United States Patent Application Publication US 2025/0264482 A1 - sequence listing, part 2

SEQ ID NO: 11861 - DNA, 280 bp, Homo sapiens
  source 1..280: mol_type = other DNA
tgcagcctctggattcacctttagcatctatgtcatgagctgggtccgccaggctccagggaaggggctggagtgggtctcagctattagtggtaatggtgctaccacatactacgcagactccgtgaagggccgattcaccgtctccagagacaattccaagaacacactgtttctgcaaatgaacagcctgagagtcgaggacacggccgtatattactgtgcgaggcggcaccgcccggactactggggccagggaaccctggtcaccgtctcctca

SEQ ID NO: 11862 - DNA, 280 bp, Homo sapiens
  source 1..280: mol_type = other DNA
tgtagtctctggattcacctttagcagctatgccatgagttgggtccgccaggctccaggaaaggggctggagtgggtctcagctgttagtactggtggtgataccacattctacgcagactccgtgaagggccggttcaccatctccagagacaattccaagaacacgctgtatctgcaaatgaacagcctgagagccgaggacacggccgtatattactgtgcgaggcgtcaccgtcccgactactggggccagggaaccctggtcaccgtctcctca

SEQ ID NO: 11863 - DNA, 298 bp, Homo sapiens
  source 1..298: mol_type = other DNA
tgccgcctctggattcacctttgatgattatgccatgcactgggtccggcaagctccagggaagggcctggagtgggtctcaggtattagttggaatagtggtagcataggctatgcggactctgtgaagggccgattcaccatctccagagacaacgccaagaactccctgtatctgcaagtgaacagtctgagagctgaggacatggccttgtattactgtgcaaaagatatatccggttcggggagttattattttgactactggggccagggaaccctggtcaccgtctcctca

SEQ ID NO: 11864 - DNA, 298 bp, Homo sapiens
  source 1..298: mol_type = other DNA
tgcagcctctggaatcacctttgataattatgccatgcactgggtccggcaagctccagggaagggcctggagtgggtctcaggtattagttggaatagtgatagcataggctatgcagactctgtgaagggccgattcaccatctccagagacaacgccaagaactccctgtatctgcaaatgaacactctgagagctgaggacacggccttgtattactgtgcaaaagatataagcggatcggggagttactactttgactactggggccagggcaccctggtcaccgtctcctca

SEQ ID NO: 11865 - DNA, 301 bp, Homo sapiens
  source 1..301: mol_type = other DNA
tgtagcctctggattcaccttcagtaactatcctatgcactgggtccgccaggctccaggcaaggggctggagtgggtggcagttttatcaaatgatggaaatgataaatacttcgcagactccgtgaagggccgattcaccatctccagagacaattcgaagaacacactgtatctgcaaatgaacagcctgagagctgaggacacggctgtatattactgtgcgaaagatggggcaatagcagcagctgcgtattactttgactattggggccagggaaccctggtcaccgtctcctca

SEQ ID NO: 11866 - DNA, 301 bp, Homo sapiens
  source 1..301: mol_type = other DNA
tgcagtctctggattcaccttcagtagctatggcatacactgggtccgccaggctccaggcaaggggctggagtgggtggcagttatctcatataaaggagatgataaaaagtatgcagactccgtgaagggccgattcaccatctccagagacaattccatgaacacgatgtatctacaaatgagcagcctgagagctgaggacacggctgtgtattactgtgcgaaagatggcgccatagcagcagctgcgtactactttgactactggggccagggaaccctggtcaccgtctcctca

SEQ ID NO: 11867 - DNA, 280 bp, Homo sapiens
  source 1..280: mol_type = other DNA
tgcagtctctggattcaccctcagtggttatgaaatgaattgggtccgccaggctccagggaaggggctggagtgggtttcattcattaatagcggtggtactatatactatgcagagtctgtgaagggccgattcaccatctccagagacaacgccaagaagtcactgtatctgcaaatgaacagcctgagagccgaagacacggctatttattactgtgcgagaaaggatagtagtggttattactggggccagggaacaccggtcaccgtctcctca

SEQ ID NO: 11868 - DNA, 283 bp, Homo sapiens
  source 1..283: mol_type = other DNA
tgcagcctctggattcaccttcagtacttatgaaatgaactgggtccgccaggctccagggaaggggctggagtgggtttcatacattagtagtggtggtactaccatatactacgcagactctgtgaagggccgattcaccatgtccagagacatcgccgagaactcactgtatctgcaaatgaacagcctgagagccgaggacacggctgtttattactgtgcgagaaaggatagtagtggttattactggggccagggaaccctggtcaccgtctcctca

SEQ ID NO: 11869 - DNA, 292 bp, Homo sapiens
  source 1..292: mol_type = other DNA
cagtgtctctggtggctccatcagcagtggtagttactactggggctggatccgccagcccccagggaaggggctggagtggattgggagtatctattatagtgggagtacctactacaacccgtccctcaagagtcgagtcaccatatccgtggacacgtccaaggaccagttctccctgaggctgagctctgtgaccgccgcagacacggctgtttattactgtgcgagacgatataccagtggctggtacaactactggggccagggcaccctggtcaccgtctcctca

SEQ ID NO: 11870 - DNA, 292 bp, Homo sapiens
  source 1..292: mol_type = other DNA
cactgtctctggtggctccatcagcagttatagttactactggggctggatccgccagcccccagggaaggggctggagtggattgggagtctctgttatagtgggagcacctactacaacccgtccctcacgagtcgagtcaccatgtccgtagacacgtccaagaaccagttctccctgaagttgagctctgtgaccgccgcagacacggctgtgtattactgtgcgagacggtataccagtggctggtacaattattggggccagggaaccctggtcaccgtctcctca

SEQ ID NO: 11871 - DNA, 295 bp, Homo sapiens
  source 1..295: mol_type = other DNA
tgcagcctctggactcactttcagtgaggcctggatgagctgggtccgccaggctccagggaaggggctggagtgggttggccgtattaaaagcacagctgatggtcatggtgggacaacagactacgctgcacccgtgaaaggcagattcaccatcttaagagatgattcaaaaaacacgctgtatctgcagatgaacagcctgaaaaccgaggacacagccgtgtattactgtaacacagatagcctagtggctaactactggggccggggaaccctggtcaccgtctcctca

SEQ ID NO: 11872 - DNA, 289 bp, Homo sapiens
  source 1..289: mol_type = other DNA
tgcagcctctggattcactttcagtaacgcctggatgagctgggtccgccaggctccagggaaggggctggagtgggttggccgtattaaaagtaaaactgatggtgagacaacagactacgctacacccgtgaaaggcagattcaccatctcaagagatgattcaaaaaacacactgtatctgcaaatgaacagcctgagaaccgaggacacagccgtgtattattgtaacacagattccctcgtggcaaactactggggccagggaaccctggtcaccgtctcctca

SEQ ID NO: 11873 - DNA, 298 bp, Homo sapiens
  source 1..298: mol_type = other DNA
tgcagcctctggattcacctttgatgattatgccatgcactgggtccggcaagctccagggaaaggcctggagtgggtctcaggtattagttggaatagtggtagcataggctatgcggactctgtgaagggccgattcaccatctccagagacaacgccaagaactccctgtatctgcaaatgaacagtctgagagctgaggacacggccttgtattactgtgcaaaagctaggaccggcagtggctggtactactttgactactggggccagggaaccctggtcaccgtctcctca

SEQ ID NO: 11874 - DNA, 298 bp, Homo sapiens
  source 1..298: mol_type = other DNA
tgcagcctctggattcacctttgatgattatggcatgcactgggtccggcaagctccagggaagggcctggagtgggtctcaggtattagttggaatagtggtagcataggctatgcggactctgtgaagggccgattcaccatctccagagacaacgccaagaactccctgtatctgcaaatggacagtctgagagctgaggacacggccttgtattactgtgcaaaagccaggaccggcagtggctggtactactttgactactggggccagggaaccctggtcaccgtctcctca

SEQ ID NO: 11875 - DNA, 286 bp, Homo sapiens
  source 1..286: mol_type = other DNA
tgcagcctctggattcaacttcaatatctatagcatgaattgggcccgccaggctccaggaaggggcctggagtgggtttcatacattactggtggtagtaatgccatacactacgcagactctgtgaagggccgattcaccgtctccagagacaatgccaagaattcactgtatctacaaatgaatagcctgggggacgaggacacggctgtgtattattgtgcgaggggactacaatacgcaatggacgtctggggccaagggattatggtcaccgtctccaca

SEQ ID NO: 11876 - DNA, 286 bp, Homo sapiens
  source 1..286: mol_type = other DNA
tgcagcctctggattcacctttaatatttacagcatgaactgggcccgccaggctccagggaaggggctggagtgggtttcatacattactggtgatagtaaaatcacgcactacgcagactctgtgaagggccgcttcaccatctccagagacaacgccaagaactcactgtatctccaaatggacagcctgagagccgacgacacggctgtgtattactgtgcgagagggcttcaatacgccatggacgtctggggccaggggaccacggttaccgtctcctta

SEQ ID NO: 11877 - DNA, 316 bp, Homo sapiens
  source 1..316: mol_type = other DNA
tgcagcctctggattcaccttcagtagttatggtctacactgggtccgccaggctccaggcaaggggctggagtgggtggcagttatatcatatgatggaaataatagatactacacagactccatgaagggccgattcaccatctccagagacaattccaagaacacgctgtatctccaaatgaacagcctgagagctgaggacacggctgtgtattactgtgcgagagatcgctattgtagtggtggtggctgcccagactactactacggtatggacgtctggggccaagggaccacggtcaccgtcccctca

SEQ ID NO: 11878 - DNA, 316 bp, Homo sapiens
  source 1..316: mol_type = other DNA
tgcagcctctggattcaccttcagtgtctatgctatgcactgggtccgccaggctccaggcaaggggctggagtgggtggcacttatatcatatgatggaagtaataaatattacgcagactccgtgaagggccgattcaccatctccagagacaattccaagaacacggtgtatctgcaaatgaatagcctgagagctgaggacacggctgtgtattactgtgcgagagatcgatattgtagtggtggtggctgcccagactactactacggtatggacgtctggggccaagggaccacggtcaccgtctcctca

SEQ ID NO: 11879 - DNA, 286 bp, Homo sapiens
  source 1..286: mol_type = other DNA
tgcagcctctggattcacctttagcacctgtgccatgagctgggtccgccaggctccagggacggggctggagtgggtctcagttattggtggtggtggtgttcccacatactacgcagactccgtgaagggccgattcaccatctccagagacaattccaagaacacggtgtatctgcaaatgaacagcctgagagtcgaggacacggccgtctattactgtgcgaaaggtagtggtgggagctacgactactggggcccgggaaccctggtcaccgtctcctca

SEQ ID NO: 11880 - DNA, 286 bp, Homo sapiens
  source 1..286: mol_type = other DNA
tgcagcctctggattcacctttagcagctataccatgagctgggtccgccaggctccggggcagggcctggagtgggtctcagctattagtggtaatggtgttaccacacactacgcagactccgtgaagggccggttcaccatctccagagacaattccaagatcaccctgtatctgcaaatgaacagcctgagagccgaggacacggccatatattactgtgcgaaaggttcgggtgggagctacgactactggggccagggaaccctggtcaccgtctcctca

SEQ ID NO: 11881 - DNA, 289 bp, Homo sapiens
  source 1..289: mol_type = other DNA
tgcagcctctgggctcaccttcagtaactacgggatgcactgggtccgccaagctccagggaaggggctggtgtgggtcgcagtaactaagagtgatggcgacgctaccgcaatctacgcggactccgtgaagggccgcttcaccatctccagagacaacgccaagaagacggtggatctccaaatgaacagtctgagagccgaggacacggctgtctattactgtgtcactggcggtgcctacttctatgaatactggggccagggaacgccggtcaccgtctcctca

SEQ ID NO: 11882 - DNA, 289 bp, Homo sapiens
  source 1..289: mol_type = other DNA
tgcagcctctgggctcaccttcagtaactacgggatgcactgggtccgccaagctccagggaaggggctggtgtgggtcgcagttactaagagtgatggcgacgctaccgcaatctacgcggactccgtgaagggccgcttcaccatctccagagacaacgccaagaagacggtggatctccaaatgaacagtctgagagccgaggacacggctgtctattactgtgtcactggcggtgcctacttctatgaatactggggccagggaacgccggtcaccgtctcctca

SEQ ID NO: 11883 - DNA, 286 bp, Homo sapiens
  source 1..286: mol_type = other DNA
ttcagcctctggattaacattcaccaggtattcgatgcactgggtccgccaaactccagggaagggcctggagtgggtctcacgtgtcaatgaagatgggattgacgcaaggtacgcggactccgtgaagggccgattcaccatttcgagagacaacggcaagaatatggtgtttctgcaaatgaatggtcttagagacgaggacacggctgtctattactgtgtcactgggggggcatatttctatgaatactggggccagggaaccctggtcaccgtctcctca

SEQ ID NO: 11884 - DNA, 286 bp, Homo sapiens
  source 1..286: mol_type = other DNA
ttcagcctctggattaacattcaccaggtattcgatgcactgggtccgccaaactccagggaagggcctggagtgggtctcacgtgtcaatgaagatgggattgacgcaaggtacgcggactccgtgaagggccgattcaccatttcgagagacaacggcaagaatatggtgtttctgcaaatgaatggtctgagagacgaggacacggctgtctattactgtgtcactgggggggcatatttctatgaatactggggccagggaaccctggtcaccgtctcctca

SEQ ID NO: 11885 - DNA, 290 bp, Homo sapiens
  source 1..290: mol_type = other DNA
ccatctccggggacagtgtctctagcaacagtggtgcttggaactggatcaggcagtccccatcgagaggccttgagtggctgggaaggacatactacaggtccaagtggcataatgaatatgcagtatctgtgaaaagtcgagtaaccatcaacccagacacatccaagaaccagttctccctgcagctgaactctgtgactcccgaggacacggctgtctattactgtgcaagaggggtgactacctttgactactggggccagggaaccctagtcaccgtctcctca

SEQ ID NO: 11886 - DNA, 290 bp, Homo sapiens
  source 1..290: mol_type = other DNA
ccatccccggggacagtgtctctagcaacagtgctgcctggaactggatcaggcagtccccatcgagaggccttgagtggctgggaaggacatactacaggtccaagtggtattatgattatgcactatctgtgaaaagtcgaataaccatcagcccagacacatccaagaaccagttctccctgcagctgaaatctgtgactcccgaggacacggctatatatttctgtgcaagaggagtaactacctttgactactggggccagggaaccctggtcaccgtctcctca

SEQ ID NO: 11887 - DNA, 295 bp, Homo sapiens
  source 1..295: mol_type = other DNA
tgcagcctctggattcaccttcagtagttatgaaatgaactgggtccgccaggctccagggaagggactggaatgggtctcatatattaattatgatgggagtatcatttactacgccgactctgtggagggccgattcaccacgtccagagacaacgccaagaactcactgtatctgcaaatgaacagcctgagagccgaggacacggctgtttatttctgtgcgagaagggctacagtgacctactacggtatggacgtctggggccacgggaccacggtcaccgtctcctca

SEQ ID NO: 11888 - DNA, 295 bp, Homo sapiens
  source 1..295: mol_type = other DNA
tgcagcctctggattcaccttcagtagttatgaaatgaactgggtccgccaggctccagggaaggggctggagtggatttcatatattaattatagtgggagtaccatatactacgcagactctgtgaagggccgattcaccatgtccagagacaacgccaagaactcactgtatctgcaaatgaacagcctgagagccgaggacacggctgtttattactgtgcgagaagggctacggtgacctactacggtatggacgtctggggccacgggaccacggtcaccgtctcctca

SEQ ID NO: 11889 - DNA, 304 bp, Homo sapiens
  source 1..304: mol_type = other DNA
tgcagcctctggattcactagattcagtttcagtgattatgaaatgaactgggtccgccaggctccagggaaggggctggagtggatttcatacattgataccagaggcactatcgtagactacgcagactctgtgaagggccgattcaccttctccagagacaacgccaagaactcaatgtatctacaaatgaacagcctgagagccgaggacacggctgtttattactgtgcgagaagggctacggttacatattacggtatggacgtctggggccaggggaccacggtcaccgtctcctca

SEQ ID NO: 11890 - DNA, 304 bp, Homo sapiens
  source 1..304: mol_type = other DNA
tgcagcttctggattcgccggattccccttcagtgcttatgaaatgaactgggtccgccaggctccagggaaggggctggagtgggtttcatacattgatactagtgagaataccaaatactacgcagactctgtgaagggccgattcaccatctccagagacaacgccaagaactcactgtatctgcaaatgaacagcctgagagtcgaagacacggctgtttattactgtgcgagaagggccacggtgacttattacggcatggacgtctggggccaggggaccacggtcaccgtctcctca

SEQ ID NO: 11891 - DNA, 295 bp, Homo sapiens
  source 1..295: mol_type = other DNA
tgcagcctctggattcacccttagcagttatgccatgagctgggtccgccaggctccagggaaggggctggagtgggtctcagctattagtggtagtggtggtagcacaaaccacgcagactccgtgaagggccggttcaccatctccagagacaaaaccaagaacacgctgtatctgcaaatgaacagcctgagagccgaggacacggccatatattactgtgcgaaacgtgcctatgatagtagtggttatattgactactggggccagggaaccctggtcaccgtctcctca

SEQ ID NO: 11892 - DNA, 295 bp, Homo sapiens
  source 1..295: mol_type = other DNA
tggagcctctggattcacctttagcagctatgccatgagctgggtccgccaggctccagggaaggggctggagtgggtctcagctattagtactagtggtggtagcacataccacgcagactccgtgaagggccggttcaccatctccagagacaattccaagaacacgctgtatctgcaaatgaacagcctgagagtcgaggacacggccgtatattactgtgcgaaaagagcctatgatagtagtggttacattgactactggggccagggaaccctggtcaccgtctcctca

SEQ ID NO: 11893 - DNA, 292 bp, Homo sapiens
  source 1..292: mol_type = other DNA
cactgtctctggtggctccatcaatacttactactggagctggatccggcagcccccggggaagagactggagtggattgggtatatctctaacagtgggagcaccacctacaacccctctctcaagagtcgagtcaccatatcaacacacacgtccaagaatcaggtctctgtgaagctgagctctgtgaccgctgcggacacggccgtatattactgtgcgagggtatttactagtggttatggagtctttgactactggggccagggaaccctggtcaccgtctcctca

SEQ ID NO: 11894 - DNA, 292 bp, Homo sapiens
  source 1..292: mol_type = other DNA
cactgtctctggtggctccatcagtagttactactggggctggatccggcagccccccggggagggactggagtggattggctatatctctaacagtgggagcaccacctataatccctccctcaagagtcgagtcaccatatcagtagactcgtccaagagccagttgtccctgatggtgagctctgtgaccactgcggacacggccctgtattactgtgcgagagtctttactagtggttatggtgtctttgactactggggccagggaaccctggtcaccgtctcctca

SEQ ID NO: 11895 - DNA, 292 bp, Homo sapiens
  source 1..292: mol_type = other DNA
tgcagcctctggattcatcttaagcaattatggcatgagctgggtccgccaggctccagggaaggggctggaatgggtctcacatattctgagtagtgatggtgccacatactacacagactccgtgaagggccggttcaccatctccagagacattgccaagaacacgttgtttctgcaaatgaacaccctgagaaccgaggacacggccctgtattactgtgcgaaaagaggggcagcagctggtccctttgactactggggccagggaaccctggtcaccgtctcctca

SEQ ID NO: 11896 - DNA, 292 bp, Homo sapiens
  source 1..292: mol_type = other DNA
tgcagcctctggattcacctttagcaactatggcatgagctgggtccgccaggctccagggaaggggctggagtgggtctcacatattcgtgatactggtggtaccgcatactacgcagactccgtgaagggccggttcaccatctccagagacaattccaagaacacgctgtatctgcaaataaacagcctgagagccgaggacacggccgtatattattgtgcgaaacggggagcagcagctggcccttttgactactggggccagggaaccctggtcaccgtctcctca

SEQ ID NO: 11897 - DNA, 292 bp, Homo sapiens; identical to SEQ ID NO: 11896
  source 1..292: mol_type = other DNA

SEQ ID NO: 11898 - DNA, 277 bp, Homo sapiens
  source 1..277: mol_type = other DNA
tgcagcctctggattcaccttcagtagctataacatgagctgggtccgccgggctcctgggaaggggctggagtgggtttcatgcattactagtggtagtggaaccatatactacgctgactctgtgaagggccgattcaccatctccagagacaatgccaagaactcactgtttctgctaatgaacagcctgagagacgaggacacggctgtgtattactgtgccgccggccgggggggctactggggccagggaaccctggtcaccgtctcctca

SEQ ID NO: 11899 - DNA, 277 bp, Homo sapiens
  source 1..277: mol_type = other DNA
tgcagcctctggattcaccttcagtaactattacatgaactgggtccgccaggctccagggaaggggctggagtgggtttcatacataagtagtagtagcagtaccacatactacgcagactctgtgaagggccgattcaccatctccagagacaatgccaagaactcactgcatctgcaaatgaacagcctgagagacgaggacacggctgtatattactgtgcggccgggagaggtggctactggggccagggaaccctggtcaccgtctcctca

SEQ ID NO: 11900 - DNA, 289 bp, Homo sapiens
  source 1..289: mol_type = other DNA
tgcagcctctggattcaccttcaatgaatggtggatgcactgggtccgccaagtcccagggaaggggctggtgtgggtctcacgtattgatcgggatggcagtagaacaaactacgcggactccgtgaagggccgatttaccgtctccagagacaacgccaagaacacgttgtatctgcagatgagcagtctgagagtcgaggacacggctgtctattactgtgcaaaagatttccacgatgcagcggctgactactggggcccgggaaccctggtcaccgtctcctca

SEQ ID NO: 11901 - DNA, 289 bp, Homo sapiens
  source 1..289: mol_type = other DNA
tgcagcctctggattcgcctttcgtagttggtggatgcactgggtccgccaaggtccagggaaggggctagtgtgggtctcacggattaatagagaagggactgtcacaaatctcgcggactccgtgaagggccggttcagcgtctccagagacaacgacaagaacataatatatttgcagatgaacagtctgagagccgaagacacgggtgtctattattgtgcaaaagattttcatgatgcggcggctgactactggggccagggaaccctggtcaccgtctcctca

SEQ ID NO: 11902 - DNA, 286 bp, Homo sapiens
  source 1..286: mol_type = other DNA
tgcagcctctggattcaccttgagtagttattggatgagttgggtccggcaggctccagggaaggggctggagtgggtggccaacataaaggaagatggaagtgagaaaaactatgtggactctgtgaagggccgattcaccatctccagagacaacgccaagagctcactgtatctgcaaatgaacagcctgagagccgaggacacggctttgtattactgtacgagatggacgcactggtacttcgatctctggggccgtggcaccctggtcactgtctcttca

SEQ ID NO: 11903 - DNA, 286 bp, Homo sapiens
  source 1..286: mol_type = other DNA
tgcagcctctggatttaccctcagtacctattggatgagctgggtccgccaggctccaggggaggggctggagtgggtggccaacataaaggaagatggaagtgagaataaccttgtggactctgtgaagggccgattcaccatctccagagacaacaccaagaattcactgtatctgcaaatgaacagcctgagagccgaggacacggctgtatattattgtacgaggtggacccactggtacttcgatctctggggccgtggcaccctggtcactgtctcctca

SEQ ID NO: 11904 - DNA, 286 bp, Homo sapiens
  source 1..286: mol_type = other DNA
tgcagcctctgaatttacctttaataagcattggatgagctgggtccgccaggctccagggaaggggctggagtgggtggccaacataaaggaagacggaagtgagaataaccttgtggactctgtgaagggccgattcaccatctccagagacaacaccaagaattcactgtatctgcaaatgaacagcctgagagccgaggacacggctgtgtattactgtacgaggtggacccactggtacttcgatctctggggccgtggcaccctggtcactgtctcctca

SEQ ID NO: 11905 - DNA, 286 bp, Homo sapiens
  source 1..286: mol_type = other DNA
tgcagcctctggatttaccctcagtacctattggatgagctgggtccgccaggctccagggaaggggctggagtgggtggccaacataaaggaagatggaagtgagaataaccttgtggactctgtgaagggccgattcaccatctccagagacaacaccaagaattcactgtatctgcaaatgaacagcctgagagccgaggacacggctgtatattattgtacgaggtggacccactggtacttcgatctctggggccgtggcaccctggtcactgtctcctca

SEQ ID NO: 11906 - DNA, 286 bp, Homo sapiens
  source 1..286: mol_type = other DNA
tgcagcctctgaatttatctttaataagcattggatgagctgggtccgccaggctccagggaaggggctggagtgggtggccaacataaaggaagacggaagtgagaataaccttgtggactctgtgaagggccgattcaccatctccagagacaacaccaagaattcactgtatctgcaaatgaacagcctgagagccgaggacacggctgtgtattactgtacgaggtggacccactggtacttcgatctctggggccgtggcaccctggtcactgtctcctca

SEQ ID NO: 11907 - DNA, 286 bp, Homo sapiens
  source 1..286: mol_type = other DNA
tgcagcctctgaatttacctttaatacctattggatgagctgggtccgccaggctccagggaaggggctggagtgggtggccaacataaaggaagatggaagtgagaataaccttgtggactctgtgaagggccgattcaccatctccagagacaacaccaagaattcactgtatctgcaaatgaacagcctgagagccgaggacacggctgtgtattactgtacgaggtggacccactggtacttcgatctctggggccgtggcaccctggtcactgtctcctca

SEQ ID NO: 11908 - DNA, 286 bp, Homo sapiens
  source 1..286: mol_type = other DNA
tgcagcctctgaatttacctttaatacctattggatgagctgggtccgccaggctccagggaaggggctggagtgggtggccaacataaaggaagatggaagtgagaataaccttgtggactctgtgaagggccgattcaccatctccagagacaacaccaagaattcactgtatctgcaaatggacagcctgagagccgaggacacggctgtgtattactgtacgaggtggacccactggtacttcgatctctggggccgtggcaccctggtcactgtctcctca

SEQ ID NO: 11909 - DNA, 301 bp, Homo sapiens
  source 1..301: mol_type = other DNA
tgtaggctctggattcagcttctctaacaacggcttgcactgggtccgccagcctccaggcaaggggctggagtgggtggcagttatctattatgacggaaagtccaaatactatgcagactccgtgaggggccgattcaccatctccagagacaattccaagaacacactgtatctgcaaatgaacagcctgagcgctgaggacacggctgtgtattactgtgcgacagtcttctacggtgactacgcccggtctggtatggacgtctggggccaagggaccacggtcaccgtctcctca

SEQ ID NO: 11910 - DNA, 301 bp, Homo sapiens
  source 1..301: mol_type = other DNA
tgtaggctctggattcaccttctctcataacggcatgcactgggtccgccaggctccaggcaaggggctggagtgggtggcagttatttattatgacggaaagtacaaatactatgcagactccgtgaagggccgattcaccatctccagagacaattccaagaacacattgtatctgcaaatgaacagcctgagagctgaggacacggctgtttattactgtgcgacagtcttctacggtgactacgcccggtctggtatggacgtctggggccaagggaccacggtcaccgtctcctca

SEQ ID NO: 11911 - DNA, 301 bp, Homo sapiens
  source 1..301: mol_type = other DNA
tgtagcctctggattcaccttcagtagtaacggcatgcactgggtccgccaggctccaggcaaggggctggagtgggtggcagttatatattatgacggaaagtccaaatactatgcagactccgtgaagggccgattcaccatctccagagacaattccaagaacacactgtatctgcaaatgaacagcctgagagttgaggacacggctgtgtattactgtgcgacagtcttctacggtgactacgcccggtccggtatggacgtctggggccaagggaccacggtcaccgtctcctca

SEQ ID NO: 11912 - DNA, 301 bp, Homo sapiens
  source 1..301: mol_type = other DNA
tgcagcctctggattcattttcagtacctatggcatacattgggtccgccaggctccaggcaaggggctggagtgggtggcagttatatcaaatgatggaaataataaatactatgcagactccgtgaagggccgattcaccatctccagagacaattccaagaacacggtgtatctgcaaatgaacagcctgagagctgaggacacggctgtgtattactgtgcgacagtgttttacggtgactacgcaaggagcggtatggacgtctggggccaagggaccacggtcaccgtctcctta

SEQ ID NO: 11913 - DNA, 301 bp, Homo sapiens
  source 1..301: mol_type = other DNA
tgtaggctctggattcaccttctcttataacggcatgcactgggtccgccaggctccaggcaaggggctggagtgggtggcagttatttattatgacggaaagtccaaatactatgcagactccgtgaagggccgattcaccatctccagagacaattccaagaacacactgtatctgcaaatgaacagcctgagagttgaggacacggctgtgtattactgtgcgacagtcttctacggtgactacgcccggtctggtatggacgtctggggccaagggaccacggtcaccgtctcctca

SEQ ID NO: 11914 - DNA, 301 bp, Homo sapiens
  source 1..301: mol_type = other DNA
tgtagcctctggattcaccttccgcagtaacggcatgcactgggtccgccaggctccaggcaaggggctggagtgggtggcagttataaattatgacgcaaagtccacatactatgcagactccgtgaagggccgattcaccatctccagagacaattccaagaacacactgtatctgcaaatgaacagcctgagagttgaggacacggctgtatattactgtgcgacagtcttctacggtgactacgcccggtccggtatggacgtctggggccaagggaccacggtcaccgtctcctca

SEQ ID NO: 11915 - DNA, 301 bp, Homo sapiens
  source 1..301: mol_type = other DNA
tgtaggctctggattcaccttctcttataacggcatgcactgggtccgccaggctccaggcaaggggctggagtgggtggcagttatttattatgacggaaagtccaaatactatgcagactccgtgaagggccgattcaccatctccagagacaattccaagaacacactgtatctgcaaatgaacagcctgagagctgaggacacggctgtgtattactgtgcgacagtcttctacggtgactacgcccggtctggtatggacgtctggggccaagggaccacggtcaccgtctcgtca

SEQ ID NO: 11916 - DNA, 301 bp, Homo sapiens
  source 1..301: mol_type = other DNA
tgtaggctctggattcaccttctcttataacggcatgcactgggtccgccaggctccaggcaaggggctggagtgggtggcagttatttattatgacggaaagtccaaatactatgcagactccgtgaagggccgattcaccatctccagagacaattccaagaacacactgtatctgcaaatgaacagcctgagagctgaggacacggctgtgtattactgtgcgacagtcttctacggtgactacgcccggtctggtatggacgtctggggccaagggaccacggtcaccgtctcctca

SEQ ID NO: 11917 - DNA, 298 bp, Homo sapiens
  source 1..298: mol_type = other DNA
cactgtctctggtgactccatcagtagttactactggagctggatccggcagcccccagggaaggggctggagtggattggctatgtctattacactggggtcaccaactacaacccctccctcaagagtcgagtcaccatatcactagacacgtccaagaaccagttctccctgaaggtgaggtttgtgagcgccgcagacacggccatttattactgtgcgagacatcgggggggcagcgactggcaaaactggttcgacccctggggccagggaaccctggtcaccgtctcctca

SEQ ID NO: 11918 - DNA, 298 bp, Homo sapiens
  source 1..298: mol_type = other DNA
cactgtctctggtgactccatcagtagttactactggagctggatccggcagcccccagggaagggactggagtggattgcctatgtctatcacactgggaccaccaactacaacccctccctccagagtcgagtcaccatatcaatagacacgtccaagaagcaattctccctgaagctgaactctgtgaccgcctcagacacggccgtctattactgtgcgagacacagggggggcagcgactggcaaaactggttcgacccctggggccagggaaccctggtcaccgtctcctca

SEQ ID NO: 11919 - DNA, 292 bp, Homo sapiens
  source 1..292: mol_type = other DNA
ttcagcctctggattcacctttagtgacttttggatgacctgggtccgccaggctccagggaaggggctggagtacatggccaacataaaaaaagatggaagtgagaagtactatgtggactctgtgaagggccggttcaccatctccagagacaacgccaagcactctctgtatctgcaaatgaccagcctgagcaccgaggacacggctgtctattactgtgcgaggtataccagcagctggtctacttttgactactggggccagggaaccctggtcaccgtctcctca

SEQ ID NO: 11920 - DNA, 292 bp, Homo sapiens
  source 1..292: mol_type = other DNA
tgcagtctctggattccaatttagtgactattggatgagctgggtccgccaggctccaggaaaggggctggagtgggtggccagcataaacaaagatggaagtgcggaatattatgtggactctgtgaagggccgattcaccatctccagagacaacgcccagatctcaatgtatctgcaaatgaacagcctgagagccgaggacacggccatgtattactgcgcgagatacaccagcagttggtctacatttgactactggggccagggagccctggtcaccgtctccgca

SEQ ID NO: 11921 - DNA, 357 bp, Homo sapiens
  source 1..357: mol_type = other DNA
acagagaccctcacgctgacctgcaccgtctctgggttctcactcaccaatggtaaaatgggtgtgagctggatccgtcagcccccagggaaggccctggagtggcttgcacacattttttcgaatgaagaaaaagcctatagtacatctctgaagagcaggctcaccatctccaaggacacctccaaaagtcaggtggtcctcaccatgaccagcatggaccctgtggacacagccacatattactgtgcacggatacccctaggatcttgtagtagtaccatctgctatcatccaacctactactactccggtatggacgtctggggccaagggaccacggtcaccgtctcctca

SEQ ID NO: 11922 - DNA, 357 bp, Homo sapiens
  source 1..357: mol_type = other DNA
acagagaccctcacgctgacctgcaccgtctctgggttctcactcaccaatggtaaaatgggtgtgagctggatccgtcagcccccagggaaggccctggagtggcttgcacacattttttcgaatgacgaaaaagcctatagtacatctctgaagagcaggctcaccatctccaaggacacctccaaaagtcaggtggtcctcaccatgaccagcatggaccctgtggacacagccacatattactgtgcacggatacccctaggatcttgtagtagtaccatctgctatcatccaacctactactactccggtatggacgtctggggccaagggaccacggtcaccgtctcctca

SEQ ID NO: 11923 - DNA, 301 bp, Homo sapiens
  source 1..301: mol_type = other DNA
tacagtctctggattcactgttgggacctacggtatgcactgggtccgccaggctccaggcaagggtctggagtgggtggcaatgatttcacacaatggacgtacgacacagtatagcgactccgtgaagggccgtttcaccatctccagagacacttccaaggacacactatatctgcaaatgaatagcctgaaaactgaggacacggctctatattactgcgcgagggacctctatggcagtggctggtacaattatttcgacccctggggcctgggaaccctggtcaccgtctcctca

SEQ ID NO: 11924 - DNA, 301 bp, Homo sapiens
  source 1..301: mol_type = other DNA
tgaagcctctggattcacctttaatatttatggcatgcactgggtccgccaggctccaggcaagggcctggagtgggtggcaatgatgccatatgatggatctagtaaagtctatacagactccgtgaagggtcgatttaccatctccagagacaattccaagaacacgttgtatctacaaatggacagcctgagagctgaggacacggctgtctattactgtgcgagagacttgtatggcagtggctggtacaactacttcgacccctggggccagggaaccctggtcaccgtctcctca

SEQ ID NO: 11925 - DNA, 274 bp, Homo sapiens
  source 1..274: mol_type = other DNA
tgcagcctctggattcaccttcagtacttatgaaatgaactgggtccgccaggctccagggaaggggccggagtgggtttcgtacattagtaatagtggtaataccatatactacgcagactctgtgaagggccgattcaccatctccagagacaacgccaagaattcactgtatctgcaaatgaacagcctgagagccgaggacacggctctttattactgtgcgcgatcggttgacttctggggccagggaaccctggtcaccgtctcctca

SEQ ID NO: 11926 - DNA, 274 bp, Homo sapiens
  source 1..274: mol_type = other DNA
tacagcctctggattcaccttcagtacttatgaaatgaactgggtccgccaggctccagggaaggggccggagtggatttcatatattagtagtagtgatagtaccatatattatgcagactctgtgaagggccggttcaccatctccagagacaacgccaagaactcactgtatctgcaaatgaacagcctgagagccgaggacacggctgtttattactgtgcgagatccgtggacttttggggccagggaaccctggtcaccgtctcctca

SEQ ID NO: 11927 - DNA, 274 bp, Homo sapiens
  source 1..274: mol_type = other DNA
tacagcctctggattcacgttcaatacttatgaaatgaactgggtccgccaggctccagggaaggggctggagtgggtttcatacattagtagtagtgatagtaccatatactacacagactctgtgaagggccggttcaccatctccagagacaacgccaagaactcactgtatctgcaaatgaacagcctgggagtcgaggacacggctgtttatttctgtgcgagatccgtggacttttggggccagggaaccctggtcaccgtctcctca

SEQ ID NO: 11928 - DNA, 274 bp, Homo sapiens
  source 1..274: mol_type = other DNA
tacagcctctggattcaccttcaatacttatgaaatgaactgggtccgccaggctccagggaaggggctggagtggatttcatacattagtagtagtgatagtaccatatactacgcagactctgtgaagggccggttcaccatctccagagacaacgccaagaactcactgtatctgcaaatgaacagcctgagagccgaggacacggctgtttattactgtgcgagatccgtggacttttggggccagggaaccctagtcaccgtctcctca

SEQ ID NO: 11929 - DNA, 274 bp, Homo sapiens
  source 1..274: mol_type = other DNA
tacagcctctggattcaccttcagtacttatgaaatgaactgggtccgccaggctccagggaaggggctggagtggatttcatacattagtagtagtgatagtaccatatactacgcagactctgtgaagggccggttcaccatctccagagacaacgccaagaactcactgtatctgcaaatgaacagcctgagagccgaggacacggctgtttattactgtgcgagatccgtggacttttggggccagggaaccctggtcaccgtctcctca

SEQ ID NO: 11930 - DNA, 289 bp, Homo sapiens
  source 1..289: mol_type = other DNA
tgcagcctctggattcacctttagcacctatgtcatgaactgggtccgccaggctccagggaaggggctggagtgggtctcaggtattagtggaagtggtgacaccacatactacgcagactccgtgaagggccggttcaccgtctccagagacaattccatgaaaatactgtatctgcaaatgaacagcctgagagtcgaggacacggccgtttattactgtgcgaaaggggcgggttcggatagtggcaggtactggggccagggaaccctggtcaccgtctcctca

SEQ ID NO: 11931 - DNA, 289 bp, Homo sapiens
  source 1..289: mol_type = other DNA
ttcaggctctggattcatcttcagtgactatgccatcaattgggtccgccaggctccagggaaggggccggagtgggtctcagcaatcagtggcagtggtgctaccacatactatgcagactccgtgcagggccggttctccatctccagagacaattccaagaacactgtgtctctgcaaatgaacagcctgagagtcgaggacacggccctatattattgtgcgaaaggggccgggtcggactccgggcgctactggggccagggaaccctggtcaccgtctcctca

SEQ ID NO: 11932 - DNA, 289 bp, Homo sapiens
  source 1..289: mol_type = other DNA
tggagcctctggattcacctttagcagccacgccatgaactgggtccgccaggctccagggaaggggctggagtgggtctcaggtattagtggtagtggaggtagcacatactatgcagactccgtgaagggccggttcaccatctccagagacaattccgagaacacattggatctgcaaatgaatagcctgagagccgacgacacggccgtatattactgtgcgaaaggggccgggtcggactccgggcgctactggggccagggaaccctggtcactgtctcctca

SEQ ID NO: 11933 - DNA, 289 bp, Homo sapiens; identical to SEQ ID NO: 11932
  source 1..289: mol_type = other DNA

SEQ ID NO: 11934 - DNA, 289 bp, Homo sapiens
  source 1..289: mol_type = other DNA
tgcagcctctggattcacctttagtagctatgccatgaactgggtccgccaggctccagggaagggactggagtgggtctcaggtattcttggaactggtgttaccacatactacgcagactccgtgaagggccggttcaccatctccagagacaattccaagaacacactgtatctgcaaatgaacagcctgagaggcgacgacacggccgtatattactgtgcgaaaggggccgggtcggactccgggcgctactggggccagggaaccctggtcaccgtctcctca

SEQ ID NO: 11935 - DNA, 289 bp, Homo sapiens
  source 1..289: mol_type = other DNA
tgcagcctctggattcacctttagtagctattggatgagctgggtccgccaggctccagggaaggggctggagtgggtggccaacataaagcaagatagaagtgagaaatactatgtggactctgtgaagggccgattcaccatctccagagacaacgccaagaactcactgtttctgcaaatgaacagcctgagagccgaggacacggccgtgtattactgtgtcaggggtggttattacggcagttttgactactggggccagggaaccctggtcaccgtctcctca

SEQ ID NO: 11936 - DNA, 289 bp, Homo sapiens
  source 1..289: mol_type = other DNA
tgcagcctctggattcagttttagagactattggatgagctgggtccgccagactccagggaaggggctggagtgggtggccaacataaaacaagatggaagtgagaaatcgtgtgtggactttgtgaagggccgattcaccatctccagagacaacgccaagaactcagtgtatctgcaagtggacagtctgagagtcgaggacacggctgtgtattactgtgtgagaggagggtactatggaagctttgactactggggccagggaaccctggtcactgtctcctca

SEQ ID NO: 11937 - DNA, 286 bp, Homo sapiens
  source 1..286: mol_type = other DNA
tgcagcctctggattcaccttcagtagctatagcataaactgggtccgccaggctccagggaaggggctggagtggctttcatacattagtagtagtagtagttccatatactacgcagactctgtgaagggccgattcaccatctccagagacaatgccaagaactcactgtctctgcaaatgaacaccctgagagacgaggacacggctgtgtattactgtgtgaaatctcggaattactactttgactactggggccagggaaccctggtcaccgtctcctca

SEQ ID NO: 11938 - DNA, 286 bp, Homo sapiens
  source 1..286: mol_type = other DNA
tacagcctctggattcaccttcagtagctacagtgtgaactgggtccgccaggctccagggaaggggctagagtgggtttcatacattagtagtagttctagtagcatatattacgcagactctgtgaagggccgattcaccatctccagagacaatgccagggactcactgtatctgcaaatgaacagcctgggagacgaggacacggctgtctattactgtgtgaaaagtagaaattactactttgactactggggccagggaaccctggtcaccgtctcctca

SEQ ID NO: 11939 - DNA, 298 bp, Homo sapiens
  source 1..298: mol_type = other DNA
tgcagcctctggattcaccttcagtagctactggatgcactgggtccgccaggctccagggaaggggctggtgtgggtctcacgtattagtattgatgggagtaccaccacctacgcgggctccgtgaagggccgattcaccatctccagagacaacgccaagaacacactatatctgcaaatgaacagtctgagagccgaggacacggctgtgtattactgtgcaagacctgccacggtgactacgccgaactggttcgagccctggggccagggcaccctggtcaccgtctcctca

SEQ ID NO: 11940 - DNA, 298 bp, Homo sapiens
  source 1..298: mol_type = other DNA
tgcagcctctggattcaccgtcagtagcaactacatgagctgggtccgccaggctccagggaaggggctggagtgggtctcacgtattagtattgatgggagtaccaccacctacgcgggctccgtgaagggccgattcaccatctccagagacaacgccaagaacacactatatctgcaaatgaacagtctgagagccgaggacacggctgtgtattactgtgcaagacctgccacggtgactacgccgaactggttcgagccctggggccagggcaccctggtcaccgtctcctca

SEQ ID NO: 11941 - DNA, 301 bp, Homo sapiens
  source 1..301: mol_type = other DNA
tgtgggctctggattcacctttagcacttatgccatgaactgggtccgccaggttccagggaaggggctggagtgggtctcagctattacgggtactgaagatagtacatactacgcagactccgtgcagggccggttcaccatctccagagacaattccaagaacacgctgtatctgcaaatgaacagcctgagagccgaggacacggccgtatattactgtgcgaagtactgtagtggtggtggctgctactctgggcttgacttctggggccagggaatcctggtcaccgtctcctca

SEQ ID NO: 11942 - DNA, 301 bp, Homo sapiens
  source 1..301: mol_type = other DNA
tgtaggctctggattcacctttagcaactatgccatgaactgggtccgccaggctccagggaaggggctggagtgggtctcagctattcctcgtagtgatggtgccacatactacgcagactccgtgaagggccggttcaccatctccagagacaattccaagaacacactgtttctgcaaatgaacagcctgagagccgacgacacggccgtttattactgtgcgaagtactgtagtggtggtggctgctactccggacttgacttctggggccagggaaccctggtcaccgtctcctca

SEQ ID NO: 11943 - DNA, 301 bp, Homo sapiens; identical to SEQ ID NO: 11942
  source 1..301: mol_type = other DNA

SEQ ID NO: 11944 - DNA, 301 bp, Homo sapiens
  source 1..301: mol_type = other DNA
tgaaggctctggattcagctttagcaactatgccatgaactgggtccgccaggctccagggaagggccttgagtgggtcgcagctattcttcgtagtgatagtgccacatactacgcagactccgtgaagggccggttcactatctccagagacaattccaagagtacactgtttctgcagatgcacagcctgagagccgaagacacggccatttattactgtgcgaagtattgtagtggtggtggctgctactccggacttgacttctggggccagggaaccctggtcaccgtctcctca

SEQ ID NO: 11945 - DNA, 277 bp, Homo sapiens
  source 1..277: mol_type = other DNA
cactgtctctggtggctccatcagcagtagtagttactactggggctggatccgccagcccccagggaaggggctggagtggattgggattatctattatagtgggagcacctactacaacccgtccctcaagagtcgagtcaccatatccgtagacgcgtccaagaaccagttctccctgaagctgagctctgtgaccgccgcagacacggctgtgtattactgtgcgagacgaggtgatcactggggccagggaatcctggtcaccgtctcctca

SEQ ID NO: 11946 - DNA, 277 bp, Homo sapiens
  source 1..277: mol_type = other DNA
cactgtctctggtggctccatcagcagtagttattactactggggctggatccgccagcccccagggaaggggctggagtggattgggagtatctattatagtgggagcacctactacaacccgtccctcaagagtcgagtcaccatatccatagacacgtccaagaaccagttctccctgaagctaagctctgtgaccgccgcagacacggctgtgtattactgtgcgagacgtggtgaccactggggccagggaaccctggtcaccgtctcctca

SEQ ID NO: 11947 - DNA, 277 bp, Homo sapiens
  source 1..277: mol_type = other DNA
cactgtctctggtgactccatcaggagtagtagttactactggggctggatccgccagcccccagggaagggactggagtggattgggattatctattccagcgggagcacctactacaacccttccctcaagagtcgactcaccatatccgtagacacgtccaagaaccagttctccctgcagctgagttctgtgaccgccgcagacacggccgtgtattactgtgcgagacgcggtgaccactggggccagggaaccctggtcaccgtctcctca

SEQ ID NO: 11948 - DNA, 298 bp, Homo sapiens
  source 1..298: mol_type = other DNA
tgcagcctctggattcacctttagtagtcattggatgagttgggtccgccaggctccagggaaggggctggagtgggtgtccaacataaagcaagatggaagtgagaaatattatgtggactctgtgaagggccgattcaccatctccagagacaacgccaagaattcactgtatctgcaaatgaacagcctgagagccgaggacgcggctgtgtactactgcgcgagagagccgaatatagccgtggtcacccactttgactattggggccagggtgccctggtcaccgtctcctca

SEQ ID NO: 11949 - DNA, 298 bp, Homo sapiens
  source 1..298: mol_type = other DNA
tgcagcctctggattcacctttagtaattattggatgagttgggtccgccaggctccagggaaggggctggagtgggtggccaacataaaacaagatggaagtgagacatactatgtggactctgtgaagggccgattcaccatctccagagacaacgccaagaactcactgtttctgcaaatgaacaacctaagagccgaggacacggctgtgtatttctgtgcgagagagccaaatatagctgttgtcacccactttgactactggggccagggaaatttggtcactgtctcctca

SEQ ID NO: 11950 - DNA, 298 bp, Homo sapiens
  source 1..298: mol_type = other DNA
tgcagcctctgggttcacctttagtagctattggatgagctgggtccgccagactccagggaaggggctggagtgggtggccaacataaagcaagatggaagtgagaaatactatgtggaatctgtgaagggccgattcaccatctccagagacaacgccaagaactcactgtatctgcagatggatagcctgggagccgcggacacggctgtatattattgtgcgagagaaccaaatatagctgtggtcacccactttgactactggggccagggaaccctggtcaccgtctcctca

SEQ ID NO: 11951 - DNA, 289 bp, Homo sapiens
  source 1..289: mol_type = other DNA
tgcagcttctggattctcctttttcagctatgccatgagctgggtccgccaggctccagggaaggggctgaagtgggtctcaactatcaatactagtggtggtgtcacatactacgcagactccgtgaagggccggttcaccatctccagagacaattccaagaacacgctgtctctgcaaatgaacagcctgagagccgaggacacggccatatattactgtgcgaaactaataactggctggcaatttgactcctggggccagggaaccctggtcaccgtctcctca

SEQ ID NO: 11952 - DNA, 289 bp, Homo sapiens
  source 1..289: mol_type = other DNA
tgcagcctctggattcacctttagcagctttgccgtgacctgggtccgccaggctccagggaaggggctggagtgggtctcaactattggtggtagttctactagcacatactacgcagactccgtgaagggccggttcagcatctccagagataattccaagaacacggtgtatttgcaaatgagcagcctgagagccgaggacacggccatatattactgtgcgaaactgattaccggctggcaatttgactcctggggccagggaaccctggtcaccgtctcctcg

SEQ ID NO: 11953 - DNA, 290 bp, Homo sapiens
  source 1..290: mol_type = other DNA
ccatctccggggacagtgtctctagcactagtgctgcttggatctggatcaggcagtccccatcgagaggccttgagtggctgggaaggacatactacaggtccaagtggcttaatgattatgcagtggctgtgaaaagtcgaataaccgtcatcccagacacatccaagaaccagttctccctgcagctgaactctgtgactcccgaggacacggctgtatattactgtgcaagagggaattattggtttgactcctggggccagggaaccctggtcaccgtctcctca

SEQ ID NO: 11954 - DNA, 290 bp, Homo sapiens
  source 1..290: mol_type = other DNA
ccatctccggggacagtgtctctagcaatagtgctgtttggtactggttcaggcagtccccatcgagaggccttgagtggctgggaaggacatactacaggtccaagtggtataatgattatgcagtatctgtgaaaagtcggataaccgtcaacccagacacatccaagaaccagttctccctgcagctgaactctgtgactcccgaggacacggctgtgtattactgtgcaaggggaaactactggttcgactcctggggtcagggaaccctggtcaccgtctcctca

SEQ ID NO: 11955 - DNA, 289 bp, Homo sapiens
  source 1..289: mol_type = other DNA
tgcagcctcgggattcagtttcaatggtgcctggatgagttgggtccgccaggctccagggaaggggctggagtgggttggccggattaaaagtaaagctgaaggtgggacaacagactacgctgcacccgtgaaaggcagattcaccatctcaagagatgactcaaaaaacacactatatctgcaaatgaacagcctgaaaaccgaggacacagccgtatattactgttcatggttcggggagttatggtactactggggccagggaaccctggtcaccgtctcctca

SEQ ID NO: 11956 - DNA, 289 bp, Homo sapiens
  source 1..289: mol_type = other DNA
tgcagcctctggattcactttcagtgacgcctggatgagctgggtccgccaggctccagggaaggggctggagtgggttggccgtattaaaagcaaagctgatggtgaggcagtagactacgctgcacccgtgaaaggcagattcaccatctcaagagatgattcaaaagacacgctgtatctgcaaatgaacagcctgaaaaccgaggacacagccctgtattactgtagttggtttggggagttatggtactactggggccagggaaccctggtcaccgtctcctca

SEQ ID NO: 11957 - DNA, 289 bp, Homo sapiens
  source 1..289: mol_type = other DNA
tgcagcctctggattcactttcactaacgcctggatgagctgggtccgccaggctccagggaaggggctggagtgggttggccgtattaaagccaaaactgatgatgggacaacagactacgctgcacccgtgaaaggcagattcaccatctcaagagatgattcaaaaaacacgctgtatctgcaaatgaacagcctgaaaaccgaggacacagccgtgtattactgtagttggttcggggagttatggtactactggggccagggaaccctggtcaccgtctcctca

SEQ ID NO: 11958 - DNA, 289 bp, Homo sapiens
  source 1..289: mol_type = other DNA
tgcagcctctggattcactttcaatgacgcctggatgagctgggtccgccaggctccagggaaggggctggagtgggttggccgtattaaaagcaatactgatggtgggacaatagactacgctgcacccgtgaaaggcagattcaccatctcaagagatgattcaaaaaacacgctgtttctgcaaatgaacagcctgaaaaccgaggacacagccgtgtattactgtagttggtttggggagttatggtactactggggccagggaaccctggtcaccgtctcctca

SEQ ID NO: 11959 - DNA, 289 bp, Homo sapiens
  source 1..289: mol_type = other DNA
tgcagcctctggattcactttcactaacgcctggatgagctgggtccgccaggctccagggaaggggctggagtgggttggccgtattaaagccaaaactgacgatgggacaacagactacgctgcacccgtgaaaggcagattcaccatgtcaagagatgattcaaaaaacacgctgtatctgcaaatgaagagcctgaaaaccgaggacacagccgtgtattactgtagttggttcggggagttatggtactactggggccagggaaccctggtcaccgtctcctca

SEQ ID NO: 11960 - DNA, 289 bp, Homo sapiens
  source 1..289: mol_type = other DNA
tgcagcctctggattcactttcagtgacgcctggatgagctgggtccgccaggctccagggaaggggctggagtgggttggccgtattaaaagcaaaactgctggtgggacaacagactacgctgcacccgtgaaaggcagagtcaccatctcgagagatgattcaaaaaacatgttgtatctgcaattgaacagcctgaaaaccgaggacacagccgtgtattattgtagttggttcggggagttatggtactactggggccagggaaccctggtcaccgtctcctca

SEQ ID NO: 11961 - DNA, 301 bp, Homo sapiens
  source 1..301: mol_type = other DNA
cactgtctctggtggctccatcagcagtagtagttactactggggctggatccgccagcccccagggaaggggctggagtggattgggagtgggagtatgtattatagtgggagaattaactacaacccgtccctcaagagtcgagtcaccatatccgtagacacgtccaagaatcagttctccctgaagctgagctctgtgaccgccgcagacacggctgtgtatttctgtgtgagacggggagacagctatgggatctttgactactggggccagggaaccctggtcaccgtctcctca

SEQ ID NO: 11962 - DNA, 292 bp, Homo sapiens
  source 1..292: mol_type = other DNA
cactgtctctggtgactccatcagtaggaattattactggggctggatccgccagcccccagggaaggggctggagtggattgggagtatctcttatagtgggaggacatactacaacccgtccctcaagagtcgagtcaccatatccgttgacacgtccaggaaccaattgtccctgaagctgacctctgtgaccgccgcagacacggctgtctattactgtgtgagacgtggagacagctatggaatttttgactactggggccagggagccctggtcaccgtctcctca

SEQ ID NO: 11963 - DNA, 292 bp, Homo sapiens; identical to SEQ ID NO: 11962
  source 1..292: mol_type = other DNA

SEQ ID NO: 11964 - DNA, 286 bp, Homo sapiens
  source 1..286: mol_type = other DNA
tgcagcctctggattcaccttcagtacctatagcatgaactgggtccgccaggctccagggaaggggctggaatggttttcatacattcgtaatagtcctccaacaatatactacgcggactctgtgaagggccgattcaccatctccagagacaacgccaagaattcactgtatctgcagatgaacagcctggcagtcgacgacacggctgtttactactgtgcgagagatcacttctatgcatttgatctctggggccaagggacaatggtcaccgtctcttca

SEQ ID NO: 11965 - DNA, 286 bp, Homo sapiens
  source 1..286: mol_type = other DNA
tgcagcctctggattcaccttcagtacctatagcatgaactgggtccgccaggctccagggaaggggctggaatggctttcatacattcgtaatagtcctccaacaatatactacgcagactctgtgaagggccgattcaccatctccagagacaacgccaagaattcactgtatctgcagatgaacagcctggcagtcgacgacacggctgtttactactgtgcgagagatcacttctatgcatttgatctctggggccaagggacaatggtcaccgtctcttca

SEQ ID NO: 11966 - DNA, 285 bp, Homo sapiens
  source 1..285: mol_type = other DNA
gcttctggatacaccttcaccggcaagtatatgcactgggtgcgacaggcccctggacaagggcttgagtggatgggatggatcaacccgaacagtggtggcacaaactatgcacagaactttcagggctgggtcaccatgaccagggacacgtccaccagcacagcctacatggagctgagcaggctgagatatgacgacacggccgtgtatttctgtgcgagagaagtgaccagtagctggtttgactactggggccagggaacccaggtcaccgtctcctca

SEQ ID NO: 11967 - DNA, 285 bp, Homo sapiens
  source 1..285: mol_type = other DNA
acctctggatacaccttcaccggctcctatatgcactgggtgcgacaggcccctggacaagggcttgagtggatggggtggatcaactgtaacagtggtggcacaaaatatgcacagaagtttcagggcagggtcaccatgaccagggacacgtccatcagtacagtctacatggagctcaacagactgatatttgacgacacggccgtgtatttctgtgcgagagaagttacgagcagctggtttgactactggggccagggaaccctggtcaccgtctcctca

SEQ ID NO: 11968 - DNA, 283 bp, Homo sapiens
  source 1..283: mol_type = other DNA
cgctgtctatggtgggtccttcagtggttactactggagctggatccgccagcccccagggaaggggctggagtggattggggaaatcaatcatagtggaaccaccaggtacaacccgtccctcaagagtcgagtcaccatatcagtagacacgtccaagaaccacttctccctgaagctgagctctgtgaccgccgcggacacggctatttattactgtgcgagaaaggactacgacgggcttgattactggggccagggaaccctggtcaccgtctcctca

SEQ ID NO: 11969 - DNA, 283 bp, Homo sapiens
  source 1..283: mol_type = other DNA
cgctgtctatggtgggtccttcagtggttactactggagctggatccgccagcccccagggaaggggctggagtggattggggaaatcaatcatagtggaagcaccaactacaacccgtccctcaagagtcgagtcaccatatcagtagacacgtccaagaaccagttctccctgaagctgagctctgtgaccgccgcggacacggctgtgtattactgtgcgagaaaggactacgacggacttgactactggggccagggaaccctggtcaccgtctcctca

SEQ ID NO: 11970 - DNA, 274 bp, Homo sapiens
  source 1..274: mol_type = other DNA
tgaagtctctggattcactgtcaatagccactggatgcactgggtccgccaagttccagggaaggggctggtgtgggtctcacatattaatcctgatggaactaatattgattatgtggactcagtgaagggccgattcatcatctccagagacaactccaagaacacgctgtatctgcagatgaacagtctgagagccgaggacacggcagtatattactgtgcaagaggttatgacctctggggccagggaaccctggtcaccgtctcctca

SEQ ID NO: 11971 - DNA, 274 bp, Homo sapiens
  source 1..274: mol_type = other DNA
tgcagcctctggattcagcttcagtagctcctggatgcactgggtccgccaagctccggggagggggctgatgtgggtctcacagattaatggggatagcagtaacacacgctacgcggactccgtgaagggccgattcaccatctccagagacaacgccaagaacacactgtatctgcaaatgaacagtctgagagccgaggacacggctgtatatttctgtgcaagagggtacgacctctggggccagggaaccctggtcaccgtctcctca

SEQ ID NO: 11972 - DNA, 274 bp, Homo sapiens
  source 1..274: mol_type = other DNA
tgcagcctctgcattcaccttcagtagccactggatgcactgggtccgccaagctccagggaaggggcttgtgtgggtctcaggtattaatagtgatgggagtaagacagtttacgcggactccgtgaagggccgattcgccatctccagagacaacgccaagaacaccctgtatctgcaaatgaacagtctgagagccgaggacacggctgtttattattgtgcaagagggtacgacctttggggccagggaaccctggtcaccgtctcctca

SEQ ID NO: 11973 - DNA, 286 bp, Homo sapiens
  source 1..286: mol_type = other DNA
tgtagcctctggattcaggtttagtagttattggatgagttgggtccgccaggctccagggaaggggctggagtgggtggccaatataaagcaagatggaagtgagaaatactatgtggactctgtgaagggccgattcaccatctccagagacaacgccaagaattcactgtatctgcaaatgaacagcctgagagtcgaggacacggccatgtattactgtgcgaggtatgggggacccgaccttgactactggggccagggaaccctggtcaccgcctcctca

SEQ ID NO: 11974 - DNA, 286 bp, Homo sapiens
  source 1..286: mol_type = other DNA
tgcagcctctgaattcacctttagcaactcttggatgagctgggtccgccaggctccagggaaggggctggagtgggtggccaacataaagaaagatggaagtgagaagtattatgcggactctgtgaagggccgattcaccatctccagagacaacgccaagaattcactgtatctgcagatgaacaacctgagagccgaggacacggctgtgtattactgtgcgagatatggcggcccggaccttgactactggggccagggaaccctggtcaccgtctcctca

SEQ ID NO: 11975 - DNA, 286 bp, Homo sapiens
  source 1..286: mol_type = other DNA
tgcagcctctggactcactttcagtgactactacatgacctggatccgccaggctccagggaaggggccggagtgggtttcatacattagtagtagtggtagggacaaatattacgcagactctgtgaagggccgattcaccatctccagagacaacgccaagaactcactatacctgcaaatgaacagcctgagagccgaggacacggccgtatattactgtgcgagagcgatatatgatgcttttgatatctggggccaagggacaaaggtcaccgtctcttca

SEQ ID NO: 11976 - DNA, 286 bp, Homo sapiens
  source 1..286: mol_type = other DNA
tgcagcctctagattcaccttcagtaactactacatgacctggatccgccaggctccagggaaggggctggagtggatttcatacattagtaatagtgggagttccacatactacgcagactctgtgaagggccggttcaccatctccagggacaacgccaagaactcactgtatctgcaaatgaatggcctgagagccgaggacacggctgtctattactgtgcgagagcaatatatgatgcttttgatatctggggccaagggaaaatggtcaccgtctctgca

SEQ ID NO: 11977 - DNA, 286 bp, Homo sapiens
  source 1..286: mol_type = other DNA
tgcagcctctagattcaccttcagtaactactacatgacctggatccgccaggctccagggaaggggctggagtgggtttcatacattagtaatagtgggagttccacatactacgcagactctgtgaagggccggttcaccatctccagggacaacgccaagaactcactgtatctgcaaatgaatggcctgagagccgaggacacggctgtctattactgtgcgagagcaatatatgatgcttttgatatctggggccaagggaaaatggtcaccgtctctgca

SEQ ID NO: 11978 - DNA, 286 bp, Homo sapiens
  source 1..286: mol_type = other DNA
tgcagcctctggattcaccttcagtaactactacatgacctggatccgccaggctccagggaaggggctggagtggatttcatacattagtaatagtgggagttccacatactacgcagactctgtgaagggccggttcaccatctccagggacaacgccaagaactcactgtatctgcaaatgaatggcctgagagccgaggacacggctgtctattactgtgcgagagcaatatatgatgcttttgatatctggggccaagggaaaatggtcaccgtctctgca

SEQ ID NO: 11979 - DNA, 286 bp, Homo sapiens
  source 1..286: mol_type = other DNA
tgcagcctctagattcaccttcagtgactactacatgacctggatccgccaggctccagggaaggggctggagtggatttcatacattagtaacagtgggagttccacatactacgcagactctgtgaagggccggttcaccatctccagggacaacgccaagaactcactgtatctgcaaatgaacggcctgagagccgaggacacggctgtctattactgtgcgagagcaatatatgatgcttttgatatctggggccaagggaaaatggtcaccgtctctgca

SEQ ID NO: 11980 - DNA, 292 bp, Homo sapiens
  source 1..292: mol_type = other DNA
tgcagcctctggattcacctttagtaactattggatgacctgggtccgccaggctccagggaaggggctggagtgggtggccaacataaagcaagatgcaagtgagaaatactatgtggactctgtgaagggccgattcaccatctccaaagacaacgccaagaactcactgtatctgcaaatgaacagcctgagagccgacgacacggctgtgtattactgtgcgagagggtacggtgactaccacccccttgactactggggccagggaaccctggtcaccgtctcctca

SEQ ID NO: 11981 - DNA, 292 bp, Homo sapiens; identical to SEQ ID NO: 11980
  source 1..292: mol_type = other DNA

SEQ ID NO: 11982 - DNA, 292 bp, Homo sapiens
  source 1..292: mol_type = other DNA
tgcagcctctggattcacctttagtagttattggctgacctgggtccgccaggctccagggaaggggctggagtgggtggccaacataaagcaaggtggaagtgagagatactatctggactctgtgaagggccgattcaccatctccagagacgacgccaagaactcagtgtatctgcaaatgaacagcctgagagccgaggacacggctgtgtattactgtgcgagagggtacggtgactatcaccccttggactactggggccagggaaccctggtcaccgtctcctca

SEQ ID NO: 11983 - DNA, 292 bp, Homo sapiens
  source 1..292: mol_type = other DNA
tgcagcctctggattcacctttagtagttattggatgacctgggtccgccaggctccagggaaggggctggagtgggtggccaacataaagcaaggtggaagtgagagatactatctggactctgtgaagggccgattcaccatctccagagacgacgccaagaactcagtgtatctgcaaatgaacagcctgagagccgaggacacggctgtgtattactgtgcgagagggtacggtgactatcaccccttggactactggggccagggaaccctggtcaccgtctcctca

SEQ ID NO: 11984 - DNA, 292 bp, Homo sapiens
  source 1..292: mol_type = other DNA
tgcagcctctggattcacctttagtagctattggatgacctgggtccgccaggctccagggaaggggctggggtgggtggccaacataaagcaagatggaagtgagaaatactatgtggactctgtgaggggccgattcaccatctccagagacgacgccaagaactcagtgtatttgcaaatgaacagcctgagagtcgaggacacggctgtgtattattgtgcgagagggtacggtgactaccaccccttggactactggggccagggaaccctggtcaccgtctcctca

SEQ ID NO: 11985 - DNA, 286 bp, Homo sapiens
  source 1..286: mol_type = other DNA
tatagcctctacatttacaaaggatcatgccatgcactgggtccggcaaattccagggaagggcctagagtgggtctcaggtattttttgggataatgataggccaggctatgcggattctgtgaagggccgattctccatctccagagacaacgccaagaactccctgtatctgcaaatgaacagtctgacaactgacgatacggccacatattactgtggaaaagatatcagcgcggggggtttggacgtctggggccaagggaccacggtcatcgtctcctca

SEQ ID NO: 11986 - DNA, 286 bp, Homo sapiens
  source 1..286: mol_type = other DNA
tatagcctctacatttacaaaggatcatgccatgcactgggtccggcaaattccagggaagggcctagagtgggtctcaggtattttttgggataatgataggccaggctatgcggattctgtgaagggccgattctccatctccagagacaacgccaagaactccctgtatctgcaaatgaacagtctgacaactgacgatacggccacatattactgtggaaaagatatcagcgcggggggtttggacgtctggggccaagggaccacggtcaccgtctcctca

SEQ ID NO: 11987 - DNA, 289 bp, Homo sapiens
  source 1..289: mol_type = other DNA
tacagcctctggattcaacttacatgatcatgccatgcactgggtccggcaagctccagggaagggcctggagtggatctcaggtatttattggaatggtgatggggtagactatgcggactctgttaagggccgattcaccacctccagagacaacgccaagaactccctctatctgcaaatgaacagtttgagagctgacgacacggccttgtatttctgtggaaaagatatatcagccggcggtttggacgtctggggccaggggaccacggtcaccgtctcctca

SEQ ID NO: 11988 - DNA, 289 bp, Homo sapiens
  source 1..289: mol_type = other DNA
tgtaggctctggagtcatcgttcgggatcatgccatgcactgggtccggcaagctccagggaagggcctggagtgggtctcaggcattttttggaataatgatgggccagggtatgcggactctgtgaagggccgattcaccgtctccagggacaacgccaagaactccctctatctgcaaatgaacagtctgagagctgaagacacggccatttattactgtggaaaagatatttcggccgggggattggacgtctggggccctgggaccacggtcatcgtctcctca

SEQ ID NO: 11989 - DNA, 289 bp, Homo sapiens
  source 1..289: mol_type = other DNA
tgtaggctctggatccacccttaatgatcatgccatgcactgggtccggcaagctccagggaagggcctggagtgggtctcaggtattatgtggaagagtgataggatagactatgcggactctgtcaagggccgattcaccacgtccagagacaacgccaagaactccctgtatctggaaatgaacagtctgagacctgaggactcggccttgtattattgtggaaaagatatatcagccggcggtttggacgtctggggccaagggaccacggtcaccgtctcctca

SEQ ID NO: 11990 - DNA, 289 bp, Homo sapiens
  source 1..289: mol_type = other DNA
tgtaggctctggatccacccttaatgatcatgccatgcactgggtccggcaagctccagggaagggcctggagtgggtctcaggtattatgtggaagagtgataggatagactatgcggactctgtcaagggccgattcaccacgcccagagacaacgccaagaactccctgtatctggaaatgaacagtctgagacctgaggactcggccttgtattattgtggaaaagatatatcagccggcggtttggacgtctggggccaagggaccacggtcaccgtctcctca

SEQ ID NO: 11991 - DNA, 283 bp, Homo sapiens
  source 1..283: mol_type = other DNA
tgcagcctctgggttcactttcaataaggcctggatgagctgggtccgccaggctccagggaaggggctggagtgggttgcccgtcttaaaagtaaatctgatggtgggacaatagactacgctgcacccgtgaaaggcagattcaccatctcaagagatgattcaaaaaatacgctgtatctgcaaatgagcagcctcaaaaccgatgacacagccgtgtattactgtatgcgggactacggtgaaccctggggccaagggaccctggtcaccgtctcctca

SEQ ID NO: 11992 - DNA, 283 bp, Homo sapiens
  source 1..283: mol_type = other DNA
tgcagcctctgggttcactttcaataaggcctggatgagttgggtccgccaggctccagggaaggggctggagtgggttgcccgtctgaaaagtaaatctgatggtgggacaatagactacgctgcacccgtgaaaggcagattcaccatctcaagagatgattcaaaaaatacgttgtatctgcaaatgagcagcctcaaaaccgatgacacagccgtgtattactgtatgcgggactacggtgaaccctggggccaagggaccctggtcaccgtctcctca

SEQ ID NO: 11993 - DNA, 283 bp, Homo sapiens
  source 1..283: mol_type = other DNA
tgcagcctttggattcactgtaagtaaggcctggatgagctgggtccgccaggctccagggaaggggctggagtgggttggccgtattaaaagtaggactgatggtgggacaacagactacgctgcacccgtgaaaggcagattcaggatctcaagagatgactcacaaaacaaagtgttcctggaaatgaacagtctggaaatcgaggacacagccatatatttctgtatgagggactacggtgaaccttggggccagggaaccctggtcactgtctcctca

SEQ ID NO: 11994 - DNA, 283 bp, Homo sapiens
  source 1..283: mol_type = other DNA
tgcagcctctggatttactttcagtaaggcctggatgagttgggtccgccagcctccagggagggggctggagtgggtcggccgtattaaaagtaagactgatggtgggacaagacattacgctgcgcccgtgaaaggcagattcaccatcttaagagatgatttacaaaacacactttatctccatatgaacagcctgaaaaccgacgacacaggcatgtatttctgtatgagggactacggtgaaccttggggccagggaaccctggtcaccgtctcctca

SEQ ID NO: 11995 - DNA, 280 bp, Homo sapiens
  source 1..280: mol_type = other DNA
tgtggcctctggattcagcattcgtgattatgaaatgaactgggtccgccaggctccagggaagggactggagtgggtttcattgattaggagcagtggcacttccgtgttttacgcagactctgtgaagggccgattcacctcctccagagacaacgccaagaacacactgtatctacaaatgaacagcctgagagtcgaggacacggctacttattactgtgtgagaatctatggttcggggacttggggccagggaaccctggtcaccgtctcctca

SEQ ID NO: 11996 - DNA, 280 bp, Homo sapiens
  source 1..280: mol_type = other DNA
tgtggcctctggattcagcattcgtgattatgagatgaactgggtccgccaggctccagggaagggactggagtgggtttcattgattaggagcagtggcacttccgtgttttacgcagactctgtgaagggccgattcacctcctccagagacaacgccaagaacacactgtatctacaaatgaacagcctgagagtcgaggacacggctacttattactgtgtgagaatctatggttcggggacttggggccagggaaccctggtcaccgtctcctca

SEQ ID NO: 11997 - DNA, 280 bp, Homo sapiens
  source 1..280: mol_type = other DNA
tgtagcctctggattcagttttagtcgttatgaaatgcattgggtccgccaggttccagggagggggctggagtgggtcgctcacattagtgatagtggtagacgaatccactacgcagcctctgtgaagggccgattcaccatctccagagacaacgccagaaattctatgtttctccaaatgaccagcctgagagccgacgactcgggtctgtattattgtgtgagaatctatggctcggggacgtggggccagggaacccgggtcaccgtcgcctca

SEQ ID NO: 11998 - DNA, 295 bp, Homo sapiens
  source 1..295: mol_type = other DNA
cactgtctctcgtgactccatcagcactggtggttactactggagctggatccgacagcccccagggaagggcctggagtggcttggctacatctattacactgggagcacctcctacaacccgtccctcaagagtcgacttaccatgtcacttgacacgtctgggagccagttctccctgaggctgacgtctctgacggccgcggacacggccgtatattattgtgcgagaggttcggggtacagctatagttacaattactggggccagggaaccctggtcatcgtctcgtca

SEQ ID NO: 11999 - DNA, 295 bp, Homo sapiens
  source 1..295: mol_type = other DNA
cactgtctctcgtgactccatcagcactggtggttactactggagctggatccgacagcccccagggaagggcctggagtggcttggctacatctattacactgggagcacctcctacaacccgtccctcaagagtcgacttaccatgtcacttgacacgtctgggagccagttctccctgaggctgacgtctctgacggccgcggacacggccgtatattattgtgcgagaggttcggggtacagctatagttacaattactggggccagggaaccctggtcatcgtctcctca

SEQ ID NO: 12000 - DNA, 295 bp, Homo sapiens
  source 1..295: mol_type = other DNA
cactgtctctggtggctccatcaacactggtggttactactggacctggattcggcaacaaccagggaagggcctggagtggattggctacatctattacactgggagcacgtcctacgacccgtccctcaagagtcgactttccatgtcaattgacacgtctaagagtcagttctccctacacttgaactctgtgacggccgcggacacggccgtatacttttgtgcgagagggagcggctacagttattcttataactactggggccagggaaccctggtcaccgtctcctca

SEQ ID NO: 12001 - DNA, 307 bp, Homo sapiens
  source 1..307: mol_type = other DNA
cattgtctctggtgcctccatcagcagtgggagttactactggagctggatccggcagcccgccgggaagggactggagtggattgggcgtgtctataccagtgggaccaccaaccactacaatccctccctcaagagtcgagtcaccatatcactagacacgtccaggaaccagttctccctgaagcttaggtctgtgaccgccgcagacacggccgtatattattgcgcgagagatcgaagatattctagcagctggtacgcttttgatatctggggccaagggacaatggtcaccgtctcttca

SEQ ID NO: 12002 - DNA, 304 bp, Homo sapiens
  source 1..304: mol_type = other DNA
cactgtctctggtgcctccatcagcagtggtagctactactggaactggatccggcagcccgccgggaagggactggagtggattgggcgtatctatatcagtgggagcaccaactacaacccctccctcaagagtcgagtcatcatatcagtagacacgtccaagagccagttctccctgaagctgaggtctgtgaccgccgcagacacggccgtatattactgtgcgagagatcggcggtatagcagcagctggtacgcttttgatatctggggccaagggacaatggtcaccgtctcttca

SEQ ID NO: 12003 - DNA, 304 bp, Homo sapiens; identical to SEQ ID NO: 12002
  source 1..304: mol_type = other DNA

SEQ ID NO: 12004 - DNA, 277 bp, Homo sapiens
  source 1..277: mol_type = other DNA
tgcagcctctggattcacctttagcagctctgccatgagctgggtccgccaggctccagggaagggactggagtgggtctcaattatttatagcggtggtggtgtcacattctatgcagactccgtgaagggccggttcaccatctccagagataattccaagaacacgctgtatctgcaaatgaacagcctgagagccgaggacacggccatatattactgtgcgaaccgggcctttgactactggggccagggaaccctggtcaccgtctcctca

SEQ ID NO: 12005 - DNA, 277 bp, Homo sapiens; identical to SEQ ID NO: 12004
  source 1..277: mol_type = other DNA

SEQ ID NO: 12006 - DNA, 277 bp, Homo sapiens
  source 1..277: mol_type = other DNA
tgcagcctccggattcatctttagtagctgtgacatgagctgggtccgccaggctccagggaaggggctggagtgggtctcacttatttatactggtggtagtagcgcattttatgcagggtccgtgaagggccggttcaccatctccagagataactccaagaacacgctgtatctgcaaatgaacagcctgagagccgaggacacggccgtatattactgtgcgaatagggcctttgactactggggccagggaatcctggtcaccgtctcctca

SEQ ID NO: 12007 - DNA, 277 bp, Homo sapiens
  source 1..277: mol_type = other DNA
caatgtctctggtggctccatcagtcgttactactggagttggatccggcagcccccagggaagggactggagtggattgggtatatctatgaccgtggaagcaccaattacaacccctccctcaagagtcgagtcaccatatcagtagacacgtcgaagagccagttctccctgagactgacctctgtgaccgctgcggacacggccgtctattactgtgcccgagggcggtcctttgaccagtggggccagggaatcctggtcaccgtctcctca

SEQ ID NO: 12008 - DNA, 277 bp, Homo sapiens
  source 1..277: mol_type = other DNA
cactgtctctggtggctccatcagtagttactactggagttggatccggcagcccccagggaagggactggagtggattgggtatatctatgacagtgggagcaccaactacaacccctccctcaagagtcgagtcaccatatcagtagacacgtcgaagaggcagttctccctgagactgaggtctgtgaccgctgcggacacggccgtgtatcactgtgcccgagggcggtcctttgaccagtggggccagggaaccctggtcaccgtctcctca

SEQ ID NO: 12009 - DNA, 277 bp, Homo sapiens
  source 1..277: mol_type = other DNA
cactgtctctggtggctccatcagtagttacttctggagttggatccggcagcccccagggaagggactggagtggattgggtatatctatggcagtgggagcaccaactacaacccctccctcaagagtcgagtcaccatatcagtcgacacgtcgaagagccagttctccctgagactgagctctgtgaccgctgcggacacggccgtgtatcactgtgcccgagggcggtcctttgaccagtggggccagggaaccctggtcaccgtctcctca

SEQ ID NO: 12010 - DNA, 277 bp, Homo sapiens
  source 1..277: mol_type = other DNA
cactgtctctggtggctccatcagtagttactactggagttggatccgccagcccccagggaagggactggagtggattgggtatatctatggcagtgggagcaccaactacaacccctccctcaagagtcgagtcaccatatcagtcgacacgtcgaagagccagttctccctgagactgagctctgtgaccgctgcggacacggccgtgtatcactgtgcccgagggcggtcctttgaccagtggggccagggaaccctggtcaccgtctcctca

SEQ ID NO: 12011 - DNA, 277 bp, Homo sapiens
  source 1..277: mol_type = other DNA
cactgtctctggtggctccatcagtagttactactggagttggatccggcagcccccagggaagggactggagtggattgggtatatctatgacagtgggagcaccaactacaacccctccctcaagagtcgagtcaccatatcagtcgacacgtcgaagagccagttctccctgagactgagctctgtgaccgctgcggacacggccgtgtatcactgtgcccgagggcggtcctttgaccagtggggccagggaaccctggtcaccgtctcctca

SEQ ID NO: 12012 - DNA, 277 bp, Homo sapiens
  source 1..277: mol_type = other DNA
cactgtctctggtggctccatcagtcgttactactggagttggatccggcagcccccagggaagggactggagtggattggctatatctatgtccctggaagcaccaattacaacccctccctcaagagtcgagtcaccatatcagtagactcgtcgaagagccagttctccctgagactgagctctgtgaccgctgcggacacggccgtctattactgtgcccgagggcggtcctttgaccagtggggccagggaatcctcgtcaccgtctcctca

SEQ ID NO: 12013 - DNA, 277 bp, Homo sapiens
  source 1..277: mol_type = other DNA
cagtgtctctggtggctccatcagtcgttactactggagttggatccggcagcccccagggaagggactggagtggattgggtatatctatgaccgtggaagcaccaattacaacccctccctcaagagtcgagtcaccatatcagtagacacgtcgaagagccagttctccctgagactgagctctgtgaccgctgcggacacggccgtctattactgtgcccgagggcggtcctttgaccagtggggccagggaatcctggtcaccgtctcctca

SEQ ID NO: 12014 - DNA, 277 bp, Homo sapiens
  source 1..277: mol_type = other DNA
cactgtctctggtggctccatcagtaattccttctggagctggatccggcagcccccagggaagggactggagtggattggctatatctattacagtgggagcaccaactacaagccctccctcaagagtcgagtcaccatatcagtagacacgtccaagaaccaggtctccctgaagctgacctctgtgaccgctgcggacacggccgtgtattactgtgcgagagggaggtcgtttgaccagtggggccagggaaccctggtcaccgtctcctca

SEQ ID NO: 12015 - DNA, 297 bp, Homo sapiens
  source 1..297: mol_type = other DNA
aagggttctggatacagttttaccagttattggatcggctgggtgcgccagatgcccgggaaaggcctggagtggatggggatcatctatcctggtgactctgataccagatacagcccgtccttccaaggccaggtcaccatctcagccgacaagtccatcagcaccgcctacctgcagtggagcagcctgcaggcctcggacaccgccatgtattactgtgcgagacggggcaatagcagtggctggtacgggggggactactggggccagggaaccctggtcaccgtctcctca

SEQ ID NO: 12016 - DNA, 297 bp, Homo sapiens
  source 1..297: mol_type = other DNA
aagggttctggatacagttttaccagttactggatcggctgggtgcgccagatgcccgggaaaggcctggagtggatggggatcatctatcctggtgactctgataccagatacagcccgcccttccaaggccaggtcaccatttcagccgacaagtccatcagtaccgcctacctgcagtggagcagcctgcaggtctcggacaccgccatgtattactgtgcgagacggggcaacagcagtggctggtacgggggggactactggggccagggaaccctggtcaccgtctcctca

SEQ ID NO: 12017 - DNA, 297 bp, Homo sapiens; identical to SEQ ID NO: 12015
  source 1..297: mol_type = other DNA

SEQ ID NO: 12018 - DNA, 297 bp, Homo sapiens
  source 1..297: mol_type = other DNA
aagggttctggatacagcttcaccaactactggatcggctgggtgcgccagatgcccgggaaaggcctggagtggatggggatcatttatcctggtgactctgataccagatacagcccgtccttccaaggccaggtcaccatctcagccgacaagtccatcagcaccgcctacctgcagtggagcagcctgaaggcctcggacaccgccatgtattactgtgcgagacgcggtaatagtagtggctggtacgggggggattattggggccagggaaccctggtcaccgtctcctca

SEQ ID NO: 12019 - DNA, 283 bp, Homo sapiens
  source 1..283: mol_type = other DNA
tgcagcctctggattcagttttaggacctattggatgagttggatccgccaggctccagggaagggaccggaatgggtgggctacataaatcaagattcaagtgagacatattatgtggactctatgaagggccgattcaccatctccagagacaacgccaggaactctctttatctgcaaatgaacagcctgagaaccgaagacacggctgtatattactgtgcgagacacgggggagctcctgactactggggccagggaaccctggtcaccgtctcctct

SEQ ID NO: 12020 - DNA, 283 bp, Homo sapiens
  source 1..283: mol_type = other DNA
tgcagcctctggattcacctttagtaactattggatgacctgggtccgccaggctccagggaaggggctggagtgggtggccaacataaaagaagatggaagtcagaaaaaccatgtggactctgtgaagggccgattcaccatctccagagacaacgccaagagctcactgtatctgcaaatgaacagcctgagagccgaggacacggctgtgtattactgtgcgagacatggcggggccccagactactggggccagggaaccctggtcaccgtctcctca

SEQ ID NO: 12021 - DNA, 289 bp, Homo sapiens
  source 1..289: mol_type = other DNA
tgcaacctctggattcactttgaataatgcctggatgagctgggtccgccaggctccagggaaggggctggagtggattggccgtattaaaagcagaactgatggtgggacaacagactacgctgcacccgtgaaaggcagattcactatctcaagagatgattcaaaaaacacactgtatctgcaaatgaacaacctgaaaaccgaggacacagccgtgtattactgtaccaagggaggtacgaccctaggttactggggccagggaaccctggtcaccgtctcctcg

SEQ ID NO: 12022 - DNA, 289 bp, Homo sapiens
  source 1..289: mol_type = other DNA
tgcagtctctggattcagtgtcactaacgcctggatgagctgggtccgccaggctccagggaaggggctggagtgggttggccgaattaaaagtaaaactgatggtgggacaacagactacgctgcacacgtgaaagacagattcaccatctcaagagatgattcaaaaaatacgttatatttgcgaatgaccagcctgaaaagcgaggacacagccgtgtattattgtactaaggggggaacgacgcttggctactggggccagggaagcctggtcaccgtctcctca

SEQ ID NO: 12023 - DNA, 283 bp, Homo sapiens
  source 1..283: mol_type = other DNA
tgcagcctctggattcacctttaccagctatgccatgagctgggtccgccaggctccagggaaggggctggagtgggtctcgattatttatagcggtgatgataccagatactatgtagagtccgtgaagggccggttcaccatctccagagataattccaagaacaccctgtacctgcaaatgaacagcctgagagccgacgacacggccgtatattactgtgcgaagggttcgggcgctatggacgtctggggccatgggaccacggtcaccgtctcctca

SEQ ID NO: 12024 - DNA, 283 bp, Homo sapiens; identical to SEQ ID NO: 12023
  source 1..283: mol_type = other DNA

SEQ ID NO: 12025 - DNA, 283 bp, Homo sapiens
  source 1..283: mol_type = other DNA
tgcagcctctggattcacctttaccagctatgccatgagctgggtccgccaggctccagggaaggggctggagtgggtctcgattatttatagcggtgatgataccagatactatgtagagtccgtgaagggccggttcaccatctccagagataattccaggaacaccctgtacctgcaaatgaacagcctgagagccgacgacacggccgtatattactgtgcgaagggttcgggcgctatggacgtctggggccatgggaccacggtcaccgtctcctca

SEQ ID NO: 12026 - DNA, 283 bp, Homo sapiens
  source 1..283: mol_type = other DNA
tgcagcctctggattcatctttaacaattatgccatgagctgggtccgccaggctccagggaaggggctggagtgggtctcaactattagtggtaatggtcgtaccacatactacgcagactccgtgaagggccggttcaccgtctccagagacaattccaagaacacgctgtatctgcaaatgaacagcctgagggccgaggacacggccctctattactgtgcgaaaggttcgggggctatggacgtctggggccaagggaccacggtcaccgtctcctca

SEQ ID NO: 12027 - DNA, 300 bp, Homo sapiens
  source 1..300: mol_type = other DNA
gcttctggatacaccttcaccagttatgatatcaactgggtgcgacaggcccctggacaagggcttgagtggatgggatggatgaacgctaacactggtaacacaggctatgcacagaagttccagggcagagtcaccatgaccaggtacacctccataagtacagcctatatggagctgagcagcctgggatctgaggacacggccttttattactgtgcgagagcgggatattgtagtagtaccagctgcggcggttttgactactggggccagggaaccctggtcatcgtctcctca

SEQ ID NO: 12028 - DNA, 300 bp, Homo sapiens
  source 1..300: mol_type = other DNA
acttctggatacatcttcaccagttatgatatcaactgggtgcgacgggcccctggacaagggtttgagtggatgggatggatgaattctaacactggtaacacaggctatgcacagaagttccagggcagagtcgccctgaccaggaacaccctcacaagcacagcctacatggagctgagtagtctgagatctgaggacacggccgtgtattactgtgcgagagccggatattgtagtagtaccagctgtggaggttttgactactggggccagggaatcttggtcaccgtctcctca

SEQ ID NO: 12029 - DNA, 289 bp, Homo sapiens
  source 1..289: mol_type = other DNA
tgcagcctctggattcaccttcagtagctatggcatgaactgggtccgccaggctccaggcaaggggctggaatgggtgacagttatatcagatgatggatataataaatactatgcggactccgtgaagggccgattcaccatctccagagacaattccaagaacatgctgtatctgcaaatgaacagcctgagagctgaggacacggctgtgtattactgtgcgaaagagtatagtagtggacttactgactactggggccagggaaccctggtcaccgtctcctca

SEQ ID NO: 12030 - DNA, 289 bp, Homo sapiens; identical to SEQ ID NO: 12029
  source 1..289: mol_type = other DNA

SEQ ID NO: 12031 - DNA, 289 bp, Homo sapiens
  source 1..289: mol_type = other DNA
tgcagcctctggattcaccttcagaagttatggcatgaactgggtccgccaggctccaggcaaggggctggagtgggtggcggttatatcatctggtggaggtagtaaatactatgcagactccgtgaagggccgattcaccatctccagagacaactccgagaacaccctgtatctgcaaatgaacaccctgagagctgaggacacggctgtgtattactgtgcgaaggagtacagcagtggcttgacggactactggggccagggaaccctggtcaccgtctcctca

SEQ ID NO: 12032 - DNA, 286 bp, Homo sapiens
  source 1..286: mol_type = other DNA
tgtcgtctctggattcacctttagtgattattggatgagctgggtccgccaggctccagggaagggtctggagtgggtggccatcatacataaagatggaagttctgataactatgtggactctgtgaagggccgattcaccatctccagagacaactccaagaactcactgtatctacaaatgaacagcctgagagacgaggacacggccctgtattactgtgcgagagatgcgaacagcctttttgactactggggccagggaaccctggtcaccgtctcctca

SEQ ID NO: 12033 - DNA, 286 bp, Homo sapiens
  source 1..286: mol_type = other DNA
tgtcgtctctggattcacctttagtgattattggatgagttgggtccgccaggctccagggaagggtctggagtgggtggccatcatacataaagatggaagttctgataactatgtggactctgtgaagggccgattcaccatctccagagacaactccaagaactcactgtatctacaaatgaacagcctgagagacgaggacacggccctgtattactgtgcgagagatgcgaacagcctttttgactactggggccagggaaccctggtcaccgtctcctca

SEQ ID NO: 12034 - DNA, 285 bp, Homo sapiens
  source 1..285: mol_type = other DNA
tgcagcctctggattcacatttagtagcaattggatgagctgggtccgccaggctccggggaaggggatggagtgggtggccaatataaagcatgatggaagtacgaaatactatgtgggctctgtgaggggccgattcaccatctccagagacaacgccaagaattcattgtttctggaaatgaacaacctgagagccgaggacacggccgtgtattactgtgcgagagacgcaaacagcttatttgactactgggccagggaaccctggtcaccgtctcctca

SEQ ID NO: 12035 - DNA, 299 bp, Homo sapiens
  source 1..299: mol_type = other DNA
tcatttccggggacagtgtctctgggaacagggctgctgcttggaactggatcaggcagtccccatcgagaggccttgagtggctgggaaggacatactacaagtccaagtggtataatgattatgcagtatctgtgaaaggtcgaataaacatcagaccagacacatccaggaatcagttctccctgcagctgaactctgtgactcccgacgacacggctgtgtattactgtgcacgccaaccggggagctggtacttcgatgtctggggccgtggcaccctggtcactgtctcctca

SEQ ID NO: 12036 - DNA, 299 bp, Homo sapiens
  source 1..299: mol_type = other DNA
tcatttccggggacagtgtctctgggaacagggctgctgcttggaactggatcaggcagtccccatcgagaggccttgagtggctgggaaggacatactacaagtccaagtggtataatgattatgcagtatctgtgaaaggtcgaataaacatcagcccagacacatccaggaatcagttctccctgcagctgaactctgtgactcccgacgacacggctgtgtattactgtgcacgccaaccggggagctggtacttcgatgtctggggccgtggcaccctggtcactgtctcctca

SEQ ID NO: 12037 - DNA, 296 bp, Homo sapiens
  source 1..296: mol_type = other DNA
ccatctccggggacagtgtctgcagcaaaaatgcagcttggagctggatcaggcagtccccatcgagaggccttgagtggctgggaaggacaaactgcaggtccgagtggtataatgattatgcagtctctgtgaaaagtcgaataaccatcaagccagacacatcgaagaaccagctctccctggagctgaactctgtgacccccgaggactcggctgtatatttctgtgcaaggcagccagggtcctggtacttcgatgtctggggccgtggcaccctggttactgtctcctca

SEQ ID NO: 12038 - DNA, 301 bp, Homo sapiens
  source 1..301: mol_type = other DNA
tgcagcctctggattcacctttaatagttattggatggcctgggtccgccaggctccagggaggggtctggagtgggtggccaacataaagcaagatggaagtgagacatactatgtggactctgtgcagggccgattcaccatctccagagacaacgccaagaactcactgtctctgcaaatgaacagcctgagagccgaggacacggccctgtattactgtgcgagaatatatgactacggtgggaggcactacggtatggacgtctggggccaagggaccacggtcaccgtctcctca

SEQ ID NO: 12039 - DNA, 301 bp, Homo sapiens
  source 1..301: mol_type = other DNA
tgcagcctctggattcacctttaatacttattggatggcctgggtccgccaggctccagggaggggtctggagtgggtggccaacataaagcaagatggaagtgagacatattatgtggactctgtgcagggccgattcaccatctccagagacaacgccaagaactcactgtctctgcaaatgaacagcctgagagccgaggacacggccctgtattactgtgcgagaatatatgactacggtgggaggcactacggtatggacgtctggggccaagggaccacggtcaccgtctcctca

SEQ ID NO: 12040 - DNA, 301 bp, Homo sapiens; identical to SEQ ID NO: 12038
  source 1..301: mol_type = other DNA

SEQ ID NO: 12041 - DNA, 301 bp, Homo sapiens
  source 1..301: mol_type = other DNA
tgcagcctctggattcacctttagctcccattggatgagttgggtccgccaggctccagggaaggggctggagtgggtggccaacataaatcaagatggaaatgagaaatactatgtggactctgtgaagggccgattcaccattttcagagacaacgccaagaactcactgtatctgcaaatgtacagcctgagagccgaggacacggccctgtattactgtgcgaggatttatgactacggtggccgccactacggtatggacgtctggggccaggggaccacggtcaccgtctcctca

SEQ ID NO: 12042 - DNA, 281 bp, Homo sapiens
  source 1..281: mol_type = other DNA
acatctccggggacagtgtctccagcagcagtgctacttggaactggttcaggcagtccccatcgagaggccttgagtggctaggaaggacatattacaggtccaagtggtattttgattatgcagaatctttgaagagtcgagtaaccatcaacccagacacatcaaagaaccagttctccctgcagctgaactctgtgactcccgaggacacggctgtgtattactgtgcaaggggtctggcctactggggccagggaaccctggtcaccgtctcctca

SEQ ID NO: 12043 - DNA, 281 bp, Homo sapiens
  source 1..281: mol_type = other DNA
tcatctccggggacaatgtctctaacaacagcgctatttggacctggatcaggcagtccccatcgagaggccttgagttcctgggaaggacatactacaggtccaggtggtctaatgattatgcaccatctgtgaaaagtcgaatgaccatcaaaccagacacatccaggaaccagctctccctgcagctgaactctgtgactcccgaggacacggctgtgtattactgtgcaagagggctggcctactggggccagggaaccctggtcaccgtctcctca

SEQ ID NO: 12044 - DNA, 281 bp, Homo sapiens; identical to SEQ ID NO: 12043
  source 1..281: mol_type = other DNA

SEQ ID NO: 12045 - DNA, 276 bp, Homo sapiens
  source 1..276: mol_type = other DNA
acttctggatatatcttcactaactatgctatgcattgggtgcgccaggcccccggacaaaggcttgagtggatgggatggatctacgctggcaatggtaacacaaaatattcacagaagttccagggcagagtcaccattaccagggacacatccgcgagcacagcctacatggagctgagcagcctgagatctgaagacacgactgtgtattactgtgcgagatcaatgagctttgactactggggccagggaaccctggtcaccgtctcctca

SEQ ID NO: 12046 - DNA, 276 bp, Homo sapiens
  source 1..276: mol_type = other DNA
gcttctggatacaccctcactacctttggcatgcattgggtgcgccaggcccccggacaaaggcttgagtggatgggatcgatcaacactggcgatggtaagacaaagtattcacagaagttccagggcagagtcaccattaccagggacacatccgcgagcacagtctacttggaagtgaacagcctgagatctgaagacacggctatatattactgtgcgagaagtatgagttttgactactggggccagggaaccctggtcaccgtctcctca

SEQ ID NO: 12047 - DNA, 276 bp, Homo sapiens
  source 1..276: mol_type = other DNA
gcttctggatttaggctcactgacaatgatatacattgggtgcgccaggcccccggacaaaggtttgagtggatgggatggatcagcgctgcccatgctaacacaaagtattcacagaaattccaggacagaatcaccattaccctcgacacatccgcggccacagcctacatggaactgagcagcctgacatctgaagacacggctatctactactgtgcgagatctcgatcctgtgactattggggccagggaaccctggtcaccgtatcctca

SEQ ID NO: 12048 - DNA, 276 bp, Homo sapiens
  source 1..276: mol_type = other DNA
gcttctggatttaggctcactgacaatgatatacattgggtgcgccaggcccccggacaaaggtttgagtggatgggatggatcagcgctgcccatggtaacacaaagtattcacagaaattccaggacagaatcaccattaccctcgacacatccgcggccacagcctacatggaactgagcagcctgacatctgaagacacggctatttactactgtgcgagatctcgatcctgtgactattggggccagggaaccctggtcaccgtatcctca

SEQ ID NO: 12049 - DNA, 276 bp, Homo sapiens
  source 1..276: mol_type = other DNA
gcttctggatttaggctcactgacaatgatatacattgggtgcgccaggcccccggacaaaggtttgagtggatgggatggatcagcgctgcccatggtaacacaaaatattcacagaaattccaggacagaatcaccattaccctcgacacatccgcggccacagcctacatggaactgagcagcctgacatctgaagacacggctatttattactgtgcgagatctcgatcctgtgactattggggccagggaaccctggtcactgtatcctca

SEQ ID NO: 12050 - DNA, 276 bp, Homo sapiens
  source 1..276: mol_type = other DNA
gcttctggatttaggctcactgacaatgatatacattgggtgcgccaggcccccggacaaaggtttgagtggatgggatggatcagcgctgcccatggtaacacaaagtcttcacagaaattccaggacagaatcaccattaccctcgacacatccgcggccacagcctacatggaactgagcagcctgacatctgaagacacggccatttactactgtgcgagatctcgatcctgtgactattggggccagggaaccctggtcaccgtctcctca

SEQ ID NO: 12051 - DNA, 276 bp, Homo sapiens
  source 1..276: mol_type = other DNA
gcttctggatttaggctcactgacaatgatatacattgggtgcgccaggcccccggacaaaggtttgagtggatgggatggatcagcgctgcccatggtaactcaaagtatgcacagaaattccaggacagaatcaccattaccctcgacacatccacggccacagcctacatggaactgagcagcctgacatctgaagacacggctatttactactgtgcgagatctcgatcctgtgactattggggccagggaaccctggtcaccgtatcctca

SEQ ID NO: 12052 - DNA, 276 bp, Homo sapiens
  source 1..276: mol_type = other DNA
gcttctggatacaccttcactaacaatgatatacattgggtgcgccaggcccccggacaaaggcttgagtggatgggatgggtcagcgctgccaatggtaacacaaaatattcacagaagttccaggacagagtcaccattaccagggacccatccgcgaccacagcctacatggagctgagcagcctgacatctgaagacacggctgtgtattactgtgcgaggtcgaggagctgtgactaccggggccagggaaccctggtcaccgtctcctca

SEQ ID NO: 12053 - DNA, 276 bp, Homo sapiens
  source 1..276: mol_type = other DNA
gcttctggatacaccttcactaacaatgatatacattgggtgcgccaggcccccggacaaaggcttgagtggatgggatgggtcagcgctgccaatggtaacacaaaatattcacagaagttccaggacagagtcaccattaccagggacccatccgcgaccacagcctacatggagctgagcagcctgacatctgaagacacggctgtgtattactgtgcgaggtcgaggagctgtgactactggggccagggaaccctggtcaccgtctcctca

SEQ ID NO: 12054 - DNA, 283 bp, Homo sapiens
  source 1..283: mol_type = other DNA
tgcagcctctggattcacctttagtagctattggatgaactgggtccgccaggctccagggaaggggctggagtgggtggccaacataaagcacgatggaagtgagacatattatgtggactctgtgaagggccgattcaccatctccagagacaacgccaagaactcactgtatctgcaagtgaacagcctgagagtcgaggacacggctgtgtattactgtgtgagaggtagtggttattatatttattggggccagggaaccctggtcaccgtctcctca

SEQ ID NO: 12055 - DNA, 283 bp, Homo sapiens
  source 1..283: mol_type = other DNA
tgcagcctctggattcacctttaggagttattggatgagttgggtccgccaggctccagggaaggggctggagtgggtggccaacataaagcacgatggaagtgagaaaaactatgtggactctgtgaagggccgattcaccatctccagagacaacgccaagaactcactgtatctgcaaatgaacagcctgagagccgaggacacggctgtgtattactgtgtgaggggcagtggctactacatatactggggccagggaaccctggtcaccgtctcctca

SEQ ID NO: 12056 - DNA, 283 bp, Homo sapiens
  source 1..283: mol_type = other DNA
tgcagcctctggattcacctttagtaaccattggatgagctgggtccgccaggctccagggaaggggctggagtgggtggccaccataaaggaagatggaactgagaaatactatgtggattctgtggagggccgattcaccgtctccagagacaacgccaggaactcacagtatctacaaatgaacagcctgagagccgaggacacggccgtgtattactgtgtgagaggtagtggttattacatctattggggccagggaacccaggtcaccgtctcctca

SEQ ID NO: 12057 - DNA, 298 bp, Homo sapiens
  source 1..298: mol_type = other DNA
tgcagcctctgggttcaccttcagcggctctgctatgcactgggtccgccaggcttccgggaaagggctggagtgggttggccgtattagaagcaaaggtaacaattacgcgacagcatatgctgcgtcggtgaaaggcaggttcaccatctccagagatgattcaaagaacacggcctatctgcaaatgaacagcctgaaaaccgaggacacggccgtgtattattgtactagaccacggggagctggcaactggctcgacccctggggccagggaaccctggtcaccgtctcctca

SEQ ID NO: 12058 - DNA, 298 bp, Homo sapiens
  source 1..298: mol_type = other DNA
tgcagcctctgggttcaccttcagcggctctgctatgcactgggtccgccaggcttccgggaaagggctggagtgggttggccgtattagaagcaaaggtaacaattacgcgacaacatatgctgcgtcggtgaaaggcaggttcaccatctcccgagatgattcaaagaacacggcctatctgcaaatgaagagcctgaaaaccgaggacacggccgtgtattattgtactagaccacggggagctggcaactggctcgacccctggggccagggaaccctggtcaccgtgtcctca

SEQ ID NO: 12059 - DNA, 298 bp, Homo sapiens
  source 1..298: mol_type = other DNA
tgcagcctctgggttcaccttcagtgcctctgctatgcactgggtccgccaggcttccggcaaaggactggagtgggttggccgtattagaagcaaagctaacaattacgcgacagcatatactgcgtcgctgaaaggcaggtttagcatctccagagatgattcgaagaacacggcatatctgcaaatgaatagcctaaaaaccgaggacacggccgtgtatttctgtactagacccagaggagcgggaaactggctcgacccctggggccagggaaccctggtcaccgtctcctca

SEQ ID NO: 12060 - DNA, 276 bp, Homo sapiens
  source 1..276: mol_type = other DNA
gcctctggatacacattcatcagttatgatattcattgggtgcgacaggccactggccaagggcttgagtggatgggatcaatgaaccctaagaatggaaatacacgccttgtacagaaattccagggcagagtcaccatgaccaggaacacctccataggaacagcctacttggaactggaaaacctgagatctgatgacacggccatttattactgtgcgagaggcgaaaggttggacacctggggccagggaaccctggtcaccgtctcctca

SEQ ID NO: 12061 - DNA, 276 bp, Homo sapiens
  source 1..276: mol_type = other DNA
gcttctggatacaccttcagcattttcgatattagttgggtgcgacaggcccccggacaagggcttgagtggatgggatggatgaatcccaagaatggaaacacaggctatgcacagaagttccagggcagggtcaccatgaccagggacacctccatgagtacagcctacatggaggtgatcagcctgagacctgaggactcgggcatttattactgcgcgagaggcgaacgactcgacacctggggccagggaaccctggtcagcgtctcttca

SEQ ID NO: 12062 - DNA, 286 bp, Homo sapiens
  source 1..286: mol_type = other DNA
tgcagcctctggattcagttttagcaacacctggatgaactgggtccgccaggttccagggaaggggctggagtggatcggccgcattaaagggaaggctgaaggtgtgacaacagattacgctacagccgtgaagggcaaattcaccatctcaagagatgattcaaaaaacacgctgtatttacaaatgaccagcctgaaaagcgaggacacaggcctttattattgtgccaacggatcttggttcgacccctggggccagggaaccctggtcaccgtctcctca

SEQ ID NO: 12063 - DNA, 286 bp, Homo sapiens
  source 1..286: mol_type = other DNA
tgcagcctctggattcactttcagttacgcctggatgagctgggtccgccaggctccagggaaggggctggagtgggttggccgtattaaaagcaaaactgatggtgggacaacagactacgctgcacccgtgaagggcagattcaccatctcaagagatgattcaaaaaacacgctgtatctgcaaatgaacagcctgaaaattgaggacacagccgtgtattactgtgccaacggtagctggttcgacccctggggccagggaaccctggtcaccgtctcctca

SEQ ID NO: 12064 - DNA, 296 bp, Homo sapiens
  source 1..296: mol_type = other DNA
ccatctccggggacagtgtctctagcaacagtgttacttggaactggatcaggcagtccccatcgagaggccttgagtggctgggaaggacatactacaggtccaagtggcataatgattatgcagtatctgtgaaaagtcgaataaccatcaacccagacacatccaagaaccagttctccctgcagctgaactctgtgactcccgaggacacggctgtgtattactgtgcaagatctggttcgggcggttcacttgactactggggccagggaaccctggtcaccgtctcctca

SEQ ID NO: 12065 - DNA, 296 bp, Homo sapiens
  source 1..296: mol_type = other DNA
ccatctccggggacagtgtctctagcaacagtgctgcttggaactggatcaggcagtccccatcgagaggccttgagtggctgggaaggacatatcacaggtccaagtggaataataattatgcagtatctgtgaaaagtcgaataaccatcaacccagacacatccaagaaccagttctccctgcagctgaactctgtgactcccgaggacacggctgtgtattactgtgcaaggagtggtagtggtggttcccttgactactggggccagggaaccctggtcaccgtctcctca

SEQ ID NO: 12066 - DNA, 288 bp, Homo sapiens
  source 1..288: mol_type = other DNA
gcttctggatattccatcactagatattctgtgcattgggtgcgccaggcccccggacaaatccttgagtggatgggatggatccatgcttccactggtgacgcaggatattcacaggagttccagggcagagtcaccattaccagggacacatccgcgaacacagtctacatggagttggggagcctgacatctgaagacacgggtgcatacttctgtgcgagagatgacggcaacacctggttactcgactactggggccagggaaccctggtcaccgtctcctca

SEQ ID NO: 12067 - DNA, 288 bp, Homo sapiens
  source 1..288: mol_type = other DNA
gcttctggatacaccttcaatagatattctatacattgggtgcgccaggcccccggacagaggcttgagtggatgggatggatcaacggtgccaatggtaacatagaatattcacagaagtttcagggcggagtcaccattacctgggacacatccgcgaatacagtctacatggagttgaaaagcctgaaatctgatgatatggctttgtatttctgtgcgagagatgacggcaacacctggctccttgactactggggccagggaagcctggtcaccgtctcctca

SEQ ID NO: 12068 - DNA, 274 bp, Homo sapiens
  source 1..274: mol_type = other DNA
tgcagcctctggatttagcttaagcagttattccatgagctgggtccgccaggctgcagggaaggggctggagtgcgtctcagttattagtagtagtggtaccacatactacgcagactccgtgaagggccggttcaccatctccagagacaattccaagaacacgctgtatctgcaaatgaacagcctgagagtcgaggacacggccttatattactgtgcgagacatgggggtgactactggggccaggggaccctggtcaccgtctcctca

SEQ ID NO: 12069 - DNA, 277 bp, Homo sapiens
  source 1..277: mol_type = other DNA
tgcagcctctggattcacctttaacaactatgccatgacctgggtccgccaggctccagggaaggggctggagtgggtctcaagtcttagtggtgatggtggtagcacatactatgcagactccgtgaagggccggttcaccatctccagggacaattccaagaacacactgtctctgcaaatgaacagcctgagagccgaggacacggccctatattactgtgcgagacatggtggcgactactggggccagggaaccctggtcaccgtctcctca

SEQ ID NO: 12070 - DNA, 304 bp, Homo sapiens
  source 1..304: mol_type = other DNA
tgcagcctctggattcaccttcagtaactactggatgcactgggtccgccaagctccagggaaggggctggtgtgggtctcacgtattaatagtgatgaagttgacacaacccacgcggactccgtgaagggccgattcaccatctccagagacaacgccaagaacacggtgtatctgcaaatgaacagtctgagagccgaggacacggctatttattactgtgcaagagggggcatcagcagctggacccgcccgtacttctttgactactggggccagggaaccctggtcaccgtctcctca

SEQ ID NO: 12071 - DNA, 304 bp, Homo sapiens
  source 1..304: mol_type = other DNA
tgcagcctctggattcaccttcagtgactactggctgcactgggtccgccaaggtccagggaaggggctggtgtgggtctcacgtattaaaagtgatgagactaccaaatactacgcggacaccgtgaagggccgattcaccatctccagagacaacgccaagaacacggtgtacttgcaaatgaacggtctgagagccgaggacacggctgtgtattactgtgcaagagggggtatcagtagctggacccgaccctatttctttgactactggggccagggaaccctggtcaccgtctcctca

SEQ ID NO: 12072 - DNA, 277 bp, Homo sapiens
  source 1..277: mol_type = other DNA
tgcagcctctggatctggattcacctttagcatctctgacatgaattgggtccgccaggctccagggaaggggctggagtggatctcacgtgttaatggtagaggtgattttacatattatgtagactcagtgaagggccggtttaccatctccagagacaattcaaagaatatcctgtatctacaaatgaacagcctgcgatccgaggacacggccgtatattactgtgcgggattgtggcaatggggccagggaaccctggtcaccgtctcctca

SEQ ID NO: 12073 - DNA, 271 bp, Homo sapiens
  source 1..271: mol_type = other DNA
tgtagcctctggagtcacctttagcaactatgacatgcactgggtccgccaggttccaggaaaggggctggagtgggtctcaagtatttttggtggtgatggtcgcacatactacgcagactccgtgaagggccggttcaccgtctccagagacacttccaaggacacggtgtatctgcaaatgaatagcctgagagccgaagacacggccgtatatttctgtgcgggactttggcagtggggccagggaaccctggtcaccgtctcctca

SEQ ID NO: 12074 - DNA, 286 bp, Homo sapiens
  source 1..286: mol_type = other DNA
tgcagcctctggattcacttttagttatatctggatgagttgggtccgccaggctccagggaaggggctggagtgggttggccgtattaaaagcaaaactgatggtgggacaactgactacgctgcacccgtgaaaggcagattcaccatctcaagagatgattcaaacaatacgctgtatctgcaaatgaaaagcctgcaaaccgaggacacagccgtgtattactgtgtcacagatgacgacggggcctactggggccagggaaccccggtcatcgtctcctca

SEQ ID NO: 12075 - DNA, 286 bp, Homo sapiens
  source 1..286: mol_type = other DNA
tgtagcctccggattcagtttcagttacatctggatgagttgggtccgccaggctccagggaaggggctggagtgggttggccgcattagaagcaacgatgacggcggcacaacagacattgcagaagccgtgaaaggcagattcatcatctcaagagatgattccagaaacacggtgtatctggaaatgaaccgcctgaaaacagaggacacaggcagatattattgtgtgacagatgacgatggggcctattggggccagggaaccctggtcgccgtctcctca

SEQ ID NO: 12076 - DNA, 286 bp, Homo sapiens
  source 1..286: mol_type = other DNA
tgcagcctctggattcaccttcagttacatttggatgagttgggtccgccaggctccagggaaggggctggagtgggttggccgtattagaagtaacactgatggtgggaccacagactacgctgcacccgtgaagggcagattcatcatctcaagagatgattcgaagaacaccgtgtttctgcacatgaacagcctgaaaaccgaggacacaggcgtttattattgtgtcaccgatgacgatggggcctactggggccagggagccctggtcaccgtctcctca

SEQ ID NO: 12077 - DNA, 274 bp, Homo sapiens
  source 1..274: mol_type = other DNA
tgcagcctctggattcacttttagtagctattggatgagctgggtccgccaggctccagggaaggggctggagtgggtggccaacataaaacaagatggaagtgagacatattatgtggactctgtgaagggccgattcaccatctccagagacaacgccaataactcactgtatctgcaaatgcacaacctgagagccgaagatacggccgtatattactgtgcgagtggcaccgcccactggggccagggaaccctggtcaccgtctcctca

SEQ ID NO: 12078 - DNA, 274 bp, Homo sapiens
  source 1..274: mol_type = other DNA
tgcagcctctggattcacctttagtgactattggatgagctgggtccgccaggctccagggaagggactggagtgggtggccaacataaagcaagatggaagtgagaaatactatgtggactctgtgaagggccgattcaccatctccagagacaacgccaagaactcactgtttctgcaaatgaacagcctgagagccgaagacacggccctatattactgtgcgagcggcaccgcccactggggccagggaaccctggtcaccgtctcctca

SEQ ID NO: 12079 - DNA, 274 bp, Homo sapiens
  source 1..274: mol_type = other DNA
tgcagcctctggattcacgtttagtagctattggatgagctgggtccgccaggctccagggaaggggctggagtgggtggccaacataaagcaagatggaaatgaaaaatactatgtggactctgtgaagggccgattcaccatctccagagacaacgccgagaactcactgtatctgcaaatgaacagcctgagagccgaggacacggctgtgtattactgtgcgagtggtacggcccactggggccagggaaccctggtcaccgtctcctca

SEQ ID NO: 12080 - DNA, 304 bp, Homo sapiens
  source 1..304: mol_type = other DNA
cactgtctctggtgcctccatcaaccataggagtttctactggggctggatccgccagccccccgggaagggactggagtggattggcaatatctattatagtgggaacacctactacaagccgtccctcaagagtcgagtcaccatatccgtggacacgtccaagaatcagttctctctgaatatgaagtctgtgaccgccgcagacacggctgtctattactgtgcgagacatgacgtcgggtacagcaccagctggttcttggactcctggggccagggagccctggtcaccgtctcccca

SEQ ID NO: 12081 - DNA, 304 bp, Homo sapiens
  source 1..304: mol_type = other DNA
cactgtctctggtggctccatcaacactcgtagttactactggggctggatccgccagcccccagggaagggactggaatggattgggaatatctattatagtgggaacacctactacaagccgtccctcaagagtcgactcaccatatccgttgacacgtccaaggaccagttctccctgaagctgacctctgtgaccgccgcagacacggctgtctattactgtgcgagacatgatgtgggatatagtaccagttggttccttgactcctggggccagggaaccctggtcaccgtctcctca

SEQ ID NO: 12082 - DNA, 286 bp, Homo sapiens
  source 1..286: mol_type = other DNA
tgcggcctctggattcacctttcgtgactattggatgagttgggtccgccaggctccagggaaggggctggagtgggtggccgatataaaatatgatgcaggtcagaaaaattatgtggactctgtgaagggccgattctccatctccagagacgacgccaggaactcactgtatctgcgaatgaacagcctgagagtcgaggacacggctatatattattgtgcgagagtggccgcgtctggccttgactactggggccagggagtcctggtcaccgtctcctca

SEQ ID NO: 12083 - DNA, 286 bp, Homo sapiens
  source 1..286: mol_type = other DNA
tgcagcctctggattcgtcttttctgactattggatgggttgggtccgccaggctccagggcaggggctggagtgggtggccaatctgcagtatgatgacggtgaaataaactatgcggacactgtgaagggccgattcaccatttccagagacgacgtcaagacgtcactatatctgcagatgaacagcctgagagccgaagacactgctgtctattactgtgcgagagtcgcagcttctggccttgactactggggccagggaacccaggtcaccgtctcctca

SEQ ID NO: 12084 - DNA, 283 bp, Homo sapiens
  source 1..283: mol_type = other DNA
tgcagcctctgggttcacctttagcagccaagccatgagctgggtccgccaggctccagggaaggggctggagtgggtctcagttgtctatggcagtggtaatagtgcgtatgcagattccgtgaagggccggttcaccatctccagagatacttccaagaacacgctgtttctgcaaatgaacagcctgagagccgaagacacggccatatattactgtgttaaaggcagcagctgggggggtgactactggggccagggaaccctggtcaccgtctcctca

SEQ ID NO: 12085 - DNA, 295 bp, Homo sapiens
  source 1..295: mol_type = other DNA
tgcagcctctggattcacctttactacgcaagccatgagctgggtccgccaggctccagggaaggggctggagtgggtctcatttattagtggtgattggggtagtggtgttagcacatactacgcagactccgtgaagggccggttcaccatctccagagacaattccaagaacacactgtatttactaatgaacagcctgagagccgaggacacggccgtatattattgtgtgaaaggcagcagctggggaggggactactggggccagggaacccgggtcaccgtctcctca

SEQ ID NO: 12086 - DNA, 289 bp, Homo sapiens
  source 1..289: mol_type = other DNA
cactgtctctagtggctccatcagcggtactagttactactggggctggatccgccagcccccagggaaggggctggagtggattgggagcgtctattatagtgggagcacctactacaatccgtccctcaagagtcgagtcaccatatccgttgacacgtccaagaaccacttctccctgaagctgaggtctgtgaccgccgcagacacggctgtgtattactgtgcgagacgcgatggaggctggttcgacccctggggccagggaaccctggtcaccgtctcctca

SEQ ID NO: 12087 - DNA, 289 bp, Homo sapiens; identical to SEQ ID NO: 12086
  source 1..289: mol_type = other DNA

SEQ ID NO: 12088 - DNA, 289 bp, Homo sapiens
  source 1..289: mol_type = other DNA
cactgtctctggtggctccatcagcagtagtagctactactggggctggatccgccagcccccagggaaggggctggagtggattgggaatatctattatagtgggagcccctactataacccgtccctcaagagtcgagtcaccatatccctagacacgtccaagaaccagttctccctgaagctgagctctgtgaccgccgcagacacggctgtgtattactgtgcgagaagggatggagggtggttcgacccctggggccagggaaccctggtcaccgtctcctca

SEQ ID NO: 12089 - DNA, 304 bp, Homo sapiens
  source 1..304: mol_type = other DNA
tgcagcctctggattcatcttcagtagctatgctatgcactgggtccgccaggctccaggcaaggggctggagtgggtggcaattatatcatctgatggaactaataaatattacgcagactccgtgaagggccgattcaccatctccagagacaattccaagaacacgctgtatctgcaaatgaacagcctgagagctgaggacacggctatgtattactgtgcgagaggtcgccttccttcgcactactactactacggtatggacgtctggggccaagggaccacggtcaccgtctcctca

SEQ ID NO: 12090 - DNA, 304 bp, Homo sapiens; identical to SEQ ID NO: 12089
  source 1..304: mol_type = other DNA

SEQ ID NO: 12091 - DNA, 304 bp, Homo sapiens
  source 1..304: mol_type = other DNA
tgcagcctctggattcaccttcagtaactatgctatgcactgggtccgccaggctccaggcaaggggctggagtgggtggcagttatctcatatgatggaagtaataaatactacgcagactccgtgaagggccgattcaccatctccagagacaattccaagaacacgctgtatctgcaaatgaacagcctgagagctgaggacacggctgtgtattactgtgcgagagggagactaccgagtcactactactactacggtatggacgtctggggccaagggaccacggtcaccgtctcctca

SEQ ID NO: 12092 - DNA, 292 bp, Homo sapiens
  source 1..292: mol_type = other DNA
cactgtctctggtgtctccatcagcactagtaattcctactggggctggatccgccagcccccagggaagggactggagtggattgggagtatctattatagtggaagcacctactacaacccgtccctcaagagtcgagtcaccatatccctagacacgtccaagaaccagttctccctgaagctgaactctgtgaccgccgcagacacggctgtgtattactgtgcgagaccttactctgatcatgcttttgatatctggggccaagggacaatggtcaccgtctcttca

SEQ ID NO: 12093 - DNA, 292 bp, Homo sapiens
  source 1..292: mol_type = other DNA
cactgtctctggtgtctccctcagcagtagtaattcctactggggctggatccgccagcccccagggaagggactggagtgggttgggagtatctattatagtggaaacacctactacaagccgtccctcaagagtcgagtcaccatatccctagacacgtccaagaaccagttctccctgaagttgacctctgtgaccgccgcagacacggctgtgtattactgtgcgagaccttactctgatcatgcttttgatatctggggccaagggacaatggtcaccgtctcttca

SEQ ID NO: 12094 - DNA, 292 bp, Homo sapiens
  source 1..292: mol_type = other DNA
cactgtctctggtggctccctcagcagtggtacttactactgggcctggatccgccagcccccagggaagggactggagtggattgggagtatctactacagtgggaccacgtactacagcccgtccctcaagagtcgagtcaccatatccatagacacatccaagaatcagttctccctgagactgagctctgtgaccgccgcagacacggctttatattactgtgcgagaccttattctgaccatgcttttgatatctggggccaagggacagtggtcaccgtctcttca

SEQ ID NO: 12095 - DNA, 289 bp, Homo sapiens
  source 1..289: mol_type = other DNA
tgcagcctctggattcaccttcagtagttttgaaatgaactgggtccgccaggctccagggaaggggctggagtgggtttcacacatcagtagtagtggtagcaccatatattatgcagactctgtgaagggccgattcaccatctccagagacaacgccaagaactcactgtatctgcaaatgaacagcctgagagccgaggacacggctgtttattactgtgcgagagattggcgagtctactactttgactactggggccagggaaccctggtcaccgtctcctca

SEQ ID NO: 12096 - DNA, 289 bp, Homo sapiens
  source 1..289: mol_type = other DNA
tgcagcctctggattcaccttcagtagctatagcatgaactgggtccgccaggctccagggaaggggctagagtggatttcatacattagtagtagtactactaccatatactatgcagactctgtgaagggccgattcaccatctccagagacaatgtccacaactcactgtatctgcaaatgaccagcctgagagacgaggacacggctgtctattactgtgcgagagattggagggtttactactttgactactggggccagggaaccctggtcaccgtctcctca

SEQ ID NO: 12097 - DNA, 301 bp, Homo sapiens
  source 1..301: mol_type = other DNA
tgcagcgtctggattcagcgtcagcaattatggcacacactgggtccgccagcctccaggcaaggggctggagtgggtggcaatgatgccgcatgatggaagtactccatattacacagactccgtgaagggccgattcattatctccagagacaattccaagaacacggtgtttctgcaaatgaacagcctgagagtcgacgacacggctctctattactgtgcgagagattggggtattagtggctggtacaactggttcgacccctggggccagggaaccctggtcaccgtctcctca

SEQ ID NO: 12098 - DNA, 298 bp, Homo sapiens
  source 1..298: mol_type = other DNA
tgcagcctcaggattcaccttcagtaattatggaatgcactgggtccgccaggctccaggcaaggggctggagtgggtggcaattatagcatatgatggaactattaagtatgaagactccgtggagggccgattcaccatctccagagacaattccaagaacacgttgtatctgcaaatgaacagcctgagacctgaggacacggctgtgtattattgtgcgagagattggggtatcagtggctggtacaactggttcgacccctggggccagggaaccctggtcaccgtctcctca

SEQ ID NO: 12099 - DNA, 292 bp, Homo sapiens
  source 1..292: mol_type = other DNA
cactgtctctggtgactccatcagtagttacttctggagctggatccggcagcccccagggaagacactagagtggattgcgtatattcattacagtgggaacaccaactacaacccctccctcaagagtcgagtcaccatatcagtagacacgtccaagaaccaggtctctctgaagctgaggtctgtgaccgccgcagacacggccgtctattactgtgcgagacactatgcttcggggacttatccccttgaccactggggccagggaaccctggtcaccgtctcctca

SEQ ID NO: 12100 - DNA, 292 bp, Homo sapiens
  source 1..292: mol_type = other DNA
cactgtctctggtgactccgtcaataattactactggagctggttccggcagaccccagggaagggactggagtggattggttataaccattacagtgggaccagcaactacaacccctccctcaagagtcgactcaccatatcagttgacacgtccaggaaccaaatctccctgaagctgaactctgtgaccgctgcggacacggccgtgtattactgtgcgagacactatgcttcggggacttaccccttggaccactggggccagggaaccctggtcatcgtttcctca

SEQ ID NO: 12101 - DNA, 289 bp, Homo sapiens
  source 1..289: mol_type = other DNA
tgcagcctctggattcacgttcagtgaccacaacatggagtgggtccgccaggctccagggaaggggctggagtgggttggccgtgcccggagcaaacatgacagatacaccgtgcaatacgccgcgtctgtgaaaggcagattcaccatctcaagagttgattcacagaactcactgtatctgcagatgaacagcctgagaaccgaggacacggccgtctattactgtgcctctagtcttaattactattcatggtggggccagggaaccctggtcaccgtctcctca

SEQ ID NO: 12102 - DNA, 289 bp, Homo sapiens
  source 1..289: mol_type = other DNA
tgcagcttctggattcaccttcagtgaccacaacatggactgggtccgccaggctccagggaaggggctggagtgggttggccgcactagaaacaaagctgacagttacaccacagaatacgccgcgtctgtgaaaggcagattcaccatctcaagagatgattcaaagaactcactgtatctgcaaatgaacagcctgaaaaccgaggacacggccgtgtattactgtgctagctcactaaattactatagctggtggggccagggaaccctggtcaccgtctcctca

SEQ ID NO: 12103 - DNA, 270 bp, Homo sapiens
  source 1..270: mol_type = other DNA
gcttctggattcacctttagtaagtctgctatacagtgggtgcgacaggctcgtggacaacgccttgagtggataggatggatcgtcgttggcagtggtgacacaaactacgcacagaagttccaggaaagagtcaccattaccagggacatgtccacaagcacagcctacatggacctgagcagcctgaaatccgaggacacggccgtgtattactgtgtggcagactgggctgtttggggccagggaaccctggtcaccgtctcctca

SEQ ID NO: 12104 - DNA, 270 bp, Homo sapiens
  source 1..270: mol_type = other DNA
gcttctggattcacatttagtcggtctgctatgcagtgggtgcgacaggctcgtggacaacactttgagtggatgggttgggtcgtcgttgatagtggcgacacaaaatacgcacagaagtttcaggaaagagtcaccatgactagggacatgtctacaaacacagcctacatggagctgaacagcctgacatccgacgacacggccgtatattactgtgtggcggactgggcagtctggggccagggaaccctggtcaccgtctcctca

SEQ ID NO: 12105 - DNA, 313 bp, Homo sapiens
  source 1..313: mol_type = other DNA
tgcagcctctggattcaccttcagtaactatgacatgaactgggtccgccaggttccagggaaggggctggagtgggtctcatcaatcagtggaactagaagttacagatactacgcagactcagtgaagggccgattcaccatctccagagacaacgccaagaactcactgtctctgcaaatgagcagcctgcgagccgaggacacggctgtttattactgtgcgagagagacctatggttcggggagttattttgactactactacggtatggacgtctggggccaagggaccacggtcaccgtctcctca

SEQ ID NO: 12106 - DNA, 313 bp, Homo sapiens
  source 1..313: mol_type = other DNA
tgcagcctctggattcaccttcagtagctatagcatgaactgggtccgccaggctccagggaaggggctggagtgggtctcatccattagtagtagtagtaggtacatatactacgcagactcagtgaagggccgattcaccatctccagagacaacgccaagaactcactgtatctgcaaatgaacggcctgagagccgaggacacggctgtgtattactgtgcgagagagacctatggttcggggagttattttgactactactacggtatggacgtctggggccaagggaccacggtcaccgtctcctca

SEQ ID NO: 12107 - DNA, 288 bp, Homo sapiens
  source 1..288: mol_type = other DNA
gcctctggttacacctttaccaaatatggtattacgtgggtgcgacaggcccctggacaaggacttgagtggatgggatggatgagcgctgacaacggtaacacagattatgcacagaaacttcagggcagaatcaccatgaccacagacacatccacgagcacagcctacatggacctgaggaccctgagatctgacgacacggccatgtactactgtgcgaggtttggtgtaactggggatggctctgatatctggggccaagggacaatggtcaccgtctcttca

SEQ ID NO: 12108 - DNA, 288 bp, Homo sapiens
  source 1..288: mol_type = other DNA
gcttctggttacacctataccacctatggtatcagctgggtgcgacaggcccctggacaagggcttgagtggatgggatggatcagcgctgacaatggtaacacagactatgcacagaaactccagggcagagtcaccatgaccacagacacatccacgagcacagcctacatggaactgaggagcctgagatctgacgacacggccgtgtattactgtgcgagatttggggtgactggggatggttctgatatatggggtcaagggacaatggtcaccgtctcttca

SEQ ID NO: 12109 - DNA, 298 bp, Homo sapiens
  source 1..298: mol_type = other DNA
tggaacctctggattcaccttcaatacttatgaaatgaattgggtccgccaggctccagggaaggggctggagtggatttcttacattaataggagtgggtctctcatatactacgcagactctgtgaagggccgattcaccatctccagagacaacgccaagaacgaactctatctgcaaatgaacagcctgagagccgaggacacggctgtttactactgtgcgagagaaagatgtagtacgaacagttgctacctaaattactggggccagggaaccctggtcaccgtctcctca

SEQ ID NO: 12110 - DNA, 298 bp, Homo sapiens
  source 1..298: mol_type = other DNA
tgcagcctctggattcaccttcagttcttatgaaatgaactgggtccgccaggctccagagaaggggctggagtgggtttcatacatcaatagggggagtagtctcataaagtacgcagactctgtgaagggccgattcacaatctccagagacaacgccaaggactcactgtatctgcaaatgaacagcctgagagccgaggatacggctgtttattattgtgcgagagagcgttgtagtactaacagctgctatttgaactactggggcccgggaaccctggtcaccgtctcctca

SEQ ID NO: 12111 - DNA, 301 bp, Homo sapiens
  source 1..301: mol_type = other DNA
tgcagcctctggattcaccttcagtagtcactggatggactgggtccgccaagttccagggaagggactggtttgggtctcacgtattcagattgatgggagtagtgcggactacgtagcctacgctgacttcgtgaggggccgattcaccatctccagagacaacgccaagaatacgctgtatctgcagatgaacagtctgagcgtcgaggacacggctgtatattactgtgcgagagatggcggctatgggacccccttcgactactggggccagggaaccctggtcaccgtctcctca

SEQ ID NO: 12112 - DNA, 301 bp, Homo sapiens
  source 1..301: mol_type = other DNA
tgcagcctctggattcagcttcagtagccactggatggactgggtccgccaagttccagggaagggactggtatgggtctcacgcattcagattgatgggagtagttcaaactacgtaagctacgcggacttcgtgaagggccgattcaccatctccagagacaacgccaagaatacgctgtatctgcagatgaacagtctgagcgccgaggacacggctgtgtattactgtgcgagagatggcggctatgggaccccctttgactactggggccagggaaccctggtcaccgtctcctca

SEQ ID NO: 12113 - DNA, 292 bp, Homo sapiens
  source 1..292: mol_type = other DNA
cacagcctctggattcacctttagtaattactgggtgcattgggtccgccaagctccagggaaggggccggtgtgggtctcacgtattactagtgacgggagtaccacagcctacgcggactccgtgaagggccgattcaccatctccagagataacgccaagaacacggtgtttctgcaaatgaacagtctgagagccgaagacacggctgtctattactgtgcaagagatgggggctacgggaccccctttgactactggggccagggaaccctggtcaccgtctcctca

SEQ ID NO: 12114 - DNA, 292 bp, Homo sapiens
  source 1..292: mol_type = other DNA
cacagcctctggattcacctttagtaattactggatacattgggtccgccaagctccagggaaggggccggtgtgggtctcacgtattacttatgacgggagtaccacagcctacgcggactccgtgaagggccgattcaccatctccagagaaaacgccaagaacacggtgtatctgcaaatgaacagtctgagagccgaagacacggccgtatattattgtgcaagagatgggggctacgggaccccctttgactactggggccagggaaccatggtcaccgtctcctca

SEQ ID NO: 12115 - DNA, 298 bp, Homo sapiens
  source 1..298: mol_type = other DNA
tgcagcctctggattcactttcagtaacgcctggatgacctgggtccgccagtctccagggaaggggctggagtgggttggccgtattaagagcaaaattgatggtgagacaacagactactctgcacccgtgaaaggcagattcaccatctcaagagatgattcaaaagacacactgtatctgcaaatgaacagcctgagaatcgaggacacagccgtgtattactgttccacgaatttctatggttcgggcccctttgactactggggccagggaaccctggtcaccgtctcctca

SEQ ID NO: 12116 - DNA, 298 bp, Homo sapiens
  source 1..298: mol_type = other DNA
tgcagcctctggattcactttcagtaacgcctggatgacctgggtccgccaggctccagggaaggggctggagtgggttggccgtattaaaagcaaaactgatggtgggacaatagactacgctgcacccgtgaaaggcagattcaccatctcaagagatgattcaaaaaacacgctatatctgcaaatgaacagcctgaaaaccgaggacacagccgtgtattactgtagcaccaacttctatggttcggggccctttgactactggggccagggaaccctggtcaccgtctcctca

SEQ ID NO: 12117 - DNA, 295 bp, Homo sapiens
  source 1..295: mol_type = other DNA
cactctctctgctggctccatcagaagttactactggagctggatccggcagcccccagggaagggactggagtggattgggtatatctattacactgggagcaccacctacaacccctccctcaagagtcgagtcaccatatcagtagacacgtccaagatccagttctctctgaagctgagctctgtgaccgctgcggacacggccttttattactgtgcgagagcaggatacatctatggtgctgatgcttttgatatctggggccaagggactttggtcaccgtctcttca

SEQ ID NO: 12118 - DNA, 295 bp, Homo sapiens
  source 1..295: mol_type = other DNA
cactgtctctggtggctccatcagtagtttctactggagttggatccggcagcccccggggaggggactggagtggattgggtatgtctcttacagtgagaacatcagctacaacccctccctcaagagtcgagtcaccatatcagtagacacgtccaagaaccaactcgccctgaaggtgaggcctgtgaccgctgcggacacggccgtgtattactgtgcgagagcgggatacatctatggtgcagatgcttttgatatctggggccacgggaaaatggtcaccgtctcttca

SEQ ID NO: 12119 - DNA, 277 bp, Homo sapiens
  source 1..277: mol_type = other DNA
tgcatcctctggattcaccttttacagctatgccatgacctgggtccgccaggctccagggaaggggctggactgggtctcacttattgatagcggtggtaggaacacatactatgcagactccgtgaagggccggttcagcatctccagggataattccaagaacatgttgtatttgcaaatgaacagcctgagagccgaggacacggccatatattactgtgcgagaggggacgggctggactggggccagggaaccctggtcaccgtctcctca

SEQ ID NO: 12120 - DNA, 277 bp, Homo sapiens
  source 1..277: mol_type = other DNA
tgtagtcgctggactcacctttagtagccatggcatgacctggctccgccaggctccagggaaggggctggagtgggtctcaactatcagtggaagtggtggtggcacacactacgcagactccgtgaggggccggttcaccatctccagggacaattccaggagcaccttttatctgcaaatgaacagcctgagagccgacgacacggccgtatattactgtgcgaggggggatgggctcgactggggccagggaaccctggtcagcgtctcctca

SEQ ID NO: 12121 - DNA, 298 bp, Homo sapiens
  source 1..298: mol_type = other DNA
cattgtatctggtggctccatcagcactaggaattattactggggctggatccgccagcccccagggaaggggctggaatgtattgggagtgtctactatagtgggatcacctactacaacccgtccctcaagagtcgagtcaccatatcagtggacacgtccaagaaccagttctccctgaagctgagctctgtgaccgccgcagacacggctgtatattactgtgcgagacactggagcagtggctgggactactttgactactggggccagggaaccctggtcaccgtctcctca

SEQ ID NO: 12122 - DNA, 298 bp, Homo sapiens
  source 1..298: mol_type = other DNA
cactgtctctggtggctccatcagcagtagtcgctactactggagctggatccgccagcccccagggaaggggctggagtgcattgggagtatctattatagtgggaacacctactacaacccgtccctcaagagtcgagtcaccatatccttagactcgtccaagaaccagttttccctgaagttgaactctgtgaccgccgcagacacggctgtgtttttctgtgcgaggcattggagcagtggctgggactacttcgactattggggccagggaaccctggtcaccgtctcctca

SEQ ID NO: 12123 - DNA, 299 bp, Homo sapiens
  source 1..299: mol_type = other DNA
ccatctccggggacagtgtctctggcagcagtggtgcttggaactggatcaggcagtccccatcgagaggccttgagtggctgggaaggacataccactcctccaagtggtataatgattatgcagtttctgtgaaaagtcgaataaccatcaacccagacacatccaagaaccagttctccctgcagctggactctgtgactcccgaggacacggctgtttattactgtgcaagagggtggctacgatccgggggttttgcctactggggccagggagccctggtcaccgtctcatca

SEQ ID NO: 12124 - DNA, 299 bp, Homo sapiens
  source 1..299: mol_type = other DNA
ccatctccggggacagtgtctctggcaacagtggtgcttggaactggatcaggcagtccccatcgagaggccttgagtggctgggaaggacatactacgggtccaagtggcaaaatgattatgcagtatctgtgaaaagtcgaataaccatcaacccagacacatccaagaaccagttcaccctgcagctgaactctgtgactcccgaggacacggctgtatactactgtgcaagggggtggctacgttctggaggcttcgcctattggggccagggaacactggtcaccgtctcctca

SEQ ID NO: 12125 - DNA, 292 bp, Homo sapiens
  source 1..292: mol_type = other DNA
tgcagcctctggatttacctttagtgaccactacatggactgggtccgccagactccagggaagggcctggagtgggttggccgtattagaaagaaagttaatagttacaccacagaatatgccgcgtctgtgaaaggcagattcatcatctcaagagatgattcaaagaactcactgtatctgcaaatgaacagcctgagaaccgaggacacggccatgtatttctgtgctagagtgcttgggaattaccttgactactggggccagggaaccctggtcaccgtcccctca

SEQ ID NO: 12126 - DNA, 292 bp, Homo sapiens
  source 1..292: mol_type = other DNA
tgcagcctctggattcaccttcagtgaccactacatggactgggtccgccaggctccagggaaggggctggagtgggttggccgtattagaaacaaacctagcagttacaccacagaatacgccgcgtctgtgaaaggcagattcagcatctcaagagatgattcaaagaacgcactgtttctgcaaatgaacagcctgaaaaccgaggacacggccgtgtattattgtgctagagtcttagggaactaccttgactactggggccagggaaccctggtcaccgtctcctca

SEQ ID NO: 12127 - DNA, 280 bp, Homo sapiens
  source 1..280: mol_type = other DNA
cactgtctctggtggctccatcagtagttactactggagctggatccggcagcccccagggaagggactggagtggattgggtatatctattacagtgggagcaccaactacaacccctccctcaagagtcgagtcaccatgtcagtagacacgtccaagaaccagttctccctgaagctgagctctgtgaccgccgcggacacggccgtgtattactgtgcgagggggggcaccagctggggctactggggccagggaaccctggtcaccgtctcctca

SEQ ID NO: 12128 - DNA, 280 bp, Homo sapiens
  source 1..280: mol_type = other DNA
cactgtctctggtggctccatcagtagtttcttctggagctggatccggcagcccccagggaagggactggaatggattgggtatatctattacagtgggaccaccaactacaacccctccctcaagagtcgagtcaccatatcagtagacacgtccaagaatcagttctccctgatgctgagctccgtgacctctgcggacacggccgtttattactgtgcgagagggggcacctcgtgggggtactggggccagggaaccctggtcaccgtctcctca

SEQ ID NO: 12129 - DNA, 289 bp, Homo sapiens
  source 1..289: mol_type = other DNA
tgcagcctctggattcaccttcagtagctactggatgcactgggtccgccaagctccagggaaggggctggtgtgggtctcacgtattaatagtgatgggagtaccacaagcttcgcggactccgtgaagggccgattcaccatctccagagacaacgccaagaacacgctgtatctgcaaattaagagtctgagacccgaggacacggctgtatattactgtgcgagagagggcagtggctggacgattgactactggggccagggaaccctggtcaccgtctcctca

SEQ ID NO: 12130 - DNA, 289 bp, Homo sapiens
  source 1..289: mol_type = other DNA
tgcagcctctggattcagcctcagtagtaactggatgaactgggtccgccaagctccagggaaggggctggcgtgggtctcacgtattaatagtgatggggggaccacaacctacgcggactccgtgcagggccgattcaccatctccagagacaacgccaagaacaccctatatctgcaaatgaacagtctgaggcccgaggacacggctgtgtactactgtgcaagagaaggcagtggctggacaattgactactggggccgcggaaccctggtcaccgtctcctca

SEQ ID NO: 12131 - DNA, 289 bp, Homo sapiens
  source 1..289: mol_type = other DNA
tgcagcctctggattcagcctcagtagtaactggatgaactgggtccgccaagctccagggaaggggctggtgtgggtctcacgtattaatagtgatgggagtagcacaacctacgcggactccgtgaagggccgattcaccatctccagagacaacgccaagaacacgctgtatctgcaaatgaacagtctgagacccgaggacacggctgtgtattactgtgcaagagaaggcagtggctggacaattgactactggggccggggaaccctggtcaccgtctcctca

SEQ ID NO: 12132 - DNA, 289 bp, Homo sapiens
  source 1..289: mol_type = other DNA
tgcaagctctggattcacctttagtagttattggatgacttgggtccgccaggctccagggaaggggctggagtgggtggccagcataaagacagatgaaagtgagaaaaagtatgtggactctgtgaagggccgattcaccatctccagagacaacgccaagaactcagtgcatctgcaaatgaacagcctgagagccgaggacacggctgtgtattactgtgcgagattagtaggctggggcaggttcgacgcttggggccagggaagcctggtcaccgtctcctca

SEQ ID NO: 12133 - DNA, 289 bp, Homo sapiens
  source 1..289: mol_type = other DNA
tgcaagctctggattcacctttagtagttattggatgacttgggtccgccaggctccagggaaggggctggagtgggtggccagcataaagacagatgaaagtgagaaaaagtatgtggactctgtgaagggccgattcaccatctccagagacaacgccaagaactcagtgcatctgcaaatgaacagcctgagagccgaggacacggctgtgtattactgtgcgagactagtaggctggggcaggttcgacgcttggggccagggaagcctggtcaccgtctcctca

SEQ ID NO: 12134 - DNA, 289 bp, Homo sapiens; identical to SEQ ID NO: 12132
  source 1..289: mol_type = other DNA

SEQ ID NO: 12135 - DNA, 289 bp, Homo sapiens
  source 1..289: mol_type = other DNA
tgcagcctctggattcacattcgggagttattggatgacttgggtccgccaggctccagcgaaagggctggagtgggtggccagtataaaattcgatgggagtgacaaaaggtatatggattctgtgaggggccaatttaccatctccagagacaacgcggagaactcaatgtttctgcacatcggcagcctgagacccgacgacacggccgtgtattattgtgcgagactggtggggtggggccggttcgacgcttggggccggggaaccctggtcattgtctcctca

SEQ ID NO: 12136 - DNA, 295 bp, Homo sapiens
  source 1..295: mol_type = other DNA
tgcagcctctggattcagtttcagtgactatactatgcactggatccgccaggctccaggcaaggggctggagtgggtgacagttatttcatatgatggaagtcaaaaatactatgtagactccgtgaagggacgattcgccatctccagagacaattccaagagcacactgtatctgcaaatgaacagcctgagaactgaggacacggctgtctattactgtgtgaggtcaaatagcagcagttggcattactttgactactggggccagggaagcctggtcaccgtctcctca

SEQ ID NO: 12137 - DNA, 295 bp, Homo sapiens
  source 1..295: mol_type = other DNA
tgaagcctctggattcaccttcagcccctatactttacactgggtccgccaggctccaggcacggggctggagtgggtggcagttatttcatatgatggaggtcaaaaatactacgttgattccgtgaagggccgcttcaccatctccagagacaattccaagaacacgctgtttctgcaaatgaatagcctgagatctgaggacacggctgtttatttttgtgtgagatccaatagcagtagctggcactactttgactactggggccagggagccctggtcaccgtctcctca

SEQ ID NO: 12138 - DNA, 295 bp, Homo sapiens
  source 1..295: mol_type = other DNA
tgaagcctctggattcaccttcagcccctatactttacactgggtccgccaggctccaggcacggggctggagtgggtggcagttatttcatatgatggaagtcaaaaatactacgtagattccgtgaagggccggttcatcatctccagagacaattccaagaacacactgtttctgcaaatgaatagcctgagagctgaggacacggctctctatttttgtgtgagatctaatagcagtagttggcactactttgactactggggccagggagccctggtcatcgtctcctca

SEQ ID NO: 12139 - DNA, 295 bp, Homo sapiens
  source 1..295: mol_type = other DNA
tgaagcctctggattcaccttcagcccctatactttacactgggtccgccaggctccagccacggggctggagtgggtggcagttatttcatatgatggacgtcaaaaatactacgttgattccgtgaagggccgcttcaccatctccagagacaattccaagaacacgctgtttctgcaaatgaagagcctgagatctgaagacacggctgtttatttttgtgtgagatccaatagcagtagctggcactactttgactactggggccagggagccctggtcaccgtctcctca

SEQ ID NO: 12140 - DNA, 286 bp, Homo sapiens
  source 1..286: mol_type = other DNA
tgcagcctctggattcaccttcagtaggtattggatgcactgggtccgccaagctccagggaaggggctggtgtgggtctcacgcagtaatgaacatgggagtatcagaaactacgcggactccgtgaagggccgattcaccatctccagagacaacgacaagaacacgctgtatttggaaatgttcagtctaagagccgaggacacggcaatatactactgtgcaagggatctcagtggccgcgatgacttctggggccagggaaccctggtcaccgtctcctca

SEQ ID NO: 12141 - DNA, 289 bp, Homo sapiens
  source 1..289: mol_type = other DNA
tgcagcctctggattcactttgagcacctactggatgcactgggtccgccgagctccagggaaggggctggtgtgggtctcacgtatcaatgataatgatgggacttacacaaattacgcggactccgtgaagggccgattcaccatctccagagacatcgccaagaacaccctgtacctgcaaatgaacagtctgagagccgaggacacggctatgtattactgtgcaagagacttaagtggtagggacgacttctggggccagggaaccctggtcaccgtcacctca

SEQ ID NO: 12142 - DNA, 286 bp, Homo sapiens
  source 1..286: mol_type = other DNA
tgcagcctctggatacaacttcaataggtattggatgcactgggtccgccaagctccagggaaggggctggtgtgggtctcacgtattaatgaagatgagagggtgacgaactacgcggactccgtgaaggggcgattcaccatctccagagacaacgccagggacacattatatctgcaaatgaacagtctgagagcggaggacacggctgtgtattattgtgcaagagatctaagcgggagagatgacttctggggccagggaaccctggtcaccgtcgcctca

SEQ ID NO: 12143 - DNA, 297 bp, Homo sapiens
  source 1..297: mol_type = other DNA
gcttctggatacaccttcaccagttatgatatcaattgggtgcgacaggccactggacaagggcttgagtggatgggatggatgaaccctaatagtggtaacacaggctatgcacagaggttgaagggcagagtcatcatgaccaggaacacctccataagtacagcctacatggagctgagcagcctgagatctgaggacacggccgtgtattactgtgcgagaggctatcgggatagtagtggccgtgaatacttccagcactggggccagggcaccctggtcaccgtctcctca

SEQ ID NO: 12144 - DNA, 297 bp, Homo sapiens
  source 1..297: mol_type = other DNA
gcttctggatacaccttcaccacctatgatatcaactgggtgcgccaggccactggacaagggcttgagtggatgggatggatgaaccctaacagtggtaacacaggctatgcacagaagttccagggcagagtcaccatgaccaggaacacctccataagcactgcctacatggagctgagtagcctgacatctgaggacacggccgtgtattactgtgcgagagggtatcgggatagtagtggtcgggaatacttccagcattggggccagggcaccctggtcaccgtctcctca

SEQ ID NO: 12145 - DNA, 298 bp, Homo sapiens
  source 1..298: mol_type = other DNA
tgtagcctctggattcacctttaatagctatgtcatgacctgggtccgccaaggtccagggaaggggctggagtggatctcaggtattactggtagtggtggtgacacataccacgcagactccgtgaagggccggttcatcatctccagagacaattccaagaacacactgtatctacaaatgaacagcctgagagccgaggacacggccctttattattgtgtgaaggggtcagggtcgtccaggccgtactattttgactactggggccagggaaccctggtcaccgtctcctca

SEQ ID NO: 12146 - DNA, 298 bp, Homo sapiens
  source 1..298: mol_type = other DNA
tacagcctctggattcacctttagcactttggccatgagctgggtccgccaggctccagggcaggggctggagtgggtctcagctattactggtagtagtggtagcacttacctcgcagactccgtgaagggccggttcaccatctccagagacaattccaagaacacgctatatctgcaaatggacagcctgaaaggcgaggacacggccctgtattactgtgtgaaaggttcgggctcgtcgcggccttactacttcgactactggggccagggaaccctggtcaccgtctcctca

SEQ ID NO: 12147 - DNA, 298 bp, Homo sapiens
  source 1..298: mol_type = other DNA
tgcagcctctggattcacctttagcactttgaccatgagctgggtccgccaggctccagggcaggggctggagtgggtctcagctatcactggcagtagtagtaacacatacctcgcagactccgtgaagggccggttcaccatctccagagacaattccaagagcacgctgtatctgcaaatgaacagcctgagagccgaggacacggccgtgtattactgtgtgaaaggatcgggctcgtcgcgcccttattacttcgactactggggccagggaaccctggtcaccgtctcctca

SEQ ID NO: 12148 - DNA, 298 bp, Homo sapiens
  source 1..298: mol_type = other DNA
tgcagcctctggattcacctttagtgactatgtcatgagctgggtccgccaggctccagggatggggctagaatgggtctcagctattactggtggcggtggcagcacatacgacgctgactccgtgaagggccggttcaccatctccagagacaattccaagaaaacgctgtatttgcaaatgaacagcctgagagccgaggacacggccatatattactgtgtgaaaggtagcggctcgtcccgaccatactactttgattactggggccagggaaccctggtcaccgtctcctca

SEQ ID NO: 12149 - DNA, 298 bp, Homo sapiens
  source 1..298: mol_type = other DNA
tgctgcctctggattcacctttagcactttggccatgagctgggtccgccaggctccagggcaggggctggagtgggtctcagctattactggtagtagtggtagcacatacttcgcagactccgtgaagggccggttcaccatctccagagacaattccaagagcacgctgtatctgcaaatgaacagcctgaaagccgaggacacggccgtgtattactgtgtgaaaggttcgggctcgtcgcgcccttactacttcgactactggggccagggaaccctggtcaccgtctcctca

SEQ ID NO: 12150 - DNA, 293 bp, Homo sapiens
  source 1..293: mol_type = other DNA
tcatctccggggacagtgtctctagtatccatgttgcttggggctggatcaggcagtccccatcgagaggccttgagtggctgggaaggacatactacaggtccaagtggtataatgattttgcactatctgtgaaaagtcgaataaccatcaacccagacacatcccagaaccagttctccctgcagctgaactttgtgactcccgacgacacggctgtgtattattgtgcaagagaacgagatagggcttttgatatttggggccaagggacaatggtcaccgtctcttca

SEQ ID NO: 12151 - DNA, 293 bp, Homo sapiens
  source 1..293: mol_type = other DNA
tcatctccggggacagtgtctctagtttcggtgttgcttgggcctggatcaggcagtccccatcgagaggccttgagtggctgggaaggacatactacaggtccaagtggtctaatgattttgcactatctgtgaaaagtcgaataaccatcaacccagacacatcccagaaccagttctccctgcagctgagctttgtgactcccgacgacacggctgtgtattattgtgcaagagaacgagatagggcttttgatatttggggccaagggacaatggtcaccgtctcttca

SEQ ID NO: 12152 - DNA, 293 bp, Homo sapiens
  source 1..293: mol_type = other DNA
ccatctccggggacagtgtctctagcaacagtgctgcttggaattggatcaggcagtccccatcgagaggccttgagtggctgggaaggacatactacaggtccaagtggtattatgattatgcaatgtctatgaaaagtcgaataagtgtcgacccagacacatccaagaaccagttctccctgcatctgaactctgtgactcccgaggacacggctctgtattactgtgcaagagaacgagaccgagcttttgatatctggggccaagggacagtggtcaccgtctcctca

SEQ ID NO: 12153 - DNA, 292 bp, Homo sapiens
  source 1..292: mol_type = other DNA
tgcagcctctggattcaccttcagtaactactggatgcactgggtccgccaagttccagggacggggctggtgtgggtctcacgtcttgatcctgatggggatagtatagaatatgtagactccgtgaagggccgattcaccatctccagagacgacgccgagaacacactgtatttgcaaatgagcagtctgagagccgaggacacggctgtgtattattgtgtaaggggaagtaatgactggaacggcgttgactactggggccagggaaccctggtcaccgtctcctca

SEQ ID NO: 12154 - DNA, 292 bp, Homo sapiens
  source 1..292: mol_type = other DNA
tgcagcgtctggattcaccttcagaagctactggatgcactgggtccgccaagttccagggaaggggctgatgtgggtctcacatattaatggtgatgggaccgtcatacaggacgcggagtctgtggagggccgattcaccatctccagagacaacgccagaaataccctttatctgcaaatgaatgatctgggcgccgaagacacggctttgtattattgtgtcagaggtagcaatgactggaacggcgttgactactggggccagggaatcctggtcaccgtctcttcc

SEQ ID NO: 12155 - DNA, 292 bp, Homo sapiens
  source 1..292: mol_type = other DNA
tgcagcctctggattcaccttcagtggctactggatgcactgggtccgccaagctccgggggaggggctggtgtgggtctcacgcattgacattgatgtgagatggacggactacgcggactccgtgaagggccgattcaccatctccagagacaacgccaagaacacgctgtatctgcaaatgaacagtctgacagtcgaggactcggctgtatattattgtgtcaggggtagcaatgactggaatggggtcgactactggggccagggaaccctggtcaccgtctcccca

SEQ ID NO: 12156 - DNA, 292 bp, Homo sapiens
  source 1..292: mol_type = other DNA
tgcagcctctggattcaccttcagtagttactggatgcactgggtccgccaagctccagggaaggggctggtgtgggtctcacgtattagcgatgataggtatacaatagactacgcgggctccgtgaagggccgattcaccatctccagagacgacgccaagaacacgctgtatctgcaaatgaacagtctgagagacgaagacacggctgtgtattattgtgtaagaggatcaaatgactggaacggggttgactattggggccagggaaccctggtcaccgtctcctca

SEQ ID NO: 12157 - DNA, 292 bp, Homo sapiens
  source 1..292: mol_type = other DNA
tgcagcctctggattcaccttcagtatttattggatgcactgggtccgccaagttccagggaaggggctggtgtgggtctcacgtattagtgatgataggtacacaatagactacgcggactccgtgaagggccgattcaccatctccagagacgacgccaagaacacgctgtatctgcaaatgaacagtctgagagacgaagacacggctgtatattactgtgtaagaggatcaaatgactggaacggggttgactactggggccagggaacctcggtcaccgtctcctca

SEQ ID NO: 12158 - DNA, 285 bp, Homo sapiens
  source 1..285: mol_type = other DNA
gcttctggttacacctttgccagatttggtatcacctgggtgcgacaggcccctggacaaggccttgagtggatgggttggatcggcggcggtaatacagactacgcagaaaaggtccagggcagagtcaccttgaccacagacacatccacgttcacagcctatatggagttgaggagcctgagatctgacgacacggccgtatattactgtgcgagagccggggctgaagtgaccagtcactttgactactggggcctgggaaccctggtcaccgtctcctca

SEQ ID NO: 12159 - DNA, 291 bp, Homo sapiens
  source 1..291: mol_type = other DNA
gcttctggttactccttcaacatctttggtatcacctgggtgcgacaggcccctggacaagggcttgagtggatgggatggatcggctctgacaatggcaacacaaactatgcacagaaggtccaggacagagtcaccatgaccacagacccatccgcgagaacagcctacttggagctgaggggcctgagatctgacgacacggccgtgtattactgtgcgagagcgggggctgaggtgactagtcattttgactactggggtcagggaaccctggtcattgtctcctca

SEQ ID NO: 12160 - DNA, 285 bp, Homo sapiens
  source 1..285: mol_type = other DNA
gctcctggttacacctttgccagatttggtatcacctgggtgcgacaggcccctggacaaggccttgagtggatgggttggatcggcggcggtaatacagactacgcagaaaaggtccagggcagagtcaccttgaccacagacacatccacgttcacagcctatatggagttgaggagcctgagatctgacgacacggccgtatattactgtgcgagagccggggctgaagtgaccagtcactttgactactggggcctgggaaccctggtcaccgtctcctca

SEQ ID NO: 12161 - DNA, 286 bp, Homo sapiens
  source 1..286: mol_type = other DNA
tgcagcctctggattcacctttaatagctattggatggcctgggtccgccaggctccagggaaggggctggagtgggtggccaacataaagcaagatggaagtgacaaaaactatgtggactctgtgaagggccgattcaccatctccagagacaacgccaagaactcactgtatctacaaatgaacagcctgagagccgaggacacggctgtgtattactgtgcgagagataatgtgggagcccttgactactggggccagggaaccctggtcaccgtctcctca

SEQ ID NO: 12162 - DNA, 286 bp, Homo sapiens
  source 1..286: mol_type = other DNA
tgcagcctctggattcacctttagtaactattggatggcctgggtccgccaggctccagggaaggggccggagtgggtggccaacgtaaaccaagatgaaaataagaaaatctatgtggactctgtgaggggccgattcaccatctccagagacaacgccaggagctcactgcatctgcaaatgaacagcctgagagccgaggacacggctgtgtattactgtgcgagagacaacgtcggggcccttgactactggggccagggaatcctggtcaccgtctcgtct

SEQ ID NO: 12163 - DNA, 295 bp, Homo sapiens
  source 1..295: mol_type = other DNA
tgcagcctctggattcacctttactgactattggatgaactgggtccgccaggctccagggaagggactggagtgggtggccaacataaaccaagatggaagtgacaaatactatgtggactctgtgaagggccgattcaccatctccagagacaacgccaggaactcactgtttctgcaaatgaacagcctgagagccgaggacactgctgtctattactgtgcgacagatctccctatagcaggagctggttttgactactggggccagggaaccctggtcaccgtctcctca

SEQ ID NO: 12164 - DNA, 295 bp, Homo sapiens
  source 1..295: mol_type = other DNA
tgcagcctctggattcacctttactagctattggatgaactgggtccgccaggctccagggaaggggctggagtgggtggccaacatagaccaagatggaagtgacacatactatgtggactctgtgaagggccgattcaccatctccagagacaacgccaggaactcactgtttctgcaaatgaacagcctgagagccgaggacactgctgtctattactgtgcgacagatctccctatagcaggagctggttttgactactggggccagggaaccctggtcaccgtctcctca

SEQ ID NO: 12165 - DNA, 295 bp, Homo sapiens
  source 1..295: mol_type = other DNA
tgcagcctctggattcacctttactacctattggatgaactgggtccgccaggctccagggaaggggctggagtgggtgggcaacataaaccaagatggacgtgagaagttctatgtgggctctgtgaagggccgattcaccatctccagagacaacaccaagaactcactgtatctgcaaatgaacagcctgagagccgatgacacggctgtctattactgtgcgacagatctgcctatagcaggagctggttttgactactggggccagggaaccctggtcaccgtctcctca

SEQ ID NO: 12166 - DNA, 289 bp, Homo sapiens
  source 1..289: mol_type = other DNA
tgcagcctctggattcaccttcagtgactactatatggactgggtccgccaggctccagggaaggggctggagtgggttggccgtacgagaaacaaagctaaaagttacaccacagaatacgccgcgtctgtgaaaggcagattcaccatctcaagagatgattcaaagaactcactgtatctgcaaatgaacagcctgcaaaccgacgacacggccgtgtattattgtactaggggatacaacggtttggacgtctggggccaagggaccacggtcaccgtctcctca

SEQ ID NO: 12167 - DNA, 289 bp, Homo sapiens
  source 1..289: mol_type = other DNA
tgcaacctctggattcagtttcagtgacttctacatggactgggtccgccaggctccagggaaggggctggagtgggttgctcgtattagaaacagagctcacagttataccacagaatacgccgagtctgcgaaaggcagattcaccatctcaagagataattcaaggaacttactgtatctgcaaatgaacgccctgaaaaccgaggacacggccgtttattactgtactagaggttacaacggtctggacgtctggggccaagggaccatggtcaccgtctcctca

SEQ ID NO: 12168 - DNA, 289 bp, Homo sapiens
  source 1..289: mol_type = other DNA
tgcaacctctggattcagtttcagtgacttctacatggactgggtccgccaggctccagggaaggggctggagtgggttgctcgtattagaaacagagctcacagttataccacagaatacgccgagtctgcgaaaggcagattcaccatctcaagagataattcaaggaacttactgtatctacaaatgaacgccctgaaaaccgaggacacggccgtttattactgtactagaggttacaacggtctggacgtctggggccaagggaccatggtcaccgtctcctca

SEQ ID NO: 12169 - DNA, 280 bp, Homo sapiens
  source 1..280: mol_type = other DNA
cgcagcctctggactcacctttagtaagaactggatgagctgggtccgccaggctccaggaaaggggctggagtgggcggcccacataaagccagatggaagtggcaaatactatgtggactccacggagggccgattcaccgtctccagagacaacgccaagaactcactgtatctgcaaatgaacagcctgagagtcgaggacacggctgtgtattactgtgtcgggtgggggagcagctcggactggggccagggaaccctggtcaccgtctcctca

SEQ ID NO: 12170 - DNA, 280 bp, Homo sapiens
  source 1..280: mol_type = other DNA
tgaagcctctggagtcatctttagttggccttggatgagttgggtccgccaggctccaggaaaggggctggactgggtggcccacacaaaccgagatggaagtgcgacattctatgtggactctgtgaagggccgattcaccatctccagagacaacgccaagaagtcactgtttctgcaaatgaacatcttgagacccgaggacacggctctgtattactgtgttggctgggggtcctcttccgactggggccagggaaccctggtcaccgtctcctca

SEQ ID NO: 12171 - DNA, 283 bp, Homo sapiens
  source 1..283: mol_type = other DNA
cgcagcctttggattcacgttcagtgattatgagattaattgggtccgccaggctccagggaaggggctggagtgggtttcatatgttagtagcagtgggactaccattcactacgcagactctgtgaagggccggttcatcatgtccagagacaacgccaagaactcagtgtccctgcaaatgaacagcctgagagtcgacgacacggctgtctattactgtgcaagaggctgggaatactttgacttctggggccagggagccctggtcatcgtctccgca

SEQ ID NO: 12172 - DNA, 283 bp, Homo sapiens
  source 1..283: mol_type = other DNA
tacagcctctggattcacatttagtgattatgaaataaactgggtccgccaggctccagggagggggctgcagtggatttcatacatcagtagtagtggggaaaccgaaaaatatgcagactctgtgaagggccgaatctccgtctccagagacaactccaagaactcagtgaatctgcaaatggacagcctacgagtcgaagacacggccatttattactgtgcgagagggtgggagtactttgacttctggagccagggaacactgctcaccgtctcttcg

SEQ ID NO: 12173 - DNA, 283 bp, Homo sapiens
  source 1..283: mol_type = other DNA
tacagcctctggattcacatttagtgattatgaaataaactgggtccgccaggctccagggagggggctgcagtggatttcatacatcagtagtagtggggaaaccgaaaaatatgcagactctgtgaagggccgagtctccgtctccagagacaactccaagaactcagtgaatctgcaaatggacagcctacaagtcgaagacacggccatttattactgtgcgagagggtgggagtactttgacttctggagccagggaacactgctcaccgtctcttcg

SEQ ID NO: 12174 - DNA, 297 bp, Homo sapiens
  source 1..297: mol_type = other DNA
gcttctggatacaccttcaccagttatgatatcaactgggtgcgacaggccactggacaagggcttgagtggatgggatggatgaaccctaacagtggtaacacaggctatgcacagaagttccagggcagagtcaccatgaccaggaacacttccataagcacagcctacatggacctgagtagcctgagatctgacgacacggccgtgtattactgtgcgagaggtcctaactggaacgacggtccttactactttgactactggggccagggaaccctggtcaccgtctcctca

SEQ ID NO: 12175 - DNA, 297 bp, Homo sapiens
  source 1..297: mol_type = other DNA
gcttctggatacaccttcaccagttatgatatcaactgggtgcgacaggccactggacaagggcttgagtggatgggatggatgaaccctaacagtggtaacaccggctatgcacagaaattccagggcagagtcaccatgaccaggaacacctccataagcacagcctacatggagctgagcagcctgagatctgacgacacggccgtgtattactgtgcgagaggtcctaactggaacgacggtccttactattttgactactggggccagggaaccctggtcaccgtctcctca

SEQ ID NO: 12176 - DNA, 297 bp, Homo sapiens
  source 1..297: mol_type = other DNA
gcttctggatacaccttcaccagttatgatatcaactgggtgcgacaggccactggacaagggcttgagtggatgggatggatgaaccctaacagtggtaacacaggctatgcacagaagttccagggcagagtcaccatgaccaggaacacctccacaagcacagcctacatggaggtgagcagcctgagatctgaggacacggccgtgtattactgtgcgagaggccctaactggaacgacgggccttactactttgactactggggccagggaaccctggtcaccgtctcctca

SEQ ID NO: 12177 - DNA, 283 bp, Homo sapiens
  source 1..283: mol_type = other DNA
tgcagcctctggatacatctttaccgcctttggcatgagctgggtccgccagcctccagggaaggggctggagtgggtctcagttattagtgctaatggtggtctcacatactacgcagagtctatgaagggccggttcaccatctccagagacgattccaagaacacactgtatttgcaaatgaacagcctgagattcgaagacacggccgtatattattgtaccagagggactacgccccccgactactggggccagggaaccctagtcatcgtctcctca

SEQ ID NO: 12178 - DNA, 283 bp, Homo sapiens
  source 1..283: mol_type = other DNA
tgcagcctctggatacgactttaccacttttggcatgagctgggtccgccaggctccagggaaggggctgcagtgggtctcagtcattagtgctaatggtgctattacctactacgcagactccgtgcagggccggttcaccatctccagagacgattccaagaacacactgtttctgcaaatgaacagcctgagagccgaggacacggccctttattattgcacgagaggaactacgccgcctgactactggggccagggaaccctggtcaccgtctcctca

SEQ ID NO: 12179 - DNA, 283 bp, Homo sapiens
  source 1..283: mol_type = other DNA
tacagcctctggatacgcctttaccacttttggcatgagctgggtccgccaggctccagggaaggggctgcagtgggtctcagtcattagtgctaatggtgctattacctactacgcagactccgtgcagggccggttcaccatctccagagacgattccaagaacacactgtatctgcaaatgaacagcctgagagccgaagacacggccctttattattgtacgagaggaactacgccgcctgactactggggccagggaaccctggtcaccgtctcctca

SEQ ID NO: 12180 - DNA, 283 bp, Homo sapiens
  source 1..283: mol_type = other DNA
tgcagcctctggatacatctttacgacttttgggttgagctgggtccgccaggctccagggaagggactggactgggtcgcagttattagtgctaatggtgctatcatatactacgcagactccgtgcagggccggttcaccatctccagagacgattccaagaacattctgtatctgcaaatgaacagcctgagagccgaggacacggccctttattactgtacgagaggaactacgccgcctgactactggggccagggaacccttgtcaccgtctcctca

SEQ ID NO: 12181 - DNA, 307 bp, Homo sapiens
  source 1..307: mol_type = other DNA
tgtcgcctctggatttgtctttaagggctatgtcatgagttgggtccgccaggctccagggagggggctggagtgggtctcagctattggaaatgttgtctcatccactggaagtgtttttgagaatacagactacgcagactccgtgcagggccgcttcaccatcttcagagacaactcgaaaaacacactatatctacaaatgaacaacctgagactcgaggacacggccgtctatttctgtgcaaggaggacaggtggtcagaaggactattggggccggggaaccctggtcaccgtctcctca

SEQ ID NO: 12182 - DNA, 286 bp, Homo sapiens
  source 1..286: mol_type = other DNA
tgaagcctctggattcactttcagaaactatgtcatgagttgggtccgccaggcaccagggaaggggctggagtgggtctcggctattagctataatgctgctaggacagactacgcagactccgtgaagggccggttcaccatctctagagacaattccaagaacacactgtttctgcagatgaacagcctgagagccgaggacacggccacatattactgtgcgagacgtacaggtggccagaaagactattggggccagggaaccctggtcaccgtctcctca

SEQ ID NO: 12183 - DNA, 286 bp, Homo sapiens
  source 1..286: mol_type = other DNA
tggaacctccggattcaccttcacaccctacacgatgcactggatccgccaaggtccagggaaggggctggtgtgggtcgcacgtattaatggtcctgggaacatcataagctacgcggactccgtgaagggccgcttcaccatctccagagacaacgccaagaacgcactgtatctgcaaatgaacagtctgagagccgaggacacggccaagtattactgtgcaaggtcggtggagtggggatatgactactggggccagggaaccctggtcaccgtctcctca

SEQ ID NO: 12184 - DNA, 286 bp, Homo sapiens
  source 1..286: mol_type = other DNA
tgcagcctctgggttcaggttcaatgtctatacgatgcactgggtccgccaagttccagggaaggggccggtgtgggtctcacgtattacgagcgatgagaggactatcagctatgcggactccgtgatgggccgattcaccatctccagagacaacgccaagaacacattgtttctgcaaatgaataatctgagagtcggagactccggtctctattattgtgcaaggagcgtcgagtggggttatgactactggggccggggaaccctggtcaccgtctcctca

SEQ ID NO: 12185 - DNA, 289 bp, Homo sapiens
  source 1..289: mol_type = other DNA
tgcagcgtctggattcaccttcagtagctatggcatgcactgggtccgccaggctccaggcaaggggctggagtgggtggcagttatatggtatgatggaagtaataaatactatgtagactccgtgaagggccgattcaccatctccagagacaattccaagaacacgctgtatctgaaaatgaacagcctgagagccgaggacacggctgtgtattactgtgcgagagatcggggtgggagctaccctgactactggggccagggaaccctggtcaccgtctcctca

SEQ ID NO: 12186 - DNA, 289 bp, Homo sapiens
  source 1..289: mol_type = other DNA
tgcagcgtctggattcaccttcagtagttatggcatgcactgggtccgccaggctccaggcaaggggctggagtgggtggcagttatatcatttgatggaagtaataaatactatgtagactccgtgaagggccgattcatcatctccagagacaattccaagaacacgctgtatctgcaaatgatcagcctgagagccgaggacacggctctgtattactgtgcgagagatcggggtgggagttaccctgactactggggccagggaaccctggtcaccgtctcctca

SEQ ID NO: 12187 - DNA, 286 bp, Homo sapiens
  source 1..286: mol_type = other DNA
tgcggcctctggattcacctttagtagctattggatgacctgggtccgccaggctccagggaaggggctggagtgggtggccaacataaagcaagatggaactgaaaaatactatgtggactctgtgaagggccgattcaccatctccagagataacgccgaaaactcactgtctctgcaaatgaactccctgagagccgaggacacggctgtttattactgtgcgagagggggagactacgacctcgacccctggggccagggaaccctggtcgccgtctcctca

SEQ ID NO: 12188 - DNA, 286 bp, Homo sapiens
  source 1..286: mol_type = other DNA
tgcagcctctggattcacctttagcacttcttggatgacctgggtccgccaggctccagggaaggggctggagtgggtggccaacataaaacaagatggaagtgagaaatactatgtggactctgtgaagggccgattcaccatctccagagacaacgccaagaactcactctatctgcaaatgaacagcctgagagtcgaggacacggccgtctattattgtgcgagaggcggtgactacgatctcgacccctggggccagggaaccctggtcaccgtctcctca

SEQ ID NO: 12189 - DNA, 294 bp, Homo sapiens
  source 1..294: mol_type = other DNA
gcttctggaggcaccttcagcagctatgctatcagctgggtgcgacaggcccctggacaaggacttgagtggatgggagggatcatccctatctttggtacagcaaactacgcacagaagttccagggcagagtcacgattaccgcggacaaatccacgagcacagtctacatggagctgagcagcctgagatctgaggacacggccgtttattactgtgcgagaggagactatgatagtagtggttattaccctgactactggggccagggaaccctggtcaccgtctcctca

SEQ ID NO: 12190 - DNA, 294 bp, Homo sapiens
  source 1..294: mol_type = other DNA
gcttctggaggcaccttcagcagctatgctatcagctgggtgcgacaggcccctggacaagggcttgagtggatgggaaggatcatccctatctttggtatagcaaactacgcacagaagttccagggcagagtcacgattaccgcggacaaatccacgagcacagcctacatggagctgagcagcctgagatctgaggacacggccatgtattactgtgcgagaggtgactatgatagtagtggttattaccccgactactggggccagggaaccctggtcaccgtctcctca

SEQ ID NO: 12191 - DNA, 279 bp, Homo sapiens
  source 1..279: mol_type = other DNA
gcttctggatacaccttcaccagttatgatatcaactgggtgcgacaggccactggacaagggcttgagtggatgggatggatgaaccctaacagtggtaacacaggctatgcacagaagttccagggcagagtcaccatgaccaggaacacctccataagcacagcctacatggagctgagcagcctgagatctgaggacacggccgtgtattactgtgcgaggagtcactacggtatggacgtctggggccaagggaccacggtcaccgtctcctca

SEQ ID NO: 12192 - DNA, 279 bp, Homo sapiens
  source 1..279: mol_type = other DNA
gcttctggatacaccttcaccaactatgatatcaactgggtgcgacaggccactggacaagggctggagtggatgggatggatgaaccctaacagtggtaacacaggctatgcacagaagttccagggcagagtctccatgaccaggaacacctccataagcacagcctacatggagctgagcagcctgagatctgaggacacggccgtgtattactgtgcgagatcccactacggtatggacgtctggggccaagggaccacggtcaccgtctcctca

SEQ ID NO: 12193 - DNA, 280 bp, Homo sapiens
  source 1..280: mol_type = other DNA
tgcagcctctggattcacctttagtagttattggatgacctgggtccgccaggctccagggaaggggctggagtgggtggccaacataaaggaagatggaagtgagaaaaactatgtggactctgtgaagggccgattcaccatctccagagacaacgccaagagctcactgtatttgcaaatgaacagcctgagagccgaggacacggctgtgtattactgtgcgagagggcgcggcgtgaacgtctggggccaagggaccacggtcaccgtctcctca

SEQ ID NO: 12194 - DNA, 280 bp, Homo sapiens
  source 1..280: mol_type = other DNA
tgcagcctctggattcacctttagtagctattggatgacctgggtccgccaggctccagggaaggggctggagtgggtggccaacataaagcaagatggaattgagaaatactatgtggactctgtgaagggccgattcaccatctccagagacaacgccaagaactcactgtatctgcaaatgaacagcctgagagccgaggacacggctgtgtattactgtgcgagaggacgcggggtaaacgtctggggccaagggaccacggtcaccgtctcctca

SEQ ID NO: 12195 - DNA, 304 bp, Homo sapiens
  source 1..304: mol_type = other DNA
tgcagcctctggattcagctttgaagattatgccatgcactgggtccggcaagctccagggaagggcctggagtgggtctcaggcattagttggaatagtaataacatagcctatgcggactctgtgaagggccgattcaccatctccagagacaaccccaagaattccctgtatctacagatgaacagtctgagacctgaggacacggccttatattactgtgcaaaaccgaagagcagcgactgggactatcactacggtatggacgtctggggccaagggaccacggtcaccgtctcctca

SEQ ID NO: 12196 - DNA, 304 bp, Homo sapiens
  source 1..304: mol_type = other DNA
tgcagcctctggattcacctttggagattatgccatgcactgggtccggcaagctccagggaagggcctggagtgggtctcaggtattagttggaatagtggtagcataggctatgcggactctgtgaagggccgattcaccatctccagagacaacgccaagaactccctgtatctgcaaatgaacagtctgagagctgaggacacggccttgtattactgtgcaaaacctaagagcagtgactgggactaccactatggaatggacgtctggggccaagggaccacggtcaccgtctcctca

SEQ ID NO: 12197 - DNA, 284 bp, Homo sapiens
  source 1..284: mol_type = other DNA
ccatctccggggacagtgtctctagcaaaagtgctgcttggaactggatcaggcagtccccatcgagaggccttgagtggctgggaaggacattctacaggtccaagtggtcttatgattatgcagtttctgtgaaaagtcgaataactatcaatccagacacatccaagaacgggttctccctgcaactgaactctgtgactcccgaagacacggctgtgtattattgtgcaactctcaactttgactactggggccagggaatcctggtcaccgtctcctcc

SEQ ID NO: 12198 - DNA, 284 bp, Homo sapiens
  source 1..284: mol_type = other DNA
ccatctccggggacagtgtctctagcaacagtgctgcttggaactggatcaggcagtccccatcgagaggccttgagtggctgggaaggacattctacaggtccaagtggaaaaatgattatgcagtatctgtgaaaagtcgaataaccatcaacccagacacatccaagaaccagttctccctgcagctgaactctgtgactcccgaggacacggctgtgtattactgcgctaccctaaactttgactactggggccagggaaccctggtcaccgtctcctca

SEQ ID NO: 12199 - DNA, 298 bp, Homo sapiens
  source 1..298: mol_type = other DNA
tgcagcctctggattcaccttcagtgactacttcatgagctggatgcgccaggctccagggaaggggctggagtgggtttcatacattggaagtagtgatactatcaaatactacgcagactctgtgaagggccgattcaccatctccagggacaacgccaagaactcactgtatctgcaaatgaacagccttagagccgaggacacggccgtgtattactgtgcgagactgggtgtaatagcagcagctggtacgtgtgactactggggccagggaaccctggtcaccgtctcctca

SEQ ID NO: 12200 - DNA, 298 bp, Homo sapiens
  source 1..298: mol_type = other DNA
tgcaggctctggattcatcttcagtgactactacatgagttggatgcgccaggctccagggaaggggctggagtgggtttcatacattagtactagtgctactaccatatattatgcagactctgtgaagggccgattcaccacctccagggacaacgccaagaactcactgtatctgcaaatgaacagtctgagagccgaggacacggctgtctattattgtgcgagattaggagtgatagcagcagctggtacctgtgactactggggccagggaaccctggtcaccgtctcctca

SEQ ID NO: 12201 - DNA, 298 bp, Homo sapiens
  source 1..298: mol_type = other DNA
tgcagcctctggattcatcttcagtgactactacatgagctggatccgccaggctccagggaaggggctggagtgggtttcatacattagtaatagtggtagtaccatatactatgcagactctgtgaagggccgattcaccacctccagggacagcgccaagaactcactgtatctgcaaatgaacagcctgagagccgaggacacggctgtctattattgtgcgagattaggagtgatagcagcagctggtacctgtgactactggggccagggaaccctggtcatcgtctcctca

SEQ ID NO: 12202 - DNA, 289 bp, Homo sapiens
  source 1..289: mol_type = other DNA
tgcagcctctggattcaccttcaataccgaaaacatgaactgggtccgccaggctccagggaaggggctagattggatttcatatattagcagtactggtggagtcatagtctacgcagactctgtgaagggccgattcaccatctccagagacaatgccaggaactcactctacttgcaactgaacagcctgagagacgaggacacggctgtatattactgtgcgagagggcttggcagcagctggttctaccactggggccagggaaccctggtcaccgtctcctca

SEQ ID NO: 12203 - DNA, 289 bp, Homo sapiens
  source 1..289: mol_type = other DNA
tgcagtctctggaatcaccttcagaaattataatatgaattgggtccggcaggctccagggagggggctggagtgggtctcatacattaatgagattggtgataaaatattctacgcagactctgtgaagggccgattcaccatctccagagacaatgccaagaattcactgtatttacaaatgaacagcctgagagacgaggacacggctctatattactgtgcgagagggctcggcagtagctggttttaccactggggccagggaaccccggtcaccgtctcctca

SEQ ID NO: 12204 - DNA, 292 bp, Homo sapiens
  source 1..292: mol_type = other DNA
cagtgtctctggtgactctatcagtggtagtagtgactactggggctggatccgccagcccccagggaagggactggagtggattgggagtttgtattctagtgggaacagctactacaacccgtccctcaagagtcgagtcatcatgtccgtcgacacgtccaagaaccaattctccctgaagctgacctctctgaccgccgctgacacggctgtatattattgtgcgagacatcacggccctacggggcctgagtattggggccagggaagcctggtcaccgtctcctca

SEQ ID NO: 12205 - DNA, 292 bp, Homo sapiens
  source 1..292: mol_type = other DNA
cagtgtctctggtgactccatcaccagtagtgatgactactggggctggatccgccagccccccgggaagggactggagtggattgggagtatctataatagtgggaacacctactataacccgtccctcaagagtcgagtcaccatatccgtggacacgtccaagaaccagttctccctgaagctgacctctgtgaccgccgcagacacggctgtatattactgtgcaaggcatcacggtccaacgggccctgaatactggggccagggaaccctggtcaccgtctcctca

SEQ ID NO: 12206 - DNA, 292 bp, Homo sapiens
  source 1..292: mol_type = other DNA
cattgtctctggtgactctatcagtagtagtactgactactggggctggatccgccagcccccagggaagggactggagtggattgggagtttatattccagtgggaaaacccactacaacccgtccctcaagagtcgagtcatcatgtccgtcgacacgtccaagaaccaattctccctgaagatgacctctctgaccgcctctgacacggctctatattactgtgcgagacatcacggccctacggggcctgaatactggggccagggaaccctggtcaccgtctcctca

SEQ ID NO: 12207 - DNA, 292 bp, Homo sapiens
  source 1..292: mol_type = other DNA
cactgtctctggtgactctatcagtggtagtagtgactactggggctggatccgccagcccccagggaagggactggagtggattgggagtttgtattctagtgggaacacctactacaacccgtccctcaagagtcgagtcatcatgtccgtcgacacgtccaagaaccaattctccctgaagctgacctctctgaccgccgctgacatggctctatattactgtgcgagacatcacggccctacggggcctgagtactggggccagggaaccctggtcaccgtctcctca

SEQ ID NO: 12208 - DNA, 298 bp, Homo sapiens
  source 1..298: mol_type = other DNA
tgcagcctctggattcagcttcagtacttatgaaatgaattgggtccgccaggctccagggaaggggctggagtgggtttcatacataggtactactgttaataccatatactacgcaggctctgtgaagggccgcttcaccacctccagagacaacgccaagaactcactgtatctccaaatgaacagcctgagagccgaggacacggctatttattactgtgcgagagagacagtagattgtggtggtgactgcttagactactggggccagggaaccctggtcaccgtctcctca

SEQ ID NO: 12209 - DNA, 298 bp, Homo sapiens
  source 1..298: mol_type = other DNA
tgcagcctctggattcagcttcagtacttatgaaatgaattgggtccgccaggctccagggaaggggctggagtgggtttcatacataggtactgctgttaataccatatactacgcaggctctgtgaagggccgcttcaccacctccagagacaacgccaagaactcactgtatctccaaatgaacagcctgagagccgaggacacggctatttattactgtgcgagagagacagtagattgtggtggtgactgcttagactactggggccagggaaccctggtcaccgtctcctca

SEQ ID NO: 12210 - DNA, 298 bp, Homo sapiens
  source 1..298: mol_type = other DNA
tgcagcctctggattcagcttcagtacttatgaaatgaactgggtccgccaggctccagggaaggggctggagtgggtttcatacattgatagtagtggtagttccatatactacgcagattctgtgaagggccgattcaccgtctccagagacaacgccaagagttcactgtttctgcaaatgaacagcctgagagtcgaggacacggctgtttatttctgtgcgagagagacagtagattgtggtggtgactgccttgactactggggccagggaaccctggtcaccgtctcctca

SEQ ID NO: 12211 - DNA, 286 bp, Homo sapiens
  source 1..286: mol_type = other DNA
tgcagcctctggatacatcttcagtgaagactggatacactgggtccgccaagctccagggaaggggctggagtgggtctcacatattaagagtgatgggaggagaacaagttatgcggacttcgtgaagggccgattcaccatctccagagacaacgccaagaacatgtcgtttctgcaaatgaacggtctgagagtcgaggacacaggtgtatattactgtgcaagagataagggatatagtcaagactactggggccagggaaccctagtcaccgtctcctca

SEQ ID NO: 12212 - DNA, 286 bp, Homo sapiens
  source 1..286: mol_type = other DNA
tgcagcctctggattcaccttcagtagctactggatgcactgggtccgccaagttccagggaaggggctggtgtgggtctcacttattaaaagtgatgggagtagaacagggtacgcggactccgtgaagggccgattcaccatctccagagacaacgccaagaacacgctgtatctgcaaatgaacagtctgagagccgaggacacggctgtgtattactgtgcaagagataaaggatattcccaggactactggggccagggaaccctggtcaccgtctcctca

SEQ ID NO: 12213 - DNA, 286 bp, Homo sapiens; identical to SEQ ID NO: 12212
  source 1..286: mol_type = other DNA

SEQ ID NO: 12214 - DNA, 295 bp, Homo sapiens
  source 1..295: mol_type = other DNA
tgcagcctctggattcaccttcagtacctatagcatgaactgggtccgccaggctccagggaaggggctggagtgggtttcacacattagtactagtggtagtgacaaatattacgcagactctgtgaagggccgattcaccatctccagagacaatgccaagaactcactgtatctgcaaatgaacagcctgagagacgaggacacggctgtgtattactgtgcgagaggatcagacagttatggttactggggggactactggggccagggaaccctggtcaccgtgtcctca

SEQ ID NO: 12215 - DNA, 295 bp, Homo sapiens
  source 1..295: mol_type = other DNA
tgcagcctctggattcaatttcaacacctatagtatgaactgggtccgccaggctccagggaaggggctggagtggatttcatacattgaaagtagtggaagctccacacagtatgcagactctgtgaaggaccgattcaccatctccagagacaatgccaagaactcactgtatctgcaaatgaacagcctgagagacgaggacacggctgtgtattactgtgcgagagggtccgatagttatggttattggggggactactggggccagggagccctggtcaccgtctcctca

SEQ ID NO: 12216 - DNA, 295 bp, Homo sapiens
  source 1..295: mol_type = other DNA
tgcagcctctggattcaccttcgggagttatagtatgaattgggtccgccagcctccagggatggggctgcagtggatttcatacattagtagtagtggtagcgaaacacagtacgcagactctgtgaagggccgattcaccgtctccagagacacagccaagaactcactgtatctgcaaatgaacagcctgagagacgacgacacggctgtatattactgtgcgagagggtccgatagttatggttattggggggactactggggccagggaaccgtggtcatcgtctcctca

SEQ ID NO: 12217 - DNA, 292 bp, Homo sapiens
  source 1..292: mol_type = other DNA
tgcagcctctggattcacctttagtgattattatttgagctgggtccgccaggctccagggaaggggctggagtgggtggccagcgtgaatcagggaggaagtcagaagtactatgtggactctctgaagggccgcttcaccatctccagagacaacgccgagaactcactgtatttgcagatgaacagcctgagagccgaggacacggctgtttattactgtgcgaggtggaggtggcaacaatccgaatttgacttctggggccagggaaccctggtcaccgtctcctca

SEQ ID NO: 12218 - DNA, 292 bp, Homo sapiens; identical to SEQ ID NO: 12217
  source 1..292: mol_type = other DNA

SEQ ID NO: 12219 - DNA, 292 bp, Homo sapiens
  source 1..292: mol_type = other DNA
tgcagcctctggattcatctttagtaattattggatgagttgggtccgccaggctccagggaaggggctggagtgggtggccagcataaagcaagatggaagagagacatactatctggactctgtaaagggccgattcaccatctccagagacaacgccaagaactcactatatttgcaaatggacagcctgagagccgaagacacggctgtgtattcctgtgcgagatggagatggcaacaatcggaatttgacttctggggccagggagccctggtcaccgtctcctca

SEQ ID NO: 12220 - DNA, 292 bp, Homo sapiens
  source 1..292: mol_type = other DNA
tgcagcctctggattcagtattagtggttattggatgagttgggtccgccaggctccaggggaggggctggagtgggtggccagcataagcccagacggaggtgagaaattttatgtggactctgtgagcggccgattcaccatctccaaagacaatgccaagaattcactgtatctgcaaatgaaaagcctgagagccgaggacacggctgtgttctactgtgcgagatggagatggcaacaatccgaatttgacttctggggccagggaaccctggtcaccgtctcctca

SEQ ID NO: 12221 - DNA, 295 bp, Homo sapiens
  source 1..295: mol_type = other DNA
tgcagcctctggattcactttcactaacgcctggatgacctgggtccgccaggctccagggaaggggctggagtgggttggccgtattaaaagcaaaactgatggtgggacaacagactacgctacacccgtgaaaggcagattcaccatctcaagagatgattcaaaaaacacactgtatctgcaaatgaacagcctgaaaaccgaagacacagccgtgtattactgtaccacagttggggacttctatggttctggctactggggccagggaaccctggtcaccgtctcctca

SEQ ID NO: 12222 - DNA, 295 bp, Homo sapiens
  source 1..295: mol_type = other DNA
cgcagcctctggattcaatttcattaacgcctggctaaactgggtccgccagactccagggaagggactggaatgggttggtcgtattaaaagcaaaagtgatggtgggacaacagactacgctgcacccgtgcaaggcagattcaccatctcaagggatgattcagaagacaccctgtatctacaattgaacagcctgaaaactgaggacacaggcgtgtattactgtaccacagtgggggatttttatggttcggggtactggggccagggagccccggtcaccgtctcctca

SEQ ID NO: 12223 - DNA, 283 bp, Homo sapiens
  source 1..283: mol_type = other DNA
tgcagtctctggattcacctttagtaactattggatgtcctgggtccgccaggctccagggaaggggctggagtgggtggccaacataaagccagatggaagtgagaaatactatgtggactccgtgaagggccgattcaccatctccagagacaacgccaagaactcactgtatctgcaaatgaacagcctgagagccgaggacacggctgtgtattactgtgcgagaggcagtggtggtccagactactggggccagggaaccctggtcactgtctcctca

SEQ ID NO: 12224 - DNA, 283 bp, Homo sapiens
  source 1..283: mol_type = other DNA
tgcagcctctggattcacctttagtgactattggatgacctgggtccgccaggctccagggaaggggctggagtgggtggccaacataaggcgtgatgcaagtgagggaaactatgtggactctgtgaagggccgattcaccatctccagagacaacaccaaaaactcactatatctacaaatgaacaacctgagagccgaagacacggctgtgtatttctgtgcgagagggagtggcggacctgactactggggccagggaaccctggtcaccgtctcctca

SEQ ID NO: 12225 - DNA, 283 bp, Homo sapiens
  source 1..283: mol_type = other DNA
tgcagcctctggattcacctttactagtttttggatgacctgggtccgccaggctccagggaaggggctggagtgggtggccagcataaaacaagatggcagtgataaacggtatgtggactctgtgaagggccgattcaccatctccagagacaacgccaagaactcactgtatctgcaaatgaacagcctgatagccgaggacacggccgtgtatttctgtgcgagagggagtggcgggcctgactattggggccagggaaccctggtcagtgtctcctca

SEQ ID NO: 12226 - DNA, 301 bp, Homo sapiens
  source 1..301: mol_type = other DNA
tgcagcctctggattctccttaagcgagtatcccataaattgggtccgccacgctccagggaaggggctggagtgggtctcagctattcgtggtagtggtggtggcacatactacgcagactccgtggagggccggttcaccatctccaaggacaattccaagaacatgatttatttgcaaatgaacagcctgagagccgaggacacggccgtatattactgtgcgaaagatcggtattgtactggtggtatctgcccggttgactactggggccagggaacactggtcaccgtctcctca

SEQ ID NO: 12227 - DNA, 301 bp, Homo sapiens
  source 1..301: mol_type = other DNA
tgcaggctctggattcacctctagcgaatatgccatgaactgggtccgccaggctccagggaagggactggaatgggtctcaattattagtggtagtggtggcacctcatactacgcagactccgtgaagggccggttcaccatctccagagaccattccaagaacaccctgtatctgcaaatgaacagcctgagagtcgaggacacggccgtgtattactgtgcgaaagataggtattgtactggtggtatctgtccagttgactactggggccagggcaccctggtcaccgtctcctca

SEQ ID NO: 12228 - DNA, 301 bp, Homo sapiens
  source 1..301: mol_type = other DNA
tgcaggctctggattcacctctagcgaatatgccatgaactgggtccgccaggctccagggaagggactggaatgggtctcaattattagtggtagtggtggcaccgcatactacgcagactccgtgaagggccggttcaccatctccagagaccattccaagaacaccctgtatctgcaaatgaacagcctgagagccgaggacacggccgtgtattactgtgcgaaagataggtattgtactggtggtatctgtccagttgactactggggccagggcaccctggtcaccgtctcctca

SEQ ID NO: 12229 - DNA, 304 bp, Homo sapiens
  source 1..304: mol_type = other DNA
tgcagcctctggattcacctttagtagctatgccatgagctgggtccgccaggctccagggaaggggctggaatgggtgacaatcatttataggagtagtaccacatactatgcagactccgtgaagggccggttcaccatctttagagatgattccaagaacacgctgaatctgcaaatgaacagcctgagagccgaggacacggccgtttattactgtgcgaaagatcgaagtcccgggttcggggagttattatacccctttgactactggggccagggaaccctggtcaccgtctcctca

SEQ ID NO: 12230 - DNA, 307 bp, Homo sapiens
  source 1..307: mol_type = other DNA
tgcagcctctggattcacctttagcagccatgccatgagctgggtccgccaggctccagggaaggggctggagtgggtctcaattatttatagtggtagtagtaacacatactatgcagactccgtgaagggccggttcaccatctccagagataattccaagaacacgctgtatctacaaatgaacggcctgagagccgaggacacggccgtatattactgtgcgaaagatcgttctcccgggttcggggagttattgtacccctttgactactggggcccgggaaccctggtcaccgtctcctca

SEQ ID NO: 12231 - DNA, 282 bp, Homo sapiens
  source 1..282: mol_type = other DNA
gcttctggatacaccttcactaactatgctatgcattgggtgcgccaggcccccggacaaaggcttgagtggatgggatggatcagcgctgtcaatggtaacacaaaatattcacagaagttccagggcagagtcaccattaccagggacacatccgcgagcacagcctacatggaggtgagcagcctgagatctgaagacacggctgtgtattactgtgcaagagatcgtgcctgggctatggacgtctggggccaagggaccacggtcaccgtctcctca

SEQ ID NO: 12232 - DNA, 285 bp, Homo sapiens
  source 1..285: mol_type = other DNA
gcttctggacacaccctcaatcaccctcctgctgtacattgggtgcgccaggcccccggacaaaggcttgagtggatgggatacgtcaacacactcgatggtcacacattatattcaccgagattccaggacagagtcatccttaccaaagacacgtccgcgagcacgggctacatggaactgagtggcctcagatctgaagacacggctgtgtattattgtgcgagagatcgggcctgggccatggacgtctggggccaagggaccacggtcattgtctcctca

SEQ ID NO: 12233 - DNA, 286 bp, Homo sapiens
  source 1..286: mol_type = other DNA
tgcagcctctggattcaccttgagtagctattggatgagttgggtccgccaggctccagggaaggggctggagtgggtggccaacataaaacaagatggaagtgagaaatactatgtggactctgtgaagggccgattcaccatctccagagataacgccaagaactcagtgtatctgcaaatgaacagcctgagagccgaggacacggctgtgtattactgtacgagagccatagcagcagctggaaactactggggccagggaaccctggtcaccgtctcctca

SEQ ID NO: 12234 - DNA, 286 bp, Homo sapiens
  source 1..286: mol_type = other DNA
tgcagcctctggattcaccttgagtacctattgggtgacctgggtccgccaggctccaggaaaggggctggagtgggtggccaacataaaccaagatggaagtgagaaatactatgtggactctgtgaagggccgattcaccatctccagagacaacgccaagaactcagtgtctctgcaaatgaacagcctgagagccgaagacacggctgtgtactactgtacgagggctatagcagcagctggtaactactggggccagggaaccctggtcaccgtctcctca

SEQ ID NO: 12235 - DNA, 282 bp, Homo sapiens
  source 1..282: mol_type = other DNA
aaggtttctggatacacctttaccagctactggatcgcctgggtgcgccagatgcccgggaaaggcctggagtggatggggatcatctatcctggtgactctgataccagatacagcccgtccttccaaggccaggtcaccatctcagccgacaagtccatcagcaccgcctacctgcagtggagcagcctgaaggcctcggacaccgccatgtattactgtgcgagagaagacgctttttttgactactggggccagggaaccctggtcaccgtctcctca

SEQ ID NO: 12236 - DNA, 282 bp, Homo sapiens
  source 1..282: mol_type = other DNA
aagggttccggacacagctttaccaactactggatcgcctgggtgcgccagatgcccgggaaaggcctggagtggatggggatcatctatcctggtgactctgataccagatacagcccgtccttccaaggccaggtcaccatctcagtcgacaagtccatcagcaccgcctacctgcagtggagcagcctgaaggcctcggacaccgccatgtattactgtgcgagagaggatgccttctttgactactggggccagggaaccctggtcaccgtctcccca

SEQ ID NO: 12237 - DNA, 283 bp, Homo sapiens
  source 1..283: mol_type = other DNA
tgtagcctctggattcacctttagcagctatgccatgagttgggtccgccaggctccagggaaggggctggagtgggtctcagttatttatagggatggtagtaacacatactatgcagactccgtgaagggccggttcaccctctccagagataatcccaagaacactctgtatctgcaaatgagcagcctgagagccgaggacacggccgtatattactgtgcgagaggtcggacgtcgattgactactggggccagggaaccctggtcaccgtctcctca

SEQ ID NO: 12238 - DNA, 283 bp, Homo sapiens
  source 1..283: mol_type = other DNA
tgcagcctctggattcacctttagcagctttgccatgagctgggtccgccaggctccagggaaggggctggagtgggtctcaactattagtgctagtggtggtaggacatactacgcagactccgtgaagggccgattcaccatctccagagacaattccaagaacacgctgtatctgcaaatgaacagcctgagagccgaggacacggccgtatattactgtgcgagaggacgtacaagcattgactactggggccagggaaccctggtcaccgtctcctca

SEQ ID NO: 12239 - DNA, 283 bp, Homo sapiens
  source 1..283: mol_type = other DNA
tgtagcctctggattcacctttagcaactatgccatgagttgggtccgccaggctccagggaaggggctggagtgggtctcagttatttatagcggtggtactagcacattctatgcagactccgtgaagggccggttcaccctctccagagataattccaagaacactctgtatctgcaaatgagcagcctgagagccgaggacacggccgtttattactgtgcgagaggtcggacgtcgattgactactggggccagggaaccctggtcaccgtctcctca

SEQ ID NO: 12240 - DNA, 291 bp, Homo sapiens
  source 1..291: mol_type = other DNA
acttctgattacaaatttaccaactatggtatcagttgggtgcgacaggcccctggacaagggcttgagtggatgggatggatcaacgctaataatggtaacacaaactatgcacagaagttccagggcagagtcaccatgaccacagacacatccacgaccacagccttcgtggacctgaggagcctgagatctgacgacacggccgtgtattattgtgcgagagatgggggccgcagctgggggatctttgactactggggccaaggaaccctggtcaccgtctcctca

SEQ ID NO: 12241 - DNA, 297 bp, Homo sapiens
  source 1..297: mol_type = other DNA
acttctggttacaggtttaacaattatggtatcagttgggtgcggctgcggcaggcccctggacaagggcttgagtggatgggatggatcaacgttaacaatggtaacacaaaatatgcacagaagttccagggcagagtcaccatgaccacagaaacctccacgagcacagcctacatggagttcaggagcctgatatctgacgacacggccgtgtattactgtgcgagagatggtggccgttcctggggaatatttgactactggggccagggaaccctggtcaccgtctcctca

SEQ ID NO: 12242 - DNA, 301 bp, Homo sapiens
  source 1..301: mol_type = other DNA
tgcagcctctggattcacctttggaagctatgccatgagttgggtccgccaggctccagggaaggggctggagtgggtcgcagctgttggtagtgataataatgcaatagtctacgcagagtccgtgaagggccggttcaccatctccaaagacaattccaagaacacactgtatctgcagatgaacagcctgagagccgaagacacggccatatattattgtgcgagaccgattatgacagttcctggtacgaggtggttcgacccctggggccagggaaccctggtcaccgtctcctca

SEQ ID NO: 12243 - DNA, 301 bp, Homo sapiens
  source 1..301: mol_type = other DNA
tgcagcctctggattcacctttagcagctatgccatgagttgggtccgccaggctccagggaaggggccggagtgggtctcagctattggcagtgatggaagtagcccatactacgcagactccgtgaagggccggttcaccatctccagagacaattccaagaacacgctgtatctgcaaatgaatagcctgagggccgaggacacggccgtatattactgtgcgagaccgattatgacagtacctggtactcgctggttcgacccctggggccagggaaccctggtcatcgtctcctca

SEQ ID NO: 12244 - DNA, 274 bp, Homo sapiens
  source 1..274: mol_type = other DNA
tgcagtctctggattcacctttagcagctttgccatgagctgggtccgccaggctccagggaaggggctggagtgggtctcagctattagtggtcgtggtgatactacattctacgcagactccgtgaagggccggttcaccatctccagagacaattccaagaacacactatatctacaaatgaacagcctgagagccgaggacacggccgtatattactgtgcgaatgctcgtgcctactggggccagggaaccctggtcaccgtctcctca

SEQ ID NO: 12245 - DNA, 274 bp, Homo sapiens
  source 1..274: mol_type = other DNA
tacagcctctggattcacctttagtagctatggcatgagttgggtccgccaggctccagggaaggggctggagtgggtctgcaccactaatgcccgtggtgctaacgcaaactacgcagactccgtgaagggccggttcaccatctccagagacaattccaagaatacgctgtttctgcaaatgaacaacctgagagtcgaggacacggccgtatattactgtgcgaatgccagggcctactggggccagggaaccctggtcaccgtctcctca

SEQ ID NO: 12246 - DNA, 274 bp, Homo sapiens
  source 1..274: mol_type = other DNA
tacagcctctggattcacctttagtagctatggcatgagttgggtccgccaggctccagggaaggggctggagtgggtctgcaccactaatgcccgtggtgctaacgcaaactacgcagactccgtgaagggccggttcaccatctccagagacaattccaagaatacgctgtttctgcaaatgaacaacctgagagtcgaggacacggccgtatactactgtgcgaatgccagggcctactggggccagggaaccctggtcaccgtctcctca

SEQ ID NO: 12247 - DNA, 298 bp, Homo sapiens
  source 1..298: mol_type = other DNA
cactgtctctggtggctccatcggtacttactactggagctggatccggcagaccccagggaagggactggagtggattgggtatatcgattacactgggagcaccaactacaacccccccctcaacagtcgagtcaccatatcattagacacgtccaagaaccagttctccctgaaagtgagctctgtgaccgctgcggatacggccgtgtattactgtgcgagagggcgacggtatagtgggaggcatgatgcttttgatatctggggccaagggacaatggtcaccgtctcttca

SEQ ID NO: 12248 - DNA, 298 bp, Homo sapiens
  source 1..298: mol_type = other DNA
cactctctctggtggctccaccactaattactactggagctggttccggcagcccccagggaagggactggagtggattggatatatgtattacagtggggactccaactacaacccctccctcaagagtcgagtcaccatgtcgatagacacgtcccagaaacagatatccctgaaactgaactctgtgaccgccgcagacacggccgtgtattactgtgcgaggggacggcgatatagtgggaggcacgatgcttttgatatctggggccaagggacaatggtcaccgtctcttca

SEQ ID NO: 12249 - DNA, 298 bp, Homo sapiens
  source 1..298: mol_type = other DNA
cactgtctctggtggctccttcagtacttactactggagctggatccggcagcccccagggaagggactggagtggattgggtatatcgattacagtgggagcaccaactacaacccctccctcaagagtcgagtcaccatatcagcagacacgtccaagaaccagttctccctgaagctgagctctgtgaccgctgcggacagggccgtgtattactgtgcgagagggcggcggtatagtgggagacatgatgcttttgatatctggggccaagggacaatggtcaccgtctcttca

SEQ ID NO: 12250 - DNA, 286 bp, Homo sapiens
  source 1..286: mol_type = other DNA
tgcagcctctggattcgtcttcacaacctactgggtgaactgggcccgccaagctccaggagaggggctgatgtgggtcgcacttattgatcctgatgggactgccacaacctacgcggactccgtgaaggggcgattcaccatctccagagacaacgccaagaacacggtgtatttgcaaatgaacagtctgagagtcgccgacacggctgtgtactattgtgcacgagactacgctggttcgccccactcttggggccagggaaccctggtcaccgtctcctca

SEQ ID NO: 12251 - DNA, 286 bp, Homo sapiens
  source 1..286: mol_type = other DNA
tacagcctctggattcaccttcagtaactactggatgaactgggtccgccaaactccagggaaggggctggtgtgggtctcacttattaatggtgatgggactaccacaacctacgcggactccgtgaagggccgattcaccgtctccagagacaacgccaagaacacggtgtatctgcaaatgaacagtctgagaggcgaggactcggctgtctattactgtgcaagagattacgctggttcgcctcactcctggggccagggaaccctggtcaccgtctcctca

SEQ ID NO: 12252 - DNA, 292 bp, Homo sapiens
  source 1..292: mol_type = other DNA
tgtagcctctggattcaccttcagtaactaccacatgacctgggtccgccaggctccagggaaggggctagaatgggttgcatacattagtcgtaccagtggcattatatactacaaagactctgtgaagggccgattcaccatctccagagacaacgccaagaattccctgtttctgcaaatgaacagcctgagagtcgaggacacggctctgtattactgtgcgagagactcgggtatagcgggcgctgatgaccactggggccagggaacccgggtcaccgtctcctca

SEQ ID NO: 12253 - DNA, 292 bp, Homo sapiens
  source 1..292: mol_type = other DNA
tgtagcctctggattcaccttcagtaactaccacatgacctgggtccgccaggctccagggaaggggctggagtgggttgcatacattcgtagtaacagtaaaattatatactacaaagactctgtgaagggccgattcaccatctccagagacaacgccaagaattccctgtttctgcaaatgaacagcctgagagtcgaggacacggctctgtattactgtgcgagagactcgggtatagcaggcgctgatgaccactggggccagggaacccgggtcaccgtctcctca

SEQ ID NO: 12254 - DNA, 289 bp, Homo sapiens
  source 1..289: mol_type = other DNA
cgtagtctctggattcactttcagtaactaccccatgacctgggtccgccaggctccagggaaggggctggagtgggttgcatacattaggactagtacaaggatatactacaaagactctgtgaagggccgattcaccatctccagagacaacgccaagaattccctgtttctgcaaatgaacagcctgagagtcgaggacacggctgtttattactgtgcgagagactcgggtatagcaggcgctgatgaccactggggccagggaacccgggtcaccgtctcctca

SEQ ID NO: 12255 - DNA, 292 bp, Homo sapiens
  source 1..292: mol_type = other DNA
tgtagcctctggattcaccttcagtaactaccacatgacctgggtccgccaggctccagggaaggggctggagtgggttgcatacattagcagtaacagcagaatcatatactacaaagactctgtgaagggccgattcaccatctccagagacaacgccaagaattccctgtttctgcaaatgaacagcctgagagtcgaggacacggctgtgtattactgtgcgagagactcgggtatagcaggcgctgatgaccactggggccagggaacccgggtcaccgtctcctca

SEQ ID NO: 12256 - DNA, 292 bp, Homo sapiens
  source 1..292: mol_type = other DNA
tgtagcctctggattcaccttcagtaactaccacatgacctgggtccgccaggctccagggaaggggctagagtgggttgcatacattagtagtaccagtacaattatatactacaaagactctgtgaagggccgattcaccatctccagagacaacgccaagaattccctgtttctgcaaatgaacagcctgagagtcgaggacacggctctgtattactgtgcgagagactcgggtatagcaggcgctgatgaccactggggccagggaacccgggtcaccgtctcctca

SEQ ID NO: 12257 - DNA, 292 bp, Homo sapiens; identical to SEQ ID NO: 12256
  source 1..292: mol_type = other DNA

SEQ ID NO: 12258 - DNA, 292 bp, Homo sapiens
  source 1..292: mol_type = other DNA
tgtaacctctggattcagcttcagtaactaccacatgacctgggtccgccaggctccagggaaggggctagagtgggttgcatacattagtagaaccagttcaattatatattacaaagactctgtgaagggccgattcaccatctccagagacaacgccaagaattccctgtttctgcaaatgaacaccctgagagtcgaggacacggctctgtattactgtgcgagagactcgggtatagcaggcgctgatgaccactggggccagggaacccgggtcaccgtctcctca

SEQ ID NO: 12259 - DNA, 292 bp, Homo sapiens
  source 1..292: mol_type = other DNA
tgtagcctctggattcaccttcagtaactaccacatgacctgggtccgccaggctccagggaaggggctggagtgggttgcatacattcgtagtgacagtcaaattatatactacaaagactctgtgaagggccgattcaccatctccagagacaacgccaagaattccctgtttctgcaaatgaacagcctgagagtcgaggacacggctctgtattactgtgcgagagactcgggcatagcaggcgctgatgaccactggggccagggaacccgggtcaccgtgtcctca

SEQ ID NO: 12260 - DNA, 292 bp, Homo sapiens
  source 1..292: mol_type = other DNA
tgtagcctctggattcaccttcagtaactaccacatgacctgggtccgccaggctccagggaaggggctagaatgggttgcatacattagtcgtaccagtggcattatatactacaaagactctgtgaagggccgattcaccatctccggagacaacgccaagaattccctgtttctgcaaatgaacagcctgagagtcgaggacacggctctgtattactgtgcgagagactcgggtatagcgggcgctgatgaccactggggccagggaacccgggtcaccgtctcctca

SEQ ID NO: 12261 - DNA, 292 bp, Homo sapiens
  source 1..292: mol_type = other DNA
tgtagcctctggattcaccttcagtaactaccacatgacctgggtccgccaggctccagggaaggggctagagtgggttgcatacattagtcgtaccagtgacatcatatactacaaagactctgtgaagggccgattcaccatctccagagacaacgccaagaattccctgtttctgcaaatgaacagcctgagagtcgaggacacggctctgtattactgtgcgagagactcgggtatagcaggcgctgatgaccactggggccagggaacccgggtcaccgtctcctca

SEQ ID NO: 12262 - DNA, 292 bp, Homo sapiens
  source 1..292: mol_type = other DNA
tgtagcctctggattcaccttcagtaactaccacatgacctgggtccgccaggctccagggaaggggctagaatgggttgcatacattagtcgtaccagtggcattatatactacaaagactctgtgaagggccgattcaccatctccagagacaacgccaagaattccctgtttctgcaaatgaacagcctgagagtcgaggacacggctctgtattactgtgcgagagactcgggtatagcgggcgctgatgaccactggggccagggaacccggatcaccgtctcctca

SEQ ID NO: 12263 - DNA, 290 bp, Homo sapiens
  source 1..290: mol_type = other DNA
tagcctctggattcaccttcagtaactaccacatgacctgggtccgccaggctccagggaaggggctagaatgggttgcatacattagtcgtaccagtggcattatatactacaaagactctgtgaagggccgattcaccatctccagagacaacgccaagaattccctgtttctgcaaatgaacagcctgagagtcgaggacacggctctgtattactgtgcgagagactcgggtatagcgggcgctgatgaccactggggccagggaacccgggtcaccgtctcctca

SEQ ID NO: 12264 - DNA, 292 bp, Homo sapiens
  source 1..292: mol_type = other DNA
tgcagcctctggattcaccttcagtagctatagcatgaactgggtccgccaggctccagggaaggggctggagtgggtttcatacattagtagtagtagtagtaccatatactacaaagactctgtgaagggccgattcaccatctccagagacaacgccaagaattccctgtttctgcaaatgaacagcctgagagtcgaggacacggctctgtattactgtgcgagagactcgggtatagcaggcgctgatgaccactggggccagggaacccgggtcaccgtctcctca

SEQ ID NO: 12265 - DNA, 292 bp, Homo sapiens
  source 1..292: mol_type = other DNA
tgcagcctctggattcaccttcagtagttatagcatgacctgggtccgccaggctccagggaaggggctggagtggcttgcatatatcagtagaagtagtagaaccatatactatgcagactctgtgaagggccgatttagcatctccagagacgacgccaagaactcactgtatctgcaaatgaacggcctgagagccgaggacacggctttgtattactgtgcgagagactccggaatagcaggagctgatgaccactggggccagggaaccctggtcaccgtctcctca

SEQ ID NO: 12266 - DNA, 292 bp, Homo sapiens
  source 1..292: mol_type = other DNA
tgcagcctctggattcaccttcagtagttatagcatgacctgggtccgccaggctccagggaaggggctggagtggctttcatatatcagtagaagtagtagtaccatatactatgcagactctgtgaagggccgatttaccatctccagagacgacgccaagaactcactgtatctgcaaatgaacagcctgagagccgaggacacggctttgtattactgtgcgagagactccggaatagcaggagctgatgaccactggggccagggaaccctggtcaccgtctcctca

SEQ ID NO: 12267 - DNA, 292 bp, Homo sapiens
  source 1..292: mol_type = other DNA
tatagcctctggattcaccttcagtaactaccacatgacctgggtccgccaggctccagggaaggggctagagtgggttgcatacattagtcattccagtacaattatctactacaaagactctgtgaagggccgtttcaccatctccagagacaacgccaagaattccctgattctgcaaatgaacaacctgagagtcgacgacacggctctatattactgtgcgagagactcgggtatagcaggcgctgatgaccactggggccagggaacccgggtcaccgtctcctca

SEQ ID NO: 12268 - DNA, 289 bp, Homo sapiens
  source 1..289: mol_type = other DNA
tgtagtctctggattcaccttcagtaactaccccatgacctgggtccgccaggctccagggaaggggctggagtgggttgcatacatttggactagtacaaggatatactacaaagactctgtgaagggccgattcaccatctccagagacaacgccaagaattccctgtttctgcaaatgaacagcctgagagtcgaggacacggctgtttattactgtgcgagagactcgggtatagcaggcgctgatgaccactggggccagggaacccgggtcaccgtctcctca

SEQ ID NO: 12269 - DNA, 292 bp, Homo sapiens
  source 1..292: mol_type = other DNA
tgtcgcctctggattcaccttcagtaactaccacatgacctgggtccgccaggctccagggaaggggctagagtgggttgcatatattaggagtaccagttcaattatatactacaaagactctgtgaagggccgattcaccatctccagagacaacgccaagaattccctgtttctgcaaatgaacagcctgagagtcgaggacacggctctgtattactgtgcgagagactcgggtatagcaggcgctgatgaccactggggccagggaacccgggtcaccgtctcctca

SEQ ID NO: 12270 - DNA, 292 bp, Homo sapiens
  source 1..292: mol_type = other DNA
tgtagcctctggattcaccttcagtaactaccacatgacctgggtccgccaggctccagggaaggggctagagtgggttgcatatattaggagtaccagtacaattatatactacaaagactctgtgaagggccgattcaccatctccagagacaacgccaagaattccctgtttctacaaatgaacagcctgagagtcgaggacacggctctgtattactgtgcgagagactcgggtatagcaggcgctgatgaccactggggccagggaacccgggtcaccgtctcctca

SEQ ID NO: 12271 - DNA, 289 bp, Homo sapiens
  source 1..289: mol_type = other DNA
tgtagtctctggattcaccttcagtaactaccccatgacctgggtccgccaggctccagggaaggggctggagtgggttgcatacatttggactagtacaaggatatactacaaagattctgtgaagggccgattcaccatctccagagacaacgccaagaattccctgtttctgcaaatgaacagcctgagagtcgaggacacggctgtttattactgtgcgagagactcgggtatagcaggcgctgatgaccactggggccagggaacccgggtcaccgtctcctca

SEQ ID NO: 12272 - DNA, 276 bp, Homo sapiens
  source 1..276: mol_type = other DNA
gcctcaggatacaccttcaacacttatccagtgcattgggtgcgccaggctcccggacaaaggcttgagtggatgggatggatcaatgtaggcaacggcaacacaaaatattcacagaactttcagggcagactcaccatcagcagagacacatccgcgagcacagtctacctggagttgagtagtctgagatctggagacacggctgtctattattgcgcgagcggagattggtttgactactggggccagggaacccaggtcaccgtctcctca

SEQ ID NO: 12273 - DNA, 276 bp, Homo sapiens
  source 1..276: mol_type = other DNA
gcctcaggatacaccttcaacacttatccagtgcattgggtgcgccaggctcccggacaaaggcttgagtggatgggatggatcaatgtaggcaacggcaacacaaaatattcacagaactttcagggcagactcaccatcagcagagacacatccgcgagcacagtctacttggagttgagtagtctgagatctggagacacggctgtctattattgcgcgagcggagattggtttgactactggggccagggaacccaggtcaccgtctcctca

SEQ ID NO: 12274 - DNA, 276 bp, Homo sapiens; identical to SEQ ID NO: 12272
  source 1..276: mol_type = other DNA

SEQ ID NO: 12275 - DNA, 276 bp, Homo sapiens
  source 1..276: mol_type = other DNA
gcctcaggatacaccttcaacagttatccagtacattgggtgcgccaggctcccggactaaggcttgagtggatgggatggatcaatgtaggcaacggcaacacaaaatattcacagaacttccagggcagactcaccatcagcagagacacatccgcgagcacggtctacctagagctgagtagtctgagatctgaagacacggctgtctattattgcgcgagcggagattggtttgactactggggccagggaacccaggtcaccgtctcctca

SEQ ID NO: 12276 - DNA, 276 bp, Homo sapiens
  source 1..276: mol_type = other DNA
gcctcaggatacaccttcaacacttatccagtgcattgggtgcgccaggctcccggacaaaggcttgagtggatgggatggatcaatgtaggcaacggcaacacaaaatatccacagaactttcagggcagactcaccatcagcagagacacatccgcgagcacagtctacttggagttgagtagtctgagatctggagacacggctgtctattattgcgcgagcggagattggtttgactactggggccagggaacccaggtcaccgtctcctca

SEQ ID NO: 12277 - DNA, 276 bp, Homo sapiens
  source 1..276: mol_type = other DNA
gcctcaggatacaccttcaacacttatccagtgcattgggtgcgccaggctcccggacaaaggcttgagtggatgggatggatcaatgtaggcaacggcaacacaaaatattcacagaactttcagggcagactcaccatcagcagagacacatccgcgagcacagtctacttggagttcagcattctgatatctggagacacggctgtctattattgcgcgagcggagattggtttgactactggggccagggaacccaggtcaccgtctcctca

SEQ ID NO: 12278 - DNA, 276 bp, Homo sapiens
  source 1..276: mol_type = other DNA
gcttctgcatacaccttcactacccatcctatacattggatgcgccaggcccccggacagaggcttgagtggatgggatggatcaacgctggcaaaggtaacacgaagttttcacagaggttccagggcagagtcaccatcaccagggacacatccgcgagcacagtctacatggagctgagcagtctgagatctgaggacacggctgtatactactgtgcgagcggggactggtttgactactggggccaggggaccctggtcaccgtctcctca

SEQ ID NO: 12279 - DNA, 276 bp, Homo sapiens
  source 1..276: mol_type = other DNA
acttctggatacaccttcactacccatcctatacattggatgcgccaggcccccggacagaggcttgagtggatgggatggatcaacgctggcaaaggtaacacgaagttttcacagaagttccagggcagagtcaccatcaccagggacacatccgcgagcacagtctacatggagctgagcagtctgagatctgaagacacggctgtatactactgtgcgagcggggactggtttgactactggggccaggggaccctggtcaccgtctcctca

SEQ ID NO: 12280 - DNA, 276 bp, Homo sapiens
  source 1..276: mol_type = other DNA
gcttctggatacagttactctaactttcctatacattgggtgcgccaggcccccggacaaaggcttgagtggatgggatggatcaacgctggcaacggtaacacaaaatattcacagaatttccaggacagagtcaccattacctgggacacatttgcgaccacgggcttcatggacctgtccagcctgaaatctgaagacacggctgtgtattactgtgcgagtggggattggtttgactactggggccagggaaccctggtcaccgtctccgca

SEQ ID NO: 12281 - DNA, 276 bp, Homo sapiens
  source 1..276: mol_type = other DNA
gtctcagggtataccttcaccacttatcccatgcactgggtgcgccaggctcacggacaaaggcttgagtggatgggatggatcaatgttggcactggcaacacaaaatattcacgggagtttcaaggcagagtcaccattactagagacagatccgggagcacagcctacatggaactgagcagcctgagatttgaagacacggctgtctattattgcgcgagcggagattggtttgactactggggcccgggaaccctggtcaccgtctcctca

SEQ ID NO: 12282 - DNA, 276 bp, Homo sapiens
  source 1..276: mol_type = other DNA
acttctggatacattttcactacctatcctatacattgggtgcgccaggcccccggacaaaggcttgagtggatgggatggatcaacactggcaatggtaacacgaagttttcacagaactttcagggcagactcaccattactagagacacatccgcgaccactgcctacatggtattgagcaacctgagatttggagacacggctatatactactgtgcgagcggggattggtttgactactggggccagggcaccccagtcaccgtctcctca

SEQ ID NO: 12283 - DNA, 280 bp, Homo sapiens
  source 1..280: mol_type = other DNA
tgtggcctctggattcaccttcaatagctatagcatgaactgggtccgccaggctccagggaaggggctggagtgggtttcattcattggtagcagtagtcctaccatttactacacagactctgtgaagggccgattcgccatctccagagacaacgccaagaactcagtgtatctgcaaatgaacagcctgagagtcgaggatacggctgtgtactattgtgcgagaggtcaggatattgactactggggccagggaacccgggtcatcgtctcctca

SEQ ID NO: 12284 - DNA, 280 bp, Homo sapiens; identical to SEQ ID NO: 12283
  source 1..280: mol_type = other DNA

SEQ ID NO: 12285 - DNA, 280 bp, Homo sapiens
  source 1..280: mol_type = other DNA
tgtagcctctggattcaccttcaatagctatagcatgaactgggtccgccaggctccagggaaggggctggagtgggtttcattcattggtagtagtagtcctaccatttactacgcagactctgtgaagggccgattcgccatctccagagacaacgccaagaactcagtgtatctgcaaatgaacagcctgagagtcgaggatacggctgtgtactattgtgcgagaggtcaggatattgactactggggccagggaacccgggtcatcgtctcctca

SEQ ID NO: 12286 - DNA, 280 bp, Homo sapiens
  source 1..280: mol_type = other DNA
tgcaggctctggattcaccttcagtagctttagcatgaactgggtccgccaggctccagggaaggggctggagtggatttcattcattggtagtagtactaatgccatatactacgcagactctgtgaagggccgattcaccatctccagagacaacgccaagaactcactgtatctgcaaatgaacagcctgagagccgaggacacggctgtttattactgtgcgaggggtcaagacattgactactggggccagggaaccctggtcaccgtctcctta

SEQ ID NO: 12287 - DNA, 280 bp, Homo sapiens
  source 1..280: mol_type = other DNA
tgcagcctctggattcaccttcagtagctttagcatgaactgggtccgccaggctccagggaaggggctggagtgggtttcattcattgatagtaggagctctaccatgtattatgcagactctctgaagggccgattcaccatctccagagacaacgccaagaactccctgtatctgcaactgaacagcctgagagccgaggacacggctgtctattactgtgcgaggggccaagacatagactactggggccagggaaccctggtcaccgtctcctca

SEQ ID NO: 12288 - DNA, 280 bp, Homo sapiens
  source 1..280: mol_type = other DNA
tgcagcctctggattcaccttcagtagctttagcatgaactgggtccgccaggctccagggagggggctggagtggatttcattcattggtagtagtactagtgccatgtactacgcagactctgtgaagggccgattcaccatctccagagacaacgccaagaactcagtgtatctgcaaatgaacagcctgagagccgaggacacggctgtttattactgtgcgaggggtcaagacattgactactggggccagggaaccctggtcaccgtctcctta

SEQ ID NO: 12289 - DNA, 280 bp, Homo sapiens
  source 1..280: mol_type = other DNA
tgcagcctctggattcaccttcagtagctttagcatgaactgggtccgtcaggctccagggagggggctggagtggatttcattcattggtagtagtactagtgccatgtactacgcagactctgtgaagggccgattcaccatctccagagacaacgccaagaactcagtgtatctgcaaatgaacagcctgagagccgaggacacggctgtttattactgtgcgaggggtcaagacattgactactggggccagggaaccctggtcaccgtctcctta

SEQ ID NO: 12290 - DNA, 280 bp, Homo sapiens
  source 1..280: mol_type = other DNA
tgcagcctctggattcaccttcagtagctttagcctgaactgggtccgccaggctccagggagggggctggaatgggtttcattcattagtagtactggtagtaccatatactacgcagactctgtgaagggccgattcaccatctccagagacaacgccaacaactcactgtatctgcaaatgaacgccctgagagccgaggacacggctttttattactgtgcgaggggtcaagacattgactactggggccagggaaccctggtcagcgtctcctca

SEQ ID NO: 12291 - DNA, 280 bp, Homo sapiens
  source 1..280: mol_type = other DNA
tgcagcctctggattcaccttcagtagctttagcatgaactgggtccgccaggctccagggaaggggctggagtggatttcattcattggtagtagtactagtgccatatactacgcagactctgtgaagggccgattcaccatctccagagacaacgccaagaactcagtgtatctgcaaatgaacagcctgagagccgaggacacggctgtttattactgtgcgaggggtcaagacattgactactggggccagggaaccctggtcaccgtctcctta

SEQ ID NO: 12292 - DNA, 280 bp, Homo sapiens
  source 1..280: mol_type = other DNA
tgcagcctctggattcaccttcagtagctttagcatgaactgggtccgccaggctccagggaaggggctggagtgggtttcattcattagtagtggtagtactaccatatactacgcagacactgtgaagggccgattcaccatctccagagacaacgccaagaactcactgtatctgcaaatgaacagcctgagagccgaggacacggctgtgtattactgtgcgaggggtcaagacattgactactggggccagggaaccttggtcaccgtctcctca

SEQ ID NO: 12293 - DNA, 280 bp, Homo sapiens
  source 1..280: mol_type = other DNA
tgcagcctctggattcaccttcagtagctttagcatgaactgggtccgccaggctccagggaaggggctggagtggatttcattcattggtagtagtactagtgccatatactacgcagactctgtgaagggccgattcaccatctccagagacaacgccaagaactcagtgtatctgcaaatgaacagcctgagagccgaggacacggctatttattactgtgcgaggggtcaagacattgactactggggccagggaaccctggtcaccgtctcctta

SEQ ID NO: 12294 - DNA, 280 bp, Homo sapiens
  source 1..280: mol_type = other DNA
tgcagcctctggattcaccttcagtagctttagtatgaattgggtccgccaggctccagggaaggggctggagtgggtttcattcattgatagtaggagctctaccatatattatgcagactctctgaggggccgattcaccatctccagagacaacgccaagaactcactgtatctgcaagtgaacagcctgagagccgaggacacggctgtctattactgtgcgaggggccaagacatagactactggggccagggaaccctggtcaccgtctcctca

SEQ ID NO: 12295 - DNA, 295 bp, Homo sapiens
  source 1..295: mol_type = other DNA
cgctgtctatggtgggcccttcaggggttattactggagctggatccgccagccccccgggaaggggctggagtggattggggaaatcaatcatagtggaagcaccaactacaacccgtccctcaagagtcgagtcaccatttcagtagacacgtccaagaaccaaatctccctgaggctgaagtctgtgaccgccgcggacacggctgtttattactgtgcgagcctctggttcggggacttctattacggtatggacgtctggggccaagggaccatggtcaccgtctcctca

SEQ ID NO: 12296 - DNA, 295 bp, Homo sapiens
  source 1..295: mol_type = other DNA
cgctgtctatggtggggccttcagtggttactactggagctggatccgccagcccccagggagggggctggagtggattggggaaatcaatcatagtggaagcaccaactacaacccgtccctcaagagtcgagtcaccatttcagtagacacgtccaagaaccagctctccctgaagctgagctctgtgaccgccgcggacacggctgtttattactgtgcgagcctatggttcggggacttctattacggtatggacgtctggggccaagggaccacggtcaccgtctcctca

SEQ ID NO: 12297 - DNA, 295 bp, Homo sapiens
  source 1..295: mol_type = other DNA
cgctgtctatggtgggcccttcaggggttattactggagctggatccgccagccccccgggaaggggctggagtggattggggaaatcaatcatagtggaagcaccaactacaacccgtccctcaagagtcgagtcaccatttcagtagacacgtccaaaaaccaaatctccctgaggctgaagtctgtgaccgccgcggacacggctgtttattactgtgcgagcctctggttcggggacttctattacggtatggacgtctggggccaagggaccatggtcaccgtctcctca

SEQ ID NO: 12298 - DNA, 295 bp, Homo sapiens
  source 1..295: mol_type = other DNA
cggtgtctatggtggggccttcagtggttactactggagctggatccgccagcccccagggaaggggttggagtggattggggaaatcaatcatagtggaagcaccaactacaacccgtccctgaagagccgagccaccatttcagtagacacgtccaagaaccagctctccctgaagctgagctctgtgaccgccgcggacacggctgtttattactgtgcgagcctatggttcggggacttctattacggtatggacgtctggggccaagggaccacggtcaccgtctcctca

SEQ ID NO: 12299 - DNA, 295 bp, Homo sapiens
  source 1..295: mol_type = other DNA
cgctgtctatggtggacccttcaggggttattactggagctggatccgccagccccccgggaaggggctggagtggattggggaaatcaatcatagtggaagcaccaactacaacccgtccctcaagagtcgagtcaccatttcagtagacacgtccaagaaccaaatctccctgaggctgaagtctgtgaccgccgcggacacggctgtttattactgtgcgagcctctggttcggggacttctattacggtatggacgtctggggccaagggaccatggtcaccgtctcctca

SEQ ID NO: 12300 - DNA, 295 bp, Homo sapiens; identical to SEQ ID NO: 12298
  source 1..295: mol_type = other DNA

SEQ ID NO: 12301 - DNA, 295 bp, Homo sapiens
  source 1..295: mol_type = other DNA
cgctgtctatggtgcgtccttcagtggttactactggagctggatccgccagcccccagggaaggggctggagtggattggagaaatcaatgatagtggaagcaccaattacagcccgtccctcaagagtcgagtcaccatgtcagtagacacgtccaagaaccaattctccctgagactgagctctgtgaccgccgcggacacggctgtatattactgtgccagcctttggttcggggatttctactacggtatggacgtctggggccaagggaccacggtcatcgtctcctca

SEQ ID NO: 12302 - DNA, 295 bp, Homo sapiens
  source 1..295: mol_type = other DNA
cgctgtgtatggtggggccttcagtggatactactggagctggatccgccagcccccagggaaggggctggagtggattggggaaatcaatcatagtggaagcaccaactacaacccgtccctcaagagtcgagtcaccatttcagtagacacgtccaagaaccagctctccctgaagctgagctctgtgaccgccgcggacacggctatctattactgtgcgagcctatggttcggggacttctattacggtatggacgtctggggccaagggacctcggtcaccgtctcctca

SEQ ID NO: 12303 - DNA, 295 bp, Homo sapiens; identical to SEQ ID NO: 12295
  source 1..295: mol_type = other DNA

SEQ ID NO: 12304 - DNA, 282 bp, Homo sapiens
  source 1..282: mol_type = other DNA
gcatctggatacaccttcagcagctacttcatgcactgggtgcgacaggcccctggacaagggcttgagtggatgggaataatcaaccctagtggtggtaccacaagctacgcacagacgttgcagggcagagtcaccatgaccagggacacgtccacgagcacaatctacatggaactgagcagcctgagatctgaggacacggccgtgtattactgtgcgagagcatgggaacaattctttgactactggggccagggaactttggtcaccgtctcctca

SEQ ID NO: 12305 - DNA, 282 bp, Homo sapiens
  source 1..282: mol_type = other DNA
gcatctggatacaccttcagcagctacttcatgcactgggtgcgacaggcccctggacaagggcttgagtggatgggaataatcaaccctagtggtggtaccacaagctacgcacaaacgttgcagggcagagtcaccatgaccagggacacgtccacgagcacaatctacatggaactgagcagcctgagatctgaggacacggccgtgtattactgtgcgagagcatgggaacaattctttgactactggggccagggaactttggtcaccgtctcctca

SEQ ID NO: 12306 - DNA, 282 bp, Homo sapiens
  source 1..282: mol_type = other DNA
gcatctggatacaccttcaccagttactggatacactgggtgcgacaggcccccggacaagggcctgagtggatgggaatgatcaaccccagtggctatcacacaagatatggacaggggttccagggcagagtcaccctgaccggggacacgtccacgagtacagtctatatggagttgagcgccttgcgctctgaggacacggccgtatactactgtgcgagagcctgggaacagttctttgactactggggccagggaaccctgctcaccgtctcctca

SEQ ID NO: 12307 - DNA, 282 bp, Homo sapiens
  source 1..282: mol_type = other DNA
gcatctggatacaccttcagcagctacttcatgcactgggtgcgacaggcccctggacaagggcttgagtggatgggaataatcgaccctagtggtggtaccacaagctacgcacagacgttgcagggcagagtcaccatgaccagggacacgtccacgagcacaatctacatggaactgagcagcctgagatctgaggacacggccgtgtattactgtgcgagagcatgggaacaattctttgactactggggccagggaactttggtcaccgtctcctca

SEQ ID NO: 12308 - DNA, 292 bp, Homo sapiens
  source 1..292: mol_type = other DNA
tgcagcctctggattcatctttagcaactatgccatgggctgggtccgccaggctccagggaaggggctggagtgggtctcaattattagtgctgttaatactggcacatactacggagactccgtgaagggccggttcaccatcaccagagacaattccaagagcacgctgtttctgcaaatgaacagcctgagagccgaggacacggccgtatattactgtgcgaaaagggatttgggtcacggagttattgactactggggccagggagtcctggtcaccgtctcctca

SEQ ID NO: 12309 - DNA, 292 bp, Homo sapiens
  source 1..292: mol_type = other DNA
tgtagcctctggattcagctttagtacctatgccatgggctgggtccgccaggctccagggatggggctggagtgggtctccatcattagtgctgttaatagtggcacatactacgcagactccgtgaagggccggttcaccatctccagagacaattccaagaacacgctgtttctccaaatgaacagcctgagagtcgaggacacggccatatattactgtgcgaaaagggatttgggtcacggagttattgactactggggccagggaaccctggtcaccgtctccgca

SEQ ID NO: 12310 - DNA, 282 bp, Homo sapiens
  source 1..282: mol_type = other DNA
gcctctggatacaccttcaccgctcactatttccactgggtgcgacaggcccctggacaaggacttgagtggatgggatggatcgacccaaacagtggtggcacaaagtatgcacagaaatttcagggcagggtcaccatgaccagggacacgtccatcagcacactctacatggacctcagcaggctgagatctgacgacatggccgtctattactgtgcgagagccgtcaactggggatatgactactggggccagggaaccccggtcaccgtctcatca

SEQ ID NO: 12311 - DNA, 282 bp, Homo sapiens
  source 1..282: mol_type = other DNA
gcctctggatacaccttcaccgctcactatttccactgggtgcgacaggcccctggacaaggacttgagtggatgggatggatcgacccaaacagtggtgacacaaactatgcacagaaatttcagggcagggtcaccatgaccagggacacgtccatcagcacactgtacatggacctcatcaggctgagatctgacgacatggccgtctacttctgtgcgagagccgtcaactggggatatgactactggggccagggaaccccggtcaccgtctcatca

SEQ ID NO: 12312 - DNA, 283 bp, Homo sapiens
  source 1..283: mol_type = other DNA
ggcttctggatactccctcaccgcccactatatacactgggcgcgccaggcccctggacaagggcttgagtggatgggatggaccgaccctgtcagtggtgacacaaagtataaacagaagtttcagggcaggatcaccatggccagggacacgtccatcagcacagtctacatggaattgagtagcctgagatctgacgacacggccgtatattactgtgcgcgagccgtcaactggggatatgactactggggtcagggagccctggtcaccgtctcctca

SEQ ID NO: 12313 - DNA, 282 bp, Homo sapiens
  source 1..282: mol_type = other DNA
gcctctggatacaccttcaccgctcactatttccactgggtgcgacaggcccctggacaaggccttgagtggatgggatggatcgacccaattagtggtgccacaaagtatgcacagaaatttcagggcagggtcaccatgaccagggacacgtccatcagcacagtctacatggacctgagcaggctgagatctgacgacatggccgtctattactgtgcgagagccgtcaactggggatatgactactggggccagggaaccccggtcaccgtctcctca

SEQ ID NO: 12314 - DNA, 282 bp, Homo sapiens
  source 1..282: mol_type = other DNA
gcttctggatacaccttcaccggccactatttccactgggtgcgacaggcccctggacaagggcttgagtggatgggatggatcgaccctaccagtggtgacacaaactatgcacagaagtttcagggcagggccaccatgaccagggacacgtccatcagcacagtctacatggacctgagcaggctgaggtctgacgacacggccctgtattactgtgcgagagccgtcaactggggatatgactactggggccagggaaccccggtcaccgtctcctca

SEQ ID NO: 12315 - DNA, 282 bp, Homo sapiens
  source 1..282: mol_type = other DNA
gcctctggatacaccttcaccggtcactatttccactgggtgcgacaggcccctggacaaggacttgagtggatgggatggatcgacccaaacagtggtggcacaaactatgcacagaaatttcagggcagggtcaccatgaccagggacacgtccatcagcacagtctacatggacctgagcaggctgagatctgacgacatggccgtctattactgtgcgagagccgtcaactggggatatgactactggggccagggaaccccggtcaccgtctcctca

SEQ ID NO: 12316 - DNA, 286 bp, Homo sapiens
  source 1..286: mol_type = other DNA
tgcagcctctggaatcaccgtcagtagcaactacatgagttgggtccgccaggctccagggaaggggctggagtgggtctcagttatttatagtggtggtagtatatactacgcagactccgtgaagggccgattcaccatctccagagacaattccaagaacacgctgtatcttcaaatgaacagcctgagagctgaggacacggctgtgtattactgtgcgagaagctacggtgaatactactttgactactggggccagggaaccctggtcaccgtctcctca

SEQ ID NO: 12317 - DNA, 286 bp, Homo sapiens
  source 1..286: mol_type = other DNA
tgcagcctctggaatcaccgtcagtagcaactacatgagttgggtccgccaggctccagggaaggggctggagtgggtctcagttatttatagtggtggtagtatatactacgcagactccgtgaagggccgattcaccatctccagagacaattccaagaacacgctgtatcttcaaatgaacagcctgagagctgaggacacggctgtgtattactgtgcgagaagctacggtgaatactactttgactactggggccagggaacgctggtcaccgtctcctca

SEQ ID NO: 12318 - DNA, 307 bp, Homo sapiens
  source 1..307: mol_type = other DNA
cactgtctctggtggctccatcagtagttactactggagctggatccggcagcccccggggaagggactggagtggattgggtatatctattacagtgggagccccaactacaacccctcgctcaagagtcgagtcaccatatcagtagacacgtccaagaaccagttctccctgaagctgagctctgtgaccgctgcggacacggccgtgtattactgtgcgactgggggcgggggtgtagtagtggctggtacgggcggctggttcgacccctggagccggggaaccctggtcaccgtctcctca

SEQ ID NO: 12319 - DNA, 307 bp, Homo sapiens; identical to SEQ ID NO: 12318
  source 1..307: mol_type = other DNA

SEQ ID NO: 12320 - DNA, 307 bp, Homo sapiens
  source 1..307: mol_type = other DNA
cagtgtctctggtggctccatcagtagttacttctggagctggatccggcagcccccagggaagggactggagtggattgggtatattcattatagtgggaccaccacctacagtccctccctcaagaatcgagtcagcatatcggtagacacgtccaagaaccagttctccctgaaactgagatctgtgaccgttgcggacacggccgtctattattgtgcgaccggcgggggaggagtagtggtggctggtacaggcggttggttcgacccgtggggccggggaatcctggtcaccgtctcctca

SEQ ID NO: 12321 - DNA, 307 bp, Homo sapiens; identical to SEQ ID NO: 12320
  source 1..307: mol_type = other DNA

SEQ ID NO: 12322 - DNA, 286 bp, Homo sapiens
  source 1..286: mol_type = other DNA
tgtagcctctggattcacgttcagttcctatagcatgaactgggtccgccaggctccagggaaggggctcgagtgggtttcatacattggttacacttctactcccatgacctacgcagactctgtgaagggccgattcaccatctccagagacaacgccaagaactcactgtctctgcaaatgaacagcctgagagacgaggacacggctgtatattactgtgtgagagatcatggctgggcttttgattactggggccagggagccctggtcaccgtctcctca

SEQ ID NO: 12323 - DNA, 286 bp, Homo sapiens
  source 1..286: mol_type = other DNA
tgtagcctctggattcacgttcagttcctatagcatgaactgggtccgccaggctccagggaaggggctcgagtgggtttcatacattggttacagttctactcccacgtcctacgcagactctgtgaagggccgattcaccatctccagagacaatgccaagaactcactgtctctgcaaatgaacagcctgagagacgaggacacggctgtatattattgtgtgagagatcatggctgggcttttgactactggggccagggagccctggtcaccgtctcctca

SEQ ID NO: 12324 - DNA, 286 bp, Homo sapiens
  source 1..286: mol_type = other DNA
tgcagcctctggattcaccttcagagactttagcatgaactgggtccgccgggctccagggaaggggctgcaatggatttcatacattagaggtgatagtagaaacccatcctacgcagactctgtgaagggccgattcaccatctccagagacaatggcaagaactcactgtatctgcaaatgaacagcctgagagacgaggacacagctgtgtattactgtgtcagagatcacggctgggcctttgactactggggccagggatcccaggtcaccgtctcctca

SEQ ID NO: 12325 - DNA, 286 bp, Homo sapiens
  source 1..286: mol_type = other DNA
tgcagcctctggattcaccttcagagactttagcatgaactgggtccgccgggctccagggaaggggctgcaatggatttcatacattagaggtgatagtaaaaacccatcctacgcagactctgtgaagggccgattcaccatctccagagacaatggcaagaactcactgtatctgcaaatgaacagcctgagagacgaggacacagctgtgtattactgtgtcagagatcacggctgggcctttgactactggggccagggatcccaggtcaccgtctcctca

SEQ ID NO: 12326 - DNA, 286 bp, Homo sapiens
  source 1..286: mol_type = other DNA
tgtagcctctggattcacgttcagttcctatagcatgaactgggtccgccaggctccagggaaggggctcgagtgggtttcatacattggttacacttctactcccatgtcctacgcagactctgtgaagggccgattcaccatctccagagacaacgccaagaactcactgtctctgcaaatgaacagcctgagagacgatgacacggctgtatattactgtgtgagagatcatggctgggcttttgattactggggccagggagccctggtcaccgtctcctca

SEQ ID NO: 12327 - DNA, 286 bp, Homo sapiens
  source 1..286: mol_type = other DNA
tatagcctctggattcacgttcagttcgtatagcatgaactgggtccgccaggctccagggaaggggctcgagtggatttcatacattggttacacttctactcccatgtcctacgcagactctgtgaagggccgattcaccatctccagagacaatgccaagaactcactgtctctgcagatgaacagcctgagagacgaggacacggctgtatattattgtgtgagagatcatggctgggcttttgattactggggccagggagccctggtcaccgtctcctca

SEQ ID NO: 12328 - DNA, 301 bp, Homo sapiens
  source 1..301: mol_type = other DNA
cactgtctctggtggctccatcagcagtggtagttactactggagctggatccggcagcccgccgggaagggactggagtggattgggcatatctataccagtggcagcaccaagtacaacccctccctcaagagtcgagtcactatatcagtcgacacgtccaagaaccagttctccctgaagctgagctctgtgaccgccgcagacacggccgtgtattactgtgcgagagaggaatatagcagtggctggtactactttgactactggggccagggaaccctggtcaccgtctcctca

SEQ ID NO: 12329 - DNA, 301 bp, Homo sapiens
  source 1..301: mol_type = other DNA
cactgtctctggtggctccatcagcagtggtacttactactggagctggatccggcagcccgccgggaagggcctggagtggattgggcgtatctataccagtgggagcaccaactacaacccctccctcaagagtcgagtcaccatatcagtagacacgtccaagaaccagttctccctgaagctgagctctgtgaccgccgcagacacggccgtgtattactgtgcgagagaggagtatagcagtggctggtactactttgactactggggccagggaaccctggtcaccgtctcctca

SEQ ID NO: 12330 - DNA, 301 bp, Homo sapiens
  source 1..301: mol_type = other DNA
cactgtctctggtggctccatcggtagtggtggttactactggacctggatccggcagcccgccgggaagggcctggagtggattgggcgtatctatagtagtgggagcaccaactacaattcctccctcaagagtcgagtcaccatatcaatagacacgtccaagaaccagttctccctgaacctgagttctgtgaccgccgcagacacggccgtatattactgtgcgagagaggaatatagcagtggctggtactactttgactactggggccagggaaccatggtcaccgtctcctca

SEQ ID NO: 12331 - DNA, 301 bp, Homo sapiens
  source 1..301: mol_type = other DNA
cactgtctctggtggctccatcagtagtggtggttactactggacctggatccggcagcccgccgggaagggcctggagtggattgggcgtatctatagtagtgggagcaccaactacaattcctccctcaagagtcgagtcaccatatcaatagacacgtccaggaaccagttctccctgaacctgagttctgtgaccgccgcagacacggccgtatattactgtgcgagagaggaatatagtagtggctggtactactttgactactggggccagggaaccatggtcaccgtctcctca

SEQ ID NO: 12332 - DNA, 301 bp, Homo sapiens
  source 1..301: mol_type = other DNA
cactgtctctggtggctccatcaatagtggtggttactactggacctggatccggcagcccgccgggaagggcctggagtggattgggcgtatctatagtagtgggagcaccaactacaattcctccctcaagagtcgagtcaccatatcaatagacacgtccaagaaccagttctccctgaacctgagttctgtgaccgccgcagacacggccgtatattactgtgcgagagaggaatatagcagtggctggtactactttgactactggggccagggaaccctggtcaccgtctcctca

SEQ ID NO: 12333 - DNA, 301 bp, Homo sapiens
  source 1..301: mol_type = other DNA
cactgtctctggtggctccatcagtagtggtggttactactggacctggatccggcagcccgccgggaagggcctggagtggattgggcgtatttatagtagtgggagcaccaactacaattcctccctcaagagtcgagtcaccatatcaatagacacgtccaagaaccagttctccctgaacctgagttctgtgaccgccgcagacacggccgtatattactgtgcgagagaggaatatagtagtggctggtactactttgactactggggccagggaaccatggtcaccgtctcctca

SEQ ID NO: 12334 - DNA, 301 bp, Homo sapiens
  source 1..301: mol_type = other DNA
cactgtctctggtggctccatcagtagtggtggttactactggagctggatccggcagcccgccgggaagggactggagtggattgggcgtatctatagcagtgggagcaccaactacaattcctccctcaagagtcgagtcaccatatcaatagacacgtccaagaaccagttctccctgaacctgagttctgtgaccgccgcagacacggccgtgtattactgtgcgagagaggaatatagcagtggctggtactactttgactactggggccagggaaccctggtcaccgtctcctca

SEQ ID NO: 12335 - DNA, 301 bp, Homo sapiens
  source 1..301: mol_type = other DNA
cactgtctctggtggctccatcagtagtggtggttactactggacctggatccggcagcccgccgggaagggcctggagtggattgggcgtatctatagtagtgggagcaccaactacaattcctccctcaagagtcgagtcaccatatcaatagacacgtccaagaaccagttctccctgaacctgagttctgtgaccgccacagacacggccgtatattactgtgcgagagaggaatatagtagtggctggtactactttgactactggggccagggaaccatggtcaccgtctcctca

SEQ ID NO: 12336 - DNA, 301 bp, Homo sapiens
  source 1..301: mol_type = other DNA
cactgtctctggtggctccattagtagtggtggttactactggacctggatccggcagcccgccgggaagggcctggagtggattgggcgtatctatagtagtgggagcaccaactacaattcctccctcaagagtcgactcaccatatcaatagacacgtccaagaaccagttctccctgaacctgagttctgtgaccgccgcagacacggccgtatattactgtgcgagagaggaatatagcagtggctggtactactttgactactggggccagggaaccctggtcaccgtctcctca

SEQ ID NO: 12337 - DNA, 301 bp, Homo sapiens
  source 1..301: mol_type = other DNA
cactgtctctggtggctccatcagtagtggtagttactactggacctggatccggcagcccgccgggaagggcctggagtggattgggcgtatctatagtagtgggagcaccaactacaattcctccctcaagagtcgagtcaccatatcaatagacacgtccaagaaccagttctccctgaacctgagttctgtgaccgccgcagacacggccgtatattactgtgcgagagaggaatatagcagtggctggtactactttgactactggggccagggaaccatggtcaccgtctcctca

SEQ ID NO: 12338 - DNA, 301 bp, Homo sapiens
  source 1..301: mol_type = other DNA
cactgtctctggtggctccatcagtagtggtggttactactggagctggatccggcagcccgccgggaagggactggagtggattgggcgtatctatagcagtgggagcaccaactacaattcctccctcaagagtcgagtcaccatatcaatagacacgtccaagagtcagttctccctgaacctgagttctgtgaccgccgcagacacggccgtttattactgtgcgagagaagaatatagcagtggctggtactactttgactactggggccagggaaccctggtcaccgtctcctca

SEQ ID NO: 12339 - DNA, 301 bp, Homo sapiens
  source 1..301: mol_type = other DNA
cactgtctctggtggctccatcagcagtggtagttactactggagctggatccggcagcccgccgggaagggactggagtggattgggcatatctataccagtgggagcaccaactacaacccctccctcaagagtcgagtcaccatatcagtagacacgtccaagaaccagttctccctgaaactgagctctgtgaccgccgcagacacggccgtgtattattgtgcgagagaggaatatagcagtggctggtactactttgactactggggccagggaaccctggtcaccgtctcctca

SEQ ID NO: 12340 - DNA, 280 bp, Homo sapiens
  source 1..280: mol_type = other DNA
tgttgcctctggattcacttttagtaactattggatgacctgggtccgccaggctccagggagggggttggagtgggtggccaacataaaggcagatggaagtgagaaatactatgtggactctgtgaagggccgattcaccatctccagagacaacgccaagaactcaatgtatctgcaaatgaacagcctgcgagtcgaggactcggctctttattattgtgcgagttgggttgggagagaccactggggccagggaaccccggtcaccgtctcctca

SEQ ID NO: 12341 - DNA, 280 bp, Homo sapiens; identical to SEQ ID NO: 12340
  source 1..280: mol_type = other DNA

SEQ ID NO: 12342 - DNA, 280 bp, Homo sapiens
  source 1..280: mol_type = other DNA
ttcagcctctggattcatttttagtaacttttggatgacatgggtccgccaggctccagggaaggggctggagtgggtggccagcataaagcacgatggaagtggggaaagctatgtggactctgtgaagggccgattcaccatctccagagacaacgccaggagctcactgtttctgcaaatgaacagcctgagagccgaggattcggctgtctattattgtgcgagctgggtggggcgagatcactggggccagggaaccctggtcaccgtctcctca

SEQ ID NO: 12343 - DNA, 289 bp, Homo sapiens
  source 1..289: mol_type = other DNA
tgcagcctctggattcaccttcaatgactactggatgcactgggtccgccaagctccagggaaggggctggtgtgggtctcacgtattgaccgttttggcgttaacacaaactacgcggacttcgtgaagggccgcttcaccatctccagagacaacgccaagaatatgttgtatctgcaaatgaacagtctgggagccgaggacatggctgtgtattattgttcaagagacccccggaataaggggctcgacccctggggccagggaaccctggtcaccgtctcctca

SEQ ID NO: 12344 - DNA, 289 bp, Homo sapiens
  source 1..289: mol_type = other DNA
tgtcgcctctggattcaccttcagtaaatactggatgttctgggtccgccaagctccagggaagggtctggtgtgggtctcacgcattaatggtgatgggagtgacacaaactacgcggactccgtgaagggccgattcaccatctccagagacaacgccaagaatacgctgtttttgcaaatgaacagtctgagagccgacgacacggctgtgtattactgttcaagagacccccggaataaggggctcgacccctggggccagggaaccctggtcaccgtctcctca

SEQ ID NO: 12345 - DNA, 289 bp, Homo sapiens
  source 1..289: mol_type = other DNA
tgaaggtgctggattcacctttagaaatttctggatgttctgggtccgccaagttccagggaaggggctggtgtgggtctcacgtattgatggtggcggcggtgaaatagactacgccgactccgtgaagggccgattcaccacctccagagacaactccaggaacatcctatatctgcagatgagcagcctcagagtcgaggacacggctgtctattattgttcaagagatcctcggaacaaggggttggacccctggggccagggaaccctggtcactgtctcgtca

SEQ ID NO: 12346 - DNA, 289 bp, Homo sapiens
  source 1..289: mol_type = other DNA
tgcaggttctggattcacctttagaaatttctggatgttctgggtccgccaagttccagggaaggggctggtgtgggtctcacgtattgatggtggtggcggtgccacagactacgccgactccgtgaagggccgattcaccacctccagagacaactccaagaacatcctatatctgcaaatgaacagcctcagagtcgaggacacggctgtctattattgttcaagagatccccggaacaaggggttggacccctggggccagggaaccctggtcactgtctcgtca

SEQ ID NO: 12347 - DNA, 289 bp, Homo sapiens
  source 1..289: mol_type = other DNA
tgcaggttctggattcagcattagacattactggatgttctgggtccgccaagttccagggaaggggctggtgtgggtctcacgtattgatggtagtggcggtgagacagactacgccgactccgtgaagggccgattcaccacctccagagacaactccaagaacatcctgtatctgcaaatggacagcctcagagtcgaggacacgggtgtctatttttgttcaagagatccccggaacaaggggttggacccctggggccagggaaccctggtcactgtctcgtca

SEQ ID NO: 12348 - DNA, 289 bp, Homo sapiens
  source 1..289: mol_type = other DNA
tgtaggttctggattcacctttagaaatttctggatgttctgggtccgccaagttccagggaaggggctggtgtgggtctcacgtattgatggtggtggcggtgccacagactacgccgactccgtgaagggccgattcaccacctccagagacaactccaagaacatcctatatctgcacatgaacagcctcagagtcgaagacacggctgtctattattgttcaagagatccccggaacaagggcttggacccctggggccagggaaccctggtcactgtctcgtca

SEQ ID NO: 12349 - DNA, 289 bp, Homo sapiens
  source 1..289: mol_type = other DNA
tggaagttctggattcacctttagaaatttctggatgttctgggtccgccaagttccagggaaggggctggagtgggtctcacgtattgatggtggtggcggtgccacagactacgccgactccgtgaggggccgattcaccacgtccagagacaactccaggaacatcctatatctgcaaatgaacagcctcacagtcgaggacacggctgtgtattattgttcaagagatccccggaacaaggggttggacccctggggccagggaaccctggtcactgtctcgtca

SEQ ID NO: 12350 - DNA, 277 bp, Homo sapiens
  source 1..277: mol_type = other DNA
cactgtctctggtgactccatcagcggcaattcttactactggggctggatccgccagcccccagggaaggggctggagtggattgcgagtctgtataatgatgggagaacctactacaacccgtccctcaagagtcgagtcaccatatctaaagacacgtccaagacccagttctccctgaagctgagctctgtgaccgccgcagacaccgctgtatattattgtgtgaaatttgcaggatattggggccagggaaccctggtcatcgtctcctca

SEQ ID NO: 12351 - DNA, 277 bp, Homo sapiens
  source 1..277: mol_type = other DNA
cactgtctctggtgactccatcagcggcaattcttactactggggctggatccgccagcccccagggaaggggcttgagtggattgcgagtctgtataatgatgggagaacctactacaacccgtccctcaagagtcgagtcaccatatctaaagacacgtccaagacccagttctccctgaagctgagctctgtgaccgccgcagacaccgctgtatattattgtgtgaaatttgcgggatattggggccagggaaccctggtcaccgtctcctca

SEQ ID NO: 12352 - DNA, 277 bp, Homo sapiens
  source 1..277: mol_type = other DNA
cactgtctctggtgactccatcaatgacaaacattactactggggctggattcgccagcccccagggaaggggctggagtggattgcgggtctgtattatgatgggagaatctattacagcccgtccctcaagagtcgagtcaccatatctaaagacacgtccaagacccagttctccctgaatctgagctctgcgaccgccgcagacaccgctgtatattattgtgtgaaattcgcgggatattggggccagggaaccctggtcaccgtctcctca

SEQ ID NO: 12353 - DNA, 277 bp, Homo sapiens
  source 1..277: mol_type = other DNA
cactgtctctggtgactccatcagcggcaattattactactggggctggatccgccagcccccagggaaggggctggagtggattgcgagtctgtataatgatgggagaacctactacaacccgtccctcaagagtcgagtcaccatatctaaagacacgtccaagacccagttctccctgaagctgagctctgtgaccgccgcagacaccgctgtatattattgtgtgaaatttgcgggatattggggccagggaaccctggtcaccgtctcctca

SEQ ID NO: 12354 - DNA, 277 bp, Homo sapiens
  source 1..277: mol_type = other DNA
cactgtctctggtgactccagcaatgacaaacattactactggggctggattcgccagcccccagggaaggggctggagtggattgcgggtctgtattatgatgggagaatctattacagcccgtccctcaagagtcgagtcaccatatctaaagacacgtccaagacccagttctccctgaatctgagctctgtgaccgccgcagacaccgctgtatattattgtgtgaaattcgcgggatattggggccagggaaccctggtcaccgtctcctca

SEQ ID NO: 12355 - DNA, 277 bp, Homo sapiens
  source 1..277: mol_type = other DNA
cactgtctctggcgactccgccaacagtggctcttactattggggctggatccgccagcccccagggaaggggctggagtggattgggagtctctatggtacagggaacagatacttcaacccgtcactcaagagtcgagtcaccatatctatggacacgtccaagacccagttctccctgaaactgacctctgtgaccgcggcagacacggctatctattattgtgtgaaatttgctggctactggggccagggaatcctggtcaccgtctcgtca

SEQ ID NO: 12356 - DNA, 277 bp, Homo sapiens
  source 1..277: mol_type = other DNA
cactgtctctggtgacttcatcagcggcaattcttactactggggctggatccgccagcccccagggaaggggctggagtggattgcgagtctgtatcatgatgggagaacctactacaacccgtccctcaagagtcgagccaccatatctaaagacacgtccaagacccagttctccctgaagctgagttctgtgaccgccgcagacaccgctgtatatttttgtgtgaaatttgcgggatattggggccagggaaccctggtcaccgtctcctca

SEQ ID NO: 12357 - DNA, 277 bp, Homo sapiens
  source 1..277: mol_type = other DNA
cactgtctctggtgactccatcagcggctattcttactactggggctggatccgccagcccccagggaaggggctggagtggattgcgagtctgtataatgatgggagaacctactacaacccgtccctcaggagtcgagtcaccatatctaaagacgcgtccaagacccagttctccctgaagctgggctctgtgaccgccgcagacaccgctgtatattattgtgtgaaatttgcgggatattggggccagggaatcctggtcaccgtctcctca

SEQ ID NO: 12358 - DNA, 277 bp, Homo sapiens
  source 1..277: mol_type = other DNA
cactgtctctggtgactccatcagcggcaattcttactactggggctggatccgccagcccccagggaaggggctggagtggattgtgggtctgtataatgatgggacaacctactacaacccgtccctcaagagtcgagtcaccatatctaaagacacgtccaagacccagttctccctgaagctgggctctgtgaccgccgctgacaccgctgtatattactgtgtgaaatttgcgggatattggggccagggaatcctggtcaccgtctcctca

SEQ ID NO: 12359 - DNA, 277 bp, Homo sapiens
  source 1..277: mol_type = other DNA
cactgtctctggtgactccatcagcggcaattcttactactggggctggatccgccagcccccagggaaggggctggagtggattgcgagtctgtataatgatgggagaacctactacaacccgtccctcaagagtcgagtcaccatatccaaagacacgtccaagacccagttctccctgaagctgggctctgtgaccgccgcagacaccgctgtatattattgtgtgaaatttgcgggatattggggccagggaatcctggtcaccgtctcctca

SEQ ID NO: 12360 - DNA, 277 bp, Homo sapiens
  source 1..277: mol_type = other DNA
cactgtctctggtgactccatcagcggcaattcttactactggggctggatccgccagcccccagggaaggggctggagtggattgcgggtctctataatgatgggacaacctactacaacccgtccctcaagagtcgagtcaccatatccaaagacacgtccaagtcccagttctccctgaagctgggctctgtgaccgccgcagacaccgctgtttattattgtgtgaaatttgcgggatattggggccagggaatcctggtcaccgtctcctca

SEQ ID NO: 12361 - DNA, 277 bp, Homo sapiens
  source 1..277: mol_type = other DNA
cactgtctctggtgactccatcagcggcaattcttactactggggctggatccgccagcccccagggaaggggcttgagtggattgcgagtctgtataatgatgggagaacctactacaacccgtccctcaagagtcgagtcaccatatctaaagacacgtccaagacccagttctccctgaagctgagctctgtgaccgccgcagacaccgctgtatattattgtgtgaaatttgcgggatattggggccagggaaccctggtcaccctctcctca

SEQ ID NO: 12362 - DNA, 295 bp, Homo sapiens
  source 1..295: mol_type = other DNA
cactgtatctggaggctccatcagaactggaggttacttttggagttggctccgcctgcgcccaggaaagggcctggagtggattgggtacatacattacagtgggagcgcctactacaacccgtccctcaggagtcgtcttagcatatcggtggacacgtctaacaatgagttctccctgtatgtgacttctgtgactgccgcggacacggccgtctattactgtgcgagagaaggcggctacaataacggtttggacgtctggggccaagggaccacagtcaccgtcttatca

SEQ ID NO: 12363 - DNA, 295 bp, Homo sapiens
  source 1..295: mol_type = other DNA
cagtgtctctggtggcaccatcagccgtggtggatactactggacttgggtccgccaagtcccagggaagggcctggagtggattgggtacatctattaccgtgggaccacctactacaacccgtccctcaggagtcgacttaccatgtcaatcgagacgtctaagaaccagttctccctgaaaatgacctctgtgactggcgcggacacggccgtatattattgcgcgagagaagggggttataacaacggtttagacgtctggggcccagggaccacggtcaccgtctcctca

SEQ ID NO: 12364 - DNA, 286 bp, Homo sapiens
  source 1..286: mol_type = other DNA
cagtgtctccggtggctccaccaatattgttaattcatactggaactggatgcggcagcccgccggggagggactggaatggattgggtttatcgcgcccgatgggaagaccaggtacaatccctccctcgagagtcgagtcataattgcagtcgacacgtccaggaagcagctttccctgaacctgacttctgtgacggccgcagacacggccgtgtattattgtgcgagaggtcaactggtttttgactcctggggccagggaacccaggtcaccgtctcctca

SEQ ID NO: 12365 - DNA, 286 bp, Homo sapiens
  source 1..286: mol_type = other DNA
cagtgtctccggtggctccaccagtagtgctcagtcatattggaactggatccggcagcccgccggggagggactggagtggattggatttatcgctcccgatgggaaaaccaggtacaatccctccctcgagagtcgagtcctgatatctgtcgacacctccaagagacaactttccctgaacctgacctctgtgacggccgcagacacgaccgtgtattactgtgcgaggggtcaactggtatttgactcctggggccagggaaccctggtcaccgtctcctca

SEQ ID NO: 12366 - DNA, 285 bp, Homo sapiens
  source 1..285: mol_type = other DNA
agtgtctccggtggctccaccaatattgttaattcatactggaactggatgcggcagcccgccggggagggactggaatggattgggtttatcgcgcccgatgggaagaccaggtacaatccctccctcgagagtcgagtcataattgcagtcgacacgtccaggaagcagctttccctgaacctgacttctgtgacggccgcagacacggccgtgtattattgtgcgagaggtcaactggtttttgactcctggggccagggaacccaggtcaccgtctcctca

SEQ ID NO: 12367 - DNA, 286 bp, Homo sapiens
  source 1..286: mol_type = other DNA
ttcagtctccggtggctctctcagtggttcaaatccctactggagttggctccggcaggccgccgggcagaccctggagtggattgggcgtatttctgccagtggcagcgacaactatggcccctcttttaagagtcgagtctccatgtcaattgacacggccaagaacgagttctccctccgtctgaattctgtgaccgccgcagacacggccgtgtattactgtgcgagagggcaactcgtttttgactcgtggggccagggagcgcaggtcatcgtctcctca

SEQ ID NO: 12368 - DNA, 307 bp, Homo sapiens
  source 1..307: mol_type = other DNA
tgtagtctctggattcacctttagtgactattggatgagctgggtccgccaggctccagggaaggggctggagtgggtggccaacataaagaaagatggaagtgagaaatactatgtggactctgtgaagggccgattcaccatcttcagagacaacgccaagaactcactgtatctgcaaatgaacagcctgagagccgaggacacggctgtctattactgtgcgagaggcggcaaattttactatgataccagtggttatcctgaagacttctggggccagggatccctggtcaccgtctcctca

SEQ ID NO: 12369 - DNA, 307 bp, Homo sapiens
  source 1..307: mol_type = other DNA
tctagtctctggattcacctttagtgactattggatgagctgggtccgccaggctccagggaaggggctggagtgggtggccaacataaaaaaagatggaagtgagagatactatgtggactctgtgaagggccgattcaccatcttcagagacaacgccaagaactcactgtatctggaaatgaacaccctgagagccgaggacacggctgtctattactgtgcgagaggcggcaaattttactatgataccagtggttatcctgaagacttctggggccagggatccctggtcaccgtctcctca

SEQ ID NO: 12370 - DNA, 307 bp, Homo sapiens
  source 1..307: mol_type = other DNA
tgtagtctctggattcacctttagtgactattggatgagctgggtccgccaggctccagggaaggggctggagtgggtggccaacataaagaaagatggaagtgagaaatattatgtggactctgtgaagggccgattcaccatcttcagagacaacgccaagaactcactgtatctggaaatgaacagcctgagagccgaggacacggctgtctattactgtgcgagaggcggcaaattttattatgataccagtggttatcctgaagacttctggggccagggatccctggtcaccgtctcctca

SEQ ID NO: 12371 - DNA, 307 bp, Homo sapiens
  source 1..307: mol_type = other DNA
tgcagcctctggattcacctttagtagctactggatgagttgggtccgccaggctccagggaaggggctggattgggtggccaacataaagcaagatggaagtgagaaatactatgtggagtctctgaagggccgattcaccatctccagagacaacgccaagaactcactgtatctgcaaatgaacagcctgagagccgaggacacggctgtgtattactgtgcgagaggcggaaagttttactatgataccagtggttatcccgaagacttctggggccagggaaccttggtcaccgtctcctca

SEQ ID NO: 12372 - DNA, 307 bp, Homo sapiens; identical to SEQ ID NO: 12371
  source 1..307: mol_type = other DNA

SEQ ID NO: 12373 - DNA, 307 bp, Homo sapiens
  source 1..307: mol_type = other DNA
tgcagcctctggattcagcttcagtagctactggatgagctgggtccgccaggctccagggaaggggctggattgggtggccaacataaagcaagatggaagtgagaaatactatgtggactctgtgaagggccgattcaccatctccagagacaacgccaagaactcactgtatctgcaaatgaacagcctgagagccgaggacacggctgtgtattactgtgcgagaggcggaaagttttactatgataccagtggttatcccgaagacttctggggccagggaaccctggtcaccgtctcctca

SEQ ID NO: 12374 - DNA, 307 bp, Homo sapiens
  source 1..307: mol_type = other DNA
tgcagcctctggattcaccttcactgactactggatgagctgggtccgccaggctccagggaaggggctggattgggtggccaacataaagcaagatggaagtgagaagtactatgtggactctgtgaagggccgattcaccatctccagagacaacgccaagaactcactgtatctgcaaatgaacagcctgagagccgaggacacggctgtatattactgtgcgagaggcggaaagttttactatgatactagtggttatcccgaagacttctggggccagggaaccctggtcaccgtctcctca

SEQ ID NO: 12375 - DNA, 307 bp, Homo sapiens
  source 1..307: mol_type = other DNA
tgcagcctctggattcaccttcactgactactggatgagctgggtccgccaggctccagagaaggggctggattgggtggccaacataaagcaagatggaagtgagaagtactatgtggactctgtgaagggccgattcaccatctccagagacaacgccaagaactcactgtatctgcaaatgaacagcctgagagccgaggacacggctgtatattactgtgcgagaggcggaaagttttactatgatactagtggttatcccgaagacttctggggccagggaaccctggtcaccgtctcctca

SEQ ID NO: 12376 - DNA, 307 bp, Homo sapiens
  source 1..307: mol_type = other DNA
tgcagcctctggattcaccttcagtaactactggatgagctgggtccgccaggctccagggaaggggctggattgggtggccaacataaaccaagatggaagtgagaaatactatgtggactctgtgaagggccgattcaccatctccagagacaacgccaagaactcactgtatctgcaaatgaacagcctgagagccgaggacacggctgtgtattactgtgcgagaggcggaaagttttactatgataccagtggttatcccgaagacttctggggccagggaaccctggtcaccgtctcctca

SEQ ID NO: 12377 - DNA, 307 bp, Homo sapiens
  source 1..307: mol_type = other DNA
tgtagtcactggattcacctttagtgactattggatgagctgggtccgccaggctccagggaaggggctggagtgggtggccaacataaagaaagatggaagtgagaaatattatgtggactctgtgaagggccgattcaccatcttcagagacaacgccaagaactcactgtatctggaaatgaacagcctgagagccgaggacacggctgtctattactgtgcgagaggcggcaaattttactatgataccagtggttatcctgaagacttctggggccagggatccctggtcaccgtctcctca

SEQ ID NO: 12378 - DNA, 292 bp, Homo sapiens
  source 1..292: mol_type = other DNA
tgcagcctctggattcactttcagtaatgtctggatgaactgggtccgccaggctccaggaaagggactggagtggcttggccgtattaaaacgagacgtgaaggtgcgcctacagaatacattgcacccgtgaaaggcagattcaccatctcaagagatgattcaaaaaacatgctgtttctgcaaatggacagcctgaaaaccgacgacacagccgtgtattactgtacttctcgtatcacgactacaaatgattactggggccagggaaccctggtcaccgtctcctca

SEQ ID NO: 12379 - DNA, 292 bp, Homo sapiens
  source 1..292: mol_type = other DNA
tgcagcctctggattcagtttcagtaatgtctggatgaactgggtccgccaggctccaggaaaggggctggagtgggttggccgtattaaaaccaaggctgaaggtgtgacaacagaatacattgcacccgtggaaggcagattcaccatctcaagagatgattcaaaaaacacgctgtttctgcaaatgaacaacctgaaaaccgacgacacagccgtgtattattgtacttctcgtatcacgactacaaatgattactggggccagggaaccctggtcaccgtctcctca

SEQ ID NO: 12380 - DNA, 292 bp, Homo sapiens
  source 1..292: mol_type = other DNA
tgcagcctctggattcactttcagtaatgtctggatgaactgggtgcgccaggctccaggaaaggggctggagtggcttggccgtattaaaaccaaagctgaaggtgtgacaacagactacattgcacccgtgaaaggcagattcaccatctcaagagatgattcaagaaatatggtgtttctgcaaatgaacggcctcaaaaccgacgacacagccgtgtattactgtacttctcgtatcacgactacaaatgattactggggccagggaaccctggtcaccgtctcctca

SEQ ID NO: 12381 - DNA, 292 bp, Homo sapiens
  source 1..292: mol_type = other DNA
tgtggcctctggatttagttttagtaacgtctggatgaattgggtccgccagattccagggaaggggctggagtgggttggccgtattatgacccatagtgaagatgagacaacacaatatattgcacccgtgaagggcagattcaccatctccagagatgattcaagaaacacactgtatctacaaatgaacgacctgagaatggaggacacagccctatattattgtacgtctcgaattacgactacgaatgactactggggccagggaaccctggtcaccgtctcctca

SEQ ID NO: 12382 - DNA, 292 bp, Homo sapiens
  source 1..292: mol_type = other DNA
tgcagcctctggattcaatttcgataacgtctggatgaactgggtccgccagattccagggaaggggctgcagtgggttggtcgtattatgaccaaaagggagggcgagaaaacagagttcattgaacccgtgagaggcagattcgtcatctcaagagatgattcaaaaaacacactgtatctgcagatgaccaacctgagaattgaggacacagccctctattattgcacctcccggattacgaccacgaatgactactggggccagggaaccctggtcaccgtctcctca

SEQ ID NO: 12383 - DNA, 292 bp, Homo sapiens
  source 1..292: mol_type = other DNA
tgcagcctctggattcactttcaataaggcctggatgaattgggtccgtcaggctccagggaaggggctggagtggcttggccgtgttaaaactcaacctgaaggagcgacgacagagttcgctccacccgtgaaaggcagattcaccatctcaagagatgattcaagaaacatggtgtttctgcgaatgaacagcctgagttttgaagacacagccgtgtactactgtacctcaaggatcactactacgaatgactactggggccagggaaccctggtcaccgtgtcttca

SEQ ID NO: 12384 - DNA, 292 bp, Homo sapiens
  source 1..292: mol_type = other DNA
tgcagcctctggattcactttcagtaatgcctggatgaactgggtgcgccaggctccaggaaaggggctggagtggcttggccgtgttaagaccaaagctgagggtgtggcaacagactacattgcacccgtgaaaggcagattcaccatctcaagagatgattcaagaaatatggtgtttctgcacatgaacggcctcaaaaccgacgacacagccgtgtattactgtacttctcgtatcacgacaacaaatgactactggggccagggaaccctggtcaccgtgtcctca

SEQ ID NO: 12385 - DNA, 292 bp, Homo sapiens
  source 1..292: mol_type = other DNA
tgcagcctctggattcagtttcagtaatgtctggatgaactgggtccgccaggctccaggaaagggactggagtggcttggacgtattaaaaccaaagctgaaggtgtgcctacagaatacattgcacccgtgaaaggcagattcaccatctcaagagatgattcaaaaaagacactgtatctgcaaatggacagcctgaaaaccgacgacacagccgtgtattactgtacttctcgtatcacgactacaaatgattactggggccagggaaccctggtcaccgtctcctca

SEQ ID NO: 12386 - DNA, 292 bp, Homo sapiens
  source 1..292: mol_type = other DNA
tgcagcctctggattcactttcagtaatgtctggatgaactgggtccgccaggctccaggaaagggactggagtgggttggccgtattaaaaccaaacctgagggtgtgcctacagaatacattgcacccgtgaaaggcagattcaccatctcaagagatgattcaaaaaacacgctgtttctgcaaatggacagcctgaaaaccgacgacacagccgtgtattactgtacttctcgcatcacgactacaaatgattactggggccagggaaccctggtcaccgtctcctca

SEQ ID NO: 12387 - DNA, 283 bp, Homo sapiens
  source 1..283: mol_type = other DNA
tgcagtctctgggtacatcgtcaagaccagctacatgagctgggtccgccaggctccagggaagggcctggagtgggtctcagttatttatgccggtggtagcacatactacgcagactccgtgaagggccgattcaccatctccagagacgattccaggaacacggtggatcttcaaatgaacggcctgacagccgaggacacggccgtatattactgtgcgagaggaggaggtctgcccccaggggagtggggccagggaactctggtaactgtctccgcc

SEQ ID NO: 12388 - DNA, 283 bp, Homo sapiens
  source 1..283: mol_type = other DNA
tgcagcctctggggtcaccgtcagcaccagctacatgagctgggtccgccaggctccagggagcgggctggagtgggtctcagttatttatcccggtggcaacacatactacgcagactccgtgaagggccgattcaccatctccagagacaattccaagaacacgctgtatcttcaaatgaacagcctgagagccgaggacacggccgtttattactgtgcgagggggggcgggctgccccctggagagtggggccagggagccctggtcaccgtctcctcg

SEQ ID NO: 12389 - DNA, 295 bp, Homo sapiens
  source 1..295: mol_type = other DNA
tgcagcctctgaattcacgtttagtacgaattggatgacctgggtccgccaggttccagggaaggcactggcgcgggtggccaccataaaccaagatggaagtgtgaaatactatttggactctgtggagggccgattcaccatctccagagacaacgccgagaagtcactgtacctacaaatgaacagcctgagagtcgacgacacggctgtctattattgtgcgagagggggaagggacagcagttggtactggagagactggggccagggaaccctggtcaccgtctcctca

SEQ ID NO: 12390 - DNA, 295 bp, Homo sapiens
  source 1..295: mol_type = other DNA
tgcagcctctggattcacctttagtacgaattggatgacctgggtccgccaggttccagggaagacactggcgagggtggccaccattgatcaaaatggaagtgaggaatactatttggactctgtgaagggccgattcagcatctccagagacaacgccgagaactcactgcatctacaaatgaacagcctgagagtcgacgacacggctgtatatttttgtgcgagagggggaagggacagcagctggtactggagagactggggccagggaaccctggtcaccgtctcctca

SEQ ID NO: 12391 - DNA, 295 bp, Homo sapiens
  source 1..295: mol_type = other DNA
tgcagcctctggattcacgttcagtaggaattggatgacctgggtccgccaggccccagggaaggggctggagtgggtggccaatataaaagaagatggaagtgagcagtactatgtggagtctgtgaagggccgattcaccatttccagagacaacgccaagagctcactgcatgtgcaaatgaatagcctgagagtcgaggacacggctgtgtattactgtgcgagagggggacgtgacagcagctggtactggagagactggggccagggaaccctggtcaccgtctcctca

SEQ ID NO: 12392 - DNA, 295 bp, Homo sapiens
  source 1..295: mol_type = other DNA
tgcagcctctggattcacgttcagtaggaattggatgacctgggtccgccaggccccagggaaggggctggagtgggtggccaatataaaagaagatggaagtgagcagtactatgtggagtctgtgaagggccgattcaccatttccagagacaacgccaagagctcactgcatgtgcaaatgaacagcctgagagtcgaggacacggctgtgtattactgtgcgagagggggacgtgacagcagctggtactggagagactggggccagggaaccctggtcaccgtctcctca

SEQ ID NO: 12393 - DNA, 295 bp, Homo sapiens
  source 1..295: mol_type = other DNA
tgcagcctctggattcacctttagtaccaattggctgacctgggtccgccaggctccagggaaggggctggagtgggtggccaacataaagcaagatgggcgtgagaaatactatgtggagtctgtgaagggccgattcaccatctccagagacaacgccaagaactcactgtatctgcaaatgagcggcctgagatccgaagacacggctatttattattgtgcgagagggggacgtgacagcagctggtattggagagactggggccagggaaccctggtcaccgtctcctca

SEQ ID NO: 12394 - DNA, 295 bp, Homo sapiens
  source 1..295: mol_type = other DNA
tgcagcctctggattcacgttcaataggaattggatgacctgggtccgccaggccccagggaaggggctggagtgggtggccaatataaaagaagatggaagtgagcagtactatgtggagtctgtgaagggccgattcaccatttccagagacaacgccaagagctcactgcatgtgcaaatgaacagcctgagagtcgaggacacggctgtgtattactgtgcgagagggggacgtgacagcagctggtactggagagactggggccagggaaccctggtcaccgtctcctca

SEQ ID NO: 12395 - DNA, 295 bp, Homo sapiens
  source 1..295: mol_type = other DNA
tgcagcctctggaatcacctttagtaatttttggatgacctgggtccgccaggctccagggaaggggctggagtgggtggccaacatagatcaagatggaaatgcgaaatactatgtggactctgtgaagggccgattcaccatctccagagacaacgccaagaactcactgtatctgcaaatgaacaccctgggagccgaggacacggctgtatattactgtgcgagagggggacgtgacagcagctggtactggagagactggggccagggaaccctggtcaccgtctcctct

SEQ ID NO: 12396 - DNA, 295 bp, Homo sapiens
  source 1..295: mol_type = other DNA
tgcagcctctggattcacgtttagtaggaattggatgacctgggtccgccaggctccagggagggggctggagtgggtggccaacataaaggaggatggaagtgagaagtactatgtggagtctgtgaagggccgattcaccatctccagagacaacgctaagaactcactggacgtgcaaatgaacagcctgagagccgaggacacggctgtgtattattgtgcgagagggggacgtgacagcagctggtattggagagactggggccagggagccctggtcaccgtctcctca

SEQ ID NO: 12397 - DNA, 295 bp, Homo sapiens
  source 1..295: mol_type = other DNA
tgcagcctctggattcacgtttagtaggaactggatgacctgggtccgccaggctccagggaaggggctggagtgggtggccaatataaaagaagatggaagtgagaagtactatgtggagtctgtgaagggccgattcaccatttccagagacaacgccaagaactcactgtatgtgcaaatggacagcctgagagtcgaggacacggccgtctattattgtgcgagagggggacgtgacagcagctggtactggagagactggggccagggaacccaggtcagcgtctcctca

SEQ ID NO: 12398 - DNA, 295 bp, Homo sapiens
  source 1..295: mol_type = other DNA
tgcagcctctggattcacgttcagtaggaattggatgacctgggtccgccaggccccagggaaggggctggagtgggtggccaatataaaagaagatggaagtgagcagtactatgtggagtctgtgaagggccgattcaccatttccagagacaacgccaagagctcactgcatgtgcaaatgaacagcctgagagtcgaggacacggctgtgtattactgtgcgagagggggacgtgacagcagctggtactggagagactggggccggggaaccctggtcaccgtctcctca

SEQ ID NO: 12399 - DNA, 295 bp, Homo sapiens
  source 1..295: mol_type = other DNA
tgcagcctctggattcacgtttagtaggaattggatgacctgggtccgccaggctccagggagggggctggagtgggtggccaacataaaggaggatggaagtgagaagtactatgtggagtctgtgaagggccgattcaccatctccagagacaacgctaagaactcactggacgtgcaaatgaacagcctgagagccgaggacacggctgtgtattattgtgcgagagggggacgtgacagcagctggtactggagagactggggccagggagccctggtcaccgtctcctca

SEQ ID NO: 12400 - DNA, 293 bp, Homo sapiens
  source 1..293: mol_type = other DNA
cagcctctggattcacgttcagtaggaattggatgacctgggtccgccaggccccagggaaggggctggagtgggtggccaatataaaagaagatggaagtgagcagtactatgtggagtctgtgaagggccgattcaccatttccagagacaacgccaagagctcactgcatgtgcaaatgaacagcctgagagtcgaggacacggctgtgtattactgtgcgagagggggacgtgacagcagctggtactggagagactggggccagggaaccctggtcaccgtctcctca

SEQ ID NO: 12401 - DNA, 295 bp, Homo sapiens; identical to SEQ ID NO: 12392
  source 1..295: mol_type = other DNA

SEQ ID NO: 12402 - DNA, 295 bp, Homo sapiens
  source 1..295: mol_type = other DNA
tgcagcctctggattcactttcagtaacgcctggatgacctgggtccgccaggctccagggaaggggctggagtgggttggccgtattaaaagcaaaacggatggtgggacaagagagtacgctgcgcccgtgaaaggcagatttaccatctcaagagatgattcaaaaaacacgctgtatctgcaaatgaacagcctgaaaatcgaggacacagccgtctattactgtatcataggacccaaacactatggtatggacgtctggggccaagggaccacggtcaccgtctcccca

SEQ ID NO: 12403 - DNA, 295 bp, Homo sapiens
  source 1..295: mol_type = other DNA
tgcagtctctggattcactttcagtaacgcctggatgacctgggtccgccaggctccagggaaggggctggagtgggttggccgtattaaaagcaaaacggatggtgggacaagagactacgctgcgcccgtgaaaggcagattcaccatctcaagagatgattcaaaaaacacgctgtatctgcaaatgaacagcctgaaaatcgaggacacagccgtctattactgtatcataggacccaaacactacggtatggacgtctggggccaagggaccacggtcaccgtctcctca

SEQ ID NO: 12404 - DNA, 295 bp, Homo sapiens; identical to SEQ ID NO: 12402
  source 1..295: mol_type = other DNA

SEQ ID NO: 12405 - DNA, 295 bp, Homo sapiens
  source 1..295: mol_type = other DNA
tgcagcctctggattcactttcaagaccgcctggatgacctgggtccgccaggctccagggaaggggctggagtgggttggccgtattaaaagtaaaactgatggtgggacaacagaccacgctgcacccgtgagaggcagattcgccatctcaagagatgattcaaaaaacacactgtatctgcaaatgaacagcctgaaaaccgaggacacagccgtatattactgtatcataggtcccaagcactacggtatggacgtctggggccaagggaccacggtcaccgtctcctca

SEQ ID NO: 12406 - DNA, 298 bp, Homo sapiens
  source 1..298: mol_type = other DNA
tgcagcctctggattcaccttcagtgactctgctattcactgggtccgccaggcttccgggaaagggctggagtgggttggccgtattagaaacaaaactaatagttacgcgacagcatatgctgcgtcggtgaaaggcaggttcaccatctccagagatgattcagagaacacggcgtatctgcaaatgaacagcctgaaaaccgaggacacggccgtgtattactgtactagacgtggggtgggagctacttcccctgactactggggccagggaaccctggtcacggtctcctca

SEQ ID NO: 12407 - DNA, 298 bp, Homo sapiens; identical to SEQ ID NO: 12406
  source 1..298: mol_type = other DNA

SEQ ID NO: 12408 - DNA, 298 bp, Homo sapiens
  source 1..298: mol_type = other DNA
tgcagcctctggattcaccttcagtggatctgctatacactgggtccgccaggcttccgggaaagggctggagtgggttggccgtgttagaagcaaagctaacaattacgcgacaacatatactgcgtcggtgaaaggcaggttcaccatcttcagagatgattcaaagaacacggcgtatctacaaatgaacagcctgaaaaccgaggacgcggccgtgtattactgtactagacgaggagtgggagctacttctcccgactactggggccagggaaccctggtcaccgtctcctca

SEQ ID NO: 12409 - DNA, 286 bp, Homo sapiens
  source 1..286: mol_type = other DNA
cgttgtctatggtgggtccttcaagaatttctattggacctggatccgccaggccccagggaaggggctggagtggattggggaaatctatcatagtggaggcaccaactacaacccgtccctcaagagtcgagtcaccatttcagtggacacgtcgaagaaccagttctccctgagggtgccctctgtgaccgccgcggacacggctgtatattattgtgcgagaggccgatggtcccccacttttgatatctggggccaagggacattggtcaccgtctcttca

SEQ ID NO: 12410 - DNA, 286 bp, Homo sapiens
  source 1..286: mol_type = other DNA
cgctgtctatggtgggtccttcaagaatcactattggacctggatccgccaggccccagggaaggggctggaatggattggggaaatctatcatagtggagacaccaaatataatccgtccctcaagagtcgagtcgccatttcagtggacccgtcgaggaaccagttctccctgaggatgacctctgtgaccgccgcggacacggctgtttattactgtgcgagaggccgatggtcccccacttttgatatctggggccaaggaacattggtcaccgtctcttca

SEQ ID NO: 12411 - DNA, 286 bp, Homo sapiens
  source 1..286: mol_type = other DNA
cgctgtctatggtgtgtccttcagtggtcactactggagctggatccggcagcccccagggaaggggctggagtggattggggaaatcaatcatagtggaaataccaactacaacccgtctctcaggagtcgagtcatcatatcagtagacacgtccaagaaccagttctccctgaagctgacctctgtgaccgccgcggacacggctgtctattactgtgcgagaggccgttggtcacctacttttgatatctggggccaagggacaatggtcaccgtctcttca

SEQ ID NO: 12412 - DNA, 286 bp, Homo sapiens
  source 1..286: mol_type = other DNA
cgctgtctatggtgggtccttcaagaatcattattggacctggatccgccaggccccagggaaggggctggagtggattggggaaatctatcatagtggagacaccaaatacaacccgtccctcaagagtcgagtcgccatttcagtggacacgtcgaggaaccagttctccctgagggtgacctctgtgaccgccgcggacacggctgtatattactgtgcgagaggccgatggtcccccacttttgatatctggggccaagggacattggtcaccgtctcttca

SEQ ID NO: 12413 - DNA, 285 bp, Homo sapiens
  source 1..285: mol_type = other DNA
acgtctggatacaccttcagcacttactatctacactggatgcggcaggcccctggacaaggacttgagtggatgggaatgatcgaccctgggggcggcaccacaatctacgcacagaacttccagggcagagtctccatgacccgggacacgtccattaccacagcgtatatggaaatgagcgacctaaaatctgacgacacggccatttattattgtgtgagagagtttgtgggtggccactttgactactggggccagggaaccctggtcatcgtctcctca

SEQ ID NO: 12414 - DNA, 285 bp, Homo sapiens
  source 1..285: mol_type = other DNA
gcctctggatactccttcaccacctactatttacactggatgcgacaggcccccggacaagggctcgagtgggtgggaataatcaactgtggtagtggctccacaaactacccacagaagttccagggcagagtcaccataaccagggacacgtccacgagcacagtctacatggagttgagaagcctgacgtctgacgacacggccgagtattattgtgtgagagagtttgtcggtggccactttgactattggggcccgggaaccctgatcaccgtctcccca

SEQ ID NO: 12415 - DNA, 285 bp, Homo sapiens
  source 1..285: mol_type = other DNA
acatctggatacacgttcaccaactacttagtacactggatgcgacaggcccctggacaagggcttgagtggatgggatttgtcaacactgccggtggcgacgcacatttcgtccagaagtttcaggttagactcaccagtacaagggatacgtccacgagcacagtgttcatggaaatcaccggcctgagaccggatgacacggccgtatattattgtgtgagagagttcgttgggggccattttgactactggggccagggaaccctggtcaccgtctcctca

SEQ ID NO: 12416 - DNA, 277 bp, Homo sapiens
  source 1..277: mol_type = other DNA
tacaggctctggattcacatttagtagttattggatgacttgggtgcgccaggccccagggaagggcctgcagtgggtggccaacattaatcaggatggaactgagaaacactatatggcctctctgaggggccgcttcaccatctccagagacaacacccggaggtttgtctatctggacatgagccgcctacaagccgaagacacggctctctattactgtgcgggaaacctcatggacgtctggggccaagggaccatggtcaccgtctcccca

SEQ ID NO: 12417 - DNA, 277 bp, Homo sapiens
  source 1..277: mol_type = other DNA
tacagcgtctggattcgccttcagtaattattggatgacttgggtccgccaggctccagggaaggggctggagtgggtcgccaacttgaatcaagatggaagagagaaacattatagtgactctgtgaagggccgattcaccatcggcagagacaacatcaagaactcactgtatctccaaatgaccagcctgagagtcgaggacacggctgtctattactgtgcgggaaacctcatggatgtctggggcaaagggaccatggtcatcgtctcctcg

SEQ ID NO: 12418 - DNA, 277 bp, Homo sapiens
  source 1..277: mol_type = other DNA
ttcagcctctggattcaattttaataattactggatgacctgggtccgccaggctccggggaggggcctggagtggctggccaacatcaaccaacaaggaaccgaggtacactatgcggactctgtcaaggcccgcttcaccatttccagagacaataccaggaacttattgtttctgcaaatgttcagcctgagagtcgacgacacggctctttattattgtgcgggaaatctgatggacgtctggggcacagggacctcggtcaccgtctcctca

SEQ ID NO: 12419 - DNA, 277 bp, Homo sapiens
  source 1..277: mol_type = other DNA
tacaggctctggattcacatttagtagttattggatgacttgggtgcgccaggctccaggaaagggcctgcagtgggtggccaacattaatcaagacggaactgagaaacactatatgggctctctgaggggccgattcaccatctccagagacaacacccggaggtttgtctacctggagatgagccgcctacaagccgaagacacggctgtctattactgtgcgggaaacctcatggacgtctggggccaagggaccatggtcaccgtctcccca

SEQ ID NO: 12420 - DNA, 277 bp, Homo sapiens
  source 1..277: mol_type = other DNA
tacaggctctggattcacgtttagtagttattggatgacttgggtgcgccaggctccagggaagggcctgcagtgggtggccaacattaatcaagatggaactgagaaacactatatggactctctgaggggccgattcaccatctccagagacaacacccggaggtttgtctatctggagatgagccgcctacaagccgaagacacggctgtctattactgtgcgggaaacctaatggacgtctggggccaagggaccatggtcaccgtctcccca

SEQ ID NO: 12421 - DNA, 286 bp, Homo sapiens
  source 1..286: mol_type = other DNA
tgcagcctctggattcaccgccagtagcagctacgtgaactgggtccgccaggctccagggaaggggctggagtgggtctcaatcatctatagtaatggaaatacctattacacaagctccgtgaagggccgattcaccatctccagacacaactccaggaacactgtgtatcttcaaatgaacagcctgagacgggaagacacggccgtgtatttctgcggtagaggtgacttctattacggtgtggacgtctggggccatgggaccacggtcaccgtctcctca

SEQ ID NO: 12422 - DNA, 286 bp, Homo sapiens
  source 1..286: mol_type = other DNA
tgcggcctctgggttcaccgtcagtagcacctacatgaactgggtccgccaggctccagggagggggctggagtgggtctcaattatttatagcaatggtagaacatattacgcagactccgtgaagggccgattcaccatctccagagacagttccaagaacacactctatcttcaaatgaacagcctgagagtcgaggacacggccgtttattactgtgggagaggtgacttctactacggtgtggacgtctggggccaagggaccacggtctccgtctcctcc

SEQ ID NO: 12423 - DNA, 298 bp, Homo sapiens
  source 1..298: mol_type = other DNA
tgcaacgtctggattcgccttcagtcatcatgccgtgcactgggtccgccaggctccaggcaaggggctgcagtgggtgtcacagatatggagtgatggaagtaaaaaaaattatgcagactccgtgaagggccggttcatcatctccagagacagttccaagaacacggtgtatctggaaatgaacagcctgagagtcgaggacacggctgtgtattactgtgcgagagatggtcagcaggcgaccccatacgcaatggacgtctggggccaagggactatggtcaccgtctcctca

SEQ ID NO: 12424 - DNA, 298 bp, Homo sapiens
  source 1..298: mol_type = other DNA
tgcagtctctggattcaccctcagaagtcatggcatgcactgggtccgccaggctccaggcaaggggctggagtggctggcacaaatatggtctgacggaagtaataaatactatgcagactccgtgaggggccgattcaccatctccagagacgactccaaggacacgctgtatctgcagctgaacagcctgcgagccgaggacacggctgtgtattactgtgcgagagatgggcagcaggcgactccatacgctatggacgtctggggccaagggaccacaatcaccgtctcctca

SEQ ID NO: 12425 - DNA, 295 bp, Homo sapiens
  source 1..295: mol_type = other DNA
cactgtttctggtggctccatcagcagtgctagttcctactggagctggatccggcagcccgccgggaagggactggaatggattgggcgtattcatatgagtggggggaccaagtacaacgcctccctcgagagtcgagtcatcatatcaattgacacgtccaagaaccagttctccctgaagctgagctcagtcaccgccgcggacacggccgtctattactgtgcgagagatgcgggggcaagcggacccgaggactactggggccagggaaccctggtcaccgtctcctca

SEQ ID NO: 12426 - DNA, 295 bp, Homo sapiens
  source 1..295: mol_type = other DNA
cactgtctctggtggctccgtcaaaactgctacttcctactggagctgggtccggcagcccgccgggaagggactggaatggattgggcgcattcacatgagtggggagaccaactacaacgcctccctcgagagtcgagtcctcatatcaattgacacgtccaagaaccagttctccctgaagctgacctcagtcaccgccgcggacacggccgtctattactgtgcgagagatgcgggggcaagcggacccgaggactactggggccagggaaccctggtcaccgtctcctca

SEQ ID NO: 12427 - DNA, 295 bp, Homo sapiens
  source 1..295: mol_type = other DNA
cactgtctctggtggctccatcagcagtgacagtttctactgggcctggatccggcagccccccgggaagggactggagtggattgggcgtatccatgttagtgggggcaccgactacaacgcctccctcaggggtcgagtcaccatatcagtagacacgtccaagaaccaattctccctaaacctgaactttgtgaccgccgcagacacggccgtgtattactgtgcgagggatgcgggagcttcaggccctgaagactactggggccaggggaccctggtcaccgtctcctca

SEQ ID NO: 12428 - DNA, 295 bp, Homo sapiens
  source 1..295: mol_type = other DNA
cactgtctctggtggctccatcagcagtgacagtttctactgggcctggatccggcagccccccgggaagggactggagtggattgggcgtatccatgttagtgggggcaccgactacaacgcctccctcaggggtcgagtcaccatatcagtagacacgtccaagaaccaattctccctaaacctgaaccttgtgaccgccgcagacacggccgtgtattactgtgcgagggatgcgggagcttcaggccctgaagactactggggccaggggaccctggtcaccgtctcctca

SEQ ID NO: 12429 - DNA, 295 bp, Homo sapiens
  source 1..295: mol_type = other DNA
cactgtctctggtggctccatcagcagtgacagtttctactgggcctggatccggcagccccccgggaagggactggagtggattgggcgtacccatgttagtgggggcaccgactacaacgcctccctcaggggtcgagtcaccatatcagtagacacgtccaagaaccaattctccctaaacctgaactttgtgaccgccgcagacacggccgtgtattactgtgcgagggatgcgggagcttcaggccctgaagactactggggccaggggaccctggtcaccgtctcctca

SEQ ID NO: 12430 - DNA, 289 bp, Homo sapiens
  source 1..289: mol_type = other DNA
tgcagcctctggattcagtttcagtgacacctggatgagctgggtccgccaggctccagggaaggggctggagtgggttggccgtattaaaagaaaaactgatggtggaacaacggactacgctgcacccatgaaaggcagattcaccatctcaagagatgattcaaaaaatacactgtatctgcagatgaacagcctgaaaaccgaggacacagccctgtatcactgtgcctcagggggacactactttggctcctggggccagggagccctggtcaccgtctcctca

SEQ ID NO: 12431 - DNA, 289 bp, Homo sapiens
  source 1..289: mol_type = other DNA
tccaggctctggattcagtctcagtaacgcctggatgagctgggtccgccaggctccagggaaggggctggagtgggttggccgtattaaaagcaaaactgatggtgcgacaacagactacactccacccgtgaacggcagattcaccatctcaagagatgattcaagaaacaccctgtatctgcaaatgaacagcctgaacaccgaggacacagccgtctattattgtgcctcaggaggccattactttggttcgtggggccagggaaccctggtcagcgtctcctca

SEQ ID NO: 12432 - DNA, 288 bp, Homo sapiens
  source 1..288: mol_type = other DNA
gcttctggatacaccttcaccggctactatatgcactgggtgcgacaggcccctggacaagggcttgagtggatgggatggatcaaccctaacagtggtggcacaaactgtacacagaagtttcagggcagggtctccatgaccagggacacgtccatcagcacagcctacatggagctgaggaggctgagatatgacgacacggccgtatattactgtgcgagagagggggcagtggctggtgactttgactactggggccagggaaccctggtcaccgtctcctca

SEQ ID NO: 12433 - DNA, 288 bp, Homo sapiens
  source 1..288: mol_type = other DNA
gcttctggatacaccttcaccggctactatatgcactgggtgcgacaggcccctggacaagggcttgagtggatgggatggatcaaccctaacactggtgacacaaactatgcacagaggtttcagggcagggtcaccatgaccagggacacgtccatcagcacagcctacatggaactgaggagacttaaatctgacgacacggccgtgtattactgtgcgagagagggggcagtggctggcgactttgactattggggccagggaaccctggtcaccgtctcctca

SEQ ID NO: 12434 - DNA, 288 bp, Homo sapiens
  source 1..288: mol_type = other DNA
acttctggatacaccttcaccacttttgatatcaactggatgcgacaggcccctggacaagggtttgagtggctgggatggatgaacccaaacaatggtcacacaggctatgcacagaagttccagggcagagtcagcatgaccagggacacctccaaaagtacagcctacatggaactgaggaacctaagatctgaggacacggccgtctattactgtgcgagaaatccagccttcactggggatttcgacccctggggccaaggaaccctgctcaccgtctcctca

SEQ ID NO: 12435 - DNA, 288 bp, Homo sapiens
  source 1..288: mol_type = other DNA
acttctggatacaccttcaccacttttgatatcaactggatgcgacaggcccctggacaagggtttgagtggctgggatggatgaatcctcagaatggtcacacaggctatgcacagaggttccagggcagactcagcatgaccagggacacctccaaaagtacagcctacatggaactgaggaacctaagatctgatgacacggccgtctattattgtgcgagaaatccagccttcactggggatttcgacccctggggccagggaaccctgctcaccgtctcctca

SEQ ID NO: 12436 - DNA, 288 bp, Homo sapiens
  source 1..288: mol_type = other DNA
acttctggatacatcttcaccacttttgatatcaactggatgcgacaggcccctggacaagggtttgagtggctgggttggatgaatcctcagaatggtcacacaggctatgcacagaggttccagggcagactcagcatgaccagggacacctccaaaagtacagcctacatggaactgaggaacgtaagatctgatgacacggccgtctattattgtgcgagaaatccagccttcactggggatttcgacccctggggccagggaaccctgctcaccgtctcctca

SEQ ID NO: 12437 - DNA, 288 bp, Homo sapiens
  source 1..288: mol_type = other DNA
gcttctggatacaccttcaccaattatgacatcaactgggtgcgacaggccactggacaagggcttgagtggctgggatggatgaaccctaatagcggtaaaacaggctatgcacagaggttccagggcagagtcaccatgaccagggacacctccataagcacagcctacatggagctgagcagcctcagatctgaggacacggccgtgtattattgtgcgaggaatccggcttttactggggatttcgacccctggggccagggaaccctggtcaccgtctcctca

SEQ ID NO: 12438 - DNA, 301 bp, Homo sapiens
  source 1..301: mol_type = other DNA
tgcagcctctggatttatcgtcagtagcaactacatgacttgggtccgccaggctccagggaaggggctggagtgggtctcgactgtctatagcggtggtaccacatcctacgcagactctgtgaggggccgattcatcatctccagagacaattccaagaacacactgtatcttcaaatgaacagcctgagagccgaggacacggccgtgtattattgtgcgagagattttggcgatgatactactggttattacggtatggacgtctggggccaagggaccacggtcaccgtctcctca

SEQ ID NO: 12439 - DNA, 301 bp, Homo sapiens
  source 1..301: mol_type = other DNA
tgcagcctctggattcaccgtcagtagcaactacatgagttgggtccgccaggctccagggaaggggctggagtgggtctcaactgtctatagcggtggcaccacagcctacgcagattctatgaggggccgattcatcatctccagagacaattccaagaacacactgtatcttcaaatgaacagcctgagagccgaggacacggccgtgtattattgtgcgagagattttggcgatgatactactggttattatggtatggacgtctggggccaagggaccacggtcaccgtctcctca

SEQ ID NO: 12440 - DNA, 301 bp, Homo sapiens
  source 1..301: mol_type = other DNA
tgcagcctctgggttcaccgtcagtagcaactacatgagctgggtccgccaggctccagggaaggggttggagtgggtctcaactattcatagcggtggtagtagattccacgcagactccgtgaagggccgattcaccatctccagagacaattccaagaacacgctgtatcttcaaatgaacagcctgagagtcgaggacacggccgtatattactgtgcgagagatttcggtgatgatactactggttattacggaatggacgtctggggccaagggaccacggtcaccgtctcctca

SEQ ID NO: 12441 - DNA, 283 bp, Homo sapiens
  source 1..283: mol_type = other DNA
tgcagcctctgaattcaccgtcaataccgacttcatgacctgggtccgccaggctccagggcagggactggagtgggtctcagttatgtatgccggcggtgagacatattacgcagactccgtgaagggccgatttaccgtctccagagacagttccacgaacatattatatctgcaaatagatagtctgagaggtgaggacacggctgtttactactgtgcgagagatcccttccagccgtggggccactggggccagggaaccctggtcaccgtctcctca

SEQ ID NO: 12442 - DNA, 283 bp, Homo sapiens
  source 1..283: mol_type = other DNA
tgcagcctctgaattcaccgtcaataccgacttcatgacctgggtccgccaggctccagggcagggactggagtgggtctcagttatgtatgccggcggtgagacatattacgcagactccgtgaagggccgatttaccgtctccagagacagttccacgaacatattatatcttcaaatagatagcctgagaggtgaggacacggctgtttactactgtgcgagagatcccttccagccgtggggccactggggccagggaaccctggtcaccgtctcctca

SEQ ID NO: 12443 - DNA, 283 bp, Homo sapiens
  source 1..283: mol_type = other DNA
tgcagcctttgaattcatcgtcagtgacaactacatgagctgggtccggcaggctccagggaaggggctggagtggctctcagttatttataaaaatggagacacgcactacgcagactccgtgaagggccgattcaccgtctccagagacaattccaagaacacactatatcttcaaataaacagcctgagaggtgaggacacggctgtatattactgtgcgagagatcccttccagccctggggccactggggccagggaatcctggtcaccgtctcctca

SEQ ID NO: 12444 - DNA, 292 bp, Homo sapiens
  source 1..292: mol_type = other DNA
tgttgtctctggattcaccgtcagtaccaacttcatgacttgggtccgccaggctccagggaaggggctgcggtggctctcaactatttattccgctgctgccgggggttctacgtaccacgcagactccgtgaagggccgattcaccatctccagagacagttccaagaacacactttatcttcaaatagacagtctgagaactgacgacacggctgtgtattattgtgcgagagatccctttcaaccatggggccactggggccggggaaccctggtcaccgtctcctca

SEQ ID NO: 12445 - DNA, 295 bp, Homo sapiens
  source 1..295: mol_type = other DNA
tacagcctctggattcgcccttagcagctctgccgtgagctgggtccgccaggctccagggaaggggctggagtgggtctctgctcttagcggtagtgctgttgacacattctacgcagactccgtgaagggccggttcaccatctccagagtcaatgccaagaacacgctatatctgcaaatgaacagcctgagagccgaggacacggccgtttattactgtgcgaaagcctatagcagcagctggtactactttgacttctggggccagggaaccctggtcaccgtctcctca

SEQ ID NO: 12446 - DNA, 295 bp, Homo sapiens
  source 1..295: mol_type = other DNA
tgcagcctctggattcgcctttagcagctatcccatgagctgggtccgccaggctccagggaaggggctagagtgggtctcaattttttataacggtgctgataacacatactatgccgactccgtgaagggccgcttcaccatctccagagataattccaagaacacgctgtatctgcaaatgaacagcctgagagccgacgacacggccatatattactgtgcgaaagcttatagcagcagctggtactactttgacttctggggccagggaaccctggtcaccgtctcctca

SEQ ID NO: 12447 - DNA, 295 bp, Homo sapiens
  source 1..295: mol_type = other DNA
tgcagcctctggattcgcctttagcagctatcccatgagctgggtccgccaggctccagggaaggggctagagtgggtctcaattttttatgacggtgctgataacacatactatgccgactccgtgaagggccgcttcaccatctccagagataattccaagaacacgctgtatctgcaaatggacagcctgagagccgacgacacggccatatattactgtgcgaaagcttatagcagcagctggtactactttgacttctggggccagggaaccctggtcaccgtctcctca

SEQ ID NO: 12448 - DNA, 286 bp, Homo sapiens
  source 1..286: mol_type = other DNA
tgcagcgtctgaattcagtatcagtgactactggatgcactgggtccgccaagctcctgggaagggcctgctgtgggtctcacacattagtaatgacgggaggagcgttaattacgtggactctgtgaggggccgattcaccatctccagagacaacgccaagaacaccgtatatgtgcaaatgaacagcctgagagccgaggacacggctgtttattactgtgcaagggggaccgaccgcgctatggacgtctggggccacgggaccgcggtcaccgtctcctcc

SEQ ID NO: 12449 - DNA, 286 bp, Homo sapiens
  source 1..286: mol_type = other DNA
tgcagcgtctgaattcagtatcagtgactactggatgcactgggtccgccaagctcctgggaagggcctgctgtgggtctcacacattagtaatgacgggaggagcgttaattacgcggactctgtgaggggccgattcaccatctccagagacaacgccaagaacaccgtatatgtgcaaatgaacagcctgagagccgaggacacggctgtttattactgtgcaagggggaccgaccgcgctatggacgtctggggccacgggaccgcggtcaccgtctcctcc

SEQ ID NO: 12450 - DNA, 286 bp, Homo sapiens
  source 1..286: mol_type = other DNA
tggagcctctggattcaccctcagtggttattggatgcactgggtccgccaaactccagggaagggcctggtgtgggtctcacatattagcagtgatgggagtatcataaactacgcggactccgtgaacggccgattcaccatctccagagacaacgccaagaacacggtgcatctgcacatgaacagtctcagggtcgaggacacggctgtctattactgtgcaagggggaccgatcgtgctatggacgtctggggccaagggaccacggtcaccgtctcctca

SEQ ID NO: 12451 - DNA, 286 bp, Homo sapiens
  source 1..286: mol_type = other DNA
tggagcctctggattcaccctcagtggttattggatgcactgggtccgccaaactccagggaagggcctggtgtgggtctcacatattagcagtgatgggagtatcataaactacgcggactccgtgaacggccgattcaccatctccagagacaacgccaagaacacggtgcatctgcacatgaacagtctcagggtcgagggcacggctgtctattactgtgcaagggggaccgatcgtgctatggacgtctggggccaagggaccacggtcaccgtctcctca

SEQ ID NO: 12452 - DNA, 286 bp, Homo sapiens
  source 1..286: mol_type = other DNA
tggagcctctggattcaccctcagtggttattggatgcactgggtccgccaaactccagggaagggcctggtgtgggtctcacatattagcagtgatgggagtatcataaactacgcggactccctgaacggccgattcaccatctccagagacaacgccaagaacacggtgcatctgcacatgaacagtctcagggtcgaggacacggctgtctattactgtgcaagggggaccgatcgtgctatggacgtctggggccaagggaccacggtcaccgtctcctca

SEQ ID NO: 12453 - DNA, 286 bp, Homo sapiens
  source 1..286: mol_type = other DNA
tggagcctctgaattcagcctcagaacttattggatggactgggtccgccaaactccagggaagggcctggagtgggtctcacatattaacagtgaggggagtatcataaactacgcggactccgtgaggggccgattcaccatctccagagacaacgccaagaacacagtgcatctacagatgagcagtctcagagtcgaggacacggctgtctattactgtgcaagggggaccgatcgtgctatggacgtctggggccaagggaccacggtcaccgtctcctca

SEQ ID NO: 12454 - DNA, 286 bp, Homo sapiens
  source 1..286: mol_type = other DNA
tggagccactggattcaccctcagtggttattggatgcactgggtccgccaaactccggggaagggcctggtgtgggtctcacatattagcagtgatgggagtatcataaactacgcggactccgtgaacggccgattcaccatctccagagacaacgccaagaacacggtgcatctgcacatgaacagtctcagggtcgaggacacggctgtctattactgtgcaagggggaccgatcgtgctatggacgtctggggccaagggaccacggtcaccgtctcctca

SEQ ID NO: 12455 - DNA, 286 bp, Homo sapiens
  source 1..286: mol_type = other DNA
tggagcctctggattcaccctcagtggttattggatgcactgggtccgccaaactccagggaagggcctggtgtgggtctcacatattagcagtgatgggagtatcataaactacgcggactccgtgaacggccgattcaccatctccagagacaacgccaagaacacggtgcatctgcacatgaacagtctcagggtcgaggacacggctgtctattattgtgcaagggggaccgatcgtgctatggacgtctggggccaagggaccacggtcaccgtctcctca

SEQ ID NO: 12456 - DNA, 286 bp, Homo sapiens
  source 1..286: mol_type = other DNA
tggagcctctggattcaccctcagtggttattggatgcactgggtccgccaaactccagggaagggcctggtgtgggtcccacatattagcagtgatgggagtatcataaactacgcggactccgtgaacggccgattcaccatctccagagacaacgccaagaacacggtgcatctgcacatgaacagtctcagggtcgaggacacggctgtctattactgtgcaagggggaccgatcgtgctatggacgtctggggccaagggaccacggtcaccgtctcctca

SEQ ID NO: 12457 - DNA, 318 bp, Homo sapiens
  source 1..318: mol_type = other DNA
acacagaccctcacgctgacctgcaccttctctgggttctcactcagcactaatggagtggctgtgggctggatccgtcagcccccaggaaaggccctggagtggcttacactcatttattgggatgatgataagcgctacaacccatctctgaagagcaggctcaccatcaccaaggacagctccaaaagccaggtggtccttacaatgaccaacatggaccctgtggacacagccacatattattgtggacgcaggttggcagcagctggcctctttgactactggggccagggaaccctggtcaccgtctcctca

SEQ ID NO: 12458 - DNA, 318 bp, Homo sapiens
  source 1..318: mol_type = other DNA
acacagaccctcacgctgacctgcaccttctctgggttctcactcagcactagtggaatggctgtgggctggatccgtcagcctccaggaaaggccctggagtggcttgcactcgtttattggaatgatgataagcgctacagaccatctctgaggagcaggctcaccatcaccaaggacacctccaaaaaccaggtggtccttacaatgaccaacatggaccctgtggacacagccacatattattgtggacgccgtttagcagcagctggcctctttgactactggggccaggggaccctggtcaccgtctcctca

SEQ ID NO: 12459 - DNA, 301 bp, Homo sapiens
  source 1..301: mol_type = other DNA
cgctgtctctactggctccttcagcaataatgattactactggagctggatccggcagcccgccgggaagggactggagtggattgggcgtatcttctccagtggaagcgccaactacaacccctccctcaagagtcgagtcaccatgtcagtgaacacgtccaagaaccagttctccctgagactgagccctgtgaccgccgctgacacggccgtgtattactgtgcgagagcgggctacggtgactacgtcggctactttgactactggggccagggaattatggtcaccgtctccaca

SEQ ID NO: 12460 - DNA, 304 bp, Homo sapiens
  source 1..304: mol_type = other DNA
cactgtctctggtgactccatcagcggcagtggtagttactactggagctggatccggcagcccgccgggaagggactggagtggattgggcgtatctataccagtgggagcaccaactacaacccctccctcaagggtcgagtcaccatatcagttgacacgtccaagaaccagttctccctgaagctgaggtctgtgaacgccgcagacacggccgtatattactgtgcgagggcggggtacggtgactacgtgggctactttgactactggggccagggaaccctggtcaccgtctcctca

SEQ ID NO: 12461 - DNA, 283 bp, Homo sapiens
  source 1..283: mol_type = other DNA
cactgtctctggttggcccatcactggatacttctggacctggatccggcagtccccagggaagggactggagtggattggttacatctcttacagtggggacaccaactacaacccctccttcaagagtcgggtcaccatgtcagtagacacggccaagagccagttctccctgaaactgagctctgtgaccgctgcggacacggccgtgtattactgtgcgagagaatttagatcttctcctgactactggggccagggaaccctggtcaccgtctcctca

SEQ ID NO: 12462 - DNA, 283 bp, Homo sapiens
  source 1..283: mol_type = other DNA
cactgtctctggtctgtccatcagtggctattactgggcctggatccgccagccccccgggaagggactggagtggattggggttgtctcctggagtggagacaccaactacaacccctccctccagagccgagtcactctatcggtagacatgtccaagagccagttctccctgaggctggactctgtgaccgctgcagacacggccatgtattattgtgcgagagagttccgatcatcccctgactactggggccagggaaccctggtctccgtctcctcc

SEQ ID NO: 12463 - DNA, 301 bp, Homo sapiens
  source 1..301: mol_type = other DNA
tgtagcctctggactcacctttagtacctattggatggcctgggtccgccaggctccagggcaggggctggagtgggtggccaacgtaagacaagatggaggtgagaaatattatgtggactctgtgaagggccgattcaccatctccagagacaacgccaagaactcactgtatctgcaaatgagcagcctgagaggcgacgacacggctgtgtattactgtgcgcgaattatggactacggtgaccgccactacggtatggacgtctggggccaagggacctcggtcaccgtctcctca

SEQ ID NO: 12464 - DNA, 301 bp, Homo sapiens
  source 1..301: mol_type = other DNA
tgcgacctccggattcagttttagtccctattggatggcctgggtccgccaagctccagggaaggggctgcagtgggtggccaacataaacggagatggaggtgagaaatactatgtggactctgtgaagggccgattcaccatctccagagacaacgccaagaactcactgtttctacaaatgaacagcctgagagtcgaggacacggccgtgtattactgtgcgagaataatggactacggtgaccgccactacggtatggacgtctggggccaagggaccacggtcaccgtctcgtca

SEQ ID NO: 12465 - DNA, 298 bp, Homo sapiens
  source 1..298: mol_type = other DNA
tgcagcgtctggattcaccttcagtagctatggcatgcactgggtccgccaggctccaggcaaggggctggagtgggtggcagttatatggtatgatggaagtaataaatactatgcagactccgtgaagggccgattcaccatctccagagacaattccaagaacacgctgtatctgcaaatgaacagcctgagagccgaggacacggctgtgtattactgtgctagggaatattgtagtggtggtagctgccaccttgactactggggccagggaaccctggtcaccgtctcctca

SEQ ID NO: 12466 - DNA, 298 bp, Homo sapiens
  source 1..298: mol_type = other DNA
tgcagcgtctggattcaccttcagtaattatggcataaattgggtccgccaggctccaggcaaggggctagagtgggtggcagttatatggtatgatggaactaataaatactatgcagactccgtgaagggccgattcaccatctccagagacaattccaagaacacattgtatctgcaaatgaacagcctgagagccgaggacacggctgtctattactgtgcgagagaatattgtagtggtggtagctgccacctagactactggggccagggaaccctggtcaccgtctcctca

SEQ ID NO: 12467 - DNA, 274 bp, Homo sapiens
  source 1..274: mol_type = other DNA
tgcagcctctggattcaccgtcagtaactatgggatgaactggttccgccaggctccagggaagggactggagtgggtctcatccattagtagtagtggtcacacatactacgtagactcagtgaagggccgattcaccgtctccagagacaacgccaagaactcactgtttctgcaaatgaacagcctgagagccgaggacacgtctgtgtattactgtgcgagagatgggtttgatatctggggccaagggacagtggtcaccgtctcttca

SEQ ID NO: 12468 - DNA, 274 bp, Homo sapiens
  source 1..274: mol_type = other DNA
tgcagcctctggattcagcatcactgcctatggcatgaactgggtccgccaggttccagggaaggggctggagtgggtctcatccatttctagtacttattccgtgtactatgcggactcagtgaggggccgatccaccatctccagagacaacgccaagaactcactgtatttgcaagtgaacagtctgcgcgccgaggacacggctctatattactgtgcgagagatgggtttgatatctggggcctggggacaatggtcaccgtctcttca

SEQ ID NO: 12469 - DNA, 310 bp, Homo sapiens
  source 1..310: mol_type = other DNA
cactgtctccggtgcctccctcaggagttactactggacctggatccggcagcccgccgggaagggactggagtggattggccgtatatataatagtgggagcaccaagtacaacccctccctcaggagtcgagtcaccatttcagcagacacgtccaacaaccagttctccctgacggtgatctctgtgaccgccgcggacacggccgtatattattgcgcgagatacggttgtactggtggtgtgtgtcatagtgattatttcggtatggacgtctggggcccagggaccacggtcaccgtctcctca

SEQ ID NO: 12470 - DNA, 310 bp, Homo sapiens
  source 1..310: mol_type = other DNA
cactgtctctggtggctccatcagtacttaccactggagctggatccggcagcccgccgggaagggactggagtggattgggcgtatctataacagtgggagcaccaagtacaacccctccctcaagagtcgagtcaccatgtcactagacacgtccaagaaccagttctccctgaagctgagccctgtgaccgccgcggacacggccgtgtattactgtgcgagatatggttgtactggtggtgtatgccatagcgactacttcggtatggacgtctggggccaagggaccacggtcaccgtctcctca

SEQ ID NO: 12471 - DNA, 310 bp, Homo sapiens
  source 1..310: mol_type = other DNA
cactgtctccggtgcctccctcagtagttactactggacgtggatccggcagcccgccgggaagggactggagtggattggccgtatatataatactgggagcaccagatacaatccctccctcaggagtcgagtcaccatttcagcagacacgtccaacaaccagttctccctgacggtgatctctgtgaccgccgcggacacggccgtatattactgcgcgagatatggttgtactggtggtgtgtgtcatagtgattatttcggtatggacgtctggggcccagggaccacggtcaccgtctcctca

SEQ ID NO: 12472 - DNA, 283 bp, Homo sapiens
  source 1..283: mol_type = other DNA
tgcagcctctggattcacttttagcgtctatgccatgagctgggtccgccaggctccagggaaggggctggagtgggtctcaggaattattggtagtggtgctaccacatactacgcagactccgtgaagggccggttcaccatctccagagacaattccaagaacacgctctatttgcaaatgaacagcctgagagacgaagacacggccgtatattactgtgtgaggtccccgcggctgtctgactactggggccagggaaccctggtcaccgtctcctca

SEQ ID NO: 12473 - DNA, 283 bp, Homo sapiens
  source 1..283: mol_type = other DNA
tgcagcctctggattcacctttagcgtctatgccatgagctgggtccgccaggctccagggaaggggctggagtgggtctcaggaattattggtagtggtgctaccacatactacgcagactccgtgaagggccggttcaccatctccagagacaattccaagaacacgctctatttgcaaatgaacagcctgagagacgaagacacggccgtatattactgtgtgaggtccccgcggctgtctgactactggggccagggaaccctggtcaccgtctcctca

SEQ ID NO: 12474 - DNA, 286 bp, Homo sapiens
  source 1..286: mol_type = other DNA
tgcagcctctggattcacctttatttcctatgacatgagctgggtccgccaggctccagggaagggtctggagtgggtcgcaggtattgccactggtgatggtggtagtacattctatgcagattccgtgaagggccggttcaccatctccagagacaatgacaagaacatactgtatctgcaaatgaagagcctgagagccgaggacacggccatatattactgtgtgagatcccctaggctttcggactactggggccagggaacccgggtcaccgtctcctca

SEQ ID NO: 12475 - DNA, 310 bp, Homo sapiens
  source 1..310: mol_type = other DNA
tgtagtctctggattcactttcagtaatgcctggatgacctgggtccgccaggttccagggaaggggctggagtgggttggccgtattaaaacgagaagtgatggcgggatactagactacattgcacccgtaaaaggtagattcaccatctcacgagatgattcaaaaaacacgctgtatctgcaaatgaaaagcctgaaaaccgaagacacaggaatatattattgtactaaggaggtgggagctactgggctctactactacgggatggacgtctggggccaagggaccacggtcaccgtctcctca

SEQ ID NO: 12476 - DNA, 310 bp, Homo sapiens
  source 1..310: mol_type = other DNA
tgcagcctctggatttacttttactaatgcctggatgagctgggtccgccaggctccagggaaggggctggagtgggttggccgtataaagagcacagctgaaggtgggatactggactacactgcatccatgaaaggcagattcaccatctcaagagatgattcaaaaaccacgttatatcttcaaatgaacagcctggaaatcgaggacacagccgtctattactgtacgaaagaagtgggagctactggcctttactactacggtatggacgtctggggccaaggggccacggtcaccgtctcttac

SEQ ID NO: 12477 - DNA, 310 bp, Homo sapiens
  source 1..310: mol_type = other DNA
tgcagcctctggatttacttttactaatgcctggatgagctgggtccgccaggctccagggaaggggctggagtgggttggccgtataaagagcacagctgaaggtgggatactggactacactgcatccatgaaaggcagattcaccatctcaagagatgattcaaaaaccacgttatatcttcaaatgaacagcctggaaatcgaggacacagccgtctattactgtacgaaagaagtgggagctactggcctttactactacggtatggacgtctggggccagggggccacggtcaccgtctcttac

SEQ ID NO: 12478 - DNA, 310 bp, Homo sapiens
  source 1..310: mol_type = other DNA
tgcagcctctggatttacttttactaatgcctggatgagctgggtccgccaggctccagggaaggggctggagtgggttggccgtataaagagcacagctgaaggtgggatactggactacactgcatccatgaaaggcagattcaccatctcaagagatggttcaaaaaccacgttatatcttcaaatgaacagcctggaaatcgaggacacagccgtctattactgtacgaaagaagtgggagctactggcctttactactacggtatggacgtctggggccaaggggccacggtcaccgtctcttac

SEQ ID NO: 12479 - DNA, 310 bp, Homo sapiens
  source 1..310: mol_type = other DNA
tgcagcctctggatttacttttaataatgcctggatgagctgggtccgccaggctccagggaaggggctggagtgggttggccgtattaaaagcacagctgaaggtgggacactggactacactgcatccatgaaaggcagattcaccatctcaagagatgattcaaaaaccacgttatatctgcaaatgaacagcctggaaaccgaggacacagccgtctattactgtacgaaagaagtgggagctactgggctttactactacggtatggacgtctggggccaaggggccacggtcaccgtctcttcc

SEQ ID NO: 12480 - DNA, 301 bp, Homo sapiens
  source 1..301: mol_type = other DNA
cagtgtctctggtggctccatcagcgctgctaattactactggggctggttccgccagcccccagagaagggactggagtggcttgggacattgtcttatagcggaagcgcctactacaacccgtccctcaagagtcgagtcaccatatccgtcgccacgtccgagaatcagttctccctgaacctgaactctgtgaccgccggagacacggctctctattactgtgcgaggatctatggcgatactccaccctggtacttcgatctctggggccgtggcaccctggtcactgtctcttca

SEQ ID NO: 12481 - DNA, 301 bp, Homo sapiens
  source 1..301: mol_type = other DNA
cactgtctctggtgactccattagcagtagtacttactactgggggtggatccgccagcccccagggaagggactggagtggattgggactatctattatagtgggagcgcctactacagcccgtccctcacgagtcgagtcaccataaccatagacacgtccaagaaccagttctccctgaagctgacctctgtgaccgccgcagatatggctgtttattactgtgcgaggatctacggtgacacccccccctggtacttcgatctctggggccgtggcaccctggtcactgtctcctca

SEQ ID NO: 12482 - DNA, 307 bp, Homo sapiens
  source 1..307: mol_type = other DNA
cactgtctctggtggccccatcagtagttactactggagctggatccggcagcccccagggaagggactggagtggattggatatatctattacagtgggagcaccaactacaacccctccctcaagagtcgcgtcaccatatcagtagacacgtccaagaaccagttctccctgaagctgagctctgtgaccgctgcggacacggccgtgtattactgtgcgagagaccgatattgtagtggtggtagctgctttgactggtacttcgatctctggggccgtggcaccctggtcactgtctcctca

SEQ ID NO: 12483 - DNA, 307 bp, Homo sapiens
  source 1..307: mol_type = other DNA
cactgtctctggtggctccatcagtggttactactggagctggatccggcagcccccagggaagggactggagtggattgggtttgtctatgacagtgggagaacccactacaacccctccctcaagagtcgagtcaccatctcagtggacacgtccacgaaccagttctccttgaagctgacgtctgtgtccgctgcggacacggccgtgtattactgtgcgagagatagatattgtagtggtggtagttgtttcgactggtacttcgatctctggggccgtggcaccctggtcactgtctcctca

SEQ ID NO: 12484 - DNA, 307 bp, Homo sapiens
  source 1..307: mol_type = other DNA
cactgtctctggtggctccatcagtggttactactggagctgggtccggcagtccccaggggagggactggagtggattgggtttatccattacagtgggcgcacccactacaatccctccctcaagagtcgagtcatcatatccgcagacatgcccaataaccaattctccctgaagttgacgtctgtgaccgctgcggacacgggcgtgtattactgtgcgagagataggtattgtagtggtggcagttgcttcgactggtacttcgatctctggggccgtggcaccctggtcactgtctcttca

SEQ ID NO: 12485 - DNA, 307 bp, Homo sapiens
  source 1..307: mol_type = other DNA
cactgtctctggtggctccatcagtggttattattggagttgggtccggcagtccccagggaagggactggagtggattggctttattcattacaatggaagaaccaactacaacccctccctcaagagtcgagtcaccatgtcagtagacatgtccaaaaatcaattctccctgaagctgacgtctgtgaccgctgcggacacggccgtctattattgtgcgagagatagatattgcagtggcggtagttgcttcgactggtacttcgatctctggggccgtggcaccctcattactgtctcttca

SEQ ID NO: 12486 - DNA, 307 bp, Homo sapiens
  source 1..307: mol_type = other DNA
cactgtctctggtggctccatcagtggttactactggagctggatccggcagcccccagggaagggactggagtggattgggtttgtctttgacagtgggagaacccactacaacccctccctcaagagtcgagtcaccatctcagtagacacgtccacgaaccagttctccttgaagctgacgtctgtgtccgctgcggacacggccgtgtattactgtgcgagagatagatattgtagtggtggtagttgtttcgactggtacttcgatctctggggccgtggcaccctggtcactgtctcctca

SEQ ID NO: 12487 - DNA, 307 bp, Homo sapiens
  source 1..307: mol_type = other DNA
cactgtctctggtggccccatcagtagttactcctggagctggatccggcagccccccgggaagggactggagtggattgggtacatctatgacactgatcacaccaattacaacccctccctcaagagtcgagtcaccatatcagtagacacgtccaagaacaagttctccctgaagttgaactctgtgaccgctgcggacacggccgtctattattgtgcgagagatagatattgcagcggtggtagctgcttcgactggtacttcgatctctggggccgtggcaccctggtcactgtctcctca

SEQ ID NO: 12488 - DNA, 307 bp, Homo sapiens
  source 1..307: mol_type = other DNA
cactgtctctggtggctctatcagtggttactcctggagctggatccggcagcccccagggcagggactggagtggattgggtttatctttcacagtggatacatcaactacaacccctccctcaagagtcgagtcaccatatcagtagacacgtccaaaaaccagttctccctgaagctgagttctgtgaccgctgcggacacggccgtgtattactgtgcgagagatagatattgtagtggtggtagctgcttcgactggtacttcgatctctggggccgtggcaccctggtcactgtctcctca

SEQ ID NO: 12489 - DNA, 307 bp, Homo sapiens
  source 1..307: mol_type = other DNA
cactgtctctggtggccccatcagtagttactcctggagctggatccggcagccccccgggaagggactggagtggattgggtacatctatgacgctgatcacaccaattacaacccctccctcaagagtcgagtcaccatatcagtagacacgtccaagaacaacttctccctgaggttgaactctgtgaccgctgcggacacggccgtctattattgtgcgagagatagatattgtagcggtggtagctgcttcgactggtacttcgatctctggggccgtggcaccctggtcactgtctcctca

SEQ ID NO: 12490 - DNA, 307 bp, Homo sapiens
  source 1..307: mol_type = other DNA
cactgtctctggtggctccatcagtggttactactggagctggatccggcagcccccagggaagggactggagtggattgggtttgtctatgacagtgggagaacccactacaacccctccctcaagagtcgagtcaccatctcagtagacacgtccacgaaccagttctccttgaagctgacgtctgtgtccgctgcggacacggccgtgtattactgtgcgagagatagatattgtagtggtggtagttgtttcgactggtacttcgatctctggggccgtggcaccctggtcactgtctcctca

SEQ ID NO: 12491 - DNA, 307 bp, Homo sapiens
  source 1..307: mol_type = other DNA
cactgtctctggtggctccatcagtggttattactggagttggatccggcagcccccagggaagggactggaatggattgggtttgtctatgacagtgggcgcaccaactacaacccctccctcaagagtcgagtcaccatctcagtagacacgtccaacaaccagttctccctgaagctgacgtctgtgaccgctgcggacacggccgtgtattactgtgcgagagacagatattgtagtggtggtagttgtttcgactggtacttcgatctctggggccgtggcaccctggtcactgtctcctca

SEQ ID NO: 12492 - DNA, 307 bp, Homo sapiens
  source 1..307: mol_type = other DNA
cactgtctctggtggccccatcagtagttactcctggagctggatccggcagccccccgggaagggactggagtggatcgggtacatctatgacactgatcacaccaattacaacccctccctcaagagtcgagtcaccatatcaatagacacgtccaagaacaagttctccctgaagttgaactctgtgaccgctgcggacacggccgtctattattgtgcgagagatagatattgcagcggtggtagctgcttcgactggtacttcgatctctggggccgtggcaccctggtcactgtctcctca

SEQ ID NO: 12493 - DNA, 307 bp, Homo sapiens
  source 1..307: mol_type = other DNA
cactgtctctggtggctccatcagtggttactcctggagctgggtccggcagtccccagggaagggactggagtggattggatacatctattacagtgggatcaccaattacaacccctccctcaggagccgagtcaccatgtcagtagacacgtccaataaccgattctccctgaaactgacgtctgtgaccgctgcggacacggccgtctattattgtgcgagagatagatattgtagtggtggtagctgcttcgactggtacttcgatctctggggccgtggcaccctagtcactgtctcttca

SEQ ID NO: 12494 - DNA, 307 bp, Homo sapiens
  source 1..307: mol_type = other DNA
cactgtctctggtggctccatcagtggctactactggagctggatccggcagcccccagggaaggggctggagtggattgggtttgtctatgacagtgggagaaccaactacaacccctccctcaagagtcgagtcaccatctcagtggacaagtccaagaaccagttctccctgaaactgacgtctgtgaccgctgcggacacggccgtatattactgtgcgagagatagatattgtagtggtggtagttgtttcgactggtacttcgatctctggggccgtggcaccctggtcactgtctcctca

SEQ ID NO: 12495 - DNA, 307 bp, Homo sapiens
  source 1..307: mol_type = other DNA
cactgtctctggggggtccatcagtggttactactggagctggatccggcagcccccagggaagggactagagtggattgggtttgtctttgacagtgggagatccaactacaacccctccctcgagagtcgagccaccatctctgtggacacgtccgcgaaccagttctccctgaagctgacgtctgtgaccgctgcggacacggccatatattactgtgcgagagatagatattgtagtggtggtagctgcttcgactggtacttcgatctctggggccgtggcaccctggtcactgtctcctca

SEQ ID NO: 12496 - DNA, 307 bp, Homo sapiens
  source 1..307: mol_type = other DNA
cactgtctctggggggtccatcagtggttactactggagctggatccggcagcccccagggaagggactggagtggattggatttgtctatgacagtgggagatccaactacaatccctccctcgagagtcgagccaccatctcagtggacacgtccacgaaccagttctccctgaagctgacgtctgtgaccgctgcggacacggccatatattactgtgcgagagatagatattgtagtggtggtagctgcttcgactggtacttcgatctctggggccgtggcaccctggtcactgtctcctca

SEQ ID NO: 12497 - DNA, 307 bp, Homo sapiens
  source 1..307: mol_type = other DNA
cactgtctctggtggctccatcagtggttactactggagctgggtccggcagtccccagggaagggactggaatggattggatatatctattacagtgggagcaccaattacaacccctccctcaggagtcgagtcaccatctcagcagacacgtccaataaccagttctccctgaagctgacgtctgtcaccgctgcggacacggccctctattactgtgcaagagacagatattgtagtggtggtagctgcttcgactggtacttcgatctctggggccgtggcaccctagtcactgtctcttca

SEQ ID NO: 12498 - DNA, 307 bp, Homo sapiens
  source 1..307: mol_type = other DNA
cactgtctctggtggccccatcagtagttactcctggagctggatccggcagccccccgggaagggactggagtggattgggtacatctatgacactgatcacaccaattacaacccctccctcaagagtcgagtcaccatatcagtagacacgtccaagagcaagttctccctgaagttgaactctgtgaccgctgcggacacggccgtctattattgtgcgagagatagatattgtagcggtggtagctgcttcgactggtacttcgatctctggggccgtggcaccctggtcactgtctcctca

SEQ ID NO: 12499 - DNA, 307 bp, Homo sapiens; identical to SEQ ID NO: 12494
  source 1..307: mol_type = other DNA

SEQ ID NO: 12500 - DNA, 307 bp, Homo sapiens
  source 1..307: mol_type = other DNA
cactgtcaccggtggctccataagcggttactactggagctgggtccggcagtccccaggcaagggactggagtggattggatttatctattacagtgggagaaccaactacaacccctccctcaagagtcgagtcaccatatcagcagacacgtccaataatcaattctccctgaagctgacgtctgtaaccgctgcggacacggccgtctattactgtgcgagagatagatattgtagtggcggaagctgcttcgactggtacttcgatctctggggccgtggcaccctagtcactgtctcttca

SEQ ID NO: 12501 - DNA, 307 bp, Homo sapiens
  source 1..307: mol_type = other DNA
cactgtctctggtggctccatcagtggttactcctggagctggatccggcagcccccagggcagggactggagtggattgggtacatctttcacagtgggtacaccaactacaacccctccttcaagagtcgagtcaccatgtcagtggacacgtccacaaaccagttctccctgaagctgagttctgtgaccgctgcggacacggccgtgtattactgtgcgagagatagatattgtagtggtggtagctgcttcgactggtacttcgatctctggggccgtggcaccctggtcactgtctcctca

SEQ ID NO: 12502 - DNA, 307 bp, Homo sapiens
  source 1..307: mol_type = other DNA
cactgtctctggtggctccatcagtggttactcctggagctgggtccggcagtccccagggaagggactggagtggattggatacatctattacagtgggatcaccaactacaacccctccctcaggagtcgagtcaccatgtcagtagacacgtccaataaccgattctccctgaaactgacgtctgtgaccgctgcggacacggccgtctattattgtgcgagagatagatattgtagtggtggtagctgcttcgactggtacttcgatctctggggccgtggcaccctagtcactgtctcttca

SEQ ID NO: 12503 - DNA, 307 bp, Homo sapiens
  source 1..307: mol_type = other DNA
cactgtgtctggtggctccatcagtggttactactggagctgggtccggcagtccccagggaagggactggagtggattgggtatatctattacagtgggaacaccaactacaacccctccctcaagagtcgagtcaccatatcagcagacacgtccaataaccaattctccctgaagctaacgtctgtgaccgctgcggactcggccgtgtattactgtgcgagagatagatattgtagtggtggtagctgcttcgactggtacttcgatctctggggccgtggcaccctggtcactgtctcttca

SEQ ID NO: 12504 - DNA, 307 bp, Homo sapiens
  source 1..307: mol_type = other DNA
cactgtctctggtggccccatcagtagtttctcttggagctggatccggcagcccccagggaagggactggagtggataggatatgtctatcacagtgggtacaccaactacaacccctccctcaagagtcgagtcaccatatcaatagacacgtccaagaaccagttctccctgaaattgagctctgtgaccgctgcggacacggccgtgtattactgtgcgagagatagatattgtagtggtggtagctgcttcgactggtacttcgatctctggggccgtggcaccctggtcactgtctcctcg

SEQ ID NO: 12505 - DNA, 307 bp, Homo sapiens
  source 1..307: mol_type = other DNA
cactgtctctggtggctccatcagcagttattactggagttggatccggcagtccccggggaagggactggagtggattgggtttgtctatgacaatgggagaaccaactacaatccctccctcaagagtcgagtcaccatattagttgacacgtccgagaaccagttctccctgaagttgaggtctgtgaccgctgcggacacggccgtgtattattgtgcgagagatagatattgtagtggcggaagttgcttcgactggtacttcgatctctggggccgtggcaccctggtcactgtctcttca

SEQ ID NO: 12506 - DNA, 307 bp, Homo sapiens
  source 1..307: mol_type = other DNA
cactgtctctggtggctccatcagtggttactcctggagctggatccggcagcccccagggcagggactggagtggattgggtatatctttcacagtgggtacaccaactacaacccctccttcaagagtcgagtcaccatgtcagtggacacgtccacaaaccagttctccctgaagctgagttctgtgaccgctgcggacacggccgtgtattactgtgcgagagatagatattgtagtggtggtagctgcttcgactggtacttcgatctctggggccgtggcaccctggtcactgtctcctca

SEQ ID NO: 12507 - DNA, 307 bp, Homo sapiens
  source 1..307: mol_type = other DNA
cactgtctctggtggccccatcagtagttactcctggagctggatccggcagccccccgggaagggactggagtggattgggtacatctatgacactgatcacaccaattacaacccctccctcaagagtcgagtcaccatatcagtagacacgtccaagaacaagttctccctgaagttgaactctgtgaccgctgcggacacggccgtctattattgtgcgagagatagatattgtagcggtggtagctgcttcgactggtacttcgatctctggggccgtggcaccctggtcactgtctcctca

SEQ ID NO: 12508 - DNA, 307 bp, Homo sapiens
  source 1..307: mol_type = other DNA
cactgtctctggtggccccatcagtagttactcctggagctggatccggcagccccccgggaagggactggagtggattggatacatctatgacactgatcacaccaattacaacccctccctcaagagtcgagtcaccatatcaatagacacgtccaagaacaagttctccctgaagttgaactctgtgaccgctgcggacacggccgtctattattgtgcgagagatagatattgcagcggtggtagctgcttcgactggtacttcgatctctggggccgtggcaccctggtcactgtctcctca

SEQ ID NO: 12509 - DNA, 307 bp, Homo sapiens
  source 1..307: mol_type = other DNA
cactgtctctggtggccccatcagtagttactcctggagctggatccggcagccccccgggaagggactggagtggattggctacatctatgacactgatcacaccaattacaacccctccctcaagagtcgagtcaccatatcaatagacacgtccaagaacaagttctccctgaagttgaactctgtgaccgctgcggacacggccgtctattattgtgcgagagatagatattgcagcggtggtagctgcttcgactggtacttcgatctctggggccgtggcaccctggtcactgtctcctca

SEQ ID NO: 12510 - DNA, 307 bp, Homo sapiens
  source 1..307: mol_type = other DNA
cactgtctctggtggctccatcagtggttactcctggagctgggtccggcagtccccaggaaagggactggagtggattggatacatctattacagtgggatcaccaactacaacccctccctcaggagtcgagtcaccatgtcagtagacacgtccaataaccgattctccctgaaactgacgtctgtgaccgctgcggacacggccgtctattattgtgcgagagatagatattgtagtggtggtagctgcttcgactggtacttcgatctctggggccgtggcaccctagtcactgtctcttca

SEQ ID NO: 12511 - DNA, 307 bp, Homo sapiens
  source 1..307: mol_type = other DNA
cactgtctctggtggctccataagtggttactattggagttgggtccggcagtccccagggaagggactggagtggattggatttatccactacaacgggaggaccaactacaacccctccctcaagagtcgagtcaccatttcggtagacatgtccaataatcaattctccctgaagctgacgtctgtgaccgctgcggacacggccttttattactgtgcgagagatagatattgtagtggcggtagttgcttcgactggtacttcgatctctggggccgtggcaccctggtcactgtctcttca

SEQ ID NO: 12512 - DNA, 307 bp, Homo sapiens
  source 1..307: mol_type = other DNA
cactgtctctggtggccccatcagtagttactcctggagctggatccggcagccccccgggaagggactggagtggattgggtacatctatgacactgatcacaccaattacaacccctccctcaagagtcgagtcaccatatcagtagacacgtccaagaacaagttctccctgaagttgaactctgtgaccgctgcggacacggccgtctattactgtgcgagagatagatattgcagcggtggtagctgcttcgactggtacttcgatctctggggccgtggcaccctggtcactgtctcctca

SEQ ID NO: 12513 - DNA, 307 bp, Homo sapiens
  source 1..307: mol_type = other DNA
cactgtctctggtggccccatcagtagttactcttggagctggatccggcagtcccccgggaagggactggagtggattgggtacatctatgacactgatcacaccaattacaacccctccctcaagagtcgagtcaccatatcagtggacacgtccaagaacaagttctccctgaagttgaactctgtgaccgctgcggacacggccgtctattattgtgcgagagatagatattgcagcggtggtagctgcttcgactggtacttcgatctctggggccgtggcaccctggtcactgtctcctca

SEQ ID NO: 12514 - DNA, 307 bp, Homo sapiens
  source 1..307: mol_type = other DNA
cactgtctctggtggccccatcagtagttactcctggagctggatccggcagccccccgggaagggactggagtggattgggtacatctatgacactgatcacaccaattacaatccctccctcaagagtcgagtcagcatatcagtagacacgtccaagaacaagttctccctgaagttgaactctgtgaccgctgcggacacggccgtctattattgtgcgagagatagatattgtagcggtggcagctgcttcgactggtacttcgatctctggggccgtggcaccctggtcactgtctcgtca

SEQ ID NO: 12515 - DNA, 307 bp, Homo sapiens
  source 1..307: mol_type = other DNA
cactgtctctggtggctccatcagtggttactactggagttggatccggcaggccccagggaagggactagagtggattgggtttatcttttacagtgggaggacccactacaacccgtccctcaagagtcgagtcaccatatcagtagacacgtccaacaaccagttctccctgaagctgatctctgtgaccgctgcggacgcggccgtatattactgtgcgagagatagatattgtagtggcggtagctgcttcgactggtacttcgatctctggggccgtggcagcctggtcactgtctcctca

SEQ ID NO: 12516 - DNA, 307 bp, Homo sapiens
  source 1..307: mol_type = other DNA
cactgtctctggtggctccatcagtggttactactggagctggatccggcagcccccagggaagggactggagtggattggttttgtctatgacagtgggagaacccactacaacccctccctcaagagtcgagtcaccatctcagtggacacgtccacgaaccagttctccttgaagctgacgtctgtgtccgctgcggacacggccgtgtattactgtgcgagagatagatattgtagtggtggtagttgtttcgactggtacttcgatctctggggccgtggcaccctggtcactgtctcctca

SEQ ID NO: 12517 - DNA, 307 bp, Homo sapiens
  source 1..307: mol_type = other DNA
cactgtctctggtggctccatcagtggttactcctggagctggatccggcagcccccagggcagggactggagtggattgggtacatctttcacagtgggtacaccaactacaacccctccttcaagagtcgagtcaccatgtcagtggacacgtccacaaaccagttctccctgaagctgagttctgtgaccgctgcggacacggccgtttattactgtgcgagagatagatactgtagtggtggtagctgcttcgactggtacttcgatctctggggccgtggcaccctggtcactgtctcctca

SEQ ID NO: 12518 - DNA, 298 bp, Homo sapiens
  source 1..298: mol_type = other DNA
tgcagcctctggattcacctttagcaactatgccatgaactgggtccgccaggctccagggaaggggctggagtgggtctcagccattggtggtcgtggtgataggacattctacgcagactccgtgaagggccgcttcaccatctccagagacaactccaagaacacactttatctgcaaatgaacagcctgagagccgacgacacggccgtttattactgtgcgaaagatgactacggtgactacttcgatgcttttgagatctggggccaagggacaatggtcactgtctcttta

SEQ ID NO: 12519 - DNA, 298 bp, Homo sapiens
  source 1..298: mol_type = other DNA
tgcagcctctggattcacctttagcaactatgtcatgggttgggtccgccaggctccagggaaggggctggagtgggtctcaagtattagtgggagtggtggtaccgcattctatgcagactccgtgaagggccggttcaccatctccagagacaattccaagaacacgctgtatctgcaaatgaacagcctgagagccgaggacacggccgtatattactgtgcgaaagatgactacggtgattacttcgatgctttcgaaatctggggccaagggacaatggtcgccgtctcatca

SEQ ID NO: 12520 - DNA, 298 bp, Homo sapiens
  source 1..298: mol_type = other DNA
tgcagcctctggattcacctttgatgattatgccatgcactgggtccggcaagctccagggaagggcctggagtgggtctcagctattagttataatagtggtatcgtagaaaatgcggactctgtgaagggccgattcaccgtctccagagacaacgccaagaactccctgtatctgcaaatgaacagtctgagagctgaggacacggccttgtattactgtgtaaaagatcggtatgccagtggctgggggtactttgactactggggccagggaaccctggtcaccgtctcctca

SEQ ID NO: 12521 - DNA, 298 bp, Homo sapiens
  source 1..298: mol_type = other DNA
tgcagcctctggattcacctttcatgataaagccatgcattgggtccggcaagctccagggaagggcctggagtgggtctcaggtatcagttacaatagcggtttcatagcctatgcggactctgtgaagggccgattcaccatctccagagacaacgccaagaactccctgcatctgcaaatgaacagtctgcgagctgaggacacggccttatattattgtgtaaaagataggtatgccagtggctggggttactttgactactggggccagggaaccctggtcatcgtctcctca

SEQ ID NO: 12522 - DNA, 301 bp, Homo sapiens
  source 1..301: mol_type = other DNA
tgcagcgtctggattcagcttcacttcctacggcatgcactgggtccgccaggctccaggcaaggggttggaatgggtggcagttatttggtatgatggaagaaataaaaactatgcagactccgtgaagggccgattcaccgtctccagagacacttccaagaacacggtgtatctgcaaatgaacagcctgagagccgaggacacggctgtctattactgtgcgagagatgtcgatactagtagtcattttggccgcttcgacccctggggccagggaaccctggtcaccgtctcctca

SEQ ID NO: 12523 - DNA, 301 bp, Homo sapiens
  source 1..301: mol_type = other DNA
tgcagtgtctggattcagcctcactagttatggcatgcattgggtccgccagactccaggcaaggggctggaatgggtggcggttatttggtatgatggaaaaaagaaaaattatgcagacttcgtgaagggccgattcaccatctccagagacaattccaagaacacggtgtatctgcaaatgaacagcctgagagtcgaggacacggctgtctattattgtgcgagagatgtcgatactagtagtcattttggccggttcgacccctggggccagggaaccctggtcaccgtctccgca

SEQ ID NO: 12524 - DNA, 301 bp, Homo sapiens
  source 1..301: mol_type = other DNA
tgcagcgtctggattcaccttcagtaactatggctttcactgggtccgccaggctccaggcaaggggctggagtgggtggcacttatatggtatgatggaagtaataaatattatgcagactccgtgaagggccgattcaccatctccagagacagttctaagaatacggtgtatctgcaaatgaacagcctgagagctgaagacacggctgtttactcctgtgcgagagatgtcgatactagtagtcattttggtcggttcgacccctggggccagggaaccctggtcaccgtctcctca

SEQ ID NO: 12525 - DNA, 295 bp, Homo sapiens
  source 1..295: mol_type = other DNA
tgcagcctctggattcaactttaataactattggatgagctgggtccgccaggctccagggaaggggctggagtgggtggccaacttaaaatacgatgacactgagggatactatgtggactctgtgaggggccgattcaccatctccagagacaacgcgaagaactcactgtttctccaaatgaacagtctgagagccgaagacacggctatgtattactgtgcgagagaggcaacatttacggcctacaattttgactattggggccagggaatcctggtcaccgtctcctca

SEQ ID NO: 12526 - DNA, 295 bp, Homo sapiens
  source 1..295: mol_type = other DNA
ttcagcctctggattcacatttagtaactactggatggcctgggtccgccaggctccagggaaggggctggagtgggtggccaatatgaagtttgatagaagtgagacacactatctggactctgtgaagggccgattcaccatctccagagacaacgccaagaactcagtcgttcttcaaatgaacaacctgaaagccgacgacacggccgtgtactattgtgcgagagaggctacatttacagcgtacaactttgactactggggccagggagccctggtcaccgtctcctca

SEQ ID NO: 12527 - DNA, 310 bp, Homo sapiens
  source 1..310: mol_type = other DNA
tgaaacctctggattcactttcaataccgcctggatgagctgggtccgccaggcctcagggaaggggctggagtgggtcggccgcattaaacccaaaaatcagggtgaaacaagagactacgctgcatccgtgagaggcagatttagtatctcgagagatgatccaaaaaacatgctgtttctacaaatgaacaacctgaaaaccgaggacacagccgtttattactgtaccactggcggtcccctccctcatgacagcagctggtcctttgacttctggggccggggaaccctggtcaccgtctcctca

SEQ ID NO: 12528 - DNA, 310 bp, Homo sapiens
  source 1..310: mol_type = other DNA
tgcagcctctggattcactttcactaccgcctggatgagctgggtccgccaggctccagggaaggggctggaatgggttggccgttctatacccaaaactgctggtgggacaactgactacgctgcacccgtgaaaggcagattcaccatctcaagagatgattcaagtgacatgctgtatctccaaatgaacagcctcagcaccgaggacacagccctgtattactgtaccacaggtggtccccttccacatgacagcagctggtcgtttgacttctggggccggggaaccctggtcaccgtctcttct

SEQ ID NO: 12529 - DNA, 295 bp, Homo sapiens
  source 1..295: mol_type = other DNA
tgcagcctctggattcaccgccagtgacggctggatgagttgggtccgccaggctcctgggaaggggctggagtgggttggccgtatgaaaagcaaagctcatggtgggacaatagactacgctgcacccgtgaaaggcagattcaccatctcaagacatgattcagaaaacacgttgtatctgcaaatgaacagcctgaaaaccgaggacacagccgtgtattactgtaccacaggaagtggtctttattcgcctgactactggggccagggaaccctggtcaccgtctcctca

SEQ ID NO: 12530 - DNA, 295 bp, Homo sapiens
  source 1..295: mol_type = other DNA
tgcagcctctggattcactttcagtaacgcctggatgaactgggtccgccaggctccagggaaggggctggagtgggttggccgtattaaaaccagaactgatggtgggacaacagattacgttgcacccgtgaaaggcagattcaccatctcaagagatgattcaaaaaacacgctgtatctgcaaatgaacagcctgaaaagcgaggacacagccgtgtattactgtaccacaggaagtggcttgtattcccctgactactggggccagggaaccctggtcaccgtctcctca

SEQ ID NO: 12531 - DNA, 295 bp, Homo sapiens
  source 1..295: mol_type = other DNA
ctctgtctctggtgactccatcagtggttactactggagctggatccgacagtccgccgggaagggactggagtggattgggcggatctataccagtggaggaaccgactacaatccctccctcaacagtcggatcaccatgtctatagacacgtccaagaaactgttctccctgaacctgaggtctgtgaccgccgcagacacggccgtatattactgtgcgaggtccaatgacttcgggatctacaacttgttcgacccatggggccagggagtcctggtcaccgtctcctcg

SEQ ID NO: 12532 - DNA, 295 bp, Homo sapiens
  source 1..295: mol_type = other DNA
cactgtctctggtggctccatcactggttactactggaactggctccggcagcccgccgggaaggcactggagtggattgggcgtatctacaccagtgggacaacccactacagcccctccctcaagagtcgagtcaccatgtcactagacacgtccaagaaccagttctccctgaagctgagctctgtgaccgccgcggacaccgccgtttattactgtgcgagatcgaatgacttcggtatctacaacttgttcgacccctggggccagggaatcctggtcaccgtctcctca

SEQ ID NO: 12533 - DNA, 295 bp, Homo sapiens
  source 1..295: mol_type = other DNA
cactgtctctggtgggtccatcactaattactattggaattggatccggcagtccgccggtaagggactggagtggattgggcgtatttataccagtgggaccacccactacaacccctccctcaagagtcgagtcaccatgtcactagacacgtccaagaggcagttatacttgagtctgacctctgtgaccgccgcggacacggccgtttattactgtgcgagatccaatgacttcggaatttacaacttgttcgacccctggggtccgggaatcctggtcagcgtctcctca

SEQ ID NO: 12534 - DNA, 285 bp, Homo sapiens
  source 1..285: mol_type = other DNA
aaggcttctggatacagttttaccagctactggatcgcctgggtgcgccagatgcccgggaaaggcctcgagtggatggggaccatctttcctgctgactctgattccacatacagcccgtccttccaaggccaggtcaccatctcagccgacaagtccatcgacaccgcctacctgcagtggagcagtctgaaggcctcggacgccgccatgtatttctgtgcgagacttgatagtcgtggttattcctattggggccagggaaccctaatcaccgtctcctcg

SEQ ID NO: 12535 - DNA, 285 bp, Homo sapiens
  source 1..285: mol_type = other DNA
aaggcttctggataccactttaccacctactggatcgcctgggtgcgccagatgcccgggcaaggcctcgagtggatggggaccatctttcctgctgactctgattccacatacagcccgtccttccaaggccaggtcaccatctcagccgacaagtccatcgacaccgcctacctgcagtggagcagtctgaaggcctcggacgccgccatgtatttctgtgcgagacttgatagtcgtggttattcctattggggccagggaaccctaatcaccgtctcctcg

SEQ ID NO: 12536 - DNA, 285 bp, Homo sapiens
  source 1..285: mol_type = other DNA
acgggttctggatatagttttaccagcaattggatcggctgggtgcgccagatgcccgggaaaggcctggagtggatggggatcatctttcctagtgattctgatgtcagatacagtccgtccttccaaggccaagtcaccatctcagccgacaagtccatcagcaccgcctacctgcagtggactaccctgaaggccgcggacactgccagatatttttgcgcgagacttgatagtaggggatactcatactggggccagggaaccctgatcaccgtctcctca

SEQ ID NO: 12537 - DNA, 285 bp, Homo sapiens
  source 1..285: mol_type = other DNA
acgggttctggatatacttttaccagcaattggatcggctgggtgcgccaggtgcccgggaaaggcctggagtggatgggaatcatctttcctagtgattctgatgtcagatacagtccgtcgttccaaggccaagtcaccatctccgtcgacaagtccatcagcaccgcctacctgcagtggactaccctgaaggccgcggacactgccagatatttttgcgcgagacttgatagtaggggatactcatactggggccagggaaccctgatcaccgtctcctca

SEQ ID NO: 12538 - DNA, 286 bp, Homo sapiens
  source 1..286: mol_type = other DNA
tttaggctctggattcatgcttagagactactggatgagttgggtccgccaggctccagggaaggggctagagtgggtggcccacataaatccagatgaaagtgagaagttatatgtggactctgtgaagggccgattcaccatctccaaagacaacaccaagaactcaatgtacctgcaaatgaatagcctgagagccgaggacacaggtgtttattattgtgcgagatctactaggagctcgggggactactggggccagggaacccctgtcaccgtctcctca

SEQ ID NO: 12539 - DNA, 286 bp, Homo sapiens
  source 1..286: mol_type = other DNA
tgcagtctctggattcacgactagtgattattggatgagttgggtccgccaggctccagggaaggggctggagtgggtggcccacataaaccgagatggaagtgacagacactatgcgaactatgtgaagggccgattcaccatctccaaagacaacgccaagaactcagtgatcttagaactgaacagcctgagagccgacgacacgggtgtttactactgtgcgagaagtactcgtagtagtggggactactggggccagggtaccctggtcaccgtctcctca

SEQ ID NO: 12540 - DNA, 295 bp, Homo sapiens
  source 1..295: mol_type = other DNA
cggtgtctatggtggggccttcaatggttactactggagctggatccgccagcccccagggaaggggttggagtggattggggaaatcaatcatagtggaagcaccaactacaacccgtccctgaagagccgagccaccatttcagtagacacgtccaagaaccaactctccctgaagttgagctctgtgaccgccgcggacacggctgtttattactgtgcgagcctatggttcggggacttctattacggtatgggcgtctggggccaagggaccacggtcaccgtctcctca

SEQ ID NO: 12541 - DNA, 295 bp, Homo sapiens
  source 1..295: mol_type = other DNA
cgctgtctatggtgcgtccttcagtggttattactggagctggatccgccagcccccagggaaggggctggagtggattggggaaatcaatcatagtggaagcactaactacagcccgtccctcaagagtcgagtcaccatgtcagtagacacgtccaagaaccagttctccctgaaactgaactctgtgaccgccgcggacacggctgtatactactgtgccagcctatggttcggggacttctactatggtatgggcgtctggggccaggggaccacggtcatcgtctcctca

SEQ ID NO: 12542 - DNA, 295 bp, Homo sapiens
  source 1..295: mol_type = other DNA
cgctgtctatggtgcgtccttcagtggttattactggagctggatccgccagcccccagggaaggggctggagtggattggggaaatcaatcatagtggaagcactcactacagcccgtccctcaagagtcgagtcaccatgtcagtagacacgtccaagaaccagttctccctgaaactgaactctgtgaccgccgcggacacggctgtatattactgtgccagcctatggttcggggacttctactatggtatgggcgtctggggccaggggaccacggtcatcgtctcctca

SEQ ID NO: 12543 - DNA, 292 bp, Homo sapiens
  source 1..292: mol_type = other DNA
cactgtctctggtggctccgtcagtagtgactactgggtctggatccggcagcccgccggaaagggactggagtggattgggcgtatctatgccagtgggagcaccaactacaacccctccctcaagagtcgagtcaccatgtcagtagacacgtccaagaaccagttctccctgaagttgagctcggtgaccgccgcggacacggccgtgtattactgtgcgagagtattggacccccggtacaactacttcgacccctggggccagggaaccctggtcaccgtctcctca

SEQ ID NO: 12544 - DNA, 292 bp, Homo sapiens
  source 1..292: mol_type = other DNA
cactgtctctggtggctccatcagtagttactactggacctggatccggcagcccgccggtaagggcctggagtggattgggcgtatctctaccagtgggagcaccaactacaacccctccctcaagagtcgagtcaccatgtcgatagacacgtccaagaaccagttctccctgaagttgagttctgtgaccgccgcggacacggccgtgtattactgtgcgagagtattagatccgaggtacaactacttcgacccctggggccagggaaccctggtcaccgtctcctca

SEQ ID NO: 12545 - DNA, 292 bp, Homo sapiens
  source 1..292: mol_type = other DNA
cactgtctctggtggctccatcagtagttactactggagttggatccgacagcccgccgggaagggactggagtggattgggcgtatctctgccagtgggatcaccaactacaacccctccttcaagagtcgagtcaccatgtcaatagacacgtccaagaaccagttttccctgaggctgatctctgtgaccgccgcggacacggccgtttattactgtgcgagagtactggatcccaggtacaactacttcgacccctggggccagggaaccctggtcaccgtctcctca

SEQ ID NO: 12546 - DNA, 292 bp, Homo sapiens
  source 1..292: mol_type = other DNA
cactgtctctggtggctccatcagtgcttattactggacctggatccgacagcccgccgggaagggactggagtggattgggcgtatctattccagtgggagcaccatctacaacccctccctcaagagtcgggtcaccatgtcagtagacacgtccaagaaccagttctccctgaggctgagctctgtgaccgccgcggacacggccgtgtattactgtgcgagagtattagatccacgatacaactacttcgacccctggggccagggaaccctggtcatcgtctcctca

SEQ ID NO: 12547 - DNA, 298 bp, Homo sapiens
  source 1..298: mol_type = other DNA
tgcagcgtctggattcaacttcaataactatgccatgcactgggtccgccaggctccaggcaaggggctggagtggttggcagttctctggtatgatgaaagtgttgaatactatacagactctgtgaagggccgattcaccatctccagagacaattcgaagaagacggtgtttcttcaaatgaacaccctgagagtcgaggacacggctgtctactattgcgcgaaggatctcgggcttggctacaatgccacctttgaccactggggccagggagccctggtcaccgtctcctca

SEQ ID NO: 12548 - DNA, 298 bp, Homo sapiens
  source 1..298: mol_type = other DNA
tgaaacgtctggatttgtgttcagtaactacgccatgcactgggtccgtcaggctccaggcaaggggccggagtggctggcacttatgtggtatgatggcactaacacagactatgcagactctgtgaagggccgattcaccatctccagagacaatctcaagaagacagtctatcttcacatgaacagtctgagagtcgaggacacggctatgtattattgtgcgaaggacctcggacttggctacaacgcgacttttgaccactggggccggggaaccttggtcaccgtctcctca

SEQ ID NO: 12549 - DNA, 298 bp, Homo sapiens
  source 1..298: mol_type = other DNA
tgaaacgtctggatttgtgttcactaactacgccatgcactgggtccgtcaggctccaggcaaggggccggagtggctggcacttatgtggtatgatggcactaaaacagactatgcagactctgtgaagggccgattcaccatctccagagacaatctcaagaagacagtctatcttcacatgaacagtctgagagtcgaggacacggctatgtattattgtgcgaaggacctcggacttggctacaacgcgacttttgaccactggggccggggaaccttggtcaccgtctcctca

SEQ ID NO: 12550 - DNA, 298 bp, Homo sapiens
  source 1..298: mol_type = other DNA
tgaaacgtctggatttctgttcagtaactacgccatgcactgggtccgtcaggctccaggcaaggggctggagtggctggcacttatgtggtatgatggctctaaaacagattatgcagactctgtgaagggccgattcaccatctccagagacaatctcaagaagacagtctatctacacatgagcagtctgagagtcgaggacacggctatctattattgtgcgaaggacctcggacttggctacaacgcgacttttgaccactggggccggggaaccttggtcaccgtctcctca

SEQ ID NO: 12551 - DNA, 298 bp, Homo sapiens
  source 1..298: mol_type = other DNA
tgaaacgtctggattttctttcaattcttttgccatgcactgggtccgtcagtctccaggcaaggggctggagtgggtggcccttttgtggtttgatggaagtgaaacaaggtatgtggactccgtgaagggccggttcaccatctccagagacgaatccggggcgacagtctacctacacatgaactccctgagggtcgaggacacggctgtctactattgtgcgaaggacctcggccttggctacaacgcgacatttgaccattggggccagggagccctggtcaccgtctcctct

SEQ ID NO: 12552 - DNA, 298 bp, Homo sapiens
  source 1..298: mol_type = other DNA
tgaaacgtctggatttctgttcagtaactacgccatgcactgggtccgtcaggctccaggcaaggggctggagtggctggcccttttgtggtatgatggctctgaaacagtttatgcagactctgtgaagggccgattcaccatctccagagacaatctcaagaagacagtctatttacacatgaacagtctgagagtcgaggacacggctatgtattattgtgcgaaggacctcggacttggctacaacgcgacttttgaccactggggccggggaagcttggtcaccgtctcctca

SEQ ID NO: 12553 - DNA, 298 bp, Homo sapiens
  source 1..298: mol_type = other DNA
tgctgcgtctggattcaccttcaataactatgccatgcactgggtccgccaggctccaggcaaggggctggagtggttggcagttctttggtatgatgacagtgttcagttctatacagactctgtgaagggccgattcaccatctccagagacatttcgaggaagacactgtttcttcaaatgaacaccctgagagtcgaggacacggctgtctactattgcgcgaaagatctcgggcttggctacaatgccacttttgaccactggggccagggagccctggtcaccgtctcctca

SEQ ID NO: 12554 - DNA, 292 bp, Homo sapiens
  source 1..292: mol_type = other DNA
cactgtctctggtgtctccatcagcagtactaattactactggggctggatccgccagcccccagggcagggcctggagtgggttggcactatctattatcgtgggagcacctacaaaaacccgtccctcaagagtcgagtcaccatttccgtagacacgtccaagaaccagttctccctgaggttgacgtctgtgaccgccgcagacacggctgtctattactgtgccaacgggccgtacattacttactttgacaactggggccagggaaccctggtccccgtctcctca

SEQ ID NO: 12555 - DNA, 292 bp, Homo sapiens
  source 1..292: mol_type = other DNA
cactgtctctggtgtctccatcagcagtactaattactactgggcctggatccgccagcccccagggcagggcctggagtgggttggcactatctattatcgtgggagcacctacaaaaacccgtccctcaagagtcgagtcaccatttccgtagacacgtccaagaaccagttctccctgaggttgacgtctgtgaccgccgcagacacggctgtctattactgtgccaacgggccgtacattacttactttgacaactggggccagggaaccctggtccccgtctcctca

SEQ ID NO: 12556 - DNA, 292 bp, Homo sapiens
  source 1..292: mol_type = other DNA
cactgtctctggtgtctccatcagcagtactaattactactgggcctggatccgccagcccccagggcagggcctggagtgggttggcactatctattatcgtgggagcacctacaaaaacccgtccctcaagagtcgagtcaccatttccgtagacacgtccaagaaccagttctccctgaggttgacgtctgtgaccgccgcagacacggctgtctattactgtgccaacgggccgtacattacttactttgacaactggggccagggaaccctggtcaccgtctcctca

SEQ ID NO: 12557 - DNA, 292 bp, Homo sapiens
  source 1..292: mol_type = other DNA
cactgtctctggtgtctccatcagcagtactaattactactggggctggatccgccagcccccagggcagggcctggagtgggttggcactatctattatcgtgggagcacctacaaaaacccgtccctcaagagccgagtcaccatttccgtagacacgtccaagaaccagttctccctgaggttgacgtctgtgaccgccgcagacacggctgtctattactgtgccaacgggccgtacattacttactttgacaactggggccagggaaccctggtccccgtctcctca

SEQ ID NO: 12558 - DNA, 292 bp, Homo sapiens
  source 1..292: mol_type = other DNA
cactgtctctggtgtctccatcagcagtactaattactactggggctggatccgccagcccccagggcagggcctggagtgggttggcactatctattatcgtgggagcacctacaaaaacccgtccctcaagagtcgagtcaccatttccgtagacacgtccaagaaccagttctccctgaggttgacgtctgtgaccgccgcagacacggctgtctattactgtgccaacgggccgtacattacttactttgacaactggggccagggaaccctggtcaccgtctcctca

SEQ ID NO: 12559 - DNA, 289 bp, Homo sapiens
  source 1..289: mol_type = other DNA
tgcagcctctagattcaccttcagtagctcctggatgcactgggtccgccaagctccagggaaggggctggtgtgggtctcacgtattaatactgatgggagtagcacaatctacgcggactccgtgaagggccgattcaccatctccagagacaacgccaagaatacgctgtatctgcaaatgaacagtctgagagccgaggacacggctgtgtattactgtgcaagagctgggtacagtaacggctttgactactggggccagggaaccctggtcaccgtctcctca

SEQ ID NO: 12560 - DNA, 289 bp, Homo sapiens; identical to SEQ ID NO: 12559
  source 1..289: mol_type = other DNA

SEQ ID NO: 12561 - DNA, 289 bp, Homo sapiens
  source 1..289: mol_type = other DNA
tgcagcctctagattcaccttcagtagctcctggatgcactgggtccgccaagctccagggaaggggctggtgtgggtctcacgtattaatactgatgggagtagcacaatctacgcggactccgtgaagggccgattcaccatctccagagacaacgccaagaatacgctgtatctgcaaaggaacagtctgagagccgaggacacggctgtgtattactgtgcaagagctgggtacagtaacggctttgactactggggccagggaaccctggtcaccgtctcctca

SEQ ID NO: 12562 - DNA, 289 bp, Homo sapiens; identical to SEQ ID NO: 12559
  source 1..289: mol_type = other DNA

SEQ ID NO: 12563 - DNA, 289 bp, Homo sapiens
  source 1..289: mol_type = other DNA
tgcagcctctggattcaccttcagtagcaactggatgcactgggtccgccaagctccagggaaggggctggtgtgggtctcacgtattaatactgatgggagtaccacaaactacgcggactccgtgaagggccgattcaccatctccagagacaacgccaagaacacgctgtatctgcaaatgaacaatctgagagccgaggacacggctctgtattactgtgcaagagccggatacagcaatggttttgactactggggccagggaaccctggtcaccgtctcctca

SEQ ID NO: 12564 - DNA, 289 bp, Homo sapiens
  source 1..289: mol_type = other DNA
caaagcctctggattcaccttcagtagaaactggatgcactgggtccgccaacctgcagggaaggggctggtgtgggtctcacgtattaacacggatggcagtagcgcaagctacgcggactccgtgaagggccgattcaccatctccagagacaacgccaagaacacgctgtatttgcaaatgaacagtctgagagtcgaagacacggctgtgtattactgcgcaagagccggatacagcaatggtttcgactactggggccagggaatcctggtcaccgtctcctca

SEQ ID NO: 12565 - DNA, 286 bp, Homo sapiens
  source 1..286: mol_type = other DNA
tgcagcctctgggttcacctttagtccccattggatgggctgggtccgccaggctgcagggaaggggctggagtgggtggccaatataaaggaagatggaagtgacaaatactatgtggactctgtgaagggccgattcaccatctccagagacaacgccaagaactcactatatctgcaaatgaacagcctgaaagccgaggacacggctgtgtattactgtgcgagagatttctatagggtctttgactcctggggccagggaaccctagtcaccgtctcctca

SEQ ID NO: 12566 - DNA, 286 bp, Homo sapiens
  source 1..286: mol_type = other DNA
tgcagcctctggattcacctttagtagctggtggatgggctgggtccgccaggctccagggaaggggctggagtgggtggccaacataaacgaagttggaagtgacaaatactatgtggactctgtgacgggccgattcaccgtctccagagacaacgccaagaactcactgtatctgcaaatgaacagcctgagagccgaggacacggccgtgtattactgtgcgagagatttttaccgggtctttgactcctggggccagggaaccctggtcaccgtctcctca

SEQ ID NO: 12567 - DNA, 298 bp, Homo sapiens
  source 1..298: mol_type = other DNA
tgcagcctctggattctccttcagcagctactggatgcactgggtccgccaagctccagggaaggggctagtgtgggtctcacgtattaatagtgatgggagtaatacagattatgcggactctgtgaagggccgattcaccatctccagagacaacgccaagaatacggtatatgtgcacatgaacaatctgagagccgaggacacggcggtgtatttctgtgcgagaggagtaactatgtctacaattaccccttttgggtcctggggccatggaaccctggtcagcgtctcctca

SEQ ID NO: 12568 - DNA, 298 bp, Homo sapiens
  source 1..298: mol_type = other DNA
tgcagcctctggattctccttcagcagctactggatgcactgggtccgccaagctccagggaaggggctagtgtgggtctcacgtattaatagcgatgggagtaatacagattatgcggactctgtgaagggccgattcaccatctccagagacaacgccaagaatacggtatatgtgcacatgaacaatctgagagccgaggacacggcggtgtatttctgtgcgagaggagtaactatgtctacaattaccccttttgggtcctggggccatggaaccctggtcagcgtctcctca

SEQ ID NO: 12569 - DNA, 298 bp, Homo sapiens
  source 1..298: mol_type = other DNA
tgcagcctctggattctccttcagcagctactggatgcactgggtccgccaagctccagggaaggggctagtgtgggtctcacgtattaatagtgatgggagtaatacagattatgcggactctgtgaagggccgattcaccatctccagagacaacgccaagaatacggtatatgtgcacatgaacaatctgagagccgaggacacggcggtgtatttctgtgcgagaggagtaactatgtctacaattaccccttttgggtcctggggccatggaaccctggtcagcgtctcttca

SEQ ID NO: 12570 - DNA, 313 bp, Homo sapiens
  source 1..313: mol_type = other DNA
cacagcctctggattcaccttcgagacttattggatgcactgggtccgccaagctccaggggaggggctgcggtgggtcgcacgtattgatgggtctagtaggaccccagagtacgcggactccgtgaaggggcgattcaccgtctccagagacaacgtcaagagaacactgtatctgcaaattgacagtctgagagtcgaggacacggcagtctattactgtgcaagagttcttggattctacgatcgtggttatctactcaactactactttgactactggggcccgggaaccctgctcaccgtctcctca

SEQ ID NO: 12571 - DNA, 313 bp, Homo sapiens
  source 1..313: mol_type = other DNA
cacagcctctggattcaccttcgagacttattggatgcactgggtccgccaagctccaggggaggggctgcggtgggtcgcacgtattgatgggtctagtaggaccccagaatacgcggactccgtgaaggggcgattcaccgtctccagagacaacgtcaagagaacactgtatctgcaaattgacagtctgagagtcgaggacacggcagtctattactgtgcaagagttcttgggttctatgatcgtggttatctgctcaactactactttgactactggggcccgggaaccctgctcaccgtctcctca

SEQ ID NO: 12572 - DNA, 310 bp, Homo sapiens
  source 1..310: mol_type = other DNA
cacagcctctggattcaccttcgagacttattggatgcactgggtccgccaagctccaggggaggggctgcggtgggtcgcacgtattgatgggtctagtaggaccccagagtacgcggactccgtgaaggggcgattcaccgtctccagagacaacgtcaagagaacactgtatctgcaaattgacagtctgagagtcgaggacacggcagtctactgtgcaagagttcttggattctacgatcgtggttatctactcaactactactttgactactggggcccgggaaccctgctcaccgtctcctca

SEQ ID NO: 12573 - DNA, 292 bp, Homo sapiens
  source 1..292: mol_type = other DNA
tgaagcctctggattcccctttagtagatattggatgagttgggtccgccaggctccaggggaggggctggagtgggtggccaatttaaaggaagatggaactacgacatactatggggactctgtgaagggccgattcaccatctccagagacaacgccaaaaacgcggtgtatcttcaaatgaacagcctgagagccgaggacacggctttctattactgtgcgagagtgggctataccagctcgtcctgggactactggggccagggaaccctggtcaccgtctcctca

SEQ ID NO: 12574 - DNA, 292 bp, Homo sapiens
  source 1..292: mol_type = other DNA
tgcagcctctgaattcacctttagtaactattggatgacctgggtccgccaggctccagggaaggggctggagtgggtggccaacataaaccaagatggaagtcagaagtactatgtggactctctgaagggccgattcaccatctccagagacaacgccaagaactcactgtatctgcacatgaacagcctgagagccgaggacacggctgtgtattactgtgcgagagtggggtataccagctcgtcatgggactactggggccagggaaccctggtcatcgtctcctca

SEQ ID NO: 12575 - DNA, 283 bp, Homo sapiens
  source 1..283: mol_type = other DNA
cacaacctctggattcacatttagttactattacatgacctgggtccgccaggctccagggaaggggctggagtgggtggccaacataaataaagatggaagtgccacatactacttggactctgtgaggggccgattcgctgtctccagagacaacgccaggaattcactctatctgcagatgaacaacctgagagtcgaggacacggccatctatttctgtgcgagagaccagctgcccgatccgtactggggccagggaaccctggtcagcgtctcttca

SEQ ID NO: 12576 - DNA, 283 bp, Homo sapiens
  source 1..283: mol_type = other DNA
tgcagcctctggattcacctttagtaactattggatgacctgggtccgccaggctccagggaaggggctggagtgggtggccaatataaagaaagatggaagtgagaggtattatgtggactctgtgaagggccgattcaccatctccagagacaatgccaagaactcactgtatttacaaatggacagcctgagagtcgaggacacggctatatattactgtgcgagagaccagctgcccgatccgtactggggccagggaaccctggtcaccgtctcctca

SEQ ID NO: 12577 - DNA, 283 bp, Homo sapiens
  source 1..283: mol_type = other DNA
tataggttctggattcacctttagtcactattggatgaattgggtccgccaggctccagggaaggggctggagtgggtggccatcgcaaaccaggacggaagtgagaaacactatgtggactctgtgaagggccgattcaccgtctcccgagacaacgccaagaactcactatatctacagatgaatagcctgagagtcgaggacacggctatgtattattgtgcgagagaccagctgcccgatccctactggggccagggaaccctggtcaccgtctcctca

SEQ ID NO: 12578 - DNA, 283 bp, Homo sapiens
  source 1..283: mol_type = other DNA
tgcagcctcaggcttcacctttaatacatattggatgaattgggtccgccagattccagggaaggggctggagtgggtggccaacataaacgcggatgaaacacagaaatattatgtggactctgtgaggggccgcttcatcatctccagagacaacgccaagaattcactgtatctgcagatgaacagcctgagagtcgaggacacggccatctattactgtgcgagagaccaacttcccgatccctactggggcccgggaacccaggtcaccgtctcctcg

SEQ ID NO: 12579 - DNA, 292 bp, Homo sapiens
  source 1..292: mol_type = other DNA
cactgtctctggtggctccatcagcagcagtaattactactggggctgggtccgccagcccccagggaaggggctggagtacattgcgactagttcttatagtgggagcacctactacaacccgtccctcaagagtcgagtcaccatctccatagacacgtccaagaaccaattctccctgaaattgacctctgtgaccgccgcagatacggctgtgtattactgtgcgagacgagactacaggacctggttcgacccctggggccagggaatcctggtcaccgtctcctca

SEQ ID NO: 12580 - DNA, 298 bp, Homo sapiens
  source 1..298: mol_type = other DNA
cactgtgtctggtggctctatcaggaataatatttacaacttatattggggctggatccgccagccccccgggacgggactggagtggattgggggaatgtctactactgggagtgtctactacaacccgtccctcaggggtcgagtcaccatatccgtggacacgtccaggaatgagttctccctgaggctgaggtctgtgaccgccgcagacacggctgaatattactgtgcgcgacgggactacaggacttggttcgacccctggggccggggaatcctggtcaccgtctcctca

SEQ ID NO: 12581 - DNA, 286 bp, Homo sapiens
  source 1..286: mol_type = other DNA
cactgtctctggtggctccatcagcagtagtaattacaactggggctggatccgccagcccccagggaaggggctggagtggattgggagtatctattatactgggagcaccaactacaacccgtccctcaagagtcgagtcaccatatccgtagacacgtccaagaaccagttctccctgaacctgagctctgtgaccgccgcagacacggctgtgtattactgtgcgagacgaggcggcggatttgcgtactggggccagggaaccctggtcaccgtctcctca

SEQ ID NO: 12582 - DNA, 286 bp, Homo sapiens
  source 1..286: mol_type = other DNA
cactgtctctggtggctccatcagcagtagtaattacaactggggctggatccgccagcccccagggaaggggctggagtggattgggagtatctattatactgggagcaccaactacaacccgtccctcaagagtcgagtcaccatatccgtagacacgtccaagaaccagttctccctgaacctgagctctgtgaccgccgcagacacggctgtctattactgtgcgagacgaggcggcggatttgcgtactggggccagggaaccctggtcaccgtctcctca

SEQ ID NO: 12583 - DNA, 286 bp, Homo sapiens
  source 1..286: mol_type = other DNA
cattgtctctggtggctccatcagtagtagtagttactactggagctggatccgccagtccccagggaaggggctggagtggattggcagtatctattatagtggcagcacctactacaacccgtccctcaagagtcgagtcttcatatccgtagacacgtccatgaaccagttctccctgaagctgagttctgtgaccgccgcagacacggctgtgtattactgtgcgagacggggggggggatttgcctactggggccagggaaccctggtcaccgtctcctca

SEQ ID NO: 12584 - DNA, 286 bp, Homo sapiens
  source 1..286: mol_type = other DNA
cattgtctctggtggctccatcagtagtagtagttactactggagctggatccgccagtccccagggaaggggctggagtggattggcagtatctattatagtggcagcacctactacaacccgtccctcaagagtcgagtcttcatatccgtagacacgtccatgaaccagttctccctgaagctgagttctgtgaccgccgcagacacggctgtgtattactgtgccagacggggggggggatttgcctactggggccagggaaccctggtcaccgtctcctca

SEQ ID NO: 12585 - DNA, 301 bp, Homo sapiens
  source 1..301: mol_type = other DNA
cgctgtctatggtgggtctttcagtggttactactggagttggatccgccagcccccagggaaggggctggagtgggttggggaagtcactcatagtggaagcaccaactacaacccgtccctcaagagtcgagtcactatatcagttgacaagtcgaagaaccagttctccctgaagctgaactctgtgaccgccgcggacacggctctgtattattgtgcgggggctgtggtggtgactgctatggactactggtacttcgatctctggggccgtggcaccctggtcactgtctcctca

SEQ ID NO: 12586 - DNA, 301 bp, Homo sapiens
  source 1..301: mol_type = other DNA
cgctgtctatggtgggtccttaaatggttactactggagctggatccgccagtccccagggaaggggctggagtggattggacaaatcaactatagaggaagcaccaattacaacccgtccctcaagagtcgagtcaccatgtcagtgcatacgtccaacaaccagttctccctgaagctgagctctgtgaccgccgcggacacggctatatattattgtgcgggggctgtggtggtgactgctatggactactggtacttcgatctctgggcccgtggcaccctggtcactgtctcctca

SEQ ID NO: 12587 - DNA, 301 bp, Homo sapiens
  source 1..301: mol_type = other DNA
cgctgtctatggtgggtccttcagtggatactactggagttggatccgccagcccccagggaaggggctggaatggattggcgaaatcaatcatagaggaggtaccaactacaacccgtccctcaagagtcgagtcaccatatcagttgacacgtccaagaaccagttctccctgaagttgacttctgtgaccgccgcggacacggctgtttattactgtgcgggggctgtggtggtgactgctatggactattggtacttcgatctctggggccgtggcaccctggtcactgtctcctca

SEQ ID NO: 12588 - DNA, 301 bp, Homo sapiens
  source 1..301: mol_type = other DNA
cgctgtctatggtgggtctttcagtggttactactggagttggatccgccagcccccagggaaggggctggagtgggttggggaagtcactcatagtggaagaaccaactacaacccgtccctcaagagtcgagtcactatatcagttgacaagtcgaagaaccagttctccctgaagctgaactctgtgaccgccgcggacacggctctgtattattgtgcgggggctgtggtggtgactgctatggactactggtacttcgatctctggggccgtggcaccctggtcactgtctcctca

SEQ ID NO: 12589 - DNA, 301 bp, Homo sapiens
  source 1..301: mol_type = other DNA
cgctgtctatggtgcgtccttcagtggttactactggagctggatccgccagcccccagggaaggggctggagtggattggggaaatcaatcatagtggaaacaccaactacaacccgtccctcaagagtcgagtcaccatatcattagacacgtccaggaaccagttctccctgaagctgacctctgtgaccgccgcggacacggctgtgtattactgtgcgggggctgtggtggtgactgctatggactactggtacttcgatctctggggccgtggcaccctggtcactgtctcctca

SEQ ID NO: 12590 - DNA, 301 bp, Homo sapiens
  source 1..301: mol_type = other DNA
cgctgtctatggtgggtctttcagtggttactactggagttggatccgccagcccccagggaaggggctggagtgggttggggaagtcactcatagtggaagcaccaactacaacccgtccctcaagagtcgagtcaccatatcagttgacaagtcgaagaaccagttctccctgaagctgaactctgtgaccgccgcggacacggctctgtattattgtgcgggggctgtggtggtgactgctatggactactggtacttcgatctctggggccgtggcaccctggtcactgtctcctca

SEQ ID NO: 12591 - DNA, 301 bp, Homo sapiens
  source 1..301: mol_type = other DNA
cgctgtctatggtgggtccttcagtggttactactggagctggatccgccagcccccagggaaagggctggagtggatcgggcaaatcagtcatagtggaagcagcagctacaatccgtccctcaagagtcgagtcgccatgtcagtcgacacgtccagaaaccagttctccctgaggttgacctctgtgaccgccgcggacatggctgtatattactgtgcgggggctgtggtggtgactgctatggactactggtacttcgatctctggggccgtggcaccctggtcaccgtctcctca

SEQ ID NO: 12592 - DNA, 301 bp, Homo sapiens
  source 1..301: mol_type = other DNA
cgctgtctatggtgggtcctttagtggtcactactggagctggatccgccagcccccagggaaggggccggagtggatcggacaaatcagtcatagtggaagcaccagctacagtccgtccctcaagagtcgagccgccatatcagtcgacacgtccagaaaccagttctccctgaggttgacctctgtgaccgccgcggacatgggtgtttattactgtgcgggggctgtagtggttactgctatggactactggtacttcgatctctggggccgtggcaccctggtcaccgtctcctca

SEQ ID NO: 12593 - DNA, 280 bp, Homo sapiens
  source 1..280: mol_type = other DNA
tgcagcctctggattcaccctcagtaactacgacatacactgggtccgccaagctacaggaaaaggtctggagtggatctcggctattggttctactggtgacacatcctatgcaggctccgtgaagggccgattcaccatctccagagaaaatgccaagaactccttgtatcttcaaatgaacagcctgagagccggggacacggctgtgtattactgtgtaagagccaccagtggctttgactactggggccagggaaccctggtcaccgtctcctca

SEQ ID NO: 12594 - DNA, 280 bp, Homo sapiens
  source 1..280: mol_type = other DNA
tgcagcctctggattcaccctcagtaactacgacatacactgggtccgccaagctacaggaaaaggtctggagtggatctcggctattggttctagtggtgacacatcctatgcaggctccgtgaagggccgattcaccatctccagagaaaatgccaagaactccttgtatcttcaaatgaacaccctgagagccggggacacggctctgtattactgtgtaagagccaccagtggctttgactactggggccagggaaccctggtcaccgtgtcctca

SEQ ID NO: 12595 - DNA, 280 bp, Homo sapiens
  source 1..280: mol_type = other DNA
tgcagcctctggattcaccctcagtaactacgacatacactgggtccgccaagctacaggaaaaggtctggagtggatctcggctattagttctgctggtgacacaccctatgcaggctccgtgaagggccgattcaccatctccagagaaaatgccaagaactccttgtatcttcaaatgaacaacctgagagccggggacacggctgtgtattactgtgtaagagccaccagtggctttgactactggggccagggaaccctggtcaccgtctcctca

SEQ ID NO: 12596 - DNA, 280 bp, Homo sapiens
  source 1..280: mol_type = other DNA
tgcagcctctggattcaccttcagtctctacgacatgcactgggtccgccaagccacaggaaaaggtctggagtgggtctcaggtattggcactgctggtgacccatcctatataggctccgtgaagggccgattcaccacctccagagaaaatgccaagaactccttgtatcttcaaatgaacagcctgagagccggggacacggctgtgtatttctgtgtaagagcaacatctggctttgactactggggccagggaaccctggtcaccgtctcctca

SEQ ID NO: 12597 - DNA, 280 bp, Homo sapiens
  source 1..280: mol_type = other DNA
tgcagcctctggattcaccttcagtctctacgacatgcactgggtccgccaagccacaggaaaaggtctggagtgggtctcaggtattggcagtgctggtgacccttcctatataggttccgtgaagggccgattcaccacctccagagacaatgccaagaactccttgtatcttcaaatgaacagcctgagagccggggacacggctgtgtatttctgtgtaagagcaacatctggctttgactactggggccagggaaccctggtcaccgtctcctca

SEQ ID NO: 12598 - DNA, 294 bp, Homo sapiens
  source 1..294: mol_type = other DNA
gcttctgggctcagctttggaacctctactgtccagtgggtgcgacaggctcgtggacaacgccttgagtggataggatggttccgccttggcaatggtgacacgaggtccgcacagatcttccaaaaaagagtcacgtttaccacggacctgtccacaaacacagcctacatggagctgagcagcctgacatccgaggacacggccgtctattactgtgcggcagagacgtacagtgggagttgctgctggttcgacccttggggccagggaaccctggtcaccgtctcctca

SEQ ID NO: 12599 - DNA, 294 bp, Homo sapiens
  source 1..294: mol_type = other DNA
acttctgggctcacctttgctagttctgctatacagtgggtgcgacaggcccgtggacaacgccttgagtggataggatggatcgtcgttggcagtggtaacacaaagtacacacagaagatgcaggaaagagtcaccattaccagggacatgtccacaagcacagcctacatggagttgagcagcctgacacccgaagacacggccgtgtattattgtgcggcagagacatatagcgggagttgctgttggttcgacccctggggccagggaaccctggtcaccgtctcctca

SEQ ID NO: 12600 - DNA, 294 bp, Homo sapiens
  source 1..294: mol_type = other DNA
acttctggattcacctttggtacttctgctatacaatgggtgcgacaggctcgtggacaacgccttgagtggattggatggctcgtcgttggcagcggtgacacaagctacgcacaacatctgcaggggagactctccatttttagggacatgtccacaagtacagcctacatggagttgagaggcctgagatccgatgacacggccgtctattattgtgcggcagaaacatatagtggcagttgctgctggttcgacccctggggccagggaaccccggtcaccgtctcctca

SEQ ID NO: 12601 - DNA, 286 bp, Homo sapiens
  source 1..286: mol_type = other DNA
tgcagcctctggattcaccttcagtggctattggatgcactgggtccgccaagctccagggaaggggctggtgtgggtctcacgtattcatagtgatggcagtagttcaacctacgcggactttgtgaagggccgattcaccatctccagagacaacgccaagaacacgctgtatctgcaaatgaacagtctgagagccgaggacacggctgtgtattactgtgcaaggggtgggacttacagctttgactactggggccagggaaccctggtcaccgtctcctca

SEQ ID NO: 12602 - DNA, 286 bp, Homo sapiens
  source 1..286: mol_type = other DNA
tgcagcctctggattcaccttcagtaactactggatgcactgggtccgccaagctccagggaaggggctggtgtgggtctcacgtattaatcaagatgggagtggcacaacctacgcggactccgtgacgggccgattcaccatctccagagacaacgccaagaacgtgctgtatctgcaaatgaacagtctgagagccgaggacacggctgtgtattactgtgcaagaggtgggacctactcctttgactactggggccagggaaccgtggtcaccgtctcctca

SEQ ID NO: 12603 - DNA, 283 bp, Homo sapiens
  source 1..283: mol_type = other DNA
tgcagcctctggattcaccttcagtaactactggatgcactgggtccgccaagctccagggaaggggctggtgtgggtctcacgtattaatcatgatgatagcacaacctacgcggactccgtgacgggccgattcaccatctccagagacaacgccaagaacacgctgtatctgcaaatgaacagtctgggagccgaggacacggctgtgtatttctgtgcaagaggtgggacctactcctttgactactggggccagggaacccgggtcaccgtctcctca

SEQ ID NO: 12604 - DNA, 292 bp, Homo sapiens
  source 1..292: mol_type = other DNA
tgcagcctctggattcaccttcagtgactattacatggactgggtccgccaggctccagggaaggggctggagtgggttggccgaattaaacacaaacctgaaagttacaccacagaatacgccgcgtctgtgagaggcagattcaccatctcaagagatgattcaaagaattcactgtatctgcaaatggacagcctgaaaaccgaggacacggccgtgtattattgtgctagagattcaatggggtcctatgactactggggccagggaaccctggtcaccgtctcctca

SEQ ID NO: 12605 - DNA, 292 bp, Homo sapiens
  source 1..292: mol_type = other DNA
tgcagcctctggattcaccttcagtgactattacatggactgggtccgccaggctccagggaaggggctggagtgggttggccgaattaaacacaaacctgaaagttacaccacagaatacgccgcgtctgtgagaggcagattcaccatctcaagagatgattcaaagaattcactgtatctgcaaatggacagcctgaaaaccgaggacacggccgtgtattattgcgctagagattcaatggggtcctatgactactggggccagggaaccctggtcaccgtctcctca

SEQ ID NO: 12606 - DNA, 292 bp, Homo sapiens
  source 1..292: mol_type = other DNA
tgcagcctctggattcaccttcagtgactattacatggactgggtccgccaggctccagggaaggggctggagtgggttggccgaattaaacacaaacctgaaagttacaccacagaatacgccgcgtctgtgagaggcagattcaccatctcaagagatgattcaaagaattcactgtatctgcaaatggacagcctgaaaaccgaggacacggccgtgtattattgtgctagagattcaatggggtcctatgattactggggccagggaaccctggtcaccgtctcctca

SEQ ID NO: 12607 - DNA, 292 bp, Homo sapiens
  source 1..292: mol_type = other DNA
tgcagcctccggattcaccttcagtgactattacatggactgggtccgccaggctccagggaaggggctggagtgggttggccgaattaaacacaaacctgaaagttacaccacagaatacgccgcgtctgtgagaggcagattcaccatctcaagagatgattcaaagaattcactgtatctgcaaatggacagcctgaaaaccgaggacacggccgtgtattattgtgctagagattcaatggggtcctatgactactggggccagggaaccctggtcaccgtctcctca

SEQ ID NO: 12608 - DNA, 292 bp, Homo sapiens
  source 1..292: mol_type = other DNA
tgcagcctctggattcacctttagtgaccaccagatggactgggtccgccaggctccagggaaggggctggagtggattggccgcgctagagacaaaggctacagttacagcacagaatatgccgcgtctgtgaaaggcagattcaccatctcaagagatgattcaaagaactcactgtatctccaaatgaacggcctgaaaaccgaggacacggccgtttattactgtgctagagattccatggggagctatgattattggggccagggaaccctggtcaccgtctcctca

SEQ ID NO: 12609 - DNA, 283 bp, Homo sapiens
  source 1..283: mol_type = other DNA
tgcagcctctggattgaccttcaggaattattggatgacttgggtccgccaggctccagggaaggggctagagtgggtggccaatataaaatttggtgcaactgagacatactatgtggactctgtgaggggccgattcaccatcttcagagacgacgccaaaaattcactctatctggaaatgagcagcctgagaagtgacgacacggctgtctattactgtgcgacaggcagagtaggaagggactactggggccagggaaccctggtcaccgtctcctca

SEQ ID NO: 12610 - DNA, 283 bp, Homo sapiens
  source 1..283: mol_type = other DNA
tgcagcctctggattcatcttcagtgcttattggatgacctgggtccgccaggctccagggaaggggctggagtgggtggccaacataaaacagggtggaagtgagagatactatgtggactctgtgaagggccgattcaccatctccagagacgacgccaagaattcagtgtatctgcaaatgaacagcctgagagccgaggacacggctgtgtattactgtgcgacaggtagagtaggtcgcgactactggggccagggaaccctggtcaccgtctcctca

SEQ ID NO: 12611 - DNA, 298 bp, Homo sapiens
  source 1..298: mol_type = other DNA
tgaagcctctggattcaccttcagtgattatgaaatgaactgggtccgccaggctccagggaaggggctggagtgggtttcacacattagtagtagtggtagtaccatatactacgcagactctgtgaagggccgattcaccatctccagagacaacgccaagagttcactgtatctgcaaatgaacagcctgagagccgaggacacggctgtttattactgtgcgagagatcggggatacagttatggctattggttcgacccctggggccagggaaccctggtcaccgtctcctca

SEQ ID NO: 12612 - DNA, 298 bp, Homo sapiens
  source 1..298: mol_type = other DNA
tgcagcctctggtttcacaatcagttcttttgacatgaattgggtccgccaggctccagggaaggggctggagtggatttcatacattagtagtagtggtggaaccatatactacgcagactctgtgaagggccgattcaccatctccagagacagcgccaagaactcactgtatctgcaaatgaacagcctgagagccgaagacacggctgtttactactgtgcgagagaccggggatacagttatggttactggttcgacccctggggccagggaaccctggtcaccgtctcctca

SEQ ID NO: 12613 - DNA, 282 bp, Homo sapiens
  source 1..282: mol_type = other DNA
gcttctggttacacatttaccagttatggtatcagctgggtgcgacaggcccctggacaagggcttgagtggatgggatggatcagcacctccagcggtgacacaaagtttgcacagagactccagggcagagtctccctgaccaaagacacatccacgagcacagtatatatggagctgaggaccctgagatcggacgacacggccgtgtattattgtgcgagagatagggactggacccttgactactggggccagggaaccctggtcaccgtctcctca

SEQ ID NO: 12614 - DNA, 282 bp, Homo sapiens
  source 1..282: mol_type = other DNA
gcttctggttacacgtttaccaattatggtatcagttgggtgcgacaggcccctggacaagggcctgagtgggtgggatggatcagcactcagaaaggtaagacaaagtatgcacagaagttgcaggggagagtcaccatgaccacagacacatccacgaccacagcctacatggagctgagaagcctaagatctgacgacacggccgtgtattactgtgcgagagatcgggattggacacttgactactggggccagggaaccctggtcaccgtctcctca

SEQ ID NO: 12615 - DNA, 292 bp, Homo sapiens
  source 1..292: mol_type = other DNA
tgcagcctctgggttcatcttcggtagttatgttatgcactgggtccgccaggctccaggcaaggggctggagtcggtggcagttatatcagatgatggaagtcgtacatactacgcagtctccgtggagggccgattcaccgtctccagagacatttccaggaacaccctctatctggaaatgagcagcctgacaagcgacgactcggctatatattactgtgcgagatccagagaaggctacaatttgcttgactattggggccagggagccctggtcagcgtctcctca

SEQ ID NO: 12616 - DNA, 292 bp, Homo sapiens
  source 1..292: mol_type = other DNA
tgcagcctctggattcaccttcagtggctatgcaatacactgggtccgccaggctccaggcaaggggctggagtgggtggcagctataccatctgatggaagtaaaacatactacacagactccgtgaagggccgattcaccatctccagagacaatcccaagagcacgctgtatctgcaaatgaacagcctgagaagtgaggacacggctgtgtattattgtgcgaggagtagagaaggctacaatttacttgactactggggccagggaaccctggtcaccgtctcctca

SEQ ID NO: 12617 - DNA, 289 bp, Homo sapiens
  source 1..289: mol_type = other DNA
tgcagcctctggattcatcttcagtagctactggatgtactgggtccgccaagctccagggaaggggctggtgtgggtctcacgtattaatagtgatgggagcagcacaagctacgcggactccgtgaagggccgattcaccatctccagagacaacgccaagaacacgctgtatctgcaaatgaacaatctgagagccgaggacacggctgtgtattactgtgcagggggatactactactacggtatggacgtctggggccaagggaccacggtcaccgtctcctca

SEQ ID NO: 12618 - DNA, 289 bp, Homo sapiens
  source 1..289: mol_type = other DNA
tgcagcctctggattcaccttcagtagctactggatgcactgggtccgccaagctccagggaaggggctggtgtgggtctcacgtattaatagtgatgggagtagcacaagctacgcggactccgtgaagggccgattcaccatctccagagacaacgccaagaacacgctgtatctgcaaatgaacagtctgagagccgaggacacggctgtgtattactgcgctggaggatactactactacggtatggacgtctggggccaagggaccacggtcaccgtctcctca

SEQ ID NO: 12619 - DNA, 288 bp, Homo sapiens
  source 1..288: mol_type = other DNA
aagggttctggatatacctttaccgactactggatcggctgggtgcgccagatgcccgggaaaggcctggagtggatggggatcatctatcctggtgactctgataccagatatagcccgtccttccaaggccaggtcaccatttcagccgacaagtccatcagcaccgcctacctgcagtggacgagcctgaaggcctcggacaccggcatgtattactgtgcgagatataaagcagcaacgggtacggactactggggccagggaaccctggtcaccgtctccaca

SEQ ID NO: 12620 - DNA, 288 bp, Homo sapiens
  source 1..288: mol_type = other DNA
aaggcttctggatacatctttaccgactactggatcgcctgggtgcgccagatgcccgggaaaggcctggagtggatggggatcatctatcctgatgactctgataccagatacagcccgtccttccaaggccaggtcaccatctcagccgacaagtccatcagcgccgcctaccttcagtggagcagcctgaaggcctcggacaccgccatgtattactgtgcgagatataaagcagcaactggaacggactactggggccagggaaccctggtcaccgtctcctca

SEQ ID NO: 12621 - DNA, 280 bp, Homo sapiens
  source 1..280: mol_type = other DNA
tgcagcctctggattcaccttcagtggctactggatgaactgggtccgccaagttccagggaaggggctgttgtgggtcgcacgtattaatgctgatgggagtactacaagctatgcggactccgtgaagggccgattcaccatctccagagacaacgccaagaacacactgtatctgcaagtgaacagtctgagagccgaggacacggctctgtattactgtacacgaacgaataatcttgactactggggccagggaaccctggtcaccgtctcctca

SEQ ID NO: 12622 - DNA, 280 bp, Homo sapiens
  source 1..280: mol_type = other DNA
tgcagcctctggattcaccttcagtgacaactggatgcactgggtccgccaagctccagggaaggggctggtgtgggtctcacgtattaacagtgatgggagtaacacaaagtacgcggactccgtgaagggccgattcaccatctccagagacaacgccaagaacacgctgtatctgcaaatgaacagtctgagagccgaggacacggctatttattattgtacaagaactaataacctcgactactggggccagggaaccctggtcaccgtctcctca

SEQ ID NO: 12623 - DNA, 300 bp, Homo sapiens
  source 1..300: mol_type = other DNA
aagggttctggatacatctttagcagctactggatcgcctgggtgcgccagatgcccgggaaaggcctggagtggatggggatcatctatcctggtgactctgataccagatacagcccgtccttccaaggccaggtcaccatctcagccgacaagtccatcagtaccgcctacctgcagtggagcagcctgaaggcctcggacaccgccatgtattactgtgtgagacattttagggtgggagctactctctcctggttcgacccctggggccagggaaccctggtcaccgtctcgtca

SEQ ID NO: 12624 - DNA, 300 bp, Homo sapiens
  source 1..300: mol_type = other DNA
aagggttctggatacagttttaccacctactggatcggctgggtgcgccagatgcccgggaaaggcctggagtggatggggatcatctatcctggtgactctgataccagatacagcccgtccttccaaggccaggtcaccatctcagccgacaagtccgtcagcaccgcctacctgcagtggagcagcctgaaggcctcggacaccgccatgtattactgtgtgagacattttagggtgggagctactctttcctggttcgacccctggggccagggaaccctggtcaccgtctcctca

SEQ ID NO: 12625 - DNA, 321 bp, Homo sapiens
  source 1..321: mol_type = other DNA
acacagaccctcacgctgacctgcaccttctctgggttctcactcagcactactggagtgggtgtgggctggattcgtcagcccccaggagaggccctggagtatcttgtagtcatttattgggatgatgataagcgctacaacccatctctgaagagcaggctcaccatcaccaaagacacctccaaaaatcaggtggtctttacaatgaccaacatggaccctatggacacagccacatattattgtgtacgtaggccccttcggggccaggattggttcgacccctggggccagggaatcctggtcaccgtctcctca

SEQ ID NO: 12626 - DNA, 321 bp, Homo sapiens
  source 1..321: mol_type = other DNA
acacagaccctcacgctgacctgcaccttctctgggttctcactcaggactactggagtgggtgtgggctggatccgtcagcccccaggaaaggccctggagtggcttgcactcatttattgggatgatgataagcgttacagcccatctctgaagagcaggctcaccatcaccaaggacacctccaaaaaccaggtggtcctaacaatgaccaacatggaccctgtggacacagccacatatttttgtgtacgccgtccactacgggggcaggactggttcgacccctggggccagggaaccctggtcatcgtctcctca

SEQ ID NO: 12627 - DNA, 292 bp, Homo sapiens
  source 1..292: mol_type = other DNA
tgcagcctctaaattcacctttagtacctatgctatgcactgggtccgccagactccaggcaagggactggagtgggtggcacttatatcatttaatggaaacaatgaatattacgcagactccgtgaagggccgattcgccatctccagagacaatgccaagaacacactctttctgcaaatggacagcctgagacctgaggacacggctgtctattactgtgcgagaggacactatgatagcagtgcatttgactattggggccagggaaccctggtcaccgtctcctcg

SEQ ID NO: 12628 - DNA, 292 bp, Homo sapiens
  source 1..292: mol_type = other DNA
tgcagcctccagattcaccttcagcacctatgctatgcactgggtccgccaggctccaggcaaggggctggagtgggtggcacttatatcatttgatggagttaataaatattacgcagactccgtgaagggccgattcaccatctccagagacaattccaagaacacgctgtatttgcaaatgatcagcctcagaactgaggacacggctctttattactgtgcgagaggtcattatgacagcagcgcctttgactactggggccagggaaccctggtcaccgtctcctca

SEQ ID NO: 12629 - DNA, 292 bp, Homo sapiens
  source 1..292: mol_type = other DNA
tgcagcctctagattcaccttcagtacctatgctatgcactgggtccgccaggctccgggcaaggggctggagtgggtggcacttatatcatttgatggacgtaataaatactacgcagactccgtgaagggccgattcaccatctccagagacaattccaagaacacgctggatttgcaaatgatcagcctcagaactgaggacacggctctttattactgtgcgagaggtcattatgacagcagcgcctttgactactggggccagggaaccctggtcaccgtctcctca

SEQ ID NO: 12630 - DNA, 292 bp, Homo sapiens; identical to SEQ ID NO: 12628
  source 1..292: mol_type = other DNA

SEQ ID NO: 12631 - DNA, 295 bp, Homo sapiens
  source 1..295: mol_type = other DNA
tgcagcctctggattcacctttagcggctttgccatgagctgggtccgccaggctccagggaagggactggagtgggtctcaacaattagtggtagaactagtaacacatactacgcagactccgtgatgggccggttcaccatctccagagacaattccaggagcacgctgtatctgcaagtgaacagcctgagagcggaggacacggccgtatattactgtgcgagacctcgatattttgacttgggatactttgactcctggggccagggaaccctggtcaccgtctcctca

SEQ ID NO: 12632 - DNA, 292 bp, Homo sapiens
  source 1..292: mol_type = other DNA
tgcagcctctggattcacctttagtagatttgccgtgacctgggtccgccaggctccagggaaggggctggagtgggtctcgactattagtaacagtggtggcacatactacgcagactccgtgaagggccggttctctatctccagagacaacgccaagaacacgctgtatctgcaaatgaacagtctgagagccgaggacacggccctatattactgtgcgaggccccggtacttcgatttagggtactttgactcctggggccagggagccctggtcaccgtctcctca

SEQ ID NO: 12633 - DNA, 298 bp, Homo sapiens
  source 1..298: mol_type = other DNA
tgcaacctctggattcacctttgatgactatgccatgcactgggtccgtcaacttccagggaagggtctggagtggctctctcttattagtgcggatggtggtaggacatattatgcagactctgtgaagggccgattcaccatctccagagacaacagcaaaagctccctgtctctccaaatgaacagtctgagaactgaggacaccgccttatatcactgtgcaaaaggactggggtactactactactacggtctggacgtctggggccaagggaccacggtcaccgtctcctca

SEQ ID NO: 12634 - DNA, 298 bp, Homo sapiens
  source 1..298: mol_type = other DNA
tgcagcctctggattcacctttgatgattatgccatgcactgggtccgtcaagttccagggaagggtctggagtgggtctctcttattagtgctgatggtggtagaccatactatgcggactctgtgaagggccgattcaccatctccagagacaacggcaaagcctccctggatctgcaaatgaacaacctgagaactgaggacaccgccttgtattactgtgcaaaaggcttaggatattactactattatggtttggacgtctggggccaagggaccatggtcaccgtctcctcg

SEQ ID NO: 12635 - DNA, 286 bp, Homo sapiens
  source 1..286: mol_type = other DNA
tgcagcctctggattcacctttagtacctattggatgagctgggtccgccaggctccagggaaggggctggagtgggtggccaacataaagccagatggaagtaagaattcctatgtggactctgtgaagggccgattcagtatctccagagacaacgccaagaactcactgtatctgcaaatgaacagcctgagagtcgaggacacggctctatattactgtgcgacccacaacagctggcgctttgactactggggccagggaaccctggtcaccgtctcctca

SEQ ID NO: 12636 - DNA, 286 bp, Homo sapiens
  source 1..286: mol_type = other DNA
tgcagcctctggattcacctttagtcactattggatgacctgggtccgccaggctccagggaaggggctggagtgggtggccaagataaagcaagatggaagtgagaaatactatgtggactctgtgaggggccgattcaccatctccagagacaacgccaagaactctctgtttctgcaaatgaacagcctgagagccgaggacacggccgtatattactgtgcgacacataattcgtggaggttcgattactggggccagggaaccctggtcaccgtctcctca

SEQ ID NO: 12637 - DNA, 286 bp, Homo sapiens
  source 1..286: mol_type = other DNA
tacagcttttgggttcacctctagtgatcatcatataaactgggtccgccatgctccagggaaggggctggaatggttaggagtcattagaggcaatccttctagtgggacaacagagtacgccgcctctgtaaaaggcagattcatcatctcaagagatgattccaaaagcatcgcctatctgcaaatgaacagcctgaaaaccgaagacacagccgtatatttttgtactagagggtaccatcttgactactggggccagggaaccctggtcaccgtctcctca

SEQ ID NO: 12638 - DNA, 286 bp, Homo sapiens
  source 1..286: mol_type = other DNA
tacagcttctggattcacctttggtgatcatcatatgaactgggtccgccaggctccagggaaggggccggagtgggtaggtttcattagaaataaagcttttggtgggaccacagaagccgccgcgtctgtgaaaggcagattcaccatctcaagagatgattccaaaagtatcgcctatctgcaaatgaacagcctgaaaaccgaggacacaggcgtgtattactgtactagagggtatcaccttgactactggggcctggggaccctggtcaccgtctcctca

SEQ ID NO: 12639 - DNA, 283 bp, Homo sapiens
  source 1..283: mol_type = other DNA
tgcagcctctggattcacctttagtagtcattggatgagctgggtccgccaggctccagggaaggggctggagtgggtggccaatatagaccaatatagaagtgagaaatactatgtggactctgtgaagggccgattcaccatctccagagacaatgccaagaactcactgtatctggaaatgaacagcctgagagccgaggacacggctgtgtattactgtgcgagagggttacgtacagttgactactggggccagggaactctggtcaccgtctcctca

SEQ ID NO: 12640 - DNA, 283 bp, Homo sapiens
  source 1..283: mol_type = other DNA
tgcagcctctggattcacctttagtagctattggatgacctgggtccgccaggctccagggaaggggctggagtgggtggccaacataaagccagatggaagtgagaagtactatgtggactctgtgaagggccgattcaccatctccagagacaacgccaagaactcactgtatctgcaagtgaacagcctgagagccgaggacatggctgtgtattactgtgcgagagggttaagaactgttgactactggggccagggaaccctggtcaccgtctcctca

SEQ ID NO: 12641 - DNA, 325 bp, Homo sapiens
  source 1..325: mol_type = other DNA
cactgtctctggtggctccatcagcagtagtaattactactggggctggatccgccagcccccagggaaggggctggagtggattgggagtatctattatagtgggagcacctactacaacccgtccctcaagagtcgagtcaccatatccgtagacacgtccaagaaccagttctccctgaagctgagctctgtgaccgccgcagacacggctgtatattactgtgcgagacatggcgggggctcgtattatgatattttgactggttattccctaggcgcttttgatatctggggccaagggacaatggtcaccgtctcttca

SEQ ID NO: 12642 - DNA, 325 bp, Homo sapiens
  source 1..325: mol_type = other DNA
cactgtctctggtggctccatcagcagtagtaacttctactggggctggatccgccagcccccaggacagggcctggagtggattgggagtatctattctggtgggagtacctactacaacccgtccctcaagagtcgagtctccatatccgttgacacgtccaagaaccagttctccctgaggctgagctctgtgaccgccgcagacacggctgtgtattactgtgcgagacatgggggagggtcttattacgatattttgacaggttattcccttggcgcttttgatatctggggccaagggacaatggtcaccgtctcttca

SEQ ID NO: 12643 - DNA, 292 bp, Homo sapiens
  source 1..292: mol_type = other DNA
cactgtctctggtggctccatcaacggtggtggttactcctggacctggatccgccagcacccagggaagggcctggagtggattgggtacatctcttataatgagaacaccaactacaacccgtccctcaagagtcgaattaccatgacactagacacgtctaagaaccagttctccctgaggctgacgtctgtgactgccgcggacacagccgtgtattactgtgcgagagatctctactacggaatggacgtctggggccaagggaccacggtcaccgtcgtctcctca

SEQ ID NO: 12644 - DNA, 292 bp, Homo sapiens
  source 1..292: mol_type = other DNA
cactgtctctggtggctccatcaacggtggtggttactcctggacctggatccgccagcacccagggaagggcctggagtggattggatacatctcttataatgaaaacaccaactacaacccgtccctcaagagtcgagttaccatggcactagacacgtctaagaaccagttctccctgaggttgtccgctgtgactgccgcggacacggccgtgtattactgtgcgagagatctctactacggaatggacgtctggggccaagggaccacggtcaccgtcgtctcctca

SEQ ID NO: 12645 - DNA, 289 bp, Homo sapiens
  source 1..289: mol_type = other DNA
cactgtctctggtggctccatcagcagtggtggttactactggagctggatccgccagcacccagggaagggcctggagtggattgggtacatctattacagtgggagcacctactacaacccgtccctcaagagtcgagttaccatatcagtagacacgtccaagaaccagttctccctgaagctgagctctgtgaccgctgcggacacggccgtgtattactgtgcgagagatctctactacggtatggacgtctggggccaagggaccacggtcaccgtctcctca

SEQ ID NO: 12646 - DNA, 288 bp, Homo sapiens
  source 1..288: mol_type = other DNA
gcatctggatacaccttcaccacctactacatacactgggtgcgacaggcccctggacaagggcttgagtggatgggaagaatcaaccccagtgatgccagcacatactacgtacagaagttccagggcctattcaccatgaccagtgacacgtccacgagtacagtctctatggagctgggcagcctgacgtctgaggacacggccgtgtattattgtgcgagagaacggcctgggacctactattttgactactggggccagggaaccctggtcaccgtctcctca

SEQ ID NO: 12647 - DNA, 288 bp, Homo sapiens
  source 1..288: mol_type = other DNA
gcatctggatacaccttcaccacctacttcatacactgggtgcgacaggcccctggacaagggcttgagtggatgggaagaatcgaccccagtgatgccaccacatactacgtcgagaagttcctggacccattcaccatgaccagtgacacgtccacgagtactgtctctatgtacctgggcagcctgacgtctgaggacacggccgtgtattattgtgcgagagaacggcctgggacctactattttgactactggggccagggaaccctggtcaccgtctcctca

SEQ ID NO: 12648 - DNA, 288 bp, Homo sapiens
  source 1..288: mol_type = other DNA
gcatctggattcaccttcaccagctactatatccactgggtgcgacaggcccctggacaaggacttgagtggatgggaacagtcaaccctactggtgatacgacaaggtacggacagaagttccagggcagagtcaccttgaccagagacacgtccacgaccacagtctacatggagctgagcagcctgacgtctgatgacacggccgtctattactgtgcgagagaacgacctgggacctattactttgactactggggccaggggaccctggtcaccgtctcctca

SEQ ID NO: 12649 - DNA, 295 bp, Homo sapiens
  source 1..295: mol_type = other DNA
cactttctctggtggctccatcggtacttactactggagctggatccggcagcccccagggaggcgactggagtggattgcatatatctattatagtggggacaccaaattccacccctccctcaagagtcgagtctccatttcattagacacgtccaataaccagttctccctgaagctgcgctctgtgaccgctgcggacacggccgtgtattactgtgcgagaggttctatagcagcatctggatggtactttgactactggggccagggaaccctggtcaccgtctcctca

SEQ ID NO: 12650 - DNA, 295 bp, Homo sapiens
  source 1..295: mol_type = other DNA
cactttctctggtggctccatcggtacttactactggagctggatccggcagtccccaggggggcgactggagtggattgcatatatctattatagtggcgacaccaaattccacccctccctcaagagtcgagtctccatttcattagacacgtccaataatcagttctccctgaagctgcgctctgtgaccgctgcggacacggccgtgtattactgtgcgagaggttctatagcagcatctggatggtactttgactactggggccagggaaccctggtcaccgtctcctca

SEQ ID NO: 12651 - DNA, 295 bp, Homo sapiens; identical to SEQ ID NO: 12650
  source 1..295: mol_type = other DNA

SEQ ID NO: 12652 - DNA, 295 bp, Homo sapiens
  source 1..295: mol_type = other DNA
cactttctctggtggctccatcggtacttactactggagctggatccggcagtccccagggaggcgactggagtggattgcatatatctattatagtgggagcaccaaataccacccctccctcaagagtcgagtctccatttcattagacacgtccaagaaccagttctccctgaagctgagctctgtgaccgctgcggacacggccgtgtattactgtgcgagaggttctatagcagcatctggatggtactttgactactggggccagggaaccctggtcaccgtctcctca

SEQ ID NO: 12653 - DNA, 295 bp, Homo sapiens
  source 1..295: mol_type = other DNA
cactatctctggtggctccatcggtactcactactggagttggatccgacagcccccggggaagtcactggagtggattgcgtatatctattacgatgggagcaccaagtacaacccctccctcgagagtcgaatcaccatttcgttagacacgtccaagaagcagttctccctgaaactgacctctgtgaccgctgcggacacggccgtctattactgtgcgagagggagtatagcagcatctggttggtactttgactactggggccagggaaccctggtcaccgtctcctca

SEQ ID NO: 12654 - DNA, 280 bp, Homo sapiens
  source 1..280: mol_type = other DNA
tgcagcctctggattcaccttcagtagctattggatgacctgggtccgccaggctccagggaaggggctggagtgggtggccaacataaagcaagatggaagtgagaaatactatgtggactctgtgaagggccgattcaccatctccagagacaacgccaagaactcagtgtatctacaaatgaacagcctgagagccgaggacacggctgtgtattactgtgcgcgagggtcggcgggtgactactggggccagggaaccctggtcaccgtctcctca

SEQ ID NO: 12655 - DNA, 280 bp, Homo sapiens
  source 1..280: mol_type = other DNA
tgcagcctctggattcagctttagtaactattggatgacctgggtccgccaggctccagggaaggggctggagtgggtggccaacataaagtatgatggcagtgagaaatactttgtggactctgtgaagggccgattcaccatctccagagacaacgccaagaactcattgtatctgcaaatgaacagcctgagagccgaggacacggctgtctattactgtgcgaggggtagtgccggcgactactggggccagggaaccctggtcaccgtctcctca

SEQ ID NO: 12656 - DNA, 286 bp, Homo sapiens
  source 1..286: mol_type = other DNA
cactgtctctggtgactccatcagtagttactactggagctggatccggcaacccccagggaagggactggagtggattgggtatatccattacagtgggagcaccaactacaacccctccctcaagagtcgagtcaccatgtcagtggacacgtcgaagaaccaggtctccctgaagctgagctctgtgaccgccgcagacacggccgtgtattactgtgcgagacggtatactagtggttattacgactactggggccagggaaccctggtcaccgtctcctca

SEQ ID NO: 12657 - DNA, 286 bp, Homo sapiens
  source 1..286: mol_type = other DNA
cactgtctctggtgactccatcagtagttactactggagctggatccggcaacccccagggaagggactggagtggattgggtatgtccattacagtgagaacaataactacaacccctccctcaagagtcgagtcaccatgtcagtggacacgtcgaagaaccaggtctccctggagctgagctctatgacctccgcagacacggccctgtattactgtgcgagacggtataccagtggttattacgactactggggccagggaaccctggtcaccgtctcctca

SEQ ID NO: 12658 - DNA, 286 bp, Homo sapiens
  source 1..286: mol_type = other DNA
cacagtctccggtgactccatcagtggttactactggagctggaaccggcagcccccagggaagggactggagtggattggctatatctattacagtgggagcaccaactacaacccctccctcaagagtcgagtcaccatatcagtagacacgtccaagaaccagttctccctgaagctgagctctgtgaccgccgcagacacggccgtgtattactgtgcgagacgctacactagtggttattacgactactggggccagggagccctggtcaccgtctcctca

SEQ ID NO: 12659 - DNA, 292 bp, Homo sapiens
  source 1..292: mol_type = other DNA
cgtagcctctggattcaccttcagaagttattggatgttctgggtccgccaaggtccagggaaggggctggagtgggtcacacgcattaagactgatggaagtagcacaacctacgcggactctctgaagggccgattcattatcaccagagacaacgccaagaacaccttgtatctgcaaatgaacagtctaagcgccgaggacacggctgtctattactgtgcaagagatctggtggcaacgggtgctttcgatatctggggtcaggggacaatggtcaccgtctcttca

SEQ ID NO: 12660 - DNA, 292 bp, Homo sapiens
  source 1..292: mol_type = other DNA
tgcagcctctggattcatcttcagtaattactggatgttctgggtccgtcaagctccagggaaggggccggtgtgggtctcacgtattaagactgacgggactatctcaaattatgcggactccgtgaagggccgattcaccatctccagagacaacgccaagaatatgctgtatttgcaaatgaacagtctgcgaggcgaagacacggctgtgtattactgtgcaagagatttggtggctacaggtgcttttgatatttggggcctagggacaatggtcaccgtgtcttca

SEQ ID NO: 12661 - DNA, 292 bp, Homo sapiens
  source 1..292: mol_type = other DNA
tgcagcctctgaattcaccttcaggaattactggatgttctgggtccgccaagctccagggaaggggctggagtgggtctcgcgtattaagactgatgggagtagaacaacttacgcggactccgtgaagggccgattcaccatatccagagacaacgccaagaacaccctgtatctgcaaatgaacagtctgagaggcgaggacacggctatgtattactgtgcaagagatttggtggcaacaggtgcttttgacatttggggccaagggacaatggtcaccgtctcttca

SEQ ID NO: 12662 - DNA, 286 bp, Homo sapiens
  source 1..286: mol_type = other DNA
cactgtctctggtgactccatcagtagttactactggagctggatccggcagcccccagggaagggactggagtggattgggtatatccattacagtgggagcaccaactacaacccctccctcaagagtcgagtcaccatgtcagtggacacgtcgaagaaccaggtctccctgaagctgagctctgtgaccgccgcagacacggccatgtattactgtgcgagacggggtagtagtggttattacgactactggggccagggaaccctggttaccgtctcctca

SEQ ID NO: 12663 - DNA, 286 bp, Homo sapiens
  source 1..286: mol_type = other DNA
cactgtctctggtggctccatcagtagttactactggagctggttccggcagcccccagggaagggactggagtggattggctatatctattacagtgggaccaccaactacaacccctccctcaagagtcgagtctccatgtcagtagacacgtccaagaatcagttctccctgaagctgagctctgtgaccgctgcggacacggccgtgtattattgtgcgaggcgagggagtagtggttattacgactactggggtcagggaaccctggtcatcgtctcctca

SEQ ID NO: 12664 - DNA, 280 bp, Homo sapiens
  source 1..280: mol_type = other DNA
tgcagcctctggattcaccttcaatagctattggatccactgggtccgccaagctccagggaaggggctggtgtgggtctcacgtattagtcctgaagggagtgtcacaaactacgcggactccgtgaagggccgattcaccatctccagagacaacacccagaacacggtgtatctgcagatgaacagtctgagagccgaggacacggctgtatattactgtgcgagaataggatatgacagtggctggggccagggaaccctggtcaccgtctcctca

SEQ ID NO: 12665 - DNA, 280 bp, Homo sapiens
  source 1..280: mol_type = other DNA
tgcagcctctggattcaccttcaataactattgggtgcactgggtccgccaagctccagggaaggggctggtgtgggtctcacgtattagtcctgaggggagtgtcacaaactacgcggactccgtgaagggccgattcaccatctccagagacaacacccagaacacggtgtatctgcagattaacagtctgagagccgaggacacggctatgtattactgtgcgagaataggatatgacagtggctggggccagggaaccctggtcaccgtctcctca

SEQ ID NO: 12666 - DNA, 280 bp, Homo sapiens
  source 1..280: mol_type = other DNA
tacagcctctggattcaccttcaatagctattggatacactgggtccgccaagctccagggaaggggctggtgtgggtctcacgtattagtccagaggggagtgccacaaactacgcggacttcgtgaagggccgattcaccctgtccagagacaacccccagaacacggtgtatctgcagatgaacagtctgagagccgaggacacggctctatattactgtgcgagaataggatatgacagtggctggggccagggaaccctggtcaccgtctcctca

SEQ ID NO: 12667 - DNA, 280 bp, Homo sapiens
  source 1..280: mol_type = other DNA
tgcagcctctggattcaagtttagtgactccttcatacactgggtccgccaacctccagggaaggggctggtgtgggtctcacgcactgttcctgatggtactttctcaacctacgcgggctccgtgaagggccgattcaccatctccagagacaacgccaagaacatggtgtatctgcaaatggaccgtctgagactcgatgacagcgctatatattattgtgcgagaatcggttatgacagtggctggggccagggaaccctggtcaccgtctcttca

SEQ ID NO: 12668 - DNA, 280 bp, Homo sapiens
  source 1..280: mol_type = other DNA
tgcagcctctggattcaagtttagtgactccttcatacactgggtccgccaacctccagggaaggggctggtgtgggtctcacgcactgttcctgatgggactttctcaacctacgcgggctccgtgaagggccgattcaccatctccagagacaacgccaagaacatggtgtatctgcaaatggaccgtctgagactcgatgacagcgctatatattattgtgcgagaatcggttatgacagtggctggggccagggaaccctggtcaccgtctcttca

SEQ ID NO: 12669 - DNA, 298 bp, Homo sapiens
  source 1..298: mol_type = other DNA
tgcagcctctggattcacctttagtggttatgtcatgagttgggtccgccaggctccagggaaggggctggagttggtctcaagtatttatagagatgggggttggacatactatgcagactccgtgaagggccggttcaccgtctccagggataattccaggaacaccctgtatctgcaaatgaaaagcctgagagccgaggacacggccgtatattactgtgcgaaagatcgagatgaccacggtgactactgctttgactattggggccagggaaccctggtcaccgtctcgtca

SEQ ID NO: 12670 - DNA, 298 bp, Homo sapiens
  source 1..298: mol_type = other DNA
tgcagcctctggattcccatttagcgcctatgtcatgagctgggtccgccaggctccagggaaggggctggagtgggtctccactgtttggcatcataatgataacacacagtacacagactccgtgaagggccggttcaccatctccagagacaatatcaggaacaccttgtatctgcaaatgaacagcctgagagccgaagacacggccgtatattactgtgcgaaagatagagatgaccacggtgactattgctttgactactggggccagggaaccctggtcaccgtctcctca

SEQ ID NO: 12671 - DNA, 298 bp, Homo sapiens
  source 1..298: mol_type = other DNA
tgcagcctctggattcagctttagtggttatgtcatgagttgggtccgccaggctccagggaagggactggagtgggtctcaggtatttatcgcactggtgaaggaacatactacacagactccgtgaagggccggttcaccatctccagagacaattccaagaacacactgtatctgcaaatgaacggcctgagagccgaggacacggccatatattactgtgcgaaagatagagatgaccacggtgactattgctttgactactggggccagggaaccctggtcaccgtctcctca

SEQ ID NO: 12672 - DNA, 298 bp, Homo sapiens
  source 1..298: mol_type = other DNA
tgcagcctctggattcagctttagtggttatgtcatgagttgggtccgccaggctccagggaagggactggagtgggtctcaggcatttatcgcactggtgaaggaacatactacacagactccgtgaagggccgcttcaccatctccagagacaattccaagaacacactgtatctgcaaatgaacggcctgagagccgaggacacggccatatattactgtgcgaaagatagagatgaccacggtgactattgctttgactactggggccagggaaccctggtcaccgtctcctca

SEQ ID NO: 12673 - DNA, 298 bp, Homo sapiens
  source 1..298: mol_type = other DNA
tgcagcctctggattcccatttagcgcctatgtcatgagctgggtccgccaggctccagggaaggggctggagtgggtctccactgtttggcatcataatgataacacacagtacacagactccgtgaagggccggttcaccatctccagagacaattccaggaacaccttgtatctgcaaatgaacagcctgagagccgaagacacggccgtatattactgtgcgaaagatagagatgaccacggtgactactgctttgactactggggccagggaaccctggtcaccgtctcctca

SEQ ID NO: 12674 - DNA, 298 bp, Homo sapiens; identical to SEQ ID NO: 12673
  source 1..298: mol_type = other DNA

SEQ ID NO: 12675 - DNA, 310 bp, Homo sapiens
  source 1..310: mol_type = other DNA
tgcagcctctggattcattttcactgaggcctggatgcactgggtccgccaggctccagggaaggggctggaatgggttggccgcattaaaagaaatgttgatggtgggacaacagactacgctgcacccgtgaaaggcagattcaccgtctcaagagaggattcaaaaagcacgctgtttctgcaaatgagcagcctaaaaaccgaggacacagccatgtattattgtgccacagattggggtagtgggacctattacgttcgtgcttttgatctttggggccaagggacaatggtcaccgtctcttca

SEQ ID NO: 12676 - DNA, 310 bp, Homo sapiens
  source 1..310: mol_type = other DNA
tgcagcctctggattcagttttactggcgcctggatgaactgggtccgccaggctccagggaaggggctggagtgggttggccgtattaaaagtaaaaaagatggcgcgacaacagactacgctgcacccgtgaaaggcagattcaccgtctcaagagatgactcaaaaaataccttgtatctgcaaatgaacaacctgagaagcgaggacacggccctgtattactgtgccacagattggggcagtgggacctactacgtaagagcttttgatctttggggccaagggacaatggtcaccgtctcttca

SEQ ID NO: 12677 - DNA, 301 bp, Homo sapiens
  source 1..301: mol_type = other DNA
tgcagcctctggattcacctttagcaactatgacatgagctgggtccgccaggctccagggaaggcgccggagtgggtctcagctattgttggtagtggttatagcacatactacgcagactccataaagggccggttcaccatctccagagacaattccaagaacacactgtatctgcaaatgaacagcctgagagccgaggacacggccgtatattattgtgcgaaagatgaggggcaatatagtggctacggtaactttgactactggggccagggaaccctggtcaccgtctcctca

SEQ ID NO: 12678 - DNA, 301 bp, Homo sapiens
  source 1..301: mol_type = other DNA
tgcagcctctggattcacctttaacaactatgacatgagctggctccgccaggctccagggaaggggctagagtggctctcagccattactggtagtggtgatgccacatactacgcagactccgtgaagggccggttcaccatctccagagacaattccaagaacatggtctatctgcaagtgaacagccttagagccgaggacacggccatatattattgtgcgaaagacgagggacaatatagtggctacggcaactttgactactggggccagggaaccctggtcaccgtctcctca

SEQ ID NO: 12679 - DNA, 277 bp, Homo sapiens
  source 1..277: mol_type = other DNA
cacagcctctgaattctcctttagtgtcttttggatgagttgggtccgccaggctccagggaagggactggagtgggtggccaccgcaaggcacgatgaagatactaaatactacgtggactctgtgaagggccgattcaccatttccagagacaacgccaagaattcactgtatctggaaattcacagcctgagagtcgaggacacggctgtatattattgtgtgggggcctcgcttgacttctggggccagggaaccctgctcatcgtctcctca

SEQ ID NO: 12680 - DNA, 277 bp, Homo sapiens
  source 1..277: mol_type = other DNA
tgcagcctctggattcacctttagtaactattggatgacctgggtccgccagactccagggaaggggctggagtgggtggccaccataaggcacgatattggtgtgagatactatgtggactctgtgaggggccgattcacgatctccagagacaacgccaagagctccttctatctgcaaatgagcagcctgagagccgaggacacggctgtatactattgtgtgggcgcgtctcttgacttctggggccagggaaccctggtcatcgtctcctca

SEQ ID NO: 12681 - DNA, 277 bp, Homo sapiens
  source 1..277: mol_type = other DNA
tgcagcctctggattcacctttagtaactattggatgacctgggtccgccagactccagggaaggggctggagtgggtggccaccattaggcacgatacaggtgtgaagtactatgtggactctgtgaggggccgattcacgatctccagagacgacgccaagagctcactgtatctgcaaatgaacactctgagagccgaggacacggctgtatattactgtgtgggcgcgtctcttgacttctggggccagggaaccctggtcaccgtctcctca

SEQ ID NO: 12682 - DNA, 277 bp, Homo sapiens
  source 1..277: mol_type = other DNA
tgcagcctctggattcacctttagtaactattggatgacctgggtccgccagactccagggaaggggctggagtgggtggccaccataaggcacgatacaggtgtgaaatactatgtggactctgtgaggggccgattcacgatctccagagacgacgccaagagctcactgtatctgcaaatgaacaccctgagagccgaggacacggctgtgtattactgtgtgggcgcgtcccttgacttctggggccagggaaccctggtcaccgtctcctca

SEQ ID NO: 12683 - DNA, 277 bp, Homo sapiens
  source 1..277: mol_type = other DNA
tgcagcctctggattcagctttagtgcctattggatgacctgggtccgccagactccagggaaggggctggagtgggtggccaccataaggcacgatacaggtgtgcaatattatgtggactctgtgaggggccgattcacgatctccagagacaacgccaagagctcactgtatctgcaaatggacagcctgagggccgaggacacggctgtttactactgtgtgggcgcatcgcttgacttctggggccagggaaccctggtcatcgtctcctca

SEQ ID NO: 12684 - DNA, 277 bp, Homo sapiens
  source 1..277: mol_type = other DNA
tgcagcctctggattcacctttagtgactattggatgacctgggtccgccagagtccagggaaggggctggagtgggtggccaccataaggcacgatataggtgtgagatattatgtggactctgtgaggggccgattcacgatctccagagacaacgccaagaggtcactgtatctacaaatgaacagcctgagagccgaggacacggctgtctactattgtgtgggcgcgtcccttgacttctggggccagggaaccctggtcgtcgtctcctca

SEQ ID NO: 12685 - DNA, 280 bp, Homo sapiens
  source 1..280: mol_type = other DNA
tgcagcctctggattcacctttagtagttattggatgacctgggtccgccaggctccaggaaaggggctggagtgggtggccaacataaaagaagatggaagtgagaaaaaccatgtggactctgtgaagggccgattcaccatctccagagacaacgccaagaagtcagtgtatctgcaaatgaacagcctgagagccgaggacacggctgtatattactgtgcgagattacgataccatgactactggggccagggaaccctggtcaccgtctcctca

SEQ ID NO: 12686 - DNA, 280 bp, Homo sapiens
  source 1..280: mol_type = other DNA
tgcagcctccggattcacctttagttcttattatatgacttgggtccggcaggctccagggaaggggctggagtggttggccaatataaatcaagatggacgtgaggaaaactatgcggactctgtgaagggccgattcatcatctccagagacaacgccaagaactcagtgtttttgcaaatgaacagcctgagagccgaggacacggctgtttattactgtgcgagactgcgatatcatgactattggggccagggactcctggtcaccgtctcctca

SEQ ID NO: 12687 - DNA, 277 bp, Homo sapiens
  source 1..277: mol_type = other DNA
cactgtctctggtgactccatcagcactggtggttactactggagctggatccgccagcacccagggaagggcctggagtggattgggtacacctattacagtgggcgcccctactacaacccgtccctcaagagtcgagtttccatatcagtagacaagtctaacaaccagttctccctgcacctgaactctgtgacggccgcggacacggccgtctattactgtgcgaagacactccgagactggggccagggaaccctggtcatcgtctcttca

SEQ ID NO: 12688 - DNA, 277 bp, Homo sapiens
  source 1..277: mol_type = other DNA
cactgtctctggtgactccatcagcagtggaggttactactggacctggatccgccagcagccagggaagggcctggagtggattgggtacacctattggagtgggcgcaccttgtacaacccgtccctcaacagtcgagtaaccattacagtagacaagtctaacaaccagttctccctacacctggagtctgtgacggccgcggacacggccgtgtattactgtgcgaagacactgcgggactggggccagggaacccttgtcatcgtctcttca

SEQ ID NO: 12689 - DNA, 277 bp, Homo sapiens
  source 1..277: mol_type = other DNA
cacagtctctggtgactccatcagcagtggtggtttctactggagctggatccgccagcacccagggaagggcctggagtggattgggtacacatattacagtgggcgcccctactataacccgtccctcaagagtcgagttttcatatcagtagacaagtctaacaaccagttctccctgcacctgaactccgtgacggccgcggacacggccgtatattactgtgcgaagacactccgggactggggccagggaaccctggtcatcgtctcttca

SEQ ID NO: 12690 - DNA, 277 bp, Homo sapiens
  source 1..277: mol_type = other DNA
cactgtctctggtgactccatcagcagaggtggttattattggagctggatccgccaccacccagggaagggcctggagtggatcgggtacatctattatagtgggaccagtttatacaacccgtccctcaagagtcgacttaccatatcagtagacaagtctaagaaccagttttccctgagtctgacctctgtgactgccgcggacacggccgtgtattattgtgcgaaaacactccgggactggggccagggaaccctggtcaccgtctcctca

SEQ ID NO: 12691 - DNA, 292 bp, Homo sapiens
  source 1..292: mol_type = other DNA
tgcagcctctggattcacctttagcagctatgccatgagctgggtccgccaggctccagggaaggggctggagtgggtctcagctattagtggtagtggtggtgacacatactacgcagactccgtgaagggccggttcaccatctccagagacaattccaagaacacgctgtatctgcaaatgaacagcctgagagccgaggacacggccgtatattactgtgcgaaagacataattactattgatgcttttgatatctggggccaagggacaatggtcaccgtctcttca

SEQ ID NO: 12692 - DNA, 292 bp, Homo sapiens
  source 1..292: mol_type = other DNA
tgcagcctctggattcacctttagcacctatgccatgagctgggtccgccaggctccagggaaggggctggagtgggtctcaactattagtggtggtgattatagcacatactacggagactccgtgaggggccggttcaccatctccagagacgattcccagaacacgctgtctctgcaaatgaacagcctgagagccgaggacacggccatatattactgtgcgaaagatattattacgatcgacgcttttgatatctggggccaagggacaatggtcaccgtctcttca

SEQ ID NO: 12693 - DNA, 292 bp, Homo sapiens
  source 1..292: mol_type = other DNA
tgcagcctctggattcacctttagcagttatgccatgagttgggtccgccaggctccagggaaggggctggagtgggtctcagctattagtcgcagtggtgatagcacatacttcgcagactccgtgaagggccggttcaccatctccagagacaattccaagaacacgatgtatctgcaaatgaacagcctgagagccgaggacacggccgtatattactgtgcgaaagacatcatcactattgatgcttttgatatctggggccaagggacaatggtcaccgtctcttca

SEQ ID NO: 12694 - DNA, 286 bp, Homo sapiens
  source 1..286: mol_type = other DNA
cactgtctctggtggctccatcagtggttatttctggacctggatccggcagcccccagggaagggactggaatggattggatatattcataagagtgggaacaccaactacaacccgtccctcaagagtcgagtcaccatatcaattgatacgtccaggaaccagttctccctgaatctgaactctgtgaccgccgcagacacggccgtgtattactgtgcggggggaaaacaatggctggcttttgacctctggggccagggacccctggtcaccgtctcctca

SEQ ID NO: 12695 - DNA, 286 bp, Homo sapiens
  source 1..286: mol_type = other DNA
ctctgtctctggtggctccttcggtagttactactggagctggatcaggcagtccccagggaagggactggaatatattgggtgtttctataacagtggaagtaccaattacaacccctccctccagagtcgagtcaccatatctgtagacacgtccaagaaccagttgtccctgatgctgagcccggtgacggctgcggacacggccatatattactgtgcggggggaaagcagtggctagcatttgacctctggggccagggagccctggtcaccgtctcctca

SEQ ID NO: 12696 - DNA, 313 bp, Homo sapiens
  source 1..313: mol_type = other DNA
tgcagcctctggattcaccttcggtgattatggcatgagctgggtccgccaacctccagggaaggggctggagtgggtctctggtattaattgggatggcggtaggacaggttatgcagactctgtgaagggccgattcaccatctccagagacaacgccaagaactccctgtatctgcaaatgaacagtctgagagccgaggacacggccttgtatcactgtgcgagagtggcgtactattatgatagtagtggttattacaaatactactttgactactggggccagggaaccctggtcaccgtctcctca

SEQ ID NO: 12697 - DNA, 313 bp, Homo sapiens
  source 1..313: mol_type = other DNA
tgcagcctctggattcacctttgatgattacggcatgagctgggtccgccaagctccagggaaggggctggagtgggtctctggtattaattggaatggtggtagcacaggttatgcagactctgtgaagggccgattcaccatctccagagacaacgccaagaactccctgaatctgcaaatgaacagtctgagagccgaggacacggccttgtatcactgtgcgagagtggcgtattactatgatagtagtggttattataagtactactttgactactggggccagggaaccctggtcaccgtctcctca

SEQ ID NO: 12698 - DNA, 295 bp, Homo sapiens
  source 1..295: mol_type = other DNA
tgcagcctctggattcacctttaccagctatgccatgagctgggtccgccaggctccagggaaggggctggagtgggtctcagttatttatagcggtggtagtagcacatattatgcagactccgtgaagggccggttcaccatctccagagataattccaagaagacggtgtatctgcaaatgaacagcctgagagccgaggacacggccgtatattactgtgcgaaaggggatacagcaatggtttactactttgactactggggccagggaaccctggtcaccgtctcgtca

SEQ ID NO: 12699 - DNA, 295 bp, Homo sapiens
  source 1..295: mol_type = other DNA
tgcagcctctggattcacctttagcagctatgccatgagctgggtccgccaggctccagggaaggggctggagtgggtctcagtcatttatagcggtggtagtagcacatactatgcagactccgtgaagggccggttcaccatcttcagagataattccaagaacacgctgtatctgcaaatgaacagcctgagagccgaggacacggccgtatattactgtgcgaaaggggatacagctatggtttactactttgactactggggccagggaaccctggtcaccgtctcctca

SEQ ID NO: 12700 - DNA, 295 bp, Homo sapiens
  source 1..295: mol_type = other DNA
tgcagcctctggattcacctttagcagctatgccatgagctgggtccgccaggctccagggaaggggctggagtgggtctcagctattggtggtagtggtggtagcacatactacgcagactccgtgaagggccggttcaccatctccagagacaattccaagaacacgctgtatctgcaaatgaacagcctgagcgccgaggacacggccgtatattactgtgcaaagggggatacagctatggtttactactttgactattggggcctgggaaccctggtcaccgtctcctca

SEQ ID NO: 12701 - DNA, 318 bp, Homo sapiens
  source 1..318: mol_type = other DNA
acacagaccctcacgctgacctgcaccttctctgggttctcactcagcactagtggagcgagtgtgggctggatccgtcagcccccaggaaaggccctggagtggcttgcactcatttattgggatgatgataagcgctacagcccatctctgaagagcaggctcaccatcaccaaggacacctccaaaaaccaggtggtccttacaatgaccaacatggaccctgtggacacagccacatattactgtgcacacaatgactacggtgactacgtttttgactactggggccagggaaccctggtcaccgtctcctca

SEQ ID NO: 12702 - DNA, 318 bp, Homo sapiens
  source 1..318: mol_type = other DNA
acacagaccctcacgctgacctgcaccttctctgggttctcactcagtagtaggagagcgggtgtgggctggatccgtcagcccccaggaaaggccctggagtggcttgcactcatctattgggatgatgatgagcgctacagcccatctctgaagagcaggctcaccatcaccaaggacacctccaaaaaccaagtggtccttacaatgaccaacatggaccctgtggacacagccacatattactgtgcacacaatgactacggtgactacgtctttgactactggggccagggaaccctggtcaccgtctcctca

SEQ ID NO: 12703 - DNA, 289 bp, Homo sapiens
  source 1..289: mol_type = other DNA
tgcggcctctggattcacctttagcgtctatgccatgagctgggtccgccaggctccagggaaggggctggagtgggtctcaattatttataatgattctagggatagattttatgcagactccgtgaagggccggttcaccgtctccagagataattccaagaacacactatatctgcaaatgaacagcctgagagtcgaggacacggccgtatattattgtgtgaaggaccacggtcgggcggagaatgactactggggccagggaaccctggtcaccgtctcctca

SEQ ID NO: 12704 - DNA, 289 bp, Homo sapiens
  source 1..289: mol_type = other DNA
tgtagtctctggattcacctttaacaactatgccatgacctgggtccgccaggctccagggaaggggctggagtgggtctcaattatttatcgcgatagtagtcgcacattctatgcagactccgtgcagggccggttcaccgtctccagagataattccaggaacacagtatatctgcaaatgaacagcctgagagccgaggacactgccacatatcactgtgtgaaagatcacggacgcgcggaaaacgactactggggccagggaaccctggtcaccgtctcctca

SEQ ID NO: 12705 - DNA, 289 bp, Homo sapiens
  source 1..289: mol_type = other DNA
tgcagtctctggattcacctttagcaactatgccatgacctgggtccgccaggctccagggaaggggccagagtgggtctcagttatttatcgcgatagcagtcgcacattctatgcagactccgtgaagggccggttcaccgtctccagagataattccaagaacacagtgtatctgcaaatgaacagcctgagagccgaggacactgccatatatcactgtgtgaaagatcacggacgcgcggaaaacgactactggggccagggaaccctggtcaccgtctcctca

SEQ ID NO: 12706 - DNA, 288 bp, Homo sapiens
  source 1..288: mol_type = other DNA
tgcagtcctggattcacctttagcaactatgccatgacctgggtccgccaggctccagggaaggggccagagtgggtctcagttatttatcgcgatagcagtcgcacattctatgcagactccgtgaagggccggttcaccgtctccagagataattccaagaacacagtgtatctgcaaatgaacagcctgagagccgaggacactgccatatatcactgtgtgaaagatcacggacgcgcggaaaacgactactggggccagggaaccctggtcaccgtctcctca

SEQ ID NO: 12707 - DNA, 284 bp, Homo sapiens
  source 1..284: mol_type = other DNA
ccatctccggggacagtgtctctagcaacagtgctgcttggacctggatcaggcagtccccatcgagaggccttgagtggctgggaaggacatattacaggtccaagtggtataatgattatgcagtatctgtgaaaagtcgaataatcatctaccccgacacatccaagaaccagttctccctgcagctgaactctgtgactcccgaggacacggctgtgtattactgtgcaagccggcgttacgactactggggccagggaaccctggtcaccgtctcctca

SEQ ID NO: 12708 - DNA, 284 bp, Homo sapiens
  source 1..284: mol_type = other DNA
tcatctccggggacagtgtctctggtgccagtgaagtttggaactggatcaggcagtccccatcgagaggccttgagtggctgggaaggacatactacaggtccgagtggtctagtgattatgcattatctgtgaagagtcgaatagccatcatccccgacacggccaagaaccagttctccctgcagctggactctctgactcccgaagacacggctgtttatttctgtgcaagtagacgctatgactactggggccagggaaccctggtcaccgtctcctca

SEQ ID NO: 12709 - DNA, 289 bp, Homo sapiens
  source 1..289: mol_type = other DNA
tgcagcctctgcattcactttcaataacgcctggatgagctgggtccgccaggctccagggaaggggctggagtgggttggccgtattaaaagccaaactgatggtgggacaacagactacgctgcacccgtggaaggcagattcaccatctcaagagatgattcaaaaaagatgctgtatttgcaaatgaacagcctgaaatccgacgacacagccgtatattactgtaccacaggtcacggttactccccctactggggccaggggaccctggtcaccgtctcctca

SEQ ID NO: 12710 - DNA, 289 bp, Homo sapiens
  source 1..289: mol_type = other DNA
tgcagcctctggattcacttttagtgacgcctggatgagctgggtccgccaggctccaggaaagggcttggagtgggttggccgtattaaaagccaaacttatggtgggacaacagactacgctgcacccgtgagaggcagattcaccatctccagagatgattcgaaagccacgttgtttctgcaaatggagagcctggaaaccgaggacacagccgtatattattgtaccacaggtcacggttactcgccttactggggccaggggaccctggtcaccgtctcctca

SEQ ID NO: 12711 - DNA, 277 bp, Homo sapiens
  source 1..277: mol_type = other DNA
tgcagcctctggattcaccttcagtagctatagcatgaactgggtccgccaggctccagggaaggggctggagtgggtttcatacattagtagtagtagtagtaccatatactacgcagactctgtgaagggccgattcaccatctccagagacaatgccaagaactcactgtatctgcaaatgaacagcctgagagacgaggacacggctgtgtattactgtgctcgaggaggactccagcactggggccagggcaccctggtcaccgtctcctca

SEQ ID NO: 12712 - DNA, 277 bp, Homo sapiens
  source 1..277: mol_type = other DNA
tgcagcctctggattcaccttcagtagctatagcatgaactgggtccgccaggctccagggaaggggctggagtgggtttcatacattagtagtagtagtagtaccatatactacgcagactctgtgaagggccgattcaccatctccagagacaacgccaagaactcactgtatctgcaaatgaacagcctgagagccgaggacacggctgtgtattactgtgcccgagggggcctccagcactggggccagggcaccctggtcaccgtctcctca

SEQ ID NO: 12713 - DNA, 283 bp, Homo sapiens
  source 1..283: mol_type = other DNA
tgcagcctctggattcacttttaataactattggatgacctgggtccgccaggctccagggaaggggctggagtgggtagccaacataaagcaagatggaagtgagaaatactatgtggactctgtgaagggccgattcaccatctccggagacaacgccaagaactcactgtatctgcaaatgaacagcctgagagccgaggacacggctgtgtattactgtgcgagaggcagggcgacgttcgacccctggggccagggaaccctggtcaccgtctcctca

SEQ ID NO: 12714 - DNA, 283 bp, Homo sapiens
  source 1..283: mol_type = other DNA
tgcagcctctggattcatctttagtacctttgggatgagctgggtccgccaggctccagggaaggggctggagtgggtggccaacataaagaaggatggaagtgagaaatactatgtggactctgtgaagggccgattcaccatctccagagacaacgccaagaactcactgtatctgcaaatggacagtctgagagccgaggacacggctgtgtattactgtgcgagagggagagctactttcgacccctggggccagggaaccctggtcaccgtctcctca

SEQ ID NO: 12715 - DNA, 274 bp, Homo sapiens
  source 1..274: mol_type = other DNA
tgcagcctctggattcaccttcagtagttatgaaatgaactgggtccgccaggctccaggggagggcctgcagtgggtttcatacattagtagtagtggtagtgccatatactacgcagactctgtgaagggccgattcaccatctccagagacaacgccaagaactcgctgtttttgcaaatgaacagcctgagagccgaggacacggctgtttattactgtgtgagaacttttgactcctggggccagggaatcctggtcaccgtctcctca

SEQ ID NO: 12716 - DNA, 274 bp, Homo sapiens
  source 1..274: mol_type = other DNA
tgcagcctctggattcagcttcagcagttatgaaatgaactgggtccgccaggctccagggaagggcctggagtgggtttcatacattagtagtagtggtagtaccatgtactactcagactctgtgaagggccgattcaccatctccagagacaacgccaagaggtcactgtatctgcaaatgaacagcctgagagccgaggacacggctgtttattactgtgtgagaacctttgactcctggggccagggaaccctggtcatcgtctcctca

SEQ ID NO: 12717 - DNA, 280 bp, Homo sapiens
  source 1..280: mol_type = other DNA
cgcagcctctgggttcacctttagcactactgccatgagctgggtccgccaggctccagggatgcggccggagtgggtctcttttattaatggcgatgatactaagagatactatgcagactccgtgaagggccgcttcatcatctccagagaaatttccaacaacacactgtatttgcaaatgaacagcctgagagtcgaggacacggccgtttattactgtgtgaaagaaggggggttcgacccctggggccagggaaccctggtcaccgtctcctca

SEQ ID NO: 12718 - DNA, 280 bp, Homo sapiens
  source 1..280: mol_type = other DNA
tgcagcctctggattcaccttttacaaccacgtcatgagctgggtccgccagactccagagaggggactggagtgggtctcagttatttatcccggtggaaataatgcatattatggagactccgtgaagggccggttcactgtctccagagatgattccaagaacaccctatatttgcaaatgaacagtctgagagtcgaagacacggccgtctattattgtgtaaaagagggaggtttcgacccctggggccagggaaccctggtcgccgtctcctca

SEQ ID NO: 12719 - DNA, 280 bp, Homo sapiens
  source 1..280: mol_type = other DNA
tgcagcctctggattcacctttagtagctattggatgatttgggtccgccaggctccagggaaggggctggagtgggtggccaacataaagcaagatggaagtgagaaaaactatgtggactctgtgaagggccgattcaccatctccagagacaacgccaagaactcactgtatctgcaaatgaacagcctgagagccgaggacacggctgtgtatttctgtgtgagaggtggcggtatggacgtctggggccaggggaccacggtcaccgtctcctca

SEQ ID NO: 12720 - DNA, 280 bp, Homo sapiens
  source 1..280: mol_type = other DNA
tgcagcctctggattcacctttagtacctattggatgacctgggtccgccaggctccagggaaggggctggagtgggtggccaacatgaaggaagatggaagtgagaaatactatgtggactctgtgaagggccgattcaccatctccagagacaacgccaagaattcactggatctgcaaatgaacagcctgagagccgaggacacggctgtgtattattgtgtgagaggtgggggtatggacgtgtggggcgaagggaccacggtcaccgtctcctca

SEQ ID NO: 12721 - DNA, 280 bp, Homo sapiens
  source 1..280: mol_type = other DNA
tgcagcctctggattcacctttagtacctactggatgacctgggtccgccaggctccagggaaggggctggagtgggtggccaacatgaaggaggatggaagtgagaaatactatgtggactctgtgaagggccgattcagcatctccagagacaacgccaagaattcactggatctgcaaatgaacagcctgagagccgaggacacggctgtgtattattgtgtgagaggtgggggtatggacgtgtggggcgaagggaccacggtcaccgtctcctca

SEQ ID NO: 12722 - DNA, 292 bp, Homo sapiens
  source 1..292: mol_type = other DNA
cagtgtctctggtggctccatcagcagtagtacttactactggggctggatccgccagcccccagggaagggtctggagtggattgggagcatctattatagtgggaacacctactacaacccgtccctcaagagtcgagccaccatatccgtggacacgtctaagaaccagttctccctgattctgaactctgtgaccgccgcagagacggctgtgtattattgtgcgagacatcagtggcgcaattggttcgacccctggggccagggaaccctggtcaccgtctcctca

SEQ ID NO: 12723 - DNA, 292 bp, Homo sapiens
  source 1..292: mol_type = other DNA
cactgtctctggtggctccatcagcggtagtatttactactggggctggatccgccagcccccagggaaggggctggagtggattgggagtatctattatagtgggagcaccgactacaatccgtccctcaagagtcgagtcaccatatccgtagacacgtccaagaatcacttctccctgaagctgagctctgtgaccgccgcagacacggctgtgtattactgtgcgagacatcagtggcggaactggttcgacccctggggccagggaaccctggtcaccgtctcctca

SEQ ID NO: 12724 - DNA, 292 bp, Homo sapiens
  source 1..292: mol_type = other DNA
cactgtctctggtggctccatcagcggtagtatttactactggggctggatccgccagcccccagggaaggggctggagtggattgggagtatctattatagtgggagcaccgactacaatccgtccctcaagagtcgagtcaccatatccgtagacacgtccaagaatcacttctccctgaagatgagctctgtgaccgccgcagacacggctgtgtattactgtgcgagacatcagtggcggaactggttcgacccctggggccagggaaccctggtcaccgtctcctca

SEQ ID NO: 12725 - DNA, 292 bp, Homo sapiens; identical to SEQ ID NO: 12724
  source 1..292: mol_type = other DNA

SEQ ID NO: 12726 - DNA, 283 bp, Homo sapiens
  source 1..283: mol_type = other DNA
tgcagcctctggattcaccctcagtagctactggatgcagtgggtccgccaagctccagggaaggggctggtgtgggtctcacatattaatagtggtgggagttacacaagctacgcggactccgtgaagggccgattcaccatctccagagacaacaccaagaacacggtgtatctgcaaatgaacagtctgagagccgaggacacggctgtgtattactgtgtaagagacaattcaggacttgactactggggccagggaaccctggtcaccgtctcctca

SEQ ID NO: 12727 - DNA, 283 bp, Homo sapiens
  source 1..283: mol_type = other DNA
tgcagcctctggattcaccttcagtagctattggatgcactgggtccgccaagctccagggaaggggctggtgtgggtctcacatattaatagtgatgggagtagtacaaactacgcggactccgtgaagggccgattcaccatctccagagacaacgccaagaacacgctgtatctgcaaatgaacagtctgagagccgaggacacggctgtgtattactgtgtaagagataacagtggccttgactactggggccagggaaccctggtcaccgtctcctca

SEQ ID NO: 12728 - DNA, 286 bp, Homo sapiens
  source 1..286: mol_type = other DNA
tacagcctctggattcaggtttaatctgttttggatgagttgggtccgccaggccccaggaaaggggctggagtgggtggccagtataaagtacgatggaagtgacaaagagtatgtggcctctgtgaagggccgcttcagcctctccagagacaacgccaagaactctgtgtttctgcaaatgaacagcctgagagtcgaggacacggctgtatattattgtgcgagagggggtggccacgatcatgactactggggcccgggaagtctggtcaccgtctcctca

SEQ ID NO: 12729 - DNA, 286 bp, Homo sapiens
  source 1..286: mol_type = other DNA
tgcagcctctggattcacatttaggaattattggatgacgtgggtccgccaggctccagggaaggggctggagtgggcggccagcataaagtatgatggaagtgagaggtactatgtggactctgtgaagggccgattcaccatctccagagacaacggcaagaactcagtgtctctgcagatgaacagcgtgagagtcgaggacacggctgtctattactgtgcgcgggggggtggccacgatcatgactactggggccagggaatcttggtcaccgtctcctca

SEQ ID NO: 12730 - DNA, 295 bp, Homo sapiens
  source 1..295: mol_type = other DNA
tgcagcctctggcttcaccttcagttcctacagtatgaactgggtccgccaggctccagggaaggggctggagtgggtttcatatattagtaatagtggtaataccatagactatgcagactctgtgaagggccgattcaccatctccagagacaatgccaagaactcactgtctctgcaaatgaacagcctgagagacgaggactcggctgtgtattactgtgcgagagcccgtggatacagttatggttacagtgacttctggggccagggaaccctggtcagcgtctcctca

SEQ ID NO: 12731 - DNA, 295 bp, Homo sapiens
  source 1..295: mol_type = other DNA
tgcagcctctggattcactttcagtagttatagtatgaactgggtccgccaggctccagggaaggggctggagtgggtttcatacattagttctagcggtaataccgtagactacgcagactctgtgaagggccgattcaccatctccagagacaacgccaagaattcattatttctgcaagtgaacagcctgagagccgacgacacggctgtctactactgtgcgagagcacgggggtatagttatggttactcagacttctggggccagggaaccctggtcaccgtctcctca

SEQ ID NO: 12732 - DNA, 286 bp, Homo sapiens
  source 1..286: mol_type = other DNA
tgcagcctctggattcacctttagtacgtattggatgagctgggtccgccaggctccagggaagggcctggagtgggtggccaacataaagcaagatggaagtgagatgtactatgtggactctgtgaagggccgattcaccatctccagagacaacgccaagaactcactgtatctgcaaatgaacagcctgagagccgaggacacggctgtctattactgtgcgagagggtcggggagctggtacctctactggggccagggaaccctggtcaccgtctcctca

SEQ ID NO: 12733 - DNA, 286 bp, Homo sapiens
  source 1..286: mol_type = other DNA
tgcagcctctggattcacctttagtagttattggatgagctgggtccgccaggctccagggaaggggctggagtgggtggccaacataaagcaagatggaagtgagaaatactatgtggactctgtgaagggccgattcaccatctccagagacaacgccaagagctcgctgtatctgcaaatgaacagcctgagagccgaggacacggctgtgtatcactgtgcgagagggtcgggcagctggtatctttactggggccagggaaccctggtcaccgtctcctca

SEQ ID NO: 12734 - DNA, 280 bp, Homo sapiens
  source 1..280: mol_type = other DNA
tgcagcctctggattcacctttagtaactattggatgagctgggtccgccaggctccagggaaggggctggagtgggtggccaacataaaccaagatggaggtgagaaatactatgtggactctgtgaagggccgattcaccatctccagagacaacgccaagaactcactgtatctgcaaatgaacagcctgagaggcgaagacacggctgtgtattactgtgcgagagggcgtgcccatgagtactggggccagggaaccctggtcaccgtctcctca

SEQ ID NO: 12735 - DNA, 280 bp, Homo sapiens
  source 1..280: mol_type = other DNA
tgcagcctctggattcacctttagtaaccattggatgagctgggtccgccaggctccagggaaggggctggagtgggtggccaacataaaccacgatggaagtgagaaatactgtgtggactctgtgaagggccgattcaccatctccagagacaacgccaagaactcactgtatctgcaaacgagcagcctgagagccgaggacacggccgtgtattcttgtgcgagaggcagggcccatgagtactggggccagggaaccctggtcaccgtctcctca

SEQ ID NO: 12736 - DNA, 292 bp, Homo sapiens
  source 1..292: mol_type = other DNA
tgcagtctctggattcacctttagtacctattggatgagttgggtccgccaggctccagggaagggactggagtgggtggccaatataaagaatgatggaagtgagaaatactatttggactctgtgaagggccgattcaccatctccagagacaacgccaagaactccctgtatctgcaaatgaacaacctgagagccgaggacacggctgtgtattactgtgcgaggcttaatagtgggacctattcctttgactactggggccagggaaccctggtcaccgtctcctca

SEQ ID NO: 12737 - DNA, 292 bp, Homo sapiens
  source 1..292: mol_type = other DNA
tgcacccgccggattcacctttactacgtactggatgagctgggtccgccaggctccagggaaggggctggagtgggtggccaacataaagaacgatggaagtgagaagtactatgtggactctgtgaagggccgattcaccatctccagagacaacgccaagaactcactgtatctgcaaatgaacagcctgagagccgaggacacggctgtgtattactgtgcgagactgaatagtgggacctactcgtttgactactggggccagggaaccctgctcaccgtctcctca

SEQ ID NO: 12738 - DNA, 295 bp, Homo sapiens
  source 1..295: mol_type = other DNA
tgcagcctctggattcaccttcaatagctacttgatgcactgggtccgccaggctccagggaaggggctggtgtgggtctcacgtattaatagtgatgggagtggcacaaactacgcggactccgtgaagggccgattcaccatctccagagacaacgccaagaatacgctgtatctgcaaatgaacagtctgagagccgaggacacggctgtgtattactgtgcaagaaggctctcgtcctactactacggtatggacgtctggggccaagggaccacggtcaccgtctcctca

SEQ ID NO: 12739 - DNA, 295 bp, Homo sapiens
  source 1..295: mol_type = other DNA
tgcagcctctggattcaccttcagtagctactggatgcactgggtccgccaagttccagggaaggggctggtgtgggtctcacgtattaatagtgatgggagtagcacacactacgcggactccgtgaagggccgattcaccatctccagagacaacgccaagaacacgctgtatctgcaaatgaacagtctgagagccgaggacacggctgtatattactgtgcaagacgtttgtcgtcctactactacggtatggacgtctggggccacgggaccacggtcaccgtctcctca

SEQ ID NO: 12740 - DNA, 286 bp, Homo sapiens
  source 1..286: mol_type = other DNA
tgcagcctctgggttcaccgtcagtatcaactacatgagctgggtccgccaggctccagggaaggggctggagtgggtctcagttttttatagcggtggtagcacatactacgcagactccgtgaagggccgattcaccatctccagagacaattccaagaacacactgtatcttcaaatgaacagcctgagagccgaggacacggccgtgtattactgtgcgagagtgggtggctcgtggtacttcgatctctggggccgtggcaccctggtcactgtctcctca

SEQ ID NO: 12741 - DNA, 286 bp, Homo sapiens
  source 1..286: mol_type = other DNA
tgcagcctctgggttcaccgtcagtagcaactacatgagctgggtccgccaggctccagggaaggggctggagtgggtctcagttatttatagcggtgaaagcacatactacgcagactccgtgaggggccgattcaccatctccagagacaattccaagaaaacgctccatcttcaaatgaacagcctgagagccgaggacacggccgtgtattactgtgcgagagtcggcggaagctggtacttcgatctctggggccgtggcaccctggtcactgtctcctca

SEQ ID NO: 12742 - DNA, 291 bp, Homo sapiens
  source 1..291: mol_type = other DNA
gcttctggttatctttttttcacttatggtatcagttgggtgcgacaggcccctggacaagggcttgagtggatgggctggatcaacactcacaatggtcaaccaatctatgcacagacattacagggaagagtcaccatgaccacagacacatccacgagcacgacctacatggagctgaggagcctcagatctgacgacacggccgtctattactgtgcgagagataaggggggagcaccagatacttttgatatctggggccaagggacaatggtcaccgtctcttca

SEQ ID NO: 12743 - DNA, 294 bp, Homo sapiens
  source 1..294: mol_type = other DNA
gcttctggttacacctttattaactatggtatcagctgggtgcgacaggcccctggacaagggcttgagtggatgggatggatcaacactgctgacaatggtgacacacactatgcacagaagctccagggcagagtcaccatgaccacagacacatccacgagcacagtctacatggagctgaggagcctgagatctgacgacacggccgtgtattactgtgcgagagacaaggggggggccccagatacttttgatatctggggccgtgggacagtggtcatcgtctcctca

SEQ ID NO: 12744 - DNA, 289 bp, Homo sapiens
  source 1..289: mol_type = other DNA
cactgtctctggtggctccatcaatggttactactggagctggatccggcagcccccagggaagggactggagtggattgcatatatcttttatagtgggactaccagctacagcccctccctcaagggtcgagtcaccatatcagtcgacacgtccaagaatcagttctccctgaaactgagttctgtgaccgccgcagacacggccttttattactgtgcgagacactacaccagtggctgggactttgactactggggtcagggaaccctggtcaccgtctcctca

SEQ ID NO: 12745 - DNA, 289 bp, Homo sapiens
  source 1..289: mol_type = other DNA
cactgtctctggtggctccatcagtggttattactggagctggatccggcagcccccagggaagggactggagtggattgggtatatctttcacagtggcagcaccagctacagcccctccctcaagggtcgagtcaccatgtcagtagacacgtccaagaatcaattctcccttaaactgagctctgtgaccgccgcagacacggccgtgtattactgtgcgagacattacaccagtggctgggactttgactactggggccagggaaccctggtcaccgtctcctca

SEQ ID NO: 12746 - DNA, 289 bp, Homo sapiens
  source 1..289: mol_type = other DNA
cactgtctctggtggtcccatcagtggttactattggagctggatccggcagcccccagggaagggactggagtggattggatatatcttttccagtgggagcaccagctacaacccctccctcaagagtcgagtcaccatatcagtagacacgtccaagaaccagttctccctgaaactgagctctatgaccgccgcagacacggccgtgtattactgtgcgagacattataccagtggctgggactttgactactggggccagggaaccctggtcaccgtctcctca

SEQ ID NO: 12747 - DNA, 301 bp, Homo sapiens
  source 1..301: mol_type = other DNA
tgcagcctctggattcaccttcagtgaccacaacatggactgggtccgccaggctccagggaagggactggagtgggttggtcgtactagaaagaaagctaacaattacaccacagaatacgccgcgtctgtgaaaggcagattcaccatctcaagagatgattcaaagaactcactgtatctgcaaatgaacagcctgaaaagcgaggacacggccgtgtattactgtacgagagggcgacgggactactactacggtatggacgtctggggccaagggaccacggtcaccgtctcctca

SEQ ID NO: 12748 - DNA, 301 bp, Homo sapiens
  source 1..301: mol_type = other DNA
tgcagcctctggattcaccttcagtgaccaccacatggactgggtccgccaggctccagggaaggggctggagtgggttggccgtactaaaaacaaagctaacagttacaccacagaatacgccgcgtctgtgaaaggcagattcaccatctcaagagatgattcaaagacttcactgtatctgcaaatgaacagcctgatgaccgaggacacggccgtgtattattgtactagaggtaggagggactactattacggtatggacgtctggggccaagggaccacggtcaccgtctcctca

SEQ ID NO: 12749 - DNA, 292 bp, Homo sapiens
  source 1..292: mol_type = other DNA
tgcagcctctggattcacctttagtagctattggatgagctgggtccgccagactccagagaaggggctggagtgggtggccaacataaaccaagatggaagtgagaaatactatgtggactctgtgaagggccgactcaccatctccagagacaacgccaagaactcactgtatttgcaaatgaacagcctgagagccgaggacacggctgtgtatttttgtgcgagagggtggatacaactatggccccttgataactggggccagggaaccctggtcaccgtctcctca

SEQ ID NO: 12750 - DNA, 292 bp, Homo sapiens
  source 1..292: mol_type = other DNA
tgcagcctctggattcacctttagtgactattggatgaactgggtccgccaggctccagggaaggggctggagtgggtggccagcataaagcaagatggaagtgagaaatactatgtggactctgtgaagggccgattcaccatctccagagacaacgccaagaactcactgtatctgcaaatgagcagtctgagagccgaggacacggccgtgtattactgtgcgagagggtggatacaactatggccccttgataactggggccagggaaccctggtcaccgtctcctca

SEQ ID NO: 12751 - DNA, 298 bp, Homo sapiens
  source 1..298: mol_type = other DNA
tgcagggtctggattcaccttcactaacgcctggatgacctgggtccgccaggctccagggaagggtctggagtgggttggccgtattaaaagcaatgctgatggtgggacaagagactacgctgcacccgtgaaaggcagattcaccatctcaagagatgattcaaaaaacacgctgtatctgcaaatgaacagcctgaaagccgaggacacagccgtgtattactgtaccacagtttcgggttattacggtgcctttgatcactggggccagggaaccctggtcaccgtctcctca

SEQ ID NO: 12752 - DNA, 298 bp, Homo sapiens
  source 1..298: mol_type = other DNA
tgcaggctctggattcactttcagcaacgcctggatgacctgggtccgccaggctccagggaaggggctggagtgggttggccgtattaaaagtaaaggtgacggtgggacagcagactacgctgcacccgtgaaaggcagattcaccatctcaagcgatgattcaaaaaacacgctgtatctgcaaatgaacagcctgaaaaccgaggacacagccgtgtattactgtaccacagtcagtggctactatggggcgtttgaccactggggccagggaaccctggtcaccgtctcctca

SEQ ID NO: 12753 - DNA, 298 bp, Homo sapiens
  source 1..298: mol_type = other DNA
tgcagcctctggattcaccttcaatagctatactatgcactgggtccgccagtctccaggcaggggactggagtgggtggcacttatatcatatgatggaactaatcaatactacgcagactccgtgaagggccgattcaccatcttcagagacaattccaacaacacgctgtacctgcaaatgaacagcctgagaactgaggacacggctgtgtattactgtgcgagaagtcgtggtgggaactacagggatgcttttgatatctggggccgagggacaatggtcaccgtctcttca

SEQ ID NO: 12754 - DNA, 298 bp, Homo sapiens
  source 1..298: mol_type = other DNA
tgcagcctctggattcagcttcagtggctatgctatacactgggtccgccaggctcccggcaaggggctggaatggctggcagttatatcatttgatggagagaataaatactacgcagactccgtgaagggccgattcaccgtctccagagacaattcccagaacacactgtttctgcaaatgaacagcctgagagctgaggacacggctgtgttttactgtgcgcgttccaggggtggaaactaccgcgatgcttttgatatctggggccaagggacaatggtctccgtctcttca

SEQ ID NO: 12755 - DNA, 277 bp, Homo sapiens
  source 1..277: mol_type = other DNA
tgcagcctctggattcatttttagcagcgctgacatgagttgggtccgccaggctccagggcaggggctggagtgggtctcaattatttaccacattcctggtgtcacatactatgcagactccgtgaagggccggttcaccatctccagagatgattccaagaacacactctatctgcaaatgaacagcctgagagccgaggacacggccatatattactgtgcgtgggggtggggtgcctcctggggccaggggaccctggtcaccgtctcctca

SEQ ID NO: 12756 - DNA, 277 bp, Homo sapiens
  source 1..277: mol_type = other DNA
tgcagcctctggattcaactttgtcgacggtgacatgatctgggtccgccaggctccagggaagggactggagtgggtctcagttatttatcacgatgatactggcacatattatgctgactccgtgaagggccggttcaccacctccagagataattccaagaacacgctctatctgcaaatggacagcctgagagtcgaggacacggccgtttattactgtgcgtggggatggggggcctcctggggccagggaaccccggtcaccgtctcctca

SEQ ID NO: 12757 - DNA, 307 bp, Homo sapiens
  source 1..307: mol_type = other DNA
cgctgtctatggtgggtccttcagtggttactcctggagctggatccgccagcccccagggaaggggctggagtggattggggaaatcaatcatagtggaagcaccagctacaacccgtccctcaagagtcgagtcaccatatcagtggacacgtccaagaaccagttctccctgaaggtgaactctgtgaccgccgcggacacgtctgtttattactgtgcgagaggctgggtagggtcatacatctactattactactacggtatggacgtctggggccaagggaccacagtcaccgtctcctca

SEQ ID NO: 12758 - DNA, 307 bp, Homo sapiens
  source 1..307: mol_type = other DNA
cgctgtctatggtgggtccttcagtggttactactggagttggatccgccagcccccagggaaggggctggagtggattggggaaatcaatcatagtggaagcaccagttacaacccgtccctcaagagtcgagtcaccatatcagaagacacgtccaagaaccagttctccctgaagctgacctctgtgaccgccgcggacacggctgtatattattgtgcgagaggttgggtggggagttacatttactactactactacggcatggacgtctggggccaagggaccacggtcaccgtctcccca

SEQ ID NO: 12759 - DNA, 292 bp, Homo sapiens
  source 1..292: mol_type = other DNA
tgcagcctctggattcacctttagtagttattcaatgagctgggtccgccaggctccagggaaggggctggagtgggtggccaacataaaggaagatggaagtgagaaatactatgtggactctgtgaagggccgattcaccatctccagagacaacgccaagaactcactgtatctgcaaatgatcagcctgagagtcgaggacacggctgtgtattactgtgcgcgggggtatggtccggggggttgccttgagtactggggccagggaaccctggtcaccgtctcctca

SEQ ID NO: 12760 - DNA, 292 bp, Homo sapiens
  source 1..292: mol_type = other DNA
tgcagcctctggattcacctttagtaggtattggatgagctgggtccgccaggctccagggaagggcctggagtgggtggccaacacaaaggaagatggaagtgtgaaatactatgtggactctgtgaagggccgattcaccatctccagagacaacgccgagaatttactgtttctgcaaatgaacagcctgagagccgaggacacggctgtgtattactgtgcgagaggatatggtccgggaggctgcctcgagtattggggccagggaaccctggtcaccgtctcttca

SEQ ID NO: 12761 - DNA, 304 bp, Homo sapiens
  source 1..304: mol_type = other DNA
tgcagcctctggattcaccttcaatacctactggatgcactgggtccgccaaggtccagggaaggggctggtgtgggtctcacgtattaatagtgatggagatagcacaacctacgcggactccgtgaagggccgagtcaccatctccagagacaacgccaagaacacgctgtatctgcaaatgaacagtctgagagccgacgacacggctgtgtattactgtgtaagagatctccgtaaagactattaccactactacggtatggacgtctggggccaagggacctcggtcaccgtctcctca

SEQ ID NO: 12762 - DNA, 304 bp, Homo sapiens
  source 1..304: mol_type = other DNA
tgcagcctctggattcaccttcaatacctactggatgcactgggtccgccaagctccagggaaggggctggtgtgggtctcacgtattaatagtgatggggataccacaaactacgcggactccgtgaagggccgattcaccatctccagagacaacgccaagaacacgctgtatctgcaaatgaacagtctgagagccgaggacacggctgtgtattactgtgtaagagatcttcgcaaggattactaccactactacggtatggacgtctggggccaagggaccacggtcaccgtctcctca

SEQ ID NO: 12763 - DNA, 289 bp, Homo sapiens
  source 1..289: mol_type = other DNA
cactgtctctggtgactccgtcagcagttactattggagctggatccggcagcccccagggaagggactggagtggattgcctatacccattatagcgggagcaccaaccacaacccctccctcaagagtcgagtcaccatatcaatagacacgtccaagaaccacttctccctgatgttgagctctatgaccgctgcggacacggccgtgtattactgtgcgagaggtggatatggtggctacgattttgacaactggggccagggaaccctggtcaccgtctcctca

SEQ ID NO: 12764 - DNA, 289 bp, Homo sapiens
  source 1..289: mol_type = other DNA
cactgtctctggtgactccatcaagagttactactggagctggatccggcagcccccagggaagggactggagtggattgggtacatgcattacagtgggaccaccaataacaacccctccctcaagagtcgagtcaccatatcagtagacacgtccaagaaccagttctccctgaagctgagctctgtgaccgctgcggacacggccgtgtattactgtgcgagagggggatatggtggctacgattttgacaactggggccagggaaccctggtcaccgtcccctca

SEQ ID NO: 12765 - DNA, 297 bp, Homo sapiens
  source 1..297: mol_type = other DNA
aagggttctggatacagctttcccaactactggatcggctgggtgcgccagatgcccgggaaaggcctggagtggatggggatcatctatcctcttgactctgataccagatacagcccgtccttccaaggccaggtcaccatctcagccgacaagtccatcagcaccgcctacctgcagtggagcagcctgaaggcctcggacaccgccatgtattactgtgcgagacaaagttgtagtggtggtagttgccccattgactactggggccagggaaccctggtcaccgtctcctca

SEQ ID NO: 12766 - DNA, 297 bp, Homo sapiens
  source 1..297: mol_type = other DNA
gagggttctggattcagctttcccaactactggatcgtgtgggtgcgccagatgcccgggaaaggcctggagtggatggggctcatctatcctggtgactctgataccagatacagcccgtccttccaaggccaggtcaccatctcagccgacaagtccatcagcagcgccttcctccagtggagcagcctgaaggcctcggacaccgccatgtattactgtgcgagacaatcttgtagtggtggtagttgcccaattgactactggggccagggaaccctggtcaccgtctcctca

SEQ ID NO: 12767 - DNA, 283 bp, Homo sapiens
  source 1..283: mol_type = other DNA
tggagcctctggattcacctttagcagctatgccataacttgggtccgccaggctccgggtcagggtctggagtggatctcagtgatttataacgatcagacaactgtattttatgccgactccgtgaagggccggttcaccatatccagagatgattccaagaacacggtgtatctacaaatgaacagcctgagagtcgaggacacggccttatattactgtgtcaaagggagggactacggtcattactggggccagggaaccctggtcaccgtctcctca

SEQ ID NO: 12768 - DNA, 283 bp, Homo sapiens
  source 1..283: mol_type = other DNA
tgtggcctctgggttcgactttagcagctatgccatgacctgggtccgccaggctccagggaaggggctggaatgggtctcagtgttttataatgatgaaagtaccacgtactatggcgactccgtgaagggccggttcaccatctccagagataattccaagaacactctgtatctgcaaatgaacagcctgacagccgacgacacggccgtctattactgtgtgaaaggacgggactacggtcactactggggccagggaattttggtcaccgtctcctca

SEQ ID NO: 12769 - DNA, 289 bp, Homo sapiens
  source 1..289: mol_type = other DNA
cactgtctctggtgcctccatcactagtttctactggagctggatccggcagcccccagggaagggactggagtggattgggtatatcgattacagtgggagcaccaactacaacccctccctcaagagtcgagtcaccatatcagccgacacgcccaagaaccagttctcactgaagttgagctctgtgaccgccgcagacacggccgtgtactactgtgcgagacgttacagcagtggctggctgtttgacttctggggccagggaaccctggtcaccgtctcctca

SEQ ID NO: 12770 - DNA, 289 bp, Homo sapiens
  source 1..289: mol_type = other DNA
cactgtctctggtggctccatcagtagttactactggagctggttccggcagcccccagggaagagactggagtggattgggtatatttatgacagtgggagcaccaactacaacccctccctcaagagtcgagtcaccatatcagtagacacgtccaagaaccaattctccctgaggctgagctctgtgacccctgcggacacggccgtgtattactgtgcgaggaggtatagcagtggctggctctttgacttctggggccagggaaccctggtcaccgtctcctca

SEQ ID NO: 12771 - DNA, 280 bp, Homo sapiens
  source 1..280: mol_type = other DNA
tgaagcctctggattcacctttaacacctatgccatgagctgggtccgccaggctccagggaagggcctagagtgtgtctccgttatttatagcggtggtactatcacatactatgcagactccgtgaagggccggttcaccatctccagagataattccaagaacaccctgtatctgcaaatgaacagcctgagagccgaggacacggccgtatattattgtgcgaaagcagcggttcctgactattggggccagggaatcctggtcaccgtctcctca

SEQ ID NO: 12772 - DNA, 280 bp, Homo sapiens
  source 1..280: mol_type = other DNA
tgcagcctctggattcacctttagcagctatgacatgagctgggtccgccaggctccagggaaggggctggagtgggtctcaagtatgagtggtagtgctggtagcacatactacgcagactccgtgaagggccggttcaccatctccagagacaattccaagaacacgctgtatctagaaatgaacaacttgagagccgaggacacggccgtatattactgtgcgaaagcggctgtgcctgactactggggccagggaaccctggtcaccgtctcctca

SEQ ID NO: 12773 - DNA, 276 bp, Homo sapiens
  source 1..276: mol_type = other DNA
gcttctggttacacctttaccagctatggtatcaactgggtgcgacaggcccctggacaagggcttgagtggatgggatggatcagcgcttacaatggttacacaaactatgcacagaagctccagggcagagtcaccatgaccacagacacatccacgagcacagcctacatggacctgaggagcctgagatctgacgacacggccgtgtattactgtgcgagagaccactacatggacgtctggggcgaagggaccacggtcaccgtctcctca

SEQ ID NO: 12774 - DNA, 276 bp, Homo sapiens; identical to SEQ ID NO: 12773
  source 1..276: mol_type = other DNA

SEQ ID NO: 12775 - DNA, 276 bp, Homo sapiens
  source 1..276: mol_type = other DNA
gcttctggttacacttttaccagctatagtatcacctgggtgcgacaagcccctggacaagggcttgagtggatgggatggatcagcgcttacaatggtaacacaaactatgcacagaagttccagggcagagtcaccatgaccacagacacatccacgagcacagcctacatggagctgaggagcctgagatctgacgacacggccgtgtattactgtgcgagagaccactacatggacgtctggggcaaagggaccacggtcaccgtctcctca

SEQ ID NO: 12776 - DNA, 277 bp, Homo sapiens
  source 1..277: mol_type = other DNA
ttcagcctctggattcatcttaagtacctctgacatgagctgggtccgccaggctccagggaagggcctggagtggatttcatacattgttcatggtggtacttccacatactccgcagactctgtgaagggccgcttcaccatctccagagacagtgccaagaactcactgtatctgcaaatgaacagcctgacagacgaggacacgggtgtctattactgtgtgaggggacacatggacgtctggggcaaagggactacggtcaccgtctcctca

SEQ ID NO: 12777 - DNA, 277 bp, Homo sapiens
  source 1..277: mol_type = other DNA
ttcagcctctggattcatcttaagtacctctgacatgagctgggtccgccaggctccagggaagggcctggagtggatttcatacatttctggtagtggtacttccacatactacgcagactctgtgaagggccgattcaccatctccagagacagtgccaagaactcactgtatctgcaaatgaacagcctgacagacgaggacacgggtgtctattactgtgtgaggggacacatggacgtctggggcaaagggactacggtcaccgtctcctca

SEQ ID NO: 12778 - DNA, 277 bp, Homo sapiens
  source 1..277: mol_type = other DNA
tgaagcctctggattcatcgtcactacttatgacatgagttggttccgccaggctgcagggaagggcctggagtggatttcatacatttctggtgctgctggtgccacatactacgcagcgtctgtgaggggccgattcaccatctccagagacactgccaagaactccctggatctgcaaatgaacggcctgacagacggggacacgggtctgtattactgtgtgaggggacacatggacgtctggggcagagggaccacggtcaccgtctcctca

SEQ ID NO: 12779 - DNA, 277 bp, Homo sapiens
  source 1..277: mol_type = other DNA
ttcagcctctggattcatcttaagtacctctgacatgagctgggtccgccaggctccagggaagggcctggagtggatttcatacattgttcatggtggtacttccacatactccgcagactctgtgaagggccgcttcaccatctccagagacagtgccaagaactcactgtatctgcaaatgaacagcctgacagacgaggacacgggtgtctattactgtgtgaggggacacatggacgtctggggcaaagggactacggttaccgtctcctca

SEQ ID NO: 12780 - DNA, 277 bp, Homo sapiens
  source 1..277: mol_type = other DNA
tgcggcctctggattcaccttcaataacgttgacatgagttgggtccgccaggctccagggaagcggctggagtggatttcatacattagtggtagaagtggtgccacatactacgcagactctgtgaagggccgattcaccatttccagagacatcgccaggaactcactgcatctacaaatgaacaccctgagagccgaggacacggctgtgtattattgtgtgagaggccatatggacgtctggggccaagggaccacggtcaccgtctcctca

SEQ ID NO: 12781 - DNA, 277 bp, Homo sapiens
  source 1..277: mol_type = other DNA
tgcggcctctggattcaccttcaataacgttgacatgagttgggtccgccaggctccagggaagcggctggagtggatttcatacattagtggtagaagtggtgccacatactacgcagactctgtgaagggccgattcaccatttccagagacatcgccaggaactcactgtatctgcaaatgaacaccctgagagccgaggacacggctgtgtattattgtgtgagaggccatatggacgtctggggccaagggaccacggtcaccgtctcctca

SEQ ID NO: 12782 - DNA, 277 bp, Homo sapiens
  source 1..277: mol_type = other DNA
tgcggcctctggattcaccctcaataacgttgacatgagttgggtccgccaggctccagggaagcggctggagtggatttcatacattagtggtagaagtggtgccacatactacgcagactctgtgaagggccgattcaccatttccagagacatcgccaggaatgcactgtatctgcaaatgaacaccctgagagccgaggacacggctgtgtattattgtgtgagaggccacatggacgtctggggccaagggaccacggtcaccgtctcctca

SEQ ID NO: 12783 - DNA, 277 bp, Homo sapiens
  source 1..277: mol_type = other DNA
tgcggcctctggattcaccttcaataatgttgacatgagttgggtccgccaggctccagggaagcggctggagtggatttcatacattagtggtgcaagtggtgccacatattacgcagactctgtgaagggccgattcaccatttccagagacatcgccaggaactcactgtatctgcagatgaacaacctgagaggcgacgacacggctgtgtattattgtgtgagaggccacatggacgtctggggccaagggaccacggtcaccgtctcctca

SEQ ID NO: 12784 - DNA, 277 bp, Homo sapiens
  source 1..277: mol_type = other DNA
tgcggcctctggattcagcttcaataacgttgacatgagttgggtccgccaggctccagggaagcggctggagtggatttcatacattagtggtagaagtggtgccacatactacgcagactctgtgaagggccgattcaccatttccagagacatcgccaggaactcactgtatctgcaaatgcacaccctgagagccgaggacacggctgtgtattattgtgtgagaggccatatggacgtctggggcctagggaccacggtcaccgtctcctca

SEQ ID NO: 12785 - DNA, 277 bp, Homo sapiens
  source 1..277: mol_type = other DNA
tgcagcccctggattcggctttagtacctctgacatgagctgggtccgccaggcttcagggaagggcctggagtggatttcatacattgctggtcgtgatggttccgtctactacgcagactccgtgaagggccgcttcaccatctccagagacaatgccaagaactcactgtatctccaaatgaacagcctgacggacgaggacacgggtgtgtattactgtgtgaggggacacatggccgtctggggcacagggaccacggtcaccgtctcctca

SEQ ID NO: 12786 - DNA, 277 bp, Homo sapiens
  source 1..277: mol_type = other DNA
tgcggcctctggactcacactgagtaatgctgacctgaattgggtccgccaggctccagggaagcggctggagtggatttcatacattagtggtagaagtggtgccacacactacgcagactctgtgaagggccgattcaccatctccagagacagcgccaggaattcactgcatctgcaaatgaacagcctgagaggcgaggacacggctgtgtattactgtgtgagaggccatatggccgtctggggccaagggaccacggtcaccgtctcctca

SEQ ID NO: 12787 - DNA, 286 bp, Homo sapiens
  source 1..286: mol_type = other DNA
cgctgtctatagtgggtccttcagtggttactactggagctggatccgccagcccccagggaaggggctggagtggataggtgaaatcaatcatagtggaagcaccaactacaacccgtccctcaagagtcgagtcaccatatcagtagacacgtccaagaaccagttctccctgaaactgagctctgtgaccgccgcggacacggctgtgtattactgtgcgagaggcacctctatggttcggggagtatactggggccagggaaccctggtcaccgtctcctca

SEQ ID NO: 12788 - DNA, 286 bp, Homo sapiens
  source 1..286: mol_type = other DNA
cgctgtctatggtgggtccttcagtggttactactggagctggatccgccagcccccagggaaggggctggagtggattggtgaaatcaatcatagtggaagcaccaattacaacccgtccctcaagagtcgagtcaccatatcagtagacacgtccaagaaccagttctccctgaggttgacctctgtgaccgccgcggacacggctgtgtattactgtgcgagaggcacctctatggttcggggagtatattggggccagggaaccctggtcaccgtctcatca

SEQ ID NO: 12789 - DNA, 286 bp, Homo sapiens
  source 1..286: mol_type = other DNA
cactgtctatggtgggtccttcagtggttactactggagctggatccgccagcccccagggaaggggctggagtggattggtgaaatcaatcatagtggaagcaccaactacaacccgtccctcaagagtcgagtcaccatatcagtagacacgtccaagaaccagttctccctgaagctgaactctgtgaccgccgcggacacggctgtgtattactgtgcgcgaggcacctctatggttcggggagtatactggggccagggaacgctggtcaccgtctcctca

SEQ ID NO: 12790 - DNA, 286 bp, Homo sapiens
  source 1..286: mol_type = other DNA
cgctgtctatggtgggtccttcagtggttactactggagctggatccgccagcccccagggaaggggctggagtggattggtgaaatcaatcatagtggaagcaccaattacaacccgtccctcaagagtcgagtcaccatatcagtagacacgtccaagaaccagttctccctgaggctgacctctgtgaccgccgcggacacggctgtgtattactgtgcgagaggcacctctatggttcggggagtatattggagccagggaaccctggtcaccgtctcctca

SEQ ID NO: 12791 - DNA, 286 bp, Homo sapiens
  source 1..286: mol_type = other DNA
cgctgtcaatgatgggtccttcagtggttactactggagctggatccgccagcccccatggaaggggctggagtggattggtgaaatcaatcatagtggaagcaccaactacaacccgtccctcaagagtcgagtcaccatatcagtagacacgtccaagaaccagttctccctgaacctgacctctgtgaccgccgcggacacggctgtgtattactgtgcgagaggcacctctatggttcggggagtatactggggccagggaaccctggtcaccgtctcctca

SEQ ID NO: 12792 - DNA, 286 bp, Homo sapiens
  source 1..286: mol_type = other DNA
cgctgtctatagtgagtccttcagtggttactactggagctggatccgccagcccccagggaaggggctggagtggataggtgaaatcaatcatagtggaagcaccaactataacccgtccctcaagagtcgagtcaccatatcagtagacacgtccaagaaccagttctccctgaaactgagctctgtgaccgccgcggacacggctgtgtattactgtgcgagaggcacctctatggttcggggagtatactggggccagggaaccctggtcaccgtctccgca

SEQ ID NO: 12793 - DNA, 286 bp, Homo sapiens
  source 1..286: mol_type = other DNA
cgctgtctatggtgggtccttcagtggttactactggagctggatccgccagcccccagggaaggggctggagtggattggtgaaatcaatcatagtggaagcaccaattacaacccgtccctcaagagtcgagtcaccatatcagtagacacgtccaagaaccagttctccctgaggctgacctctgtgaccgccgcggacacggctgtgtattactgtgcgagaggcacctctatggttcggggagtatattggggccagggaaccctggtcaccgtctcctca

SEQ ID NO: 12794 - DNA, 286 bp, Homo sapiens
  source 1..286: mol_type = other DNA
cgctgtctatggtggctccttcagtggttactactggagctggatccgccagcccccagggaaggggctggagtggattggtgaaatcaatcatagtggaagcatcaactacaacccgtccctcaagagtcgagtcaccatatcagtagacacgtccaagaaccagttctccctgaagctgagctctgtgaccgccgcggacacggctctgtattactgtgcgagaggcacctctatggttcggggagtatactggggccagggaaccctggtcaccgtctcctca

SEQ ID NO: 12795 - DNA, 286 bp, Homo sapiens
  source 1..286: mol_type = other DNA
cgctgtcgatggtgggtccttcagtggttaccactggagctggatccgccagcccccagggaaggggctggagtggattggggaaatcaatcatagtggaagcaccaactacaacccgtccctcaagagtcgggtcaccatatcagtagacacgtccaagaagcagttgtccctgaagctgacctctgtgaccgccgcggacacggctgtgtattactgtgcgagaggcacctctatggttcggggagtctactggggccagggaaccctcgtcaccgtctcctca

SEQ ID NO: 12796 - DNA, 271 bp, Homo sapiens
  source 1..271: mol_type = other DNA
tgcagcctctggattcaccttcattaactatggcatccactgggtccgccaggctccaggcaaggggctggagtgggtggcagttatatcatatgatggaagtaataaatactatgcagactccgtgaagggccgattcaccatctccagagacaactccaagaacacgttgtatctgcaaatggacagcctgagacctgaggacacggctgtatattactgttctacctttaactattggggccagggaaccctggtcaccgtctcctca

SEQ ID NO: 12797 - DNA, 271 bp, Homo sapiens
  source 1..271: mol_type = other DNA
tgcagcctctggattcaccttcactagctatggcatccactgggtccgccaggctccaggcaaggggctggagtgggtggcagttatatcatatgatggaagtaataaatactatgcagactccgtgaagggccgattcaccatctccagagacaattccaagaacacgttgtatctgcaaatgaacagcctgagacctgaggacacggctgtatattactgttctacctttaactactggggccagggaaccctggtcaccgtctcctca

SEQ ID NO: 12798 - DNA, 271 bp, Homo sapiens
  source 1..271: mol_type = other DNA
tgcagcctctggattcaccttcactagctatggcatccactgggtccgccaggctccaggcaaggggctggagagggtggcagttatatcatatgatggaagtaataaatactatgcagactccgtgaagggccgattcaccatctccagagacaattccaagaacacgttgtatctgcaaatgaacagcctgagacctgaggacacggctgtatattactgttctacctttaactactggggccagggaaccctggtcaccgtctcctca

SEQ ID NO: 12799 - DNA, 271 bp, Homo sapiens
  source 1..271: mol_type = other DNA
cgcagcctctggattcaccttcatcgagtatggcattcactgggtccgccaggctccaggcaaggggctggagtgggtggcagttatatcatgggatggaagtaataaatactatgcagactccgtgaagggccgattcaccatctccagagacaattccaagagcacactatatctgcaaatgaacagcctgagagctgaggacacggctgtttattactgttcgacctttaactactggggccagggaaccctggtcaccgtctcctca

SEQ ID NO: 12800 - DNA, 298 bp, Homo sapiens
  source 1..298: mol_type = other DNA
tgcagcctctgcattcacctttagcaactatgccatgaactgggtccgccagtctccagggaaggggctggagtgggtcgcatttattagaggtggtggtgccggcgctcaatacgcagactccgtgaagggccggttcaccatctccagagacaattccaggaacaccctctatctacaaatgaacagcctgagagccgaggacacggccctttattactgtgcgaaatgtgcattctccaatggcaatgatgctcttgatatctggggccaagggacaatggtcaccgtctcttca

SEQ ID NO: 12801 - DNA, 298 bp, Homo sapiens
  source 1..298: mol_type = other DNA
tgcagcctctgcattcacctttagcaactatgccatgaactgggtccgccagtctccagggaaggggctggagtgggtcgcatttattagaggtggtggtgccggcgctcaatacgcagactccgtgaagggccggttcaccatctccagagacaattccaggaacaccctctatctacaaatgaacagcctgagagccgaggacacggccctttattactgtgcgaaatgtgcattctccaatggcaatgatgctcttgatatccggggccaagggacaatggtcaccgtctcttca

SEQ ID NO: 12802 - DNA, 298 bp, Homo sapiens
  source 1..298: mol_type = other DNA
tgcagcctctggattcacttttagcaactatgccatgacctgggtccgccaggctccagggaaggggctggagtgggtctcatctgttaagggtggtggtgctggctcacaatacgcagactccgtgaagggccggttcaccatctccagagacaattccatggacacgctgtatttgcaaatgagcagcctgagagtcgaggacacggccgtatattactgtgcgaaatgcgcgttcagtaatggcaatgacgctcttgatatctggggccaagggacaatggtcaccgtctcttca

SEQ ID NO: 12803 - DNA, 286 bp, Homo sapiens
  source 1..286: mol_type = other DNA
tgcagcctctggattcaccttcagcaggtacacgatgcactgggtccgccaagttccagggaaggggctggtgtgggtcgcgcgtattgttggagctgggactagtccaagctacgcggactccgtgaggggccggttcaccatctccagagacaacgccgaaaacactctttacctgcaaatgagcagtctgagagacgaggacacggctatatattattgtgcaaggtctgttgagtggggcttggactactggggccagggagccctggtcaccgtctcctcc

SEQ ID NO: 12804 - DNA, 283 bp, Homo sapiens
  source 1..283: mol_type = other DNA
tgcagcctttgatttcactttcagcagttatacaatgcactgggtccgccaggctccaggggggggcctggtgtgggtctcacgtatcagtggcgactggcagacaagctacgcggactccgtgaggggccgattcaccatctccagagacaacgccaggaagacggtgtctttggaaatgaacagtctgagagccgaagatacggctatatattattgtgcaagatccgttgagtggggccttgactactggggccagggaaccctggtcaccgtctcttca

SEQ ID NO: 12805 - DNA, 289 bp, Homo sapiens
  source 1..289: mol_type = other DNA
tgtagcctctggattcagcctaagcagcgttggcatgagctgggtccgccaggctccagggaaggggctggagtgggtctcaagtattagtaataatgatggaaggacatactacgcagactccgtagagggccggttcacgatctccagagacaattccaagaacataatgtatctgcaaatgaacagtctgcaagccgaggacacggccatatattactgtgcgaaagaccgcagcggagtggctgcggactactggggccagggagccctggtcaccgtctcctca

SEQ ID NO: 12806 - DNA, 289 bp, Homo sapiens
  source 1..289: mol_type = other DNA
tgtagcctctggattcacccttagcagcgttggcatgagctgggtccgccaggctccagggaaggggctggagtgggtctcatctattagtaatagtgatggaagcacatactacgcagactccgtaaagggccggttcaccatctccagagacaattccaagaacacgctgtatctgcaaatgaacagcctgagagccgaggacacggccgtgtattactgtgcgaaagaccgcagcggagtggctgcggactactggggccagggagccctggtcaccgtctcctca

SEQ ID NO: 12807 - DNA, 289 bp, Homo sapiens
  source 1..289: mol_type = other DNA
tgcagcctctggattcacctttagcgactctggcatgagctgggtccgccaggctccagggaaggggctggagttcgtctcaggtattagtggtagtggacttaccacaggctacgcagcctccatgaggggccggttcaccatctccagagacaattccaagaacacgctgtctctgcaaatgaacagcctgagagccgaggacacggccgtatattactgtgcgaaagatcgcagtggagtggctgctgactactggggccagggaaccctggtcaccgtctcctca

SEQ ID NO: 12808 - DNA, 289 bp, Homo sapiens
  source 1..289: mol_type = other DNA
tgcagcctctgggttcaccttcagtggctctgctattcactgggtccgccaggcttccgggaaaggactggagtggattggtcgtattaggagcaaaggtgataattacgcgacagcatatgctgcgccggtgacaggcaggttcaccatctccagggatgattcaaagaacacgtcttatctgcaaatgcgcagcctgaaaaccgaggacacgggcgtgtatttttgtactagacccacggtggctacgaactcctggggccagggaaccctggtcaccgtctcctca

SEQ ID NO: 12809 - DNA, 289 bp, Homo sapiens
  source 1..289: mol_type = other DNA
tgcagcctctgggttcaccttcagtggctctcctattcactgggtccgccaggcttccgggaaagggctggagtgggttggccgtattaggagcaaaggtgacggttacgcgacagcatatgctgcgtcggtggaaggcaggttcaccatctccagagatgattcaaagaacacggcgtatctgcagatgaacaggctgaaaagcgaggacacggccgtgtattactgtacgagacccacggtggctacaaactcctggggccagggaaccctggtcaccgtctcctca

SEQ ID NO: 12810 - DNA, 289 bp, Homo sapiens
  source 1..289: mol_type = other DNA
tgcagcctctgggttcaccttcagtggctctgctatacactgggtccgccaggcttccgggaaagggctggagtgggttggccgtattagaagcaaaactgacggttacgcgacagcgtttgctgcgtcggtgaaaggcaggttcaccatctccagagatgattcaaagaacacgtcgtatctgcaaatgaacagcctgaaaaccgaggacacggccgtatattactgtactagacctacggtggcaacaaactcctggggccagggaaccctggtcaccgtctcctca

SEQ ID NO: 12811 - DNA, 289 bp, Homo sapiens
  source 1..289: mol_type = other DNA
tgcagcctctgggttcaccttcagtggctctcctatacactgggtccgccaggcttccgggaaagggctggagtggattggccgtattagaagcaaaggtgacaatcacgcgacagcatattctgagtcgctgaaaggcaggttcaccatctccagagatgactcaaagagcacggcgtacctacaaatgaacagcctgaaaaccgaggacacggccgtgtattattgtactaggcctacggtggctacgaactcctggggccagggaaccctggtcgtcgtctcctca

SEQ ID NO: 12812 - DNA, 276 bp, Homo sapiens
  source 1..276: mol_type = other DNA
acggcttctggatacagtttcaccaccttctggattggctgggtgcgccaaatggccgggaaaggcctggagtggatgggtatcatctaccctgatgactctgatactatgtacagtccgtccttccaaggccaggtcaccatttcagtcgacaagtccaccagtaccgccttcctgcagtggagaagtctgaaggcctcggacaccgccatttatttctgtgcgagagactcggggggctactggggccagggaaccctggtcaccgtctcctca

SEQ ID NO: 12813 - DNA, 276 bp, Homo sapiens
  source 1..276: mol_type = other DNA
acggcttctggatacagtttcaccaccttctggatcggctgggtgcgccagatggccgggaaaggcctggagtggatggctatcatctatcctgatgactctgataccatgtacagtccgtccttccaaggccaggtcaccatttcagtcgacaagtccaccagtaccgcctacctgcagtggagcagtctgaaggcctcggacaccgccatgtatttctgtgcgagagactcggggggctactggggccagggaaccctggtcaccgtctcctca

SEQ ID NO: 12814 - DNA, 276 bp, Homo sapiens
  source 1..276: mol_type = other DNA
aaggtttctggatacagctttagcaactactggatcggctgggtgcgccagatgcccgggaaaggcctggagtggatggggatcatctatcctggtgactatgataccagatacagcccgtccttccaaggccaggtcaccatctcagccgacaagtccatgaacaccgcctacctgcagtggagcagcctgaaggcctcggacaccgccatgtattactgtgcgagagactcggggggctactggggccagggaaccccggtcaccgtctcctca

SEQ ID NO: 12815 - DNA, 276 bp, Homo sapiens
  source 1..276: mol_type = other DNA
acggcttctggatacagtttcaccaccttctggatcggctgggtgcgccaaatggccgggaaaggcctggagtggatgggtatcatctatcctgatgactctgataccatgtacagtccgtccttccaaggccaggtcaccatttcagtcgacaagtccaccagtaccgcctacctgcagtggagcagtctgaaggcctcggacaccgccatgtatttctgtgcgagagactcggggggctactggggccagggaaccctggtcaccgtctcctca

SEQ ID NO: 12816 - DNA, 276 bp, Homo sapiens
  source 1..276: mol_type = other DNA
acggcctctggatacagtttcaccacctactggatcggctgggtgcgccagatggccgggaaaggcctggagtggatgggtatcatctatcctgatgactctgataccatgtacagtccgtccttccaaggccaggtcaccatttcagtcgacaagtccaccagtaccgcctacctgcagtggagcagtctgaaggcctcggacaccgccatgtatttctgtgcgagagactcggggggctactggggccagggaaccctggtcaccgtctcctca

SEQ ID NO: 12817 - DNA, 276 bp, Homo sapiens; identical to SEQ ID NO: 12813
  source 1..276: mol_type = other DNA

SEQ ID NO: 12818 - DNA, 276 bp, Homo sapiens
  source 1..276: mol_type = other DNA
aaggcttctggatacagctttaccaacttctggatcggctgggtgcgccagatgcccgggaaaggcctggagtggatggggatcatctatcctggtgactctgataccagatacagcccgtccttccaaggccaggtcaccatctcagccgacaagtccatcagcaccgcctacatgcagtggaatagcctgaaggtctcggacaccgccatgtattactgtgcgagagactcggggggctactggggccagggaaccctggtcaccgtctcctca

SEQ ID NO: 12819 - DNA, 276 bp, Homo sapiens
  source 1..276: mol_type = other DNA
aaggcttctggatacagttttgccaatttctggatcggctgggtgcgccagatgcccgggaaaggcctggagtggatggggatcatctatcctgatgactctgataccagatacagcccgtccttccaaggccaggtcaccatctcagccgacaagtccatcagcaccgcctacctgcagtggagcagcctgagggcctcggacaccgccatgtattattgtgcgagggattcggggggctactggggccggggaaccctggtcaccgtctcctca

SEQ ID NO: 12820 - DNA, 283 bp, Homo sapiens
  source 1..283: mol_type = other DNA
tgcagcctctgggttctccttaagtaaccattggatgagctgggtccgccaggctccagggaaggggccggagtgggtggccgatataaaggaagatgcgagtgaggtaaactatgtggactctgtgaagggccgattcaccatctccagagacaacgccaagaattcgctgtttctccaaatgaacagcctgagagtcgaggacacggccatgtattactgtgcgagaatgtggaactatgaagactactggggccagggaaccctggtcaccgtctcctca

SEQ ID NO: 12821 - DNA, 283 bp, Homo sapiens
  source 1..283: mol_type = other DNA
tgcagcctctggattcacctttagtaggcatttgatgagctgggtccgccaggctccagggaaggggctggagtgggtggccaacataaaccaggatggaagtgagaaatactatgtggactctgtgaagggccgattcaccatctccagagacaacgccaggaactcactatatctgcaaatgaacagcctgagagccgaagacacggccctttactactgtgcacgtatgtggaactacgaagactactggggccggggaaccctggtcaccgtctcctca

SEQ ID NO: 12822 - DNA, 296 bp, Homo sapiens
  source 1..296: mol_type = other DNA
ccatcttcggggacagtgtctctagcaacagtgctgcttggaactggatcaggcagtccccatcgaggggccttgagtggctggggaggacatactacaggtccaagtggtataatgattatgcagtatctgtgaaaagtcgaataaccatcaacccagacacatccaagaaccagttctccctgcagctgaactctgtgactcccgaggacacggctgtctattactgtgcaagaggcggaacctaccggccatttgactactggggccagggaaccctggtcaccgtctcctca

SEQ ID NO: 12823 - DNA, 296 bp, Homo sapiens
  source 1..296: mol_type = other DNA
ccatctccggggacagtgtctctagcaacagtgctgcttggaactggatcaggcagtccccatcgagaggccttgagtggctgggaaggacatactacaggtccaagtggtattttgattatgcagtatctgtgaaaagtcgaataaccgtcaacccagacacatccaagaaccagttctccctgcagctgaactctgtgactcccgaagacacggctgtgtattactgtgcaagaggtgggacctaccgcccgtttgactactggggccagggagccctggtcaccgtctcctct

SEQ ID NO: 12824 - DNA, 295 bp, Homo sapiens
  source 1..295: mol_type = other DNA
cactgtctctggtggctccgtcagcagtgttggtgactactggagttggatccgccagcgcccaggggagggcctggagtggattgggaacatctacaacagtgggctctcctggtacacgccgtctctcgagagtcgattcgccatatccttagacacgtctaaaaatcacttctccctggaagtgacgtctgtcactgccgcggattcggccgtttatttctgtgcgagagaccacagtggctacggctactttgactcgtggggcccgggaaccctggtctccgtctcctca

SEQ ID NO: 12825 - DNA, 295 bp, Homo sapiens
  source 1..295: mol_type = other DNA
cactgtctctggtggctccgtcagcagtgttggtgactactggagttggatccgccagcgcccaggggagggcctggagtggattgggaacatctacaacagtgggctctcctggtacacgccgtctctcgagagtcgatccgccatatccttagacacgtctaaaaatcacttctccctggaagtgacgtctgtcactgccgcggattcggccgtttatttctgtgcgagagaccacagtggctacggctactttgactcgtggggcccgggaaccctggtctccgtctcctca

SEQ ID NO: 12826 - DNA, 295 bp, Homo sapiens
  source 1..295: mol_type = other DNA
cacagtctctagtggctccatcagcagtggtggttactactggagctggatccgccagcacccagggaagggcctggagtggattgggtacatctattacagtgggagcacctactacaacccgtccctcgggagtcgagttaccatatcagtagacacgtctcagaaccagttctccctgaagctgagcactgtgactgccgcggacacggccgtgtattactgtgcgagagatcatagtggctacggttactttgactcctggggccagggaaccctggtcaccgtctcctcg

SEQ ID NO: 12827 - DNA, 277 bp, Homo sapiens
  source 1..277: mol_type = other DNA
tgtagtctctggattcaccttcagtgactattggatgacctgggtccgccaggctccagggcaggggctggagggggtggccaccataaagcacgatgcaagtgacaaatactatgtggagtctgtgaagggccgattcaccatctccagagacaacgccaagaacttactgtatctccaattgaatagcctgagagccgacgacacggccatatattactgtgcgacaggggattgcgcctcctggggccagggaaccctggtcaccgtctcctca

SEQ ID NO: 12828 - DNA, 277 bp, Homo sapiens
  source 1..277: mol_type = other DNA
tgcagcctccggattcacctttagtaccttttggatggcctgggtccgccaggttccagggaaggggctggagtgggtggccaccctcaaccacgatggaagtgagaaatactatgtggactctgtgaagggccgattcaccatctccaaagacaacgccaaaaactcactgtttctgcaaatgaacagcctgagagtcgaagacacggctatttattactgtgcgacaggtgactgcgcctcctggggccagggaaccctggtcgccgtctcctca

SEQ ID NO: 12829 - DNA, 276 bp, Homo sapiens
  source 1..276: mol_type = other DNA
gcttctggatacaccttctctagctatgctatgcattgggtgcgccaggcccccggacaaaggcttgagtggatgggatggatcatcgctggcaatggtaacacaaaatattcagagaacttccagggcagagtcaccattaccagggacacatccgcgagcacagcctacatggagctgagcagcctgagatctgaagacacggctgtgtattactgtgcgaccaactggaactatggctactggggccagggaaccctggtcaccgtctcctca

SEQ ID NO: 12830 - DNA, 276 bp, Homo sapiens
  source 1..276: mol_type = other DNA
gcttctggatacaccttcactaactatggtatacattgggtgcgccaggcccccggacaaaggcttgagtggatgggatggatcaacgctggcaatggtaacacaaaatattcacagaagttccagggcagagtcaccattaccagggacacatccgcgagcacagcctacatggagctgagcagcctgagatctgaagacacggctgtttattactgtgcgactaactggaactacggctactggggccagggaaccctggtcaccgtctcctca

SEQ ID NO: 12831 - DNA, 292 bp, Homo sapiens
  source 1..292: mol_type = other DNA
cactgtctctggaggctccatcagtacttactactggagctggatccggcagtccccagggaagggactggagtggcttggctatatctactacgctgggaacaccaactacaacccctccctcaacggtcgagtcaccatatcagtggacacgtccaagagccagttctccctgaagctgacctccgtgaccgctgcggacacggccgtgtattactgtgcgagagcggcgacaacaacagtaggctggttcgacccctggggccagggaaccctggtcaccgtctcctca

SEQ ID NO: 12832 - DNA, 292 bp, Homo sapiens
  source 1..292: mol_type = other DNA
cactgtctctggtgactccatgagtaattactactggagctggatccggcagtccccggggaagggactggagtggattggctatatttattctgctggcaacagccactacaatccctccctcaagagtcgagtcaccatcttaatggacacgtccaagagccagttctccctgaaattgacctccgtgaccgctgccgacacggccgtgtattactgtgcgagagccgctacaacgacggtcggctggttcgacccctggggccagggaaccctggtcaccgtctcctca

SEQ ID NO: 12833 - DNA, 295 bp, Homo sapiens
  source 1..295: mol_type = other DNA
tgcagcctgtggagtcacctttgacaactatgccatgagctgggtccgccaggctccagggaaggggctggagtggatctcggctgtgactagtgatggtagaacgacatggttcgcggactccgtgaagggccggttcaccatctccagagacaattccaagaacacggtgtatctgcaaatgagcagcctgagaggcgaggacacggccttatattactgtgcgagagatcggcgataccctgatgatgtgtttgatatatggggccaagggacaccggtcaccgtctcttca

SEQ ID NO: 12834 - DNA, 295 bp, Homo sapiens
  source 1..295: mol_type = other DNA
tgcagcctctggattcacttttaacaattatgccatgagctgggtccgccaggctccagggaaggggctggagtgggtctctgctattactgctagtggaggtgtcacatggtacgcaggctccgtgaagggccggttcaccatctccagagacaactccaggaacacggtatatctccaaatgaacagcctgagagccgaggacacggccctatattactgtgcgagagatcgacggtatccggatgatgttttcgatatttggggccaagggacaatggtcaccgtctcttta

SEQ ID NO: 12835 - DNA, 283 bp, Homo sapiens
  source 1..283: mol_type = other DNA
tgcagcctctggattcaccttcagtaaatatgggatgacttgggtccgccagcctccagggaaggggctgcagtgggtggccaacataaagcaagatggaagtgagaaatactatgtggactctgtgcagggccgattcaccatctccagagacaacgccaaaaacttactgtatttgcaaatgaacagcctgagagccgaggacacggccgtctattactgtgcgagaggccgcggctggcatgattactggggcctgggaaccctggtcaccgtctcctca

SEQ ID NO: 12836 - DNA, 283 bp, Homo sapiens
  source 1..283: mol_type = other DNA
tgcagcctctggattcacctttagtagatatgggatgacctgggtccgccaggctccagggaaggggctggagtgggtggccaacataaagcaagatggaagtgaaaaatactatgtggactctgtgaagggccgattcaccatctccagagacaacgccaagaactcactgtatctggacatgaacagcctgagagccgaggacacggctgtgtatgtctgtgcgagaggcaggggctggcacgactactggggccagggaaccctggtcaccgtctcctca

SEQ ID NO: 12837 - DNA, 283 bp, Homo sapiens
  source 1..283: mol_type = other DNA
tgcagcctctggattcacctttagtagatatgggatgacctgggtccgccaggctccagggaaggggctggagtgggtggccaacataaagcaagatggaagtgagaaatactatgtggactctgtgaagggccgattcaccatctccagagacaacgccaagaactcactgtatctggaaatgaacagcctgagagccgaggacacggctgtgtatgtctgtgcgagaggcaggggctggcacgactactggggccagggaaccctggtcaccgtctcctca

SEQ ID NO: 12838 - DNA, 289 bp, Homo sapiens
  source 1..289: mol_type = other DNA
tgcaacctcaggattcaccttcagtagttatgacatgaactgggtccgccaggctccagggaagggactggagtggctttcattcattactaaaaccagtggaaccatatactacgcagactctgtgaagagccgattcaccatctccagagacaacgccaaaaattcactgtatctgcaaatggacagcctgagagccgaggacacggctgcatattattgtgtgagagatcgagatgggggtgcttttgatatctggggccaggggacaatggtcaccgtctcttca

SEQ ID NO: 12839 - DNA, 289 bp, Homo sapiens
  source 1..289: mol_type = other DNA
tgcagcctctggattcaccttcagtttgtatgacatgaattgggtccgccaggctccagggcaggggctggagtggctttcattcattactaaaaggagtgataccatatactacgcagactctgtgaagggccgattcaccatctccagagacaacgtcaggaactcactgtatctgcaaatgaacagcctgagagccgaggacacggctgtgtatttctgtgtgagagatagagatggaggcgcttttgatatctggggccaagggacaatgctcaccgtctcttca

SEQ ID NO: 12840 - DNA, 286 bp, Homo sapiens
  source 1..286: mol_type = other DNA
tgcagcctctgggttcaccgtcagtggcaactacatgagctgggtccgccaagctccagggaaggggctggagtgggtctcagttatttatagcggtggtagcacatactacgcagactccgtgaagggccgattcaccatctccagagacatttccaagaacacgctgtatcttcaaatgaacagcctgagagccgaggacacggccgtgtattactgtgcgactacctccatcactggaactggggactactggggccagggaaccctggtcaccgtctcctca

SEQ ID NO: 12841 - DNA, 286 bp, Homo sapiens
  source 1..286: mol_type = other DNA
tgcagcctctgggttcaccgtcagtagcaactacatgagctgggtccgccaggctccagggaaggggctggagtgggtctcagctatttatagcggtggtagcacatactacgcagactccgtgaagggccgatgcaccatctccagagacaatgccaagaacacgctgtatcttcaaatgaacagcctgagagccgaggacacggccgtgtattactgtgcgacaaccagtataactggaactggtgactactggggccagggaaccctggtcaccgtctcctca

SEQ ID NO: 12842 - DNA, 280 bp, Homo sapiens
  source 1..280: mol_type = other DNA
tgcagcctctggattcacctttagcgcgtctgccttgagctgggtccgccaggctccagggaaggggctggagtggatctcagcgattactcctgatggtgataccacatactacgccgactccgtgaggggccggttcgccatctccagagacaattccaagaacacactgtatctgcaaatgaacagcctgagggccgaggacaccgccgtctattactgtgcgacaggtggcgactacgataattggggccaaggaagcctggtcaccgtctcgtca

SEQ ID NO: 12843 - DNA, 280 bp, Homo sapiens
  source 1..280: mol_type = other DNA
tgcagcctctagattcacctttagcgcgtctgccttgagctgggtccgccaggctccagggaaggggctggagtggatctcagcgattactcctgatggtgataccacatactacgccgactccgtgaggggccggttcgccatctccagagacaattccaagaacacactgtatctgcaaatgaacagcctgagggccgaggacaccgccgtctattactgtgcgacaggtggcgactacgataattggggccaaggaagcctggtcaccgtctcgtca

SEQ ID NO: 12844 - DNA, 280 bp, Homo sapiens
  source 1..280: mol_type = other DNA
tgcagcctctggattcacctttagcaactctgccctgagctgggtccgccaggctccagggaaggggctgcagtgggtctcagctattagtagtagtggtggtaacacatactacgcagactccgtgaagggccggttcaccatctccagagacaattccaagagcacgctgtatctgcaaatgaacagcctgagagccgaggacacggccgtctattactgtgccacaggcggtgactatgataactggggccagggaaccctggtcaccgtctcctca

SEQ ID NO: 12845 - DNA, 304 bp, Homo sapiens
  source 1..304: mol_type = other DNA
tgcagcctctggattcacctttagcagctatgccatgagctgggtccgccaggctccagggaaggggctggagtgggtctcagctattagtgataatgctagtcgcacatattacgcaggctccgtgaagggccggttcaccatctccagagacaattccaggaatacgatgtctctgcaaatgaacagcctgagagtcgaggacacggccgtgtattactgtgcgaaagagagcccgtatagcaggtcgagggagtactactttgactactggggccagggaatcctggtcaccgtctcctca

SEQ ID NO: 12846 - DNA, 304 bp, Homo sapiens
  source 1..304: mol_type = other DNA
tgcagcctctggattcacctttagcagctatgccatgagctgggtccgccaggctccagggaaggggctggagtgggtctcagctattagtggtagtggtgataccacatactacgcagactccgtgaagggccggttcaccatctccagagacaattccaagaacacactgtatctgcaaatgaacagcctgagagccgaggacacggccttatattactgtgcgaaagagagcccctatagccgcagccgggagtactactttgactactggggccagggaaccctggtccccgtctcctca

SEQ ID NO: 12847 - DNA, 289 bp, Homo sapiens
  source 1..289: mol_type = other DNA
cgcagcgtctggtttctcctttcgtgattcttggatggtctgggtccgtcaggctccagggaaggggctggagtggctggccaatttgaaccaggatgggaccacgacaaattatgtggactctgtgaaggggcgattcaccatctccagagacaacgcccggaactcagtgtttctgcaaatgaacagcctgagagacgaggacacggccatgtattattgtgtgagagatcgggcctatagcacgtttgactactggggccaggggaccctggtcaccgtctcttca

SEQ ID NO: 12848 - DNA, 289 bp, Homo sapiens
  source 1..289: mol_type = other DNA
ctcagcgtctggtttctcctttcgtgattcttggatggtctgggtccgtcaggctccagggaaggggctggagtggctggccaatttgaaccaggatgggaccacgacaaattatgtggacgctgtgaaggggcgattcaccatctcaagagacaatgcccggaactcagtgtttctgcaaatgaacagcctgagagacgaggacacggccatgtattattgtgtgagagatcgggcctatagcacgtttgactactggggccaggggaccctggtcaccgtctcttca

SEQ ID NO: 12849 - DNA, 289 bp, Homo sapiens
  source 1..289: mol_type = other DNA
tgcagcctctggattcacctttagtagttcttggatggtctgggtccgccaggctccagggaaggcgctggagtgggtggccaacatacatccagatggaagtgttacaaactatgtggactctgtgaagggccggttcaccatctccagagacaacgccaagaactcactgtatctgcaaatggacagcctgagagccgacgactcggctgtctattactgtgtgagagatcgtgcctacagcacatttgactattggggccagggagccctggtcaccgtctcctcg

SEQ ID NO: 12850 - DNA, 288 bp, Homo sapiens
  source 1..288: mol_type = other DNA
aaggtttctggaaacgactttaccagctactggatcgcctgggtgcgccagatgcccgggaaaggcctggagtggatggggatcatctatcctggtgactctgataccagatacagcccgtccttccaaggccaggtcaccatctcagccgacaagtccatcaccaccgcctacctgcagtggagcagactgaaggcctcggacaccgccatgtattactgtgcgagacgtgtcggtaactcaaagtttgactactggggccagggaaccctggtcaccgtctcatca

SEQ ID NO: 12851 - DNA, 288 bp, Homo sapiens
  source 1..288: mol_type = other DNA
aaaggttctggttacagcttgaccagctactggatcgcctgggtgcgccagatgcccgggaaaggcctggagtggatggggatcatctatcctggtgactctgatacgagatatagtccgtccttccaaggccacgtcaccatctcagccgacaagtccatcaccaccgcctacttgcagtggagcagcctgaaggcctcggacaccgccatgtattactgtgcgagacgggtcggtaactcaaagtttgactactggggccagggaaccctggtcaccgtctcctca

SEQ ID NO: 12852 - DNA, 283 bp, Homo sapiens
  source 1..283: mol_type = other DNA
tgcagcctctggattcaccgtcagtagtaattacatgagttggctccgccaggctccaggaaaggggctggagtgggtctccatgctttatggtgatggaacaatgcactacctggagtccacgcagggcagattcagcatctccagagacagttccaagaacatattatatcttcaaatgaccagcctgagagccgaggacaccgctgtctatttctgtgcaaggtggacgggcacatactatgactactggggccagggaaccctggtcaccgtctcttcg

SEQ ID NO: 12853 - DNA, 283 bp, Homo sapiens
  source 1..283: mol_type = other DNA
tgcagcctctgaattcaccgtcatcaagaactacatgagctgggtccgccaggctccagggaaggggctggagtgggtctcaattatttatcccagtggtgatacatactacctggactccgtgaagggcagattcaccatctccagagacaatcccaagaacacgctgtatcttcaaatgaacagcctgagatccgaggacacggctgtgtattattgtgcgaggtggactgggacctactacgactactggggccagggaaccctggtcaccgcctcctca

SEQ ID NO: 12854 - DNA, 283 bp, Homo sapiens
  source 1..283: mol_type = other DNA
tgcagcctctggattcagcttcggaagctctaccatgaactgggtccgccaggctccagggaaggggctggagtgggtttcatacattagtggtactagtagtaccatgtactacgcagactctgtgaagggccgattcaccatctccagagacaacgccaagaattcactgtatctgcacatgaacagcctgagagccgaggacacggctatctattactgtgcgagagatggtaccccgattgattattggggccagggaaccctggtcaccgtctcctca

SEQ ID NO: 12855 - DNA, 283 bp, Homo sapiens
  source 1..283: mol_type = other DNA
tgcagcctctggattcagcttcggaagctctaccatgaactgggtccgccaggctccagggaaggggctggagtgggtttcatacattagtagtactagtagtaccatgtactacgcagactctgtgaagggccgattcaccatctccagagacaacgccaagaattcactgtatctgcacatgaacagcctgagagccgaggacacggctatctattactgtgcgagagatggtaccccgattgactactggggccagggaaccctggtcaccgtctcctca

SEQ ID NO: 12856 - DNA, 283 bp, Homo sapiens
  source 1..283: mol_type = other DNA
tgcagcctctggattcaacttcaggagttatgaaatgaactgggtccgccaggctccagggaaggggctggagtgggtttcatacattagtagcagtagtagtatcatatactacgcagactctgtgaagggccgattcaccacctccagagacaacgccaagaactcactatatctgcacatgaacagcctgagagccgaggacacggctgtttattactgtgcgagagatggaacccccattgactactggggccagggaaccctggtcaccgtctcctca

SEQ ID NO: 12857 - DNA, 298 bp, Homo sapiens
  source 1..298: mol_type = other DNA
tgcagcctctggattcacctttagcaactatgccatgagctgggtccgccaggctccagggcaggggctggagtgggtctcatctattagtggtagtggtgatagcacaaactacggagactccgtgaagggccggttcaccatctccagagacaattccaagaacacgctgtacctccacatgaacagcctgagagtcgaggacacggccctatattactgtgcgaaagatcctttgagttgggggacgatctactttgactactggggccagggaatcctggtcaccgtctcctca

SEQ ID NO: 12858 - DNA, 298 bp, Homo sapiens
  source 1..298: mol_type = other DNA
tgcagcctctggattcatctttaacaactatgccatgagttgggtccgccaagctccagggaaggggctggagtgggtctcctctattagtaatgatggtgattacagaaagtccgcagactccgtgaagggccggttcaccatttccagagacaattccaaggacacgttgtatctgcaaatgaccagcctgagagccgaggacacggccgtttattactgtgcgaaagatcccctttcctggggaacaatctactttgactactggggccagggaatcctggtcaccgtcgcctca

SEQ ID NO: 12859 - DNA, 299 bp, Homo sapiens
  source 1..299: mol_type = other DNA
ccatctccggggacagggtctctagcgacactgctgcttgggactggatcaggcagtccccatcgagaggccttgagtggctgggaaggacactcttctcgtcgaagtggcagttctactatgcacgctctgtggagggccgttcacgcatcaatccggacacatccaagaaccaattctccctgcagctgaactctgtgactcccgatgacacggctacttattattgtgcaagaaggggtgacggcaattcctactatgactattggggccagggaatcctggtcgtcgtctcctca

SEQ ID NO: 12860 - DNA, 299 bp, Homo sapiens
  source 1..299: mol_type = other DNA
ccatctccggggacagtgtctctgccgactttatgacttgggactggctcaggcagtccccatcgggaggccttgagtggctgggaaggacgcgctacgcgtccaggtggattggtgaatatgcaccatctatgaagagtcgactgaccatcgacgtagacacatccaagaaccaattctccctgaagttgaagtccgtgactcccgaggacacggctaaatactactgtgcaagacggggtgatggaaactcctactatgactattggggccagggagccctggtcatcgtctcctca

SEQ ID NO: 12861 - DNA, 294 bp, Homo sapiens
  source 1..294: mol_type = other DNA
gtatctggatacaccttcaccacttcctatttgcactgggtgcgacaggcccctggacaagggcttgagtggatgggaataatcaaacctggtgatggaagcacaaactacgcgccgaagttccagggcagagtcaccatgaccagggacacgtcgacgagctcagtctacatggagctgagcagcctgagatctgacgacacggccgtttattactgtgcgagacgcgattgtactggttccagctgctatttcgtctactggggccagggaaccctggtcaccgtctcctca

SEQ ID NO: 12862 - DNA, 294 bp, Homo sapiens
  source 1..294: mol_type = other DNA
gcatctggatacatgttcaccagttactatgtgcattgggtgcggcaggcccctggacaagggcttgagtggatgggaataatcaaccctactgctgatagcacaaactacgcacagaagttccagggcagagtcaccatgaccagggacacgtccacgagcacagtctacatggaactgagcagcctaacatctgaggacacggccctatatttctgtgcgagacgcgattgtactggttccagctgctattttgtctactggggccagggaaccctggtcaccgtctcctca

SEQ ID NO: 12863 - DNA, 298 bp, Homo sapiens
  source 1..298: mol_type = other DNA
tacagccgctgaattcacctttagcaattattgggtgacctgggtccgccaggctccagggaaggggctggagtgggtggccagcataaagcaagatggaagcgagatatactatgtggactctgtgaggggccgatacaccatctccagagacaacgccaggaactcactgtatctgcaaatgaagtacctgagacccgaggacacggccgtatattattgtgcgagagggacaagtgggaggtatcatgcttactttgactactggggccagggaacccaggtcaccgtctcttca

SEQ ID NO: 12864 - DNA, 298 bp, Homo sapiens
  source 1..298: mol_type = other DNA
tgcagcctctgaattcacatttagtaactattggatgagctgggtccgccaggctccagggaaggggctggagtgggtggccagcataaagcaagatgaaagtgagaaatactatgtggactctgtgaagggccgattcaccatctccagggacaacgccaagaactcactgtatctgcaaatgaacagcctgagagccgaggacacggctgtttattactgtgcgagagggactagtgggaggtatcacgcatattttgactactggggccagggaaccctggtcaccgtctcctca

SEQ ID NO: 12865 - DNA, 299 bp, Homo sapiens
  source 1..299: mol_type = other DNA
atgcagcctctgaattcacatttagtaactattggatgagctgggtccgccaggctccagggaaggggctggagtgggtggccagcataaagcaagatgaaagtgagaaatactatgtggactctgtgaagggccgattcaccatctccagggacaacgccaagaactcactgtatctgcaaatgaacagcctgagagccgaggacacggctgtttattactgtgcgagagggactagtgggaggtatcacgcatattttgactactggggccagggaaccctggtcaccgtctcctca

SEQ ID NO: 12866 - DNA, 318 bp, Homo sapiens
  source 1..318: mol_type = other DNA
acacagaccctcacgctgacctgcaccttctctggtttctcactcatcactcgtggagtgggtgtggcctggatccgtcagcccccaggaaaggccctagagtggcttgcactcatttattgggatgatgataaccgctacagcccatctctggagagcaggctcaccctcaccaaggacaactccaaaaaccaggtggtccttacaatgaccaacatggaccctttggacacagccacatattactgtgcacacagactggcagcagctggggaatttgactactggggcccgggagtcctggtcaccgtctcctca

SEQ ID NO: 12867 - DNA, 318 bp, Homo sapiens
  source 1..318: mol_type = other DNA
acacagaccctcacgctgacctgcaccttctctgggttctcactcagcactagtggagtgggtgtgggctggatccgtcagcccccaggaaaggccctggagtggcttgcaatcatttattgggatgatgataaccgcttcagcccatctctgaagagcagactcaccctcagcaaggacacctccaaaaaccaggtggtccttacaatgaccagcgtggaccctgtggacacagccacatattactgtgcacacagattggcagcagctggggaatttgactattggggccagggaatcctggtcaccgtctcctca

SEQ ID NO: 12868 - DNA, 318 bp, Homo sapiens
  source 1..318: mol_type = other DNA
acacagaccctcacgctgacctgcaccttctctgggttctcactcagcacttatggggtgggtgtgcactggatccgtcagcccccaggaaaggccctggaatggcttgcactcatttattgggatgatgataagcgctacagcccatctctgaagagcaggctcaccatcaccaaggacacctccaaacaccaggtggtccttacaatgaccaacatggaccctgtggacacagccacatatttctgtgcgcaccgtctggcagcagctggggaatttgactactggggccagggaaccctggtcaccgtctcctca

SEQ ID NO: 12869 - DNA, 288 bp, Homo sapiens
  source 1..288: mol_type = other DNA
gcttctggatacaccttcggtacctatgctattcattgggtgcgccaggcccccggacaaaggctcgagtggatgggatggatcatccctggcaatggtctcacaaagtattcacagaccttccagcacagagtcaccgtaagcagcgacacatccgcgaatacagcctacatggagctgttcagcctgaaatctgaagacacggctgtgtattactgtgcgagagattccccgggactacgatcttttgactactggggccagggaacccgggtcaccgtctcctca

SEQ ID NO: 12870 - DNA, 288 bp, Homo sapiens
  source 1..288: mol_type = other DNA
gcttctggatacaccttcactaactatgctatacattgggtgcgccaggcccccggacaaaggcttgagtggatgggatgggtcaacggtggcagtggtgacacaagatattcacagagtttccagggcagagtcaccatgaccagggacacatccgcgaccacagtctacatggagttgagcagcctgagatctgaagacacggctgtgtattactgtgcgagagatagtcccggcttacgatcctttgactactggggccagggaaccctggtcaccgtctcctca

SEQ ID NO: 12871 - DNA, 288 bp, Homo sapiens
  source 1..288: mol_type = other DNA
gcttctggctacaccttcactaactatgctgtacattgggtgcgccaggcccccggacaaaggtttgagtggatggtttgggtcaaccctggcaatggtgacacaagatactcacagaacttccagggcagagtcaccatgaccagggacacatccgcgaccacagtctacttggaactgagcagcctgacatctgaagacacggctgtatattactgtgcgagagatagtcccggcttacgatcctttgactactggggccagggaaccctggtcaccgtctcctca

SEQ ID NO: 12872 - DNA, 288 bp, Homo sapiens
  source 1..288: mol_type = other DNA
gcttctggatacaccttcaataacattgctatacattgggtgcgccaggcccccggacaaaggcttgagtggatgggatgggtctacggtggcagtggtgacagaagatattcacagacgttccaggacagagtcaccatgaccagggacacatccgcgaccacagtctacatggagctgagcagcctgacatctgaagacacggctgtatattactgtgcgagagatagtcccggcttacgatcctttgactactggggccagggaaccctggtcaccgtctcctca

SEQ ID NO: 12873 - DNA, 289 bp, Homo sapiens
  source 1..289: mol_type = other DNA
tgcagcctctggattcacttttaccacccatgccatgggctgggtccgccaggccccagggaaggggctggagtgggtctcaattatcactgctgatggtcgcacatactacgcaaactccgtgaggggccgggtcaccatctccagagacacttccaagaacacactgtttctgcaaatgatcgacctgagagccgaagacacggccgtatatttttgtgcgaaagggggtatagaagctcgtctatcggactactggggccagggaaccctgctcaccgtctcctca

SEQ ID NO: 12874 - DNA, 292 bp, Homo sapiens
  source 1..292: mol_type = other DNA
tgcaggctctggattcacctttagttgctgcaccatgggctgggtccgccaggctccagggaaggggctggaatgggtctccactattagtgacagtggtgttaccacatactacgcagactccgtgaagggccggttcaccatctccagagacaattccaagaacacgctgtctctgcaaatgaacagcctgacaaccgaagacacggccgtatatttctgtgcgaaagggggtatagaagctcgtttgtcggactattggggccagggagcccaggtcaccgtctcctca

SEQ ID NO: 12875 - DNA, 277 bp, Homo sapiens
  source 1..277: mol_type = other DNA
tgcagcctctggattcacctttagttactatgccatgaactgggtccgccagactccagggaaggggctggaatgggtctcaagtactagtgggactggccttacctacgcagactccgtgaagggccgattcaccatctccagagacgattccaagaacacgttgtacctgcaaatgtccagcctgagagtcgaggacacggccatttattactgtgtgaagggaaaatatttggtggactgttggggccagggaaccctggtcaccgtctcctca

SEQ ID NO: 12876 - DNA, 277 bp, Homo sapiens
  source 1..277: mol_type = other DNA
tgcagcctctggattcacctttagttattatgccatgaagtgggtccgccagactccagggaaggggctggagtgggtctcaagtatcggtgggagtggcgttacctacgcagactccgtgaagggccgattcaccatctccagagacgattccaagaatatgttgtacctgcaaatgtccagcctgagagtcgaggacacggccatttattactgtgtgaaaggaaaatatttggtggactgctggggccagggaaccctggtcaccgtctcctca

SEQ ID NO: 12877 - DNA, 277 bp, Homo sapiens
  source 1..277: mol_type = other DNA
tgcagcctctggattcaagtttagcgactatgccatgagctgggtccgccaggctccagggaaggggctggagtgggtctcaaatattgctggtgatggcacaagatacgcagactccgtgaagggccggttcaccatctccagagacaattctaacaacatgctctatctgcaaatggccagcctgagagtcgacgacacggccgtatattactgtgtgaaagggaaatacttagttgactgctggggccagggaaccctggtcaccgtctcctca

SEQ ID NO: 12878 - DNA, 283 bp, Homo sapiens
  source 1..283: mol_type = other DNA
tgcagcctctggatatagcttcagttcccactggatacactgggtccgccaaggtccagggaagggtctggtgtgggtctcacagattaattacgatgggagtacgacaacttacgcggactccgtgaagggccgattcaccatctccagagacaacgccaagaacacgctgtatctgcaaatgaacagtctgagagtcgaggacacggctgtctattactgtacaacagtagcagaggggttgggctactggggccagggaaccctggtcaccgtctcctca

SEQ ID NO: 12879 - DNA, 280 bp, Homo sapiens
  source 1..280: mol_type = other DNA
tgcagcctctggattcaccttcagtaaatactggatgcactgggtccgccaagctccagggaaggggctggtgtgggtctcacatattaacagagatggaatcacaacctacgcggactccgtgaagggccgattcaccatctccagagacaacgccaagaacacactgaatctgcagatgaacagtctgagagtcgaggacacggctatgtattactgtacaacagtagcagaaggtttggggtactggggccagggaaccctggtcgccgtctcctca

SEQ ID NO: 12880 - DNA, 280 bp, Homo sapiens
  source 1..280: mol_type = other DNA
tgcagcctctggattcaccttcagtaaatactggatgcactgggtccgccaagctccagggaaggggctggtgtgggtctcacatattaacagagatggaatcacaacctacgcggactccgtgaagggccgattcactatctccagagacaacgccaagaacacactgaatctgcagatgaacagtctgagagtcgaggacacggctatgtattactgtacaacagtagcagaaggtttggggtactggggccagggaaccctggtcgccgtctcctca

SEQ ID NO: 12881 - DNA, 292 bp, Homo sapiens
  source 1..292: mol_type = other DNA
tgaagcctctggattcacattccatcgttatgatatgcactgggtccgccagactccaggcaagggactggagtgggtggcatatatatcagaagatggaagtacgagagattacacagactccgtgaagggccgattcaccgtctccagagacaacgccaagaacaccctgtatctagaagttagcaacctgagaccaaacgacacggctacatattactgtgcgagggctccccgttggaatggatttgactactggggccagggaaccctggtcatcgtgtcctccggc

SEQ ID NO: 12882 - DNA, 289 bp, Homo sapiens
  source 1..289: mol_type = other DNA
tgaagcctctggattcacgttcagtctctatgatctacactgggtccgccaggctccgggcaagggcctggagtgggtggcatttatttcacagtatggagatactgaactttacgcagactccgtgaagggccgattcaccatctccagagacaattcccagaacactctctatctgcaaattaacagcccgagacctgacgacacggcttcatacttctgtgcgagagcaccacggtggaacggctttgactactggggccggggaaccctggtcatcgtctcctca

SEQ ID NO: 12883 - DNA, 289 bp, Homo sapiens
  source 1..289: mol_type = other DNA
tgaagcctctggattcacgttcagtctctatgatctacactgggtccgccaggctccgggcaagggcctggagtgggtggcatttttttcacagtatggagatactgaactttacgcagactccgtgaagggccgattcaccatctccagagacaattcccagaacactctctatctgcaaattaacagcccgagacctgacgacacggcttcatacttctgtgcgagagcaccacggtggaacggctttgactactggggccggggaaccctggtcatcgtctcctca

SEQ ID NO: 12884 - DNA, 280 bp, Homo sapiens
  source 1..280: mol_type = other DNA
tgcagcctctggattcacctttagtaactattggatgagctgggtccgccaggctccagggaaggggctggagtgggtggccaacataaagcaagatggaagtgagaaatactatgtggactctgtgaagggccgattcaccatctccagagacaacggcaagaactcactgtatctgcaaatgaacagcctgagagccgaggacacggccgtgtattactgtgcgagaggtgggagctattatttttggggccagggaacgctggtcaccgtctcctca

SEQ ID NO: 12885 - DNA, 280 bp, Homo sapiens
  source 1..280: mol_type = other DNA
tgcagcctctggattcacctttagtagctattggatgagctgggtccgccaggctccagggaaggggctggagtgggtggccagcataaaacaagatggaactgagacatactatgtggactctgtgaagggccgattcaccatctccagagacaacgccaaggactcactgtatctgcaaatgaacagcctgagagccgaggacacggcagtgtactactgtgcgagaggggggagttactacttctggggccagggaaccctggtcaccgtctcctca

SEQ ID NO: 12886 - DNA, 289 bp, Homo sapiens
  source 1..289: mol_type = other DNA
cactgtctctggtggctccatcagtagttaccactggagctggattcggcagcccccagggaggggactggagtggattggctatgtctcttggagtgggagcgccaattacaggccctccctcaagagtcgagtcaccatatcacttgacacgtccaagaaccaattctccctgaacctgaactctgtgaccgctgcggacacggccgtctattactgtgcgagagtttctgactggggaaagtggttcgacccctggggccagggaaccctggtcaccgtctcctca

SEQ ID NO: 12887 - DNA, 316 bp, Homo sapiens
  source 1..316: mol_type = other DNA
cactatctctggtggctccattcctacttactactggacttgggtccggcagcccccagggaagggacttgagtggcttggctatatctttgatcgtgggatcaccagttacaactatgagagagtgcgcaccaattacagcccctccctcaagagtcgactcaccatatcactggacacgtccaagaaccagctctccctgacactgacttctgtgaccgctgcggacacggccgtctattactgtgcgagagtttccgactggggaaagtggttcgacccctggggcccgggaaccctggtcaccgtctcctca

SEQ ID NO: 12888 - DNA, 316 bp, Homo sapiens; identical to SEQ ID NO: 12887
  source 1..316: mol_type = other DNA

SEQ ID NO: 12889 - DNA, 316 bp, Homo sapiens
  source 1..316: mol_type = other DNA
cactatctctggtggctccattcctacttactactggacttgggtccggcagcccccagggaagggacttgagtggcttggctatatctttgatcgtgggatcaccagttacaactatgagagagtgcgcaccaattacagccccttcctcaagagtcgactcaccatatcactggacacgtccaagaaccagctctccctgacactgacttctgtgaccgctgcggacacggccgtctattactgtgcgagagtttccgactggggaaagtggttcgacccctggggcccgggaaccctggtcaccgtctcctca

SEQ ID NO: 12890 - DNA, 316 bp, Homo sapiens
  source 1..316: mol_type = other DNA
cactatctctggtggctccattcctacttactactggacttgggtccggcagcccccagggaagggacttgagtggcttggctatatctttgatcgtgggatcaccagttacaactatgagagagtgcgcaccaattacagcccctcccccaagagtcgactcaccatatcactggacacgtccaagaaccagctctccctgacactgacttctgtgaccgctgcggacacggccgtctattactgtgcgagagtttccgactggggaaagtggttcgacccctggggcccgggaaccctggtcaccgtctcctca

SEQ ID NO: 12891 - DNA, 283 bp, Homo sapiens
  source 1..283: mol_type = other DNA
cactgtgtctggtggctcctttatcggctactactggagttggttccggcagaccccagggaagggactggagtggattggctatgttcataatacgaacggggacaccgactccagcccccccctcaagagtcgcgtcaccatttcggcggacgcctcgaagagtcaattcttcctacacctgacctcaatgaccgctgcggacacggccctgtatttctgtgcgagaggacggggctggatcgacccctggggcccgggaatcctggtctccgtctcctca

SEQ ID NO: 12892 - DNA, 280 bp, Homo sapiens
  source 1..280: mol_type = other DNA
cactgtctctggtgcctccatcagtagttactactggagctggtttcggcagcccccagggaagggactggagtgcattgcgaatatctattacactgggatcaccaactacaacccctccctcaagagtcgagtcaccatatcagtagacacgtccaagaaccagttctccctgaaggtgagctctgtgaccgctgcggacacggccgtgtattactgtgcgagaggcaggggctggatcgacccctggggccagggaatcctggtcaccgtctcctca

SEQ ID NO: 12893 - DNA, 289 bp, Homo sapiens
  source 1..289: mol_type = other DNA
cgctgtctatggtgggtccttcagtggttactactggagctggattcgccagcccccagggaaggggctggagtggattggggaaatcaatcatagtggaagcaccaactacaacccgtccctcaagagtcgagtcaccatatcagtagacacgtccaagaaccagttctccctgaacctgaactctgtgaccgccgcggacacggctgtgtattactgtgcgagaggcgtctatggatatgatgcttttgatatctggggccaagggacaatggtcaccgtctcttca

SEQ ID NO: 12894 - DNA, 289 bp, Homo sapiens
  source 1..289: mol_type = other DNA
cgctgtctatggtgggtccttcagtggttactactggagctggatccgccagcccccagggaaggggctggagtggattggggaaatcaatcatagtggaagcaccaactacaacccgtccttcaagagtcgagtcaccatatcagtagacacgtccaagaaccagttctccctgaagctgagctctgtgaccgccgcggacacggctgtgtattattgtgcgagaggcgtctacggttatgatgcctttgatatctggggccaagggacaatggtcaccgtctcttca

SEQ ID NO: 12895 - DNA, 288 bp, Homo sapiens
  source 1..288: mol_type = other DNA
gcctctggatacaccttctacaattatgctatctattgggtgcgccaggcccccggacagaggcttgagtggctgggatgggtcaccggtggaaatggtgacacattctattcgcagaagttgcagggcagagtcaccattaccagggacacatccacgaccacagcctacatggaactgagtggcctgagatctgaggacacggctgtgtactactgtgcgagagattctccggggaggggtggcttagactactggggccagggaaccctggtcaccgtctcctca

SEQ ID NO: 12896 - DNA, 288 bp, Homo sapiens
  source 1..288: mol_type = other DNA
gcctctggatacaccttcaccaattatgctatgtattgggtgcgccaggcccccggacagaggcttgagtggatgggatgggtccgcggtggaaacggtgccacacagtactcagagagattgcagggcagagtcaccatgaccagcgacacaaccgcgaccacagcctacctggaagtgagtggcctgagatctgaagacacggctatgtactactgtgcgagagattctccggggaggggtggcttagactactggggccagggaaccctggtcaccgtctcctct

SEQ ID NO: 12897 - DNA, 288 bp, Homo sapiens
  source 1..288: mol_type = other DNA
acttctgcattcaccttcacctcctatgccatctattgggtgcgccaggcccccggacaaaggcttgagtggatggggtggatcgccggtggcagtggtaacagaatgtactcacagaagttccagggcagactcactttaaccagagacacatccgcgagcacagcctacatggagttgagcagtttgcggtctgaagacacggctgtttattactgtgcgagagatagtccgggccgagggggccttgactactggggccagggaaccctggtcaccgtctcctca

SEQ ID NO: 12898 - DNA, 280 bp, Homo sapiens
  source 1..280: mol_type = other DNA
tgcaacctctggattcaccttaagtagttattggatgaattgggtccgccaggctccagggaaggggctggagtgggtggccagcataaagagcgatggaactgacaagttctacttggacgctgtgaagggccggttcatcatctccagagacaacgcccagaattcattatatctgcaaatgaacagcctgagagccgaggacacggccatttattattgtgtgagagagaaccagatggcatattggggcctgggaaccctggtcaccgtctcctca

SEQ ID NO: 12899 - DNA, 280 bp, Homo sapiens
  source 1..280: mol_type = other DNA
tgcagcctctggattcacctttagtaactattggatgagctgggtccgccaggctccagggaaggggctggagtgggtggccaacataaagcacgatggaagtgacaaatactatgtggactctgtgaagggccgattcaccatctccagagacaacgccaagaactcactgtgtctgcaaatggacagcctgagagtcgaggacacggccttgtattactgtgtcagagagaatcaaatggcgtactggggccaggggaccctggtcaccgtctcctca

SEQ ID NO: 12900 - DNA, 286 bp, Homo sapiens
  source 1..286: mol_type = other DNA
cactgtctctggtggctccatcagtagttactactggagctggatccggcagcccccagggaagggactggagtggattggttatatctattacagtgggagcaccaactacaacccgtccctcacgagtcgagtcaccatatcagtagacacgtccaagaaccagttctccctgaagttgaactctgtgacagctgcggacacggccgtgtatttttgtgcgagaggcggggttaaatggacgtttgactcttggggccggggaaccctggtctccgtctcctca

SEQ ID NO: 12901 - DNA, 286 bp, Homo sapiens
  source 1..286: mol_type = other DNA
cactgtctctggtggctccatcacttcttactactggagctggatccgccagcccccaggaaagggactggagtggcttggatatatttatgacactgggaccaccagctacaacccgtccctcaagagtcgagtcaccatatcagtagacacgtccaagaaccagttctccctggggctgacctctgtgaccgctgcggacacggccctttattactgtgcgagagggggcgtaaagtggacttttgactcctggggccagggaatcctcgtcaccgtctcctca

SEQ ID NO: 12902 - DNA, 277 bp, Homo sapiens
  source 1..277: mol_type = other DNA
tgcaacctctggattcacctttagcaattatgccatgagctgggtccgccaggctccagggaaggggctggagtgggtctcagctattagtcgtagtggtgatgttacgtactacgcagactccgtgaagggccggttcaccatctccagggacactcccaagagcacgctctatctgcaaatggacagcctgacagtcggagacacggccatttattactgtacgagagacccccccgacgtctggggcccagggaccacggtcaccgtctcctca

SEQ ID NO: 12903 - DNA, 277 bp, Homo sapiens
  source 1..277: mol_type = other DNA
tgcagcctctggattcacctttagcgactatggcatgagctgggtccgccaggctccagggaaggggctggagtgggtctctactattagtggtggtggtactcgtacatactacgcagactccgtgaagggccggttcaccatctccagagacaattccaagaacacgctgtatgtgcaaatgaacagcctgagagccgaggacacggccgtatattactgtacgagagacccaccggacgtctggggccaagggaccacggtcaccgtctcctca

SEQ ID NO: 12904 - DNA, 280 bp, Homo sapiens
  source 1..280: mol_type = other DNA
tgaagcctctggattcaccttcaggaactatttgatgacctgggtccgccaggctccagggaaggggctggagtgggtggccaacataaagcaggatggaggtgagaaatattacgtggactctgtgaagggccgattcaccatctccagagacaacgccaagaactcactgtttctgcaaatgaacagcctgagagccgaggacacggctgagtattactgtgcgagaagcggcggtttggacgtctggggccaagggaccacggtcaccgtctcctca

SEQ ID NO: 12905 - DNA, 280 bp, Homo sapiens
  source 1..280: mol_type = other DNA
tgcagcctctgaattcacctttagaagttattggatgagttgggtccgccaggctccagggaaggggctggagtgggtgggcaagataaaaccagatggcagtgagaagtactatgtggactctgtgaagggtcgattcaccatctccagagacaacgccaagaactcactgtttctgcaaatgaacagcctgagagccgaggacacggccgtttattactgtgcgagaagtgggggtctggacgtctggggccaagggaccacggtcaccgtctcctca

SEQ ID NO: 12906 - DNA, 280 bp, Homo sapiens
  source 1..280: mol_type = other DNA
tgcagcctctggattcagctttagtagttattggatgagctgggtccgccaggctccagggaaggggctggagtgggtggccaagataaagcaagatggaagtgagaaatactatgtggactctgtgaagggccgattcaccatctccagagacaacgcccagagctcactgtatctgcaaatgaacagcctgagagccgaggacacggctgtgtattattgtgcgagatccgggggcctggacgtctggggcgaagggaccacggccaccgtctcctca

SEQ ID NO: 12907 - DNA, 280 bp, Homo sapiens
  source 1..280: mol_type = other DNA
tgcagcctctggattcacctttagtagctattggatgagttgggtccgccaggctccagagaaggggctggagtgggtggccaagatgaggaatgatggaagtgagaaaaactatgtggactctgtgaagggccgattcaccatctccagagacaacgccaagagctcactgtatctgcaaatgagcagcctgagaggcgaggacacggctgtatattattgtgcgagatccgggggcctggacgtctggggccaagggaccacggtcaccgtctcctca

SEQ ID NO: 12908 - DNA, 280 bp, Homo sapiens
  source 1..280: mol_type = other DNA
tgcagcctctggattcacctttagtagctattggatgagttgggtccgccaggctccagagaaggggctggagtgggtggccaagatgaggaatgatggaagtgagaaaaactatgtggactctgtgaagggccgattcaccatctccagggacaacgccaagagctcactgtatctgcaaatgagcagcctgagaggcgaggacacggctgtatattattgtgcgagatccgggggcctggacgtctggggccaagggaccacggtcaccgtctcctca

SEQ ID NO: 12909 - DNA, 271 bp, Homo sapiens
  source 1..271: mol_type = other DNA
tgcagcctctggaatcacctttagaaactatgacatgaactgggtccgccaggctccagggaaggggctggagtggatctcaagaatcagtggcagtggtgacacaacattctacgcagactccgtgaagggccggttcgccatctccagagacaattccaagaacacgctgcatctgcaaatgaacagcctgagagccgaggacacggccgtttattattgtgcgggggcgtgggagtggggccagggaaccctggtcaccgtctcctca

SEQ ID NO: 12910 - DNA, 271 bp, Homo sapiens
  source 1..271: mol_type = other DNA
tgcagacgctggattcagttttagcaagtatgacatgcactgggtccgccagactccggggaaggggctggagtggctctcagagattagtggtactggtgatagaacacagtacgcagactccgtgaagggccgcttcaccatctccagggacaattccaagaacacgctatatctgcaaatgaacagcctgagagtcgaggacacggccgtttatttctgtgcgggggcttgggagtggggccagggaaccctagtcaccgtctcgtca

SEQ ID NO: 12911 - DNA, 271 bp, Homo sapiens
  source 1..271: mol_type = other DNA
tacagcctctggaatcacctttacaaactatgacatgaactgggtccgccaggctccagggaaggggctggagtggatctcaagaatcagtggcagtggtgacacaacattctacgcagactccgtgaagggccggttcgccatctccagagacaattccaagaacacgctgcatctgcaaatgaacagcctgagagccgaggacacggccgtttattattgtgcgggggcgtgggagtggggccagggaaccctggtcaccgtctcctca

SEQ ID NO: 12912 - DNA, 289 bp, Homo sapiens
  source 1..289: mol_type = other DNA
cactgtctctggtgcctccatcagtggttactactggagctggatccggcagcccccagggaagggactggagtggattggatatatctattatagtgacaacaccaactacaacccctccctcaagagtcgagtcaccatgtcaatagacacgtccaagaaccagttctccctgaagctgaactctgtgaccgctgcggacacggccgtgtattactgtgcgagaggaggagccagcagcaagtaccttgactactggggccagggaaccctggtcaccgtctcctca

SEQ ID NO: 12913 - DNA, 289 bp, Homo sapiens
  source 1..289: mol_type = other DNA
cactgtctctggtggctccatcagtagttactactggagttggatccggcagcccccaggggagggactggaatggattgggtatatctattccagtgggagcaccgactacaacccctccctcaagggtcgagtcaccatgtcagtagacacgtccaagaaccagttctccctgaaactgagctctgtgaccgctgcggacacggccgtgtattactgtgcgagggggggtgccagctcgaaatacttagactactggggccagggaaccctggtcaccgtctcctca

SEQ ID NO: 12914 - DNA, 301 bp, Homo sapiens
  source 1..301: mol_type = other DNA
cactgtctctggtggctccatcagtggttactgctggagttggatccggcagcccccagggaagggactggagtgggttggctatgtctattacagtgggggcaccaagtacaacaactacaacccctcccttaacggtcgactcaccatatcagcagacacgtccaagaaccagttctccctgatgctgaactctgtgaccgctgcggacacggccgtgtattactgtgcgagaacgataataggaggtggaccccccgccgactactggggccagggaaccctggtcagcgtctcctca

SEQ ID NO: 12915 - DNA, 301 bp, Homo sapiens
  source 1..301: mol_type = other DNA
cactgtctctggtggctccatcagtggttactgctggagttggatccggcagcccccagggaagggactggagtgggttggctatgtctattacagtgggggcaccaagtacaacaactacaacccctcccttaacggtcgactcaccatatcagcagacacgtccaagaaccagttctccctgatgctgaactctgtgaccgctgcggacacggccgtgtattactgtgcgagaacgataataggaggtggaccccccgccgactactggggccagggaaccctggtcagcgtcccctca

SEQ ID NO: 12916 - DNA, 289 bp, Homo sapiens
  source 1..289: mol_type = other DNA
cactgtctctggtggctccatgagtggttattgctggagctggatccggcagtccccagggaagggactggactggattggatatatttacagtgaagccaggaactacagtccctccctcaagagtcgactcaccctatcattagacatggccaacaaccagttctccctgaggctgacctctgtgaccgctgcagacacggccgtctattactgcgcgagaacgatcattggtggtggcccaccagcagactactggggccagggagccctggtcaccgtctcctca

SEQ ID NO: 12917 - DNA, 289 bp, Homo sapiens
  source 1..289: mol_type = other DNA
cactgtctctggtggctccatgagtggttattgttggagctggatccggcagtccccagggaagggactggactggattggatatatttacagtgaagccaggaactacagtccctccctcaagagtcgactcaccctatcattagacatggccaacaaccagttttccctgaggctgacctctgtgaccgctgcagacacggccgtctattactgcgcgagaacgatcattggtggtggcccaccagcagactactggggccagggagccctggtcaccgtctcctca

SEQ ID NO: 12918 - DNA, 283 bp, Homo sapiens
  source 1..283: mol_type = other DNA
tgcagcctctggattcacctttaacctctataccatgggctgggtccgccaggctccagggaaggggctggagtgggtctcagcgattaatagtggtcttagcacattctactcagactccgtgaaaggccgcttcagcatctccagagacaattccaagacgacgttatatgtgcaaatgaacagcctgagagccgaggacacggccctatattactgtgcgagacgcgtagagtgggcttttgatgtctggggccaagggacgatggtcaccgtctcttca

SEQ ID NO: 12919 - DNA, 286 bp, Homo sapiens
  source 1..286: mol_type = other DNA
tggagcctctggattcagctttagcgcctacaccatgggctgggtccgtcacgttccggggaaggggctggactgggtctcagccattcttagcggtggtcaaagcacatactatgcagactccgtgaggggccgtttcaccatctccagagacaattccaagaacacggtggatctgctgctgagtagcctgagacccgaggacacggccatttattactgtgccagaagggttgaatgggcttttgatgtgtggggccgagggacgatggtcaccgtcgcttca

SEQ ID NO: 12920 - DNA, 310 bp, Homo sapiens
  source 1..310: mol_type = other DNA
tgtagcctctggattctcttttagcaactattcgatgacgtgggtccgccaggctccagggaaggggccggaatgggtctcagttttttatagcggttttagtcatgctcgtggcgccgactatgcagactccgtgaagggccggttcaccgtctccagagataattccaggaacacactgtatctgcaaatgaacagcctgcgagccgaggacacggccgtatattattgtgcgaaactcgtaacttataactgggactgggatgcttttgatgtgtggggccaagggacagtggtcaccgtctcttca

SEQ ID NO: 12921 - DNA, 310 bp, Homo sapiens
  source 1..310: mol_type = other DNA
tgtagcctctggattctcctttagcagctattcgatgacgtgggtccgccaggctccagggaaggggccggaatgggtctcagttttttatagcggttttagtcatgctcgtggcgccgactatgcagactccgtgaagggccggttcaccgtctccagagataattccaagaacacactgtatctgcaaatgaacagcctgcgagccgaggacacggccgtatattattgtgcgaaactcgtaacttataactgggactgggatgcttttgatgtgtggggccaagggacagtggtcaccgtctcttca

SEQ ID NO: 12922 - DNA, 310 bp, Homo sapiens; identical to SEQ ID NO: 12921
  source 1..310: mol_type = other DNA

SEQ ID NO: 12923 - DNA, 310 bp, Homo sapiens
  source 1..310: mol_type = other DNA
tgtagcctctggattctcctttagcagctattcgatgacgtgggtccgccaggctccagggaaggggccggaatgggtctcagttttttatagcggttttagtcatgctcgtggcgccgactatgcagactccgtgaagggccggttcaccgtctccagagataattccaggaacacactgtatctgcaaatgaacagcctgcgagccgaggacacggccgtatattattgtgcgaaactcgtaacttataactgggactgggatgcttttgatgtgtggggccaagggacagtggtcaccgtctcttca

SEQ ID NO: 12924 - DNA, 310 bp, Homo sapiens; identical to SEQ ID NO: 12921
  source 1..310: mol_type = other DNA

SEQ ID NO: 12925 - DNA, 310 bp, Homo sapiens
  source 1..310: mol_type = other DNA
tgtagcctctggattctcctttagcagctattcgatgacgtgggtccgccaggctccagggaaggggccggaatgggtctcagttttttatagcggttttagtcatgctcgtggcgccgactatgcagactccgtgaagggccggttcaccgtctccagagataattccaagaacacactgtatctgcaaatgaacagcctgcgagccgaggacacggccgtatattattgtgcgaaactcgtaacttataactgggactgggatgcttttgatgtgtggggccaagggacagtggtcaccgtgtcttca

SEQ ID NO: 12926 - DNA, 310 bp, Homo sapiens; identical to SEQ ID NO: 12921
  source 1..310: mol_type = other DNA

SEQ ID NO: 12927 - DNA, 310 bp, Homo sapiens
  source 1..310: mol_type = other DNA
tgtagcccctggattctcctttagcagctattcgatgacgtgggtccgccaggctccagggaaggggccggaatgggtctcagttttttatagcggttttagtcatgctcgtggcgccgactatgcagactccgtgaagggccggttcaccgtctccagagataattccaagaacacactgtatctgcaaatgaacagcctgcgagccgaggacacggccgtatattattgtgcgaaactcgtaacttataactgggactgggatgcttttgatgtgtggggccaagggacagtggtcaccgtctcttca

SEQ ID NO: 12928 - DNA, 310 bp, Homo sapiens
  source 1..310: mol_type = other DNA
tgtagcctctggattctcctttagcagctattcgatgacgtgggtccgccaggctccagggaaggggccggaatgggtctcagttttttatagcggttttagtcatgctcgtggcgccgactatgcagactccgtgaagggccggttcaccgtctccagagataattccaagaacacactgcatctgcaaatgaacagcctgcgagccgaggacacggccgtatattattgtgcgaaactcgtaacttataactgggactgggatgcttttgatgtgtggggccaagggacagtggtcaccgtctcttca

SEQ ID NO: 12929 - DNA, 349 bp, Homo sapiens
  source 1..349: mol_type = other DNA
tgtagcctctggattctcctttagcagctattcgatgacgtgggtccgccaggctccagggaaggggccggaatgggtctcagttttttatagcggttttagtcatgctcgtggcgccgactatgcagactccgtgaagggccggttcaccgtctccagagataattccaagaacacactgtatctgcaaatgaacagcctgcgagccgaggacacggccgtatattattgtgcgaaactcgtaacttataactgggactgggatgcttttgatgtgtggggccaagggacagtggtcaccgtctcttcagacgtctggggccaagggaccacggtcaccgtctcctca

SEQ ID NO: 12930 - DNA, 310 bp, Homo sapiens; identical to SEQ ID NO: 12925
  source 1..310: mol_type = other DNA

SEQ ID NO: 12931 - DNA, 310 bp, Homo sapiens
  source 1..310: mol_type = other DNA
tgtagcctctggattctcttttagcagctattcgatgacgtgggtccgccaggctccagggaaggggccggaatgggtctcagttttttatagcggttttagtcatgctcgtggcgccgactatgcagactccgtgaagggccggttcaccgtctccagagataattccaggaacacactgtatctgcaaatgaacagcctgcgagccgaggacacggccgtatattattgtgcgaaactcgtaacttataactgggactgggatgcttttgatgtgtggggccaagggacagtggtcaccgtctcttca

SEQ ID NO: 12932 - DNA, 310 bp, Homo sapiens
  source 1..310: mol_type = other DNA
tgtagcctctggattttcctttagcagctattcgatgacgtgggtccgccaggctccagggaaggggccggaatgggtctcagttttttatagcggttttagtcatgctcgtggcgccgactatgcagactccgtgaagggccggttcaccgtctccagagataattccaagaacacactgtatctgcaaatgaacagcctgcgagccgaggacacggccgtatattattgtgcgaaactcgtaacttataactgggactgggatgcttttgatgtgtggggccaagggacagtggtcaccgtctcttca

SEQ ID NO: 12933 - DNA, 334 bp, Homo sapiens
  source 1..334: mol_type = other DNA
tgtagcctctggattctcctttagcagctattcgatgacgtgggtccgccaggctccagggaaggggccggaatgggtctcagttttttatagcggttttagtcatgctcgtggcgccgactatgcagactccgtgaagggccggttcaccgtctccagagataattccaagaacacactgtatctgcaaatgaacagcctgcgagccgaggacacggccgtatattattgtgcgaaactcgtaacttataactgggactgggatgcttttgatgtgtggggccaagggacagtggtcaccgtctcttcagggaccacggtcaccgtctcctca

SEQ ID NO: 12934 - DNA, 286 bp, Homo sapiens
  source 1..286: mol_type = other DNA
tacagcctctggattcacctttagtgactatgccatgacctgggtccgccagactctagggcaggggctggagtgggtctcatctatcagtgaaactggtggtggcaggttctacgcagactccgtgaagggccggttcaccatctccagagacgattccaagaacacactgtatctgcaaatgaacagcctgagagccgacgacacggccatatattactgtgtgaaagatcgacttcgcaacggtgactactggggccagggaaccctggtctccgtctcctca

SEQ ID NO: 12935 - DNA, 286 bp, Homo sapiens
  source 1..286: mol_type = other DNA
tgcagcctctggattcacctttagcacctatgccatgacctgggtccgccagactccagggatggggctggagtgggtcgcaagtattagcggcggtggtggtggcacattctacgcggagtccgtgaagggccggttcatcatctccagagacaattccaagaacacgctgtatctgcaaatgaacagccttagagtcgacgacacggccgtatattactgtgtgaaagatcgactacgtaacggagactactggggccagggaaccctggtcaccgcctcctca

SEQ ID NO: 12936 - DNA, 304 bp, Homo sapiens
  source 1..304: mol_type = other DNA
tacagcctctggtggattcaccctcagtaactctgtcatgcactgggtccgccaggctccaggcaaggggctggagtgggcggcagttatatcagaagatggacgtcatcaaaactatgcagattccgtgaagggccgattcaccttctccagagacaatcccaagaacaccctttttctgcaaatgaacaacctgacacctgaggacacggctgtgtattactgtgcgaagaaaggcggcggcagtgggtcttatgactactttgactactggggccagggagccctggtcaccgtctcctca

SEQ ID NO: 12937 - DNA, 301 bp, Homo sapiens
  source 1..301: mol_type = other DNA
tgcagcctctggattaacgttcagtagagaagtaatgcattgggtccgccaggctccaggcaagggactggagtggacggcagttatatcagaagatggaacttatcaacgccagacagactccgtgaagggccgattcaccgtctccaaagacaattccaagaacacaatggatctccaaatgaacagcctgcgacccgaggacacggctgtctattactgtgcgaaaaaaggtggtggcagtggctcgtacgactactttgactactggggccagggaaccctggtcaccgtgtcatcc

SEQ ID NO: 12938 - DNA, 301 bp, Homo sapiens
  source 1..301: mol_type = other DNA
tgcagcctctggattaacgttcagtagggaagttatgcattgggtccgccaggctccaggcaagggactggagtggacggcagttatatcagaagatggaagttatcaacgccagacagactccgtgaagggccgattcaccgtctccaaagacaattccaagaacacgatggatctccaaatgaacagcctgcgacccgaggacacggctgtctattactgtgcgaaaaaaggtggtggcagtggctcgtacgactactttgactactggggccagggaaccctggtcaccgtgtcatcc

SEQ ID NO: 12939 - DNA, 310 bp, Homo sapiens
  source 1..310: mol_type = other DNA
tgcagcctctggattctctggattcaacttcagtaggcatgttatgcattgggtccgccaggctccaggcaagggactggagtggatggcagttatatcagaagatggaagttatcaacgctacagagagtccgtgaagggccgattcaccttctccagagacaattccaagaacacgctttctctgcaaatgaacagcctgagacccgaggacacggctgtgtattattgtgcgaaaaaaggtggtggcagtggctcgtacgactactttgactactggggccagggagccctggtcatcgtgtcatca

SEQ ID NO: 12940 - DNA, 301 bp, Homo sapiens
  source 1..301: mol_type = other DNA
tgcagcctctggatttacgttcagtagtcaagttatgcattgggtccgccaggctccaggcaagggactggagtggacggtagttatatcagaagatggaacttatcaacgctacacagactccgtgaagggccgattcaccgtctccagagacaattccaagaacacgatttatctgcaaatgaacagcctgagacccgaggacacggctgtgtattactgtgcgaaaaaaggtggtggcagtggctcgtacgactactttgactactggggccagggaaccctggtcaccgtgtcatcc

SEQ ID NO: 12941 - DNA, 295 bp, Homo sapiens
  source 1..295: mol_type = other DNA
tgcagcctctggatacgcctttggcacccacgccatgagctgggtccgccaggctccagggaaggggctggagtgggtctcacttattagtgctagtggtaccaacacatactacgcagactccgtgaagggccggttcaccatctccagagacgtgtccaagatcacgctgtatttgcaaatgaacagcctgagacccgaggacacggccctatactactgtgcgaaagatgttagggggggaggcgggggtatggacgtctggggccaagggaccacggtcatcgtctcctca

SEQ ID NO: 12942 - DNA, 295 bp, Homo sapiens
  source 1..295: mol_type = other DNA
tgcagcctctggactcacctttggcacctatgccatgagctgggtccgccaacctccagggaaggggctggaatgggtctcaactatcagtggtagtggttataacacatggtacgcagactccgtgaagggccggttcaccatctccagagacatttccaagaacacggtgtatctgcaaatgaacagcctgagagccgacgacacggccgtatatttctgtgcgaaagatgtccggggggggggaggaggcatggacgtctggggcctagggaccacggtcaccgtctcctca

SEQ ID NO: 12943 - DNA, 295 bp, Homo sapiens
  source 1..295: mol_type = other DNA
tgcagcctctggactcacctttggcacctatgccatgagctgggtccgccaacctccagggaaggggctggaatgggtctcaactatcagtggtagtggttataacacatggtacgcagactccgtgaagggccggttcaccatctccagagacatttccaagaacacggtgtatctgcaaatgaacagcctgagagccgacgacacggccgtatattactgtgcgaaagatgtccggggggggggaggaggcatggacgtctggggcctagggaccacggtcaccgtctcctca

SEQ ID NO: 12944 - DNA, 295 bp, Homo sapiens
  source 1..295: mol_type = other DNA
tgcaacctctggactcacctttggcacctatgccatgagctgggtccgccaacctccagggaaggggctggagtgggtctcacttatcagtggtaatggttataatacatggtacgcagactccgtgaagggccggttcaccatctccagagacatttccaagaacacggtgtatctgcaaatgaacagcctgagagccgacgacacggccgaatattactgtgcgaaagatgtccggggggggggaggaggcatggacgtctggggcctagggacaacggtcaccgtgacctca

SEQ ID NO: 12945 - DNA, 295 bp, Homo sapiens
  source 1..295: mol_type = other DNA
tgcagcctctggactcacctttggcacctatgccatgagctgggtccgccaacctccagggaaggggctggaatgggtctcaactatcagtggtagtggttataacacatggtacgcagactccgtgaagggccggttcaccatctccagagacatttccaagaacacggtgtatctgcaaatgaacagcctgagagccgacgacacggccgtttattactgtgcgaaagatgtccggggggggggaggaggcatggacgtctggggcctagggaccacggtcaccgtctcctca

SEQ ID NO: 12946 - DNA, 295 bp, Homo sapiens
  source 1..295: mol_type = other DNA
tgaagcctctggattcacatttggcacctatgccatgagctgggtccgccaggctccagggaaggggctggagtggctctcgcttattagtggtagtggtgttaacacatactacgcagactccgtgaagggccggttcaccatctccagagacattaccaagaacacgctgtatctgcaaatgaacaccctgagagccgaggacacggccgtatattactgtgcgaaagatgttcgggggggaggcgggggtatggacgtctggggccaagggaccacggtcaccgtcgcctca

SEQ ID NO: 12947 - DNA, 282 bp, Homo sapiens
  source 1..282: mol_type = other DNA
gcttctggatacaccttcactacctgtgctatgcattgggtgcgccaggcccccggacaaaggcttgagtggatgggatggatcaacgctggcaatggtaacacaaaatattcacagaagttccagggcagagtcaccattaccagggacacatccgcgagcacagcctacatggagttgagcagcctgagatctgaagacacggctgtgtattactgtgcgaaaagcagcagcgattcctttgactactggggccagggaaccctggtcaccgtctcctca

SEQ ID NO: 12948 - DNA, 282 bp, Homo sapiens
  source 1..282: mol_type = other DNA
gcctctggatacaccttcactacctgtgctatgcattgggtgcgccaggcccccggacaaaggcttgagtggatgggatggatcaacgctggcaatggtaacacaaaatattcacagaagttccagggcagagtcaccattaccagggacacatccgcgagtacagcctacatggagctgagcagtctgagatctgaagacacggctgtgtattactgtgcgaagagtagcagtgattcgtttgactactggggccagggaaccctggtcaccgtctcctca

SEQ ID NO: 12949 - DNA, 295 bp, Homo sapiens
  source 1..295: mol_type = other DNA
cagagtctctaacggctccatcagtggtaactcttggagttggattcggcaggccccagggaagggactggaatggattggctatatgtcttatactggctataccaactacaacccctccttcaagagtcggatcaccatttcactagacatgtccgacagtcagttctccctgacgttgaggtctgtgaccgacacagatactgccatatattactgtgcgagacattcattaagtcagacttcatcctggttcgacccctggggccagggaaccctggtcaccgtctcctca

SEQ ID NO: 12950 - DNA, 295 bp, Homo sapiens
  source 1..295: mol_type = other DNA
cagggtctctaatggtaccatcggtggtagctattggagttggattcggcagcccccagggaagggactggagtggattggctatgtgtcttacactggctatgtcaggtataatccctccttcaagagccggatcaccatttcactagacacgtccgacagtcagttctccttgaagttggggtctgtaaccgacacagatagtgccacctattactgtgcgagacattcattaagtcagacttcatcgtggttcgacccctggggccagggaaccctggtcagcgtctcctca

SEQ ID NO: 12951 - DNA, 295 bp, Homo sapiens
  source 1..295: mol_type = other DNA
cagagtctctaacggctccatcagtggtaactcttggagttggattcggcaggccccagggaagggactggaatggattggctatatgtcttatactggctataccaactacaacccctccttcaagagtcggatcaccttttcactagacatgtccgacagtcagttctccctgacgttgaggtctgtgaccgacacagatactgccatatattactgtgcgagacattcattaagtcagacttcatcctggttcgacccctggggccggggaaccctggtcaccgtctcctca

SEQ ID NO: 12952 - DNA, 295 bp, Homo sapiens
  source 1..295: mol_type = other DNA
cagagtctctaatggctccatcagtggtaaccattggagttggattcggcagcccccagggaagggactggagtggattggctatatgtcttacactggctataccaaatataactcctccttcaagagtcggatcaccatttcactagacacgtccgagagtcagttctccctgaagttgaggtctgtgaccgacgcagatagtgccacctattattgtgcgagacattcgttaagtcagacttcatcgtggttcgacccctggggccagggaacgctggtcaccgtctccgca

SEQ ID NO: 12953 - DNA, 295 bp, Homo sapiens
  source 1..295: mol_type = other DNA
cagagtctctaacggctccatcagtggtaactcttggagttggattcggcaggccccagggaagggactggaatggattggctatatgtcttatactggctatactaactacaacccctccttcaagagtcggatcaccttttcactagacatgtccgacagtcagttctccctgacgttgaggtctgtgaccgacacagatactgccatatattactgtgcgagacattcattaagtcagacttcatcctggttcgacccctggggccggggaaccctggtcaccgtctcctca

SEQ ID NO: 12954 - DNA, 295 bp, Homo sapiens
  source 1..295: mol_type = other DNA
cagagtctctaacggctccatcagtggtaacctatggagttggattcggcaggccccagggaagggactggaatggattggctatatgtcttatactggctataccaactacaacccctccttcaagagtcggatcaccatttcactagacatgtccgacagtcagttctccctgacgttgaggtctgtgaccgacacagatactgccatctattactgtgcgagacattcattaagtcagacttcatcctggttcgacccctggggccagggaaccctggtcaccgtctcctca

SEQ ID NO: 12955 - DNA, 295 bp, Homo sapiens
  source 1..295: mol_type = other DNA
cagagtctctaacggctccatcagtggtaactcttggagttggattcggcaggccccagggaagggactggaatggattggctatatgtcttatactggctataccaactacaacccctccttcaagggtcgcatcaccatttcactagacatgtccgacagtcacttctccctgacgttgaggtctgtgaccgacacagatactgccatatattactgtgcgagacattcattaagtcagacttcatcctggttcgacccctggggccagggaaccctggtcaccgtctcctca

SEQ ID NO: 12956 - DNA, 295 bp, Homo sapiens
  source 1..295: mol_type = other DNA
cagagtctctaacggctccatcagtgctaactcttggagttggattcggcaggccccagggaagggactggaatggattggctatatgtcttatactggctataccaactacaacccctccttccagagtcggatcaccatttcactagacatgtccgacagtcagttctccctgacgttgaggtctgtgaccgacacagatactgccatatattactgtgcgagacattcattgagtcagacttcatcctggttcgacccctggggccagggaaccctggtcaccgtctcctca

SEQ ID NO: 12957 - DNA, 295 bp, Homo sapiens
  source 1..295: mol_type = other DNA
cagactctctaacggctccatcagtggtaactcttggagttggattcggcaggccccagggaagggactggaatggattggctatatgtcttatactggctataccaactacaacccctccttcaagagtcggatcaccatttcactagacatgtccgacagtcagttctccctgacgttgaggtctgtgaccgacacagatactgccatatattactgtgcgagacattcattaagtcagacttcatcctggttcgacccctggggccagggaaccctggtcaccgtctcctca

SEQ ID NO: 12958 - DNA, 295 bp, Homo sapiens
  source 1..295: mol_type = other DNA
cagagtctctaacggctccatcagtggtaactcttggagttggattcggcaggccccagggaagggactggaatggattggctatatgtcttatactggctataccaactacaacccctccttcaagagtcgggtctccttttcactagacatgtccgacagtcagttctccctgacgttgaggtctgtgaccgacacagatactgccatatattactgtgcgagacattcattaagtcagacttcatcctggttcgacccctggggccagggaaccctggtcaccgtctcctca

SEQ ID NO: 12959 - DNA, 295 bp, Homo sapiens
  source 1..295: mol_type = other DNA
cagagtctctaacggctccatcagtggtaactcttggagttggattcggcaggccccagggaagggactggaatggattggctatatgtcttatactggctataccaagtacaacccctccttcaagagtcggatcaccatttcactagacatgtccgacagtcagttctccctgacgttgaggtctgtgaccgacacagatactgccatatattactgtgcgagacattcattaagtcagacttcatcctggttcgacccctggggccagggaaccctggtcaccgtctcctca

SEQ ID NO: 12960 - DNA, 295 bp, Homo sapiens
  source 1..295: mol_type = other DNA
cagagtctctaacggctccatcagtggtaactcttggagttggattcggcaggccccagggaagggactggaatggattggctatatgtcttatactggctataccaagtacaacccctccttcaagagtcggatcaccttttcactagacatgtccgacagtcagttctccctgacgttgaggtctgtgaccgacacagatactgccatatattactgtgcgagacattcattaagtcagacttcatcctggttcgacccctggggccagggaaccctggtcaccgtctcctca

SEQ ID NO: 12961 - DNA, 295 bp, Homo sapiens
  source 1..295: mol_type = other DNA
cagagtctctaatggctccgtcagtggtaactattggagttggattcggcagcccccagggaagggactggagtggattggctgtatgtcttatactggttataccaggtacaattcctctttcaagagtcgggtcaccatttcactagacacgtccgagagtcagttctccctgaggttgacgtctgtgaccgacacagatagtgccatctattattgtgcgagacattcattaagtcagacttcatcgtggttcgacccctggggccagggatccctggtcaccgtctcctca

SEQ ID NO: 12962 - DNA, 295 bp, Homo sapiens
  source 1..295: mol_type = other DNA
cagagtctctaatggctccatcagtggtaaccattggagttggattcggcagcccccagggaagggactggagtggattggctatatgtcttacactggctataccaaatataactcctccttcaagagtcggatcaccatttcactagacacgtccgagagtcagttctccctgaagttgaggtctgtgaccgacgcagatagtgccacctatttttgtgcgagacattcgttaagtcagacttcatcgtggttcgacccctggggccggggaacgctggtcaccgtctccgca

SEQ ID NO: 12963 - DNA, 295 bp, Homo sapiens
  source 1..295: mol_type = other DNA
cagagtctctaacggctccatcagtggtaactcttggagttggattcggcaggccccggggaagggactggaatggattggctatatgtcttatactggctataccaactacaacccctccttcaagagtcggatcaccttttcactagacatgtccgacagtcagttctccctgacgttgaggtctgtgaccgacacagatactgccatatattactgtgcgagacattcattaagtcagacttcatcctggttcgacccctggggccagggaaccctggtcaccgtctcctca

SEQ ID NO: 12964 - DNA, 295 bp, Homo sapiens
  source 1..295: mol_type = other DNA
cagagtctctaatggctccgtcagtggtaactattggagttggattcggcagcccccagggaagggactggagtggattggctgtatgtcttatactggttataccaagtacaattcctctttcaagagtcggatcaccatttcactagacacgtccgagagtcagttctccctgaggttgacgtctgtgaccgacacagatagtgccatgtattactgtgcgagacattcattaagtcagacttcatcgtggttcgacccctggggccagggaaccctggtcaccgtctcctca

SEQ ID NO: 12965 - DNA, 295 bp, Homo sapiens
  source 1..295: mol_type = other DNA
cagactctctaacggctccatcagtggtaactcttggagttggattcggcgggccccagggaagggactggaatggattggctatatgtcttatactggctataccaactacaacccctccttcaagagtcggatcaccatttcactagacatgtccgacagtcagttctccctgacgttgaggtctgtgaccgacacagatactgccatatattactgtgcgagacattcattaagtcagacttcatcctggttcgacccctggggccagggaaccctggtcaccgtctcctca

SEQ ID NO: 12966 - DNA, 289 bp, Homo sapiens
  source 1..289: mol_type = other DNA
cagagtctctaacggctccatcagtggtaactcttggagttggattcggcaggccccagggaagggactggaatggattggctatatgtcttatactggctatactaacccctccttcaagagtcggatcaccttttcactagacatgtccgacagtcagttctccctgacgttgaggtctgtgaccgacacagatactgccatatattactgtgcgagacattcattaagtcagacttcatcctggttcgacccctggggccggggaaccctggtcaccgcctcctca

SEQ ID NO: 12967 - DNA, 295 bp, Homo sapiens
  source 1..295: mol_type = other DNA
cagggtctctaatggtaccatcggtggtagctattggagttggattcggcagcccccagggaagggactggagtggattggctatgtgtcttacactggctatgtcaggtataatccctccttcaagagccggatcaccatttcactagacacgtccgacagtcagttctccttgaagttggggtctgtaaccgacacagatagcgccacctattactgtgcgagacattcattaagtcagacttcatcgtggttcgacccctggggccagggaaccctggtcagcgtctcctca

SEQ ID NO: 12968 - DNA, 295 bp, Homo sapiens
  source 1..295: mol_type = other DNA
cagagtctctaatggctccatcaatggtaaccattggagttggattcggcagcccccagggaagggactggagtggattggctatatgtcttacactggctataccaaatataactcgtccttcaagagtcggatcaccatttcactagacacctccgagaatcagttctccctgaagttgaagtctgtgaccgacacagatagtgccacctattactgtgcgagacattcgttaagtcagacttcatcgtggttcgacccctggggccagggaaccctggtcaccgtctccgca

SEQ ID NO: 12969 - DNA, 295 bp, Homo sapiens
  source 1..295: mol_type = other DNA
cagggtctctaatggtaccatcggtggtagctattggagttggattcggcagcccccagggaagggactggagtggattggctatgtgtcttacactggctatgtcaggtataatccctccttcaagagccggatcaccatttcactagacacgtccgacagtcagttctccttgaagttggggtctgtaaccgacacagatagtgccacctattactgtgcgagacattcattaagtcagacttcatcgtggttcgacccctggggccaaggaaccctggtcagcgtctcctca

SEQ ID NO: 12970 - DNA, 295 bp, Homo sapiens
  source 1..295: mol_type = other DNA
cagagtctctaacggctccatcagtggtaactcttggagttggattcggcaggccccagggaagggactggaatggattggctatatgccttatactggctataccaactacaacccctccttcaagagtcggatcaccttttcactagacatgtccgacagtcagttctccctgacgttgaggtctgtgaccgacacagatactgccatatattactgtgcgagacattcattaagtcagacttcatcctggttcgacccctggggccggggaaccctggtcaccgtctcctca

SEQ ID NO: 12971 - DNA, 295 bp, Homo sapiens
  source 1..295: mol_type = other DNA
cagggtctctaatggtaccatcggtggtagctattggagttggattcggcagcccccagggaagggactggagtggattggctatgtgtcttacactggctatgtcaggtataatccctccttcaagagccggatcaccacttcactagacacgtccgacagtcagttctccttgaagttggggtctgtaaccgacacagatagtgccacctattactgtgcgagacattcattaagtcagacttcatcgtggttcgacccctggggccagggaaccctggtcagcgtctcctca

SEQ ID NO: 12972 - DNA, 295 bp, Homo sapiens
  source 1..295: mol_type = other DNA
cagagtctctaacggctccatcagtggcaacctatggagttggattcggcaggccccagggaagggactggaatggattggctatatgtcttatactggctataccaactacaacccctccttcaagagtcggatcaccatttcactagacatgtccgacagtcagttctccctgacgttgaggtctgtgaccgacacagatactgccatctattactgtgcgagacattcattaagtcagacttcatcctggttcgacccctggggccagggaaccctggtcaccgtctcctca

SEQ ID NO: 12973 - DNA, 295 bp, Homo sapiens
  source 1..295: mol_type = other DNA
cagagtctctaacggctccatcagtggtaactcttggagttggattcggcaggccccagggaagggactggaatggattggctatatgtcttatgctggctataccaactacaacccctccttcaagggtcgcatcaccatttcactagacatgtccgacagtcacttctccctgacgttgaggtctgtgaccgacacagatactgccatatattactgtgcgagacattcattaagtcagacttcatcctggttcgacccctggggccagggaaccctggtcaccgtctcctca

SEQ ID NO: 12974 - DNA, 295 bp, Homo sapiens
  source 1..295: mol_type = other DNA
cagggtctctaatggtaccatcggtggtagctattggagttggattcggcagcccccagggaagggactggagtggattggctgtgtgtcttacactggctatgtcaggtataatccctccttcaagagccggatcaccatttcactagacacgtccgacagtcagttctccttgaagttggggtctgtaaccgacacagatagtgccacctattactgtgcgagacattcattaagtcagacttcatcgtggttcgacccctggggccagggaaccctggtcagcgtctcctca

SEQ ID NO: 12975 - DNA, 295 bp, Homo sapiens
  source 1..295: mol_type = other DNA
cagagtctctaacggctccatcagtggtaactcttggagttggattcggcaggccccagggaagggactggaatggattggctatatgtcttatactggctatactaactacaacccctccttcaagagtcgggtctccttttcactagacatgtccgacagtcagttctccctgacgttgaggtctgtgaccgacacagatactgccatatattactgtgcgagacattcattaagtcagacttcatcctggttcgacccctggggccagggaaccctggtcaccgtctcctca

SEQ ID NO: 12976 - DNA, 295 bp, Homo sapiens
  source 1..295: mol_type = other DNA
cagggtctctaatggtaccatcggtggtagctattggagttggattcggcagcccccagggaagggactggagtggattggctatgtgtcttacactggctatgtcaggtataatccctccttcaagagccggatcaccatttcactagacacatccgacagtcagttctccttgaagttggggtctgtaaccgacacagatagtgccacctattactgtgcgagacattcattaagtcagacttcatcgtggttcgacccctggggccagggaaccctggtcagcgtctcctca

SEQ ID NO: 12977 - DNA, 295 bp, Homo sapiens
  source 1..295: mol_type = other DNA
cagggtctctaatggtaccgtcggtggtagctattggagttggattcggcagcccccagggaagggactggagtggattggctatgtgtcttacactggctatgtcaggtataatccctccttcaagagccggatcaccatttcactagacacgtccgacagtcagttctccttgaagttggggtctgtaaccgacacagatagtgccacctattactgtgcgagacattcattaagtcagacttcatcgtggttcgacccctggggccagggaaccctggtcagcgtctcctca

SEQ ID NO: 12978 - DNA, 295 bp, Homo sapiens
  source 1..295: mol_type = other DNA
cagggtctctaatggtaccatcggtggtagctattggagttggattcggcagcccccagggaagggactggagtggattggctatgtgtcttacactggctatgtcaggtataatccctccttcaagagccggatcaccatttcactagacacgtccgacggtcagttctccttgaagttggggtctgtaaccgacacagatagtgccacctattactgtgcgagacattcattaagtcagacttcatcgtggttcgacccctggggccagggaaccctggtcagcgtctcctca

SEQ ID NO: 12979 - DNA, 283 bp, Homo sapiens
  source 1..283: mol_type = other DNA
cgctgtctatggtgggtccttcagtggttactactggagctggatccgccagcccccagggaaggggctggagtggattggggaaatcaatgatagtagaagcaccaactacaacccgtccctcaagagtcgagtcaccatatcagtagacacgtccaagaaccagttctccctgaagctgagctctgtgaccgccgcggacacggctgtgtattactgtgcgagaaagactgagcagctctggcagtactggggccagggaaccctggtcaccgtctcctca

SEQ ID NO: 12980 - DNA, 281 bp, Homo sapiens
  source 1..281: mol_type = other DNA
ctgtctatggtgggtccttcagtggttactactggagctggatccgccagcccccagggaaggggctggagtggattggggaaatcaatgatagtagaagcaccaactacaacccgtccctcaagagtcgagtcaccatatcagtagacacgtccaagaaccagttctccctgaagctgagctctgtgaccgccgcggacacggctgtgtattactgtgcgagaaagactgagcagctctggcagtactggggccagggaaccctggtcaccgtctcctca

SEQ ID NO: 12981 - DNA, 283 bp, Homo sapiens
  source 1..283: mol_type = other DNA
cgctgtctatggtgggtccttcagtggttactactggagctggatccgccagcccccagggaaggggctggagtggattggggaaatcaatgatagtagaagcaccaactacaacccgtcccccaagagtcgagtcaccatatcagtagacacgtccaagaaccagttctccctgaagctgagctctgtgaccgccgcggacacggctgtgtattactgtgcgagaaagactgagcagctctggcagtactggggccagggaaccctggtcaccgtctcctca

SEQ ID NO: 12982 - DNA, 283 bp, Homo sapiens
  source 1..283: mol_type = other DNA
cgctgtctatggtgggtccttcagtggttactactggagctggatccgccagcccccagggaaggggctggagcggattggggaaatcaatgatagtagaagcaccaactacaacccgtccctcaagagtcgagtcaccatatcagtagacacgtccaagaaccagttctccctgaagctgagctctgtgaccgccgcggacacggctgtgtattactgtgcgagaaagactgagcagctctggcagtactggggccagggaaccctggtcaccgtctcctca

SEQ ID NO: 12983 - DNA, 283 bp, Homo sapiens
  source 1..283: mol_type = other DNA
cgctgtctatggtgggtccttcagtggttactactggagctggatccgccagccaccaggaaaggggctggagtggattggggagatcaatcatggtggaggcaccaattacaacccgtccctcaagagtcgagtcgccatatcactagccacgtccaagaaccagttctccctgaagctgaactctgtgaccgccgcggacacggctgtgtattactgtgcgagaaagactgagcagctctggcagtactggggccagggaaccctggtcaccgtctcctca

SEQ ID NO: 12984 - DNA, 283 bp, Homo sapiens
  source 1..283: mol_type = other DNA
cgctgtctatggtgggtccttcagtggttactactggagctggatccgccagcccccagggaaggggctggagtggattggggaaatcaatcatagtagaagaaccaactacaacccgtccctcaagagtcgagtcaccatatcagtagacacgtccaagaaccagttttccctgaagctgagctctgtgaccgccgcggacacggctgtgtattactgtgcgagaaagactgagcagctctggcagtactggggccagggaaccctggtcaccgtctcctca

SEQ ID NO: 12985 - DNA, 283 bp, Homo sapiens; identical to SEQ ID NO: 12979
  source 1..283: mol_type = other DNA

SEQ ID NO: 12986 - DNA, 283 bp, Homo sapiens; identical to SEQ ID NO: 12982
  source 1..283: mol_type = other DNA

SEQ ID NO: 12987 - DNA, 283 bp, Homo sapiens
  source 1..283: mol_type = other DNA
cgctgtctatggcgggtccttcagtggttactactggagctggatccgccagcccccagggaaggggctggagtggattggggaaatcaatgatagtagaagcaccaactacaacccgtccctcaagagtcgagtcaccatatcagtagacacgtccaagaaccagttctccctgaagctgagctctgtgaccgccgcggacacggctgtgtattactgtgcgagaaagactgagcagctctggcagtactggggccagggaaccctggtcaccgtctcctca

SEQ ID NO: 12988 - DNA, 304 bp, Homo sapiens
  source 1..304: mol_type = other DNA
tgaagcctctggattcaccattagtaggtacgccatgagttgggtccgccagcctccagggaaggggctggagtgggtctcaattattactggtggtggtggtaccacatactacgcagactccgtgaagggccgattcaccatctccagagacaattataagaacacactgtttctgcaaatgaacggcctgagggccgaggacacggccatatattactgtgcgaaaaaccccacccctgatatgacaacatctggctggttcgacccctggggccagggaaccctggtcaccgtctcctca

SEQ ID NO: 12989 - DNA, 304 bp, Homo sapiens
  source 1..304: mol_type = other DNA
tgaaccctctggattcaccattagtaggtacgccatgagttgggtccgccagcctccagggaaggggctggagtgggtctcaattattactggtggtggtggtaccacatactacgcagactccgtgaagggccgattcaccatctccagagacaattataagaacacactgtttctgcaaatgaacggcctgagggccgaggacacggccatatattactgtgcgaaaaaccccacccctgatatgacaacatctggctggttcgacccctggggccagggaaccctggtcaccgtctcctca

SEQ ID NO: 12990 - DNA, 302 bp, Homo sapiens
  source 1..302: mol_type = other DNA
aagcctctggattcaccattagtaggtacgccatgagttgggtccgccagcctccagggaaggggctggagtgggtctcaattattactggtggtggtggtaccacatactacgcagactccgtgaagggccgattcaccatctccagagacaattataagaacacactgtttctgcaaatgaacggcctgagggccgaggacacggccatatattactgtgcgaaaaaccccacccctgatatgacaacatctggctggttcgacccctggggccagggaaccctggtcaccgtctcctca

SEQ ID NO: 12991 - DNA, 304 bp, Homo sapiens
  source 1..304: mol_type = other DNA
tgaagcctctggattcaccattagtaggtacgccatgagttgggtccgccagcctccagggaaggggctggagtgggtctcaattattactggtggtggtggtaccacatactacgcagactccgtgaagggccgattcaccatctccagagacaattataagaacacactgtttctgcaaatgaacggcctgagggccgaggacacggccatatattactgtgcgaaaaaccccacccctgatatgacaacctctggctggttcgacccctggggccagggaaccctggtcaccgtctcctca

SEQ ID NO: 12992 - DNA, 304 bp, Homo sapiens
  source 1..304: mol_type = other DNA
tgaagcctctggattcaccattagtaggtacgccatgagttgggtccgccagcctccagggaaggggctggagtgggtctcaactattactggtggtggtggtaccacatactacgcagactccgtgaggggccgattcaccatctccagagacaattataagaacacagtgtttctgcaaatgagcggcctgagggccgcggacacggccatatactactgtgcgaaaaaccccacccctgatatgacaacatctggctggttcgacccctggggccagggaaccctggtcaccgtctcctca

SEQ ID NO: 12993 - DNA, 304 bp, Homo sapiens
  source 1..304: mol_type = other DNA
tgaagcctctggattcaccattagtaggtacgccatgagttgggtccgccagcctccagggaaggggctggagtgggtctcaattattactggtggtggtggtaccacatactacgcagactccgtgaagggccgattcaccatctccagagacaattataagaacacactgtttctgcaaatgaacggcctgagggccgaggacacggccatatattactgtgcgaaaaaccccacccctgatatgaccacatctggctggttcgacccctggggccagggaaccctggtcaccgtctcctca

SEQ ID NO: 12994 - DNA, 304 bp, Homo sapiens
  source 1..304: mol_type = other DNA
tgaagcctctggattcaccattagtaggtacgccatgagttgggtccgccagcctccagggaaggggctggagtgggtctcaattattactggtggtggtggtaccacatactacgcagactccgtgaagggccgattcaccatctctagagacaattataagaacacactgtttctgcaaatgaacggcctgagggccgaggacacggccatatattactgtgcgaaaaaccccacccctgatatgacaacatctggctggttcgacccctggggccagggaaccctggtcaccgtctcctca

SEQ ID NO: 12995 - DNA, 304 bp, Homo sapiens
  source 1..304: mol_type = other DNA
tggagcctctggattcaccattagtaggtacgccatgagttgggtccgccagcctccagggaaggggctggagtgggtctcaattattactggtggtggtggtaccacatactacgcagactccgtgaagggccgattcaccatctccagagacaattataagaacacactgtttctgcaaatgaacggcctgagggccgaggacacggccatatattactgtgcgaaaaaccccacccctgatatgacaacatctggctggttcgacccctggggccagggaaccctggtcaccgtctcctca

SEQ ID NO: 12996 - DNA, 289 bp, Homo sapiens
  source 1..289: mol_type = other DNA
tgcagcctctacattcacctttgctgactcttggatgagctgggtccgccaggctccagggaagggactggagtgggtggccaacataaagccagatggaagtgaccaatactatgcggactctgtgaagggccgattcaccatctccagagacaaccccagcaactcattgtatctgcaaatgaagttcctgggagccgaggacacggccctgtattactgtgcgagagggggccggactggtacttttgatatttggggcctggggacaatggtcaccgtttcttca

SEQ ID NO: 12997 - DNA, 289 bp, Homo sapiens
  source 1..289: mol_type = other DNA
tgcagcctctacattcacctttcctgactattggatgggctgggtccgccaggctccagggaagggactggagtggctggccaacataaagccagatggaagtgaccaatactatgcggactctgtggcgggccgattcaccatctccagagacaaccccaacaactcattgtttctacaaatgaagttcctgggagccgaggacacggccctatattactgcgcgagagggggccggactggtacttttgatatttggggcctggggacaatggtcaccgtttcctca

SEQ ID NO: 12998 - DNA, 289 bp, Homo sapiens
  source 1..289: mol_type = other DNA
tacagcctctgcattcacccttggtgactattggatgagttgggtccgccaggctccagggaaggggctggagtgggtggccaacataaagccagatggaagtgagaagtactatgtggactctgtgacgggccgattcaccatctccagagacaaccccaacaactcactttatttacaaatgaagttcctgggagccgaagacacggccctctatttctgtgcgagagggggccggactggtaccttcgatatctggggccaggggacaatggtcatcgtttcttca

SEQ ID NO: 12999 - DNA, 290 bp, Homo sapiens
  source 1..290: mol_type = other DNA
tgcagcctctacattcacctttgctgactcttggatgagctgggtccgccaggctccagggaagggactggagtgggtggccaacataaagccagatggaagtgaccaatactatgcggactctgtgaagggccgattcaccatctccagagacaaccccagcaactcattgtatctgcaaatgaagttcctgggagccgaggacacggccctgtattactgtgcgagagggggccggactggtacttttgatatttggggcctggggacaaatggtcaccgtttcttca

SEQ ID NO: 13000 - DNA, 289 bp, Homo sapiens
  source 1..289: mol_type = other DNA
ttcagcgtctacattgatctttgctgactcttggatgagctgggtccgccaggctcctgggaagggactggagtgggtggccaacataaagccagatggaagtgagcaatactatgcggactctgtaaagggccgattcaccatctccagagacaatcccaacaagtcattgggtctgcaaatgaagttcttgggagccgaagacacggccctgtattactgtgcgagagggggccggactggaacttttgatatttggggcctggggactatggtcatcgtttcttca

SEQ ID NO: 13001 - DNA, 289 bp, Homo sapiens
  source 1..289: mol_type = other DNA
tgcagcctctacattcacctttgctgactcttggatgagctgggtccgccaggctccagggaagggactggagtgggtggccaacataaagccagatggaagtgaccaatactatgcggactctgtgaagggccgattcaccatctccagagacaaccccagcaactcattgtatctgcaaatgaagttcctgggagccgaggacacggccctgtgttactgtgcgagagggggccggactggtacttttgatatttggggcctggggacaatggtcaccgtttcttca

SEQ ID NO: 13002 - DNA, 289 bp, Homo sapiens
  source 1..289: mol_type = other DNA
tgcagcctctacattcacctttgctgactcttggatgagctgggtccgccaggctccagggaagggactggagtgggtggccaacataaagccagatggaagtgaccaatactatgcggactctgtgaagggccgattcaccatctccagagacaaccccagcaactcattgtatctgcaaatgaagttcctgggagccgaggacacggccctgtattactgtgcgagagggggccggactggtacttttgatatttggggcctggagacaatggtcaccgtttcttca

SEQ ID NO: 13003 - DNA, 289 bp, Homo sapiens
  source 1..289: mol_type = other DNA
tgcagcctctacattcacctttgctgactcttggatgagctgggtccgccaggctccagggaagggactggagtgggtggccaacataaagccagatggaagtgaccaatactatacggactctgtgaagggccgattcaccatctccagagacaaccccagcaactcattgtatctgcaaatgaagttcctgggagccgaggacacggccctgtattactgtgcgagagggggccggactggtacttttgatatttggggcctggggacaatggtcaccgtttcttca

SEQ ID NO: 13004 - DNA, 289 bp, Homo sapiens
  source 1..289: mol_type = other DNA
tgcagcctctacattcacgtttggtgactattggatgagctgggtccgccaggctccagggaagggactggagtgggtggccaacataaagccagatggaagtgtccaatactctgcggactctgtgaagggccgattcaccatctccagagacaaccccaacaactcattgtatctgcaaatgaagttcctgggagccgaggacacggccctgtattactgtgcgagagggggccggactggaacttttgatatttggggcctggggacaatggtcaccgtttcttca

SEQ ID NO: 13005 - DNA, 289 bp, Homo sapiens
  source 1..289: mol_type = other DNA
tgcagcctccacaatcacctttggtgaccattggatgagctgggtccgccaggctccagggaagggactggagtgggtggccaacataaagccagacggaagtgacaaatattatgcggactctgtggcgggccgattcaccatctccagagacaaccccaacaactcattgtatctgcaaatgaagttcctgggagtcgaggacacggccctctattactgtgcgagagggggccggactggtacttttgatatttggggcctggggacagtggtcaccgtttcttca

SEQ ID NO: 13006 - DNA, 289 bp, Homo sapiens
  source 1..289: mol_type = other DNA
ttcaccgtctacattctcctttgatgactattggatgagctgggtccgccaggctccagggaagggactggagtgggtggccaacataaagccagatggaggtgagcagtactatgcggactctgtaaagggccgattcaccatctccagagacaaccccaagaagtcattggatctgcaaatgaagttcttgggagccgaggacacggccctgtactactgtgcgagagggggccggactggaacttttgatatttggggcctggggactatggtcaccgtttcttca

SEQ ID NO: 13007 - DNA, 289 bp, Homo sapiens
  source 1..289: mol_type = other DNA
cgcagcctctacattcacctttgctgactattggatgagctgggtccgccaggctccagcgaagggactggagtgggtggccaacattaagccagatggaagtgaccaatactatgcggactctgtggtgggccgattcaccatctccagagacaaccccaacaactcattgtttctgcaaatgaagttcctgggagccgaggacacggccctgtattactgtgcgagagggggccggactggtacttttgatatttggggcctggggacaatggtcaccgtttcttca

SEQ ID NO: 13008 - DNA, 289 bp, Homo sapiens
  source 1..289: mol_type = other DNA
tgcaacctctacattcacctttgctgagtattggatgagctgggtccgccaggctccagggaagggactggagtgggtggccaacataaagccggatggaagtgaccaattctatgcggactctgtgaagggccgcttcaccatctccagagacaaccccaataactcattgtttctgcaaatgaagttcctgggagccgaggacacggccctttattactgtgcgagagggggccggactggaacttttgatatttggggcctggggacaatggtcaccgtttcttca

SEQ ID NO: 13009 - DNA, 289 bp, Homo sapiens
  source 1..289: mol_type = other DNA
ttcagcgtctacattcacctttcctgactattggatgagctgggtccgccaggctccagggaagggactggagtgggtggccaacataaagccagatggaagtgaccagtactatgcggactctgtaaagggccgattcaccatctcccgagacaaccccaacaagtcattgcatctgcaattgaagttcttgggagccgaggacacggccctgtattactgtgcgagagggggccggactggaacttttgatatttggggcctggggactatggtcaccgtttcttca

SEQ ID NO: 13010 - DNA, 289 bp, Homo sapiens
  source 1..289: mol_type = other DNA
tgccgcctctacattcacctttggtgactattggatgagctgggtccgccaggctccagggaagggactggagtgggtggccaacataaagccagatggaactgaccaatactatgcggactctgtgaagggccgattcaccatctccagagacaaccccaacaactcattgtttctgcaaatgaagttcctgggagtcgaggatacggccctgtattactgtgcgagagggggccggactggtacttttgacatctggggcctggggacaatggtcagcgtttcttca

SEQ ID NO: 13011 - DNA, 289 bp, Homo sapiens
  source 1..289: mol_type = other DNA
tgcaggctctgcattcacctttaatgagtattggatgagttgggtccgccaggctccagggaagggactggagtgggtggccaacataaagccagatggaagtgagcactactatgcagactctgtgaagggccgattcaccatctccagagacaaccccaacaactcattgtatctgcaaatgaagttcctgggagtcgaggacacggccctctattactgtgcgagagggggccggactggtacttttgatatttggggcctggggacaatggtcactgtttcttca

SEQ ID NO: 13012 - DNA, 289 bp, Homo sapiens
  source 1..289: mol_type = other DNA
tgtagcctctgcattcacctttgctgactattggatgagttgggtccgccaggctccagggaaggggctggagtgggtggccaacataaaacaagatggaagtgagaaatactatgtggagtctgtgaagggccgattcaccatctccagagacaaccccaataactccctgtatctgcaaatgaacttcctgggagccgtcgacacggccgtgtattattgtgcgagagggggccggactggtacttttgatatctggggccaagggacaatggtcaccgtttcttca

SEQ ID NO: 13013 - DNA, 289 bp, Homo sapiens
  source 1..289: mol_type = other DNA
tgcagcctctacattcacgtttggtgactattggatgagctgggtccgccaggctccagggaagggactggagtgggtggccaacataaagccagatggaagtgtccaatactctgtggactctgtgaagggccgattcaccatctccagagacaaccccaacaactcattgtatctgcaaatgaagttcctgggagccgaggacacggccctgtattactgtgcgagagggggccggactggaacttttgatatttggggcctggggacaatggtcaccgtttcttca

SEQ ID NO: 13014 - DNA, 289 bp, Homo sapiens
  source 1..289: mol_type = other DNA
tgcagcctctacattcacctttggtgacttttggatgagctgggtccgccaggctccagggaagggactggagtggctggccaacataaagccagatggaagtgaacaatactatgcggactctgtggagggccggttcaccatctccagagacaaccccagcaactcattgtttctgcaaatgaagttcctgggagccgaggacacggccctttattactgtgcgagagggggccggactggtacttttgatatttggggcctggggacaatggtcaccgtttcttca

SEQ ID NO: 13015 - DNA, 289 bp, Homo sapiens
  source 1..289: mol_type = other DNA
tgcagcctctacattcacgtttggtgactattggatgagctgggtccgccaggctccagggaagggactggagtgggtggccaacataaagccagatggaagtgtccaatactctgcggactctgtgaagggccgattcaccatctccagagacaaccccaacgactcattgtatctgcaaatgaagttcctgggagccgaggacacggccctgtattactgtgcgagagggggccggactggaacttttgatatttggggcctggggacaatggtcaccgtttcttca

SEQ ID NO: 13016 - DNA, 289 bp, Homo sapiens
  source 1..289: mol_type = other DNA
tgcagcctctacattcacgtttggtgactattggatgagctgggtccgccaggccccagggaagggactggagtgggtggccaacataaagccagatggaagtgtccaatactctgcggactctgtgaagggccgattcaccatctccagagacaaccccaacaactcattgtatctgcaaatgaagttcctgggagccgaggacacggccctgtattactgtgcgagagggggccggactggaacttttgatatttggggcctggggacaatggtcaccgtttcttca

SEQ ID NO: 13017 - DNA, 289 bp, Homo sapiens
  source 1..289: mol_type = other DNA
ttcagcgtctacattcacctttgctgactattggatgagctgggtccgccaggctccagggaagggactggagtgggtggccaacataaagccagatggaagtgaccaatactatgcggactctgtaaagggccgattcaccatctccagagacaaccccaacaagtcattgcatctgcaattgaagttcttgggagccgaggacacggccctgtattactgtgcgagagggggccggactggaacttttgatatttggggcctggggactatggtcaccgtttcttca

SEQ ID NO: 13018 - DNA, 289 bp, Homo sapiens
  source 1..289: mol_type = other DNA
tacagcgtctacattcacccttgttgactattggatgagctgggtccgccaggctccagggaaggggctggagtgggtggccaacataaagccagatggaagtgagaaatactatgtggactctgtgaagggccgattcaccatctctagagacaaccccaacaattcattgtatttacaaatgaaattcctgggaggcgaggacacggcccgctatttctgtgcgagagggggccggactggaactttcgatatctggggccaggggaccatggtcaccgtttcttca

SEQ ID NO: 13019 - DNA, 289 bp, Homo sapiens
  source 1..289: mol_type = other DNA
ttcagcgtctacattcacctttggtgactattggatggcctgggtccgccaggctccagggaagggactggagtgggtggccaacataaagccagatggaagtggccaattctatgcggactctgtgaagggccgattcaccatctccagagacaaccccaacaagtcattggatctgcaaatgaagtacttgggagccgaggacacggccctctattactgtgcgagagggggccggactggaacttttgatatttggggcctggggactatggtcaccgtttcttca

SEQ ID NO: 13020 - DNA, 289 bp, Homo sapiens
  source 1..289: mol_type = other DNA
tgcagcctccacaatcacctttggtgaccattggatgagctgggtccgccaggctccagggaagggactggagtgggtggccaacataaagccagatggaagtgaccaatattatgcggactctgtggcgggccgattcaccatctccagagacaaccccaacaactcattgtatctgcaaatgaagttcgtgggagtcgaggacacggccctctattattgtgcgagagggggccggactggtacttttgatatttggggcctggggacagtggtcaccgtttcttca

SEQ ID NO: 13021 - DNA, 289 bp, Homo sapiens
  source 1..289: mol_type = other DNA
tgcagcctccacaatcagctttggtgaccattggatgagctgggtccgccaggctccagggaagggactggagtgggtggccaacataaagccagacggaagtgacaaatattatgcggactctgtggcgggccgattcaccatctccagagacaaccccaacaactcattgtatctgcaaatgaagttcctgggagtcgaggacacggccctctattactgtgcgagagggggccggactggtacttttgatatttggggcctggggacagtggtcaccgtttcttca

SEQ ID NO: 13022 - DNA, 331 bp, Homo sapiens
  source 1..331: mol_type = other DNA
cactgtctctggtggctccatcagcagtagtagttactactggggctggatccgccagcccccagggaaggggctggagtggattgggagtatgtattatagtgggagcacccactacaacccgtccctcaagagtcgagtcaccatatccgtagacacgtccaagaaccagttctccctgaagttgagctctgtgaccgccgcagacacggctgtatattactgtgcgagacatgagggaataggggattatgattacgtttggggacctacctcccgactaggcgcttttgatatctggggccaagggacaatggtcaccgtctcttca

SEQ ID NO: 13023 - DNA, 331 bp, Homo sapiens; identical to SEQ ID NO: 13022
  source 1..331: mol_type = other DNA

SEQ ID NO: 13024 - DNA, 331 bp, Homo sapiens
  source 1..331: mol_type = other DNA
cactgtctctggtggctccatcagcagtagtagttactactggggctggatccgccagcccccagggaaggggctggagtggattgggagtatgtattatagtgggagcacccactacaacccgtccctcaagagtcgagtcaccatatccgtagacacgtccaagaaccagttctccctgaagttgagctctgtgaccgccgcagacacggctgtgtattactgtgcgagacatgagggaataggggattatgattacgtttggggacctacctcccgactaggcgcttttgatatctggggccaagggacaatggtcaccgtctcttca

SEQ ID NO: 13025 - DNA, 331 bp, Homo sapiens; identical to SEQ ID NO: 13024
  source 1..331: mol_type = other DNA

SEQ ID NO: 13026 - DNA, 331 bp, Homo sapiens
  source 1..331: mol_type = other DNA
cactgtctctggtggctccatcagcagtagtagttactacttgggctggatccgccagcccccagggaaggggctggagtggattgggagtatgtattatagtgggagcacccactacaacccgtccctcaagagtcgagtcaccatatccgtagacacgtccaagaaccagttctccctgaagttgagctctgtgaccgccgcagacacggctgtatattactgtgcgagacatgagggaataggggattatgattacgtttggggacctacctcccgactaggcgcttttgatatctggggccaagggacaatggtcaccgtctcttca

SEQ ID NO: 13027 - DNA, 331 bp, Homo sapiens
  source 1..331: mol_type = other DNA
cactgtctctggtggctccatcagcagtagtagttactactggggctggatccgccagcccccagggaaggggctggagtggattgggagcatgtattatagtgggagcacccactacaacccgtccctcaagagtcgagtcaccatatccgtagacacgtccaagaaccagttctccctgaagttgagctctgtgaccgccgcagacacggctgtatattactgtgcgagacatgagggaataggggattatgattacgtttggggacctacctcccgactaggcgcttttgatatctggggccaagggacaatggtcaccgtctcttca

SEQ ID NO: 13028 - DNA, 331 bp, Homo sapiens
  source 1..331: mol_type = other DNA
cactgtctctggtggctccatcagcagtagtagttactactggggctggatccgccagcccccagggaaggggctggagtggattgggagtatgtattatagtgggagcacccactacaacccgtccctcaagagtcgagtcaccatatccgtagacacgtccaagaaccagttctccctgaagttgagctctgtgaccgccgcagacacggctgtatattactgtgcgagacatgagggaataggggattatgattacgtttggggacctacctcccgactaggcgcctttgatatctggggccaagggacaatggtcaccgtctcttca

SEQ ID NO: 13029 - DNA, 331 bp, Homo sapiens
  source 1..331: mol_type = other DNA
cactgtctctggtggctccatcagcagtagtagttactactggggctggatccgccagcccccagggaaggggctggagtggattgggagtatgtattatagtgggagcacccactacaacccgtccctcaagagtcgagtcaccatatccgtagacacgtccaagaaccagttctccctgaagttgagctctgtgaccaccgcagacacggctgtatattactgtgcgagacatgagggaataggggattatgattacgtttggggacctacctcccgactaggcgcttttgatatctggggccaagggacaatggtcaccgtctcttca

SEQ ID NO: 13030 - DNA, 331 bp, Homo sapiens
  source 1..331: mol_type = other DNA
cactgtctctggtggctccatcagcagtagtagttacttctggggctggatccgccagcccccagggaaggggctggagtggattgggagtatgtattatagtgggagcacccactacaacccgtccctcaagagtcgagtcaccatatccgtagacacgtccaagaaccagttctccctgaagttgagctctgtgaccgccgcagacacggctgtatattactgtgcgagacatgagggaataggggattatgattacgtttggggacctacctcccgactaggcgcttttgatatctggggccaagggacaatggtcaccgtctcttca

SEQ ID NO: 13031 - DNA, 304 bp, Homo sapiens
  source 1..304: mol_type = other DNA
ttcagcctctggattcaacttcggaaactttgcaatgcactgggtccgccaggctccagggaagggactgaactctgtggcagctattagtttgaatggcataagaacagactacgcggactccgtgaagggcagattcaccatctccagagacaatgccttgaacactctgcatcttcaaatgactggtctcacaactgaagacaccggtatatattactgtgtgaaagaccacgattcggggagtaattactggcatcacttagatttctggggccagggaaccctggtcaccgtctcctcc

SEQ ID NO: 13032 - DNA, 304 bp, Homo sapiens
  source 1..304: mol_type = other DNA
ttcagcctctggattcaacttcggaaactttgcaatgcactgggtccgccaggctccagggaagggactgaactctgtgtcagctattagtttgaatggcataagaaccgactacgcggactccgtgaagggcagattcaccatctccagagacaatgccttgaacactctacatcttcaaatgactggtctcacaactgatgacaccggtatatattactgtgtgaaagaccacgattcggggagtaattactggcatcacttagatttctggggccagggaaccctggtcaccgtctcctcc

SEQ ID NO: 13033 - DNA, 304 bp, Homo sapiens
  source 1..304: mol_type = other DNA
ttcagcctctggattcaacttcggaaactttgcaatgcactgggtccgccaggctccagggaaggggctgaaccctgtgtcagctatcagtatgaatggcataaaaacagactacgcggactccgtgaagggcagattcaccatctccagagacaatgccttgaacactctgcatcttcaaatgactggtctcacaactgaggacaccggcatatattactgtgtgaaagaccacgattcggggagtaattactggcatcacttagatttctggggccagggaaccctggtcaccgtctcctcc

SEQ ID NO: 13034 - DNA, 304 bp, Homo sapiens
  source 1..304: mol_type = other DNA
ttcagcctctggattcaacttcggaaactttgcaatgcactgggtccgccaggctccagggaagggactgaactctgtggcagctattagtttgaattgcataagaacagactacgcggactccgtgaagggcagattcaccatctccagagacaatgccttgaacactctgcatcttcaaatgactggtctcacaactgaagacaccggtatatattactgtgtgaaagaccacgattcggggagtaattactggcatcacttagatttctggggccagggaaccctggtcaccgtctcctcc

SEQ ID NO: 13035 - DNA, 304 bp, Homo sapiens
  source 1..304: mol_type = other DNA
ttcagcctctggattcaacttcggaaactttgcaatgcactgggtccgccaggctccagggaagggactgaactctgtggcagctattagtttgaatggcataagaacagactacacggactccgtgaagggcagattcaccatctccagagacaatgccttgaacactctgcatcttcaaatgactggtctcacaactgaagacaccggtatatattactgtgtgaaagaccacgattcggggagtaattactggcatcacttagatttctggggccagggaaccctggtcaccgtctcctcc

SEQ ID NO: 13036 - DNA, 304 bp, Homo sapiens
  source 1..304: mol_type = other DNA
ttcagcctctggattcaacttcggaaactttgcaatgcactgggtccgccaggctccagggaagggactgaactctgtggcagctattagtttgaatggcataagaacagactacgcggactccgtgaagggcagattcaccatctccagagacaatgccttgaacactctgcatcttcaaatgactggtctcacaactgaacacaccggtatatattactgtgtgaaagaccacgattcggggagtaattactggcatcacttagatttctggggccagggaaccctggtcaccgtctcctcc

SEQ ID NO: 13037 - DNA, 292 bp, Homo sapiens
  source 1..292: mol_type = other DNA
tgcagcctctggattcactttcaataacgcctggatgacctgggtccgccaggctccagggaaggggctggagtgggttggccgtattttaatcaaaactgatggtggaacaacaaactacgctgcacccgtgataggcagattctccatctcaacagatgattcaaaaaccacgttgtatctgcaaatgaacagcctgaaaaccgaggacacagccgtgtattactgtaccacctactcctctggtgcggtaagagactggggccagggaaccctggtcaccgtctcctca

SEQ ID NO: 13038 - DNA, 292 bp, Homo sapiens
  source 1..292: mol_type = other DNA
tgcagcctctggattcactttcaataacgcctggatgacctgggtccgccaggctccagggaaggggctggagtgggttggccgtattttaatcaaaactgatggtggaacaacaaactacgctgcacccgtgataggcagattctccatctcaacagatgattcaaaaaccacgttgtatctgcaaatgaacagcctgaaaaccgaggacacagccgtgtattactgtaccacctactcctctggtgcggtaagagactggggccagggaaccctggtcaccgtctcccca

SEQ ID NO: 13039 - DNA, 316 bp, Homo sapiens
  source 1..316: mol_type = other DNA
tgcagcctctggattcactttcaataacgcctggatgacctgggtccgccaggctccagggaaggggctggagtgggttggccgtattttaatcaaaactgatggtggaacaacaaactacgctgcacccgtgataggcagattctccatctcaacagatgattcaaaaaccacgttgtatctgcaaatgaacagcctgaaaaccgaggacacagccgtgtattactgtaccacctactcctctggtgcggtaagagactggggccagggaaccctggtcaccgtctcctcagggaccacggtcaccgtctcctca

SEQ ID NO: 13040 - DNA, 292 bp, Homo sapiens
  source 1..292: mol_type = other DNA
tgcagcctctggattcactttcaataatgcctggatgacctgggtccgccaggctccagggaaggggctggagtgggttggccgtatttttatcgaaagtgacggtgaaacaacaaactacgctgcacccgtgaaaggcagattctccatctcaacagatgattcaaaaaccactttgtatctgcaaatgaacagcctgagaaccgaggacacagccgtgtattactgtaccacctactcctctggtgcggtaagagactggggccagggaaccctggtcaccgtctcctca

SEQ ID NO: 13041 - DNA, 292 bp, Homo sapiens; identical to SEQ ID NO: 13037
  source 1..292: mol_type = other DNA

SEQ ID NO: 13042 - DNA, 292 bp, Homo sapiens
  source 1..292: mol_type = other DNA
tgcagcctctggattcactttcaataacgcctggatgacctgggtccgccaggctccagggaaggggctggagtggcttggccgtattttaatcaaaactgatggtggagcaacaaactacgctgcacccgtgataggcagattctccatctcaacagatgattcaaaaaccacgttgtatctgcaaatgaacagcctgaaaatcgaggacacagccgtgtattactgtaccacttactcctctggtgcggtcagagactggggccagggaaccctggtcaccgtctcctca

SEQ ID NO: 13043 - DNA, 292 bp, Homo sapiens; identical to SEQ ID NO: 13037
  source 1..292: mol_type = other DNA

SEQ ID NO: 13044 - DNA, 295 bp, Homo sapiens
  source 1..295: mol_type = other DNA
tacagcgtctggcttcagcttcagtatctatgccatgcactgggtccgccaggctccaggcaaggggctggaatgggtggcacttatatggtatgatggaagtaatgaacgctatgcagactccgtgaggggccgattcaccgtctccagagacaattccaagagcacattgtatctgcagatgaacagcctgagagccgaggacacggctgtctattactgtgcgagagctgaggcgaatcgctccccctggttcgacccctggggccagggaaccctggtcatcgcctcctca

SEQ ID NO: 13045 - DNA, 295 bp, Homo sapiens
  source 1..295: mol_type = other DNA
tacagcgtctggcttcagcttcagtatctatgccatgcactgggtccgccaggctccaggcaaggggctggaatgggtggcacttatatggtatgatggaagtaatgaacgctatgcagactccgtgaggggccgattcaccgtctccagagacaattccaagagcacattgtatctgcagatgaacagcctgagagccgaggacacggctgtctattactgtgcgagagctgaggcgaatcgctccccctggttcgacccctggggccagggaaccctggtcatcgcttcctca

SEQ ID NO: 13046 - DNA, 298 bp, Homo sapiens
  source 1..298: mol_type = other DNA
cactgtctctgggggatccatcgatgccaactgctggaactgggtccggcaggccccagggaagggactggaatggattggctatgtctgttatagtgggagcaccaagtacaacccctccctccagagtcggaccaccatactagcagacacgcccaagaaccagttctccctgaagctgaggtctgtgactcctgcggacacggccgtttatttctgtacgagaatccctcggtcaactggtccctttgggtggttcgacccctggggccaggggaccctggtcaccgtctcctca

SEQ ID NO: 13047 - DNA, 298 bp, Homo sapiens
  source 1..298: mol_type = other DNA
cactgtctctgggggctccatcgatgccaactgctggaactgggtccggcaggccccagggaagggactggaatggattggctatgtctgttatagtgggagcaccaagtacaacccctccctccagagtcggaccaccatactagcagacacgcccaagaaccagttctccctgaagctgaggtctgtgactcctgcggacacggccgtttatttctgtacgagaatccctcggtcaactggtccctttgggtggttcgacccctggggccaggggaccctggtcaccgtctcctca

SEQ ID NO: 13048 - DNA, 298 bp, Homo sapiens
  source 1..298: mol_type = other DNA
cactgtgtctgggggctccatcgatgccaactgctggaactgggtccggcaggccccagggaagggactggagtggattggctatgtctgttctagtgggagcaccaagtacaacccctccctccagagtcggaccaccatactagcagacacgcccaagaaccagttctccctgaagctgagctctgtgactcctgcggacacggccgtttatttctgtacgagaatccctcggtcaactggtccctttgggtggttcgacccctggggccaggggaccctggtcaccgtctcctca

SEQ ID NO: 13049 - DNA, 343 bp, Homo sapiens
  source 1..343: mol_type = other DNA
tgcagcctctggattcaccttcagtagctatagcatgaactgggtccgccaggctccagggaaggggctggagtgggtctcatccattagtagtagtagtaattacatatactacccagactcagtgaagggccgattcaccgtctccagagacaacgccaagaactcactgtatctgcaaatgaacagcctgagagccgaggacacggctgtgtattattgtgcgagatccccacatgactacggtgactacgggtattactatgacagtagtggttttcgttccaactactactactacatggacgtctggggcagagggaccacgggcaccgtctcctca

SEQ ID NO: 13050 - DNA, 343 bp, Homo sapiens; identical to SEQ ID NO: 13049
  source 1..343: mol_type = other DNA

SEQ ID NO: 13051 - DNA, 343 bp, Homo sapiens
  source 1..343: mol_type = other DNA
tgcagcctctggattcaccttcagtagctatagcatgaactgggtccgccaggctccagggaaggggctggagtgggtctcatccattagtagtagtagtaattacatatactacccagactcagtgaagggccgattcaccgtctccagagacaacgccaagaactcactgtatctgcaaatgaacagcctgagagccgaggacacggctgcgtattattgtgcgagatccccacatgactacggtgactacgggtattactatgacagtagtggttttcgttccaactactactactacatggacgtctggggcagagggaccacgggcaccgtctcctca

SEQ ID NO: 13052 - DNA, 343 bp, Homo sapiens
  source 1..343: mol_type = other DNA
tgcagcctctggattcaccttcagtagctatagcatgaactgggtccgccaggctccagggaaggggctggagtgggtctcatccattagtagtagtagtaattacatatactacccagacttagtgaagggccgattcaccgtctccagagacaacgccaagaactcactgtatctgcaaatgaacagcctgagagccgaggacacggctgtgtattattgtgcgagatccccacatgactacggtgactacgggtattactatgacagtagtggttttcgttccaactactactactacatggacgtctggggcagagggaccacgggcaccgtctcctca

SEQ ID NO: 13053 - DNA, 327 bp, Homo sapiens
  source 1..327: mol_type = other DNA
acacagacgctcacactgacctgcaccttctctggcttctcactcacccctagtggaatgtctgtgagttggatccgtcagcccccagggaaggccctggagtggcttgcacgcattgattgggatgatgataaatactacatgacatctctgaagaccaggctcaccatctccaaggacaccgccaaaagccaggtggtcctgacaatgaccaacatggaccccgtggacacagccacctactactgtgcacgggccatatatggaacgggaacttatggtgtttttgatgtttggggccaagggacaatggtcacagtctctaca

SEQ ID NO: 13054 - DNA, 327 bp, Homo sapiens
  source 1..327: mol_type = other DNA
acacagaccctcacactgacctgcaccttctctgggttctcactcacccctagtggaatgtctgttaactggatccgtcagcccccagggaaggccctggagtggcttgcacgcattgattgggatgatgataaatactacagcacatctctgaagaccaggctcaccatctccaaggacacctccaaaaaccaggtggtcctaacaatgaccaagatggaggctgtggacacagccacgtatttctgtgcacgggccatctatggtacggggacttacggtgtttttgatgtctggggccaagggacaatggtcaccgtctcttca

SEQ ID NO: 13055 - DNA, 327 bp, Homo sapiens
  source 1..327: mol_type = other DNA
acacagacgctcacactgacctgcaccttctctggcttctcactcacccctagtggaatgtctgtgaattggatccgtcagcccccagggaaggccctggagtggcttgcacgcattgattgggatgatgataaatattacagcacatctctgaagaccaggctcaccatctcgaaggacacctccaaaaaccaggtggtccttacaatgaccaacatggaccccgtggacacagccacctactactgtgcacgggccatatatggaacgggaacttatggtgtttttgatgtttggggccaggggacaagggtcaccgtctcttca

SEQ ID NO: 13056 - DNA, 327 bp, Homo sapiens
  source 1..327: mol_type = other DNA
acacagacgctcacactgacctgcaccttctctggcttctcactcacccctagtggaatgtctgtgaattggatccgtcagcccccagggaaggccctggagtggcttgcacgcattgattgggatgatgataaatattacagcacatctctgaagaccaggctcaccatctcgaaggacacctccaaaaaccaggtggtccttacaatgaccaacatggaccccgtggacacagccacctactactgtgcacgggccatatatggaacgggaacttatggtgttttcgatgtttggggccaggggacaagggtcaccgtctcttca

SEQ ID NO: 13057 - DNA, 271 bp, Homo sapiens
  source 1..271: mol_type = other DNA
tgcagcctctgggttaagcgtcagtagcaactacatgagctgggtccgccaggctccagggaaggggccggagtgggtctcgattctttttagtagtgattacgcacactacgcggactccgtgaagggccgattcaccatctccagagacaattcgaagaacacgctgtatcttcaaatgaatagcctgagaatcgacgacacggccgtgtattactgtgtgagtcggagtggttacttgggccagggaaccctggtcaccgtctcctca

SEQ ID NO: 13058 - DNA, 271 bp, Homo sapiens
  source 1..271: mol_type = other DNA
tgcagcctctgggttcagcgtcagtagcaactacatgagctgggtccgccaggctccagggaaggggccggagtgggtctcgattctttttagtagtaattacgcacactacgcggactccgtgaagggccgattcaccatctccagagacaattcgaagaacacgctgtatcttcaaatgaatagcctgagaatcgacgacacggccgtgtattactgtgtgagtcggagtggttacttgggccagggaaccctggtcaccgtctcctca

SEQ ID NO: 13059 - DNA, 270 bp, Homo sapiens
  source 1..270: mol_type = other DNA
gcagcctctgggttaagcgtcagtagcaactacatgagctgggtccgccaggctccagggaaggggccggagtgggtctcgattctttttagtagtgattacgcacactacgcggactccgtgaagggccgattcaccatctccagagacaattcgaagaacacgctgtatcttcaaatgaatagcctgagaatcgacgacacggccgtgtattactgtgtgagtcggagtggttacttgggccagggaaccctggtcaccgtctcctca

SEQ ID NO: 13060 - DNA, 271 bp, Homo sapiens
  source 1..271: mol_type = other DNA
tgcagcctctgggttcgccgtcagtagcaactacatgagttgggtccgccaggctccagggaaggggctggagtgggtctcaattctttatagtagtgattacgcatactacgcagactccgtgaagggccgattcaccacctccagagacaattcgaagaacacgctgtatcttcagatgcacagcctgagagccgacgacacggccgtgtattattgtgtgagccgtagtggttacttgggccagggaaccctggtcaccgtctcctca

SEQ ID NO: 13061 - DNA, 292 bp, Homo sapiens
  source 1..292: mol_type = other DNA
tggagcctctggactcactttcaggaattatgaaatgaattgggtccgccaggctccaggggagggcctggagtgggtttcattcattgatagtggtggaagtgtcgttacatatgcagactctgtgaggggccgcttcaccacctccagagacaacgccaagaactcactacatctgcaaatgaacagcctgagagacgaggacacggctgtctattactgtgtgacagatgaggctggcatcatagactttgacaactggggccagggaacccaggtcaccgtctcctca

SEQ ID NO: 13062 - DNA, 292 bp, Homo sapiens
  source 1..292: mol_type = other DNA
tggagcctctggactcactttcaggatttatgaaatgaattgggtccgccaggctccaggggagggcctggagtgggtttcattcattgatagtggtggaagtgtcgttacatatgcagactctgtgaggggccgcttcaccacctccagagacaacgccaagaactcactacatctgcaaatgaacagcctgagagacgaggacacggctgtctattactgtgtgacagatgaggctggcatcatagactttgacaactggggccagggaacccaggtcaccgtctcctca

SEQ ID NO: 13063 - DNA, 292 bp, Homo sapiens
  source 1..292: mol_type = other DNA
tggagcctctggactcactttcaggaattatgaaatgaattgggtccgccaggctccaggggagggcctggagtgggtttcattcattgatagtggtggaagtgtcgttacatatgcagactctgtgaagggccgcttcaccacctccagagacaacgccaagaactcactacatctgcaaatgaacagcctgagagacgaggacacggctgtctattactgtgtgacagatgaggctggcatcatagactttgacaactggggccagggaacccaggtcaccgtctcctca

SEQ ID NO: 13064 - DNA, 292 bp, Homo sapiens
  source 1..292: mol_type = other DNA
tggagcctctggactcactttcaggaattatgaaatgaattgggtccgccaggctccaggggagggcctggagtgggtttcattcattgatagtggtggaagtgtcgttacatatgcagactctgtgaggggccgcttcaccacctccagagacaacgccaagaactcactacatctgcaaatgaacagcctgagagacgaggacacggctgtctattactgtgtgacagatgaggctggcatcatagactttgacaactggggccagggaacccaggtcaccgtcccctca

SEQ ID NO: 13065 - DNA, 292 bp, Homo sapiens
  source 1..292: mol_type = other DNA
tggagcctctggactcaccttcaggaattatgaaatgaattgggtccgccaggctccaggggagggcctggagtgggtttcattcattgatcgtggtggaagtgtcgttacatatgcagactctgtgaggggccgattcaccacctccagagacaacgccaagaactcactatatctgcaaatgaacagcctgagagacgaggacacggctgtctattactgtgtgacagatgaggctggcatcatagactttgacaactggggccagggaacccaggtcaccgtctcctca

SEQ ID NO: 13066 - DNA, 292 bp, Homo sapiens
  source 1..292: mol_type = other DNA
tggagcctctggactcaccttcaggaattatgaaatgaattgggtccgccaggctccaggggagggcctggagtgggtttcattcattgatcgtggtggaagtgtcgttacatatgcagactctgtgaggggccgattcaccacctccagagacaacgccaagaactcactatatctgcaaatgaacagcctgagagacgaggacacggctgtctattactgtgtgacagatgaggctggcatcatagactttgacaactggggccagggaacccaggttaccgtctcctca

SEQ ID NO: 13067 - DNA, 292 bp, Homo sapiens
  source 1..292: mol_type = other DNA
tggagcctctggactcaccttcaggaattatgaaatgaattgggtccgccaggctccaggggagggcctggagtgggtttcattcattgatagtggtggaagtgtcgttacatatgcagactctgtgaggggccgattcaccacctccagagacaacgccaagaactcactatatctgcaaatgaacagcctgagagacgaggacacggctgtctattactgtgtgacagatgaggctggcatcatagactttgacaactggggccagggaacccaggtcaccgtctcctcc

SEQ ID NO: 13068 - DNA, 295 bp, Homo sapiens
  source 1..295: mol_type = other DNA
ctctgtctctggtggctccatcaacaataataactggtggacttgggtccgccagtccccagggaaggggctggagtggattggggaaatcctccatactgggaacacccactacaacccgtccctcaagagtcgactaaccatctcaatggacaagtccaagaatcagttctccctgaacctgagttctgtgaccgccgcggacacggccgtgtattactgtgcgagagatcacgagggctggcaagctgctagcgacgtctggggccagggaatactggtcaccgtctcctca

SEQ ID NO: 13069 - DNA, 295 bp, Homo sapiens
  source 1..295: mol_type = other DNA
ctctgtctctggtggctccatcaacaataataaatggtggacttgggtccgccagtccccagggaaggggctggagtggattggggaaatcctccatactgggaacacccactacaacccgtccctcaagagtcgactaaccatctcaatggacaagtccaagaatcagttctccctgaacctgagttctgtgaccgccgcggacacggccgtgtattactgtgcgagagatcacgagggctggcaagctgctagcgacgtctggggccagggaatactggtcaccgtctcctca

SEQ ID NO: 13070 - DNA, 295 bp, Homo sapiens
  source 1..295: mol_type = other DNA
ctctgtctctggtggctccatcaacaataataactggtggacttgggtccgccagcccccagggaaggggctggagtggattggggaaatcctccatactgggagcacccactacaacccgtccctcaagagtcgactcaccatatcattagacaagtccaacaatcagttctccctgaacctgagttctgtgaccgccgcggacacggccgtgtattactgtgcgagagatcacgagggctggcaagctgctagcgacgtctggggccagggaatactggtcaccgtctcctca

SEQ ID NO: 13071 - DNA, 295 bp, Homo sapiens
  source 1..295: mol_type = other DNA
cgctgtctctgggggctccataagcaggaataactggtggacttgggtccgccaacccccagggaaggggctggagtggattggagaaatcttccatgatgggagtacccactacaagccgtccctcaagagtcgactcaccatatcactcgacaagaccaacaacaacttctccctgaaactgaggtctgtgaccgccgcggacacggccatttattactgtgcgagagatcacgagggctggcaagctgctagcgacgtctggggcccgggaatcctggtcaccgtctcgtca

SEQ ID NO: 13072 - DNA, 295 bp, Homo sapiens
  source 1..295: mol_type = other DNA
ctctgtctctggtggctccatcaacaataataactggtggacttgggtccgccagcccccagggaaggggctggagtggattggggaaatcctccatactgggagcacccactacaacccgtccctcaagagtcgactcaccatatcattagacaagtccaacaatcagttctccctgaacctgagttctgtgaccgccgcggacacggccgtgtattactgtgcgagagatcacgagggctggcaagctgctagcgacgtctggggccagggaatactggtcactgtctcctca

SEQ ID NO: 13073 - DNA, 295 bp, Homo sapiens
  source 1..295: mol_type = other DNA
ctctgtctctggtggctccatcaacaataataactggtggagttgggtccgccagcccccagggaaggggctggagtggattggggaaatcctccatactgggaacacccactacaacccgtccctcaagagtcgactcaccatatcattagacaagtccaacaatcagttctccctgaacctgagttctgtgaccgccgcggacacggccgtctattactgtgcgagagatcacgagggctggcaagctgctagcgacgtctggggccagggaatactggtcaccgtctcctca

SEQ ID NO: 13074 - DNA, 289 bp, Homo sapiens
  source 1..289: mol_type = other DNA
tgcagcctctggattcaccgttagcagctatggcatgaactgggtccgccaggctccagggaaggggctggagtgggtctcacatattggtggtagtagtagtaacacatactacgcagactccgtgaagggccggttcaccatctccagagacagttccaagaacactctatatctgcaaatgaacagcctgagagccgaggacacggccgtatacttttgtgcgaaattagtgggacatactgtttatgactactggggccagggaaccctggtcaccgtctcctca

SEQ ID NO: 13075 - DNA, 289 bp, Homo sapiens
  source 1..289: mol_type = other DNA
tgcagcctctggattcaccgttagcagctatggcatgaactgggtccgccaggctccagggaaggggctggagtgggtctcacatattggtggtagtagtagtaacacatactacgcagactccgtgaagggccggttcaccatctccagagacagttccaagaacactctatacctgcaaatgaacagcctgagagccgaggacacggccgtatacttttgtgcgaaattagtgggacatactgtttatgactactggggccagggaaccctggtcaccgtctcctca

SEQ ID NO: 13076 - DNA, 289 bp, Homo sapiens; identical to SEQ ID NO: 13074
  source 1..289: mol_type = other DNA

SEQ ID NO: 13077 - DNA, 289 bp, Homo sapiens; identical to SEQ ID NO: 13074
  source 1..289: mol_type = other DNA

SEQ ID NO: 13078 - DNA, 289 bp, Homo sapiens
  source 1..289: mol_type = other DNA
tgcagcctctggattcaccgttagcagctatggcatgaactgggtccgccaggctccagggaaggggctggagtgggtctcacatattggtggtagtagtagtaacacatactacgcagactccgtgaagggccggttcaccatctccagagacagttccaagaacactctatatctgcaaatgaacagcctgagagccgaggacacggccgtatacttttgggcgaaattagtgggacatactgtttatgactactggggccagggaaccctggtcaccgtctcctca

SEQ ID NO: 13079 - DNA, 287 bp, Homo sapiens
  source 1..287: mol_type = other DNA
cagcctctggattcaccgttagcagctatggcatgaactgggtccgccaggctccagggaaggggctggagtgggtctcacatattggtggtagtagtagtaacacatactacgcagactccgtgaagggccggttcaccatctccagagacagttccaagaacactctatatctgcaaatgaacagcctgagagccgaggacacggccgtatacttttgtgcgaaattagtgggacatactgtttatgactactggggccagggaaccctggtcaccgtctcctca

SEQ ID NO: 13080 - DNA, 289 bp, Homo sapiens
  source 1..289: mol_type = other DNA
tgcagcctctggattcaccgttagcagctatggcatgaactgggtccgccaggctccagggaaggggctggagtgggtctcacatattggtggtagtagtagtaacacatactacgcagactccgtgaagggccggttcaccatctccagagacagttccaagaacactctatatctgcaaatgaacagcctgagagccgaggacacggccatatacttttgtgcgaaattagtgggacatactgtttatgactactggggccagggaaccctggtcaccgtctcctca

SEQ ID NO: 13081 - DNA, 277 bp, Homo sapiens
  source 1..277: mol_type = other DNA
cactgtctctggtgactccctcaggagttcctactggagctggatccgccagcccccggggaagggactggagtggattggatatgtctattacactgggagcaccgactacaacccctccctcagcagtcgagtctccatttcagtggacacgtccaagaaccagttctccctgacgctgcgctctgtgaccactgcggacaccgctgtctattactgtgcgaaagaggggcctgatggctactggggccagggaaccctggtcaccgtctcctca

SEQ ID NO: 13082 - DNA, 277 bp, Homo sapiens
  source 1..277: mol_type = other DNA
cactgtctctggtgactccctcaggagttcctactggagctggatccgccagcccccggggaagggactggagtggattggatatgtctattacactgggagcaccgactacaacccctccctcagcagtcgagtcaccatttcagtggacacgtccaagaaccagttctccctgacgctgcgctctgtgaccgctgcggacaccgctgtctattactgtgcgaaagaggggcctgatggctactggggccagggaaccctggtcaccgtctcctca

SEQ ID NO: 13083 - DNA, 277 bp, Homo sapiens
  source 1..277: mol_type = other DNA
caatgtctctggtgactccctcagaaatagttactggagctggatccgccagcccccagggaagggactggagtggattgggtatatctattacactggcgccaccaactacaacccctccctcaatagtcgagtcaccatatcaatagacacgtccaagaaccaattctccctgaagttgatctctgtgaccgctgcggacacggccgtgtattactgtgcgaaagaggggcctgatggctactggggccagggaaccctggtcaccgtctcctca

SEQ ID NO: 13084 - DNA, 277 bp, Homo sapiens
  source 1..277: mol_type = other DNA
cactgtctctggtgactccctcaggagttcctactggagctggatccgccagcccccggggaagggactggagtggattggatatgtctattacactgggagcaccgactacaacccctccctcagcagtcgagtcaccatttcagtggacacgtccaagaaccaattctccctgacgctgcgctctgtgaccgctgcggacaccgctgtctattactgtgcgaaagaggggcctgatggctactggggccagggaaccctggtcaccgtctcctca

SEQ ID NO: 13085 - DNA, 277 bp, Homo sapiens
  source 1..277: mol_type = other DNA
caatgtctctggtgactccctcagaaatagttactggagctggatccgccagcccccagggaagggactggagtggattgggtatatctattacactggcgccaccaactacaacccctccctcaatagtcgagtcaccatatcaattgacacgtccaagaaccaattctccctgaagttgatctctgtgaccgctgcggacacggccgtgtattactgtgcgaaagaggggcctgatggctactggggccagggaaccctggtcaccgtctcctca

SEQ ID NO: 13086 - DNA, 277 bp, Homo sapiens
  source 1..277: mol_type = other DNA
cactgtctctggtgactccatgagaagttcctactggagctggatccgccagtccccggggaagggactggagtggattggctatatctattacactgggaccgccaactacaacccctccctcagcagtcgagtcaccatttcagcagacacgtccaagaaccagttctccctgaagctgagctctgtgacccctgcggacactgccgtgtattactgtgcgaaagaggggcctgatggctactggggccagggaaccctggtcaccgtctcctca

SEQ ID NO: 13087 - DNA, 277 bp, Homo sapiens
  source 1..277: mol_type = other DNA
cactgtctctggtgactctctcaggaattcctactggagttggatccgccagaccccggggaagggactggagtggattggatatatctattacagtggcagcaccgactacaacccctccctcagcagtcgagtcaccatatcagtagacacgtccaagaaccatttctccctgaagttgcgctctgtgaccgctgcggacaccgctgtctattactgtgcgaaagaggggcctgatggctactggggccagggaatcctggtcaccgtctcctca

SEQ ID NO: 13088 - DNA, 277 bp, Homo sapiens
  source 1..277: mol_type = other DNA
cactgtctctggtgactctctcaggaattcctactggagttggatccgccagaccccggggaagggactggagtggattggatatatctattacagtggcagcaccgactacaacccctccctcagcagtcgagtcaccatatcagtagacacgtccaagaaccagttctccctgaagttgcgctctgtgaccgctgcggacaccgctgtctattactgtgcgaaagaggggcctgatggctactggggccagggaatcctggtcaccgtctcctca

SEQ ID NO: 13089 - DNA, 277 bp, Homo sapiens
  source 1..277: mol_type = other DNA
cactgtctctggtgtctccctcagaggtagttactggagctggatccgccagaccccggggaagggactggagtggattgggcgtatgtattacagtgggagcaccgactacaacccctccctcaatggtcgagtcaccatatcagtagacacgtctaagaaccagttctccctgaagttgatctctgtgaccgctgcggacacggccgtatattactgtgcgaaagaggggcctgatggctactggggccagggaaccctggtcaccgtctcctca

SEQ ID NO: 13090 - DNA, 277 bp, Homo sapiens
  source 1..277: mol_type = other DNA
cactgtctctggtgactctctcaggaattcctactggagttggatccgccagaccccggggaagggactggagtggattggatatatctattacagtggcagcaccgactacaacccctccctcagcagtcgagtcaccatatcagtagacacgtccaagaaccatttctccctgaagttgcgctctgtgaccactgcggacaccgctgtctattactgtgcgaaagaggggcctgatggctactggggccagggaatcctggtcaccgtctcctca

SEQ ID NO: 13091 - DNA, 304 bp, Homo sapiens
  source 1..304: mol_type = other DNA
cactgtctctggtgactccatcagcagtggcggttacttctggacctggatccgccaccacccagagaggggcctggagtggattgcgtggatcaataacagtgggactaccaaccacaacccgtccctcaagagtcgaattgacatatcactggacaggtctaagaatcagttgtccctgaggctgacctctgtgactgacgcggacacggccgtttactactgtgcgagaattccctatcatagcagtggttgggggtggttcgacccctggggccggggaaccctggtcaccgtctcctca

SEQ ID NO: 13092 - DNA, 304 bp, Homo sapiens
  source 1..304: mol_type = other DNA
cactgtctctggtgactccatcaggactggcggttacttctggacctggatccgccaccacccagagaagggcctggagtggattgcgtacatcaattacagtgggactagcaaccgcaacccgtccctcaagagtcgaattgacatatcactggacacgtctaagaatcagttgtccctgaagctgacctctgtgactgacgcggacacggccgtttactactgtgcgagaattccctatcatagcagtggttgggggtggttcgacccctggggccggggaaccctggtcaccgtctcctca

SEQ ID NO: 13093 - DNA, 304 bp, Homo sapiens
  source 1..304: mol_type = other DNA
cactgtctctggtgactccatcagcagtggcggttccttctggacctggatccgccaccacccagagaagggcctggagtggattggttatatcaattacagtgggactggcaaccaaaacccgtccctcaagagtcgaattgacatatcactggacacgtctaagaatcagttgtccctgaagctgacttctgtgactgacgcggacacggccgtttactactgtgcgagaattccctatcatagcagtggttgggggtggttcgacccctggggccggggaaccctggtcaccgtctcctca

SEQ ID NO: 13094 - DNA, 304 bp, Homo sapiens
  source 1..304: mol_type = other DNA
cactgtctctggtgactccatcagcagtggcggttacttctggacctggatccgccaccacccagagaggggcctggagtggattgcgtggatcaattacagtgggactaccaaccacaacccgtccctcaagagtcgaattgacatatcactggacacgtctaagaatcagttgtccctgaagctgacctctgtgactgacgcggacacggccgtttactactgtgcgagaattccctatcatagcagtggttgggggtggttcgacccctggggccggggaaccctggtcaccgtctcctca

SEQ ID NO: 13095 - DNA, 303 bp, Homo sapiens
  source 1..303: mol_type = other DNA
aagggttctggatacagctttaccagctattggatcggctgggtgcgccagatgcccgggaaaggcctggagtggatggggttcatctatcccggtgactctgataccagatacagcccgtccttccaaggccaggtcaccatctcagtcgacaactcaatcagcaccacctatttgaagtggaacagcctgaaggcctcggacaccgccacatactactgtgcgagatcctcttgtggtagtggtagctgcaactccgactttgactactggggccagggaaccctggtcaccgtctcctca

SEQ ID NO: 13096 - DNA, 303 bp, Homo sapiens
  source 1..303: mol_type = other DNA
aagggttctggatacagcttcaccagctattggatcggctgggtgcgccagatgcccgggaaaggcctggagtggatggggttcatctatcccggtgactctgataccagatacagcccgtccttccaaggccaggtcaccatctcagtcgacaactcaatcagcaccacctatttgaagtggaacagcctgaaggcctcggacaccgccacatactactgtgcgagatcgtcttgtggtagtggtagttgcaactccgactttgactactggggccagggaaccctggtcaccgtctcctca

SEQ ID NO: 13097 - DNA, 303 bp, Homo sapiens
  source 1..303: mol_type = other DNA
aagggttctggatacagttttaccagttactggatcggctgggtgcgccagatgcccgggaaaggcctggagtggatggggttcatctatcccggtgactctgataccagatacagcccgtccttccaaggccaggtcaccatctcagtcgacaactcaatcagcaccacctatttgaagtggaacagcctgaaggcctcggacaccgccacatactactgtgcgagatcctcctgtggtagtggtagctgcaactccgactttgactactggggccagggaaccctggtcaccgtctcctca

SEQ ID NO: 13098 - DNA, 303 bp, Homo sapiens
  source 1..303: mol_type = other DNA
aagggttctggatacagctttaccagttactggatcggctgggtgcgccagatgcccgggaaaggcctggagtggatggggttcatctatcccggtgactctgataccagatacagcccgtccttccaaggccaggtcaccatctcagtcgacaactcaatcagcaccacgtatttgaagtggaacagcctgaaggcctcggacaccgccacatactactgtgcgagatcctcttgtggtagtggtagctgcaactccgactttgactactggggccagggaaccctggtcaccgtctcctca

SEQ ID NO: 13099 - DNA, 303 bp, Homo sapiens
  source 1..303: mol_type = other DNA
aagggttctggatacagctttaccagctattggatcggctgggtgcgccagatgcccgggaaaggcctggagtggatggggttcatctatcccggtgactctgataccagatacagcccgtccttccaaggccaggtcaccatctcagtcgacaactcaatcagcaccacctatttgaagtggaacagcctgaaggcctcggacaccgccacatactactgtgcgagatcctcttgtggtagtggtagctgcaactccgactttgactactggggccagggaaccctggtcatcgtctcctca

SEQ ID NO: 13100 - DNA, 303 bp, Homo sapiens
  source 1..303: mol_type = other DNA
aagggttctggatacagctttaccagttactggatcggctgggtgcgccagatgcccgggaaaggcctggagtggatggggttcatctatcccggtgactctgataccagatacagcccgtccttccaaggccaggtcaccatctcagtcgacaactcaatcagcaccacctatttgaagtggaacagcctgaaggcctcggacaccgccacatactactgtgcgagatcctcttgtggtagtggtagctgcaactccgactttgactactggggccagggaaccctggtcaccgtctcctca

SEQ ID NO: 13101 - DNA, 283 bp, Homo sapiens
  source 1..283: mol_type = other DNA
tgcagcctctgggttctccgtcagtggcggccacatggactggatccgccaggccccaggaaaggggctggagtgggtctcaagtatttataccagtgacgacacattttatgcagcctccgtgaggggccgattcaccatctccagagacagtttcaagaacacgttgtatcttcaaatgaacagcctgagagccgaggacacggccctgtattattgtgcgagacattttgactcggttacaggattctggggccagggaaccctggtcaccgtctcctca

SEQ ID NO: 13102 - DNA, 283 bp, Homo sapiens
  source 1..283: mol_type = other DNA
tgcagcctctgggtcctccgtcagtggcggccacatggactggatccgccaggccccaggaaaggggctggagtgggtctcaagtatttataccagtgacgacacattttatgcagcctccgtgaggggccgattcaccatctccagagacagtttcaagaacacgttgtatcttcaaatgaacagcctgagagccgaggacacggccctgtattattgtgcgagacattttgactcggttacaggattctggggccagggaaccctggtcaccgtctcctca

SEQ ID NO: 13103 - DNA, 283 bp, Homo sapiens
  source 1..283: mol_type = other DNA
tgcagcctctgggttctccgtcagtggcggccacatggactggatccgccaggccccaggaaaggggctggagtgggtctcaagtatgtataccagtgacgacacattttatgcagcctccgtgaggggccgattcaccatctccagagacagtttcaagaacacgttgtatcttcaaatgaacagcctgagagccgaggacacggccctgtattattgtgcgagacattttgactcggttacaggattctggggccagggaaccctggtcaccgtctcctca

SEQ ID NO: 13104 - DNA, 283 bp, Homo sapiens
  source 1..283: mol_type = other DNA
tgcagcctctgggttctccgtcagtggcggccacatggactggatccgccaggccccaggaaaggggctggagtgggtctcaagtatttataccaatgacaacacatactacgcagactccgtgaggggccgattcaccatctccagagacagtttcaagaacaccttgtatcttcaaatgaacagcctgagagccgaggacacggccctgtattactgtgcgagacattttgactcggttacaggattctggggccagggaaccctggtcaccgtctcctca

SEQ ID NO: 13105 - DNA, 288 bp, Homo sapiens
  source 1..288: mol_type = other DNA
gcatctggatacaccttcaggaactactatctgcactgggtccgacagtcccctggacaagggtttcagtggatgggagtaatgcaccctggtggtgttacgtcaacctacccagagacgttccagggcagagtcaccatgaccagggacacgtccacgagcacaggctacatggagttgaccagcctcagatctgacgacacggccctatattactgtgcgagaggctcgggtatagcagcacctggagactactggggccagggaacacttgtcaccgtctcctca

SEQ ID NO: 13106 - DNA, 288 bp, Homo sapiens
  source 1..288: mol_type = other DNA
gcatctggatacaccttcaggaactactatctgcactgggtccgacagtcccctggacaagggtttcagtggatgggagtaatgcaccctggtggtgttacgtcaacctacccagagacgttccagggcagagtcaccatgaccagggacacgtccacgagcacaggctacatggagttgaccagcctcagatctgacggcacggccctatattactgtgcgagaggctcgggtatagcagcacctggagactactggggccagggaacacttgtcaccgtctcctca

SEQ ID NO: 13107 - DNA, 288 bp, Homo sapiens
  source 1..288: mol_type = other DNA
gcatctggatacaccttcaggaactactatctgcactgggtccgacagtcccctggacaagggtttcagtggatgggagtaatgcaccctggtggtgttacgtcaacctacccagagacgttccagagcagagtcaccatgaccagggacacgtccacgagcacaggctacatggagttgaccagcctcagatctgacgacacggccctatattactgtgcgagaggctcgggtatagcagcacctggagactactggggccagggaacacttgtcaccgtctcctca

SEQ ID NO: 13108 - DNA, 288 bp, Homo sapiens
  source 1..288: mol_type = other DNA
gcatctggatacaccttcaggaactactatctgcactgggtccgacagtcccctggacaagggcttcagtgggtgggagtaatgcaccctggtggtgttacgtcaacctacccagagacgttccagggcagagtcactatgaccatggacacgtccacgagcacaggctacatggagttgaccagcctcagatctgacgacacggccctatattactgtgcgagaggctcgggtatagcagcacctggagactactggggccagggaaccctggtcaccgtctcctca

SEQ ID NO: 13109 - DNA, 310 bp, Homo sapiens
  source 1..310: mol_type = other DNA
tgcagcgtctggattcaccttcagtacctatgccatgcactgggtccgccaggctccaggcatggggctggagtgggtggcagttctttggtatgatggaaggaatacattctatggagactccgtgaagggccgattcaccatctccagagacaattccaagaagacactgtatctgcaaatggacagcctgagagccgaggacacggctgtgtattactgtgcgagacccctaggctttggtggtaacgaaaaccactactactacatggacgtctggggcaaagggaccacggtcaccgtctcctca

SEQ ID NO: 13110 - DNA, 310 bp, Homo sapiens
  source 1..310: mol_type = other DNA
tgcagcgtctggattcaccttcagtacctatgccatgcactgggtccgccaggctccaggcatggggctggagtgggtggcagttgtatggtatgatggaagtaataaacactatggagactccgtgaagggccgattcaccatctccagagacaactccaggaaaacgctgtatctgcaaatggacagcctgagagccgaggacacggctgtgtattactgtgcgagacccctaggcttcggtggtaacgaaaaccactattactacatggacgtctggggcaaagggacaacggtcaccgtctcctca

SEQ ID NO: 13111 - DNA, 310 bp, Homo sapiens
  source 1..310: mol_type = other DNA
tgcagcgtctggattcaccttcagtacctatgccatgcactgggtccgccaggctccaggcatggggctggagtgggtggcagttctttggtatgatggaaggaatacattctatggagactccgtgaagggccgattcaccatctccagagacaattccaagaagacactgtatctgcaaatggtcagcctgagagccgaggacacggctgtgtattactgtgcgagacccctaggctttggtggtaacgaaaaccactactactacatggacgtctggggcaaagggaccacggtcaccgtctcctca

SEQ ID NO: 13112 - DNA, 310 bp, Homo sapiens
  source 1..310: mol_type = other DNA
tgcagcgtatggattcaccttcagtacctatgccatgcactgggtccgccaggctccaggcatggggctggagtgggtggcagttgtatggtatgatggaagtaataaacactatggagactccgtgaagggccgattcaccatctccagagacaactccaggaaaacgctgtatctgcaaatggacagcctgagagccgaggacacggctgtgtattactgtgcgagacccctaggcttcggtggtaacgaaaaccactattactacatggacgtctggggcaaagggacaacggtcaccgtctcctca

SEQ ID NO: 13113 - DNA, 310 bp, Homo sapiens
  source 1..310: mol_type = other DNA
tgcagcgtctggattcaccttcagtagctatggcatgcactgggtccgccaggctccaggcatggggctggagtgggtggcagttctatggtttgatggaagtaataaatactatgcaaactccgtgaagggccgattcaccatctccagagacaattccaagaacacgctgtatctgcaaatggacagcctgggagccgaggacacggctgtctattactgtgcgagacccctaggcttcggtggtaacgaaaaccactactactacatggacgtctggggcaaagggaccacggtcaccgtctcctca

SEQ ID NO: 13114 - DNA, 310 bp, Homo sapiens
  source 1..310: mol_type = other DNA
tgcagcgtctggattcaccttcagtacctatgccatgcactgggtccgccaggctccaggcatggggctggagtgggtggcagttctttggtatgatggaagaaataaattctatgcagagtccgtgaagggccgattcaccatctccagagacaatcccaagaagacactgtatctgcaaatggacagcctgagagccgaggacacggctgtgtattactgtgcgagacccctaggctttggtggtaacgaaaaccactactactacatggacgtctggggcaaagggaccacggtcaccgtctcctca

SEQ ID NO: 13115 - DNA, 310 bp, Homo sapiens
  source 1..310: mol_type = other DNA
tgcagcgtctggattcactttcagtagctatgccatgcactgggtccgccaggctccaggcatggggctggagtgggtggcagttctatggtttgatggaagtaataaattctatgcaaactccgtgaagggccgattcaccatctccagggacaattccaagaacacactgtatctgcaaatggacagcctgggagccgaggacacggctgtctattactgtgcgagacccctaggcttcggtggtaacgaaaaccactactactacatggacgtctggggcaaagggaccacggtcaccgtctcttca

SEQ ID NO: 13116 - DNA, 310 bp, Homo sapiens
  source 1..310: mol_type = other DNA
tgcagcgtctggattcaccttcagtagctatgccatgcactgggtccgccaggctccaggcatggggctggagtgggtggcagttctatggtatgatggaagtaataaatactatacagactccgtgaagggccgattcaccatctccagagacaattccaagaacacagtgtatctgcaaatgaacagcctgagagccgaggacacggctgtgtactactgtgcgagacccctaggcttcggtggtaatgaaaaccactactactacatggacgtctggggcaaagggaccacggtcaccgtctcctca

SEQ ID NO: 13117 - DNA, 310 bp, Homo sapiens
  source 1..310: mol_type = other DNA
tgcagcgtctggattcaccttcagtacctatgccatgcactgggtccgccaggctccaggcatggggctggagtgggtggcagttctttggtatgatggaaggaataaattctatgcagactccgtgaagggccgattcaccatctccagagacaattccaagaagacgctgtatctgcaaatggacagcctgagagccgaggacacggctgtgtattactgtgcgagacccctaggctttggtggtaacgaaaaccactactactacatggacgtctggggcaaagggaccacggtcaccgtctcctca

SEQ ID NO: 13118 - DNA, 289 bp, Homo sapiens
  source 1..289: mol_type = other DNA
tgaagcctctggattcagttacagttcctattggatgagctgggtccgccaggctccagggaaggggctggagtgggtggccaacataaaacaagatgaaagcacgaaaaactatgtggactctgtgaagggccgattcaccatctccagagacaacgccaaaaactcactatatctgcaaatgggcagcctgagagccgaggacacgggtgtctattactgtgcgagagacgacggctggagtcgttttgagttctggggccagggaaccctggtcaccgtctcctca

SEQ ID NO: 13119 - DNA, 289 bp, Homo sapiens
  source 1..289: mol_type = other DNA
tgaagcctctggattcacttacaattcctattggatgagctgggtccgccaggctccagggaaggggctggagtgggtgggcaacataaaccaagatgaaagcacgaaaaactacgtggactctgtgaagggccgattcaccatctccagagacaacgccaaaaactcactatatctgcaaatgggcagcctgagagccgaggacacgggtgtctattactgtgcgagagacgacggctggagtcgttttgagttctggggccagggaaccctggtcaccgtctcctca

SEQ ID NO: 13120 - DNA, 289 bp, Homo sapiens
  source 1..289: mol_type = other DNA
tgaagcctctggattcagttacagttcctattggatgagctgggtccgccaggctccagggaaggggctggagtgggtggccaacataaaacaagatgaaagcacgaaaaactatgtggactctgtggagggccgattcaccatctccagagacaacgccaaaaactcactatatctgcaaatgggcagcctgagagccgaggacacgggtgtctattactgtgcgagagacgacggctggagtcgttttgagttctggggccagggaaccctggtcaccgtctcctca

SEQ ID NO: 13121 - DNA, 289 bp, Homo sapiens
  source 1..289: mol_type = other DNA
tgaagcctctggattcagttacagttcctattggatgagctgggtccgccaggctccagggaaggggctggagtgggtggccaacataaaacaagatgaaagcacgaaaaactatgtggactctgtgaagggccgattcaccatttccagagacaacgccaaaaactcactatatctgcaaatgggcagcctgagagccgaggacacgggtgtctattactgtgcgagagacgacggctggagtcgttttgagttctggggccagggaaccctggtcaccgtctcctca

SEQ ID NO: 13122 - DNA, 289 bp, Homo sapiens
  source 1..289: mol_type = other DNA
tgaagcctctggattcacctttagtgactattggatgagctgggtccgccaggctccagggatggggctggagtgggtggccaacataaagcaagatgaaagtaagaaaaactatgtggactctgtgaagggccgattcaccatctccagagacaacgccaggaacgcactgtatctgcaaatggacagcctgagagccgaggacacggctgtctattactgtgcgagagacgacggctggagtcgttttgagttctggggccagggaaccctggtcaccgtctcctca

SEQ ID NO: 13123 - DNA, 286 bp, Homo sapiens
  source 1..286: mol_type = other DNA
tacagcttctggattcacctttggtgattctggtatgagctgggtccgccaggctccagggaaggggctggagtgggtaggttacattagaggcaaagcttctggtgggacaacagaatacgccgcgtctgtgaaaggcagattcaccatctcaagagatgattccaaaagcatcgcctatctgcaaatgaacagcctgaaaaccgaggacacaggcgtgtattactgtgctagaagatcggtatttgactcctggggccagggaaccctggtcaccgtctcctca

SEQ ID NO: 13124 - DNA, 286 bp, Homo sapiens; identical to SEQ ID NO: 13123
  source 1..286: mol_type = other DNA

SEQ ID NO: 13125 - DNA, 286 bp, Homo sapiens
  source 1..286: mol_type = other DNA
tacagcttctggattcacctttggtgattctggtatgagctgggtccgccaggctccagggaaggggctggagtgggtaggttacattagaggcaaagtttctggtgggacaacagaatacgccgcgtctgtgaaaggcagattcaccatctcaagagatgattccaaaagcatcgcctatctgcaaatgaacagcctgaaaaccgaggacacaggcgtgtattactgtgctagaagatcggtatttgactcctggggccagggaaccctggtcaccgtctcctca

SEQ ID NO: 13126 - DNA, 286 bp, Homo sapiens
  source 1..286: mol_type = other DNA
tacagcttctggattcacctttggtgattctggtatgagctggatccgccaggctccagggaaggggctggagtgggtaggttacattagaggcaaagcttctggtgggacaacagaatacgccgcgtctgtgaaaggcagattcaccatctcaagagatgattccaaaagcatcgcctatctgcaaatgaacagcctgaaaaccgaggacacaggcgtgtattactgtgctagaagatcggtatttgactcctggggccagggaaccctggtcaccgtctcctca

SEQ ID NO: 13127 - DNA, 286 bp, Homo sapiens
  source 1..286: mol_type = other DNA
tacagcttctggattcacctttggtgattttggtatgagctgggtccgccaggctccagggaaggggctggagtgggtaggttacattagaggcaaagcttctggtgggacaacagaatacgccgcgtctgtgaaaggcagattcaccatctcaagagatgattccaaaagcatcgcctatctgcaaatgaacagcctgaaaaccgaggacacaggcgtgtattactgtgctagaagatcggtatttgactcctggggccagggaaccctggtcaccgtctcctca

SEQ ID NO: 13128 - DNA, 295 bp, Homo sapiens
  source 1..295: mol_type = other DNA
cggtgtctccggtgtctccatcagcaacaacaactggtggacttgggcccgccagacccccgggaaggggctggagtggattggagaaatccatcacagtatgggcacccactatagtccgtccctcaagagtcgactcaccatatcagtcgacaagtccaagaatgacttctccctgaccttgacttctgtgaccgccgcggacacggccgtatattattgtgcgagagaccgggaggagtgggcagctgctagcgacgtctggggccagggaatcctggtcaccgtctcctca

SEQ ID NO: 13129 - DNA, 295 bp, Homo sapiens; identical to SEQ ID NO: 13128
  source 1..295: mol_type = other DNA

SEQ ID NO: 13130 - DNA, 295 bp, Homo sapiens
  source 1..295: mol_type = other DNA
cgctgtctctggtgggtccatcagtaataataactggtggacttgggtccgccagccccccgggaaggggctggagtggattggggaagtccatcacagattgggcacccactataaaccgtccctcaagagtcgactcgaaatatcaatcgacaagtccaagaatgagttctccctgaagctgacctctgtgaccgccgcggacacggccgtctattattgtgcgagagatcgggaggagtgggcagctgctagcgacgtctggggcccgggaaccctggtcaccgtctcctca

SEQ ID NO: 13131 - DNA, 295 bp, Homo sapiens; identical to SEQ ID NO: 13128
  source 1..295: mol_type = other DNA

SEQ ID NO: 13132 - DNA, 295 bp, Homo sapiens
  source 1..295: mol_type = other DNA
cgctgtctctggtgggtccatcagtaataataactggtggacttgggtccgccagccccccgggaaggggctggagtggattggggaagtccatcacagattgggcacccactataaaccgtccctcaagagtcgactcgaaatatcaatcgacaagtccaagaatgagctctccctgaagctgacctctgtgaccgccgcggacacggccgtctattattgtgcgagagatcgggaggagtgggcagctgctagcgacgtctggggcccgggaaccctggtcaccgtctcctca

SEQ ID NO: 13133 - DNA, 295 bp, Homo sapiens
  source 1..295: mol_type = other DNA
cgctgtctccggtggctccatcacgaataataattggtggacttgggtccgccagccccccgggaaggggctggagtggattggggaaatccttcacgatgggaggacccactacagtccgtccctcaagagtcgactcaccatttcaatggacaagtccaggaatgagttctccctgaggttgacctctgtgaccgccgcggacacggccgtctattactgtgcgagagatcgggaggaatgggcagctgctagcgacgtctggggccagggaaccctggtcaccgtctcctca

SEQ ID NO: 13134 - DNA, 313 bp, Homo sapiens
  source 1..313: mol_type = other DNA
cgctgtttctggtggctccatcagcgatggtggttattcctggggttgggtccggcagccaccagggaagcccctggagtggcttggttacatcttttacactgggaccaccttcctcaacccgtccctcaggagtcgggtcaccttgtcggtagacacgtccaagaatcgtttctccctgcaactcagctctgtgaccgccgcggacacggccgtctattactgtgccagagccgatttttatactcgtcgtgattatcaaggaaatgcttttgatgtctggggccaggggacaaaggtcaccgtctcctca

SEQ ID NO: 13135 - DNA, 313 bp, Homo sapiens
  source 1..313: mol_type = other DNA
cgctgtttctggtggctccatcagcgatggtggttattcctggagctgggtccggcagccaccagggaagcccctggagtggcttggttacatcttttacactgggaccaccttcctcaacccgtccctcaggagtcgagtcaccttgtcggtagacacgtccaagaatcgtttctccctgcagctcagctctgtgaccgccgcggacacggccgtctattactgtgccagagccgatttctatactcgtcgtgattatcaaggaaatgcttttgatgtctggggccaggggacaaaggtcaccgtctcctca

SEQ ID NO: 13136 - DNA, 313 bp, Homo sapiens
  source 1..313: mol_type = other DNA
cgctgtttctggtggctccatcagcgatggtggttattcctggagctgggtccggcagccaccagggaagcccctggagtggcttggttacatcttttacactgggaccaccttcctcaacccgtccctcaggagtcgagtcaccttgtcggtagacacgtccaagaatcgtttccccctgcagctcagctctgtgaccgccgcggacacggccgtctattactgtgccagagccgatttctatactcgtcgtgattatcaaggaaatgcttttgatgtctggggccaggggacaaaggtcaccgtctcctca

SEQ ID NO: 13137 - DNA, 313 bp, Homo sapiens
  source 1..313: mol_type = other DNA
cgctgtttctggtggctccatcagtgacggtggttattcctggagctgggtccggcagccaccagggaagcccctggagtggcttggttacatcttttacactgggacgaccttcctcaacccgtccctcaggagtcgagtcaccttgtcggtagacacgtcccagaatcgtttctccctgcagctcagctctgtgaccgccgcggacacggccgtctattactgtgccagagccgatttctatactcgtcgtgattatcaaggaaatgcttttgatgtctggggccaggggacaaaggtcaccgtctcctca

SEQ ID NO: 13138 - DNA, 307 bp, Homo sapiens
  source 1..307: mol_type = other DNA
tgcagccgctggattcacctttagttcctaccagatgcactgggtccgccagtttccagggaaggggctggagtgggtcgcggccattactagtgatgggagtagcacattcttcgcggacttcgtgcagggccgattcaccctctccagagacaacgccaagagcacgatgtatctacaaatgaacggtctgagagccgaggacacggctgtgtattattgtgtaagagcgagagggagggatggaacaactggcaaaaactgcttcgacccctggggccagggaaccctggtcaccgtctcctca

SEQ ID NO: 13139 - DNA, 307 bp, Homo sapiens
  source 1..307: mol_type = other DNA
tgcagccgctggattcacttttagttcctaccagatgcactgggtccgccagtttccagggaaggggctggagtgggtcgcggccattactagtgatgggagtagcacattcttcgcggacttcgtgcagggccgattcaccctctccagagacaacgccaagagcacgatgtatctacaaatgaacggtctgagagccgaggacacggctgtgtattattgtgtaagagcgagagggagggatggaacaactggcaaaaactgcttcgacccctggggccagggaaccctggtcaccgtctcctca

SEQ ID NO: 13140 - DNA, 307 bp, Homo sapiens
  source 1..307: mol_type = other DNA
tgcagccgctggattcacctttagttcctaccagatgcactgggtccgccagtttccagggaaggggctggaatgggtcgcggccattactagtgatgggagtagcacattcttcgcggacttcgtgcagggccgattcacgttctccagagacaacgccaagagcacgatgtatctacaaatgaacggtctgagagtcgaggacacggctgtttattattgtgtaagagcgagagggagggatggaacaactggcaaaaactgcttcgacccctggggccaggggaccctggtcaccgtctcctca

SEQ ID NO: 13141 - DNA, 307 bp, Homo sapiens
  source 1..307: mol_type = other DNA
tgcagccgctggattcacctttagttcctaccagatgcactgggtccgccagtttccagggaaggggctggagtgggtcgcggccattactagtgatgggagtagcacattcttcgcggacttcgtgcagggccgattcacgctctccagagacaacgccaagagcacgatgtatctacaaatgaacggtctgagagtcgaggacacggctgtttattattgtgtaagagcgagagggagggatggaacaactggcaaaaactgcttcgacccctggggccagggaaccctggtcaccgtctcctca

SEQ ID NO: 13142 - DNA, 298 bp, Homo sapiens
  source 1..298: mol_type = other DNA
cactgtctctggtggctccttcagtagtgactactggagctggatccggcagcccccagggaagggactggagtggattggatatatctattacactgggaccaccaactacaacccctccctcaagagtcgagtcaccatatcagtagacacgtccaagagccagttctccctgaagctgagctctgtgaccgctgcggacacggccgtatattactgtgcgagattgctttactatgatagaagtggttatcacctcggggactggggccagggaaccctggtcaccgtctcctca

SEQ ID NO: 13143 - DNA, 298 bp, Homo sapiens
  source 1..298: mol_type = other DNA
cactgtctctggtggctccttcagtagtgactactggagctggatccggcagcccccagggaagggactggagtggattgggtatatctattacactgggaccaccaactacaacccctccctcaagagtcgagtcaccatatcagtagacacgtccaagagccagttctccctgaagctgagctctgtgaccgctgcggacacggccgtgtattactgtgcgagattgctttactatgatagaagtggttatcacctcggggactggggccagggaaccctggtcaccgtctcctca

SEQ ID NO: 13144 - DNA, 298 bp, Homo sapiens
  source 1..298: mol_type = other DNA
cactgtctctggtggctccttcagtagtgactactggagctggatccggcagcccccagggaagggactggagtggattgggtatatctattacactgggaccaccaactacaacccctccctcaagagtcgagtcaccatatcagtagacacgtccaagagccagttctccctgaagctgagctctgtgaccgctgcggacacggccgtatattactgtgcgagattgctttactatgatagaagtggttatcacctcggggactggggccagggaaccctggtcaccgtctcctca

SEQ ID NO: 13145 - DNA, 297 bp, Homo sapiens
  source 1..297: mol_type = other DNA
cacttctctggtggctccttcagtagtgactactggagctggatccggcagcccccagggaagggactggagtggattggatatatctattacactgggaccaccaactacaacccctccctcaagagtcgagtcaccatatcagtagacacgtccaagagccagttctccctgaagctgagctctgtgaccgctgcggacacggccgtatattactgtgcgagattgctttactatgatagaagtggttatcacctcggggactggggccagggaaccctggtcaccgtctcctca

SEQ ID NO: 13146 - DNA, 298 bp, Homo sapiens
  source 1..298: mol_type = other DNA
cactgtctctggtggttccttcagtagtgactactggagctggatccggcagcccccagggaagggactggagtggattggatatatctattacactgggaccaccaactacaacccctccctcaagagtcgagtcaccatatcagtagacacgtccaagagccagttctccctgaagctgagctctgtgaccgctgcggacacggccgtatattactgtgcgagattgctttactatgatagaagtggttatcacctcggggactggggccagggaaccctggtcaccgtctcctca

SEQ ID NO: 13147 - DNA, 298 bp, Homo sapiens
  source 1..298: mol_type = other DNA
cactgtctctggtggctccttcagtagtgactactggagctggatccggcagcccccagggaagggactggagtggattgggtatatctattacactgggaccaccaactacaacccctccctcaggagtcgagtcaccatatcagtagacacgtccaagagccagttctccctgaagctgagctctgtgaccgctgcggacacggccgtctattactgtgcgagattgctttactatgatagaagtggttatcacctcggggactggggccagggaaccctggtcaccgtctcctca

SEQ ID NO: 13148 - DNA, 295 bp, Homo sapiens
  source 1..295: mol_type = other DNA
cacaggctctacaggctctcctggatttaatttcaaaaaggcctatatgagctgggtccgccaggctccagggaaggggctggagtggattggccgtattaaaggcgaaaatgaaggtgggataaaagactacgctgcacccgtggaaggcagattcaccctctcaagagatgattcaataaacaccgtgtatctccaaatgaccagcctgagaaccgaggacacagccgtgtattattgcaccacaggaatacttcccctctggggccagggaaccctggtcaccgtctcctca

SEQ ID NO: 13149 - DNA, 295 bp, Homo sapiens
  source 1..295: mol_type = other DNA
cacaggctctacaggctctcctggatttaattccaaaaaggcctatatgagctgggtccgccaggctccagggaaggggctggagtggattggccgtattaaaggcgaaaatgaaggtgggataaaagactacgctgcacccgtggaaggcagattcaccctctcaagagatgattcaataaacaccgtgtatctccaaatgaccagcctgagaaccgaggacacagccgtgtattattgcaccacaggaatacttcccctctggggccagggaaccctggtcaccgtctcctca

SEQ ID NO: 13150 - DNA, 295 bp, Homo sapiens
  source 1..295: mol_type = other DNA
cacaggctctacaggctctcctggatttaatttcaaaaaggcctatatgagctgggtccgccaggctccagggaaggggctggagtggattggccgtattaaaggcgaaaatgaaggtgggataaaagactacgctgcacccgtggaaggcagattcaccctctcaagagatgattcaataaacaccgtgtatctccaaatgaccagcctgagaaccgaggacacagccgtgtattattgcaccacaggaattcttcccctctggggccagggaaccctggtcaccgtctcctca

SEQ ID NO: 13151 - DNA, 295 bp, Homo sapiens
  source 1..295: mol_type = other DNA
cataggctctacaggctctcctggatttaatttcaaaaaggcctatatgagctgggtccgccaggctccagggaaggggctggagtggattggccgtattaaaggcgaaaatgaaggtgggataaaagactacgctgcacccgtggaaggcagattcaccctctcaagagatgattcaataaacaccgtgtatctccaaatgaccagcctgagaaccgaggacacagccgtgtattattgcaccacaggaatacttcccctctggggccagggaaccctggtcaccgtctcctca

SEQ ID NO: 13152 - DNA, 283 bp, Homo sapiens
  source 1..283: mol_type = other DNA
tgcagcctctggaattaatttcaaaaaggcctggatgagctgggtccgccaggctccagggaaggggctggagtggattggccgtgttaaaagcgaaactgatggtgggacaacagactacgctgcacccgtggaaggcagattcaccatctcaagagatgattcaataaacaccctgtatctgcaaatgaccagcctgaaaaccgaggacacagccgtgtattactgtaccacagggatacttcccctctggggccagggaaccctggtcaccgtctcctca

SEQ ID NO: 13153 - DNA, 280 bp, Homo sapiens
  source 1..280: mol_type = other DNA
tgcagcctctggaattaatttcaaaaaggcctggatgagctgggtccgccaggctccagggaaggggctggagtggattggccgtgttaaaagcgaaactgatggtgggacagactacgctgcacccgtggaaggcagattcaccatctcaagagatgattcaataaacaccctgtatctgcaaatgaccagcctgaaaaccgaggacacagccgtgtattactgtaccacagggatacttcccctctggggccagggaaccctggtcaccgtctcctca

SEQ ID NO: 13154 - DNA, 289 bp, Homo sapiens
  source 1..289: mol_type = other DNA
tgcagcctctggattcacgtttagtacctattggatgacgtgggtccgccaggctccagggaaggggctggagtgggtggccaatataaaggaagatggaggcgacaaatactatgcggactctgtgaagggccgattcaccatctccagagacgaccccaagagctcactttatctgcaaatgaacttcctgggagtcgtcgacacggccgtgtattactgtgcgagagggggccggactggtgctcttgatttctggggccttgggacactggtcaccgtctcttca

SEQ ID NO: 13155 - DNA, 289 bp, Homo sapiens
  source 1..289: mol_type = other DNA
tgcagcctctggattcacgtttagtacctattggatgacgcgggtccgccaggctccagggaaggggctggagtgggtggccaatataaaggaagatggaggcgacaaatactatgcggactctgtgaagggccgattcaccatctccagagacgaccccaagagctcactttatctgcaaatgaacttcctgggagtcgtcgacacggccgtgtattactgtgcgagagggggccggactggtgctcttgatttctggggccttgggacactggtcaccgtctcttca

SEQ ID NO: 13156 - DNA, 289 bp, Homo sapiens
  source 1..289: mol_type = other DNA
tgcagcctctggattcacatttagcacctattggatgacctgggtccgccaggctccagggaaggggctggagtgggtggccaatataaaggaagatggaagcgacaaatactatgcggactctgtgaagggccgattcaccatctccagagacgaccccaagagctcactctatctgcaaatgaacttcctgggagtcgccgacacggccgtgtattattgtgcgagagggggccggactggtgctcttgatttctggggccttgggacactggtcaccgtctcttca

SEQ ID NO: 13157 - DNA, 289 bp, Homo sapiens
  source 1..289: mol_type = other DNA
tgcagcctctggattcacgtttagtacctattggatgacgtgggtccgccaggctccagggaaggggctggagtgggtggccaatataaaggaagatggaagcgacaaatactatgcggactctgtgaagggccgattcaccatctccagagacgaccccaagagctcactttatctgcaaatgaacttcctgggagtcgtcgacacggccgtgtattactgtgcgagagggggccggactggtgctcttgatttctggggccttgggacactggtcaccgtctcttca

SEQ ID NO: 13158 - DNA, 289 bp, Homo sapiens
  source 1..289: mol_type = other DNA
tgcagcctctggattcacctttagtacctattggatgacgtgggtccgccaggctccagggaaggggctggagtgggtggccaatataaaggaagatggaagcgacaaatactatgcggactctgtgaagggccgattcaccatctccagagacgaccccaagagctcactttatctgcaaatgaatttcctgggagtcgtcgacacggccgtgtactactgtgcgagagggggccggactggtgctcttgatttctggggccttgggacactggtcaccgtctcttca

SEQ ID NO: 13159 - DNA, 289 bp, Homo sapiens
  source 1..289: mol_type = other DNA
tgcagcctctggattcacccttagtacctattggatgacctgggtccgccaggctccagggaaggggctggagtgggtgggcaacataaaggaagatggaagtgagaaatactatgtggactctgtgaagggccgattcaccatctccagagacgaccccaagaactcactatatctgcaaatgaacttcctgggagtcgtggacacggccgtgtattactgtgcgagagggggccggactggtgctcttgatttctggggccaagggacactggtcaccgtctcttca

SEQ ID NO: 13160 - DNA, 289 bp, Homo sapiens
  source 1..289: mol_type = other DNA
tgcagcctctggattcacatttagtacctattggatgacgtgggtccgccaggctccagggaaggggctggagtgggtggccaatataaaggaagatggaagcgacaaatactatgcggactctgtgaagggccgattcaccatctccagagacgaccccaagacctcactttatctgcaaatgaacttcctgggagtcgtcgacacggccgtttattactgtgcgagagggggccggactggtgctcttgatttctggggccttgggacactggtcaccgtctcttca

SEQ ID NO: 13161 - DNA, 289 bp, Homo sapiens; identical to SEQ ID NO: 13157
  source 1..289: mol_type = other DNA

SEQ ID NO: 13162 - DNA, 289 bp, Homo sapiens
  source 1..289: mol_type = other DNA
tgcagcctctggattcacgtttagtacctattggatgacgtgggtccgccaggctccagggaaggggctggagtgggtggccaatataaaggaagatggaagcgacaaatactatgcggactctgtgaagggccgactcaccatctccagagacgaccccaagagctcactttatctgcaaatgaacttcctgggagtcgtcgacacggccgtgtattactgtgcgagagggggccggactggtgctcttgatttctggggccttgggacactggtcaccgtctcttca

SEQ ID NO: 13163 - DNA, 298 bp, Homo sapiens
  source 1..298: mol_type = other DNA
cactgtatctggaggctctattagcggttacttctggggctggttccggcagtccccagagaagggactggagtggattaactatgtccttgagactggcagaaccaaggacaatccctccttcgtgagtcgagccactgtatcgtcagacatgtccaagagtcaaatctacctgaagctgacctctgtgaccgctgcggacgcggccgtgtattattgtgcgagattgccccgtgtggctggaagttttgggtggttcgacgcctggggcccgggaattcgggtcactgtctcctca

SEQ ID NO: 13164 - DNA, 298 bp, Homo sapiens
  source 1..298: mol_type = other DNA
cactgtatctggaggctccattagtggttacttctggggctggttccggcagtccccagagaagggactggagtggattaactatgtccttgagactggcaaaaccaaggacaatccctccttcgtgagtcgagccactgtttcgtcagacatgtccaagagtcaattctacctgaagctgacctctgtgaccgctgcggacgcggccgtgtattattgtgcgagattgccccgtgtggctggaagttttgggtggttcgacgcctggggcccgggaattcgggtcaccgtctcctca

SEQ ID NO: 13165 - DNA, 298 bp, Homo sapiens
  source 1..298: mol_type = other DNA
cactgtatctggaggctccattagtggttacttctggggctggttccggcagtccccagagaagggactggagtggattaactatgtccttgaggctggcaaaaccaaggacaatccctccttcgtgagtcgagccactgtttcgtcagacatgtccaagagtcaattctacctgaagctgacctctgtgaccgctgcggacgcggccgtgtattattgtgcgagattgccccgtgtggctggaagttttgggtggttcgacgcctggggcccgggaattcgggtcaccgtctcctca

SEQ ID NO: 13166 - DNA, 307 bp, Homo sapiens
  source 1..307: mol_type = other DNA
tgcagcctctggattcaccttcaatatctatagtatgaactgggtccgcctggctccagggaaggggctggagtgggtctcatccattagtagtagtagtagtttcataaactacgcagactcagtgcagggccgattcaccatctccagagacaacgccaggaactcactgtttctgcaaatgaacagcctgagagccgaggacacggctgtctattactgtgcgagagagcgtagtagtaccacctggggggcggatgatgcttttgatatctggggccaagggacaatggtcaccgtctcttca

SEQ ID NO: 13167 - DNA, 307 bp, Homo sapiens
  source 1..307: mol_type = other DNA
tgcagcctctggattcaccttcaatatctatagtatgcactgggtccgcctggctccagggaaggggctggagtgggtctcatccattagtagtagtagtagtttcataaattatgcagactcagtgcagggccgattcaccatctccagagacaacgccagggactcactgtttctgcacatgaacagcctgagagccgaggacacggctgtctattactgtgcgagagagcgtagtagtaccacctggggggcggatgatgcttttgatatctggggccaagggacaatggtcaccgtctcttca

SEQ ID NO: 13168 - DNA, 307 bp, Homo sapiens
  source 1..307: mol_type = other DNA
tgcagcctctggattcaccttcaatatctatagtatgaactgggtccgcctggctccagggaaggggctggagtgggtctcatccattagtagtagcagtagtttcataaactacgcagactcagtgcagggccgattcaccatctccagagacaacgccaggaactcactgtttctgcaaatgaacagcctgagagccgaggacacggctgtctattactgtgcgagagagcgtagtagtaccacctggggggcggatgatgcttttgatatatggggccaagggacaatggtcaccgtctcttca

SEQ ID NO: 13169 - DNA, 307 bp, Homo sapiens
  source 1..307: mol_type = other DNA
tgcagcctctggattcaccttcaatatctatagtatgaactgggtccgcctggctccagggaaggggctggagtgggtctcatccattagtagtagtagtagtttcataaactacgcagactcagtgcagggccgattcaccatctccagagacaacgccaggaactcactgtttctgcaaatgaacagcctgagagccgaggacacggctgtctattactgtgcgagggagcgtagtagtaccacctggggggcggatgatgcttttgatatctggggccaagggacaatggtcaccgtctcttca

SEQ ID NO: 13170 - DNA, 295 bp, Homo sapiens
  source 1..295: mol_type = other DNA
cgctgtctccggtggctccatcaccaatgataactactggacttgggcccgccaggcccccgggaaggggctggagtgggttggggaaatccatcccagtgggaccacccactatagtccgtccctcaagagtcgactcaccatctcgctcgacaagtccaagaatgagttctccttgaggctgacgtctgtgaccgccgcggacacggccgtgtattattgtgcgagagatcgggagggatggcaagccgccagcgacgtctggggccagggaaccccggtcaccgtctcctca

SEQ ID NO: 13171 - DNA, 295 bp, Homo sapiens
  source 1..295: mol_type = other DNA
cgctgtctccggtggctccatcaccaataataactactggacttgggcccgccaggcccccgggaaggggctggagtgggttggggaaatccatcccagtgggaccacccactatagtccgtccctcaagagtcgactcaccatctcgctcgacaagtccaagaatgagttctccctgaggctgacgtctgtgaccgccgcggacacggccgtgtattattgtgcgagagatcgggagggatggcaagccgctagcgacgtctggggccagggaaccccggtcaccgtctcctca

SEQ ID NO: 13172 - DNA, 295 bp, Homo sapiens
  source 1..295: mol_type = other DNA
cgctgtctctggtgcctccatcagcaataataactggtggacttgggtccgccagccccccgggaaggggctgcaatggcttggggaagtccttcacaatgggaacacccactacaacccgtccctccagagtcgactcactatatctatggacaagtccaacaatgaattctacctgaggctggagtctgtgaccgccgcggacacggccatgtattactgtgcgagagatcgggaggggtggcaggctgccagcgacgtctggggcccgggaaccctggtcaccgtctcctca

SEQ ID NO: 13173 - DNA, 295 bp, Homo sapiens
  source 1..295: mol_type = other DNA
cgctgtctccggtgggtccatcaccaataataactggtggacttgggcccgacaggcccccgggaaggggctggagtgggttggggaaatccatcccagtgggaccacccactatagtccgtccctcaagagtcgactcaccatctcgctcgacaagtccaagaatgagttctacctgaggctgacgtctgtgaccgccgcggacacggccgtgtattattgtgcgagagatcgggagggatggcaagccgctagcgacgtctggggccagggaaccccggtcaccgtctcctca

SEQ ID NO: 13174 - DNA, 295 bp, Homo sapiens
  source 1..295: mol_type = other DNA
cgctgtctccggtggctccatcaacaataacaactggtggacttgggcccgccggccccccgggaaggggctggagtggcttgcggaaatccatcccgatgggggcacccactatagtccgtctctcaagagtcgactcaccatatcactcgacaagtccaagaatgagttctccctgacgttgagttcagtcgccgccgcggacacggccgtctattattgtgcgagagatcgggagggctggcaagctgctagtgacgtctggggccagggaattctggtcaccgtctcgtct

SEQ ID NO: 13175 - DNA, 295 bp, Homo sapiens
  source 1..295: mol_type = other DNA
cgctgtctccggtggctccatcaccaataataactactggacttgggcccgccaggcccccgggaaggggctggagtgggttggggaaatccatcccagtgggaccacccactatagtccgtccctcaagagtcgactcaccatctcgatcgacaagtccaagaatgagttctccctgaggctgacgtctgtgaccgccgcggacacggccgtgtattattgtgcgagagatcgggagggatggcaagccgctagcgacgtctggggccagggaaccccggtcaccgtctcctca

SEQ ID NO: 13176 - DNA, 295 bp, Homo sapiens
  source 1..295: mol_type = other DNA
cgctgtctccggtggctccatcaccaataataactactggacttgggcccgccaggcccccgggaaggggctggagtgggtcggggaaatccatcccagtgggaccacccactatagtccgtccctcaagagtcgactcaccatctcgctcgacaagtccaagaatgagttctccctgaggctgacgtctgtgaccgccgcggacacggccgtgtattattgtgcgagagatcgggagggatggcaagccgctagcgacgtctggggccagggaaccccggtcaccgtctcctca

SEQ ID NO: 13177 - DNA, 295 bp, Homo sapiens
  source 1..295: mol_type = other DNA
cgctgtctccggtggctccatcaccaataataactactggacttgggcccgccaggcccccgggaaggggctggagtgggttggggaaatccatcccagtgggaccacccactataatccgtccctcaagagtcgactcaccatctcgctcgacaagtccaagaatgagttctccctgaggctgacgtctgtgaccgccgcggacacggccgtgtattattgtgcgagagatcgggagggatggcaagccgctagcgacgtctggggccagggaaccccggtcaccgtctcctca

SEQ ID NO: 13178 - DNA, 295 bp, Homo sapiens
  source 1..295: mol_type = other DNA
cgctatctccggtggctccatcaccaataataactactggacttgggcccgccaggcccccgggaaggggctggagtgggttggggaaatccatcccagtgggaccacccactatagtccgtccctcaagagtcgactcaccatctcgctcgacaagtccaagaatgagttctccctgaggctgacgtctgtgaccgccgcggacacggccgtgtattattgtgcgagagatcgggagggatggcaagccgctagcgacgtctggggccagggaaccccggtcaccgtctcctca

SEQ ID NO: 13179 - DNA, 319 bp, Homo sapiens
  source 1..319: mol_type = other DNA
tgcagcctctgggttcaccttcgacaactatgcgattcactgggtccgccagaccccaggcaggggactggagtgggtggcacttatcgcaaacgatggaggtcaagaatacttcgctgagtccgtgaagggccgatttaccatctccagagatagatacaagagaaaagttattctgtacatgaacattttgagacctgacgacacggctgtctattactgtgcgagagatggggcggatctcggggctccggggccttatcagcctcactactacatggacgtctggggcagagggaccacggtcaccgtctcgtca

SEQ ID NO: 13180 - DNA, 319 bp, Homo sapiens
  source 1..319: mol_type = other DNA
tgcagcctctggtttcaccttcgacaactatgcgattcactgggtccgccagaccccaggcaggggactggagtgggtggcagttatcgcaaatgatggaggtcaagaatacttcgctgactccgtgaagggccgatttaccatctccagagatagatacaagagaaaagttattctgtacatgaacattttgagacctgacgacacggctgtctattactgtgcgagagatggggcggatctcggtgctccggggccttatcagcctcactactacatggacgtctggggcagagggaccacggtcaccgtctcgtca

SEQ ID NO: 13181 - DNA, 298 bp, Homo sapiens
  source 1..298: mol_type = other DNA
cactgtctctggtggctccctcagcggtttcttttggggctggttccgacagtccccagagaagggactggaatggattggatatgtccttgacactggggacaccaaggacaatccctccttcgtgagtcgatctaccatatcactcgacaagtcaaacagtcgattctccctgaagctgaggtctatgaccgttgcggacacggccgtttattattgtgcgcgattgccccgtgtggctggaagttttggattcttcgacccctggggccggggaattctggtcaccgtttcctca

SEQ ID NO: 13182 - DNA, 298 bp, Homo sapiens
  source 1..298: mol_type = other DNA
cactgtctctggtggctccatcagtggtttcttttggggctggttccggcagtccccagagaagggactggagtggattggctatgtctttgacactgggaacaccaaggacaatccctccttcgtgagtcgagctaccatatcactagacatgtcaagcagtcgattctccctgaagctgacctctgtgaccgttgcggacacagccgtttattattgtgcgagattgccccgtgtggctggaagttttgggttcttcgacccctggggccggggaattctggtcaccgtctcctca

SEQ ID NO: 13183 - DNA, 298 bp, Homo sapiens
  source 1..298: mol_type = other DNA
cactgtctctggtgactccatcagaggttacttctggggctggttccggcagaccccagagcaggggctggagtggatagggtatgtccttgacagtggacaaaccaaggaaaatccgtccttcgtgagtcgagtcaccatatcacgggacatgtccaagagccaattctccctgaaactgtcctctgtgaccgttgcggacacggccgtctattattgtgcgagattgccccgtgtggctggaagttttgggtttttcgacccctggggccagggaattctggtcaccgtctcctca

SEQ ID NO: 13184 - DNA, 298 bp, Homo sapiens
  source 1..298: mol_type = other DNA
cactgtctctggtggctccatcagaggttacttctggggctggttccggcagaccccagagcagggactggagtggatagggtatgtccttgacaatggacaaatcaaggaaaatccgtccttcgtgagtcgagccaccatatcacgtgacacgtccaagagccaattctccctgcagctgtcctcagtgaccgctgcggacacggccgtgtattattgtgcgagattgccccgtgtggctggaagttttgggtttttcgacccctggggccagggaattctggtcaccgtctcctca

SEQ ID NO: 13185 - DNA, 298 bp, Homo sapiens
  source 1..298: mol_type = other DNA
cactgtctctggtggctccatcagtggtttcttttggggctggttccggcagtccccagagaagggactggagtggattggctatgtctttgacactgggaacaccaaggacaatccctccttcgtgagtcgagctaccatatcactagacatgtcaagcagtcgattctccctgaagctgacctctgtgaccgttgcggacacagccgtttattattgtgcgagattgccccgtgtggctggaagttttgggttcttcgacccctggggccggggaattctgttcaccgtctcctca

SEQ ID NO: 13186 - DNA, 298 bp, Homo sapiens
  source 1..298: mol_type = other DNA
cactgtctctggtggctccatcagaggttacttctggggctggttccggcagaccccagagcagggactggagtggatagggtatgtccttgacagtggacaaaccaaggaaaatccgtccttcgtgagtcgagccaccatatcacgagacatgtccaagagccaattctccctgaagctgtcctctgtgaccgttgcggacacggccgtgtattattgtgcgagattgccccgtgtggctggaagttttgggtttttcgacccctggggccagggaattctggtcaccgtctcctca

SEQ ID NO: 13187 - DNA, 298 bp, Homo sapiens
  source 1..298: mol_type = other DNA
cactgtctctggtggctccatcagtggtttcttttgggcctggttgcggcagtccccagagaagggactggagtggattgggtctgtctttgaaactggcaacaccaaggacaacccctccttcgtgagtcggacttccatattcttagacatgtcaagaagtcgattctccctgaagctgacctctgtgaccgctgcggacacggccatttattattgtgcgagattgccccatgtgtctggaagttttgggtggttcgacccctggggccggggaattctggtcaccgtctcctca

SEQ ID NO: 13188 - DNA, 298 bp, Homo sapiens
  source 1..298: mol_type = other DNA
cactgtctctggtggctccatcagtgttttcttttgggcctggttgcggcagtccccagagaagggactggagtggattgggtctgtctttgaaactggcaacaccaaggacaacccctccttcgtgagtcggacttccatattcttagacatgtcaagaagtcgattctccctgaagctgacctctgtgaccgctgcggacacggccatttattattgtgcgagattgccccatgtgtctggaagttttgggtggttcgacccctggggccggggaattctggtcaccgtctcctca

SEQ ID NO: 13189 - DNA, 298 bp, Homo sapiens
  source 1..298: mol_type = other DNA
cactgtctctggtggctccatcagtggtttcttttgggcctggttgcggcagtccccagagaagggactggagtggattgggtctgtctttgaaactggcaacaccaaggacaacccctccttcgtgagtcgaacttccatattgttagacatgtcaagtagtcgattctccctgaagctgacctctgtgaccgctgcggacacggccatttattattgtgcgagattgccccatgtgtctggaagttttgggtggttcgacccctggggccggggaattctggtcaccgtctcctca

SEQ ID NO: 13190 - DNA, 298 bp, Homo sapiens
  source 1..298: mol_type = other DNA
cactgtctctggtggctccatcagtggtttcttttgggcctggttgcggcagtccccagagaagggactggagtggattgggtctgtctttgaaactggcaacaccaaggacaacccctccttcgtgagtcgaacttccatattgttagacatgacaagtagtcgattctccctgaagctgacctctgtgaccgctgcggacacggccatttattattgtgcgagattgccccatgtgtctggaagttttgggtggttcgacccctggggccggggaattctggtcaccgtctcctca

SEQ ID NO: 13191 - DNA, 289 bp, Homo sapiens
  source 1..289: mol_type = other DNA
tgtagcctctgcatccacctttgctgactattggatgagctgggtccgccaggctccagggaaggggctggagtgggtggccaatataaaggaagatggaagtgacaaatactatgtggactctgtgaagggccgtttcaccatctccagagacaaccccaacaactcactgtatttgcaaatgaagttcctgggagccgaggacacggccgtgtattactgtgcgagagggggccggagtggtacttttgatatctggggccaaggggcaatggtcaccgtttcttca

SEQ ID NO: 13192 - DNA, 289 bp, Homo sapiens
  source 1..289: mol_type = other DNA
tcgagcctctggattcacctttagtgtcttttggatgagctgggcccgccaggttccagggaagggcctggagtgggtggccaacataaaggaagatggaagtgagaaatactatgtggactctgtgaagggccgattcaccatctccagagaaaactccaacaactcattgtatctgcaaatgaagttcctgggagccgaggactcggccatatattactgtgcgagagggggccggagtggtacttttgatatttggggccaagggacagtggtcaccgtctcttca

SEQ ID NO: 13193 - DNA, 289 bp, Homo sapiens
  source 1..289: mol_type = other DNA
tgtagcctctgcattcacctttgaagactattggatgagttgggtccgccaggctccagggaaggggctggagtgggtggccaacataaagcaagatggaagtgagaaataccatgtggactctgtgaagggccgattcaccatcaccagagacaaccccaatagttcattgtatctggaaatgaagttcctgggagtcgaggacacggccgtgtactactgtgcgagagggggccggagtggtacttttgatatctggggccaagggacaatggtcactgtttcttca

SEQ ID NO: 13194 - DNA, 289 bp, Homo sapiens
  source 1..289: mol_type = other DNA
tgtagcctctgcatccacctttgctgactattggatgagctgggtccgccaggctccagggaaggggctggagtgggtggccaatataaaggaagatggaagtgacaaatactatgtggactctgtgaagggccgtttcaccatctccagagacaaccccaacaactcactgtatttgcaaatgaagttcctgggagccgaggacacggccgtgtattactgtgcgagagggggccggagtggtactttcgatatctggggccaaggggcaatggtcaccgtttcttca

SEQ ID NO: 13195 - DNA, 289 bp, Homo sapiens
  source 1..289: mol_type = other DNA
tgtagcctctggtttcacctttgaagactattggatgagttgggtccgtcaggctccagggaaggggctggagtgggtggccaacataaagcaagatggaagtgagaaataccatgtggactctgtgaagggccgattcactatcaccagagacaaccccaatacttcattgtatctcgaaatgaagttcctgggagtcgaggacacggccgtgtactactgtgcgagagggggccggagtggtacttttgatatctggggccaagggacaatggtcactgtttcttca

SEQ ID NO: 13196 - DNA, 289 bp, Homo sapiens
  source 1..289: mol_type = other DNA
tgtagcctctgcattcacctttgaagactattggatgagttgggtccgccaggctccagggaaggggctggagtgggtggccaacataaaggaagatggaagtgcgaaatttcttgcggactctgtgaagggccgattcaccatcaccagagacaatcccaatactgcactgtacttgcaaatgaacttcttgggagccgaagacacggccgtctattactgtgcgagagggggccggagtggtacctttgatatctggggccaagggacaatggtcaccgtttcttca

SEQ ID NO: 13197 - DNA, 289 bp, Homo sapiens
  source 1..289: mol_type = other DNA
ttcagcgtctacattcaactttgctgactattggatgagctgggtccgccaggctccagggaagggactggagtgggtggccaacataaagccagatggaagtgaccaatattatgcggactctgtaaagggccgattcaccatctccagagacaaccccaacaagtcattggatctgcaaatgaagttcttgggagccgaggacacggccctgtatttctgtgcgagagggggccggtctggaacttttgatatttggggcctggggactatggtcaccgtttcttca

SEQ ID NO: 13198 - DNA, 289 bp, Homo sapiens
  source 1..289: mol_type = other DNA
tgtagcctctgcattcacctttgaagactattggatgagttgggtccgccaggctccagggaaggggctggagtgggtggccaacataaagggagatggaagtgagaaataccatgtggactctgtggagggccgattcaccatcgccagagacaaccccaatagttcactgtacctgcaaatgaagttcctgggagtcgaggacacggccgtgtattactgtgcgagagggggccggagtggtacttttgatatctggggccaagggacaatggtcaccgtttcttca

SEQ ID NO: 13199 - DNA, 289 bp, Homo sapiens
  source 1..289: mol_type = other DNA
tgtagcctctgcattcacctttgaagactattggatgagttgggtccgccaggctccagggaaggggctggagtgggtggccaacataaaggaagatggaagtgagaaatttcatgcggactctgtgaagggccgattcaccatcaccagagacaaccccaatactgcactgtacttgcaaatgaagttcctgggagccgaggacacggccgtgtattactgtgcgagagggggccggagtggtacctttgatatctggggccaagggacaatggtcaccgtttcttca

SEQ ID NO: 13200 - DNA, 298 bp, Homo sapiens
  source 1..298: mol_type = other DNA
cactgtctctggtgcctccatgaggggttacttctggggctggttccggcagtccccagaaaagggactggaatggatcgcgtatgtctttgacactgggaatactaaggacaatccctccttcgtgagtcgagccaccatatcactagacatgtccaagcgccagttctccctgaagctgacctctgtgaccgttgcggacacggccgtctattattgtgcgagattgccccgtgtggctggaagttttgggtggttcgacccctggggccagggacttctggtcaccgtctcctca

SEQ ID NO: 13201 - DNA, 298 bp, Homo sapiens
  source 1..298: mol_type = other DNA
cactgtctctggtggctccatcagtggttacttctggggctggttccggcagcccccagagaagggactggagtggattgggtatgtccttgacactgagaataccaaggacaatccctccttcgtgagtcgagccaccatatcactagacatgtccaagagccaattctccctgaagctgacctctgtgaccgttgcggacacggccgtgtattattgtgcgagattgccccgtgtggctggaagttttgggtggttcgacccctggggccagggaattctggtcaccgtctcctca

SEQ ID NO: 13202 - DNA, 298 bp, Homo sapiens
  source 1..298: mol_type = other DNA
cactgtctctgatggctccatcagtggttacttctggggctggttccggcagcccccagagaagggactggagtggattgggtatgtccttgacactgagaataccaaggacaatccctccttcgtgagtcgagccaccatatcactagacatgtccaagagccaattctccctgaagctgacctctgtgaccgttgcggacacggccgtgtattattgtgcgagattgccccgtgtggctggaagttttgggtggttcgacccctggggccagggaattctggtcaccgtctcctca

SEQ ID NO: 13203 - DNA, 298 bp, Homo sapiens
  source 1..298: mol_type = other DNA
cactgtctctggtggctccatcggaaattacttctggagctggatccggcagtccccagggaagggactggagtggattgggtatacctataacagtgggagcaccaagtacaacccctccctcaagagtcgagtcaccatatcagcagacacgtcgaagaaccagttctccctggatctgacctctgtgagcgctgcggacacggccgtgtattactgtgcgagattaccccgagtggctggtagttttgggtggttcgacccctggggccagggaaccctggtcaccgtctcctca

SEQ ID NO: 13204 - DNA, 298 bp, Homo sapiens
  source 1..298: mol_type = other DNA
cactgtctctggtggctccatcagtggttacttctggggctggttccggcagcccccagagaagggactggagtggattgggtatgtccttgacactgagaataccaaggacaatccctccttcgtgagtcgaaccaccatatcactagacatgtccaagagccaattctccctgaagctgacctctgtgaccgttgcggacacggccgtgtattattgtgcgagattgccccgtgtggctggaagttttgggtggttcgacccctggggccagggaattctggtcaccgtctcctca

SEQ ID NO: 13205 - DNA, 298 bp, Homo sapiens
  source 1..298: mol_type = other DNA
cactgtctctggtggctccattagtggttacttctggggctggttccggcagtccccagaaaagggactggagtggattaattatgtccttgagcctgggaaaaccaaggacaatccctccttcgtgagtcgagccaccatatcactagacatgtccaacagtcaattctccttgaagctgacctctgtgaccgttgcggacacggccgtatattattgtgcgagattgccccgtgtggctggaagttttgggtggttcgacccctggggccagggaattctggtcaccgtctcttca

SEQ ID NO: 13206 - DNA, 298 bp, Homo sapiens
  source 1..298: mol_type = other DNA
cactgtctctggtgcctccatgaggggttacttctggggctggttccggcagtccccagagaagggactggaatggatcgcgtatgtctttgacactgggaataccaaggacaatccctccttcgtgagtcgagccaccatatcactagacatgtccaagagccaattctccctgaagctgacctctgtgaccgttgcggacacggccgtctattattgtgcgagattgccccgtgtggctggaagttttgggtggttcgacccctggggccagggaattctggtcaccgtctcctca

SEQ ID NO: 13207 - DNA, 298 bp, Homo sapiens
  source 1..298: mol_type = other DNA
cactgtctctggtggctccatcagtggttactactggggctggttccggcagcccccagagaagggactggagtggattgggtatgtccttgacactggcaataccaaggacagtccctccttcgtgagtcgagccaccatatcattagacatagccaagagccaattctccctgaagctgacctctgcgaccgttgcggacacggccgtgtatttttgtgcgcgattgccccgtgtggctggaagttttgggtggttcgacccctggggccagggaattctggtcaccgtctcctca

SEQ ID NO: 13208 - DNA, 298 bp, Homo sapiens
  source 1..298: mol_type = other DNA
cactgtctctggtggctccatcagtggctacttctggggctggttccggcagcccccagagaagcgaatggagtggattgggtatgtcgttgagactgggtataccaaggacaatccctccttcgtcagtcgggcctccatatcagtagacatgtccaggagccagttttccctgaagatgacctctgtgaccgtcgccgacacggccgtatattactgtgcgagattgccccgtgtggctggaagttttggttggttcgacccctggggccagggaattctggtcaccgtctcctca

SEQ ID NO: 13209 - DNA, 298 bp, Homo sapiens
  source 1..298: mol_type = other DNA
cactgtctctggtggctccatcagtggttacttctggggctggttccggcagaccccagagaagggactggagtggattgggtatgtccttgacactgggaataccaaggacaatccctccttcgccagtcgagccaccatatcactagacatgtccaagagccacttctccttgaagctgacttctgtgaccgttgcggacacggccgtgtattattgtgcgagattgccccgtgtggctggaagttttgggtggttcgacccctggggccagggaattctggtcaccgtctccgca

SEQ ID NO: 13210 - DNA, 298 bp, Homo sapiens
  source 1..298: mol_type = other DNA
cactgtctctggtggctccatcagtgggtacttctggggctggttccggcagcccccagagaagggactggagtggatcgggtatgtcgttgacactggatatagcaagcacagtccctccttagtgagtcgagccaccatatcactggacaagtccaacagccaattctctctgaagttgacctctgtgaccgttgcggacacggccgtgtattactgtgcgagattgccccgagtggctggaagttttggttggttcgacccctggggccagggaattctggtcaccgtctcctca

SEQ ID NO: 13211 - DNA, 298 bp, Homo sapiens
  source 1..298: mol_type = other DNA
cactgtctctggtggctccatcagtggttacttctggggctggttccggcagcccccagagcagggactggagtggattggctatgtccttgacactgtgcataccaagcacaatccctccttcgtgagtcgagccaccatatcactagacatgtccaagagccaattctccctgaagctgacctctgtgaccgtcgcggacacggccgtctattattgtgcgagattgccccgtgtggctggaagttttgggtggttcgacccctggggccagggaattctggtcaccgtctcctca

SEQ ID NO: 13212 - DNA, 298 bp, Homo sapiens
  source 1..298: mol_type = other DNA
cactgtctctggtggctccatgagtggttacttctggggctggttccggcagtccccagagaaggggctggagtggattgggtatgtcgttgacagtgggagaaccaaggacaatccctccttcgtgagtcgagccaccatatcactagacatgtccaggagccaattctccctgacgctgacctctgtgaccgttgcggacacggccgtgtattattgtgcgagattgccccgtgtggctggaagttttgggtggttcgacccctggggccagggaattctggtcaccgtctcctca

SEQ ID NO: 13213 - DNA, 298 bp, Homo sapiens
  source 1..298: mol_type = other DNA
cactgtctctggtggctccatcagtggttacttctggggctggttccggcagtccccagagaagggactggagtggattgggtatgtccttgacagtgggagaatcaaggacaatccctccttcgtgagtcgagccaccatatcactagacatgtccaggagccgattctccctgacgctgacctctgtgaccgttgcggacacggccgtgtattattgtgcgagattgccccgtgtggctggaagttttgggtggttcgacccctggggccagggaattctggtcaccgtctcctca

SEQ ID NO: 13214 - DNA, 298 bp, Homo sapiens
  source 1..298: mol_type = other DNA
cactgtctctggtggctccatcagtggtttcttttggggctggttccggcagtccccagagaggggactggaatggattgggtatgtccttgacactaggaacaccaaggacaatccctccttcgtgagacgagctaccatatcactcgacatgtcaaacagtcaattctccctgaagctgacctctgttaccgttgcggacacggccatttattattgtgcgagattgccccgtgtggctggaagttttgggtggttcgacccctggggccggggaattctggtcaccgtctcctca

SEQ ID NO: 13215 - DNA, 298 bp, Homo sapiens
  source 1..298: mol_type = other DNA
cactgtctctggtggctccatcagtggtttcttttggggctggttccggcagtccccagagaagggactggagtggattgggtatgtctttgacactgggaacaccaaagacaatccctccttcgtgagtcgatctaccatatcactagacatgtcaagcagtcgattctccctggcgctgacctctgtgaccgttgcggacacggccgtttattattgtgcgagattgccccgtgtggctggaagttttgggtggttcgacccctggggccggggaattctggtcaccgtctcctca

SEQ ID NO: 13216 - DNA, 298 bp, Homo sapiens
  source 1..298: mol_type = other DNA
cactgtctctggtgcctccatcagtaattactactggagctggatccggcagtccccagggaagggactggaatggattggctatacctataacggtgggagcaccaagtccaacccctccctcgagggtcggatcaccatatcaccagacacgtccaagaaccagttctccctgaagctgaactctgtgaccgctgcggacacggccgtatacttctgtgcgagattgccccgagtggctggtagttttgggtggttcgacccctggggccagggaaccgtggtcaccgtctcctca

SEQ ID NO: 13217 - DNA, 298 bp, Homo sapiens
  source 1..298: mol_type = other DNA
cactgtctctggtggctccatcagtggttacttctggggctggttccggcagtccccagagaagggactggagtggattgcatatgtcgtagagagtgggaaaaccaaggacaacccctccttcctgagtcgagccaccatatctctagacatgtccaagagccaattctccctgacgctgacctctgtgaccgttgcggacacggccgtgtattattgtgcgagattgccccgtgtggctggaagttttgggtggttcgacccctggggccagggaattctggtcaccgtctcctca

SEQ ID NO: 13218 - DNA, 298 bp, Homo sapiens
  source 1..298: mol_type = other DNA
cactgtctctggtggctccatcagtggttacttctggggctggttccggcagaccccagagaagggactggagtggattgggtatgtccttgacactgggaataccaaggacaatccctccttcgccagtcgagccaccatatcactagacatgtccaagagccacttctccttgaagctgacttctgtgaccgttgcggacacggccgtgtattattgtgcgagattgccccgtgtggctggaagttttgggtggttcgacccctggggccagggaaccctggtcaccgtctcctca

SEQ ID NO: 13219 - DNA, 298 bp, Homo sapiens
  source 1..298: mol_type = other DNA
cactgtctctggtggctccatcagtgggtacttctggggctggttccggcagcccccagagaagggactggagtggatcgggtatgtcgttgacactggatatagcaagcacagtccctccttagtgagtcgagccaccatatcactggacaagtccaacagccaattctctctgaagttgacctttgtgaccgttgcggacacggccgtgtattactgtgcgagattgccccgagtggctggaagttttggttggttcgacccctggggccagggaattctggtcaccgtctcctca

SEQ ID NO: 13220 - DNA, 298 bp, Homo sapiens
  source 1..298: mol_type = other DNA
cgctgtctctggtggctccgtcaacaatgataagtggtggcattgggtccgccagcccccagggaaggggctggagtggattggggagatccatcggagtgggaccaccaactacaacccgtccctcaagagtcgagtcaccgtatcaatggacaagtccaagaaccagctctccctgaaactgaggtctgtgaccgccgcggacacggccatttatttctgtgcgagtcattatgatacgcgtggttatggtgcttttgagatttggggccaagggacaacggtcaccgtctcttca

SEQ ID NO: 13221 - DNA, 298 bp, Homo sapiens
  source 1..298: mol_type = other DNA
cgttgtctctagtggctccgtcaacaataataagtggtggagttgggtccgccagcccccagggaaggggctggagtggattggggagatccatcagagtgggcccaccaactacaacccgtccctcaagagtcgagtcaccgtatcaatggacaagtccaagaaccagctctccctgaacctgaggtctgtgaccgccgcggacacggccatttatttctgtgcgagtcactatgatacgcgtggttatggtgcttttgagatttggggccaagggacaatggtcaccgtctcttca

SEQ ID NO: 13222 - DNA, 298 bp, Homo sapiens
  source 1..298: mol_type = other DNA
cgttgtctctagtggctccgtcaacaataataagtggtggagttgggtccgccagcccccagggaaggggctggagtggattggggagatccatcagagtgggcccaccaactacaacccgtccctcaagagtcgagtcaccgtttcaatggacaagtccgagaaccaggtctccctgaacctgaggtctgtgaccgccgcggacacggccatttatttctgtgcgagtcactatgatacgcgtggttatggtgcttttgagatttggggccaagggacaatggtcaccgtctcttca

SEQ ID NO: 13223 - DNA, 298 bp, Homo sapiens
  source 1..298: mol_type = other DNA
cgttgtctctagtggctccgtcaacaataataagtggtggagttgggtccgccagcccccagggaaggggctggagtggattggggagatccatcagagtgggcccaccaactacaacccgtccctcaagagtcgagtcaccgtatcaatggacaagtccaagaaccagctctccctgaacctgaggtctgtgaccgccgcggacacggccatttatttctgtgcgagtcactatgatacgcgcggttatggtgcttttgagatttggggccaagggacaatggtcaccgtctcttca

SEQ ID NO: 13224 - DNA, 298 bp, Homo sapiens
  source 1..298: mol_type = other DNA
cgctgtctctggtggctccgtcaacaatgataagtggtggcattgggtccgccagcccccagggaaggggctggagtggattggggagatccatcggagtgggaccaccaactacaacccgtccctcaagagtcgagtcaccgtatcaatggacaagtccaagaaccagctctccctgaaactgaggtctgtgaccgccgcggacacggccatttatttctgtgcgagtcactatgatacgcgtggttatggtgcttttgagatttggggccaagggacaacggtcaccgtctcttca

SEQ ID NO: 13225 - DNA, 298 bp, Homo sapiens
  source 1..298: mol_type = other DNA
cgctgtctctggtggctccgtcaacaatgataagtggtggcattgggtccgccagcccccagggaaggggctggagtggattggggagatccatcggagtgggaccaccaactacaacccgtccctcaagagtcgagtcaccgtatcaatggacaagtccaagaaccagctctccctgaaactgaggtctgtgaccgccgcggacacggccatttatttctgtgcgagtcactatgatacgcgtggttatggtgcttttgagatttggggccaagggacaacggtcaccgtctctgca

SEQ ID NO: 13226 - DNA, 298 bp, Homo sapiens
  source 1..298: mol_type = other DNA
cgctgtctctggtggctccgtcaacaatgataagtggtggcattgggtccgccagcccccagggaaggggctggagtggattggggagatccatcggagtgggaccaccaactacaacccgtccctcaagagtcgagtcaccgtatcaatggacaagttcaagaaccagctctccctgaaactgaggtctgtgaccgccgcggacacggccatttatttctgtgcgagtcactatgatacgcgtggttatggtgcttttgagatttggggccaagggacaacggtcaccgtctcttca

SEQ ID NO: 13227 - DNA, 298 bp, Homo sapiens
  source 1..298: mol_type = other DNA
cgctgtctctggtggctccgtcaacaatgataagtggtggcattgggtccgccagcccccagggaaggggctggagtggattagggagatccatcggagtgggaccaccaactacaacccgtccctcaagagtcgagtcaccgtatcaatggacaagtccaagaaccagctctccctgaaactgaggtctgtgaccgccgcggacacggccatttatttctgtgcgagtcactatgatacgcgtggttatggtgcttttgagatttggggccaagggacaacggtcaccgtctcttca

SEQ ID NO: 13228 - DNA, 295 bp, Homo sapiens
  source 1..295: mol_type = other DNA
tgtggtctctggattcaccttccgtgattctggcatgcactgggtccgccaggctccaggcaaggggctggagtgggtggcacttatatcatatgatggaagcaatgaatactatagagactccgtgaagggccgattcaccatctccagagacacttccaggaacacgctatatctgcaaatgaacagtctgagacttgaggacacggctgtgtattactgtgcgaaagctcgcattaggtcgtccccctcaagcgactactggggccagggaaccctggtcaccgtctcctca

SEQ ID NO: 13229 - DNA, 295 bp, Homo sapiens; identical to SEQ ID NO: 13228
  source 1..295: mol_type = other DNA

SEQ ID NO: 13230 - DNA, 295 bp, Homo sapiens
  source 1..295: mol_type = other DNA
tgtagtctctggattcaccttccgtagctctggcatgcactgggtccgccaggctccaggcaaggggctggagtgggtggcacttatatcatatgatggaagcaatgaatactatgcagactccgtgaagggccgattcaccatctccagagacacttccaagaacacgctgtatctgcaaatgaacagcctgagagttgaggacacggctgtgtattactgtgcgaaagctcgcattaggtcatccccctcaagcgactactggggccagggaaccctggtcaccgtctcctca

SEQ ID NO: 13231 - DNA, 297 bp, Homo sapiens
  source 1..297: mol_type = other DNA
gcttctggacgcaccttcagcaacaatgaaatccactgggtaagacaggcccctggacaagggcttgagtggatgggacggatcatccctctctttggtccaacaatctacgcacagagcttccagggcagactcacgattaccgcggacgaatccacgagcacaacctacatggaactgagcagcctgcgatctgaggacacggccgtgtattactgtgcgagtggttactatgatactcgtggatattattctcaagagtactggggccagggaaccccggtcaccgtctcctca

SEQ ID NO: 13232 - DNA, 297 bp, Homo sapiens
  source 1..297: mol_type = other DNA
gcttctggacgcaccttcagcaacaatgaaatccactgggtaagacaggcccctggacaagggcttgagtggatgggacggatcatccctctctttggtccaacaatctacgcacagagcttccagggcagactcacgattaccgcggacgaatccacgagcacaacctacatggaactgagcagcctgcgatctgaggacacggccgtgtattattgtgcgagtggttactatgatactcgtggatattattcccaagagtactggggccagggaaccccggtcaccgtctcctca

SEQ ID NO: 13233 - DNA, 294 bp, Homo sapiens
  source 1..294: mol_type = other DNA
gcttctggaggcaccctcagcagttatgaaatcagctgggtaagacaggcccctggacaagggcttgagtggatgggaatgatcatccctatctttggtccagcaacctacgcacagaagttccagggcagactcacgattaccgcggaatccacgaacactgcgtacatggaactgagcagcctgacgtctgaggacacggccgtctattactgtgcgagcggttactatgatactcgtggatattactctcaagaatactggggccagggatccctggtcaccgtctcctca

SEQ ID NO: 13234 - DNA, 295 bp, Homo sapiens
  source 1..295: mol_type = other DNA
ttcagcctctggattcaccttcagtacctatgccatgcactgggtccgccaggctccagggaagggactggaatatgtttcagcaattagtaataatgggggtagcacatactacgcagagtcagtgaagggcagattcaccatctccagagacaattccaagaacacgctgtatcttcaaatgagtagtctgagaactgaggacacggctgtgtattactgtgtgaaagatcggggaagtatagttagggactttgactattggggccagggaaccctggccaccgtctcctca

SEQ ID NO: 13235 - DNA, 295 bp, Homo sapiens
  source 1..295: mol_type = other DNA
ttcagcctctggattcaccttcagtacctatgccatgcactgggtccgccaggctccagggaagggactgaaatatgtttcagcaattagtaataatgggggtagcacatactacgcagagtcagtgaagggcagattcaccatctccagagacaattccaagaacacgctgtatcttcaaatgagtagtctgagaactgaggacacggctgtgtattactgtgtgaaagatcggggaagtatagttagggactttgactattggggccagggaaccctggccaccgtctcctca

SEQ ID NO: 13236 - DNA, 295 bp, Homo sapiens
  source 1..295: mol_type = other DNA
ttcagcctctggattcaccttcagtacctatgccatgcactgggtccgccaggctccagggaagggactggaatatgtttcagcaattagtaataatgggggcagcacatactacgcagagtcagtgaagggcagattcaccatctccagagacaattccaagaacacgctgtatcttcaaatgagtagtctgagaactgaggacacggctgtgtattactgtgtgaaagatcggggaagtatagttagggactttgactattggggccagggaaccctggccaccgtctcctca

SEQ ID NO: 13237 - DNA, 289 bp, Homo sapiens
  source 1..289: mol_type = other DNA
tgcagcctctgggttcattttcagtaacgcctggatgacctgggtccgccaggctccagggaaggggctggagtgggttggccgtattggaagcgaatctgatggtgggacaacacagtacgctgcacccgtgcaaggcagattcaccatctcaagagatgattcaaaacacacactgtatctgcaaatgaacagcctgaaaatcgaggacacagccgtgtatttctgtaccacgggtggggtggcgagggactactggggccagggaaccctggtcaccgtctcctca

SEQ ID NO: 13238 - DNA, 289 bp, Homo sapiens
  source 1..289: mol_type = other DNA
tgcagcctctgggttcattttcagtaacgcctggatgacctgggtccgccaggctccagggaaggggctggagtgggttggccgtattggaagcgaatctgctggtgggacaacacagtacgctgcgcccgtgcaaggcagattcaccatctcaagagatgattcaaaacacacactgtatctgcaaatgaacagcctgaaaatcgaggacacagccgtgtatttctgtaccacgggtggggtggcgagggactactggggccagggaaccctggtcaccgtctcctca

SEQ ID NO: 13239 - DNA, 289 bp, Homo sapiens
  source 1..289: mol_type = other DNA
tgcagcctctgggttcattttcagtaacgcctggatgacctgggtccgccaggctccagggaaggggctggagtgggttggccgtattggaagcgaatcggatggtgggacaacacagtacgctgcacccgtgcaaggcagattcaccatctcaagagatgattcaaaacacacactgtatctgcaaatgaacagcctgaaaatcgaggacacagccgtgtatttctgtaccacgggtggggtggcgagggactactggggccagggaaccctggtcaccgtctcctca

SEQ ID NO: 13240 - DNA, 289 bp, Homo sapiens
  source 1..289: mol_type = other DNA
tgcagcctctgggttcattttcagtaacgcctggatgacctgggtccgccaggctccagggaaggggctggagtgggttggccgtattggaagcgaatctgatggtgggacaacacagtacgctgcacccgtgcaaggcagactcaccatctcaagagatgattcaaaacacacactgtatctgcaaatgaacagcctgaaaatcgaggacacagccgtgtatttctgtaccacgggtggggtggcgagggactactggggccagggaaccctggtcaccgtctcctca

SEQ ID NO: 13241 - DNA, 280 bp, Homo sapiens
  source 1..280: mol_type = other DNA
tgcagcctctggattcaccttcagtatctataccatgacctgggtccgccaggctccagggaaggggctggagtgggtttcatacattagtaatagtggtagtatgatattctacgcagactctgtgaagggccgattcaccatctccagagacaatgccaagaactcactgtatctgcaaatgaacagcctgagagacgaggacacggctgtgtattactgtgcgggaggaaggggctttgactactggggccagggaaccctggtcaccgtctcctca

SEQ ID NO: 13242 - DNA, 280 bp, Homo sapiens
  source 1..280: mol_type = other DNA
tgcagcctctggattcaccttcagtatctataccatgacctgggtccgccaggctccagggaaggggctggagtggctttcatacattagtaatagtggtagtatgatattctacgcagactctgtgaagggccgattcaccatctccagagacaatgccaagaactcactgtatctgcaaatgaacagcctgagagacgaggacacggctgtgtattactgtgcgggaggaaggggctttgactactggggccagggaaccctggtcaccgtctcctca

SEQ ID NO: 13243 - DNA, 280 bp, Homo sapiens; identical to SEQ ID NO: 13241
  source 1..280: mol_type = other DNA

SEQ ID NO: 13244 - DNA, 280 bp, Homo sapiens; identical to SEQ ID NO: 13242
  source 1..280: mol_type = other DNA

SEQ ID NO: 13245 - DNA, 280 bp, Homo sapiens
  source 1..280: mol_type = other DNA
tgcagcctctggattcaccttcagtatctataccatgacctgggtccgccaggctccagggaaggggctggagtggttttcatacattagtaatagtggtagtatgatattctacgcagactctgtgaagggccgattcaccatctccagagacaatgccaagaactcactgtatctgcaaatgaacagcctgagagacgaggacacggctgtgtattactgtgcgggaggaaggggctttgactactggggccagggaaccctggtcaccgtctcctca

SEQ ID NO: 13246 - DNA, 280 bp, Homo sapiens
  source 1..280: mol_type = other DNA
tgcagcctctggattcaccttcagtatctataccatgacctgggttcgccaggctccagggaaggggctggagtgggtttcatacattagtaatagtggtagtatgatattctacgcagactctgtgaagggccgattcaccatctccagagacaatgccaagaactcactgtatctgcaaatgaacagcctgagagacgaggacacggctgtgtattactgtgcgggaggaaggggctttgactactggggccagggaaccctggtcaccgtctcctca

SEQ ID NO: 13247 - DNA, 301 bp, Homo sapiens
  source 1..301: mol_type = other DNA
tacagcctctggattctccttcagtaactatggcatgcactgggtccgccaggctccaggcaaggggctggagtgggtggcaatgatttcatatcatggaagtaataaatactatgcagactccgtggagggccgactcaccatctccagagacaattcgaagaacacgctgtatctgcaaatgaacagcctgagagatgaggacgcggctgtgtattactgtgcgaaagaccggaccccatacagctatgccacccactttgactactggggccagggagccctggtcaccgtctcctca

SEQ ID NO: 13248 - DNA, 301 bp, Homo sapiens
  source 1..301: mol_type = other DNA
tacagcctctggattctccttcagtaactatggcatgcactgggtccgccaggctccaggcaaggggctggagtgggtggcaatggtttcatatgatggacaaaataaatactatggaggctccggggggggacgactcaccatttacagagacaattccaagaacacactgtatctgcaaatgaccagcctgagacttgaggacgcggctgtgtattactgtgcgaaagaccggaccccatacagctatgccactcactttgactactggggccagggaacccaggtcaccgtctcctca

SEQ ID NO: 13249 - DNA, 301 bp, Homo sapiens
  source 1..301: mol_type = other DNA
tacagcctctggattctccttcagtaactatggcatgcactgggtccgccaggctccaggcaaggggctggagtgggtggcaatgatttcatatcatggaagtaataaatactatgcagactccgtggagggccgactcaccatctccagagacaattcgaagaacacgctgtatctgcaaatgaacagcctgagagatgaggacgcggctgtgtattactgtgcgaaagaccggaccccatacagctatgccacccattttgactactggggccagggagccctggtcaccgtctcctca

SEQ ID NO: 13250 - DNA, 301 bp, Homo sapiens
  source 1..301: mol_type = other DNA
tacagcctctggattctccttcagtaactatggcatgcactgggtccgccaggctccaggcaaggggctggagtgggtggcaatgatttcatatcatggaagtaataaatactatgcagactccgtggagggccgactcaccatctccagagacaattcgaagaacacgctgtatctgcaaatgaacagcctgagagatgaggacgcggctgtgtattactgtgcgaaagaccggaccccatacagctatgccacccactttgactactggggccagggagccctggtcaccgtctcgtca

SEQ ID NO: 13251 - DNA, 301 bp, Homo sapiens
  source 1..301: mol_type = other DNA
tacagcctctggattctccttcagtaactatggcatgcactgggtccgccaggctccaggcaaggggctggagtgggtggcaatgatttcatatgatggatataagaaatactatggagactccgtggagggccgactaaccatctccagagacaattcgaagaacacgctgtacctgcaaatgaacagcctgagagatgaggacgcggctgtgtattactgtgcgaaagaccggaccccatacagctatgccacccactttgactactggggccagggagccctggtcaccgtctcctca

SEQ ID NO: 13252 - DNA, 301 bp, Homo sapiens
  source 1..301: mol_type = other DNA
tacagcctctggattctccttcagtaactatggcatgcactgggtccgccaggctccaggcaaggggctggagtgggtggcaatgatttcatatcatggaagtaataaatactatgcagactccgtggagggccgactcaccatctccagagacaattcgaagaacacgctgtatctgcaaatgaacagcctgagagatgaggacgcggctgtgtattactgtgcgaaagaccggaccccatacagctatgccacccactttgactactggggccagggagtcctggtcaccgtctcctca

SEQ ID NO: 13253 - DNA, 307 bp, Homo sapiens
  source 1..307: mol_type = other DNA
cactgtctctggtggctccatcagtagttcctactggagctggatccggcagcccccggggaagggactggagtggattgggtacatctatttcggtgggagcaccaactacaatccctccctcaagagtcgagtcaccatatcagaagacacgtccaagaatcagttctccctgaagatgagctctgtgaccgctgcggacacggccgtgtattattgtgggagagttcactctgatagtacttcttaccgaagcaatgatgctttagatatctggggccaagggacaatggtcaccgtctcctca

SEQ ID NO: 13254 - DNA, 307 bp, Homo sapiens
  source 1..307: mol_type = other DNA
cactgtctctggtggctccatcagtagttcctactggagctggatccggcagcccccggggaagggactggagtggattgggtacatctatttcggtgggagcaccaactacaatccctccctcaagagtcgagtcaccatatcagaagacacgtccaagaatcagttctccctgaagatgagctctgtgaccgctgcggacacggccgggtattattgtgggagagttcactctgatagtacttcttaccgaagcaatgatgctttagatatctggggccaagggacaatggtcaccgtctcctca

SEQ ID NO: 13255 - DNA, 307 bp, Homo sapiens
  source 1..307: mol_type = other DNA
cactgtctctggtgcctccatcagtagttcctactggagctggatccggcaggccccggggaagggaccggagtggattgggtacctgtatttcggtgggagcaccaagtacaatccctccctcaagagtcgagtcaccatatcagaggacacgtccaagaatcagttctccctgaagatgacctctgtgaccgctgcggacacggccgtgtattattgtgggagagttcactctgatagtacttcttaccgaagtaatgatgctttagatatctggggccaagggacaatggtcaccgtctcctca

SEQ ID NO: 13256 - DNA, 307 bp, Homo sapiens; identical to SEQ ID NO: 13253
  source 1..307: mol_type = other DNA

SEQ ID NO: 13257 - DNA, 289 bp, Homo sapiens
  source 1..289: mol_type = other DNA
tgcagcctctggattcattatcagtaatcatgaaatgaactgggtccgccaggctccagggaaggggctggagtgggtgtcctacattagcagtcctggtgatggcgtgttctacgcagactctgtgaggggccgattcaccatctccagagacagcgccaggaactcactgtatctgcaaatgaacagcctgagagtcgaggacacggctgtttattactgtgcgagagagttcgagcacgcagactttgactactggggccagggaaccctggtcaccgtctcctca

SEQ ID NO: 13258 - DNA, 289 bp, Homo sapiens
  source 1..289: mol_type = other DNA
tgcagcctctggattcattatcagtaatcatgaaatgaactgggtccgccaggctccagggaaggggctggagtgggtgtcctacattagcagtcctggtgatggcgtgttctacgcagactctgtgaggggccgattcaccatctccagagacagcgccaggaactcactgtatctgcaaatgaacagcctgagagtcgaggacacggctgttcattactgtgcgagagagttcgagcacgcagactttgactactggggccagggaaccctggtcaccgtctcctca

SEQ ID NO: 13259 - DNA, 289 bp, Homo sapiens
  source 1..289: mol_type = other DNA
tgcagcctctggattcattatcagtaatcatgaaatgaactgggtccgccaggctccagggaaggggctggagtgggtgtcctacattagcagtcctggtgatagcgtgttctacgcagactctgtgaggggccgattcaccatctccagagacagcgccaggaactcagtgtctctgcaaatgaacagcctgagagtcgaggacacggctgtttattactgtgcgagagagttcgagcacgcagactttgactactggggccagggaaccctggtcaccgtctcctca

SEQ ID NO: 13260 - DNA, 292 bp, Homo sapiens
  source 1..292: mol_type = other DNA
tgcagcctctagattcaccttcagtagctactggatgcactgggtccgccaagctccagggaaggggctggtgtgggtctcacgtattaatggtgatggtactagcataagttctgcggactccgtgaagggccgattcaccatctccagagacaacgccaagaatacactatatttgcaaatgaacagtctgagagccgaggacacggctgtgtatttctgtgcaaggggggcagatggctacggcaattttgactcctggggccacggaaccctggtcaccgtctcctca

SEQ ID NO: 13261 - DNA, 292 bp, Homo sapiens
  source 1..292: mol_type = other DNA
tgcagcctctagattcaccttcagtagctactggatgcactgggtccgccaagctccagggaaggggctggtgtgggtctcacgtattaatggtgatggtactagcataagttctgcggactccgtaaagggccgattcaccatctccagagacaacgccaagaatacactatatttgcaaatgaacagtctgagagccgaggacacggctgtgtatttctgtgcaaggggggcagatggctacggcaattttgactcctggggccacggaaccctggtcaccgtctcctca

SEQ ID NO: 13262 - DNA, 292 bp, Homo sapiens
  source 1..292: mol_type = other DNA
tgcagcctctagattcaccttcagtagctactggatgcactgggtccgccaagctccagggaaggggctggtgtggatctcacgtattaatggtgatggtactagcataagttctgcggactccgtgaagggccgattcaccatctccagagacaacgccaagaatacactatatttgcaaatgaacagtctgagagccgaggacacggctgtgtatttctgtgcaaggggggcagatggctacggcaattttgactcctggggccacggaaccctggtcaccgtctcctca

SEQ ID NO: 13263 - DNA, 292 bp, Homo sapiens
  source 1..292: mol_type = other DNA
tgcagcctctagattcaccttcagtagctactggatgcactgggtccgccaagctccagggaaggggctggtgtgggtctcacgtattaatggtgatggtactagcataagttctgcggactccgtgaagggccgattcaccatctccagagacaacgccaagaatacactatatttgcaaatgaacagtctgagagtcgaggacacggctgtgtatttctgtgcaaggggggcagatggctacggcaattttgactcctggggccacggaaccctggtcaccgtctcctca

SEQ ID NO: 13264 - DNA, 304 bp, Homo sapiens
  source 1..304: mol_type = other DNA
cactgtctctagtggctccgtcaacagtgggactatctactggagctggatccggcagccccccgggaagggactggagtggattgcccatatctctgacaatgggaccccccactacaacccctccgtcaggggtcgagtcaccatatccgtagacacgtccaagaaccaggtctccctgcagctgagttctgtgaccgctgcggacacggccgtgtatttttgtggaaggtctgataggagaggtacttctttcgtggagtttgattactggggccagggaaccctggtcaccgtctcctca

SEQ ID NO: 13265 - DNA, 304 bp, Homo sapiens
  source 1..304: mol_type = other DNA
cactgtctctggtggctccgtcagtagtggtacttactactggagctggatccggcagcccccaggaaagggactggaatggattgcgcatatctcttaccgtgggaaccccacctacaacccctccctcaggggtcgagtcaccatatccgcagacacgtccaagaaccaggtctccctgcagctgagttctgtgaccgctgcggacacggccgtgtattactgtggaaggtctgataggagaggtacttctttcgtggagtttgattattggggccagggaaccctggtcaccgtctcctca

SEQ ID NO: 13266 - DNA, 304 bp, Homo sapiens
  source 1..304: mol_type = other DNA
cactgtctctggtggctccgtcaacagtggtagtttctactggagctggatccggcagcccccagggaagggactggagtggattgcgcatatctattacagtgggatcaccacctacaacccctccctcaggggtcgagtcaccatatccgtagacacgtccaagaaccaggtctccctgcagctgagttctgtgaccgctgcggacacggccgtttattactgtggaaggtctgataggagaggtacttctttcgtggagtttgattactggggccagggaaccctggtcaccgtctcctca

SEQ ID NO: 13267 - DNA, 304 bp, Homo sapiens
  source 1..304: mol_type = other DNA
cactgtctctggtggctccgtcagcagtggtacttactactggagctggatccggcagtccccagggaagggactggagtggattgggtttatctcttacagtgggaacaccaactccaacccctccctcaggggtcgactcaccatatccgcagacacgtccaagaaccaggtctccctgcagctgagttctgtgaccgctgcggacacggccgtttattactgtggaaggtctgataggagaggtacttctttcgtggagtttgattactggggccagggaaccctggtcaccgtctcctcg

SEQ ID NO: 13268 - DNA, 304 bp, Homo sapiens
  source 1..304: mol_type = other DNA
cactgtctcgggtggctccgtcagcagtggcacttactactggagctggatccggcagcccccagggaagggactggagtggattgggtttatgtcctacagtgggaacaccaactccaacccctccctcaggggtcgactcaccatatccgtagacacgtccaagaaccaggtctccctgcagctgagttctgtgaccgctgcggacacggccgtgtattactgtggaaggtctgataggagaggtacttctttcgtggagtttgattattggggccagggaaccctggtcaccgtctcctcg

SEQ ID NO: 13269 - DNA, 304 bp, Homo sapiens
  source 1..304: mol_type = other DNA
cactgtctctggtggctccgtcagcagtggtactaactactggaactggatccggcagcccccagggaagggactggagtggattggatatatccatgacaaagggagcaccaactacaacccctccctcaagggtcgagtcaccatatccctagacacgtccaagaaccaggtctccctgcagctgagttctgtaaccgctgcggacacggccgtgtatttctgtggaaggtctgataggagaggtacttctttcgtggagtttgattactggggccagggaaccctggtcaccgtctcctca

SEQ ID NO: 13270 - DNA, 304 bp, Homo sapiens
  source 1..304: mol_type = other DNA
cactgtctctggtggctccgtcagcagtggtacttactactggaactggatccggcagcccccagggaagggactggagtggattgggtatatctcttacagtgggagcaccaactccaacccctccctcaggggtcgagtcaccatatccgtagacacgtccaagaaccaggtctccctgcacctgagttctgtgaccgctgcggacacggccgtgtattactgtggaaggtctgataggagaggtacttctttcgtggagtttgattactggggccagggaaccctggtcaccgtctcctca

SEQ ID NO: 13271 - DNA, 304 bp, Homo sapiens
  source 1..304: mol_type = other DNA
cactgtctctggtggctccgtcaacagtggtggttactactggagctggatccggcagtccccagggaagggactggagtggattgggtttatctcttacagtgggaacatcaattccaacccctccctcaggggtcgactcaccatatccctagacacgtccgagaaccaggtctccctgcagctgagttctgtgaccgctgcggacacggccgtgtattactgtggaaggtctgataggagaggtacttctttcgtggagtttgattactggggccagggaaccctggtcaccgtctcctca

SEQ ID NO: 13272 - DNA, 304 bp, Homo sapiens; identical to SEQ ID NO: 13270
  source 1..304: mol_type = other DNA

SEQ ID NO: 13273 - DNA, 304 bp, Homo sapiens
  source 1..304: mol_type = other DNA
cactgtctccgggggctccgtcaccagtggtacttactactggaactggatccggcagcccccagggaagggactggagtggattgggtatgtctcttataatgggaacaccaactgcgagccctccctcaggggtcgagtcaccatatccttagacacgtccaagaaccaggtctccctgcagctgagttctgtgaccgctgcggacacggccgtgtattactgtggaaggtctgataggagaggtacttctttcgtggagtttgattactggggccggggaaccctggtcaccgtctcctca

SEQ ID NO: 13274 - DNA, 304 bp, Homo sapiens
  source 1..304: mol_type = other DNA
cactgtctctggtggcaccgtcagtagtggtagtcactactggagctggatccggcagcccccagggaaggggctggagtggattgcgtatatctctgatagtgggaacaccaactacaacccccccctcaggggtcgagtcaccatatccgtagacatgtccaagaaccaggtctccctgcaggtgagatctgtgaccgctgcggacacggccgtctatttttgtggaaggtctgataggagagggacttctttcgtggagtttgattatcggggccagggaaccctggtcaccgtctcctca

SEQ ID NO: 13275 - DNA, 304 bp, Homo sapiens
  source 1..304: mol_type = other DNA
cactgtctctggtggctccgtcagcagtggtacttactactggagctggatccggcagcccccagggaagggactggagtggattgggtttatctcttacagtgggaacaccaactccaacccctccctcaggggtcgactcaccatatccgtagacacgtccaagaaccaggtctccctgcagctgagctctgtgagcgctgcggacacggccgtgtattactgtggaaggtctgataggagaggtacttctttcgtggagtttgattactggggccagggaaccctggtcaccgtctcctcg

SEQ ID NO: 13276 - DNA, 304 bp, Homo sapiens
  source 1..304: mol_type = other DNA
cactgtctctggtggctccgtcagcagtggtacttactactggaactggatccggcagcccccagggaagggactggagtggattgggtatatctattacaggggggacaccaactacaacccctccctcaagggtcgagtcaccatatccgtagacacgtccaagaaccaggtctccctgcagctgagttctgtaaccgctgcggacacggccgtgtatttctgtggaaggtctgataggagaggtacttctttcgtggagtttgattactggggccagggaacccgggtcaccgtctcctca

SEQ ID NO: 13277 - DNA, 304 bp, Homo sapiens; identical to SEQ ID NO: 13269
  source 1..304: mol_type = other DNA

SEQ ID NO: 13278 - DNA, 304 bp, Homo sapiens
  source 1..304: mol_type = other DNA
cactgtctctggtggctccgtcagcagcggtagtgactactggagctggatccggcagcccccagggaagggactggagtggattgcgtatatctctaacagtgggaacaactactacaacccctccctcaggggtcgagtcaccatgtccgtagacacgtccaagaaccaggtctccctgcatctgagttctgtgaccgctgcggacacggccgtgtattactgtggaaggtctgataggagaggtacttctttcgtggagtttgattactggggccagggaaccctggtcagcgtctcctca

SEQ ID NO: 13279 - DNA, 304 bp, Homo sapiens
  source 1..304: mol_type = other DNA
cactgtctctggtggctccgtcaccagtggtacttactactggaactggatccggcagcccccagggaagggactggagtggattgggtatatctattccagtgggggcaccaactacaacccctccctcaagggtcgagtcaccatatccctagacacgtccaagaaccaggtctccctgcagctgagttctgtaaccgctgcggacacggccgtctatttctgtggaaggtctgataggagaggtacttctttcgtggagtttgattactggggccagggaaccctggtcaccgtctcctca

SEQ ID NO: 13280 - DNA, 304 bp, Homo sapiens
  source 1..304: mol_type = other DNA
cactctctctggtggctccgtcagcagtgatatcttctactggaactggatccggcagaccccagggaagggactggagtggcttgcctatatttctgacagtgggaacaccaagtacaacccctccctcaggggtcgagtcaccatatccgtggacaggtccaagaaccaggtctccctgcagttgagttctgtgaccgctgcggacacggccgtctattactgtggaaggtctgataggagaggtacttctttcgtggagtttgattactggggccagggaaccctggtcagcgtctcctca

SEQ ID NO: 13281 - DNA, 304 bp, Homo sapiens
  source 1..304: mol_type = other DNA
cactgtctctagtggctccgtcggcagtgggactatctactggagctggatccggcagccccccgggaagggactggagtggattgcccatatctctgacaatgggaccccccactacaacccctccctcaggggtcgaggcaccatagccgtagacacgtccaagaaccaggtctccctgcagctgagttttgtgaccgctgcggacacggccgtgtatttttgtggaaggtctgataggagaggtacttctttcgtggagtttgattactggggccagggaaccctggtcaccgtctcctca

SEQ ID NO: 13282 - DNA, 304 bp, Homo sapiens
  source 1..304: mol_type = other DNA
cactgtgtctggtggctccgtcagcagtggtagtaactactggagctggatccggcagcccccagggaagggactggaatggattgcgcatatctcttacagtgggaacaccaactacaacccctccctcaggggtcgagtcaccatatccgtagacacgtccaagaaccaggtcttcctgcagctgagttctgtgaccgctgcggacacggccgtgtattactgtggaaggtctgataggagaggtacttctttcgtggagtttgattactggggtcagggaaccctggtcaccgtctcctca

SEQ ID NO: 13283 - DNA, 304 bp, Homo sapiens
  source 1..304: mol_type = other DNA
cactgtctctggtggctccgtcagcggtggtacttactactggaactggatccggcagcccccagggaagggactggagtggattgggtatatctattacagtgggggcaccaactacaacccctccctcaacggtcgagtcaccatatccgtggacacgtccaagaaccaggtctccctgcagctgagttctgtaaccgctgcggacacggccgtgtatttctgtgggaggtctgataggagaggtacttctttcgtggagtttgattactggggccagggaaccctggtcaccgtctcctca

SEQ ID NO: 13284 - DNA, 304 bp, Homo sapiens
  source 1..304: mol_type = other DNA
cactgtctctggtggctccgtcagcagtggtacttactactacaactggatccggcagcccccagggaagggactggagtggattgggtatatctattacagtgggggcaccaacttcaacccctccctcaagggtcgagtcaccatatccttagacacgtccaagaaccaggtctccctgcagctgagttctgtaaccgctgcggacacggccgtgtatttctgtggaaggtctgataggagaggtacttctttcgtggagtttgattactggggccagggaattctggtcaccgtctcctca

SEQ ID NO: 13285 - DNA, 304 bp, Homo sapiens
  source 1..304: mol_type = other DNA
cactgtctctggtggctccgtcagcagtggtagtcactactggagctggatccggcagcccccagggaagggactggagtggattgcgtatatctctgatagtgggaacaccaactacaacccctccctcaggggtcgagtcaccatatccgtagacacgtccaagacccaggtctccctgcagctgagttctgtgaccgctgcggacacggccgtctattattgtggaaggtctgataggagaggtacttctttcgtggagtttgattatcggggccagggaaccctggtcaccgtctcctca

SEQ ID NO: 13286 - DNA, 304 bp, Homo sapiens
  source 1..304: mol_type = other DNA
cactgtctctggtggctccgtcaacagtggtactaattactggagctggatccggcagcccccaggggagggactggagtggattgcgcatgtctcttacactgggagaaccaactacaacccctccctcgggggtcgcgtcaccatatccgtagacacatccaagaaccaggtctccctgcagctgagttctgtgaccgctgcggacacggccgtgtattactgtggaagatctgataggagaggaacttctttcgtggagtttgattactggggccagggaaccctggtcaccgtctcctca

SEQ ID NO: 13287 - DNA, 304 bp, Homo sapiens
  source 1..304: mol_type = other DNA
cattgtctctggtggctccgtcagcagtggtacttactactggaactggatccggcagcccccagggaagggactggagtggattgggtatatctcttacactgggggcaccaactacaacccctccctcaagggtcgagtcaccatatccgtagacacgtccaagaatcaggtctccctgcagctgagttctgtgaccgctgcggacacggccgtgtatttctgtggaaggtctgataggagaggtacttctttcgtggagtttgattactggggccagggaaccctggtcaccgtctcctca

SEQ ID NO: 13288 - DNA, 304 bp, Homo sapiens
  source 1..304: mol_type = other DNA
cactgtctctggtggctccgtcagcagtggaacttactactggaactggatccggcagcccccagggaagggactggagtggattgggtatatctataacagtgggggcaccaactacaacccctccctcaagggtcgagtcaccatatccgtagacacgtccaagaaccaggtctgcctgcagctgagttctgtaaccgctgcggacacggccgtgtatttctgtggaaggtctgataggagaggtacttctttcgtggagtttgattactggggccagggaaccctggtcaccgtctcctca

SEQ ID NO: 13289 - DNA, 304 bp, Homo sapiens
  source 1..304: mol_type = other DNA
cactgtctctggtggctccgtcagcagtggtacttactactacaactggatccggcagcccccagggaagggactggagtgggttgggtatatctattacagtgggggcaccaactacaacccctccctcaacggtcgagtcaccatatccatagacacgtccaagaaccaggtctccctgcagctgagttctgtaaccgctgcggacacggccgtgtatttctgtggaaggtctgataggagaggtacttctttcgtagaatttgattactggggccagggaaccctggtcaccgtctcctca

SEQ ID NO: 13290 - DNA, 304 bp, Homo sapiens
  source 1..304: mol_type = other DNA
cactgtctccgggggctccgtcactagtggtacttactactggaactggatccggcagcccccagggaagggactggagtggattgggtatgtctcttataatgggaacaccaactgcgagccctccctcaggggtcgagtcaccatatccttagacacgtccaagaaccaggtctccctgcagctgagttctgtgaccgctgcggacacggccgtgtattactgtggaaggtctgataggagaggtacttctttcgtggagtttgattactggggccggggaaccctggtcaccgtctcctca

SEQ ID NO: 13291 - DNA, 304 bp, Homo sapiens
  source 1..304: mol_type = other DNA
cactgtctctggtggctccgtcagcagtggtacttactactggaactggatccggcagcccccagggaagggactggagtgggttgggtatatctattacagtgggggcaccaactacaacccctccctcaagggtcgagtcaccatatccttagacacgtccaagaaccaggtctcccttcagctgagttctgtaaccgctgcggacacggccgtgtatttctgtggaaggtctgataggagaggtacttctttcgtggagtttgattactggggccagggaaccctggtcaccgtctcctca

SEQ ID NO: 13292 - DNA, 304 bp, Homo sapiens
  source 1..304: mol_type = other DNA
cactgtctctggtggctccgtcagcagtggtactctctactggagctggatccggcagcccccagggaagggactggagtggattgcacatatctcttacagtgggaacaccatctacaacccctccctcaggggtcgggtcaccatatccgtagacacgtccaagaaccaggtctccctgcagttgagttctgtgaccgctgcggacacggccgtgtattattgtggaaggtctgataggagaggtacttctttcgtggagtttgattactggggccagggaaccctggtcaccgtctcctca

SEQ ID NO: 13293 - DNA, 304 bp, Homo sapiens
  source 1..304: mol_type = other DNA
cactgtctctggtggctccgtcagcagtggtacttactactggaactggatccggcagcccccagggaagggactcgagtggattgggtatatctcctacagtgggagcaccaactccaacccctccctcaggggtcgagtcaccatatccgtagacacgtccaagaaccaggtctccctgcacctgagttctgtgaccgctgcggacacggccgtgtattactgtggaaggtctgataggagaggtacttctttcgtggagtttgattactggggccagggaaccctggtcaccgtctcctca

SEQ ID NO: 13294 - DNA, 304 bp, Homo sapiens
  source 1..304: mol_type = other DNA
cactgtctctggtggctccgtcagcagtggtggttactactggagctggatccggcagtccccagggaagggactggagtggattgggtttatctcttacagtgggaacatcaattccaacccctccctgaggggtcgactcaccatatccgtagacacgtccgagaaccaggtctccctgcagctgagttctgtgaccgctgcggacacggccgtgtattactgtggaaggtctgataggagaggtacttctttcgtggagtttgattactggggccagggaaccctggtcaccgtctcctca

SEQ ID NO: 13295 - DNA, 304 bp, Homo sapiens
  source 1..304: mol_type = other DNA
cactgtctctggtggctccgtcagcagtggtacttactactggagctggatccggcagcccccagggaagggactggagtggattgcgcatatctcttacagtgggaacaccaactacaacccctccctctggggtcgagtcaccatatccgtagacaggtccaagaaccaggtctccctgcagctgagttctgtgaccgctgcggacacggccgtgtattactgtggaaggtctgataggagaggtacttctttcgtggagtttgattactggggccagggaaccctggtcaccgtctcctca

SEQ ID NO: 13296 - DNA, 304 bp, Homo sapiens
  source 1..304: mol_type = other DNA
cactgtctctagtgcctccgtcaacagtgggactatctactggagctggatccggcagccccccgggaagggactggagtggattgcccatatctctgacaatgggaccccccactacaacccctccgtcaggggtcgaggcaccatagccgtagacacgtccaagaaccaggtctccctgcagctgagttttgtgaccgctgcggacacggccgtgtatttttgtggaaggtctgataggagaggtacttctttcgtggaatttgattactggggccagggaaccctggtcaccgtctcctca

SEQ ID NO: 13297 - DNA, 295 bp, Homo sapiens
  source 1..295: mol_type = other DNA
cacagcctctggattcaccttgagtagttattggatgacctgggcccgccaggctccagggaaggggctggagtgggtggcccacataaagtacgatggaagtgagaaaaagtatgtggactctgtgaaggggcgattcaccatctccagagacagcgccaagaactcactgtatctgcaaatgaacagcctgagagccgaggacacggccgtgtattactgtgcgagactcagcagtgcctggggaggggcttttgatatctggggccaagggacattggtcaccgtctcttca

SEQ ID NO: 13298 - DNA, 295 bp, Homo sapiens
  source 1..295: mol_type = other DNA
cacagcctctggattcaccttgagtagctattggatgacctgggcccgccaggctccagggaaggggctggagtgggtggcccacataaagtacgatggaagtgagaaaaagtatgtggactctgtgaaggggcgattcaccatctccagagacagcgccaagaactcactgtatctgcaaatgaacagcctgagagccgaggacacggccgtgtattactgtgcgagactcagcagtgcctggggaggggcttttgatatctggggccaagggacattggtcaccgtctcttca

SEQ ID NO: 13299 - DNA, 295 bp, Homo sapiens
  source 1..295: mol_type = other DNA
tatagcctctggattcaccttgagtagtttttggatgacctgggcccgccaggctccagggaagggactggagtgggtggcccacataaagtacgatggaagtgagataaaatatgtggactctgtgaaggggcgattcatcatctccagagacagcgccaagaacgcactgtatgtgcaaatgaacagcctgagagtcgaggacacggccgtatattactgtgcgagactcagcagtgcgtggggaggggcttttgatatttggggccaagggacaatggtcaccgtctcttca

SEQ ID NO: 13300 - DNA, 283 bp, Homo sapiens
  source 1..283: mol_type = other DNA
cactgtctctggtgactccatcagtagttactactggagctggatccggcagcccccagggaagggactggaactgattggctatatctatcacactgggaccaccacctacaacccctccctcgagagtcgcgtcaccatttcagtcgacccgtccaacaatcagttctccctgaggctgacctctgtcaccgccgcggacacggccgtatattactgtgcgaagtacgaggccaaccggttcgccccctggggccagggaacccaggtcaccgtctcctca

SEQ ID NO: 13301 - DNA, 283 bp, Homo sapiens
  source 1..283: mol_type = other DNA
cactgtctctggtgactccatcagtagttactactggagctggatccggcagcccccagggaagggactggaactgattggctatatctattacactgggaccaccacctacaacccctccctcgagagtcgcgtcaccatttcagtcgacccgtccaacaatcagttctccctgaggctgacctctgtcaccgccgcggacacggccgtatattactgtgcgaagtacgaggccaaccggttcgccccctggggccagggaacccaggtcaccgtctcctca

SEQ ID NO: 13302 - DNA, 283 bp, Homo sapiens
  source 1..283: mol_type = other DNA
cactgtctctggtgactccatcagtagttactactggagctggatccggcagcccccagggaagggactggaactgattggctatatctatcacactgggaccaccacctacaacccctccctcgagagtcgcgtcaccatttcagtcgacccgtccaacaatcagttctccctgaggctgacctctgtcaccgccgcggacacggccgtatattactgtgcgaagtacgaggccaaccggttcgccccctgggaccagggaacccaggtcaccgtctcctca

SEQ ID NO: 13303 - DNA, 283 bp, Homo sapiens
  source 1..283: mol_type = other DNA
cagtgtctctggtgactccatcagtaactactactggagttggatccggcagcccccagggaagggactggaactgattggctacatcttccacactgggaccaccacctacaacccctccctcgagagtcgcgtcaccatttcagtcgacccgtccaacaatcagttctccctgaggctgacctctgtcaccgccgcggacacggccgtgtattactgtgcgaagtacgaggccaaccggttcgccccctggggccagggaacccaggtcaccgtctcctca

SEQ ID NO: 13304 - DNA, 280 bp, Homo sapiens
  source 1..280: mol_type = other DNA
cactgtctctaatggttccatgagtggttattactggagctggattcggcagcccccagagaagggactagagtggattggatatatgtataccggtgggggcgccaactacaacccttccctcaagagtcgagtcaccatgtccgtagacacatccaagaatgaggtctccctgaacttgacctctgtgaccgctgcggacacggccacatattactgcgcgagatatagcagtggctggtccttatggggccagggagccctggtcaccgtctcctca

SEQ ID NO: 13305 - DNA, 280 bp, Homo sapiens
  source 1..280: mol_type = other DNA
cactgtctctaatgcctccatgagtggttattactggagctggattcggcagcccccagagaagggactagagtggattggatatatgtataccggtgggggcgccaactacaacccctccctcaagagtcgagtcaccatgtccgtagacacatccaagaatgaggtctccctgaacttgacctctgtgaccgctgcggacacggccacatattactgcgcgagatatagcagtggctggtccttatggggccagggagccctggtcaccgtctcctca

SEQ ID NO: 13306 - DNA, 280 bp, Homo sapiens
  source 1..280: mol_type = other DNA
cactgtctctaatgcctccatgagtggttattactggagctggattcggcagcccccagagaagggactagagtggattggatatatgtataccggtgggggcgctaactacaacccctccctcaagagtcgagtcaccatgtccgtagacacatccaagaatgaggtctccctgaacttgacctctgtgaccgctgcggacacggccacatattactgcgcgagatatagcagtggctggtccttatggggccagggagccctggtcaccgtctcctca

SEQ ID NO: 13307 - DNA, 298 bp, Homo sapiens
  source 1..298: mol_type = other DNA
tacagcctctggattcattttaagtgatcactacatggactgggtccgccaggctccagggaaggggctggagtgggttggccgtattagaaataaagctaatagagacaccacagattacgtcgcgtctgtgaaaggcagattcattatctcaagagatgattcaaagaactcactgtatctgcaaatgaacagcctgaaaaccgaggacgcggccgtgtattactgtactagagtcggactcagaagcagctcgtgggactgctggggccagggagcccgggtcaccgtctcctca

SEQ ID NO: 13308 - DNA, 298 bp, Homo sapiens
  source 1..298: mol_type = other DNA
tacagcctctggattcattttaagtgatcactacatggactgggtccgccaggctccagggaaggggctggagtgggttggccgtattagaaacaaagctaatagagacaccacagattacgtcgcgtctgtgaaaggcagattcattatctcaagagatgattcaaagaactcactgtatctgcaaatgaacagcctgaaaaccgaggacgcggccgtgtattactgtactagagtcggactcagaagcagctcgtgggactgctggggccagggagccctggtcaccgtctcctca

SEQ ID NO: 13309 - DNA, 298 bp, Homo sapiens
  source 1..298: mol_type = other DNA
tacagcctctggattcattttaagtgatcactacatggactgggtccgccaggctccagggaaggggctggagtgggttggccgtattagaaacaaagctaatagagacaccacagattacgtcgcgtctgtgaaaggcagattcattatctcaagagatgattcaaagaactcactgtatctgcaaatgaacagcctgaaaaccgaggacgcggccgtgtattactgtaccagagtcggactcagaagcagctcgtgggactgctggggccagggagccctggtcaccgtctcctca

SEQ ID NO: 13310 - DNA, 298 bp, Homo sapiens
  source 1..298: mol_type = other DNA
tacagcctctggattcactttaagtgatcactacatggactgggtccgccaggctccagggaaggggctggagtgggttggccgtattagaaacaaagctaatagagacaccacagattacgtcgcgtctgtgaaaggcagattcattatctcaagagatgattcaaagaattcactgtatctgcaaatgaacagcctgaaaaccgaggacgcggccgtgtattactgtactagagtcggactcagaagcagctcgtgggactgctggggccagggagccctggtcaccgtctcctca

SEQ ID NO: 13311 - DNA, 298 bp, Homo sapiens
  source 1..298: mol_type = other DNA
tacagcctctggattcattttaagtgatcactacatggactgggtccgccaggctccagggaaggggctggagtgggttggccgtattagaaacaaagctaatagagataccacagattacgtcgcgtctgtgaaaggcagattcattatctcaagagatgattcaaagaactcactgtatctgcaaatgaacagcctgaaaaccgaggacgcggccgtgtattactgtactagagtcggactcagaagcagctcgtgggactgctggggccagggagccctggtcaccgtctcctct

SEQ ID NO: 13312 - DNA, 298 bp, Homo sapiens; identical to SEQ ID NO: 13308
  source 1..298: mol_type = other DNA

SEQ ID NO: 13313 - DNA, 298 bp, Homo sapiens; identical to SEQ ID NO: 13307
  source 1..298: mol_type = other DNA

SEQ ID NO: 13314 - DNA, 298 bp, Homo sapiens
  source 1..298: mol_type = other DNA
tacagcctctggattcattttaagtgatcactacatggactgggtccgccaggctccagggaaggggctggagtgggttggccgtattagaaataaagctaatagagacaccacagattacgtagcgtctgtgaaaggcagattcattatctcaagagatgattcaaagaactcactgtatctgcaaatgaacagcctgaaaaccgaggacgtggccgtgtattactgtactagagtcggactcagaagcagctcgtgggactgctggggccagggagcccgggtcaccgtctcctca

SEQ ID NO: 13315 - DNA, 298 bp, Homo sapiens
  source 1..298: mol_type = other DNA
tacagcctctggattcattttaagtgatcactacatggactgggtccgccaggctccagggaaggggctggagtgggttggtcgaattagaaacaaagctaatagagacaccacagattacgtcgcgtctgtgaaaggcagattcattatctcaagagatgattcaaagaactcactgtatctgcaaatgaacagcctgaaaaccgaggacgcggccgtgtattactgtactagagtcggactcagaagcagctcgtgggactgctggggccagggagccctggtcaccgtctcctca

SEQ ID NO: 13316 - DNA, 298 bp, Homo sapiens
  source 1..298: mol_type = other DNA
tacagcctctggattcattacaagtgatcactacatggactgggtccgccaggctccagggaaggggctggagtgggttggccgtattagaaacaaagctaatagagacaccacagattacgtcgcgtctgtgagaggcagattcattatctcaagagatgattcaaagaactcactgtatctgcaaatgaacagcctgaaaaccgaggacgcggccgtgtattactgtactagagtcggactcagaagcagctcgtgggactgctggggccagggaaccctggtcaccgtctcctca

SEQ ID NO: 13317 - DNA, 298 bp, Homo sapiens
  source 1..298: mol_type = other DNA
tacagcctctggattcattttaagtgatcactacatggactgggtccgccaggctccagggaaggggctggagtgggttggccgtattagaaacaaagctaatagagacaccacagattacgtcgcgtctgtgaaaggcagattcattatctcaagagatgattcaaagaactcactgtatctgcaaatgaacagcctgaaaaccgaggacgcggccgtgtattactgtactagagtcggactcagaagcagctcgtgggactgctggggccagggaaccctggtcaccgtctcctca

SEQ ID NO: 13318 - DNA, 292 bp, Homo sapiens
  source 1..292: mol_type = other DNA
cgctgtctctggtgactccgtcagctctagtgactactggagttgggtccgccagccccccgggaaggggctggagtggattgggcaaatccatctttctttgaccacctattacaatccgtccctcaagagtcgagtcaccgtgtcagtcgacaggtctaagaaccaactctccctgaagctgacctctgtgaccgccgcggacacggccgtgtattactgtgcgagacatctttcgggccccccgtcacatgaccactggggccagggaaccctggtcaccgtctcctca

SEQ ID NO: 13319 - DNA, 295 bp, Homo sapiens
  source 1..295: mol_type = other DNA
cgctgtctctggtgactccatcagcagtagtgactactggagttgggtccgccaggcccccgggaaggggctggagtggattgggcaaatccatcttagtttgatgaccacctattacaacccgtccctcaagagtcgagtcaccatgtcagtcgacaagtccatgaaccagctctccctgaaggtgacctctgtgagcgccgcggacacggccgtgtatttttgtgcgagacatctttcgggccccccgtcacatgaccactggggccagggaaccctggtcaccgtctcctca

SEQ ID NO: 13320 - DNA, 292 bp, Homo sapiens
  source 1..292: mol_type = other DNA
cactgtctctggtgactccataagcgctagtgactactggagttgggtccgccagccccccgggaaggggctggagtggattggacaaatccatcttactttgaccacctattacaacccggccctccagggtcgagtcaccgtgtcagtcgacaggtctaaggaccaactctccctgaggctgacctctgtgaccgccgcggacacggccgtatattactgtgcgagacatctttcgggccccccgtcacatgaccactggggccagggaaccctggtcaccgtctcctcg

SEQ ID NO: 13321 - DNA, 292 bp, Homo sapiens; identical to SEQ ID NO: 13320
  source 1..292: mol_type = other DNA

SEQ ID NO: 13322 - DNA, 295 bp, Homo sapiens
  source 1..295: mol_type = other DNA
cactgtctctggtgactccatcagcactagtgactactggagttgggtccgccaggcccccgggaaggggctggagtggattgggcaaatacatctcagtttgatggccacctattacaacccgtccctcaagagtcgagtcaccatgtcagtcgacaagtccatgaaccagctctccctgaaggtgacctctgtgaccgccgcggacacggccgtgtatttttgtgcgagacatctttcgggccccccgtcacatgaccactggggccagggaaccctggtcaccgtctcctca

SEQ ID NO: 13323 - DNA, 295 bp, Homo sapiens
  source 1..295: mol_type = other DNA
cgctgtctctggtgactccatcagcagtagtgactactggagttgggtccgccaggcccccgggaaggggctggagtggattgggcgaatccatcttagtttgatgaccacctattacaacccgtccctcaagagtcgagtcaccatgtcagtcgacaagtccatgaaccagctctccctgaaggtgacctctgtgagcgccgcggacacggccgtgtatttttgtgcgagacatctttcgggccccccgtcacatgaccactggggccagggaaccctggtcaccgtctcctca

SEQ ID NO: 13324 - DNA, 331 bp, Homo sapiens
  source 1..331: mol_type = other DNA
cgctgtctatggtgggtccttcagtggttactactggagctggatccgccagcccccagggaaggggctggagtggattggggaaatcaatcatagtagaaacaccaactacaacccgtccctcaagagtcgagtcatcatatcagtagacacgtccaagaaccagttctccctgaagctgaactctgtgaccgccgcggacacggctgtgtattactgtgcgagaggcgggcttggtagacgccactatggtgactacccaccgcccgcccgacgtccgccccgctggttcgacccctggggccagggaaccctggtcaccgtctcctca

SEQ ID NO: 13325 - DNA, 331 bp, Homo sapiens; identical to SEQ ID NO: 13324
  source 1..331: mol_type = other DNA

SEQ ID NO: 13326 - DNA, 331 bp, Homo sapiens
  source 1..331: mol_type = other DNA
cgctgtctatggtgggtccttcagtggttactactggagctggatccgccagcccccagggaaggggctggagtggattggggaaatcaatcatagtagaaacaccaactacaacccgtccctcaagagtcgagtcatcatatcagtagacacgtccaagaaccagttctccctgaagctgaactctgtgaccgctgcggacacggctgtgtattactgtgcgagaggcgggcttggtagacgccactatggtgactacccaccgcccgcccgacgtccgccccgctggttcgacccctggggccagggaaccctggtcaccgtctcctca

SEQ ID NO: 13327 - DNA, 331 bp, Homo sapiens
  source 1..331: mol_type = other DNA
cgctgtctatggtgggtccttcagtggttactactggagctggatccgccagccaccaggaaaggggctggagtggattggggagatcaatcatggtggaggcaccaattacaacccgtccctcaagagtcgagtcgccatatcactagccacgtccaagaaccagttctccctgaagctgaactctgtgaccgccgcggacacggctgtgtattactgtgcgagaggcgggcttggtagacgccactatggtgactacccaccgcccgcccgacgtccgccccgctggttcgacccctggggccagggaaccctggtcaccgtctcctca

SEQ ID NO: 13328 - DNA, 331 bp, Homo sapiens
  source 1..331: mol_type = other DNA
cgctgtctatggtgggtccttcagtggttactactggagctggatccgccagcccccagggaaggggctggagtggattggggaaatcaatcttagtagaaacaccaactacaacccgtccctcaagagtcgagtcatcatatcagtagacacgtccaagaaccagttctccctgaagctgaactctgtgaccgccgcggacacggctgtgtattactgtgcgagaggcgggcttggtagacgccactatggtgactacccaccgcccgcccgacgtccgccccgctggttcgacccctggggccagggaaccctggtcaccgtctcctca

SEQ ID NO: 13329 - DNA, 331 bp, Homo sapiens
  source 1..331: mol_type = other DNA
cgctgtctatggtgggtccttcagtggttactactggagctggatccgccagcccccagggaaggggctggagtggattggggaaatcaatcatagtagaaacaccaactacaacccgtccctcaagagtcgagccatcatatcagtagacacgtccaagaaccagttctccctgaagctgaactctgtgaccgccgcggacacggctgtgtattactgtgcgagaggcgggcttggtagacgccactatggtgactacccaccgcccgcccgacgtccgccccgctggttcgacccctggggccagggaaccctggtcaccgtctcctca

SEQ ID NO: 13330 - DNA, 282 bp, Homo sapiens
  source 1..282: mol_type = other DNA
acttctggatataccttcactaataataatataaattgggtgcgccaggcccccggacaaaggcttgaatggatgggatggatcaaacctggcagtggtgacacaagatatgcacagcgattccagggcagagtcaccattaccagggacacatccgcgaacacagcctacatggagttgagcagcctgagatttgaagacacggctgtgtattactgtgcgaaatgggggcccgaacccctagcctactggggccagggaaccctggtcaccgtctcctca

SEQ ID NO: 13331 - DNA, 282 bp, Homo sapiens
  source 1..282: mol_type = other DNA
acttctggatataccttcactagtaataatataaattgggtgcgccaggcccccggacaaaggcttgaatggatgggatggatcaaacctggcagtggtgacacaagatatgcacagagattccagggcagagtcaccattaccagggacacatccgcgaacacagcctacatggagttgagcagcctgagatttgaagacacggctgtgtattactgtgcgaaatgggggcccgaacccctagcctactggggccagggaaccctggtcaccgtctcctca

SEQ ID NO: 13332 - DNA, 282 bp, Homo sapiens
  source 1..282: mol_type = other DNA
acttctggatataccttcactagttataatataaattgggtgcgccaggcccccggacaaaggcttgaatggatgggatggatcaaacctggcagtggtgacacaagatatgcacagagattccagggcagagtcaccattaccagggacacatccgcgaacacagcctacatggagttgagcagcctgagatttgaagacacggctgtgtattactgtgcgaaatgggggcccgaacccctagcctactggggccagggaaccctggtcaccgtctcctca

SEQ ID NO: 13333 - DNA, 282 bp, Homo sapiens
  source 1..282: mol_type = other DNA
acttctggatataccttcactagtaataatataaattgggtgcgccaggcccccggacaaaggcttgaatggatgggatggatcaaacctggcagtggtgacacaagatatgcacagagattccagggcagagtcaccattaccagggacacatccgcgaacacagcctacatggagttgagcagcctgagatttgaagacacggctgtgtattattgtgcgaaatgggggcccgaacccctagcctactggggccagggaaccctggtcaccgtctcctca

SEQ ID NO: 13334 - DNA, 282 bp, Homo sapiens
  source 1..282: mol_type = other DNA
acttctggatataccttcactagtaataatataaattgggtgcgccaggcccccggacaaaggcttgaatggatgggatggatcaaacctggcaatggtgacacaagatatgcacagaggttccagggcagagtcaccattaccagggacacatccgcgagcacagcctacatggagttgagtagcctgagatttgaagacacggctgtgtattactgtgcgaaatgggggcccgaacccctagcctactggggccagggaaccctggtcaccgtctcctca

SEQ ID NO: 13335 - DNA, 282 bp, Homo sapiens
  source 1..282: mol_type = other DNA
acttctggatataccttcactagtaataatataaattgggtgcgccaggcccccggacaaaggcttgaatggatgggatggatcaaacctggcagtggtgacacaagatatgcacagagattccagggcagagtcaccattaccagggacacatccgcgaacacagcctacatggaattgagcagcctgagatttgaagacacggctgtgtattactgtgcgaaatgggggcccgaacccctagcctactggggccagggaaccctggtcaccgtctcctca

SEQ ID NO: 13336 - DNA, 295 bp, Homo sapiens
  source 1..295: mol_type = other DNA
tgcagcctctggattcattttcagtgactatagcatccactgggtccgccaggctccgggcaaggggctagagtgggtcacagtcatatcgaaaaagtcaaattctatacaatatgcagactccgtgaagggccggttcaccgtctccagagacaatcgcgaaaaaaaggtgtatctgcaaatgaacagcctgcgaactgacgacacggctctctattactgtgtgaaggaacatgccagtgcctggcctaacctcgactactggggccagggaatcctggtcatcgtctcctcg

SEQ ID NO: 13337 - DNA, 295 bp, Homo sapiens; identical to SEQ ID NO: 13336
  source 1..295: mol_type = other DNA

SEQ ID NO: 13338 - DNA, 295 bp, Homo sapiens
  source 1..295: mol_type = other DNA
tgcagcctctggattcattttcagtgactatagcatccactgggtccgccaggctccgggcaaggggctagagtgggtcacagtcatatcgaaaaagtcaaattctatacaatatgcagactccgtgaagggccggttcaccgtctccagagacaatcgcgaaaaaaaggtgtatctgcaaatgaacagcctgcgaactgacgacacggctctctattactgtgtgaaggaacatgccagtgcctggcctaacctcgactactggggccagggaatactggtcatcgtctcctcg

SEQ ID NO: 13339 - DNA, 295 bp, Homo sapiens
  source 1..295: mol_type = other DNA
tgcagcctctggattcattttcagtgactatagcatccactgggtccgccaggctccgggcaaggggctagagtgggtcacagtcatatcgaaaaagtcaaattctattcaatatgcagactccgtgaagggccggttcaccgtctccagagacaatcgcgaaaaaaaggtgtatctgcaaatgaacagcctgcgaactgacgacacggctctctattactgtgtgaaggaacatgccagtgcctggcctaacctcgactactggggccagggaatcctggtcatcgtctcctcg

SEQ ID NO: 13340 - DNA, 301 bp, Homo sapiens
  source 1..301: mol_type = other DNA
tgcagcctctggattcactttcagcagttataacatgcactgggtccgccggactccaggcagggggctggagtgggtggcgactatctcacatgatggaagtaagacatactacgcagactccgtgaagggccgattcaccatctccagagactcggacgagaagcagtttctgcaaatggacagcctgcgaagtgaagacacggctgtttattattgtgggagagataccgtccctttcgacgcctggactggcggagtccaatattggggccagggaacccgggtcaccgtctcctcg

SEQ ID NO: 13341 - DNA, 301 bp, Homo sapiens
  source 1..301: mol_type = other DNA
tgcagcctctggattcactttcagcagttataacatgcactgggtccgccggactccaggcagggggctggagtgggtggtgactatctcacatgatggaagtaagacatactacgcagactccgtgaagggccgattcaccatctccagagactcggacgagaagcagtttctgcaaatggacagcctgcgaagtgaagacacggctgtttattattgtgggagagataccgtccctttcgacgcctggactggcggagtccaatattggggccagggaacccgggtcaccgtctcctcg

SEQ ID NO: 13342 - DNA, 301 bp, Homo sapiens
  source 1..301: mol_type = other DNA
tgcagcctctggattcactttcagcagttataacatgcactgggtccgccggactccaggcagggggctggagtgggtggcaactgtctcacatgatggaagtaagacatactacgcagactccgtgaagggccgattcaccatctccagagacagcaacgagaagcagtttctgcaaattgacagcctgagaattgaagacacggctgtttattattgtgggagagataccgtccctttcgacgcctggactggcggagtccaatattggggccagggaacccgggtcaccgtctcctcg

SEQ ID NO: 13343 - DNA, 301 bp, Homo sapiens
  source 1..301: mol_type = other DNA
tgcagcctctggattcactttcagcagttataacatgcactgggtccgccggactccaggcagggggctggagtgggtggcaactatctcacatgatggaagtaagacatactacgcagactccgtgaagggccgattcaccatctccagagacaggaacgagaagcagtttctgcaaatggacagcctcagaagtgaagacacggctgtttattattgtgggagagataccgtccctttcgacgcctggactggcggagtccaatattggggcctgggaacccgggtcaccgtctcctcg

SEQ ID NO: 13344 - DNA, 301 bp, Homo sapiens
  source 1..301: mol_type = other DNA
tgcagcctctggattcatcttcagtagttatgttatgcactgggtccgccaggctccaggcaaggggccggaatgggtggcacttatatcatatgatggaaccaatgaagactacgcagactccgtgaagggccgattcaccatctccagagacacttccaaggacacgctgtatctgcaaatgaacagcctgagaagtgaggacacggctatctattactgtgcgagagattaccgccctgtggctgcctctaaatactttgacttctggggccagggaacccaggtcaccgtctcctca

SEQ ID NO: 13345 - DNA, 301 bp, Homo sapiens
  source 1..301: mol_type = other DNA
tgcagcctctggattcatcttcagtagttatgttatgcactgggtccgccaggctccaggcaaggggccggaatgggtggcacttatatcatatgatggaaccaatgaagactacgcagactccgtgaagggccgattcaccatctccagagacacttccaaggacacgctgtatctgcaaatgaacagcctgagaagcgaggacacggctgtgtattactgtgcgagagattaccgccctgtggctgcctctaagtactttgacttctggggccagggaacccaggtcaccgtctcctca

SEQ ID NO: 13346 - DNA, 301 bp, Homo sapiens
  source 1..301: mol_type = other DNA
tgcagcctctggattcatcttcagtagttatgttatgcactgggtccgccaggctccaggcaaggggccggaatgggtggcacttatatcatatgatggaaccaatgaagactacgcagactccgtgaagggccgattcaccatctccagagacacttccaaggacacgctgtatctgcaaatgaacagcctgagaagtgaggacacggctgtgtattactgtgcgagagattaccgccctgtggctgcctctaagtattttgacttctggggccagggaacccaggtcaccgtctcctca

SEQ ID NO: 13347 - DNA, 301 bp, Homo sapiens
  source 1..301: mol_type = other DNA
tgcagcctctggattcatcttcagtagttatgttatgcactgggtccgccaggctccaggcaaggggccggaatgggtggcacttatatcatttgatggaaccaatgaagactacgcagactccgtgaagggccgattcaccatctccagagacacttccaaggacacgctgtatctgcaaatgaacagcctgagaagtgaggacacggctatctattactgtgcgagagattaccgccctgtggctgcctctaaatactttgacttctggggccagggaacccaggtcaccgtctcctca

SEQ ID NO: 13348 - DNA, 301 bp, Homo sapiens
  source 1..301: mol_type = other DNA
tgcagcctctggattcaccttcagtagctatgttatgcactgggtccgccaggctccaggcaaggggctggagtgggtggcacttatatcatatgatggaaccaataaagactacgcagactccgtgaagggccgattcaccatctccagagacacttccaagaacacgctgtatctgcaaatgaacagcctgagaactgaggacacggctgtgtattactgtgcgagagattaccgccctgtggctgcctctaagtactttgacttctggggccagggaaccctggtcaccgtctcctca

SEQ ID NO: 13349 - DNA, 295 bp, Homo sapiens
  source 1..295: mol_type = other DNA
tgcagcctctggattcatcttcagcagttatgttatgcattgggtccgccaggctccaggcaagggcccggaatgggtggcacttatctcatatgatggaaccacagaagactacgcagactccgtgaagggccgattcagcatctccagagacacttccacgctgtatctgcaaatgaacagcctgagaagtgaggacacggctgtgtattactgtgcgagagattaccgccctgtggctgcctctaagtactttgacttctggggccagggaacccaggtcaccgtctcctca

SEQ ID NO: 13350 - DNA, 298 bp, Homo sapiens
  source 1..298: mol_type = other DNA
cactgtctctggtggctccattagtggttacttctggaactggatccggcagtccccggggaagggactggagtggattgcatatatccattacagtgggagcaccaactacaatccctccctcaagagtcgagtcaccatatctctagacacgtccaagaacgagttctccatgaagctgagctctatgaccgctgcggacacggccgtgtattattgtggaaggtctgataggagtgggaattctttcgtggaatttgactactggggccagggagccctggtcaccgtctcctca

SEQ ID NO: 13351 - DNA, 298 bp, Homo sapiens
  source 1..298: mol_type = other DNA
cactgtctctggtggctccattagtggttacttctggaactggatccggcagtccccggggaagggactggagtggattgcatatatccattacagtgggagcaccaactacaatccctccctcaagagtcgagtcaccatatcactagacacgtccaagaacgagttctccctgaagctgagctctatgaccgctgcggacacggccgtgtattattgtggaaggtctgataggagtggtaattctttcgtggaatttgactactggggccagggaaccctggtcaccgtctcctca

SEQ ID NO: 13352 - DNA, 298 bp, Homo sapiens
  source 1..298: mol_type = other DNA
cactgtctctggtggctccattagtggttacttctggaactggatccggcagtccccggggaagggactggagtggattgcatatatccattacagtgggagcaccaactacaatccctccctcaagagtcgagtcaccatatctctagacacgtccaagaacgagttctccatgaagctgagctctatgaccgctgcggacacggccgtgtattattgtggaaggtctgataggagtgggaattctttcgtggaatttgactactgggaccagggagccctggtcaccgtctcctca

SEQ ID NO: 13353 - DNA, 298 bp, Homo sapiens
  source 1..298: mol_type = other DNA
cactgtctctggtggctccattagtggttacttctggaactggatccggcagtccccggggaagggactggagtggattgcatatatccattacagtgggagcaccaactacaatccctccctcaagagtcgagtcaccatatctctagacacgtccaagaacgagttctccatgaagctgagctctatgaccgctgcggacacggccgtgtattattgtggaaggtctgataggagtggcaattctttcgtggaatttgactactggggccagggagccctggtcaccgtctcctca

SEQ ID NO: 13354 - DNA, 298 bp, Homo sapiens
  source 1..298: mol_type = other DNA
cactgtctctggtggctccattagtggttactactggaactggatccggcagtccccggggaagggactggagtggattgggtatatccattacagtggggggaccaactacaatccctccctcaagagtcgagtcaccatatcagtagacacgtccaagaaccagctctccctgaagctgagctctgtgaccgctgcggacacggccgtgtattattgtggaaggtctgataggagtggtaattctttcgtggaatttgactactggggccagggaaccctggtcaccgtctcctca

SEQ ID NO: 13355 - DNA, 298 bp, Homo sapiens
  source 1..298: mol_type = other DNA
cactgtctctggtggctccattagtggttacttctggaactggatccggcagtccccggggaagggactggagtggattgcatatatccattacggtgggagcaccaactacaatccctccctcaagagtcgagtcaccatatctctagacacgtccaagaacgagttctccatgaagctgagctctatgaccgctgcggacacggccgtgtattattgtggaaggtctgataggagtgggaattctttcgtggaatttgactactggggccagggagccctggtcaccgtctcctca

SEQ ID NO: 13356 - DNA, 298 bp, Homo sapiens
  source 1..298: mol_type = other DNA
cactgtctctggtggctccattagtggttacttctggaactggatccggcagtccccggggaagggactggagtggattgcatatatccattacagtgggagcaccaactacaatccctccctcaagagtcgagtcaccatatcactagacacgtccaagaacgagttctccctgaacctgagctctatgaccgctgcggacacggccgtgtattattgtggaaggtctgataggagtggtaattctttcgtggaatttgactactggggccagggaaccctggtcaccgtctcctca

SEQ ID NO: 13357 - DNA, 298 bp, Homo sapiens
  source 1..298: mol_type = other DNA
cactgtctctggtggctccatcagtggttactactggagctggattcggcagtccccggggaacggactggagtgggttgcgtatatctctaacagtgaaaatagccaccgaaacccctccctcaatggtcgagtcaccatctcagtagacacgtccaagaaccaggtctccctgaggctgagctctgtgaccgctgcggacacggccgtctatttctgtggaaggtctgataggagtggtaactctttcgtggaatttgactactggggccagggaaccctggtcaccgtctcctca

SEQ ID NO: 13358 - DNA, 298 bp, Homo sapiens
  source 1..298: mol_type = other DNA
cactgtctctggtggctccattagtggttactactggaactggatccggcagtccccggggaagggactggagtggattgggtatatccattacagtgggggcaccaactacaatccctccctcaagagtcgagtcaccatatcactagacacgtccaagaaccagctctccctgaagctgagctctgtgaccgctgcggacacggccgtgtattattgtggaaggtctgataggagtggtaattctttcgtggaatttgactactggggccagggaaccctggtcaccgtctcctca

SEQ ID NO: 13359 - DNA, 298 bp, Homo sapiens
  source 1..298: mol_type = other DNA
cactgtctctggtggctccattagtggttacttctggaactggatccggcagtccccggggaagggactggagtggattgcatatatccattacagtgggagcaccaactacaatccctccctcaagagtcgagtcaccatatcactagacacgtccaagaacgagttctccctgaaactgagctctatgaccgctgcggacacggccgtgtattattgtggaaggtctgataggagtggtaattctttcgtggaatttgactactggggccagggaaccctggtcaccgtctcctca

SEQ ID NO: 13360 - DNA, 298 bp, Homo sapiens
  source 1..298: mol_type = other DNA
cactgtctctggtggctccattagtggttactactggaactggatccggcactccccggggaagggactggagtggattgggtatatccattacagtgggggcaccaactgcaatccctccctcaagagtcgagtcaccatatcactagacacgtccaagaaccagctctccctgaagctgagctctgtgaccgctgcggacacggccgtgtattattgtggaaggtctgataggagtggtaattctttcgtggaatttgactactggggccagggaaccctggtcaccgtctcctca

SEQ ID NO: 13361 - DNA, 298 bp, Homo sapiens; identical to SEQ ID NO: 13350
  source 1..298: mol_type = other DNA

SEQ ID NO: 13362 - DNA, 298 bp, Homo sapiens; identical to SEQ ID NO: 13351
  source 1..298: mol_type = other DNA

SEQ ID NO: 13363 - DNA, 298 bp, Homo sapiens
  source 1..298: mol_type = other DNA
cactgtctctggtggctacatcggtgatcactactggaactggatccggcagtccccggggaagggactggagtgggttggccatatccgttacagtgagagcacccaccagaatccctccctcaacagtcgactcaccttatcactagacacgtccaagaaccagatctccctgaaactgagctctgtgaccgctgcggacacggccgtgtattattgtggaaggtctgacaggagtggtaattctttcgtggaatttgactactggggccagggaaccctggtcaccgtctcctca

SEQ ID NO: 13364 - DNA, 283 bp, Homo sapiens
  source 1..283: mol_type = other DNA
cactgtctctggcgactccatggacgacctgtattggagttggatccgacagaccccagggaagggactgcaatggattggatatgtcttttctagtggcaacaccagttacaatccggccttccaccctcgcgtcgccatttctattgacacgtcgaagaatcaattctccctgagacttcattctgtcagcgctgcggacacgggcatgtacttctgtgcgaagtttccggcccgggggagcgtctcgtggggcccgggaacttgggtcaccgtgtcagca

SEQ ID NO: 13365 - DNA, 283 bp, Homo sapiens
  source 1..283: mol_type = other DNA
cactgtctctggcgactccatggacgacctgtattggagttggatccgacagaccccagggaagggactgcaatggattggatatgtcttttctagtggcaacaccagttacaatccggccttccaccctcgcgtcgctatttctattgacacgtcgaagaatcaattctccctgagacttcattctgtcagcgctgcggacacgggcatgtacttctgtgcgaagtttccggcccgggggagcgtctcgtggggcccgggaacttgggtcaccgtgtcagca

SEQ ID NO: 13366 - DNA, 283 bp, Homo sapiens
  source 1..283: mol_type = other DNA
cactgtctctggcgactccatggacgacctgtattggagttggatccgacaaaccccagggaagggactgcagtggattggatatgtcttttctagtggcaacaccagttacaatccggccttccaccctcgcgtcgccatttctattgacacgtcgaagaatcaattctccctgagacttcattctgtcagcgctgcggacacgggcatgtacttctgtgcgaagtttccggcccgggggagcgtctcgtggggcccgggaacttgggtcaccgtgtcagca

SEQ ID NO: 13367 - DNA, 283 bp, Homo sapiens
  source 1..283: mol_type = other DNA
cactgtctctggcgactccatggacgacctgtattggagttggatccgacagaccccagggaagggactgcaatggattggatatgtcttttctagtggcaacaccagttacaatccggccttccaccctcgcgtcgccatttctattgacacgtcgaagaatcaattctccctgagacttcattctgtcagcgctgcggacacgggcatgtacttctgtgcgaagtttccggcccgggggagcgtctcgtggggcccgagaacttgggtcaccgtgtcagca

SEQ ID NO: 13368 - DNA, 283 bp, Homo sapiens
  source 1..283: mol_type = other DNA
cactgtctctggcgactccatggacgacctgtattggagttggatccgacagaccccagggaagggactgcaatggattggatatgtcttttctagtggcaacaccagttacaatccggccttccaccctcgcgtcgccatttctattgactcgtcgaagagtcaattctccctgagacttcattctgtcaccgctgcggacacgggcatgtacttctgtgcgaagtttccggcccgggggagcgtctcgtggggcccgggaacttgggtcaccgtgtcagca

SEQ ID NO: 13369 - DNA, 298 bp, Homo sapiens
  source 1..298: mol_type = other DNA
tgcagcctctggattcacctttagtggctattggatgagctggttccgccaggctccagggaaggggctggagtgggtggccaacataaagcaagatggaagtgagcaatactatgtggactctctgaagggccgattcaccatctcccgagacaacgccaagaactcactgtatctgcaaatgagcagcctgagagccgaggacacggccgtgtattactgtgcgagagatcgggagtatggtgggagccatccgattgactactggggccagggaaccctggtcaccgtctcctca

SEQ ID NO: 13370 - DNA, 298 bp, Homo sapiens
  source 1..298: mol_type = other DNA
tgcagcctctggattcacctttagtggctattggatgagctggttccgccaggctccagggaaggggctggagtgggtggccaacataaagcaagatggaagtgagcaatactatgtggactctctgaggggccgattcaccatctcccgagacaacgccaagaagtcaatgtatttgcaaatgagcagcctgagagccgaggacacggccgtgtattactgtgcgagagatcgggagtatggtgggagccatccgattgactactggggccagggaaccctggtcaccgtctcctca

SEQ ID NO: 13371 - DNA, 298 bp, Homo sapiens
  source 1..298: mol_type = other DNA
tgcagcctctggattcacctttagtggctattggatgagctggttccgccaggctccagggaaggggctggagtgggtggccaacataaagcaagatggaagtgagcaatactatgtggactctctgaagggccgattcaccatctcccgagacaacgccaagaactcaatgtatttgcaaatgagcagcctgagagccgaggacacggccgtgtattactgtgcgagagatcgggagtatggtgggagccatccgattgactactggggccagggaaccctggtcaccgtctcctca

SEQ ID NO: 13372 - DNA, 298 bp, Homo sapiens
  source 1..298: mol_type = other DNA
tgcagcctctggattcacctttagtggctattggatgagctggttccgccaggctccatggaaggggctggagtgggtggccaacataaagcaagatggaagtgagcaatactatgtggactctctgaagggccgattcaccatctcccgagacaacgccaagaactcactgtatctgcaaatgagcagcctgagagccgaggacacggccgtgtattactgtgcgagagatcgggagtatggtgggagccatccgattgactactggggccagggaaccctggtcaccgtctcctca

SEQ ID NO: 13373 - DNA, 298 bp, Homo sapiens
  source 1..298: mol_type = other DNA
tgcagcctctggattcacctttagtggctattggatgagctggttccgccaggctccagggaaggggctggagtgggtggccaacataaagcaagatggaagtgagcaatactatgtggactctctgaagggccgattcaccatctcccgagacaacgccaagaagtcactgtatctgcaaatgagcagcctgagagccgaggacacggccgtgtattactgtgcgagagatcgggagtatggtgggagccatccgattgactactggggccagggaaccctggtcaccgtctcctca

SEQ ID NO: 13374 - DNA, 298 bp, Homo sapiens
  source 1..298: mol_type = other DNA
tacagcctctggattcacctttagtggctattggatgagctggttccgccaggctccagggaaggggctggagtgggtggccaacataaagcaagatggaagtgagcaatactatgtggactctctgaagggccgattcaccatctcccgagacaatgccaagaagtcactgtatctgcacatgagcagcctgagagccgaggacacggccgtgtattactgtgcgagagatcgggagtatggtgggagccatccgattgactactggggccagggaaccctggtcaccgtctcctca

SEQ ID NO: 13375 - DNA, 298 bp, Homo sapiens
  source 1..298: mol_type = other DNA
tgcagcctctggattcacctttagcggctattggatgagctggttccgccaggctccagggaaggggctggagggggtggccaacgtgaagcaagatggaagtgagcaatactatgtggactctctgaagggccgattcaccatctcccgagacaacgccaagaactcactgtatctgcaaatgagcagcctgagagccgaggacacggccgtttattactgtgcgagagatcgggagtatggtgggagccatccgattgactactggggccagggaaccctggtcaccgtctcctca

SEQ ID NO: 13376 - DNA, 298 bp, Homo sapiens
  source 1..298: mol_type = other DNA
tgcagcctctggattcatctttagtggctattggatgagctggttccgccaggctccagggaaggggctggagtgggtggccaacataaagcaagatggaagtgagcaatactatgtggactctctgaagggccgattcaccatctcccgagacaacgccaagaaatcattgtatctgcaaatgaccagcctgagagccgaggacacggccgtgtattattgtgcgagagatcgggagtatggtgggagccatccgattgactactggggccagggaaccctggtcaccgtctcctca

SEQ ID NO: 13377 - DNA, 298 bp, Homo sapiens
  source 1..298: mol_type = other DNA
tgcagcctctggattcacctttagtggctattggatgagctggttccgccaggctccagggaaggggctggagtgggtggccaacataaagcaagatggaagtgagcaatactatgtggactctctgaagggccgattcaccatctcccgagacaacgccaagaagtcaatgtatttgcaaatgagcagcctgagagccgaggacacggccgtgtattactgtgcgagagatcgggagtatggtgggagccatccgattgactactggggccagggaaccctggtcaccgtctcctca

SEQ ID NO: 13378 - DNA, 298 bp, Homo sapiens
  source 1..298: mol_type = other DNA
tgcagcctctggattcagttttagtggctattggatgagctggttccgccaggctccagggaaggggctggagtgggtggccaacataaaacaagatggaagtgagcagtactatgtggactctctgaagggccgattcaccatctcccgagacaacgccaagaaatcaatgtatctgcaaatgagcagcctgagagccgaggacacggccgtgtattattgtgcgagagatcgggagtatggtgggagccatccgattgactactggggccagggaaccctggtcaccgtctcctca

SEQ ID NO: 13379 - DNA, 298 bp, Homo sapiens; identical to SEQ ID NO: 13369
  source 1..298: mol_type = other DNA

SEQ ID NO: 13380 - DNA, 298 bp, Homo sapiens
  source 1..298: mol_type = other DNA
tgcagcctctggattcacctttagtggctattggatgagttggttccgccaggctccagggaaggggctggagtgggtggccaacataaagcaagatggaagtgagcaatactatgtggactttctgaggggccgattcaccatctcccgagacaacgccaagagctcactgtatctgcaaatgagcaacctgagagtcgacgacacggccgtgtattactgtgcgagagatcgggagtatggtgggagccacccgattgactactggggccagggaaccctggtcaccgtctcctca

SEQ ID NO: 13381 - DNA, 298 bp, Homo sapiens
  source 1..298: mol_type = other DNA
tgcagcctctggattcacctttagtggctattggatgagctggttccgccaggctccagggaaggggctggagtgggtggccaacataaagcaagatggaagtgagcaatactatgtggactctctgaagggccgattcaccatctcccgagacaacgccaagaagtcactgtatctgcaaatgagcagcctgagagccgaggacacggccgtgtattactgtgcgagagatcgggaatatggtgggagccatccgattgactactggggccagggcaccctggtcaccgtctcctca

SEQ ID NO: 13382 - DNA, 298 bp, Homo sapiens
  source 1..298: mol_type = other DNA
tgcagcctctggattcacctttagcggctattggatgagctggttccgccaggctccagggaaggggctggagtgggtggccaacataaagcaagatggaagtgagcaatactatgtggactctctgaagggccgattcaccatctcccgagacaacgccaagaactcactgtatctgcaaatgagcagcctgagagccgaggacacggccgtatattactgtgcgagagatcgggagtatggtgggagccatccgattgactactggggccagggaaccctggtcaccgtctcctca

SEQ ID NO: 13383 - DNA, 304 bp, Homo sapiens
  source 1..304: mol_type = other DNA
cactgtctctggtgactccatcagcagtggcggttacttctggagctggatccgccaccacccagggaagggcctggaatggattgcgtacatcaattacagtgggagtaccaaccacaacccgtccctcaagagtcgagttaccctatcagtggacacgtctaagaatcagttctccctgaagctgagctctgtgactgccgcggacacggccgtgtattactgtgcgagaattccctattatagtagtggttggggctggttcgacccctggggccagggaaccctggtcaccgtctcctca

SEQ ID NO: 13384 - DNA, 304 bp, Homo sapiens
  source 1..304: mol_type = other DNA
cactgtctctggtgtctccatcagcagtggcgattacttctggacctggatccgccaccacccagagaggggcctggagtggattgcgtggatcaattaccgtgggactaccaaccacaacccgtccctcaagagtcgaattgacatatcactggacaggtctaagaatcagttgtccctgaggctgacctctgtgactgacgcggacacggccgtttactactgtgcgagaattccctattatagcagtggttgggggtggttcgacccctggggccggggaaccctggtcaccgtctcctca

SEQ ID NO: 13385 - DNA, 304 bp, Homo sapiens
  source 1..304: mol_type = other DNA
cactgtctctggtgactccatcagcagtggcggttacttctggagctggatccgccacctcccagggaagggcctgcaatggattgcgtacatcaattacagtgggactaccaaccacaacccgtccctcaagagtcgagttaccctatcagtggacacgtctaagaatcagttctccctgaagctgagctctgtgactgccgcggacacggccgtgtattattgtgcgagaattccctattacagtagtggttggggctggttcgacccctggggccagggaaccctggtcaccgtctcctca

SEQ ID NO: 13386 - DNA, 289 bp, Homo sapiens
  source 1..289: mol_type = other DNA
tgcagcctctggattcaccttcagcaactattccatgaactgggtccgccaggctccagggaaggggctggagtgggtcgcattcattagtagtggtggtcaattcttttactacgcagactcagtgaagggccgattcaccatctccagagacaacgccaagaattcattgtatctgcaaatgaacagcctgagagtcgaagacacggctgtatattactgtgcgagagacggggggacctacttcctagactcctggggccagggagtcctggtcaccgtctcctca

SEQ ID NO: 13387 - DNA, 289 bp, Homo sapiens
  source 1..289: mol_type = other DNA
tgcagcctctggattcaccttcagcaactattccatgaactgggtccgccaggctccagggaaggggctggagtgggtcgcattcattagtagtggtggtcaattcttttactacgcagactcagtgaagggccgattcaccatctccagagacaacgccaagaattcattgtatctgcaaatgaacagcctgagagccgaagacacggctgtatattactgtgcgagagacggggggacctacttcctagactcctggggccagggagtcctggtcaccgtctcctca

SEQ ID NO: 13388 - DNA, 289 bp, Homo sapiens
  source 1..289: mol_type = other DNA
tgcagcctctggattcaccttcagcaactattccatgaattgggtccgccaggctccagggaaggggctggagtgggtcgcattcatcagtagtggtggtcaattcttttactatgcagactcagtgaagggccgattcaccatctccagagacaacgccaagaattcattgtatctgcagatgagcagcctgagagccgaagacacggctgtatattactgtgcgagagacggggggacctacttcctagactcctggggccagggagtcctggtcaccgtctcctca

SEQ ID NO: 13389 - DNA, 289 bp, Homo sapiens
  source 1..289: mol_type = other DNA
tgcagcctctggattcaccttcagcaactattccatgaaatgggtccgccaggctccagggaaggggctggagtgggtcgcattcatcagtagtggtggtcaattcttttactatgcagactcagtgaagggccgattcaccatctccagagacaacgccaagaattcattgtatctgcagatgagcagcctgagagccgaagacacggctgtatattactgtgcgagagacggggggacctacttcctagactcctggggccagggagtcctggtcaccgtctcctca

SEQ ID NO: 13390 - DNA, 289 bp, Homo sapiens
  source 1..289: mol_type = other DNA
tgcagcctctggattcaccttcagcaactattccatgaattgggtccgccaggctccagggaaggggctggagtgggtcgcattcatcagtagtggtggtcaattcctttactatgcagactcagtgaagggccgattcaccatctccagagacaacgccaagaattcattgtatctgcagatgagcagcctgagagccgaagacacggctgtatattactgtgcgagagacggggggacctacttcctagactcctggggccagggagtcctggtcaccgtctcctca

SEQ ID NO: 13391 - DNA, 289 bp, Homo sapiens
  source 1..289: mol_type = other DNA
tgcagcctctggattcagcttcggcaactattccatgacctgggtccgccaggctccagggaaggggctggagtgggtcgccttcattagtagtggtggtcaattcttttactacgcagactcactgaagggccgattcaccatctccagagacaacgccaagaattcattgtatctgcagatgagcagcctgagagccgaagacacggctgtttattactgtgcgagagacggggggacctacttcctagactcctggggccagggagtcctggtcaccgtctcctca

SEQ ID NO: 13392 - DNA, 289 bp, Homo sapiens
  source 1..289: mol_type = other DNA
tgcagcctctggattcagcttcggcaactattccatgacctgggtccgccaggctccagggaaggggctggagtgggtcgccttcattagtagtggtggtcaattcttttactacgcagactcactgaagggccgattcaccatctccagagacaacgccaagaattcattgtatctgcagatgaacagcctgagagccgaagacacggctgtttattactgtgcgagagacggggggacctacttcctagactcctggggccagggagtcctggtcaccgtctcctca

SEQ ID NO: 13393 - DNA, 289 bp, Homo sapiens
  source 1..289: mol_type = other DNA
tgcagcctctggattcagcttcggcaactattccatgacctgggtccgtcaggctccagggaaggggctggagtgggtcgccttcattagtagtggtggtcaattcttttactacgcagactcactgaagggccgattcaccatctccagagacaacgccaagaattcattgtatctgcagatgaacagcctgagagccgaagacacggctgtttattactgtgcgagagacggggggacctacttcctagactcctggggccagggagtcctggtcaccgtctcctca

SEQ ID NO: 13394 - DNA, 289 bp, Homo sapiens
  source 1..289: mol_type = other DNA
tgcagcctctggattcaccttcagcaactattccatgaattgggtccgccaggctccagggaaggggctggagtgggtcgcattcatcagtagtggtggtcaattctcttactatgcagactcagtgaagggccgattcaccatctccagagacaacgccaagaattcattgtatctgcagatgagcagcctgagagccgaagacacggctgtatattactgtgcgagagacggggggacctacttcctagactcctggggccagggagtcctggtcaccgtctcctca

SEQ ID NO: 13395 - DNA, 303 bp, Homo sapiens
  source 1..303: mol_type = other DNA
aagggttctggatacaactttgccacttactggatcggctgggtgcgccagatgcccgggaagggcctggagtggatgggaatcatctatcctggtgactctgataccagatatagtccgtccttccaaggccaggtcactatctcagtcgacaacccaaccagcaccgcctatttacagtggaccagcctgaaggcctcggacaccgccgtgtattattgtgcgagaccacttacggacgcaaaagtgagcggtggctacgcggactactggggccagggaaccctgatcaccgtctcctca

SEQ ID NO: 13396 - DNA, 303 bp, Homo sapiens
  source 1..303: mol_type = other DNA
aagggttctggatacaactttgccacttactggatcggctgggtgcgccagatgcccgggaagggcctggagtggatgggaatcatctatcctggtgactctgataccagatatagtccgtccttccaaggccaggtcactatctcagtcgacaacccaaccaccaccgcctatttacagtggaccagcctgaaggcctcggacaccgccgtgtattattgtgcgagaccacttacggacgcaaaagtgagcggtggctacgcggactactggggccagggaaccctgatcaccgtctcctca

SEQ ID NO: 13397 - DNA, 289 bp, Homo sapiens
  source 1..289: mol_type = other DNA
ctctgtctctggtggctccatcagcagtgataactggtggagttgggtccgccagcccccagggaaggggctggagtggcttggggaaatctatcatagtgggagccccaactacaagccgtccctcaagagtcgactctccatatcagtagacaagtccaagaaccacctctccctgaaggtgaactctgtgaccgccgcggacacggccgtgtattactgtgcgaggcacgcgggttggagtggccctgactcctggggccagggaaccctggtcaccgtctcctca

SEQ ID NO: 13398 - DNA, 289 bp, Homo sapiens
  source 1..289: mol_type = other DNA
ctctgtctctggtggctccatcagcagtgataactggtggagttgggtccgccagcccccagggaaggggctggagtggcttggggaaatctatcatagtgggagccccaactacaagccgtccctcaagagtcgactctccatatcagtagacaagtccaagaaccacctctccctgaaggtgaactctgtgaccgccgcggacacggccgcgtattactgtgcgaggcacgcgggttggagtggccctgactcctggggccagggaaccctggtcaccgtctcctca

SEQ ID NO: 13399 - DNA, 289 bp, Homo sapiens
  source 1..289: mol_type = other DNA
ctctgtctctggtggctccatcagcagtgataactggtggagttgggtccgccagcccccagggaaggggctggagtggcttggggaaatctatcatagtgagagccccaactacaagccgtccctcaagagtcgactcaccatatcaatagacaagtccaagaaccacctctccctgaaggtgaactctgtgaccgccgcggacacggccgtgtattactgtgcgaggcacgcgggttggagtggccctgactcctggggccagggaaccctggtcaccgtctcctca

SEQ ID NO: 13400 - DNA, 292 bp, Homo sapiens
  source 1..292: mol_type = other DNA
ttcagcttctggattcacctttggtgattatgctgtgagctgggtccgccaggctccagggagggggctggagtgcgttggtctcattacaagcaagacttctggtataatagaatacgccgcgtctgtgcaaggcagattcaccgtctcaagagatgattccaaaagcatcgcctatctgcacatgaacagcctgaaaaccgaggacacggccgtgtattactgtgctagatggactggacagagttacatggatgtctggggcaaagggaccacagtcaccgtctcctca

SEQ ID NO: 13401 - DNA, 295 bp, Homo sapiens
  source 1..295: mol_type = other DNA
tgcagcttctggtttcacctctggtgattatgctatgacctgggtccgccaggctccagggaaggggctggagtgcgtagatctcattcctgggaaaacttctggtgggatattacaatacgccgcgtctgtggaaggcagattcaccgtctcaagagatgattccaaaagcatcgcctatcttcaaatgaacagcctgaaaatcgaggacacagccgtgtattactgtgctagatggactggacagagttacatggacgtctggggcaaagggaccacagtcaccgtctcctca

SEQ ID NO: 13402 - DNA, 295 bp, Homo sapiens
  source 1..295: mol_type = other DNA
tgcagcttctggtttcacctctggtgattatgctatgacctgggtccgccaggctccagggaaggggctggagtgcgtaggtctcattcctgggaaaacttctggtgggatattacaatacgccgcgtctgtggaaggcagattcaccgtctcaagagatgattccaaaagcatcgcctatcttcaaatgaacagcctgaaaatcgaggacacagccgtgtattactgtgctagatggactggacagagttacatggacgtctggggcaaagggaccacagtcaccgtctcctca

SEQ ID NO: 13403 - DNA, 295 bp, Homo sapiens
  source 1..295: mol_type = other DNA
tacatcttcaggattcacctttggtgattatgctctgacctgggtccgccaggctccagggaggggcctggagtgcgtaggtctcattagaagtaaaagttccggtgggagaattctatacgccgcgtctgtgaaaggcagattctccgtctcaagagatgattccaagagcatcggctatctgcaaatggacagcctaaaaaccgaggacacagccgtgtatttttgtgctaggtggactggacaaagctacatggacgtctggggcaaggggaccacggtcaccgtctcctca

SEQ ID NO: 13404 - DNA, 310 bp, Homo sapiens
  source 1..310: mol_type = other DNA
cactgtctccggtggctccatcagcagtaatagtcactactggggctggatccgccagccccccgggaaggggctggagtggattgcgaatgtctattatgatggggccaccgcctacagcccgtccctcaggggtcgagtcaccatatccgtagacacgtccaacaaccagttcttcctgaagttgacgtctgtgaccgccgcagacacggctctgtatttctgtgcgagagtcattttgactacttcttatatgtggcccgatgcttttgacatctggggccaagggacaatggtcaccgtctcttca

SEQ ID NO: 13405 - DNA, 310 bp, Homo sapiens
  source 1..310: mol_type = other DNA
cactgtctccggtggctccatcagcagtaatagtcactactggggctggatccgccagccccccgggaaggggctggagtggattgcgaatgtctattatgatggggccaccgcctacagcccgtccctcaggggtcgagtcaccatatccgtagacatgtccaacaaccagttcttcctgaagttgacgtctgtgaccgccgcagacacggctctgtatttctgtgcgagagtcattttgactacttcttatatgtggcccgatgcttttgacatctggggccaagggacaatggtcaccgtctcttca

SEQ ID NO: 13406 - DNA, 310 bp, Homo sapiens
  source 1..310: mol_type = other DNA
cactgtctccggtggctccatcagcagtaatagtcactactggggctggatccgccagacccccgggaaggggctggagtggattgcgaatgtctattatgagggggccaccgcctacagcccgtccctcaggggtcgagtcaccatatccgtagacacgtccaacaaccagttcttcctgaggttgacgtctgtgaccgccgcagacacggctctgtatttctgtgcgagagtcattttgactacttcttatatgtggcccgatgcttttgacatctggggccaagggacaatggtcaccgtctcttca

SEQ ID NO: 13407 - DNA, 283 bp, Homo sapiens
  source 1..283: mol_type = other DNA
tgcagcctctggattcagcttcagtgactcctacatgacctggatccgccaggctccagggagggggctggaatgggtttcatacattagtggtagtgggggtgacataaactacgcagactctgtgaggggccgattcaccgtctccagggacaacgccaagaactcagtatatctacaaatgagcagcctgagagccgaggacacggccatatattactgttcgacagaaccccgtctactggcccattggggccagggaaccctggtcaccgtctcctca

SEQ ID NO: 13408 - DNA, 283 bp, Homo sapiens
  source 1..283: mol_type = other DNA
tgcagcctctggattcaccttcagtgcctcctacatgacctggatccgccaggctccagggaaggggctggaatgcctttcatacattagtggtagtggtactgccataaactacgcagactctgtgaggggccgattcaccgtctccagggacaacgccaagagctcactatatctgcaaatgaccagcctgagagccgaggacacggccatgtattactgttcgacagaaccccgtctactggcccattggggccagggaaccctggtcaccgtctcctca

SEQ ID NO: 13409 - DNA, 283 bp, Homo sapiens
  source 1..283: mol_type = other DNA
tgcagcctctggattcaccttcagtgactcctacatgacttggatccgccaggctccagggaaggggctggaatgtctttcatacattagtggtggtggtagtgacataaactacgcagactctgtgaagggccgattcaccgtctccagggacaacgccagaaactcactatatctgcaaatgagtagcctgagagccgaggacacggccatgtatttctgttcgacagaaccccgtctactggcccattggggccagggaaccctggtcaccgtctcctca

SEQ ID NO: 13410 - DNA, 292 bp, Homo sapiens
  source 1..292: mol_type = other DNA
tgcagcgtctggattcaccgtcagtagatacggcgtacactgggcccgccaggctccaggcaaggggctggaatgggtggcagttacgtggtttgatggaacgaacacatatgcacgttcagtgatgggccgattcaccctctcccgagacacctccaagaacactgtgtatctccaaatgagtagtctgcgagtcgaggacacggctgtctactactgtgcgaaatcaagggatggttggaatcacgggcttgaatattggggccaggggaccccggtcaccgtctcctcg

SEQ ID NO: 13411 - DNA, 292 bp, Homo sapiens
  source 1..292: mol_type = other DNA
tgcagcgtctggattcagcctcagtagatacggcatacactgggcccgccaggctccaggcaaggggctggagtgggtggcagttacgtggtttgatggaacgaatacatatgcagattccgtgaggggccgattcaccctctcccgagacacgtccaagagcactctgtatctccaaatgagtagtctgcgagtcgaggacacggctgtctactactgtgcgaaatcaagagatggttggaatcacgggcttgagtattggggccagggaaccctggtcaccgtctcctcg

SEQ ID NO: 13412 - DNA, 314 bp, Homo sapiens
  source 1..314: mol_type = other DNA
tcatctccggggacagtgtctcgaccaacagtgctacttggaactgggtcaggcagtccccttcgagaggccttgagtggctgggaaggacatcctacaggtccaagtgggaaactattttggcagactctgtcaaaagtcgaataaccatcaacccagacacagccaggaaccagttcttcctgcaactgaactctgtgactcccgaggacacggctgtgtattactgtgcaagagcggggcctttagtgggacccttcccggggaattacatggccgtctggggcaaagggaccacggtcaccgtctcctca

SEQ ID NO: 13413 - DNA, 314 bp, Homo sapiens
  source 1..314: mol_type = other DNA
tcatctccggggacagtgtctcgaccaacagtgctacttggaactgggtcaggcagtccccttcgagaggccttgagtggctgggaaggacatcctacaggtccaagtgggaaactattttggcagactctgtcaaaagtcgaataagcatcagcccagacacagccaggaaccagttcttcctgcaactgaactctgtgactcccgaggacacggctgtgtattactgtgcaagagcggggcctttagtgggacccttcccgggaaattacatggccgtctggggcaaagggaccacggtcaccgtctcctca

SEQ ID NO: 13414 - DNA, 314 bp, Homo sapiens
  source 1..314: mol_type = other DNA
tcatctacggggacagtgtgtcgtccaccagtgcgacttggaactgggtcaggctgtccccttcgagaggccttgagtggctgggaaggacaggctacaggttcaagtgggaaactattttggcagactctgtcaaaagtcgaataaccatcatcccagacacagccaggaaccagttctccctgcaattgaactctgtgactcctgaggactcggctgtgtattactgtgcgagagcggggcctttagtgggccccttcccggggaattacatggccgtctggggcaaagggaccacggtcaccgtctcctca

SEQ ID NO: 13415 - DNA, 314 bp, Homo sapiens
  source 1..314: mol_type = other DNA
ccatctccggggacagtgtcgcgaccaacagtgctacttggaactggatcaggcagtccccttcgagaggccttgagtggctgggaaggacatcctacaggtccaagtgggagactattttggccgactctgtcaaaggtcgaataaacatcaacccagacacagccaggaaccagttcttcctgcaactgaattttgtgactcccgaggacacggctgtgtattattgtgcaagagcggggcctttagtgggacccttcccggggaactacatggccgtctggggcaaagggaccacggtcaccgtctcctca

SEQ ID NO: 13416 - DNA, 314 bp, Homo sapiens
  source 1..314: mol_type = other DNA
ccatctccggggacagtgtctcgaccaacagtgctacttggaactggatcaggcagtccccttcgagaggccttgagtggctgggaaggacatcctacaggtccaagtgggagactattttggccgactctgtcaaaggtcgaataagcatcaacccagacacagccaggaaccagttcttcctgcaactgaactctgtgactcccgaggacacggctgtgtattattgtgcaagagcggggcctttagtgggacccttcccggggaactacatggccgtctggggcaaagggaccacggtcaccgtctcctca

SEQ ID NO: 13417 - DNA, 314 bp, Homo sapiens
  source 1..314: mol_type = other DNA
tcatctccggggacagtgtctcgaccaacagtgctacttggaactgggtcaggcagtccccttcgagaggccttgagtggctgggaaggacatcctacaggtccaagtgggaaactattttggcagactctgtcaaaagtcgaataaccatcaacccagacacagccaggaaccagttcttcctgcagctgaactctgtgactcccgaggacacggctgtgtattactgtgcaagagcggggcctttagtgggacccttcccggggaattacatggccgtctggggcaaagggaccacggtcaccgtctcctca

SEQ ID NO: 13418 - DNA, 314 bp, Homo sapiens; identical to SEQ ID NO: 13412
  source 1..314: mol_type = other DNA

SEQ ID NO: 13419 - DNA, 314 bp, Homo sapiens
  source 1..314: mol_type = other DNA
tcatctccggggacagtgtctcgtccaacagtgctacttggaactgggtcaggcagtccccttcgagaggccttgagtggctgggaaggacagcctacaggtccaagtgggaaactattttggcagactctgtcaaaagtcgaataaccatcaacccagacacagccaggaaccagttcttcctacaactgaactctgtgactcccgaggacacggctgtgtattactgtgcaagagcggggcctttagtgggacccttcccggggaattacatggccgtctggggcaaagggaccacggtcaccgtctcctca

SEQ ID NO: 13420 - DNA, 314 bp, Homo sapiens
  source 1..314: mol_type = other DNA
tcatctccggggacagtgtctcgaccaacagtgctacttggaactgggtcaggcagtccccctcgagaggccttgagtggctgggaaggacatcctacaggtccaagtgggaaactattttggcagactctgtcaaaagtcgaataaccatcagcccagacacagccaggaaccagttcttcctgcaactgaactctgtgactcccgaggacacggctgtgtattactgtgcaagagcggggcctttagtgggacccttcccggggaattacatggccgtctggggcaaagggaccacggtcaccgtctcctca

SEQ ID NO: 13421 - DNA, 314 bp, Homo sapiens
  source 1..314: mol_type = other DNA
tcatctccggggacagtgtctcgaccaacagtggtacttggaactgggtcaggcagtccccctcgagaggccttgagtggctgggaaggacatcctacaggtccaagtgggaaactattttggcagactctgtcaaaagtcgaataaccatcaacccagacacagccaggaaccagttctccctgcaactgaactctgtgactcccgaggacacggctgtctattactgtgcaagagcggggcctttagtgggacccttcccggggaattacatggccgtctggggcaaagggaccacggtcaccgtcgcctca

SEQ ID NO: 13422 - DNA, 314 bp, Homo sapiens
  source 1..314: mol_type = other DNA
ccatctccggggacagtgtctcgaccaacagtgctacttggaactggatcaggcagtccccttcgagaggccttgagtggctgggaaggacaggctacaggtccaagtgggagactattttggccgactctgtcaaaggtcgaataagcatcaacccagacacagccaggaaccagttcttcctacaactgacctctgtgactcccgaggacacggctgtgtattattgtgcaagagcggggcctttagtgggacccttcccggggaactacatggccgtctggggcaaagggaccacggtcaccgtctcctca

SEQ ID NO: 13423 - DNA, 314 bp, Homo sapiens
  source 1..314: mol_type = other DNA
ccatctccggggacagtgtctcgaccaacagtgctacttggaattggatcaggcagtccccttcgagaggccttgagtggctgggaaggacatcctacaggtccaagtgggaaactattttggcagactctctcaaaagtcgaataagcatcaacccagacacagccaggaaccagttctccctgcgactcaactctgtgactcccgaggacacggctgtctattactgtgcaagagcggggcctttagtggggcccttcccggggaactacatggccgtctggggcaaagggaccacggtcaccgtctcctca

SEQ ID NO: 13424 - DNA, 314 bp, Homo sapiens
  source 1..314: mol_type = other DNA
ccatctccggggacagtgtctcgaccaacagtgctacttggaactggatcaggcagtccccttcgagaggccttgagtggctgggaaggacatcctacaggtccaagtgggagactattttggccgactctgtcaaaagtcgaataagcatcaacccagacacagccaggaaccagttcttcctgcaactgaactctgtgactcccgaggacacggctgtgtattattgtgcaagagcggggcctttagtgggacccttcccggggaactacatggccgtctggggcaaagggaccacggtcaccgtctcctca

SEQ ID NO: 13425 - DNA, 314 bp, Homo sapiens
  source 1..314: mol_type = other DNA
ccatctccggggacagtgtctcgaccaacagtgctacttggaattggatcaggcagtccccttcgagaggccttgagtggctgggaaggacatcctacaggtccaagtgggaaactattttggcagactctgtcaaaagtcgaataagcatcaacccagacacagccaggaaccagttctccctgcgactcaactctgtgactcccgaggacacggctgtctattactgtgcaagagcggggcctttagtggggcccttcccggggaactacatggccgtctggggcaaagggaccacggtcaccgtctcctca

SEQ ID NO: 13426 - DNA, 289 bp, Homo sapiens
  source 1..289: mol_type = other DNA
tggagcctctggattcatctttagtagttactggatgacttgggtccgccaggctccagggaaggggctggagtggctggccagtataaaggcagatggaagtgtgaaagactatgtgggctctgtgaggggccgattcaccatatccagagacaacgccaagaactcagtgtcgctgaaaatgaacagcctgagagtcgaggacacggccgtttattactgctcgagagacgatcacttctactacatggacgtctggggcaaagggacctcggtcaccgtctcctca

SEQ ID NO: 13427 - DNA, 289 bp, Homo sapiens
  source 1..289: mol_type = other DNA
tggagcctctggattcatctttagtagttactggatgacttgggtccgccaagctccagggaaggggctggagtggctggccagtataaaggcagatggaagtgtgaaagactatgtgggctctgtgaggggccgattcaccatatccagagacaacgccaagaactcagtgtcgctgaaaatgaacagcctgagagtcgaggacacggccgtttattactgctcgagagacgatcacttctactacatggacgtctggggcaaagggacctcggtcaccgtctcctca

SEQ ID NO: 13428 - DNA, 289 bp, Homo sapiens
  source 1..289: mol_type = other DNA
tggagcctctggattcatctttagtagttactggatgacttgggtccgccaggctccagggaaggggctggaatggctggccagtataaaggcagatggaagtgtgaaagactatgtgggctctgtgaggggccgattcaccatatccagagacaacgccaagaactcagtgtcgctgaaaatgaacagcctgagagtcgaggacacggccgtttattactgctcgagagacgatcacttctactacatggacgtctggggcaaagggacctcggtcaccgtctcctca

SEQ ID NO: 13429 - DNA, 307 bp, Homo sapiens
  source 1..307: mol_type = other DNA
tgcagcctctggattcatctttaacgactatgccatgacctgggtccgccaggcgccagggaaggggctgcagtgggtctcaactattggtgctagtggtacaaagaaaaattacgcagactccgtgaagggccggttcaccatctccagagacaattccaagaacaccttcgatcttcaaatgaacgacctgagagccgaggacacggccgtctatttctgtgcgaaagagaaatggagggaggaggactatggtgacgcctcccctgtctactggggccagggagtcctggtcaccgtctcttca

SEQ ID NO: 13430 - DNA, 307 bp, Homo sapiens
  source 1..307: mol_type = other DNA
tgcagcctctggattcatctttaacgactatgccatgacctgggtccgccaggcgccagggaaggggctgcagtgggtctcaactattggtgctagtggtacaaagaaaaattacgcagactccgtgaagggccggttcaccatctccagagacaattccaagaacaccttcgatcttcaaatgaacgacctgagagccgaggacacggccgtctatttctgtgcgaaagagaaatggagggaggaggactatggtgacgcctcccctgtctaccggggccagggagtcctggtcaccgtctcttca

SEQ ID NO: 13431 - DNA, 307 bp, Homo sapiens
  source 1..307: mol_type = other DNA
tgcagcctctggattcatctttaacgactatgccatgacctgggtccgccaggcgccagggaaggggctgcagtgggtctcaactattggtgctagtggtacaaagaaaaattacgcagactccgtgaagggccggttcaccatctccagagacaattccaagaacaccttcgatcttcaaatgaacgacctgagagccgaggacacggccgtctattactgtgcgaaagagaaatggagggaggaggactatggtgacgcctcccctgtctactggggccagggaatcctggtcaccgtctcttca

SEQ ID NO: 13432 - DNA, 301 bp, Homo sapiens
  source 1..301: mol_type = other DNA
tacagtctctggcctcaacttcagtagcgactggatgcactgggtccgccaagctccagggcaggggctggtgtgggtctcacgtattgaccgtgaagggaagtccaagacctacgtggactccgtgaagggtcgatttaccacctccagagacaacgccaagaacacgctgtatctgcaaatgaacagtctgagagtcgaggatacggctgtgtattattgtacaagaggttgggggaatagttacggttatggagcatttgactactggggccagggaaacctggtcaccgtctcctca

SEQ ID NO: 13433 - DNA, 301 bp, Homo sapiens
  source 1..301: mol_type = other DNA
tacagtctctggactccccttcagtagcgactggatgcactgggtccgccaagctccagggcaggggctggtgtgggtctcacgtattgaccgtgaggggaagtccaagacctacgtggactccgtgaagggtcgattcaccatctccagagacaacgccaagaacacgctgtatctgcaaatgaacagtctgagagtcgaggatacggctgtgtattattgtacaagaggttgggggaatagctacggttatggagcatttgactactggggccagggaaacctggtcaccgtctcctca

SEQ ID NO: 13434 - DNA, 298 bp, Homo sapiens
  source 1..298: mol_type = other DNA
tgcagcctctggattcagcttcaagagtcataggatgaactgggtccgccaggctccagggaaggggctggagtgggtctcgtccattagtcctaataatgtcatagagtatgcagactcagtgaagggccgattcaccatctccagagacaacgccaagagctcactttatctgcaaatgaacagcctgagagccgaggacacggccgtttattattgtgcgagagaggacgtctctttgactggatattatatctttgactactggggccagggaaccctggtcaccgtctcctca

SEQ ID NO: 13435 - DNA, 301 bp, Homo sapiens
  source 1..301: mol_type = other DNA
tgcagcctctggattcagcttcaagagtcataggatgaactgggtccgccaggctccagggaaggggctggagtgggtctcgtccattagtagtactaataatgtcatagagtatgcagactcagtgaagggccgattcaccatctccagagacaacgccaagagctcactttatctgcaaatgaacagcctgagagccgaggacacggccgtttattattgtgcgagagaggacgtctctttgactggatattatatctttgactactggggccagggaaccctggtcaccgtctcctca

SEQ ID NO: 13436 - DNA, 301 bp, Homo sapiens
  source 1..301: mol_type = other DNA
tgcagcctctggattcatgttcaggagtcataggatgaactgggtccgccaggctccagggaaggggctggagtgggtctcatctattagtagtgggagtacttacatagaatacgcagactcagtgaagggccgattcaccatctccagagacgattccgagaactcactgtatctgcaaatgaacagcctgagagccgaggacacggctgtatattattgtgcgagagaagacgtttctttgactggttattatatctttgactattggggccagggaaccctggtcaccgtctcctca

SEQ ID NO: 13437 - DNA, 301 bp, Homo sapiens
  source 1..301: mol_type = other DNA
tgcagcctctggattcagcttcaagagtcataggatgaactgggtccgccaggctccagggaaggggctggagtgggtctcgtccattagtagtattaataatgtcatagagtatgcagactcagtgaagggccgattcaccatctccagagacaacgccaagaactcactttatctgcaaatgaacagcctgagagccgaggacacggccgtttattattgtgcgagagaggacgtctctttgactggatattatatctttgattactggggccagggaaccctggtcaccgtctcctca

SEQ ID NO: 13438 - DNA, 301 bp, Homo sapiens
  source 1..301: mol_type = other DNA
tgcagcctctggattcagtttcaagagtcataggatgaattgggtccgccaggctccagggaaggggctggagtgggtctcgtcaattagcagtactaataatgtcatagagtatgcagactcagtgaagggccgcttcaccatctccagagacaacgccgagaactcactttatctgcaaatgaacagcctgagagccgaggacacggccgtttatttttgtgcgagagaggacgtctctttgactggatattatatctttgactactggggccagggaaccctggtcaccgtctcctca

SEQ ID NO: 13439 - DNA, 301 bp, Homo sapiens
  source 1..301: mol_type = other DNA
tgcagcctctggattcagtttcaagagtcataggatgaattgggtccgccaggctccagggaaggggctggagtgggtctcgtcaattagcagtacaaataatgtcatagagtatgcagactcagtgaagggccgcttcaccatctccagagacaacgccgagaactcactttatctgcaaatgaacagcctgagagccgaggacacggccgtttatttttgtgcgagagaggacgtctctttgactggatattatatctttgactactggggccagggaaccctggtcaccgtctcctca

SEQ ID NO: 13440 - DNA, 289 bp, Homo sapiens
  source 1..289: mol_type = other DNA
tacagcctctggattcagcttcagtagttcttggatgacctgggtccgccaggctccagggaagggcctggagtggctggccaacataaggcacgatggaggtgtgaagaactatgcggactctctggagggccgattcaccatctccaaagacaacgtcaagaagtcattgtatctgcaaatgaacagtctgagagtcgaggacacggccatgtattactgtgcgagagatagtggctctaatgctcttgatatctggggccaagggacaatggtcaccgtctcttca

SEQ ID NO: 13441 - DNA, 289 bp, Homo sapiens
  source 1..289: mol_type = other DNA
tgcagcctctagattcacttttagtgggtcttggatgacgtgggtccgccaggctccaggggaggggctggagtgggtggccaatataaaagaagatggaagtgtgaaaaattatgtgccctctgtgaggggccgattcgacatttccagagacaacgccaagaactcgctgtttcttcagatgaacagcctgagagtcgaggacacggctctatatttctgtgcgagagatagcggttctaatgctcttgatatctggggccaagggacaatggtcaccgtctcttca

SEQ ID NO: 13442 - DNA, 301 bp, Homo sapiens
  source 1..301: mol_type = other DNA
tgcaacctctggattcacctttgatgagtatgccatgcactgggtccgtcaagctccagggacgggtctggagtgggtctcttttattagtggggatggtggtagcacatcctatgcagactctgtgaggggccgattcaccatctccagagacagcaccacaaagtccctgtatctacaaatgaacagtctgagaactgaagacaccgccttatattactgtacaaaagacagatattgtactactcccaggtgcccccttgactactggggccagggaaccctggtcaccgtctcctca

SEQ ID NO: 13443 - DNA, 301 bp, Homo sapiens
  source 1..301: mol_type = other DNA
tgcaacctctggattcacctttgatgagtatgccatgcactgggtccgtcaagttccagggacgggtctggagtgggtctcttttattagtggggatggtggtagcacatcctatgcagactctgtgaggggccggttcaccatctccagagacagcaccacaaagtccctgtatctacaaatgaacagtctgagaactgaagacaccgccttatattactgtacaaaagacagatattgtactactcccaggtgcccccttgactactggggccagggaaccctggtcaccgtctcctca

SEQ ID NO: 13444 - DNA, 301 bp, Homo sapiens
  source 1..301: mol_type = other DNA
tgcaacctctggattcacctttgatgagtatgccatgcactgggtccgtcaagctccagggatgggtctggagtgggtctcttttattagtggggatggtggtagcacatcctatgcagactctgtgaggggccgattcaccatctccagagacagcaccacaaagtccctgtatctacaaatgaacagtctgagaactgaagacaccgccttatattactgtacaaaagacagatattgtactactcccaggtgcccccttgactactggggccagggaaccctggtcaccgtctcctca

SEQ ID NO: 13445 - DNA, 301 bp, Homo sapiens
  source 1..301: mol_type = other DNA
tgcaacctctggattcacctttgatgagtatgccatgcactgggtccgtcaagctccagggacgggtctggagtgggtctcttttattagtggggatggtggtagcacatcctatgcagactctgtgaagggccgattcaccatctccagagacagcaccacaaagtccctgtatctacaaatgaacagtctgagaactgaagacaccgccttatattactgtacaaaagacagatattgtactactcccaggtgcccccttgactactggggccagggaaccctggtcaccgtctcctca

SEQ ID NO: 13446 - DNA, 301 bp, Homo sapiens
  source 1..301: mol_type = other DNA
tgcaacctctggattcacctttgatgagtatgccatgcactgggtccgtcaagctccagggacgggtctggagtgggtctcttttattagtggggatggtggtagcacatcctatgcagaccctgtgaggggccgattcaccatctccagagacagcaccacaaagtccctgtatctacaaatgaacagtctgagaactgaagacaccgccttatattactgtacaaaagacagatattgtactactcccaggtgcccccttgactactggggccagggaaccctggtcaccgtctcctca

SEQ ID NO: 13447 - DNA, 301 bp, Homo sapiens
  source 1..301: mol_type = other DNA
tgcaacctctggattcacgtttgatgagtatgccatgcactgggtccgtcaagttccagggacgggtctggagtgggtctcttttattagtggggatggtggtagcacatcctatgcagactctgtgaggggccggttcaccatctccagagacagcaccacaaagtccctgtatctacaaatgaacagtctgagaactgaagacaccgccttatattactgtacaaaagacagatattgtactactcccaggtgcccccttgactactggggccagggaaccctggtcaccgtctcctca

SEQ ID NO: 13448 - DNA, 310 bp, Homo sapiens
  source 1..310: mol_type = other DNA
tgcaacctctggcttcaccttcagtagttcttggatatactgggtacgccaaggaccagggaagggcttgcagtgggtctcaagtattaataatgatggcagcagtacaagatatgcggagtccgtgaagggccgattcaccatgtccagagacaacgccgagaatactgcatatctgcaaatgagcaacttgagagccgacgacaccggtgtctattactgtgccaggcccacaaaattctattacgatcccgacttcgggaactacatgggcgtctggggcagcgggaccacggtcaccgtctcctca

SEQ ID NO: 13449 - DNA, 310 bp, Homo sapiens
  source 1..310: mol_type = other DNA
tgcaacctctggcttcaccttcagcagttcttggatatactgggttcgccaagcaccaggtaagggattgcagtgggtctcaagtattgataatgacggcagcagtccaagatatgcggagtccgtgaagggccgattcaccatgtccagagacaacgccgagaacactgcatatctgcaaatgaccaacttgagagccgacgacaccggtgtctattactgtgccaggcccacaaaattctattacgatcccgacttcgggaactacatgggcgtctggggcagcgggaccacggtcaccgtctcctca

SEQ ID NO: 13450 - DNA, 310 bp, Homo sapiens
  source 1..310: mol_type = other DNA
tgcaacgtctggattcaccttcagtagttcctggatgtactgggtacgccaagcaccagggaaggggttgcagtgggtctcaagtattagtaatgatggcagcagtacaagatacgcggactccgtgaagggccgattcatcatgtccagagacaacgccgagaacactgtttatctgcaaatgagcgatttgagagccgacgacaccggtgtctattactgtgccaggcccacaaaattctattacgatcccgacttcgggaactacatgggcgtctggggcagcgggaacacggtcaccgtctcctca

SEQ ID NO: 13451 - DNA, 310 bp, Homo sapiens
  source 1..310: mol_type = other DNA
tgcaacctctggcttcaccttcagtagttcttggatatactgggtacgccaaagaccagggaagggcttgcagtgggtctcaagtattaataatgatggcagcagtacaagatatgcggagtccgtgaagggccgattcaccatgtccagagacaacgccgagaatactgcatatctgcaaatgagcaacttgagagccgacgacaccggtgtctattactgtgccaggcccacaaaattctattacgatcccgacttcgggaactacatgggcgtctggggcagcgggaccacggtcaccgtctcctca

SEQ ID NO: 13452 - DNA, 310 bp, Homo sapiens
  source 1..310: mol_type = other DNA
tggaacctctggattcaccttcagtagctcctggatgtattgggtacgccaagtaccagggaaggggttggaatgggtcgcaagtattagtaatgatggcagcagtacaagatacgcggactccgtgaagggccgattcaccatctccagagacaacgccgagaacaccctctatctgcagatgaacagtttgagaggcgacgacaccgctacttattactgtgccagacccacaaaattctattacgatcccgacttcggaaattacatgggcgtctggggcagcgggaccaaggtcaccgtctcatca

SEQ ID NO: 13453 - DNA, 310 bp, Homo sapiens
  source 1..310: mol_type = other DNA
tgcaacctctggattcacgttcagtagctcctggatgtattgggtacgccaagtccaaggtaaggggttggaatgggtcgcaagtattagtcatgatggcagtagtacaagatatgcggactccgtgaagggccgattcaccatctccagagacaacgccgagaacaccctctatctgctgatgaaccgtttgagcggcgacgacaccgctacttattactgtgccagacccacaaagttctattacgatcccgacttcggaaattacatgggcgtctggggcagcgggaccacggtcaccgtctcatca

SEQ ID NO: 13454 - DNA, 310 bp, Homo sapiens
  source 1..310: mol_type = other DNA
tgcaacctctggattcaccttcagtagctcctggatgtattgggtacgccaagtacaaggaaaggggttggaatgggtcgcaagtattagtcatgatggcagtagtacaagatatgcggactccgtgaagggccgattcaccatctccagagacaacgccgagaacaccctctatctgctgatgaaccgtttgagaggcgacgacaccgctacttattactgtgccagacccacaaagttctattacgatcccgacttcggaaattacatgggcgtctggggcagcgggaccacggtcaccgtctcatca

SEQ ID NO: 13455 - DNA, 310 bp, Homo sapiens
  source 1..310: mol_type = other DNA
tgcaacctctggcttcacgttcagtagttcttggatatactgggtacgccaagcaccagggaaggggttgcagtgggtctcaagtattgataatgacggcagcagtccaagatatgcggagtccgtgaagggccgattcaccatgtccagagacaacgccgagaacactgcatatctgcaaatgaccaacttgagagccgacgacaccggtgtctattactgtgccaggcccacaaaattctattacgatcccgacttcgggaattatatgggcgtctggggcagcgggaccacggtcaccgtctcctca

SEQ ID NO: 13456 - DNA, 289 bp, Homo sapiens
  source 1..289: mol_type = other DNA
tgcagcgtctggactcaacttcagaagttatggcatgcactgggtccgccaggctccaggcaaggggctggagtgggtggccgtcatatggtatgatgaagtaaatatctactatgcagactccgtgaagggccgattcaccatctccagagacaattccaggaatatgctgtatttgcaaatgaacaacctgagagtcgaagacacggctgtctattactgtgcaggagcagaagctgaaggctggttcgacccctggggccagggaaccctggtcaccgtctcctca

SEQ ID NO: 13457 - DNA, 289 bp, Homo sapiens
  source 1..289: mol_type = other DNA
tgaagcgtctggattctccctcagttcttatggcatgcactgggtccgccaggctccaggcaagggcctggagtgggtggcagatatatggtatgatggaactaagaaatattatgcggactccgtgaagggccgattcaccatctccagagacacttccaagaacacgctgtttctgcaaatgagcaatctgcgagccgaggacaccgctgtctattactgtgcgggcgcagaggctgagggctggttcgacccctggggccggggaaccctggtcaccgtctcctca

SEQ ID NO: 13458 - DNA, 311 bp, Homo sapiens
  source 1..311: mol_type = other DNA
tcgtcaccggggacagtgtcactagcgacaccgcttcttggaactggatcaggcagtccccatcgagaggccttgagtggctggggaggacatattacaggtcccagtggtcccagtggtatactgaatatggagactctgtgagaagtcgaatgagaatcaacgcagacacatccaagaaccagttttccctgcacctgaactctgtgactcccgaggacacggctgttttcttctgtgcaagaagtagggaccatgatatctttggtttcggccactggggccagggatccctggtcaccgtctcctca

SEQ ID NO: 13459 - DNA, 302 bp, Homo sapiens
  source 1..302: mol_type = other DNA
tcgtctccggggacagtgtcactagcgacaccgcttcttggaactggatcaggcagtccccatcgagaggccttgaatggttggggaggacatattacaggtcccagtggtttactgaatatgcagactctgtgaaaagtcgaatgagtatcagcgcagacacatccaagaaccagttttccctgcaggtgtactctgtgactcccgaggacacggctgttttctactgtgcaagaagtagggaccatgatatctttggtttcggccactggggccagggatccctggtcaccgtctcctca

SEQ ID NO: 13460 - DNA, 302 bp, Homo sapiens
  source 1..302: mol_type = other DNA
tcgtctccggggacagtgtcactagtgacaccgcttcttggaactggatcaggcagtcgccatcgagaggccttgagtggctggggaggacatattacaggtccatgtggtttactgaatatgctgggtctttcgaaggacgaatgaggatcagcgcggacgcatccaggaaccagttttccctgcaggtgttctctgcagctgccgaggacacggctgttttctactgtgcaagaagtcgggaccacgacatctttggtttcggccactggggccagggatcccgggtcaccgtctcctca

SEQ ID NO: 13461 - DNA, 304 bp, Homo sapiens
  source 1..304: mol_type = other DNA
cagtgtctctggtggttccatggctggttattactggagctggatccggcagtccccagggaagggactggagtggcttggctatatgtcttacattgggaccacccactattatccttccttcgcgagtcgagtcaccatgtccctagacacgtccaggaaccagttctctctgaggctgggctctgtgaccgctgcggacacggccgtctattactgtgggagagttggtcacaaaggcaatttaggtatctccaggttcgtggacgtctggggcagagggaccacggtcaccgtgtcgtca

SEQ ID NO: 13462 - DNA, 304 bp, Homo sapiens
  source 1..304: mol_type = other DNA
cagtgtctctggtggttccatggctggttattactggagctggatccggcagtccccagggaagggactggagtggcttggctatatggcttacagtgggaccacccactattatccttccctcgcgagtcgagtcaccatgtcactagacacgtccaggaaccagttctctctgaggctgggctctgtgaccgctgcggacacggccgtctattactgtgggagagttggtcacaaaggcaatttaggtatctccaggttcgtggacgtctggggcagagggaccacggtcaccgtgtcgtca

SEQ ID NO: 13463 - DNA, 298 bp, Homo sapiens
  source 1..298: mol_type = other DNA
tgcaggctctggattcactttcagtaacgcctggatggactgggtccgccaggctccagggaaggggctggagtgggttggccgtatcaaaagcaaaactgatggtgggataaaagactacgctgcacccgtgaaaggcagattcaccatctcaagagatgattcaaaagacaccctttatctggagatgaacagcctgaaaaccgaggacacagccgtgtattattgtaccgcaagacattactatgataacatgtttgatgtctggggccaaggggcactggtcaccgtctcttca

SEQ ID NO: 13464 - DNA, 298 bp, Homo sapiens; identical to SEQ ID NO: 13463
  source 1..298: mol_type = other DNA

SEQ ID NO: 13465 - DNA, 298 bp, Homo sapiens
  source 1..298: mol_type = other DNA
tgcaggctctggattcactttcagtaacgcctggatggactgggtccgccaggctccagggaaggggctggagtgggttggccgtatcaaaagcaaaactgatggtgggataaaagactacgctgcacccgtgaaaggcagattcaccatctcaagagatgattcaaaagacaccctttatctggagatgaacagcctgaaaaccgaagacacagccgtgtattattgtaccgcaagacattactatgataacatgtttgatgtctggggccaaggggcactggtcaccgtctcttca

SEQ ID NO: 13466 - DNA, 298 bp, Homo sapiens; identical to SEQ ID NO: 13463
  source 1..298: mol_type = other DNA

SEQ ID NO: 13467 - DNA, 298 bp, Homo sapiens
  source 1..298: mol_type = other DNA
tgcaggctctggattcactttcactaacgcctggatggactgggtccgccaggctccagggaaggggctggagtgggttggccgtattaaaagcaaaactgatggtgggataaaagactacgctgcacccgtgaaaggcagattcaccatctcaagagatgattcaaaagacacgctttatctggaaatggacagcctgaaaaccgaggacacagccgtgtattattgtaccgcaagacattactatgataacatgtttgatgtctggggccaagggacactggtcaccgtctcctca

SEQ ID NO: 13468 - DNA, 298 bp, Homo sapiens
  source 1..298: mol_type = other DNA
tgcaggctctggattcactttcagtaacgcctggatggactgggtccgccaggctccagggaaggggccggagtgggttggccgtatcaaaagcaaaactgatggtgggataaaagactacgctgcacccgtgaaaggcagattcaccatcacaagagatgattcaaaagacaccctttatctggagatgaacagcctgaaaaccgaggacacagccgtgtattattgtaccgcaagacattactatgataacatgtttgatgtctggggccaaggggcactggtcaccgtctcttca

SEQ ID NO: 13469 - DNA, 298 bp, Homo sapiens
  source 1..298: mol_type = other DNA
cactgtctccggtggctccatcagaacttactactggagctggatccggcagcccccaggggagggactggagtggattgggtgttttcattacagtgggagcaccaactacaacccctccctcaagagtcgagtcaccattttagtagacacgtccaagaaccagttctccctaaagctgagctctgtgaccgccgcagacacggccgtgtactactgtgcgagacatttgagctatggctataatacgcatacttttgatttctggggccaagggacaatggccaccgtctcatca

SEQ ID NO: 13470 - DNA, 298 bp, Homo sapiens
  source 1..298: mol_type = other DNA
cactgtctccggtggctccatcagaacctactactggagctggatccggcagcccccaggggagggactggagtggattgggtgttttcattacagtgggagcaccaactacaacccctccctcaagagtcgagtcaccattttagtagacacgtccaagaaccagttctccctaaagctgagctctgtgaccgccgcagacacggccgtgtactactgtgcgagacatttgagctatggctataatacgcatacttttgatttctggggccaagggacaatggccaccgtctcatca

SEQ ID NO: 13471 - DNA, 298 bp, Homo sapiens; identical to SEQ ID NO: 13469
  source 1..298: mol_type = other DNA

SEQ ID NO: 13472 - DNA, 298 bp, Homo sapiens
  source 1..298: mol_type = other DNA
cactgtctccggtggctccatcagaacttactactggagctggatccggcagcccccaggggagggactggagtggattgggtgttttcattacagtgggagcaccaactacaacccctccctcaagagtcgagtcaccattttagtagacacgtccaagaaccagttctccctaaagctgagctctgtgaccgccgcatacacggccgtgtactactgtgcgagacatttgagctatggctataatacgcatacttttgatttctggggccaagggacaatggccaccgtctcatca

SEQ ID NO: 13473 - DNA, 300 bp, Homo sapiens
  source 1..300: mol_type = other DNA
gcttctggaaacatcttcagcactgatgatgtgaattgggtgcgacaggcccctggacaagggcttgagtggatgggatgggtgaaccccaatagtggtgactcaggctttgaacagaaatttcagggcagaatcaacatggcctggaacacctccataggcacagtctacatggagctgagcagcctgagatctgaggacacggccacttattactgtgcgacaggcggctacagtgggagttattatgaaaggccccctgatgtctggggccaagggacagtggtcaccgtctcttca

SEQ ID NO: 13474 - DNA, 300 bp, Homo sapiens
  source 1..300: mol_type = other DNA
gcttctggaaacatcttcagcactgatgatgtgaattgggtgcgacaggcccctggacaagggcttgagtggatgggatgggtgaaccccaatagtggtgactcaggctttgaacagaaatttcagggcagaatcaacatggcctggaacacctccataggcacagtccacatggagctgagcagcctgagatctgaggacacggccacttattactgtgcgacaggcggctacagtgggagttattatgaaaggccccctgatgtctggggccaagggacagtggtcaccgtctcttca

SEQ ID NO: 13475 - DNA, 300 bp, Homo sapiens
  source 1..300: mol_type = other DNA
gcttctggaaacatcttcagcactgatgatgtgaattgggtgcgacaggcccctggacaagggcttgagtggatgggatgggtgaaccccaatagtggtgactcaggctatgaacagaaatttcagggcagaatcaacatggcctggaacacctccataggcacagtctacatggagctgagcagcctgagatctgaggacacggccatttactactgtgcgacaggaggctatagtgggagttattatgaaaggccccctgatgtctggggccaagggacagtggtcaccgtctcttca

SEQ ID NO: 13476 - DNA, 292 bp, Homo sapiens
  source 1..292: mol_type = other DNA
tgcagcgtctggattcaccttcagaaactttggcatgcactgggtccgccaggctccaggcaaggggctggagtgggtggcacttatatggtatgatggaagtaaaacatattatggagactccgtgaagggccgattcaccatctccagagacgattccgagaacacactgtatctggaaataaatagcctgagagccgaggacacggctctgtattactgtgcgcgagatgatcccaactcgggatcaatcgactcctggggccagggaaccctggtcaccgtctcctca

SEQ ID NO: 13477 - DNA, 292 bp, Homo sapiens
  source 1..292: mol_type = other DNA
tgcagcgtctggattcaccttcagaaactttggcatgcactgggtccgccaggctccaggcaaggggctggagtgggtggcacttatatggtatgatggaagtaaaacatattatggagactccgtgaagggccgattcaccatctccagagacgattcccagaacacattgtatctggaaataaatagcctgagagccgaggacacggctctgtattactgtgcgcgagatgatcccaactcgggatcaatcgactcctggggccagggaaccctggtcaccgtctcctca

SEQ ID NO: 13478 - DNA, 292 bp, Homo sapiens
  source 1..292: mol_type = other DNA
tgcaacgtctggattcaccttcagaaactttggcatgcactgggtccgccaggctccaggcaaggggctggagtgggtggcacttatatggtatgatggaagtaaaacatattatggagactccgtgaagggccgattcaccatctccagagacgattccaagaacacactgtatctggaagtaaatagcctgagagccgaggacacggctctatattactgtgcgcgagatgatcccaactcgggatcaatcgactcctggggccagggaaccctggtcaccgtctcctca

SEQ ID NO: 13479 - DNA, 292 bp, Homo sapiens
  source 1..292: mol_type = other DNA
tgcagcgtctggattcaccttcaggaactttggcatgcactgggtccgccaggctccaggcaaggggctggagtgggtggcacttatatggtatgatggaagtaaaacatattatggagactccgtgaagggccgattcaccatctccagagacgattccgagaacacactgtatctggagataaatagcctgagagccgaggacacggctctatattactgtgcgcgagatgatcccaattcgggatcaatcgactcctggggccagggaaccctggtcaccgtctcctca

SEQ ID NO: 13480 - DNA, 292 bp, Homo sapiens
  source 1..292: mol_type = other DNA
tgcagcgtctggattcaccttcagaaaccttggcatgcactgggtccgccaggctccaggcaaggggctggagtgggtggcacttatatggtatgatggaagtaaaacatattatggagactccgtgaagggccgattcaccatctccagagacgattccgagaacacactgtatctggaaataaatagcctgagagccgaggacacggctctgtattactgtgcgcgagatgatcccaactcgggatcaatcgactcctggggccagggaaccctggtcaccgtctcctca

SEQ ID NO: 13481 - DNA, 292 bp, Homo sapiens
  source 1..292: mol_type = other DNA
tgcagcgtctggattcaccttcagaaactttggcatgcactgggtccgccaggctccaggcaaagggctggagtgggtggcacttatatggtatgatggaagtaaaacatattatggagactccgtgaagggccgattcaccatctccagagacgattccaagaacacactgtatctggaaataaatagcctgagagccgaggacacggctctgtattactgtgcgcgagatgatcccaactcgggatcaatcgactcctggggccagggaaccctggtcaccgtctcctca

SEQ ID NO: 13482 - DNA, 292 bp, Homo sapiens
  source 1..292: mol_type = other DNA
tgcagcgtctgggttcaccttcaggaactttggcatgcactgggtccgccaggctccaggcaaggggctggagtgggtggcacttatatggtatgatggaagtaaaacatattatggagactccgtgaagggccgattcaccatctccagagacgattccgagaacacactgtatctggaaataaatagcctgagagccgaggacacggctctgtattactgtgcgcgagatgatcccaactcgggatcaatcgactcctggggccagggaaccctggtcaccgtctcttca

SEQ ID NO: 13483 - DNA, 292 bp, Homo sapiens
  source 1..292: mol_type = other DNA
tgcagcgtctggattcaccttcagaaactttggcatgcactgggtccgccaggctccaggcaaggggctggagtgggtggcacttatatggtatgatggaagtcaaacatattatggagactccgtgaagggccgattcaccatctccagagacgactccgagaacacactttatctgcaaataaatagcctgagagccgaggacacggctctatattactgtgcgcgagatgatcccaactcgggatcaatcgactcctggggccagggaaccctggtcaccgtctcctca

SEQ ID NO: 13484 - DNA, 295 bp, Homo sapiens
  source 1..295: mol_type = other DNA
cactgtctctggtggctccatcaacagtggtggttactactggagctggatccgccagcacccagggaagggcctggagtggattggagacatctattacagtggcagcacctactacaacccgtccctcaagagtcgagttaccatatcagtggacacgtctaagaaccagttctccctgaagctgagctctgtgactgccgcggacacggccgtgtattactgtgcgagagatagcaacacctggagcgcccttgagtactggggccagggaaccctggtcaccgtctcctca

SEQ ID NO: 13485 - DNA, 295 bp, Homo sapiens
  source 1..295: mol_type = other DNA
caatgtctctggtgactccatcagcagtggtggttactactggacctggatccgccagcacccagggaagggcctggagtggattgggtacatcttttccagtgggcgcacctactacaacccgtccctcaagagtcgcgttaccatatcagtggacacgtctaagaaccagttctccctgaagctgagctctgtgactgccgcggacacggccgtgtattactgcgcgagagatagcaacacctggagtgcccttgagtactggggccagggaaccctggtcaccgtctcctca

SEQ ID NO: 13486 - DNA, 295 bp, Homo sapiens
  source 1..295: mol_type = other DNA
cactgtctctggcgtctccatgaacagtggtggttactactggagctggatccgccagttcccagggaagggcctggagtttattggagacatctattacagtggcagcacctactacaacccctccctcaagagtcgagtttccatatcggtggacctgtctaagaaccaattctccctgaacctcagcgctgtgactgccgcggacacggccgtctattactgtgcgagagatagtaacacctggagcgcccttgaatactggggccagggaattctggtcaccgtctcctca

SEQ ID NO: 13487 - DNA, 292 bp, Homo sapiens
  source 1..292: mol_type = other DNA
tgcagcgtctggattcaccttcagtaattatggcatgcactgggtccgccaggctccaggcaaggggctggaatgggtggcaattatatggtatgatggaagtaatatatactatgcagactccgtgaagggccgattcaccatctccagagacaattccaacaacaccctatatctgcaaatgaacagcctgagagccgaggacacggctttgtattactgtgcgagagagccggctgggacctattcctttgactactggggccagggaaccctggtcaccgtctcctca

SEQ ID NO: 13488 - DNA, 292 bp, Homo sapiens
  source 1..292: mol_type = other DNA
tgcagcgtctggattcaccttcaggaattatggcatgcactgggtccgccaggctccaggcaaggggctggagtgggtggcacttatatggtatgatggaagtaataagtactatgcagactccgtgaagggccgattcaccatctccagagacaattccgagaacacgctgtatctgcaaatgaacagcctgagagccgaggacacggctgtatattactgtgcgagagagccggctggtacctattcctttgactactggggccagggaaccctggtcaccgtctcctca

SEQ ID NO: 13489 - DNA, 292 bp, Homo sapiens
  source 1..292: mol_type = other DNA
tgccacgtctggattcaccttcagtaactatggcatgcactgggtccgccaggctccaggcaaggggctggagtgggtggcaattatatggtatgatggaagtaataagtactatgcagactccgtgaagggccggttcaccatctccagagacaattccaagaacaccctatatctgcaaatgaacagcctgagagccgaggacacggctatgtattactgtgcgagagagccggctgggacctactcctttgactactggggccagggaaccctggtcaccgtctcctca

SEQ ID NO: 13490 - DNA, 292 bp, Homo sapiens
  source 1..292: mol_type = other DNA
tgcagcgtctggattcaccttcagtaactatggcatgcactgggtccgccaggctccaggcaaggggctggagtgggtggcaattatatggtatgatggaactaataaatactatgcagactccctgaagggccggttcaccatctccagagacaattccaagaacaccctgtatctgcaaatgaacagcctgagagccgaggacacggctgtgtattactgtgcgagagagccggctgggacctactcctttgactactggggccagggaaccctggtcaccgtctcctca

SEQ ID NO: 13491 - DNA, 292 bp, Homo sapiens
  source 1..292: mol_type = other DNA
tgcagcgtctggattcaccttcaggaattatggcatgcactgggtccgccaggctccaggcaaggggctggagtggatggcacttatatggtatgatggaagtaataagtactatgcagactccgtgaagggccgattcaccatctccagagacaattccgagaacacgctgtatctgcaaatgaacagcctgagagccgaggacacggctgtatattactgtgcgagagagccggctggtacctattcctttgactactggggccagggaaccctggtcaccgtctcctca

SEQ ID NO: 13492 - DNA, 292 bp, Homo sapiens
  source 1..292: mol_type = other DNA
tgcagcgtctggactcaccttcagtaattatggcatgcactgggtccgccaggctccaggcaaggggctggaatgggtggcaattatatggtatgatggaagtaatatatactatgcagactccgtgaagggccgattcaccatctccagagacaattccaacaacaccctatatctgcaaatgaacagcctgagagccgaggacacggctttgtattactgtgcgagagagccggctgggacctattcctttgactactggggccagggaaccctggtcaccgtctcctca

SEQ ID NO: 13493 - DNA, 292 bp, Homo sapiens
  source 1..292: mol_type = other DNA
tgcagcgtctggattcaccttcaggaattatggcatgcactgggtccgccaggctccaggcaaggggctggagtgggtggcacttatatggtatgatggaagtaataagtactatgcagactccgtgaagggccgattcaccatctctagagacaattccgagaacacgctgtatctgcaaatgaacagcctgagagccgaggacacggctgtatattactgtgcgagagagccggctggtacctattcctttgactactggggccagggaaccctggtcaccgtctcctca

SEQ ID NO: 13494 - DNA, 292 bp, Homo sapiens
  source 1..292: mol_type = other DNA
tgcagcgtctggattcaccttcagtaattatggcatgcactgggtccgccaggctccaggcaagggactggaatgggtggcaattatatggtatgatggaagtaatatatactatgcagactccgtgaagggccgattcaccatctccagagacaattccaacaacaccctatatctgcaaatgaacagcctgagagccgaggacacggctttgtattactgtgcgagagagccggctgggacctattcctttgactactggggccagggaaccctggtcaccgtctcctca

SEQ ID NO: 13495 - DNA, 292 bp, Homo sapiens
  source 1..292: mol_type = other DNA
tgcagcgtctggattcaccttcagtaactatggcatgcactgggtccgccaggctccaggcaaggggctggagtgggtggcaattatctggtatgatggaactaataaatactatgcagactccgtgaagggccgattcaccatctccagagacaattccgagaacacgttgtatctacaaatgaacaccctgagagccgaggacacggctgtatattactgtgcgagagagccggctgggacttattcctttgactactggggccagggaaccctggtcaccgtctcctca

SEQ ID NO: 13496 - DNA, 292 bp, Homo sapiens
  source 1..292: mol_type = other DNA
tgcagcgtctggattcaccttcaggaattatggcatgcactgggtccgccaggctccaggcaaggggctggagtgggtggcacttatatggtatgatggaagtaataagtactatgtagactccgtgaagggccgattcaccatctccagagacaattccgagaacacgctgtatctgcaaatgaacagcctgagagccgaggacacggctgtatattactgtgcgagagagccggctggtacctattcctttgactactggggccagggaaccctggtcaccgtctcctca

SEQ ID NO: 13497 - DNA, 292 bp, Homo sapiens
  source 1..292: mol_type = other DNA
tgcagcgtctggattcaccttcagtaattatggcatgcactgggtccgccaggctccaggcaaggggctggaatgggtggcaattatatggtatgatggaagtaatatatactatgcagactccgcgaagggccgattcaccatctccagagacaattccaacaacaccctatatctgcaaatgtacagcctgagagccgaggacacggctttgtattactgtgcgagagagccggctgggacctattcctttgactactggggccagggaaccctggtcaccgtctcctca

SEQ ID NO: 13498 - DNA, 292 bp, Homo sapiens
  source 1..292: mol_type = other DNA
tgcagcgtctggattcaccttcagaaactatggcatgcactgggtccgccaggctccaggcaaggggctggagtgggtggcaattatctggtatgatggcactgttaaacactatgcagactccgtgaggggccgattcaccatctccagagacaattccaacaacacgttgtatctacaaatggacagcctgagagccgaggacacggccgtgtatttctgtgcgagagagccggctgggacttactcctttgactactggggccagggaatcctggtcaccgtctcctca

SEQ ID NO: 13499 - DNA, 292 bp, Homo sapiens
  source 1..292: mol_type = other DNA
tgcagcatctggattcaccttccgtaactatggcatgcactgggtccgccaggctccaggcaaggggctggagtgggtggcaattatctggtatgatggaagtcatgaatactatgcagactccgtgaagggccgattcaccatctccagagacaattccaacaacactctgtatctgcaaatgaacagcctgagagccgaggacacggctgtctattactgcgcgagagagccggctgggacctactcctttgactactggggccagggaaccctggtcaccgtctcctca

SEQ ID NO: 13500 - DNA, 292 bp, Homo sapiens
  source 1..292: mol_type = other DNA
tgcagcatctgggttcaccttcaggaactatggcatgcactgggtccgccaggctccaggcaaggggctggagtgggtggctattatatggtatgatggaagtaatgaatactatgctgactccgtgaagggccgattcaccatctccagagacaattccgagaacacgctgtatctgcaaatgaacaacctgagagtcgaggacacggctgtctattactgcgcgagagagccggctgggacctactcctttgactactggggccagggaaccctggtcaccgtctcctca

SEQ ID NO: 13501 - DNA, 292 bp, Homo sapiens
  source 1..292: mol_type = other DNA
tgcagcgtctggattcaccttcagaaattatggcatgcactgggtccgccaggctccaggcaaggggctggagtgggtggcaattatctggtatgatggaactgttaaacactatgcagactccgtgaggggccgattcaccatctccagagacaattccaacaacacgttgtatctacaaatggacagcctgagagccgaggacacggccgtatatttctgtgcgagagagccggctgggacttactcctttgactactggggccagggaaccctggtcaccgtctcctca

SEQ ID NO: 13502 - DNA, 292 bp, Homo sapiens
  source 1..292: mol_type = other DNA
tgcagcgtctggattcaccttcagaaattatggcatgcactgggtccgccaggctccaggcaaggggctggaatgggtggcaattatatggtatgatggaagtaataaatattatgcagactccgtgaagggccgattcaccatctccagagacaattccgagaacactctatatctgcaaatgaacagcctgagaaccgaggacacggctgtgtattactgtgcgagagagccggctgggacctattcctttgactactggggccagggaaccctggtcaccgtctcctca

SEQ ID NO: 13503 - DNA, 295 bp, Homo sapiens
  source 1..295: mol_type = other DNA
ttcagcctctggattcgcctttagcgactacgccatgacctggatccgacaggctccagggaaggggctggagtgggtgtcaatgattagtggtagtggttttaccatatactacgcagactccatgaagggccgggtcaccatctccagagacaattcgaagaacacggtggatctgcaaatgaacagcctgagagccgaggacaccgccgtttattactgtgcgaaagccggtggtaacactatatattggtatgacttttggggccagggaaccctggtcaccgtctcctca

SEQ ID NO: 13504 - DNA, 295 bp, Homo sapiens
  source 1..295: mol_type = other DNA
ttcagcctctggattcgcctttagcgactacgccatgacctggatccgacaggctccagggaaggggctggagtgggtgtcaatgattagtggtagtggttttaccatatactacccagactccatgaagggccgggtcaccatctccagggacaattcgaagaacacggtggatctgcaaatgaaaagcctgagagccgaggacaccgccgtttattactgtgcgaaagccggtggtaacactatatattggtatgacttttggggccagggaaccctggtcaccgtctcctca

SEQ ID NO: 13505 - DNA, 295 bp, Homo sapiens
  source 1..295: mol_type = other DNA
ttcagcctctggattcgcctttagcgactacgccatgacttggatccgacaggctccagggaaggggctggagtgggtgtcaatgattagtggtagtggttataccatatactacccagactccctgaagggccgggtcaccatctccagagacaattcgaagaacacggtggatctgcacatgaacagcctgagagccgaggacaccgccgtttattactgtgcgaaagccggtggtaacactatatattggtatgacttttggggccagggaaccctggtcaccgtctcctca

SEQ ID NO: 13506 - DNA, 295 bp, Homo sapiens
  source 1..295: mol_type = other DNA
ttcagcctctggattcgcctttagcgactacgccatgacctggatccgacaggctccagggaaggggctggagtgggtgtcaatgattagtggtagtggttataccatatactacccagactccatgaagggccgggtcaccatctccagagacaattcgaagaacacggtggatctgcaaatgaacagcctgagagtcgaggacaccgccatttactactgtgcgaaggccggtggtaacactatatattggtatgacttttggggccagggaaccctggtcaccgtctcctca

SEQ ID NO: 13507 - DNA, 283 bp, Homo sapiens
  source 1..283: mol_type = other DNA
ttcagcctctggacttactttcagtgtgtccactatgtactgggtccgccaggctccagcgaaggggctggaatatgtttcagctattactaatggggatagaacatactacagagactcagttaagggcagattcaccatctctagagacgattccaagaacacgctgtatcttcaaatgaacagtctgagacctgaggacacggctgtgtattactgtgtgaaagatccaggccccctgttcgtgactaggggccagggaattctggtcaccgtctcctca

SEQ ID NO: 13508 - DNA, 283 bp, Homo sapiens
  source 1..283: mol_type = other DNA
ttcagcctccggacttactttcagtgtgtccactatgtactgggtccgccaggctccagcgaaggggctggaatatgtttcagctattactaatggggatataacatactacagagactcagttcagggcagattcaccatctctagagactattccacgaacacgttgtatcttcaaatgaacagtctgagacctgaggacacggctgtgtattactgtgtgaaagatccaggccccctgttcgtgactgggggccagggaattcccgtcaccgtctcctca

SEQ ID NO: 13509 - DNA, 286 bp, Homo sapiens
  source 1..286: mol_type = other DNA
ttcagcctctggactcaccttcagtgtgtccactatgtactgggtccgccaggctccagcgaagggactggaatatgtttcagctattaccagtaatggggatagtacatactacacagactcagtgaggggcagattcaccatctccagagacaattccaagaacacgctgtatcttcaaatgaacagtctgagacctgaggacacggctgtgtattactgtgtgaaagatccaggccccctgttcgtgactaggggccagggaatcctggtcaccgtctcctca

SEQ ID NO: 13510 - DNA, 286 bp, Homo sapiens
  source 1..286: mol_type = other DNA
ttcagcctctggactcaccttcagtgtgtccactatgtactgggtccgccaggctccagcgaagggactggaatatgtttcagctattaccagtaatggggagagtacatattacacagactcagtgacgggcagattcaccatctccagagacaattccaagaacacgctgtatcttcaaatgaacagtctgagacctgaggacacggctgtgtattactgtgtgaaagatccaggccccctgttcgtgactaggggccagggaatcctggtcaccgtctcctca

SEQ ID NO: 13511 - DNA, 295 bp, Homo sapiens
  source 1..295: mol_type = other DNA
tgcagcctctggattcaccttcagcagctatagcatgaactgggtccgccaggctccagggaaggggctggagtgggtttcatacattagtagaactagtagtgccacactctatgcagactctgtgaagggccgattcaccatctccagagacaatgccaagaactcactttatctgcaaatgaacagcctgagagacgaggacacggctgtgtattactgtgcgagagaagccccagtgggagcttcgacgactgactactggggccagggaaccctggtcaccgtctcctca

SEQ ID NO: 13512 - DNA, 295 bp, Homo sapiens
  source 1..295: mol_type = other DNA
tgcagcctctggattcaccttcagcagctatagcatgaactgggtccgccaggctccagggaaggggctggagtgggtttcatacattagtagaagtagtagtgccatactctatgcagactctgtgaagggccgattcaccatctccagagacaatgccaagaactcactgtatctgcaaatgaacagcctgagagacgaggacacggctgtgtattactgtgcgagagaagccccagtgggagcttcgacgactgactactggggccagggaaccctggtcaccgtctcctca

SEQ ID NO: 13513 - DNA, 295 bp, Homo sapiens
  source 1..295: mol_type = other DNA
tgcagcctctggattcaccttcagcagctatagcatgaactgggtccgccaggctccagggaaggggctggagtgggtttcatacattagtagaagtagtagtgccatactctatgcagactctgtgaagggccgattcaccatctccagagacaatgccaggaactcactgtatctgcaaatgaacagcctgagagacgaggacacggctgtgtattactgtgcgagagaagccccagtgggagcttcgacgactgactactggggccagggaaccctggtcaccgtctcctca

SEQ ID NO: 13514 - DNA, 295 bp, Homo sapiens
  source 1..295: mol_type = other DNA
tgcagcctctggattcaccttcagcagctatagcatgaactgggtccgccaggctccagggaaggggctggagtggatttcatacattagtagaagtagtagtgccatactctatgcagactctgtgaagggccgattcaccatctccagagacaatgccaagaactcactgtatctgcaaatgaacagcctgagcgacgaggacacggctgtgtattactgtgcgagagaagccccagtgggagcttcgacgactgactactggggccagggaaccctggtcaccgtctcctca

SEQ ID NO: 13515 - DNA, 295 bp, Homo sapiens
  source 1..295: mol_type = other DNA
tgcagcctctggattcaccttcagcagctatagcatgaactgggtccgccaggctccagggaaggggctggagtgggtttcatacattagtagaactagtagtgccatactctatgcagactctgtgaagggccgattcaccatctccagagacaatgccaagaactcactgtatctgcaaatgaacagcctgagagacgaggacacggctgtgtattactgtgcgagagaagccccagtgggagcttcgacgactgactactggggccagggaaccctggtcaccgtctcctca

SEQ ID NO: 13516 - DNA, 295 bp, Homo sapiens
  source 1..295: mol_type = other DNA
tgcagcctctggattcaccttcagcagctatagcatgaactgggtccgccaggctccagggaaggggctggagtgggtttcatacattagtagaagtagtagtgccatactctatgcagactctgtgaagggccgattcaccatctccagagacaatgccaagaactcactgtatctgcaaatgaacagcctgagagacgaggacacggctgtttattactgtgcgagagaagccccagtgggagcttcgacgactgactactggggccagggaaccctggtcaccgtctcctca

SEQ ID NO: 13517 - DNA, 295 bp, Homo sapiens
  source 1..295: mol_type = other DNA
tgcagcctctggattcaccttcagcagctatagcatgaactgggtccgccaggctccagggaaggggctggagtgggtttcatacattactagaactagtagtgtcacactctatgcagactctgtgaagggccgattcaccatctccagagacaatgccaagaactcactgtttctgcaaatgaacagcctgagagacgaggacacggctatttattactgtgcgcgagaagccccagtgggagcttcgacgactgactactggggccagggaaccctggtcaccgtctcctca

SEQ ID NO: 13518 - DNA, 295 bp, Homo sapiens
  source 1..295: mol_type = other DNA
tgcagcctctggattcaccttcagcagctatagcatgaattgggtccgccaggctccagggaaggggctggagtgggtttcatacattaatagaggtagtagtgccatattttatgcagactctgtgaagggccgattcaccatctccagagacaatgccaagaactcactgtatctgcaaatgaacaacctgagagaggaggacacggctgtgtattactgtgcgagagaagccccagtgggagcttcgacgactgactactggggccagggaaccctggtcaccgtctcctca

SEQ ID NO: 13519 - DNA, 295 bp, Homo sapiens
  source 1..295: mol_type = other DNA
tgcagcctctggattcaccttcagcagctatagcatgaactgggtccgccaggctccagggaaggggctggagtgggtttcatacattagtagaagtagtagtgccatactctatgcagactctgtgaagggccggttcaccatctccagagacaatgccaagaactcactgtatctgcaaatgaacagcctgagagacgaggacacggctgtgtattactgtgcgagagaagccccagtgggagcttcgacgactgactactggggccagggaaccctggtcaccgtctcctca

SEQ ID NO: 13520 - DNA, 295 bp, Homo sapiens
  source 1..295: mol_type = other DNA
tgcagcctctggattcaccttcagcagctatagcatgaattgggtccgccaggctccagggaaggggctggagtgggtttcatacattaatagaggtagtagtgccatactctatgcagactctgtgaagggccgattcaccatctccagagacaatgccaagaactcactgtatctgcaaatgaacaacctgagagaggaggacacggctgtgtattactgtgcgagagaagccccagtgggagcttcgacgactgactactggggccagggaaccctggtcaccgtctcctca

SEQ ID NO: 13521 - DNA, 292 bp, Homo sapiens
  source 1..292: mol_type = other DNA
tgtaggctctggattcacgtttagcaggcatgacatgagttggctccgccaggctccagggaaggggctggagtgggtctcacttattaggagtgccagtactaacacacattacgcagactccgtgaagggccggttcaccatctccagagacaactccaggagcaccctctatcttcaaatgaacgacctgagagtcgaagacacggccatttattactgtgcaaagggggagaccgagccgcgcccctttgaccgctggggccagggaacccttgtctccgtctcctca

SEQ ID NO: 13522 - DNA, 292 bp, Homo sapiens
  source 1..292: mol_type = other DNA
tgcggcctctggattcacctttagcaaccatgacatgagctggctccgccaggctccagggaaggggctggagtgggtctcacttattaggagcgctaatactaacacacattatgtagactccgtgaagggccggttcaccatctccagagacaattccaagagcacgctgtatctccaaatgaacagcctgagagccgaagacacggccatttattactgtgcaaaaggggagaccgagccgcgtccctttgaccgctggggccagggaacccttgtcaccgtctcctca

SEQ ID NO: 13523 - DNA, 292 bp, Homo sapiens
  source 1..292: mol_type = other DNA
cactgtctctggtggctccatcaatgccttctactggagttggatccgacagtccccgggggggcgactggagtggcttggatatgtctatgatggtggcaaaaccacctacaacccctccctcgagagtcgagtcaccatatcaatgggcacatcgcagagcgagttctccctgaggatgacctctgtgaccgccgcagacacggccgtgtattattgtgcgactagtgggggacttacggggagatactttgaccactggggccagggaaccccagtcaccgtctcctca

SEQ ID NO: 13524 - DNA, 292 bp, Homo sapiens
  source 1..292: mol_type = other DNA
cactgtctctggtggctccatcaatgccttctactggagttggatccgacagcccccgggggggcgactggagtggcttggatatgtctatgatggtggcaaaaccacctacaacccctccctccagagtcgagtcaccatatcagtgggcacatcgcagaacgagttctccctgaggatgacctctgtgaccgccgcagacacggccgtgtattattgtgcgactagtgggggacttacggggagatactttgaccactggggccagggaaccccagtcaccgtctcctca

SEQ ID NO: 13525 - DNA, 295 bp, Homo sapiens
  source 1..295: mol_type = other DNA
tgcagcctctggattcaccttcagtaattactggatgcactgggcccgccaagctccaggggaggggctggtgtggatctcacgtattaggggagatgggagtgacatgagttacgcggactccgtgaggggccgattcaccatatccagagacaacgccaagaacacgttgtatctgcaaatgaacagtctgacagtcgacgacacggctgtttattactgtgccagacacggtgactacgctgcacatgcttttgatgtctggggccaagggacaatggtcaccatctcctca

SEQ ID NO: 13526 - DNA, 295 bp, Homo sapiens
  source 1..295: mol_type = other DNA
tgcagcctctggattcaccttcagtaattactggatgcactgggcccgccaagctccaggggaggggctggtgtggatctcacgtattaggggagatgggagtgacatgagttacgcggactccgtgaggggccgattcaccatatccagagacaacgccaagaacacgttgtatctgcaaatgaacagtctgacagtcgacgacacggctgtttattactgtgccagacacggtgactacgctgcacatgcttttgatgtctggggccaagggacaatggtcaccgtctcctca

SEQ ID NO: 13527 - DNA, 295 bp, Homo sapiens
  source 1..295: mol_type = other DNA
tgcagcctctggattcaccttcagtaattactggatgcactgggcccgccaagttccaggggaggggctggtgtggatctcacgtattaggggagatgggagtgacatgagttacgcggactccgtgaggggccgattcaccatatccagagacaacgccaagaacacgctgtatctgcaaatgaacagtctaacagtcgacgacacggctgtttattactgtgccagacacggtgactacgctgcacatgcttttgatgtctggggccaagggacaatggtcaccgtctcctca

SEQ ID NO: 13528 - DNA, 295 bp, Homo sapiens; identical to SEQ ID NO: 13526
  source 1..295: mol_type = other DNA

SEQ ID NO: 13529 - DNA, 283 bp, Homo sapiens
  source 1..283: mol_type = other DNA
cactgtctctggtggctccatcagtagttactactggagctggatccggcagcccccagggaagggactggagtggattgggtatatctattacagtgggagcaccaactacaacccttccctcaagagtcgagtcaccatatcagtagacacgtccaagaaccagttctccctgaagctgagctctgtgaccgccgcagacacggccgtgtattactgtgcgagacatgtcgggtcgggcatggacgtctggggcaaagggaccacggtcaccgtctcctca

SEQ ID NO: 13530 - DNA, 283 bp, Homo sapiens
  source 1..283: mol_type = other DNA
cactgtctctggtggctccatcagtagttactactggagctggatccggcagcccccagggaagggactggagtggattgggtatatctattacagtgggagcaccaactacaacccctccctcaagagtcgagtcaccatatcagtagacacgtccaagaaccagttctccctgaaggtgagctctgtgaccgccgcagacacggccgtgtattactgtgcgagacatgtcgggtcgggcatggacgtctggggcaaagggaccacggtcaccgtctcctca

SEQ ID NO: 13531 - DNA, 283 bp, Homo sapiens
  source 1..283: mol_type = other DNA
cgctgtctatggtgggtccttcagtggttactactggagctggatccgccagccaccaggaaaggggctggagtggattgggtatatctattacagtgggagcaccaactacaacccttccctcaagagtcgagtcaccatatcagtagacacgtccaagaaccagttctccctgaagctgagctctgtgaccgccgcagacacggccgtgtattactgtgcgagacatgtcgggtcgggcatggacgtctggggcaaagggaccacggtcaccgtctcctca

SEQ ID NO: 13532 - DNA, 283 bp, Homo sapiens
  source 1..283: mol_type = other DNA
cactgtctctggtggctccatcagtagttactactggagttggatccggcagcccccagggaagggactggagtggattgggtatgtctatttcagtgggggcaccaactacaacccctccctcacgagtcgagtcaccatatcaatagacacgtccaagaaccagttctccctgaacctgacttctgtgaccgccgcagacacggccgtgtactattgtgcgagacatgtcgggtcgggcatggacgtctggggcaaagggaccacggtcaccgtctcctca

SEQ ID NO: 13533 - DNA, 283 bp, Homo sapiens
  source 1..283: mol_type = other DNA
cactgtctctggtggctccatcagtagttactactggagctggatccggcagcccccagggaagggactggagtggattgggtatatctatcccagtgggagcaccaactacaacccctccctcaagaatcgagtcaccatatcagtagacacgtccaagaaccagttctccctgaagttgacctctgtgaccgccgcagacacggccgtttattactgtgcgagacatgtcgggtcgggcatggacgtctggggcaaagggaccacggtcaccgtctcctca

SEQ ID NO: 13534 - DNA, 283 bp, Homo sapiens
  source 1..283: mol_type = other DNA
cactgtctctggtggctccatcagtagttactactggagctgggtccggcagcccccagggaagggactggagtggattggatatatctattacagtgggagcaccaactacaacccctccctcagcagtcgaatcaccatatcactagacacgtccaacaaccagttctccctgaggctgagctctgtgaccgccgcagattcggccgtctattattgtgcgagacatgtcgggtcgggcatggacgtctggggcaaagggaccacggtcaccgtctcctca

SEQ ID NO: 13535 - DNA, 289 bp, Homo sapiens
  source 1..289: mol_type = other DNA
tggagcctctggattcgacttcagtggctctggcatgcactggttccgccaggctccaggcaagggtctagagtgggttgcacttatatcatatgagggaaggaccacaaactatgcagcctccgtgatgggccgattcaccatatccagagacaattccaagaatacggtgtctttgaaaatgaagaacctgagacctgaagacacgggtgtctatttctgcgcgaaagaacggggcctgggggtctttgacaactggggccagggagcccgagtcaccgtctcctca

SEQ ID NO: 13536 - DNA, 289 bp, Homo sapiens
  source 1..289: mol_type = other DNA
tggcgcctctggattcgacttcagtgactctggcatgctctgggtccgccaggctccaggcaagggtctcgagtgggtttcacttatctcatatgggggagcgaccacaaactatgcagacttcgtgaagggccgattcaccatatccagagacaattccaagaatacagtgtctttggaaatgaagaacctgagacctgaagacacgggtgtctatttctgcgcgaaagaacggggtctgggggtctttgacaactggggccagggagcccgagtcatcgtctcctcc

SEQ ID NO: 13537 - DNA, 292 bp, Homo sapiens
  source 1..292: mol_type = other DNA
tgcagcctccggattcacgttcagtaattatgcaatgcagtgggtccgccaggctccaggccgggggctggagtggctggcagttatatcgaatggcggaaccttaatattctacgcagactccgtgaagggccggttcaccatctcccgagacaattccaacaacaaagtgtatctgcaggtcgacgacctgaaacctgaggacacggctgttttctattgtgcgagagaattgacacgcactggcaacctcgactactggggccagggagccctggtcatcgtctcctca

SEQ ID NO: 13538 - DNA, 292 bp, Homo sapiens
  source 1..292: mol_type = other DNA
tgcagcctctggattcaccttcagcaattatgctatgcaatgggtccgccaggctccaggccggggactggagtggctggcagttgtttcgagagatggaggcttaatatactatgcagactccgtgaagggccgattcaccatctcccgagacaattcgaagaacacactatatctccagatgaatagcctgagacctgacgacacggctgtgttttactgtgcgagagaattgacccgcacaggcaacctcgactattggggccagggagtcctggtcagcgtctcctca

SEQ ID NO: 13539 - DNA, 301 bp, Homo sapiens
  source 1..301: mol_type = other DNA
tgcagcctctggattcacctttagcacatatgccatgagctgggtccgccactttccaggaaagggggtggagtgggtcgctgctattgatgctggtcgtcctggcacacactacgcagactctgtgaagggccgcttcaccatctccagggacgattccaggaatacgctgtctctgctattgaacagcctgagagccgacgacacggccatttattattgtgcgagaccgggcctaacagtggcacatacgcggtggttcgacctctggggccagggagccctggtcaccgtctcctca

SEQ ID NO: 13540 - DNA, 301 bp, Homo sapiens
  source 1..301: mol_type = other DNA
tgcagcctctggattcgcctttagcacatatgccatgagctgggtccgccaccttccaggaaagggggtggagtgggtcgctgctattgatgctggtcgtcctggcacacactacgcagactctgtgaagggccgcttcaccatctccagggacgattccaggaatacgctgtctctgctattgagcagcctgagagccgacgacacgggcacttattattgcgcgagaccgggcctaacagtggcacatacgcggtggttcgacctctggggccagggagccctggtcaccgtctcctca

SEQ ID NO: 13541 - DNA, 301 bp, Homo sapiens
  source 1..301: mol_type = other DNA
tgcagcctctggattcacctttagcacatatgccatgagctgggtccgccaccttccaggaaagggggtggagtgggtcgctgctattgatgctggtcgtcctggcacacactacgcagactctgtgaagggccgcttcaccatttccagggacgattccaggaatacgctgtctctgctattgaacagcctgagagccgacgacacggccatttattattgtgcgagaccgggcctaacagtggcacatacgcggtggttcgacctctggggccagggagccctggtcaccgtctcctca

SEQ ID NO: 13542 - DNA, 301 bp, Homo sapiens
  source 1..301: mol_type = other DNA
tgcagcctctggattcacctttagcacatatgccatgagctgggtccgccaccttccaggaaagggggtggagtgggtcgctgctattgatgctggtcgtcctggcacacactacgcagactctgtgaagggccgcttcaccatctccagggacgattccaggaatacgctgtctctgctattgaacagcctgagagccgacgacacggccatttattattgtgcgagaccgggcctaacagtggcacatacgcggtggttcgacctctggggccagggagccctggtcaccgtctcctca

SEQ ID NO: 13543 - DNA, 283 bp, Homo sapiens
  source 1..283: mol_type = other DNA
tgcaccctctggatttatgtttcgtgacttttggatgatgtgggtccgccaggctcctgggaaggggctggaatggatggccaacataaacccagatggaagtgacaaatactatgtggactctgtgaagggccgattcaccgtctccagagacaacaccaagaacttactgtatctgcaaatgaacagcctgagagccgacgacacggccgtatattactgtgcgagagggcagacgtgggcttattactggggccagggaaccctggtcaccgtctcctca

SEQ ID NO: 13544 - DNA, 283 bp, Homo sapiens
  source 1..283: mol_type = other DNA
tgcaccctctggatttatgtttcgtgacttttggatgatgtgggtccgccaggctcctgggaaggggctggaatggatggccaacataaacccagatggaagtgacaagtactatgtggactctgtgaagggccgattcaccgtctccagagacaacaccaagaacctactgtatctacaaatgaacagcctgagagccgacgacacggccgtatattactgtgcgagagggcagacgtgggcttattactggggccagggaaccctggtcaccgtctcctca

SEQ ID NO: 13545 - DNA, 283 bp, Homo sapiens
  source 1..283: mol_type = other DNA
tgcaccctctggatttatgtttcgtgacttttggatgatgtgggtccgccaggctcctgggaaggggctggagtgggtggccaacataaacccagatggaagtgacaaatactatgtggactctgtgaagggccgattcaccgtctccagagacaacaccaaaaacttgctgtatctgcaaatgaacagcctgagagccgacgacacggccgtttattactgtgcgagagggcagacgtgggcttattactggggccagggaaccctggtcaccgtctcctca

SEQ ID NO: 13546 - DNA, 301 bp, Homo sapiens
  source 1..301: mol_type = other DNA
tgcagcctctggattcaccttcagtgattacaccatgaactgggtccgccaggctccagggaagggtctagagtgggtgtcatccattagtagtggtggtacttacatatacgacgcagactcagtgaagggccgattcaccatctccagagacgactccaagaattccctgtatctacaactgagcagccttagagccgaggacacggctgtatattactgtgcgagagactgcagtattaccagttgttatggaatttttgactactggggccaggggaccctggtcgccgtctcctca

SEQ ID NO: 13547 - DNA, 300 bp, Homo sapiens
  source 1..300: mol_type = other DNA
tgcagcctctggattcaccttcagtgattacaccatgaactgggtccgccaggctccagggaagggtctagagtgggtgtcatccattagtagtggtggtacttacatatacgacgcagactcagtgaagggccgattcaccatctccagagacgactccaagaattccctgtatctacaactgagcagccttagagccgaggacacggctgtatattactgtgcgagagactgcagtattaccagttgttatggaatttttgactactgggccaggggaccctggtcgccgtctcctca

SEQ ID NO: 13548 - DNA, 301 bp, Homo sapiens
  source 1..301: mol_type = other DNA
tgcagcctctggattcaccttcagtgattacaccatgaactgggtccgccaggctccagggaagggtctagagtgggtgtcatccattagtagtggtggtacttacatatacgacgcagactcagtgaagggccgattcaccatctccagagacgactccaagaattccctgtatctacaactgagcagccttagagccgaggacacggctgtatattactgtgcgagagactgcagtattaccagttgttatggaatttttgactactggggccagggaaccctggtcaccgtctcctca

SEQ ID NO: 13549 - DNA, 292 bp, Homo sapiens
  source 1..292: mol_type = other DNA
tgcagcctcgggattcaccctaagtggttattggatgagttgggttcgccaggctccagggaaggggctggagtgggtggccaacataaggcaagatggaagtgaggagtactatttggactctgtgacgggccgattcaccatctccagagacaacgacaggaactccctgtatctgcaaatgaacagcctgagagccgaggacacggctgtctattactgtgtgagagattggagtggttactcctactttgactactggggcccgggagccttggtcaccgtctcctca

SEQ ID NO: 13550 - DNA, 292 bp, Homo sapiens
  source 1..292: mol_type = other DNA
tgcagccactggattcacccttagtagctattggatgagttgggtccgccaggctccagggaaggggctggagtgggtggccaacatcaggcaagatggaagcgaggaatactatgcggactctgtgacgggccgattcaccatctccagagacaacgacaagaactcagtgtttctgcaaatgaacaccctgagagccgaggacacggctgtgtattactgtgtgagagattggagtggttactcctactttgactactggggccagggaaccatggtcaccgtctcctca

SEQ ID NO: 13551 - DNA, 292 bp, Homo sapiens
  source 1..292: mol_type = other DNA
tgcagcctcgggattcaccctaagtggttattggatgagttgggttcgccaggttccagggaaggggctggagtgggtggccaacataaggcaagatggaagtgaggagtactatttggactctgtgacgggccgattcaccatctccagagacaacgacaggaactccctgtatctgcaaatgaacagcctgagagccgaggacacggctgtctattactgtgtgagagattggagtggttactcctactttgactactggggcccgggagccttggtcaccgtctcctca

SEQ ID NO: 13552 - DNA, 307 bp, Homo sapiens
  source 1..307: mol_type = other DNA
tgcagcctctgggttcaccttcagtggctctgctatacactgggtccgccaggcttccgggaaagggctggagtgggttggccgtataagaagcaaagctaaccgttacgcgacaacatatgctgcgtcggtggatggcaggttcaccatctcccgagatgattcaaagaacacggcgtatctgcaaatgaacagcctgaaaaccgaggacacggccgtgtattattgtactaacctccttactaacccccactactactacaacgtggacgtctggggcaaagggaccacggtcaccgtctcctca

SEQ ID NO: 13553 - DNA, 307 bp, Homo sapiens
  source 1..307: mol_type = other DNA
tgcagcctctgggttcaccttcagtggctctgctatacactgggtccgccaggcttccgggaaagggctggagtgggttggccgtataagaagcaaagctaaccgttacgcgacaacatatgctgcgtcggtggatggcaggttcaccatctcccgagatgattcaaagaacacggcgtatctgcaaatgaacagcctgaaaaccgaggacatggccgtgtattattgtactaacctccttactaacccccactactactacaacgtggacgtctggggcaaagggaccacggtcaccgtctcctca

SEQ ID NO: 13554 - DNA, 307 bp, Homo sapiens; identical to SEQ ID NO: 13552
  source 1..307: mol_type = other DNA

SEQ ID NO: 13555 - DNA, 307 bp, Homo sapiens
  source 1..307: mol_type = other DNA
tgcagcctctgggttcaccttcagtggctctgctatacactgggtccgccaggcttccgggaaagggctggagtgggttggccgtataagaagcaaagttaaccgttacgcgacaacatatgctgcgtcggtggatggcaggttcaccatctcccgagatgattcaaagaacacggcgtatctgcaaatgaacagcctgaaaaccgaggacacggccgtgtattattgtactaacctccttactaacccccactactactacaacgtggacgtctggggcaaagggaccacggtcaccgtctcctca

SEQ ID NO: 13556 - DNA, 307 bp, Homo sapiens
  source 1..307: mol_type = other DNA
tgcagtctctggattaaacttcgatgacgcctggctgagctgggtccgccaggctccagggaaggggctggagtgggttgcccagattaaaagcaaatcttatcgtgggaaaccagactacgctgcccccgtgagaggcagattcaccatctcaagagatgattcaaaaaccacggtgtatctgcaaatgaatagcctgaaaaccgaggacacagccgtatattactgtacctcagacgtctatttgagaggctcctacttctacatggacgtctggggcaaagggaccgcggtcaccgtctcctca

SEQ ID NO: 13557 - DNA, 307 bp, Homo sapiens
  source 1..307: mol_type = other DNA
tgcagtctctggattaaacttcgatgacgcctggctgagctgggtccgccaggctccagggaaggggctggagtgggttgcccagattaaaagcaaatcttatcgtgggaaaccagactacgctgcccccgtgagaggcagattcaccatctcaagagatgattcaaaaaccacggtctatctgcaaatgaatagcctgaaaaccgaggacacagccgtatattactgtacctcagacgtctacttgagaggctcctacttctacatggacgtctggggcaaagggaccgcggtcaccgtctcctca

SEQ ID NO: 13558 - DNA, 307 bp, Homo sapiens
  source 1..307: mol_type = other DNA
tacagtctctggattaaacttcgatgacgcctggctgagctgggtccgccaggctccagggaaggggctggagtgggttgcccagattaaaagcaaatcttatcgtgggaaaccagactacgctgcccccgtgagaggcagattcaccatctcaagagatgattcaaaaaccacggtgtatctgcaaatgaatagcctgaaaaccgaggacacagccgtatattactgtacctcagacgtctatttgagaggctcctacttctacatggacgtctggggcaaagggaccgcggtcaccgtctcctca

SEQ ID NO: 13559 - DNA, 301 bp, Homo sapiens
  source 1..301: mol_type = other DNA
tgcagcctctgggttcgccttcagtggctctgttatgcactgggtccgccaggcttccgggaaagggctggaatgggttggccaaattaccatcaaggctggcaattacgcgacatcatatggtgcgtcgcagaaaggcaggttcaccatctccagagatgattcaaagaacacggcatatctgcaaatgaacagcctgaaaaccgaggacacggccgtgtattactgtactagatccgacccggcttactataatgcggggagtatttggggccagggaacccgggtcaccgtctcctca

SEQ ID NO: 13560 - DNA, 300 bp, Homo sapiens
  source 1..300: mol_type = other DNA
gcagcctctgggttcgccttcagtggctctgttatgcactgggtccgccaggcttccgggaaagggctggaatgggttggccaaattaccatcaaggctggcaattacgcgacatcatatggtgcgtcgcagaaaggcaggttcaccatctccagagatgattcaaagaacacggcatatctgcaaatgaacagcctgaaaaccgaggacacggccgtgtattactgtactagatccgacccggcttactataatgcggggagtatttggggccagggaacccgggtcaccgtctcctca

SEQ ID NO: 13561 - DNA, 301 bp, Homo sapiens
  source 1..301: mol_type = other DNA
tgcagcctctgggttcgccttcagtggctctgttatgcactgggtccgccaggcttccgggaaagggctggaatgggttggccaaattaccatcaaggctcacaattacgcgacatcatatggtgcgtcgcagaaaggcaggttcaccatctccagagatgattcaaagaacacggcatatctgcaaatgaacagcctgaaaaccgaggacacggccgtgtattactgtactagatccgacccggcttactataatgcggggagtatttggggccagggaacccgggtcaccgtctcctca

SEQ ID NO: 13562 - DNA, 301 bp, Homo sapiens
  source 1..301: mol_type = other DNA
tgcagcctctgggttcgccttcagtggctctgttatgcaccgggtccgccaggcttccgggaaagggctggaatgggttggccaaattaccatcaaggctcacaattacgcgacatcatatggtgcgtcgcagaaaggcaggttcaccatctccagagatgattcaaagaacacggcatatctgcaaatgaacagcctgaaaaccgaggacacggccgtgtattactgtactagatccgacccggcttactataatgcggggagtatttggggccagggaacccgggtcaccgtctcctca

SEQ ID NO: 13563 - DNA, 307 bp, Homo sapiens
  source 1..307: mol_type = other DNA
tgaagcctctggattcacctttaaaacctattggatgagttgggtccgccaggctccagggagggggctggagtgggtggccaacataaaacaagatggaagtgaaaagaactatgtggactctgtgaagggccgattcaccatctccagagacaacgccaagaactcactgtatctgcaagtgaacagcctgagagccgaggacacggctgtttattactgtgcgcgagatcagagcggaggctatttctggaaccacggctactttgactactggggccggggaaccctggtcactgtgtcctca

SEQ ID NO: 13564 - DNA, 307 bp, Homo sapiens
  source 1..307: mol_type = other DNA
tgaagcctctggattcacctttaaaacctattggatgagttgggtccgccaggctccagggagggggctggagtgggtggccaacataaaacaagatggaagtgaaaagaactatgtggactctgtgaagggccgattcaccatctccagagacaacgccaagaactcactgtatctgcaagtgaacagcctgagagccgaggacacggctgtttattactgtgcgcgagatcagagcggaggctatttctggaaccacggctactttgactactggggccggggaactctggtcactgtgtcctca

SEQ ID NO: 13565 - DNA, 307 bp, Homo sapiens
  source 1..307: mol_type = other DNA
tgaagcctctggattcacctttaaaacgtattggatgagttgggtccgccaggctccagggagggggctggagtgggtggccaacataaaacaagatggaagtgaaaagaactatgtggactctgtgaagggccgattcaccatctccagagacaacgccaagaactcactgtatctgcaagtgaacagcctgagagccgaggacacggctgtatattactgtgcgcgagatcagagcggaggctatttctggaaccacggctactttgactactggggccggggaaccctggtcactgtgtcctca

SEQ ID NO: 13566 - DNA, 301 bp, Homo sapiens
  source 1..301: mol_type = other DNA
tgcagtctctggagtcaccatcagtagctatggcatgcactgggtccggcaggctccaggcaaggggctggagtgggtggcagttatatcaaatgatggaagtaataaatattatgcagactctgtgaagggccgattcaccatctccagagacaatcccaagaacacgctgtacttgcaaatgaacggcctgagaactgaagacacggctgtgtattattgtgcgaaggatcgatattgtggtcgtgacaggtgtccggtagactactggggccagggaaccctggtcaccgtctcctca

SEQ ID NO: 13567 - DNA, 301 bp, Homo sapiens
  source 1..301: mol_type = other DNA
tgcagtctctggagtcaccatcagtagctatggcatgcactgggtccggcaggctccaggcaaggggctggagtgggtggcagttatatcaaatgatggaagtaataaatattatgcagactctgtgaagggccgattcaccatctccagagacaatcccaagaacacgctctacttgcaaatgaacggcctgagaactgaagacacggctgtgtattattgtgcgaaggatcgatattgtggtcgtgacaggtgtcccgtagactattggggccagggaaccctggtcaccgtctcctca

SEQ ID NO: 13568 - DNA, 301 bp, Homo sapiens
  source 1..301: mol_type = other DNA
tgcagtctctggagtcaccatcagtagctatggcatgcactgggtccggcaggctccaggcaaggggctggagtgggtggcagttatatcaaatgatggaagtaataaatattatgcagactctgtgaagggccgattcaccatctccagagacaatcccaagaacacgctgtacttgcaaatgaacggcctgagaactgaagacacggctgtgtattattgtgcgaaggatcgatattgtggtcgtgacaggtgtccggtagattactggggccagggaaccctggtcaccgtctcctca

SEQ ID NO: 13569 - DNA, 301 bp, Homo sapiens; identical to SEQ ID NO: 13566
  source 1..301: mol_type = other DNA

SEQ ID NO: 13570 - DNA, 301 bp, Homo sapiens
  source 1..301: mol_type = other DNA
tgcagtctctggagtcaccatcagtagctatggcatgcactgggtccggcaggctccaggcaaggggctggagtgggtggcacttatatcaaatgatggaagtaataaatattatgcagactctgtgaagggccgattcaccatctccagagacaatcccaagaacacgctatacttgcaaatgaacggcctgagaactgaagacacggctgtgtattattgtgcgaaggatcgatattgtggtcgtgacaggtgtcccgtagactactggggccagggaaccctggtcaccgtctcctca

SEQ ID NO: 13571 - DNA, 301 bp, Homo sapiens
  source 1..301: mol_type = other DNA
tgcagtctctggactcaccatcagtagctatggcatgcactgggtccggcaggctccaggcaaggggctggagtgggtggcacttatatcaaatgatggaagtaataaatattatgcagactctgtgaagggccgattcaccatctccagagacaatcccaagaacacgctgtacttgcaaatgaacggcctgagaactgaagacacggctgtgtatttttgtgcgaaggatcgatattgtggtcgtgacaggtgtccggtagactactggggccagggaaccctggtcaccgtctcctca

SEQ ID NO: 13572 - DNA, 288 bp, Homo sapiens
  source 1..288: mol_type = other DNA
gcatctggatacaccttcaccaacaacgatatccactgggtgcgacaggcccctggacaagggcttgagtggatggcgaaaatcagccctagtaatggtgacacagactacgcacagaagttccagggcagagtcaccgtgactagggacacgtccacgagcacagtttatttggagctgcgcagcctgacatctgaggacacggccatatattactgtgggagagacttagtagggggctggagccttgactactggggccagggaaccctggtcaccgtctcctca

SEQ ID NO: 13573 - DNA, 288 bp, Homo sapiens
  source 1..288: mol_type = other DNA
gcatctggatacaccttcaccaacaacgatatccactgggtgcgacaggcccctggacaagggcttgagtggatggcgaaaatcagccctagtaatggtgacacagactacgcacagaagttccagggcagagtcaccgtgactagggacacgtccacgagcacagtttatttggagttgcgcagcctgacatctgaggacacggccatatattactgtgggagagacttagtagggggctggagccttgactactggggccagggaaccctggtcaccgtctcctca

SEQ ID NO: 13574 - DNA, 288 bp, Homo sapiens
  source 1..288: mol_type = other DNA
gcatctggatacaccttcaccaacaacgatatccactgggtgcgacaggcccctggacaagggcttgagtggatggcgaaaatcagccccagtaatggtgacacagactacgcacagaagttccagggcagagtcaccgtgactagggacacgtccacgagcacagtttatttggagttgcgcagcctgacatctgaggacacggccatatattactgtgggagagacttagtagggggctggagccttgactactggggccagggaaccctggtcaccgtctcctca

SEQ ID NO: 13575 - DNA, 298 bp, Homo sapiens
  source 1..298: mol_type = other DNA
cactgtctctggtggctccatcagcagtggtgattactactggagttggatccgccagcccccagggaagggcctggagtggattggatacatctataacagtgggagcacctactacaacccgtccctcaggagtcgaattaccatatcagtagacacgtccaagaatcagttctccctgaaggtgaactctgtgactgccgcagacacggccgtgtattactgtgccagggggggctggggaaggttgggatactttgactactggggccagggagccctggtcaccgtctcctct

SEQ ID NO: 13576 - DNA, 298 bp, Homo sapiens; identical to SEQ ID NO: 13575
  source 1..298: mol_type = other DNA

SEQ ID NO: 13577 - DNA, 298 bp, Homo sapiens
  source 1..298: mol_type = other DNA
cactgtctctggcggctccatcagcagtggtgattactactggagttggatccgccagcccccagggaagggcctggagtggattgggtacatctataacagtgggagcacctacgacaacccgtccctcaagagtcgagttaccatatcagtagacacgtccaagaaccacttctccctgaagctgagctctgtgactgccgcagacacggccgtgtattactgtgccagggggggctggggaaggttgggatactttgactactggggccagggaaccctggtcaccgtctcctca

SEQ ID NO: 13578 - DNA, 298 bp, Homo sapiens
  source 1..298: mol_type = other DNA
cactgtctctggtggctccatcagtagtggtgattactactggagttggatccgccagcccccagggaagggcctggagtggatcgggtacatctatcacagtgggagcacctactacaacccgtccctcaagagtcgaattgccatatcagtggacacgtccaagaaccagctctccctgaagctgagctctgtgactgccacagacacggccgtgtattactgtgccagggggggctggggaaggttgggatactttgactactggggcccgggaaccctggtcaccgtctcctca

SEQ ID NO: 13579 - DNA, 298 bp, Homo sapiens
  source 1..298: mol_type = other DNA
cactgtctctggcgactccatcattggtggtgattactactggagttggatccgccagcccccaggggagggcctggagtggattgggtacatctataacagtggaaccacctactacaacccgtccctcaagagtcgacttaccatatcactagacacgtccaagaaccagttctccctgaagctgagctctgtgactgccgcagacacggccgtgtattactgtgccagggggggctggggaaggttgggatactttgactactggggccagggatccctggtcaccgtctcctca

SEQ ID NO: 13580 - DNA, 298 bp, Homo sapiens
  source 1..298: mol_type = other DNA
cactgtctctggtgactccatcatcagtggtgattactactggagttggatccgccagaccccagggaagggcctggagtggattggttacatctataacagtgggaccacctactacaacccgtccctcaggagtcgacttaccatgtcaatagacacgtccaagaaccagttctccctgaagttgacctctgtgactgccgcagacacggccgtgtatttctgtgccagggggggctggggaaggttgggatactttgactactggggccagggaaccctggtctccgtctcctca

SEQ ID NO: 13581 - DNA, 298 bp, Homo sapiens; identical to SEQ ID NO: 13578
  source 1..298: mol_type = other DNA

SEQ ID NO: 13582 - DNA, 298 bp, Homo sapiens
  source 1..298: mol_type = other DNA
cactgtctctggtggctccatcagcagtggtgattactactggagttggatccgccagcccccagggaagggcctggagtggattggatatatctataacagtgggagcacctactacaacccgtccctcaggagtcgaattaccatatcagtagacacgtccaagaatcagttctccctgaaggtgaactctgtgactgccgcagacacggccgtgtattactgtgccagggggggctggggaaggttgggatactttgactactggggccagggagccctggtcaccgtctcctct

SEQ ID NO: 13583 - DNA, 298 bp, Homo sapiens
  source 1..298: mol_type = other DNA
cactgtctctggtggctccaccagcagtggtgattactactggagttggatccgccagcccccagggaagggcctggagtggattgggtacatctattacagtgggagcacctactacaacccgtccctcaagagtcgacttaccatatcagtagacacgtccaagaaccagttctccctgaagctgagctctgtgactgccgcagacacggccgtgtattactgtgccagggggggctggggaaggttgggatactttgactactggggccagggaaccctggtcaccgtctcctca

SEQ ID NO: 13584 - DNA, 298 bp, Homo sapiens
  source 1..298: mol_type = other DNA
cactgtctctggtggctccatcagtgatggtgatttctactggagttggatccgccagcccccaggggagggcctggagtggattgggtacatctataacagtgggagcacctactacaacccgtccctcaggagtcgacttaccatatcaatagacacgtccaagaaccagttctccctgaagctgagctctgtgattgccgcagacacggccgtgtattactgtgccaggggcggctgggggaggttgggatactttgactactggggccagggaaacctggtcaccgtctcctca

SEQ ID NO: 13585 - DNA, 298 bp, Homo sapiens
  source 1..298: mol_type = other DNA
cagtgtctctgatgactccatcactgatggtgattactactggagttggatccgccagcccccaggggagggcctggagtggattgggtacatctataacagtgggaccacctactacaacccgtccctcaagagtcgacttaccatatcactagacacgtccaagaaccacttctccctgaggctgagctctgtgactgccgcagacacggccgtctattactgtgccagggggggctggggaaggttgggatattttgactactggggccagggaaccctggtcaccgtctcctca

SEQ ID NO: 13586 - DNA, 298 bp, Homo sapiens
  source 1..298: mol_type = other DNA
cactgtctctggtggctccatcagtagtggtgattactactggagttggatccgccagcccccaggggagggcctggagtggattgggtacatctataacagtgggagcacctactacaacccgtccctcaagagtcgacttaccatatcagtagacacgtccaagaaccagttctccctgaagctgagctctgtgactgccgcagacacggccgtgtattactgtgccagggggggctggggaaggttgggatactttgactactggggccagggaaccctggtcaccgtctcctca

SEQ ID NO: 13587 - DNA, 298 bp, Homo sapiens; identical to SEQ ID NO: 13580
  source 1..298: mol_type = other DNA

SEQ ID NO: 13588 - DNA, 298 bp, Homo sapiens
  source 1..298: mol_type = other DNA
tgcgacctcgggattcaactttaatatttattggatgagctgggtccgccaggctccagggaaggggctggagtgggtggccaacataaaagaagatgggagtgacaagaattatgtggactctgtgaagggccgattcaccatctccagagacaacaccaagaattcagtgtatctgcaaatgagtaacctgagagccgaagacacggctgtgtattactgtgcgaaagtaggggaggcacaacaatggaggttctttcaccactggggccagggaatcctggtcaccgtctcctca

SEQ ID NO: 13589 - DNA, 298 bp, Homo sapiens
  source 1..298: mol_type = other DNA
ttcaacctcgggattcacctttaatatttactggatgagttgggtccgccaggctccagggaaggggctggagtgggtggccaacataaaagaagatggaagtgccaaaaattatgtggactttgtgaagggccgattcaccatctccagagacaacgccaagaattcagtgtatctgcaaatgaataacctgagagccgaagacacggctgtgtattactgtgcgaaagtaggggaggcacaacaatggaggttctttcaccactggggccagggaatcctggtcaccgtctcctca

SEQ ID NO: 13590 - DNA, 298 bp, Homo sapiens
  source 1..298: mol_type = other DNA
tgcaacctcgggattcaagtttaatatttactggatgagttgggtccgccaggctccagggaaggggctggagtgggtggccaacataaaagaagatggaagtgagaaaaattatgtggactttgtgaagggccgattcaccatctccagagacaacgccaagaattcagtgtatctgcaaatgaataacctgagagccgaagacacggctgtgtattactgtgcgaaagtaggggaggcacaacaatggaggttctttcaccactggggccagggaatcgtggtcaccgtctcctca

SEQ ID NO: 13591 - DNA, 298 bp, Homo sapiens
  source 1..298: mol_type = other DNA
tgcagcctcgggattcacctttaatatttactggatgagttgggtccgccaggctccagggaaggggctggagtgggtggccaacataaaagaagatggaagtgccaaaaattatgtggactttgtgaagggccgattcaccatctccagagacaacgtcaagaattcagtgtatctgcaaatgaataacctgagagccgaagacacggctgtgtattactgtgcgaaagtaggggaggcacaacaatggaggttctttcaccactggggccagggaatcctggtcaccgtctcctca

SEQ ID NO: 13592 - DNA, 298 bp, Homo sapiens
  source 1..298: mol_type = other DNA
tgcgacctcgggattcaactttaatatttattggatgagctgggtccgccaggccccagggaaggggctggagtgggtggccaacataaaagaagatgggagtgacaagaattatgtggactctgtgaagggccgattcaccatctccagagacaacaccaagaattcagtgtatctgcaaatgagtaacctgagagccgaagacacggctgtgtattactgtgcgaaagtaggggaggcacaacaatggaggttctttcaccactggggccagggaatcctggtcaccgtctcctca

SEQ ID NO: 13593 - DNA, 325 bp, Homo sapiens
  source 1..325: mol_type = other DNA
tgcagcctctggattcatctttagtgactattggatgaactgggtccgccaggctccagggaaggggctggagtgggtggccaccataaagccagatggaagtgagaaatactatgtggactctgtgaagggccgattcaccatctccagagacaacgccaagaactcactgtatgtgcaaatgaacagcctgagagccgaggacacggctgtttattactgtgcgagagtgtcgctctcccctgattgtggtggtagtagctgctcctcgcgttatcgctggttcgacccctggggccagggaaccctggtcaccgtctcctca

SEQ ID NO: 13594 - DNA, 324 bp, Homo sapiens
  source 1..324: mol_type = other DNA
tgcagcctctggattcatctttagtgactattggatgaactgggtccgccaggctccagggaaggggctggagtgggtggccaccataaagccagatggaagtgagaaatactatgtggactctgtgaagggccgattcaccatctccagagacaacgccaagaactcactgtatgtgcaaatgaacagcctgagagccgaggacacggctgtttattactgtgcgagagtgtcgctctcccctgattgtggtggtagtagctgctcctcgcgttatcgctggttcgacccctggggccagggaaccctgtcaccgtctcctca

SEQ ID NO: 13595 - DNA, 325 bp, Homo sapiens
  source 1..325: mol_type = other DNA
tgcagcctccggattcatctttagtgactattggatgaactgggtccgccaggctccagggaaggggctggagtgggtggccaccataaagccagatggaagtgagaagtactatgtggactctgtgaagggccgattcaccatctccagagacaacaccaagaattcactgtatgtgcaaatgaacagcctgagagccgacgacacggctatttattactgtgcgagagtgtcgctctcccctgattgtggtggtagtagctgctcctcgcgttatcgctggttcgaccccttgggccagggaaccctggtcaccgtctcctca

SEQ ID NO: 13596 - DNA, 295 bp, Homo sapiens
  source 1..295: mol_type = other DNA
tgcagcctctggattcaccttcgctgaatatagcatgaactgggtccgccaggctccagggaagggactggagtgggtttcattcattagtgatactactagaaatatattctacgcagattctgtgaggggccgattcaccatctccagagacaatgccaagagctcactgtatctgcaaatggacggcctgagagacgaggacacggctgtgtattactgtgcgagaagtttaccaatttttggagtggtgtttgagtactggggccagggaaccctggtcaccgtctcctca

SEQ ID NO: 13597 - DNA, 295 bp, Homo sapiens
  source 1..295: mol_type = other DNA
tgaagcctctggattcaccttcgctacatatagcatgaactgggtccgccaggctccagggaaggggctggagtgggtttcattcattagtgatactactagaaatatcttctacgcagactctgtgaggggccgattcaccatctccagagacaatgccaagaactcactgtatctgcaaatggacggcctgagagacgaggacacggctgtgtattactgtgcgagaagtctaccaatttttggagtggtgtttgagtactggggccagggagccctggtcaccgtggcctca

SEQ ID NO: 13598 - DNA, 295 bp, Homo sapiens
  source 1..295: mol_type = other DNA
tgcagcctctggattcaccttcgctgaatttagcatgaactgggtccgccagtctccagggaaggggctggagtgggtttcattcattagtgatactactagaaatataatgtactcagactctgtgaggggccgattcaccgtctccagagacaatgccaagagctcactgtatctgcaaatggacggcctgagagacgaggacacggctgtgtattactgtgcgagaagtttaccaatttttggagtggtgtttgagtactggggccagggaattttggtcaccgtctcctca

SEQ ID NO: 13599 - DNA, 295 bp, Homo sapiens
  source 1..295: mol_type = other DNA
tgcagcctctggattcaccttcgctagatatagcatgaactgggtccgccaggctccagggaaggggctggagtgggtttcattcattagtgatactactagaactatattgtacgcagactctgtgaggggccgattcaccatctccagagacaatgccaagagctcactgtatctgcaaatggacggcctgagagacgaggacacggctgtgtattactgtgcgagaagtttaccaatttttggagtggtgtttgagtactggggccagggaaccctggtcaccgtctcctca

SEQ ID NO: 13600 - DNA, 295 bp, Homo sapiens
  source 1..295: mol_type = other DNA
tacaacttctggattcacctttggtgattatggtatgaactggttccgccaggctccagggaaggggctggagtgggtaagtttcattagaagcaaacgtaatggtgggacaacagaatacgtcgcgtctgtgaaaggcagattcaccatcttaagagatgattccaaaagtatcgcctatctccaaatgaacagcctgaaattcgaggacacagccgtgtattactgttctagagagatgtgggaggccggctttgactactggggccagggagccctggtcaccgtctcctca

SEQ ID NO: 13601 - DNA, 295 bp, Homo sapiens
  source 1..295: mol_type = other DNA
tgcaacttctggattcacctttggtgattatggtatgaactggttccgccaggctccagggaaggggctggagtggttaagtttcattagaagcaaacgtaagggtgggacaacagagtacgtcccgtctgtgaaaggcagattcaccatcttaagagatgattccaaaagtatcgcctatctccaaatgaatagcctgaaattcgaggacacagccgtgtattattgttctagagagatgtgggaggccggctttgactactggggccagggagccctggtcaccgtctcctca

SEQ ID NO: 13602 - DNA, 295 bp, Homo sapiens; identical to SEQ ID NO: 13600
  source 1..295: mol_type = other DNA

SEQ ID NO: 13603 - DNA, 295 bp, Homo sapiens
  source 1..295: mol_type = other DNA
tataacttctggattcatgtttggtgattatggtatgaattggttccgccaggctccagggaaggggctggagtgggtaagtttcattagaaggaagagtcgtggtgagacaacagaatacgccccgtctgtgaaaggcagattcaccatctctagagatgattccaaaagtatcgcctatctccaaatgaacagcctgaaattcgaggacacagccgtgtattattgttctagagagatgtgggaggccggctttgactactggggccagggagccctggtcaccgtctcctca

SEQ ID NO: 13604 - DNA, 294 bp, Homo sapiens
  source 1..294: mol_type = other DNA
atatccggaaactcccttggtgattcaatgatgcactgggtgcgacaaagagctggaaagagtcctgagtggatcggtggtttcaatcctgtagatcgtgaaaggatctacgcacagatgtttcagggcagggtcaccttcaccgtggacgcgtctgcagacacaggccacatggagttgagaggcctgagacgtgacgactcggccatttattattgtgccacaggaccgatcgatttgtggactgcttactttcccttctggggccagggaactccggtcaccgtctcctca

SEQ ID NO: 13605 - DNA, 294 bp, Homo sapiens
  source 1..294: mol_type = other DNA
atatccggagactcccttggtgattcaatgatgcactgggtgcgacaaagagctggaaagagtcctgagtggatcggtggtttcaatcctgtagatcgtgaaaggatctacgcacagatgtttcagggcagggtcaccttcaccgtggacgcgtctgcagacacaggccacatggagttgagaggcctgagacgtgacgactcggccatttattattgtgccacaggaccgatcgatttgtggactgcttactttcccttctggggccagggaactccggtcaccgtctcctca

SEQ ID NO: 13606 - DNA, 294 bp, Homo sapiens
  source 1..294: mol_type = other DNA
atgtccggagactcccttggtgattcaatgatgcactgggtgcggcaaagacgtggaaagggtcttgagtggatcggtggctttaatcctgtagatcgtgaaaggatctacgcacagatgtttcagggcagggtcaccttcaccgtggacgcgtctgcagacacaggccacatggagttgagaggcctgagacgtgacgactcgggcatttattattgtgccacaggaccgatcgatctttggactgcttactttcccttctggggccagggaactctggtcaccgtctcctca

SEQ ID NO: 13607 - DNA, 294 bp, Homo sapiens
  source 1..294: mol_type = other DNA
atatccggaaactcccttggtgattcaatgatgcactgggtgcgacaaagacctggaaagagtcctgagtggatcggtggtttcaatcctgtagatcgtgaaaggatctacgcacagatgtttcagggcagggtcaccttcaccgtggacgcgtctgcagacacaggccacatggagttgagaggcctgagacgtgacgactcggccatttattattgtgccacgggaccgatcgatttgtggactgcttactttcccttctggggccagggaactccggtcaccgtctcctca

SEQ ID NO: 13608 - DNA, 307 bp, Homo sapiens
  source 1..307: mol_type = other DNA
cgctgtctctggtgactccgtcagcaatactggttaccactggggctggatccgccagcccccagggaagggactggagtggattgggagtatttattataatggggacacctattacaacccgtccctcaagagtcgagtcaccatatccattgactcgtccaagaaccagttctccctgaagctgagctctgtgaccgccacagacacggctctatattattgtgcgacacatcatttctggttccagcagaaacacaactggttcgacccctggggccagggagccctggtcaccgtctccaca

SEQ ID NO: 13609 - DNA, 307 bp, Homo sapiens
  source 1..307: mol_type = other DNA
cgctgtctctggtgactccgtcagcaatactggttaccactggggctggatccgccagcccccagggaagggactggagtggattgggagtatttattataatggggacacctattacaacccgcccctcaagagtcgagtcaccatatccattgactcgtccaagaaccagttctccctgaagctgagctctgtgaccgccacagacacggctctatattattgtgcgacacatcatttctggttccagcagaaacacaactggttcgacccctggggccagggagccctggtcaccgtctccaca

SEQ ID NO: 13610 - DNA, 307 bp, Homo sapiens
  source 1..307: mol_type = other DNA
cgctgtctctggtgactccgtcagcaatactggttaccactggggctggatccgccagcccccagggaagggactggagtggattgggagtatttattataatggggacacctattacaacccgtccctcaagagtcgagtcaccatatccattgactcgtccaagaatcagttctccctgaagctgagctctgtgaccgccacagacacggctctatattattgtgcgacacatcatttctggttccagcagaaacacaactggttcgacccctggggccagggagccctggtcaccgtctccaca

SEQ ID NO: 13611 - DNA, 310 bp, Homo sapiens
  source 1..310: mol_type = other DNA
tgcagcctctggattcacctttagcagctatgccatgagctgggtccgccaggctccagggaaggggctggagtgggtctcagctattagtggtagtggtggtagcacatacgacgcagactccctgaagggccggttcaccatctccagagacaattccaagaacacgctgtatctgcaaatgaacagcctgagagccgaggacacggccttatattactgtgcgaaagatcttagcaatattgtagtagtaccagccctaggggatcttgactactggggccagggaaccctggtcaccgtctcctca

SEQ ID NO: 13612 - DNA, 310 bp, Homo sapiens; identical to SEQ ID NO: 13611
  source 1..310: mol_type = other DNA

SEQ ID NO: 13613 - DNA, 310 bp, Homo sapiens
  source 1..310: mol_type = other DNA
tgcagcctctggattcacctttagcagctatgccatgagctgggtccgccaggctccagggaaggggctggagtgggtctcagctattagtggtagtggtggtagcacatacgacgcagactccctgaagggccggttcaccatctccagagacaattccaagaacacgctgtatctgcaaatgaacagcctgagagccgaggacacggacttatattactgtgcgaaagatcttagcaatattgtagtagtaccagccctaggggatcttgactactggggccagggaaccctggtcaccgtctcctca

SEQ ID NO: 13614 - DNA, 310 bp, Homo sapiens
  source 1..310: mol_type = other DNA
tgcagcctctggattcacctttagcagctatgccatgagctgggtccgccaggctccagggaaggggctggagtgggtctcagctattagtggtagtggtgatagcacatacgacgcagactccctgaagggccggttcaccatctccagagacaattccaagaacacgctgtatctgcaaatgaacagcctgagagccgaggacacggccttatattactgtgcgaaagatcttagcaatattgtagtagtaccagccctaggggatcttgactactggggccagggaaccctggtcaccgtctcctca

SEQ ID NO: 13615 - DNA, 310 bp, Homo sapiens
  source 1..310: mol_type = other DNA
tgcagcctctggattcacctttagcagttatgccatgagctgggtccgccaggctccagggaaggggctggagtgggtctcagctattagtggtagtggtggtagcacatacgacgcagacgccctgaagggccggttcaccatctccagagacaattccaagaacacgctgtatctccaaatgaacagcctgagagccgaggacacggccttatattactgtgcgaaagatcttagcaatattgtagtagtaccagccctaggggatcttgactactggggccagggaaccctggtcaccgtctcctca

SEQ ID NO: 13616 - DNA, 310 bp, Homo sapiens
  source 1..310: mol_type = other DNA
tgcagcctctggattcacctttagcagctatgccatgagctgggtccgccaggctccagggaaggggctggagtgggtctcagctattagtggtagtggtggtagtacatacgacgcagactccctgaagggccggttcaccatctccagagacaattccaagaacacgctgtatctgcaaatgaacagcctgagagccgaggacacggccttatattactgtgcgaaagatcttagcaatattgtagtagtaccagccctaggggatcttgactactggggccagggaaccctggtcaccgtctcctca

SEQ ID NO: 13617 - DNA, 295 bp, Homo sapiens
  source 1..295: mol_type = other DNA
taaggtctctggattcaccttcaacaactttgccatgatgtgggtccgccaggctccagggaaggggctggagtgggtctcaggaattagtagtagtggtgttggcacatattacgcagactccgtgaagggccggttcaccgtctccagagataactccaacgacacactgtttctgcgaatgagcaacctgagagtcgaggacacggccgtctattactgtgcgaaagatccccagtggctcgttcgagactttgatcactggggccagggaaccctagtcaccgtctcctca

SEQ ID NO: 13618 - DNA, 295 bp, Homo sapiens
  source 1..295: mol_type = other DNA
tgaagcctctggattcaccttcaacaagtttgccatgatgtgggtccgccaggctccagggaaggggctggagtgggtctcaggaattagtagtagtggtgttaacacatattacgcagactccgtgaagggccggttcaccgtctccagagataactccaacgacacgctgtctctgcgaatgaatagcctgagagtcgaggacacggccgtctattactgtgcgaaagatccccagtggctcgttcgagactttgaccactggggccagggaaccctggtcaccgtctcctca

SEQ ID NO: 13619 - DNA, 295 bp, Homo sapiens
  source 1..295: mol_type = other DNA
taaggtctctggattcaccttcaacaactttgccatgatgtgggtccgccaggctccaggtaaggggctggagtgggtctcaggaattagtagtagtggtgttgccacatattacgcagactccgtgaagggccggttcaccgtctccagagataactccaacgacacactgtttctgcgaatgagcaacctgagagtcgaggacacggccgtctattactgtgcgaaggatccccagtggctcgttcgagactttgatcactggggccagggaaccctagtcaccgtctcctca

SEQ ID NO: 13620 - DNA, 295 bp, Homo sapiens
  source 1..295: mol_type = other DNA
tgaagcctctggattcaccttcaacagattcgccatgatgtgggtccgccaggctcctgggaaggggctggagtgggtcgcgggcattagtagtagtggtgtcaacacatattacgccgactccgtgaagggccgcttcaccgtctccagagacaactccaaagacacgctgtatctgcgaatggatagcctgagggtcgaggacacggccgtctattattgtgcgaaagatccccagtggctcgtgcgagactttgaccactggggccagggaaccccggtcaccgtctcctca

SEQ ID NO: 13621 - DNA, 295 bp, Homo sapiens
  source 1..295: mol_type = other DNA
tgaagcctctgggttcaatttccgcaactatggcatgcactgggtccgccagtctccaggccaggggctggagtgggtggcacttatatcagtggatggaaagaaaaaatggtatggagactccgtgaagggccgattcaccatctccagagacaattccaagaatacactctatctgcaaatgaacagcctgacacctgaggacacggctacatactattgttcgaaacgaggtgccagtggcggtcactattttgacgcttggggccaaggagaccttgtcaccgtctcctca

SEQ ID NO: 13622 - DNA, 295 bp, Homo sapiens
  source 1..295: mol_type = other DNA
tgaagcctctgggttcaatttccgcaactatggcatgcactgggtccgccactctccaggccaggggctggagtgggtggctctcataggagtggatggaaagaagaaatggtatggagactccgtgaagggccgattcaccatctccagagacaattccaagaatacagtctatctgcaaatgaacagcctgacacctgaggacacggctacatactattgttcgaaacgaggtgccagtggcggtcactattttgacgcttggggccaaggagaccttgtcaccgtctcctca

SEQ ID NO: 13623 - DNA, 295 bp, Homo sapiens
  source 1..295: mol_type = other DNA
cactgtctccggtggctccatgaagaattacttctggagctgggtccggcagaccccgggaaagggactggagtggattggatatgtctcttttagtgggagcactagttacaatccctccctcaggggtcgagtcaccatgtcagctgacacgtccaagaaccagttctccctgagcctgacttctgtgactgctgcagacacgggcctgtatttgtgttcgaggaaccccccggatgtaggattgggctacatggacgcctggggcaaggggaccacggtcaccgtctcctca

SEQ ID NO: 13624 - DNA, 295 bp, Homo sapiens
  source 1..295: mol_type = other DNA
cactgtctccggtgactccatgaagaattacttctggagctgggtccggcagaccccgggaaagggactggagtggattggatatgtctcttttagtgggagcactagttacaatccctccctcaggggtcgagtcaccatgtcagctgacacgtccaagaaccagttctccctgagcctgacttctgtgactgctgcagacacgggcctgtatttgtgttcgaggaaccccccggatgtaggattgggctacatggacgcctggggcaaggggaccacggtcaccatctcctca

SEQ ID NO: 13625 - DNA, 295 bp, Homo sapiens
  source 1..295: mol_type = other DNA
cactgtctccggtggctccatgaagaattacttctggagctgggtccggcagaccccgggaaagggactggagtggattggatatgtctcctttagtgggagcactagttacaatccctccctcaggggtcgagtcaccatgtcagctgacacgtccaagaaccagttctccctgagcctgacttctgttactgcttcagacacgggcctgtatttgtgttcgaggaaccccccggatgtaggattgggctacatggacgcctggggcaaggggaccacggtcaccgtctcctca

SEQ ID NO: 13626 - DNA, 295 bp, Homo sapiens
  source 1..295: mol_type = other DNA
cactgtctccggtggctccatgaaaaattacttctggagctgggtccggcagaccccgggaaagggactggagtggattggatatgtctcttttagtgggagcactagttacaacccctccttcaggggtcgagtcaccatgtcacctgacacgtccaagaaccagttctccctgagcctgacttctgtgactgctgcagacgcgggcctgtatttgtgttcgaggaaccccccggatgtaggattgggctacatggacgcctggggcaaggggaccacggtcaccgtctcctcg

SEQ ID NO: 13627 - DNA, 295 bp, Homo sapiens
  source 1..295: mol_type = other DNA
cactgtctccggtggctccatgaagagttacttctggagctgggtccggcagaccccgggaaagggactggagtggattggatatgtctcttttagtgggagcactagttacaatccctccctcaggggtcgagtcaccatgtcagctgacacgtccaagaaccagttctccctgagcctgacttctgtgactgctgcggacacgggcctgtatttgtgttcgaggaatcccccggatgtaggattgggctacatggacgcctggggcaaggggaccacggtcaccgtctcctca

SEQ ID NO: 13628 - DNA, 310 bp, Homo sapiens
  source 1..310: mol_type = other DNA
tgcgatctctggattcaacttcaatgattttggcatgcattgggtccggaaagttccagggaagggcctgcagtgggtctctggtatcacttggaacagtggaaatgaagcttatgcggcgtctgtgaagggccgattcatcgtctccagggacaacgccaagaactccctatttctgcaaatgaatagtctgagacctgaggacacggccttgtattactgtgtgaagccttcccggggttcgggcttcgatgatcggctcggttcatttcatgtgtggggccacgggacaatggtcaccgtctcttca

SEQ ID NO: 13629 - DNA, 310 bp, Homo sapiens
  source 1..310: mol_type = other DNA
tgcgatctctggattcaagttcggtgattttggcatgcattgggtccggaaagttccagggaagggcctgcagtgggtctctggtatcagttggaacagtggaaataaaggttatgcggagtctgtgaagggccgattcatcgtctccagagacaacgccaagaactccctatttttgcaaatgaacagtctgagacctgaggacacggccttgtattactgtgtgaagccttcccggggttcgggcttcgatgatcggctcggttcatttcatgtgtggggccacgggacaatggtcaccgtctcttca

SEQ ID NO: 13630 - DNA, 310 bp, Homo sapiens
  source 1..310: mol_type = other DNA
tgcgatctctggattcaagttcgatgattttggcatgcattgggtccggaaagttccagggaagggcctgcagtgggtctctggtatcacttggaacagtggaaataaaggttatgcggagtctgtgaagggccgattcatcgtctccagagacaacgccaagaactccctatttctgcaaatgaacagtctgagacctgaggacacggccttgtattactgtgtgaagccttcccggggttcgggcttcgatgatcggctcggttcatttcatgtgtggggccacgggacaatggtcaccgtctcctca

SEQ ID NO: 13631 - DNA, 310 bp, Homo sapiens
  source 1..310: mol_type = other DNA
tgcgatctctggattcaagctcggtgattttggcatgcattgggtccggaaagttccagggaagggcctgcagtgggtctccggtatcacctggaacagtgcaaataaaggttatgcggcgtctgtgaagggccgattcaccgtctccagggacaacgccaagaactccctatttctgcaaatgaacagtctgagacctgaggacacggccttgtattactgtgtgaagccttcccggggttcgggcttcgatgatcggctcggttcatttcatgtgtggggccacgggacaatggtcaccgtctcttca

SEQ ID NO: 13632 - DNA, 310 bp, Homo sapiens
  source 1..310: mol_type = other DNA
tgcgatctctggattcaacttcgatgactttgccatgcattgggtccggaaagttccagggaagggcctgcagtgggtctctggtatcacttggaacagtgcaaataaaggttatgcggcgtctgtgaagggccgattcatcgtctccagggacaacgccaagaactccctatttttgcaaatgaacagtctgagacctgaggacacggccttgtattactgtgtgaagccttcccggggttcgggcttcgatgatcggctcggttcatttcatgtgtggggccacgggacactggtcaccgtctcttca

SEQ ID NO: 13633 - DNA, 310 bp, Homo sapiens
  source 1..310: mol_type = other DNA
tgcgatctctggattcaacctcggtgattttggcatgcattgggtccggaaagttccagggaagggcctgcagtgggtctctggtatcaattggaacagtggaagtagaggttatgcggcgtctgtgaagggccggttcatcgtctccagggacaacgccaagaactcgctatttctgcaaatgaacagtctgagacctgaggacacggccttatattactgtgtgaaaccttcccggggttcgggcttcgatgatcggctcggttcatttcatgtgtggggccacgggacaatggtcaccgtctcttca

SEQ ID NO: 13634 - DNA, 310 bp, Homo sapiens
  source 1..310: mol_type = other DNA
tgcgatctctggattcaacttcgatgattttgccatgcattgggtccggaaagttccagggaagggcctgcagtgggtctctggtatcacttggaacagtggaaaaaaaggttatgcggagtctgtgaagggccgattcatcgtctccagagacaacgccaagaactccctatttctgcaaatgaacagtctgagacctgaggacacggccttgtattactgtgtgaagccttcccggggttcgggcttcgatgatcggctcggttcatttcatgtgtggggccacgggacaatggtcaccgtctcttca

SEQ ID NO: 13635 - DNA, 274 bp, Homo sapiens
  source 1..274: mol_type = other DNA
tgaagcctctggattcacttttgatgattattccatgcactgggtccgtcaagttccggggaagggtctggagtgggtctctcatattagttgggatggcagtagcctaacttatgcagactctgtgaagggccgattcaccgtctccagagacaacagcaaaaactccctttttctgcaaatggatggtctgacaactgaggacaccgccttctactactgtgcaaagggaattaccaactggggccagggaaccctggtcaccgtctcctca

SEQ ID NO: 13636 - DNA, 274 bp, Homo sapiens
  source 1..274: mol_type = other DNA
tgaagcctctggattcacttttgatgattattccatgcactgggtccgtcaagttccggggaagggtctggagtgggtctctcatattagttgggatggcagtagcataacttatgcagactctgtgaagggccgattcaccgtctccagagacaacagcaaaaactccctttttctgcaaatggatggtctgacaactgaggacaccgccttctactactgtgcaaagggaattaccaactggggccagggaaccctggtcaccgtctcctca

SEQ ID NO: 13637 - DNA, 300 bp, Homo sapiens
  source 1..300: mol_type = other DNA
atttctggagacaccgacaccaatgacgatataaattgggtgcgccaggcctctgcccaagggcttgagtgggtgggatacatgaatccgacgactggtaagacaggctatgcacagaaattccagggcagagtcaccatgaccagggacgcccccagcagaacagtctacatggaactgacggacctcacatctgaagacacggccgtctatttctgtgcgaggggaggatatcttggcagcttctacatcaggcccccgcttctctggggccaagggacaaaggtcaccgtctcttca

SEQ ID NO: 13638 - DNA, 300 bp, Homo sapiens
  source 1..300: mol_type = other DNA
atttctggagacaccgtcaccaatgacgatataaattgggtgcgccaggcctctgcccaagggcttgagtgggtgggatacatgaaccctacgactggtaagacaggctatgcacagaaattccagggcagagtcaccatgaccagggacgcccccagcagaacagtctacatggaagtgacggacctcacatctgaagacacggccgtctatttctgtgcgaggggaggatatcttggcagcttctacatcaggcccccgcttctctggggccaagggacaaaggtcaccgtctcttca

SEQ ID NO: 13639 - DNA, 298 bp, Homo sapiens
  source 1..298: mol_type = other DNA
tgcagtctctggattcaccttcagtagctatggcatgcactgggtccgccaggctccaggcaaggggctgaagtgggtggcatttatatcatttgatggaagtaataaatactatgcagactccgtgaagggccgattcaccatctccagagacaattccaagaacacgctgtatctgcaaatgaacagcctgagaactgaggacacggctgtgtataactgtgcgaggtcggcagcagccggtggacagtactactttgactactggggccagggaaccctggtcaccgtctcctca

SEQ ID NO: 13640 - DNA, 298 bp, Homo sapiens
  source 1..298: mol_type = other DNA
tgcagcctctggattcaccttcagtagccatggcatgcactgggtccgccaggctccaggcaaggggctggagtgggtgacatttgtatcatttgatggaagtgatagatactatgcagacttcgtcaagggccgattcaccatctccagagacaattccaagaacacgctgtatctgcaattgaacagcctgagacctgatgacacggctgtgtattactgtgcgaggtcggcagcagccggtggacaatactactttgactactggggccagggaaccctggtcaccgtctcctca

SEQ ID NO: 13641 - DNA, 298 bp, Homo sapiens
  source 1..298: mol_type = other DNA
tgcagcctctggattcaccttcagtagctatggcatgcactgggtccgccaggctccaggcaaggggctggagtgggtgacatttatatcatttgatggaaataatagatactatgcagacttcgtgaagggccgattcaccatctccagagacaattccaagaacacgctgtatctgcaattgaacagcctgagagctgaggacacggctgtgtattactgtgcgaggtcggcagcagccggtggacaatactactttgactactggggccagggaaccctggtcaccgtctcctca

SEQ ID NO: 13642 - DNA, 298 bp, Homo sapiens
  source 1..298: mol_type = other DNA
tgcagtctctggattcaccttcagtagctatgggatgcactgggtccgccaggctccaggcaaggggctggagtgggtgacatttatatcatttgatggaagtgatagatactatgcagacttcgtcaagggccgattcaccatctccagagacaattccaagaacacgctgtatctgcaattgaacagcctgagagctgaggacacggctgtgtattactgtgcgaggtcggcagcagccggtggacaatactactttgactactggggccagggaaccctggtcaccgtctcctca

SEQ ID NO: 13643 - DNA, 298 bp, Homo sapiens
  source 1..298: mol_type = other DNA
cgcagcctctggattcaccttcagtagccatggcatgcactgggtccgccaggctccaggcaaggggctggagtgggtgacatttatatcatttgatggaggtgatagatactatgcagacttcgtcaagggccgattcaccatctccagagacaattccaagaccacattgtatctgcaattgaacagcctgagacctgaagacacggctgtgtactactgtgcgaggtcggcagcagccggtggacaatactactttgactactggggccagggaaccctggtcaccgtctcctcg

SEQ ID NO: 13644 - DNA, 289 bp, Homo sapiens
  source 1..289: mol_type = other DNA
cactgtctctggtgcctccgtcactaatgcctattggcactggatccggcagcccccagggaagggactggaatggattggtcgcatcgattacactgggaccaccttctacaattactccctcaagagtcgagtcaccctatcagtaaagacgtccaagaaccaattctccctgagactgaactctgtgaccgctgcggacacggccgtatattactgtgcgagagcccttacggcgaccccctactttgacaattggggccagggaaccctggtcaccgtctcctca

SEQ ID NO: 13645 - DNA, 289 bp, Homo sapiens
  source 1..289: mol_type = other DNA
cactgtctctggtgcctccatcagaaattatttctggagttggatccgccagcccccagggaagggactggaatggattggtcatatctataacactgggaccaccttctacaacccctccctcaagagtcgagtcaccctatcagtaaagacgtccaagaaccaattctccctgaggctgaactctgtgaccgctgcggacacggccgtgtattactgtgcgagagcccttacggcgaccccctactttgacaattggggccagggaaccctggtcaccgtctcctca

SEQ ID NO: 13646 - DNA, 295 bp, Homo sapiens
  source 1..295: mol_type = other DNA
cactgtctccggcgagtccatcaccagtcctccttacttctggagctggatccgccaccacccagggaagggcctggagtggattgggtacatctctcacagtggaagcacccactacaacccgtccctcaggactcgtgcgaccctatccttagacacgtctaagaaccagttctccctcaggctgacctctgtgactgccgcggacacggccgtctatcactgtgcgagagaacggcatttgggggagctcagggacgtctggggcaaagggacaacggtcaccgtctcctca

SEQ ID NO: 13647 - DNA, 295 bp, Homo sapiens
  source 1..295: mol_type = other DNA
cactgtctctggcgagtccatcaccagtcctccttactattggagctggatccgccaccacccagggaagggcctggagtggattgggtacatctctcacagtggaagtacccactacaacccgtccctcaggactcgagcgaccctatcgttagacacgtctaagaaccagttctccctgaggctgacctctgtgactgccgcggacacggccgtctatcactgtgcgagagaacggcatttgggggagctcagggacgtctggggcgaagggaccacggtcaccgtctcctca

SEQ ID NO: 13648 - DNA, 295 bp, Homo sapiens; identical to SEQ ID NO: 13646
  source 1..295: mol_type = other DNA

SEQ ID NO: 13649 - DNA, 295 bp, Homo sapiens
  source 1..295: mol_type = other DNA
cactgtctctggtgaatccatcaccaatcctccttactactggagctggatccgccagcacccagggaaggacctggagtggattggctacatctctcacagtggagacccccactacaacccgtccctcaggactcgagttaccctttcattagacacgtctaagaaccagttctccctgaggctgacctctgtgactgccgcggacacggccgtctattactgtgcgagagaacgccatttgggggagctcagggacgtctggggcaaagggaccacggtcaccgtctcctca

SEQ ID NO: 13650 - DNA, 295 bp, Homo sapiens
  source 1..295: mol_type = other DNA
cactgtctccgacgagtccatcaccagtcctccttacttctggagctggatccgccaccacccagggaagggcctggagtggattgggtacatctctcacagtggaagcacccactacaacccgtccctcaggactcgtgcgaccctatccttagacacgtctaagaaccagttctccctcaggctgacctctgtgactgccgcggacacggccgtctatcactgtgcgagagaacggcatttgggggagctcagggacgtctggggcaaagggacaacggtcaccgtctcctca

SEQ ID NO: 13651 - DNA, 295 bp, Homo sapiens
  source 1..295: mol_type = other DNA
cactgtctccggcgagtccgtcgccggtcctccttacttctggagctggatccgccaccacccagggaagggcctggagtggattgggtacatctctcacagtggagacacccgctacaacccgtccctcaggactcgagcgaccctatcgttagacacgtctaagaaccagttctccctcaggctgacctctgtgactgccgcggacacggccgtctatcactgtgcgagagaacggcatttgggggagctcagggacgtctggggcaaagggacaacggtcaccgtctcctca

SEQ ID NO: 13652 - DNA, 295 bp, Homo sapiens
  source 1..295: mol_type = other DNA
cactgtctccggcgagtccgtcaccagtcctccttacttctggagctggatccgccaccacccagggaagggcctggagtggattgggtacatctctgacagtggaagcacccgctacaacccgtccctcaggactcgagcgaccctatcgttagacacgtctaagaaccagttctccctcaggctgacctctgtgactgccgcggacacggccgtctatcactgtgcgagagaacggcatttgggggagctcagggacgtctggggcaaagggacaacggtcaccgtctcctca

SEQ ID NO: 13653 - DNA, 294 bp, Homo sapiens
  source 1..294: mol_type = other DNA
gcttctggaggcacttttagcagctatgaaatcacctggataagacaggcccctggacaagggcttgagtggatgggagtgatcatccctctctatggtccaccaacctacgcacagaagttccagggcagactcacgattaccgcggaatccacgaacacaatctacatggagctgagcagcctgagatctgaggacacggccgtttattactgtgcgagtggttactatgacactcgtggatattactctcaagactcctggggccggggaaccctggtcaccgtctcctca

SEQ ID NO: 13654 - DNA, 294 bp, Homo sapiens
  source 1..294: mol_type = other DNA
gcttccggaggcaccttcaacaactatgaaatcagctgggtaagacaggcccctggacaagggcttgagtggatgggatggatcacccctatctttggcccagcaaagtacgcacagaagttccagggaagactcacgattaccgcggaatccacgaccacaacctacatggagctgagcagcctgagctctgaggacacggccgtgtattactgtgcgagtggttactatgatactcgtggatattattctcaagactcctggggccagggaaccctggtcaccgtctcctca

SEQ ID NO: 13655 - DNA, 291 bp, Homo sapiens
  source 1..291: mol_type = other DNA
agatcctctggattcacctctacccttcactggttcgcctgggtgcgccgaatgcccggcaaaggcctggagtggatggggtccatctaccctggtacctcggagacgtactatgggccgtcatcccaaggccaggtcaccatgtcagtcgacaagtccatcagtatcgcctacttacagtggaatgtcttgaagccctcggacagcgccatgtatttctgtgcgatgacgaaaggactgactggagaaatagacctctggggccagggaaccctgctcaccgtctcctca

SEQ ID NO: 13656 - DNA, 291 bp, Homo sapiens
  source 1..291: mol_type = other DNA
agatcttctggattttcttctactattcactggttcgcctgggtgcgccgaatgcccggcaaaggcctggagtgggtggggtccatttaccctggtacctcggaaacctactataggccgtcatcccaaggccaggtcaccatgtccgtcgacaagtccatcaataccgcctacttgcggtggactttcttgaagccctcggacagcgccatgtatttctgtgccatgacaaaaggactgactggagaaattgacctctggggccagggaaccctgctcaccgtctcctca

SEQ ID NO: 13657 - DNA, 291 bp, Homo sapiens
  source 1..291: mol_type = other DNA
agatcttctggattcacctctaccattcactggttcgcctgggtgcgccgaatgcccggcaaaggcctggagtggatggggtccatctaccctggtacctcggaaacctactataggccgtcatcccaaggccaggtcaccatgtcagtcgacaagtccatcagtaccgcctacttgcagtggaatgtcttgaagccctcggacagcgccatgtatttctgtgcgatgacgaaaggactgactggagaaattgacctctggggccagggaaccctgctcaccgtctcctca

SEQ ID NO: 13658 - DNA, 291 bp, Homo sapiens
  source 1..291: mol_type = other DNA
agatcttctggattcacgtctaccattcactggttcgcctgggtgcgccgaatgcccggcaaaggcctggagtggatggggtccatttaccctggtacctcggaaacttattataggccgtcatcccaaggccaggtcaccatgtcagtcgacaagtccatcagtaccgcctacttgaagtggaatgtcttgaagccctcggacagcgccatgtatttctgtgcgatgacaaaaggactgactggagaaattgacctctggggccagggaaccctgctcaccgtctcctca

SEQ ID NO: 13659 - DNA, 291 bp, Homo sapiens
  source 1..291: mol_type = other DNA
agatcttctggattcacctctaccattcactggttcgcctgggtgcgccgaatgcccggcaaaggcctggagtggatggggtccatctaccctggtacctcggagacctactataggccgtcatcccaaggccaggtcaccatgtcagtcgacaagtccatcagtaccgcctacttgcagtggaatgtcttgaagccctcggacagcgccatgtatttctgtgcgatgacgaaaggactgactggagaaatagacctctggggccagggaaccctgctcaccgtctcctca

SEQ ID NO: 13660 - DNA, 295 bp, Homo sapiens
  source 1..295: mol_type = other DNA
cactgtctctggtggctccaccagcagtcgtagtttcttctggggctggatccgccagaccccaggaaaggggctggagtggattgggagtatttgttctgatgggcgcacctaccagaatccgtccctcaacagtcgagtctccatatccctggacacgtcaaaaaatcagttttccctgaggctgaactctgtgaccgccgcagacacggctgtctattactgtgcgagactcgtctgtggtgactgctattcagacaactggggccacggaaccctggtcaccgtctcctca

SEQ ID NO: 13661 - DNA, 295 bp, Homo sapiens
  source 1..295: mol_type = other DNA
cactgtctctggtggctccaccagcagtcgtagttacttctggggctggatccgccagcccccaggaaaggggctggagtggattgggagtatttgttctgatgggcgcacctaccagaatccgtccctcaacagtcgagtctccatatccgtggacacgtcaaacaatcagttttccctgaggctgagctctgtgaccgccgcagacacggctgtctattactgtgcgagactcgtctgtggtgactgctattcagacaactggggccacggaaccctggtcaccgtctcctca

SEQ ID NO: 13662 - DNA, 295 bp, Homo sapiens
  source 1..295: mol_type = other DNA
cactgtctctggtggctccaccagcagtcgtagttacttctggggctggatccgccagcccccaggaaaggggctggagtggattgggagtatttgttctgatgggcgcacctactacaatccgtccctcaacagtcgagtctccatatccgtggacacgtcaaacaaccagttctccctgaggctgagctctgtgaccgccgcagacacggctgtctattactgtgcgagactcgtctgtggtgactgctattcagacaactggggccacggaaccctggtcaccgtctcctca

SEQ ID NO: 13663 - DNA, 311 bp, Homo sapiens
  source 1..311: mol_type = other DNA
tcatctccggcgacagtgtctcgagcagtattgttacttggaactggatcaggcagtccccatcgagaggccttgagttggtgggaagggcatactataggtccaagtggtatattgattacggagcatctgtgaaaggtcgaataaccatcaccccggacacatccaagaaccagttgtccctgcagctgagttctgtgactcccgaggacacggctgtatattactgtacaaaatattgtagtactgccgtgtgctcgatgggggctttggatgtctggggccaagggacaatggtcaccgtctcttca

SEQ ID NO: 13664 - DNA, 311 bp, Homo sapiens
  source 1..311: mol_type = other DNA
tcatctccggggacagtgtctctactagtattgttacttggaactggatcaggcagtccccatcgagaggccttgagtgggtgggaagggcatactataggtccaagtggtatattgattacggagcatctgtgaaaggtcgaataaccatcaccccggacacatccaagaaccagttgtccctgcagctgaggtctgtgaatcccgaggacacggctgtatattactgtacaaaatactgtagtactgccgtgtgctcgatgggggctttggatgtctggggccaagggacaatggtcaccgtctcttca

SEQ ID NO: 13665 - DNA, 311 bp, Homo sapiens
  source 1..311: mol_type = other DNA
tcatctccggggacagtgtctctagcaatattgttacttggaactggatcaggcagtccccatcgagaggccttgagtgggtaggaagggcatactataggtccaagtggtatattgattacggagcatctgtgaaaggtcgaataaccatcaccccggacacatccaagaaccagttgtccctgcagctgagttctgtgactcccgaggacacggctgtatattactgtacaaaatattgtagtactgccgtgtgctcgatgggggctttggatgtctggggccaagggacaatggtcaccgtctcttca

SEQ ID NO: 13666 - DNA, 311 bp, Homo sapiens; identical to SEQ ID NO: 13665
  source 1..311: mol_type = other DNA

SEQ ID NO: 13667 - DNA, 311 bp, Homo sapiens
  source 1..311: mol_type = other DNA
tcatctccggggacagtgtctctagcagtattgttacttggaactggatcaggcagtccccatcgagaggccttgagtgggtgggaagggcatactataggtccaagtggtatattgattacggagcatctgtgaaaggtcgaataaccatcaccccggacacatccaagaaccagttgtccctgcagctgagttctgtgactcccgaggacacggctgtgtattactgtacaaaatattgtagtactgccgtgtgctcgatgggggctttggatgtctggggccaagggacaatggtcaccgtctcttca

SEQ ID NO: 13668 - DNA, 311 bp, Homo sapiens
  source 1..311: mol_type = other DNA
tcatctccggggacagtgtctctagcagtattgttacttggaactggatcaggcagtccccatcgagaggccttgagtgggtgggaagggcatactataggtccaagtggtatattgattacggagcatctgtgaaaggtcgaataaccatcaccccggacacatccaagagtcagttgtccctgcagctgagttctgtgactcccgaggacacggctgtgtattactgtacaaaatattgtagtactgccgtgtgctcgatgggggctttggatgtctggggccaagggacaatggtcaccgtctcttca

SEQ ID NO: 13669 - DNA, 311 bp, Homo sapiens
  source 1..311: mol_type = other DNA
tcatctccggggacagtgtctctagtagtattgttacttggaactggatcaggcagtccccatcgagaggccttgagtgggtgggaagggcatactataggtccaagtggtatattgattacggagcatctgtgaaaggtcgaataaccatcaccccggacacatccaagaaccagttgtccctgcagctgaggtctgtgagtcccgaggacacggctgtatattactgtacaaaatactgtagtactgccgtgtgctcgatgggggctttggatgtctggggccaagggacaatggtcaccgtctcttca

SEQ ID NO: 13670 - DNA, 311 bp, Homo sapiens; identical to SEQ ID NO: 13667
  source 1..311: mol_type = other DNA

SEQ ID NO: 13671 - DNA, 311 bp, Homo sapiens; identical to SEQ ID NO: 13667
  source 1..311: mol_type = other DNA

SEQ ID NO: 13672 - DNA, 280 bp, Homo sapiens
  source 1..280: mol_type = other DNA
tgtgccctctggaatcgccgtcattgacaatcacataacgtgggtccgccaggctccagggaagggtctggagtgggtctcagtccattataaaggcggatacatacactatgcagactccgtgaagggcagattcacaatctccagagacatttccaaaaacacggtctatcttcaaatgaacagtttgagcaccgaggacacggcaacatatttctgtgcgagagacctcggatggttcgacctctggggccacggaaccctggtcaccgtctcctca

SEQ ID NO: 13673 - DNA, 280 bp, Homo sapiens
  source 1..280: mol_type = other DNA
tgtgccctctggaatcgccgtcattgacaatcacataacctgggtccgccaggctccagggaagggtctggagtgggtctcagtccattataaaggcggatacatacactatgcagactccgtgaagggcagattcacaatctccagagacatttccaaaaacacggtctatcttcaaatgaacagtttgagcaccgaggacacggcaacatatttctgtgccagagacctcggatggttcgacctctggggccacggaaccctggtcaccgtctcctca

SEQ ID NO: 13674 - DNA, 289 bp, Homo sapiens
  source 1..289: mol_type = other DNA
tacaacttctggattcacctttggtgattatgctgtgatctgggtccgccaggctccagggaaggggctggagtgggtaggtttcattagaagcaaaacttatggtgggacaacagaatacgccgcgtctgtgaaaggcagattcaccatctcaagagatgattccaaaagcatcgcctatctgcaaatgaacagcctgaaaaccgaggacacagccgtatattactgtactagacagtaccagtttctagactactggggccagggaaccctggtcaccgtctcctca

SEQ ID NO: 13675 - DNA, 289 bp, Homo sapiens
  source 1..289: mol_type = other DNA
tgttacttctgggttcaactttggtgatttagctataatctgggtccgccaggctccagggaaggggctggagtgggtaggattcattagaagcaagacttatggtgccacaacagaatacgccgcgtctgtgcaaggcagattcaccatctcaagagatgattccaaaaggatcgcctatctgcaaatgaacagcctgaaaaccgaggacacagccatttattattgtaccagacagtaccagttcctagactactggggccggggaaccctggtcaccgtctcctca

SEQ ID NO: 13676 - DNA, 289 bp, Homo sapiens
  source 1..289: mol_type = other DNA
tacaacttctggattcacctttggtgattatgctgtgatctgggtccgccaggctccagggaaggggctggagtgggtaggtttcattagaagcaaaacttatggtgcgacaacagaatacgccgcgtctgtgaaaggcagattcaccatctcaagagatgattccaaaagcatcgcctatctgcaaatgaacagcctgaaaaccgaggacacagccgtatattactgtactagacagtaccagtttctagactactggggccagggaaccctggtcaccgtctcctca

SEQ ID NO: 13677 - DNA, 289 bp, Homo sapiens
  source 1..289: mol_type = other DNA
tacaacttctggattcacctttggtgattatgctgtgatctgggtccgccaggctccagggaaggggctggagtgggtaggtttcattagaagcaaaacttatggtgcgacaacagaatacgccgcgtctgtgaaaggcagattcaccatctcaagagatgattccaaaagcatcgcctatctgcaaatgaacagcctgaaaaccgaggacacagccgtatattactgtactagacaataccagtttctagactactggggccagggaaccctggtcaccgtctcctca

SEQ ID NO: 13678 - DNA, 289 bp, Homo sapiens
  source 1..289: mol_type = other DNA
cacaacttctggattcaactttggtgatcttgctgtgatctgggtccgccaggctccagggaaggggctggagtgggtaggtttcattagaagcaaaacctatggtgggacaacagaatacgccgcgtctgtgaaaggcagattcaccatctcaagagatgattccaaaagcatcgcctatctgcaaatgaacagcctgaaaaccgaggacacagccgtatattactgtactagacagtaccagtttctagactactggggccagggaaccctggtcaccgtctcctca

SEQ ID NO: 13679 - DNA, 292 bp, Homo sapiens
  source 1..292: mol_type = other DNA
tgaagcctctggatacagttttagaagttattggatgagctgggtccgccaggctccagggaaggggctagagtgggtggccaacatacagattggtggaactacgagattctatgtggactccgtgaagggccgattcagcgcctccagcgacaacggcaagaatacactgtatctgcagctggacagcctgagagccgaggacacggctgtgtattactgcgcgagacttgggggaaggtcaaacagatatgactactggggccagggaacccaggtcaccgtctcctca

SEQ ID NO: 13680 - DNA, 292 bp, Homo sapiens
  source 1..292: mol_type = other DNA
tgaagcctctggattcaactttggaaagtattggatgagctgggtccgccagtccccagggaaggggctggagtgggtggccaacatagaagttggtggaagtaagagattctatatggagtccgtgaagggccgattcaccgcctccagcgacaacgccaagaattcactgtatctgcagctggacagcctgagagccgaggacacggctgtgtactactgtgcgagacttgggggaaggtcaaacagatatgactactggggccagggaaccctggtcaccgtctcctca

SEQ ID NO: 13681 - DNA, 292 bp, Homo sapiens
  source 1..292: mol_type = other DNA
tgaagcctctggattcacctttggaaattattggatgagctgggtccgccagtctccagggaaggggctggagtgggtggccaacatagaggttgctggaagtaagagattctatatggactccgtgaagggccgattcaccgcctccagcgacaacgccaagaattcactgtttctgcagctggacagcctgagagccgaggacacggctgtgtactactgtgcgagacttgggggaaggtctaacagatatgactactggggccagggaaccctggtcaccgtctcctca

SEQ ID NO: 13682 - DNA, 292 bp, Homo sapiens
  source 1..292: mol_type = other DNA
tgaaacatctggattcacctttagtaatcattggatgagctgggtccgccagtctccaggtaaggggctggagtgggtggccaacataaactttgatggaagtaagaaattccatgtggactccgtgaagggccgattcaccgcctccagcgacaacgccaagagctcagtgtatctgcacctggacagcctgagagccgaggacacggctgtatactactgtgcgagacttgggggaaggtcaaacagatatgactactggggccagggaaccctggtcaccgtctcctca

SEQ ID NO: 13683 - DNA, 292 bp, Homo sapiens
  source 1..292: mol_type = other DNA
tgaagcctctggattcacctttagtgattactggatgagttgggtccgccactctccagggaaggggctggagtgggtggccaacataagccctcatggaagtcagaaagcctatgtggactccgtgaagggccgattcaccgcctccatcgacaacgccaggaattcactgtctctgcagctggacagcctgagagccgaagacacggctgtgtactactgtgcgagacttgggggaaggtcaaacagatatgactactggggccagggaatcctggtcaccgtctcctca

SEQ ID NO: 13684 - DNA, 292 bp, Homo sapiens; identical to SEQ ID NO: 13681
  source 1..292: mol_type = other DNA

SEQ ID NO: 13685 - DNA, 301 bp, Homo sapiens
  source 1..301: mol_type = other DNA
tgaaacctctggattcatctttactgaccggcacatggactgggtccgccagacttcagagaaggggctggagtgggttggccgttccagaaatgaggctcacagttacaccacagaatatgccgcgtctgtgaagggcagagtcagcatctacagagatatttcaagaaactcattgtatctgcaactgaacagcctgaaaaccgaggacacggccgtctattactgcgctagagtcgaaggagctactgggggaaatcatgactactggggccagggaaccctggtcaccgtgtcctca

SEQ ID NO: 13686 - DNA, 301 bp, Homo sapiens
  source 1..301: mol_type = other DNA
tgcgacctctggattcaccctcagtgaccgccacatggactgggtccgccaggcttcagggaaggggctggagtgggttggccgttccagaaacgaagctcacagtttcagcacagaatacgccgcgtctgtgagaggcagagtcaccatctcaagagatgattcaagaaactcactgtatctgcagctgaacagcctgaaaaccgaggacacggccgtctattattgcgctagagtcgaaggagctactgggggaaatcatgactactggggccagggaaccctggtcaccgtgtcctca

SEQ ID NO: 13687 - DNA, 301 bp, Homo sapiens
  source 1..301: mol_type = other DNA
tgcagcctctggattcaccctcagtgaccgccacatggactgggtccgccaggcttcagggaaggggctggagtgggttggccgttccagaaacaaagctaacagttacaccacagaatacgccgcgtctgtgaaaggcagagtcaccatctcaagagatgattcaagaaactcactgtatctgcaactgaacagcctgaagaccgaggacacggccgtctattactgcgctagagtcgaaggagctactgggggaaatcatgattactggggccagggaaccctggtcaccgtgtcctcg

SEQ ID NO: 13688 - DNA, 301 bp, Homo sapiens
  source 1..301: mol_type = other DNA
tgcgacctctggattcaccctcagtgaccgccacatggactgggtccgccaggcttcagggaaggggctggagtgggttggccgttccagaaacgaagctcacagtttcagcacagaatacgccgcgtctgtgagaggcagagtcaccatctcgagagatgattcaagaaactcactgtatctgcagctgaacagcctgaaaaccgaggacacggccgtctattactgcgctagagtcgaaggagctactgggggaaatcatgactactggggccagggaaccctggtcaccgtgtcctca

SEQ ID NO: 13689 - DNA, 301 bp, Homo sapiens
  source 1..301: mol_type = other DNA
tgcagtctctggattcaccctccgtgaccgccacatggactgggtccgccagccttcagggaaggggctggagtggattgcccgttccagaaatgaagctaatggttacaccacagaatacgccgcgtctgtgaaaggcagagtcaccatctcaagagataattcaagagactcattgtatctacaactgaacagcctgaagatcgaggacacggccgtctattactgcgctagagtcgaaggggctactgggggaaatcatgactattggggccagggaaccctggtcaccgtgtcctca

SEQ ID NO: 13690 - DNA, 301 bp, Homo sapiens
  source 1..301: mol_type = other DNA
tgcagcctctggattcaccctcagtgaccgccacatggactgggtccgccaggcttcagggaaggggctggagtgggttggccgttccagaaataaagctaacagttacaccacagaatacgccgcgtctgtgaaaggcagagtcaccatctcaagagatgattcaacaaactcattgtatctgcaactgaacagcctgaagaccgatgacacggccgtctattactgcgctagagtcgaaggagctactgggggaaatcatgactactggggccagggaaccctggtcaccgtgtcctcc

SEQ ID NO: 13691 - DNA, 301 bp, Homo sapiens
  source 1..301: mol_type = other DNA
tgcgacctctggattcaccctcagtgaccgccacatggactgggtccgccaggcttcagggaaggggctggagtgggttggccgttccagaaacgaagctcacagtttcaccacagaatacgccgcgtctgtgaaaggcagagtcaccatctcaagagatgattcaagaaactcactgtatctgcaactgaacagcctgaaaaccgaggacacggccgtctattactgcgctagagtcgaaggagctactgggggaaatcatgactactggggccagggaaccctggtcaccgtgtcctca

SEQ ID NO: 13692 - DNA, 301 bp, Homo sapiens
  source 1..301: mol_type = other DNA
tgcgacctctggattcaccctcagtgaccgccacatggactgggtccgccaggcttcagggaaggggctggagtgggttggccgttccagaaacgaagctcacagtttcaccacagaatacgccgcgtctttgaaaggcagagtcaccatctcaagagatgattcaagaaactcactgtatctgcaactgaacagcctgaaaaccgaggacacggccgtctattactgcgctagagtcgaaggagctactgggggaaatcatgactactggggccagggaaccctggtcaccgtgtcctca

SEQ ID NO: 13693 - DNA, 301 bp, Homo sapiens
  source 1..301: mol_type = other DNA
tgcgacctctggattcaccctcagtgaccgccacatggactgggtccgccaggcttcagggaaggggctggagtgggttggccgttccagaaacgaggctcacagtttcaccacagaatacgccgcgtccttgaaaggcagagtcaccatctcaagagatgattcaagaaactcactgtatctgcaactgaacagcctgaaaaccgaggacacggccgtctattactgcgctagagtcgagggagctactgggggaaatcatgactactggggccagggaaccctggtcaccgtgtcctca

SEQ ID NO: 13694 - DNA, 301 bp, Homo sapiens
  source 1..301: mol_type = other DNA
tgcgacctctggattcaccctcagtgaccgccacatggactgggtccgccaggcttcagggaaggggctggagtgggttggccgttccagaaacgaagctcacagtttcagcacagaatacgccgcgtctgtgagaggcagagtcaccatctcaagagatgattcaagaaactcactgtatctgcagctgaacagcctgaaaaccgaggacacggccgtctattactgcgctagagtcgaaggagctactgggggaaatcatgactactggggccagggaaccctggtcaccgtgtcctca

SEQ ID NO: 13695 - DNA, 301 bp, Homo sapiens
  source 1..301: mol_type = other DNA
tgcgacctctggattcaccctcagtgaccgccacatggactgggtccgccaggcttcagggaaggggctggagtgggttggccgttccagaaacgaagctcacagtttcagcacagagtacgccgcgtctgtgagaggcagagtcaccatctcaagagatgattcaagaaactcactgtatctgcagctgaacagcctgaaaaccgaggacacggccgtctattactgcgctagagtcgaaggagctactgggggaaatcatgactactggggccagggaaccctggtcaccgtgtcctca

SEQ ID NO: 13696 - DNA, 307 bp, Homo sapiens
  source 1..307: mol_type = other DNA
tgcagcctctgggttcaccgtcagtaggacctacatgagctgggtccgccaggctccagggaaggggctggagtggatctcagttatttatagggatggtgccacatactacgcagactccgtgaagggccgattcatcatctccagagacagttccaagaacacactctttcttcaaatgggcagcctgacagccgaggacacggccatatattattgtgtgagaggtggaggggcatattgtggcggtgactgtcttaggactcttgatatatggggccaagggacaatggtcaccgtctcttca

SEQ ID NO: 13697 - DNA, 307 bp, Homo sapiens
  source 1..307: mol_type = other DNA
tgcagcctctgggttcaccgtcagtaggacctacatgagctgggtccgccaggctccagggaaggggctggagtggatctcggttatttatagggatggtgccgcgtactacgcagactccgtgaagggccgattcatcatctccagagacagttccaagaacacactctttcttcaaatgggcagcctgacagtcgaggacacggccatatattattgtgtgagaggtggaggggcatattgtggcggtgactgtcttaggactcttgatatatggggccaagggacaatggtcaccgtctcttca

SEQ ID NO: 13698 - DNA, 307 bp, Homo sapiens
  source 1..307: mol_type = other DNA
tgcagcctctggcctcagcgtcagtaccacctacatgagctgggtccgccaggctccagggaaggggctggagtgggtttcagttatgtatagggatagtaccaaatactacgcagactccgtgaagggccgattcaccatctccagagacaattccaagaacacactctttcttcaaatggacagcctgacagccgaggacacggccatatattactgtgtgagaggtggaggggcatattgtggtggcgactgtctgaggactcttgatatctggggccaagggacaatggtcaccgtctcttca

SEQ ID NO: 13699 - DNA, 307 bp, Homo sapiens
  source 1..307: mol_type = other DNA
tgcagcctctgggttcaccgtcagtaggacttacatgagttgggtccgccaggctccagggaaggggctggagtggatctcagttatttacagggatggtgccacgtactacgcagactccgtgaagggccgattcatcatctccagagacagttccaagaacacactctttcttcaaatggccagcctgacagccgaggacacggccatatattattgtgtgagaggtggaggggcatattgtggcggtgactgtcttaggactcttgatatatggggccaagggacaatggtcaccgtctcttca

SEQ ID NO: 13700 - DNA, 307 bp, Homo sapiens
  source 1..307: mol_type = other DNA
tgcagcctctgggttcaccgtcagtgggacctacatgagctgggtccgccaggctccaggggagggacttgagtggatctcagtaatttatagggatggtgccacatactacgcagactccgtgaagggccgattcatcatctccagagacagtttcaagaacagactctttcttcaaatgggcagcctgacagccgaggacacggccatatattattgtgtgagaggtggaggggcatattgtggcggtgactgtcttaggactcttgatatatggggccaagggacaatggtcaccgtctcttca

SEQ ID NO: 13701 - DNA, 307 bp, Homo sapiens
  source 1..307: mol_type = other DNA
tgcagcctctgggttcaccgtcagtaggacctacatgagctgggtccgccaggctccagggaaggggctggagtggatctcagttatttataggaatggtgccacatattacgcagactccgtgaagggccgattcatcatctccagagacagttccaagaacacactgtttcttcaaatgggcagcctgacagccgaggacacggccatatattattgtgtgagaggtggaggggcatattgtggcggtgactgtcttaggactcttgatatatggggccaagggacaatggtcaccgtctcttca

SEQ ID NO: 13702 - DNA, 307 bp, Homo sapiens; identical to SEQ ID NO: 13696
  source 1..307: mol_type = other DNA

SEQ ID NO: 13703 - DNA, 307 bp, Homo sapiens
  source 1..307: mol_type = other DNA
tgcagcctctgggttcaccgtcagtaggacctacatgagctgggtccgccaggctccaggaaaggggctggagtggatctcagttatttatagggatggtgccacatactacgcagagtccgtgaagggccgattcatcatctccagagacagttccaagaacacactctttcttcaaatgggcagcctgacagccgaggacacggccatatattattgtgtgagaggtggaggggcatattgtggcggtgactgtcttaggactcttgatatatggggccaagggacaatggtcaccgtctcttca

SEQ ID NO: 13704 - DNA, 307 bp, Homo sapiens; identical to SEQ ID NO: 13703
  source 1..307: mol_type = other DNA

SEQ ID NO: 13705 - DNA, 307 bp, Homo sapiens
  source 1..307: mol_type = other DNA
tgtagcctctgggttcaccgtcagtaagacttatatgagttgggtccgccaggctccagggaaggggccggagtggctctcagttatttatagggatggtggcgcatactacgcagactccgtgaagggccgattcatcatctccagagacacttccaagaacacactctttcttcaaatggtcagcctgacagccgaggacacggccgtatattattgtgtgagaggtggaggggcatattgtggcggtgactgtcttaggactcttgatatatggggccaagggacaatggtcaccgtctcttca

SEQ ID NO: 13706 - DNA, 307 bp, Homo sapiens
  source 1..307: mol_type = other DNA
tgcagcctctgggttcaccgtcagtaggacctacatgagctgggtccgccaggctccagggaaggggctggagtggatctcagttatttataggaatggtgccacatactacgcaaactccgtgaagggccgtttcatcatctccagagacagttccaagaacacactctttcttcaaatgggcagcctgacagccgaggacacggccatatattattgtgtgagaggtggaggggcatattgtggcggtgactgtcttaggactcttgatatatggggccaagggacaatggtcaccgtctcttca

SEQ ID NO: 13707 - DNA, 307 bp, Homo sapiens
  source 1..307: mol_type = other DNA
tgcagcctctgggttcaccgtcagtaggacctacatgagctgggtccgccaggctccagggaaggggctggagtggatctcagttctttatagggatggtgccacatactacgcagactccgtgaagggccgattcatcatctccagagacagttccaagaacacactctttcttcaaatgggcagcctgacagccgaggacacggccatatattattgtgtgagaggtggaggggcatattgtggcggtgactgtcttaggactcttgatatatggggccaagggacaatggtcaccgtctcttca

SEQ ID NO: 13708 - DNA, 307 bp, Homo sapiens
  source 1..307: mol_type = other DNA
tgcagcctctgggttaggcgtcagttccacctacatgagctgggtccgccaggctccagggagtgggctggagtgggtttcagtcatttatagtgatagttccacatactacgcagactccgtgaagggccgattcaccatctccagagacaattccaagaacacactctttcttcaaatggacagcctgacagccgacgacacggccatatattactgtgtgagaggtggaggggcatattgtggcggtgactgccttaggactcttgatatctggggccaagggacaagggtcaccgtatcttca

SEQ ID NO: 13709 - DNA, 307 bp, Homo sapiens
  source 1..307: mol_type = other DNA
tgcagcctctggcctcaccgtcagtagcacctacatgagctgggtccgccaggctccagggaaggggctggagtgggtctcagttatttatagggatagcaccacacactacgcagactccgtgaagggccgaatcaccatctccagagacaactccaagaacacactctttcttcaaatggacagcctgacagccgaggacacggccatatattactgtgtgagaggtggaggggcatattgtggtggcgactgtctgaggactcttgatatctggggccaagggacaatggtcaccgtctcttca

SEQ ID NO: 13710 - DNA, 307 bp, Homo sapiens
  source 1..307: mol_type = other DNA
tgcagcctctgggttcaccgttagtagtacctacatgagctgggtccgccaggctccaggggaggggctggagtggatctcagttctttatagggatggcgccacatactacgcagactccgtgaagggccgattcatcatctccagagacagtttcaggaatacagtccttcttcaaatgggcagcctgacagccgaggacacggccatatattattgtgtgagaggtggaggggcatattgtggcggtgattgtcttaggactcttgatatatggggccgagggacaatggtcaccgtctcttca

SEQ ID NO: 13711 - DNA, 307 bp, Homo sapiens
  source 1..307: mol_type = other DNA
tgcagcctctggcctcaccgtcagtagcacctacatgagctgggtccgccaggctccagggaaggggctggagtgggtctcagttatttatagggatagtaccacatactacgcagactccgtgaagggccgattcaccatctccagagacaactccaagaacacactctttcttcaaatggacagcctgacagccgaggacacggccatatattactgtgtgagaggtggaggggcatattgtggtggcgactgtctgaggactcttgatatctggggccaagggacaatggtcaccgtctcttca

SEQ ID NO: 13712 - DNA, 306 bp, Homo sapiens
  source 1..306: mol_type = other DNA
tgcagcctctgggttaggcgtcagttccacctacatgagctgggtccgccaggctccagggagtgggctggagtgggtttcagtcatttatagtgatagttccacatactacgcagactccgtgaagggccgattcaccatctccagagacaattccaagaacacactctttcttcaaatggacagcctgacagccgacgacacggccatatattactgtgtgagaggtggaggggcatattgtggcggtgactgccttaggactcttgatatctggggccaagggacaagggtcaccgtatcttc

SEQ ID NO: 13713 - DNA, 307 bp, Homo sapiens
  source 1..307: mol_type = other DNA
tgcagtctctgggttcaccgtcagtgggacctacatgagctgggtccgccaggctccagggcaggggctggagtggatctcagttctttataggaatggtgccacatactacgcagactccgtgaagggccgattcatcatctccagagacagttccaagaacacactgtttcttcaaatgggcagcctgacagacgaggacacggccatatattattgtgtgagaggtggaggggcatattgtggcggtgactgtcttaggactcttgatatatggggccaagggacaatggtcaccgtctcttca

SEQ ID NO: 13714 - DNA, 307 bp, Homo sapiens
  source 1..307: mol_type = other DNA
tgcagcctctgggttcaccgtcagtaggacctacatgagctgggtccgccaggctccagggaaggggctggagtggatctcagttatttatagggatggtgccacatactacgcagactccgtgaagggccgattcatcatctccagagacagttccaggaacacactctttcttcaaatgggcagcctgacagccgaggacacggccatatattattgtgtgagaggtggaggggcatattgtggcggtgactgtcttaggactcttgatatatggggccaagggacaatggtcaccgtctcttca

SEQ ID NO: 13715 - DNA, 307 bp, Homo sapiens
  source 1..307: mol_type = other DNA
tgcagcctctgagttaactgtcagtaccacctacatgagctgggtccgccaggctccagggagtgggctggaatgggtctcagttatttatagggatggttccacatactacgcagactccgtgaagggccgattcaccatctccagagacgattccaagaacacagtctctcttcaaatggacagcatgtcagccgacgacacggccctatattactgtgtgagaggtggaggggcatattgtggcggtgactgccttaggactcttgatatctggggccaagggacacgggtcaccgtatcttca

SEQ ID NO: 13716 - DNA, 307 bp, Homo sapiens
  source 1..307: mol_type = other DNA
tgcagcctctgggttcaccgtcagtaggacctacatgagctgggtccgccaggctccagggaaggggctggagtggatctcagttatttatagggatggtgccacatactacgcagactccgtgaagggccgattcatcatctctagagacagttccagggacacactctttcttcagatgggcagcctgacagccgaggacacggccatatattattgtgtgagaggtggaggggcatattgtggcggtgactgtcttaggactcttgatatatggggccaagggacagtggtcaccgtctcttca

SEQ ID NO: 13717 - DNA, 295 bp, Homo sapiens
  source 1..295: mol_type = other DNA
tgaagcctctggcttcgtctttcgcgcctactggatgcactgggtccgccaagttcccgggaaggggctggtctgggtctgtggcataagcagtgatggaagtgaagttatgtctgcggactccgcgcgggaccgattcaccatctccagagacaacgccaggaacactctatatctgcaaatgaacagtctcagtgtcgacgatacggctctttattattgtgtaaggggaggcccatattatagatccttcggggacttttggggccagggaaccccggtcaccgtctcctca

SEQ ID NO: 13718 - DNA, 295 bp, Homo sapiens
  source 1..295: mol_type = other DNA
tgaagcctctggcttcgtctttcgcgcctactggatgcactgggtccgccaagttcccgggaaggggctggtctgggtctgtggcataagcagtgatggaagtgaagttatgtctgcggactccgcgcgggaccgattcaccatctccagagacaacgccaagaacactctatatctgcaaatgaacagtctcagtgtcgacgatacggctctttattattgtgtaaggggaggcccatattatagatccttcggggacttttggggccagggaaccccggtcaccgtctcctca

SEQ ID NO: 13719 - DNA, 304 bp, Homo sapiens
  source 1..304: mol_type = other DNA
caccgtctctgatgtccccattagtggtcgctcgtgggcttggatccggcagcccccgggcaaggcaatggagtggatcgggtacatcgatgacagcggcgacctcgatgagaagacactcatctcctacaacccttccctccagagtcgagtctctttttcagtggacatgtccaggggccagttctcgttgagactgacatctgtgacacgtgctgacacggccgtctatttctgtgcgagagtcccttcccgggcccgggtcgacgtctggggccagggaatcctggtcaccgtctcttca

SEQ ID NO: 13720 - DNA, 304 bp, Homo sapiens
  source 1..304: mol_type = other DNA
caccgtctctgatgtccccattagtggtcgctcgtgggcttggatccggcagcccccgggcaaggcaatggagtggatcgggtacatcgatgacagcggcgacctcgctgaggagactctcatctcctacaacccttccctccagagtcgagtctctttttcagtggacatgtccaggggccagttctcgcttagactgacgtctgtgacacgtgctgacacggccgtctatttctgtgcgagagtcccttcccgggcccgggtcgacgtctggggccagggaatcctggtcaccgtctcctca

SEQ ID NO: 13721 - DNA, 289 bp, Homo sapiens
  source 1..289: mol_type = other DNA
tgcagtctctggattcacctttagtaattattggatgacctgggtccgccaggctccagggaaggggctggagtgggtggccaacataaaggcagatggaagtgagatttactatgtggactctgtgaggggccgattcatcatctccagagacaacgccaagaactcactatatctgcaaatgaacagcctgagagtcgaagacacggccgtttattattgtgcctgctatccagtaaatgcaggcatggactactggggccaggggaccctggtcatcgtctcctca

SEQ ID NO: 13722 - DNA, 289 bp, Homo sapiens
  source 1..289: mol_type = other DNA
tgcagtctctggattcacctttagtaattattggatgacctgggtccgccaggctccagggaaggggctggagtgggtggccaacataaaggcagatggaagtgaggttcactatgtggactctgtgaggggccgattcatcatctccagagacaacgccaagaactcactatatctgcaaatgaacagcctgagagtcgaagacacggccgtttattattgtgcctgctatccagtaaatgcaggcatggactactggggccaggggaccctggtctacgtctcctca

SEQ ID NO: 13723 - DNA, 289 bp, Homo sapiens
  source 1..289: mol_type = other DNA
tgcagtctctggattcacctttagtaattattggatgacctgggtccgccaggctccagggaaggggctggagtgggtggccaacataaagggagatggaagtgaggttcagtatgtggactctgtgaggggccgattcatcatctccagagacaacgccaagaactcactatatctgcaaatgaacagcctgagagtcgaagacacggccgtttattattgtgcctgctatccagtaaatgcaggcatggactactggggccaggggaccctggtctacgtctcctca

SEQ ID NO: 13724 - DNA, 289 bp, Homo sapiens
  source 1..289: mol_type = other DNA
tgcagtctctggattcacctttagtaattattggatgacctgggtccgccaggctccagggaaggggctggagtgggtggccaacataaaaaaagatggaagtgaggttcactatgtggactctgtgaggggccgattcatcatctccagagacaacgccaagaactcactatatctgcaaatgaacaacctgagagtcgaagacacggccgtttattattgtgcctgttatccagtaaatgcaggcatggactactggggccaggggaccctggtctacgtctcctca

SEQ ID NO: 13725 - DNA, 289 bp, Homo sapiens
  source 1..289: mol_type = other DNA
tgcagtctctggattcacctttagtaattattggatgacctgggtccgccaggctccagggaaggggctggagtgggtggccaacataaagacagatggaagtgaggttcactatgtggactctgtgaggggccgattcatcatctccagagacaacgccaagaactcactatatctgcaaatgaacagcctgagagtcgaagacacggccgtttattattgtgcctgctatccagttaatgcaggcatggactactggggccaggggaccctggtctacgtctcctca

SEQ ID NO: 13726 - DNA, 289 bp, Homo sapiens
  source 1..289: mol_type = other DNA
tgcagtctctggattcacctttagtaattattggatgacctgggtccgccaggctccagggaaggggctggagtgggtggccaacataaagacagatggaagtgaggttcactatgtggactctgtgaggggccgattcatcatctccagagacaacaccaagaactcactatatctgcaaatgaacagcctgagagtcgaagacacggccgtttattattgtgcctgctatccagtaaatgcaggcatggactactggggccaggggaccctggtctacgtctcctca

SEQ ID NO: 13727 - DNA, 304 bp, Homo sapiens
  source 1..304: mol_type = other DNA
tgcagcctctggattccccttcaacctttatgagatgaactgggtccgccaggctccagggaaggggccggaatgggttgcgtacattagaagtggtgctagtaccatactgtacgcagactctgtgaagggccgattcaccatctccagagacgacgccaggaactcagtttatctgcaaatgaacagcctgagagtcgaggacacggctacatattactgtgcgagagtgcctcttgagggcgacttccgtggtaattgttatgcccactggggccagggaaccctggtcaccgtctcctca

SEQ ID NO: 13728 - DNA, 304 bp, Homo sapiens
  source 1..304: mol_type = other DNA
tgcagcctctggattccccttcaatgcttatgaaatgaactgggtccgccaggctccagggaaggggccggagtgggttgcatacattagaagtggtgctagtaccatactgtacgcagactctgtgaagggccgattcaccatctccagagacgacgccaagaactcactgtatctgcaaatgaacagcctgagagtcgaggacacggctatatattactgtgcgagagtgcctcttgagggcgacttccgtggtaattgttatgcccactggggccagggaaccctggtcaccgtctcctca

SEQ ID NO: 13729 - DNA, 304 bp, Homo sapiens
  source 1..304: mol_type = other DNA
tgcggcctctggattccccttcagcctttatgaaatgaactgggtccgccaggctccagggaaggggccggaatgggttgcctacattagaagtggtgctgctaccatactgtacgcagactctgtgaagggccgatttaccattttcagagacgacgccaggaattcagtttatctgcaaatgaacagcctgagagtcgaggacacggctacatattactgtgcgagagtgcctcttgagggcgacttccgtggtaattgttatgcccactggggccagggagccctggtcaccgtctcctca

SEQ ID NO: 13730 - DNA, 304 bp, Homo sapiens
  source 1..304: mol_type = other DNA
tgcagcctctggattccccttcaacctttatgaaatgaactgggtccgccaggctccagggaaggggccggaatgggttgcgtacattagaagtggtgctagtaccatactgtacgcagactctgttaagggccgattcaccatctccagagacgacgccaagaactcagtttatctgcaaatgaacagcctgagagtcgaggacacggctacatattactgtgcgagagtgcctcttgagggcgacttccgtggtaattgttacgcccactggggccagggaaccctggtcaccgtctcctca

SEQ ID NO: 13731 - DNA, 345 bp, Homo sapiens
  source 1..345: mol_type = other DNA
acagagaccctcacgctgacctgcaccgtctctggatactcactcgacagtgctacaatgggtgtgagctggatccgtcagcccccagggaaggccctggagtggcttgcacacgttttttcgaatgacgaaaaatcctacaatacatctctgaagaggaggctcaccatctccaaggacacctccaaaagccaggtggtccttaccatgaccaacatggaccctgtggacacagccacatattactgtgcacggataaggggggaccaatacgatattttgactggttattccccgtactactttgactcctggggccagggagccctggtcaccgtctcctca

SEQ ID NO: 13732 - DNA, 345 bp, Homo sapiens
  source 1..345: mol_type = other DNA
acagagaccctcacgctgacctgcaccgtctctggatactcactcgacagtgctacaatgggtgtgagctggatccgtcagcccccagggaaggccctggagtggcttgcacacgttttttcgaatgacgaaaaatcctacaatgcatctctgaaaaggaggctcaccatctccaaggacacctccaaaagccaggtggtccttaccatgacccacatggaccctgtggacacagccacatattactgtgcacggataaggggagaccaatacgatattttgactggttattccccgtactactttgactcctggggccagggagccctgatcaccgtctcctca

SEQ ID NO: 13733 - DNA, 289 bp, Homo sapiens
  source 1..289: mol_type = other DNA
tgcagcctctggattcacctttcgaacctatgccatgaactgggtccgccaggctccagggaaggggctggagtgggtctcactcattagtggtggttatggtcgtagtgacacatactacgcagactccgtgaagggccggttcaccatctccagagacaattccaagaacatactttttctacaaatgaacagcctgagagccgaggacacggccctctatttctgtgcgagagatactaccagcctcgactactggggccagggaaccctggtcaccgtctcctca

SEQ ID NO: 13734 - DNA, 289 bp, Homo sapiens
  source 1..289: mol_type = other DNA
tgcagcctctggattcacgtttagaacctatgccatgaactgggtccgccaggctccagggaaggggctggagtgggtctcactcattagtggtggttatggtcgtagtagcacatactatgcagactcggtgaagggccggttcaccatctccagagacaattccaagaacacactatatctgcaaatgaacagcctgagagccgaggacacggccgtatatttctgtgcgagagatactaccagcctcgactactggggcccgggaaccctggtcaccgtctcctca

SEQ ID NO: 13735 - DNA, 289 bp, Homo sapiens
  source 1..289: mol_type = other DNA
tgcagcctctggattcacgtttagaacctatgccatgaactgggtccgccaggctccagggaaggggctggagtgggtctcactcattagtggtggttatggtcgtagtgacacatactacgcagactcggtgaagggccggttcaccatctccagagacaattccaagaacacactatatctgcaaatgaacagcctgagagccgaggacacggccgtatatttctgtgcgagagatactaccagcctcgactactggggccagggaaccctggtcaccgtctcctca

SEQ ID NO: 13736 - DNA, 289 bp, Homo sapiens
  source 1..289: mol_type = other DNA
tgcagcctctgggttcacctttagaacctatgccatgaactgggtccgccaggctccagggaaggggctggagtgggtctcactcattagtggtggttatggtcgtagtgacacatactacgcagactcggtgaagggccggttcaccatctccagagacaattccaagaacacactatatctgcaaatgaacagcctgagagccgaggacacggccgtatatttctgtgcgagagatactaccagcctcgactactggggccagggaaccctagtcaccgtctcctca

SEQ ID NO: 13737 - DNA, 289 bp, Homo sapiens
  source 1..289: mol_type = other DNA
ggcagcctctgggttcacctttagaacctatgccatgaactgggtccgccaggctccagggaaggggctggagtgggtctcactcattagtggtggttatggtcgtagtgacacatactacgcagactcggtgaagggccggttcaccatctccagagacaattccaagaacacactatatctgcaaatgaacagcctgagagccgaggacacggccgtatatttctgtgcgagagatactaccagcctcgactactggggccagggaaccctagtcaccgtctcctca

SEQ ID NO: 13738 - DNA, 289 bp, Homo sapiens
  source 1..289: mol_type = other DNA
tgcagcctctggattcacgtttagaacctatgccatgaactgggtccgccaggctccagggaaagggctggagtgggtctcactcattagtggtggttatggtcgtagtgacacatactacgcagactcggtgaagggccggttcaccatctccagagacaattccaagaacacactatatctgcaaatgaacagcctgagagccgaggacacggccgtatatttctgtgcgagagatactaccagcctcgactactggggccagggaaccctggtcaccgtctcctca

SEQ ID NO: 13739 - DNA, 289 bp, Homo sapiens
  source 1..289: mol_type = other DNA
tgcagcctctggattcacctttagaacctatgccatgaactgggtccggcaggccccagggaaggggctggagtgggtctcactcattagcggtggttttggttggagtagcacacactacgcggactccgtgaagggccggttcaccatctccagagacaattccaagaacacagtatatctggaaatgaacagcgtgagagccgaggacacggccctatatttctgtgcgagagatactaccagcctcgactactggggcctgggaaccctggtcaccgtctcccct

SEQ ID NO: 13740 - DNA, 295 bp, Homo sapiens
  source 1..295: mol_type = other DNA
tgcagcctctggattcaccttgagtagtcattggatgagttgggtccgccaggctccagggaaggggccggagtgggtgacgtacataaagcaagatggaagtgagaaatactatttggagtctgtgaagggccgattcaccatctccagagacaacaccaagaactcactgtacctgcaaatgaacagcctgagagtcgaggacacggccgcgtatttctgcgtgagattaaatgggggccacgggggcgattttgatttctggggccaagggacaatggtcaccgtttcttca

SEQ ID NO: 13741 - DNA, 294 bp, Homo sapiens
  source 1..294: mol_type = other DNA
tgcagcctctggattcacctttggtagtcattggatgagttgggtccgccaggctccagggaaggggccgcagtgggtgacttacataaagcaagatggaagtgagaaatactatttggagtctgtgaagggccgattcaccatctccagagacaacaccaagaactcactgtacctgcaaatgaacagcctgagagtcgaggacacggccgcgtatttctgtgtgagattaaatgggggccacgggggcgattttgatttctggggccaagggacaatggcaccgtatcatca

SEQ ID NO: 13742 - DNA, 295 bp, Homo sapiens
  source 1..295: mol_type = other DNA
tgcagcctctggattcaggtttcatatctatatgatgaactggatccggcaggctccagggaaggggctggagtgggtctcttctattaatggtaatggtgctggcgcaaagtacgctgactccgtgaagggccggttcaccatctccagagacaataccgagaacacgctgtatctgcaaatgaacagcctgagagtcgaggacacggccatatattattgtgtcaaagattggggacgtgacactggaacccggggctactggggccagggaaccctggtcaccgtctcctca

SEQ ID NO: 13743 - DNA, 295 bp, Homo sapiens
  source 1..295: mol_type = other DNA
tgcagcctctggattcaggtttcatatctatatgatgaactggatccggcaggctccagggaaggggctggagtgggtctcatctattaatggtaatggtgctggcgcaaagtacgctgactccgtgaagggccggttcaccatctccagagacaataccgagaacacgctgtatctgcaaatgaacagcctgagagtcgaggacacggccatatattattgtgtcaaagattggggacgtgacactggaacccggggctactggggccagggaaccctggtcaccgtctcctca

SEQ ID NO: 13744 - DNA, 295 bp, Homo sapiens
  source 1..295: mol_type = other DNA
tgcagcctctggattcaggtttagtgtctatatgatgaactggatccgccaggctccagggaaggggctggagtgggtctcagctattcatggtcatggtgatgtcacaaagtacgctgactccgtgaagggccggttcaccatctccagagacaataccgagaacacgttgtctctgcaaatgaacagcctgagagtcgaggacacggccatatattattgtgtcaaagattggggacgtgacactggaacccggggctactggggccagggaaccctggtcaccgtctcctca

SEQ ID NO: 13745 - DNA, 292 bp, Homo sapiens
  source 1..292: mol_type = other DNA
tgcagcctctggatttaccttcagtgactactacatgagctggatccgacaggctccagggaaggggctggagtgggtctcacacattagcactaggagtagttacactaagtatgcagactctgtgaagggccgattcaccatctccagagacaacgtccagaattcactgtttctgcagatgaacagtctgagagccgaggacacggccgtgtattactgtgcgagagatcggcatagtagtattggcttcgacccctggggccagggaaccctggtcaccgtctcctca

SEQ ID NO: 13746 - DNA, 292 bp, Homo sapiens
  source 1..292: mol_type = other DNA
tgcagcctctggatttaccttcagtgactactacatgagctggatccgacaggctccagggaaggggctggagtgggtctcacacattagcactaggagtagttacactaagtatgcagactctgtgaagggccgattcaccatctccagagacaacgtccagaattcactgtttctgcagatgaatagtctgagagccgaggacacggccgtgtattactgtgcgagagatcggcatagtagtattggcttcgacccctggggccagggaaccctggtcaccgtctcctca

SEQ ID NO: 13747 - DNA, 292 bp, Homo sapiens
  source 1..292: mol_type = other DNA
tgcagcctctggatttaccttcagtgactactacatgagctggatccgacaggctccagggaaggggctggagtgggtctcacacattagcactaggagtagttacattaagtatgcagactttgtgaagggccgattcaccatctccagagacaacgtccagaattcactgtttctgcagatgaacagtctgagagtcgacgacacggccgtgtattactgtgcgagagatcggcatagtagtattggcttcgacccctggggccagggaaccctggtcaccgtctcctca

SEQ ID NO: 13748 - DNA, 292 bp, Homo sapiens
  source 1..292: mol_type = other DNA
ttcagcgtctggattcaacttcccgagttatggattccactgggtccgccaggctccaggcaaggggctggagtgggtggcaatgatgtggtacaatgtcagagactcttattatagagattccgtgaagggccggttcaccatttccagagacgactccaaaaagatcctttttcttgaaatgaatggcctgagagaggacgacacggctttgtattattgtgcgagagcgggacctagcggcggagtgttcgatatttggggccaagggacgatggtcaccgtctcttca

SEQ ID NO: 13749 - DNA, 292 bp, Homo sapiens
  source 1..292: mol_type = other DNA
ttctgcgtctggattcaacttccagagttatggaatgcactgggtccgccaggctccaggcaaggggctggagtgggtggcaatgatgtggtataatgtcagagactcttattatagtgattcagtcaagggccggttcaccatctccagagacgactccaaaaagaccctgtttcttcaaatgaatggcctgcgaaacgacgacacggctttgtattattgtgcgcgggcggggcccagtggcggagtttttgacatttggggccaagggacaatggtcaccgtctcttca

SEQ ID NO: 13750 - DNA, 292 bp, Homo sapiens
  source 1..292: mol_type = other DNA
tgcagcctctggtttcaagttcagtgactctgctatgcactgggtccgccaggcttccgggaaggggctggagtggcttggccgcattcgaagtaaaagtaacaatcacgagacaggatatgctgcctcggtgaaagggaggttcaccatctccagagatgattcacaaaacacgatgtatctgcaaatggatggcctgaagaccgaggacacggccctttattactgtactcgtccaggccaaacggggggggacatctggggccagggcaccctggtcaccgtctcctca

SEQ ID NO: 13751 - DNA, 292 bp, Homo sapiens
  source 1..292: mol_type = other DNA
tgcagcctctgggttcaagtttagtgactctgctatgcactgggtccgccaggcttccgggaaggggctggagtggcttggccgtattcgaagcaaaagtaacaatcacgcgacaggatatgctgcctcggtgaaagggaggttcaccatctccagagatgattcagagaacacgatgtatctgcaaatgaatggcctgaaaaccgaggacacggccctttattattgtactcgtccaggccaaacggggggggacatctggggccagggcacccaggtcaccgtctcctca

SEQ ID NO: 13752 - DNA, 292 bp, Homo sapiens
  source 1..292: mol_type = other DNA
tgcagcctctgggttcaagtttagtgactctgctatgcactgggtccgtcaggcttccgggaaggggctggagtggcttggccgtattcgaagtaaaagtaacaatcacgcgacaggatatgctgcctcggtgaaagggaggttcaccatctccagagatgattcagagaacacgatgtatctgcaaatgaatggcctaaaaaccgaggatacggccctttattattgtactcgtccaggccaaacggggggggacatctggggccagggcacccaggtcaccgtctcctca

SEQ ID NO: 13753 - DNA, 298 bp, Homo sapiens
  source 1..298: mol_type = other DNA
tgcaggctctggattcacctttagcggctatggcatgagctgggtccgccaggctccagggaaggggctggagtgggtctcagctattagtgggagtggtggtagtacatactacgcagactccgtgaagggccggttcaccatctccagagacaattccaagaacacactgtatctgcaaatgaacagcctgagagccgatgacacggccgtatattactgtgcgaaagaggtgacccctctcattgtagtagtaccagggcactggggccagggaaccctggtcaccgtctcctca

SEQ ID NO: 13754 - DNA, 298 bp, Homo sapiens
  source 1..298: mol_type = other DNA
tgcaggctctggattcacctttagcggctatggcatgagctgggtccgccaggctccagggaaggggctggagtgggtctcagctattagtgggagtggtggtagtacatactacgcagactccgtgaagggccggttcaccatctccagagacaattccaagaaaacactgtatctgcaaatgaacagcctgagagccgatgacacggccgtatattactgtgcgaaagaggtgacccctctcattgtagtagtaccagggcactggggccagggaaccctggtcaccgtctcctca

SEQ ID NO: 13755 - DNA, 298 bp, Homo sapiens
  source 1..298: mol_type = other DNA
tgcaggctctggattcacctttagcggctatggcatgagctgggtccgccaggctccagggaaggggctggagtgggtctcagctattagtgggagtggtggtagtacatactacgcagactccgtgaagggccagttcaccatctccagagacaattccaagaacacactgtatctgcaaatgaacagcctgagagccgatgacacggccgtatattactgtgcgaaagaggtgacccctctcattgtagtagtaccagggcactggggccagggaaccctggtcaccgtctcctca

SEQ ID NO: 13756 - DNA, 298 bp, Homo sapiens
  source 1..298: mol_type = other DNA
tgcaggctctggattcacctttagcggctatggcatgagctgggtccgccaggctccagggaaggggctggagtgggtctcagctattagtggcagtggtggtagtacatactatgcagactccgtgaagggccggttcaccatctccagagacaattccaagaacacactgtatctgcaaatgaacagcctgagagccgatgacacggccgtatattactgtgcgaaagaggtgacccctctcattgtagtagtcccagggcactggggccagggaaccctggtcaccgtctcctca

SEQ ID NO: 13757 - DNA, 298 bp, Homo sapiens
  source 1..298: mol_type = other DNA
tgcaggctctggattcacctttagcggctatggcatgagctgggtccgccaggctccagggaaggggctggagtgggtctcagctattagtggcagtggtggtagtacatactacgcagactccgtgaagggccggttcaccatctccagagacaattccaagaacacactgtatctgcaaatgaacagcctgagagccgatgacacggccgtatattactgtgcgaaagaggtgacccctctcattgtagtagtcccagggcactggggccagggaaccctggtcaccgtctcctca

SEQ ID NO: 13758 - DNA, 292 bp, Homo sapiens
  source 1..292: mol_type = other DNA
tgcagcctctggactcaccattggcacttatggcatgggttgggtccgccaggctccagggaaggggctggagtgggtctcaactattagtgccagtgctactgacacatactatgcagactccgtgaggggccggttcaccatctccagcgactattccaagaacaccctgtttctgcaaatgcacagcctgagagtcgaagacgcggccttatattattgcgtgacaacttttggggagtggtcccgctttgactactggggccagggcgccctggtcaccgtctcctca

SEQ ID NO: 13759 - DNA, 292 bp, Homo sapiens
  source 1..292: mol_type = other DNA
tgcagcctctggattcaccattggcacttatggcatgggctgggtccgccaggctccagggaaggggctggagtgggtctcaactattagtgctactggtgctgacacatactacgcagactccgtgaggggccggttcaccatctccagcgactattccaagaacacgctgtttctgcaaatgcacagcctgagagtcgaggacgcggccttatattactgtgtgacgacttttggggagtggtcccgctttgactactggggccggggagccctggtcaccgtctcctca

SEQ ID NO: 13760 - DNA, 295 bp, Homo sapiens
  source 1..295: mol_type = other DNA
tgcagtctctggattcagcgtcagcaatgtcgactacaagtacatgagttgggtccgccaggctccagggaaggggctggagtgggtctccgttatctatgacggcgaacaaacatacttcgcagactccgtaaggggcagattcaccatctccagagacacttccaccaacactctatatcttcaaatggacaacctgagagtcgaggacacggctatgtattattgtgtgaaagaagacagggggactacaatttacaactggggccggggaaccctggtcaccgtctcctca

SEQ ID NO: 13761 - DNA, 295 bp, Homo sapiens
  source 1..295: mol_type = other DNA
tgcagtgtctggattcagcgtcagcaatgtcgaccagaagtacatgagttgggtccgccaggctccagggaaggggctggagtgggtctccgttatctatgccggcgcccgaacatactacgcagactccgtaaggggcagattcaccatctccagagacagttccaccaacactctatatcttcaaatggacaacctgagagtcgaagacacggctatgtattattgtgtgaaagaagacagggggactacaatttataactggggccggggaaccctggtcaccgtctcccca

SEQ ID NO: 13762 - DNA, 295 bp, Homo sapiens
  source 1..295: mol_type = other DNA
tgcagtgtctggattcagcgtcagcaatgtcgaccagaagtacatgagttgggtccgccaggctccagggaaggggctggagtgggtctccgttatctatgccggcgcccgaacatactacgcagactccgtaaggggcagattcaccatctccagagacagttccaccaacactctatatcttcaaatggacaacctgagagtcgaagacacggctatgtattattgtgtgaaagaagacagggggactacaatttataactggggccggggaaccctggtcaccgtctcctca

SEQ ID NO: 13763 - DNA, 295 bp, Homo sapiens
  source 1..295: mol_type = other DNA
tgcagtctctggattcagcgtcagcaatgtcgaccagaagtacatgagttgggtccgccaggctccagggaaggggctggagtgggtctccgttatctattacggcgacggaacatactacgcagactccgtaaggggcagattcaccatctccagagacagttccaccaacactctatatcttcaaatggacaacttgagagtcgaggacacggctatgtattattgtgtgaaagaagacagggggactacaatttacaactggggccggggaaccctggtcaccgtctcctca

SEQ ID NO: 13764 - DNA, 268 bp, Homo sapiens
  source 1..268: mol_type = other DNA
cacaggcgctggggtcgacataagagacacctacgtgagttgggtccgccaggctccagggaaggggctggaaggggtctcaattaattacgaaggtggtgagacattctacgcagagtcggtgaagggccgcttcaccgtctccagagacatttccaagagcacggtgtatcttcacatgaacagcctgcgagccgaggacacggccgtctattattgtgtgaactttggaacttggggccagggaaccctggtcaccgtctcctca

SEQ ID NO: 13765 - DNA, 268 bp, Homo sapiens
  source 1..268: mol_type = other DNA
tgcaggctctggattcgccgtcagtggcacctacgtgagctgggtccgccaggctccaggtaaggggctggaagaggtcgcaataagttatgaaactggtcacacattctacgcagacccggtgaagggccgcttcaccctctccagagacagttccaagaacacggtgtatcttcaaatgaacagcctgcgagccgaggacacggccgtctattattgtgtgaacttcggaacttggggccagggaaccctggtcaccgtctcctca

SEQ ID NO: 13766 - DNA, 268 bp, Homo sapiens
  source 1..268: mol_type = other DNA
cacaggcgctggggtcgacataagagacacctatgtgagttgggtccgccaggctccagggaaggggctagaaggggtctcaattaattatgaacgtggtgagacattctacgcagagtcggtgaagggccgcttcaccgtctccagagacacttccaaggccacggtgtatcttcacatgaacagtctgcgcgccgacgacacggccgtctattactgtgtgaactttggaacttggggccagggaaccctggtcaccgtctcctca

SEQ ID NO: 13767 - DNA, 298 bp, Homo sapiens
  source 1..298: mol_type = other DNA
cactgtctcgggtggctctatcagtggttacttctggggctggttccgacagtccccacagaagggactggagtggattggatatgtctttgacaatgggaggcccaaagacaatccctccttcgtgagtcgatccaccatctcattggacatgtccaagagtcaattctccctcaagttgacttctctgaccattgcggacacggccgtgtattattgtgcgagattgccccgtgaggctggaagcttcgggtggttcgacccctggggccagggaattctggtcaccgtctcctca

SEQ ID NO: 13768 - DNA, 298 bp, Homo sapiens
  source 1..298: mol_type = other DNA
cactgtctcgggtggctccatcagtggttacttctggggctggttccgacagtccccacagaagggactggagtggattggatatgtctttgacaatgggaggcccaaagacaatccctccttcgtgagtcgatccaccatctcattggacatgtccaagagtcaattctccctcaagttgacttctctgaccattgcggacacggccgtgtattattgtgcgagattgccccgtgaggctggaagcttcgggtggttcgacccctggggccagggaattctggtcaccgtctcctca

SEQ ID NO: 13769 - DNA, 298 bp, Homo sapiens
  source 1..298: mol_type = other DNA
cactgtctttggtggctccatcagtggttacttctggggctggttccgacagtccccagacaagggactggagtggattgggtatgtccttgagcctgggaggaccaaggacaatccctccttcgtgagtcgagccaccatcttattggacatgtccaagagccagttctccctgaagttgacttctctgaccgttgcggacacggccgtgtattattgtgcgagattgccccgtgaggctggaagttttgggtggttcgacccctggggccagggaattctggtcaccgtctcctca

SEQ ID NO: 13770 - DNA, 298 bp, Homo sapiens
  source 1..298: mol_type = other DNA
cactgtctctggtggctccatcagtggttacttctggggctggttccggcagtccccaaaaaagggactggagtggattgcgtatgtcgttgagactggatacatcaagcacaatccctccttcgagagtcgagccagcatctcactggacatgtccaagagccaattctccctgaagttgacttctctgaccgttgcggacacggccgtctattattgtgcgagattgccccgtgaggctggaagttttgggtggttcgacccctggggccagggaattctggtcaccgtctcctca

SEQ ID NO: 13771 - DNA, 286 bp, Homo sapiens
  source 1..286: mol_type = other DNA
tgcagcgtctggatttaccttcagtagttataacatgcactgggtccgccaggctccaggcaaggggctggagtgggtggcagttatatggtttgatggaactaatgaaaactatgcagactccgtgaagggccgattcaccatctccagagacaactccaagaacacgttgtacctgcaaatgaacagcctgagagccgaggacacggctgtgtattactgtgcgagagatcataagttgcttccctactactggggccagggaaccctggtcaccgtctcctca

SEQ ID NO: 13772 - DNA, 286 bp, Homo sapiens
  source 1..286: mol_type = other DNA
tgcagcgtctggatttagcttcagtagttataacatgcactgggtccgccaggttccaggcaaggggctggagtgggtggcaattatatggtttgatgggactaatgaaaactatgcagactccgtgaagggccgattcaccatctccagagacaactccaagaacacgttgtacctgcaaatgaacagcctgagagccgaggacacggctgtgtattactgtgcgagagatcataagttgcttccctactactggggccagggaaccctggtcaccgtctcctca

SEQ ID NO: 13773 - DNA, 304 bp, Homo sapiens
  source 1..304: mol_type = other DNA
tgcagcctctggattcacctttaacaaccatgccatgatctgggtccgccaggctccagggaaggggctggagtgggtctcaggtatcaatgctcgtggtaattctagatattatgcagactccgtgaagggccggttcaccatctccagagacaattccaagaacacgctgtttctggaaatgaacagtctgagagccgacgacgcggccgaatattattgtgcgaggcgatattgtgatgacacccgctgttacgtgcacattgacttctggggccagggaaccctggtcaccgtctcctca

SEQ ID NO: 13774 - DNA, 304 bp, Homo sapiens
  source 1..304: mol_type = other DNA
tgcagcctctggattcacctttagcaatcatgccatgatctgggtccgccaggctccagggaaggggctggagtgggtctcaggtatcagtgctcctggtaattatagatattatgcagactccgtgaagggccggttcaccatctccagagacaattccaagaacacgctgtttctggaaatgaacagcctgagagccgacgacgcggccgaatattattgtgcgaggcgatattgtgatgacacccgctgttacgtgcacattgacttctggggccagggaaccctggtcaccgtctcctca

SEQ ID NO: 13775 - DNA, 300 bp, Homo sapiens
  source 1..300: mol_type = other DNA
acttctggttatacatttaccacctatggtatcagttgggtgcggcaggcccctggacaagggcttgagtgggtggcttggatcagcaccttcaatgataacccaaacattgcacagaagttccagggcagactcaccatgaccacagacacatccacgagcacagcctacatggagctgaggagcctgagatctgacgacacggccgtgtattactgtacgagagcccggtatagtagtggctggtactcggacggcggtgactactggggccagggaaccctggtcaccgtctcctca

SEQ ID NO: 13776 - DNA, 300 bp, Homo sapiens
  source 1..300: mol_type = other DNA
acttctggttatacatttaccacctatggtatcagttgggtgcggcaggcccctggacaagggcttgagtgggtggcttggatcagcaccttcaatgataacccaaacattgcacagaagttccagggcagactcaccatgaccacagacacatccacgagcacagcctacatggagctgaggagcctgagatctgacgacacggccgtgtattactgtacgagagcccggtatagtagtggctggtactcggacggcggtgactactggggcaagggaaccctggtcaccgtctcctca

SEQ ID NO: 13777 - DNA, 288 bp, Homo sapiens
  source 1..288: mol_type = other DNA
gtttccggatacaccctcagtgaattatccttgcactgggtgcgacggactcctggaaaagggcttgagttattgggaggtgctgatcctaaaaatggtgagccaatcttcgcacagatgttgcagggcagactcaccatgaccgaggacacatctacagagacagcctacatggagctgagaagcctgacatctgaggacacggccatttattactgtgcagcaagcccctatgatagtagtggttattcctactggggccagggaaccctggtcagcgtctcctca

SEQ ID NO: 13778 - DNA, 289 bp, Homo sapiens
  source 1..289: mol_type = other DNA
ggtttccggatacaccctcagtgaattatccatccactgggtgcggcaggctcctggaaaagggcttgagttgttgggaggtgctgatccgaaaaatggtgaaccaatctccgcgcagaaggtccagggcagagtcatcatgaccgaggacacagctacagatacggcctatatggagctgagcagcctgagatctgacgacacggccgtttattactgtgcagcaagcccctatgacagtagtggttattcgtactggggccagggaacccttgtcaccgtctcctca

SEQ ID NO: 13779 - DNA, 288 bp, Homo sapiens
  source 1..288: mol_type = other DNA
gtttccggatacaccctcagtgaattatccatccactgggtgcggcaggctcctggaaaagggcttgagttgttgggaggtgctgatcctaaaaatggtgaaccaatctccgcgcagaagttccagggcagagtcaccatgaccgaggacacagctacagacacagcctatatggagctgagcagcctgagatctgacgacacggccgtttattactgtgcagcaagcccctatgacagtagtggttattcctactggggccagggaacccttgtcaccgtctcctca

SEQ ID NO: 13780 - DNA, 307 bp, Homo sapiens
  source 1..307: mol_type = other DNA
tgcagcctctggattcatctttagtaactatgtcatgggctgggtccgccaggctccagggaaggggctggagtgggtctcacttattagtggtagtggtggtaatagattctatgtagattccgtgaaggggcggatcaccatctccagagacaactccaagaacacactgtatctgcaaatgaacagcctgagggccgaggacacggccgtttatttctgtgcgaaaggtcgataccctggtccggagagcaaccagaatacctttgactcctggggccggggaaccctggtcaccgtctcgtca

SEQ ID NO: 13781 - DNA, 307 bp, Homo sapiens
  source 1..307: mol_type = other DNA
tggagcctttggattcagctttagtaactatgtcatgggctgggtccgccaggctccagggaaggggctggagtgggtctcacttattaatgggagtggtggtaagagattctatgtagattccgtgaaggggcggatcaccatctccagagacaactccaagaacacactgtatctgcaaatgaacagcctgagggccgaggacacggccatttatttctgtgcgaaaggtcgataccctggtccggagagcaaccagaatacctttgactcgtggggccggggaaccctggtcaccgtctcgtca

SEQ ID NO: 13782 - DNA, 307 bp, Homo sapiens
  source 1..307: mol_type = other DNA
tggagcctctggattcatctttactaactatgtcatgggctgggtccgccaggctccagggaaggggctggagtgggtctcacttattagtggtagtggtcgtaataaattctatgtagactccgtgaaggggcggatcaccatctccagagacaactccaagaacacattgtatctgcaaatgaacagcctgagggccgaggacacggccgtttatttctgtgcgaaaggtcgataccctggtccggagagcaaccagaatacctttgactcctggggccggggagccctggtcaccgtctcgtca

SEQ ID NO: 13783 - DNA, 283 bp, Homo sapiens
  source 1..283: mol_type = other DNA
cgcagcgtctggattcatcttcagcagtcacgaaatgagctgggtccgccaggccccgggaaaggggctagagtgggttgccaccatcactaatggtggttatacaatccattatgcagattctgtgaagggccgcttcaccatctccagagacaacgccaaggatctactattcctccagatgaacgacctgagaggcgccgacacgggtctctatttttgcgcgactctgtggtcgtcatggggctattggggccagggaaccctggtcaccgtctcttca

SEQ ID NO: 13784 - DNA, 283 bp, Homo sapiens
  source 1..283: mol_type = other DNA
cgcagcgtctggattcatcttcagtagtcaggaaatgagctgggtccgccaggccccggggaaggggctagagtgggttgccaccatcactaatggtggttatacaatacattatgcagattctgtgaggggccgcttcaccatctccagagacaacgccaaggatcaactgtatctccagatgaacgacctgagaggcgccgacacgggtctttattattgtgcgaccctctggtcgtcatggggctactggggccagggaaccctggtcaccgtctcttca

SEQ ID NO: 13785 - DNA, 289 bp, Homo sapiens
  source 1..289: mol_type = other DNA
tgcagcctctggattcacctttagcagctatgccatgagctgggtccgccaggctccagggaaggggctggagtgggtctcagctattagtggtagtactggtagcacatactacgcagactccgtgaagggccggttcaccatctccagagacaattccaagaacacgctgtatctgcaaatgaacagcctgagagccgaggacacggccgtatattactgtgcgaaattgggcttgcccgaggcttttgatatctggggccaagggacaatggtcaccgtctcttca

SEQ ID NO: 13786 - DNA, 289 bp, Homo sapiens
  source 1..289: mol_type = other DNA
tgcaccctctggattcacctttggcacctatgccatgagctgggtccgccaggctccagggaaggggctggactgggtctcagctattagtggtactactggtagcacatactacgcagactccgtgaagggccggttcaccatctccagagacaattccaagaacacgctgtatctgcaaatgaacagcctgagagccgaggacacggccgtatattactgtgcgaaattgggcttgcccgaggcttttgatatctggggccaagggacaatggtcaccgtctcttca

SEQ ID NO: 13787 - DNA, 289 bp, Homo sapiens
  source 1..289: mol_type = other DNA
tggagcctctggattcaccttaagcagctatgccatgggctgggtccgccaggctccagggaaggggctggagtgggtctcacttcttagtggtactactggcaacacattctacgcagactccgtgaagggccggttcaccatctccggagacaattccaagaacacactatgtctgcagatgaacagcctgagagccgacgacacggccgtatattactgtgcgaaattgggcttgcccgaggcttttgatatctggggccaagggacaatggtcaccgtctcctca

SEQ ID NO: 13788 - DNA, 289 bp, Homo sapiens
  source 1..289: mol_type = other DNA
tgcagcctctggattcacctttagcacctctaccttgggctgggtccgccaggctccagggaaggggctggagtgggtctcacttattagtggcactactggtaccacatactacgcagactccgtgaagggccggttcaccttctccagagacaattccaagaacacactgtatctgcaaatgaacagcctgagagccgaggacacggccctatattactgtgcgaaattgggcttgcccgaggcttttgatatctggggccaagggacgttggtcaccgtctcttca

SEQ ID NO: 13789 - DNA, 289 bp, Homo sapiens
  source 1..289: mol_type = other DNA
tgcagcctctggattcacatttagcagctatgccatgggctgggtccgccaggctccagggaaggggctggagtgggtctcacttatcagtggtattactggtagcacatactacgcagactccgtgaagggccggttcaccatctccagaggcaattccaagaacacgctgtatctgcaaatgaacagcctgagagccgacgacacggccgtatattactgtgcgaaattgggcttgcccgaggcttttgatatctggggccaagggacaatggtcaccgtctcttca

SEQ ID NO: 13790 - DNA, 289 bp, Homo sapiens
  source 1..289: mol_type = other DNA
tgcaccctctggattcacctttggcacctatgccatgagctgggtccgccaggctccagggaaggggctggactgggtctcagctattagtggtactactggtagcacatactacgcagactccgtgaagggtcggttcaccatctccagagacaattccaagaacacgctgtatctgcaaatgaacagcctgagagccgaggacacggccgtatattactgtgcgaaattgggcttgcccgaggcttttgatatctggggccaagggacaatggtcaccgtctcttca

SEQ ID NO: 13791 - DNA, 289 bp, Homo sapiens
  source 1..289: mol_type = other DNA
tgcagcctctggattcacctttagcagctatgccatgacctggatccgccaggctccagggaaggggctggagtgggtctcagttattagtgatagtagtggtagcacatactacgccgactccgtgaagggccggttcaccatctccagagacaattccaagaacacgctgtatctgcaaatgaacagcctgagagccgaggacacggccgtatattactgtgcgaagttgggcttgcccgaggcttttgatatctggggccaagggacaatggtcaccgtctcttca

SEQ ID NO: 13792 - DNA, 289 bp, Homo sapiens
  source 1..289: mol_type = other DNA
tgcagcctctggattcacctttagcagctatgccatgacctgggtccgccaggctccagggaaggggctggagtgggtctcagttattagtgatagtagtggtagcacatactacgccgactccgtgaagggccggttcaccatctccagagacaattccaagaacacgctgtatctgcaaatgaacagcctgagagccgaggacacggccgtatattactgtgcgaagttgggcttgcccgaggcttttgatatctggggccaagggacaatggtcaccgtctcttca

SEQ ID NO: 13793 - DNA, 295 bp, Homo sapiens
  source 1..295: mol_type = other DNA
tgaaacaactggattcatcttcagtcactttagtatgcattgggtccgccaggctccagggtcgggcctggagtgggtcgcatctattagtagcagcagtgttgacattggctatggagcctcagtgaggggccgattcaccgtctccagagacgaccgcaccaactccctttttcttcacttgactggcctgagagacgacgatacggctgtctattactgtgcgagaggaataacatctctgcccccccacgctgactactggggcccgggaagccaagtcaccgtctcctca

SEQ ID NO: 13794 - DNA, 295 bp, Homo sapiens
  source 1..295: mol_type = other DNA
tgaaacctctggattcatcttcagtcacttcagtatgcattgggtccgtcaggctccagggtcgggcctggagtgggtcgcttctattagtagcagcagtgttgacattggctatggagcctcagtgaggggccgattcaccgtctccagagacgaccgcaccaactccctttttcttcatttgactggcctgagagacgacgatacggctgtctattactgtgcgagaggaataacatctctgcccccccacgctgactactggggcccgggaagccaagtcaccgtctcctca

SEQ ID NO: 13795 - DNA, 295 bp, Homo sapiens
  source 1..295: mol_type = other DNA
tgaaacctctggattcatcttcagtcacttcagtatgcattgggtccgtcaggctccagggtcgggcctggagtgggtcgcatctattagtagcagcagtgttgacattggctatggagcctcagtgaggggccgattcaccgtctccagagacgaccgcaccaactccctttttcttcatttgactggcctgagagacgacgatacggctgtctattactgtgcgagaggaataacatctctgcccccccacgctgactactggggcccgggaagccaagtcaccgtctcctca

SEQ ID NO: 13796 - DNA, 295 bp, Homo sapiens
  source 1..295: mol_type = other DNA
tgaaacctctggattcatcttcagtcacttcagtatgcattgggtccgtcaggctccagggtcgggcctggagtgggtcgcatctattagtagcagtagtgttgacattggctatggagcctcagtgaggggccgattcaccgtctccagagacgaccgcaccaactccctttttcttcatttggctgacctgagagacgacgatacggctgtctattactgtgcgagaggaataacatctctgcccccccacgctgactactggggcccgggaagccaagtcaccgtctcctca

SEQ ID NO: 13797 - DNA, 295 bp, Homo sapiens
  source 1..295: mol_type = other DNA
tgaaacctctggattcatcttcagtcactttagtatgcattgggtccgccaggctccagggtcgggcctggagtgggtcgcatctattagtagcagcagtgttgacattggctatggagcctcagtgaggggccgattcaccgtctccagagacgaccgcaccaactccctttttcttcacttgactggcctgagagacgacgatacggctgtctattactgtgcgagaggaataacatctctgcccccccacgctgactactggggcccgggaagccaagtcaccgtctcctca

SEQ ID NO: 13798 - DNA, 319 bp, Homo sapiens
  source 1..319: mol_type = other DNA
cgctgtctctggtggctccatcactactagtagttactactggggctggatccgccagcccccagggaaggggctggagtggattgggagtatctattatagtgggagcacctactacaacccgtccctcaagagtcgagtcaccatatccgtggacacgtccaagaaccagttctctctgaggctgaggtctgtgaccgccgcagacacggctgtctattactgtgcgagacacccctattgtagtagtaccagctgctatccatactactactacatggacgtctggggcaacgggaccacggtcaccgtctcctca

SEQ ID NO: 13799 - DNA, 319 bp, Homo sapiens
  source 1..319: mol_type = other DNA
cactgtctctggtggctccataagcactagtagttactactggggctggatccgccagtccccagggaaggggctggagtggattgggagtatttattatagtgggagcagctactacaacccgtccctcaagagtcgagtctccatatccgtacacacgtccaaggaccagttctccctgaaggtgatctctgtgaccgccgcagacacggctgtgtattactgtgcgagacacccctattgtagtagtaccagctgctatccctactactactacatggacgtctggggcaaagggaccacggtcaccgtctcctca

SEQ ID NO: 13800 - DNA, 319 bp, Homo sapiens
  source 1..319: mol_type = other DNA
cgctgtctctggtggctccatcactactagtagttactactggggctggatccgccagcccccagggaaggggctggagtggattgggagtatctattatagtgggagcacctactacaacccgtccctcaagagtcgagtcaccatatccgtggacacgtccaagaaccagttctccctgaagctgaggtctgtgaccgccgcagacacggctgtctattactgtgcgagacacccctattgtagtagtaccagctgctatccatactactactacatggacgtctggggcaacgggaccacggtcaccgtctcctca

SEQ ID NO: 13801 - DNA, 319 bp, Homo sapiens
  source 1..319: mol_type = other DNA
cactgtctctggtggctccatcatgactagtagttactactggggctggatccgccagcccccagggaaggcactggagtggattgggagtgtctattatagtgggagcacctattacaccccgtccctcaagagtcgagtcaccatatccgtagacacgtccaagaaccagttctccctgaagttgaggtctgtgactgtcgcagacacggctgtgtactactgtgcgagacacccctattgtagtagtaccagttgctatccatattactactacatggacgtctggggcaaagggaccacggtcatcgtctcctca

SEQ ID NO: 13802 - DNA, 319 bp, Homo sapiens; identical to SEQ ID NO: 13798
  source 1..319: mol_type = other DNA

SEQ ID NO: 13803 - DNA, 319 bp, Homo sapiens
  source 1..319: mol_type = other DNA
cgctgtctctggtggctccatcactactagtagttactactggggctggatccgccagcccccagggcaggggctggagtggattgggagtatttattatagtgggagcacctactacaacccgtccctcaagagtcgagtcgccatatctgtagacacgtccaagaaccaattctccctgaagctgaggtctgtgaccgccgcagacacggctgtatattactgtgcgagacacccctattgtagtagtaccagctgctatccatactactactacatggacgtctggggcaaagggaccacggtcaccgtctcctct

SEQ ID NO: 13804 - DNA, 319 bp, Homo sapiens; identical to SEQ ID NO: 13799
  source 1..319: mol_type = other DNA

SEQ ID NO: 13805 - DNA, 319 bp, Homo sapiens
  source 1..319: mol_type = other DNA
cactgtctctggtggctccatcagcacaagtagttactactggggctggatccgccagtccccagggaaggggctggagtggattgggagtatttattatagtgggagcacctactacaacccgtccctcaagagtcgagtctccatatccgtacacacgtccaaggaccagttctccctgaaggtgatctctgtgaccgccgcagacacggctgtgtattactgtgcgagacacccctattgtagtagtaccagctgctatccctactactactacatggacgtctggggcaaagggaccacggtcaccgtctcctca

SEQ ID NO: 13806 - DNA, 319 bp, Homo sapiens
  source 1..319: mol_type = other DNA
cactgtctctggtggctccatcagcactagtagttactactggggctggatccgccagcccccagggaaggggctggagtggattgggagtatctattatagtgggagcacctactacaacccgtccctcaagagtcgagtcaccatatccgtagacacgtccaagaaccaattctccctgaagctgagctctgtgaccgccgcagacacggctgtgtattactgtgcgagacacccctattgtagtagtaccagctgctatccctactactactacatggacgtctggggcaaagggaccacggtcaccgtctcctca

SEQ ID NO: 13807 - DNA, 319 bp, Homo sapiens
  source 1..319: mol_type = other DNA
cactgtctctggtggctccgtcagcactagtagttactactggggctggatccgccagcccccagggcgggggctggagtggattgggagtatctattatagtgggagcacctactacagcccgtccctcaagagtcgagtcaccatatccgtagacacgtccagggaccagttctccctgaagctgaggtctgtgaccgccgcagacacggctgtgtattactgtgcgagacacccctattgtagtagtaccagctgctatccatactactactacatggacgtctggggcaaagggaccacggtcaccgtctcctca

SEQ ID NO: 13808 - DNA, 319 bp, Homo sapiens
  source 1..319: mol_type = other DNA
cactgtctctggtggctccatcagcactagtagttactactggggctggatccgccagtccccagggaaggggctggagtggattgggagtatttattatagtgggagcacctactacaacccgtccctcaagagtcgagtctccatatccgtacacacgtccaaggaccagttctccctgaaggtgatctctgtgaccgccgcagacacggctgtgtattactgtgcgagacacccctattgtagtagtaccagctgctatccctactactactacatggacgtctggggcaaagggaccacggtcaccgtctcctca

SEQ ID NO: 13809 - DNA, 304 bp, Homo sapiens
  source 1..304: mol_type = other DNA
cactgtctctggtggctccgtcagaagttctggttactacttgagctggatccggcagcccccagggaagggactggagttcattgggcatatatcttacggtgggagcacctactacaacccctccctcaggagtcgagtcaccatatccgtagacacgtccaagacccagctctccctgcatctgaattctgtgaccgctgcggacacggccgtgtattactgtggaatgtctgataggagtggttcctctttcgtggagtttgattactggggccagggaaccctggtcaccgtctcctca

SEQ ID NO: 13810 - DNA, 304 bp, Homo sapiens
  source 1..304: mol_type = other DNA
cactgtctctggtggctccgtcagaagttctggttactacttgagctggatccggcagcccccagggaagggactggagttcattgggcatatatcttacggtgggagcacctactacaacccctccctcaggagtcgagtcaccatatccgtagacacgtccaagacccagctctccctgcatctgaattctgtgaccgctgcggacacggccgtgtattactgtggaatgtctgataggagtggttcttctttcgtggagtttgattactggggccagggaaccctggtcaccgtctcctca

SEQ ID NO: 13811 - DNA, 304 bp, Homo sapiens
  source 1..304: mol_type = other DNA
cactgtctctggtggctccgtcagaagttctggttactatttgagctggatccggcagcccccagggaagggactggagttcattgggcatatatcttacggtgggagcacctactacaacccctccgtcaggagtcgagtcaccatatccgtagacacgtccaagacccagctctccctgcatctgaattctgtgaccgctgcggacacggccgtgtattactgtggaatgtctgataggagtggttcctctttcgttgagtttgattactggggccagggaaccctggtcaccgtctcctca

SEQ ID NO: 13812 - DNA, 304 bp, Homo sapiens
  source 1..304: mol_type = other DNA
cactgtctctggtggctccgtcagaagttctggttactacttgagctggatccggcagcccccagggaagggactggagttcattgggcatatatcttacggtgggagcacctactacaacccctccctcaggagtcgagtcaccatatccgtagacacgtccaagacccagctctccctgcatctgaattctgtgaccgctgcggacacggccgtctattactgtggaatgtctgataggagtggttcttctttcgtggagtttgattactggggccagggaaccctggtcaccgtctcctca

SEQ ID NO: 13813 - DNA, 304 bp, Homo sapiens
  source 1..304: mol_type = other DNA
cactgtctctggtggctccgtcagaagttctggttactacttgagctggatccggcagcccccagggaagggactggagttcattgggcatatatctttcggtgggagcacctactacagcccctccctcaggagtcgggtcaccatgtccgtcgacacgtccaagacccagctctccctgcatctgaattctgtgaccgctgcggacacggccgtgtattactgtggaatgtctgataggagtggttcctctttcgtggagtttgattactggggccagggaaccctggtcaccgtctcctca

SEQ ID NO: 13814 - DNA, 304 bp, Homo sapiens
  source 1..304: mol_type = other DNA
cactgtctctggtggctccgtcagaagttctggttactacttgagctggatccggcagcccccagggaagggactggagttcattgggcatatatcttacggtgggagcacctactacaatccctccctcaggagtcgagtcaccatatccgtagacacgtccaagacccagctctccctgcatctgaattctgtgaccgctgcggacacggccgtgtattactgtggaatgtctgataggagtggttcttctttcgtggagtttgattactggggccagggaaccctggtcaccgtctcctca

SEQ ID NO: 13815 - DNA, 277 bp, Homo sapiens
  source 1..277: mol_type = other DNA
cactgtctctggtgactccatgagaacttcgtactggtcctggatccgccagcccccggggaagggactggagtggattggctatatctattacagtggtaccaccaactacaacccctccctcaacaatcgagtcaccatatcagtagacacgtccaagaatcagttctccctgaaactgagctctgtgacctctgcggacacggccatgtatttctgtgcgagagaggggcctgatggctactggggccagggaaccctggtcaccgtctcctca

SEQ ID NO: 13816 - DNA, 277 bp, Homo sapiens
  source 1..277: mol_type = other DNA
cactgtgtctggtgtctccctcagaagtagttactggagctggatccgccagcccccggggaagggactggagtggattgggcgtatgtattacagtgggagcaccgactacaacccctccctcaatggtcgagtcaccatatcagtagacacgtctaagaaccagttctccctgaagttgatctctgtgaccgctgcggacacggccgtgtattactgtgcgagagaggggcctgatggctattggggccagggaaccctggtcaccgtctcctca

SEQ ID NO: 13817 - DNA, 277 bp, Homo sapiens
  source 1..277: mol_type = other DNA
cactgtctctggtgactccctcagaagtagttactggagctggatccgccagcccccggggaagggactggagtggattgggcatatttattacagtgggagcaccgactacaacccctccctcaatggtcgagtcaccatatcagtagacacgtctaagaaccagttctccctgaagttgatctctgtgaccgctgcggacacggccgtgtattactgtgcgagagaggggcctgatggctactggggccagggaaccctggtcaccgtctcctca

SEQ ID NO: 13818 - DNA, 277 bp, Homo sapiens
  source 1..277: mol_type = other DNA
cactgtctccggtgactccctcaggagttcctactggagctggatccgccagcccccgggtaagggactggagtggattggatatatctattacagtgggagcaccgactacaacccctccctcagcagccgagtcaccatatcagtagacacgtccaagaaccagttttccctgaagctgcgctctgtgaccgctgcggacaccgctgtctattactgtgcgagagaggggcctgatggctactggggccagggaaccctggtcaccgtctcctca

SEQ ID NO: 13819 - DNA, 277 bp, Homo sapiens
  source 1..277: mol_type = other DNA
cactgtctctggtgtctccctcagaagtagttactggagctggatccgccagcccccggggaagggactggagtggattgggcgcatgtattacagtgggagcaccgactacaacccctccctcaatggtcgagtcaccatatcagtagacacgtctaagaaccagttctccctgaagttgatctctgtgaccgctgcggacacggccgtgtattactgtgcgagagaggggcctgatggctactggggccagggaaccctggtcaccgtctcctca

SEQ ID NO: 13820 - DNA, 277 bp, Homo sapiens
  source 1..277: mol_type = other DNA
cactgtctctggtgtctccctcagaagtagttactggagctggatccgccagcccccggggaagggactggagtggattgggcgtatgtattacagtgggagcaccgactacaacccctccctcaatggtcgagtcaccatatcagtagacacgtctaagaaccagttctccctgaagttgatctctgtgaccgctgcggacacggccgtgtattactgtgcgagagaggggcctgatggctactggggccagggaaccctggtcaccgtctcctca

SEQ ID NO: 13821 - DNA, 277 bp, Homo sapiens
  source 1..277: mol_type = other DNA
cactgtctctggtgactccctcaggagttcctactggagttggatccgccagcccccggggaagggactggagtggattggatatatctattacagtgggagcaccgactacaacccctccctcagcagtcgagtcaccatatcagtagacacgtccaagaaccagttctccctgaagctgcgctctgtgaccgctgcggacaccgctgtctattactgtgcgagagaggggcctgatggctactggggccagggaaccctggtcaccgtctcctca

SEQ ID NO: 13822 - DNA, 277 bp, Homo sapiens
  source 1..277: mol_type = other DNA
caccgtctctggtgactccctcagaagtagctactggagctggatccgccagcccccggggaagggactggagtggattgggtatatctattacagtgggaccaccgactacaacccctccctcaatagtcgagtcaccatatcaatagagacgtccaagaatcagttctccctgaagctgatctctgtgaccgcagcggacacggccgtgtattattgtgcgagagaggggcctgatggctactggggccagggaaccctggtcaccgtctcctca

SEQ ID NO: 13823 - DNA, 277 bp, Homo sapiens
  source 1..277: mol_type = other DNA
cactgtctctggtgtctccctcggaagtagttactggagctggatccgccagcccccggggaagggactggagtggattgggcgtatgtattacagtgggagcaccgactacaacccctccctcaatggtcgagtcaccatatcagtagacacgtctaagaaccagttctccctgaagttgatctctgtgaccgctgcggacacggccgtgtattactgtgcgagagaggggcctgatggctactggggccagggaaccctggtcaccgtctcctca

SEQ ID NO: 13824 - DNA, 277 bp, Homo sapiens
  source 1..277: mol_type = other DNA
cactgtctctggtgactccctcaggacttcctactggagctggatccgccagtccccggggaagggactggagtggattggatatatctattacactgggaccaccgactacaacccctccctcagcagtcgagtcagcatatcaatagacacgtccaagaaccagttctccctgaagctgcgctctgttaccgctgcggacaccgctgtctattattgtgcgagagaggggcctgatggctactggggccagggaaccctggtcaccgtctcctca

SEQ ID NO: 13825 - DNA, 292 bp, Homo sapiens
  source 1..292: mol_type = other DNA
tgcagcctctggattcaccttcagtagctactggatgcactgggtccgccaagctccagggaaggggctggtgtgggtctcacgtattaatagtgatgggagtagcacaatatacgcggactccgtgaagggccgattcaccatctccagagacaacgccaagaacacgctgtatctgcaaatgaacagtctgagagccgaggacacggctgtgtattactgtgcaagaacgtattctgttgtaagcccctttgactattggggccagggaaccctggtcaccgtctcctca

SEQ ID NO: 13826 - DNA, 292 bp, Homo sapiens
  source 1..292: mol_type = other DNA
tgcagcctctggattcacgttcagtaattactggatgcactgggtccgccaagctccagggaaggggctggtgtgggtctcacgtattgatagtgatgggagtggcacaatatacgcggactccgtgaagggccgattcaccgtctccagagacaacgccaagaacacgctgtatctgcaaatgaacagtctgagagccgaggacacggctgtttattactgtgcaagaacgtattctgttgtaagcccctttgactattggggccagggaaccctggtcaccgtctcctca

SEQ ID NO: 13827 - DNA, 313 bp, Homo sapiens
  source 1..313: mol_type = other DNA
cagtgtctctggtgggcccatcactggttactattggggctgggtccggcaggccccagggaagggactggaatggattggctatgtgtattatagtgggaccaccaagtacaacccctccctcagaggtcgagttagcatgtccgtcggcccctctgcgacccagttctcactgcgtctgaggtctatgaccgccgcggacacggccgtctactattgtgtgagactcgaccttgggaactacgatggttcggggactcgattcagacagtttgcctactggggccagggagccccggtcaccgtctcctca

SEQ ID NO: 13828 - DNA, 313 bp, Homo sapiens
  source 1..313: mol_type = other DNA
cagtgtctctggtgggcccatcactggttactattggggctgggtccggcaggccccagggaagggactggaatggattggctatgtgtattatagtgggaccaccaagtacaacccctccctcagaggtcgagttagcatgtccgtcggcccctctgcgacccagttctcactgcgtctgaggtctctgaccgccgcggacacggccgtctactattgtgtgagactcgaccttgggaactacgatggttcggggactcgattcagacagtttgcctactggggccagggagccccggtcaccgtctcctca

SEQ ID NO: 13829 - DNA, 313 bp, Homo sapiens
  source 1..313: mol_type = other DNA
cactgtctctggtgggcccatcactggttattattggggctgggtccggcagcccccagggaagggactggagtggattggctatgtctattacagtgggaccaccaagtacaatccctccctcagaggtcgagttaccgtgtccgtgggcccgtctgccacccagttctcactgggtctgaggtctgtgaccgccgcggacacggccgtctattattgtgtgagactcgacctaggaaattacgatggttcggggactcgattcagacagtttgcctactggggccagggagccctggtcaccgtctcctca

SEQ ID NO: 13830 - DNA, 313 bp, Homo sapiens
  source 1..313: mol_type = other DNA
tgcagcctctggtttcaaatttgatgagtatgtcatttcgtgggtccgtcagactaaagggaagggtctggagtgggtctctcacattagtggcgatgggcgctacaccttttatatagactctgtgaagggccggttcaccatctccagagacaacaccaagaagtccctgttcttgcaaatggatggtctgaagactgaagacaccgccgtttatttttgtgcaaaaggacccatgtggttcggggggaccagtcgccccgggtggtacctggacgtctggggcaaaggatctccggtcaacgtctccgca

SEQ ID NO: 13831 - DNA, 313 bp, Homo sapiens
  source 1..313: mol_type = other DNA
tgcagcctctggattcacatttgatgaacatgtcattacctgggtccgtcaaattaaagggaagggtctggagtgggtctctcatattagtggagatggtcgctacaccttttacatagactctgtgaagggccgattcaccatctccagagacaacaccaggaactccctgtttttgcaaatgaacagtctgaaacctgaagactccgccgtatattattgtgcaaaaggacccatgtggttcggggggaccagtcgccccgggtggtacctggacgtctggggcaaagggtctccggtcaccgtctccgca

SEQ ID NO: 13832 - DNA, 313 bp, Homo sapiens
  source 1..313: mol_type = other DNA
cactgtctctggtggctccatcagcagtagtaattactactggggctggatccgccagccccccgggaaggggctggagtggattggcagtatctattatagtgggagtacctactacaacccgtccctcaagagtcgagtcaccatatccgtagacacgtccaagaaccagttctccctgaagctgagctctgtgaccgccgcagacacggctgtgtattactgtgcgagacattggtccttcggtgatgttgactggttcaaaggttggttcgacccctggggccagggaaccctggtcaccgtctcctca

SEQ ID NO: 13833 - DNA, 313 bp, Homo sapiens
  source 1..313: mol_type = other DNA
cactgtctctggtggctccatcagcagtagtaattactactggggctggatccgccagcccccagggaaggggctggagtggattgggagtatctattatagtgggagtacctactacaacccgtccctcaagagtcgagtcagtatatccgtagacacgtccaagaagcagttctccctgaagctgagctctgtgaccgccgcagacgcggctatatattactgtgcgagacattggtccttcggtgatgttgactggttcaaaggttggttcgacccctggggccagggaaccctggtcaccgtctcctca

SEQ ID NO: 13834 - DNA, 292 bp, Homo sapiens
  source 1..292: mol_type = other DNA
cgctgtctctggcggctccatcaccagtaactggtggaattgggtccgccagcccccagggaagggcctggagtggattggagaaatccttcatactgggagcgccaactacaacccgtccctcatgagtcgggtcaccatatcagtggacacgtccaagaacctgctctccctgaagctgagctctgtgaccgccgcggacacggccgtctattactgtgcgcgaatcggatacagtggctttggctgtagtgattactggggccagggaaccctggtcaccgtctcctca

SEQ ID NO: 13835 - DNA, 292 bp, Homo sapiens; identical to SEQ ID NO: 13834
  source 1..292: mol_type = other DNA

SEQ ID NO: 13836 - DNA, 292 bp, Homo sapiens
  source 1..292: mol_type = other DNA
cgctgtttctggcggctccatcaccaggaactggtggaattgggtccgccagtccccagggaagggcctggagtggattggagaaatccttcattctgggagccccaactacaacccgtccctcatgagtcgagtcaccatatcagtggacacgtccaagaacttactgtccctgaaaatgatttctgtgaccgccgcggacacggccgtctattattgtgcgcgaatcggatacagtggctttggctgtagtgattactggggccagggaaccctggtcaccgtctcctca

SEQ ID NO: 13837 - DNA, 292 bp, Homo sapiens
  source 1..292: mol_type = other DNA
cgctgtttctggcggctccatcaccaggaactggtggaattgggtccgccagtccccagggaagggcctggagtggattggagaaatccttcattctgggagcgccaactacaacccgtccctcatgagtcgagtcaccatatcagtggacacgtccaagaacttactgtccctgaaaatgaattctgtgaccgccgcggacacggccgtctattattgtgcgcgaatcggatacagtggctttggctgtagtgattactggggccagggaaccctggtcaccgtctcctca

SEQ ID NO: 13838 - DNA, 292 bp, Homo sapiens
  source 1..292: mol_type = other DNA
cgctgtctctggtggctccatcaccagtaactggtggaattgggtccgccagcccccagggaaggggctggagtggattggggagatccttcatactgggagcgccaactacaacccgtccctcatgagccgtgtcaccatatcagtggacaagtccaagaaccagctctccctgaagctgagctctgtgaccgccgcggacacggccgtctattactgtgcgcgaatcggatacagtggctttggctgtagtgattactggggccagggaaccctggtcaccgtctccgca

SEQ ID NO: 13839 - DNA, 310 bp, Homo sapiens
  source 1..310: mol_type = other DNA
tacagcctctggattcacctttagtgattattggatgacttgggtccgccaggctccagggaaggggctggagtgggtggccaacataaggggagatggaagtgaggataactatgtggactctgtgaagggccgattcaccatctccagagacaacgccaagaagtcagtatatctccaaatgaacagtctgagagccggcgacacgggcatgtattactgtgcgagagtagattgtggttctataggctgccaaggccgggacgggttcgacccctggggccagggaatccaggtcaccgtctcctca

SEQ ID NO: 13840 - DNA, 310 bp, Homo sapiens
  source 1..310: mol_type = other DNA
tacagcctctggattcacctttagtaattattggatgacttgggtccgccaggctccagggaaggggctggagtgggtggccaacataaggggagatggaagtgaggaaaagtatgtggactctgtgaagggccgattcaccatctccagagacaacgccaagaactcagtatatctccaaatgaacagtctgagagccggcgacacgggcatgtattactgtgcgagagtagattgtggttccataggctgccaaggccgggacgggttcgacccctggggccagggaaccctggtcaccgtctcctca

SEQ ID NO: 13841 - DNA, 310 bp, Homo sapiens
  source 1..310: mol_type = other DNA
tacagcctctggattcacctttagtaattattggatgacttgggtccgccaggctccagggaaggggctggagtgggtggccaacataaggggagatggaagtgaggaaaagtatgtggactctgtgaagggccgattcaccatctccagagacaacgccaagaactcagtatatctccaaatgaacagtctgagagccggcgacacgggcatgtatttctgtgcgagagtagattgtggttccataggctgccaaggccgggacgggttcgacccctggggccagggaaccctggtcaccgtctcctca

SEQ ID NO: 13842 - DNA, 310 bp, Homo sapiens
  source 1..310: mol_type = other DNA
tacagcctctggattcacctttagtaattattggatgacttgggtccgccaggctccagggaaggggctggagtgggtggccaacataaggggagatggaagtgaggaaaagtatgtggactctgtgaagggccgattcaccatctccagagacaacgccaagaactcagtatatctccaaatgaacagtctgagagccgacgacacgggcatgtattactgtgcgagagtagattgtggttccataggctgccaaggccgggacgggttcgacccctggggccagggaaccctggtcaccgtctcctca

SEQ ID NO: 13843 - DNA, 310 bp, Homo sapiens
  source 1..310: mol_type = other DNA
tacagcctctggattcaccttcagtagttattggatgacttgggtccgccaggctccagggaaggggctggagtgggtggccagcattaggggagatggaagtgagcaaaggtttgtggactccgtgaagggccgattcaccatttccagagacaacgccatgaaacaagtgtatctccagatgaacaatctgagagccggcgacacgggcatgtattactgtgcgagagtagattgtggttctataggctgccaaggccgggacgggttcgacccctggggccagggaaccctggtcaccgtctcctca

SEQ ID NO: 13844 - DNA, 310 bp, Homo sapiens
  source 1..310: mol_type = other DNA
tacagcctctggattcacctttggtaattattggatgacttgggtccgccaggctccagggaaggggctggagtgggtggccaacataaggggagatggaagtgaggaaaagtatgtggactctgtgaagggccgattcaccatctccagagacaacgccaagaactcagtatatctccaaatgaacagtctgagagccgacgacacgggcatgtattactgtgcgagagtagattgtggttccataggctgccaaggccgggacgggttcgacccctggggccagggaaccctggtcaccgtctcctca

SEQ ID NO: 13845 - DNA, 310 bp, Homo sapiens
  source 1..310: mol_type = other DNA
tacagcctctggattcaccttcagtagttattggatgacttgggtccgccaggctccagggaaggggctggagtgggtggccagcattaggggagatggaagtgagcaaaggtttgtggactccgtgaagggccgattcaccatttccagagacaacgccatgaaacaagtgtatctccagatgaacaatccgagagccggcgacacgggcatgtattactgtgcgagagtagattgtggttctataggctgccaaggccgggacgggttcgacccctggggccagggaaccctggtcaccgtctcctca

SEQ ID NO: 13846 - DNA, 312 bp, Homo sapiens
  source 1..312: mol_type = other DNA
gcttctggttacacctttaccacatatggtatcagctgggtgcgacaggcccctggacaagggcttgagtggatgggctggatcagagttcacaacgctgacgtaaagttgacacagaagttccggggcagagtcagcatgaccacagacacagccacgagcacagcctacatggaactgacgagcctgaaatctgacgacacggccgtgtattactgtgcgagaggtcggccccatttttgtagtggtacgtgctatccagatgatgcttttagtatctggggccaagggacaatggtcatcgtctcttca

SEQ ID NO: 13847 - DNA, 312 bp, Homo sapiens
  source 1..312: mol_type = other DNA
gcttctggttacacctttaccacatatggtatcacctgggtgcgacaggcccctggacaagggcttcaatggatgggctggatcagagttcacaacgctgacgtaaagttgacacagaagttccggggcagagtcagcatgaccacagacacagccacgagcacagcctacatggaactgacgagcctgaaatctgacgacacggccgtgtattactgtgcgagaggtcggccccatttttgtagtggtacgtgctatccagatgatgcttttagtatctggggccaagggacaatggtcatcgtctcttca

SEQ ID NO: 13848 - DNA, 312 bp, Homo sapiens
  source 1..312: mol_type = other DNA
gcttctggttacatctttacaacatatggtatcagctgggtgcgacaggcccctggacaagggcttgagtggatgggctggatcagagttcacaacgctgacgtaaagttgacacagaagttccggggcagagtcagcatgaccacagacacagccacgagcacagccaacatggaactgacgagcctgaaatctgacgacacggccgtgtattactgtgcgagaggtcggccccatttttgtagtggtacgtgctatccagatgatgcttttagtatctggggccaagggacaatggtcatcgtctcttca

SEQ ID NO: 13849 - DNA, 312 bp, Homo sapiens
  source 1..312: mol_type = other DNA
gcctctggttacacctttaccacatatggtatcagctgggtgcgacaggcccctggacaagggcttgagtggatgggctggatcagagttcacaacgctgacgtaaagttgacacagaagttccggggcagagtcagcatgaccacagacacagccacgagcacagcctacatggaactgacgagcctgaaatctgacgacacggccgtgtattactgtgcgagaggtcggccccatttttgtagtggtacgtgctatccagatgatgcttttagtatctggggccaagggacaatggtcatcgtctcttca

SEQ ID NO: 13850 - DNA, 289 bp, Homo sapiens
  source 1..289: mol_type = other DNA
cactgtctctggtggctccatcagcagtggtagttactactggaactggatccgccagcacccagggaagggcccggagtacattgggtacatctcttacactgggagcacctactacaacccgtccctcaagagtcgaatcaccatctcagtagacacgtctaagaatcagttttccctgaagttgagctctgtgactgccgcggacacggccgtctattactgtgcgggattgacaccttactactttgactactggggccagggaaccctggtcaccgtctcctca

SEQ ID NO: 13851 - DNA, 289 bp, Homo sapiens
  source 1..289: mol_type = other DNA
cactgtctctggtggctccatcagcagtggtagttactactggaactggatccgccagcacccagggaagggcccggagtacatagggtacatctcttacactgggagcacctactacaacccgtccctcaagagtcgaatcaccatgtcagtagacacgtctaagaatcagttttccctgaagttgagttctgtgactgccgcggacacggccgtctattactgtgcgggattgacaccttactactttgactactggggccagggaaccctggtcaccgtctcctca

SEQ ID NO: 13852 - DNA, 289 bp, Homo sapiens
  source 1..289: mol_type = other DNA
cactgtctctggtggctccatcagcagtggtagttactactggaactggatccgccagcacccagggaagggcccggagtacattgggtacatctcttacactgggagcacctactacaacccgtcccccaagagtcgaatcaccatctcagtagacacgtctaagaatcagttttccctgaagttgagctctgtgactgccgcggacacggccgtctattactgtgcgggattgacaccttactactttgactactggggccagggaaccctggtcaccgtatcctca

SEQ ID NO: 13853 - DNA, 298 bp, Homo sapiens
  source 1..298: mol_type = other DNA
tgcagcctctggattcacctttaatatctattggatgagctgggtccgccaggctccagggaaggggctggagtgggtggccagcataaaggaagatggaagtgagaaatactatgtggactctgtgaagggccgattcaccatctccagagacaacgccaagaactcactgtatctgcaaatgaacagcctgagagccgaggacacggccgtgtattactgtgcgagagatgggtggcgtgggagctacatattttttgactactggggccaaggaaccctggtcaccgtctcctca

SEQ ID NO: 13854 - DNA, 298 bp, Homo sapiens
  source 1..298: mol_type = other DNA
tgcagcctctggattcacctttaatatctattggatgagctgggtccgccaggctccagggaaggggctggagtgggtggccagtataaaggaagatggaagtgagaaatactatgtggactctgtgaagggccgattcaccatctccagagacaacgccaagaactcactgtatctgcaaatgaacagcctgagagccgaggacacggccgtgtattactgtgcgagagatgggtggcgtgggagctacatattttttgactactggggccaaggaaccctggtcaccgtctcctca

SEQ ID NO: 13855 - DNA, 301 bp, Homo sapiens
  source 1..301: mol_type = other DNA
tgcagtctctggattcaccctccgtgaccgccacatggactgggtccgccagccctcagggaaggggctggagtggattgcccgttccagaaatgaagctaatggttacaccacagaatacgccgcgtctgtgaaaggcagagtcaccatctcaagagatgattcaagagactcattgtatctccaactgaacagcctgaagatcgaggacacggccgtctattactgcgctagagtcgaaggggctactgggggaaatcatgacttttggggccagggaaccctggtcaccgtgtcctca

SEQ ID NO: 13856 - DNA, 301 bp, Homo sapiens
  source 1..301: mol_type = other DNA
tgcagtctctggattcaccctccgtgaccgccacatggactgggtccgccagccctcagggaaggggctggagtggattgcccgttccagaaatgaagctaatggttacaccacagaatacgccgcgtctgtgaaagacagagtcaccatctcaagagatgattcaagagactcattgtatctccaactgaacagcctgaagatcgaggacacggccgtctattactgcgctagagtcgaaggggctactgggggaaatcatgacttttggggccagggaaccctggtcaccgtgtcctca

SEQ ID NO: 13857 - DNA, 301 bp, Homo sapiens
  source 1..301: mol_type = other DNA
tgcagcctctggattcaccctcagtgaccgccacatggactgggtccgccagacttcagggaaggggctggagtgggttggccgttccagaaataaagctaatagttacaccacagaatacgccgcgtctgtgaaaggcagagtcaccatctcaagagatgattcaagaaactcattgtatctgcaactgaacagcctgaaaaccgaggacacggccgtctattactgcgctagagtcgaaggagctactgggggaaatcatgacttctggggccagggaaccctggtcaccgtgtcctca

SEQ ID NO: 13858 - DNA, 288 bp, Homo sapiens
  source 1..288: mol_type = other DNA
gtttccgtctacaccctcactgaattatccatacactgggtgcgacaggctcctggaaaaggtcttgagaggatgggaggttctgatcctaaaaatggtgaaggaatcttcgcacagaacttccagggccgactcatcctgaccgaggacacatctacaaacacagcctacatggagctgagcagcctgagatctgacgacacggccatctattactgtgcagcaagcccctatgatagtagtggttattccctctggggccagggaaccctggtcaccgtctcctca

SEQ ID NO: 13859 - DNA, 288 bp, Homo sapiens
  source 1..288: mol_type = other DNA
gtttccgtctacaccctcagtgaattatccatccactgggtgcgacaggctcctggaaaagggcttgagaggatgggaggttctgatcctaaaaatggtgaaggaatcttcgcacagaagttccagggcagactcatcttgaccgaggacacatctacagacacagtcttcatggagctgagcggcctgagatctgaggacacggccatgtattactgtgcagcaagcccctatgatagtagtggttattccctctggggccagggaaccctggtcaccgtctcctca

SEQ ID NO: 13860 - DNA, 288 bp, Homo sapiens
  source 1..288: mol_type = other DNA
gtttccggatacaccctcactgagttatccctgcactgggtgcgacaggctcctggaaaggggcttgaattagtgggaggtcgtgatcctaaaaatggtgaaacactcgacgcgcagaggttcaaggacagagtcaccctgaccgaggacacatctacagacacagcctacatggagctgagcagcctgagatctgaggacacggccgtctattactgtgcagcaagcccctatgatagtagtggctattccctgtggggccagggaaccctgctcaccgtctcttca

SEQ ID NO: 13861 - DNA, 288 bp, Homo sapiens
  source 1..288: mol_type = other DNA
gtttccggatacaccctcactgagttatccctgcactgggtgcgacaggctcctggaaaggggcttgaattagtgggaggtcgtgatcctaaaaatggtgaaacactcgacgcgcagaggttcaaggacagagtcaccctgaccgaggacacatctacagacacagcctacatggagctgagcagcctgagatctgaggacacggccgtctattactgtgcagcaagcccctatgatagtagtggctattccttgtggggccagggaaccctgctcaccgtctcttca

SEQ ID NO: 13862 - DNA, 288 bp, Homo sapiens
  source 1..288: mol_type = other DNA
gtttccggatacaccctcactgagttatccctgcactgggtgcgacaggctcctggaaaggggcttgaattagtgggaggtcgtgatcctaaaactggtgaaacactcgacgcgcagaggttcaaggacagagtcaccctgaccgaggacacatctacagacacagcctacatggagctgagcagcctgagatctgaggacacggccgtctattactgtgcagcaagcccctatgatagtagtggctattccttgtggggccagggaaccctgctcaccgtctcttca

SEQ ID NO: 13863 - DNA, 307 bp, Homo sapiens
  source 1..307: mol_type = other DNA
cactgtcactggtggctccgtcagtagttactactggagctgggtccggcagcccccagggaagggactggagtggcttggatatatctattacagcgggagtaccaactacaacccctccctcaggagtcgactcaccatatctctagacaagtccaagaaccagttctccctgaagatgaggtctgtgaccgccgcagacacggccgtgtatttttgtgcgagacgaatggttcgtgagaaccacggtaattactattactacatggactcctggggcaaagggaccacggtcatcgtctcctca

SEQ ID NO: 13864 - DNA, 307 bp, Homo sapiens
  source 1..307: mol_type = other DNA
cactgtcactggtggctccgtcagtagttactactggagctgggtccggcagcccccaggaaagggactggagtggcttggatatatctattacagcgggagtaccaactacaacccctccctcaggagtcgactcaccatgtctctagacaagtccaagaaccagttctccctgaacatgaggtctgtgaccgccgcagacacggccgtgtatttttgtgcgagacgaatggttcgtgagaaccacggtaattactattactacatggactcctggggcaaagggaccacggtcatcgtctcctca

SEQ ID NO: 13865 - DNA, 289 bp, Homo sapiens
  source 1..289: mol_type = other DNA
tgcagcctctggattcagtttcaacacctatgatctgaactgggtccgccaggctccagggaaggggctcgactggatttcgtatattagtagtagtgggagcaccactcactacgcagactctgtgaagggccgattcaccgtctccagagacaacgccaagaactcattgtttctgcaaatgaacagcctgagagccgacgacacggctctttattactgtgtcaccgacgtgagtacgtttgggagagtttggtggggccagggaaccctggtcgccgtctcctca

SEQ ID NO: 13866 - DNA, 289 bp, Homo sapiens
  source 1..289: mol_type = other DNA
tgcagcctctggattcagtttccacacttatgatctgaactgggtccgccaggctccagggaaggggctcgactggatttcgtatattagtagtagtgggagtaccactcactacgcagactctgtgaagggccgattcaccgtctccagagacaacgccaagaactcactgtttctgcaaatgaacagcctgagagccgacgacacggctgtttattactgtgtcaccgacgtgagtacgtttgggagagtctggtggggccagggaaccctggtcgccgtctcctca

SEQ ID NO: 13867 - DNA, 289 bp, Homo sapiens
  source 1..289: mol_type = other DNA
tgcagcctctggattcagtttccacacttatgatctgaactgggtccgccaggctccagggaaggggctcgaatggatttcgtatattagtagtagtgggagtaccactcactatgcagactctgtgaagggccgattcaccgtctccagagacaacgccaagaactcactgtttctgcaaatgaacagcctgagagccgacgacacggctctttattactgtgtcaccgacgtgagtacgtttgggagagtttggtggggccagggaaccctggtcgccgtctcctca

SEQ ID NO: 13868 - DNA, 295 bp, Homo sapiens
  source 1..295: mol_type = other DNA
tgcagcctctggattcatctttagtgactatgccatgagctgggtccgccaggctccagggaagggactggagtgggtctcagctattactggcagtggtgaaaccacctactacttagactccgttgagggccggttcaccatcgccagagacaattccaaggacacactatatctatatatgcgcagcctgagagccgaggacacggccatgtattactgtacgaaaaggaggtcgtctgctgggagttaccttgactactggggccagggttccctggtcaccgtctcctca

SEQ ID NO: 13869 - DNA, 295 bp, Homo sapiens
  source 1..295: mol_type = other DNA
tgtagcctctggattcgctttcggaaactatgccatgggctgggtccgccaggctccagggaaggggctggagtgggtctcagcaattactgccggtggtgagaccacatactacctagactccgtggagggccggttcaccatctacagagacaatttcaggaacacagtgtatctactcatgaattcccttagagccgaggacacggccacatatttttgtacgaaaaggaggtcgtctgctgggagctaccttgactactggggccagggaaccctggtcaccgtctcctca

SEQ ID NO: 13870 - DNA, 295 bp, Homo sapiens
  source 1..295: mol_type = other DNA
tgcagcctctggattcaccctcactggtcactggctgcattgggtccgccaagctccaggggagggcctggtgtggctctcacaaattactcctgatgggaggaccacaatttacgcggactacgtgaagggccgattcaccgtctccagagacgacgccaagaacacggtctttctgcaaatgaacagtttgagagtcgaggacacggctgtgtattattgtacaaggggttgcactacaaccacatgccccgcggatttgtggggccaagggacaacggtcatcgtctcttca

SEQ ID NO: 13871 - DNA, 295 bp, Homo sapiens; identical to SEQ ID NO: 13870
  source 1..295: mol_type = other DNA

SEQ ID NO: 13872 - DNA, 295 bp, Homo sapiens
  source 1..295: mol_type = other DNA
tgcagcctctggattcaccctcactggtcactggctgcattgggtccgccaagctgcaggggagggcctggtgtggctctcacaaattacgcctgatgggaggaccataatttacgcggactacgtgaagggccgattcaccgtctccagagacgacgccaagaacacggtctttctgcaaatgaacagtttgagagtcgaggacacggctgtgtattattgtacaaggggttgcactacaaccacatgccccgcggatttgtggggccaagggacaacggtcatcgtctcttca

SEQ ID NO: 13873 - DNA, 300 bp, Homo sapiens
  source 1..300: mol_type = other DNA
gcgtctgaatacaccttcgagacctatgggtttcactgggtgcgccaggcccccggacaaagtcttgagtggatgggatgggtcaaccctgtcaagtctctcacaagattttcgcagaagttccagggcagaatcaccttgggcacggacacctccgcgggtttcgtctatatggagttgaatagtctgacatcggaagacacggctgtttattattgtgcggcagttaagggaataattgcagccccgacgtactcctttgaccattggggccagggaaccctggtcaccgtctcctct

SEQ ID NO: 13874 - DNA, 300 bp, Homo sapiens
  source 1..300: mol_type = other DNA
gtgtctgaatccaccttccagacctatgggtttcactgggtgcgccaggcccccggacaaagtcttgagtggatgggatgggtcaaccctgtcaggtctctcacaagattttcgcagaagttccaagacagaatcaccttgggcacggacacctccgcgggtttcgtctatctggagttgagtagtctgacatcggaagacacggctgtttattattgtgcggcagttaagggaataattgcagccccgacgtattcctttgaccattggggccagggaaccctggtcacggtctcctct

SEQ ID NO: 13875 - DNA, 283 bp, Homo sapiens
  source 1..283: mol_type = other DNA
cgaagcctctggattccccttcagtgtctatgccatgaattgggtccgccaggctcccgggaagggactggagtggatttcatatattagtagtacttttgagattcactacgcagactctgtgaagggccgattcaccgtctccagagacagtgccaagaatacagtgtatctgcaaatgaacagcctgagagacgaggacacggctgtctattactgtgtgagagatcatcagtgggccctggactactggggccagggaaccctggtcaccgtctcctca

SEQ ID NO: 13876 - DNA, 283 bp, Homo sapiens
  source 1..283: mol_type = other DNA
tggagcctctggattctccttcagtacctatgccatgaactgggtccgccaggctcccgggaaggggctggagtggctttcatatattagtagtacttttgagatacactacggagactctgtgaagggccgattcaccgtctccagagacagtgccaggaactcagtgtatctgcagatgaacagcctgagagacgaggacacggctgtgtattactgtgtcagagatcatcagtgggccctggactactggggccagggaaccctggtcaccgtctcctca

SEQ ID NO: 13877 - DNA, 286 bp, Homo sapiens
  source 1..286: mol_type = other DNA
tgcagcctctggattcagcctcagtagttataacatgaactgggtccgccaggctccagggaaggggctggagtgggtctcatacattactactagtagtgagaccatatattacgcagactctgtgaagggccgattcaccatctccagagacaatggcaagaattcactgtatctgcaaatgaacagcctgagagacgaggacacggctgtatattattgtgtgagagatcatcaatgggcccttgactactggggccagggagccctggtcaccgtctcctca

SEQ ID NO: 13878 - DNA, 295 bp, Homo sapiens
  source 1..295: mol_type = other DNA
cactgtctctggtggctccatcactaattactactggagctggattcggcagcccccagggaagggactggaatggattgggtatatctattacactgggagcaccaattacaacccctccctcaagagtcgagtcaccatgtctgtagacacgtccaagaaccagttctccctgaagctgaagtctgtgaccgctgcggacacggccgtctatcactgtgcgagagggggggggtggctacaatttagtgcctttgatatctggggccaagggacaatggtcaccgtctcttca

SEQ ID NO: 13879 - DNA, 295 bp, Homo sapiens
  source 1..295: mol_type = other DNA
cactgtctctggtggctccatcactaattactactggagctggatccggcagcccccagggaagggactggaatggattgggtatatctattacactgggagcaccaattataacccctccctcaagagtcgagtcaccatgtctgtagacacgtccaagaaccagttctccctgaagctgagctctgtgaccgctgcggacacggccgtgtatcactgtgcgagaggggggggatggctacaatttagtgcctttgatatctggggccaagggacaatggtcaccgtctcttca

SEQ ID NO: 13880 - DNA, 295 bp, Homo sapiens
  source 1..295: mol_type = other DNA
cactgtctctggtggctccatcactaattactactggagctggatccggcagcccccagggaagggactggaatggattgggtatatctattacactgggagcaccaattacaacccctccctcaagagtcgagtcaccatgtctgtagacacgtccaagaaccagttctccctgaagctgagctctgtgaccgctgcggacacggccgtgtatcactgtgcgagaggggggggatggctacaatttagtgcctttgatatctggggccaagggacaatggtcaccgtctcttca

SEQ ID NO: 13881 - DNA, 295 bp, Homo sapiens
  source 1..295: mol_type = other DNA
cactgtctctggtggctccatcactaattactactggagctggatccggcagcccccagggaagggactgaaatggattgggtatatctattacactgggagcaccaattacaacccctccctcaagagtcgagtcaccatgtctgtagacacgtccaagaaccagttctccctgaagctgagctctgtgaccgctgcggacacggccgtgtatcactgtgcgagaggggggggatggctacaatttagtgcctttgatatctggggccaagggacaatggtcaccgtctcttca

SEQ ID NO: 13882 - DNA, 295 bp, Homo sapiens; identical to SEQ ID NO: 13880
  source 1..295: mol_type = other DNA

SEQ ID NO: 13883 - DNA, 292 bp, Homo sapiens
  source 1..292: mol_type = other DNA
tgtagcctcgggattcacctttggcttctatggcatgatctgggtccgccaggctccagggaaggggctggagcggatctcgagtatggataatcatattaatggtcataatgcatactacgcagactccgtgaagggccggttcaccatctccagagacaattctaagaacacactgtttctggaaatgaacagtctgagagtcgaggacacggccgtatattactgtgcgagaggaggtgggggctacatggacgtctggggccaggggaccacggtcaccgtctccaca

SEQ ID NO: 13884 - DNA, 292 bp, Homo sapiens; identical to SEQ ID NO: 13883
  source 1..292: mol_type = other DNA

SEQ ID NO: 13885 - DNA, 292 bp, Homo sapiens; identical to SEQ ID NO: 13883
  source 1..292: mol_type = other DNA

SEQ ID NO: 13886 - DNA, 286 bp, Homo sapiens
  source 1..286: mol_type = other DNA
tgcagcctctggattcacctttagcaactatggcatgatctgggtccgccaggctccagggaaggggctggagtgggcctcaggaattaatcccactggtagtaccacacactacgcagactccgtgaagggccggttcaccatctccagagacaattccaagagcacactgtctctgcaaatgaacagcctgagagccgaggacacggccgtatattactgtgcgagaggtggtggtggttacatggacgtctggggcaaagggaccacggtcaccgtctcctcc

SEQ ID NO: 13887 - DNA, 328 bp, Homo sapiens
  source 1..328: mol_type = other DNA
tgaggtctctggattcacttttaacacgtatgccatgagctgggtccgccaggctccagggaaggggctggagtgggtctccagtattagtgagagtggcagttattccagccactcagactccgtggagggccgcttcaccatctccagagacaattcccagaacacactatatctgcaaatggcgagcctgagagccgaggacgcggccgtctattactgtgcgaaaggtgggtcgaaactgtttcggggagtgacgatcagagctaagaactactactactacatggacgtctggggcaaggggacaacggtcaccgtctcctca

SEQ ID NO: 13888 - DNA, 328 bp, Homo sapiens
  source 1..328: mol_type = other DNA
tgaagtctctggattcacttttaacacctatgccatgagctgggtccgccaggctccggggaaggggctggagtgggtctccagtattagcgagagtggcagttactccagccactcagaccccgtggagggccggttcaccatctccagagacaattctcagagcacgctatatttgcaaatggagagcctgagagtcgaggacgcggccgtctattactgtgcgaaaggtgggtcgaaactgtttcggggagtgaccataagagctaagaactactactactacatggacgtctggggcaaagggacaacggtcaccgtctcctca

SEQ ID NO: 13889 - DNA, 280 bp, Homo sapiens
  source 1..280: mol_type = other DNA
tgcagcctctggattcacctttagcagttatgccatgagctgggtccgccaggctccagggaaggggctggagtggttctcaactgttgctattaatggtgccagcaccttctacgcagactctgtgacgggccggttcaccatctccagagacaactccaagaacatgctgtttctgcaaatgaacagcctgcgagacgaggacacggccgtatattactgtgcgagaggggggcagaccgactactggggccagggaaccctggtcaccgtctcctca

SEQ ID NO: 13890 - DNA, 277 bp, Homo sapiens
  source 1..277: mol_type = other DNA
ttcagcctctggattcacctttgccaagtatgccatgacctgggtccgccaggctccaggtcaggggctggagtggatctcaagtattgttattggtggtgccactttgtacgcagactccgtgaagggccgattcaccatctccagagacaattccaacaacaatctgtatctgcaaatgaacagcctgagagccgaagacacggccatatattattgtgcgagagggggacagactgactactggggccagggaaccctggtcaccgtctcctca

SEQ ID NO: 13891 - DNA, 295 bp, Homo sapiens
  source 1..295: mol_type = other DNA
tgcagcctctggatttacctttgtggattttgacatgagctgggtccgccagcctccggggaaggggctggagtgggtctcaacagttggtcttactggtggctacacagtctacgcagactccgtgaggggccggttctccatctccagagacaattccaagaacacactgtatttagaaatgaacagcctgagagccgaggacacggccatatattactgtgttaagcccccccgtggattcaacaatgcttcgtcagcctggggccagggaaccctggtcaccgtctcctca

SEQ ID NO: 13892 - DNA, 295 bp, Homo sapiens
  source 1..295: mol_type = other DNA
tgcagcctctggatttacctttgacaattatgacatgagctgggtccgccagactccagggagggggctggagtgggtctcagcgattggtcctagtggtacctacgcattctacgcagactccgtgaggggccgattcaccatctccagagacaatgtcaagaacacagtgtctctgcaaatgaacagcctgagagccgaggacacggccatctattactgtgtgaagcccccccgtggattcaacaatgcttcgtcagcctggggccagggaaccctggtcaccgtctcctca

SEQ ID NO: 13893 - DNA, 295 bp, Homo sapiens
  source 1..295: mol_type = other DNA
tgcagcctctggatttacctttgacaattatgacatgagctgggtccgccagactccagggagggggctggagtgggtctcagcaattggtcctagtggtacctacgcattctacgcagactccgtgaggggccgattcaccatctccagagacaatgtcaggaacacagtgtctctgcaaatgaacagcctgagagccgaggacacggccatctattactgtgtgaagcccccccgtggattcaacaatgcttcctcagcctggggccagggaaccctggtcaccgtctcctca

SEQ ID NO: 13894 - DNA, 295 bp, Homo sapiens
  source 1..295: mol_type = other DNA
tgcagcctctggctttacctttgtgaactttgacatgagctgggtccgccaggctccggggaaggggctggagtgggtctcagcagttggtcttactggtgtctacacagtctacgcagactccgtgaggggccggttcaccatctccaaagacaattccaggaacacagtatatctacaaatgaacagcctgagagccgaggacacggccatatattactgtgttaagcccccccgtggattcaacaatgcctcgtcagcctggggccagggaaccctggtcaccgtctcctca

SEQ ID NO: 13895 - DNA, 295 bp, Homo sapiens
  source 1..295: mol_type = other DNA
tgcagcctctggttttacctttgtgaattttgacatgagctgggtccgccaggctccggggaaggggctggagtgggtctcagcagttggtcttactggtgtctacacagtctatgcagactccgtgaggggccggttcaccatctccagagacaattccaagaacacagtatatctacaaatgaacagcctgagagccgaggacacggccatatattactgtgttaagcccccccgtggattcaacaatgcctcgtcagcctggggccagggagccctggtcaccgtctcctca

SEQ ID NO: 13896 - DNA, 295 bp, Homo sapiens
  source 1..295: mol_type = other DNA
tgcagcctctggatttacatttgtgaattttgacatgagttgggtccgccaggctccggggaaggggctggagtgggtctcatcagttggtcttactggtggctacacagtctacgcagactccgtgaggggccggttcaccatctccagagacaattccaagaacacagtatatctacaaatgaacagcctcagagccgacgacacggccatatattattgtgttaagcccccccgtggattcaacaatgcttcgtcagcctggggccagggaaccctggtcaccgtgtcctca

SEQ ID NO: 13897 - DNA, 295 bp, Homo sapiens
  source 1..295: mol_type = other DNA
tgcaggctctggttttacctttgtgaaatttgacatgagctgggtccgccaggctccggggaaggggctggagtgggtctcagcagttggtcttactggatcctacacagtctacgcagactccgtgaggggccggttcaccatctccagagacaattccaagaacacagtatatctacaaatgaacagcctgagagccgaggacacggccatatattactgtgttaagcccccccgtggattcaacaatgcctcgtcagcctggggccagggagccctggtcaccgtctcctca

SEQ ID NO: 13898 - DNA, 295 bp, Homo sapiens
  source 1..295: mol_type = other DNA
tgcagcctctggatttacctttgtggattttgacatgagctgggtccgccagcctccggggaaggggctggagtgggtctcaacagttggtcttactggtgcctacacagtctacgcagactccgtgaggggccggttctccatctccagagacaattccaggaacacagtatatttagaaatgaacagtttgagagccgaggacacggccatatattactgtgttaagcccccccgtggattcaacaatgcttcgtcagcctggggccagggaaccctggtcaccgtctcctca

SEQ ID NO: 13899 - DNA, 298 bp, Homo sapiens
  source 1..298: mol_type = other DNA
tgcagcgtctggattcacctttagcacctctgccatgagctgggtccgccaggctccagggaaggggctggagtgggtctcagttatttgtggcattgctgaaaacacattctacgcagactccgtgaagggccggtttattatgtccagaggcaatgcccagaacacactatatctacaaatgaacagcctgagagccgaggacacggccgtgtattactgtgcgaaactcaatggtgatagttgttactccccgattgactactggggccagggagccctggtcatcgtctcctca

SEQ ID NO: 13900 - DNA, 298 bp, Homo sapiens; identical to SEQ ID NO: 13899
  source 1..298: mol_type = other DNA

SEQ ID NO: 13901 - DNA, 298 bp, Homo sapiens
  source 1..298: mol_type = other DNA
tgcagcgtctggattcacctttagcacctctgccatgagctgggtccgccaggctccagggaaggggctggagtgggtctcagttatttgtggcattgctgaaaacacattctacgcagactccgtgaagggccggtttattatgtccagaggcaatgccgagaacacactatatctacaaatgaacggcctgagagccgaggacacggccgtgtattactgtgcgaaactcaatggtgatagttgttactccccgattgactactggggccagggagccctggtcatcgtctcctca

SEQ ID NO: 13902 - DNA, 298 bp, Homo sapiens
  source 1..298: mol_type = other DNA
tgcagcgtctggattcacctttagcacctctgccatgagctgggtccgccaggctccagggaaggggctggagtgggtctcagttatttgtggcattgctgaaaacacattctacgcagactccgtgaagggccggtttattatgtccagaggcaatgcccaaaacacactatatctacaaatgaacagcctgagagccgaggacacggccgtgtattactgtgcgaaactcaatggtgatagttgttactccccgattgactactggggccagggagccctggtcatcgtctcctca

SEQ ID NO: 13903 - DNA, 298 bp, Homo sapiens; identical to SEQ ID NO: 13902
  source 1..298: mol_type = other DNA

SEQ ID NO: 13904 - DNA, 298 bp, Homo sapiens
  source 1..298: mol_type = other DNA
tgcagcgtctggattcagctttagcacctctgccatgagctgggtccgccaggctccagggaaggggctggaatgggtctcagttatttgtggcattgctgaaaacacattctacgcagactccgtgaagggccggtttattatgtccagaggcaatgcccagaacacactatatctacaaatgaacagcctgagagccgaggacacggccgtgtattactgtgcgaaactcaatggtgatagttgttactccccgattgactactggggccagggagccctggtcatcgtctcctca

SEQ ID NO: 13905 - DNA, 280 bp, Homo sapiens
  source 1..280: mol_type = other DNA
tgtaggctctggattcacccttagcaactatgacatgaactgggtccgccaggctccagggaaggggctggagtgggtctcacgtattgagggtaatggtggtaacataaactacgcagactccgtgaagggccggttcaccatctccagagacaattccaagaacatgctgtttttgcaaatgaacagcctgagagccgaggacacggccgtatattactgtgcgagccctggtcgggatataggctggggccaagggacaatggtcaccgtctcttca

SEQ ID NO: 13906 - DNA, 280 bp, Homo sapiens
  source 1..280: mol_type = other DNA
tgtaggctctggattcacctttaccaactatgacataaactgggtccgccaggctccagggaaggggctggagtgggtctcacgtattgagggtaatggtggtaacataaactacgcagactccgtgaagggccggttcaccatcttcagagacaactccaagaacatggtgtttttgcaaatgaacagcctgagagtcgaggacacggccgtatattactgtgcgagccctggtcgggacataggctggggccaagggacaatggtcaccgtctcttca

SEQ ID NO: 13907 - DNA, 280 bp, Homo sapiens
  source 1..280: mol_type = other DNA
tgtaggctctggatttacctttgccaactatgacatgaactgggtccgccaggctccagggaaggggctggagtgggtctcacgtattgagggtaatggtggtaacataaactacgcagactccgtgaagggccggttcaccatctccagagacaattccagggacatggtgtcgctgcaaatgaacagcctgcgagtcgaggacacggccgtatattactgtgcgagccctggtcgggacataggctggggccaagggacaatggtcaccgtctcttca

SEQ ID NO: 13908 - DNA, 280 bp, Homo sapiens
  source 1..280: mol_type = other DNA
tgtaggctctggattcaaccttatcaactatgacatgaactgggtccgccaggctccagggaaggggctggagtgggtctcacgtattgagggtaatggtggtaacataaactacgcagactccgtgaagggccggttcaccatctccagagacaattccaagaacatggtgtttttgcaaatgaacagcctgagagtcgaggacacggccgtatatttctgtgcgagccctggtcgggacataggctggggccaagggacaatggtcaccgtctcttca

SEQ ID NO: 13909 - DNA, 307 bp, Homo sapiens
  source 1..307: mol_type = other DNA
cactgtctctggtggctccatcagtagttactactggagttggatccggcagcccccagggaagggactggagtggattgggtatatgtattatagtgggaacaccaactacaatccttccctcaagagtcgagtcaccatctcagtagacacgtccaagaaccagatctccctgaagctgagctctgtgaccgccgcagacacggccgtgtattactgtgcgagacacggggatttccggtttttggagtggttattgcccaattttgacatctggggccaagggacaatggtcaccgtctcttca

SEQ ID NO: 13910 - DNA, 307 bp, Homo sapiens
  source 1..307: mol_type = other DNA
cactgtctctggtggctccatcagtagttactactggagttggatccggcagcccccagggaagggactggagtggattgggtatatgtcttatagtgggaacaccaacttcaatccttccctcaagagtcgcatcaccatttcagtggacacgtccaagaaccagatctccctgaagctgagctctgtgaccgccgcagacacggccgtgtatttctgtgcgagacacggggatttccggtttttggagtggttattgcccaattttgacatctggggccaagggacaatggtcaccgtctcttca

SEQ ID NO: 13911 - DNA, 307 bp, Homo sapiens
  source 1..307: mol_type = other DNA
cactgtctctggtggctccatgagtagttactactggagttggatccggcagcccccagggaagggactggagtggattggatatatgtcttatagtgggaacaccaactacaatccttccctcaagagtcgagtcaccatctcagtagacacctccaagaaccggatctccctgaagttgagctctgtgaccgccgcagacacggccgtgtattactgtgcgagacacggggatttccggtttttggagtggttattgcccaattttgatatctggggccaagggacaatggtcaccgtctcttca

SEQ ID NO: 13912 - DNA, 307 bp, Homo sapiens; identical to SEQ ID NO: 13909
  source 1..307: mol_type = other DNA

SEQ ID NO: 13913 - DNA, 292 bp, Homo sapiens
  source 1..292: mol_type = other DNA
cactgtctctggtggctccatcaataattactactggacctggatccggcagcccccagggaagggactggagtggattggatatatgtctaacagtgggagtaccgactacaacccctccctcaagagtcgagtcaccatttcagttgacacatccaagaatcaattgtccctgaggctgagctctgtgacctctgcggacacggccgtgtattactgtgcgagagggggctatgctcacgcttggcattttgaccactggggccagggaaccctggtcaccgtctcgtct

SEQ ID NO: 13914 - DNA, 292 bp, Homo sapiens
  source 1..292: mol_type = other DNA
cactgtctctggtggctccgtcaataattactactggacctggatccggcagcccccagggaagggactggagtggattggatatatgtctaatagtgggagaaccgactaccacccctccctcaggagtcgagtcaccatttcagttgacacatctaagaatcaattgtccctgaggctgagctctgtgacctctgcggacacggccgtgtattactgtgcgagagggggctatgctcacgcttggcattttgaccactggggccagggaaccctggtcaccgtctcgtct

SEQ ID NO: 13915 - DNA, 292 bp, Homo sapiens
  source 1..292: mol_type = other DNA
cactgtctcgggtggctccatcaataattactactggacctggatccggcagcccccagggaagggactggagtggattggatatatgtctaacagtgggagtaccgactacaacccctccctcaagagtcgagtcaccatttcagttgacacatccaagaatcaattgtccctgaggctgagctctgtgacctctgcggacacggccgtgtattactgtgcgagagggggctatgctcacgcttggcattttgaccactggggccagggaaccctggtcaccgtctcgtct

SEQ ID NO: 13916 - DNA, 292 bp, Homo sapiens
  source 1..292: mol_type = other DNA
cactgtctctggtggctccatcaatgattactactggacctggatccggcagcccccagggaagggactggagtggattggatatatgtctaacagtgggagtgccgactacaacccctccctcaagagtcgagtcaccatttcagttgacacatccaagaaccaattgtccctgaggctgagctctgtgatctctgcggacacggccgtgtattattgtgcgagagggggctatgctcacgcttggcattttgaccactggggccagggaaccctggtcaccgtctcgtct

SEQ ID NO: 13917 - DNA, 292 bp, Homo sapiens; identical to SEQ ID NO: 13913
  source 1..292: mol_type = other DNA

SEQ ID NO: 13918 - DNA, 292 bp, Homo sapiens
  source 1..292: mol_type = other DNA
cactgtctctggtgactccatcaataattactactggacatggatccggcagcccccagggaagcgactggaatggattggatatatgtctaacagtgggagtaccgactacaacccctccctcaagagtcgagtcaccatttcagttgacacatccaagaatcaattgtccctgaggctgacgtctgtgacctctgcggacacggccgtgtattactgtgcgagaggtggctatgctcacgcttggcattttgaccactggggccagggaaccctggtcaccgtctcgtct

SEQ ID NO: 13919 - DNA, 295 bp, Homo sapiens
  source 1..295: mol_type = other DNA
cactgtctctggtggctccatcaacattacttactactggggctgggtccgccaggcccccgcgaagggactggagtggattgggagtatcttttatagtgggaacacctactacaacccgtccctcaagagtcgggtcatcatttccgtcgacacgtccaagaaccaattctccttgaacttgagttctgtgaccgcctcagacacggctctctattactgtgtgagacattcttccgcgacccacccgaactttgactactgggaccagggggccctggtcgccgtctcctca

SEQ ID NO: 13920 - DNA, 295 bp, Homo sapiens
  source 1..295: mol_type = other DNA
cagtgtctctggtggctccatcaacatcagttactactggggctgggtccgccaggccccagcgaagggactggagtggattgggagtatcttttacagtgggaacacctactacaacccgtccctcaagagtcgggtcatcgtttccgtcgacacgtccaagaaccggttctccttgaagttgagctctgtgaccgccgcagacacggctctgtattactgtgtgagacactcttccgcgacccacccgaactttgactactgggaccagggggccctggtcgccgtctcctca

SEQ ID NO: 13921 - DNA, 295 bp, Homo sapiens
  source 1..295: mol_type = other DNA
cagtgtctctggtggctccatcaacatcagttactactggggctgggtccgccagtccccagcgaagggactggagtggattgggagtatcttttacagtgggaacacctactacaacccgtccctcaagagtcgggtcatcatttccgtcgacacgtccaagaaccggttctccttgaagttgacctctgtgaccgccgcagacacggctctgtattactgtgtgagacattcttccgcgacccacccgaactttgactactgggaccagggggccccggtcgccgtctcctca

SEQ ID NO: 13922 - DNA, 292 bp, Homo sapiens
  source 1..292: mol_type = other DNA
tgaagcctctggattcacctttagcacctatggcatgagctgggtccgccaggctccagggaaggggctggagtgggtcgccggtattactaataccggtgttagaacaaactatagagactccgtgaagggccggttcaccatctccagagacaattccaagaacacgctgtttctgcaaatgaacagcctgggagccgaggacacggccctatattactgtacgaagcggaatactgccaatacttatgatgactattggggccggggaaccctggtcaccgtctcctca

SEQ ID NO: 13923 - DNA, 292 bp, Homo sapiens
  source 1..292: mol_type = other DNA
tgaaggctctggattcacctttagcacctatggcatgagctgggtccgccaggctccagggaaggggctggagtgggtcgccggtattactaataccggtgttagaacaaactatagagactccgtgaagggccggttcaccatctccagagacaattccaagaacacgctgtttctgcaaatgaacagcctgggagccgaggacacggccctatattactgtacgaagcggaatactgccaatacttatgatgactattggggccggggaaccctggtcaccgtctcctca

SEQ ID NO: 13924 - DNA, 292 bp, Homo sapiens
  source 1..292: mol_type = other DNA
tgaaggctctggattcacctttagcacctatggcatgagctgggtccgccaggctccagggaaggggctggagtgggtctccggtattactaataccggtgttagaacaagctatagaggctccgtgaagggccggttcaccatctccagagacaattccaagaacacgctgtttctgcaaatgaacagcctgggagccgaggacacggccctatattactgtacgaagcggaatactgccaatacttatgatgactattggggccggggaaccctggtcaccgtctcctca

SEQ ID NO: 13925 - DNA, 310 bp, Homo sapiens
  source 1..310: mol_type = other DNA
cactgtctctggtggctccgtcagcagtagtgattactactggggctggatccgccagcccccagggaaggggctggagtggattgggagtatctttaacagtgggagcacctactacaacccgtccctcatgagtcgagtcaccatatccatagacacgtccaagaaacagttctccctgaaggtgacctctgtgaccgccgcagacacggctgtgtattactgtgcgagacattcctcccaagatgactatggccccgggaatgcttttgatgtctggggccagggggcaatggtcaccgtctcttca

SEQ ID NO: 13926 - DNA, 310 bp, Homo sapiens
  source 1..310: mol_type = other DNA
cactgcctctggcggctccatcagcagtaataattactactggggctggatccgccagcccccagggaaggggctggagtggattgggagtatttttaacagtgggagcacctactacaacccgtccctcatgagtcgagtcaccatatccatagacacgtccaagagacagttttccctgaagctgagctctgtgaccgccgcagacacggctgtgtattactgtgcgagacattcctcccaagatgactatggccccgggaatgcttttgatgtgtggggccaagggacaatggtcaccgtctcttca

SEQ ID NO: 13927 - DNA, 301 bp, Homo sapiens
  source 1..301: mol_type = other DNA
tgcagcctctggattcaccttcagtagctattggatgagctgggtccgccaggctccagggaaggggctggagtgggtggccaacataaagcaagatggaagtgagacatactgtatagactctgtgaagggccgattcaccatctccagagacaacgccaagaactcactttatctgcaaatgaacagcctgagagccgaggacacggctgtgtattactgtgcgagggggacggagtggctggacgcctctgcggttggagactattggggccagggaaccctggtcaccgtctcctca

SEQ ID NO: 13928 - DNA, 301 bp, Homo sapiens
  source 1..301: mol_type = other DNA
tgcagcctctggattcaccttcagtaggtattggatgagctgggtccgccaggctccagggaaggggctggagtgggtggccaacataaagcaagatggaagtgagacatattgtatagactctgtgaagggccgattcaccatctccagagacaacgccaagaactcactttatctgcaaatgaacagactgagagccgaggacacggctgtatattactgtgcgagggggacggagtggctggacgcctctgcggttggagactattggggccagggaaccctggtcaccgtctcctca

SEQ ID NO: 13929 - DNA, 301 bp, Homo sapiens
  source 1..301: mol_type = other DNA
tgcagcctctggattcaccttcagtagatattggatgagctgggtccgccaggctccagggaaggggctggagtgggtggccaacataaagcaagatggaagtgagacatactgtatagactctgtgaagggccgattcaccatctccagagacaacgccaagaactcactttatctgcaaatgaacagcctgagagccgaggacacggctgtgtattactgtgcgagggggacggagtggctggacgcctctgcggttggagactattggggccagggaaccctggtcaccgtctcctca

SEQ ID NO: 13930 - DNA, 301 bp, Homo sapiens; identical to SEQ ID NO: 13929
  source 1..301: mol_type = other DNA

SEQ ID NO: 13931 - DNA, 301 bp, Homo sapiens
  source 1..301: mol_type = other DNA
tgcagcctctggattcaccttcagaagctattggatgagctgggtccgccaggctccagggaaggggctggagtgggtggccaacataaagcaagatggaagtgagacatactgtatagactctgtgaagggccgattcaccatctccagagacaacgccaagaactcactttatctgcaaatgaacagcctgagagccgaggacacggctgtgtattactgtgcgagggggacggagtggctggacgcctctgcggttggagactattggggccagggaaccctggtcaccgtctcctca

SEQ ID NO: 13932 - DNA, 301 bp, Homo sapiens
  source 1..301: mol_type = other DNA
tgcagcctctggattcaccttcagtaggtattggatgagctgggtccgccaggctccagggaaggggctggagtgggtggccaacataaagcaagatggaagtgagacatcctgtatagactctgtgaagggccgattcaccatctccagagacaacgccaagaacacactttatctgcaaatgaacagcctgagagccgaggacacggctgtgtatttctgtgcgagggggacggagtggctggacgcctctgcggttggagactattggggccagggaaccctggtcaccgtctcctca

SEQ ID NO: 13933 - DNA, 301 bp, Homo sapiens
  source 1..301: mol_type = other DNA
tgcagcctctggattcagcttcagtagttattggatgagctgggtccgccaggctccagggaaggggctggagtgggtggccaacataaagcaagatggaagtgagacatactgtatagactctgtgaagggccgattcaccatctccagagacaacgccaagaactcactttatctgcaaatgaacagactgagagccgaggacacggctgtatattactgtgcgagggggacggagtggctggacgcctctgcggttggagactattggggccagggaaccctggtcaccgtctcctca

SEQ ID NO: 13934 - DNA, 301 bp, Homo sapiens
  source 1..301: mol_type = other DNA
tgcagcctctggattcaccttcagtaggtattggatgagctgggtccgccaggctccagggaaggggctggagtggatggccaacataaagcaagatggaagtgagacatactatatagactctgtgaagggccgattcaccatctccagagacaatgccaagaactcactgtatctgcaaatgaacagcctgagagccgaggacacggctgtgtattactgtgcgagggggacggagtggctggacgcctctgcggttggagactattggggccagggaaccctggtcaccgtctcctca

SEQ ID NO: 13935 - DNA, 301 bp, Homo sapiens
  source 1..301: mol_type = other DNA
tgcagcctctggattcaccttcagtaggtattggatgagctgggtccgccaggctccagggaaggggctggagtgggtggccaacataaagcaagatggaagtgagacatactgtatagactctgtgaagggccgattcaccatctccagagacaacgccaagaactcactttatctgcaaatgcacagcctgagagccgaggacacggctgtgtattactgtgcgagggggacggagtggctggacgcctctgcggttggagactattggggccagggaaccctggtcaccgtctcctca

SEQ ID NO: 13936 - DNA, 301 bp, Homo sapiens
  source 1..301: mol_type = other DNA
tgcagcctctggattcaccttcagtaggtattggatgagctgggtccgccaggctccagggaaggggctggagtgggtggccaacataaagcaagatggaagtgagacatactgtatagactctgtgaagggccgattcaccatctccagagacaacgccaagaactcactttatctgcaaatgaacagcctgagagccgaggacacggctgtgtattactgtgcgagggggacggagtggctggacgcctctgcggttggagactattggggccagggaaccctggtcaccgtctcctca

SEQ ID NO: 13937 - DNA, 304 bp, Homo sapiens
  source 1..304: mol_type = other DNA
tgcagcgtctggattcaccttcagcaactatgccatgcactgggtccgccaggttccaggcaaggggctggagtgggtggcagttgtttggtatgatggaagtaataaattctatgcagactccgtgaagggccgattcaccatctccagagacaattccagggacacgatgtatctgcaaatgaacagcctgagagccgaggacacggcactgtatttgtgtgcgagagacagttatagtaacgagccccggcgggggggatttgactcctggggccggggaaccctggtcatcgtctcctca

SEQ ID NO: 13938 - DNA, 304 bp, Homo sapiens
  source 1..304: mol_type = other DNA
tgcagcgtctggattcaccttcagcaactatgccatgcactgggtccgccaggttccaggcaaggggctggagtgggtggcagttgtttggtatgatggaagtaataaattctacgcagactccgtgaagggccgattcaccatctccagagacaattccagggacacgatgtatctgcaaatgaacagcctgagagccgaggacacggcattgtatttgtgtgcgagagacagttatagtaacgagccccggcgggggggatttgactcctggggccggggaaccctggtcatcgtctcctca

SEQ ID NO: 13939 - DNA, 304 bp, Homo sapiens
  source 1..304: mol_type = other DNA
tgcagcgtctggattcaccttcagcaactatgccatgcactgggtccgccaggttccaggcaaggggctggagtgggtggcagttgtatggtatgacggaagtaataaattctatgtagactccgtgaagggccgattcaccatctccagagacaactccagggacacgctgtatctgcaaatgaacagcctgagagccgaggacacggcgctgtatttttgtgcgagagacagttatagtaacgagccccggcgggggggatttgactcctggggccggggaaccctggtcatcgtctcctca

SEQ ID NO: 13940 - DNA, 304 bp, Homo sapiens
  source 1..304: mol_type = other DNA
tgcagcgtctggattcaccttcagcaactatgccatgcactgggtccgccaggttccaggcaaggggctggagtgggtggcagttgtatggtatgatggaagtaataaattctatgcagactccgtgaagggccgattcaccatctccagagacaattccagggacacgctgtatctgcaaatgaacagcctgagagtcgaggacacggcactgtatttctgtgcgagagacagttatagtaacgagccccggcgggggggatttgactcctggggccggggaaccctggtcaccgtctcctca

SEQ ID NO: 13941 - DNA, 304 bp, Homo sapiens
  source 1..304: mol_type = other DNA
tgcagcgtctggattcaccttcagcaactatgccatgcactgggtccgccaggttccaggcaaggggctggagtgggtggcagttgtatggtatgatggaagtaataaattctatgcagactccgtgaagggccgattcaccatctccagagacaattccagggacacgctgtatctgcaaatgaacagcctgagagccgaggacacggcgctgtatttctgtgcgagagacagttatagtaacgagccccggcgggggggatttgactcctggggccggggaaccctggtcatcgtctcctca

SEQ ID NO: 13942 - DNA, 304 bp, Homo sapiens
  source 1..304: mol_type = other DNA
tgcagcgtctggattcaccttcagcaactatgccatgcactgggtccgccaggttccaggcaaggggctggagtgggtggcagttgtatggtttgatggaagtaataaattctatgcagactccgtgaagggccgattcaccatctccagagacaattccagggacacgctgtatctgcaaatgaacagcctgagagccgaggacacggcgctgtatgtctgtgcgagagacagttatagtaacgagccccggcgggggggatttgactcctggggccggggaaccctggtcaccgtctcctca

SEQ ID NO: 13943 - DNA, 304 bp, Homo sapiens
  source 1..304: mol_type = other DNA
tgcagcgtctggattcaccttcagcaactatgccatgcactgggtccgccaggttccaggcaaggggctggagtgggtggcagttgtatggtatgatggaagtaataaattctatgcagactccgtgaagggccgattcaccatctccagagacaattccagggacacgctgtatctgcaaatgaacaccctgagagccgaggacacggcgctgtatttctgtgcgagagacagttatagtaacgagccccggcgggggggatttgactcctggggccggggaaccctggtcatcgtctcatca

SEQ ID NO: 13944 - DNA, 304 bp, Homo sapiens
  source 1..304: mol_type = other DNA
tgcagcgtctggattcaccttcagcaactatgccatgcactgggtccgccaggttccaggcaaggggctggagtgggtggcagttgtatggtttgatggaagtaataaattctatgcagactccgtgaagggccgattcaccatctccagagacaattccagggacacgctgtatctgcaaatgaacagcctgagagccggggacacggcgctgtatgtctgtgcgagagacagttatagtaacgagccccggcgggggggatttgactcctggggccggggaaccctggtcaccgtctcctca

SEQ ID NO: 13945 - DNA, 302 bp, Homo sapiens
  source 1..302: mol_type = other DNA
cagcgtctggattcaccttcagcaactatgccatgcactgggtccgccaggttccaggcaaggggctggagtgggtggcagttgtatggtttgatggaagtaataaattctatgcagactccgtgaagggccgattcaccatctccagagacaattccagggacacgctgtatctgcaaatgaacagcctgagagccgaggacacggcgctgtatgtctgtgcgagagacagttatagtaacgagccccggcgggggggatttgactcctggggccggggaaccctggtcaccgtctcctca

SEQ ID NO: 13946 - DNA, 295 bp, Homo sapiens
  source 1..295: mol_type = other DNA
tgcagcgtctggattcaccttcagcaactatgccatgcactgggtccgccaggttccaggcaaggggctggagtgggtggcagttgtatggtttgatggaagtaataaattctatgcagactccgtgaagggccgattcaccatctccagagacaattccagggacacgctgtatctgcaaatgagagccgaggacacggcgctgtatgtctgtgcgagagacagttatagtaacgagccccggcgggggggatttgactcctggggccggggaaccctggtcaccgtctcctca

SEQ ID NO: 13947 - DNA, 301 bp, Homo sapiens
  source 1..301: mol_type = other DNA
tgcagtctctggattcatctttagtgactaccacatagactgggtccgccaggctccagggaaggggctggaatgggttggccgggttagaaggaaagctgatcgtcacagcacagaatatggcgcgtctgtgaaaggcaggttcaccttgtcaagagacgattcaaacaacgcagtgtatttgcaaatgaacagcctgaaaagcgaggactcggccttttattactgtgtcagagtgacacatactgagaggtactcttttgacaactggggccagggaaccctggtcaccgtctcctca

SEQ ID NO: 13948 - DNA, 301 bp, Homo sapiens
  source 1..301: mol_type = other DNA
tgcagtctctggattcatctttagtgactaccacatagactgggtccgccaggctccagggaaggggctggaatgggttggccgcgttagaaggaaagctgatcgtcacaccacagaatatggcgcgtctgtgaaaggcaggttcaccttgtcaagagacgattcaaacaacgcagtgtatttgcaaatgaacagcctgaaaagcgaggactcggccttttattactgtgtcagagtgacacatactgagaggtactcttttgacaactggggccagggaaccctggtcaccgtctcctca

SEQ ID NO: 13949 - DNA, 301 bp, Homo sapiens
  source 1..301: mol_type = other DNA
tgtcgtctctggattcatctttacagactaccacatagactgggtccgccaggctccagggaaggggctggagtgggttggccgggttagaaggaaagctgatcgtcacagcacagaatatggcgcgtctgcgaaaggcaggtttaccttgtcaagagacgattcaagaaatgcagtgtttttgcaaatggacagcctgagaagcgaggactcggccttttattactgtgtcagagtgacgcacactgagaggtactcttttgacaactggggccagggaaccctggtcaccgtctcctca

SEQ ID NO: 13950 - DNA, 292 bp, Homo sapiens
  source 1..292: mol_type = other DNA
cgcagcctctggattcacgtttagcagttatgccatgaactgggtccgccaggctccagggaagggactggagtgggtctcagggatcagtgctagtggtggtaccacatactccgctgacgccgtgaagggccgcttcaccatctccagagacaattccttgaacacgctgtctctgcaaatggatggcctgagagccgaggacacggccgtatattactgtgcgcgggggtccttacgaaggtactactttgactactggggccagggaaccctggtctccgtctcctca

SEQ ID NO: 13951 - DNA, 292 bp, Homo sapiens
  source 1..292: mol_type = other DNA
cgcagcctctggattcacctttagcagttatgccatgaactgggtccgccaggctccagggaagggactggagtgggtctcagggattagtgcaagtggcggtacaacatactccgctgacaccgtgaagggccgcttcaccatttccagagacaattccttggacacggtgtctctgcaaatggatggcctgagaaccgaggacacggccgtatattactgtgcgcgggggtccttacgaaggtactactttgactactggggccagggaaccctggtcaccgtctcctca

SEQ ID NO: 13952 - DNA, 292 bp, Homo sapiens; identical to SEQ ID NO: 13950
  source 1..292: mol_type = other DNA

SEQ ID NO: 13953 - DNA, 292 bp, Homo sapiens
  source 1..292: mol_type = other DNA
cgcagcctctggattcacgtttagcagttatgccatgaactgggtccgccaggctccagggaagggactggagtgggtctcagggattagtgctagtggtggtaccacatactccgctgacgccgtgaagggccgcttcaccatctccagagacaattccttgaacacgttgtctctgcaaatggatggcctgagagccgaggacacggccgtatattactgtgcgcgggggtccttacgaaggtactactttgactactggggccagggaaccctggtctccgtctcctca

SEQ ID NO: 13954 - DNA, 304 bp, Homo sapiens
  source 1..304: mol_type = other DNA
tgcagcctctggattcacctttagcacctctgccatgaactgggtccgccagactccacggaaggggctggagtgggtctcaactgttgatgctgttggtagtgccacatggtacgcagactccgtgaagggccggttcaccatctccagagacaattccaaggacacgctgtatctgcaaatggacagcctgagagtcgacgacacggccctttatttctgtgcgaagggccgatttgactgtactagtcccagctgcaaccctgattactggggccagggaaccctggtcaccgtctcctca

SEQ ID NO: 13955 - DNA, 304 bp, Homo sapiens
  source 1..304: mol_type = other DNA
tgcagcctctggattcacctttagcagctctgccatgaactgggtccgccaggctccagggaaggggctggagtgggtctcaactgttaatggtgttggtagtgtcacacggtacgcggactccgtgaagggccggttcaccatctccagagacaattccaaatacacgctgtatctgcaaatggacagcctgagagtcgaggacacggccctttatttctgtgcgaagggccgatttgactgtactagtcccagctgcaaccctgactactggggccagggaaccctggtcaccgtctcctca

SEQ ID NO: 13956 - DNA, 280 bp, Homo sapiens
  source 1..280: mol_type = other DNA
tgtagcctctggattcacctttagtaacttttggatgaattgggtccgccaggctccagggaaggggctggagtgggtggccaacataaacggagatggaagtgagaaacactatgtagattctctgaagggccgattcactatttctagagacaacgccaagaactcactgtatctccaactgaacagcctgagagccgaggacacggccgtctattattgtttctatggtcattacagtgactactggggccagggaaccctggtcaccgtctcctca

SEQ ID NO: 13957 - DNA, 280 bp, Homo sapiens
  source 1..280: mol_type = other DNA
tgtaggctctggaatgagtctcagtgtctattggatgaactgggtccgccaggctccagggaaggggctggagtgggtggccaacataaacggggatggaagtgagatatactatgtggactctgtgaaggggcgatttaccatctccagagacaacgccaagaattcagtgtctctgcaaatgaacagcctgagagccgaggatacagccgtctattattgtttttacggtcattattctgactactggggccggggaaccctggtcaccgtctcctca

SEQ ID NO: 13958 - DNA, 280 bp, Homo sapiens
  source 1..280: mol_type = other DNA
tgtaggctctggaatgagtctcagtgtctattggatgaactgggtccgccaggctccagggaaggggctggagtgggtggccaacataaacggggatggaagtgagatatactatgtggactctgtgaaggggcgatttaccatctccagagacaacgccaagaattcagtgtctctgcaaatgaacagcctgagagccgaggatacagccgtctattattgtttttacggtcattattctgactactggggccggggaaccccggtcaccgtctcctca

SEQ ID NO: 13959 - DNA, 280 bp, Homo sapiens
  source 1..280: mol_type = other DNA
tgtaggctctggaatcagtctcagtgcctattggatgaactgggtccgccaggctccagggaaggggctggagtgggtggccaacataaagggagatggaagtgagatatactatgtggattctgtgaaggggcgattcaccatctccagagacaacgccaagaactcagtgtctctgcagatgaacagcctgagagccgaggatacggccgtctatttctgtttttacggtcattattctgactactggggccggggaaccctggtcaccgtctcctca

SEQ ID NO: 13960 - DNA, 292 bp, Homo sapiens
  source 1..292: mol_type = other DNA
tgcagcctctggattcacctttagcagctatgccatgagctgggtccgccaggctccagggaaggggctggactgggtctcagctattagtgatagtggtggtagcacatactacgcagactccgtgaagggccggttcaccatctccagagacaattccaagaacacgctgtttctgcaattgaacagcctgagacccgaggacacggccgtatattactgtgcgaaaagaattcaactgaactacttctttgactactggggccagggaaccctggtcaccgtctcctca

SEQ ID NO: 13961 - DNA, 292 bp, Homo sapiens; identical to SEQ ID NO: 13960
  source 1..292: mol_type = other DNA

SEQ ID NO: 13962 - DNA, 292 bp, Homo sapiens
  source 1..292: mol_type = other DNA
tgcagcctctggattcacctttagcacctatgccatggcctgggtccgccaggctccagggaaggggctggactgggtcgcagctattagtgatagtggtgctagtacatactacgcagactccgtgaagggccggttcaccatctccagagacaattccaagaacacgctgtttctgcaattgaacagcctgagacccgaggacacggccgtatattactgtgcgaaaagaattcagctcaactacttctttgactactggggccagggaaccctggtcaccgtctcctca

SEQ ID NO: 13963 - DNA, 292 bp, Homo sapiens
  source 1..292: mol_type = other DNA
tgcagcctctggattcacctttagcagctatgccatgagctgggtccgccaggctccagggaaggggctggactgggtctcagctattagtgatagtggtggtagcacatactacgtagactccgtgaagggccggttcaccatctccagagacaattccaagaacacgctgtttctgcaattgaacagcctgagacccgaggacacggccgtatattactgtgcgaaaagaattcaactgaactacttctttgactactggggccagggaaccctggtcaccgtctcctca

SEQ ID NO: 13964 - DNA, 289 bp, Homo sapiens
  source 1..289: mol_type = other DNA
ttcagcctccggattcaccctcagtgcctatgctatccactgggtccgccaggctccagggaagggactagaatatgtttcagctattagttctgatgggggtgccacatactacgcagactcagtgaaggacagattcaccatctccagagacaattccaggaacacgctgtatctccaggtgagcagtctgagagctggggacacggctgtgtattactgtgtgagggcgctacaatggagttatctcgactactggggccagggaaccctggtcaccgtctcctca

SEQ ID NO: 13965 - DNA, 289 bp, Homo sapiens
  source 1..289: mol_type = other DNA
ttcagcctccggattcactctcagtgcctatgctatccactgggtccgccaggctccagggaagggactagaatatgtttcagctattagttctgatgggtttgtcacatactacgcagactcaatgaaggacagattcaccatctccagagacaattccaggaacacgctgtatctccagatgagcagtctgagagctggggacacggctgtttattactgtgtgagggcgctacaatggagttatctcgactactggggccagggagccctggtcaccgtctcctca

SEQ ID NO: 13966 - DNA, 289 bp, Homo sapiens
  source 1..289: mol_type = other DNA
ttcagcctccggattcaccctcagtgcctatgctttccactgggtccgccaggctccagggaagggactggaatatgtttcagctattagttctgatgggactgccacatactacgcagactcagtgaagggcagattcaccatctccagagacaattccaggaacacgctgtttctccaggtgagcagtctgagagctggggacacggctgtatattactgtgtgagggcgctacagtggagttatctcgactactggggccagggaaccctggtcaccgtctcctca

SEQ ID NO: 13967 - DNA, 309 bp, Homo sapiens
  source 1..309: mol_type = other DNA
gccattggaggcaccttcaccacgtacggacttacttgggtgcgacaggcccctggacgaggacttgagtggatgggcgcaatcatccctctccttggatcgacaagctacccacagaagttccaggacagagtcactgtgaccgcggacagattcgcagccacagcccacttgcaactgaggagcctgacatctgacgacacggccgtctactactgtgcgcgaggtcgaatcgtgaccacgaatggggacagaatctaccaatacatggacatatggggcaaagggaccacggtcatcgtctcctca

SEQ ID NO: 13968 - DNA, 309 bp, Homo sapiens
  source 1..309: mol_type = other DNA
gccattggaggcaccttcaccacgtacggacttacttgggtgcgacaggcccctggacgaggacttgagtggatgggcgcaatcatccctctccttggatcgacattctacccacagaagttccaggacagagtcactgtgaccgcggacagattcgcagccacagcccacttgcaactgaggagcctgacatctgacgacacggccgtctactactgtgcgcgaggtcgaatcgtgaccacgaatggggacagaatctaccaatacatggacatatggggcaaagggaccacggtcatcgtctcctca

SEQ ID NO: 13969 - DNA, 297 bp, Homo sapiens
  source 1..297: mol_type = other DNA
aaaggttctggatacagcttcaccaactactggatcggctgggtgcgccaggtgcccgggaaaggcctggaatgggtggcgatcatctttcccgctgactctgataccgcatacaacccgtccttccaaggccaggtcaccatctcagccgacaagtccatcagtaccgcctacctacagtggagtagcctgaaggcctcggacaccgccatgtattactgtgcgagacgacttcgataccactctggcggatacttcgatctctggggccgtggcaccctggtcactgtctcgtca

SEQ ID NO: 13970 - DNA, 297 bp, Homo sapiens
  source 1..297: mol_type = other DNA
aagggttctggatacagcttcaccaactactggatcggctgggtgcgccaggtgcccgggaaaggcctggagtgggtggcaatcatctttcccgctgactctgataccgcatacaacccgtccttccaaggccaggtcaccatctcagccgacaagtccatcagtaccgcctacctacagtggagtagcctgaaggcctcggacaccgccatgtattactgtgcgagacgacttcgataccactctggcggatacttcgatctctggggccgtggcaccctggtcactgtctcgtca

SEQ ID NO: 13971 - DNA, 274 bp, Homo sapiens
  source 1..274: mol_type = other DNA
tgcagcctctggattcacctttagtacctcttggatgaactgggtccgccaggctccagggaaggggctggagtgggtggccaacataaatggagatgaaagtgtgaaacgctatgtggactctgtgaagggccgattcaccgtctccagagacaacaccaagaactcactgtatctacaaatgaacagcctgagagccgaggacacggctgtgtattactgtgtgagagctgatgacatctggggccaagggacaatggtcagcgtctcttca

SEQ ID NO: 13972 - DNA, 274 bp, Homo sapiens
  source 1..274: mol_type = other DNA
tgcagcctctagattcacctttagtacctcttggatgaactgggtccgccaggctccagggaaggggctggagtgggtggccaacataaatgaaaatgaaagtgtgaaacgctatgtggactctgtgaagggccgattcaccatctccagagacaacgccaagaactcactgtatctacaaatgaacagcctgagagccgaggacacggctgtgtattactgtgtgagagctgatgacatctggggccaagggacagtggtcaccgtctcttca

SEQ ID NO: 13973 - DNA, 286 bp, Homo sapiens
  source 1..286: mol_type = other DNA
tgcagcctctggattcaccttcagtcactataccatgaactgggtccgccaggctccagggaaggggctggagtggatttcatacattaatagtgatagtaccatcacatggtacgctgattctgtgaggggccgattcaccatctccagagacaatgccaagaattcactgtctctgcaaatgactagcctgagagacgaggacacggctgtctatttttgtgtgagagatcattggtgggcttttgatgtctggggccaggggacactggtcaccgtctcttca

SEQ ID NO: 13974 - DNA, 286 bp, Homo sapiens
  source 1..286: mol_type = other DNA
tgcagcctctggattcaccttcagtcattttaccatgaactgggtccgccaggctcctgggaaggggctggagtggatttcatacatctatggtgatagtaccatcatatggtacgcagactctgtgaagggccgattcaccatttccagagacaatgccaagaattcactgtctctgcaaatgaatagcctgagagacgaggacacggctgtgtattattgtgtgagagatcattggtgggcttttgatgtctggggccaggggacagtggtcaccgtctcttca

SEQ ID NO: 13975 - DNA, 304 bp, Homo sapiens
  source 1..304: mol_type = other DNA
cactgtctctggtgtctccgtcagaacttctggttactacttgagctggatccgacagcccccagggaagggactggagttcattgggcatatatctaacggtgggagcaccaactacaacccctccctcaagagtcgagtcaccatatccgtagacacgtccaagaaccagctcttcctgcatctgagttctgtgaccgctgcggacacggccgtgtattactgtggaaggtctgataggagtggttcttctttcgtggagtttgattactggggccagggaaccctggtcaccgtctcctca

SEQ ID NO: 13976 - DNA, 304 bp, Homo sapiens
  source 1..304: mol_type = other DNA
cactgcctctggtggctccatcagaatttctggttactacttgagctggatccgacagaccccagggaagggactggagttcattgggcacatatcttccggtgggagcacctactacaacccctccctcaggagtcgagtcaccatatccgttgacacgtccaccaaccagctctccctgcatctgagttctgtaaccgctgcggacacggccgtgtattattgtggaaggtctgataggagtggttcttccttcgtggagtttgattactggggccagggaaccctggtcaccgtctcctca

SEQ ID NO: 13977 - DNA, 304 bp, Homo sapiens
  source 1..304: mol_type = other DNA
cactgtctctggtgtctccgtcagaagttctggttactacttgagctggatccggcagcccccagggaagggactggagttcgttgggcatatatctaacggtgggagcaccaactacaacccctccctcaagagtcgagtcaccatatccgtagacacgtccaagaaccagctctccctgcatctgaattctgtgaccgctgcggacacggccgtgtattactgtggaaggtctgataggagtggttcttctttcgtggagtttgattactggggccaggggaccctggtcaccgtctcctca

SEQ ID NO: 13978 - DNA, 304 bp, Homo sapiens
  source 1..304: mol_type = other DNA
cactgtctctggtgtctccgtcagaacttctggttactacttgaactgggtccggcagcccccagggaagggactggagttcattggccatatatcttacggtgggaccaccaactacaacccctccctcaagagtcgagtcaccatatccgtagacacgtccaagaaccagctctccctgcatctgagttccgtgaccgctgcggacacggccgtgtattactgtggaaggtctgataggagtggttcttctttcgtggagtttgattactggggccagggaaccctggtcaccgtctcctca

SEQ ID NO: 13979 - DNA, 304 bp, Homo sapiens
  source 1..304: mol_type = other DNA
cactgtctctggtggctccgtcagaagttctggttactacttgagctggatccggcagcccccagggaagggactggagttcattgggcatatatcttccggtgggagcaccaactacaacccctccctcaagagtcgagtcaccatatccgtagacacgtccgggaaccagctctccctgtatctgagttctgtgaccgctgcggacacggccgtgtattactgtggaaggtctgataggagtggtagttctttcgtggagtttgattactggggccagggaaccctggtcaccgtctcctca

SEQ ID NO: 13980 - DNA, 304 bp, Homo sapiens
  source 1..304: mol_type = other DNA
cactgcctctggtggctccatcagaatttctggttactacttgagctggatccgacagaccccagggaagggactggagttcattgggcacatatcttccggtgggagcacctactacaacccctccctcaggagtcgagtcaccatatccgttgacacgtccaccaaccagctctccctgcatctgagttctgtaaccgctgcggacacggccgtgtattattgtggaaggtctgataggagtggttcttcgttcgtggagtttgattactggggccagggaaccctggtcaccgtctcctca

SEQ ID NO: 13981 - DNA, 304 bp, Homo sapiens
  source 1..304: mol_type = other DNA
cactgtctctggtgcctccgtcaggagttctggttactacttgacctggatccggcagaccccagggaagggactggaattcattgggtacatatcttccggggggaacaccaactacaacccctccctcaagagtcgagtcaccatatccgtagacacgtccaagaaccagctctccctgcatctgagttctgtgaccgctgcggacacggccgtgtattactgtggaaggtctgataggagtggttcttctttcgtggagtttgattactggggccagggaaccctggtcaccgtctcctca

SEQ ID NO: 13982 - DNA, 298 bp, Homo sapiens
  source 1..298: mol_type = other DNA
ggcttctggttacacctttaccagctttggtatcagctgggtgcgacaggcccctggacaagggcttgagtggatgggatggatcagcgcttacaatgctaacacaaactatgcacagaagttccagggcagagtcaccatgaccacagacacatccacgaccacagcctacatggagctgaggagcctgagctctgacgactcggccgtgtattactgtgcgagagatgtggggttcgttaatgggtactactacatggacgtctggggcaaagggaccacggtcaccgtctcctca

SEQ ID NO: 13983 - DNA, 297 bp, Homo sapiens
  source 1..297: mol_type = other DNA
gcttctggttacacctttaccagctttggtatcagctgggtgcgacaggcccctggacaagggcttgagtggatgggatggatcagcgcttacaatgctaacacaaactatgcacagaagttccagggcagagtcaccatgaccacagacacatccacgaccacagcctacatggagctgaggagcctgagctctgacgactcggccgtgtattactgtgcgagagatgtggggttcgttaatgggtactactacatggacgtctggggcaaagggaccacggtcaccgtctcctca

SEQ ID NO: 13984 - DNA, 295 bp, Homo sapiens
  source 1..295: mol_type = other DNA
tgtagcctctggattcacctttaacaactatgccatgaggtgggtccgccaggctccagggaaggggctggagtgggtctcaactattcttgatgggggtactggcacagcgtacgcagactccgtgaagggccggttcaccatctccagagacaattccaagaacacggtgactctacaaatgaacagtctgagagccgaagacacggccgtatatttctgtgtgaaaggggggcctagtgggagttacttttgtgactactgggcccagggaacgcaggtcaccgtctcttca

SEQ ID NO: 13985 - DNA, 295 bp, Homo sapiens
  source 1..295: mol_type = other DNA
tgtagcctctggattcacctttagcaactatgccatgaggtgggtccgccagactccagggaaggggctggagtgggtctcaactattcttgatggtggtactgtcacagcgtacgcagactccgtgaagggccggttcaccatctccagagacaattccaagaacacggtgactctacaaatgaacagtctgagagccgaagacacggccgtatatttctgtgtgaaaggggggcctagtgggagttacttttgtgactactgggcccagggaatgcaggtcaccgtctcttca

SEQ ID NO: 13986 - DNA, 298 bp, Homo sapiens
  source 1..298: mol_type = other DNA
cgcagcctctggattctccttcagcacctatgccatgaattggctccgccaggctccagggaagggcctggagtgggtctcagttattgtcggtggtggtggtggaataacatacgcagactccgtgaagggccggttcaccatatccagagacaattccaagaacacattgtatctgcaaatgaatgacctgagagtcgaggacacggccatttattactgtgcgaaagatttacagcccgatggaagatacgatcttgactattggggccggggaaccctagtcaccgtctcctca

SEQ ID NO: 13987 - DNA, 298 bp, Homo sapiens
  source 1..298: mol_type = other DNA
tgcagcctctggattcacctttagcacctatgccatgaactgggtccgccaggctccagggaaggggctggagtgggtctcagttatcgtcggcgatgggagcagtagacactacgcggactccgtgaagggccggttcaccatctccagagacaacgccaagaacattctatatctgcagatggacaccctgagagccgatgacacggccatatattactgtgccaaggatctgcagccggatggtcgctacgaccttgactactggggccggggaaccctggtcgccgtctcttca

SEQ ID NO: 13988 - DNA, 304 bp, Homo sapiens
  source 1..304: mol_type = other DNA
cgcaacctctggattcacctttagtagtcattggatgacctgggtccgccaggctccagggaaggggctggagtgggtggccaacttgaacttcggtggaagtgagaagtattatgtggactctgtgaagggccgattcaccatctccagagacaacgccaagaactcactgtatttgcaaatgaacagcctgagagccgaggacacggctgtgtattactgtgcgagagtacggttcgccaggacgtactactccaactacatggacgtctggggcaaagggaccacggtcaccgtctcctca

SEQ ID NO: 13989 - DNA, 304 bp, Homo sapiens
  source 1..304: mol_type = other DNA
cgcaacctctggattcacctttagtagtcattggatgacctgggtccgccaggctccagggaaggggctggagtgggtggccaacttgaacttcggtggaagtgagaagtattatgtggactctgtgaagggccgattcaccatctccagagacaacgccaagaactcgctgtatttgcaaatgaacagcctgagagccgaggacacggctgtgtattactgtgcgagagtacgtttcgccaggacgtactactccaactacatggacgtctggggcacagggaccacggtcaccgtctcctca

SEQ ID NO: 13990 - DNA, 304 bp, Homo sapiens
  source 1..304: mol_type = other DNA
cgcaacctctggattcacctttagtagtcattggatgacctgggtccgccaggctccagggaaggggctggagtgggtggccaacatgaacttcggtggaagtgagaagtattatgtggactctgtgaagggccgattcaccatctccagagacaacgccaagaactcactgtacttgcaaatgaacagcctgagagccgaggacacggctgtgtattactgtgcgagagtacggttcgccaggacgtactactccaactacatggacgtctggggcaaagggaccacggtcaccgtctcctca

SEQ ID NO: 13991 - DNA, 303 bp, Homo sapiens
  source 1..303: mol_type = other DNA
cgcaacctctggattcacctttagtagtcattggatgacctgggtccgccaggctccagggaaggggctggagtgggtggccaacttgaacttcggtggaagtgagaagtattatgtggactctgtgaagggccgattcaccatctccagagacaacgccaagaactcactgtatttgcaaatgaacagcctgagagccgaggacacggctgtgtattactgtgcgagagtacggttcgccaggacgtactactccaactacatggacgtctggggcaagggaccacggtcaccgtctcctca

SEQ ID NO: 13992 - DNA, 283 bp, Homo sapiens
  source 1..283: mol_type = other DNA
tgcagcctctggattcaccttgagtaactattgggtgacctgggtccgccaggccccagggaaggggctggagtgggtggccaacataaggcataatggaagtttgaagtattatgtggactctgtgaagggccgattcaccatctccagagacaacgccgagaacttagtttatctgcaaatgaacagcctgagagtcgaggacacggctatatattactgtgcgagccgtcaggactgcgggggctactggggcccgggaaccctggtcaccgtctcctca

SEQ ID NO: 13993 - DNA, 283 bp, Homo sapiens
  source 1..283: mol_type = other DNA
tgcagcctctggattcattttgagtaattactgggtgacctgggtccgccaggctccagggaaggggctggagtgggtggccaacataaggcatgatggaagtctgaagtattatgtggactctgtgaagggccgattcaccatctccagagacaacgccgagaactcagtttatctgcaaatgaacagcctgagagtcgaggacacggctatatattattgtgcgagccgtcaggactgcgggggctactggggcccgggaaccctggtcaccgtctcctca

SEQ ID NO: 13994 - DNA, 283 bp, Homo sapiens
  source 1..283: mol_type = other DNA
cgcagcctctggattcaccttgagtgaatattgggtgacctgggtccgccaggccccagggaaggggctggagtgggtggccaacataaggcatgatgcaagtttgaagtattatgtggactctgtgaagggccgattcaccatctccagagacaacgccgagaacttagtttatctgcaaatgaagagcctgagactcgaagacacgggtacatattattgtgcgagccgtcaggactgcgggggctactggggcccgggaacccaggtcaccgtctcctca

SEQ ID NO: 13995 - DNA, 283 bp, Homo sapiens
  source 1..283: mol_type = other DNA
tgcagcctctggattcaccctcagtaattattgggtgacctgggtccgccaggctccagggaagggactggagtgggtggccaacataaggcatgatggaagtttgaagtattatgtggactctgtgaagggccgattcaccatctccagagacaacgccgagaacttagtttatctgcaaatgaacagcctgagagtcgaggacacggctatatattactgtgcgagtcgtcaggactgcgggggctattggggcccgggaaccctggtcaccgtctcctca

SEQ ID NO: 13996 - DNA, 283 bp, Homo sapiens; identical to SEQ ID NO: 13992
  source 1..283: mol_type = other DNA

SEQ ID NO: 13997 - DNA, 283 bp, Homo sapiens
  source 1..283: mol_type = other DNA
tgcagcctctggattcattttgagtaattactgggtgacctgggtccgccaggctccagggaaggggctggagtgggtggccaacatcaggcatgatggaagtctgaagtattatgtggactctgtgaagggccgattcaccatctccagagacaacgccgacaactcagtttatctgcaaatgaacagcctgagagtcgaggacacggctatatattattgtgcgagccgtcaggactgcgggggctactggggcccgggaaccctggtcaccgtctcctca

SEQ ID NO: 13998 - DNA, 283 bp, Homo sapiens; identical to SEQ ID NO: 13993
  source 1..283: mol_type = other DNA

SEQ ID NO: 13999 - DNA, 283 bp, Homo sapiens
  source 1..283: mol_type = other DNA
tacagcctctggattcattttgagcaattggtgggtgacctgggtccgccaggctccagggaaggggctggagtgggtggccaacataaggcatgatggaagtctgaagttttatgtggactctgtgaagggccgattcaccatctccagagacaacgccgagaactcagtttatctgcaaatgaacagcctgagagtcgaggacacgggtatatattactgtgcgagccgtcaggactgcgggggctactggggcccgggaaccctggtcaccgtctcctca

SEQ ID NO: 14000 - DNA, 283 bp, Homo sapiens
  source 1..283: mol_type = other DNA
tgcagcctctggattcattttgagtaattactggatgacctgggtccgccaggctccagggaaggggctggagtgggtggccaacataaggcatgatggaagtctgaagtattatgtggactctgtgaagggccgattcaccatctccagagacaacgccgagaactcagtttatctgcaaatgaacagcctgagagtcgaggacacggctatatattattgtgcgagccgtcaggactgcgggggctactggggcccgggaaccctggtcaccgtctcctca

SEQ ID NO: 14001 - DNA, 291 bp, Homo sapiens
  source 1..291: mol_type = other DNA
caggcttctggatacagctttaccagcaactggatcggctgggtgcgccagacgcccgggaaaggcctggagtggatggggatcatctatcctggtgactctgatacccgatacagcccgtcctttcaaggccaggtcaccatctcagccgacaagtccatcagcacctcctacctgcagtggagcagcctgaaggcctcggacaccgccatgtattactgtgcgagacacgaccgcagtggctggtactcggactactggggccagggaaccctggtcaccgtctcctca

SEQ ID NO: 14002 - DNA, 291 bp, Homo sapiens
  source 1..291: mol_type = other DNA
caggcttctggatacagctttaccagcaactggatcggctgggtgcgccagacgcccgggaaaggcctggagtggatggggatcatctatcctggtgactctgatacccgatacagcccgtccttccaaggccaggtcaccatctcagccgacaagtccatcagcacctcctacctgcagtggagcagcctgaaggcctcggacaccgccatgtattactgtgcgagacacgaccgcagtggctggtactcggactactggggccagggaaccctggtcaccgtctcctca

SEQ ID NO: 14003 - DNA, 291 bp, Homo sapiens
  source 1..291: mol_type = other DNA
caggcttctggatacagctttaccagcaactggatcggctgggtgcgccagacgcccgggaaaggcctggagtggatggggatcatctatcctggtgactctgatacccgatacagcccgtccttccaaggccaggtcaccatctcagccgacaagtccatcagcacctcctacttgcagtggagcagcctgaaggcctcggacaccgccatgtattactgtgcgagacacgaccgcagtggctggtactcggactactggggccagggaaccctggtcaccgtctcctca

SEQ ID NO: 14004 - DNA, 310 bp, Homo sapiens
  source 1..310: mol_type = other DNA
tgcagcctctggattcaccttcagtagctatggcatgcactgggtccgccaggctccaggcaaggggctggagtgggtggcagttatatcatatgatggaagtaataaatactatgcagactccgtgaagggccgattcaccatctccagagacaattccaagaacacgctgtatctgcaaatgagcagcctgagagctgaggacacggctctgtattactgtgcgaaagatccagctaactggggaccgagctactactactactacatggacgtctggggcaaagggaccacggtcaccgtctcctca

SEQ ID NO: 14005 - DNA, 310 bp, Homo sapiens
  source 1..310: mol_type = other DNA
tgcagcctctggattcaccttcagtagctatggcatgcactgggtccgccaggctccaggcaaggggctggagtgggtggcagttatatcatatgatgggagtaataaatactatgcagactccgtgaagggccgattcaccatctccagagacaattccaagaacacgctgtatctgcaaatgagcagcctgagagctgaggacacggctctgtattactgtgcgaaagatccagctaactggggaccgagctactactactactacatggacgtctggggcaaagggaccacggtcaccgtctcctca

SEQ ID NO: 14006 - DNA, 310 bp, Homo sapiens; identical to SEQ ID NO: 14004
  source 1..310: mol_type = other DNA

SEQ ID NO: 14007 - DNA, 310 bp, Homo sapiens
  source 1..310: mol_type = other DNA
tgcagcctctggattcaccttcagtagctatggcatgcactgggtccgccaggctccaggcaaggggctggagtgggtggcagttatatcatatgatggaagtaataaatactatgcagactccgtgaagggccgattcaccatctccagagacaattccaagaacacgctgtatctgcaaatgagcagcctgagagctgaggacacggctctgtattactgtgcgaaagatccggctaactggggaccgagctactactactactacatggacgtctggggcaaagggaccacggtcaccgtctcctca

SEQ ID NO: 14008 - DNA, 310 bp, Homo sapiens
  source 1..310: mol_type = other DNA
tggatcctctggattcgccttcagttactactggatgcactgggtccgccaagctccagggaaggggctggagtgggtctcacgaattgatggtgatggacttagcagaatttacgtggactccgtgaagggccgattcaccacctctagagacaacgccaagaacacggtgtatctgcaaatggacagtctgagagtcgaggacacggctacgtattattgtgtcagagatgtctgctattctactggttgcagagttccgggtgcttttgaaaactggggccgagggacactggtcaccgtctcttcg

SEQ ID NO: 14009 - DNA, 310 bp, Homo sapiens
  source 1..310: mol_type = other DNA
tggatcctctgcattcgccttcagttactactggatgcactgggtccgccaagctccagggaaggggctggagtgggtctcacgaattgatggtgatggacttagcagaatttacgtggactccgtgaagggccgattcaccacctctagagacaacgccaagaacacggtgtatctgcaaatggacagtctgagagtcgaggacacggctacgtattattgtgtcagagatgtctgctattctactggttgcagagttccgggtgcttttgaaaactggggccgagggacactggtcaccgtctcttcg

SEQ ID NO: 14010 - DNA, 310 bp, Homo sapiens; identical to SEQ ID NO: 14008
  source 1..310: mol_type = other DNA

SEQ ID NO: 14011 - DNA, 310 bp, Homo sapiens
  source 1..310: mol_type = other DNA
tggatcctctggattcgccttcagttactactggatgcactgggtccgccaagctccaaggaaggggctggagtgggtctcacgaattgatggtgatggacttagcagaatttacgtggactccgtgaagggccgattcaccacctctagagacaacgccaagaacacggtgtatctgcaaatggacagtctgagagtcgaggacacggctacgtattattgtgtcagagatgtctgctattctactggttgcagagttccgggtgcttttgaaaactggggccgagggacactggtcaccgtctcttcg

SEQ ID NO: 14012 - DNA, 310 bp, Homo sapiens
  source 1..310: mol_type = other DNA
tggatcctctggattcgccttcagttactactggatgcactgggtccgccaagctccagggaaggggctggagtgggtctcacgaattgatggtgatggacttagcagaatttacgtggactccgtgaagggccgattcaccacctctagagacaacgccaagaacacggtgtatctgcaaatggacagtctgagagtcgaggacacggctacgtattattgtgtcagagatgtctgctattctactggttgcagagttccgggtgcctttgaaaactggggccgagggacactggtcaccgtctcttcg

SEQ ID NO: 14013 - DNA, 308 bp, Homo sapiens
  source 1..308: mol_type = other DNA
gatcctctggattcgccttcagttactactggatgcactgggtccgccaagctccagggaaggggctggagtgggtctcacgaattgatggtgatggacttagcagaatttacgtggactccgtgaagggccgattcaccacctctagagacaacgccaagaacacggtgtatctgcaaatggacagtctgagagtcgaggacacggctacgtattattgtgtcagagatgtctgctattctactggttgcagagttccgggtgcttttgaaaactggggccgagggacactggtcaccgtctcttcg

SEQ ID NO: 14014 - DNA, 310 bp, Homo sapiens
  source 1..310: mol_type = other DNA
tggatcctctggattcgccttcagttactactggatgcactgggtccgccaagctccagggaaggggttggagtgggtctcacgaattgatggtgatggacttagcagaatttacgtggactccgtgaagggccgattcaccacctctagagacaacgccaagaacacggtgtatctgcaaatggacagtctgagagtcgaggacacggctacgtattattgtgtcagagatgtctgctattctactggttgcagagttccgggtgcttttgaaaactggggccgagggacactggtcaccgtctcttcg

SEQ ID NO: 14015 - DNA, 310 bp, Homo sapiens; identical to SEQ ID NO: 14008
  source 1..310: mol_type = other DNA

SEQ ID NO: 14016 - DNA, 310 bp, Homo sapiens
  source 1..310: mol_type = other DNA
tggatcctctggattcgccttcagttactactggatgcactgggtccgccaagctccagggaaggggctggagtgggtctcacgaattgatggtgatggacttagcagaatttatgtggactccgtgaagggccgattcaccacctctagagacaacgccaagaacacggtgtatctgcaaatggacagtctgagagtcgaggacacggctacgtattattgtgtcagagatgtctgctattctactggttgcagagttccgggtgcttttgaaaactggggccgagggacactggtcaccgtctcttcg

SEQ ID NO: 14017 - DNA, 310 bp, Homo sapiens
  source 1..310: mol_type = other DNA
tggatcctctggattcgccttcagttactactggatgcactgggtccgccaagctccagggaaggggctggagtgggtctcacgaattgatggtgatggacttagcagaatttacgtggactccgtgaaggcccgattcaccacctctagagacaacgccaagaacacggtgtatctgcaaatggacagtctgagagtcgaggacacggctacgtattattgtgtcagagatgtctgctattctactggttgcagagttccgggtgcttttgaaaactggggccgagggacactggtcaccgtctcttcg

SEQ ID NO: 14018 - DNA, 310 bp, Homo sapiens
  source 1..310: mol_type = other DNA
tggatcctctggattcgccttcagttactactggatgcactgggtccgccaagctccagggaaggggctggagtgggtctcacgaattgatggtgatggacttagcagaatttacgtggactccgtgaagggccgattcaccacctctagagacaacgccaagaacacggtgtatctgcaaatggacagtctgagagtcgaggacacggctacgtattattgggtcagagatgtctgctattctactggttgcagagttccgggtgcttttgaaaactggggccgagggacactggtcaccgtctcttcg

SEQ ID NO: 14019 - DNA, 310 bp, Homo sapiens
  source 1..310: mol_type = other DNA
tggatcctctggattcgccttcagttactactggatgcactgggtccgccaagctccagggaaggggctggagtgggtctcacgaattgatggtgatggacttagcagaatttacgtggactccgtgaagggccgattcaccacctctagagacaacgccaagaacacggtgtatctgcaaatggacagtctgagagtcgaggacacggctacgtattattgtgtcagagatgtctgctattctactggttgcagagttccgggtgcttttgaaaactggggccgagggacactggtcaccgtctcctca

SEQ ID NO: 14020 - DNA, 310 bp, Homo sapiens
  source 1..310: mol_type = other DNA
tggatcctctggattcgccttcagttactactggatgcactgggtccgccaagctccagggaaggggctggagtgggtctcacgaattgatggcgatggacttagcagaatttacgtggactccgtgaagggccgattcaccacctctagagacaacgccaagaacacggtgtatctgcaaatggacagtctgagagtcgaggacacggctacgtattattgtgtcagagatgtctgctattctactggttgcagagttccgggtgcttttgaaaactggggccgagggacactggtcaccgtctcttcg

SEQ ID NO: 14021 - DNA, 310 bp, Homo sapiens
  source 1..310: mol_type = other DNA
tggatcctctggattcgccttcagttactactggatgcactgggtccgccaagctccagggaaggggctggagtgggtctcacgaattgatggtgatggacttagcaaaatttacgtggactccgtgaagggccgattcaccacctctagagacaacgccaagaacacggtgtatctgcaaatggacagtctgagagtcgaggacacggctacgtattattgtgtcagagatgtctgctattctactggttgcagagttccgggtgcttttgaaaactggggccgagggacactggtcaccgtctcttcg

SEQ ID NO: 14022 - DNA, 310 bp, Homo sapiens
  source 1..310: mol_type = other DNA
tggatcctctggattcgccttcagttactactggatgcactgggtccgccaagctccagggaaggggctggagtgggtctcacgaattgatggtgatggacttagcagaatttacgtggactccgtgaagggccgattcaccacctctagagacaacgccaagaacacggtgtatctgcaaatggacagtctgagagtcgaggacacggctacgtattattgtgtcagagacgtctgctattctactggttgcagagttccgggtgcttttgaaaactggggccgagggacactggtcaccgtctcttcg

SEQ ID NO: 14023 - DNA, 310 bp, Homo sapiens
  source 1..310: mol_type = other DNA
tggatcctctggattcgccttcagttactactggatgcactgggtccgccaagctccagggaaggggctggagtgggtctcacgaattgatggtgatggacttagcagaatttacgtggactccgtgaagggccgattcaccacctctagagacaacgccaagaacacggtgtatctgcaaatggacagcctgagagtcgaggacacggctacgtattattgtgtcagagatgtctgctattctactggttgcagagttccgggtgcttttgaaaactggggccgagggacactggtcaccgtctcttcg

SEQ ID NO: 14024 - DNA, 310 bp, Homo sapiens
  source 1..310: mol_type = other DNA
ttcaacctctggattctccttcagttaccacgccatggactggatccgccgggcaccggggaagggactggagtgggtctcacgaattgatggtgatggacttagcagaatttacgtggactccgtgaagggccgattcaccacctctagagacaacgccaagaacacggtgtatctgcaaatggacagtctgagagtcgaggacacggctacgtattattgtgtcagagatgtctgctattctactggttgcagagttccgggtgcttttgaaaactggggccgagggacactggtcaccgtctcttcg

SEQ ID NO: 14025 - DNA, 310 bp, Homo sapiens
  source 1..310: mol_type = other DNA
tggatcctctggattcgccttcagttactactggatgcactgggtccgccaagctccagggaaggggctggagtgggtctcacgaattgatgatgatggacttagcagaatttacgtggactccgtgaagggccgattcaccacctctagagacaacgccaagaacacggtgtatctgcaaatggacagtctgagagtcgaggacacggctacgtattattgtgtcagagatgtctgctattctactggttgcagagttccgggtgcttttgaaaactggggccgagggacactggtcaccgtctcttcg

SEQ ID NO: 14026 - DNA, 310 bp, Homo sapiens
  source 1..310: mol_type = other DNA
tggatcctctggattcgccttcagttactactggatgcactgggtccgccaagctccagggaaggggctggagtgggtctcacgaattgatggtgatggacttagcagaatttacgtggactccgtgaagggccgattcaccacctctagagacaacgccaagaacacggtgtatctgcaaatggacagtctgagagtcgaggacacggctacgtattattgtgtcagagatgtctgctattctactggttgcagagttccgggtgcttttgaaaactggggccgagggacactagtcaccgtctcttcg

SEQ ID NO: 14027 - DNA, 310 bp, Homo sapiens
  source 1..310: mol_type = other DNA
tggatcctctggattcgccttcagttactactggatgtactgggtccgccaagctccagggaaggggctggagtgggtctcacgaattgatggtgatggacttagcagaatttacgtggactccgtgaagggccgattcaccacctctagagacaacgccaagaacacggtgtatctgcaaatggacagtctgagagtcgaggacacggctacgtattattgtgtcagagatgtctgctattctactggttgcagagttccgggtgcttttgaaaactggggccgagggacactggtcaccgtctcttcg

SEQ ID NO: 14028 - DNA, 274 bp, Homo sapiens
  source 1..274: mol_type = other DNA
tgcagcctctagattcacctttagtaattcctggatgaactgggtccgccaggctccagggaaggggctggagtgggtggccaacataaatcaagatgaaagtgtgagacgctatgtggactctgtgaagggccgattcaccgtctccagagacaacgccaagaactcactgtatctacaaatgaacagcctgagagccgaggacacggctgtgtattattgtgtgagaggtgaagacatctggggccaagggacaatggtcagcgtctcttca

SEQ ID NO: 14029 - DNA, 274 bp, Homo sapiens
  source 1..274: mol_type = other DNA
tgcagcctctagattcacctttagtaattcctggatgaactgggtccgccaggctccagggaaggggctggagtgggtggccaacataaatgaaaatgaaagtgtgagacgctatgtggactctgtgaagggccgattcaccgtctccagagacaacgccaagaactcattgtatctacaaatgaacagcctgagagccgaggacacggctgtttattattgtgtgagaggtgaagacatctggggccaagggacaatggtcagcgtctcttca

SEQ ID NO: 14030 - DNA, 274 bp, Homo sapiens
  source 1..274: mol_type = other DNA
tgcagcctctagattcagcttcagtgactcctggatgaactgggtccgccaggctccagggaaggggctggagtgggtggccaatataaatgaaaatgaaagtgtgagacggtatgtggactctgtgaagggccgattcaccgtctccagagacaacgccaagaactcactgtttctacaaatgaacagcctgagagccgaggacacggctgtgtattactgtgtcagaggtgaagacatctggggccaagggacgatggtcagcgtctcttca

SEQ ID NO: 14031 - DNA, 274 bp, Homo sapiens
  source 1..274: mol_type = other DNA
tgcagcctctagattcacctttagtaattcctggatgaactgggtccgccaggctccagggaaggggctggagtgggtggccaacataaatgaaaatgaaagtgtgagacgctatgtggactctgtgaagggccgattcaccgtctccagagacaacgccaagaactcactgtatctacaaatgaacagcctgagagccgaggacacggctgtgtattattgtgtgagaggtgaagacatctggggccaggggacaatggtcagcgtctcttca

SEQ ID NO: 14032 - DNA, 274 bp, Homo sapiens
  source 1..274: mol_type = other DNA
tgcagcctctagattcacctttagtaattcctggatgaactgggtccgccaggctccagggaaggggctggagtgggtggccaacataaatgaaaatgaaagtgtgagacgctatgtggactctgtgaagggccgattcaccgtctccagagacaacgccaagaactcactgtatctacaaatgaacagcctgagagccgaggacacggctgtgtattattgtgtgagaggtgaagacatctggggccaagggacaatggtcagcgtctcttca

SEQ ID NO: 14033 - DNA, 274 bp, Homo sapiens
  source 1..274: mol_type = other DNA
tgcagcctctggaatcaccgtcactaattcctggatgaactgggtccgccaggctccagggaaggggctggagtgggtggccaacataaatgaaaatgaaggtgtgagacggtatgtggactctgtgaagggccgattcaccgtctccacagacaacgccaagaactcactgtatctacaaatgaacagcctgagagccgaggacacggctgtctattattgtgtgagaggtgaagacatctggggccaagggacaatggtcagcgtctcttca

SEQ ID NO: 14034 - DNA, 274 bp, Homo sapiens; identical to SEQ ID NO: 14029
  source 1..274: mol_type = other DNA

SEQ ID NO: 14035 - DNA, 274 bp, Homo sapiens
  source 1..274: mol_type = other DNA
tgcagcctctggattcacctttagtaattcctggatgaactgggtccgccaggctccagggaaggggctggagtgggtggccaacataaatggagatgaaagtgtgagacgctatgtggactctgtgaagggccgattcaccgtctccagagacaacgccaagaactcactgtatctacaaatgaacagcctgagagccgaggacacggctgtgtattattgtgtgagaggtgaagacatctggggccaagggacaatggtcagcgtctcttca

SEQ ID NO: 14036 - DNA, 274 bp, Homo sapiens
  source 1..274: mol_type = other DNA
tgcagcctctggattcacctttagtaattcctggatgaactgggtccgccaggctccagggaaggggctggagtgggtggccaacataaatggagatgaaagtgtgagacgctatgtggactctgtgaagggccgattcaccgtctccagagacaacgccaagaactcactgtatctacaaatgaacagcctgagagccgaggacacggctgtgtattattgtgtgagaggtgaagacatctggggccaagggacaatggtcagcgtcttttca

SEQ ID NO: 14037 - DNA, 274 bp, Homo sapiens
  source 1..274: mol_type = other DNA
tgcagcctctagattcacctttagtaattcctggatgaactgggtccgccaggctccagggaaggggctggagtgggtggccaacataaatgaaaatgaaagtgtgagacgctatatggactctgtgaagggccgattcaccgtctccagagacaacgccaagaactcactgtatctacaaatgaacagcctgagagccgaggacacggctgtgtattattgtgtgagaggtgaagacatctggggccaagggacaatggtcagcgtctcttca

SEQ ID NO: 14038 - DNA, 302 bp, Homo sapiens
  source 1..302: mol_type = other DNA
ccatctccggggacagtgtctctagcgacagtgttgcttggaactggatcaggcagtccccatcgagaggccttgagtggctgggaaggacacagtataggtctaagtggtctcatgattatgcagtatctgtgaaaagtcgaataagcatcaactcagatacatccaagaaccagttctccctgcagttgaactctgtgactcccgaggacacggctgtgtattactgcgtaagagatacgagtgcgcgggggatttacatggacgtctggagcacagggaccacggtcaccgtctcctcg

SEQ ID NO: 14039 - DNA, 302 bp, Homo sapiens
  source 1..302: mol_type = other DNA
ccatctccggggacagtgtctctagtaacagtgttgcttggaactggatcaggcagtccccatcgagaggccttgagtggctgggcaggacacactacaggtctaagtggaataatgattatgcgcaatctgtgaaaagtcgaataaccatcaacccagatacatccaagaaccagttctccctgcagctgaactccgtgactcccgaggacacggctgtgtattactgcgtaagagatacgagtgcgcgggggatttacatggacgtctggggcaaagggaccacggtcaccgtctcctcg

SEQ ID NO: 14040 - DNA, 302 bp, Homo sapiens
  source 1..302: mol_type = other DNA
ccatctccggggacagtgtctctagcgacagtgttgcttggaactggatcaggcagtccccatcgagaggccttgagtggctgggaaggacacagtataggtctgagtggtctcatgattatgcagtatctgtgaaaggtcgaataagcatcaactcagatacatccaagaaccagttgtccctgcagttgaactctgtgactcccgaggacacggctgtgtattactgcgtaagagatacgagtgcgcgggggatttacatggacgtctggagcacagggaccacggtcaccgtctcctcg

SEQ ID NO: 14041 - DNA, 302 bp, Homo sapiens; identical to SEQ ID NO: 14038
  source 1..302: mol_type = other DNA

SEQ ID NO: 14042 - DNA, 302 bp, Homo sapiens
  source 1..302: mol_type = other DNA
ccatctccggggacagtgtctctagtgacagtgttgcttggaactggatcaggcagtccccatcgagaggccttgagtggctgggaaggacacagtacaggtctaagtggatgtatgattatgcacaatctgtgaaaagtcgaataaccatcaacgcagatacagccaagaaccagttctccctgcagttgaactctgtgactcccgacgacacggctctgtattactgcgtaagagatacgagtgcgcgggggatttacatggacgtctggggcaaagggaccacggtcaccgtctcctcg

SEQ ID NO: 14043 - DNA, 302 bp, Homo sapiens
  source 1..302: mol_type = other DNA
ccatctccggggacagtgtctctagtaacagtgttgcttggaactggatcaggcagtccccatcgagaggccttgagtggctgggcaggacacactacaggtctaagtggtataatgattatgcgcaatctgtgaaaagtcgaataaccatcaacccagatacatccaagaaccagttctccctgcagctgaactctgtgactcccgaggacacggctgtgtattactgcgtaagagatacgagtgcgcgggggatttacatggacgtctggggcaaagggaccacggtcaccgtctcctcg

SEQ ID NO: 14044 - DNA, 302 bp, Homo sapiens
  source 1..302: mol_type = other DNA
ccatctccggggacagtgtctctagcgacagtgttgcttggaactggatcaggcagtccccatcgagaggccttgagtggctgggaaggacacagtataggtctaagtggtctcatgattatgcagtatctgtgaaaagtcgaataagcatcaactcagatacatccaagaaccagttgtccctgcagttgaactctgtgactcccgaggacacggctgtgtattactgcgtaagagatacgagtgcgcgggggatttacatggacgtctggagcacagggaccacggtcaccgtctcctcg

SEQ ID NO: 14045 - DNA, 301 bp, Homo sapiens
  source 1..301: mol_type = other DNA
tgtagcctctggattctcttttagtgaccatcccatgacctgggtccgccaggctccagggaaggggctggagtgggtctcaactattagtgcaggtagtgggacatactatgtagattctgtgacgggccggttcaccatctccagagacaatgccagggacacactgtatctgcagatgaacagcctgagagtcgacgacacggccatctattactgtgcgaagggcagtctacagccgtcccggagttacggactttttgagtcctggggccagggaaccctggtcaccgtctcctca

SEQ ID NO: 14046 - DNA, 301 bp, Homo sapiens
  source 1..301: mol_type = other DNA
tgtagcctctggattctcttttagtgaccatcccatgacctgggtccgccaggctccagggaaggggctggagtgggtctcaactattagtgcaggtagtgggacatactatgtagattctgtgacgggccggctcaccatctccagagacaatgccagggacacactgtatctgcagatgaacagcctgagagtcgacgacacggccatctattactgtgcgaagggcagtctacagccgtcccggagttacggactttttgagtcctggggccagggaaccctggtcaccgtctcctca

SEQ ID NO: 14047 - DNA, 301 bp, Homo sapiens
  source 1..301: mol_type = other DNA
tgcagcctctggattctcttttagtgaccatcccatgacctgggtccgccaggctccagggaaggggctggagtgggtctcaactattagtgcaggtagtgggacatactacgtagattctgtgacgggccggttcaccatctccagagacaatgccagggacacactgtatctgcagatgaacagcctgagagtcgacgacacggccatctattactgtgcgaagggcagtctgcagccctcccggagttacggactttttgagtcctggggccagggaaccctggtcaccgtctcctca

SEQ ID NO: 14048 - DNA, 293 bp, Homo sapiens
  source 1..293: mol_type = other DNA
ccatctccggagacagtgtctccagcaacacttttaattgggactggatcaggcagctcccatctggaggccttgagtggctgggaaggacatattacagctccaagtggtatactgattatgcagggtctgtgaaaagtcgaataatcatcagcgcagacacttccagaaaccagttctccctacagctgaactctgtgactcccgaggacacggctgtgtattactgtgcaagacagttccgtggaggcatggacgtctggggcgaagggaccacggtcaccgtctcgcca

SEQ ID NO: 14049 - DNA, 293 bp, Homo sapiens
  source 1..293: mol_type = other DNA
ccatctccggagacagtgtctccagcaacactgttaattgggactggatcaggcagctcccatctggaggccttgagtggctgggaaggacatattacaactccaagtggtatactgattatgcagggtctgtgaaaagtcgaataatcatcagcgcagacacttccagaaaccagttctccctacagctgaactctgtgactcccgaggacacggctgtgtattactgtgcaagacagttccgtggaggcatggacgtctggggcgaagggaccacggtcaccgtctcgcca

SEQ ID NO: 14050 - DNA, 293 bp, Homo sapiens
  source 1..293: mol_type = other DNA
ccatctccggagacagtgtctccagcaacactgttaattgggactggatcaggcagctcccatctggaggccttgagtggctgggaaggacatattacaactccaagtggtatactgattatgcagggtctgtgaaaagtcgaataatcatcagcgcagacacttccagaagccagttctccctacagctgaactctgtgactcccgaggacacggctgtgtattactgtgcaagacagttccgtggaggcatggacgtctggggcgaagggaccacggtcaccgtctcgcca

SEQ ID NO: 14051 - DNA, 293 bp, Homo sapiens
  source 1..293: mol_type = other DNA
ccatctccggagacagtgtctccagcaacactgttaattgggactggatcaggcagctcccatctggaggccttgagtggctgggaaggacatattacaactccaagtggtatactgattatgcagggtctgtgaaaagtcgaataatcatcagcgcagacacttccagaaaccagttctccctacagttgaactctgtgactcccgaggacacggctgtgtattactgtgcaagacagttccgtggaggcatggacgtctggggcgaagggaccacggtcaccgtctcgcca

SEQ ID NO: 14052 - DNA, 304 bp, Homo sapiens
  source 1..304: mol_type = other DNA
tgtcgcctctggattcaccttcactagttacaatttccattgggtccgccgggctccaggcaaggggctggaatgggtggcgaccatttcaaatgatggggccgagaaatacaactcagagtccgtgacgggccgattcaccgtctccagagacgtttctggcaactcaatatctctactaatgaacagcctgcggcctgaggacacggcactctattattgtgcgagagatacactccctttcgattcgtggactggcggatccggctactggggccacggcaccctggtcaccgtctcctca

SEQ ID NO: 14053 - DNA, 304 bp, Homo sapiens
  source 1..304: mol_type = other DNA
tgtcgcctctggattcactttaactagttataatttccattgggtccgccgggctccaggcaaggggctggaatgggtggcgaccatttcatatgatggggccgagagatacaactcagagtccgtgacgggccgattcaccgtctccagagacgtttctggcaactcaatatctctactaatgaacagcctgcggcctgaggacacggcagtctattattgtgcgagagatacactccctttcgattcgtggactggcggatccggctactggggccacggcaccctggtcaccgtctcctca

SEQ ID NO: 14054 - DNA, 295 bp, Homo sapiens
  source 1..295: mol_type = other DNA
tgtagcctctggattcaccttcagtctctatgcgatgcactgggtccgccacgttccagggaagggactggagtatgttgcggtagtgagcggtaatggggccagcacacattattcagactcagtggagggcagattcaccatctccagagacaactccaagaacacggtgcatcttcatatgggcagcctgagcgttgatgacacgggtgtgtatttctgtgcaagaggatacagtttcaacttcccctactttgactactggggccagggaaccctggtctccgttttctca

SEQ ID NO: 14055 - DNA, 295 bp, Homo sapiens
  source 1..295: mol_type = other DNA
tgtagcctctggattcaccttcagtctctatgcgatgcactgggtccgccacgttccagggaagggactggagtatgttgcggtagtgagtggtaatggggccagcacacattattcagactcagtggagggcagattcaccatctccagagacaactccaagaacacggtgcatcttcaaatgggcagcctgagcgttgatgacacgggtgtgtatttctgtgcaagaggatacagtttcaacttcccctactttgactactggggccagggaaccctggtctccgttttctca

SEQ ID NO: 14056 - DNA, 310 bp, Homo sapiens
  source 1..310: mol_type = other DNA
cactgtctctggtggctccatcagtacttactactggagctggatccggcagcccccggggaagggactggagtggattgggtatatctattacagtgggagcaccaactacaacccctccctcaagagtcgagtcaccatatcagtagacacgtccaagaaccagttctccctgaagctgagctctgtgaccgctgcggacacggccgtgtattactgtgcgagagatggttatgattacgtttgggggagttatcgccagggctggttcgacccctggggccagggaaccctggtcaccgtctcctca

SEQ ID NO: 14057 - DNA, 310 bp, Homo sapiens
  source 1..310: mol_type = other DNA
cagtgtctctggtggctccatgagtacttactactggagctggctccggcagtccccggggaagggactggagtggattgggtatgtctatgacagtggcatcaccaactacaacccctcgttcgagagtcgtgtcaccatttcaatagacacgtccacgaatcagttctccctgaagctgacctctgtgaccgctgcggacacggccgtctattattgtgcgagagatggatatgattatgtttgggggagttatcgccagggctggttcgacccctggggccagggatccctggtcaccgtctccgca

SEQ ID NO: 14058 - DNA, 310 bp, Homo sapiens
  source 1..310: mol_type = other DNA
cagtgtctctggtggctccatcagcagtggtaattactactgggcctggtaccgccagcccccagggatggggctggagtggattgggaccgtctattatactgggacggcctattacacccggtccctccagagtcgagtcaccatgtccgtagacacgtccaaaaaccacttctccctgaagctgagctctgtgaccgccgcagacacggccgtctattactgtgcgcgatcggccggccgtggctatagtgggtacgcatactatgtcgacccctggggccagggaaccctggtcaccgtttcctca

SEQ ID NO: 14059 - DNA, 310 bp, Homo sapiens
  source 1..310: mol_type = other DNA
cagtgtctctggtggctccatcagcagtggtaattactactgggcctggtaccgccagcccccagggatggggctggagtggattgggaccgtctattatactgggacgccctattacacccggtccctccagagtcgagtcaccatgtccgtagacacgtccaaaaaccacttctccctgaagctgagctctgtgaccgccgcagacacggccgtctattactgtgcgcgatcggccggccgtggctatagtgggtacgcatactatgtcgacccctggggccagggaaccctggtcaccgtttcctca

SEQ ID NO: 14060 - DNA, 310 bp, Homo sapiens
  source 1..310: mol_type = other DNA
cagtgtctctggtggctccatcagcagtggtaattactactgggcctggtaccgccagcccccagggatggggctggagtggattgggaccgtctattatactgggacggcctattacacccggtccctccagagtcgagtcaccatgtccgtagacacgtccaaaaaccaattctccctgaagctgagctctgtgaccgccgcagacacggccgtctattactgtgcgcgatcggccggccgtggctatagtgggtacgcatactatgtcgacccctggggccagggaaccctggtcaccgtttcctca

SEQ ID NO: 14061 - DNA, 319 bp, Homo sapiens
  source 1..319: mol_type = other DNA
cagtgtctctggtggctccatcagcagtggtggttactactggagttggatccgccagcacccagggaagggcctggagtggattggttacatctatcacagtgggagcacctactatgacccgtccctcaagagtcgagttaccatatcagtagacacgtctaagaaccagttctccctgaaggtgagctctgtgactgccgcggacacggccgtgtattactgtgcgagagataggcggggaagtaggtcttcgtcgcactcctactactcctacatggacgtctggggcaaagggaccacggtcaccgtctcctca

SEQ ID NO: 14062 - DNA, 319 bp, Homo sapiens; identical to SEQ ID NO: 14061
  source 1..319: mol_type = other DNA

SEQ ID NO: 14063 - DNA, 319 bp, Homo sapiens
  source 1..319: mol_type = other DNA
cactgtctctggtggctccatcagcagtggtggttactactggagctggatccgccagcacccagggaagggcctggagtggattgggtacatctatcacagtgggagcacctactatcacccgtccctcaagagtcgagttaccatatcagtagacacgtctaagaaccagttctccctgaaggtgagctctgtgactgccgcggacacggccgtgtattactgtgcgagagataggcggggaagtaggtcttcgtcgcactcctactactcctacatggacgtctggggcaaagggaccacggtcaccgtctcctca

SEQ ID NO: 14064 - DNA, 306 bp, Homo sapiens
  source 1..306: mol_type = other DNA
gcatctggatacaccttcaccaactactatatgcactgggtgcgacaggcccctggacaagggcttgagtggatgggaataatcaatactagtggtggtagcacaagctacgcacagaagttccagggcagagtcaccgtgaccagggacacgtccacgagcacagtgtacatggagctgagcagcctgagatctgaggacacggccgtgtattactgtgcgagagatggcataggcgtcgtaccagctgctcttggcaactggttcgacccctggggccagggaaccctggtcaccgtctcctca

SEQ ID NO: 14065 - DNA, 306 bp, Homo sapiens
  source 1..306: mol_type = other DNA
gcatctggatacaccttcaccaactactatatgcactgggtgcgacaggcccctggacaagggcttgagtggatggcaataatcaatactagtggtggtagcacaagctacgcacagaagctccagggcagagtcaccgtgaccagggacacgtccacgagcacagtgtacatggagctgagcagcctgagatctgaggacacggccgtgtattactgtgcgagagatggcataggcgtcgtaccagctgctcttggcaactggttcgacccctggggccagggaaccctggtcaccgtctcctca

SEQ ID NO: 14066 - DNA, 306 bp, Homo sapiens
  source 1..306: mol_type = other DNA
gcctctggatacaccttcaccaactactatatgcactgggtgcgacaggcccctggacaaggccttgagtggatggcaataatcaatactagtggtggtagcacaagttacgcacagaaactccagggcagagtcaccgtgaccagggacacgtccacgagcacagtgtacatggagctgagcagcctgagatctgaggacacggccgtgtattactgtgcgagagatggcataggcgtcgtaccagctgctcttggcaactggttcgacccctggggccagggaaccctggtcaccgtctcctca

SEQ ID NO: 14067 - DNA, 291 bp, Homo sapiens
  source 1..291: mol_type = other DNA
aaggcttctggatacagctttaccacctactggatcgcctgggtgcgccagatgcccgggaaaggcctggagtggatggggatcatctatcttggtgactctgataccaaatacagcccgtccttccaaggccaggtcaccatctcagccgacaagtccatcagcgccgcctacctgcagtggagcagcctgaaggcctcggacaccgccatgtactactgtgcgagacagaggaatagcaagtcgtcctttgactcctggggccagggaaccctggtcaccgtctcctca

SEQ ID NO: 14068 - DNA, 291 bp, Homo sapiens
  source 1..291: mol_type = other DNA
aaggcttctggatacagctttaccacctactggatcggctgggtgcgccagatgcccgggaaaggcctggagtggatggggatcatctatcttggtgactctgataccaaatacagcccgtccttccaaggccaggtcaccatctcagccgacaagtccatcagcgccgcctacctgcagtggagcagcctgaaggcctcggacaccgccatgtattactgtgcgagacagaggaatagcaagtcgtcctttgactcctggggccagggaaccctggtcaccgtctcctca

SEQ ID NO: 14069 - DNA, 291 bp, Homo sapiens
  source 1..291: mol_type = other DNA
aaggcttctggatacagctttaccacctactggatcgcctgggtgcgccagatgcccgggaaaggcctggagtggatggggatcatctatcttggtgactctgataccaaatacagcccgtccttccaaggccaggtcaccatctcagccgacaagtccatcagcgccgcctacctgcagtggagcagcctgaaggcctcggacaccgccatgtattactgtgcgagacagaggaatagcaagtcgtcctttgactcctggggccagggaaccctggtcaccgtctcctca

SEQ ID NO: 14070 - DNA, 291 bp, Homo sapiens; identical to SEQ ID NO: 14068
  source 1..291: mol_type = other DNA

SEQ ID NO: 14071 - DNA, 291 bp, Homo sapiens
  source 1..291: mol_type = other DNA
aaggcttctggatacagctttaccacctactggatcggctgggtgcgccagatgcccgggaaaggcctagagtggatggggatcatctatcttggtgactctgataccaaatacagcccgtccttccaaggccaggtcaccatctcagccgacaagtccatcagcgccgcctacctgcagtggagcagcctgaaggcctcggacaccgccatgtattactgtgcgagacagaggaatagcaagtcgtcctttgactcctggggccagggaaccctggtcaccgtctcctca

SEQ ID NO: 14072 - DNA, 298 bp, Homo sapiens
  source 1..298: mol_type = other DNA
tgcagcctctgaattcacctttagcagccatgccatgagctgggtccgccaggctccagggaaggggctggagtgggtctcagccattagtcatagtggtggcagcacacactacgcagactccgtgaagggccgtttcaccatctccagagacaattccaagaacacgctgtatctgcaaatgaacggcctgagagccgaggacacggccgtatattactgtgccaaaggggcttggcggcagctcggatcttactttgactactggggccagggaaccctggtcaccgtctcctca

SEQ ID NO: 14073 - DNA, 298 bp, Homo sapiens
  source 1..298: mol_type = other DNA
tgcagcctctgaattcacctttagcagccatgccatgagctgggtccgccaggctccagggaaggggctggagtgggtctcagccattagtcatagtggtggcagcacacactacgcagactccgtgaagggccgtttcaccatctccagagacaattccaagaacacgctgtatctgcaaatgaacggcctgagagccgaggacacggccgtatattactgtgccaaaggggcttggcggcagctcggatcttactttgactactggggccagggaaccctggtcaccgtctcctcg

SEQ ID NO: 14074 - DNA, 283 bp, Homo sapiens
  source 1..283: mol_type = other DNA
cgcagcgtctgggttcatgttcagcagtcacgagatgagctgggtccgccaggccccgggaaaggggctagagtgggttgccaccatcactaatggtggttacacaatccactatgcagcttctgtgaagggccgcttcaccatctccagagacaacgccaagggtctactatttctccagatgaacgacctgagaggcgccgacacgggtctctattattgcgcgaatttgtggtcgtcatggggctattggggccagggaacccaggtcaccgtctcttca

SEQ ID NO: 14075 - DNA, 283 bp, Homo sapiens
  source 1..283: mol_type = other DNA
cgcagcgtctggattcatgttcagcagtcacgaaatgagctgggtccgccaggccccgggaaaggggctagagtgggttgccaccatcactaatggtggttacacaatccactatgcagcttctgtgaagggccgcttcaccatctccagagacaacgccaagggtctactgtttctccagatgaacgacctgagaggcgccgacacgggtctctattattgcgcgaatttgtggtcgtcatggggctattggggccagggaacccaggtcaccgtctcttca

SEQ ID NO: 14076 - DNA, 292 bp, Homo sapiens
  source 1..292: mol_type = other DNA
cactgtctctggtggctccatcagtccttactactggagctggatccggcagcccccagggaagggactggagtggattggtgatatctattacagtgggagcaccaactacaacccctccctcaagagtcgagtcaccatatcactagacacgtccaagaaccagttctccctgaacctggcctctgtgaccgccgcagacacggccgtctattactgtgcgagaaaggtgtatgctaatttctactacatggacgtctggggcaaagggaccacggtcaccgtctcctca

SEQ ID NO: 14077 - DNA, 292 bp, Homo sapiens
  source 1..292: mol_type = other DNA
ctctgtctctggtgtctccatcagtccttactactggagctggatccggcagcccccagggaagggactggagtggattggggatatctattacagtgggagcaccaactacaacccctccctcaagagtcgagtcaccatatcagtagacacgtccaagaaccagttctccctgaagctgacctctgtgaccgccgcagacacggccgtgtattactgtgcgagaaaggtctatgctaatttctactacatggacgtctggggcaaagggaccacggtcaccgtctcctca

SEQ ID NO: 14078 - DNA, 292 bp, Homo sapiens
  source 1..292: mol_type = other DNA
cactgtctctggtgactccatcagtcgttactactggagctggatccggcagcccccagggaagggactggagtggattggggaaatctattacactgggagcaccaattacaacccctccctcaagagtcgagtcaccatatcactagacacgtccatgaaccacttctccctgatggtgacctctgtgaccgccgcagacacggccgtctattattgtgcgagaaaggtgtatgctaatttctactacatggacgtctggggcaaagggaccacggtcaccgtctcctca

SEQ ID NO: 14079 - DNA, 340 bp, Homo sapiens
  source 1..340: mol_type = other DNA
tgcagcctctggattcaccttcagtacctattacatgacctgggtccgccaggctccagggcaggggctggagtgggtctcatccattagttataccagtggcgacatcttttactcagactctgtgaagggccgattcaccatctccagagacaacgcccagaactcactgtatctgcaaatgaacagcctgggagtcgacgacacggctgtttattactgtgcgagaggaggggctcagtttggcccatgggtggctggtttagggatacatggatactaccaccactactactatatggacgtctggggccaagggaccccggtcaccgtctcctca

SEQ ID NO: 14080 - DNA, 340 bp, Homo sapiens
  source 1..340: mol_type = other DNA
tgtagcctctggattcaccttcactacctattacatgacctgggtccgccaggctccagggcaggggctggagtgggtctcatccattagttataccagtggcgacatcttttactcagactctgtgaagggccgattcaccatctccagagacaacgcccagaactcactgtatctgcaaatgaacagcctgggagtcgacgacacggctgtttattactgtgcgagaggaggggctcagtttggcccatgggtggctggtttagggatacatggatactaccaccactactactatatggacgtctggggccaagggaccccggtcaccgtctcctca

SEQ ID NO: 14081 - DNA, 340 bp, Homo sapiens
  source 1..340: mol_type = other DNA
tgcagcctctggattcaccttcagtacctattacatgacctgggtccgccaggctccagggcaggggctggagtgggtctcatccattagttataccagtggcgacatcttttattcagactctgtgaagggccgattcaccatctcccgagacaacgcccagaactcactatatctgcaaatgaacagcctgggagccgacgacacggctgtttattactgtgcgagaggaggggctcagtttggcccatgggtggctggtttagggatacatggatactaccaccactactactatatggacgtctggggccaagggaccccggtcaccgtctcctca

SEQ ID NO: 14082 - DNA, 340 bp, Homo sapiens
  source 1..340: mol_type = other DNA
tgcagcctctggattcaccttcagtacctattacatgacctgggtccgccaggctccagggcaggggctggagtgggtctcatccattagttataccagtggcgacatcttttattcagactctgtgaagggccgattcaccatctccagagacaacgcccagaactcactatatctgcacatgaacagcctgggagccgacgacacggctgtttattactgtgcgagaggaggggctcagtttggcccatgggtggctggtttagggatacatggatactaccaccactactactatatggacgtctggggccaagggaccccggtcaccgtctcctca

SEQ ID NO: 14083 - DNA, 340 bp, Homo sapiens
  source 1..340: mol_type = other DNA
tgcagcctctggattcaccttcagtacctattacatgacctgggtccgccagggtccagggcaggggctggagtgggtctcatccattagttataccagtggcgacatcttttactcagactctgtgaagggccgattcaccatctccagagacaacgcccagaactcactgtatctgcaaatgaacagcctgggagccgacgacacggctgtttactactgtgcgagaggaggggctcagtttggcccatgggtggctggtttagggatacatggatactaccaccactactactatatggacgtctggggccaagggaccccggtcaccgtctcctca

SEQ ID NO: 14084 - DNA, 340 bp, Homo sapiens
  source 1..340: mol_type = other DNA
tgcagcctctggattcaccttcagtacctattacatgacctgggtccgccaggctccagggcaggggctggagtgggtctcatccattagttataccagtggcgacatctcttattcagactctgtgaagggccgattcaccatctcccgagacaacgcccagaactcactatatctgcaaatgaacagcctgggagccgacgacacggctgtttattactgtgcgagaggaggggctcagtttggcccatgggtggctggtttagggatacatggatactaccaccactactactatatggacgtctggggccaagggaccccggtcaccgtctcctca

SEQ ID NO: 14085 - DNA, 340 bp, Homo sapiens
  source 1..340: mol_type = other DNA
tgtagcctctggattcaccttcactacctattacatgacctgggtccgccaggctccagggcaggggctggagtgggtctcatccattagttataccagtggcgacatcttttactcagactctgtgaagggccgattcaccatctccagagacaacgcccagaactcactgtatctgcaaatgaacagcctgggagtcgacgacacggctgtttattactgtgcgagaggaggggctcagtttggcccatgggtggctggtttagggatacatggatactaccaccactactactatatggacgtctggggccaagggaccccgatcaccgtctcctca

SEQ ID NO: 14086 - DNA, 280 bp, Homo sapiens
  source 1..280: mol_type = other DNA
tgcaggctctggattcactttcgataacgcctggatgagctgggtccgccaggctccagggaaggggctggagtgggttgctcgtattaaaaagagaagtgatggtgggacaacagactacgctgcacccgtgaaaggcagattcaccatctcaagagatgattcaaaaaacacgctgtatttgcaaatgaacagcctgaaaaccgaggacacagccgtgtattactgtactacagatccttacgtctggggcaaagggaccacggtcatcgtctcctca

SEQ ID NO: 14087 - DNA, 280 bp, Homo sapiens
  source 1..280: mol_type = other DNA
tgcaggttctggattcacttttagtaacgcctggatgagctgggtccgccaggctccagggaaggggctggagtgggttggccgtattaaaagcaatattgatggtgggacaacagactacgctgcacccgtgaaaggcagattcaccatctcaagagatgattcaaaaaacacgctgtatctgcaaatgaacagcctgaaaaccgaggacacagccgtgtattactgtaccacagatccttacgtctggggcaaagggaccacggtcaccgtctcctca

SEQ ID NO: 14088 - DNA, 280 bp, Homo sapiens
  source 1..280: mol_type = other DNA
tgcagcctctggattcactttcactaacgcctggatgagctgggtccgccaggctccagggaaggggctggagtgggttggccgtattaaaagcaatattgatggtgggacaacagactacgctgcacccgtgaaaggcagattcaccatctcaagagatgattcaaaacacacgttctatctgcaaatgaacagcctgaaaaccgaggacacagccgtgtattattgtaccacagatccttacgtctggggcaaagggaccacggtcaccgtctcctca

SEQ ID NO: 14089 - DNA, 292 bp, Homo sapiens
  source 1..292: mol_type = other DNA
tgcagcctctggattcaccttcagtaactatgccatgaactgggtccgccaggctccagggaaggggctggaatgggtcgcgtccattgatagtggtagcacttacatattctacgcagactcagtgaagggccgattcaccatctccagagacaacgccaagaactcactctatctgcaaatgaacagcctgagagccgaggacacggctgtatattactgtgcgaggcaccatagtagtgacggctggttcggcccctggggccagggaaccctggtcaccgtctcctca

SEQ ID NO: 14090 - DNA, 292 bp, Homo sapiens
  source 1..292: mol_type = other DNA
tgcagcctctggattcagcttcagtacctacgccatgaactgggtccgccaggctccagggaaggggctggagtgggtctcgtccattgatagtagtagcagttacatattctacgcagactcagtgaagggccgattcaccatctccagagacaacgccaagaactcactgtatctgcaaatgaacagcctgagaggcgaggacacggctgtgtattactgtgcgaggcaccatagcagtgacggctggttcggcccctggggccagggaaccctggtcaccgtctcctca

SEQ ID NO: 14091 - DNA, 292 bp, Homo sapiens
  source 1..292: mol_type = other DNA
tgcagcctctggattcaccttcgataactatgccatgaactgggtccgccaggctccagggaaggggctggaatgggtcgcgtccattgatagtggtagcacttacatattctacacaaactcagtgaagggccgattcaccatctccagagacaacgccaagaactcactctatctgcaaatgaacagcctgagagccgacgacacggctgtatattactgtgcgaggcaccatagtagtgacggctggttcggcccctggggccagggaaccctggtcaccgtctcctca

SEQ ID NO: 14092 - DNA, 280 bp, Homo sapiens
  source 1..280: mol_type = other DNA
tgcagtctctggattcagctttagcaccaattggatgacctgggtccgccaggctcccgggaaggggctggagtgggtggccaacataaaccacgatggaactgagaaatactatgtggactctgtgaagggccgattcaccatctccagagacaacgccaagaactcactgtatctacaaatgaccagcctgagcgccgaggacacggctctctattactgtgcgacctatacgggcttgggctcctggggccagggaaccctggtcaccgtctcctca

SEQ ID NO: 14093 - DNA, 280 bp, Homo sapiens
  source 1..280: mol_type = other DNA
tgaagtctctggattcagctttagcagcaattggatgagctgggtccgccaggctcccgggaaggggctggagtgggtggccaacataaagcacgatggaactgagaaatactatgtggactctgtgaagggccgattcaccatctccagagacaacgccaagaactcactgtatctacaaatgaccagcctgagcgccgaggacacggctctctattactgtgcgacctatacgggcttgggctcctggggccagggaaccctggtcaccgtctcctca

SEQ ID NO: 14094 - DNA, 280 bp, Homo sapiens
  source 1..280: mol_type = other DNA
tgcagtctctggattcagctttagcagcaattggatgagctgggtccgccaggctcccgggaaggggctggagtgggtggccaacataaagcacgatggaactgagaaatactatgtggactctgtgaagggccgattcaccatctccagagacaacgccaagaactcactgtatctacaaatgaccagcctgagcgccgaggacacggctctctattactgtgcgacctatacgggcttgggctcctggggccagggaaccctggtcaccgtctcctca

SEQ ID NO: 14095 - DNA, 280 bp, Homo sapiens
  source 1..280: mol_type = other DNA
tgcagtctctggattcaactttgacaccaattacatgacctgggtccgccaggctcccgggaaggggctggagtgggtggccaacataaaccacgatggaactgagaaaaactatgtggactctgtgaagggccgattcaccatctccagagacaacgccaaggactcactgtatctacaaatgaccagcctgagcgccgaggacacggctctctattactgtgcgacctatacgggcttgggctcctggggccagggaaccctggtcaccgtctcctca

SEQ ID NO: 14096 - DNA, 304 bp, Homo sapiens
  source 1..304: mol_type = other DNA
tacagcctcggggttctccgtcagtgacaacttcatgagctgggtccgccaggctccagggaaggggctggagtgggtctcacttatttatagtggtggtaggacagactacgcagactccgtgaagggccgattcaccatctccagagacaattccaagaacacgctgtatcttcaaacgaacaggctgagagtcgaggacacggccgtctattactgtgcgagagtaggttcttactatgatagtagtgaagctgagcacttccaaaactggggccagggcgccctagtcaccgtctcctca

SEQ ID NO: 14097 - DNA, 304 bp, Homo sapiens
  source 1..304: mol_type = other DNA
tacagcctcgggattctccgtcagttacaacttcatgagctgggtccgccaggctccggggacggggctggagtgggtctcagttatttatagcggtggtcgcacatactacgcagactccgtgaagggccgattcaccatctctagagacaattccaagaacacggtgtatcttcaaatgaataggctgagagtcgaggacacggccgtctactactgtgcgagagtaggttcttactatgacagtagtgaagctgaacacttccagaactggggccagggcgccctagtcaccgtctcctca

SEQ ID NO: 14098 - DNA, 304 bp, Homo sapiens
  source 1..304: mol_type = other DNA
tacagcctcggggttctccgtcagtaacaactacatgagctgggtccgccaggctccagggaaggggctggagtgggtctcagttatttatagtggtgggaacacatactacgcagactccgtgaagggccgattcaccatctccagagacagttccaagaacacgctgtatcttcaaatgaacaggctgagagtcgaggacacggccgtctattactgtgcgagagtaggttcctactatgatagtagtgaagctgaacacttccagaactggggccagggcgccctggtcaccgtctcctca

SEQ ID NO: 14099 - DNA, 304 bp, Homo sapiens
  source 1..304: mol_type = other DNA
tacagcctcggggttctccgtcagtaacaacttcatgagttgggtccgccaggctccagggaaggggctggagtgggtctcagttatatatagcggtggtagtacatactacgcagactccgtgaagggccgattcaccatctccagagacaattccaagaacacgctgtatcttcaaatgaacaggctgagagtcgaggacacggccgtctattactgtgcgagagtgggttcttactatgatagtagtgaagctgaacacttccaaaactggggccagggcgccctggtcaccgtctcctca

SEQ ID NO: 14100 - DNA, 289 bp, Homo sapiens
  source 1..289: mol_type = other DNA
tagaggcactggattcagttttaggacctatagtatgaactgggtccgccaggctccagggaaggggctgcagtgggtcgcttcaattagtgatacgagtacttacatatatcacgcggagtcagtgaggggccgattcaccatctccagaaacaacgccgacgcctcagtgtatctgcaaatgaacagcctgcgagtcgaggacacggctatatattactgtgcgagagctttacttatggggaagtttgactcctggggccagggagccctggtcaccgtctcctca

SEQ ID NO: 14101 - DNA, 289 bp, Homo sapiens
  source 1..289: mol_type = other DNA
tacaggcactggattcagttttaggacctatagtatgaactgggtccgccaggctccagggaaggggctgcagtgggtcgcttcaattagtgatacgagtacttacatatatcacgcggactcagtgaggggccgattcaccatctccagaaacaacgccgacgcctcagtgtatctgcaaatgaacagcctgcgagtcgaggacacggctatatattactgtgcgagagctttacttatggggaagtttgactcctggggccagggagccctggtcaccgtctcctca

SEQ ID NO: 14102 - DNA, 280 bp, Homo sapiens
  source 1..280: mol_type = other DNA
cgcagtctctggattcaccttcagcagatatgaaatgaactgggtccgccaggctccagggaagggactggagtgggtttcatacattaatgttagtgaaagtagtaccttctacgcagactctgtgaagggccgattcaccatctccagagacaacgccaagaactcactgtatctgcaaatgaacagcctgagacccgaggacacggctgtttattactgtgcgagcggggcccagtccgacttctggggccagggaaccctggtcaccgtctcctca

SEQ ID NO: 14103 - DNA, 280 bp, Homo sapiens
  source 1..280: mol_type = other DNA
cgcagtctctggattcaccttcagcagatatgaaatgaactgggtccgccaggctccagggaagggactggagtgggtttcatacattaatgttagtgaaagtagtaccttctacgcagactctgtgaagggccgattcaccatctccagagacaacgccaagaactcactgtatctgcaaatgaacagcctgagacccgaggacacggctgtttattactatgcgagcggggcccagtccgacttctggggccagggaaccctggtcaccgtctcctca

SEQ ID NO: 14104 - DNA, 280 bp, Homo sapiens
  source 1..280: mol_type = other DNA
cgcagtctctggattcaccttcagcaaatatgaaatgaactgggtccgccaggctccagggaaggggctggagtgggtttcatacattaatgttagtgaaactaacaccttctacgcaggctctgtgaagggccgattcaccatctccagagacaacgccaagaactcactgtttctgcaaatgaacagcctgagacccgaggacacgggtgtttattactgtgcgagcggggcccagtccgacttctggggcccggggaccctggtcaccgtctcctca

SEQ ID NO: 14105 - DNA, 289 bp, Homo sapiens
  source 1..289: mol_type = other DNA
tgcaatgtccggattcacctttactagtcattggatggcctgggtccgccaggctccagtgacggggctggagtggctggccaacataaagccagacggaactgagaaaaaccatgtggcctctgtgaggggccgattcaccatctccagagacaacgccaagagctcactctatctgcaaatgaacagcctgagagatgacgacacggctgtgtattattgtgtgagagacgttggtggtggctactttgacttctggggccagggaaccctggtcaccgtctcctca

SEQ ID NO: 14106 - DNA, 289 bp, Homo sapiens
  source 1..289: mol_type = other DNA
tgcaatgtccggattcacctttactagtcattggatggcctgggtccgccaggctccagtgacggggctggagtggctggccagcataaagccagacggaactgagaaaaaccatgtggcctctgtgaggggccgattcaccatctccagagacaacgccaagagctcactctatctgcaaatgaacagcctgagagatgacgacacggctgtgtattattgtgtgagagacgttggtggtggctactttgacttctggggccagggaaccctggtcaccgtctcctca

SEQ ID NO: 14107 - DNA, 289 bp, Homo sapiens
  source 1..289: mol_type = other DNA
tgcaatgtccggattcacctttacaagttattggatggcctgggtccgccaggctccagtgacggggctggagtggctggccaacataaagccagacggaactgagaaaaaccatgtggcctctgtgaggggccgattcaccatctccagagacaacgccaagagctcactctatctgcaaatgaacagcctgagagatgacgacacggctgtgtattattgtgtgagagacgttggtggtggctactttgacttctggggccagggaaccctggtcaccgtctcctca

SEQ ID NO: 14108 - DNA, 298 bp, Homo sapiens
  source 1..298: mol_type = other DNA
cagtgtctctggtggctccatcactgatcactactggaactggatccggcagtccccggggaagggactggagtgggttggccatatccgtaagactgagagtacccaccagaatccctccctcaacagtcgactcaccttatcactagacacgtccaagaaccagatctccctgaaactgagctctgtgaccgctgcggacacggccgtgtattattgtggaaggtctgatacgagtggtaattctttcgtggaatttgactactggggccagggaaccctggtcaccgtctcctca

SEQ ID NO: 14109 - DNA, 298 bp, Homo sapiens
  source 1..298: mol_type = other DNA
cagtgtctctggtggctccatcactgatcactactggaattggatccggcagtccccggggaagggactggagtgggttggccatatccgtaaaactgagagtacccaccagaatccctccctcaacggtcgactcaccttatcactagacacgtccaagaaccagatctccctgaaactgagctctgtgaccgctgcggacacggccgtgtattattgtggaaggtctgatacgagtggtaattctttcgtggaatttgactattggggccagggaaccctggtcactgtctcctca

SEQ ID NO: 14110 - DNA, 298 bp, Homo sapiens
  source 1..298: mol_type = other DNA
cagtgtctctggtggctccatcactgatcactactggaactggatccggcagtccccggggaagggactggagtgggttggccatatccgtgtgactgagagtacccaccagaatccctccctcaacagtcgactcaccttatcactggacacgtccaggaaccagatctccctgaaactgagctctgtgaccgctgcggacacggccgtgtattattgtggaaggtctgatacgagtggtaattctttcgtggaatttgactactggggccagggaaccctggtcaccgtctcctca

SEQ ID NO: 14111 - DNA, 298 bp, Homo sapiens
  source 1..298: mol_type = other DNA
cagtgtctctggtggctccatcactgatcactactggaattggatccggcagtccccggggaagggactggagtgggttggccatatccgtaaaactgagagtacccaccagaatccctccctcaacggtcgactcaccttatcactagacacgtccaagaaccagatctccctgaaactgagctctgtgaccgctgcggacacggccgtttatttttgtggaaggtctgatacgagtggtaattctttcgtggaatttgactattggggccagggaaccctggtcactgtctcctca

SEQ ID NO: 14112 - DNA, 298 bp, Homo sapiens
  source 1..298: mol_type = other DNA
cagtgtctctggtggctccatcactgatcactactggaattggatccggcagtccccggggaagggactggagtgggttggccatatccgtatgactgagaacacccaccagaatccctccctcaacggtcgactcaccttatcgctagacacgtccaagaacgagatctccctgaaactgaggtctgtgaccgctgcggacacggccgtgtattattgtggaaggtctgatacgagtggtaattctttcgtggaatttgactattggggccagggaaccctggtcaccgtctcctca

SEQ ID NO: 14113 - DNA, 298 bp, Homo sapiens
  source 1..298: mol_type = other DNA
cagtgtctctggtggctccatcactgatcactactggaactggatccggcagtccccggggaaggggctggagtgggttggccatatccgtcagactgagagtacccaccagaatccctccctcaacagtcgactcaccttatcactagacacgtccaagaaccagatctccctgaaactgagctctgtgaccgctgcggacacggccgtgtattattgtggaaggtctgatacgagtggtaattctttcgtggaatttgactactggggccagggaaccctggtcaccgtctcctca

SEQ ID NO: 14114 - DNA, 298 bp, Homo sapiens
  source 1..298: mol_type = other DNA
cagtgtctctggtggctccatcactgatcactactggaattggatccggcagtccccggagaagggactggagtgggttggccatatccgtaagactgagagtacccaccagaatccctccctcaacggtcgactcaccttatcactagacacgtccaagaaccagatctccctgaaactgagctctgtgaccgctgcggacacggccgtgtattattgtggaaggtctgatacgagtggtaattctttcgtggaatttgactactggggccagggaaccctggtcaccgtctcctca

SEQ ID NO: 14115 - DNA, 298 bp, Homo sapiens; identical to SEQ ID NO: 14113
  source 1..298: mol_type = other DNA

SEQ ID NO: 14116 - DNA, 298 bp, Homo sapiens
  source 1..298: mol_type = other DNA
cagtgtctctggtggctccatcactgatcactactggaactggatccggcagtccccggggaagggactggagtgggttggccatatccgtaagactgagagtacccaccagaatccctccctcaacagtcgactcaccttatcactagacacgtccaagaaccagatttccctgaaactgagttctgtgaccgctgcggacacggccgtgtattattgtggaaggtctgacacgagtggcaattctttcgtagaatttgactactggggccagggaaccctggtcaccgtctcctca

SEQ ID NO: 14117 - DNA, 298 bp, Homo sapiens
  source 1..298: mol_type = other DNA
cagtgtctctggtggctccatcactgatcactactggaactggatccggcagtccccggggaagggactggagtgggttggccatatccgtatgactgagagcacccaccagaatccctccctcaacagtcgactcaccttatcactagacacgtccaagaaccagatctccctgaaactgagctctgtgaccgctgcggacacggccgtgtattattgtggaaggtctgatactagtggtaattctttcgtggaatttgactactggggccagggaaccctggtcaccgtctcctca

SEQ ID NO: 14118 - DNA, 298 bp, Homo sapiens
  source 1..298: mol_type = other DNA
cagtgtctctggtggctccatcactgatcactactggaactggatccggcagtccccggggaagggactggagtgggttggccatatccgtaagactgagagtacccaccagaatccctccctcaacagtcgactcaccttatcactagacacgtccaagaaccagatctccctgaaactgagctctgtgaccgctgcggacacggccgtgtattattgtggaaggtctgatacgagtggtaattctttcgtggaatttgactactggggccagggaactctggtcaccgtctcctca

SEQ ID NO: 14119 - DNA, 298 bp, Homo sapiens
  source 1..298: mol_type = other DNA
cagtgtctctggtggctccatcactgatcactactggaactggatccggcagtccccggggaagggacttgagtgggttggccatatccgtaagactgagagtacccaccagaatccctccctcaacagtcgactcaccttatcactagacacgtccaagaaccagatctccctgaaactgacctctgtgaccgcagcggacacggccgtgtattattgtggacggtctgatacgagtggtaattctttcgtggaatttgactactggggccagggaaccctggtcaccgtctcctca

SEQ ID NO: 14120 - DNA, 298 bp, Homo sapiens
  source 1..298: mol_type = other DNA
cagtgtctctggtggctccatcactgatcactactggaactggatccgccagtccccggggaagggactggagtgggttggccatatccgtaagactgagactacccaccagaatccctccctcaacagtcgactcaccttatcactagacacgtccaagaaccagatctccctgaaactgacctctgtgaccgctgcggacacggccgtgtattattgtggaaggtctgatacgagtggtaattctttcgtggaatttgactactggggccagggaaccctggtcaccgtctcctca

SEQ ID NO: 14121 - DNA, 298 bp, Homo sapiens
  source 1..298: mol_type = other DNA
cagtgtctctggtggctccatcactgatcactactggaactggatccggcagtccccggggaaggggctggagtgggttggccatatccgtcagactgagagtacccaccagaatcccttcctcaacagtcgactcaccttatcactagacacgtccaagaaccagatctccctgaaactgagctctgtgaccgctgcggacacggccgtgtattattgtggaaggtctgatacgagtggtaattctttcgtggaatttgactactggggccagggaaccctggtcaccgtctcctca

SEQ ID NO: 14122 - DNA, 298 bp, Homo sapiens
  source 1..298: mol_type = other DNA
cagtgtctctggtggctccatcactgatcactactggaattggatccggcagtccccggggaagggactggagtgggttggccatatccgtgtcactgagagtacccaccagaatccctccctcaacagtcgactcaccttatcactagacacgtccaagaaccagatctccctgaaactgagctctgtgaccgctgcggacacggccgtgtattattgtggaaggtctgatacgagtggtaattctttcgtggaatttgactactggggccagggaaccctggtcaccgtctcctca

SEQ ID NO: 14123 - DNA, 298 bp, Homo sapiens
  source 1..298: mol_type = other DNA
cagtgtctctggtggctccatcactgatcactactggaactggatccggcagtccccggggaagggactggagtgggttggccatatccgtaagactgagactacccaccagaatccctccctcaacagtcgactcaccttatcactagacacgtccaagaaccagatctccctgaaactgagctctgtgaccgctgcggacacggccgtgtattattgtggaaggtctgatacgagtggtaattctttcgtggaatttgactactggggccagggaatcctggtcaccgtctcatca

SEQ ID NO: 14124 - DNA, 298 bp, Homo sapiens
  source 1..298: mol_type = other DNA
cagtgtctctggtggctccatcactgatcactactggaactggatccggcagtccccggggaagggactggagtgggttggccatatccgtaagactgagactacccaccagaatccctccctcaacagtcgactcaccttatcactagacacgtccaagaaccagatttccctgaaactgagttctgtgaccgctgcggacacgggcgtgtattattgtggaaggtctgacacgagtggcaattctttcgtggaatttgactactggggccagggaatcctggtcaccgtctcctca

SEQ ID NO: 14125 - DNA, 298 bp, Homo sapiens
  source 1..298: mol_type = other DNA
cagtgtctctggtggctccatcactgatcactactggaactggatccggcagtccccggggaagggactggagtgggttggccatatccgtaagactgagagtacccaccagaatccctccctcaacagtcgactcaccttatcactagacacgtccaagaaccagatctccctgaaactgagctctgtgaccgctgcggacacggccgtgtattattgtggaaggtctgatacgagtggtaattctttcgtggagtttgactactggggccagggaaccctggtcaccgtctcctca

SEQ ID NO: 14126 - DNA, 298 bp, Homo sapiens
  source 1..298: mol_type = other DNA
cagtgtctctggtggctccatcactgatcactactggaattggatccggcagtccccggggaagggactggagtgggttggccatatccgtaagactgagagtacgcaccagaatccctccctcaacggtcgactcaccttatcactagacacgtccaagaaccagatctccctgaaactgacctctgtgaccgctgcggacacggccgtgtattattgtggaaggtctgatacgagtggtaattctttcgtggaatttgactactggggccagggagccctggtcaccgtctcctca

SEQ ID NO: 14127 - DNA, 298 bp, Homo sapiens
  source 1..298: mol_type = other DNA
cagtgtctctggtggctccatcactgatcactactggaactggatccggcagtccccggggaagggactggagtgggttggccatatccgtgtgactgagagtacccaccagaatccctccctcaacagtcgactcaccttatcactggacacgtccaggaaccagatctccctgaaactgtactctgtgaccgctgcggacacggccgtgtattattgtggaaggtctgatacgagtggtaattctttcgtggaatttgactactggggccagggaaccctggtcaccgtctcctca

SEQ ID NO: 14128 - DNA, 298 bp, Homo sapiens; identical to SEQ ID NO: 14118
  source 1..298: mol_type = other DNA

SEQ ID NO: 14129 - DNA, 298 bp, Homo sapiens
  source 1..298: mol_type = other DNA
cagtgtctctggtggctccatcactgatcactactggaactggatccggcagtccccggggaagggactggagtgggttggccatatccgtaagactgagagtacccaccagaatccctccctcaacagtcgactcaccttatcactagacacgtccaagaaccagatctccctgaaactgagctctgtgaccgctgcggacacggccgtgtattattgtggaaggtctgatacgagtggtaattctttcgtggaatttgactactggggtcagggaaccctggtcaccgtctcctca

SEQ ID NO: 14130 - DNA, 298 bp, Homo sapiens
  source 1..298: mol_type = other DNA
cagtgtctctggtggctccatcagtgatcactactggaactggatccggcagtccccggggaagggactggagtgggttggccatatccgtgtgactgagagtacgcaccagaatccctccctcaacagtcgactcaccttatcactggacacgtccaggaaccagatctccctgaaactgagctctgtgaccgctgcggacacggccgtgtattattgtggaaggtctgatacgagtggtaattctttcgtggaatttgactactggggccagggaaccctggtcaccgtctcctca

SEQ ID NO: 14131 - DNA, 298 bp, Homo sapiens
  source 1..298: mol_type = other DNA
cagtgtctctggtggctctatcactgatcactactggaattggatccggcagtccccggggaagggactggagtgggttggccatatccgtaagactgagagtacccaccagaatccctccctcaacagtcgactcaccttatcactagacacgtccaagaaccagatctccctgaaactgagctctgtgaccgctgcggacacggccgtgtattattgtggaaggtctgatacgagtggtaattctttcgtggaatttgactactggggccagggaaccctggtcaccgtctcctca

SEQ ID NO: 14132 - DNA, 298 bp, Homo sapiens
  source 1..298: mol_type = other DNA
cagtgtctctggtggctccatcactgatcactattggaactggatccggcagtccccggggaagggactggagtgggttggccatatccgtaagactgagactacccaccagaatccctccctcaacagtcgactcaccttatcactagacacgtccaagaaccagatttccctgaaactgagttctgtgaccgctgcggacacgggcgtgtattattgtggaaggtctgacacgagtggcaattctttcgtggaatttgactactggggccagggaatcctggtcaccgtctcctca

SEQ ID NO: 14133 - DNA, 286 bp, Homo sapiens
  source 1..286: mol_type = other DNA
cactgtctctggtggctccctcagtacttactactggagctggatccggcagcccccagggaagacactggagtggattgggtatatctcttacactgggagcaccgactacaagtcctccctcaagagtcgagtcaccgtgtcacgagacacgtcgaagaaccagttctccctgatactggactctgtgaccgctgcggacacggccgtctattactgtgcgagattcgtcagcagccgatgttacgactactggggccagggaatcctggtcaccgtctcctca

SEQ ID NO: 14134 - DNA, 286 bp, Homo sapiens
  source 1..286: mol_type = other DNA
cactgtctctggtggctccctcagtacttactactggagctggatccggcagcccccagggaagacactggagtggattgggtatatctcttacactgggagcgccgactacaagtcctccctcaagagtcgagtcaccgtgtcacgagacacgtcgaagaaccagttctccctgatactggactctgtgaccgctgcggacacggccgtctattactgtgcgagattcgtcagcagccgatgttacgactactggggccagggaatcctggtcaccgtctcctca

SEQ ID NO: 14135 - DNA, 286 bp, Homo sapiens
  source 1..286: mol_type = other DNA
cactgtctctggtggctccctcactacttactactggagctggatccggcagcccccagggaagacactggagtggattgggtatatctcttatactgggagcaccgactacaagtcctccctcaagagtcgagtcaccgtgtcacgagacacgtcgaagaaccagttctccctgatactggactctgtgaccgctgcggacacggccgtctattactgtgcgagattcgtcagcagcagatgttacgactattggggccagggaatcctggtcaccgtctcctca

SEQ ID NO: 14136 - DNA, 286 bp, Homo sapiens
  source 1..286: mol_type = other DNA
cactgtctctggtggctccctcactacttactactggagctggatccggcagcccccagggaagacactggagtggattgggtatatctcttacactggggtcaccgactacaagtcctccctcaggcgtcgagtcaccgtgtcccgagacacgtcgaagaaccagttctccctgatacttgactctgtgaccgctgcggacacggccgtctattactgtgcgagattcgtcagcagcagatgttacgactactggggccagggaatcctggtcaccgtctcctca

SEQ ID NO: 14137 - DNA, 286 bp, Homo sapiens
  source 1..286: mol_type = other DNA
cactgtctctggtggctccctcagtacttactactggagctggatccggcagcccccagggaagacactggagtggattgggtatatctcttacactgggagcaccgactacaagtcctccctcaagagtcgagtcaccgtgtcacgagacacggcgaagaaccagttctccctgatactggactctgtgaccgctgcggacacggccgtctattactgtgcgagattcgtcagcagcagatgttacgactactggggccagggaatcctggtcaccgtctcctca

SEQ ID NO: 14138 - DNA, 304 bp, Homo sapiens
  source 1..304: mol_type = other DNA
tgcagcctctggattcaccttcagtgactatggcatgcactgggtccgccaggctccaggcaaggggctggagtgggtggcagttatatcatatgatggaggtaataaatactatgaagactccgtgaagggccgattcaccatctccagagacaattccaagaacacgctgtatctgcaaatgaacagcctgagagctgaggacacggctgtatattactgtgcgaaagcaccctatagagatggttttgggaattactaccttgactactggggccagggaaccctggtcatcgtctcctca

SEQ ID NO: 14139 - DNA, 304 bp, Homo sapiens
  source 1..304: mol_type = other DNA
tgcagcctctggattcaccttcagtgactatggcatgcactgggtccgccaggctccaggcaaggggctggagtgggtggcagttatatcatatgatggaggtaataaatactatgcagactccgtgaagggccgattcaccatctccagagacaattccaagaacacgctgtatctgcaaatgaacagcctgagagctgaggacacggctgtatattactgtgcgaaagcaccctatagagatggtttcgggaattactaccttgactactggggccagggaaccctggtcatcgtctcctca

SEQ ID NO: 14140 - DNA, 304 bp, Homo sapiens
  source 1..304: mol_type = other DNA
tgcagcctctggattcaccttcagtagctatggcatgcactgggtccgccaggctccaggcaaggggctggagtgggtggcagttatatcatatgatggaactaataaatactatgcagactccgtgaagggccgattcaccatcgccagagacaattccaaggacacgctgtatctgcaaatgaacagcctgagagctgaggacacggctgtgtattactgtgcgaaagcaccctatagagatggttttgggaattactaccttgactactggggccagggaaccctggtcatcgtctcctca

SEQ ID NO: 14141 - DNA, 304 bp, Homo sapiens
  source 1..304: mol_type = other DNA
tgcagcctctggattcagcttcagtagctatggcatacactgggtccgccaggctccaggcaaggggctggagtgggtggcagttatatcatatgatggaactaacagatactatgcagactccgtgaagggccgattcaccatcgccagagacaactccaagaacacgctgtatctgcaaatggacagcctgagagctgaggacacggctgtgtattactgtgcgaaagcaccctatagagatggttttgggaattactaccttgactactggggccagggaaccctggtcatcgtctcctca

SEQ ID NO: 14142 - DNA, 304 bp, Homo sapiens
  source 1..304: mol_type = other DNA
tgcagcctctggattcaccttcagtagctatggcatacactgggtccgccaggctccaggcaaggggctggagtgggtggcagttatatcatatgatggaactaataaatactatgcagactccgtgaagggccgattcaccatcgccagagacaatgccaagaacacgctgtatctgcaaatgaacagcctgagagctgaggacacggctgtgtattactgtgcgaaagcaccctatagagatggttttgggaattactaccttgactactggggccagggaaccctggtcatcgtctcctca

SEQ ID NO: 14143 - DNA, 274 bp, Homo sapiens
  source 1..274: mol_type = other DNA
tgcaggttctggattcacctttaagaattattggattaactgggtccgccaggctccagggaagggcctggagtgggtggccaacataaacccggatggaagtgcgagttactatgtggactctgtgaagggccggttcaccctctccagagacaacgccaagaattcagtgtatctgcagatgcacaccctgagagccgaagacacggccgtctattactgttcttgtgcatttacgtactggggcctgggaaccctggtcaccgtctcctca

SEQ ID NO: 14144 - DNA, 274 bp, Homo sapiens
  source 1..274: mol_type = other DNA
tgcaggttctggattcacctttaagaattattggattaactgggtccgccaggctccagggaagggcctggagtgggtggccaacataaacccggatggaagtgcgagttactatgtggactctgtgaagggccggttcaccctctccagagacaacgccaagaattcagtgtatctgcagatgcacaccctgagagacgaagacacggccgtctattactgttcttgtgcatttacatactggggcctgggaaccctggtcaccgtctcctca

SEQ ID NO: 14145 - DNA, 274 bp, Homo sapiens
  source 1..274: mol_type = other DNA
tgcagattctggattcacctttaagaattattggattaactgggtccgccaggctccagggaagggcctggagtgggtggccaacataaacccggatggaagtgcgagttactatgtggactctgtgaagggccggttcaccctctccagagacaacgccaagaattcagtgtatctgcagatgcacaccctgagagccgaagacacggccgtctattactgttcttgtgcatttacctactggggcctgggaaccctggtcaccgtctcctca

SEQ ID NO: 14146 - DNA, 274 bp, Homo sapiens
  source 1..274: mol_type = other DNA
tacagattctggattcacctttaagaattattggattaactgggtccgccaggctccagggaagggcctggagtgggtggccaacataaacccggatggaagtgcgagttactttgtggactctgtgaagggccggttcaccctctccagagacaacgccaagaattcagtgtatctgcagatgcacagcctgagagccgaagacacggccgtctattactgttcttgtgcatttacgtactggggcctgggaaccctggtcaccgtctcctcg

SEQ ID NO: 14147 - DNA, 313 bp, Homo sapiens
  source 1..313: mol_type = other DNA
tgcagcctctggattcagcttcagcagctatggcatgagttgggtccgccaggctccagggaaggggctggagtgggtctcaggtattagtggtagtggtggtaccacatactacgcagactccgtgaagggccggttcaccatctccagagacaattccaagaacacgctgtatctgcaaatgaacagcctgagagccgaggacacggccgtatattactgtgcgaaagatggctgtagtggtggtagctgctacggggggtttcgtgcttttgatatctggggccaagggacaatggtcaccgtctcttca

SEQ ID NO: 14148 - DNA, 313 bp, Homo sapiens
  source 1..313: mol_type = other DNA
tgcagcctctggattcagcttcagcagctatggcatgagttgggtccgccaggctccagggaaggggctggagtgggtctcaggtattagtggtagtggtgctaccacatactacgcagactccgtgaagggccggttcaccatctccagagacaattccaagaacacgctgtatatgcaaatgaacagcctgagagccgaggacacggccgtatattactgtgcgaaagatggctgtagtggtggtagctgttacggggggtttcgtgcttttgatatctggggccaagggacaatggtcaccgtctcttca

SEQ ID NO: 14149 - DNA, 301 bp, Homo sapiens
  source 1..301: mol_type = other DNA
tgcagcctctggcttcaccttcgagacctttaaaatgaactgggtccgccaggctccagggaaggggctggagtgggtctcatccattagtagtactaataattacataaactacgcagactcagtgaagggccgattcaccatctccagagacaacgccaagaactcactgtatctgcaaatgaacagcctgagagccgaggacacggctgtttattattgtgtgagagagcacctttctttgactggttattatatgtttgattactggggccagggaaccctggtcaccgtctcctca

SEQ ID NO: 14150 - DNA, 301 bp, Homo sapiens
  source 1..301: mol_type = other DNA
tgcagcctctggcttcaccttcgagacctataaaatgaactgggtccgccaggctccagggagggggctggagtgggtctcatccattagtaataccaataattacatccactacgcagactcagtgaagggccgtttcaccatctccagagacaacgccaagaactcactgtatctgcaaatgaacagcctgagagccgaggacacggctgtttattattgtgtgagagagcacctttctttgactggttattatatgtttgattactggggccagggaaccctggtcaccgtctcctca

SEQ ID NO: 14151 - DNA, 295 bp, Homo sapiens
  source 1..295: mol_type = other DNA
tgcaggctctggattcaacttcaataactatagcatgaactgggtccgccaggctccagggaaggggctggagtgggtttcatacattagtagtggtagtagtgccatatactacacagactctgtgaggggccgattctccatctccagagacaatgccaagaactcactgtatctgcaaatgaacagcctgagagacgaggacacggctgtgtattactgtgcgagaggccggaagccaggtcgaggcgcttttgatatctggggccaagggacaatggtcaccgtctcttca

SEQ ID NO: 14152 - DNA, 295 bp, Homo sapiens
  source 1..295: mol_type = other DNA
tgcaggctctggattcaacttcaataactatagcatgaactgggtccgccaggctccagggaagggactggagtgggtttcatacattagtagtggtagcgttgccatatactacgcaggctctgtgaggggccgattctccatcgccagagacaacgccaagaactcattgtttctgcaaatgaacagcctgagagacgaggacacggctgtgtattactgtgcgagaggccggaagccaggtcgaggcgcttttgatatctggggccaagggacaatggtcaccgtctcttca

SEQ ID NO: 14153 - DNA, 311 bp, Homo sapiens
  source 1..311: mol_type = other DNA
ccatctccggggacagtgtctctaacaacaatgcttcttggaactgggtcaggcagtccccatcgagaggccttgagtggctgggaaggacatacttcaggtccaagtggtatcatgattatgcagaatctgtgaaaagtcgaataaccatcaatccagacacatccaagaaccagttctccctgcagttgaattctgtgactcccgaggacacggctgtctattactgtgcaagagaccccgaatatgacattggctggcacaactggttcgacccctggggccagggaacgctggtcactgtctcctca

SEQ ID NO: 14154 - DNA, 311 bp, Homo sapiens
  source 1..311: mol_type = other DNA
tcatctccggggacagtgtctctagcaacaattctgcttggaactgggtcaggcagtccccatcgagaggccttgagtggctgggaaggacatactacaggtccaagtggtatcatgattatgcaatatctgtgaaaagtcgaataatcatcaatccagacacatccaagaaccagttctccctgcagctgaattctgtgactcccgaggacacggctgtctattactgtgcaagagaccccgaatatgacattggctggcacaactggttcgacccctggggccagggaaccctggtcactgtctcctca

SEQ ID NO: 14155 - DNA, 304 bp, Homo sapiens
  source 1..304: mol_type = other DNA
cactgtctctggtgtctccgtcagaacttctggttactacttgagctggatccgacagcccccagggaagggactggagttcattgggcatatatctaacggtgggagcaccaactacaacccctccctcaagagtcgagtcaccatatccgtagacacgtccaagaaccagctcttcctgcatctgagttctgtgaccgctgcggacacggccgtgtattactgtggaaggtctgataggagtggtacttctttcgtggagtttgattactggggccagggaaccctggtcaccgtctcctca

SEQ ID NO: 14156 - DNA, 304 bp, Homo sapiens
  source 1..304: mol_type = other DNA
cagtgtctctggtggctccgtcagcagtggttcttactactggagctggatccggcagcccccagggaagggactggagtggattgggcatttcccttccagggggaacaccaactataacccctccctcaagagtcgagtcaccatatccgtagacacgtccaacaaccagctctccctgcatctgagttctgtgaccgctgcggacacggccgtgtattactgtggaaggtctgataggagtggcacttctttcgtggagtttgattactggggccagggaaccctggtcaccgtctcctca

SEQ ID NO: 14157 - DNA, 304 bp, Homo sapiens
  source 1..304: mol_type = other DNA
cactgtctctggtggctccgtcagcagtggttcttactactggagctggatccggcagcccccagggaagggactggagtggattgggcatttcccttccagggggaacaccaactataacccctccctcaagagtcgagtcaccatatccgtagacacgtccaacaaccagctctccctgcatctgagttctgtgaccgctgcggacacggccgtgtattactgtggaaggtctgataggagtggcacttctttcgtggagtttgattactggggccagggaaccctggtcaccgtctcctca

SEQ ID NO: 14158 - DNA, 304 bp, Homo sapiens
  source 1..304: mol_type = other DNA
cactgtctctggtggctccgtcagcagtggttcttactactggagctggatccggcagcccccagggaagggactggagtggattgggcatttcccttccagggggaacgccaactataacccctccctcaagagtcgagtcaccatatccgttgacacgtccaacaaccagctttccctgcatctgagttctgtgaccgctgcggacacggccgtgtattactgtggaaggtctgataggagtggcacttctttcgtggagtttgattactggggccagggaaccctggtcaccgtctcctca

SEQ ID NO: 14159 - DNA, 304 bp, Homo sapiens
  source 1..304: mol_type = other DNA
cactgtctctggtggctccgtcaccagtggttcttactactggagctggatccggcagcccccagggaagggactggagtggattgggcatttcccttccagggggaacgccaactataacccctccctcaagagtcgagtcaccatatccgtagacacgtccaacaaccagctctccctgcatctgagttctgtgaccgctgcggacacggccgtgtattactgtggaaggtctgataggagtggcacttctttcgtggagtttgattactggggccagggaaccctgatcaccgtctccgca

SEQ ID NO: 14160 - DNA, 304 bp, Homo sapiens
  source 1..304: mol_type = other DNA
cactgtctctggtgtctccgtcagaacttctggttactacttgagctggatccggcagcccccagggaagggactggagttcattgggcatatatctaacggtgggagcaccaactacaacccctccctcaagagtcgagtcaccatatccgtagacacgtccaagaaccacctctccctgcatctgagttctgtgaccgctgcggacacggccgtgtattactgtggaaggtctgataggagtggtacttctttcgtggagtttgattactggggccagggaaccctggtcaccgtctcctca

SEQ ID NO: 14161 - DNA, 304 bp, Homo sapiens
  source 1..304: mol_type = other DNA
cactgtctctggtggctccgtcagaacttctggttactacttgacctggatccggcagcccccagggaagggactggagttcattgggcatatatcttatggtgggagcaccaactacaacccctccctcaagagtcgagtcaccatatccgtagacacgtccaagaaccagctctccctgcatctgagttctgtgaccgctgcggacacggccgtgtattactgtggaaggtctgataggagtggtacttctttcgtggagtttgattactggggccagggaaccctggtcaccgtctcctca

SEQ ID NO: 14162 - DNA, 304 bp, Homo sapiens
  source 1..304: mol_type = other DNA
cactgtctctggtggctccgtcagcagtggttcttactactggagctggatccggcagccccccgggaagggactggagtggattggtcatttcccttccagggggaacgccaactataacccctccctcaagagtcgagtcaccatatccgtagacacgtccaacaaccaactctccctgcatctgagttccgtgaacgctgcggacacggccgtgtattattgtggaaggtctgacaggagtggcacttctttcgtggagtttgattactggggccagggaaccctggtcaccgtctcctca

SEQ ID NO: 14163 - DNA, 304 bp, Homo sapiens
  source 1..304: mol_type = other DNA
cactgtctctggtgtctccgtcagaacttctggttgttacttgagctggatccgacagcccccagggaagggactggagttcattggccatatatcttacggtgggagcaccaactacaacccctccctcaagagtcgagtcaccatatccgtagacacgtccaagaaccagctcctcctgcatctgagttccgtgaccgctgcggacacggccgtgtattactgtggaaggtctgataggagtggtacttctttcgtggagtttgattactggggccagggaaccctggtcaccgtctcctca

SEQ ID NO: 14164 - DNA, 304 bp, Homo sapiens
  source 1..304: mol_type = other DNA
cactgtctctggtgtctccgtcagaacttctggttactacttgagctggatccggcagcccccagggaagggactggagttcattgggcatatatctaacggtgggagcaccaactacaacccctccctccagagtcgagtcaccatatccgtagacacgtccaagaaccagctctccctgcatctgagttctgtgaccgctgcggacacggccgtgtattactgtggaaggtctgataggagtggtacttctttcgtggagtttgattactggggccagggaaccctggtcaccgtctcctca

SEQ ID NO: 14165 - DNA, 304 bp, Homo sapiens
  source 1..304: mol_type = other DNA
cactgtctctggtggctccgtcagcagtggttcttactactggagctggatccggcagcccccagggaagggactggagtggattgggcatttcccttccagggggaacgccaactataacccctccctcaagagtcgagtcaccatatccgtagacacgtccaataaccagctctccctgcatctgagttctgtgaccgctgcggacacggccgtgtattactgtggaaggtctgataggagtggcacttctttcgtggagtttgattactggggccagggaaccctggtcaccgtctcctca

SEQ ID NO: 14166 - DNA, 304 bp, Homo sapiens
  source 1..304: mol_type = other DNA
cactgtctctggtgtctccgtcagaacttctggttactacttgagctggatccgacagcccccagggaagggactggagttcattgggcatatatctaacggtgggaacaccaactacaacccctccctcaagagtcgagtcaccatatccgtagacacgtccaagaaccagctcttcctgcatctgagttctgtgaccgctgcggacacggccgtgtattactgtggaaggtctgataggagtggtacttctttcgtggagtttgattactggggccagggaaccctggtcaccgtctcctca

SEQ ID NO: 14167 - DNA, 304 bp, Homo sapiens
  source 1..304: mol_type = other DNA
cactgtctctggtggctccgtcagcagtggttcttactactggagctggatccggcagcccccagggaagggactggagtggattgggcttttcccttccagggggaacaccaactatagcccctccctcaagagtcgagtcaccatatccgtagacacgtccaacaaccagctctccctgcatctgagttctgtgaccgctgcggacacggccgtgtattactgtggaaggtctgataggagtggcacttctttcgtggagtttgattactggggccagggaaccctggtcaccgtctcctca

SEQ ID NO: 14168 - DNA, 304 bp, Homo sapiens
  source 1..304: mol_type = other DNA
cactgtctctggtggctccgtcagcagtggttcttactactggagctggatccggcagcccccagggaagggactggagtggattgggcatttcccttccagggggaacgccaactataacccctccctcaagagtcgagtcaccatatccgtagacacgtccaacaaccagctctccctgcatctgagttctgtgaccgctgcggacacggccgtgtattactgtggaaggtctgataggagtggcacttctttcgtggagtttgattactggggccagggaaccctggtcaccgtctcctca

SEQ ID NO: 14169 - DNA, 304 bp, Homo sapiens
  source 1..304: mol_type = other DNA
cactgtctctggtgtctccgtcagaagttctggttactacttgagctggatccggcagcccccagggaagggactggagttcgttgggtatatatctagcggtgggagcaccacctacaacccctccctcaagagtcgagtcaccatatccgtagacacgtccaagaaccagctctccctgcatctgacttctgtgaccgctgcggacacggccgtgtattactgtggaaggtctgataggagtggtacttctttcgtggagtttgattactggggccagggaaccctggtcaccgtctcctca

SEQ ID NO: 14170 - DNA, 304 bp, Homo sapiens
  source 1..304: mol_type = other DNA
cactgtctctggtgtctccgtcagaacttctggttactacttgagctggatccgacagcccccagggaagggactggagttcattgggcatatatctaacggtgggagcaccaactacaacccctccctcaagagtcgagtcaccatatccgtagacacgtccaagaaccagctcttcctgcatctgagttctgtgaccgctgcggacacggccgtgtattactgtggaaggtctgataggagtggcacttctttcgtggagtttgattactggggccagggaaccctggtcaccgtctcctca

SEQ ID NO: 14171 - DNA, 304 bp, Homo sapiens
  source 1..304: mol_type = other DNA
cactgtctctggtgtctccgtcagaacttctggttactacttgagctggatccgacagcccccagggaagggactggagttcattgggcatatatcttacggtgggagcaccaactacaacccctccctcaagagtcgagtcaccatatccgttgacacgtccaagaaccagctcttcctgcatctgagttctgtgaccgctgcggacacggccgtgtattactgtggaaggtctgataggagtggtacttctttcgtggagtttgattactggggccagggaaccctggtcaccgtctcctca

SEQ ID NO: 14172 - DNA, 304 bp, Homo sapiens
  source 1..304: mol_type = other DNA
cactgtctctggtggctccgtcagaagttctggttactacttgaactggatccggcagcccccagggaagggactggagttcattgggcatatatcttacggtgggagcaccaactacaacccctccctcaagagtcgagtcaccatatccgtggacacgtccaagaaccagctctccctgcatctgagttctgtgaccgctgcggacacggccgtgtattactgtggaaggtctgataggagtggtacttctttcgtggagtttgattactggggccagggaaccctggtcaccgtctcctca

SEQ ID NO: 14173 - DNA, 304 bp, Homo sapiens
  source 1..304: mol_type = other DNA
cactgtctctggtggctccgtcagaagttctggttactactggagctggatccggcagcccccagggaagggactggaattcattgcgtatatatcttccactgggaacacctactacaacccctccctcaagggtcgagtcaccatatccgtagacacgtccaagaaccagctctccctgcagctgagctctgtgaccgctgcggacacggccgtgtattactgtggaaggtctgataggagtggtacttctttcgtggagtttgactactggggccagggaaccctggtcaccgtctcctca

SEQ ID NO: 14174 - DNA, 304 bp, Homo sapiens
  source 1..304: mol_type = other DNA
cactgtctctggtgtctccgtcagaagttctggttactacttgagctggatccggcagccccccgggaagggactgcaattcattgggcatatatctaacagtgggagcacctactacaacccctccctcaggagtcgagtcaccatgtccgtagacacgtccaagaaccagctctccctgcatctgacttctgtgacggctgcggacacggccgtctattactgtggaaggtctgataggagtggtacttctttcgtggagtttgattactggggccagggaaccctggtcaccgtctcctca

SEQ ID NO: 14175 - DNA, 304 bp, Homo sapiens
  source 1..304: mol_type = other DNA
cactgtctctggtggctccgtcagcagtggttcttactactggagctggatccggcagcccccagggaagggcctggagtggattgggcatttcccttccagggggaacgccaactataacccctccctcaagagtcgagtcaccatatccgtagacacgtccaacaaccagctctccctgcatctgagttctgtgaccgctgcggacacggccgtgtattactgtggaaggtctgataggagtggcacttctttcgtggagtttgattactggggccagggaaccctggtcaccgtctcctca

SEQ ID NO: 14176 - DNA, 304 bp, Homo sapiens
  source 1..304: mol_type = other DNA
cactgtctctggtggctccgtcagaagttctggttactacttgagctggatccggcagcccccagggaagggactggagttcattgggcatataaattccggtgggaacaccaactacaacccctccctcaagagtcgagtcaccatatccgtagacacgtccaagaaccagctctccctgcatctgagttctgtgaccgctgcggacacggccgtgtattactgtggaaggtctgataggagtggtacttctttcgtggagtttgattactggggccagggaaccctggtcaccgtctcctca

SEQ ID NO: 14177 - DNA, 304 bp, Homo sapiens
  source 1..304: mol_type = other DNA
cactgtctctggtggctccgtcagcagtggttcttactactggagctggatccggcagcccccagggaagggactggagtggattgggcatttcccttccagggggaacgccaactataacccctccctcaagagtcgagtcaccatatccgtggacacgtccaacagccagctctccctgcatctgagttctgtgaccgctgcggacacggccgtgtattactgtggaaggtctgataggagtggcacttctttcgtggagtttgattactggggccagggaaccctggtcaccgtctcctca

SEQ ID NO: 14178 - DNA, 304 bp, Homo sapiens
  source 1..304: mol_type = other DNA
cactgtctctggtgcctccgtcagaacttctggttactacttgaactggatccggcagcccccagggaagggactggagttcattgggcatatatcttacggtgggagcaccaactacaacccctccctcaagagtcgagtcaccatatccgtagacacgtccaagaaccagctctccctgcatctgagttctgtgaccgctgcggacacggccgtgtattactgtggaaggtctgataggagtggtacttctttcgtggagtttgattactggggccagggaaccctggtcaccgtctcctca

SEQ ID NO: 14179 - DNA, 304 bp, Homo sapiens
  source 1..304: mol_type = other DNA
cactgtctctggtggctccgtcagcagtggttcttactactggagctggatccggcagcccccagggaagggactggagtggattgggcatttcccttccagggggaacgccaactataacccctccctcaagagtcgagtcaccatatccgtagacacgtccaacaaccagctctccctgcatctgagttctgtgaccgctgcggacacggccgtgtattactgtggaaggtctgataggagtggcacttctttcgtggagtttgattactggggccagggaaccctgatcaccgtctccgca

SEQ ID NO: 14180 - DNA, 304 bp, Homo sapiens; identical to SEQ ID NO: 14169
  source 1..304: mol_type = other DNA

SEQ ID NO: 14181 - DNA, 304 bp, Homo sapiens
  source 1..304: mol_type = other DNA
cactgtctctggtggctccgtcagcagtggttcttactactggagctggatccggcagcccccagggaagggactggagtgggttgggcatttcccttccagggggaacgccaactataacccctccctcaagagtcgagtcaccatatccgtagacacgtccaacaaccagctctccctgcatctgagttctgtgaccgctgcggacacggccgtgtattactgtggaaggtctgataggagtggcacttctttcgtggagtttgattactggggccagggaaccctggtcaccgtctcctca

SEQ ID NO: 14182 - DNA, 301 bp, Homo sapiens
  source 1..301: mol_type = other DNA
ttcaggctctggattcaccttcagtaataatgctatgcactgggtccgccaggctccagggaagggactggaatatgtgtcaggtattagtaatactggggacacaacacattatgccgactcagtgaggggcagattcagcgtctccagagacaattccaagaacgcgctgtctcttcaaatgagcagtctgagaccggaggacacggccatttattactgtgtgagaggggctttatttttgggagatagcagtgcatcgatcctctggggccagggaacacaggtcaccgtctcctca

SEQ ID NO: 14183 - DNA, 301 bp, Homo sapiens
  source 1..301: mol_type = other DNA
ttcaggctctggattcaccttcagtaataatgctatgcactgggtccgccaggctccagggaagggactggaatatgtttcaggtattagtaatactggggacacaacacattatgccgactcagtgaagggcagattcagcgtctccagagacaattccaagaacgcgctgtctcttcaaatgagcagtctgagaccggaggacacggccatttattactgtgtgagaggggctttatttttgggagatagcagtgcatcgatcctctggggccagggaacactggtcaccgtctcctca

SEQ ID NO: 14184 - DNA, 310 bp, Homo sapiens
  source 1..310: mol_type = other DNA
tgcagcatctggattcaccttcagtgactatggcatgcactgggtccgccaggctccaggcaaggggctggagtgggtggcagttatatggtatgatggaagtattaaatactatgcaaactccgtgaagggccgattcaccatctccagagacaattccaagaacacactatatctgcaaatgaacagcctgagagccgaggacacggctgtctattactgtgcgagagatcgggggacacactcagagctcgtcgcccgatactactttgacaactggggccagggaaccctggtcaccgtctcctca

SEQ ID NO: 14185 - DNA, 310 bp, Homo sapiens
  source 1..310: mol_type = other DNA
tggagcatctggattcaccttcagtgactatggcatgcactgggtccgccaggctccaggcaaggggctggagtgggtggcagttatatggtatgatggaagtattaaatactatgcagactccgtgaagggccgattcaccatctccagagacaattccaagaacacactatatctgcaaatgaacagcctgagagccgaggacacggctgtctattactgtgcgagagatcgggggacacactcagagctcgtcgcccgatactactttgacaactggggccagggaaccctggtcaccgtctcctca

SEQ ID NO: 14186 - DNA, 310 bp, Homo sapiens; identical to SEQ ID NO: 14184
  source 1..310: mol_type = other DNA

SEQ ID NO: 14187 - DNA, 308 bp, Homo sapiens
  source 1..308: mol_type = other DNA
cagcatctggattcaccttcagtgactatggcatgcactgggtccgccaggctccaggcaaggggctggagtgggtggcagttatatggtatgatggaagtattaaatactatgcaaactccgtgaagggccgattcaccatctccagagacaattccaagaacacactatatctgcaaatgaacagcctgagagccgaggacacggctgtctattactgtgcgagagatcgggggacacactcagagctcgtcgcccgatactactttgacaactggggccagggaaccctggtcaccgtctcctca

SEQ ID NO: 14188 - DNA, 310 bp, Homo sapiens
  source 1..310: mol_type = other DNA
tgcagcatctggattcaccttcagtgactatggcatgcactgggtccgccaggctccaggcaaggggctggagtgggtggcagttatatggtttgatggaagtattgaatactatgcaaactccgtgaagggccgattcaccatctccagagacaactcctggaacacactatatctgcaaatgaacaacctgagagccgaggacacggctgtctattactgtgcgagagatcgggggacacactcagaactcgtcgcccgttactactttgacaactggggccagggaaccctggtcaccgtctcctca

SEQ ID NO: 14189 - DNA, 310 bp, Homo sapiens
  source 1..310: mol_type = other DNA
tgcagcatctggattcaccttcagtgactatggcatgcactgggtccgccaggctccaggcaaggggctggagtgggtgacagttatatggtttgatggaagtattaaatactatgcagactccgtgaagggccgattcaccatctccagagacaattccaggaacacactatatctgcaaatgaacagcctgagagccgaggacacggctgtctattactgtgcgagagatcgggggacacactcagagctcgtcgcccgatactactttgacaactggggccagggaaccctggtcaccgtctcctca

SEQ ID NO: 14190 - DNA, 295 bp, Homo sapiens
  source 1..295: mol_type = other DNA
cactgtctctactgactccatcagtagtcactactacaactggatccggcagatcccagggaagggactggagtggattgcggagatctttcacagtgggcccaccaagaacaacccctccctcaagagtcgactcaccacttcagttgacacgtccaagaagcaattcttcctgaaattgagctctgtcaccgccgcggacacggccgtctatttttgcgcgagagagataaggattggtggcggaatggcctttgactactggggccagggaatcctggtcaccgtctcttca

SEQ ID NO: 14191 - DNA, 295 bp, Homo sapiens
  source 1..295: mol_type = other DNA
cactgtctccactgactccatcagtactcacttctggaactggatccggcagaccccggggaagggactggagtggattggggaaatctttcacactgggcccacgaaatacaacccctccctcaagagtcgagtcaccacttcagttgacacgtccaagaagcagttctacctgaagttgaactctgtgaccgccgcggacacggccgtatattattgcgcgagagagattaggattggtggcggaatggcctttgactactggggccagggaatcctggtcaccgtctcgtca

SEQ ID NO: 14192 - DNA, 295 bp, Homo sapiens
  source 1..295: mol_type = other DNA
cactgtctctactgactccatcagtagtcactactacaactggatccggcagatcccagggaagggactggagtggattgcggagatctttcacagtgggcccaccaagaacaacccctccctcaagagtcgactcaccacttcagttgacacgtccaagaagcaattcttcctgaaattgagctctgtcatcgccgcggacacggccgtctatttttgcgcgagagagataaggattggtggcggaatggcctttgactactggggccagggaatcctggtcaccgtctcttca

SEQ ID NO: 14193 - DNA, 304 bp, Homo sapiens
  source 1..304: mol_type = other DNA
tgcagcctctggattcaccttcagtagttatgaaatgaactgggtccgccaggctccagggaaggggctggagtgggtttcatacattagtagtggtgatagtcccatatactacgcagactctgtgaagggccgattcaccgtctccagagacgacgccaagaactcactgtttctgcaaatgaacagcctgagagccgaggacacggctgtttattactgtgcgagagagggatattgtagtagcaccagctgcgatgggttcgacccctggggccagggaaccctggtcaccgtctcctca

SEQ ID NO: 14194 - DNA, 304 bp, Homo sapiens
  source 1..304: mol_type = other DNA
tgcagcctctggattcaccttcagtagttatgaaatgaactgggtccgccaggctccagggaaggggctggagtgggtttcatacattagtagtggtgatagtcccatatactacgcagactctgtgaagggccgattcaccgtctccagagacaacgccaagaactcactgtttctgcaaatgaacagcctgagagccgaggacacggctgtttattactgtgcgagagagggatattgtagtagcaccagctgcgatgggttcgacccctggggccagggaaccctggtcaccgtctcctca

SEQ ID NO: 14195 - DNA, 304 bp, Homo sapiens
  source 1..304: mol_type = other DNA
tgcagcctctggattcaccttcaggagttatgaaatgaactgggtccgccaggctccagggaaggggctggagtgggtttcatacattagtagtggtgatagtcccatatactacgcagactctgtgaagggccgattcaccgtctccagagacaacgccaagaactcactgtttctgcaaatgaacagcctgagagtcgaggacacggctgtttattactgtgcgagagagggatattgtagtagcaccagctgcgatgggttcgacccctggggccagggaaccctggtcaccgtctcctca

SEQ ID NO: 14196 - DNA, 304 bp, Homo sapiens
  source 1..304: mol_type = other DNA
tgcagcctctggattcaccttcagtagttatgaaatgaattgggtccgccaggctccagggaaggggctggagtgggtttcatacattagtagtagtgatagtcccatatactacgcagactctgtgaagggccgattcaccatctccagagacaacgccaagaactcactgtttctgcaaatgaacagcctgagagccgaggacacggctgtttattactgtgcgagagagggatattgtagtagcaccagctgcgatgggttcgacccctggggccagggaaccctggtcaccgtctcctca

SEQ ID NO: 14197 - DNA, 304 bp, Homo sapiens
  source 1..304: mol_type = other DNA
tgcagcctctggattcaccatcagtagttatgaaatgaactgggtccgccaggctccagggaaggggctggagtgggtttcatacattagtagtggtgatagtcccatatactacgcagactctgtgaagggccgattcaccgtctccagagacaacgccaagaactcactgtttctgcaaatgaacagcctgagagccgaggacacggctgtttattactgtgcgagagagggatattgtagtagcaccagctgcgatgggttcgacccctggggccagggaaccctggtcaccgtctcctca

SEQ ID NO: 14198 - DNA, 304 bp, Homo sapiens
  source 1..304: mol_type = other DNA
tgcagcctctggattcaccctcagtagttatgaaatgaactgggtccgccaggctccagggaaggggctggagtgggtttcatacattagtagtggtgatagtcccatatactacgcagactctgtgaagggccgattcaccgtctccagagacaacgccaagaactcactgtttctgcaaatgaacagcctgagagccgaggacacggctgtttattactgtgcgagagagggatattgtagtagcaccagctgcgatgggttcgacccctggggccagggaaccctggtcaccgtctcctca

SEQ ID NO: 14199 - DNA, 298 bp, Homo sapiens
  source 1..298: mol_type = other DNA
tgcagcctctgaattcaccttcagtaattatgccatgcactgggtccgccaggctccaggcaaggggctggagtgggtggctgttatatcagatgatggaagcaataaatattatgcagactccgtgaagggccgattcaccatctccagagacaattccaagaacacgctgtatctgcaaatgaacagcctgagacttgaggacacggctgtgtattactgtgcgaaagccccacagtctacccagcggggctactttgactactggggccagggagccctggtcaccgtctcctca

SEQ ID NO: 14200 - DNA, 298 bp, Homo sapiens
  source 1..298: mol_type = other DNA
tgcagcctctgaattcaccttcagtagttatggcatgcactgggtccgccaggctccaggcaaggggctggagtgggtggcagttatatcatctgatggaagcaataaatactatgcagactccgtgaggggccgattcaccatctccagagacaattccaagaacacgctgtatctgcaaatgaacagcctgagagttgaggacacggctgtgtattactgtgcgaaagccccacagtctacccagcgggggtactttgactactggggccagggaaccctggtcaccgtctcctca

SEQ ID NO: 14201 - DNA, 298 bp, Homo sapiens
  source 1..298: mol_type = other DNA
tgcagcctctgaattcaccttccgtaattatgccatgcactgggtccgccaggctccaggcaaggggctggagtgggtggctgttatatcagatgatggaagcaataaatattatgcagactccgtgaagggccgattcaccatctccagagacaattccaagaacacgctgtatctgcaaatgaacagcctgagacttgaggacacggctgtgtattactgtgcgaaagccccacagtctacccagcggggctactttgactactggggccagggagccctggtcaccgtctcctca

SEQ ID NO: 14202 - DNA, 298 bp, Homo sapiens
  source 1..298: mol_type = other DNA
tgcagcctctgaattcaccttcagaaattatgccatgcactgggtccgccaggctccaggcaaggggctggagtgggtggctgttatatcagatgatggaagcaataaatattatgcagactccgtgaagggccgattcaccatctccagagacaattccaagaacactctgtatctgcaaatgaacagcctgagacttgaggacacggctgtgtattactgtgcgaaagccccacagtctacccagcggggctactttgactactggggccagggagccctggtcaccgtctcctca

SEQ ID NO: 14203 - DNA, 298 bp, Homo sapiens
  source 1..298: mol_type = other DNA
tgcagcctctgaattcaccttcagtagttatggcatgcactgggtccgccaggctccaggcaaggggctggagtgggtggctgttatttcatatgatggaagcaataaatactatgcagactccgtgaagggccgattcaccatctccagagacaattccaagaacacgctgtctctgcaaatgaacagcctgagagttgaggacacggctgtgtattactgtgcgaaagccccacagtctacccagcgggggtactttgactactggggccagggagccctggtcaccgtctcctca

SEQ ID NO: 14204 - DNA, 298 bp, Homo sapiens
  source 1..298: mol_type = other DNA
tgcagcctctgaattcaccctcagtagttatggcatgcactgggtccgccaggctccaggcaaggggctggagtgggtggctgttatttcatatgatggaagcaataaatactatgcagactccgtgaagggccgattcaccatctccagagacaattccaagaacacgctgtctctgcaaatgaacagcctgagagttgaggacacggctgtgtattactgtgcgaaagccccacagtctacccagcgggggtactttgactactggggccagggagccctggtcaccgtctcctca

SEQ ID NO: 14205 - DNA, 301 bp, Homo sapiens
  source 1..301: mol_type = other DNA
tgcagcctccggattcagctttagtagttattggatgagctgggtccgtcaggctccagggaaggggctggagtgggtggccaacataaagcaagatggaagtgagaagaactatgtggactctgtgaagggccgactcaccatctccagagacaacgccaagaagtcactgtatctgcaaatgaacagcctgagagtcgaggacacggccgtctattactgtgcgagagatccgcttgttttgggagctacaggtgcttgtgatgtctggggccaagggacaatggtcaccgtatcttca

SEQ ID NO: 14206 - DNA, 301 bp, Homo sapiens
  source 1..301: mol_type = other DNA
tgcagcctccggattcagctttagtagttattggatgagctgggtccgtcaggctccaggaaaggggctggagtgggtggccaacataaagcaagatggaagtgagaagaactatgtggactctgtgaagggccgactcaccatctccagagacaacgccaagaagtcactgtatctgcaaatgaacagcctgagagtcgaggacacggccgtctattactgtgcgagagatccgcttgttttgggagctacaggtgcttgtgatgtctggggccaagggacaatggtcaccgtatcttca

SEQ ID NO: 14207 - DNA, 301 bp, Homo sapiens
  source 1..301: mol_type = other DNA
tgcagcctccggattcagctttagtagttattggatgagctgggtccgtcaggctccaggtaaggggctggagtgggtggccaacataaaggaagatggaagtgagaagaactatgtggactctgtgaagggccgactcaccatctccagagacaacgccaagaagtcactgtatctgcaaatgaacagcctgagagtcgaggacacggccgtctattactgtgcgagagatccgcttgttttgggagctacaggtgcttgtgatgtctggggccaagggacaatggtcaccgtatcttca

SEQ ID NO: 14208 - DNA, 301 bp, Homo sapiens
  source 1..301: mol_type = other DNA
tgcagcctccggattcagctttagtagttattggatgagctgggtccgtcaggctccagggaaggggctggagtgggtggccaacataaagcaagatggaagtgagaagaactatgtggactctgtgaagggccgactcaccatctccagagacaacgccaagaagtcactgtatctgcaaatgaacagcctgagagtcgaagacacggccgtctattactgtgcgagagatccgcttgttttgggagctacaggtgcttgtgatgtctggggccaagggacaatggtcaccgtatcttca

SEQ ID NO: 14209 - DNA, 301 bp, Homo sapiens
  source 1..301: mol_type = other DNA
tgcagcctccggattcagctttagtagttattggatgagctgggtccgtcaggctccagggaaggggctggagtgggtggccaacataaaacaagatggaagtgagaagaactatgtggactctgtgaagggccgactcaccatctccagagacaacgccaagaagtcactgtatctgcaaatgaacagcctgagagtcgaggacacggccgtctattactgtgcgagagatccgcttgttttgggagctacaggtgcttgtgatgtctggggccaagggacaatggtcaccgtatcttca

SEQ ID NO: 14210 - DNA, 301 bp, Homo sapiens
  source 1..301: mol_type = other DNA
tgcagcctccggattcagttttagtagttattggatgagctgggtccgtcaggctccagggaaggggctggagtgggtggccaacataaagcaagatggaagtgagaagaactatgtggactctgtgaagggccgactcaccatctccagagacaacgccaagaagtcactgtatctgcaaatgaacagcctgagagtcgaggacacggccgtctattactgtgcgagagatccgcttgttttgggagctacaggtgcttgtgatgtctggggccaagggacaatggtcaccgtatcttca

SEQ ID NO: 14211 - DNA, 289 bp, Homo sapiens
  source 1..289: mol_type = other DNA
cgatgtctctggtgtcgcccctcgcacaacgtctttttactacagttggatccgccagcccccagggaagggcctggaatggattggaattatctttcgtcgtggactcaccgcctacaatccgtccctcggggaccgagtctccatatctgcgtccagagaccggttcaccctgagtctgacgtctgtgaccgccgcagacacggctgtctattattgtgcgcgaacccatacgaatgcgtggcagttgggctcctggggccagggaaccctggtcaccgtctcctca

SEQ ID NO: 14212 - DNA, 289 bp, Homo sapiens
  source 1..289: mol_type = other DNA
cgatgtctctggtgtcgcccctcgcacaacctctttttattatagttggatccgccagcccccagggaagggcctggagtggattggaattatctttcgtcgtggactcaccgcctacaatccgtccctcggggaccgagtctccatatctgcgtccagggaccggttcaccctgagtctgacgtctgtgaccgacgcagacacggctgtctattattgtgcgcgaacccatacgaatgcgtggcagttgggctcctggggccagggaaccctggtcaccgtctcctca

SEQ ID NO: 14213 - DNA, 299 bp, Homo sapiens
  source 1..299: mol_type = other DNA
ccatctccggggacagtgtctctcgcgacactactacttggaactggatcaggcagtccccatcgagaggccttgagtggctgggaaggacattctacaggtccaattggtataatgaatatgcaacttctgtgaaaggtcgaataaccatcaacccagacacatcgaagaatcagttctccctacagctgaactctgtgactcccgacgacacggctgtgtacttctgtgcaagagccgacaccgatggggaccgcttcgacccctggggccagggaacccaggtcaccgtctcctca

SEQ ID NO: 14214 - DNA, 299 bp, Homo sapiens
  source 1..299: mol_type = other DNA
ccatctccggggacagtgtctctagcaacagtgctacttggaactggatcaggcagtccccgtcgagaggccttgagtggctggggaggacattctacaggtccaagtggtttaatgagtatgcagtatctgtgagaagtcgaataatcatcaacccagacacatccaagaaccagttctccctccagctgaagtctgtgacccccgaggacacggctgtgtattactgtgcaagagccgacaccgatggggaccggttcgacccctggggccagggaacgctggtcaccgtctcctca

SEQ ID NO: 14215 - DNA, 299 bp, Homo sapiens
  source 1..299: mol_type = other DNA
ccatctccggggacagtgtctctcgcgacactactacttggaactggatcaggcagtccccatcgagaggccttgagtggctgggaaggacattctacaggtccaattggtataatgaatatgcaacttctgtgaaaggtcgaataaccatcaacccagacacatccaagaatcagttctccctacagctgaactctgtgactcccgaggacacggctgtgtatttctgtgcaagagccgacaccgatggggaccgcttcgacccctggggccagggaaccctggtcaccgtctcctca

SEQ ID NO: 14216 - DNA, 299 bp, Homo sapiens
  source 1..299: mol_type = other DNA
ccatctccggggacagtgtctctcgcaacactgctacttggaactggatcaggcagtccccatcgagaggccttgagtggctgggaaggacattctacaggtccaattggtataatgagtacgcaacttctgtgaaaggtcgaataaccatcaacccagacacatccaagaaccagttctccctgcagatgaactctgtgactcccgaggacacggctgtgtattactgtgcaagagccgacaccgatggggaccggttcgacccctggggccagggaaccctggtcaccgtctcctca

SEQ ID NO: 14217 - DNA, 280 bp, Homo sapiens
  source 1..280: mol_type = other DNA
cgctgtttatggtgggcccttcagtggttactggtggagctggttccgccagcccccagggaaggggctggagtggattggggaaatcaatgatagaggaagcaccaactacaacccgtccctcaagagtcgggtcaccatatcaatagacaggtccaaaaaccagtactccctgaagctgagctctgtgaccgccgcggacacggctgtgtattactgtgcgagaaaatcagtggctgatgactactggggcccgggaaccctggtcaccgtctcctca

SEQ ID NO: 14218 - DNA, 280 bp, Homo sapiens
  source 1..280: mol_type = other DNA
cgctgtttatggtgggcccttcagtggttactggtggagctggttccgccagcccccagggaaggggctggagtggattggggaaatcaatgatagaggaagcaccaactaccacccgtccctcaagagtcgggtcaccatatcaatagacaggtccaaaaaccagtactccctgaaactgagctctgtgaccgccgcggacacggctgtgtatttctgtgcgagaaaatcagtggctgatgactactggggcccgggaaccctggtcaccgtctcctca

SEQ ID NO: 14219 - DNA, 280 bp, Homo sapiens
  source 1..280: mol_type = other DNA
cgctgtttatggtgggcccttcagtggttactggtggagctggttccgccagcccccagggaaggggctggagtggattggggaaatcaatgatagaggaagcaccaactacaacccgtccctcaagagtcgggtcaccatatcaatagacaggtccaaaaaccagtactccctgaaggtgagctctgtgaccgccgcggacacggctgtgtattactgtgcgagaaaatcagtggctgatgactactggggcccgggaaccctggtcaccgtctcctca

SEQ ID NO: 14220 - DNA, 280 bp, Homo sapiens
  source 1..280: mol_type = other DNA
cgctgtttatggtgggcccttcagtggttactggtggagctggttccgccagcccccagggaaggggctggagtggattggggaaatcaatgatagaggaagcaccaactacaacccgtccctcaagagtcgggtcaccatatcaatagacaggtccaaaaaccagtactccctgaagctgagctctgtgaccgccgcggacacggctgtgtattactgtgcgagaaaatcagtggctgatgactactggggaccgggaaccctggtcaccgtctcctca

SEQ ID NO: 14221 - DNA, 280 bp, Homo sapiens
  source 1..280: mol_type = other DNA
cgctgtttatggtgggcccttcagtggttactggtggagctggttccgccagcccccagggaaggggctggagtggattggggaaatcaatgatagaggaagcaccaactacaacccgtccctcaagagtcgggtcaccatatcaatagacaggtccaaaaatcagtactccctgaagctgagctctgtgaccgccgcggacacggctgtgtattactgtgcgagaaaatcagtggctgatgactactggggcccgggaaccctggtcaccgtctcctca

SEQ ID NO: 14222 - DNA, 298 bp, Homo sapiens
  source 1..298: mol_type = other DNA
cgcagcctctggattcgctttcaaaacttatgaaatgaactgggtccgccagactccagccaatgggctggagtggattgcatacattggtgccagtggtgcttatataaagtatgctgactctgtaaagggccgtttcaccatctccagagacgacgccaagaattcactgtttctgcaaatgaacagcctgagagccgaagacacgggtgtttattactgtgcgacagctgggggcaattggtaccttggtttgcttgtctattggggccagggaaccgtggtcaccgtctcctcg

SEQ ID NO: 14223 - DNA, 298 bp, Homo sapiens
  source 1..298: mol_type = other DNA
cgcagcctctggattcgctttcaaaacttatgaaatgaactgggtccgccagactccagccaatgggctggagtggattgcatacattggtgccagtggtgcttatataaagtatgctgactctgtaaagggccgcttcaccatctccagagacgacgccaagaattcactgtttctgcaaatgaacagcctgagagccgaagacacgggtgtttattactgtgcgacagctgggggcaattggtaccttggtttgcttgtctattggggccagggaaccgtggtcaccgtctcctcg

SEQ ID NO: 14224 - DNA, 298 bp, Homo sapiens
  source 1..298: mol_type = other DNA
cgcagcctctggattcattttcaatacttatgaaatgaactgggtccgccagactccagggaatgggctggagtggatttcatacattggtgctagtggtgctttcataaagtatgcagactctgtgaagggccgattcaccatctccagagacgacgccaagaactcactatatctgcaaatgaacggcctgagagccgaggactcgggtgtttattactgtgcgacagctgggggcaattggtacctgggtttgcttgtctactggggccagggaacccaggtcaccgtctcctca

SEQ ID NO: 14225 - DNA, 304 bp, Homo sapiens
  source 1..304: mol_type = other DNA
tgcagcctctggtttcatcttcagtgactatgtcatgcattggatccgtcgggctccaggcaaggggctggagtgggtggcacttacagcacatgatggaagtaataaatattatgcagattccgtgaagggccgattcaccatctccagagacaattccaagagcacggtctatctgcaaatgaacagcctcagagctgaagacacggctgtgtatttctgtgcgaaagggacgtcggggtactatgatggtagtggccacatcgacatctggggccaagggacagaggtcatcgtctcttca

SEQ ID NO: 14226 - DNA, 304 bp, Homo sapiens
  source 1..304: mol_type = other DNA
tgcagcctctggattcaccttcagtgactatgtcatgcattggatccgtcgggctccaggcaaggggctggagtgggtggcacttacagcacatgatggaagtaataaatattatgcagattccgtgaagggccgattcaccatctccagagacaattccaagagcacggtgtatctgcaaatgaacagcctgagagctgaagacacggctgtgtatttctgtgcgaaagggacgtcggggtactatgatggtagtggccacatcgacatctggggccaagggacaatggtcatcgtctcttca

SEQ ID NO: 14227 - DNA, 297 bp, Homo sapiens
  source 1..297: mol_type = other DNA
aagggttctggattcagttttacatcacactggatcgcctgggtgcgccagatgcccgggaaaggcctggagtggatggggaccatctatcctggtgactctgagactagatacagtccgtccttccaaggccgggtcaccttctcagccgacaagtccatcaccaccgcctacctgcactggaccaccctgcaggcctccgacaccgccgtatattactgtgcgaaaaatcgacacacaagtagagacttttacttcgatctctggggccgtggcaccctggtcactgtcgcctca

SEQ ID NO: 14228 - DNA, 297 bp, Homo sapiens
  source 1..297: mol_type = other DNA
aagggttctggattcagttttacatcacactggatcgcctgggtgcgccagatgcccgggaaaggcctggagtggatggggaccatctatcctgctgactctgagactagatacagtccgtccttccaaggccaggtcaccttctcagccgacaagtccaccaccaccgcctacctgcactggaccaccctgaaggcctccgacaccgccatatattactgtgcgaaaaatcgacatacgagtagggacttttacttcgatctctggggccgtggcaccctggtcactgtcgcctca

SEQ ID NO: 14229 - DNA, 297 bp, Homo sapiens
  source 1..297: mol_type = other DNA
aagggttctggattcagttttacatcacactggatcgcctgggtgcgccagatgcccgggaaaggcctggagtggatggggaccatctatcctggtgactctgagactagatacagtccgtccttcgaaggccgggtcaccttctcagccgacaagtccaccaccaccgcctacctgcactggaccaccctgcaggcctccgacaccgccgtttattactgtgcgaaaaatcgacacacaagtagagacttttacttcgatctctggggccgtggcaccctggtcactgtcgcctca

SEQ ID NO: 14230 - DNA, 289 bp, Homo sapiens
  source 1..289: mol_type = other DNA
tgcagcctctggattcaccttcactacctcttacatgagttggctccgccaggctccagggaaggggctggagtgggtggcctacgtgagcccagatggcagtgtgaaagtctatgtggactctgtgaagggccgattctccatttccagagacaacaccaagcactcactgtatctgcaaatggacagtctgagagtcgaggacacggctgtctatttctgtgtgagagatccgtggtacggagcagttgactactggggccagggaagcctggtcacagtctcctca

SEQ ID NO: 14231 - DNA, 289 bp, Homo sapiens
  source 1..289: mol_type = other DNA
tgcagcctctggattcaccttcaccacctcttacatgagttgggtccgccaggctccagagaaggggctggagtgggtggcctacgtgagcccagatggaggtgtgaaagtctatgtggacgctgtgaagggccgattctccatttccagagacaacaccaagcactcggtgtatctgcaaatggacagtctgagagtcgaggacacggctgtgtatttctgtgtgagagatccgtggtacggagcagttgactactggggccagggaatcctggtcacagtctcctca

SEQ ID NO: 14232 - DNA, 289 bp, Homo sapiens
  source 1..289: mol_type = other DNA
tgcagcctctggattcagcttcagtacctcttacatgagttgggtccgccaggctgcagggaaggggctggagtgggtggcctacgtgagcccagatggcagtgtgaaagtctatgtggactctgtgaagggccgattctccatttccagagacaatacgaagcactcattgtatctgcaaatggacagtctgagagtcgaggacacggctctgtatttctgtgtgagagatccgtggtacggggcagttgactattggggccagggaagcctggtcacagtctcctca

SEQ ID NO: 14233 - DNA, 289 bp, Homo sapiens
  source 1..289: mol_type = other DNA
tgcagcctctggattcaccttcactacctcttacatgagttggctccgccaggctccagggaaggggctggagtgggtggcctacgtgagcccagatggcagtgtgaaagtctatgtggactctgtgaagggccggttctccatttccagagacaactccaagcactcagtgtatctgcaaatggacagtctgagagtcgaggacacggctgtctatttctgtgtgagagacccgtggtacggagcagttgactactggggccagggaagcctggtcacagtctcctca

SEQ ID NO: 14234 - DNA, 298 bp, Homo sapiens
  source 1..298: mol_type = other DNA
tgcagcctctggattcaccttcagtggttatgaattcaattgggtccgtcaggctccagggaaggggctggagtgggtatcatacatcagtagtagtggtgataatatacactatgcagactctgtgaagggccgattcaccatctccagagacaacgccaagaattcactgtatctgcaaatgaacagcctgagagtcgaggacacggctctttattattgtgcgagagagaaaagtggatgtgggggtgattgctctgactactggggccagggatccctggtcaccgtctcctca

SEQ ID NO: 14235 - DNA, 298 bp, Homo sapiens
  source 1..298: mol_type = other DNA
tgcagcctctggattcaccttcagtggttatgaattcaattgggtccgtcaggctccagggaaggggctggagtgggtatcatacatcagtagtagcggtgataatatacagtatgcagactctgtgaagggccgattcaccatctccagagacaacgccaagaattcactgtatctgcaaatgaacagcctgagagtcgaggacacggctctttattattgtgcgagagagaaaagtggatgtgggggtgattgctctgactactggggccagggatccctggtcaccgtctcctca

SEQ ID NO: 14236 - DNA, 295 bp, Homo sapiens
  source 1..295: mol_type = other DNA
cactgtctcgagtggccccatcggcatcagtagttgttactggggctggatccgccagcccccagggaaggggccggaatggattgggagtatctactataatggggacacctactaccccccgtccctcaagagtcgactctccatgtccgtggacacgtccaagaaccagttctccctgaagctgacctctgtgaccgccgcagacacggctctatattattgtgcgagacatcctcgtagtggtttttactgggacttttggggccagggaatcctggtcgccgtctcctca

SEQ ID NO: 14237 - DNA, 295 bp, Homo sapiens
  source 1..295: mol_type = other DNA
ctctgtctctggtggccccatcggcaccagtagttgttactggggctggatccgccagcccccagggaaggggccggagtggattgggagtgtctattataatggggacacctactacaccccgtccctcaggagtcgagtcaccatgtccatagacacgtccaacaaccggttctccctgaggctgacttctgtgaccgccgcagacacggctcaatattattgtgcgagacatcctcggagtggtttttactgggacttttggggccagggagccctggtcgccgtctcctca

SEQ ID NO: 14238 - DNA, 295 bp, Homo sapiens
  source 1..295: mol_type = other DNA
cactgtctctggtggccccatcggcagcagtagttgttactggggctggatccgccagcccccagggaaggggccggagtggcttgggagtatctactataatggcgacacctactacaccccgtccctcaagagtcgactcaccatgtccgtggacacgtccaggaaccagttctccctgaaggtgacctctgtgaccgccgcagacacggctctctactattgtgcgagacatcctcgtagtggtttttactgggacttttggggccagggaatcctggtcgccgtctcctca

SEQ ID NO: 14239 - DNA, 295 bp, Homo sapiens
  source 1..295: mol_type = other DNA
ctctgtctctggtggccccatcggcagcagtagttgttactggggctggatccgccagcccccagggaaggggccggagtggattgggagtatctactataatggggacacctactacaccccgtccctcaagagtcgagtcaccatgtccgtggacacgtccaacaaccggttctccctgaggctgacttctgtgaccgccgcagacacggctcaatattattgtgcgagacatcctcgtagtggtttttactgggacttttggggccagggacccctggtcgccgtctcctca

SEQ ID NO: 14240 - DNA, 295 bp, Homo sapiens
  source 1..295: mol_type = other DNA
cactgtctctggtggccccatcggcagcagtagttgttactggggctggatccgccagcccccagggaaggggccggagtggattgggagtatctactataatggggacacctactacaccccgtccctcaagagtcgactcaccatgtccgtggacacgtccaagaaccagttctccctgaagctgacctctgtgaccgccgcagacacggctcaatattattgtgcgagacatcctcgtagtggtttttactgggacttttggggccagggaaccctggtcgccgtctcctca

SEQ ID NO: 14241 - DNA, 295 bp, Homo sapiens
  source 1..295: mol_type = other DNA
cactgtctcgagtggccccatcggcatcagtagttgttactggggctggatccgccagcccccagggaaggggccggaatggattgggagtatctactataatggggacacctactgccccccgtccctcaagagtcgactcaccatgtccgtggacacgtccaagaaccagttctccctgaagctgacctctgtgaccgccgcagacacggctctatattattgtgcgagacatcctcgtagtggtttttactgggacttttggggccagggaatcctggtcgccgtctcctca

SEQ ID NO: 14242 - DNA, 297 bp, Homo sapiens
  source 1..297: mol_type = other DNA
aagggttctggatacagtttcaccaactactggatcggctgggtgcgccaggtgcccgggaaaggcctggagtgggtggcgatcatctttcccggtgactctgataccgcatacaacccgtccttccaaggccaggtcaccatctcagccgacaagtccatcagtaccgcctacctacagtggagtagcctgaaggcctcggacaccgccatgtattactgtgcgagacgacttcgatacaactctggcggatacttcgatctctggggccgtggcaccctggtcactgtctcgtca

SEQ ID NO: 14243 - DNA, 297 bp, Homo sapiens
  source 1..297: mol_type = other DNA
aagggttctggatacagcttcaccaactactggatcggctgggtgcgccagatgcccgggaaaggcctggagtggatggggatcatctttcccgctgactctgataccacatacaacccgtccttccaaggccaggtcaccatctcagccgacaagtccatcagtaccgcctacctacagtggaacagtctgaaggcctcggacaccgccatgtattactgtgcgagacgacttcgatacaactctggcggatacttcgatctctggggccgtggcaccctggtcactgtctcgtca

SEQ ID NO: 14244 - DNA, 297 bp, Homo sapiens
  source 1..297: mol_type = other DNA
aggggttctggatacagcttcgccaactactggatcggctgggtgcgccaggtgcccgggaaaggcctggagtggatgggaatcatctttcccgctgactctgataccacatacaacccgtccttccaaggccaggtcaccatctcagccgacaagtccatcaataccgcctacctacagtggaacagcctgaaggcctcggacaccgccatgtattactgtgcgagacgacttcgatacaactctggcggatacttcgatctctggggccgtggcaccctggtcactgtctcgtca

SEQ ID NO: 14245 - DNA, 286 bp, Homo sapiens
  source 1..286: mol_type = other DNA
tgcaggcgctggattcgtgttcagcaactttgtcatgaagtgggtccgccaggctccagggaaggggctggagtgggtctcaactgctcatgtgaatgctgattggacacaatacgcagactccgtgaagggccggttcaccatctccagagacaattccaagaatacactatatctgcatatgaacagcctgagagccgaggacacggccgtatattactgtgcgaaagatatttcgtgggccatggacgtctggggcaaagggaccacggtcaccgtctcctca

SEQ ID NO: 14246 - DNA, 286 bp, Homo sapiens
  source 1..286: mol_type = other DNA
tgcaggcgctggattcaccttcagcaactatgtcatgaagtgggtccgccaggctccagggaaggggctggagtgggtctcaactgctcatgggaatggtgatttgacacaatacgcagactccgtgaagggccggttcaccatctccagagacaattccaagaatacactgtatctgcaaatgaacagcctgagagccgaggacacggccgtatattactgtgcgaaagatatttcgtgggccatggacgtctggggcaaagggaccacggtcaccgtctcctca

SEQ ID NO: 14247 - DNA, 286 bp, Homo sapiens; identical to SEQ ID NO: 14246
  source 1..286: mol_type = other DNA

SEQ ID NO: 14248 - DNA, 286 bp, Homo sapiens
  source 1..286: mol_type = other DNA
tgcaggcgctggattcatcttcagcaactatgccatgaagtgggtccgccaggctccagggaaggggctggagtgggtctcaactgctcatgggaatggtgttttgacacaatacgcagactccgtgaagggccggttcaccatctccagagacaattccaagaatacactgtatctgcaaatgaacagcctgagagccgaggacacggccgtatattactgtgcgaaagatatttcgtgggccatggacgtctggggcaaagggaccacggtcaccgtctcctca

SEQ ID NO: 14249 - DNA, 289 bp, Homo sapiens
  source 1..289: mol_type = other DNA
tgcagcctctggattcacctttactaactattggatgacctgggtccgccaggctccagggaaggggctggagtgggtgggcaacataaaggaagatggaagtgagaaatactatgtggactctgtgaagggccgattcaccatctccagagacgaccccaagaactcactatatctgcaaatgaacttcctgggagtcgtggacacggccgtgtattattgtgcgagagggggccggactggcgctcttgatatctggggccaagggacactggtcaccgtctcttca

SEQ ID NO: 14250 - DNA, 289 bp, Homo sapiens
  source 1..289: mol_type = other DNA
tggagcctctggattcacccttagtacctattggatgacctgggtccgccaggctccagggaaggggcaggagtgggtggccaacataaaggaagatggaagtgacaagttctatgcggactctgtgaagggccgattcaccatctccagagacgaccccaagaactcactgtatctgcaaatgaacttcctgggagtccaggacacggccgtgtattattgtgcgagagggggccggactggtgctcttgatatctggggccaagggacaatggtcaccgtctcttca

SEQ ID NO: 14251 - DNA, 289 bp, Homo sapiens
  source 1..289: mol_type = other DNA
tgtagcctctggattcacatttagtaattattggatgacctgggtccgccaggctccagggaaggggctggagtgggtggccaacataaagggagatggaagtgagaaatactatggggactctgtgaagggccgattcaccatttccagagacgaccccaacaagtcactatatctggaaatgaccttcctgggagtcgtggacacggccgtgtattactgtgcgagagggggccggactggtgctcttgatatctggggccatggaacactggtcaccgtctctaca

SEQ ID NO: 14252 - DNA, 289 bp, Homo sapiens
  source 1..289: mol_type = other DNA
tggagcctctggattcacccttagtacctattggatgacctgggtccgccaggctccagggaaggggcaggagtgggtggccaacataaaggaagatggaagtgacaagttctatgcggactctgtgaagggccgattcaccatctccagagacgaccccaagaactcactgtatctgcaaatgaacttcctgggagtccaggacacggccgtgtattattgtgcgcgagggggccggactggtgctcttgatatctggggccaagggacaatggtcaccgtctcttca

SEQ ID NO: 14253 - DNA, 289 bp, Homo sapiens
  source 1..289: mol_type = other DNA
tgcagcctctggattcacccttactaactattggatgacttgggtccgccaggctccagggaaggggctggagtgggtgggcaacataaaggaagatggaagtgagaaatactatgtggactctgtgaagggccgattcaccatctccagagacgaccccaagaactcactatatctgcaaatgaacttcctgggagtcgttgacacggccgtgtattactgtgcgagagggggccggactggtgctcttgatatctggggccaagggacactggtcaccgtctcttca

SEQ ID NO: 14254 - DNA, 289 bp, Homo sapiens
  source 1..289: mol_type = other DNA
tgcagcctctggattcacctttactagctattggatgacctgggtccgccaggctccagggaaggggctggagtgggtgggcaacataagggaagatggaagtgagaaacactatgtggactctgtgaagggccgattcaccatctccagagacgaccccaagaactcactatatctgcaaatgaacttcctgggagccgtggacacggccgtgtattactgtgcgagagggggccggactggtgctcttgatatctggggccaagggacactggtcaccgtctcttca

SEQ ID NO: 14255 - DNA, 289 bp, Homo sapiens
  source 1..289: mol_type = other DNA
tgcagcctctggattcacctttactacctattggatgacctgggtccgccaggctccagggaaggggctggagtgggtgggcaacataaaggaagatggaagtgaggtgtactatgcggactctgtgaagggccgattcaccatctccagagacgaccccaagaattcactatatctgcaaatgaacttcctgggagtcgtggacacggccgtgtattactgtgcgagagggggccggactggtgctcttgatatctggggccaagggacactggtcaccgtctcttca

SEQ ID NO: 14256 - DNA, 289 bp, Homo sapiens
  source 1..289: mol_type = other DNA
tgtagcctctggattcacatttagtaattattggatgacctgggtccgccaggctccagggaaggggctggagtgggtggccaacataaagggagatggaagtgagaaatactatgggaactctgtgaagggccgattcaccatttccagagacgaccccaacaagtcactatatctggaaatgaccttcctgggagtcgtggacacggccgtgtattactgtgcgagagggggccggactggtgctcttgatatctggggccatggaacactggtcaccgtctctaca

SEQ ID NO: 14257 - DNA, 289 bp, Homo sapiens
  source 1..289: mol_type = other DNA
tgcagcctctggattcacccttactaactattggatgacttgggtccgccaggctccagggaaggggctagagtgggtgggcaacataaaggaagatggaagtgagaaatactatgtggactctgtgaagggccgattcaccatctccagagacgaccccaagaactcactatatctgcaaatgaacttcctgggagtcgttgacacggccgtgtattactgtgcgagagggggccggactggtgctcttgatatctggggccaagggacactggtcaccgtctcttca

SEQ ID NO: 14258 - DNA, 289 bp, Homo sapiens
  source 1..289: mol_type = other DNA
tgcagcctctggattcacccttactaactattggatgacttgggtccgccaggctccagggaaggggctggagtgggtgggcaacataaaggaagatggaagtgagaaataccatgtggactctgtgaagggccgattcaccatctccagagacgaccccaagaactcactatatctgcaaatgaacttcctgggagtcgttgacacggccgtgtattactgtgcgagagggggccggactggtgctcttgatatctggggccaagggacactggtcaccgtctcttca

SEQ ID NO: 14259 - DNA, 289 bp, Homo sapiens
  source 1..289: mol_type = other DNA
tgcagcctctggattcacctttagtacctattggatgacctgggtccgccaggctccagggaagggcctggagtgggtggccaacataaaggaagatggaagtgagaaatattatgtggactctgtgaagggccgattcactatctccagagacgaccccaagaactcactatatctgcaaatgaacttcctgggagtcgtggacacggccgtgtattactgtgcgagagggggccggactggtgctcttgatatctggggccaagggacactggtcaccgtctctgca

SEQ ID NO: 14260 - DNA, 289 bp, Homo sapiens
  source 1..289: mol_type = other DNA
tgtagcctctggattcacatttagtaattattggatgacctgggtccgccaggctccagggaaggggctggagtgggtggccaacataaagggagagggaagtgagaaatactatggggactctgtgaagggccgattcaccatttccagagacgaccccaacaagtcactatatctggaaatgaccttcctgggagtcgtggacacggccgtgtattactgtgcgagagggggccggactggtgctcttgatatctggggccatggaacactggtcaccgtctctaca

SEQ ID NO: 14261 - DNA, 289 bp, Homo sapiens
  source 1..289: mol_type = other DNA
tggagcctctggattcacccttagtacctattggatgacctgggtccgccaggctccagggaaggggcaggagtgggtggccaacataaaggaagatggaagtgacaagttctatgcggactctgtgaagggccgattcaccatctccagagacgaccccaagaactcactgtatctgcaaatgaacttcctgggagtccaggacacggccgtgtattattgtgcgcgagggggccggactggtgctcttgatatctggggccaagggacaatggtcaccgtctctgca

SEQ ID NO: 14262 - DNA, 298 bp, Homo sapiens
  source 1..298: mol_type = other DNA
cactgtctctggtgcctccatcagccgtgacttctggagctggatccggcagcccccagggaagggactggagtggattgggtatatctatcacagtggtggcaccaactacaacccctccctcaagagtcgagtcaccatatcagtcgacacgtccaagagccagttctccctgaaggtgagctctgtgaccgctgcggacacggccgtgtattattgtgcgagaggaactggatctaacggtgaggtggcctggttcgacccctggggccagggaaccctggtcaccgtctcctca

SEQ ID NO: 14263 - DNA, 298 bp, Homo sapiens
  source 1..298: mol_type = other DNA
cactgtctctggtgcctccatcagccgtgacttctggagctggatccggcagcccccagggaagggactggagtggattgggtatatctatcacagtggcggcaccaactacaacccctccctcaagagtcgagtcaccatatcagtcgacacgtccaagagccagttctcactgaaggtgacctctgtgaccgctgcggacacggccgtgtatttttgtgcgagaggaactggatctaacggtgaggtggcctggttcgacccctggggccagggaaccctggtcaccgtcccctca

SEQ ID NO: 14264 - DNA, 298 bp, Homo sapiens
  source 1..298: mol_type = other DNA
cgctgtgtctggtgcctccctcagccgtgacttttggagctggatccggcagaccccagggaagggactggagtggattgggtatatctatcacagtggtggcaccaactacaacccctccctcaagagtcgagtcaccatttcagtcgacacgtccaagagccagttctccctgaaggtgacctctatgaccgcagcggacacggccgtatattattgtgcgaggggaactggatctaacggtgaggtggcctggttcgacccctggggccagggaatcctggtcaccgtcccctca

SEQ ID NO: 14265 - DNA, 298 bp, Homo sapiens
  source 1..298: mol_type = other DNA
cagtgtctctggtgcctccatccgtcgtgacttctggagctgggtccggcagcccccagggaggggactggagtggattggctatatctatcaccttggtggcaccaactacaacccctccctcgagagtcgagtcaccatatcagtcgacacgtccaagagccagttctccctgagggtgaggtcagtgaccgctgcggacacggccgtctattattgtgcgagagggactggatctaatggtgaggtggcctggttcgacccctggggccagggaaccctggtcaccgtctcctca

SEQ ID NO: 14266 - DNA, 301 bp, Homo sapiens
  source 1..301: mol_type = other DNA
ctctgtctctggtggctccatcaccagtatgaatttctactggggctggatccgccagtccccagggaaggggctggagtggatcgcgaccatgtattacagtgggaacacttactacaatccgtccctcaagagtcgagtcactatatcaggagacacgcccaggaatcgagtctccctgcagttgacctctgtgaccgccgcagacacgggggtgtattactgtgccagatcaatctggaccgtcgaagcagctacgtggcgggagtggggcccgggaatgctggtcaccgtctccacc

SEQ ID NO: 14267 - DNA, 301 bp, Homo sapiens
  source 1..301: mol_type = other DNA
ctctgtctctggtggctccatcaccagtatgaatttctactggggctggatccgccagtccccagggaaggggctggagtggatcgcgaccatgtattacagtgggaaaacttactacaatccgtccctcaagagtcgagtcactatatcaggagacacgcccaggaatcgagtctccctgcaattgacctctgtgaccgccgcagacacgggggtgtattactgtgccagatcaatctggaccgtcgaagcagctacgtggcgggagtggggcccgggaatgctggtcaccgtctccacc

SEQ ID NO: 14268 - DNA, 301 bp, Homo sapiens
  source 1..301: mol_type = other DNA
ctctgtctctggtggctccatcaccagtatgaatttctactggggctggatccgccagtccccagggaaggggctggagtggatcgcgaccatgtattacagtgggaaaacttactacaatccgtccctcaagagtcgagtcactatatcaggagacacgcccaggaatcgagtctccctgcaattgacctctgtgaccgccgcagacacggggatgtattactgtgccagatcaatctggaccgtcgaagcagctacgtggcgggagtggggcccgggaatgctggtcaccgtctccacc

SEQ ID NO: 14269 - DNA, 268 bp, Homo sapiens
  source 1..268: mol_type = other DNA
cactgtctctgtctctggtggctccatcgataactgcaactgggtccggcagcccccagggaagggactggagtggattggaaatataaatttcagggggaccaccaactacagcccctctctcaagagtcgagtcagtatatcagtagacacgtccaagaatcagatcgccctgaaactgaactctgtgaccgccgcagacacggccgtgtattattgtatgagttgggggtactggggccagggaattctggtcaccgtctcctca

SEQ ID NO: 14270 - DNA, 268 bp, Homo sapiens
  source 1..268: mol_type = other DNA
cactgtctctgctggctccatcggtagaagtatgttgaactgggtccggcagcccccagggaagggactggagtggattgggaatataaattacagggggaccaccaactacagcccctccctcaagagtcgagtcactatatcagaagacacgtccaagaaccagttcgccctgacactgaactctgtgaccgccgcagacacggccgtgtattattgtatgagttgggggtactggggccagggaattctggtcaccgtctcctca

SEQ ID NO: 14271 - DNA, 316 bp, Homo sapiens
  source 1..316: mol_type = other DNA
cactgcctctggtggctccatcaccgataattatttcttctgggtctggatccgccagtccccagggcaggggctggagtggattgggagtctcgaatatggtgggagcacttattacaatccgtccctccagaatcgagtcaccataggcgtagacgcctccaagaaccagttctccctgaagctgaactctgtgaccgccccagacacggctgtctattactgtgcgaggtcgttgggcgattactctaagagtggtgcccactactggtacttccctctctggggccgtggcaccccggtcactgtctcctca

SEQ ID NO: 14272 - DNA, 316 bp, Homo sapiens
  source 1..316: mol_type = other DNA
cactgcctctggtggctccatcaccaataatagtttcttctgggtctggatccgccagcccccagggcaggggctggagtggattgggagtctctattatggtgggagcacttattacaatccgtccctcaagagtcgagtcaccataggcgtagacacgtccaagaaccagttctccctgaagttgagctctgtgaccgccccagacacggctgtctattactgtgcgaggtcgttgggcgattactctaagagtggtgcccactactggtacttccctctctggggccgtggcaccccggtcactgtctcctca

SEQ ID NO: 14273 - DNA, 304 bp, Homo sapiens
  source 1..304: mol_type = other DNA
cactgtctctggtggctccgtcagcaatactaattacttctggagctggatccggcagcccccagggaaggggctggaatacattgggtatatccattacagtgggaggtccaactaccacccctccctcaacagtcgagtcaccatgtccgtagacacgtccaagaaccacctctccctgcagctgagttctgtgaccgctgcggacacggccgtctattactgtggtaggtctgataggagtggtccttctttcgtggagtttgattactgcggccagggaatcctggtcaccgtctcctca

SEQ ID NO: 14274 - DNA, 304 bp, Homo sapiens
  source 1..304: mol_type = other DNA
cactgtctctggtggctccgtcagcactgctaattacttctggagctggatccggcagcccccagggaaggggctggagtatattgggtacatccattacagtgggaggtccaactaccacccctccctcaagagtcgagtcaccatgtccgtagacacgtccaagaaccacctctccctgcagctgagttctgtgaccgctgcggacacggccgtgtattactgtggtaggtctgataggagtggtccttctttcgtggagtttgattactgcggccagggaatcctggtcaccgtctcctca

SEQ ID NO: 14275 - DNA, 304 bp, Homo sapiens
  source 1..304: mol_type = other DNA
cactgtctctggtggctccgtcagcaattctaatagctactggagctggatccggcagcccccagggaagggactggagtggattgcgtatatccgttacaatgggaggtccgactaccacccctccctcaagagtcgagccaccgtatccgtagacacgtccaagaaccacttctccctgcagctgagttctgtgaccgctgcggacacggccgtgtattactgtggtaggtctgataggagtggtccttctttcgtggagtttgattactgcggccagggaatcctggtcaccgtctcctca

SEQ ID NO: 14276 - DNA, 304 bp, Homo sapiens
  source 1..304: mol_type = other DNA
cactgtctctggtggctccgtcagcagtgctaataactactggagctggatccggcagcccccagggaaggggctggagtggattgcgtatatccattataatgggaggtccgactaccacccctccctcaggagtcgagtcaccgtatccgtagacacgtccaagaaccacgtctccctgcagctgagttctgtgaccgctgcggacacggccgtgtattactgtggtaggtctgataggagtggtccttctttcgtggagtttgattacttcggccagggaatcctggtcaccgtctcctca

SEQ ID NO: 14277 - DNA, 304 bp, Homo sapiens
  source 1..304: mol_type = other DNA
cactgtctctggtggctccgtcagcagtgctaataactactggagctggatccgacagcccccagggaaggggctggagtggattgcatatatccattataatgggaggtccgactaccacccctccctcaagagtcgagtcaccgtatccgtagacacgtccaagaaccacgtctccctgcagctgagttctgtgaccactgcggacacggccgtgtattactgtggtaggtctgataggagtggtccttctttcgtggagtttgattacttcggccagggaatcctggtcaccgtctcctca

SEQ ID NO: 14278 - DNA, 304 bp, Homo sapiens
  source 1..304: mol_type = other DNA
cactgtctctggtggctccgtcagcagtgctaataactactggagctggatccggcagcccccagggaaggggctggagtggattgcgtatatccattataatgggaggtccgactaccacccctccctcaagagtcgagtcaccgtatacgtagacacgtccaagaaccatgtctccctgcagctgagttctgtgaccgctgcggacacggccgtgtattactgtggtaggtctgataggagtggtccttctttcgtggagtttgattacttcggccagggaatcctggtcaccgtctcctca

SEQ ID NO: 14279 - DNA, 304 bp, Homo sapiens
  source 1..304: mol_type = other DNA
cactgtctctggtggctccgtcagcaatactaattacttctggagctggatccggcagcccccagggaaggggctggagtacattgggtatatccattacagtgggaggtccaactatcacccctccctcaacagtcgagtcaccatatccgtagacacggccaagaaccacctctccctgcagctgagttctgtgaccgctgcggacacggccgtctattactgtggtaggtctgataggagtggtccttctttcgtggaatttgattactgcggccagggaatcctggtcaccgtctcctca

SEQ ID NO: 14280 - DNA, 304 bp, Homo sapiens
  source 1..304: mol_type = other DNA
cattgtctctggtggctccgtcagcagtgctaataactactggagctggatccggcagcccccagggaaggggctggagtggattgcgtatatccattataatgggaggtccgactaccacccctccctcaagagtcgagtcaccgtatccgtagacacgtccaagaaccacgtctccctgcagttgagttctgtgaccgctgcggacacggccgtgtattactgtggtaggtctgataggagtggtccttccttcgtggagtttgattacttcggccagggaatcctggtcaccgtctcctca

SEQ ID NO: 14281 - DNA, 304 bp, Homo sapiens
  source 1..304: mol_type = other DNA
cactgtctctggtggctccgtcagcagtgctaataattactggagctggatccggcagcccccagggaaggggctggagtggattgcgtatatccattacaatgggaggtccgactaccacccctccctcaagagtcgagtcaccgtatccgtagacacgtccaagaaccacctctccctgcagctgagttctgtgaccgctgcggacacggccgtgtattactgtggtaggtctgataggagtggtccttctttcgtggagtttgattactgcggccagggaatcctggtcaccgtctcctca

SEQ ID NO: 14282 - DNA, 304 bp, Homo sapiens
  source 1..304: mol_type = other DNA
cactgtctctggtggctccgtcagcactgctaattacttctggagctggatccggcagcccccagggaaggggctggagtacattgggtatatccattacagtgggaggtccaactaccacccctccctcaagagtcgagtcaccatatccgtagacacgtccaagaaccacctctccctgcagctgagttctgtgaccgctgcggacacggccgtgtattactgtggtaggtctgataggagtggtccttctttcgtggagtttgattactgcggccagggaatcatggtcaccgtctcctca

SEQ ID NO: 14283 - DNA, 304 bp, Homo sapiens
  source 1..304: mol_type = other DNA
cactgtctctggtggctccgtcagcaatactaattacttctggagctggatccggcagcccccagggaaggggctggagtacattgggtatgtccattacagtgggaggtccaactaccacccctccctcaacagtcgagtcaccatatccgtagacacgtccaagaaccacctgtccctgcacctgagttctgtgaccgctgcggacacggccgtctattactgtggtaggtctgataggagtggtccttctttcgtggagtttgattacagcggccagggaattctggtcaccgtctcctca

SEQ ID NO: 14284 - DNA, 304 bp, Homo sapiens
  source 1..304: mol_type = other DNA
cactgtctctggtggctccgtcagcaatactaattacttctggagctggatccggcagcccccagggaaggggctggagtacattgggtatatccattacagtgggaggtccaactaccacccctccctcaacagtcgagtcaccatgtccgtagacacgtccaagaaccacctctccctgcagctgagttctgtgaccgctgcggacacggccgtctattactgtggtaggtctgataggagtggtccttctttcgtggagtttgattactgcggccagggaatcctggtcaccgtctcctca

SEQ ID NO: 14285 - DNA, 304 bp, Homo sapiens
  source 1..304: mol_type = other DNA
cactgtctctggtgtctccgtcagaagttctttttactacttgagctggatccggcagcccccagggaagggactggagttcattgggcatatatcttacggtgggagcaccaactacaacccttccctcaggagtcgagtcaccatatccctggacgtgtccaagaaccaggtctccctgcatttgagttctgtgaccgttgcggactcggccgtgtattactgtggaaggtctgataggagtggtccttctttcgtggagtttgattattggggccagggaaccctggtcaccgtctcctca

SEQ ID NO: 14286 - DNA, 304 bp, Homo sapiens
  source 1..304: mol_type = other DNA
cactgtctctggtggctccgtcagcagtgctaattacttctggagctggatccggcagcccccagggaaggggctggagtacattgggtatatccattacagtgggaggtccaactaccacccctccctcaagagtcgagtcaccatgtccgtagacacgtccaagaaccacctctccctgcagctgagttctgtgaccgctgcggacacggccgtgtattactgtggtaggtctgataggagtggtccttctttcgtggagtttgattactgcggccagggaatcatggtcaccgtctcctca

SEQ ID NO: 14287 - DNA, 304 bp, Homo sapiens
  source 1..304: mol_type = other DNA
cactgtctctggtggctccgtcagcagtgctaataactactggagctggatccggcagcccccagggaaggggctggagtggattgcgtatatccattataatgggaggtccgactaccacccctccctcaagagtcgagtcaccgtatccgtagacacgtccaagaaccacgtctccctgcagctgagttctgtgaccgctgcggacacggccgtgtattactgtggtaggtctgataggagtggtccttctttcgtggagtttgattacttcggccagggaatcctggtcaccgtctcctca

SEQ ID NO: 14288 - DNA, 304 bp, Homo sapiens
  source 1..304: mol_type = other DNA
cactgtctctggtggctccgtcagcagttctaattacttctggagctggatccggcagccccccgggaaggggctggagtacattgggtatatccattacactgggaggtccaactaccacccctccctcaagagtcgagtcaccatgtccgtagacacgtccaagaaccacctctccctgcagctgagttctgtgaccgctgcggacacggccgtgtattactgtggtaggtctgataggagtggtccttctttcgtggagtttgattactgcggccagggaatcctggtcaccgtctcctca

SEQ ID NO: 14289 - DNA, 304 bp, Homo sapiens
  source 1..304: mol_type = other DNA
cactgtctctggtggctccgtcagcagtgctaataactactggagctggatccggcagcccccagggaaggggctggagtggattgcgtatatccattataatgggaggtccgactaccacccctccctcaagagtcgagtcaccgtatccgtagacacgtccaagaaccacgtctccctgcagttgagttctgtgaccgctgcggacacggccgtgtattactgtggtaggtctgataggagtggtccttctttcgtggagtttgattacttcggccagggaatcctggtcaccgtctcctca

SEQ ID NO: 14290 - DNA, 304 bp, Homo sapiens
  source 1..304: mol_type = other DNA
cactgtctctggtggctccgtcagcaattctaatagctactggagctggatccggcagcccccagggaagggactggagtggattgcgtatatccattacaatgggaggtccgactaccacccctccctcaagagtcgagccaccatatccgtagacacgtccaagaaccaattctccctgcagctgagttctgtgaccgctgcggacacggccgtgtattactgtggtaggtctgataggagtggtccttctttcgtggagtttgattactgcggccagggaatcctggtcaccgtctcctca

SEQ ID NO: 14291 - DNA, 304 bp, Homo sapiens
  source 1..304: mol_type = other DNA
cactgtctctggtggctccgtcagcagtgctaattacttctggagttggatccggcagcccccagggaaggggctggagtggattgggtatatccattacagtgggagatccaactaccgcccctccctccagagtcgagtcaccatgtccgtagacacgtccaagaaccacgtctccctgcagctgagttctgtgaccgctgcggacacggccgtgtattactgtggtaggtctgataggagtggtccttccttcgtggagtttgattactgcggccagggaatcctggtcaccgtctcctca

SEQ ID NO: 14292 - DNA, 304 bp, Homo sapiens
  source 1..304: mol_type = other DNA
cactgtctctggtggctccgtcagcaatgctaataactactggagctggatccggcagcccccagggaaggggctggagtggattgcgtatatccattataatgggaggtccgactcccacccctccctcaagagtcgagtcaccgtatccgtagacacgtccaagaaccacgtctccctgcagctgagttctgtgaccgctgcggacacggccgtgtattactgtggtaggtctgataggagtggtccttctttcgtggagtttgattacttcggccagggaatcctggtcaccgtctcctca

SEQ ID NO: 14293 - DNA, 304 bp, Homo sapiens
  source 1..304: mol_type = other DNA
cactgtctctggtggctccgtcagcaattctaatagctactggagctggatccggcagcccccagggaagggactggagtggattgcgtatatccattacaatgggaggtccgactaccacccctccctcaagagtcgagccaccgtatccgtagacacgtccaagaaccacttctccctgcagctgagttctgtgaccgctgcggacacggccgtgtattactgtggtaggtctgataggagtggtccttctttcgtggagtttgattactgcggccagggaatcctggtcaccgtctcctca

SEQ ID NO: 14294 - DNA, 304 bp, Homo sapiens
  source 1..304: mol_type = other DNA
cactgtctctggtggctccgtcagcacttctaattacttctggagctggatccggcagccccccgggaaggggctggagtacattgggtatatccattacactgggaggtccaactaccacccctccctcaagagtcgagtcaccatgtccgtagacacgtccaagaaccacctctccctgcagctgagttctgtgaccgctgcggacacggccgtgtattactgtggtaggtctgataggagtggtccttctttcgtggagtttgattactgcggccagggaatcctggtcaccgtctcctca

SEQ ID NO: 14295 - DNA, 304 bp, Homo sapiens
  source 1..304: mol_type = other DNA
cactgtctctggtggctccgtcagcaatactaataactactggagctggatccggcagcccccagggaaggggctggagtggattgcgtatattcattacaatgggaggtccgactaccacccctccctcaagagtcgagtcaccgtatccatggacacgtccaagaaccagttctccctgcagctgagttctgtgaccgctgcggacacggccgtgtattactgcggtaggtctgataggagtggtccttctttcgtggagtttgattactgcggccagggaatcctggtcaccgtctcctca

SEQ ID NO: 14296 - DNA, 304 bp, Homo sapiens; identical to SEQ ID NO: 14274
  source 1..304: mol_type = other DNA

SEQ ID NO: 14297 - DNA, 304 bp, Homo sapiens
  source 1..304: mol_type = other DNA
cactgtctctggtggctccgtcaacaatgctaataactactggagctggatccggcagcccccaggaaaggggctggagtggattgcgtatgtccattctaatgggaggtccgactaccacccctccctcaagagtcgagtcaccgtgtccgtagacacgtccaagaaccacgtctccctgcagctgacctctgtgaccgctgcggacacggccgtgtatttctgtggtaggtctgataggagtggtccttctttcgtggagtttgattacttcggccagggaatcctggtcaccgtctcctca

SEQ ID NO: 14298 - DNA, 304 bp, Homo sapiens
  source 1..304: mol_type = other DNA
cactgtctctggtggctccgtcagcagtactaataactactggagctggatccggcagcccccagggaagggtctggagtggattgcgtatatccattataatgggaggtccgactaccacccctccctcaagagtcgagtcaccgtatccgtagacacgtccaagaaccacgtctccctgcagttgagttctgtgaccgctgcggacacggccgtgtattactgtggtaggtctgataggagtggtccttctttcgtggagtttgattacttcggccagggaatcctggtcaccgtctcctca

SEQ ID NO: 14299 - DNA, 304 bp, Homo sapiens
  source 1..304: mol_type = other DNA
cactgtctctggtggctccgtcagcagtgctaataactactggagctggatccggcagcccccagggaaggggctggagtggattgcatatatccattataatgggaggtccgactaccacccctccctcaagagtcgagtcaccgtatccgtagacacgtccaagaaccacgtctccctgcagctgagttctgtgaccgctgcggacacggccgtgtattactgtggtaggtctgataggagtggtccttctttcgtggagtttgattacttcggccagggaatcctggtcaccgtctcctca

SEQ ID NO: 14300 - DNA, 313 bp, Homo sapiens
  source 1..313: mol_type = other DNA
cgctgtctctggtggctccatcagcagcagtggttactactggggctggatccgccagccccccgggaaggggctggagtggattgggaatatctattatagtgggagcacctactacaacccgtccctcaagagtcgagtcaccatatcggtagacacgtccaagaaccagttttccctgaggctgacctccgtgatcgccgcagacacggctgtgtattattgtgcgagagttcattgtagtaggtccagctgctatttcccagcctggttcgacccctggggccagggaaaccaggtcaccgtctcctca

SEQ ID NO: 14301 - DNA, 313 bp, Homo sapiens
  source 1..313: mol_type = other DNA
cgctgtctctggtggttccatcagcagcagtggttactactggggctggatccgccagcccccagggaaggggctggagtggattgggtatatctattatagtgggagcacctactacaacccgtccctcaagagtcgagtcaccatatcggcagacacgtccaagaaccagctatccctgaaactgacctctgtgatcgccgcagacacggctgtgtattattgtgcgagagttcattgtagtaggtccagctgctatttcccagcctggttcgacccctggggccagggaaaccaggtcaccgtgtcctca

SEQ ID NO: 14302 - DNA, 313 bp, Homo sapiens
  source 1..313: mol_type = other DNA
cgctgtctctggtggctccatcagcagcagtggttactactggggctggatccgccagcccccagggaaggggctggagtggattgggagtatatattatagtgggagcacctactacaacccgtccctcaagagtcgagtcgccatgtcgatagagacgtcgaagaatcagttatccctgaagctgacctctgtgatcgccgcagacacggctgtgtattattgtgcgagagttcattgtagtaggtccagctgctatttcccagcctggttcgacccctggggccagggaaaccaggtcaccgtctcctca

SEQ ID NO: 14303 - DNA, 295 bp, Homo sapiens
  source 1..295: mol_type = other DNA
cactgtctccggtggctccatgaataattacttctggagctgggtccggaagaccccgggaaagggactggagtggattggatatgtctctgttagtgggagcactaattacaacccctccctcaggggtcgagtcaccatgtcagttgacacgtccaagaaccagttctccctgagcctgacttctgtgactgctgcagacacgggcctgtatttgtgttcgaggaaccccccggatatagcattgggctacatggacgcctggggcaaggggaccacggtcaccgtctcctca

SEQ ID NO: 14304 - DNA, 295 bp, Homo sapiens
  source 1..295: mol_type = other DNA
cactgtctccggtggctccatgaataattacttctggagctgggtccggcagaccccgggaaagggactggagtggattggatatgtctcttttagtgggagcactaattacaacccctccctcaggggtcgagtcaccatgtcagttgacacgtccaagaaccagttctccctgagcctgacttctgtgactgctgcagacacgggcctgtatttgtgttcgaggaaccccccggatatagcattgggctacatggacgcctggggcaaggggaccacggtcaccgtctcctca

SEQ ID NO: 14305 - DNA, 298 bp, Homo sapiens
  source 1..298: mol_type = other DNA
tgcagcctctggattcaccttcagtggctctgctatgcactgggtccgccaggcttccgggaaagggctggagtgggttggccgtattagaagcaaaactaacagttacgcgacagcatatgctgcgtcgatgaaaggcaggttcaccatctccagagatgattcaaagaacacggcgtatctgcaaatgaacagcctgaaaaccgaggacacggccgtgtattactgtactagacatgaggactacggtgacccatttgactactggggccagggaaccctggtcaccgtctcctca

SEQ ID NO: 14306 - DNA, 298 bp, Homo sapiens
  source 1..298: mol_type = other DNA
tgcagcctctggattcaccttcagtggctctgctatgcactgggtccgccaggcttccgggaaagggctggagtgggttggccgtattagaagcaaaactaacagttacgcgacagcatatgctgcgtcgatgaaaggcaggttcaccatctccagagatgattcaaagaacacggcgtttctgcaaatgaacagcctgaaaaccgaggacacggccgtgtattactgtactagacatgaggactacggtgacccatttgactactggggccagggaaccctggtcaccgtctcctca

SEQ ID NO: 14307 - DNA, 288 bp, Homo sapiens
  source 1..288: mol_type = other DNA
gcatctgcatctagtttcaacgccaattatatgcagtgggtgcgacaggcccctggacaagggcttgagtggatggccatgatcaaccgtattgatggtagcacatactacgcacagacttttaagggtcgagtcaccatgaccagggacacgtccacgagaacagtctatatggaactgagcagcctaacatctgacgacacggccgtttattactgtgcgacaggttcgggcgccacctggtacgcgcaatactggggccagggaaccctggtcaccgtctcctca

SEQ ID NO: 14308 - DNA, 288 bp, Homo sapiens
  source 1..288: mol_type = other DNA
acatctgcatctagtttcaacgccaattgtatgcagtgggtgcgacaggcccctggacaagggcttgagtggatggccatgctcaaccgtcttgatggtagcacatactacgcacagacttttaagggtcgagtcaccatgaccagggacacgtccacgagaacagtctatatggaactgagcagcctaacatctgacgacacggccgtttattactgtgcgacaggttcgggcgccacctggtacgcgcaatactggggccagggaaccctggtcaccgtctcctca

SEQ ID NO: 14309 - DNA, 304 bp, Homo sapiens
  source 1..304: mol_type = other DNA
tgcagcctctggattcaccctcagtcatcatgaaatcaactgggtccgccaggttccagggaaggggctggaatggctttcatttgctgatgggagtgctggtacaatttactatagagactctgtgaggggccgattcatcatctccagagacaacgccaacaactcagtgtttctgcaattgaacagcctgagagtcgaggacacggctgtttattattgtgtgagagggcccggggggggagagatgggaacaattacgtttgacttctggggccagggaaccctggtcaccgtctcctca

SEQ ID NO: 14310 - DNA, 304 bp, Homo sapiens
  source 1..304: mol_type = other DNA
tgcagcctctggattcaccctcagtcatcatgaaatcaactgggtccgccaggttccagggaaggggctggaatggctttcatttgctgatgggagtgctggtacaatttactatagagactctgtgaggggccgattcatcatctccagagacaacgccaacaactcagtgtttctgcagttgaacagcctgagagtcgaggacacggctgtttattattgtgtgagagggcccggggggggagagatgggaacaattacgtttgacttctggggccagggaaccctggtcaccgtctcctca

SEQ ID NO: 14311 - DNA, 304 bp, Homo sapiens
  source 1..304: mol_type = other DNA
tgcagcctctggattcaccctcagtcatcatgaaatcaactgggtccgccaggttccagggaaggggctggaatggctttcatttgctgatgggagtgctggtacaatttactatagagactctgtgcggggccgattcatcatctccagagacaacgccaacaactcagtgtttctgcaattgaacagcctgagagtcgaggacacggctgtttattattgtgtgagagggcccggggggggagagatgggaacaattacgtttgacttctggggccagggaaccctggtcaccgtctcctca

SEQ ID NO: 14312 - DNA, 310 bp, Homo sapiens
  source 1..310: mol_type = other DNA
tgcagcctctggattcactttcactacctatagcttcaactgggtccgccaggctccagggaagggactggagtgggtctcatccattagtagtagtagtcgtcacatatactacgcagactcagtaaagggccgattcaccatctccagagacaacgccaagaactcactgtatctgcaaatgaacatcctgagagccgaggacacggctgtgtactactgtgcgagagatgggacgcagttctacgacagtactggcctgtactacatggacgtctggggcaaagggaccacggtcaccgtctcctcc

SEQ ID NO: 14313 - DNA, 310 bp, Homo sapiens
  source 1..310: mol_type = other DNA
cgcagcctctggattccctttcactacctattccttcaactgggtccgccaggctccagggaagggactggagtgggtctcatccattagtagtagtagtcgtcacatatactacgcagactcagtaaagggccgattcaccatctccagagacaacgccaagaactcactgtatctgcaaatgaacaacctgagagccgaggacacggctgtgtactactgtgcgagagacgggacgcagttctacgacagtactggcctgtactacatggacgtctggggcaacgggaccacggtcaccgtctcctcc

SEQ ID NO: 14314 - DNA, 298 bp, Homo sapiens
  source 1..298: mol_type = other DNA
tgcagtctctggattcagcattagtagctattggatgagctggctccgccaggctccagggaaggggctggagtggttgggcaacataaagcaagatggaagtgagacatactatctagactctgtgaagggccgattcaccatctccagaaacaacgccaagaactcactgtatgtgcaattgaacagcctgagagtcgaggacacggccgtttattactgtgcgagagatcgggagtatagtgggagccacccgattgactactggggccagggaaccctggtcaccgtctcctca

SEQ ID NO: 14315 - DNA, 298 bp, Homo sapiens
  source 1..298: mol_type = other DNA
tgcagtctctggattcagcattagtagctattggatgacctgggtccgccaggctccagggaaggggctggagtggctgggcaacataaagcaagatggaagtgagacatactatctagactctgtgaagggccgattcaccatctccagaaacaacgccaagaactcactgtatgtgcaattgaacagcctgagagtcgaggacacggccgtttattactgtgcgagagatcgggagtatagtgggagccacccgattgactactggggccagggaaccctggtcaccgtctcctca

SEQ ID NO: 14316 - DNA, 298 bp, Homo sapiens
  source 1..298: mol_type = other DNA
tgcagcctctggattcagctttagtagctattggatgagctggctccgccaggctccagggaagggactggagtggctggccaacataaagcaagatggaagtgagacatactatgtagactctgtgaagggccgattcaccatctccagagacaacgccaagaactcactgtatgtgcaattgaacagcctgagagtcgaggacacggccgtttattactgtgcgagagatcgggagtatagtgggagccacccgattgactactggggccggggaaccctggtcaccgtctcctca

SEQ ID NO: 14317 - DNA, 298 bp, Homo sapiens
  source 1..298: mol_type = other DNA
tgcagcctctggattcagcattagtagctattggatgagctgggtccgccaggctccagggaaggggctggagtggctggccaacataaagcaagatggaagtgagacatactatctggactctgtgaggggccgattcaccatctccagaaacaacgccaagaactcactgtatgtgcaattgaacagcctgagagtcgaggacacggccgtttattactgtgcgagagatcgggagtatagtgggagccacccgattgactactggggccagggaaccctggtcaccgtctcctca

SEQ ID NO: 14318 - DNA, 313 bp, Homo sapiens
  source 1..313: mol_type = other DNA
cgcctatggtgggtccttcagtatttactactggaactggatccgccagcccccagggaagggtctggagtggattggggaaatcgatcgcagtggaggcgccagctacaccccgtccctcaggggtcgagtctccatatcacttgactcgtccaataaccagttctccctgaggctgacctctgtgaccgccgcggacacggctgtctattactgtgcgcgagccacttacgtgcccgatagtagtggttacgactactactactactacatggacgtctggggcaaagggaccacggtcaccgtctcctca

SEQ ID NO: 14319 - DNA, 313 bp, Homo sapiens; identical to SEQ ID NO: 14318
  source 1..313: mol_type = other DNA

SEQ ID NO: 14320 - DNA, 313 bp, Homo sapiens
  source 1..313: mol_type = other DNA
cgcctatggtgggtccttcagtacttactactggaactggatccgccagcccccagggaaggggctggagtggattggggaaatcaatcgcagtggaggcgccagctacaccccgtccctcaggggtcgagtcaccgtatcacttgactcgtccaagaaccagttctccctgaagctgacctctgtgaccgccgcggacacggctgtctattactgtgcgcgagccacttacgtgcccgatagtagtggttacgactattattactactacatggacgtctggggcaaagggaccacggtcaccgtctcctca

SEQ ID NO: 14321 - DNA, 313 bp, Homo sapiens
  source 1..313: mol_type = other DNA
cgcctatgatgggtccttcactacttactactggaactggatccgccagcccccagggaaggggctggagtggattggggaaatcaatcgcagtggaggcgccagctacaccccgtccctcaggggtcgagtcaccgtatcatttgactcgtccaagaaccaattctccctgaagctgacctctgtgaccgtcgcggacacggctgtctattactgtgcgcgagccacttacgtgcccgatagtagtggttacgactattattactactacatggacgtctggggcaaagggaccacggtcaccgtctcctca

SEQ ID NO: 14322 - DNA, 319 bp, Homo sapiens
  source 1..319: mol_type = other DNA
cgctgtctatggtgggtccttcagtggttactactggagctggatccgccagccaccaggaaaggggctggagtggattggggagatcaatcatggtggaggcaccaattacaacccgtccctcaagagtcgagtcgccatatcactagccacgtccaagaaccagttctccctgaagctgaactctgtgaccgccgcggacacggctgtgtattactgtgcgagaggtggataccactcatctcgccgccacccgccccgcaaaagagactattacatggacgtctggggcacagggaccacggtcaccgtctcctca

SEQ ID NO: 14323 - DNA, 319 bp, Homo sapiens
  source 1..319: mol_type = other DNA
cgctgtctatggtgggtccttcagtggttactactggagctggatccgccagccaccaggaaaggggctggagtggattggggagatcaatcatggtggaggcaccaattacaacccgtccctcaagagtcgagtcgccatatcactagccacgtccaagaaccagttctccctgaagctgaactctgtgaccgccgcggacacggctgtgtattactgtgcgagaggtggataccactcaagtcgccgccacccgccccgcaaaagagactattacatggacgtctggggcacagggaccacggtcaccgtctcctca

SEQ ID NO: 14324 - DNA, 274 bp, Homo sapiens
  source 1..274: mol_type = other DNA
tgcagcctctggattcaccttcagtggttatgacatgaattgggtccgccaggctccagggaaggggctggagtgggtttcatacattagtagtagaggtagtaccataaactacgcagactctgtgaggggccgattcaccatctccagagacaatggcaggaactcactgtatctgcaaatgaacagcctgagagacgacgacacggctgtatattactgtgggagccttacgagtttctggggccaagggacagtggtcaccgtctcttca

SEQ ID NO: 14325 - DNA, 274 bp, Homo sapiens
  source 1..274: mol_type = other DNA
tgcagcctctggattcaccttcagtggttatgacatgaattgggtccgccaggctccagggaaggggctggagtgggtttcatacattagtagtagaggtagtaccataaactacgcagactctgtgaggggccgattcaccatctccagagacaatggcaggaactcactgtatctgcaaatgaacagcctgagagacgacgacacggctgtgtattactgtgggagccttacgagtttctggggccaagggacagtggtcaccgtctcttca

SEQ ID NO: 14326 - DNA, 274 bp, Homo sapiens
  source 1..274: mol_type = other DNA
tgcagcctctggattcaccttcagtggttatgacataaactgggtccgccaggctccagggaaggggctggagtgggtttcatatattagtagtaaaggtagtgccataaactacgcagactctgtgaggggccgattcaccatctccagagacaatgacaggaactcagcgtttttgcaaatgaacagcctgagagacgacgacacggctgtgtattattgtgggagccttacgagtttctggggccaagggacagtggtcatcgtctcttca

SEQ ID NO: 14327 - DNA, 274 bp, Homo sapiens
  source 1..274: mol_type = other DNA
tgcagcctctggattcaccttcagtggttatgacatgaactgggtccgccaggctccagggaaggggctggagtgggtttcatatattagtagtaaaggtagtgccataaactatgcagactctgtgaggggccgattcaccatctccagagacaatgacaggaactcagtgtatttgcaaatgaacagcctgagagacgacgacacggctgtgtattactgtgggagccttacgagtttctggggccaagggacagtggtcaccgtctcttca

SEQ ID NO: 14328 - DNA, 274 bp, Homo sapiens
  source 1..274: mol_type = other DNA
tgcagcctctggattcaccttcagtggttatgacatgaactgggtccgccaggctccagggaaggggctggagtggatttcatacattagtagtaaaggtagtgccataaactacgcagactctgtgaggggccgattcaccatctccagagacaatgacaggaactcagtgtatttgcaaatgaacagcctgagagacgacgacacggctgtgtattactgtgggagccttacgagtttctggggccaagggacagtggtcaccgtctcttca

SEQ ID NO: 14329 - DNA, 274 bp, Homo sapiens
  source 1..274: mol_type = other DNA
tgaagcctctggattcactttcagtggttatgacatgaactgggtccgccaggctccagggaaggggctggagtgggtttcatatatcagtagtaaaggtgctgccataaattacgcagactctgtgaggggccgattcaccatccacagagacaatgacaggaagtccgtgtatttgcaaatgaacagcctgagagacgacgacacggctgtatattactgtgggagcctcacgagtttctggggccaagggacagtggtcatcgtctcttca

SEQ ID NO: 14330 - DNA, 274 bp, Homo sapiens
  source 1..274: mol_type = other DNA
tgcagcctctggattcaccttcagtggttatgacatgaactgggtccgccaggctccagggaaggggctggagtgggtttcatacattagtagtaaaggtagtgccataaactacgcagactctgtgaggggccgattcaccatctccagagacaatgacaggaactcagtgtatttgcaaatgaacagcctgagagacgacgacacggctgtgtattactgtgggagccttacgagtttctggggccaagggacagtggtcaccgtctcttca

SEQ ID NO: 14331 - DNA, 295 bp, Homo sapiens
  source 1..295: mol_type = other DNA
tgcagcctctggattcacctttagctactatcccatgagctgggtccgccaggctccagggaaggggctggagtgggtctcaactattggtgatagtggtggcgagacatactacgcagactccgtgaggggccggttcaccatctccagagacaattccaagaacacgctgtttctgcaagtgaacagcctgagatccgaggacacggccgtatattactgtgcgaaacatatccggaatgccaactcccaatttgactactggggccagggaaccctggtcaccgtctcctca

SEQ ID NO: 14332 - DNA, 295 bp, Homo sapiens
  source 1..295: mol_type = other DNA
tgcagcctctggattcacgtttagcgactatcccatgacctgggtccgccaggctccagggaaggggctggagtgggtctcaactattggtgattatggtggcgacatatactacgcagactccgtgaggggccggttcaccatctccagagacaattccaagaacacgctgtttctgcaaatgaacagcctgagatccgaggacacggccgtatattactgtgcgaaacatatccggaatgccaactcccaatttgactactggggccagggaaccctggtcaccgtctcctca

SEQ ID NO: 14333 - DNA, 295 bp, Homo sapiens
  source 1..295: mol_type = other DNA
tgcagcctctggattcacgtttagcgaccatcccatgacctgggtccgccaggctccagggaaggggctggagtgggtctcaactattggtgattatggtggcgacatatactacgcagactccgtgaggggccggttcaccatctccagagacaattccaagaacacgctgtttctgcaaatgaacagcctgagatccgaggacacggccgtatattactgtgcgaaacatatccggaatgccaactcccaatttgactactggggccagggaaccctggtcaccgtctcctca

SEQ ID NO: 14334 - DNA, 298 bp, Homo sapiens
  source 1..298: mol_type = other DNA
cactgtctctggtggctccgtcagtagtggtggttactactggaactggatccgccagcacccagggaagggcctggagtggattggttacatctcttacagtgggaccacctacagcaacccgtccctcaagagtcgaattagtatatcagtagacacgtctaggaaccaaatctccctgaagctgagctctgtgactgccgcagacacggccgtgtattactgtgcgagagatcgggagggttcggggagttattatgcctactggggccagggaaccctggtcaccgtctcctca

SEQ ID NO: 14335 - DNA, 298 bp, Homo sapiens
  source 1..298: mol_type = other DNA
cactgtctctggtggctccgtcagcagtggtggttactactggaactggatccgccagcacccagggaagggcctggagtggattgggtacatctcttacagtgggaccacctacagcaacccgtccctcaagagtcgaattactatagcaatagacacgtctcggaaccaaatctccctgaagctgaggtctgtgactgccgcagacacggcccggtattactgtgcgagagatcgggagggttcggggagttattatgcctactggggccagggaaccctggtcaccgtctcctca

SEQ ID NO: 14336 - DNA, 298 bp, Homo sapiens
  source 1..298: mol_type = other DNA
cactgtctctggtggctccgtcagcagtggtggttaccactggaactggatccgccagcacccagggaagggcctggagtggatcggctacatctcttacagtgggagcacctacagcaacccgtccctcaagagtcgagttactatttcagtagacacgtctcggaaccaaatctccctgaagctgagctctgtgactgccgcggacacggccgtgtattactgtgcgagagatcgggagggttcggggagttattatgcctactggggccagggaaccccggtcaccgtctcctca

SEQ ID NO: 14337 - DNA, 312 bp, Homo sapiens
  source 1..312: mol_type = other DNA
aagggttctggatacagctttagcaactactggatcggctgggtgcgccagatgcccggaaaaggcctggagtggatggggatcatctaccctgatgactctgataccacatacagcccgtccttcaaaggccacgtcaccatctcagtcgacaagtccgtcagcaccgcctacctccagtggagcagcctgaaggcctcggacaccgccatgtattactgtgcgagacagtcccacatagtcatggccaccaccccgcagtacgatccttttgatatgtggggccaagggacaatggtcaccgtctcttcg

SEQ ID NO: 14338 - DNA, 312 bp, Homo sapiens
  source 1..312: mol_type = other DNA
aagggttctggatacagctttaccaactactggatcggctgggtgcgccagatgcccggaaaaggcctggagtggatggggatcatctaccctgatgactctgataccacatacagcccgtccttcaaaggccacgtcaccatctcagtcgacaagtccgtcagcaccgcctacctccagtggagcagcctgaaggcctcggacaccgccatgtattactgtgcgagacagtcccacatagtaatggccaccaccccgcagtacgatccttttgatatgtggggccaagggacaatggtcaccgtctcttca

SEQ ID NO: 14339 - DNA, 298 bp, Homo sapiens
  source 1..298: mol_type = other DNA
tgcagcctctggattcaccttcggtgactatgccatgcactgggtccgccaggctccaggcaaggggctggagtgggtggcagttatatcatataatggagatactaagttttatgcagactccgtgaagggccgattcaccatctccagagacagtcccaagaacacattgtatctgcaaatgaacagcctgagagccgaggactcggctgtctattactgtgcgagagatatgtttcggggagtccctgactacttagactattggggccagggaaccctggtcaccgtctcctca

SEQ ID NO: 14340 - DNA, 298 bp, Homo sapiens
  source 1..298: mol_type = other DNA
tgccgcctctggattcaccctcagtagttatactatgcactgggtccgccagactccagacatggggctgcagtgggtggcagttttgtcatatgatggagagtacaaaatctacgcagactccgtgaagggccgattcaccatctccagagacgattcgaagaacacgctgtatctgcaaatggacagcctgagacctgaggacacggctgtctacttctgtgcgagagatatgtttcggggagtacccgactacttggactactggggccagggaaccctggtcaccgtctcctca

SEQ ID NO: 14341 - DNA, 298 bp, Homo sapiens
  source 1..298: mol_type = other DNA
tgcagcctctggattcaccttcggtgactatgccatgcactgggtccgccaggctccaggcaaggggctggagtgggtggcagttatatcatataatggagatactaagttttatgcagactccgtgaagggccgattcaccatctccagagacagtcccaagaacacattgtatctgcaaatgaacaacctgagagccgaggactcggctgtctattactgtgcgagagatatgtttcggggagtccctgactacttagactattggggccagggaaccctggtcaccgtctcctca

SEQ ID NO: 14342 - DNA, 298 bp, Homo sapiens
  source 1..298: mol_type = other DNA
tgcagcctctggattcaccttcggtgactatgctttccactgggtccgccaggctccaggcaaggggctggagtgggtggcagttatatcatataatggagatactaagttttacgcagactccgtgaagggccgattcaccatctccagagacggtcccaagaacacattgtatctgcaaatgaacagcctgagagccgaggactcggctgtctattactgtgcgagagatatgtttcggggagtccctgactacttagactattggggccagggaaccctggtcaccgtctcctca

SEQ ID NO: 14343 - DNA, 298 bp, Homo sapiens
  source 1..298: mol_type = other DNA
cactgtctctggtggctccaccagcactaggaattactgctggggctggatccgccaggccccagggaaggggctggagtggattgggactgtctattatagtgggagcaccaactacaacctgtccctcaagagtcgagtcaccatatccctagacacgtccaagaaccaattctccctgaaactgagctctgtgaccgccgcagacacggctgtgtattactgtgcgagacagtccactacatctgtggccctttttgactactggggccagggcaccctggtcaccgtctcctca

SEQ ID NO: 14344 - DNA, 298 bp, Homo sapiens
  source 1..298: mol_type = other DNA
cactgtctctggtggctccaccagcactaggaattactgctggggctggatccgccaggccccagggaaggggctggagtggatggggactgtctattatggtgggagcaccaactacaacctgtccctcaagagtcgagtcaccatatcgctagacacgtccaagaaccaattctccctgaaactgagctctgtgaccgccgcagacacggctgtttattactgtgcgagacagtccactacatctgtggccctttttgactactggggccagggcaccctggtcaccgtctcctca

SEQ ID NO: 14345 - DNA, 298 bp, Homo sapiens
  source 1..298: mol_type = other DNA
cagtgtctctggtggctccacgagcactaggaattactgctgggcctggatccgcctggccccagggaaggggctggagtgggttggaactgtctattataatgggaacaccaactacaacctgtccttcaagggtcgagtcaccatatccctagacacgtccaagaaccaattctccctgagactgagctctgtgaccgccgcagacacggctgtatattactgtgcgagacagtccactacatctgtggccctttttgactactggggccagggcacgctggtcaccgtctcctca

SEQ ID NO: 14346 - DNA, 298 bp, Homo sapiens
  source 1..298: mol_type = other DNA
cactgtctctggtggctccaccagcactaggaattactgctggggctggatccgccaggccccagggaaggggctggagtggatggggactgtctattatggtgggagcaccaactacaacctgtccctcaagagtcgagtcaccatatcgctagacacgtccaagaaccaattctccctgaaactgagctctgtgaccgccgcagacacggctctgtattactgtgcgagacagtccactacatctgtggccctttttgactactggggccagggcaccctggtcaccgtctcctca

SEQ ID NO: 14347 - DNA, 280 bp, Homo sapiens
  source 1..280: mol_type = other DNA
cactgtctctggtgcctccatcaggagttactactggagctggatccggcagcccccagggaagggactggagtggattgggtatgtctatcacactggaaccaccaactacaacccctccctcgggagtcgtgtcaccatatcagtagacacgtccaagaaccagttcaccctgaacctgacctctgtgaccgctgcggacacggccatttattactgtgcctgtttagcaccggctgatatcccctggggccaggggaccctggtcaccgtctcctca

SEQ ID NO: 14348 - DNA, 280 bp, Homo sapiens
  source 1..280: mol_type = other DNA
cactgtctctggtgtatccatcgggagttattactggagctggatccggcagcccccagggaagggactggagtggattgggtatgtctattccactgggagcaccgactacaacccctccctcaagggtcgagtcaccatatcagtagacacgtccaagaaccagttctccctgaacctgacttctgtgaccactgcggacacggccgtctattactgtgcctgtctagcaccggctgatatcccctggggtcagggaaccctggtcaccgtctcctca

SEQ ID NO: 14349 - DNA, 280 bp, Homo sapiens
  source 1..280: mol_type = other DNA
cactgtctctggcgtctccatcagaagttactactggagctgggtccggcagcccccagggaagggactggagtggattggatatgtctattccactgggagcgccgactacaacccctccctcgcgagtcgagtcaccattttagtagacacgtccaagaaccagttctccctgaagctgacctctgtgaccgctgcggacacggccgtgtattactgtgcctgtttggcaccggctgatatcccctggggccagggaaccctggtcaccgtctcctca

SEQ ID NO: 14350 - DNA, 280 bp, Homo sapiens
  source 1..280: mol_type = other DNA
cagtgtctctggcgtctccatcagaagttactactggagctgggtccggcagcccccagggaagggactggagtggattgggtctgtctattccactgggagcgccgactacaacccctccctctcgagtcgagccaccatatcagtagacacgtccaagaaccagttctccctgaagctgacctctgtgaccgctgcggacacggccgtgtattactgtgcctgtttagcaccggctgatatcccctggggccagggaacccgggtcaccgtctcctca

SEQ ID NO: 14351 - DNA, 280 bp, Homo sapiens
  source 1..280: mol_type = other DNA
cactgtctctggcgtctccatcacaagttacttctggagttgggtccggcagcccccagggaagggactggagtggattggctatgtctattccactgggagcgccgactacaacccctccctctcgggtcgagccaccatatcaatagacacgtccaagaaccagttctccctgaccctgacctctgtgaccgctgcggacacggccgtctattactgtgcctgtctagccccggctgatatcccctggggccagggaaccctggtcaccgtctcctca

SEQ ID NO: 14352 - DNA, 280 bp, Homo sapiens
  source 1..280: mol_type = other DNA
cactgtctctggcgtctccatcacaagttacttctggagttgggtccggcagcccccagggaagggactggagtggattggctatgtctattccactgggagcgccgactacaacccctccctctcgggtcgagccaccatatcaatagacacgtccaagaaccagttccccctgaccctgacctctgtgaccgctgcggacacggccgtctattactgtgcctgtctagccccggctgatatcccctggggccagggaaccctggtcaccgtctcctca

SEQ ID NO: 14353 - DNA, 292 bp, Homo sapiens
  source 1..292: mol_type = other DNA
tgcagcctctggattcacctttagttactattggatgggctgggtccgccaggctccagggaaggggctgatatgggtggccaacataaagcaagatggaagtgagaaaaactatgtggactctgtgaagggccgattcaccatctccagagacaacgccaagaactcactgtatctgcaaatgaacagcctgagagccgaagacacggccgtctattactgtgtgagagagggggggagtggttattcgtttgactcctggggccagggaaccctggtcaccgttttctca

SEQ ID NO: 14354 - DNA, 292 bp, Homo sapiens
  source 1..292: mol_type = other DNA
tgcagcctctggattcacctttagttactattggatgagttgggtccgccaggctccagggaaggggctgatatgggtggccaacataaagcaagatggaagtgagaaaaactatgtggactctgtgaagggccgattcaccatctccagagacaacgccaagaactcactgtatctgcaaatgaacagcctgagagccgaagacacggccgtgtattactgtgtgagagagggggggagtggttattcgtttgactcctggggccagggaaccctggtcaccgttttctca

SEQ ID NO: 14355 - DNA, 292 bp, Homo sapiens
  source 1..292: mol_type = other DNA
tgcagcctctggattcacctttagttactattggatgggctgggtccgccaggctccagggaaggggctgatatgggtggccaacataaagcaagatggaagtgagaaaaactatgtggactctgtgaagggccgattcaccatctccagagacaacgccaagaactcactgtatctgcaaatgaacagcctgagagccgaagacacggccgtatattactgtgtgagagagggggggagtggttattcatttgactcctggggccagggaaccctggtcaccgttttctca

SEQ ID NO: 14356 - DNA, 292 bp, Homo sapiens
  source 1..292: mol_type = other DNA
tgcagcctctggattcacctttagttactattggatgagctgggtccgccaggctccagggaaggggctgatatgggtggccaacataaagcaagatggaagtgagaaaaactatgtggactctgtgaagggccgattcaccatctccagagacaacgccaagaactcactgtatctgcaaatgaacagcctgagagccgaagacacggccgtgtattactgtgtgagagagggggggagtggttattcgtttgactcctggggccagggaaccctggtcaccgttttctca

SEQ ID NO: 14357 - DNA, 292 bp, Homo sapiens
  source 1..292: mol_type = other DNA
tgcagcctctggattcacctttagttattattggatgggctgggtccgccaggctccagggaaggggctgatatgggtggccaacataaagcaagatggaagtgagaaaaactatgtggactctgtgaagggccgattcaccatctccagagacaacgccaagaactcactgtatctgcaagtgaacagcctgagagccgaagacacggccgtctattactgcgtgagagagggggggagtggttattcctttgactcctggggccagggaaccctggtcaccgttttctca

SEQ ID NO: 14358 - DNA, 292 bp, Homo sapiens
  source 1..292: mol_type = other DNA
tgcagcctctggattcacctttagttattattggatgggctgggtccgccaggctccagggaaggggctgatatgggtggccaacattaagcaagatggaagtgagaaaaactatgtggactctgtgaagggccgattcaccatctccagagacaacgccaagaactcactgtatctgcaaatgaacagcctgagagccgaagacacggccctatattactgtgtgagagagggggggagtggttattcgtttgactcctggggccagggaaccctggtcaccgttttctca

SEQ ID NO: 14359 - DNA, 292 bp, Homo sapiens
  source 1..292: mol_type = other DNA
tgcagcctctggattcacctttagttacttttggatgagctgggtccgccaggctccagggaaggggctgatatgggtggccaacataaagcaagatggaagtgagaaaaactatgtggactctgtgaggggccgattcaccatctccagagacaacgccaagaactcactgtatctgcaaatgaacagcctgagagccgaagacacggccgtgtattactgtgtgagagagggggggagtggttattcgtttgactcctggggccagggaaccctggtcaccgttttctca

SEQ ID NO: 14360 - DNA, 292 bp, Homo sapiens
  source 1..292: mol_type = other DNA
tgcagcctctggattcacctttagttactattggatgggctgggtccgccaggctccagggaaggggctgatatgggtggccaacataaagcaagatggaagtgagaaaaactatgtggactctgtgaagggccgattcaccatctccagagacaacgccaagaactcactgtatctgcaaatgaacagcctgagaggcgaagacacggccgtgtattactgtgtgagagagggggggagtggttattcgtttgactcctggggccagggaaccctggtcaccgttttctca

SEQ ID NO: 14361 - DNA, 292 bp, Homo sapiens
  source 1..292: mol_type = other DNA
tgaagcctctggattcacctttagctactattggatgagttgggtccgccaggctccagggaaggggctgatatgggtggccaacataaaacaagatggaagtgagaaaaactatgtggactctgtgaagggccgattcaccatctccagagacaacgccaagaactcactgtatctgcaaatgaacagcctgagagccgaagacacggccgtatattactgtgtgagagagggggggagtggttattcgtttgactcctggggccagggaagcctggtcaccgttttctca

SEQ ID NO: 14362 - DNA, 293 bp, Homo sapiens
  source 1..293: mol_type = other DNA
tgcagcctctggattcacctttagttacttttggatgggctgggtccgtcaggctccagggaaggggctgatatgggtggccaacataaagcaagatggaagtgagaaaaactatgtggactctgtgaagggccgattcaccatctccagagacaacgccaagaactcactgtatctgcaaatcaacagcctgagagccgaagacacggccgtgtattactgtgtgagagagggggggagtggttattcgtttgactcctggggccagggaaccctggtcaccgtttttctca

SEQ ID NO: 14363 - DNA, 292 bp, Homo sapiens
  source 1..292: mol_type = other DNA
tgcagcctctggattcacctttagttactattggatgggctgggtccgccaggctccagggaaggggctgatatgggtggccaacataaagcaagatggaagtgagaaaaactatgtggactctgtgaagggccgattcaccatctccagagacaacgccaagaactcactgtcactgcaaatgaacagcctgagagccgaagacacggccgtctattactgtgtgagagagggggggagtggttattcgtttgactcctggggccagggatccctggtcaccgttttctca

SEQ ID NO: 14364 - DNA, 292 bp, Homo sapiens
  source 1..292: mol_type = other DNA
tgcagcctctggattcacctttagttactattggatgagctgggtccgccaggctccagggaaggggctgatatgggtggccaacataaagcaagatggaagtgagaaaaactatgtggactctgtgaagggccgattcaccatctccagagacaacgccaagaactcactgtatctgcaaatgaacagcctgagagccgaagacacggccgtgtattattgtgtgagagagggggggagtggttattcgtttgactcctggggccagggaaccctggtcaccgttttctca

SEQ ID NO: 14365 - DNA, 292 bp, Homo sapiens
  source 1..292: mol_type = other DNA
tgcagcctctggattcacatttagttactattggatgagctgggtccgccaggctccagggaaggggctgatatgggtggccaacataaagcaagatggaagtgagaaaaactatgtggactctgtgaagggccgattcaccatctccagagacaacgccaagaactcactgtatctgcaaatgaacagcctgagagccgaagacacggccgtctattattgtgtgagagagggggggagtggttattcgtttgactcctggggccagggaaccctggtcaccgttttctca

SEQ ID NO: 14366 - DNA, 292 bp, Homo sapiens
  source 1..292: mol_type = other DNA
tgcagcctctggattcacctttagttacttttggatgggctgggtccgccaggctccagggaaggggctgatatgggtggccaacataaagcaagatggaagtgagaaaaactatgtggactctgtgaagggccgattcaccatctccagagacaacgccaagaactcactgtatctacaaatgaacagcctgagagccgaagacacggccgtgtattactgtgtgagagagggggggagtggttattcgtttgactcctggggccagggagccctggtcaccgttttctca

SEQ ID NO: 14367 - DNA, 292 bp, Homo sapiens
  source 1..292: mol_type = other DNA
tgcagcctctggattcacatttagttactattggatgagctgggtccgccaggctccagggaaggggctgatatgggtggccaacataaagcaagatggaagtgagaaaaactatgtggactctgtgaagggccgattcaccatctccagagacaacgccaagaactcactgtatctgcaaatgaacagcctgagagccgaagacacggccgtgtattactgtgtgagagagggggggagtggttattcgtttgactcctggggccagggaaccctggtcaccgttttctca

SEQ ID NO: 14368 - DNA, 292 bp, Homo sapiens; identical to SEQ ID NO: 14353
  source 1..292: mol_type = other DNA

SEQ ID NO: 14369 - DNA, 292 bp, Homo sapiens
  source 1..292: mol_type = other DNA
tgcagcctctggattcacctttagttactattggatgagctgggtccgccaggctccagggaaggggctgatatgggtggccaacataaagcaagatggaagtgagaaaaactatgtggactctgtgaagggccgattcaccgtctccagagacaacgccaagaactcactgtatctgcaaatgaacagcctgagagccgaagacacggccgtgtattactgtgtgagagagggggggagtggttattcgtttgactcctggggccagggaaccctggtcaccgttttctca

SEQ ID NO: 14370 - DNA, 292 bp, Homo sapiens
  source 1..292: mol_type = other DNA
tgcagcctctggattcacctttagttactattggatgggctgggtccgccaggctccagggaaggggctgatatgggtggccaacataaagcaagatggaagtgagaaaaactatgtggactctgtgaagggccgattcaccatctccagagacaacgccaagaactcactgtatctgcaaatgaatagcctgagacccgaagacacggccgtgtattactgtgtgagagagggggggagtggttattcgtttgactcctggggccagggaaccctggtcaccgttttctca

SEQ ID NO: 14371 - DNA, 292 bp, Homo sapiens
  source 1..292: mol_type = other DNA
tgcagcctctggattcacctttagttacttctggatgggctgggtccgccaggctccagggaaggggctgatatgggtggccaacataaagcaagatggaagtgagaaaaactatgtggactctgtgaagggccgattcaccatctccagagacaacgccaagaactcactgtatctgcaaatgaacagcctgagagccgaagacacggccgtgtattactgtgtgagagagggggggagtggttattcgtttgactcctggggccagggaaccctggtcaccgttttctca

SEQ ID NO: 14372 - DNA, 292 bp, Homo sapiens
  source 1..292: mol_type = other DNA
tgcagcctctggattcacctttaattacttttggatgggctgggtccgccaggctccagggaaggggctgatatgggtggccaacataaaccaagatggaagtgagagaaactatgtggactctgtgaagggccgattcaccatctccagagacaacgccaagaactcactgtatctgcatatgaacagcctgagagccgaagacacggccgtctattactgtgtgagagagggggggagtggttattcgtttgactcctggggccagggaaccctggtcaccgttttctca

SEQ ID NO: 14373 - DNA, 292 bp, Homo sapiens
  source 1..292: mol_type = other DNA
tgcagcctctggattcacctttagttactattggatgagctgggtccgccaggctccagggaaggggctgatatgggtggccaacataaagcaagatggaagtgagaaaaactatgtggactctgtgaagggccgattcaccatctccagagacaacgccaagaactcactgtatctgcaaatgaacagcctgagagtcgaagacacggccgtgtattattgtgtgagagagggggggagtggttattcgtttgactcctggggccagggaaccctggtcaccgttttctca

SEQ ID NO: 14374 - DNA, 292 bp, Homo sapiens
  source 1..292: mol_type = other DNA
tgcagcctctggattcacctttagttactattggatgagctgggtccgccaggctccagggaaggggctgatatgggtggccaacataaagcaagatggaagtgagaaaaactatgtggactctgtgaagggccgattcaccatctccagagacaacgccaagaactcactgtatctgcaaatgaacagcctgagagccgaagacacggccatatattattgtgtgagagagggggggagtggttattcgtttgactcctggggccagggaaccctggtcaccgttttctca

SEQ ID NO: 14375 - DNA, 292 bp, Homo sapiens
  source 1..292: mol_type = other DNA
tgcagcctctggattcacctttagttactattggatgggctgggtccgccaggctccagggaaggggctgatatgggtggccaacataaagcaagatggaagtgaaaaaaattatgtggactctgtgaagggccgattcaccatctccagagacaacgccaagaactcactgtatctgcaaatgaacagcctgagggccgaagacacggccgtgtattactgtgtgagagagggggggagtggttattcgtttgactcctggggccagggaaccctggtcaccgttttctca

SEQ ID NO: 14376 - DNA, 292 bp, Homo sapiens
  source 1..292: mol_type = other DNA
cactgtctctggtggccccatcagcaggagtaattacttctggggctggatccgccagcccccagggaaggggcttgagtggattgggagtatccattatagtgggaccacctactacaacccgtcgctcaagagtcgagtcaccatatccgtggacacgtccaagaacaagatctccctgatgctgaggtctgtgaccgccgcagacacggctgtgtattattgtgcgagacccctccgaggcggtgaggttgactcctggggccaaggaaccctggtcaccgtctcctca

SEQ ID NO: 14377 - DNA, 292 bp, Homo sapiens
  source 1..292: mol_type = other DNA
cactgtctctggtggccccatcagcaggagtaattacttctggggctggatccgccagcccccagggaaggggcttgagtggattgggagtatccattatagtgggaccacctactacaacccgtcgctcaagagtcgagtcaccatatccgtagacacgtccaagaacaagatttccctgatgctgaggtctgtgaccgccgcagacacggctgtgtattattgtgcgagacccctccgaggcggtgaggttgactcctggggccaaggaaccctggtcaccgtctcctca

SEQ ID NO: 14378 - DNA, 292 bp, Homo sapiens
  source 1..292: mol_type = other DNA
cactgtctctggtggccccatcagcaggagtaattacttctggggctggatccgccagcccccagggaaggggcttgagtggattgggagtatccattatagtgggaccacctactacaacccgtcgctcaagagtcgagtcaccatatccgtggacacgtccaagaacaagatctccctgatgttgaggtctgtgaccgccgcagacacggctgtgtattattgtgcgagacccctccgaggcggtgaggttgactcctggggccaaggaaccctggtcaccgtctcctca

SEQ ID NO: 14379 - DNA, 292 bp, Homo sapiens
  source 1..292: mol_type = other DNA
cactgtctctggtggccccatcagcaggagtaattacttctggggctggatccgccagcccccaggaaaggggcttgagtggattgggagtatccattatagtgggaccacctactacaacccgtcgctcaagagtcgagtcaccatatccgtagacacgtccaagaacaagatctccctgatgctgaggtctgtgaccgccgcagacacggctgtgtattattgtgcgagacccctccgaggcggtgaggttgactcctggggccaaggaaccctggtcaccgtctcctca

SEQ ID NO: 14380 - DNA, 292 bp, Homo sapiens
  source 1..292: mol_type = other DNA
cactgtctctggtggccccatcagcaggagtaattacttctggggctggatccgccagcccccagggaaggggcttgagtggattgggagtatccattatagtgggaccacctactacaacccgtcgctcaagagtcgagtcaacatatccgtagacacgtccaagaacaagatctccctgatgctgaggtctgtgaccgccgcagacacggctgtatattattgtgcgagacccctccgaggcggtgaggttgactcctggggccaaggaaccctggtcaccgtctcctca

SEQ ID NO: 14381 - DNA, 280 bp, Homo sapiens
  source 1..280: mol_type = other DNA
tgcagcctccggactcatctttactgatcattggatgagctgggtccgccaggctccagggaagggactggagtgggtggccaatataaaccaagatggaagtaagaacttctatgtggggtccgttaagggccgattcagcatctccagagacaacgccaagaactcagtatatctgcagatgaacagcctgagagccgaggacacggctgtgtattattgtagtggaggggactactttgaccactggggccagggaaccctggtcagcgtctccgca

SEQ ID NO: 14382 - DNA, 280 bp, Homo sapiens
  source 1..280: mol_type = other DNA
tgcagcctccggactcatctttagtgatcattggatgagctgggtccgccaggctccagggaagggactggagtgggtggccaatataaagcaagatggaagtaagaagttctatgtggggtccgttaagggccgattcagcatctccagagacaacgccaagaactcagtgtatctgcagatgaacagcctgagagccgaggacacggctatgtattattgtagtggaggggactactttgaccactggggccagggaaccctggtcagcgtctccgca

SEQ ID NO: 14383 - DNA, 280 bp, Homo sapiens
  source 1..280: mol_type = other DNA
tgtagcctccggactcatctttagtgaacattggatgagttgggtccgccaggctccagggaagggactggagtgggtggccaatataaaccaagatggaagtaagaagttctgtgtggagtccgttaagggccgattcagcatctccagagacaacgccaagaaatcagtgtatctgcagatgaaaagcctgagagccgaggacacggctgtatattattgtagtggaggggactactttgaccactggggccagggaaccctggtcagcgtctccgca

SEQ ID NO: 14384 - DNA, 280 bp, Homo sapiens
  source 1..280: mol_type = other DNA
tgcagcctccggactcatctttagtgatcattggatgagctgggtccgccaggctccagggaagggactggagtgggtggccaatataaaccaagatggaagtaagaagttctatgtggggtccgttaagggccgattcagcatctccagagacaacgccaagaactcagtgtttctgcagatgaacagcctgagagccgaggacacggctgtttattattgtagtggaggggactactttgaccactggggccagggaaccctggtcagcgtctccgca

SEQ ID NO: 14385 - DNA, 280 bp, Homo sapiens
  source 1..280: mol_type = other DNA
tgcagcctccggactcatctttagtgatcattggatgagctgggtccgccaggctccagggaagggactggagtgggtggccaatataaaccaagatggaagtaagaagttctatgtggggtccgttaagggccgatgcagcatctccagagacaacgccaagaactcagtgtatctgcagatgaacagcctgagagccgaggacacggctgtgtattattgtagtggaggggactactttgaccactggggccagggaaccctggtcagcgtctccgca

SEQ ID NO: 14386 - DNA, 280 bp, Homo sapiens
  source 1..280: mol_type = other DNA
tgcagcctccggactcatatttagtgatcattggatgagttgggtccgccaggctccagggaagggactggagtgggtggccaatataaaccaacgtggaagtcagaagttctatgtggagtccgtaaagggccgattcagcatctccagagacaacgccaagaactcagtatatctgcagatgaacagcctgagagccgaagacacggctgtatattattgtagtggaggggactactttgaccactggggccagggaaccctggtcagcgtctccgca

SEQ ID NO: 14387 - DNA, 280 bp, Homo sapiens
  source 1..280: mol_type = other DNA
tgcagcctccggactcatctttagtgatcattggatgagctgggtccgccaggctccagggaggggactggagtgggtggccaatataaaccaagaaggaagtaagaagttctatgtggggtccgttaagggccgatgcagcatctccagagacaacgccaagaactcagtgtatctgcagatgaacaggctgagagccgaggacacggctgtgtattattgtagtggaggggactactttgaccactggggccagggaaccctggtcagcgtctccgca

SEQ ID NO: 14388 - DNA, 280 bp, Homo sapiens
  source 1..280: mol_type = other DNA
tgcagcctccggactcatctttagtgatcattggatgacctgggtccgccaggctccagggaagggactggagtgggtggccaatataaaccaagatggaagtaagaagttctatgtggggtccgttaagggccgattcagcatctccagagacaacgccaagaagtcagtgtctctgcagatgaacagcctgagagccgaggacacggctgtgtattattgcagtggaggggactactttgaccactggggccagggaaccctggtcagcgtctccgca

SEQ ID NO: 14389 - DNA, 292 bp, Homo sapiens
  source 1..292: mol_type = other DNA
tgcaacctctggattcaccttcagtagctatagcatgaactgggtccgccaggctccagggaaggggctggagtgggtttcatacattggcagtagtagtagtcccatatactatgcagactctgtgaagggccgattcaccatctccagagacaatgccaagagctcagtgtatctgcaaatgaacaccctgagagacgaggacacggctgtatattactgtgcaagactaccctggtctgcagggggagcccagaactggggccagggaaccctggtcaccgtctcctca

SEQ ID NO: 14390 - DNA, 292 bp, Homo sapiens
  source 1..292: mol_type = other DNA
tgcaacctctggattcaccttcagtcattatagcatgaactgggtccgccaggctccagggaaggggctggagtgggtttcatacattggtagtagtagtagtcccatatactacgcggactctgtgaagggccgattcaccatctccagagacaatgccaagagctcagtgtatctgcaaatgaacagcctgagagacgaggacacggctgtatattactgtgcaagactaccctggtctgcagggggagcccagaactggggccagggaaccctggtcaccgtctcctca

SEQ ID NO: 14391 - DNA, 292 bp, Homo sapiens
  source 1..292: mol_type = other DNA
tgcaagctctggattcaccttcagtacctatagcatgaactgggtccgccaggctccagggaaggggctggagtgggtttcatacattggtagtagtagtagtcccatatactacgcagactctgtgaagggccgattcaccgtttccagagacaatgccaagagctcactatatctgcaaatgaacaccctgagagacgaggacacggctgtatattactgtgcaagactaccctggtctgcagggggagcccagaactggggccagggaaccctggtcaccgtctcctca

SEQ ID NO: 14392 - DNA, 292 bp, Homo sapiens
  source 1..292: mol_type = other DNA
tgcaacctctggattcaccttcagtagctatagcatgaactgggtccgccaggctccagggaaggggctggagtgggtttcatacattggtagtagtagtagtcccatatactatgcagactctgtgaagggccgattcaccatctccagagacaatgccaagaactcagtgtatctgcaaatgaacagcctgagagacgaggacacggctgtatattactgtgcaagactaccctggtctgcagggggagcccagaactggggccagggaaccctggtcaccgtctcctca

SEQ ID NO: 14393 - DNA, 292 bp, Homo sapiens
  source 1..292: mol_type = other DNA
tgcagcctctggattcaccttcaatacctatagcatgaactgggtccgccaggctccagggaaggggctggagtgggtttcatacattagtagtagtactggtaccatatactatgcagactctgtgaagggccgattcaccatctccagagacaatgccaagaactcactttatctgcaaatgaacagcctgagagacgacgacacggctgtgtattactgtgcgagactaccctggtctgcagggggagcccagaactggggccagggaaccctggtcaccgtctcctca

SEQ ID NO: 14394 - DNA, 292 bp, Homo sapiens; identical to SEQ ID NO: 14391
  source 1..292: mol_type = other DNA

SEQ ID NO: 14395 - DNA, 292 bp, Homo sapiens; identical to SEQ ID NO: 14389
  source 1..292: mol_type = other DNA

SEQ ID NO: 14396 - DNA, 292 bp, Homo sapiens
  source 1..292: mol_type = other DNA
tgcaacctctggattcaccttcaatagctatagcatgaactgggtccgccaggctccagggaaggggctggagtgggtttcatacattggtagtagtggtagtcccatatactacgcagactctgtgaagggccgattcaccatctccagagacaatgccaagaactcactgtatctgcaaatgaacagcctgagagacgaggacacggctgtatattactgtgcaagactaccctggtctgcagggggggcccagaactggggccagggaaccctggtcaccgtctcctca

SEQ ID NO: 14397 - DNA, 292 bp, Homo sapiens
  source 1..292: mol_type = other DNA
tgcagcctctggattcaccttcagtacctatagcatgaactgggtccgccaggctccagggaaggggctggaatggatttcatacattaatagtggtggtggtaccgtatactacgctgactctgtgaagggccggttcaccatctccagagacaatgccaagaactcactgtatctgcaaatgaacagcctgagagacgacgacacggctgtttattactgtgcgagattaccctggtctgcagggggagcccagaactggggccagggaaccctggtcaccgtctcctca

SEQ ID NO: 14398 - DNA, 292 bp, Homo sapiens
  source 1..292: mol_type = other DNA
tgcagcctctggattcaccttcaatacctatagcatgaactgggtccgccaggctccagggaaggggctggagtgggtttcatacattagtagtagtagtagtaccatatactatgcagactctgtgaagggccgattcaccatctccagagacaatgccaagaactcactttatctgcaaatgaacagcctgagagacgaggacacggctgtctattactgtgcgagactaccctggtctgcagggggagcccagaactggggccagggaaccctggtcaccgtctcctca

SEQ ID NO: 14399 - DNA, 292 bp, Homo sapiens
  source 1..292: mol_type = other DNA
tgcagcctctggattcaccttcaatacctatagcatgaactgggtccgccaggctccagggaaggggctggagtgggtttcatacattagtagtagtagtagtaccatatactatgcagactctgtgaagggccgattcaccatctccagagacaatgccaagaactcactttatctgcaaatgaacagcctgagggacgacgacacggctgtgtattactgtgcgagactaccctggtctgcagggggagcccagaactggggccagggaaccctggtcaccgtctcctca

SEQ ID NO: 14400 - DNA, 292 bp, Homo sapiens
  source 1..292: mol_type = other DNA
tgcaacctctggattcaccttcagtacctatagcatgaactgggtccgccaggctccagggaaggggctggagtgggtttcatacattggtagtagtagtagtcccatatactacgcagactctgtgaagggccgattcaccgtttccagagacaatgccaagagctcactatatctgcaaatgaacaccctgagagacgaggacacggctgtatattactgtgcaagacttccctggtctgcagggggagcccagaactggggccagggaaccctggtcaccgtctcctcg

SEQ ID NO: 14401 - DNA, 292 bp, Homo sapiens
  source 1..292: mol_type = other DNA
tgcaacctctggattcaccttcagtacctatagcatgaactgggtccgccaggctccagggaaggggctggagtgggtttcatacattggtagtagtagtagtcccatatactacgcagactctgtgaagggccgattcaccatctccagagacaatgccaagacctcactgtatctgcaaatgaacagcctgagagacgaggacacggctgtatattactgtgcaagactaccctggtctgcagggggagcccagaactggggccagggaaccctggtcaccgtctcctca

SEQ ID NO: 14402 - DNA, 280 bp, Homo sapiens
  source 1..280: mol_type = other DNA
tatagtctctgaattcacctgtgacacctgttccatgacctgggtccgccaggctccagggaaggggctggagtgggtctcaactagtgctactaaaacatactacgcagactccgtgaagggccggttcaccatctccagagacacttccaagaacacactctttctgcaaatgaacagcctgagagtcgaggacacggccatatattactgtgtgaaaggaggaaggggggacctgctggcttactggggccagggaaccctggtcaccgtctcctca

SEQ ID NO: 14403 - DNA, 280 bp, Homo sapiens
  source 1..280: mol_type = other DNA
tgcagtctctgaattcacctgtagcacctgttccatgacctgggtccgccaggctccagggaaggggctggagtgggtctcaactagtggtactaatacatactacgcagactccgtgaagggccggttcaccatctccagagacaattccaagaacacactctttctgcaaatgaacagcctgagagccgaggacacggccatatattactgtgtgaaaggaggaaggggggacctgctggcttactggggccagggaaccctggtcaccgtctcctca

SEQ ID NO: 14404 - DNA, 279 bp, Homo sapiens
  source 1..279: mol_type = other DNA
gcttctggatacaccttcaccacttatgatatccactgggtgcgacaggccactggacaaggacttgagtggatgggatggatgaaccctcacagtggtaacacaggctatgcacagaacttccagggcagagtcaccatgaccagcagcacccccataagcacagcctacatggaactgagcagactgagatctgacgacacggccgtgtattactgtacgagaaagcctttcccctccgactactggggccagggaaccctggtcaccgtctcctca

SEQ ID NO: 14405 - DNA, 279 bp, Homo sapiens
  source 1..279: mol_type = other DNA
gcttctggatacaccttcaccacttatgatatccactgggtgcgacaggccactggacaagggcttgagtggatgggatggatgaaccctcacagtggtaacacaggctatgcacagaagttccagggcagagtcaccatgaccagcagcacccccataagcacagcctacatggaactgagcagcctgagatctgacgacacggccgtgtattactgtacgagaaagcctttcccctccgactactggggccagggaaccctggtcaccgtctcctca

SEQ ID NO: 14406 - DNA, 298 bp, Homo sapiens
  source 1..298: mol_type = other DNA
cactgtctctgctggctccatcagcagtgctaattactactggagctggatccgccaacacccagggaagggcctggagtggattgggtacatctattatagtgggaccacctactacaacccgtccctcaagagtcgagttaccatatcaggagacacgtctaagaaccaggtctccctgaagctgagctctgtgactgccgcggacacggccgtgtattactgtgcgagagatggacagggtggatacggtgcttttgatatctggggccaagggacaatggtcaccgtctctcca

SEQ ID NO: 14407 - DNA, 298 bp, Homo sapiens
  source 1..298: mol_type = other DNA
cactgtctctgctggctccatcagcagtgctaattactactggagctggatccgccaacacccagggaagggcctggagtggattgggtacatctattatagtgggaccacctactacaacccgtccctcaagagtcgagttaccatatcaggagacacgtctaagaaccaggtctccctgaacctgagctctgtgactgccgcggacacggccgtgtattactgtgcgagagatggacagggtggatacggtgcttttgatatctggggccaagggacaatggtcaccgtctctcca

SEQ ID NO: 14408 - DNA, 298 bp, Homo sapiens
  source 1..298: mol_type = other DNA
cactgtctctgctggctccatcagcagtgctaattactactggagctggatccgccaacacccagggaagggcctggagtggattgggtacatctattatagtgggaccacctactacaacccgtccctcaagagtcgagttaccatatcaggagacacgtctaagaaccaggtctccctgaagctgagctctgtgactgccgcggacacggccgtgtattactgtgcgagagatggacagggtggatacggtgcctttgatatctggggccaagggacaatggtcaccgtctctcca

SEQ ID NO: 14409 - DNA, 298 bp, Homo sapiens
  source 1..298: mol_type = other DNA
cactgtctctggtggctctatcagcagtggtaattactactggagctggatccgccagcacccagggaagggcctggagtggattgggtacatctattatagtgggagcacctactacaacccgtccctcaagagtcgagtgaccatatcagtagacacgtctaagatccagttctccctgaagctgagctctgtgactgccgcggacacggccgtgtattactgtgcgagagatggacagggtggatacggtgcttttgatatctggggccaagggacaatggtcaccgtctctcca

SEQ ID NO: 14410 - DNA, 298 bp, Homo sapiens; identical to SEQ ID NO: 14406
  source 1..298: mol_type = other DNA

SEQ ID NO: 14411 - DNA, 301 bp, Homo sapiens
  source 1..301: mol_type = other DNA
tgcagcctctggattcaccttcagtaggtattggatgagctgggtccgccaggctccagggaaggggctggagtgggtggccaacataaagcaagatggaagtgagacatactgtatagactctgtgaagggccgattcaccatctccagagacaacgccaagaactcactttatttgcaaatgaacagcctgagagccgaggacacggctgtgtattattgtgcgagggggacggagtggctggacgcctctgcggtaggagactgttggggccagggaaccttggtcaccgtctcctca

SEQ ID NO: 14412 - DNA, 301 bp, Homo sapiens
  source 1..301: mol_type = other DNA
tgcagcctctggattcaccttcagtagttattggatgagctgggtccgccaggctccagggaaggggctggagtgggtggccaacataaagcaagatggaagtgagacatactgtatagactctgtgaagggccgattcaccatctccagagacaacgccaagaactcactgtatctgcaaatgaacagcctgagagccgaggacacggctgtgtattactgtgcgagggggacggagtggcttgacgcctctgcggttggagactgttggggccagggaaccctggtcaccgtctcctca

SEQ ID NO: 14413 - DNA, 301 bp, Homo sapiens
  source 1..301: mol_type = other DNA
tgcagcctctggattcaccttccgtagctattggatgagctgggtccgccaggctccagggaaggggctggagtgggtggccaacataaagcaagatggaagtgagacatactgtatagactctgtgaagggccgattcaccatctccagagacaacgccaagaactcactttatctgcaaatgaacagcctgagagccgaggacacggctgtgtattactgtgcgagggggacggagtggctggacgcctctgcggttggagactgttggggccacggaaccctggtcaccgtctcctca

SEQ ID NO: 14414 - DNA, 301 bp, Homo sapiens
  source 1..301: mol_type = other DNA
tgcagcctctggattcaccttcagtaggtattggatgagctgggtccgccaggctccagggaaggggctggagtgggtggccaacataaagcaagatggaagtgagacatactgtatagactctgtgaagggccgattcaccatctccagagacaacgccaagaactcactttatctgcaaatgaacagcctgagagccgaggacacggctgtgtattactgtgcgagggggacggagtggctggacgcctctgcggttggagactgttggggccagggaaccctggtcaccgtctcctca

SEQ ID NO: 14415 - DNA, 301 bp, Homo sapiens
  source 1..301: mol_type = other DNA
tgcagcctctggattcaccttcagtaggtattggatgagctgggtccgccaggctccagggaaggggctggagtgggtggccaacataaagcaagatggaagtgagacatactgtatagactctgtgaagggccgattcaccatctccagagacaacgccaagaacacactttatctgcaaatgaacagcctgagagccgaggacacggctgtgtatttctgtgcgagggggacggagtggctggacgcctctgcggttggagactgttggggccagggaaccctggtcaccgtctcctca

SEQ ID NO: 14416 - DNA, 283 bp, Homo sapiens
  source 1..283: mol_type = other DNA
tgcaccctctggattcacgtttagtgactattggatgagttgggtccgccaggctccagggaaggggctagagtgggtggccaacataaaccaatatggaagtgccgactactacgcggactctgtgaagggccgattctccatctccagggacaacaccaagaactcactgtatcttcagatgaacagcctgagagccgaggacacggccacctattactgcgcgagagggaactacggccttgatcactggggccagggaaccctggtcaccgtctcctca

SEQ ID NO: 14417 - DNA, 283 bp, Homo sapiens
  source 1..283: mol_type = other DNA
tgcgccctctggattcatctttagtgactattggatgggctgggtccgccaggctccagggaaggggctggagtgggtggccaacataaagaacgatggaagtggcgacttccacgtggactctgtgaagggccgattcaccatctccagagacaacgccaagaactcactgtatctgcaaatgaacagcctgagacccgaggacacggccatatattattgtgcgagagggaactacgggcttgaccactggggccagggaaccctggtcaccgtctccaca

SEQ ID NO: 14418 - DNA, 316 bp, Homo sapiens
  source 1..316: mol_type = other DNA
cactgtctctggtggctccgtcagcagtgctagttactactggagctggatccggcagcccccagggaagggactggagtggatagggtatatctattacagtgggaccaccaactacaacccctccctcaagagtcgagtcaccctatcagtagacacgtccaagaaccgattctccctgaggctgagctctgtgaccgcagcggacacggccgtttattactgtgcgagagagccctttagtgtggttcggggaattattatccagaacccccttgactactggggccagggaaccctggtcaccgtctcctca

SEQ ID NO: 14419 - DNA, 316 bp, Homo sapiens
  source 1..316: mol_type = other DNA
cactgtctctggtggctccgtcagcagtgctagttactactggagctggatccggcagcccccagggaagggactggagtggatagggtatatcgattacagggggaccaccaactacaacccctccctcaagagtcgagtcaccctatcagtagacacgtccaagaaccgattctccctgaggctgagctctgtgaccgcagcggacacggccgtttattactgtgcgagagagccctttagtgtggttcggggaattattatccagaacccccttgactactggggccagggagccctggtcaccgtctcctca

SEQ ID NO: 14420 - DNA, 316 bp, Homo sapiens
  source 1..316: mol_type = other DNA
cactgtctctggtggctccgtcagcaatgctaattactactggagctggatccggcagcccccagggaagggactggagtggatagggtatatctattacagtgggaccaccaactacaacccctccctcaagagtcgagtcaccctatcagtagacacgtccaagaaccgattctccctgaggctgagctctgtgaccgcagcggacacggccgtttattactgtgcgagagagccctttagtgtggttcggggaattattatccagaacccccttgactactggggccagggaaccctggtcaccgtctcctca

SEQ ID NO: 14421 - DNA, 295 bp, Homo sapiens
  source 1..295: mol_type = other DNA
tgcagcctctggattcaccttcagtgactactacatgacctggatccgccaggctccagggaaggggctggagtggctttcatatattagtgccagagatagtgccacattctacgcagacgctgtgaagggccgattctccatctccagggacaacgccaagaattctctgtatctgcaaatgaacagcctgagagccgaggacacggccgtgtatttctgtgtgagaataactcgacaatgggggttctattttgactcctggggccagggaaccctggtcaccgtctcctca

SEQ ID NO: 14422 - DNA, 295 bp, Homo sapiens
  source 1..295: mol_type = other DNA
tgcagcctctggattcacgttcagtgactactacatgagctggatccgccaggctccagggaaggggctggagtggctttcatacattagtgccagagatagtgccacattctacgcagacgctgtgaagggccgattctccatctccagggacaacgccaagaactcactgtatctgcaaatgaacagcctgagagccgaggacacggccgtgttttactgtgtgagaataactcgacaatgggggttctattttgactcctggggtcagggaaccctggtcaccgtctcctca

SEQ ID NO: 14423 - DNA, 310 bp, Homo sapiens
  source 1..310: mol_type = other DNA
tgtagcgtctggcttcaattttagtagttattggatgagctgggtccgccaggctccagggaaggggctggagtgggtggccaacataaaggaagatggaagtgagaattacttagtggactctgtgaaggggcgattcaccatttccagagacaacgccaggacctccctgtatctgcaaatgaacagcctgagagccgaagacacggccgtatattattgtgcgagactccacggttattggaatggttacggctactactactacatggacgtctggggcaacgggaccacggtcaccgtctcctca

SEQ ID NO: 14424 - DNA, 310 bp, Homo sapiens
  source 1..310: mol_type = other DNA
tgcagcgtctggattcaactttagtagttattggatgagctgggtccgccaggctccagggaaggggctggagtgggtggccaacataaaggaagatggaagtgagaaatactcagtggactctgtgaaggggcgattcaccatctccagagacaacgccaggacctccctgtatctgcaaatgaacagcctgagagccgaagacacggccgtatattattgtgcgagactccacggttattggaatggttacggctactactactacatggacgtctggggcaacgggaccacggtcaccgtctcctca

SEQ ID NO: 14425 - DNA, 308 bp, Homo sapiens
  source 1..308: mol_type = other DNA
tagcgtctggcttcaattttagtagttattggatgagctgggtccgccaggctccagggaaggggctggagtgggtggccaacataaaggaagatggaagtgagaattacttagtggactctgtgaaggggcgattcaccatttccagagacaacgccaggacctccctgtatctgcaaatgaacagcctgagagccgaagacacggccgtatattattgtgcgagactccacggttattggaatggttacggctactactactacatggacgtctggggcaacgggaccacggtcaccgtctcctca

SEQ ID NO: 14426 - DNA, 310 bp, Homo sapiens
  source 1..310: mol_type = other DNA
tgcagcgtctggcttcaactttagtaattattggatgacttgggtccgccaggctccagggaaggggctggagtgggtggccaacataaaggaagatggaagtgaggattactcagtggactctgtgaaggggcgattcagcatctccagagacaacgccaggacctccctgtttctgcaaatgaacagcctgagagccgaagacacggccgtatattattgtgcgaggctgcacgggtattggaatggctacggctactactactacatggacgtctggggcaacgggaccacggtcaccgtctcctca

SEQ ID NO: 14427 - DNA, 292 bp, Homo sapiens
  source 1..292: mol_type = other DNA
cactgtctctggtgactccatcaccagttactactggagctggatccggcagaccccagggaagggactggagtggattggatatatctctcacagtgagagcagcaacttcaacccgtccctcaggagtcgagtcaccatatcggcagacacgtccaagaaccagttctccctgaggttgagctctgtgaccgccgcagacacggccctatattactgtgcgagacgtaactatgatgctaatggaccctttgactactggggccagggaaccctggtcaccgtctcctca

SEQ ID NO: 14428 - DNA, 292 bp, Homo sapiens
  source 1..292: mol_type = other DNA
cactgtctctggtgtctccatcaccagttactactggagctggatccggcagcccccagggaagggactggagtggattggatatatctctcacagtggaagcagcaactacaacccgtccctcaggagtcgagtcaccatatcggcagacacgtccaagaaccagttctccctgaggttgagctctgtcaccgccgcagacacggccctatattactgtgcgagacgtaattatgatgctaatggaccctttgactactggggccagggaaccctggtcaccgtctcctca

SEQ ID NO: 14429 - DNA, 292 bp, Homo sapiens
  source 1..292: mol_type = other DNA
cactgtctctggtggctccatcaccagttactactggagctggatccggcagcccccagggaagggactggagtggattggatatatctctcacagtgggagcagcaactacaacccgtccctcaggagtcgagtctccatatcggcagacacgtccaagaaccagttctccctgaggttgagctctgtgaccgccgcagacacggccctatattactgtgcgagacgtaactatgatgctaatggaccctttgactactggggccagggaaccctggtcaccgtctcctca

SEQ ID NO: 14430 - DNA, 295 bp, Homo sapiens
  source 1..295: mol_type = other DNA
tgtaggctctagattcatctttagcacgtactggatgagctgggtccgccaggctccagggaaggggctggagtgggtggccaacataaaagaggatggaagtcaaatacatcatgtggactctgtgaagggccgattcaccatctccagagacaacgccaagaattcactgtttttgcaaatgaacagcctgggagccgaggacacggctgtatattactgtgcgagagaagccgtgggaactggcgctgcttttgatgtctggggcctagggacaatggtcaccgtctcttca

SEQ ID NO: 14431 - DNA, 295 bp, Homo sapiens
  source 1..295: mol_type = other DNA
tgtaggctctagattcatctttagtaggtactggatgagctgggtccgccaggctccagggaaggggctggagtgggtggccaacataaaagaggatggaagtcagatacatcatgtggactctgtgaagggccgattcaccatctccagagacaacgccaagaattcactgtttttgcaaatggacagcctgggagccgaggacacggctgtttattactgtgcgagagaagccgtgggaactggcgctgcttttgatgtctggggcctagggacaatggtcaccgtctcttca

SEQ ID NO: 14432 - DNA, 303 bp, Homo sapiens
  source 1..303: mol_type = other DNA
cagggttctggatacagattcgccacacactggatcggctgggtgcgccagaagcccgggaaaggcctggagtggatgggaaacatctaccctgatgactctgacatcagatacagtccgtcctctcaaggccaggtcacgatctcagtcgacaaggccaccagaaccgcctacctggagtggggcagcctgaagacctcggacacagccacatattactgtgtgacacgggggagcagtggcatatacgggggatggttctttgaatactggggccagggaacccgggtcaccgtgtcctcc

SEQ ID NO: 14433 - DNA, 303 bp, Homo sapiens
  source 1..303: mol_type = other DNA
cagggttctggatacagattcgccacacactggatcggctgggtgcgccagaagcccgggaaaggcctggagtggatgggaaacatctaccctgatgactctgacaccagatacagtccgtcctcccaaggccaggtcaccatctcagtcgacaaggccaccagaaccgcctacctgcagtgggacagcctgaagacctcggacacagccacatattactgtgtgacacgggggagcagtggcatatacgggggatggttctttgaatactggggccagggaacccgggtcaccgtgtcctcc

SEQ ID NO: 14434 - DNA, 325 bp, Homo sapiens
  source 1..325: mol_type = other DNA
cactgtctctggtggctccatcagcagtagtagttactactggggctggatccgccagcccccagggaaggggctggagtggattgggagtatctattatagtgggagcacctactacaacccgtccctcaagagtcgagtcaccatatccgtagacacgtccaagaaccagttctccctgaagctgagctctgtgaccgccgcagacacggctgtgtattactgtgcgagaggtggataccactcaactcgccgccacccgccccgcaaaagagactattacatggacgtctggggcacagggaccacggtcaccgtctcctca

SEQ ID NO: 14435 - DNA, 325 bp, Homo sapiens
  source 1..325: mol_type = other DNA
cactgtctctggtggctccatcagcagtagtaattactactggggctggatccgccagcccccagggaaggggctggagtggattgggagtatctatcatactgggagcacctactacaacccgtccctcaagagtcgagtcaccatatccgtagacacgtccaagaaccagttctccctgaagctgaactctgtgaccgccgcggacacggctgtgtattactgtgcgagaggtggataccactcaactcgccgccacccgccccgcaaaagagactattacatggacgtctggggcacagggaccacggtcaccgtctcctca

SEQ ID NO: 14436 - DNA, 325 bp, Homo sapiens
  source 1..325: mol_type = other DNA
cactgtctctggtggctccatcagcagtagtagttactactggggctggatccgccagcccccagggaaagggctggagtggattgggagtatctattatagtgggagcacctactacaacccgtccctcaagagtcgagtcaccatatccgtagacacgtccaagaaccagttctccctgaagctgagctctgtgaccgccgcagacacggctgtgtattactgtgcgagaggtggataccactcaactcgccgccacccgccccgcaaaagagactattacatggacgtctggggcacagggaccacggtcaccgtctcctca

SEQ ID NO: 14437 - DNA, 325 bp, Homo sapiens
  source 1..325: mol_type = other DNA
cactgtctctggtggctccatcagcagtagtagttactactggggctggatccgccagcccccagggaaggggctggagtggattgggagtatctattatagtgggagcacctactacaacccgtccctcaagagtcgagtcaccatatccgtagacacgtccaagaaccagttctccctgaagctgagctctgtgaccgccgcggacacggctgtgtattactgtgcgagaggtggataccactcaactcgccgccacccgccccgcaaaagagactattacatggacgtctggggcacagggaccacggtcaccgtctcctca

SEQ ID NO: 14438 - DNA, 325 bp, Homo sapiens
  source 1..325: mol_type = other DNA
cactgtctctggtggctccatcagcagtagtagttactactggggctggatccgccagcccccagggaaggggctggagtggattgggagtatgtattatagtgggagcacccactacaacccgtccctcaagagtcgagtcaccatatccttagacacgtccaagaaccagttctccctgaagctgaactctgtgaccgccgcggacacggctgtgtattactgtgcgagaggtggataccactcaactcgccgccacccgccccgcaaaagagactattacatggacgtctggggcacagggaccacggtcaccgtctcctca

SEQ ID NO: 14439 - DNA, 325 bp, Homo sapiens
  source 1..325: mol_type = other DNA
cactgtctctggtggctccatcagcagtagtagttactactggggctggatccgccagcccccagggaaggggctggagtggattgggagtatctattatagtgggagcacctactacaacccgtccctcaagagtcgagtcaccatatccgtagacacgtccaagaaccagttctccctgaagctgaactctgtgaccgccgcggacacggctgtgtattactgtgcgagaggtggataccactcaactcgccgccacccgccccgcaaaagagactattacatggacgtctggggcacagggaccacggtcaccgtctcctca

SEQ ID NO: 14440 - DNA, 295 bp, Homo sapiens
  source 1..295: mol_type = other DNA
tgcagcctctggattcacctttagcagctgtgacatgcactgggtccgccaggctccagggaaggggctggagtgggtctcagctattagtgctggtggttctgccacatactacgcagactccgtgaagggccggttcaccatctccagagacaattccaagaacaccctgtatctgcagacgaacagtctgagagccgaggacacggccctatattattgtgtgaaaagatatactccgacatctggtcctctggacttctggggccagggaaccctggtcgccgtctcctca

SEQ ID NO: 14441 - DNA, 295 bp, Homo sapiens
  source 1..295: mol_type = other DNA
tgcagcctctggattcacctttagcagctgtgacatgcactgggtccgccaggctccagggaaggggctggagtgggtctcagctattagtgctggtggttctgccacatactacgcagactccgtgaagggccggttcaccatctccagagacaattccaagaacaccctgtatctgcagacgaacagtctgagagccgaggacacggccctatattattgtgtgaaaaggtatactccgacatctggtcctctggacttctggggccagggaaccctggtcgccgtctcctca

SEQ ID NO: 14442 - DNA, 295 bp, Homo sapiens
  source 1..295: mol_type = other DNA
tgcagcctctggattcatctttagtagctgtgacatgcactgggtccgccaggctccagggaaggggctggagtgggtctcagctattagtgctggtggttctgttacatactacgcagactccgtgaagggccggttcaccgtctccagagacaattccaagaacaccctgtatctgcagacgaacagtctgagagccgaggacacggccctatattattgtgtgaaaagatatactccgacatctggtcctctggacttctggggccagggaaccctggtcgccgtctcctca

SEQ ID NO: 14443 - DNA, 295 bp, Homo sapiens; identical to SEQ ID NO: 14440
  source 1..295: mol_type = other DNA

SEQ ID NO: 14444 - DNA, 295 bp, Homo sapiens
  source 1..295: mol_type = other DNA
tgcagcctctggattcacctttagcagctgtgacatgcactgggtccgccaggctccagggaaggggctggagtgggtctcagctattagtgctggtggttctgccacatactacgcagactccgtgaagggccggttcaccatctccagagacaattccaagaacaccctgtatctgcagacgaacagtctgagagccgaggacacggccctatattattgtgtgaaaagatatactccgacatctggtcctctggacttctggggccaggaaaccctggtcgccgtctcctca

SEQ ID NO: 14445 - DNA, 289 bp, Homo sapiens
  source 1..289: mol_type = other DNA
cgcagcctctgggttcagctttgacagctctgccatgaactgggtccgccaggctccagggaaggggctggagtgggtctcagttattagcattggtggtgatgacatatattacgcagactccgtgaagggccggttcaccatctccagagacaattccaagaacacgctgtatctacaaatgaatagcctgagagccgacgacacggccgtatattactgtgcgagacaaatagggcacctgcccggcgactactggggccagggaaccctggtcaccgtctcctca

SEQ ID NO: 14446 - DNA, 289 bp, Homo sapiens
  source 1..289: mol_type = other DNA
tgcagtctctgggttcacctttagcaacgctgccatgaactgggtccgccaggccccagggaaggggctggagtggctctcagttattagtattggtggtgatgacacatactacgcagactccgtgaagggccggttcaccatctccagagacaattccaagaacacgctatatctgcaaatgaacagcctgagagccgacgacacggccgtatattactgtgcgagacaaatagggcacctgcccggagactactggggccagggaaccctggtcaccgtctcctca

SEQ ID NO: 14447 - DNA, 307 bp, Homo sapiens
  source 1..307: mol_type = other DNA
tgcagcctccggattcaccttcagtgaccactacatggactgggtccgccaggttccagggaaggggctggagtgggttggccgtagtagaaacagaggtcgcagttacaccacagaatatgccgcgtctgtgaaaggcagattcaccgtctcaagagatgactcaaaggactcaatgtatctgcaaatgaacagcctgaaaaccgaggacatggccgtgtattattgtactagactgaccccgggaacaaaaggcgactactacatggacgtctggggcactgggaccacggtcaccgtctcctca

SEQ ID NO: 14448 - DNA, 307 bp, Homo sapiens
  source 1..307: mol_type = other DNA
tgcaggctctggattcaggctcagtgaccactatatggactgggtccgccaggttccagggaaggggctggagtgggttggccgtagtagagacaaaggtcgaggttacaccacagaatacgccgcgtctgcgaagggcagattcaccgtctcaagagatgactcaagggactcattctatctgcaaatgaacagcctgaaaaccgaggacacggccgtgtattattgtaccagactgaccccgggaacaaagggcgactactacatggacgtctggggcactgggaccacggtcaccgtctcgtca

SEQ ID NO: 14449 - DNA, 307 bp, Homo sapiens
  source 1..307: mol_type = other DNA
tgcagcctctggattcaccttcagtgaccactacatggactgggtccgccaggttccagggaaggggctggagtgggttggccgtagtagagacaaagctcacagttacaccacagaatacgccgcgtctgtgaaaggcagattcaccgtctcaagagatgactcaaaggactcactgtatctgcaaatgaacagcctgaaaaccgaggacacggccgtgtattattgtactagactgaccccgggaacaaaaggcgactactacatggacgtctggggcactgggaccacggtcaccgtctcctca

SEQ ID NO: 14450 - DNA, 283 bp, Homo sapiens
  source 1..283: mol_type = other DNA
tgcagcctctggattcactttcagcaacgcctggatgagctgggtccgccaggctccagggaaggggctggagtgggttggccgtgttaaaaccaagactgatggtgggacaatagactacgctgcacccgtgagaggcagattcaccatctcaagagatgattcaaaaaacaccctgtatctgcaaatgaacagcctgaaaaccgaggactcagccgtgtattactgtagcacatctaggggcgactactggggccagggaaccctggtcaccgtctcctca

SEQ ID NO: 14451 - DNA, 283 bp, Homo sapiens
  source 1..283: mol_type = other DNA
tgcagcctctggattcactttcagcaacgcctggatgagctgggtccgccaggctccagggaaggggctggagtgggttggccgtgttaaaagcaagactgatggtgggacaatagactacgctgcacccgtgagaggcagattcaccatctcaagagatgattcaaaaaacaccctgtatctgcaaatgaacagcctgaaaaccgaggactcagccgtgtattattgtagcacatctaggggcgactactggggccagggaaccctggtcaccgtctcctca

SEQ ID NO: 14452 - DNA, 283 bp, Homo sapiens
  source 1..283: mol_type = other DNA
tgcagcctctggattcactttcagcaacgcctggatgagctgggtccgccaggctccagggaaggggctggagtgggttggccgtgttaaaaccaaggctgatggtgggacaatagactacgctgcacccgtgagaggcagattcaccatctcaagagatgattcaaaaaataccctgtatctgcaaatgaacagcctgaaaaccgaggactcagccgtgtattactgtagcacatctaggggcgactactggggccagggaaccctggtcaccgtctcctca

SEQ ID NO: 14453 - DNA, 286 bp, Homo sapiens
  source 1..286: mol_type = other DNA
tgttggcactggattcagccctccctcctatggcatgagctgggtccgccaggctccggggaagggactgcagtgggtctcatttattgatggtggtggtggttggacagcctatgcagactccgtgaagggccggttcaccatctccagagacaattccaagaacaccctgtatctacaaatgaacagcctgataatcgaggacacggccgtgtatttttgtgcgaaccataacgatgcgggcgactataactggggccagggaaccctggtcaccgtctcctcg

SEQ ID NO: 14454 - DNA, 286 bp, Homo sapiens
  source 1..286: mol_type = other DNA
tgttggctctggattcacccctctctcctatggcatgagctgggtccgccaggctccggggaagggactggagtgggtctcatttgttgatggtggtggtgcttggacagcctatgcagactccgtgaagggccggttcaccatctccagagacaattccaagaacaccctgtatctgcaaatgaacagcctgatagtcgaggacacggccgtgtatttttgtgcgaaccataacgatgcgggcgactataactggggccagggaaccctggtcaccgtctcctcg

SEQ ID NO: 14455 - DNA, 286 bp, Homo sapiens; identical to SEQ ID NO: 14454
  source 1..286: mol_type = other DNA

SEQ ID NO: 14456 - DNA, 292 bp, Homo sapiens
  source 1..292: mol_type = other DNA
cactgtctctggtgcctccatcagcagtagtggttactactgggcctggatccgccagcccccagggaagggactggagtggattggcagtatctcttatagtgggactacattctacagcccgtccctcaagagtcggctcaccatctccgcagacacgtccaagaaccacttctccctgcagctgagctctgtgaccgccgcagacacggctgtgtattactgtgcgagacgagaaatagtgaatacgattgactactggggccagggaacgttggtcaccgtctcctca

SEQ ID NO: 14457 - DNA, 292 bp, Homo sapiens
  source 1..292: mol_type = other DNA
cactgtctctggtgcctccatcagcagtagtggttactactgggcctggatccgccagcccccagggaagggactggagtggattggcagtatttcttatagtgggaccacattctacagcccgtccctcaagagtcggctcaccatctccgcagacacgtccaagaaccacttctccctgcagctgagctctgtgaccgccgcagacacggctgtgtattactgtgcgagacgagaaatagtgaatacgattgactactggggccagggaaccctggtcaccgtctcctca

SEQ ID NO: 14458 - DNA, 292 bp, Homo sapiens
  source 1..292: mol_type = other DNA
cactgtctctggtgcctccatcaccagtagtggttactactgggcctggatccgccagtccccagggaagggactggagtggattggcagtatctcttatagtgggaccacattctacagcccgtccctcaagagtcgactcaccatctccgcagacacgtccaagaaccacttctccctgcagctgaactctgtgaccgccgcagacacggctgtctattactgtgcgagacgagaaatagtaaatacgattgactactggggccacggaaccctggtcaccgtctcctca

SEQ ID NO: 14459 - DNA, 292 bp, Homo sapiens
  source 1..292: mol_type = other DNA
cactgtctctggtgcctccatcagcagtagtggttactactgggcctggatccgccagcccccagggaagggactggagtggattggcagtatctcttatagtgggaccacattctacagcccgtccctcaagagtcggctcaccatctccgcagacacgtccaagaaccacttctccctgcagctgagctctgtgaccgccgcagacacggctgtctattactgtgcgagacgagaaatagtgaatacgattgactactggggccagggaaccctggtcaccgtctcctca

SEQ ID NO: 14460 - DNA, 286 bp, Homo sapiens
  source 1..286: mol_type = other DNA
tgcagcctctggattcaccttcggttcctacgtcatgcactggctccgccaaggtacaggagaaagtcctgagtgggtctcaactattggtactgctggtgacacatactatccaggctccgtgaagggccgattcaccatctccagagataatgccaagaactccttgtatcttcaaatgaacagtctgagagccggggacacggctgtgtattactgtgcaagggccgatcgctctgggtactatgacctctggggccagggaacccaggtcaccgtctcctca

SEQ ID NO: 14461 - DNA, 286 bp, Homo sapiens
  source 1..286: mol_type = other DNA
tgcagcctctggattcaccttcggtacctacgacatgcactgggtccgccaaggtagaggaaaaggtcctgagtgggtctcagctattggtactgttggtgacacatactatccaggctccgtgaagggccgattcaccatctccagagaaaatgccaagaactccttgtatcttcaaatgaacaacttgagagccggggacacggctgtgtattactgtgcaagggccgatcgctctgggtactatgacctctggggccagggaacccaggtcaccgtctcctca

SEQ ID NO: 14462 - DNA, 307 bp, Homo sapiens
  source 1..307: mol_type = other DNA
tgcagcctctggggtcaccgtcagtggtgactacatgagctgggtccgccaggctccagggaaggggctggagtgggtctcagttatttatagggatggtcagacatactatatagactccgtgaagggccgattcaccatctccagagacaattccaagaacaccctgtatcttcaaatgaacagcctgagagtcgaggatacggccctgtattactgtgcgagaggtggaggggcatattgtggttctgactgcctgaggactattgatatctggggccaagggacactggtgaccgtctcttca

SEQ ID NO: 14463 - DNA, 307 bp, Homo sapiens
  source 1..307: mol_type = other DNA
tgcagcctctggggtcaccgtcagtgatgactacatgagctgggtccgccaggctccagggaaggggctggagtgggtctcagttatgtatagggatggtaagacatactatacagactccgtgaagggccgattcaccatctctagagacaattccaagaacaccctgtatcttcaaatgaatagcctgagagtcgaggacacggccctgtattactgtgcgagaggtggaggggcatattgtggttctgactgcctgaggactattgatatctggggccaagggacactggtgaccgtctcttta

SEQ ID NO: 14464 - DNA, 319 bp, Homo sapiens
  source 1..319: mol_type = other DNA
cgctgtctatggtgggtccttcagtggttactactggacctggatccgccagcccccagggaaggggctggagtggattggggaaatcaatcatagtggaagcaccaactacaacccgtccctcaagactcgactcaccatatcagtggacacgtccaagaaccagttctccctgaaggtgagctctgtgaccgccgcggacacggctgtgtattactgtgcgaggggctccccgtattacgatttttggagtgccatggagtactactactactacatggacgtgtggggcaaagggaccacggtcaccgtctcctca

SEQ ID NO: 14465 - DNA, 319 bp, Homo sapiens
  source 1..319: mol_type = other DNA
cgctgtctatggtgggtccttcagtggttactactggagctggatccgccagcccccagggaaggggctggagtggattggggaaatcaatcatagtggaagcaccaactacaacccgtccctcaagagtcgagtcaccatatcagtggacacgtccaagaaccagttctccctgaaggtgacctctgtgaccgccgcggacacggctgtttattactgtgcgaggggctccccgtattacgatttttggagtgccatggagtactactactactacatggacgtctggggcaaagggaccacggtcaccgtctcctca

SEQ ID NO: 14466 - DNA, 319 bp, Homo sapiens
  source 1..319: mol_type = other DNA
cgctgtctatggtgggtccttcagtggttactactggacctggatccgccagaccccagggaaggggctggagtggattggggaaatcaatcatagtggaagcaccaactacaacccgtccctcaagactcgactcaccatatcagtggacacgtccaagaaccagttctccctgaaggtgagctctgtgaccgccgcggacacggctgtgtattactgtgcgaggggctccccgtattacgatttttggagtgccatggagtactactactactacatggacgtgtggggcaaagggaccacggtcaccgtctcctca

SEQ ID NO: 14467 - DNA, 295 bp, Homo sapiens
  source 1..295: mol_type = other DNA
tgcagcctctggattcacctttagtagcttttggatgaactgggtccgccaggctccagggaaggggctggagtgggtggccaacataaagcgagatggaagtgagaagtactatgtggactctgtgaagggccgattcaccatctccagagacaacgccaaaaactcgctgtatctgcaaatgaacagcctgagagccgaggacacggccgtgtattactgtgcgagagatggtgtcggctacggtggtgtccttgactactggggccagggaaccctggtcaccgtctcctca

SEQ ID NO: 14468 - DNA, 295 bp, Homo sapiens
  source 1..295: mol_type = other DNA
tgcagcctctggattcacctttagtagcttttggatgaactgggtccgccaggctccagggaaggggctggagtgggtggccaacataaagcaagatggaagtgagaaatactatgtggactctgtgaagggccgattcaccatctccagagacaacgccaagaactcactgtatctgcaaatgaacagcctgagagccgacgacacggccgtatattactgtgcgagagatggtgtcggctacggtggtgtccttgactactggggccagggaaccctggtcaccgtctcctca

SEQ ID NO: 14469 - DNA, 295 bp, Homo sapiens
  source 1..295: mol_type = other DNA
tgcagcctctggattcccctttagcagcttttggatgaattgggtccgccaggctccagggaaggggctggagtgggtggccaacataaagcaagatggaagtgagaaatactatgtggactctgtgaagggccgattcaccgtctccagagacaacgccaagaactcactgtatctgcaaatgaacagcctgagagccgaggacacggccgtgtattactgtgcgagagatggtgtcggctacggcggtgtccttgactactggggccagggagccctggtcaccgtctcctca

SEQ ID NO: 14470 - DNA, 295 bp, Homo sapiens
  source 1..295: mol_type = other DNA
tgcagcctctggattcacctttagtagcttttggatgaactgggtccgccaggctccagggaaggggctggagtgggtggccaacataaggcaagatggaagtgacaaatactacgtggactctgtgaagggccgattcaccatctccagagacaacgccaagaactcactgtatctgcaaatgagcagcctgacagacgaggacacggccgtgtattactgtgcgagagatggtgtcggctacggtggtgtccttgactactggggccagggaaccctggtcaccgtctcctca

SEQ ID NO: 14471 - DNA, 295 bp, Homo sapiens
  source 1..295: mol_type = other DNA
tgcagcctctggattcacctttagtagcttttggatgaactgggtccgccaggctccagggaaggggctggagtgggtggccaacataaagcaagatggaagtgagaaacactatgtggactctgtgaagggccgattcaccatctccagagacaacgccaagaactcactgtatctgcaaatgaacagcctgagagccgaggacacggccgtctattactgtgcgagagatggtgtcggctacgggggtgtccttgactactggggccagggaaccctcgtcaccgtctcctca

SEQ ID NO: 14472 - DNA, 303 bp, Homo sapiens
  source 1..303: mol_type = other DNA
acggcttctggatacagctttaccagctactggatcggctgggtgcgccagatgcccgggaaaggcctggagtggatggggatcatctatcctggtgactctgatgccaggtacagcccgtccttccaaggccaggtcaccatctcagccgacacgtccatcactgccgtctacctgcagtggagcagcctgagggcctcggacaccgccatgtattactgtgcgagacagcgccgtcccctatatacggagccgagtcggttcgacccctggggccagggaaccctggtcaccgtctcctca

SEQ ID NO: 14473 - DNA, 303 bp, Homo sapiens
  source 1..303: mol_type = other DNA
acggcttctggatacagctttaccagctactggatcggctgggtgcgccagatgcccgggaaaggcctggagtggatggggatcatctatcctggtgactctgatgtcaggtacagtccgtccttccaaggccaggtcaccatctcagccgacacgtccatcactgccgtccacctgcagtggagcagcctgagggcctcggacaccgccatgtattactgtgcgagacagcgccgtcccctatatacggagccgagtcggttcgacccctggggccagggaaccctggtcaccgtctcctca

SEQ ID NO: 14474 - DNA, 345 bp, Homo sapiens
  source 1..345: mol_type = other DNA
acacagaccctcacgctgacctgcaccttctctgggttctcactcagcactagtggagttggtgtgggctggatgcgtcagcccccaggaaaggccctggagtggcttgcgctcatttattgggatgatgataagcgctacagcccatctctgaggagcaggctcaccatcaccaaggacacctccaaaaacctggtggtccttacaatgaccaacatggaccctgtggacacagcctcatattattgtgcacacagacaggatggatcctgtagtcctaccaggtgcaatacccactgggggtttgactactggggccagggagccctggtcaccgtctcctca

SEQ ID NO: 14475 - DNA, 345 bp, Homo sapiens
  source 1..345: mol_type = other DNA
acacagaccctcacgctgacctgcaccttctctgggttctcactcagcactagtggagtgggtgtgggctggatccgtcagcccccaggaaaggccctggagtggcttgcgctcatttattgggatgatgataagcgctacagcccatctctgaagagcaggctcaccatcaccaaggacacctccaaaaacctggtggtccttacaatgaccaacatggaccctgtggacacagcctcatattattgtgcacacagacaggatggatcttgtagtcctaccaggtgcaatacccactggggctttgactactggggccagggagccctggtcaccgtctcctca

SEQ ID NO: 14476 - DNA, 345 bp, Homo sapiens
  source 1..345: mol_type = other DNA
acacagaccctcacgctgacctgcaccttctctgggttctcactcagcactagtggagtgggtgtgggctggatgcgtcagcccccaggaaaggccctggagtggcttgcgctcatttattgggatgatgataagcgctacagcccatctctgaagagcaggctcaccatcaccaaggacacctccaaaaacctggtggtccttacaatgaccaacatggaccctgtggacacagcctcatattattgtgcacacagacaggatggatcctgtagtcctaccaggtgcaatacccactgggggtttgactactggggccagggagccctggtcaccgtctcctca

SEQ ID NO: 14477 - DNA, 345 bp, Homo sapiens
  source 1..345: mol_type = other DNA
acacagaccctcacgctgacctgcaccttctctgggttctcactcagcactagtggagtgggtgtgggctggatccgtcagcccccaggaaaggccctggagtggcttgcgctcatttattgggatgatgataagcgctacagcccatctctgaagagcaggctcaccatcaccaaggacacctccaaaaacctggtgttccttacaatgaccaacatggaccctgtggacacagcctcatattattgtgcacacagacaggatggatcttgtagtcctaccaggtgcaatacccactggggctttgactactggggccagggagccctggtcaccgtctcctca

SEQ ID NO: 14478 - DNA, 345 bp, Homo sapiens
  source 1..345: mol_type = other DNA
acacagaccctcacgctgacctgcaccttctctgggttctcactcagcactagtggagtgggtgtgggctggatccgtcagcccccaggaaaggccctggagtggcttgcgctcatttattgggatgatgataagcgctacagcccatctctgaagagcaggctcaccatcaccaaggacacctccaaaaacctggtggtcctaacaatgaccaacatggaccctgtggacacagcctcatattattgtgcacacagacaggatggatcttgtagtcctaccaggtgcaatacccactggggctttgactactggggccagggagccctggtcaccgtctcctca

SEQ ID NO: 14479 - DNA, 345 bp, Homo sapiens
  source 1..345: mol_type = other DNA
acacagaccctcacgctgacctgcaccttctctgggttctcactcagcactaatggagtgggtgtgggctggatccgtcagcccccaggaaaggccctggagtggcttgcgctcatttattgggatgatgataagcgctacagcccatctctgaagagcaggctcaccatcaccaaggacacctccaaaaacctggtgttccttacaatgaccaacatggaccctgtggacacagcctcatattattgtgcacacagacaggatggatcttgtagtcctaccaggtgcaatacccactggggctttgactactggggccagggagccctggtcaccgtctcctca

SEQ ID NO: 14480 - DNA, 345 bp, Homo sapiens
  source 1..345: mol_type = other DNA
acacagaccctcacgctgacctgcaccttctctgggttctcactcagcactagtggagtgggtgtgggctggatccgtcagccccccggaaaggccctggagtggcttgcgctcgtttattgggatgatgataagcgctaccgcccatctctgaagagcaggctcaccatcaccaaggacacctccaaaaacctggtgttccttacaatgaccaacatggaccctgcggacacagcctcatattattgtgcacacagacaggatggatcttgtagtcctaccaggtgcaatacccactggggctttgactactggggccagggagccctggtcaccgtctcctca

SEQ ID NO: 14481 - DNA, 345 bp, Homo sapiens
  source 1..345: mol_type = other DNA
acacagaccctcacgctgacctgcaccttctctgggttctcactcagcactagtggagtgggtgtgggctggatccgtcagcccccaggaaaggccctggagtggcttgcgctcatttattgggatgatgataagcgctacagcccatctctgaagagcaggctcaccatcaccaaggacacctccaaaaacctggtgttccttacaatgaccaacatggaccctgtggacacagcctcatattattgtgcacacagacaggatggatcttgtagtcctacgaggtgcaatacccactggggctttgactactggggccagggagccctggtcaccgtctcctca

SEQ ID NO: 14482 - DNA, 304 bp, Homo sapiens
  source 1..304: mol_type = other DNA
tgcagcctctggattcacttttgatgattatggcatgagctgggtccgccaagctccagggaaggggctggagtgggtctctggtattagttggaatggtggtagcacaggttatgcagactctgtgaagggccgattcaccatctccagagacaacgccaagaactccctgtatctgcaaatgagcagtctgagagccgaggacacggccttgtatcaatgtgcgagagaatacggtgactacccctcgaactattactacatggacgtctggggcaaggggaccacggtcaccgtctcctca

SEQ ID NO: 14483 - DNA, 304 bp, Homo sapiens
  source 1..304: mol_type = other DNA
tgcagcctctggattcacttttgatgattatggcatgagctgggtccgccaagctccagggaaggggctggagtgggtctctggtattagttggaatggtggtagcacaggttatgcagactctgtgaagggccgattcaccatctccagagacaacgccaagaactccctgtatctgcaaatgagcagtctgagagccgaggacacggccttgtatcaatgtgcaagagaatacggtgactacccctcgaactattactacatggacgtctggggcaaggggaccacggtcaccgtctcctca

SEQ ID NO: 14484 - DNA, 295 bp, Homo sapiens
  source 1..295: mol_type = other DNA
tgcagcctctggattcacctttagcagttatggcatgagctgggtccgccaggctccagggaaggggctggagtgggtctcaattattagtggtggtgggagtcaaacatactacgcagactccgtgaagggccggttcaccatctccagagacaattccaagaacacgctgtatctgcaaatgaacagcctgagagtcgacgacgcggccgtatattactgtgcgaaagggggggcaacagctgggtatgcttttgatatctggggccaagggacaatggtcaccgtctcttca

SEQ ID NO: 14485 - DNA, 295 bp, Homo sapiens
  source 1..295: mol_type = other DNA
tgcagcctctggattcagctttagcagttatggcatgagctgggtccgccaggctccagggaaggggctggagtgggtctcaattattagtggtggtgggagtcatacatactacgcagactccgtgaagggccggttcaccatctccagagacaactccaagaacacgctgtatctgcagatgaacagcctgagagtcgacgacgcggccgtatattactgtgcgaaagggggggcaacagctgggtatgcttttgatatctggggccaagggacaatggtcaccgtctcttca

SEQ ID NO: 14486 - DNA, 295 bp, Homo sapiens
  source 1..295: mol_type = other DNA
tgcagcctctggattcacctttagcagttatggcatgaactgggtccgccaggctccagggaaggggctggagtgggtctcaattattagtagtagtgggggtgatacatactacgcagactccgtgaagggccggttcaccatctccagagacaattccaagaacacgctgtttctgcaaatgaacagcctgagagtcgacgacgcggccgtatattactgtgcgaaagggggggcaacagctgggtatgcttttgatatctggggccaagggacaatggtcaccgtctcttca

SEQ ID NO: 14487 - DNA, 295 bp, Homo sapiens
  source 1..295: mol_type = other DNA
tgcagcctctggattcacctttagcagttatggcatgaactgggtccgccaggctccagggaaggggctggagtgggtctcaattattagtaatagtgggggtgatacatactacgcagactccgtgaagggccggttcaccatctccagagacaattccaagaacacactgtttctgcaaatgaacagcctgagagtcgacgacgcggccgtatattactgtgcgaaagggggggcaacagctgggtatgcttttgatatctggggccaagggacaatggtcaccgtctcttca

SEQ ID NO: 14488 - DNA, 295 bp, Homo sapiens
  source 1..295: mol_type = other DNA
tgcagcctctggattcacctttagcagttatggcatgaactgggtccgccaggctccagggaaggggctggagtgggtctcaattattagtagtagtgggggtgatagatactacgcagactccgtgaagggccggttcaccatctccagagacaattccaagaacacgctgtttctgcaaatgaacagcctgagagtcgacgacgcggccgtatattactgtgcgaaagggggggcaacagctgggtatgcttttgatatctggggccaagggacaatggtcaccgtctcctca

SEQ ID NO: 14489 - DNA, 301 bp, Homo sapiens
  source 1..301: mol_type = other DNA
tgcagcctctggattcacttttagtacctattggatgagctgggtccgccaggctccagggaaggggctggagtgggtggccaacataaagcaagatggaagtgagaaatactatgtggactctgtgaagggccgattgaccatctccagagacaacgccaagaagtcactgtatctgcaaatgaacagcctgagagtcgaggacacggctgtgtattactgtgcgagagatcgcgggcagtatagcaacagctggtatattgattactggggccagggaaccctggtcaccgtctcctca

SEQ ID NO: 14490 - DNA, 301 bp, Homo sapiens
  source 1..301: mol_type = other DNA
tgcagcctctggattcacctttagtaactattggatgagctgggtccgccaggctccagggaaggggctggagtgggtggccaacataaagcaagatggaagtgagaaatactatgtggactctgtgaagggccgattgaccatctccagagacaacgccaagaagtcactgtatctgcaaatgaacagcctgagagtcgaggacacggctgtgtattactgtgcgagagatcgcggacagtatagcaacagctggtatattgattactggggccagggaaccctggtcaccgtctcctca

SEQ ID NO: 14491 - DNA, 304 bp, Homo sapiens
  source 1..304: mol_type = other DNA
tgcagcctctggattcaccctcagtgactactacatggcctggatccgccaggctccagggaaggggctggattgggtttcatacattagtaatagtggtggttccctacagtacgcggactctgtgaagggccgattcaccatctcccgggacaccgccaagaactcactgtatctgcaaatgaacagcctgagagacgaggacacggccgtgttttactgtgcgagatttgggagggggagtgattattttaaaaactggttcgattcttggggccagggaaccctggtcaccgtctcctca

SEQ ID NO: 14492 - DNA, 304 bp, Homo sapiens
  source 1..304: mol_type = other DNA
tgcagcctctggattcaccctcagtgactactacatggcctggatccgccaggctccagggaaggggctggagtgggtttcatacattagtaatagtggtgcttccctacagtacgcagactctgtgaagggccgattcaccatctcccgggacaacgccaagaactcactgtatctgcaaatgaacagcctgagagacgaggacacggccgtgttttactgtgcgagatttgggagggggagtgattattttaaaaactggttcgattcttggggccagggaaccctggtcaccgtctcctca

SEQ ID NO: 14493 - DNA, 304 bp, Homo sapiens
  source 1..304: mol_type = other DNA
tgcagcctctggattcaccctcagtgactactacatggcctggatccgccaggctccagggaaggggctggagtgggtttcatacattagtaatagtggtggttccctacagtacgcagactctgtgaagggccgattcaccatctcccgggacaacgccaagaactcactgtatctgcaaatgaacagcctgagagacgaggacacggccgtgttttactgtgcgagatttgggagggggagtgattattttaaaaactggttcgattcttggggccagggaaccctggtcaccgtctcctca

SEQ ID NO: 14494 - DNA, 292 bp, Homo sapiens
  source 1..292: mol_type = other DNA
tgcagcgtctggattcaccttcagtaactatggcatgcactgggtccgccaggctccaggcaaggggctggagtgggtggcagttatacggtatgatggaagtaataaatattatgcagactccgtgaagggccgattcaccatctccagagacaattccaacaacacactgtatgtgcaaatgaatagcctgagagccgaggacacggctgtgtattattgtgggagagaacggcgggactactattacatggacgtctggggcaaagggaccacggtcaccgtctcctca

SEQ ID NO: 14495 - DNA, 292 bp, Homo sapiens
  source 1..292: mol_type = other DNA
tgcagcgtctggattcaccttcagtaactatggcatgcactgggtccgccaggctccaggcaaggggctggagtgggtggcagttatacggtatgatggaagtaataaatattatgcagactccgtgaagggccgattcaccatctccagagacaattccaacaacacactgtatgtgcaaatgaatagcctgagagccgaggacacggctgtgtgttattgtgggagagaacggcgggactactattacatggacgtctggggcaaagggaccacggtcaccgtctcctca

SEQ ID NO: 14496 - DNA, 292 bp, Homo sapiens
  source 1..292: mol_type = other DNA
tgcagcgtctggattcaccttcagtagctatggcatgcactgggtccgccaggctccaggcaaggggctggagtgggtggcagttatacggtatgatggaagtaataaatactatgcagactccgtgaagggccgattcaccatctccagagacaattccaagaacacactgtatgtgcaaatgaacagcctgagagccgaggacacggctgtgtattactgtgggagagaacggcgggactactactacatggacgtctggggcaaagggaccacggtcaccgtctcctca

SEQ ID NO: 14497 - DNA, 289 bp, Homo sapiens
  source 1..289: mol_type = other DNA
tgtagcctctggaatcaccttcaacaaatactggatgtcctgggcccgccaggctccagggaaggggctggtgtgggtctcatctattaatagtgatatgagttccacaagttacgcggactccgtgaagggccgattcaccatctccagagacaacgccaagaacacactgtatctgcaaatgaacattctgagaggcgaggacacggctgtttattactgtttaagagccggatacaggggtggatttgacatctggggccaagggacaaaggtcaccgtctcttca

SEQ ID NO: 14498 - DNA, 289 bp, Homo sapiens
  source 1..289: mol_type = other DNA
tgtagcctctggaatcaccttcaaaaattattggatgtcgtgggcccgccaggctccagggaaggggctggtgtgggtctcatctattaatagtgatatgagttccaaaagttacgcggactccgtgaagggccgattcaccatctccagagacaacgccgggaacacactgtatctgcaaatgaacattctggaagacgaggacacggctgtttattactgtttaagagccggatacaggggtggatttgacatctggggccaagggacaaaggtcaccgtctcttca

SEQ ID NO: 14499 - DNA, 289 bp, Homo sapiens
  source 1..289: mol_type = other DNA
tgtagcctctggaatcaccttcaaaaattactggatgtcgtgggcccgccaggctccagggaaggggctggtgtgggtctcatctattaatagtgatatgagttccaaaagttacgcggactccgtgaagggccgattcaccatctccagagacaacgccgggaacacactgtatctgcaaatgaacattctggaagacgaggacacggctgtttattactgtttaagagccggatataggggtggatttgacatctggggccaagggacaaaggtcaccgtctcttca

SEQ ID NO: 14500 - DNA, 289 bp, Homo sapiens
  source 1..289: mol_type = other DNA
tgtagcctctggaatcaccttcgaaagatactggatgtcctgggcccgccaggctccagggaaggggctggtgtgggtctcatctattaacagtgatgcgacttccagaagttacgcggactccgtgaagggccgattcaccatctccagagacaacgccaggagcacggtgtatctccaaatgaacagtctgcgaggcgaggacacggctgtttattactgtttgagagccggatacaggggtgggtttgacatctggggccaagggacaaaggtcttcgtctcttca

SEQ ID NO: 14501 - DNA, 325 bp, Homo sapiens
  source 1..325: mol_type = other DNA
tgcagcctctggattcaccttcagtagttatggcatgaactgggtccgccaggctccaggcaaggggctggagtgggtctcatccattagtggtagtagtcgttacatatactacgcagactcagtgacgggccgattcaccatctccagggacaacgccaagaactcactgtatctgcaaatggacagcctgagagccgaagacacggctgtgtatttctgtgcgaggtgggacgaggatagcagcagctggtaccgaggctcaaaatacgttttctactacatggacgtctggggcaaagggaccacggtcaccgtctcctca

SEQ ID NO: 14502 - DNA, 325 bp, Homo sapiens
  source 1..325: mol_type = other DNA
tgcaggcactggattcaccttcagtaattatggcatgaactgggtccgccaggctccagggaaggggctggagtgggtctcatccattagtggtagtagtcgttacatatactacgcagactcagtgacgggccgattcaccatctccagggacaacgccaagaactcactgtatctgcaaatggacagtctgagagccgaggacacggctgtgtatttctgtgcgaggtgggacgaggatagcagcagctggtaccgaggctcaaaatacgttttctactacatggacgtctggggcaaagggaccacggtcaccgtctcctca

SEQ ID NO: 14503 - DNA, 279 bp, Homo sapiens
  source 1..279: mol_type = other DNA
gcttctggagtcaccttcaacacctatgctatcaactgggtgcgacaggcccctggacaagggcttgagtggatgggagggatcatccctccctttggaacagcatactacgcacagaggttccagggcagagtcacgattaccgcggacgaatccacgagcacagcctacatggaactgagcagcctgagatctgaggacacggccgtgtattactgtgcgagaggtacaactatggccaactactggggccagggaaccctggtcaccgtctcctca

SEQ ID NO: 14504 - DNA, 279 bp, Homo sapiens
  source 1..279: mol_type = other DNA
gcttctggagtcaccttcaacacctatgctattaactgggtgcgacaggcccctggacaagggcttgagtggatgggagggatcatccctccctttggtacagcaaactacgcacagaggttccagggcagagtcacgattaccgcggacgaatccacgagcacagcgtacatggacctgagcagcctgagatctgaagacacggccatctattactgtgcgaggggtacaactatggccaactactggggccagggcaccctggtcaccgtctcctca

SEQ ID NO: 14505 - DNA, 279 bp, Homo sapiens
  source 1..279: mol_type = other DNA
gcttctggagtcaccttcaacacctatgctatcaactgggtgcgacaggcccctggacaagggcttgagtggatgggagggatcatccctccctttggtacagcaaactacgcacagaggttccagggcagagtcacgattaccgcggacgaatccacgagcacagcctacatggagctgagcagcctgagatctgaggacacggccgtgtattactgtgcgagaggtacaactatggccaactactggggccagggaaccctggtcaccgtctcctca

SEQ ID NO: 14506 - DNA, 279 bp, Homo sapiens
  source 1..279: mol_type = other DNA
gcttctagagtcatcttcaacacccatgctatcaactgggtgcgacagggccctggacaagggcttgagtggatgggagcgatcgttcctccctttggtataccaaactacgcacagacgttccagggcagagtcacgattaccgcggacgaatccacgagcacagtctacatggagctgaggagcctgagatctgaggacacggccgtgtattactgtgcgagaggaacaactatggccaactactggggccagggaaccctggtcaccgtctcctca

SEQ ID NO: 14507 - DNA, 279 bp, Homo sapiens
  source 1..279: mol_type = other DNA
gcttctggagtcacgttcaacacctatgccatcaactgggtgcgacaggcccctggacaagggcttgagtggatgggagggatcatccctccctttggtacaccatactacgcacagaggttccagggcagagtcacgattacggcggacgaatccacgaacacagcctacatggaactgagcagcctgagatctgaggacacggccgtgtattactgtgcgagaggtacaactatggccaactactggggccagggaaccctggtcaccgtctcctca

SEQ ID NO: 14508 - DNA, 310 bp, Homo sapiens
  source 1..310: mol_type = other DNA
tgcagcctctggattcacctttagcagctttgccatgggctgggtccgccaggctccagggaaggggctggagtgggtctcaggtattagttttggtggtggtacaacatattacgcagactccgtgaagggccggttcaccatctccagagacaattccaagaacacactgtatctgcagatggacagcctgagaggcgaggacacggccctttattactgtgcgaaaggggctgacgggtatagcagtggcggatcaagggggtactttgactactggggcctgggagccctggtcatcgtctcctca

SEQ ID NO: 14509 - DNA, 310 bp, Homo sapiens
  source 1..310: mol_type = other DNA
tgcagcctctggattcacctttaccagctatgccatgggctgggtccgccaggctccagggaaggggctggagtgggtctcaggtattagttttggtggtggtacaacatattacgcagactccgtgaagggccggttcaccatctccagagacaattccaagaacacactgtatctgcagatggacagcctgagaggcgaggacacggccctttattactgtgcgaaaggggctgacgggtatagcagtggcggatcaagggggtactttgactactggggccagggagccctggtcatcgtctcctca

SEQ ID NO: 14510 - DNA, 280 bp, Homo sapiens
  source 1..280: mol_type = other DNA
cactgtttctggtggctccatcagtagttactactggagctggatccggcagtccccggctcagggactggagtggattggatatatctcttacagaggggacatcaagtacaacccctccctcatgagtcgagtcaccatgtctatagacacgtctaagaagcaggtctccctgaagctgacctctgtgaccgctgcggacacggccgtatactactgtgcggggggcagtccggatttcgtttgttggggcctgggaaccctggtcaccgtctcctca

SEQ ID NO: 14511 - DNA, 280 bp, Homo sapiens
  source 1..280: mol_type = other DNA
cactgtttctggtggctccatcagtagttactactggagctggatccggcagtccccggctcagggactggagtggattggatatatctcttacagaggggacatcaagtacaacccctccctcatgagtcgagtcaccatgtctatagacacgtctaagaagcaggtctccctgaagctgacctcggtgaccgctgcggacacggccgtatactactgtgcggggggcagtccggatttcgtttgttggggcctgggaaccctggtcaccgtctcctca

SEQ ID NO: 14512 - DNA, 297 bp, Homo sapiens
  source 1..297: mol_type = other DNA
gcctctggttacacctttaccacctatggaatcagctgggtgcgacaggcccctggacaagggcttgagtggatgggatggatcagcggtaacaatggtaacacaaactatgcacagaaattccagggcagagtcaccatgaccacagacacatccacgagcacagtctacatggagctgaggagcctgagatctgacgacacggccgtgtattactgtgcgaggaccagacttcattgtggtggtgactgctccccgggtcactggggccagggaaccctggtcaccgtctcctca

SEQ ID NO: 14513 - DNA, 297 bp, Homo sapiens
  source 1..297: mol_type = other DNA
gcctctggttacacctttaccacctatggaatcagttgggtgcgacaggcccctggacaagggcttgagtggatgggatggatcagcggtaacaatggtaacgcaaactatgcacagaaattccagggcagagtcaccatgaccacagacacatccacgagcacagtctacatggagctgaggagcctgagatctgacgacacggccgtgtattactgtgcgaggaccagacttcattgtggtggtgactgctccccgggtcactggggccagggaaccctggtcaccgtctcctca

SEQ ID NO: 14514 - DNA, 297 bp, Homo sapiens; identical to SEQ ID NO: 14513
  source 1..297: mol_type = other DNA

SEQ ID NO: 14515 - DNA, 289 bp, Homo sapiens
  source 1..289: mol_type = other DNA
tgcagcctatggaatcaccttcagtgcctctggcatgcactgggtccgccagactccaggcaaggggctggagtgggtggcatttatatcatatgatggaactaaaaaatactatcgagactccgtggagggccgattcaccatctccagagacgattccaagaacacgatatatctgcaaatgaacagccttggaactgaagacacggctctatattactgtgcgaaagacaagggtaattattactttgactactggggccagggaaccctgatcaccgtctcctca

SEQ ID NO: 14516 - DNA, 289 bp, Homo sapiens
  source 1..289: mol_type = other DNA
tgcagcctatggaatcaccttcagtgcctctggcatgcactgggtccgccagactccaggcaaggggctggagtgggtggcatttatatcatatgatggaactaaaaaatattatcgagactccgtggagggccgattcaccatctccagagacgattccaagaacacgatatatctgcaaatgaacagccttggaactgaagacacggctctatattactgtgcgaaagacaagggtaattattactttgactactggggccagggaaccctgatcaccgtctcctca

SEQ ID NO: 14517 - DNA, 289 bp, Homo sapiens
  source 1..289: mol_type = other DNA
tgcagcctatggaatcaccttcagtgcctctggcatgcactgggtccgccaggctccaggcaaggggctggagtgggtggcatttatatcatctgatggaaggaataaatactatagagactccgtggagggccgattcaccatctccagagacaattccaagaacacgatatatctgcaaatgaacagccttagaactgaggacacggctctatatttctgtgcgaaggacaaaggcaattattactttgactactggggccagggaaccctgatcaccgtctcctca

SEQ ID NO: 14518 - DNA, 283 bp, Homo sapiens
  source 1..283: mol_type = other DNA
tgcagcctctggattcagctttagtacctattggatgagctgggtccgccaggctccagggaaggggctggaatgggtggccaacataaagcaagatggaagtgagaaattctatgtggactctgtgaagggccgattcaccatctccagggacaacgccaagaactcactgtttctgcaaatgaacagcctgagagccgaggacacggctgtgtattattgtacgagaggagctacttgggttgactgctggggccagggaaccctggtcaacgtctcctca

SEQ ID NO: 14519 - DNA, 283 bp, Homo sapiens
  source 1..283: mol_type = other DNA
tgcagcctctggattcagctttagttcctattggatgagctgggtccgccaggctccagggaaggggctggaatgggtggccaacataaagcaagatggaagtgagaaattctatgtggactctgtgaagggccgattcaccatctccagggacaacgccaagaactcactgtttctgcaaatgaacagcctgagcgccgaggacacggctgtgtattattgtacgagaggagctacttgggttgactgctggggccagggaaccctggtcaacgtctcctca

SEQ ID NO: 14520 - DNA, 283 bp, Homo sapiens; identical to SEQ ID NO: 14519
  source 1..283: mol_type = other DNA

SEQ ID NO: 14521 - DNA, 298 bp, Homo sapiens
  source 1..298: mol_type = other DNA
tgtagcgtctggattcaccttcagttcctatggcatgtactgggtccgccaggctccaggcaagggactggagtgggtggcaggcacttggtatgacggaagtaatcgaaattatgcagactccgtgaagggccgattcaccatctccagagacaattcaaagaacacactgaatcttcagatggacagcctgagagtcgaggacacgggtctatattactgtgtgagagatgggattcggggtgatgacgatgcttttgatatgtggggccaagggacaatggtcaccgtctcttca

SEQ ID NO: 14522 - DNA, 298 bp, Homo sapiens
  source 1..298: mol_type = other DNA
tgcagcgtctggattcaccttcagttcctatggcatgtactgggtccgccaggctccaggcaaggggctggagtgggtggcaggttcatggtctgacggtagtaatagaaattatgcagactccgtgaagggccgattcaccatctccagagacaattccaagagcacactgaatcttcaaatggacagtctgagagccgaggacacggctgtgtattactgtgtgagagatgggattcggggtgatgacgatgcttttgatatgtggggccaagggacaatggtcatcgtctcttca

SEQ ID NO: 14523 - DNA, 330 bp, Homo sapiens
  source 1..330: mol_type = other DNA
acacagaccctcacgctgacctgcaccttctctgggttctcactcagtactagtggagtgggtgtgggctgggtccgtcagtccccaggaaaggccctggagtggcttgcactcatttattgggatgatgacaggcgctacagcccatctctgaggagcaggctcaccatcaccaaggacacctccaaaaaccaggtggtccttacaatgaccaacatgtaccctgtggacacagccacatattactgtgcacacagacggggagggcatgactggaacgctggatggttcgccccctggggccagggaaccctagtcaccgtctcctca

SEQ ID NO: 14524 - DNA, 324 bp, Homo sapiens
  source 1..324: mol_type = other DNA
acacagaccctcacgctgacttgcaccttctctgggttctcactcagtactagtggagtgggtgtgggctgggtccgtcagtccccaggaaaggccctggagtggcttgcactcatttattgggatgatgacaggcgctacagcccatctctgaggagcaggctcaccatcaccaaggacacctccaaaaaccaggtggtccttacaatgaccaacattgtggacacagccacatattactgtgcacacagacggggagggcatgactggaacgctggatggttcgccccctggggccagggaaccctagtcaccgtctcctca

SEQ ID NO: 14525 - DNA, 330 bp, Homo sapiens
  source 1..330: mol_type = other DNA
acacagaccctcacgctgacctgcaccttctctgggttctcactcagtactagtggagtgggtgtgggctgggtccgtcagtccccaggaaaggccctggagtggcttgcactcatttattgggatgatgacaggcgctacagcccatctctgacgagcaggctcaccatcaccaaggacacctccaaaaaccaggtggtccttacaatgaccaacatgttccctgtggacacagccacatattactgtgcacacagacggggagggcatgactggaacgctggatggttcgccccctggggccagggaaccctagtcaccgtctcctca

SEQ ID NO: 14526 - DNA, 324 bp, Homo sapiens
  source 1..324: mol_type = other DNA
acacagaccctcacgctgacttgcaccttctctgggttctcactcagtactaatggagtgggtgtgggctgggtccgtcagtccccaggaaaggccctggagtggcttgcactcatttattgggatgatgacaggcgctacagcccatctctgaggagcaggctcaccatcaccaaggacacctccaaaaaccaggtggtccttacaatgaccaacattgtggacacagccacatattactgtgcacacagacggggagggcatgactggaacgctggatggttcgccccctggggccagggaaccctagtcaccgtctcctca

SEQ ID NO: 14527 - DNA, 330 bp, Homo sapiens
  source 1..330: mol_type = other DNA
acacagaccctcacgctgacctgcaccttctctgggttctcactcagtactaatggagtgggtgtgggctgggtccgtcagtccccaggaaaggccctggagtggcttgcactcatttattgggatgatgacaggcgctacactctgtctctgaggagcaggctcaccatcaccaaggacacctccaaaaaccaggtggcccttacaatgaccaacatgtaccctgtggacacagccacatattactgtgcacacagacggggaggccatgactggaacgctggatggttcgccccctggggccagggaaccctagtcaccgtctcctca

SEQ ID NO: 14528 - DNA, 280 bp, Homo sapiens
  source 1..280: mol_type = other DNA
tgcagcctctggattcaccctcagcaactactggatggtctgggtccgccaagttccagggaaggggctgatgtgggtctcacgaattaagggtgatgggagtggtataagctacgcggactccgtgaagggccgattcaccatctccagagacgacgccaagaacacactgtatctacaaatggacagtctgagagtcgaggacacggctgtttattattgtgcaagagatcgatacggtgactactggggccagggaatcctggtcaccgtctcctca

SEQ ID NO: 14529 - DNA, 280 bp, Homo sapiens
  source 1..280: mol_type = other DNA
tgcagcctctggattcaccctcagcaactactggatggtctgggtccgccaagttccagggaaggggctgatgtgggtctcacgaattaagagtgatgggagtggtataacctacgcggactccgtgaagggccgattcaccatctccagagacgacgccaagaacacactgtatctacaaatggacagtctgagagtcgaggacacggctgtttattattgtgcaagagatcgatacggtgactactggggccagggaatcctggtcaccgtctcctca

SEQ ID NO: 14530 - DNA, 280 bp, Homo sapiens
  source 1..280: mol_type = other DNA
tgcagcctctggattcaccctcagcaactactggatggtctgggtccgccaagttccagggaaggggctgatgtgggtctcacgaattaagagtgatgggagtggtataagctacgcggactccgtgaagggccgattcaccatctccagagacgacgccaagaacacactgtatctacaaatggacagtctgagagtcgaggacacggctgtttattattgtgcaagagatcgatacggtgactactggggccagggaatcctggtcaccgtctcctca

SEQ ID NO: 14531 - DNA, 295 bp, Homo sapiens
  source 1..295: mol_type = other DNA
ttcagcctctggattcaccttcagtagctatgctatgcactgggtccgccaggctccagggaagggactggaatatgtttcagctattagtagtaatgggggtagcacatactacgcagactcagtgaagggcagattcaccatctccagagacaattccaagaacacgctgtatcttcaaatgagcagtctgagagctgaggaggacacggctgtgtactactgtgtgagatctgatcagctagcgggtgcttttgatatctggggccaagggacaatggtcaccgtctcctca

SEQ ID NO: 14532 - DNA, 292 bp, Homo sapiens
  source 1..292: mol_type = other DNA
ttcagcctctggattcaccttcagtagctatgctatgcactgggtccgccaggctccagggaagggactggaatatgtttcagctattagtagtaatgggggtagcacatactacgcagactcagtgaagggcagattcaccatctccagagacaattccaagaacacgctgtatcttcaaatgagcagtctgagagctgaggacacggctgtatattactgtgtgagatctgatcagctagcgggtgcttttgatatctggggccaagggacaatggtcaccgtctcttca

SEQ ID NO: 14533 - DNA, 292 bp, Homo sapiens
  source 1..292: mol_type = other DNA
ttcagcctctggattcacctttagtagctatgctatgcactgggtccgccaggctccagggaagggactggaatatgtttcagctattagtagtaatgggggtagcacatactacgcagactcagtgaagggcagattcaccatctccagagacaattccaagaacacgctgtatcttcaaatgagcagtctgagagctgaggacacggctgtgtattactgtgtgagatctgatcagctagcgggtgcttttgatatctggggccaagggacaatggtcaccgtctcttca

SEQ ID NO: 14534 - DNA, 292 bp, Homo sapiens
  source 1..292: mol_type = other DNA
ttcagcctctggattcaccttcagtagctatgctatgcactgggtccgccaggctccagggaagggactggaatatgtttcagctattagtagtaatgggggtagcacatactacgcagactcagtgaagggcagattcaccatctccagagacaattccaagaacacgctgtatcttcaaatgagcagtctgagggctgaggacacggctgtgtattactgtgtgagatctgatcagctagcgggtgcttttgatatctggggccaagggacaatggtcaccgtctcttca

SEQ ID NO: 14535 - DNA, 286 bp, Homo sapiens
  source 1..286: mol_type = other DNA
tgcagcctctggatttacctttagcaacaatgacatgagctgggtccgccaggctccagggaaggggctggagtgggtctcagctattagtcccagtggtggtactacatacgcagactccgtgaagggccggttcaccatctccagagagaattccaagaacacgctgtatctgcatacgaacagcctgagagccgaggacacggccgtatattactgtgcgaaagtcagaggcaggtggtactttgacgcctggggccagggaaccctggccaccgtctcctca

SEQ ID NO: 14536 - DNA, 286 bp, Homo sapiens
  source 1..286: mol_type = other DNA
tgcagcctctggattcacctttagcaacaatgacatgagctgggtccgccaggctccagggaaggggctggagtgggtctcagctattagtcctagtggtggtactacatacgcagactccgtgaagggccggttcaccatctccagagagaattccaagaacactctgtatctgcatacgagcagcctgagagccgaggacacggccgtatattactgtgcgaaagtcagaggcaggtggtactttgacgcctggggccagggaaccctggccaccgtctcctca

SEQ ID NO: 14537 - DNA, 286 bp, Homo sapiens
  source 1..286: mol_type = other DNA
tgcagcctctggattcacctttagcaacaatgacatgagctgggtccgccaggctccagggaaggggctggagtgggtctcagctattagtcctagtggtggtaccacatacgcagactccgtgaagggccggttcaccatctccagagagaattccaagaacacgctgtatctgcatacgaacagcctgagagccgaggacacggccgtatattactgtgcgaaagtcagaggcaggtggtattttgacgcctggggccagggaaccctggccaccgtctcctca

SEQ ID NO: 14538 - DNA, 286 bp, Homo sapiens
  source 1..286: mol_type = other DNA
tgcagcctctggattcacctttagcaacaatgacatgagctgggtccgccaggctccagggaaggggctggagtgggtctcagctattagtcctagtggcggtactacatacgcagactccgtgaagggccggttcaccatctccagagagaattccaagaacactctgtatctgcatacgagcagcctgagagccgaggacacggccgtatattactgtgcgaaagtcagaggcaggtggtactttgacgcctggggccagggaaccctggccaccgtctcctca

SEQ ID NO: 14539 - DNA, 297 bp, Homo sapiens
  source 1..297: mol_type = other DNA
gcttctggttacacgtttgtcagctatggtctcaactgggtgcgacaggcccctggacaaggacttgagtgggtgggttggatcagcggttccaatggcaacacaaagtatgcacagaaggtccagggcagagtcacgatgaccacagacacttccgcgagaacagcctacatggaactgaggagcctgaggtctgacgacacggccgtgtattactgtgcaagaggatcggttcaattttcggactactactacatggacgtctggggcacagggaccacggtcaccgtctcctca

SEQ ID NO: 14540 - DNA, 297 bp, Homo sapiens
  source 1..297: mol_type = other DNA
gcttctggttacacgtttggcagctatggtctcaactgggtgcgacaggcccctggacaaggacttgagtgggtgggttggatcagcggttccaatgggaacacaaagtatgcacagaaggtccagggcagagtcacgatgaccacagacacttccgcgagaacagcctacatggaactgaggagcctgaggtctgacgacacggccgtgtattactgtgcaagaggatcggttcaattttcggactactactacatggacgtctggggcacagggaccacggtcaccgtctcctca

SEQ ID NO: 14541 - DNA, 310 bp, Homo sapiens
  source 1..310: mol_type = other DNA
cactgtctctggtggctccatcagcagtagaagttactactgggcctggatccgccagcccccagggaaggggctggagtggattgcgagtatctattatagtgggagcacctactacaacccgtccctcaagagtcgagtcaccatatccatagacacgtccaagaaccagttctccctgaggctgaactctgtgaccgccgcagacacggctgtgtattactgtgcgagacatgcttcctcgtatagtgggagctacagaaactactttgactactggggccagggaaccctggtcaccgtctcctca

SEQ ID NO: 14542 - DNA, 310 bp, Homo sapiens
  source 1..310: mol_type = other DNA
cactgtctctggtggctccatcagtaatataaattactactgggcctggatgcgccagcccccagggaaggggctggagtggattgcgagtatctattatagtgggagcacctactacaatccgtccctcaacagtcgagtcaccatatccgtagacgtgtccaagaaccagttctccctgaagctgagctctgtgaccgccgcagacacggctgtattttactgtgcgagacatgcttcctcgtatagtggcagctacagaaactactttgactactggggccagggaaccctggtcaccgtctcctca

SEQ ID NO: 14543 - DNA, 310 bp, Homo sapiens
  source 1..310: mol_type = other DNA
cactgtctctggtggctccatcagtgatagaagttactactgggcctggatccgccagcccccagggaaggggctggagtggattgcgagtatctattatagtggggtcacctactacaacccgtccctcgagagtcgagtctccatattcgtagacacgtccaagaaccagttctccctgaggctgaactctgcgaccgccgcagacgcggctgtctattactgtgcgagacatgcttcctcctatagtgggagctacagaaactactttgactactggggccagggaaccctggtcaccgtctcctca

SEQ ID NO: 14544 - DNA, 309 bp, Homo sapiens
  source 1..309: mol_type = other DNA
gcttctggtttcacctttaccagctatggtttcacctgggtgcgacaggcccctggacaagggcttgagcggatgggatggatcagcgctcacaatggtaacacaaattatgcagagaacctccagggcagaatcaccatgaccacagacacacccacgaggacagtctacatggagctgaggagcctgagatctgacgacacggccatgtattactgtgcgagagttggggggcctgtattacgatttcttgactggttgggctacatggacgtctggggccaagggaccacggtcaccgtctcctca

SEQ ID NO: 14545 - DNA, 309 bp, Homo sapiens
  source 1..309: mol_type = other DNA
gcttctggtttcacctttaccagctatggtttcacctgggtgcgacaggcccctggacaagggcttgagcggatgggatggatcagcgctcacaatggtaacacaaattatgcacagagcctccagggcagaatcaccatgaccatagacacatccacgagcacagtctacatggaactgaggagcctgagatctgacgacacggccatgtattactgtgcgagagttggggggcctgtattacgatttcttgactggttgggctacatggacgtctggggccaagggaccacggtcaccgtctcccca

SEQ ID NO: 14546 - DNA, 309 bp, Homo sapiens
  source 1..309: mol_type = other DNA
gcttctggtttcacctttaccagctatggtttcacctgggtgcgacaggcccctggacaagggcttgagcgcatgggatggatcagtgcttacaatggtaacacagattatgcacagagcctccagggcagaatcaccataaccacagacacatccacgaggacagtctacatggaactgaggagcctgagatctgacgacacggccatttattactgtgcgagagttggggggcctgtattacgatttcttgactggttgggctacatggacgtctggggccaagggaccacggtcaccgtctcctca

SEQ ID NO: 14547 - DNA, 309 bp, Homo sapiens
  source 1..309: mol_type = other DNA
gcttctggtttcacctttaccagctatggtttcacctgggtgcgacaggcccctggacaagggcttgagcggatgggatggatcagcgctcacaatggtaacacaaattatgcagagagcctccagggcagaatcaccatgaccacagacacatccacgaggacagtctacatggagctgaggagcctgagatctgacgacacggccatgtattactgtgcgagagttggggggcctgtattacgatttcttgactggttgggctacatggacgtctggggccaagggaccacggtcaccgtctcctca

SEQ ID NO: 14548 - DNA, 309 bp, Homo sapiens
  source 1..309: mol_type = other DNA
gcttctggtttcacctttaccagctatggtttcacctgggtgcgacaggcccctggacaagggcttgagcggatgggatggatcagcgcttacaatggtaacacaaattatgcacagagcctccagggcagaatcaccttgaccacagacacatccacgagcacagtctacatggagctgaggagcctgagatctgacgacacggccatgtattactgtgcgagagttggggggcctgtattacgatttcttgactggttgggctacatggacgtctggggccaagggaccacggtcaccgtctcctca

SEQ ID NO: 14549 - DNA, 309 bp, Homo sapiens
  source 1..309: mol_type = other DNA
acttctggtttcacctttaccagctatggtttcacctgggtgcgacaggcccctggacaagggcttgagcggatgggctggatcagcgcttacaatggtaacacaaattatgcacagagtctccagggcagaatcaccatgaccacagacacacccacgagcacagtctacatggagctgaggagcctgagatctgacgacacggccatatattactgtgcgagagttggggggcctgtattacgatttcttgactggctgggctacatggacgtctggggccaagggaccacggtcatcgtctcctca

SEQ ID NO: 14550 - DNA, 309 bp, Homo sapiens
  source 1..309: mol_type = other DNA
gcttctggtttcacctttaccagctatggtttcacctgggtgcgacaggcccctggacaagggcttgagcggatgggatggatcagcgctcacaatggtaacacaaattatgcacagagcctccagggcagaatcaccatgaccacagacacatccacgagaacagtctacatggagctgaggagcctgagatctgacgacacggccatgtattactgtgcgagagttggggggcctgtattacgatttcttgactggttgggctacatggacgtctggggccaagggaccacggtcaccgtctcctca

SEQ ID NO: 14551 - DNA, 309 bp, Homo sapiens
  source 1..309: mol_type = other DNA
gcttctggtttcacctttaccagctatggtttcacctgggtgcgacaggcccctggacaagggcttgagcggatgggatggatcagcgctcataatggtaacacaaattatgcacagagcctccagggcagaatcaccatgaccatggacacatccacgagcacagtctacatggaactgaggagcctgagatctgacgacacggccatgtattactgtgcgagagttggggggcctgtattacgatttcttgactggttgggctacatggacgtctggggccaagggaccacggtcaccgtctcccca

SEQ ID NO: 14552 - DNA, 309 bp, Homo sapiens; identical to SEQ ID NO: 14551
  source 1..309: mol_type = other DNA

SEQ ID NO: 14553 - DNA, 309 bp, Homo sapiens
  source 1..309: mol_type = other DNA
gcttctggtttcacctttaccagctatggtttcacctgggtgcgacaggcccctggacaagggcttgagcggatgggatggatcagcgcttacaatggtaacacaaattatgcacagagcctccagggcagaatcaccataaccacagacacatccacgagcacagtctacatggaactgaggagcctgagatctgacgacacggccatgtattactgtgcgagagttggggggcctgtattacgatttcttgactggttgggctacatggacgtctggggccaagggaccacggtcaccgtctccgca

SEQ ID NO: 14554 - DNA, 303 bp, Homo sapiens
  source 1..303: mol_type = other DNA
gcatctggatacaccttcaccaggtactatatgcactgggtgcgacaggcccctggacaagggcttgagtggatgggaataatcaacccttatgatgctaccacaagctacgcacagaggtttcagggcagagtcaccatgaccagcgacacgtccacgagcacattctatatggacctgagcagcctgagatctgaggacacggccgtgtattactgtgggagagcttcagagagatattgtagtagaactagctgctatccggactactggggccagggaaccctggtcaccgtctcctca

SEQ ID NO: 14555 - DNA, 304 bp, Homo sapiens
  source 1..304: mol_type = other DNA
ggcatctggatacaccttcacccgctactatatgcactgggtgcgacaggcccctggacaagggcttgaatggatgggaataatcaaccctagtgatggtaccacggcctacgcacagaagttccagggcagagtcaccgtgactagggacacgtccacgagcacagtgtatatggacctgagcagcctgagatctgaggacacggccgtttattactgtgggagagcttcagagcgatattgtagtaggaccagttgctatcctgactactggggccagggaaccctggtcaccgtctcctca

SEQ ID NO: 14556 - DNA, 303 bp, Homo sapiens
  source 1..303: mol_type = other DNA
gcatctggatacaccttcaccacatactatatgcactgggtgcgacaggcccctggacaagggcttgagtggatgggaataatcaacccttttgatgataccacaagctacgcacagaagttccagggcagagtcaccatgaccagggacacgtccacgagcacattctatatggacctgagcagcctggcatctgaggacacggccgtttattactgtgggagagcttcagagagatattgtagtagaaccagctgctatccggactactggggccagggaaccctggtcaccgtctcctca

SEQ ID NO: 14557 - DNA, 303 bp, Homo sapiens
  source 1..303: mol_type = other DNA
gcatctggatacaccttcaccagctactatatacactgggtgcgacaggcccctggacaagggcttgagtggatgggaataatcaaccctagtgatcataccacaagctacgcacagaagttccagggcagagtcaccatgaccagggacacgtccacgagcacagtctatatggacctgagcagcctgagatctgaggacacggccgtgtattactgtgggagagcttcagagagatattgtagtcgtaccagctgctatccggactactggggccagggaaccctggtcaccgtctcctca

SEQ ID NO: 14558 - DNA, 303 bp, Homo sapiens
  source 1..303: mol_type = other DNA
gcatctggatacaccttcaccaggtactttatgcactgggtgcgacaggcccctggacaaggccttgagtggatgggaataatcaacccttatgatgctaccacaagctacgcacagaggtttcagggcagagtcaccatgaccagcgacacgtccacgagcacattctatatggacctgagcagcctgagatctgaggacacggccgtgtattactgtgggagagcttcagagagatattgtagtagaactagctgctatccggactactggggccagggaaccctggtcaccgtctcctca

SEQ ID NO: 14559 - DNA, 303 bp, Homo sapiens
  source 1..303: mol_type = other DNA
gcatctggatacaccttcaccaggtactatatgcactgggtgcgacaggcccctggacaagggcttgagtggatgggaataatcaacccttatgatgctaccacaagctacgcacagaggtttcagggcagagtcaccatgaccagcgacacgtccacgagcacattctatatggacctgagcagcctgagatctgaggacacggccgtatattactgtgggagagcttcagagagatattgtagtagaactagttgctatccggactactggggccagggaaccccggtcaccgtctcccca

SEQ ID NO: 14560 - DNA, 298 bp, Homo sapiens
  source 1..298: mol_type = other DNA
tgcagcctctggattcaggtttataaattattggatgagctggttccgccaggctccagggagggggctggagtggctggccaatataaagcaggatggaagtgagacatactatgtggactctgtgaagggccgattcaccatctccagagacaacgccaagaactcgctctatgtgcaattgaacagcctgacagtcgaggacacggccgtatattactgtgcgagagatcgggagtatggtgggagccacccgattgaccactggggccagggaaccctggtcagcgtctcctca

SEQ ID NO: 14561 - DNA, 298 bp, Homo sapiens
  source 1..298: mol_type = other DNA
tgcagtctctggattcaggtttagaaattattggatgagctggttccgccaggctccagggaaggggctggagtggctgggcaatataaagcaggatggcagtgagacatactatatggagtctgtggagggccgattcatcatctccagagacaacgccaagtactcactctatgtgcaattgaacagcctgacagtcgaggacacggccgtatattactgtgcgagagatcgggagtatggtgggagccacccgatagaccactggggcccgggaaccctggtcaccgtctcctta

SEQ ID NO: 14562 - DNA, 336 bp, Homo sapiens
  source 1..336: mol_type = other DNA
acacagaccctcgcgctgacctgcacgttctctgggttctcactcagcaccagtggagtgggtgtgggctggatccgtcagcccccagggaaggccctggaatggcttgcattcatttattgggatgatgataagcgctacagcccatctctgaggaccaggctcaccatcaccaaggacacctccaaaaaccaggtggtcctcacaatgaccaccatggaccctgtggacacagccacatattactgtgcacacaggttgtcgggccatagcggtggctgggacgctggctacttagacttctggggcccgggaaccctggtcaccgtctcctca

SEQ ID NO: 14563 - DNA, 336 bp, Homo sapiens
  source 1..336: mol_type = other DNA
acacagaccctcgcgctgacctgcacgttctctggcttctcactcagcaccagtggagtgggtgtgggctggatccgtcagcccccagggaaggccctggaatggcttgcattcatttattgggatgatgataagcgctacagcccatctctgaggaccaggctcaccatcaccaaggacacctccaaaaaccaggtggtcctcacaatgaccaccatggaccctgtggacacagccacatattactgtgcacacaggttgtcgggccatagcggtggctgggacgctggctacttagacttctggggccagggaaccctggtcaccgtctcctca

SEQ ID NO: 14564 - DNA, 336 bp, Homo sapiens
  source 1..336: mol_type = other DNA
acacagaccctcgcgctgacctgcacgttctctgggttctcactcagcaccagtggagtgggtgtgggctggatccgtcagcccccagggaaggccctggaatggcttgcattcatttattgggatgatgataagcgctacagcccatctctgaggaccaggctcaccatcaccaaggacacctccaaaaaccaggtggtcctcacaatgaccaccatggaccctgtggacacagccacatattactgtgcacacaggttgtcgggccatagcggtggctgggacgctggatacttagacttctggggccagggaaccctggtcaccgtctcctca

SEQ ID NO: 14565 - DNA, 336 bp, Homo sapiens
  source 1..336: mol_type = other DNA
acacagaccctcgcgctgacctgcacgttctctgggttctcactcagcaccagtggagtgggtgtgggctggatccgtcagcccccagggaaggccctggaatggcttgcattcatttattgggatgatgataagcgctacagcccatctctgaggaccaggctcaccatcaccaaggacacctccaaaaaccaggtggtcctcacaatgaccaccatggaccctgtggacacagccacatattactgtgcacacaggttgtcgggccacagcggtggctgggacgctggctacttagacttctggggcccgggaaccctggtcaccgtctcctca

SEQ ID NO: 14566 - DNA, 336 bp, Homo sapiens
  source 1..336: mol_type = other DNA
acacagaccctcgcgctgacctgcacgttctctgggttctcactcagcaccagtggagtgggtgtgggctggatccgtcagcccccagggaaggcccttgaatggcttgcattcatttattgggatgatgataagcgctacagcccatctctgaggaccaggctcaccatcaccaaggacacctccaaaaaccaggtggtcctcacaatgaccaccatggaccctgtggacacagccacatattactgtgcacacaggttgtcgggccatagcggtggctgggacgctggctacttagacttctggggccagggaatcctggtcaccgtctcctca

SEQ ID NO: 14567 - DNA, 336 bp, Homo sapiens
  source 1..336: mol_type = other DNA
acacagaccctcgcgctgacctgcacgttctctgggttctcactcagcaccaatggagtgggtgtgggctggatccgtcagcccccagggaaggccctggaatggcttgcattcatttattgggatgatgataagcgctacagcccatctctgaggacgaggctctccatctccaaggacacctccaaaaatcaggtggtcctcacaatgaccaccatggaccctgtggacacagccacatattactgtgcacacaggttgtcgggccatagcggtggctgggacgctggctacttagacttctggggcccgggaaccctggtcaccgtctcctca

SEQ ID NO: 14568 - DNA, 319 bp, Homo sapiens
  source 1..319: mol_type = other DNA
tgcagcctctggattctccttcagtagttatgaaatgatttgggtccgccaggctccagggaaggggctggagtgggtttcatacattagtggaagtggtactaccatatactatgcagactccgtgaagggtcgattcgccatctccagagacaacgccaagaactcactgtatttgcaaatgagcatcctgagagccgaggacacggctatttattactgtgcgagagggggcagtggcagcagttcgtcctggaattactactattattattacatggacgtctggggcaaagggaccacggtcaccgtctcctca

SEQ ID NO: 14569 - DNA, 319 bp, Homo sapiens
  source 1..319: mol_type = other DNA
tgcagcctctggattcaccttcaatagttatgaaatgaactgggtccgccaggctccggggaaggggctggagtgggtttcatacattagtggtagtggtagtatcatatactacgcagactctgtgaagggccgattcttcatctccagagacaacgccaagaactcactgtatctgcaagtgaacaacctgacagccgaggacacggctgtttattactgtgcgagagggggcagtggcagcagctcgtcctggaattactactactactactacatggacgtctggggcaaagggaccacggtcaccgtctcctca

SEQ ID NO: 14570 - DNA, 319 bp, Homo sapiens; identical to SEQ ID NO: 14569
  source 1..319: mol_type = other DNA

SEQ ID NO: 14571 - DNA, 304 bp, Homo sapiens
  source 1..304: mol_type = other DNA
tacagcctctggattcacctttggcagctatggcatgagctgggtccgccaggctccagggaaggggctggagtgggtctcaggtttcagtggtagtggaactagtacatattacgcagcctccgtgaagggccggttcaccatctcccgagacaggtcgacgaacacgctgtatctgcaaatgaacagcctgagagccgaagacacggccgtgtatttctgtgcgaaagatctttcgtcctacataccaacagctggctcctttgactactggggccggggaaccctggtcaccgtctcctca

SEQ ID NO: 14572 - DNA, 304 bp, Homo sapiens
  source 1..304: mol_type = other DNA
tacagcctctggattcacctttagcagctatggcatgagctgggtccgccaggctccagggaaggggctggagtgggtctcaggtttcagtggtagtggaactagcacatattacgcagcctccgtgaagggccggttcaccatttcccgagacaggacgaggaacacgctgtatctgcaaatgaacagcctgagagccgaagacacggccgtgtattactgtgcgaaagatctttcgtcctacataccaacagctggctcctttgactactggggccggggaaccctggtcaccgtctcctca

SEQ ID NO: 14573 - DNA, 304 bp, Homo sapiens
  source 1..304: mol_type = other DNA
tacagcctctggattcacctttggcagctatggcatgagctgggtccgccaggctccagggaaggggctggagtgggtctcaggtttcagtggtagtggaactagtacatattacgcagcctccgtgaagggccggttcaccatctcccgagacaggtcgacgaacacgttgtatctgcaaatgaacagcctgagagccgatgacacggccgtgtacttctgtgcgaaagatctgtcgtcctacataccaacagcaggctcctttgactactggggccggggaaccctggtcaccgtctcctca

SEQ ID NO: 14574 - DNA, 345 bp, Homo sapiens
  source 1..345: mol_type = other DNA
acacagaccctcacgctgacctgcaccttctctgggttctcactcagcactactggagtgggtgtgggctggatccgtcagcccccaggaaaggccctggagtggcttgcgctcatttattgggatgatgataagcgctacagcccatctctgaagagcaggctcaccatcaccaaggacacctccaaaaacctggtggtccttacaatgaccaacgtagaccctgtagacacagcctcatattattgtgcacacagacaggatggatcttgtactcctaccaggtgcaatacccactggggctttgactactggggccagggagccctggtcaccgtctcctca

SEQ ID NO: 14575 - DNA, 345 bp, Homo sapiens
  source 1..345: mol_type = other DNA
acacagaccctcacgctgacctgcaccttctctgggttctcactcagcactagtggagtgggtgtgggctggatccgtcagcccccaggaaaggccctggagtggcttgcgctcatttattgggatgatgataagcgctacagcccatctctgaagagcaggctcaccatcgccaaggacacctccaaaaacctggtggtccttataatgaccaacatggaccctgtggacacagcctcatattattgtgcacacagacaggatggatcttgtactcctacgaggtgcaatacccactggggctttgactactggggccagggagccctggtcaccgtctcctca

SEQ ID NO: 14576 - DNA, 345 bp, Homo sapiens
  source 1..345: mol_type = other DNA
acacagaccctcacgctgacctgcaccttctctgggttctcactcagcactagtggagtgggtgtgggctggatccgtcagcccccaggaaaggccctggagtggcttgcgctcatttattgggatgatgataagcgctacagcccatctctgaagagcaggctcaccatcaccaaggacacctccaaaaacctggtggtccttataatgaccaacatggaccctgtggacacagcctcatattattgtgcacacagacaggatggatcttgtactcctacgaggtgcaatacccactggggctttgactactggggccagggagccctggtcaccgtctcctca

SEQ ID NO: 14577 - DNA, 345 bp, Homo sapiens
  source 1..345: mol_type = other DNA
acacagaccctcacgctgacctgcaccttctctgggttctcactcagcactactggagtgggtgtgggctggatccgtcagcccccaggaaaggccctggagtggcttgcgctcatttattgggatgatgataagcgctacagcccatctctgaagagcaggctcaccatcaccaaggacacctccaaaaacctggtggtccttataatgaccaacgtagaccctgtagacacagcctcatattattgtgcacacagacaggatggatcttgtactcctaccaggtgcaatacccactggggctttgactactggggccagggagccctggtcaccgtctcctca

SEQ ID NO: 14578 - DNA, 322 bp, Homo sapiens
  source 1..322: mol_type = other DNA
cgcagtgtctggccgtcgtttcactgacctctggatgacctgggtccgccagggtccagggaagggcctggagtgggttgcgcgtatcaaaggcgaagaagacggtgaatctaaagactacgctgaacgcgtgaaagggagattctccatttccagagatgagtcaagaagaactgtttatctccaaatgaacaatctgcaagtcgacgactcagccgtctattactgctgcactggagacgtcgactatggcagtggtcgtcattacccagcaaactacttcgacacatggggccagggaacccgagtcctcgtctcctct

SEQ ID NO: 14579 - DNA, 322 bp, Homo sapiens
  source 1..322: mol_type = other DNA
cgcagtgtctggccgtcgtttcactgacctctggatgacctgggtccgccagggtccagggaagggcctggagtgggttgcgcgtatcaaaggcgaagaagacggtgaatctaaagactacgctgaacgcgtgaaagggagattctccatttccagagatgagtcaagaagaactgtttatctccaaatgaacaatctgcaagtcgacgactcagccgtctattactgctgcactggagacgtcgactatggcagtggtcgtcattacccagcaaactatttcgacacatggggccagggaacccgagtcctcgtctcctct

SEQ ID NO: 14580 - DNA, 304 bp, Homo sapiens
  source 1..304: mol_type = other DNA
tgcagcctctggattcaccttcagtagctatggcatgcactgggtccgccaggctccaggcaaggggctggagtgggtggcagttatatcatatgatggaagttatacatcctatgcagactccgtgaagggccgattcaccatctccagagacaattccaagaacacgctgtttctggaaatgaacagcctgagagctgaggacacggctgtatattactgtgcgaaagaccagcacttggtactatattggtgggatgcttttgatatctggggccaagggacaatggtcaccgtctcttca

SEQ ID NO: 14581 - DNA, 304 bp, Homo sapiens
  source 1..304: mol_type = other DNA
tacagcctctgggttcaacttcgggacttatggcatgcactgggtccgccaggctccaggcaaggggctggagtgggtggcggttatttcatatgatggaagttataaatcatacgcagagtccgtggaggggcgattcaccatctctagagacgattccaagaacacgctgtctctgcaaatgaaaagcgtgagagatgaggacacggctgtgtatttctgtgcgaaagaccagcacctggtattatattggtgggatgcctttgatatctggggccgagggacactggtcaccgtctcttca

SEQ ID NO: 14582 - DNA, 304 bp, Homo sapiens
  source 1..304: mol_type = other DNA
tacagcctctgggttcaacttcaggaattatggcatgcactgggtccgccaggctccaggcaaggggctggagtgggtggcggttatttcatatgatggaagttataaatcatacgcagagtccgtggaggggcgattcaccatctccagagacaattccaagaacacgctgtctctgcaaatgaaaagcgtgagagatgaggacacggctgtgtattactgtgcgaaagaccagcacctggtattatattggtgggatgcttttgatatctggggccgagggacactggtcaccgtctcttca

SEQ ID NO: 14583 - DNA, 310 bp, Homo sapiens
  source 1..310: mol_type = other DNA
tgcagcctctggattcgcctttgacgactatggcatgagttgggtccgccaggctccagggaaggggctggagtgggtctcagctattagtggtgggggtgatagcactttctacgcagactccgtgaagggccgcttcaccatctccagagacaattccaagaacacactgtttctgcaaatgaacagcctgagagccgaggacacggccctatattactgtgcgaaacagcactattacgatatcttgactggttactactactactttgaatcctggggccagggaaccctggtcaccgtctcctca

SEQ ID NO: 14584 - DNA, 310 bp, Homo sapiens
  source 1..310: mol_type = other DNA
tgcagcctctggattcgcctttgacgactatggcatgagttgggtccgccaggctccagggaaggggctggagtgggttgcagcaatcagtggtgggggtgatagcactttctacgcagactccgtgaagggccggttcaccatctccagagacaattccaagaacacactgtttcttcaaatgaacagcctgagagccgaggacacggccctgtactactgtgcgaaacaacattattacgatattttgactggttactactactactttgaatcctggggccagggaaccctggtcaccgtctcctca

SEQ ID NO: 14585 - DNA, 286 bp, Homo sapiens
  source 1..286: mol_type = other DNA
tgcagcctctggattcacattcagagcctattggatgagttgggtccgccaggctccagggaaggggctagagtgggtggccaacataaaaggagacggaagtctgaaaagctatgtggactctgtgaagggccgattcaccatctccagagacaacaccaaagagacactgtctctgcaaatgaacagcctgggagacgaggacacggctgtgtatcactgtgtgagagaggacctctatgcttttgaaatctggggccaagggacaaaggtcacagtctcttca

SEQ ID NO: 14586 - DNA, 286 bp, Homo sapiens
  source 1..286: mol_type = other DNA
tgcagcctctggattcacctttagtgcctattggatgagttgggtccgccaggctccagggaaggggctggagtgggtggccaacataaaacaagacggaagtatgaaaacctatgtggactctgtgaagggccgattcaccatctccagagacaatacaaaagagacaatgtatctgcaaatgaacagcctgggagacgaggacacggctttgtattactgtgtgagagaggacctctatgcttttgaaatctggggccaagggacaaaggtcacagtctcttca

SEQ ID NO: 14587 - DNA, 286 bp, Homo sapiens
  source 1..286: mol_type = other DNA
tgcagcctctggattcacctttcgtctctattggatgagttgggtccgccaggctccagggaaggggctggagtgggtggccaacataaaagaagacggaagtaggaaaacctatgtggactctgtgaggggccgattcaccatctccagagacaataccaaagagacaatgtatctgcaaatgaacagcctgggagacgaggacacggctgtgtattactgtgtgagagaggacctctatgcttttgaaatctggggccaagggacaaaggtcacagtctcttca

SEQ ID NO: 14588 - DNA, 286 bp, Homo sapiens
  source 1..286: mol_type = other DNA
tgcagcctctggattcacctttcgtctctattggatgagttgggtccgccaggctccagggaaggggctggagtgggtggccaacataaaagaagacggaagtaggaaaacctatgtggactctgtgaggggccgattcaccatctccagagacaataccaaagagacaatgtatctgcaaatgaacagcctgggagacgaggacacggctgtgtattactgtgtgagagaggacctctatgcctttgaaatctggggccaagggacaaaggtcacagtctcttca

SEQ ID NO: 14589 - DNA, 286 bp, Homo sapiens
  source 1..286: mol_type = other DNA
tgcagcctctggattcacctttcgtctctattggatgagttgggtccaccaggctccagggaaggggctggagtgggtggccaacataaaagaagacggaagtaggaaaacctatgtggactctgtgaggggccgattcaccatctccagagacaataccaaagagacaatgtatctgcaaatgaacagcctgggagacgaggacacggctgtgtattactgtgtgagagaggacctctatgcttttgaaatctggggccaagggacaaaggtcacagtctcttca

SEQ ID NO: 14590 - DNA, 286 bp, Homo sapiens
  source 1..286: mol_type = other DNA
tgcagcctctggattcacctttagtggctattggatgagctgggtccgccaggctccagggaaggggctggagtgggtggccaacataaaaccagacggaagtttgaaagactatgtggacgctgtgaagggccgattcaccatctccagagacaacaccaaagagacactgtatctgctaatgaatagcctgggagacgaggacacggctgtgtatcactgtgtgagagaggacctctatgcttttgaaatctggggccaagggacaaaggtcacagtctcttca

SEQ ID NO: 14591 - DNA, 286 bp, Homo sapiens
  source 1..286: mol_type = other DNA
tgcagcctctggattcacctttagtgtctattggatgagttgggtccgccaggctccagggaaggggctggagtgggtggccaacataaaagaagacggaagtaggaaaacctatgtggactctgtgaagggccgattcaccatctccagagacaataccaaagagacaatgtatctgcaaatgaacagcctgggagacgaggacacggctgtgtattactgtgtgagagaggacctctatgcttttgaaatctggggccaagggacaaaggtcacagtctcttca

SEQ ID NO: 14592 - DNA, 286 bp, Homo sapiens
  source 1..286: mol_type = other DNA
tgaagcctctggattcacctttagaggctattggatgagctgggtccgccaggctccagggaaggggctggagtgggtggccaacataaaacaggacggaagtatgaaaagttatgtggactctgtgaagggccgattcaccatctccagagacaacaccaaagagacactatttctgcaaatgaacagcctgggagacgaggactcggctgtgtattactgtgtgagagaggacctctatgcttttgaaatctggggccaagggacaaaggtcatagtctcttca

SEQ ID NO: 14593 - DNA, 286 bp, Homo sapiens
  source 1..286: mol_type = other DNA
tgcagcctctggattcacttttcgtctctattggatgagttgggtccgccaggctccagggaaggggctggagtgggtggccaacataaaagaagacggaagtaggaaaacctatgtggactctgtgaggggccgattcaccatctccagagacaataccaaagagacaatgtatctgcaaatgaacagcctgggagacgaggacacggctgtgtattactgtgtgagagaggacctctatgcttttgaaatctggggccaagggacaaaggtcacagtctcgtca

SEQ ID NO: 14594 - DNA, 286 bp, Homo sapiens
  source 1..286: mol_type = other DNA
tgcagcctctggattcacttttcgtctctattggatgagttgggtccgccaggctccagggaaggggctggagtgggtggccaacataaaagaagacggaagtaggaaaacctatgtggactctgtgaggggccgattcaccatctccagagacaataccaaagagacaatgtatctgcaaatgaacagcctgggagacgaggacacggctgtgtattactgtgtgagagaggacctctatgcttttgaaatctggggccaagggacaaaggtcacagtctcttca

SEQ ID NO: 14595 - DNA, 298 bp, Homo sapiens
  source 1..298: mol_type = other DNA
ggcttctggttacagctttagcaactatggtatcacctgggtgcgacaggcccctggacaaggccttgagtggatgggatggatcagcgcttacaatggtcacacaaggtttgcacagaagttccagggcagagtcaccatgaccacggacgcatccacgagtacagcctacatggagctgaggagcctcagatctgacgacacggccgtgtattactgtgcgagagattttatgatttttggggaaattttccggttcgacccctggggccagggcaccctggtcaccgtctcatca

SEQ ID NO: 14596 - DNA, 298 bp, Homo sapiens
  source 1..298: mol_type = other DNA
ggcttctggttacacctttaccaactatggtatcacctgggtgcgacaggcccctggacaaggccttgagtggatgggatggatcagcgcttacaatgggcacacaaggtttgcacagaagttccagggcagagtcaccatgaccacaaacacatccacgagtacagcctacatggagctgaggagcctcacatctgacgacacggccgtatattactgtgcgagagactttatgatttttggagagattttccggttcgacccctggggccagggaacccgggtcaccgtctcctca

SEQ ID NO: 14597 - DNA, 303 bp, Homo sapiens
  source 1..303: mol_type = other DNA
aagggttctggatacagctttaccagctactggatcacctgggtgcgccagatgcccgggaaaggcctggagtggatggggaggattgatcctagtgactcttctaccaactacagtccgtccttccgaggccacgtcaccatctcagctgacaagtccatcagcactgcctacttgcagtggagcagcctgaaggcctcggacaccgccatgtattactgtgcgagaccaccaacctggaactactttccgaatgatgcttttgatgtctggggccaagggacaatggtcaccgtctcttca

SEQ ID NO: 14598 - DNA, 303 bp, Homo sapiens; identical to SEQ ID NO: 14597
  source 1..303: mol_type = other DNA

SEQ ID NO: 14599 - DNA, 303 bp, Homo sapiens
  source 1..303: mol_type = other DNA
aagggttctggatacagctttaccagctactggatcacctgggtgcgccagatgcccgggaaaggcctggagtggatggggaggattgatcctagtgactcttctaccaactacagtccgtccttccgaggccacgtcaccatctcagctgacaagtccatcagcactgcctacttgcagtggagcagcctgaaggcctcggacaccgccatgtattactgtgcgagaccaccaacctggaactactttccgaatgatgcttttgatgtctggggccaagggacaatggtcatcgtctcttca

SEQ ID NO: 14600 - DNA, 295 bp, Homo sapiens
  source 1..295: mol_type = other DNA
tgcagcctcagcattcacctttagcagctatgccatgagctgggtccgccagtctccagggaaggggctggagtgggtctcaactgttagtactagtggtgctggcacatactacgcagtctccgtgaagggccggttcaccatctccagagacaattccaagaacacactgtatctgcaaatgaacagcctgagagccgaggacacggccgtatattactgtgcgaaagatcggggcagtggctggtactactttgacgactggggccagggaaccctggtcaccgtctcctca

SEQ ID NO: 14601 - DNA, 295 bp, Homo sapiens
  source 1..295: mol_type = other DNA
tgcagcctcagcattcacctttagcagctatgccatgagctgggtccgccagtctccagggaaggggctggagtgggtctcaactgttagtactagtggtgctggcacatactacgcagtctccgtgaagggccggttcaccatctccagagacaattccaagaacacactgtatctgcaaatgaacagcctgagagccgaggacacggccgtatattactgtgcgaaagatcggggcagtggctggtactactttgacgactggggccagggaaccctggtcaccgtcttctca

SEQ ID NO: 14602 - DNA, 295 bp, Homo sapiens; identical to SEQ ID NO: 14600
  source 1..295: mol_type = other DNA

SEQ ID NO: 14603 - DNA, 295 bp, Homo sapiens
  source 1..295: mol_type = other DNA
tgcagcctcagcattcacctttagcagctatgccatgagctgggtccgccagtctccagggaaggggctggagtgggtctcaactgttagtactagtggtgctggcacatactacgcagtctccgtgaagggccggttcaccatctccagagacaactccaagaacacactgtatctgcaaatgaacagcctgagagccgaggacacggccgtatattactgtgcgaaagatcggggcagtggctggtactactttgacgactggggccagggaaccctggtcaccgtctcctca

SEQ ID NO: 14604 - DNA, 280 bp, Homo sapiens
  source 1..280: mol_type = other DNA
tgcagcctctggattcaccttcaaagattactatatgacatggattcgtcaggttaaagggaaggggctggaatggatttcttttattgattatggcggtcacgcaaattatgcggagtctgtgaatggccggttttccgtctccagagacaacgacagggccacactttatctggacatgagtggcctcagactcgacgacacggctacatattattgtggtagaggccactggggccctgactcttggggccagggaaccctggtcacggtctcctca

SEQ ID NO: 14605 - DNA, 280 bp, Homo sapiens
  source 1..280: mol_type = other DNA
tgcagcctctggattcaggttcaacgactactatatgacatggattcgtcagggtgcagggaaggggctggaatggatttcttttattgattataccggtcacgcagattatgcggactctgtgaatggccggttttccgtctccagagacaacgaaagggacacattttatctgcacatgaatgccctcagagtcgacgacacgggcacatattattgtggtcgaggccactggggccctgactcttggggccagggaaccctggtcacggtctcctca

SEQ ID NO: 14606 - DNA, 295 bp, Homo sapiens
  source 1..295: mol_type = other DNA
cactgtctctggtgactccatgagtatttactactggagctgggtccggcagcccccggggaagggactggagtggattgcgtatatctcttacagtgggagcgccacctacagcccctccctcaagagtcgagtcaccatattaatagacacgtccaagaaccagttctccctgaaactgaggtctgtgaccgctgcggacacggccgtgtattactgtgcgagacggagtacaactggatcgacgcggtggttcgacccctggggccagggaaccctggtcaccgtctcctca

SEQ ID NO: 14607 - DNA, 295 bp, Homo sapiens
  source 1..295: mol_type = other DNA
cactgtctctggtgactccatgggtgtttactactggagctgggtccggcagcccccggggaagggactggagtggattgcatatatctcttatagtgggagcgccacctacagcccctcccttaagagtcgagtcaccatattaatagacacgtccaacaaccagttctccctgaaactgaggtctgtgaccgctgcggacacggccgtgtattactgtgcgagacggagtacaactggatcgacgcggtggttcgacccctggggccagggaaccctggtcaccgtctcctca

SEQ ID NO: 14608 - DNA, 289 bp, Homo sapiens
  source 1..289: mol_type = other DNA
tgcagcctctggattcacattcagtgattactggattcactgggtccgccaagctccaggtaaggggctggtgtgggtctcacgcattaataatgatgggagagacacaatatacgcggactccgtgaggggccgattcacctgctccagagacaaccgcaagaacacgttgtatctgacaatgaacagtctgagagtcgacgacacggctgtgtattactgtgcaagaggcggcttcagccattcttttgactcctggggtcagggaaccgtggtcaccgtctcctca

SEQ ID NO: 14609 - DNA, 289 bp, Homo sapiens
  source 1..289: mol_type = other DNA
tgcagcctctggattcaccttcagtgattactggattcactgggtccgccaagctccaggtaaggggctgatgtgggtctcacgcattaataatgatgggagtgacacaatatacgcggactccgtgaggggccgattcacctgctccagagacaacgccaagaacacgttatatctgacaatgaacagtctgagagacgacgacacggctgtgtattattgtgcaagaggcggcttcagtcattcttttgactcctggggtcagggaaccgtggtcaccgtctcctca

SEQ ID NO: 14610 - DNA, 325 bp, Homo sapiens
  source 1..325: mol_type = other DNA
tgcagcctctggattcactttcactaatgcctggatgacctgggtccgccaggctccagggaaggggctggattgggtcggccgtcttaaaagtgaaactgatggtgggactgcagactacgctgcacccgtgaaaggcagattcaccatctcaagagatgattcaaagaacacgctgtatttacaaatgaacagcctggaaatcgaggacacagccatatattactgtaccacagttgaagatttttggagtggttattactatcccaccccccaccgtcccgttgattactggggccagggaaccctggtcaccgtctcctca

SEQ ID NO: 14611 - DNA, 325 bp, Homo sapiens; identical to SEQ ID NO: 14610
  source 1..325: mol_type = other DNA

SEQ ID NO: 14612 - DNA, 325 bp, Homo sapiens
  source 1..325: mol_type = other DNA
tgcagcctctggattcactttcactaacgcctggatgacctgggtccgccaggctccagggaaggggctggagtgggtcggccgtattaaaagtgaaactgatggtgggactgcagactacgctgcacccgtgaaaggcagattcaccatctcaagagatgattcaaagaacacgctgtatttacaaatgaacagcctggaaatcgaggacacagccgtgtattactgtaccacagttgaagatttttggagtggttattattatcccaccccccaccgtcccgttgattactggggccagggaaccctggtcaccgtctcctca

SEQ ID NO: 14613 - DNA, 325 bp, Homo sapiens
  source 1..325: mol_type = other DNA
tgcagcctctggattcactttcactaatgcctggatgacctgggtccgccaggctccagggaaggggctggattgggtcggccgtcttaaaagtgaaactgatggtgggactgcagactacgctgcacccgtgaaaggcagattcaccatctcaagagatgattcaaagaacacgctgtatttacaaatgaacagcctggaaatcgaggacacagccatatattactgtaccacagttgaagatttttggagtggttattactatcccaccccccaccgtcccgttgattactggggccagggaaccctggtcaccgcctcctca

SEQ ID NO: 14614 - DNA, 286 bp, Homo sapiens
  source 1..286: mol_type = other DNA
tgcaggctctggattcactctcactaacgtctggataagatggatccgccaggctccagggaaggggctggagtggattggccgtattaaaagtaaagctgatggtgggacaacggactacgctgcacccgtgaaaggcagattcaccatctcaagagatgattcaaaaaacacactctatctacagatgaacagcctgaaaaccgaggacacagccgtgtattactgtttcacagaccgttcccttggctactggggccagggaaccctggtcaccgtctcctca

SEQ ID NO: 14615 - DNA, 286 bp, Homo sapiens; identical to SEQ ID NO: 14614
  source 1..286: mol_type = other DNA

SEQ ID NO: 14616 - DNA, 286 bp, Homo sapiens
  source 1..286: mol_type = other DNA
tgcaggctctggattcgctctcactaacgtctggataagatgggtccgccaggctccagggaaggggctggagtggattggccgtattaaaagcatggctgaaggtgggacaacggactacgctgcacccgtgaaaggcagattcaccatctcaagagatgattcaaaaaacacactctatctacagatgaacagcctgaaaatcgacgacacagccgtttattactgtttcacagaccgttcccttgggtactggggccagggaaccctggtcaccgtctcctca

SEQ ID NO: 14617 - DNA, 292 bp, Homo sapiens
  source 1..292: mol_type = other DNA
tactgtctctggtgactccgtcagcagacattacttaacttgggtccggcagtccccagggaagggtctggagtggattggatatagatattccactgtgaatgtccagtacaatccctccctgaagagtcgcgtctccatatcagtggacacgaccgagaaccagtctatcctgaggctgagttctgtgaccgccgcggacacggccgtctattactgtgcgagatggaatagttatgaaaacttttacttagatacctggggccagggggccccggtaaccgtctcttca

SEQ ID NO: 14618 - DNA, 292 bp, Homo sapiens
  source 1..292: mol_type = other DNA
tactgtctctggtgactccgtcagcagacattacttaagttgggtccggcagtccccagggaagggtctggagtggattggatatagatattccactgtgaatgtccagtacaatccctccctgaagagtcgcgtctctatatcagtggacacgaccgagaaccagtctatcctgaggctgagttctgtgaccgccgcggacacggccgtctattactgtgcgagatggaatagttatgaaaacttttacttagatacctggggccagggggccccggttaccgtctcttca

SEQ ID NO: 14619 - DNA, 307 bp, Homo sapiens
  source 1..307: mol_type = other DNA
tgcagggtctggattcacgtttagccactttgccatgagctgggtccgccaggctccagggaaggggctggagtgggtctcaagtataagtggtagtggtggttacacatactacgcagactccgtgaggggccggttcaccatctccagagacaattccaagaacacgctgtatctgcaaatgaacagcctgagagccgacgacacggccgtatattactgtgcgagagatcgcctcggggcaacagctggcagggggggctggtccgacccctggggccagggaaccctggtcatcgtctcctca

SEQ ID NO: 14620 - DNA, 307 bp, Homo sapiens
  source 1..307: mol_type = other DNA
tgcaggctctggattcatctttagtgactatgccatgagctgggtccgccaggctccagggaaggggctggagtgggtctcagcaatcagtggtagtggtgatagcacatactacgcagcctccgtgaagggccggttcaccatctccagagacaattccaagaaaactctgcatctacagatgagcagcctgggagccgacgacacggccgtatattactgtgcgagagatcgcctcggggcaacagctggcagggggggctggtccgacccctggggccagggaaccctggtcaccgtctcctca

SEQ ID NO: 14621 - DNA, 298 bp, Homo sapiens
  source 1..298: mol_type = other DNA
tgtagcgtctggatttaccttcggtagctatggcatgcactgggtccgtcaggctccaggcaaggggctggagtgggtggcaattatatggtttgatggaggtaaaaaatactatacagactccgtgaggggccgattcaccatctccagagacaattccaagaacacactgtatctgcaaatgaacagcctgacagccgaggacacggctgtgtattactgtgcgagagatgagtcgacctcgggatactattacatggacgtctggggcaaagggaccacggtcaccgtctcctca

SEQ ID NO: 14622 - DNA, 298 bp, Homo sapiens
  source 1..298: mol_type = other DNA
tgcagcgtctggatttaccttcagtagctatggcatgcactgggtccgtcaggctccaggcaaggggctggaatgggtggcaattatatggtttgatggaggtaaaaaatactatacagactccgtgaggggccgattcaccatctccagagacaattccaagaacacgctgtacctgcaaatgaacagcctgacagccgaggacacggctgtgtattactgtgcgagagatgagtcgacctcgggatactattacatggacgtctggggcaaagggaccacggtcaccgtctcctca

SEQ ID NO: 14623 - DNA, 298 bp, Homo sapiens
  source 1..298: mol_type = other DNA
tgcagcgtctggatttaccttcagtagctatggcatgcactgggtccgtcaggctccaggcaaggggctggagtgggtggcaattatatggtttgatggaggtaaaaaatactatacagactccgtgaggggccgattcaccatctccagagacaattccaagaacacgctgtacctgcaaatgaacagcctgacagccgaggacacggctgtgtattactgtgcgagagatgagtcgacctcgggatactattacatggacgtctggggcaaagggaccacggtcaccgtctcctca

SEQ ID NO: 14624 - DNA, 306 bp, Homo sapiens
  source 1..306: mol_type = other DNA
gcctctggagccaccttcagcaactatgctgtcagctgggtgcgacaggcccctggacaagggcttgagtggatgggaagggtcatccctacccttgacgtagcaaactacgcacagaagttccagggcagactcaggattaccgttgacaaatccacgaccacagcctacatggagctgagcagtctgaaatctgaggacacggccatttattactgtgcgactgggggatattgtagtggtgcccggtgttttacggactggttcgacccctggggccagggaaccctggtcaccgtctcctca

SEQ ID NO: 14625 - DNA, 306 bp, Homo sapiens
  source 1..306: mol_type = other DNA
gcctctggaggcaccttcagcaactatgctgtcagctgggtgcgacaggcccctggacaagggcttgagtggatgggaagggtcatccctacccttgacgtagcaaactacgcacagaagttccagggcagactcaggattagcgttgacaaatccacgaccacagcctacatggagctgagcagtctgaaatctgaggacacggccatatattactgtgcgactgggggatattgtagtggtgcccggtgttttacggactggttcgacccctggggccagggaaccctggtcaccgtctcctca

SEQ ID NO: 14626 - DNA, 304 bp, Homo sapiens
  source 1..304: mol_type = other DNA
cactgtctctggtgactccttcaacagtactacttactactggggctgggtccgccagcccccagggaaggggctggagtggattacgagtgtctcttacagtgggcgcccctactacaacccgtccctcaagagtcgagccaccatatccgtagacacgtccaagagtcagttctccctgaagctcagcgctgtgaccgccgcagacacggctgtctattactgtgcgagacatttggcggaggccctccctgcgggggcggttgagtactggggccagggaaccctggtcaccgtctcctca

SEQ ID NO: 14627 - DNA, 304 bp, Homo sapiens
  source 1..304: mol_type = other DNA
cactgtctctggtgactccttcaccagtactacttactactggggctgggtccgccagcccccagggaaggggctggagtggattgcgagtgtctcttatagtgggatcacctactacaacccgtccctcaagagtcgggccaccatttccgtagacacgtccaggagtcagttctccctgaacctcagcgctgtgaccgccgcagacacggctgtctatttctgtgcgagacatttggcggaggccctccctgcgggggcggttgagtactggggccagggaaccctggtcaccgtctcctcg

SEQ ID NO: 14628 - DNA, 291 bp, Homo sapiens
  source 1..291: mol_type = other DNA
ggttctggatacaccttcagtaattttgctatacattgggtgcgtcaggcccccggacaaaggcctgagtggatgggatggatcaacgctgccggtaataaatcagattattcacagaagttccaggacacagtcaccattcgcagggacacatccgctaatatagtctacatggagttgagcagcctgacatctgaagacacggctgtttattactgtgtgcgaggagttcatgccggcgcctggctcgttgactactggggcccgggaaccctgcttaccgtctcctca

SEQ ID NO: 14629 - DNA, 291 bp, Homo sapiens
  source 1..291: mol_type = other DNA
ggttctggatacaccttcagtaattttgctatacattgggtgcgccaggcccccggacaaaggcctgagtggatgggatggatcaacgctgccggtaataaatcagattattcacagaagttccgggacacagccaccattcgcagggacacatccgctagtatagtctacatggagttgagcagcctgacatctgaagacacggctgtgtattactgtgtgagaggagttcatgccggcgcctggctcgttgactactggggcccgggaaccctgcttaccgtctcctca

SEQ ID NO: 14630 - DNA, 291 bp, Homo sapiens
  source 1..291: mol_type = other DNA
ggttctggatacaccttcagtaattttgctatacattgggtgcgccaggcccccggacaaaggcctgagtggatgggatggatcaacgctgccggtaataaatcagattattcacagaagttccaggacacagccaccattcgcagggacacatccgctaatatagtctacatggagttgagcagcctgacatctgaagacacggctgtgtattactgtgtgagaggagttcatgccggcgcctggctcgttgactactggggcccgggaaccctgcttaccgtctcctca

SEQ ID NO: 14631 - DNA, 292 bp, Homo sapiens
  source 1..292: mol_type = other DNA
tgcagcctctggattctcctttagcttctatcccatgagctgggtccgccaggctccagggaaggggctggagtgggtctcagctgttagtaatagtggtgccaatacatactactctgactccgtgaagggccggttcaccatctccagagacaattccaagaacacggtgtatctgcagatgaacagcctgagagccgaggacacggccgtatattactgtgcgaaagagattccggtggacgtctcctttgactactggggccagggtaccctggtcaccgtctcctca

SEQ ID NO: 14632 - DNA, 292 bp, Homo sapiens
  source 1..292: mol_type = other DNA
tgcagcctctggattctcctttagcagctatcccatgagctgggtccgccaggctccagggaaggggctggagtgggtctcagctattagtaatagtggtgccgatacatactactctgactccgtgaagggccggttcaccatctccagagacaattccaagaacacggtgtatctgcagatgaacagcctgagagccgaggacacggccgtatattactgtgcgaaagagattccggtggacgtctcctttgactactggggccagggtaccctggtcaccgtctcctca

SEQ ID NO: 14633 - DNA, 292 bp, Homo sapiens
  source 1..292: mol_type = other DNA
tgcagcctctggattctcctttagtacctatcccatgagctgggtccgccaggctccagggaaggggctggagtgggtctcagcaattagtaacagtggtggcgaaacattctactctgactccgtgaagggccggttcaccgtctccagagacaattccaagaacacggtctttctgcagctgaacagcctgagagccgaggacacggccatttattactgtgcgaaagagattccggtggacgtctcctttgactactggggccagggtaccctggtcaccgtctcctca

SEQ ID NO: 14634 - DNA, 292 bp, Homo sapiens
  source 1..292: mol_type = other DNA
tgcagcctctggattctcctttagcacctatcccatgagctgggtccgccaggctccagggaaggggctggagtgggtctcagcaatcagtaaaagtggtgccgatacatactactctgactccgtgaagggccggttcaccatctccagagacaattccaagaacacggtggatctgcacctgaacagcctgagagccgaggacacggccgtatattactgtgcgaaagagattccggtggacgtctcgtttgactactggggccggggtaccctggtcaccgtctcctca

SEQ ID NO: 14635 - DNA, 285 bp, Homo sapiens
  source 1..285: mol_type = other DNA
gcatctggatactccttcacccactaccttctgcactgggtgcggcaggcccctggacaggggcttgagtggatgggagtaatcaaccctggtaatcgtgacacagtgtacccactgaacttccagggcagagtcagcatgaccagggacacgtccacgagcacagtgtacatggagctgagcagcctgagatatgacgacacggccgtgtattactgtgcgagagaggagtctggggggcgttgggactactggggccagggatccccggtcacgatctcctca

SEQ ID NO: 14636 - DNA, 285 bp, Homo sapiens
  source 1..285: mol_type = other DNA
gcatctggatactccttcacccactaccttctgcactgggtgcgacaggcccctggacaagggcttgagtggatgggaataatcaaccctggtaatggtgacacaatatacgtactgaacttccagggcagagtcagcatgaccagggacacgtccacgagcacagtgtacatggaactgagcagcctgagatatgacgacacggccgtgtattactgtgcgagagaggagtctggggggcgttgggactactggggccagggatccccggtcacgatctcctca

SEQ ID NO: 14637 - DNA, 313 bp, Homo sapiens
  source 1..313: mol_type = other DNA
tgcagcctctggattcaccttaagtaactattggatgagctgggtccgccaggctccagggaaggggctggagtgggtggccaacataaaccaggatggaagtgagcaagactatgtggactctgtgaagggccgattcaccatctccagagacaacgccaagaactcactgtttctgcaaatgaacagcctgagagccgaggacacggccgtgtattactgtgcgcggacccaggaacgatttttggagtgggcaatgataccacttcactttgactactggggccagggaaccctggtcaccgtctcctca

SEQ ID NO: 14638 - DNA, 313 bp, Homo sapiens
  source 1..313: mol_type = other DNA
tgcagcctctggattcacctttagtaactattggatgagctgggtccgccaggctccagggaaggggctggagtgggtggccaacataaagcaggatggaagtgagaaagactatgtggactctgtgaagggccgattcaccatctccagagacaacgccaagaactcactgtttctgcaaatgaacagcctgagagccgaggacacggccgtgtattactgtgcgcggacccaggaacgatttttggagtgggcaatgataccacttcactttgactactggggccagggaaccctggtcaccgtctcctca

SEQ ID NO: 14639 - DNA, 331 bp, Homo sapiens
  source 1..331: mol_type = other DNA
tgcagcctctggactcaccttcagtaattatggcttccactgggtccgccagactccagacaaggggctggagtgggtggcagttatttcatacgatggaagggataaatactattctgagtccgtgaagggccgattcaccatctccagagacaattccaagaacacgctgtatttgcaaatggacagcccgagagctgaggacacggctgtctattactgtgcgaaaatcttttcgagggattgtactagtaccacctgctatttgagccggggctaccactactacatggacgtctggggcaaagggaccacggtcaccgtctcctca

SEQ ID NO: 14640 - DNA, 331 bp, Homo sapiens
  source 1..331: mol_type = other DNA
tgcagcctctggactcaccttcaggaattatggcttccactgggtccgccagactccagacaaggggctggagtgggtggcagttatttcatacgatggaggggacaaatactattctgagtccgtgaagggccgattcaccatctccagagacaattccaagaacacgctgtatttgcaaatggacagcccgagagctgaggacacggctgtctattactgtgcgaaaatcttttcgagggattgtactagtaccacctgctatttgagccggggctaccactactacatggacgtctggggcaaagggaccacggtcaccgtctcctca

SEQ ID NO: 14641 - DNA, 331 bp, Homo sapiens
  source 1..331: mol_type = other DNA
tgcagcctctggactcaccttcagtaattatggcttccactgggtccgccagactccagacaaggggctggagtgggtggcagttatttcatacgatggaagggataaatactattctgagtccgtgaggggccgattcaccatctccagagacaattccaagaacacgctgtatttgcaaatggacagcccgagagctgaggacacggctgtctattactgtgcgaaaatcttttcgagggattgtactagtaccacctgctatttgagccggggctaccactactacatggacgtctggggcaaagggaccacggtcaccgtctcctca

SEQ ID NO: 14642 - DNA, 329 bp, Homo sapiens
  source 1..329: mol_type = other DNA
cagcctctggactcaccttcagtaattatggcttccactgggtccgccagactccagacaaggggctggagtgggtggcagttatttcatacgatggaagggataaatactattctgagtccgtgaagggccgattcaccatctccagagacaattccaagaacacgctgtatttgcaaatggacagcccgagagctgaggacacggctgtctattactgtgcgaaaatcttttcgagggattgtactagtaccacctgctatttgagccggggctaccactactacatggacgtctggggcaaagggaccacggtcaccgtctcctca

SEQ ID NO: 14643 - DNA, 325 bp, Homo sapiens
  source 1..325: mol_type = other DNA
cagtgtctctggtgactccatcagaaattactactggagttgggtccggcagcccccagggaagagactggagtggcttggatacatttactatcgggagaccaccgtctacaacccatccctccagggtcgagtcaccatttccgtagacatgtccaagaaccagatctccctggaggtgaagtctgtgagcgcagcggacacggccgtgtattattgtgcgagagatttaagggaaaaagtggaaggcctcaggaggggctattactactcccatcaacacatggacgtctggggtaaagggaccacggtcaccgtttcctca

SEQ ID NO: 14644 - DNA, 325 bp, Homo sapiens
  source 1..325: mol_type = other DNA
cagtgtctctggtgactccatcagaagtcactactggagctggatccggcagcccccagggaagaggctggagtggatggggtacatttactatagggagaccaccgtctacaacccatccctccagggtcgagtcaccatttcggtagacacgtccaagaaccagatctccctggagctgaggtctgtgagcgcagcggacgcggccgtttattattgtgcgagagatttaagggaaaaagtggaaggcctcaggaggggctattactactcccatcagcacatggacgtctggggcaaagggaccacggtcaccgtttcctca

SEQ ID NO: 14645 - DNA, 325 bp, Homo sapiens
  source 1..325: mol_type = other DNA
cagtgtctctggtgactccatcagaaattactactggagctgggtccggcagcccccagggaagagactggagtggattggatacatttactatcgggagaccaccatctacaacccatccctccagggtcgagtcaccatttccgtagacatgtccaagaaccagatctccctggagctgaagtctgtgagcgcagcggacacggccgtgtattattgtgcgagagatttaagggaaaaagtggaaggcctcaggaggggctattactactcccatcaacacatggacgtctggggcaaagggaccacggtcaccgtttcctca

SEQ ID NO: 14646 - DNA, 307 bp, Homo sapiens
  source 1..307: mol_type = other DNA
tgcaacctctggattcaccttcagtgccgctgctctgcactgggtccgccaggctcccgggaaagggctggaatgggttggccatattagaagtaaacctaataattatctgacagaatatggtgcgtcggtgaggcgcaggttcatcatctccagagatgattcaaagaacacggcgtatctccaaatgaacaacctgaaagccgacgacacggccgtctattactgtaccttaatactggtcactgctactccctattattacatggacgtctggggcagagggaccacggtcaccgtctcctca

SEQ ID NO: 14647 - DNA, 307 bp, Homo sapiens
  source 1..307: mol_type = other DNA
tgaaacctctggattcaccttcagtgccgctgctctgcactgggtccgccaggctcccgggaaagggctggaatgggttggccatattagaagtaaacctaataattatctgacagaatatggtgcgtcggtgaggcgcaggttcatcatctccagagatgattcaaagaacacggcgtatctccaaatgaacaacctgaaagccgacgacacggccgtctattactgtaccttaatactggtcactgctactccctattactacatggacgtctggggcagagggaccacggtcaccgtctcttca

SEQ ID NO: 14648 - DNA, 298 bp, Homo sapiens
  source 1..298: mol_type = other DNA
cactgtctctggtgactccgtcaacagtaatagttactactggaactggatccggcagcccccagggaagggactggagtggattgggtatatctatcacagtgggaccacaaagtacaacccctccttcaagagtcgagtcaccatatcactaaacacgtccaagaaccagttctccctgaagctgaattctgtgaccgctgcggacacggccgtctattactgtgcgacaggggtctggaacgtccaggactggttcgacccctggggccagggaaccctggtcaccgtctcctca

SEQ ID NO: 14649 - DNA, 298 bp, Homo sapiens
  source 1..298: mol_type = other DNA
cactgtctctggtggctccgtcaacagtgggacttactattggaactggctccggcagcccccagggaagggactggagtggattgggtatatctcttacagggggatcaccaaatacaacccctccctcaagggtcgagtcaccatattactagacacgtcccagagccagatctccctgcggctgagctctgtgaccgctgcggacacggccgtctattactgtgcgacaggggtctggaacgtccaggactggttcgacccctggggccagggaaccctggtcaccgtctcctcg

SEQ ID NO: 14650 - DNA, 289 bp, Homo sapiens
  source 1..289: mol_type = other DNA
tgcagcctctggattcacctttggaagttattggatggactgggtccgccaggctccagggaaggggctggagtgggtggccagtataaggacagatgcaactgagaaagactatgtggactctgtgaagggccgattcaccatctccagagacaacgccatgaactcaatgtatctgcaaatgagcagcctgagagccgaggacacggccgtctattactgtgtgagagatcgggggtggggtgctttcgactactggggccagggaaccctggtcaccgtctcctca

SEQ ID NO: 14651 - DNA, 289 bp, Homo sapiens
  source 1..289: mol_type = other DNA
tgcagcctctggattcacctttggaagttattggatggactgggtccgccaggctccagggaaggggctggagtgggtggccagtataaggacagatgcaactgagaaagactatgtggactctgtgaagggccgattcaccatctccagagacaacgccatgaactcactgtatctgcaaatgaacagcctgagagccgaggacacggccgtctattactgtgtgagagatcgggggtggggtgctttcgactactggggccagggaaccctggtcaccgtctcctca

SEQ ID NO: 14652 - DNA, 289 bp, Homo sapiens
  source 1..289: mol_type = other DNA
tgcagcctctggattcacctttgggggttattggatggactgggtccgccaggctccagggaagggactggagtgggtggccagtataaggacagatgcacttgagaaagactatgtggactctgtgaggggccgattcaccatctccagagacaacgccaggaactctctgtatctgcaaatgaacagcctgacagccgcggacacggccgtgtatttctgtgtgagagatcgggggtggggtgctttcgactactggggccagggaaccctggtcaccgtctcctca

SEQ ID NO: 14653 - DNA, 288 bp, Homo sapiens
  source 1..288: mol_type = other DNA
gcttctggaggcaccttcaacagctatgctatcaactgggtgcgacaggcccctggacaagggcttgagtggatgggagggatcatccctatctttggtacagcaaactacgcacagaagttccagggcagagtcacgattaccgcggacgaatccacgagcacagcctacatggagctgagcagcctgagatctgaggacacggccgtgtattactgtgcgatcctaggcggtgctaacgccggggttgactactggggccagggaaccctggtcaccgtctcctca

SEQ ID NO: 14654 - DNA, 288 bp, Homo sapiens
  source 1..288: mol_type = other DNA
gcttctggaggcaccttcaacagctatgctatcaactgggtgcgacaggcccctggacaagggcttgagtggatgggagggatcatccctatctttgttacagcaaactacgcacagaagttccagggcagagtcacgattaccgcggacgaatccacgagcacagcctacatggagctgagcagcctgagatctgaggacacggccgtgtattactgtgcgatcctaggcggtgctaacgccggggttgactactggggccagggaaccctggtcaccgtctcctca

SEQ ID NO: 14655 - DNA, 288 bp, Homo sapiens
  source 1..288: mol_type = other DNA
gcttctggaggcaccttcaacacctatgctatcaactgggtgcgacaggcccctggacaagggcttgagtggatgggagggatcatccctatctttggtacagcaaactacgcacagaagttccagggcagagtcacgattaccgcggacgaatccacgagcacagcctacatggagctgagcagcctgagatctgaggacacggccgtatattactgtgcgatcctaggcggtgctaacgccggggttgactactggggccagggaaccctggtcaccgtctcctca

SEQ ID NO: 14656 - DNA, 301 bp, Homo sapiens
  source 1..301: mol_type = other DNA
tgcagcctctggattcacatcgggattcacatttagtagttattggatgacgtgggtccgccaggctccagggaaggggctggagtgggtggccaatatagaccaaggtggaagtgagaagttctacgcggactctgtgaagggccgattcgccatctccagagacaatgccaaggactccctgtacctggaaatgaacagcctgagactcgacgacacggctctatattactgtgcgagtgtttttaacagtgatggctctgacatctggggccaagggacaatggtcaccgtctcttca

SEQ ID NO: 14657 - DNA, 301 bp, Homo sapiens
  source 1..301: mol_type = other DNA
tgcagcctctggattcacatcgggattcacatttagtagttattggatgacctgggtccgccaggctccagggaaggggctggaatgggtggccaatgtagaccaaggtggaagtgagaagttctatgcggactctgtgaagggccgattcgccatctccagagacaatgccaaggactccctgtacctggaaatgaacagcctgagactcgaggacacggctctatattactgtgcgagtgtttttaacagtgatggttctgacatctggggccaagggacaatggtcaccgtctcttca

SEQ ID NO: 14658 - DNA, 304 bp, Homo sapiens
  source 1..304: mol_type = other DNA
tacaacctctgcattcacctttagtccctatgccatcagctgggtccgccaggctccagggaaggggctggagtggctctcaggtattagtggtagtggtggtagcacatactacgcagactccgtgaagggccggttcaccatctccagagacaattccaagaacacggtgtatctgcaaatgaacagcctgagagccgacgacacggccgtatattactgtgcgaaagttggggttggattacgatttttggagtggttctttgactactggggccagggaaccctggtcaccgtctcctca

SEQ ID NO: 14659 - DNA, 304 bp, Homo sapiens
  source 1..304: mol_type = other DNA
tacaacctctgcattcacctttagcccctatgccatcagctgggtccgccaggctccagggaaggggctggagtggctctcaggtattagtggtagtggtggcagcacatactacgcagactccgtgaagggccggttcaccatctccagagacaattccaagaacacggtgtatctgcaaatgaacagcctgagagccgacgacacggccgtatattactgtgcgaaagttggggttggattacgatttttggagtggttctttgactactggggccagggaaccctggtcaccctctcctca

SEQ ID NO: 14660 - DNA, 304 bp, Homo sapiens
  source 1..304: mol_type = other DNA
tacagcctctggattcacctttaaagactactacatgagttggatccgccaggctccagggaaggggctggagtgggtttcacagattagttctggcgcttctcacactttctacgcagactctgtgaggggccgcttcaccatttccagagacgactccaagaactcagtttatcttcacatgagcagcctgagagtcgaggacacggccctatattattgtacgagagagcgctactttgaaagtagcgcattccgctggttcgacacctggggccaaggaagcccggtcaccgtctcctca

SEQ ID NO: 14661 - DNA, 304 bp, Homo sapiens
  source 1..304: mol_type = other DNA
tacagcctctggattcacctttaaagactactacatgagttggatccgccaggctccagggaaggggctggagtgggtttcacagattagttctggcgcttctcacactttctacgcagactctgtgaggggccgcttcaccatttccagagacgactccaagaactcagtttatcttcacatgagcagcctgagagtcgaggacacggccctatattattgtacgagagagcgctacttcgaaagtagcgcattccgctggttcgacacctggggccaaggaagcccggtcaccgtctcctca

SEQ ID NO: 14662 - DNA, 304 bp, Homo sapiens
  source 1..304: mol_type = other DNA
tacagcctctggattcacctttaaagactactacatgagttggatccgccaggctccagggaaggggctggagtgggtttcacagattagttctggtgcttctcacactttctacgcagactctgtgaggggccgcttcaccatctccagagacgactccaagaactcagtttatcttcacatgagcagcctgagagtcgaggacacggccctatatttttgtacgagagagcgctactttgaaagtagcgcattccgctggttcgacacctggggccaaggaagcccggtcaccgtctcctca

SEQ ID NO: 14663 - DNA, 310 bp, Homo sapiens
  source 1..310: mol_type = other DNA
tgcagcctctggattcacctttagtagctttgccatgagctgggtccgccaggctccagggaaggggctggagtgggtctcaggtattagtggtagtggtggtagcacatactacgcagactccgtgaagggccggttcaccatctccagagacaattccaagaacacgctgtatctgcaaatgaacagcctgagagccgaggacacggccgtctattactgtgcgaaagatcttaccaatattgtcgtggtaccagccctaggggatcttgactactggggccagggaaccctggtcaccgtctcctca

SEQ ID NO: 14664 - DNA, 310 bp, Homo sapiens
  source 1..310: mol_type = other DNA
tgcagcctctggattcacctttagcagctatgccatgagctgggtccgccaggctccagggaaggggctggagtgggtctcaggtattagtggtagtggtggtagcacatactacgcagactccgtgaaggaccggttcaccatctccagagacaattccaagaacacgctgtatctgcaaatgaacagcctgagagccgaggacacggccgtatattactgtgcgaaagatcttaccaatattgtagtagtaccagccctaggggatcttgactactggggccagggaaccctggtcaccgtctcctca

SEQ ID NO: 14665 - DNA, 310 bp, Homo sapiens
  source 1..310: mol_type = other DNA
tgcagcctctggattcacctttagcagctatgccatgagctgggtccgccaggctccagggaaggggctggagtgggtctcaggtattagtggtagtggtggtggcacatactacgcagactccgtgaagggccggttcaccatctccagagacaattccaagaacacgctgtatctgcaaatgaacagcctgagagccgaggacacggccgtatattactgtgcgaaagatcttaccaatattgtagtagtaccagccctaggggatcttgactactggggccagggaaccctggtcaccgtctcctca

SEQ ID NO: 14666 - DNA, 310 bp, Homo sapiens; identical to SEQ ID NO: 14664
  source 1..310: mol_type = other DNA

SEQ ID NO: 14667 - DNA, 310 bp, Homo sapiens; identical to SEQ ID NO: 14663
  source 1..310: mol_type = other DNA

SEQ ID NO: 14668 - DNA, 310 bp, Homo sapiens
  source 1..310: mol_type = other DNA
tgcaggctctggattcacctttagcaggtatgccatgagctgggtccgccaggctccagagaaggggctggagtgggtctcagctattagtggtagtggtggtagcacatactacgcagactccgtgaagggccggttcaccatctccagagacaattccaagaacacgctgtatctgcaaatgaacagcctgagagccgaggacacggccgtatattactgtgcgaaagatcttaccaatattgtagtagtaccagccctaggggatcttgactactggggccagggaaccctggtcaccgtctcctca

SEQ ID NO: 14669 - DNA, 310 bp, Homo sapiens
  source 1..310: mol_type = other DNA
tacagcctctggattcacctttagcagctatgccatgagctgggtccgccaggctccagggaaggggctggagtgggtctcaggtattagtggtagtggtggtagcacatactacgcagactccgtgaagggccggttcaccatctccagagacaattccaagaacacgctgtatgtgcaaatgaacagcctgagagccgaggacacggccgtatattactgtgcgaaagatcttaccaatattgtagtagtaccagccctaggggatcttgactactggggccagggaaccctggtcaccgtctcctca

SEQ ID NO: 14670 - DNA, 307 bp, Homo sapiens
  source 1..307: mol_type = other DNA
cgctgtctctggtggctccatcggtagtgactactggagttggatccggcagcccccagggaagggactggagtggattgggtatatctattatactgggagcaccaactacaacccctccctcaagagtcgagtcaccatatcagtagacacgtccaagaatcacttctccctgaagctaacctctgtgaccgctgcggacacggccgtgtattactgtgcgagacaggattttgtagtagtaccaacccttatccctaattggctcgacccctggggccagggaaccctggtcaccgtctcctca

SEQ ID NO: 14671 - DNA, 307 bp, Homo sapiens
  source 1..307: mol_type = other DNA
cactgtctctggtggctccatcggtagtgactactggagttggatccggcagcccccagggaagggactggagtggattgggtatatctattatactgggagtaccaactacaacccctccctcaagagtcgagtcaccatatcagtagacacgtccaagaatcacttctccctgaagctagcctctgtgaccgctgcggacacggccgtgtattactgtgcgagacaggattttgtagtagtaccaacccttatccctaattggctcgacccctggggccagggaaccctggtcaccgtctcctca

SEQ ID NO: 14672 - DNA, 307 bp, Homo sapiens
  source 1..307: mol_type = other DNA
cactgtctctggtggctccatcggtagtgactactggagttggatccggcagcccccagggaagggactggagtggattggatatatttattatactgggagcaccaactacaacccctccctcaagagtcgagtcaccatatcagtagacacgtccaagaatgacttctccctgaagctaacctctgtgaccgctgcggacacggccgtgtattactgtgcgagacaggattttgtagtagtaccaacccttatccctaattggctcgacccctggggccagggaaccctggtcaccgtctcctca

SEQ ID NO: 14673 - DNA, 307 bp, Homo sapiens
  source 1..307: mol_type = other DNA
cactgtctctggtggctccatcggtagtgactactggagttggatccggcagcccccagggaagggactggagtggattgggtatatctattatactgggagcaccaactacaacccctccctcaagagtcgagtcaccatatcagtagacacgtccaagaatcacttttccctgaagttaacctctgtgaccgctgcggacacggccgtgtattactgtgcgagacaggattttgtagtagtaccaacccttatccctaattggctcgacccctggggccagggaaccctggtcaccgtctcctca

SEQ ID NO: 14674 - DNA, 301 bp, Homo sapiens
  source 1..301: mol_type = other DNA
cgctgtctctggtggctccatcagcactaataactggtggagttgggtccgccagcccccagggaaggggctggagtggattgggcaaatctttcatagtgggagcaccaactacaatccgtccctcaagagtcgagtcaccatatcagtagaccagtcgaagaaccagttctccctgaagttgaattctgtgaccgccgcggacacggccatgtattactgtgcgagagatcggaagtatgatgggagatactacgaagatgactactggggccagggaatcctggtcaccgtctcctca

SEQ ID NO: 14675 - DNA, 301 bp, Homo sapiens
  source 1..301: mol_type = other DNA
cgctgtctctggtggctccatcagcactaataactggtggagttgggtccgccagcccccagggaaggggctggagtggattgggcaaatctttcatagtgggagcaccaactacaatccgtccctcaagagtcgagtcaccatatcagtagaccagtcgaagaaccagttctccctgaagttgaattctgtgaccgccgcggacacggccatgtattactgtgcgagagatcggaagtatgatgggagatactacgaagatgactactggggccagggaatcctggtcaccgactcctca

SEQ ID NO: 14676 - DNA, 301 bp, Homo sapiens
  source 1..301: mol_type = other DNA
cactgtctcgggtgcctccatcaggagtcattactggagctggatccggcagcccccagggaggggactggagtggattgggtatatctcttctggtgggagcaccacctacaacccatctctcaagagtcgggtcaccatagcagaagacacgtccaagaaacagttctccctgaaggtgacttctgtgaccgctgcggacacggccgtttattactgtgtgagaggaccgggatgggtacaatcgggatatgaaggctttgactactggggccagggaaccctggtcaccgcctcctcg

SEQ ID NO: 14677 - DNA, 301 bp, Homo sapiens
  source 1..301: mol_type = other DNA
cactgtctcgggtgcctccatcaggagtcattactggagctggatccggcagcccccagggaggggactggagtggattgggtatatctcttctggtgggagcaccacctacaacccatctctcaagagtcgggtctccatagcagaagacacgtccaagaaacagttctccctgaagctgacttctatgaccgctgcggacacggccgtttattactgtgtgagaggaccgggctgggtacaatcgggatatgaaggctttgactactggggccagggaaccctggtcaccgcctcctcg

SEQ ID NO: 14678 - DNA, 286 bp, Homo sapiens
  source 1..286: mol_type = other DNA
cactgtctctggtgactccgtcagccgaggtaaatactactggagctggatccggcagcccccagggaagggactggagtggattggctatatctattccaatgggagcaccaactacaacccctccctcaagagtcgagtcaccatatcagtagacacgtccaagaatcaattctccctgaaactgacctctgtgacctcctcggacacggccgtctattactgtgcgagagatgcgggggattccgggcactggggccagggaaccctgatcaccgtctcctca

SEQ ID NO: 14679 - DNA, 286 bp, Homo sapiens
  source 1..286: mol_type = other DNA
cactgtctctggtggctccgtcaggcgtggtagttactactggagttggatccggcagcccccagggaagggactggagtggattgggtatatctatttcaatgggagcaccaactacaacccctccctcaagagtcgagtcaacttatcagtagacacttccaagaaccagttctccctgaagctgagctctgtgaccgctgcggacacggccgtgtattattgtgcgagagacgcgggggactccggccactggggccagggaaccctggtcaccgtctcctca

SEQ ID NO: 14680 - DNA, 286 bp, Homo sapiens
  source 1..286: mol_type = other DNA
cactgtctctggtgcctcagccaggagtggtagtcactactggagctggatccggcagccccccgggaagggattggagtggattgggtacatctattacaatgggaccaccaattacaacccctccctcaagagccgagtcaccatctcagtcgacacgtccaagagccagttctccctgaacctgatctctgtgaccgctgcggacacggccatgtattactgtgcgagagatgcgggagattccgggcactggggccagggaaccctggtcaccgtctcctca

SEQ ID NO: 14681 - DNA, 294 bp, Homo sapiens
  source 1..294: mol_type = other DNA
gcctctggatacaccttcaccagttatgatgtcaactgggtgcgacaggccactggacaagggcttgagtggatgggaaggatgaaccctaacaggggtaactcagcctatgcacagaaattccagggcagagtcaccatgaccagaaacacctccataagcacagcctacatggagctgagcggcctgagatctgaggacacggccgtgtattactgtgcgagacttagtggaaactacctgtacaactggttcgacccctggggccagggaaccctggtcaccgtctcctca

SEQ ID NO: 14682 - DNA, 294 bp, Homo sapiens; identical to SEQ ID NO: 14681
  source 1..294: mol_type = other DNA

SEQ ID NO: 14683 - DNA, 294 bp, Homo sapiens
  source 1..294: mol_type = other DNA
gcctctggatacaccttcaccagttatgatgtcaactgggtgcgacaggccactggacaagggcttgagtggatgggaaggatgaaccctaacaggggtaactcagcctatgcacagaagttccagggcagagtcaccatgaccagaaacacctccataagcacagcctacatggagctcagcggcctgagatctgaggacacggccgtgtattactgtgcgagacttagtggaaactacctgtacaactggttcgacccctggggccagggaaccctggtcaccgtctcctca

SEQ ID NO: 14684 - DNA, 294 bp, Homo sapiens
  source 1..294: mol_type = other DNA
gcctctggatacaccttcaccagttatgatgtcaactgggtgcgacaggccactggacaagggcttgagtggatgggaaggatgaaccctaacaggggtaactcagcctatgcacaaaaattccagggcagagtcaccatgaccagaaacacctccataagcacagcctacatggagctgagcggcctgagatctgaggacacggccgtgtattactgtgcgagacttagtggaaactacctgtacaactggttcgacccctggggccagggaaccctggtcaccgtctcctca

SEQ ID NO: 14685 - DNA, 294 bp, Homo sapiens; identical to SEQ ID NO: 14681
  source 1..294: mol_type = other DNA

SEQ ID NO: 14686 - DNA, 277 bp, Homo sapiens
  source 1..277: mol_type = other DNA
tgcagcctctgggttcaccgtcagtcgcaactacataagctgggtccgccagactccagggaaggggctggagtgggtctcatttatttatggtggttatagcacatactatgcagactccgtgaagggccgattcaccgtctccggagacaattccacgaacacagtgcatcttcaaatgagcagcctgagagccgaggacacggccgtctattactgtgcgagaaatagatacttcgatctctggggccgtggcaccctggtcactgtctcctca

SEQ ID NO: 14687 - DNA, 277 bp, Homo sapiens
  source 1..277: mol_type = other DNA
tgcagtctctgggttcaccatcagtcgcaactacataaactgggtccgccagactccagggaaggggctggagtgggtctcatttatttatggagcttatagcacatactacgcagactccgtgaagggccgattcaccgtctccggagacaattccacgaacacagtgcatcttcaaatgagcagcctgagagccgaggacacggccgtctattactgtgcgagaaatagatacttcgatctctggggccgtggcaccctggtcactgtctcctca

SEQ ID NO: 14688 - DNA, 277 bp, Homo sapiens
  source 1..277: mol_type = other DNA
tgcagcctctgggttcaccgtcagtcgcaactacataagctggatccgccagactccagggaaggggctggagtgggtctcatttatttatggtggttatagcacatactatgcagactccgtgaagggccgattcaccgtctccggagacaattccacgaacacagtgcatcttcaaatgagcagcctgagagccgaggacacggccgtctattactgtgcgagaaatagatacttcgatctctggggccgtggcaccctggtcactgtctcctca

SEQ ID NO: 14689 - DNA, 277 bp, Homo sapiens
  source 1..277: mol_type = other DNA
tgcagcctctgggttcaccgtcagtcgcaactacataaactgggtccgccagactccaggcaaggggctggagtgggtctcatttatttatggtggttatgccacatactacgcagactccgtgaagggccgattcaccatctccggagacaattccacgaacacagtgcatcttcagatgagcagcctgagagccgaggacacggccgtctattactgtgcgagaaatagatacttcgatctctggggccgtggcaccctggtcactgtctcctca

SEQ ID NO: 14690 - DNA, 289 bp, Homo sapiens
  source 1..289: mol_type = other DNA
tgaaggctctggattcacctttattgagcatggcatacactgggtccggcaagttccagggaggggcctagagtgggtctcaggtatcatttggaatactggtcgcacaggctacgcggactctgtgaagggccgattcaccgtctccagagactacgccaagaactccctgtctctgcaaatgaacaatctgagagttgaggacacggccttgtattactgtgtgaaagatgggggtgccggaggtgccgaatactggggccagggaaccctggtcaccgtctcctca

SEQ ID NO: 14691 - DNA, 289 bp, Homo sapiens
  source 1..289: mol_type = other DNA
tgcagtgtctggattcacctctcatgatcatggcatgcactgggtccggcaagctccagggaagggcctggagtgggtctcaggtattatttggaatagtggaactttaggctatgcggactctgtgaggggccgattcaccatctccagagacaacgccaaggattccctgtatttagaaatgaacagtctgagagttgaggacacggccttatatttttgtgtgaaagacgggggtgccggaggtgccgaatactggggccagggaaccctggtcaccgtctcctca

SEQ ID NO: 14692 - DNA, 292 bp, Homo sapiens
  source 1..292: mol_type = other DNA
tgcagcctctggattcacttttagcagctatgctctgagctgggtccgccaggctccagggaaagggctggagtgggtctcaactattactgagactacttacagcacattctacgcagactccgtgaagggccggttcaccatctccagagacaattccaagaaaactctgtacctgcaaatgaacagcctgagagccgaggacacggccgtgtattactgtgcgaaacctgacggagtggaacaggagcgtgactactggggccagggcaccctggtcaccgtctcctca

SEQ ID NO: 14693 - DNA, 292 bp, Homo sapiens
  source 1..292: mol_type = other DNA
tgcagcctctggattcagttttagcagctatactctgagctgggtccgccaggctccagggaaagggctggagtgggtctcaagtattactgagacaactcacagcacaatctacgcagactccgtgaagggccggttcaccatctccagagacaattccaagaaaactctgtacctgcaaatgaacagcctgagagccgaggacacggccgtgtattactgtgcgaaacctgacggagtggaacaggagcgtgactactggggccagggcaccctggtcaccgtctcctca

SEQ ID NO: 14694 - DNA, 292 bp, Homo sapiens
  source 1..292: mol_type = other DNA
tgcagcctctggattcacttttagcagctatagtctgagctgggtccgccaggctccagggaaagggctggagtgggtctcaactattgctgagactacttacagtacattctacgcagactccgtgaagggccggttcaccatctccagagacgattccaagaaaactctgtacctgcaaatgaacagcctgagagccgaagatacggccgtctattactgtgcgaaacctgacggagtggaacaggagcgtgactactggggccagggcaccctggtcaccgtctcctca

SEQ ID NO: 14695 - DNA, 325 bp, Homo sapiens
  source 1..325: mol_type = other DNA
tgcagcctctggattcatgttcagtagttatggcatgcactgggtccgccaggctccaggcaaggggctggagtgggtggcagttatatcatttgatggaaataataaatattatgaagactccgtgaagggccgttttaccatctccagagacgactccaggaacacgctgtatctgcagatcgacatcctgagagctgaggacacggctgtttattattgtgcgaaagacccaaatcctttttcatccatatctccacctattaccgacggcgacaactacatggacgtctggggcaaagggaccacggtcaccgtctcctct

SEQ ID NO: 14696 - DNA, 325 bp, Homo sapiens
  source 1..325: mol_type = other DNA
tgcagcctctggattcatgttcagtagttatggcatgcactgggtccgccaggctccaggcaaggggctggagtgggtggcagttatttcatttgatggaaataaaaaatattatgaagactccgtgaagggccgttttaccatctccagagacgcctccaggaacacgctgtatctgcagatcgacatgctgagagcagaggacacggctgtttattattgtgcgaaagacccaaatcctttttcatccatatctccacctattaccgacggcgacaactacatggacgtctggggcaaagggaccacggtcaccgtctcctct

SEQ ID NO: 14697 - DNA, 325 bp, Homo sapiens
  source 1..325: mol_type = other DNA
tgcagcctctggattcatcttcagtagttatggcatgcactgggtccgccaggctccaggcaaggggctggagtgggtggcagttatatcatttgatggaaataatagatattatgaagactccgtgaagggccgatttaccatctccagagacgactccaagaacacgctgtatctgcagatcgacatcctgagagctgaggacacggctgtttactactgtgcgaaagacccaaatcctttttcatccatatctccacctattaccgacggcgacaactacatggacgtctggggcaaagggaccacggtcaccgtctcctct

SEQ ID NO: 14698 - DNA, 307 bp, Homo sapiens
  source 1..307: mol_type = other DNA
ttcagcctctgggttcaccgtcagtagtaactacatgacctgggtccgccaggctccagggaaggggctggagtgggtctcacttatttctagcagtggtaccacatactacgcagactccgtgaagggccgattcaccatctccagagactactccaagaacacgctgtatcttcaaatgaacagcctgagagccgaggacacggccgtatattactgtgcgagagtcattagggagaccagtggctggaatcactactcctacatggacgtctggggcaaagggaccacggtctccgtctcctca

SEQ ID NO: 14699 - DNA, 307 bp, Homo sapiens
  source 1..307: mol_type = other DNA
ttcagcctctgggttcaccgtcagtagcaactacatgacctgggtccgccaggctccagggaaggggctggagtgggtctcacttatttctagcagtggtagcacatactacgcagactccgtgaagggccgattcaccatctccagagacaactccaagaacacgctgtatcttcaaatgaacagcctgagagccgaggacacggccgtattttactgtgcgagagtcattagggagaccagtggctggaatcactactcctacatggacgtctggggcacagggaccacggtctccgtctcctca

SEQ ID NO: 14700 - DNA, 307 bp, Homo sapiens
  source 1..307: mol_type = other DNA
ttcagcctctgggttcaccgtcagtagcaactacatgacctgggtccgccaggctccagggaaggggctggagtgggtctcacttatttctagcagtggtaccacatactacgcagactccgtgaagggccgattcaccatctccagagacaactccaagaacacgctgtatcttcaaatgaacagcctgagagccgaggacacggccgtatattactgtgcgagagtcattagggagaccagtggctggaatcactactcctacatggacgtctggggcaaagggaccacggtctccgtctcctca

SEQ ID NO: 14701 - DNA, 307 bp, Homo sapiens
  source 1..307: mol_type = other DNA
ttcagcctctggattcaccgtcactaataactacatgacctgggtccgccaggctccagggaagggcctggagtgggtctcacttatttctagcagtggtaccacatactacgcagactccgtgaagggccgattcaccatctccagagacaactccaagtatacgctgtatcttcaaatgagcagcctgagagtcgaggacacggccgtatattactgtgcgagagtcattagggagaccagtggctggaaccactactcctacatggacgtctggggcaaagggaccacggtctccgtctcctca

SEQ ID NO: 14702 - DNA, 298 bp, Homo sapiens
  source 1..298: mol_type = other DNA
cgcagtgtctggtgggtccttctatagttattactggacgtggatccgccagccccccgggaagggcctggagtggattggcgaagtcgatcatagtggagccacccggttcaatccgtccctcaagggccgggtcaccttgtcaatagacacgtccaagaaccaattctccctgacactgaagtctctgatcgccgcggacacggctgtctacttctgtgcgagaggctatcgtggctccgatcgggatgactactttcaatattggggccaggggtccctggtcaccgtctcctcg

SEQ ID NO: 14703 - DNA, 298 bp, Homo sapiens
  source 1..298: mol_type = other DNA
cgcagtgtctggtgggtccttccatagttattactggacgtggatccgccagccccccgggaagggactggagtggattggcgaagtcgatcatagtggagccaccaggttcaatccgtccctcaagggccgagccactttgtcaatagacacggccaagagtgaattctccctgacaatgaagtctctgaccgccgcggacacggctgtctacttctgtgcgagaggctatcgtggctccgatcgggatgactactttcaatattggggccaggggtccctggtcaccgtctcctcg

SEQ ID NO: 14704 - DNA, 298 bp, Homo sapiens
  source 1..298: mol_type = other DNA
cgcagtgtctggtgggtccttccatagttattactggacgtggatccgccagccccccgggaagggcctggagtggattggcgaagtcgatcatagtggagccacccggttcaatccgtccctcaagggccgagtcaccttgtcaatagacacgtccaagaaccaattctccctgacaatgaagtctctgaccgccgcggacacggctgtctacttctgtgcgagaggctaccgtggctccgatcgggatgactactttcaatattggggccaggggtccctggtcaccgtctcctcg

SEQ ID NO: 14705 - DNA, 298 bp, Homo sapiens
  source 1..298: mol_type = other DNA
cgcagtgtctggtgggtccttccatagttattactggacgtggatccgccagtcccccgggaagggactggagtggattggcgaagtcgatcatagtggagccaccaggttcaacccgtccctcaagggccgagccaccttgtcaatagacacggccaagagtgaattctccctgacaatgaagtctgtgaccgccgcggacacggctgtctacttctgtgcgagaggctatcgtggctccgatcgggatgactactttcaatattggggccaggggtccctggtcaccgtctcctcg

SEQ ID NO: 14706 - DNA, 298 bp, Homo sapiens
  source 1..298: mol_type = other DNA
cgcagtgtctggtgggtccttccatagttattactggacgtggatccgccagccccccgggaagggactggagtggattggcgaagtcgatcatagtggagccaccaggttcaatccgtccctcaagggccgagccagcttgtccatagacacgtccaagaaccaattctccctgacgctgaagtctttgaccgccgcggacacggctgtctacttctgtgcgagaggctatcgtggctccgatcgtgatgactactttcaatattggggccaggggtccctggtcaccgtctcctcg

SEQ ID NO: 14707 - DNA, 285 bp, Homo sapiens
  source 1..285: mol_type = other DNA
acttctggatacaccttcattgaccagtatatacactgggtgcgacaggcccctggacaagggcttgagtggatgggatggatcaaccctaaaaatggtggcacaaattatgcacagaagtttcagggctgggtcaccatgaccagggacacgtccatcagaacagcctacatggagttgatcaggctgagatctaatgacacggccgtgtattattgtgcgagaggggacgtggttacctcgacggactattggggccagggaaccctggtcaccgtctcctca

SEQ ID NO: 14708 - DNA, 285 bp, Homo sapiens
  source 1..285: mol_type = other DNA
acttctggatacatcttcattgaccagtatatacactgggtgcgacaggcccctggacaagggcttgagtggatgggatggatcaaccctaaaaatggtgtcccaaattatgcgcagaagtttcagggctgggtcatcatgaccagggacacgtccatcagaacagcctacatggagttgatcgggctgaaatctaatgacacggccgtgtattattgtgcgagaggggacgtggttacctcgacggactactggggccagggaaccctggtcaccgtctcctca

SEQ ID NO: 14709 - DNA, 285 bp, Homo sapiens
  source 1..285: mol_type = other DNA
acttctggatacatcttcattgaccagtatatacactgggtgcgacaggcccctggacaagggcttgagtggatgggatggatcaaccctaaaaatggtgtcccaaattatgcgcagaagtttcagggctgggtcatcatgaccagggacacgtccatcagaacagcctacatggagttgatcgggctgaaatctactgacacggccgtgtattattgtgcgagaggggacgtggttacctcgacggactactggggccagggatccctggtcaccgtctcctca

SEQ ID NO: 14710 - DNA, 316 bp, Homo sapiens
  source 1..316: mol_type = other DNA
cagtgtctctggtggctccatcagcagtagtagttccttctggggctggatccgccagcccccagggaaggggctggagtggattgggagtatgtattacagtgggagcacctactacaacccgtccctcaagagccgagtcaccatatccgtagatacgtccaagaaccagttctccctgaagctgagctctgtgaacgccgcagacacggctgtgtattactgtgcgagacttttgggcacacttgaatatagtgattatgatccccctttgtctgactactggggccagggaaccctggtcaccgtctcctca

SEQ ID NO: 14711 - DNA, 316 bp, Homo sapiens
  source 1..316: mol_type = other DNA
cagtgtctctggtggctccatcagcagtagtagttccttctggggctggatccgccagcccccagggaaggggctggagtggattgggagtatgtattacagtgggagcacctactacaacccgtccctcaagagccgagtcaccatatccgtagatacgtccaagaaccagttctccctgaagctgagctctgtgaacgccgcagacacggctgtgtattactgtgcgagacttttgggcacacttgaatatagtgattacgatccccctttgtctgactactggggccagggaaccctggtcaccgtctcctca

SEQ ID NO: 14712 - DNA, 295 bp, Homo sapiens
  source 1..295: mol_type = other DNA
tgcagcctctggattcacctttagtagttttgccatgagctgggtccgccaggctccagggaaggggctggagtgggtctcaactattactagtaggggtggtagcgcatactacgcagactccgtgaagggccggttcaccatctccagagacatttccaagaatacgctgtttctgcaaatgaacagcctgagagccgaagacacggccgtatatttctgtgcgaaagagctagactcaccggggatctacatgaacgtctggggcaaagggaccacggtcaccgtctcctca

SEQ ID NO: 14713 - DNA, 295 bp, Homo sapiens
  source 1..295: mol_type = other DNA
tgcagcctctggattcacttttagcagctttgccatgagctgggtccgccaggctccagggaaggggctggagtgggtctcaactattaatggtgggggtggaaggacatactacgcagactccgtgaagggccgcttcaccgtctccagagacaattccaacaacacgttgtatctgcaaatgaacaccctgagcgccgaagacacggccctatattattgtgcgaaagaattagactcaccggggatctacatgaacgtctggggcaaagggaccacggtcaccgtctcctca

SEQ ID NO: 14714 - DNA, 303 bp, Homo sapiens
  source 1..303: mol_type = other DNA
aagggttctggatacaactttgccaccttctggaccgcctgggtgcgccaggtgcccgggaaaggccttgagtggatggggatcatctatcctattgactctgagaccaaatacagcccgtccttccaaggccaggtcaccatgtcagtcgacaagtccattagtaccgcctacttgcagtggagcagcctgaaggcctcggacaccgccatctattactgtgcgagacatacagcagttgctggagagtcccccccttggctgcactattggggccagggaaccctggtcaccgtctcctca

SEQ ID NO: 14715 - DNA, 303 bp, Homo sapiens
  source 1..303: mol_type = other DNA
aagggttctggatacagctttaccaccttctggatcgcctgggtgcgccagatgcccgggaaaggcctggagtggatggggatcatctatcctggtgactctgataccagatacagcccgtccttccaaggccaggtcaccatctcagccgacaagtccatcagtaccgcctacttgcagtggagcagcctgaaggcctcggacaccgccatgtattactgtgcgagacatacagcagttgctggagagtcccccccttggctgcactattggggccagggaaccctggtcaccgtctcctca

SEQ ID NO: 14716 - DNA, 298 bp, Homo sapiens
  source 1..298: mol_type = other DNA
tgcagcctctggattcaacttcagtgattatgaaatgaattgggtccgccaggttccagggaaggggctggagtgggtttcatacattgatagtggtagtagtcccatcttttacgcagactctgtgaagggccgattcaccatctccagagacaacgccaagaactccctatatctacaaatgaacagcctgagagccgaggacacggctctttattactgtgcgagaggggtttcggcccacccacagtaccagtttgactactggggccagggaaccctggtcaccgtctcctca

SEQ ID NO: 14717 - DNA, 298 bp, Homo sapiens
  source 1..298: mol_type = other DNA
tgcggcctctggattcaacttcagtgattatgaaatgaactgggtccgccaggttccagggaaggggctggagtggatttcatacattgatagtggtagtagtccctttttttacgcagactctgtgaagggccgattcaccgtctccagagacaacgccaagaaatccctatatctacaaatggacagcctgagagccgaggactcggctctttattactgtgcgagaggggtttcggcccacccacagtaccagtttgactactggggccagggaaccctggtcaccgtctcctca

SEQ ID NO: 14718 - DNA, 283 bp, Homo sapiens
  source 1..283: mol_type = other DNA
tgcagccgctggattcaactttagcaactatgccatggcctgggtccgccagactccagggaaggggctggaatgggtctcagatattagtgccactggtggtagcacactctacgcagacttcgtgaagggccggttcaccatctccagagacaattccaagaacacgatgtatctgcaaatgcacagcctgacagccgaggactcggccgtatactactgtgcgaatttaccaggtacttctggctactggggccagggaaccctggtcaccgtctcctca

SEQ ID NO: 14719 - DNA, 283 bp, Homo sapiens
  source 1..283: mol_type = other DNA
tgcagcctctggattcacccttagcaactatgccatggcctgggtccgccagactccagggaaggggctggaatgggtctcagatattagtgccactggtgatagcacatactacgcagacttcgtgaagggccggttcaccatctccagagacaattccaagaacacgatgtatctgcaaatgcacagcctgacagccgaggactcggccgtatactactgtgcgaatttaccaggtacttctggctactggggccagggaaccctggtcaccgtctcatca

SEQ ID NO: 14720 - DNA, 283 bp, Homo sapiens
  source 1..283: mol_type = other DNA
tgcagcctctggattcagcttgagcaactatgccatggcctgggtccgccagactccagggaaggggctggaatgggtctcagatattagtgccactggtggtagcgcaaactacgcagacttcgtgaagggccggttcaccatctccagagacaattccaagaacacggtgtatttgcaaatggacggcctgacagccgaggactcggccgtatattactgtgcgaatttaccaggtacttctggctactggggccagggaaccctggtcaccgtctcctca

SEQ ID NO: 14721 - DNA, 283 bp, Homo sapiens
  source 1..283: mol_type = other DNA
tgcagcctctggattcagccttagcgcctatgccatggcctgggtccgccagactccagggaaggggctggaatgggtctcagaaatcagtgccactggtgatagcacatactacgcagacttcgtgaagggccgattcaccatctccagagacaattccaagaacacgatgtatctgcaaatgcacagcctgacagccgaggactcggccgtttactactgtgcgaatttaccaggaacttctggctactggggccagggaaccctggtcaccgtctcctca

SEQ ID NO: 14722 - DNA, 283 bp, Homo sapiens
  source 1..283: mol_type = other DNA
tgcagcctctggattcacccttagcaactatgccatggcttgggtccgccagactccagggaaggggctggaatgggtctcagatattagtgccactggtgatagcacatactacgcagacttcgtgaagggccggttcaccatctccagagacaattccaagaacacgatgtatctgcaaatgcacagcctgacagccgaggactcggccgtatactactgtgcgaatttaccaggtacttctggctactggggccagggaaccctggtcaccgtctcatca

SEQ ID NO: 14723 - DNA, 304 bp, Homo sapiens
  source 1..304: mol_type = other DNA
cactgtctctggtggctccgtcagcagtagtccctactactggaactggatccggcagcccccagggaagggactggagtggattgggtatatctcttacagtgggaataccaactacagtccctccctcaggggtcgagtcaccatatacgtagacacgtccaagaaccaggtctccctgcagctgagttctgtgaccgctgcggacacggccgtgtattactgtggaaggtctgataggagaggtagttctttcgtggagtttgattactggggccagggaaccctggtcaccgtctcctca

SEQ ID NO: 14724 - DNA, 304 bp, Homo sapiens
  source 1..304: mol_type = other DNA
cgctgtctctggtggctccgtcagcagtagtccctactactggaactggatccggcagcccccagggaagggactggaatggattgggtatatctcttacagtgggaacaccaactacagtccctccctcaggggtcgagtcaccatatacgtagacacgtccaagaaccaggtctccctgcagctgagttctgtgaccgctgcggacacggccgtgtattactgtggaaggtctgataggagaggtagttctttcgtggagtttgattactggggccagggaaccctggtcaccgtctcctca

SEQ ID NO: 14725 - DNA, 304 bp, Homo sapiens
  source 1..304: mol_type = other DNA
cactgtctctggtggctccgtcagcagtggtacttactactggaactggatccggcagccccccgggaagggactggagtgggtaggctatatctattacagtgggggcaccaactacaacccctccctcaagggtcgagtcaccatatccgtagacacgtccaagaaccaggtctccctgcagctgagttctgtaaccgctgcggacacggccgtgtatttctgtggaaggtctgataggagaggttcttctttcgtggagtttgattactggggccagggaaccctggtcaccgtctcctca

SEQ ID NO: 14726 - DNA, 304 bp, Homo sapiens
  source 1..304: mol_type = other DNA
cagtgtctctggtggctccgtcagcagtggtactcactactggacctggatccggcagcccccagggaagggactggaatggattgcgcatatctcttacactgggaacaccaactacaacccctccctcaggggtcgagtcaccatatccgtagacccgtccaagaaccaggtctccctgcagctgagctctgtgaccgctgcggacacggccgtgtattactgtggaaggtctgataggagaggtagttctttcgtggagtttgattactggggccagggaaccctggtcaccgtctcctca

SEQ ID NO: 14727 - DNA, 304 bp, Homo sapiens
  source 1..304: mol_type = other DNA
cactgtctctggtggctccgtcagcagtggtacttactactggaactggatccggcagcccccagggaagggactggagtgggttggatatatctattacagtgggggcaccaattacaacccctccctcaacggtcgagtcaccatatccgtagacacgtccaagaaccaggtctccctgcagctgacttctgtaaccgctgcggacacggccgtgtatttctgtggaaggtctgataggagaggttcttctttcgtggagtttgactactggggccagggaaccctggtcaccgtctcctca

SEQ ID NO: 14728 - DNA, 304 bp, Homo sapiens
  source 1..304: mol_type = other DNA
cactgtctctggtggctccgtcagcagtagtccctactactggaactggatccggcagcccccagggaagggactggagtggattgggtatatctcttacagtgggaacaccaactacagtccctccctcaggggtcgagtcaccatatacgtagacacgtccaagaaccaggtctccctgcagctgagttctgtgaccgctgcggacacggccgtgtattactgtggaaggtctgataggagaggtagttctttcgtggagtttgattactggggccagggaaccctggtcaccgtctcctca

SEQ ID NO: 14729 - DNA, 304 bp, Homo sapiens; identical to SEQ ID NO: 14723
  source 1..304: mol_type = other DNA

SEQ ID NO: 14730 - DNA, 304 bp, Homo sapiens
  source 1..304: mol_type = other DNA
cactgtctctggtggctccgtcagcagtggtacttactactggaactggatccggcagcccccagggaagggactggagtggattgcgtatatctcttacaatgggaacaccaactacaacccctccctcaggggtcgagtcaccatatccgtagacacgtccaagaaccaggtctccctgcagctgagttctgtgaccgctgcggacacggccgtgtattactgtggaaggtctgataggagaggtagttctttcgtggagtttgattactggggccagggaaccctggtcaccgtctcctca

SEQ ID NO: 14731 - DNA, 304 bp, Homo sapiens
  source 1..304: mol_type = other DNA
cactgtctctggtggctccgtcagcagtagtccctactactggaactggatccggcagcccccagggaagggactggagtggattgggtatatctcttacagtgggaacaccaactacagtccctccctcaggggtcgagtcaccatatccgtagacacgtccaagaaccaggtctccctgcagctgagttctgtgaccgctgcggacacggccgtgtattactgtggaaggtctgataggagaggtagttctttcgtggagtttgattactggggccagggaaccctggtcaccgtctcctca

SEQ ID NO: 14732 - DNA, 304 bp, Homo sapiens; identical to SEQ ID NO: 14725
  source 1..304: mol_type = other DNA

SEQ ID NO: 14733 - DNA, 304 bp, Homo sapiens
  source 1..304: mol_type = other DNA
cactgtctctggtggctccgtcagcagtagtccctactactggaactggatccggcagcccccagggaagggactggagtggattgggtatatctcttacagtgggaacaccaactacagtccctccctcaggggtcgagtcaccatatacgtagacacgtccaagaaccaggtctccctgcagctgagttctgtgaccgctgcggacacggccgtgtattactgtggaaggtctgataggagaggtagttctttcgtggagtttgattattggggccagggaaccctggtcaccgtctcctca

SEQ ID NO: 14734 - DNA, 304 bp, Homo sapiens
  source 1..304: mol_type = other DNA
cactgtctctggtggctccgtcagcagtagtccctactactggaactggatccggcagcccccagggaagggactggagtggattgggtatatctcttacagtgggaacaccaactacagtccctccctcaggggtcgagtcaccatatacgtagacacgtccaagaaccaggtctccctgcagctgagttctatgaccgctgcggacacggccgtgtattactgtggaaggtctgataggagaggtagttctttcgtggagtttgattactggggccagggaaccctggtcaccgtctcctca

SEQ ID NO: 14735 - DNA, 325 bp, Homo sapiens
  source 1..325: mol_type = other DNA
tgtagcgtctggattcacctttgaaaattactggatgaattgggtccgccaggctccagggaaggggctggagtgggtggccagtataatgcaagatggaagtgagagatcctatggggactctttggagggccgattcaccatctccagagacaacgccaagaactcactgtatttggaaatgaacagcctgagagccgaggactcggccgtgtattactgtgcgagagcgcaatacagtattacgctttttggatcgactattatccggaactactactacatggacgtctggggcatagggaccacggtcaccgtctcctca

SEQ ID NO: 14736 - DNA, 325 bp, Homo sapiens
  source 1..325: mol_type = other DNA
tgcagcgtctggattcagctttgaaaattattggatgaattgggtccgccaggctccagggaaggggctggagtgggtggccagtataatgcaagatggaagtaagagacactatggggactctttggagggccgattcaccatctccagagacaacgccaagaactcactgtatttggaaatgaacagcctgagagccgaggactcggccgtgtattactgtgcgagagcgcagtacagtattacgctttttggatcgactattatccggaactactactacatggacgtctggggcatagggaccacggtcaccgtctcctca

SEQ ID NO: 14737 - DNA, 325 bp, Homo sapiens
  source 1..325: mol_type = other DNA
tgcagcgtctggattcatctttgaaaattattggatgaattgggtccgccaggctccagggaaggggctggagtgggtggccagtataatgcaagatggaagtaagagatcctatggtgactctttggagggccgattcaccatctccagagacaacgccaagaactcactgtctttggaaatgaacagcctgagagccgaggactcggccgtctattactgtgcgagagcgcagtacagtattacgctttttggatcgactattatccggaactactactacatggacgtctggggcatagggaccacggtcaccgtctcctca

SEQ ID NO: 14738 - DNA, 325 bp, Homo sapiens; identical to SEQ ID NO: 14735
  source 1..325: mol_type = other DNA

SEQ ID NO: 14739 - DNA, 325 bp, Homo sapiens
  source 1..325: mol_type = other DNA
tgcagcgtctggattcacctttgaaaattattggatgaattgggtccgccaggctccagggaaggggctggagtgggtggccagtataatgcaagatggaagtaagagacactatggggactctttggagggccgattcaccatctccagagacaacgccaagaactcactgtatttggaaatgaacagcctgagagccgaggactcggccgtgtattactgtgcgagagcgcagtacagtattaccctttttggatcgactattatccggaactactattacatggacgtctggggcattgggaccacggtcaccgtctcctca

SEQ ID NO: 14740 - DNA, 325 bp, Homo sapiens
  source 1..325: mol_type = other DNA
tgtagcgtctggattcacctttgaaaattactggatgaattgggtccgccaggctccagggaaggggctggagtgggtggccagtataatgcaggatgggagtaagagatactatggggactctttggagggccgattcaccatctccagagacaacgccaagaactcactgtatttggaaatgatcagcctgagagccgaggactcggccgtgtattactgtgcgagagcgcaatacagtattacgctttttggatcgactattatccggaactactactacatggacgtctggggcatagggaccacggtcaccgtctcctca

SEQ ID NO: 14741 - DNA, 325 bp, Homo sapiens
  source 1..325: mol_type = other DNA
tgcagcgtctggattcacctttgaaaattattggatgaattgggtccgccaggctccagggaaggggctggagtgggtggccagtataatgcaagatggaagtaagagatcctatggtgactctttggagggccgattcaccatctccagagacaacgccaagaactcactgtctttggaaatgaacagcctgagagccgaggactcggccgtctattactgtgcgagagcgcagtacagtattacgctttttggatcgactattatccggaactactactacatggacgtctggggcatagggaccacggtcaccgtctcctca

SEQ ID NO: 14742 - DNA, 325 bp, Homo sapiens
  source 1..325: mol_type = other DNA
tgcagcgtctggattcacctttgaaaattattggatgaattgggtccgccaggctccagggaaggggctggagtgggtggccagtataatgcaagatggaagtaagagacactatggggactctttggagggccgattcaccatctccagagacaacgccaagaactcactgtatttggaaatgaacagcctgagagccgaggactcggccgtgtattactgtgcgagagcgcagtacagtattacgctttttggatcgactattatccggaactactactacatggacgtctggggcatagggaccacggtcaccgtctcctca

SEQ ID NO: 14743 - DNA, 325 bp, Homo sapiens
  source 1..325: mol_type = other DNA
tgtagcgtctggattcacctttgaaaattactggatgaattgggtccgccaggctccagggaaggggctagagtgggtggccagtataatgcaagatggaagtaagagatcctatggggactctttggagggccgattcaccatctccagagacaacgccaagaactcactgtatttggaaatgaacagcctgagagccgaggactcggccgtgtattactgtgcgagagcgcaatacagtattacgctttttggatcgactattatccggaactactactacatggacgtctggggcatagggaccacggtcaccgtctcctca

SEQ ID NO: 14744 - DNA, 325 bp, Homo sapiens
  source 1..325: mol_type = other DNA
tgtagcgtctggattcacctttgaaaattactggatgaattgggtccgccaggctccagggaaggggctggagtgggtggccagtataatgcaagatggaagtaagagatcctatggggactctttggagggccgattcaccatctccagagacaacgccaagaactcactgtatttggaaatgaacagcctgagagccgaggactcggccgtgtattactgtgcgagagcgcaatacagtattacgctttttggatcgactattatccggaactactactacatggacgtctggggcatagggaccacggtcaccgtctcctca

SEQ ID NO: 14745 - DNA, 325 bp, Homo sapiens; identical to SEQ ID NO: 14740
  source 1..325: mol_type = other DNA

SEQ ID NO: 14746 - DNA, 325 bp, Homo sapiens
  source 1..325: mol_type = other DNA
tgtagcgtctggattcacctttgaaaattactggatgaattgggtccgccaggctccagggaaggggctggagtgggtggccactataatgcaagatggaagtaagagatactatggggactctttggagggccgattcaccatctccagagacaacgccaagaactcactgtatttggaaatgaacagcctgagagccgaggactcggccgtgtattactgtgcgagagcgcaatacagtattacgctttttggatcgactattatccggaactactactacatggacgtctggggcatagggaccacggtcaccgtctcctca

SEQ ID NO: 14747 - DNA, 294 bp, Homo sapiens
  source 1..294: mol_type = other DNA
gcatctggatacaccttcaccagttactatatgcactgggtgcgacaggcccctggacaagggcttgagtggatgggaataatcaaccccagtgttggtaacacaagctacgcacagaagttccagggcagagtcaccatgaccagggacacgtccacgagcacagtctacatggagctgagcagtctgagatctgaggacacggccgtgtattactgtgcgagagcccgacatattgtggtggtgtctttacttgacaactggggccagggaagcctggtcaccgtctcctca

SEQ ID NO: 14748 - DNA, 294 bp, Homo sapiens
  source 1..294: mol_type = other DNA
gcatctggatacaccttcaccagttactatatgcactgggtgcgacaggcccctggacaagggcttgagtggatgggaataatcaaccccagtgttggtaacacaagctacgcacagaagttccagggcagagtcaccatgaccagggacacgtccacgagcacagtctacatggagctgagcagtctgagatctgaggacacggccgtgtattactgtgcgagagcccgacatattgtggtggtgtctttacttgacaactggggccagggaaccctggtcaccgtctcctca

SEQ ID NO: 14749 - DNA, 307 bp, Homo sapiens
  source 1..307: mol_type = other DNA
tgcagcctctggatttttcgttgcggacgtcgccatgcactgggtccgtcaacggccagggaagggtctggagtgggtggctcttatcactagagatggtccgacaacatattatgcagactccgtgaggggccgattcaccatctccagagacagcatcaaaaatgccctctttctggaaatgaacaatctggcccctgaggacaacgccatctacttctgcgcaaaggacttaggaaccacgccggtctttggcgggagtgttattgactattggggccgaggaaccctggtcaccgtccactca

SEQ ID NO: 14750 - DNA, 307 bp, Homo sapiens
  source 1..307: mol_type = other DNA
tgcagcctctggatttttcgttgcggacgttgccatgcactgggtccgtcaacggccagggaagggtctggagtgggtctctcttatcactagagaaggtccgacgacatattatgaagactcagtgaggggccgattcaccatctccagagacaacatcaaaaatgccttgtatctgcaaatgaacaatctgggaacagaggacaccgccctctattactgtgcaaaggacttaggcaccacgccggtttttggagggagtgttattgactattggggccggggaaccctggtcaccgtccactca

SEQ ID NO: 14751 - DNA, 307 bp, Homo sapiens
  source 1..307: mol_type = other DNA
tgcagcctctggatttttcgttgcggacgtcgccatgcactgggtccgtcaacggccagggaagggtctggagtgggtggctcttatcactagagatggtccgacaacatattatgcagactccgtggggggccgattcaccatctccagagacagcatcaaaaatgccctctatctggaaatgaacaatctggcccctgaggacaacgccatctactactgcgcaaaggacttaggaaccacgccggtctttggcgggagtgttattgactattggggccgaggaaccctggtcaccgtccactca

SEQ ID NO: 14752 - DNA, 304 bp, Homo sapiens
  source 1..304: mol_type = other DNA
tgcaacctctggattcaccttcagtagctacggcatgcactgggtccgccaggctccaggcaaggggctggagtgggtggcagtgatatcatatgaaggaagtaatagattctatgcagactccgtgaagggccgattcaccatctccagagacaattccaagaacacggtatatctgcaaatgaacagcctgagacctgaggacacggctgtctattactgtgcgaaaaagtggggggcctatacggtgacggccgactactttgactcctggggccagggaaccctggtcaccgtctcctca

SEQ ID NO: 14753 - DNA, 304 bp, Homo sapiens
  source 1..304: mol_type = other DNA
tgcaacctctggattcaccttcagtagctacggcatgcactgggtccgccaggctccaggcaaggggctggagtgggtggcagtgatatcatatgaaggaagtaatagattctatgcagactccgtgaagggccgattcaccatctccagagacaattccaagaacacggtatatctgcaaatgaacagcctgagacctgaggacacggctgtgtattactgtgcgaaaaagtggggggcctatacggtgacggccgactactttgactcctggggccagggaaccctggtcaccgtctcctca

SEQ ID NO: 14754 - DNA, 331 bp, Homo sapiens
  source 1..331: mol_type = other DNA
tgcagcctctggattcaccttcagtaccaatggcatgcactgggtccgccaggctccaggcaaggggctggagtgggtggcagttatatcatatgatggaagtaataaatattacgcagactccgtgaagggccgattcaccatttccagagacaattccaagaacacgctgtatctgcaaatggacagcctgatacctgaggactcggctatgtattactgtgcgaaaatcaattcgagggattgtactagtaccacctgctatttgacccggggctactactactacatggacgtctggggcaaagggaccacggtcaccgtctcctca

SEQ ID NO: 14755 - DNA, 331 bp, Homo sapiens
  source 1..331: mol_type = other DNA
tgcagcctctggattcaccttcagtaccaatggcatgcactgggtccgccaggctccaggcaaggggctggagtgggtggcagttatatcatatgatggaagtaataaatattacgcagactccgtgaagggccgattcaccatttccagagacaattccaagaacacgctgtatctgcaaatggacagcctgatacctgaggactcggctatgtattactgtgcgaaaatcaattcgagggattgtactagtaccacctgctatttgacccggggctactattactacatggacgtctggggcaaagggaccacggtcaccgtctcctca

SEQ ID NO: 14756 - DNA, 331 bp, Homo sapiens; identical to SEQ ID NO: 14754
  source 1..331: mol_type = other DNA

SEQ ID NO: 14757 - DNA, 331 bp, Homo sapiens
  source 1..331: mol_type = other DNA
tgcagcctctggattcaccttcagtaccaatggcatgcactgggtccgccaggctccaggcaaggggctggagtgggtggcagttatatcatatgatggaagtaataaatattacgcagactccgtgaagggccgattcaccatttccagagacaattccaagaatacgctgtatctgcaaatggacagcctgatacctgaggactcggctatgtattactgtgcgaaaatcaattcgagggattgtactagtaccacctgctatttgacccggggctactactactacatggacgtctggggcaaagggaccacggtcaccgtctcctca

SEQ ID NO: 14758 - DNA, 331 bp, Homo sapiens
  source 1..331: mol_type = other DNA
tgcagcctctggattcaccttcagtaccaatggcatgcactgggtccgccaggctccaggcaaggggctggagtgggtggcagtaatatcatatgatggaagtaataaatattacgcagactccgtgaagggccgattcaccatttccagagacaattccaagaacacgctgtatctgcaaatggacagcctgatacctgaggactcggctatgtattactgtgcgaaaatcaattcgagggattgtactagtaccacctgctatttgacccggggctactactactacatggacgtctggggcaaagggaccacggtcaccgtctcctca

SEQ ID NO: 14759 - DNA, 307 bp, Homo sapiens
  source 1..307: mol_type = other DNA
cgctgtctctggtgcctccatcagtagtgataactggtggagttgggtccgccagtccccagggaagggactggagtggattggcgaaatctttcatgatggaaaaacgaatttcaacccgtccctcacaagtcgagtgaccatatcaatcgacaagtcgaaaaaccaaatgtacctgaagctgacgtccgtgaccgccgcggacacggccgtatattattgtgcgagagagacgtcacggtttttggagtggctgcggggaggattcaattactggggccagggatccctggtcaccgtctcctca

SEQ ID NO: 14760 - DNA, 307 bp, Homo sapiens
  source 1..307: mol_type = other DNA
cgctgtctctggtggctccatcagtagtgataattggtggagttgggtccgccagtccccagggaaggggctggagtggattggggaaatctttcatgatggaaagacgaacttcaacccgtcgttcaacagtcgagtgaccatatcagtagacaagtcgaggaaccaaatctccctgaagctggcatccgtgaccgccgcggacacggccgtctattactgtgcgagagaaacgtcacggtttttggagtggttgcggggaggattcaattactggggccagggatccctggtcaccgtctcctca

SEQ ID NO: 14761 - DNA, 307 bp, Homo sapiens
  source 1..307: mol_type = other DNA
cgctgtctctggtgcctccatcagtagtgataactggtggagttgggtccgccagtctccagggaagggactggagtggattggcgaaatctttcatgatggaaaaacgaatttcaacccgtccctcacaagtcgagtgaccatatcaatcgacaagtcgaaaaaccaaatgtacctgaagctgacgtccgtgaccgccgcggacacggccgtatattattgtgcgagagagacgtcacggtttttggagtggctgcggggaggattcaattactggggccagggatccctggtcaccgtctcctca

SEQ ID NO: 14762 - DNA, 304 bp, Homo sapiens
  source 1..304: mol_type = other DNA
cactgtctctggtggctccatcagaagtttccactggacctggatccgccagcccccgggaaagggactggagtggattgggaatatctattccggtgggagcaccgactacaacccctccctcaagagtcgagtcaccatgtcactagacacgtccaagaaccagttctccctgaagctggcatccgtgaccgccgcggacacggccgtctattactgtgcgagagaaacgtcacggtttttggagtggttgcggggaggattcaattactggggccagggatccctggtcaccgtctcctca

SEQ ID NO: 14763 - DNA, 297 bp, Homo sapiens
  source 1..297: mol_type = other DNA
cgggcttctggattcatgttaaccacctactggttcgcctgggtgcgccagatgcccgggaaaggcctggagtggatggggatcatctttcttgatgactctgataccagatacagcccgtccttccaaggccaggtcaccatctcaggcgacaagtccatcaccaccgcctacctccagtggagcagcctgaaggcctcggacaccgccatgtattactgtgcgagaggccggagtgggaccttacaagatgcttttcacatctggggccaagggacaatggtcaccgtctcttcc

SEQ ID NO: 14764 - DNA, 297 bp, Homo sapiens
  source 1..297: mol_type = other DNA
cgggcttctggattcatgttaaccacctactggttcgcctgggtgcgccagatgcccgggaaaggcctggagtggatggggatcatctttcttgatgactctgatacaagatacagcccgtccttccaaggccaggtcaccatctcaggcgacaagtccatcaccaccgcctacctccagtggagcagcctgaaggcctcggacaccgccatgtattactgtgcgagaggccggagtgggaccttacaagatgcttttcacatctggggccaagggacaatggtcaccgtctcttcc

SEQ ID NO: 14765 - DNA, 296 bp, Homo sapiens
  source 1..296: mol_type = other DNA
ccatctccggggacagtgtctctagcgacagtgctacttggaactggattaggcagtccccatcgagaggccttgagtggctgggaagggcatactacaggtccaagtggtataatgattatgcagtatctgtgaaaagtcgaataagcatcaacccagacacatccaagaaccaattctccctgcagctgaactctgtgactcccgaggacaccgctgtgtattactgtacaagagaggccgtccctggttggtctgactactggggccagggaaccctggtcaccgtctcctca

SEQ ID NO: 14766 - DNA, 296 bp, Homo sapiens
  source 1..296: mol_type = other DNA
ccatctccggggacagtgtctctagtaacagtgcttcttggaactggatcaggcagtccccatcgagaggccttgagtggctgggaaggacatactacaggtccaagtggtataatgattattcagtggctgtgaaaagtcgaataagcatcaacccagacacatccaagaaccaattctccctgcagctgaactctgtgactcccgaagacaccgctgtgtattactgtacaagagaggccgtccctggttggtctgactactggggccagggagccctggtcaccgtctcctca

SEQ ID NO: 14767 - DNA, 280 bp, Homo sapiens
  source 1..280: mol_type = other DNA
tgcagtctctggattcaccgtcagtaagagtgacttcaactgggtccgccaggccccagggcaggggctgcagtgggttgcatacattggttacagcagttctaccatgtattatgcaagctctgtgaaggaccgattcaccatctccagagacactgccaaggactcactgtatctacaaatgaacagcctgagagacgaggacacggctatatattactgctcgaggggtcgagatggcattggctggggccagggaaccctggtcaccgtctcctca

SEQ ID NO: 14768 - DNA, 280 bp, Homo sapiens
  source 1..280: mol_type = other DNA
tgaggcctctggattcagtttcactccccatgacatgaactgggtccgccaggcaccagggaagggactggaatgggttgcgtacattactggtgatagtaatatcaaatggtacgcagactctgtgaagggccgattcaccatctccagagacaatgccaagaactcaatgtatctgcaaatggacagcctgagagacgacgacacggctgtatattattgttcgaggggacgtgatggcatcggctggggccagggaaccctggtcagcgtctcttca

SEQ ID NO: 14769 - DNA, 333 bp, Homo sapiens
  source 1..333: mol_type = other DNA
acacagaccctcacactgacgtgtaccttctctgggttctcactcaacactagtggaatgtctatgagctggatccgtcagcccccagggaaggccctggagtggcttgcactcattgattgggatgatgataaattctacagcacatctctgaagaccaggctcaccatctccaaggacacctccaaaaaccacgtggtcttgacaatgaccaacatggaccctgtggacacaggcacatattattgtgcacggaaatatgataaccgattggatggactgggcggggcttttgatatctggggccaggggacaatggtcaccgtctcttca

SEQ ID NO: 14770 - DNA, 333 bp, Homo sapiens
  source 1..333: mol_type = other DNA
acacagaccctcacgctgacgtgcaccttctctgggttctcactcagcactagtggaatgtgtgtgagttggatccgtcagcccccagggaaggccctggagtggcttgcactcgttgattgggatgatgagaaatactacagcacttctctgaagaccaggctcaacatttccaaggacacctccaaaaaccaggtggtccttacaatgaccaacatggagcctgtggacacaggcacatattactgtgcacggaaatatgataaccgtttggatggactgggcggggcttttgatatctggggacaagggacagtggtcaccgtctcttca

SEQ ID NO: 14771 - DNA, 289 bp, Homo sapiens
  source 1..289: mol_type = other DNA
tgtggcctctggattcaccttcgcttcctatagcatgaattgggtccgccaggctccaggcaaggggctggagtgggtttcatacattactagtagtagtgggaccatctactacgcagactctctgaggggtcgcttcaccatctccagagacaatgccaagagctcactgtttctgcaactgaacagcctgagagacgacgacacggctgtgtattactgtgcgagaggttctggcccctggggacttgactactggggccagggaaccctggtcaccgtctcgtcg

SEQ ID NO: 14772 - DNA, 289 bp, Homo sapiens
  source 1..289: mol_type = other DNA
tgcggcctctggattcaccttcacttcctatagcatgaactgggtccgccaggctccagggaaggggctggagtgggtttcatatattactagtagcagtgggaccgtctactatgcaggctctgtgaggggccgcttcaccatctccagagacaacggcaagaggtcactgtttctgcaactgaacagcctgagagacgaggatacggctgtgtattactgtgcgagagggtctggcccatggggactcgactattggggccagggaaccctggtcaccgtctcgtcg

SEQ ID NO: 14773 - DNA, 295 bp, Homo sapiens
  source 1..295: mol_type = other DNA
tgcagcctctggattcacctttagcagctatggcatgagctgggtccgccaggctccaggggaggggctggagtgggtctcaagtattagtggtggtggtggtgccacatactacgcagactccgtgaagggccggttcaccatctccagagacaattccaagaacacgctgtttttgcaaatgaacagcctgaaagtcgaggacacggccgtgtatcactgtgcgaaatacgcaatgcctggaattccggggctttgcgactggggccagggaaccctggtcactgtctcctca

SEQ ID NO: 14774 - DNA, 295 bp, Homo sapiens
  source 1..295: mol_type = other DNA
tgcagcctctggattcacctttagcagctatggcatgagctgggtccgccaggctccaggggaggggctggagtgggtctcaagtattagtggtggtggtggtgccacatactacgcagactccgtgaagggccggttcaccatctccagagacaattccaagaacacgctgtttttgcaaatgaacagcctgaaagtcgaggacacggccgtgtatcactgtgcgaaatacgcgatgcctggaattccggggctttgcgactggggccagggaaccctggtcactgtctcctca

SEQ ID NO: 14775 - DNA, 295 bp, Homo sapiens
  source 1..295: mol_type = other DNA
tgcagcctctggattcacctttagcagctatggcatgagctgggtccgccaggctccaggggaggggctggagtgggtctcaagtattagtggtggtggtggtgccacatactacgcagactccgtgaagggccggttcaccatctccagagacaattccaagaacacgctgtatttgcaaatgaacagcctgagagtcgaggacacggccgtgtattattgtgcgaaatacgcaatgcctggaattccggggctttgcgactggggccagggaaccctggtcactgtctcctca

SEQ ID NO: 14776 - DNA, 286 bp, Homo sapiens
  source 1..286: mol_type = other DNA
tgtagcctctggattcacatttagtagcttttggatgggctgggtccgccaggctccagggaaggggctggagtgggtggccatgatgaaccaagatggaaataagagattatatgttgactctgtgaagggccgattcaccatttccagagacaacgccaaggactcactttttctgcaagcgaacagcctgagagccgaggacacggctgtatattattgttcgagaccacaacagtggacagtggccgactggggccagggaaccctggtcaccgtctccgca

SEQ ID NO: 14777 - DNA, 286 bp, Homo sapiens
  source 1..286: mol_type = other DNA
tgtagcctctggattcacatttagtagcttttggatgggctgggtccgccaggctccagggaaggggctggagtgggtggccatgatgaaccaagatcgaaataagagattatatgttgactctgtgaagggccgattcaccatttccagagacaacgccaaggactcactttttctgcaagcgaacagcctgagagccgaggacacggctgtatattattgttcgagaccacaacagtggacagtggccgactggggccagggaaccctggtcaccgtctccgca

SEQ ID NO: 14778 - DNA, 300 bp, Homo sapiens
  source 1..300: mol_type = other DNA
aagggttctgaagacacctttaccaggtcttggatcgcctggttgcgccagaagcccgggaagggcctggagtggatgggaatgatctatcctggtgactctgatatccaatatagtccgtccatccaaggacaagtcaccatttcagccgacatgtcgatctataccgcctccctggagtggaagagcctgaaggcctcggacaccgccgtctattactgtgcgcgactgccgacacctgggcgccaccacgcctacttcgactactggggccagggaaccctggtcaccgcctcctca

SEQ ID NO: 14779 - DNA, 300 bp, Homo sapiens
  source 1..300: mol_type = other DNA
aagggttctgaagacacctttaccaggtcctggatcgcctggttgcgccagaagcccgggaagggcctggagtggatgggaatgatctatcctggtgactccgatatccaatatagtccgtccatccaaggacaagtcaccatttcagccgacatgtcgatctataccgcctccctggagtggaagagcctgaaggcctcggacaccgccgtctactactgtgcgcgactgccgacacccgggcgccaccacgcctacttcgactactggggccagggaaccctggtcaccgcctcctca

SEQ ID NO: 14780 - DNA, 307 bp, Homo sapiens
  source 1..307: mol_type = other DNA
cactgtctctggtggctccatcagcagtagtagtttctactggggctggatccgccagcccccagggaaggggctggagtggattgggagtatctattatagtgggagcacctactacaacccgtccctcaagagtcgagtcgccatttccgtggacacgtcccagaaccagttctccctgaggctgaactctgtgaccgccgcagacacggctgtgtattactgtgcgagacaaggacgatattgcagtggtaccacctgctatattgcccactggggccagggaaccctggtcaccgtctcctca

SEQ ID NO: 14781 - DNA, 307 bp, Homo sapiens
  source 1..307: mol_type = other DNA
cactgtctctggtggctccatcagcagtagtagtttctactggggctggatccgccagcccccagggaaggggctggagtggattgggagtatctattatagtgggagcacctactacaacccgtccctcaagagtcgagtcgccatttccgtggacacgtccaagaaccagttctccctgaggctgaactctgtgaccgccgcagacacggctgtgtattactgtgcgagacaaggacgatattgcagtggtaccacctgctatattgcccactggggccagggaaccctggtcaccgtctcctca

SEQ ID NO: 14782 - DNA, 304 bp, Homo sapiens
  source 1..304: mol_type = other DNA
tgtagcctctggattcgcctttagctcgtatgccatgagctgggtccgccaggctccagggaaggggctggagtgggcctcaggtattagtggtggtggtagaagtacattctacgtcgactcagtgaagggccggttcaccatctccagggacaattccaggaaaacgctgtatctagaaatgaacagcctgagagtcgaagacacggccgtatatcgttgtgcgagaaattcggcctggtccgatggccactactactacatggacgtctggggcaaagggaccacggtcaccgtctcccca

SEQ ID NO: 14783 - DNA, 304 bp, Homo sapiens
  source 1..304: mol_type = other DNA
tgcagcctctggattcagctttagcacctatgccatgagctgggtccgccaggctccagggaaggggctggagtgggcctcaggtattagtggtggtggtagaaataccttctacgtagactcagtgaagggccggttcaccatctccagggacaattccaggaaaacgctgtatttacaaatgaacagcctgagagccgaggacacggccgtatatcgctgtgcgagaaattcggcctggtccgatggccactattactacatggacgtctggggcaaagggaccacggtcaccgtctcctca

SEQ ID NO: 14784 - DNA, 301 bp, Homo sapiens
  source 1..301: mol_type = other DNA
tgcaggctctggattcagctttgacgaatatgccatgcactgggtccggcaagctccagggaagggcctggagtgggtctcaggtattagttcgaatagtggtagcataagttatgcggactctgtgaagggccgattcaccatttccagagacaacgccaagaactccctgtatctgcaaatgaacagtctgagacctgaggacacggccttgtattactgtgcaaaagaccgatattgtattggtggtatttgccccattgactactggggccaggggaccctggtcaccgtctcctca

SEQ ID NO: 14785 - DNA, 301 bp, Homo sapiens
  source 1..301: mol_type = other DNA
tgcaggctctggattcagctttgacgaatatgccatgcactgggtccggctagctccagggaagggcctggagtgggtctcaggtattagtgcggatagtggtgtcataagttatgcggactctgtgaagggccgattcaccatttccagagacaacgccaagaattccctgtatctgcaaatgaacagtctgagacctgaggacacggccttgtattactgtgcaaaagaccgatattgtattggtggtatttgccccattgactactggggccaggggaccctggtcaccgtctcctca

SEQ ID NO: 14786 - DNA, 295 bp, Homo sapiens
  source 1..295: mol_type = other DNA
tgcagcctctggattcacctttagtagctatggcatgagctgggtccgccaggctccaggggaggggctggagtgggtctcaagtatcagtggtggtggtgctgtcacatactacgcagactccgtgaagggccggttcaccatctccagagacaattccaagaacacgctgtatttgcaaatgaacagcctgagagtcgaagacacggccgtgtattactgtgcgaaatacgcagtgcctggaattccggggctttgcgactggggccagggaaccctggtcactgtctcctca

SEQ ID NO: 14787 - DNA, 295 bp, Homo sapiens
  source 1..295: mol_type = other DNA
tgcagcctctggattcacctttagcagctatggcatgagctgggtccgccaggctccaggggaggggctggagtgggtctcaagtatcagtggtggtggtggtgccacatactacgcagactccgtgaagggccggttcaccatctccagggacaattccaagaacacgctgtatttgcaaatggacagcctgagagtcgaggacacggccgtgtattactgtgcgaaatacgcagtgcctggaattccggggctttgcgactggggccagggaaccctggtcactgtctcctca

SEQ ID NO: 14788 - DNA, 307 bp, Homo sapiens
  source 1..307: mol_type = other DNA
tgcagcctctggattcacctttaataactatgccatgaactgggtccgccaggctccagggaaggggctggagtgggtctcaggtattagtggtggtggtattaccacatactacgcagactccgtgaagggccggttcaccatctccagagacaattccaagagcacgctgtatctgcaaatgaacagcctgagagccgaggacacggccgtatattactgtgcgaaaggggggggaacttcatacacagtggctggtttcctttttgagtactggggccagggaaccctggtcaccgtctcctca

SEQ ID NO: 14789 - DNA, 307 bp, Homo sapiens
  source 1..307: mol_type = other DNA
tgcagcctctggattcacctttaataactatgccatgaactgggtccgccaggctccagggaaggggctggagtgggtctcaggtattagtggtggtggtattaccacatactacgcagactccgtgaagggccggttcaccatctccagagacaaatccaagagcacgctgtatctgcaaatgaacagcctgagagccgaggacacggccgtatattactgtgcgaaaggggggggaacttcatacacagtggctggtttcctttttgagtactggggccagggaaccctggtcaccgtctcctca

SEQ ID NO: 14790 - DNA, 280 bp, Homo sapiens
  source 1..280: mol_type = other DNA
tacagcctctggattcatctttagcacctctgccatgatctgggtccgccaggctccagggaaggggctggactgggtggcaactatatcatatgatggaagcggcaaatactacgcagactccgtgaagggccgattcgccatctccagagacgattccaagagcacggtgtttctgcagatgaacagcctgagacctgaggacacggccgtatattactgtgcgaagaactggaacgctgacaattggggccggggaaccctggtcaccgtctcctca

SEQ ID NO: 14791 - DNA, 280 bp, Homo sapiens
  source 1..280: mol_type = other DNA
tacagcctctggattcatctttagcacctctgccatgatctgggtccgccaggctccagggaaggggctggactgggtggcagacatatcatatgatggaagcggcaaatactacgcagactccgtgaagggccgattcgccatctccagagacgattccaagagcacggtgtttctgcagatgaacagcctgagacctgaggacacggccgtatattattgtgcgaagaactggaacgctgacaattggggccggggaaccctggtcaccgtctcctca

SEQ ID NO: 14792 - DNA, 280 bp, Homo sapiens
  source 1..280: mol_type = other DNA
tgcagcctctggattcatctttagcacctctgccatgatctgggtccgccaggctccagggaaggggctggactgggtggcacttatatcatatgatggaaacgacaaatattacgcagtctccgtgaagggccgattcgccatctccagagacgattccaagagcacggtgtttctgcaaatgaacagcctgagacctgaggacacggccgtatattactgtgcgaagaactggaacgctgacaattggggccagggaagcctggtcaccgtctcctca

SEQ ID NO: 14793 - DNA, 280 bp, Homo sapiens
  source 1..280: mol_type = other DNA
tacagcctctggattcatctttagcacctctgccatgatctgggtccgccaggctccagggaaggggctggactgggtggcagctatatcatatgatggaagcggcaaatactacgcagactccgtgaagggccgattcgccatctccagagacgattccaagagcacggtgtttctgcagatgaacagcctgagacctgaggacacggccgtatattactgtgcgaagaactggaacgctgacaattggggccggggaaccctggtcaccgtctcctca

SEQ ID NO: 14794 - DNA, 289 bp, Homo sapiens
  source 1..289: mol_type = other DNA
tgtagcgtctggactcaacttcaacagatatggcatgcactggatccgccagggtccaggcaaggggctggagtgggtggcagttgtttggcatgatggaagtaaaacatactatgatgactccgttaagggccgattcaccatctccagagacaactccaagaacacggtatatttgcaaatggacagtctgagagccgaagacacggcggtgtatttctgtgcggggaccctccaatacggtgacttcgtctactggggccagggaaccctagtcaccgtctcctca

SEQ ID NO: 14795 - DNA, 289 bp, Homo sapiens
  source 1..289: mol_type = other DNA
tgcagcgtctggactcaccttcgatagatatggcatgcactgggtccgccaggctccaggcaaggggctggagtgggtggcggttatttggtatgatggaagtaataagtattacgctgactccgtgaagggccgattcaccatctctagagacaattccaagaacacgctatatctccaaatggacagcctgagagccgaggacacggctgtgtatttctgtgcgggaacactccaatacggcgacttcgtctactggggccagggaaccctggtcaccgtctcctca

SEQ ID NO: 14796 - DNA, 298 bp, Homo sapiens
  source 1..298: mol_type = other DNA
tgcagcctctggattcagcattaggagctattggatgagctgggtccgccaggctccagggaaggggctggagtggctgggcaacataaaacaagatggaagtgagacatactataaagactctgtgaagggccgattcaccatctccagagacaacgccaagaactcactgtatgtgcaattgaacagcctgagagtcgaggacacggccgtttattactgtgcgagagatcgggagtatcgtgggagccacccgattgactactggggccagggaaccctggtcaccgtctcctca

SEQ ID NO: 14797 - DNA, 298 bp, Homo sapiens
  source 1..298: mol_type = other DNA
tgcagtctctggatttagtattagaaactattggatgagttggttccgccaggctccagggaaggggctggagtggctggccaacataaagcaagatggaactgagacatactatgtggactttgtgaagggccgattcaccatctccagagacaacgccaagaactcactgtatgtgcaactgaacagcctgagagtcgacgacacggccgtctattactgtgcgagagatcgggaataccgtgggagccacccgattgactactggggccagggaaccctggtcgccgtctcctca

SEQ ID NO: 14798 - DNA, 298 bp, Homo sapiens
  source 1..298: mol_type = other DNA
tgcagcctctggattcagctttagtagctattggatgagctgggtccgccaggctccagggaaggggctggagtggctgggcaacataaagcaagatggaagtgagacatactataaagagtctgtgaagggccgattcaccatctccagagacaacgccaagaactcactgtatgtgcaattgaacagcctgagagtcgaggacacggccgtttattactgtgcgagagatcgggagtatcgtgggagccacccgattgactactggggccagggaaccctggtcaccgtctcctca

SEQ ID NO: 14799 - DNA, 298 bp, Homo sapiens
  source 1..298: mol_type = other DNA
tgcagcctctggattcacctttagtagttattggatgacctgggtccgccagactccggggaaggggctggagtgggtgggcaacataaagcaagatggaagtgaggtatactgtgtggactctgtgaagggccgattcaccttctccagagacaacgccaagaactcactgtatctgcaaatgaacagcctgagagccgaggacacggccgtgtattactgtgcgagagatcgagagtatagagggagccacccgattgactactggggccagggaaccctggtcaccgtctcctca

SEQ ID NO: 14800 - DNA, 286 bp, Homo sapiens
  source 1..286: mol_type = other DNA
tacaggctctggattcatctttgggagtcactggatgagttggatccgccagtctccagggaaggcgccggagtgggtggccctcataaatcaggatggacgtatggcactctatgtggactctgtgaagggccgattcaccatctccagagacaacgccaggaagtctctgcgtctgcaaatggacggcctgagaggcgaggacacggctgtatattactgtgcgagagaggccttccggggatctgagtgctggggccagggaaccctggtcgccgtctcctca

SEQ ID NO: 14801 - DNA, 286 bp, Homo sapiens
  source 1..286: mol_type = other DNA
tacaggctctggattcatctttgggagtcactggatgagttggatccgccagtctccagggaaggcgccggagtgggtggccctcataaatcaggatggacgtatggcactctatgcggactctgtgaagggccgattcaccatctccagagacaacgccaggaagtctctgcgtctgcaaatggacggcctgagaggcgaggacacggctgtatattactgtgcgagagaggccttccggggatctgagtgctggggccagggaaccctggtcgccgtctcctca

SEQ ID NO: 14802 - DNA, 298 bp, Homo sapiens
  source 1..298: mol_type = other DNA
cactgtctctggtggctccatcactgatcactactggaattggatccggcagtccccggaaaagggactggagtgggttggccatatccgtagtactgagaatacccaccagaatccctccctcaatggtcgactcaccttatcactagacacgtccaagaaccagatctccctgaaactgaactctgtgaccgctgcggacacggccgtgtattattgtggaaggtctggtacgagtggtaattcattcgtggaatttgactactggggccagggaaccctggtcaccgtctcctca

SEQ ID NO: 14803 - DNA, 298 bp, Homo sapiens
  source 1..298: mol_type = other DNA
cagtgtctctggtggctccatcactgatcactactggaactggatccggcagtccccggggaagggactggagtgggttggccatatccgtcagactgagagtacccaccagaatccctccctcaacggtcgactcaccttatcactagacacgtccaagaaccagatctccctgaaactgagctctgtgaccgctgcggacacggccgtgtattattgtggaaggtctggtacgagtggtaattctttcgtggaatttgactactggggccagggaatcctggtcaccgtctcctca

SEQ ID NO: 14804 - DNA, 336 bp, Homo sapiens
  source 1..336: mol_type = other DNA
acacaaaccctcgcgctgacctgcacgttttctgggttctcactcagcaccagtggagtgggtgtgggctggatccgtcagcccccagggaaggccctggaatggcttgcattcatttattgggatgatgataagcgctacagcccatctctgaggaccagactcaccatcaccaaggacacctccaacaaccaggtggtcctcacaatgaccaccatggaccctgtggacacagccacatattactgtgcacacaggttgccgggccatagcggtggctgggacgctggctacttagacttctggggccaggggaccctggtcaccgtctcctca

SEQ ID NO: 14805 - DNA, 336 bp, Homo sapiens; identical to SEQ ID NO: 14804
  source 1..336: mol_type = other DNA

SEQ ID NO: 14806 - DNA, 336 bp, Homo sapiens
  source 1..336: mol_type = other DNA
acacagaccctcgcgctgacctgcacgttctctgggttctcactcagcaccagtggagtgggtgtgggctggatccgtcagcccccagggaaggccctggaatggcttgcattcatttattgggatgatgataagcgctacagcccatctctgaggaccaggctcaccatcaccaaggacacctccaaaaacctggtggtcctcacaatgaccaccatggaccctgtggacacaggcacatattactgtgcacacaggttgccgggccatagcggtggctgggacgctggctacttagacttctggggccagggaaccctggtcaccgtctcctcc

SEQ ID NO: 14807 - DNA, 336 bp, Homo sapiens
  source 1..336: mol_type = other DNA
acacagaccctcgcgctgacctgcacgttctcagggttttcactcagcaccagtggagtgggtgtgggctggatccgtcagcccccagggaaggccctggaatggcttgcattcatttattgggatgatgataagcgctacagcccatctctgaggaccaggctcagcatcaccaaggacacctccaaaaacctggtggtcctcacaatgaccaccatggaccctgtggacacaggcacatattactgtgcacacaggttgccgggccatagcggtggctgggacgctggctacttagacttctggggccaggggaccctggtcaccgtctcctcc

SEQ ID NO: 14808 - DNA, 283 bp, Homo sapiens
  source 1..283: mol_type = other DNA
cagtgtctctggtgactccgtccgttattactattggagctggatccggcagcccccagggaagggactggagtggattggctatatctattacagtgggagcaccaggtacaacccctccctccagagtcgagtcaccatatcaacagacacgtccaagaaccagttctccctgagactgacctcggttaccgctgcggacaccgccgtttattactgtgcgcgaggggtttctctggctattgattcctggggccagggaatcttggtctccgtctcctca

SEQ ID NO: 14809 - DNA, 283 bp, Homo sapiens
  source 1..283: mol_type = other DNA
cagtgtctctggtgactccgtccgtaattactactggagctggatccggcagcccccagggaagggactggagtggattggctatatctattacagtgggagcaccaagtacaacccctccctcaagagtcgagtcaccatatcaacagacacgtccaagaaccagttctccctgaggctgacctctgttaccgctgcggacaccgccgtttattactgtgcgagaggggtttctctggctattgactcctggggccagggaaccctggtctccgtctcctca

SEQ ID NO: 14810 - DNA, 283 bp, Homo sapiens
  source 1..283: mol_type = other DNA
cattgtctctgatgactccgtccgtaattactactggagctggatccggcagcccccagggaagggactggagtggattggctatatctattacagtgggagcaccaagtacaacccctcactcaagagtcgagtcaccatttcaacagacacgtccaagaaccagttctccctgaggctgacctctgttaccgctgcggacaccgccgtgtattactgtgcgagaggggtttctctggctattgactcctggggccagggagccctggtctccgtctcctca

SEQ ID NO: 14811 - DNA, 283 bp, Homo sapiens
  source 1..283: mol_type = other DNA
tgcagcctctggattcacctttagcagctataccatgagttgggtccgccaggctccagggaagggactggagtgggtctcagctgttactggtagtggtagcgccacatcttacgcagactccgtgaagggccggttcaccatctccagagacaattccatggacacgttgtttctccaaatcaacagcctgagagccgaggacacggccgtatatttctgtgcgagaacgccagggttctttgactactggggccagggaagcctggtcaccgtctcctca

SEQ ID NO: 14812 - DNA, 283 bp, Homo sapiens
  source 1..283: mol_type = other DNA
tgcagcctctggattcacctttagcagctataccatgagttgggtccgccaggctccagggaagggactggagtgggtctcagctattactggtagtggtagcgccacatcttacgcagactccgtgaagggccggttcaccatctccagagacaattccatggacacgttgtttctccaaatcaacagcctgagagccgaggacacggccgtatatttctgtgcgagaacgccagggttctttgactactggggccagggaagcctggtcaccgtctcctca

SEQ ID NO: 14813 - DNA, 298 bp, Homo sapiens
  source 1..298: mol_type = other DNA
tgaagcctctggattcacattcagtgactcctacatgacctggatccgccaggctccagggaaggggctggagtgggtttcaatcatgagtggtagcggaaatgccatatacaacgcagactctgtgaagggccgattcaccatctccagggacaactccaagaactcactgtatcttcaaatgaacagcctgagagccgaggacacggccgtgtattattgtgcgagaggctcagggttcggggagttaggggtttttgactactggggccacggaaccctggtcaccgtctcctca

SEQ ID NO: 14814 - DNA, 298 bp, Homo sapiens
  source 1..298: mol_type = other DNA
tgaagcctctggattcacgttcagtgactcctacatgacctggatccgccaggctccagggaaggggctggagtgggtttcaatcatgagtggtagcggaaatgccatatacaacgcagactctgtgaagggccgattcaccatctccagggacaactccaagaactcactatatcttcaaatgaacagcctgagagtcgaggacacggccgtgtattattgtgcgagaggctcagggttcggggagttaggggtttttgactactggggccacggaaccctggtcaccgtctcctca

SEQ ID NO: 14815 - DNA, 321 bp, Homo sapiens
  source 1..321: mol_type = other DNA
acacagaccctcacgctgacctgcaccttctctgggttgtcactcagcactaatggagtgggtgtgggctggatccgtcagcccccaggaaaggccctggagtggcttgcactcatttattgggatgatgataagcgctacagcccatctctgaagagcaggctcaccatcaccaaggacacctccagaaaccaggtggtccttactatgaccaacatggaccctgtggacacaggcacatattactgtgcacgcggggggtcggactacaattacgcatttgactcctggggccagggaaccctggtcaccgtctcctca

SEQ ID NO: 14816 - DNA, 321 bp, Homo sapiens
  source 1..321: mol_type = other DNA
acacagaccctcacgctgacctgcaccttctctgggttgtcactcagcactaatggagtgggtgtgaactggatccgtcagcccccaggaaaggccctggagtggcttgcactcatttactgggatgatgataagagctacagcccatctctaaagagcaggctcatcatcaccaaggacacctccagaaaccaggtggtccttactatgaccaacatggaccctgtggacacaggcacatattactgtgcacgcggggggtcggactacaattacgcatttgactcctggggccagggaaccctggtcaccgtctcctca

SEQ ID NO: 14817 - DNA, 321 bp, Homo sapiens
  source 1..321: mol_type = other DNA
acacagaccctcacgctgacctgcaccttctctggattctcactcaacacttatgcagtgggtgtgggctggattcgtcagcccccaggaaaggccctagaatggcttgcactcatttattgggatgatgataagacctacagtccatctctgaagagcaggctcaccatcaccaaggacacctccagtaaccaagtagtccttactatgaccaatatggaccctgtggacacaggcacatattactgtgcacgcggggggtccgactacaattatgcatttgactcctggggccagggaaccctggtcaccgtctcctca

SEQ ID NO: 14818 - DNA, 292 bp, Homo sapiens
  source 1..292: mol_type = other DNA
tgcagcctctggattcaggttcagtgactattacatgagttggatccgccaggctccagggagggggctggagtggatttcatacattagtagtagtggtggttccatatactatacagactctgtgaagggccgattcaccgtctccagggacaacgccaagaagtcactgtatcttcaaatgaacagcctgagagccgaggacacggccgtgtattactgtgcgagagatccgactataaaatactacatggacgtttggggcaaagggaccacggtcaccgtctcctca

SEQ ID NO: 14819 - DNA, 292 bp, Homo sapiens
  source 1..292: mol_type = other DNA
tgcagcctctggattcaccttcagtgactactacatgagttggatccgccaggctccagggaaggggctggagtggctttcatacattagtagtagtggtagtactacatattatgcagactctgtgaagggccgattcaccatctccagggacaacgccaagaactctctgtatctgcacatgaacagcctgagagccgaggacacggccgtgtattactgtgcgagggatccgactataaaatactacatggacgtgtggggcagagggaccacggtcaccgtctcctca

SEQ ID NO: 14820 - DNA, 310 bp, Homo sapiens
  source 1..310: mol_type = other DNA
tgcggcctctgggttcaccctcagtggctctgctgtggaatgggtccgccaggcttccgggaaagggctggagtgggttggccgtattaggagcaaagctaataggtacgcgacagaatatcatgcgtcggtgaaaggcaggttcaccatttccagagatgattcaaagaacacggcgtatctgcaaatgagcagcctgaaaatcgaggacacggccatttattattgtgttagtcgtggctccgaccccgtggacgaagtgcattggtgggacttctggggccagggaacactggtcaccgtctcctca

SEQ ID NO: 14821 - DNA, 310 bp, Homo sapiens
  source 1..310: mol_type = other DNA
tgcggcctctgggttcagcctcagtggctccattgtggaatgggtccgccaggcttccgggaaagggctggagtgggttggccgtatcaggagcaaagctaatggtgacgcgacagcatatgatgcgtcgctgaaaggcaggttcaccatctccagagatgattcaaagaacacggcgtatctgcaaatgagcagcctgaaaatcgaggacacggccatttattactgtgttagtcgtggctccgaccccgtggacgaagtgcattggtgggacttctggggccagggaaccctggtcaccgtctcctca

SEQ ID NO: 14822 - DNA, 316 bp, Homo sapiens
  source 1..316: mol_type = other DNA
cacagcttctggattcgcatttagtcggtatgctatgacctgggtccgccaggctccagggaagggccttgaatggttaggtttcattagaagcgaatcttatggtgatacaacggaatatgccgcgtctgtgaaaggcagattcttcatctcaaaagatgattccaaaagaatcgcctatctgcaaatgaacagcctggaaatcgaggacacaggcgtgtatcactgtattagaggcggagatttttggagtggaccttatagcgaaaactggttcgacacctggggccagggaaccctggtcaccgtctcctca

SEQ ID NO: 14823 - DNA, 316 bp, Homo sapiens
  source 1..316: mol_type = other DNA
cacagcctctggattcgcatttagtcggtatgctatgacctgggtccgccaggctccagggaagggccttgaatggttaggtttcattagaagcgaatcttatggtgacacatcagaatatgccgcgtctgtgaaaggcagattcttcatctcaaaagatgattccaaaagagtcgcctatctgcaaatgaacagcctggaaatcgaggacacaggcgtgtattactgcattagaggcggagatttttggagtggaccttatagcgaaaactggttcgacacctggggccagggaaccctggtcaccgtctcctcg

SEQ ID NO: 14824 - DNA, 285 bp, Homo sapiens
  source 1..285: mol_type = other DNA
gcgtctggatacagcttcacccattatgatgtcaactgggtgcgacaggccactggacaagggcctgagtggatgggatgggtggaccatagcagtggtaacgcgggctttccacagaagttccagggcagagtcaccttgaccagggacacctccataagcaccgcctacctggaactgagccgcctgacatctgacgacacgggcgtatattattgtgtggtcgggatgactgaatttacttttgatatttggggccaagggacaatggtcaccgtctcttca

SEQ ID NO: 14825 - DNA, 285 bp, Homo sapiens
  source 1..285: mol_type = other DNA
gcgtccggatacaccctcacccagtatgatgtcaactgggtgcgacaggcccctggacaagggcctgagtggatgggatgggtgcaccgtagcagtggtaacgcgggctttgcacagaagttccagggcagagtcaccttgacgagggacacctccataaacacagcctacctggaactgagcagcctgagatctgacgacacgggcgtatattactgtgtggtcgggatgactgaatttacttttgatatctggggccaagggacaatggtcaccgtctcttca

SEQ ID NO: 14826 - DNA, 292 bp, Homo sapiens
  source 1..292: mol_type = other DNA
tgcagtctctggattcactttcactaatgcctggatgagctgggtccgccaggctccagggaggggcctggagtggcttggccgtatcaaaagcaaaagtgatcgtgggacaatcgactacgctgcagccctgaagggcagattcaccatctcaagagatgattcaaaaaacacgttgtatctgcaaatgaacagcctgaataccgaggacacagccgtgtattactgtaccacagactaccttactgcttttgacatctggggccaagggacgatggtcaccgtctcttca

SEQ ID NO: 14827 - DNA, 292 bp, Homo sapiens
  source 1..292: mol_type = other DNA
tgcagtctctggattcactttcactaatgcctggatgagctgggtccgccaggctccagggaggggcctggagtggcttggccgtatcaaaagcaaaagtgatcgtgggacaatcgactacgctgcagccctgaagggcagattcaccatctcaagagatgattcaaaaaacacgttatatctgcaaatgaacagtctgaataccgaggacacagccgtgtattactgtaccacagactaccttactgcttttgacatctggggccaagggacgatggtcaccgtctcttca

SEQ ID NO: 14828 - DNA, 292 bp, Homo sapiens
  source 1..292: mol_type = other DNA
tgcagtctctggattcactttcactaatgcctggatgagctgggtccgccaggctccagggaggggcctggagtggcttggccgtatcaaaagcaaaagtgatcgtgggacaatcgactacgctgcagccctgaagggcagattcaccatctcaagagatgattcaaaaaacacgttgtatctgcaaatgaacagtctgaataccgaggacacagccgtgtattactgtaccacagactaccttactgcttttgacatctggggccaagggacgatggtcaccgtctcttca

SEQ ID NO: 14829 - DNA, 292 bp, Homo sapiens
  source 1..292: mol_type = other DNA
tgcagtctctggattcactttcactaatgcctggatgagctgggtccgccaggctccagggaggggcctggagtgggttggccgtatcaaaagcaaaagtgatcgtgggacaatcgactacgctgcagccctgaagggcagattcaccatctcaagagatgattcaaaaaacacgctgtatctgcaaatgaacagcctgaataccgaggacacagccgtgtattactgtaccacagactaccttactgcttttgacatctggggccaagggacaatggtcaccgtctcttca

SEQ ID NO: 14830 - DNA, 316 bp, Homo sapiens
  source 1..316: mol_type = other DNA
tgcagcgtctggattcaccttcagtagctatggcatgcactgggtccgccaggctccaggcaaggggctagagtgggcggcagttatatggtatgatggaagtaataaatactatgcagactccgtgaagggccgattcaccatctccagagacaattccaagaacacgctgtatctgcaaatgaacagcctgagagccgaggacacggctgtgtattactgtgcgagagataagggaataatggtgtatgctagtatacactactactactacatggacgtctggggcaaagggaccacggtcaccgtctcctca

SEQ ID NO: 14831 - DNA, 316 bp, Homo sapiens
  source 1..316: mol_type = other DNA
tgcagcgtctggattcaccttcagtagctatggcatgcactgggtccgccaggctccaggcaaggggctagagtgggtggcagttatatggtatgatggaagtaataaatactatgcagactccgtgaagggccgattcaccatctccagagacaattccaagaacacgctgtatctgcaaataaacagcctgagagccgaggacacggctgtgtattactgtgcgagagataagggaataatggtgtatgctagtatacactactactactacatggacgtctggggcaaagggaccacggtcaccgtctcctca

SEQ ID NO: 14832 - DNA, 304 bp, Homo sapiens
  source 1..304: mol_type = other DNA
cactgtctctggtggcgccatcagcagtagtagtttctactggggctggatccgccagcccccagagaagggactggagtggattgggagcatctctcatgatggggccacctactacaacccgtccctcaagagtcgagtcaccatatccgtagacacgtccaggaaccagttctccctggaggtggactctgtgagcgccgcagacacggctatttattactgtacgagacatgtgggcaacacggtgactaaggctaaatttgagtcctggggccagggaaccctggtcaccgtctcctca

SEQ ID NO: 14833 - DNA, 304 bp, Homo sapiens
  source 1..304: mol_type = other DNA
cactgtctctggtggcgccatcagcagtagtgattactactggggctggatccgccagcccccagggaaggggctggagtggatcgggagtatctattatgctggggacacctactacaacccgtccctccagagtccagtctccatatccgtagacacgtccaagaaccagttctccctgaaggtgaactctgtgaccgccgcagacacggctgtgtattattgtacgagacatgtaggcaacacggtgactaaggctaaatttgagtcctggggccagggaaccctggtcaccgtctcctca

SEQ ID NO: 14834 - DNA, 298 bp, Homo sapiens
  source 1..298: mol_type = other DNA
tgccgccactggattcacctttagcagctttgccatgagctgggtccgccaggctccagggaaggggctagagtgggtctcaggtgttggtggtgatggggctgacacgtactacgcagactccgtgaggggccggttcaccatctccagagacaattccaagaacacgctgtctttgcagatgaacagcctgagagtcgacgacacggccgtatattactgcgcgaaagagattggattgagtggcattttcgtttttgaccattggggccagggagccctggtcaccgtctcctca

SEQ ID NO: 14835 - DNA, 298 bp, Homo sapiens
  source 1..298: mol_type = other DNA
tgccgccactggattcacctttagcagctttgccatgagctgggtccgccaggctccagggaaggggctagagtgggtctcaagtgttggtggtgatggggctgacacgtactacgcagactccgtgaggggccggttcaccatctccagagacaattccaagaacacgctgtctttgcagatgaacagcctgagagtcgacgacacggccgtatattactgcgcgaaagagattggattgagtggcattttcgtttttgaccattggggccagggagccctggtcaccgtctcctca

SEQ ID NO: 14836 - DNA, 306 bp, Homo sapiens
  source 1..306: mol_type = other DNA
aaggcttctggatacgactttaccaactactggatcctctgggtgcgccagatgcccgggaaaggcctggagtgggtggggatcacctttcctcgtgactctgataccagatacagcccgtccttccaaggccaggtcaccatctcggccgacaagtccatcagcaccgcctacctgcagtggaacactctgaaggcctcggacaccgccatgtattactgtgcgagacggttttgtggtactcctaccacttgctcctcgtactttgactactggggccagggaagcctggtcaccgtctcctca

SEQ ID NO: 14837 - DNA, 306 bp, Homo sapiens
  source 1..306: mol_type = other DNA
aaggcttctggatacgactttaccaactactggatcctctgggtgcgccagatgcccgggaaaggcctggagtgggtggggatcacctttcctcgtgactctgataccagatacagcccgtccttccaaggccaggtcaccatctcggccgacaagtccatcagcaccgcctacctgcagtggaacagtctgaaggcctcggacaccgccatgtattactgtgcgagacggttttgtggtactcctaccacttgctcctcatactttgactactggggccagggaagcctggtcaccgtctcctca

SEQ ID NO: 14838 - DNA, 301 bp, Homo sapiens
  source 1..301: mol_type = other DNA
tgcagcctctggattcaccttcagtgactactacctggagtgggtccgccagactccggggaaggggctggagtgggttggccttaccagaaacaaagctaacagttacaccacagagtacgccgcgtctgtgaaaggcagattcaccatctcaagagatgattcaaagaactcactgtatctgcagatgaatagcctgaaaaccgaggacacggccatatattactgtgctagaggtttggggttcggcaatgcctacatggacgtctggggcaaagggaccacggtcaccgtctcttcc

SEQ ID NO: 14839 - DNA, 301 bp, Homo sapiens
  source 1..301: mol_type = other DNA
tgcagcctctggattcaccttcagtgactactacatacagtgggtccgccagactccggggaaggggctggagtgggttggcctcaccagaaataaaggtgcctcttacaccacagaatacgccccgtctgtgaaaggcagattcaccatctcaagagatttttccaacaactcagtgtatctgcagatgaaaagcctgaaaaccgaggacacggccatatattattgtgctcgaggtttgggattcgggaatgcctacatggacgtctggggcaaagggaccacggtcaccgtttcctcc

SEQ ID NO: 14840 - DNA, 316 bp, Homo sapiens
  source 1..316: mol_type = other DNA
cactgtctctggtggctccatcagcagtagttcttactactggggctggatccgccagcccccagggaagggactggagtggattgggagtatctcttacagtgggagtacctactacaattcgaccctcaagaatatagtcaccatgtccgtagacacgtccaagaatgagttctccctgaaggtgagctctgtgaccgccgcagacacggctctatattactgtgcgagacatatggccgggaaatggggagtggctacgatccagtccgcttttggtatctggggccaagggacaatggtcaccgtctcttca

SEQ ID NO: 14841 - DNA, 316 bp, Homo sapiens
  source 1..316: mol_type = other DNA
cactgtctctggtggctccatcagcagtagtacttactactggggctggatccgccagcccccagggaagggactggagtggattgggagtatcaactatagtgggagcacctactacaacccgtccctcaagagtggagtcaccatgtccgtagacacgtccaagaatgagttctcactgaaggtgagctctgtgaccgccgcagacacggctctgtattattgtgcgagacatatggccgggaaatggggagtggctacgatccagtccgcttttggtatctggggccaagggacagtcgtcaccgtctcttca

SEQ ID NO: 14842 - DNA, 282 bp, Homo sapiens
  source 1..282: mol_type = other DNA
gcttctggatacaccttcattaactatgctatacattgggtgcgccaggcccccggacaaaggcctgagtggatgggatacatcaacgctggcaacggtaacacaaaatattcaccgaagttccagggcagagtcaccattagtagggacacatccgcgaacatagcctacacggagttgagcagcctgagatctgaagacacggctgtctattactgtgcgagagagcgcgctggtaccattgactcctggggccagggatccctggtcaccgtctcctca

SEQ ID NO: 14843 - DNA, 282 bp, Homo sapiens
  source 1..282: mol_type = other DNA
gcctctggattcaccttcagtaattatgccatccattgggtgcgccaggcccccggacaaaggcttgagtggatggggtacttctacgcaggcaatggtaacacaaagtattcagagaagttccaggacagagtcaccattaccggggacacatccgcgagcacatcctacatggagctgaccagcctgacatctgaagacacggctttttattactgtgccagagagcgcgccggtacgattgactcctggggtcagggaaccctgctcaccgtctcctca

SEQ ID NO: 14844 - DNA, 304 bp, Homo sapiens
  source 1..304: mol_type = other DNA
cactgtctctggtggctccgtcaccactgctaattactactggaactggatccggcagcccccagggaagggactggagtggattgggtatatccattacactgggaggtccgactaccacccctccctcaagagtcgagtcaccttatccgtcgacacgtccaataaccacctctccctgcacctgagttctgtgaccgctgcggacacggccgtgtattactgtggtaggtctgataggattggtccttctttcgtggagtttgattactgcggccagggaatcctggtcaccgtctcctca

SEQ ID NO: 14845 - DNA, 304 bp, Homo sapiens
  source 1..304: mol_type = other DNA
cactgtctctggtggctccgtcaccactgctaattactactggaactggatccggcagcccccagggaaggggctggagtggattgggtatatccattacactgggaggtccgactaccacccctccctcaagagtcgagtcaccttatccgtcgacacgtccaataaccacctctccctgcacctgagttctgtgaccgctgcggacacggccgtgtattactgtggtaggtctgataggattggtccttctttcgtggagtttgattactgcggccagggaatcctggtcaccgtctcctca

SEQ ID NO: 14846 - DNA, 304 bp, Homo sapiens
  source 1..304: mol_type = other DNA
cactgtctctggtggctccgtcaccactgctaattacttctggaattggatccgtcagcccccagggaagggtctggagtggattgggtatatccattacagtgggaggtccgactaccacccctccctcaagagtcgagtcaccttatccgtcgacacgtccaataaccacctctccctgcacctgagttctgtgaccgctgcggacacggccgtgtattactgtggtaggtctgataggattggtccttctttcgtggagtttgattactgcggccagggaatcctggtcaccgtctcctca

SEQ ID NO: 14847 - DNA, 304 bp, Homo sapiens
  source 1..304: mol_type = other DNA
cactgtctctggtggctccgtcgccactgctaattactactggaactggatccggcagcccccagggaaggggctggagtggattgggtatatccattacagtgggaggtccgactaccacccctccctcaagagtcgagtcaccttatccgtcgacacgtccaataaccacctctccctgcacctgagttctgtgaccgctgcggacacggccgtgtattactgtggtaggtctgataggattggtccttctttcgtggagtttgattactgcggccagggaatcctggtcaccgtctcctca

SEQ ID NO: 14848 - DNA, 304 bp, Homo sapiens
  source 1..304: mol_type = other DNA
cactgtctctggtggctccgtcagcagtgctaataactactggagctggatccggcagcccccagggaaggggctggagtggattgcgtatatccattacaatgggaggtccgactaccacccctccctcaagagtcgagtcaccgtatccgtagacacgtccaagaaccacctctccctgcagctgagttctgtgaccgctgcggacacggccgtgtattactgtggtaggtctgataggattggtccttctttcgtggagtttgattactgcggccagggaatcctggtcaccgtctcctca

SEQ ID NO: 14849 - DNA, 282 bp, Homo sapiens
  source 1..282: mol_type = other DNA
acttctggatacaccttcaccaaatttgatattaattgggtgcgacaggccactggacaagggcttgagtggatgggatacatgaaccctgacaatgggaacacgggctatgcacagaagttccagggcagagtcaccatgaccagcaacgcctccataggcacagcctacttggagctgacctccctgactcctgacgacacggccgtgtatttctgtgcgagatctgactggaacttccttgacttctggggcgacggatccctggtcagcgtctcctca

SEQ ID NO: 14850 - DNA, 282 bp, Homo sapiens
  source 1..282: mol_type = other DNA
acttctggatacaccttcaccaattttgatattaattgggtgcgacaggccactggacaagggcttgagtggatgggatacatgaaccctgacaatgggaacacgggctatgcacagaagttccagggcagagtcaccatgaccaggaacacctccataggcacagcctacttggagctgagctccctgacttctgacgacacggccgtgtatttctgtgcgagatctgactggaacttccttgacttctggggcgacggatccctggtcagcgtctcctca

SEQ ID NO: 14851 - DNA, 282 bp, Homo sapiens
  source 1..282: mol_type = other DNA
acttctggatacaccttcaccaaatttgatattaattgggtgcgacaggccactggacaagggcttgagtggatgggatacatgaaccctgacaatgggaacacgggctatgcacagaagttccagggcagagtcaccatgaccaggaacacctccataggcacagcctacttggagctgagctccctgacttctgacgacacggccgtgtatttctgtgcgagatctgactggaacttccttgacttctggggcgacggatccctggtcagcgtctcctca

SEQ ID NO: 14852 - DNA, 282 bp, Homo sapiens
  source 1..282: mol_type = other DNA
acttctggatacaccttcaccaaatttgatattaattgggtgcgacaggccactggacaagggcttgagtggatgggatacatgaaccctgacaatgggaacacgggctacgcacagaagttccagggcagaatcaccatgaccaggaacacctccataggcacagcctacttggagctgaggtccctgacgtctgacgacacggccgtgtacttctgtgcgagatctgactggaacttccttgacttctggggcgagggatccctggtcagcgtctcctca

SEQ ID NO: 14853 - DNA, 282 bp, Homo sapiens
  source 1..282: mol_type = other DNA
acttctggatacaccttcaccaaatttgatattaattgggtgcgacaggccactggacaagggcttgagtggatgggatacatgaaccccgacaatgggaacacgggctatgcacagaagttccagggccgagtcaccatgactagcaacgcctccataggcacagcctacttggagctgacctccttgactcctgacgacacggccgtgtatttctgtgcgagatctgactggaacttccttgacttctggggcgacggatccctggtcagcgtctcctca

SEQ ID NO: 14854 - DNA, 282 bp, Homo sapiens
  source 1..282: mol_type = other DNA
acttctggatacaccttcaccaattttgatattaattgggtgcgacaggccactggacaagggcttgagtggatgggatacatgaaccctgacaatgggaacacgggctatgcacagaagttccagggcagagtcaccatgaccaggaacacctccataggcacagcctacttggagctgacctccctgacttctgacgacacggccgtgtatttctgtgcgagatctgactggaacttccttgacttctggggcgacggatccctggtcagcgtctcctca

SEQ ID NO: 14855 - DNA, 319 bp, Homo sapiens
  source 1..319: mol_type = other DNA
cactgtcactggtgcctccatcaacagttactactggagttgggtccggcaggccccggggaagggagtggagtggcttgggtctatctattacagtgggagcaccgactacaacccctccctcgggagtcgagcctccatatcgctagacatggacaaaaaccagttttctttgaggctgagctctgtgaccgctgcggacacggccgtgtattactgtgcgagtttggtcggagattgtagtcgtattagttgctatttccctggtgtagcctacaaggacgtctggggcaaagggaccacggtcaccgtctcctca

SEQ ID NO: 14856 - DNA, 319 bp, Homo sapiens
  source 1..319: mol_type = other DNA
cactgtcactggtgcctccatcaacagttactactggagttgggtccggcaggccccggggaagggagtggagtggcttgggtctatctattacagtgggagcaccgactacaacccctccctcgggagtcgagcctccatatcgctagacatggacaaaaaccagttttctttgaggctgagctctgtgacccctgcggacacggccgtgtattactgtgcgagtttggtcggagattgtagtcgtattagttgctatttccctggtgtagcctacaaggacgtctggggcaaagggaccacggtcaccgtctcctca

SEQ ID NO: 14857 - DNA, 292 bp, Homo sapiens
  source 1..292: mol_type = other DNA
tgcagcctctggattcacctttagcacctatgccatggcctgggtccgccaggctccagggaaggggctggactgggtctcagctattagtgatagtggtggtagcacatattacgcagattctgtgaagggccggttcaccatctccagagacaactccaagaacacgctgtttctgcaattgaacagcctcagacccgaggacacggccgtatatttctgtgcgaaaagaattctactgaactacttctttgactactggggccagggagccctggtcaccgtctcctca

SEQ ID NO: 14858 - DNA, 292 bp, Homo sapiens
  source 1..292: mol_type = other DNA
tgcagcctctggattcacctttggaagctatgccatgagctgggtccgccaggctccagggaaggggctggagtgggtctcagcaattagtgatagtggtggtagcacatactacgcagactccgtgaagggccggttcaccatctccagagacaattccaagtacacgctgtttctgcaattgagcagcctgagacccgaggacacggccgtatattactgtgcgaaaagaatcctactgaactacttctttgactactggggccagggaaccctggtcaccgtctcctca

SEQ ID NO: 14859 - DNA, 292 bp, Homo sapiens
  source 1..292: mol_type = other DNA
tgtagcctctggattcacgtttagcacctacgccatgagctgggtccgccaggctccagggaaggggctggactgggtctcagcgattagtgacagtggtgggaacacatactacgcagactccgtgaagggccggttcaccatctccagagacaattccaagaacacgctgtttctgcagttgaacagcctgagacccgaggacacggccgtatattactgtgcgaaaagaattctactgaactacttctttgactactggggccagggagccctggtcaccgtctcctca

SEQ ID NO: 14860 - DNA, 290 bp, Homo sapiens
  source 1..290: mol_type = other DNA
ccatctccggggacagtgtctctagtaatagtgctgcttggaactggttcaggcagtccccatcgagaggccttgagtggctgggaaggacatactacaggtccaagtggtataatgattacgcagtatctgtgaaaagtcgaataaccatcgacccggacacatccaagaaccagttctccctgcagctgaagtctctgactcccgaggacacggctgtgtattactgtgcagaggggactggtacatttgactactggggccaggggaccctggtcaccgtctcctca

SEQ ID NO: 14861 - DNA, 290 bp, Homo sapiens
  source 1..290: mol_type = other DNA
ccatctccggggacagtgtctctagtaatagtgctgcttggaactggttcaggcagtccccatcgagaggccttgagtggctgggaaggacatactataggtccaagtggtataatgattacgcagtatctgtgaaaagtcgaataaccatcgacccggacacatccaagaaccagttctccctgcagctgaagtctctgactcccgaggacacggctgtatactactgtgcagaggggactggtacatttgactactggggccaggggaccctggtcaccgtctcctca

SEQ ID NO: 14862 - DNA, 290 bp, Homo sapiens
  source 1..290: mol_type = other DNA
ccatttccggggacagtgtctcaagtaatagtgctgcttggaactggttcaggcagtccccatcgagaggcattgagtggctgggaaggacatattacaggtccaagtggtattatgattacgcagtatctgtgaaaagtcgaataacaatcgacccggacacatccaagaaccagttctccctgcagttgaagtctctgactcccgaggacgcggctgtatactactgtgcagaggggactggtacatttgactactggggccaggggaccctggtcaccgtctcctca

SEQ ID NO: 14863 - DNA, 290 bp, Homo sapiens
  source 1..290: mol_type = other DNA
ccatctccggggacagtgtctctagtaatagtgctgcttggaactggttcaggcagtccccatcgagaggccttgagtggctgggaaggacatactacaggtccaagtggtattatgattacgcagtatctgtgaaaagtcgaataaccatcgacccggacacatccaagaaccagttctccctgcagctgaggtctctgactcccgaggacacggctgtgtactactgtgcagaggggactggtacatttgactactggggccaggggaccctggtcaccgtctcctca

SEQ ID NO: 14864 - DNA, 290 bp, Homo sapiens
  source 1..290: mol_type = other DNA
ccatctccggggacagtgtctctagtaatagtgctgcttggaactggttcaggcagtccccatcgagaggccttgagtggctgggaaggacatactacaggtccaagtggtattatgattacgcagtatctgtgaaaagtcgaataaccatcgacccggacacatccaagaaccagttctccctgcagttgaagtctctgactcccgaggacacggctctatactactgtgcagaggggactggtacatttgactactggggccaggggaccctggtcaccgtctcctca

SEQ ID NO: 14865 - DNA, 290 bp, Homo sapiens
  source 1..290: mol_type = other DNA
ccatctccggggacagtgtctctagtaatagtgctgcttggaactggttcaggcagtccccatcgagaggccttgagtggctgggaaggacatactacaggtccaagtggtataatgattacgcagtatctgtgaaaagtcgaataaccatcgacccggacacatccaagaaccagttctccctgcagctgaagtcgctgactcccgaggacacggctgtgtactattgtgcagaggggactggtacatttgactactggggccaggggaccctggtcaccgtctcctca

SEQ ID NO: 14866 - DNA, 290 bp, Homo sapiens
  source 1..290: mol_type = other DNA
ccatctccggggacagtgtctctagtaatagtgctgcttggaactggttcaggcagtccccatcgagaggcattgagtggctgggaaggacatactacaggtccaagtggtattatgattacgcagtatctgtgaaaagtcgaataaccatcgacccggacacatccaagaaccagttctccctgcagttgaagtctctgactcccgaggacacggctgtatactactgtgcagaggggactggtacatttgactactggggccaggggaccctggtcaccgtctcctca

SEQ ID NO: 14867 - DNA, 290 bp, Homo sapiens
  source 1..290: mol_type = other DNA
ccatctccggggacagtgtctctagtaatagtgctgcttggaactggttcaggcagtccccatcgagaggccttgagtggctgggaaggacatactacaggtccaagtggtataatgattacgcagtatctgtgaaaagtcgaataaccatcgacccggacacatccaagaaccagttctccctgcagctgaagtctctgactcccgaggacacggctgtgtactactgtgcagaggggactggtacatttgactactggggccaggggaccctggtcaccgtctcctca

SEQ ID NO: 14868 - DNA, 290 bp, Homo sapiens
  source 1..290: mol_type = other DNA
ccatctccggggacagtgtctctagtaacagtgctgcttggaactggttcaggcagtccccatcgagaggccttgagtggctgggaaggacatactacaggtccaagtggtattatgattacgcagtatctgtgaaaagtcgaataaccatcgacccggacacatccaagaaccagttctccctgcaactgaggtctctgactcccgaggacacggctgtgtactactgtgcagaggggactggtacatttgactactggggccaggggaccctggtcaccgtctcctca

SEQ ID NO: 14869 - DNA, 290 bp, Homo sapiens
  source 1..290: mol_type = other DNA
ccatctccggggacagtgtctctagtaatagtgctgcttggaactggttcaggcagtccccatcgagaggccttgagtggctgggaaggacatactacaggtccaagtggtataatgattacgcagtatctgtgaaaagtcgaataaccatcgacgcggacacatccaggaaccagttctccctgcagctgaagtctctgactcccgaggacacggctgtgtactactgtgcagaggggactggtacatttgactactggggccaggggaccctggtcaccgtctcctca

SEQ ID NO: 14870 - DNA, 290 bp, Homo sapiens
  source 1..290: mol_type = other DNA
ccatctccggggacagtgtctctagtaataatgctgcttggaactggttcaggcagaccccatcgagaggccttgagtggctgggaaggacatactacaggtccaagtggtatactgattacgcagtatctgtgaaaagtcgaataaccatcgacccggacacatccaagaaccagttctccctgcagttgaagtctctgactcccgaggacacggctgtgtattactgtgcagaggggactggtacatttgactactggggccaggggaccctggtcaccgtctcctca

SEQ ID NO: 14871 - DNA, 290 bp, Homo sapiens
  source 1..290: mol_type = other DNA
ccatctccggggacagtgtctctagtaatagtgctgcttggaactggttcaggcagtccccatcgagaggccttgagtggctgggaaggacatactacaggtccaagtggtattatgattacgcagtatctgtgaaaagtcgaataaccatcgacccggacacatccaagaaccagttctccctgcaactgaagtctctgactcccgaggacacggctgtctactactgtgcagaggggactggtacatttgactactggggccaggggaccctggtcaccgtctcctca

SEQ ID NO: 14872 - DNA, 297 bp, Homo sapiens
  source 1..297: mol_type = other DNA
gcttctggaggcaccttcagcaactatgctctcagctgggtgcgacaggcccctggacaagggcttgagtggatgggagggatcatccctatctttgggacagcaaactacgcacagaggttccagggcagagtcacgattaccgcggacgaatccacgagcacagcctacatggagctgagcggcctgagatctgaggacacggccctgtattactgtgcgagagagaggtacggcatcaacatagttgatgcttttgatatctggggccaagggacaacggtcaccgtctcttca

SEQ ID NO: 14873 - DNA, 297 bp, Homo sapiens
  source 1..297: mol_type = other DNA
gcttctggaggcaccttcagcaactatgctctcagctgggtgcgacaggcccctggacaagggcttgagtggatgggagggatcatccctatctttggtacagcaaactacgcacagaagttccagggcagagtcacaattaccgcggacgaatccacgagcacagcctacatggagctgagcagcctgagatctgaggacacggccctatattactgtgcgagagagaggtacggcatcaacatagttgatgcttttgatatctggggccaagggacaatggtcaccgtctcttca

SEQ ID NO: 14874 - DNA, 297 bp, Homo sapiens
  source 1..297: mol_type = other DNA
gcttctggaggcaccttcagcaactatgctctcagctgggtgcgacaggcccctggacaagggcttgagtggatgggagggatcatccctatctttggtacagcaaactacgcacagaagttccagggcagagtcacgattaccgcggacgaatccacgagcacagcctacatggagctgagcagcctgagatctgaggacacggccctgtattactgtgcgagagagaggtacggcatcaacatagttgatgcttttgatatctggggccaagggacaatggtcaccgtctcttca

SEQ ID NO: 14875 - DNA, 297 bp, Homo sapiens
  source 1..297: mol_type = other DNA
gcttctggaggcaccttcagcaactatgctctcagctgggtgcgacaggcccctggacaagggcttgagtggatgggagggatcatccctatctttggtacaccaaactacgcacagaagttccagggcagagtcacgattaccgcggacgaatccacgagcacagcctacatggagttgagcagcctgacatctgaggacacggccctgtattattgtgcgagagagaggtacggcatcaacatagttgatgcttttgatatctggggccaagggacaatggtcagcgtctcttca

SEQ ID NO: 14876 - DNA, 301 bp, Homo sapiens
  source 1..301: mol_type = other DNA
tgcagcctctgggttcaccgtcagtagcaactacatgagctgggtccgccaggctccagggaaggggctggagtgggtctcagttatttatagcggtggtagcacatactacgcagactccgtgaggggccgattcaccatctccagagacaattccaagaacacgctgtttcttcaaatgaacagcctgagagccgaggacacggccgtgtattactgtggcagagatccgatcgatcctaactggaactacttgtcgttcgacccctggggccagggaaccctggtcaccgtctcctca

SEQ ID NO: 14877 - DNA, 301 bp, Homo sapiens
  source 1..301: mol_type = other DNA
tgaagcctctgggttcaccgtcagtagcaactacatgagctgggtccgccaggctccagggaaggggctggagtgggtctcagttatttatagtggtggtagcacatactacgcagactccgtgaagggccgattcaccatctccagagacaattccaagaacacactgtatcttcaaatgaacagcctgagagccgaggacacggccgtgtattactgtggcagagatccgatcgatcctaactggaactacttgtcgttcgacccctggggccagggaaccctggtcaccgtctcctca

SEQ ID NO: 14878 - DNA, 307 bp, Homo sapiens
  source 1..307: mol_type = other DNA
cggtgtctctggtggctccatcagcagtggtgctttctcctggagttggatccggcagccaccagggaagggcctggagtgggttgggtacatttatcatactgggagcacctactacaacccgtccctcaagagtcgagtcaccatatcactagacaggtccaagaatcagttctccctgaagctgagttctgtgaccgccgcagacacggccgtgtatttctgtgccagagcgggctattgtagtagtaccagttgttatgcttttgatatctggggccaagggacaatggtcaccgtctcttca

SEQ ID NO: 14879 - DNA, 307 bp, Homo sapiens
  source 1..307: mol_type = other DNA
cggtgtctctggtggctccatcagcagtggtgctttctcctggagttggatccggcagccaccagggaagggcctggagtgggttgggtacatttatcatactgggagcacctactacaccccgtccctcaagagtcgagtcaccatatcactagacaggtccaacaatcagttctccctgaagctgagttctgtgaccgccgcagacacggccgtgtatttctgtgccagagcgggctattgtagtagtaccagttgttatgcctttgatatctggggccaagggacaatggtcaccgtctcttca

SEQ ID NO: 14880 - DNA, 307 bp, Homo sapiens
  source 1..307: mol_type = other DNA
tgcagcctctggatttaccttcagtacctactggatgcactgggtccgccaagctccagggaaggggctggtgtgggtctcacgcattaataacgatgcaactggtacagcctacgcgagctccgtgaagggccgattcaccttctccagagacaacgccaagaacaccgtatatttgcagatgaacagtctgagagccgaggacacggctatgtattactgtgcaagagcccgatgggagtaccaactgctgtcgtctgatgcttttgatctctggggccaagggacaatggtcaccgtctcttca

SEQ ID NO: 14881 - DNA, 307 bp, Homo sapiens
  source 1..307: mol_type = other DNA
tgcagcctctggattcaccttcagtacctactggatgcactgggtccgccaagctccagggaaggggctggtgtgggtctcacgcattaataacgatgcaagtagtacagcctacgcggactccgtgaagggccgattcaccttctccagagacaacgccaagaacaccgtatatttgcaaatgaacagtctgagagccgaggacacggctgtgtattactgtgcaagagcccgatgggagtaccaacttctgtcgtctgatgcttttgatctctggggccaagggacaatggtcaccgtctcttca

SEQ ID NO: 14882 - DNA, 283 bp, Homo sapiens
  source 1..283: mol_type = other DNA
tgcagcctctggaatcaccgtcagtaccaactacatgaactgggtccgccaggctccagggaaggggctggagtgggtctcagttattaatagtggtggcaccacatactacgcagactccgtgaagggcagattcaccatctccagagacgattcgaagaacacgctgtatcttcaaatgaacaccctgagagacgaggacacggctgtctattactgtgcgagactgggtgactactcattaaaggactggggccagggaaccctggtcaccgtctcctca

SEQ ID NO: 14883 - DNA, 283 bp, Homo sapiens
  source 1..283: mol_type = other DNA
tgcagcctctggattcaccgtcagtagcaactacatcagctgggtccgccaggctccagggaaggggctggagtgggtctcacttattaatagtggtggcaccacatactacgcagactccgtgaagggcagattcaccatctccagagacgattcgaagaacacgctgtatcttcaaatgaacaccctgagagacgaggacacggctgtctattactgtgcgagactgggtgactactctttaaaggactggggccagggaaccctggtcaccgtctcctca

SEQ ID NO: 14884 - DNA, 283 bp, Homo sapiens
  source 1..283: mol_type = other DNA
tgcagcctctggattcaccgtcagtagcaactacatgaactgggtccgccaggctccagggaaggggctggagtgggtctcagttatttatagtgatggtaccacatactacgcagactccgtgaagggcagattcaccatctccagagacgattccaagaacacgctgtatcttcaaatgaacaccctgagagacgaggacacggctgtctattactgtgcgagactgggtgactactcattaaaggactggggccagggaaccctggtcaccgtctcctca

SEQ ID NO: 14885 - DNA, 283 bp, Homo sapiens
  source 1..283: mol_type = other DNA
tggagcctctggattcaccgtcagtagcaactacatgaactgggtccgccaggctccagggaaggggctggagtgggtctcagttatttatagtggtgggaacacatactacgcagaatccgtgaagggcagattcaccatctccagagacgattccaagaacacactgtatcttcaaatgaacagcctgagagccgaggacacggctgtatattactgtgcgagactgggtgactactcattaaaggactggggccagggagccctggtcaccgtctcctcc

SEQ ID NO: 14886 - DNA, 283 bp, Homo sapiens
  source 1..283: mol_type = other DNA
tgcagcctctggattcaccgtcagtagcaactacatgaactgggtccgccaggctccagggaaggggctggagtgggtctcagttatttatagtggtggtaccacatactacgcagactccgtgaagggcagattcaccatctccagagacgattccaagaacacgctgtatcttcaaatgaacaccctgagagacgaggacacggctgtctattactgtgcgagattgggtgactactcattaaaggactggggccagggaaccctggtcaccgtctcctca

SEQ ID NO: 14887 - DNA, 289 bp, Homo sapiens
  source 1..289: mol_type = other DNA
cgcagcctctggattcacgtttagtagcaagtggatgacctgggtccgcctggttccagggcaggggctggagtgggtggccggcacaaaagaagatggaaatgataaatattatgtggactctgtgaagggccgattcaccatctccagagacaacggcaagaactcagtcgatctgcaaatgaacagcctgagagtcgacgacacggcagtgtattactgtgcgagttcgccccccggactctacatggacatctggggcaaagggaccacggtcaccgtctcctca

SEQ ID NO: 14888 - DNA, 289 bp, Homo sapiens
  source 1..289: mol_type = other DNA
cgcagcctctggattcacgtttagtagcaagtggatgacctgggtccgcctggttccagggcaggggctggagtgggtggccggcacaaaagaagatggaaatgataaatattatgtggactctgtgaagggccgattcaccatctccagagacaacggcaagaactcagtcgatctgcaaatgaacagcctgagagtcgaggacacggcagtgtattactgtgcgagttcgccccccgggctctacatggacatctggggcaaagggaccacggtcaccgtctcctca

SEQ ID NO: 14889 - DNA, 316 bp, Homo sapiens
  source 1..316: mol_type = other DNA
cgctgtctctggtggctccatcagtagttactactggagctggatccggcagcccccaggggagggactggagtggattgggtatatctattacactgggagcatgaacaacaacccctccctcaagagtcgagtcaccatatcactggacacgtccaagaaccacttctccctgaagctgaactctgtgaccgccgcagacacgggcgtctattactgtgcgagacatgggggggttattaatctgattcggggagttatgaaattcgatgcttttgatgtctggggccaaggggcaaaggtcaccgtctcttca

SEQ ID NO: 14890 - DNA, 316 bp, Homo sapiens
  source 1..316: mol_type = other DNA
cgctgtctctggtggctccatcagtagttactactggagctggatccggcagcccccaggggagggactggagtggattgggtatatctattacagtgggagcatgaacaacaacccctccctcaagagtcgagtcaccatatcactggacacgtccaagaaccagttctccctgaagctgaactctgtgaccgccgcagacacgggcgtctattactgtgcgagacatgggggggttattaatctgattcggggagttatgaaattcgatgcttttgatgtctggggccaaggggcaaaggtcaccgtctcttca

SEQ ID NO: 14891 - DNA, 316 bp, Homo sapiens
  source 1..316: mol_type = other DNA
cgctgtctctggtggctccatcagtagttactactggagctggatccggcagcccccaggggagggactggagtggattgggtatatctattacactgggaacatgaacaacaacccctccctcaagagtcgagtcaccatatcactggacacgtccaagaaccacttctccctgaagctgaactctgtgaccgccgcagacacgggcgtctattactgtgcgagacatgggggggttattaatctgattcggggagttatgaaattcgatgcctttgatgtctggggccaaggggcaaaggtcaccgtctcttca

SEQ ID NO: 14892 - DNA, 316 bp, Homo sapiens
  source 1..316: mol_type = other DNA
cgctgtctctggtggctccatcagtagttactactggagctggatccggcagcccccaggggagggactggagtggattgggtatatctattacactgggagcatgaacaacaacccctccctcaagagtcgagtcaccatatcactggacacgtccaagaaccacttctccctgaagctgaactctgtgaccgtcgcagacacgggcgtctattactgtgcgagacatgggggggttattaatctgattcggggagttatgaaattcgatgcttttgatgtctggggccaaggggcaaaggtcaccgtctcttca

SEQ ID NO: 14893 - DNA, 297 bp, Homo sapiens
  source 1..297: mol_type = other DNA
aagggttctggatacatctttagcagctactggatcgcctgggtgcgccagaagcccgggaaaggcctggagtggatggcgtccatctatcctggtgactctgataccagatacagcccgtccttccaaggccaggtcaccatctcagccgacaagtccatcagcaccgcctacctgcagtggagcagcctgaaggcctcggacaccgccatctattactgtgcgaggcatcgccgtatagcagcgactgatcactttgacaactggggccagggaaacctggtcaccgtctcctca

SEQ ID NO: 14894 - DNA, 297 bp, Homo sapiens
  source 1..297: mol_type = other DNA
aagggttctggatacatctttagcagctactggatcgcctgggtgcgccagaagcccgggaaaggcctggagtggatggcgtccatctatcctggtgactctgataccagatacagcccgtccttccaaggccaggtcaccatctcagccgacaagtccatcagcaccgcctacctgcagtggagcagcctgaaggcctcggacaccgccatgtattactgtgcgaggcatcgccgtatagcagcgactgatcactttgacaactggggccagggaaacctggtcaccgtctcctca

SEQ ID NO: 14895 - DNA, 301 bp, Homo sapiens
  source 1..301: mol_type = other DNA
cactgtctccggtggctccatcagtagttactcctggagctggatccggcagcccccagggcagggactggagttgattgggtctctctcttacggtgggagcgccaactacaacccctccctcaagagtcgagtcaccatatcactagacgcgtccaagaaccagttctccctgcagctgagctctgtgaccgctgcggacacggccgtgtattactgttcgagatcggcgggtagccacaactactactactactacatggacgtctggggcaaagggaccacggtcaccgtctcctca

SEQ ID NO: 14896 - DNA, 301 bp, Homo sapiens
  source 1..301: mol_type = other DNA
cactgtctccggtggctccatcagtagttactcctggagctggatccggcagcccccagggcagggactggagtggattgggtctctctcttacggtgggagcgccaactacaacccctccctcaagagtcgagtcaccatatcactagacgcgtccaagaaccagttctccctgcagctgagctctgtgaccgctgcggacacggccgtgtattactgttcgagatcggcgggtagccacaactactactactactacatggacgtctggggcaaagggaccacggtcaccgtctcctca

SEQ ID NO: 14897 - DNA, 301 bp, Homo sapiens
  source 1..301: mol_type = other DNA
cactgtctccggtggctccatcagcagttactactggagctggatccggcagcccccagggcagggactggagatgattgggtatctctattacggtgggagcgccaactacaacccctccctcaggagtcgagtcaccatatcactagacgcgtccaagaaccagttctccctgcagctgagctctgtgaccgctgcggacacggccgtgtattactgttcgagatcggcgggtagccacaactactactactactacatggacgtctggggcaaagggaccacggtcaccgtctcctca

SEQ ID NO: 14898 - DNA, 301 bp, Homo sapiens
  source 1..301: mol_type = other DNA
cactgtctccggtggctccatcagtagttattcctggagctggatccggcagcccccagggcagggactggagttgattgggtctctctcttacggtgggagcgccaactacaacccctccctcaagagtcgagtcgccatatcactagacgcgtccaagaaccagttctccctgcagctgaactctgtgaccgctgcggacacggccgtgtattactgttcgagatcggcgggtagtcacaactactactactactacatggacgtctggggcaaagggaccacggtcaccgtctcctca

SEQ ID NO: 14899 - DNA, 295 bp, Homo sapiens
  source 1..295: mol_type = other DNA
tgcagcctctggattcacccttagcaacagtggcttgagctgggtccgccaggctccagggaaggggctggagtgggtcgcaggtatacttcaaagtgatgatagaacattctacgctgactccgtgaagggccgattcaccatctccagagacagatccaagaacacgctatatctgcaaatgaacagcctgagagccgaggacacggccctatattactgtgcgaaagatcaggcaaaagattggcaagcctttgcctcctggggccagggaaccctggtcaccgtctcctct

SEQ ID NO: 14900 - DNA, 295 bp, Homo sapiens
  source 1..295: mol_type = other DNA
cgcagcctctggattcacccttagcaacagtggcttgagctgggtccgccaggctccagggaaggggctggagtgggtcgcaggtgtgcatgaaagtgttgatagaccattctacgctgactccgtgaagggccgattcaccgtctccagagacgaatccaagaacacgctatatctgcagatgaacagcctgagagccgaggacacggccctctattactgtgcgaaagatcaggcaaaagattggcaggcctttgcctcctggggccagggaaccctggtcaccgtctcctct

SEQ ID NO: 14901 - DNA, 295 bp, Homo sapiens
  source 1..295: mol_type = other DNA
tgcagcctctggattcacccttagcaacagtggcttgagctgggtccgccaggctccagggaaggggctggagtgggtcgcaggtttgcttgaaagtgttgatagaacattctacgctgactccgtgaagggccgattcaccatctccagagacaaatccaagaacacactatatctgcaaatgaacagcctgagaaccgaggacacggccctgtattactgtgcgaaagatcaggcgaaagattggcaagcctttgcctcctggggccagggaaccctggtcaccgtctcctct

SEQ ID NO: 14902 - DNA, 294 bp, Homo sapiens
  source 1..294: mol_type = other DNA
gcttctggattcacgttcaccggccactttatacactgggtgcgacaggcccctggacaagggcttgagtggctgggatggatcaacccttacagcggtgacacaaactatgcacagaattttcagggctgggtcaccatgaccagggacacgtccattagcacagcctatatggaactgacgagcctgagatctgacgacacggccgtctattactgtgcgaggcagacttcgggaagttattacaacgactttgactactggggccagggaaccctggtcaccgtctcctca

SEQ ID NO: 14903 - DNA, 294 bp, Homo sapiens
  source 1..294: mol_type = other DNA
gcttctggattcacgttcaccggctactttatacactgggtgcgacaggcccctgggcaagggcttgagtggctgggatggatcaacccttacagcggagacacaaactatgcacagaattttcagggctgggtcaccatgaccagggacacgtccatcagcacagcctatatggaactgaccagcctgagatctgacgacacggccgtctattactgtgcgaggcagacttcgggaagttattacaacgactttgactactggggccagggaaccctggtcaccgtctcctca

SEQ ID NO: 14904 - DNA, 310 bp, Homo sapiens
  source 1..310: mol_type = other DNA
tgcagcctctggattcaacttaactagttgtggcatgagctgggtccgccaggctccagggaaggggctggagtgggtctcaattttaagtgaagttgaaggtaggacagactacgcagactccgtgaggggccggttcaccatttccagagactcgtccgagaacaccctgtatctgcagatgaacagcctgagacccgaggacacggccttatatttctgtgcgaagattgggcccattattgcagcggctggtagcactgaatacttccagcactggggccagggcaccctggtcaccgtctcctca

SEQ ID NO: 14905 - DNA, 310 bp, Homo sapiens
  source 1..310: mol_type = other DNA
tgcagcctctggattcaacttaactagttgtggcatgagctgggtccgccaggctccagggaaggggctggagtgggtctcaattttaagtgaagttgaaggtaggacagactacgcagactccgtgaggggccggttcaccatttccagagactcttccgagaacaccctgtatctgcaaatgaacagcctgagagccgaggacacggccttatatttctgtgcgaagattgggcccattattgcagcggctggtagcactgaatacttccagcactggggccagggcaccctggtcaccgtctcctca

SEQ ID NO: 14906 - DNA, 310 bp, Homo sapiens
  source 1..310: mol_type = other DNA
tgcagcctctggattcaacttaactagttgtggcatgagctgggtccgccaggctccagggaaggggctggagtgggtctcaattttaagtgaagttgaaggtaggacagactacgcagattccgtgaggggccggttcaccatttccagagactcttccgagaacaccctgtatctgcaaatgaacagcctgagagccgaggacacggccttatatttctgtgcgaagattgggcccattattgcagcggctggtagcactgaatacttccagcactggggccagggcaccctggtcaccgtctcctca

SEQ ID NO: 14907 - DNA, 319 bp, Homo sapiens
  source 1..319: mol_type = other DNA
tacagcctcgggatttaccttcagtgacttcttcatgagctggatccgccaggctccagggaaggggctggagtggatttcacacattagtaacactggaacctacacacactatggtgactctgtcaagggccgcttcaccatctccagagacaactccaacaactcagtgtatctgcacatgagcaacctgagacccgacgacacggccaaatattactgtgcgagagagtcgtatcctgaaagtgcagtgggaactacgcctctggcacggtacgctgactattggggccagggagacccggtcaccgtctcctca

SEQ ID NO: 14908 - DNA, 319 bp, Homo sapiens
  source 1..319: mol_type = other DNA
tacagcctcgggatttaccttcagtgacttcttcatgagctggatccgccaggctccagggaaggggctggagtggatttcacacattagtaacactggaacctacacacactatggtgactctgtcaagggccgcttcaccatctccagagacaactccaacaactcagtgtatctgcacatgagcaacctgagacccgacgacacggccatatattactgtgcgagagagtcgtatcctgaaagtgcagtgggaactacgcctctggcacgttacgctgactattggggccagggagacccggtcaccgtctcctca

SEQ ID NO: 14909 - DNA, 298 bp, Homo sapiens
  source 1..298: mol_type = other DNA
cactgtctctggcgcctccatcgccagtggtgattacttctggacttggatccgccagcccccagggaagggcctggaatggattggctacatctattacagtggcagcaccctctacaacccatcccttaagagtcgagtttcaatgtcaatggacacgtccaagaaccagttctccctgcagttgacctctgtgactgccgcagacacggccgtctattactgtgtcagcgagctcagtggcgactactcttctcttgactcttggggccagggagccctggtcaccgtctcctca

SEQ ID NO: 14910 - DNA, 298 bp, Homo sapiens
  source 1..298: mol_type = other DNA
cactgtctctggcgcctccatcagcagtggtgattacttctggacttggatccgccagcccccagggaagggcctggaatggattgggtacatctattacagtgggagcaccttctacaacccgtccctcaagagtcgagtttccatgtcaacagacacgtccaagaagcagttctccctgcagttgacctctgtgactgccgcagacacggccgtctattactgtgtcagcgagctcagtggggactactcttctcttgactcttggggccagggaaccctggtcaccgtctcctca

SEQ ID NO: 14911 - DNA, 298 bp, Homo sapiens
  source 1..298: mol_type = other DNA
cactgtctctggcgcctccatcagcagtggtgattacttctggacttggatccgccagcccccagggaagggcctggaatggattgggtacatctattacagtgggagcaccttctacaacccgtccctcaagagtcgagtttccatgtcaacagacacgtccaagaaccagttctccctgcagttgacctctgtgactgccgcagacacggccgtctattactgtgtcagcgagctcagtggggactactcttctcttgactcttggggccagggaaccctggtcaccgtctcctca

SEQ ID NO: 14912 - DNA, 292 bp, Homo sapiens
  source 1..292: mol_type = other DNA
tgcagcctctgcattcaccttcagtacctactggatgcactgggtccgccgagttccagggaaggggctggtgtggatctcacgtattaatcctgatgggactgccacaacctacgcggactccgtgaagggccgattcaccatctccagagacaactccaagaacacgctgtttctgcaaatgaacagtctcagagccgaggacacggccgtgtattactgtgtaagaggaaccttagtaacagggggtacggactactggggccagggaaccctggtcaccgtctcctca

SEQ ID NO: 14913 - DNA, 292 bp, Homo sapiens
  source 1..292: mol_type = other DNA
tgcagcctctgcattcaccttcaatacctactggatgcactgggtccgccgagttccagggaaggggctggtgtggatctcacgtattaatcctgatgggactgccacaacctacgcggactccgtgaagggccgattcaccatctccagagacaactccaagaacacgctgtttctgcaaatgaacagtctcagagccgaggacacggccgtgtattactgtgtaagaggaaccttagtaacagggggtacggactactggggccagggaaccctggtcaccgtctcctca

SEQ ID NO: 14914 - DNA, 316 bp, Homo sapiens
  source 1..316: mol_type = other DNA
cactgtctctggtggctccatcagcggtagtagttactactgggactggatccgccagcccccagggaagggcctggagtggattgggagtatatattatagtggggtcacctactacaagccgaccctcaagagtcgagtctccatctccgttgacacgtccaagaaccagttctccctgcagttgacctctgtgaccgccgcagacacggctgtgtattactgtgccaagtgtgtggtgggcgctaccgggcgttggaattactactattacatggacgtctgggggaaagggaccgcggtcaccgtctcctcg

SEQ ID NO: 14915 - DNA, 316 bp, Homo sapiens; identical to SEQ ID NO: 14914
  source 1..316: mol_type = other DNA

SEQ ID NO: 14916 - DNA, 316 bp, Homo sapiens
  source 1..316: mol_type = other DNA
cactgtctctggtggctccatcagcggtagtagttactactgggactggatccgccagcccccagggaaggggctggagtggatggggagtatatattatagtggggtcacctactacaagccgtccctcaagagtcgagtctccatctccgttgacacgtccaagaaccagttctccctgcaattgacctctgtgaccgccgcagacacggctgtgtattactgtgccaagtgtgtggtgggcgctaccgggcgttggaattactactattacatggacgtctgggggaaagggaccgcggtcaccgtctcctcg

SEQ ID NO: 14917 - DNA, 304 bp, Homo sapiens
  source 1..304: mol_type = other DNA
tgcagcctctggattcatcttcagtgcttataccatgaactgggtccgccaggctccagggaaggggctggagtgggtctcatccattggtactagtagtagtgacatatatattgcagactcattgaagggccgattcaccatgtccagagacaacgccaagaactccctgtatctgcaaatgaatagcctgagagccgaggacacggctgtgtattactgtgcgagaggttattttgatagtagtggttattattgggtctttgacgactggggccagggaaccctggtcaccgtctcctca

SEQ ID NO: 14918 - DNA, 304 bp, Homo sapiens
  source 1..304: mol_type = other DNA
tgcagcctctggattcatcttcagtgcttataccatgaactgggtccgccaggctccagggaaggggctggagtgggtctcatccattggtactagtagtagtgacatatatattgcagactcattgaagggccgattcaccatgtccagagacaacgccaagaactccctgtatctgcaaatgaatagcctgagagccgaggacacggctgtatattactgtgcgagaggttattttgatagtagtggttattattgggtctttgacgactggggccagggaaccctggtcaccgtctcctca

SEQ ID NO: 14919 - DNA, 304 bp, Homo sapiens
  source 1..304: mol_type = other DNA
tgcagcctctggattcaccttcagtgcttataccatgaactgggtccgccaggctccagggaaggggctggagtgggtctcatccgttggtactagtcctactgacatatatattgcagactcattgaagggccgattcaccatgtccagagacaacgccaagaactccctgtatctgcaaatgaatagcctgagagccgaggacacggctgtgtattactgtgcgagaggttattttgatagtagtggttattattgggtctttgacgactggggccagggaaccctggtcaccgtctcctca

SEQ ID NO: 14920 - DNA, 304 bp, Homo sapiens
  source 1..304: mol_type = other DNA
tgcagcctctggattcaccttcagtgcttataccatgaactgggtccgccaggctccagggaaggggctggagtgggtctcatccattggtactagtagtagtgacatatatattgcagactcattgaagggccgattcaccatgtccagagacaacgccaagagctccctgtatctgcaaatgaatagcctgcgagccgaggacacggctgtgtattactgtgcgagaggttattttgatagtagtggttattattgggtctttgacgactggggccagggaaccctggtcaccgtctcctca

SEQ ID NO: 14921 - DNA, 286 bp, Homo sapiens
  source 1..286: mol_type = other DNA
tgcagcctctggattcacgttcagtccctacagcatgaactgggtccgccaggctccagggaaggggctggagtgggtttcgtacattactggtgatagtactaccatacactacgcagactctgtgaagggccgattcaccatctccagggacaatgccaagaactcagtgtatctgcaaatgaacagcctgagagacgaggacacggctgtctattactgtgcgagaggatatcaatattcttttgatatgtggggcctagggacaatggtcagcgtctcttca

SEQ ID NO: 14922 - DNA, 286 bp, Homo sapiens
  source 1..286: mol_type = other DNA
tgcagcctctggattcacgttcagtccctacagcatgaattgggtccgccaggctccagggaaggggctggagtgggtttcgtacattactggtgatagtcgtaccatacattacgcagactctgtgaggggccgattcaccatctccagggacaatgccaagaactcagtgtatctgcaaatgaacagcctgagagacgaggacacggctgtctattactgcgcgagaggatatcaatattcttttgatatgtggggcctagggacaatggtcagcgtctcttca

SEQ ID NO: 14923 - DNA, 286 bp, Homo sapiens
  source 1..286: mol_type = other DNA
tgcagcctctggattcactttcagggactacagcatgaactgggtccgccaggttccagggaaggggctggagtgggtttcatacatgactggtgatagtaaggtcattcactatgcagactctgtgaagggccgattcatcatctccagagacaatgccaggaactcactgtatctgcaaatgaaccgcctgagagacgaggacgcggctctttattactgtgcgagaggatatcagtactcttttgatatgtggggccaggggacaatggtcaccgtctcttca

SEQ ID NO: 14924 - DNA, 303 bp, Homo sapiens
  source 1..303: mol_type = other DNA
aaggggtctggatacatctttaccaactattggatcgcctgggtgcgccagatgcccgggaaaggcctggagtggatggggatcatctatcctgctgactctgataccacttacagcccgtccttccaaggccaggtcaccatctcagtcgacacgtccatcactaccgcctacctgcagtggagcagcctgaaggcctcggacaccgccatgtattactgtgcgagacttgccaacataccagtggctgggcgaaactggctcgacccctggggccagggaaccctggtcaccgtctcctca

SEQ ID NO: 14925 - DNA, 303 bp, Homo sapiens
  source 1..303: mol_type = other DNA
aaggggtctggatacatctttaccaactactggatcgcctgggtgcgccagatgcccgggaaaggcctggagtggatggggatcatctatcctgctgactctgataccacttacagcccgtccttccaaggccaggtcaccatctcagtcgacacgtccatcactaccgcctacctgcagtggagcagcctgaaggcctcggacaccgccatgtattactgtgcgagacttgccaacataccagtggctgggcgcaactggctcgacccctggggccagggaaccctggtcaccgtctcctca

SEQ ID NO: 14926 - DNA, 303 bp, Homo sapiens
  source 1..303: mol_type = other DNA
aaggggtctggatacatctttaccaactactggatcgcctgggtgcgccagatgcccgggaaaggcctggagtggatggggatcatctatcctgctgactctgataccacttacagcccgtccttccaaggccaggtcaccatctcagtcgacacgtccatcactaccgcctacctgcagtggagcagcctgaaggcctcggacaccgccatgtattactgtgcgagacttgccaacataccagtggctgggcgaaactggctcgacccctggggccagggaaccctggtcaccgtctcctca

SEQ ID NO: 14927 - DNA, 289 bp, Homo sapiens
  source 1..289: mol_type = other DNA
tgcagcctctggattcaccttcagtagtcactggatgtactgggtccgccaagttccagggaacgggccggtgtgggtctcacgcattagtactgatgggagtgacacaacttacgcggactccgtgaagggccgattcaccatctccagagacaacgccaagaacacggtggatctgcaaatgaacagtctgagagccgaggacacggctgtatattattgtgcaagagccggggatggccaatgcatggacgtctggggcaaagggaccacggtcaccgtctcctca

SEQ ID NO: 14928 - DNA, 289 bp, Homo sapiens
  source 1..289: mol_type = other DNA
tgcagcctctggattcaccttcaggagtcactggatgtactgggtccgccaagttccagggaacgggccggtgtgggtctcacgcattagtactgatgggactgacacaacttacgcggactccgtgaagggccgattcaccatctccagagacaacgccaagaacacggtggatctgcaaatgaacagtctgagagccgaggacacggctgtatattattgtgcaagagccggggatggccaatgcatggacgtctggggcaaagggaccacggtcaccgtctcctca

SEQ ID NO: 14929 - DNA, 289 bp, Homo sapiens
  source 1..289: mol_type = other DNA
tgcagcctctggattcaccttcagtagtcactggatgtattgggtccgccaagttccagggaacgggccggtgtgggtctcacgcattagtactgatgggagtgacacaacttacgcggactccgtgaagggccgattcaccatctccagagacaacgccaagaacacggtggatctgcaaatgaacagtctgagagccgaggacacggctgtatattattgtgcaagagccggggatggccagtgcatggacgtctggggcaaagggaccacggtcaccgtctcctca

SEQ ID NO: 14930 - DNA, 286 bp, Homo sapiens
  source 1..286: mol_type = other DNA
tgcagcctctggattcaccttcagtacctactggatgcattgggtccgccaggctccagggaaggggctggagtgggtctcacatattaatggtgatggggggagcataaacttcgcggactccgtgaagggccggttcaccatctccagagacaacgccaagaatacggtgtatctggaaatgcacagtctgagagccgaggacacggctgtgtattactgtgcaagaggatccgaatatggccttgactcctggggccagggaaccctggtcaccgtctcctca

SEQ ID NO: 14931 - DNA, 286 bp, Homo sapiens
  source 1..286: mol_type = other DNA
tgcagcctctggattcaccttcagtagctactgggtgaattgggtccgccaggctccagggaaggggctggtgtgggtctcacatattaatggtgatgggaggatcataaacttcgcggactccgtgaagggccggttcaccatctccagagacaacgccaagaatacggtgtatctgcaaatgaacagactgagagccgaggacacggctgtgtattactgtgcaagaggatccgaatatggccttgactcctggggccagggaaccctggtcaccgtctcctca

SEQ ID NO: 14932 - DNA, 286 bp, Homo sapiens
  source 1..286: mol_type = other DNA
tgcagcctctggattcagtttcagtaactactggatgcactgggtccgccaagctccaggaaaggggctggtgtgggtctcacatattaggtatgatggggcaaccacaaacttcgcggactccgtgaagggccggttcaccatctccagagacaccgccaagagtacgctgtttctgcaaatgaacagtctgagagccgaggacacggctgtgtattactgtgcaagaggatccgaatatggccttgactcctggggccagggaaccctggtcaccgtctcctca

SEQ ID NO: 14933 - DNA, 286 bp, Homo sapiens
  source 1..286: mol_type = other DNA
tgcagcctctggattcagtttcagttactactggatgcactgggtccgccaagttccaggaaaggggctggagtgggtctcacacattagttatgatgggagaaccacaaacttggcggactccgtgaagggccggttcaccatctccagagacaccgccaagagtacgctgtttctgcaaatgaacagtctgagagccgaggacacggctgtgtattactgtgcaagaggatccgaatatggccttgactcctggggccagggaaccctggtcaccgtctcctca

SEQ ID NO: 14934 - DNA, 286 bp, Homo sapiens
  source 1..286: mol_type = other DNA
tgcagcctctggattcaccctcagtagctactggatgcactgggtccgccaagctccagggaaggggctggtgtgggtctcacatattaatggtgatgggaggagcataaacttcgcggactccgtgaagggccggttcaccatctcccgagacaacgccaagaaaacgctgtatctgcaaatgaacagtctgagagccgaggacacggctgtgtattactgtgcaagaggatccgaatatggccttgactcctggggccagggaaccctggtcaccgtctcctca

SEQ ID NO: 14935 - DNA, 286 bp, Homo sapiens
  source 1..286: mol_type = other DNA
tgcagcctctggattcagtttcagtaactactggatgcattgggtccgccaagctccaggaaaggggctggtgtgggtctcacatattagttatgatgggagaaccacaaacttcgcggactccgtgaggggccggttcaccatctccagagacaccgccaagagtacgctgtttctgcaaatgaacagtctgagagccgaggacacggctgtgtattactgtgcaagaggatccgaatatggccttgactcctggggccagggaaccctggtcaccgtctcctca

SEQ ID NO: 14936 - DNA, 286 bp, Homo sapiens
  source 1..286: mol_type = other DNA
tgcagcctcgggattcaccttcagtagctactggatgcagtgggtccgccaaggtccagggaaggggctggagtcattctcacgtattaatcatgatgggagtcgcacagattacgcggactccgtgaagggccgattcaccatctccagagacaacgccaagaatatggtgtttctgcaaatgaacagtctgagagtcgaggacacggctgtgtattactgtgcaaccgacgtttgggggaggggtgcctactggggccagggaaccctggtcgccgtctcctca

SEQ ID NO: 14937 - DNA, 286 bp, Homo sapiens
  source 1..286: mol_type = other DNA
tgcagcctcgggattcaccttcagtagctactggatgcagtgggtccgccaaggtccagggaaggggctggagtcattctcacgtattagtcatgaggggagtcgctcagattacgcggactccgtgaagggccgattcaccatctccagagacaacgccaagaacacactgtttctggaaatgaacagtctgacagtcgaggacacggctgtgtattactgtgcaaccgacgtttgggggaggggtgcctactggggccagggaaccctggtcgccgtctcctca

SEQ ID NO: 14938 - DNA, 304 bp, Homo sapiens
  source 1..304: mol_type = other DNA
tacagcctctggttttgccttcagcgactatggcatgaactgggtccgccaggctccagggaaggggctggagtgggttgcgtacctcagtcgtagcagcaaaatctctcacgtcgcagactctgtgaagggccgattcaccatctccagagacaatggcaagaacgctctttttctgcagatggacagcctgagagacgaggacacggctgtctactactgcgcgcgaacgactaattatcataatgcaactgcttattaccaagatttttggggccagggaacccgggtcaccgtctcctcc

SEQ ID NO: 14939 - DNA, 304 bp, Homo sapiens
  source 1..304: mol_type = other DNA
tacagcctctggttttgccttcagcgactatggcatgaactgggtccgccaggctccagggaaggggctggagtgggttgcgtacctcagtcgtagcagcaaaatctctcacgtcgcagactctgtgaagggccgattcaccatctccagagacaatggcaagaacgctctttttctgcagatggacagcctgagagacgaggacacggctgtctactactgcgcgcgaacgactaattatcataatgcaactgcatattaccaagatttttggggccagggaacccgggtcaccgtctcctcc

SEQ ID NO: 14940 - DNA, 304 bp, Homo sapiens
  source 1..304: mol_type = other DNA
tacagcctctggttttgccttcagcgactatggcatgaactgggtccgccaggctccagggaaggggctggagtgggttgcgtacctcagtcgtagcagcaaaatctctcacgtcgcagactctgtgaagggccgattcaccatctccagagacaatggcaagaacactctttttctgcagatggacagcctgagagacgtcgacacggctgtctactactgcgcgcgaacgactaattatcataatgcaactgcttattaccaagatttttggggccagggaacccgggtcaccgtctcctcc

SEQ ID NO: 14941 - DNA, 310 bp, Homo sapiens
  source 1..310: mol_type = other DNA
tgcagcctctggattcaccgtcaggagcaactacctgacctgggtccgccaggctccagggaaggggctggagtgggtctcagttctttatagcaatggtaatacatattacgcggagtccattaagggccgattcagcatctccagactcatttccgagaacaccctctatcttcaaatgaacagcctgagacctgaggacacggccgtgtattactgtgcggggagcagtcgcgatactcatagtggtttttacctagatgatgcttttgatatctggggccaggggacaatggtcaccgtctcttca

SEQ ID NO: 14942 - DNA, 310 bp, Homo sapiens
  source 1..310: mol_type = other DNA
tgtagcctctgggttcagcgtcagcaccaagtacctgacctgggtccgccaggccccagggaaggggctggagtgggtctcagttatttacaccgccggaaacacatattacccagagtcctttaagggccgattcttcatctccagaagcaagtccgagaacaccctctatcttctaatgaacagcctgagacctgaggacacggccgtgtattactgtgcggggagcagtcgcgatactcatagtggtttttacctagatgatgcttttgatatctggggccaggggactatggtcaccgtctcttca

SEQ ID NO: 14943 - DNA, 286 bp, Homo sapiens
  source 1..286: mol_type = other DNA
cgacgtctctggattcagactcagtgacttttacatggcctggatccgccaggctccggggaaggggctggagtgggtctcctccattggcaagactagtgagttctcacactacgcagcctctgtgaagggccgattcaccatctccagagacgacgccaagaactccctctatttgcaaatggacgatctgagagccgaggacacggccagatacttctgcgccagaagtgtttccttctactttgacctttggggccacggatcggtggtcaccgtctcctcc

SEQ ID NO: 14944 - DNA, 286 bp, Homo sapiens
  source 1..286: mol_type = other DNA
cggcgtctctggattcagactcactgacttttacatggcctggatccgccaggctccggggaaggggctggagtgggtttcctccattggcaggactagtgagttctcacactacgcagtctctgtgaagggccgattcaccatctccagagacgacgccaacaactccctctatttgcaaatggacgatctgcgagccgaggacacggccagatacttctgcgccagaagtgtatcgttctactttgacctttggggccacggatcggtggtcaccgtctcctca

SEQ ID NO: 14945 - DNA, 304 bp, Homo sapiens
  source 1..304: mol_type = other DNA
cactgtctctggtggctccatcagcagtggtgggtactactggagctgggtccgccagcccccagggaagggcctggagtggattgggtacatctattacagtgggagtacctactacaacccgtccctcaagagtcgagttaccatatcagtagacacgtctaagaaccagttctccctgaggctgagctctgtgactgccgcggacacggccgtgtattattgtgcgagagattcctcccgagagtacagtgggtactactttgactactggggccagggaaccctggtcaccgtctcctca

SEQ ID NO: 14946 - DNA, 304 bp, Homo sapiens
  source 1..304: mol_type = other DNA
cactgtctctggtggctccatcagcagtggtgggtactactggagctggatccgccagcccccagggaagggcctggagtggattgggtacatctattacagtgggagcacctactacaacccgtccctcaagagtcgagttaccatatcagtagacacgtcgaagaaccagttctccctgaggctgaactctgtgactgccgccgacacggccgtgtattattgtgcgagagattcctcccgagagtacagtgggtactactttgactactggggccagggaaccctggtcaccgtctcctca

SEQ ID NO: 14947 - DNA, 304 bp, Homo sapiens
  source 1..304: mol_type = other DNA
tacagcctctggattcaccttttccaactatgccatgagctgggtccgccagcctccggggaaggggctggagtgggtctcaacaataagtggaagtggtgataaaacattctccgcagactccgcgaagggccggttcaccatctccagggacgcttccaagaatattgtgactttggaaatgaacagcctgcgtctcgaggacacgggcctctatttctgtgccaaagatcaacatggctatgccgggggggatgatggtttcgacttctggggcccagggacaatggtcaccgtctctcca

SEQ ID NO: 14948 - DNA, 304 bp, Homo sapiens
  source 1..304: mol_type = other DNA
tgcagcctctggattcaccttttccaactatgccatgagctgggtccgccagcctccggggaaggggctggagtgggtctcaacaattagtggaagtggtgatagaacattctccgcagactccgcgaagggccggttcaccatctccagggacgcttccatgaatattgtgactttggaaatgaacagcctgcgtctcgaggacacgggcctctatttctgtgccaaagatcaacatggctatgccgggggggatgatggtttcgacttctggggcccagggacaatggtcaccgtctctcca

SEQ ID NO: 14949 - DNA, 304 bp, Homo sapiens
  source 1..304: mol_type = other DNA
tgcagcctctggattcaacttcagtccctatagtatgaactgggtccgccaggctccagggaaggggctggagtcggtctcatccattagtgggagtagtaattacatatactatgcagactcagtgaagggccgattcaccatttccagagacaatgccaagaactcactgtatctgcaaatgaacagcctgagagccgaggacacggctgtctattactgtgcgagagaccctgagctgcatcactacaactactactacatggacgtctggggcaaagggaccacggtcaccgtctcctcg

SEQ ID NO: 14950 - DNA, 304 bp, Homo sapiens
  source 1..304: mol_type = other DNA
tgcagcctctggattcaacttcagtccctatagtatgaactgggtccgccaggctccagggaaggggctggagtcggtctcgtccattagtgggagtagtaattacatatactatgcagactcagtgaagggccgattcaccatttccagagacaatgccaagaactcactgtatctgcaaatgaacagcctgagagccgaggacacggctgtctattactgtgcgagagaccctgagctgcatcactacaactactactacatggacgtctggggcaaagggaccacggtcaccgtctcctcg

SEQ ID NO: 14951 - DNA, 295 bp, Homo sapiens
  source 1..295: mol_type = other DNA
cgctgtctctggtggttttatcaatcgtgatgactggtggagttgggtccgccagaccccagggaaagggctggagtggatcggagaaatccatgaaagtgggaggaccaactataacccgtcactcaagagtcgagtcagcatgtcagtagacaagtccaacaaccagttctccttgaaactgacttctgtgatcgtcgcagacacggccatgtattattgcgcgactacttctgcgagggccgcgggcgccttgagctactggggccagggaaccctggtcaccgtcccctca

SEQ ID NO: 14952 - DNA, 293 bp, Homo sapiens
  source 1..293: mol_type = other DNA
ctgtctctggtggttttatcaatcgtgatgactggtggagttgggtccgccagaccccagggaaagggctggagtggatcggagaaatccatgaaagtgggaggaccaactataacccgtcactcaagagtcgagtcagcatgtcagtagacaagtccaacaaccagttctccttgaaactgacttctgtgatcgtcgcagacacggccatgtattattgcgcgactacttctgcgagggccgcgggcgccttgagctactggggccagggaaccctggtcaccgtcccctca

SEQ ID NO: 14953 - DNA, 301 bp, Homo sapiens
  source 1..301: mol_type = other DNA
tgcagcctctggattcacgttcagtagttatgaaatgaactgggtccgccaggctccagggaaggggctggagtgggtttcatacattagtagtagtggttctaccatatattatgcagactctctgaagggccgactcatcatctccagagacaacgccaagaactcactgtatctgcaaatgagcagcctgagagtcgaggacacggctgtttattactgtgtgagagatttgtcgtggagtggcaggaagtggcacttcgatctctggggccgtgggaccctggtcactgtctcctca

SEQ ID NO: 14954 - DNA, 301 bp, Homo sapiens
  source 1..301: mol_type = other DNA
tgcagcctctggattcacgttcagtagttatgaaatgaactgggtccgccagactccagggaaggggctggagtgggtttcatacattagtggtagtggttctcccatatattatgcagactctctgaagggccgactcatcatctccagagacaacgccaagaactcactgtatctgcaaatgaacagcctgagagccgaggacacggctgtttattactgtgtgagagatttgtcgtggagtggcaggaagtggcacttcgatctctggggccgtgggaccctggtcactgtctcctca

SEQ ID NO: 14955 - DNA, 301 bp, Homo sapiens
  source 1..301: mol_type = other DNA
tgcagcctctggattcaccttcagtagttatgaaatgaactgggtccgccaggctccagggaaggggctggagtgggtttcatacattagtggtagtggttctaccatatattatgcagactctctgaagggccgactcatcatctccagagacaacgccaagaactcactgtatctgcaaatgagcagcctgagagtcgaggacacggctgtttattactgtgtgagagatttgtcgtggagtggcaggaagtggcacttcgatctctggggccgtgggaccctggtcactgtctcctca

SEQ ID NO: 14956 - DNA, 301 bp, Homo sapiens
  source 1..301: mol_type = other DNA
tgcagcctctggattcacgttcagtagttatgaaatgaactgggtccgccaggctccagggaaggggctggagtgggtttcatacattagtagtagtggttctaccatatattatgcagactctctgaagggccgactcatcatctccagagacaacgccaagaattcactgtatctccaaatgagcagcctgagagccgaggacacggctgtttattactgtgtgagagatttgtcgtggagtggcaggaagtggcacttcgatctctggggccgtgggaccctggtcactgtctcctca

SEQ ID NO: 14957 - DNA, 301 bp, Homo sapiens
  source 1..301: mol_type = other DNA
tgcagcctctggattcacgttcagtagttatgaaatgaactgggtccgccaggctccagggaaggggctggagtgggtttcatacattagtagtagtggttctaccatatattatgcagactctctgaagggccgactcatcatctccagagacaacgccaagaactcactgtatctgcaaatgagcagcctgagagccgaggacacggctgtttattactgtgtgagagatttgtcgtggagtggcaggaagtggcacttcgatctctggggccgtgggaccctggtcactgtctcctca

SEQ ID NO: 14958 - DNA, 300 bp, Homo sapiens
  source 1..300: mol_type = other DNA
ggttctggttacacctttaccaattatggtatcaactggatgcgacaggcccctggacaaggacttgagtggatgggatggatcagcggttacaatggtaacacaaattatgcacagaagttccagggcagagtcaccatgaccacagatacatccacgagtacagcctacatggagctgaggagcctgagatctgacgacacggccgtgtattactgtgggagcgggactcgcggggttagtgggaactacgcatactctgactactggggccaggggaccctggtcaccgtctcctca

SEQ ID NO: 14959 - DNA, 300 bp, Homo sapiens
  source 1..300: mol_type = other DNA
ggttctggttacacctttaccaattatggtatcaactggatgcgacaggcccctggacaaggacttgagtggatgggatggatcagcggttacaatgctaacacaaattatgcacagaagttccagggcagagtcaccatgaccacagatacatccacgagtacagcctacatggagctgaggagcctgagatctgacgacacggccgtgtattactgtgggagcgggactcgcggggttagtgggaactacgcatactctgactactggggccaggggaccctggtcaccgtctcctca

SEQ ID NO: 14960 - DNA, 286 bp, Homo sapiens
  source 1..286: mol_type = other DNA
ttcagcgtctggattcaccttcagtacctatggcatgcactgggtccgccagcctccaggcaaggggctggagtgggtaacagttatatggtatgatggaagtaataaattctatgcagactctgtgaagggccgattctccatctccagagacaattccaagaacacgctgtatctgcaaatgaacagcctgagagccgaggacacggctgtgtattactgtgcgagagagacaaataactattatgactactggggccagggaaccctggtcaccgtctcctca

SEQ ID NO: 14961 - DNA, 286 bp, Homo sapiens
  source 1..286: mol_type = other DNA
tgcagcgtctggattcaccttcagtagctatggcatgcactgggtccgccagcctccaggcaaggggctggagtgggtaacagttatatggtatgatggaagtaataaattctatgcagactctgtgaagggccgattctccatctccagagacaattccaagaacacgctgtatctgcaaatgaacagcctgagagccgaggacacggctgtgtattactgtgcgagagagacaaataactattatgactactggggccagggaaccctggtcaccgtctcctca

SEQ ID NO: 14962 - DNA, 286 bp, Homo sapiens
  source 1..286: mol_type = other DNA
tgcagcgtctggattcagcttcagtacctatggcatgcactgggtccgccagcctccaggcaaggggctggagtgggtaacagttatatggtatgatggaagtaataaattctatgcagactctgtgaagggccgattctccatctccagagacaattccaagaacacgctgtatctgcaaatgaacagcctgagagccgaggacacggctgtgtattactgtgcgagagagacaaataactattatgactactggggccagggaaccccggtcaccgtctcctca

SEQ ID NO: 14963 - DNA, 286 bp, Homo sapiens
  source 1..286: mol_type = other DNA
tgcagcgtctggattcaccttcagtacctatggcatgcactgggtccgccagcctccaggcaaggggctggagtgggtaacagttatatggtatgatggaagtaataaattctatgcagactctgtgaagggccgattctccatctccagagacaattccaagaacacgctgtatctgcaaatgaacagcctgagagccgaggacacggctgtgtattactgtgcgagagagacaaataactattatgactactggggccagggaaccctggtcaccgtctcctca

SEQ ID NO: 14964 - DNA, 310 bp, Homo sapiens
  source 1..310: mol_type = other DNA
cactgtctctggcggctccatcaacagtaatagttactactggggctggatccgccagccccccgggaaggggctggagtggattgcaagtttctattctagtggcgccacctactacaacccgtccctcaagagtcgagtcaccaaatcggtagacacgtccgagaaccacttctccctgagtctgacctctgtgaccgccgcggacacggctgtctattattgtgcgagacgcagtaaaattgaaccaccagggcgggcttactactttgactcctggggccagggaatcctggtcaccgtcgcctca

SEQ ID NO: 14965 - DNA, 310 bp, Homo sapiens
  source 1..310: mol_type = other DNA
caatgtctctggcggctccatcaacagtaatagttactattggggctggatccgccagcccccagggaaggggctggagtggattggaagtatctatcccagtggcgccacctactacaacccgtccctcaagagtcgagtcatcaaatcggtagacaagtccgactaccacttctccctgagtctgacctctgtgaccgccgcggacacggcagtctattattgtgcgagacgcagtaaaattgaaccaccagggcgggcttactactttgactcctggggccagggaatcctggtcaccgtcgcctca

SEQ ID NO: 14966 - DNA, 295 bp, Homo sapiens
  source 1..295: mol_type = other DNA
tgcagcctctggattcacctttagtaattattacatgacctgggtccgccagtctccagggaaggggctggagtgggtggccaacataaagaaggacggaagagacaaagactatgtggactctgtgaagggccgattcaccatctccagggacaacgccaagaactcactgtatctacaaatgaacagcctgagagtcgaggacacggccgtttattattgtacgaagggggggatgaccagcagctggttctgggtcgactggggccagggaaccctggtcaccgtctcctca

SEQ ID NO: 14967 - DNA, 295 bp, Homo sapiens
  source 1..295: mol_type = other DNA
tgcagcctctggattcacctttagtaactattggatgacctgggtccgccagtctccagggaaggggctggagtgggtggccaacataaagcaagatggaagtgagaaatactatgtggactctgtgaagggccgattcaccatctccagggacaacgccaagaattcactgtatctgcaaatgaacagcctgagagacgatgatacggccttatatcattgtacgaaaggggggatgaccagcagctggttctgggtcgactggggccagggaaccctggtcaccgtctcctca

SEQ ID NO: 14968 - DNA, 295 bp, Homo sapiens
  source 1..295: mol_type = other DNA
tgcagcctctggattcacctttagtaattattacatgacctgggtccgccagtctccagggaaggggctggagtgggtggccaacataaagaaggacggaagtgagaaagactatgtggactctgtgaagggccgattcaccatctccagggacaacgccaagaactcactgtatctgcaaatgaacagcctgagagccgaggacacggccgtttattattgtacgaagggggggatgaccagcagctggttctgggtcgactggggccagggaaccctggtcaccgtctcctca

SEQ ID NO: 14969 - DNA, 295 bp, Homo sapiens
  source 1..295: mol_type = other DNA
tgcagcctctggattcacctttggtagctattggatgacctgggtccgccagtctccagggaaggggctggagtgggtggccaatataaagaaagatggaaatgagaaatactatgtggactctgtgaagggccgattcaccatctccagggacaacactaagaactcattgtatctgcaaatgaacagcctgagagccgaggacacggccgtgtatttttgtacgaaaggggggatgaccagcagctggttctgggtcgactggggccagggaaccctggtcaccgtctcctca

SEQ ID NO: 14970 - DNA, 318 bp, Homo sapiens
  source 1..318: mol_type = other DNA
gcttctggaggcaccctcagcagtttcgctatcggctgggtgcgacaaggccctggacaagggcttgagtgggtgggaggggtcatccctatcctaggaagaacagactacgcagagaggttccagggcagagtcacgattaccgcggacgaacccaggaatggagcctacatggagctgagcggcctgacacctgaggacacggccgtgtatttctgtgcgagaggccgctattatgatgttggtggtgactcccaaatggggcggtattatttattcgaccgctggggccagggaaccctggtcaccgtctcctca

SEQ ID NO: 14971 - DNA, 318 bp, Homo sapiens
  source 1..318: mol_type = other DNA
gcttctggaggcaccctcagcagtttcgctatcggctgggtgcgacaaggccctggacaagggcttgagtgggtggggggggtcatccctatcctaggaagaacagactacgcagagaggttccagggcagagtcacgattaccgcggacgaacccaggaatggagcctacatggagctgaacggcctgacagctgaggacacggccgtgtatttctgtgcgagaggccgctattatgatgttggtggtgactcccaaatggggcggtactatttattcgaccgctggggccagggaaccctggtcaccgtctcctca

SEQ ID NO: 14972 - DNA, 310 bp, Homo sapiens
  source 1..310: mol_type = other DNA
ttcagcctctggattcaccttcagtagttcttctatgcactgggtccgccaggctccagggaagggactggaatatgttgcacctttcagtagtaatgggggtagcacatactacgcagactcagtgaagggcagattcaccatgtccagagacaattccaagaatacgcagtatcttcaaatgagcagtctgagagctgaggacacggctgtgtattattgtgtgaaggcgacggggtataaggtcgggtcgttcaaattttactacatggacgtctggggcaaagggaccacggtcaccgtgtcctca

SEQ ID NO: 14973 - DNA, 310 bp, Homo sapiens
  source 1..310: mol_type = other DNA
ttcagcctctggattcaccttcagtagctcttctatgcactgggtccgccaggctccagggaagggactggaatatgttgcacctttcagtagtaatgggggtagcacatactacgcagactcagtgaagggcagattcaccatgtccagagacaattccaagaatacgcagtatcttcaaatgagcagtctgagagctgaggacacggctgtgtattattgtgtgaaggcgacggggtataaggtcgggtcgttcaaattttactacatggacgtctggggcaaagggaccacggtcaccgtgtcctca

SEQ ID NO: 14974 - DNA, 289 bp, Homo sapiens
  source 1..289: mol_type = other DNA
cactgtctccggtggctccgtgagtagtaaatattattggggctggatccgccagtccccagggaaggggctggagtggattgcgagtttcctttataatggacgaagttacttcaacccgtccctcaagagtcgagtcaccatatccacagacacgtccaagaaccaattctccctgaacctgacgtctgtgaccgccgcagacacggccatttattattgtgcgagacaaggggttgtgtggtgcccgaggaactggggccagggaaccctggtcaccgtctcttcc

SEQ ID NO: 14975 - DNA, 289 bp, Homo sapiens
  source 1..289: mol_type = other DNA
cactgtctccggtggctccgtgagtagtaaatattattggggctggatccgccagtccccagggaaggggctggagtggattgcgagtttcctttataatggacgaagttacttcaacccgtccctcaagagccgagtcaccatttccacagacacgtccaagaaccaattccacctgaacctgacgtctgtgaccgccgcagacacggctatttattattgtgcgagacaaggggttgtgtggtgcccgaggaactggggccagggaaccctggtcaccgtctcttcc

SEQ ID NO: 14976 - DNA, 289 bp, Homo sapiens
  source 1..289: mol_type = other DNA
cactgtctccggtggctccgtgagtagtaaatattattggggctggatccgccagtccccagggaaggggctggagtggattgcgagtttcctttataatggacgaagttacttcaacccgtccctcaagagccgagtcaccatctccacagacacgtccaagaaccaattccacctgaacctgacgtctgtgaccgccgcagacacggctatttattattgtgcgagacaaggggttgtgtggtgcccgaggaactggggccagggaaccctggtcaccgtctcttcc

SEQ ID NO: 14977 - DNA, 289 bp, Homo sapiens
  source 1..289: mol_type = other DNA
cactgtctccggtggctccgtgagtagtaaatattattggggctggatccgccagtccccagggaaggggctggagtggattgcgagtttcctttataatggacgaagttacttcaacccgttcctcaagagccgagtcaccatttccacagacacgtccaagaaccaattccacctgaacctgacgtctgtgaccgccgcagacacggctatttattattgtgcgagacaaggggttgtgtggtgcccgaggaactggggccagggaaccctggtcaccgtctcttcc

SEQ ID NO: 14978 - DNA, 293 bp, Homo sapiens
  source 1..293: mol_type = other DNA
ccatctccggggacagtgtctctagtgagacttctgcctggaattggttcaggcagtccccatcgaggggccttgagtggttggggaggacatattacaggaccaagtggaacaatgatttttcatcctctgtgagagggcgaatagacgtcaatccagacacatccaagaatcaattttccctacacctctattctgtgacccccgaagacgcggctacatattattgtgcaagagagggagtctgggcccttgatttctggggccagggaacccgggtcaccgtctcctca

SEQ ID NO: 14979 - DNA, 293 bp, Homo sapiens
  source 1..293: mol_type = other DNA
ccatctccggggacagtgtctctagtgacacttctgcttggaattggttcaggcagtccccatcgaggggccttgagtggttggggaggacatattataggaccaagtggaacaacgatttttcatcgtctgtgagagggcgaatagatgtcaatccagacacatccaagaaccagttttccctgcatctccactctgtgacccccgaagatgcggctatatattattgtgcaagagagggagtctgggcccttgatttctggggccagggaacccgggtcaccgtctcctca

SEQ ID NO: 14980 - DNA, 295 bp, Homo sapiens
  source 1..295: mol_type = other DNA
cactgtgtctggtggctccatcggtagttactactggagctggatccggcagcccccggggaagggactggagtggattggccatatctattacgatgggagcaccaactccaacccctccctcaagagtcgagtcaccatatcagtagacacgtccaagaaccagttctccctgaaggtgagctctgtgaccgctgcggacacggccatttattactgtgcgagaattgtgtccggctactactactactacatggacgtctggggcaaggggaccacggtcaccgtctcctca

SEQ ID NO: 14981 - DNA, 295 bp, Homo sapiens
  source 1..295: mol_type = other DNA
cactgtctctggtggctccatcggtacttactactggagctggatccggcagcccccggggaagggactggagtggcttggacatatctattacagtgggaccaccaactacaacccctccctcaagagtcgagtcaccatatcagtagacacgtccaagaaccagttctccctgaagctgagctctgtgaccgctgcggacacggccgtctattactgtgcgagaattgtgtccggctactactactactacatggacgtctggggcaaagggaccacggtcaccgtctcctca

SEQ ID NO: 14982 - DNA, 297 bp, Homo sapiens
  source 1..297: mol_type = other DNA
gcatctggatacaccttcagcaactactatatgcaatgggtgcgacaggcccctggacaagggcttgagtggatgggaataatcaaccctactactggtagcacaagctactcagagaagttccagggcagagtcaccatgaccagggacacgtccacgagcacagtctacatggacctgagcagcctgagatctgaggacacggccgtgtattactgtgcgagagatcccggattacgaggggactactactacatggacgtctggggcaaagggacgacggtcaccgtctcctca

SEQ ID NO: 14983 - DNA, 297 bp, Homo sapiens
  source 1..297: mol_type = other DNA
gcatctggatacaccttcaccagctactatatacactgggtgcgacaggcccctggacatgggcttgagtggatgggaataatcaaccctactagcggtagcacaagctacgcacagaatttccagggcagagtcaccatgaccagggacacgtccacgagcacagtctacatggagctgagcagcctgagatctgaggacacggccgtatattactgtgcgagagatcccggattacgaggggactactactacatggacgtctggggcaaagggaccacggtcaccgtctcctca

SEQ ID NO: 14984 - DNA, 297 bp, Homo sapiens
  source 1..297: mol_type = other DNA
gcatctggatacaccttcaccaactactatatacagtgggtgcgacaggcccctggacatgggcttgagtggatgggaataatcaaccctactagcggtagcacaagctacgcacagaattcccagggcagagtcaccatgaccagggacacgtccacgagtatggtctatatggagctgagcagcctgagatctgaggacacggccgtatattactgtgcgagagatcccggattacgaggggactactactacatggacgtctggggcaaagggactacggtcaccgtctcctca

SEQ ID NO: 14985 - DNA, 286 bp, Homo sapiens
  source 1..286: mol_type = other DNA
tgcagcctctgggttcaacttcaacatttatagcatgaattgggtccgccaggctccagggaagggactggagtggatttcatatattaatggtccaagtaccgccatacactacgcagactctgtgaggggccgattcaccatctccagagacaatggcaagaacgcagtgtatctgcaaatgaacaacctgagagacgacgacacggctgtctattattgtacgaggggtttgcaatacagctctgacttctggggccagggaaccctggtcaccgtctcctca

SEQ ID NO: 14986 - DNA, 286 bp, Homo sapiens
  source 1..286: mol_type = other DNA
tttggcctctggattcaacttcaagatctatagcatgaattgggtccgccaggctccagggaaggggctggagtgggtttcatatattactggcgggagtaatgtcctccactacgcagactccgtgaagggccggttcaccatctccagagacaatgccaagaactctctgtatctgcatatgaacagtctgagagacgacgacacggctgtctattattgtacgaggggactccaatatagtagtgacttctggggccagggaatcctggtcaccgtctcctca

SEQ ID NO: 14987 - DNA, 286 bp, Homo sapiens
  source 1..286: mol_type = other DNA
tgcagcctctggattcaccttcagtagttatagcatgaactgggtccgccaggctccagggaagggactggagtggatttcatatattactggtcctagtagcaccatacactacgcagactctgtgaggggccgattcaccatctccagagacaatgccaagaactcagtgtatctgcaaatgagcagcctgagagacgaggacacggctgtctattattgtacgaggggtttacaatacagctctgacttctggggccagggaaccctggtctccgtctcttca

SEQ ID NO: 14988 - DNA, 286 bp, Homo sapiens
  source 1..286: mol_type = other DNA
tgcagcctctggattcaacttcaatatttatagtatgaattgggtccgccaggctccagggaagggactggagtggatttcatacattactagtaatgaaaaaaccatacactacgcagactctgtgaggggccgattctccatctccagagacaatgccaggaactcactgtatttgcaaatgaacagcctgagagacgaggacacggctgtctattattgtacgaggggtttgcaatacagttctgacttctggggccacggaaacttggtcaccgtctcctca

SEQ ID NO: 14989 - DNA, 286 bp, Homo sapiens
  source 1..286: mol_type = other DNA
tgcagcctctgggttcaacttcaaggtttatagcatgaactgggtccgccaggctccagggaagggactggagtggatcgcatacatcaatggtccaagtaatgccctacactacgcagactctgtgaggggccgattcaccatctccagagacaatgccaagaactcagtgtctctgcaaatgaacagcctgagagacgaggacacggctctctattattgtacgaggggtttacaatacagctctgacttctggggccagggaaccctggtcaccgtctcctca

SEQ ID NO: 14990 - DNA, 301 bp, Homo sapiens
  source 1..301: mol_type = other DNA
tgcagcgtctggattcagcttcagtacctatggcatgcactgggtccgccaggctccaggcaaggggctggagtgggtggcaattatatcgtatgatggaagttggcaatcctatgcagactccgtgaagggccggctcaccatctccagagacaattcccagaacacactgtatctgcaaatgagcagtctgagacctgaagacacggctacttattactgcacgaaagactttacttgggtggtcgcttcgacgggttttgactcctggggccagggaaccctggtcaccgtctcctca

SEQ ID NO: 14991 - DNA, 301 bp, Homo sapiens
  source 1..301: mol_type = other DNA
tgcagcctctggattcaccttcagtcattatggcatgcactgggtccgccaggctccaggcaaggggctggagtgggtggcacttatagcgaatgatggaagttgggaatcctatgcagactccgtgaggggccggctcaccatctccagagacaattcccagaatacactgtatctgcaagtgagcagtctgagacctgaagacacggctacttattactgcacgaaagactttacttgggtggtcgcttctacgggttttgactcctggggccagggaaccctggtcaccgtctcctca

SEQ ID NO: 14992 - DNA, 289 bp, Homo sapiens
  source 1..289: mol_type = other DNA
tgcagcctctggattcagcctcagaaattatgaaatgaactgggtccgccaggttccagggaaggggctggagcgcgttgcattcatcagtcatggtactactaccatgtactacggagactctgtgaggggccgattcaccatctccagagatgacgccaagaactcactgtatctgcaaatgaacaacctgagagtcgaagacacggctatttactactgtgcgagagataatggagcggcagctgccgacgaatggggccagggaaccctggtcaccgtctcctca

SEQ ID NO: 14993 - DNA, 289 bp, Homo sapiens
  source 1..289: mol_type = other DNA
tgcagcctctggattcagcctcagaaattatgaaatgaactgggtccgccaggttccagggaaggggctggagcgcgttgcattcatcagtcatggtactactaccatgtactacggagactctgtgaggggccgattcaccatctccagagatgacgccaagaacacactgtatctgcaaatgaacagcctgagagtcgaggacacggctatttactactgtgcgagagataatggagcggcagctgccgacgagtggggccagggaaccctggtcaccgtctcctca

SEQ ID NO: 14994 - DNA, 289 bp, Homo sapiens
  source 1..289: mol_type = other DNA
tgcagcctctggattcagcctcagaaattatgaaatgaactgggtccgccaggttccagggaaggggctggagcgcgttgcattcattagtcatggtactactaccatgtactacggagactctgtgaggggccgattcaccatctccagagatgacgccaagaacacactgtatctgcaaatgaacagcctgagagtcgaggacacggctatttactactgtgcgagagataatggagcggcagctgccgacgagtggggccagggaaccctggtcaccgtctcctca

SEQ ID NO: 14995 - DNA, 289 bp, Homo sapiens
  source 1..289: mol_type = other DNA
tgcagcctctggattcagcctcagacgttatgaaatgaactgggtccgccaggttccagggaaggggctggagcgcgtcgcattcatcagtcatgatactcctaccatgtactatggagactctgtgaggggccgcttcaccatctccagagatgacgccaagaactcactgtatctgcaaatgaacagcctgagagtcgaagacacgggtatttattactgtgcgagagataatggagcggcagctgccgacgagtggggccggggaaccctggtcaccgtctcctca

SEQ ID NO: 14996 - DNA, 289 bp, Homo sapiens
  source 1..289: mol_type = other DNA
tgcagcctctggattcagcctcagaaattatgaaatgaactgggcccgccaggttccagggaaggggctggagcgcgttgcattcatcagtcatggtactactaccatgtactacggagactctgtgaggggccgattcaccatctccagagatgacgccaagaacacactgtatctgcaaatgaacagcctgagagtcgaggacacggctatttactactgtgcgagagataatggagcggcagctgccgacgagtggggccagggaaccctggtcaccgtctcctca

SEQ ID NO: 14997 - DNA, 315 bp, Homo sapiens
  source 1..315: mol_type = other DNA
aagggctctggatacaactttaccaactactggatcacttgggtgcgccagatgcccgggaaaggcctggagtggatggggaggattgatcctactgactcttctaccaaatacagcccgtccttccaaggccacgtcaccatctcagctgacgagtccttcagcactgcctacctgcagtggagcagcctgagggcctcggacgtcgccatgtattactgtgcgagagtttctagacaatcacctgtcaggggaggttattattaccactacatggacgtctggggcaaagggaccacggtcatcgtctcctca

SEQ ID NO: 14998 - DNA, 315 bp, Homo sapiens
  source 1..315: mol_type = other DNA
cagggttctggatacaactttaccaactactggatcacgtgggtgcgccagatgcccgggaaaggcctggagtggatggggaggattgatcctactgactcttctaccaagtacagcccgtccttcgaaggccacgtcaccctctcagttgacgagtccttcagcactgcctacctgcagtggagcagcctgaaggcctcggacgtcgccatgtattactgtgcgagagtttctagacaatcacctgtcaggggaggttactattaccactacatggacgtctggggcaaagggaccacggtcatcgtctcctca

SEQ ID NO: 14999 - DNA, 316 bp, Homo sapiens
  source 1..316: mol_type = other DNA
cactgtctctggtggctccgtcagcagtagtagttactactggacctggatccggcagcccccagggaagggactggagtggattgggtacgtctattacagtgggatcaccaactacaacccctccctcaagagtcgactcaccatagcagtggacacgtccaagaatcaattctccctgaagctgaggtctgtgacccctgcggacacggccgtgtattactgtgcgagagaattcctacacgtatccccggattccgggggatacaactggttcgacccctggggccagggatccctggtcaccgtctcctca

SEQ ID NO: 15000 - DNA, 316 bp, Homo sapiens
  source 1..316: mol_type = other DNA
cactgtctctggtgtctccgtcagcagtggtagtttctactggacgtggatccggcagcccccagggaagggactggagtgggttgggtacgtctattacagtgggatcaccaactacaacccctccctcaagagtcgactcaccatagcagtggacacgtccaagaatcaattctccctgaagttgacctctgtaaccgctgcggacacggccgtgtattactgtgcgagagagttcctacacgtatcgccggattccggggggtacaactggttcgacccctggggccagggaaccctggtcaccgtctcctca

SEQ ID NO: 15001 - DNA, 316 bp, Homo sapiens
  source 1..316: mol_type = other DNA
cactgtctctggtggctccgtcagcagtggtagttactactggacctggatccggcagcccccagggaagggactggagtggatggggtacatctattacggtgggatcaccaactacaacccctccctcaagagtcgactcaccatgacagtagacacgtccaagaatcagttctccctgaggttgagctctgtgaccgctgcggacacggccgtgtattactgtgcgagagaattcctacacgtatccccggattccggggggtacaactggttcgacccctggggccagggaaccctggtcaccgtctcctca

SEQ ID NO: 15002 - DNA, 298 bp, Homo sapiens
  source 1..298: mol_type = other DNA
tgcagcctctgggttcaccgtcagtagcaactacatgatctgggtccgccaggctccagcgaaggggctggagtgggtctcacttatttctagcggtagcgggggtagtacatactacgcagagtccgtgaagggccgattcaccatctccagagacaattccaagaacacgctgtatcttcaaatgaacagccttagagccgaggatacggccgtttattactgtgcgaggatgtatatcagtggcgaggggtacttcgatctctggggccgtggcaccctgctcactgtctcctca

SEQ ID NO: 15003 - DNA, 298 bp, Homo sapiens
  source 1..298: mol_type = other DNA
tgcagcctctgggttcaccgtcagtagcaactacatgatctgggtccgccaggctccagcgaaggggctggagtgggtcgcacttatttctagcggtagcgggcgtagtacatactacgcagagtccgtgaagggccgattcaccatctccagagacacttccaagaacacgctgtatcttcaaatgaacagccttagagccgaggacacggccatttattactgtgcgaggatgtatatcagtggcgaggggtacttcgatctctggggccgtggcaccctgctcactgtctcctca

SEQ ID NO: 15004 - DNA, 298 bp, Homo sapiens
  source 1..298: mol_type = other DNA
tgcagcctctgggttcaccgtcagtagcaactacatgatctgggtccgccaggctccagcgaaggggctggagtgggtctcacttatttctagcggtagcgggggtagtacattctacgcagagtccgtgaagggccgattcaccatctccagagacaattccaagaacacgctatatcttcaaatgaacagccttagagccgaggatacggccgtttattactgtgcgaggatgtatatcagtggcgaggggtacttcgatctctggggccgtggcaccctgctcactgtctcctca

SEQ ID NO: 15005 - DNA, 319 bp, Homo sapiens
  source 1..319: mol_type = other DNA
cgctgtctatggtgggtccttcagtggttactactggagctggatccgccagccaccaggaaaggggctggagtggattggggagatcaatcatggtggaggcaccaattacaacccgtccctcaagagtcgagtcgccatatcactagccacgtccaagaaccagttctccctgaagctgaactctgtgaccgccgcggacacggctgtgtattactgtgcgagaggtggataccactcaactcgccgccacccgccccgcaaaagagactattacattgacgtctggggcacagggaccacggtcaccgtctcctca

SEQ ID NO: 15006 - DNA, 319 bp, Homo sapiens
  source 1..319: mol_type = other DNA
cgctgtctatggtgggtccttcagtggttactactggagctggatccgccagccaccaggaaaggggctggagtggattggggagatcaatcatggtggaggcaccaattacaacccgtccctcaagagtcgagtcgccatatcactagccacgtccaagaaccagttctccctgaagctgaactctgtgaccgccgcggacacggctgtgtattactgtgcgagaggtggataccactcaactcgccgccacccgccccgcaaaagagactattacatagacgtctggggcacagggaccacggtcaccgtctcctca

SEQ ID NO: 15007 - DNA, 307 bp, Homo sapiens
  source 1..307: mol_type = other DNA
tgcaacctctggattcagcttccgtacttttggcatgcactgggtccgccaggctccaggcaaggggccggagtgggtggcagttatatcaaatgacggatattctaaacattatagagactccgtgaacggccgattcaccatctccagagacaattcgaagaacacgctggatctgcaaatgaacagcctgagagctgaggacacggctgtgtattactgtgtgaaaggcgattatgataggagtcattatttcactcccccgatggaaatctggggccaagggacaaaggtcaccgtctctcca

SEQ ID NO: 15008 - DNA, 307 bp, Homo sapiens
  source 1..307: mol_type = other DNA
tgcaacctctggattcagcttccgtacttttggcatgcactgggtccgccaggctccaggcaaggggccggagtgggtggcagttatatcaaatgacggatattctaaacattatagagactccgtgaatggccgattcaccatctccagagacaattcgaagaacacgctggatctgcaaatgaacagcctgagagctgaggacacggctgtatattactgtgtgaaaggcgattatgataggagtcattatttcactcccccgatggaaatctggggccaagggacaaaggtcaccgtctctcca

SEQ ID NO: 15009 - DNA, 295 bp, Homo sapiens
  source 1..295: mol_type = other DNA
tgcagcctctggattcagcttcagcacctatagcatgacctgggtccgccaggctccagggaaggggctggagtggctttcatacattagttatggtagtacttatatatactacgcagactctgtgcagggccgattcaccatctccagagacagtgccaggaactcagtgtatctgcaaatgagcggcctaagagacgaggacacggctgtgtattactgtgcgagggtggtgactggtacggaggggtactttgactattggggccagggaaccctggtcaccgtctcctca

SEQ ID NO: 15010 - DNA, 295 bp, Homo sapiens
  source 1..295: mol_type = other DNA
tgcagtctctggattcaccttcagtagctatagcatgagctgggtccgccaggctccagggaaggggctggagtgggtttcatacattagttatgggagtagtaccatatactacgcagactctgtgaagggccgattcaccatctccagagacagtgccaagaactcattgtatctgcaaatgaacggcctgagagacgaggacacggctgtgtattactgtgcgagggtggtgactggtacggaggggtactttgactattggggccagggaaccctggtcaccgtctcctca

SEQ ID NO: 15011 - DNA, 307 bp, Homo sapiens
  source 1..307: mol_type = other DNA
tgcagcctctggattccccttcagtacctatggcatgcactgggtccgccaggctccaggcaaggggctggagtgggtggcagttatttcatatgatggaagaaataaatattatgcagactccgtgaggggccgattcaccatctcaagagacaattccgagaacacgctatatctgcaaatgaacagcctgagagctgaggacacggctgtttattactgtgcgaaagattccctacagaatgttgtcatagtaccaactgctatcccagtctggggccagggaaccctggtcaccgtctcctca

SEQ ID NO: 15012 - DNA, 307 bp, Homo sapiens
  source 1..307: mol_type = other DNA
tgcagcctctggattcaccttcagtagctatggcatgcactgggtccgccaggctccaggcaaggggctggagtgggtggcagttatttcatatgatggaagaaataaatattatgcagactccgtgaggggccgattcagcatctcaagagacaattccgagaacacgctgtatctgcaaatgaacagcctgagagctgaggacacggctgtttattactgtgcaaaagattccctacagaatgttgttatagtaccaactgctatcccagtctggggccagggaaccctggtcaccgtctcctca

SEQ ID NO: 15013 - DNA, 307 bp, Homo sapiens
  source 1..307: mol_type = other DNA
tgcagcctctggattcaccttcagtagctatggcatgcactgggtccgccaggctccaggcaaggggctggagtgggtggcagttatttcatatgatggaagaaataaatattatgcagactccgtgaggggccgattcaccatctcaagagacaattccgagaacacgctgtatctgcaaatgaacagcctgagagctgaggacacggctgtttattactgtgcgaaagattccctacagaatgttgtaatagtaccaactgctatcccagtctggggccagggaaccctggtcaccgtctcctca

SEQ ID NO: 15014 - DNA, 298 bp, Homo sapiens
  source 1..298: mol_type = other DNA
cgctgtctctggcgggtccttcagtggttactactggagctggatccgccagcccccaggggaggggctggagtggattggggacataaatcatagtggaagcaccaactacaacccgtccctcaagagtcgactcaccatatcagtagacacgtccaagaaccagttctccctgaagctgacctctgtgaccgccgcggacacggctgtgtatttctgtgcgagaggccgttcagctatgggaccatactccgtctttgactactggggccagggaaccctggtcaccgtctcctca

SEQ ID NO: 15015 - DNA, 298 bp, Homo sapiens
  source 1..298: mol_type = other DNA
tgctgtctctggcgggtccttcagtggttactactggagctggatccgccagcccccaggggaggggctggagtggattggggacataaatcatagtggaagcaccaactacaacccgtccctcaagagtcgactcaccatatcagtagacgcgcccaagaaccagttctccctgaaggtgacctctgtgaccgccgcggacacggctgtgtatttctgtgcgagaggccgttcagctatgggaccatactccgtctttgactactggggccacggaaccctggtcaccgtctcctca

SEQ ID NO: 15016 - DNA, 298 bp, Homo sapiens
  source 1..298: mol_type = other DNA
tgcagcctctggattcaccttcagtaattatgctatgcactgggtccgccaggctccaggcaaggggctggagtggatggcggtgacatcatatgatggaagaaattactactacgcagactccgtgaagggccgcttcaccatctccagagacaattccaagaataccctgtatctgcaaatgaacagcctgagagctgaggacacggctgtttattactgtgcgagaggggcgggaggtacttgccgatactattttgaccactggggccagggaaccctggtcaccgtctcctca

SEQ ID NO: 15017 - DNA, 298 bp, Homo sapiens
  source 1..298: mol_type = other DNA
tgcagcctctggattcaccttcagtaattatgctatgcactgggtccgccaggctccaggcaaggggctggagtggatggcggtgacatcatatgatggaagaaattactactacgcagactccgtgaagggccgcttcaccatctccagagacaattccaagaataccctgtatctgcaaatgaacagcctgagagctgaggacacggctgtttattactgtgcgagaggggcgggaggtacttgccgatactattttgaccactggggccagggaaccctggtcaccgtctcctta

SEQ ID NO: 15018 - DNA, 296 bp, Homo sapiens
  source 1..296: mol_type = other DNA
cagcctctggattcaccttcagtaattatgctatgcactgggtccgccaggctccaggcaaggggctggagtggatggcggtgacatcatatgatggaagaaattactactacgcagactccgtgaagggccgcttcaccatctccagagacaattccaagaataccctgtatctgcaaatgaacagcctgagagctgaggacacggctgtttattactgtgcgagaggggcgggaggtacttgccgatactattttgaccactggggccagggaaccctggtcaccgtctcctca

SEQ ID NO: 15019 - DNA, 304 bp, Homo sapiens
  source 1..304: mol_type = other DNA
tgcagcctctggattcacctttagtacctattggatgagctgggtccgccaggctccagggaaggggctggagtgggtggccaacataaagtttgatggaagtgagaaatactatgtggactctgtgaagggccgattcaccatctccagagacaacgccaagaactcactgtatctgcaaatgaacagcctgggagccgaggacacggctctgtattactgtgcgagtcaatattgtagtggtggtagctgctccccagcgcggggcaactggggccagggcaccctggtcaccgtctcctca

SEQ ID NO: 15020 - DNA, 304 bp, Homo sapiens
  source 1..304: mol_type = other DNA
tgcagcctctggattcacctttagtagctattggatgagctgggtccgccaggctccagggaaggggctggagtgggtggccaacataaagtttgatggaagtgagaaatattatgtggactctgtgaagggccgattcaccatctccagagacaacgccaagaactcactgtatctgcaaatgaacagcctgggagccgaggacacggctctgtattactgtgcgagtcaatattgtagtggtggtagctgctccccagcgcggggcaactggggccagggcaccctggtcaccgtctcctca

SEQ ID NO: 15021 - DNA, 304 bp, Homo sapiens
  source 1..304: mol_type = other DNA
tgcagcctctggattcacctttagcacctattggatgagttgggtccgccaggctccagggaaggggctggagtgggtggccaacataaagtttgatggaagtgagacatactatgtggactctgtgaagggccgattcaccatctccagagacaacgccaagaaatcactgtatctgcaaatgaacagcctgggagccgaggacacggctgtgtattactgtgcgagccaatattgtagtggtggtagctgctccccagcgcggggcaactggggccagggcaccctggtcaccgtctcctca

SEQ ID NO: 15022 - DNA, 297 bp, Homo sapiens
  source 1..297: mol_type = other DNA
gcttctggttacacctttaccagttatggtatcagttgggtgcgacaggcccctggacaagggcttgagtggatgggctggatcagcgattacaatggtaacacaaattatgcacagaaggtccagggcagagtcaccatgaccacagacacatccacgaacacagcctccatggagctgaggagcctgagatctgacgacacggccatgtattattgtgcgagagatcttagtggaactggaggaggggtacacttccagtattggggccagggcaccctggtcaccgtctcctca

SEQ ID NO: 15023 - DNA, 297 bp, Homo sapiens
  source 1..297: mol_type = other DNA
gcttctggttacacctttaccagttatggtatcagttgggtgcgacaggcccctggacaagggcttgagtggatgggctggatcagcgcttacaatggtaacacaaactacgcacagaaggtccagggcagagtcaccatgaccacagacacatccacgaacacagcctccatggaggtgaggagcctgagatctgacgacacggccatgtattattgtgcgagagatcttagtggaactggaggaggggtacacttccagtattggggccagggcaccctggtcaccgtctcctca

SEQ ID NO: 15024 - DNA, 297 bp, Homo sapiens
  source 1..297: mol_type = other DNA
gcttctggttacacctttaccagttatggtatcagttgggtgcgccaggcccctggacaagggcttgagtggttgggctggatcagctcttacaatggtaatacaaactatgcacagaaggtccagggcagagtcaccatgaccacagacacatccacgaacacagcctccatggaactgaggagcctgagatctgacgacacggccatgtattattgtgcgagagatcttagtggaactggaggaggggtacacttccagtattggggccagggcaccctggtcaccgtctcctca

SEQ ID NO: 15025 - DNA, 315 bp, Homo sapiens
  source 1..315: mol_type = other DNA
aagggttctggatacagcttctctaactactggatcgcctgggtgcgccagatgcccgggaaaggcctggagttgatggggatcatctatcctggtgactctgataccagatacagcccgtccttccaaggccaggtcatcatctcagccgacaagtccatcaacaccgcctacctgcagtggcgcagcctgaaggcctcggacaccgccacttattactgtgcgagacaaggctgtcctagtgctccctgttactccttcgtctattactacatggacgtctggggcatagggaccacggtcaccgtctcctca

SEQ ID NO: 15026 - DNA, 315 bp, Homo sapiens
  source 1..315: mol_type = other DNA
aagggttctggatacagcttctcgaactactggatcgcctgggtgcgccagatgcccgggaaaggcctggagttgatggggatcatctatcctggtgactctgataccagatacagcccgtccttccaaggccaggtcaccatctcagccgacaagtccatcaataccgcctacctgcagtggcgcagcctgaaggcctcggacaccgccacttatttctgtgcgagacaagggtgtcctagtgctccctgttactccttcgtctattactacatggacgtctggggcatagggaccacggtcaccgtctcctca

SEQ ID NO: 15027 - DNA, 295 bp, Homo sapiens
  source 1..295: mol_type = other DNA
cgctgtgtctggtgggtccctcagtgggtccttttggacctggatccgtcagaccccacggaagggcctcgagtggattggagcaatcaatgatcgtggaatacgcaactaccatccgtccctgtcgagtcgagccaccgtctcagcagacacgtcccagaatcaagtattacttcacctgacctctgtgaccgacgcggacacgggtgtttattactgtgcgagactcagcagtggccgggactactattatttggacgtctggggcaaggggaccccggtcaccgtctcctca

SEQ ID NO: 15028 - DNA, 295 bp, Homo sapiens
  source 1..295: mol_type = other DNA
cgctgtgtctggtgggtccctcagtgggtccttttggacctggatccgtcagaccccacggaagggcctcgagtggattggagcaatcaatgatcgtggaatacgtaactaccatccgtccctgtcgagtcgggccaccgtctcagcagacacgtcccagaatcaggtgttacttcacctgagctctgtgaccgacgcggacacgggtgtttattactgtgcgagactcagcagtggccgggactactattatttggacgtctggggcaaggggaccccggtcaccgtctcctca

SEQ ID NO: 15029 - DNA, 280 bp, Homo sapiens
  source 1..280: mol_type = other DNA
tgaagtctttggattcacctttagcacctatagcatgagttgggtccgccaggccccagggaaggggctggaatgggtctcagttattactgctactgggactacatactacgcagactccgtgtggggccggttcaccatctccagagacaattccaagaacacactgtatctgcaaatgaacagcctgagagacgaggacacggccacatattactgtgcgaagaagatagggcactttgactactggggccagggaaccctggtcaccgtctcctca

SEQ ID NO: 15030 - DNA, 280 bp, Homo sapiens
  source 1..280: mol_type = other DNA
tgaagtctctggattcacctttagcacctatagcatgagctgggtccgccaggccccagggaaggggctggagtgggtctcagttattactgctactggtagtacatactacgcagactccgtgaggggccggttcaccatctccagagacaattccaagaacacactgtatctgcaaatgaacagcctgagagccgaggacacggccatatattactgtgcgaagaagatagggcactttgactactggggccagggaaccctggtcaccgtctcctca

SEQ ID NO: 15031 - DNA, 292 bp, Homo sapiens
  source 1..292: mol_type = other DNA
cactgtctctggtggctccatcagcagtagtagttactactggggctggatccgccagcccccaggaaaggggctggaatggattgggaatatcttttatagtgggagcacctactacaacccgtccctcaagagtcgagtcaccatatccgtggacacgtccaagaaccatttctccctgaagctgagctctgtgaccgccgcagacacggctctgtattactgtgcgagacgggggggtggtaaggcctttgactactggggccagggacccctggtcaccgtctcctca

SEQ ID NO: 15032 - DNA, 292 bp, Homo sapiens
  source 1..292: mol_type = other DNA
cactgtctctggtggctccatcagcagtactagttactactggggctggatccgccagcccccagggaaggggctggaatggattgggaatatcctttatagtgggagcacctactacaacccgtccctcaagagtcgagtcacgatatccgtggacacgtccaagaaccaattttccctgaagctgagctctgtgaccgccgcagacacggctctctattactgtgcgcgccgggggggtggtaaggcctttgactactggggccagggacccctggtcaccgtctcctca

SEQ ID NO: 15033 - DNA, 292 bp, Homo sapiens
  source 1..292: mol_type = other DNA
cactgtctctggtggctccatcagcagtactagttactactggggctggatccgccagcccccagggagggggctggaatggattgggaatatcttctatagtgggagcacctactacaacccgtccctcaagagtcgagtcaccatatccgtggacacgtccaagaaccatttttccctgaagctgagctctgtgaccgccgcagacacggctctgtatttctgtgcgagacgggggggtggtaaggcctttgactactggggccagggaaccctggtcaccgtctcctca

SEQ ID NO: 15034 - DNA, 292 bp, Homo sapiens
  source 1..292: mol_type = other DNA
cactgtctctggtggctccatcagcagtactagttactactggggctggatccgccagcccccagggaaggggctggaatggattgggaatatcttttatagtgggagcacctactataacccgtccctcaagagtcgagtcaccatatccgtggacacgtccaagaaccatttttccctgaagctgagctctgtgaccgccgcagacacggctctgtattactgtgcgagacgggggggtggtaaggcctttgactactggggccagggacccctggtcaccgtctcctca

SEQ ID NO: 15035 - DNA, 292 bp, Homo sapiens
  source 1..292: mol_type = other DNA
cactgtctctggtggctccatcagcagtagtagttactactggggctggatccgccagcccccagggagggggctggaatggattgggaatatcttctatagtgggagcacctactacaacccgtccctcaagagtcgagtcaccatatccgtggacacgtccaagaaccatttttccctgaagctgagctctgtgaccgccgcagacacggctctgtatttctgtgcgagacgggggggtggtaaggcctttgactactggggccagggaaccctggtcaccgtctcctca

SEQ ID NO: 15036 - DNA, 292 bp, Homo sapiens
  source 1..292: mol_type = other DNA
ctctgtctctggtgactccatcagcactagtagttattactggggctggatccgccagcccccaggaaaggggctggaatggattgggaatatctttaatagtgggagcacctactacaacccgtccctcaagagtcgagtcaccatatccgtggacacgtccaagaaccatttctccctgaagctgagctctgtgaccgccgcagacacggctctgtattactgtgcgagacgggggggtggtaaggcctttgactactggggccagggacccctggtcaccgtctcctca

SEQ ID NO: 15037 - DNA, 292 bp, Homo sapiens
  source 1..292: mol_type = other DNA
cactgtctctggtggctccgtcagtagtaccagttactactggggctggatccgccagtccccagggaagggactagaatggattgggaatatcttttatagtgggagcacctactacaacccgtccctcaagagtcgagtcaccatatccgtggacacgtccaagaaccatttttcccttgagctgaactctttgaccgccgcagacacggctctttattactgtgcgagacgggggggcggtaaggcctttgactactggggccagggaatcctggtcaccgtctcctca

SEQ ID NO: 15038 - DNA, 292 bp, Homo sapiens
  source 1..292: mol_type = other DNA
cactgtctctggtggctccatcagcagtactagttactactggggctggatccgccagcccccagggaaggggctggaatggattggtaatatcttttatagtgggagcacctactacaacccgtccctcaagagtcgagtcaccatctccgtggacacgtccaagaaccatttttccctgaaactgagctctgtgaccgccgcagacacggctctgtattactgtgcgagacgggggggtggtaaggcctttgactactggggccagggacccctggtcaccgtctcctca

SEQ ID NO: 15039 - DNA, 301 bp, Homo sapiens
  source 1..301: mol_type = other DNA
cggtgtctctggtgggtccttcagtggttactattggacctggatccgccagtccccaaggcaggggctggagtggattggggagatcaatcatcttgcaagggccgacggcaacccgtccctcaagagtcgactcaccatctcggtggacacatccaacagacaattctccctgaacctgacctctgtgaccgccgcggacacggctgtatattactgtgcgagaggctcccggcctataacgtcccctgggagagcttttgatgtctggggccgggggacgatggtcaccgtctcttcc

SEQ ID NO: 15040 - DNA, 301 bp, Homo sapiens
  source 1..301: mol_type = other DNA
cggtgtctctggtgggtccttcagtggttactattggacctggatccgccagtccccaagacaggggctggagtggattggggaaatcaatcatcttgcaagggccgacggcaacccgtccctcaagagtcgactcaccatctcggtggacacatccaagagacaattctccctgaacctgacctctgtgaccgccgcggacacggctgtatattactgtgcgagaggctcccggcctataacgtcccctgggagagcttttgatgtctggggccaggggacgatggtcaccgtctcttcc

SEQ ID NO: 15041 - DNA, 315 bp, Homo sapiens
  source 1..315: mol_type = other DNA
aagggttctggatacagctttaccagctactggatcgcctgggtgcgccagatgcccgggaaaggcctggagtggatggggatcatttatcctggtgactctgataccagatacagcccgtccttccaaggccaggtcaccatctcagccgacaagtccatcagcaccgcctacctgcagtggagcagcctgaaggcctcggacaccgccatgtattactgtgcgagacgagggtatagcagtggctttatcggcgtccactactactactacatggacgtctggggcaaagggaccacggtcaccgtctcctca

SEQ ID NO: 15042 - DNA, 315 bp, Homo sapiens
  source 1..315: mol_type = other DNA
aagggttctggatacagctttaccagctactggatcgcctgggtgcgccagatgcccgggaaaggcctggagtggatggggatcatttatcctggtgactctgataccagatacagcccgtccttccaaggccaggtcaccatctcagccgacaagtccatcagcaccgcctatctgcagtggagcagcctgaaggcctcggacaccgccatgtattactgtgcgagacgagggtatagcagtggctttatcggcgtccactactactactacatggacgtctggggcaaagggaccacggtcaccgtctcctca

SEQ ID NO: 15043 - DNA, 301 bp, Homo sapiens
  source 1..301: mol_type = other DNA
tgttggctctggattcacctttgatgaatatgccatacactgggtccggcaagctccagggaagggcctggagtgggtctcacgtattagtggggatagtagcttcataggctatgcggactctgtgaagggccgattcaccatctccagagacaacgccatgcagtccctgtatctgcagatgaacagtctgagacctgaggacacggccgtgtattactgtacaaaagaccgatattgtagtggcggtatctgccccactgactactggggccagggaaccctggtcaccgtctcctca

SEQ ID NO: 15044 - DNA, 301 bp, Homo sapiens
  source 1..301: mol_type = other DNA
tgtaggctctggatttagctttgatgaatatgccatgcactgggtccggcaagctccagggaagggcctggaatgggtctcacgtattagtgggaatggagacaccataggctatgcggactctgtgaagggccgattcaccatctccagagacaacgccatgcagtccctgtatctgcagatgaacagtctgagacctgaggacacggccttctatttctgtacaaaagaccgatattgtagtggtggtatctgccccactgactactggggccagggaaccctggtcaccgtctcctca

SEQ ID NO: 15045 - DNA, 301 bp, Homo sapiens
  source 1..301: mol_type = other DNA
tgtaggctctggatttagctttgatgaatatgccatgcactgggtccggcaagctccagggaagggcctggaatgggtctcacgtattagtgggaatggagacaccataggctatgcggactctgtgaagggccgattcaccatctccagagacaacgccatgcagtccctatatctgcagatgaacagtctgagacctgaggacacggccttctatttctgtacaaaagaccgatattgtagtggtggtatctgccccactgactactggggccagggaaccctggtcaccgtctcctca

SEQ ID NO: 15046 - DNA, 301 bp, Homo sapiens; identical to SEQ ID NO: 15044
  source 1..301: mol_type = other DNA

SEQ ID NO: 15047 - DNA, 298 bp, Homo sapiens
  source 1..298: mol_type = other DNA
cagtgtctctggtggctccattagtgatgactattggagctggatccggcagcccccggggaagggactggagtggattgggtatatcttttacagtgggagcgtcaactccaacccctccctcaagagtcggctcaccatatcagtagtcacgtccaagaaccagttctccctgaagctgacctctgtgacccctgcggacacggccgtgtattactgtgcgaggagcccccaggacttgggtagtggttattcctttgactactggggccagggagccctggtcaccgtctcctca

SEQ ID NO: 15048 - DNA, 298 bp, Homo sapiens
  source 1..298: mol_type = other DNA
cactgtctctggtggctccattagtgattactattggagctggatccggcagcccccggggaagggactggagtggattgggtatatcttttacagtgggagcgtcaactccaacccctccctcaagagtcggctcaccatatcgttagtcacgtccaagaaccagttctccctgaagctgacctctgtgacccctgcggacacggccgtgtattactgtgcgaggagcccccaggacttgggtagtggttattcctttgactactggggccagggagccctggtcaccgtctcctca

SEQ ID NO: 15049 - DNA, 292 bp, Homo sapiens
  source 1..292: mol_type = other DNA
tgcaacctctggattctccttcagttaccacgccatggactgggtccgccgggcaccggggaagggactggagtgggtctcatccattagttccactcctacttacgtatcgtacgcagactcagtgaagggccgattcaccatctccagagacaacgccaaaaactcggtgtatctgcgaatggacagcctgagagtcgacgacacggctgtctattactgtgcccgagaggcctacggctattatcatctggacgtctggggcaaagggaccacggtcaccgtctcctca

SEQ ID NO: 15050 - DNA, 292 bp, Homo sapiens
  source 1..292: mol_type = other DNA
tgcaacctctggattctccttcagttaccacgccatggactgggtccgccgggcaccggggaagggactggagtgggtctcatccattagttccacgccaacttacgtatcatatgcagactcagtgaagggccgattcaccatctccagagacaacgccaagaactcggtgtttctgcaaatggacagcttgagagtcgacgacacggctgtctattactgtgcccgagaggcctacggctattatcatctggacgtctggggcaaggggaccacggtcaccgtctcctca

SEQ ID NO: 15051 - DNA, 310 bp, Homo sapiens
  source 1..310: mol_type = other DNA
tgcagcctctggattcaccttcagttcttactggatgcactgggtccgccaagctccagggaaggggctggtgtgggtctcacttattaatagtgatgggactactacactctacgcggactccgtgaagggccgattcaccatctccagagacaacgccaagaacacgctgaatctgcaaatgaacagtctgagagccgaggacacggctgtctattactgtgtaagagatgtcggagtaaggtgtggcagtgactggtgcaagtggttcgacccctggggccagggagccctggtcaccgtctcctca

SEQ ID NO: 15052 - DNA, 310 bp, Homo sapiens
  source 1..310: mol_type = other DNA
tgcagcctctggattcaccttcagtagctactggatgcactgggtccgccaagctccagggaaggggctggtgtgggtctcacatattaatagtgatgggagtagaacaaactacgcggactccgtgaagggccgattcaccatctccagagacaacgccaagaacacgctgtatctgcaaatgaacagtctgagagccgaggacacggctgtctattactgtgtaagagatgtcggagtaaggtgtggcagtgactggtgcaagtggttcgacccctggggccagggaaccctggtcaccgtctcctca

SEQ ID NO: 15053 - DNA, 310 bp, Homo sapiens
  source 1..310: mol_type = other DNA
tgcagcctctggattcaccttcagtagctactggatgcactgggtccgccaagctccagggaaggggctggtgtgggtctcacgtattaattttgatgggagtagcacaaactacgcggactccgtgaagggccgattcaccatctccagagacaacgccaagaacacgctgtatctgcaaatgaacagtctgagagccgaggacacggctgtctattactgtgtaagagatgtcggagtaaggtgtggcagtgactggtgcaagtggttcgacccctggggccagggaaccctggtcaccgtctcctca

SEQ ID NO: 15054 - DNA, 294 bp, Homo sapiens
  source 1..294: mol_type = other DNA
gcttctggatacaccttcggtacctatacaatgcattgggtgcgccaggcccccggacaaaggcttgagtggatgggatgtatcaacgctggcaatggtaacacaaaatattcacagaacttccagggcagagtcaccattaccagggacacatccgcgagcacagcctacatggacctgagcagcctgagatctgaagacacggctgtgtattactgtgcgagattgtatagcagctcgtccggggacgtttttgactactggggccagggaaccctggtcaccgtctcctca

SEQ ID NO: 15055 - DNA, 294 bp, Homo sapiens
  source 1..294: mol_type = other DNA
gcttctggatacaccttcagtacctatacaatgcattgggtgcgccaggcccccggacaaaggcttgagtggatgggatgtatcaacgctggcaatggtaacacaaaatattcacagaacttccagggcagagtcaccattaccagggacacatccgcgagcacagcctacatggacctgagcagcctgagatctgaagacacggctgtgtattactgtgcgagattgtatagcagctcgtccggggacgtttttgactactggggccagggaaccctggtcaccgtctcctca

SEQ ID NO: 15056 - DNA, 294 bp, Homo sapiens
  source 1..294: mol_type = other DNA
gcttctggatacaccttcagtacctatgcaatgcattgggtgcgccaggcccccggacaagggcttgagtggatgggatgtatcaacgctggcaatggtaacacaaaatattcacagaacttccagggcagagtcaccattaccagggacacatccgcgagcacagcctacatggacctgagcagtctgagatctgaagacacggctgtgtattactgtgcgaggttgtatagcagctcgtccggggacgtttttgactactggggccagggaaccctggtcaccgtctcctca

SEQ ID NO: 15057 - DNA, 310 bp, Homo sapiens
  source 1..310: mol_type = other DNA
tgcagcctctggattccccttcagcagctacagcatcaactgggtccgccaggctccagggaaggggctggagtgggtctcatccattagtggtagtggtagtgacaaatactacgcagactcagtgaagggccgattcaccatctccagagacaacgccaagaactcactgtttctgcaattgaacaacctgagagccgaggacacggctgtgtactcctgtgcgagagggttttacgatcttaaccggggatatcgccgcttctacatggacgtctggggcaaagggaccacggtcaccgtctcctca

SEQ ID NO: 15058 - DNA, 310 bp, Homo sapiens
  source 1..310: mol_type = other DNA
tgcagcctctggattccccttcggttcctacagcatgaactgggtccgccaggctccagggaaggggctggagtgggtcgcatccataactggtgacagtagttacaaaaactacgcagactcactgaagggccgactcaccatctccagagacaacgccgagaactcactgtatctgcaattggacggcctgagagccgaggacacggctgtgtactcctgtgcgagagggttttacgatcttaaccggggataccgccgcttctacatggacgtctggggcaaagggaccacggtcaccgtctcctca

SEQ ID NO: 15059 - DNA, 310 bp, Homo sapiens
  source 1..310: mol_type = other DNA
tgcagcctctggattccccttcagtagttacatcatgaactgggtccgccaggctccagggaagcggctggagtgggtctcatccattagtggtagtagcggtgacaaattctacgcagactcagtgaggggccgattcaccatctccagagacaacaccaagaactcactatatctgcaattgagcagcctgagcgccgaggacacggctgtgtactcctgtgcgagaggcttctacgatcttaaccggggataccgccgcttctacatggacgtctggggcaaagggaccacggtcaccgtctcctca

SEQ ID NO: 15060 - DNA, 310 bp, Homo sapiens
  source 1..310: mol_type = other DNA
tgcagcctctggattccccttcagtagttacatcatgaactgggtccgtcaggctccagggaaggggctggagtgggtctcatccattagtggtagcagtggtgacaaatactacgcagactcagtgaagggccgattcaccatctccagagacaacgccaagaactcactgtttctgcaattgagcagcctgagagccgaggacacggctgtgtactcctgtgcgagaggcttctacgatcttaaccggggataccgccgcttctacatggacgtctggggcaaagggaccacggtcaccgtctcctca

SEQ ID NO: 15061 - DNA, 310 bp, Homo sapiens
  source 1..310: mol_type = other DNA
tgcagcctctggattccccttcagcagctacatcatcaactgggtccgccaggctccagggaaggggctggagtgggtctcatccattagtggtagtggtagtgacaaatactacgcagactcagtgaagggccgattcaccatctccagagacaacgccaagaactcactgtttctgcaattgaacaacctgagagccgaggacacggctgtgtactcctgtgcgagagggttttacgatcttaaccggggatatcgccgcttctacatggacgtctggggcaaagggaccacggtcaccgtctcctca

SEQ ID NO: 15062 - DNA, 319 bp, Homo sapiens
  source 1..319: mol_type = other DNA
cgctgtctctggtggctccatcagcagcagtgactggtggagttgggtccgccagcccccagggagggggctggagtggattggcgaaatctctcatactgggaccaccaactacaacccgtccctcaagagtcgagtcaccatatcagtagacaagtccaacaaccagttctccctgaaactgaactctgtgaccgccgcggacacggccgtgtattactgtgcgcagagtatcggggaacccttcgcatttcgcgtagtgagaggtattcgtccttttgatatctggggccaagggacactaatcaccgtctcttca

SEQ ID NO: 15063 - DNA, 319 bp, Homo sapiens
  source 1..319: mol_type = other DNA
cgctgtctctggtgcctccatcagcagcagtgactggtggagttgggtccgccagcccccagggggggggctggagtggattggcgaaatctctcatactgggaccaccaactacaacccgtccctcaagagtcgagtcaccatatcagtagacaagtccaacaaccagttctccctgaaactgaactctgtgaccgccgcggacacggccgtgtattactgtgcgcagagtatcggggaacccttcgcatttcgcgtagtgagaggtattcgtccttttgatatctggggccaagggacactaatcaccgtctcttca

SEQ ID NO: 15064 - DNA, 319 bp, Homo sapiens
  source 1..319: mol_type = other DNA
cgctgtctctggtggctccatcagcagcagtgactggtggagttgggtccgccagcccccagggagggggctggagtggattggcgaaatctctcatactgggaccaccaactacaacccgtccctcaagagtcgagtcaccatatcagtagacaagtccaacaaccagttctccctgaaactgaactctgtgaccgccgcggacacggccgtgtatttctgtgcgcagagtatcggggaacccttcgcatttcgcgtagtgagaggtattcgtccttttgatatctggggccaagggacactaatcaccgtctcttca

SEQ ID NO: 15065 - DNA, 310 bp, Homo sapiens
  source 1..310: mol_type = other DNA
cgcagcatctggattcatcttcagtggttatggaatgcactgggtccgccaggctccaggcaaggggccggagtgggtggcagttatatggtccgatggaagtaatgagttctatggagacttcgtgaagggccggctcaccatctccagagacaactcccagaacactctgtttctgcaaatgaacagcctgagagtcgaggacacagctgtctattattgtgcgagagatgggaattactttgatactgctgggtattcgtactactttgacttgtggggccagggaacccgggtcaccgtctcctca

SEQ ID NO: 15066 - DNA, 310 bp, Homo sapiens
  source 1..310: mol_type = other DNA
tgcagcatctggattcatcttcagtggttatggaatgcactgggtccgccaggctccaggcaaggggccggagtgggtggcagttatatggtccgatggaagtaatgagttctatggagacttcgtgaagggccggctcaccatctccagagacaactcccagaacactctgtttctgcaaatgaacagcctgagagtcgaggacacagctgtctattattgtgcgagagatgggaattactttgatactgctgggtattcgtactactttgacttgtggggccagggaacccgggtcaccgtctcctca

SEQ ID NO: 15067 - DNA, 310 bp, Homo sapiens; identical to SEQ ID NO: 15066
  source 1..310: mol_type = other DNA

SEQ ID NO: 15068 - DNA, 310 bp, Homo sapiens
  source 1..310: mol_type = other DNA
cgcagcatctggattcatcttcagtggttatggaatgcactgggtccgccaggctccaggcaaggggccggagtgggtggcagttatatggtccgatggaagtaatgagttctatggagacttcgtgaagggccggctcaccatctccagagacaactcccagaacactctgtttctgcaaatgaacagcctgagagtcgaggacacaggtgtctattattgtgcgagagatgggaattactttgatactgctgggtattcgtactactttgacttgtggggccagggaacccgggtcaccgtctcctca

SEQ ID NO: 15069 - DNA, 286 bp, Homo sapiens
  source 1..286: mol_type = other DNA
tgcagcctctggattcaccttcagtagctactcgatgcactgggtccgccaagctccagggaaggggctggtgtgggtctcacgtattaatactgatgggagtaccacaacctacgcggactccgtgaagggccgattcaccatctccagagacaacgccaagaacacgctgtatctgcaaatgaacagtctgagagccgaggacacggctgtgtattactgtgccagaaaccgaaactattactttgactactggggccagggagccctggtcaccgtctcctca

SEQ ID NO: 15070 - DNA, 286 bp, Homo sapiens
  source 1..286: mol_type = other DNA
tgcagcctctggattcaccttcagtagctactcgatgcactgggtccgccaagctccagggaaggggctggtgtgggtctcacgtattaatactgatgggagtaccacaacctacgcggactccgtgaagggccgattcaccatctccagagacaacgccaagaacgcgctgtatctgcaaatgaacagtctgagagccgaggacacggctgtgtattactgtgccagaaaccgaaactattactttgactactggggccagggagccctggtcaccgtctcctca

SEQ ID NO: 15071 - DNA, 282 bp, Homo sapiens
  source 1..282: mol_type = other DNA
gcttctggatacatgttctcctcttatgatatcaactgggtgcgacaggcccctggacaagggcttgagtggatgggatggatgaaccctttcagtggtgacacaggctatgcacagaagttccagggcagagtcaccatgaccaggaacccctccataaacacagcctatatggacctgagcagcctgacatttgaggacacggccctgtatttctgtgcgagagggcacgggggagccagtgactactggggccagggaaccctggtcaccgtctcctca

SEQ ID NO: 15072 - DNA, 282 bp, Homo sapiens
  source 1..282: mol_type = other DNA
acttctggatacatgttctcctcttatgatatcaactgggtgcgacaggcccctggacaagggcttgagtggatgggatggatgaaccctttcagtggtgacacaggctatgcacagaagttccagggcagagtcaccatgaccaggaacccctccataaacacagcctatatggacctgagcagcctgacatttgaggacacggccctgtatttctgtgcgagagggcacgggggagccagtgactactggggccagggaaccctggtcaccgtctcgtca

SEQ ID NO: 15073 - DNA, 289 bp, Homo sapiens
  source 1..289: mol_type = other DNA
tggagcctctggagtcaccttcagtagctgtggcatgcactgggtccgccaggctccaggcaaggggctggagtgggtgtcatttatatcatttgatggaaataaaaaaaattatgcagactccgtgaagggccgattcaccatctccagagacaattccaagaacacactatatctgcaaatgaacagcctgagagctgaagacacggctgtgtattactgtgcgaagacgagtggttatttctaccctgactactggggccagggaaccctggtcaccgtctcctca

SEQ ID NO: 15074 - DNA, 289 bp, Homo sapiens
  source 1..289: mol_type = other DNA
tgcagcctctggattcaccttcagtagctgtggcatgcactgggtccgccaggctccaggcaaggggctggagtgggtggcagttatatcatttgatggaagtaataaatattatgcagactccgtgaagggccgattcaccatctccagagacaattccaagcacacactatatctgcaaatgaacagcctgagagctgaggacacggctgtgtattactgtgcgaagacgagtggttatttctaccctgactactggggccagggaaccctggtcaccgtctcctca

SEQ ID NO: 15075 - DNA, 289 bp, Homo sapiens
  source 1..289: mol_type = other DNA
tgcagcctctggattcaccttcagtagctgtggcatgcactgggtccgccaggctccaggcaaggggctggagtgggtggcagtgatatcatttaatggaattaataaatattatgcagactccgtgaagggccgattcaccatctccagagacaattccaagaacacgctgaatctgcaaatgaacagcctgagagctgaggacacggctgtgtattactgtgcgaagacgagtggttacttctaccctgactactggggccagggaaccctggtcaccgtctcctca

SEQ ID NO: 15076 - DNA, 313 bp, Homo sapiens
  source 1..313: mol_type = other DNA
cgctgtctctggtggctccatcagcagcaataactggtggagttgggtccgccagcccccagggaaggggctggagtggattggggaaatctatcatactgggagcaccaactacaacccgtccctcaagagtcgagtcaccatatcagtagacaagtccaagaaccagttctccctgaagctgagctctgtgaccgccgcggacacggccgtgtattactgtgcgaggggcgggaatggttactatgatagaagtggttactcatacccctttgactactggggccagggaaccctggtcaccgtctcctca

SEQ ID NO: 15077 - DNA, 313 bp, Homo sapiens
  source 1..313: mol_type = other DNA
cgctgtctctggtggctccatcagcagcaataactggtggagttgggtccgccagcccccagggaaggggctggagtggattggggaaatctatcatactgggagcaccaactacaacccgtccctcaagagtcgaatcaccatatcagtggacaactccaagaaccagttctccctgaaactgacctctgtgaccgccgcggacacggccgtgtattactgtgcgaggggcgggaatggttactatgatagaagtggttactcatacccctttgactactggggccagggaaccctggtcaccgtctcctca

SEQ ID NO: 15078 - DNA, 295 bp, Homo sapiens
  source 1..295: mol_type = other DNA
tgcagcctctggattcacctttagtagttttgccatgagctgggtccgccaggctccagggaaggggctggagtgggtcgcacttattactagtgggggtggtactacatactacgcagactccgtgaggggccggttcaccatctccagagacaattccaagaacacactgtatctgcaaatgaacagcctgagagtcgaagacacggccgtatatttctgtgcgaaagagatggactcaccgggatactacatgaacgtctggggcaaagggaccacggtcaccgtgtccgca

SEQ ID NO: 15079 - DNA, 295 bp, Homo sapiens
  source 1..295: mol_type = other DNA
tgcagcctctggattcacgtttagtagttttgccatgagctgggtccgccaggctccagggaaggggctagagtgggtctcacttattagtcgtgggggtggtacaacatattacgcagactccgtgaagggccggttcaccgtctccagagacgattccaagagcacgctgtatctgcaaatgagcagcctgagagtcgaagacacggccgtatattactgtgcgaaagagatggactcaccgggatactacatgaacgtctggggcaaggggaccacggtcaccgtctcctca

SEQ ID NO: 15080 - DNA, 295 bp, Homo sapiens
  source 1..295: mol_type = other DNA
tgcagcctctggattcacctttagcagctttgccatgagctgggtccgccaggctccagggaaggggctggagtgggtctcacttattactagtgggggtggtaacacacactacgcagactccgtgaggggccggttcaccgtctccagagacaattccaacaatacgatgtatctgcaattgaacagcctgagagtcgaagacacggccgtatactactgtgcgaaagagatggactcaccgggatactacatgaacgtctggggcaaagggaccacggtcaccgtctcgtca

SEQ ID NO: 15081 - DNA, 295 bp, Homo sapiens
  source 1..295: mol_type = other DNA
tgtaggctctggattcacctttagcagttttgccatgagctgggtccgccaggttccagggaaggggctggagtgggtctcaggtattaatagtgggggtggtaggacaagctacgtagactccgtgaagggccggttcaccatctccagagacaactccaagaacactctgtatctgcaaatgaacaacctgagagccgaagacacggccctatattactgtgcgaaagagatggactcaccggggtactacatgaacgtctggggcaatgggaccacggtcaccgtctcctca

SEQ ID NO: 15082 - DNA, 289 bp, Homo sapiens
  source 1..289: mol_type = other DNA
tgaagcctctggattcacctttagtacctattggatgagttgggtccggcaggctccagtgaaggggctggagtgggtggccaacataaaagaagatggaagtgagatatattatttggactctgtgaagggccgattcaccatctccagagacaacggcaagagctcactgtctttgcagatgaacagcctgagagccgaggacacggctgtgtattactgcgtttctatggtatgggggggtgcttttgatgcctggggccaggggacattggtcaccgtctcttca

SEQ ID NO: 15083 - DNA, 289 bp, Homo sapiens
  source 1..289: mol_type = other DNA
tgaagcctctggattcacctttagtacctattggatgagttgggtccgccaggctccagtgaaggggctggagtgggtggccaacatcaaagaagatggaagtgacatatattatttggactctgtgaagggccgattcaccatctccagagacaacggcaagagctcactgtctttgcagatgaacagcctgagagccgaggacacggctatatattactgcgtttctatggtatgggggggtgcttttgatgcctggggccaagggacattagtcaccgtctctcca

SEQ ID NO: 15084 - DNA, 289 bp, Homo sapiens
  source 1..289: mol_type = other DNA
tgaagcctctggattcacctttagtacctattggatgagttgggtccgccaggctccagtgaaggggctggagtgggtggccaacataaaagaagatggaagtgagatatattatttggactctgtgaagggccgattcaccatctccagagacaacggcaagagctcactgtctttgcagatgaacagcctgagagccgaggacacggctgtgtattactgcgtttctatggtttgggggggtgcttttgatgcctggggccaagggacactagtcaccgtctctcca

SEQ ID NO: 15085 - DNA, 289 bp, Homo sapiens
  source 1..289: mol_type = other DNA
tgaaggctctggattcagctttagtacctattggatgagctgggtccgccaggctccagtgaaggggctggagtgggtggccaacataaaagaagatggaagtgagatatattatttggactctgtgaagggccgattcaccatctccagagacaacggcaagagctcactgtctttgcagatgaacagcctgagagccgaggacacggctgtgtattactgcgtttctatggtatgggggggtgcttttgatgcctggggccaagggacattagtcaccgtctctcca

SEQ ID NO: 15086 - DNA, 304 bp, Homo sapiens
  source 1..304: mol_type = other DNA
tgcagcctctggattcaccttcagtgactatggcatgcactgggtccgccaggctccaggcaaggggctggagtgggtgacagttgtatcatatgatggaaggaataaatactatgcagactccgtgaagggccgattcaccatctccagagacaattccacgaacacgctgtatctgcaaatgaacagcctgagagctgaggacacggctgtgtattactgtgcgaaagatgccgcgtcagggacctaccactacggctactttgactactggggccagggaaccctggtcaccgtctcctca

SEQ ID NO: 15087 - DNA, 304 bp, Homo sapiens
  source 1..304: mol_type = other DNA
tgcagcctctggattcaccttcagtaactatggcatgcactgggtccgccaggctccaggcaaggggctggagtgggtgacagttgtatcatatgatggaagtaataaatactatgcagactccgtgaagggccgattcaccatctccagagacaattccacgaacacgctgtatctgcaaatgaacagcctgagagctgaggacacggctgtgtattactgtgcgaaagatgccgcgtcagggacctaccactacggctactttgactactggggccagggaaccctggtcaccgtctcctca

SEQ ID NO: 15088 - DNA, 304 bp, Homo sapiens; identical to SEQ ID NO: 15087
  source 1..304: mol_type = other DNA

SEQ ID NO: 15089 - DNA, 304 bp, Homo sapiens
  source 1..304: mol_type = other DNA
tgcagcctctggattcaccttcagtaactatggcatgcactgggtccgccaggctccaggcaaggggctggagtgggtgacagttgtatcatatgatggaagaaataaatactatgcagactccgtgaagggccgattcaccatctccagagacaattccacgaacacgctgtatctgcaaatgaacagcctgagagctgaggacacggctgtgtattactgtgcgaaagatgccgcgtcagggacctaccactacggctactttgactactggggccagggaaccctggtcaccgtctcctca

SEQ ID NO: 15090 - DNA, 301 bp, Homo sapiens
  source 1..301: mol_type = other DNA
tgcagcctctggattcaccttcagtgactatagcatgcactgggtccgccaggctccagggaaggggctggagtgggtctcatccattgatagtactagtcgttacatatactacgcagactcattgaagggccgattcaccatctccagagacaacgccaagaactcactgtatctgcaaatgagcggcctgggagccgaggacacggccctgtattactgtgtgagagatccgcatctctatagcagctactactactttgactactggggccagggaaccctggtcaccgtctcctca

SEQ ID NO: 15091 - DNA, 301 bp, Homo sapiens
  source 1..301: mol_type = other DNA
tgcagcctctggattcaccttcagtgactatagcatgcactgggtccgccaggctccaggaaaaggcctggagtgggtctcatccattgacagtagtagtcgttacatatactatgcagactcgtttaaggggcgattcaccatttccagagacaacgccaggagctcactgtggctgcagatgagcggccttggagccgaggacacggctctttattactgtgtgagagatccgcatctctatagcagctactactactttgactactggagccagggaaccctggtcaccgtctcctct

SEQ ID NO: 15092 - DNA, 304 bp, Homo sapiens
  source 1..304: mol_type = other DNA
tgcagcctctggattcacctttaacaactatgtcatgagctgggtccgccaggctccagggaaggggctggagtgggtctcagccattagtggtagtggcgatagtacatactatgcagactccgtgaagggccggttcaccatctccagagacaattccaggaacacgctgtatctgcaaatgaacagcctgagagacgaggacacggccctatattactgtgcgaaagataagataaggcagataatagtggttgggcataatgatttctggggccaagggacaatggtcaccgtctcttca

SEQ ID NO: 15093 - DNA, 304 bp, Homo sapiens
  source 1..304: mol_type = other DNA
tgcagcctctggattcacctttaacaactatgccatgagctgggtccgccaggctccagggaaggggctggagtgggtctcagccattagtggtagtggcgatagtacatactatgcagactccgtgaagggccggttcaccatctccagagacaattccaggaacacgctgtatctgcaaatgaacagcctgagagacgaggacacggccctatattactgtgcgaaagataagataaggcagataatagtggttgggcataatgatttctggggccaagggacaatggtcaccgtctcttca

SEQ ID NO: 15094 - DNA, 304 bp, Homo sapiens
  source 1..304: mol_type = other DNA
tgcagcctctggattcacctttaacaactatgccatgagctgggtccgccaggctccagggaaggggctggagtgggtctcagccattagtggtagtggtgataagatatattatgcagactccgtgaagggccggttcaccatctccagagacaattccaagaatacgctatatctgcaaatgaacagcctgagagacgaggacacggccctatattactgtgcgaaagataaaataaggcagataatagtggttgggcataatgatttctggggccaagggacaatggtcaccgtctcttca

SEQ ID NO: 15095 - DNA, 304 bp, Homo sapiens
  source 1..304: mol_type = other DNA
tgcagcctctggattcacctttaacaactatgccatgagctgggtccgccaggctccagggaaggggctggagtgggtctcagccattagtggtagtggtgatagtacatactatgcagactccgtgaagggccggttcaccatctccagagacaattccaagaacacgctgtatctgcaaatgaacagcctgagagacgaggacacggccctatattactgtgcgaaagataagataaggcagataatagtggttgggcataatgatttctggggccaagggacaatggtcaccgtctcttca

SEQ ID NO: 15096 - DNA, 286 bp, Homo sapiens
  source 1..286: mol_type = other DNA
cgctgtctatggtgaatctctcagtggttactactggacttgggtccgccagcccccagggaaggggctgcagtggattggtgaagtcaatcatagtggaagcaccaacttcaacccgtccctcaagagtcgagtcaccatatcagtcgacacgtctaagaaccagttctccctgaaactgacctctgtgaccgccgcggacacggctgtttattactgtgcgagactgcataggaactatgcccttgactcctggggccagggaactccggtcaccgtctcctcc

SEQ ID NO: 15097 - DNA, 286 bp, Homo sapiens
  source 1..286: mol_type = other DNA
cgctgtctatggtgagtctctcagtggttactactggacctgggtccgccagcccccagggaaggggctgcagtggattggtgaagtcaatcatagtggaagcaccaacttcaacccgtccctcaagagtcgagtcaccatatcagtcgacacgtctaagaaccagttctccctgaaactgacctctgtgaccgccgcggacacggctgtttattactgtgcgagactgcataggaactatgcccttgactcctggggccagggaactccggtcaccgtctcctcc

SEQ ID NO: 15098 - DNA, 286 bp, Homo sapiens
  source 1..286: mol_type = other DNA
cgctgtctatggagagtctctcagtggttactactggacctgggtccgccagcccccagggaaggggctgcagtggattggtgaagtcaatcatagtggaagcaccaacttcaacccgtccctcaagagtcgactcaccatatcagtcgacacgtctaagaaccagttctccctgaaactgacctctgtgaccgccgcggacacatctgtttattactgtgcgagactgcataggaattatgcccttgactcctggggccagggaactccggtcagtgtctcctcc

SEQ ID NO: 15099 - DNA, 286 bp, Homo sapiens
  source 1..286: mol_type = other DNA
cgctgtctatggtgagtctctcagtggttactactggacctgggtccgccagcccccagggaaggggctgcagtggattggtgaagtcaatcatagtggaagcaccaacttcaacccgtccctcaagagtcgagtcaccatatcagtcgacacgtctaagaagcagttctccctgaaactggcctctgtgaccgccgcggacacggctgtttattactgtgcgagactgcataggaactatgcccttgactcctggggccagggaactccggtcaccgtctcctcc

SEQ ID NO: 15100 - DNA, 280 bp, Homo sapiens
  source 1..280: mol_type = other DNA
tgcagcctctggattcagctttagcacctatgccttgagctgggtccgccaggctccaggaaaggggctggaatgggtctcaactattggtggtggtggcgttagtacatactacgcagactccgtgaagggccggttcaccatctccagagacaactccaagaacacgctgtatctgcaaatgaacagcctgagaggcgaggacacggccgtatattactgtgcgaaagattcgacccctaattactggggccagggaaccctggtcaccgtctcctca

SEQ ID NO: 15101 - DNA, 280 bp, Homo sapiens
  source 1..280: mol_type = other DNA
tgtaacctctggattcacctttagcaactctcccatgagctgggtccgccaggctccagggaagggtctggagtgggtctcagctataagtgggagtggtactaccacgtactatgcagactccgtgaagggccggttcaccatctccagagacatttccaagagcacgctgtatctgcaaatgaacagcctaagagccgcggacacggccgtatattactgtgcgaaagattctacccctaactactgtggcccgggaaccctggtcaccgtctcctca

SEQ ID NO: 15102 - DNA, 295 bp, Homo sapiens
  source 1..295: mol_type = other DNA
tgtagcctccggattcaccttcagtgcgaagtggatgcactgggtccgccaagttccagggcaggggctggtgtggatctcacgtatcaatggtgatgggggtctcacagcctacgcgggctccgttaagggccggttcaccatctccagagacaacgccaagaacacactgtatctgcaaatgaacagtctgagagccgaggacacggctgtgtatttttgtgtaagaggtccaaatgataaaagtggcgggttcgactcctggggccagggaacccaggtcaccgtctcctca

SEQ ID NO: 15103 - DNA, 295 bp, Homo sapiens
  source 1..295: mol_type = other DNA
tgcagcctccggattcatcttccgtgcgaagtggatgcactgggtccgccaagttccagggcaggggctgatgtggatcgcacgtattaatggtgatgggggtgtcacagcctacgcggagtccgttaagggccgcttcagcatctccagagacaacgccaagaacacactgtacctacaaatgaacagtctgagaggcgaggacacggctgtgtatttttgtgtaagaggtccaaatgataaaagtggcgggttcgactcctggggccagggaatacaggtcaccgtctcctca

SEQ ID NO: 15104 - DNA, 307 bp, Homo sapiens
  source 1..307: mol_type = other DNA
tgtagcctctggattcacctttagaaattatgccatgaattgggtccgccaggctccagggaaggggctggagtgggtcgcaagtattagttatagtggtgaaagtacatactacgcagactccgtgaaggaccggttcgccctctccagagacaattccaagaataccctgtatctacaaatggatagcctgagaggcgaggacacggccgtctatttctgtgcgaaagggtggagtggaaatagtggcccttattattacaccatggacgtctggggcaaagggaccacggtcaccgtttcctca

SEQ ID NO: 15105 - DNA, 307 bp, Homo sapiens
  source 1..307: mol_type = other DNA
tgtagcctctggattcacctttagaaattatgccatgaattgggtccgccaggctccagggaaggggctggagtgggtcgcaagtattagttatagtggtgaaactacatactacgcagactccgtgaaggaccggttcaccctctccagagacaattccaagaataccctgtatctacaaatggatagcctgagaggcgaggacacggccgtctatttctgtgcgaaagggtggagtggaaatagtggcccttattattacaccatggacgtctggggcaaagggaccacggtcaccgtttcctca

SEQ ID NO: 15106 - DNA, 298 bp, Homo sapiens
  source 1..298: mol_type = other DNA
cactgtctctggtggctccatcagcaatacttcttactactggggctgggtccgccagtccccagggaaggggctgcagtgggttgggagtgtcttttatagcgggggcacctactacaacccgtccctgaagagtcgtgtcactatagtggcagacacatccaacaaccagttctcactgaacttgacctctgtcaccgccgcagacgcggctctctattattgtgcgagacattccagcctctaccacgccccgttcgacccctggggccacggaaccctggtcaccgtttcctct

SEQ ID NO: 15107 - DNA, 298 bp, Homo sapiens
  source 1..298: mol_type = other DNA
cactgtctctggtggctccatcagcaatacttcttattactggggctgggtccgccagtctccagggaagggcctgcagtgggttgggagtgtcttttacagcggggacacctactacaacccgtccctgaagagtcgtgtcagtgtagtgacagacacatccaacaaccagttctcactgaacttgacctctgtcaccgccgcagacgcggctctctattattgtgcgagacattccagcctctaccacgccccgttcgacccctggggccccggaattctggtcaccgtttcctct

SEQ ID NO: 15108 - DNA, 292 bp, Homo sapiens
  source 1..292: mol_type = other DNA
tgcagcctctggattcacctttagcagcaatcccatgggctgggtccgccaggctccagggaaggggctggagtgggtctcagttatgggtggtagtgatggtagcacatactacgcagactccgtgaggggccggttcaccatttccagagacaattccaagaacacactgtatctgcaaatgcacagcctgagagccgaggacacggccgtatattactgtgcgaaacgtcatatggtttttggagtggttgactactggggccagggaaccctggtcaccgtctcctca

SEQ ID NO: 15109 - DNA, 292 bp, Homo sapiens
  source 1..292: mol_type = other DNA
tgcagcctctggattcacctttagtagcaatcccatgggctgggtccgccaggctccagggaaggggctggagtgggtctcagttatgggtggtagtgatggtagcacatactacgcagactccgtgaggggccggttcaccatttccagagacaattccaagaacacactgtatctgcaagtgtacagcctgagagccgaggacacggccgtctattactgtgcgaaacgtcatatggtttttggagtggttgactactggggccagggaaccctggtcaccgtctcctca

SEQ ID NO: 15110 - DNA, 286 bp, Homo sapiens
  source 1..286: mol_type = other DNA
tgcagcctctgggttcagttttagcagctattggatgagctgggtccgccagtctccagggaaggggctggagtgggtggccagcatagcgcaagatggaggtgagaaacactatgtggactctgtgaagggccgattcaccatctccaaggacaacgccaagaactcactgtatctgcaaatgaacagcctgagagtcgaggacacggctgtctattactgtgcgagagaaagccacgcccgctttgattattggggccagggaacccgggtcaccgtctcctca

SEQ ID NO: 15111 - DNA, 286 bp, Homo sapiens
  source 1..286: mol_type = other DNA
tgcagcctctgggttcatctttagtagttattggatgagttgggtccgccagcctccagggaagggaccggagtgggtggccaacataaagcaagatggaggtgagaaatactatgtggactctgtgaagggccgattcaccatctccaaagacaacgccaagaactcactgtatctgcaaatgaacagcctgagagccgaggacacggctgtgtattactgtgcgagagaaagccacgcccgctttgactactggggccagggaacccgggtcaccgtctcctca

SEQ ID NO: 15112 - DNA, 307 bp, Homo sapiens
  source 1..307: mol_type = other DNA
tgcagcctctggattcaccttcagtagttatgaaatgaactgggtccgccaggctccagggaaggggctggagtgggtttcatacattagtagtagtagcgggaccgtatactacgcagactctgtgaggggccgattcaccatctccagagacaacgccaaaaactcactgtatcttcaaatgaacagcctgagagccgaggacacggctgtttatttctgtgcgagaggaggggcatattgttctaaaggtgtatgctacatctttgactactggggccagggaaccctggtcaccgtctcctca

SEQ ID NO: 15113 - DNA, 307 bp, Homo sapiens
  source 1..307: mol_type = other DNA
tgcagcctctggattcaccttcagtagttatgaaatgaactgggtccgccaggctccagggaaggggctggagtgggtttcatacattagtagtagtagcggtaccgtatactacgcagactctgtgaggggccgattcaccatctccagagacaacgccaaaaactcactgtatcttcaaatgaacagcctgagagccgaggacacggctgtttatttctgtgcgagaggaggggcatattgttctaaaggtgtatgctacatctttgactactggggccagggaaccctggtcaccgtctcctca

SEQ ID NO: 15114 - DNA, 291 bp, Homo sapiens
  source 1..291: mol_type = other DNA
gttgccggatacaccctccctgaattatccatctactgggtgcgacaggctcctggaaaagggcttgagtggatgggaggttttgatcgtgaagatggtgagacaatctacgcacagaacttccagggcagagtcaccatgaccgaggacacatctacagacacagcctacatggagctgagcagcctgagatctgaggacacggccatatattactgtgcccgaaaggaagaactacgggttcttggtcttgatttgtggggccaagggacaatggtcaccgtctcttca

SEQ ID NO: 15115 - DNA, 291 bp, Homo sapiens
  source 1..291: mol_type = other DNA
gttgccggatacaccctccctgaattatccatctactgggtgcgacaggctcctggaaaagggcttgagtggatgggaggttttgatcgtgaaactggtgagacaatctacgcacagaacttccagggcagagtcaccatgaccgaggacacatctacagacacagcctacatggagctgagcagcctgagatctgaggacacggccatatattactgtgcccgaaaggaagaactacgggttcttggtcttgatttgtggggccaagggacaatggtcaccgtctcttca

SEQ ID NO: 15116 - DNA, 291 bp, Homo sapiens
  source 1..291: mol_type = other DNA
gttgtcggatacaccctccctgaattatccatctactgggtgcgacaggctcctggaaaagggcttgagtggatgggaggttttgatcgtggagaaggtgagacaatctacgcacagaacttccagggcagagtcaccatgaccgaggacacatctacagacacagcctacatggagctgagcagcctgagatctgaggacacggccatgtattactgtgcccgaaaggaagaactacgggttcttggtcttgatttgtggggccaagggacaatggtcaccgtctcttca

SEQ ID NO: 15117 - DNA, 291 bp, Homo sapiens
  source 1..291: mol_type = other DNA
gttgccggatacaccctccctgaattatccatctactgggtgcgacaggctcctggaaaagggcttgagtggatgggaggttttgatcgtgaagatggtgagacaatctacgcacagaacttccagggcagagtcaccatgaccgaggacagatctacagacacagcctacatggagctgagcagcctgagatctgaggacacggccatatattactgtgcccgaaaggaagaactacgggttcttggtcttgatttgtggggccaagggacaatggtcaccgtctcttca

SEQ ID NO: 15118 - DNA, 295 bp, Homo sapiens
  source 1..295: mol_type = other DNA
tgtaggtactggattctccttcagtacctatggcatgcactgggtccgccaggctccaggcaaggggctggactgggtggcatttatatcatatcgtggaactaaaaaatacagtgaagactccgtgaggggccgattcaccatctccagagacaattccaagaacacgctgtatctgcaaatgaatagcctgagagctgaggacacggctctatattactgtgcgaaccaaccacgagacacagataacatattgtgggactggggccagggaaccctggtcaccgtctcctca

SEQ ID NO: 15119 - DNA, 295 bp, Homo sapiens
  source 1..295: mol_type = other DNA
tgcagcctctggattctccttcagtacctatggcatgcactgggtccgccaggctccaggcaaggggctggactgggtggcatttatatcatatactggaactacaaaatacaatgcagactccgtgaagggccgattcaccatctccagagacaattccaagaacacgctgtttttgcagatgaacagcctgagagctgaggacacggctctgtattactgtgcgaatcaaccacgagacacagataatatattgtgggactggggccagggaaccctggtcaccgtctcctca

SEQ ID NO: 15120 - DNA, 307 bp, Homo sapiens
  source 1..307: mol_type = other DNA
tgcagcctctggattcatgtttagtagcttttacatgagctgggtccgccaggctccagggaaggggctggagtgggtggccaacataaaggaagatggaagtgagaaacagtatgtggactctgtgaggggccgattcaccatctccagagacaacgacaagaactcgctgagtctgcaaatgaacagcctgagaggcgacgacacggctgtgtattattgtgcgagagtggcgcgtgtgggggacttatcgttataccgtccccttgactactggggccagggaaccctggtcaccgtctcctca

SEQ ID NO: 15121 - DNA, 307 bp, Homo sapiens
  source 1..307: mol_type = other DNA
tgcagcctctggattcacctttagtagcttttacatgagctgggtccgccaggctccagggaaggggctggagtgggtggccaacataaaggaagatggaagtgagaaacagtatgtggactctgtgaggggccgattcaccatctccagagacaacgacaagaactcgctgagtctgcaaatgaacagcctgagaggcgacgacacggctgtgtattattgtgcgagagtggcgcgtgtgggggacttatcgttataccgtccccttgactactggggccagggaaccctggtcaccgtctcctca

SEQ ID NO: 15122 - DNA, 274 bp, Homo sapiens
  source 1..274: mol_type = other DNA
tgcagcctctggattcaccttcagtgactatgacatgaactgggtccgccaggctccagggaaggggctggagtgggtttcatacgttagtcctactagtagaaccatatactatgcagactctgtgaagggccgattcaccatctccagagacaatgccaagaactcactatttctgcaaatgaacagcctgagagacgaggacacggctgtgtattactgtgcgagaggtcataccgtctggggccagggaaccctggtcaccgtctcctca

SEQ ID NO: 15123 - DNA, 274 bp, Homo sapiens
  source 1..274: mol_type = other DNA
tgcagcctctggattcacctttactaactatgacatgaactgggtccgccaggctccagggaaggggctggagtggatttcattcattagtcctactagtaaaaccatatactatgcagactctgtgaagggccgattcaccatctccagagacaatgccaagaactcaatatttctgcaaatgaacagcctgagagacgaggacacggctgtgtattactgtgcgagaggtcacaccgtctggggccagggaaccctggtcaccgtctcctca

SEQ ID NO: 15124 - DNA, 307 bp, Homo sapiens
  source 1..307: mol_type = other DNA
tgcagcctctagattcatcttcagtgaccactacatggactgggtccgccaggctccagggaaggggctggagtgggttgcccgtgctcgaaacaaagctagaagttacaccacagaatacgccgcgtctgtgaaaggcagattcaccatctcaagagatgagtcaaagaattcactgtatctgcaaatgaatagcctgaacaccgaggacacggccgtttattactgtgttagaggctactctgatagtcgtgcttatgtcttctctggctactggggccagggaatcctggtcaccgtctcctca

SEQ ID NO: 15125 - DNA, 307 bp, Homo sapiens
  source 1..307: mol_type = other DNA
tgcagcctctggattcatcttcagtgaccactacatggactgggtccgccaggctccagggaaggggctggagtgggttgcccgtgctcgaaacaaagctagaagttacaccacagaatacgccgcgtctgtgaaaggcagattcaccatctcaagagatgagtcaaagaattcactgtatctgcaaatgaatagcctgaacaccgaggacacggccgtttattactgtgttagaggctactctgatagtcgtgcttatgtcttctctggctactggggccagggaatcctggtcaccgtctcctca

SEQ ID NO: 15126 - DNA, 307 bp, Homo sapiens
  source 1..307: mol_type = other DNA
tgcagcctctggattcagcttcatcacctacggcatgcactgggtccgcgacgttccaggcaagggtctggagtgggtggcagctatatcatttgatggaagtcatcaatactacgcagagtccgtgaggggccgctttaccatctccagagacgatcccaggaactcgctgtatctgcacatgaatggcctgagacctgaggacacggctgtgtattactgtgcgcaagatgaccactccaaagaacgaaatgagtatctgtactttgactactggggccggggaaccctggtcaccgtctcctca

SEQ ID NO: 15127 - DNA, 307 bp, Homo sapiens
  source 1..307: mol_type = other DNA
tgcagcctctggattcagcttcattacctacggcatgcactgggtccgccaggctccaggcaaggggctggagtgggtggcagctatatcatttgatgcaactcatcaatactacgcagagtccgtgaagggccggttcaccatctccagagacaattccaagaactcgctgtatctgcagatgaatagcctgagacctgaggacacggctgtttattactgtgcgcaagatgaccactctaaagaacgaaatgagtatctatactttgactactggggccggggaaccctggtcaccgtctcctca

SEQ ID NO: 15128 - DNA, 307 bp, Homo sapiens
  source 1..307: mol_type = other DNA
tgcagcctctggattcaccttcattacctacggcatgcactgggtccgccaggctccaggcaaggggctggagtgggtggcagctatatcatttgatggaagtcatgaatactatgcagagtccgtgaagggccgattcaccatctccagagacaattccaagaactcgctgtatctgcagatgaatagcctgagacctgaggacacggctgtgtattactgtgcgcaagatgaccactccaaagaacgaaatgagtatctatactttgactactggggccggggaaccctggtcaccgtctcctca

SEQ ID NO: 15129 - DNA, 291 bp, Homo sapiens
  source 1..291: mol_type = other DNA
aagggtgtaggatacaggtttcccagccactggatcggctgggtgcgccagatgcccgggaaaggcctggagtggatgggggtcatctatcctggtgactctgataccagatacagcccgtccttccaaggccaggtcaccatctcagccgacaagtccatcagcaccgcctacctgcagtggagcagcctgaaggcctccgacaccgccatgtattactgtgcgagacattcaccttatagtggctcgtccgactcctggggccagggaaccctggtcaccgtctcctca

SEQ ID NO: 15130 - DNA, 291 bp, Homo sapiens
  source 1..291: mol_type = other DNA
aagggtgctggatacaggttttccagccactggatcggctgggtgcgccagatgcccgggaaaggcctggagtggatgggggtcatctatcctggtgactctgataccagatatagcccgtccttccaaggccaggtcaccatctcagccgacaagtccatcagcaccgcctacctgcagtggagcagcctgaaggcctccgacaccgccatgtattactgtgcgagacattcaccttatagtggctcgtccgactcctggggccagggaaccctggtcaccgtctcctca

SEQ ID NO: 15131 - DNA, 298 bp, Homo sapiens
  source 1..298: mol_type = other DNA
tacagcctctggattcgccgtcagtagcaactacatgagctgggtccgccaggctccagggaagacactggaatgggtctcagttacttataccggtggtagcacatactacgcagactccgtgaagggccgattcaccatctccagagacattcccaataacaccctgtatcttcaaatgaacagcctgagagccgaggacacggccgtgtattattgtgcgaggaacctcaatacagcccctggtgtggggtggttcgacccctggggccagggaaccctggtcaccgtctcctca

SEQ ID NO: 15132 - DNA, 298 bp, Homo sapiens
  source 1..298: mol_type = other DNA
tgcagcctctgggttcaccgtcagtagcagctacatgagctgggtccgccaggctccaggaaagacactggaatgggtctcagttatttataccggtggtagcacatactacgcagactccgtgaagggccgattcaccatctccagagacatttccaacaacaccctgtatcttcaaatgaacagcctgagagccgaggacacggccgtgtattactgtgcgaggaacctcaatacagcccctggtgtggggtggttcgacccctggggccagggaaccctggtcatcgtctcctca

SEQ ID NO: 15133 - DNA, 295 bp, Homo sapiens
  source 1..295: mol_type = other DNA
tgcagcgtctggattcaccttcagtagctatggcatgcactgggtccgccaggctccaggcaaggggctggagtgggtggcagctatatggtctgatggaagtaaaaaatactatgcagactccgtgaagggccgattcaccatctccagagacaaatccaacaatacgctgtatctgcaactgaacagcctgagagccgatgacatggctgtgtattactgtgcgaaagatcgggggttcggggttacgcaaattgacttctgggcccagggaacgctggtcaccgtctcctca

SEQ ID NO: 15134 - DNA, 295 bp, Homo sapiens
  source 1..295: mol_type = other DNA
tgcagcgtctggattcaccttcagtagctatggcatgcactgggtccgccaggctccaggcaaggggctggagtgggtggcagctatatggtctgatggaagtaaaaaatactatgcagactccgtgaagggccgattcaccatctccagagacaaatccaacaatacgctgtatctgcaactgaacagcctgagagccgaggacatggctgtgtattactgtgcgaaagatcgggggttcggggttacgcaaattgacttctgggcccagggaacgctggtcaccgtctcctca

SEQ ID NO: 15135 - DNA, 295 bp, Homo sapiens
  source 1..295: mol_type = other DNA
tgcagcgtctggattcaccttcagtagctatggcatgcactgggtccgccaggctccaggcaaggggctggagtgggtggcaggtatatggtctgatggaagtaaaaaatactatgcagactccgtgaagggccgattcaccatctccagagacaaatccaacaatacgctgtatctgcaactgaacagcctgagagccgaggacgtggctgtgtattactgtgcgaaagatcgggggttcggggttacgcaaattgacttctgggcccagggaacgctggtcaccgtctcctca

SEQ ID NO: 15136 - DNA, 295 bp, Homo sapiens; identical to SEQ ID NO: 15134
  source 1..295: mol_type = other DNA

SEQ ID NO: 15137 - DNA, 313 bp, Homo sapiens
  source 1..313: mol_type = other DNA
tgcagcgtctggattcatcttcagtagttatggcatgcactgggtccgccaggctccaggcaaggggctggagtgggtggcagttatatggtctgatgaaagtaacaaatactatctagactccgtgaagggccgattcaccatctccagagacaagtccaagaacacgttgtacctccaaatgaacagcctgagagccgaggacacggctgtatattattgtgcgagagatgttcattattgtagtgggggtagctgccactccgtcgggtgggactactggggccagggaaccctggtcaccgtctcctca

SEQ ID NO: 15138 - DNA, 313 bp, Homo sapiens
  source 1..313: mol_type = other DNA
tgcagcgtctggattcatcttcagtagttatggcatgcactgggtccgccaggctccaggcaaggggctggagtgggtggcagttatatggtctgatgaaagtcagaaatactatctagactccgtgaagggccgattcacgatctccagagacaaatccaagaaaacgctatatctccaaatgaacagcctgagagccgaggacacggctgtgtattattgtgcgagagatgttcattattgtagtgggggtagctgccactccgtcgggtgggactactggggccagggaaccctggtcaccgtctcctca

SEQ ID NO: 15139 - DNA, 291 bp, Homo sapiens
  source 1..291: mol_type = other DNA
acttctggataccccttcagaagttatgctatgcattgggtgcgccaggcccccggacaaaggcttgagtggatgggatgggtcaacgttggcatgagtgagccaacattttctcagaagttccagggcagactcaacataaccaaggacacagccgcgagcacagtctacatggaactgagtcgcctgacctctgaagacacggctatttattactgtgcgagagaacgtacctacggtggtaggctccttgactattggggccagggaaccctggtcaccgtctcctca

SEQ ID NO: 15140 - DNA, 291 bp, Homo sapiens
  source 1..291: mol_type = other DNA
acttctggatacaccttcagaagttatgctatgcattgggtgcgccaggcccccggacaaaggcttgagtggctgggatggatcaacgttggcttgagtgagccaagattttctcagaagttccagggcagagtcaacataaccaaggacacaaccgcgaccacagtctacatggaactgagtagcctgagctctgaagacacggctatgtattactgtgcgagagaacgtacctacggtggtaggctccttgactattggggccagggaaccctggtcaccgtctcctca

SEQ ID NO: 15141 - DNA, 316 bp, Homo sapiens
  source 1..316: mol_type = other DNA
tgcagcctctggattcagcttcagtaactataacataaactgggtccgccaggctccagggaaggggctggagtgggtttcatacattagtagtagtagtagtatcatatactacgcagactctgtggagggccgattcaccatctccagagacaatgccaagaactcactgtatctgcaaatgaacagcctgagagacgaggacacggctgtatattactgtgcgagaggggggcgagctagtgggagctacttccaacgacatgaagatgcttttgatatctggggccaagggacaatggtcaccgtctcttca

SEQ ID NO: 15142 - DNA, 316 bp, Homo sapiens
  source 1..316: mol_type = other DNA
tgcagcctctggattcatcttcagtaactataacataaactgggtccgccaggctccagggaaggggctggagtgggtttcatacattagtagtagtagtagtatcatatactacgcagactctgtggagggccgattcaccatctccagagacaatgccaagaactcactgtatctgcaaatgaacagcctgagagacgaggacacggctgtatattactgtgcgagaggggggcgagctagtgggagctacttccaacgacatgaagatgcttttgatatctggggccaagggacaatggtcaccgtctcttca

SEQ ID NO: 15143 - DNA, 316 bp, Homo sapiens
  source 1..316: mol_type = other DNA
tgcagcctctggattcaccttcagtagctatagcatgaactgggtccgccaggctccagggaaggggctggagtgggtttcatacattagtagtagtaatagtaccatatactacgcagactctgtgaagggccgattcaccctctccagagacaatgccaagaactcactgtatctgcaaatgaacagcctgagagacgaggacacggctgtgtattactgtgcgagaggggggcgagctagtgggagctacttccaacggcatgaagatgcttttgatatctggggccaagggacaatggtcaccgtctcttca

SEQ ID NO: 15144 - DNA, 316 bp, Homo sapiens
  source 1..316: mol_type = other DNA
tgcagcctcgggattcaccttcagtagctatagcatgaactgggtccgccaggctccagggaaggggctggagtgggtttcatacattagtagtagtaatagtaccatatactacgcagactctgtgaagggccgattcaccctctccagagacaatgccaagaactcactgtatctgcaaatgaacagcctgagagacgaggacacggctgtgtattactgtgcgagaggggggcgagctagtgggagctacttccaacggcatgaagatgcttttgatatctggggccaagggacaatggtcaccgtctcttca

SEQ ID NO: 15145 - DNA, 294 bp, Homo sapiens
  source 1..294: mol_type = other DNA
acttctggatacaccttcactgaccatagtatccattgggtgcgccaggcccccggacaaaggcttgagtggatgggctggatcatcggtaacagggatggcacaaaatattcacagaagttccagggcagagtcaccatgaccaaggacacattcgcgagcacagtctacatggagttgagtagcctgagatctgaagacacggcggtatattattgtgcgagagagggggccccctactaccactactacgtggacgtctggggcaaagggaccacggtcaccgtcgcctca

SEQ ID NO: 15146 - DNA, 294 bp, Homo sapiens
  source 1..294: mol_type = other DNA
acttctggatacaccttcactgaccatagtatccattgggtgcgccaggcccccggacaaaggcttgagtggatgggctggatcatcggtaacagggatggcacaaaatattcacagaagttccagggcagagtcaccatgaccaaggacacattcgcgagcacagtctacatggagttgagcagcctgagatctgaagacacggcggtatattattgtgcgagagagggggccccctactaccactactacgtggacgtctggggcaaagggaccacggtcaccgtcgcctca

SEQ ID NO: 15147 - DNA, 294 bp, Homo sapiens
  source 1..294: mol_type = other DNA
acttctggatacaccttcactgaccatagtatccattgggtgcgccaggcccccggacaaaggcttgagtggatgggctggatcatcggtaacagggatggcacaaaatattcacagaagttccagggcagagtcaccatgaccaaggactcattcgcgagcacagtctacatggagttgagcagcctgacatctgaggacacggcggtatattattgtgcgagagagggggccccctactaccactactacgtggacgtctggggcaaagggaccacggtcaccgtcgcctca

SEQ ID NO: 15148 - DNA, 298 bp, Homo sapiens
  source 1..298: mol_type = other DNA
tgcagcctctggattcacttttagtaggcattggatgagctgggtccgccaggctccagggaaggggctggagtgggtggccaacataaagaatgatggaagtgagaaatactatgtggactctgtgaagggccgattcaccatctccagagacaacgccaagaactcagtgtatctgcaaatgaacagcctgagagccgaggacacggctgtgtattactgtgcgagagatggaatacaggtacggatggaggcttttgatatctggggccaagggacgatggtcaccgtctcttca

SEQ ID NO: 15149 - DNA, 298 bp, Homo sapiens
  source 1..298: mol_type = other DNA
tgcagcctctggattcacctttagtaggcattggatgagctgggtccgccaggctccagggaaggggctggagtgggtggccaacataaagaatgatggaagtgagaaatactatgtggactctgtgaagggccgattcaccatctccagagacaacgccaagaactcagtgtatctgcaaatgaacagcctgagagccgaggacacggctgtgtattactgtgcgagagatggaatacaggtacggatggaggcttttgatatctggggccaagggacgatggtcaccgtctcttca

SEQ ID NO: 15150 - DNA, 298 bp, Homo sapiens
  source 1..298: mol_type = other DNA
tgcagcctctggattcacctttagtaggcattggatgagctgggtccgccaggctccagggaaggggctggagtgggtggccaacataaagaatgatggaagtgagaaatactatgtggactctgtgaagggccgattcaccatctccagagacaacgccaagaactcagtgtatatgcaaatgaacagcctgagagccgaggacacggctgtgtattactgtgcgagagatggaatacaggtacggatggaggcttttgatatctggggccaagggacgatggtcaccgtctcttca

SEQ ID NO: 15151 - DNA, 303 bp, Homo sapiens
  source 1..303: mol_type = other DNA
aagggttctggatacagctttaccagctactgggtcggctgggtgcgccagatgcccgggaaaggcctggagtggatggggatcatctatcctggtgactctgataccagatacagcccgtccttccaaggccaggtcaccctctcagtcgacaagtccatcagcaccgcctacctgcagtggagcagcctgaaggcctcggacaccgccatgtattactgtgcgagacatggggccacatatgcagcggtgggaacttcatttgactactggggccagggaaccctggtcaccgtctcctca

SEQ ID NO: 15152 - DNA, 303 bp, Homo sapiens
  source 1..303: mol_type = other DNA
aagggttctggatacagctttaccagctactggatcggctgggtgcgccacatgcccgggaaaggcctggagtggatgggaatcatctatcctggtgactctgataccagatacagcccgtccttccaaggccaggtcatcctctcagtcgacaagtccatcaacatcgcctacttgcagtggagcagcctgaaggcctcggacaccgccatgtattactgtgcgagacatggggccacatatgcagcggtgggaacttcatttgactactggggccagggaaccctggtcaccgtctcctca

SEQ ID NO: 15153 - DNA, 277 bp, Homo sapiens
  source 1..277: mol_type = other DNA
tgcagcctctggattcatctttagtaatgatgcgatgaactgggtccgccaggctccagggaaggggctggagtgggtggccagcataaatcaagatggaagtataaaatactatgtggactctgtgaagggccgattcgccatctccagagacaacgccagggactccttatatctgcaaatgaacagcctgggagccgaggacacggccgtctattactgcgccagtgactggttcgtctactggggccagggagccctggtcaccgtctcctca

SEQ ID NO: 15154 - DNA, 277 bp, Homo sapiens
  source 1..277: mol_type = other DNA
tgcagcctctggattcatctttagtagtgatgcgatgaactgggtccgccaggctccagggaaggggctggagtgggtggccagcataaatcaagatggaagtataaaatactatgtggactctgtgaagggccgattcgccatctccagagacaacgccagggactccttatatctgcaaatgaacagcctgggagccgaggacacggccgtctattactgcgccagtgactggttcgtctactggggccagggaaccctggtcaccgtctcctca

SEQ ID NO: 15155 - DNA, 310 bp, Homo sapiens
  source 1..310: mol_type = other DNA
tgcagcctctggattcaccttcactgactatggccttcattgggtccgccaggctccaggcaagggactggagtgggtggcaagtgtctcatctgaagggggaaggaccttctatccattctacctggggggccgattcaccgtctacagagtcaatgtcaagaacacactgtatctccaaattaacagcccgaccacagaagacacggctgtctactattgtgcgagagatggtcgggcgaattactatgggccccccgccaactggtttgacccctggggccagggaacccaggtcaccgtctcccca

SEQ ID NO: 15156 - DNA, 310 bp, Homo sapiens
  source 1..310: mol_type = other DNA
tgcagcctctggattcaccttcactgactatggccttcattgggtccgccaggctccaggcaagggactggagtgggtggcaagtgtgtcgtctgaaggaggaaggactttgtatccattctacctggggggccgatttaccgtctacagagtcaatgtccagaacacactgtatctgcaaattaacagcccgacaacagaagacacggctgtctactattgtgcgagagatggtcgggcgaattattatgggccccccgccaactggtttgacccctggggccagggaacccaggtcaccgtctcccca

SEQ ID NO: 15157 - DNA, 310 bp, Homo sapiens
  source 1..310: mol_type = other DNA
tgcagcctctggattcaccttcactgactatggccttcattgggtccgccaggctccaggcaagggactggagtgggtggcaagtgtatcatctgaaggaggaaggactttctatccattctacctggggggccgattcaccgtctacagagtcaatgtcaagaacacactgtatctccaaattaacagcccgacaacagaagacacggctgtctactattgtgcgagagatggtcgggcgaattactatgggccccccgccaactggtttgacccctggggccagggaacccaggtcaccgtctcccca

SEQ ID NO: 15158 - DNA, 292 bp, Homo sapiens
  source 1..292: mol_type = other DNA
tgcagcgtctggattcaccttcagtaactatggcatgcactgggtccgccaggctccaggcaaggggctggagtgggtggcagtcatatggtatgatggaagtaataaatactatgcagactccgtgaagggccgattcaccatctccagagacaattccaagaacacgctgtatctgcaaatgaacagcctgagagtcgaggacacggctgtatattactgtgcgagggagccggctgggactatctcctttgactactggggccagggaaccctggtcaccgtctcctca

SEQ ID NO: 15159 - DNA, 292 bp, Homo sapiens
  source 1..292: mol_type = other DNA
cgcagcgtctggattcaccttcagtaattatggcatgcactgggtccgccaggctccaggcaaggggctggagtgggtggcagttatatggtatgatggaagtaatgaatactatgcagactccgtgaagggccgattcaccatctccagagacaattccaagaacacgctgtatctgcaaatgaacagcctgagaggcgaggacacggctgtctactactgtgcgagagagccggctgggaccatctcctttgactactggggccagggaaccctggtcaccgtctcctca

SEQ ID NO: 15160 - DNA, 292 bp, Homo sapiens
  source 1..292: mol_type = other DNA
cgcagcgtctggattcaccttcagtaattatggcatgcactgggtccgccaggctccaggcaaggggctggagtgggtggcaattatatggtatgatggaagtaataaatactatgcagactccgtgaagggccgattcaccatctccagagacaattccaagaacacgctgtatctgcaaatgaacagcctgagagccgaggacacggctgtctattactgtgcgagagagccggctgggaccatctcctttgactactggggccagggaaccctggtcaccgtctcctca

SEQ ID NO: 15161 - DNA, 292 bp, Homo sapiens
  source 1..292: mol_type = other DNA
cgcagcgtctggattcaccttcagtaattatggcatgcactgggtccgccaggctccaggcaaggggctggagtgggtggcagttatatggtatgatggaagtaatgaatactatgcagactccgtgaagggccgattcaccatctccagagacaattccaacaacacgctgtatctgcaaatgaacagcctgagagccgaggacacggctgtctattactgtgcgagagagccggctgggaccatctcctttgactactggggccagggaaccctggtcaccgtctcctca

SEQ ID NO: 15162 - DNA, 292 bp, Homo sapiens
  source 1..292: mol_type = other DNA
cgcagcgtctggattcaccttcagtaattatggcatgcactgggtccgccaggctccaggcaaggggctggagtgggtggcagttatatggtatgatggaagtaataaatactatgcagactccgtgaagggccgattcaccatctccagagacaattccaagagcacgctgtatctgcaaatcaacagcctgagagccgaggacacggctgtctattactgtgcgagagagccggctgggaccatctcctttgactactggggccagggaaccctggtcaccgtctcctca

SEQ ID NO: 15163 - DNA, 292 bp, Homo sapiens
  source 1..292: mol_type = other DNA
cgcagcgtctggattcacgttcagtaattatggcatgcactgggtccgccaggctccaggcaaggggctggagtgggtggcagttatatggtatgatggaagtaatgaatactatgcagactccgtgaagggccgattcaccatctccagagacaattccaagaacacgctatatctgcaaatgaacagcctgacagccgaggacacggctgtctattactgtgcgagagagccggctgggaccatctcctttgactactggggccaggggaccctggtcaccgtctcctca

SEQ ID NO: 15164 - DNA, 292 bp, Homo sapiens
  source 1..292: mol_type = other DNA
cgcagcgtctggattcacgttcagtaattatggcatgcactgggtccgccaggctccaggcaaggggctggagtgggtggcagttatatggtatgatggaagtaatgaacactatgcagactccgtgaagggccgattcaccatctccagagacaattccaagaacacgctatatctgcaaatgaacagcctgacagccgaggacacggctgtctattactgtgcgagagagccggctgggaccatctcctttgactactggggccaggggaccctggtcaccgtctcctca

SEQ ID NO: 15165 - DNA, 292 bp, Homo sapiens
  source 1..292: mol_type = other DNA
tgcagcgtctggattcaccttcagtagttatgcaatgcactgggtccgccagcctccaggcaaggggctggagtgggtggcagctatatggtatgatggaagtcagcaattctatgcagactccgtgaagggccgattcgccatctccagagacacttccaagaacacgctatatctgcaaatgaacagcctgacagccgaggacacggctgtctattactgtgcgagagagccggctgggaccatctcctttgactactggggccaggggaccctggtcaccgtctcctca

SEQ ID NO: 15166 - DNA, 339 bp, Homo sapiens
  source 1..339: mol_type = other DNA
acacagaccctcacgctgacctgcaccttctctgggttctcactcagcactagtggagtgggtgtgggctggatccgtcagcccccaggaaaggccctggagtggcttgcagtcatttattgggatggtgataagtggtacagcccatctctgaagagcaggctcacgaacaccaaggacacctccaaaaaccaggtggtccttacaatgaccaacatggaccctgtggacacagccacatattactgtgcacacacaggtggatacacctatggttcaaggttctactactactacatggacgtctggggcaaagggaccacggtcaccgtctcctca

SEQ ID NO: 15167 - DNA, 339 bp, Homo sapiens
  source 1..339: mol_type = other DNA
acacagaccctcatgctgacctgcaccttctctgggttctcactcagcactagtggagtgggtgtgggctggatccgtcagcccccaggaaaggccctggagtggcttgcagtcatttattgggatgctgataagtggtacagcccatctctgaagagcaggctcacgaacaccaaggacacctccaaaaaccaggtggtccttacaatgaccaacatggaccctgtggacacagccacatattactgtgcacacacaggtggatacacctatggttcaagattctactactactacatggacgtctggggcaaagggaccacggtcaccgtctcctca

SEQ ID NO: 15168 - DNA, 297 bp, Homo sapiens
  source 1..297: mol_type = other DNA
gcttctgggggcaccttcaacaactatgctatcacttgggtgcgacaggcccctggacaaggacttgagtgggtgggagggatcagccctgtctttggtaaagcaaactacgcacagaagttccagggcagagtcacgattaccgcgggcgactccacgagcacagcctatatggaactgcgcagcctgagatctgaggacacggccgtgtattactgtgcgagaggaatctacggtgactacgtgggaggtgcttttgatatctggggccaagggacaatggtcaccgtctcttcg

SEQ ID NO: 15169 - DNA, 297 bp, Homo sapiens
  source 1..297: mol_type = other DNA
gcttctggaggctccttcaacaattatgctatcggctgggtgcgacagccccctggacaagggcttcagtggatgggagggatcagccctgtctttgctacaggaaaatacgcacagaagttccagggcagagtcacgattaccgcggacgaatccacgagcacagcctacatggaagtgaggagcctgagatatgaggacacggccgtctactactgtgcgagaggaatctacggtgactacgtgggaggtgcttttgatatctggggccaagggacaatggtcagcgtctcttca

SEQ ID NO: 15170 - DNA, 304 bp, Homo sapiens
  source 1..304: mol_type = other DNA
tacaccctctggattcacctttggcagctatgccatgacctgggtccgccaggctccagggacggggctggagtgggtctcaactattcttagtagtggtggtagcacatactacgcagactccgtgaagggccgattcaccatctccagagacaattccaagaacacgctctatctgcaaatgaacagcctgagaggcgaggacacggccgtatattactgtgcgagacattgtactattaccgactgcggggcgaggtggttcgacccctggggccagggaaccctggtcaccgtctcctca

SEQ ID NO: 15171 - DNA, 304 bp, Homo sapiens
  source 1..304: mol_type = other DNA
tgcagcctctggattcacctttggcagctatgccatgacctgggtccgccaggctccagggacggggctggagtgggtctcaactattcttagtagtggtggtagcacattctacgcagactccgtgaggggccgattcagcatctccagagacaattccaggaacacgctctatctgcaaatgtacagcctgagaggcgaggacacggccatatattactgtgcgagacattgtactattaccgactgcggggcgaggtggttcgacccctggggccagggaaccctggtcaccgtctcctca

SEQ ID NO: 15172 - DNA, 304 bp, Homo sapiens
  source 1..304: mol_type = other DNA
tacaccctctggattcacctttggcagctatgccatgacctgggtccgccaggctccagggacggggctggagtgggtcgcaactattcttagtagtggttctggcacatactacgcagactctatgaggggccgattcaccatctccagagacaattccaagagcacgctctatttacaaatcaacagcctgagagccgaagacacggccatatattactgtgcgagacattgtactattaccgactgcggggcgaggtggttcgacccctggggccagggaaccctggtcaccgtctcctca

SEQ ID NO: 15173 - DNA, 315 bp, Homo sapiens
  source 1..315: mol_type = other DNA
acacagaccctcacgctgacctgtaacttctctgggttctcactcagcactcctggaatgggtgtggcctggatccgtcagcccccaagaaaggccctggagtggattgcagtcatttattgggatgacgataaactctacagcccatctctgaagaacaaactcaccatctccaaggacacttccaaaaaccaggtggtcttaacaatgaccaacatggaccctttggacacagccacatactactgtgcacacagacggggctacgaccccttcgggtattggggccagggaacccaggtcaccgtctcctca

SEQ ID NO: 15174 - DNA, 315 bp, Homo sapiens
  source 1..315: mol_type = other DNA
acacagaccctcacgctgacctgtaacttctctgggttctcactcaccactgctggaatgggtgtggcctggatccgtcagcccccaagaaaggccctggagtggattgcagtcatttattgggatgacgataagctctacagcccatctctgaagaacaaactcaccatctccaaggacacttccaaaaaccaggtggtcttaacaatgaccaacatggaccctttggacacagccacatactactgtgcacacagacggggctacgaccccttcggctattggggccagggaacccaggtcaccgtctcctca

SEQ ID NO: 15175 - DNA, 291 bp, Homo sapiens
  source 1..291: mol_type = other DNA
cagggttctggatacagctttaccagatattggatcgcctgggtgcgccagatgcccgggaaaggcctggagtggatgggtatcatctctccaggtgactctggtgccacatacagcccgtccttccaaggccgggtcaccttctcagccgacaggtccatcaacaccgcctacctacagtggcgcagcctgaaggcctcggacagtggcatctattactgtgcgagacttttaactgcaacatctccgcttacctactggggccagggaaccctgatcaccgtctcctca

SEQ ID NO: 15176 - DNA, 291 bp, Homo sapiens
  source 1..291: mol_type = other DNA
aagggttatggatacagctttaccaggtattggatcgcctgggtgcgccagatgcccgggaaaggcctggagtggctggggatcatctctcctgctgactctgatgccagatacagcccgtccttccaaggccaggtcaccatctcagccgacaagtccatcggcaccgcctacctgcagtggaacagcctgcaggcctcggacagtgccatctatttctgtgcgagacttttaactgcaacatctccacttacctactggggccagggaaccctggtcaccgtctcctca

SEQ ID NO: 15177 - DNA, 301 bp, Homo sapiens
  source 1..301: mol_type = other DNA
tgcagtctctggattcaccttcagtagctatagcatgaactgggtccgccaggctccagggaaggggctggagtgggtctcatccattagtagtagtagtacttacatatactacgcagactcagtgaagggccgattcaccatctccagagacaacgccaagaactcactgtatctgcaaatgaacagcctgagagccgaggacacggctgtgtattactgtgcgagacctgcggcggggggtataactggaacccacgtggactactggggccagggaaccctggtcaccgtctcctca

SEQ ID NO: 15178 - DNA, 301 bp, Homo sapiens
  source 1..301: mol_type = other DNA
tgcagtctctggattcaccttcagtagctatagtatgaactgggtccgccaggctccagggaaggggctggagtgggtctcatccattagtagtagtagtagttacatatactacgcagactcagtgaagggccgattcaccatctccagagacaacgccaagaactcactgtatctgcaaatgaacagcctgagagccgaggacacggctatatattactgtgcgagacctgcggcggggggtataactggaacccacgtggactactggggccagggaaccctggtcaccgtctcctca

SEQ ID NO: 15179 - DNA, 301 bp, Homo sapiens; identical to SEQ ID NO: 15177
  source 1..301: mol_type = other DNA

SEQ ID NO: 15180 - DNA, 301 bp, Homo sapiens
  source 1..301: mol_type = other DNA
tgcagcctctggattcaccttcagtagctatagcatgaactgggtccgccaggctccagggaaggggctggagtgggtctcatccattagtggtagtagtagttacatatactacgcagactcagtgaggggccgattcaccatctccagagacaacgccaagaactcactgtatctgcaaatgaacagcctgagagccgaggacacggctgtgtattactgtgcgagacctgcggcggggggtataactggaacccacgtggactactggggccagggaaccctggtcaccgtctcctca

SEQ ID NO: 15181 - DNA, 298 bp, Homo sapiens
  source 1..298: mol_type = other DNA
cgctgtctctggtggctccatcagcagtaatacctggtggagttgggtccgccagtccccaggggagggactgatttggattggggaaatacatcatagtgggagtgtcaactacaacccgtccctcaagagtcgagtcaccatgtcagtagacaagtccaagaaccagttctccctgaagttgacctctgtgaccgccgcggacacggccgtctattactgtgcgagagaggggcaagtgggagctactaaatacttccgccactggggcccgggcaccctggtcaccgtctcctcg

SEQ ID NO: 15182 - DNA, 298 bp, Homo sapiens
  source 1..298: mol_type = other DNA
cgctgtctctggtggctccatcagcagtaatacctggtggagttgggtccgccagtccccgggggagggactgatttggattggggaaatccatcatagtgggagtgtcaactacaacccgtccctcaagagtcgagtcaccatgtcagtagacaagtccaagaaccagttctccctgaagttgacctctgtgaccgccgcggacacggccgtctattactgtgcgagagaggggcaagtgggagctactaaatacttccgccactggggcccgggcaccctggtcaccgtctcctcg

SEQ ID NO: 15183 - DNA, 298 bp, Homo sapiens
  source 1..298: mol_type = other DNA
cgctgtctctggtggctccatcagcagtaatacctggtggagttgggtccgccagtccccaggggagggactgatttggattggggaaatacatcatagtgggagtgtcaactacaacccgtccctcaagagtcgagtcaccatgtcagtagacaagtccaagaaccagttctccctgaagttgacctctgtgaccgccgcggacacggccgtctattactgtgcgagagaggggcaagtgggagctactaaatacttccgccactggggcccgggcaccctgttcaccgtctcctcg

SEQ ID NO: 15184 - DNA, 277 bp, Homo sapiens
  source 1..277: mol_type = other DNA
tgcagcctctggattcacctttaatacttattggatgacctgggtccgccaggccccagggaaggggctggagtggttggccagcataaagggagatggaagtaagaaattctatgaggactctatgaagggccgattcaccatctccagagacaacgccaagaattcactgtttttggaaatgaacagcctgagagccgaggacacggctatttatttctgtggcaacgtacagcatgactactggggccagggaaccctggtcaccgtctcctca

SEQ ID NO: 15185 - DNA, 277 bp, Homo sapiens
  source 1..277: mol_type = other DNA
tggagcctctggattcacctttaatagttattggatgacctgggtccgccaggccccagggaaggggctggagtggttggccagtataaaggaagatggaagtaagaaattctatgtggactctatgaagggccgactcaccatctccagagacaacgccaagaattcactgtttttggaaatgaacagcctgagagccgaggacacggccatttatttctgtggcaacgtacagcatgactactggggccagggaaccctggtcaccgtctcctca

SEQ ID NO: 15186 - DNA, 277 bp, Homo sapiens
  source 1..277: mol_type = other DNA
tgcagcctctggattcacctttaatacttattggatgacctgggtccgccaggccccagggaaggggctggagtggttggccagcataaaggaagatggaagtaagagattctatgtggactcaatgaagggccgactcaccatctccagagacaacgccaagaattcactgtttttggaaatgaacagcctgagagccgaggacacggctatttatttctgtggcaacgtacagcatgactactggggccagggaaccctggtcaccgtctcctca

SEQ ID NO: 15187 - DNA, 286 bp, Homo sapiens
  source 1..286: mol_type = other DNA
tgcagcctctggattcaccttcagtaacaacgacatgcactgggtccgccaagttacaggacagggtctggagtgggtctcagctattggtactgccagtgacacatactatgcaggctctgtgaagggccgattcatcatctccagagagaatgccaagaactccttgtatcttcaaatgagcagcctgagagacgaggacacggctgtgtattactgtgcaagaggaaaacccggattgtggtttgacttctggggccagggaatcctggtcaccgtctcctca

SEQ ID NO: 15188 - DNA, 286 bp, Homo sapiens
  source 1..286: mol_type = other DNA
tgcagcctctggattcaccttcagtaacaacgacatgcactgggtccgccaagttacaggacaaggtctggagtgggtctcagctattggtactgccagtgacacatactatgcaggctctgtgaagggccgattcatcatctccagagagaatgccaagaactccttgtatcttcaaatgagcagcctgagagacgaggacacggctgtgtattactgtgcaagaggaaaacccggattgtggtttgacttctggggccagggaatcctggtcaccgtctcctca

SEQ ID NO: 15189 - DNA, 343 bp, Homo sapiens
  source 1..343: mol_type = other DNA
tgcagcctctggattcagctttgatgattatgtcatacactgggtccgtcaagctccagggaagggtctggagtgggtctctcttattagtggggatggtggtaccacatactatgcagagtctgtgaagggccgattcaccatctccagagacaacagtaaagactccctgtatttggaaatgaacagtctgagaactgaggacagcgccttgtattactgtgcaaaagatggcttttcccgggatctttggagtggttattggatggggggagcagacttttactactactactcctacatggacgtctggggcaaagggaccacggtcaccgtctcctca

SEQ ID NO: 15190 - DNA, 343 bp, Homo sapiens
  source 1..343: mol_type = other DNA
tgcagcctctggattcacctttgatgattatgtcataaactgggtccgtcaagctccagggaagggtctggagtgggtctctcttattagtggggatggtggtaccacatactatgcagagtctgtgaagggccgattcaccatctccagagacaacagtaaagactccctgtatttggaaatgaacagtctgagaactgaggacagcgccttgtattactgtgcaaaagatggcttttcccgggatctttggagtggttattggatggggggagcagacttttactactactactcctacatggacgtctggggcaaagggaccacggtcaccgtctcctca

SEQ ID NO: 15191 - DNA, 343 bp, Homo sapiens
  source 1..343: mol_type = other DNA
tgcagcctctggattcacctttgatgattatgtcataaactgggtccgtcaagctccagggaagggtctggagtgggtctctcttattagtggggatggtggcaccacatactatgcagagtctgtgaagggccgattcaccatctccagagacaacagtaaagactccctgtatttggaaatgaacagtctgagaactgaggacagcgccttgtattactgtgcaaaagatggcttttcccgggatctttggagtggttattggatggggggagcagacttttactactactactcctacatggacgtctggggcaaagggaccacggtcaccgtctcctca

SEQ ID NO: 15192 - DNA, 343 bp, Homo sapiens; identical to SEQ ID NO: 15191
  source 1..343: mol_type = other DNA

SEQ ID NO: 15193 - DNA, 289 bp, Homo sapiens
  source 1..289: mol_type = other DNA
tgcagcctctggactcacctttagcagctctgacatgacctgggtccgccaggctccagggatggggctggagtgggtctcagccattagtggtagtggtgggaccacatactacgcagactccgtgaagggccgcttcaccatctccagagacaattccaagaacaccctgtatctgcaaatgaacaccctgagagccgaagacacggccctatattactgtgcgaaaactgagggggtgggaatgactgactattggggccagggaaccctggtcaccgtctcctca

SEQ ID NO: 15194 - DNA, 289 bp, Homo sapiens
  source 1..289: mol_type = other DNA
tgcagcctctggactcacctttagcagctctgacatgacctgggtccgccaggctccagggatggggctggagtgggtctcagccattagtggtagtggtgggaccacgtactacgcagactccgtgaagggccggttcaccatctccagagacaattccaagaacaccctgtatctgcaaatgaacaccctgagagccgaagacacggccgtatattactgtgcgaaaactgagggggtgggaatgactgactattggggccagggaaccctggtcaccgtctcctca

SEQ ID NO: 15195 - DNA, 283 bp, Homo sapiens
  source 1..283: mol_type = other DNA
tgcagcctctggattcactttgagtaactattgggtgacctgggtccgccaggccccagggaaggggctggagtgggtggccaacataaggcataatggaagtttgaagtattatgtggactctgtgaagggccgattcaccatctccagagacaacgccgagaacttagtttatctgcaaatgaacagcctgagagtcgaggacacggctatatattactgtgcgacccgtcaggactgcgggggctactggggcccgggaaccctggtcaccgtctcctca

SEQ ID NO: 15196 - DNA, 283 bp, Homo sapiens
  source 1..283: mol_type = other DNA
tgcagcctctggattcaccttgagtgactattgggtgacctgggtccgccaggccccagggaaggggctggagtgggtggccaacataaggcataatggaagtttgaagttttatgtggactctgtgaagggccgattcaccatctccagagacaacactgagaatttagtttatctgcaaatgaacagcctgggagtcgaggacacggctatatattactgtgcgacccgtcaggactgcgggggctactggggcccgggaacgctggtcaccgtctcctca

SEQ ID NO: 15197 - DNA, 277 bp, Homo sapiens
  source 1..277: mol_type = other DNA
tacagcctctggattcatctttagtggtgatgcgatgaactgggtccgccaggctccagggaaggggctggagtgggtggcaagcataaaccaagatggaagtataaaatactatgtggactctgtgaagggccgattcaccatctccagagacaacgccagggactccttatatctgcaaatgaacagcctgggagccgaggacacggccgtctattactgcaccagtgactggttcgtctactggggccagggaaccctggtcaccgtctcctca

SEQ ID NO: 15198 - DNA, 277 bp, Homo sapiens
  source 1..277: mol_type = other DNA
tgcagcctctggattcatctttagtggtgatgcgatgaactgggtccgccaggctccagggaaggggctggagtgggtggccagcataaaccaagatggaagtgtaaaatactatgtggactctgtgaagggccgattcaccatctccagagacaacgccagggactccttacatctgcaaatgaacagcctgggagccgaggacacggccgtctattactgcaccagtgactggttcgtctactggggccagggaaccctggtcaccgtctcctca

SEQ ID NO: 15199 - DNA, 277 bp, Homo sapiens
  source 1..277: mol_type = other DNA
tgtagcctctggattcatctttagtagtgatgcgatgaactgggtccgccaggctccagggaaggggctggagtgggtggccagcataaaccaagatggaagtgtaaaatactatgtggactctgtgaagggccgattcaccatctccagagacaacgccagggactccttatatctgcaaatgaacagcctgggagccgaggacacggccgtctattactgcaccagtgactggttcgtctactggggccagggaaccctggtcaccgtctcctca

SEQ ID NO: 15200 - DNA, 295 bp, Homo sapiens
  source 1..295: mol_type = other DNA
tgcagcctctgggttcaccgtcagtaacaactacatgacttgggtccgccaggctccggggaagggactggaatgggtctcggttatttatagtggtggtaccacatactactcagactccctgaagggccgattcaccatctccagagacaattccaagaacacgctgtatcttcaaatgaacagcctgagagccgaggacacggccgtgtattattgtgcgagctctggggataattacaactactacggctttgactcctggggccagggaaccctggtcaccgtctcctct

SEQ ID NO: 15201 - DNA, 295 bp, Homo sapiens
  source 1..295: mol_type = other DNA
tgcagcctctgggttcaccgtcagtaacaactacatgacttgggtccgccaggctccggggaagggactggagtgggtctcggttatttatagtggtggaaccacatactactcagactccctgaagggccgattcaccatctccagagactattccaagaacacgctgtatcttcaaatgaacaccctgagagccgaggacacggccgtgtattattgtgcgagctctggggataattacaactactacggctttgactcctggggccagggaaccctggtcaccgtctcctct

SEQ ID NO: 15202 - DNA, 285 bp, Homo sapiens
  source 1..285: mol_type = other DNA
gcatctggaaacaccttcaccagcaactatatgcactgggtgcgacaggcccctggacaagggcttgagtggatgggaataatcaaccctactggtgataccacaagctacgcacagaatttccaggacagagtcaccatgaccagggacacgtccctgagtacagtctacatggaactgagcagcctgagatctgaggacacggccatgtattactgtgcgggagcgactatagcagctccaattgactactggggcccgggaaccctggtcaccgtctcctca

SEQ ID NO: 15203 - DNA, 285 bp, Homo sapiens
  source 1..285: mol_type = other DNA
gcatctggaaacaccttcaccagcaactatatgcactgggtgcgacaggcccctggacaagggcttgagtggatgggaataatcaaccctactggtgataccacaagctacgcacagaatttccaggacagagtcaccatgaccagggacacgtccctgagtacagtctacatggagctgagcagcctgagatctgaggacacggccatgtattactgtgcgggagcgactatagcagctcccattgactactggggcccgggaaccctggtcaccgtctcctca

SEQ ID NO: 15204 - DNA, 285 bp, Homo sapiens
  source 1..285: mol_type = other DNA
gcatctggaaacaccttcaccagcaactatatgcactgggtgcgacaggcccctggacaagggcttgagtggatgggaataatcaaccctactggtgataccacaagctacgcacagaatttccaggacagagtcaccatgaccagggacacgtccctgagtacagtctacatggagctgagcagcctgagatctgaggacacggccatctattactgtgcgggagcgactatagccgctcccattgactactggggcccgggaaccctggtcaccgtctcctca

SEQ ID NO: 15205 - DNA, 316 bp, Homo sapiens
  source 1..316: mol_type = other DNA
cactgtctctggtggctccatcaccagtagtacttactactgggcctggatccgccagcccccagggaaggggctggagtggattggcagtctctatcacagtgggagcacctattacaacccgtccctcaagagtcgagtcaccatatccgtagacacgtccaagagccagttctccctccaggtgacctctgtaaccgccgcagacacggctgtgtatttctgtgcgagtaagatgaagtctgcctacgatataactggttattctgaggcttttgatatctggggccaagggacagtggtcaccgtttcttca

SEQ ID NO: 15206 - DNA, 316 bp, Homo sapiens
  source 1..316: mol_type = other DNA
cactgtctctggtggctccatcaccagtagtacttactactggggctggatccgccagcccccagggaaggggctggagtggattggcagtatctattatagtgggagcacctattacaacccgtccctcaagagtcgagtcaccatatccgtagacacgtccaagagccagttctccctccaggtgacctctgtaaccgccgcagacacggctgtgtatttttgtgcgagtaagatgaagtctgcctatgatataactggttattctgaggcttttgatatctggggccaagggacaatggtcaccgtttcttca

SEQ ID NO: 15207 - DNA, 292 bp, Homo sapiens
  source 1..292: mol_type = other DNA
tgtagcctctggaatcagtatgagtaggttttggatgagctgggtccgcctggctccaggaaaggggctggagtgggtggccaacataaacgagcatggaagtatagaatattatgtggactctgtgaagggccgattcaccatctccagagacaacgccaaggactcactgtatctgcaaatggacagcctgagagtcgaggacacggctatgtattactgtacgagacttgggggcaggtcaaacagatatgactactggggccagggaaccctggtcaccgtctcctca

SEQ ID NO: 15208 - DNA, 292 bp, Homo sapiens
  source 1..292: mol_type = other DNA
tgtagcctctggaatcagcatgaataggttttggatgagctgggtccgcctgcctccaggaaaggggctggagtgggtggccaacataaaggaagatggaagtgtaagattctatgtagactctgtgaagggccgattcaccatctccagagacaacgccaagaactcactgtatctgcaaatggacagcctgagagccgaggactcggctatgtattactgtacgagacttgggggcaggtcaaacagatatgactactggggccagggaaccctggtcaccgtctcctca

SEQ ID NO: 15209 - DNA, 310 bp, Homo sapiens
  source 1..310: mol_type = other DNA
tgcagcctctggattcaccttcagtagctatgctatgcactgggtccgccaggctccaggcaaggggctggagtgggtggcagttatctcatatgatggaagcaataaatactacgcagactccgtgaagggccgattcaccatctccagagacaattccaagaacaccctgtatctgcaaatgaacagcctgagacctgaggacacggctgtgtattactgtgcgagagaccaacataactggaaccccgcagagcttcttggctacatggacgtctggggcaaagggaccacggtcaccgtctcctca

SEQ ID NO: 15210 - DNA, 310 bp, Homo sapiens
  source 1..310: mol_type = other DNA
tgcagcctctggattcaccttcagtagttatgctatgcactgggtccgccaggctccaggcaaggggctggagtgggtggcagttatatcatatgatggaagcaataaatactacgcagactccgtgaagggccgattcaccatctccagagacaattccaagaacacgctgtgtctgcaaatgaacagcctgagagctgaggacacggctgtgtattactgtgcgagagaccaacataactggaaccccgcagagcttcttggttacatggacgtctggggcaaagggaccacggtcaccgtctcctca

SEQ ID NO: 15211 - DNA, 304 bp, Homo sapiens
  source 1..304: mol_type = other DNA
tgcagcctctggattcatcttcagtgactacgacatggcctggatccgccaggctccagggaggggtctggagtggctttcatccttgagtagaagtggaagtcccatttcctacgcggactctgtgaggggccggttcaccatctccagggacaacaccgagacgtcactttttctgcagatgaacagcctgagaggcgaggacacggccatttattactgtgcgagacacaatcctcaggattatcttggttcggggctgctcgacccctggggccagggaaccctggtcactgtctcctca

SEQ ID NO: 15212 - DNA, 304 bp, Homo sapiens
  source 1..304: mol_type = other DNA
tgcagcctctggattcatcttcagtgactacgacatggcctggatccgccaggctccaggaaaggggctggagtggctttcatccttgagtagaagtggaagtcccatttcctacgcagactctgtgaggggccggttcaccatctccagggacagcaccgagacgtcactgtatctgcaaatgaacagcctgagaggcgaggacacggccgtgtattactgtgcgagacacaatcctcaggattatcttggttcggggctgctcgacccctggggccagggaaccctggtcactgtctcctca

SEQ ID NO: 15213 - DNA, 319 bp, Homo sapiens
  source 1..319: mol_type = other DNA
cagtatctctggtggctccatcagtaatttctattggagctggatccggcagcccccagggaagggactggagtggattgggtatatctattacagtgggagcaccgattacaacccctccctcaagagtcgagtcaccatgtcaatagatacgtccatgaacctgttctccctgaagctcacctctgtgaccgctgcggacacggccgtgtattactgtgcgagatccccggctacctctttggagtggttattatcggacccttactacttctacatggacgtctggggcaaagggaccacggtcaccgtctcctca

SEQ ID NO: 15214 - DNA, 319 bp, Homo sapiens
  source 1..319: mol_type = other DNA
cagtatctctggtggctccatcagtaatttctattggagctggatccggcagcccccagggaagggactggagtggattgggtatatctattacagtgggagcaccgattacaacccctccctcaagagtcgagtcaccatgtcaatagatacgtccatgaacctgttctccctgaagctcacctctgtgaccgctgcggacacggccgtgtattactgtgcgagatccccggctacctctttggagtggttattatcggatccttactacttctacatggacgtctggggcaaagggaccacggtcaccgtctcctca

SEQ ID NO: 15215 - DNA, 318 bp, Homo sapiens
  source 1..318: mol_type = other DNA
acacagaccctcacactgacctgcaccttctctgggttctcactcaccactaattcaatgtgtgtgagctgggtccgtcagcccccagggaaggcactggagtggcttgcacgcattgattgggatggtgataaacattacagcacatctctgaagaccaggctcaccatctccaaggacacctccaaaaaccaggtggtccttacaatgaccaacatggaccctgtggactcagccacctatttctgtgcacggagcacctccgggaaagaatgcggtgactactggggccagggaaccctggtcatcgtctcctca

SEQ ID NO: 15216 - DNA, 318 bp, Homo sapiens
  source 1..318: mol_type = other DNA
acacagaccctcacactgacctgcaccttctctgggttctcactcaccactaattcaatgtgtgtgagctgggtccgtcagcccccagggaagtcactggagtggcttgcacgcattgattgggacggtgacaaacattacagctcatctctgaagaccaggctcaccatctccaaggacacctccaaaaaccaggtggtcctgacaatgaccaacatggaccctgtggactcagccacctatttctgtgcacggagcacctccgggaaagaatgcggtgactactggggccagggaaccctggtcatcgtctcctca

SEQ ID NO: 15217 - DNA, 318 bp, Homo sapiens
  source 1..318: mol_type = other DNA
acacagaccctcacactgacctgcaccttctctgggttctcactcaccactaattcaatgtgcgtgagctgggtccgtcagcccccagggaagtcactggagtggcttgcacgcattgattgggatgatgatacacattacaacacatctctgaggaccaggctcaccatctccaaggacacctccaaaaaccaggtggtccttacaatgaccaacatggaccctgtggactcagccacgtatttctgtgcacggagcacctccgggaaagaatgcggtgactactggggccagggagccctggtcatcgtctcctca

SEQ ID NO: 15218 - DNA, 318 bp, Homo sapiens; identical to SEQ ID NO: 15215
  source 1..318: mol_type = other DNA

SEQ ID NO: 15219 - DNA, 318 bp, Homo sapiens
  source 1..318: mol_type = other DNA
agacagaccctcacactgacctgcaccttctctgggttctcactcagaactaattcaatgtgtgtgagctgggtccgtcagcccccagggaaggcactggagtggcttgcacgcattgattgggatgatgatacacattacaacacatctctgaggaccaggctcaccatctccaaggacacctccaaaaaccaggtattccttacaatgaccaacatggaccctgtggactcagccacgtatttctgtgcacggagcacctccgggaaagaatgtggtgactactggggccagggagccctggtcatcgtctcctca

SEQ ID NO: 15220 - DNA, 283 bp, Homo sapiens
  source 1..283: mol_type = other DNA
tgcagcctctgggctctccgtcagcggcaacttcatgacctgggtccgccaggctccagggaaggggctggagtgggtctcacttcttaaaagcggtggttacacaaactacgcagactccgtgaagggccgattcaccatctccagagacaattccaagaacacggtgtatcttcaaatgaacagcctgagagtcgaggacacggccgtgtattactgtgcgagagaccagatctactacatggacgtctggggcaaagggaccacggtcaccgtctcctca

SEQ ID NO: 15221 - DNA, 283 bp, Homo sapiens
  source 1..283: mol_type = other DNA
tgcagcctctgggctctccgtcagcggcaacttcatgacctgggtccgccaggctccagggaaggggctggagtgggtctcacttcttaaaagcggtggttacacaaactacgcagactccgtgaagggccgattcaccatctccagagacaattccaagaacacgctgtatcttcaaatgaacagcctgagagccgaggacacggccgtgtattactgtgcgagagatcagatctactacatggacgtctggggcaaagggaccacggtcaccgtctcctca

SEQ ID NO: 15222 - DNA, 283 bp, Homo sapiens
  source 1..283: mol_type = other DNA
tgcagcctctgggctcaccgtcagcggcaactacatgagctgggtccgccaggctccagggaaggggctggagtgggtctcacttcttaaaagtggtggtagcacaagctacgcagactccgtgaagggccgattcaccatctccagagacaattccaagaacacgctgtatcttcaaatgaacagcctgagagccgaagacacggccgtgtattactgtgcgagagatcagatctactacatggacgtctggggcaaagggaccacggtcaccgtctcctca

SEQ ID NO: 15223 - DNA, 283 bp, Homo sapiens
  source 1..283: mol_type = other DNA
tgcagtctctggactccccttcagtaattcctacatgctgtgggtccgccaacctccagggaaggggctggtatgggtcgcacatcttaaccgtgatggaagtattacaacttacgcggacttcgtgaagggccgattcaccatctccagagacaacgccaagaacacactgtatctgcaaatgaacagtctgagcgccgaggacacggctgtgtattattgtgcaagaggactctaccaaagtgaccactggggccaggggaccctggtcaccgtctcctca

SEQ ID NO: 15224 - DNA, 283 bp, Homo sapiens
  source 1..283: mol_type = other DNA
tgcagtctctggactccccttcagtaactcctacatgctgtgggtccgccaacctccagggaaggggctggtgtgggtcgcacatcttaaccgtgatggaagtattacaacttacgcggacttcgtgaagggccgattcaccatctccagagacaacgccaagaacacactgtatctgcaaatgaacagtctgagcgccgaggacacggctgtgtattattgtgcaagaggactctaccaaagtgaccactggggccaggggaccctggtcaccgtctcctca

SEQ ID NO: 15225 - DNA, 289 bp, Homo sapiens
  source 1..289: mol_type = other DNA
tgcagcctctggattcagcttcagttcctatagcataaactgggtccgccaggctccagggaagggcctggagtgggtttcgtacattaatactgatagtagcgccacatactacgcagactctgtgaagggccgattcaccatctccagagacaatgccaagaactcactgtttctgcaaatgaactccctgagagacgaggacacggctgtatatttctgtgggagagataggggagtggctacgagtgactactggggccagggaaccctggtcaccgtctcctca

SEQ ID NO: 15226 - DNA, 289 bp, Homo sapiens
  source 1..289: mol_type = other DNA
tgcagcctctggattcagcttcagttcctatagcataaactgggtccgccaggctccagggaagggcctggagtgggtatcatacattaatactgatagtagtgccacatactacgcagactctgtgaagggccgattcaccatctccagagacaatgccaagaactcactgtttctggaaatgaactccctgagagacgaggacacggctgtatatttctgtgggagagataggggagtggctacgagtgactactggggccagggaaccctggtcaccgtctcctca

SEQ ID NO: 15227 - DNA, 297 bp, Homo sapiens
  source 1..297: mol_type = other DNA
aagggttttggatacagctttcccacctactggatcggctgggtgcgccagatgcccgggaaaggcctggagttaatggggatcatctatcctggtgactctgacgccagatacagcccgtccttcgagggccaggtcaccatgtcagccgacaagtccaccgacaccgcctacctgcagtggagcagcctgaaggcctcggacaccgccatgtattactgtgcgcgactccaacaaagtagcacccactcgtatggtgactactggggccagggaaccctgctcaccgtctcctca

SEQ ID NO: 15228 - DNA, 297 bp, Homo sapiens
  source 1..297: mol_type = other DNA
aagggttttggatacagctttcccacctactggatcggctgggtgcgccagatgcccgggaaaggcctggagttaatggggatcatctatcctggtgactctgacgccagatacagcccgtccttcgaaggccaggtcaccatgtcagccgacaagtccatcgacaccgcctacctgcagtggagcagcctgaaggcctcggacaccgccatgtattactgtgcgcgactccaacaaagtagtacccactcgtatggtgactactggggccagggaaccctgctcaccgtctcctca

SEQ ID NO: 15229 - DNA, 282 bp, Homo sapiens
  source 1..282: mol_type = other DNA
gcttctggatacaccttcactaggtacgccatccattgggtgcgccaggcccccggacataggcttgagtggatgggatggatcaacggtgccgacggttacacaaaaaccatagagaagttccagggcagagtcaccttcacctgggacgcatccgcgaccacaggctatatggagctgagcagcctgagatctgacgacacggctgtgtatttctgtgcgagaggtcacagctacctcatggacgtctggggcacagggaccacggtcaccgtctcctca

SEQ ID NO: 15230 - DNA, 282 bp, Homo sapiens
  source 1..282: mol_type = other DNA
gcttctggatacaccttcactaggtacgccatccattgggtgcgccaggcccccggacataggcttgagtggatgggatggatcaacggtgccgacggttacacaaaaaccatagagaagttccagggcagagtcaccttcacctgggacgcatccgcgaccacaggctacatggagctgagcagcctgagatctgacgacacggctgtgtatttctgtgcgagaggtcacagctacctcatggacgtctggggcaaagggaccacggtcaccgtctcctca

SEQ ID NO: 15231 - DNA, 282 bp, Homo sapiens
  source 1..282: mol_type = other DNA
gcttctggatacaccttcactaggtacgccatccattgggtgcgccaggcccccggacataggcttgagtggatgggatggatcaacggtgccgacggttacacaaaaaccatagagaagttccagggcagagtcaccttcacctgggacgcatccgcgaccacaggctacatggagctgagcagcttgagatctgacgacacggctgtgtatttctgtgcgagaggtcacagctacctcatggacgtctggggcaaagggaccacggtcaccgtctcctca

SEQ ID NO: 15232 - DNA, 282 bp, Homo sapiens
  source 1..282: mol_type = other DNA
gcttctggatacaccttcactaggtacgccatccattgggtgcgccaggcccccggacataggcttgagtggatgggatggatcaacggtgccgacggttacacaaaaaccatagagaagttccagggcagagtcaccttcacctgggacgcatccgcgaccacaggctacatggagctgagcagcctgagatctgacgacacgactgtgtatttctgtgcgagaggtcacagctacctcatggacgtctggggcaaagggaccacggtcaccgtctcctca

SEQ ID NO: 15233 - DNA, 298 bp, Homo sapiens
  source 1..298: mol_type = other DNA
cactgtctctggtggctccatgagtagttactactggagctggatccggcagcccccagggaagggactggagtggattgggtatatctcttacagggagagcaccaactacaacccctccctcaagagtcgagtcaccatatcagtagacacgtccaagaacctgttctccctgaaattgagctctgtgaccgctgcggacacggccgtgtattactgtgcgagacttcacctctttggagtaattgaaaactacatggacgtctggggcaaaggaaccacggtcaccgtctcctca

SEQ ID NO: 15234 - DNA, 298 bp, Homo sapiens; identical to SEQ ID NO: 15233
  source 1..298: mol_type = other DNA

SEQ ID NO: 15235 - DNA, 298 bp, Homo sapiens
  source 1..298: mol_type = other DNA
cactgtctctggtggctccatcagtagttactactggagctggatccggcagcccccagggaagggactggagtggattggatatatctcttacagggagagcaccaactacaacccctccctcaagagtcgagtcaccatatcagtggacacgtccaagagcatgttctccctgaaactgagctctgtgaccgctgcggacacggccgtgtattactgtgcgagacttcacctctttggagtaattgaaaactacatggacgtctggggcaaaggaaccacggtcaccgtctcctca

SEQ ID NO: 15236 - DNA, 289 bp, Homo sapiens
  source 1..289: mol_type = other DNA
tgcagcctctggaatcaccttcaaaacctactggatgtcctgggtccgccaagctccaggggaggggctggtgtgggtctcatctattaatggtgatgtgactactacaagctatgtgggctccgtgaagggccgattcaccatctccagagacaacgccaggaacacgctgtatctgcaaatgaacagtctgagagccgacgacacggctgtttattactgtgcaagagttgcatacagggctggttttgatatctggggccaagggacaatggtcaccgtctcttca

SEQ ID NO: 15237 - DNA, 289 bp, Homo sapiens
  source 1..289: mol_type = other DNA
tgcggcctctggaatcaccttcaatacctactggatgtcctgggtccgccaagctccaggggaggggctggtgtgggtctcatctattaatagtgatgtgagtagtacaagttatgtgggctccgtgaagggccgattcaccatctccagagacaacgccaggaacacgctgtatctgcaaatgaacagtctgagagccgaggacacggctctttattactgtgcaagagttgcatacagggctggttttgatatctggggccaagggacaatggtcaccgtctcttca

SEQ ID NO: 15238 - DNA, 289 bp, Homo sapiens
  source 1..289: mol_type = other DNA
tgcagcctctggaatcaccttcaatacctactggatgtcctgggtccgccaagctccaggggaggggctggtgtgggtctcatctattaatagtgatgtgagtactacaagctatgtgggctccgtgaagggccgattcaccatctccagagacaacgccaggaacacgctgtatctgcaaatgaacagtctgagagccgaggacacggctgtttattactgtgcaagagttgcatacagggctggttttgatatctggggccaggggacaatggtcaccgtctcttca

SEQ ID NO: 15239 - DNA, 289 bp, Homo sapiens
  source 1..289: mol_type = other DNA
tgcagcctctggaatcaccttcaatacctactggatgtcctgggtccgccaagctccaggggaggggctggtgtgggtctcatctattaatagtgatgtgagtactacaagctatgtgggctccgtgaagggccgattcaccatctccagagacaacgccaggaaaacgctgtatctgcaaatgaatagtctgagagccgaggacacggctgtttattactgtgcaagagttgcatacagggctggttttgatatctggggccaggggacaatggtcaccgtctcttca

SEQ ID NO: 15240 - DNA, 289 bp, Homo sapiens
  source 1..289: mol_type = other DNA
tgcagcctctggattcaccttcaatagctactggatgtcctgggtccgccaagctccaggggaggggctggtgtgggtctcatctattaatggtgatgtgactactacaagctatgtgggctccgtgaagggccgattcaccatctccagagacaacgccaggaacacgctgtatctgcaaatgaacagtctgagagccgacgacacggctgtttattattgtgcaagagttgcatacagggctggttttgatatctggggccaagggacaatggtcaccgtctcttca

SEQ ID NO: 15241 - DNA, 289 bp, Homo sapiens
  source 1..289: mol_type = other DNA
tgcagcctctggaatcaccttcaacacctactggatgtcctgggtccgccaagctccaggggaggggctggtgtgggtctcatccattaatagtgatgtgagtactacaagctatgtgggctccgtgaagggccgattcaccatctccagagacaacgccaggaacacgttgtatctgcaaatgaacagtctcagagccgaggacacggctgtttactactgtgcaagagttgcatacagggctggttttgatatctggggccaagggacaatggtcaccgtctcttca

SEQ ID NO: 15242 - DNA, 289 bp, Homo sapiens
  source 1..289: mol_type = other DNA
tgcagcctctggaatccccttcaatacctactggatgtcctgggtccgccaagctccaggggaggggctggtgtgggtctcatctattaatagtgatatgagtactacaagctatgtgggctccgtgaagggccgattcaccatctccagagacaacgccaggaagacgctgtatctgcaaatgaacagtctgagagccgaggacacggctgtttattactgtgcaagagttgcatacagggctggttttgatatctggggccaggggacaatggtcaccgtctcttca

SEQ ID NO: 15243 - DNA, 313 bp, Homo sapiens
  source 1..313: mol_type = other DNA
cgcagcgtccggattcaccttcagtaattatactatgcactgggtccgccaggctccaggcaaggggctggagtgggtggcagttatatcatttggtggaagcggtgcatactacacagactccgtgaggggccggttcaccatctccagggacaattccaagaacacgctgcacctgcaaatgaacggcctgagaggtgaagacacggctgtttattactgtgtcagagatccggagtggctgtcggagcatctgtgggcctcgaaccgcttcgacccgtggggccagggaaccctggtgaccgtctccgca

SEQ ID NO: 15244 - DNA, 313 bp, Homo sapiens
  source 1..313: mol_type = other DNA
cgcagcgtccggattcaccttcagtaattatactatgcactgggtccgccaggctccaggcaaggggctggagtgggtggcagttatatcatttggtggaagcggttcatactacacagactccgtgaggggccgattcaccatctccagggacaattccaagaacacgctgcacctgcaaatgaacagcctgagaggtgaagacacggctgtttattactgtgtcagagatccggagtggctgtcggagcatctgtgggcctcgaaccgcttcgacccgtggggccagggaaccctggtgaccgtctcctca

SEQ ID NO: 15245 - DNA, 295 bp, Homo sapiens
  source 1..295: mol_type = other DNA
tgcagcctctggattcacctttagcagctatgccatgaactgggtccgccaggctccagggaaggggctggagtgggtctctgctatcagtggtagtggcgatagcacatactacgcagactccgtgaagggccggttcaccacctccagagacaattccaagaacacggtgtatctgcaaatgaacagcctgagagccgaggacagggccgtgtattactgtgcgaaactccggggcccgagcagtggctgccctgactactggggccagggaaccctggtcaccgtctcctca

SEQ ID NO: 15246 - DNA, 295 bp, Homo sapiens
  source 1..295: mol_type = other DNA
tgcagcctctggattcacctttaccagctatggcatgaactgggtccgccaggctccagggaaggggctggagtgggtctctgctatcagtggtagtggtgatagcacatactacgcagactccgtgaagggccggttcaccacctccagagacaattccaagaacacggtgtatctgcaaatgaacagcctgagagccgaggacacggccgtgtattactgtgcgaaactccggggcccgagtagtggctgccctgactactggggccagggaaccctgatcaccgtctcctca

SEQ ID NO: 15247 - DNA, 289 bp, Homo sapiens
  source 1..289: mol_type = other DNA
tgcagcctctggaatcaccttcagtacctatagcatgaactgggtccgccaggctccagggaaggggctggagtgggtttcatacattagtgatagtagtaataaaatatactacgcagactctgtgaagggacgattcaccatctccagagacaatgccaagaactcactgtatctgcaaatgaacagcctgagagacgaggacacggctgtgtattactgtgcattgactaattttttctggtacttccatctgtggggccgtggcaccctggtcactgtctcctca

SEQ ID NO: 15248 - DNA, 289 bp, Homo sapiens
  source 1..289: mol_type = other DNA
tgcagcctctggaatcaccttcagtacctatagcatgaactgggtccgccaggctccagggaaggggctggagtgggtttcatacattagttatagtagtaataaaatatactacgcagactctgtgaagggacgattcaccatctccagagacaatgccaagaactcactgtatctgcaaatgaacagcctgagagacgaggacacggctgtgtattactgtgcattgactaattttttctggtacttccatctgtggggccgtggcaccctggtcactgtctcctca

SEQ ID NO: 15249 - DNA, 292 bp, Homo sapiens
  source 1..292: mol_type = other DNA
tgcagcctctggcttcgccttcagtaattcctttatgaactgggtccgccgggctccagggaaggggctggagtgggtgacaactgcttcatatgatggaagccttaaatattacgcagactccgtgaagggccgattcaccatctccagagacaattccaagaacacactgtatctacaaatgaacagcctgaaagaagaggacacggctatgtattactgtacgagaggtgacggtcatagtaaagtttttgactattggggccagggaaccctggtcaccgtctcctca

SEQ ID NO: 15250 - DNA, 292 bp, Homo sapiens
  source 1..292: mol_type = other DNA
tgcagcctctggcttcgccttcagtaattcttttatgaactgggtccgccgggctccagggaaggggctggagtgggtgacaactgcttcatatgatggaagccttaaatattacgcagactccgtgaagggccgattcaccatctccagagacaattccaagaacacactgtatctacaaatgaacagcctgaaagaagaggacacggctatgtattactgtacgagaggtgacggtcatagtaaagtttttgactattggggccagggaaccctggtcaccgtctcctca

SEQ ID NO: 15251 - DNA, 298 bp, Homo sapiens
  source 1..298: mol_type = other DNA
tgaagcctcgggattcaccttcattacctatggcatgcactgggtccgccaggctccaggcaaggggctggagtgggtggcagttatctcatatgatgcaaatggtaaatactatggagactccgtgaagggccgattcaccatctccagagacaattccaagaacacggtgtttctgcaaatggactacgtgagtcctgaggacacggctgtgtattactgtacgaaatcgcgacttagcagcagctgggactacatggacgtctggggcaaagggaccacggtcaccgtctcccca

SEQ ID NO: 15252 - DNA, 298 bp, Homo sapiens
  source 1..298: mol_type = other DNA
tgcagcctcgggattcaccttcattacctatggcatgcactgggtccgccaggctccaggcaaggggctggagtgggtggcagttatctcatatgatgcaaatggtaaatactatggagactccgtgaagggccgattcaccatctccagagacaattccaagaacacggtgtttctgcaaatggactacgtgagtcctgaggacacggctgtgtattactgtacgaaatcgcgacttagcagcagctgggactacatggacgtctggggcaaagggaccacggtcaccgtctcccca

SEQ ID NO: 15253 - DNA, 292 bp, Homo sapiens
  source 1..292: mol_type = other DNA
cgctgtctctggtggctccatcagtggttactactggacctggatccggcagcccccagggaagggactggagtggattggttatatccattacactgggaacatccagtacaacccctccctcaagagtcgtctcaccatatcactagacacatccaagaaccagttctccctgaagctgacctctgtgaccgccacagacacggccctctactactgtgcgagacatctgcctacagcaaccgccacctttgactactggggccagggaatcctggtcaccgtctcctca

SEQ ID NO: 15254 - DNA, 292 bp, Homo sapiens
  source 1..292: mol_type = other DNA
cgctgtctctggtggctccatcagtggttactattggacctggatccggcagcccccagggaagggactggagtggattggttatatccattacactgggaacatcgagtgcaacccctccctcaagagtcgtctcaccatatcactagacacgtccaggaaccaattctccctgaagctgacctctgtgaccgccacagacacggccctctactactgtgcgagacatctgcctacagcaaccgccacctttgactactggggccagggaatcctggtcaccgtctcctca

SEQ ID NO: 15255 - DNA, 292 bp, Homo sapiens
  source 1..292: mol_type = other DNA
cgctgtctctggtggctccatcagtggttactactggacctggatccggcagcccccagggaagggactggagtggattggttatatccattacactgggaacatccagtacaacccctccctcaagagtcgtctcaccatatcactagacacgtccaagaaccaattctccctgaagctgacctctgtgaccgccacagacacggccctctactactgtgcgagacatctgcctacagcaaccgccacctttgactactggggccagggaatcctggtcaccgtctcctca

SEQ ID NO: 15256 - DNA, 322 bp, Homo sapiens
  source 1..322: mol_type = other DNA
taaagtgtctggattcttcttcagtggctatagcatggagtgggtccgtcaggccccaggcggggggctggagtgggtggcagttttatggtatgatggaaggaatgagcattacgtagactctgtgaagggccgattcaccatctccagagacacgtccaagaatacactgtatcttcaaatgaacagcctgagagccgaggacacggcgacatactattgtgcgcgactccgttctcgcagtggcgacgatgaaggcgatgacttttacagctactacgcggacgtctggggcagagggacgtctgtcagtgtctcatca

SEQ ID NO: 15257 - DNA, 322 bp, Homo sapiens
  source 1..322: mol_type = other DNA
taaagtgtctggattcttcttcagtgggtatagcatgcagtgggtccgccaggccccaggcgaggggctggagtgggtggcagttttatggtatgatggaaggactgagcattatgtggactctgtgaagggccgattcaccatctccagagacacgtccaagaatacactgtatcttcaaatgaacagcctgagagccgaggacacggcaacatactactgtgcgcgactccgctctcgcagtggcgacgatgaaggcgatgacttttacagctactacgcggacgtctggggcagagggacgtctgtcagtgtctcatca

SEQ ID NO: 15258 - DNA, 322 bp, Homo sapiens
  source 1..322: mol_type = other DNA
taaagtgtctggattcttcttcagtggctatagcatgcagtgggtccgccaggccccaggcgaggggctggagtgggtggcagttttatggtatgatggaaggactgagcattatgtggactctgtgaagggccgattcaccatctccagagacacgtccaagaatacactgtatcttcaaatgaacagcctgagagccgaggacacggcaacatactactgtgcgcgactccgctctcgcagtggcgacgatgaaggcgatgacttttacagttactacgcggacgtctggggcagagggacgtctgtcagtgtctcatca

SEQ ID NO: 15259 - DNA, 293 bp, Homo sapiens
  source 1..293: mol_type = other DNA
ccatctccggggacagtgtctctagcaacagtgctgcttggaactggatcaggcagtccccatcgagaggccttgagtggctgggagggacatactacaggtccaagtggtataatgattatgcagtatctctgaaaagtcgaataaccatcaacccagacacatccaagaaccagttctccctgcagttgaactctgtgactcccgaggacacggctgtgtattactgtgcgaaagagagtggggcagcgttcgacccctggggccagggaaccctggtcaccgtctcctca

SEQ ID NO: 15260 - DNA, 293 bp, Homo sapiens
  source 1..293: mol_type = other DNA
ccatctccggggacagtgtctctagcaacagtgctgcttggaactggatcaggcagtccccatcgagaggccttgagtggctgggaaggacatactacaggtccaagtattttaatgattatgcagtatctgtgaaaagtcgaataaccatcaacccagacatatccaagaaccagttctccctgcagctgaactctgtgactcccgaggacacggctgtatattactgtgcgaaagagagtggggcagcgttcgacccctggggccagggaaccctggtcaccgtctcctca

SEQ ID NO: 15261 - DNA, 336 bp, Homo sapiens
  source 1..336: mol_type = other DNA
gcttctggttacacctttaccagctatggtatcagctgggtgcgacaggcccctggacaagggcttgagtggatgggatggatcaccacttacaatggtaacacaaactatgcacagaagctccagggcagagtcaccatgaccacagacacatccacgagcacagcctacatggagctgaggagcctgagatctgacgacacggccgtgtattactgtgcgagagcctcgtatcattactatgatagtagtggttattactaccacgtttctgagcgcgggcataccactgcttttgatatctggggccaagggacaatggtcaccgtctcttca

SEQ ID NO: 15262 - DNA, 336 bp, Homo sapiens; identical to SEQ ID NO: 15261
  source 1..336: mol_type = other DNA

SEQ ID NO: 15263 - DNA, 336 bp, Homo sapiens
  source 1..336: mol_type = other DNA
gcttctggttacacctttagcagctatggtatcagctgggtgcgacaggcccctggacaagggcttgagtggatgggatggatcagcgcttacaatggtaacacaaactatgcacagaagctccagggcagagtcaccatgaccacagacacatccacgagcacagcctacatggaactgaggagcctgagatctgacgacacggccgtgtattactgtgcgagagcctcgtatcattactatgatagtagtggttattactaccacgtttctgagcgcgggcataccactgcttttgatatctggggccaagggacaatggtcaccgtctcttca

SEQ ID NO: 15264 - DNA, 336 bp, Homo sapiens
  source 1..336: mol_type = other DNA
gcttctggttacacctttaccagatatggtatcagctgggtgcgacaggcccctggacaagggcttgagtggatgggatggatcagcgcttacaatggtaacacaaactatgcacagaaggtccagggcagagtcaccatgaccacagacacatccacgagcacagtctacatggagctgaggagcctgagatctgacgacacggccgtgtattactgtgcgagagcctcgtatcattactatgatagtagtggttattactaccacgtttctgagcgcgggcataccactgcttttgatatctggggccaagggacaatggtcaccgtctcttca

SEQ ID NO: 15265 - DNA, 304 bp, Homo sapiens
  source 1..304: mol_type = other DNA
tgcagcctctggattcactttcagtgacgcctggatgagctgggtccgccaggctccagggaaggggctggagtgggttggccgtattaaaagcaaaattgatggtgggacaccagactacgctgcacccgtgaaaggcagattcaccatctcaagagatgattcaaaaaacacgctgtatctgcaaatgaacagcctgaaaaccgaggacacagccgtctattattgtaccacagtggatggttggggcagcagctggtaccgtgtctcctggggccagggaaccctggtcaccgtctcctca

SEQ ID NO: 15266 - DNA, 304 bp, Homo sapiens
  source 1..304: mol_type = other DNA
tgcagcctctggattcactttcagtgacgcctggatgagctgggtccgccaggctccagggaaggggctggagtgggttggccgtattaaaagcaaaattgatggtgggacaccagactacgctgcacccgtgaaaggcagattcaccatctcaagagatgattcaaaaaacacgctgtatctgcaaatgaacagcctgaaaatcgaggacatagccgtctattattgtacgacagtggatggttggggcagcagctggtaccgtgtctcctggggccagggaaccctggtcaccgtctcctca

SEQ ID NO: 15267 - DNA, 304 bp, Homo sapiens
  source 1..304: mol_type = other DNA
tgcagcctctggattcactttcagtgacgcctggatgagctgggtccgccaggctccagggaaggggctggagtgggttggccgtattaaaagcaaaattgatggtgggacaccagactacgctgcacccgtgaaaggcagatttaccgtctcgagagatgattcagaaaacacgctgtatctgcacatgaacagcctgaaaaccgaggacacagccgtctattattgtaccacagtggatggttggggcagcagctggtaccgtgtctcctggggccagggaaccctggtcaccgtctcctca

SEQ ID NO: 15268 - DNA, 304 bp, Homo sapiens
  source 1..304: mol_type = other DNA
tgcagcctctggattcactttcactgacgcctggatgaactgggtccgccaggctccagggaaggggctggagtgggttggccgtattcaaagtaaaattgatggtgggacaccagactacgctgcacccgtgaaaggcagattcaccatctcaagagatgattcaaaaaagacgctgtatctgcaaatggacagcctgaaaaccgaggacacagccgtctattattgtaccacagtggatggttggggcagcagctggtaccgtgtctcctggggccagggaaccctggtcaccgtctcctca

SEQ ID NO: 15269 - DNA, 292 bp, Homo sapiens
  source 1..292: mol_type = other DNA
tgcagcctctggattcacctttcgtaattattggatgagctgggtccgccaggctcccgggaaggggctggagtgggtggccaacataagcccagatggacgtcagagattctatttggactctgtgaggggccgattcgccacctccatagacaccaccaagaactcactgtggctgcaactgaacagcctgcgagccgaggacacggctgtctattactgtgcgagacttggggggagggcaaacagatatgactactggggccagggaaccctggtcaccgtctcctca

SEQ ID NO: 15270 - DNA, 292 bp, Homo sapiens
  source 1..292: mol_type = other DNA
tgcagcctctggattcaccttccgtgattattggatgagctgggtccgcctggcacccgggaaggggctggagtgggtggccaacattagcccagatggacgtcggatattctatttggagtccgtgaggggccgattcgccacctccatagacggcaccaagaactcagtgtatctgcaactgaacagcctgcgagccgaggacacggcggtctactattgtgcgagacttggggggagggcaaacagatatgactactggggccagggaaccctggtcaccgtctcctca

SEQ ID NO: 15271 - DNA, 292 bp, Homo sapiens
  source 1..292: mol_type = other DNA
tgcagcctctggattcacctttcgtgattattggatgagctgggtccgccaggctcccgggaaggggctggagtgggtggccaacataagcccagatggacgtcagagattctatttggactctgtgaggggccgattcgccacctccatagacagcaccaagaactcactgtatctgcaactgaacagcctgcgagccgaggacacggctgtctattactgtgcgagacttggggggagggcaaacagatatgactactggggccagggaaccctggtcaccgtctcctca

SEQ ID NO: 15272 - DNA, 298 bp, Homo sapiens
  source 1..298: mol_type = other DNA
tgcagcctctggcttcaccttcagtcgctatagcatgaactgggtccgccaggctccagggaaggggctggagtgggtctcatccatcagtagtagtagtagtttcatatactatgcagactcagtgaagggccgattcaccatctccagagacaacgccaagaactcactgtatctgcaaatgaacagcctgagagccgaggacacggctgtgtattactgtgcgagagatctaagtgggagctacacgcatggctttgactactggggccagggaaccctggtcaccgtctcctca

SEQ ID NO: 15273 - DNA, 298 bp, Homo sapiens
  source 1..298: mol_type = other DNA
tgcagcctctggattcaccttcagttactatagcatgaactgggtccgccaggctccagggaaggggctggagtgggtctcatctattagtagtagtagtagtgacatatactacgcagactcagagaagggccgattcaccatctccagagacaacgccaagaactcactgtatctgcaaatgaacagcctgagagccgaggacacggctgtgtattactgtgcgagagatctaagtgggagctacacgcatggctttgactactggggccagggaaccctggtcaccgtctcctca

SEQ ID NO: 15274 - DNA, 298 bp, Homo sapiens
  source 1..298: mol_type = other DNA
tgcagcctctggattcaccttcagttactatagcatgaactgggtccgccaggctccagggaaggggctggagtgggtctcatccattagtagtagcagtagttacatatactacgcagactcagtgaagggccgattcaccatctccagagacaacggcaagaacttactgtatctgcaaatgaacagcctgagagccgaggacacggctgtgtattactgtgcgagagatctaagtgggagctacacacatggctttgactactggggccagggaaccctggtcaccgtctcctca

SEQ ID NO: 15275 - DNA, 294 bp, Homo sapiens
  source 1..294: mol_type = other DNA
gcttctggttacacctttagcaatcatggtatcagttgggtgcgacaggcccctggacaagggcttgagtggatgggatggatcagcgctgacaatagaagcacaaacttcgcacagactttccggggcagactcaccctgatcacagacacagccacgaacacagcctacatggagctgaggagcctgacttctgacgacacggccgtttattactgtgcgcgagatgggttcatagccgcttctgggcagtttgactactggggccagggaaccctggtcaccgtctcctcc

SEQ ID NO: 15276 - DNA, 294 bp, Homo sapiens
  source 1..294: mol_type = other DNA
gcttctggttacacctttagcaatcatggtatcagttgggtgcgacaggcccctggacaagggcttgagtggatgggatggatcagcgctgacaatagaagcacaaacttcgcacagactttccggggcagactcaccctgaccacagacacagccacgaacacagcctacatggagctgaggagcctgacttctgacgacacggccgtttattactgtgcgcgagatgggttcatagccgcttctgggcagtttgactactggggccagggaaccctggtcaccgtctcctcc

SEQ ID NO: 15277 - DNA, 313 bp, Homo sapiens
  source 1..313: mol_type = other DNA
tgcagcctctggattcactttcagtacctataccatgaactgggtccgccaggctccagggaaggggctggagtgggtctcatccatcagtagtagtagtagttacatatactacgcagactctgtgaggggccgattcaccatctccagagacaacgccaagaattcattgtatctgcaaatgaacagcctgagagccgaggacacggctgtgtattactgtgcgagaggaaactggctatattatgatagtagtggttatgaggattctgggggctactggggccagggaaccctggtcagcgtctcctca

SEQ ID NO: 15278 - DNA, 313 bp, Homo sapiens
  source 1..313: mol_type = other DNA
tgcagcctctggattcactttcagtacctatactatgaactgggtccgccaggctccagggaaggggctggagtgggtctcatccatcagtggtggtagtagttacatatactacgcagattcagtgaggggccgattcaccatctccagagacaacgccgagaattcattgtatctgcaaatgaacagcctgagagccgaggacacggctgtgtattactgtgcgagaggaaactggctatattatgatagtagtggttatgaggattctgggggctactggggccagggaaccctggtcagcgtctcctca

SEQ ID NO: 15279 - DNA, 313 bp, Homo sapiens
  source 1..313: mol_type = other DNA
tgcagcctctggattcactttcagtacctataccatgaactgggtccgccaggctccagggaaggggctggagtgggtctcatccatcagtagtagtagtagttacatatactacgcagactcagtgaggggccgattcaccatctccagagacaacgccaagaattcattgtatctgcaaatgaacagcctgagagccgaggacacggctgtgtattactgtgcgagaggaaactggttatattatgatagtagtggttatgaggattctgggggctactggggccagggaaccctggtcagcgtctcctca

SEQ ID NO: 15280 - DNA, 313 bp, Homo sapiens
  source 1..313: mol_type = other DNA
tgcagcctctggattcactttcagtacctataccatgaactgggtccgccaggctccagggaaggggctggagtgggtctcatccatcagtagtagtagtagttacatatactacgcagactcagtgaggggccgattcaccatctccagagacaacgccaagaattcattgtatctgcaaatgaacagcctgagagccgaggacacggctgtgtattactgtgcgagaggaaactggctatattatgatagtagtggttatgaggattctgggggctactggggccagggaaccctggtcagcgtctcctca

SEQ ID NO: 15281 - DNA, 313 bp, Homo sapiens; identical to SEQ ID NO: 15277
  source 1..313: mol_type = other DNA

SEQ ID NO: 15282 - DNA, 313 bp, Homo sapiens; identical to SEQ ID NO: 15279
  source 1..313: mol_type = other DNA

SEQ ID NO: 15283 - DNA, 313 bp, Homo sapiens
  source 1..313: mol_type = other DNA
tgcagcctctggattcacgttcagtgaccactacatggactgggtccgccaggctccagggaaggggctggagtgggttggccgtagtagaaacaaagctaggagtttcagcacggaatatgccgcgtctgtgaaagacagattcatcatctcaagagacgaatcaaagaactcagcgtatctgcaaatgaacagcctgaaaaccgacgacacggccgtgtattattgtgctagagatctgggagtgggacctacggactactaccactacatggacgtctggggcaaggggaccacggtcaccgtctcctca

SEQ ID NO: 15284 - DNA, 313 bp, Homo sapiens
  source 1..313: mol_type = other DNA
tgcagcctctggattcacgttcagtgaccactatatggactgggtccgccaggctccagggaaggggctggagtgggttggccgtagcagaaacaaagctaagagtttcagcacagaatatgccgcgtctgtgaaaggcagattcaccatctcaagagacgaatcaaagaactcagcgtatctgcaaatgaacagcctgaaaaccgacgacacggccgtgtattattgtgctagagatctgggagtgggacctacggactactaccactacatggacgtctggggcaaagggaccacggtcaccgtctcctca

SEQ ID NO: 15285 - DNA, 292 bp, Homo sapiens
  source 1..292: mol_type = other DNA
tgtaggctctggattcacctttagcagctatgccctgagctgggtccgccaggctccagggaaggggctggaatatgtctcggctatcaatagtggtgggaacacatactacgttgactccgcgaagggccggttcaccatctccagagacatttctaagaacacactgtatctgcaaatggagagtctgagagccgaggacacggccgtctattactgtgtgaaatcagcggtagctgctattccggcttggttgaactggggccagggaactctggtcattgtctcctca

SEQ ID NO: 15286 - DNA, 292 bp, Homo sapiens
  source 1..292: mol_type = other DNA
tgttggctctggattcacctttagcagctatgccctgagctgggtccgccaggctccagggaaggggctggaatatgtctcggctatcaatgatgttgggaacacattctacgttgactccgcgaagggccggttcaccatctccagagacatttctaagaacacagtgtatctgcaaatggagagtctgagagccgacgacacggccgtctattactgtgtgaaatcagcggtagctgctattccggcttggttgaactggggccagggaactctggtcattgtctcctca

SEQ ID NO: 15287 - DNA, 292 bp, Homo sapiens
  source 1..292: mol_type = other DNA
tgcagcctctggattccccttcagtaactatgacatgaactgggtccgccaggctccagggaaggggctggaatatgtctcggctatcaatgatgttgggaacacattctacgttgactccgcgaagggccggttcaccatctccagagacatttctaagaacacagtgtatctgcaaatggagagtctgagagccgacgacacggccgtctattactgtgtgaaatcagcggtagctgctattccggcttggttgaactggggccagggaactctggtcattgtctcctca

SEQ ID NO: 15288 - DNA, 292 bp, Homo sapiens
  source 1..292: mol_type = other DNA
tgtaggctctggattcacctttagcagctatgccctgagctgggtccgccaggctccagggaaggggctggaatatgtctcggctatcaatagtggtgggaacacatactacgttgactccgcgaagggccggttcaccatctccagagacatttccaagaacacactgtatctgcaaatggagagtctgagagccgaggacacggccgtctattactgtgtgaaatcagcggtagctgctattccggcttggttgaactggggccagggaactctggtcattgtctcctca

SEQ ID NO: 15289 - DNA, 307 bp, Homo sapiens
  source 1..307: mol_type = other DNA
tgcagcctctggattcaccttcagtgactactacatgagctggatccgccaggctccagggatggggctggaatggatttcatacattagtgctagtagtagtaacacactctacgcagactctgtgaagggccgattcaccatctccagagacagcgccaagaactcactgtatctgcaaatgaacagcctgagagccgaggacacggccgtgtattactgtgcgagagacgtctccacctacgatggtcactccgtcttcgcttttgatatctggggccaagggacaatggtcaccgtctcttca

SEQ ID NO: 15290 - DNA, 307 bp, Homo sapiens
  source 1..307: mol_type = other DNA
tgcagcctctggattcaccttcagtgactactacatgagctggatccgccaggctccagggatggggctggaatggatttcatacattagtgctagtggtagtgacacaaagtacgcagactctgtgaaggggcgattcaccatctccagagacagcgccaagaactcactgtatctgcaaatgaacagcctgagagccgacgacacggccgtgtattactgtgcgagagacgtctccacctacgatggtcactccgtcttcgcttttgacatctggggccaagggacaatggtcaccgtctcttca

SEQ ID NO: 15291 - DNA, 307 bp, Homo sapiens
  source 1..307: mol_type = other DNA
tgcagcctctggattcaccttcagtgactactacatgagctggatccgccaggctccagggatggggctggaatggatttcatacattagtgctagtagtagtaacacaaactacgcagactctgtgaagggccgattcaccatctccagagacagcgccaagaactcactgtatctgcaaatgaacagcctgagagccgaggacacggccgtgtattactgtgcgagagacgtctccacctacgatggtcactccgtcttcgcttttgatatctggggccaagggacaatggtcaccgtctcttca

SEQ ID NO: 15292 - DNA, 298 bp, Homo sapiens
  source 1..298: mol_type = other DNA
tggtgtctctggtgtctccatagatcacaattactggagttggattcggcaggccccgggaaagggactggagtggattggttatgtgtcttatagtgggacaaccgactacaatccctccctcaggagtcgagccacgatatcatcagacacgtccaagaatgaggtcactctgaggctgacctctgtgaccgccgcggacacggccgtttattactgtgcgagtaacggctacaatgatggctatagtttaagtctggaccagtggggccagggaaccctggtcaccgtctcatca

SEQ ID NO: 15293 - DNA, 298 bp, Homo sapiens
  source 1..298: mol_type = other DNA
tactgtctctggtgtctccataaataacaattactggagttggattcgtcaggccccggggaagggactggagtggattggttatgtgtcttatagtgggacaaccgactacaatccctccctcagcagtcgagccacgatatcatcagacagtgccaagaatgaggtcaccctgaggctgagctctgtgaccgccgcggacacggccgtttattattgtgcgagtaacggctacaatgatggctatagtttaagtctggaccagtggggccagggaaccctggtcaccgtgtcatca

SEQ ID NO: 15294 - DNA, 286 bp, Homo sapiens
  source 1..286: mol_type = other DNA
tgcagcctctggattcacctttagcaactatgccatgagctgggtccgccaggctccagggaaggggctggagtgggtctcagccattagtggtagtggtggtagcacatactacgcagactccgtgaagggccggttcaccatctccagagacaattccaagagcacgctgtatctgcaaatgaacagcctgagagccgaggacacggccgtatattactgtgcgaaattggtaggatacagccctaactactggggccagggaaccctggtcaccgtctcctca

SEQ ID NO: 15295 - DNA, 286 bp, Homo sapiens
  source 1..286: mol_type = other DNA
tgcagcctctggattcacctttagcaactatgccatgagctgggtccgccaggctccagggaaggggctggagtgggtctcaggtattagtggcagtggtgatagcacatactacgcagactccgtgaagggccggttcaccatctccagagacaattccaagaacacgctgtatctgcaaatgaacagcctgagagccgaggacacggccgtatattactgtgcgaaattggtaggatacagccctaactactggggccagggaaccctggtcaccgtctcctca

SEQ ID NO: 15296 - DNA, 286 bp, Homo sapiens
  source 1..286: mol_type = other DNA
tgcagcctctggattcacctttagcaactatgccatgagctgggtccgccaggctccagggaaggggctggagtgggtctcagctattagtggtagtggtgatagcacatactacgcagactccgtgaagggccggttcaccatctccagagacaattccaagagcacgctgtttctgcaaatgaacagcctgagagccgaggacacggccgtatattactgtgcgaaattggtaggatacagccctaactactggggccagggaaccctggtcaccgtctcctca

SEQ ID NO: 15297 - DNA, 286 bp, Homo sapiens
  source 1..286: mol_type = other DNA
tgcagcctctggattcacctttagcaattatgccatgagctgggtccgccaggctccagggaaggggctggagtgggtctcagctattagtggcagtggtgatagcacatactacgcagactccgtgaagggccggttcaccatctccagagacaattccaagagcacgctgtttctgcaaatgaacagcctgagagccgaggacacggccgttttttactgtgcgaaattggtaggatacagccctaactactggggccagggaaccctggtcaccgtctcctca

SEQ ID NO: 15298 - DNA, 286 bp, Homo sapiens
  source 1..286: mol_type = other DNA
cagtgtctctggtggctccatcaataggtactactggaactggatccgccaggccccggggcagggactggagtggattgggtttatctatcacactgggaggaccaggtacaacccctccctcgcgagtcgactcaccatgtcagtggacacgtccaagagccgcctcttcctgaaacttgactctgttacccctgcggacacggccgtttattactgtgcgagtggcaataactggaattactttgacctctggggccagggaaccctggtcaccgtctcctca

SEQ ID NO: 15299 - DNA, 286 bp, Homo sapiens
  source 1..286: mol_type = other DNA
cagtgtctctggtggctccatcaataggtactactggaactggatccgccaggccccggggcagggactggagtggattgggtttatctatcacactgggaggaccaagtacaacccctccctcgcgagtcgactcaccatgtcagtggacacgtccaagagccgcctcttcctgagactggactctgttacccctgcggacacggccgtttattactgtgcgagtggcaataactggaattactttgacctctggggccagggaaccctggtcaccgtctcctca

SEQ ID NO: 15300 - DNA, 304 bp, Homo sapiens
  source 1..304: mol_type = other DNA
tgcaacctctggagtcacgttcaatgtctactccatgaactgggtccgccaggctccagggaaggggctagagtgggtctcatccataacaattaatactggttatactaactacgcagagtcagtgaggggccggttcaccatctccagagacaacgccaagaactcactgtttctggacatgaacagcctgagtgccggcgacacggctgtttattactgtgtgacagacaggcgaagatatagtagttcgcccgatgggtttgacagctggggccacggaaccctggtcaccgtctcctca

SEQ ID NO: 15301 - DNA, 304 bp, Homo sapiens
  source 1..304: mol_type = other DNA
tgcaacctctggagtcacgtccaatgtctactccatgaactgggtccgccaggctccagggaagggactagagtgggtctcatccataacaattaatactggttacactaactatgcagagtctgtgaggggccggttcaccatctccagagacaacgccaagaactcactgtttctggacatgaacagcctgagtgccgacgacacggctctttattactgtgtgacagacaggcgaagatatagtagttcgcccgatgggtttgacagctggggccacggaaccctggtcaccgtctcgtca

SEQ ID NO: 15302 - DNA, 288 bp, Homo sapiens
  source 1..288: mol_type = other DNA
gcttctggttacacctttaacagctatggtatcagctgggtgcggcaggcccctggacaggggcttgagtggatgggatggatcagcggttacaagggtaacacagagtatgcacagcagctccagggcagagtcaccatgaccacagacacatccacgaatatagtctacatggagctgaggagcctgagatctgaagacacggccgtgtattactgtgcgagaggcactacagtgagtccatactttgactactggggccagggaaccctggtcaccgtctcctca

SEQ ID NO: 15303 - DNA, 288 bp, Homo sapiens
  source 1..288: mol_type = other DNA
gcttctggttacacctttaacagctatggaatcagctgggtgcggcaggcccctggacaggggcttgagtggatgggatggatcagcggttacaggggtgacacagagtatgcacagcagttccagggcagagtcaccatgaccgcagacacatccacgaatatagtctacatggaactgaggagcctgagatttgaagacacggccgtgtattattgtgcgagaggcactacagtgagtccatactttgactactggggccagggaaccctggtcaccgtctcctca

SEQ ID NO: 15304 - DNA, 301 bp, Homo sapiens
  source 1..301: mol_type = other DNA
cactgtctctggtgcctccatcagcagtagtaatcactactgggcctgggtccgccagacccccgggaagggactggagtggattggcaacatcttctacactgggagcacctactacaacccgtccctcaacagtcgagtcaccatatcgctggacaggtccaagaaccagttctccctgaaggtgacctctgtgagcgccgcagacacggcagtatattactgtgcgaggcgaggggacagaaacttctactactacatagacgtctggggcaatgggaccacagtcaccgtctcctca

SEQ ID NO: 15305 - DNA, 301 bp, Homo sapiens
  source 1..301: mol_type = other DNA
cactgtctctggtgcctccatcagcagtagtaatcactactgggcctggatccgccagacccccgggaagggactggagtggattggcaacatcttctacactgggagcacctactacaacccgtccctcaacagtcgagtcaccatatcgctggacaggtccaagaaccagttctccctgaaggtgacctctgtgagcgccgctgacacggcagtatattactgtgcgaggcgaggggacagaaacttctactactacatagacgtctggggcaatgggaccacagtcaccgtctcctca

SEQ ID NO: 15306 - DNA, 299 bp, Homo sapiens
  source 1..299: mol_type = other DNA
tcatctccggggacagtgtctccagcaacagtgctgcctggaactggatcaggcagtccccatcgagaggccttgagtggctgggaaggacatactacagggtcaagtggtataatgattatgcagtgtctctgaagagtcgagtaatcatcagcccagacgcatccaagaaccagttctccctgcagttgaattatgtgactcccgacgacacggctgtgtatttctgcgccaagtgggatgctaacaaggtggcccttgactactggagccaggcaactctggtcaccgtctcctca

SEQ ID NO: 15307 - DNA, 299 bp, Homo sapiens
  source 1..299: mol_type = other DNA
tcatctccggggacagtgtctccagcaacagtgctgcctggaactggatcaggcagtccccatcgagaggccttgagtggctgggaaggacatactacaggtccaagtggtataatgattatgcagtgtctctgaagagtcgaataatcatcagcccagacgcatccaagaaccagttctccctgcagttgaattatgtgactcccgacgacacggctgtgtatttctgcgccaagtgggatgctaacaaggtggcccttgactactggagccaggcaactctggtcaccgtctcctca

SEQ ID NO: 15308 - DNA, 299 bp, Homo sapiens
  source 1..299: mol_type = other DNA
gcatctccggggacagtgtctctagcaacactgctgcttggaactggatcaggcagtccccatcgagcggccttgagtggctgggaaggacatactacaggtccaagtggtataatgattatgcagtgtctgtgaatagtcgaataatcatcaactcagacacatccaagaaccagttctccctgcagctgaagtctgtgactcccgaagacacagctgtctattactgtgccaagtgggacgctaacaaggtggcccttgactactggggccagggaaccctggtcacagtctcctca

SEQ ID NO: 15309 - DNA, 299 bp, Homo sapiens
  source 1..299: mol_type = other DNA
gcatctccggggacagtgtctctagcaacactgctgcttggaactggatcaggcagtccccatcgagaggccttgagtggctgggaaggacatactacaggtccaagtggtataatgattatgcagtgtctgtgaatagtcgaataatcatcaactcagacacatccaagaaccagttctccctgcagctgaagtctgtgactcccgaagacacagctgtctattactgtgccaagtgggacgctaacaaggtagcccttgactactggggccagggaaccctggtcacagtctcctca

SEQ ID NO: 15310 - DNA, 316 bp, Homo sapiens
  source 1..316: mol_type = other DNA
tgaaggctctggattcagctttgatgactatggcctgaattgggtccgccaagttccaggaaaggggctggagtgggtctctggcattaatcggagtgggaatagaacagaatatgtagactctgtgaagggccgattcaccatctccagagacaacgccaagaactccctgtatctgcaaatgaacagtctgagagccgaggacaccgccttctatttctgcacgagggagggtgtgaagtggacggtccgcatggggcggcggagtggtgcttttgatatctggggccaagggacactggtcaccgtctcttca

SEQ ID NO: 15311 - DNA, 316 bp, Homo sapiens
  source 1..316: mol_type = other DNA
tgcagcctctggattcacctttgaagattatggcctgagttgggtccgccaagttccagggaagggactggagtgggtctctggtattaatcgcagtggtaatagaacagaatatgtagactctgtgaagggccgattcaccatctccagagacaacgccaagaactccctctatctgcaaatgaacagtctgagagccgaggacaccgccttgtatttctgtacgagggagggtgtgaagtggacggtccgcatggggcggcggagtggtgcttttgatatctggggccaagggacactggtcaccgtctcttca

SEQ ID NO: 15312 - DNA, 316 bp, Homo sapiens
  source 1..316: mol_type = other DNA
tgcagcctctggattcagcttcgatgattatggcctgagttgggtccgccaagttccagggaaggggctggagtgggtctctggaattaatcgcagtggtaatagaacagaatatgtagactctgtgaagggccgattcaccatctccagagacaacgccaagaactccctgtatctgcaaatgaacagtctgagagccgaggacaccgccttgtatttctgtacgagggagggtgtgaagtggacggtccgcatggggcggcggagtggtgcctttgatatctggggccaagggacactggtcaccgtctcttca

SEQ ID NO: 15313 - DNA, 304 bp, Homo sapiens
  source 1..304: mol_type = other DNA
cactgtctctggtggctccttcagttcttcctactgggcttggctccgccagtccccggggaagggattggaatggattggctatcattactacactgagaccgccgactataacccctccctcaagagtcgagctaccatatccctagacacgtccaggaaccaattctccctgaagctgacctctgtgaccgctgcggactccgccgtgtattactgtgcgaccaggtcccttaacaaatggctacaattagatgatgcttttgatacctggggcccagggacactggtcaccgtctctgca

SEQ ID NO: 15314 - DNA, 304 bp, Homo sapiens
  source 1..304: mol_type = other DNA
cactgtctctggtggctccttcagttcttcttactggagttggatccggcagtccccggggaagggactggaatggattggctatcactactatactgagaccaccgattacaacccctccttcaaggatcgggcaaccatatcactagacacgtccaagaaccaattctccctgaaactgacctctgtgaccgctgcggacaccgccgtgtattactgtgcgaccaggtcccttaacaaatggctacaattagatgatgcttttgatacctggggccaagggacattggtcaccgtctcttca

SEQ ID NO: 15315 - DNA, 298 bp, Homo sapiens
  source 1..298: mol_type = other DNA
cactgtctctggtggctccatcagtagttactactggagctggatccggcagcccccagggaagcgactggagtggattggctatatctattccagtgggagcaccaactacaacccctccctcaagagtcgagtcaccatatcagtagacacgtccaagaaccagttctccctgaagctgagctctgtgaccgctgcggactcggccgtttattactgtgcgagagtctacgatttttcgagtggttattattattatgactactggggccagggaaccctggtcaccgtctcctca

SEQ ID NO: 15316 - DNA, 298 bp, Homo sapiens
  source 1..298: mol_type = other DNA
cactgtctctggtggctccatcagtggttactactggagctggatccggcagcccccagggaagggactggagtggattggctatatctatttcagtgggaacaccaactacaacccctccctcaagagtcgagtcaccatgtcagtagacacgtccaagaaccagttctccatgaagttgagctctgtgaccgctgcggactcggccgtttattactgtgcgagagtatacgatttttcgagtggttattattattatgactactggggccagggaacccaggtcaccgtctcctca

SEQ ID NO: 15317 - DNA, 322 bp, Homo sapiens
  source 1..322: mol_type = other DNA
cacggtctttggtgcctccgtctataatttctactggagttggattcggcagcccccggggaagggactggagtggattggggacatctattatagtgagatcaccaactataacccgtccctcagtgggagcaccaagtatcatccctcactccagagtcgagtcgccatttcagtggacacgtcgaagaaccaggtgtccttgaagctgacgtctgtgagtgctgcggacacggccgtttatttttgtgcgagagaggatgttagtggatctatgtacatcgaagtctggggcaaggggaccacggtcatcgtctcctca

SEQ ID NO: 15318 - DNA, 322 bp, Homo sapiens
  source 1..322: mol_type = other DNA
cacggtctttggtgcctccgtctataatttctactggagttggattcggcagcccccggggaagggactggagtggattggggacatctattatagtgaaatcaccaactataacccgtccctcagtgggagcaccaagtatcatccctcactccagagtcgagtcgccatttcagtggacacgtcgaagaaccaggtgtccttgaagctgacgtctgtgagtgctgcggacacggccgtgtatttttgtgcgagagaggatgttagtggatctatgtacatcgaagtctggggcaaggggaccacggtcatcgtctcctca

SEQ ID NO: 15319 - DNA, 280 bp, Homo sapiens
  source 1..280: mol_type = other DNA
tgcagcctctggattcaccttcaggaactctgacatgagctgggtccgccaggctccagggaaggggctggactgggtttcatacatcagtagaagtagtagtaccatatactatgcagactctgtgaagggccgattcaccatctccagagacaatgccaagagctcactgtatctgcaaatgaacagcctgagagacgaggacacggctgtatattactgtgtgagagcctggcccccgggggactggggccagggaaccctggtcaccgtctcctca

SEQ ID NO: 15320 - DNA, 280 bp, Homo sapiens
  source 1..280: mol_type = other DNA
tgcagcctctggattcaccttcaggaactctgacatgagctgggtccgccaggctccagggaaggggctggtctgggtttcatacatcagtacaagtagtagtatcatatactatgcagactctgtgaagggccgattcaccgtctccagagacaatgccaagaactcactgtatctgcaaatgaacagcctgagagacgaggacacgggtgtatattactgtgtgagagcctggcccccgggggactggggccagggaaccctggtcaccgtctcctca

SEQ ID NO: 15321 - DNA, 307 bp, Homo sapiens
  source 1..307: mol_type = other DNA
tgcagcctctggattcacctttagcttctatgtcatgagctgggtccgccaggctccagggaaggggctggagtgggtttcaggtattagtggtagtggtggtagcacatactacgcagactccgtgaagggccggttcaccatctccagagacaattccaagaacatgctgtatctgcaaatgaacagcctgagagtcgaggacacggccgtatactactgtgtgaaatgggggcttgatcagcattcctatgatagtagtggttattactcatggggccagggaaccctggtcaccgtctcctca

SEQ ID NO: 15322 - DNA, 307 bp, Homo sapiens
  source 1..307: mol_type = other DNA
tgcagcctctggattcacctttagcttctatgtcatgagttgggtccgccaggccccagggaaggggctggagtgggtctcaggtattagtggtagtggtggcagcacataccacgcagactccgtgaagggccggttcaccatctccagagacaactccaagaacatgttatatctgcaaatgaacagcctgagagtcgaggacacggccttatactactgtgtgaaatggggccttgatcagcactcctatgatagtagtggttattactcatggggccagggaaccctggtcaccgtctcctca

SEQ ID NO: 15323 - DNA, 286 bp, Homo sapiens
  source 1..286: mol_type = other DNA
cactgtcgctgatggctccatcagcagtggtggttactactggaactggctccgccagcacccagggaagggcctggagtggattgggtacatctctcacagtggggacacctactacaacccgtccctgaagagtcgagtcagcatatcagtaggcacgtctaagaaccagttctccctgaaactaggctctgttactgccgcggacacggccgtgtattactgtgcgagagggtacagttggctcgacccctggggccagggaaccctggtcaccgtctcctca

SEQ ID NO: 15324 - DNA, 286 bp, Homo sapiens
  source 1..286: mol_type = other DNA
cactgtcgctgatggctccatcagcagtggtggttactactggaactggctccgccagcacccagggaagggcctggagtggattgggtacatctctcacagtggggacacctactacaacccgtccctgaagagtcgagtcagcatatcagtaggcacgtctaagaaccagttctccctgaaactagggtctgttactgccgcggacacggccgtgtattactgtgcgagagggtacagttggctcgacccctggggccagggaaccctggtcaccgtctcctca

SEQ ID NO: 15325 - DNA, 313 bp, Homo sapiens
  source 1..313: mol_type = other DNA
tgcagcctctggattcaccttcagtagctatgctatgcactgggtccgccaggctccagggaagggactggaatctgtttcagttattactagtaatggggctagcacatattatgcaaactctgtgaggggcagattcaccatctccagagacaattccaagaacacgctgtatcttcaaatgggcagcctgagacctgaggacatggctgtgtattactgtgcgagggatgggccctattgtggtggtgattgcaatccctactactacttcgatctctggggccgtggcaccctggtcactgtctcctca

SEQ ID NO: 15326 - DNA, 313 bp, Homo sapiens
  source 1..313: mol_type = other DNA
tgcagcctctggattcaccttcagtaactatgctatgcactgggtccgccaggctccagggaagggactggaatctgtttcagttattactagtaatggggctaccacatattatgcaaagtctgtgaggggcagattcgccatctccagagacaattccaagaacacgctgtatcttcaaatgggcagcctgagacctgaggacatggctgtgtattactgtgcgagggatgggccctattgtggtggtgattgcaatccctactactacttcgatctctggggccgtggcaccctggtcactgtctcctca

SEQ ID NO: 15327 - DNA, 292 bp, Homo sapiens
  source 1..292: mol_type = other DNA
cactgtctctggtggctccatcagtattttctactggagctggatccggcagcccccggggaagggactggagtggattggctatgtctatcatactggggacaccaactacaacccctccctcaagagtcgagtcaccatatcggtcgacacgtccaagaacaagttctccctgaaactgacctctgtgaccgctgcggacacggccgtgtattactgtgcgaaacaatattatgataggagtggggggttcgacccctggggccagggaaccctggtcaccgtctcctca

SEQ ID NO: 15328 - DNA, 292 bp, Homo sapiens
  source 1..292: mol_type = other DNA
cactgtctctggtggctccatcagtattttctactggagctggatccggcagcccccggggaagggactggagtggattggctatgtctatcatactggggacaccaattacaacccctccctcaagagtcgagtcaccatatcggtcgacacgtccaagaacaagttctccctgaaactgacctctgtgaccgctgcggacacggccgtgtattactgtgcgaaacaatattatgataggagtggggggttcgacccctggggccagggaaccctggtcaccgtctcctca

SEQ ID NO: 15329 - DNA, 292 bp, Homo sapiens
  source 1..292: mol_type = other DNA
cactgtctctggtggctccatcagtattttctactggagctggatccggcagcccccggggaagggactggagtggattggctatgtctatcatactggggacaccaactacaacccctccctcaggagtcgagtcaccatgtcggtcgacacgtccaagaacaagttctccctgaaactgacctctgtgacccctgcggacacggccgtgtattactgtgcgaaacaatattatgataggagtggggggttcgacccctggggccagggaaccctggtcaccgtctcctca

SEQ ID NO: 15330 - DNA, 292 bp, Homo sapiens
  source 1..292: mol_type = other DNA
cactgtctctggtggctccatcagtattttctactggagctggatccggcaggccccggggaagggactggagtggattggctatgtctatcacactggggaaaccaactacaacccgtccctcaagagtcgagtcaccatatcggtcgacacgtccaagaacaagttctccctgaaactgacctctgtgaccgctgcggacacggccgtatattactgtgcgaaacaatattatgataggagtggggggttcgacccctggggccagggaaccctggtcaccgtctcctca

SEQ ID NO: 15331 - DNA, 301 bp, Homo sapiens
  source 1..301: mol_type = other DNA
tacagcctctagattcacctttagcaactatgtcatgacctgggtccgccaggctccaggggagggactggagtgcgtctcatctattagtcctactggtgatagcacattctacgcagactccgtgaggggccgcttcaccatctccagagacagttccaagaacaccctgtatctgcaaatgaacagcctgagagtcgaggacaccgccctatatttctgtgcgagaggtcagcgatataccaacgcgccttactacatggacgtctggggcaaagggaccacggtcaccgtctcctca

SEQ ID NO: 15332 - DNA, 301 bp, Homo sapiens
  source 1..301: mol_type = other DNA
tacagcctctagattcacctttaccaactatgtcatgacctgggtccgccaggctccagggaagggactggagtgcgtctcttctcttagtcctactggtgatagcaccttctacgcagactccgtgaggggccgcttcaccatctccagagacagttccaagaacaccctgtatctgcaaatgaacagcctgagagtcgaggacaccgccctgtatttctgtgcgagaggtcagcgatataccaacgcgccttactacatggacgtctggggcaaagggaccacggtcaccgtctcctca

SEQ ID NO: 15333 - DNA, 301 bp, Homo sapiens
  source 1..301: mol_type = other DNA
tacagcctctagattcacctttaccaactatgtcatgacctgggtccgccaggctccaggggagggactggagtgcgtctcttctcttagtcctactggtgatagcaccttctacgcagactccgtgaggggccgcttcaccatctccagagacagttccaagaacaccctgtatctgcaaatgaacagcctgagagtcgaggacaccgccctgtatttctgtgcgagaggtcagcgatataccaacgcgccttactacatggacgtctggggcaaagggaccacggtcaccgtctcctca

SEQ ID NO: 15334 - DNA, 301 bp, Homo sapiens
  source 1..301: mol_type = other DNA
tacagcctctagattcacctttagcaactatgtcatgacctgggtccgccaggctccaggggagggactggagtgcgtctcatctattagtcctactggtgatagcacattctacgcagactccgtgaggggccgcttcaccatctccagagacagttccaagaacaccctgtatctgcaaatgaacagcctgagagtcgaggacaccgccctatacttctgtgcgagaggtcagcgatataccaacgcgccttactacatggacgtctggggcaaagggaccacggtcaccgtctcctca

SEQ ID NO: 15335 - DNA, 304 bp, Homo sapiens
  source 1..304: mol_type = other DNA
tgcagcctctggattcacctttgccacctattggatgacctgggtccgccggtctccagggaaggggctgcagtgggtggccaacataaagcaagatggaagtgagaaatactatgtggactctgtgaagggccgattcaccatctccagagacaacgccgagaactcactgtatctgcagatgaacagcctgagagtcgaggacacggccatgtattactgtgcgagaggggacttacctagcagcagctggtactgggcttttgatatctggggccaagggacaatggtcaccgtctcttca

SEQ ID NO: 15336 - DNA, 304 bp, Homo sapiens
  source 1..304: mol_type = other DNA
tgcagcctctggattcacctttagcagctattggatgacctgggtccgccggtctccagggagggggctgcagtgggtggccaacataaagcaagatggaaatgagaaatactatgtggactctgtgaagggccgattcaccatctccagagacaacgccgagaactcactgtatctgcagatgaacagcctgagagtcgaggacacggccatctattactgtgccagaggggacttgcctagcagcagctggtactgggcttttgatatctggggccaagggacaatggtcaccgtctcttca

SEQ ID NO: 15337 - DNA, 289 bp, Homo sapiens
  source 1..289: mol_type = other DNA
tgtaggctctggattcacctttggtagtcattggatgaactgggtccgcctacctccaggtaaggggctggagtgggtcgccaatttagggcaagatggaagtgagaaatactctctggactctgtgaagggccgattcaccgtctccagagacaacgccaagaactcactgtttctgcaaatgaacagcctgagagtcgaggacacggccgtatattactgtgcagccagtacagtgggagcaacgattgcctactggggccagggaaccctggtcaccgtctcctca

SEQ ID NO: 15338 - DNA, 289 bp, Homo sapiens
  source 1..289: mol_type = other DNA
tgtaggctctggattcacctttggtagtcattggatgaactgggtccgcctacctccaggtaaggggctggagtgggtcgccaatttagggcaagatggaagtgagaaatactctctggactctgtgaagggccgattcaccgtctccagagacaacgccaagaactcactgtttctgcaaatgaacagcctgagagtcgaggacacggccgtatattactgtgcagccagtacagtgggagctacgattgcctactggggccagggaaccctggtcaccgtctcctca

SEQ ID NO: 15339 - DNA, 292 bp, Homo sapiens
  source 1..292: mol_type = other DNA
tgcagcctctaaattccccttcagtacatataccatgaactgggtccgccaggctccagggaaggggctggagtgggtctcatccattagtagtagtagttcttacatattctacgcagactcagtgaagggccgattcaccatctccagagacaacgccaagaactcactgtatctgcaaatgaacagcctgagagccgaagacacggctgtgtattactgtgcgagaatcggtagcagctcggccgactttgactcctggggccagggaaccctggtcaccgtctcctca

SEQ ID NO: 15340 - DNA, 292 bp, Homo sapiens
  source 1..292: mol_type = other DNA
tgcaacctctagattccccttcagtacatataccatgaactgggtccgccaggctccagggaaggggctggagtgggtcgcatccattagtagtactagttcttacatattctacgcagactcagtgaagggccgattcaccgtctccagagacaacgccaagaactcactgtatctgcaaatgaacagcctgacagccgaggacacggctgtgtattactgtgcgagaatcggcagcagctcggccgactttgactcctggggccagggaaccctggtcaccgtctcctca

SEQ ID NO: 15341 - DNA, 295 bp, Homo sapiens
  source 1..295: mol_type = other DNA
tgcagcctctggattcacctttagtaattactggatgcattggctccgccaagttccagggaaggggctggtgtgggtctcatgcattcatggtgacggtgctacatcttacgcggactccgtggagggccgattcaccatctccagagacaacgccaagaacactctatatctgcaaatggacagtctgagagccgaggacacggctttttattactgtgcaagagaggggggagtgggcggtcctggctggttcgacccctggggccagggagccctggtcaccgtctcctca

SEQ ID NO: 15342 - DNA, 295 bp, Homo sapiens
  source 1..295: mol_type = other DNA
tgcagcctctggattcaccttcagtaattactggatgcattggctccgccaagttccagggaaggggctggtgtgggtctcatgcattcatggtgacgggactacgtcttacgcggactccgtggagggccgattcaccatctccagagacaacgccaagaacactctatatctgcaaatggacagtctgagagccgaggacacggctttttattactgtgcaagagagggtggagtgggcggtcctggctggttcgacccctggggccagggagccctggtcaccgtctcctca

SEQ ID NO: 15343 - DNA, 295 bp, Homo sapiens
  source 1..295: mol_type = other DNA
tgcagcctctggattcacttttagtaattactggatgcattggctccgccaagttccagggaaggggctggtgtgggtctcatgcattcatggtgacggtgctacatcttacgcggactccgtggagggccgattcaccatctccagagacaacgccaagaacactctatatctgcaaatggacagtctgagagccgaggacacggctttttattactgtgcaagagaggggggagtgggcggtcctggctggttcgacccctggggccagggagccctggtcaccgtctcctca

SEQ ID NO: 15344 - DNA, 286 bp, Homo sapiens
  source 1..286: mol_type = other DNA
tgcagcctctggattcagcgtcagtagcatctacatgagctgggtccgccagactcctgggaaggggctggagtgggtctcacttattcacatcagtggtagcacaacgaacgcagactccgtgaagggccgattcaccatctccagagacatttccaagaacacggtgtatgttcaaatgaacagcctgagagccgaggacacggccgtctattactgtgcgagaggacgggggacatgggctttcgatgcctggggcccggggacaatggtcaccgtctcttca

SEQ ID NO: 15345 - DNA, 286 bp, Homo sapiens
  source 1..286: mol_type = other DNA
tgcagcctctggattcagcgtcagtagcatctacatgagctgggtccgccagactcctgggaaggggctggagtgggtctcactcattcacatcaatggaaggacaacgaacgcagactccgtgacgggccgattcaccatctccagagacatttccaagaacacggtgtatgttcaaatgaacagcctgagagtcgaggacacggccgtctattactgtgcgagaggacgggggacatgggctttcgatgcctggggcccggggacaatggtcaccgtctcttca

SEQ ID NO: 15346 - DNA, 286 bp, Homo sapiens
  source 1..286: mol_type = other DNA
tgcagcctctggattcagcgtcagtagcatctacatgagctgggtccgccagactcctgggaaggggctggagtgggtctcacttattcacatcaatggtagaacaacgaacgcagactccgtgaggggccgattcaccatctccagagacatttccaagaacaccgtggatgttcaaatgaacagcctcagagccgaggacacggccgtctattactgtgcgcgaggacgggggacatgggctttcgatgcctggggcccggggacaatggtcaccgtctcttca

SEQ ID NO: 15347 - DNA, 334 bp, Homo sapiens
  source 1..334: mol_type = other DNA
tacagcttctgggttcaactttggtgattatggtatgacctgggtccgccaggctccagggaaggggctggagtggatagggttcattaaaagccatcattacggtgggacaacagagtacgccgcgtctgtgaaaggccgattcaccatctcaagagatgattccaatagcatcggctatctgcaaatgaacagcctgaaaaccgaggacacagccgtgtattactgtactagagatatccattacggtttctggagtggccgcgggcgcaattggcctcgaattgccctaattgactcctggggccagggaaccctggtcaccgtctcctca

SEQ ID NO: 15348 - DNA, 334 bp, Homo sapiens
  source 1..334: mol_type = other DNA
tacagcttctgggttcaactttggtgattatggtatgacctgggtccgccaggctccagggaaggggctggagtggatagggttcattaaaagccatcattacggtgggacaacagagtacgccgcgtctgtgaaaggccgattcaccatctcaagagatgattccaatagcatcggctatctgcaaatgaacagcctgaaaaccgaggacacagccgtgtattactgtactagagatatccattacggtttctggagtggccgcgggcgcaattggccccgaattgccctaattgactcctggggccagggaaccctggtcaccgtctcctca

SEQ ID NO: 15349 - DNA, 334 bp, Homo sapiens
  source 1..334: mol_type = other DNA
tacagcttctgggttcaactttggtgattatggtatgacctgggtccgccaggctccagggaaggggctggagtggatagggttcattaaaagccatcattacgatgggacaacagagtacgccgcgtctgtgaaaggccgattcaccatctcaagagatgattccaatagcatcggctatctgcaaatgaacagcctgaaaaccgaggacacagccgtgtattactgtactagagatatccattacggtttctggagtggccgcgggcgcaattggccccgaattgccctaattgactcctggggccagggaaccctggtcaccgtctcctca

SEQ ID NO: 15350 - DNA, 279 bp, Homo sapiens
  source 1..279: mol_type = other DNA
gcttctggatacaccttcaccacttatgatatccactgggtgcgacaggccagtggacaagggcttgagtggatgggatggatgaaccctcatagtggaaacacaggctacgcacagatcttccagggcagagtcaccatgaccagggacacctccataagcacagcctacatggagctgagcagcctgacatctgacgacacggccctgtattactgtacgagacgccctttcccctccgagtactggggccagggaaccctggtcaccgtctcctca

SEQ ID NO: 15351 - DNA, 279 bp, Homo sapiens
  source 1..279: mol_type = other DNA
gcttctggatacaccttcaccacttatgatatccactgggtgcgacaggccagtggacaagggcttgagtggatgggatggatgaaccctcatagtggaaacacaggctacgcacagaacttccagggcagagtcaccatgaccagggacacctccataagcacagcctatatggagctgagcagcctgacatctgacgacacggccctctattactgtacgagacgccctttcccctccgagtactggggccagggaaccctggtcaccgtctcctca

SEQ ID NO: 15352 - DNA, 286 bp, Homo sapiens
  source 1..286: mol_type = other DNA
tgaagtctctggactccccttcagcagtaattggatgagctggctccgcctggctccaggaaaggggcttgagtgggtggccaacataaacccagatggaggtggggaaaactatttggactctgtgaagggccgattcaccatctccagagacaacgccaagaatttactgtctctgcaaatgagcagcctgagagccgaagacacctctgtttattactgtgcgagagatggtcgtggtttttcgctcaactggggccagggaacacaggtcaccgtctcctca

SEQ ID NO: 15353 - DNA, 286 bp, Homo sapiens
  source 1..286: mol_type = other DNA
tgaagtctctggactccccttcagcagtaattggatgagctggctccgcctggctccaggaaaggggcttgagtgggtggccaacatagacccagatggaggtggggaaaactatttggactctgtgaagggccgattcaccatctccagagacaacgccagaaattttctgtttctgcaaatgagcagcctgagagccgaagacacctctgtttattactgtgcgagagatggtcgtggtttttcgctcaactggggccagggaacacaggtcaccgtctcctca

SEQ ID NO: 15354 - DNA, 304 bp, Homo sapiens
  source 1..304: mol_type = other DNA
cagtgtctctggtggctccatcagtacttactactggagctggatccggcagcccccagggaagggactggagtggattggatttatctctgacagtgggaacaccaactacaacccctccctcaagagtcgagtcaccatatcagtagacacgtccaagaaccagttctccctgaagctgaactttgtgaccgccgcagacacggccgtgtattactgtgcgagacatggacccgattgtactagtaccacctgctaccaatttgactactggggccagggaaccctggtcaccgtctcctca

SEQ ID NO: 15355 - DNA, 304 bp, Homo sapiens
  source 1..304: mol_type = other DNA
cactgtctctggcggctccatcagtacttactactggagctggatccggcagcccccagggaagggactggagtggcttggatttatctctgacagtgggagcaccaactacaacccctccctcgagagtcgagtcaccatatcagtagacacgtccaagaaccagttctccctgaagctgaactttgtgaccgccgcagacacggccgtgtattactgtgcgagacatggacccgattgtactagtaccacctgctaccaatttgactactggggccagggatccctggtcaccgtctcctca

SEQ ID NO: 15356 - DNA, 304 bp, Homo sapiens; identical to SEQ ID NO: 15355
  source 1..304: mol_type = other DNA

SEQ ID NO: 15357 - DNA, 303 bp, Homo sapiens
  source 1..303: mol_type = other DNA
gcttctggttacagctttaccaattatgctatcagctgggtgcgacaggcccctggacaagggcttgagtggatgggatggatcaacgttaacaacggtaacacagactatccacagaagttccagggtagagtcaccatgtccacagatagattaacgaccactgtgtacatggagctgaggagcctgagatctgacgacacggccgtgtattactgtgcgagagatcgtagaattgggactatggttactcaaagcggcatggacgtctggggcaatgggaccacggtcaccgtctcctca

SEQ ID NO: 15358 - DNA, 303 bp, Homo sapiens
  source 1..303: mol_type = other DNA
gcttctggttacagctttagcaattatgctataagctgggtgcgacaggcccctggacaagggcttgagtggatgggatggatcaacgttaacaacggtaacacagactatccacagaagttccagggtagagtcaccatgtctacagatagattaacgaccactgtgtatatggagctgaggagcctgagatatgacgacacggccgtgtattattgtgcgagagatcgtagaattgggactatggttactcaaagcggcatggacgtctggggcaatgggaccacggtcaccgtctcctca

SEQ ID NO: 15359 - DNA, 303 bp, Homo sapiens
  source 1..303: mol_type = other DNA
gcttctggttacacctttaccaattatgctatcagttgggtgcgacaggcccctgggcaagggcttgagtggatgggatggatcaacgttaacaacggtaacacagactatccacagaagttccagggtagagtcaccctgtccatagatagattaacgaccactgtgtacatggagctgaggagcctgagatctgacgacacggccgtgtactactgtgcgagagatcgtagaattgggactatggtgactcaaagcggcatggacgtctggggcaatgggaccacggtgaccgtctcctca

SEQ ID NO: 15360 - DNA, 292 bp, Homo sapiens
  source 1..292: mol_type = other DNA
tgcagcctctggattcacctttagtgacgattcgatgagctgggtccgccaggctccagggaaggggctggagtgggtggccaacataaagaaagatggaagtgagaaatactatgtggactctgtgaagggccgattcaccatctccagagacaacgccaagaactcactgtacctgcaaatgaatagcctgagagccgaggacacggccgtgtattattgtgccagaggttggggtctaagatatatatttgactactggggcccgggaaccctggtcaccgtctcctca

SEQ ID NO: 15361 - DNA, 292 bp, Homo sapiens
  source 1..292: mol_type = other DNA
tgcagcctctggattcacctttagtagcgattcgatgagctgggtccgccaggctccagggaaggggctggagtgggtggccaacataaagaaagatggaagtgagaaatactatgtggactctgtgaagggccgattcaccatctccagagacaacgccaagaactcactgtatctgcaaatgaatagcctgagagccgaggacacggccgtgtattattgtgccagaggttggggtctaagatatatatttgactactggggcccgggaaccctggtcaccgtctcctca

SEQ ID NO: 15362 - DNA, 292 bp, Homo sapiens
  source 1..292: mol_type = other DNA
tgcagcctctggattcatctttagtgacgattcgatgagctgggtccgccaggctccagggaaggggctggagtgggtggccaacataaacaaagatggaaatgagaaatacttcgcggactctgtgaagggccgattcaccatctccagagacaacgccaagaactcactgtctctgcaaatgaatagcctgagagccgaggacacggccgtgtattattgtgccagaggttggggtctaagatatatatttgactactggggcccgggaaccctggtcaccgtctcctca

SEQ ID NO: 15363 - DNA, 298 bp, Homo sapiens
  source 1..298: mol_type = other DNA
tgtagcctctggatttacccttagcacccatgccatgacttgggtccgccaggctccagggaaggggctggagtgggtctcatctattagtgttggtggtgattacacatactacatagactccgtgaagggccggttcaccatctccagagacaattccaagaacacgttgtatctgcaaatgaacagcctgagagtcgaggacacggccatatattactgtgcgaaatttcagtcagtgactggtaaggcgacctttgactactggggccggggagccctggtcaccgtctcctca

SEQ ID NO: 15364 - DNA, 298 bp, Homo sapiens
  source 1..298: mol_type = other DNA
tgtaggctctggattgacccttagtacctatgctatgacctgggtccgccaggctccagggaaggggctggagtgggtctcagctatgagtcttagtggtgagaacacatactacacagactccgtgaggggccggttcaccatctccagagacaactccaagaacacgctgtatctgcaaatgaacagcctgagagtcgaggacacggccatatattactgtgcgaaatttcagtcagtgactggtaaggcgacctttgactactggggccggggagccctggtcaccgtctcctca

SEQ ID NO: 15365 - DNA, 295 bp, Homo sapiens
  source 1..295: mol_type = other DNA
tgtagcctctggatttactcttaccacctatgccatgacctgggtccgccaggctccagggaaggggctggagtgggtctcagccattaatgtgattgataccacatactacacagactccgtgaggggccggttcaccatctccagagacaattccaagaacacactgtatctgcaaatgaacagcctgagagtcgaggacacggccatatattactgtgcgaaatttcagtcagtgactggtaaggcgacctttgactactggggccggggagccctggtcaccgtctcctca

SEQ ID NO: 15366 - DNA, 292 bp, Homo sapiens
  source 1..292: mol_type = other DNA
tgcagcctctggattcacctttaatacctgctggatgaactgggtccgccaggctccagggaaggggctggagtgggtggccaacataaagcaggactcaagtgagaaacactttgcagactctgtgaagggccggttcaccatctccagagacaacgccaagaattcactgtatctgcaaatggacaacctgagagacgaggacacggccgtgtattactgtgtgagaagctgttcgagaaccgctcctagagacttctggggccagggaaccctggtcaccgtctcctca

SEQ ID NO: 15367 - DNA, 292 bp, Homo sapiens
  source 1..292: mol_type = other DNA
tgcagcctctggattcacctttaagacctgctggatgaactgggtccgccaggctccagggaaggggctggagtgggtggccaatataaagccggactccagtgacaaaggctttgcagactctgtgaggggccggttcaccatctccagagacaacgccaagaactcactgtttctgcaaatgaacaacctaagagacgaggacacggccgtatattactgtgtgagaagctgttcgagaaccgctcctagagacttctggggccagggaaccctggtcaccgtctcctcg

SEQ ID NO: 15368 - DNA, 319 bp, Homo sapiens
  source 1..319: mol_type = other DNA
tgcggcctctggattcacctttaacagctttcccatgacctgggtccgccaggctccagggaaggggctggagtgggtctcagctattagtggtagtggtggtaccacatacttcgcagactccgtgaagggccggttcaccatctccagagacaattccaagagtacgctgtatctccaaatgaacagcctgagagccgaggacacggccgtatattactgtgcgaggaggggggattgtagtggtggtagctgctattactactactactcctacatggacgtctggggcaaagggaccacggtcaccgtctcctca

SEQ ID NO: 15369 - DNA, 319 bp, Homo sapiens
  source 1..319: mol_type = other DNA
tgcggcctctggattcacctttagcagctttcccatgacctgggtccgccagtctccagggaaggggctggagtgggtctcagctattagcggtagtggtggtaccacatactacgcagactccgtgaagggccggttcaccatctccagagacaactccaggagtacgctgtatctccagatggacagcctgagagccgaggacacggccttatattactgtgcgaggaggggggattgtagtggtggtagttgttattattactattattcctacatggacgtctggggcaaagggaccacggtcaccgtctcccca

SEQ ID NO: 15370 - DNA, 319 bp, Homo sapiens
  source 1..319: mol_type = other DNA
tgcggcctctggattcacctttagcagctttcccatgacctgggtccgccagtctccagggaaggggctggagtggctctcagctattagcgggagtggtggtaccacatactacgcagactccgtgaagggccggttcaccatctccagagacaactccaggagtacgctgtatctccagatgggcagcctgagagccgaggacacggccttatattactgtgcgaggaggggggattgtagtggtggtagttgttattattactattattcctacatggacgtctggggcaaagggaccacggtcaccgtctcccca

SEQ ID NO: 15371 - DNA, 319 bp, Homo sapiens
  source 1..319: mol_type = other DNA
tgcggcctctggattcacctttagcaggtttcccatgacctgggtccgccaggctccagggaaggggctggagtgggtctcagctattagcggtagtggtggtaccacatactacgcagactccgtgaagggccggttcaccatctccagagacaactccaggagtacgctgtatctccagatggacagcctgagagccgaggacacggccttatattactgtgcgaggaggggggattgtagtggtggtagttgttattattactattattcctacatggacgtctggggcaaagggaccacggtcaccgtctcccca

SEQ ID NO: 15372 - DNA, 307 bp, Homo sapiens
  source 1..307: mol_type = other DNA
tgcagcctctggattcatttttagtagttattggatgagttgggtccgccaggctccagggaaggggctggagtgggtggccaacataaagcaagatggaagtgagaaatactatgtggactctgtgaagggccgattcaccatctccagagacaacgccaagaactcactgtatctgcaaatgaacagcctgagagccgaggacacggccgtgtatttctgtgcgagagaaccattgtgtagtactaaaaggtgcccacctcggttcgacccctggggccagggaaccctggtcaccatctcctca

SEQ ID NO: 15373 - DNA, 307 bp, Homo sapiens
  source 1..307: mol_type = other DNA
tgcagcctctggattcacttttagtagctattggatgagttgggtccgccaggctccagggaaggggctggagtgggtggccaacataaagcaagatggaagtgagaaatactatgtggactctgtgaagggccgattcaccatctccagagacaacgccaagaactcactatatctgcaaatgaacagcctgagagccgaggacacggccctgtatttctgtgcgagagaaccattgtgtagtactaaaaggtgtccacctcggttcgacccctggggccagggaaccctggtcaccgtctcctca

SEQ ID NO: 15374 - DNA, 325 bp, Homo sapiens
  source 1..325: mol_type = other DNA
cactgtctctggtggctccatcagcagtggtggttactactggagctggatccgccagcacccagggaagggcctggagtggattgggtacatctattacagtgggagcacctactacaacccgtccctcaagagtcgagttaccatatcagtagacacgtctaagaaccagttctccctgaagctgaactctgtgaccgccgcggacacggctgtgtattactgtgcgagaggtggataccactcaactcgccgccacccgccccgcaaaagagactattacatggacgtctggggcacagggaccacggtcaccgtctcctca

SEQ ID NO: 15375 - DNA, 325 bp, Homo sapiens
  source 1..325: mol_type = other DNA
cactgtctctggtggctccatcagcagtggtggtcactattggagctggatccgccagcacccagggaagggcctggagtggattggatacatctattacactgggagcacctactataacccgtccctcaagagtcgagttaccatatcactagacacgtctaagaaccaggtctccctgaggctgaactctgtgaccgccgcggacacggctgtgtattactgtgcgagaggtggataccactcaactcgccgccacccgccccgcaaaagagactattacatggacgtctggggcacagggaccacggtcaccgtctcctca

SEQ ID NO: 15376 - DNA, 325 bp, Homo sapiens
  source 1..325: mol_type = other DNA
cactgtctctggtggctccatcagcagtggtggttactactggagctggatccgccagcacccagggaagggcctggagtggattgggtacatctattacagtgggagcacctactacaacccgtccctcaagagtcgagttaccatatcagtagacacgtctaagaaccagttctccctgaagctgagctctgtgactgccgcggacacggccgtgtattactgtgcgagaggtggataccactcaactcgccgccacccgccccgcaaaagagactattacatggacgtctggggcacagggaccacggtcaccgtctcctca

SEQ ID NO: 15377 - DNA, 325 bp, Homo sapiens
  source 1..325: mol_type = other DNA
cattgtctctggcggctccatcagcagtggtggttactactggaactggatccgccagcgcccagggaagggcctggagtggattgggtacatctcttacagtgggagcaccttctacaacccgtccctcaatcgtcgagtcaccatatcagttgacacgtctaagaaccagttctccctgaagctgaactctgtgaccgccgcggacacggctgtgtattactgtgcgagaggtggataccactcaactcgccgccacccgccccgcaaaagagactattacatggacgtctggggcacagggaccacggtcaccgtctcctca

SEQ ID NO: 15378 - DNA, 325 bp, Homo sapiens
  source 1..325: mol_type = other DNA
ctctgtctctggtggctccgtcggcagtggtggttactactggagctggatccgccagcacccagggaagggcctggagtggattggatacatctattacagtgggaccacccattacatgccgtccctcaagagtcgagtcgccatatcactagccacgtccaagaaccagttctccctgaagctgaactctgtgaccgccgcggacacggctgtgtattactgtgcgagaggtggataccactcaactcgccgccacccgccccgcaaaagagactattacatggacgtctggggcacagggaccacggtcaccgtctcctca

SEQ ID NO: 15379 - DNA, 295 bp, Homo sapiens
  source 1..295: mol_type = other DNA
tgcagcctctggattcaccttcagtaactttggcatgcactgggtccgccaggctccagggaaggggctggagtgggtctcagctataggtgctaatggtgacaacacatactacgcagactccgtgaagggccggttcaccatctccagagacaattccaggagcacgctatatatgcaaatgaacagcctgagagccgaggacacggccgtttattactgtgcgaaacgggatacggtggtaacccatggctttgactactggggccagggaaccctggtcaccgtctcctca

SEQ ID NO: 15380 - DNA, 295 bp, Homo sapiens
  source 1..295: mol_type = other DNA
tgcagcctctggattcaccttcagtaactttggcatgcactgggtccgccaggctccagggaaggggctggagtgggtctcagctataggtgctaatggtgacaacacatactacgcagactccgtgaagggccggttcaccatctccagagacaattccaggagcacgctatatatgcaaatgaacagcctgagaggcgaggacacggccgtttattactgtgcgaaacgggatacggtggtaacccatggctttgactactggggccagggaaccctggtcaccgtctcctca

SEQ ID NO: 15381 - DNA, 295 bp, Homo sapiens
  source 1..295: mol_type = other DNA
tgcaggattcaactttaacaattctggcctgggctgggtccgccaggctccagggaagggcctggagtgggtctcagggattactattagtggtggcggctcatactacgccggctccgtgaagggccggttcaccgtctcccgagacaattcgaagaacaccctgtatctgcacatgaacagcctgagagtcgaggacacggccgtatattactgtgtaaaaggggccacgaactggaactttctatactacatggacgtctggggcaaagggaccacggtcaccgtcgcctca

SEQ ID NO: 15382 - DNA, 301 bp, Homo sapiens
  source 1..301: mol_type = other DNA
tgcgggcactggattcaactttaacaactctggcctgggctgggtccgccaggctccagggaaggggctggagtgggtctcaggaattactattagtggtggcggctcatactacgcaggctccgtgaagggccggttcaccgtctcccgagacaattcgaagaacacactgtatctgcaaatgaacggcctgagagtcgaggacacggccgtttattactgtgtaaaaggggccaccaactggaactttctatactacatggacgtctggggcaaagggaccacggtcaccgtcgcctca

SEQ ID NO: 15383 - DNA, 283 bp, Homo sapiens
  source 1..283: mol_type = other DNA
tgcagcctctggattcgccttcagtaagtcatggatgtactgggtccgccaaggtccagggaaggggctggtgtgggtctcacgtattaacagtgatgggagtagtataagttatgcagactccgtgaagggccgattcaccatctccagagacaacgccaagaacacgttgtatctgcaaatgaacagtctgagagtcaacgacaccgctatatattattgtgcaggaccatataattactttgactactggggccagggaaccctggtcaccgtctcctca

SEQ ID NO: 15384 - DNA, 283 bp, Homo sapiens
  source 1..283: mol_type = other DNA
tgcagcctctggattcgccttcagtaactcatggatgtactgggtccgccaaggtccagggaaggggctggtgtgggtctcacgtattaacagtgatgggagtagcataagttatgcagactccgtgaagggccgattcaccatctccagagacaacgccaagaacacgttgtatctgcaaatgaacagtctgagagtcgacgacaccgctgtatattattgtgcaggaccatataattactttgactactggggccagggaaccctggtcaccgtctcctca

SEQ ID NO: 15385 - DNA, 292 bp, Homo sapiens
  source 1..292: mol_type = other DNA
tgcagcctctggattcacgttcagtgaccaccaaatgagctggatccgccaggctccagggaaggggctggagtggctttcactcattactagaagtggtgaaaatgtgtactacgccgactctgtgaagggccgattcaccatctccagggacaacaccaagaacttactgtatctgcaaatgagcagcctgagagccgaggacacggccgtttattactgtgcgagagatccagatactagtgacaaagtggactactggggccagggaaccctggtcaccgtctcctca

SEQ ID NO: 15386 - DNA, 292 bp, Homo sapiens
  source 1..292: mol_type = other DNA
tgcagcctctggattcaccttccgtgaccaccagatgagctggatccgccaggctccagggaaggggctggaatggctttcactcattactagaagtggtgataatgtgtactacgcagactctgtgaagggccgattcaccatctccagggacaacaccaagaacttactgtatctacaaatgagcagcctgagagccgaggacacggccgtatattactgtgcgagagatccagatactagtgacaaagtggactactggggccagggaaccctggtcaccgtctcctca

SEQ ID NO: 15387 - DNA, 292 bp, Homo sapiens
  source 1..292: mol_type = other DNA
tgcagcctctggattcaccttccgtgatcaccagatgagctggatccgccaggctccagggaaggggcttgagtggctttcactcattactagaagtggtgataatgtctactacgcagactctgtgaggggccgattcaccatctccagggacaacaccaacaacttactgtatctacaaatgagcagcctgagagccgacgacacggccgtatattactgtgcgagagatccagatactagtgacaaagtggactactggggccagggaaccctggtcaccgtctcctca

SEQ ID NO: 15388 - DNA, 282 bp, Homo sapiens
  source 1..282: mol_type = other DNA
gcatctggttacagcttcaccagctactctatgcactgggtgcgacaggcccctggacaagggcttgagtggatgggagtaatcaaccctagtggtggtagcacaagccacgcacagaagttccaggggagagtcaccatgaccagagacacgtccacgagaacactctacattgagttgagtagcctgaaatctgatgacacggccgtctattactgtgcgcgagaggggaatgactggggtgacttctggggccagggaaccctggtcaccgtctcctca

SEQ ID NO: 15389 - DNA, 282 bp, Homo sapiens
  source 1..282: mol_type = other DNA
gcatctggttacagcttcaccagctactctatgcactgggtgcgacaggcccctggacaaggccttgagtggatgggagtaatcaaccctagtggtggtagcacaagccacgcacagaagttccagggcagagtcaccatgaccagagacacgtccacgagaacactctacatggagttgagtagcctgaaatctgatgacacggccgtctattactgtgcgcgagaggggaatgactggggtgacttctggggccagggaaccctggtcaccgtctcctca

SEQ ID NO: 15390 - DNA, 313 bp, Homo sapiens
  source 1..313: mol_type = other DNA
tgcggcctctggattcaccttcagcccttatgaaatgaactgggtccgccaggctccagggaaggggctggagtggatttcatacattagtggtagtggtgataccatatactacgcagactctgtggagggccgattcaccatctccagagacaacgccaagaattcactgtatttgcaaatgaacagcctgagagccggggacacggctgtttactactgtgtgagaggcggatattgtagtagtacactctgctataatttaaatgcttttgatatctggggccaagggacagtggtcaccgtctcttca

SEQ ID NO: 15391 - DNA, 313 bp, Homo sapiens
  source 1..313: mol_type = other DNA
tgcggcctctggattcaccttcagcccttttgaaatgaactgggtccgccaggctccagggaaggggctggagtgggtttcatacattagtggtagtagtgataccatatactacgcagactctgtggagggccgattcaccatctccagagacaacgccaagaattcactgtatctgcaaatgaacagcctgagagccgaggacacggctgtttattactgtgtgagaggcggatattgtagtagtacactctgctataatttaaatgcttttgatatctggggccaagggacaatggtcaccgtctcttca

SEQ ID NO: 15392 - DNA, 313 bp, Homo sapiens
  source 1..313: mol_type = other DNA
tgcggcctctggattcaccttcagcccttatgaaatgaactgggtccgccaggctccagggaaggggctggagtgggtttcatacattagtggtagtggtgataccatatactacgcagactctgtggagggccgattcaccatctccagagacaacgccaggaattcactgtatctgcaaatgaacagcctgagagccgaggacacggctgtttattactgtgtgagaggcggatattgtagtagtacactctgctataatttaaatgcttttgatatctggggccaagggacaatggtcaccgtctcttca

SEQ ID NO: 15393 - DNA, 313 bp, Homo sapiens
  source 1..313: mol_type = other DNA
tgcggcctctggattcaccttcagcccttttgaaatgaactgggtccgccaggctccagggaaggggctggagtgggtttcatacattagtggtagtggtgataccatatactacgcagactctgtggagggccgattcaccatctccagagacaacgccaagaattcactgtatctgcaaatgaacaccctgagagccgaggacacggctgtttattactgtgtgagaggcggatattgtagtagtacactctgctataatttaaatgcttttgatatctggggccaagggacagtggtcaccgtctcttca

SEQ ID NO: 15394 - DNA, 328 bp, Homo sapiens
  source 1..328: mol_type = other DNA
cactgtctctaatggctccatcagtagtagtttctactggaactggatccggcagcccccggggaagacactggagtcgattgggtatatctctttcagtgggagcaccaattacaaccccaccctcaagagtcgagtcaccatatcagtagacacgtccaagaaccagttctccctgagcctgaactctgtgaccactgcggacacggccgtgtacttctgtgcgagaggttcgaaagggtatatcagtggctggtacggggcggtccccaactactactaccacatggacgtctggggcaaagggacctcggtcaccgtctcctca

SEQ ID NO: 15395 - DNA, 328 bp, Homo sapiens
  source 1..328: mol_type = other DNA
cactgtctctaatggctccatcagtagtagtttctactggaactggatccggcagcccccggggaagacactggagtcgattgggtatatctctttcagtgggagcaccaattacaacccctccctcaagagtcgagtcaccatatcagtagacacgtccaagaaccagttctccctgagcctgaactctgtgaccactgcggacacggccgtgtacttctgtgcgagaggttcgaaagggtatatcagtggctggtacggggcggtccccaactactactaccacatggacgtctggggcaaagggacctcggtcaccgtctcctca

SEQ ID NO: 15396 - DNA, 285 bp, Homo sapiens
  source 1..285: mol_type = other DNA
gcttctggatacaacttcagagcctatgctatacattgggtgcgccaggcccccggacgaaggcttgagtggatgggatggatcaacgctggcactggtgacagaaattgtgcacagaggtttcagggcagagtcaccattaccagggacacatccgcgaacactgcctacatggagctgagcagcctgagttctgaagacacggctttatattactgtgcgagacctggaagagatgctgcgtttgactactggggccagggaaccctggtcaccgtctcctca

SEQ ID NO: 15397 - DNA, 285 bp, Homo sapiens
  source 1..285: mol_type = other DNA
gcttctggatacaccttcactgactttgctatacattgggtgcgccaggcccccggccaaagacttgagtggatggggtggatcagcgctaaaactggtgacagaaaatgttcacagaagttccagggcagagtcaccattaccagggacacatccgcgaagacagcctacatggagctgagcggcctgacgtctgaagacacggctgtatattattgtgcgagacctggtagagatgctgcatttgactactggggccagggaaccctggtcaccgtctcctca

SEQ ID NO: 15398 - DNA, 289 bp, Homo sapiens
  source 1..289: mol_type = other DNA
tgcagcctctggattcactgtcagtaccaactatatgagctgggtccgccaggctccagggaaggggctggagtgggtctcagttattgataccgctggtcgtgcatcctatacagactccgtaaagggcagattcaccatctccagagacaattccaagaacacactgtatcttcaaatgaacagcctgagagccgaggacacggctgtctattactgtgcgagaggcgttgggggttatggtgtatggtatacctggggccagggaaccctggtcaccgtctcctca

SEQ ID NO: 15399 - DNA, 289 bp, Homo sapiens
  source 1..289: mol_type = other DNA
tgcagcctctggattcactgtcagtagcgactatatgagctgggtccgccaggctccagggaaggggctgcagtgggtctccgttattgatggcgctggtcgtgcatcctatacagactccgtaaagggcagattcaccatctccagagacacttccaagaacacactatctcttcaaatgaacagcctgagagccgaggacacggctgtctattactgtgcgagaggcgttgggggttatggtgtatggtatacctggggtcagggaaccctggtcaccgtctcctca

SEQ ID NO: 15400 - DNA, 289 bp, Homo sapiens
  source 1..289: mol_type = other DNA
tgcagcctctggattcactgtcagtagcgactatatgagctgggtccgccaggctccagggaaggggctggagtgggtctcagttattgatggcgctggtcgtgcatcctatacagactccgtaaagggcagattcaccatttccagagacaattccaagaacacactgtatcttcaaatgaacagcctgagagccgaggacacggctgtctattactgtgcgagaggcgttgggggttatggtgtatggtatacctggggccagggaaccctggtcaccgtctcctca

SEQ ID NO: 15401 - DNA, 289 bp, Homo sapiens
  source 1..289: mol_type = other DNA
tgcagcctctggattcactgtcagtagcgactatatgagctgggtccgccaggctccagggaaggggctggagtgggtctcagttattgatagcgctggtcgtgcatcctatacagactccgtaaagggcagattcaccatctccagagacaattccaagaacacactgtatcttcaaatgaacagcctgagagccgaggacacggctgtctattactgtgcgagaggcgttgggggttatggtgtatggtatacctggggccagggaaccctggtcaccgtctcctca

SEQ ID NO: 15402 - DNA, 306 bp, Homo sapiens
  source 1..306: mol_type = other DNA
gcatctggttacacctttgccagctatactatcacctgggtgcgacaggcccctggacaagggcttgagtggatgggatggatcagcgtctacaatggtgacacaaactatgcacagaagttccagggcagagtcaccatgaccacagacacatccacgagcacagcctacatggagctgaggagcctgagatctgacgacacggccgtgtattactgtgcgagaatcggtttttggagtggtcgatacctctactactactacatggatgtctggggcaaagggaccacggtcaccgtctcctca

SEQ ID NO: 15403 - DNA, 306 bp, Homo sapiens
  source 1..306: mol_type = other DNA
gcttctggttacacctttaccagctatactatcagctgggtgcgacaggcccctggacaagggcttgagtggatgggatggatcagcgtctacaatggtgacacaaactatgcacagaagctccagggcagagtcaccatgaccacagacacatccacgagcacagcctacatggagctgaggagcctgagatctgacgacacggccgtgtattactgtgcgagaatcggtttttggagtggtcgatacctttactactactacatggacgtctggggcaaagggaccacggtcaccgtctcctca

SEQ ID NO: 15404 - DNA, 292 bp, Homo sapiens
  source 1..292: mol_type = other DNA
cgctgtctatggtgggtctttcagtgataactactggagctggatccgccagcacccagggaaggggctggagtggattggggaaatcaatcatagtggaagctccaactacaacccgtccctcaagagtcgagtcaccatatcagtagacacgtccaagaaccacttctccctgaagctgagctctgtgaccgccgcggacacggctgtgtattactgtgcgagaggcgcgagatggctaaaaaaccggtttgacttctggggccagggaaccctggtcaccgtctcctca

SEQ ID NO: 15405 - DNA, 292 bp, Homo sapiens
  source 1..292: mol_type = other DNA
cgctgtctatggtgggtccttcagtgataactactggagctggatccgccagcacccagggaaggggctggagtggattggggaaatcaatcatagtggaagcaccaactacaacccgtccctcaagagtcgagtcaccatatcggtagacacgtccaagaaccacttctccctgaagctgagctctgtgaccgccgcggacacggctgtgtattactgtgcgagaggcgcgagatggctaaaaaaccggtttgacttctggggccagggaaccctggtcaccgtctcctca

SEQ ID NO: 15406 - DNA, 289 bp, Homo sapiens
  source 1..289: mol_type = other DNA
tgcagcctctggattcacctttaatagttattggatgacctgggtccgccaggctccagggaaggggctggagtgggtggccaacataaaggaagatggaagtcagaaatactatgtggactctgtgaagggccgattcaccatctccagagacgaccccaagagttcactatatctgcaaatgaacttcctgggagtcgtggacacggccgtgtatttctgtgcgagagggggccggaatggtgctcttgatatctggggccatgggacactggtcaccgtctcttca

SEQ ID NO: 15407 - DNA, 289 bp, Homo sapiens
  source 1..289: mol_type = other DNA
tgcagcctctggattcacctttagcacctattggatgacctgggtccgccaggctccagggaaggggctggagtgggtgggcaacataaaggaacatggaagtgacacatactatgtggactctgtgaagggccgattcaccatctccagagacgacccctcgaactcactatatctgcaaatgaatttcctgggagtcgtggacacggccgtctattactgtgcgagagggggccggaatggtgctcttgatatctggggccatgggacactggtcaccgtctcttca

SEQ ID NO: 15408 - DNA, 289 bp, Homo sapiens
  source 1..289: mol_type = other DNA
tgcagcctctggattcacctttagtacctattggatgacctgggtccgccaggctccagggaaggggctggagtgggtgggcaacataaaggaagatggaagtgacacatactatgtggactctgtgaagggccgattcaccatctccagagacgaccccaagaactcactatatctgcaaatgaatttcctgggagtcgtggacacggccgtctattactgtgcgagagggggccggaatggtgctcttgatatctggggccatgggacactggtcaccgtctcttca

SEQ ID NO: 15409 - DNA, 289 bp, Homo sapiens
  source 1..289: mol_type = other DNA
tgcagcctctggattcacctttagtacctattggatgacctgggtccgccaggctccagggaaggggctggagtgggtgggcaacataaaggaagatggaagtgacacctactatgtggactctgtgaagggccgattcaccatctccagagacgaccccaacaactcactatatctgcaaatgaatttcctgggagtcgtggacacggccgtctattactgtgcgagagggggccggaatggtgctcttgatatctggggccatgggacactggtcaccgtctcttca

SEQ ID NO: 15410 - DNA, 289 bp, Homo sapiens
  source 1..289: mol_type = other DNA
tgcagcctctggattcacctttagtacctattggatgacctgggtccgccaggctccaaggaaggggctggagtgggtgggcaacataaaggaagatggaagtgacacctactatgtggactctgtgaagggccgattcaccatctccagagacgaccccaacaactcactatatctgcaaatgaatttcctgggagtcgtggacacggccgtctattactgtgcgagagggggccggaatggtgctcttgatatctggggccatgggacactggtcaccgtctcttca

SEQ ID NO: 15411 - DNA, 289 bp, Homo sapiens
  source 1..289: mol_type = other DNA
tgcagcctctggattcacctttagtacctattggatgacctgggtccgccagcctccagggaaggggctggagtgggtgggcaacataaaggaagatggaagtgagacacactatgtggactctgtgaagggccgattcaccatctccagagacgaccccaagaactcactatatctgcaaatgaacttcctgggagtcgtggacacggccgtgtattactgtgcgagagggggccggaatggtgctcttgatatctggggccatgggacactggtcaccgtctcttca

SEQ ID NO: 15412 - DNA, 289 bp, Homo sapiens
  source 1..289: mol_type = other DNA
tgcagcctctggattcacccttagtacctattggatgacctgggtccgccaggctccagggaaggggctggagtgggtgggcaacataaaggaagacggaagtgagaaatactttgtggactctgtgaagggccgattcaccatttccagagacgaccccaagaactcagtatatctgcaaatgaacttcctgggagccgtggacacggccgtgtattactgtgcgagagggggccggaatggtgctcttgatatctggggccatgggacactggtcaccgtctcttca

SEQ ID NO: 15413 - DNA, 289 bp, Homo sapiens
  source 1..289: mol_type = other DNA
tgcaacctctggattcacctttagtacctattggatgacctgggtccgccaggctccagggaaggggctggagtgggtgggcaacataaaggaagatggaagtgacacatactatgtggactctgtgaagggccgattcaccatctccagagacgaccccaagaactcactatatctgcaaatgaatttcctgggagtcgtggacacggccgtctattactgtgcgagagggggccggaatggtgctcttgatatctggggccgtgggacactggtcaccgtctcttca

SEQ ID NO: 15414 - DNA, 289 bp, Homo sapiens
  source 1..289: mol_type = other DNA
tgcagcctctggattcacctttagtacctattggatgacctgggtccgccaggctccagggaaggggctggagtgggtgggcaacataaaggaagatggaagtgacacatactatgtggactctgtgaagggccgattcaccatctccagagacgaccccaagaactcactatatctgcaaatgaatttcctgggagtcgtggacacggccgtctattactgtgcgagagggggccggaatggtgctcttgatatctggggccatgggacactggtcactgtctcttca

SEQ ID NO: 15415 - DNA, 289 bp, Homo sapiens
  source 1..289: mol_type = other DNA
tgcagcctctggattcacctttagcaccgattggatgacctgggtccgccaggctccagggaaggggctggagtgggtgggcaacataaaggaacatggaagtgacacatactatgtggactctgtgaagggccgattcaccatctccagagacgacccctcgaactcactatatctgcaaatgaatttcctgggagtcgtggacacggccgtctattactgtgcgagagggggccggaatggtgctcttgatatctggggccatgggacactggtcaccgtctcttca

SEQ ID NO: 15416 - DNA, 289 bp, Homo sapiens
  source 1..289: mol_type = other DNA
tgcagcctctggattcacctttagtagttattggatgacctgggtccgccaggctccagggaaggggctggagtgggtgggcaatataaaggaagatggaagtgagaaatactatgtggactctgtgaagggccgattcaccatctccagagacgaccccaagaactcactatatctgcaaatgaatttcctgggagtcgtggacacggccgtatattactgtgcgagagggggccggaatggtgctcttgatatctggggccatgggacactggtcaccgtctcttca

SEQ ID NO: 15417 - DNA, 289 bp, Homo sapiens
  source 1..289: mol_type = other DNA
tgcagcctctggattcacctttagtacctattggatgacctgggtccgccaggctccagggaaggggctggagtgggtgggcaacataaaggaagatggaagtgagaaatactatgtggactctgtgaagggccgattcaccatctccagagacgaccccaagaactcactatatctgcaaatgaacttcctgggagtcgtggacacggccgtgtattactgtgcgagagggggccggaatggtgctcttgatatctggggccatgggacactggtcaccgtctcttca

SEQ ID NO: 15418 - DNA, 289 bp, Homo sapiens
  source 1..289: mol_type = other DNA
tgcagcctctggattcacctttagcacctattggatgacctgggtccgccaggctccagggaaggggctggagtgggtgggcaacataaaggaacatggaagtgacacatactatgtggactctgtgaagggccgattcaccatctccagagacgacccctcgaactcactatatctgcaaatgaatttcctgggagtcgtggacacggccgtctattactgtgcgagagggggccggaatggtgctcttgatatctggggccatgggacactggtcaccgtctcttta

SEQ ID NO: 15419 - DNA, 304 bp, Homo sapiens
  source 1..304: mol_type = other DNA
cactgtctctgctgcgtccatcagtagttactcctggaactggatccggcagcccccagggaagggactggagtggattgggtacatctatgaaagtgggagcaccaactacaatccctccctcaagagtcgagtctccatatcggtagacacgtccaagaatgaaatctcgttgaaactgagctctgtgaccgctgcggacacggccgtgtatttctgtgccagaagcggggctacaatttttggagtagttatccccggctttgactcctggggccagggaaccctggtcaccgtctcctca

SEQ ID NO: 15420 - DNA, 304 bp, Homo sapiens
  source 1..304: mol_type = other DNA
cactgtctctgctgcgtccatcagtagttactcctggaattggatccggcagcccccagggaagggactggagtggattgggtatatctatgacagtgggagcaccaactacaatccctccctcaagagtcgagtctccatatcggtagacacgtccaagaatgaattctcgttgagactgacctctgtgaccgctgcggacacggccgtgtacttctgtgccagaagcggggctacaatttttggagtcgttatccccggctttgactcctggggccagggaaccctggtcaccgtctcctca

SEQ ID NO: 15421 - DNA, 304 bp, Homo sapiens
  source 1..304: mol_type = other DNA
cactgtctctggtgcgtccatcagtagttactcctggaactggatccgccggcccccagggaagggactggagtggattgggtacatttatgaaagtgggagcaccacctacagtccctccctcaagagtcgagtctccatatcggttgacacgtccaagaatgaattctcgttgaaactgagctctgtgacccctgcggacacggccgtgtatttctgtgccagaagcggggctacaatttttggagtagttatccccggctttgactcctggggccagggaaccctggtcaccgtctcctca

SEQ ID NO: 15422 - DNA, 304 bp, Homo sapiens; identical to SEQ ID NO: 15421
  source 1..304: mol_type = other DNA

SEQ ID NO: 15423 - DNA, 304 bp, Homo sapiens
  source 1..304: mol_type = other DNA
cactgtctctgctgcgtccatcagtagttactcttggaactggatccgccggcccccagggaagggactggagtggattgggtacatctatgaaagtgggagcaccaactacagtccctccctcaagagtcgagtctccatatcggtagacacgtccaagaatgaattctcgttgaaactgagctctgtgaccgctgcggacacggccgtgtatttctgtgccagaagcggggctacaatttttggagtagttatccccggctttgactcctggggccagggaaccctggtcaccgtctcctca

SEQ ID NO: 15424 - DNA, 304 bp, Homo sapiens
  source 1..304: mol_type = other DNA
cactgtctctgctgcgtccatcaggagttactcctggaactggatccggcagcccccagggaagggactggagtggattggggacatctctaaaagtgggagcaccaactacaatccctccctcaagagtcgggtctccatatcggtagacacgtccaagaatgaaatctcgttgaaactgagctctgtgaccgctgcggacacggccgtgtatttctgtgccagaagcggggctacaatttttggagtcgttatccccggctttgactcctggggccagggaaccctggtcaccgtctcctca

SEQ ID NO: 15425 - DNA, 304 bp, Homo sapiens; identical to SEQ ID NO: 15420
  source 1..304: mol_type = other DNA

SEQ ID NO: 15426 - DNA, 304 bp, Homo sapiens
  source 1..304: mol_type = other DNA
cactgtctctactgggtccatcactagttactcctggaactggatccggcagcccccagggaagggactggagtggattgggtatatctatgacagtgggagcaccaactacaatccctccctcaagagtcgagtctccatatcggtggacacgtccaagaatgaattctcgttgaaactgagctctgtgaccgctgcggacacggccgtgtatttctgtgccagaagcggggctacaatttttggagtagttatccccggctttgactcctggggccagggaaccctggtcaccgtctcctca

SEQ ID NO: 15427 - DNA, 298 bp, Homo sapiens
  source 1..298: mol_type = other DNA
tgcagcctctggattcaccttcagtaattatctcatgcactgggtccgccaggctccagggaaggggctggagtgggtctcatccatcagcagtggtagcacttacttaaactacgctgactcagtgaagggccgcttcaccatctccagagacaacgacaggaattcactgtatctggaaatgaacagcctgagagccgaggacacggctatctatttctgtgcgaccccacttgttcgggcctattcctactacatggacgtctggggcaaggggaccacggtcaccgtctcctca

SEQ ID NO: 15428 - DNA, 298 bp, Homo sapiens
  source 1..298: mol_type = other DNA
tgcagcctctggattcaccttcagtaattatctcatgcactgggtccgccaggctccagggaaggggctggagtgggtctcatccatcagcagtggtagcacttacttaaactacgctgactcagtgaagggccgcttcaccatctccagagacaacgacaggaattcactgtatctggaaatgaacagcctgagagccgaggacacggctatctatttctgtgcgaccccacttgttcgggcctattcctactacatggacgtctggggcaaggggaccacggtcagcgtctcctca

SEQ ID NO: 15429 - DNA, 295 bp, Homo sapiens
  source 1..295: mol_type = other DNA
tacagcctctggattcaggtttagtagccgtgccatgagctgggtccgccaggctccagggaaggggctggagtgggtctcaagtataaatggtcaaggcagtggcatctactacacagactccgttcagggccggttcaccatctccagagacaactccaagaacacgctgtatctgcaaatggatggcctgagagccgaggacacggcccgatattattgtgcgagagagatacaataccagttactggcaattgactcctggggccagggaaccctggtcaccgtctcctca

SEQ ID NO: 15430 - DNA, 295 bp, Homo sapiens
  source 1..295: mol_type = other DNA
tacagcctctggattcagatttagtagccgtgccatgagttgggtccgccaggctccagggaaggggctggagtgggtctcaagtataaatggtcaaggcagtggcatctactacacagactccgttcagggccggttcaccatctccagagacaactccaagaacacgctctatctgcaaatggatggcctgagagccgaggacacggcccgatattattgtgcgagagagatacaataccagttactggcaattgactcctggggccagggaaccctggtcaccgtctcctca

SEQ ID NO: 15431 - DNA, 310 bp, Homo sapiens
  source 1..310: mol_type = other DNA
tgtggcctctggcttcaccttcgaaaggcatactatgaactgggtccgccaggctccaggaaagggaccagagtggatagctcacatcagtgttactgattcacacattagtggtagtcgtagattcacagccacatactacgcagactctgtgaagggccggttcaccatctccagagacgacgccgagaactcactgtatctggacatgggcagcctgcgagacgaggacgcggctgtctattactgtgcgaagtcgctgactgagtttgacctttggggccagggaaccctggtcaccgtctcctca

SEQ ID NO: 15432 - DNA, 310 bp, Homo sapiens
  source 1..310: mol_type = other DNA
tgtagcctctggcttcaccttcgaaagggaaactatgaactgggtccgccaggctccaggaaagggaccagagtggatatcacacatcagtgttactgattcacacattagtggcagtcgtagattcacagccacatactacgcagactctgtgaagggccggttcaccatctccagagacgacgccaagaacacactgtttctggacatgagcagcctgagagacgaggacacggctgtctattactgtgcgaagtcgctgactgagtttgacctttggggccagggaaccctggtcaccgtctcctca

SEQ ID NO: 15433 - DNA, 310 bp, Homo sapiens
  source 1..310: mol_type = other DNA
tgtggcctctggcttcaccttcgaaagggatactatgaactgggtccgccaggctccaggaaagggaccagagtggatagcacacatcagtgttactgattcacacattagtggtagtggtaggttcacagccacatactacgcagactctgtgaagggccggttcaccatctccagagacgacgccaagaactcactgtatctggacatgagcagcctgagagacgaggacacggctgtctattactgtgcgaagtcgctgactgagtttgacctttggggccagggaaccctggtcaccgtctcctca

SEQ ID NO: 15434 - DNA, 298 bp, Homo sapiens
  source 1..298: mol_type = other DNA
tgcagcctctgggttcaccgtcagtagcagctacatgagctgggtccgccaggctccagggaaggggctggagtgggtctcggttatttatagcggtggtaacacatactacgcagactccgtgaagggccgattcaccatctccagagacaattccaagaacaccctgtatcttcaaatgaacagtctgagagccgaggacacggccgtgtattactgtgcgagagaactaccccgttccgcgtatagtagtggctggaactactggggccagggaaccctggtcaccgtctcctca

SEQ ID NO: 15435 - DNA, 298 bp, Homo sapiens
  source 1..298: mol_type = other DNA
tgcagcctctgggttcaccgtcagtagcaactacatgagctgggtccgccaggctccagggaaggggctggagtgggtctcagttatttatagcggtggtagcacatactacgcagactccgtgaagggccgattcaccatctccagagacaattccaagaaaacgctgtatcttcaaatgaacagtctgagagccgaggacacggccgtgtattactgtgcgagagaactaccccgttccgcgtatagcagtggctggaactactggggccagggaaccctggtcaccgtctcctca

SEQ ID NO: 15436 - DNA, 298 bp, Homo sapiens
  source 1..298: mol_type = other DNA
tgcagcctctgggttcaccgtcagtagcaactacatgagctgggtccgccaggctccagggaaggggctggagtgggtctcagttatttatagcggtggtaccacatactacgcagactccgtgaagggccgattcaccatctccagagacaattccaagaacacgctgtatcttcaaatgaacagtctgagagccgaggacacggccgtgtattactgtgcgagagaactaccccgttccgcgtatagcagtggctggaactactggggccagggaaccctggtcaccgtctcctca

SEQ ID NO: 15437 - DNA, 294 bp, Homo sapiens
  source 1..294: mol_type = other DNA
gcttctgcttacacctttaccagctatggtatcacctgggtgcgacaggcccctggacaagggcttgagtggatgggatggatcaccgcttacaatgctaacacaaactatgcacagaagctccagggcagagtcaccatgaccacagacacatccacgagcacagcctacatggagctgaggagcctgagatctgacgacacggccgtgtattactgtgcgagggcttatagtgggagctacttcgactggttcgacccctggggccagggaaccctggtcaccgtctcctca

SEQ ID NO: 15438 - DNA, 294 bp, Homo sapiens
  source 1..294: mol_type = other DNA
gcttctggttacacctttaccagctatggtatcacctgggtgcgacaggcccctggacaagggcttgagtggatgggatggatcagcgcttacaatggtaacacaaactatgcacagaagctccagggcagagtcaccatgaccacagactcatccacgagcacagcctacatggagctgaggagcctgagatctgacgacacggccgtgtattactgtgcgagggcttatagtgggagctacttcgactggttcgacccctggggccagggaaccctggtcaccgtctcctca

SEQ ID NO: 15439 - DNA, 316 bp, Homo sapiens
  source 1..316: mol_type = other DNA
tgcagcctctggattcaccttcagtagttatggcatgaactgggtccgccaggctccaggcaaggggctggagtgggtggcagttatatcatatgatggaagtaataaatactatgtagactccgtgaagggccgattcaccatctccagagacaattccgagagcacgctgtatctgcaaatgaacagcctgagagctgaagacacggctgtgtattactgtgcgaaagatgataagggaggctccaggcaggaattctactactactactacatggacgtctggggcaaagggaccacggtcaccgtctcctca

SEQ ID NO: 15440 - DNA, 316 bp, Homo sapiens
  source 1..316: mol_type = other DNA
tgcagcctctggattcaccttcagtagttatgccatgaactgggtccgccaggctccaggcaaggggctggagtgggtggcagttatatcatatgatggaagtcataaatactatgtagactccgtgaagggccgattcaccatctccagagacaattccgagagcacgctgtatctgcaaatgaacagcctgagagctgaagacacggctgtgtattactgtgcgaaagatgataagggaggctccaggcaggaattctactattactactacatggacgtctggggcaaagggaccacggtcaccgtctcctca

SEQ ID NO: 15441 - DNA, 316 bp, Homo sapiens
  source 1..316: mol_type = other DNA
cactgtctctggtggctccatcagcactgccacttattactggggctggatccgccagcccccagggaaggggctggagtggattggcagtatgtattatagtgggagcacctactacaacccctccctcaagagtcgagtcaccatgtccgtagacacgtccaagaaccagttctccctgaaactgaggtctgtcaccgccgcagacacggctgtctattactgtgcgagacatcctctaagtataacacctcgtccggatcttcgtaactggttcgacccctggggccagggaaccctggtcatcgtctcctca

SEQ ID NO: 15442 - DNA, 316 bp, Homo sapiens
  source 1..316: mol_type = other DNA
cactgtctctggtggctccatcagcactgccacttattactggggctggatccgccagcccccagggaaggggctggagtggattggcagtatgtattatagtgggagcacctactacaacccctccctcaagagtcgagtcaccatgtccgtagacacctccaagaaccagttctccctgcaactgaggtctgtcaccgccgcagacacggctgtctattactgtgcgagacatcctctaagtataacacctcgtccggatcttcgtaactggttcgacccctggggccagggaaccctggtcaccgtctcctca

SEQ ID NO: 15443 - DNA, 298 bp, Homo sapiens
  source 1..298: mol_type = other DNA
tgcagcctctgggttcaccttcagtaattgggagatgcactgggtccgccaagctccggggaaggggctggagtgggtctcacgtgttgagagcgatgggagtagcacgagctacgcggactccgtgaagggccgagtcaccgtctccagagacaacgccaagaaaacgctgtatctggaaatgaagaatttgagagtcgaagactcggctgtctattactgtgcaagatgggccacgacacggggaattgacttctttgaccagtggggccacggaaccctggtcaccgtctcctca

SEQ ID NO: 15444 - DNA, 298 bp, Homo sapiens
  source 1..298: mol_type = other DNA
tgcagcctctgggttcaccttcagtaattgggagatgcactgggtccgccaagctccggggaaggggctggagtgggtctcacgtattgggagcgatgggagttacacgagcttcgcagactccgtgaggggccgagtcaccgtctccagagacaacgccaagaaaatgctgtatctggaaatgaagaatctgagagtcgaagactcggctgtctattactgtgcaagatgggccacgacacggggaattgacttctttgaccagtggggccacggaaccctggtcaccgtctcctca

SEQ ID NO: 15445 - DNA, 301 bp, Homo sapiens
  source 1..301: mol_type = other DNA
tgcagcctctgggttcaccttcagtggctctgctatacactgggtccgccaggcttccgggaaagggctggagtgggttggccgtattagaggtgattccaaaagttacacgacagcatattctgcgtcggtgaaaggcaggttcaccatctccagagatgattcagagagcacggcgtatctgcaaatgagcagcttgaaaatcgaggacacggccgtgtattactgtgctagagggacttggggcagcagctggtacaatgactactggggccggggaaccctggtcaccgtctcctca

SEQ ID NO: 15446 - DNA, 301 bp, Homo sapiens
  source 1..301: mol_type = other DNA
tgcagcctctgggttcaccttcagtggctctgctatacactgggtccgccaggcttccgggaaagggctggagtgggttggccgtattagaggtgattccaaaagttacacgacagcatattctgcgtcggtgaaaggcaggttcaccatctccagagatgattcagagagcacggcgtatctgcaaatgagcagcttgaaaatcgaggacacggccgtgtattactgtgctagagggacttggggcagcagctggtacaatgactactggggccagggaaccctggtcaccgtctcctca

SEQ ID NO: 15447 - DNA, 304 bp, Homo sapiens
  source 1..304: mol_type = other DNA
tgcagcctctggattcaccttcattagctatggcatgcactgggtccgccaggctccaggcaaggggctggagtgggtggcagttatatcatttgatggaagtattaagtacatggcagactccgtggagggccgtttcaccatctccagagacaattccaagagcacgctgtatctgcaaatgaacagcctgagaattgaggacacggctatatattactgtgcgagagcccgctccccgatgtcaacggctggttgggggattggctactggggccagggaacccaggtcacagtctcctca

SEQ ID NO: 15448 - DNA, 304 bp, Homo sapiens
  source 1..304: mol_type = other DNA
tgcagcctctggattcaccttcattacctatggcatgcactgggtccgccaggctccaggcaaggggctggagtgggtggcagttatatcatatgatggaagaattaagtacattgcagactccgtggagggccgtttcaccatctccagagacaattccaagagcacgctgtatctgcaaatgaacagcctgagagctgaggacacggctatatattactgtgcgagagcccgctccccgatgtcaacggctggttgggggattggctactggggccagggaacccaggtcaccgtctcctca

SEQ ID NO: 15449 - DNA, 301 bp, Homo sapiens
  source 1..301: mol_type = other DNA
cactgtctctggtggctccatcagtagttactactggagctggatccggcagcccccagggaagggactggagtggattgggtatatctattacagtgggagcaccaactacaacccctccctcaagagtcgagtcaccatatcactagacccgtccaagaaccagttctccctgaagctgagctctgtgaccgctgcggacacggccgtctattactgtgcgagatcgggggcagggggttactactactactactacatggacgtctggggcaaagggaccacggtcaccgtctcctca

SEQ ID NO: 15450 - DNA, 301 bp, Homo sapiens
  source 1..301: mol_type = other DNA
cactgtctctggtggctccatcagtagttactactggagctggatccggcagcccccagggaagggactggagtggattgggtatatctattacagtgggagcaccaactacaacccctccctcaagagtcgagtcaccatatcactagacacgtccaagaaccagttctccctgaagctgagctctgtgaccgctgcggacacggccgtctattactgtgcgagatcgggggcagggggctactactactactactacatggacgtctggggcaaagggaccacggtcaccgtctcctca

SEQ ID NO: 15451 - DNA, 309 bp, Homo sapiens
  source 1..309: mol_type = other DNA
aagggttctggatacagctttaccaattcctggatcggctgggtgcgccagatgcccggggaaggcctggagtggatgggaatcatctatcctgatgactctgataccagatacagcccgtccttccaaggccaggtcaccatctcagccgacaagtccatcagcaccgcctacctgcagtggagcagcctgaaggcctcggacaccgccatgtattactgtgcgagacccccaggatattgtagtagtagcagcgccgggtgctactttgactcctggggccagggaaccctggtcaccgtctcctca

SEQ ID NO: 15452 - DNA, 309 bp, Homo sapiens
  source 1..309: mol_type = other DNA
aagggttctggatacagttttgccaaatcctggatcggctgggtgcgccagatgcccggggaaggcctggagtggatgggaatcatctatcctgatgactctgataccagatacagcccgtccttccaaggccaggtcaccatctcagccgacaagtccatcagtaccgcctacctgcagtggagcagcctgagggcctcggacagcgccatgtattattgtgcgagacccccaggatattgtagtagtagcagcgccgggtgctactttgactcctggggccagggaaccctggtcaccgtcgcctca

SEQ ID NO: 15453 - DNA, 298 bp, Homo sapiens
  source 1..298: mol_type = other DNA
cacagcttctggattcacctttggtgattatggtatgagttggttccgccaggctccagggaaggggctggagtgggtaggtttcattagaagtaaagcttatggtgggacaacagaatacgccgcgtctgtgaaagggagattcaccatctcaagagatgattctaaaagcatcgcctatctgcaaatgaacagcctgaaaaccgaggacacagccgtgtattactgtactagaggtcatccccggttcggggaaattgtgtactggggccagggaaccctggtcaccgtctcctca

SEQ ID NO: 15454 - DNA, 298 bp, Homo sapiens
  source 1..298: mol_type = other DNA
cacagcttctggattcacctttggtgattatgctatgagctggttccgccaggctccagggaaggggctggagtgggtaggtttcattagaagcaaaggttatggtgggacaacagaatacgccgcgtctgcgaaaggcagattcatcatctcaagagatgatcctaaaagcatcgcctatctgcaaatgaacagcctgaaaaccgaggacacagccgtgtattattgtactagaggtcatccccggttcggggaaattgtgtactggggccagggaaccctggtcaccgtctcctca

SEQ ID NO: 15455 - DNA, 298 bp, Homo sapiens
  source 1..298: mol_type = other DNA
cacagcttctggattcacctttgttgattatgctatgagctggttccgccaggctccagggaaggggctggagtgggtaggtttcattagaaggaaagcttatggtgggacaacagaatacgccgcgtctgtgaaaggcagattcaccatctcaagagatgattctaaaagcatcgcctatctgcaaatgaacagcctaaaaaccgaggacacagccgtgtattactgtactagaggtcatccccgcttcggggaaattgtgtactggggccagggaaccctggtcaccgtctcctca

SEQ ID NO: 15456 - DNA, 304 bp, Homo sapiens
  source 1..304: mol_type = other DNA
tgcagcctctgggctcaccttcagtggctctggtattcactgggtccgccaggcttccgggaaagggctggagtgggttggccgtatcagaaacagagctaacagttacgcgacagcatatgctgcgtcggttaaaggcaggttcaccatctccagagatgatttaaagaacacggcgtatctgcaaatgaatagcctgaaaaccgaggacacggccgtttattattgtgctacgccaggcgttagcagtggctactatgtccttgaccactggggccagggaaccctggtcaccgtctcctca

SEQ ID NO: 15457 - DNA, 304 bp, Homo sapiens
  source 1..304: mol_type = other DNA
tgcagcctcggggctcaccttcagtggctctggtattcactgggtccgccgggcttccgggaaagggctggagtggattggccgtatcagaaacagagctaacaattacgcgacagcatatgctgcgtcgattaaaggcaggttcaccatctccagagatgatttaaagaacacggcgtatctgcaaatgaatagcctgaaaaccgaggacacggccgtttattattgtgctacgccaggcgttagcagtggctactatgtccttgaccactggggccagggaaccctggtcaccgtctcctca

SEQ ID NO: 15458 - DNA, 304 bp, Homo sapiens
  source 1..304: mol_type = other DNA
tgcggcctctggattcccctttaccagccacgccatgacctgggtccgccagcctccagggaagggactggagtgggtagcacttattagtgatactggtgatgatgcctactactcagactccgtggagggccggttcaccatctccagagacaatgccaagaacacagtggatctgcagatgaacagcctgagcggcgaggacacggccctatattactgtgccaaaatcaactattggacgaagggcggctatgactactttgactactggggccagggagtcctggtcaccgtctcctca

SEQ ID NO: 15459 - DNA, 304 bp, Homo sapiens
  source 1..304: mol_type = other DNA
tgcggcctctggattcccctttaccagccacgccatgacgtgggtccgccagcctccagggaagggactggagtgggttgcacttattagtgatactggtgatgatgcctactactcagactccgtggagggccggttcaccatctccagagacaatgccaagaacacagtggatctgcagatgaacagcctgagcggcgaggacacggccctatattactgtgccaaaatcaactattggacgaagggcggctatgactactttgactactggggccagggagtcctggtcaccgtctcctca

SEQ ID NO: 15460 - DNA, 304 bp, Homo sapiens
  source 1..304: mol_type = other DNA
tgcggcctctggattcccctttaccagccacgccatgacctgggtccgccaggctccagggaagggactggagtgggtagcacttattagtgatactgctgatgatgcctactactcagactccgtggagggccggttcaccatctccagagacaatgccaagaacacagtggatctgcagatgaacaacctgagcggcgaggacacggccctatattactgtgccaaaatcaactattggacgaagggcggctatgactactttgactactggggccagggagtcctggtcaccgtctcctca

SEQ ID NO: 15461 - DNA, 291 bp, Homo sapiens
  source 1..291: mol_type = other DNA
aaggggtcaggagacaggttcaccagctactggatcggctgggtgcgccagatgcccggaaaaggcctggagtggatggccatcttcaatcctgatgactctgagaccagatacagcccgccattccaaggccaggtcaccatgtcagtcgacaagtccagcagtaccgcctacctgcagtggggcagcctgcaggcctcggacaccgccatgtatttctgtgcgagacacccccgaagcagtagttggttcgacccctggggccagggaacccaggtcaccgtctcctca

SEQ ID NO: 15462 - DNA, 291 bp, Homo sapiens
  source 1..291: mol_type = other DNA
aagggctcagcagacaccttcaccacctattggatcgcctgggtgcgccagaagcccgggaaaggccttgagtggatggccatcttcaatcctgatgactccgagaccagattcaccccgtcattccgaggccaggtcaccatgtcagtcgacaagtccatcaacaccgcctacctgcactgggacagcctgcaggcctcggacagcgccatgtatttctgtgcgagacacccccgaagtagtagctggttcgacccctggggccagggaaccctagtcaccgtctcctca

SEQ ID NO: 15463 - DNA, 291 bp, Homo sapiens
  source 1..291: mol_type = other DNA
aaggggtcagcagacacgttcaccacgtattggatcggctgggtgcgccagaagcccgggaaaggcctggagtggatggccatcttcaatcctgatgactccgagaccagatacaccccgtcattccgaggccaggtcaccatgtcagtcgacaagtccatcagtaccgcctacctgcactgggacagcctgcaggcctcggacaccgccatgtatttctgtgcgagacacccccgaagcagcagttggttcgacccctggggccagggaacccaggtcaccgtctcctca

SEQ ID NO: 15464 - DNA, 282 bp, Homo sapiens
  source 1..282: mol_type = other DNA
gcttctggatacaccttcactacctattctatgtattgggtgcgccaggcccctggacaaagtcttcagtggatgggatggatcaacgctggcaatggtgacacaagatattcacagaagttccaggacagactcaccatttccagggacacatccgcgaacacagcctccatgcaattgagcagcctgacgtctgaagacacggctgtgtattactgtgcgactagtctagcagcagattttgactactggggccagggaaccctggtcaccgtctcctca

SEQ ID NO: 15465 - DNA, 282 bp, Homo sapiens
  source 1..282: mol_type = other DNA
gcttctggatacaccttcagtacctattctatgtattgggtgcgccaggcccccggacaaaggcttgagtggatgggatggatcaacgctggcaatggtgacacaagatattcacagaagttccaggacagagtcacctttaccagggacacatccgcgagcacagcctacctggagctgagcaccctgagatctgaggacacggctgtgttttactgtgcgactagtttagcagcagattttgactactggggccagggaaccctggtcaccgtctcctca

SEQ ID NO: 15466 - DNA, 310 bp, Homo sapiens
  source 1..310: mol_type = other DNA
cactgtctccggtggctccatcagcagtgatagtcactactggggctggatccgccagccccccgggaaggggctggagtggattgccaatgtctattatagtggggccaccgcctacagctcgtccctcaggaggcgagtcaccatatccgtacacacgtccaacaaccagttcttcctgaagttgacgtctgtgaccgccgcagacacggctctatatttctgtgcgagagtcatgttgactacttcttccatgttgcccgatgcttttgacatctggggccaagggacaatggtcaccgtctcttca

SEQ ID NO: 15467 - DNA, 310 bp, Homo sapiens
  source 1..310: mol_type = other DNA
cactgtctccggtggctccatcagcagtaatagtcactactggggctggatccgccagacccccgggaaggggctggagtggattgcgaatgtctattatagtggggccaccgcctacagcccgtccctcaggagtcgagccaccatatccgtagacacgtccaacaaccagttcttcctgaagttgacgtctgtgaccgccgaagacacgactctgtatttctgtgcgagagtcatgttgactacttcctctatgttgcccgatgcttttgacatctggggccaagggacaatggtcaccgtctcttca

SEQ ID NO: 15468 - DNA, 310 bp, Homo sapiens
  source 1..310: mol_type = other DNA
ctctgtctccggtggctccatcagcagtaatagtcactactggggctggatccgccagccccccgggaaggggctggagtggattgcgaatgtctattatagtggggccaccgcctacagcccgtccctcacgggtcgagtcaccatatccgtagacacgtccaacaaccagttcttcctaaagttgacgtctgtgaccgccgcagacacggctctgtatttctgtgcgagagtcatgttgactacttcttctatgttgcccgatgcttttgacatctggggccaagggacaatgctcaccgtctcttca

SEQ ID NO: 15469 - DNA, 319 bp, Homo sapiens
  source 1..319: mol_type = other DNA
cactgtgtctggtggccccataagtgatgatgattattactggggctgggtccgccagtctacagggaagggactggagtggattgggagcatccaccataatggtgatacctacaagaacccgtccctcaagagtcgagtcaccctttccgtcgacacgtccaagagccacttctccctgagcctggactccgtgaccgccgcagacaccgcaatatattactgcgcgagacatggctaccctccatgtagcggcggcccctgctcggagaaatggttcgacccctggggccagggaaccctggtcaccgtctcctca

SEQ ID NO: 15470 - DNA, 319 bp, Homo sapiens
  source 1..319: mol_type = other DNA
cactgtgtctggtggccccataagtgatgatgattattactggggctgggtccgccagtctacagggaagggactggagtggattgggagcatccaccataatggtgatagctacaagaacccgtccctcaagagtcgagtcaccctttccgtcgacacgtccaagagccacttctccctgagcctgggctctgtgaccgccgcagacaccgcaatatattactgcgcgagacatgggtaccctccatgtagcggcggcccctgctcggagaaatggttcgacccctggggccagggaaccctggtcaccgtctcctca

SEQ ID NO: 15471 - DNA, 298 bp, Homo sapiens
  source 1..298: mol_type = other DNA
tgcagcctctggattcacctttgatgagtatgtcatgcactgggtccggcaggctccagggacgggcctggagtgggtctcgggaattagttggaatggtgattacataggttatgcggactctgtgaagggccgattcatgatctccagagacaacaccaagaactccctgtatctgcaaatgaacagtctgagaggtgaggacacggccttatatttctgtgtcaaagacgttcgtaaatacaactataaaatgatggacgtctggggcaaagggaccacggtcaccgtctcctca

SEQ ID NO: 15472 - DNA, 298 bp, Homo sapiens
  source 1..298: mol_type = other DNA
tgcagcctctggattcacctttgatgagtatgtcatgcactgggtccggcaggctccagggaagggcctggagtgggtctcgggaattagttggaatggtgattacatagggtatgcggactctgtgaagggccgattcatgatctccagagacaacaccaagaactccctgtatctgcaaatgaacagtctgagaggtgaggacacggccttatacttctgtgtaaaagacgttcgtaaatacaactataaaatgatggacgtctggggcaaagggaccacggtcaccgtctcctca

SEQ ID NO: 15473 - DNA, 298 bp, Homo sapiens
  source 1..298: mol_type = other DNA
tgcagcctctggattcacctttgatgagtatgtcatgcactgggtccggcaggctccagggaagggcctggagtgggtctcgggaattagttggaatggtgattacatagggtatgcggactctgtgaagggccgattcatgatctccagagacaacaccaagaactccctgtatctgcaaatgaacagtctgaggggtgacgacacggccttatatttctgtgtaaaagacgttcgtaaatacaactataaaatgatggacgtctggggcaaagggaccacggtcaccgtctcctca

SEQ ID NO: 15474 - DNA, 298 bp, Homo sapiens
  source 1..298: mol_type = other DNA
tgcagcctctggattcacctttcatgagtatgtcatgcactgggtccggcaggctccagggaagggcctggagtgggtctcgggaattagttggaatggtgattacatagggtatgcggactctgtgaagggccgattcatgatctccagagacaacaccaagaactccctgtatctgcaaatgaacagtctgagaggtgaggacacggccttatatttctgtgtaaaagacgttcgtaaatacaactataaaatgatggacgtctggggcaaagggaccacggtctccgtctcctca

SEQ ID NO: 15475 - DNA, 297 bp, Homo sapiens
  source 1..297: mol_type = other DNA
aagggttctggattcgactttagcagtcactggattgcctgggtgcgccagatgcccgggaaaggcctggagtggatggggatcatctaccccggtgactctgataccagatacagtccgtccttccaaggccaggtcagcatctcagccgacaagtccatcagcaccgcctacctgcagtggagcaggctgaaggcctcggacaccgccatgtattactgtgcgtgtgttcggcggggggtaggaaaaggctggttcgacccctggggccagggaaccccggtcaccgtctcctca

SEQ ID NO: 15476 - DNA, 297 bp, Homo sapiens
  source 1..297: mol_type = other DNA
gagggttttggatacagttttagcaactactggatcgcctgggtgcgccaaacgcccgggaagggcctggagtggatgggggtcatctatcctggtgactctgatattaggtacaatccgtccttccaaggccaggtcaccatctcagccgacaagtccgtcagtgccgcctacctgcagtggaggagcctgaaggcctcggacaccgccatgtattattgtgcgtgcgtgcggaggggagtgggaaaagggtggttcgacccctggggccagggtaccctggtcaccgtctcctca

SEQ ID NO: 15477 - DNA, 289 bp, Homo sapiens
  source 1..289: mol_type = other DNA
tgcagcctctggattcaccttcagtacctacgacatgcactgggtccgccaagctacaggaaaaggtctagaatgggtcccaggtattggtactgctgatgacacatactattcaggctccgtgaagggccgattcaccatctccagagaaaatgccaagtcctccttgtatcttcaaatgaacaacctgagagccggggacacggctgtgtattactgtgcaagagaatcgggtgggagctacctgcttgactactggggccagggaaccctggtcaccgtctcctca

SEQ ID NO: 15478 - DNA, 289 bp, Homo sapiens
  source 1..289: mol_type = other DNA
tgcagcctctggattcaccttcagtacctacgacatgcactgggtccgccaagctacaggaaaaggtctagaatgggtctcaggtattggtactgctgatgacacatactattcaggctccgtgaagggccgattcaccatctccagagaaaatgccaagtcctccttgtatcttcaaatgaacaacctgagagccggggacacggctgtgtattactgtgcaagagaatcgggtgggagctacctgcttgactactggggccagggaaccctggtcaccgtctcctca

SEQ ID NO: 15479 - DNA, 298 bp, Homo sapiens
  source 1..298: mol_type = other DNA
tgcagcctctggattcacctttagcagctatggcatgagctgggtccgccaggctccagggaaggggctggagtgggtcattagtgatagtggtgctagcacatattacgcagactccgtgaagggccggttcaccgtctccagagacaattccaagaacacgctgtatctgcaaatgaacagcctgagagccgaggacacggccgtatattactgtgcgaaaacggggatagcagtggctgtcactaactggtacttcgatctctggggccgtggcaccctggtcactgtctcctca

SEQ ID NO: 15480 - DNA, 298 bp, Homo sapiens
  source 1..298: mol_type = other DNA
tgcagcctctggattcacctttagcagctatggcatgagctgggtccgccaggctccagggaaggggctggagtgggtcattagtgatagtggtgctagcacatattacgcagactccgtgaagggccggttcaccgtctccagagacaattccaagaacacgctgtatctgcaaatgaacagcctgagaaccgaggacacggccgtatattactgtgcgaaaacgggaatagcagtggctgtaactaactggtacttcgatctctggggccgtggcaccctggtcactgtctcctca

SEQ ID NO: 15481 - DNA, 289 bp, Homo sapiens
  source 1..289: mol_type = other DNA
tgcagcctctggattcaccttcagtagctataacatgaactgggtccgccaggctccagggaaggggctggagtgggtgtcattcattagtagtattaataattacatatactacgcagactcagtgaagggccgattcaccatctccagagacaacgccaagaactcactgtatctgcaaatgaacagcctgagagccgaggacacggctgtctattactgtgtgagagacggggggacctactactttgactcctggggccagggaaccctggtcaccgtctcctca

SEQ ID NO: 15482 - DNA, 289 bp, Homo sapiens
  source 1..289: mol_type = other DNA
tgcagcctctggattcaacttcagtggctataacatgaactgggtccgccaggctccagggcaggggctggagtggctggcattcattagtaacgttaataattacatatactacgcagactcagtcaagggccgattcaccatttccagagacaacgccaagaactcactgtatctacaaatgaacagcctgagagccgaggacacggctgtctattactgtgtgagagacggggggacctactactttgactcctggggccagggaaccctggtcaccgtctcctca

SEQ ID NO: 15483 - DNA, 292 bp, Homo sapiens
  source 1..292: mol_type = other DNA
tacagcctctggattcaactctggattcagcttcagtgactactacatgatctgggtccgccaggcgccagggaaggggctggagttgatttcatacattactagcagtcagaccacatactacgcagactctgtgaagggccgattcaccatctccagggacaacgccaagaactcactgtatctgcgaatgaacagcctgagagccgaggacacggccgtgtattactgtgtgagagactcatacggcgttgactactggggccagggaaccctggtcaccgtctcctca

SEQ ID NO: 15484 - DNA, 292 bp, Homo sapiens
  source 1..292: mol_type = other DNA
tagagcctctgggttcaactctggattcagcttcagtgaatactacatgatctggatccgccaggctccagggaaggggctggagtggatttcatacattactagtagtctgaccacatactacgcagactctgtgaagggccgattcaccatctccagggacaacgccaagaactcactatatctgcaaatgaacagcctgagagtcgaggacacggccatgtattactgtgtgagagactcatacggcgttgactactggggccagggaaccctggtcaccgtctcctca

SEQ ID NO: 15485 - DNA, 292 bp, Homo sapiens; identical to SEQ ID NO: 15484
  source 1..292: mol_type = other DNA

SEQ ID NO: 15486 - DNA, 298 bp, Homo sapiens
  source 1..298: mol_type = other DNA
cggtgtctctggtgcgtcgttcactgattcctacttcacctggatccgccagcccccagggagggggctggagtggattggggatgtctttcaaggtggatccaccaactacaattcgtccctcaagagtcgagtctccttatcagcagacacctacatgaggcaaatctccctgaggatgccctccatgaccgccgcggacgcggctgtctatttctgtgcgaggggagaggtccgacttttggggtggtccccacttgactcctggagccagggagtcctggtcaccgtctcgtca

SEQ ID NO: 15487 - DNA, 298 bp, Homo sapiens
  source 1..298: mol_type = other DNA
cggtgtctctggtgcgtcgttcactgattcctacttcacctggatccgccagcccccagggagggggctggagtggattggggatgtctttcaaggtggagccaccaactacaattcgtccctcaagagtcgagtctccttatcagcagacacctacatgaggcaagtctccctgaggatgccctccatgaccgccgcggacgcggctgtctatttctgtgcgcggggagaggtccgacttttggggtggtctccacttgactcctggagccagggagtcctggtcaccgtctcctca

SEQ ID NO: 15488 - DNA, 298 bp, Homo sapiens
  source 1..298: mol_type = other DNA
cggtgtctctggtgcgtcgttcactgattcctacttcacctggatccgccagcccccagggagggggctggagtggattggggatgtctttcaaggtggagccaccaactacaattcgtccctcaagagtcgagtctccttatcatcagacacctacatgaggcaaatctccctgaggatgccctccatgaccgccgcggacgcggctgtctatttctgtgcgaggggagaggtccgacttttggggtggtccccacttgactcctggagccagggagtcctggtcaccgtctcctca

SEQ ID NO: 15489 - DNA, 316 bp, Homo sapiens
  source 1..316: mol_type = other DNA
caccgtctctggtggctccatcagtagtagtagtcactactggggctggatccgccagcccccagggaaggggctggagtggattgggactatctattatagtgggagcacctcctacaacccgtccctcaagagtcgagtcaccctatccgtagacacgtccaagaaccagttctccctgaagctgagctctgtggccgccgcagacacggctgtgtattactgtgcgagacgaggaagcagcagtttatacctacctaccatttcttactacatggacatctggggcaaagggaccacggtcaccgtctcctca

SEQ ID NO: 15490 - DNA, 316 bp, Homo sapiens
  source 1..316: mol_type = other DNA
caccgtctctggtggctccatcagcagtagtagtcactactggggctggatccgccagcccccagggaaggggctggagtggattgggactatctattatagtgggagcacctcctacaacccgtccctcaagagtcgagtcaccatatccgtagacacgtccaagaaccagttctccctgaagctgagctctgtggccgccgcagacacggctgtgtattactgtgcgagacgaggaagcagcagtttatacctacctaccatttcttactacatggacatctggggcaaagggaccacggtcaccgtctcctca

SEQ ID NO: 15491 - DNA, 280 bp, Homo sapiens
  source 1..280: mol_type = other DNA
tgtaggctctggattcaactttggtgattataccatgtattgggtccggcaacgtccagggaagggcctggagtgggtctcaactattaattggaatggaggcaccataggctactcggactctgtgaagggccgattcaccgtttcaagagacaacgccaacaactccttgtatctgttgatgaacagtctgagtcctgaggacacggccttctattactgtgcaagggggagtagggccccagtctggggcccgggaaccctggtcaccgtctcctca

SEQ ID NO: 15492 - DNA, 280 bp, Homo sapiens
  source 1..280: mol_type = other DNA
tgcagcctctggattcaatttttatgattattccatgtactgggtccgacaagctccagggaagggcctggagtgggtcgcaactattaattggaacggtgataacgtcggctattcggactctgtgaagggccgattcaccgtttccagagacaatgccaacagctccctccatctcctaatgaacagtctgagacctgaggacacggccttctatttctgtgcaagggggagtagggccccagtctggggccggggaaccctggtcaccgtctcctca

SEQ ID NO: 15493 - DNA, 294 bp, Homo sapiens
  source 1..294: mol_type = other DNA
gaggcttctggatatagttttgtcaattattacatcgcttgggtgcgccagaggcccggcaaaggcctggaatggatgggaaatatatatcctggtgactctgaaaccagatacagcccgtccttccaaggccaagtcaccttctcagtcgacaggtccaccgggaccgcttacttacactggagcagcctgaaggcctcggacaccgccatttattactgtgcgagacagttcgaggtggtacagcctagccttaactactggggcctggggaccctggtcaccgtctcctct

SEQ ID NO: 15494 - DNA, 294 bp, Homo sapiens
  source 1..294: mol_type = other DNA
gaggcctctggatatagttttgtcaattattacatcgcttgggtgcgccagatgcccggcaaaggcctggaatggatgggaaatatatatcctgctgactctgaaaccagatatagtccgtccttccaaggccaggtcaccttctcagtcgacaggtccaccgggaccgcttacctacactggaacagcctgaaggcctcggacaccgccatttattactgtgcgagacaattcgaggtggtacagcctagccttaactactggggcctgggaaccccggtcaccgtctcctct

SEQ ID NO: 15495 - DNA, 283 bp, Homo sapiens
  source 1..283: mol_type = other DNA
tgcagcctctgaattcaccgtcagtagcaactacatgagttgggtccgccaggctccagggaaggggctggagtgggtttcagtgatttatagtggtggaagcacatactacgcagactccgtgaggggccggctcagcatctccagagacaattccaagaacacgctgtttcttcaaatgagcagcctgaaagtcgaggacacggccgtttatttctgtgtgggggcccgcttgggcctgcccgggtactggggccagggaaccctggtcatcgtctcctca

SEQ ID NO: 15496 - DNA, 283 bp, Homo sapiens
  source 1..283: mol_type = other DNA
tgcagtctctgaattcaccgtcagtagcaactacatgagctgggtccgccaggctccagggaaggggctggagtgggtttcagtgatttatagtggtggaagcacatactacgcagactccgtgaggggccggctcaccatttccagagacaattccaagaacacgctgtttcttcaaatgagcagcctgagagtcgaggacacggccgtttatttctgtgtgggggcccgcttgggcctgcccgggtactggggccagggaaccctggtcaccgtctcctca

SEQ ID NO: 15497 - DNA, 283 bp, Homo sapiens
  source 1..283: mol_type = other DNA
tacagcctctgaattcaccgtcagtaacaactacatgagctgggtccgccaggctccagggaaggggctggagtgggtttcagtgatttatagtggtggtagtacatactacgcagactccgtgaggggccggctcaccatctccagagacacttccaagaacacggtatttcttcaaatgagcagcctgagagtcgaggacacggccatatattattgtgttggggcccgcttgggcctgcccgggtactggggccagggaaccctggtcaccgtctcctca

SEQ ID NO: 15498 - DNA, 283 bp, Homo sapiens
  source 1..283: mol_type = other DNA
tgcagcctctgaatttaccgtcagtggcaactacatgagctgggtccgccaggctccagggaaggggctggagtgggtttcagtgatttacagtggtggtagcacatactacgcagactccgtgaggggccggttcaccatctccagagacaactccaagaacacgctgtttcttcaaatgagcagcctgagagtcgaggacacggccgtatattactgtgtgggggcccgcttgggcctgcccgggtactggggccagggaaccctggtcaccgtctcctca

SEQ ID NO: 15499 - DNA, 298 bp, Homo sapiens
  source 1..298: mol_type = other DNA
tgcagcctctggattcactttcggtaatgcctggatgcactgggtccgccaggctccagggaagggcctggagtgggttggccgtattaaaaccaaacgtgatggtggggcaacagactacgccccacccgtgaaaggcagattcaccatatcaagagatgattcagagaacacactgtatctgcagatgaacagcctgaaaaccgaggacactgccgtgtatcactgtaccacagatcaggggggagatgtcttgactggctcctggggccagggaaccctggtcaccgtctcctca

SEQ ID NO: 15500 - DNA, 298 bp, Homo sapiens
  source 1..298: mol_type = other DNA
tgcagcctctgggttcactttcagtaacgcctggatgcactgggtccgccaggctccagggaagggcctggagtgggttggccgtattaaaaccaaaggtgaacgtggggcaacagactacgccccacccgtgaaaggcagattcaccatctcaagagatgattcagagaacacactgtatctgcagatgaacagcctgaaaaccgaggacactgccgtgtatcactgtaccacagatcaggggggagatgttttgactggctcctggggccagggaaccctggtcaccgtctcctca

SEQ ID NO: 15501 - DNA, 295 bp, Homo sapiens
  source 1..295: mol_type = other DNA
tgtagcctctggattcacatttagaagttattgtatgagttgggtccgccaggctccggggaagggcctggagtgggtctcagcaattagtgaaagtggtcgcagcacaacccacgcagactccgtgaggggccgcttcaccatctccagagacaactccaagaacatactgtttctgcaaatgaacagcctgacagccgaggacacggccatttattattgtgcaaaaaccgcgcagggctactggcgaccccatgattcctggggccggggaaccctggtcaccgtctcctca

SEQ ID NO: 15502 - DNA, 295 bp, Homo sapiens
  source 1..295: mol_type = other DNA
tgcagcctctggattcacgtttagaagttattgtatgagttgggtccgccaggctccagggaagggactagagtgggtctcagctattagtgaaagtggtcgcagcacaacccacgcagactccgtgaggggccgcttcaccatctccagagacaactccaaaaacacactgtttctgcaaatgaacagcctgacagccgaggacacggccatttattactgtgcaaaaaccgcgcagggctactggcgacctcatgattcctggggccagggaaccctggtcaccgtctcctca

SEQ ID NO: 15503 - DNA, 295 bp, Homo sapiens
  source 1..295: mol_type = other DNA
tgcagcctctggattcacctttagaagttattgtatgagttgggtccgccaggctccagggaagggactggagtgggtctcagccattagtgaaactggtcgcagcacaacccacgcagactccgtgaggggccgcttcaccatctccagagacaactccaaaaacacactgtttctgcaaatgaacagcctgacagccgaggacacggccatttattactgtgcaaaaaccgcgcagggctactggcgacctcatgattcctggggccagggaaccctggtcaccgtctcctca

SEQ ID NO: 15504 - DNA, 295 bp, Homo sapiens
  source 1..295: mol_type = other DNA
tgtagcctctggattcacatttagaagttattgtatgagttgggtccgccaggctccggggaaggggctggagtgggtctcagcaattagtgaaagtggtcgcagcacaacccacgcagactccgtgaggggccgcttcaccatctccagagacaactccaagaacatactgtttctgcaaatgaacagcctgacagccgaggacacggccatttattattgtgcaaaaaccgcgcagggctactggcgaccccatgattcctggggccagggaaccctggtcaccgtctcctca

SEQ ID NO: 15505 - DNA, 310 bp, Homo sapiens
  source 1..310: mol_type = other DNA
cactgtctctggtggctccatcaacagtactacttactactggggctggatccgccagcccccagggaaggggctggagtgggtagggagtgtctattctagtgggatttcctactacaacccgtccctcaaaagtcgagtcaccatatcccttgacacgtccaagaaccagttctccctggagctgacctctgtgaccgccgcagacacggctgtctattcctgtgcgcgacataattacccgcagagatggcttcagtcattctactttgactcctggagccagggaaccctggtcaccgtctcctca

SEQ ID NO: 15506 - DNA, 310 bp, Homo sapiens
  source 1..310: mol_type = other DNA
cactgtctctggtggctccgtcaacagtactacttactactggggctggatccgccagtccccagggaagggactggagtggattggcagtgtttattatactgggagcacctactacaacccgtccctcaaaggtcgagtctccatgtccattgacacgtccaagaaccagttctccctgcacttgagctctgtgaccgccgcagacacagctgtatattcctgcgcgagacataattacccacagagatggctacagtcattctactttgactcctggggccagggcaccctggtcaccgtctcctca

SEQ ID NO: 15507 - DNA, 310 bp, Homo sapiens
  source 1..310: mol_type = other DNA
cactgtctctggtggctccgtcaacagtagtacttactactgggcctgggtccgccagccccctgggaagggactggagtggattgggagtgtctattctagtgggaagtcatactacaacccgtccctgaaaagtcgagtcaccatatccgctgacacgtccaagaaccaattctccctgaaactgctctctgtgaccgccgcagacacggctgtttattcctgtgcgagacataattacccgcagaggtggctgcaatcattctactttgactcctggggccagggaaacctggtcaccgtctcctca

SEQ ID NO: 15508 - DNA, 309 bp, Homo sapiens
  source 1..309: mol_type = other DNA
gcctcaggagacacttacggcagcttcgctgtcacctgggtgcgacaggcccctggacaggggcttgagtggatgggagggatcatccctgtcgttggttcgccaaactacgcgcagaagtttcagggcagaatcacaattaccgcggacgagtcgacgaccacggcctacctggaactgagcggcctgagatctgacgacacggccgtctattactgtgcgagagcgccattcgtgagtagtcaatatgccgtctattactactacatggacgtctggggcaaggggaccacggtcaccgtctcctca

SEQ ID NO: 15509 - DNA, 309 bp, Homo sapiens
  source 1..309: mol_type = other DNA
gcctcaggagacacctacggcacctttgctattacctgggtgcgacaggcccctggacaagggcttgagtggatgggagggatcatccctgtcgttggttcaccgaattacgcacggaaattccagggcagagtcacgattacggcggacgaatcaacgaccacatcctacatggagctgaccagcctgagatctgaggacacggccgtctattactgtgcgagagcgccattcgtgagtagtcagtatgccgtctactactactacatggacgtctggggcaaggggaccacggtcaccgtctcctca

SEQ ID NO: 15510 - DNA, 289 bp, Homo sapiens
  source 1..289: mol_type = other DNA
tgtttcctctggattcatcttcagtcgttatgaaatgaactgggtccggcaggctccaggtaaggggctggagcgcgttgcattcataagtcacagtgatgataacatagtttatgcagaatctgtgaagggccgattcaccatctccagagacaacaccaagaactcactgtttctgcaaatgaacagcctgagaaccgaggacacggctgtttactactgtgcgagagataacggaagagctgctgccgatgagtggggccagggaaccctggtcaccgtttcctca

SEQ ID NO: 15511 - DNA, 289 bp, Homo sapiens
  source 1..289: mol_type = other DNA
tgtagcctctggattcgccctcagtccttatgaaatgaactgggtccgccaggctccagggaagggactggagcgcgttgctttcatcagtcacactgatacgaccgtgctgtatggagactctgtgaggggccgattcaccatctccagagacaacggcaagaattcagtgtatctgcaaatgtacagcctgcgagtcgaggacacggctgtttattactgtgcgagagacaatggaagagcagctgccgacgagtggggccagggaaccctggtcaccgtcgcctca

SEQ ID NO: 15512 - DNA, 304 bp, Homo sapiens
  source 1..304: mol_type = other DNA
tgcggcctcgggattcaccttcagtagttatagcatgaactgggtccgccaggctccagggaaggggctggagtgggtctcatgtattagtagtggtggtgattacatatattacgcagactcagtgaagggccgattcaccatctccagagacaaccccaggaactcactgtctctgcaaatgagcagcctgagagccgaggacacggctatttattactgtgcgagaggcccctataactggaacgaccagaggaactggttcgacccctggggccagggaaccctggtcaccgtctcctca

SEQ ID NO: 15513 - DNA, 304 bp, Homo sapiens
  source 1..304: mol_type = other DNA
tgcggcctcgggattcaccttcagtagttatagcatgaactgggtccgccaggctccagggaaggggctggagtgggtctcatgtattagtagtggtggtgattacatatattacgcagactcagtgaagggccgattcaccatctccagagacaacgccaggaactcactgtctctgcaaatgagcagcctgagagccgaggacacggctgtgtattactgtgcgagaggcccctataactggaacgaccagaggaactggttcgacccctggggccagggaaccctggtcaccgtctcctca

SEQ ID NO: 15514 - DNA, 292 bp, Homo sapiens
  source 1..292: mol_type = other DNA
tgcagcctctggattcacctttagcagccatgtcatgagctgggtccgccaggctccagggaaggggctggagtgggtctcagtaattagtggtagtggcagtggcacatactacgcagactccgtgaggggccggttcaccatctccagagacaattccaaggacaccgtgtatctgcaaatgagcagcctgagagccgaggacacggccgtctattactgtgcgagaggcccctgtaccacctgctatagtgacttctggggccagggaaccctggtcaccgtctcctca

SEQ ID NO: 15515 - DNA, 292 bp, Homo sapiens
  source 1..292: mol_type = other DNA
tgcagcctctggattcacctttagcagccatgtcatgagttgggtccgccaggctccagggaaggggctggagtgggtctcagtcattagtggaagtggtagtggcacatactacgcagactccgtgaggggccggttcaccatctccagagacaattccgaggacaccctgcatctgcaaatgagcagtctgacagccgacgacacggccgtctattactgtgcgagaggcccctgtaccacctgctatagtgacttctggggccagggaaccctggtcaccgtctcctca

SEQ ID NO: 15516 - DNA, 313 bp, Homo sapiens
  source 1..313: mol_type = other DNA
tgtgggctctgacttcaccttcagtgaatatgccatgcactgggtccgccaggctccagggaagggcctgcaatatgtctcaaccatcaacaatgatgggagcagcaccttttacacaacttctgtgaaggacagattcaccatctccagagacaactccaagaagacgttgtatcttcagatgggcagtctgagagttgaggactcggctgtctatttctgtgcgagagagggtgagggtgattaccatgatagcgctggttatgactacatggatgtctggggcagagggaccacggtcatcgtctcctca

SEQ ID NO: 15517 - DNA, 313 bp, Homo sapiens
  source 1..313: mol_type = other DNA
tgtggcctctgagttcaccttcagtgagtatgccatgcactgggtccgccaggctccagggaagggcctgcaatatgtctcaaccatcaacaatgatgggagcagcaccttttacacaacttctgtgaaggacagattcaccatctccagagacaactccaagaagacgctatatcttcagatgggcagtctgagagttgaggactcggctgtctatttctgtgcgagagagggtgagggtgattaccatgatagcgctggttatgactacatggatgtctggggcagagggaccacggtcatcgtctcctca

SEQ ID NO: 15518 - DNA, 301 bp, Homo sapiens
  source 1..301: mol_type = other DNA
tgcagcctctggattcagcttcgcaagtcacttcttacactgggtccgccaggctccagggcaggggctggtgtgggtctctcgtataaatactggtgggagtcagacattctacgcggactccgtgaagggccgcttcaccatgtccagagacaacgccaagaacacgctctatctgcagatgaacagtttgagagtcgacgacgcggctatttattactgtgccgcagaataccctgtgggttttggaaaggtaccccttgactattggggccagggaaccttggtcaccgtcgcctca

SEQ ID NO: 15519 - DNA, 301 bp, Homo sapiens
  source 1..301: mol_type = other DNA
tgcagcctctggattcaccttcagaagtcacttcatgcactgggtccgccaggctccagggcagggcctggtctgggtctctcgtataaatactgatgggagtcagacattctacgcggactccgtgaagggccgcttcaccatgtccagagacaacgccaagaacacgctgtatctacagatgaacaatttgagagccgacgacgcggctatttactactgtgcagcagagtaccctgtgggttttggaaaggtaccccttgactattggggccagggaaccttggtcaccgtcgcctca

SEQ ID NO: 15520 - DNA, 298 bp, Homo sapiens
  source 1..298: mol_type = other DNA
tgcagcctctagattcaccttcagtgactactacatgacctggatccgccaggctccagggaaggggctggagtggattgcatacattagcagtagtagtagttacagaaaatacgcagactctgtgaagggccgattcaccatctccagagacaacgccaagaactcactctatctgcaaatgaccagcctgcgacccgaggacacggccatgttttactgtgcgagagtcggtggaaggacctacactgatgcttttgatatctggggccaagggacaatggtcaccgtctcttca

SEQ ID NO: 15521 - DNA, 298 bp, Homo sapiens
  source 1..298: mol_type = other DNA
tgcagcctctggattcaccttcagtgactactacatgacttgggtccgtcaggctccagggaggggactggagtggatttcatatattagcggtagcagtgatgacagaaaacacgcagactctgtgaagggtcgattcgccatctccagagacaacgccaagaactcactctatctgcaaatgaccagcctgcgacccgaggacacggccgtatattactgtgcgagagtcggtggaaggacttacactgatgcttttgatatctggggccaagggacaatggtcaccgtctcttca

SEQ ID NO: 15522 - DNA, 289 bp, Homo sapiens
  source 1..289: mol_type = other DNA
tgcagcctctggattcacccttagtaactattggatgacttgggtccgccaggctccagggaaggggctggagtgggtggccaacataaacgaagatggaagtgcgaaaacctatgtggactctgtgaagggccgattcaccgtctctagagacaacgtcaagaagtcactgtatctacaaatgaacagcctgagagccgaggacacggccgtgtattactgtgcgaactctccaacatcggttgactctgactactggggccagggaaccctggtctccgtctcctca

SEQ ID NO: 15523 - DNA, 289 bp, Homo sapiens
  source 1..289: mol_type = other DNA
tgcagcctctggattcacctttagtaactattggatgacttgggtccgccaggctccagggaaggggctggagtgggtggccaacataaaccaagatggaagtgcgaaaacctatgtggactctgtgaagggccgattcaccgtctccagagacaacgtcaagaagtcactgtatctgcaaatgaacagcctgagagccgaggacacggccgtgtattactgtgcgaactctccaacatcggttgactctgactactggggccagggaaccctggtctccgtctcctca

SEQ ID NO: 15524 - DNA, 289 bp, Homo sapiens
  source 1..289: mol_type = other DNA
tgcagcctctggattcacctttagtaactattggatgacttgggtccgccaggctccagggaaggggctggagtgggtggccaacataaacgaagatggaagtgcgaaaacctatgtggactctgtgaagggccgattcaccgtctctagagacaacgtcaagaagtcactgtatctgcaaatgaacagcctgagagccgaggacacggccgtgtattactgtgcgaactctccaacatcggttgactctgactactggggccagggaaccctggtctccgtctcctca

SEQ ID NO: 15525 - DNA, 289 bp, Homo sapiens
  source 1..289: mol_type = other DNA
tgcagcctctggattcacctttagtaactattggatgacttgggtccgccaggctccagggaaggggctggagtgggtggccaacataaaccaagatggaagtgcgaaaacctatgtggactctgtgaagggccgattcaccgtctctagagacaacgtcaagaagtcactctatctgcaaatgaacagcctgagagccgaggacacggccgtgtattactgtgcgaactctccaacatcggttgactctgactactggggccagggaaccctggtctccgtctcctca

SEQ ID NO: 15526 - DNA, 294 bp, Homo sapiens
  source 1..294: mol_type = other DNA
caggtttctggatacagctttaccaactactggatcggctgggtgcgccagatgcccgggaaaggcctggagtggatggggatcatctatcctcgtgactctgataccagatacagcccgtccttcgaaggcctcgtcaccatctcagccgacaagtccatcacaaccgcctacctgcagtggagcaacctgaaggcctcggacaccgccatgtattactgtgcgagaacccggattgaagggggatactactttgaccgctggggccagggaaccctggtcaccgtctcccca

SEQ ID NO: 15527 - DNA, 294 bp, Homo sapiens
  source 1..294: mol_type = other DNA
aaggtgtctggatacagcttcaccagctactggatcggctgggtgcgccagatgcccgggaaaggcctagagtggatgggcatcacgcatcctagtgactctgataccagatatagtccgtccttcgaaggccaggtcaccatctcagccgacaagtccaccagaaccgcctacctgcagtggagcaacctgaaggcctcggacaccgccatctatttctgtgcgagaacacgcattgaagggggatactactttgaccgctggggccagggaaccctggtcaccgtctcctca

SEQ ID NO: 15528 - DNA, 297 bp, Homo sapiens
  source 1..297: mol_type = other DNA
gtttccggatacagcctcacagaagtgtccttgcactgggtccgacaggcccctggaaaagggcttgaatacatgacaggttttgatcctagagatggggaaactgtctattcgcagaattttcacggcagagtcgacatgaccgaggacacagtcacagaaacagcctacatggttctgagcaatctgagatctggcgacacggccgtgtattattgtgtgactgagttggatagtagtgccatgtatccgggtggcagctactggggccagggaacccaggtcaccgtctcctca

SEQ ID NO: 15529 - DNA, 297 bp, Homo sapiens
  source 1..297: mol_type = other DNA
gtttccggatacagcctcactgaagtgtccttgcactgggtccgacaggcccctggaaaagggcttgaatacatgacaggttttgatcctagagatgggaaaactgtctattcgcagagttttcgcggcagagtcgacatgaccgaggacacagtcacagaaacagcctacatggttctgagcaatctgagatctggcgacacggccgtgtattattgtgtgactgagttggatagtagtgccatgtatccgggtggcagctactggggccagggaacccaggtcaccgtctcctca

SEQ ID NO: 15530 - DNA, 310 bp, Homo sapiens
  source 1..310: mol_type = other DNA
cactgtctctggtggctccatcagaggtagtccttactactgggcctggatccgccagcccccagggaaggggctggagtggattgggagtgtcccttatagtgggagcacctactacaacccgtccctcaagagtcgagtcaccgtgtccgtagacacgtccaagaaccagttctccctgaacctgagctctgtgaccgccgcggacacggctgtgtattactgtgcgagacagggatattgtagtggtggtccctgccacaggtatttcgacccctggggccagggaaccctggtcaccgtctcctca

SEQ ID NO: 15531 - DNA, 310 bp, Homo sapiens
  source 1..310: mol_type = other DNA
cactgtctctgatagttccatcagaggtagtccttactactgggcctggatccgccagcccccagggaaggggctggagtggattgggagtgtcccttttagtgggaccacctactacaccccgtccctcaggagtcgagccaccgtgtccgcagacacgtccaagaaccaattctccctgaccctgagctctgtgaccgccgcggacacggctgtgtattactgtgcgaggcagggatattgtagtggtggtccctgccacaggtatttcgacccctggggccagggaatcctggtcaccgtctcctca

SEQ ID NO: 15532 - DNA, 315 bp, Homo sapiens
  source 1..315: mol_type = other DNA
gcttctggttacacctttaccacctatggtatcagctgggtgcgacaggcccctggacaggggcttgagtggatgggatggatcaagccttacaatggtaacacagagtacacacagaagctccaggggagagtcaccatgaccacagacacatccacgagcacggcctacatggagttgaggagactgagatctgacgacacggccgtatattactgtgcgagagatcggccctcttattgtagtggtaccacctgctatccaaatgatgcttttgatgtctggggccaaggggcaatggtcaccgtctctcca

SEQ ID NO: 15533 - DNA, 315 bp, Homo sapiens
  source 1..315: mol_type = other DNA
gcttctggttacacctttaccacctatggtatcagctgggtgcgacaggcccctggacaggggcttgagtggatgggatggatcaagccttacaatggtaacacagagtacacacagaagctccaggggagagtcaccatgaccacagacacatccacgagcacggcctacatggagctgaggagactgagatctgacgacacggccgtatattactgtgcgagagatcggccctcttattgtagtggtaccacctgctatccaaatgatgcttttgatgtctggggccaaggggcaatggtcaccgtctctcca

SEQ ID NO: 15534 - DNA, 304 bp, Homo sapiens
  source 1..304: mol_type = other DNA
cgctgtctctggtgggtccttcagtggttactactggacctggatccgccagcccccagggagggggctggagtggattggggaaatcaatcatacgggagatagcaactacaattcgtccctcgagagtcgagtcaccatatcacttgatatgtccaagaaccaagtctccctgcgattgtcctctgtcaccgccgcggacacggctgtgtattactgtgcgagggcgaggggtggtgccactggctactacctctactactttgactactggggccagggaaccctggtcaccgtctcctca

SEQ ID NO: 15535 - DNA, 304 bp, Homo sapiens
  source 1..304: mol_type = other DNA
cggagtctctggtgggtccttcagtggttactactggacctggatccgccagcccccggggaagggcctggagtggattggggaaatcaatcatactggagatgccaactacaattcgtccctcgagcgtcgagtcgccatatccattgacatgtccaagaaccaagtctccctgaagttgttctctgtcagcgccgcggacacggctgtgtattactgtgcgagggcgaggggtggtgccactggctactacctctactactttgactactggggccagggaaccgtggtcaccgtctcctcc

SEQ ID NO: 15536 - DNA, 333 bp, Homo sapiens
  source 1..333: mol_type = other DNA
acgcagaccctcacgctgacctgcaccttctctgggttctcgctcagcactagtggagtgggtgtgggctggctccgtcagcccccaggacaggccctggaatgtcttgcactcatttattgggatgatgataagcgctacaggccttctctgaggaacaggctcaccatcaccaaggacacctccaaaaatcaagtggtcctgacaatgaccaacatggaccctctggacacagccacatattactgtgcacacagacgggtcagtgggagcccctgggactggggtgactttgacttctggggccagggaaccgtggtcaccgtctcctca

SEQ ID NO: 15537 - DNA, 333 bp, Homo sapiens
  source 1..333: mol_type = other DNA
acgcagaccctcacgctgacctgcaccttctctgggttctcgctcagtactagtggagtgggtgtgggctggctccgtcagcccccaggacaggccctggaatgtcttgctctcatttattgggatgatgataagcgctacaggccttctctgaggaacaggctcaccatcaccaaggacacctccagaaatcaagtggtcctgacaatgaccaacatggaccctctggacacagccacatattactgtgcacacagacgggtcagtgggagcccctgggactggggtgactttgacttctggggccagggaaccgtggtcaccgtctcctca

SEQ ID NO: 15538 - DNA, 333 bp, Homo sapiens
  source 1..333: mol_type = other DNA
acgcagaccctcacgctgacctgcaccttctctgggttctcgctcagcactagtggagtgggtgtgggctggctccgtcagcccccaggacaggccctggaatgtcttgcactcatttattgggatgatgataagcgctacaggccttctctgaggaacaggctcaccatcaccaaggacacctccaaaaatcaagtagtcctgacaatgaccaacatggaccctctggacacaggcacatattactgtgcacacagacgggtcagtgggagcccctgggactggggtgactttgacttctggggccagggaaccgtggtcaccgtctcctca

SEQ ID NO: 15539 - DNA, 333 bp, Homo sapiens
  source 1..333: mol_type = other DNA
acgcagaccctcacgctgacctgcaccttctctgggttctcgcttagtgcgagtggagtgggtgtgggctggatccgtcagcccccaggacaggccctggaatgtcttgcaatcatttattgggatgatgataagcgctacagaccttctctgaggagtagactcaccatcaccaaggacacctccaaaaatcaggtggtcctgacaatgaccaacatggaccctctggacacagccacatattactgtgcacacagacgggtcagtgggagcccctgggattggggtgactttgacttctggggccagggaaccgtggtcaccgtctcctca

SEQ ID NO: 15540 - DNA, 333 bp, Homo sapiens
  source 1..333: mol_type = other DNA
acgcagaccctcacgctgacctgcaccttctctgggttctcgctcagcacgagtggagtgggagtgggctggatccgtcagcccccaggacaggccctggaatgtcttgcagtcgtttattgggatggtgataagcgctacaggccttctctgaggaacaggctcaccatcaccaaggacacctacaaaaatcaggtggtcctgacaatgaccaacatggaccctctggacacagccacatattactgtgcacacagacgggtcagtgggagcccctgggactggggtgactttgacttctggggccagggaaccgtggtcaccgtctcctca

SEQ ID NO: 15541 - DNA, 295 bp, Homo sapiens
  source 1..295: mol_type = other DNA
cactgtctttggtggctccatcagcagtgatgattactactggagctgggtccgccagcacccaggggagggcctggagtggattgggtacatctaccacagtggggagacctactacaacccgtccctcaggagtcgacttatcatatcagtagacacctctaagaaccagttctccctgaatctgatctctgtgactgccgcggacacggccgtgtattactgtgcgagatacagagggcgaccagtagactttgactactggggccagggaaccctggtcaccgtctcctca

SEQ ID NO: 15542 - DNA, 295 bp, Homo sapiens
  source 1..295: mol_type = other DNA
cactgtctttggtggctccatcagcagtgatgattactactggagctgggtccgccagcacccaggggagggcctggagtggattgggtacatctaccacagtggggagacctactacaacccgtccctcaagagtcgacttatcatatcagtagacacctctaagaaccagttctccctgaatctgatctctgtgactgccgcggacacggccgtgtattactgtgcgagatacagagggcgaccggtagactttgactactggggccagggaatcctggtcaccgtctcctca

SEQ ID NO: 15543 - DNA, 304 bp, Homo sapiens
  source 1..304: mol_type = other DNA
tgcagcctctgggttcaccgtcaggagcaactacatgagctgggtccgccaggctccagggaaggggctggagtgggtctcagttatttctagcggtagtaatacatactacgcagactccgtgaggggccgattcaccatctccagagacaattccaagaacacgctctatcttcaaatgaacagcctgagagccgaggacacggccgtgtattactgtgcgagaggtaatggggtagtgagcggctggaaatcctactactttgacaactggggccagggaaccctggtcaccgtctcctca

SEQ ID NO: 15544 - DNA, 304 bp, Homo sapiens
  source 1..304: mol_type = other DNA
tgcagcctctgggttcaccgtcagtagcaactacatgagctgggtccgccaggctccagggaaggggctggagtgggtctcagttatttatagtggtggtaggacatactcctcagactccgtgaagggccgattcaccatctccagagacaattccaagaacacgctgtatcttcaaatgaacagcctgagagtcgaggacacggccgtgtattactgtgcgagaggtaatggggtggtgagcggctggaaatcctactactttgacaattggggccagggaaccctggtcaccgtctcctca

SEQ ID NO: 15545 - DNA, 301 bp, Homo sapiens
  source 1..301: mol_type = other DNA
ggcttctggatacaccttcaccgccttctatatgcactgggtgcgacaggcccctggacaagggcttgagtggatgggatggatcaaccctaacagtggtggcacaaactatgcacagaagtttcagggctgggtcaccatgaccagggacacgtccataagtacagcctacatggaactgagcaggctgggatctgacgacacggccgtgtattactgtgcgacagaccgctatagcagctcgcctggaaggggcgcggtcgactactggggccagggaaccctggtcaccgtctcctca

SEQ ID NO: 15546 - DNA, 300 bp, Homo sapiens
  source 1..300: mol_type = other DNA
gcttctggatacaccttcaccgccttctatatgcactgggtgcgacaggcccctggacaggggcttgagtggatgggctggatcaaccctaacagtggtggcacaaactatgcacagaagtttcagggctgggtcaccatgaccagggacacgtccgtaagtacagcctacatggaactgagcagcctgggatctgacgacacggccgtctattactgtgcgacagaccgctatagcagctcgcctggaaggggcgcggtcgactactggggccagggaaccctggtcaccgtctcctca

SEQ ID NO: 15547 - DNA, 300 bp, Homo sapiens
  source 1..300: mol_type = other DNA
gcttctggatacaccttcaccgccttctatatgcactgggtgcgacaggcccctggacaagggcttgagtggatgggatggatcaaccctaacagtggtggcacaaactatgcacagaagtttcagggctgggtcaccatgaccagggacacgtccataagtacagcctacatggaactgagcagcctgggatctgacgacacggccgtgtattactgtgcgacagaccgctatagcagctcgcctggaaggggcgcggtcgactactggggccagggaaccctggtcaccgtctcctca

SEQ ID NO: 15548 - DNA, 300 bp, Homo sapiens; identical to SEQ ID NO: 15546
  source 1..300: mol_type = other DNA

SEQ ID NO: 15549 - DNA, 300 bp, Homo sapiens
  source 1..300: mol_type = other DNA
gcttctggatacaccttcaccgccttctatatgcactgggtgcgacaggcccctggacaagggcttgagtggatgggatggatcaaccctaacagtggtggcacaaactatgcacagaagtttcagggctgggtcaccatgaccagggacacgtccatgagtgcagcctacatggaattgagcaggctgggatctgacgacacggccgtgtattactgtgcgacagaccgctatagcagctcgcctggaaggggcgcggtcgactactggggccagggaaccctggtcaccgtctcctca

SEQ ID NO: 15550 - DNA, 300 bp, Homo sapiens
  source 1..300: mol_type = other DNA
gcttctggatacaccttcaccgccttctatatgcactgggtgcgacaggcccctggacaagggcttgagtggatgggatggatcaaccctaacagtggtggcacaaactatgcacagaagtttcagggctgggtcaccatgaccagggacacgtccataagtacagcctacatggaactgagcaggctgggatctgacgacacggccgtgtattactgtgcgacagaccgctatagcagctcgcctggaaggggcgcggtcgactactggggccagggaaccctggtcaccgtctcctca

SEQ ID NO: 15551 - DNA, 313 bp, Homo sapiens
  source 1..313: mol_type = other DNA
tgcagcctctggattcaccttcagtaactactggatgcactgggtccgccaacctccagggaaggggctggtgtgggtctcacgtattaacattaatggcagtagcacaacctacgcggactccgtgaagggccgattctccatctccagagacaacgccatgaacacgctgtatctgcagatgaacagtctgagagccgaggacacggctgtgtattactgtgcaaaagattttttcccattttgtagtggtggtaactgcttcgtggaatttgacctgtggggccagggaaccctggtcaccgtctccgca

SEQ ID NO: 15552 - DNA, 313 bp, Homo sapiens
  source 1..313: mol_type = other DNA
tgcagcctctggattcaccttcagtaactactggatgcactgggtccgccaacctccagggaaggggctggtgtgggtctcacgtattaacattaatggcagtagcacaacctacgcggactccgtgaagggccgattcaccatctccagagacaacgccatgaacacgctgtatctgcagatgaacagtctgagagccgaggacacggctgtgtattactgtgcaaaagattttttcccattttgtagtggtggtaactgcttcgtggaatttgacctgtggggccagggaaccctggtcaccgtctccgca

SEQ ID NO: 15553 - DNA, 295 bp, Homo sapiens
  source 1..295: mol_type = other DNA
tgcagcctctggattcacctttaataactattggatgacctgggtccgccagtctccagggaaggggctggagtgggtggccaacataaagccagatggaagtgagaaatattatctggactctgtgaagggccgattcaccatctccagggacaacgccaagagctcactgtctctgcaaatgaacagcctgagagccgacgacacggccatgtattattgtacgaaaggggggatgagtagtagctggttctgggtcgactggggccagggaaccctggtcaccgtctcctca

SEQ ID NO: 15554 - DNA, 295 bp, Homo sapiens
  source 1..295: mol_type = other DNA
tgcagcctctggattcacctttagtaactattggatgacctgggtccgccagtctccagggaaggggctggagtgggtggccaacataaagccagatggaagtgagaaatactatgtggactctgtgaagggccgattcaccatctccagggacaacgccaagaactcactatatctgcaaatgaacagcctgagagccgaggacacggccatgtattactgtacgaaaggggggatgagtagcagctggttctgggtcgactggggccagggaaccctggtcaccgtctcctca

SEQ ID NO: 15555 - DNA, 292 bp, Homo sapiens
  source 1..292: mol_type = other DNA
cgctgtctctggtgactccgtcagctctagtgactactggagttgggtccgccagccccccgggaaggggctggagtggatcgggcaaatccgtcttcctttgaccgcctactacaatccgtccctccagagtcgagtcaccgtgtcagtcgacaggtctaagaaccagctctccctcaagctgacctctgtgaccgccgcggacacggccgtgtattattgtgcgagacatctttcgggccccccgtcacatgacctctggggccagggaaccctagtcaccgtctcctca

SEQ ID NO: 15556 - DNA, 292 bp, Homo sapiens
  source 1..292: mol_type = other DNA
cgctgtctctggtgactccgtcagctctagtgactactggagttgggtccgccagccccccgggaagggtctggagtggatcgggcaaatccgtcttcctttgaccgcctactacaatccgtccctccagagtcgagtcaccgtgtcagtcgacaggtctaagaaccagctctccctcaggctgacctctgtgaccgccgcggacacggccgtgtattattgtgcgagacatctttcgggccccccgtcacatgacctctggggccagggaaccctagtcaccgtctcctca

SEQ ID NO: 15557 - DNA, 292 bp, Homo sapiens; identical to SEQ ID NO: 15556
  source 1..292: mol_type = other DNA

SEQ ID NO: 15558 - DNA, 292 bp, Homo sapiens
  source 1..292: mol_type = other DNA
cgctgtctctggtgactccgtcagctctagtgactactggagttgggtccgccagccccccggaaaggggctggagtggatcggtcaaatccgtcttccttcgaccgcctactacaatccgtccctccagagtcgagtcaccgtgtcagtcgacaggtctaagaaccagctctccctcatgctgacctctgtgaccgccgcggacacggccgtgtattattgtgcgagacatctttcgggccccccgtcacatgacctctggggccagggaaccctagtcaccgtctcctca

SEQ ID NO: 15559 - DNA, 292 bp, Homo sapiens
  source 1..292: mol_type = other DNA
cgctgtctctggtgactccgtcagctctagtgactactggagttgggtccgccagccccccgggaagggtctggagtggatcgggcaaatccgtcttcccttgaccgcctactacaatccgtccctccagagtcgagtcaccgtgtcagtcgacaggtctaagaaccagctctccctcaggctgacctctgtgaccgccgcggacacggccgtgtattattgtgcgagacatctttcgggccccccgtcacatgacctctggggccagggaaccctagtcaccgtctcctca

SEQ ID NO: 15560 - DNA, 292 bp, Homo sapiens
  source 1..292: mol_type = other DNA
cgctgtctctggtgactccgtcagatctagtgactactggagttgggtccgccagccccccgggaagggtctggagtggatcgggcaaatccgtcttcctttgaccgcctactacaatccgtccctccagagtcgagtcaccgtgtcagtcgacaggtctaagaaccagctctccctcaggctgacctctgtgaccgccgcggacacggccgtgtattattgtgcgagacatctttcgggccccccgtcacatgacctctggggccagggaaccctagtcaccgtctcctca

SEQ ID NO: 15561 - DNA, 292 bp, Homo sapiens
  source 1..292: mol_type = other DNA
cgctgtctctggtggctccatcagcagtagtaactggtggacttgggtccgccagcccccagggaaggggctggagtggattggggaaatctatcacagggggagcaccaattacaacccgtccctcaagagtcgagtcaccatatcagtcgacaagtccaagaaccagttctccctgaagctgagttctgtgaccgccgcggacacggccatttattactgtgcgaggagaggaactgacagtggctggtaccgggactggggccagggatccctggtcaccgtctcctca

SEQ ID NO: 15562 - DNA, 292 bp, Homo sapiens
  source 1..292: mol_type = other DNA
cgctgtctctggtggctccatcagcagtagtaactggtggacttgggtccgccagcccccagggaaggggctggagtggattggggaaatctatcacagggggagcaccaattacaacccgtccctcaagagtcgagtcaccatatcagtcgacaagtccaagaaccagttctccctgaagctgagttctgtgaccgccgcggacacggccatctattactgtgcgaggagaggaactgacagtggctggtaccgggactggggccagggatccctggtcaccgtctcctca

SEQ ID NO: 15563 - DNA, 292 bp, Homo sapiens
  source 1..292: mol_type = other DNA
cgctgtctctggtggctccatcagcagtagtaactggtggacttgggtccgccagcccccagggaaggggctggagtggattggggaaatctatcacagggggaacaccaattacaacccgtccctgaagagtcgagtcaccatatcagtcgacaagtccaagacccagttctccctgaacctgagttctgtgaccgccgcggacacggccatttattactgtgcgaggagaggaactgacagtggctggtaccgggactggggccagggatccctggtcaccgtctcctca

SEQ ID NO: 15564 - DNA, 301 bp, Homo sapiens
  source 1..301: mol_type = other DNA
cactgtctctggtggctccatcagcagtggcggctactactggagctggatccgccagcacccagggaagggcctggagtgggttgggtacatctattatagtgggagcacctactacaacccgtccctcaagagtcgagttaccatatcagtagacacgtctaagaaccaattctccctgaagctgagctctttgactgccgcggacacggccatgtattattgtgcgagaaatggtggctacgatttaggctggtacttcgatctctggggccgtggcaccctggtcactgtctcctca

SEQ ID NO: 15565 - DNA, 301 bp, Homo sapiens
  source 1..301: mol_type = other DNA
cactgtctctggtgggtccatcagcagtgatggctactactggagctggatccgccagcacccagggaagggcctggagtggcttgggtacatctattacagtgggagcacctactacaacccgtccctcaagagtcgacttaccatatcagtagacacgtctaagaaccagttctccctgaaaatgagctctgtgactgccgcggacacggccgtgtattattgtgcgagaaatggtggctacgatttaggctggtacttcgatctctggggccgtggcagcctggtcactgtctcccca

SEQ ID NO: 15566 - DNA, 310 bp, Homo sapiens
  source 1..310: mol_type = other DNA
tgcagcctctggattcaggtttagcagttatgccatgagctgggtccgccaggctccagggaaggggctggagtgggtctcaactattactaaggatggtcgtaacacatactacgcagactccgtcaagggccggttcaccatctccagagacaattccaaggacacgctgtatctgcaaatgaacagcctgagagccgaggacacggccgtatattactgtgcgaaagaacccaattacgtttgggggaattatcgttatatcccttttgactactggggccagggagccctggtcaccgtctcctca

SEQ ID NO: 15567 - DNA, 310 bp, Homo sapiens
  source 1..310: mol_type = other DNA
tgcagcctctggattcagttttagcagttatgccatgagctgggtccgccaggctccagggaaggggctggagtgggtctcaactattactaaggatggtcgtagcacatactacgcagactccgtcaagggccgcttcaccatctccagagacaattccagaaacacgctgtatctgcatatgaacagcctgagagccgaggacacggccgtatattactgtgcgaaagaaccgaattacgtttgggggaattatcgttatatcccttttgactactggggccagggagccctggtcaccgtctcctca

SEQ ID NO: 15568 - DNA, 310 bp, Homo sapiens
  source 1..310: mol_type = other DNA
tgcagcctctggattcagttttagcagttatgccatgagctgggtccgccaggctccagggaaggggctggagtgggtctcaactattactaaggatggtcgtagcacatactacgcagactccgtcaagggccggttcaccatctccagagacaattccagaaacacgctgtatctgcatatgaacagcctgagagccgaggacacggccgtatattactgtgcgaaagaaccgaattacgtttgggggaattatcgttatatcccttttgactactggggccagggagccctggtcaccgtctcctca

SEQ ID NO: 15569 - DNA, 310 bp, Homo sapiens
  source 1..310: mol_type = other DNA
tgcagcctctggattcaggtttagcagttatgccatgagctgggtccgccaggctccagggaaggggctggagtgggtctcaactattactaaggatggtcgtaacacatactacgcagactccgtcaagggccggttcaccatctccagatacaatttcaaggacacgctgtatctgcaaatgaacagcctgagagccgaggacacggccgtatattactgtgcgaaagaaccgaattacgtttgggggaattatcgttatatcccttttgactactggggccagggagccctggtcaccgtctcctca

SEQ ID NO: 15570 - DNA, 292 bp, Homo sapiens
  source 1..292: mol_type = other DNA
cactgtctctggtggctccatgagtaattactactggagttggatccggcagcccccagggaagggactggagtggattgggtatatctcttacggtgggaccaccaactacaacccctccctcaagagtcgagtcaccatatcagtagacacgtccaagaaccagttctccctgaagctgagctctgtgaccgccgcagacacggccgtgtattactgcgcgagacaagaggggtctgggactacttggatacgagtctggggccagggaaccctggtcaccgtctcctca

SEQ ID NO: 15571 - DNA, 292 bp, Homo sapiens
  source 1..292: mol_type = other DNA
cactgtctctggtggctccatgagtacttactattggagctggatccggcagcccccagggaagggactggagtggattggctatatctattacagtgggagaaccgactacaacccctccctcaagagtcgactcaccctatcagtagacacgtccaaaaaccagttctccctgaagctgaggtctgtgaccgccgcagacacggccatctattactgtgcgagacaagagggctctgggacgacttggatacgagtctggggccagggaaccctggtcaccgtctcctca

SEQ ID NO: 15572 - DNA, 289 bp, Homo sapiens
  source 1..289: mol_type = other DNA
cactgtctctggtggctccatccctggttactactggagttggattcggcagtccccgggaaagggactggagtggattgggttcgtctatgacagtgggagcagccactccaatccctccctcgggagtcgagtcaccatttcattagacaagtccaagaaacagttcactctggaactgacttctgtgacccctgcggacacggccgtatattattgtgcgagaaccgggtcttattactactacatggacgtctggggcgaggggaccacggtcactgtctcctca

SEQ ID NO: 15573 - DNA, 289 bp, Homo sapiens
  source 1..289: mol_type = other DNA
cactgtctctggtggctccatccctggttactactggagttggattcggcagtccccgggaaagggactggagtggattgggttcgtctatgacagtgggagcagccactccaatccctccctcgagagtcgagtcaccatttcattagacacgtccaagaaacagttcactctgaaactgacttctgtgaccgctgcggacacggccgtatattattgtgcgagaaccgggtcttattactactacatggacgtctggggcaaagggaccacggtcaccgtctcctca

SEQ ID NO: 15574 - DNA, 288 bp, Homo sapiens
  source 1..288: mol_type = other DNA
actgtctctggtggctccatccctggttactactggagttggattcggcagtccccgggaaagggactggagtggattgggttcgtctatgacagtgggagcagccactccaatccctccctcgggagtcgagtcaccatttcattagacaagtccaagaaacagttcactctggaactgacttctgtgacccctgcggacacggccgtatattattgtgcgagaaccgggtcttattactactacatggacgtctggggcgaggggaccacggtcactgtctcctca

SEQ ID NO: 15575 - DNA, 289 bp, Homo sapiens
  source 1..289: mol_type = other DNA
cactgtctctggtggctccatcagtggttactactggagttggatccggcagaccccggggaagggactggagtacattggtcacatctatgacactgggagcgccttctccagtccctccctcgagagtcgagtcaccatttcattagacacgtccaagaaacagttctctctgaaactgacgtctgtgaccgctgcggacacggccgtgtattattgtgcgagaaccgggtcttattactactacatggacgtctggggcaaagggaccacggtcaccgtctcctca

SEQ ID NO: 15576 - DNA, 289 bp, Homo sapiens
  source 1..289: mol_type = other DNA
cactgtctctggtggctccatcagtggttactactggagttggatccggcagaccccggggaagggactggagtggattggttacgtctatgacactgggagtgccttctccagtccctccctcgagagtcgagtcagcatttcattagacacgtccaagaaacagttctctctgaaactgaggtctgtgaccgctgcggacacggccgtctattattgtgcgagaaccgggtcttattactactacatggacgtctggggcaaagggaccacggtcaccgtctcctca

SEQ ID NO: 15577 - DNA, 289 bp, Homo sapiens
  source 1..289: mol_type = other DNA
cactgtgtctggtggctccatcatgggttactactggagttggatccggcagtccccggggaagggactggagtggattggttacatctatgacagtgggagcgactactccaatccctccctcgagagtcgagtcaccatttcattagacaggtccaagaaacagttctctctgaaactgagttctgtgaccgctgcggacacggccgtatattattgtgcgagaaccgggtcttattactactacatggacgtctggggcaaagggaccacggtcaccgtctcctca

SEQ ID NO: 15578 - DNA, 289 bp, Homo sapiens
  source 1..289: mol_type = other DNA
cactgtctctggtggctccatcagtggttactactggagttggatccggcagcccccggggaagggactggagtggattgggtacatctatgacagtgggagcagctactccaatccctccctcgagagtcgagtcaccatttcattagacacgtccaagaaacagttctctctgaaactgagttctgtgaccgctgcggacacggccgtatattattgtgcgagaaccgggtcttattactactacatggacgtctggggcaaagggaccacggtcaccgtctcctca

SEQ ID NO: 15579 - DNA, 289 bp, Homo sapiens
  source 1..289: mol_type = other DNA
cactgtctctggtggctccatcagtggttactactggagttggatccggcagaccccggggaagggactggagtggattggttacatctatgacagtgggagcacctactccagtccctccctcgagagtcgagtcaccatttcattagacacgtccaagaaacagttctctctgaaactgaggtctgtgaccgctgcggacacggccgtgtattattgtgcgagaaccgggtcttattactactacatggacgtctggggcaaagggaccacggtcaccgtctcctca

SEQ ID NO: 15580 - DNA, 289 bp, Homo sapiens
  source 1..289: mol_type = other DNA
cactgtctctggtggctccatcagtggttactactggagttggatccggcagaccccggggaagggactggagtatattggtcacatttatgacactgggagcgccttctccagtccctccctcgagagtcgagtcaccatttcattagacaggtccaagaaacagttctctctgaaactgacgtctgtgaccgctgcggacacggccgtgtattattgtgcgagaaccgggtcttattactactacatggacgtctggggcaaagggaccacggtcaccgtctcctca

SEQ ID NO: 15581 - DNA, 289 bp, Homo sapiens
  source 1..289: mol_type = other DNA
cactgtctctggtggctccatcgatggttactactggagttggatccggcagaccccggggaagggactggagtgggttggttacatctatgacagtgggagctcctactccagtccctccctcgagagtcgagtcaccatttcattagacaagtcgaagaaacagttctctctgaaactgaggtctgtgaccgctgcggacacggccgtgtattattgtgcgagaaccgggtcttattactactacatggacgtctggggcaaagggaccacggtcaccgtctcctca

SEQ ID NO: 15582 - DNA, 289 bp, Homo sapiens
  source 1..289: mol_type = other DNA
cactgtctctggtggctccatcagtggatactactggagttggatccggcagcccccggggaagggactggaatggattgggtacgtctatgacagtggaagcagctactccaatccctccctcgagagtcgagtcaccatttccttagaaaagtccaagaaacagttctctctgaaactgagttctgtgaccgctgcggacacggccatatactactgtgcgagaaccgggtcctattactactacatggacgtgtggggcgaagggaccacggtcaccgtctcctca

SEQ ID NO: 15583 - DNA, 289 bp, Homo sapiens
  source 1..289: mol_type = other DNA
cactgtctctggtggctccatcagtggttactactggagttggatccggcagaccccggggaggggactggagtgggttggttacgtgtatgacactgggagttccttctccagtccctccctcgagagtcgagtcaccatttcgttagacacgtccaagaaacagttctctctgaagctgaggtctgtgaccgctgcggacacggccgtttattattgtgcgagaaccgggtcttattactactacatggacgtctggggcaaggggaccacggtcaccgtctcctca

SEQ ID NO: 15584 - DNA, 289 bp, Homo sapiens
  source 1..289: mol_type = other DNA
cactgtctctggtggctccatcagtggttactactggagttggatccggcaggccccggggaagggactggagtacattggtcacatctatgacactgggagcgccttctccagtccctccctcgagagtcgagtcaccatttctttggacaggtccaagaaacagttctctctgaaactgacgtctgtgaccgctgcggacacggccgtgtattattgtgcgagaaccgggtcttattactactacatggacgtctggggcaaggggaccacggtcaccgtctcctca

SEQ ID NO: 15585 - DNA, 289 bp, Homo sapiens; identical to SEQ ID NO: 15573
  source 1..289: mol_type = other DNA

SEQ ID NO: 15586 - DNA, 289 bp, Homo sapiens
  source 1..289: mol_type = other DNA
cactgtctctggtggctccatcagtggttactactggagttggatccggcagaccccggggaagggactggagtatattggtcacatctatgacactgggagcgccttctccagtccctccctcgagagtcgagtcaccatttcattagacacgtccaagaaacagttctctctgaaactgacgtctgtgaccgctgcggacacggccgtgtattattgtgcgagaaccgggtcttattactactacatggacgtctggggcaaagggaccacggtcaccgtctcctca

SEQ ID NO: 15587 - DNA, 289 bp, Homo sapiens
  source 1..289: mol_type = other DNA
cactgtctctggtggctccatcagtggttactactggagttggattcgacagaccccggggaagggactggagtggattggttacgtctatgacactgggagctccttctccagtccctccctcgagagtcgagtctccatttcattggacacatccaagaaacagttttctctgaaactgaggtctgtgaccgctgcggacacggccgtgtattattgtgcgagaaccgggtcttattactactacatggacgtctggggcaaagggaccacggtcaccgtctcctca

SEQ ID NO: 15588 - DNA, 289 bp, Homo sapiens
  source 1..289: mol_type = other DNA
ctctgtctctggtggctccatgatgggttactactggagttggatccggcagcccccggggaagggattggagtggattgggtttgtctatgacagtgggagcagccactccactccctccctcgagagtcgagtcaccatttcattagacaagtccaagaaacagttctctctgagactgagttctgtgaccgctgcggacacggccgtatattattgtgcgagaaccgggtcttattactactacatggacgtctggggcaaagggaccacggtcaccgtctcctca

SEQ ID NO: 15589 - DNA, 289 bp, Homo sapiens
  source 1..289: mol_type = other DNA
cactgtctctggtggctccatcagtggttactactggagttggatccggcaggccccggggaagggactggagtacattggtcacatctatgacactgggagcgccttctccagtccctccctcgagagtcgagtcaccatttctttagacacgtccaagaaacagttctctctgaaactgacgtctgtgaccgctgcggacacggccgtgtattattgtgcgagaaccgggtcttattactactacatggacgtctggggcaaagggaccacggtcaccgtctcctca

SEQ ID NO: 15590 - DNA, 289 bp, Homo sapiens
  source 1..289: mol_type = other DNA
cactgtctctggtggcgccatcagtggttactactggagttggatccgacagcccccggggaaggggctggagtggattgggtacgtctatgacagtggaagtagctactcgactccctccctcgagagtcgagtcaccatttcattagacaagtccaagaggcagttctctctgaagctgagttttgtgaccgctgcggacacggccgtatattactgtgcgagaaccgggtcttattactactacatggacgtctggggcaaagggaccacggtcaccgtctcctca

SEQ ID NO: 15591 - DNA, 289 bp, Homo sapiens
  source 1..289: mol_type = other DNA
cattgtctctggtggctccatcagtggttactactggagttgggtccggcagcccccggggaagggactggagtggattgggtacatctatgacactgggagcagctactccaatccctccctcgagagtcgagtcaccatttcattagacacgtccaggaaacagttctctctgaaactgagttctgtgaccgctgcggacacggccgtatattattgtgcgagaaccgggtcttattactactacatggacgtctggggcaaagggaccacggtcaccgtctcctca

SEQ ID NO: 15592 - DNA, 289 bp, Homo sapiens
  source 1..289: mol_type = other DNA
cactgtctctggtggctccatcagtggttactactggagttggatccggcaggccccggggaagggactggagtacattggtcacatctatgacactgggagcgccttctccagtccctccctcgagagtcgagtcaccatttctttggacacgtccaagaaacagttctctctgaaactgacgtctgtgaccgctgcggacacggccgtgtattattgtgcgagaaccgggtcttattactactacatggacgtctggggcaaggggaccacggtcaccgtctcctca

SEQ ID NO: 15593 - DNA, 289 bp, Homo sapiens
  source 1..289: mol_type = other DNA
cactgtctctggtggctccatcagtggttactactggagttggatccggcagcccccggggaagggactggagtggattgggttcatctatgacagtgggagcagcttctcagatccctccctggagagtcgagtcaccatttcgtgggacacgtctaagaaacagttctctttgaagctgagttctgtgaccgctgcggacacggccgtatattattgtgcgagaaccgggtcttattactactacatggacgtctggggcaatgggaccacggtcaccgtctcctca

SEQ ID NO: 15594 - DNA, 289 bp, Homo sapiens
  source 1..289: mol_type = other DNA
cactgtctctggtggctccatcggtggttactactggagttggatccggcagaccccggggaagggactggagtggattggttacgtctatgacactgggagcgcctactccagtccctccctcgagagtcgagtcaccatttcattagacacgtccaagaaacagttctctctgaaactgagatctgtgaccgctgcggacacggccgtgtattattgtgcgagaaccgggtcttattactactacatggacgtctggggcaaagggaccacggtcaccgtctcctca

SEQ ID NO: 15595 - DNA, 289 bp, Homo sapiens
  source 1..289: mol_type = other DNA
cactgtctctggtggctccatccctggttactactggagttggattcggcagtccccgggaaagggactggagtggattgggttcgtctatgacagtgggagcagccactccactccctccctcgagagtcgagtcaccatttcattagacaagtccaagaaacagttcactctgaaactgacttccgtgaccgctgcggacacggccgtatattattgtgcgagaaccgggtcttattactactacatggacgtctggggcaaagggaccacggtcaccgtctcctca

SEQ ID NO: 15596 - DNA, 289 bp, Homo sapiens
  source 1..289: mol_type = other DNA
cactatctctggtggctccatccctggttactactggagttggattcggcagtccccgggaaagggactggagtggattgggttcgtctatgacactgggagcagccactccaatccctccctcgagagtcgagtcaccatttcattagacacgtccaagaaacagttcactctgaaactgacttctgtgaccgctgcggacacggccgtatattattgtgcgagaaccgggtcttattactactacatggacgtctggggcaaagggaccacggtcaccgtctcctca

SEQ ID NO: 15597 - DNA, 290 bp, Homo sapiens
  source 1..290: mol_type = other DNA
cactgtctctggtggctccatcagtggttactactggagttggatccggcagaccccggggaagggactggagtatattggtcacatttatgacactgggagcgccttctccagtccctccctcgagagtcgagtcaccatttcattagacaggtccaagaaacagttctctctgaaactgacgtctgtgaccgctgcggacacggccgtgtattattgtgcgagaaccgggtcttattactactacatggacgtctggggcaaaagggaccacggtcaccgtctcctca

SEQ ID NO: 15598 - DNA, 286 bp, Homo sapiens
  source 1..286: mol_type = other DNA
cactgtctctggtggctccatccctggttactactggagttggattcggcagtccccgggaaagggactggagtggattgggttcgtctatgacagtgggagcagccactccaatccctccctcgagagtcgagtcaccatttcattagacacgtccaagaaacagttcactctgaaactgacttctgtgaccgctgcggacacggccgtatattgtgcgagaaccgggtcttattactactacatggacgtctggggcaaagggaccacggtcaccgtctcctca

SEQ ID NO: 15599 - DNA, 289 bp, Homo sapiens
  source 1..289: mol_type = other DNA
cactgtgtctggtggctccatcatgggttactactggagttggatccggcagtccccggggaagggactggagtggattggttacatctatgacagtgggagcgactactccaatccctccctcgagagtcgagtcaccatttcattagacaggtccaagaaacagttctctctgaaactgagttctgtgaccgctgcggacacggccgtacattattgtgcgagaaccgggtcttattactactacatggacgtctggggcaaagggaccacggtcaccgtctcctca

SEQ ID NO: 15600 - DNA, 289 bp, Homo sapiens
  source 1..289: mol_type = other DNA
cactgtctctggtggctccatcagtggttactactggagttggatccggcagaccccggggaagggactggagtggattggttacctctatgacactgggagtgccttctccagtccctccctcgagagtcgagtcagcatttcattagacacgtccaagaaacagttctctctgaaactgaggtctgtgaccgctgcggacacggccgtctattattgtgcgagaaccgggtcttattactactacatggacgtctggggcaaagggaccacggtcaccgtctcctca

SEQ ID NO: 15601 - DNA, 289 bp, Homo sapiens
  source 1..289: mol_type = other DNA
cactgtctctggtggctccatcagtggttactactggagttggatccggcagaccccggggaagggactggagtacattggtcacatctatgacactgggagcgccttctccagtccctccctcgagagtcgagtcaccatttcattagacacgtccaagaaacagttctctctgaaactgacgtctgtgaccgctgcggacacggctgtgtattattgtgcgagaaccgggtcttattactactacatggacgtctggggcaaagggaccacggtcaccgtctcctca

SEQ ID NO: 15602 - DNA, 289 bp, Homo sapiens
  source 1..289: mol_type = other DNA
cactgtctctggtggctccatcaatggttactactggagttggatccggcagcccccggggaagggactggagtggcttgggtacatctatgacagtgggagcagctactccaatccgtccctcgagagtcgagtcaccatctcattagacaagtcccagaaacagttctctctgaaactcagttctgtgaccgctgcggacacggccgtatattattgtgcgagaaccgggtcttattactactacatggacgtctggggcaaagggaccacggtcaccgtctcctca

SEQ ID NO: 15603 - DNA, 289 bp, Homo sapiens
  source 1..289: mol_type = other DNA
cactgtctctggtggctccatcagtggttactactggagttggatccggcagcccccggggaagggactggagtacattgggcacatctttgacagtgggagcagctactccagtccctccctcgagagtcgagtcaccatttccttagacaagtccaagaaacagatctctctgaaactgagttctatgaccgctgcggacacggccgaatattattgtgcgagaaccgggtcttattactactacatggatgtctggggcaaagggaccacggtcaccgtctcctca

SEQ ID NO: 15604 - DNA, 289 bp, Homo sapiens
  source 1..289: mol_type = other DNA
cagtgtctctggtggctccatcagtggttactactggagttggatccggcagcccccggggaagggactggagtggattgggtacgtctatgacagtggaagtagttactccaatccctccctcgagagtcgagtcaccatttcattagacacgtccaagaaacagttctctctgaaactgagctctgtgaccgctgcggacacggccgtatattattgtgcgagaaccgggtcttattactactacatggacgtctggggcaaagggaccacggtcaccgtctcctca

SEQ ID NO: 15605 - DNA, 289 bp, Homo sapiens
  source 1..289: mol_type = other DNA
cactgtctctggtggctccatcagtggttactactggagttggatccggcaggccccggggaagggactggagtacattggtcacatctatgacactgggagcgccttctccagtccctccctcgagagtcgagtcaccatttcttcagacacgtccaagaaacagttctctctgaaactgacgtctgtgaccgctgcggacacggccgtgtattattgtgcgagaaccgggtcttattactactacatggacgtctggggcaaagggaccacggtcaccgtctcctca

SEQ ID NO: 15606 - DNA, 289 bp, Homo sapiens
  source 1..289: mol_type = other DNA
cactgtctctggtggctccatcagtggttactactggagttggatccggcaggccctggggaagggactggagtacattggtcacatctatgacactgggagcgccttctccagtccctccctcgagagtcgagtcaccatttctttagacacgtccaagaaacagttctctctgaaactgacgtctgtgaccgctgcggacacggccgtgtattattgtgcgagaaccgggtcttattactactacatggacgtctggggcaaagggaccacggtcaccgtctcctca

SEQ ID NO: 15607 - DNA, 289 bp, Homo sapiens
  source 1..289: mol_type = other DNA
cagtgtctctggtggctccatccctggttactactggagttggatccggcagcccccggggaagggactggagtggattgggttcatctatgacagtgggagcagcttctccaatccctccctcgagagtcgagtcaccatttcattggacacgtccaacaaacagttctctctgaaactgagttctgtgaccgctgcggacacggccgtatattattgtgcgagaaccgggtcttattactactacatggacgtctggggcaacgggaccacggtcaccgtctcctca

SEQ ID NO: 15608 - DNA, 289 bp, Homo sapiens
  source 1..289: mol_type = other DNA
cactgtctctggtggctccatcagtggttactactggagttggattcgacagaccccggggaagggactggagtggattggttacgtctatgacactgggagctccttctccagtccctccctcgagagtcgagtctccatttcattggacacatccaagaaacagttttctctgaaactgaggtctgtgaccgctgcggacacggccgtgtattattgtgcaagaaccgggtcttattactactacatggacgtctggggcaaagggaccacggtcaccgtctcctca

SEQ ID NO: 15609 - DNA, 289 bp, Homo sapiens
  source 1..289: mol_type = other DNA
cactgtctctggtggctccatcagtggttactactggagttggatccgacagcccccggggaagggactggagtggattggggagatctatgacactgggagcagctattccaatccctccctcgagagtcgagtcaccatttcattagacacttccaagaaacaattctctctgaaactgagttctgtggacgccgcggacaccgccgtatattattgtgcgagaaccgggtcttattactactacatggacgtctggggcaaagggaccacggtcaccgtctcctca

SEQ ID NO: 15610 - DNA, 289 bp, Homo sapiens
  source 1..289: mol_type = other DNA
cactgtctctggtggctccatccttggtttctactggagttggatccggcagaccccagggaagggactggagtggattggtttcatctatgacactgggagcgccttctccagtccctccctcaagagtcgagtcagcatttccttagacacgtccaagaaacaattctctctaaatctgaggtctgtgaccgctgcggacacggccgtctactattgtgcgcgaaccgggtcttattactactacatggacgtctggggcaaagggaccacggtcaccgtctcctca

SEQ ID NO: 15611 - DNA, 289 bp, Homo sapiens
  source 1..289: mol_type = other DNA
cactgtctctggtggctccatcagtggttactactggagttggatccggcagaccccggggaagggactggagtatattggtcacatttatgacactgggagcgccttctccagtccctccctcgagagtcgagtcaccatttcattagacaggtccaagaaacagttctctctgaaactgacgtctgtgaccgctgcggacacggccgtgtattattgtgcgagaactgggtcttattactactacatggacgtctggggcaaagggaccacggtcaccgtctcctca

SEQ ID NO: 15612 - DNA, 288 bp, Homo sapiens
  source 1..288: mol_type = other DNA
cactgtctctggtggctccatcagtggttactactggagttggatccggcagaccccggggaagggactggagtacattggtcacatctatgacactgggagcgccttctccagtccctccctcgagagtcgagtcaccatttcattagacacgtccaagaaacagttctctctgaaactgacgtctgtgaccgctgcggacacggccgtgtattattgtgcgagaaccgggtcttattactactacatggacgtctggggcaagggaccacggtcaccgtctcctca

SEQ ID NO: 15613 - DNA, 289 bp, Homo sapiens
  source 1..289: mol_type = other DNA
cactgtctctggtggctctatcagtggttactactggagttggattcgacagaccccggggaagggactggagtggattggttacgtctatgacactgggagctccttctccagtccctccctcgagagtcgagtctccatttcattggacacatccaagaaacagttttctctgaaactgaggtctgtgaccgctgcggacacggccgtgtattattgtgcgagaaccgggtcttattactactacatggacgtctggggcaaagggaccacggtcaccgtctcctca

SEQ ID NO: 15614 - DNA, 289 bp, Homo sapiens
  source 1..289: mol_type = other DNA
cactgtgtctggtggctccatcatgggttgctactggagttggatccggcagtccccggggaagggactggagtggattggttacatctatgacagtgggagcgactactccaatccctccctcgagagtcgagtcaccatttcattagacaggtccaagaaacagttctctctgaaactgagttctgtgaccgctgcggacacggccgtatattattgtgcgagaaccgggtcttattactactacatggacgtctggggcaaagggaccacggtcaccgtctcctca

SEQ ID NO: 15615 - DNA, 289 bp, Homo sapiens
  source 1..289: mol_type = other DNA
cactgtctctggtggctccatcagtggttactactggagttggatccggcagaccccggggaagggactggagtggattggttacatctatgacagtgggagcacctactccagtccctccctcgagagtcgagtcaccatttcattagacacgtccaagaaacagttctctctaaaactgaggtctgtgaccgctgcggacacggccgtgtattattgtgcgagaaccgggtcttattactactacatggacgtctggggcaaagggaccacggtcaccgtctcctca

SEQ ID NO: 15616 - DNA, 289 bp, Homo sapiens
  source 1..289: mol_type = other DNA
cactgtctctggtggttccatcgatggttactactggagttggatccggcagcccccggggaaggggctggagtggattggctacgtctatgacactggaagtagcttctcgattccatccctcgagagtcgagtcaccatttcattagacaagtccaggagacagttctctctgaaactgagttctgtgaccgttggtgacacggccgtatattactgtgcgagaaccgggtcttattactactacatggacgtctggggcaaagggaccacggtcaccgtctcctca

SEQ ID NO: 15617 - DNA, 289 bp, Homo sapiens; identical to SEQ ID NO: 15582
  source 1..289: mol_type = other DNA

SEQ ID NO: 15618 - DNA, 289 bp, Homo sapiens
  source 1..289: mol_type = other DNA
cactgtctctggtggctccatcagtggttactactggagttggatccggcagaccccggggaagggactggagtacattggtcacatctatgacactgggagcgccttctccagtccctccctcgagagtcgagtcaccatttcattagacacgcccaagaaacagttctctctgaaactgacgtctgtgaccgctgcggacacggccgtgtattattgtgcgagaaccgggtcttattactactacatggacgtctggggcaaagggaccacggtcaccgtctcctca

SEQ ID NO: 15619 - DNA, 289 bp, Homo sapiens
  source 1..289: mol_type = other DNA
cactgtctctggtggctccatcaggggttactactggagttggatccggcagaccccggggaagggactggagtacgttggtcacatctatgacactgggagcgccttctccagtccctccctcgagagtcgagtcaccatttcattagacacgtccaagaaacagttctctctgaaactgacgtctgtgaccgctgcggacacggccgtgtattattgtgcgagaaccgggtcttattactactacatggacgtctggggcaaagggaccacggtcaccgtctcctca

SEQ ID NO: 15620 - DNA, 289 bp, Homo sapiens
  source 1..289: mol_type = other DNA
cactgtctctggtggctccatcagtggttactactggagttggatccggcagcccccggggaagggactggagtggattgggtacatctatgacactgggagcagctactccaacccctccctcgagagtcgagtcaccatttcatttgacacgtccaggaaacacttctctctgaaactgagttctgtgaccgctgcggacacggccgtatattattgtgcgagaacagggtcttattactactacatggacgtctggggcaaagggaccacggtcaccgtctcctca

SEQ ID NO: 15621 - DNA, 289 bp, Homo sapiens
  source 1..289: mol_type = other DNA
cactgtctctggtggctccatccctggtttctactggagttggattcgccagtccccggcaaagggactggagtggattgggttcgtctatgacactgggagcagccactacagcccctccctcgcgagtcgagtcaccatttcattagacacgtccaagaaacagttcactctgaaactgacttctgtgaccgctgcggacacggccgtatactattgtgcgagaaccgggtcttattactactacatggacgtctggggcaaagggaccacggtcaccgtctcctca

SEQ ID NO: 15622 - DNA, 289 bp, Homo sapiens
  source 1..289: mol_type = other DNA
cactgtctctggtggctccatcagtggttactactggagttggatccggcagcccccggggaagggactggagtacattgggcacgtctatgacagtgggagcagctactccaatccctccctcgagagtcgagtcaccatttccttagacaagtccaagaaacagatctctctgaaactgagttctatgaccgctgcggacacggccgaatattattgtgcgagaaccgggtcttattactactacatggacgtctggggcaaagggaccacggtcaccgtctcctca

SEQ ID NO: 15623 - DNA, 289 bp, Homo sapiens
  source 1..289: mol_type = other DNA
cactgtctctggtggctccatcagtggttactactggagttggatccggcagcccccggggaagggactggagtggattgggttcatctatgacagtgggagcagcttctcagatccctccctggagagtcgagtcaccatttcgtgggacacgtctaagaaaatgttctctttgaagctgaattctgtgaccgctgcggacacggccgtatattattgtgcgagaaccgggtcttattactactacatggacgtctggggcaatgggaccacggtcaccgtctcctca

SEQ ID NO: 15624 - DNA, 322 bp, Homo sapiens
  source 1..322: mol_type = other DNA
tgcagcctctggattcactctcagtacttatggcatgcactgggtccgccaggctccaggcaaggggccggagtgggtggcagttatagcatatgatggaagtaacgaccactatgcaggctccgtgaagggccgattcaccatctccagagacaattccaggaacacggtgtatctgcagatgaacagcctgagagctgaggacacggctgtgtactactgtgcgaggggcgataacgattattggagtggtcattatacaagctactattactactacatggacgtctggggcacagggaccacggtcaccgtctcctca

SEQ ID NO: 15625 - DNA, 322 bp, Homo sapiens
  source 1..322: mol_type = other DNA
tgcagcctctggattcaccctcagtagttatggcatgcactgggtccgccaggctccaggcaaggggccggagtgggtggcagttatagcatatgatggaagtaaggaccactatgcagactccgtgaagggccgattcaccatctccagagacaattccaggaacacggtgtatctgcagatgaacagcctgagagctgaggacacggctgtgtactactgtgcgaggggcgataacgattattggagtggtcattatacaagctactattactactacatggacgtctggggcacagggaccacggtcaccgtctcctca

SEQ ID NO: 15626 - DNA, 301 bp, Homo sapiens
  source 1..301: mol_type = other DNA
tgcagtctctagattcacgtttagcaactatgccatggactgggtccgccaggctccggggaaggggctggagtgggtcgcacacattggtcctaatggtggtggcacatactacgcagactccgttaagggccggttcaccatctccagagacaattccaagaacacgctgtatctgcaaatgaatagcctgagagccgaggacacggccgtctattattgtgcgaaagtctgttatggcaacaacaggagattgggttttgactcctggggccggggaaccctggtcaccgtctcctca

SEQ ID NO: 15627 - DNA, 301 bp, Homo sapiens
  source 1..301: mol_type = other DNA
tgcagtctctagattcacgtttagcaactatgccatggactgggtccgccaggctccggggaaggggctggagtgggtcgcacacattggtcctaatggtggtggcacatactacgcagactccgttaagggccggttcaccatctccagagacaattccaagaacacgctgtatctgcaaatgaatagcctgagagccgaggacacggccgtctattactgtgcgaaagtctgttatggcaacaacaggagattgggttttgactcctggggccggggaaccctggtcaccgtctcctca

SEQ ID NO: 15628 - DNA, 304 bp, Homo sapiens
  source 1..304: mol_type = other DNA
cactgtctccggtggccccatctggaatagtgacttccgctggggctggatccgccagcccccagggagggggctggagtggatcgggactatctggtataatggggacacctacaacaacccgtccctcaagagccgaatcaccatgtccgtcgacacgtccaggaaccatgtctccctgaaggtgttttctgtgaccgccgcagacacggcggtctattactgtgcgagacacatcgaggcaggagccggatgggactggttcgacccctggggccagggaatcccggtcactgtctcttca

SEQ ID NO: 15629 - DNA, 304 bp, Homo sapiens
  source 1..304: mol_type = other DNA
cactgtctccggtggccccatctggaatagtgacttccgctggggctggatccgccagcccccagggagggggctggagtggatcgggactatctggtataatggggacacctacaacaacccgtccctgaagagccgaatcaccatgtccgtcgacacgtccaggaaccatgtctccctgaaggtgttctctgtgaccgccgcagacacgggggtctattattgtgcgagacacatcgaggcaggagccggatgggactggttcgacccctggggccagggaatcccggtcactgtctcctca

SEQ ID NO: 15630 - DNA, 304 bp, Homo sapiens
  source 1..304: mol_type = other DNA
cactgtctccggtggccccatctggaatagtgacttccgctggggctggatccgccagcccccagggagggggctggagtggatcgggactatctggtataatggggacacctacaacaacccgtccctcaagagccgaatcaccatgtccgtcgacacgtccaggaaccatgtctccctgaaggtgttctctgtgaccgccgcagacacggcggtctattactgtgcgagacacatcgaggcaggagccggatgggactggttcgacccctggggccagggaatcccggtcactgtctcctca

SEQ ID NO: 15631 - DNA, 304 bp, Homo sapiens; identical to SEQ ID NO: 15629
  source 1..304: mol_type = other DNA

SEQ ID NO: 15632 - DNA, 304 bp, Homo sapiens
  source 1..304: mol_type = other DNA
cactgtctccggtggccccatctggaatagtgacttccgctggggctggatccgccagcccccagggagggggctggagtggatcgggactatctggtataatggtgacacctacaacaacccgtccctcaagagccgaatcaccatgtccgtcgacacgtccaggaaccagctctccctgaagctgtactctgtgaccgccgcagacacggcggtatatttctgtgcgagacacatcgaggcaggagccggatgggactggttcgacccctggggccagggaaccccggtcactgtctcctca

SEQ ID NO: 15633 - DNA, 280 bp, Homo sapiens
  source 1..280: mol_type = other DNA
tgcagcctctggtttcaggtttagtgacttttggatgaattgggtccgccaggctccagggaagggcctgcaatgggtggccaacataaaggacgatggaagtgaaaaatactatgcagattctctgaagggccgattcaccatctccagagacaacgccaagaactcattgtatctacaactaaacagcctgcgagccgaggacacggccctctactattgcttttatggccattatagtgaccgctggggccagggaaccctggtcaccgtctcctca

SEQ ID NO: 15634 - DNA, 280 bp, Homo sapiens
  source 1..280: mol_type = other DNA
tgcagcctctggtttcaggtttagtgacttttggatgaattgggtccgccaggctccagggaaggggctggaatgggtggccaacataaaggacgatggaagtgaaaaatactatgcagattctctgaagggccgattcaccatctccagagacaacgccaagaactcattgtatctacaactaaacagcctgcgagccgaggacacggccctctactattgcttttatggccattatagtgaccgctggggccagggaaccctggtcaccgtctcctca

SEQ ID NO: 15635 - DNA, 280 bp, Homo sapiens
  source 1..280: mol_type = other DNA
ctcagcctctggactcaggtttagcgacttttggatgaactgggtccgccaggctccagggaaggggctggagtgggtggccaatataaatggagatggatctcaggaaaactatgcaaattttgtgaagggccgattcaccatctccagagacaacgccaggacctcactgtatctgcacctgacaagcctgagagtcgaggacacggccgtctattattgtttttatggtcattacagtgaccgctggggcccgggaaccctgctcaccgtctcctcc

SEQ ID NO: 15636 - DNA, 280 bp, Homo sapiens
  source 1..280: mol_type = other DNA
ctcagcctctggactcaggtttagcgacttttggatgaactgggttcgccaggctccagggaaggggctggagtgggtggccaatataaatggagatggatctcaggaaaactatgcaaattttgtgaagggccgattcaccatctccagagacaacgccaggacctcactgtatctgcacctgacaagcctgagagtcgaggacacggccgtctattattgtttttatggtcattacagtgaccgctggggcccgggaaccctgctcaccgtctcctcc

SEQ ID NO: 15637 - DNA, 280 bp, Homo sapiens; identical to SEQ ID NO: 15633
  source 1..280: mol_type = other DNA

SEQ ID NO: 15638 - DNA, 280 bp, Homo sapiens
  source 1..280: mol_type = other DNA
ctcagcctctggactcaggtttagcgacttttggatgaactgggtccgccaggctccagggaaggggctggagtgggtggccaatataaagggagatggatctcaggaaaactatgcaaattttgtgaagggccgattcaccatctccagagacaacgccaggacctcactgtatctgcacctgacaagcctgagagtcgaggacacggccgtctattattgtttttatggtcattacagtgaccgctggggcccgggaaccctgctcaccgtctcctcc

SEQ ID NO: 15639 - DNA, 280 bp, Homo sapiens
  source 1..280: mol_type = other DNA
ctcagcctctggactcaggtttagcgacttttggatgaactgggtccgccaggctccagggaaggggctggagtgggtggccaatataaatggagatggatctcaggaaaactatgcaaattttgtgaagggccgattcaccgtctccagagacaacgccaggacctcactgtatctgcacctgacaagcctgagagtcgaggacacggccgtctattattgtttctatggtcattacagtgaccgctggggcccgggaaccctgctcaccgtctcctcc

SEQ ID NO: 15640 - DNA, 277 bp, Homo sapiens
  source 1..277: mol_type = other DNA
tgcagcctctggattcacctttagcaactatctcctgacctgggtccgccaggctccagggaaggggctggaatgggtctcagatattagtggtagtggtgctactacatactacgcagactccgtgaagggccggttcaccatctccagagacaattccaagaacacgctgtatctgcaaatgaacagcctgagagtcgaggacacggccctatattactgtgcgaaaagacttagcggggactggggccagggagccctggtcaccgtctcctca

SEQ ID NO: 15641 - DNA, 277 bp, Homo sapiens
  source 1..277: mol_type = other DNA
tgcagcctctggattcacctttagcaactatctcctgacctgggtccgccaggctccagggaaggggctggaatgggtctcagatattagtggtagtggtactactacatactacgcagactccgtgaagggccggttcaccatctccagagacaattccaagaacacgctgtatctgcaaatgaacagcctgagagtcgaggacacggccctatattactgtgcgaaaagacttagcggggactggggccagggagccctggtcaccgtctcctca

SEQ ID NO: 15642 - DNA, 307 bp, Homo sapiens
  source 1..307: mol_type = other DNA
tgcagcctctggattcaccttcagtgactcctacatgagctggatccgccaggctccagggaaggggctggaatgggtttcatacattagtagtagtggtagttacccaaactacgcagactctgtgaagggccgattcaccatctccagagacaacgccaagaactcactggatctgcaaatgaacagcctgagagccgaggacacggccgtgtattactgtgcgagagaagggacgatttttggagtggtgaccacgggggcctttgatatctggggccaagggacaatggtcaccgtctcttca

SEQ ID NO: 15643 - DNA, 307 bp, Homo sapiens
  source 1..307: mol_type = other DNA
tgcagcctctggattcaccttcagtgactcctacatgagttggatccgccaggctccagggaaggggctggagtgggtttcatacattagtagtagtggtagttacccaaactacgcagactctgtgaagggccgattcaccatctccagagacaacgccaagaactcactgaatctgcacatgaacagcctgagagccgaggacacggccgtgtattactgtgcgagagaagggacgatttttggagtggttaccacgggggcttttgatatctggggccaagggacaatggtcaccgtctcttca

SEQ ID NO: 15644 - DNA, 283 bp, Homo sapiens
  source 1..283: mol_type = other DNA
cgctgtctctgttgactccatcagtcgttactggtggggttgggtccgccagcccccagggaaggggctggagtggcttggggaaatctatgagagtgtgagcgccaactacaacccgtccctcaagagtcgagtttccatatcgatagacaagaccaaaaaccagttttccctgaacctgagttctgtgaccgccgcggacacggccatgtattactgtgtggcgagccggaactgggcccttgaaaactggggccagggaaccctggtcaccgtctcctca

SEQ ID NO: 15645 - DNA, 283 bp, Homo sapiens
  source 1..283: mol_type = other DNA
cggtgtctctgttgactccattagtcgttactggtgggcttgggtccgccagcccccagggaaggggctggagtggcttggggaaatctatgagagtgggagcgccaactacaacccgtccctcaagagtcgagtttccatatcaatagacaagaccaaaaaccagttttccctgaacctgagatctgtgaccgccgcggacacggccatgtattattgtgtggcgagccggaactgggcccttgaaaactggggccagggaaccctggtcaccgtctcctca

SEQ ID NO: 15646 - DNA, 291 bp, Homo sapiens
  source 1..291: mol_type = other DNA
aagggttctgaatactcctttaccagcgagtggatcagttgggtgcgccagctgcccgggaaaggcctggagtggatggggaggattgatcctggtgactctcacatcaactacagcccgtccttggaaggccacgtcaccatctcggctgacaagtccatcaacactgcctacctacagtggagcagcctgaaggcctcggacaccgccatgtattactgtgcgaggcacacctttagttcggggagctgtgactactggggccagggaaccctggtcaccgtctcctca

SEQ ID NO: 15647 - DNA, 291 bp, Homo sapiens
  source 1..291: mol_type = other DNA
aagggttctggatactcctttaccaacgagtggatcagttgggtgcgccagctgcccgataaaggcctagagtggatggggaggattgatcctggtgagtctcacatcaactacagcccgtccttggaaggccacgtcaccatctcggctgacaagtccatgaacactgtctacctacactggaacagcctgagggcctcggacaccgccatgtattactgtgcgagacacacctttagttcggggtcctgtgactactggggccagggaaccctggtcaccgtcgcctca

SEQ ID NO: 15648 - DNA, 292 bp, Homo sapiens
  source 1..292: mol_type = other DNA
tgcggcctctggattcacctttaggagttatgaaatgaactgggtccgccaggctccagggaaggggctggagtgggtttcgttcattgggactagtggttatgtcaaaggctacgcagactctgtaaagggccgattcgccatctccagagacaacgccaagaactcactgtatctccaaatgaacaacctgagagtcgaggacacggctgtttattactgtgcgactgatgtccctggcgcgctcgactttgacgactggggccagggaatcgtggtcaccgtctcttca

SEQ ID NO: 15649 - DNA, 292 bp, Homo sapiens
  source 1..292: mol_type = other DNA
tgcggcctctggattcaccttcaggaattatgaaatgaactgggtccgccaggctccagggaaggggctggagtgggtttcgttcattgggactggtggttatgtcaaaggctacgcagactctgtaaagggccgattcgccatctccagagacaacgccaagaactcactgtatctccaaatgaacaacctgagagtcgaggacacggctgtatattactgtgcgactgatgtccctggcgcgctcgactttgacgactggggccagggaatcctggtcaccgtctctcca

SEQ ID NO: 15650 - DNA, 292 bp, Homo sapiens
  source 1..292: mol_type = other DNA
tgcggcctctggattcaccttcaggaattatgaaatgaactgggtccgccaggctccagggaaggggctggagtgggtttcgttcattgggactggtggttatgtcaaaggctacgcagactctgtaaagggccgattcgccgtctccagagacaacgccaagaactcactgtatctccaaatgaacaacctgagagtcgaggacacggctgtatattactgtgcgactgatgtccctggcgcgctcgactttgacgactggggccagggaatcctggtcaccgtctctcca

SEQ ID NO: 15651 - DNA, 294 bp, Homo sapiens
  source 1..294: mol_type = other DNA
cagggttctggatacaactttatcagctactcgatcagctgggtgcgccagatgcccgggaaaggcctggagtggatggggaggattgatcctagtgactcttataccaactacagcccgtccttccaaggccacgtcaccatctcagctgacaggtccatcagcactgcctacctgcagtggagcagcctgaaggcctcggacaccgccatgtattactgcgcgagaccttacgatagtagtggtcattactatatgttttggggccaggggaccctggtcaccgtctcctca

SEQ ID NO: 15652 - DNA, 294 bp, Homo sapiens
  source 1..294: mol_type = other DNA
cagggttctggatacaactttatcagctactcgatcagctgggtgcgccagatgcccgggaaaggcctggagtggatggggaggattgatcctagtgactcttatatcaactacggcccgtccttccaaggccacgtcaccatctcagctgacaggtccatcagcactgcctacctgcagtggagcagcctgaaggcctcggacaccgccatgtattactgcgcgagaccttacgatagtagtggtcattactatatgttttggggccaggggaccctggtcaccgtctcctca

SEQ ID NO: 15653 - DNA, 294 bp, Homo sapiens
  source 1..294: mol_type = other DNA
cagggttctggatacaactttatcagctactcgatcagctgggtgcgccagatgcccgggaaaggcctggagtggatggggagggttgatcctagtgactcttataccaactacagcccgtccttccaaggccacgtcaccatctcagctgacaggtccatcagcactgcctacctgcagtggagcagcctgaaggcctcggacaccgccatgtattactgcgcgagaccttacgatagtagtggtcattactatatgttttggggccaggggaccctggtcaccgtctcctca

SEQ ID NO: 15654 - DNA, 294 bp, Homo sapiens; identical to SEQ ID NO: 15652
  source 1..294: mol_type = other DNA

SEQ ID NO: 15655 - DNA, 330 bp, Homo sapiens
  source 1..330: mol_type = other DNA
aaggattctggatacaggtttaccaccgactggatcggctgggtgcgccagatgcccgggaaaggcctggagtggatggggatcatctatcctggtgactctgataccagatacagtccgtccttccaaggccaggtcaccatctcagccgacaagtccatcagcaccgcctacctgcagtggagcagcctgaaggcctcggacaccgccatgtatttctgtgcgagagtaagaaccggtatcggaatagcagcaggtggtacgccgggacagtactactattactacatggacgtctggggcaaagggaccacggtcaccgtctcctca

SEQ ID NO: 15656 - DNA, 330 bp, Homo sapiens
  source 1..330: mol_type = other DNA
aagggttctggagacaggtttaccaccgactggatcggctgggtgcgccagatgcccgggaaaggcctggagtggatggggatcatctatcctggtgattctgataccagatacagcccgtccttccaaggccaggtcaccatctcagccgacaagtccatcagcaccgcctacctgcagtggagcagcctgaaggcctcggacaccgccatgtattattgtgcgagagtaagaaccggtatcgggatagcagcaggtggtacgccgggacagtactactattactacatggacgtctggggcaaagggaccacggtcaccgtctcctca

SEQ ID NO: 15657 - DNA, 307 bp, Homo sapiens
  source 1..307: mol_type = other DNA
cactgtctctggtggctccatctacagtgtcagtcactgcctgggctgggtccgccagccccctgggaagggaccggagtggattgggagtatctataatagtgcagacgcctactacaacccgtccctcaagggtcgactcaccctgtccgtggacacgtccaagaagcagttttccctgagtcttacctctgtgaccgccgcagacacggctttatattactgcgcgacaatcgctctcactggagagggggggcgaggctggttcgactcctggggcctgggaaccctcgtcaccgtctcctca

SEQ ID NO: 15658 - DNA, 307 bp, Homo sapiens
  source 1..307: mol_type = other DNA
cactgtctctggtggctccatcagcagtgttagtcactgcttgggctgggtccgccagccccctgggaagggactggagtggattgggagtatctataacagtggagacacctactacaacccgtccctcaagagtcgagtcaccatgtccgtggacacgtccaagaagcagttttccctgaggctgacctctgtgaccgccgcagacacggctttatattactgtgcgacaatcgctctaactggagagggggggcgaggctggttcgactcctggggcctgggaaccctggtcaccgtctcctca

SEQ ID NO: 15659 - DNA, 307 bp, Homo sapiens
  source 1..307: mol_type = other DNA
cactgtctctggtggctccatcagcagtgttagtcactgcttgggctgggtccgccagccccctgggaagggactggagtggattgggagtatctataacagtggaaacacctactacaacccgtccctcaagagtcgagtcaccatgtccgtggacacgtccaagaagcagttttccctgaggctgacctctgtgaccgccgcagacacggctttatattactgtgcgacaatcgctctaactggagagggggggcgaggctggttcgactcctggggcctgggaaccctggtcaccgtctcctca

SEQ ID NO: 15660 - DNA, 313 bp, Homo sapiens
  source 1..313: mol_type = other DNA
tgcagcctctgcattcaccttcagtagttatagtatgaactgggtccgccaagctccagggaaggggctggagtgggtctcatccattagtggtagtagtagttacatatactacgcagactcagtgaagggccgattcaccatctccagagacaacgccaggaactcactgtatctgcagatgaacagcctgagagccgaggacacggctgtgtattactgtgcgagagtgggttcggagagttattatacgccctactactactactacatggacgtctggggcaaagggaccacggtcaccgtctccgca

SEQ ID NO: 15661 - DNA, 313 bp, Homo sapiens
  source 1..313: mol_type = other DNA
tgcagcctctgcattcaccttcagtagttatagtatgaactgggtccgccaagctccagggaaggggctggagtgggtctcatccattagtagtagtagtagttacatatactacgcagactcagtgaagggccgattcaccatctccagagacaacgccaggaactcactgtatctgcagatgaacagcctgagagccgaggacacggctgtgtattactgtgcgagagtgggttcggagagttattatacgccctactactactactacatggacgtctggggcaaagggaccacggtcaccgtctccgca

SEQ ID NO: 15662 - DNA, 312 bp, Homo sapiens
  source 1..312: mol_type = other DNA
tgcagcctctgcattcaccttcagtagttatagtatgaactgggtccgccaagctccagggaaggggctggagtgggtctcatccattagtagtagtagtagttacatatactacgcagactcagtgaagggccgattcaccatctccagagacaacgccaggaactcactgtatctgcagatgaacagcctgagagccgaggacacggctgtgtattactgtgcgagagtgggttcggagagttattatacgccctactactactactacatggacgtctgggcaaagggaccacggtcaccgtctccgca

SEQ ID NO: 15663 - DNA, 288 bp, Homo sapiens
  source 1..288: mol_type = other DNA
acttctggttacacctttaccagctatggtatcagctgggtgcgacaggcccctggacaagggcttgagtggatgggatggatcagcgcttacaatagtaacacaaagtatgcacagaagttccagggcagagtcaccatgaccacagacacatccacgagcacagcctacatggaactgaggagcctgagatctgacgacacggccgtgtattactgtgcgagagagacggatattgtcgcaacaaatgactactggggccagggagccctggtcaccgtctcctca

SEQ ID NO: 15664 - DNA, 288 bp, Homo sapiens
  source 1..288: mol_type = other DNA
acttctggttacacctttaccagttatggtatcagctgggtgcgacaggcccctggacaagggcttgagtggatgggatggatcagcgcttacaatagtaacacaaagtatgcacagaagttccagggcagagtcaccatgaccacagacacatccacgagcacagcctacatggaactgaggagcctgagatctgacgacacggccgtgtattactgtgcgagagagacggatattgtcgcaacaaatgactactggggccagggaaccctggtcaccgtctcctca

SEQ ID NO: 15665 - DNA, 298 bp, Homo sapiens
  source 1..298: mol_type = other DNA
tgcagcctctggattcagtttcagtaactatggcattcactgggtccgccaggctcctggcaaggggctggagtgggtggcacttatatggtttgatggaagtaataaatactatgcagactccgtgaagggccgattcaccatctcaagagacaattccaggagcactctgtatctacaaatgaacaacctgagagccgaggacacggctgtctattactgtgcgcgagatcggggttcgggcagttacgaatacatggacgtctggggcaaagggaccacggtctccgtctcctca

SEQ ID NO: 15666 - DNA, 298 bp, Homo sapiens
  source 1..298: mol_type = other DNA
tgcagcctctggattcactttcagtaactatggcattcactgggtccgccaggctcctggcaaggggctggagtgggtggcacttatatggtttgatggaagtaataaatactatgcagactccgtgaagggccgattcaccatctcaagagacaattccaggagcacgctgtatctacaaatgaacaacctgagagccgaggacacggctgtctattactgtgcgcgagatcggggttcgggcagttacgaatacatggacgtctggggcaaagggaccacggtctccgtctcctca

SEQ ID NO: 15667 - DNA, 298 bp, Homo sapiens; identical to SEQ ID NO: 15665
  source 1..298: mol_type = other DNA

SEQ ID NO: 15668 - DNA, 298 bp, Homo sapiens
  source 1..298: mol_type = other DNA
tacagcctctggattcactttcagtaactatggcattcactgggtccgccaggctcctggcaaggggctggagtgggtggcacttatatggtttgatggaagtaataaatactatgcagactccgtgaagggccgattcaccatctcaagagacaattccaggagcacgctgtatctacaaatgaacaacctgagagccgaggacacggctgtctattactgtgcgcgagatcggggttcgggcagttacgaatacatggacgtctggggcaaagggaccacggtctccgtctcctca

SEQ ID NO: 15669 - DNA, 298 bp, Homo sapiens
  source 1..298: mol_type = other DNA
tgcagcctctggattcactttcagtaactatggcattcactgggtccgccaggctcctggcaaggggctggagtgggtggcacttatatggtttgatggaagtaataaatactatgcagactccgtgaagggccgattcaccatctcaagagacaattccaggagcactctgtatctacaaatgaacaacctgagagccgaggacacggctgtctattactgtgcgcgagatcggggttcgggcagttacgaatacatggacgtctggggcaaagggaccacggtctccgtctcctca

SEQ ID NO: 15670 - DNA, 289 bp, Homo sapiens
  source 1..289: mol_type = other DNA
tgcagcctctggattccccttcagcagctacgtgatgcactgggtccgccaaggtccaggggacggcctgctgtgggtcgcacgtcttagtcatgatgggtctgtccccatctatgcggactccgtgaagggccgattcaccatctccagagacaacgccaggaacaccctgtatctgcaaatgaacagtctgagcgccgaggatacggctatctattattgtgtaagagacgacggcagttggggacttgactactggggccagggaaccctggtcaccgtctcctca

SEQ ID NO: 15671 - DNA, 289 bp, Homo sapiens
  source 1..289: mol_type = other DNA
tgcagcctctggattccccttcagcagctacgtgatgcactgggtccgccaaggtccaggggacggcctgctgtgggtcgcacgtcttagtcatgatggggctgtccccatctatgcggactccgtgaagggccgattcaccatctccagagacaacgccaggaacaccctgtatctgcaaatgaacagtctgagcgccgaggatacggctatctattattgtgtaagagacgacggcagttggggacttgactactggggccagggaaccctggtcaccgtctcctca

SEQ ID NO: 15672 - DNA, 289 bp, Homo sapiens
  source 1..289: mol_type = other DNA
tgcagcctctggatttcccttcagcagctacgtgatgcactgggtccgccaaggtccaggggacggcctgctgtgggtcgcacgtcttagtcatgatggggctgtccccatctatgcggactccgtgaagggccgattcaccatctccagagacaacgccaggaacaccctgtatctgcaaatgaacagtctgagcgccgaggatacggctatctattattgtgtaagagacgacggcagttggggacttgactactggggccagggaaccctggtcaccgtctcctca

SEQ ID NO: 15673 - DNA, 298 bp, Homo sapiens
  source 1..298: mol_type = other DNA
cattgtctctggtggctccatcagcagtagtaattactactggggctggatccgccagcccccagggaaggggctggagtggattgggagtatctattatagtgggagcacctactacagcccgtccctcaagagtcgagtcaccatgtctgtggacacgtccaagaaccagttctccctgaaactgagctctgtgaccgccgcagacacggctgtgtattattgtgcgagacattcgacggtgacttccttcccaattttggtctggggccagggaaccctggtcaccgtctcctca

SEQ ID NO: 15674 - DNA, 298 bp, Homo sapiens; identical to SEQ ID NO: 15673
  source 1..298: mol_type = other DNA

SEQ ID NO: 15675 - DNA, 298 bp, Homo sapiens
  source 1..298: mol_type = other DNA
cactgtctctggtggctccatcagtagtagtaattactactggggctggatccgccagcccccagggaagggactggaatggattgggagtatctattatagtaggagcacctactacagcccgtccctccagagtcgagtcaccatatccgtagacacgtccaagagccagttctccctgaagctgagttctgtgaccgccgcagacacggctgtatattactgcgcgagacattcgacggtgacctccttcccaattttggtctggggccagggaacccgggtcgccgtctcctca

SEQ ID NO: 15676 - DNA, 298 bp, Homo sapiens
  source 1..298: mol_type = other DNA
cactgtctctggtggctccatcagcagtagtaattactactggggctggatccgccagcccccagggaaagggctggagtggattgggagtatctattatagtgggaacacctattacagcccgtccctcaagagtcgagtcaccatgtctgtggacacgtccaagaaccagttctccctgaagctgaggtctgtgaccgccgcagacacggctctatatttctgtgcgagacattcgacggtgacttccttcccaattttggtctggggccagggagccctggtcaccgtctcctca

SEQ ID NO: 15677 - DNA, 313 bp, Homo sapiens
  source 1..313: mol_type = other DNA
ttcaacctctggattcaccttcaatagttttgatgtgaactgggtccgccaggctccagggagggggctagagtgggtctcatacactaagactggtggtgctcgagtggactacgcagactctgtgaagggccgcttcaccatctccagagacaacgccaagtcctcagtggatctgcaaatgcacagcctgagagccgaggacacggctgtctactactgtgtgagatctcgattattctctgatactaggggttatccccacttggggttagacttctggggccagggaaccctggtcaccgtctcctca

SEQ ID NO: 15678 - DNA, 313 bp, Homo sapiens
  source 1..313: mol_type = other DNA
ttcaacctctggattcaccttcaatagttttgatgtgaactgggtccgccaggctccagggaaggggctagagtgggtctcatacactaagactggtggaggtcgagtggactacgcagactctgtgaagggccgcttcaccatctccagagacaacgccaagtcctcagtggatctgcaaatgcacagcctgaaagccgaggacacggctgtctactactgtgtgagatctcgattattctctgatactaggggttatccccacttggggttagacttctggggccagggaaccctggtcaccgtctcctca

SEQ ID NO: 15679 - DNA, 283 bp, Homo sapiens
  source 1..283: mol_type = other DNA
cgttgtctctggtggctccattggcagcccttactggtggagttgggtccgccaggccccagggaaggggctggagtggattgggaaaacccatcataatgggagttccaactacaacccgtccctcaagagtcgagtctccatgtcagttgagaagtccaacaatcagttctccctgaagctttcctctgtcagtgccgcggacacgggcgtgtattattgtgcgagagaccacggggaatctggctactggggccagggaaccctggtcaccgtctcctca

SEQ ID NO: 15680 - DNA, 283 bp, Homo sapiens
  source 1..283: mol_type = other DNA
cgttgtctctggtggctccattggcagaccttactggtggagttgggtccgccagcccccagggaaggggctggagtggattggggaaatccatcataatgggagtaccaactacaacccgtccctcaagagtcgagtcaccatatcagttgacaagtccaacaatcagttcttcctgaagctttcctctgtcagtgccgcggacacggccgtgtattactgtgcgagagaccacggggaatctggctactggggccagggaaccctggtcaccgtctcatca

SEQ ID NO: 15681 - DNA, 283 bp, Homo sapiens
  source 1..283: mol_type = other DNA
cgttgtgtctggtggctccattagccgtccgtactggtggagttggatccgccagaccccagggaaggggctggagtggattggtgaaatccatcataatggaagtaccaactacaacccgtccctcaagagtcgagtcaccatttcagtggacaagtccaagaatgagttctccctgaaggtttcctctgtgactggggcggacacgggcgtgtattactgtgcgagagaccacggggaatctggctactggggccagggaagcctggtcaccgtctcctca

SEQ ID NO: 15682 - DNA, 292 bp, Homo sapiens
  source 1..292: mol_type = other DNA
tgcagcctctggattcaccttaagtacctattggatggtctgggtccgccaggctccagggaagggcctggagtgggtggccaacataaagcaagatggaagtgaaaaatactatgtggactctgtgcagggccgattcaccatctccagagacaacgccaagaactcactgtatctgcaaatgagcagcctgagagccgaggacacggctgtatattactgtgcgagagactctgacagtggctggtcgctatcccactggggccagggaaccctggtcaccgtctcctca

SEQ ID NO: 15683 - DNA, 292 bp, Homo sapiens
  source 1..292: mol_type = other DNA
tgcagcctctggattcaccttaagtacctattggatggtctgggtccgccaggctccagggaagggcctggagtgggtggccaacataaagcaagatggaactgaaaaatactatgtggactctgtgcagggccgattcaccatctccagagacaacgccaagaactcactgtatctgcaaatgaacagcctgagagccgaggacacggctgtatattactgtgcgagagactctgacagtggctggtcgctatcccactggggccagggaaccctggtcaccgtctcctca

SEQ ID NO: 15684 - DNA, 306 bp, Homo sapiens
  source 1..306: mol_type = other DNA
cagggctatggatataagtttcccaattattggatcggctgggtgcgccagaggcccgggaaaggcctggagtggatgggcatcgtctatcctgatgattctgatactagatatgccccgtccttccgaggccaagtcaccgtctccgccgacaagtccaccaacaccgcctacctgcagtgggctagccttagggcctcggacagcggcatctactactgtgtcagacatgataaaatacaggcagttgctggtctccgcggcgttgacttctggggccagggaaccctggtcaacgtctcatca

SEQ ID NO: 15685 - DNA, 306 bp, Homo sapiens
  source 1..306: mol_type = other DNA
cagggctctggatacaagtttcccaattattggatcggctgggtgcgccagaggcccgggaaaggcctggagtggatgggcatcgtctatcctgatgattctgatactagatatgccccgtccttccgaggccaagtcaccatctccgccgacaagtccatcaacaccgcctacctgcagtggcctagcctcaaggcctcggacaccgccatctattactgtgtgagacatgataaaatccaggcagttgctggtctccgcggtgttgacttctggggccagggaacccaggtcaccgtctcctca

SEQ ID NO: 15686 - DNA, 313 bp, Homo sapiens
  source 1..313: mol_type = other DNA
tgtagtctctggattcaccttcagtgactactacatgatctggatccgccaggctccagggaaggggctggagtgggtttcatatattagtcctacaggtagtactacatcctacgcagactctgtgaagggccgattcaccatctccagggacaacgccaaaaactcactgtatctccaaatgaacagcttgagagccgaggacacggccttatatttctgtgcgagagatggtaacactggtatcttctctcgctcctactactactacttggacgtctggggcaaagggaccacggtcaccgtctcctca

SEQ ID NO: 15687 - DNA, 313 bp, Homo sapiens
  source 1..313: mol_type = other DNA
tgtagtctctggattcaccttcagtgactactacatgatctggatccgccaggctccagggaaggggctggagtgggtttcatatattagtcctacaggtagtactacatcctacgcagactctgtgaagggccgattcaccatctccagggacaacgccaaaaactcactgtatctccaaatgaacagcctgagagccgaggacacggccttatatttctgtgcgagagatggtaacactggtatcttctctcgctcctactactactacttggacgtctggggcaaagggaccacggtcaccgtctcctca

SEQ ID NO: 15688 - DNA, 313 bp, Homo sapiens
  source 1..313: mol_type = other DNA
tgtagtctctggattcaccttcaatgactactacatgatctggatccgccaggctccagggaaggggctagagtgggtttcatatattagtcctacaggtagtactacatcctacgcagactctgtgaagggccgattcaccatctccagggacaacgccaaaaactcactgtatctccaaatgaacagcctgagagccgaggacacggccgtatatttctgtgcgagagatggtaacactggtatcttctctcgctcctactactactacttggacgtctggggccaagggaccacggtcaccgtctcctca

SEQ ID NO: 15689 - DNA, 313 bp, Homo sapiens
  source 1..313: mol_type = other DNA
tgtagtctctggattcaccttcagtgactactacatgatctggatccgccaggctccagggaaggggctggagtgggtttcatatattagtcctacaggtagtactacatcctacgcagactctgtgaagggccgattcaccgtctccagggacaccgccaaaaactcattgtatctccaaatgaacagcctgagagccgaggacacggccctatattactgtgcgagagatggtaatactggtatcttctctcgctcctactactactacttggacgtctggggcaaagggaccacggtcaccgtctcctca

SEQ ID NO: 15690 - DNA, 289 bp, Homo sapiens
  source 1..289: mol_type = other DNA
tacagcctctgcgttcacccttggtgactattggatggcctgggtccgccaggctccagggaaggggctggagtgggtggccaacatacaccaagatggaaatcagagatactatgcggactctgtgaagggccgattcaccatatccagagacaaccccaacaactcactgtttttagaaatgaagtttgtgggagccgaggacacggccctgtattcctgtgcgagagggggccggactggcactttcgatgtctggggccagggggcgatggtcaccgtttcttcg

SEQ ID NO: 15691 - DNA, 289 bp, Homo sapiens
  source 1..289: mol_type = other DNA
tacagcctctgcattcacccttggtgactattggatggcctgggtccgccaggctccagggaaggggctggagtgggtggccaacataaaacaagatggaagtgagaaatactatgtggactctgtgaagggccgattcaccatctccagagacaactccaacaactcactgtttttagaaatgaagttcgtgggagccgaggacacggccctgtattactgtgcgagagggggccggactggcactttcgatgtctggggccagggggcaatggtcaccgtttcttcg

SEQ ID NO: 15692 - DNA, 307 bp, Homo sapiens
  source 1..307: mol_type = other DNA
tgcagcctctggattcaccttcagtaactatggcatgcactgggtccgccaggttccaggctggggcctggagtgggtggcaattatttcatatgatggaggtagtaaatactatgcagactccgtgcagggccgattcaccatctccagagacaattccaagaacacgctgtatctgcaaatgaacagcctgagagctgacgacacggctgtgtattattgtgcgaaagatcgggcatattgtagtggtggaaggtgctacgacactgactactggggccagggaaccctggtcaccgtctcctca

SEQ ID NO: 15693 - DNA, 307 bp, Homo sapiens
  source 1..307: mol_type = other DNA
tgcagcctctggattcaccttcagtaactatggcatgcactgggtccgccaggttccaggctggggcctggagtgggtggcaattatttcatatgatggaggtagtaaatactatacagactccgtgcagggccgattcaccatctccagagacaattccaagaacacagtgtatctgcaaatgagcggcctgacagctgacgacacggctgtgtattattgtgcgaaagatcgggcatattgtagtggtggaaggtgctacgacactgactactggggccagggaaccctggtcaccgtctcctca

SEQ ID NO: 15694 - DNA, 307 bp, Homo sapiens
  source 1..307: mol_type = other DNA
tgcagcctctggattcaccttcagtaactatggcatgcactgggtccgccaggttccaggctggggcctggagtgggtggcaattatttcatatgatggaggtagtaaatactatgcagactccgtgcagggccgattcaccatctccagagacaattccaagaacacactgtatctgcaaatgaacagcctgagagctgaggacacggctgtgtattattgtgcgaaagatcgggcatattgtagtggtggaaggtgctacgacactgactactggggccagggaaccctggtcaccgtctcctca

SEQ ID NO: 15695 - DNA, 307 bp, Homo sapiens; identical to SEQ ID NO: 15694
  source 1..307: mol_type = other DNA

SEQ ID NO: 15696 - DNA, 301 bp, Homo sapiens
  source 1..301: mol_type = other DNA
tgcaacctctggattcacctttagcagctatgccatggcctgggtccgccagcctccagggaaggggctggagtgggtctcaactatgagtgggagtggtggtagtacatactacgcagactccgtgaagggccggttcaccacctccagagacaattccaggaacacagtatatctgcacatgaacagcctgagagccgaggacacggccgtatattactgtgcgaaagattacaactatgacagtagtggttggctctttgactcctggggccagggaacccaggtcaccgtctcctca

SEQ ID NO: 15697 - DNA, 301 bp, Homo sapiens
  source 1..301: mol_type = other DNA
tgcaacctctggattcacctttagcagctatgccatggcctgggtccgccagcctccagggaaggggctggagtgggtctcaactatgagtgggagtggtggtagtacatactacgcagactccgtgaagggccggttcaccatctccagagacaattccaggaacacagtatatctgcacatgaacagcctgagagccgaggacacggccgtatattactgtgcgaaagattacaactatgacagtagtggttggctctttgactcctggggccagggaacccaggtcaccgtctcctca

SEQ ID NO: 15698 - DNA, 301 bp, Homo sapiens
  source 1..301: mol_type = other DNA
tgcaacctctggattcacctttagcagctatgccatggcctgggtccgccagcctccagggaaggggctggagtgggtctcaactatgagtgggagtggtggtagtacatactacgcagactccgtgaagggccggttcaccatttccagagacaattccaggaacacagtatatctgcacatgaacagcctgagagccgaggacacggccgtatattactgtgcgaaagattacaactatgacagtagtggttggctctttgactcctggggccagggaacccaggtcaccgtctcctca

SEQ ID NO: 15699 - DNA, 301 bp, Homo sapiens
  source 1..301: mol_type = other DNA
tgcaacctctggattcacctttagcacctatgccatggcctgggtccgccagcctccagggaaggggctggagtgggtctccactatgagtgggagtggtggtagtacatactacgcagactccgtgaggggccggttcaccatctccagagacacttccaggaacaccgtatatctgcacatgaacagcctgagagccgaggacacggccgtatattactgtgcgaaagattacaactatgacagtagtggttggctctttgactcctggggccagggaacccaggtcaccgtctcctca

SEQ ID NO: 15700 - DNA, 307 bp, Homo sapiens
  source 1..307: mol_type = other DNA
tgcagcctctggattcaactttagaagttattccatgagctgggtccgccaggctccagggaaggggctggagtgggtctcacttatcagtggtggtggtgaaaaaatacatcaaagagactccgtgaagggccggttcatcatctccagagacaataccaagaacactctttatctgcaaatgaacagtctgagagacgaggacacggcaatatactactgtgcgaaagaggcaaccttttgtggcggtggttgcctgtccctgaacgactactggggcccgggaaccctggtcaccgtctcctca

SEQ ID NO: 15701 - DNA, 307 bp, Homo sapiens
  source 1..307: mol_type = other DNA
tgcagcctctggattcaactttagaagttattccatgagctgggtccgccaggctccagggaaggggctggagtgggtctcacttatcagtggtggtggtgaaactatacaccaaagagactccgtgaagggccggttcatcatctccagagacaacaccaagaacactctttatttgcaaatgaacagtctgaggaacgaggacacggcaatatactactgtgcgaaagaggcaaccttttgtggcggtggttgcctgtccctgaacgactactggggcccgggaaccctggtcaccgtctcctca

SEQ ID NO: 15702 - DNA, 307 bp, Homo sapiens
  source 1..307: mol_type = other DNA
tgcagcctctggattcaactttagaagttattccatgagctgggtccgccaggctccagggaaggggctggagtgggtctcacttatcaatggtcgtggtgaaattatccaccaaagagactccgtgaagggccggttcatcatctccagagacaataccaagaacactctttatctgcaaatgaacagtctgagagacgaggacacggcaatatactactgtgcgaaagaggcaaccttttgtggcggtggttgcctgtccctgaacgactactggggcccgggaaccctggtcaccgtctcctca

SEQ ID NO: 15703 - DNA, 292 bp, Homo sapiens
  source 1..292: mol_type = other DNA
ttcaacctcaggattcatctttggtgattatactatgagttggttccgccaggctccagggaaggggctggaatgggtaggtttcattagaggcaaagctttcggtgggacaatacaatacgccgcgtctgtgagaggcagattcaccgtctccagagatgattccaaaagcatcgcctttctgcaaatggacagcctgaaaaccgaggacacagccctctattactgtactagggggtacgttgacctcggggacttctggggccggggaaccctggtaaccgtctcctca

SEQ ID NO: 15704 - DNA, 292 bp, Homo sapiens
  source 1..292: mol_type = other DNA
ttcaacctctggattcacctttggtgattatactatgagttggttccgccaggctccagggaaggggctggaatgggtaggtttcattagaggcaaagctgttggtgggacaatacaatacgccgcgtctgtgagaggcagattcaccgtctccagagatgattccaaaagcatcgcctttctgcaaatggacagcctgaaaaccgaggacacagccctgtattactgtactagggggtacgttgacctcggggacttctggggccggggaaccctggtaaccgtctcctca

SEQ ID NO: 15705 - DNA, 304 bp, Homo sapiens
  source 1..304: mol_type = other DNA
tgcagcctctggattcacctttagtacctatgccatgagctgggtccgccaggctccagggaaggggctggagtgggtctcatctattattcagagtgggagtaacacattctacgcagactccgtgaagggccgcttcaccatctccagagacaattccaagagcacgctgtatctgcaaatgaacagcctgagagccgaggacacggccgtttattactgtgcgaaagatcatttgaccagaaacaacgtttgggacgattttgacatctggggccaagggacaatggtcaccgtctcttca

SEQ ID NO: 15706 - DNA, 304 bp, Homo sapiens
  source 1..304: mol_type = other DNA
tgcagcctctggattcacctttagtacctatgccatgagttgggtccgccaggctccagggaaggggctggagtgggtctcatctattattcagagtgggagtaacacattctacgcggactccgtgaagggccgcttcaccatctccagagacaattccaagagcacgctgtatctgcaaatgaacagcctgagagccgaggacacggccgtatattactgtgcgaaagatcatttgaccagaaacaacgtttgggacgattttgacatctggggccaagggacaatggtcaccgtctcttca

SEQ ID NO: 15707 - DNA, 298 bp, Homo sapiens
  source 1..298: mol_type = other DNA
tgtagcctctggattcagcttcaaaacctatgctatgcactgggtccgccaggctccaggcaaggggctggagtggctggcagttatgtcatatgagggaagcaatagattctacgcagactccgtgaagggccgattcatcatctccagagacaattccattaacacgctgtatctgcaaatgaacagcctgagagatgaggacacggctgtctatttctgtgcgagtttaaccgaatatggcggctctctctatgtggacgtctggggcaaagggaccacggtcaccgtctcctca

SEQ ID NO: 15708 - DNA, 298 bp, Homo sapiens
  source 1..298: mol_type = other DNA
tgtagcctctggattcagcttcaaaacctatgctatgcactgggtccgccaggctccaggcaaggggctggagtggctggcagttatgtcatatgagggaagcaatagattctacgcagactccgtgaagggccgattcatcatctccagagacaattccattaacacgttgtatctgcaaatgaacagcctgagagatgaggacacggctgtctatttctgtgcgagtttaaccgaatatggcggctctctctacgtggacgtctggggcaaagggaccatggtcaccgtctcctca

SEQ ID NO: 15709 - DNA, 295 bp, Homo sapiens
  source 1..295: mol_type = other DNA
tgcagcctctggattcaccttcagtagctacgacatgcactgggtccgccaagttacaggaaaaggtctggagtgggtctcagctattggtactgctggtgacacatactatccaggctccgtgaagggccgattcaccatctccagagaaaatgccaagaactccttgtttcttcaaatgaacagcctgagagccggggacacggctgtgtattactgtgccaggtactatggttcggggagttacagctggttcgacccctggggccagggaaccctggtcaccgtctcctca

SEQ ID NO: 15710 - DNA, 295 bp, Homo sapiens
  source 1..295: mol_type = other DNA
tgcagcctctggattcaccttcagtagctacgacatgcactgggtccgccaagctacaggaaaaggtctggagtgggtctcagctattggtactgctggtgacacatactatccaggctccgtgaagggccgattcaccatctccagagaaaatgccaagaactccttgtttcttcaaatgaacagcctgagagccggggacacggctgtgtattactgtgccaggtactatggttcggggagttacagctggttcgacccctggggccagggaaccctggtcaccgtctcctca

SEQ ID NO: 15711 - DNA, 310 bp, Homo sapiens
  source 1..310: mol_type = other DNA
tgcaggctctggattcacctttagcggctatgccgtgagttgggtccgccaggctccagggaaggggctggagtgggtctctgctattactggtgatggtagtaccacatggtacgcagactccgtgaagggccggttcaccatctccagagacaattccaagaacacgctgtatctgcaaatgagcagcctgagagtcgaggacacggccgtgtattactgtgcgaaagatcacggtagggatggccacagttcccgggcgcgcgaatttgactactggggccagggaaccctggtcaccgtctcctca

SEQ ID NO: 15712 - DNA, 310 bp, Homo sapiens
  source 1..310: mol_type = other DNA
tgcaggctctggaatcatttttggcaactatgccatgagctgggtccgccaggctccagggaagggtctggagtgggtctcagctattactggtggtggtgatactacatggtacgcagactccgtgaagggccggttcaccatctccagagacaattccaagaatatgctgtatctgcaaatgaacagcctgagagtcgaggacacggccgtatattactgtgcgaaagatcacggtagggatggccacagttcccgggcgcgcgaatttgactattggggccagggaaccctggtcaccgtctcctca

SEQ ID NO: 15713 - DNA, 310 bp, Homo sapiens
  source 1..310: mol_type = other DNA
tgcaacttatggactcacgttcagcagttatgccatgagctgggtccgccaggctccagggaaggggctggagtgggtctcagggattactggtggtggtgatactacatggcacgcagactccgtgaagggccggttcaccacctccagagacaattccaagagcacgctgtatctgcaaatgaacagcctgagagtcgaggacacggccgtatatttctgtgcgaaagatcacggtagggatggccacagttcccgggcgcgcgaatttgactactggggccagggaaccctggtcaccgtctcctca

SEQ ID NO: 15714 - DNA, 310 bp, Homo sapiens
  source 1..310: mol_type = other DNA
tgcagcctctggattcacctttagcagctatgccatggcctgggtccgccaggctccagggaaggggctggagtgggtctcaggtattagtggtagtggtgataacacatgggacgcagactccgtgaagggccggttcaccatctccagagacaattccaagaacacgctgtatctgcaaatgagcagcctgagagccgaggacacggccgtatatttctgtgcgaaagatcacgggagggatggccacagttcccgggcgcgcgaatttgactactggggccagggaaccctggtcaccgtctcctca

SEQ ID NO: 15715 - DNA, 310 bp, Homo sapiens
  source 1..310: mol_type = other DNA
tgcaggctctggattcacctttagcgactatgccttgagttgggtccgccaggctccagggaaggggctggagtgggtctctggcattactggtgatggtagcaccacatggtacgcagactccgtgaagggccggttcaccatgtccagagacaattccaagaacacactttatctacaaatgagcagcctgagagtcgaggacacggccgtgtattactgcgcgaaagatcacggtagggatggccacagttcccgggcgcgcgaatttgactactggggccagggaaccctggtcaccgtctcctca

SEQ ID NO: 15716 - DNA, 310 bp, Homo sapiens
  source 1..310: mol_type = other DNA
tgcaggctctggattcacctttagcagctatgccatgagctgggtccgccaggctccagggaaggggctggagtgggtctcagctattactggtggtggtgatactacatggtacgcagactccgtgaagggccggttcaccatctccagagacaattccaagaacacgctgtatctgcaaatgaacagcctgagagtcgaggacacggccgtatattactgtgcgaaagatcacggtagggatggccacagttcccgggcgcgcgaatttgactactggggccagggaaccctggtcaccgtctcctca

SEQ ID NO: 15717 - DNA, 313 bp, Homo sapiens
  source 1..313: mol_type = other DNA
tgcagcctctggattcccctttagcagctatgccatgagctgggtccgccaggctccagggagggggctggagtgggtctcatctcttggtcatgatggtggaaatacatactatgccgagtccgtgaagggccggttcaccatctccagagacaattccaggaacacgttgtatctggaaatgaatagcctgagtgccgacgacacggccaaatattactgtgcgcaatccctgggcgaccgttgtgacagtgatggttgtcgatactactttgccaactggggccagggaaccctggtcacggtctcctca

SEQ ID NO: 15718 - DNA, 313 bp, Homo sapiens
  source 1..313: mol_type = other DNA
tgcagcctctggattcccctttaggagttatgtcatgagttgggtccgccagactccaggcatggggctggagtgggtctcatctctgagtggtaatgggggaaatgcattctacgcagactccgtgaagggccggttcaccatctccagagacaattccaggaatacagtgtatctggaaatgaacagcctgcgtgccgacgactcggccaagtattactgtgcgcagtcactgggcgaccgatgtgatagtgatggttgtcgatactactttgccaattggggccagggaaccctggtcaccgtctcgtca

SEQ ID NO: 15719 - DNA, 313 bp, Homo sapiens
  source 1..313: mol_type = other DNA
tgcagcctctggattcccctttaggagctatgtcatgagttgggtccgccagactccaggcatggggctggagtgggtctcatctctgagtggtaatgggggaaatgcattctacgcagactccgtgaagggccggttcaccatctccagagacaattccaggaacacagtgtatctgcaaatgaacagcctgcgtgccgacgactcggccaagtattactgtgcgcagtcactgggcgaccgatgtgatagtgatggttgtcgatactactttgccaattggggccagggaaccctggtcaccgtctcgtca

SEQ ID NO: 15720 - DNA, 313 bp, Homo sapiens
  source 1..313: mol_type = other DNA
tgcagcctctggattcccctttcggagttatgtcatgagctgggtccgccagactccaggcatggggctggagtgggtctcatctctgagtggtaatgggggaaatgcattctacgcagactccgtgaagggccggttcaccatctccagagacaattccaggaatacagtgtatctggaaatgaacagcctgcgtgccgacgactcggccaagtattactgtgcgcagtcactgggcgaccgatgtgatagtgatggttgtcgatactactttgccaattggggccagggaaccctggtcaccgtctcgtca

SEQ ID NO: 15721 - DNA, 298 bp, Homo sapiens
  source 1..298: mol_type = other DNA
tgcagcctctggatccaccttcaacaataatgccttgacctgggtccgccaggcaccagggagggggctggagtgggtctcgtctataactgggaatggtgaatacacatattacgcagactcagtggagggccgcttcaccatctccagagagaattccaacaacacggtgtatctgcaaatgaacagcctgagagtcgaggacacggccatatattactgtgcggcccataccagtccctggtactcgggctggttcgacccctggggccagggcaccctggtcaccgtctcctca

SEQ ID NO: 15722 - DNA, 298 bp, Homo sapiens
  source 1..298: mol_type = other DNA
tgcagcctctggatccacctttaaaaacaacgccattacctgggtccgccaggcacccgggaggggcctggagtgggtcgcatctattactggtaacggtgattacacatactacgcagactcactgaagggccgtgtcaccatctccagagacaactccaagaacacaatatttctgcagatgaacagcctgagagtcgaggacacggccatgtattactgtgcggcccataccagtccctggtactcgggctggttcgacccctggggccagggaaccccggtcaccgtctcctca

SEQ ID NO: 15723 - DNA, 298 bp, Homo sapiens
  source 1..298: mol_type = other DNA
tggagcctctggattcactttcaactcttatgaattcaactgggtccgccaggctccagggaaggggctggagtgggtgtcatatatttctgcgagcggtgatctcatatactacgcagactctgtgaggggccgattcaccgtctccagagacaacaccaaggattcactgtttttgcaaatgaacagcctgagacccgaggacacggccgtttactactgcgcgagagaggcgttgcattgtggcggtgattgcctcgactactggggcctgggaaccctggtcaccgtctcctca

SEQ ID NO: 15724 - DNA, 298 bp, Homo sapiens
  source 1..298: mol_type = other DNA
tgcagcctctggattcaccttaacttcttatgaaatgaactgggtccgccaggctccagggaaggggctggagtgggtgtcatttattaatgagaggggtgattccataaagtacgcagactctgtgaggggccgattcaccctctccagagacaacgccaaggactcactgtttctgcaaatgaacagcctgagacccgaagacacggccgtttactactgcgcgagagaggcattgcattgtggtggtgattgcctcgactactggggccagggaaccctggtcaccgtctcctca

SEQ ID NO: 15725 - DNA, 307 bp, Homo sapiens
  source 1..307: mol_type = other DNA
cactgtctctggtggctccctcaataaatactactggacctggcttcggcagtccccggggaagggactggagtggattggatacatctattacaggggggctaccaactacaacccctccctcaagagtcgagtcaccatgtcagtagacacgcccaacaaccagttctccctgcgactgacctccgtgacagctgcggacacggcccgatatttctgtgcgagacagagtcgagcatattgtggtgctgactgccctagtccctttgaccactggggccagggagccctggtcaccgtctcctca

SEQ ID NO: 15726 - DNA, 307 bp, Homo sapiens
  source 1..307: mol_type = other DNA
cactgtctctggtggctccctcaataaataccactggacctggcttcggcagtccccggggaagggactggagtggattggatacatctattacaggggggctaccaactacaacccctccctcaagagtcgagtctccatgtcactagacacgcccaacaaccagttctccctgcgactgacctccgtgacatctgcggacacggcccgatatttctgtgcgaggcagagtcgagcatattgtggtgctgactgccctagtccctttgaccactggggccagggagccctggtcaccgtctcctcg

SEQ ID NO: 15727 - DNA, 307 bp, Homo sapiens
  source 1..307: mol_type = other DNA
cactgtctctggtggctccctcaataaatactactggacctggcttcggcagtccccggggaagggactggagtggattggatacatctattacaggggggctaccaactacaacccctccctcaagagtcgagtctccatgtcactagacacgcccaacaaccagttctccctgcgactgacctccgtgacatctgcggacacggcccgatatttctgtgcgaggcagagtcgagcatattgtggtgctgactgccctagtccctttgaccactggggccagggagccctggtcaccgtctcctcg

SEQ ID NO: 15728 - DNA, 307 bp, Homo sapiens
  source 1..307: mol_type = other DNA
cactgtctctggtggctccctcaataaaaactactggacctggcttcggcagtccccggggaagggactggagtggattggatacatctattacaggggggctaccaactacaacccctccctcaagagtcgagtctccatgtcaatagacacgcccaacaaccagttctccctgcgactgacctccgtgacatctgcggacacggcccgatatttctgtgcgaggcagagtcgagcatattgtggtgctgactgccctagtccctttgaccactggggccagggagccctggtcaccgtctcctcg

SEQ ID NO: 15729 - DNA, 283 bp, Homo sapiens
  source 1..283: mol_type = other DNA
tgaagcgtctgcattccccttcagtcgctggggcatgcactgggtccgccaggctccaggcaaggggctggagtgggtggcggttatatggtatgacggaagtcaaagatattttggagactccgtgaagggccgattcaccatctccagagacaattccaagaacaccttgtatctgcaaatgaccagcctgagagtcgaggacacggctgtgtattactgtgcgaggggggacaatgcttttgatatctggggccaagggacaatggtcaccgtctcttca

SEQ ID NO: 15730 - DNA, 283 bp, Homo sapiens
  source 1..283: mol_type = other DNA
tgaagcgtctggattccccttcagtcggtggggcatgcactgggtccgccaggctccaggcaaggggctggagtgggtggcggtgatatggtatgacggaagtcaaagatattttgcagactccgtgaggggccgattcaccatctccagagacaattccaacaacaccttgtacctgcaaatgaccagcctgagagtcgaggacacggctgtatattactgtgcgaggggggacaatgcttttgatatctggggccaagggacattggtcaccgtctcttca

SEQ ID NO: 15731 - DNA, 283 bp, Homo sapiens
  source 1..283: mol_type = other DNA
tgaagcgtctggattccccttcagtcggtggggcatgcactgggtccgccaggctccaggcaaggggctggagtgggtggcggtgatatggtatgacggaagtcaaagatattttgcagactccgtgaggggccgattcaccatctccagagacaattccaacaacaccttgtacctgcaaatgaccagcctgagagtcgaggacacggctgtatattactgcgcgaggggggacaatgcttttgatatctggggccaagggacattggtcaccgtctcttca

SEQ ID NO: 15732 - DNA, 283 bp, Homo sapiens
  source 1..283: mol_type = other DNA
tgaagcgtctggattccccttcagtcgctggggcatgcactgggtccgccaggctccaggcaaggggctggagtgggtggcggtgatatggcatgacggaagtcaaagatattttgcagactctgtgcagggccgattcaccatctccagagacaattccaagaacaccttgtatctacaaatgaccagcttgagagtcgaggacacggctgtttactactgtgcgaggggggacaatgcttttgatatctggggccaagggacaatggtcaccgtctcttca

SEQ ID NO: 15733 - DNA, 295 bp, Homo sapiens
  source 1..295: mol_type = other DNA
tgtaggctctggattctctttcagtacctatggcatgcactgggtccgccaggcaccaggcaaggggctggactgggtggcatttatatcatatcgtggaactgaaaaatacaatgcagactccgtgaagggccgcttcaccatctccagagacaattccaggaacacactgtatctccaaatgaacagcctgagagctgaggacacaggcctctattattgtgcgaaccaaccacgagactcacagaacattttgtgggactggggccagggaaccctggtcaccgtctcctca

SEQ ID NO: 15734 - DNA, 295 bp, Homo sapiens
  source 1..295: mol_type = other DNA
tgcaggctctggattctccttcagtacctatggcatgcactgggtccgccaggctccaggcaaggggctggactgggtggcttttatttcatatcgtggaacaacaaaatacaactcagacgccgtgaagggccgattcaccatctcccgagacaattccaagaacactctgtttctccaaatgaacagcctgagacctgaggacacggctctttatttctgtgcgaaccaaccacgagattcacaaaacatcttgtgggactggggccagggaaccctggtcaccgtctcctca

SEQ ID NO: 15735 - DNA, 316 bp, Homo sapiens
  source 1..316: mol_type = other DNA
tgtagcctctggattcaccttcagtaactatggcatgcactgggtccgccaggctccaggcaagggcctggattgggtgtcgtttatatcatctgatggaagtgatgaatactatgcagactccgtgaagggccgattcaccatctccagagacaattccaacaacacggtgtatctccaaatgagcagcctgagacctgaggacacggctttatattactgtgcgcggcgcgcgaggaattattacggtttttggagtggttttggaaactggttggacccctggggccagggaacccttgtcaccgtctcctca

SEQ ID NO: 15736 - DNA, 316 bp, Homo sapiens
  source 1..316: mol_type = other DNA
tgtagcctctggattcaccttcagtaactatggcatgcactgggtccgccaggctccaggcaagggcctggattgggtgtcatttatatcatctgatggaagtgatgaatactatgcagactccgtgaagggccgattcaccatctccagagacaattccaacaacacggtgtatctccaaatgagcagcctgagacctgaggacacggctttatattactgtgcgcggcgcgcgaggaattattatggtttttggagtggttttggaaactggttggacccctggggccagggaacccttgtcaccgtctcctca

SEQ ID NO: 15737 - DNA, 292 bp, Homo sapiens
  source 1..292: mol_type = other DNA
tgtagcctctggattcagtctcagtggcttctacatgacctggatccgccagactccagggaaggggctggagtgggtttcatacattagcaacagtcgcagtagtaacatattgtactcagagtctgtgaagggccgattcaccgtctctagggactacgccaagaactcactctatctgcaaatgaacaccctgagagccgaagacacggccgtgtattactgtgcgcgagactggaggaataagggccacgatgtgtggggccagggaaccctggtcaccgtctcctca

SEQ ID NO: 15738 - DNA, 292 bp, Homo sapiens
  source 1..292: mol_type = other DNA
tgtagcctctgcattcagtctcagggactactacatgacctggatccgccagactccagggaaggggctggagtgggtttcatacattagcaacggttacagtgataccgtatactacgcagagtctgtgaagggccgattcaccgtctctagggactacgccaagaactcactgtatctgcaaatgaacaccctgagagtcgaagacacggccgtgtattactgtgcgagagactggcggaataagggccacgatgtgtggggccagggaaccctggtcaccgtctcctca

SEQ ID NO: 15739 - DNA, 292 bp, Homo sapiens
  source 1..292: mol_type = other DNA
tgtagcctctggattcagtctcagtgccttctacatgacctggatccgccagagtccagggaaggggctggagtgggtttcatacactagcaacagtcgtagtagtaacatatggtactcagagtctgtgaagggccgattcaccgtctctagggactacgccaagaactcactctacctgcaaatgaacaccctgagagccgaagacacggccgtctattactgtgcgcgagactggaggaataagggccacgatgtgtggggccagggaaccctggtcaccgtctcctca

SEQ ID NO: 15740 - DNA, 292 bp, Homo sapiens
  source 1..292: mol_type = other DNA
tgtagcctctggattcagtctcagtgcctactacatgacctggatccgccagactccagggaaggggctggagtgggtttcatacattagcaacagtcatagtagtaccatacattacgcagagtctgtgaagggccgattcaccgtctctagggactacgccaagaactcactctatctgcatatgaacaccctgagagccgaagacacggccgtttattactgtgcgcgagactggcggaataagggccacgatgtgtggggccagggaaccctggtcaccgtctcctca

SEQ ID NO: 15741 - DNA, 292 bp, Homo sapiens
  source 1..292: mol_type = other DNA
tgtagcctctgcattcagtctcagtgactactacatgacctggatccgccagactccagggaaggggctggagtgggtttcatacattagcaacagtcgtggtagtaccatgtactacgcagagtctgtgaagggccgattcaccgtctctagggactacgccaagaactcactgtttctgcaaatgaacgccctgagagccgaagacacggccgtctattactgtgcgagagactggcggaataagggccacgatgtgtggggcccgggaaccctggtcaccgtctcctca

SEQ ID NO: 15742 - DNA, 292 bp, Homo sapiens
  source 1..292: mol_type = other DNA
tgtagcctctggattcagtctcagtgcctactacatgacctggatccgccagactccagggaaggggctggagtgggtttcatacattagcaacagtcatagtagtaccatacattacgcagagtctgtgaagggccgattcaccgtctctagggactacgccaagaactcactctatctgcaaatgaacaccctgagagccgaagacacggccgtgtattactgtgcgcgagactggcggaataagggccacgatgtgtggggccagggaaccctggtcaccgtctcctca

SEQ ID NO: 15743 - DNA, 292 bp, Homo sapiens
  source 1..292: mol_type = other DNA
tgtggcctctggattcagtctcagtggctactacatgacctggatccgccagactccagggaaggggctggagtgggtttcatacattagcaacagtcatggtactaccatatattacgcagagtctgtgaagggccgattcaccgtctctagggactacgccaagaactcactctatctgcaaatgaacaccctgagagccgaagacacggccgtgtattactgtgcgagagactggcggaataagggccacgatgtgtggggccagggaaccctggtcaccgtctcctca

SEQ ID NO: 15744 - DNA, 292 bp, Homo sapiens
  source 1..292: mol_type = other DNA
tgtaggctctgcattcagtctcagtgacttctacatgacctggatccgccaggctccagggaaggggctggagtgcatttcatacattagcaacagtcgtggtactaccatatactacgcagagtctgtgaagggccgattcaccgtctctagggactacgccaagaactcactgtatctgcaaatgaacaccctgagagccgaagacacggccgtgtattactgtgcgagagactggcggaataagggccacgatgtgtggggccagggaaccctggtcaccgtctcctca

SEQ ID NO: 15745 - DNA, 292 bp, Homo sapiens; identical to SEQ ID NO: 15737
  source 1..292: mol_type = other DNA

SEQ ID NO: 15746 - DNA, 292 bp, Homo sapiens
  source 1..292: mol_type = other DNA
tgtagcctctgcattcagtctcggtgactactacatgacctggatccgccagactccagggaaggggctggagtgcgtttcatacattagcaacagtgctggtaataccatatactacgcagagtctgtgaagggccgattcaccgtctctagggactacgccaagaactcactgtatctgcaaatgaacgccctgagagccgaagacacggccgtgtattactgtgcgagagactggcggaataagggccacgatgtgtggggccagggaaccctggtcaccgtctcctca

SEQ ID NO: 15747 - DNA, 292 bp, Homo sapiens
  source 1..292: mol_type = other DNA
tgtaggctctggattcagtctcagtgcctactacatgacctggatccgccagactccagggaaggggctggagtggctttcatacattagcaacagtcatagtaataccatacattacgcagagtctgtgaagggccgattcaccgtctctagggactacgccaagaactcactctatctacaaatgaacaccctgagagccgaagacacggccatatattactgtgcgcgagactggcgtaataagggccacgatgtgtggggcctgggaaccctggtcaccgtctcctca

SEQ ID NO: 15748 - DNA, 292 bp, Homo sapiens
  source 1..292: mol_type = other DNA
tgtagcctctggattcagtctcagtgcctactacatgacctggatccgccagactccagggaaggggctggaatgggtttcatacattagcaacagtcatagtagtaccatacattacgcagagtctgtgaagggccgattcaccgtctctagggactacgccaagaactcactctatctgcatatgaacaccctgagagccgaagacacggccgtttattactgtgcgcgagactggcggaataagggccacgatgtgtggggccagggaaccctggtcaccgtctcctca

SEQ ID NO: 15749 - DNA, 292 bp, Homo sapiens
  source 1..292: mol_type = other DNA
tgtagcctctggattcagtctcagtgcctactacatgacctggatccgccagactccagggaaggggctggagtgggtttcatacattagcaacagtcatagtagtaccatacattacgcagagtctgtgaagggccgattcaccgtctctagggactacgccaagaactcactctatctgcatatgaacaccctgagagccgaagacacggccgtttattactgtgcgcgagactggcggaataagggccacgatgtgtggggccggggaaccctggtcaccgtctcctca

SEQ ID NO: 15750 - DNA, 292 bp, Homo sapiens
  source 1..292: mol_type = other DNA
tgtagcctctgcattcagtctcagtgactactacatgacctggatccgccagactccagggaaggggctggagtgcgtttcatacattagcaacagtgctggtagtaccatatactacgcagagtctgtgaagggccgattcaccgtctctagggactacgccaagaactcactgtatctgcaaatgaacaccctgagagccgaagacacggccgtgtattactgtgcgagagactggcggaataagggccacgatgtgtggggccagggaaccctggtcaccgtctcctca

SEQ ID NO: 15751 - DNA, 289 bp, Homo sapiens
  source 1..289: mol_type = other DNA
tgcagcctctggattcaccttaggggactggtacatgacctggatccgccagcctccagggaaggggctggagtggatttcatacatcagtggtagtggcagtagtatacactacgcagactctgtgaggggccggttcaccgtctccagggacaactccaagaactcactgtatctgcaaatgaacagcctgacagtcgaggacacggccgtgtacttctgtgcgagagattggcggaataagggccacgatgtgtggggccagggaaccctggtcaccgtctcctca

SEQ ID NO: 15752 - DNA, 292 bp, Homo sapiens
  source 1..292: mol_type = other DNA
tgtagcctctggattcagtctcagtgcctactacatgacctggatccgccagactccagggaaggggctggagtgggtttcatacattagcaacagtcatagtagtaccatacattacgcagagtctgtgaagggccgattcaccgtctctagggactacgccaagaactcactctatctgcaaataaacaccctgagagccgaagacacggccgtgtattactgtgcgcgagactggcggaataagggccacgatgtgtggggccagggaaccctggtcaccgtctcctca

SEQ ID NO: 15753 - DNA, 292 bp, Homo sapiens
  source 1..292: mol_type = other DNA
cgttgtctctggtgactccatgaataatgtgaactacgcctggagttggctccgccagcgaccagggaagggcctggagtggatcggctacatctatcctagtgcgaagacctactacaccgagtccctcaagagtcgagtcaccatttcagtagactggtccaagaaccagttctccctgaagatgacgtcaatgaccgccggggacacggccacttattactgtgccagagcccctcaatacaattggttcgacccctggggccagggcaccctggtcaccgtctcctca

SEQ ID NO: 15754 - DNA, 292 bp, Homo sapiens
  source 1..292: mol_type = other DNA
cactgtctctggtgactccatgaaaaacgttaattacgcctggacctggatccgccagccaccagggaagggcctggagtggattggctacatctatcctagtgagaagacttactacaccgcgtccctcaagagtcgagtcaccatctcagtagactggtctaagaaccagttctccctgaggatgacgtcaatgaccgccggggacacggccatttattactgtgccagagcccctcaatacaactggttcgacccctggggccagggcaccctggtcaccgtcccctca

SEQ ID NO: 15755 - DNA, 292 bp, Homo sapiens
  source 1..292: mol_type = other DNA
tgaagcctctggattcaccctcagtaattctgaaatgaactgggtccgccaggctccagggaagggactggagtgggtctcgtatatcagtcgtggtgctagtaccatatattacggagactctgtaaagggccgattcaccctctccggagactacgccaagaactctctaaatctacaaatgaacagcctgagagtcgaggacacggctgtgtatttctgtgcgagagagggaacttctcatgatgcttttgatctctggggccaagggacactggtcaccgtttattca

SEQ ID NO: 15756 - DNA, 292 bp, Homo sapiens
  source 1..292: mol_type = other DNA
tcaagcctctggattcagcctcagtaattctgaaatgaactgggtccgccaggctccagggaagggactggaatgggtctcgtatatcagtcgtggtgctagtaccatatattacggagactctgtaaagggccgattcaccctctccggagactacggcaagaactctctacatctacagatgaacagcctgagagtcgaggacacggctgtgtatttctgtgcgagagagggaacttctcatgatgcttttgatctctggggccaagggacactggtcaccgtttatcca

SEQ ID NO: 15757 - DNA, 292 bp, Homo sapiens
  source 1..292: mol_type = other DNA
tcaagcctctggattcagcctcagtaattctgaaatgaactgggtccgccaggctccagggaagggactggaatgggtctcgtatatcagtcgtggtgctagtaccatatattacggagactctgtaaagggccgattcaccctctccggagactacggcaagaactctctacatctacagaggaacagcctgagagtcgaggacacggctgtgtatttctgtgcgagagagggaacttctcatgatgcttttgatctctggggccaagggacactggtcaccgtttatcca

SEQ ID NO: 15758 - DNA, 298 bp, Homo sapiens
  source 1..298: mol_type = other DNA
caatgtctctggtggctccatcagtagttcctactggacctggatccgccagaccccggggaagggactggagtggattggatatatccatcacactgggagcgcctactacaatccctccctcaggagtcgagtcagcatatcaattgccacgtccaagacccagttctccctgaacatcaactctgtcaccgccgcggacacggccgtctattactgtgcgagaacgggatcaggtggatatactggctatatttttgactactggggccagggaaccctagtcaccgtctcttca

SEQ ID NO: 15759 - DNA, 298 bp, Homo sapiens
  source 1..298: mol_type = other DNA
cgatgtctctggtggctccatcagtagttcctactggacctggatccgccagaccccggggaagggactggagtggatcggatacatccatcacactgggagcgcctactacaatccctccctcagcagtcgagtcagcatatcaattgccacgtccaagacccagttctccctgaacatctactctgtcaccgccgcggacacggccgtctattactgtgcgagaacgggatcaggtggatatactggctatatttttgactactggggccagggaaccctagtcaccgtctcttca

SEQ ID NO: 15760 - DNA, 289 bp, Homo sapiens
  source 1..289: mol_type = other DNA
cactgtctctggtggctccatcagtagttactactggagctggatccggcagcccccagggaagggactggagtggattggttatatctattacagtgggagcaccaactacaacccctccctcaagagtcgagtcaccatattagtagacacgtccaagaaccagttctccctgaagctgagctctgtgaccgctgcggacacggccgtctattactgtgcgggacataatagtgcttccctccctctactcctctggggccagggaaccctggtcaccgtctcctca

SEQ ID NO: 15761 - DNA, 289 bp, Homo sapiens
  source 1..289: mol_type = other DNA
cactgtctctggtggctccatcagtagttactactggagctggatccggcagcccccagggaagggactggagtggattggttatatctattacagtgggagcaccaactacaacccctccctcaagagtcgagtcaccatatcagttgacacgtccaagaaccagttctccctgaagctgagctctgtgagcgcagcggacacggccgtctattactgtgcgggacataatagtgcttccctccctctactcctctggggccagggaaccctggtcaccgtctcctca

SEQ ID NO: 15762 - DNA, 289 bp, Homo sapiens
  source 1..289: mol_type = other DNA
cactgtctctggtggctccatcagtagttactactggagctggatccggcagcccccagggaagggactggagtggattggttatatctattacagtgggagcaccaactacaacccctccctcaagagtcgagtcaccatatcagtagacacgtccaagaaccagttctccctgaagctgagctctgtgaccgctgcggacacggccgtctattactgtgcgggacataatagtgcttccctccctctactcctctggggccagggaaccctggtcaccgtctcctca

SEQ ID NO: 15763 - DNA, 298 bp, Homo sapiens
  source 1..298: mol_type = other DNA
cagtgtctctggtggctccatcactgatcactactggaactggatccggcagtccccggggaagggactggagtgggttggccatatccgtaagactgagagtacccaccagaatccgtccctcaacagtcgactcaccttatcactagacacgtccaagaaccagatctccctgaaactgacctctgtgaccgctgcggacacggccgtgtattattgtggaaggtctgatatgagtggtaattctttcgtggaatttgactactggggccagggaaccctggtcaccgtctcctca

SEQ ID NO: 15764 - DNA, 298 bp, Homo sapiens
  source 1..298: mol_type = other DNA
cagtgtctctggtggctccatcactgatcactactggaactggatccggcagtccccggggaagggactggagtgggttggccatatccgtaagactgagactacccaccagaatccctccctcaacggtcgactcaccttatcactagacacgtccaagaaccagatctccctgaaactgaactctgtgaccgctgcggacacggccgtgtattattgtggaaggtctgatatgagtggtaattctttcgtggaatttgactactggggccagggaaccccggtcaccgtctcctca

SEQ ID NO: 15765 - DNA, 298 bp, Homo sapiens
  source 1..298: mol_type = other DNA
cagtgtctctggtggctccatcactgatcactactggaactggatccggcagtccccggggaagggactggagtgggttggccatatccgtaagactgagagtacccaccagaatccctccctcaacagtcgactcaccttatcactagacacgtccaagaaccagatctccctgaaactgagctctgtgaccgctgcggatacggccgtgtattattgtggaaggtctgatatgagtggtaattctttcgtggaatttgactactggggccagggaactctggtcaccgtctcctca

SEQ ID NO: 15766 - DNA, 298 bp, Homo sapiens
  source 1..298: mol_type = other DNA
cagtgtctctggtggctccatcactgatcactactggaactggatccggcagtccccggggaagggactggagtgggttggccatatccgtaagactgagagtacccaccagaatccctccctcaacagtcgactcaccttatcactagacacgtccaagaaccagatctccctgaaactgagctctgtgaccgctgcggacacggccgtgtattattgtggaaggtctgatatgagtggtaattctttcgtggaatttgactactggggccagggaaccctggtcaccgtctcctca

SEQ ID NO: 15767 - DNA, 298 bp, Homo sapiens
  source 1..298: mol_type = other DNA
cagtgtctctggtggctccatcactgatcactactggaactggatccggcagtccccggggaagggactggagtgggttggccatatccgtaagactgagagtacccaccagaatccctccctcaacagtcgactcaccttatcactagacacgtccaagaaccagatctccctgaaactgagctctgtgaccgctgcggacacggccgtgtattattgtggaaggtctgatatgagtggtaactctttcgtggaatttgactactggggccagggaaccctggtcaccgtctcctca

SEQ ID NO: 15768 - DNA, 292 bp, Homo sapiens
  source 1..292: mol_type = other DNA
caatgtctctggtggctccatcagtagttactactggagctggattcggcagcccccagggaagggactggaatggattggttatgtctattacagtgggagcaccaactacaacccctccctcaagagtcgagtcaccatatcagtagacaagtccaagaatcagttctccctgaaggtgacctccgtgagcgcggcggacacggccgtgtattactgtgcgagagggggtaccactggctgggggcagtttgactactggggccagggaaccctggtcaccgtctcctca

SEQ ID NO: 15769 - DNA, 292 bp, Homo sapiens
  source 1..292: mol_type = other DNA
caatgtctctggtggctccatcagtagttactactggagctggattcggcagcccccagggaagggactggagtggattggttatgtctattacagtgggagcaccaactacaacccctccctcaagagtcgagtcaccatatcagtagacaagtccaagaatcagttctccctgaaggtgacctctgtgagcgcggcggacacggccgtgtattactgtgcgagagggggtaccactggctgggggcagtttgactactggggccagggaaccctggtcaccgtctcctca

SEQ ID NO: 15770 - DNA, 292 bp, Homo sapiens
  source 1..292: mol_type = other DNA
caatgtctctggtggctccatcagtagttactactggagctggattcggcagcccccagggaagggactggagtggattggttatgtctattacagtgggagcaccaactacaacccctccctcaagagtcgagtcaccatatcagtagacaagtccaagaatcagttctccctgaaggtgacctccgtgagcgcggcggacacggccgtgtattactgtgcgagagggggtaccactggctgggggcagtttgactactggggccagggaaccctggtcaccgtctcctca

SEQ ID NO: 15771 - DNA, 289 bp, Homo sapiens
  source 1..289: mol_type = other DNA
cactgtctctggtggctccatcagcaatagtagttactactggggctggatccgccagcccccagggaaggggctggagtggattgggagtatctattatcgtgggagcacgtactacaacccgtccctcaagagtcgagtcaccatatccgtagacacgtccaagaaccacttctccctgaagctgagctctgtgaccgccgcagacacggctgtgtattactgtgtgtatttccatacgtttatgtttgactactggggccagggaaccctggtcaccgtctcctca

SEQ ID NO: 15772 - DNA, 289 bp, Homo sapiens
  source 1..289: mol_type = other DNA
cactgtctctggtggctccatcagcaatagtagttactactggggctggatccgccagcccccagggaaggggctggagtggattgggagtatctattatcgtgggagcacgtactacaacccgtccctcaagagtcgagtcaccatatccgtagacacgtccaagaaccacttctccctgaagctgagctctgtgatcgccgcagacacggctgtgtattactgtgtgtatttccatacgtttatgtttgactactggggccagggaaccctggtcaccgtctcctca

SEQ ID NO: 15773 - DNA, 298 bp, Homo sapiens
  source 1..298: mol_type = other DNA
tgcagcctctggattcacctttaccaactatgccatgacctgggtccgccaggctccagggaaggggctggagtgggtctcaactattagtggtagtggtggtaacacatactacgcagactccgtgaagggccggttcaccatctccagagacaattccaagaacacgttgtatctgcaaatgaacagcctgagagccgaggacacggccctatattactgtgcgaaagatcggagagatgacagctcgtccttcatcgacccctggggccagggaaccctggtcatcgtctcctca

SEQ ID NO: 15774 - DNA, 298 bp, Homo sapiens
  source 1..298: mol_type = other DNA
tgcagcctctggattcacctttttcgactatgccatgacttgggtccgccaggctccagggaaggggctggagtgggtctcaactattagcggtgctggttataacacatactacgcagactccgtgaagggccggttcaccatctccagagacaattccaagaacacgttgtatctgcaaatgaacagcctgagagccgaggacacggccctatattattgtgcgaaagatcggagagatgacagctcgtccttcattgacccctggggccagggaaccctggtcatcgtctcctca

SEQ ID NO: 15775 - DNA, 298 bp, Homo sapiens
  source 1..298: mol_type = other DNA
tgcagcctctggattcacccttttcgactatgccatgacttgggtccgccaggctccagggaaggggctggagtgggtctcaactattagcggtgctggttataacacatactacgcagactccgtgaagggccggttcaccatctccagagacaattccaagaacacgttgtatctgcaaatgaacagcctgagagccgaggacacggccctatattattgtgcgaaagatcggagagatgacagctcgtccttcattgacccctggggccagggaaccctggtcatcgtctcctca

SEQ ID NO: 15776 - DNA, 280 bp, Homo sapiens
  source 1..280: mol_type = other DNA
tgcagcctctggattcacctttagtgccaattggatgacctgggtccgccaggctccagggaagggactggagtgggtggccaacataaaagaagatggaagtgaggtacactatgtggactctgtgaggggccgattcaccatctccagagacaacgccaggagctccctgtatctgcaaatgaacagcctgagagccgaagacacggccgtatattactgtgcgagaaatcgtgggactagccactggggccagggaaccctggtcaccgtctcctca

SEQ ID NO: 15777 - DNA, 280 bp, Homo sapiens
  source 1..280: mol_type = other DNA
tgcagcctctggattcacctttagtggcagttggatgacctgggtccgccaggctccagggaagggactggagtgggtggccatcataaaacaagatggaagtgagaaatactatgtggactctgtggagggccgattcaccatctccagagacaacgccaagagctccctgtttctgcaaatgaacagcctgagagtcgaggacacggccgtatattactgtgcgagaaatcgtgggactagccactggggccagggaaccctggtcaccgtctcctca

SEQ ID NO: 15778 - DNA, 280 bp, Homo sapiens
  source 1..280: mol_type = other DNA
tgcagcctctggattcacctttagtagcaattggatgacctgggtccgccaggctccagggaagggactggagtgggtggccatcataaaacaagatggaagtgagaaaaactatgtggactctgtgaagggccgattcaccatctccagagacaacgccaagagctccctgtatctgcaaatgaacagcctgagagtcgaggacacggccgtatattactgtgcgagaaatcgtgggactagccactggggccagggaaccctggtcaccgtctcctca

SEQ ID NO: 15779 - DNA, 307 bp, Homo sapiens
  source 1..307: mol_type = other DNA
cactgtctctggtggctccattagtagttacgactggagctggatccggcagcccccggggaagggactagagtggattggatatatctatcagagtgggagaaccaactacgacccctccctgaagagtcgagtcaccatgtcagtagacacgtccaagaaccagatctccctgaggctgacctctgtgaccgctgcggacacggccgtctattactgtgcgagaacattaagtgtctccgagggctactcttactacttccacatggacgtctggggcaaggggaccacggtcaccgtcgcctca

SEQ ID NO: 15780 - DNA, 307 bp, Homo sapiens
  source 1..307: mol_type = other DNA
cagtgtctctggtggctccattagtagttacgactggagctggatccggcagcccccggggaagggactagagtggattggatatatctaccagaatgggagaaccaactacgacccctccctggagagtcgagtcaccatgtcagtagacatgtccaagaagcagatctccctgaggctgacctctgtgaccgctgcggacacggccgtctattactgtgcgagaacattaagtgtctccgagggctactcttactacttccacatggacgtctggggcaaagggaccacggtcaccgtcgcctca

SEQ ID NO: 15781 - DNA, 289 bp, Homo sapiens
  source 1..289: mol_type = other DNA
tgcagcctctggattcacctttagtaactcttggatgagctgggtccgccaggctccagggaaggggctggagtgggtggccaacattaagcaagatgaaagtgagaaatactatgtggactctgtggagggccgattcaccatctccagagacaacgccaagaactcactgtatctgcaaatgaacagcctgagagccgaggacacggctgtgtattactgtgcgagagaaaaagatggctaccactatgattactggggccagggaaccctggtcaccgtctcctca

SEQ ID NO: 15782 - DNA, 289 bp, Homo sapiens
  source 1..289: mol_type = other DNA
tgcagcctctggattcagctttagtaactcttggatgagctgggtccgccaggctccagggaaggggctggagtgggtggccaacataaaggaagatgaaagtgagaaatactatgtggactctgtgaagggccgattcaccatctccagagacaacgccaagaactcactgtatctgcaaatgaacagcctgagagccgaggacacggctgtgtattactgtgcgagagaaaaagatggctaccactatgactactggggccagggaaccctggtcaccgtctcctca

SEQ ID NO: 15783 - DNA, 289 bp, Homo sapiens
  source 1..289: mol_type = other DNA
tgcagcctctggattcagctttagtaactcttggatgagctgggtccgccaggctccagggaaggggctggagtgggtggccaacataaaggaagatgaaagtgagaaattctatgtggactctgtgaagggccgattcaccatctccagagacaacgccaagaactcactgtatctgcaaatgaacagcctgagagccgaggacacggctgtgtattactgtgcgagagaaaaagatggctaccattatgactactggggccagggaaccctggtcaccgtctcctca

SEQ ID NO: 15784 - DNA, 297 bp, Homo sapiens
  source 1..297: mol_type = other DNA
tcttctggaggcaccttcatcagttatgctatcagctgggtgcgacaggcccctggacaaggacttgagtggatgggagggatcatccctatctttggtacagcaaagtatgtacagaagttccaaggcagagtcacgattaccgcggacgaatccacgagcacagcctacatggagctgaggagcctgagatttgaggacacggccgtatattactgtgcgagagctcggtatagcagtggctggggggcggaatttgactactggggccagggaaccctggtcaccgtctcctca

SEQ ID NO: 15785 - DNA, 297 bp, Homo sapiens
  source 1..297: mol_type = other DNA
tcttctggaggcaccttcatcagttatgctgtcagctgggtgcgacaggcccctggacaaggacttgagtggatgggagggatcatccctatctttggtacagaaaagtatgcacagaagttccaaggcagagtcacgattaccgcggacgaatccacgagcacagcctacatggagctgaggagcctgagatttgaggacacggccgtatattactgtgcgagagctcgctatagcagtggctggggggcggaatttgactactggggccagggaaccctggtcaccgtctcctca

SEQ ID NO: 15786 - DNA, 297 bp, Homo sapiens
  source 1..297: mol_type = other DNA
tcttctggaggcaccttcatcagttatgctatcagctgggtgcgacaggcccctggacaaggacttgagtggatgggagggatcatccctatctttggtacagaaaagtatgcacagaagttccaaggcagagtcacaattaccgcggacgaatccacgagtacagcctacatggagctgaggagcctgagatttgaggacacggccgtatattactgtgcgagagctcgctatagcagtggctggggggcggaatttgactactggggccagggaaccctggtcaccgtctcctca

SEQ ID NO: 15787 - DNA, 297 bp, Homo sapiens; identical to SEQ ID NO: 15784
  source 1..297: mol_type = other DNA

SEQ ID NO: 15788 - DNA, 297 bp, Homo sapiens
  source 1..297: mol_type = other DNA
tcttctggaggcaccttcatcagttatgctatcagctgggtgcgacaggcccctggacaaggacttgagtggatgggcgggatcatccccatctttggtacagcaaagtatgtacagaagttccaaggcagagtcacgattaccgcggacgaatccacgagcacagcctacatggagctgaggagcctgagatttgaggacgcggccgtatattactgtgcgagagctcggtatagcagtggctggggggcggaatttgactactggggccagggaaccctggtcaccgtctcctca

SEQ ID NO: 15789 - DNA, 297 bp, Homo sapiens
  source 1..297: mol_type = other DNA
tcttctggaggcaccttcatcagttatgctatcagctgggtgcgacaggcccctggacaaggacttgagtggatgggagggatcatccctatctttggtacagaaaagtatgcacagaagttccaaggcagagtcacgattaccgcggacgaatccacgagcacagcctacatggagctgaggagcctgagatttgaggacacggccgtatattactgtgcgagagctcgctatagcagtggctggggggcggaatttgactactggggccagggaaccctggtcaccgtctcctca

SEQ ID NO: 15790 - DNA, 297 bp, Homo sapiens; identical to SEQ ID NO: 15786
  source 1..297: mol_type = other DNA

SEQ ID NO: 15791 - DNA, 280 bp, Homo sapiens
  source 1..280: mol_type = other DNA
cgctgtctatggtgggtccttcagtggttactactggagctggatccgccagcccccagggaaggggctggagtggattggggaaatcagtcatagtggaagtaccaactacaacccgtccctcaagagtcgagtcaccatatcagtagacacgtccaagaagcagttctccctgaagctgacctctgtgaccgccgcggacacggctgtgtattactgtgcgacagggggcctccacagtgactactggggccagggaaccctggtcaccgtctcctca

SEQ ID NO: 15792 - DNA, 280 bp, Homo sapiens
  source 1..280: mol_type = other DNA
cgctgtctatggtgggtccttcagtggttactactggagctggatccgccagaccccagggaaggggctggagtggattggggaaatcaatcatagtggaagcaccaactacaacccgtccctcaagagtcgagtcaccatatcagtagacacgtccaagaaccacttctccctgaagctgagctctgtgaccgccgcggacacggctgtgtattactgtgcgacagggggcctccacagtgactactggggccagggaaccctggtcaccgtctcctca

SEQ ID NO: 15793 - DNA, 298 bp, Homo sapiens
  source 1..298: mol_type = other DNA
tgcaggctctggattcacgtttggtgattatgccatgcactgggtccgccaacgtccggggaagggcctggagtgggtcgcgggaattgactggaatggcaaaggtctttcttatgcggactctgtcaggggtcgatttagtatcttcagagacaacacgaaggggtccctccacttgcaaatggacggcctgagacctgacgacacggccctctattactgcgcaaaaggcgggggcagcagtttgaacaactggttcgacccctggggcccgggaaccctggtcaccgtctcctca

SEQ ID NO: 15794 - DNA, 298 bp, Homo sapiens
  source 1..298: mol_type = other DNA
tgcaggctctggtttcacgtttggtgattatgccatgcactgggtccgccaacccccggggaagggcctggagtgggtcgcggcaattgactggaacggcaaaactctatcttatgcggactctgtgaggggtcgattcaccatctccagagacaacaccaaggggtccctctacttgcaaatggacggtctgagagctgacgacacggccctctattactgcgcaaaaggcgggggcagcagtttgaacaactggttcgacccctggggcccgggaaccctggtcaccgtctcctca

SEQ ID NO: 15795 - DNA, 309 bp, Homo sapiens
  source 1..309: mol_type = other DNA
gtctctggagtcaccttcgacacttttactttcagctgggtgcgccaggcccctggacaagggcttgagtggatgggagggatcatccctatcttaggtgcagcgaactatgcacagaagttccagggcagagtcaaagttaccgcggacgaatcgtcgaccacagcctacatggagctgaacagcctgacatctgacgacacggccatgtattactgtgcgggcctaccccggacaggcagctatggcggcaactactactactacatggacgtctggggcaaagggaccccggtcaccgtctcctca

SEQ ID NO: 15796 - DNA, 309 bp, Homo sapiens
  source 1..309: mol_type = other DNA
gtctctggagtcaccttcgacacttttactttcagctgggtgcgccaggcccctggacaagggcttgagtggatgggagggatcatccctatcttaggtgcagcgaactatgcacagaagttccagggcagagtcaaaattaccgcggacgaatcctcgaccacagcctacatggagctgaacagcctgacatctgacgacacggccatgtattactgtgcgggcctaccccggacaggcagctatggcggcaactactactactacatggacgtctggggcaaagggaccccggtcaccgtctcctca

SEQ ID NO: 15797 - DNA, 298 bp, Homo sapiens
  source 1..298: mol_type = other DNA
cgctgtctctggtgcctccgtcagtgttgattctcaccactggacctggatccggcagtccccagggaagggcctggagtggattggccgtatcatgtacaatggggccaccagctacaacccctccctcaagagtcgagtcagcatttccttggacacgttcagaaatcagttctcccttaaactgacctctgtgaccgctgcggacacggccttttattactgtgcggcagacccgcgggatggctatggtcatttttcagactggggacagggacccctggtcaccgtctcctca

SEQ ID NO: 15798 - DNA, 298 bp, Homo sapiens
  source 1..298: mol_type = other DNA
cgctgtctctggtgcctacgtcagtgttgattctcaccactggacttggatccggcagtccccagggaagggcctggagtggattggtcgtatcatgtacaatggggccaccagctacaacccctccctcaagactcgagtcagcatttcattggacacgtccagaaatcagttctcccttaaactgaactttgtgaccgtagcggacacggccttttattactgtgcggcagacccgcgggatggctacggtcatttttcagactggggacagggacccctggtcaccgtctcttca

SEQ ID NO: 15799 - DNA, 301 bp, Homo sapiens
  source 1..301: mol_type = other DNA
tgcagtctctggattcagcttcagtgactactacatgagttgggtccgccaggctccagggaaggggctggagtggctttcatacattagtagtagacgaggctacacaaactacgcagactctgtgaagggccgattcaccatctccagagacaacgccaagaactcactctatctgcaaatgaacagcctgagagccgaggacacggccatgtattactgtgcgagagataaggactggaacagacaaacctggatattcgacccctggggccagggaaccctggtcaccgtctcctca

SEQ ID NO: 15800 - DNA, 301 bp, Homo sapiens
  source 1..301: mol_type = other DNA
tgcagtctctggattcaccttcagtgactactacatgagttgggtccgccaggctccagggaaggggctggagtgggtttcatacattagtagtagacgaggttatataaactacgcagactctgtgaagggccgattcaccatctccagagacaacgccaagaactcactgtatctgcaaatgaacagcctgagagccgaggacacggccatctactactgtgcgagagataaggactggaacagacaaacctggatattcgacccctggggccagggaaccctggtcaccgtctcctca

SEQ ID NO: 15801 - DNA, 298 bp, Homo sapiens
  source 1..298: mol_type = other DNA
tgcagcctctggattcacttttagcacctatgccatgacctgggtccgccaggctccagggaaggggctggagtgggtctcatctattagtggtagtggtggtgccacatactacccagaccccgtgaagggccggttcaccatctccagagacaattccaacaacacgttgtatctgcaaatgaacagcctgagagccgaggacacggccgtatattactgtgcgaaaagaccagctgctatcctcgcctactacatgggcgtctggggcaaagggaccacggtcagcgtctcctca

SEQ ID NO: 15802 - DNA, 298 bp, Homo sapiens
  source 1..298: mol_type = other DNA
tgcagcctctggattcacttttagcacctatgccatgacctgggtccgccaggctccagggaaggggctggagtgggtctcatctattagtggtagtggtggtgccacatactacccagactccgtgaagggccggttcaccatctccagagacaattccaacaacacgttgtatctgcaaatgaacagcctgagagccgaggacacggccgtatattactgtgcgaaaagaccagctgctatcctcgcctactacatgggcgtctggggcaaagggaccacggtcagcgtctcctca

SEQ ID NO: 15803 - DNA, 298 bp, Homo sapiens
  source 1..298: mol_type = other DNA
tgcagcctctggattcacctttagcacctatgccatgagctgggtccgccaggctccagggaaggggctggagtgggtctcaactattagtggtaatggtggtgccacatactacccagactccgtgaagggccggttcaccatctccagagacaattccaagaacacgttgtatctgcaaatgaacagcctgagagccgaggacacggccgtatattactgtgcgaaaagaccagctgctatcctcgcctactacatgggcgtctggggcaaagggaccacggtcagcgtctcctca

SEQ ID NO: 15804 - DNA, 298 bp, Homo sapiens
  source 1..298: mol_type = other DNA
tgcagcctctggattcacttttagcacctatgccatgagctgggtccgccaggctccagggaaggggctggagtgggtctcatctattagtggtagtggtggtgccacatactacccagactccgtgaagggccggttcaccatctccagagacaattccaacaacacgttgtatctgcaaatgaacagcctgagagccgaggacacggccgtatattactgtgcgaaaagaccagctgctatcctcgcctactacatgggcgtctggggcaaagggaccacggtcagcgtctcctcg

SEQ ID NO: 15805 - DNA, 328 bp, Homo sapiens
  source 1..328: mol_type = other DNA
cactgtctctggtgactccatcaataatttcttctggagctggatccggcagcccccagggaagggactggagtggattggctatatctactacagtgagggcagcgacttcagtgggagcaccacctacaatccctccctcaagagccgagtcaccatatcggtagacacgtccaagacccagttctccctgaagctgacctctgtgaccgctgcggacacggccgtgtattactgtgcgaggcatcgtactacgctttttggagtggtcaatatcccggagtattttgacttgtggggccagggaaccctggtcaccgtctcctca

SEQ ID NO: 15806 - DNA, 328 bp, Homo sapiens
  source 1..328: mol_type = other DNA
cactgtctctggtgactccatgaataatttcttctggagctggatccggcagcccccagggaagacactagagtggattggctatatctactacaatgaggccagcgacttcagtgggagcacgacctacaatccctctctcaagagccgagtcaccatatcggtagacacgtccaagacccagttctccctgaacctgacctctgtgaactctgcggacacggccgtgtattactgtgcgaggcatcgcactacactttttggagtggtcaatatcccggaatactttgacctctggggccagggaaccccggtcaccgtctcctca

SEQ ID NO: 15807 - DNA, 316 bp, Homo sapiens
  source 1..316: mol_type = other DNA
tgcagcctctggattcacctttaggaactatgccatgagctgggtccgccaggctccagggaaggggctggagtgggtctcagctattagtgccagtggtcgtaacacatactacgcagactccgtgaggggccggttctccatctccagagacaattccaagaacacgctgtatctgcaaatgaacagcctgagagtcgaagacacggccctatattactgtgcgcaagatctgccctccctaaaaggcgcatttgtagtagtgccagttgccgagggctactggggccagggaaccctggtcaccgtctcctca

SEQ ID NO: 15808 - DNA, 316 bp, Homo sapiens
  source 1..316: mol_type = other DNA
tgcagcctctggattcacctttaggaactatgccatgagctgggtccgccaggctccagggaaggggctggagtgggtctcagctattagtgccagtggtcgtaacacatactacgcagactccgtgaagggccggttctccatctccagagacaattccaagaacacgctgtatctgcaaatgaacagcctgagagccgaagacacggccctatattactgtgcgcaagatctgccctccctaaaaggcgcatttgtagtagtgccagttgccgagggctactggggccagggaaccctggtcaccgtctcctca

SEQ ID NO: 15809 - DNA, 295 bp, Homo sapiens
  source 1..295: mol_type = other DNA
tgaagcctctggattcaccttcgctacatatagcatgaactgggtccgccaggctccagggaggggactggagtgggtttcattcattagtgacactgctagaaatatgttgtacgcagactctgtgaggggccgattcaccatctccagagacaatgccaagagctcactgtatctgcaaatggacggcctgagagacgaggacacggctgtgtattactgtgcgagaagtctaccaattcctggagtggtgtttgagtattggggccagggagccctggtcaccgtctcctca

SEQ ID NO: 15810 - DNA, 295 bp, Homo sapiens
  source 1..295: mol_type = other DNA
tgcagcctctggattcaccttcgctgaatatagcatgaactgggtccgccagactccagggaaggggctggagtgggtttcattcattagtgatactgctagaaatatgttgtacgcagactctgtgaggggccgattcaccatctccagagacaatggcaagagctcactgtatctgcaaatggacggcctgagagacgaggacacggctgtgtattactgtgcgagaagtttaccaattcctggagtggtgtttgagtactggggccagggaaccctggtcaccgtctccgca

SEQ ID NO: 15811 - DNA, 295 bp, Homo sapiens
  source 1..295: mol_type = other DNA
tgcagcctctggattcaccttcgctgaatatagcatgaactgggtccgccaggctccagggaaggggctggagtgggtttcatttattagtgatactgctagacatatgttgtacgcagactctgtgaggggccgattcaccatctccagagacaatggcaagagctcactgtatctgcaaatggacggcctgagagacgaggacacggctgtgtattactgtgcgagaagtttaccaattcctggagtggtttttgagtactggggccagggaaccctggtcaccgtctccgca

SEQ ID NO: 15812 - DNA, 310 bp, Homo sapiens
  source 1..310: mol_type = other DNA
tgcagcctctggattcaccttcagtaacgtctggatgagctgggtccgccaggctccagggaaggggctggagtggattggccgtattaagagcaaaactgatggtgagacaacagactacgctgcacccgtgaaaggcagattcagcatctcaagagatgattcaaaaaacacgctgtatctgcatatgaacagcctgcaaaccgaggacacagccgtgtattactgtaccacagttcggtattgtggtggtggtgccgtttattgctttgactactggggccagggaaccctggtcaccgtctcctca

SEQ ID NO: 15813 - DNA, 310 bp, Homo sapiens
  source 1..310: mol_type = other DNA
tgcagcctctggattcaccttcagtaacgtctggatgagctgggtccgccaggctccagggaaggggctggagtggattggccgtattaagagcaaaactgatggtgagacaacagactacgctgcacccgtgaaaggcagattcaccatctcaagagatgattcaaaaaacacgctgtatctgcatatgaacagcctgcaaaccgaggacacagccgtgtattactgtaccacagttcggtattgtggtggtggtgccgtttattgctttgactactggggccagggaaccctggtcaccgtctcctca

SEQ ID NO: 15814 - DNA, 310 bp, Homo sapiens
  source 1..310: mol_type = other DNA
tgcagcctctggattcaccttcagtaacgtctggatgagctgggtccgccaggctccagggaaggggctggagtggattggccgtattaagagcaaaactgatggtgagacaacagactacgctgcacccgtgaaaggcagattcaccatctcaagagatgattcaaaaaacacgctgtatctgcaaatgaacagcctgcaaaccgaggacacagccgtgtatcactgtaccacagttcggtattgtggtggtggtgccgtttattgctttgactactggggccagggaaccctggtcaccgtctcctca

SEQ ID NO: 15815 - DNA, 289 bp, Homo sapiens
  source 1..289: mol_type = other DNA
tgcaacgtttggattcaccttcagtagttatggcttccactgggtccgccaggctccaggcaaggggctggagtgggtggcatgtatttggaatgatggaagtcagaaatatcatgcagactccgtgaagggccgattcactatctccagagacgactccaagaacacggtgtttctggaaatgatccacctgagaggcgaggacacggctatttattattgtgcgagagatattgggcgcactgctttgggccagtggggccagggagccctggtcaccgtctcctca

SEQ ID NO: 15816 - DNA, 289 bp, Homo sapiens
  source 1..289: mol_type = other DNA
tgcaacgtttggattcaccttcactagtcatggcttccactgggtccgccaggctccgggcaaggggctggagtgggtggcatgtatctggaaggatggaagtcagaaatatcatgcagactccgtgaagggccgattcaccatctccagagacgactccaagaacacggtgtttctggaaatgaacaacctgagagccgaggacacggctacttattattgtgcgagagatattgggcgcactgctttaggccagtggggccagggagccctggtcaccgtctcctca

SEQ ID NO: 15817 - DNA, 280 bp, Homo sapiens
  source 1..280: mol_type = other DNA
tgcagcctctggattcacctttagtagttcttggatgacttgggtccgccaacctccagggaaggggctggagtgggtggccaacatcaaggaagatggaagtgacaaatactacgtggactctgtgaagggccgattcaccatctccagagacaaccctaagaactccctgtatctgcaaatgaacaacctgagagtcgaggacacggctttttattactgtgcgcggtatcgaggggctggtgattggggccagggatccctggtcattgtctcctca

SEQ ID NO: 15818 - DNA, 280 bp, Homo sapiens
  source 1..280: mol_type = other DNA
tgcagcctctggattcacctttagtagttcttggatgacttgggtccgccaggctccagggaaggggctggagtgggtggccaacataaaggaagatggaggtgagaagtattacgtggactctgtgaagggccgattcaccatctccagagacaaccctaagaactcactgtatctgcaaatgaacaacctgagagtcgaggacacggctgtgtattactgtgcgcggtatcgaggggctggtgattggggccagggatccctggtcaccgtctcctca

SEQ ID NO: 15819 - DNA, 280 bp, Homo sapiens
  source 1..280: mol_type = other DNA
tgcagcctctggattcacctttagtgattcttggatgacttgggtccgccaacctccagggaaggggctggagtgggtggccaacataaaggaagatggaagtgacaaatactacgtggactctgtgaagggccgattcaccatctccagagacaaccctaagaactccctgtatctgcaaatgaacaacctgagagtcgaggacacggctttttattactgtgcgcggtatcgaggggctggtgattggggccagggatccctggtcattgtctcctca

SEQ ID NO: 15820 - DNA, 280 bp, Homo sapiens
  source 1..280: mol_type = other DNA
tgcagcctctggattcacctttagtggagattggatgacttgggtccgccaacctccagggaaggggctggagtgggtggccaacataaaggaggatggaggtgagaaatactacgtggactctgtgaagggccgattcaccatctccagagacaaccctaagaggtccctgtatctgcaaatggacaacctgagagccgaggacacggctgtgtattactgtgcgcgatatcgaggggctggtgattggggccagggatccctggtcaccgtctcctca

SEQ ID NO: 15821 - DNA, 292 bp, Homo sapiens
  source 1..292: mol_type = other DNA
cactgtctctggtggctccatcagtacttactattggagctggatccggcagcccccagggaagggactggagtggattgggtatatctattacactgggagcaccaactacaacccctccctcaagagtcgagtcaccatgtcagtagacacgtccaggaaccagttctccctgaaggtgagctctgtgaccgctgcggacacggccgtgtattactgtgcgagaggggcgcaggtcgtcccacactacatggacgtctggggcagagggactacggttaccgtctcctca

SEQ ID NO: 15822 - DNA, 292 bp, Homo sapiens
  source 1..292: mol_type = other DNA
cactgtctctggtggctccatcagtacttactactggagctggatccggcagcccccagggaagggactggagtggattgggtatatctattacactgggagcaccaactacaacccctccctcaagagtcgagtcaccatgtcagtagacacgtccaggaaccagttctccctgaaggtgagctctgtgaccgctgcggacacggccgtgtattactgtgcgagaggggcgcaggtcgtcccacactacatggacgtctggggcagagggactacggttaccgtctcctca

SEQ ID NO: 15823 - DNA, 307 bp, Homo sapiens
  source 1..307: mol_type = other DNA
caagggttctggatacagcttttccacctactggatcgcctgggtgcgccagatgcccgggaaaggcctggagtggatggggatcatctatcctggtgactctgataccaaatacagtccgtccttccaaggccaggtctccatctcagccgacaagtccatcaacaccgcctacctgcagtggagcagcctgaaggcctcggacaccgccatgtattactgtgccagacgcgaattagcatattgtggtgctgagtgctacttttttgactactggggccagggaaccctggtcaccgtctcctca

SEQ ID NO: 15824 - DNA, 307 bp, Homo sapiens; identical to SEQ ID NO: 15823
  source 1..307: mol_type = other DNA

SEQ ID NO: 15825 - DNA, 306 bp, Homo sapiens
  source 1..306: mol_type = other DNA
aagggttctggatacagcttttccacctactggatcgcctgggtgcgccagatgcccgggaaaggcctggagtggatggggatcatctatcctggtgactctgataccagatacagtccgtccttccaaggccaggtctccatctcagccgacaagtccatcaacaccgcctatttgcagtggagcagcctgaaggcctcggacaccgccatgtattactgtgcgagacgcgaactagcatattgtggtgctgagtgctacttttttgactactggggccagggaaccctggtcaccgtctcctca

SEQ ID NO: 15826 - DNA, 298 bp, Homo sapiens
  source 1..298: mol_type = other DNA
cagtgtctctggtggctccatcactgatcactactggaactggatccggcagtccccggggaagggactggagtgggttggccatatccgtaagactgagaatacccaccagaatccctccctcaacagtcgactcaccttatcactagacacgtccaagaaccagatctccctgaaactgagctctgtgaccgctgcggacacggccgtgtattattgtggaaggtctgatacgaggggtaattctttcgtggaatttgactactggggccagggaatcctggtcaccgtctcctca

SEQ ID NO: 15827 - DNA, 298 bp, Homo sapiens
  source 1..298: mol_type = other DNA
cagtgtctctggtggctccatcactgatcactactggaactggatccggcagtccccggggaagggactggagtgggttggccatatccgtaagactgagagtacccaccagaatccctccctcaatggtcgactcaccttatcactagacacgtccaagaaccagatctccctgaaactgacctctgtgaccgctgcggacacggccgtatattactgtggaaggtctgatacgcgtggtaattctttcgtggaatttgactactggggccagggaaccctggtcaccgtctcctca

SEQ ID NO: 15828 - DNA, 300 bp, Homo sapiens
  source 1..300: mol_type = other DNA
gagggatctggttacatttttggcaaccactggatcgcctgggtgcgccggaggcccgggaaaggcctggagtggatggggatcacctatcctggatcctctcttctcaaatacaacccgtccttcgaaggccgggtcaccatctcagccgacaagtccatcaacaccgcctacctgcagtggagcagcctgcaggcctcggacaccgccacttattactgtgcgagacatcggggagtattcttcgatactttctcttttgacttctggggccagggaacccaggtcaccgtctcgtca

SEQ ID NO: 15829 - DNA, 300 bp, Homo sapiens
  source 1..300: mol_type = other DNA
gaggcatctggttacatttttggcaaccactggatcgcctgggtgcgccggaggcccgggaaaggcctggagtggatggggatcacctatcctggatcctctcttctcaaatacaacccgtccttcgaaggccgggtcaccatctcagccgacaagtccatcaacaccgcctacctgcagtggagcagcctgcaggcctcggacaccgccacttattactgtgcgagacatcggggagtgttcttcgatactttctcttttgacttctggggccagggaacccaggtcaccgtctcgtca

SEQ ID NO: 15830 - DNA, 297 bp, Homo sapiens
  source 1..297: mol_type = other DNA
aaggcttctggatacaattttagcagaaagtggatcgggtgggtgcgccagatgcccgggaaaggcctggagtggttggggatcatctatcctgctgactctgacatcagatatagcccggccctccaaggccaggtcaccatctcagccgacgagtccatcagtaccacttacctgcagtggggcagcctgagggcctcggacaccgccgtctattactgtgcgactggctccggtgactacaggcgcactcactttgactattggggccagggaaccctggtcaccgtctcctca

SEQ ID NO: 15831 - DNA, 297 bp, Homo sapiens
  source 1..297: mol_type = other DNA
aaggcttctggatacaattttagcagaaagtggatcgggtgggtgcgccagatgcccgggaaaggcctggagtggttggggatcatctatcctgctgactctgacaccagatatagcccggccctccaaggccaggtcaccatctcagccgacgagtccatcagtaccactttcctgcagtggggcagcctgagggcctcggacaccgccgtctattactgtgcgactggctccggtgactacaggcgcactcactttgactattggggccagggaaccctggtcaccgtctcctca

SEQ ID NO: 15832 - DNA, 289 bp, Homo sapiens
  source 1..289: mol_type = other DNA
tgcagcctctggattcaccttcagcagctacgtgatgcactgggtccgccaagctccagggaagggcctggtgtgggtcgcacgtattagtcatgatatgtctgtcacaatctatgaggactccgtgaagggccgattcaccatctccagagacaacgccaagaacaccctgtatctgcaaatgaacagtctgagaggcgaagacacgggcttgtattattgtgtaagagacgacggcaattggggacttgactattggggccagggaaccgtggtcaccgtctcctca

SEQ ID NO: 15833 - DNA, 289 bp, Homo sapiens
  source 1..289: mol_type = other DNA
tgcagcctctggattcaccttcagcaactacgtgatgcactgggtccgccaagctccagggaagggcctggtgtgggtcgcacgtcttagtcacgaaatgactggcacagtctatgcggactccgtgaagggccgattcaccatctccagagacaacgccgagaacaccttgtatctgcaactgaacagtctgagaggcgaagacacgggcatctattattgtgtgagagacgacggcaattggggacttgactattggggccagggaaccgtggtcaccgtctcctca

SEQ ID NO: 15834 - DNA, 304 bp, Homo sapiens
  source 1..304: mol_type = other DNA
cactgtctctggagtctccctcagcagtagtactcactactggggctggatccgccaggcctcagggaaggggctggaatggattggaaatatttttcatgatggggccaccaattacaacccgtccctcaacaatcgagtctccctgtccgttgacacgtccaagaaccagttctccctgaagttgcgctccgtgaccgccgccgacacggctatctattactgcgcgcgacgcggtgactacggtggcgcgtggaattggttcggcccctggggtcagggagccctggtcaccgtctcctca

SEQ ID NO: 15835 - DNA, 304 bp, Homo sapiens
  source 1..304: mol_type = other DNA
tcttgtctctggtgcctccattagcactagtactcactactgggcctggctccgcctggccccaggcgaggggctggaatggattggcaatatcttcaatgatggggccaccaactacaacccgtccctcaagagtcgagtcaccatgtccgttgacacagccaagaaccagttcttcctgaacctgcgctccgtgaccgccgcagacacggccacatattactgcgcgcgacgcggtgactacggtggcgcgtggaattggttcggcccctggggacagggaaccctggtcaccgtctcctca

SEQ ID NO: 15836 - DNA, 340 bp, Homo sapiens
  source 1..340: mol_type = other DNA
tgcagcctccggattcaccttcagtacctattacatgacctgggtccgccagtctccagggcaggggctggagtgggtctcatccattagttataccagtggcgacatattttactcagactctgtgaagggccgattcaccatttccagagacaacgcccagaactcactgtatctgcaaatgaacagcctgggagccgacgacacggctgtttattactgtgcgagaggaggggctcagtttggcccatgggtggctggtttagggatacatggatactaccaccactacttctatatggacgtctggggccaagggaccccggtcaccgtctcctca

SEQ ID NO: 15837 - DNA, 340 bp, Homo sapiens
  source 1..340: mol_type = other DNA
tgcagcctctggattcaccttcagtacctattacatgacctgggtccgccaggctccagggcaggggctggagtgggtctcatccattagttataccagtggcgacatcttttactcagactctgtgaagggccgattcaccatctccagagacaacgcccagaactcactgtatctgcaaatgaacagcctgggagccgacgacacggctgtttattactgtgcgagaggaggggctcagtttggcccatgggtggctggtttagggatacatggatactaccaccactacttctatatggacgtctggggccaagggaccccggtcaccgtctcctca

SEQ ID NO: 15838 - DNA, 289 bp, Homo sapiens
  source 1..289: mol_type = other DNA
tacaggctctggattcacctttgacagttatgccttcgactgggtccgccaggctccagggaaggggctggagtgggtcgccgccattagtaacgggggtgatagggcttacctcgcagactccgtgcaaggccgcttcagcgtcttcagagacaattccaagagcacactttatctacacatggacaacctgagagtcgaggattcggccatctattactgtgggaaaaatctacctggccacacgcccgaacactggggccagggaaccgtggtcaccgtctcctca

SEQ ID NO: 15839 - DNA, 289 bp, Homo sapiens
  source 1..289: mol_type = other DNA
ttcaggctctggattcacctttgacagttatgccttcgactgggtccgccaggctccagggaaggggctggagtgggtcgccgccattagtaacgggggtgatagggcttacctcgcagactccgtgcaaggccgcttcagcgtcttcagagacaattccaagagcacactttatctacacatggacaacctgagagtcgaggattcggccatctattactgtgggaaaaatctacctggccacacgcccgaacactggggccagggaaccgtggtcaccgtctcctca

SEQ ID NO: 15840 - DNA, 295 bp, Homo sapiens
  source 1..295: mol_type = other DNA
tgcggcctctgggttcaccttcagtggctctggtatgcactgggtccgccaggcttccggaaaagggctggagtgggttggccgtattggaggcaaacctaacagttacgcgacagtatatggtgggtcggtgaaaggcacgttcaccatctccagagatgattcaaagaacacggcgtatcttcaaatgaacagcctgaaaaccgacgacacggccgtctattattgtacctgtaaatggaacgacgtcgggtctgactactggggccagggaaccctggtcaccgtctcctca

SEQ ID NO: 15841 - DNA, 295 bp, Homo sapiens
  source 1..295: mol_type = other DNA
tgcggcctctgggttcacctgcagtgactctggtatacactgggtccgccaggcttccggaaaagggctggagtgggttggccgtattggaggcaagcctcacaattacgcgacagtatatggtgggtcggtgaaaggcacgttcaccatctccagagatgattcaaagaacacggcgtatcttcaaatgagcagcctgaaaaccgacgacacggccgtctattattgtacctgtaaatggaacgacgtcgggtctgactactggggccagggaaccctggtcaccgtctcctca

SEQ ID NO: 15842 - DNA, 295 bp, Homo sapiens
  source 1..295: mol_type = other DNA
tgcggcctctgggttcaccttcagtggctctggtatacactgggtccgccaggcttccggaaaagggctggagtgggttggccgtattggaggcaaacctaacaattacgcgacagtatatggtgggtcggtgaaaggcacgttcaccatctccagagatgattcaaagaacacggcgtatcttcaaatgaacagcctgaaaaccgacgacacggccgtctattattgtacctgtaaatggaacgacgtcgggtctgactactggggccagggaaccctggtcaccgtctcctca

SEQ ID NO: 15843 - DNA, 310 bp, Homo sapiens
  source 1..310: mol_type = other DNA
tgtgggatctggattcagtttcagtgacgactggatgacttgggtccgtcagagtcaaggcaaggggctggaatgggtggcccacattaactcagatggaagtgagagatattatttggactctgtgaagggacgcttcaccatctccagggacaacgtcaagaactccctctatcttcaaatggacagtatgagtgtcgacgacacggccatttattattgtgtgagggaacatcttataggacaccattcggatgggcccccgcacttcgaccactggggccagggcaccctggtcaccgtctcctca

SEQ ID NO: 15844 - DNA, 310 bp, Homo sapiens
  source 1..310: mol_type = other DNA
tgtgggctctggaatcactctcagtgacgattggatgacctgggtccgtcagagtcaagggaaggggctggaatgggtggcccacattaaccccgatggaagtgagagatactacttggattctgtgaagggccggttcaccatctccagggacaacgtcaagaactccctctatcttcaaatggacagtttgagtgtcgacgacacggccctttatttttgtgtgagagaacatcttataggacatcactcggatgggcccccgcacttcgaccactggggccagggcgcccaggtcaccgtctcctca

SEQ ID NO: 15845 - DNA, 301 bp, Homo sapiens
  source 1..301: mol_type = other DNA
tgcagcccctggattcatctttgataattatgccttccactgggtccggcaacctccagggaagggcctggagtgggtctcaggtattagtcggacaagtgctaatataggctatgcggactctgtgaagggccgattcaccatctccagagacaacgccagggactccctgtttctgcaaatgaacagtctgggacctgaggacacggccttgtattattgtgcaagagatctgggaactggtagtgggggagggtattttgacgactggggccagggaaccctggtcatcgtctcctca

SEQ ID NO: 15846 - DNA, 301 bp, Homo sapiens
  source 1..301: mol_type = other DNA
tgcagcctctggattcatctttgataattatgccttccactgggtccggcaacctccagggaagggcctggagtgggtctcaggtattggtcggagaagtgttaacatcggctatgcggactctgtgaagggccgattcaccatctccagagacaacgccaagaactccctgtttctgcaaatgaacagtctgggacctgaggacacggccttgtattactgtgcaagagatctgggaactggtagtgggggagggtattttgacgactggggccagggaaccctggtcatcgtctcctca

SEQ ID NO: 15847 - DNA, 301 bp, Homo sapiens
  source 1..301: mol_type = other DNA
tgcagcctctggattcatctttgataattatgccttccactgggtccggcaacctccagggaagggcctggagtgggtctcaggtattggtcggaaaagtgttaatataggctatgcggactctgtgaagggccgattcaccatctccagagacaacgccaagaactccctgtttctgcaaatgaacagtctgggacctgaggacacggccttgtattactgtgcaagagatctgggaactggaagtgggggagggtattttgacgactggggccagggaaccctggtcaccgtctcctca

SEQ ID NO: 15848 - DNA, 298 bp, Homo sapiens
  source 1..298: mol_type = other DNA
tgcagcctctggattcactttcagtaacgcctggatgagttgggtccgccaggctccagggaaggggctggagtgggttggccgtattaaaagcaagaaagatggtgagacgacagactacgctgcacccgtgaaaggcagattcaccgtctcaagagatgattcaaagaacatggtgtatctgcaaatgaacagcctcaagaccgaggacatagccgtatattactgtgccaaaggggctctacccggaactttctttgactactggggccagggaaccctggtcaccgtcacctca

SEQ ID NO: 15849 - DNA, 298 bp, Homo sapiens
  source 1..298: mol_type = other DNA
tgcagcctctggattcactttcagtcacgcctggatgagctgggtccgccaggctccagggaaggggctggagtgggttggccgtattaaaagcaagaaagatggtgagacgacagactacgctgcacccgtgaaaggcagattcaccgtctcaagagatgattcgaagaacatggtgtatctccaaatgaacggcctcaagaccgaggacataggcgtatattactgtgcgaaaggggctctacccggaactttctttgactactggggccagggaacgctggtcaccgtcacctca

SEQ ID NO: 15850 - DNA, 304 bp, Homo sapiens
  source 1..304: mol_type = other DNA
tgcagcctctggattcacctttaacatctatggcataaactgggtccgccaggctccagggaaggggctggagtggatctcaggtattagtgggagtggtgatctgacattctacgcagactccgtgaagggccggttcaccgtctccagagacaatcccaagagcacgctgtatctgcaaatgaacagcctgagagccgaggacacggccgtatattactgtgcgacctctctatcgcgtttagtagtggttggcgggtacttcctacactggggccagggcaccctggtcaccgtctcctca

SEQ ID NO: 15851 - DNA, 304 bp, Homo sapiens
  source 1..304: mol_type = other DNA
cgcagcctctggattcacctttaacatctatggcataaactgggtccgccaggctccagggaaggggctggagtggatcgcaggtattagtggcagtggcgatctgactttctacgcagactccgtgaagggccggttcaccgtctccagagacaatcccaagagcacgctgtatctgcaaatgaacagcctgagagccgaggacacggccgtatactactgtgcgacctctctatcgcgtttagtggtggttggcgggtacttcttacactggggccagggcaccctggtcagcgtctcctca

SEQ ID NO: 15852 - DNA, 309 bp, Homo sapiens
  source 1..309: mol_type = other DNA
gcatctggagtcaccttcagcgacttctacatacactgggtgcgacaggcccctggacaagggcttgagtggatgggagtaatcaacccgaagggcggcaccacaacccacgcacagaatttccaggacagaatcatcgtgtcctgggacacgtccacgggcacagccttcatggagctgacgagtctgggatctgaggacacggccgtgtactactgtgcgcttgagaggctcctttactcgggaaattatttttttaatcggcggtacgacccctggggccagggaaccctggtcaccgtctcctca

SEQ ID NO: 15853 - DNA, 309 bp, Homo sapiens
  source 1..309: mol_type = other DNA
gcatctggagtcaccttcagcgacttctacatacactgggtgcgacaggcccctggacaagggcttgagtggatgggagtaatcaacccgaagggcggcaccacaacccacgcacagaatttccagggcagaatcatcgtgtcctgggacacgtccacgggcacagccttcatggagctgacgagtctgggatctgaggacacggccgtgtactactgtgcgcttgagaggctcctttactcgggaaattatttttttaatcggcggtacgacccctggggccagggaaccctggtcaccgtctcctca

SEQ ID NO: 15854 - DNA, 292 bp, Homo sapiens
  source 1..292: mol_type = other DNA
tgcagcctctggattcacctttagcagccattccatgagctgggtccgccaggctccagggaaggggctggaatgggtctctagtattagtcctaatagtgatgccatattctacgcagactccgtggagggccgggtcaccacctccagagacaattccaggaacacactgtttctagaaatgaacagcctgagagccgaggacacggccatatattactgtgggagaggagcagcggctgctaggaaggttgactactggggccagggaaccctggtcaccgtctcctca

SEQ ID NO: 15855 - DNA, 292 bp, Homo sapiens
  source 1..292: mol_type = other DNA
tgcagcctctggattcacctttagcaggcattccatgagctgggtccgccaggctccagggaaggggctggaatgggtctctagtattagtcctaatagtgatgacatattccacgcagactccgtggagggccgggtcaccacctccagagacaattccaggaacacactgtttctagaaatgaacagcctgagagccgaggacacggccatatattactgtgggagaggagcagcggctgctaggaaggttgactattggggccagggaacccgggtcaccgtctcctca

SEQ ID NO: 15856 - DNA, 294 bp, Homo sapiens
  source 1..294: mol_type = other DNA
gcttctggatacactttcacaaattttcctatacattggctgcgccaggtccccggccaaggccttgagtggatgggatggatcaatgttggcaatggttacacaaattattcacagaagttccagggcggactctccataaccgccgacacatccgcgagttcagtctacatggagctgggcagcctgagatctgaggacacggctctttatttctgtgcgagaggaatgggaggcgcttactaccaatacatggacgtctggggcagagggaccacggtcaccgtctcctca

SEQ ID NO: 15857 - DNA, 294 bp, Homo sapiens
  source 1..294: mol_type = other DNA
gcttctggatacagtttcacaaattttcctatacattggctgcgccaggcccccggccaaggccttgagtggatgggatggatcaatgttggcaatggttacacaaattattcacagaagttccagggcggactctccataaccgccgacacatccgcgagttcagtctacatggagctgggcagcctgagatctgaggacacggctctttatttctgtgcgagaggaatgggaggcgcttactaccaatacatggacgtctggggcagagggaccacggtcaccgtctcctca

SEQ ID NO: 15858 - DNA, 333 bp, Homo sapiens
  source 1..333: mol_type = other DNA
acacagaccctcacactgacctgcaccttttctgggttctctctcaccactagtggaacgtgtgtgagctggatccgtcaggccccagggaaggccctggagtggcttgcacgcattgattgggatggtgataaatactacacaaaatctctgaggaccaggctcaccctctccaaggacacctccgaaaaccaggtggtccttacaatgaccaacatggacccagcggacacagccacatattactgtgcacgaatggggggggtggcgagtcgtccggggagggactggttcgacccctggggcccgggaacccaggtcatcgtctcctca

SEQ ID NO: 15859 - DNA, 333 bp, Homo sapiens
  source 1..333: mol_type = other DNA
acacagaccctcacactgacctgcaccttttctggattctctctcaccaccagtggaacgtgtgtgagctggatccgtcaggccccagggaaggccctggagtggcttgcacgcattgattgggatgatgacaaatattacacaaaatctctgaggaccaggctcaccctctccaaggatacctccgaaaaccaggtggtcctcacaatgaccaacatggacgcagcggacacagccacctattactgtgcacgaatggggggtgtggcaagtcgtccggggagggactggttcgacccctggggcccgggaacccaggtcatcgtctcctca

SEQ ID NO: 15860 - DNA, 307 bp, Homo sapiens
  source 1..307: mol_type = other DNA
tgcaacctctggattcacctttagtcaccatgacatgacctgggtccgccaggctccagggaaggggctggagtgggtctcaatgatttcccgtagtggtgacgccgcatactacacagactccgtcaagggccgctttatcacctccagagacaactccaagaacaccatgtttctggaaatgaacagcctgagagccgaggacacgggcgtgtattattgtgtgaaacctggctactgtagtattgtgaactgctacagctggttcgcctcctggggcccgggaacccaggtcaccgtctcctca

SEQ ID NO: 15861 - DNA, 307 bp, Homo sapiens
  source 1..307: mol_type = other DNA
tgcaacctctggattcacctttagtcaccatgacatgacctgggtccgccaggctccagggaaggggctggagtgggtctcaatgatttcccgtagtggtgacgccgcatactacacagactccgtcaagggccggtttaccacctccagagacaactccaagaacaccatgtttctggaaatggacagcctgagagccgaggacacgggcgtgtattattgtgtgaaacctggctactgtagtattgtgaactgctacagctggttcgcctcctggggccagggaacccaggtcaccgtctcctca

SEQ ID NO: 15862 - DNA, 310 bp, Homo sapiens
  source 1..310: mol_type = other DNA
tgcggcctcgggtttcactttccacaatttttggatgtactgggtgcgcctggttccagggaaggggttggagtgggtctccagcattgatgaggacggcgacagtccaaggtacgcggactccgcgaaaggccggttcaccatgtccagagacaacgccgaaaacactgtttatcttcaaatgacgtctttgagagtcgacgacagcgccgtctattactgtgccaggccagcaagagtctacaacgatcccgacttccggaacttcatggccgtctggggcagtgggaccacggtcaccgtctcctca

SEQ ID NO: 15863 - DNA, 310 bp, Homo sapiens
  source 1..310: mol_type = other DNA
tgcggcctcgggtttcactttccacaatttttggatgtattgggtgcgcctggttccagggaaggggttggagtgggtctccagtattgatgaggacggcgacagtccaaggtacgcagactccgcgaaaggccggttcaccatgtccagagacaacgccgacaacattgtttatcttcaaatgacgtctttgagagtcgacgacagtgccgtctattattgtgccaggccagcaagagtctacaacgatcccgacttccgtaacttcatggccgtctggggcagtgggaccacggtcaccgtctcctca

SEQ ID NO: 15864 - DNA, 313 bp, Homo sapiens
  source 1..313: mol_type = other DNA
tgcggcctcgggtttcactttccgtaatttttggatctactgggtgcgcctggttccagggaaggggttggagtgggtctccagtattgatgaggaggacggcgatagtccaaggtacgcggactccgtgaaaggccggttcaccatgtccagagacaacgccgaaaacattgtatatcttcaaatgacgtctttgagagtcgacgacagcgccgtctattactgtgccaggccagcaagagtctacaacgatcccgacttccggaacttcatggccgtctggggcagtgggaccacggtcaccgtctcctca

SEQ ID NO: 15865 - DNA, 310 bp, Homo sapiens
  source 1..310: mol_type = other DNA
tgcggcctcgggtttcactttccacaatttttggatgtattgggtgcgcctggttccagggaaggggttggagtgggtctccagcattgatgaggacgacgacagtccaaggtacgcagactccgcgaaaggccggttcaccatgtccagagacaacgccgacaacattgtttatcttcaaatgacgtctttgagagtcgacgacagcgccgtctattactgtgccaggccagcaagagtctacaacgatcccgacttccggaacttcatggccgtctggggcagtgggaccacggtcaccgtctcctca

SEQ ID NO: 15866 - DNA, 310 bp, Homo sapiens
  source 1..310: mol_type = other DNA
cacggtctccggtggctccatcagcatcagcacttactactgggcctggatccgccagtccccaggggggggcctggagtggattgggagtctttattacactggcaacacgtattacaacccgtccctcaagagtcgagtcaccatttccgtggacacgtcgaacaatcagttctccctgagtctgacatatgtgaccgccgcggacacggctctttattattgtgccagacaaagtcgatactacaactctgaaacttcctatggctttgatgtctggggccaagggacaagggtcgatgtctcttca

SEQ ID NO: 15867 - DNA, 310 bp, Homo sapiens
  source 1..310: mol_type = other DNA
cacggtctccggtggctccatcagcatcagcacttactactgggcctggatccgccagtccccaggggggggcctggagtggattgggagtctttattacactggcaacacctactacaacccgtccctcaagagtcgagtcgccatttccgtggacacgtcgaacaatcagttctccctgagtctgacatatatgaccgccgcggacacggctctttattattgtgccagacaaagtcgatactacaactctgaaacttcatatggctttgatgtctggggccaaggggcaagggtcgatgtctcttca

SEQ ID NO: 15868 - DNA, 316 bp, Homo sapiens
  source 1..316: mol_type = other DNA
cactgtctctggtggctccatcagcagtagtagttcctactggggctggatccgccagcccccagggaaggggctggagtggattgggagtatctattatagtgggagcacctactacaacccgtccctcaagagtcgagtcaccatgtccgtagacacgtccaagaaccagttctccctgaagctgaacactgtgaccgccgcagacacggctgtatattactgtgcgagacacagggggacaactgtggtctgggactactactactactacatggacgtctggggcaaagggaccacggtcaccgtctcctca

SEQ ID NO: 15869 - DNA, 316 bp, Homo sapiens
  source 1..316: mol_type = other DNA
cactgtctctggtggctccatcagcagtagtagttcctactggggctggatccgccagcccccagggaaggggctggagtggattgggagtatctattatagtgggagcacctactacaacccgtccctcaagagtcgagtcaccatgtccgtagacacgtccaagaaccagttctccctgaagctgaacaccgtgaccgccgcagacacggctgcatattactgtgcgagacacagggggacaactgtggtctgggactactactactactacatggacgtctggggcaaagggaccacggtcaccgtctcctca

SEQ ID NO: 15870 - DNA, 295 bp, Homo sapiens
  source 1..295: mol_type = other DNA
cgcagcctctgggttcatgttcagtgactctgggatccactgggtccgccaggcttccgggaaagggctggagtgggttggccgtattcgaaacaaagataacaactacgcgacagaatatgctgcgtcggtgaaaggcaggttcaccatcgccagagatgagtcaagggcgtatctacacatggacgggctgaaaaccgaggacacggccgtgtatttttgttttaggcgttattgtattggtggcggctgcagctgtgactggggccagggaaccctggtcaccgtctcgtca

SEQ ID NO: 15871 - DNA, 301 bp, Homo sapiens
  source 1..301: mol_type = other DNA
tgcagcctttgggttccccttcagtgactctggtatccactgggtccgccaggcttccgggaaagggctggagtggcttggccgtgttagaaacaaagataacaattacgcggcagaatatgctgcgtcggtgaaaggcaggttcaccgtcgccagagatgaatcaaggaacacggcgtacctgcacatggacagcctgaaaagcgaggacacggccgtgtattattgttttaggcggtattgtattggcggtggctgcagctgtgactggggccagggaacccttgtcaccgtctcctca

SEQ ID NO: 15872 - DNA, 301 bp, Homo sapiens
  source 1..301: mol_type = other DNA
tgcagcctctggattcacctttagtagttattacatgacctgggtccgccaggctccagggaaggggctggagtgggtggccaacataaagcgagatggaagtgagaaatactatatggactctgtgaagggccgattcaccatctccagagacaacgtcaagaactcattgtatctgcaaatgaacaacctgagagtcgaggacacggctgtgtattactgtgcgagagatggttatagggtcgcggctacggtcgaacttgaccactggggccagggaatcctggtcaccgtctcctca

SEQ ID NO: 15873 - DNA, 301 bp, Homo sapiens
  source 1..301: mol_type = other DNA
tgcagcctctggattcacctttagtagctattacatgacctgggtccgccaggctccagggaaggggctggagtgggtggccaacataaagcgagatggaagtgagaaatactatgtggactctgtgaagggccgattcaccatctccagagacaacgccaagaactcattgtatctgcaaatgaacaacctgagagtcgaggacacggctgtgtattactgtgcgagagatggttatagggtcgcggctacggtcgaacttgaccactggggccagggaatcctggtcaccgtctcctca

SEQ ID NO: 15874 - DNA, 307 bp, Homo sapiens
  source 1..307: mol_type = other DNA
tgcagcctctggattcaccttcagtgactatcccatggcctgggtccgccaggctccagggaaggggctggagtgggtctcatccattagtagtggtagtacttacatattctacgcagactcagtgaagggccgatccaccatctccagagacaacgccaagaactcactgtatctccaaatgaacagcctgagagccgaggacacggctatatattactgtgcgagagataggagtagttccaattgctatgtttgcggcctgcatgactactggggccagggaaccctggtcaccgtctcctca

SEQ ID NO: 15875 - DNA, 307 bp, Homo sapiens
  source 1..307: mol_type = other DNA
tgcagcctctggattcaccttcagtaactatcccatggcctgggtccgccaggctccagggaaggggctggagtgggtctcatccataagtagtagtagtggttacatattctacgcagactcagtgaagggccgatccaccatctccagagacaacgccaggaactcactgtatctccaaatgaacagcctgagagccgaggacacggctgtatactactgtgcgagagataggagtagtagcaattgctatgtttgcggcctgcatgactactggggccagggaaccctggtcaccgtctcctca

SEQ ID NO: 15876 - DNA, 310 bp, Homo sapiens
  source 1..310: mol_type = other DNA
cactgtctctggtgactccatcagcagtcgttctgactactgggcctggatccgccagcccccagggaaggggctggagtggattgggaatatctattatagtgggagcacctactacaacccgtccctcaagagtcgagtcagcatatccgtagacacgtccaagaaccagttctccctgaacctgagctctgtgaccgccgcagacacggctgtgtattactgtgcgagacatgactacaatttttggagtggttattatagtcgaattgactactggggccagggaaccctggtcaccgtctcctca

SEQ ID NO: 15877 - DNA, 310 bp, Homo sapiens
  source 1..310: mol_type = other DNA
cactgtctctggtgactccatcagcagtcgttctgactactgggcctggatccgccagcccccaggaaaggggctggagtggattgggaatatctattatagtgggagcacctactacaacccgtccctcaagagtcgagtcagcatatccgttgacacgtccaagaaccagttctccctgaacctgagctctgtgaccgccgcagacacggctgtgtattactgtgcgagacatgactacaatttttggagtggttattatagtcgaattgactactggggccagggaaccctggtcaccgtctcctca

SEQ ID NO: 15878 - DNA, 304 bp, Homo sapiens
  source 1..304: mol_type = other DNA
tgcagcctctgggttcagcgtcagtagcaactacatgagctgggtccgccaggctccagggaaggggctggagtgggtctcagttatttatggcggtggtaccacatactacgcagactccgtgaagggccgattcaccatctccagagacaattccaaggacacgctgtatcttcaaatgaacagcctgagagccgaggacacggccgtgtattactgtgcgagagtggcgatggttcggggacttactatcaggtggtacttcgatctctggggccgtggcaccctggtcactgtctcctca

SEQ ID NO: 15879 - DNA, 304 bp, Homo sapiens; identical to SEQ ID NO: 15878
  source 1..304: mol_type = other DNA

SEQ ID NO: 15880 - DNA, 304 bp, Homo sapiens
  source 1..304: mol_type = other DNA
tgcagcctctgggttcagcgtcagtagcaactacatgagctgggtccgccaggctccagggaaggggctggagtgggtctcagttatttatggcggtggtaccacatactacgcagactccgtgaagggccgattcaccatctccagagacaattccaaggacacgctgtatcttcaaatgaacagcctaagagccgaggacacggccgtgtattactgtgcgagagtggcgatggttcggggacttactatcaggtggtacttcgatctctggggccgtggcaccctggtcactgtctcctca

SEQ ID NO: 15881 - DNA, 295 bp, Homo sapiens
  source 1..295: mol_type = other DNA
ttcagcctctggattcaccttcagtagtcattccatgcactgggtccgccaggctccaggggggggacccgaatatgtttcaggtattaatgcttatggcgaaaacacattctacgcagactcagtgcggggcagattcgccatctccagagacaattccaggaacacgctgtatcttcaaatgagcagtctcagaactgaggacacggctctttattcctgtgtgaaatctatggatcggggactcacccccatggacgtctggggcaaagggactatggtcaccgtctcctca

SEQ ID NO: 15882 - DNA, 295 bp, Homo sapiens
  source 1..295: mol_type = other DNA
ttcagcctctggattcaccttcagtagtcattccatgcactgggtccgccaggctccaggggggggaccagaatatgtttcaggtattaattctaatggggatcacacattctacgcagactcagtgcggggcagattcgccatctccagagacaattccaggaacacgctgtatcttcaaatgagcagtctcagaactgaggacacggctgtttattcctgtgtgaaatctatggatcggggactcacccccatggacgtctggggcaaagggactatggtcaccgtctcctca

SEQ ID NO: 15883 - DNA, 299 bp, Homo sapiens
  source 1..299: mol_type = other DNA
tcatctccggggacagtgtctctagcaacagtgctgtttggaactggatcaggcagtccccatcgagaggccttgagtggctgggaaggacatactacaggtccaagtggtataatgattatgcagtgtctgtggaaggtcgaataatcttcaattcagacacatccaagaaccagttctccctgcagctgaactctgtgactcccgaggacaccgctgtgtattactgtgcaagactaataacaggtcgtggctactttgaccagtggggccagggaaccctggtcaccgtctcctca

SEQ ID NO: 15884 - DNA, 299 bp, Homo sapiens
  source 1..299: mol_type = other DNA
ccatctccggggacagtgtctctagcaacagtgctgtttggaactggatcaggcagtccccatcgagaggccttgagtggctgggaaggacatactacaggtccaagtggtataatgattatgcagtgtctgtggaaggtcgaataatcttcaattcagacacatccaagaaccagttctccctgcagctgaactctgtgactcccgaggacaccgctgtgtattactgtgcaagactaataacaggtcgtggctactttgaccagtggggccagggaaccctggtcaccgtctcctca

SEQ ID NO: 15885 - DNA, 295 bp, Homo sapiens
  source 1..295: mol_type = other DNA
tgcagcctctggattcatcttcagcaactatgccataagctgggtccgccgggctccagggaaggggctggagtgggtcgcagctattagaggtcctggtgacaacacatactatgcagactccgtgaagggccggttcaccatctccagagacaattccaagagcacggcatttctgcaaatggacagcctgatagccgaggacacggccatgtacttctgtgtgaaagacgagagtgcgagcttccgtctcgccgaatattggggccagggaaccctagtcaccgtctcctca

SEQ ID NO: 15886 - DNA, 295 bp, Homo sapiens
  source 1..295: mol_type = other DNA
tgcagcctctggattcatcttcagcagctatgccataagctgggtccgccaggctccagggaaggggctggagtgggtctcagctattagaggtcctggtgacaatacatactatgcagactccgtgaagggccggttcaccatctccagagacaattccaagaacacggcatttctgcaaatggacagcctgatagccgaggacacggccatatatttctgtgtgaaagacgagagtgcgagcttccgtctcgccgaatattggggccagggaaccctggtcaccgtctcctca

SEQ ID NO: 15887 - DNA, 295 bp, Homo sapiens
  source 1..295: mol_type = other DNA
tgcagcctctggattcatcttcagcaattatgccataagctgggtccgccaggctccagggaaggggctggagtgggtctcagctattagaggtcctggtgacaatacatactatgcagactccgtgaagggccggttcaccatctccagagacaattccaagaacacggcatttctgcaaatggaaagcctgatagccgaggacacggccatatatttctgtgtgaaagacgagagtgcgagcttccgtctcgccgaatattggggccagggaaccctggtcaccgtctcctca

SEQ ID NO: 15888 - DNA, 295 bp, Homo sapiens
  source 1..295: mol_type = other DNA
tgcagcctctggattcatcttcagcagctatgccataagctgggtccgccaggctccagggaaggggctgcagtgggtctcagctattagaggtcctggcgacaatacatactatgcagactccgtgaagggccggttcaccatctccagagacaattccaagaacacggcatttctgcaaatggacagcctgatagccgaggacacggccatatatttctgtgtgaaagacgagagtgcgagcttccgtctcgccgaatattggggccagggaaccctggtcaccgtctcctca

SEQ ID NO: 15889 - DNA, 325 bp, Homo sapiens
  source 1..325: mol_type = other DNA
tgcagcctctggattcaccttcagtagttatgccatgaactgggtccgccaggctccagggaaggggctggagtgggtctcatccattagtagtagtagtaattacatatattacggagactcagtgaagggccgattcaccattaccagagacaacgccaagaactcactgtatctgcaaatgaacagcctgcgagccgaggacacggctgtctataactgtgcgagatgggacgagggtagcagcagctggtaccgaggcacaaaatttgactactactacatggacgtctggggcaaagggaccacggtcaccgtctcctca

SEQ ID NO: 15890 - DNA, 325 bp, Homo sapiens
  source 1..325: mol_type = other DNA
tgcagcctctggattcaccttcagtaattatgccatgaactgggtccgccaggctccagggaaggggctggagtgggtctcatccattagtagtagtagtaattacatatattacggagactcagtgaagggccgattcaccattaccagagacaacgccaagaactcactgtatctgcaaatgaacagcctgagagccgaggacacggctgtgtataactgtgcgagatgggacgagggtagcagcagctggtaccgaggcacaaaatttgactactactacatggacgtctggggcaaagggaccacggtcaccgtctcctca

SEQ ID NO: 15891 - DNA, 325 bp, Homo sapiens
  source 1..325: mol_type = other DNA
tgcagcctctggattcaccttcagtagttatgccatgaactgggtccgccaggctccagggaaggggctggagtgggtctcatccattagtagtagtagtaatttcatatattacggagactcagtgaagggccgattcaccattaccagagacaacgccaagaactcactgtatctgcaaatgaacagcctgcgagccgaggacacggctgtctataactgtgcgagatgggacgagggtagcagcagctggtaccgaggcacaaaatttgactactactacatggacgtctggggcaaagggaccacggtcaccgtctcctca

SEQ ID NO: 15892 - DNA, 298 bp, Homo sapiens
  source 1..298: mol_type = other DNA
tgtagcctctggattcaccttcagtggctatgctatgcactgggtccgccaggctccagggaagggactggaatatgtttcagctattagtagtaatgggggtagcacatattatgcaaactctgtgaagggcagattcaccatctccagagacaattccgacaacacactgtatcttcaaatgggcagcctgagagccgaggacatggctgtgtattactgtgcgagagctaggtgtagtagttccagctgcctttttgactcctggggccagggaaccctggtcaccgtctcctca

SEQ ID NO: 15893 - DNA, 298 bp, Homo sapiens
  source 1..298: mol_type = other DNA
tgcagcctctggattcaccttcagtggctatgctatgcactgggtccgccaggctccagggaagggactggaatatgtttcagctattagtagtaatgggggtagcacatattatgcaaactctgtgaagggcagattcaccatctccagagacaattccgacaacacactgtatcttcaaatgggcagcctgagagccgaggacatggctgtgtattactgtgcgagagctaggtgtagtagttccagctgcctttttgactcctggggccagggaaccctggtcaccgtctcctca

SEQ ID NO: 15894 - DNA, 310 bp, Homo sapiens
  source 1..310: mol_type = other DNA
cactctctctggtggcttcatcagcgggtctggttactactggaattgggtccgccagcgcccagggaagggcctggagtggattggcaacatcttttacagtggggtcaccgcgtttgacccgtccctcacgagtcgactttccatgtctgttgacacatctaagaatcaattctccatgaccctgagctctgtgactgtcgcggactcggccacttattattgtgccagagagaggggtgcagacaactatggcaccgctggggcttttgatgtctggggcccagggactctggtcatggtttcttcc

SEQ ID NO: 15895 - DNA, 310 bp, Homo sapiens
  source 1..310: mol_type = other DNA
cactctctctggtggcttcatcagcgggtctggttactactggaattgggtccgccagcgcccagggaagggcctggagtggattggcaacatcttttacagtggggtcacctcgttcgacccgtccctcacgagtcgactttccatgtctgttgacacatctaagaatcaattctccatgaccctgacctctgtgactgtcgcggactcggccacgtattattgtgccagagagaggggtgcagacaactatggcaccgctggggcttttgatgtctggggcccagggacactggtcacggtttcttcc

SEQ ID NO: 15896 - DNA, 307 bp, Homo sapiens
  source 1..307: mol_type = other DNA
tgcagcctctggattcacctttagcagctatgccatgagctgggtccgccaggctccagggaaggggctggagtgggtctcagctattagtggtagtggtggtggcacagattacgcagactccgtgaagggccggttcaccatctccagagacaactccaagaacacgctgtatctgcaaatgaacagcctaagagcggaggacacggccttatattactgtgcgaaagacatctcatgccgggattgtactagaaccagctgccatgactactggggccagggaaccctggtcactgtctcctca

SEQ ID NO: 15897 - DNA, 307 bp, Homo sapiens
  source 1..307: mol_type = other DNA
tgcagcctctggattcacctttagtagctttgccatgagctgggtccgccaggctccagggaaggggctggagtgggtctcagctattagtgctagtggtggtaacacagattacgcagactccgtgaagggccggttcaccatctccagagacaactccaagaacacgctgtttctgcaaatgaacagcctgagagcggaggacacggccgtatattactgtgcgaaagacatctcatgccgggattgtactagaaccagctgccatgactactggggccagggaaccctggtcactgtctcctca

SEQ ID NO: 15898 - DNA, 307 bp, Homo sapiens
  source 1..307: mol_type = other DNA
tgcagcctctggattcacctttagtagctttgccatgagctgggtccgccaggctccagggaaggggctggagtgggtctcagctattactggtagtggtggtagcacagattacgcagactccgtgaagggccggttcaccatctccagagacaactccgagaacacgctgtatctgcaaatgaacagcctgagagcggaggacacggccttatattactgtgcgaaagacatctcatgccgggattgtactagaaccagctgccatgactactggggccagggaaccctggtcactgtctcctca

SEQ ID NO: 15899 - DNA, 325 bp, Homo sapiens
  source 1..325: mol_type = other DNA
cactgtctctggtggctccatcagcagtggtcattactactggggctggatccgccagcccccagggaagggcctggagtggattgggagtatctattatagtgggaccacctactacaacccgtccctcaagagtcgagccaccatatccatagacacgtccaagaaccacgtcgccctgaaggtgagctctgtggccgccgcagacacggctgtatattactgtgcgaggctaggatattgtactagtggtagctgctatggcgtccactactataactacatggacgtcttgggcaaagggaccacggtcaccgtctcctca

SEQ ID NO: 15900 - DNA, 325 bp, Homo sapiens
  source 1..325: mol_type = other DNA
cactgtctctggtggctccatcagcagtggtcattactactggggctggatccgccagcccccagggaagggcctggagtggattgggagtatctattatagtgggaccacctactacaacccgtccctcaagagtcgagccaccatatccatagacacgtccaagaaccacttcgccctgaaggtgagctctgtggccgccgcagacacggctgtatattactgtgcgaggctaggatattgtactagtggtagctgctatggcgtccactactataactacatggacgtcttgggcaaagggaccacggtcaccgtctcctca

SEQ ID NO: 15901 - DNA, 325 bp, Homo sapiens; identical to SEQ ID NO: 15900
  source 1..325: mol_type = other DNA

SEQ ID NO: 15902 - DNA, 325 bp, Homo sapiens
  source 1..325: mol_type = other DNA
cactgtctatggtgactccatcagcagtggtaattactactggggctggatccgccagcccccagggaaggggctggagtggattgggagtatctattatagtgggaccacctactacaacccgtccctcaagagtcgagtcaccatatccgcagacacgtctaagaaccagttcgccctgaaggtgagctctgtgaccgccgcagacacggctgtatattactgtgcgaggctaggatactgtaccagtggcagctgctatggcgtccactactataactacatggacgtcttcggcaaagggaccacggtcaccgtctcctca

SEQ ID NO: 15903 - DNA, 304 bp, Homo sapiens
  source 1..304: mol_type = other DNA
tgcagcctctgcatttaccttcggtctctatagcatgaactgggtccgccaggctccagggaaggggctggaatgggtctcatccattagtcgtgatagcagttacatatactacgcagactcagtgaagggccgattcaccacctccagagacaacgccaagaactcactgtatttgcaactgtacagcctgagagccgcggacacggctgtatattactgtgcgagagtccttgctccggtgactacggagtactactacatggacgtctggggcaaagggaccacggtcaccgtctcctca

SEQ ID NO: 15904 - DNA, 304 bp, Homo sapiens
  source 1..304: mol_type = other DNA
tgcagcctctggatttaccttcagtctctatagcatgaactgggtccgccaggctccagggaaggggctggaatgggtctcatccattaatagtgatagtgattacatatactacgcagactcactgaagggccgattcaccacctccagagacaacgccaaaaactcactgtttttgcaaatgtacagcctgacagccgcggacacggctgtatattactgtgcgagagtccttgctccggtgactacggagtactactacatggacgtctggggcaaagggaccacggtcaccgtctcctca

SEQ ID NO: 15905 - DNA, 304 bp, Homo sapiens
  source 1..304: mol_type = other DNA
tgcagcctctggatttaccttcagtctctatagcatgaactgggtccgccaggctccagggaaggggctggaatgggtctcatccattaatagtgatagtagttacatatactacgcagactcactgaagggccgattcaccacctccagagacaacgccaagaactcactgtatttgcaaatgtacagcctgacagccgcggacacggctgtatattactgtgcgagagtccttgctccggtgactacggagtactactacatggacgtctggggcaaagggaccacggtcaccgtctcctca

SEQ ID NO: 15906 - DNA, 309 bp, Homo sapiens
  source 1..309: mol_type = other DNA
gcttctggatacaccttcaccgattatgatatcaactgggtgcgacaggccgctggacaggggcttgagtggatgggatgggcgaaccctaaaagtggtaacacagggtatgcacagaagttccagggcagagtcaccatgaccagggacacctccactaacacagcctacatggagctgagcgccctgacacctgacgacacggccttttattactgtgcgaggcccaaagagatggccagaattcgggacccggcagactggtacttcgatctctggggccgtggcaccctggtcactgtctcctca

SEQ ID NO: 15907 - DNA, 309 bp, Homo sapiens
  source 1..309: mol_type = other DNA
gcttctggatacaccttcaccgattatgatatcaactgggtgcgacaggccgctggacaggggcttgagtggatgggatgggcgaaccctagaagtggtaacacaggctatgcacagaagttccagggcagagtcaccatgaccagggacacctccactaacacagcctacatggagctgagcgccctgacacctgacgacacggccgtatattactgtgcgaggcctaaagagatggccagaattcgggacccggcagattggtacttcgacctctggggccgtggcaccctggtcactgtctcctca

SEQ ID NO: 15908 - DNA, 295 bp, Homo sapiens
  source 1..295: mol_type = other DNA
tgcagcctctggattcacctttggtagctattggatgacctgggtccgccagtctccagggaaggggctggagtgggtggccaacataaagaaagatggaagtgagagatactatgtggactctgtgaagggccgattcaccatctccagggacaacaccaagaactcactgtatctgcaaatgaacagcctgagagccgaggacacggccgtgtattattgtgcgaaaggggggatgaccagcagctggttctgggtcgactggggccagggaaccctggtcaccgtctcctca

SEQ ID NO: 15909 - DNA, 295 bp, Homo sapiens
  source 1..295: mol_type = other DNA
tgcaacctctggattcacctttagcagttattggatgacgtgggtccgccagtctccagggaaggggctggagtgggtggccaacataaagcaaaatggaggtgagaaatactatgtggactctgtgaagggccgattcaccatctccagggacaacgccaagaactcactgtatctacaaatgaacagcctgagagccgaggacacggccgtctattactgtgcgaaaggggggatgaccagtagctggttctgggtcgactggggccagggaaccctggtcaccgtctcctca

SEQ ID NO: 15910 - DNA, 295 bp, Homo sapiens
  source 1..295: mol_type = other DNA
tgcagcctctggattcacctttagtaactattggatgacctgggtccgccagtctccagggaaggggctggagtgggtggccaacataaagcaagatggaagtgagaaatactatgtggattctgtgaagggccgattcaccatgtccagggacaacgccaagaactcaatgtatctgcaattaaacagcctgagagccgaggacacggccgtatattactgtgcgaaaggggggatgaccagcagctggttctgggtcgactggggccagggaaccctggtcaccgtctcctca

SEQ ID NO: 15911 - DNA, 295 bp, Homo sapiens
  source 1..295: mol_type = other DNA
tgcagcctctggattcacgtttagtagctattggatgacgtgggtccgccagtctccagggaaggggctggagtgggtggccaacataaagcgagatggaagtgagaaatactacgtggactctgtgaagggccgattcatcatctccagggacaacgccaagaactcactgtatttgcaaatgaacagcctgagagccgaggacacggccgtgtattattgtgcgaaaggggggatgaccagcagctggttctgggtcgactggggccagggaaccctggtcaccgtctcctca

SEQ ID NO: 15912 - DNA, 295 bp, Homo sapiens
  source 1..295: mol_type = other DNA
tgcagcctctggattcacctttggtagctattggatgacctgggtccgccagtctccagggaaggggctggagtgggtggccaacataaagaaagatggaggtgagaaatactatgtggactctgtgaagggccgattcaccatctccagggacaacgccaagaactcactgtatctgcaaatgaacagcctgagagccgaggacacggccgtgtattattgtgcgaaaggggggatgaccagcagctggttctgggtcgactggggccagggaatcctggtcaccgtctcctca

SEQ ID NO: 15913 - DNA, 295 bp, Homo sapiens
  source 1..295: mol_type = other DNA
tgcagcctctggattcacctttagtagttattggatgacctgggtccgccagtctccagggaaggggctggagtgggtggccaacataaaacaagagggaagtgagagatactatgtggactctgtgaagggccgattcaccatctccagggacaacgccaagagctcactgtttctgcaaatgaatagcctgagagccgaagacacggccgtgtattattgtgcaaaaggggggatgaccagcagctggttctgggtcgactggggccagggaaccctggtcaccgtctcctca

SEQ ID NO: 15914 - DNA, 296 bp, Homo sapiens
  source 1..296: mol_type = other DNA
cagcctctggattcaccttcagtgactactacatgagctggatccgccaggctccagggaaggggctggagtgggtttcatacattagtggcagtagtagttccacaaactacgcagactctgtgaagggccgattcaccatctccagagacaacgccaagaattcactgtatctgcaaatgaacagcctgagagccgaggactcggccgtgtactattgtgcgagagattactacaccctaggggcggtgctgattgctgattggggccagggaaccctggtcaccgtctcctca

SEQ ID NO: 15915 - DNA, 298 bp, Homo sapiens
  source 1..298: mol_type = other DNA
tgcagcctctggattcaccttcagtgactactacatgagctggatccgccaggctccagggaaggggctggagtgggtttcatacattagtggcagtagtagttccacaaactacgcagactctgtgaagggccgattcaccatctccagagacaacgccaagaattcactgtatctgcaaatgaacagcctgagagccgaggactcggccgtgtactattgtgcgagagattactacaccctaggggcggtgctgattgctgattggggccagggaaccctggtcaccgtctcctca

SEQ ID NO: 15916 - DNA, 298 bp, Homo sapiens
  source 1..298: mol_type = other DNA
tgtagcctctggattcaccttcagtatttataccatgaactgggtccgccaggctccagggaagaggccggagtgggtctcgtccattattagtagtagtagttacatgtcctacgcagactcagtgaagggccgattcaccatctccagagacaacgccaagaactcaatctatctgcaaatgaacagcctgagagccgaggacacggctgtctattactgtgcgagagatcttggcactggtggtagttggccctttgactactggggccagggaaccctggtcatcgtctcctca

SEQ ID NO: 15917 - DNA, 298 bp, Homo sapiens
  source 1..298: mol_type = other DNA
tgtagcctctggattcaccttcagtatttataccatgaactgggtccgccaggctccagggaagaggccggagtgggtctcgtccattattagtagtagtagttacatgtcctacgcagactcagtgaagggccgattcaccatctccagagacaacgccaagaactcaatctatctgcaaatgaacagcctgagagccgaggacacggctgtctactactgtgcgagagatcttggcactggtggaagttggccctttgactactggggccagggaaccctggtcatcgtctcctca

SEQ ID NO: 15918 - DNA, 315 bp, Homo sapiens
  source 1..315: mol_type = other DNA
gcttctggatacaccttcaccgactactatatacactgggtgcgacaggcccctggacaagggcttgagtggatgggatggatcaaccctaacagtggtgtcacaaagtatgcacagaagtttcaggactgggtcaccataaccagtgacacgtccatcagcacagccttcatggagctgagcagggtgacatctgacgacacggccgtctattactgtgcgagagatggggctgctcacgatcttttgactggttaccaaccctcgtactacatggacgtctggggcgaagggaccacggtcaccgtctcctca

SEQ ID NO: 15919 - DNA, 315 bp, Homo sapiens
  source 1..315: mol_type = other DNA
gcttctggatacagtttcaccgactactatatacactgggtgcgacaggcccctggacaagggcttgagtggatgggatggatcaaccctaaaagtggtgtcacaaagtatgcacagaagtttcaggactgggtcaccataagtagtgacacgtccaccagcacagccttcatggaggtgagcagggtgacatctgacgacacggccgtctactactgtgcgagagatggggctgctcacgatctcttgactggttaccaaccctcgtactacatggacgtctggggcgaagggaccacggtcaccgtctcctca

SEQ ID NO: 15920 - DNA, 292 bp, Homo sapiens
  source 1..292: mol_type = other DNA
tgtagcctctggattcaccttcagcacctatcccatgaattgggtccgccagtctccagggaaggggctggagtggctttcatatattaataaaggaagtgatagcatatactacgcagactctgtgaggggccgattcaccatctccagggacaatgccaagaactcactgtatctacatatgaacagcctgagagacgacgacacggctgtctattactgtgcgagagacgatgagactggctggtactccccctactggggccagggaaccctggtcaccgtctcctca

SEQ ID NO: 15921 - DNA, 292 bp, Homo sapiens
  source 1..292: mol_type = other DNA
tgtagcctctggattcaccttcagcacctatcccatgaattgggtccgccagtctccagggaaggggctggagtggctttcatatattaataaaggaagtgattacatatactacgcagactctgtgaggggccgattcaccatctccagggacaatgccaagaactcactgtatctacatatgaacagcctgagagacgacgacacggctgtctattactgtgcgagagacgatgagactggctggtactccccctactggggccagggaaccctggtcaccgtctcctca

SEQ ID NO: 15922 - DNA, 292 bp, Homo sapiens
  source 1..292: mol_type = other DNA
tgcagcctctggattcacctttagtttctatgtcatgagctgggtccgccagtctccagggaaggggctccagtggctttcatatattaatggaggaagtgattacatatattacgcagactctgtgaggggccgattcaccatctccagggacaatgccaagaactcactgtatctacatatgaacagcctgagagacgacgacacggctgtctattactgtgcgagagacgatgagactggctggtactccccctattggggccagggaaccctcgtcaccgtctcctca

SEQ ID NO: 15923 - DNA, 292 bp, Homo sapiens
  source 1..292: mol_type = other DNA
tatagcctctggattcaccttcagcacctatcccatgaattgggtccgccagtctccagggaaggggctccagtggctttcatatattaatggaggaagtgattacatatattacgcagactctgtgaggggccgattcaccatctccagggacaatgccaagaactcactgtatctacatatgaacagcctgagagacgacgacacggctgtctattactgtgcgagagacgatgagactggctggtactccccctattggggccagggaaccctcgtcaccgtctcctca

SEQ ID NO: 15924 - DNA, 303 bp, Homo sapiens
  source 1..303: mol_type = other DNA
gtctctggttacacctttaccagttatggtgtcagttgggtgcgacaggcccctggacaagggcttgagtggatgggatggatcagctgttacgatggtgagacaaggtatgcacagaagttccagggcagagtcaccctgaccatagacactcccacgaccacagtctatatggagctgaggagcctgacatctgacgacacggccgtatattactgtgcgagagtaagggcggccgctggtaggggccgcccaggtgtttttgactcctggggccagggaaccctggtcaccgtctcctca

SEQ ID NO: 15925 - DNA, 303 bp, Homo sapiens
  source 1..303: mol_type = other DNA
gtctctggttacacctttaccagttatggtgtcagctgggtgcgacaggcccctggacaagggcttgagtggatgggatggatcagctgttacgatggtgagacaaggtatgcacagaagttccagggcagagtcaccctgaccatagacactcccacgaccacagtctatatggagctgaggagcctgacatctgacgacacggccgtatattactgtgcgagagtaagggcggccgctggtaggggccgcccaggtgtttttgactcctggggccagggaaccctggtcaccgtctcctca

SEQ ID NO: 15926 - DNA, 310 bp, Homo sapiens
  source 1..310: mol_type = other DNA
tgcagcctctggattcaccttcagtagctatagcatgaactgggtccgccaggctccagggaaggggctggagtgggtctcatccattactagtagcagtagttccacatactacgcagactcagtggagggccgattcaccatctccagagacaacgccaggaattcactgtctctgcaaatgaacagcctgacagccgaggatacggctctttattactgtgcgagagatgcaagttgcggaggtactaccaactgccatgattactttgactactggggccggggaaccctggtcaccgtctcctca

SEQ ID NO: 15927 - DNA, 310 bp, Homo sapiens
  source 1..310: mol_type = other DNA
tgcagcctctggattcaccttcagtacctatagcatgaactgggtccgccaggctccagggaaggggctggagtgggtctcatccattactggtagcagtagttccacatactacgcagactcagtggagggccgattcaccatctccagagacaacgccaggaattcactgtctctgcaaatgaacagcctgacagccgaggatacggctgtttattactgtgcgagagatgcaagttgcggaggtactaccaactgccatgattactttgactactggggccggggaaccctggtcaccgtctcctca

SEQ ID NO: 15928 - DNA, 310 bp, Homo sapiens
  source 1..310: mol_type = other DNA
tgaagcctctggattcacctccagcagctatagcatgaactgggtccgccaggctccagggaaggggctggagtgggtctcatccattactagtagtagtacttccaaatactacgcagactcaatgaagggccgattcaccatctccagagacaacgccaggaactcactgtatctgcaaatgaacagcctgagagccgaggacacggctgtctattactgtgcgagagatgcaagttgcggaggtactaccaactgccatgattactttgactactggggccagggaatcctggtcaccgtctcctca

SEQ ID NO: 15929 - DNA, 310 bp, Homo sapiens; identical to SEQ ID NO: 15926
  source 1..310: mol_type = other DNA

SEQ ID NO: 15930 - DNA, 304 bp, Homo sapiens
  source 1..304: mol_type = other DNA
cagtgtctccggtggctccatcacagataactactggaactggatccggcagtccccggggaagggactggagtggattgcatatgttcattacactggaagcaccaactacaacccctccctcaagagtcgagtctccatatcactagacaggtccatgaagcagttctcactgcagatgttctctgtgaccgctgcggacacggccgtctacttctgtgcgaggggttctggttgtaggagtggtcggtgctatttctactttgacacctggggtcagggaacactggtcaccgtctcctca

SEQ ID NO: 15931 - DNA, 304 bp, Homo sapiens
  source 1..304: mol_type = other DNA
cagtgtctccggtgactccatcacagataactactggaactggatccggcagtccccggggaagggactggagtggattgcatatgttcattacactggaagcaccaactacaacccctccctcaagagtcgagtctccatatcactagacaggtccatgaagcagttctcactgcagatgttctctgtgaccgctgcggacacggccgtctacttctgtgcgaggggttctggttgtaggagtggtcggtgctatttctactttgacacctggggtcagggaacgctggtcaccgtctcctca

SEQ ID NO: 15932 - DNA, 322 bp, Homo sapiens
  source 1..322: mol_type = other DNA
cgctgtctctggtggctccatcagcagtagtaactggtggagttgggtccgccagcccccagggaaggggctggagtggattggggaaatcaatcatggtggaggcaccaattacaacccgtccctcaagagtcgagtcgccatatcactagccacgtccaagaaccagttctccctgaagctgaactctgtgaccgccgcggacacggctgtgtattactgtgcgagaggtggataccactcaactcgccgccacccgccccgcaaaagagactattacatggacgtctggggcacagggaccacggtcaccgtctcctca

SEQ ID NO: 15933 - DNA, 319 bp, Homo sapiens
  source 1..319: mol_type = other DNA
cgatgtctctggtgtccccatcagtggtttcctctggacctggatccggcagtcctcggagaagggtctgcagtggctcggccatattcgtgacagtggggcccccgccttcaacccttccctccagagtcgactcaccatttcagtggacacgtccaagaaccagttctccctgaagctgaactctgtgaccgccgcggacacggctgtgtattactgtgcgagaggtggataccactcaactcgccgccacccgccccgcaaaagagactattacatggacgtctggggcacagggaccacggtcaccgtctcctca

SEQ ID NO: 15934 - DNA, 322 bp, Homo sapiens
  source 1..322: mol_type = other DNA
cgctgtctccggtggctccatcagtagtactaactggtggagttgggtccgccagtccccagggaaggggctggagtggattggggaaatctatcatagtgggaccaccaactacaacccctccctcaagagtcgagtcaccatatcagtagacaagcccaagaaccagttctccctgaagctgacctctgtgaccgccgcggacacggccgtgtattactgtgcgagaggtggataccactcaactcgccgccacccgccccgcaaaagagactattacatggacgtctggggcacagggaccacggtcaccgtctcctca

SEQ ID NO: 15935 - DNA, 322 bp, Homo sapiens
  source 1..322: mol_type = other DNA
cgttgtctctggttactccataactaataataaatggtggagttgggtccgccagtccccagggaaggggctggagtggattggagatatctatcatggtgggaccaccgactacaacccgtccctcaagagtcgagtcgccatatcactagccacgtccaagaaccagttctccctgaagctgaactctgtgaccgccgcggacacggctgtgtattactgtgcgagaggtggataccactcaactcgccgccacccgccccgcaaaagagactattacatggacgtctggggcacagggaccacggtcaccgtctcctca

SEQ ID NO: 15936 - DNA, 303 bp, Homo sapiens
  source 1..303: mol_type = other DNA
gcttctggatacaccttcactgactatgctattcattgggtgcgccaggcccccggacagaggcttgagtggatgggatggatcaacgctggcaatggtgacacaaaatattcacagacgttccaggacagagtcactattagcagagacacatccgcgagcacagcctacatggagctgagcagcctgagatctgaagacacggctgtgtattattgtgcgagaggatattgtagtcgtaccagctgtcagtactactttgatgattactggggccagggaaccctggtcaccgtctcctca

SEQ ID NO: 15937 - DNA, 303 bp, Homo sapiens
  source 1..303: mol_type = other DNA
gcttctggatacaccttcactgactatgctattcattgggtgcgccaggcccccggacagaggcttgagtggatgggatggatcaacgctggcaatggtgacacaaaatattcacaaacgttccacgacagagtcactattaccagagacacatccgcgagcacaacctacatggagctgagcagcctgagatctgaagacacggctgtctattattgtgcgagaggatattgtagtcgtaccagctgtcagtactactttgatgattactggggccagggaaccctggtcaccgtctcctca

SEQ ID NO: 15938 - DNA, 328 bp, Homo sapiens
  source 1..328: mol_type = other DNA
cactgtctctggtgactccatcagtagtactagttacttctggggctggatccgccagcccccggggaacggactggagtggattgggagtatctattccagcaggagtacctactacaccccgtccctcaagagtcgagtcaccatatcggtagacacgtcgaagaatcagttcttcctgaacctgagctctgtgaccgccgcagacacggctgtatattactgtgtgagacagtattgtagtagtaccagctgctatgcgaaatttttctaccgccactattatatggacgtctggggcaaagggaccacggtcaccgtctcctca

SEQ ID NO: 15939 - DNA, 328 bp, Homo sapiens
  source 1..328: mol_type = other DNA
cactgtctctgatgactccatcagcagtactagttacttctggggctggatccgccagcccccggggaagggactggagtggattgggagtatctattccagcaggagtacctactacaccccgtccctcaagagtcgagtcaccatatccgtagacacgtcgaagaatcagttcttcctgaacctgagctctgtgaccgccgcagacacggctgtatattactgtgtgagacaatattgtagtagtaccagctgctatgcgaaatttttctaccgccactattatatggacgtctggggcaaagggaccacggtcaccgtctcctca

SEQ ID NO: 15940 - DNA, 301 bp, Homo sapiens
  source 1..301: mol_type = other DNA
tgcagcctctggattcaccttcagtgactactacatgagctggatccgccaggctccagggaaggggctggagtgggtttcatacattagtcgtagtggtagtagcatatactacgcagcctctgtgcagggccgattcaccatctccagggacaacgccaagaactcactgtatctgcaaatgaacagcctgagagccgaggacacggccgtgtattactgtgcgagagatcggaccctttatgatagtagtggttattttgactactggggccagggaaccctggtcaccgtctcctca

SEQ ID NO: 15941 - DNA, 301 bp, Homo sapiens
  source 1..301: mol_type = other DNA
tgcagcctctggatttaccttcagtgactactacatgagctggatccgccaggctccagggaaggggctggagtgggtttcatacattagtagtggtggtcgtaccatatactacgcagactctgtgaagggccgattcaccatctccagggacaacgccaagaactcactgtatctgcaaatgaacagcctgagagccgaggacacggccgtgtattactgtgcgagagatcggaccctttatgatagtagtggttattttgactactggggccagggaaccctggtcaccgtctcctca

SEQ ID NO: 15942 - DNA, 298 bp, Homo sapiens
  source 1..298: mol_type = other DNA
cagtgtctctggtggctccatcagtcattactactggagctggatccgacagcccccggggaagagaccggaatggattgggtatatctttcacagtgggagtgccaagtacagccccacttacagcccctccctcaagagtcgagtcaccatctcagtggacacgtccgagaaccagatctccctgaaactgaactctgtcaccgctgcggacacggccgtctattattgtgcgcgagggtgggaactccttgtcttagagggctggggccagggaattttggtcaccgtctcctca

SEQ ID NO: 15943 - DNA, 298 bp, Homo sapiens
  source 1..298: mol_type = other DNA
cagtgtctctggtgcctccatgagtcattactattggagctggatccgacagcccccggggaagggactggagtggattggctatatctttcatagtgggagtgccaagtacagccccacttacagcccctccctcaagagtcgagtcaccatctcacttgacacgtccgagaagcagttctccctgaaggtgaagtctgtcaccgctgcggacacggccgtatattattgtgcgcgagggtgggaactccttgtcttagagggctggggccagggaattttggtcaccgtctcctca

SEQ ID NO: 15944 - DNA, 306 bp, Homo sapiens
  source 1..306: mol_type = other DNA
aagggttctggatacagcttttccaaccactggatcaactgggtgcgccagatgcccgggaagggcctggagtggatgggaagaattgatcctagtgactcttctaccacctacagcccgtccttccaaggccacgtcaccatctcagctgacaagtccatcagcactgcctacctgcagtggagcagcctgaaggcctcggacagcgccatgtattactgtgcgcgacgcggctcgtccggggcaggtgacttttactcctacatggacgtctggggcaaagggaccacggtcaccgtctcctca

SEQ ID NO: 15945 - DNA, 306 bp, Homo sapiens
  source 1..306: mol_type = other DNA
aagggttctggatacagctttaccaactactggatcaactgggtgcgccagctgcccgggaagggcctggagtggatggggaggattgatcctagtgactcttataccacctacagcccgtccttccaaggccacgtcaccatctcagctgacaagtccatcagcactgcctacctgcagtggagcagcctgaaggcctcggacagcgccatgtattactgtgcgagacgcggctcgtccggggcaggtgacttttactcctacatggacgtctggggcaaagggaccacggtcaccgtctcctca

SEQ ID NO: 15946 - DNA, 306 bp, Homo sapiens
  source 1..306: mol_type = other DNA
aagggttctggatacagctttaccaactactggatcaactgggtgcgccagatgcccgggaagggcctggagtggatggggaggattgatcctagtggctcttataccacctacagcccgtccttccaaggccacgtcaccatctcagtcgacaagtccatcagcactgcctacctgcagtggagcagcctgaaggcctcggacagcgccatgtattactgtgcgagacgcggctcgtccggggcaggtgacttttactcctacatggacgtctggggcaaagggaccacggtcaccgtctcctca

SEQ ID NO: 15947 - DNA, 298 bp, Homo sapiens
  source 1..298: mol_type = other DNA
tgcagcctctggattcaccttcgggaactatgcgatgcactgggtccgccaggctccaggcaaggggctggagtgggtggcctttatatcatatgatggaaccaacaaatattatgcagactccgtgaagggccgattcaccatctccagagacaattccaagaacacgctgtatttgcaaatgaacagcctgagagctgaggacacggctgtgtattactgtgcgaggggcgatagcagctctggggtcgggtacttccagcactggggccagggcaccctggtcaccgtctcctca

SEQ ID NO: 15948 - DNA, 298 bp, Homo sapiens
  source 1..298: mol_type = other DNA
tacagcctctggattcaccttcagtaactatgctatgcactgggtccgccaggctccaggcaaggggctggagtgggtggcatttgtttcatatgatggaatcaataaatactacgcagactccgtgaagggccgattcaccatctccagagacaattccaagaacatgatttatctggaaatgaacagcctgagagctgaggacacggctgtgtatttctgtgcgaggggcgatagcagctctggggtcgggtacttccagcactggggccagggcaccctggtcaccgtctcctca

SEQ ID NO: 15949 - DNA, 298 bp, Homo sapiens
  source 1..298: mol_type = other DNA
tacagcctctggattcaccttcagtaactatgctatgcactgggtccgccaggctccaggcaaggggctggagtgggtggcatttgtatcatatgatggaatcaataagtactacgcagactccgtggagggccgattcaccatctccagagacaattccaagaacacgctgtctctgcaaatgaacagcctgagagctgaagacacggctgtctatttctgtgcgaggggcgatagcagttctggggtcgggtacttccagcactggggccagggctccctggtcaccgtctcctca

SEQ ID NO: 15950 - DNA, 307 bp, Homo sapiens
  source 1..307: mol_type = other DNA
tgcagcctctggattcacctttagtcaatattggatgagctgggtccgccaggctccagggaaggggctggagtgggtggccgccataaaacaggatggaagtgagaaatattatgtggactctgtgaagggccgattcaccatctccagagacaacgccaagaactcactgtttgtggacatgaacagcctgagagccgaggacacggccgtctactattgtgcgagagaccgatatagcgggagctactacgagtctcccacacttgactactggggcccgggagccctggtcaccgtctcctca

SEQ ID NO: 15951 - DNA, 307 bp, Homo sapiens
  source 1..307: mol_type = other DNA
tgcagcctctggattcacctttagtcagtattggatgagctgggtccgccaggctccagggaaggggctggagtgggtggccgccataaagcaagatggaagtgagaaatactatgtggactctgtgaagggccgattcaccatctccagagacaacgccaagaactcactgtatctggacatgaacagcctgagagccgaggacacggccgtctattactgtgcgagagaccgatatagcgggagctactacgagtctcccacccttgactactggggccagggaaccctggtcaccgtctcctca

SEQ ID NO: 15952 - DNA, 304 bp, Homo sapiens
  source 1..304: mol_type = other DNA
cactgtctctggtggctccgtcagcagtggaacttactactggagctggatccggcagacaccagggaagggactggagtggattgcgcatatctcttaccgtgggaacaccaactacaacccctccctcaggggtcgagtcaccatatcggtagacatgtccaagaaccaggtctgcctgcagctgagttctttgaccgctgcggacacggccgtgtattactgtggaaggtctgataggagagatacttctttcgtggagtttgattactggggccagggaaccctggttaccgtctcctca

SEQ ID NO: 15953 - DNA, 304 bp, Homo sapiens
  source 1..304: mol_type = other DNA
cactgtctctggtggctccgtcagcagtggtacttactactggagctggatccggcagcccccagggaagggactggagtggattgcgcatatctcttaccgtgggaacaccaactacaacccctccctcaggggtcgagtcaccatatcggtagacacgtccaagaaccaggtctgcctgcagctgagttctgtgaccgctgcggacacggccgtgtattactgtggaaggtctgataggagagatacttctttcgtggagtttgattactggggccagggaaccctggtcaccgtctcctca

SEQ ID NO: 15954 - DNA, 283 bp, Homo sapiens
  source 1..283: mol_type = other DNA
tgcagcctctggattcatcttaagtagtcatgacatgcactgggtccgccgagctgcaggaaaaggtctggaatgggtctcaggtattggtattgccggcaacatacattattcaggctccgtgaagggccgattcaccatctccagagaaagtgccaagaactccctgtatcttcaaatgaacagcctaagagccggggacacggctgtgtactattgtgtaagagtattcttgaatggtttcgatatctggggccaagggacaatggtcaccgtcgcttca

SEQ ID NO: 15955 - DNA, 283 bp, Homo sapiens
  source 1..283: mol_type = other DNA
tgcagcctctggatttattttaagtagttatgacatgcactgggtccgccgagctgcaggaaaaggtctggaatgggtctcaggtattggtattgccggcaacatacattattcaggctccgtgaagggccgattcaccatctccagagaaagtgccaagaactccctgtatcttcaaatgaacagcctcagagccggtgacacggctgtgtactattgtgtaagagtattcttgaatggttttgatatctggggccaagggacaatggtcaccgtcgcttca

SEQ ID NO: 15956 - DNA, 301 bp, Homo sapiens
  source 1..301: mol_type = other DNA
cagagtctctgatggctccatcagtcgttattactggagctggatccggcagcccccagggcagcgactggaatggattggctttgtctattacactgggagcaccacgtacaacccctccctcgagagtcgagtcaccatgtcaatagagacgtccaacaaccagttctccctgaggctgacgtctgtgaccgcagcggacacggccgtgtactattgtgcgaggggcggagataacagtggttcctggaatgatgcttttgatatctggggccaagggacaatggtcaccgtctcctca

SEQ ID NO: 15957 - DNA, 301 bp, Homo sapiens
  source 1..301: mol_type = other DNA
cactgtctctggtggctccatcagtagttactactggagctggatccggcagtccccagggaagggactggagtggattgggtttgtctaccacactgggagcaccacctttaacccctcgctcgagagtcgagccaccatatcagtacacacgtccaagaatcagttctccctgaagctgacctctgtgaccgctgcggacacggccgtctattattgtgcgaggggcggggataatagtggttcttggaatgatgcttttgatatctggggccaagggacaatggtcagcgtctcgtca

SEQ ID NO: 15958 - DNA, 292 bp, Homo sapiens
  source 1..292: mol_type = other DNA
cactgtctctggtggctccatcagcagaggcaattactactgggcctggatccgccagcccccagggaaggggctggagtggattgggagtttgtattatactggtagcaccctccgcaacccgtccctccagagtcgagtcaccatatccggagacacgtcgaagaaccaattctccctgaagctgaactctgtgaccgccgcagacacggctgtttattattgtgcgagacgagactaccgggcctggatcgacccctggggccagggaaccctggtcaccgtctcctca

SEQ ID NO: 15959 - DNA, 292 bp, Homo sapiens
  source 1..292: mol_type = other DNA
cactgtctctggtggctccatcagcagtggcaattactactgggcctggatccgccagcccccagggaaggggctggagtggattgggagtttgtattatagtggtagcacctcccgcaacccgtccctccagagtcgagtcaccatatccggagacacgtccaagaaccagttctccctgaagctgagttctgtgaccgccgcagacacggctatatattattgtgcgagacgggactaccgggcctggatcgacccctggggccagggaaccctggtcaccgtctcctca

SEQ ID NO: 15960 - DNA, 307 bp, Homo sapiens
  source 1..307: mol_type = other DNA
tgcagcctctggattcacctttagcagctatgccatgagctgggtccgccagaatccagggaaggggctggagtgggtctcggttattagtggtagtggtgataaaacatactactcagactccgtgaagggccggttcaccatctccagagagaattccaaggacacgctgtatctgcaaatgagcagcctgcgagccgaggacacggccgtgtattactgtgcgaaaggaagtagtagcaactactatggcgccgggggacttgacgacaactggggccagggaaccctggtcaccgtctcctca

SEQ ID NO: 15961 - DNA, 307 bp, Homo sapiens
  source 1..307: mol_type = other DNA
tgcagcctctggattcacctttagcagctatgccatgagctgggtccgccagaatccagggaaggggctggagtgggtctcggttattagtggtaatggtgatagaacatactactcagactccgtgaagggccggttcaccatctccagagagaattccaaggacacgctgtatctgcaaatgagcagcctgcgagccgaggacacggccgtgtattactgtgcgaaaggaagtagtagcaactactatggcgccgggggacttgacgacaactggggccagggaaccctggtcaccgtctcctca

SEQ ID NO: 15962 - DNA, 276 bp, Homo sapiens
  source 1..276: mol_type = other DNA
gcttctggatacaccttcagtagctttataataagctgggtgcgccaggcccccgggcaaaggcttgagtggatgggatggatcaaccctggcaatggtgacacaaggtattcacagaaattccagggcagagtcaccattaacagggacacatccgcgaccacagtctacatggagctgagcagcctgacatctgaggacacggctgtgtattactgtgcgaggcggggtttttttgatatctggggccaagggacaatggtcaccgtctcttca

SEQ ID NO: 15963 - DNA, 276 bp, Homo sapiens
  source 1..276: mol_type = other DNA
gcttctggatacaccttcactagctttataataagctgggtgcgccaggcccccgggcaaaggcttgagtggatgggatggatcaaccctggcaatggtgacacaaagtattcacagaaattccagggcagagtcaccattaacagggacacatccgcgaccacagtctacatggagctgagcagcctgacatctgaggacacggctgtgtattactgtgcgaggcggggtttctttgatatctggggccaagggacaatggtcaccgtctcttca

SEQ ID NO: 15964 - DNA, 289 bp, Homo sapiens
  source 1..289: mol_type = other DNA
cactgtctctggtggctccatcaatacttactactggagctggatccggcagcccccaggcaagggactggagtggattgcgtggatccattacagtgggaacaccaactacaacccctccctcaagagtcgagtcaccatatcagtggacacctccaagaaccagttctccctgaagttgaactctgtgaccgctgcggacacggccgtgtattactgtgcgaggggcggcgcgagcagccagcccttccaccactggggccagggcaccctggtcaccgtctcctca

SEQ ID NO: 15965 - DNA, 289 bp, Homo sapiens
  source 1..289: mol_type = other DNA
cactgtctctggtggctccatcaatacttactactggagctggatccggcagtccccgggcaagggactggagtggattgcgtggatctattacagtgggaacaccaactacaacccctccctcaagagtcgagtcaccatatcagtggacacctccaagaaccagttctccctgaagttgaactctgtgaccgctgcggacacggccgtgtattactgtgcgaggggcggcgcgagcagccagcccttccaccactggggccagggcaccctggtcaccgtctcctca

SEQ ID NO: 15966 - DNA, 316 bp, Homo sapiens
  source 1..316: mol_type = other DNA
cactgtctctggtggctccatcaccagtggtggtaactactggagctggatccgccagcacccagggaagggcctggagtggattgggtacatctacaatcgtgggaacagctactccaatccgtccctcaagagtcgagttaccatctcattagacacgtctaagaaccagttctccctgaggctgaggtctgtgactgccgcggacacggccgtgtattattgtgcgagagataagcgacaatttgcaggggagttatcgtccccccactggttcgacccctggggccagggaaccctggtcaccgtctcctca

SEQ ID NO: 15967 - DNA, 316 bp, Homo sapiens
  source 1..316: mol_type = other DNA
cactgtctctggtggctccatcagcagtggtggtaactactggagctggatccgccagcacccagggaagggcctggagtggattgggtacatctataatcgtggtaccacctcctacaacccgtccctcaagagtcgaattaccatatcagtagacacgtctaagaaccaattctccctgaagatgaggtctgtgactgccgcggacacggccgtgtattactgtgcgagagataagcgacaatttgcaggggagttatcgtccccccactggttcgacccctggggccagggaacactggtcaccgtctcctca

SEQ ID NO: 15968 - DNA, 319 bp, Homo sapiens
  source 1..319: mol_type = other DNA
caagggttctggatacagttttgccaactactggatcgtctgggtgcgccagatgcccgggaaaggcctggagtggatgggtatcatctatcctggtgactctgataccagatatagcccctccttccaaggccaggtcaccatctcagccgacaagtccaccagcacctcctacctgcagtggagcagcctgaaggcctcggacaccgccatgtattactgtgcgagggagaactatgatggtagtgcttattacccctcgttctcctactactacatggacgtctggggcaacgggaccacggtcaccgtctcctca

SEQ ID NO: 15969 - DNA, 318 bp, Homo sapiens
  source 1..318: mol_type = other DNA
aagggttctggatacagttttgccaactactggatcgtctgggtgcgccagatgcccgggaaaggcctggagtggatgggtatcatctatcctggtgactctgataccagatacagcccgtccttccaaggccaggtcaccatctcagccgacaagtccaccagcacctcctacctgcagtggagcagcctgaaggcctcggacaccgccatgtattactgtgcgagggagaactatgatggtagtgcttattacccctcgttctcctactactacatggacgtctggggcaaagggaccacggtcaccgtctcctca

SEQ ID NO: 15970 - DNA, 289 bp, Homo sapiens
  source 1..289: mol_type = other DNA
tgcagcctctggattcacctttagcaactatgccatgaactgggtccgccaggctccagggaaggggctggagtgggtctcagctattactccgagtggtggtaatacatactacgcagactccgtgaagggccggttcaccgtctccagagacaattccaagaacacgcttcatctgcaagtgaacagcctgagagccgacgacacggccgtatattcctgtgcgaaagccggcgaccactcctactttgactactggggccagggaaccctggtcaccgtctcctca

SEQ ID NO: 15971 - DNA, 289 bp, Homo sapiens
  source 1..289: mol_type = other DNA
tgcagcctctggattcacctttagcaactatgccatgagctgggtccgccaggctccagggaaggggctggagtgggtctcagctattactgctagtggtggtagtacatactacgcagactccgtgaagggccggttcaccgtctccagagacaattccaagagcacgctgcatctgcaagtgaacagcctgagagccgaggacacggccgtatattactgtgcgaaagccggcgaccactcctactttgactactggggccagggaaccctggtcaccgtctcctca

SEQ ID NO: 15972 - DNA, 310 bp, Homo sapiens
  source 1..310: mol_type = other DNA
tgcagcctctggattcacctttagtagatcttggatgagttgggtccgccaggctccaggaaaggggctggagtgggtggccaacataaagcaagatggaagtgagaaatactatgtggactctgtgaagggccgattcaccatctccagagacaacgtcgagaattcattgtttctgcaaatgaacaacctgagagccgaggacacggccgtgtattactgtgcgagattttttggagtggttagattccaagccaccgggggctggttcggcccctggggccagggaaccctggtcaccgtctcctct

SEQ ID NO: 15973 - DNA, 310 bp, Homo sapiens
  source 1..310: mol_type = other DNA
tgcagcctctggattcacctttagtagatcttggatgagttgggtccgccaggctctaggaaaggggctggagtgggtggccaacataaagcaagatggaagtgagaaatactatgtggactctgtgaagggccgattcaccatctccagagacaacgtcgagaattcattgtttctgcaaatgaacaacctgagagccgaggacacggccgtgtattactgtgcgagattttttggagtggttagattccaagccaccgggggctggttcggcccctggggccagggaaccctggtcaccgtctcctct

SEQ ID NO: 15974 - DNA, 310 bp, Homo sapiens
  source 1..310: mol_type = other DNA
tgcagcgtctggattcacttttagtaggtcttggatgagttgggtccgccaggctccaggaaagggactggagtgggtggccaacataaagcaagatggaagtgagaaatactatgtggactctgtggagggccgcttcaccatctccagagacaacgtcgaggattcagtttttctgcaaatgaacagcctgagagccgaggacacggccgtctattactgtgcgagattttttggagtggttagattccaagccaccgggggctggttcggcccctggggccagggaaccctggtcaccgtctcctca

SEQ ID NO: 15975 - DNA, 307 bp, Homo sapiens
  source 1..307: mol_type = other DNA
cactgtctctggtgactccatgcacaatggtgattactactggacttggctccgccagtccccagggaagggcctggaatggattggctacatctataacagtgggagcacctactacaacccgtccctcgaccgtcgagttttcatatctgaggacacgtccaggaaccagttctccctgagcctgagctctgtgactgccgcagacacggccgtatattactgtgccagactacacggccccaatagttggaccccctactactttgacaggtggggccagggaaccctggtcgccgtctcccca

SEQ ID NO: 15976 - DNA, 307 bp, Homo sapiens
  source 1..307: mol_type = other DNA
cactgtctctggtgactccatgaacaatggtgattactactggacttggctccgccagtccccagggaagggcctggagtggattggctacatctataacagtgggagcacctactacaacccgtccctcgagcgtcgagttttcatatcagaggacacgtccaggaaccagttctccctgagcctgagctctgtgactgccgcagacacggccgtatattactgtgccagactacacggccccaatagttggaccccctactactttgacaggtggggccagggaaccctggtcgccgtctcccca

SEQ ID NO: 15977 - DNA, 307 bp, Homo sapiens
  source 1..307: mol_type = other DNA
cacagtctctggtgactccatgtcaaatggtgattactattggacttggctccgccagaccccagggaagggcctggagtggattggctacatctataaaagtgggaccacctacttcaacccgtccctcgggagtcgagctttcatctcagaggccgcgtccaccaaccagttctccctcaggctcgactctgtgactgcctctgactcggccctctactactgcgcccgacttcacggccccaacagttggaccccctactactttgacaggtggggcccggggaccctggtcgccgtttcgtca

SEQ ID NO: 15978 - DNA, 322 bp, Homo sapiens
  source 1..322: mol_type = other DNA
tgcagcctcaggattaagctttagtggttctgagatgatttgggtccgccaggctccagggaagggtctggagtgggtttcatacatcactagtgctgggagtaacatctactacgcagactctgtgaagggccggttcaccatctccagagacaacgccaagagctcactgtatctgcaaatgaacagcctgagagccgaggacacggctgtttattactgtgcgagaggcgccagactcacgaaagtagaaacatcgactatgatccaggttgaggcttttgatatctggggccaagggacaatcgtcaccgtctcttca

SEQ ID NO: 15979 - DNA, 322 bp, Homo sapiens
  source 1..322: mol_type = other DNA
tgcagcctcaggatttgcctttagtgcttctgaaatgatttgggtccgccaggctccagggaagggtctggagtgggtttcatacatcactcgtgctgggagtaacatctactacgcagactctgtgaagggccggttcaccatctccagagacaacgccaagaactcactgtatctgcaaatgaacagcctgagagccgaggacacggctgtttattactgtgcgagaggcgccagactcacgaaagtagaaacatcgactatgatccaggttgaggcatttgatatttggggccaagggacaatcgtcaccgtctcttca

SEQ ID NO: 15980 - DNA, 307 bp, Homo sapiens
  source 1..307: mol_type = other DNA
tgaagcctctggattcaccttcagtgactactacatgagctggatccgtcaggctccagggaaggggctgcagtggctttcatacattagtactagtggtagttccacaaactacgcagactctgtgaagggccgattcaccatttccagagacaacgccaagaactcactgtctctgcacatggacagcctgagagccgaggacacggccgtgtattactgtgcgagagacctctccacctacggtggtaactccgtcttcgcttttgatatctggggccaagggacaatggtcaccgtctcttca

SEQ ID NO: 15981 - DNA, 307 bp, Homo sapiens
  source 1..307: mol_type = other DNA
tgcagcctctggattcaccttcagtgactacttcatgagctggatccgccaggctccagggaaggggctggagtgggtttcatacattagtgatagtggtggtaacacaaactacgcaggctctgtgaagggccgattcaccatctccagagacaacgtcaagaactcactgtatctgcaaatgaacagcctgagagccgacgacacggccgtgtattactgtgcgagagacctctccacctacggtggtaactccgtcttcgcttttgatatctggggccaagggacaatggtcaccgtctcttca

SEQ ID NO: 15982 - DNA, 307 bp, Homo sapiens
  source 1..307: mol_type = other DNA
tgcagcctctggattcaccttcagtgactcctacatgagttgggtccgccaggctccagggaaggggctggagtgggtttcatacattagtagtagtggtactgacacaaagtacgcagactctgtgaagggccgattcaccatctccagagacaacgccaagaactcactgtatctgcaaatggacagcctgagagccgaggacacggccgtgtattactgtgcgagagacctctccacctacggtggtaactccgtcttcgcttttgatatctggggccaagggacaatggtcaccgtctcttca

SEQ ID NO: 15983 - DNA, 307 bp, Homo sapiens
  source 1..307: mol_type = other DNA
tgcagcctctggattcaccttcagtgactcctacatgagttgggtccgccaggctccagggaaggggctggagtgggtttcatacatcagtagtagtgctactgacacaaagtacgcagactctgtgaagggccgattcaccatctccagagacaacgccaagaactcactgtatctgcaaatggacagcctgagagccgaggacacggccgtgtattactgtgcgagagacctctccacctacggtggtaactccgtcttcgcttttgatatctggggccaagggacaatggtcaccgtctcttca

SEQ ID NO: 15984 - DNA, 307 bp, Homo sapiens
  source 1..307: mol_type = other DNA
tgcagcctctggattcaccttcagtgactcctacatgagttgggtccgccaggctccagggaaggggctggagtgggtttcatacattagtagtagtggttctgacacaaagtacgcagactctgtgaagggccgattcaccatctccagagacaacgccaagaactcactgtatctgcaaatggacagcctgagagccgaggacacggccgtgtattactgtgcgagagacctctccacctacggtggtaactccgtcttcgcttttgatatctggggccaagggacaatggtcaccgtctcttca

SEQ ID NO: 15985 - DNA, 301 bp, Homo sapiens
  source 1..301: mol_type = other DNA
tgcagcctctgcattcatcttcagtagcaataccatgaactgggtccgccaggctccagggaaggggctggagtgggtctcatccattagcggtagtagtggttacatatactacgcagactcagtgaagggccgattcaccatctccagagacaacgccaagaactcattgtatctgcaaatgaacagcctgagagccgaggacacggctgtgtattactgtgcgagagtccctagcaactggaactatgggggatactttgactactggggccagggaaccctggtcaccgtctcctca

SEQ ID NO: 15986 - DNA, 301 bp, Homo sapiens
  source 1..301: mol_type = other DNA
tgcagcctctggattcaccttcagtagttatagcatgaactgggtccgccaggctccagggaaggggctggagtgggtctcatccattagcagtggtagtggttacatatactacgcagactcagtgaagggccgattcaccatctccagagacaacgccaagaactcattgtatctgcaaatgaacagcctgagagccgaggacacggctgtgtattactgtgcgagagtccctagcaactggaactacgggggatactttgactactggggccagggaaccctggtcaccgtctcctca

SEQ ID NO: 15987 - DNA, 301 bp, Homo sapiens
  source 1..301: mol_type = other DNA
tgcagcctctggattcaccttcagtagttatagcatgaactgggtccgccaggctccagggaaggggctggagtgggtctcatccattagcagtggtagtggttacatatactacgcagactcagtgaaggaccgattcaccatctccagagacaacgccaagaactcattgtatctgcaaatgaacagcctgagagccgaggacacggctgtgtattactgtgcgagagtccctagcaactggaactacgggggatactttgactactggggccagggaaccctggtcaccgtctcctca

SEQ ID NO: 15988 - DNA, 313 bp, Homo sapiens
  source 1..313: mol_type = other DNA
tgcggcctccggattcacttttagtcctcatgaaatgaactgggtccgcctggctccagggaaggggctggagtgggtttcatacattagtggtagtggcgataccattctctacgcagactctgtggagggccgattcaccatctccagagacaacgccaagaattcactttatctacaaatgggcagcctgagagccgaggacacgggtttttattactgtgcgagaggcggattttgtagtcctacactctgctataatttaaatgcttttgatatttggggccaagggacaatggtcaccgtctcttca

SEQ ID NO: 15989 - DNA, 313 bp, Homo sapiens
  source 1..313: mol_type = other DNA
tgcggcctccggattcaccttcagtcctcatgaaatgaactgggtccgccaggctccagggaaggggctggagtgggtttcatacattagtggtagtggtgataccattctctacgcagactctgtggagggccgattcaccatctccagagacaacgccaagaattcactgtatctacaaatggacagcctgagagccgaggacacggctttttattactgtgcgagaggcggattttgtagtcctacactctgctataatttaaatgcttttgatatttggggccaagggacaatggtcaccgtctcttca

SEQ ID NO: 15990 - DNA, 307 bp, Homo sapiens
  source 1..307: mol_type = other DNA
cgttgtctctggtggctccctcagcagtgcaagttactactggagctggatccggcagccccccgggaagggactggagtggattggatatatctattacagtgggagcaccaactacaacccctccctcaagagtcgagtcaccatatcagtagacacgtccaagaaccagttctccctgaagttgagctctgtgaccgctgcagacacggccgtgtattattgtacgagagatgatcggcgtccctactctctccagtactacacggacgtctggggcaaagggaccacggtcaccgtctcctca

SEQ ID NO: 15991 - DNA, 307 bp, Homo sapiens
  source 1..307: mol_type = other DNA
cgttgtcactggtggctccctcagcagtgctagttactactggagctggatccggcagccccccgggaagggactggagtggattgggtatatctattacagtgggagcaccaactacaacccctccctcaagagtcgagtcaccatgtcagtggacatgtccaagaaccagttctccctgaagttgacctctgtgaccgctgcagacacggccgtttattattgtacgagagatgatcggcgtccctactccctccaatactacacggacgtctggggccaagggaccacggtcaccgtctcctca

SEQ ID NO: 15992 - DNA, 277 bp, Homo sapiens
  source 1..277: mol_type = other DNA
tgcaacctccggattcgcctttagtgtctatacgatgaactgggtccgccaggctccagggaaggggctggagtgcgtggccagtataaaacacgatggaagggacagatattatgtggactctgtgaggggccgattcaccatctccagagacaacgccaggagctcagtgtatctgcaaatgaacagcctgagagtcgaggacacggctgtgtattattgtatgcgcgggcgggggggccgccggggccagggaaccctggtcaccgtctcctca

SEQ ID NO: 15993 - DNA, 277 bp, Homo sapiens
  source 1..277: mol_type = other DNA
tgcaacctctggattctcctttagtgcctatacgatgaattgggtccgccaggctccagggaaggggttggagtcggtggccaacataaaacaagatggaagtgagaaatattatgtggactctgtgaagggccgattcaccatctccagagacaacgccaagaactcagtgtatctgcaaatgaacagcctgagagccgaggacacggctgtgtattactgtatgcgcgggcgggggggccgccggggccagggaaccctggtcaccgtctcctca

SEQ ID NO: 15994 - DNA, 298 bp, Homo sapiens
  source 1..298: mol_type = other DNA
tgcagcctccggattcaccttcagtgactactggatgcactgggtccgccaagctccagggaaggggctggtgtgggtctcacgtgttaagggtgatggaagggagtcaagctacgcggactccgtgaagggccgattcaccatctccagagacaacgccaagaacactctgtatctgcaaatgaacagtctgagagtcgaagacacggctgtgtatttttgtggaagagttccggtggctagacctggtattgggattgactactggggccagggaaccctggtcaccgtctcctca

SEQ ID NO: 15995 - DNA, 298 bp, Homo sapiens
  source 1..298: mol_type = other DNA
tgcagcctccggattcaccttcagtgactactggatgcactgggtccgccaagctccagggaaggggctagtgtgggtctcacgtgttaagggtgatggaagggagtcaagctacgcggactccgtgaagggccgattcaccatctccagagacaacgccaagaacactctgtatctgcaaatgaacagtctgagagtcgaagacacggctgtgtatttttgtggaagagttccggtggctagacctggtattgggattgactactggggccagggaaccctggtcaccgtctcctca

SEQ ID NO: 15996 - DNA, 298 bp, Homo sapiens
  source 1..298: mol_type = other DNA
tgcagcctccggattcaccttcagtgactactggatgcactgggtccgccaagccccagggaaggggctagtgtgggtctcacgtgttaagggtgatggaagggagtcaagctacgcggactccgtgaagggccgattcaccatctccagagacaacgccaagaacactctgtatctgcaaatgaacagtctgagagtcgaagacacggctgtgtatttttgtggaagagttccggtggctagacctggtattgggattgactactggggccagggaaccctggtcaccgtctcctca

SEQ ID NO: 15997 - DNA, 295 bp, Homo sapiens
  source 1..295: mol_type = other DNA
ttcagcctcaggattcatcttcagtccctatgctcttcactgggtccgccaggctccagggaagggcctggaatatgttggagttgtttatgcagatgggactagcacatattacgcagagtcaatgaggggcagattcaccatctccagagacaattccgagaagacgttgtatcttcaaatgaccagtctgagagttgacgacacggctgtctattactgtgtgaaaggcggagacttgcctactcgtccctttgaccactggggccagggaaccccggtcatcgtctcctca

SEQ ID NO: 15998 - DNA, 295 bp, Homo sapiens
  source 1..295: mol_type = other DNA
tctaggctctggattcctcttcagcactcatgctctgcactgggtccgccaggctccagggaagggcctagaatatgttggagttgtttatgctgatgggacgagcacatactacgcagactcagtgaggcataggttcaccgtctctagagacaattccaagaagacgttgtatcttgaaatgaccagtctgagacctgaggacacggctctatactactgtgtcaaaggtggagaccttccgacacgcccctttgaccactggggccagggaacccctgtcaccgtctcctca

SEQ ID NO: 15999 - DNA, 297 bp, Homo sapiens
  source 1..297: mol_type = other DNA
aagggctatggatacagctttcccacctactggatcggctgggtgcgccagatgcccgggaaaggcctggagtggatgggaatgatctatcctggtgactctgatgccagatacagtccgtccttccaaggccgggtcaccttctcagccgacaagtccaccagcaccgtctacctgcagtggagcagtctgaaggcctcggacaccgccatgtattactgcgcgagactccaacaaagtagtcccaattcctatggtgactcctggggccagggaaccctggtcaccgtctcctca

SEQ ID NO: 16000 - DNA, 297 bp, Homo sapiens
  source 1..297: mol_type = other DNA
aagggctatggatacagctttcccacctactggatcggctgggtgcgccagatgcccgggaaaggcctggagtggatgggaatgatctatcctggtgactctgatgccagatacagtccgtccttccaaggccgggtcaccttctctgccgacaagtccaccgacaccgtcttcctgcagtggagcagtctgaaggcctcggacaccgccatgtattactgcgcgagactccaacagagtagtcccaactcctatggtgactcctggggccagggaaccctggtcaccgtctcctca

SEQ ID NO: 16001 - DNA, 291 bp, Homo sapiens
  source 1..291: mol_type = other DNA
gcttctggatacaccttcagtaactatgctatgcattgggtgcgcctggcccccggacaaaggcttgagtggatgggatggatcagcgctggcaatattaagacaaaatattcaccgaagttccagggcagagtcaccatcaccggggacacatccgcgagcacagcctacatggagctgagcaacctgggatctgaagacacggctgtgtattactgtgcgagagttgggaacaatgggtggaatgtttttgatatctggggccaagggacaatggtcactgtctcttca

SEQ ID NO: 16002 - DNA, 291 bp, Homo sapiens
  source 1..291: mol_type = other DNA
gcttctggatacaccttcagtaactatgctatgcattgggtgcgcctggcccccggacaaaggcttgagtggatgggatggatcaacgctggcaatattaagacaaaatattcaccgaagttccagggcagagtcaccattaccggggacacatccgcgagcacagcctacatggagctgagcagcctgttatctgaagacacggctgtgtattactgtgcgagagttgggaacaatgggtggaatgtttttgatatctggggccaagggacaattgtcactgtctcttca

SEQ ID NO: 16003 - DNA, 348 bp, Homo sapiens
  source 1..348: mol_type = other DNA
aagggttctggatacactttcaccacctactggatcggctgggtgcgccagatgcccgggaaaggcctggagtggatgggaatcatctttcctgctgactctgataccatatacagtccgtccttccaaggccaggtcaccatctcagccgacatatccatcaacaccgcctacctacagtggacaagcctgaaggcctcggacaccgccatgtatttctgtgccagacgggggatagcggaaaattacgatattttgagtggttattattggaccagatccagggcggcagagtacttctaccacatggacgtctggggcacagggaccatggtgaccgtctcctca

SEQ ID NO: 16004 - DNA, 348 bp, Homo sapiens
  source 1..348: mol_type = other DNA
aagggttctggatacactttcaccacctactggatcggctgggtgcgccagatgcccgggaaaggcctggagtggatgggaatcatctttcctggtgactctgataccatatacagtccgtcgttccaaggccaggtcaccatctcagccgacatatccatcaacaccgcctacctacagtggacaagcctgaaggcctcggacaccgccatgtatttctgtgccagacgggggatagcggaaaattacgatattttgagtggttattattggaccagatccagggcggcagagtacttctaccacatggacgtctggggcacagggaccatggtgaccgtctcctca

SEQ ID NO: 16005 - DNA, 303 bp, Homo sapiens
  source 1..303: mol_type = other DNA
acttctggaggcagcttcaacgactatgggatcaattgggtgcggcaggcccctggacaaggacttgagtggatgggaagaatcatccccgtccttggcacaggaacccccgcacagaggtttcagggcagactcacaattaccgcggacaaatcgacgaacactgcctacatggaactgagcagcctgagatctgaggacacggccacatactactgtgcgagagatcaggggatagttgagggaattcttataagtatctttgactattggggccagggaaccccggtcaccgtctcctca

SEQ ID NO: 16006 - DNA, 303 bp, Homo sapiens
  source 1..303: mol_type = other DNA
acttctggaggcagcttcagcgactatgggatcaattgggtgcggcaggcccctggacaaggacttgagtggatgggaagaatcatccccatccttggcacaggaacccccgcacagaggtttcagggcagactcacaattaccgcggacaaatccacgagcactgcctacatggaactgagcagcctgagatctgaggacacggccatatactactgtgcgagagatcaggggatagttgagggaattcttataagtatctttgactattggggccagggaaccccggtcaccgtctcctca

SEQ ID NO: 16007 - DNA, 292 bp, Homo sapiens
  source 1..292: mol_type = other DNA
cgctgtctctggtggctccatgaacagtaatgattactcgtggagctggatccggcggccaccagggaagggcctggagtgccttggctacatctatcgtagtgggagcgcctactacagcccgtccctcaagagtcgagtcaacatgtcaatagacaggtccaagaatcagttctccctggagttgaagtctgtgaccgccgcggacacggccgtgtattactgtgccagaaggctgaggccctactactttgactcctggggccagggaaccctggtcaccgtctcctca

SEQ ID NO: 16008 - DNA, 292 bp, Homo sapiens
  source 1..292: mol_type = other DNA
cgctgtctctggtggctccatgaacagtaatgattactcgtggagctggatccggcggccaccagggaagggcctggagtgccttgggtacatctatcgtagtgggagcgcctactacagcccgtccctcaagagtcgagtcaacatgtcaatagacaggtccaagaaccagttctccctggagctgaagtctgtgaccgccgcggacacggccgtgtattactgtgccagaaggctgaggccctactactttgactcctggggccagggaaccctggtcaccgtctcctca

SEQ ID NO: 16009 - DNA, 294 bp, Homo sapiens
  source 1..294: mol_type = other DNA
aagggttctggatacagctttagaagttactggatcggctgggtgcgccagatgcccgggaaaggcctggagtggatggggatcatctatcctggtgactctaagaccacatacagcccgtccttccaaggccaggtcaccatctcagtcgacaagtccatcagtaccgcctacctgcagtggaccagcctgaaggcctcggacaccgccatgtattactgtgcgagacgtagcaacagctggtacggcgggttcgacccctggggccagggaaccctggtcaccgtctcctcc

SEQ ID NO: 16010 - DNA, 294 bp, Homo sapiens
  source 1..294: mol_type = other DNA
cagggttctggatacagctttagaagttattggatcggctgggtgcgccagatgcccgggaagggcctggagtggatggggatcatctatcctggtgactctaagaccacatacagtgcgtccttccaaggccaggtcaccttctcagtcgacaagtccatcagtaccgcctacctccagtggaccagcctgaaggcctcggacaccgccgtgtattactgtgcgagacgtagtaatagttggtacggcgggttcgacccctggggccagggaaccctggtcaccgtctcctcc

SEQ ID NO: 16011 - DNA, 333 bp, Homo sapiens
  source 1..333: mol_type = other DNA
actcagaccctcacattgacctgtaccttctctggtttctcactcagcacgagtggagtgggggtgggctgggtccgtcagcccccaggaaaggccctggagtgggttgcgcagatttattgggatgatgataagcgctacaacccatctctgaggagcagactcaccatcaccaaggacacctccagaaaccaggtgactcttacaatgaccaacatggaccctgtggacacagccacatattactgtgcacacagactgacttcccggtatgactggaactccggcatttacgacccctggggccagggaaccctcgtcaccgtctcctca

SEQ ID NO: 16012 - DNA, 333 bp, Homo sapiens
  source 1..333: mol_type = other DNA
actcagaccctcacattgacctgcaccttctctggtttctcactcagcacgagtggagtgggggtgggctgggtccgtcagcccccaggaaaggccctggagtgggttgcgcagatttattgggatgatgataagcgttacaacccatctctgaggagcagactcaccatcaccaaggacacctccagaaaccaggtgactctgacaatgaccaacatggaccctgtggacacagccacatattactgtgcacacagactgacttcccggtatgactggaactccggcatttacgacccctggggccagggaaccctcgtcaccgtctcctca

SEQ ID NO: 16013 - DNA, 333 bp, Homo sapiens
  source 1..333: mol_type = other DNA
actcagaccctcacattgacctgcaccttctctggtttctcactcactacgagtggagtgggggtgggctgggtccgtcagcccccaggaaaggccctggagtgggttgcgcagatttattgggatgatgataagcgttacaacccatctctgaggagcagactcaccatcaccaaggacacctccagaaaccaggtgactctgacaatgaccaacatggaccctgtggacacagccacatattactgtgcacacagactgacttcccggtatgactggaactccggcatttacgacccctggggccagggaaccctcgtcaccgtctcctca

SEQ ID NO: 16014 - DNA, 288 bp, Homo sapiens
  source 1..288: mol_type = other DNA
gcttctggaggcaccttcagcagctatgctatcagctgggtgcgacagggccctggacaagggcttgagtggatgggagggatcatccctatgtttgatacagcaaactacgcacagaagttccagggcagagtcacgattaccgcggacgaatccaggagcacagcctacatggagctgagcagcctgagatctgaggacacggccgtgtattactgtgcgagtgccccgggtatcgcagtctggttcgacccctggggccagggaaccctggtcaccgtctcctca

SEQ ID NO: 16015 - DNA, 288 bp, Homo sapiens
  source 1..288: mol_type = other DNA
gcttctggaggcaccttcagcagctatgttatcagctgggtgcgacagggccctggacaagggcttgagtggatgggggggatcatccctatgtttgatacagcaaactacgcacagaagttccagggcagagtcacgattaccgcggacgaatccaggagcacagcctacatggagctgaccagcctgagatctgacgacacggccgtgtattactgtgcgagtgccccgggtatcgcagtctggttcgacccctggggccagggaaccctggtcaccgtctcctca

SEQ ID NO: 16016 - DNA, 301 bp, Homo sapiens
  source 1..301: mol_type = other DNA
cactgtctctggtggctccatcagcagtagcccttacttctggggctggatccgccagcccccaggggaggggctggagtggattgcgagtattatgtatcgtgggaacaccgagtacaatccgtccctcaagagtcgagtcaccatatcggtagacacgtccaggaaccaattctccctgaaactgaggtctgtgaccgccgcggacacgtctgtgtattactgtgcgagactctccgactacgatagcaacaggtggttcgacgcctggggccagggaaccctggtcaccgtctcctca

SEQ ID NO: 16017 - DNA, 301 bp, Homo sapiens
  source 1..301: mol_type = other DNA
cactgtctctggtggctccatcagcagtagcccttacttctggggctggatccgccagcccccaggggaggggctggagtggattgcgagtatcctgtatcgtgggaacaccgagtacaatccgtccctcaagagtcgagtcaccatatcggtagacacgtccaggaaccaattctccctgaaactgaggtctgtgaccgccgcggacacgtctgtgtattactgtgcgagactctccgactacgatagcaacaggtggttcgacgcctggggccagggaaccctggtcaccgtctcctca

SEQ ID NO: 16018 - DNA, 304 bp, Homo sapiens
  source 1..304: mol_type = other DNA
cagtgtctctggtgactccatcagtaacacgaattactattggggctggatccgccagtccccagtgacgggtctggagtggattgggagtgtcttctacactgggctcacatacagcaacccaaacttcaagagtcggatcaccctctccgctgacacgtccaagaaccagttctccctgagcctggcctccgtgaccgccgcagacacggctctttatttctgtgcgaggcatgtcgcgccaggggctaaaccttacttctttgaccactggggccggggaaccctggtcaccgtctcctca

SEQ ID NO: 16019 - DNA, 304 bp, Homo sapiens
  source 1..304: mol_type = other DNA
cagtgtctctggtgactccatcactaccacaaattactattggggctgggtccgccagtccccagtgacgggcctggagtggattgggagtgtcttctacactggactcacatacaccaacccaaacttcaagagtcgaatcaccgtctccgctgacacgtccacgaaccagttctccctgagcctggcctccgtgaccgccacagacacggctctttatttctgtgcgagacatgtcgcgccaggggctaaaccttacttctttgaccactggggccggggaaccctggtcaccgtctcctca

SEQ ID NO: 16020 - DNA, 319 bp, Homo sapiens
  source 1..319: mol_type = other DNA
ctcagccactggtttcagttttagcggctatgccatgacctgggtccgccaggctccagggaaggggctggagtgggtctcgactatcagtggaaatgctgaaactacgtactattcagcctccgtgaggggccgcttcaccatctccagagacaattccaagaacacactgtatctccaactgagcagcctgagagccgaggacgcggccatatattactgcacgaaaacctcccgcggatcttgctccagtgttaggtgctttcttaactggcacttcgatgtctggggccgtggcgccctggtcactgtctcctca

SEQ ID NO: 16021 - DNA, 319 bp, Homo sapiens
  source 1..319: mol_type = other DNA
ctcagccactggattcagttttagcggctatgccatgacctgggtccgccaggctccagggaaggggctggagtgggtctcgactatcagtggaaatgctgaaaccacgtactattcagcctccgtgaggggccgcttcaccatctccagagacaattccaagaacacattgtatctccaactgagcagcctgagagccgaggacgcggccatatattactgcacgaaaacctcccgcggatcttgctccagtgttaggtgttttcttaactggcacttcgatgtctggggccgtggcgccctggtcactgtctcctca

SEQ ID NO: 16022 - DNA, 286 bp, Homo sapiens
  source 1..286: mol_type = other DNA
tgcagcctctggattcacctttcagaactattggatgctctgggtccgccaggctccagggaaggggctggagtgggtggccagtataaagaccgatggaagccaggaattgtatgcggactctgtgaagggccgattcaccatctccagagacaacgccaagaactcactatttctgcaattggacagcctgagagccgacgacacggctctatattactgtgcgagagatttttcgtggtcttgggagtactggggccagggaacccgggtcaccgtctcctca

SEQ ID NO: 16023 - DNA, 286 bp, Homo sapiens
  source 1..286: mol_type = other DNA
tgtagcctctggattcacctttaagaacaattggatgctctgggtccgccaggctccagggaaggggctggagtgggtggccagtataaagcacgatggaagtcaggaattgtatgcggactctgtgaagggccgattcaccatctccagagataacgccaagaactcactatttctgcaattggacagcctgagagccgacgacacggctatatattactgtgcgagagatttttcgtggtcttgggagtattggggccagggaacccgggtcaccgtctcctca

SEQ ID NO: 16024 - DNA, 286 bp, Homo sapiens
  source 1..286: mol_type = other DNA
tgcagcctcgggattcacctttaagaactattggatgctctgggtccgccaggctccagggaaggggctggagtgggtggccagtataaaagacgatggaagtcaggaattgtatgcggactctgtgaagggccgattcaccatctccagagacaactccaagaactcactatttctgcaattggacagcctgagagccgacgacacggctctatattactgtgcgagagatttttcgtggtcttgggagtactggggccagggaacccgggtcaccgtctcctca

SEQ ID NO: 16025 - DNA, 298 bp, Homo sapiens
  source 1..298: mol_type = other DNA
tgcagcctctggattcaccttcagtacctactggatgcactgggtccgccaagctccagggaaggggctggtttgggtctcacgtatttacgatgatgagagtggcacaagctacgcggactccgtgaagggccgattcaccatctccagagacaacgccaagaacacggtgtatctgcaaatgaacagtttgagagccgaggacacgggtgtatattactgtgcaagagcccccacatacaactctggtacggggtgtgactactggggccagggaaccctggtcaccgtctcctca

SEQ ID NO: 16026 - DNA, 298 bp, Homo sapiens
  source 1..298: mol_type = other DNA
tgcagcctctggattcaccttcagtacctactggatgcactgggtccgccaagctccagggaaggggctggtttgggtctcacgtatttacgatgatgggagtggcacaacctacgcggactccgtgaagggccgattcaccatctccagagacaacgccaagaacacggtgtatctgcaaatgaacagtctgacagccgaggacacggctgtatattactgtgcaagagcccccacatacaactctggtacggggtgtgactactggggccagggaaccctggtcaccgtctcctca

SEQ ID NO: 16027 - DNA, 304 bp, Homo sapiens
  source 1..304: mol_type = other DNA
tgcagcctctggattctccttcagttcctattacatgaactgggtccgccaggctccagggaaggggctggagtgggtttcatacattagtagtgataatagtagcagaaactacgcagactctgtgaggggccgattcaccgtctccagagacaatgccaagaactcactgtttctgcaaatgaacagcctgagagacgaggacacggctgtgtattactgtgcgagaggtttcggtgactactggacacaaagacactactttgactactggggccagggaaccctggtcaccgtctcctca

SEQ ID NO: 16028 - DNA, 304 bp, Homo sapiens
  source 1..304: mol_type = other DNA
tgcagcctctggactcagcttcagtaactataacatgaactgggtccgccaggctccagggaaggggctggagtgggtttcagacattagtagtagtagtagtaccatatactacgcagactctgtgaagggccgattcaccatctccagagacaatgccaagaactcactgtatctgcaaatgaacagcctgagagacgaggacacggctgtgtattactgtgcgagaggtttcggtgactactggacacaaagacactactttgactactggggccggggaaccctggtcaccgtctcctca

SEQ ID NO: 16029 - DNA, 304 bp, Homo sapiens
  source 1..304: mol_type = other DNA
tgcagcctctggattctccttcagtaattattacatgaactgggtccgccaggctccagggaaggggctggagtgggtttcatacattagtagtgataatattagcagaaactacgcagactctgtgaggggccgattcaccgtctccagagacaatgccaagaactcactgtttctgcaaatgaacagcctgagagacgaggacacggctgtgtattactgtgcgagaggtttcggtgactactggacacagagacattactttgactactggggccagggaaccctggtcaccgtctcctca

SEQ ID NO: 16030 - DNA, 298 bp, Homo sapiens
  source 1..298: mol_type = other DNA
cactgtctctggtggccccatcggtgtttaccactggagctggatccgacagcccccggggcagggactggagtggattggctttgcccattacactggggacaccaactacaacccctccctcaggaatcgactcagtctgtcactagacacgtccaagaagcagttgtcgttgcagctgcactctgtgaccgctgcggacacggccgtctattactgtgcgagagtccactgggtgggaggcgcttggctacgcatcgacccctggggccagggaaccctggtcaccgtctcatca

SEQ ID NO: 16031 - DNA, 298 bp, Homo sapiens
  source 1..298: mol_type = other DNA
cagtttctctggtggccccgtcataccttaccactggagttggatccgacggcccccggggcagggactggagtggattgggtttgcccattacactggggacaccaactacaacccctccctcaggaatcgagttagtctgtctctagacacgtccaggaagcagttgtcgctgcagttgcactctgtgaccgctgcggacacggccgtctattactgtgcgagagtccactgggtgggaggcgcttggcttcgcatcgacccctggggccagggagccctggtcaccgtctcagca

SEQ ID NO: 16032 - DNA, 298 bp, Homo sapiens
  source 1..298: mol_type = other DNA
cactgtctctggtggccctatcggtgtttaccactggagctggatccgacagcccccggggcagggactggagtggattgggtttgcccattacactggggacaccaactacaacccctccctcaggaatcgagtcagtctgtcactagacacgtccaagaagcagttgtccttgcaactgcactccgtgaccgctgcggacacggccgtctattactgtgcgagagtccactgggtgggaggcgcttggctacgcatcgacccctggggccagggaaccctggtcaccgtcgcatca

SEQ ID NO: 16033 - DNA, 295 bp, Homo sapiens
  source 1..295: mol_type = other DNA
tgcagcctctggattcaccttcagtaactctggcatgcactgggtccgccaggctccaggcaaggggctggagtgggtgtcatttatgtcatctgatggaagtattaaatactatgcaggctccgtgaagggccgattcaccatctccagagacaactccgagaacactctgtatctgcaaatgaatggcctgagacctgaggacacggctgcctattactgtgcgaaagatatcgcgtcgtcctacttctacatggacgtctggggcaaggggaccacggtcagcgtctcctca

SEQ ID NO: 16034 - DNA, 295 bp, Homo sapiens
  source 1..295: mol_type = other DNA
tgcagcctctggattcaccttcagtaactctggcatgcactgggtccgccaggctccaggcaaggggctggagtgggtgtcatttatgtcatctgatggaagtattaaatactatgcaggctccgtgaagggccgattcaccatctccagagacaattccgagaacactctgtatctgcaaatgaatggcctgagacctgaggacacggctgcctattactgtgcgaaagatatcgcgtcgtcctacttctacatggacgtctggggcaaggggaccacggtcagcgtctcctca

SEQ ID NO: 16035 - DNA, 295 bp, Homo sapiens
  source 1..295: mol_type = other DNA
tgcagcctctggattcaccttcagtaactctggcatgcactgggtccgccaggctccaggcaaggggctggagtgggtgtcatttatgtcatatgatggaagtattaaatactatgcaggctccgtgaagggccgattcaccatctccagagacaattccgagaacactctgtatctgcaaatgaatagcctgagacctgaggacacggctgcctattactgtgcgaaagatatcgcgtcgtcctacttctacatggacgtctggggcaaggggaccacggtcaccgtctcctca

SEQ ID NO: 16036 - DNA, 304 bp, Homo sapiens
  source 1..304: mol_type = other DNA
tacatcttctggattcacctttggtgattacgctatgagctgggtccgccaggctccagggaaggggctggagtgggtaggtctcattagaagcaaagcttatggtgggacaacacaatacgccgcgtctgtgaaaggcagattcaccatctcaagagatgactccaaaagcatcgcctatctgcaaatgaacagcctgaaaaccgaggacacagccgtgtatttctgttctagagaagtcgtaccaacttctcttgatgcttttgatgtctggggccaagggacaatggtcaccgtctcttca

SEQ ID NO: 16037 - DNA, 304 bp, Homo sapiens
  source 1..304: mol_type = other DNA
tacatcttctggattcacctttggtgattacgctatgacctgggtccgccaggctccagggaaggggctggagtgggtgggtctcattagaagcaaagcttatggtgggacaacacaatacgccgcgtctgtgaaaggcagattcaccatctcaagagatgactccaaaagcatcgcctatctgcaaatgaacagcctgaaaaccgaggacacagccgtgtatttctgttctagagaagtcgtaccaacttctcttgatgcttttgatgtctggggccaagggacaatggtcaccgtctcttca

SEQ ID NO: 16038 - DNA, 292 bp, Homo sapiens
  source 1..292: mol_type = other DNA
tgcagcctctggattcaccttcagtaactcctatatgcactgggtccgccaagctccagggcaggggctagtatgggtctcacatattaatagtgatgggactagcacaagttatgtggactccgtgaagggccgattcaccatctccagagacaacgccaagaacacgctgtatctgcaaatgaacagtctgagagccgaggacacggctctgtattactgtgtaagcggatattgtagtggtagtaggtgcttctactggggccagggaaccctggtcaccgtctcctca

SEQ ID NO: 16039 - DNA, 292 bp, Homo sapiens
  source 1..292: mol_type = other DNA
tgtagtctctggattcaccttcagtagctcctacatgcactgggtccgccaagctccagggaaggggctggtgtgggtctcacacattattagcggtggggcaggcacaagctacgcggactccgtgaagggccgattcaccatctccagagacaacgccaagaacacgctgtatctggaaatgaacagtctgagacccgaggacacggctgtgtattactgtgtaagtggatattgtagtggtagtcgctgcttctactggggccagggaaccctggtcaccgtctcctca

SEQ ID NO: 16040 - DNA, 289 bp, Homo sapiens
  source 1..289: mol_type = other DNA
tagtgtctctggtggctccatcactacctattattggacctggatccggcagcccccggggatgggactggagtttattggctatatttttcacactggtcacaccaactacaattcctccctcgagcatcgagtcgccatgtcagtagacacgtccaagaaccagatctccctgacgttgacctctgtgaccgcagcggacacggccatgtattactgtggggcctacagcggctcgtcgcaggctattgatatttggggccacgggaccatggtctccgtctcctca

SEQ ID NO: 16041 - DNA, 289 bp, Homo sapiens
  source 1..289: mol_type = other DNA
tagtgtctctggtggctccatcactacctattattggacctggatccggcagcccccggggatgggactggagtttattggctatatttttcacactggtcacaccaactacaattcctccctcgagcatcgagtcgccatgtcagtagacacgtccaagaaccagatctccctgacgttgacctctgtgaccgcagcggacacggccatgtattactgtggggcctacagcggctcgtcgcaggctatagatatttggggccacgggaccatggtctccgtctcctca

SEQ ID NO: 16042 - DNA, 280 bp, Homo sapiens
  source 1..280: mol_type = other DNA
tgcagcctctggattctcttttagtagtcagcgcatgagctgggtccgccaggctccagggaaggggctggagtggctggccaacataaacgaagatggaggagaaaaacattatgcggactctgtgaagggccgattcaccatttctagagacaacgccgagcagtcactttctttgcaattgagcagtctgagagtcgacgacacggctatttattactgtgtgaatcgtggctggcttgagttttggggcccgggagtccaggtcaccgtctcctca

SEQ ID NO: 16043 - DNA, 280 bp, Homo sapiens
  source 1..280: mol_type = other DNA
tgcagcctctggattcagctttagtacttattggatgagttgggtccggcaggctccagggaaggggctggagtgggtggccagcataaacgaagctggaagtgacaaatattatgtggactctgtgaagggccgattcaccatctccagagacaacgccaagaactcactgtatctgcaaatggacagcctgagagccgaggacacggctgtgtattactgtgtcaatcgaggttggcttgagttctggggccagggaaccctggtcaccgtctcctca

SEQ ID NO: 16044 - DNA, 295 bp, Homo sapiens
  source 1..295: mol_type = other DNA
cactgtctctggtggctccctcatgagtggtgcttcctactggggctggatccgccagcacccagggaagggcctggagtggattgggtccatctattacagtgggagcacctactacaacccgtccctcaagagtcgactgaccatgtcactagacacgtctaagaaccagttctccctgaacctgacctctgtcactggcgcggacacggccgtctattactgtgcgagactacgggggcgactcggagcgtgcgacccctggggccagggaaccctggtcaccgtctcctca

SEQ ID NO: 16045 - DNA, 295 bp, Homo sapiens
  source 1..295: mol_type = other DNA
caatgtctctggtgtctccatcatcagcggtgcttactactggggttggctccgccagcccccagggaagggcctggagtgggttgggtccatctattataatgggaacacctactacaacccgtccctcaagagtcgcctggccttgtcagtggacacttctaaaaaccaattctccctgaacctgacctctgtgactgccgcggacacggccttctactactgtgcgagactgcgggggcgactcggggcgtgcgacccctggggccagggaaccctggtcaccgtctcctca

SEQ ID NO: 16046 - DNA, 304 bp, Homo sapiens
  source 1..304: mol_type = other DNA
tgcagcctccggattcaccttcagtgactactacatgagctggatccgccaggctccagggaaggggctggagtgggtttcatacattagtagtagtggcagtaccatatattacgcagactctgtgaagggccgattcaccatctccagggacaacgccaagaactcactgtatctgcaaatgaacagcctgagagccgaggacacggccatgtattactgtgcgagaggtgcggggcggatagcagcagctggaaccctcggtggctactggggccagggaaccctggtcaccgtctcctca

SEQ ID NO: 16047 - DNA, 304 bp, Homo sapiens
  source 1..304: mol_type = other DNA
tgcagcctctggattcaccttcagtgactactacatgagctggatccgccaggctccaggggaggggctggagtgggtttcatacattagtagtagtggtagtaccatgtattacgcagactctgtgaagggccgattcaccatctccagggacaacgccaagaactcactgtatctgcaaatgaacagcctgagagccgaggacacggccgtgtattactgtgcgagaggtgcggggcggatagcagcagctggaaccctcggtggctactggggccagggaaccctggtcaccgtctcctca

SEQ ID NO: 16048 - DNA, 289 bp, Homo sapiens
  source 1..289: mol_type = other DNA
tgcagcctctggattcaccttcagtggccactggatgcactgggtccgccgaattccagggaagggcccggtgtgggtctcacggattaataatgatgggaccagcacaacctacgcggactccgtgaagggccgattcaccatgtccagagacaatgtcaagaacacgatttatttgcagatgcacagtctgagagtcgaggacacggctctatatatttgtacaagaggcgattacccaaactggctcgactcctggggcccgggaaccctggtcaccgtctcttca

SEQ ID NO: 16049 - DNA, 289 bp, Homo sapiens
  source 1..289: mol_type = other DNA
tgcagcctctggattctccttcagtggccactggatgcactgggtccgccgaattccagggaagggcccggtgtgggtctcacggattaataatgatgggaccagcacaacctacgcggactccgtgaagggccgattcaccatgtccagagacaatgtcaagaacacgatttatttgcagatgcacagtctgagagtcgaggacacggctctatatatttgtacaagaggcgattacccaaactggctcgactcctggggcccgggaaccctggtcaccgtctcttca

SEQ ID NO: 16050 - DNA, 289 bp, Homo sapiens
  source 1..289: mol_type = other DNA
tgcagcctctggattcaccttcagttcttatgcaatgaactgggtccgccaggctccagggaaggggctggagtgggtttcatacattagtagtactggtagtaccatatactacgcagactcggtgatgggccgattcaccatctccagagacaacgccaagaactcactctatctgcaaatgaacagcctgagagccgacgacacggctgtttattactgtgcgggagagtacgcgaatacagagcatgactactggggccagggaaccctggtcaccgtctcctcg

SEQ ID NO: 16051 - DNA, 289 bp, Homo sapiens
  source 1..289: mol_type = other DNA
tgcagcctctggattcaccttcagttcttatgcaatgaactgggtccgccaggctccagggaaggggctggagtgggtttcatacattagtagtactggtagtaccatatactacgcagactctgtgatgggccgattcaccatctccagagacaacgccaagaactcactctatctgcaaatgaacagcctgagagccgacgacacggctgtttattactgtgcgggagagtacgcgaatacagagcatgactactggggccagggaaccctggtcaccgtctcctcg

SEQ ID NO: 16052 - DNA, 289 bp, Homo sapiens
  source 1..289: mol_type = other DNA
tgcagcctctggattcagctttagtggttattggatgaactgggtccgccaggctccggggaaggggctggagtgggtggccaacataaagccagatgggagtgagaaattttatctggactctgtgaagggccgattcaccatctccagagacaacgccaagaactcactgtatctgcaaatgaacagcctgagagtggaggacacggccgtgtattactgtacgagatacggagtaacagctggccttgattattggggccagggaaccctggtcaccgtctcctca

SEQ ID NO: 16053 - DNA, 289 bp, Homo sapiens
  source 1..289: mol_type = other DNA
tgcagcctctggattcaggtttagtgattattggatgagctgggtccgccaggttccggggaaggggctggagtgggtggccaacattaagccagatgggagtggaaaattttatctggactctgtgaagggccgattcaccatctccagagacaacgccaagaactcactgtatctgcaaatgaacagcctgagagtggaggacacggccgtgtattactgtacgagatacggagtaacagctggccttgattattggggccagggaaccctggtcaccgtctcctca

SEQ ID NO: 16054 - DNA, 289 bp, Homo sapiens
  source 1..289: mol_type = other DNA
tgcagcctctggattcagctttagtggttattggatgaactgggtccgccaggctccggggaaggggctggagtgggtggccaacataaagccagatgggagtgaaaaattttatctggactctgtgaagggccgattcaccatctccagagacaacgccaagaactcactgtatctgcaaatgaacagcctgagagtggaggacacggccgtgtattactgtacgagatacggagtaacagctggccttgattattggggccagggaaccctggtcaccgtctcctca

SEQ ID NO: 16055 - DNA, 289 bp, Homo sapiens
  source 1..289: mol_type = other DNA
tgcagcctctggattcaccttcagtaagtgctggatgcactgggtccgccaagctccagggaaggggctggtgtgggtctcacgtattaatagtgatggcagtagcacaagctacgcggactccgtgaagggccgattcaccatctccagagacaacgccaagaacacgctgtatctgcaaatgaacagtctgagagccgaggacacggctgtgtattactgtgcaagaggactcgggaagcgttcccttgactactggggccagggaaccctggtcaccgtctcctca

SEQ ID NO: 16056 - DNA, 289 bp, Homo sapiens
  source 1..289: mol_type = other DNA
tgcagcctctggattcaccttcagtaactgctggatgcactgggtccgccaagctccagggaaggggctggtgtgggtctcacgtattaatagtgatggcagtagcacaagctacgcggactccgtgaagggccgattcaccatctccagagacaacgccaagaacacgctgtatctgcaaatgaacagtctgagagccgaggacacggctgtgtattactgtgcaagaggactcgggaagcgttcccttgactactggggccagggaaccctggtcaccgtctcctca

SEQ ID NO: 16057 - DNA, 304 bp, Homo sapiens
  source 1..304: mol_type = other DNA
tgtagcctctggattcaccttcagtagctatggcatgcactgggtccgccaggctccaggcaaggggctggagtgggtggcagttatatcatatgatgaaaataataaattgtatgcagactccgtgaagggccgattcaccatctccagagacaattccaagaacacgctgtatctgcaaatgaacagcctgagggctgaggacacggctgtgtatcactgtgcgaaagcaccctatagagatggttttgggaattactactttgactactggggccagggaaccctggtcatcgtctcctca

SEQ ID NO: 16058 - DNA, 304 bp, Homo sapiens
  source 1..304: mol_type = other DNA
tgtagcctctggattcaccttcagtacctatggcatgcactgggtccgccaggctccaggcaaggggctggagtgggtggcagttatatcatatgatggaggtaataaattgtatgcagactccgtgaagggccgattcaccatctccagagacaattccaagaacacgctgtatctgcaaatgaacagcctgagagctgaggacacggctgtgtatcactgtgcgaaagcaccctatagagatggttttgggaattactactttgactactggggccagggaaccctggtcatcgtctcctca

SEQ ID NO: 16059 - DNA, 304 bp, Homo sapiens
  source 1..304: mol_type = other DNA
tgtagcctctggattcagcttcagtagctatggcatgcactgggtccgccaggctccaggcaaggggctggagtgggtggcagttatatcatatgatggaagtaatacattgtatgcagactccgtgaagggccgattcaccatctccagagacaattccaagaacacgctgtatctgcaaatgaacagcctgagagctgaggacacggctgtgtatcactgtgcgaaagcaccctatagagatggttttgggaattactactttgactactggggccagggaaccctggtcatcgtctcctca

SEQ ID NO: 16060 - DNA, 298 bp, Homo sapiens
  source 1..298: mol_type = other DNA
tgcagtttctggaatcaccttcagtaacttctggatgtattgggtccgccaagttccagggaaggggctggcgtgggtctcacgtattaacagtgatgggagtatcacagactacgcggactccgtgaagggccggttcaccatctccagagacaacgccaagaaaacggtgtatttgcaaatgaacagtctgagggccgacgacacggctgtttatttctgtgcaagatgggctatgatgaggggaaatgattactttgactactggggccagggaaccctggtcaccgtcacctca

SEQ ID NO: 16061 - DNA, 298 bp, Homo sapiens
  source 1..298: mol_type = other DNA
tgcagtttctggaatcaccttcagtaacttctggatatattgggtgcgccaagttccagggaaggggctggtgtgggtctcacgtattaacagtgatgggagtgtcacagactacgcggactccgtgaagggccggttcaccatctccagagacaacgccaagaaaacggtgtatttgcaaatgaacagtctgagggccgacgacacggctgtttatttctgtgcaagatgggctatgatgaggggaaatgattactttgactactggggccagggaaccctggtcaccgtcacctca

SEQ ID NO: 16062 - DNA, 316 bp, Homo sapiens
  source 1..316: mol_type = other DNA
tgcagtctctggattcaccttcagttcctatagcatgaactgggtccgccaggctccagggagggggctggaatgggtctcatccattagtagtagtggtagttacatatactacgcggactcagtgaagggccgattcgccatctccagagacaacgccgagaactcactgtatctgcaaatgaacaacctgagagccgaggacacggctgtgtattactgtgcgagggatcacttctatgataggagtggttatggcctcgccacagatcctcttgactactggggccagggaaccctggtcaccgtctcctca

SEQ ID NO: 16063 - DNA, 316 bp, Homo sapiens
  source 1..316: mol_type = other DNA
tgcagtctctggattcaccttcagttcctacagcatgaactgggtccgccaggctccagggagggggctggagtgggtctcatccattagtagtagtggtagttacatatactacgcggactcagtgaagggccgattcgccatctccagagacaatgccgagaactcactgtatctgcaaatgagcaacctgagagccgaggacacggctgtgtattactgtgcgagggatcacttctatgataggagtggttatggcctcgccacagatcctcttgactactggggccagggaaccctggtcaccgtctcctca

SEQ ID NO: 16064 - DNA, 316 bp, Homo sapiens
  source 1..316: mol_type = other DNA
tgcagtctctggattcaccttcagttcctacagcatgaactgggtccgccaggctccagggagggggctggagtgggtctcatccattagtagtagtggtagttacatatactacgcggactcagtgaagggccgattcgccatctccagagacaacgccgagaactcactgtatctgcaaatgagcaacctgagagccgaggacacggctgtgtattactgtgcgagggatcacttctatgataggagtggttatggcctcgccacagatcctcttgactactggggccagggaaccctggtcaccgtctcctca

SEQ ID NO: 16065 - DNA, 298 bp, Homo sapiens
  source 1..298: mol_type = other DNA
tgcagcctctggattcaattttggtgttaatgacatgcactgggtccggcaggctccagggaagggcctggagtgggtctcaagtataaattggaatagtgctggcacagcctatgcggactctgtgaagggccgattcaccatctccagagacaacttcaagaacatgttgtttctacaaatgaagaatctgcgagaggaagacacggccttgtattactgtgccaaagacagtcgtcaatacaggcatggaatcatggacgcctggggcagagggaccacggtcaccgtttcctca

SEQ ID NO: 16066 - DNA, 298 bp, Homo sapiens
  source 1..298: mol_type = other DNA
tgcagcctctggattcaattttggtgttaatgacatgcactgggtccggcaggctccagggaagggcctggagtgggtctcaagtataaattggaatagtgctggcacagcctatgcggactctgtgaagggccgattcaccatctccagagacaacttcaagaacatgttgtttctacaaatgaacaatctgcgagaggaagacacggccttgtattactgtgccaaagacagtcgtcaatacaggcatggaatcatggacgcctggggcagagggaccacggtcaccgtttcctca

SEQ ID NO: 16067 - DNA, 292 bp, Homo sapiens
  source 1..292: mol_type = other DNA
tgcagcctctggattcacctttagtacttattggatgagctgggtccgccaggctccagggacggggctggagtgggtggccaacataaaggaagatggaagtgagaaatactatgtggactctgtgaagggccgattcaccatcttcagagacaacgccaagaactcactgtatctgcaaatgaacagcctgagagccgaggacacggccgtatattactgtgcgagagatcacgggggttactggtatctcgatctctggggccgtggcaccctggtcactgtctcctta

SEQ ID NO: 16068 - DNA, 292 bp, Homo sapiens
  source 1..292: mol_type = other DNA
tgcagcctctggattcacgttgagtagttattggatgagctgggtccgccaggctccagggaaggggctggagtgggtggccaacataaaggaggatggaagtgagaaatactatgtggactctgtgaagggccgattcaccatctccagagacaacgccaagaactcactatatctgcaaatgaacagcctgagagccgaggacacggccgtgtattactgtgcgagagatcacgggggttactggtatctcgatctctggggccgtggcaccctggtcactgtctcctta

SEQ ID NO: 16069 - DNA, 292 bp, Homo sapiens
  source 1..292: mol_type = other DNA
tgcagcctctggattcacctttagtagttattggatgagctgggtccgccaggctccagggaaggggctggagtgggtggccaacataagggaacatggaagtgagaaatactatgtggactctgtgaagggccgattcaccatcttcagagacaacgccaagaactcactgtatctgcaaatgaacagcctgagagccgaggacacggccgtgtattactgtgcgagagatcacgggggttactggtatctcgatctctggggccgtggcaccctggtcactgtctcctta

SEQ ID NO: 16070 - DNA, 297 bp, Homo sapiens
  source 1..297: mol_type = other DNA
acttctggttacacctttaccagctatggtatcagctgggtgcgacaggcccctggacaaggtcttgagtggatggggtggatcagcacttacaatggtaacacagagacggcacagaacttccagggcagactctccatggccacagagacatccacgaccacagcctacatggaactgaggagcctgacatctgacgacactgccgtctattactgtgcgagagttggcggcagggctacggtggtgactcctcaggaccactggggccagggaaccctggtcgccgtctcctca

SEQ ID NO: 16071 - DNA, 297 bp, Homo sapiens
  source 1..297: mol_type = other DNA
acttctggctacacctttaccagctatggtatcagctgggtgcgacaggcccctggacaaggtcttgagtggatggggtggatcagcacttacaatggtaacacagagactgcacagaacttccagggcagagtctccatgaccacagagacatccacgaccacagcctacctggaactgaggagcctgacatctgacgacactgccgtctattactgtgcgagagttggcggcagggctacggtggtcactcctcaggaccactggggccagggaaccctggtcgccgtctcctca

SEQ ID NO: 16072 - DNA, 301 bp, Homo sapiens
  source 1..301: mol_type = other DNA
tgcagcctctggattcaccttcagcagttatgctatgcactgggtccgccaggctccagggaagggactggaatatgtttcagctatcagcagtgatggggataatacatattatgcaaactctgtgaagggcagattcaggatctccagagacaattccaagaacacactgtatcttcaaatgggcaacctgagaactgacgacatggctatctatttctgtgcgagagggggggttgtagtagtaacagctgccatggttgattactggggccagggaaccctggtcaccgtctcctca

SEQ ID NO: 16073 - DNA, 301 bp, Homo sapiens
  source 1..301: mol_type = other DNA
tgcagcctctggattcaccttcagcagttatgctatgcactgggtccgccaggctccagggaagggactggaatatgtttcagctatcagcagtgatggggacaatacatattatgcaaactctgtgaagggcagattcaggatctccagagacaattccaagaacacactgtatcttcaaatgggcaacctgagaactgacgacatggctatctatttctgtgcgagagggggggttgtagtagtaacagctgccatggttgattactggggccagggaaccctggtcaccgtctcctca

SEQ ID NO: 16074 - DNA, 295 bp, Homo sapiens
  source 1..295: mol_type = other DNA
cgctgtctctggtgactccatcagcagtatcagttggtggagttgggtccgccagccccccgggaaggggctggagtgggttgccgctatctatcatagtggcaacaccaactacaacccgtccctcgggggtcgagtcacgatatcactagacaagtccaacaaccacttctccctgacactgaactctgtgaccgacgcggacacggccgtctatttctgtgcgagagagagcagggactggaacggcctctttgactactggggccagggaatccaggtcaccgtctcgtca

SEQ ID NO: 16075 - DNA, 295 bp, Homo sapiens
  source 1..295: mol_type = other DNA
cgctgtctctggtgactccatcagcagtatcagttggtggagttgggtccgccagccccccgggaaggggctggagtgggttgccgctatctatcatagtggcaacaccaattacaacccgtccctcgggggtcgagtcacgatatcactagacaagtccaataaccacttctccctgacactgaactctgtgaccgacgcggacacggccgtctatttctgtgcgagagagagcagggactggaacggcctctttgactactggggccagggaatccaggtcaccgtctcgtca

SEQ ID NO: 16076 - DNA, 313 bp, Homo sapiens
  source 1..313: mol_type = other DNA
tgcagcctctggactcaccgtcagtagtaactacatgagttgggtccgccaggctccagggaaggggctggagtgggtctcagttatttatagggatggtacgacatacgacgcagactccgtgaagggccgattcaccatctccagagacaattccaagaacacggtgtatcttcaaatgaacagcctgagagtcgaggacacggccgtgtattattgtgcgagagatgtttctgagttcagtcagtacggaggctcctactactactacatggacgtctggggcaaagggaccacggtcaccgtctcctca

SEQ ID NO: 16077 - DNA, 313 bp, Homo sapiens
  source 1..313: mol_type = other DNA
tgcagcctctggactcaccgtcagtagcaactacatgagttgggtccgccaggctccagggaaggggctggagtgggtctcagttgtttatagggatggtacgacatacgacgcagactccgtgaagggccgattcaccatctccagagacatttccaagaacacggtgtatcttcaaatgaacagcctgagagtcgaggacacggccgtgtattattgtgcgagagatgtttctgagttcagtcagtacggaggctcctactactactacatggacgtctggggcaaagggaccacggtcaccgtctcctca

SEQ ID NO: 16078 - DNA, 304 bp, Homo sapiens
  source 1..304: mol_type = other DNA
tgtagcgtctggcttcaacttccatgtacatggaatgcattgggtccgccaggctccaggcaaggggctggaatgggtggcaactatttggtatgatggaagtaatcagcactatgcagactccgtgaagggccgattcaccatctccagagacaattcccagaagtcgctgtatctccaaatgaacagcctgagacccgaggacacggctgtctattattgtgcgagagatttcaatacagcaactacatactactactacatggacgtctggggcaaagggaccacggtcaccgtctcctca

SEQ ID NO: 16079 - DNA, 304 bp, Homo sapiens
  source 1..304: mol_type = other DNA
tgtagcgtctggcttcaacttcaatgtccatggcatgcactgggtccgccaggctccaggcaaggggctggagtgggtggcaactgtctggtatgatggaagtaagcaagactatgcagactccgtgaagggccgattcaccatctccagagacaattcccagaagtcgctgtttctccaaatgaacagcctgagacccgaggacacggctgtttattactgtgcgagagacttcaatacagcaacgacatactactactacatggacgtctggggcgaggggaccacggtcaccgtgtcctca

SEQ ID NO: 16080 - DNA, 295 bp, Homo sapiens
  source 1..295: mol_type = other DNA
tgcagcctctggattcaccttcagtagttatgagatgaactgggtccgccaggctccagggaaggggatggagtggctttcatacattagtagtagtggtgctaccatgtactactcagactctgtgaagggccgattcaccatctccagagacaacgccgagaactcactgtatctgcaaatgaacagcctgagagccgaggacacggctatttattactgtgcgagagagggggaatacaactccggtcactttgactactggggccagggaaccctggtcaccgtctcctca

SEQ ID NO: 16081 - DNA, 295 bp, Homo sapiens
  source 1..295: mol_type = other DNA
tgcagcctctggattcatcttcagtagtcacgaaatgaattgggtccgccaggctccagggaaggggctggagtgggtttcatacattgataatagtggtagtaccatatactacggagactccgtgaggggccgattcaccgtctccagagacaacaccaagaactcactgtatctgcaaatgaacagcctgagaatcgaggacacggctgtttattactgtgcgagagagggggaatacaactccgggcactttgactactggggccagggaaccctggtcaccgtctcctca

SEQ ID NO: 16082 - DNA, 295 bp, Homo sapiens
  source 1..295: mol_type = other DNA
tgcagcctctggattcaccttcagtagttatgaaatgaactgggtccgccaggctccagggaaggggatggagtggctttcatacattagtagtggtggtactaccatatactacgcagactctgtgaagggccgattcaccatctccagagacaacgccgagaactcactgtatctgcaaatgaacagcctgagagccgaggacacggctgtttattactgtgcgagagagggggaatacaactccggtcactttgactactggggccagggaaccctggtcaccgtctcctca

SEQ ID NO: 16083 - DNA, 301 bp, Homo sapiens
  source 1..301: mol_type = other DNA
tggactctctggattcaccctcgacgacttctatatcagctggatccggcaggctccagggaagggactggagtgggtttcatatattagtggaggtggtagtcacataaagtatgcagactctgtgaggggccgattcaccatctccagagacaacgacgagaaattagttcatctccacatgaagagcctgcgagccgaggacacggccatgtattattgtgcgagagaggacaaacgaggccacgattcggactggtacgacccctggggccagggaaccctggtcatcgtctcctca

SEQ ID NO: 16084 - DNA, 301 bp, Homo sapiens
  source 1..301: mol_type = other DNA
tgcagcctccggattcacctttagtgacttctacatgagctggatacgccaggctccagggaagggaccggagtgggtttcgtacatcagtggcggaggcactcacataaagtatgcagactctgtgtggggccgattcaccatctccagagacaacgacaagaactcactgtatctccaaatgaacagcctgacagccgacgacacggccatctattattgtgcgagagaggacaaacgcggccacgattcggactggtacgacccctggggccagggaaccctggtcaccgtctcctca

SEQ ID NO: 16085 - DNA, 301 bp, Homo sapiens
  source 1..301: mol_type = other DNA
tgaagcctctgggttcaccttcagtgacttctacatgagttggatacgccagactccagggaagggaccggagtgggttgcgtacatcagtggtggtggcactcacatcaagtatgctgactctgtgtggggccgattcaccatctccagagacaacgacaagaactcactgtatctccaaatgaaaagcctgacagtcgacgacacggccatctattattgtgcgagagaggacaaacgcggccacgattcggactggtacgacccctggggccagggaaccctggtaaccgtctcctca

SEQ ID NO: 16086 - DNA, 301 bp, Homo sapiens
  source 1..301: mol_type = other DNA
tgcactctctggattcaccctcgaagacttctacatcagttggatccgccaggccccagggaagggactggagtgggtcgcatatattagtggcggtggtagtcacataaagtacgcggactctgtgaggggccgattcgtcatctccagagacaactacgagacgtcagtctatctccagatgaacaacctgagagacgacgacacggccgtctattattgtgcgagagaggacaaacgtggccacgattcggactggtacgacccctggggccggggaacccaggtcgtcgtctcctca

SEQ ID NO: 16087 - DNA, 292 bp, Homo sapiens
  source 1..292: mol_type = other DNA
tgtaggctctggattcaccttcagtgactactacatgacctgggtccgccaggctccagggaaggggctggagtggatttcatacattagtactagtggcagtctcatatactacgcagactctgtgaagggccgattcaccatctccagggacaacgcccagaactcagtacatctgcaaatgagtggcgtgagagccgaggacacggccgtttattactgtgcgagaggtttgggaagtgattattcccgcgactactggggccagggaaccatggtcaccgtctcctca

SEQ ID NO: 16088 - DNA, 292 bp, Homo sapiens
  source 1..292: mol_type = other DNA
tgcagcctctggattcaccttcagtgactactacatgtgctgggtccgccaggctccagggaaggggctggagtgggtttcatacattagtactagtggtagtgtcacacactacgcagactctgtgaggggccgattctccatctccagggacaacaccaagaattcattgtatctcctaatgaacagcctgagagccgaggacacggccatatattactgtgcgagaggtttgggtagtgattattcccgcgactactggggccaggggaccctggtcaccgtctcctca

SEQ ID NO: 16089 - DNA, 303 bp, Homo sapiens
  source 1..303: mol_type = other DNA
gcttctgattacacctttaccaactatggtatcagctgggtgcgacaggcccctggacaagggcttgagtggatgggatggatcagcgcttacaatggtaacacaaactatgcacagaaggtccagggcagagtcaccatgaccacagacacatccacgagcacagcctacatggagttgaggagcctgagatctgacgacacggccatgtattactgtgcgagagcagaagttagtgcctcgtaccactactactactacatggacgtctggggcaaagggaccacggtcaccgtctcctca

SEQ ID NO: 16090 - DNA, 303 bp, Homo sapiens
  source 1..303: mol_type = other DNA
gcttctgattacacctttaccaactatggtatcagctgggtgcgacaggcccctggacaagggcttgagtggatgggatggatcagcgcttacaatggtaacacaaactatgcacagaaggtccagggcagggtcaccatgaccacagacacatccacgagcacagcctacatggagctgaggagcctgagatctgacgacacggccatgtattactgtgcgagagcagaagttagtgcctcgtaccactactactactacatggacgtctggggcaaagggaccacggtcaccgtctcctca

SEQ ID NO: 16091 - DNA, 304 bp, Homo sapiens
  source 1..304: mol_type = other DNA
tgcagcctctggattcaccttcattgactactacatgagctggatccgccaggctccagggagggggctggagtgggtttcatacattagtagtagtggtaataccatgtactacgcagactctgtgcagggccgattcaccatctccagggacaacgccaagaactcactgtatctgcaaatgaacagcctgagagccgaggacacggccgtgtatttctgtgcgagagttggagatggctacaataagtactactactacatggacgtctggggcaaagggaccacggtcaccgtctcctca

SEQ ID NO: 16092 - DNA, 304 bp, Homo sapiens
  source 1..304: mol_type = other DNA
tgcagcctctggattcaccttcattgactactacatgagctggatccgccaggctccagggagggggctggagtgggtttcatacattactagtagtggtaataccatgtactacgcagactctgtgcagggccgattcaccatctccagggacaacgccaagaactcactgtatctgcaaatgaacagcctgagagccgaggacacggccgtgtatttctgtgcgagagttggagatggctacaataagtactactactacatggacgtctggggcaaagggaccatggtcaccgtctcctca

SEQ ID NO: 16093 - DNA, 298 bp, Homo sapiens
  source 1..298: mol_type = other DNA
tgcagcctctggattcacctttagcacctatgccatgagctgggtccgccaggctccagggaaggggctggagtgggtctcaactattagtggtgatggtggtgccacatactacccagactccgtgaagggccggttcaccatctccagagacaattccatgcacacgttgtatctgcaaatgaacagcctgagagccgaggacatggccgtatattactgtgcgataagaccagctcctatcttcgtctactacatgggcgtctggggcaaagggaccacggtcagcgtctcctca

SEQ ID NO: 16094 - DNA, 298 bp, Homo sapiens
  source 1..298: mol_type = other DNA
tgcagcctctggattcacctttagcacctatgccatgagctgggtccgccaggctccagggaaggggctggagtgggtctcaactattagtggtgatggtggtgccacatactacccagactccgtgaagggccggttcaccatctccagagacaattccatgcacacgttgtatctgcaaatgaacagcctgagagccgaggacacggccgtatattactgtgcgataagaccagctcctatcttcgtctactacatgggcgtctggggcaaagggaccacggtcagcgtctcctca

SEQ ID NO: 16095 - DNA, 295 bp, Homo sapiens
  source 1..295: mol_type = other DNA
cactgtctctggtggctccatcagcggtagtggttactactggagttggatccgccagcacccagggaagggcctggagtggattgggtacatctcttacactgtgagtaccgactacaacccgtccctcaagagtcgagttaccacatcagtagacacgtctaagaaccagttctccctgaagctgaactctgtgactgccgcggacacggccgtgtattactgtgcgagagggggtagtggttccgcttactttgactactggggccagggagccctggtcaccgtctcctca

SEQ ID NO: 16096 - DNA, 295 bp, Homo sapiens
  source 1..295: mol_type = other DNA
cactgtctctggtggctccatcagcggtagtggttactattggagttggatccgccagcacccagggaagggcctggagtggattgggtacatctcttacactgtgagcaccgactacaacccgtccctcaagagtcgagttaccacatcagtagacacgtctaagaaccagttctccctgaggctgagctctgtgactgccgcggacacggccgtgtattactgtgcgagagggggtagtggttccgcttactttgactactggggccagggaaccctggtcaccgtctcctca

SEQ ID NO: 16097 - DNA, 292 bp, Homo sapiens
  source 1..292: mol_type = other DNA
tgcagcctctggattcacctttggaacctattggatgagctgggtccgccaggctccagggaaggggctggaatgggtggccaacataaagcaagatggaagtgaacactactatgtggcctctgtgaggggccgattcaccctctccagagacaacgcccacaactcactgtatctgcaaatgaacagcctgagagccgaggacacggccgtctattattgtgtgagagactgtggtacttccaactgctgggcctactggggccagggaaccctggtcaccgtctcctca

SEQ ID NO: 16098 - DNA, 292 bp, Homo sapiens
  source 1..292: mol_type = other DNA
tgcagcctctggattcacctttagtacctattggatgagctgggtccgccaggctccagggaaggggctggaatgggtggccaacataaagcaagatggaagtgaacactactatgtggcctctgtgaggggccgattcaccctctccagagacaacgcccacaactcactgtatctgcaaatgaacagcctgagagccgaggacacggccgtctattattgtgtgagagactgtggtacttccaactgctgggcctactggggccagggaatcctggtcaccgtctcctca

SEQ ID NO: 16099 - DNA, 292 bp, Homo sapiens; identical to SEQ ID NO: 16098
  source 1..292: mol_type = other DNA

SEQ ID NO: 16100 - DNA, 286 bp, Homo sapiens
  source 1..286: mol_type = other DNA
tgcagcctctggatttgacgtcactaccaactacatgagttgggtccgccaggctccagggaggggactggagtgggtctcaattactcatatcgccggtagtacatactacggaggctccgtgaagggcagattcaccgtctccagagacaattccaagaacattgtgtttcttcaaatgaacagcctgagagtcgaggacacggctgtctattactgtgcgacgcgacgaaaggtcttctacatggacgtctggggcaaggggactccggtcaccgtttcgtca

SEQ ID NO: 16101 - DNA, 286 bp, Homo sapiens
  source 1..286: mol_type = other DNA
tgcagcctctggatttgacgtcactaccaactacatgagttgggtccgccaggctccagggagggggctggagtgggtctcaattactcatatcgccggtagtacatactacggaggctccgtgaagggcagattcaccgtctccagagacaattccaagaacattgtgtttcttcaaatgaacagcctgagagtcgaggacacggctgtctattactgtgcgacgcgacgaaaggtcttctacatggacgtctggggcaaggggactccggtcaccgtttcgtca

SEQ ID NO: 16102 - DNA, 280 bp, Homo sapiens
  source 1..280: mol_type = other DNA
tgcagcctctggattcacctttagcagcgctgccatgagttgggtccgccaggctccagggaaggggctggagtgggtctcaactattagtgatactggttttgacacatactacgcagactccgtggagggccggttcaccatctccagagacaactccaagaacgcactgtatctgcaaatgaacagcctgagagccgaggacacggccctttattactgtgcgcaccgtactgcttttgatttctggggtctagggacaatggtcaccgtctcttca

SEQ ID NO: 16103 - DNA, 280 bp, Homo sapiens
  source 1..280: mol_type = other DNA
tgcagcctctggattcacctttagcagcgctgccatgagttgggtccgccaggctccagggaagggcctggagtgggtctcaactattactgatactggttttgacacatggtacgcagactccgtggagggccggttcaccatctccagagacaactccaagaacgcactgtatctgcaaatgaacagcctgagagtcgaggacacggccctttattactgtgcgcaccgtactgcttttgatttctggggtctagggacaatggtcaccgtctcttca

SEQ ID NO: 16104 - DNA, 280 bp, Homo sapiens
  source 1..280: mol_type = other DNA
tgcagcctctggattcacctttagcagcgctgccatgagttgggtccgccaggctccagggaagggcctggagtgggtctcaactattactgatactggttttgacacatggtacgcagactccgtggagggccggttcaccatctccagagacaactccaagaacgcactgtatctgcaaatgaacagcctgagagtcgaggacacggccctttattactgtgcgcaccgtactgcttttgatttctggggtctagggacaatggtcaccgtctcctca

SEQ ID NO: 16105 - DNA, 280 bp, Homo sapiens
  source 1..280: mol_type = other DNA
tgcagcctctggattcacctttagcagcgctgccatgagttgggtccgccaggctccagggaagggcctggagtgggtctcaactattactgatactggttttgacacatggtacgcagactccgtggagcgccggttcaccatctccagagacaactccaagaacgcactgtatctgcaaatgaacagcctgagagtcgaggacacggccctttattactgtgcgcaccgtactgcttttgatttctggggtctagggacaatggtcaccgtctcttca

SEQ ID NO: 16106 - DNA, 295 bp, Homo sapiens
  source 1..295: mol_type = other DNA
tgcagcctctggattcacctttaccacctatgccatggcctgggtccgccaggctccagggaaggggctggagtgggtctcgactattagtgacagtggtgatagaacatactacgcagactccgtgaagggccggttcaccatctccagagacaattccaagagcacgctgcatctgcacatgaacagcctgagagccgaggacacggccgtatattactgtgcgcgaggaccaaccctggtacttgggtacatggacgtctggggcaaagggaccacggtcaccgtctcctca

SEQ ID NO: 16107 - DNA, 295 bp, Homo sapiens
  source 1..295: mol_type = other DNA
tgcagcctctggattcacctttagcacctatgccatggcctgggtccgccaggctccagggaaggggctggagtgggtctcgactattagtgacagtggtgatagaacatactacgcagactccgtgaagggccggttcaccatctccagagacaattccaagagcacgctgcatctgtacatgaacagcctgagagccgaggacacggccgtatattactgtgcgcgaggaccaaccctggtacttgggtacatggacgtctggggcaaagggaccacggtcaccgtctcctca

SEQ ID NO: 16108 - DNA, 295 bp, Homo sapiens
  source 1..295: mol_type = other DNA
tgcagcctctggattcacctttagcacctatgccatggcctgggtccgccaggctccagggaaggggctggagtgggtctcgactcttagtgacagtggtgagagaacatactacgcagactccgtgaagggccggttcaccatctccagagacaattccaagagcacgctgcatctgcacatgaacagcctgagagccgaggacacggccatatattactgtgcgcgaggaccaaccctggtacttgggtacatggacgtctggggcaaagggaccacggtcaccgtctcctca

SEQ ID NO: 16109 - DNA, 295 bp, Homo sapiens
  source 1..295: mol_type = other DNA
tgcagcctctggattcacctttagcacctatgccatggcctgggtccgccaggctccagggaaggggctggagtgggtctcgactattagtgacagtggtgatagaacatactacgcagactccgtgaagggccggttcaccatctccagagacaattccaagagcacgctgcatctgcacatgaacagcctgagagccgaggacacggccatatattactgtgcgcgaggaccaaccctggtacttgggtacatggacgtctggggcaaagggaccacggtcaccgtctcctca

SEQ ID NO: 16110 - DNA, 307 bp, Homo sapiens
  source 1..307: mol_type = other DNA
ttcagcctctgggttcaccgtcagtagcaactacatgacctgggtccgccaggctccagggaaggggctggagtgggtctcacttatttctagcagtggtagcacatactacgcagactccgtgaagggccgattcaccatctccagagacaactccaagaacacgctgtatcttcaaatgaacagcctgagagccgaggacacggccgtatattactgtgcgagagtcattagggagagcagtggctggaatcactactcctacatggacgtctggggcaaagggaccacggtctccgtctcctca

SEQ ID NO: 16111 - DNA, 307 bp, Homo sapiens
  source 1..307: mol_type = other DNA
ttcagcctctgggttcaccgtcagtaccaactacatgacctgggtccgccaggctccagggaaggggctggagtgggtctcacttatttctagtagtggtaccacatactacacagactccgtgaagggccgattcaccatctccagagacaactccaagaacacgctgtatcttcaaatgaacagcctgagagccgaggacacggccgtatatttctgtgcgagagtcattagggagagcagtggctggaatcactactcctacatggacgtctggggcaaagggacctcgctctccgtctcctca

SEQ ID NO: 16112 - DNA, 307 bp, Homo sapiens
  source 1..307: mol_type = other DNA
ttcagcctctgggttcaccgtcagtagcaactacatgacctgggtccgccaggctccagggaaggggctggagtgggtctcacttatttctagcagtggtagcacatactacgcagactccgtgaagggccgattcaccatctccagagacaactccaagaacacgctgtatcttcaagtgaacagcctgagagccgaggacacggccgtatattactgtgcgagagtcattagggagagcagtggctggaatcactactcctacatggacgtctggggcaaagggaccacggtctccgtctcctca

SEQ ID NO: 16113 - DNA, 307 bp, Homo sapiens
  source 1..307: mol_type = other DNA
ttcagcctctgggttcaccgtcagtaccaactacatgacctgggtccgccaggctccagggaaggggctggagtgggtctcacttatttctagcagtggtaccacatactacgcagactccgtgaagggccgattcaccatctccagagacaactccaagaacacgctgtatcttcaaatgaacagcctgagagccgaggacacggccctatattactgtgcgagagtcattagggagagcagtggctggaatcactactcctacatggacgtctggggcaaagggaccacggtctccgtctcctca

SEQ ID NO: 16114 - DNA, 280 bp, Homo sapiens
  source 1..280: mol_type = other DNA
tgcagcctctggattcaccttcagtaactatctcatgaactgggtccgccaggctccagggaaggggctggagtgggtttcatacattagtgatagtagtagtgccatgtcctactcagactctgtgaagggccgattcaccatctccagagacaatgccaagaactcactgtatctgcaaatgaacagcctgagagacgaggacacggctgtgtattactgtgtgagagatcactactttgactactggggccagggaaccctggtcaccgtctcctca

SEQ ID NO: 16115 - DNA, 280 bp, Homo sapiens
  source 1..280: mol_type = other DNA
tgcagcctctggattcaccttcagtagctatctcatgaactgggtccgccaggctccagggaaggggctggagtgggtttcatacattagtgatagtagtagtgccatgtcctacgcagactctgtgaagggccgattcaccatctccagagacaatgccaagaactcactgtatctgcaaatgaacagcctgagagacgaggacacggctgtgtattactgtgtgagagatcactactttgactactggggccagggaaccctggtcaccgtctcctca

SEQ ID NO: 16116 - DNA, 292 bp, Homo sapiens
  source 1..292: mol_type = other DNA
tgcagcctctggattcaccttcatgacttatgaattcaactgggtccgccaggctccagggaggggcctagagtggattgcatacataagtagtcttggaagtaccattcactactcagactctgcgaagggccgattcaccatctccagagacaacgccaaggactcactgtatctgcaaatgaccagcctgagacccgacgacacggctatctattactgtgcgagaggccgggcgattattacggggattgacttttggggccagggaaccctggtcaccgtctcctca

SEQ ID NO: 16117 - DNA, 292 bp, Homo sapiens
  source 1..292: mol_type = other DNA
tgcagcctctggattcaccttcatgacttatgaattcaactgggtccgccaggctccagggaggggcctagagtggattgcatacataagtagtcttggaagtaccattcactactcagactctgcgaagggccgattcaccatctccagagacaacgccaaggactcactgtatctgcaaatgaccagcctgagacccgacgacacggctatctattactgtgcgagaggccgggcaattattacggggattgacttttggggccagggaaccctggtcaccgtctcctca

SEQ ID NO: 16118 - DNA, 292 bp, Homo sapiens
  source 1..292: mol_type = other DNA
tgcagcctctggattcaccttcatgacttatgaattcaactgggtccaccaggctccagggaggggcctagagtggattgcatacataagtagtcttggaagtaccattcactactcagactctgcgaagggccgattcaccatctccagagacaacgccaaggactcactgtatctgcaaatgaccagcctgagacccgacgacacggctatctattactgtgcgagaggccgggcaattattacggggattgacttttggggccagggaaccctggtcaccgtctcctca

SEQ ID NO: 16119 - DNA, 292 bp, Homo sapiens; identical to SEQ ID NO: 16117
  source 1..292: mol_type = other DNA

SEQ ID NO: 16120 - DNA, 292 bp, Homo sapiens
  source 1..292: mol_type = other DNA
tgcagcctctggattcaccttcatgacttatgaattcaactgggtccgccaggctccagggaggggcctagagtggattgcatacataagtagtcctggaagtaccattcactactcagactctgcgaagggccgattcaccatctccagagacaacgccaaggactcactgtatctgcaaatgaccagcctgagacccgacgacacggctatctattactgtgcgagaggccgggcaattattacggggattgacttttggggccagggaaccctggtcaccgtctcctca

SEQ ID NO: 16121 - DNA, 292 bp, Homo sapiens
  source 1..292: mol_type = other DNA
tgcagcctctggattaaccttcatgacttatgaattcaactgggtccgccaggctccagggaggggcctagagtggattgcatacataagtagtcttggaagtaccattcactactcagactctgcgaagggccgattcaccatctccagagacaacgccaaggactcactgtatctgcaaatgaccagcctgaaacccgacgacacggctatctattactgtgcgagaggccgggcaattattacggggattgacttttggggccagggaaccctggtcaccgtctcctca

SEQ ID NO: 16122 - DNA, 292 bp, Homo sapiens
  source 1..292: mol_type = other DNA
tgcagcctctggattcaccttcatgacttatgaattcaactgggtccgccaggctccagggaggggcctagagtggattgcatacataagtagtcttggaagtaccattcactactcagactctgcgaagggccgattcaccatctccagagacaacgccaaggactcactgtatctgcaaatgaccagcctgagacccgacgacacggctatctattactgtgcgagaggtcgggcaattattacggggattgacttttggggccagggaaccctggtcaccgtctcctca

SEQ ID NO: 16123 - DNA, 297 bp, Homo sapiens
  source 1..297: mol_type = other DNA
gcttctggggactccttcaagaactatggtatcaactgggtgcggcaggcccctggacaagggcttgagtggatgggagggatcatccctctgtttaatacagcggactacgcacagaagtttctgggcaggatcacaatcaccgcggacgaattcaggagcacagcctacatggaggtgaccagcctgaaatctgaggacacggccgtctattactgtgcgagagccgctgtggtagctgcaagaagaaactggttcgactcctggggccagggaaccctggtcaccgtctcctca

SEQ ID NO: 16124 - DNA, 297 bp, Homo sapiens
  source 1..297: mol_type = other DNA
gcttctggggactccttcaagaactatggtatcaactgggtgcgacaggcccctggacaagggcttgagtggatgggagggatcatccctctgtttaatacagcggactacgcacagaagtttctgggcaggatcacaatcaccgcggacgaattcaggagcacagcctacatggaggtgaccagcctgaaatttgaggacacggccgtctattactgtgcgagagccgctgtggtagctgcaagaagaaactggttcgactcctggggccagggaaccctggtcaccgtctcctca

SEQ ID NO: 16125 - DNA, 307 bp, Homo sapiens
  source 1..307: mol_type = other DNA
tgcagcctctggcctcattgtcagtagcacttacatgagctgggtccgccaggctccagggaaggggctggagtgggtctcagttatttatagggatagtaccacatactacgcagactccgtgaagggccgattcaccatctcaagagacaactccaagaacacactctttcttcaaatggacagcctgacagccgaggacacggccatatattactgtgtgagaggtggaggggcatattgtggtggcgactgtctgaggactcttgatctctggggccaagggacaatggtcaccgtctcttca

SEQ ID NO: 16126 - DNA, 307 bp, Homo sapiens
  source 1..307: mol_type = other DNA
tgcagcctctgggttcaccgtcagtaggacctacatgagctgggtccgccaggctccagggaaggggctggagtggatctcagttatttatagatatggtgacacatactacgcagagtccgtgaagggccgattcatcatctccagagacagttccaagaacacactctttcttcaaatgggcagcctgacagccgaggacacggccatatattattgtgtgagaggtggaggggcatattgtggcggtgactgtcttaggactcttgatctatggggccaagggacaatggtcaccgtctcttca

SEQ ID NO: 16127 - DNA, 301 bp, Homo sapiens
  source 1..301: mol_type = other DNA
tgcagcctctggattcgccttcagtagctatgacatgcactgggtccgccaggctccaggcaaggggctggagtgggtggcagttatttcgcctgatggaaattctaagaactatgcagactccgtgaagggccgattcaccgtttccagagacaattccaagaacacgctttatctgcaaatgaacatcctgagaactgaggacacggctttgtattactgtgcgaaaaaaacagtggtgggaattggtaggggtgggctagactacgggggccagggaagcctggtcaccgtctcctca

SEQ ID NO: 16128 - DNA, 301 bp, Homo sapiens
  source 1..301: mol_type = other DNA
tgcagcctctggattcgccttcagtagctatgacatgcactgggtccgccaggctccaggcaaggggctggagtgggtggcagttatttcgcctgatggaaattctaagaactatgcagactccgtgaagggccgattcaccgtttccagagacaattccaagaacacgctttatctgcaaatgaacagcctgagaactgaggacacggctttgtattactgtgcgaaaaaaacagtggtgggaattggtaggggtgggctagactacgggggccagggaagcctggtcaccgtctcctca

SEQ ID NO: 16129 - DNA, 301 bp, Homo sapiens; identical to SEQ ID NO: 16128
  source 1..301: mol_type = other DNA

SEQ ID NO: 16130 - DNA, 307 bp, Homo sapiens
  source 1..307: mol_type = other DNA
tgaagtctctggattcacctttagcaaatatgccatgagctgggtccgccagactccagggaagggactgcagtgggtctcaggcatgaccggtagtggtaatgacacatattacgcagactctgtgaagggccggttcaccatctccggagacacttccaagaacacggtgtatctactaatggaccgcctgagagtcgacgacacggccgtatattactgtgcgagcggcggagtgccagatggaaactattactactactacatggacggctggggcaaagggaccatggtcaccgtctcctca

SEQ ID NO: 16131 - DNA, 307 bp, Homo sapiens
  source 1..307: mol_type = other DNA
tgaagtctctggattcacctttagcagatatgccatgagctgggtccgccagactccagggaagggactgcagtgggtctcaggtatgaccggtagtggtaatgacacatactacgcagactctgtgaagggccggttcaccatctccggagacacttccaagaacacggtgtatctgttaatggaccgcctgagagtcgaggacacggccgtctattactgtgcgagcggaggagtaccagatggaaactattactactactacatggacggctggggcaaagggaccatggtcaccgtctcctca

SEQ ID NO: 16132 - DNA, 292 bp, Homo sapiens
  source 1..292: mol_type = other DNA
cactgtctctggtggctccgtcagcagtaatagtttctactggaactggatccggcagcccccagggaagggactggagtggattgggtatatctattacactgggagcaccaactacaacccctccctcaagagtcgagtcaccatatcagtagacacgtccaagaaccagttctccctgaagctgagttctgtgaccgctgcagacacggccgtctattactgtgcgagcgggggacagattaccactattgagtactggggccagggaaccctggtcaccgtctcctca

SEQ ID NO: 16133 - DNA, 292 bp, Homo sapiens
  source 1..292: mol_type = other DNA
cactgtctctggtggctccgtcagcagtaatagtttctactggaactggatccggcagcccccagggaagggactggagtggattgggtatatctattacactgggagcaccaactacaacccctccctcaagagtcgagtcaccatatcagtagacacgtccaagaacctgttctccctgaagctgagttctgtgaccgctgcagacacggccgtctattactgtgcgagcgggggacagattaccactattgaatactggggccagggaaccctggtcaccgtctcctca

SEQ ID NO: 16134 - DNA, 333 bp, Homo sapiens
  source 1..333: mol_type = other DNA
acacagaccctcacactgacctgcgccttctctgggttctcactcaatactagtggaatgtgtgtgagctggctccgtcagcccccagggaaggccctggagtggcttgcactcgttgattgggatgatgataaatactacagcacatctctgaagactaggctcaccatctccaaggacacctccaaaaaccaggtggtccttacactgaccaacatggaccctgtggacacagccacgtattactgtgcacggaaatatgataaccggatggatggattgggcggggcttttgatatttggggccaagggacaacggtcaccgtctcttca

SEQ ID NO: 16135 - DNA, 333 bp, Homo sapiens
  source 1..333: mol_type = other DNA
acacagaccctcacactgacctgcaccttctctgggttctcactcaacactagtggaatgtgtgtgagctggatccgtcagcccccagggaaggccctggagtggcttgcagtcattgattgggatgatgataaatactacagcacatctctgaagaccaggctcaccatctccaaggacacctccaaaaaccaagtggtccttataatgaccaacatggaccctgtggacacaggcacatattactgtgcacggaaatatgataaccgaatggatggactgggcggggcttttgatatctggggccaagggacaatggtcaccgtctcttca

SEQ ID NO: 16136 - DNA, 333 bp, Homo sapiens
  source 1..333: mol_type = other DNA
acacagaccctcacactgacctgtaccttctctgggttctcgctcaacactagtggaatgtgtgtgagctggatccgtcagcccccagggaaggccctggagtggcttgcactcattgattgggatgatgataaatactacatcacatctctgaagaccaggctcaccatctccaaggacctctccaagaagcaggtggtcctcacaatgaccaacatggaccctgcggacacagccacgtattactgtgcacggaaatatgataaccggatggatggactaggcggggcttttgatatctggggccaggggacattggtcaccgtctcttca

SEQ ID NO: 16137 - DNA, 310 bp, Homo sapiens
  source 1..310: mol_type = other DNA
tacagcctctggattcacctttagcgaccatgccatgaactgggtccgccaggctccaggaaaggggctggaatgggtctcaattatgagtggtgttagtgagaccacatactacgcagaccccgtgaagggccggttcaccatattcagagacaattccaagaacacgctgtatctacaaatgaacagcctaagagtcgaggacacggccgtatatttctgtgcgaaaagtcaggggagcaacagctggagcttctactacgactacatggacgtctggggcaaagggaccacggtcaccgtctcctca

SEQ ID NO: 16138 - DNA, 310 bp, Homo sapiens
  source 1..310: mol_type = other DNA
tgcagcctctggattcaccttcagcgactatgccatgaactgggtccgccaggctccaggaaaggggctggaatgggtctcaattatgagtggtgttagtgagaccacatactacgcagaccccgtgaagggccggttcaccatcttcagagacaattccaagaacacgctgtatctacaaatgaacagcctaagagtcgaggacacggccgtatatttctgtgcgaaaagtcaggggagcaacagctggagcttctactacgactacatggacgtctggggcaaagggaccacggtcaccgtctcctca

SEQ ID NO: 16139 - DNA, 310 bp, Homo sapiens
  source 1..310: mol_type = other DNA
tgcagcctctggattcaccttcagtacctatagcatgaattgggtccgccaggctccagggaaggggctggagtgggtttcatacattagtagtagtagtagtaccatatattacgcagactctgtgaagggccgattcaccatctccagagacaatgccaagaagtcactctatctgcaaatgaacagcctgagagacgaggacacggctgtgtattactgtgcgagaggggggaacgatttttggagtggttacacggacgaagatttcgacccctggggccagggaaccctggtcaccgtctcctca

SEQ ID NO: 16140 - DNA, 310 bp, Homo sapiens
  source 1..310: mol_type = other DNA
tgcagcctctggattcaccttcagtagttatagcatgaactgggtccgccaggctccagggaaggggctggagtggatttcatacattagtagtagtagtagtaccatatactacgcagactctgtgaagggccgattcaccatctccagagacaatgccaagaagtcactgtatctgcaaatgaacagcctgagagacgaggacacggctgtgtattactgtgcgagaggggggaacgatttttggagtggttacacggacgaagatttcgacccctggggccagggaaccctggtcaccgtctcctca

SEQ ID NO: 16141 - DNA, 292 bp, Homo sapiens
  source 1..292: mol_type = other DNA
cactgtctctggtggctccatcggtaactactactggagctggatccggcagcccccggggaagggactggagtggattggatatatctattatactgggagcaccaactacaacccctccctcaagagtcgagtcaccatatcagtggacacgtccaagaaccagttctccctgagcctgagctctgtgaccgctgcggacacggccgtatattactgtgcgaaaggacgcagtggtttttatacagccttcgacccctggggccagggaaccctggtcaccgtctcctca

SEQ ID NO: 16142 - DNA, 292 bp, Homo sapiens
  source 1..292: mol_type = other DNA
cactgtctctggtggctccatcggtaactactactggagctggatccggcagcccccggggaagggactggagtggattggatatatctattatactgggagcaccaactacaacccctccctcaagagtcgagtcaccatatcagtggacacgtccaagaaccagttctccctgagcctgaggtctgtgaccgctgcggacacggccgtatattactgtgcgaaaggacgcagtggtttttatacagccttcgacccctggggccagggaaccctggtcaccgtctcctca

SEQ ID NO: 16143 - DNA, 289 bp, Homo sapiens
  source 1..289: mol_type = other DNA
ttcagcctctggattcaccttcagtgactatgctatgcactgggtccgccaggctccagggaagggactggaacatgtttcatctgttagtagtgatgggcataccacatactacgcagactcagtgaagggcagatttaccatctccagagacaattccaagaattcgctgtatctccaaatgagcagtctgagagctggggacacggctgtgtattactgtgtgagggcgctgcaatgggactatttcgacgactggggccagggaaccctggtcaccgtctcctca

SEQ ID NO: 16144 - DNA, 289 bp, Homo sapiens
  source 1..289: mol_type = other DNA
ttcagcctctggattcaccttcagtgactatgctatgcactgggtccgccaggctccagggaagggactggaacatgtttcatctgttagtagtgatgggcataccacatactacgcagactcagtgaagggcagattcaccatctccagagacaattccaagaattcgctgtatctccaaatgagcagtctgagagctggggacacggctgtgttttactgtgtgagggcgctgcaatgggactatttcgacgactggggccagggaaccctggtcaccgtctcctca

SEQ ID NO: 16145 - DNA, 319 bp, Homo sapiens
  source 1..319: mol_type = other DNA
tgcagcgtctggattaaccttcagtagtcataccatgcactgggtccgccaggctccaggcaaggggctggagtgggtggcagcaatatggtctgatggcattaataaatattatgcagactccgtgaagggccgattctccatctccagagacaattccaagagcgcgttgtatctggaactgaacaacctgagaggcgaggacacggctgtctactactgtgcgagagccccgggggaggggacatattacgatatattgaccggtctgtcctacatggacgtctggggcaaagggaccacggtcaccgtctcctca

SEQ ID NO: 16146 - DNA, 319 bp, Homo sapiens
  source 1..319: mol_type = other DNA
tgcagcgtctggattcacgttcagtagccatacaatgcactgggtccgccaggctccaggcaaggggctggagtgggtggcagctatatggtctgatgcaattaataaatactatgcagactccgtgaagggccgattcaccatctccagagacaattccaacaacacgctgtatctgcaaatggacagcctgggagccgaggacacggctgtctattactgtgcgagagccccgggggaggggacatattacgatattttgactggtctgtcgtacatggacgtctggggcaaagggaccacggtcaccgtctcctca

SEQ ID NO: 16147 - DNA, 301 bp, Homo sapiens
  source 1..301: mol_type = other DNA
tgcagcctctggattcaccgtcagtagtaactacatgagctgggtccgccaggctccagggaaggggctggagtgggtctcaattatttatagcggtggtcacacatactacgcagactccgtgaagggcagattcaccatctccagagacaattccaagaacacgctgtatcttcaaatgaacagcctgagagccgaggacacggctgtgtattactgtgcgagagatggtggtaatggtgtatcctactactactacatggacgtctggggcaaagggaccacggtcaccgtctcctca

SEQ ID NO: 16148 - DNA, 301 bp, Homo sapiens
  source 1..301: mol_type = other DNA
tgcagcctctggattcaccgtcagtagcaactacatgagctgggtccgccaggctccagggaggggactggagtgggtctcaattatttatagcggtggtagcacatactacgcagactccgtgaagggcagattcaccatctccagagacaattccaagaacacggtgtatcttcaaatgaacagcctgagagccgaggacacggctgtgtattactgtgcgagagatggtggtaatggtgtgtcctactactactacatggacgtctggggcaaagggacgacggtcaccgtctcctca

SEQ ID NO: 16149 - DNA, 307 bp, Homo sapiens
  source 1..307: mol_type = other DNA
tgcagcctctggactcacttttagtagctattggatgagttgggtccgccaggctccagggaaggggctggagtgggtggccaacataaaacaagatggaagtgagaaatattatgtggactctgtgaagggccgattcaccatctccagagacaactccaagaactcactgtatctgcaaatgaacagcctgagagccgaggacacggccgtgtatttctgtgcgagagaatcattgtgtagtagtcgtaggtgcccaccacggttcgacctctggggccagggaaccctggtcaccgtctcctca

SEQ ID NO: 16150 - DNA, 307 bp, Homo sapiens
  source 1..307: mol_type = other DNA
tgcagcctctggactcacttttagtagctattggatgagttgggtccgccaggctccagggaaggggctggagtgggtggccaacataaagcaagatggaagtgagaaatattatgtggactctgtgaagggccgattcaccatctccagagacaactccaagaactcactgtatctgcaaatgaacagcctgagagccgaggacacggccgtgtatttctgtgcgagagaatcattgtgtagtagtcgtaggtgcccacctcggttcgacctctggggccagggaaccctggtcaccgtctcctca

SEQ ID NO: 16151 - DNA, 307 bp, Homo sapiens
  source 1..307: mol_type = other DNA
tgcagcctctgggttcaccgtcagtagcaactacatgagctgggtccgccaggctccagggaaggggctggagtgggtctcagttattcatagaggtggtagcacatactacggagactccgtgaagggccgattcaccatctccagagacaattccaagaacacgctgtaccttcaaatgaacagcctgacagccgaggacacggccgtgtattactgtgcgagagatttgcgccgcggggtcgggaggaattactactactacatggacgtctggggcaaagggaccacggtcaccgtctcctca

SEQ ID NO: 16152 - DNA, 307 bp, Homo sapiens
  source 1..307: mol_type = other DNA
tgcagcctctgggttcaccgtcagtagcaactacatgagctgggtccgccaggctccagggaagggactggagtgggtctcagttattcatagaggtggtagcacatactacgcagactccgtgaagggccgcttcaccatctccagagacaattccaagaacacgctgtatcttcaaatgaacagcctgagagtcgaagacacggccgtgtattactgtgcgagagatttgcgccgcggggtcgggaggaactactattactacatggacgtctggggcaaagggaccacggtcaccgtctcctca

SEQ ID NO: 16153 - DNA, 283 bp, Homo sapiens
  source 1..283: mol_type = other DNA
tgcagcctctggattcaccttcagtgactactacatgagctggatccgccaggctccggggaaggggctggagtgcgttgcatacattagtagtagtggtactcccatgtactacgcagactctgtgaagggccgattcaccatctccagggacaacgccaagaactcattgtatctgcaaatgaacagcctgagagccgaggacacggccgtgtattactgtgcgaaaaataggttcgacttactcctctggggccagggaaccctgctcaccgtctcctca

SEQ ID NO: 16154 - DNA, 283 bp, Homo sapiens
  source 1..283: mol_type = other DNA
tgcagcctctggattcaccttcagtgactactacatgacctggatccgccaggctccggggaaggggctggagtgcgtttcatacattagtagtactggtactcccatgtactacgcagactctgtgcagggccgattcaccatctccagggacaacgccaagaactcattgtatctgcacatgaacagcctgagagccgaggacacggccgtgtattactgtgcgaaaaataggttcgacttactcctctggggccagggaaccctggtcaccgtctcctca

SEQ ID NO: 16155 - DNA, 279 bp, Homo sapiens
  source 1..279: mol_type = other DNA
gcttctggatacagcttcactacttatggtattcattgggtgcgccaggcccccggacaagcgcttgagtggctgggatggatcaacgttggcggtggaatcacaaaatattcagagaacttccagggcagagtcaccatgaccagggaaacatccgcgaccacagcctacatggagctgaccgatttgagacatgaagacatggctgtgtattattgtgtgagggggggtggcacggtcgaattctggggccagggaaccctggtcaccgtctcctca

SEQ ID NO: 16156 - DNA, 279 bp, Homo sapiens
  source 1..279: mol_type = other DNA
gcttctggatacaccttcactgcctatggtatgcattggctgcgccaggcccccggacagaggcctgagtggatggcctggatcagcactgccactgggaacacaatgtactccgagaacttccagggcagagtcaccattaccagggaaacatccgcgagcacagcctacatggagctgaccagcctgacatctgaagacacggctgtctatttctgtgtgagggggggtggtacggtcgagttctggggccagggaaccctggtctccgtctcctca

SEQ ID NO: 16157 - DNA, 304 bp, Homo sapiens
  source 1..304: mol_type = other DNA
tgcagcctctggattcacctttagcagctatgccatgagctgggtccgccaggctccagggaaggggctggagtgggtctcagctattagtggtagtggtggtagcacatactacgcagactccgtgaagggccggttcaccatctccagagacaactccaagaacacgctgtatctgcaaatgaacagcctgagagccgaggacacggccgtatattactgtgcgaaagtacgaggatatagtggctacgatttgtactacatggacgtctggggcaaagggaccacggtcaccgtctcctca

SEQ ID NO: 16158 - DNA, 304 bp, Homo sapiens
  source 1..304: mol_type = other DNA
tgcagcctctggattcacctttaccacctatgccatgagctgggtccgccaggctccagggaaggggctggagtgggtctcagatattagtggtagtggtggtagcacatactacgcagactccgtgaagggccggttcaccatctccagagacaattccaagaacacgctgtatctgcaaatgaacagcctgagagccgatgacacggccgtatattactgtgcgaaagtacgaggatatagtggctacgatttgtactacatggacgtctggggcaaagggaccacggtcaccgtctcctca

SEQ ID NO: 16159 - DNA, 306 bp, Homo sapiens
  source 1..306: mol_type = other DNA
gcttctggaagtacctttaccaattatgctatcagctgggtgcgacaggcccctggacaagggctggagtggatgggagggatcatccctatgtatgataccacaacctacgcacagaagttcaagggcagagtcacgattaccgcggacgaatccacaagcacagcctacatggagctgagcagcctgacatctgacgacacggccgtatattactgtgtgagggcgcgcactatgtatgattcggtgagctattggaactacatggacgtctggggcaaagggaccgcggtcaccgtctcctca

SEQ ID NO: 16160 - DNA, 306 bp, Homo sapiens
  source 1..306: mol_type = other DNA
gcctcaggaagtagtttcaataattatgccattagctgggtgcgccaggcccctggacaagggctggagtggatgggagggatcatcccaatgtttgatacaacaacctacgcacagaagttcaagggcagagtcacgattaccgcggacgaatccacgatgacagcctacatggagctgaacagcctgacatctgacgacacgggcgtgtattactgtgtgagggcgcggaccatgtatgattcggtgagctattggaactacatggacgtctggggcaaagggactgcggtcaccgtctcctca

SEQ ID NO: 16161 - DNA, 307 bp, Homo sapiens
  source 1..307: mol_type = other DNA
ggcctctggaaatacctttaacaattatgctatcagttgggtgcgacaggcccctggacaagggctggagtggatgggagggatcatccctatgtttggtacaacaagctacgcacagagattcaagggcagagtcacgattaccgcggacgaatccacgatgacagccttcatggagctgagcagcctgacatctgacgacacggccgtatattactgtgtgagggcgcggaccatgtatgattcggtgagctattggaactacatggacgtctggggcaatgggactgcggtcaccgtctcctca

SEQ ID NO: 16162 - DNA, 307 bp, Homo sapiens
  source 1..307: mol_type = other DNA
tgcagcctctggattcactttcactaacgcctggatgagttgggtccgccaggctccagggaaggggctggagtgggttggccgtattaaaaccaaaggtgaaggtgggccaacagactacgctgcacccgtgaaagacagattcatcatctcaagggatgactcagaagacacgctctatctgcaactgaacaacctgaaaaccgaggacacagccctgtattactgtaccacagatcgctatggtgggacctcaggtgcccaatttgactactggggccagggaaccctggtcaccgtctcctca

SEQ ID NO: 16163 - DNA, 307 bp, Homo sapiens
  source 1..307: mol_type = other DNA
tgcagcctctggattcactttcattaacgcctggatgagttgggtccgccaggctccagggaaggggctggagtgggttggccgtattaaaagcaaaagtgatggtggggcaacacactacgctgcatccgtgaaagacagagtcaccatctcaagagatgactctgcggacacgctgtatctgcaactgaacaacctgaaaaccgaggacacagccctgtattattgtaccacagatcgctatggtgggacctcaggtgcccagtttgactactggggccagggaaccctggtcaccgtctcctca

SEQ ID NO: 16164 - DNA, 307 bp, Homo sapiens
  source 1..307: mol_type = other DNA
tgcagcctctggattcactttcattaacgcctggatgagttgggtccgccaggctccagggaaggggctggagtgggttggccgtattaaaagcaaaggtgatggtggggcaatagactacgctgctcccgtgaaagacagatttaggatctcaagagatgactcagaagacaccctgtatctgcatctgaactacctgaaaaccgaggacacagccctatattattgtaccacagatcgctatggtgggacctcaggtgcccagtttgactactggggccagggaaccctggtcaccgtctcctca

SEQ ID NO: 16165 - DNA, 298 bp, Homo sapiens
  source 1..298: mol_type = other DNA
cactgtctctggtggctccatcagaagtaggaattacaaatggggctggatccgccagcccccagggaaggggcttgaatggattgggacagtcttttatggtggggacaccgactacgacccgtccctcaagagtcgagtcaccatatccctagacacctccaagaaccagttctccctgaccgtgaattctgtgaccgccgcagacgcggctgtgtattactgcgcgagacagtcctcttcagttgtggccctgtttgactactggggccagggaaccctggtcaccgtctcctca

SEQ ID NO: 16166 - DNA, 298 bp, Homo sapiens
  source 1..298: mol_type = other DNA
cactgtctctggtggctccatcagaagtaggaattacaaatggggctggatccgccagcccccagggaaggggcttgaatggattgggacagtcttttatggtgggaacaccgactacgacccgtccctcaagagtcgagtcaccatatccctagacacctccaagaaccagttctccctgaccgtgaattctgtgaccgccgcagacgcggctgtgtattactgcgcgagacagtcctcttcagttgtggccctgtttgactactggggccagggaaccctggtcaccgtctcctca

SEQ ID NO: 16167 - DNA, 313 bp, Homo sapiens
  source 1..313: mol_type = other DNA
cacagtcgccggattcagtctagaagactttggcctgagttgggtccgccagttgcccgggaagggactcgagtgggtctccggtcttaagttgactgacggcggggcgcggtacgcggactccgtgaaggggcgattcaccatctccagagacccctccaagaacattgcctacttgcatatgacaagtctgacagacgacgacacggccttgtatcgctgtgcgcgcgagaagcgagaacctgctggcggcctctattactactattccatggacgtctggggcaaggggaccacagtcaccgtctccgca

SEQ ID NO: 16168 - DNA, 313 bp, Homo sapiens
  source 1..313: mol_type = other DNA
tacagtcgccggattcagtctggaggactttggcctgagttgggtccgccagttgccggggaagggcctcgagtgggtctccggtcttaagctgactgacggcggggcacgttacgcggactccgtgaaggggcgattcaccgtctccagagacccctccaagaacattgtctacctgcatatgacaagtctgacagacgacgacacggccttatatcgctgtgcgcgcgagaagcgagaacctgctggcggcctctattactattattccatggacgtctggggcaaggggaccacagtcgtcgtctccgta

SEQ ID NO: 16169 - DNA, 298 bp, Homo sapiens
  source 1..298: mol_type = other DNA
cgcagcctctggattctccttcagtagttatattatacactgggtccgccaggctccgggcaaggggctggagtgggtggcagttttctcaagggatgaaaggtttgaattctatggagactccgtgaagggccgattcaccatctccagagacaattccaagaataccctgtatctgcaaatgaacagcctgagagatgaggacacggctgtgtatttctgtgcgagagaagataagaacaactttgataatgcttttgatgtctggggccaagggacaatggtcaccgtctcttca

SEQ ID NO: 16170 - DNA, 298 bp, Homo sapiens
  source 1..298: mol_type = other DNA
cgcagcctctggattctccttcagtagttatattatacactgggtccgccaggctccaggcaaggggctggagtgggtggcagttttctcaagggatgaaaggtttgaattctatggagactccgtgaagggccgattcaccatctccagagacaattccaagaataccctgtatctgcaaatgaacagcctgagagatgaggacacggctgtgtatttctgtgcgagagaagataagaacaactttgataatgcttttgatgtctggggccaagggacaatggtcaccgtctcttca

SEQ ID NO: 16171 - DNA, 298 bp, Homo sapiens
  source 1..298: mol_type = other DNA
tgcagcctctggattcactttcaataacgcctggatgagctgggtccgccaggctccagggaaggggctggagtgggttggccgtattaaaagcaaagctgatggtgggacagcagactacgttgtacccgtggaaggcagattcaccatctcaagagatgattcaaaaaacacgctgtatctgcaaatgaacagcctgaaaaccgacgacacagccgtgtattactgtaccacagatccttatcatggttattcattttactactggggccagggaaccctggtcaccgtctcctca

SEQ ID NO: 16172 - DNA, 298 bp, Homo sapiens
  source 1..298: mol_type = other DNA
tgcagcctctggattcactttcaataacgcctggatgagctgggtccgccaggctccagggaaggggctggagtgggttggccgtatcaaaagcaacactgatggtgggacagcagactacgttgtacccgtgaaaggcagattcaccatctcaagagatgattcaaaaaacacgctgtatctgcaaatgaacagcctgaaaaccgaggacacagccgtttattactgtaccacagatccttatcatggttattcattttactactggggccagggaaccctggtcaccgtctcctca

SEQ ID NO: 16173 - DNA, 295 bp, Homo sapiens
  source 1..295: mol_type = other DNA
cactgtctctggtgactccgtcagcagtagtagttactactggggctggatccgccaggccccagggaaggggctggagtggattgggagtatttactacagtgggagcacctactacgccccgtccctcaagagtcgagtcaccatatatgtagacatgtccaagaaccacttctccctgaggctgagctctgtgaccgccgcagacacgtctgtttattattgtgcgagagttgtctggtacgacggatggttcgactcgtggggccagggaaccctggtcaccgtctcctca

SEQ ID NO: 16174 - DNA, 295 bp, Homo sapiens
  source 1..295: mol_type = other DNA
cactgtctctggtggctccgtcagcagtagtagttactactggggctggatccgccaggccccagggaaggggctggagtggattgggagtatttactatagtgggagcacctactacgccccgtccctcaagagtcgagtcaccatatatgtagacatgtccaagaaccacttctccctgaggctgagctctgtgaccgccgcagacacgtctgtttattactgtgcgagagttgtctggtacgacggatggttcgactcgtggggccagggaaccctggtcaccgtctcctca

SEQ ID NO: 16175 - DNA, 295 bp, Homo sapiens; identical to SEQ ID NO: 16173
  source 1..295: mol_type = other DNA

SEQ ID NO: 16176 - DNA, 295 bp, Homo sapiens
  source 1..295: mol_type = other DNA
cactgtctctggtggctccgtcagcagtagtagttactactggggctggatccgccaggccccagggaaggggctggagtggattgggagtatttactacagtgggagcacctactacgccccgtccctcaagagtcgagtcaccatatatgtagacatgtccaagaaccacttctccctgaggctgagctctgtgaccgccgcagacacgtctgtttattattgtgcgagagttgtctggtacgacggatggttcgactcgtggggccagggaaccctggtcaccgtctcctca

SEQ ID NO: 16177 - DNA, 295 bp, Homo sapiens
  source 1..295: mol_type = other DNA
cactgtctctggtggctccataagcagtagtagttactattggggctggatccgccaggccccagggaaggggctggagtggattgcaagtatctattatagtgggagcacctactacgccccgtccctcaagagtcgagtcaccataaaagtagacatgtccaagaaccacttctccctgaggctgagctctgtgaccgccgcagacacgtctgtttattactgtgcgagagttgtctggtacgacggatggttcgactcctggggccagggaaccctggtcaccgtctcctca

SEQ ID NO: 16178 - DNA, 283 bp, Homo sapiens
  source 1..283: mol_type = other DNA
cggtgtccacggtggctccgtcagtagtgttcactggtggagttggatccgccagtccccagagaaggggctggagtggattggggaagtccaccataatgggagttccaactacaacccgtccctcaagagtcgagtcaccatgtcagtggacaagtccaagaaccagttctccctgaagttgaattctgtgaccgccgcagacacggccgtgtattactgtgcgagagaccacggtgactctggccactggggccagggaaccctggtcaccgtctcctca

SEQ ID NO: 16179 - DNA, 283 bp, Homo sapiens
  source 1..283: mol_type = other DNA
cgctgtctctggtggctccatcaggagtccttactggtggagttgggtccgccagaccccagggaagggcctggagtggattgggagagtccatcataatgggagcaccacctacaatccgtccctcaggactcgagtcaccatgtcagtagacttggcccataaccagttctccctgaacatgaagtctctgaccgccgcggacacggccgtctattattgtgcgagagaccacggtgactccggccattggggccagggaaccctggtcaccgtctcctca

SEQ ID NO: 16180 - DNA, 283 bp, Homo sapiens
  source 1..283: mol_type = other DNA
cgctgtctctggtgtctccatcaacaatgatcactggtggagttggatccgccagcccccaggtatgaggctggagtggattggtaaaatccatcataatgggagcaccgactacaatccgtccctcaggagtcgagtcacaatatcactggacaagtccatgaacctactctccctgaagctgacgtctgtgagcgccactgacacggccgtgtactactgtgcgagagaccacggtgactctggtcactggggccagggaaccctggtcaccgtctcctca

SEQ ID NO: 16181 - DNA, 283 bp, Homo sapiens
  source 1..283: mol_type = other DNA
cgatgtctctggtgtctccatcagcagtgatcactggtggagttggatccgccagcccccagggaagaggctggaatggattggtaaaatccatcataatgggagcaccgactacaatccgtccctcaagagtcgagtcaccatatcgttggacgagtccaagaaccaattctccctgaagctgacgtctgtgagcgccacagacacggccgtgtactactgcgcgagagaccacggtgactctggtcactggggccagggaagcctggtcaccgtctcctca

SEQ ID NO: 16182 - DNA, 303 bp, Homo sapiens
  source 1..303: mol_type = other DNA
gaggcttctggatacccctttaccacctactggatcggctgggtgcgccagatgcccgagaagggcctggagtggctggggatcatcaatccccgtgactctgagaccagatacagtccgtccctccagctccaggtcaccatgtcagtcgacaagtccgtcagcactgcctacctacagtggactaggctgaaggtctcggacagcgccatgtattactgtgcgagactcttgtttccagttccagccgcgatggcgtacttcgacacctggggccagggaaccctagtcaccgtctccccc

SEQ ID NO: 16183 - DNA, 303 bp, Homo sapiens
  source 1..303: mol_type = other DNA
gaggcttctggatacccctttaccacctactggatcggctgggtgcgccagatgcccgagaagggcctggagtggctggggatcatcaatccccgtgactctgagaccagatatagtccgtccctccagctccaggtcaccatgtcagtcgacaagtccgtcagcactgcctacctacagtggactaggctgaaggtctcggacagcgccatgtattactgtgcgagactcttgtttccagttccagccgcgatggcgtacttcgacacctggggccagggaaccctagtcaccgtctccccc

SEQ ID NO: 16184 - DNA, 319 bp, Homo sapiens
  source 1..319: mol_type = other DNA
tgcagcctctggattcacctttagcagctttgccatgacctgggtccgccaggctccagggaaggggctggagtgggtctcaggtattagtggtagtggtggtagcacatactacgcagagtccgtgaagggccggttcaccatctccagagacaattccaagaacacgctgtatctgcaaatgaacagcctgagagccgaggacacggccgtctattactgtgcgaagtcatattgtagtggtgatagctgctcctccgtctcttactactactacatggacgtctggggcaaagggaccacggtcaccgtctcctca

SEQ ID NO: 16185 - DNA, 319 bp, Homo sapiens
  source 1..319: mol_type = other DNA
tgcagcctctggattcacttttagcagctttgccatgacctgggtccgccaggctccagggaaggggctggagtgggtctcaggtattagtggtagtggtggtaacacatactacgcagagtccgtgaagggccggttcaccatctccagagacaattccaagaacacgttgtttctgcagatgaacagcctgagagccgaggacacggccgtctattactgtgcgaagtcatattgtagtggtgatagctgctcctccgtctcttactactactacatggacgtctggggcaaagggaccacggtcaccgtctcctca

SEQ ID NO: 16186 - DNA, 297 bp, Homo sapiens
  source 1..297: mol_type = other DNA
acttctggttacacctttaccagctatggtatcacctgggtgcgacaggcccctggacaagggcttgagtggatgggatggatcagtgctaacaatggtaacacaaactatgcaccgaaggtccagggcagagtcaccatgaccacagacacatccacgagtacagtttacatggacctgaggagcctcacatctgacgacacggccgtatattactgtgcgaggaccaaacttcattgtggtggggactgctccccgggtaactggggccagggaaccctggtcaccgtctcctca

SEQ ID NO: 16187 - DNA, 297 bp, Homo sapiens
  source 1..297: mol_type = other DNA
acttctggttacacctttaccagctatggtatcacctgggtgcgacaggcccctggacaagggcttgagtggatgggatggatcagtggtaacaatggtaacacaaactatgcacagaaggtccagggcagagtcaccatgaccacagacacatccacgagcacagcctacatggacctgaggagcctcacatctgacgacacggccgtatattactgtgcgaggaccaaacttcattgtggtggtgactgctccccgggtaactggggccagggaaccctggtcaccgtctcctca

SEQ ID NO: 16188 - DNA, 289 bp, Homo sapiens
  source 1..289: mol_type = other DNA
tgcagtctcaggattcaccttcagtgattattggataagttgggtccgccaggctccagggaaggggctggagtgggtggccaacattaatccaggtggaagtgagaaatactatgtggactctgtgaagggccgattcaccatctccagagacaacgccaagaactcactttatctgcaaatgaacagcctgcgagtcgaggatacggctgtatattattgtgtgtgcgacaagaatttcagcccatcaggagtctggggccagggagccctggtcaccgtctcctca

SEQ ID NO: 16189 - DNA, 289 bp, Homo sapiens
  source 1..289: mol_type = other DNA
tgcagtctcaggattcaccttcagtgattattggataagttgggtccgccaggctccagggaaggggctggagtgggtggccaacattaatgcaggtggaagtgagaaatactatgtggactctgtgaagggccgattcaccatctccagagacaacgccaagaactcactttatctgcaaatgaacagcctgcgagtcgaggatacggctgtatactattgtgtgtgcgacaagaatttcagcccatcaggagtctggggccagggaaccctggtcaccgtctcctca

SEQ ID NO: 16190 - DNA, 283 bp, Homo sapiens
  source 1..283: mol_type = other DNA
tgcggcctctggattcaccttcagttcctataccatgaactgggtccgccagtctccagggaaggggctggagtgggtctcatccattagtcgtagtagtgatcagatatactacctagactcagtgaagggccgattcaccgtctcgagagacaacgccaagaactcagtgtatctgcaaatgaacagcctgagagccgaggacacggctttttattattgtgcgaggacctttgcagcccttgattactggggccagggagccctggtcaccgtctcctca

SEQ ID NO: 16191 - DNA, 283 bp, Homo sapiens
  source 1..283: mol_type = other DNA
tgcggcctctggattcacctttagttcctataccatgaactgggtccgccagtctccagggaaggggctggagtgggtctcatccatcagtcgtagtagtgatcagatatactacctagactcagtgaagggccgattcaccgtctcgagagacaacgccaagaactcagtgtatctgcaaatgaacagcctgagagccgaggacacggctttttattattgtgcgaggacctttgcagcccttgattactggggccagggagccctggtcaccgtctcctca

SEQ ID NO: 16192 - DNA, 289 bp, Homo sapiens
  source 1..289: mol_type = other DNA
tgcagtctctggattcactatcagtgacgcctggctgaactgggtccgccaggctccagggaaggggctggagtggattggccgtatcagaagcaagactgatggagggacaattgactacgctgcacccgtgaaaggcagattcaccttctcaagagatgattctgaaaacacactgtacctgcagatgaacagcctgaaaaccgaggacacagccatttattactgcaccaaagactggggatacttgacccgatggggccagggaaccctgatcaccgtttcctca

SEQ ID NO: 16193 - DNA, 289 bp, Homo sapiens
  source 1..289: mol_type = other DNA
tgcagtctctggattcactatcagtgacgcctggctgaactgggtccgccaggctccagggaaggggctggagtggattggccgtatcagaagcaagactgatggagggacaattgactacgctgcacccgtgaaaggcagattcaccttctcaagagatgattctgaaaacacactgtacctgcagatgaacagcctgaaaaccgaggacacagccatttattactgcaccaaagactggggatacttgacccgatggggccagggaaccctggtcaccgtttcctca

SEQ ID NO: 16194 - DNA, 292 bp, Homo sapiens
  source 1..292: mol_type = other DNA
tgcagcctctggattcagcattaccaattatggcatcggctgggtccgccaggctccagggaaggggctggagtgggtctcaactattagtggtagtggtgatgacacatactacgcagactccgtgaggggccggttcaccatctccagagacagttccaagaatacactgtatctgcaaatgcacagcctgagagtcgaggacacggccttatattactgtgcgacaacgtttgggagctggtcccgctttgattactggggccagggaaccctggtcaccgtctcctca

SEQ ID NO: 16195 - DNA, 292 bp, Homo sapiens
  source 1..292: mol_type = other DNA
tgcagcctctggattctccattaccaattatggcatcggctgggtccgccaggctccagggaaggggctggagtgggtctcaactattaatgctgctggtgatgacacatactacgcagactccgtgaggggccggttcaccatctccagagacgtttccaagaacactttgtatctgcaaatgcacagcctgacagtcgaggacacggccttatattactgtgcgacaacatttgggagctggtcccgctttgactactggggccagggaaccctggtcaccgtctcctca

SEQ ID NO: 16196 - DNA, 292 bp, Homo sapiens
  source 1..292: mol_type = other DNA
tgcagcctctggattcaccgtcagtagcaactccatgagctgggtccgccaggctccggggaaggggctggagtgggtctcagttatttatgtcggtggtagcacatactacgcagactccgtgaagggccgattcaccatctccagagacaattccaagaacacgttgtttcttcaaatgaacatcctgagagccgaggacacggccgtgtattactgtgcgagggccctggccacctctggctactactttgactactggggccagggaaccctggtcaccgtctcctca

SEQ ID NO: 16197 - DNA, 292 bp, Homo sapiens
  source 1..292: mol_type = other DNA
tgcagcctctggattcaccgtcagtagcaactccatgagctgggtccgccaggctccagggaaggggctggagtgggtctcagttatttatgtcggtggtagcacatactacgcagactccgtgaagggccgattcaccatctccagagacaattccaagaacacgttgtatgttcaaatgaacagcctgagagccgaggacacggccgtgtattactgtgcgagggccctggccacctctggctactactttgactactggggccagggaaccctggtcaccgtctcctca

SEQ ID NO: 16198 - DNA, 304 bp, Homo sapiens
  source 1..304: mol_type = other DNA
cgcagcctctggattcaccttcagtaccttctggatgcagtgggtccgccaagttccagggaaggggctggtgtgggtcgcacatattaatagtgatgggagtcgcacaacctacgcggactccgtgaagggccgattcaccatctccagagacaacgccaagaacacgctgtatctgcaaatgaacactctgagagccgaggacacggctgtgtattactgtgcgagatattgtagtagttccagctgctatgatgccacttttgatatctggggccaagggacaatggtcaccgtctcttca

SEQ ID NO: 16199 - DNA, 304 bp, Homo sapiens
  source 1..304: mol_type = other DNA
cgcagcctctgggttcagtttcagtacctactggatgcagtgggcccgccaagctccagggaagggcctggtgtgggtctcacatattaatagtgatgcctctagaaaaacctacgcggactccgtcaagggccgattcgccatctccagagacaacgccaagaacacgctgtatctgcaaatggacaatctgagagccgaggacacggctgtgtattactgtgcgagatattgtagtagttccagctgctatgatgccacttttgatatctggggcctagggacaatggtcaccgtctcttca

SEQ ID NO: 16200 - DNA, 304 bp, Homo sapiens
  source 1..304: mol_type = other DNA
tgcagcctctggattcagcttcagcagctactggatgcactgggtccgccaagctccagggaaggggctggtgtgggtctcacatattaacagtgatgcgagtagaacaacctacgcggactccgtgaagggacgattcaccatctccagagacaacgccaaaaacacactgtatctgcaaatgaacaatctgagagccgaggacacggctgtgtattactgtgcgagatattgtagtagttccagctgctatgatgccacttttgatatctggggccaagggacaatggtcaccgtctcttca

SEQ ID NO: 16201 - DNA, 304 bp, Homo sapiens
  source 1..304: mol_type = other DNA
tgcagcctctggattcaccttcagtagctactggatgcactgggtccgccaagctccagggaaggggctggtgtgggtctcacatattaatagtgatgcgagtagaacaacctacgcggactccgtgaagggccgattcaccatctccagagacaacgccaagaacacgctgtatctgcaaatgaacattctgagagccgaggacacggctgtgtattactgtgcgagatattgtagtagttccagctgctatgatgccacttttgatatctggggccaagggacaatggtcaccgtctcttca

SEQ ID NO: 16202 - DNA, 289 bp, Homo sapiens
  source 1..289: mol_type = other DNA
tgcagcctctggattcaccctcagtcagtactacatgaactggatccgccaggctcctgggaaggggctggagtggattgcatacattaatgatagtggtgaaaccatttactacgcagactctgtgaagggccggttcaccatctccagggacaacgccaagaactcactgtatctgcaaatgaacagcctgagagccgaggacacggccgtctattactgtgcgagagatcaattccctctaccattcgacccctggggccagggaaccctggtcaccgtgtcttca

SEQ ID NO: 16203 - DNA, 289 bp, Homo sapiens
  source 1..289: mol_type = other DNA
tgcagcctctggattcagtttaagtcaatactacatgatctgggtccgccaggctccagggaaggggctggagtgggtcgcatatattagtaatagtggtgatatcacatactatgcagactctgtgaagggccgattcaccatctccagggacaccgccaagaattcactatatctgcaaatgaacagcctgacagccgaggacacggccgtgtattactgtgccagagatcaattccctctaccattcgacccctggggccagggaaccctggtcaccgtctcctca

SEQ ID NO: 16204 - DNA, 325 bp, Homo sapiens
  source 1..325: mol_type = other DNA
tacaacctctggattcacctttgctgactttgatgtgagctgggtccgccaggctccagggaaggggctggagtgggtaggtttcattagaagtaagacttatcatgagacaatagaagacgccgcgtctgtgaaggacagaccccccacagaatacgcctcgtcagtgaagggcagattcaccatttcaagagatgattccaaaggcatcgcctatctgcaaatgaacagcctgaaacccgaggacacaggcgtctattactgttctcccggggaggccctctttgactactggggccagggaaccctggtcaccgtctcctca

SEQ ID NO: 16205 - DNA, 325 bp, Homo sapiens
  source 1..325: mol_type = other DNA
cacaacctctggattcacctttggtgactttgatgtgagctgggtccgccaggctccagggaagggcctggagtgggtaggtttcattagaagtaaaacttacaatgagacaatagaagacgccgcctctgtgaaggacagaccccccacagagtacgcctcgtctgtgaagggcagattcaccattttcagagatgatttcaaaggcatcgcctatctgcaaatgaacagcctgagacccgaggacacagccgtctactattgttcccccggggaggccctctttgactattggggccagggaaccctggtcaccgtctcctca

SEQ ID NO: 16206 - DNA, 297 bp, Homo sapiens
  source 1..297: mol_type = other DNA
gcttctggatacactttgactaactatgctatgcattgggtgcgccaggcccccggacagaggcttgagtgggtgggatggatcaacgctggcaatggtgacccaaaatattcacagaagttccagggcagagtcacccttgccagcgacacatccgcgagcacagcctacatggagttgagcagcctgagatctgaagacacggctctgtattactgtgcgagagttcgatttgatagtagtggttattacctacttgactactggggccagggaaccctggtcaccgtctcctca

SEQ ID NO: 16207 - DNA, 297 bp, Homo sapiens
  source 1..297: mol_type = other DNA
gcttctggatacactttgactaactatgctatgcattgggtgcgccaggcccccggacagaggcttgagtgggtgggatggatcaacgctggcaatggtgacccaaaatattcacagaagttccagggcagagtcacccttaccagcgacacatccgcgagcacagcctacatggagttgagcagcctgagatctgaagacacggctctgtattactgtgcgagagttcgatttgatagtagtggttattacctacttgactactggggccagggaaccctggtcaccgtctcctca

SEQ ID NO: 16208 - DNA, 301 bp, Homo sapiens
  source 1..301: mol_type = other DNA
tgaaggctttggattcacctttagtacctattggatcagttgggtccgccaggctccagggaaggggccggagtgggtgggcaccataaagcaagatggaagtgagatatattatgtggactctctgaagggccgattcaccatatccagagacaacgccaagaactcagtgtatctgcaaatgaacagtctgagagccgaggacacggctgtctatttctgtgcgagagaaggttggggtctgaggggcaactactacatggacgtctggggcaaagggaccacggtcaccgtctcctca

SEQ ID NO: 16209 - DNA, 301 bp, Homo sapiens
  source 1..301: mol_type = other DNA
tgaaggcttcggattcacctttagcacctattggatcagttgggtccgccaggctccagggaagggcctggagtgggtgggcaccataaagcaagatggaagtgagaaatattatgtggactctctgcagggccgattcaccatctccagagacaactccaagaactcagtgtatctgcaaatgaacagtcttagagccgaggacacggctgtctattactgtgcgagagaaggttggggtctgaggggcaattactatatggacgtctggggcaaagggaccacggtcaccgtctcctca

SEQ ID NO: 16210 - DNA, 292 bp, Homo sapiens
  source 1..292: mol_type = other DNA
cgctgtgtctggtggctccgtcaccagtcgtaactggtggagctgggtccgccaggccccagggaaggggctggagtggattggggaaatctatcatagtgggagcaccacctacaacccgtccctcaagagtcgagtcaccatgtcagtagagaactccaagaaccagttctccctgaagttgagcgctgtgaccgccgcggacacggccgtgtattattgtgccacggatctgtatagcagtggacgtctcgactactggggccagggcaccctggtcaccgtctcctca

SEQ ID NO: 16211 - DNA, 292 bp, Homo sapiens
  source 1..292: mol_type = other DNA
cgctgtgtctggtgcctccatcagcagtcgtaactggtggtcctgggtccgccaggccccaggtaaggggctcgagtggattggggaaatctatcatagtgggacctccaccgacaacccgtcgctccggagtcgactcaccatgtcagtagacatgtccaagaaccagttctccctgaagttgagcgctgtgaccgccgcggacacggccatttattattgtgccacggatctttatagtagtggacgtctcgactactggggccagggaaccctggtcaccgtctcctca

SEQ ID NO: 16212 - DNA, 289 bp, Homo sapiens
  source 1..289: mol_type = other DNA
cagtgtctctggtggctccatcagcagctactattggagttggatccggcagcccccagggaagggactggagtggattgggtatatctcctacagtgggaccaccaactaccacccctccctcaagagtcgggtcaccatatcagtagacacgtccaagaaccagttctccctgaggctaagctctgtgatcgcggcggacacggccgtgtattactgtgcgagagtgggcggtcgagcagctcccccgttatactggggcccgggaatcctggtcaccgtctcctca

SEQ ID NO: 16213 - DNA, 289 bp, Homo sapiens
  source 1..289: mol_type = other DNA
cagtgtctctggtggctccatcagcagctactattggagttggatccggcagtccccagggaagggactggagtggattgggtatatctcctacagtgggaccaccaactaccacccctccctcaagagtcgggtcaccatatcagttgacacgtccaagaaccagttctccctgaggctaacctctgtgatcgcggcggacacggccgtgtattactgtgcgagagtgggcggtcgagcagctcccccgttatactggggcccgggaatcctggtcaccgtctcctca

SEQ ID NO: 16214 - DNA, 289 bp, Homo sapiens
  source 1..289: mol_type = other DNA
tgaagcctctggattcagctttagtagcagttggatgagttgggtccgccaggctccagggaaggggctggagtgggtggcctacataaaccaagatggaagtcagagtaaccatgtggactctgtgaagggccgattcaccatctccagagacaacgccaacaacttactgtatctgcagatgaagagcctgagagccgacgactcggctttttattactgtgcgaaagacgcggggcggtccgggggagtttccgggggtcggggaaccctggtcaccgtctcctca

SEQ ID NO: 16215 - DNA, 289 bp, Homo sapiens
  source 1..289: mol_type = other DNA
tgaagcctctggattcagctttagtaacagttggatgagttgggtccgccaggctccagggaaggggctggagtgggtggcctacataaaccaagatggaagtgagagtaaccatgtggactctgtgaagggccgattcaccatctccagagacaacgccaacaacttagtgtatctgcagatgaacagcctgagagccgaggactcggctgtttattactgtgcgaaagacgcagggcggtccgggggagtttccgggggtcggggaaccctggtcaccgtctcctca

SEQ ID NO: 16216 - DNA, 289 bp, Homo sapiens
  source 1..289: mol_type = other DNA
tgcagcctctggattcacctttagtagctattggatgtgctgggtccgccaggctccagggaaggggctggagtgggtggccaacataaacccagatggaggtgtgaaaaactatgtggactctgtgaagggccgattcaccatctccagagacaacgccaagaactcactgtatctgcaaatgaacagcctgagagccgaggacacggccgtgtattactgtgcgagtcggtcttcgagagtatcagctactacctggggccagggaaccctggtcaccgtctcctca

SEQ ID NO: 16217 - DNA, 289 bp, Homo sapiens
  source 1..289: mol_type = other DNA
tgcagcctctggattcacctttagtagctattggatgtgctgggtccgccaggctccagggaaggggctggagtgggtggccaacataaaccaagatggaggtgggaaaaactatgtggactctgtgaagggccgattcaccatctccagagacaacgccaagaactcactgtatctgcaaatgaacagcctgagagccgaggacacggccgtgtattactgtgcgagtcggtcttcgagagtatcagctactacctggggccagggaaccctggtcaccgtctcctca

SEQ ID NO: 16218 - DNA, 289 bp, Homo sapiens; identical to SEQ ID NO: 16217
  source 1..289: mol_type = other DNA

SEQ ID NO: 16219 - DNA, 301 bp, Homo sapiens
  source 1..301: mol_type = other DNA
tgcagcctctggattcaccttcagtgactactacatgagctggatccgccagactcctgggaagggactggagtgggtttcataccttagtggtagtagtcttaacacaaactacgcagactctgtgaagggccgattcaccatctccagagacaacgccaaaaattcactgtatctgcagatggacagcctgagagccgaggacacggccgtctattactgtgcgagacctcccttcccctcagactactactactacatggacgtctggggcaaagggaccatggtcaccgtctcctca

SEQ ID NO: 16220 - DNA, 301 bp, Homo sapiens
  source 1..301: mol_type = other DNA
tgcagcctctggattcaccttcagtgactactacatgagctggatccgccaggctcctgggaaggggctggagtgggtttcataccttagtggtagtagtcttaacacaaactacgcagactctgtgaagggccgattcaccatctccagagacaacgccaagaattcactgtatctgcagatggacagcctgagagccgaggacacggccgtctattactgtgcgagacctcccttcccctcagactactactactacatggacgtctggggcaaagggaccatggtcaccgtctcctca

SEQ ID NO: 16221 - DNA, 288 bp, Homo sapiens
  source 1..288: mol_type = other DNA
acttctggttacacctttaccgcctatcggatcagctgggtgcgacaggcccctcgacaagggcttgagtggatgggatggagcatcgtttacaatggagacacaaactatgcacagaatgtccagggcagagtcaccatgaccacagacatatccacgagtacagcctacatggaactgaggggcctgcgatctgacgacacggccgtgtattactgtgcgagaaatgacggtggcaacggggcatttgactactggggccagggaaccctggtcaccgtctcctca

SEQ ID NO: 16222 - DNA, 288 bp, Homo sapiens
  source 1..288: mol_type = other DNA
acttctggttacacctttaccagctatcgtatcagctgggtgcgacaggcccctcgacaagggcttgagtggatgggatggatcatcgtttacaatggaaacacagactatgcacacaatctccagggcagagtcaccatgaccatagacacatccacgagtacagcctacatggagctgaggagcctgagatctgacgacacggccgtgtattactgtgcgagaaatgacggtggcaacggggcatttgactactggggccagggaaccctggtcaccgtctcctca

SEQ ID NO: 16223 - DNA, 298 bp, Homo sapiens
  source 1..298: mol_type = other DNA
cagtgtctctggtggcgccatgagtaattactactggacctggatccggcagcccccggggaagggactggagtggattggctatatctcttacactgtgggcaccaagtataacgcctccctcaagagtcgagtcaccatgtcactggacacgtccaagaaccagatctccctgaaactgagttctgtgaccgctgcggacacggccctgtattactgtgcgagagttggagacctcagtggatactactactacatggacgtctggggcagcgggaccatggtcaccgtctcctca

SEQ ID NO: 16224 - DNA, 298 bp, Homo sapiens
  source 1..298: mol_type = other DNA
cagtgtctctggtggcgccatgagaaattatcactggacctggatccggcagcccccggggaagggactggagtggatcggctatgtctcttacaccgtgggcaccaagtataatgactccctcaagagtcgagtcaccatgtcactggacacgtccaagaaccagatctccctgaaactgagttctgtgaccgctgcggacacggccctgtattactgtgcgagagttggagacctcagtggatactactactacatggacgtctggggcagcgggaccatggtcaccgtctcctca

SEQ ID NO: 16225 - DNA, 292 bp, Homo sapiens
  source 1..292: mol_type = other DNA
tgcaggctctggattcatcttcagtgacttcgctatgcactgggtccgtcaggctccaggcaaggggctggagtggttggcagttatttcgtctgacggaataattagaagttatggagagtccgcgctgggccgattcagcatatccagagacaattccaagagaaggttgtatctgcaaatgaccagcctgaatagagaggacacggccgtctatatctgtgcgagaagtctgacgttgacatcacacatggacgtctggggtaaggggaccacggtcaccgtctcctca

SEQ ID NO: 16226 - DNA, 301 bp, Homo sapiens
  source 1..301: mol_type = other DNA
tgtggcctctggatttatctttagtgacttcgctatgcactgggtccgtcagcctccaggcgggggtctggagtggctggcaattatctcatctgacggaataacaaaattttttggagactctgtgaagggccggcagggccccctcagcatctccagagacaattccaagggaacgctgtatctggaaatgactttcctgacgagtgaagacacggccacttatttttgcgcgagaagtctgacgctgacctcacacatggacgtctggggtaaggggaccacggtcaccgtctcctca

SEQ ID NO: 16227 - DNA, 298 bp, Homo sapiens
  source 1..298: mol_type = other DNA
tgcggcctctggattcacgtccgagagttatgccatgcactgggtccgccaggctccagggaagggactggagtatgtggcagctattaataataatggctacttcacgtattacgcagattctgtgaaggccagattcaccatctcccgagacttctccaacaacattttgtttcttcaaatggacagcctgagacctgaggacacggctgtttattactgtgcgagaggcgacggggggggaacaattggaactcttccctactggggcctgggaacccaggtcaccgtctcctca

SEQ ID NO: 16228 - DNA, 298 bp, Homo sapiens
  source 1..298: mol_type = other DNA
tgcagcctctggattcacgttcgatagttttgccatgcactgggtccgccaggctccagggaagggactggagtatgtggcagctattaataataatggctacttcacctattacgcagactctgtgaaggccagattcaccatcgcccgagactacgccaccaacactctgtttcttcacatggacagcctgagacctgaagacacggctgtttattactgtgcgagaggtgacgggggaggtacaattggaactcttccctactggggcctgggaacccaggtcaccgtctcctca

SEQ ID NO: 16229 - DNA, 298 bp, Homo sapiens
  source 1..298: mol_type = other DNA
tgcagcctctggattcaccttcagtagttatgccatgcactgggtccgccaggctccagggaagggactggaatatgtttcagctattcatagtaatggctttagcgcatattatgcaaactctgtgaaggccagattcaccatctccagagactattccaagaacactctgtatcttcaaatggacagcctgaaacctgaagacacggctgtctattactgtgcgagaggggacgggggaggtacaattggaactcttccctactggggcctgggaaccctggtcaccgtctcctca

SEQ ID NO: 16230 - DNA, 298 bp, Homo sapiens
  source 1..298: mol_type = other DNA
tgcagcctctggattcacgttcgatagttttgccatgcactgggtccgccaggctccagggaagggactggagtatgtggcagctattaataataatggttacttcacctattacgcagactctgtgaaggccagattcaccatcgcccgagactacgccaccaacactctgtttcttcacatggacagcctgagacctgaagacacggctgtttattactgtgcgagaggtgacgggggaggtacaattggaactcttccctactggggcctgggaacccaggtcaccgtctcctca

SEQ ID NO: 16231 - DNA, 298 bp, Homo sapiens
  source 1..298: mol_type = other DNA
tgcagcctctggattcaccttcagtagttatgccatgcactgggtccgccaggctccagggaagggactggaatatgtttcagctattcatagtaatggctttagcgcatattatgcaaactctatgaaggccagattcaccatctccagagactattccaagaacactctgtatcttcaaatggacagcctgaaacctgaagacacggctgtctattactgtgcgagaggggacgggggaggtacaattggaactcttccctactggggcctgggaaccctggtcaccgtctcctca

SEQ ID NO: 16232 - DNA, 298 bp, Homo sapiens
  source 1..298: mol_type = other DNA
cgctgtctcgggtgtctccctcagtcacaattactggagttggatccggcagtccccggagaagggtctcgagtggattgggtttatctcttacagtgggaccaccaattacaatccctccttcaagagtcgcgccaccatatcgtcagacacgtccaagaaccaggtctccctgaccctgacctttgtgaccgctgcggacacggccgtgtattattgtgcgaccaacggatacaacgacggttacagcttaagtctggaccactggggccagggaaccctagtcaccgtctcctca

SEQ ID NO: 16233 - DNA, 298 bp, Homo sapiens
  source 1..298: mol_type = other DNA
cgctgtctctggtgcctccctcagtcaaaattactggagttggatccgacagtccccggagaagggtctagagtggattgggtttatctcttacagtggagtcaccagttacaatccctccttcaagagtcgcgccaccatatcgtcagacacgtccaagaaccagatctccctgaccctgacttttgtgaccgctgcggacacggccgtgtattattgtgcgaccaacggatacaacgacggttacagcttaagtctggaccactggggccagggaaccctggtcaccgtctcctca

SEQ ID NO: 16234 - DNA, 283 bp, Homo sapiens
  source 1..283: mol_type = other DNA
cactgtctctggtggctccatgagcaggaattacgcttggagttgggtccgccagaccccagggaaggggctggagtggattggcaaaatctatcctaatgggagcaccacctacaatccgtacctcaagagtcgactcaccatgtcaatagacaagtcccagaaccagttctctctgaaggtgaagtctgtgaccgccgcggacacggccgtctattattgtacgagagaccacggtgactccggctactggggccagggaaccctggtcaccgtctcctca

SEQ ID NO: 16235 - DNA, 283 bp, Homo sapiens
  source 1..283: mol_type = other DNA
cgctgtctctggtggctccatcagcagtccttcctgttggagttgggtccgccagaccccagggaaggggctggagtggattgggcacatctttcataatgggagcaccacctacaatccgtccctcaagagtcgactcaccatgtccatagacaagtcccagaaccagttctccctgaagatgacgtctgtatccgccgcggacacggccgtctattattgtacgagagaccacggtgactccggctactggggccagggaaccctggtcaccgtctcctca

SEQ ID NO: 16236 - DNA, 301 bp, Homo sapiens
  source 1..301: mol_type = other DNA
tgcagcccccggattaacccttaacaactatgccatgagctgggtccgccaggctccagggaaggggctggagtgggtctcagctattagtgctggtggtagtagcaccttctacgcagactccgtgaagggccggttcaccatctccagagacaattccaagaacacgctgtatctgcaaatgaacatccttatacctgacgacacggccctttattactgtgcgaaacctctatccccccccctcgcccatggggggtttgactcctggggccagggaaccctggtcaccgtctcctca

SEQ ID NO: 16237 - DNA, 301 bp, Homo sapiens
  source 1..301: mol_type = other DNA
tgcagcccccggattaagccttaactactatgccatgagctgggtccgccaggctccagggaaggggctggagtgggtctcagctattagtggtggtggtagtagcacattctacgcagactccgtgaagggccggttcaccatctccagagacaattccaagaacacgctgtatctgcaaatgaacatcctgggacctgacgacacggccctttattactgtgcgaaacctctatcccccccgctcgcccatgggggttttgactcctggggccagggaaccctggtcaccgtctcctca

SEQ ID NO: 16238 - DNA, 307 bp, Homo sapiens
  source 1..307: mol_type = other DNA
tgcagcctctggattcaccttcagtacctatagcatgaattgggtccgccaggctccagggaaggggctggagtgggtttcatacattagtagtagtagtggtaccatatactacgcagactctgtgaagggccgattcaccatctccagagacaatgccaagaactcactgtatctgcaaatgaacagcctgagagacgaggacacggctgtgtattactgtgcgagaagggattcacctatggttcggggagttacgaactggttcgacccctggggccagggaaccctggtcaccgtctcctca

SEQ ID NO: 16239 - DNA, 307 bp, Homo sapiens
  source 1..307: mol_type = other DNA
tgcagcctctggattcaccttcagtaactatagcatgaactgggtccgccaggctccagggaaggggctggactgggtttcatacattagtagtagtagtagtaccatatactacgcagactctgtgaagggccgattcaccatctccagagacaatgccaagaactcactatatctgcaaatgaacagcctgagagacgaggacacggctatttattactgtgcgagaagggattcacctatggttcggggagttacgaactggttcgacccctggggccagggaaccctggtcaccgtctcctca

SEQ ID NO: 16240 - DNA, 298 bp, Homo sapiens
  source 1..298: mol_type = other DNA
tgcagcctctggattcaccttcagtggctctgttatgcactgggtccgccaggctcccgggaaagggctggagtgggttgcccgtattagaagcagaactaacggttacgcgacagtatatgttgcgtcggtggaaggcaggttcaccatctccagagatgattcaaagagcacgacgtatctggaaatgaccagcctgaaaggcgacgacacggccgtctattactgtaccagattcgaatctgccggcgggttcggggatgtctggggccagggaaccctggtcaccgtctcttca

SEQ ID NO: 16241 - DNA, 298 bp, Homo sapiens
  source 1..298: mol_type = other DNA
tgcagcctctggattcaccttcagtggctctgttatgcactgggtccgccaggcttccgggaaagggctggagtgggttgcccgtattagaagcagagctaacggttacgcgacagtatatgttgcgtcggtggaaggcaggttcaccatctccagagatgattcaaggaacacgacatatctggaaatgaccagcctgaaagccgacgacacggccgtctattactgtactagattcgaatctgccggcgggttcggggacgtctggggccagggaaccctggtcaccgtctcttca

SEQ ID NO: 16242 - DNA, 298 bp, Homo sapiens
  source 1..298: mol_type = other DNA
tgcagcctttggattcaccttcagtgactactacatgagctggatccgccaggctccagggaaggggctggagtgggtttcatacattagtgatagtagtacttacacaaactacgcagactctgtgaagggccgattcaccatctccagagacaacgcccagaattcactgtatctgcaaatgaacagcctgagagccgaggacacggccgtgtattactgtgcgagatcgggatacagctatggttacggctactttgactactggggccagggaaccctggtcaccgtctcctca

SEQ ID NO: 16243 - DNA, 298 bp, Homo sapiens
  source 1..298: mol_type = other DNA
tgcagcctctggattcaccttcagtgactactacatgagctggatccgccaggctccagggaaggggttggagtgggtttcatacattagtactagtagtagttacacaaactacgcagactctgtgaagggccgattcaccatctccagagacaacgccaagaactcactgtatctgcaaatgaacagcctgagagccgaggacacggccgtgtattactgtgcgagatcgggatacagctatggttacggctactttgactactggggccagggaaccctggtcaccgtctcctca

SEQ ID NO: 16244 - DNA, 310 bp, Homo sapiens
  source 1..310: mol_type = other DNA
cactgtctctggtgactccatcagcagtactagttactactggggctggatccgcaagaccccagggaaggggctggagtacattgggagtatgtattatagtgggaacacctactacaacccgtccctcaagagtcgagtcaccatatccgtagacacgtccaagaaccagttctccctgcaactgagctctgtgaccgccgcagacacggctgcatattactgtgcgagacaccgtatatcatcaggtggcatccgctccaactggttcgacccctggggccagggaaccctggtcaccgtctcctca

SEQ ID NO: 16245 - DNA, 310 bp, Homo sapiens
  source 1..310: mol_type = other DNA
cactgtctctggtgactccatcagcagtactagttactactggggctggatccgccagaccccagggaaggggctggagtacattgggagtatgtattatagtgggaacacctactacaacccgtccctcaagagtcgagtcaccatatccgtagacacgtccaagaaccagttctccctgcaactgagctctgtgaccgccgcagacacggctgcatattactgtgcgagacaccgtatatcatcaggtggcatccgctccaactggttcgacccctggggccagggaaccctggtcaccgtctcctca

SEQ ID NO: 16246 - DNA, 286 bp, Homo sapiens
  source 1..286: mol_type = other DNA
tgcagcctctggattacccttcattagatatagcatgaactgggtccgccaggctccagggaaggggctggagtgggtctcatccattagtagtactagtagttccatatactacgcagactcagtgaagggccgattcaccatctccagagacaacgccaagaactcactgtatctgcaaatgaacagcctgagagccgaggacacggctgtgtattactgtgcgagtggatacacctatggccatgactactggggccagggaaccctggtcaccgtctcctca

SEQ ID NO: 16247 - DNA, 286 bp, Homo sapiens
  source 1..286: mol_type = other DNA
tgcagcctctggattacccttcaggagttatagcatgaactgggtccgccaggctccagggaaggggctggagtgggtctcatccattagtagtactagtacttccatatactacgcagactcagtgaggggccgattcaccatctccagagacaacgccaagaactcactgtatctgcaaatgaacagcctgagagccgaggacacggctgtctattactgtgcgagtggatacacctatggccatgactactggggccagggaaccctggtcaccgtctcctca

SEQ ID NO: 16248 - DNA, 307 bp, Homo sapiens
  source 1..307: mol_type = other DNA
tgcagcctctggattcaccttcagtagctatagcatgaactgggtccgccaggctccagggaaggggctggagtgggtctcgtccattagtactagtagtagtttcatatactacgcagactcagtgaagggccgattcaccgtctccagagacaacgccaagaactcactgtatttgcaaatgaacagcctgagagtcgaggacacggctgtgtattactgtgcgggatcccggaacgatttttggggtggttacaacaactggttcgacccctggggccagggaaccctggtcaccgtctcctca

SEQ ID NO: 16249 - DNA, 307 bp, Homo sapiens
  source 1..307: mol_type = other DNA
tgcagcctctggattcaccttcagtagctatagcatgaactgggtccgccaggctccagggaaggggctggagtgggtctcgtccattagtagtagtagtagtttcatatactacgcagactcagtgaagggccgattcaccatctccagagacaacgccaagaactcactgtatttgcaaatgaacagcctgagagtcgaggacacggctgtgtattactgtgcgggatcccggaacgatttttggggtggttacaacaactggttcgacccctggggccagggaaccctggtcaccgtctcctca

SEQ ID NO: 16250 - DNA, 289 bp, Homo sapiens
  source 1..289: mol_type = other DNA
tgcagcctctggattcaccttcagtctttatgaaataaactgggtccgtcaggctccagggaagggactggagtgggtttcatacattagtagtagtggttcttcgttatcctacgcagactctgtgaagggccgattctccatctccagagacaacgccaagaactcagtgtatctgcagatgcacagcctgagacccgaggacacagctgtatattactgtgcgagaggtgattactggcactactttgactactggggccggggatccctggtcaccgtctcctca

SEQ ID NO: 16251 - DNA, 289 bp, Homo sapiens
  source 1..289: mol_type = other DNA
tgtggcctctgggtttaccttcaatagttatgaaatgaattgggtccgccaggctccagggaaggggctggaatggctttcatacattagtaatagtggaacttccttggcctacgcagactctgtgaagggccgattcaccgtcgccagagacaacgccaagaggtcactttatctggaaatgtacagcctgagagccgaggacacagctgtttattactgtgcaagaggtgattactggcactattttgattattggggccagggaaccccggtcaccgtctcctca

SEQ ID NO: 16252 - DNA, 319 bp, Homo sapiens
  source 1..319: mol_type = other DNA
cactgtctctggtggctccatcaacagtggtgcttactactggagctggatccgccagcacccagggaagggcctggagtggattgggtacatctatcacagtgggagcacctactacaacccgtccctcaagagtcgagtcaccatatcagtggacacgtctaacaaccagttctccctgaagctgagctctgtgactgccgcggacacggccgtgtattactgtgcgagagatacccccaattgtagtagtaccatctgctatccccgctattactttgactactggggccagggaaccttggtcatcgtctcctca

SEQ ID NO: 16253 - DNA, 319 bp, Homo sapiens
  source 1..319: mol_type = other DNA
cactgtctctggtggccccatcaacagtggtgcttactactggagctggatccgccagcacccagggaagggcctggagtggattgggtacatctatcacagtgggagcacctactacaacccgtccctcaagagtcgagtcaccatatcagtggacacgtctaacaaccagttctccctgaagctgagctctgtgactgccgcggacacggccgtgtattactgtgcgagagatacccccaattgtagtagtaccatctgctatccccgctattactttgactactggggccagggaaccttggtcatcgtctcctca

SEQ ID NO: 16254 - DNA, 304 bp, Homo sapiens
  source 1..304: mol_type = other DNA
tgcagcgtctggattcaccttcagtagctctggcatgcactgggtccgccaggctccaggcaaggggctggagtgggtggcagttatatggtatgatggaagtaataaatactatgcagaccctgtgaagggccgattcaccatctccagagacaattccaagaacacgttgtatctgcaaatgaacagcctgagagtcgaggacacggctgtgtattattgtgcgagagttctgggtcactatgtttcggggaggtcccactgtgactactggggccagggaaccctggtcaccgtctcttca

SEQ ID NO: 16255 - DNA, 304 bp, Homo sapiens
  source 1..304: mol_type = other DNA
tgcagcgtctggattcaccttcagtagctctggcatgcactgggtccgccaggctccaggcaaggggctggagtgggtggcagttatatggtatgatggaagtaataaatactatgcagactctgtgaagggccgattcaccatctccagagacaattccaagaacacgttgtatctgcaaatgaacagcctgagagtcgaggacacggctgtgtattattgtgcgagagttctgggtcactatgtttcggggaggtcccactgtgactactggggccagggaaccctggtcaccgtctcttca

SEQ ID NO: 16256 - DNA, 304 bp, Homo sapiens
  source 1..304: mol_type = other DNA
tgcagcgtctggattcaccttcagtagctctggcatgcactgggtccgccaggctccaggcaaggggctggagtgggtggcagttatatggtatgatggaagtaataaatactatgcagactccgtgaagggccgattcaccatctccagagacaattccaagaacatgttgtatctgcaaatgaacagcctgagagccgaggacacggctgtgtattattgtgcgagagttctgggtcactatgtttcggggaggtcccactgtgactactggggccagggaaccctggtcaccgtctcctca

SEQ ID NO: 16257 - DNA, 307 bp, Homo sapiens
  source 1..307: mol_type = other DNA
cacagtttccggtgactccatggctagacaacactggagttgggttcggcagtccccagggaagggactggaattccttgcctatattcactacgcgggcagccccatttatcatccgtccctcaagagtcgagtcaccatatcaatagacagggccaagaaccagttctccctcagtctgcagtctgtcaccgccgcagacacggccgtctattactgtgcgagagtgacggatattgtcgcgggcagagtttcccgattttactttgactcctggggccagggaacactggtcaccgtctcctca

SEQ ID NO: 16258 - DNA, 307 bp, Homo sapiens
  source 1..307: mol_type = other DNA
cacagtttccggtgactccatggctagacaacactggagttgggttcggcagtccccagggaagggactcgaattccttgcctatattcattacgcgggcagccccatttatcatccgtccctcaagagtcgactcaccatatcaatagacagggccaagaaccagttctccctcagtctgcagtctgtcaccgccgcagacacggccgtctattactgtgcgagagtgacggatattgtcgcgggcagagtttcccgattttactttgactcctggggccagggaacactggtcaccgtctcctca

SEQ ID NO: 16259 - DNA, 287 bp, Homo sapiens
  source 1..287: mol_type = other DNA
ccatctccggggacagtgtctctagcaacagtgctacttggagctggatcaggcagtacccatcgagaggccttgagtggctgggaaggacatactacaggtccgggtggtatagtgattatgctgtgtttgtgaaaagtcgaataaccatcaccccagacacatccaagaaccagttctccctgcagctgaactctgtgactcccgaagacacggctgtatgttattgtgcaagaaataattttatggacgtctggggcaaagggaccacggtcaccgtctcctca

SEQ ID NO: 16260 - DNA, 287 bp, Homo sapiens
  source 1..287: mol_type = other DNA
ccatctccggggacagtgtctctagcaacagtgctacttggagctggatcaggcagtacccatcgagaggccttgagtggctgggaaggacatactacaggtccgggtggtatagtgattatgctgtgtttgtgaaaagtcgaataaccatcaccccagacacatccaagaaccagttctccctgcagctgaactctgtgactcccgaagacacggctgtatattattgtgcaagaaataattttatggacgtctggggcaaagggaccacggtcaccgtctcctca

SEQ ID NO: 16261 - DNA, 281 bp, Homo sapiens
  source 1..281: mol_type = other DNA
ccatctccggggacagtgtctctagcaacagtgctgcttggaactggttcaggcagtccccatcgagaggccttgagtggctcggaaggacatactataggtccaggtggtactatgattatgcagcttctgtgagaggtcgatcaagtatcagccctgacacatccaagaaccaggtctccctgcaactgaactctgtgactcccgaggacacggctgtctattactgtgcgagatggacaaatatctggggccagggaaccctggtcaccgtctcctca

SEQ ID NO: 16262 - DNA, 281 bp, Homo sapiens
  source 1..281: mol_type = other DNA
ccatctccggggacagtgtctctagcaacagtgctgcttggaactggttcaggcagtccccatcgagaggccttgagtggctcggaaggacatactacaggtccaggtggtattctgattatgcagtttctgtgagaggtcgatcaagtatcagccctgacacatccaagaaccaggtctccctgcaactgaactctgtgactcccgaggacacggctgtctattactgtgcgagatggacaaatatctggggccagggaaccctggtcaccgtctcctca

SEQ ID NO: 16263 - DNA, 277 bp, Homo sapiens
  source 1..277: mol_type = other DNA
tgcagcctctggattcaccttcactgattatgaaatgagctgggtccgccaggctccagggaagggcctggagtgggtttcattcattactggtagtggtactaccatatactacgcagactctgtgaaaggccgattcaccatctccagagacaacgccaagaaatcagtgtgtctgcaaatgaacagcctgagagccgaggacacggctgtttattactgtgtgagaggtaggagtgccgtctggggcaaagggaccacggtcaccgtctcctca

SEQ ID NO: 16264 - DNA, 277 bp, Homo sapiens
  source 1..277: mol_type = other DNA
tgcagcctctggattcaccttcactgattatgaaatgagctgggtccgccaggctccagggaagggcctggagtgggtttcattcattactggtagtggtagtaccatatactacgcagactctgtgaaaggccgattcaccatctccagagacaacgccaagaaatcagtgtatctgcaaatgaacagcctgagagccgaggacacggctgtttattactgtgtgagaggtaggagtgccgtctggggcaaagggaccacggtcaccgtctcctca

SEQ ID NO: 16265 - DNA, 289 bp, Homo sapiens
  source 1..289: mol_type = other DNA
cactgtgtctggtgactccatcaggagttactactggagctggatgcggcagcccccagggaagggactggaatggattgggtacatctataacactgagagcaccacctacaatccctccctcgagagtcgagtcaccatatcaggagactcgtccaagaatcagttctccctgaggctgaactctgtgaccgctgcggacacggccgtgtattactgtgcgagagtcaaagatgcagttggaggacttgatttctggggccagggaaacctggtcaccgtctcctca

SEQ ID NO: 16266 - DNA, 289 bp, Homo sapiens
  source 1..289: mol_type = other DNA
cactgtgtctggtgactccatcaggagttactactggagctggatgcggcagcccccagggaagggactggaatggattgggtacatctataacactgagagcaccacctacaatccctccctcgagagtcgagtcaccatatcaggagactcgtccaagaatcagttctccctgaggctgaactctgtgaccgctgcggacacggccgtgtattactgtgcgagagtcaaagatgcagttggaggacttgatttctggggccagggaatcctggtcaccgtctcctca

SEQ ID NO: 16267 - DNA, 283 bp, Homo sapiens
  source 1..283: mol_type = other DNA
tgcagcctctggaattaatttcaataaggcctggatgagctgggtccgccaggctccagggaaggggctggagtggattggccgtgttaaaagcgaaactgatggtgggacaacagactacgctgcacccgtggaaggcagattcaccatctcaagagatgattcaataaacaccgtgtatctgcaaatgaccggcctgaaaaccgaggacacagccgtctattactgtaccacagggaaacttcccctctggggccagggaaccctggtcaccgtctcctca

SEQ ID NO: 16268 - DNA, 283 bp, Homo sapiens
  source 1..283: mol_type = other DNA
tgcagcctctggaattaatttcaataaggcctggatgagctgggtccgccaggctccagggaaggggctggagtggattggccgtgttaaaagcgaaactgatggtgggacaacagattacgctgcacccgtggaaggcagattcaccatctcaagagatgattcaataaacaccgtgtatctgcaaatgaccggcctgaaaaccgaggacacagccgtctattactgtaccacagggaaacttcccctctggggccagggaaccctggtcaccgtctcctca

SEQ ID NO: 16269 - DNA, 283 bp, Homo sapiens
  source 1..283: mol_type = other DNA
tgcagcctctggaattaatttcaataaggcctggatgagctgggtccgccaggctccagggaaggggctggagtggattggccgtgttaaaagcgaaactgatggtgggacaacagactacgctgcacccgtggaaggcaggttcaccatctcaagagatgattcaatcaacaccgtgtatctgcaaatgaccggcctgaaaaccgaggacacagccgtctattactgtaccacagggaaacttcccctctggggccagggaaccctggtcaccgtctcctca

SEQ ID NO: 16270 - DNA, 295 bp, Homo sapiens
  source 1..295: mol_type = other DNA
cactgtctctggtggctccatcggtggttacttctggagttggttccgccagcccccagggaagggactggagtggattggttttgtctattacggtgggggccccaaccgcaatccctccctgaagagtcgagtcaccatgtcagtagacaggtccaacaaccagttctccctgaacctgaattctgtgaccgctgcggacacggccgtctattactgtgcggggacgactgtaccgctacgccctgatggttgtgatctctggggcccagggactttggtcaccgtctcttca

SEQ ID NO: 16271 - DNA, 295 bp, Homo sapiens
  source 1..295: mol_type = other DNA
ctctgtctctggtggctccatcggtggttacttctggagctggttccgccagcccccagggaagggactggagtggattgggtttgtctattatggtgggggccccaatctcaacccctccctgaagagtcgagtcaccatgtcagtagacaggtccaacaaccagttctccctgaaaatgaactctgtgaccgctgcggacacggccgtctattactgtgcggggacgactgtaccactgcgccctgatggctgtgatctctggggcccagggactatggtcaccgtctctcca

SEQ ID NO: 16272 - DNA, 295 bp, Homo sapiens
  source 1..295: mol_type = other DNA
tgtagcctctggattcaccttcagtaactatggcatgaactgggtccgccaggctccagggaaggggctggagtgggtcgcagcccttagtactggtggttacatctactatgcagactcagtgaggggccgattcaccatctccagagacaacgcccacaactcagtgtatctgcaaatgaatagcctgagagccgaggacacggctgtctattactgtgcgacagggaacctgatgactacaatacgaccttttgactactggggccagggaaccctggtcaccgtctcctca

SEQ ID NO: 16273 - DNA, 295 bp, Homo sapiens
  source 1..295: mol_type = other DNA
cacagcctctggattcagcttcagcaactatggcatgaactgggtccgccaggctccagggaaggggctggagtgggtctcagccatggattttgctggtcgcgtatactatccagactcattgaggggccgattcaccatctccagagacaacgccaacaacgcagtgtttctgcaaatgaacagcctgcgagccgaggacacggctgtctattactgtgcgacaggaaacctgatgactacaatacgaccttttgactattggggccagggaaccctggtcaccgtctcctca

SEQ ID NO: 16274 - DNA, 304 bp, Homo sapiens
  source 1..304: mol_type = other DNA
tgaagcctctggattcaccttcagaaactactggatgcactgggtccgccaaactccagggaaggggctggtgtgggtctcagatgttcatggtgatgggactgctacaatgtacgcggactccgtggagggccgattcaccatctccagagacaacgccaagaacacgctgtttctccaagtgaacagtctgagagtcgaggacacggctctatattattgtgtaagagggggcactataacaccaggtggtatcttcggggtggactactggggccagggagccctggtcaccgtctcctca

SEQ ID NO: 16275 - DNA, 304 bp, Homo sapiens
  source 1..304: mol_type = other DNA
tgaagcctctggattcaccttcagaaactactggatgcactgggtccgccaaactccagggaaggggctggtgtgggtctcagatgttcatggtgatgggactgctacaatgtacgcggactccgtggagggccgattcaccatctccagagacaacgccaagaacacgctgtttctccaagtgaacagtctgagagtcgaggacacggctctatattattgtgtaagagggggcactataacaccaggtggtatcttcggggtggactactggggccagggaaccctggtcaccgtctcctca

SEQ ID NO: 16276 - DNA, 304 bp, Homo sapiens
  source 1..304: mol_type = other DNA
tgaagcctctggattcaccttcagaaactactggatgcactgggtccgccaaactccagggaaggggctggtgtgggtctcagatgttcatggtgatgggactgctacaatgtacgcggactccgtggagggccgattcaccatctccagagacaacgccaagaacacgctgtttctccaagtgaacagtctgagagtcgaggacacggctctatattattgtgtaagagggggcactataaccccaggtggtatcttcggggtggactactggggccagggaaccctggtcaccgtctcctca

SEQ ID NO: 16277 - DNA, 292 bp, Homo sapiens
  source 1..292: mol_type = other DNA
tgcagcctctggattcccctttgccctctatggcatgagttgggtccgccaggctccagggaaggggctggagtgggtctcaacgatttggtctcttggcacatactacgcagactccgtgaagggccggttcaccatctccagagacgattccaagagcacgttgtatctacaaatgaacagcctgacagccgaggacacggccgtgtattactgtacgaagtggactctgatatctttgggtaatgacggggcctactggggccagggaaccctggtcaccgtctcctca

SEQ ID NO: 16278 - DNA, 292 bp, Homo sapiens
  source 1..292: mol_type = other DNA
tgcagcctctggattcccctttgccctctatggcatgagttgggtccgccaggctccagggaaggggctggagtgggtctcaacgatttggtcttatggcacatattacgcagactccgtgaagggccggttcaccatctccagagacgattccaagagcacgttgtatctacaaatgaacagcctgacagccgaggacacggccgtgtattactgtacgaagtggactctgatatctttgggaaatgacggggcctactggggccagggaaccctggtcaccgtctcctca

SEQ ID NO: 16279 - DNA, 292 bp, Homo sapiens
  source 1..292: mol_type = other DNA
tgcagcctctggattcccctttgccctctatggcatgagttgggtccgccaggctccagggaaggggctggagtgggtctcaacgatttggtctcttggcacatactacgcagactccgtgaagggccggttcaccatctccagagacgattccaagagcacgttgtatctacaaatgaacagcctgacagccgaggacacggccgtgtattactgtacgaagtggactctgatatctttgggaaatgacggggcctactggggccagggaaccctggtcaccgtctcctca

SEQ ID NO: 16280 - DNA, 301 bp, Homo sapiens
  source 1..301: mol_type = other DNA
ctcagtctctggtgactccgtcagtcgtactatttactattggggctggatccgccagccccctgggagtggcctggaatggattggaagtgtctattataatggtgacaccgagtataacccgtccctcaagactcgagtcaccatttccgttgactcgtccaagaaccagttctccctggagttgccctctatgaccgccgcagacacggctatctatttttgtgcgagaagattggctgggacctaccaagcggattttgactcctggggccagggactccgagtcaccgtctcctct

SEQ ID NO: 16281 - DNA, 301 bp, Homo sapiens
  source 1..301: mol_type = other DNA
ctcagtctctggtgactccgtcagtcgtactatttactattggggctggatccgccagccccctgggagtggcctggaatggattggaagtgtctattataacggtgacaccgactataacccgtccctcaagactcgagtcaccatttccgttgactcgtccaagaaccagttctccctggagttgccctctatgaccgccgcagacacggctatctatttttgtgcgagaagattggctgggacctaccaagcggattttgactcctggggccagggactccgagtcaccgtctcctct

SEQ ID NO: 16282 - DNA, 292 bp, Homo sapiens
  source 1..292: mol_type = other DNA
tgcagcctctggaatcacctttgttcattatgccatgcactgggtccgtcaagctccagggaagggtctggagtgggtctctcttataagtgcggatggtggtaccacatactatgcagactctgtgaagggccgattcaccatctccagagacaacagcaaaaactccctgtatctgcaaatgaacagtctgagaactgaggacaccgccttgtattactgtgccccagcgaggggtggctacgactactttgactactggggccagggaaccctggtcaccgtctcctca

SEQ ID NO: 16283 - DNA, 292 bp, Homo sapiens
  source 1..292: mol_type = other DNA
tgcagcctctggattcacctttgttcatcatgccatgcactgggtccgtcaagctccagggaagggtctggagtgggtctctcttataagtgcggatggtggtaccacatactatgcagactctgtgaagggccgattcaccatctccagagacaacagcaaaaactccctgtatctgcaaatgaacagtctgagaactgaggacagtgccttgtattactgtgccccagcgaggggtggctacgactactttgactactggggccagggaaccctggtcaccgtctcctca

SEQ ID NO: 16284 - DNA, 292 bp, Homo sapiens
  source 1..292: mol_type = other DNA
tgcagcctctggattcgcctttgttcattatgccatgcactgggtccgtcaagctccagggaagggtctggagtgggtctctcttataagtgcggatggtggtaccacacactatgcagactctgtgaagggccgattcaccatctccagagacaacagcaaaaacgccctgtatctgcaaatgaacagtctgagaagtgaggacaccgccttgtattactgtgccccagcgaggggtggctacgactactttgactactggggccagggaaccctggtcaccgtctcctca

SEQ ID NO: 16285 - DNA, 298 bp, Homo sapiens
  source 1..298: mol_type = other DNA
cactgtgtctggtggctccatcactggtggcgattactactggagttggatccgccagtccccaggggagggcctggaatggattggctacatctataacagcgggaccacctactacaggccgtccctcaagagtcgacttaccatatccgtggacacgtccaagaaccacttctccctgagcctaaactctgtgactgccgcagacacggccgtctattactgtgccagggggggctggggaaaattgggatactttgacttctggggccagggagccctggtcaccgtctcctca

SEQ ID NO: 16286 - DNA, 298 bp, Homo sapiens
  source 1..298: mol_type = other DNA
cactgtgtctggtggctccatcactggtggcgattactactggagttggatccgccagtccccaggggagggcctggaatggattggctacatctataacagcgggaccacctactacaggccgtccctcaagagtcgacttaccatatccgtggacacgtccaagaaccacttctccctgaacctaaactctgtgactgccgcagacacggccgtctattactgtgccagggggggctggggaaaattgggatactttgacttctggggccagggagccctggtcaccgtctcctca

SEQ ID NO: 16287 - DNA, 298 bp, Homo sapiens; identical to SEQ ID NO: 16286
  source 1..298: mol_type = other DNA

SEQ ID NO: 16288 - DNA, 307 bp, Homo sapiens
  source 1..307: mol_type = other DNA
tgcaccgtctggattcatcttcagtcattatggcatggactgggtccgccaggctccaggcaagggactggagtgggtggcaactgtgtggaatgatggaagtaggacatattatgcagactccgtgaagggccgattcaccatctccagagacaactccaagaacacattggatctgcaaatgaacagcctgagacccgaagacacggctgtatattactgtgcgagaagtgtttacggtgactccgaaggtaggggtggggcactcgacccctggggccagggaacactggtcaccgtctcttca

SEQ ID NO: 16289 - DNA, 307 bp, Homo sapiens
  source 1..307: mol_type = other DNA
tgcaccgtctggattcatcttcagtcattttggcatggactgggtccgccaggctccaggcaagggactggagtgggtggcaactgtgttaaatgatggaagtaggacatattatgcagactccgtgaagggccgattcaccatctccagagacaactccaagaacacattggatctgcaaatgaacagcctgagacccgaggacacggctgtatattactgtgcgagaagtgtttacggtgactccgaaggtaggggtggggcactcgacccctggggccagggaacactggtcaccgtctcctca

SEQ ID NO: 16290 - DNA, 295 bp, Homo sapiens
  source 1..295: mol_type = other DNA
tgcagcgtctggatttatctttagcaaccatgccatgtactgggtccgccaggctccagggaagggactggagtgggtctcaactattgttccaagtggcgataccacatactacgaagactccgtgaagggccggttcaccatctccagagacaattccaagaacaaactgtatctgcaaatgcacagcctgagagccgaggacacggccctatattattgtgtaagaagggaggctggagcgacgcttacctttgactactggggccagggaaccctggtcaccgtctcctca

SEQ ID NO: 16291 - DNA, 295 bp, Homo sapiens
  source 1..295: mol_type = other DNA
tgcagcgtctggatttgtctttagcaaccatgccatgtactgggtccgccaggctccagggaagggactggagtgggtctcaactattgttccaagtggtgataccacatactacgaagactccgtgaagggccggttcaccatctccagagacaattccaagaacaaactgtatctgcaaatgcacagcctgagagccgaggacacggccctatattattgtgtaagaagggaggctggagcgacgcttacctttgactactggggccagggaaccctggtcaccgtctcctca

SEQ ID NO: 16292 - DNA, 304 bp, Homo sapiens
  source 1..304: mol_type = other DNA
ctcagtctctggtggcttcatcgacaattataattactactgggcctggatccgccagcccccagggaaggggctggagtggcttgggggtgtctattatagtggcaacacattctacaatccgtctctcaagagtcgcctcaccgtgtccgcagacacgcccaagaatcagttttccctgacgttgaggtctgcgaccgccgcagacacggctgtctactactgtgcgagacgctttagtgggaactcttgggctatgtactttgactactggggccagggaatcctggtcaccgtctcctca

SEQ ID NO: 16293 - DNA, 304 bp, Homo sapiens
  source 1..304: mol_type = other DNA
cagtgtatctggtggctccatcaccaattttagttactactggggctggattcgccagcccccagggaaggggctgcaatggattggcgatatttattatagtgggcacacctactacaatccgtccctgaagagtcgcctcaccatgtccgtagacacgcccaagaaccagttctccctgaccttgacctctgcgaccgccgcagacacggctgtctatttctgtgcgagacgctttagtgggaactcctgggcaatgtactttgactactggggccagggagccctggtcaccgtctcctca

SEQ ID NO: 16294 - DNA, 301 bp, Homo sapiens
  source 1..301: mol_type = other DNA
tgcagcctctggattcgtcttcagttcctataacatggtctgggtccgtcaggctccagggaaggggctggagtgggtctcatcgattggttctactagcacttacaagttctacgcagactcactgaagggccgattcaccgtctccagagacaacgccaagaactcagtgtatctgcagatgaacagcctgagagccgaggacacggctgtctattactgtgcgagaattgtgactgagactagtggtgagaccttcttcgactactggggccagggaaccctggtcaccgtctcctca

SEQ ID NO: 16295 - DNA, 301 bp, Homo sapiens
  source 1..301: mol_type = other DNA
tgcagcctctggattcgtcttcagttcctataacatggtctgggtccgtcaggctccagggaaggggctggagtgggtctcatcgattggttctactagcacttacaagttctacgccgactcactgaagggccgattcaccgtctccagagacaacgccaagaactcagtgtatctgcagatgaacagcctgagagccgaggacacggctgtctattactgtgcgagaattgtgactgagactagtggtgagaccttcttcgactactggggccagggaaccctggtcaccgtctcctca

SEQ ID NO: 16296 - DNA, 295 bp, Homo sapiens
  source 1..295: mol_type = other DNA
tgcagcctctggattcaccttcagtacttatagcatgaactgggtccgccaggctccagggaaggggctggagtggctttcatacattagtggtgatagtagtaccataacctacgcagactctgtgaagggccgattcaccatctccagagacaacggcaggaactcgctgtttctgcaaatgaacagcctgagagacggggacacggccgtctattactgtgcgagaggtttgatggctacaaaaactgactttgactactggggccagggaaccctggtcaccgcctcctca

SEQ ID NO: 16297 - DNA, 295 bp, Homo sapiens
  source 1..295: mol_type = other DNA
tgcagcctctggattcaccttcagtacttatagcatgaactgggtccgccaggctccagggaaggggctggagtgggtttcatacattagtggtgatagtaataccataacctacgcagactctgtgaagggccgattcaccatctccagagacaacggcaggaactcactgtctctgcaaatgaacagcctgagagacgaggacacggccgtgtattactgtgcgagaggtttgatggctacaaaaactgactttgactactggggccagggaaccctggtcaccgcctcctca

SEQ ID NO: 16298 - DNA, 298 bp, Homo sapiens
  source 1..298: mol_type = other DNA
cactgtctctggtgactccatcagcagtagtagtcattactggggctgggtccgccagcccccagggaagggcctggactggattgggactatctattatagtgggaccccctactacaacccgtccctcaagagtcgactcaccatgtccgtagacacgtccaagaaccagttctccctgaagctgagctctgtgaccgccgcagacacggctgtctattattgtgcgagactaaagggatacagttatgggctctttgactactggggccagggaaccctggtcaccgtctcctca

SEQ ID NO: 16299 - DNA, 298 bp, Homo sapiens
  source 1..298: mol_type = other DNA
cactgtctctggtggctccgtcagcagtaataattactactggggctggatccgccagcccccagggaagggactggagtggattgggagtatctattatagtgggagcgcctactacaacccgtccctcaagagtcgggtcaccatatccgtagacacgtctaagaaccagttctccctgaaactgggctctgtgaccgccgcagacacggctgtgtattactgtgcgagactcaagggatacagttatggtctatttgactactggggccagggaaccctggtcaccgtctcctca

SEQ ID NO: 16300 - DNA, 283 bp, Homo sapiens
  source 1..283: mol_type = other DNA
tatcgcctctggggtcaccatcagggacatccacatgagatgggctcgccaggctccagggacggggctggagtgggtctcagttgtgtatagcaatggtaatacagactacgcagactccgtgaagggccgattcaccatctccagagacaactccaagaactcgatatatcttcaaatgaatagcctgagagccgaggacacgggcatctattactgtgtgcgagatcgacttggtgattctgagtactggggccagggaaccctggtcaccgtctcctca

SEQ ID NO: 16301 - DNA, 283 bp, Homo sapiens
  source 1..283: mol_type = other DNA
taccgcctctggggtcgccatcagggacatccacatgagatgggcccgccaggctccagggacggggctggagtgggtctcagttgtgtatagcaatggtaatacagactacgcagactccgtgaagggccgattcaccatctccagagacaactccaagaactcgatatatcttcaaatgaataggctgagagccgaggacacgggcatctattactgtgtgcgagatcgacttggtgattctgagtactggggccagggaatcctggtcaccgtctcctca

SEQ ID NO: 16302 - DNA, 283 bp, Homo sapiens
  source 1..283: mol_type = other DNA
tgtcgcctctggggtcagcatcggtgacatccacatgagatgggcccgccagactccagggacgggactggagtgggtcgcagttatctacagcaatggcaatacagactacgcagactccgtgaagggccgattcaccatctccagagacaagtccatgaacgcgatgtatcttcaaatgaatcgcctgagagtcgaggacacggccatgtattactgtgtgagagatcgacttggtgattccgaatactggggccagggagccctggtcaccgtctcctca

SEQ ID NO: 16303 - DNA, 283 bp, Homo sapiens
  source 1..283: mol_type = other DNA
tgccgcctctggggccaccatcaatagtgtccacatgagatgggcccgccaggctccagggacgggactggagtgggtctcagttatttatagcaatggcaatacagactacgcagactccgtgaagggccgattcaccatctccagagacatctccaagaacacgatgtatcttctaatgaatggtctgagaaccgaggacacgggcatgtattattgtgtgagagatcgacttggtgattctgagtactggggccagggaacccaggtcaccgtctcgtca

SEQ ID NO: 16304 - DNA, 301 bp, Homo sapiens
  source 1..301: mol_type = other DNA
tgcagcctctggattcagtgtcaataacaactacataagttgggtccgccaggctccagggaaggggctggagtgggtctcagttatttatagtagtggtaccacatactacggagactccgtgaagggcagattcaccatctccagagacaattccaagaacacggtgtaccttcaaatgaacaacctgagaaccgaggacacggctgtgtattggtgtacgagagatcccgggtacgggacaccttcgggtgactggttcgacccctggggccagggaaccctggtcaccgtctcccca

SEQ ID NO: 16305 - DNA, 301 bp, Homo sapiens
  source 1..301: mol_type = other DNA
tgcagcctctggattcagtgtcagtagcaactacataagttgggtccgccaggctccagggaaggggctggagtgggtctcagttatttatagcaatggtaccacatactacggagactccgtgaagggcagattcaccatctccagagacaattccaagaacacggtgtaccttcaaatgaacaacctgagagccgaggacacggctgtgtattggtgtacgagagatcccgggtacgggacaccttcgggtgactggttcgacccctggggccagggaaccctggtcaccgtctcccca

SEQ ID NO: 16306 - DNA, 298 bp, Homo sapiens
  source 1..298: mol_type = other DNA
cagtgtctctggtggctccatcactgatcactactggaactggatccggcagtccccggggaagggactggagtgggttggccatatccgtaagactgagagtacccaccagaatccctccctcaacagtcgactcaccttatcactagacacgtccaagaaccagatctccctgaaactgagctctgtgaccgctgcggacacggccgtgtattattgtggaaggtctgatacgagtggtaatgttttcgtggaatttgactactggggccagggaatcctggtcaccgtctcctca

SEQ ID NO: 16307 - DNA, 298 bp, Homo sapiens
  source 1..298: mol_type = other DNA
cagtgtctctggtggctccatcactgatcactactggaactggatccggcagtccccggggaagggactggagtgggttggccatatccgtaagactgagagtacccaccagaatccctccctcaacagtcgactcaccttatcactagacacgtccaagaaccagatctccctgaaattgagctctgtgaccgctgcggacacggccgtgtattattgtggaaggtctgatacgagtggtaatgttttcgtggaatttgactactggggccagggaaccctggtcaccgtctcctca

SEQ ID NO: 16308 - DNA, 268 bp, Homo sapiens
  source 1..268: mol_type = other DNA
tgtagcctctgggttcatcgtcactagcaactacatgatctgggtccgccaggctccagggaaggggctggagtgggtctcagttatttatgccggtggtgccacatactacgcagactccgtgaagggccgattcaccatctccagagacagttccaagaacacactgtatcttcaaatgaacagcctgagagccgaggacacggccgtctattactgtacgaggggggactcctggggccagggaaccctggtcaccgtctcctca

SEQ ID NO: 16309 - DNA, 268 bp, Homo sapiens
  source 1..268: mol_type = other DNA
tgtagcctctgggttcatcgtcactagcaactacatgatctgggtccgccaggctccagggaaggggctggagtgggtctcagttatgtatgccggtggtgccacatactacgcagactccgtgaagggccgattcaccttctccagagacatttccaagaacacactgtatcttcacatgaaaagcctgagagccgaggacacggccgtctatttctgtacgaggggggactcctggggccagggaaccctgatcaccgtctcctca

SEQ ID NO: 16310 - DNA, 301 bp, Homo sapiens
  source 1..301: mol_type = other DNA
tacagcctctggattcaccttcagcacttatgcgatgaactgggtccgcctggctccagggagggggctggagtgggtctcatccattagtcgaactagcagtttcaaatactacgcagattctgtgaagggccgcttcagcatctccagggacaacgccatgaactcagtgtttctgcagatgaatagcctgagagccgacgacacgggtatttattattgtgcgagagatgagcaaaaagatgatgtcagggggtggttcgacccctggggccagggaacgctggtcaccgtctcctca

SEQ ID NO: 16311 - DNA, 301 bp, Homo sapiens
  source 1..301: mol_type = other DNA
tacagcctctggattcaccttcagcacttatgcgatgaactgggtccgcctggctccagggagggggctggagtgggtctcatccattagtcgaactagcagcttcaaatactacgcagattctgtgaagggccgcttcaccatctccagggacaacgccaggagctcagtgattctgcagatgaatagcctgagagccgacgacacgggagtttattattgtgcgagagatgagcaaaaggatgatgtcagggggtggttcgacccctggggccaggggacgctggtcaccgtctcctca

SEQ ID NO: 16312 - DNA, 297 bp, Homo sapiens
  source 1..297: mol_type = other DNA
aagggttctggatacagcttttccacgtactggatcggctgggtgcgccagatgcccgggaaaggcctggagtggatgggactcatctttcctggtaactctgatacccgatacagcccgtccctccaaggccaggtcaccctctcagttgacaggtccatcaccaccgcctacctgcagtggagcagcctgaaggcctcggacaccgccatatatttctgtgggaggctcttcaaatataacaattactggaccattgacttctggggccagggaaccctggtcaccgtctcctca

SEQ ID NO: 16313 - DNA, 297 bp, Homo sapiens
  source 1..297: mol_type = other DNA
aagggttctggatacagcttttccacgtactggatcggctgggtgcgccagatgcccgggaaaggcctggagtggatgggactcatctatcctggtaactctgatacccgatacagcccgtccctccaaggccaggtcaccctctcagttgacaggtccatcaccaccgcctacctgcagtggagcagcctgaaggcctcggacaccgccatatatttctgtgggaggctcttcaaatataacaattactggaccattgacttctggggccagggaaccctggtcaccgtctcctca

SEQ ID NO: 16314 - DNA, 301 bp, Homo sapiens
  source 1..301: mol_type = other DNA
tgcagcctctggattcacctttactagttattcttttctctgggtccgccaggctccaggcaaggggctggactgggtggcaattatatcagatgatggacgcagtaggttctacgcagactccgtgaagggccgattcaccatctccagagacgattccaagaatacactgtatctccaaatgaacagcctgagagctgaggacacggctgtgtattactgtgcaagagaaggtgcagtggtgccaacttctcgcgcgcttgactactggggccagggaaccctggtcaccgtctcccca

SEQ ID NO: 16315 - DNA, 301 bp, Homo sapiens
  source 1..301: mol_type = other DNA
tgcagcctctggattcacctttattagttattcttttctctgggtccgccaggctccaggcaaggggctggactgggtggcaattatatcagacgatggacgcagtaggttctacgcagactccgtgaagggccgattcaccatctccagagacgattccaagaacacactgtatctccaaatgaacagcctgagagctgaggacacggctgtgtattactgtgcaagagaaggtgcagtggtgccaacttctcgcgcgcttgactactggggccagggaaccctggtcaccgtctcccca

SEQ ID NO: 16316 - DNA, 277 bp, Homo sapiens
  source 1..277: mol_type = other DNA
cactgtctctggtgactccctccgaagcgcctactggagctggatccgccagcccccggggaaggggctggagtggattggttatctctattacactggaaccaccgactacaacccctccctcagtagccgagtcaccatttcaatagacaggtccaagaaccagttctccctgaagctgatctctgtgaccgctgcggacacggccgtgtattactgtgcgaaagaggggcctgatggcaactggggccagggaaccctggttaccgtcaccgca

SEQ ID NO: 16317 - DNA, 277 bp, Homo sapiens
  source 1..277: mol_type = other DNA
cactgtctctggtgactccctccgaagcgcctactggagctggatccgccagcccccggggaaggggctggagtggattggttatctctattacactggaaccaccgattacaacccctccctcagtagccgagtcaccatatcaatagacaggtccaagaaccagttctccctgaagctgatctctgtgaccgctgcggacacggccgtgtattactgtgcgaaagaggggcctgatggcaactggggccagggaaccctggttaccgtcaccgca

SEQ ID NO: 16318 - DNA, 277 bp, Homo sapiens
  source 1..277: mol_type = other DNA
cactgtcgctggtgactccctccgaagcacctactggagctggatccgccagcccccggggaaggggctggagtggattggctacatctattacactggaaccaccgactacaacccctccctcagtagccgagtcaccatatcaatagacaggtccaagaaccagttctccctgaacctgatctctgtgaccgctgcggacacggccgtgtattactgtgcgaaagaggggcctgatggcaactggggccagggaacccgggttaccgtcacctca

SEQ ID NO: 16319 - DNA, 301 bp, Homo sapiens
  source 1..301: mol_type = other DNA
tgcagcctctggattcgacttcaattattatggcatgcactgggtccgccagcctccaggcaaggggctggagtggctggcacttatatcatatgatggaagcaaaaacgtctatgcagactccgtgaagggccgattcagcatttccagagacaattcccagaacatcgtttatctagaaatgcacagcctgcgagaagacgacacagctgtcttctactgtgtgagaggtcgggagtggttgtttattgaatacttctttgatttctggggccagggaagcctggtcaccgtctcgtca

SEQ ID NO: 16320 - DNA, 301 bp, Homo sapiens
  source 1..301: mol_type = other DNA
tgcagcctctggattcgacttcaattattatggcatgcactgggtccgccaggctccaggcaaggggctggagtggctggcacttatatcatatgatggaagcaaaaacctctatgcagactccgtgaagggccggttcatcatttccagagacaattcccagaacatcctttatctacaaatgcacagcctgcgagaagacgacacagctgtcttttactgtgtgagaggtcgggagtggttgtttattgaatacttctttgatttctggggccagggaagcctggtcaccgtctcgtca

SEQ ID NO: 16321 - DNA, 307 bp, Homo sapiens
  source 1..307: mol_type = other DNA
tgcagcctctggattcaccttcagtgactactacatgagctggatccgccaggctccagggaaggggctggagtgggtttcatacattagtagcagtaatactgacagaaactacgcagactctgtgaagggccgattcaccatctccagagacaacgccaagaactcactttatctgcaaatgaaaagcctgagagccgaggacacggccgtgtattactgtgcgagagacgtctctacctacggtggtatgtccgtcttcgcttttgatatctggggccaagggacaatggtcaccgtctcttca

SEQ ID NO: 16322 - DNA, 307 bp, Homo sapiens
  source 1..307: mol_type = other DNA
tgcagcctctggattcaccttcagtgactactacatgagctggatccgccaggctccagggaaggggctggagtgggtctcatacattagtagcagtaatactgacagaaactacgcagactctgtgaagggccgattcaccatctccagagacaacgccaagaactcactttatctgcaaatgaaaaacctgagagccgaggacacggccgtgtattactgtgcgagagacgtctctacctacggtggtatgtccgtcttcgcttttgatatctggggccaagggacaatggtcaccgtctcttca

SEQ ID NO: 16323 - DNA, 316 bp, Homo sapiens
  source 1..316: mol_type = other DNA
cgcagcctctaatttcgccttgagtcattatgacatgtcctgggtgcgccaggctccaggcaaggcgccggagtggatggcatttatatcttttagtggacttgatcgacaatatcaaagatctgtgaggggccgattcaccatctccagagacgattccaggaacaggctgtttctggcaatgagcagcctgacaactgaagacacggctatttactattgtgcgagaaatgtccgccaaagggaccgccggccgccatcgttcgcccaccacatggacgtctggggcaaagggaccgcggtcaccgttatcgta

SEQ ID NO: 16324 - DNA, 316 bp, Homo sapiens
  source 1..316: mol_type = other DNA
cgcagccgctaatttcgccttgagtcattatgacatgtcctgggtgcgccaggctccaggcaaggcgccggagtggatggcatttatatcgtttgatggtcttgatcgacaatatcaaagatccgtgaggggccgattcaccatctccagagacgattccaggaaccggctgtttctggcaatgagcagcctgacaactgaagacacggctatttactattgtgcgagaaatgtccgccaaagggaccgccggccgccatcgttcgcccaccacatggacgtctggggcaaagggaccgcggtcaccgttatcgta

SEQ ID NO: 16325 - DNA, 316 bp, Homo sapiens
  source 1..316: mol_type = other DNA
cgcagcctctaatttcgccttgagtcattatgacatgtcctgggtgcgccaggctccaggcaaggcgccggagtggatggcatttatatcatttgatgggtttaatcgacaatatcaaagatccgtgaggggccgattcaccatctccagagacgattccaggaacaggctgtttctggcaatgagcagcctgacaactgaagacacggctatttactattgtgcgagaaatgtccgccaaagggaccgccggccgccatcgttcgcccaccacatggacgtctggggcaaagggaccgcggtcaccgttatcgta

SEQ ID NO: 16326 - DNA, 304 bp, Homo sapiens
  source 1..304: mol_type = other DNA
tgtaggctctggattcagctttggaagttattggatgggctgggtccgccaggctccagggaagggactggagtgggtggccagtataacgccagatggaggagcgacatactatgtagactctatgaagggccgattcaccatctccagagacaacgtcaagaattcagtgtttctgcagatggacaccctgagagccgaggacacggccgtgtattattgtgagagagaggaatactgtggtagcggtacctgttacaagtctgcccactggggccagggaaccctggtcatcgtctcatca

SEQ ID NO: 16327 - DNA, 304 bp, Homo sapiens
  source 1..304: mol_type = other DNA
tgtaggctctggattcagctttggaagttattggatgggctgggtccgccaggctccagggaagggactggagtgggtggccagtataacgccagatggaggagcgacatactatgtagactctatgaagggccgattcaccatctccagagacaacgtcaagaattcagtgtttctgcagatggacaccctgagagccgaggacacggccgtgtattattgtgagagagaggaatactgtggtagcggtacctgttacaagtctgcccactggggccagggaaccctggtcaccgtctcatca

SEQ ID NO: 16328 - DNA, 298 bp, Homo sapiens
  source 1..298: mol_type = other DNA
tgcagcctctggattctcctttggcacctacgccatgaattgggtccgccaggctccagggaaggggctggaatgggtctcgtctcttgctggtggtggcggcgacatacattatgccgactccgtgaagggccgattcaccatctccagagacaattccaacaacttagtttatctgcaaatgaacaacctgagagtcgaggacacggccgtatattattgtgcgaaagaccgaacgcccgatggtcgaaccgaaattgactactggggccagggaaccctggtcaccgtctcctca

SEQ ID NO: 16329 - DNA, 298 bp, Homo sapiens
  source 1..298: mol_type = other DNA
tgcagcctctggattctcctttggcacctacgccatgaattgggtccgccaggctccagggaaggggctggaatgggtctcgtctcttgctggcggtggcggcgacatacattatgccgactccgtgaagggccgattcaccatctccagagacaattccaacaacttagtttatctgcaaatgaacaacctgagagtcgaggacacggccgtatattattgtgcgaaagaccgaacgcccgatggtcgaaccgaaattgactactggggccagggaaccctggtcaccgtctcctca

SEQ ID NO: 16330 - DNA, 319 bp, Homo sapiens
  source 1..319: mol_type = other DNA
cgatgtgtccggtgtgtctttaaatgattattcgtggagttgggtccgcctatttccaggaaacgggctggagtggattggagaactgactcacagtgggagcaccaattacaacccgtccctcaagagtcgagtctccatttccaaggaaaagtccgtcaatcagttctccctgaaattgctctctatgaccgccgcggacacggctctctatttctgtgcgcgcgaaagagtcctccgtttctcggctcctcgatataatttcacgaggggattttttgactcttggggccagggcacccacgtcaccgtgtcctca

SEQ ID NO: 16331 - DNA, 319 bp, Homo sapiens
  source 1..319: mol_type = other DNA
cgatgtgtccggagtgtctttaagtgattattcgtggagttgggtccgcctatttccaggaaaggggctggagtggattgcggaattgacttacagtgggagcaccaattacaacccgtccctcaagggtcgagtcaccatttccgaagaaaagtccgtcaatcagttctccctgaaactactctcaatgaccgccgcggacacgggtctctatttctgcgcgcgcgaaagagtcctccgtttctcggctcctcgatataatttcacgaggggcttttttgactcttggggccagggcacccacgtcaccgtctcctca

SEQ ID NO: 16332 - DNA, 301 bp, Homo sapiens
  source 1..301: mol_type = other DNA
tgtcgcctctctgttaagcatcgataactatgccatgcactgggtccgccaggatccaggcaagggactggagtgggtggcactgatttcacatgatggatatcacacattttacgcggactctgtgaggggccgattcaccatctccagagacgattccacggacacattgtttctacaaatgaacagcctgagacttgaagacacggctgtgtattactgtgcgagagatcccaggaagtccatggtggggcgctactttgaccgctggggccagggaaccaaggtcaccgtctctcca

SEQ ID NO: 16333 - DNA, 301 bp, Homo sapiens
  source 1..301: mol_type = other DNA
tgtcgcctctctgttaagcatcgataattatgccatgcactgggtccgccaggatccaggcaagggactggagtgggtggcactgatttcacatgatggatatcacacattttacgcggactctgtgaggggccgattcaccatctccagagacgattccacggacacattgtttctacaaatgaacagcctgagacttgaagacacggctgtgtattactgtgcgagagatcccaggaagtccatggtggggcgctactttgaccgctggggccagggaaccaaggtcaccgtctcttca

SEQ ID NO: 16334 - DNA, 286 bp, Homo sapiens
  source 1..286: mol_type = other DNA
tgaagtttctggactcaccttcgttgcccagtggatgcagtgggtccgccaagttccagggaaggggctgctgtcggtcgcacgtattagtaatgatgggagtgacataatttacgcggactccgtgaagggccgattcaccatctccagagacaacaccaagagtatggtctatctgcaaatggacagtctgcgcgtcgacgacacgggtgtctattattgtgctgacggtggggcagtgccattggggttctggggccaggggactctagtcaccgtctcctca

SEQ ID NO: 16335 - DNA, 286 bp, Homo sapiens
  source 1..286: mol_type = other DNA
tgaagtttctggactcaccttcgttgcccagtggatgcagtgggtccgccaagtgccagggaaggggctgctgtcggtcgcacgtattagtaatgatgggagtgacataatttacgcggactccgtgaagggccgattcaccatctccagagacaacaccaagagtatggtctatctgcaaatggacagtctgcgcgccgacgacacgggtgtctattattgtgctgacggtggggcagtgccattggggttctggggccaggggactctagtcaccgtctcctca

SEQ ID NO: 16336 - DNA, 286 bp, Homo sapiens
  source 1..286: mol_type = other DNA
tgaagtttctggactcaccttcgttgcccagtggatgcagtgggtccgccaagtgccagggaaggggctactgtcggtcgcacgtattagtaatgatgggagtgacataatttacgcggactccgtgaagggccgattcaccatctccagagacaacaccaagagtatggtctatctgcaaatggacagtctgcgcgccgacgacacgggtgtctattattgtgctgacggtggggcagtgccattggggttctggggccaggggactctagtcaccgtctcctca

SEQ ID NO: 16337 - DNA, 294 bp, Homo sapiens
  source 1..294: mol_type = other DNA
gcttctggatacaccttcactaggcatgccatacattgggtgcgccaggcccccggacaaaggcttgagtggatggggtggatcaacggtgtcaatggtgagacaaaatattcacagaagttccaggacagagtctccatgaccagcgacacatccgcgagcacagtctacatggacctgagcagcctgagatctgaagacacggctgtgtattactgtgctaaaggtggcgcatctcccccgggcaactggttcgacccctggggccagggaaccctggtcaccgtctcttca

SEQ ID NO: 16338 - DNA, 294 bp, Homo sapiens
  source 1..294: mol_type = other DNA
ggttctggatacaccttcactaggcatgccatacattgggtgcgccaggcccccggagaagggcttgagtggatgggatggatcaacggtgtcaatggtgagacaaaatattcacagaagttccaggacagagtctccatgaccagggacacatccgcgagcacagcctacatggacctgagcagcctgacatctgaagacacggctgtgtattactgtgcgaaaggtggcgcatctcccccgggcaactggttcgacccctggggccagggaaccctggtcaccgtctcctca

SEQ ID NO: 16339 - DNA, 305 bp, Homo sapiens
  source 1..305: mol_type = other DNA
ccatctccggggacagtgtctctagggacagtgctgcttgggactggatcaggcagtccccatcgagaggccttgagtggctgggaaggacatactacaggtccaagtggtttactgcttacgcagtgtctgtgagaggtcgaataaccgtcatcccagacacatcccagaaccagttctccctgcacctgaactctgtgactcccgaggacacggctgtatattactgtgcaagagagggggtgtcccggctaaattggtacttcgatctctggggccgtggcaccctggtcattgtctcctca

SEQ ID NO: 16340 - DNA, 305 bp, Homo sapiens
  source 1..305: mol_type = other DNA
ccatctccggggacagtgtctctagggacagtgctgcttgggactggatcaggcagtccccatcgagaggccttgaatggctgggaaggacatactacaggtccaagtggtttagtgcttatgcagaatctgtgagaagtcgaataaccgtcatcccagacacatcccagaaccagttctccctgcacctgaactctgtgactcccgaggacacggctgtgtattactgtgcaagagagggggtgtcccggctaaattggtacttcgatctctggggccgtggcaccctggtcattgtctcctca

SEQ ID NO: 16341 - DNA, 289 bp, Homo sapiens
  source 1..289: mol_type = other DNA
cgcagcctctggatttagtgtcggtgacgacaatgtagtttgggtccgtcaggctccagggaagggtctggagtgggtctcagtcctttatcgtgttggaggctcagcctacgcagactccgtgaagggccggttcaccatctccagagagaagtccaacaacacggtgtttcttcaaatgaaaagactgagagtcgaagactcggccgtgtattattgtgcgaaagaaggcgccttcggtgactactttgagaactggggccagggaaccctggtcatcgtctcctca

SEQ ID NO: 16342 - DNA, 289 bp, Homo sapiens
  source 1..289: mol_type = other DNA
cgcagcctctggatttaccgtcggtgacgacaatgtagtttgggtccgtcaggctccagggaagggtctggagtgggtctcagttctttatcgtgttggaggcacagcctacgcagactccgtgaagggccggttcaccatctccagagagaagtccaacaacacggtgtttcttcaaatgaaaagactgagagccgaggacacggccgtgtattactgtgcgaaagaaggcgccttcggtgactactttgagaactggggccagggaaccctggtcaccgtctcctca

SEQ ID NO: 16343 - DNA, 295 bp, Homo sapiens
  source 1..295: mol_type = other DNA
cactgtctctggtgcctccatcagcagtagtagttacttctggggctggatccgccagcccccagggaagggcctggagtccattgggagtatctattatactgggaccaccctctacaacccgtccctcaagagtcgagtcaccatatctgtagacacgtccaagaatcagtttttcctgaagctgaactctgcgaccgccgctgacacggctgtatattactgtgcgagacgcgattatggcagcagccaatttgactactggggccagggaaccctggtcaccgtctcctca

SEQ ID NO: 16344 - DNA, 295 bp, Homo sapiens
  source 1..295: mol_type = other DNA
cgctgtctctggtgcctccatcatcactagtggtgattactgggcctggatccgccagcccccagggaagggcctggagtccattggcagtatctactttagtgggaccaccctctacaacccgtccctcaagagtcgagtcaccatgtctgtagacacgtccaagaaccagttctccctgaacgtgaactctgcgaccgccgctgacacggctgtatattactgtgccagacgcgattatggcagcagccaatttgactactggggccagggagccctggtcaccgtctcctca

SEQ ID NO: 16345 - DNA, 307 bp, Homo sapiens
  source 1..307: mol_type = other DNA
tgcagcctctggattcaccttcattagctatggcatgcactgggtccgccaggctccaggcaaggggctggagtgggtggcagttgtatcgtatgatggaaatgataaatactatgcagactccgtgaagggccgattcaccatctccagagacaattccaagcacacggtgtatttgcaaacgaatagtctgagacctgaggacacggctgtgtattactgtgcgaaagatgttacggtgacaacgagctactacttctactacatggacggctggggcaaagggaccacggtcaccgtctcctca

SEQ ID NO: 16346 - DNA, 307 bp, Homo sapiens
  source 1..307: mol_type = other DNA
tgcagcctctggattcaccttcagtaactatggcatgcactgggtccgccaggctccaggcaaggggctggagtgggtggcagttatatcatatgatggaagtgatgaatactatgcagactccgtgaagggccgattcaccatctccagagacaattccaagaacacgctgttcttgcaaatgaacagcctgagagctgaggacacggctgtatatttctgtgcgaaagatgttacggtgacaacgagctactacttctactacatggacggctggggcaaagggaccacggtcaccgtctcctca

SEQ ID NO: 16347 - DNA, 307 bp, Homo sapiens
  source 1..307: mol_type = other DNA
tgcagcctctggattcaccttcagtaactatggcatgcactgggtccgccaggctccaggcaaggggctggagtgggtggcagttatatcatatgatggaagtgataaatactatgcagactccgtgaagggccgattcaccatctccagagacaattccaagaacacgctgtatctgcaaatgaacagcctgagagctgaggacacggctgtgtattactgtgcgaaagatgttacggtgacaacgagctactacttctactacatggacggctggggcaaagggaccacggtcaccgtctcctca

SEQ ID NO: 16348 - DNA, 280 bp, Homo sapiens
  source 1..280: mol_type = other DNA
cgctgtctctggtgagtccatcaccagtggtgacaactactggagttggatccgccagccccccgggcagggcctggagtggattgggtacattcattccactggcaacacctactacaacccgtccctgaggagtcgagttaccatatccacgtccaagacccagttctccctgaatctgacctctgtgactgccgctgacacggccgtttattactgtgcccgaggattggcgggggctcgctactggggccagggagccctggtcaccgtctcctca

SEQ ID NO: 16349 - DNA, 280 bp, Homo sapiens
  source 1..280: mol_type = other DNA
ctctgtctctggtgagtccatcaccagtggtgacaactactggagttggatccgccagcccccagggcagggcctggagtggattgggtacattcattccactggcaacacctactacaacccgtccctgaagagtcgagttaccatatccacgtccaagacccagttctccctgaatctgacctctgtgactgccgcagacacggccgtttattactgtgcccgaggattggcgggggctcgctactggggccagggagccctggtcaccgtctcctca

SEQ ID NO: 16350 - DNA, 280 bp, Homo sapiens
  source 1..280: mol_type = other DNA
cgctgtctctggtgagtccatcaccagtggtgactactattggagttggatccgtcaggccccagggcagggcctggagtggattgggtacattcattccactggcaacacctactacaacccgtccctggagagtcgagtaaccatatccacgtccaagacccagttttctctgaatctgacctctgtgactgccgcagacacggccgtttattactgtgcccgaggattggcgggggctcgctactggggccagggagccctagtcaccgtctcctca

SEQ ID NO: 16351 - DNA, 304 bp, Homo sapiens
  source 1..304: mol_type = other DNA
cgctgtctctggcgtctcaatcagcagtagtaactggtggagttggctccgccagcccccaggcaaggggctggagtggattggagaaatctctcgtgataggagtcccacctacaacccgtccctcaagagtcgagtcaccatctcagtagactggtccaagaatcagttctccctgaacctgacctccatgaccgccgcggacacggccgtctattactgttcgagacgatcttgtcctactggcagctgctactacgcctttgactactggagccagggaaccctggtcaccgtctcctca

SEQ ID NO: 16352 - DNA, 304 bp, Homo sapiens
  source 1..304: mol_type = other DNA
cgctgtctctggcgtctcaatcagcagtgctaactggtggagttggctccgccagtccccaaacacggggctggagtggattggagaaatctctcgtgataggagccccacgtacaacccgtccctcaagagtcgagtcaccatctcagtagactggtccaagaatcacttctccctgaacctgacctccatgaccgccgcggacacggccgtctattactgttcgagacgatcttgtcctactggcagctgctactacgcctttgactactggagccagggaaccctggtcaccgtctcctca

SEQ ID NO: 16353 - DNA, 303 bp, Homo sapiens
  source 1..303: mol_type = other DNA
gcttcaggttacacctttactcaatacaatatcgcctgggtgcgccaggcccctgggcaagggcttgagtggatggggtggatcagtggttacaatggaaacacaaagtatacacagaagttccagggcagagtcaccatggccatagacacatccacgagcacagccttcatggaactgaggagcctgacatctgacgacacggccgtgtattattgtgcgagagacgtccactgtgctggtggaagttgctacatgccccctgactactggggccagggaaccctggtcagcgtctcctcc

SEQ ID NO: 16354 - DNA, 303 bp, Homo sapiens
  source 1..303: mol_type = other DNA
gcttctggttacacctttactcaatataatatcgcctgggtgcgccaggcccctgggcaagggcttcagtgggtgggatggatcagtggttacaatggaaacacaaagtacacacagaagttccagggcagagtcaccatggccatagacacatccacgagcacagccttcatggaactgaggagcctgacatctgacgacacggccgtgtattattgtgcgagagacgtccactgtgctggtggaagttgctacatgccccctgactactggggccagggaaccctggtcagcgtctcctcc

SEQ ID NO: 16355 - DNA, 298 bp, Homo sapiens
  source 1..298: mol_type = other DNA
tgcagcgtctggattcaccttcagtaactctgccatgcactgggtccgccaggctccaggcaaggggctggagtgggtggcagttatctggcctgatgggagtaatacatattatgcaggctctgtgaggggccgagtcaccatctccagagacaattccgagaacatgctctatttggacataaagagcctgagaggcgaggacacggctgtttattactgtacgagagcggcgggatggaccttctactactacatggacgtctggggcaaagggacaacggtcaccgtctcctca

SEQ ID NO: 16356 - DNA, 298 bp, Homo sapiens
  source 1..298: mol_type = other DNA
tgcagcgtctggattcaccttcagtaactctgccatgcactgggtccgccaggctccaggcaaggggctggagtggctggcagttatctggtctgatggaagtaatacatactatgcaggctctgtgaggggccgagtcaccatctccagagacaattccgagaacatgctctatttggacataaagagcctgagaggcgaggacacggctgtttattactgtacgagagcggcgggatggacgttctattactacatggacgtctggggcaaagggacaacggtcaccgtctcctca

SEQ ID NO: 16357 - DNA, 298 bp, Homo sapiens; identical to SEQ ID NO: 16356
  source 1..298: mol_type = other DNA

SEQ ID NO: 16358 - DNA, 283 bp, Homo sapiens
  source 1..283: mol_type = other DNA
tgcagcctctggattcaccttcagtgattatgagatgaattgggtccgccagactccagggaaggggctggagtggattgcatacattagtactagtgacaccatatattacgcagactccgtgcagggccgatttagcatttccagagacaacgacaagaattcactgtatctgcaaatgaacagcctgagaaccgaggacacggctgtttattattgtgcatcgttgggatatggccactccgccttctggggccagggaaccctggtcaccgtctcatca

SEQ ID NO: 16359 - DNA, 283 bp, Homo sapiens
  source 1..283: mol_type = other DNA
tgcagcctctggattcaccttcagtaactatgagatgaattgggtccgccagactccagggaaggggctggagtggattgcatacattagtactagtgacaccatatattacgcagactctgtgcagggccgattcaccatttccagagacaacgtcaagaattcactgtttctgcaaatgaacagcctgagaaccgaggacacggctgtttattactgtgcatctttgggatatggccactccgccttctggggccagggaaccctggtcaccgtctcatca

SEQ ID NO: 16360 - DNA, 298 bp, Homo sapiens
  source 1..298: mol_type = other DNA
tgcagcctctggattcacctttagcagctttgccatgggctgggtccgccaggctccagggaaggggctggagtgggtctcaagtcttagtgccaatggcgctgaaacattctacgcagactccgtgaagggccgcttcaccatatccagagacgactccgagagcacggtgtctctggaaatgaacagcctgagagccgaggacacggccatatattactgtgcgaaatgggtggtggcaggtgatatcgaatattttgactactggggccagggaaccctggtcaccgtctcctca

SEQ ID NO: 16361 - DNA, 298 bp, Homo sapiens
  source 1..298: mol_type = other DNA
tgcaacctctggattcggctttagttactctgccatgggctgggtccgccaggctccagggaaggggctggagtgggtctcaagtcttagtgatgacagtgctcatatattctacgcagactccgtgaggggccgcttcaccatctccagagacaattccaagagcaccctgtatctgcacatgaacagcctgacagtcgaggacacggccgtctattactgtgcgaagtgggtggtggctggtgacatcgagtactttgactattggggccagggaaccccggtcaccgtctcctct

SEQ ID NO: 16362 - DNA, 298 bp, Homo sapiens
  source 1..298: mol_type = other DNA
tgcaacctctggattcagctttagctactctgccatgggctgggtccgccaggctccggggaaggggctggagtgggtctcgagtcttagcccggatagtgtccatatcttctacgcagactccgtgaggggccggttcaccatctccagagacaattccaaggacaccctgtatctgcaaatgaacagcctgagagtcgaggacacggccgaatattactgtgcgaagtgggtggtggctggtgacatcgagtactttgactactggggccagggaaccctggtcaccgtctcctca

SEQ ID NO: 16363 - DNA, 298 bp, Homo sapiens
  source 1..298: mol_type = other DNA
tgcaacctctggattcagctttagctactctgccatgggctgggtccgccaggctccggggaaggggctggagtgggtctcaagtcttagtccggatagtgtccatatcttctacgcagactccgtgaagggccggttcaccatctccagagacaattccaaggacaccctgtatctgcaaatgaacagcctgagagtcgacgacacggccgtatattactgtgcgaagtgggtggtggctggtgacatcgagtactttgactactggggccagggaaccctggtcaccgtctcctca

SEQ ID NO: 16364 - DNA, 295 bp, Homo sapiens
  source 1..295: mol_type = other DNA
tgcaacctctggattcacctttagcagttctgccatgggctgggtccgccaggctccagggaaggggctgcagtgggtctcaaatctttttgatagtcgtaatatattctacgcagactccgtgcagggccgattcaccatctccagagacaattccaagaacatgctgtatttgcaaatgaacaacctgagaggcgaggacaccgccgtatattactgtgcgaaatgggtggtggctggtgacatcgagtactttgactactggggccagggaaccctggtttccgtctcctcc

SEQ ID NO: 16365 - DNA, 298 bp, Homo sapiens
  source 1..298: mol_type = other DNA
tgcaacctctggattcagctttagctactctgccatgggctgggtccgccaggctccagggaaggggctggagtgggtctcaagtcttagtgatgatagtcgtcatatattctactcagactccgtgaggggccggttcaccatctccagagacaattccaagaacaccctgtggctgcaaatgaacagcctgagagtcgaggacacggccatatattactgtgcgaaatgggtggtggctggtgacatcgagtactttgactactggggccagggaaccctggtcaccgtctcctca

SEQ ID NO: 16366 - DNA, 301 bp, Homo sapiens
  source 1..301: mol_type = other DNA
cactgtctctggtggctccatcagcagtagtagttactactggggctggatccgccagcccccagggaaggggctggagtggattgggaatatctactatagtgggagcacctaccacaacccgtccctcaagagtcgagtcaccatatccgtagacacgtccaagaaccaattctccctgaagctgagctctgtgaccgccgcagacacggctgtgtattactgtgcgagacacgttcatcgagtgtatgagtactactttgagtactggggccagggaaccctggtcaccgtctcctca

SEQ ID NO: 16367 - DNA, 301 bp, Homo sapiens
  source 1..301: mol_type = other DNA
cactgtctctggtggctccatcagcagtagtaattactactggggctggatccgccagcccccagggaaggggctggagtggattggaaatatctattatagtgggagcacctacaacaacccgtccctcaagagtcgagtcaccatatccgtagacacgtccaagaaccaattctccctgaagctgagctctgtgaccgccgcagacacggctgtgtattactgtgcgagacacgttcatcgagtgtatgagtactactttgagtactggggccagggaaccctggtcaccgtctcctca

SEQ ID NO: 16368 - DNA, 304 bp, Homo sapiens
  source 1..304: mol_type = other DNA
tgcagcctctggtttcaccttcagtacttatggcatgaactgggtccgccaggctccagggaaggggctggattgggtttcatacattactgatagtggtagtaacagatactacgcagactctgtgaggggccgcttcaccatctccagagacaatgccaagaactcactgtttctgcaaatgagcagcctcagagacgaggacacggctgtgtattactgtgcgagagatataatgacttttggggggcgcgcaggggcttttgattcctggggccagggaaccctggtcaccgtctcctca

SEQ ID NO: 16369 - DNA, 304 bp, Homo sapiens
  source 1..304: mol_type = other DNA
tgcagcctctggtttcaccttcagttcttatggcatgaactgggtccgccaggctccagggaaggggctggattggatttcatacattactgatagtggtagtaacagattctacgcagactctgtgaggggccgcttcaccatctccagagacaatgccaagaactcactgtttctgcaaatgagcagcctcagagacgaggacacggctgtgtattactgtgcgagagatataatgacttttggggggcgcgcaggggcttttgattcctggggccagggaaccctggtcaccgtctcctca

SEQ ID NO: 16370 - DNA, 297 bp, Homo sapiens
  source 1..297: mol_type = other DNA
ggttttggatccgactttcccaattattggataggctgggtgcgccagatgcccggtaaaggcctggagtggatgggactcatctatcctggtgactctgataccagatacggcccgcccttttatggcccggtcaccatctccgccgacaagtccaccgccaccgcctacctgcagtggaccagtctgcgggcctcagacagcggcatttattactgtgtgaggtacggcccagagacaatgcgtttcaccagtattgacttgtggggaccgggaaccctggtcaccgtatcctca

SEQ ID NO: 16371 - DNA, 301 bp, Homo sapiens
  source 1..301: mol_type = other DNA
caagggttttggatccgactttgccagttattggataggctgggtgcgccagcctcccggtaagggcctggagtggatgggactcatctatcctggtgactctgataccagatatggcccgcccttttatggcccggtcaccatctccgccgacaagtccaccgccaccgcctacctgcagtggaccagtctgcgggcctcagacagcggcatttattactgtgtgaggtacggcccagagacaatgcgtttcaccagtattgacttgtggggaccgggaaccctggtcaccgtttcctca

SEQ ID NO: 16372 - DNA, 286 bp, Homo sapiens
  source 1..286: mol_type = other DNA
tgcagcctctggattcaccttcactgactactccatgaactggatccgccaggctccagggaagggtctggagtgggtttcatacattagtcgtggtgctggtagaatgcactacccagactctgtgaagggccgattcaccatctccagggacaacgccaagaactcattgtatctgcaaatgaacagcctgagggtcgaggacacggccgtgtattattgtgtgagagatcaaggatggacttttgatatctggggccaagggacaatggtcaccgtctcctca

SEQ ID NO: 16373 - DNA, 286 bp, Homo sapiens
  source 1..286: mol_type = other DNA
tgcagcctctggattcaccttcagtgactactccatgaactggatccgccaggctccagggaaggggctggagtgggtttcatacattagtggtggtgctggtagaatgcactacgcagactctgtgaagggccgattcaccatctccagggacaacgccatgaactcattgtatctgcaaatgaacagcctgagagtcgaggacacggccgtatactattgtgtgagagatcaagggtggacttttgatatctggggccaagggacaatggtcaccgtctcctca

SEQ ID NO: 16374 - DNA, 292 bp, Homo sapiens
  source 1..292: mol_type = other DNA
tgcagtctcgggattcaacgtcaacggttttgaaatgaattggatccggcaggctccaggaaaggggctggagtgggtatcatacattagcactgatggtgcaacgatctaccacgcaaattccgtgaagggccgatttaccatctccagagacggcgccaagaattcggtgtacctggacatgaccggcctgagagtcgacgacacggccgtttatttctgtgcgagggggctttaccacctgccgccctttgacttctggggccagggaaccccggtcaccgtctcctca

SEQ ID NO: 16375 - DNA, 292 bp, Homo sapiens
  source 1..292: mol_type = other DNA
tgcagtctctggattcagcgtctacggttttgaaatgaattggatccgccaggctccagggaagggacttgagtggatctcatatataagtgttgatggtggaacgatatactacgcacactccgtgaacggccgctttaccatctccagagacagcgccaacaattctgtgtacctgcaaatgagcggcctgagaaccgacgacacggctgtttattactgtgcgagaggtctttaccacctgccgccctttgacttctggggccagggaaccccggtcaccgtctcctca

SEQ ID NO: 16376 - DNA, 292 bp, Homo sapiens
  source 1..292: mol_type = other DNA
tgcagtctcgggattcaacgtcaacggttttgaaatgaattggatccggcaggctccaggaaaggggctggagtgggtatcatacattagcactgatggtgcaacgatctaccacgcaaattccgtgaagggccgatttaccatctccagagacggcgccaagaattgggtgtacctggacatgaccggcctgagagtcgacgacacggctgtttattactgtgcgagggggctttaccacctgccgccctttgacttctggggccagggaaccccggtcaccgtctcctca

SEQ ID NO: 16377 - DNA, 307 bp, Homo sapiens
  source 1..307: mol_type = other DNA
tagaggttctggattcacctttggtgattctgctctgaactgggtccgccaggctccagggaaggggctggagtgggtaggtttaattagaagcaaaattcatggtgggacttcagcgtacggcgcgtctgtggagggcagattcaccatctcaagagatgactccgaaagcatcgcctatctgcaaatgaacagtctgaaaaccgaggacacagccgtctattactgtactagagacacgtgggtcaattggcagcagccctgctatgactactggggccagggaatcctggtcaccgtctcctca

SEQ ID NO: 16378 - DNA, 307 bp, Homo sapiens
  source 1..307: mol_type = other DNA
tagaggttctggattcacctttggtgattctgctctgaactgggtccgccaggctccagggaaggggctggagtgggtaggtttaattagaagcaaaattcatggtgggactgcagcgtacggcgcgtctgtggagggcagattcaccatctcaagagatgactccgaaagcatcgcctatctgcaaatgaacagtctgaaaaccgaggacacagccgtctattactgtactagagacacgtgggtcaattggcagcagccctgctatgactactggggccagggaatcctggtcaccgtctcctca

SEQ ID NO: 16379 - DNA, 307 bp, Homo sapiens
  source 1..307: mol_type = other DNA
tgcagcctctggattcaacttcggtggctatgctatgcactgggtccgccaggctccaggcaaggggctggagtgggtggcagttatatcgtatgatgggagcactaaatactatgcagactacgtgaagggccgattcagcatctccagagacaattccaagaacacgctgtatctgcaaatgaacagcctgagagttgaggacacggctgtattttactgtgcgagagatgttaatgggcacgctgcagtagttggcaccaggatggacgtctggggcgaagggaccacggccaccgtctcctca

SEQ ID NO: 16380 - DNA, 307 bp, Homo sapiens
  source 1..307: mol_type = other DNA
tgcagcctctggattcaacttcggtggctatgctatgcactgggtccgccaggctccaggcaaggggctggagtgggtggcagttatatcgtatgatgggagcactaaatactatgcagactccgtgaagggccgattcagcatctccagagacaattccaagaacacgctgtatctgcaaatgaacagcctgagagttgaggacacggctgtattttactgtgcgagagatgttaatgggcacgctgcagtagttggcaccaggatggacgtctggggcgaagggaccacggccaccgtctcctca

SEQ ID NO: 16381 - DNA, 295 bp, Homo sapiens
  source 1..295: mol_type = other DNA
ctctgtctctggtggctccctcagtagtttctactggacctggatccggcagcccccagggaagggactggagtggattgggaatatctattacactgggagcaccaactacaacccctcactcaagagtcgagtcaccatatcagtagacacgtccgacaaccagttctccctgaagctgaactctgtgaccgctgcggacacggccatttattactgtgcgagaggaggggttgggggcgagtggttattcagtgactactggggccagggaatcctggtcaccgtctcctca

SEQ ID NO: 16382 - DNA, 295 bp, Homo sapiens
  source 1..295: mol_type = other DNA
ctctgtctctggtggctccctcagtagtttctactggacctggatccggcagcccccagggaagggactggagtggattgggaatatctattacagtgggagcaccaactacaacccctcactcaagagtcgagtcaccatatcagtagacacgtccgacaaccagttctccctgaggctgaactctgtgaccgctgcggacacggccatttattactgtgcgagagggggggttgggggcgagtggttattcagtgactactggggccagggaatcctggtcaccgtctcctca

SEQ ID NO: 16383 - DNA, 307 bp, Homo sapiens
  source 1..307: mol_type = other DNA
ctctgtctctggtggctccatcaacagttctatttactactggggctgggtccgtcagcccccagggaaggggctggagtggatcgggactctctattatactgggagtgcctacaccaccccgtccctccagagtcgattcaacatgtccatggacacatccaagaatcaattcttcttgcggctggcctctgtgagcgccgcagacacggctgtctattactgtgcgaggatttccgcacttatagcagcacctggagggtggttccacccctggggccaggggatccatgtcaccgtctcctca

SEQ ID NO: 16384 - DNA, 307 bp, Homo sapiens
  source 1..307: mol_type = other DNA
ctctgtctctggtggctccatcaacaattctatttactactggggctgggtccgtcagcccccagggaaggggctggagtggatcgggactctctattatactgggagtgcctacaccaccccgtccctccagagtcgattcaacatgtccatggacacatccaagaatcaattcttcttgcggctggcctctgtgagcgccgcagacacggctgtctattactgtgcgaggatttccgcacttatagcagcacctggagggtggttccacccctggggccaggggatccatgtcaccgtctcgtca

SEQ ID NO: 16385 - DNA, 286 bp, Homo sapiens
  source 1..286: mol_type = other DNA
caaagattcgggacacagctttgccagatattggatggcctgggtgcgccagaggcccgggaaaggcctggagttcatgggaataatctttccaggggactctgaaaccaggtacagtccggccttccaaggccaagtcaccatgtccgccgacaagtccatcagcaccgtctacttggagtggaccagtctgaggccctcggacaccgccacttattattgtgcgcgacttgactcgaactggttcgacccctggggccagggaacacaagtcaccgtctcctca

SEQ ID NO: 16386 - DNA, 286 bp, Homo sapiens
  source 1..286: mol_type = other DNA
caaagattcgggacacagctttgccagatattggatggcctgggtgcgccagaggcccgggaaaggcctggagttcatggggataatctttccaggggactctgaaaccaggtacagtccggccttccaaggccaagtcaccatgtccgccgacaagtccatcagcaccgtctacttggagtggaccagtctgagggcctcggacaccgccacttattattgtgcgcgacttgactcgaactggttcgacccctggggccagggaacacaagtcaccgtctcctca

SEQ ID NO: 16387 - DNA, 295 bp, Homo sapiens
  source 1..295: mol_type = other DNA
cactgtctctggtgggtccatgagtagttactactggacctggatccggcggcccccagggaagggactgcagtggattggggatatctattacagagggggcaccaactacaacccctccctcaagggtcgagtcaccatatcaattgacacgtccaacaaccaacactccctgaaactgagttctgtgaccgccgcagacacggcccattattactgtgcgagacatctcaactttgatagtggtggaagacttgacttttggggccagggaaccctggtcaccgtctcctca

SEQ ID NO: 16388 - DNA, 295 bp, Homo sapiens
  source 1..295: mol_type = other DNA
cactgtctctggtgggtccatgagtagttactactggacctggatccggcggcccccagggaagggactgcagtggattggcgatatctattacagagggggcaccaactacaacccctccctcaagggtcgagtcaccatatcaattgacacgtccaacaaccaacactccctgaaactgagttctgtgaccgccgcagacacggcccattattactgtgcgagacatctcaactttgatagtggtggaagacttgacttttggggccagggaaccctggtcaccgtctcctca

SEQ ID NO: 16389 - DNA, 289 bp, Homo sapiens
  source 1..289: mol_type = other DNA
tgcagcctctggattcaccttcagtagttattacatgcattgggtccgccaggctccagggaaggggctggagtgggttgcacacattagtagtagtggtagttccatccactacgcagactctgtgaggggccgattcaccgtctccagagacaatgccaagaactcactgtatctacaaatgagcaacctgaaagacgaggacacggctgtgtattactgtgcgagagatcccccgggcaatgcttttgatatctggggccaagggacaatggtcaccgtctcttca

SEQ ID NO: 16390 - DNA, 289 bp, Homo sapiens
  source 1..289: mol_type = other DNA
tacagcctctggattcaccttcagtagttattatatgcattgggtccgccaggctccagggaaggggctggagtggctttcacacattagtcaaagtggtagttccacatactacgcagactctgtgaggggccgattcaccatctccagagacaatgccaagaactcaatgtatctacaaatgaacaacctgagagacgaggacacggctgtgtattactgtgcgagagatcccccgggcaatgcttttgatatctggggccaagggacaatggtcaccgtctcttca

SEQ ID NO: 16391 - DNA, 304 bp, Homo sapiens
  source 1..304: mol_type = other DNA
cggtgtctatggtgggcctctcagtggctactactggaactggatccgccagtcccagccccccgacacggggctggagtggattggggaagttgatcattctggaatcagccattacaatctgtccctcgtgagtcgggtcaccatatcagtcgacacgtccaagaggcaggtctccctgaaagtgaggtctgtgaccgccgcggacacgggtgtctactactgtgcgagaggcgtggggactgtgagagcaggtggccacatggacgtctggggcaaagggaccactgtcaccgtctcttca

SEQ ID NO: 16392 - DNA, 298 bp, Homo sapiens
  source 1..298: mol_type = other DNA
cggtgtctatggtgggtctctcagtggctactactggaactggatccgccagccccccgacacggggctacagtggattggggaagttgatcattctggaatcagccattacaatctgtccctcgtgagtcgggtcaccgtatcagtcgacacgtccaagaggcaggtctccctgaaagtgaggtctgtgaccgacgcggacacggctgtctactactgtgcgagaggcgtggggactgtgagagcaggtggccacatggacgtctggggcaaagggaccacggtcaccgtctcttca

SEQ ID NO: 16393 - DNA, 274 bp, Homo sapiens
  source 1..274: mol_type = other DNA
tgcagcctctggagtcaccgtcagtggcaactacatggcctgggtccgccaggccacaggggaggggctggagtgggtctccgttatttatcccgatgacaacacatactatgcggagtccgtgaagggcagattcaccatctccagagacaattccaagaacacgggatttcttcaaatgaacagcctgagcgccgacgacacggctgtctatttctgttcgttcgggttcttcgagaactggggccagggaaccctggtcaccgtctcctca

SEQ ID NO: 16394 - DNA, 274 bp, Homo sapiens
  source 1..274: mol_type = other DNA
tgcagcctctggagtcaccgtcagtaacaactacctgggctgggtccgccaggctccaggggaggggttggagtgggtctccgttatttatcccgatggtaacacatactatgcagactccgtgaagggcagattcaccatctccagagacaatttcaagaacacggggtttcttcaaatgaacagtctgagcgccgacgacacggctgtctattactgttcgttcgggttcttcgagaactggggccagggaaccctggtcaccgtctcctca

SEQ ID NO: 16395 - DNA, 310 bp, Homo sapiens
  source 1..310: mol_type = other DNA
cgctgtctacggtgggtcttttagtgaattctattggagttggatccgccaggccccagggaaggggctggagtggattgcggaaatcaacaattttggaagctcgaactacagtccgtccctcaagagtcgggtcaccatttcagttgacacgtccaagaaccaattctccctggaagtcaggtctgtgaccgccgcggacacggccgtctattattgtgcgaggggccgccgtgaatataagggctatgattatggcgtcacctggttcgacccctggggccagggaaacctggtcaccgtcgcctca

SEQ ID NO: 16396 - DNA, 310 bp, Homo sapiens
  source 1..310: mol_type = other DNA
cgctgtctacggtgggtcttttagtgaattctattggagttggatccgccaggccccagggaaggggctggagtggattgcggaaatcaacaattttggaagctcgaactacagtccgtccctcaagagtcgagtcaccatttcagttgacacgtccaagaaccaattctccctggaagtcaggtctgtgaccgccgcggacacggccgtctattattgtgcgaggggccgccgtgaatataagggctatgattatggcgtcacctggttcgacccctggggccagggaaacctggtcaccgtcgcctca

SEQ ID NO: 16397 - DNA, 286 bp, Homo sapiens
  source 1..286: mol_type = other DNA
cgctgtctatggtgggtccctcagtggttactactggagttggatccggcagcccccaggtaaggggctggagtggattggtgaaatcaatcatagtggaagtaccaacttcaacccgtccctcgagagtcgggtcaccatatcagttgacacgtccaggaaccagtactccctaaaagtgacctctgtgaccgccgcggacacggcggtatactactgtgcgagacttgacaggacctatggctttgaccgctggggccagggaaccccagtcaccgtctcctca

SEQ ID NO: 16398 - DNA, 286 bp, Homo sapiens
  source 1..286: mol_type = other DNA
cgctgtctatggtgggtccctcagtggttactactggagttggatccggcagcccccaggtaaggggctggagtggattggtgaaatcaatcatagtggaagtagcaacttcaacccgtccctcgagagtcgggtcaccatatcagttgacacgtccaggaaccagttctccctacaagtgacctctgtgaccgccgcggacacggcggtatactactgtgcgagacttgacaggacctatggctttgaccgctggggccagggaaccccagtcaccgtctcctca

SEQ ID NO: 16399 - DNA, 295 bp, Homo sapiens
  source 1..295: mol_type = other DNA
tgcagcctctggattcagtctcacgagttataacatgaagtgggtccgccaggctccagagaggggactggagtgggtctcaaccattctcggaactggtgagacatactacgcagagtcattgaagggccgattcaccatctccagagacaagtcgcagaagttagtacatctgcaaatgaacagcctcggagtcgacgacacggccgtctatttttgtgttagagataaggggagcggcagctggtacgcgattgactactgggggcagggggtcctggtcaccgtcgcctca

SEQ ID NO: 16400 - DNA, 295 bp, Homo sapiens
  source 1..295: mol_type = other DNA
tgcagcctctggattcagcctcaccagctataacatgaagtgggtccgccaggctccagggaagggactggagtgggtctcaaccattctcggtactggtgagacatactacgcagagtcattcaagggccgattcaccatctccagagacaactccaagaagttagtacatctgcaaatgaacagcctcggagtcgaggacacggccgtttatttctgtgtgagagataaggggagcggcagctggtacgcgattgactactggggccagggggtcctggtcaccgtctcctca

SEQ ID NO: 16401 - DNA, 304 bp, Homo sapiens
  source 1..304: mol_type = other DNA
tgcagcctctggattcaccttcagtagttatgagatgaactgggtccgccaggctccagggaaggggctggagtggctttcatacattagtagtagtggtagtaccatatactacgcagactctgtgaagggccgattcaccatctccagagacaacgccaagaactcactgcatctgcaaatgagcagcctgggagccgaggacacggctgtttattactgtgcgagagatgggcaaggatattgtagtagtaccagctgctatgactcctggggccagggaaccctggtcaccgtctcctca

SEQ ID NO: 16402 - DNA, 304 bp, Homo sapiens
  source 1..304: mol_type = other DNA
tgcagcctctggattcaccttcagtagttatgagatgaactgggtccgccaggctccagggaaggggctggagtggctttcatacattagtagtagtggtagtaccatatactacgcagactctgtgaagggccgattcaccatctccagagacaacgccaagaactcactgcatctgcaaatgagcagcctgggaaccgaggacacggctgtttattactgtgcgagagatgggcaaggatattgtagtagtaccagctgctatgactcctggggccagggaaccctggtcaccgtctcctca

SEQ ID NO: 16403 - DNA, 307 bp, Homo sapiens
  source 1..307: mol_type = other DNA
cactgtctctggtggctccatcagtactggtgattactactggagttggattcgccaatacccagggaagggcctggagtggcttgggtacatctattacaaaggcagcacctactacaatccgtccctcaagagtcgagttttcatatcagtagacacgtctaagaaccaattctccctgaaactgaactctgtgactgccgcggacacggccgtgtattactgtgcgagattcgggtctggagtggccacctatctaaatgtttttgatatctggggccaagggacaatggtcaccgtctcttca

SEQ ID NO: 16404 - DNA, 307 bp, Homo sapiens
  source 1..307: mol_type = other DNA
cactgtctctggtggctccatcagtactggtgattactactggagttggattcgccaatacccagggaagggcctggagtggcttgggtacatctattacaaaggcagcacctactacaatccgtccctcaagagtcgagttttcatatcagtagacacgtctaagaaccaactctccctgaaactgaactctgtgactgccgcggacacggccgtgtattactgtgcgagattcgggtctggagtggccacctatctaaatgtttttgatatctggggccaagggacaatggtcaccgtctcttca

SEQ ID NO: 16405 - DNA, 307 bp, Homo sapiens
  source 1..307: mol_type = other DNA
cactgtctctggtggctccatcagtactggtgattactactggagttggattcgccagtacccagggaagggcctggagtggcttgggtacatctattacagaggcagcacctactacaatccgtccctcaagagtcgagttttcatatcagtagacacgtctaagaaccaattctccctgaaactgaactctgtgactgccgcggacacggccgtgtattactgtgcgagattcgggtctggagtggccacctatctaaatgtttttgatatctggggccaagggacaatggtcaccgtctcttca

SEQ ID NO: 16406 - DNA, 295 bp, Homo sapiens
  source 1..295: mol_type = other DNA
tacagcctcgggatcctccttcagcactactgccacgacctgggtccgcctggctcccgggaagggactagagtgggtctcacgtattagtgataatggtcgtttcacatactacgcagactccgtgaagggccgcttcaccgtctcccgcgacagttccaagaacacattgttcctgcaaatgaccagcctgagagccgaggacacggccatttattactgtgcgacatccggtccgggagtcttttactacatggacgcctggggcaaagggaccacggtcaccgtctcccca

SEQ ID NO: 16407 - DNA, 295 bp, Homo sapiens
  source 1..295: mol_type = other DNA
tacagcctcgggatcctccttcagcactactgccacgacctgggtccgcctggctcccgggaagggactagagtgggtctcacgtattagtgataacggtcgtttcacatactacgcagactccgtgaagggccgcttcaccgtctcccgcgacagttccaagaacacattgttcctgcaaatgaccagcctgagagccgaggacacggccatttattactgtgcgacatccggtccgggggtcttttactacatggacgcctggggcaaagggaccacggtcaccgtctcccca

SEQ ID NO: 16408 - DNA, 301 bp, Homo sapiens
  source 1..301: mol_type = other DNA
cgctgtcgatggtgactacatcagtgcaaaaacttggtggacttgggtccgccagcccccagggaaggggctggagtggattgggcagatctttcaaactggggccaccgactacaacccgtccctcaagcgtcgagtcaccatttccgcagacgagtccaagaaccacttctccctgacgctgacctccgtgaccgccgcggacacggccgtatattactgtgcgagagtggggagggacgttgtcgtttatggggccttcgatctctggggccgaggcataatggtcactgtctcgtca

SEQ ID NO: 16409 - DNA, 301 bp, Homo sapiens
  source 1..301: mol_type = other DNA
cgctgtcgatggtgactacatcagtgcaaaaacttggtggacttgggtccgccagcccccagggaaggggctggagtggattggccagatctttcaaactggggccaccgactacaacccgtccctcaagcgtcgagtcaccatttctgcagacgagtccaagaaccacttctccctgacgctgacctccgtgaccgccgcggacacggccgtatattactgtgcgagagtggggagggacgttgtcgtttatggggccttcgatctctggggccgaggcataatggtcactgtctcctca

SEQ ID NO: 16410 - DNA, 315 bp, Homo sapiens
  source 1..315: mol_type = other DNA
gcttctggataccccttcactaactttcctattcattgggtgcgccaggcccccggacaaagccttgagtggatgggatggatcaacgctgccaatggtgagtcagattattcacagaagtttcagggcagagtcaccattaccagggacacatccgcgaacacagcctacatggaactgagtggcctgagatctgaagacacggctgtctacttttgtgcgagagatttcaattctggcggggcggggaagtacgcgacttacttctactacatggacgtctggggcaaagggaccacggtcaccgtctcctca

SEQ ID NO: 16411 - DNA, 315 bp, Homo sapiens
  source 1..315: mol_type = other DNA
gcttcgggataccccttcataaactttcctattcattgggtgcgccaggcccccggacaaagccttgagtggatgggatggatcaacgctgccaatggtgagtcagattattcacagaagtttcagggcagagtcaccattaccacggacacatccgcgaacacagcctacatggaactgagtggcctgagatctgaagacacggctgtctacttttgtgcgagagatttcaactctggcggggctgggaagtacgcgacttatttctactacatggacgtctggggcaaagggaccacggtcaccgtctcctca

SEQ ID NO: 16412 - DNA, 300 bp, Homo sapiens
  source 1..300: mol_type = other DNA
gtttccggatacaccctcactgaattatccatgcactgggtgcgacaggctcctggaaaagggcttgagtggatgggaggttttgatcctgaagatggtgaaacaatctacccacagaagttccagggcagagtcaccatgaccgaggacacatctacagacacagcctacatggagctgaacagcctgagatctgacgacacggccgtctattactgtgcaacagttatatttatggttcggggaacagagaactggttcgacccctggggccagggaaccctggtcaccgtctcctca

SEQ ID NO: 16413 - DNA, 300 bp, Homo sapiens
  source 1..300: mol_type = other DNA
gtttccagatacaccctcactgaattatccatgcactggctgcgacaggctcctggaaaagggcttgagtggatgggaggttttgatcctgaagatggtaaaacaatctacccacagaagttccagggcagagtcaccatgaccgaggacacatctaccgacacagcctacatggagctgagcagcctgagatctgaggacacggccgtgtattactgtgcaacagttatatttatggttcggggaacagagaactggttcgacccctggggccagggaaccctggtcaccgtctcctca

SEQ ID NO: 16414 - DNA, 283 bp, Homo sapiens
  source 1..283: mol_type = other DNA
tgcagcctctggattcaccttcagtgactactggatgcactgggtccgccaagctccaggaaaggggctggtgtgggtctcacgtattaatggtgatggcagtaccacaaattacgcggactccgtgaggggccgattcaccatctccagagacaacgccaagaacacgctgtatctgcaaatgaacagtctgagagtcgaggacacggctgtgtattattgtataaggtcgcaatattacgatttctactggggccagggagccctggtcaccgtctcctca

SEQ ID NO: 16415 - DNA, 283 bp, Homo sapiens
  source 1..283: mol_type = other DNA
tgcagcctctggattcaccttcagtgactactggatgcactgggtccgccaagttccaggaaaggggctggtgtgggtctcacgtattaatggtgatggcagtaccacaaactacgcggactccgtgaagggccgattcaccatctccagagacaacgccaagaacacgctgtatctgcaaatgaacagtctgagagtcgaggacacggctgtgtattactgtataaggtcgcagtattacgatttctactggggccagggagccctggtcaccgtctcctca

SEQ ID NO: 16416 - DNA, 280 bp, Homo sapiens
  source 1..280: mol_type = other DNA
cgctgtctctggattcacccttagcgggaataccatgaagtgggtccgccaggctccagggaagggtctggagtgggtctcacgtctcaaaggtagtgatgggactacatactacgcagactccgtgaagggccgcttcaccatctccagagacatttccaagaacacactctatctgcaaatgaacagcctgagagtcgaggacacggccgtatattattgtttgggggcggggggaggtagttcctggggccagggaaccctggtcaccgtctcctca

SEQ ID NO: 16417 - DNA, 280 bp, Homo sapiens
  source 1..280: mol_type = other DNA
tgctgtctctggactcacccttagcgggaataccatgaagtgggtccgccaggctccagggaagggtctggagtgggtctcacgtatcaaaggtagtgatgataccacatactacgcagactccgtgaagggccggttcaccatctccaaagacatttccaagaacacactgtatctgcaaatgaacagcctgagagtcgaggacacggccgtatattattgtttgggggcggggggaggtagttcctggggccagggaaccctggtcaccgtctcctca

SEQ ID NO: 16418 - DNA, 280 bp, Homo sapiens
  source 1..280: mol_type = other DNA
tgctgtctctggactcacccttagcgggaataccatgaagtgggtccgccaggctccagggaagggtctggagtgggtctcacgtatcaaaggtagtgatggtagcacatactacgcagactccgtgaagggccggttcaccatctccagagacatttccaagaacacactgtatctgcaaatgaacagcctgagagtcgaggacacggccgtatattattgtttgggggcggggggaggtagttcctggggccagggaaccctggtcaccgtctcctca

SEQ ID NO: 16419 - DNA, 301 bp, Homo sapiens
  source 1..301: mol_type = other DNA
tgtagtctctggactcactttcagccacgcctggatgagctgggtccgccactttccagggaaggggctggagtgggttggccgtattaaacacgacggttcaacaacctacgctgcacccgtgaagggcagattcaccatgtcaagagatgattcaaaacacacgatgtatctgcaaatgaacaccctgagaaccgaggacacagccctctattactgtacacacgacatttacgatttttcgagtaactttggggcttttagtacgtggggccaagggacattggtcaccgtctcttca

SEQ ID NO: 16420 - DNA, 301 bp, Homo sapiens
  source 1..301: mol_type = other DNA
tgtagtctctggactcactttcagccacgcctggatgagctgggtccgccactttccagggaaggggctggagtgggttggccgtattaaacacgacggttcagcaacctacgctgcacccgtgaagggcagattcaccatgtcaagagataattcaaaacacacgatgtatctgcaaatgaacgccctgagaaccgaggacacagccctctattactgtacacacgacatttacgatttttcgagtaactttggggcttttagtacgtggggccaagggacactggtcaccgtctcttca

SEQ ID NO: 16421 - DNA, 301 bp, Homo sapiens
  source 1..301: mol_type = other DNA
tgtagtctctggtctcactttcagccacgcctggatgagctgggtccgccactttccagggaaggggctggagtgggttggccgtattaaacacgacggttcagcaacctacgctgcacccgtgaagggcagattcaccatgtcaagagataattcaaaacacacgatgtatctgcaaatgaacgccctgagaaccgaggacacagccctctattactgtacacacgacatttacgatttttcgagtaactttggggcttttagtacgtggggccaagggacactggtcaccgtctcttca

SEQ ID NO: 16422 - DNA, 285 bp, Homo sapiens
  source 1..285: mol_type = other DNA
gcttctggatacaccttcaccgactactatatgcactgggtgcgacaggcccctggacaagggcttgagtggatgggatggatcaaccctaaaagtggtggcacaaactatgcagagaagtttcagggctgggtcaccgtgaccagggacacgtccatcagcacagtttatatggaactgagcaggctgacatctgacgacacggccgtgtattactgtgcgagaggggaggttacgtttggccttgactactggggccagggaaccctggtcaccgtctcctca

SEQ ID NO: 16423 - DNA, 285 bp, Homo sapiens
  source 1..285: mol_type = other DNA
gcttctggatacaccttcatcgactactatatgcactgggtgcgacaggcccctggacaagggcttgagtggatgggatggatcaaccctaaaagtggtggcacaaactatgcagagaagtttcagggctgggtcaccgtgaccagggacacgtccgtcagcacagtttatatggaattcagcaggctgacatctgacgacacggccgtgtattactgtgcgagaggggaggttacgtttggccttgactactggggccagggaaccctggtcaccgtctcctca

SEQ ID NO: 16424 - DNA, 304 bp, Homo sapiens
  source 1..304: mol_type = other DNA
tgcagcctctggattcacgtttgatgaatataacatgcactgggtccgccaagttccggggaagggtctggagtgggtcgctcttgttagttgggatgggacttccacatattatgcagactctgtgaagggccgattcaccatctccagagacaacagcaaaaactccctatatctgcaaatgaacaatgtgggaattgacgacaccgccttgtatcgctgtgccgggggtagaagtggatattatttaggtggacgtgcctttgatatgtggggccaagggacaatggtcaccgtctcttcc

SEQ ID NO: 16425 - DNA, 304 bp, Homo sapiens
  source 1..304: mol_type = other DNA
tgtggcctctggattcacctttgatgattataccatgcactgggtccgacaacgtccggggcagggtccggagtgggtctctcttatcagttgggatggtggttccacatattatgcagactctgtgatgggccggttcaccatctccagagacaacagtaaaaactccctgtatctccaaatgaacagtctgagaattgacgacaccgccttgtatcactgtgccgggggtagaagtggttattacttaggtggacgtgcctttgacatgtggggccaggggacaatggtcaccgtctcttca

SEQ ID NO: 16426 - DNA, 310 bp, Homo sapiens
  source 1..310: mol_type = other DNA
tgcagcctctggcttcctcgttaacgcgtattatatgacctgggtccgccaggctccggggaaggggctgcagtggatcgcatccatcagtcatagcgataaatccacatactacgcagaatccgtgaagggccgattcaccatttccagagacgactccaagaacacactatatctgcaaatgcgcagcctgagaggcgacgacacggccgtttattactgtgcgagggatgggaaattttgtcaaagttccaactgctatagttggaatgacttctggggccagggaaccctggtcaccgtctcctca

SEQ ID NO: 16427 - DNA, 310 bp, Homo sapiens
  source 1..310: mol_type = other DNA
tgcagcctctggcttcctcgttaacgcgtattatatgacctgggtccgccaggctccggggaaggggctgcagtggatcgcatccatcagtcatagtgataaatccacatactacgcagaatccgtgaagggccgattcaccatttccagagacgactccaagaacacactatatctgcaaatgcgcagcctgagagccgacgacacggccgtttattactgtgcgagggatgggaaattttgtcaaagttccaactgctatagttggaatgacttctggggccagggaaccctggtcaccgtctcctca

SEQ ID NO: 16428 - DNA, 315 bp, Homo sapiens
  source 1..315: mol_type = other DNA
tcatctggatacaccttcagcagctactttatgcactgggtgcgacaggcccctggacaagggcctgagtggatgggagtaatcaaccctaatggtggcagcacaagccacgcacagaagttccagggcagagtcaccatgaccatggacacgtccacgagcacagtctacatggagctgagcagcctgagatctgacgacacggccgtgtattactgtgcgagaggcctggacgtagagatggctacaattagctatcactactcctactacatggacgtctggggcaaagggaccacggtcaccgtctcctca

SEQ ID NO: 16429 - DNA, 315 bp, Homo sapiens
  source 1..315: mol_type = other DNA
tcatctggatacaccttcagcagctactttatgcactgggtgcgacaggcccctgggcaagggcctgagtggatgggagtaatcaaccctaatggtggcagcacaagccacgcacagaagttccagggcagagtcaccatgaccatggacacgtccacgagcacagtctacatggagctgagcagcctgagatctgacgacacggccgtgtattactgtgcgagaggcctggacgtagagatggctacaattagctatcactactcctactacatggacgtctggggcaaagggaccacggtcaccgtctcctca

SEQ ID NO: 16430 - DNA, 315 bp, Homo sapiens
  source 1..315: mol_type = other DNA
gcatctggatacaccttcagcagctactttatgcactgggtgcgacaggcccctggacaagggcctgagtggatgggagtaatcaaccctaatggtggcagcacaagccacgcacagaagttccagggcagagtcaccatgaccagggacacgtccacgagcacagtctacatggagctgagcagcctgagatctgaggacacggccgtgtattactgtgcgagaggcctggacgtagagatggctacaattagctatcactactcctactacatggacgtctggggcaaagggaccacggtcaccgtctcctca

SEQ ID NO: 16431 - DNA, 292 bp, Homo sapiens
  source 1..292: mol_type = other DNA
tgcagcctttggatttaacttcaagaacttccctatgttctgggtccgccaggctccaggcagggggctggagtgggtggctttcatgtcagttgatgaaacaaaaaaattatacggtgcctccgcggagggccgcgccataatcaccagagacaacgacaggaggaccttgtttctatacatggactacatgactatggaagacacgggtatttatttctgtgcgagaggcttggcgctgggaagatacatggacgtctggggcagagggacaacggtcactgtgacctcc

SEQ ID NO: 16432 - DNA, 292 bp, Homo sapiens
  source 1..292: mol_type = other DNA
tgcagcctttggatttgacctcaagagattccctatgtactgggtccgccaggctccaggcagggggctggagtgggtggcttttacgtcagttcatgaaggacaaaaattatacggtgcctccgcggagggccgcgccattatcaccagagacaacgacaggaggaccttgtttctggacatggactacatgactctggaagacacgggtgtttatttctgtgcgagaggcttggcgctcggaagatatatggacgtctggggcagagggacaacgatcactgtgacctcc

SEQ ID NO: 16433 - DNA, 292 bp, Homo sapiens
  source 1..292: mol_type = other DNA
tgcagcctttggatttaacttcaagaacttccctatgttctgggtccgccaggctccaggcagggggctggagtgggtggctttcatgtcaggtgatgaaggaaaaaaattatatggtgcctccgcggagggccgcgccataattaccagagacaacgacaggaggaccttgtttctacacatggagtacatgactatggaagacacgggtgtttatttctgtgcgagaggcttggcgctgggaagatacatggacgtctggggcagagggacaacggtcactgtgacctcc

SEQ ID NO: 16434 - DNA, 301 bp, Homo sapiens
  source 1..301: mol_type = other DNA
tgtaacatctggattcaacttcggtgaccatggcatgcactgggtccgccaggctccaggcaaggggctggagtgggtggctggtctatggtatgatggatctaagaaatcctatggagagtccgtccagggccgattcaccatctccagagacaattccaagaattcgctgtttctgcaaatgaataggctgagagccgaggacacggctatttattactgtgcgaggcaggattccgatttctggagtggttatctcttcgatctctggggccgtggcaccctggtcgatgtctcctca

SEQ ID NO: 16435 - DNA, 301 bp, Homo sapiens
  source 1..301: mol_type = other DNA
tgtaacttctggattcaacttcggcgactacggcatgcactgggtccggcaggctccaggcaaggggctggagtgggtggcaggtctctggtatgatggaagtaagaaatcctatggagactccgtgcagggccgattcatcatctccagagacaattcgaagaatgcgctgtatctgcaaatgaataccctgagagccgaggacacggctgtttactactgtgcgagacaggattccgatttttggagtggttatctcttcgatctctggggccgtggcacccttgtcgctgtctcctca

SEQ ID NO: 16436 - DNA, 295 bp, Homo sapiens
  source 1..295: mol_type = other DNA
tgcagcctctggattcaccgtcagcagcaactacatgacctgggtccgccagcctgtggggaaggggctggagtgggtctcagttatttttcccactggtaacacatactacgcagactccgtgaaggacagattcgtcatctcaagagacatttccaaaaacacgttgtatcttcaaatgaacagcctgagaggcgaagacacggctgtctattactgtgcgagagcgattgttccagttcatcgagggtggttcgacccgtggggccagggaaccctggtcaccgtctcctca

SEQ ID NO: 16437 - DNA, 295 bp, Homo sapiens
  source 1..295: mol_type = other DNA
tgcagcctctggattcaccgtcagcagcaactacatgacgtgggtccgccagcctgcggggaaggggctggagtgggtctcagttatttttcccactggcaacacatactacgcagactccgtgaaggacagattcgtcatctcaagagacatttccaaaaacactttgtatcttcaaatgaacagtgtgagaggcgatgacacggctgtctactactgtgcgagagcgattgttccagttcatcgagggtggttcgacccgtggggccagggaacccaggtcaccgtctcctca

SEQ ID NO: 16438 - DNA, 310 bp, Homo sapiens
  source 1..310: mol_type = other DNA
cgctgtcgctggtgactccatcagtagtggtgattactcctggagctggatccgccagccacccgggaagggcctggagtggattggacacatccatcatagtgggaccacctactacaacccgtccctcaagagtcgagtcaccatatcaatagacaggcccaagaaccagttctccctgaagttgacctctgtgaccgccgcggacacggccgtctattactgtgccagagttttagggaactggtactacgaggactactactacatggacgtctggggcagaggggccacggtcaccgtctcctca

SEQ ID NO: 16439 - DNA, 310 bp, Homo sapiens
  source 1..310: mol_type = other DNA
cgctgtctctggtgactccatcagtagtggtgattactcctggagctggatccgccagccacccgggaagggcctggagtggattggacacatccatcatagtgggaccacctactacaacccgtccctcaagagtcgagtcaccatatcaatagacaggcccaagaaccagttctccctgaagctgacctctgtgaccgccgcggacacggccgtctattactgtgccagagttttagggaactggtactacgaggactactactacatggacgtctggggcagaggggccacggtcaccgtctcctca

SEQ ID NO: 16440 - DNA, 296 bp, Homo sapiens
  source 1..296: mol_type = other DNA
cagcctctggattcaccctcagttcttatgaagtgaactgggtccgccaggctccagggaaggggctggagtggctgtcatatattaaagagaacggtgattccatctactacgcagactcagtgaggggccgattcaccctctccagagacaacgccaacaacttagtgtttctgcaaatgaacgccctgagacccgaggacacggccgtttactactgcgcgagagaggcaataaattgtggtggtgattgcctcgactactggggccagggaaccctggtcaccgtctcctca

SEQ ID NO: 16441 - DNA, 298 bp, Homo sapiens
  source 1..298: mol_type = other DNA
tgtagtctctggattcaccttcagtgcttatgaattcaactgggtccgccagggtccagggaaggggctggagtggatttcatacattagtactagtggtgctcacaaatattacgcagactctttcaggggccgattcaccatctccagagacaacgccatgaactcagtatatctgcaaatgaacggcctgagagccgaggacacggctatttattactgtgcgagagaggcgatcaactgtggtggtgactgccttgactactggggccagggaaccctggtcgccgtctcctca

SEQ ID NO: 16442 - DNA, 298 bp, Homo sapiens
  source 1..298: mol_type = other DNA
tgcagcctctggattcaccttcagtagttataccattaactgggtccgccaggctccagggaaggggctggagtgggtctcatccattagtggtagtggttctgtcctgtggtacgcagactcagtgaggggccgattcaccatctccagagacaacgccaagaactcagtgtctttgcaaatgaacagtctgagagtcgaagacacggctttctattactgtgtgagagaccgggtgagcagctcggcctaccacatggacgtctggggcaatgggaccacggtcaccgtctcctca

SEQ ID NO: 16443 - DNA, 298 bp, Homo sapiens
  source 1..298: mol_type = other DNA
tgcagcctctggattcaccttcagtagttataccattaactgggtccgccaggctccagggaaggggctggagtgggtctcatccattagtggtagtggttctgtcctgtggtacgcagactcagtgaggggccgattcaccatctccagagacaacgccaagaactcagtgtctttgcaaatgaacagcctgagagtcgaagacacggctttctattactgtgtgagagaccgggtgagcagctcggcctaccacatggacgtctggggcaatgggaccacggtcaccgtctcctca

SEQ ID NO: 16444 - DNA, 295 bp, Homo sapiens
  source 1..295: mol_type = other DNA
tgcaggctctggattcaacttcaacttctactggatgaattgggtccgccaagttccaggaaaggggctggtgtgggtcgcacgtattaacagtgatggaagtcatactgactacgcggactccgtaaagggccgattcaccatctccagagacaacgccaagaacacattgtttctgcaaatggacggtctgagagccgaggacacggctgtctattactgtgcgagaatagtggattactttgataatcgtgacgctatctggggccaagggacaatggtcaccgtctcttca

SEQ ID NO: 16445 - DNA, 295 bp, Homo sapiens
  source 1..295: mol_type = other DNA
tgcaggctctggattcaagttcaacttctactggatgaattgggtccgccaagttccagggaagggtctggtgtgggtcgcacgtattaacagtgatggaagtcatagtgactacgcggactccgtaaagggccgattcaccatctccagagacaacgccaagaacacattgtttctgcaaatggacggtctgagagccgaggacacggctgtctattactgtgcgagaatagtggattactttgataaccgtgacgctatttggggccaggggacaatggtcaccgtctcttca

SEQ ID NO: 16446 - DNA, 286 bp, Homo sapiens
  source 1..286: mol_type = other DNA
tgaagcctctggattcgccttctctacctataacatgaactgggtccgccaggctccagggaaggggctggagtggatttccttcattactattggaggtgaaaccgtccactacgcagagtctgtgaagggccgattcaccatctccagagacaatgccaagaactcactgtatctgcaaatgaacagcctgagagacgaggacacggctgtctattactgtctgagagatacggcgtggattcgcgacttgtggggccaagggtcaattgtcaccgtctcttca

SEQ ID NO: 16447 - DNA, 286 bp, Homo sapiens
  source 1..286: mol_type = other DNA
tgaagcctctggattcaccttcagtacctataacatgaactgggtccgccaggctccagggaaggggctggagtgggtttccttcattactgttggaggtgataccatccactacgcagactctgtgaagggccgattcaccatctccagagacaatgccaagaagtcactgtatctgcagatgaacagcctgagagccgaggacacggctgtctattactgtctgagagatacggcgtggatacgcgacttgtggggccaagggacaatggtcaccgtctcttca

SEQ ID NO: 16448 - DNA, 307 bp, Homo sapiens
  source 1..307: mol_type = other DNA
cagtgtctctggtacctccatcagtgcttattactggacctggattcggcagcccccagggaagggactggagtggattggggatatctattacagagggagcaccaggtacaacccctccctcaacagtcgagtcaccatgtcattagacatgacccagagacaagtctccctgaagttgagctcggtgaccgccgcagacacggccgtttattactgcgcgagattcttaagcagcgccgaagggtatgactactatttctacatggacgtctggggcggagggaccacggtcaccgtctcctca

SEQ ID NO: 16449 - DNA, 307 bp, Homo sapiens
  source 1..307: mol_type = other DNA
caatgtctctggtacctccatcagtgcttattcctggacctggattcggcagaccccagggaagggactggagtggattggggatatctattacagagggagcaccaggtacaacccctccctcaacagtcgagtcaccatgtcattagacatgacccagagacaagtctccctgaagttgagctcggtgaccgccgcagacacggccgtttattactgcgcgagattcttaagcagcgccgaagggtatgactactatttctacatggacgtctggggcggagggaccacggtcaccgtctcctca

SEQ ID NO: 16450 - DNA, 307 bp, Homo sapiens
  source 1..307: mol_type = other DNA
tgcagcctctggggtcaccgtcagtagtgactacatgagttgggtccgccaggctccagggaaggggctggagtgggtctcagttatttataggggtggtgagacatactatacagactccgtgaagggccgattcaccatctccagagacaattccaagaacaccctgtatcttcaaatgaacagcctgagagtcgaggacacggccctctattactgtgtgagaggtggaggggcatattgtggttctgactgcctgaggacttttgatatctggggccaagggacactggtgaccgtctcttca

SEQ ID NO: 16451 - DNA, 307 bp, Homo sapiens
  source 1..307: mol_type = other DNA
tgcagcctctggggtcaccgtcagtcgtgactacatgagctgggtccgccaggctcctgggaagggactggaatgggtctcagttatttataggaatggtgagacatactatacagactccgtgaagggccgattcaccatctccagagacagttccaagaacaccctggatcttcaaatgaacagcctgacactcgaggacacggccctgtattattgtgtgagaggtggaggggcatattgtggttctgactgcctgaggacttttgatatctggggccaagggacactggtgaccgtctcttca

SEQ ID NO: 16452 - DNA, 300 bp, Homo sapiens
  source 1..300: mol_type = other DNA
gcgtctgggaacgactttacaatttatgcaatcgactggctgcggcaggcgcctggacaagggcttgagtgggtggggtgggtcgacacgaatggcggtaagacgggtcaggcgaagacatttgagggcagaatcaacatcaccgcagacagatctaccgacacattttatctggagttggggaacctcaaacctggcgacacggccacttattactgcgcgcgagagtttgaaggaccaggtggtcgctcgtggtacttcgacccctggggccagggaacccgagtcaccgtctcttca

SEQ ID NO: 16453 - DNA, 300 bp, Homo sapiens
  source 1..300: mol_type = other DNA
gcgtctgggaacgactttacaatttatgcaatcgactggctgcggcaggcgcctggacaagggcttgagtgggtggggtgggtcgacacgaaaaccggtaagacgggtcaggcgaagacatttgagggcagaatcaacatcaccgcagacagatctaccgacacagtttatctggagttgaggaacctcaaacctggcgacacggccacttattattgcgcgcgagagtttgaaggaccaggtggtcgctcgtggtacttcgacccctggggccagggaacccgggtcaccgtctcttca

SEQ ID NO: 16454 - DNA, 289 bp, Homo sapiens
  source 1..289: mol_type = other DNA
tgcagcctctggattcagggacaccttcagtgcatcctggatgcactgggtccgccaggttccaggggaggggctggagtgggtctcacgtattggagatgatggaagcacattctacgcggactccgtgcagggccgatttatcatttccagagacatcgccatgaacacggttcacctgcaaatgaacagtctgagagccgaggacacggctctgtattactgtgcaagagatcgggcatacagtcttgacgaatggggccagggaatcctggtcaccgtctcctca

SEQ ID NO: 16455 - DNA, 289 bp, Homo sapiens
  source 1..289: mol_type = other DNA
tgcagcctctggattcagggacaccttcagtgcatcctggatgcactgggtccgccagattccaggggaagggctggagtgggtctcacgtattggagacgatggtagcacattctacgcggactccgtgcggggccgatttatcatctccagagacatcgccatgaacacggttcatctgcaaatgaacagtctgagagccgaggacacggctctctattactgtgcaagagatcgggcatacagtcttgacgaatggggccagggaatcctggtcaccgtctcctca

SEQ ID NO: 16456 - DNA, 337 bp, Homo sapiens
  source 1..337: mol_type = other DNA
cactgtctctggtggctccatcagtagttactcctggagctggatccggcagcccccagggaagggactggagtggattgggtatatctattatagtgggagcaccttctacaatccctccctcaagagtcgagtcaccatttcagtagacacgtccaagaaccagttctccctgcagctgagctctgtgaccgccgcagacacggccgtctattactgtgcgagacgcctgcgtgcttccgccgcctaccacaactacgatttttggagtggctatggtgactcctactactacatggacgtctggggcaaagggaccacggtcaccgtctcctca

SEQ ID NO: 16457 - DNA, 337 bp, Homo sapiens
  source 1..337: mol_type = other DNA
cactgtctctggtggctccatcagtagttcctcctggagctggatccggcagcccccagggcacggactggagtggattgggtatatctattatagtgggagcaccttctacaatccctccctcaagagtcgagtcaccatttcagtaggcacgtccaagaaccagttctccctgcagctgagctctgtgaccgccgcagacacggccgtctattactgtgcgagacgcctgcgtgcttccgccgcctaccacaactacgatttttggagtggctatggtgactcctactactacatggacgtctggggcaaagggaccacggtcaccgtctcctca

SEQ ID NO: 16458 - DNA, 337 bp, Homo sapiens
  source 1..337: mol_type = other DNA
cactgtctctggtggctccatcagtagttcctcctggagctggatccggcagcccccagggcacggactggagtggattgggtatatctattatagtgggagcaccttctacaatccctccctcaagagtcgagtcaccatttcagtagacacgtccaagaaccagttctccctgcagctgagctctgtgaccgccgcagacacggccgtctattactgtgcgagacgcctgcgtgcttccgccgcctaccacaactacgatttttggagtggctatggtgactcctactactacatggacgtctggggcaaagggaccacggtcaccgtctcctca

SEQ ID NO: 16459 - DNA, 298 bp, Homo sapiens
  source 1..298: mol_type = other DNA
tgtagcctctggattcaccttcagtaactactggatgcactgggtccgccaagttccagggaaggggctgctgtgggtctcacgtattgatgatgatggggatgggataacttacgcggactccgtaaagggccgattcaccatctccagaaacaacgccgagaacacactgtatctccaaatgaacaatctgagagccgaggacacggctgtttattactgtgcaagaggacctgtaaaagggggtcattggagtggggactcctggggccagggaaccctggtcaccgtctcctca

SEQ ID NO: 16460 - DNA, 298 bp, Homo sapiens
  source 1..298: mol_type = other DNA
tgtagcctctggattcagcttcagtaattactggatgcactgggtccgccaagctccagggaaggggctgcagtgggtctcacgtattgatgatgatggggatgggataacttatgcggactccgtagagggccgatttaccatctccagaaacaacgccgagaacacactgtatctccaaatgaataatgtgagagccgaggacacggctgtttattactgtgcaagaggacctgtaaaagggggtcattggagtggggactcctggggccagggaaccctggtcgccgtctcctca

SEQ ID NO: 16461 - DNA, 292 bp, Homo sapiens
  source 1..292: mol_type = other DNA
tgcagcttctggattcaccttcagtgcctactacatcagctggatccgccaggctccagggaaggggctggagtgggtttcgaagattagtgccgctagtacttacataacctacgcagactctgtgaagggccgattcaccatctccagagacgacgccaagaactcactgtatctgcaaatgaacagcctgagagtcgaggacacggccgtctattactgtgcgagaggggtatcgggccactactacatggacgtctggggcagagggaccacggtcaccgtgtcctca

SEQ ID NO: 16462 - DNA, 292 bp, Homo sapiens
  source 1..292: mol_type = other DNA
tgcagcctctggattcaccttcagtgcctactacatcagctggatccgccaggctccagggaaggggctggagtgggtttcgaagattagtgccgctagtacttacataacctacgcagactctgtgaagggccgattcaccatctccagagacgacgccaagaactcactgtatctgcaaatgaacagcctgagagtcgaggacacggccgtctattactgtgcgagaggggtatcgggccactactacatggacgtctggggcagagggaccacggtcaccgtgtcctca

SEQ ID NO: 16463 - DNA, 303 bp, Homo sapiens
  source 1..303: mol_type = other DNA
acttctggttacacgtttagtaatcttggaatcagctgggtacgacaggcccctggacaagggcttgagtggatggggtggatcagcgcttacattggtaccacaaggtatgcacagaaattccaggacagaatcaccttgaccacagacgcatccacgagcacagtctacatggagctgaggagcctgagagctgaggacacggccatgtattactgtgcgagagatccgaataggagggcgatgactatgatcgacaactttgactactggggccagggaagcctggtcaccgtctcctct

SEQ ID NO: 16464 - DNA, 303 bp, Homo sapiens
  source 1..303: mol_type = other DNA
acttctggttacacgtttagtaattttggaatcagctgggtacgacaggcccctggacaagggcttgagtggatggggtggatcagcgcttacattggtaccacaaggtatgcacagaaattccaggacagaatcaccttgaccacagacgcatccacgagcacagtctacatggagctgaggagcctgggagctgaggacacggccatgtattactgtgcgagagatccgaataggagggcgatgactatgatcgacaactttgactactggggccagggaagcctggtcaccgtctcctct

SEQ ID NO: 16465 - DNA, 303 bp, Homo sapiens
  source 1..303: mol_type = other DNA
gcctctggatacaccttcactacttatgctatgcattgggtgcgccaggcccccggacaaaggcttgagtggatggcatggatcaacgctggcaatggtaacacaaaaagttcacagaagttccagggcagagtcaccattaccagggacacatccgcgagcacagcctacatggagctgagcggactgacatctgaagacacggctgtgtattactgtgcgagaggtcaccccacatatagtgactatgatcccctactcattgactactggggccggggaaccctggtcaccgtctcctca

SEQ ID NO: 16466 - DNA, 303 bp, Homo sapiens
  source 1..303: mol_type = other DNA
gcttctggatacaccttcactacttacgctatgcattgggtgcgccaggcccccggacaaaggcttgagtggatggcatggatcaacgctggcaatgttaacacaaaatattcacagaagttccagggcagagtcaccattaccagggacacatccgcgagcacagcctacatggagctgagcagactgacatctgaagacacggctgtgtattactgtgcgagaggtcaccccacatatagtgactatgatcccctactcattgactactggggccagggaaccctggtcaccgtctcctca

SEQ ID NO: 16467 - DNA, 277 bp, Homo sapiens
  source 1..277: mol_type = other DNA
tgtagcctctggattcaattttgatacgtattggatgacctgggtccgccaggccccagggaaggggctggagtggttggccagcatgaaggaagatggaagtaagatattctatgtggactctgtgaagggccgattcaccatctccagagacaacgctaagaattcactgtttttggaaatgaacagcctgagagccggggacacggctttttatttctgtgccaacgtacagcatgacttctggggccagggaaccctggtcaccgtctcctca

SEQ ID NO: 16468 - DNA, 277 bp, Homo sapiens
  source 1..277: mol_type = other DNA
tgtagcctctggattcaattttaatacgtattggatgacctgggtccgccaggccccagggaaggggctggagtggttggccagcatgaaggaagatggaagtaagatattctatgtggactctgtgaagggccgattcaccatctccagagacaacgctaagaattcactgtttttggaaatgaacagcctgagagccggggacacggctttttatttctgtgccaacgtacagcatgacttctggggccagggaaccctggtcaccgtctcctca

SEQ ID NO: 16469 - DNA, 277 bp, Homo sapiens
  source 1..277: mol_type = other DNA
tgtagcctctggattcaactttaatacgtattggatgacctgggtccgccaggccccagggaaggggctggagtgggtggccagcatgaaggcagatggaagtaagatattctatgtggactctgtgaagggccgatttaccatctccagagacaacgccaagaattcactgtttttggaaatgaacagcctgacagccggggacacggctttttatttctgtgccaacgtacagcatgacttctggggccagggaacactggtcaccgtctcctca

SEQ ID NO: 16470 - DNA, 286 bp, Homo sapiens
  source 1..286: mol_type = other DNA
tgcagcctctggattcacctttagcagctatgccttgacctgggtccgccaggctccagggaaggggctggaatgggtctcaactattaataatagtgatggtggcacatactacgcagactccgtgaagggccggttcaccatctccagagacaattccaagaacaccctgtatctgcaaatgaacagcctgggagccgaggacacggccgtatatttctgtgcgagagtgtggagcagatcctatgactactggggccagggaaccctggtcaccgtctcctca

SEQ ID NO: 16471 - DNA, 286 bp, Homo sapiens
  source 1..286: mol_type = other DNA
tgcagcctctggattcacctttagcaactatgccttgacctgggtccgccaggctccagggaaggggctggagtgggtctcaactattaatagtagtggtggtggcacattctacgcagactccgtgaagggccggttcaccatctccagagacaattccaagaacaccctgtatctgcaaatgaacagcctgagagccgaggacacggccgtatatttctgtgcgagagtgtggagcagatcctatgactactggggccagggaaccctggtcaccgtctcctca

SEQ ID NO: 16472 - DNA, 286 bp, Homo sapiens
  source 1..286: mol_type = other DNA
tgcagcctctggattcacctttagcagttatgccttgacctgggtccgccaggctccagggaaggggctggagtgggtctcaagtattaataataatggtggtggcacatactacgcagactccgtgaagggccggttcaccatctcccgagacaattccaagaacaccctgtatctgcaaatgaacaccctgagagccgaggacacggccgtatatttctgtgcgagagtgtggagcagatcctatgactactggggccagggaaccctggtcaccgtctcctca

SEQ ID NO: 16473 - DNA, 286 bp, Homo sapiens
  source 1..286: mol_type = other DNA
tgcagcctctggattcacctttagcagctatgccttgacctgggtccgccaggctccagggaaggggctggaatgggtctcaactattaataatactggtggtggcacatactacgcagactccgtgaagggccggttcaccatctccagagacaattccaagaacaccctgtatctgcaaatgaacagcctgggagccgaggacacggccgtatatttctgtgcgagagtgtggagcagatcctatgactactggggccagggaaccctggtcaccgtctcctca

SEQ ID NO: 16474 - DNA, 298 bp, Homo sapiens
  source 1..298: mol_type = other DNA
tgcagcctctggattcatgtttggcgcctatgccatgacctgggtccgccaggctccagggaaggggctggagtgggtctcaagtattagtggtagtggtggtagcacattctacggagactacgtgaagggccggttcaccatctccagagacaattccaagaacacactgtatctgcaaatgagcagcctgagagtcgaggacacggccgtatatttctgtgcgaaagggtggggagctactccccgcgactactttgactactggggtcagggaaccctggtcaccgtctcctca

SEQ ID NO: 16475 - DNA, 298 bp, Homo sapiens
  source 1..298: mol_type = other DNA
tgcaggctctggattcagctttagaacatatgccatcagctgggtccgccgggctccagggaaggggctggagtgggtctcaagtataagcggtagtggtggcgccacatactacggagactccgtgaagggccgcttcaccatcttcagagacttttccaagaacacggcttatctgcaaatgaacagcctgagagtcgaggacacggccgtatactactgtgcgaagggttggggagctactccccgcgactattttgactactggggccagggaaccccggtcaccgtctcctca

SEQ ID NO: 16476 - DNA, 289 bp, Homo sapiens
  source 1..289: mol_type = other DNA
cactgtctctggtggctccatgaatacttacttctggagttggatccggcagcccccaggcaagggactggagtggattgggtggatcgactacagtgggacgaccaactacaagtcctccctcaagagtcgagtcaccatatcagtggacacctccaagaaccagttctccctgaatttgaactctgtgaccgctgcggacacggccgtgtattattgtgcgaggggcggcgcgagcagccggcccttccaccactggggccagggcaccctggtcaccgtctcctca

SEQ ID NO: 16477 - DNA, 289 bp, Homo sapiens
  source 1..289: mol_type = other DNA
cactgtctctggtggctccttcaatactttctactggagctggatccggcagcccccaggcaagggactggagtggattgggtggatctcttacagtgggagcaccaactacaacccctccctccagagtcgagtcaccatatcactggacacctccaagaaccagttctccctgaagctgaactctgtgaccgctgcggacacggccgtgtactactgtgcgaggggcggcgcgagcagccggcccttccaccactggggccagggcaccctggtcaccgtctcctca

SEQ ID NO: 16478 - DNA, 298 bp, Homo sapiens
  source 1..298: mol_type = other DNA
tgcagcctctggattcacctttaggaactatgccatgagctgggtccgccaggttccagggaaggggctggagtgggtctcagctcttagtggtagtggtgatcgcgcaaattacgcagaattcgtgaagggccggttcaccatctccagagacaattccaagaacaccctgtatctgcaaatgaacagcctgggagccgaggacacggccctatattactgtgcgagagataggtctccttcagacgggtgggagccagacaactggggccacggaaccctggtcaccgtctcctca

SEQ ID NO: 16479 - DNA, 298 bp, Homo sapiens
  source 1..298: mol_type = other DNA
tgcagcctctggattcacctttaggaactatgccatgagctgggtccgccaggttccagggaaggggctggagtgggtctcagctcttagtggtagtggtgatcgcgcaaattacgcagaattcgtgaagggccggttcaccatctccagagacaattccaagaacaccctgtatctgcaaatgaacagcctgggagtcgaggacacggccctatattactgtgcgagagataggtctccttcagacgggtgggagccagacaactggggccacggaaccctggtcaccgtctcctca

SEQ ID NO: 16480 - DNA, 298 bp, Homo sapiens
  source 1..298: mol_type = other DNA
tgcagcctctggattcacttttaggaactatgccatgacctgggtccgccaggctccagggaaggggccggagtgggtctcagctcttagtaatagtggtgacctcacatactacgcagactccgtggagggccggttcaccatctccagagacaattccaagaacaccctgtatctgcaaatgaacagcctgagagccgaggacacggccctttatcactgtgcgagagataggtctccttcagacgggtgggaacctgataattggggcccgggaaccctggtcaccgtctcctca

SEQ ID NO: 16481 - DNA, 293 bp, Homo sapiens
  source 1..293: mol_type = other DNA
ccatctccggggacagtgtctctagcaacagtgctacttggaactggatcaggcagtccccatcgagaggccttgagtggctggggaggacatattacaggtccaagtggtctaatgattatgcactatctgtgaaaagtcgaataagcatcaacccagacacatccaagaaccagttctccctgcagctgaactctgtgactcccgaggacacggctgtgtattactgtgcaagagaacagcagatgaaacttgaccactggggccagggaaccctggtcaccgtctcctca

SEQ ID NO: 16482 - DNA, 293 bp, Homo sapiens
  source 1..293: mol_type = other DNA
ccgtctccggggacagtgtctctaccaacactgttacttggaactggatcaggcagtccccatcgagaggccttgagtggctggggaggacatattaccggtccaagtggtctaatgattatgcactatctgtgaaaagtcgaataagcatcaacccagacacatccaagaaccagttctccctgcagctgaactctgtgactcccgaggacacggctgtctattactgtgcaagagaacagcagatgaaacttgaccactggggccagggaaccctggtcaccgtctcctca

SEQ ID NO: 16483 - DNA, 298 bp, Homo sapiens
  source 1..298: mol_type = other DNA
cactgtctctggtgcctccatcaacagtagtcatttctactggggttggatccgccagtccccagcgagggggctggagtggattgggcatatcttttatattgggactttctcctacaacccgtccctcagcagtcgagtcaccatatccgtagacacgtccaagaaccagttctccctgaagctgacctctgtgaccgccgcagacacggctgtttattactgtgcgagaagaggggtcgcgaaaaaggggtggttcgacccctggggccagggaaccctggtcaccgtctcctca

SEQ ID NO: 16484 - DNA, 298 bp, Homo sapiens
  source 1..298: mol_type = other DNA
cactgtctctggtgcctccatcaacagtagtcatttctactggggttggatccgccagtccccagcgagggggctggagtggattgggcatatcttttatattgggactttctcctacaacccgtccctcagcagtcgagtcaccatatccgtagacacgtccaagaaccagttctccctgaaggtgacctctgtgaccgccgcagacacggctgtgtattactgtgcgagaagaggggtcgcgaaaaaggggtggttcgacccctggggccagggaaccctggtcaccgtctcctca

SEQ ID NO: 16485 - DNA, 306 bp, Homo sapiens
  source 1..306: mol_type = other DNA
aaggcttctggatacatctttacccacaggtggatcggctgggtgcgccagatgcccgggaaaggcctggagtggatgggcagaatctatcctggtgactctgagaccacttacagcccgtccttcgagggccaggtcaccatctcagccgacacgtccatcactaccgcctacctgcagtggagcagcctgaaggcctcggacaccgccatgtattactgtgtgagacatgaggcatcctatggaacttttggctatcactttttggactcctggggccagggaacccaggtcaccgtctcctca

SEQ ID NO: 16486 - DNA, 306 bp, Homo sapiens
  source 1..306: mol_type = other DNA
aaggcttctggatacatctttacccacaggtggatcggctgggtgcgccagatgcccgggaaaggcctggagtggatgggcagaatctatcctggtgactctgagaccacttacagcccgtccttcgaaggccaggtcaccatctcagccgacacgtccatcactaccgcctacctgcagtggagcagcctgaaggcctcggacaccgccatgtattactgtgtgagacatgaggcatcctatggaacttttggctatcactttttggactcctggggccagggaacccaggtcaccgtctcctca

SEQ ID NO: 16487 - DNA, 306 bp, Homo sapiens
  source 1..306: mol_type = other DNA
aaggcttctggatacatctttacccacaggtggatcggctgggtgcgccagatgcccgggaaaggcctggagtggatgggcagaatctatcctggtgactctgagaccacttacagcccgtccttcgaaggccaggtcaccatctcagtcgacacgtccaccactaccgcctacctgcagtggagcagcctgaaggcctcggacaccgccatgtattattgtgtgagacatgaggcatcctatggaacttttggctatcactttttggactcctggggccagggaacccaggtcaccgtctcctca

SEQ ID NO: 16488 - DNA, 306 bp, Homo sapiens
  source 1..306: mol_type = other DNA
aaggcttctggatacatctttacccacaggtggatcggctgggtgcgccagatgcccgggaaaggcctggagtggatgggcagaatctatcctggtgacggtgagaccacttacagcccgtccttcgaaggccaggtcaccatctcagccgacacgtccctcactaccgcctacctgcagtggagcagcctgaaggcctcggacaccgccatgtattactgtgtgagacatgaggcatcctatggaacttttggctatcactttttggactcctggggccagggaacccaggtcaccgtctcctca

SEQ ID NO: 16489 - DNA, 292 bp, Homo sapiens
  source 1..292: mol_type = other DNA
cgcagcctctggattcaagtttagtacccatgccatgacctgggtccgccaggcttcagggaagggactagagtgggtctcggctatcagtgacactggttatagtacattctatgcagactccgtgaagggccggttcaccatctccagggacaattccagggacacggtgtatctgcagatgaatagccttacagccgaagacacggccgtgtattactgtgcgaaaaggacctggcgaaactactacatggacgtctggggcaaagggaccacggtcaccgtctcctca

SEQ ID NO: 16490 - DNA, 292 bp, Homo sapiens
  source 1..292: mol_type = other DNA
cgcagcctctggattcaagtttagtacccatgccatgacctgggtccgccaggcttcagggaagggactagagtgggtctcggctatcagtgacattggtagtagtacattctatgcagactccgtgaagggccggttcaccatctccagggacaactccagggacacggtgtatctgcagatgaatagccttacagtcggagacacggccgtgtattactgtgcgaaaaggacctggcgaaactactacatggacgtctggggcaaaggggccacggtcaccgtctcctca

SEQ ID NO: 16491 - DNA, 291 bp, Homo sapiens
  source 1..291: mol_type = other DNA
cgcagcctctggattcaagtttagtacccatgccatgacctgggtccgccaggcttcagggaagggactagagtgggtctcggctatcagtgacattggtagtagtacattctatgcagactccgtgaagggccggttcaccatctccagggacaactccagggacacggtgtatctgcagatgaatagccttacagtcggagacacggccgtgtattactgtgcgaaaaggacctggcgaaactactacatggacgtctggggcaaggggccacggtcaccgtctcctca

SEQ ID NO: 16492 - DNA, 292 bp, Homo sapiens
  source 1..292: mol_type = other DNA
cgcagcctctggattcaagtttagtacccatgccatgacctgggtctgccaggcttcagggaagggactagagtgggtctcggctatcagtgacattggtagtagtacattctatgcagactccgtgaagggccggttcaccatctccagggacaactccagggacacggtgtatctgcagatgaatagccttacagtcggagacacggccgtgtattactgtgcgaaaaggacctggcgaaactactacatggacgtctggggcaaaggggccacggtcaccgtctcctca

SEQ ID NO: 16493 - DNA, 274 bp, Homo sapiens
  source 1..274: mol_type = other DNA
tgtagtctccggattgtcctttagggacaattggatggactgggtccgccaggctccagggaagggtctggagtgggtggccaacataagtccagatggaagtgacaaaaactatgtggactctgtaaagggacgattcatcatctccagagacaacgccaagaactcagtgtttctgcaaatggacagcctgagacgcgaggacacggccatgtatttctgttcgccatcgcttaactcctggggccagggagtcctggtcaccgtctcctca

SEQ ID NO: 16494 - DNA, 274 bp, Homo sapiens; identical to SEQ ID NO: 16493
  source 1..274: mol_type = other DNA

SEQ ID NO: 16495 - DNA, 274 bp, Homo sapiens
  source 1..274: mol_type = other DNA
tgcagtctccggattgtcctttagggacaattggatggactgggtccgccaggctccagggaagggtctggagtgggtggccaacataaatccagatggaagtgacaaaaactatgtggactctgtgaagggacgattcatcatctccagagacaacgccaagaactcagtgtttctgcaaatggacagcctgagacgcgaggacacggccatgtatttctgttcgccatcgcttaactcctggggccagggaatcctggtcaccgtctcctca

SEQ ID NO: 16496 - DNA, 274 bp, Homo sapiens
  source 1..274: mol_type = other DNA
tgtagtctccggattgtcctttagggacaattggatggactgggtccgccaggctccagggaagggtctggagtgggtggccaacataagtccagatggaagtgacaaaaactatgtggactctgtaaagggacgattcatcatctccagagacaacgccaagaactcagtgtttctgcaaatggacagcctgagacgcgaggacacggccatgtatttctgttcgccatcgcttaactcctggggccagggaatcctggtcaccgtctcctca

SEQ ID NO: 16497 - DNA, 274 bp, Homo sapiens; identical to SEQ ID NO: 16496
  source 1..274: mol_type = other DNA

SEQ ID NO: 16498 - DNA, 274 bp, Homo sapiens
  source 1..274: mol_type = other DNA
ctcagtctctggattggtctttaagagtaattggatggactgggtccgccaggctccagggaaggggctggagtgggtggccaacataaagccagatggaagtgagatgaactatgtggactctgtgaagggccggttcaccatctccagagacaatgtcaagggctcattatatctggatatcagcagcctgagagccgaggacacggctatgtattactgttcgccctccttaaactcctggggccagggagtcctggtcaccgtctcctca

SEQ ID NO: 16499 - DNA, 312 bp, Homo sapiens
  source 1..312: mol_type = other DNA
acacagaccctcacgctgacctgcaccttctctgggttctcactcactactgctgaagtgggtgtgcactggatccgtcagcccccaggaaaggccctggagtggcttgcactcatttattggaatgatgataaccactacagtccatccctggagagcaggctcaccatcaccaaggacacctccaagaaccaggtggtccttacaatgaccaacatggaccctgtggacacagccacatattactgtgcacatagcagtggctgggttagcgactactggggccagggaaccctggtcaccgtctcctca

SEQ ID NO: 16500 - DNA, 312 bp, Homo sapiens
  source 1..312: mol_type = other DNA
acacagaccctcacgctgacctgcaccttctctgggttctcactcagcactgctgcagtgggtgtgcagtggatccgtcagcccccaggaaaggccctggagtggcttgcactcgtttattgggatgatgataatcactacagcccatctctgaagagcagactcaccatcaccaaggacacctccaaaaaccaggtggtccttacaatgatcaatatggaccctgcggacacagccacatattactgtgcacacagtagtggctgggtatctgactactggggccagggaaccctggtcaccgtctcctca

SEQ ID NO: 16501 - DNA, 312 bp, Homo sapiens
  source 1..312: mol_type = other DNA
acacagaccctcacgctgacctgcaccttctctgggttctccctcacctctgctgaagtgggtgtgcactggatccgtcagcccccaggaaaggccctggagtggcttgcactcatttattggaatgatgataaccgctacagtccatccctggagagcaggctcaccatcaccaaggacacctccaagaaccaggtggtccttacaatgaccaacatggcccctgtggacacagccacatattactgtgcacatagcagtggctgggttagcgactactggggccagggaaccctggtcaccgtctcctca

SEQ ID NO: 16502 - DNA, 283 bp, Homo sapiens
  source 1..283: mol_type = other DNA
tgtagcctccggattcacctttagtagccattggatgagttgggtccgccaggctccagggaaggggctcgagtgggtggccaacataaagggagatggaagtgtcagcttctatgtggactctgtgaagggccgcttcaccatctccagagacaacgcccacaactcagtatatctgcaaatgaacagcctgagagtcgaggacacggccgtatattattgtgcgagagccgtggacgtgggggactactggggccagggaaccctggtcaccgtctcctca

SEQ ID NO: 16503 - DNA, 283 bp, Homo sapiens
  source 1..283: mol_type = other DNA
tgtagcctctggattcacctttagtagccattggatgagttgggtccgccaggctgcagggaaggggctggagtgggtggccaacataaaggaagatggccgtgtcaagttctatgtggactctgtgaagggccgcttcaccatctccagagacaacgcccagaattcagtatatctgcaaatgaacagcctgagagtcgaggacacggccgtgtattactgtgcgagagccgtggacgtgggggactactggggccagggaaccctggtcaccgtctcctca

SEQ ID NO: 16504 - DNA, 283 bp, Homo sapiens
  source 1..283: mol_type = other DNA
tgtagcctccggattcacctttagtagccattggatgagttgggtccgccaggctccagggaaggggctcgagtgggtggccaacataaagggagatggaagtgtcagcttctatgtggactctgtgaagggccgcttcaccatctccagagacaacgcccacaactcagtatatctgcaaatgaacagcctgagagtcgaggacacggccgtatattattgtgcgagagccgtggacgtgggggactactggggccaggaaaccctggtcaccgtctcctca

SEQ ID NO: 16505 - DNA, 283 bp, Homo sapiens
  source 1..283: mol_type = other DNA
tgcagcctctggattcacctttatcaaccattggatggcctgggtccgccaggctccagggaaggggctggagtgggtggccaacataaagcaagatggaagtgcgaaattctatgtgggctctgtgaagggccgattcaccatctccagagacaacgccgagaactcactgtatctgcaaatgaacagcctgacagccgaggacacggctgtgtattactgtgcgcgagctgtggacgtgggtgactactttggccagggaaccctggtcaccgtctcctca

SEQ ID NO: 16506 - DNA, 277 bp, Homo sapiens
  source 1..277: mol_type = other DNA
cgcagcctctggattcacctttagtaattcttggatgagttgggtccgccaggctccagggaaggggctggagtgggtggccaacataaaggacgatggaagtgggaaatactatgtggactctgtgaagggccgatttaccatctccagagacaacgccaagaactcaatgtatctgcaaatgagcagcctgagagccgaggacacggctatgtattactgtgcgacctctgggggggggcactggggccagggcaccctggtcagcgtctcctca

SEQ ID NO: 16507 - DNA, 277 bp, Homo sapiens
  source 1..277: mol_type = other DNA
tgcaacctttgggttcatctttagtactacttggatgggctgggtccgccaggctccagggaaggggctggagtgggtggccaagataaatccagatggaagtgggaaagcctatgtggactctgttaagggccgattcaccatctccagagacaacgccaagaattcactgcatctgcaattgaacagcctgagaagcgaggacacggctgtgtattactgtgcgacaagtggtggcggccactggggccagggtaccctggtcaccgtctcctct

SEQ ID NO: 16508 - DNA, 277 bp, Homo sapiens
  source 1..277: mol_type = other DNA
tgcaacctttgggttcatctttagtactacttggatgggctgggtccgccaggctccagggaaggggctggagtgggtggccaagataaatccagatggaagtgggaaagcctatgtggactctgttaagggccgattcaccatctccagagacaacgccaagaattcactgcacctgcaattgaacagcctgagaagcgaggacacggctgtgtattactgtgcgacaagtggtggcggccactggggccagggtaccctggtcaccgtctcctct

SEQ ID NO: 16509 - DNA, 277 bp, Homo sapiens
  source 1..277: mol_type = other DNA
cactgtctctggtggctccatcactggatactactggagctggatccggcagcccccagggaagggactggagtggattgggtgcatcactaacactgggagcaccaactacaacccctccctcaagagccgagtcaccatatcagtagacacgtccaagaaccagttctccctaaaactgaactccgtgaccgccgcagacacggccgtgtattactgtgcgagacgtggtggtttggactactggggccagggaaccctggtcaccgtctcctca

SEQ ID NO: 16510 - DNA, 277 bp, Homo sapiens
  source 1..277: mol_type = other DNA
cactgtctctggtggctccatcagtagttactactggagctggatccggcagcccccagggaagggactggagtggattgggtatatctattccaatggaaacgccaactacaacccctccctcaagagtcgagtcaccatgtcagtagacacgtccaagaaccagttctccctggagctgacctctgtgaccgccgcagacacggccgtgtattactgtgcgagacgcggcggccttgactactggggccggggaaccctgctcaccgtctcctca

SEQ ID NO: 16511 - DNA, 292 bp, Homo sapiens
  source 1..292: mol_type = other DNA
tgcagcgtctggtttcagcatcagtagctatggcatgcactgggtccgccaggctccaggcaaggggctggagtgggtggcagttatgtggcatgatggaagtaaaaaatactatgcagaggccgtgaagggccgattcaccatctccagagacaattccaagaacacgctgtatttgcaaatggacagcctgagaaccgaagacacggctgtgtattactgtgcgagaccaggaccgggttatgatgcttttgatatctggggccaagggacaatggtcaccgtctcctca

SEQ ID NO: 16512 - DNA, 292 bp, Homo sapiens
  source 1..292: mol_type = other DNA
tgcagcgtctggtttcagcatcagtacctatggcatgcactgggtccgccaggctccaggcaaggggctggagtgggtggcagttatgtggcatgatggaagtaaaaaatactatgcagaggccgtgaagggccgattcaccatctccagagacaattccaagaacacgctgtatttgcaaatggacagcctgagaaccgaagacacggctgtgtattactgtgcgagaccaggaccgggttatgatgcttttgatatctggggccaagggacaatggtcaccgtctcctca

SEQ ID NO: 16513 - DNA, 292 bp, Homo sapiens
  source 1..292: mol_type = other DNA
tgcagcgtctggattcaccttcagtacctatggcatgcactgggtccgccaggctccaggcaagggtctggactgggtggcagttatatggcatgatggaagtaagacatactatgcagactccgtgaagggccgattcaccatctccagagacatttccaagaacacactgtatctacaaatgaacaacctgagagccgaggacacggctgtgtattactgtgcgagaccgggtcccggatatgatgcttttgatatctggggccaagggacaatggtaaccgtctcttgg

SEQ ID NO: 16514 - DNA, 292 bp, Homo sapiens
  source 1..292: mol_type = other DNA
tgcagcgtctggattcaccttcagtagctatggcatgcactgggtccgccaggctccaggcaagggtctggagtgggtggcagttatatggcatgatggaagtaagacatactatgcagactccgtgaagggccgattcaccatctccagagacatttccaagaacacactgtatctacaaatgaacgacctgagagccgaggacacggctgtgtattactgtgcgagaccgggtcccggatatgatgcttttgatatctggggccaagggacaatggtaaccgtctcttgg

SEQ ID NO: 16515 - DNA, 292 bp, Homo sapiens
  source 1..292: mol_type = other DNA
tgcagcgtctggattcaccttcagtagctatggcatgcactgggtccgccaggctccaggcaagggtctggagtgggtggcagttatatggcatgatggaagtaagacatactatgcagactccgtgaagggccgattcaccatctccagagacatttccaagaacacactgtatctacaaatgaatgacctgagagccgaggacacggctgtgtattactgtgcgagaccgggtcccggatatgatgcttttgatatctggggccaagggacaatggtaaccgtctcttgg

SEQ ID NO: 16516 - DNA, 301 bp, Homo sapiens
  source 1..301: mol_type = other DNA
tgcagcctctggattcacctttagtacctattggatgagctgggtccgccaggctccagggaaggggctggagtgggtggccaacataaagcaagatggaagtgagaaatactatgtggactctgtgaagggccgattcaccatctccagagacaacgccaggaactcactgtatctgcaaatgaacagcctgagagccgaggacacggccgtgtattactgtgcgagagcccggatagcagtggctggtacagactattttgagtactggggtcagggaaccctggtcaccgtctcctca

SEQ ID NO: 16517 - DNA, 301 bp, Homo sapiens
  source 1..301: mol_type = other DNA
tgcagcctctggattcacctttagtagctattggatgagctgggtccgccaggctccagggaaggggctggagtgggtggccaacataaagcaagatggaagtgagacatactatgtggactctgtgaagggccgattcaccatctccagagacaacgccaagaactcactgtttctgcaaatgaacagcctgagagccgaggacacggctttttattactgtgcgagagcgcgtatagcagtggctggtacggactacttcgagtactggggccagggaaccctggtcaccgtctcctca

SEQ ID NO: 16518 - DNA, 297 bp, Homo sapiens
  source 1..297: mol_type = other DNA
gcttctggatacaccttcactagctatgctatacattgggtgcgccaggcccccggacaaaggcttgagtggatggggtggatcaacgctggcaatggtaacacaagatattcacagaagttccagggcagactcaccattacctgggacacatccgcgagcacagcctacatggacctgagcagcctgagatctgaagacacggctgtgtattactgtgcgagaggaggggagggtggatacagctatgggtgctttgactactggggccagggaaccctggtcaccgtctcctca

SEQ ID NO: 16519 - DNA, 297 bp, Homo sapiens
  source 1..297: mol_type = other DNA
gcttctggatacaccttcactagctatgctatacattgggtgcgccaggcccccggacaaaggcttgagtggatggggtggatcaacgctggcaatggtaacacaaaatattcacagaagttccagggcagactcaccattacctgggacacatccgcgagcacagcctacatggacctgagcagcctgagatctgaagacacggctgtgtattactgtgcgagaggaggggagggtggatacagctatgggtgctttgactactggggccagggaaccctggtcaccgtctcctca

SEQ ID NO: 16520 - DNA, 297 bp, Homo sapiens
  source 1..297: mol_type = other DNA
gcttctggatacaccttcactaactatgctattcattgggtgcgccaggcccccggaaaaaggcttgagtggatgggatggatcaacgctggcaatggtaacacaaaatattcacagaagttccagggcagagtcaccattaccagggacacatccgcgagcacagcctacatggagctgagcagcctgagatctgaagacacggctgtgtattactgtgcgagggggggggagggtggatacagctatgggtgctttgactactggggccagggaaccctggtcaccgtctcctca

SEQ ID NO: 16521 - DNA, 280 bp, Homo sapiens
  source 1..280: mol_type = other DNA
tggagcctctggattcaccttcactacttatagcatgaactgggtccgccaggctccagggaaggggctggagtgggtctcttccattagtagtcggggtacttccatttactacgcagactcagtgaagggccgattcaccatctccagggacaactccaacaactcagtgtttctgcaaatgaacaacgtgagagccgaggacacggcgatatatttctgtgcgagagcgccctcttctgactactggggccagggaaccctggtcaccgtctcctca

SEQ ID NO: 16522 - DNA, 280 bp, Homo sapiens
  source 1..280: mol_type = other DNA
tgccgcctctgacttcaccttcagtacttacagtatgaactgggtccgtcaggctccagggaagggactggagtgggtctcgttaattagtagtactggcacttacacatattacgcagagtcagtgaagggccggttcaccatctccagagacaacgccaacaactcagtatatctggaaatgaacagtctgagagccgacgacacggctgtatattactgcgcgagagccccctcgtcggattattggggccagggagtcccggtcaccgtctcctca

SEQ ID NO: 16523 - DNA, 280 bp, Homo sapiens
  source 1..280: mol_type = other DNA
tgccgcctctgacttcaccttcagtacttacagtatgaactgggtccgtcaggctccagggaagggactggagtgggtctcgttaattagtagtactggcacttacacatattacgcagagtcagtgaagggccggttcaccatctccagagacaacgccaacaagtcagtatatttggaaatgaacagtctgagagccgacgacacggctgtatattactgcgcgagagccccctcgtcggattattggggccagggagtcccggtcaccgtctcctca

SEQ ID NO: 16524 - DNA, 280 bp, Homo sapiens
  source 1..280: mol_type = other DNA
cgtagtctctggagtcactttcagagacgtctggatgacctggttccgccaggctccagggaaggggctggagtgggttggccgtattaagagtgaaggtcaaggtgggactacagactacgctgcacccgtgaagggcagattcaccatctcaagagatgagtcaaaaaacatactgtatctgcaaatgaccagcctgaaaaccgaggacacagccgtttatcattgtaccactgatcattttacctggggccagggaaccctcgtcaccgtctcctca

SEQ ID NO: 16525 - DNA, 280 bp, Homo sapiens
  source 1..280: mol_type = other DNA
tgaagcctctggaatcactctcagtaacgcctggatgtcctggttccgccaagctccagggaaggggctggagtgggttggccgtattaaaagcaaaactcatggtgggacaacagactacgctgcacccgtgaacggcagattcaccatctcaagagatgattcaaagaacactctgtttctacacatgaacagcctgaaaaccgaggacacagccgtctattactgtaccacagatcactttacctggggccagggaaccctggtcaccgtctcctca

SEQ ID NO: 16526 - DNA, 280 bp, Homo sapiens
  source 1..280: mol_type = other DNA
tgaagtctctggaatcactctcagtaacgcctggatgtcctggttccgccaagctccagggaaggggctggagtgggttggccgtattaaaagcaaaattcatggtgggacaacagactacgctgcacccgtgaacggcagattcactatctcaagagatgattcaaagaacactctgtttctacacatgaacagcctgaaaaccgaggacacagccgtctattactgtaccacagatcactttacctggggccagggaaccctggtcaccgtctcctca

SEQ ID NO: 16527 - DNA, 280 bp, Homo sapiens
  source 1..280: mol_type = other DNA
tacagcctctagattcactcttagtaacgcctggatgtcctggttccgccaagctccagggaaggggctggagtgggttggccgtattaaaagcaaagctcatggtgggacaatagactacgctgcacccgtgaacggcagattcaccatctcaagagatgattcaaagaacactctgtttctacacatgaacagcctgaataccgaggacacagccgtctattactgtaccacagatcactttacctggggccaaggaaccctggtcaccgtctcctca

SEQ ID NO: 16528 - DNA, 274 bp, Homo sapiens
  source 1..274: mol_type = other DNA
tgcagcctctggattcctcttaaggactttttggatgcactgggtccgccaggctccagggaaggggctggagtgggtggccaccatgaatctagatggaggtgaaaactattatgtggactctgtgaagggccgattcaccatctccagagacgacgccaagaactcactgtttctgcaaatgaacaggctgagagccgaagactcggctgtgtattattgtacgaggggtttggacgtctggggccgggggaccgcggtcaccgtctcatcc

SEQ ID NO: 16529 - DNA, 274 bp, Homo sapiens
  source 1..274: mol_type = other DNA
tgcagcctctggattcactttcagtagcccttggatgaactgggtccgccaggctccagggaaggggctggagtgggtggccaacataaacccagatggaaatgcgcaatactatgtggactctgtgaagggccgattcaccatctccagagacaacgccaagaactcactgtatctgcaaatgaacagtctgagagccgaggacacggctgtgtattactgtacgaggggactggacgtctggggccaagggaccacggtcaccgtctcctca

SEQ ID NO: 16530 - DNA, 274 bp, Homo sapiens; identical to SEQ ID NO: 16529
  source 1..274: mol_type = other DNA

SEQ ID NO: 16531 - DNA, 289 bp, Homo sapiens
  source 1..289: mol_type = other DNA
cactgtctctggtggctccagcagtggttactactggggctggatccggcagccccccgggaggggaccggagtggattgggtatatgtattacagtgggacccccaactacagcccctccctcaagagtcgagtcaccatatcagtggacacgtccaagaaccagttctccctgaagctgacctctgtgacggccgcagacacggccgtgtattactgtgcgagactgggctactactcctacgctatggacgtctggggccaagggaccacggtcaccgtctcctca

SEQ ID NO: 16532 - DNA, 289 bp, Homo sapiens
  source 1..289: mol_type = other DNA
cactgtctctggtggctccatcagtggttactactggggctggatccggcagcccccagggaggggactggagtggattgggtatagttattacagtgggacccccaactacagcccctccctcaagagtcgagtcaccatatcagtggacacgtccaagaaccagttctccctgaaggtgacctctgtgacggccgcagacacggccgtgtattactgtgcgagactgggctactactcctacgctatggacgtctggggccaagggaccacggtcaccgtctcctca

SEQ ID NO: 16533 - DNA, 289 bp, Homo sapiens; identical to SEQ ID NO: 16531
  source 1..289: mol_type = other DNA

SEQ ID NO: 16534 - DNA, 289 bp, Homo sapiens
  source 1..289: mol_type = other DNA
cactgtgtctggtggccccatcagtggttactactggggctggatccggcagcccccggggaaggctctggagtggattggatatttgtattccagtgggaaccccaactacagtccgtccctcaagagccgagtcaccatctcagtcgacatggccaacaaccggttctccctgaaactgacgtctgtgatccctacggacacggccgtgtattattgtgcgaggctgggctactactcctacgctatggacgtctggggccaagggaccacgatcaccgtctcctca

SEQ ID NO: 16535 - DNA, 297 bp, Homo sapiens
  source 1..297: mol_type = other DNA
gcttctggatacactttcaccaattttgatgtcaactgggtgcgacaggccgctggccaaggccttgagtgggtggggtggatgaaccccggaactggtcgctcagtctctgcacataagttccagggcagagtcatcatgactagggacacctccataaattcagccttcttggagttgaccagcctcagatctgacgacacggccgtgtattactgtgcgcggcgagccattcttggtccggggagttcccgttttgactcatggggccagggaaccgtggtcaccgtcgcctca

SEQ ID NO: 16536 - DNA, 297 bp, Homo sapiens
  source 1..297: mol_type = other DNA
gcttctggatacaccttcaccagctatgatatcaactgggtgcgacgggcccctggacaagggcttgagtggatgggatggatgaacgctagcactggtatcacactctatgcacagaagttccagggccgagtcaccatgaccagggacacctccataagcacagcctatttggaggtgcgcagcctgacatctgaggacacggccgtgtatctctgtgcgagacgagccatccttggtccggggagctcgcgctttgactcctggggccagggaaccctggtgaccgtctcctca

SEQ ID NO: 16537 - DNA, 307 bp, Homo sapiens
  source 1..307: mol_type = other DNA
cactgtctctggtggctccatcagtagttactactggagctggatccggcagcccccggggaagggactggagtggattgggtatatctattacagtgggagcaccaactacaacccctccctcaagagtcgagtcaccatatcagtagacacgtccaagaaccagttctccctgaagctgagctctgtgaccgctgcggacacggccgtgtattactgtgcgagggaaacgtattactatgatagtagtggttattacaactggttcgacccctggggccagggaaccctggtcaccgtctcctca

SEQ ID NO: 16538 - DNA, 307 bp, Homo sapiens
  source 1..307: mol_type = other DNA
cactgtctctggtggctccatcagtagttactactggagctggatccggcagcccccagggaagggactggagtggattgggtatatctattacagtgggagcaccaactacaacccctccctcaagagtcgagtcaccatatcagtagacacgtccaagaaccagttctccctgaagctaacctctgtgaccgctgcggacacggccgtgtattactgtgcgagagagacgtattactatgatagtagtggttattacaactggttcgacccctggggccagggaaccctggtcaccgtctcctca

SEQ ID NO: 16539 - DNA, 310 bp, Homo sapiens
  source 1..310: mol_type = other DNA
tgcagcgtctggattcaccttcagtagttatggcatgcactgggtccgccaggctccaggcaaggggctggagtgggtggcagttatatggtatgatggaagtaataaatactatgcagactccgtgaagggccgattcaccatctccagagacaattccaggaacacgctgtatctgcaaatgaacaacctgagagtcgaggacacggctgtgtattactgtgcgagagtggggcgagactactatgatagtagtggttattaccctattgactactggggccagggaaccctggtcaccgtctcctca

SEQ ID NO: 16540 - DNA, 310 bp, Homo sapiens
  source 1..310: mol_type = other DNA
tgcagcgtctggattcaccttcagtagctatggcatgcactgggtccgccaggctccaggcaaggggctggagtgggtggcagttatatggtatgatggaagtaataaatactctgcagactccgtgaagggccgattcaccatctccagagacaattccaagaacacgctgtatctgcaaatgaacagcctgagagccgaggacacggctgtttatttctgtgcgagagtaggacgcgattactatgatagtagtggttattatcccattgactactggggccagggaaccctggtcaccgtctcctca

SEQ ID NO: 16541 - DNA, 310 bp, Homo sapiens
  source 1..310: mol_type = other DNA
tgcagcgtctggattcaccttcagtagctatggcatgcactgggtccgccaggctccaggcaaggggctggagtgggtggcagttatatggtatgatggaagtaataaatactatgcagactccgtgaagggccgattcaccatctccagagacaattttaagaacacgctgtatctgcaaatgaacaccctgagagccgaggacacggctgtatattactgtgcgagagtggggcgggattactatgatagtagtggttattaccctattgactactggggccagggatccctggtcaccgtctcctca

SEQ ID NO: 16542 - DNA, 295 bp, Homo sapiens
  source 1..295: mol_type = other DNA
tgcagcctctggattcacctttagtagctattggatgagctgggtccgccaggctccagggaaggggctggagtgggtggccaacataaagcaagatggaagtgagacatactatgtggactctgtgaagggccgattcaccatctccagagacaacgccaagaactcactgtatctgcaaatgaacagcctgagagccgaggacacggccgtgtattactgtgcgagaggtggaggaggtgaccgtgatgcttttgatatctggggccaagggacaatggtcaccgtctcttca

SEQ ID NO: 16543 - DNA, 295 bp, Homo sapiens
  source 1..295: mol_type = other DNA
tgcagcctctggattcacctttagtacctattggatgagctgggtccgccaggctccagggaaggggctggagtgggtggccaacataaagcaagatggaagtgagacatactatgtggcctctgtgaagggccgattcaccatctccagagacaacgccaagaactcactgtatctgcaaatgaacagcctgagagccgaggacacggctgtctattactgtgcgagaggggggggcggtgaccgcgatgcttttgatatctggggccaagggacaatggtcaccgtctcttca

SEQ ID NO: 16544 - DNA, 295 bp, Homo sapiens
  source 1..295: mol_type = other DNA
tacagcctctggattcacctttagcagctctgccatgagctgggtccgccaggctccagggaaggggctggagtgggtctcagctatcagtaatggtgatggtggtagcacatactacgcaggctccgtgcggggccgattcaccatctccagagacaattccaagaacacgctgtatctgcaaatgtacagcctgagagccgaggactcggccctatattactgtgcgaaagatcgtttaactattagcgcttttgatatctggggccaagggacaatggtcaccgtctcttca

SEQ ID NO: 16545 - DNA, 292 bp, Homo sapiens
  source 1..292: mol_type = other DNA
tacagcctctggattcacctttaacaactatggcatgaactgggtccgccaggctccagggaagggcctggagtgggtctcaggcattagtggtagtagtagagacacatactacggagactccgtgaagggccggttcaccatctccagagacaattccaagaacatcctctttctgcaaatgaacagcctgagagccgacgacacggccttatattactgtgcgaaagaccggcttacgatttcggcttttgatatctggggccaagggacaatggtcaccgtctcttca

SEQ ID NO: 16546 - DNA, 292 bp, Homo sapiens
  source 1..292: mol_type = other DNA
tgtagcctctggattcacctttaacaactatggcatgagctgggtccgccaggctccagggaaggggctggagtgggtcacgggtattagtggtagtagtcgtgacacatactacgaagactccgtgaagggccggttcaccatctccagagacaattccaagaacaccctatttctgcaaatgaacagcctgagagccgacgacacggccttatattactgtgcgaaagaccggcttacgatttcggcttttgatatctggggccaagggacaatggtcaccgtctcttca

SEQ ID NO: 16547 - DNA, 298 bp, Homo sapiens
  source 1..298: mol_type = other DNA
tgcagcctctggattcacgtttagtagctatgccatgagctgggtccgccagggtccagggaaggggctggagtgggtctcagctcttagtggtagtggtggtcgcacattctacgcagactccgtgaagggccggttcaccatctccagagacaattccaagaacacgctgtttctgcaaatgaacagcctgagagccgaggacacggccatatattactgtgcgaaaaatcggggatacagtggttacgatccccttgactactggggccagggaaccctggtcaccgtctcctca

SEQ ID NO: 16548 - DNA, 298 bp, Homo sapiens
  source 1..298: mol_type = other DNA
tgcagcctctggattcacctttagcagctatgccatgagctgggtccgccaggctccagggaaggggctggagtgggtctcagctattagtggtagtggtgctagcacatactacgcagactccgtgaagggccggttcaccttctccagagacaattccaagaacacgctgtatctgcaaatgaacagcctgagagccgaggacacggccatatattactgtgcgaaaaatcgtggatatagtggctacgatccccttgactactggggccagggaaccctggtcaccgtctcctca

SEQ ID NO: 16549 - DNA, 299 bp, Homo sapiens
  source 1..299: mol_type = other DNA
tcatctccggggacagtgtctctagcaacagtgctacttggaactggatcaggcagtccccatcgagaggccttgagtggctgggaaggagttttttcaggtccaagtgggagagtgtttatgcactatctgtggaaagtcgaatgaccatcaagccagacacatcgcagaaccagttctccctgcaactgaactctgtgactcccgaggattcggctgtgtattactgtgctagaagtgcgtactataaggagtggctcgacccctggggccagggaaccctggtcaccgtctcctca

SEQ ID NO: 16550 - DNA, 300 bp, Homo sapiens
  source 1..300: mol_type = other DNA
tccatttccggggacagtgtctctaccaatactgctacttggaactggatcaggcagtccccatcgagaggccttgagtggctgggaaggacatactacaggtccaggtggtctactgtttatgcagaatctgtgaaaagtcgaataaccatcaacccagacacatccaggaaccagttctccctgcacctgaactctgcgactcccgaggacacggctgtgtattattgtgcaagaagtgcgtattataaagaatggctcgacccctggggccagggaaccctggtcaccgtctcctca

SEQ ID NO: 16551 - DNA, 274 bp, Homo sapiens
  source 1..274: mol_type = other DNA
tgtaggctctggattcagctttagtagctattggatgaactgggtccgccaggctccaaggaaggggctggagtgggtggccaacattaagcaggatggaagtgacaaatcctatgtggactctgtgaagggccgattcaccatctccagagacaacgccaagaattcactgtatttgcaaatgaacagtctgagagacgaggacacggccgtttattattgtgtgagaggggttgaccactggggccagggaaccctggtcaccgtctcgtca

SEQ ID NO: 16552 - DNA, 274 bp, Homo sapiens
  source 1..274: mol_type = other DNA
tacagtctctggattcacctttagtagttattggatgagttgggtccgccagactccagggaaggggctggagtgggcggccaacataaatgaagatgggagtaagaagtactatgtggactctgtgaagggccgattcaccatctcccgagacaacaccaagaacgtagtctatctgcaaatgaacagactgacggtcgaggatacggctgtgtattactgtgtcaggggcgtggatcattggggccagggaaccctggtcaccgtctcttca

SEQ ID NO: 16553 - DNA, 283 bp, Homo sapiens
  source 1..283: mol_type = other DNA
tgcagccactggattcacttttagcatctatggcatgacctgggtccgccaggctccagggaaggggctggagtgggtctcaggaattagcggtagtgatgctagcacatactacgcagactccgtgaagggccggttcaccatctccagagacaattccaagaacacgctgtatctgcaaatgcacagcctgagagccgaggacacggccgtctattactgtgcgaaaggctggcaggcgcctgactactggggccggggaaccctggtcaccgtctcctca

SEQ ID NO: 16554 - DNA, 283 bp, Homo sapiens
  source 1..283: mol_type = other DNA
tgcagcctctggattcacctttagcaactctgccatgagctgggtccgccaggctccagggaagggtctggagtgggtctcaattattagtattagtggtggtagcacatactacgcagactccgtgaagggccggttcaccgtctccagagacaattccaagagtacgctgtatctgcaactgaacagcctgagagccgaggacacggccgtatattactgtgcgaaaggatggcaggcccctgactactggggccagggaaccctggttaccgtctcctca

SEQ ID NO: 16555 - DNA, 277 bp, Homo sapiens
  source 1..277: mol_type = other DNA
tgcagcctctggattcacctttagtaactactggatgacctgggtccgccaggctccagggaaggggctggagtgggtggccaatacaagggaagatggaagtgagaaatggtatgtggactctgtgaagggccgattcaccatctccagagacaacgccaagaactcactgtatctgcaaatgaacagcctgagagccgaggacacggccgtgtattactgtgcgataagtgtgggtgaagattggggccagggaaccctggtcaccgtctcctca

SEQ ID NO: 16556 - DNA, 277 bp, Homo sapiens
  source 1..277: mol_type = other DNA
tgcagcctctggattcacctttggtagttattggatgacctgggtccgccaggctccagggaaggggctggagtgggtggccaacataaaggaagatggaagtgcgaagtactatgtggactctgtgaagggccgattcaccatctccagagacaacgccaagaactcactgtatctgcaaatgaacagcctgagagccgaggacacggctgtgtactactgtgcgataagtgtcggggaagactggggccagggaaccctggtcaccgtctcctca

SEQ ID NO: 16557 - DNA, 277 bp, Homo sapiens
  source 1..277: mol_type = other DNA
tgcagcctctggactcccctttcgtacttggtggatggcctgggtccgccaggctccagggaaggggctggagtgggtggccagcataaaggaagatggaagtgcgaggttctatgtggactctgtgaagggccgattcaccatctccagagacaacgccaagagctcattgtatctgcaaatgaacaacctgagagccgaggactcggctatgtactactgtgcgataagtgtcggggaagactggggccggggaaccctggtcaccgtctcctca

SEQ ID NO: 16558 - DNA, 277 bp, Homo sapiens
  source 1..277: mol_type = other DNA
tgcagcctctggactcacctttggtagttattggatgacctgggtccgccaggctccagggaaggggctggagtgggtggccaacataaaggaagatggaagtgcgaagtactatgtggactctgtgaagggccgattcaccatctccagagacaacgccaagaactcactgtatctgcaaatgaacagcctgagagccgaagacacggctgtgtactactgtgcgataagtgtcggggaagactggggccagggaaccctggtcaccgtctcctca

SEQ ID NO: 16559 - DNA, 279 bp, Homo sapiens
  source 1..279: mol_type = other DNA
gcttctggatatactttcaccagttataatatacattgggtgcggcaggcccccggacaaagccctgagtggatgggatatatcaaccctggcaatggtaaaacgagattttcacagaagttccagggcagagtctccattacgacggacacctccgcgagcactgcgtacatggaggtgtacagcctgacatctgacgacacggctgtctactactgtgcgactgaccgtgggagttttgactactggggccagggaaccctggtcaccgtctcctca

SEQ ID NO: 16560 - DNA, 279 bp, Homo sapiens
  source 1..279: mol_type = other DNA
gcttctggatacatcttcactagttatgatatgcattgggtgcgccaggcccccggacaaaggcttgagtggatgggacggatcaacgctggcaatggtaagacaagatattcacagaagttccagggcagagtcaccattacccgggacacatccgcgaccacagcctacatggagctaagaagcctgacatctgaagacacggctgtgtattactgtgcgacagaccgcgggagtttcgactactggggccagggaaccctggtcagcgtctcctca

SEQ ID NO: 16561 - DNA, 279 bp, Homo sapiens
  source 1..279: mol_type = other DNA
gcttctggatacatcttcactagttatgatatgcattgggtgcgccaggcccccggacaaaggcttgagtggatgggacggatcaacgctggcaatggtaagacaagatattcacagaagttccaaggcagagtcaccattacccgggacacatccgcgaccacagcctacatggagctaagaagcctgacatctgaagacacggctgtgtattactgtgcgacagaccgcgggagtttcgactactggggccagggaaccctggtcagcgtctcctca

SEQ ID NO: 16562 - DNA, 282 bp, Homo sapiens
  source 1..282: mol_type = other DNA
gcgtctggatacagcttcactaataatgctatacattgggtgcgccaggcccccggacaagggcttgagtgcatgggatgggtctaccctgacagcggtaacacaagatattcacagaagttccaagacagagtcacctttgccagagacacatccacgagcacagcctacatggagctgtacagcctgagatccgaagacacggctgtatattactgtgcgaggggcagctcgtcgggctttggctactggggccagggaaccctggtcaccgtctcctca

SEQ ID NO: 16563 - DNA, 282 bp, Homo sapiens
  source 1..282: mol_type = other DNA
gcttctggatacatcttcactggttatgctgtgcattgggtgcgccaggcccccggacaagggcttgagtggatgggatggatcaccactgacaatggtaatacaagatattcacagaagatccagggcagagtcaccattaccagggacacatccgcgagcacagcctacatggagctgagcagcctgagatctgaagacacggctgtttattactgtgcgagaggcagtagcagtggatttggctactggggccagggaaccctggtcaccgtctcctca

SEQ ID NO: 16564 - DNA, 286 bp, Homo sapiens
  source 1..286: mol_type = other DNA
tgcagcctctggattcacgtttagtagctattggatgaattgggtccgccaggctccagggaaggggctggagtgggtggccaacataaagcaagatggaagtgagaaatactatgtggactctgtgaagggccgattcaccatctccagagacaacgccaagaactcactgtatctgcaaatgaacagcctgagagtcgaggacacggccctatattactgcgcgggaggttctggctggctgattgattgttggggccagggaaccctggtcaccgtctcctca

SEQ ID NO: 16565 - DNA, 286 bp, Homo sapiens
  source 1..286: mol_type = other DNA
tgcagcctctggattcacctttggttcctattggatgaattgggtccgccaggctccagggaaggggctggagtgggtggccaacataaagggagatggaagtgacaatcgctatgtggactctgtgaagggccgcttcaccatctccagagacaacgccaagaattcggtgtatctggaaatgaacagcctgagagtcgaggacaccgctgtctattactgtgcgggaggtagtggctggcttattgactgttggggccagggaaccctggtcagcgtctcctca

SEQ ID NO: 16566 - DNA, 274 bp, Homo sapiens
  source 1..274: mol_type = other DNA
tgttgcctctggtttcagcttcagcaactttgccatgacctgggtccgccaggctccagggaaggggctggagggggtctcatttataaatgctagaggtgatatcacagattacgctgaccccgtgaagggccggttcaccatctccagagacaatgccaagaacaccctgtatctgcaaatggacagcctgagagccgaggacacggccttctattactgtgcgtcgcggtggcacgactggggccagggaaccctggtcaccgtctcctca

SEQ ID NO: 16567 - DNA, 274 bp, Homo sapiens
  source 1..274: mol_type = other DNA
tgtagtctctggattcacctttagtaaaaatgccatgaactgggtccgccaggctccagggaaggggctggagtgggtctcgggtattagcggcagtggtgatagtacatactacttagaccccgtgaagggccgcttcaccatctccagagacaattccaagaaaactctgtttctgcaaatgaacagcctgagagccgaggacacggccgtatattactgtgcgagccgctggcacgactggggccagggaaccctggtcaccgtctcctca

SEQ ID NO: 16568 - DNA, 274 bp, Homo sapiens
  source 1..274: mol_type = other DNA
tatagtctctggattcacctttagtaaaaatgccatgaattgggtccgccaggctccagggaaggggctggagtgggtctcaggtattagtggcagtggtgacagcacatactatttagactccgtgaggggccgcttcaccatctccagagacaattccaagagtatgctgtttctgcaaatgaacagcctgagaggcgacgacacggccgtctattactgtgcgagccgctggcacgactggggccagggaacccttgtcaccgtctcctca

SEQ ID NO: 16569 - DNA, 286 bp, Homo sapiens
  source 1..286: mol_type = other DNA
tgcagcgtctggattcaccttcagtagttatggaatgcactgggtccgccaggctccaggcaaggggctggagtgggtggcagttatatggtatgatggaagtaataaatactatgcagactccgtgaagggccgattcaccatctccagagacaattccaagaacacgctgtttctgcaaatgaacagcctgagagccgaggacacggctgtgtattactgtgcgagagattggcgcggtgactttgactactggggccagggaaccctggtcaccgtctcctca

SEQ ID NO: 16570 - DNA, 286 bp, Homo sapiens
  source 1..286: mol_type = other DNA
tgcagcgtctggattcaccttcagtaactatggcatgcactgggtccgccaggctccaggcaaggggctggagtgggtggcagttatatggtatgatggaagtaataaattatatgcagactccgtgaagggccgattcaccatctccagagacaattccaagaacacgctgtatctggaaatgaacagcctgagagccgaggacacggctgtgtattactgtgcgagagattggaggggagactttgactactggggccagggaaccctggtcaccgtctcctca

SEQ ID NO: 16571 - DNA, 271 bp, Homo sapiens
  source 1..271: mol_type = other DNA
tgaagcgtctgggctcaccttcagcaaatataacatacactgggtccgccaggctccaggcaaggggccggagtgggtggcacttatttactatgatggaaataagaaatactatgcagactccgtgaagggccgattcaccatctccagagacaattccaagaacacgctgtatctgcaaatgaacagcctgagaaccgaggacacggctgtgtattactgttcgacctatgagtactggggccagggaaccctggtcaccgtctcctca

SEQ ID NO: 16572 - DNA, 271 bp, Homo sapiens
  source 1..271: mol_type = other DNA
tgcagcgtctggactcaccttcagtaactataacatacactgggtccgccaggctccaggcaagcggctggagtgggtggcacttatatactatgatggaaatactagatactatgcagactccgtgaagggccgattcaccgtctccagagacaattccaagagcacgctgtatctgcaaatgaataacctgagagtcgaggacacggctgtgtattactgttcgacatatgaatattggggccagggaaccctggtcaccgtctcctcg

SEQ ID NO: 16573 - DNA, 289 bp, Homo sapiens
  source 1..289: mol_type = other DNA
tgcagcctctggattcaccctgagtagccatggcatgacctgggtccgccaggctccagggaagggactggagtgggtctcaactattagtgctcgtggtagcacgtactacgcagactccgtgaagggccggttcaccatctccagagacaattccaagaacacgctgtatctgcaaatgaacagcctgacagccgaggacacggccgtatattactgtgtgaattactatggctcggggagttatggtcactactggggccagggaaccctggtcgccgtctcctct

SEQ ID NO: 16574 - DNA, 289 bp, Homo sapiens
  source 1..289: mol_type = other DNA
tgtagcctctggaatcgcctttaacacctatggcatgacctgggtccgccaggctccagggaaggggctggagtgggtctcaactgttggtactggcgatgacacactctacgcagactccgtgaagggccggttcaccatctccagagacaattccaagaacactctgtatctgcaaatgaacagcctgagagtcgaggacacggccatatattactgtgtaaattactatggttcggggagttatggtcactactggggccagggaaccctggtcaccgtctcctca

SEQ ID NO: 16575 - DNA, 292 bp, Homo sapiens
  source 1..292: mol_type = other DNA
tgcagcctctggaatgacgttcagtacttatggcatgacttgggtccgccaggctccagggaaggggctggagtgggtctcaaccattggaaaaagtggtgatgacagattctatgcagactccgtgaagggccgcttcaccatctccagagacaattccaggagcactctgtctctgcaactgagcagcctgagagccgaggacacggccatgtattattgcgtgaattattatggttcggggagttatggccactactggggccagggagccctggtcaccgtctcctca

SEQ ID NO: 16576 - DNA, 285 bp, Homo sapiens
  source 1..285: mol_type = other DNA
acttctggatacagcttcacaaattatgctttgcattgggtgcgccaggcccccggacaaaggcctgagtggatgggatggatccaccctgccaatggtaacacaaaatatgcacaggactttcagggcagagtcaccattaccagagacacatccgcgaccacatcctacatggagttgagcagcctgaaatctgaagactcggctctctattattgtgcgagaggttatagtaccacctaccttgactactggggccagggagccctggtaaccgtctcctca

SEQ ID NO: 16577 - DNA, 285 bp, Homo sapiens
  source 1..285: mol_type = other DNA
gcttctggatacaccttcacttcctatgcttttcattgggtgcgccaggcccccggagaaagtcttgagtggctggggtggatccaccctggcaatggagatgcacaatattcaccgaggttccagggcagagtcaccattaccagggacacatccgcgagtacagtttacatggagctgagcagccttaactccgaagacacggctgtctattactgtgcgaggggctacagtaccacttaccttgactactggggccagggagccctggtcaccgtctcctca

SEQ ID NO: 16578 - DNA, 285 bp, Homo sapiens
  source 1..285: mol_type = other DNA
gcttctggatataccttcacttcgtatgcttttcattgggtgcgccaggcccccggagaaagtcttgagtggctggggtggatccaccctggcaatggagatgcacaatattcaccgaggttccagggcagagtcaccattaccagggacacatccgcgactacagtttacatggagctgagcagccttaactccgaagacacggctgtctattactgtgcgaggggctacagtaccacttaccttgactactggggccagggagccctggtcaccgtctcctca

SEQ ID NO: 16579 - DNA, 285 bp, Homo sapiens
  source 1..285: mol_type = other DNA
acttctggatacagcttcagtaattatgccatccattgggtgcgccaggcccccggacaaaggcctgagtggatgggatggatccaccctggcaatggtgacgcacaatattcgccgaagtttcagggcagagtcaccatcaccagggactcgtccgcgagtgttatctccatggagatgagccgcctgagacccgaagacacggctatgtattactgtgcgagaggctatagcacgacctaccttgattattggggccagggaaccctggtctccgtctcctca

SEQ ID NO: 16580 - DNA, 283 bp, Homo sapiens
  source 1..283: mol_type = other DNA
tgcagcctctggattcactgtgacttacgcctggatgagctgggtccgccaggccccagggaagggactggagtgggttggtcgtatagaaagtaaaattgatggtgggacaacagactacgctgcacccgtgaaaggcagattcatcatctcagcagatgattcaagaaacacgctctttctgcaaatgaacagcctgaagatcgaggacacagccgtctattactgtatgacagtgttcggaggagactggggccagggagccctggtcaccgtctcctca

SEQ ID NO: 16581 - DNA, 283 bp, Homo sapiens
  source 1..283: mol_type = other DNA
tgcagcctctggattcagtttcagttacgcctggatgagttgggtccgccaggctccagggaaggggctggagtgggttggccgtattaaaagcaaaactgatggtgcgacagcagactacgctgcacccgtgaaaggcagattcaccatctcaggagatgagtcaaaaaacacgctgtatctggaaatgaacagcctgaaaattgaggacacagccgtgtattactgtatgacagtattcggtggtgactggggccagggaaccctggtcaccgtctcctca

SEQ ID NO: 16582 - DNA, 280 bp, Homo sapiens
  source 1..280: mol_type = other DNA
tgcagcctctggattcagttttagtagttattggatgagctgggtccgccagattccagggaaggggctggagtgggtggccaacatgaaccaagacggaagtgtgaactaccatgtggactctgtgaagggccgattcaccatctccagagacaacgccaagaactcactgtatctgcaaatgaacagcctgagagccgaggacacggccatttattactgtgcgacgggaggctgggatggctactggggccagggaaccctggtcaccgtctcctca

SEQ ID NO: 16583 - DNA, 280 bp, Homo sapiens
  source 1..280: mol_type = other DNA
tgcagcctctggattcacctttagtacttattggatgagctgggtccgccaggctccagggaaggggctggagtgggtggccaacatgaaccaagatggaagtgtgaaatactatgtggactctgtgaagggccgattcaccatctccagagacaacgccaagaactcactgtatctgcaaatgaacagcctgacagccgaggacacggctatatattactgtgcgacagggggttgggatggctactggggccagggaaccctggtcaccgtctcctca

SEQ ID NO: 16584 - DNA, 271 bp, Homo sapiens
  source 1..271: mol_type = other DNA
tgtagcctctggattcacctttagcagctatgacatgaactgggtccgccagggtccagggaaggggctggagtgcgtctcacgtatcagtggtggtggtgataaaacatactacggagactccgtgaagggccggttcaccatctccagagacaattccaagaacacgctgtatctgcagatgagcagcctgacagccgacgacacggccgtgtattactgtgggggggcgtggagttggggacagggaaccctggtcaccgtctcctca

SEQ ID NO: 16585 - DNA, 268 bp, Homo sapiens
  source 1..268: mol_type = other DNA
tgcagcctcgggactcaccattagcagatataccatgaattggctccgccaggctccagggaaggggctggagtgggtctcagatatcaagagtggtggtgacacatactacgcagactccgtgaagggccggttcgccgtcttcagagacagttctaagaacactctgtatctagaaatgaacagcctgagagtcgaggacacggccgtatattattgtgggggggcgtggagctggggcccgggagccctggtcaccgtctcctca

SEQ ID NO: 16586 - DNA, 316 bp, Homo sapiens
  source 1..316: mol_type = other DNA
tgcagcctctggattcaccttcagtagttatatcatgcactgggtccgccaggctccagggaaggggctggagtgggtctcatccattagtagtagtaataattccatatacaactcagactcactgaagggccgattcaccatctccagagacaacgccaagaagtcgctgtatctgcaaatgagcagcctgagagccgaggacacggctgtctattactgtgcgagagagcgtaattatgtcgtggtggtgactgctacccctacacgctactttgactactggggccagggaaccctggtcagcgtctcctca

SEQ ID NO: 16587 - DNA, 316 bp, Homo sapiens
  source 1..316: mol_type = other DNA
tgcagcctctggattcaccttcagtagttatatcatgcactgggtccgccaggctccagggaaggggctggagtgggtctcatccattagtagtagtaataattccatatacaactcagactcactgaagggccgattcaccatctccagagacaacgccaagaagtcgctgtatctgcaaatgagcagcctgagagccgaggacacggctgtctattactgtgcgagagagcgtaattatgtcgtggtggtgactgctacccctacacgctactttgactactggggccggggaaccctggtcaccgtctcctca

SEQ ID NO: 16588 - DNA, 302 bp, Homo sapiens
  source 1..302: mol_type = other DNA
ccatctccggggacagtgtctctagcaatagtgctgcttggaactggatcaggcagtccccatcgagaggccttgagtggctgggaaggacatattacaggtccaagtggtataatgattatgcagtgtctgtgaaaggtcgaataaccgtcaacccagacacatccaagaaccagttctccctgcaactgagctctgtgactcccgaggacacggctgtgtattactgtgcaagagatcctccggaactacactctgcttttgatatttggggccaagggacaatggtcaccgtctcttca

SEQ ID NO: 16589 - DNA, 302 bp, Homo sapiens
  source 1..302: mol_type = other DNA
ccatctccggggacagtgtctctagcagcactgctgcttggaattggatcaggcagtccccatcgagaggacttgagtggctgggaaggacatactacaggtccaagtggtataatgattatgcagaatctctgaaaggtcgaataaccgtcaacccagacacatccaagaaccagttctccctgcagctgaactctgtgactcccgaggacacggctgtgtattattgtgcaagagatccgcctgagctacatagtgcttttgatatctggggccaagggacaatggtcaccgtctcttca

SEQ ID NO: 16590 - DNA, 283 bp, Homo sapiens
  source 1..283: mol_type = other DNA
tgcagcctctggattcacctttagcaactatgccatgagctgggtccgccaggctccagggaaggggctggagtgggtctcagctattagtggtagtggtggtagcacatactacgcagactccgtgaagggccggttcaccatctccagagacaattccaagaacacgctgtatctgcaaatgaacagcctgagagccgaggacacggccgtatattactgtgcgagagggatttgggggtcagactactggggccagggaaccctggtcaccgtctcctca

SEQ ID NO: 16591 - DNA, 283 bp, Homo sapiens
  source 1..283: mol_type = other DNA
tgcagcctctggattcacctttagcagctatgccatgagctgggtccgccaggctccagggaaggggctggagtgggtctcagctattagtggtagtggtggtagcacatactacgcagactccgtgaagggccgattcaccatctccagagacaatgccaagaactcactgtatctgcaaatgaacagcctgagagacgaggacacggctgtgtattactgtgcgagaggcatatgggggagcgactactggggccagggaaccctggtcaccgtctcctca

SEQ ID NO: 16592 - DNA, 280 bp, Homo sapiens
  source 1..280: mol_type = other DNA
tgcagcctctggattcacctttagcagctatgccatgagctgggtccgccaggctccagggaaggggctggagtgggtctcaactattagtggtagtggtggtagcacatactacgcagactccgtgaagggccggttcaccatctccagagacaattccaagaacacgctgcatctacaaatgaacagcctgagagccgaggacacggccatttattactgtgcgaaagatcatccgtttgactactggggccagggaaccctggtcaccgtctcctca

SEQ ID NO: 16593 - DNA, 280 bp, Homo sapiens
  source 1..280: mol_type = other DNA
tgcagcctctggattcacctttagcagctctgccatgagctgggtccgccaggctccacggaaggggctggagtgggtctcaagtattagtggtactggtggtagcacatactacacagactccgtgaagggccggttcaccatctccagagacaattccaagaacacgctgtatctgcaaatggacagcctgagagccgaggacacggccgtatattactgtgcgaaagatcacccttttgactactggggccagggaaccctggtcaccgtctcctca

SEQ ID NO: 16594 - DNA, 292 bp, Homo sapiens
  source 1..292: mol_type = other DNA
tgcagcctctggattcacctttagcagcaattacatgagttgggtccgccaggctccagggaaggggctggaatgggtctcagttatgacttctagtgacggcatcgcaagctacgcagactccgtgaagggccgcttcaccatctccagagacaaatccaagaacacactgtatctgcaaatgaatagcctcagagccgaggacacggccgtatattactgtgcgaaacatctcagtggcacctactcatttgactcctggggccagggaaccctggtcaccgtctcctca

SEQ ID NO: 16595 - DNA, 295 bp, Homo sapiens
  source 1..295: mol_type = other DNA
tgcagcctctggattcacctttaacacctatgccagctgggtccgccaggctcccgggaaggggctggagtgggtctcagtttttactgggactactaatggtggtgccacatactacgcagactctgtgaagggccggttcaccgtctccagagacggttcgacgaacaccctctttctgcacatgaccaccctgagagccgaggacacggccctatattactgtgcgaaacatcttagtgggacctactcctttgactcctggggccagggcaccctggtcaccgtctcctca

SEQ ID NO: 16596 - DNA, 294 bp, Homo sapiens
  source 1..294: mol_type = other DNA
gcagcctctggattcacctttaacacctatgccagctgggtccgccaggctcccgggaaggggctggagtgggtctcagtttttactgggactactaatggtggtgccacatactacgcagactctgtgaagggccggttcaccgtctccagagacggttcgacgaacaccctctttctgcacatgaccaccctgagagccgaggacacggccctatattactgtgcgaaacatcttagtgggacctactcctttgactcctggggccagggcaccctggtcaccgtctcctca

SEQ ID NO: 16597 - DNA, 289 bp, Homo sapiens
  source 1..289: mol_type = other DNA
ctctgtctctggtgcctccatcactacctactactggagctggctccggcagcccccggggaagggactggagtggattgcatttatctattacagtgggagcaccaactacaacccctccctcaagagtcgagtcaccatctcactagacacggccaacaaccaattctccctgaagctgaggtctgcgatcgctgcggacacggccgtgtattactgtgcgagagggggggcgagttctcttccgttcgacctctggggccagggaaccctggtcaccgtctcctca

SEQ ID NO: 16598 - DNA, 289 bp, Homo sapiens
  source 1..289: mol_type = other DNA
cagtgtctctggtggctccatcagaagttactactggagctggatccggcagcccccagggaagggactggagtggattgcgttcatcttttatgatgggagcaccaactacaatccctccctcaagagtcgagtcaccatatcagaagacacgtccaagaaccggttctccctgaaactgagctctgtgaccgctgcggacacggccgtatattattgtgcgagaggaggagctagtagtcttcccttcgacctctggggccagggaaccctggtcaccgtctcctca

SEQ ID NO: 16599 - DNA, 286 bp, Homo sapiens
  source 1..286: mol_type = other DNA
tgcagcctctggattcagctttagtagttattggatggcctgggtccgccaggctccagggaaggggctggagtggatggccaacataaagcaagacggaagtgagaaaaactatgtggactctgtgaagggccgattcaccatctccagggacaacgccaagaactcactgtatctgcaaatgaacagcctgagagccgaggacacggctgtgtattactgtgcgagagattggggtggaaaccttgactactggggccagggaaccctggtcaccgtctcctca

SEQ ID NO: 16600 - DNA, 286 bp, Homo sapiens
  source 1..286: mol_type = other DNA
tgcagcctctgagttcacctttggaacctattggatggcttgggtccgccaggctccagggaaggggccggagtgggtggccaacataaagcaagatggaagtgtcaaaaactatgtggactctgtgaagggccgattcaccatctccagagacaacgccaagaattcactgtatctgcaaatgaacagcctgagagacgaggacacggctgtgtattactgtgcgagagattggggtggtaaccttgactactggggccagggaaccctggtcaccgtctcctca

SEQ ID NO: 16601 - DNA, 301 bp, Homo sapiens
  source 1..301: mol_type = other DNA
tgcagcctctggattcaccttcagtaccaacgacatgcactgggtccgccaagctacaggaaaaggtctggagtgggtctcaggtattggtactgctggtgacacatattatccaggctccgtgaagggccgattcaccatctccagagaaaacgccaagaactccttgtatcttcaaatgaacagcctgagagccgaggacacggctgtgtattactgtgcaagagggataccggtggttcggggagttatatccccacttgattactggggccagggaaccctggtcaccgtctcgtcg

SEQ ID NO: 16602 - DNA, 301 bp, Homo sapiens
  source 1..301: mol_type = other DNA
tgcagcctctggattcaccttcggtaccaacgacatgcactgggtccgccaatctacaggaaaaggtctggagtgggtctcaggtattggtactgcttatgacacatactatgcggactccgtgaagggccgattcaccatctccagagaaaatgccgagagttctttgtatcttcaaatgaacagcctgagagccgatgacacggctgtgtattactgtgcaagaggcattcctgtggttcggggagttatcagcccccttgactactggggccagggagccctggtcaccgtctcctca

SEQ ID NO: 16603 - DNA, 307 bp, Homo sapiens
  source 1..307: mol_type = other DNA
cactgtctctggtggctccatcaatacttactactggagctggatccggcagcccccggggaagggactggagtggattgggtatctccattacagtgggagcaccaaccacaacccctccctcaagagtcgagtcaccttatcattagacaagtccaagaaccaattctccctgaagctgaactctgtgaccgctgcggacacggccgtgtattactgtgcgaccgggggagggggtatagcagtggccggtacaggggggtggttcgacccctggggccagggaatcctggtcaccgtctcctca

SEQ ID NO: 16604 - DNA, 307 bp, Homo sapiens
  source 1..307: mol_type = other DNA
cagtgtctctggtggctccatcagtagttacttctggagctggatccggcagctcccagggaagggactggagtggattggatatatctattacactgggaccaccaactacaacccctccctcaagagtcgagtcaccatatcagtagacacgtccaagaaccagttctccctgaacctgaggtctgtgaccgctgcggacacggccgtgtattactgtgcgaccggcgggggagggatagcagtggctggtacaggcggttggttcgacccctggggccagggaaccctggtcatcgtctcctca

SEQ ID NO: 16605 - DNA, 307 bp, Homo sapiens
  source 1..307: mol_type = other DNA
cagtgtctctggtggtttcataagtagttacttctggagctggatccgacagcccccagggaagggactggagtggattggatatatccattacagtgggaccaccaactacaacccctccctcaagagtcgagtcaccatatcagtagacacgtccaagaaccagttctccctgaatctgaggtctgtgaccgctgcggacacggccgtgtattactgtgcgaccggcgggggagggatagcagtggctggtacaggcggttggttcgacccctggggccagggaaccctggtcaccgtctcctca

SEQ ID NO: 16606 - DNA, 307 bp, Homo sapiens
  source 1..307: mol_type = other DNA
cactgtctctggtgcctccatcaggagttactactggagctggatccggcagtccccagggaagggactggagtggattgggtatatccattacagtgggagcatcaattgtaacccctccctgaagagtcgagtcaccatgtcagtagacacgtccaagaaccagctctccctgaaactgaactctgtgaccgctgcggacacggccgtgtattactgtgcgaccggcgggggagggatagcagtggccggtacaggcggttggttcgacccctggggccagggaaccctggtcaccgtctcctca

SEQ ID NO: 16607 - DNA, 307 bp, Homo sapiens
  source 1..307: mol_type = other DNA
cactgtctctggtgcctccatcagtacttactactggagctggatccggcagtccccagggaagggactggagtggattgggtatatccattacagtgggagcaccaactgtaacccctccctcaagagtcgagtcaccatgtcactagacacgtccaagaaccagctatccctgaaactgaactctgtgaccgcagcggacacggccgtgtattactgtgcgaccggcgggggagggatagcagtggccggaacaggcggttggttcgacccctggggccagggaaccctggtcaccgtctcctca

SEQ ID NO: 16608 - DNA, 307 bp, Homo sapiens; identical to SEQ ID NO: 16607
  source 1..307: mol_type = other DNA

SEQ ID NO: 16609 - DNA, 307 bp, Homo sapiens
  source 1..307: mol_type = other DNA
cactgtctctggtggctccatcaatacttactactggagttggatccggcagcccccggggaagggactggagtggattgggtatctccattacagtgggagcaccaaccacaacccctccctcaagagtcgagtcaccttatcattagacaagtccaagaaccaattctccctgaagctgacctctgtgagcgctgcggacacggccgtgtattactgtgcgaccgggggagggggtattgcagtggccggtacaggggggtggttcgacccctggggccagggaatcctggtcaccgtctcctca

SEQ ID NO: 16610 - DNA, 292 bp, Homo sapiens
  source 1..292: mol_type = other DNA
tgcggcctctggattcacctttagaacctattggatgacctgggtccgccaggctccaggaaaggggctggagtgggtggccaacataaaccaagatggaagtcagaggtcctatgtgggctctgtcaagggccgattcaccatctccagagacaacgccaagaactcactgtatctgcaaatgaacagcctgagagccgaggacacgggtatatattactgtgcgacaaatctcccctacggtgactcttctgaccactggggccagggatccctggtcaccgtctcctca

SEQ ID NO: 16611 - DNA, 292 bp, Homo sapiens
  source 1..292: mol_type = other DNA
tgcaacctctggattcgcctttcggacctattggatgacctgggtccgccaggctccagggaaggggctggagtgggtggccaacataaaccaagaaggaagtcggagatcttatgtggagtctgtgaacggccgattcaccatctccagagacaacgccaggaacttactgtatctggaaatgaacggtctgagagccgaggacacgggtctgtattactgtgcgacaaatctcccctatggtgactcttctgaccactggggccagggaacccgggtcaccgtctcctca

SEQ ID NO: 16612 - DNA, 292 bp, Homo sapiens
  source 1..292: mol_type = other DNA
tgcaacctctggattcacctttaggacctattggatgacctgggtccgccaggctccagggaaggggctggagtgggtggccaacataaaccaagaaggaagtcggaaatcttatgtggactctgtgaacggccgattcaccatctccagagacaacgccaagaactcactgtatctgcaaatgaacagcctgagagccgaggacacgggtgtgtattactgtgcgacaaatctcccctacggtgactcttctgaccactggggccagggaaccctggtcaccgtctcctca

SEQ ID NO: 16613 - DNA, 295 bp, Homo sapiens
  source 1..295: mol_type = other DNA
cgctgtctatggtgggtccttcagtggttactactggagctggatccgccagcccccagggaaggggctggagtggattggggaaatcaatcatagtggaagcacctactacaacccgtccctcaagagtcgagtcaccatatcagtggacacgtccaagaaccagttctccctgaagctgagctctgtgaccgccgcggacacggctgtgtattactgtgcgaggcattgtggtggtgactgctcccatgcttttgatatctggggccaagggacaatggtcaccgtctcttca

SEQ ID NO: 16614 - DNA, 295 bp, Homo sapiens
  source 1..295: mol_type = other DNA
cgctgtctatggtgggtccttcagtggttactactggagctggatccgccagcccccagggaaggggctggagtggattggggaaatcaatcatagtggaagcaccaactacaacacgtccctcaagagtcgagtcaccatttcactagacacgtccaagaaccagttctccctgaagctgaactctgtgaccgccgcggacacggctgtgtattactgtgcgaggcattgtggtggtgactgctctcatgcttttgatatctggggccaagggacaatggtcaccgtctcttca

SEQ ID NO: 16615 - DNA, 276 bp, Homo sapiens
  source 1..276: mol_type = other DNA
acttctggatacaccttcactaactatcctatacattggatgcgccagggccccggacaaaggcctgagtggatgggatggatcaacgctggcaatggtaacacgaagttttcacagaagttccagggcagagtcaccattaccagggacacatccgcgagcacagcctacatggagctgagcagcctgagatctgaagacacggctgtatactactgtgcgagcggggagtggtttgactactggggtcagggaactctggtcaccgtctcctca

SEQ ID NO: 16616 - DNA, 276 bp, Homo sapiens
  source 1..276: mol_type = other DNA
acttctggatacaccttcactacctatcctatacattggatgcgccaggcccccggacaaaggcttgagtggatgggatggatcaacgctggcaatggtaacacgaagtattcacagaagttgcagggcagagtcaccattaccagggacacattcgcgagcacagccaacatggagctgagcagcctgagattcgaagacacggctgtatattactgtgcgagcggggagtggtttgactactggggccagggaaccctggtcaccgtctcctca

SEQ ID NO: 16617 - DNA, 276 bp, Homo sapiens
  source 1..276: mol_type = other DNA
acttctggatacattttcactacctatcctatacattgggtgcgccaggcccccggacaaaggcttgagtggatgggatggatcaacgctggcaatggtaacacgaagttttcacagaagtttcagggcagagtcaccattactagggacacatccgcgaccacagcctacatggagttgagcagcctgagatttgaagacacggctatatactactgtgcgagcggggaatggtttgactactggggccagggaaccccggtcaccgtctcctca

SEQ ID NO: 16618 - DNA, 276 bp, Homo sapiens
  source 1..276: mol_type = other DNA
acttctggatacaccttcactacgtatcctatacattggatgcgccaggcccccggacagaggcttgagtggatgggatggatcaacgctggcaatggtaacacgaagttttcacagaagttccagggcagagtcaccattaccagggacacatccgcgagcacagcctacatggagctgagcagtctgagatctgaagacacggctgtatactactgtgcgagcggggagtggtttgactactggggccaggggaccctggtcaccgtctcctca

SEQ ID NO: 16619 - DNA, 276 bp, Homo sapiens
  source 1..276: mol_type = other DNA
gcttctggatacagttactctaactttcctatacattgggtgcgccaggcccccggacaaaggcttgagtggatgggatggatcaacgctggcaaccgtaacagaaaatattcacagaatttccgggacagagtcaccattacctgggacacatccgcgaccacaggcttcatggacctgtccagcctaagatctgaagacacggctgtgtattactgtgcgagcggggagtggtttgactactggggccagggaaccttggtcaccgtctccgct

SEQ ID NO: 16620 - DNA, 276 bp, Homo sapiens
  source 1..276: mol_type = other DNA
acctctggatacaccttcactacctatcctatacattggatgcgccaggcccccggacaaaggcttgagtggatgggatggatcaacgctggcaaaggtaacacgaagttttcacagaagttccagggcagagtcaccattaccagggacacatccgcgagcacagcctacatggagctgagcagcctgagatccgaagacacggctatatattactgtgcgagcggggagtggtttgactactggggccagggaaccctggtcaccgtctcctca

SEQ ID NO: 16621 - DNA, 276 bp, Homo sapiens
  source 1..276: mol_type = other DNA
acttctggatacaccttcactacctatcctatacattggatgcgccaggcccccggacaaagccttgagtgggtgggatggatcaacgctggcaatggtaacacgaagttttcacagaagttccagggcagagtctccattaccagggacacatccgcgagcacagcctacatggagctgaccagtctgagatctgaagacacggctgtatactactgtgcgagcggggagtggtttgactactggggccagggaaccctggtcaccgtctcctca

SEQ ID NO: 16622 - DNA, 276 bp, Homo sapiens
  source 1..276: mol_type = other DNA
acttctggatacattttcactacctatcctatacattgggtgcgccaggcccccggacaaaggcttgagtggatgggatggatcaacactggcaatggtaacacgaagttttcacagaagtttcagggccgagtcaccattactagggacacatccgcgaccacagcctatatggagttgagcagcctgagatttgaagacacggctatatactactgtgcgagcggggaatggtttgactactggggccagggaaccccggtcaccgtctcctca

SEQ ID NO: 16623 - DNA, 276 bp, Homo sapiens
  source 1..276: mol_type = other DNA
acttctggatacattttcactacctatcccatacattgggtgcgccaggcccccggacaaaggcttgagtggatgggatggataaacgctggcaatggtaatacgaagttttcacagaggtttcagggcagagtcaccattactagggacacatccgcgaccacagcctacatggagttgagcagcctgagatttgaagacacggcaatatattactgtgcgagcggggaatggtttgactactggggccagggaaccccggtcaccgtctcctca

SEQ ID NO: 16624 - DNA, 286 bp, Homo sapiens
  source 1..286: mol_type = other DNA
tgcagcctctggattcaccttcagtcacaatgccatggcctgggtccgccaggctccagggaaggggctggagtgggtctcaggtattgggagtgataataacaaactctacggaaactccgtgaagggccggttcaccgtctccagagacaattccaagaacatgctgtatctacaaatgaacagcctgagagccgaggacacggccgtatattactgtgtgaaagacattttaggatgggcctttgactactggggccagggaagcctggtcaccgtctcctca

SEQ ID NO: 16625 - DNA, 286 bp, Homo sapiens
  source 1..286: mol_type = other DNA
tgcggcctctggattcacctttagtactaatgccatggcatgggtccgccagggtccagggaagggtctggagtgggtctcaggcatcggtagtgacggaaacaaactatacggagactccgtgaggggccgattcaccgtctccagagacaactccaagaacgcgctgtttctgcaaatgcacagcctgagagccgaggacacggccgtatattactgtgttaaagatatactcggctgggcgtttgactactggggccagggaaccctggtcaccgtctcctca

SEQ ID NO: 16626 - DNA, 286 bp, Homo sapiens
  source 1..286: mol_type = other DNA
tgcagcctctggattcacctttagtactaatgccatggcatgggtccgccagggtccagggaagggtctggagtgggtctcaggcatcggtagtgacggaaacaaactatacggagactccgtgaggggccgattcaccgtctccagagacaactccaagaacgcgctgtttctgcaaatgcacagcctgagagccgaggacacggccgtatattactgtgttaaagatatactcggctgggcgtttgactactggggccagggaatcctggtcaccgtctcctca

SEQ ID NO: 16627 - DNA, 286 bp, Homo sapiens
  source 1..286: mol_type = other DNA
tgcggcctctggattcacctttagtactaatgccatggcatgggtccgccagggtccagggaagagtctggagtgggtctcaggcatcggtagtgacggaaacaaactatacggagactccgtgaggggccgattcaccgtctccagagacaactccaagaacgcgctgtttctgcaaatgcacagcctgagagccgaggacacggccgtatattactgtgttaaagatatactcggctgggcgtttgactactggggccagggaaccctggtcaccgtctcctca

SEQ ID NO: 16628 - DNA, 286 bp, Homo sapiens
  source 1..286: mol_type = other DNA
tgcagcctctggattcacctttagcagctatgccatgagctgggtccgccaggctccagggaaggggctggagtgggtctcaggcatcggtagtgacggaaacaaactatacggagactccgtgaggggccgattcaccgtctccagagacaactccaagaacgcgctgtttctgcaaatgcacagcctgagagccgaggacacggccgtatattactgtgttaaagatatactcggctgggcgtttgactactggggccagggaaccctggtcaccgtctcctca

SEQ ID NO: 16629 - DNA, 286 bp, Homo sapiens
  source 1..286: mol_type = other DNA
tgcggcctctggattcacctttagtactaatgccatggcatgggtccgccagggtccagggaagggtctggagtgggtctcaggcatcgatagtgacggaaacaaactatacggagactccgtgaggggccgattcaccgtctccagagacaactccaagaacgcgctgtttctgcaaatgcacagcctgagagccgaggacacggccgtatattactgtgttaaagatatactcggctgggcgtttgactactggggccagggaaccctggtcaccgtctcctca

SEQ ID NO: 16630 - DNA, 286 bp, Homo sapiens
  source 1..286: mol_type = other DNA
tgcggcctctggattcacctttagtactaatgccatgacatgggtccgccagggtccagggaagggtctggagtgggtctcaggcatcggtagtgacggaaacaaactatacggagactccgtgaggggccgattcaccgtctccagagacaactccaagaacgcgctgtttctgcaaatgcacagcctgagagccgaggacacggccgtatattactgtgttaaagatatactcggctgggcgtttgactactggggccagggaaccctggtcaccgtctcctca

SEQ ID NO: 16631 - DNA, 289 bp, Homo sapiens
  source 1..289: mol_type = other DNA
tgcagcctctggattcaccttcagtacccactggatgcactgggtccgccaaactccagagaaggggctggtgtgggtctcacacattaatagtgatgggagtggcacaagttacgcggactccgtgaagggccgattcaccatctccagagacaacgccaagaacacactgtatctgcaaatgaacagtctgagagccgaggacacggctctttattactgtgcaagagatcgccccggggacgggattgactattggggccagggaagcctggtcaccgtctcctca

SEQ ID NO: 16632 - DNA, 289 bp, Homo sapiens
  source 1..289: mol_type = other DNA
tgcagcctctggattcaccttcagtagtcactggatgcactgggtccgccaagctccagggaaggggctggtgtgggtttcacatattgaaagtgatgggattaggacaagttacggggactccgtgaagggccggttcaccatctccagagacaacgccaagaacacgttgtatctgcaaatgaacagtctgagagccgaggacacggctgtgtattactgtgcaagagatcgtcctggggatgggattgactactggggccagggaaccctggtcaccgtctcctca

SEQ ID NO: 16633 - DNA, 289 bp, Homo sapiens
  source 1..289: mol_type = other DNA
tgcagcctctggattcaccttcagtagtaactggatgcactgggtccgccaagttccagggaaggggctgatgtgggtctcacacattaatagtgatgggagtggcacaagctacgcggactccgtgaagggccgattcaccatctccagagacaacgccaagaacatggtatatctgcaaatgaacagtctgagagacgaggacacggctctttattattgtgcaagagatcgccctggggatgggattgactactggggccagggaaccctggtcaccgtctcctca

SEQ ID NO: 16634 - DNA, 277 bp, Homo sapiens
  source 1..277: mol_type = other DNA
tgcagcctctggattcacctttactggccgttggatgagctgggtccgccaggctccaggggaggggctggagtgggtggccaacataaggccagatggaagtgagaattcctacctggactctgtgaagggccgattcaccatctccagagacgactccaagaactcactgtatctacaaatgaacagcctgagagccgacgacacggctgtatattactgtgcgagagataatttcgatatcaggggccagggaaccctggtcaccgtctccgca

SEQ ID NO: 16635 - DNA, 277 bp, Homo sapiens
  source 1..277: mol_type = other DNA
tgcagcctctggattcacctttagtggccgttggatgagctgggtccgccaggctccagggaaggggctacaatgggtggccaacataaaggaagatggaagtgacaaatcctatgtggactctgtgaagggccgattcaccatctccagagacgacgccaagaactcactctatctgcaaatgaacagcctgagagccgacgacacggctatatattactgtgcgagagataattttgacatcaggggccagggaaccctggtcaccgtctcctca

SEQ ID NO: 16636 - DNA, 277 bp, Homo sapiens
  source 1..277: mol_type = other DNA
tgcagcctctggcttcacctttagtaggagttggttgagctgggtccgccaggctccagggaaggggctggagtgggtggccaacataaacccagatggaagtgacaagtcgtatgtggactctgtgacgggccgattcaccatctccagagacaacgcccagaactcactgtttctgcaaatgaacagcctgagagccgaggacacggctatatattattgtgcgcgggacaatttcgatatccggggccagggaaccatggtcaccgtctcctca

SEQ ID NO: 16637 - DNA, 277 bp, Homo sapiens
  source 1..277: mol_type = other DNA
tgcagcctctggcttcacctttagtaggagttggttgagctgggtccgccaggctccagggaaggggctggagtgggtggccaacataaacccagatggaagtgacaagtcgtatgtggactctgtgacgggccgattcaccatctccagagacaacgcccagaactcactgtttctgcaaatgaacagcctgagagccgaggacacggctatatattattgtgcgcgggacaacttcgatatccggggccagggaaccatggtcaccgtctcctca

SEQ ID NO: 16638 - DNA, 277 bp, Homo sapiens
  source 1..277: mol_type = other DNA
tgcagcctctggattcacctttagtggccattggatgagctgggtccgccaggctccagggaaggggctggagtgggtggccaacataaaggaagatggaagtgacaagtcctatgtggactctgtgaagggccgattcaccatctccagagacgacgccaagaactcactctatctgcaaatgaacagcctgagagccgacgacacggctatgtattactgtgcgagagataattttgacatcaggggccagggaaccctggtcaccgtctcctca

SEQ ID NO: 16639 - DNA, 289 bp, Homo sapiens
  source 1..289: mol_type = other DNA
tgcagtctctggattcagtctcagtagttattggatgagttgggtccgccaggctccagggaaggggctggagtgggtggccaacataatgcaagatggaaatgggaaatactatgtggactctgtgaagggccgattcaccatctccagagacaacgccaagaggtcactgtatctgcaaatgaacagcctgagagccgaggacacggctgtatattactgtgcgagactcggagcagcagctggaacagactactggggccagggaaccctggtcaccgtctcctca

SEQ ID NO: 16640 - DNA, 289 bp, Homo sapiens
  source 1..289: mol_type = other DNA
tgcagtctctggattcaaaattagtagctattggatgagctgggtccgccaggctccagggaaagggctggagtgggtggccaatataaagcgagatggaagtgagaaatataatgtggactttgtgaagggccgattcatcatctccagagacaacggcaagaattcattgtttctacaaatgaacagcctgagagccgaggacacggccgtatattcctgtgcgagactgggagcagcagctggtactgactactggggccagggagccctggtcaccgtctcctca

SEQ ID NO: 16641 - DNA, 316 bp, Homo sapiens
  source 1..316: mol_type = other DNA
tgcagcctctggattcaccttcagtagctatgctatgcactgggtccgccgggctccaggcagggggctggagtgggtggcagttatattatatgatggaagtaataaatactacgcagactccgtgaagggccgattcaccatctccagagacaattccaagaacaccttgtatctgcaaatgaacagcctgagagctgaggacacggctatgttttactgtgcgagagcgccaggatattgtagtggtgatacttgctactccgcttactactttgactattggggccagggaaccctggtcaccgtctcctca

SEQ ID NO: 16642 - DNA, 316 bp, Homo sapiens
  source 1..316: mol_type = other DNA
tgcagcctctggattcaccttcagtagctatgctatgcactgggtccgccgggctccaggcagggggctggagtgggtggcagttatattatatgatggaagtaataaatactacgcagactccgtgaagggccgattcaccatctccagagacaattccaagaacaccttgtatctgcaaatgaacaacctgagagctgaggacacggctgtgttttactgtgcgagagcgccaggatattgtagtggtgatacttgctactccgcatactactttgactattggggccagggaaccctggtcaccgtctcctca

SEQ ID NO: 16643 - DNA, 297 bp, Homo sapiens
  source 1..297: mol_type = other DNA
gcttctggatacaccttcaccttcactagcaatactatccattgggtgcgccaggcccccggacaaaggcttgagtggatgggattgatcaacggtgacaatgataacacacaatattcacagaagttccagggcagaatcaccattaccattgacacatccgcgagcacagcctacatggagctcagcagcctgagatctgaagacacggctgtgtattactgtgcgagagggatccatagtgggagctacctctttgactactggggccagggaaccctggtcaccgtctcctca

SEQ ID NO: 16644 - DNA, 291 bp, Homo sapiens
  source 1..291: mol_type = other DNA
gcttctggatacaccttcgctaactatcctatacattgggtgcgccaggcccccggacaaaggcttgagtggatgggatgggtcaacgttgccaatgattacacacattctccaccgaggttccagggcagagtcaccattaccagggacacatccgcgagcacagcctacatggagttgagcagcctgagatatgaagacacggctgtgtatttctgtgcgagaggtatacatagtgggagctacttgtttgactactggggccagggaaccctggtcaccgtctcctca

SEQ ID NO: 16645 - DNA, 292 bp, Homo sapiens
  source 1..292: mol_type = other DNA
tgcaggctctggattcacctttagcagctttgccatgagctgggtccgccaggctccagggaaggggctggagtgggtctcaggtattagtaacattggcagtagcacatattacgcagactccgtgaagggccgcttcaccatttccagagacaattccaagaacacgctatatctgcaaatgaacagcctgagagccgaggacacggccgtatattactgtgtgaaagttttagagaggtatggcaactttgactactggggccagggaaacctggtcaccgtctcctca

SEQ ID NO: 16646 - DNA, 292 bp, Homo sapiens
  source 1..292: mol_type = other DNA
tgcagcctctggattcacctttagcaactatgccatgacctgggtccgccaggctccagggaaggggctggagtgggtctcagctattagtgctactggtggtaacacttactatccagactccgtgaagggccggttcaccatctccagagacaattccaagaacacgctgtttctgcaaatgaacagcctgagagccgaggacgcggccgtatatttctgtgtgaaagtattggagagatacggaaactttgactactggggccagggaaccctggtcaccgtctcctca

SEQ ID NO: 16647 - DNA, 301 bp, Homo sapiens
  source 1..301: mol_type = other DNA
tgcagcctctggattcaccttcagtgactatagcatgaattgggtccgccaggctccggggaaggggctggagtgggtttcatacattagtagtagtagtagtgccatatactacgcagactctgtgaagggccgattcaccatctccagagacaatgccaagaactcactgtatctgcaaatgaacagcctgaaagacgatgacacggctgtatattactgtgcgagagacgggggccgatatagtgggacctacctgaacgactactggggccagggaaccctggtcaccgtctcctca

SEQ ID NO: 16648 - DNA, 301 bp, Homo sapiens
  source 1..301: mol_type = other DNA
tgcagcctctggattcaccttcggtacctatagcatgaactgggtccgccaggctccagggaaggggctggaatgggtttcatatattagtagtagtagtagtgccatatactacgcagactctgtgaagggccgattcaccatctccagagacaatgccaaggactcactgtttctgcaaatgaacagcctgagagacgaggacacggctttgtattactgtgcgagagatggagggaggtatagtgggacctacctcaatgactactggggccagggaaccctggtcaccgtctcctca

SEQ ID NO: 16649 - DNA, 286 bp, Homo sapiens
  source 1..286: mol_type = other DNA
cactgtctctggtggctccatcagtagttactattggagctggatccggcagcccccgggggagggactggagtggattgcatatatcactaacagtgggagcacccatcacaacccctccctcaagagtcgagtcaccatgtcactagacacgtccaagaaccagttcgccctgaagttgaactctgtgaccgctgcggacacggccgtgtattactgtgcgcgtcatagcagtgactggtcttttgactactggggccagggaaccctggtcaccgtctcctca

SEQ ID NO: 16650 - DNA, 286 bp, Homo sapiens
  source 1..286: mol_type = other DNA
cactgtctctggtgcctccatcagtacttactactggagctggatccggcagcccccagggaagggaccggagtggattgcctatctctattacggtgggaacaccaactacaacccctccctcaagagtcgagtcaccatgtcagtagacacgtccaagaaccagttctccctcaaactgagttctgtgaccgctgcggacacggccgtgtattactgtgcgagacatagcagtgactggtcctttgactactggggccagggaaccctggtcaccgtctcctca

SEQ ID NO: 16651 - DNA, 286 bp, Homo sapiens
  source 1..286: mol_type = other DNA
tgcagcctctggattcacctttagtaattattggatgcactgggtccgccaggctccagggaaggggctggagtgggtggccaacataaaaccagatggaagtgaaaacttctatgtggactctgtgaagggccgattcaccatctccagagacaacgccaagaactcactgtatctgcaaatgaacagcctcagagccgaggacacggctgtgtattactgtgtgagagcagtgggcagtagtgactgttactggggccagggaaccctggtcaccgtctcctcc

SEQ ID NO: 16652 - DNA, 286 bp, Homo sapiens
  source 1..286: mol_type = other DNA
tgcagcctctggattcacctttagtagttattggatgaactgggtccgccaggctccagggaaggggctggagtgggtggccaacataaaacaagatggaagtcagaaatactatctggactctgtgaggggccgattcaccatctccagagacaacgccgagaactcagtgtatttgcaaatggacagcctgagagccgaagacacggccgtctattattgtgtgagagccgtcggaagcagcgactgctactggggccagggaatcctggtcaccgtctcctcg

SEQ ID NO: 16653 - DNA, 286 bp, Homo sapiens
  source 1..286: mol_type = other DNA
tgcagcctctggattcacctttattaattattggatgcactgggtccgccaggctccagggaaggggctggagtgggtggccaacataaaaccagatggaagtgagaagttttatgtggactctgtgaagggccgattcaccatctccagagacaacgccaagaactcactgtatctgcaaatgaacagcctgagagccgaggacacggctgtgtattactgtgtgagagcagtgggtagtagtgactgttattggggccagggaatcctggtcaccgtctcctca

SEQ ID NO: 16654 - DNA, 292 bp, Homo sapiens
  source 1..292: mol_type = other DNA
tgaagcctctaaatacagcttcagtagctattggatgagctgggtccgccaggttccagggaaggggctggagtgggtggccaacataaaccaagatggaagtgagaaacacaatgtggcctctgtgaagggccgatttagtatctccagagacaacaccaagaactcactgtatctgcaaatgaacagcctgagagccgaggacacggccgtgtattattgtgcgggttgtggtggtgactgctatactattgaccactggggccagggtaccctggtcaccgtctcgtca

SEQ ID NO: 16655 - DNA, 292 bp, Homo sapiens
  source 1..292: mol_type = other DNA
tgcagcctctaaatacagctttattagctattggatgagctgggtccgccaggctccagggaaggggctggagtgggtggccaacataaaccaagatggaagtgagaaacactatgtggactctgtgaagggccgattcagcatctccagagacaacaccaagaactcactgtttctgcaaatgaacagcctgagagccgaggacacggccgtttattactgtgcgggttgtggtggtgactgctatactattgaccactggggccagggtaccctggtcaccgtctcgtca

SEQ ID NO: 16656 - DNA, 292 bp, Homo sapiens
  source 1..292: mol_type = other DNA
tgcagcctctaaatacagctttagtagctattggatgagctgggtccgccaggttccagggaaggggctggagtgggtggccaacataaaccaagatggaagtgagaaacacaatgtggactctgtgaagggccgattcagcatctccagagacaacaccaagaactcactgtatctgcaaatgaacagcctgagagccgaggacacggccgtgtattattgtgcgggttgtggtggtgactgctatactattgaccactggggccagggtaccctggtcaccgtctcgtca

SEQ ID NO: 16657 - DNA, 292 bp, Homo sapiens
  source 1..292: mol_type = other DNA
tgcagcctctaaatacagctttagtagctattggatgagctgggtccgccaggctccagggaaggggctggagtgggtggccaacataaaccaagatggaagtgagaaacactatgtggactctgtgaagggccgattcagcatctccagagacaacaccaagaactcactgtatctgcaaatgatcagcctgagagccgaggacacggccgtgtattactgtgcgggttgtggtggtgactgctatactattgaccactggggccagggtaccctggtcaccgtctcgtca

SEQ ID NO: 16658 - DNA, 292 bp, Homo sapiens
  source 1..292: mol_type = other DNA
tgaagcctctaaatacagcttcagtagctattggatgagctgggtccgccaggttccagggaaggggctggagtgggtggccaacataaaccaagatggaagtgagaaacacaatgtggcctctgtgaagggccgattcagtatctccagagacaacaccaagaactcactgtatctgcaaatgaacagcctgagagccgaggacacggccgtgtattattgtgcgggttgtggtggtgactgctatactattgaccactggggccagggtaccctggtcaccgtctcgtca

SEQ ID NO: 16659 - DNA, 292 bp, Homo sapiens
  source 1..292: mol_type = other DNA
tgcagcctctaaatacagctttagtagctattggatgagctgggtccgccaggttccagggaaggggctggagtgggtggccaacataaaccaagatggaagtgagaaacacaatgtggactctgtgaagggccgattcagcatctccagagacaacaccaagaactcactgtatctgcaaatgaacagcctgagagccgaagacacggccgtgtattattgtgcgggttgtggtggtgactgctatactattgaccactggggccagggtaccctggtcaccgtctcgtca

SEQ ID NO: 16660 - DNA, 292 bp, Homo sapiens
  source 1..292: mol_type = other DNA
tgcagcctctaaatacagctttagtagctattggatgagctgggtccgccagtctccagggaaggggctggagtgggtggccaacataaatcaagatggaagtgagaaacactatgtggactctgtgacgggccgattcagcatctccagagacaacaccaagaactcactgtatctgcaaatgaacagcctgagagccgaggacacggccgtgtattactgtgcgggttgtggtggtgactgctatactattgaccactggggccagggtaccctggtcaccgtctcgtca

SEQ ID NO: 16661 - DNA, 292 bp, Homo sapiens
  source 1..292: mol_type = other DNA
tgcagcctctaaatacagctttagtagctattggatgagctgggtccgccaggttccagggaaggggctggagtgggtggccaacataaaccaagatggaagtgagaaacacaatgcggactctgtgaagggccgattcagcatcaccagagacaacaccaagaactcactgtttctgcaaatgaacagcctgagaaccgaagacacggccgtgtattattgtgcgggttgtggtggtgactgttataccattgaccactggggccagggtaccctggtcaccgtctcgtca

SEQ ID NO: 16662 - DNA, 292 bp, Homo sapiens
  source 1..292: mol_type = other DNA
tgcagcctctaaatacagctttagtagctattggatgagctgggtccgccaggctccaggggaggggctggagtgggtggccaacataaagcaagatggaagtgagaaacactatgtggactctgtgaagggccgattcagcatctccagagacaacgccaagaactcactgtatctccaaatgaacagcctgagagccgaggactcggccgtgtattactgtgcgggttgtggtggtgactgctatactattgaccactggggccagggaaccctggtcaccgtctcgtca

SEQ ID NO: 16663 - DNA, 292 bp, Homo sapiens
  source 1..292: mol_type = other DNA
tgcagcctctaaatacagctttagtagctattggatgagctgggtccgccaggctccagggaaggggctggagtgggtggccaacataaaccaagatggaagtgagaagcactatgtggactctgtgaagggccgattcagcatctccagagacaacaccaagaactcactgtatctgcaaatgaacagcctgagagccgaagacacggccgtgtattactgtgcgggttgtggtggtgactgctatactattgaccactggggccagggtaccctggtcaccgtctcgtca

SEQ ID NO: 16664 - DNA, 292 bp, Homo sapiens
  source 1..292: mol_type = other DNA
tgcagcctctaaatacagctttagtagctattggatgagctgggtccgccaggctccagggaaggggctggagtgggtggccaacataaaccaagatggaagtgagaaacactatgtggactctgtgaagggccgattcagcatctccagagacaacaccaagaactcactgtatctgcaaatgaacagcctgagagccgaggacacggccgtgtattactgtgcgggttgtggtggtgactgctatactattgaccactggggccagggtaccctggtcaccgtctcgtca

SEQ ID NO: 16665 - DNA, 292 bp, Homo sapiens
  source 1..292: mol_type = other DNA
tgcagcctctaaatacagctttagtagctattggatgagctgggtccgccaggttccagggaaggggctggagtgggtggccaacataaaccaagatggaagtgagaaacacaatgtggactctgtgaagggccgattcagcatctccagagacaacaccaagaactcactgtatctacaaatgaacagcctgagagccgaggacacggccgtgtattattgtgcgggttgtggtggtgactgctatactattgaccactggggccagggtaccctggtcaccgtctcgtca

SEQ ID NO: 16666 - DNA, 292 bp, Homo sapiens
  source 1..292: mol_type = other DNA
tgcagcctctaaatacagctttagtagctattggatgagctgggtccgccagcctccagggaaggggctggagtgggtggccaacataaatcaagatggaagtgagaaacactatgtggactctgtgacgggccgattcagcatctccagagacaacaccaagaactcactgtatctgcaaatgaacagcctgagagccgaggacacggccgtatattactgtgcgggttgtggtggtgactgctatactattgaccactggggccagggtaccctggtcaccgtctcgtca

SEQ ID NO: 16667 - DNA, 292 bp, Homo sapiens
  source 1..292: mol_type = other DNA
tgcagcctctaaatacagctttagtagttattggatgagctgggtccgccagcctccagggaaggggctggagtgggtggccaacataaatcaagatggaagtgagaaacactatgtggactctgtgacgggccgattcagcatctccagagacaacaccaagaactcactgtatctgcaaatgaacagcctgagagccgaggacacggccgtgtattactgtgcgggttgtggtggtgactgctatactattgaccactggggccagggtaccctggtcaccgtctcgtca

SEQ ID NO: 16668 - DNA, 292 bp, Homo sapiens
  source 1..292: mol_type = other DNA
tgcagcctctaaatacagctttagtagctattggatgagctgggtccgccaggctccagggaaggggctggagtgggtggccaacatcagacaagatggaaatgagaaacactatgtggactctgtgaagggccgattcagcatctccagagacaacgccaagaattcactgtatctgcaaatgaacagcctgagagccgaggacacggccttttattactgtgcgggttgtggtggtgactgctatactattgaccactggggccagggaaccctggtcaccgtctcgtca

SEQ ID NO: 16669 - DNA, 292 bp, Homo sapiens
  source 1..292: mol_type = other DNA
tgcagcctctaaatacagctttagtagctattggatgagctgggtccgccaggctccaggggaggggctggagtgggtggccaacataaagcaagatggaagtgagacacactatgtggactctgtgaagggccgattcagcatctccagagacaacgccaagaactcactgtatctccaaatgaacagcctgagagccgaggacacggccgtgtattactgtgcgggttgtggtggtgactgctatactattgaccactggggccagggaaccctggtcaccgtctcgtca

SEQ ID NO: 16670 - DNA, 292 bp, Homo sapiens
  source 1..292: mol_type = other DNA
tgcagcctctaaatacagctttagtagctattggatgagctgggtccgccaggctccagggaaggggctggagtgggtggccaacataaagcaagatggaagtgagaaacactatgtggactctgtgaagggccgattcagcatctccagagacaacgccaagaactcactgtatctgcaaatgaacagcctgagagccgaggacacggccgtatattactgtgcgggttgtggtggtgactgctatactattgaccactggggccagggaaccctggtcaccgtctcgtca

SEQ ID NO: 16671 - DNA, 292 bp, Homo sapiens
  source 1..292: mol_type = other DNA
tgcagcctctaaatacagctttagtagctattggatgagctgggtccgccaggctccaggggaggggctggagtgggtggccaacataaagcaagatggaagtgagaaacactatgtggactctgtgaagggccgattcagcatctccagagacaacgccaagaactcactgtatctccaaatgaacagcctgagagccgaggacacggccgtgtattactgtgcgggttgtggtggtgactgctatactattgaccactggggccagggaaccctggtcaccgtctcgtca

SEQ ID NO: 16672 - DNA, 292 bp, Homo sapiens; identical to SEQ ID NO: 16654
  source 1..292: mol_type = other DNA

SEQ ID NO: 16673 - DNA, 292 bp, Homo sapiens
  source 1..292: mol_type = other DNA
tgtagcctctaaatacagctttggtagctattggatgagctgggtccgccaggctccagggaaggggctggagtgggtggccaacataaagcaagatggaagtgagaaacactatgtggactctgtgaagggccgattcagcatctccagagacaacaccaagaactcactgtatctgcaaatgaacagcctgagagccgaggacacggccgtgtattactgtgcgggttgtggtggtgactgctatactattgaccactggggccagggtaccctggtcaccgtctcgtca

SEQ ID NO: 16674 - DNA, 292 bp, Homo sapiens
  source 1..292: mol_type = other DNA
tgcagcctctaaatacagctttagtaactattggatgagctgggtccgccaggctccagggaaggggctggagtgggtggccaacataaaacaagatggaagtgagaaacactatgtggactctgtgaagggccgattcagcatctccagagacaacgccaagaactcactgtatctgcaaatgaacagcctgagagccgaggacacggccgtgtattactgtgcgggttgtggtggtgactgctatactattgaccactggggccagggaaccctggtcaccgtctcgtca

SEQ ID NO: 16675 - DNA, 292 bp, Homo sapiens
  source 1..292: mol_type = other DNA
tgcagcctctaaatacagctttagtagctattggatgagctgggtccgccagcctccagggaaggggctggagtgggtggccaacataaatcaagatggaagtgagaaacactatgtggactctgtgacgggccgattcagcatctccagagacaacaccaagaactcactgtatctgcaaatgaacagcctgagagccgaggacacggccgtgtattactgtgcgggttgtggtggtgactgctatactattgaccactggggccagggtaccctggtcaccgtctcgtca

SEQ ID NO: 16676 - DNA, 292 bp, Homo sapiens
  source 1..292: mol_type = other DNA
tgcagcctctaaatacagctttagtagctattggatgagctgggtccgccaggttccagggaaggggctggagtgggtggccaacataaaccaagatggaagtgagaaacacaatgcggactctgtgaagggccgattcagcatctccagagacaacaccaagaactcactgtatctgcaaatgaacagcctgagagccgaggacacggccgtgtattattgtgcgggttgtggtggtgactgttataccattgaccactggggccagggtaccctggtcaccgtctcgtca

SEQ ID NO: 16677 - DNA, 292 bp, Homo sapiens
  source 1..292: mol_type = other DNA
tgcagcctctaaatacagctttagtagctattggatgagctgggtccgccaggctccagggaaggggctggagtgggtggccaacataaagcaagatggaagtgagaaacactatgtggactctgtgaggggccgattcagcatctccagagacaacgccaagaactcactgtatctgcaaatgaacagcctgagagccgaggacacggccgtgtattactgtgcgggttgtggtggtgactgctatactattgaccactggggccagggtaccctggtcaccgtctcgtca

SEQ ID NO: 16678 - DNA, 292 bp, Homo sapiens
  source 1..292: mol_type = other DNA
tgaagcctctaaatacagctttagtagctattggatgagctgggtccgccaggttccagggaaggggctggagtgggtggccaacataaaccaagatggaagtgagaaacacaatgtggcctctgtgaagggccgattcagcatctccagagacaacaccaagaactcactgtatctgcaaatgaacagcctgagagtcgaggacacggccgtgtattattgtgcgggttgtggtggtgactgctatactattgaccactggggccagggtaccctggtcaccgtctcgtca

SEQ ID NO: 16679 - DNA, 292 bp, Homo sapiens
  source 1..292: mol_type = other DNA
tgcagcctctgaatacagctttagtagctattggatgagctgggtccgccaggctccagggagggggctggagtgggtggccaacataaaccaagatgggagtgagaaacactatgtggactctgtgaagggccgattcagcatctccagagacaacaccaagaactcactgtatctgcaaatgaacagcctgagagccgaggacacggccgtgtattactgtgcgggttgtggtggtgactgctacactattgaccactggggccagggtaccctggtcaccgtctcgtca

SEQ ID NO: 16680 - DNA, 292 bp, Homo sapiens
  source 1..292: mol_type = other DNA
tgcagcctctaaatacagctttagtagctattggatgagctgggtccgccaggttccagggaaggggctggagtgggtggccaacataaaccaagatggaagtgagaaatacagtgtggactctgtgaagggccgattcagcatctccagagacaacaccgagaactcactgtatctgcaaatgaacagcctgagagccgaggacacggccgtgtattattgtgcgggttgtggtggtgactgctatactattgaccactggggccagggtaccctggtcaccgtctcgtca

SEQ ID NO: 16681 - DNA, 292 bp, Homo sapiens
  source 1..292: mol_type = other DNA
tgcagcctctaaatacagctttagtagctattggatgagctgggtccgccaggctccagggaaggggctggagtgggtggccaacataaagcaagatggaagtgagaaccactatgtggactctgtaaagggccgattcagcatctccagagacaacgccaagaactcactgtatctgcaaatgaacagcctgagagccgaggacacggccgtgtattactgtgcgggttgtggtggtgactgctatactattgaccactggggccagggaaccctggtcaccgtctcgtca

SEQ ID NO: 16682 - DNA, 292 bp, Homo sapiens
  source 1..292: mol_type = other DNA
tgcagcctctaaatacagctttagtagctattggatgagctgggtccgccaggctccagggaaggggctggagtgggtggccaacataaagcaagatggaagtgagaaacactatgtggactctgtgaagggccgattcagcatctccagagacaacgccaagagctcactgtatctgcaaatgaacagcctgagagccgaggacacggccgtctattactgtgcgggttgtggtggtgactgctatactattgaccactggggccagggaaccctggtcaccgtctcgtca

SEQ ID NO: 16683 - DNA, 292 bp, Homo sapiens
  source 1..292: mol_type = other DNA
tgcagcctctaaatacagctttagtagctattggatgagctgggtccgccaggttccagggaaggggctggagtggggggccaacataaaccaagatggaagtgagaaacacaatgcggactctgtgaagggccgattcagcatcaccagagacaacaccaagaactcactgtttctgcaaatgaacagcctgagaaccgaagacacggccgtgtattattgtgcgggttgtggtggtgactgttataccattgaccactggggccagggtaccctggtcaccgtctcgtca

SEQ ID NO: 16684 - DNA, 292 bp, Homo sapiens
  source 1..292: mol_type = other DNA
tgcagcctctaaatacagctttagtagctattggatgagctgggtccgccaggctccagggaaggggctggagtgggtggccaacataaagcaagacggaagtgagaaacactatgtggactctgtgaagggccgattcagcatctccagagacaacgccaagaactcactgtatctgcaaatgagcagcctgagagccgaggacacggccgtgtattactgtgcgggttgtggtggtgactgctatactattgaccactggggccagggaaccctggtcaccgtctcgtca

SEQ ID NO: 16685 - DNA, 292 bp, Homo sapiens; identical to SEQ ID NO: 16667
  source 1..292: mol_type = other DNA

SEQ ID NO: 16686 - DNA, 292 bp, Homo sapiens
  source 1..292: mol_type = other DNA
tgcagcctctaaatacagctttattagctattggatgagctgggtccgccaggctccagggaaggggctggagtgggtggccaacataaaccaagatggaagtgagaaacactatgtggactctgcgaagggccgattcagcatctccagagacaacaccaagaactcactgtttctgcaaatgaacagcctgagagccgaggacacggccgtttattactgtgcgggttgtggtggtgactgctatactattgaccactggggccagggtaccctggtcaccgtctcgtca

SEQ ID NO: 16687 - DNA, 292 bp, Homo sapiens; identical to SEQ ID NO: 16659
  source 1..292: mol_type = other DNA

SEQ ID NO: 16688 - DNA, 292 bp, Homo sapiens
  source 1..292: mol_type = other DNA
tgaagcctctaaatacagtttcagtagctattggatgagctgggtccgccaggttccagggaaggggctggagtgggtggccaacataaaccaagatggaagtgagaaacacaatgtggcctctgtgaagggccgattcagtatctccagagacaacaccaagaactcactgtatctgcaaatgaacagcctgagagccgaggacacggccgtgtattattgtgcgggttgtggtggtgactgctatactattgaccactggggccagggtaccctggtcaccgtctcgtca

SEQ ID NO: 16689 - DNA, 292 bp, Homo sapiens; identical to SEQ ID NO: 16660
  source 1..292: mol_type = other DNA

SEQ ID NO: 16690 - DNA, 292 bp, Homo sapiens; identical to SEQ ID NO: 16656
  source 1..292: mol_type = other DNA

SEQ ID NO: 16691 - DNA, 292 bp, Homo sapiens
  source 1..292: mol_type = other DNA
tgcagcctctaaatacagctttagtaactattggatgagctgggtccgccaggctccagggaaggggctggagtgggtggccaacatcaaccaagatggaagtgagaaacacaatgtggactctgtgaagggccgattcagcatctccagagacaacaccaagaactcactgtatctgcaaatgaacagcctgagagccgaggacacggccgtgtattattgtgcgggttgtggtggtgactgctatactattgaccactggggccagggtaccctggtcaccgtctcgtca

SEQ ID NO: 16692 - DNA, 292 bp, Homo sapiens; identical to SEQ ID NO: 16661
  source 1..292: mol_type = other DNA

SEQ ID NO: 16693 - DNA, 292 bp, Homo sapiens
  source 1..292: mol_type = other DNA
tgcagcctctaaatacagctttagtaactattggatgagctgggtccgccaggctccagggaagggactggagtgggtggccaacataaaccaagatggaagtgagaaacactatgtggactctgtgaagggccgattcagcatctccagagacaacaccaagaactcactgtatctgcaaatgaacagcctgagagccgaggacacggccgtgtattactgtgcgggttgtggtggtgactgctatactattgaccactggggccagggtaccctggtcaccgtctcgtca

SEQ ID NO: 16694 - DNA, 292 bp, Homo sapiens
  source 1..292: mol_type = other DNA
tgaagcctctaaatacagcttcagtagctattggatgagctgggtccgccaggttccagggaaggggcgggagtgggtggccaacataaaccaagatggaagtgagaaacacaatgtggcctctgtgaagggccgatttagtatctccagagacaacaccaagaactcactgtatctgcaaatgaacagcctgagagccgaggacacggccgtgtattattgtgcgggttgtggtggtgactgctatactattgaccactggggccagggtaccctggtcaccgtctcgtca

SEQ ID NO: 16695 - DNA, 292 bp, Homo sapiens; identical to SEQ ID NO: 16662
  source 1..292: mol_type = other DNA

SEQ ID NO: 16696 - DNA, 292 bp, Homo sapiens; identical to SEQ ID NO: 16688
  source 1..292: mol_type = other DNA

SEQ ID NO: 16697 - DNA, 292 bp, Homo sapiens
  source 1..292: mol_type = other DNA
tgcagcctctaaatacagctttagtagctattggatgagctgggtccgccaggctccagggaaggggctggagtgggtggccaacataaagcaagatggaagtgagaaacactatgtggactctgtgaagggccgattcagcatctccagagacaacgccaagaactcactgtatctgcaaatgaacagcctgagagccgaggacacggccgtgtattactgtgcgggttgtggtggtgactgttatactattgaccactggggccagggtaccctggtcaccgtctcgtca

SEQ ID NO: 16698 - DNA, 292 bp, Homo sapiens; identical to SEQ ID NO: 16665
  source 1..292: mol_type = other DNA

SEQ ID NO: 16699 - DNA, 292 bp, Homo sapiens
  source 1..292: mol_type = other DNA
tgcagcctctaaatacagctttagtagctattggatgagctgggtccgccaggctccagggaaggggctggagtgggtggccaacataaagcaagatggaagtgagaaacactatgtggactctgtgaagggccgattcagcatctccagagacaacgccaagaactcactgtatctgcaaatgaacagcctgagagccgaggacacggccgtgtattactgtgcgggttgtggtggtgactgctatactattgaccactggggccagggtaccctggtcaccgtctcgtca

SEQ ID NO: 16700 - DNA, 292 bp, Homo sapiens; identical to SEQ ID NO: 16657
  source 1..292: mol_type = other DNA

SEQ ID NO: 16701 - DNA, 292 bp, Homo sapiens
  source 1..292: mol_type = other DNA
tgcagcctctaaatacagctttagtagctattggatgagctgggtccgccaggctccagggaaggggctggagtgggtggccaacataaagcaagatggaagtgagaaacactatgtggactctgtgaagggccgattcagcatctccagagacaacgccaagaactcactgtatctgcaaatgaacagcctgagagccgaggacacggccgtgtattactgtgcgggttgtggtggtgactgctatactattgaccactggggccagggaaccctggtcaccgtctcgtca

SEQ ID NO: 16702 - DNA, 292 bp, Homo sapiens; identical to SEQ ID NO: 16670
  source 1..292: mol_type = other DNA

SEQ ID NO: 16703 - DNA, 292 bp, Homo sapiens
  source 1..292: mol_type = other DNA
tgcagcctctaaatacagctttagtagctattggatgagctgggtccgccaggctccagggcaggggctggagtgggtggccaacatcaagcaagatggaagtgagaaacactatgtggactctgtgaagggccgattcagcatctccagagacaacgccaagagttcactgtatctgcaaatgaacagcctgagagccgaggacgcggccttttattactgtgcgggttgtggtggtgactgctatactattgaccactggggccagggaaccctggtcaccgtctcgtca

SEQ ID NO: 16704 - DNA, 292 bp, Homo sapiens
  source 1..292: mol_type = other DNA
cgcagcctctaaatacaactttggtagctattggatgagctgggtccgccagtctccagggaaggggctggagtgggtggccaacataaatcaagatggaagtgagaaaaactatgtggactctgtgacgggccgattcagcatctccagagacaacaccaggaactcactgtatctgcaaatgagtagcctgagagtcgaggacacggccgtgtattactgtgcgggttgtggtggtgactgctatactattgaccactggggccagggtaccctggtcaccgtctcgtca

SEQ ID NO: 16705 - DNA, 292 bp, Homo sapiens; identical to SEQ ID NO: 16655
  source 1..292: mol_type = other DNA

SEQ ID NO: 16706 - DNA, 292 bp, Homo sapiens
  source 1..292: mol_type = other DNA
tgcagcctctaaatacagctttagtagctattggatgagctgggtccgccagcctccagggaagggactggagtgggtggccaacataaatcaagatggaagtgagaaacactatgtggactctgtgacgggccgattcagcatctccagagacaacaccaagaactcactgtatctgcaaatgaacagcctgagagccgaggacacggccgtatattactgtgcgggttgtggtggtgactgctatactattgaccactggggccagggtaccctggtcaccgtctcgtca

SEQ ID NO: 16707 - DNA, 292 bp, Homo sapiens
  source 1..292: mol_type = other DNA
tgcagcctctggattcacctttagtaattattgggtgacctgggtccgccaggctccagggatgggtctggagtgcgtggccaacataaaccaagatggaagtgagaaacactatgtggactctgtgaagggccgattcaccatctccagagacaacgccaggaactcacagtatctgcaaatgaatagcctgagagtcgaggacacggctgtgtattactgtgcgggttgtggtggtgattgctatactattgaccactggggccagggaaccctggtcaccgtctcctca

SEQ ID NO: 16708 - DNA, 292 bp, Homo sapiens
  source 1..292: mol_type = other DNA
tgcagcctctaaatacagctttagtagttattggatgagctgggtccgccaggctccagggaaggggctggagtgggtggccaacataaagcaagatggaagtgagaaacactatgtggactctgtgaagggccgattcagcatctccagagacaacgccaagaactcactgtatctgcaaatgaacagcctgagagccgaggacacggccgtgtattactgtgcgggttgtggtggagactgctatactattgaccactggggccagggtaccctggtcaccgtctcgtca

SEQ ID NO: 16709 - DNA, 292 bp, Homo sapiens
  source 1..292: mol_type = other DNA
tgaagcctctaaatacagcttcagtagctactggatgagctgggtccgccaggttccagggaaggggctggagtgggtggccaacataaatcaagatggaagtgagaaacacaatgtggcctctgtgaagggccgattcagtatctccagagacaacaccaagaactcactgtatctgcaaatgaacagcctgagagccgaggacacggccgtgtattattgtgcgggttgtggtggtgactgctatactattgaccactggggccagggtaccctggtcaccgtctcgtca

SEQ ID NO: 16710 - DNA, 292 bp, Homo sapiens
  source 1..292: mol_type = other DNA
tgcagcctctaaatacagctttagtagctattggatgagctgggtccgccaggctccagggaaggggctggagtgggtggccaacataaagcaagatggaagtgagaaacactatgtggactctgtgaagggccgattcagcatctccagagacaacgccaagaactcattgtatctgcaaatgaacagcctgagagccgaggacacggccgtgtattactgtgcgggttgtggtggtgactgctatactattgaccactggggccagggaaccctggtcaccgtctcgtca

SEQ ID NO: 16711 - DNA, 292 bp, Homo sapiens
  source 1..292: mol_type = other DNA
tgcagcctctaaatacagctttagtagctattggatgagctgggtccgccaggctccagggaaggggctggagtgggtggccaacataaaacaagatggaagtgagaaacactatgtggactctgtgaagggccgattcagcatctccagagacaacgccaagaactcactgtatctgcaaatgaacagcctgagagccgaggacacggccgtgtattactgtgcgggttgtggtggtgactgctatactattgaccactggggccagggtaccctggtcaccgtctcgtca

SEQ ID NO: 16712 - DNA, 292 bp, Homo sapiens
  source 1..292: mol_type = other DNA
tgcagcctctaaatacagctttagtagctattggatgagctgggtccgccaggctccagggaaggggctggagtgggtggccaacatcaagcaagatggaagtgagaaacactatgtggactctgtgaagggccgattcagcatctccagagacaacgccaagaattcactgtatctgcaaatgaacagcctgagagccgaggacacggccttttattactgtgcgggttgtggtggtgactgctatactattgaccactggggccagggaaccctggtcaccgtctcgtca

SEQ ID NO: 16713 - DNA, 292 bp, Homo sapiens; identical to SEQ ID NO: 16669
  source 1..292: mol_type = other DNA

SEQ ID NO: 16714 - DNA, 292 bp, Homo sapiens; identical to SEQ ID NO: 16663
  source 1..292: mol_type = other DNA

SEQ ID NO: 16715 - DNA, 290 bp, Homo sapiens
  source 1..290: mol_type = other DNA
cagcctctaaatacagctttagtagctattggatgagctgggtccgccaggttccagggaaggggctggagtgggtggccaacataaaccaagatggaagtgagaaacacaatgcggactctgtgaagggccgattcagcatcaccagagacaacaccaagaactcactgtttctgcaaatgaacagcctgagaaccgaagacacggccgtgtattattgtgcgggttgtggtggtgactgttataccattgaccactggggccagggtaccctggtcaccgtctcgtca

SEQ ID NO: 16716 - DNA, 300 bp, Homo sapiens
  source 1..300: mol_type = other DNA
aagggttctggataccggtttgccgactactggatcgcctgggtgcgccaggttcccgggaaaggcctggagtggatggggatcatctatcctgatgactctgaagtgaaatacagcccgtccttccaaggccaggtcaccatctcagtcgacgagtccatcactaccgcctacctgcagtggaccagcctgaaggcctcggacaccgccgtgtattactgtgcgagattttccgggccgcgtctggcctacaactggttcgacccctggggccagggaactttggtcaccgtctcctca

SEQ ID NO: 16717 - DNA, 300 bp, Homo sapiens
  source 1..300: mol_type = other DNA
aagggttatggatacggcttttacggctactggatcgcctgggtgcgccagatgtccgggaaaggcctggagtggatgggaatcatctatcctgatgactctcgtaccatatacagcccgtccttccaaggccaggtcaccatctcagccgacaagtccatcgacaccgcctacctgcagtggagcagcctgaaggcctcggacaccgccatgtattattgtgcgagattctcggggccgcggctggcctacaactggttcgacccctggggccagggaaccctggtcatcgtctcctca

SEQ ID NO: 16718 - DNA, 286 bp, Homo sapiens
  source 1..286: mol_type = other DNA
ttctgtctctggtggctccattacttataataattacttctggggctgggtccgccagcccccagggaaggggctggagtggattgggagcatctatcatagtgggagctctttctacaacccgtccctcaagagtcgagtcaccgtatccgttgacacgtccaagaaccagttctccctgaaggtgacctctgtgaccgccgcagacacggctgtatattactgcgcgaggtggtggaattattttgactactggggccagggagccctggtcaccgtctcctca

SEQ ID NO: 16719 - DNA, 286 bp, Homo sapiens
  source 1..286: mol_type = other DNA
ctctgtctctggtggctccattacctataataattacttctggggctgggtccgccagcccccagggaaggggctggagtggattgggagcatctatcatagtgggagctctttctacaacccgtccctcaagagtcgagtcaccgtatccgttgacacgtccaagaatcagttctccctgaaggtgacctctgtgaccgccgcagacacggctgtatattactgtgcgaggtggtggaattattttgactactggggccagggagccctggtcaccgtctcctca

SEQ ID NO: 16720 - DNA, 286 bp, Homo sapiens
  source 1..286: mol_type = other DNA
cactgtctctggtggctccatcagcaatagtcattattactgggtctggatccgccagccccccgggaaggggctggaatggattgggagtatgttttatagtgcgagcacctactacaacccgtccctcaagagtcgagtcaccatatccggggacgcgtccaagaaccagttctccctgaagctgacctctgtgaccgccgcagacacggctctttatttctgtgcgagatggtggaactactttgactactggggccagggaaccctggtcaccgtctcctca

SEQ ID NO: 16721 - DNA, 280 bp, Homo sapiens
  source 1..280: mol_type = other DNA
tgcagcctctggattcacctttagtagttatgaaatgagctgggtccgccaggctccagggagggggctggagtgggtttcacacattagtagtagtggtagtaacacatactacgcagactctgtgaagggccgattcaccatctccagagacaacgccaagaactcactgtatctgcaaatgaacagcctgagcgccgaggacacggctgtttattactgtgcgagactaagggggtttgactactggggccagggaatcctggtcaccgtctcctca

SEQ ID NO: 16722 - DNA, 280 bp, Homo sapiens
  source 1..280: mol_type = other DNA
tgcagcctctggattcaccttcagtagttatgaaatgaactgggtccgccaggctccagggaaggggctggagtggctttcatacattagtagtagtggtagtaccatatactacgcagactctgtgatgggccgattcaccatctccagagacaacgccaagaactcactgtatctgcaaatgaacagcctgagagccgaggacacggctgtttattactgtgcgagactacgaggctttgactactggggccagggaactctggtcaccgtctcctca

SEQ ID NO: 16723 - DNA, 295 bp, Homo sapiens
  source 1..295: mol_type = other DNA
tacaggttctggattcacctttggtgattatgctatgagctgggtccgccaggctccaggggaggggctggagtgggtaggtttctttagaagcaaaacttatggtgggacaacagagtacgccgcgtctgtgaaaggcagattcaccatctcaagagatgattccaaaagcatcacctatctgcaaatgaacagcctgaaaaccgaggacacagccgtgtattactgtactagagatccctactactacggtatggacgtctggggccaaggggccacggtcaccgtctcctca

SEQ ID NO: 16724 - DNA, 295 bp, Homo sapiens
  source 1..295: mol_type = other DNA
tacaggttctggattcacctttggtgattatgctatgagctgggtccgccaggctccagggaaggggctggagtgggtaggtttctttagaagcaaaacttatggtgggacaacagagtacgccgcgtctgtgaaaggcagattcaccatctcaagagatgattccaaaagcatcgcctatctgcaaatgaacagcctgaaaaccgaggacacagccgtgtattactgtactagagatccctactactacggtatggacgtctggggccaagggaccacggtcaccgtctcctca

SEQ ID NO: 16725 - DNA, 295 bp, Homo sapiens
  source 1..295: mol_type = other DNA
tacaggttctggattcacctttggtgattatgctatgagctgggtccgccaggctccagggaaggggctggagtgggtaggtttctttggaagcaaaacttatggtgggacaacagagtacgccgcgtctgtgaaaggcagattcaccatctcaagagatgattccaaaagcatcgcctatctgcaaatgaacagcctgaaaaccgaggacacagccgtgtattactgtactagagatccctactactacggtatggacgtctggggccaagggaccacggtcaccgtctcctca

SEQ ID NO: 16726 - DNA, 295 bp, Homo sapiens
  source 1..295: mol_type = other DNA
tacagcttctggattcacctttggtgatcatgctatgagttgggtccgccaggctccagggaaggggctggactgggtagctttcattagaagcaaagctaatggtgggacaacagaatacgccgcgtctgtgaaaggcagattcattatatcaagagatgattccaaaagcatcgcctatctgcaaatgaacagcctaaaaaccgaggacacaggcgtgtattattgtactagagatccttactactacggtatggacgtctggggccaagggaccacggtcaccgtctcctca

SEQ ID NO: 16727 - DNA, 295 bp, Homo sapiens
  source 1..295: mol_type = other DNA
cacaggttctggattcatctttggtgattatgccatgagctgggtccgtcaggctccaggggaggggctggagtgggtaggtttctttagaagtaaaacttatggtgggacaacagagtacgccgcgtctgtgaaaggcagattcaccatctcaagagatgattccaaaagcatcgcctatctgcaaatgaacagcctgaaaaccgaggacacagccgtgtattactgtactagagatccctactattacggtatggacgtctggggccaagggaccacggtcaccgtctcctca

SEQ ID NO: 16728 - DNA, 295 bp, Homo sapiens; identical to SEQ ID NO: 16724
  source 1..295: mol_type = other DNA

SEQ ID NO: 16729 - DNA, 274 bp, Homo sapiens
  source 1..274: mol_type = other DNA
tgcagcctctggcctcatcgtcaatacttatgagatgaactgggtccgccaggctccagggaaggggctggaatgggtcgcatttatgagtcagagtggtgatgacatacactatgcaggttctgtgacgggccgattcggcatcaccagagacaacgccttgaacttgatatatttggagatgaacagcctgaaagccgaggacacggctgtttattactgtacggcgtctgatgactactggggccagggaaccctggtcactgtctcctca

SEQ ID NO: 16730 - DNA, 274 bp, Homo sapiens
  source 1..274: mol_type = other DNA
tgcagcctctggattcagcttcagcagttatgaaatgaactgggtccgccagactgcagggaaggggctggagtggatttcatccatcagtggaagtggtacttccatatattacgcagactctgtggagggccgattcaccatctccagagacaatgccaagaactcactgtctctggaaatgaacagcctgagagacgaggacacgggtgtttattattgtacagccagtgatgactactggggccagggagccctggtcaccgtctcctca

SEQ ID NO: 16731 - DNA, 286 bp, Homo sapiens
  source 1..286: mol_type = other DNA
cgtagtctctgggttcaccgtcagtagcacctccatgagttgggtccgccaggctccagggaaggggctggcgtgggtctcaattattgagaccggtggtaaaacattgtacgcagattccgtgaggggccgattcaccatctccagagacaactccaagaacaccctatatcttcaaatgaatagcctgagagtcgacgacacggccgtgtattactgtgcgagagatgggtcacagcggtccttccaacactggggccagggcaccctggtcaccgtctcttca

SEQ ID NO: 16732 - DNA, 286 bp, Homo sapiens
  source 1..286: mol_type = other DNA
cgaagtctctgggttcaccgtcagtagcgtctccatgagctgggtccgccaggctccagggaaggggctggcgtgggtctccattattgagagcgctaataatgcacactacgcagattccgtgaagggccgattcaccatctccagagacaactccaggaacacactatatcttcaaatgagcagcctgagagccgaggacacggccgtctattactgtgcgagagatgggtcacagcggtccttccaacactggggccagggcaccctggtcaccgtctcttca

SEQ ID NO: 16733 - DNA, 286 bp, Homo sapiens
  source 1..286: mol_type = other DNA
cgcagtctctgggttcaccgtcagtagcgtcttcatgagctgggtccgccaggctccagggaaggggctggcgtgggtctccattattgagagcgctggtaatgcacactacgcagattccgtgaagggccgattcaccatctccagagacaactccaggaacacactatatcttcaaatgagcagcctgagagccgaggacacggccgtctattactgtgcgagagatgggtcacagcggtccttccaacactggggccagggcaccctggtcaccgtctcctca

SEQ ID NO: 16734 - DNA, 286 bp, Homo sapiens
  source 1..286: mol_type = other DNA
cgcagtctctgggttcaccgtcagtagcacctccatgagctgggtccgccaggctccagggaaggggctggcgtgggtctcaattattgagaccggtggtaaaacattctacgcagattccgtgaggggccgattcaccatctccagagacaactccaagaacaccctatatcttcagatggacagcctgagagccgacgacacggccgtgtattactgtgcgagagatgggtcacagcggtccttccaacactggggccagggcaccctggtcaccgtctcttca

SEQ ID NO: 16735 - DNA, 286 bp, Homo sapiens; identical to SEQ ID NO: 16731
  source 1..286: mol_type = other DNA

SEQ ID NO: 16736 - DNA, 286 bp, Homo sapiens
  source 1..286: mol_type = other DNA
cgtagtctctgggttcaccgtcagtagcacctccatgagttgggtccgccaggctccagggaaggggctggcgtgggtctcaattattgagaccggtggtaaaacattgtacgcagattccgtgaggggccgattcaccatctcgagagacaactccaagaacaccctatatcttcaaatgaatagcctgagagccgacgacacggccgtgtattactgtgcgagagatgggtcacagcggtccttccaacactggggccagggcaccctggtcaccgtctcttca

SEQ ID NO: 16737 - DNA, 286 bp, Homo sapiens
  source 1..286: mol_type = other DNA
cgcagtctctgggttcaccgtcaatagcgtctccttgagctgggtccgccaggctccagggaaggggctggcgtgggtctccactattgagagcgctggtaatgctcactacgcagattccgtgaagggccgattcaccatctccagagacaactccagaaacacactacatcttcaaatgaccagactgagagccgaggacacggccgtctattactgtgcgagagatgggtcacagcggtccttccagcactggggccagggcaccctggtcaccgtctcctca

SEQ ID NO: 16738 - DNA, 286 bp, Homo sapiens
  source 1..286: mol_type = other DNA
cgcagcctctgggttcaccgtcagaagcaactacatgagctgggtccgccaggctccagggaaggggctggcctgggtctcacttattgagaccggtggcagtacatactacgcagattccgtgaagggccgattcaccatctccagagacgactccaagaacacactacttcttcaaatgaacagcctgagagtcgaggacacggccgtgtattactgtgcgagagacgggtcacagcggtccttccaacactggggccagggcaccctggtcaccgtttcctca

SEQ ID NO: 16739 - DNA, 286 bp, Homo sapiens
  source 1..286: mol_type = other DNA
cgcagcctctgggttcaccgtcagaagcaactacatgagctgggtccgccaggctccagggaaggggctggcctgggtctcacttattgagaccggtggcagtacatactacgcagattccgtgaagggccgatttaccatctccagagacgactccaagaacacactacttcttcaaatgaacagcctgagagtcgaggacacggccgtgtattactgtgcgagagacgggtcacagcggtccttccaacactggggccagggcaccctggtcaccgtttcctca

SEQ ID NO: 16740 - DNA, 286 bp, Homo sapiens
  source 1..286: mol_type = other DNA
tgcagcctctgggttcaccgtcagtagcaactacatgagctgggtccgccaggctccagggaaggggctggcgtgggtctcaattattgaaagcggtggtaatacatactacgcagattccgtgaagggccgattcaccatctccagagacaactccaagaacacactatatcttcgaatgaacagcctgagagccgaggacacggccgtgtattactgtgcgagagatgggtcacagcggtccttccagcactggggccagggcaccctggtcaccgtctcctca

SEQ ID NO: 16741 - DNA, 286 bp, Homo sapiens
  source 1..286: mol_type = other DNA
cgcagtctctgggttcaccgtcagtagtgtctccttgagctgggtccgccaggctccagggaaggggctggcgtgggtctccactattgagagcgctggtaatgctcactacgcagattccgtgaagggccgattcaccatctccagagacaactccaggaacacactacatcttcaaatgagcagactgagagccgaggacacggccgtctattactgtgcgagagatgggtcacagcggtccttccaacactggggccagggcaccctggtcaccgtctcctca

SEQ ID NO: 16742 - DNA, 286 bp, Homo sapiens
  source 1..286: mol_type = other DNA
tgcagcctctgggttcaccgtcagtagtaactacatgagttgggtccgccaggctccagggaaggggctggagtgggtctcaattctttataccggtggtaatacatattacgcagactccgtgaagggccgattcaccatctccagagacagcaccaagaatacggtgtatcttcaaatgaccagcctaagagtcgaggacacggccgtgtactactgtgcgagagatgggagccaacggtcgttccagcactggggccagggcaccctggtcaccgtctcctca

SEQ ID NO: 16743 - DNA, 286 bp, Homo sapiens
  source 1..286: mol_type = other DNA
cgcagcctctggattcaccgtcagaagcaactacatgagctgggtccgccaggctccagggaaggggctggcctgggtctcacttattgagaccggtggcagtacatactacgcagattccgtgaagggccgattcaccatctccagagacgactccaagaacacactacttcttcaaatgaacagcctgagagtcgaggacacggccgtgtattactgtgcgagagacgggtcacagcggtccttccaacactggggccagggcaccctggtcaccgtttcctca

SEQ ID NO: 16744 - DNA, 286 bp, Homo sapiens
  source 1..286: mol_type = other DNA
cgcagcctctgggttcaccgtcagaagcaactacatgagctgggtccgccaggctccagggaaggggctggcgtgggtctcaattattcagagcggtggcagtacatactacgcagattccgtgaagggccgattcaccatctccagagacgactccaagaacacactacttcttcaaatgaacagcctgagagtcgaggacacggccgtgtattactgtgcgagagacgggtcacagcggtccttccaacactggggccagggcaccctggtcaccgtttcctca

SEQ ID NO: 16745 - DNA, 291 bp, Homo sapiens
  source 1..291: mol_type = other DNA
gcatctggatacaccttcaccaactactatatgcactgggtgcgacaggcccctggacaagggcttgagtggatgggaataatcaagcctagtgatagtagcacagcctacgcacagaacttccagggcagagtcattatgaccagggacacgtccacgaccacagtctacatggagctgagcagcctgagttctgacgacacggccatttattactgtgcgagagatcgaaccaatgggtggggtgcttttgatatctggggccaagggacactggtcaccgtctcttca

SEQ ID NO: 16746 - DNA, 291 bp, Homo sapiens
  source 1..291: mol_type = other DNA
gcatctggatataccttcaccaactactatatgcactgggtgcgacaggcccctggacaagggcttgagtggatgggaataatcaagcctagtgatagtagcacagcctacacagagaacttccagggcagagtcatcatgaccagggacacgtccacgaccacagtctacatggagctgagcagcctgagatctgacgacacggccatttattactgtgcgagagatcgaaccaatgggtggggtgcttttgatatctggggccaagggacactggtcaccgtctcttca

SEQ ID NO: 16747 - DNA, 291 bp, Homo sapiens
  source 1..291: mol_type = other DNA
gcatctggatataccttcaccaactactatatgcactgggtgcgacaggcccctggacagcggcttgagtggatgggaataatcaagcctagtgatagtagcacagcctacgcacagaacttccagggcagagtcattatgaccagggacacgtccacgaccacagtctacatggagctgaccagcctgagctctgacgacacggccatttattactgtgcgagagatcgaaccaatgggtggggtgcctttgatatctggggccaagggacactggtcaccgtctcttca

SEQ ID NO: 16748 - DNA, 291 bp, Homo sapiens
  source 1..291: mol_type = other DNA
gcatctggatacaccttcaccaactactatatgcactgggtgcgacaggcccctggacaagggcttgagtggatgggaataatcaagcctagtgatagtagcacaacctacgcacagaacttccagggcagagtcattatgaccagggacacgtccacgaccacagtctacatggagctgagcagcctgagctctgacgacacggccatttattactgtgcgagagatcgaaccaatgggtggggtgcttttgatatctggggccaagggacactggtcaccgtctcttca

SEQ ID NO: 16749 - DNA, 291 bp, Homo sapiens
  source 1..291: mol_type = other DNA
gcatctggatataccttcaccaactactatatgcactgggtgcgacaggcccctggacaagggcttgagtggatgggaataatcaagcctagtgatagtagcacagcctacacacagaacttccagggcagagtcattatgaccagggacacgtccacgaccacagtctacatggagctgagcagcctgaggtctgacgacacggccatttattactgtgcgagagatcgaaccaatgggtggggtgcttttgatatctggggccaagggacactggtcaccgtctcttca

SEQ ID NO: 16750 - DNA, 291 bp, Homo sapiens; identical to SEQ ID NO: 16749
  source 1..291: mol_type = other DNA

SEQ ID NO: 16751 - DNA, 291 bp, Homo sapiens
  source 1..291: mol_type = other DNA
gcatctggatataccttcaccaactactatatgcactgggtgcgacaggcccctggacaagggcttgagtggatgggaataatcaagcctagtgatggtagcacatcctacgcacagaacttccagggcagagtcattatgaccagggacacgtccacgaccacagtctacatggagctgagcagcctgagatctgacgacacggccatttattactgtgcgagagatcgaaccaatgggtggggtgcttttgatatctggggccaagggacactggtcaccgtctcttca

SEQ ID NO: 16752 - DNA, 291 bp, Homo sapiens
  source 1..291: mol_type = other DNA
gcatctggatacaccttcaccagctactatatgcactgggtgcgacaggcccctggacaagggcttgagtggatgggaataatcgaccctagtggtggtagcacaagctacgcacagaacttccagggcagagtcaccttgaccagggacacgtccacgagcacagtctacatggagctgagcagcctgagatctgaggacacggccgtgttttactgtgcgagagatcgcaccaatggctggggtgcttttgatatctggggccaagggacaatggtcaccgtctcttca

SEQ ID NO: 16753 - DNA, 289 bp, Homo sapiens
  source 1..289: mol_type = other DNA
tgcagcctctggattcacctttagtccctatggcatgacctgggtccgccaggctccagggaaggggctggagttcgtctcagttatttatacaggtggcactaggacaaattatgcagagtccgtgaagggccggttcaccgtctccagagatgattccaagagcacagtctatctgcaaatgaacgacctgagagtcgaggacacggccatctactattgtgcgagagatggtagtgagtggtcgagggattactggggccagggaaccctggtcaccgtctcctcg

SEQ ID NO: 16754 - DNA, 289 bp, Homo sapiens
  source 1..289: mol_type = other DNA
tgcagcctctggattcacctttagtccctatggcatgacctgggtccgccaggctccagggaaggggctggagttcgtctcagttatttatacaggtggcactaggacaaattatgcagagtccgtgaagggccggttcaccgtctccagagatgattccaagggcacactgtatctgcaaatgaacgacctgagagtcgaggacacggccatctactattgtgcgagagatggtagtgagtggtcgagggattactggggccagggaaccctggtcaccgtctcctcg

SEQ ID NO: 16755 - DNA, 289 bp, Homo sapiens
  source 1..289: mol_type = other DNA
tacagcctctggattcatgtttagcagtagtggcatgacctgggtccgccaggctccagggaagggactggaatgggtctcaactatttatagtagtggtagtcccacatcttatgcagactccgtgaagggccgattcaccgtctccagagacaattccaagaatatggtgtatctgcaattgagcagtctgagagtcgaggacacggccatatattactgtgcgagagatggcagtgagtggtcccgggactattggggccagggaaccctggtcactgtctcctca

SEQ ID NO: 16756 - DNA, 292 bp, Homo sapiens
  source 1..292: mol_type = other DNA
tgcagcctctggattcacctttagcagctctgccatgagctgggtccgccaggctccagggatggggctggaatgggtctcagtgattagtgctagtggtggtacgacatactacgcagactccgtgaagggccggttcaccatctccagagacaattccgagagcacggtgtatctgcaaatgaacagcctgagagccgaggacacggccgtatattactgtgcgtcacgggggcataccttggggtactttgactactggggccagggaaccctggtcaccgtctcctca

SEQ ID NO: 16757 - DNA, 292 bp, Homo sapiens
  source 1..292: mol_type = other DNA
tgcagtctctggattcacctttagcagctctgccatgacctgggtccgccaggctccagcgaaggggctggagtgggtctcaactattagtggtaatggtggtagcacataccacgcagactccgtgaagggccggttcaccatctccagagacaattccaagaacacggtgtatctggaaatgaacagcctgagagccgaggacacggccctatattactgtgcgtcccggggacacaccttgggttattttgactactggggccagggaaccgtggtcaccgtctcctca

SEQ ID NO: 16758 - DNA, 283 bp, Homo sapiens
  source 1..283: mol_type = other DNA
tgcagcctctgggttcacctttagtgactattggatggtttgggtccgcctggctccagggaaggggctggagtgggtgggcaacataaaccaaattggaactgagtaccactatgcggactctgtgaagggccgattcaccatctccagagacaacgcccagaactcactgtctctgcaaatgaacggcctgagagccgaggacacggccgtgtactactgtgcgagagacgcacggtattctgacttctggggccagggaaccctggtcagcgtctcctca

SEQ ID NO: 16759 - DNA, 283 bp, Homo sapiens
  source 1..283: mol_type = other DNA
tgcagcctctggattcacctttagcacctattggatggtttgggtccgccaggctccagggaaggggctggagtgggtgggcaacataaaccaagatggaagtgacaaatactatgtggactctgtgaagggccgattcaccatctccagagacaacgccaagaactcactgtatctgcaaatgaacagcctgagagccgaggacacggctgtgtatttctgtgcgagagatgcccgctattctgacttttggggccagggaaccctggtcaccgtctcctca

SEQ ID NO: 16760 - DNA, 292 bp, Homo sapiens
  source 1..292: mol_type = other DNA
cgctgtctatggtgggtcattcagtgattactggtggacgtggatccgccagcccccagggaaggggctggagtgggtcggagaaatcaaccatagtggaagcaccaattacaacccggcactcaagagtcgagtcgccatatcggtcgacacgtccaagaaccagttctccctgaaactgagttctgtgaccgccgcggacacggctatctattactgtgcgaggggcggcggggaccttcaacccgactttgactactggagccaggggtccctggtcactgtctcctca

SEQ ID NO: 16761 - DNA, 292 bp, Homo sapiens
  source 1..292: mol_type = other DNA
cgctgtctatggtgggtcattcaatgattactggtggacgtggatccgccagcccccaggcaaggggctggagtgggtcggggaaatcagccatagtggaagcaccaattacaacccggcactcaagagtcgagtcgccatatcagtcgacacgtccaagaaccagttctccctgaaactgacctctgtgaccgccgcggacacggctgtctattactgtgcgaggggcggcggggaccttcaacccgactttgactactggggccaggggtccctggtcactgtctcctca

SEQ ID NO: 16762 - DNA, 292 bp, Homo sapiens
  source 1..292: mol_type = other DNA
cgctgtctatggtgggtcattcagtgattattggtggacgtggatccgccagcccccagggaaggggctggagtgggtcggggaaatcaatcatagtggaagcaccaattacaacccggcactcaagagtcgagtcgccatatcagtcgacacgtccaagaaccagttctccctgaaacttagctctataaccgccgcggacacggctgtctattactgtgcgaggggcggcggggaccttcaacccgactttgactactggggccaggggtccctggtcactgtctcctca

SEQ ID NO: 16763 - DNA, 292 bp, Homo sapiens
  source 1..292: mol_type = other DNA
cgctgtctatggtgggtcattcagtgattactggtggacgtggatccgccagcccccaggcaaggggctggagtgggtcggggaaatcaaccatagtggaagcaccaattacaacccggcactcaagagtcgagtcgccatatcagtcgacacgtccaagaaccagttctccctgaaactgagctctgtgaccgccgcggacacggctgtctattactgtgcgaggggcggcggggaccttcaacccgactttgactactggggccaggggtccctggtcactgtctcctca

SEQ ID NO: 16764 - DNA, 292 bp, Homo sapiens
  source 1..292: mol_type = other DNA
cgctgtctatggtgggtcattcagtgattattggtggacgtggatccgccagcccccaggcaaggggctggagtgggtcggggaaatcaatcatattggaagcaccaatttcaacccggcactcagcagtcgagtcgccatatcagtcgacacgtccaagagtcagttctccctgaaattgagctctgtgaccgccgcggacacggctgtctattactgtgcgaggggcggcggggaccttcaacccgactttgactactggggccaggggtccctggtcactgtctcgtca

SEQ ID NO: 16765 - DNA, 292 bp, Homo sapiens
  source 1..292: mol_type = other DNA
cgctgtctatggtgggtcattcagtgattactggtggacgtggatccgccagcccccagggaaggggctggagtgggtcggggaaatcaaccatagtggaagcaccaattacaacccggcactcaagagtcgagtcgccatatcagtcgacacgtccaagaaccagttctccctgaaactgacctctgtgaccgccgcggacacggctgtctattactgtgcgaggggcggcggggaccttcaacccgactttgactactggggccaggggtccctggtcactgtctcctca

SEQ ID NO: 16766 - DNA, 290 bp, Homo sapiens
  source 1..290: mol_type = other DNA
ctgtctatggtgggtcattcagtgattattggtggacgtggatccgccagcccccagggaaggggctggagtgggtcggggaaatcaatcatagtggaagcaccaattacaacccggcactcaagagtcgagtcgccatatcagtcgacacgtccaagaaccagttctccctgaaacttagctctataaccgccgcggacacggctgtctattactgtgcgaggggcggcggggaccttcaacccgactttgactactggggccaggggtccctggtcactgtctcctca

SEQ ID NO: 16767 - DNA, 292 bp, Homo sapiens
  source 1..292: mol_type = other DNA
cgctgtctatggtgggtcattcagtgattactggtggacgtggatccgccagcccccagggaaggggctggagtgggtcggggaaattgcccatagtggaagcaccaactacaacccggcactcgagagtcgagccaccatctcagtcgacacggccaagaaccagttctccctgaaactgaactctgtgaccgccgcggacacggctgtctattactgtgcgaggggcggcggggaccttcaacccgactttgactactggggccaggggtccctggtcactgtctcctca

SEQ ID NO: 16768 - DNA, 292 bp, Homo sapiens
  source 1..292: mol_type = other DNA
cgctgtgtatggtgggtccttcaatgagcactactggacctggatccgccagcccccaggcaaggggctggagtggattggggacatcgatcatggtggagtcaccaactacaacccgtccctcaagagtcgagtcaccatatcagtagacacgtccaagaaccagttctccctgaggttgagctctgtgaccgccgcggacacggctgtctactactgtgcgagaggtggaggtgacctgcaaccagactttgactactggggccagggaaccctggtcaccgtctcctca

SEQ ID NO: 16769 - DNA, 292 bp, Homo sapiens
  source 1..292: mol_type = other DNA
cgctgtctatggggggtcattcagtgattactggtggacgtggatccgccagcccccagggaaggggctggagtgggtcggggaaatcaaccatagtggaagcaccaattacaacccggcactcaagagtcgagtcgccatatcagtcgacacgtccaagaaccagttctccctgaaagtgagctctgtgaccgccgcggacacggctgtctattactgtgcgaggggcggcggggaccttcaacccgactttgactactggggccaggggtccctggtcactgtctcctca

SEQ ID NO: 16770 - DNA, 286 bp, Homo sapiens
  source 1..286: mol_type = other DNA
cggtgtctttggtggggccttcagtggttatcactggacctggatccgccagcccccagggaaggggctggagtggataggggaaatcaatcatggtggaagcaccaactacaacccgtccctcaagagtcgactcaccatgttagtggacacgtccaagaggcagttctccctgaggctgagttctgtgaccgccgcggacacggctgtctattactgtgcgagagggggtttcggggagttgctaaacttctggggccagggaaccctggtcaccgtctcctcg

SEQ ID NO: 16771 - DNA, 286 bp, Homo sapiens
  source 1..286: mol_type = other DNA
cgctgtgtctggtggggccttcagtggttactactggacctggatccgccaggccccagggaaggggctggagtggattggggaaatcaatcatagtggaagcagcaactacaacccgtccctcaagagtcgagtcagcatttcagtggacacgtccaagaaacacttctccctgaagttgacctctgtgaccgccgcggacacggctgtctatttttgtgcgagaggaggattcggggaattactgaatttctggggccagggaaccctggtcaccgtctcctca

SEQ ID NO: 16772 - DNA, 286 bp, Homo sapiens
  source 1..286: mol_type = other DNA
cgctgtgtctggtggggccttcagtggttactactggacctggatccgccaggccccagggaaggggctggagtggattggggaaatcaatcatagtggaagcagcaactacaacccgtccctcaagagtcgagtcagcatttcagtggacacgtccaagaaccacttctccctgaagttgacctctgtgaccgccgcggacacggctgtctatttttgtgcgagaggaggattcggggaattactgaatttctggggccagggaaccctggtcaccgtctcctca

SEQ ID NO: 16773 - DNA, 274 bp, Homo sapiens
  source 1..274: mol_type = other DNA
tacagcctctggattcaccctcagtaccaactggatacactgggtccgtcaggttccagggaagggcctggtgtgggtctcacgtgttaatgaagatgggagtggcacaagctacgcggactccgtgaagggccgattcaccgtctccagagacgaagccaggaacacggtgtctctgcaaatgaacagtctgagaggcgatgatacggctgtatattattgtactacgatctttgacttctggggccagggaaccctggtcaccgtctcctca

SEQ ID NO: 16774 - DNA, 274 bp, Homo sapiens
  source 1..274: mol_type = other DNA
tgcagcctctggattcaacttcaggaactactggatgcactgggtccgccaagctccaggggaggggctggtgtgggtctcacgtgttaatgtagatgggagtgacacaagctacgcggactccgtgaagggccgattcaccatgtccagagacaacgccaagaacacggtgtctctgcaaatgaacagtctgagggccgaggatacggctgtttattactgtacaactatctttgacttctggggccagggaaacctggtcaccgtctcctca

SEQ ID NO: 16775 - DNA, 274 bp, Homo sapiens
  source 1..274: mol_type = other DNA
tgcaacctctggagtcatcttcacgaactactggatgcactgggtccgccaaggtccaggagaggggctggtgtgggtcgcacgtatcgatggatatgggagtggcacaagctacgcggactccgtgaagggccgattcaccatctccagagacaacgccaagaacacggtgtctctgcaaatgaacagtctgagggccgaggatacggctgtatattactgcacaaccatttttgacttctggggccagggaaacctggtcaccgtctcctca

SEQ ID NO: 16776 - DNA, 274 bp, Homo sapiens
  source 1..274: mol_type = other DNA
tgcagcctctggattcaccttcactaactactggatgcactgggtccgccaagctccaggggaggggctggtgtgggtctcacgtattgatggacttgggagtggcacaagctacgcggactccgtgaagggccgattcaccatctccagagacaacgccaagaacacggtgtctctgcaaatgaacagtctgagggccgaggatacggctgtgtattattgtacaaccatctttgacttctggggccagggaaacctggtcaccgtctcctca

SEQ ID NO: 16777 - DNA, 274 bp, Homo sapiens
  source 1..274: mol_type = other DNA
tgcagcctctggattcaccttcactaactactggatgcactgggtccgccaagctccaggggaggggctggtgtgggtctcacgtattaatggagatgggagtggcacaagctacgcggactccgtgaagggccgattcaccatctcgagagacaacgccaagaacacggtgtctctgcaaatgaacagtctgagggccgaggatacggctgtctattactgtacgaccatttttgacttctggggccagggaaacctggtcaccgtctcctca

SEQ ID NO: 16778 - DNA, 294 bp, Homo sapiens
  source 1..294: mol_type = other DNA
aagggttctggatacaggtttagcagctactggatcggctgggtgcgccagatgcccgggaaaggcctggaggtgatggggatcatctatcctggagactctgataccaaatacagcccgtccttccaaggccaggtcaccatctcagccgacaagtccatcagcaccgcctacctgcagtggaacagcctgcaggcctcggacaccgccatgtatttctgtgcgagactttcgatagcagtgtctggtgactttgacttctggggccagggaaccctggtcaccgtctcctca

SEQ ID NO: 16779 - DNA, 294 bp, Homo sapiens
  source 1..294: mol_type = other DNA
aagggttctggatacagcttcagcaactactggatcggttgggtgcgccagatgcccgggagaggcctggagttgatggggatcgtctatcctggtgactctgaccccacatacagtccgtccttccagggcctggtcaccatctcagccgacaagtccaccagcactgccttcctgcagtggagcagcctgaaggcctcggacaccgccatgtattactgtgcgagactcagcatagcagtgtctggggactttgacttctggggccagggaaccctggtcaccgtctcctca

SEQ ID NO: 16780 - DNA, 294 bp, Homo sapiens
  source 1..294: mol_type = other DNA
aagggttctggatacaggtttagcagctactggatcggctgggtgcgccagatgcccgggaaaggcctggaggtgatggggatcatctatcctggagactctgaaaccaaatacagcccgtccttccaaggccaggtcagcatctcagccgacaagtccatcaccaccgcctatctgcagtggaacagcctgcaggcctcggacaccgccatgtatttctgtgcgagactttcgatagcagtgtctggtgactttgacttctggggccagggaaccctggtcaccgtctcctca

SEQ ID NO: 16781 - DNA, 283 bp, Homo sapiens
  source 1..283: mol_type = other DNA
tgcagcctctggattcaccttcagtaattactggttgcactgggtccgccaagttccagggaaggggctggtgtgggtctccagtattagaggtgatggggctgacacaaactacgcggactccctgaagggccgagtcaccatctccagagacaacgccaagagcacattgtatctgcaaatgaacagtctcagagccgaggacacggctgtctattactgtgcaagagaggcgaatagcttcgatatttggggccaagggacattggtcaccgtctcttca

SEQ ID NO: 16782 - DNA, 283 bp, Homo sapiens; identical to SEQ ID NO: 16781
  source 1..283: mol_type = other DNA

SEQ ID NO: 16783 - DNA, 283 bp, Homo sapiens
  source 1..283: mol_type = other DNA
tgtagcctcgggattcactttcagtagtcactggatgcactgggtccgccaatctccagggaggggactggtttgggtctcaagcattaggtttgatgggggagatagcaactacgcggacttcgtgaagggccgattcaccatctccagagacaacgcccagaacacggtgtctctggaaatgaacattctgagagacgaggacacggctgtgtattactgtgcaagagaggcgaattcttttgatatctggggccaagggacaatggtcaccgtctcttca

SEQ ID NO: 16784 - DNA, 292 bp, Homo sapiens
  source 1..292: mol_type = other DNA
tgcagcctctggattcatcgtcagtggcaactacatgagctgggtccgccaggctccagggaaggggctggagtgcgtcacagtcatttttatcggtggtaccacatactacgcagactccgtgaagggcagattcaccatctccagagacaattcccagaacaccctgtatcttcagatgaatagtctgagagccgaggacacggctgtgtattactgtgcgacacggcccaatggtgactatccctactttgactactggggccagggaaccctggtcaccgtctcctca

SEQ ID NO: 16785 - DNA, 292 bp, Homo sapiens
  source 1..292: mol_type = other DNA
tgcagcctctggattcaccgtcagtaggaagtacatgacttgggtccgccaggctccagggaaggggctggagtgggtctcacttatttatagcggtggtagcacatcctacgcagactccgtgaagggcagattcaccatctccagagacaattccaggaacacactgtatcttcaaatgaatagcctgagagccgaggacacggctgtgtattattgtgcgacccgaccgaacggtgactacccctattttgactactggggccagggaaccctggtcaccgtctcctca

SEQ ID NO: 16786 - DNA, 292 bp, Homo sapiens
  source 1..292: mol_type = other DNA
tgcagcctctggattcaccgtcagtaggaagtacatgagttgggtccgccaggctccagggaaggggctggagtgggtctcacttatttatagcggtggtagcacatcctacgcagactccgtgaagggcagattcaccatctccagagacaattccaggaacacactgtatcttcaaatgaatagcctgagagccgaggacacggctgtgtattattgtgcgacccgaccgaacggtgactacccctattttgactactggggccagggaaccctggtcaccgtctcctca

SEQ ID NO: 16787 - DNA, 283 bp, Homo sapiens
  source 1..283: mol_type = other DNA
tgcagcctctggattcacctttagtgactacacgttaggctgggtccgccaggctccaggggaggggctgcagtgggtctcagccattattagtgactttagtacattttatgccgactccgtgaagggccgcttcaccatctccagagacaattccaagaacagactgtttttacaaatggacaacctgggagccgacgacacggccctatattactgtgcgcaacgagtagagggtgcttttcatgagtggggccaagggacggtggtcaccgtctcttca

SEQ ID NO: 16788 - DNA, 286 bp, Homo sapiens
  source 1..286: mol_type = other DNA
tgcagcctctggattcacgtttaacgtctataccatgggttgggtccgccaggctccggggggggggctggagtgggtcgcagctatgattagcagtggtgctagagccgactacgcagactccgtgaggggccgattctccatctccagagacaactccaagaacactctgtctctgcaaatgaacagcctgagagccgacgacacggccgtatatttctgtgcgcaaagggttgaaggagcttttcatgagtggggccaggggacattggtcaccgtctcttca

SEQ ID NO: 16789 - DNA, 295 bp, Homo sapiens
  source 1..295: mol_type = other DNA
tgcagcctctggattcaccttcagtaactactggatgcactgggtccgccaagctccagggaaggggctggtgtgggtctcacgtgttaagtttgatgggagcaccacaaactacgcggactccgtgaagggccgattcaccatctccagagacaacgccaagaacacgttgtttctgcaaatgaacagtctgagagtcgaggacacggctgtatattactgtacaagagatctggtacttggttcggggagcagtgactactggggccagggaaccctggtcaccgtctcctca

SEQ ID NO: 16790 - DNA, 295 bp, Homo sapiens
  source 1..295: mol_type = other DNA
tgcagcctctggattcgtgttcagtcacaactggatgcactgggtccgccaagctccagggaaggggctggcatgggtcgcacgtattaatgaggatgagaccacaacaaactacgcggactccgtgaagggccgattcaccatctccagagacaacgccaagaacacgctgtatctgcaaatgaacagtctgagagtcgacgacacggctgtgtatcactgtacaagagatcttgtcttgggctcggggagttcggactactggggccagggaaccctagtcaccgtctcctca

SEQ ID NO: 16791 - DNA, 295 bp, Homo sapiens
  source 1..295: mol_type = other DNA
tgcagcctctgggttcaccttcagtggctctgctatgcactgggtccgccaggcttccgggaaagggctagagtgggttggccgtattagaagcaaagctaacagttacgcgacagcatatgctgagtcggtgaaaggcaggttcaccatctccagagatgattcaaagaacacggcgtatctgcaaatgaacagcctgaaaaccgaggacacggccgtgtattattgcactagacaggcgtatacggtgactcctgactactggggccagggaaccctggtcaccgtctcctca

SEQ ID NO: 16792 - DNA, 295 bp, Homo sapiens
  source 1..295: mol_type = other DNA
tgcagcctctgggttcaccttcagtggcgctgctatgcactgggtccgccaggcttccgggaaagggctggagtgggttggccgtattagaagcaaaggtaataattacgcgacagcatatgctgcgtcggtgaaaggcaggttcaccatctccagagatgattcaaagaacacggcgtatctgcaaatgaacagcctgaaaaccgaggacacggccgtgtattactgtactagacaggcgtatacggtgactcctgattattggggccagggaaccctggtcaccgtctcctca

SEQ ID NO: 16793 - DNA, 295 bp, Homo sapiens
  source 1..295: mol_type = other DNA
tgcagcctctgggttcaccttcagtgactctgctatgcactgggtccgccaggcgtccgggaaagggctggagtgggttggccgtgttagaagcaaagctaacagttacgcgacagcatatgctgcgtcggtgaaaggcaggttcaccatttccagagatgattcaaagagcacggcgtttctgcaaatgaacggcctgaaaatcgaggacacggccgtctattattgtactagacaagcttatacagtcactcctgactactggggccagggaaccctggtcgtcgtctcctca

SEQ ID NO: 16794 - DNA, 295 bp, Homo sapiens
  source 1..295: mol_type = other DNA
tgcagcctctgggttcaccttcagtggctctgctatgcactgggtccgccaggcttccgggaaagggctggagtgggttggccgtattagaagcaaagctaacagttacgcgacagcatatgctgagtcggtgaaaggcaggttcaccatctccagagatgattcaaagaacacggcgtatctgcaaatgaacagcctgaaaaccgaggacacggccgtgtattattgcactagacaggcgtatacggtgactcctgactactggggccagggaaccctggtcaccgtctcctca

SEQ ID NO: 16795 - DNA, 298 bp, Homo sapiens
  source 1..298: mol_type = other DNA
tgcagcctctggattcacctttagtgactactggatgggctgggtccgccaggctccagggaaggggctggagtgggtggccaatataaggcaagatggaggtgaaaaatattatgtggactctgtgaagggccgattcaccatctccagagacaacgtcaaaaactcactgtctctgcaaatgaacaacctgagaggcgaggacacggctgtgtattactgtgcgagagatcggcggccgtcgatctacaatggtctggacgtctggggccaggggaccacggtcaccgtctcctca

SEQ ID NO: 16796 - DNA, 298 bp, Homo sapiens
  source 1..298: mol_type = other DNA
tgcagcctctggattcagctttagtagttattggatgagctgggtccgccaggctccagggaaggggctggagtgggtggccaacataaagcaagatggaagtgagaaatactatgtggactctgtgaagggccgattcaccatctccagagacaacgccaagaacgcactgtatctggaaatgaacagcctgagagccgaggacacggctgtatattactgtgcgagagatcgccgaccatcaatctacaacggtttggacgtctggggccaagggaccacggtcaccgtctcctca

SEQ ID NO: 16797 - DNA, 297 bp, Homo sapiens
  source 1..297: mol_type = other DNA
gcttctggatacaccttcaccgcccactatatgcactgggtgcgacaggcccccggacaagggcttgagtggatgggatgcatcaaccctaacagtggtggcacaacctatgcacagaagtttcagggcagggtcaccatgaccacggacacgtccatcagcacggcctacatggagctaagcagactgacgtctgacgacacggccgtgtattactgtgcgagacctttggagagtagtagctggaaggagtggttcgacccctggggccagggaaccctggtcaccgtctcctca

SEQ ID NO: 16798 - DNA, 297 bp, Homo sapiens
  source 1..297: mol_type = other DNA
gcttctggatacaccttcaccgcccactatatacactgggtgcgacaggcccctggacaagggcttgagtggatgggatgcatcaaccctaacagtggtggcacaacctatgcacagaagtttcagggcagggtcaccatgaccacggacacgtccatcagcacagcctacatggagctgagcagactgacgtctgacgacacggccgtgtattactgtgcgagacctttggagagtagtagctggaaggagtggttcgacccctggggccagggaaccctggtcaccgtctcctca

SEQ ID NO: 16799 - DNA, 297 bp, Homo sapiens
  source 1..297: mol_type = other DNA
gcttctggatacaccttcagcggccactatatccactgggtgcgacaggcccctggacaagggcttgagtggatgggatgcatcaatcctaacactggtgccacaaactatgcaccgaagtttcagggcagggtcgccatgaccagggacacgtccatcagcacagcctacgtggaattgagtagtctgaattctgacgacacggccgtatattattgtgcgaggcccctagagagcagtagctggaaagagtggttcgacccctggggccagggaaccctggtcaccgtctcctca

SEQ ID NO: 16800 - DNA, 286 bp, Homo sapiens
  source 1..286: mol_type = other DNA
tggagcctctgggttcagcgtcagtaacaactacatgagctgggtccgccaggctccagggaaggggctggagtgggtctcagttatttatagcggtggtagcacatactacgcagactccgtgaagggccgattcaccatctccagagacaattccaagaacacgctgtatcttcaaatgaacagcctgagagccgaggacacggccgtgtattactgtgcgacaaccggtataactggaactggtgactactggggccagggaaccctggtcaccgtctcctca

SEQ ID NO: 16801 - DNA, 286 bp, Homo sapiens
  source 1..286: mol_type = other DNA
tgcagcctctgggttcaccgtcagtagtaactacatgagttgggtccgccaggctccagggaaggggctggagtgggtctcagttatttatagcggtggtagcacatactacgcagactccgtgaagggccgattcaccatctccagagacaattccaagaacacgctgtatcttcaaatgaacagcctgagagtcgaggacacggccgtatattactgtgcgacaactggtataactggaactggtgactactggggccaggggaccctggtcaccgtctcctca

SEQ ID NO: 16802 - DNA, 286 bp, Homo sapiens
  source 1..286: mol_type = other DNA
tgcagcctctgggttcaccgtcagtagcaactacatgagctgggtccgccaggctccagggaaggggctggagtgggtctcagttatttatagcggtggtagtacatactacgcagactccgtgaagggtcgattcaccatctccagagacaattccaagaacacgctgtatcttcaaatgaacagcctgagagccgaggacacggccgtgtattactgtgcgaccaccggtataactggaactggggactactggggccagggaaccctggtcaccgtctcctca

SEQ ID NO: 16803 - DNA, 286 bp, Homo sapiens
  source 1..286: mol_type = other DNA
tgcagcctctgggttcaccgtcactaacaactacatgagctgggtccgccaggctccagggaaggggctggagtgggtctcagttatttatagtggtggtagcacatactacgcagactccgtgaagggccgattcaccatctccagagacaattccaagaacacgctgtatcttcaaatgaacagcctgagagccgaggacacggccgtgtattactgtgcgacaaccggtataactggaactggtgactactggggccagggaaccctggtcaccgtctcctca

SEQ ID NO: 16804 - DNA, 286 bp, Homo sapiens
  source 1..286: mol_type = other DNA
tgcagcctctggactcatcatcagtagttatgaaatgaactgggtccgccaggctccagggaaggggctggagtgggtttcatacattagtgatagtggtactaccaaatactacgcagactctgtgaagggccgattcaccatcttcagagacaacgccaagaactcactgtatctgcaaatgaacagcctgagagccgaggacacggctatttattactgtgcgagagggggtggtaacaccctggcatactggggccagggaaccctggtcaccgtttcctca

SEQ ID NO: 16805 - DNA, 286 bp, Homo sapiens
  source 1..286: mol_type = other DNA
tgcagtctctggactcaccttcagtagttatgaaatgaactgggtccgccaggctccagggaaggggctggagtgggtttcatacattagtagtagtggaagtagcatatactacgcagactctgtgaagggccgattcaccatctccagagacaatgccaagaactcactgtatctacaaatgaacagcctgagagccgaggacacggctgtttattactgtgcgagagggggtggtaacaccttggcttactggggccagggaaccctggtcaccgtctcctca

SEQ ID NO: 16806 - DNA, 286 bp, Homo sapiens
  source 1..286: mol_type = other DNA
tgcagcctctggattcaccttcagtagttatgaaatgaactgggtccgccaggctccagggaaggggctggagtgggtttcatacattagtagtagtggtggttccatacactacgcagactctgtgaagggccgattcaccatctccagagacaacgccaagaactcagtgtatctccaaatgaacagcctgagagccgaggacacggctgtttattactgtgcgagagggggtggtaacacccttgcctactggggccaaggaaccctggtcaccgtctcctca

SEQ ID NO: 16807 - DNA, 280 bp, Homo sapiens
  source 1..280: mol_type = other DNA
tgcagcctctggattcaccttcagtagttatgaaatgaactgggtccgccaggctccagggaaggggctggagtgggtttcatacattggtagtggtggtagtaccatatactacgcagactctgtgaagggccgattcaccatctccagagacaacgccaagaactcactgtgtctgcaaatgaacagcctgagagccgaggacacggctgtttattactgtgcgagaggtaggcacctcgcctactggggccagggaaccctggtcaccgtctcctca

SEQ ID NO: 16808 - DNA, 280 bp, Homo sapiens
  source 1..280: mol_type = other DNA
tgcagcctctggattcaccttcagtagtcatgaaatgaactgggtccgccaggctccagggaaggggctggagtgggtttcaaacattggtggtggcgggaattccatatactacgcagactctgtgaagggccgattcaccatctccagagacaacgccaagaactcactgtatctgcaaatgaacagcctgagagccgaggacacggctgtttattactgtgcgagaggaaggcatctcgcctactggggccagggaaccctggtcaccgtctcctca

SEQ ID NO: 16809 - DNA, 283 bp, Homo sapiens
  source 1..283: mol_type = other DNA
tgcagcctctgggttcactttcagttcttactggatgcactgggtccgccgagttccagggaaggggctggtgtgggtctcaagtattcgaggtgatgccaatgacgcggcctacgcgaactccgtgaggggccgagtcaccatctccagagacaacgccaagaacatgctttatctgcaaatggccagtctgggagtcgaagacacggctgtctattactgtacaagagaggcggatggttttgatatctggggccaggggacatcggtcaccgtctcttca

SEQ ID NO: 16810 - DNA, 283 bp, Homo sapiens
  source 1..283: mol_type = other DNA
tgcagcctctggattcagtctcagtgaccactggacacactgggtccgccaggctccaggaaaggggctggtgtgggtctccagtagtaggtatgatggggaagacacagcttacgcgggctccgtgaggggccgattcaccgtctccagagacaacgccaagaacacgctgtatctgcaaatgaacagtctgagagtcgacgacacggctgtatattactgtacaagagaggctgatggttttgatatctggggccaagggacaatggtcaccgtttcttct

SEQ ID NO: 16811 - DNA, 280 bp, Homo sapiens
  source 1..280: mol_type = other DNA
tgcagcctctggattcacctttagcaactatgacatgagttggatgcgccaggctccagggaagggactggagtgggtctcagttgcttatgtcggtggtagtagaacatcctatgcagactccgtgaagggccgattcaccatctccagagatgattccaagaacacggtgtatctacaaatgaacagcctgagagtcggggactcggccgtttattactgtacgaaaggcagctggggcgacaactggggcccgggaaccctggtcaccgtctcccca

SEQ ID NO: 16812 - DNA, 280 bp, Homo sapiens
  source 1..280: mol_type = other DNA
tgcagcctctggattcacctttagtagtcatgacatgagctgggtccgccaggctccagggaaggggctggactgggtctcaactatttatggcggtgagagtggcacatcctatgcagactctgtgaagggccggttcatcatctccagagataattccaagagcacgctgtatctgcaaatgaacagcctgagagccgaggacacggccctatattattgtacgaaagggtcttggggggacaactggggccagggaaccctggtcaccgtctcctca

SEQ ID NO: 16813 - DNA, 289 bp, Homo sapiens
  source 1..289: mol_type = other DNA
tgcagcctctggattcaccttcagtagttatgaatggaattgggtccgccaggctcccgggaaggggctggagtgggtttcatacattgatagtggtggtgatatcatatactacgcggactctgtgaagggccgtttcaccatctccagagacaacgccaagaactcactgtatctgcaaatgaacagcctgggagccgaggacacggctatatattactgtgcgagagacgagcgcggcggggggattgactactggggccagggaaccctggtcaccgtctcctca

SEQ ID NO: 16814 - DNA, 289 bp, Homo sapiens
  source 1..289: mol_type = other DNA
tgcagcctctggattcatattcagtagttatgaaatgaactgggtccgccaggctccagggaaggggctggagtggctttcgtgggttagtagtagtggtagtaccatatactacgcagactctgtgaagggccgattcaccatctccagagacgacgccaagagctcactttatctgcaaatgaacagcctgagagtcgaggacacggctgtttattactgtgcgagagatgaacgaggtggaggtattgactactggggccagggaaccctggtcaccgtctcctca

SEQ ID NO: 16815 - DNA, 292 bp, Homo sapiens
  source 1..292: mol_type = other DNA
cgctgtctctggtggctccatcagtggtaactactggagctggatccgacagcccccagggaagggactggagtggattggatatatctattacactgggaccaccaactacaacccctccctcaagagtcgagtcaccatgtcagtagacacgtccaagagccagttctccctgaagctgacctctgtgaccgctgcggacacggccgtgtattactgtgcgcgactccattactatggttcggaagagtttgactcctggggccagggaaccctggtcaccgtctcctca

SEQ ID NO: 16816 - DNA, 292 bp, Homo sapiens
  source 1..292: mol_type = other DNA
cactgtctctggtggctccatcagtccttactactggagctggatccggcagcccccagggaagggactgcagtacattgggtatatccattacagtgggggcaccaactacagcccctccctcgagagtcgagtcacaatatcagtagacacgtccaagaaccagttctccctgaggctgaactctgtgaccgctgcggacacggccgtgtattactgtgcgcgactgcattattatggttcggaggagtttgactcctggggccagggaaccctggtcaccgtctcctca

SEQ ID NO: 16817 - DNA, 292 bp, Homo sapiens
  source 1..292: mol_type = other DNA
ctctgtctctggtggctccatcagtggttactactggagctggatccggcagtccccagggaagggactggagtggattgggtatgtctattacagtgggagtaccagctacaacccctccctccagagtcgagtcaccatatcagtagacacgtccactaacaagttctccctgaaggtgagctctgtgaccgccgcagacacggccatgtattactgtgcgagacttcactactatggttcggaggaatttgactcctggggccagggaaccctggtcaccgtctcctca

SEQ ID NO: 16818 - DNA, 292 bp, Homo sapiens
  source 1..292: mol_type = other DNA
cactgtctctgatggctccatcagtccttactactggagctggatccggcagcccccaggaaagggactgcagtacattgggtatatctattacaatgggggcaccaactacagcccctccctcgagagtcgagtcaccatatcagtagacacgtcccagaaccagttctccctgaggctcagctctgtgaccgctgcggacacggccgtctattactgtgcgcgactccattattatggttcggaggagtttgactcctggggccagggaaccctggtcaccgtctcctca

SEQ ID NO: 16819 - DNA, 295 bp, Homo sapiens
  source 1..295: mol_type = other DNA
tgcagcctctggattcaccttcagtagctataacatgaactgggtccgccaggctccagggaaggggctggagtgggtctcatccattagtagtagtagtagttacatatactacgcagactcagtgaagggccgattcaccatctccagagacaacgccaagaactcactgtatctgcaaatgaacagcctgagagccgaggacacggctatgtattactgtgcgagagaccttagtggctacgaccccccttttgggtactggggccagggaaccctggtcaccgtctcctca

SEQ ID NO: 16820 - DNA, 295 bp, Homo sapiens
  source 1..295: mol_type = other DNA
tgcagcctctggattcaccttcagtagctataacatgaactgggtccgccaggctccagggaaggggctggagtgggtctcatccattagtagtagtagtagttacatatactacgcagactcagtgaagggccgattcaccatctccagagacaacgccaagaattcactgtatctgcaaatgaacagcctgagagccgaagacacggctgtgtattactgtgcgagagatttaagtggctacgatcctccatttggctactggggccagggaaccctggtcaccgtctcctca

SEQ ID NO: 16821 - DNA, 310 bp, Homo sapiens
  source 1..310: mol_type = other DNA
tgcagcctctggattcaccttcaataatttctgggtgcactgggtccgccaagctccagggaaggggctggtgtgggtcgcacgtgttaatcatgatgggactggcacaagctacgcggactccgtgaagggccgattcaccatctccagagacaacgccaggaacactctgtatctgcaaatgaacagtctgagagccgaggacacggctctctattattgtgtcagagattacggttatgataggagtggctattggcaaaaatactttgactactggggccagggaaccccggtcaccgtctcctca

SEQ ID NO: 16822 - DNA, 310 bp, Homo sapiens
  source 1..310: mol_type = other DNA
tgcagcctctggattcagcttcagtagcttctgggtgcactgggtccgccaagctccagggaaggggctggtgtgggtcgcacgtgttgatcatgatgggactggcacaagctacgcggactccgtgaagggccgattcaccatctccagagacaacgccaggaacactctgtatctacaaatgaacagtctgagagccgaggacacggctctgtattactgtgtaagagattacggttatgataggagtggctattggcaaaaatactttgactactggggccagggaaccccggtcaccgtctcctca

SEQ ID NO: 16823 - DNA, 310 bp, Homo sapiens
  source 1..310: mol_type = other DNA
tgcagcctctggattcaccttcactaccttctggatgcactgggtccgccaagctccaggggaggggctgatgtgggtctcacgtattagcaatgatgggagaagcacaaactatgcggactccgtgaagggccgattcaccatctccagagacaacgccaagaacacggtgtatctgcaaatgaacggtctgagagccgaggacacggctgtctattactgtgtaagagactatggctatgatcggagtggctattggcagaaatactttgactactggggccagggatccctggtcaccgtctcctct

SEQ ID NO: 16824 - DNA, 283 bp, Homo sapiens
  source 1..283: mol_type = other DNA
tgcagcctctggattcaccttcagtagttacgaaatgaactgggtccgccaggctccagggaaggggctggagtgggtttcatgtattagtagtggtggtagtatcatagactacgcagactctgtgaagggccgattcgccatctccagagacaacgccaagaacgcactgtatctgcaaatgaacagcctgagaggcgaggacacggctgtttactactgtgcgagagccccggggggtatggacgtctggggccaagggaccacggtcaccgtctcctca

SEQ ID NO: 16825 - DNA, 283 bp, Homo sapiens
  source 1..283: mol_type = other DNA
tgtagcctctggattcgccttaagtacttatgagatgaactgggtccgccaggctccagggaaggggctggagtgggtttcatacattactaatagtggtaatactatgtactatgcagactctgtgaagggccgattcaccatctccagagacaacgccaagaactcactgtatctgcaaatgaacagcctgggagccgaagacacggctgtttattactgtgcgagagccccaggcggtatggacgtctggggccaagggaccacggtcaccgtctcctca

SEQ ID NO: 16826 - DNA, 286 bp, Homo sapiens
  source 1..286: mol_type = other DNA
tgcagtctctggactcaccttcagcaacaactggatgcactgggtccgtcaaactccagggaaggggctggtgtgggtctcacatattaatagtgatgggagtgacacaacctacgcggactccgtgaagggccgattcaccatctccagagacaacgccaagaacacgttgtatctgcaaatgaacaatctgagagtcgaagacacggctatatattattgtacaagagataacggtgacccctttgactactggggccagggaaccctggtcaccgtctcctca

SEQ ID NO: 16827 - DNA, 286 bp, Homo sapiens
  source 1..286: mol_type = other DNA
tgcagcctccggattcagcttcagtaaccactacatgcactgggtccgccaagcgccagggaaggggctggagtgggtctcacatattgaccgtgatgggacaggcacaggctacgcggactccgtgaagggccgattcaccatctccagagatttcgccaagaacactctgtatctgcaaatgaacagtctgagagtcgaggacacggctgtatattattgtacaagagataacggtgacccctttgactactggggccagggaaccctggtcaccgtctcctca

SEQ ID NO: 16828 - DNA, 286 bp, Homo sapiens
  source 1..286: mol_type = other DNA
tgcggtctctggattcaccttcaccagccactatatgcactgggtccgccaagctccagggaaggggctggtgtgggtctcacatatagattttgatgggagtgccacaacctacgcggactccgtgaagggccgattcaccatctccagggacaacgccaagaacacgctgtatctgcaaatgaacagtctgagagccgaggacacggctgtgtattactgtacaagagacaacggtgacccctttgactactggggccagggaaccctggtcaccgtctcccca

SEQ ID NO: 16829 - DNA, 286 bp, Homo sapiens
  source 1..286: mol_type = other DNA
tgtaggctctagattcaccttcagtagctattggatgaactgggtccgccaggctccagggaaggggctggagtgggtggccaacataaagcaagacggaagtgagacatactatgcggactctgtgaagggccgattcaccatctccagagacaacgccaagaactcacagtttctgcacatgaacagcctgagagccgacgacacggccgtctactactgtgtgggaggttatggctggttacctgactcctggggccagggaaccctggtcaccgtctcctca

SEQ ID NO: 16830 - DNA, 286 bp, Homo sapiens
  source 1..286: mol_type = other DNA
tgcaggctctgaattcacctttagcagctattggatgaactgggtccgccaggctccaggaaaaggtctggagtgggtggccaacataaagcaggatggaagtgaggaatactatgtggactctgtgaagggccgattcaccatctccagagacaacgccaagaactcaatgtatctgcaaatgaacagcctgagaggcgaggacacggccgtgtattactgtgtgggaggctatggttggcttcctgactcctggggccagggaaccctggtcaccgtctcctca

SEQ ID NO: 16831 - DNA, 292 bp, Homo sapiens
  source 1..292: mol_type = other DNA
ttcagcctctggattcaccttcagtaattatgctatgcactgggtccgccagactccagggaagagactgcaatatgtttcagctattaatagtgggtttaacacatactacgcagactccatgaagggcagattcaccatctccagagacaattccaagaacacggtgtatcttcaaatgagcagtctgagacctgaggacacggctgtgtattactgtgtgaaagatcccggacctaacccgcggggaatggacgcctggggccaagggaccacggtcaccgtctcctca

SEQ ID NO: 16832 - DNA, 295 bp, Homo sapiens
  source 1..295: mol_type = other DNA
ctcagtctctggcctcacattcagtaactatgctatgcactgggtccgccaggctccagggaagggactggaatatgtttccggtattactaatactgggactaacacatactacgcagactctctgaagggcagattcaccacctccagagacaattccaagaacactctgtatcttcaaatgagcagtctgagagaggacgacacggctgtttattactgtgtgaaagatcctgggcccaaccccagaggtatggacgcctggggccaagggaccacggtcaccgtttcctca

SEQ ID NO: 16833 - DNA, 295 bp, Homo sapiens
  source 1..295: mol_type = other DNA
ctcagtctctggcctcacattcagtaactatgctatgcactgggtccgccaggctccagggaagggactggaatatgtttccggtattactaatactgggactaacacatactacgcagactctctgaagggcagattcaccacctccagagacaattccaagaacactctgtatcttcaaatgagcagtctgagagaggacgacacggctgtttattactgtgtgaaagatcctgggcccaaccccagaggtatggacgcctggggccaagggaccacggtcaccgtttcctcg

SEQ ID NO: 16834 - DNA, 286 bp, Homo sapiens
  source 1..286: mol_type = other DNA
tgcagcctctggattcaccttcagtagctactggatgcactgggtccgccaagctccagggaaggggctggtgtgggtctcacatattaatagtgatgggaggaccataggctacgcggactccgtgaagggccgattcaccatctccagagacaacgcccagaacacgctgtatctgcaaatgaatagtctaagagccgaggacacggctgtgtattactgtgcaagaggctatgggtcggggcctcactattggggccagggaaccctggtcaccgtctcctca

SEQ ID NO: 16835 - DNA, 286 bp, Homo sapiens
  source 1..286: mol_type = other DNA
tgcagcctctggattcaccttcagtagctactggatgcactgggtccgccaagctccagggaaggggctggtgtgggtctcacgtattaatactgatgggagtaccacaatctacgcggactccgtgaagggccgattcaccatctccagagacaacgccaagagcacgctgtatctgcaaatgagcagtctgagagccgaggacacggctgtgtattactgtgcaagaggctatggttcggggccgcattactggggccagggaaccctggtcaccgtctcctca

SEQ ID NO: 16836 - DNA, 297 bp, Homo sapiens
  source 1..297: mol_type = other DNA
aaggggtctggatacacctttagcgacttctggatcgcctgggtgcgccagaagcccggaaaaggcctggagtggatggggaccatctatcctcgtgactctgatgtcagatatggcccgtccttccacggccaggtcaccatctcagtccacaggtccatcaacaccgcctacttacaattgaacaccctgaaggcctcggacaccgccatatattactgtgcgcgacgtcgcggttcaactgacaacaactggctcgacccctggggccagggaaccctggtcaccgtctcctca

SEQ ID NO: 16837 - DNA, 297 bp, Homo sapiens
  source 1..297: mol_type = other DNA
aagggttctggatacatctttgacgacttctggatcgcctgggtgcgccagaagcccggaaaaggcctggaatggatggggaccatctatcctcgtgactctgatgtcagatatggcccgtccttccaaggccaggtcaccatctcagtccacaggtccatcagcaccgcctaccttcaattgaacaccctgaaggcctcggacaccgccatatattactgtgcgagacgtcgcggttcaacagacaacaactggctcgacccctggggccagggaaccctggtcaccgtctcctca

SEQ ID NO: 16838 - DNA, 297 bp, Homo sapiens
  source 1..297: mol_type = other DNA
cgggcttctggatacaacttcccctactcctggatcgcctgggtgcgccagatgcccgggaaaggcctggagtggatgggtaccatctatcctggtgactctcataccagatacagtccgtccttcctgggccaggtcaccatctcagccgacaggtccatcaccaccgcctacctgcagtggaccagcctgcagccctcggacaccgccgtctatttctgtgcgagacgcagggggagcaccgacaacaactggctcgacccctggggccagggaaccctggtcaccgtctcctca

SEQ ID NO: 16839 - DNA, 298 bp, Homo sapiens
  source 1..298: mol_type = other DNA
cgcagcctctggattcgccttcagtaattatgctctgcactgggtccgccagtctccaagcagggggctggagtggttggcagttctttcatatgatggaagatatcaagactacgcagacgccgtgcggggccgattcaccatttccagggacaattccaagaacattctgtatctgcaaatgtacagcctgggaacggaagacacggctctatattattgcgcgcgagatcgacatagcagtggctggaggctttttgactactggggccaggggaccctggtcaccgtctcctca

SEQ ID NO: 16840 - DNA, 298 bp, Homo sapiens
  source 1..298: mol_type = other DNA
tgcagcctctggattcaccttcagaaattatgctctgcactgggtccgccaggctccaggtagggggctggagtggttggcagttctgtcatctgatgaaactaatagatactacgcagacgccgtgaagggccgattcagcatttccagggacaattccaagagcatgttgtatctgcaaatggacagcctgagaactgaggacaccggtctttattactgcgcgagagacagacatagcagtggctggaggctctttgactactggggccagggaaccctggtcaccgtctcctca

SEQ ID NO: 16841 - DNA, 298 bp, Homo sapiens
  source 1..298: mol_type = other DNA
tgcagcctctggattcaccttcagtggctatgctatgcactgggtccgccaggctccaggcaaggggctggagtgggtggcagttatgtcatatgatggaagtaatgaatactatgcagactccgtgaagggccgattcaccatctccagagacaattccaagaacacgctgtatctgcaaatgaacagcctgacagttgaggacacggctgtgtattactgtgcgagagaccgtcatagcagtggctggcggctctttgactactggggccagggaaccctggtcaccgtctcctca

SEQ ID NO: 16842 - DNA, 286 bp, Homo sapiens
  source 1..286: mol_type = other DNA
tgcagcctctggattcacctttagcaactctcccatgaactgggtccgccagactccagggaaggggctggagtgcgtctcagttatttatagctctggtagcacacactatctagactccgtgaggggccggttcaccatctccagagataattccaagaacacactgtatctgcaaatgaacagcctgcgagccgatgacacggccgtatattactgtgcgaaagatggaggtggatacagctttgatcactggggccagggagccctggtcaccgtctcctca

SEQ ID NO: 16843 - DNA, 289 bp, Homo sapiens
  source 1..289: mol_type = other DNA
tgcagcctctggattcacctttagcagctatgccatgagctgggtccgccaggctccaggaaaggggctggagtgggtctcagttatttatagcggtggtaggagcacatgctttgcagactccgtgaagggccggttcaccatctccagagatgattccaggaacacgctgtatctgcaaatgaacagcctgagagccgaggacacggccatgtatttctgtgcgaaagatggcggtggatacagttttgaccactggggccagggaaccctggtcaccgtctcctca

SEQ ID NO: 16844 - DNA, 297 bp, Homo sapiens
  source 1..297: mol_type = other DNA
gcatctggattctccttcaccagccactatatgcactgggtgcgacaggcccctggacaaggacttgagtggatgggagtgatcaaccctggtggttttaaaacgcactacgcgcagaagttgcagggcagagtcaccctgaccagggacacgtccacgagcacggactacatggagttgagcagcctgagttctgaggacacggccttttattactgtgcgagggatatctcctacgatgataagtcatggtggctcgacccctggggccagggaaccctggtcaccgtctcctca

SEQ ID NO: 16845 - DNA, 297 bp, Homo sapiens
  source 1..297: mol_type = other DNA
gcatctggattcaccttcagcgaccactatatgcactgggtgcgacaggcccctggacaagggcttgagtggatgggaataatcaaccctagtggtgatacgacatggtacgaacagaagttccagggcagagtcaccatgaccagggacacgtccacgagcacagtctacatggagttgagcagcctgaaatctgaagacacggccgtctatttttgtgcgagggatataagttacgacgacaaaagttggtggctcgacccctggggccagggaaccctggtcaccgtctcctca

SEQ ID NO: 16846 - DNA, 286 bp, Homo sapiens
  source 1..286: mol_type = other DNA
tgcagcctctggatttagttttagtaattatcgaatgcactggatccgccaacctccagggaaggggctagtgtgggtctcagatattaggggtgatgcgactatcccaaggtacgcggactccgtgaagggccgattcaccatctccagagacaacgccaagaacacattgtatctgcagatgaacagcctgagtgtcgaagacacggctgtgtatttctgtgtgagggatgagcctggttcgtttgactactggggccagggaatcctggtcaccgtctcctca

SEQ ID NO: 16847 - DNA, 286 bp, Homo sapiens
  source 1..286: mol_type = other DNA
tgcagcctctggattcaccttcagtaaccaccggatgcactgggtccgccacgctccagggaaggggctggtgtgggtctcagatattctcggtgatgggagtgtcccaaggtacgcggactccgtgaagggccgattcaccatctccagagacaacgccaagaacacactgtatctgcaaatgaacagtctgagagttgaggacacggctctatattactgtgtaagagatgaacctggctcatttgactactggggccagggaaccctggtcaccgtctcctca

SEQ ID NO: 16848 - DNA, 286 bp, Homo sapiens
  source 1..286: mol_type = other DNA
tgcagcctctggattcaccttcagtaaccaccggatgcactgggtccgccacgctccagggaaggggctggtgtgggtctcagatattttcggtgatgggagtgtcccaaggtacgcggactccgtgaagggccgattcaccatctccagagacaacgccaagaacacactgtatctgcaaatgaacagtctgagagttgaggacacaggtctatattattgtgtaagagatgaacctggctcatttgactactggggccagggaaccctggtcaccgtctcctca

SEQ ID NO: 16849 - DNA, 283 bp, Homo sapiens
  source 1..283: mol_type = other DNA
tactgtctctggtggctccaccagagattactactggacctggatccggcagaccccagggaggggactggagtgcattgggtatatctattatactgggagcaccaactacaacctctccctcaagagtcgagtcaccatatcagtagacacgtccaagaaccagttctccctgaagctgagttctgtgaccgctgcggacacggccgtttattactgtgcgagagtgacacgagggtactttgactactggggccagggaaccctggtcaccgtctcctca

SEQ ID NO: 16850 - DNA, 283 bp, Homo sapiens
  source 1..283: mol_type = other DNA
cactgtctctggtgcctccatcagtaattactactggacctggatccggctgcccccagggaagggactggagtggattggggatatctattatactgggaacaccaacttcaacccctccctcaagagtcgagtcgccatctcagtagacacgtcccagaaccagttctccctgagtcttacctctgtgaccgctgcggacacggccgtgtattattgtgcgagagtgacgaggggatactttgactattggggccagggaaccctggtaaccgtctcctca

SEQ ID NO: 16851 - DNA, 280 bp, Homo sapiens
  source 1..280: mol_type = other DNA
tgcagcctctggattcatctttagaagttattggatgggctgggtccgccaggctcctggtaaggggctggagtgggtggccgacataaagcacgatggcagtgagggatactacttggactctgtgcagggccgattcaccatctccagagacaacgtcaagaacttactgtatctgcaaatgaacagcctgagacccgaggacacggctgtgtattattgtacgagagatgactacattgactcctggggccagggaaccctggtcaccgtctcctca

SEQ ID NO: 16852 - DNA, 280 bp, Homo sapiens
  source 1..280: mol_type = other DNA
tgcagcctctggattcacctttgcgaattattggatggcctgggtccgccaggctccagggcaggggctggagtgggtggcccacataacccgagatggaagagccgcaaactacgtggactctgtgaagggccgattcaccatctccagagacaacaccaggaattcagttgatctgcaaatgaatagcctaagagccgaggacacggctatttattactgtacaagagatgactacattgactcttggggccagggaaccctggtcaccgtctcctca

SEQ ID NO: 16853 - DNA, 286 bp, Homo sapiens
  source 1..286: mol_type = other DNA
tgcagcctctgggtttatcttcagtgatttttggatggcctgggtccgccaggctccagggagggaactggagtgggtggccaacataaatcgagatggaagtgagcaaaactatgtggactctgtgaagggccgattcaccatctccagagacaacgccaagaattcactgtatctgcaaatgagtagcctgagagccgaagacacgggtgtatattattgtacgacgaggtctagggggactttagactactggggccagggaaccctggccagcgtctcctca

SEQ ID NO: 16854 - DNA, 286 bp, Homo sapiens
  source 1..286: mol_type = other DNA
tgtagcctctggattaaccttcaatacttattggatggcctgggtccgccaggctccagggaaggggctggagtgggtgggcaacataaatggagatggaagtgagcaaaactatgtggactctgtgaagggccgattcatcatctccagagacaacgccaggaactcactgtatctgcaaatgagcagcctgagagccgaagacacggctgtatattactgtacgacgaggtctagggggactttagactactggggccagggaaccctggtccacgtctcctca

SEQ ID NO: 16855 - DNA, 286 bp, Homo sapiens
  source 1..286: mol_type = other DNA
tgcagcctctggattcacctttagtagttattggatggcctgggtccgccaggctccagggaaggggctggagtgggtggccaacataaatcgagatggaagtgagcaaaactatgtggactctgtgaagggccgattcaccatctccagagacaacgccaagaattcactgtatctgcaaatgagtagcctgagagccgaagacacgggtgtatattactgtacgacgaggtctagggggactttagactactggggccagggaaccctggccagcgtctcctca

SEQ ID NO: 16856 - DNA, 286 bp, Homo sapiens
  source 1..286: mol_type = other DNA
tgcagcctctggattcatctttagtaatttttggatgagttgggtccgccagagtcccgggaaagggctggagtggctggccaacataaaagaagatggaagtgacaaaaactatctgggctctgtgaggggccgattcaccatctccagagacaacgccaagaattcactgtatctgcaaataaacaacctgagagccgacgacacggccgtatattactgtacgactcgcagtcggggaacccttgactactggggccagggaaccctggtcaccgtctccgca

SEQ ID NO: 16857 - DNA, 301 bp, Homo sapiens
  source 1..301: mol_type = other DNA
cactgtctccggtgactccatcggcagtagtagttactactggggctggatccgccagcccccagggaaggggctggagtggattggaaatatcttttatactgggagagcctactacaacccgtccctcaagagtcgagtcaccatatccgtggacacgtccaagaaccagttctccctgaagctgagctctgtgaccgccgcagacacggctgtctattactgtgcgaggcatcttatgattacttttggggggcttcccgactactggggccagggaaccctggtccccgtctcctca

SEQ ID NO: 16858 - DNA, 298 bp, Homo sapiens
  source 1..298: mol_type = other DNA
cactgtctctggtgactccgtcactagcagttactactggggctggatccgccagcccccagggaagggcctggagtggcttgggaatatgtactatactgggaccacctactacaacccgtccctcaagagtcgagtcaccatttcggtggacacgtccaagaaccagttctccctgaagctgacctctgtgaccgccgcagacacggctttttattactgtgcgagacatcttatgattacatttgggggacttccggactactggggccagggaaccctggtcaccgtctcctca

SEQ ID NO: 16859 - DNA, 283 bp, Homo sapiens
  source 1..283: mol_type = other DNA
tgcagcctctggattcacctttagtgactattggatgacctgggtccgccaggctccagagaaggggctggagtgggtggccagcataaaagaggatggaagtgacaagtactatgtggactctgtgaagggccgattcaccatctccagggacaacgccaagagttcactgtatctgcaaatgaacagcctgagaggcgaggacacggcagtgtattactgtgcgagatatgttcgtgcatttgactactggggccagggagccctgatcaccgtctcttca

SEQ ID NO: 16860 - DNA, 283 bp, Homo sapiens
  source 1..283: mol_type = other DNA
tgcagcctctggattcacctttagtaggtattggatgacctgggtccgccaggctccagggaaggggctggagtgggtggccaacataaaggaagatggaagtgagaaatactatgtggactctgtgaggggccgattcaccatctccagagacaactccaaaagctcactgtatctgcaaatggacagcctgagagtcgaggacacggctgtgtattactgtgcgagatatgttagggcctttgactactggggccggggaatactggtcatcgtttcctca

SEQ ID NO: 16861 - DNA, 289 bp, Homo sapiens
  source 1..289: mol_type = other DNA
caatgtctctggtggctccatcagtagttactactggagctgggtccggcagcccccagggaagggactggagtggattgggtatatctattacagtgggagcaccaattacaacccctccctcaagagtcgagtcaccatatcactggacacgtccaagaaccagttctccctgaagctgagctctgtgaccgccgcagacacggccgtgtattactgtgcgagacatggggatggctacaacccgttgaactactggggccagggaaccctggtcaccgtctcctca

SEQ ID NO: 16862 - DNA, 289 bp, Homo sapiens
  source 1..289: mol_type = other DNA
cactgtctctggtggctccatcagtagttactactggagttggatccggcagcccccagggaagggactggagtggattgggtacatctattacagtgggagcaccaactacaacccctccctcaagagtcgagtcaccatgtcactcgacacgtctaagaaccagttctccctgaagctgagttctgtgaccgccgcagacacggccgtgtattactgtgcgagacacggagatggctacaaccccttaaactactggggccagggaaccctggtcaccgtctcctca

SEQ ID NO: 16863 - DNA, 283 bp, Homo sapiens
  source 1..283: mol_type = other DNA
tgcagcctctggattcacctttggtgattatggcatgagctgggtccgccaagctccagggaaggggctggagtgggtctctggtattaattggaatggtgataacataggtgatttagactctgtgaagggccgattcaccatctccagagacaacgccaagaactccctgtatctgcaaatgaacagtctgagagtcgacgacacggccttgtattattgtgcgagaggttcgggtgccggggattactggggccagggaaccctggtcaccgtctcctca

SEQ ID NO: 16864 - DNA, 283 bp, Homo sapiens
  source 1..283: mol_type = other DNA
tgtagcctctggattcaactttggtgattatggcatgaactgggtccgccaagctccagggaaggggctggagtgggtctctgccattaattggaatggtgatactctcggttatgccgactctgtgaagggccgatttaccatctccagagacaacgccaacaactccctgtacttgcacatgaacagtctgagagccgaggacacggccttctactactgtgcgaggggcagtggggccggggactactggggccagggaagcctggtcatcgtctctcca

SEQ ID NO: 16865 - DNA, 298 bp, Homo sapiens
  source 1..298: mol_type = other DNA
tgcagcctctggattcgctttcagtacctactggatgcactgggtccgccaagctccagggaaggggctggtgtgggtctcacgtattaatagtgatgggagcagcacaaactacgcggactccgtgaagggccgattcaccatctccagagacaacgccaagaacacgctgtatttgcaaatgaacagtctgacagccgaggacacggctatttattactgtgcaagagcaagttatagttcggggacttattataatgactactggggccagggaaccctggtcaccgtctcctca

SEQ ID NO: 16866 - DNA, 298 bp, Homo sapiens
  source 1..298: mol_type = other DNA
tgtagcctctggattcaccttcagtaactactggatgcactgggtccgccaagctgcagggaaggggctggtgtgggtctcacgtattaagagtgacgggagtgtcacaaacaccgcggactccgtgaagggccgattcaccacctccagagacaacgccaagaacacactgtatctgcaaatgaacagtctgagagccgaggacacggctgtgtattactgtgcaagagcatcttatagttcggggacttattataatgactactggggccagggaaccctggtcaccgtctcctca

SEQ ID NO: 16867 - DNA, 298 bp, Homo sapiens; identical to SEQ ID NO: 16866
  source 1..298: mol_type = other DNA

SEQ ID NO: 16868 - DNA, 316 bp, Homo sapiens
  source 1..316: mol_type = other DNA
cactgtctctggtggctccatcagtagttactactggacctggatccggcagcccccagggaagggactggagtggattgggtatatctattacagtgggagcaccagtgggagcaccaactacaacccctccctcaagagtcgagtcaccatatcagtagacacgtccaagaaccagttctccctgaagctgagctctgtgaccgctgcggacacggccgtgtattactgtgcgagaggggagggagaggggaaatactactactactacggtatggacgtctggggccaagggaccacggtcaccgtctcctca

SEQ ID NO: 16869 - DNA, 310 bp, Homo sapiens
  source 1..310: mol_type = other DNA
cactgtctctggtggctccatcagtagttactactggagctggatccggcagcccccagggaagggactggagtggattgggtatatctattacagtgggagcaccaactacaactacaacccctccctcaagagtcgagtcaccatatcagtagacacgtccaagaaccagttctccctgaagctgagctctgtgaccgctgcggacacggccgtgtattactgtgcgagaggggagggagaggggaaatactactactactacggtatggacgtctggggccaagggaccacggtcaccgtctcctca

SEQ ID NO: 16870 - DNA, 304 bp, Homo sapiens
  source 1..304: mol_type = other DNA
cagtgtctctggtggctccatcagtagctcctactggacctggatccggcagcccccagggaagggactggaatggattgggtatatctattacagtgggagcaccaactacaacccctccctcaagagtcgagtcaccatatcagtagacacgtccaagaatcagttctccctgaagctgagctctgtgaccgctgcggacacggccgtgtattactgtgcgagaggagagggtgaggggaagtactactactattacggtatggacgtctggggccaagggaccatggtcaccgtctcctca

SEQ ID NO: 16871 - DNA, 285 bp, Homo sapiens
  source 1..285: mol_type = other DNA
tcatctggatacaccttcaccaactactatatgcactgggtgcgacaggcccctggacaagggcttgagtggctgggaatggtcatctctagtggtggtgccacgatctacgcacagaagctccagggcagagtcaccttgaccagagacacgtccacgagcactgtctacatggaacttagcagcctgagatctgaggacacggccgagtattactgtgtgagagagttccgcggaggaacttttgactactggggccagggaaccctggtcaccgtctcctca

SEQ ID NO: 16872 - DNA, 285 bp, Homo sapiens
  source 1..285: mol_type = other DNA
gcgtctggatactccttcaccagctacttgatacactgggtgcgacaggcccctggacaagggcttgagtggatgggaataatcggctcaggtgatggtggcacaacatatgcacagaacctccagggcagagtcatcatgaccagggacacgtccacgagcacagtctacatggagctgagcagcctgagatttgaggacacggccgtgtattactgtgtgagggaatttcgaggtggcacttttgactactggggccagggaaccccggtcaccgtctcctca

SEQ ID NO: 16873 - DNA, 274 bp, Homo sapiens
  source 1..274: mol_type = other DNA
tgcagcctctggactcaattttcgcacctatggcatgagttgggtccgccaggctccagggaaggggctggagtgggtctcaactattagtggcagtggtggtaacatacactacgcagagtccgtgaagggccggttcaccatctccagagacaattccaagaacacactgtctctgcagatgaacagcctgcgagccgaggacacggccctatattactgtgcgcaaaacgggggctactggggccggggaaccctggtcaccgtctcctca

SEQ ID NO: 16874 - DNA, 274 bp, Homo sapiens
  source 1..274: mol_type = other DNA
tgtagcctctggactcacctttaacagatatggcatgacctgggtccgccaggctcccgggaaggggctggaatgggtctcactaataactggcagtgggggaagcacatactacgcagactccgtgaagggccggttcaccatctccagagacaattccaagaacacgctgtatttgcagatgaacagcctgagaaccgaggacacggccgtatattactgtgcgcaaaacgggggatactggggccagggaatcctggtcattgtctcctca

SEQ ID NO: 16875 - DNA, 297 bp, Homo sapiens
  source 1..297: mol_type = other DNA
gcatctggatacacattcagcagctattatatgcactgggtgcgacaggcccctgggcaaggacttgagtggatgggaataatcaaccctagtggtgatagcacaacctacgcacagaagttccagggcagagtcaccatgaccaggcacacgtccacgagcacagtttacatggaattgagcagcctgagagctgaggacaaggccgtgtattactgtgcgagtgggacgggtgaccacgcatcaatatggagtatggacgtctggggccaagggaccacggtcatcgtctccgca

SEQ ID NO: 16876 - DNA, 297 bp, Homo sapiens
  source 1..297: mol_type = other DNA
gcatctggatacacattcagcagctattatatgcactgggtgcgacaggcccctgggcaaggacttgagtggatgggaataatcaaccctagtggtgatagcacaacctacgcacagaagttccagggcagagtcaccatgaccaggcacacgtccacgagcacagtttacatggaattgagcagcctgagagctgaggacacggccgtgtattactgtgcgagtgggacgggtgaccacgcatcaatatggagtatggacgtctggggccaagggaccacggtcatcgtctccgca

SEQ ID NO: 16877 - DNA, 289 bp, Homo sapiens
  source 1..289: mol_type = other DNA
tgcagcctctggattcaccttcagtgactactacatggactgggtccggcaggcgccagggaagggactggagtgggttggccgttctagaagtagtgccaggagttacaccacagaatacgccgcgtctgtgaagggcagattcaccatctcaagagatgcctcaaagaactcactgtatctgcaaatgaatggcctgagaaccgaggacacggccatatattattgtgttagaggttttcgcggtttggacgtctggggccaggggaccagggtcaccgtctcctca

SEQ ID NO: 16878 - DNA, 289 bp, Homo sapiens
  source 1..289: mol_type = other DNA
cgtagcctctggattcaccctcagtgaccgctacatggactgggtccgccaggctccagggaaggggctggagtgggttggccgtagtagaaacaaagctaacagttacaccacagaatacgccgcgtctgtgcaaggcagattcaccatctcaagagatgattcaaagaactcactgtctctgcaaatgaacagcctgaaaagcgaggacacggccatatattactgtgtaagagggttccgtggtttggacgtctggggccaagggaccacggtcaccgtctcctca

SEQ ID NO: 16879 - DNA, 271 bp, Homo sapiens
  source 1..271: mol_type = other DNA
tgctgcctctggattcacctttagaagttattggatgagctgggtccgccaggctccagggaaggggctggagtgggtggccagcataaaggaagatggaagtgagaaatactatgtggactctgtgaagggccgattcaccatttccagagacaacgccaagaactcactgaatctgcaaatgaacagcctgagagccgaggacacggctgtgtattactgtgcgagaggttacctctggggccagggaaccctggtcaccgtctcctca

SEQ ID NO: 16880 - DNA, 271 bp, Homo sapiens
  source 1..271: mol_type = other DNA
tgcagcctctggattcacctttactacgtcttggatgagctgggtccgccagcctccagggaaggggctggagtgggtggccaacataaaggaggatggaagtgaaagatactatgtggactctgtgaagggccgattcaccatctccagcgacaacgccaagaattcactgtatctgcaaatgaacagcctgagggccgaggacacggctgtatatttctgtgcgagaggttacctctggggccagggaaccctggtcaccgtctcctca

SEQ ID NO: 16881 - DNA, 294 bp, Homo sapiens
  source 1..294: mol_type = other DNA
gcttctggatacaccttcaccgattatgatatcagctgggtgcgacaggccactggacaaggacttgagtggatgggatggataaatgctaacagtggtagcacagactatctacagaggttccagggcagagtcaccatgaccagggacacttccaaaaccacagcctacatggaactgagcagcctgacatttgaggacacggccgtgtattattgtgccagaggtggagtaccggggcagcagctgccccgggactactggggccagggcaccctggtcaccgtctcctca

SEQ ID NO: 16882 - DNA, 294 bp, Homo sapiens
  source 1..294: mol_type = other DNA
gcttctggattcaccttcaccaattatgatatcaactgggtgcgacaggccactggacaagggcttgagtggatgggatgggtgaattctaatagtggtaacacaggctatgcacagaagttccagggcagggtcaccatgaccagggacacctccacaagcacagcctacatggagctcagcagactgcgatctgaggacacggccgtctattactgtgcgagaggcggggtccccgggcagcagctgccaagggactactggggccagggaaccctggtcaccgtctcctca

SEQ ID NO: 16883 - DNA, 294 bp, Homo sapiens
  source 1..294: mol_type = other DNA
gcttctggatacagcttcaccaattatgatatcagctgggtgcgacaggccactggacaagggcttgagtggctgggatgggtaaattgtgacagtggtaacacaggctatgcaccaaagttccgggacagagtcaccatgaccagggacgcctccataaccacagtctacatggacctgagcggcctgaaatctgaggacacggccgtctattactgtgcgagaggcggggtccccgggcagcagctgccaagggactactggggccagggaaccctggtcaccgtctcctca

SEQ ID NO: 16884 - DNA, 294 bp, Homo sapiens
  source 1..294: mol_type = other DNA
gcttctggatacagcttcaccgattacgatatcagctgggtgcgacaggccactggacaagggcttgagtggctgggatgggtaaattgtaacagtggtaacacaggctatgcacagaagttccagggcagagtcaccatgaccagggacacctccataaccacagcctacatggagctgagcggcctgagatctgaggacacggccgtctatttctgtgcaagaggcggggtccccgggcagcagctgccaagggactactggggccagggaaccctggtcaccgtctcctca

SEQ ID NO: 16885 - DNA, 294 bp, Homo sapiens
  source 1..294: mol_type = other DNA
gcttctggattcaccttcaccaattatgatatcaactgggtgcgacaggccactggacaagggcttgagtggatgggatgggtgaattctaatagtggtaacacaggctatgcacagaagttccagggcagggtcaccatgaccagggacacctccacaagcacagcctacatggagctcagcagactgcgatctgaggacacggccgtctattactgtgcgagaggcggggtccccgggcagcagctgccaagggactaccggggccagggaaccctggtcaccgtctcctca

SEQ ID NO: 16886 - DNA, 294 bp, Homo sapiens; identical to SEQ ID NO: 16882
  source 1..294: mol_type = other DNA

SEQ ID NO: 16887 - DNA, 295 bp, Homo sapiens
  source 1..295: mol_type = other DNA
ggcttctggatactccttcaccaattatgatataaattgggtgcgacgggccactggacaagggctagagtggataggatgggtgaatgctagcagtggtaagacagattatgcacaaaaatttcgcggcagagtcaccgtgaccagggacacctccataaatacagcctacatggagctgcatagcctggcatctgacgacacggccgtctattactgtgcgagaggcggggtccccgggcagcagctgccaagggactactggggccagggaaccctggtcaccgtctcctca

SEQ ID NO: 16888 - DNA, 295 bp, Homo sapiens
  source 1..295: mol_type = other DNA
cactttgtctggtggctccatcagcagtgctggttactactggacctggatacgcctgtattcagggaggggccttgagtggattgggaacatcgactacagtggggctacccgctacaacccgtccctcaagagtcgacttaccgtttcggtggacacgtctaagaaccagttctccctgaacctgaggtctgtgagtgccgcggacacggccgtctattactgtgccagagggactcgttggtcctggtacttcgatctctggggccgtggcgccctggtcactgtctcctca

SEQ ID NO: 16889 - DNA, 295 bp, Homo sapiens
  source 1..295: mol_type = other DNA
cactgtctctggtggctccatcagcagggatggttactactggagctggatccgccagcacccagggaagggcctggagtacattgggtacatctcttacactgggaacaccgactacaacccgtccctccggagtcgactaaccatgtcaatagacacgtctaagaaccagttctccctgaagttgacctctgtgactgccgcggacgcggccgtctattactgtgcgagaggcactaggtggtcctggtacttcgatctctggggccgtggcaccctggtcactgtctcctca

SEQ ID NO: 16890 - DNA, 295 bp, Homo sapiens
  source 1..295: mol_type = other DNA
cactgtctctggtggctccatcagcagggatggttactactggagctggatccgccagcacccagggaagggcctggagtacattgggtacatctcttacactgggaacaccgactacaacccgtccctccggagtcgactaaccatgtcaatagacacgtctaagaaccagttctccctgaagttgacctctgtgactgccgcggacgcggccgtctattactgtgcgagaggcactaggtggtcctggtacttcgatctctgggaccgtggcaccctggtcactgtctcctca

SEQ ID NO: 16891 - DNA, 280 bp, Homo sapiens
  source 1..280: mol_type = other DNA
tgcagcctctggattcacctttagtagctattggatgacctgggtccgccaggctccagggaaggggctggagtgggtggccaacataaagcaagatggaagtgaacaatactatgtggactctgtgaagggccgattcaccatctccagagacaacgccaagaactcactgtatctgcaaatgaacagcctgagagccgaggacacggctgtgtattactgtgcgagaggatatagtggctcccactggggccagggatccctggtcaccgtctcttca

SEQ ID NO: 16892 - DNA, 280 bp, Homo sapiens
  source 1..280: mol_type = other DNA
tgcagtctctggattcaccgttaatacctattggatgaactgggtccgccaggctccagggaaggggctggagtgggtggccaacataaagcaagatggaagtgagaaaaactatgtggactctgtgaagggccgattcaccatctccagagacaacgccaagaactcactgtatctgcaaatgaacagcctgagagccgaggacacggcctattattattgtgcgagagggtatagcggcagccactggggccagggaaccctggtcaccgtctcctca

SEQ ID NO: 16893 - DNA, 298 bp, Homo sapiens
  source 1..298: mol_type = other DNA
tggagcctctggattcatcttcagtcaatatgaattccaatgggtccgccagcctccagggaaggggctggagtggatttcatacattactagtagtggtagtgacatactctacgcagactctgtgaagggccgattcaccatgtccagagacaacgccaagaattctctgtatctacaaatgaacaacctgagagccgaagacacggctgtttattactgtgcgagagaaagggagaattgtggtggtgactgcttggactactggggccagggaaccctggtcaccgtctcctca

SEQ ID NO: 16894 - DNA, 298 bp, Homo sapiens
  source 1..298: mol_type = other DNA
tgcagcctctggatttaccttcagtgattatgaaatgacctgggtccgccaggctccagggaaggggctggagtggctttcatacattactcctagtggcggtgccataaactacgcagactctgtgaagggccgattcaccgtctccagagacaactccaagaactcactgtatctgcatatgaacagcctgagagccgaggacacggctctttattactgtgcgagggagcgagaaaattgtggtggtgattgcctcgactactggggccagggaaccctggtcaccgtctcctcg

SEQ ID NO: 16895 - DNA, 295 bp, Homo sapiens
  source 1..295: mol_type = other DNA
tgcaccctctggattcattttcaatacctatggcatgcactgggtccgccaggctccaggcaaggggctggagggggtggcagttatatcaggtgatggaagttctacattctatagagactccgtggagggccgattcaccatctccagagacaacgccaagaacaccctgtatctgcaaatgaacagcctgagagttgaggacacggctgtgtattactgtgtgagagatggcggaggtggctacaatcagattgactactggggccaggggacgttggtcaccgtctcctca

SEQ ID NO: 16896 - DNA, 295 bp, Homo sapiens
  source 1..295: mol_type = other DNA
tgcagcctctggattcaccttcagtagttatggaatgcagtgggtccgcctggtcccaggcaaggggctggagtgcgtgggagttataggacatgatggaaatagtgaatactacgcaggctccgtgaagggccgattcagcatttccagagacaatttcaagaatatgctgtatctgcaaatggacggcctgagagctgaggacacggcaatatattactgtgtgcgagatgggggaggtggctacaatcaaattgattactggggccagggaatcctggtcaccgtgtcctca

SEQ ID NO: 16897 - DNA, 295 bp, Homo sapiens
  source 1..295: mol_type = other DNA
tgcagcctctggattcaccttcagaagttatgcaatgcactgggtccgcctggtcccaggcaaggggctggagtccgtgggagttgtaggacgtgatgaaaatgaaaaatactacgcaggctccgtgaagggccgattcaccatctccagagacaattttgagaatattctgtatctgcaaatggacggcctgagagctgaagacacggcaacatatttctgtgtgcgagatgggggaggcggctacaatcaaattgattactggggccagggaatcgtggtcaccgtgtcctca

SEQ ID NO: 16898 - DNA, 295 bp, Homo sapiens
  source 1..295: mol_type = other DNA
tgcagcctctggattcacctttggtgattatggcatgagctgggtccgccaacctccagggaaggggctggagtgggtctctggtattaattggaatggtcgtagcacaggttatgcagactctgtgaagggccgattcaccatctccagagacaacggcaagaacaccctgtatctgcaaatgaacagtctgagcgccgaggacacggccttgtattactgtgcgagagggaactaccatggttcggggagccttgactactggggccagggaaccctggtcaccgtctcctca

SEQ ID NO: 16899 - DNA, 295 bp, Homo sapiens
  source 1..295: mol_type = other DNA
tgcagcctctggattcacctttggtgattatggcatgagctgggtccgccaagctccaggaaaggggctggagtgggtctctggtattaattggaatggtcgtagcagaggttatgcagactctgtgcagggccgattcaccgtctccagagacaacgccaagaactccctgtatttgcaaatgaacagtctaagagacgaggacacggccttctattactgtgcgagaggaaattaccatggttcggggagtttagactactggggccagggaaccctggtcaccgtctcctca

SEQ ID NO: 16900 - DNA, 271 bp, Homo sapiens
  source 1..271: mol_type = other DNA
cactgtctctggttactccatcagcagtggttactactggggctggatccggcagcccccagggaaggggctggagtggattgggagtgtccatcatagtgggagcacctactacaacccgtccctcaagagtcgagtcaccatctcaatggacacgtccaagaatcagttctccctgaagctgagctctgtgaccgccgcagacacggccgtctattactgtgcgagagatgtccactggggccagggaaccctggtcaccgtctcctca

SEQ ID NO: 16901 - DNA, 271 bp, Homo sapiens
  source 1..271: mol_type = other DNA
cactgtctctgattattccatcagcagtaatttccactggggctgggtccggcagccccccgggaagggtctggagtggattggcgttctctatcaaactgaactcacctcctacaacccgtccctccggagtcgagtcaccatatcactagactcgtcccagaatcagttctccctgaagttgacctctgtgaccgccgctgacacggccgtctattactgtgcgagagatgtacactggggccagggaaccctggtcaccgtctcctca

SEQ ID NO: 16902 - DNA, 271 bp, Homo sapiens
  source 1..271: mol_type = other DNA
cactgtctctgattattccatcagcagtaatttccactggggctgggtccagcagccccccgggaagggtctggagtggattggcgttctctatcaaactgaactcacctcctacaacccgtccctccggagtcgagtcaccatatcactagactcgtcccagaatcagttctccctgaagttgacctctgtgaccgccgctgacacggccgtctattactgtgcgagagatgtacactggggccagggaaccctggtcaccgtctcctca

SEQ ID NO: 16903 - DNA, 276 bp, Homo sapiens
  source 1..276: mol_type = other DNA
acctccggttacacctttagcacctatgttatcagctgggtgcgacaggcccctggacaaggacttgagtggatgggatggatcaaccctaacaatgggaacacaaagtatgcacagaacctccagggcagagtcaccatgaccacagacacatccacgagcacagcctacatggagctgaggagcctggaatctgacgacacggccgtatattactgtgcgagacggtcatttttggacgtctggggccaagggaccacggtcaccgtctcctca

SEQ ID NO: 16904 - DNA, 276 bp, Homo sapiens
  source 1..276: mol_type = other DNA
gcttctggctacagttttaccagctttggtatcagctgggtgcgacaggcccctggacaagggcttgagtggatgggatggatcaaccctaacaatgggaggataacctatgcacagacactccagggcagagtcaccatgaccacagacacatccacgagcacagcctacatggagctgaggagcctgagatctgacgacacggccgtgtattactgtgcgagaaggtcatttctggacgtctggggccaagggaccacggtcaccgtctcctca

SEQ ID NO: 16905 - DNA, 300 bp, Homo sapiens
  source 1..300: mol_type = other DNA
acttcaggatacaccttcatcaattatgatatcaattgggtgcggcaggccagtggacaaggacttgagtggatgggatggatgaaccctaaaagtggtaatacaggctatgcgcagaagttccagggcagagtcacgatgaccagggatacgtccactggtacagcctacatggagttgagcaatttgagattagacgacacggccgtgtattattgtgcgagaccccctgaaaccagtggctggtaccggaattgcttcgacccctggggccagggaaccctggtcaccgtctcctca

SEQ ID NO: 16906 - DNA, 300 bp, Homo sapiens
  source 1..300: mol_type = other DNA
gcctccggatataccttcatcaactacgatatcaactgggtgcgacaggccccaggacaagggcttgagtggctgggatggatgaaccctaaaactggcaatacaggctatgcagagaagttccagggcagaatcaccatgaccaggaacaccgccataagtacagcctacatggagctgagcagcctgacagctgaggacacggccatgtattattgtgcgaggcccccggaaaccagtggctggtaccgcaactgcttcgacccctggggccagggaaccctggtcaccgtctcctca

SEQ ID NO: 16907 - DNA, 300 bp, Homo sapiens
  source 1..300: mol_type = other DNA
gcctccggatataccttcatcaactacgatgtcaactgggtgcgacaggccccaggacaagggcttgagtggctgggatggatgaaccctaaaactggcaatacaggctatgcagagaagttccagggcagaatcaccatgaccaggaacaccgccataagtacagcctacatggagctgagcagcctgacagctgaggacacggccatgtattattgtgcgaggcccccggaaaccagtggctggtaccgcaactgcttcgacccctggggccagggaaccctggtcaccgtctcctca

SEQ ID NO: 16908 - DNA, 300 bp, Homo sapiens; identical to SEQ ID NO: 16906
  source 1..300: mol_type = other DNA

SEQ ID NO: 16909 - DNA, 274 bp, Homo sapiens
  source 1..274: mol_type = other DNA
tgaagtctctggatccaccttcagtagctactggatgcactgggtccgccaagctccagggaaggggctggtgtgggtctcacatattaataatgatgggagtgggacaacctacgcggactccgtgaagggccgattcaccatctccagagacaacgccaagaacacgctgtatctgcaaatgaacagtctgagagccgaggacacggctgtgtattactgtttaagatcttttgacacctggggccagggaaccctggtcaccgtctcctca

SEQ ID NO: 16910 - DNA, 274 bp, Homo sapiens
  source 1..274: mol_type = other DNA
tgcagcctctgggttcaccttcagtacctactcgatgacctgggtccgccaagttccaggaaagggactggcgtgggtctcacgtattactgctgatggaaggaccacaaactacgcggactccgtgaagggccggttcaccatctccagagacaacgccaagaacacgctgtatttgcaaatgaacagtctgagagtcgaggacacggctgtttattattgtttaagaagttttgacacatggggccagggaacgctggtcaccgtctcctca

SEQ ID NO: 16911 - DNA, 274 bp, Homo sapiens
  source 1..274: mol_type = other DNA
tgaagtctctggatccaccttcagtagccactggatgcactgggtccgccaagctccagggaaggggctggtgtgggtctcacatattaataatgatgggagtgggacaacctacgcggactccgtgaagggccgattcaccatctccagagacaacgccaagaacacgctgtatctgcaaatgaacagtctgagagccgaggacacggctgtgtattactgtttaagatcttttgacacctggggccagggaaccctggtcaccgtctcctca

SEQ ID NO: 16912 - DNA, 297 bp, Homo sapiens
  source 1..297: mol_type = other DNA
gcttctggttacacctacaccagttatggtatcatctgggtgcgacaggcccctggacaagggcttgagtggatgggatggatcggtccaaacaatgtaaagacaagatatgcacaaaacgtccagggcagagtcaccctgaccacagacacagccacgagcacagcctacatggaggtgaggagcctgagatctgacgacacggccgtatattattgtgcgagagggtcggtggaactacgggactactactacatggacgtctggggcacagggaccacggtcaccgtctcctca

SEQ ID NO: 16913 - DNA, 297 bp, Homo sapiens
  source 1..297: mol_type = other DNA
gcttctggttacaccttttccagttatggtatcatctgggtgcgacaggcccctggacaagggcttgagtggatgggatggatcggtagaaacaatgtaaacacaagatatgcacaaaacctccagggcagagtcaccatgaccacagacacagccacgagcacagcctacatggaggtgacgagcctgagatctgacgacacggccgtgtattactgtgcgagagggtcggtggaactacgggactactactacatggacgtctggggcacagggaccacggtcaccgtctcctca

SEQ ID NO: 16914 - DNA, 297 bp, Homo sapiens
  source 1..297: mol_type = other DNA
gcttctggttacaactttgtcaggtatggtatcaactgggtgcgacaggcccctggacaggggcttgagtggttgggatggaacagcccttacaatggtcagacaaactatgcacagaaagtccagggcagagtcaccatgaccacagacacatccacgaccacagcctacatggacctgaggagcctggggtctgacgacacggccgtgtattactgtgcgagagggagtgtggaactacgtgactattactacatggacgtctggggcaaagggaccacggtcaccgtctcctca

SEQ ID NO: 16915 - DNA, 297 bp, Homo sapiens
  source 1..297: mol_type = other DNA
gcttctggttacacctttatcaactatggtatcatctgggtgcgacaggcccctggacaagggcttgagtggatgggatggatcggcgcttacaagagcaatacaaaatatgcacagaagctccagggcagagtcaccatgaccacagacacatccacgagcacagtctacatggaactgaggagtctgacatctgacgacacggccgtgtattactgtgcgagagggagtgtggaactacgtgactattactacatggacgtctggggcaaagggaccacggtcaccgtctcctca

SEQ ID NO: 16916 - DNA, 297 bp, Homo sapiens
  source 1..297: mol_type = other DNA
gcttctggttacaactttatcagatatggtatcaactgggtgcgacaggcccctggacaggggcttgagtggttgggatggaacagcccttccaatggtaagacaaactatgcacagaaactccagggcagagtcaccatgaccacagacacatccacgagcacagcctacatggacctggggagcctggggtctgacgacacggccgtttattactgtgcgagagggagtgtggaactacgtgactactactacatggacgtctggggcaaagggaccacggtcaccgtctcctca

SEQ ID NO: 16917 - DNA, 277 bp, Homo sapiens
  source 1..277: mol_type = other DNA
tgcagcctctgggttcaccgtcagtagcacctacatgacctgggtccgccaggctccagggaaggggctggagtgggtctcaattctttatagtggtggtagttcatactacgcagactccgtgaagggcagattcaccatctccagagacagttccaagaacacggtgcatcttcaaatgaacagcctgagagtcgaggacacggctgtgtattactgtgcgagagagcggggccccaacctctggggccagggaaccctggtcatcgtctcctca

SEQ ID NO: 16918 - DNA, 277 bp, Homo sapiens; identical to SEQ ID NO: 16917
  source 1..277: mol_type = other DNA

SEQ ID NO: 16919 - DNA, 277 bp, Homo sapiens
  source 1..277: mol_type = other DNA
tgcagcctctggattcaccgtcagtagtatctacatgagttgggtccgccagactccagggaaggggctggagtgggtctcacttactcatagcgatggtactacatactacgcagactccgtgaaggacagatttaccgtctccagagacagttcccagaacacgttgtatcttgaaatgaacagcctgagagccgaagacacggctgtctattactgtgcgagagagaggggcccaaacctctggggccagggaaccctggtcaccgtctcctca

SEQ ID NO: 16920 - DNA, 277 bp, Homo sapiens; identical to SEQ ID NO: 16917
  source 1..277: mol_type = other DNA

SEQ ID NO: 16921 - DNA, 277 bp, Homo sapiens; identical to SEQ ID NO: 16917
  source 1..277: mol_type = other DNA

SEQ ID NO: 16922 - DNA, 283 bp, Homo sapiens
  source 1..283: mol_type = other DNA
tgcagcctctgggttcacctttagtaactcttggatgacctgggtccgccaggctccagggacggggctggagtgggtggccagcataaatcaggagggaagtgagagatactatatggactccgtgaagggccgattcagcatctccagagacaaccccaagaactctttgtatctgcaaatgaacagcctgagagccgaggacacggctgtctatttctgtgcgaaaggacatacaatcctcgacccccggggcccgggaaccctggccaccgtctcctca

SEQ ID NO: 16923 - DNA, 283 bp, Homo sapiens
  source 1..283: mol_type = other DNA
tgcagcctctggattcagctttagtaacttttggatgacctgggtccgccaggctccagggaaggggctggagtgggtggccaacataaagttagatggaagtgagaaatactatgtggactctgtgaagggccgattcaccatctccagagacaacgccaagaactcactgtatctgcaaatgaacagcctgagagccgaggacacggccgtgtattactgtgcgaaaggccacacaattctggacccccagggccagggaaccctggtcaccgtctcctca

SEQ ID NO: 16924 - DNA, 283 bp, Homo sapiens; identical to SEQ ID NO: 16923
  source 1..283: mol_type = other DNA

SEQ ID NO: 16925 - DNA, 283 bp, Homo sapiens
  source 1..283: mol_type = other DNA
tgcagcctctggattcagctttagtaacttttggatgacctgggtccgccaggctccagggaagggcctggagtgggtggccaacataaagtttgatggaagtgagaaatactatgtggactctgtgaagggccgattcgccatctccagagacaacgccaagaactcactgtatctgcaaatgaacagcctgagagccgaggacacggccgtgtattactgtgcgaaaggccacacaattctggacccccagggccagggaaccctggtcaccgtctcctca

SEQ ID NO: 16926 - DNA, 301 bp, Homo sapiens
  source 1..301: mol_type = other DNA
cactgtctctggttcctccgtcaccgggactctttactcctggggctggatccgccagcccccagggaaggggctggagtggattgggagtattcatcatagtgggaccacctacttcaatccgtccctcagcagtcgactcagtatatcagtggacacgtccaagaaccagctctccctgaacctgagctctgtgaccgccgcggacacggccgtgtattactgtgcgagggatcggcgtggatatagtggctacgaccttgactactggggccagggaaccctggtcaccgtctcctca

SEQ ID NO: 16927 - DNA, 301 bp, Homo sapiens
  source 1..301: mol_type = other DNA
cactgtctctggtggctccatcagcagtaatagttactactggggctggatccgccagcccccagggaaggggctggagtggattgggagtatctattatagtgggagcacctactacaacccgtccctcaagagtcgagtcaccatatccgtagacacgtccaagaaccagttctccctgaagctgagctctgtgaccgccgcagacacggctgtgtattactgtgcgagagatcgacgtggatatagtggctacgacttggactactggggccagggaaccctggtcaccgtctcctca

SEQ ID NO: 16928 - DNA, 289 bp, Homo sapiens
  source 1..289: mol_type = other DNA
tgcagcctctggattcaccttcagtagctatgctatgcactgggtccgccaggctccaggcaaggggctggagtgggtggcagttatatcatatgatggaagtaataaatactacgcagactccgtgaagggccgattcaccatctccagagacaattccaagaacacgctgtatctgcaaatgaacagcctgagagctgaggacacggctgtgtattactgtgcaacaggatacagctatgggaactttgactactggggccagggaaccctggtcaccgtctcctca

SEQ ID NO: 16929 - DNA, 289 bp, Homo sapiens
  source 1..289: mol_type = other DNA
tgcagcctctggattcatcttcagtacctatggcatgcactgggtccgccaggctccaggcagagggctggagtgggtggcatttatttactatgatggaagtaataaattctctgcagactccgtgaagggccgattcaccatctccagagacaattccatggacacattgtatcttcaggtgaacagcctgagagccgaggacacggctgtatattactgtgcgactggatacagctatggaaactttgactactggggccaggggaccctggtcaccgtctcctca

SEQ ID NO: 16930 - DNA, 283 bp, Homo sapiens
  source 1..283: mol_type = other DNA
tgcagcctctggattcccctttagcagctatggcatgagctgggtccgccaggctccagggaaggggctggagtgggtctcaactattagtggtagtgctggtaacacatactacgcagactccgtgaagggccggttcaccatctcgagagacaattccaagaatacgttgtatctgcaaatgaacagtttgagagacgaggacacggccgtatattactgtgcgaaaaatagtgggagctacgattactggggccagggaaccctggtcaccgtctcctca

SEQ ID NO: 16931 - DNA, 283 bp, Homo sapiens
  source 1..283: mol_type = other DNA
tgcagcctctggattcacctttagtccctatggcatgacctgggtccgccaggctccagggaaggggctggagtgggtctcagttattagtggtagtggtgatagcatatattacgcagactccgtgaagggccggttcaccatctccagagacaattccaagaacacgctgtatctgcaaatgaacagcctgagagccgaggacacggccgtatattactgtgcgaaaaattcgggcagctatgattactggggccagggaaccctggtcaccgtctcctca

SEQ ID NO: 16932 - DNA, 277 bp, Homo sapiens
  source 1..277: mol_type = other DNA
cactgtctctggtgactccatcagtagtagtacttaccactggggctggatccgccagcccccaggaaaggggctggagtggctggggactatctatttcagtgggactacccactacaacccgtccctcgagagtcgagtcaccatatcggtagacacgtccaagaaccagttctccctgcagctgacctctgtgaccgccgcggacacggccgtgtattactgtgcgagaggaactagtccttggagccagggaaccctggtcaccgtctcctca

SEQ ID NO: 16933 - DNA, 277 bp, Homo sapiens
  source 1..277: mol_type = other DNA
cactgtctctggtgactccatcagcgatagtgtttactactgggcctggatccgccagcccccagggaagggactggaatggattgggagtattcattatagtgggagcaccagctacaacccgtccctcaagagtcgagtcgccattttcgtcgacacgtccaagaaccagttctcccttaagctgacctctgtgaccgccgcagacacggctgtgtattactgtgcgaggggcacttctccatggggccagggaaccctggtcaccgtctcctca

SEQ ID NO: 16934 - DNA, 289 bp, Homo sapiens
  source 1..289: mol_type = other DNA
tgcagcctctggattcacctttagcgcatatgccatgaactgggtccgccaggctccaggtgaggggctggagtgggtctcttctattattgatggtggtggtgatacattctacacagactccgtgaagggccgcttcaccatttccagagacaattcccagaacacactgtatctgcaaatgaacagcctgagagccgaagacacggccgtatatttctgtgcgaaggttcacggtggctactacttcgatctctggggccgtggcaccctggtcactgtctcctca

SEQ ID NO: 16935 - DNA, 289 bp, Homo sapiens
  source 1..289: mol_type = other DNA
tgcagcctctggattcacctttagcggatatgccatgaactgggtccgccaggctccaggtgaggggctggagtgggtctcttctattattgatggtggtggtgatacattctacagagactccgtgaagggccgcttcaccatttccagagacaatgcccagaacacactgtatctgcaaatgaacagcctgagagccgaagacacggccgtatatttctgtgcgaaggttcacggtggctactacttcgatctctggggccgtggcaccctggtcactgtctcctca

SEQ ID NO: 16936 - DNA, 289 bp, Homo sapiens
  source 1..289: mol_type = other DNA
tgcagcctctggattcacctttagcagatatgccatgaactgggtccgccaggctccaggtgaggggctggagtgggtctcatctattattgatggtggtggtgattcattctacacagactccgtgaagggccgcttcaccatttccagagacaattcccagaacacgctgtatctgcaaatgaacagcctgagagccgaagacacggccgtatatttctgtgcgaaggtacacggtggctactacttcgatctctggggccgtggcaccctggtcactgtctcctca

SEQ ID NO: 16937 - DNA, 289 bp, Homo sapiens
  source 1..289: mol_type = other DNA
tgcagcctctggattcacctttagcaactatgccgtgaactgggtccgccaggctccagggagggggctggagtgggtctcaagtattattgatagtggtggtagcacatactacacagactccgtgaagggccggttcaccatctccagagacaattccaagaacaccctgtatctgcaaatgaacagcctgagagccgaggacacggccgtatattactgtgcgaaagtccacggtggctactacttcgatctctggggccgtggcaccctggtcactgtctcctca

SEQ ID NO: 16938 - DNA, 289 bp, Homo sapiens; identical to SEQ ID NO: 16937
  source 1..289: mol_type = other DNA

SEQ ID NO: 16939 - DNA, 304 bp, Homo sapiens
  source 1..304: mol_type = other DNA
tgcagcctctgggttcaccttcagtggctctgctatgcactgggtccgccaggcttccgggaaagggctggagtgggttggccgtatcagaagcaaagctaacagttacgcgacaggatatgctgcgtcggtgaaaggcaggttcaccatctccagagatgactcaaagaacacggcgtatttgcaaatgaacagcctgaaaaccgaggacacggccgtgtattattgtattagacaccactatgatagtagtggttattactacggctactggggccagggaaccctggtcaccgtctcctca

SEQ ID NO: 16940 - DNA, 304 bp, Homo sapiens
  source 1..304: mol_type = other DNA
tgcagcctctgggttcaccttcagtggctctgcaatgcactgggtccgccaggcttccgggaaagggctggagtgggttggccgtattagaagcaaagctaacaattacgcgacagcatatgctgcgtcggtgaaaggcaggttcaccatctccagagatgattcaaagaacacggcgtatctgcaaatgaacagcctgaaaaccgaggacacggccgtgtattactgtatcagacatcactatgatagtagtggttattactacggctactggggccagggaaccctggtcaccgtctcctca

SEQ ID NO: 16941 - DNA, 304 bp, Homo sapiens
  source 1..304: mol_type = other DNA
tgcagcctctgggttcaccttcagtggctctgctatgcactgggtccgccaggcttccgggaaagggctggagtgggttggccgtattagaagcaaagctaacaattacgcgacagaatatgctgcgtcggtgaaaggcaggttcaccatctccagagatgattcaaagaacacggcgtatctgcaaatgaacagcctgaaaaccgaggacacggccgtgtattactgtattagacaccactatgatagtagtggttattactacggatattggggccagggaaccctggtcaccgtctcctca

SEQ ID NO: 16942 - DNA, 304 bp, Homo sapiens; identical to SEQ ID NO: 16941
  source 1..304: mol_type = other DNA

SEQ ID NO: 16943 - DNA, 283 bp, Homo sapiens
  source 1..283: mol_type = other DNA
tgcagcctctggattcaccttcagtagctactggatccactgggtccgccaagctccagggaaggggctggtgtgggtctcacgtactaatactgatgggagtagcacaagttacgcggactccgtgaagggccgattcaccatctccagagacaacgccaagaacacgctgtatctgcaaatgaacagtctgagagccgaggacacggctgtgtattactgtgcaaggggtgggagctactttgactcctggggccagggaaccctggtcaccgtctcctca

SEQ ID NO: 16944 - DNA, 283 bp, Homo sapiens
  source 1..283: mol_type = other DNA
tgcagcctctggattcaacttctctaactactggatgcactgggtccgccaagccccggcgaaggggctaatttgggtcgcacgtataaaaggagatggaagtactacaacctacgcggactccgtgaagggccgattcaccatctccagagacaactccaggaataccctgtatctgcatgtgaacagtctgagagccgaggacacggctgtgtatttttgtgcaagaggtggcagctactttgactcctggggccagggaaccctggtcaccgtctcctca

SEQ ID NO: 16945 - DNA, 298 bp, Homo sapiens
  source 1..298: mol_type = other DNA
cactgtctctggttactccatcagcaattattgccactggggctggctccggcagcccccagggaaggggctggagtggattgggagtatctatcatagtgggagcacctactacaacccgtccctcatgagtcgagtcaccatatcagtagacacgtccaagaaccagttctccctgaagctgagctctgtgaccgccgcagacacggccatgtattactgtgcgagacgtatagcagtggctggtcactggtacttcgatctctggggccgtggcaccctggtcactgtctcctca

SEQ ID NO: 16946 - DNA, 298 bp, Homo sapiens
  source 1..298: mol_type = other DNA
cactgtctccggttactccatcagcagtggttactactggggctggatccggcagcccccagggcaggggctggagtggattgggaatatccatcatagtgggaacacctactacaacccgtccctccagagtcgagtcaccatttcagtagacacgtccaagaaccagttctccctgaacctgagttctgtgaccgccgcagacacggccgtgtattactgtgcgagacgtatagcagtggctggccactggtacttcgatctctggggccgtggcaccctggtcactgtctcctca

SEQ ID NO: 16947 - DNA, 295 bp, Homo sapiens
  source 1..295: mol_type = other DNA
tgcagcctctggattcaccttcagtacttatgaatacaactgggtccgccaggccccagggaaggggctggagtgggtttcatatattaatactattagtgccattttctacgcagactctgtgaggggccgatttaccatgtccagagacaacgccaagaactctctctatctacaaatgaacagcctgacagccgaggacacggctgtctattactgtgcgagagaaataccagattgtggtggtgattgccttgactactggggccagggaaccctggtcgccgtctcctca

SEQ ID NO: 16948 - DNA, 295 bp, Homo sapiens
  source 1..295: mol_type = other DNA
tgcagcctctggattcatcttcagtacttatgaatacaactgggtccgccaggccccagggaaggggctggagtgggtttcatatattaatactgttagtgccattttctacgccgactctgtgaagggccgatttaccatgtccagagacaacgccaagaactctctctatcttcaaatgaacagcctgacagccgaggacacggctgtctattactgtgcgagagaaataccagattgtggtggtgattgcctcgactactggggccagggaaccctggtcaccgtctcctca

SEQ ID NO: 16949 - DNA, 298 bp, Homo sapiens
  source 1..298: mol_type = other DNA
tgtaacctctggattcaccttcagtgcttatgagttcaactgggtccgccaggctccaggggaggggctggagtgggtttcatatattagtagtaatggtatttacatacactacgcagactctgtgaggggccgattcaccatgtccagagacaacgccaggaactcgctatatctgcaaatgaacaacctgagagccgatgacacggctgtttatttctgtgcgagagagataccagattgtggtggtgattgcctagactactggggccagggaaccctggtcaccgtctcttcg

SEQ ID NO: 16950 - DNA, 295 bp, Homo sapiens
  source 1..295: mol_type = other DNA
tgcagcctctggattcaccttcagtacttatgaatacaactgggtccgccaggccccagggaaggggctggagtgggtttcatatattaatactgttagtgccattttctacgcagactctgtgaagggccgatttaccatgtccagagacaacgccaagaactctctctatctacaaatgaacagcctgacagccgacgacacggctgtctattactgtgcgagagaaataccagattgtggtggtgattgccttgactactggggccagggaaccctggtcaccgtctcctca

SEQ ID NO: 16951 - DNA, 280 bp, Homo sapiens
  source 1..280: mol_type = other DNA
cactgtctctggtgtctccatcagtaactactactggagctggatccggcagcccccagggaagggactggagtggattgggtatatcttttacagtgggagcaccaactacaacccctccctcaagagtcgagtcaccatatcaatagacacgtccaggaggcagttctcccttaacctgaactctgtgaccgctgcggacacggccgtgtattactgtgcgaggggtaatggttatcacctcttctggggccagggaaccctggtcaccgtctcctca

SEQ ID NO: 16952 - DNA, 280 bp, Homo sapiens
  source 1..280: mol_type = other DNA
cactgtctctggtgtctccatgagtccttactactggtgctggatccggcagcccccagggaagggactggagtggattgggtacatctattacagtgggaacaccaactacaacccctccctcaagagtcgagtcaccatatcagtagacacgtccaagagccagttctccctgaagctgagctctgtgaccgccgcagacacggccgtatattactgtgcccgggggaatggctaccatttgttctggggccagggaagcctggtcaccgtctcctca

SEQ ID NO: 16953 - DNA, 280 bp, Homo sapiens; identical to SEQ ID NO: 16952
  source 1..280: mol_type = other DNA

SEQ ID NO: 16954 - DNA, 280 bp, Homo sapiens
  source 1..280: mol_type = other DNA
cactgtctctggtggctccatcagtacttactactggagctggatccggcagcccccagggaagggactggagtggattggttatatctattacagtgggagcaccaactacaacccctccctcaagagtcgagtcaccgtatcagtggacacgtccaagaaccagttctccctgaagctgagctctgtgaccgctgcggacacggccgtgtattactgtgcgagagggaatggctacattagatactggggccagggaaccctggtcaccgtctcctca

SEQ ID NO: 16955 - DNA, 280 bp, Homo sapiens
  source 1..280: mol_type = other DNA
cactgtctctggtggctccatcagtggctactgctggggctggatccggcagcccccagggaagggactggagtggattgggtatatctgttacactgggagcacgaactacaacccctccctcaagagtcgagtcgccctatcaatagacacgtccaagaaccagttctccctgaagctgagctctgtgacagcagcggacacggccgtgtatctctgtgcgagaggaaatggatacattcgttactggggccagggaaccctggtcaccgtctcctca

SEQ ID NO: 16956 - DNA, 285 bp, Homo sapiens
  source 1..285: mol_type = other DNA
gcatctggatacatcttcaccacctacttcctgcactgggtgcgacaggcccctggacaagggcttgaatgggtgggaataatcaaccctagtggtggtggcacaaactacccacagaagttccagggcagagtcactatgaccagggacacgtccacgagcacagtttacatggaactgagcagcctgggatctgaggacacggccgtatattattgtgtgagagagtggtccgggggccactttgactactggggccagggaaccctggtcaccgtctcctca

SEQ ID NO: 16957 - DNA, 285 bp, Homo sapiens
  source 1..285: mol_type = other DNA
gcatctggatacaccttcaccagttactatatacactggatgcggcaggcccctggacaaggacttcaatggctgggaataatcatccctagtgttgggcgcacaaactacgcacagaaattccagggaagagtcagcatgactgcagacacgtccacgagcacagtatatttggaactgcgcagcctggggtctgacgacacggccctgtatttctgtgtgagagaatggtctggtggccactttgattacttgggccagggaaccccggtcaccgtctcctca

SEQ ID NO: 16958 - DNA, 285 bp, Homo sapiens
  source 1..285: mol_type = other DNA
gcatctggatacaccttcaccagttactatatacactggatgcggcaggcccctggacaaggacttcaatggctgggaataatcatccctagcgttgggcgcacaaactacgcacagaaattccagggaagagtcagcatgactgcagacacgtccacgagcacagtatatttggaactgcgcagcctggggtctgacgacacggccctgtatttctgtgtgagagaatggtctggtggccactttgattacttgggccagggaaccccggtcaccgtctcctca

SEQ ID NO: 16959 - DNA, 295 bp, Homo sapiens
  source 1..295: mol_type = other DNA
cgctgtctatggtgggtccttcagtcgccacttctggagctggatccgccagcccccagggaaggggctggagtggattggggaaatcaatcatggtggaagcgccaactccagcccgtccctcaagagtcgagtcaccatatcactagacacgtccaagaaccagctctccctgaggctgagctctgtgaccgccgcggacacggctgtctattactgtgcgagggcgggcacctggggcccctatgatgcttttgatatctggggccaagggacaatggtcaccgtctcttca

SEQ ID NO: 16960 - DNA, 304 bp, Homo sapiens
  source 1..304: mol_type = other DNA
cgctgtctatgatgactccttcaaaactctctactggagctggatccgccagccccccggaaaggggctggagtggattggggaaatccaccatagtggattcaccaactacaacccgtccctcccgtcccttaggagtcgagtcaccatattgttagacacgtccaactaccagatctccctgaagttgacttctgtgaccgccgcagacacggctatgtattactgtgcgagagccgggacttggggtccctatgatgcttttgatatctggggccaagggacaatggtgaccgtctcttca

SEQ ID NO: 16961 - DNA, 286 bp, Homo sapiens
  source 1..286: mol_type = other DNA
tgcagcctctgggttcaccctcagtgaccacaacatggactgggtccgccaggctccagggaaggggctggagtgggttggccgtagagagaaagctaatagttacaccatagagtacgccgcgtctgtgagaggcagattcaccatctcaagagacgattcaaagaactcactttatctgcaaatgaacagcctgaaaaccgaagacacggccgtgtattactgtactaggggcctcaattcctttgatatttggggccaagggacaatggtcaccgtctcctca

SEQ ID NO: 16962 - DNA, 289 bp, Homo sapiens
  source 1..289: mol_type = other DNA
tgcagcctctggatttaccttcagtgactaccatatggactgggtccgccaggctccagggaaggggctggagtgggttggccgtgctacgactaaaggtagaagttccaccgcagagtatgccgcgtctgtgaagggcagattcaccatctcaagagatgattcaaagaactctctgtatctggaaatcaacagcctgagaagcgaagacacggccgtgtatttttgtactaggggactaaattcttttgatatctggggccaagggacagtagtctccgtctcttca

SEQ ID NO: 16963 - DNA, 286 bp, Homo sapiens
  source 1..286: mol_type = other DNA
tgcagcctctggattcaccctcagtgaccacaacatggactgggtccgccaggctccagggaaggggctggagtgggttggccgtagagagaaagctaatagttacaccatagcgtacgccgcgtctgtgagaggcagattcaccatctcaagagatgattcaaagaactcactttatctacaaatgaacagcctgaaaaccgaagacacggccgtgtattactgtactaggggcctcaattcctttgatatttggggccaagggacaatggtcaccgtctcctca

SEQ ID NO: 16964 - DNA, 286 bp, Homo sapiens
  source 1..286: mol_type = other DNA
tgcagcctctggattcaccctcagtgaccacaacatggactgggtccgccaggctccagggaaggggctggagtgggttggccgtagagagaaagctaatagttacaccatagagtacgccgcgtctgtgagaggcagattcaccatctcaagagatgattcaaagaactcactttatctgcaaatgaacagcctgaaaaccgaagacacggccgtgtattactgtactaggggcctcaattcctttgatatttggggccaagggacaatggtcaccgtctcctca

SEQ ID NO: 16965 - DNA, 293 bp, Homo sapiens
  source 1..293: mol_type = other DNA
ccatctccggggacagtgtctctagcaaccgtgttgcttggaactggatcaggcagtccccatcgagaggccctgagtggctgggaaggacatactacaggtccaagtggtataatgattatgcagtatctgtaaaaagtcgaataactatcaacccagacacatccaagaaccagttctccctgcagctgaactctgtgactcccgaggacacggctgtgtattactgtgcaagaggttacaactatgcttttgacttctggggccagggaaccctggtcaccgtctcctca

SEQ ID NO: 16966 - DNA, 293 bp, Homo sapiens
  source 1..293: mol_type = other DNA
ccatctccggggacagtgtctctaccaaaagtgttggttggcactggatcaggcagtccccatcgagaggccttgagtggctgggaaggacatactacaggtccaagtggtctaatgattatgcactatctgtgaaaagtcgcataaccatcaacccagacacatccaagaaccagttctccctgcagctgaattctgtgactcccgaggacacggctgtgtattactgtgcaagaggatacaactatgcttttgacttctggggccagggaaccctggtcaccgtctcctca

SEQ ID NO: 16967 - DNA, 286 bp, Homo sapiens
  source 1..286: mol_type = other DNA
tgcagcctctggattcacgtttagtagtcattggatgaactgggtccgccaggctccagggaaagggctggaatgggtggccatcataaaacaagatgggagtgagaaaaagtatgtggactctgtgaagggccgattcaccatctccagagacaacgccaagaactcgctgtatctgcaaattgacagcctgagagccgaggacacggccgtgtattactgtgtgagcggccttggctggctaccggactattggggccagggaaccctggtcaccgtctcctca

SEQ ID NO: 16968 - DNA, 286 bp, Homo sapiens
  source 1..286: mol_type = other DNA
tgcagcctctggattcacgtttagtagtcattggatgaactgggtccgccaggctccagggaaagggctggaatgggtggccatcataaaacaagatgggagtgagaaaaagtatgtggactctgtgaagggccgattcaccatctccagagacaacgccaagaactcgctgtatctgcaaattgacagcctgagagccgaggacacggccgtgtattactgtgtgagcggccttggctggctaccggactactggggccagggaaccctggtcaccgtctcctca

SEQ ID NO: 16969 - DNA, 286 bp, Homo sapiens
  source 1..286: mol_type = other DNA
tgcagcctctggattcacctttagtaactattggatgaactgggtccgccaggctccagggaaggggctggagtgggtggccatcatacagcaagatggaagtgagaaatactatgtggactctgtgaagggccgattcaccatctccagagacaacgccaagaactcactgtatttgcaaatgaacagcctgagagccgacgacacggctgtatattactgtgtgagcgggctggggtggctacccgactactggggccagggaaccctggtcaccgtctcctca

SEQ ID NO: 16970 - DNA, 280 bp, Homo sapiens
  source 1..280: mol_type = other DNA
tgcagcctctggattcacgtttagaaactattggatgagttgggtccgccaggctccagggaaagggctggagtgggtggccaacataaaggaagacggaagtgagaaatactatgtggactctgtgaagggccgattcagcatctccagagacaacgccgacaactcactatatctgcaaatgaacagcctgagagtcgaggacacggccgtctatttctgtacgagagacacacgcttttactactggggccagggaaccctggtcgccgtctcctca

SEQ ID NO: 16971 - DNA, 280 bp, Homo sapiens
  source 1..280: mol_type = other DNA
tgcagcctctggattcagcttcagtaactattggatgacctgggtccgccagactccagggagggggctgcagtgggtggccagtatgacggcagatggggctcagaaatactatgaggcctctgtgaagggccgattcaccatctccagagacaatgtcgacaactcactttttctacaaatgaccagtctgagagtcgaggacacggctctttattactgtacgagagacacgaggttttattactggggccagggagccctggtcaccgtctcctca

SEQ ID NO: 16972 - DNA, 315 bp, Homo sapiens
  source 1..315: mol_type = other DNA
acacagaccctcacactgacctgcaccttctctgggttctcactcagtaccagtggaatgtgtgtgagctggatccgtcagcccccaggtaaggccctggagtggcttgcacgcattgattgggatgatgctaaacactacagcacatctctgaggaccaggctcaccatctccaaggacacctccaaaaaccaggtggtccttacaatgaccgacatggaccctgtggacacaggcacgtatttctgtgcacgggaggtgcctaccaccgcctctgacttctggggccagggagccctggtcaccgtctcctca

SEQ ID NO: 16973 - DNA, 315 bp, Homo sapiens
  source 1..315: mol_type = other DNA
acacagaccctcacactgacctgcagcctctctggattctcactcagcactagaggaatgtctgtgagctggatccgtcaggccccagggaaggccctggagtggcttgcacgcattgattgggatgatgataaatactacagcacaagtctaaggaccaggctcaccatctccaaggacacatccaaaaaccaggtggtccttacaatgaccaacatggaccctgtggacacaggcacctattactgtgcacgggaagtaccaactactgcatctgacttctggggccaggggaccccggtcaccgtctcctcc

SEQ ID NO: 16974 - DNA, 289 bp, Homo sapiens
  source 1..289: mol_type = other DNA
cgctgtctctggtggctccgtcaacagtgatagttattactggagctggatccggcagcccccaggggcgggactggagtggattgggtatatgttttacagtgggaacaccaactacaacccctccctcaagagtcgagtcaccataacaatagacacgtccaagaaccagttctccttgaagctgaggtctgtgaccgctgcggacacggccgtgtattactgtgcgagagatcgaggtgactattttgactactggggccagggaaccctggtcaccgtctcctca

SEQ ID NO: 16975 - DNA, 289 bp, Homo sapiens
  source 1..289: mol_type = other DNA
cactgtctctggtggctccatcagtagtggtagttactactggagctggatccggcagcccgccgggaagggactggagtggattgggcgtatctttaccagtgggagcaccagctacaacccctccctcaagagtcgagtcaccatatccgtagacaggtccaagaaccagttctccctaaaactgaactctgtgaccgccgcagacacggccgtgtattactgtgcgagagataggggtgactactttgactactggggccagggaaccctggtcaccgtctcctca

SEQ ID NO: 16976 - DNA, 289 bp, Homo sapiens
  source 1..289: mol_type = other DNA
cactgtctctggtggctccgtcaacagtgatagttattactggacctggatccggcagtctccaggggcgggactggagtggattgggtatatgttttacagtgggaacaccaactacaacccctccctcaagagtcgagtcaccataacaatagacacgtccaagaaccagttctccttgaagctgaggtctgtgaccgctgcggacacggccgtgtattactgtgcgagagatcgaggtgactattttgactactggggccagggaaccctggtcaccgtctcctca

SEQ ID NO: 16977 - DNA, 274 bp, Homo sapiens
  source 1..274: mol_type = other DNA
tgcagcctctggaataacttttagtaacttctggatgacctgggtccgccaggctccagggaaggggctggagtgggtggccaccattaagcaagatggaagtgagaaatactatgtggactctgtgaagggccgattcaccatctccagagacaacgccaagaactcactgtatctgcaaatgaacaacctgagagacgaggacacggctgtgtattactgtgcgaccgcccgtgattactggggccagggaaccctggtcatcgtctcctca

SEQ ID NO: 16978 - DNA, 274 bp, Homo sapiens; identical to SEQ ID NO: 16977
  source 1..274: mol_type = other DNA

SEQ ID NO: 16979 - DNA, 274 bp, Homo sapiens
  source 1..274: mol_type = other DNA
tgcagcctcaggattaacctttagtagctattggatgacctgggtccgccaggctccagggaaggggctggagtgggtggccaacataaagcaagatggaagtgagaaatactatgcggactctgtgaagggccgattcaccatctccagagacaacgccaagagctcactgtatctgcaaatgaacagcctgagagtcgaggacacggctgtgtattactgtgcgaccgctagggactactggggccagggaaccctggtcaccgtctcctca

SEQ ID NO: 16980 - DNA, 277 bp, Homo sapiens
  source 1..277: mol_type = other DNA
caccgtctctggtggctccatcagcagtagtagttactactggggctggttccgccagcccccagggaaggggctggagtggattgggagtatctcttgtagtgggagcacctactacaacccgtccctcaagagtcgagtcaccatatccgtagacacgtccaagaaccagttttccctgaagttgagctctgtgaccgccgcagacacggctgtgtattactgtgcgagacatccggactcttggggccagggaaccctggtcaccgtctcctca

SEQ ID NO: 16981 - DNA, 277 bp, Homo sapiens
  source 1..277: mol_type = other DNA
cactgtctctggtggctccattaacagtagtacttcctactggggctggatccgccagcccccagggaaggggctggagtggattgggaatatctattatagtgggagcaccgactacaacccctccctcaaaagtcgagtcaccatatccgtagacacgtccaagaaccagttctccctgaagctgagctctgtgatcgtcgcagacacggctgtatattactgtgcgaggcaccccgactcctggggccagggaaccctggtcaccgtctcctca

SEQ ID NO: 16982 - DNA, 304 bp, Homo sapiens
  source 1..304: mol_type = other DNA
tgcagcctctggattcaccttcagtgaccgctacatggactgggtccgccaggctccagggagggggctggagtgggttggccgttctagagacaaatctggtagttacaccacagagtatgccgcgtctgtgagaggcagattcaccatctcaagagatgatgcaaagaactcagtgtatctgcaaatgaacagcctgaaaaccgaggacacggccgtgtattactgtgctagaggggatagcagtggctgggctaatgcttttgatatctggggccaagggacagtggtcaccgtctctcca

SEQ ID NO: 16983 - DNA, 304 bp, Homo sapiens
  source 1..304: mol_type = other DNA
tgcagcctctggattcaccttcagtgaccactacatggactgggtccgccaggctccaggggaggggctggagtgggttggccgtagtagagacaaacctcacggttacaccgcagaatacgccgcgtctgtgaaaggcagattcaccatctcaagagatgaatcaaagaactcaatatatctgcaaatgaacagcctgcaaaccgacgacacggccgtgtattactgtgctaggggagatagtagtggctgggctaatgcttttgatatctggggccaagggacaatggtcaccgtctcttca

SEQ ID NO: 16984 - DNA, 304 bp, Homo sapiens
  source 1..304: mol_type = other DNA
tgcagcctctggattcaccttcagtgaccactacatggactgggtccgccaggctccagggaaggggctggagtgggttggccgtagtagagacaaacctcacggttacaccgcagaatacgccgcgtctgtgaaaggcagattcaccatctcaagagatgaatcaaagaactcagtgtatctgcaaatgaacagcctgcaaaccgacgacacggccgtgtattactgtgctaggggagatagcagtggctgggctaatgcttttgatatctggggccaagggacaatggtcaccgtctcttca

SEQ ID NO: 16985 - DNA, 286 bp, Homo sapiens
  source 1..286: mol_type = other DNA
tgcagcctctggattcacctttcgcagctctgccatgagctgggtccgccaggctccagggaaggggctggagtgggtctcatctattagtggtagtggcgctggcacatactacgcagactccgtgaagggccgcctcaccatttccagagacaattccaagaacacggcgtatctgcaaatgaacagcctgagagtcgaggacacggccctatattactgtgcgaaattggtgccggactactttgactattggggccagggtatcctggtcaccgtctcctca

SEQ ID NO: 16986 - DNA, 286 bp, Homo sapiens
  source 1..286: mol_type = other DNA
tgtagcctctggattcacctttaggagctctgccatgagctgggtccgccaggctccagggaaggggctggagtgggtctcaagtattagtgctagtggtggtggcacatactacgcagactccgtgaagggccggttcaccatctccagagacaattccaagaacacgctgtatctgcaaatgagcagcctgagagccgaggacacggccctatattactgtgcgaaactcgttcctgattactttgactactggggccagggaaccctggtcaccgtctcctca

SEQ ID NO: 16987 - DNA, 295 bp, Homo sapiens
  source 1..295: mol_type = other DNA
cactgtctctggttactccatcaccagtggttactactggggctggatccggcagcccccagggaaggggctggagtggattgggagtatctatcatggtgggagcgcctactacagcccgtccctcaagagtcgagtcaccatatcactagacacgtccaagaaccagttctccctgaaactgaggtctgtgaccgccgctgacacggccgtgttttactgtgcgagagtggggagtggcgcgaggacctggttcgacccctggggccagggaaccctggtcaccgtctcctcc

SEQ ID NO: 16988 - DNA, 295 bp, Homo sapiens; identical to SEQ ID NO: 16987
  source 1..295: mol_type = other DNA

SEQ ID NO: 16989 - DNA, 295 bp, Homo sapiens
  source 1..295: mol_type = other DNA
cactgtctctagttactccatcagcagtggttactactggggctggatccggcagtccccagggaagggactggagtggattgggagtgtctattatagtgggaccacctactacaacccgtccctcaagagtcgagtcaccatatcagtagacacgtcccagaaccagttctccctgaaactgaggtctgtgaccgccgcagatacggccatgtattactgtgcgagagttgggtcgggtgcgcgcacctggttcgacccctggggccagggaaccctggtcaccgtctcctca

SEQ ID NO: 16990 - DNA, 283 bp, Homo sapiens
  source 1..283: mol_type = other DNA
tgcagcctctggattcatttttagtagttcctggatgagctgggtccgccaggctccagggaaggggctggagtgggtggccaacataaaagaagatggaagtgacaaatattatgtggactctgtgaagggccgattcaccatctccagagacaacgccaaggcctcactgtatctgcaaatgaacgccttgagagccgaggacacggccgtctattactgtgcgaaagacgggcggacttggcccttctggggccagggaaccctggtcaccgtctcctca

SEQ ID NO: 16991 - DNA, 283 bp, Homo sapiens
  source 1..283: mol_type = other DNA
tgcagcctctggattcacctttagtaactcttggatgagctgggtccggcaggctccagggaaggggctggagtgggtggccaacataaagcaagatggaagtgagaaattttatgtggactctgtaaagggccgattcagtatctccagagacaacgccaagaactcactttatctgcaaatgaacagcctgagagccgaggacacggctgtgtattactgtgcgaaggacgggaggacctggcccttctggggccagggaaccctggtcaccgtctcctca

SEQ ID NO: 16992 - DNA, 301 bp, Homo sapiens
  source 1..301: mol_type = other DNA
tgcagcctctggactccccttcagcaattacgacatgcactgggtccgccaggttccaggaaaaggtctggaatgggtctcagctattggtactcgttatgatacatactattcaacttccgtgaagggccgattcaccatctccagagaaaatgccaagacttccttgtatcttcagatgaacagcctgagtgtcggggacacggctgtttattactgtgcaagagaggtcatggacagcatcagccggggctggtacttcgatctctggggccgtggcaccctggtcactgtctcctca

SEQ ID NO: 16993 - DNA, 301 bp, Homo sapiens
  source 1..301: mol_type = other DNA
tgcggcctctggattcaccttcagtacctacgacatgcactgggtccgccaagctgtaggaaaaggtctggagtgggtctcaggtattggtactattggtgacacatactatccaggctccgtgaagggccgattcaccatctccagagaaaatgccaaggactccttgtatcttcaaatgaacagcctgagagccggggacacggctgtttacttttgtgcaagagaggtaatggacagcatatctcggggctggtacttcgatctctggggccgtggcaccctggtcactgtctcctca

SEQ ID NO: 16994 - DNA, 280 bp, Homo sapiens
  source 1..280: mol_type = other DNA
tgcagcctctggattcacctttagtaactattggatgacctgggtccgccaggctccagggaaggggctggagtgcgtggccaacataaagcaagatggaagtgagaaatactatgtggactctgtgaagggccgattcaccatctccagagacaacgccaagaactcactgtatctgcaaatgaacagcctgagagccgaagatacggctgtgtattactgtgcgagaggaagaggggtggacggctggggccaagggaccacggtcaccgtctcctca

SEQ ID NO: 16995 - DNA, 280 bp, Homo sapiens
  source 1..280: mol_type = other DNA
tgcagcctctggattcacctttactaacaattggatgacctgggtccgccaggcaccagggaaggggctggagtgggtggcctgcataaagcaagatggaagtgagaaatactatgtggactctgtgaagggccgattcaccatctccagagacaacgccaagaactcagtgtatctgcaaatgaacagcctgagagccgaggatacggctgtgtattattgtgcgagagggcgcggtgtggacggctggggccaagggaccacggtcaccgtctcctca

SEQ ID NO: 16996 - DNA, 307 bp, Homo sapiens
  source 1..307: mol_type = other DNA
cactgtctctggtggctccatcagcagtagtagttactactggggctggatccgccagcccccagggaaggggctggagtggattgggagtatctattatagtgggagcacctactacaacccgtccctcaagagtcgagtcaccatatccgtagacacgtccaagaaccagttctccctgaagctgagctctgtgaccgccgcagacacggctgtgtattactgtgcgaaagaaacgtattactatgatagtagtggttatccctttgactactggggccagggaaccctggtcaccgtctcctca

SEQ ID NO: 16997 - DNA, 307 bp, Homo sapiens
  source 1..307: mol_type = other DNA
cactgtctctggtggctccatcagcagtagtagttactactggggctggatccgccagcccccagggaaggggctggagtggattgggagtatctattatagtgggagcacctactacaacccgtccctcaagagtcgagtcaccatatccgtagacacgtccaagaaccagttctccctgaagctgagctctgtgaccgccgcagacacggctgtgtattactgtgcgaaagagacgtattactatgatagtagtggttatccttttgactactggggccagggaaccctggtcaccgtctcctca

SEQ ID NO: 16998 - DNA, 289 bp, Homo sapiens
  source 1..289: mol_type = other DNA
cactgtctctggtagctccatcagtacctactactggagctggatccggcagcccccagggaagggactggagtggattggctatttctacaacagcgggagcaccgactacaacccctccctcaagagtcgagtcaccatgtcagtagacacgtccaagaaccagttctccctgaagctgcgctctgtgaccggtgccgacacggccgtgtatttctgtgcgagatatgggcgtggctggccagaccttgactactggggccagggaaccctggtcaccgtctcctca

SEQ ID NO: 16999 - DNA, 289 bp, Homo sapiens
  source 1..289: mol_type = other DNA
cactgtctctggtgtctccatcagtacttactactggagctggatccggcagcccccagggaggggactggagtggattgggtatatctattctagtgggagcatcaactacaacccctccctgaagagtcgagtcaccatatcagtagacacgtccaagaaccagatctccctgaagctgacctctgtgaccgccgcagacacggccgtatattactgtgcgagatacggccgtggctggcctgaccttgactactggggccagggaaccctggtcaccgtctcctca

SEQ ID NO: 17000 - DNA, 295 bp, Homo sapiens
  source 1..295: mol_type = other DNA
cactgtctctggtggctccatcagcagtagtagttacttctggggctggatccgccagcccccagggaaggggctggagtggattgggactatgtcttatagtgggaggtcctactacaacccgtccctcaagagtcgagtcaccatatcagtcggcacgtccaagaaccagttctccctgaagatgaactctgtgaccgccgcggacacggccgtgtattactgtgagagagaaaggagtggatacagttatgttgactactggggccagggaaccctggtctctgtgtcctcg

SEQ ID NO: 17001 - DNA, 295 bp, Homo sapiens
  source 1..295: mol_type = other DNA
cactgtctctggtggctccatcagcagtagtagttactactggggctgggtccgccagcccccagggagggggctggagtggattgggattatttattatagtgggagaacctactacaacccgtccctcaagagtcgagtcaccatatcactagacacgtccaagaaccagttctccctgaagctgagctctgtgaccgacgcggacacggccgtgtattactgtgagagagaacgaagtggatacagctatgttgactactggggccagggaaccctggtcaccgtctcctca

SEQ ID NO: 17002 - DNA, 289 bp, Homo sapiens
  source 1..289: mol_type = other DNA
tgaagtgtctggaatcaccttcagtatgtctggcatgcactgggtccgccaggctccaggcaaggggctggagtgggtggcaatgatatggtctgatggaagtcaaaaatactatgcagactccgtgaagggccgattcaccatctccagagacaattccaagaacacggtgcatctgcaaatggacagcctgagagccgaggacacggctgcgtactactgtgcgagagataagggggtggctagtcttgactactggggccagggaaccctggtcaccgtctcctca

SEQ ID NO: 17003 - DNA, 289 bp, Homo sapiens
  source 1..289: mol_type = other DNA
tgcagcgtctggaatcatcttcagtaggtctggcatgcactgggtccgccaggctccaggcaagggtctggagtgggtgggaatgatatggtctgatggaagtagtaaatactatgcagactccgtgaagggccgattcaccatcaccagagacaattccaagaacacgttggatctgcaaatggacagtttgagagccgaggatacggctatttattactgtgcgagagataaaggggtcgcctcgcttgactactggggccagggaaccctggtcaccgtctcgtca

SEQ ID NO: 17004 - DNA, 285 bp, Homo sapiens
  source 1..285: mol_type = other DNA
gcattaggatacaccctgaccagctactatacgcactgggtgcgacaggcccctggacaagggcttgagtggatgggagtaatcaaccctattgatgatagtacaagttacgcacagaagttccacggcagagtcaccatgaccagcgacacgtccacgagcacagtctacatggagctgagcagcctgacatctgaggacacggccgtatattactgtgcgagagggcatagtagtggtcactttgactactggggccagggaagcctggtcaccgtctcctca

SEQ ID NO: 17005 - DNA, 285 bp, Homo sapiens
  source 1..285: mol_type = other DNA
gcatctggatacaccttcaccgattactatatacactgggtgcgacaagtcgctggacaagggcttgagtggatgggaataatcaactgtcttggtggaagcacaatgttcgcacaggagttccagggcagaatcgccatgaccagcgacacgtccacgagcacagtccacatggagctgagtagcctgcgatctgacgacgcggccgtttatttctgtgcgagaggtcatagtagtggtcactttgactactggggccagggaaccctggtcaccgtctcctca

SEQ ID NO: 17006 - DNA, 285 bp, Homo sapiens
  source 1..285: mol_type = other DNA
gcatctggatacaccttcacttactactatgtgcactgggtgcggcaggcccctggacaagggcttgagtggatgggaataatcaaccctcttgatggtagcacaaccttcgcacagaacttccagggcagagtcaccatgaccacggacacgtccacgagcacagcctacatggacctgagcagcctgagatctgaggacacggccctgtattactgtgcgagaggtcatagtagtggtcactttgactactggggccagggaaccctggtcaccgtctcctca

SEQ ID NO: 17007 - DNA, 295 bp, Homo sapiens
  source 1..295: mol_type = other DNA
tggagcgtctggattcatcttcagaacctatggcatgcactgggtccgccaggctccaggcaaggggctggagtgggtggcattcatatggcatgatggaagtaataaatactatggagactccgtgaagggccgattcaccatctccagagacaattcgaagaacacactgtatctgcaaatgaacaacctgagagtcgaggacacggctatttattactgtgtgggagatcccccgaggagtggttacgcctttgatatttggggccaagggacaacggtcaacgtctcttca

SEQ ID NO: 17008 - DNA, 295 bp, Homo sapiens
  source 1..295: mol_type = other DNA
tgcggcgtctagattcaccttcagtacctatggcatgcactgggtccgccaggctccaggcaaggggctagagtgggtggcgtttatatggtttgatggaattcataaatactatgcagactccgtgaagggccgcttcaccatctccagagacaactcgaagaattcgctgtatctgcaaatgaacagcctgagagccgaggacacggctgtctattactgtgtgggagaccccccgaggagcggctatgcttttgatatctggggccaagggacaatggtcaccgtctcttca

SEQ ID NO: 17009 - DNA, 283 bp, Homo sapiens
  source 1..283: mol_type = other DNA
tgtaggctctggattcacctttagtagctattggatgggatgggtccgccaggctccagggaaggggctggagtgggtggccaacataaagccagatggaggtgagagagcctatatggagtctatgaagggccgattcaccatctccagagacaacgccaagaagtcactttttctgcaaataaatggcctgagagccgaggacacggccgtctattactgtgcgagagcgtccaagggtatggacgtctggggccatgggaccacggtcaccgtctcctca

SEQ ID NO: 17010 - DNA, 283 bp, Homo sapiens
  source 1..283: mol_type = other DNA
tgcagcctctggattcacctttactaacttttggatgagctgggtccgccaggctccagggaagggactggagtgggtggccaacataaagaaagatggaagtgagaaagcctatgtggactctgtgaagggccgattcaccatctccagagacaacgccaagaactcactgtatctgcagatgaacagcctgagagccgaggacacggctgtgtatttctgtgcgagagcgtctaagggtatggacgtctggggccaagggaccacggtcaccgtctcctca

SEQ ID NO: 17011 - DNA, 283 bp, Homo sapiens
  source 1..283: mol_type = other DNA
tgcagcgtctggattcagtttcagtagttatggcatgcactgggtccgccaggctccaggcaaggggctggagtgggtggcagttatatggtttgatggaagtaataagaactatggagactccgtgaagggccgattcaccatctccagagacaattccaagaacacgctgtatctgcaaatgaacagcctgagagccgaggatacggctgtgtattactgtgcgagcaggtctgatggttttgaccactggggccagggaaccctggtcaccgtctcctca

SEQ ID NO: 17012 - DNA, 283 bp, Homo sapiens
  source 1..283: mol_type = other DNA
tgcagcgtctggattcgccttcagtagctatggcatgcactgggtccgccaggctccaggcaaggggctggagtgggtggcagttatatggtatgatggaagtaataaatactatgcagactccgcgaagggccgattcaccatctccagagacaattccaagaacatgctgtatctgcaaatgaacagcctgagagccgaggacacggctgtatattactgtgcgagccggtccgacggatttgaccactggggccagggaaccctggtcaccgtctcctca

SEQ ID NO: 17013 - DNA, 277 bp, Homo sapiens
  source 1..277: mol_type = other DNA
cactgtctctggtggctccatcagtagttactattggagctggatccggcagcccccagggaaggggctggagtggattgggtatgtctattacaatgggaacactaactacaacccctccctcaagagtcgagtcaccatatcagtagacacgtccaagaaccagttctccctgaagctgaactctgtgaccgccgcagacacggccgtctattactgtgcgagacataagggtctcgacctctggggccagggaaccctggtcaccgtctcctca

SEQ ID NO: 17014 - DNA, 277 bp, Homo sapiens
  source 1..277: mol_type = other DNA
cactgtctctggtggctccaccaggaacttctactggagctggatccggcagccccccggaaagggactggagtggattgggtatgtcttttacagtggggccactagctacaatccctccctcaggagtcgagtcaccatatcaattgacacgtccaagaaccagttctccctgaacttgaggtctgtgaccgccgcagactcggccgtctattactgtgcgagacataagggtctcgacctctggggccagggaatgctggtcaccgtctcctca

SEQ ID NO: 17015 - DNA, 277 bp, Homo sapiens
  source 1..277: mol_type = other DNA
cactatcgatggtgactccattggtaaaaacttctggacctggatacgacagtccccagagaagggactgcaatggatcggctttgtctttcataatggcgaaaggagttataatccgtccctccagaatcgagtcacaatatcagtggacacctctaggaagaagtttttcctaagattgagcgcgatgaccgccgccgacacgggcgtttattactgtgcgaggcataagggtctcgacctctggggccagggaatcccggtcaccgtctcctcg

SEQ ID NO: 17016 - DNA, 277 bp, Homo sapiens
  source 1..277: mol_type = other DNA
cactatctctggtgcctctatcggtagtttctactggagctggatccggcagcccccagggaagggactgcagtgggttggctttgtctcttacagtgggagtgccacctacaatccctccctccagagtcgagtcaccatctcaatagacacgtctaagaagaacttctcactgaacctgacctcggtgaccgccgccgacacggccgtatattattgtgcgagacataagggtctcgacctctggggccagggaattctggtcaccgtctcctca

SEQ ID NO: 17017 - DNA, 295 bp, Homo sapiens
  source 1..295: mol_type = other DNA
cactgtctctggtggctccatcagcagtagtggttactactgggtctggatccgccagcccccagggaaggggctggagtggattgggagtatcaattatagtgggagctcctactacaacccgtccctcaagagtcgagtcacctttcccgtagacacgtccaagaaccaggtctccctgaagctgagctctgtgaccgccgcagacacggctgtgtattactgtgcgagacgggggagggagaactattgggttgactactggggccagggaaccctggtcaccgtctcttca

SEQ ID NO: 17018 - DNA, 295 bp, Homo sapiens
  source 1..295: mol_type = other DNA
cactgtctctggtgactccatcggcagtagtgattactactggggctggatccgccagcccccagggaaggggctggagtggattgggagtatctatcatagtgggaaagcctactacaacccgcccctcaggagtcgagtcaccatatccgtggacacgtccaagaaccagttctccctgaaggtgacctctgtgaccgccgcagacacggctgtgtattactgtgcgagacggggccgtgagaattactgggttgactactggggccagggaaccctggtcaccgtctcctca

SEQ ID NO: 17019 - DNA, 294 bp, Homo sapiens
  source 1..294: mol_type = other DNA
gcttctggatacaccttcagtacctatgctatccattgggtgcgccaggcccccggacaaagccttgagtggatgggatggatcaacactggctctggttacacaaagtattcacaggacttccagggcagactcaccattaccagggacacatccgcgagtacagcctacatggagctgaccagcctgacatctgaagacacggctatatattactgtgcgaaagcgggggcagctcctcccggaaactggttcgactcctgggcccagggaaccctggtcaccgtctcctca

SEQ ID NO: 17020 - DNA, 294 bp, Homo sapiens
  source 1..294: mol_type = other DNA
gcttctggatacacattcactaaccatgctatacattgggtgcgccaggcccccggacaaagccttgagtggatggggtggatcgcaggtggcaacggtgaaacaaaatattcagagaagttccaggacagagtctcctttaccagggacacatctgcgaggtcatcccacatggagctgaggagcctactatctgaagacacggctacatattactgtgcgaaggcaggagcagccccacccgggaactggttcgactcctggggccagggaacccaggtcaccgtctcctca

SEQ ID NO: 17021 - DNA, 295 bp, Homo sapiens
  source 1..295: mol_type = other DNA
tgcagcctctggattcacctatagcaactatgccatgagctgggtccgccaggctccagggaaggggctggagtgggtctcagccattagtaatagtggtagtagcacatactacgcagactccgtgaagggccggttcaccatctccagagacaattccaggaacacgctgtatctgcaaatgaacagcctgagagtcgaggacacggccatatattactgtgcgacccacatgactgcggtgactacggcacttgactactggggccagggaaccctggtcaccgtctcctca

SEQ ID NO: 17022 - DNA, 295 bp, Homo sapiens
  source 1..295: mol_type = other DNA
tgcagcctctggattcacctttagcaactatgccatgagctgggtccgccaggctccagggaaggggctggagtgggtctcaactgttagtggtaatggtgttaacacatactacgcagactccgtgaagggccggttcaccgtctccagagacaattccaagaacacgctgtatctgcaaatgaacagcctgagagtcgaggacacggccctctatttctgtgcgacccatatgactgcggtgacaaccgcccttgactactggggccagggaaccctggtcaccgtctcatca

SEQ ID NO: 17023 - DNA, 304 bp, Homo sapiens
  source 1..304: mol_type = other DNA
tgcagcctctggattcaccttgagtggtcactggatgagctgggtccgccaggctccagggaaggggccggagtgggtggccaacataaagcaagatggaagtggggagtactatgtggactctgtgaagggccgattcaccgtctccagagacaacgccaagagctcagtgtttctgcaaatgaacagcctgagagtcgaggacacggctgtatatttctgtgcgagaggggcgtatagcagtggctggtaccccgactactttgactactggggccagggaaccctggtcaccgtctcctca

SEQ ID NO: 17024 - DNA, 304 bp, Homo sapiens
  source 1..304: mol_type = other DNA
tgcagcctctggattcacctttaatagcgcttggatgagctgggtccgccaggctccagggaaggggctggagtgggtggccaacataaaggaagatggaagtaagcagtactatgtggactctgtgaagggccgattcaccatctccagagacaacaccaagaactcactgtttctgcaaatgaacagcctgagaactgaggacacggccgtgtattattgtgcgagaggggcgtatagcagtggctggtacccggactactttgactactggggccacggaaccctggtcaccgtctcctca

SEQ ID NO: 17025 - DNA, 262 bp, Homo sapiens
  source 1..262: mol_type = other DNA
tgcagcctctggattcaccttcagtagctatgctatgcactgggtccgccaggctccagggaagggactggaatatgtttcagctattagtagtaatgggggtagcacatattatgcaaactctgtgaagggcagattcaccatctccagagacaattccaagaacacgctgtatcttcaaatgggcagcctgagaggcgaggcagtggctggtaattattttgactactggggccagggaaccctggtcaccgtctcctca

SEQ ID NO: 17026 - DNA, 262 bp, Homo sapiens
  source 1..262: mol_type = other DNA
ttcagcctctggattcaccttcagtacctatgccatgcactgggtccgccaggctccagggaagggactggaatatgtttcagcaattagtaataatgggggtagcacatactacgcagagtcagtgaagggcagattcaccatctccagagacagtctgagaactgaggacacggctgtgtattactgtgtgaaagatcggggaagtatagttagggactttgactattggggccagggaaccctggccaccgtctcctca

SEQ ID NO: 17027 - DNA, 286 bp, Homo sapiens
  source 1..286: mol_type = other DNA
tgcagcctctggattcacctttagtagctatgccatgagctgggtccgccaggctccagggaaggggctggagtgggtctcagctgttagtagtagtggtgctatcacatactacgcagactccgtgaagggccggttcaccgtctccagagacaattccaagaacaccctgtatctgcagatgaatagcctgagagccgaggacacggccgtatattactgtgcgaaaggaggtattaatgcttttgatatctggggccaagggacaatggtcaccgtctcttca

SEQ ID NO: 17028 - DNA, 286 bp, Homo sapiens
  source 1..286: mol_type = other DNA
tgcagcctctcaattcaccattagcacctctgccatgacctgggtccgccaggctccagggaaggggctcgagtgggtctcaactattaattatagtggtggtagcacattctacgcagactccgtgaagggccggttcaccatctccagagacaatcccaagaacacggtatttctgcaaatgaacagcctgagacccgaggacacggccctatattactgtgcgaagggggggatcaatgcttttgatatctggggccaagggacaatggtcaccgtctcttca

SEQ ID NO: 17029 - DNA, 289 bp, Homo sapiens
  source 1..289: mol_type = other DNA
tgcagcgtctgggttcagtttcagtgactatgccatgcactgggtccgccaggctccaggcaaggggctggagtgggtggcagttatatggtatgatggaagtactaaatactatgcagactccgtgaagggccgcttcaccgtctccagagacaattccaagaacacgctgtatctgcaaattaacagcctgagagccgaggacacggctgtgtattattgtgcgagagagtttaagcccagcgcgatggacgtctggggccaagggaccacggtcaccgtctcctca

SEQ ID NO: 17030 - DNA, 289 bp, Homo sapiens
  source 1..289: mol_type = other DNA
tgcagcgtctggattcaccttcaataattatgccatgcactgggtccgccagactccaggcaaggggctggagtgggtggcagttatatggtatgatggaagtaataaatattatgcagagtccgtgaagggccgatttaccgtctccagagacaattccgataacacactgtatctgcaaatgaacagcctgggagccgaggacacggctgtctattactgtgcgagagagtttaagcccagcgctatggacgtctggggccaagggaccacggtcaccgtctcctca

SEQ ID NO: 17031 - DNA, 280 bp, Homo sapiens
  source 1..280: mol_type = other DNA
tgtggcctctggattcaccttcagtaaatactggatgcactgggtccgccaagttccagggaaggggctggtgtgggtctcacgcatttatactgatggaatcagcatggattacgcggactccgtgaagggccgattcaccatctccagagacaacgccaagaacacgctgtatctgcagatgaacagtctgagagccgaggacacggctgtgtattactgtaggggttcgggggagtttgactactggggccggggaaccctggtcaccgtctcctca

SEQ ID NO: 17032 - DNA, 280 bp, Homo sapiens
  source 1..280: mol_type = other DNA
tgcagcctctggattcaacttcagcacctactggatgcactgggtccgccaagctccagggaaggggctggtgtgggtctcacgtatttatcgtgatgggaggattacaaactatgcggactccgtgaagggccgattcaccatctccagagacaacgccaagaacacggtgtatctgcaaatgaacagcctgagagtcgaagacacggctgtgtattattgtagggggtccggggagttcgactactggggccagggaaccctggtcaccgtctcctca

SEQ ID NO: 17033 - DNA, 283 bp, Homo sapiens
  source 1..283: mol_type = other DNA
tgtagcctcgggattcactttcagtagttatgccatcacctgggtccgccaggctccagggaaggggctggagtgggtttccttcattagcagtagtagtagtgccatacattacgcaaactctgtgaagggccgattcaccatctccagagacaacgccaagaactcactgtctctgcaaatgaacagcctgagagccgaggacacggctgtgtattactgtgcgaggacgagtggctggtccgactactggggccagggaaccctggtcaccgtctcctca

SEQ ID NO: 17034 - DNA, 283 bp, Homo sapiens
  source 1..283: mol_type = other DNA
tgcagcctctggattcaccttcagtagctatagcatgaactgggtccgccaggctccagggaaggggctggagtgggtttcatacattagtagtagtagtagtaccatatactacgcagactctgtgaagggccgattcaccatctccagagacaacgccaagaactcactgtttctgcaaatgaacagcctgagagccgaggacacggctgtgtattactgtgcgagaacctctggatggtctgactactggggccagggaaccctggtcaccgtctcctca

SEQ ID NO: 17035 - DNA, 298 bp, Homo sapiens
  source 1..298: mol_type = other DNA
tgtagcctctggattcaccttcagtagctatgctatgcactgggtccgccaggctccaggcaaggggctggagtgggtggcaattatatcttatgatggaagtaataaatactacgcagactccgtgaagggccgattcaccatctccagagacaattccaagaacacgctgtctctgcaaatgaacagcctgagagctgaggacacggctgtgtattactgtgcgagaagtcatactggtaactactactacggtatggacgtctggggcctagggaccacggtcaccgtctcctca

SEQ ID NO: 17036 - DNA, 298 bp, Homo sapiens
  source 1..298: mol_type = other DNA
tgcagcctctggattcaccttcagtacctatgctatgtactgggtccgccaggctccaggcaaggggctggagtgggtggctcttattgcatatgatggagataaaaaatactacgcagactccgtgaagggccgattcaccatctccagagacaattccaaggacacgctgtatctgcaaatgaacagcctgagaggtgaggacacggctgtgtatttctgtgcgagaagccacacaggcaactactactacggtatggacgtctggggccacgggaccacggtcaccgtctcctca

SEQ ID NO: 17037 - DNA, 295 bp, Homo sapiens
  source 1..295: mol_type = other DNA
tacagcctctggattgatcttcagtgaccattacatggactgggtccgccaggccccagggaaggggccggagtgggttgcccgtattaaaaataaagctgacgcttacggcacactttatgccgcgtctgtgagaggcagattcaccatcgcaagggaggattcaatgaactccctgtatctgcagatgaacagtctgagaaccgaggacacggccgtgtattactgcgctagagtggggtatagtgggagcgaagactactggggccagggaaccctggtcaccgtctcccca

SEQ ID NO: 17038 - DNA, 295 bp, Homo sapiens
  source 1..295: mol_type = other DNA
tacagcctctggattgatcttcagtgaccattacatggactgggtccgccaggccccagggaaggggccggagtgggttgcccgtattaaaaataaagctgacgcttacggcacactttatgccgcgtctgtgagaggcagattcaccatctcaagggatgattcaatgaactccctgtatctgcagatgaacagtctgagaaccgaggacacggccgtgtattattgcgctagagtgggctatagtgggagcgaggactactggggccagggaaccctggtcaccgtctcccca

SEQ ID NO: 17039 - DNA, 295 bp, Homo sapiens
  source 1..295: mol_type = other DNA
tgcagcctctggaatcattttcagtgaccactacatggactgggtccgccaggctccagggaaggggctggagtgggttgcccgtattacaaccaaaggtgacggttatggcacacaatacgccgcgtctgtgaagggcagattcaccatctcaagagttgattcaaaaaattcactatacttgcaaatgaacagcctgaaaaccgacgacacggccgtgtattattgtgctagagtcggatacagtggctccgaggactactggggccagggaactctggtcaccgtctcctca

SEQ ID NO: 17040 - DNA, 277 bp, Homo sapiens
  source 1..277: mol_type = other DNA
tgcagcctctggattcagcttcagtgactactacatgagctggatccgccaggctccagggaaggggctggagtgggtctcagctattagtggtagtggtggtagcacatactacgcagactccgtgaagggccggttcaccatctccagagacaattccaagaacacgctgtatctgcaaatgaacagcctgagagccgaggacacggccgtatattactgtgcgcttaggaggggtgactactggggccagggaaccctggtcaccgtctcctca

SEQ ID NO: 17041 - DNA, 277 bp, Homo sapiens
  source 1..277: mol_type = other DNA
tgcagcctctggattcacctttagcagctatgccatgagctgggtccgccaggctccagggaaggggctggagtgggtctcagctattagtgatagtggtggtagcacatactacgcagactccgtgaagggccggttcaccatctccagagacaattccaagaacacgctgtatctgcaaatgaacagcctgagagccgaggacacggccgtatattactgtgccctccggcggggagactactggggccagggaaccctggtcaccgtctcctca

SEQ ID NO: 17042 - DNA, 283 bp, Homo sapiens
  source 1..283: mol_type = other DNA
tgcagcctctggattcacctttagcagccctaccatgacctgggtccgccaggctccagggatggggctggagtgggtctcatctattgctcctaatggtggttacacatactacgcagactccgtgaagggccgtttcaccatctccagagacaattccaagaacactctgtatttgcaaatgaacagcctgagagccgaggacacggccgtttattactgtgcgagagggtcctacggtccggacgtctggggccaagggaccacggtcaccgtctcctca

SEQ ID NO: 17043 - DNA, 283 bp, Homo sapiens
  source 1..283: mol_type = other DNA
tgcagcctctggattcaccttcagcacctactacatgacttgggtccgccaggctccagggaaggggctggagtgggtctcaagtattggtggaggtggagttagcacatactacgcagactccgtgaagggccggttcaccatctccagagacaattcccagaacacgctgttcttgcaaatgaacggcctgagagccgaggacacggccgtatattactgtgcgagaggtagctacggtccggacgtctggggccaagggaccacgatcaccgtctcccca

SEQ ID NO: 17044 - DNA, 286 bp, Homo sapiens
  source 1..286: mol_type = other DNA
tgcagcctctggattcacctttagaaccttttggatgacatggctccgccaacttccagggaaggggctggagtgggtggccatcttaaagccagatggaactgagacatattatgtggactctgtgaggggccgcttcaccatctccagagacaatgccaagaattcgctgtttctccaaatgaacaacctgagagccgaagacacggccgtgtatttctgtgcgagagacaacaatgatctttttgactattggggccagggaaccctggtcaccgtctcctca

SEQ ID NO: 17045 - DNA, 286 bp, Homo sapiens
  source 1..286: mol_type = other DNA
tgcagcctctggattcacctttaggacctattggatgagctgggtccgccaggctccagggaaggggctggagtgggtggccaacattaaccccgatggaagtgcggacttctatgtggactctgtgaggggccgattcaccatctccagagacaacgccaagaactcactgtctctgcaaatgaataccctgagagccgaggacacggctgtgtattactgtgcgagagataacaacgatctttttgactactggggccagggaaccctggccaccttctcctca

SEQ ID NO: 17046 - DNA, 286 bp, Homo sapiens
  source 1..286: mol_type = other DNA
tgcagcctctggattcacctttaggacctattggatgagctgggtccgccaggctccagggaaggggctggagtgggtggccaacattaaccccgatggaagtgcggacttctatgtggactctgtgaggggccgattcaccatctccagagacaacgccaagaactcactgtctctgcaaatgaataccctgagagccgaggacacggctgtgtattactgtgcgagagataacaacgatctttttgactactggggccagggaaccctggtcaccttctcctca

SEQ ID NO: 17047 - DNA, 289 bp, Homo sapiens
  source 1..289: mol_type = other DNA
tgcaggctctgaattcactttcagtacctatggcatgtactgggtccgccaggctccagggaaggggctggagtgggtttcatatattagtgagagtagtagtgccaaatactacgcagactctgtgaagggccgattcaccatctccagagacaacgccaagaattcaatgtttctgcaaatgaacagcctgagagccgaggacacggctgtgtattactgtgcgagattacgctccggtggctacgctgactactggggccagggaaccctggtcaccgtctcctca

SEQ ID NO: 17048 - DNA, 289 bp, Homo sapiens
  source 1..289: mol_type = other DNA
tgcagcctctggcttcaccttcaggacctatggcatgtactgggtccgccaggctccagggaaggggctggagtgggtttcatacattagtgatactattagtaccacgtactacgcagactctgtgaagggccgattcaccatctccagagacaatgcccagaactcactgtatctgcaaatgaacagcctgagagacgaggacacggccgtctattattgtgcgagactgagaagtggtggttatgccgactactggggccagggaaccctggtcaccgtctcctca

SEQ ID NO: 17049 - DNA, 289 bp, Homo sapiens
  source 1..289: mol_type = other DNA
tgcagtctctggattcaccttcaggacctatggcatgaactgggtccgccaggctccagggaaggggctggagtgggtttcatacattagtgaaactggtactaccatgtactacgcagactctgtgcagggccgattcaccatctccagagacaatgccaagaactcactgtatctgcaaatgaacagcctgagggacgaggacacggctgtttattattgtgcgagactgagaagtggtggttacgccgactactggggccagggaaccctggtcaccgtctcctca

SEQ ID NO: 17050 - DNA, 289 bp, Homo sapiens
  source 1..289: mol_type = other DNA
tgcagcctctggcttcaccttcaggacctatggcatgtactgggtccgccaggctccagggaaggggctggagtgggtttcatacattagtgatactattactaccacgtactacgcagactctgtgaagggccgattcaccatctccagagacaatgcccagaactcactgtatctgcaaatgaacagcctgagagacgaggacacggccgtctattattgtgcgagactgagaagtggtggttatgccgactactggggccagggaaccctggtcaccgtctcctca

SEQ ID NO: 17051 - DNA, 286 bp, Homo sapiens
  source 1..286: mol_type = other DNA
tgcagcctctggattcaccttcggtaactacgacatgcactgggtccgccaagctccggggaaggggctggtgtgggtcgcacgaattaacaatgatggggatagtataacctacgcggactccgtgaagggccgattcaccatctccagagacaacgccaagaacacggtgtatgtgcaaatgaacagtctgagagtcgaggacacggctgtatattactgtgcaagagattggtggggatcattagagtattggggccagggaaccctggtcaccgtctcctca

SEQ ID NO: 17052 - DNA, 286 bp, Homo sapiens
  source 1..286: mol_type = other DNA
tgcagcctctggattcaccttcagtatttacgacatacactgggtccgccaggttccagggaaggggctggtgtgggtctcacgtattaaggctgatggaagtgacacaaccctcgcggactccgtgaagggccgattctccatctccagagacaacgccaagaacacggtgtatttgcaaatgaacagtctgagagccgaggacacggctgtctatttctgtgcaagagactggtggggatcccttgagtactggggccagggagtcctggtcaccgtctcctca

SEQ ID NO: 17053 - DNA, 286 bp, Homo sapiens
  source 1..286: mol_type = other DNA
tgcagcctctggattcaccttcagtacctatagcatgaactgggtccgccaggctccagggaaggggctggagtgggtttcatacactagtagtagtagtagtaccatatactacgcagactctgtgaagggccgattcaccatctccagagacaacgccaagaactcactgtatctgcaaatgaacagcctgagagccgaggacacggctgtgtattactgtgcgagggatgattactattactttgactactggggccagggaaccctggtcaccgtctcctca

SEQ ID NO: 17054 - DNA, 286 bp, Homo sapiens
  source 1..286: mol_type = other DNA
tgcagcctctggatttaccttcattacctatagcatgaactgggtccgccaggctccagggaaggggctggagtgggtttcatacattagtagtagtagtagtaccatatactacgcagactctgtgaagggccgattcaccatctccagagacaatgccaagaactcactgtatctgcagatgaacagcctgagagacgaggacacggctgtctattactgtgcgagagatgactactattactttgactactggggccagggaaccctggtcaccgtctcctca

SEQ ID NO: 17055 - DNA, 290 bp, Homo sapiens
  source 1..290: mol_type = other DNA
ccatctccggggacagtgtctctagcaacagcgctacttggaactggatcaggcagtccccatcgagaggccttgagtggctgggaaggacatactacaagtccaagtggtttaatgattatgcagaatctgtgaaaagtcgaataaccatcaacccagacacatccaagaaccaattctccctgcagctgaactctgtgactcccgaggacacggctgtgtattactgtgcaagggggggagctaagtttgactactggggccagggaaccctgctcaccgtctcctca

SEQ ID NO: 17056 - DNA, 290 bp, Homo sapiens
  source 1..290: mol_type = other DNA
ccatctccggggacagtgtctctagtaacagtgctgtttggaactggatcaggcagtccccatcgagaggccttgagtggctgggaaggacatattataggtccaagtggtataatgattatgcagtatctgtgaaaagtcgaataatcatcaacccagacacatccaagaaccagttctccctgcaactgaactctgtgactcccgaggacacggctgtgtattactgtgcaagagggggagcgaagtttgactactggggccagggaaccctggtcaccgtctcctct

SEQ ID NO: 17057 - DNA, 289 bp, Homo sapiens
  source 1..289: mol_type = other DNA
tgtgggctctggattcacctttagcagttattggatcagctgggtccgccgggctccagggaaggggctggagtgggtggccaacataaagaaagatggaagtgagaggtactatgaggactctgtgaagggccgattcaccatctccagagacaacgccaagaattcagtgtatctggaaatgaacaacctgagagccgaggacacggctgtattttactgtgcgagagaccccgacggccattattttgactattggggccagggagccctggtcatcgtctcctca

SEQ ID NO: 17058 - DNA, 289 bp, Homo sapiens
  source 1..289: mol_type = other DNA
tgtaggctccggattcacctttagtaacttttggatgagctgggtccgcctgcctccagggaaggggctggagtgggtggccaatattaaaaaagatggaagtgagagatattatgcggactctgtgaggggccgattcaccatctccagagacaacgccaagaactcagtgtatctgcaaataaacagcccgagagccgaggacacggctgtctattactgtgcgagagatcccgacggtcattactttgactattggggccagggagccctggtcaccgtctcctca

SEQ ID NO: 17059 - DNA, 289 bp, Homo sapiens
  source 1..289: mol_type = other DNA
tgtagtctctggattcaccttcagtaacttttggatgagctgggtccgcctgcctccagggaaggggctggagtgggtggccaatataaagaaagatggaagtgagagatattatgcggactctgtgaggggccgattcaccatctccagagacaacgccaagaactcagtgtatctgcaaataaatagtccgagagccgaggacacggctgtctattactgtgcgagagatcccgacggtcattactttgattattggggccagggagccctggtcaccgtctcgtca

SEQ ID NO: 17060 - DNA, 289 bp, Homo sapiens
  source 1..289: mol_type = other DNA
tgtagtctctggattcacctttaataacttttggatgagctgggtccgcctgcctccagggaaggggctggagtgggtggccaatataaagaaagatggaagtgagaaatactacgcggactctgtgaggggccgattcaccatctccagagacaacgccaagaactcagtgtatctggaaataaacagcccgagagccgaggacacggctgtctattactgtgcgagagatcccgacggtcactactttgactattggggccagggaaccctggtcaccgtctcctca

SEQ ID NO: 17061 - DNA, 289 bp, Homo sapiens
  source 1..289: mol_type = other DNA
tgcagtctctggattcaccttcagtaacttttggatgagctgggtccgcctgcctccagggaaggggctggagtgggtggccaatataaagaaagatggcagtgagagatattatgcggactctgtgaggggccgattcaccatctccagagacaacgccaagaactcagtgtatctgcaaataaacagtccgagagccgaggacacggctgtctattactgtgcgagagatcccgacggtcattactttgactattggggccagggagccctggtcaccgtctcgtca

SEQ ID NO: 17062 - DNA, 286 bp, Homo sapiens
  source 1..286: mol_type = other DNA
tgcagcctctggattcacctttagtagctgttggatgaactgggtccgccaggctccagggaaggggctggagtgggtggcgaatataaagaaagatggaagtgagaaatactatgtggactctgtgaagggccgattcaccatctccagagacaacgccaagaactcactgtatctgcaaatgaacagcctgagagccgaggacacggccgtgtactactgtgcgagagggtcgtctggggctcttgatatctggggccaagggacaatggtcaccgtctcttca

SEQ ID NO: 17063 - DNA, 286 bp, Homo sapiens
  source 1..286: mol_type = other DNA
tgcagcctctggattcacctttagtagctattggatgaactgggtccgccaggctccagggaaggggctggagtgggtggccaacatgaagcaagatggaagtgggaaatactatgtggactctgtgaagggccgattcaccatctccagagacaacgccaagaactcactgtatctgcaagtgaacagcctgagagccgaggacacggctgtgtattactgtgcgagaggatctagtggtgctcttgatatctggggccaagggacaatggtcaccgtctcttca

SEQ ID NO: 17064 - DNA, 293 bp, Homo sapiens
  source 1..293: mol_type = other DNA
ccatctccggggacactgtctctgacaccggacttgcttggaattggatcaggctgtccccatcgagaggccttgagtggctgggaaggacattctacaatttcaagtggtttaatgagtattcaccatctgtgcgaggtcgaataaccttcaacgcagacacttccaataaccagttctccctgcaattgaactctgtgactcccgacgacacggctatgtattattgtgcaagaggtgcagaccgttcccttgactactggggccagggaatcctggtcaccgtctcctca

SEQ ID NO: 17065 - DNA, 293 bp, Homo sapiens
  source 1..293: mol_type = other DNA
tcatctccggttatggtgtctctgccgacggtgttgcttggaactggatcaggcagtccccatcgagaggccttgagtggctgggaaggacattctataggtccaagtggtattttgaatatggagtatctgtgaaaggtcgaatgaccatcagcccagacacaaccaggaatcagttctctctgcacgtgagggctgtgactcccgaggacacggctgtgtactactgtgcaagaggggccgacaggtcccttgactactggggccagggaaccctagtcaccgtctcctca

SEQ ID NO: 17066 - DNA, 280 bp, Homo sapiens
  source 1..280: mol_type = other DNA
tgcagcctctggattcgcatttaatacttattggatgacctgggcccgccaggttccagggaaggggccggagtgggtggccaacataaaatacagtggaagtgaaatatactatgtggactctgtgaggggccgattcaccatctccagagacaacgccaagaattcactatatctggaaatgaacagcctgagagtcgacgacacggctgtgtattactgtgcgagggcaatcagcatggacgtctggggccaagggaccacggtcaccgtctcttca

SEQ ID NO: 17067 - DNA, 280 bp, Homo sapiens
  source 1..280: mol_type = other DNA
tgcagcctctggattcgcatttaatacttattggatgacctgggcccgccaggttccagggaaggggccggagtgggtggccaacataaaatacagtggaagtgaaatatactatgtggactctgtgaggggccgattcaccatctccagagacaacgccaagaattcactatatctggaaatgaacagcctgagagtcgacgacacggctgtgtattactgtgcgagggcaatcagcatggacgtctggggccaagggaccacggtcaccgtctcatca

SEQ ID NO: 17068 - DNA, 280 bp, Homo sapiens
  source 1..280: mol_type = other DNA
tgcagcctctggattcaactttagaacctactggatgacctgggtccgccaggtttcagggagggggctggagtgggtggccaacatcaacccagatgggactgagacatactatgtggactctgtgaacggccgattcaccatctccagagacaacgccaaaaactctctgtacctgcaactggacagcctgagagtcgacgacacggctctatatttctgtgcgagggccatcagcatggacgtctggggcaaagggaccacggtcatcgtctcctca

SEQ ID NO: 17069 - DNA, 280 bp, Homo sapiens
  source 1..280: mol_type = other DNA
tgcagcctctggattcacctttaggagtttttggatgacgtgggtccgccaggctccagggaaggggctggagtgggtggccaacataaatcatgatggaagtgagaaatactatgtggactctgtggagggccgattcaccatctccagagacaacgccaagaactcactgtatctgcaattgaacagcctgagagccgaggacacggctgcgttttactgtgcgagagctataagtatggacgtctggggtcaagggaccacggtcaccgtctcctca

SEQ ID NO: 17070 - DNA, 283 bp, Homo sapiens
  source 1..283: mol_type = other DNA
tgcagcctctggattcagttttagtaactattggatgagctgggtccgccaggctccagggaaggggctggagtgggtggccaacataaaggaagatggaagtgagaaattctatgtggactctgtgaagggccgattcaccatctccagagacgacgccaagaagtcactgtatctgcaaatgaacagcctgagagccgaggacacggctgtttattactgtgcgaaagataacgatggttttgatatttggggccaagggacaatggtcagcgtctcttca

SEQ ID NO: 17071 - DNA, 283 bp, Homo sapiens
  source 1..283: mol_type = other DNA
tgtagcctctggattcacctttagtagcttttggatgagctgggtccgccaggctccagggaaggggctggagtgggtggccaacataaattacgatggaagtgagaagtactctatggactctgtgaagggccgattcaccatctccagagacaaccccgagaactcactgtatctgcagatgaacagcctgagcgccgaggacacggctgtgtattactgtgcgaaagacaacgatggttttgatatctggggccaagggacaatggtcaccgtctcttca

SEQ ID NO: 17072 - DNA, 298 bp, Homo sapiens
  source 1..298: mol_type = other DNA
tacaacttctggattcagctttggtgattatgctatgagctgggtccgccaggctccagggaaggggctggagtgggtaggtttcattagaagcaaacgttatggtgggacaatacaatacgccgcgtctgtgagaggcagattcaccatctcaagagatgattccaaaagtatcgcctatctgcaaatgaacagcctgaaaaccgaggacacagccgtatattattgtggggtgactacttactactactacggtatggacgtctggggccaagggaccacagtcaccgtctcctca

SEQ ID NO: 17073 - DNA, 298 bp, Homo sapiens
  source 1..298: mol_type = other DNA
tacagcttctggattcacctttggtgattatgctatgagctgggtccgccaggctccagggaaggggctggagtggttaggtttcattagaagcaaagcttatggtgggacaacagaatacgccgcgtctgtgaaaggcagattcaccatctcaagagatgattccaaaagcatcgcctatctgcaaatgaacagcctgaaaaccgaggacacagccgtgtattactgtggggttaccacatactactactacggtatggacgtctggggccaagggaccacggtcaccgtcccctca

SEQ ID NO: 17074 - DNA, 295 bp, Homo sapiens
  source 1..295: mol_type = other DNA
tgcagcctctggattctccttcactgtctactggatgtactgggtccgccaagctccagggaaggggctagtgtgggtctcaaagatcaataacgatgggagtggttcaacttgtgcggactccgtgaagggccgattcaccatctccagagacaacgccaagaacacggtgtctctgcaaatgaatagtctgagagccgaggacacggctgtctattactgtgcaagaggaggccgaggaggtttatactacattgactactggggccagggaacccaggtcaccgtctcctca

SEQ ID NO: 17075 - DNA, 307 bp, Homo sapiens
  source 1..307: mol_type = other DNA
tgcagcctctggatacacctctggactcagcttcaatatttattggatgtattggttccgccaagctccagggaaggggctggagtgggtctcacgtattattgatgatgagagtgatgcgatttatgctgactccgtgaagggccgattcaccatctccagagacaacgccaagaacacactgtctctgcaactgaacagtctgagagtcgaagacacggctatatattactgtgcaagagggggtagagggggcctttattacattgactactggggccagggaacgctggtcaccgtctcctca

SEQ ID NO: 17076 - DNA, 286 bp, Homo sapiens
  source 1..286: mol_type = other DNA
tgcagcctctggattcagctttgatgattctgccatgcactgggtccgtcaagctccagggaagggtctggagtgggtctctcttattagcagagatggtgctaacacatactatgcagactctgtgaagggccgattcaccatctccagagacaccagcaaaaactccctgtatctgcaaatgagcagtctgagaactgaggacaccgccttatattactgtgcaagaggggggcagtggctcatacgcaactggggccagggaaccctggtcaccgtctcctca

SEQ ID NO: 17077 - DNA, 286 bp, Homo sapiens
  source 1..286: mol_type = other DNA
tgcagcctctggattcatctttgatgattatgccatgcactgggtccgtcaagctccagggaagggtctggagtgggtctctcttattggtggggatggtgttaggacatactatgcagactctgtgaagggccgattcaccatctccagagacaacagcaaaaactccctgtatctgcaaatgaacagtctgagaactgacgacaccgccttctattactgtgcaagaggggggcagtggctgataaggaactggggccagggaaccctggtcaccgtctcttca

SEQ ID NO: 17078 - DNA, 292 bp, Homo sapiens
  source 1..292: mol_type = other DNA
tgcagcctctggattcatctttagtgactattacatgagctgggtccgccaggctccagggaagggcctggagtgggtagccaacatagaccaacaaggaagtgacacatactatgcggactctgtgaagggccgattcaccgtctccagagacaacgcccaaaactcactctatctgcaaatgaacagcctgagagccgaggacacggctgtgtatttctgtgcgagagggatagggacatatgccctctttgcctactggggccagggaaccctggtcactgtctcttca

SEQ ID NO: 17079 - DNA, 292 bp, Homo sapiens
  source 1..292: mol_type = other DNA
tgcagcctctggattcacttttagcgactattatatgagctgggtccgccaggctccagggaagggactggagtgggtggccaacatacaacaacatggaagtgacaaattctatgtggactctgtgaaaggccgattcaccatctccagagacaactccaagaacctactgtatttgcaaatggacagcctgagagtcgaggacacggctgtatattactgtgcgagaggtattggcacctacgcgttgtttgcctactggggccagggggccctagtcaccgtctcatcc

SEQ ID NO: 17080 - DNA, 280 bp, Homo sapiens
  source 1..280: mol_type = other DNA
tgcagcctctggattcaccttaagcagctatgtcatgagctgggtccgccaggctccagggaaggggctggagtgggtctcacttattgatagtgctgatggtaaggcatactatgcagactccgtgaagggccgggtcaccatctccagagatgattccaagaacacactatatctgcaaatgaaccgcctgagcgccgaggacacggccgtatattactgtgcgaaagatcgcatggcggccaactggggccagggaaccctggtcaccgtctcctca

SEQ ID NO: 17081 - DNA, 280 bp, Homo sapiens
  source 1..280: mol_type = other DNA
tgcagcctctggattcacctttagcacctatggcatgagctgggtccgccaggctccagggagggggctggagggggtctcaagtattggtagtggtggtattagtgcatactacgcagactccgtgaagggccggttcaccatctccagagacaattccaagaacaccctttatctggaaatgaacagcctgagagccgaggacacggccatatattactgtgcgaaagatcggatggcagcaaactggggccagggaaccctggtcaccgtctcctca

SEQ ID NO: 17082 - DNA, 283 bp, Homo sapiens
  source 1..283: mol_type = other DNA
tgcagcctctggattcaccttcagtggctactggatggactgggtccgccaaggtccagggaaggggctgatgtgggtctcacgtcttaatagtgatggcagtatcacaagttatgcggactccgtgaagggccgattcaccatctccagagacaacgccaagaacacactgtctctgcaaatgaacagtctgagagccgaggacacggctgtgtattactgtgcaagaggtgggcggtacttcgatctctggggccgtggcaccctggtcactgtctcctca

SEQ ID NO: 17083 - DNA, 283 bp, Homo sapiens
  source 1..283: mol_type = other DNA
tgcagcctctggattcaccttcagtagctactggatgcactgggtccgccaagctccagggaaggggcaggtgtgggtctcacgtatgcatagtgatgggagtaccacaacctacgcggagtccgtgaagggccgattcaccatctccagagacaacgccaagaacacactatatctgcaaatgaacagtctgagagtcgaggacacggctgtgtattactgtgcaagagggggtcggtacttcgatctctggggccgcggcaccctggtcactgtctcctca

SEQ ID NO: 17084 - DNA, 289 bp, Homo sapiens
  source 1..289: mol_type = other DNA
tgcagcctctggattcaccttcagtgactactacatgatctggatgcgccaggctccagggaaggggctggagtgggtttcatacattagcaatagtggtagtatcaaatattacgcagactctgtgaagggccgattcaccatctccagggacaacaccaagaactcaatatatctgcaaatgaacagcctgagagtcgaggacacggccgtgtattactgtgcgagacatattgtggtggtgactgcccccccctggggccagggaaccctggtcaccgtctcctca

SEQ ID NO: 17085 - DNA, 289 bp, Homo sapiens
  source 1..289: mol_type = other DNA
tgcagcctctggattcaccttcagcgactactacatgatctggatccgccaggctccagggaaggggctggagtgggtttcatacattagcaagagtggtagtatcaaatattacgcagactctgtgaagggccgattcaccatctccagggacaacaccaagaactcaatatatctgcaaatgaacagcctgagagtcgaggacacggccgtgtattactgtgcgagacatattgtggtggtgactgcccccccctggggccagggaaccctggtcaccgtctcctca

SEQ ID NO: 17086 - DNA, 289 bp, Homo sapiens
  source 1..289: mol_type = other DNA
tgcagcctctggattcaccttcagtgactactacatgagctggatccgccaggctccagggaaggggctggagtacatttcatatataagtggtaatggttataccatatactacgcagactctgtgaagggccgattcaccatctccagggacaacgccaagaactcactgtatctgcaaatgaacagcctgagagccgaggacacggccgtgtattactgtgcgcggcatattgtggtggtgactgcgcccccctggggccagggaaccctggtcaccgtctcctca

SEQ ID NO: 17087 - DNA, 289 bp, Homo sapiens
  source 1..289: mol_type = other DNA
tgcagcctctggattcaccttcagtgactactacatgatctggatccgccaggctccagggaaggggctggagtgggtttcatacattagtagtagtggtagtatcgtatactacgcagactctgtgaagggccgattcaccatctccagggacaacgccaagaactcactgtatctgcaaatgaacagcctgagagccgaggacacggccgtgtattactgtgcgcggcatattgtggtggtgactgcgcccccctggggccagggaaccctggtcaccgtctcctca

SEQ ID NO: 17088 - DNA, 289 bp, Homo sapiens
  source 1..289: mol_type = other DNA
tgcagcctctggattcaccttcagtgactactacatgacctggatccgccaggctccagggaaggggctggagttggtttcatacattagtaatagtggtggtatgatttactatgcagactctgtgaagggccgattcaccatctccagggacaacgccaagaactcactgtatctgcaaatgaacagcctgagagccgaggacacggccgtgtattactgtgcgcggcatattgtggtggtgactgcgcccccctggggccagggaaccctggtcaccgtctcctca

SEQ ID NO: 17089 - DNA, 289 bp, Homo sapiens
  source 1..289: mol_type = other DNA
tgcagcctctggattcaccttcagtgactactatatgagttggatccgccaggctccagggaaggggctggagtacctttcacatattagtggtaatggttataccatatactacgcagactctgtgaagggccgattcaccatctccagggacaacgccaagaactcactgtatctgcaaatgaacagcctgagagccgaggacacggccgtgtattactgtgcgcggcatattgtggtggtgactgcgcccccctggggccagggaaccctggtcaccgtctcctca

SEQ ID NO: 17090 - DNA, 289 bp, Homo sapiens; identical to SEQ ID NO: 17087
  source 1..289: mol_type = other DNA

SEQ ID NO: 17091 - DNA, 277 bp, Homo sapiens
  source 1..277: mol_type = other DNA
tgcagcctctggattcaccttcaatacctactggatgcactgggtccgccaagttccagggaaggggctactgtgggtctcacgtattaatagtgatgggactttaacaacctacgcggactccgtgaagggccgattcaccatctccagagacaacgccaagaacacgttgcatctgcaaatgaacagtctgagagccgaggacacggctgtgtattattgtacaagaggactcggggaccactggggccagggaaccctggtcaacgtctcctca

SEQ ID NO: 17092 - DNA, 277 bp, Homo sapiens
  source 1..277: mol_type = other DNA
tgcagcctctggattcatctttagtggctactggatgcactgggtccgccaagttccaggaaaggggctggtgtgggtctcacgtattaatggtgatggaagtatgacaacctacgcggactccgtgaagggccgattcaccatatccagagacaacgcccacaacacgttgtttctgcaaatgaactctctgacagtcgacgacacggctgtgtattactgcacaaggggcttgggtgaccactggggccagggagccctggtcaccgcctcctca

SEQ ID NO: 17093 - DNA, 280 bp, Homo sapiens
  source 1..280: mol_type = other DNA
tgcagcctctggattcacctttagcagctatgccatgacctgggtccgccaggctccagggaaggggctggagtgggtctcagctattggtactggtggtgtcgcatataacgcagacttcgtgaagggccggtttatcatctccagagacaattccaagaacacggtgtatctgcaaatgaacagcctgagagccgaggacacggccgtatatttctgtgcgaaaggtggggggtggatggacgtctggggcaaagggaccacggtcaccgtctcctca

SEQ ID NO: 17094 - DNA, 283 bp, Homo sapiens
  source 1..283: mol_type = other DNA
tgcagcgtccggattcacgtttatgagttatggcatgacctgggtccgccaggctccagggaaggggctggagtgggtctcagcaatttctaatagtggtggtagcacatactacgcagactccgtgaagggccggttcaccatctccagagacaattccaagaacacgctatatctgcaaatgaacaacctgagagccgaggacacggccgtatattactgtgcgaaaggggggggctggatggacgtctggggcgaagggaccacggtcaccgtctcctca

SEQ ID NO: 17095 - DNA, 301 bp, Homo sapiens
  source 1..301: mol_type = other DNA
tgcagcctctggattcacctttagcagctatgccatgagctgggtccgccaggctccagggaaggggctggagtgggtctcaggcattagtcgtagtggtggaagcacatactacgcagactccgtgaagggccggttcaccatctccagagacaattccaagaacacgctgtatctgcaaatgaacagcctgagagccgaggacacggccgtatattactgtgcgaaagatcgtggggctatgatagtagtggttatttgggactactggggccagggaaccctggtcaccgtctcctca

SEQ ID NO: 17096 - DNA, 301 bp, Homo sapiens
  source 1..301: mol_type = other DNA
tgcagcctctggattcacctttagcagctatgccatgagctgggtccgccaggctccagggaaggggctggagtgggtctcaggcattagtcgtagtggtggaggcacatattacgcagactctgtgaagggccggttcaccatctccagagacaattccaagaacacgctgtatctgcaaatgaacagcctgagagccgaggacacggccgtgtattactgtgcgaaagatcgtggggctatgatagtagtggttatttgggactactggggccagggaaccctggtcaccgtctcctca

SEQ ID NO: 17097 - DNA, 301 bp, Homo sapiens
  source 1..301: mol_type = other DNA
tgcagcctctggattcaactttggcaactatgccatgagctgggtccgccaggctccagggaaggggctggagtgggtctcaggtattagtcgtgatggtgatagcacatactacgcagactccgtgaagggccggttcaccatctccagagacaattccaagaacacgctgcatctgcacatgaacagcctgagagccgaggacacggccgtatattactgtgcgaaagatcgaggggctatgatagtagtggttatttgggactactggggccagggaaccctggtcaccgtctcctca

SEQ ID NO: 17098 - DNA, 301 bp, Homo sapiens
  source 1..301: mol_type = other DNA
tacatcctctggattcagtttcagcacctattccatgaactgggtccgccaggctccggggaaggggctggagtgggtctcaatcgtttatggcggtggttcttcagcaagatattatgcagactccgtgaggggacgcttcaccatctccagagatgattccaagaacacactgtttctgcaaatggagagcctgagagtcgaggacacggccgtttattactgtgcgaaagatcgagtcgtagatggtctcttcgaaattgacttctggggccagggaatcctggtcaccgtctcctca

SEQ ID NO: 17099 - DNA, 298 bp, Homo sapiens
  source 1..298: mol_type = other DNA
tgtagcctctggattcagatttgccggcttttccatcaactgggtccgccaggctccagggaagggtctggagtgggtctcaatcatctatcaacgcggggcgaccacatattatgcggactctgtgaggggccgcttcaccatgtccagagatgactccaggaacgcagtcttcctgcaaatgaacaacctgagagacgaggacacggccatatattattgtgcgaaagaccgtgtagtggacggcctcttcgaaattgacttctggggccagggaaccctggtcaccgtctcctca

SEQ ID NO: 17100 - DNA, 295 bp, Homo sapiens
  source 1..295: mol_type = other DNA
tgcaggctctggattcaccttcagtgactatcacataggctggatccgccaggctccagggaaggggctggagtgggtttcgttcattcgtagtagtagtcttcacacaagctacgcagactctgtgaagggccgcttcaccatctccagagacgacgccaagaactcagtgtatctgcaaatgaacagcctgagagccgaggacacggccctgtattactgtgcgagagatcccgtggacggctatgcccattttgaccactggggcaagggaaccctggtctccgtctcctcg

SEQ ID NO: 17101 - DNA, 295 bp, Homo sapiens
  source 1..295: mol_type = other DNA
tgcagcctctggattcaccttcagtgactataacataggctggatccgccaggctccagggaaggggctggagtgggtttcgttcattcgtcgtagtagtctttacacaagctacgcagactctgtgaagggccgcttcaccatctccagagacgacgccaggaactcagtgtatctgcaaatgaacagcctgagagccgaggacacggccctgtattactgtgcgagagatcccgtggacggctatgcccattttgaccactggggcaagggaaccctggtctccgtctcctcg

SEQ ID NO: 17102 - DNA, 292 bp, Homo sapiens
  source 1..292: mol_type = other DNA
tgaagcctctggattcaccttcagtgacttccacatgagttggatacgccaggctccagggaaggggctggagtgggtttcatatattaggactgctggttccatatactactcagactctgtcaagggccggttcaccatctccagggacaacgccaagaactcactgcacctgcatatgaacagcctgagagccgacgacacggccgtgtattactgtgcgagagaccccgtggatggctacgcacattttgaccactggggccagggaaccctggtcaccgtctcctca

SEQ ID NO: 17103 - DNA, 333 bp, Homo sapiens
  source 1..333: mol_type = other DNA
acacagaccctcacgctgacctgcaccttctctggtttctcactcaggagtactggagtgggtgtgggctggatccgtcagcccccaggacaggccctggagtggcttgcactcatttattgggatgatgataaataccagaggccatctctgaagaacaggctcaccatcaccaaggacacttccaaaaaccaggtggtccttacaatgaccaacatggaccctgtggacacagccacatattactgtgcacacctgttttactatgatactaatggttattatcgctactttgactactggggccagggaatcctggtcaccgtctcctca

SEQ ID NO: 17104 - DNA, 333 bp, Homo sapiens
  source 1..333: mol_type = other DNA
acacagaccctcacgctgacctgcaccttctctgggttctcactcaccactagtggagtgggtgtgggctggatccgtcagcccccgggaaaggccctggagtggcttgcactcatttattgggatgatgataggcgctacaggccatttctgaagagaggggtcaccatcaccaaggacacctccaaaaaccaggtggtccttacaatgaccaacatggaccctgtggacacagccacatatttctgtgcacacctattttactatgatactaatggttattatagatactttgactactggggccagggaaccctggtcaccgtctcctca

SEQ ID NO: 17105 - DNA, 333 bp, Homo sapiens
  source 1..333: mol_type = other DNA
acacagaccctcacgctgacctgcaccttctctgggttctcactcaccactagtggagtgggtgtgggctggatccgtcagcccccgggaaaggccctggagtggcttgcactcatttattgggatgatgataggcggtacaggccatttctgaagagaggggtcaccatcaccaaggacacctccaaaaaccaggtggtccttacaatgaccaacatggaccctgtggacacagccacatatttctgtgcacacctattttactatgatactaatggttattatagatattttgactactggggccagggaaccctggtcaccgtctcctca

SEQ ID NO: 17106 - DNA, 286 bp, Homo sapiens
  source 1..286: mol_type = other DNA
tgcagcctctggattcacgttcagtagctacgacatgcactgggtccgccaaggtacaggaaaaggtctggaatgggtcgcaggtattggtactgctgctgacacatactatgtaggctccgtgaagggccgattcaccatctccagagatgatgccaagaactccttgtatcttgaaatgaacagtctgagagccgatgacacggctatttattactgtgcaagagaaaggaccaactacggtatggacgtctggggccaagggaccacggtcaccgtctcctca

SEQ ID NO: 17107 - DNA, 286 bp, Homo sapiens
  source 1..286: mol_type = other DNA
tgcagcctctggattcaccttcagaagctacgacatgcactgggtccgccaagctacaggaaaaggtctggagtgggtctcagcaattggtactgctggtgacacatactatccaggctccgtgaagggccgattcaccatctccagagaaaatgccaagaactccttgtatcttcaaatgaacagtctgagagccggggacacggctgtgtattactgtgcaagggaacgaacgaactacggtatggacgtctggggccaagggaccacggtcaccgtctcctca

SEQ ID NO: 17108 - DNA, 294 bp, Homo sapiens
  source 1..294: mol_type = other DNA
gcctctggatacaccttccgtgcctatgctgtgcagtgggtgcgccaggcccccggacaaaggcttgagtggctgggttgggtcaacggtgccaatggtgacacaagatattctgagaggttccagggaaggctcacccttaggtgggactcatactcgagcacagcctacatggagctgaccagtctggcatctgaagacacggctgtgtattactgtgcgcgagatcttctcagtgacagtggcttcgagtttgactattggggccagggaaccctggtaaccgtctccgca

SEQ ID NO: 17109 - DNA, 294 bp, Homo sapiens
  source 1..294: mol_type = other DNA
gcttctggatacaccttcagtaactttgctgtgcaatgggtgcgccaggcccccggacaagggcttgagtggatgggatggatcaacgctggcagtggtcagccacaatattcacagaagttccagggcagaatcagctttaccagagacacatccgcgagtacagtgtacatggagctgagcggcctgagatctgaagacacggctgtttattattgtgcgagagatcttctgagtgatagtgggttcgaatttgactactggggtcagggaaccctggtcaccgtctcctca

SEQ ID NO: 17110 - DNA, 285 bp, Homo sapiens
  source 1..285: mol_type = other DNA
gcttctggatacaccttcatcaactactacatacactggctgcgacaggcccctggacaagggcttgagtggatgggatacatcaaccctaagagtggcgccacaatttttccacagaagtttcagggcagggtcaccatgaccagcgacacgtccatcagcacagttcacatggagctgagcagcctgagatctgacgacacggccttttattattgtgcgagggggccgaacacgggttgttttgactactggggccagggaaccctggtcaccgtctcctca

SEQ ID NO: 17111 - DNA, 285 bp, Homo sapiens
  source 1..285: mol_type = other DNA
gcttctggataccccttcatcgactactatgtacactggtggcgacaggcccctggacaagggcctgagtggatggggtggatcaaccctaagaatggtgacacaggttatgcacagaactttcagggaagggtcaccatgaccagagaaacgtccatcaacacaatctacatggagttgagcaggctgagatttgacgacagggccatttattactgtgcgagaggtcccaataccgggtgctttgactactggggccagggaaccctggtcaccgtctcctca

SEQ ID NO: 17112 - DNA, 285 bp, Homo sapiens
  source 1..285: mol_type = other DNA
gcttctggatacaccttcagcggctactatctccactggatgcgacaggcccctggacaagggcttgagtggatgggatggatggaccctaacagtggtgacacagcgaatgcacacaagtttcagggccgggtcaccatgaccagggacaggtccatcaacacagcctacatggagctgagcagtctgagatctgacgacacggccatgtattattgtgcgagaggtcctaacaccgggtgctttgactactggggccagggaaccctggtcaccgtctccgca

SEQ ID NO: 17113 - DNA, 286 bp, Homo sapiens
  source 1..286: mol_type = other DNA
tgcagcgtctggattcaccttcagtacctatggcatgcactgggtccgccaggctccaggcaaggggctggagtgggtggcatttatatggtctgatggaagtagtaaatactatgcagactccgtgaagggccgattctccatctccagagacaattccaagaacaccctatttctgcaaatcaacagcctgagagccgaggacacggctatgtattactgtgcgagagatcgtggctggtacgaggactactggggccagggaaccctggtcaccgtctcctca

SEQ ID NO: 17114 - DNA, 286 bp, Homo sapiens
  source 1..286: mol_type = other DNA
tgcagcgtctgggttcaccttcagtagctatggcatgcactgggtccgccaggctccaggcaaggggctggagtgggtggcagttatatggaatgatggaagtaacaaattgtattcagactccgtgaagggccgattcaccatctccagagacgattccaagaacacgctgtatctgcaaatgaacagcctgagagccgaggacacggctgtatattactgtgcgagagataggggctggtatgaggactactggggccagggaaccctggtcaccgtctcctca

SEQ ID NO: 17115 - DNA, 280 bp, Homo sapiens
  source 1..280: mol_type = other DNA
tgcagcctctggactcactttcaataccgcctggctgagttgggtccgccaggctccagggaaggggctggagtgggttggccgtattagaagcaacactgatggtgggacaacagactacgctgcacccgtgaaaggcagattcaccatttcaagagatgattcaaagaccacgctgtatctacaaatggacagcctgaaaatcgaggacacagccgtttactattgtaccacagtaggtcgattctggggccagggaaccctggtcaccgtctcctcg

SEQ ID NO: 17116 - DNA, 280 bp, Homo sapiens
  source 1..280: mol_type = other DNA
tgcagcctctggactcactttcagagacgcctggatgagctgggtccgccaggctccaggggaggggctggagtgggttggccgtattaaaagcatagctgatggtgggacaacagactactctgcacccgtgaaaggcagattcaccatctcaagagatgattcacaatacatgctatatctgcaaatgaacagcctgaaaagcgaggacacagccgtgtattactgtaccacagtgggcagattctggggccagggaaccctggtcaccgtctcctca

SEQ ID NO: 17117 - DNA, 280 bp, Homo sapiens
  source 1..280: mol_type = other DNA
tgcagcctctggattcacttttagcagctatgccatgaactgggtccgccaggctccagggaaggggctggagtgggtctcagtcatttatagcggtgataatagcacatactatgcagactccgtgaagggccggttcaccgtctccagagataattccaagaacaccctgtatctgcaaatgaacagactgagagtcgaggacacggccgtatattactgtgcgaaagggagttactccgactactggggccagggaaccatggtcaccgtctcctca

SEQ ID NO: 17118 - DNA, 280 bp, Homo sapiens
  source 1..280: mol_type = other DNA
tgcagcctctggattcacctttagcagctatgccatgacctgggtccgccaggctccagggaaggggctggagtgggtctcaattatttatagcggtggtactaccacatattatgcagactccgtgaagggccggttcaccatctccagagataattccaagaacacgctgtatctgcaaatgaacagcctgagagccgaggacacggccgtatattactgtgcgaaggggagttactctgactactggggccagggaacccaggtcaccgtctcctca

SEQ ID NO: 17119 - DNA, 283 bp, Homo sapiens
  source 1..283: mol_type = other DNA
tgcagcctctggattcactttcagcaacgcctggatgagctgggtccgccaggctccagggaaggggctggagtggtttgcccgtattaaaagtcacactgatggtgggacaacagactacgctgcacccgtgaagggcagattcaccatctcaagagatgattcaaaaaacacgctgtatctgcaaatgaacagcctgaaaaccgaggacacaggcgtgtattactgtgtcgcaagttggctcgacccctggggccagggaaccctggtcaccgtctcctca

SEQ ID NO: 17120 - DNA, 283 bp, Homo sapiens
  source 1..283: mol_type = other DNA
tgcagcctctggattcactttcagtaacgcctggatgagctgggtccgccaggctccagggctggggctgtattgggttggccgtatcaaaagcgaaactgttggtgggacaacagactacgctgcacccgtgaaaggcagattcaccatctcaagagatgattcaaaaagcacggtgtatctgcaaatggacagcctgaaaaccgaggacacaggcgtgtattattgtgtcgccagttggctcgacccctggggccagggaaccctggtcaccgtctcctca

SEQ ID NO: 17121 - DNA, 280 bp, Homo sapiens
  source 1..280: mol_type = other DNA
tgcagcctctggattcaccttcaatatttactggatgcactgggtccgccaagctccaggggaggggctgatgtggctctcaaatattaatcttgatgggaccagagcagcctacgcggactccgtgaagggccgattcaccatctccagagacaacgccaagaacacgctgtatctgcaaatgaacagtctgagagccgaggacacggctgtttattactgtgttcgatatcccacctttgactactggggccagggaaccctggtcaccgtctcctca

SEQ ID NO: 17122 - DNA, 280 bp, Homo sapiens
  source 1..280: mol_type = other DNA
tgcagcctctggattcaccttcagtagctactggatgcactgggtccgccaagctccagggaaggggctggtatgggtctcacgtattcataatgatgggagtagtacaacctacgcggactccgtgaagggccgattcaccgtctccagagacaacgccaagaacacgctgtatctgcaaatgaacagtctgagagccgaagacacggctgtgtattactgtgtaagatatcctacgtttgactactggggccagggaaccctggtcaccgtctcctca

SEQ ID NO: 17123 - DNA, 280 bp, Homo sapiens
  source 1..280: mol_type = other DNA
tgcagcctctggattcacctttagcaactcttacatgacctgggtccgccaggctccagggaaggggctggagtgggtctcatttgttgacggcagtgacactattaaatattatacagactctgtgaagggccggttcaccatctccagagataactccaagagcacggtgtatctgcaaatgaacagcctgagagccgaggacacggccgtatattactgtgtaaaagggacttgggcggaaaactggggccagggaaccctggtcaccgtctcctca

SEQ ID NO: 17124 - DNA, 280 bp, Homo sapiens
  source 1..280: mol_type = other DNA
tgcagcctctggattcacctttagcaactcttatatgatgtgggtccgccaggctccagggaaggggctggagtgggtctcaactattagtgggagtggtgacaccacagactacgcagactccgtgaagggccggttcaccatctccagagacaattccaagagtacgctgtatttacaaataaacagcctgagagtcgacgacacggccgtattttactgtgtgaaaggcacctgggccgagaactggggccagggaaccctgattatcgtctcctca

SEQ ID NO: 17125 - DNA, 310 bp, Homo sapiens
  source 1..310: mol_type = other DNA
tgcagcctctggattcacctttaacaactatgccatggcctgggttcgccaggctccagggaagcggccggagtgggtctcagtcattactggtaatggtgtggacacatactacatagactccgtgaagggccacttcaccatctccagagacaattccaagaacaccctgtttctgcaaatgaacagcctgagagccgaggactcggccgtttattactgtgcgaaaggaactttaccatcttgtcgtggtgcttcttgctacccccttgactactggggccagggaaccctggtcaccgtctcctca

SEQ ID NO: 17126 - DNA, 310 bp, Homo sapiens; identical to SEQ ID NO: 17125
  source 1..310: mol_type = other DNA

SEQ ID NO: 17127 - DNA, 310 bp, Homo sapiens
  source 1..310: mol_type = other DNA
tgcagcctctggatttacctttagcaactatgccatggtctgggtccgccaccttccagggaaggggctggagtgggtctcagtgattactggtgacggttataacacatggtatgtagactccgtgaagggccggttcaccatctccagagacaattccaagagcacgctttttctgcaaatgaacagtctgagagccgaggacacggccgtttattactgtgcgaaggggacactaccatcttgtaggggtgctagctgctacccccttgactactggggccagggaaccctggtcaccgtctcctca

SEQ ID NO: 17128 - DNA, 289 bp, Homo sapiens
  source 1..289: mol_type = other DNA
tgcagcctctggattcacctttagtaattattggatgagttgggtccgccaggctccagggaaggggctggagtgggtggccaacatgaaccaagatggaagtgcgaaaaactatgtggactctgtgaggggccgattcaccatctccagagacaacgccaagaaatcactgtatctgcaaatgaacagcctgagagccgaggacacgtctgtgtattactgtgcgagagatgacggttattccaggtttgaatattggggccagggaaccctggtcaccgtcccctca

SEQ ID NO: 17129 - DNA, 289 bp, Homo sapiens
  source 1..289: mol_type = other DNA
tacagcctctggattcacctttagtaacttttggatcacctgggtccgccaggctccaggtaaggggctggagtgggtggccaacataaaccaagatggaagtgtgaaaaatcatgtggcctctgtgaggggccgattcactatctccagagacaacgccaagaattcattgtatctgcaaatgaacaacctgagagacgaagacacggctgtctattactgtgcgagagatgacggatatagtagatttgaatactggggccagggaaccctggtcaccgtctcctca

SEQ ID NO: 17130 - DNA, 289 bp, Homo sapiens
  source 1..289: mol_type = other DNA
tacagcctctggattcacctttagtaacttttggatcacctgggtccgccaggctccaggtaaggggctggagtgggtggccaacataaaccaagatggaagtgtgaaaaatcatgtggcctctgtgaggggccgattcactatctccagagacaacgccaagaattcattgtatctgcaaatgaacaacctgagagacgaagacacggctgtctattactgtgcgagagatgatggatatagtagatttgaatactggggccagggaaccctggtcaccgtctcctca

SEQ ID NO: 17131 - DNA, 289 bp, Homo sapiens
  source 1..289: mol_type = other DNA
tgcagcctctggattcatcttcactgagtattggatgagctgggtccgccaggctccagggaaggggctggagtgggtggccaacacaaataacaatgagggtgcgaaatcgtatgtggactctgtgaagggccgattcaccatctccagagacaacgccaagaactcagtgtatctgcaaatggatagcctgagaggcgaggatacggctgtgtattactgtgcgagagatgacggttatagccgttttgaatattggggccagggagtcctggtcaccgtctcctca

SEQ ID NO: 17132 - DNA, 280 bp, Homo sapiens
  source 1..280: mol_type = other DNA
tgcagcctctggattcaccttcagtaatcatgaaatgaactgggtccgccaggctccagggaaggggctggagtgggtttcaaggattagtactagtggtagtgccatccagtacgcagactctgtgaagggccgattcaccatctccagagacaacgccaagaactcactgtatctgcaaatgaacagcctgagagccgaggacacggctgtttattattgtgcgggcagtggctggtttgcctactggggccagggaaccctggtcaccgtctcctca

SEQ ID NO: 17133 - DNA, 280 bp, Homo sapiens; identical to SEQ ID NO: 17132
  source 1..280: mol_type = other DNA

SEQ ID NO: 17134 - DNA, 280 bp, Homo sapiens
  source 1..280: mol_type = other DNA
tgcagcctctggattcaccttcagtaatcatgaaatgaactgggtccgccaggctccagggaaggggctggagtgggtttcaaggattagtactagtggtagtgccatccagtacgcagactctgtgaagggccgattcaccatctccagagacaacgccaagaactcactgtatctgcaaatgaacagcctgagagacgaggacacggctgtttattattgtgcgggcagtggctggtttgcctactggggccagggaaccctggtcaccgtctcctca

SEQ ID NO: 17135 - DNA, 280 bp, Homo sapiens; identical to SEQ ID NO: 17132
  source 1..280: mol_type = other DNA

SEQ ID NO: 17136 - DNA, 280 bp, Homo sapiens
  source 1..280: mol_type = other DNA
tgcagcctctggattcaccttcagtaatcatgaaatgaactgggtccgccaggctccagggaaggggctggagtgggtttcaaggattagtactagtggtagtgccatccagtacgcagactctgtgaagggccgattcaccacctccagagacaacgccaagaactcactgtatctgcaaatgaacagcctgagagccgaggacacggctgtttattattgtgcgggcagtggctggtttgcctactggggccagggaaccctggtcaccgtctcctca

SEQ ID NO: 17137 - DNA, 280 bp, Homo sapiens
  source 1..280: mol_type = other DNA
tgcagcctctggattcaccttcagtaatcatgaagtgaactgggtccgccaggctccagggaaggggctggagtgggtctcatccattagttacagtggtagtaccatatactacgcagactctgtgaagggccgattcaccatctccagagacaacgccaagaactcactgtatctgcaaatgaacaacctgagagccgaggacacggctgtttattactgtgcaggcagtggctggtttgcctactggggccagggaacccaggtcaccgtctcctca

SEQ ID NO: 17138 - DNA, 295 bp, Homo sapiens
  source 1..295: mol_type = other DNA
tgcagcctctggattcactttcagtaacgcctggatgagctgggtccgccaggctccagggcaggggctggagtgggttggccgtattaaaaggagagttgatggtgggacaatagactacacttcgcccgtgaaaggcagattcaccatctcgagagatgattccaaagacacgctctatctacaaatgaacagcctgaaaaccgaggacacagccacttactactgtgtcgcagggctgggaacctcggacgttgacttctggggccagggagccctggtcaccgtctcctca

SEQ ID NO: 17139 - DNA, 295 bp, Homo sapiens
  source 1..295: mol_type = other DNA
tgtagcctctggattcactttcagtgacgcctggatgagctgggtccgccaggctccagggaaggggctggagtgggttggccgtattaaaaggagaatgcacggtggggcaacagactatagtgtacccgtgagaggcagattcaccatctcaagagatgattcaaaagacacgctgtatctgcaaatgaacagcctgaagaccgaggacacagccgtttactactgtgtcgcagggctgggaacttcggacgttgacttctggggccagggagccctggtcaccgtctcctca

SEQ ID NO: 17140 - DNA, 295 bp, Homo sapiens
  source 1..295: mol_type = other DNA
tgcagcctctggattcactttcagtaacgcctggatgacctgggtccgccaggctccagggaaggggctggagtggattggccgtattaaaaggaaagatcacggtggggcaatagactacactgcacccgtgagaggcagattcaccatctcaagagatgattcaaaaaacacgttgtatctgcaaatgaacagcctgaaaaccgaggacacagccgtatattactgtgtcgcaggactgggaacttcggacgttgacttctggggccagggagccctggtcaccgtctcctca

SEQ ID NO: 17141 - DNA, 295 bp, Homo sapiens
  source 1..295: mol_type = other DNA
cgcagcctctggattcactttcagtaatgcctggatggcctgggtccgtcaggctccagggaaggggctggggtgggtcggccgtattaaaaggaaaattgatggtgagacaacagactacgctgcgcccgtgaaaggcagattcaccatctcaagagatgactcaaaaagcatgctgaatctgcaaatgaacagcctgaaagtggaggacacaggcctatattattgtgtagcaggattgggaacaagtgacgttgacttctggggcccgggaaccctggtcaccgtctcctca

SEQ ID NO: 17142 - DNA, 295 bp, Homo sapiens
  source 1..295: mol_type = other DNA
tactctttctgttggctccatcagcagtagtgattactactggggctggatccgccagcccccagggaaggggctggagtggattgggagtgtctattatagtgggagtacctactacaactcgtccctcaagagtcgagtcaccatatctatagacacgtccaagacacagttcttcttgaaactgacctcggtgaccgccgcagacacggctgtttactactgtgcgagacttccttacttctactactacatggacgtctggggcaaagggaccacggtcaccgtctcctca

SEQ ID NO: 17143 - DNA, 295 bp, Homo sapiens
  source 1..295: mol_type = other DNA
cactctttctggtggctccatcagtagtagtgattactactggggctggatccgccagcccccagggaaggggctggagtggattgggagtgtctattatagtgggagtacctattacaactcgtccctcaagagtcgagtcaccatatctatagacacgtccaagacacagttcttcttgaaactgacctcggtgaccgccgcagacacggctgtttactactgtgcgagacttccttacttctactactacatggacgtctggggcaaagggaccacggtcaccgtctcctca

SEQ ID NO: 17144 - DNA, 295 bp, Homo sapiens
  source 1..295: mol_type = other DNA
cactctttctggtggctccatcagcagtagtgattactactggggctggatccgccagcccccagggaaggggctggagtggattgggagtgtctattatagtgggagcacctactacaactcgtccctcaagagtcgagtcaccatatctatagacacgtccaagacacagttcttcttgaagctgacctcggtgaccgccgcagacacggctgtttactactgtgcgagacttccttacttctactactacatggacgtctggggcaaagggaccacggtcaccgtctcctca

SEQ ID NO: 17145 - DNA, 295 bp, Homo sapiens
  source 1..295: mol_type = other DNA
cactctttctggtggctccatcagcagtagtgattactactggggctggatccgccagcccccagggaaggggctggagtggattgggagtgtctattatagtgggagtacctattacaactcgtccctcaagagtcgagtcaccatatctatagacacgtccaagacacagttcttcttgaaactgacctcggtgaccgccgcagacacggctgtttactactgtgcgagacttccttacttctactactacatggacgtctggggcaaagggaccacggtcaccgtctcctca

SEQ ID NO: 17146 - DNA, 295 bp, Homo sapiens
  source 1..295: mol_type = other DNA
cactctttctggtggctccatcagcagtagtgattactattggggctggatccgccagcccccagggaaggggctggagtggattgggagtatctattatagtgggagcacctactacaacccgtccctcaagagtcgagtcaccatatctatagacacttcgaagaaacagttctccctgaaggtgacctctgtgaccgccgcagacacggctgtttactactgtgcgagacttccttacttctactactacatggacgtctggggcaaagggacaacggtcaccgtctcctca

SEQ ID NO: 17147 - DNA, 295 bp, Homo sapiens
  source 1..295: mol_type = other DNA
cactctttctggtggctccatcagcagtagtgattactactggggctggatccgccagcccccagggaaggggctggagtggattgggagtgtctattatagtgggagtacctactacaactcgtccctcaagagtcgagtcaccatctctatagacacgtccaagacacagttcttcttgaaactgacctcggtgaccgccgcagacacggctgtttactactgtgcgagacttccttacttctactactacatggacgtctggggcaaagggaccacggtcaccgtctcctca

SEQ ID NO: 17148 - DNA, 295 bp, Homo sapiens
  source 1..295: mol_type = other DNA
cgctgtctctaatggctccatgagcactagtgattactactggggctggatccgccagcccccagggaaggggctggagtggattgggagtatctattatagtgggagcacctactataacccgtccctcaagagtcgactcaccatatcgatagacacgtccactaagcacttctccctgaagctgaactctgtgaccgccgcggacacggctgtttattactgtgcgagactcccttatttctactactacatggacgtctggggcaaagggaccacggtcaccgtctcctca

SEQ ID NO: 17149 - DNA, 285 bp, Homo sapiens
  source 1..285: mol_type = other DNA
gcttctggagacagcttcagtgattatactatcacgtgggtgcgacaggccactggacaggggcttgaatggatgggagggatcatccctgccttgggcacagtcagctatgcacacaagttccagggcagagtcacgattaccgcggacgaaatcacgagcacagcctacatggaactgactacactgacatctgacgacacggccgtgtattactgtgcgacagacttacggggaggatacttcgactactggggccagggaaccgtggtcaccgtctcctca

SEQ ID NO: 17150 - DNA, 285 bp, Homo sapiens
  source 1..285: mol_type = other DNA
gcttctggagacagcttcagtgattatactatcacgtgggtgcgacaggccactggacaggggcttgaatggatgggagggatcatccctgccttgggcacagtcagctatgcacacaagttccagggcagagtcacgattaccgcggacgaaatcacgagcacagcctacatggaactgactacactgacatctgacgacacggccgtgtattactgtgcgacagacttacggggaggatacttcgactactggggccagggaatcgtggtcaccgtctcctca

SEQ ID NO: 17151 - DNA, 285 bp, Homo sapiens
  source 1..285: mol_type = other DNA
gcttctgaagacaccttcagtagttatgcgatctcctgggtgcgacaggcccctggacaaggacttgagtggatgggagggatcatccctcagtttgggacggtaaagtacccacagaacttccagggcagagtcacgattaccgcggacgagtccacggacacagcgtacatggaattgagcagcctgagatctgaggacacggccgtgtattactgtgccacagatttaaggggaggatactttgactactggggccagggaaccctggtcaacgtctcctca

SEQ ID NO: 17152 - DNA, 285 bp, Homo sapiens
  source 1..285: mol_type = other DNA
gcttctgaagacaccttcagtagttatgcgatctcctgggtgcgacaggcccctggacaaggacttgagtggatgggagggatcatccctcagtttgggacggtaaagtacccacagaacttccagggcagagtcacgattaccgcggacgagtccacggacacagcgtacatggaattgagcagcctgagatctgaggacacggccgtgtgttactgtgccacagatttaaggggaggatactttgactactggggccagggaaccctggtcaacgtctcctca

SEQ ID NO: 17153 - DNA, 286 bp, Homo sapiens
  source 1..286: mol_type = other DNA
tgcagcctctggattcaccttcagtgactactacatgagctggatacgccaggctccagggaaggggctggagtgggtgtcatacattggtagtagtactggtaccatatactatacagactctgtgaagggccgattcaccatctccagggacaacgccaaaaagtcactgtatctggaaatgaacagcctgagagccgaggacacggccgtgtattactgtgcgagagagccaggataccgttttgactactggggccagggaaccctggtctccgtctcctca

SEQ ID NO: 17154 - DNA, 286 bp, Homo sapiens
  source 1..286: mol_type = other DNA
tgcagcctctggattcaccctcagtgactactacatgagctggatacgccaggctccagggaaggggctggagttggtttcatacatcggtactagaactggtaccacatactatacagactctgtgaagggccgattcaccatctccagggacaacgccaaaaagtcactgtatctggaaatgaacagcctgagagacgaggacacggccgtctattactgtgcgagagagccaggataccgttttgactactggggccagggaaccctggtctccgtctcctca

SEQ ID NO: 17155 - DNA, 289 bp, Homo sapiens
  source 1..289: mol_type = other DNA
tacagcctctggattcaccttcagtgactactacatggcctggatccgccaggctccagggaaggggctggaatgggttggatgcattattagtggtggtggtggtaccatattctacgcagactctgtgaagggccgattcaccatctccagggacaacgtcgagaactcactgtatctgcaaatgaacagcctgagagtcgaggacacggcctcttattactgtgcgagagagccaggttaccgttttgactactggggccagggaaccctggtcaccgtctcctcg

SEQ ID NO: 17156 - DNA, 286 bp, Homo sapiens
  source 1..286: mol_type = other DNA
tgcagcctccggattcaccttcagtgactactacatgagctggatccgccaggctccagggaaggggctggagtgggtttcatacattagtagtagtgttgataccatatactacgcagactctgtgaagggccgattcaccatctccagggacaacgccaagaactcactgtatctgcaaatgaacagcctgagagtcgaagacacggccgtgtattactgtgcgagagagccagggtaccgttttgactactggggtcagggaaccctggtcaccgtctcctca

SEQ ID NO: 17157 - DNA, 289 bp, Homo sapiens
  source 1..289: mol_type = other DNA
tacaacctctggattcaccttcagtgactactacatgacctggatccgccaggctccagggaaggggctggaatgggttggatgcattagtagtggtggtggtggtaacacattctacgcagactctgtgaggggccgattcaccatctccagggacaacgtccagaactcactgtatctgcaaatgaacagcctgagagtcgaggacacggcctcttattactgtgcgagagagccaggataccgttttgactactggggccagggaaccctggtcaccgtctcctca

SEQ ID NO: 17158 - DNA, 289 bp, Homo sapiens; identical to SEQ ID NO: 17157
  source 1..289: mol_type = other DNA

SEQ ID NO: 17159 - DNA, 286 bp, Homo sapiens
  source 1..286: mol_type = other DNA
tgcagcctctggattcagcttcagtgactactacatggcctggatccgccaggctccagggaaggggctggaatgggttgcatgcattaatagtggtggtggtaccatgtactacgcagactctgtgaagggccgattcaccatctccagggacaacgccaagaactcactgtatctgcaaatgaacagcctgagagtcgaggacacggcctcttattactgtgcgagagagccagggtaccgttttgactactggggccagggaaccctggtcaccgtctcctca

SEQ ID NO: 17160 - DNA, 295 bp, Homo sapiens
  source 1..295: mol_type = other DNA
tgcaactactggattcagcttcagtgactacttcatgacttggatacgccaggctccagggaaggggctggagtgcgtgtcttacattggtggtggtgctagtggtactggaacaatatactatacagactctgtgaagggccgattcaccatctccagggacaacgccaaaaagtctctgtatctggaaatgaacagcctgagacccgaggactcggccgtgtattactgtgcgagagagccaggataccgttttgactactggggcccgggaaccctagtctccgtctccaca

SEQ ID NO: 17161 - DNA, 295 bp, Homo sapiens
  source 1..295: mol_type = other DNA
tgcagcctctggattcaccttcagtgactacttcatgacttggatacgccaggctccagggaaggggctggagtgggtgtcatacattggtggtggtactggtggtactggtacaatatactatacagactctgtgaagggccgattcaccatctccagggacaacgccaaaaagtcactgtatctggaaatgaacagcctgagacccgaggactcggccgtttattactgtgcgagagagccaggataccgttttgactactggggccagggaaccctggtctccgtctccgca

SEQ ID NO: 17162 - DNA, 286 bp, Homo sapiens
  source 1..286: mol_type = other DNA
tgcagcctctggattcaccttcagtgactactacatgacctggatacgccaggctccagggaaggggctggagtgggtgtcatgtattggttctacctctggtaccaaatactatacagactctgtgaggggccgattcaccatctccagggacaacgccaaaaagtcactgtatctggaaatgaacagcctgagagccgaggacacggccgtgtattactgtgcgagagagccaggataccgttttgactactggggccagggaaccctggtctccgtctcctca

SEQ ID NO: 17163 - DNA, 289 bp, Homo sapiens
  source 1..289: mol_type = other DNA
cacagcctctggattcaccttcagtgactactacatggcctggatccgccaggctccagggaaggggctggaatggattggatgcattactagtggaggtggtagtaccatattctacgcagactctgtgaagggccgattcaccatctccagggacaacgtcaagaactcactgtatctgcaaatgaacagcctgagagtcgaggacacggcctcttattactgtgcgagagagccaggttaccgttttgactactggggccagggaaccctggtcaccgtctcctca

SEQ ID NO: 17164 - DNA, 286 bp, Homo sapiens
  source 1..286: mol_type = other DNA
tgcagcctctggattcaccttcagtgactactacatgagctggatacgccaggctccagagaaggggctggagtgggtgtcatacattggtactagtactggtaccatatactatacagactctgtgaagggccgattcaccatctccagggacaacgccaaaaagtcactgtatctggaaatgaacagcctgagagccgaggacacggccgtgtattactgtgcgagagagccaggataccgttttgactactggggccagggaaccctggtctccgtctcctca

SEQ ID NO: 17165 - DNA, 286 bp, Homo sapiens
  source 1..286: mol_type = other DNA
tgcagcctctggattcaccttcagtgactactacatgggctggatccgccaggctccagggaaggggctggagtgggtttcacagatcagtaatactggtaataagatctacaacgcagactctgtgaagggccgattcaccatctccagggacaacgccgagaactcactgtatctgcaaatgaacagcctgagagccgaggacacggccgtctatttctgtgcgcgagagcccgggtacaggtttgactactggggccggggaaccctcgtcaccgtctcctca

SEQ ID NO: 17166 - DNA, 286 bp, Homo sapiens
  source 1..286: mol_type = other DNA
tgcagcctctggattcaccttcagtgactactacatgagttggatacgccaggctccagggaaggggctggagtgggtgtcatacattggtagtagtactggtaccatatactacacagactctgtgaagggccgcttcaccatctccagggacaacgccaaaaactcactgtttctgcaaatgaacagcctgagagccgaggacacggccgtctattactgtgcgagagagccaggataccgttttgactactggggccagggagccctggtctccgtctcctca

SEQ ID NO: 17167 - DNA, 289 bp, Homo sapiens
  source 1..289: mol_type = other DNA
ttcagcctctggattcaccttcagtgactactacatggcctggatccgccaggctccagggaaggggctggaatgggttggttgcatttttagtggtggtgctggtaccatattctacgcagactctgtgaagggccgattcaccatctccagggacaacgtcgagaactcactgtatctgcaaatgaacagcctgagagtcgaggacacggcctcttattactgtgcgagagagccaggttaccgttttgactactggggccagggaaccctggtcaccgtctcctcg

SEQ ID NO: 17168 - DNA, 289 bp, Homo sapiens
  source 1..289: mol_type = other DNA
tacagcctctggattcaccttcagtgactactacatgacctggatccgccaggctccagggaaggggctggaatgggttggatgcattagtagtggtggtggtggtaccatattctacgcagactctgtgaagggccgattcaccatctccagggacaacgtcaagaactcactgtatctgcaaatgaacagcctgagagtcgaggacacggcctcttattactgtgcgagagagccagggtaccgttttgactactggggccagggaaccctggtcaccgtctcctca

SEQ ID NO: 17169 - DNA, 285 bp, Homo sapiens
  source 1..285: mol_type = other DNA
gcttctggttacacgtttaccagttacggtataagctgggtgcgacaggcccctggacaagggcttgagtggatgggatggatcggcgttcacgaggttcagataaactatcaacaccaggacagagtcaccatgaccacagacacatccacgagcacagcctacatggaggtgaggagcctgagatctgacgacacggccgtgtatttttgtgcgagaaatactttgcttgacggaattaaaattgacaactggggcaagggaaccctggtcaccgtctcctca

SEQ ID NO: 17170 - DNA, 285 bp, Homo sapiens
  source 1..285: mol_type = other DNA
gcctctggttacacgtttaccagttacggtataagctgggtgcgacaggcccctggacaagggcttgagtggatggggtggatcggcattcacgaggttcagataaactatcaacaccaggacagagtcaccatgaccacagacacatccacgagcacagcctacatggaggtgaggagcctgagatctgacgacacggccgtgtatttttgtgcgcgaaatactttgcttgacggaataaagattgacaactggggcaagggaaccctggtcaccgtctcctca

SEQ ID NO: 17171 - DNA, 285 bp, Homo sapiens
  source 1..285: mol_type = other DNA
gcttctggttacacatttaccagttatggtataagctgggtgcgacaggcccctggacaagggcttgagtggatggggtggatcggcattcacgaggttcagataaattatcaacaccaagacagagtcaccatgaccacagacacatccacgagcacagcctacatggaggtgaggagcctgagatctgacgacacggccgtatatttttgtgcgcgaaatactttgcttgacggaattaagattgacaactggggcaagggaaccctggtcaccgtctcctca

SEQ ID NO: 17172 - DNA, 285 bp, Homo sapiens
  source 1..285: mol_type = other DNA
gcttctggttacacgtttaccagttacggtataagctgggtgcgacaggcccctggacaagggcttgagtggatgggatggatcggcgttcacgaggttcagataaactatcaacaccaggacagagtcaccatgaccacagacacatccacgagcacagcctacatggaggtgaggagcctgagatctgacgacacggccgtgtatttttgtgcgaggaatactttgcttgacggaattaaaattgacaactggggcaagggaaccctggtcaccgtctcctca

SEQ ID NO: 17173 - DNA, 301 bp, Homo sapiens
  source 1..301: mol_type = other DNA
tgcagcctctggattcagctttagcagctatgccatgagttgggtccgacaggctccagggaaggggctggagtgggtctcaagtattactggtagtggtggtcgcacagactacgcagactccgtgaagggccggttcaccatctccagagacaattccaagcacatgctctatctgcaaatgaacagcctgagagccgacgacacggccgtatatttctgtgcgaaatgcggaagtggtggtgtctgctactggtacttcgatctctggggccgtggcaccctggtcactgtctcctca

SEQ ID NO: 17174 - DNA, 301 bp, Homo sapiens
  source 1..301: mol_type = other DNA
tgcagcctctggattcagttttagcagctatgccatgagctgggtccgacaggctccggggaaggggctggagtgggtctcaactattactggaagtggtggtcgcacagactacgcagactccgtgaggggccggttcaccatctctagagacaattccaagtacatggtctatctgcaaatgaacagcctgagagccgacgacacggccgtatatttctgtgcgaaatgcggaagtggtggtgtctgctactggtacttcgatctctggggccgtgggaccctggccactgtctcctca

SEQ ID NO: 17175 - DNA, 301 bp, Homo sapiens
  source 1..301: mol_type = other DNA
tgcagcctcgggattcaagtttagcagctatgccatgacctgggtccgccaggctccagggaagggactggagtgggtcgcaacttttagggttggtggtggtggcgcatcctacgcagattccgtgaagggccggttcaccatctccagagacgattcgaagttttcactatatctgcaaatgaacagcctgagagtcgaggacacggccgtttattactgtgcgaagtgtggaagtggaggtgtttgctactggtacttcgatctctggggccctggcaccctggtctctgtctcctca

SEQ ID NO: 17176 - DNA, 301 bp, Homo sapiens
  source 1..301: mol_type = other DNA
tgcagcctctggattcacctttagcagctatgccatgagctgggtccgccaggctccagggaaggggctggagtgggtctcagctattagtggtagtggtggtagcacatactacgcagactccgtgaagggccggttcaccatctccagagacaattccaagaacacgctgtatctgcaaatgaacagcctgagagccgaggacacggccgtatattactgtgcgaagtgtggaagtggaggtgtttgctactggtacttcgatctctggggccctggcaccctggtctctgtctcctca

SEQ ID NO: 17177 - DNA, 288 bp, Homo sapiens
  source 1..288: mol_type = other DNA
gcatctggatacaccttcatcaactactatatgcactgggtgcgacaggcccctggacaagggcttgaatacatgggagtaatcaaacttagtggtggtcgcacaacttacgcacagaaattccagggcagagtcaccatcaccagtgacacgtcctcgagcacagtctacatggagctgagcagcctgaagtctgaggacacggccgtatattactgtgcgagagaactccccgacaccttgtactttgactattggggccagggaaccctggtcaccgtctcctct

SEQ ID NO: 17178 - DNA, 288 bp, Homo sapiens
  source 1..288: mol_type = other DNA
gcatctggatacagcttcaccagctactatatgcactgggtgcgacaggcccctggacaagggcttgagtggatgggaataataacccctaatgatggtgggactgcctacacacagaagttccggggcagagtcaccatgaccagtgacgcgtccacgagcacagtttacatggaactaagcagcctgagatctgaggacacggccgtctacttctgtgcgagagaattaccagataccctgtatttcgactactggggccagggaaccctggtcaccgtctcctca

SEQ ID NO: 17179 - DNA, 297 bp, Homo sapiens
  source 1..297: mol_type = other DNA
acttctggatacaccttcactatccatggtattcattgggtgcgccaggcccccggacaaagacttgagtggatgggatggatcaacgctggcaatgggggcacacaatattcacagaagttccagggcagagtcaccattaccagggacacatccgcgaacacagcctatatggagttgaccagcctgacatctgaagacacagctgtttactattgtgcgagagcgggatggccacaacccccgggtaactggttcgacccctggggccagggaaccctggtcaccgtctcctca

SEQ ID NO: 17180 - DNA, 297 bp, Homo sapiens
  source 1..297: mol_type = other DNA
gcttctggatacaccttcactagtcatggtgtgcactgggtgcgccaggcccccggacaaaggcttgagtggatggcatggatcaacgctggtaatggtaacacaaaatattcacagaagttccagggcagagtcaccattacgagggacaaatccgcgagcatagtctacatggagatgagcagcctgacatctgaagacacggctgtgtatttctgtgcaagagcgggttggccacaacccccggggaactggttcgacccctggggccagggaaccctggtcaccgtctcctca

SEQ ID NO: 17181 - DNA, 297 bp, Homo sapiens
  source 1..297: mol_type = other DNA
acttctggatacaccttcactctccatggtatccattgggtgcgccaggcccccggacaaaggcttgagtggatgggatggatcaacgctggcaatggacacacaaaatattcacagaagttccagggcagagtcaccatcaccacggacacatccgcgaccacagcctacatggagctgagcagcctgaaatctgaagacagtgctgtgtattactgtgcgagagcgggttggccacaacccccgggaaactggttcgacccctggggccagggaaccctggtcaccgtctcttca

SEQ ID NO: 17182 - DNA, 297 bp, Homo sapiens
  source 1..297: mol_type = other DNA
acttctggatacaccttcactctccatggtatccattgggtgcgccaggcccccggacaaaggcttgagtggatgggatggatcaacgctggcaatggacacacaaaatattcacagaagttccagggcagagtcaccatcaccacggacacatccgcgagcacagcctacatggagctgagcagcctgagatctgaagacagtgctgtgtattactgtgcgagagcgggttggccacaacccccgggaaactggttcgacccctggggccagggaaccctggtcaccgtctcttca

SEQ ID NO: 17183 - DNA, 277 bp, Homo sapiens
  source 1..277: mol_type = other DNA
tgcaggctctggtttcatcttcagtgattttgacatggactgggtccgccaggctccagggaaggggctggaatgggtttcatacattagtagtagtgctaataccaaatactacgcggactctgtgaagggccgattcaccgtctccagagacaacgccaagaactctctgtttttgcaactgaacagcctgagagtcgaggacacggctgtttattactgtacgagaggttggctggccgacgggggccagggcacccaggtcaccgtctcctca

SEQ ID NO: 17184 - DNA, 283 bp, Homo sapiens
  source 1..283: mol_type = other DNA
tgcagcatctggattcaccttcagcacttttgaattgaactgggtccgccaggctccggggaaggggctggaatgggttgcatacattagtggtagtggttctggaaatatcgtatactacgcagactctgtgaagggccgattcaccatctccagagacaacgccaagaactccctgtatctgcaaatgcacagcctgagagccgaggacacggctatttattattgtacgagagggtggctggccgactggggccagggcaccctggtcaccgtctcctca

SEQ ID NO: 17185 - DNA, 304 bp, Homo sapiens
  source 1..304: mol_type = other DNA
cactgtctttggtggctccatcatcagtggagattactattggggctggatccgccaggcccccgggagggggctggaattcattgggaatttccttagaggtgggagtacctactacaatccgtccctcaggagtcgagtcgcaatttccatagacgcttccaagaaccagtattccctgagactgacttctgtgaccgcctcagacacggccatatattactgtgcgagaccggccactgggagggggggcggcagccggttcgacccctggggccagggagtcctggtcaccgtctcctca

SEQ ID NO: 17186 - DNA, 304 bp, Homo sapiens
  source 1..304: mol_type = other DNA
cactgcctctggtggctccatcaccagtggtggttactactggggctgggtccgccagccccccgggaagggtctggagtggattgcgaatatcctctatagtgggagcacctactacaatccgttcctcgagagtcgagtcaccatatccgtagacgcctccaagaaccagttgtccctgaggctgacttctgtgaccgccgcagacacggctgtctattactgtgcgagaccggctactggaagggggggcggcagccggttcgacccctggggccaggggaccctggtcaccgtctcctca

SEQ ID NO: 17187 - DNA, 304 bp, Homo sapiens
  source 1..304: mol_type = other DNA
ctctgtctctggtggctccatcaggagaggtttttactactggggctggatccgccagtccccagggaaggggctggagtggattgggagtatctattatggtggggacacctggtacaacccgtccctcaagagtcgaatcaccatgtccgtagacacgtccaggaaccaattttccctgaacctgaactctgtgaccgccaccgacacggctttttattactgtgcgagacctgctacgggtcgcgggggggggtctcgcttcgacccctggggccagggaaccctggtcaccgtctcctca

SEQ ID NO: 17188 - DNA, 304 bp, Homo sapiens
  source 1..304: mol_type = other DNA
cactgcctctggtggctccatcaccagtggagattactattggggctggatccgccaggcccccgggaaggggctggagttcattgggaatctccttagaggtgggagtacatactacaatccgtccctcaagagtcgagtcacaatttccatagacgcttccaagaaccagtattccctgagactgacttctgtgaccgcctcagacacggctatatattattgtgcgagaccggccactgggagggggggcggcagccggttcgacccctggggccagggaaccctggtcaccgtctcctca

SEQ ID NO: 17189 - DNA, 286 bp, Homo sapiens
  source 1..286: mol_type = other DNA
tgtagtctctgaattcacctttagtaattattggatggactgggtccgccaggctccagggaaggggccggagtgggtggccggcataaagccagatggaagtgagcaaaattatgtggactctgtgaagggccgattcaccgtctctagagacaacgccaagaactcactgtatctccaaatgaatagcctgagagccgaggacacggcgaagtattactgtgcgagaggtaatcggcgggcttttgacatctggggccaagggacaatggtcaccgtctcttta

SEQ ID NO: 17190 - DNA, 286 bp, Homo sapiens
  source 1..286: mol_type = other DNA
tgcagcctctggattcacctttagtggctcttggatgagctgggtccgccaggctccagggaaggggctggactgggtggccatcataaagcaagatggaagtgagaaatactatgtggactctgtgaagggccgattcaccatctccagagacaacgccaagaactcactgtatctgcaaatgagcagcctgagagccgaggacacggctgtatattactgtgcgagaggcaatagacgtgcttttgatatctggggccaagggacaatggtcaccgtctctaca

SEQ ID NO: 17191 - DNA, 294 bp, Homo sapiens
  source 1..294: mol_type = other DNA
gcctctggatacagcttcacgacccatggtatccattgggtgcgccaggcccccggacaagggcttgagtggatgggatggatcatccctggcaatggcaacacacagtattcacagaagttccagggcagagtcaccattaccagggacacatacgcgaatacagcctacatggagttgaagagcctgagatccgaagacacggctgtatattactgtgcgaaaagtggagccagccccccgggaaactggttcgatacatggggccagggaaccctggtcaccgtctcgtca

SEQ ID NO: 17192 - DNA, 294 bp, Homo sapiens
  source 1..294: mol_type = other DNA
gcttctggatacacattcactacttatggtctgcattgggtgcgccaggcccccggacaaagtcttgagtggatgggatggatcaaaattggcgatggttacactaaatattctcagtattttcagtccagagtcaccattaccagggacacatccgcgagcacagcctacatggaactgagcagcctgagatcggaagacacggctgtatattactgcgcgaaatcgggtgcaagtccgccgggaaactggttcgacacctggggccagggaaccctggtcaccgtctcctca

SEQ ID NO: 17193 - DNA, 294 bp, Homo sapiens
  source 1..294: mol_type = other DNA
gcttctggatacacattcacttctaatggtctgcattgggtgcgccaggcccccggacaaaggcttgagtggatgggatggatcaaaactggcgatggttacacaaaatattcccagtattttcagtccagagtcaccattaccagggacacatccgcgaccacgttttacatggaactaagcagcctgagatcggaagacacggctgtatattactgtgcgaaatcgggtgcaagtccgccgggaaactggttcgacacctggggccagggaaccctggtcaccgtctcctca

SEQ ID NO: 17194 - DNA, 294 bp, Homo sapiens
  source 1..294: mol_type = other DNA
gcctctggatacaccttcacgacccatggtatccattgggtgcgccaggcccccggacaagggcttgagtggatgggatggatcatccctggcaatggcaacacacagtattcacagaagttccagggcagagtcaccattaccagggacacatacgcgaatacagcctacatggagttgaggagcctgagatccgaagacacggctgtatattactgtgcgaaaagtggagccagccccccgggaaactggttcgatacatggggccagggaaccctggtcaccgtctcgtca

SEQ ID NO: 17195 - DNA, 310 bp, Homo sapiens
  source 1..310: mol_type = other DNA
tgcagcctctggattcacctttagtagttattggatgagctgggtccgccagcctccagggaaggggctggagtgggtggccaacataaagccagatggaagtgagaagttctatgtggactctgtgaagggccgattcaccatctccagagacatcgccaagaactcactgtatctgcaaatgaacagcctgagagtcgacgacacggctgtctattactgtgcgagaggcgattactttgatagtagtggttattatcatgatgcttttgatgtctgggggcaagggacaatggtcaccgtctctgca

SEQ ID NO: 17196 - DNA, 310 bp, Homo sapiens
  source 1..310: mol_type = other DNA
tgcagcctctggattcacctttagtagttattggatgagctgggtccgccaggctccagggaaggggctggagtgggtggccaacataaagcaagatggaagtcagaaatactatgtggactctgtgaagggccgattcaccatctccagagacaacgccaagaactcactgtatctgcagatgaacaggctgagagccgaggacacggctgtctattactgtgcgagaggggattactttgacagcagtggttattatcacgatgcttttgatgtctggggtcaggggacaatggtcaccgtctcttca

SEQ ID NO: 17197 - DNA, 310 bp, Homo sapiens
  source 1..310: mol_type = other DNA
caatgtctctggtgtctccatcactagtggaagtgtttcctactggaactggatccggcagcccgccgggaagggactagagtggattgggcgtgtctttagtggtgggaccaccgcctacaacccctccctcaagagtcgagtcaccatatcaatggacacgtccaagaaccagttctccctgcagctgacttctgtgaccgccgcagatacggccgtgtatttctgtgcgagaggcacagattgttatggtggcagttgccaaatttttgacaattggggccaaggaaccctggtcaccgtctcctca

SEQ ID NO: 17198 - DNA, 310 bp, Homo sapiens
  source 1..310: mol_type = other DNA
caatgtctctggtgtctccatcactagtggaagtgtttcctactggaactggatccggcagcccgccgggaagggactagagtggattgggcgtgtctttagtggtgggaccaccgcctacaacccctccctcaagagtcgagtcaccatatcaatggacacgtccaagaaccagttctccctgcagctgacttctgtgaccgccgcagatacggccgtgtatttctgtgcgagaggcacagattgttatggtggcagttgccaaatttttgacaattggggccagggaaccctggtcaccgtctcctca

SEQ ID NO: 17199 - DNA, 301 bp, Homo sapiens
  source 1..301: mol_type = other DNA
cggtgtctctgggggctccattaagactaataactggtggatttgggtccgccagcccccaggggaggggctggagtggattggagaaatccagcatagaggaaacaccaactacaacccgtccctcaaaagtcgagtcaccatgtcagttgacaagtcgaagaaccagttctccctgaacctgaactctgtgaccgccgcggacacggccgtgtactactgtgcgagagataggggggggaaagggcggctcgatggttttgatatctggggccaagggacaagggtcaccgtctcttca

SEQ ID NO: 17200 - DNA, 301 bp, Homo sapiens
  source 1..301: mol_type = other DNA
cggtgtctctgggggctccatcagtactgataactggtggatttgggtccgccagcccccaggcgaggggctggagtggattggagaaatccatcatagacataacaccaactacaacccgtccctcaaaagtcgactcaccatgtcacttgacaggccgaagaaccagttctccctgaacctgaactctgtgacggccgcggacacggccgtgtactactgtgcgagagataggggggggaaagggcggctcgatggttttgatatctggggccaagggacaagggtcaccgtctcttca

SEQ ID NO: 17201 - DNA, 301 bp, Homo sapiens
  source 1..301: mol_type = other DNA
cgctgtctctggtggctccatcagcagccgtaattggtggatttgggtccgccagtccccagggaaggggctggagtggattggggaaatctattttgatggcaaaagaaactacgacccgtccctcaagagtcgagttatcatatcacttgacaagtccaagaatcaattctccctgcaagtgaactctgtgaccgccgcggacacggccgtctattattgtgcgagagataggggtggtaaggggcggctggatggttttgatatctggggccaagggacaaaggtcaccgtctcttca

SEQ ID NO: 17202 - DNA, 301 bp, Homo sapiens
  source 1..301: mol_type = other DNA
tgcagcctctggattcacctttgataattatgccatgacctgggtccgccaggctccagggaagggcctggagtgggtctcaactattgatggtagtggtggtgccacattctacgcagactccgtgaatggccgcttcaccatctccagagacaattccaagaacacgctgtatctgcaaatgaacagcctgagagccgaggacacggccgtttattactgtgcgaaagacggagatgataataggcctcctgattgttatgatatgtggggccaagggacaatggtcaccgtctcttca

SEQ ID NO: 17203 - DNA, 301 bp, Homo sapiens
  source 1..301: mol_type = other DNA
tgcagcctctggattcacctttagcacctatgccatgacctgggtccgccgggctccagggaaggggctggagtgggtctcaactattagtggtggaactgagaacacatactacgcagactccgtgaagggccgcttcaccgtctccagagacaactccaagaatacgctgtatctccacatgaacagcctgagagtcgaggacacggccgtatattactgtgcgaaagacggagatgataatagacctccggattgttatgatatgtggggccaagggacaatggtcaccgtctcttca

SEQ ID NO: 17204 - DNA, 294 bp, Homo sapiens
  source 1..294: mol_type = other DNA
gcttctggatacaccttcactagttatgctatgaattgggtgcgacaggcccctggacaagggcttgagtggatgggatggatcaacaccaacactgggaacccaacgtatgcccagggcttcacaggacggtttgtctactccttggacacctctgtcagcacggcatatctgcagatcagcagcctaaaggctgaggacactgccgtgtattactgtgcgagagggacggcggcagctggtacggactggctcgacccctggggccagggaaccctggtcaccgtctcctca

SEQ ID NO: 17205 - DNA, 294 bp, Homo sapiens
  source 1..294: mol_type = other DNA
gcttctggatacaccttcaccaactatgctatgaattgggtgcgacaggcccctggacaagggcttgagtggatggggtggatcaacatcaacactgggaatccaacctatgcccagggcttcacaggacggtttgtcttctccttggacacctctgtcagtacggcatatctgcagatccgcggcctaaaggctgaggacactggcgtgtattattgtgcgagaggtacagcagcagctggtactgactggctcgacccctggggccagggaaccctggtcaccgtctcctca

SEQ ID NO: 17206 - DNA, 294 bp, Homo sapiens
  source 1..294: mol_type = other DNA
gcttctggatacaccttcactagttatgctatgaattgggtgcgacaggcccctggacaagggcttgagtggatgggatggatcaacaccaacactgggaacccaacgtatgcccagggcttcacaggacggtttgtctactccttggacacctctgtcagcacggcatatctgcagatcagcagcctaaaggctgaggacactgccgtatattactgtgcgagagggacggcggcagctggaacggactggctcgacccctggggccagggaaccctggtcaccgtctcctca

SEQ ID NO: 17207 - DNA, 274 bp, Homo sapiens
  source 1..274: mol_type = other DNA
tgcagcctctggattcacccttagtaactattggatgaactgggtccgccaggctccagggaaggggctggagtgggtggccagcataaagcaatatggaagtgagacatattatgtggactctgtgaagggccgattcaccatctccagagccaacgccaggaactcacttgatctgctgatgaacagcctgagagccgaggacacggcaatgtattactgtgtgacagatgtcagatattggggccagggaaccatggtcaccgtcgcctca

SEQ ID NO: 17208 - DNA, 274 bp, Homo sapiens
  source 1..274: mol_type = other DNA
tccagcctctggactcatttttagtaaatattggatggcctgggtccgccaggctccagggaaggggctggagtgggtggccaccataaaacaagatggaagtgaccaaaactatctggactctgtgaagggccgattcatcatctcccgagacaacgccaaaaactcagtgtatctgcaaatgaacagcctgagagccgaggacacggcagtgtattattgtgtgacagatgtgcgatactggggccagggaatcctggtcaccgtctcctca

SEQ ID NO: 17209 - DNA, 304 bp, Homo sapiens
  source 1..304: mol_type = other DNA
tgcagcctctggattcacttttagaaacgtctggatgagttgggtccgccaggttccagggaaggggctggagtgggttggccgtgttaaaagtaaatctgatggtgggacaactaactacgctgcacccgtggagggcaggttcaccatctcaagagatgattcacagaacacggtgtatttggagatgaatagcctgaaaaccgaggacacaggcttgtatttctgtaccacagtcttccggtacaattcggggagttattctgactactggggccagggaaccctggtcaccgtctcctca

SEQ ID NO: 17210 - DNA, 304 bp, Homo sapiens
  source 1..304: mol_type = other DNA
tgcagcctctggattcactttcagtaacacctggatggcctgggtccgccaagttccagggaaggggctggagtgggttggccgcattaaaagcagaagtgatggtgggacaacaaactacgctgcacccgtgcagggcagattcaccatttcaagagatgattcagaaaacaaagtatttctacaaatgaatggcctcaaaaccgaggacacagccgtgtattattgtaccacagttttccggtataattcggggagttattcggactactggggccagggaaccctggtcaccgtctcctca

SEQ ID NO: 17211 - DNA, 295 bp, Homo sapiens
  source 1..295: mol_type = other DNA
tggagcctctggatttaccttcagtggctactggatgcactgggtccgccaagctccaggaaaggggctggtgtgggtctcacatattatgactaatggggctaccacaacctacgcggactccgtgaagggccgattcaccatctccagagacaacaccaagaacacactgtatctgctaatggacagtctgagagccgaggacacgggtgtctattactgtgcgaggggaagtggcaattactacgggccacttgactactggggccagggaaccgtggtcaccgtctcctca

SEQ ID NO: 17212 - DNA, 295 bp, Homo sapiens
  source 1..295: mol_type = other DNA
tacagcgtctggattcagctttagtacctcctggatgcactgggtccgccaagctccagggaaggggctggtgtggatctcacgtcttgattatggtgggggtagcatgagctacgcggaccccgtgaagggccgattcaccatgtccagagacaacgccaagagcacgctgtatctgcaaatgaatagtctgagggtcgaggacacggctatctattactgtgcaaggggttcggggaattattatggtccgcttgactactggggcccgggaaccctggtcaccgtctcgtca

SEQ ID NO: 17213 - DNA, 309 bp, Homo sapiens
  source 1..309: mol_type = other DNA
acacagaccctcacgctgacctgcaccttctctgggttctcactcaccactagtggagtgggtgtgggctggatccgtcagtccccaggaaaggccctggagtggcttgcactcatttattgggatgatgataagcgctacagcccatctctgaagagcagactcaccatcaccaaggacacctccaaaaaccaggtggtccttacaatgaccaacatggaccctgtggacacagccacatactactgtgcacacggagggtggccctttgactactggggccagggaaccctggtcaccgtctcctca

SEQ ID NO: 17214 - DNA, 309 bp, Homo sapiens
  source 1..309: mol_type = other DNA
acacagaccctcacgttgacctgcaccttctctgggttctcactcagcactagtggagtgggtgtgggctggatccgtcagcccccaggaaaggccctggagtggcttgcactcatttattgggatgatgataagcgctacagcccatctctgaagagcaggctcaccatcaccaaggacacctccaaaaacctgatggtccttacaatgacgaacatggaccctgtggacacagccatatattactgtgcgcacggagggtggccttttgactactggggccagggaaccctggtcaccgtctcctca

SEQ ID NO: 17215 - DNA, 309 bp, Homo sapiens
  source 1..309: mol_type = other DNA
acacagaccctcacgctgacctgcaccttctctgggttctcactcagcactagtggagtgggtgtgggctggatccgtcagcccccaggaaaggccctggagtggcttgcactcatttattgggatgatgataagcgctacagcccatctctgaagagcaggctcaccatcaccagggacacctccaaaaaccaggtggtccttacaatgaccaacatggaccctgtggacacagccacatattactgtgctcacggagggtggccctttgactactggggccagggaaccctggtcaccgtctcctca

SEQ ID NO: 17216 - DNA, 309 bp, Homo sapiens
  source 1..309: mol_type = other DNA
acacagaccctcacgctgacctgcaccttctctgggttctcactcagcactagtggagtgggtgtgggctggatccgtcagcccccaggaaaggccctggagtggcttgcactcatttattgggatgatgataagcgctacagcccatctctgaagagcaggctcaccatcgccacggacacctccaaaaaccaggtggtccttacaatgaccaacatggaccctgtggacacaggcacatattactgtgcacacgggggctggccctttgactactggggccagggaaccctggtcaccgtctcctca

SEQ ID NO: 17217 - DNA, 309 bp, Homo sapiens
  source 1..309: mol_type = other DNA
acacagaccctcacgctgacctgtaccttctctgggttctcagtcagcgctagtggagtgggtgtgggctggatccgtcagcccccaggaaaggccctggagtggcttgcactcatttattgggatgatgataagcgctacagtccgtctgtgaggagcaggctcaccatcaccaaggacacctccaaaaaccaggtggtccttagaatgaccaacatggaccctgtggacacagccacatattactgtgcacacgggggctggccctttgactactggggccagggaaccctggtcaccgtctcctca

SEQ ID NO: 17218 - DNA, 309 bp, Homo sapiens
  source 1..309: mol_type = other DNA
acacagaccctcacgttgacctgcaccttctctgggttctcactcagcactagtggagtgggtgcgggctggatccgtcagcccccaggaaaggccctggagtggcttgcactcatttattgggatgatgatgagcgctacagcccatctctgaagagcaggctcaccatcaccaaggacacctccaaaaatcagatggtccttagaatgaccaacatggaccctgtggacacagccatatattattgtgcacacggagggtggccttttgactactggggccagggaaccctggtcaccgtctcctca

SEQ ID NO: 17219 - DNA, 309 bp, Homo sapiens
  source 1..309: mol_type = other DNA
acacagaccctcacgctgacctgcaccttctctgggttctcactcagcactagtggagtgggtgtgggctggatccgtcagcccccaggaaaggccctggagtggcttgcactcctttattgggatgatgataagcgctacagcccatctctgaagagcaggctcaccatcaccaaggacacctccaaaaaccaggtggtccttacaatgaccaacatggaccctgtggacacagccacatattactgtgcacacggagggtggccctttgactactggggccagggaaccctggtcatcgtctcctca

SEQ ID NO: 17220 - DNA, 309 bp, Homo sapiens
  source 1..309: mol_type = other DNA
acacagaccctcacgctgacctgcaccttctctggcttctcactcagcactagtggagtgggtgtgggctggatccgtcagccccccggaaaggccctggagtggcttgcactcatttactgggatgatgataagcgctacagcccatctctgaagagcaggctcaccatcaccaaggacacctccaaaaaccaggtggtccttacaatgaccaacatggaccctgtggacacagccacatattactgtgcacacggagggtggccctttgactactggggccagggaaccctggtcaccgtctcctca

SEQ ID NO: 17221 - DNA, 309 bp, Homo sapiens
  source 1..309: mol_type = other DNA
acacagaccctcacgctgacctgcaccttctctgggttctcactcagcactagtggagtgggtgtgggctggatccgtcagcccccaggaaaggccctggagtggcttacactcatttattgggatgctgataagcgctacagcccatctctgaagaacaggctcaccatcaccaaggacacctccaaaaaccaggtggtccttacaatgaccaacatggaccctgtggacacagccacatattactgtgcacacggagggtggccctttgactactggggccagggaaccctggtcaccgtctcctca

SEQ ID NO: 17222 - DNA, 283 bp, Homo sapiens
  source 1..283: mol_type = other DNA
tgcagcctctggattctcctttagtaactattggctaagttgggtccgccaggctccaggaaagagactggagtgggtggccaacattaaacaagatggaagtgagaaaaactatgtggactctgtgaagggccgattcaccatctccagagacaacgcccagaacttactgtttctgcaaatgaacagcctgagagccgaggacacggctgtatattactgtgcgagagataaattgggatggacctactggggccagggaaccctggtcaccgtctcctcg

SEQ ID NO: 17223 - DNA, 283 bp, Homo sapiens
  source 1..283: mol_type = other DNA
tgcagcctctggattcacctttagtaattattggataacttgggtccgccaggctccaggaaagagactggagtgggtggccaacattaaacaagatggaagtgagaaaaactatgtggactctgtgaagggccgattcaccatctccagagacaacgcccagaactcactgtatctgcaaatgaacagcctgagagccgaggacacggctgtatattactgtgcgagagataaattgggatggacctactggggccagggaaccctggtcaccgtctcctcg

SEQ ID NO: 17224 - DNA, 283 bp, Homo sapiens
  source 1..283: mol_type = other DNA
tgcagcctctggattcacctttaatacgtattggatgacctgggtccgccaggctccagggaagagactggagtgggtggccaacataaagcaagatggaagtgagaccaactatgtggactctgtgaagggccgattcaccatctccagagacaacgccaagaactcactgtatctgcaaatgaacagcctgagacccgaggacacggctatgtattactgtgcgagagataaattggggtggacctactggggccagggaatcttggtcaccgtctcctca

SEQ ID NO: 17225 - DNA, 283 bp, Homo sapiens
  source 1..283: mol_type = other DNA
tgcagcctctggattctcctttagtagctattggctaagttgggtccgccaggctccaggaaagagactggagtgggtggccaacattaaacaagatggaagtgagaaaaactatgtggactctgtgaagggccgattcaccatctccagagacaacgcccagaacttactgtttctgcaaatgaacagcctgagagccgaggacacggctgtatattactgtgcgagagataaattgggatggacctactggggccagggaaccctggtcaccgtctcctcg

SEQ ID NO: 17226 - DNA, 283 bp, Homo sapiens
  source 1..283: mol_type = other DNA
cactgtctctggtggttccatcaatagttactactggagctggatccggcagcccccagggaagggactggagtggattggctatatcttttatagtgggggcaccaactacaacccctccctcaagagtcgagtcgccatatcagtagacacgtccaagaaccagttcttcctgaagctgaggtctgtgaccgctgcggacacggccgtgtattactgtgcgagagggggagcacctcgtcccggctactggggccagggaaccctggtcaccgtctcctca

SEQ ID NO: 17227 - DNA, 283 bp, Homo sapiens
  source 1..283: mol_type = other DNA
cagtgtctctaatagctccattagaagtttctattggagctggatccggcagcccccagggaagggactggagtggattggttatatcgacgacagtgggaacaccaactacaacccctccctcaagagccgagtcaccatatcagtggacacgtccaagaaagaggtgtccctgaagctgagatctgtgatcgccgcggacacggccgtgttttattgtgcgagaggaggagctcctcgcccaggctactggggccagggaaccctagtcaccgtctcctca

SEQ ID NO: 17228 - DNA, 295 bp, Homo sapiens
  source 1..295: mol_type = other DNA
tacaccctctggattcaccttcaatatttatgaaatgaactgggtccgccaggctccagggaaggggctggagtgggtttcatatatcagtactagtggtagtaacaaatactacgcagactctgtgaagggccgattcaccatctccagagacaactccaagaactcactgtatctgcaaatgaacagcctgagagtcgaggacacggctgtttattactgtgggagagagccgtcaggctatggctacggtatggacgtctggggccaagggaccacggtcaccgtctcctca

SEQ ID NO: 17229 - DNA, 295 bp, Homo sapiens
  source 1..295: mol_type = other DNA
tgcagcctctggattcaccttcagtaattatgaaatgaattgggtccgccaggctccagggaaggggctggagtgggtttcatacattagtagtagtggtgataccagatactacacagactctgtgaagggccgattcaccatctccagagacaacgccaagaactcactgtatctgcaaatgaactacttgagagccgaggacacggctgtttattactgtgggagagagcctagtggctacggttacggtatggacgtctggggccaggggaccacagtcaccgtctcctca

SEQ ID NO: 17230 - DNA, 295 bp, Homo sapiens
  source 1..295: mol_type = other DNA
tgcagcctctggattcactttcagtaattatgaaatgaattgggtccgccaggctccagggaaggggctggagtgggtttcatacattagtagtagtggtgataccagatactacacagactctgtgaagggccgattcaccatctccagagacaacgccaagaactcactgtatctgcaaatgaacagcttgagagccgaggacacggctgtttattactgtgggagagagcctagtggctacggttacggtatggacgtctggggccaggggaccacagtcaccgtctcctca

SEQ ID NO: 17231 - DNA, 295 bp, Homo sapiens
  source 1..295: mol_type = other DNA
tgcggcctctggattcaccttcagtaattatgaaatgaattgggtccgccaggctccagggaaggggctggagtgggtttcatacattactactagtggtgataaaagatactacacagactctgtgaagggccgattcaccatctccagagacaacgccaagaactcactgtatctgcaaatgaacagcttgagagccgaggacacggctgtttattattgtgggagagagcctagtggctacggttacggtatggacgtctggggccaggggaccacagtcaccgtctcctca

SEQ ID NO: 17232 - DNA, 319 bp, Homo sapiens
  source 1..319: mol_type = other DNA
tgcagcctctggatttacctttagtagttattggatgaactgggtccgccaggctccagggaaggggccggagtgggtggccaacataaagcacgatggaagtgacagacactatgcggactctgtgaagggccgattcaacatttacagagccaacgccaagaactcactgtatctccaaatgaacagcctgagagacgacgatacggctgtatatttttgtgcgagaggtttgtgggagggacactgtagtagtaccctctgccatcccaactggttcgacccctggggccagggaaccctggtcaccgtctcctca

SEQ ID NO: 17233 - DNA, 319 bp, Homo sapiens
  source 1..319: mol_type = other DNA
tgcagcctctggattcaccttcagcagcttttggatgacctgggtccgccaggctccagggaaggggctggagtgggtggccaacataaagcatgatggaggtgaacaacactatgtggactctgtgaagggccgattcaccatctccagagacaacgccaagaactctctgtatctgcaaatgaacagcctgagagccgaggacacggctgtatattactgtgcgagagggctgtgggaaggacattgtagtagtaccttgtgccatcccaactggttcgacccctggggccagggaaccctggtcaccgtctcctca

SEQ ID NO: 17234 - DNA, 282 bp, Homo sapiens
  source 1..282: mol_type = other DNA
gcttctggatacaccttcgctggaaatgctatacattgggtgcgccaggcccccggacaaaggcttgagtggatgggacggatccacgctggcaatggcaacacaaaatactcacagaggttccagggcagagtcaccattaccagggacacatccgcgaccacagcctacatggagctgagcagcctgagatccgaagacacggctgtgtattactgtgcgagaggaaatagtggctaccttgactactggggccagggaaccctggtcaccgtctcctca

SEQ ID NO: 17235 - DNA, 282 bp, Homo sapiens
  source 1..282: mol_type = other DNA
acttctggatacaccttcactagccatgttgtgcagtgggtgcgccaggcccccggacaaggtcttgagtgggtgggatgggtcagcactgccagtggtaacccaaaatattcacagaagttccaagacagagtcaccattaccagggacacatccgcgagcacagcctacatgcaactgagcagcctgcgatctgaagacacggctgtatattactgtgcgagaggaaattcaggctaccttgactactggggccagggaaccctggtcaccgtctcctca

SEQ ID NO: 17236 - DNA, 282 bp, Homo sapiens; identical to SEQ ID NO: 17234
  source 1..282: mol_type = other DNA

SEQ ID NO: 17237 - DNA, 283 bp, Homo sapiens
  source 1..283: mol_type = other DNA
tgcaggctctgagttcacctttagtagttattggatgagttgggtccgccaacctccagggaaggggctggagtgggtggccaacataaaaccagatggaagtgagaaatactatgtgggctctgtgaagggccgattcaccatctccagagacaacgccaagaactcactgtatctgcaaatgaacagcctgagagccgaggacacggctgtatattactgtgcgagaggtcccctagacggtgactactggggccagggaaccctggtcaccgtctcctca

SEQ ID NO: 17238 - DNA, 283 bp, Homo sapiens
  source 1..283: mol_type = other DNA
tgcagcctctggtttcacctttagtagctatttaatgagctgggtccgccaggctccagggaaggggctggagtgggtggccaacataatggaagatggcagtgagaaatactatgtggactctgtggagggccgattcaccatctccagagacaacgccaagaactcactgtatctgcagatgaacagcctgagagccgaggacacggctgtgtattactgtgcgagaggacctttagacggtgactactggggccagggaaccctggtcaccgtctcctca

SEQ ID NO: 17239 - DNA, 287 bp, Homo sapiens
  source 1..287: mol_type = other DNA
cagcctctggattcaccttcagtacctactggatgcactgggtccgccaagttccagggaaggggctggtgtgggtctcacgtattaatagtgatgagactgacacaagctacgcggcctccgtgaagggccgattcaccatctccagagacaacgccaagaacacgctgtatctgcaaatgaacggtctgagagtcgaggacacggctgtgtattattgtgtcagaggtgcaacatctgggtcacttgactactggggccagggaaccctggtcaccgtctcctca

SEQ ID NO: 17240 - DNA, 289 bp, Homo sapiens
  source 1..289: mol_type = other DNA
tgcagcctctggattcaccttcagtacctactggatgcactgggtccgccaagttccagggaaggggctggtgtgggtctcacgtattaatagtgatgagactgacacaagctacgcggcctccgtgaagggccgattcaccatctccagagacaacgccaagaacacgctgtatctgcaaatgaacggtctgagagtcgaggacacggctgtgtattattgtgtcagaggtgcaacatctgggtcacttgactactggggccagggaaccctggtcaccgtctcctca

SEQ ID NO: 17241 - DNA, 289 bp, Homo sapiens
  source 1..289: mol_type = other DNA
tgcagcctctggattcaccttcagtaccttctggatgcactgggtccgccaggctccagggaaggggctggtgtgggtctcacgcattagtcctgatgcgagtgacacgagctatgcggactccgtgaagggccgattcaccatctccagagacagcgccacgaacacgctgtatctgcaaatgaacagtctgagagccgaggacacggctgtgtatttctgtgtaaggggagcaacatctggatcacttgactactggggccagggaaccctggtcaccgtctcctca

SEQ ID NO: 17242 - DNA, 321 bp, Homo sapiens
  source 1..321: mol_type = other DNA
acacagaccctcacgctgacctgcaccttctctgggttctcactcaacactcctgctgtggctgtgggctggatccgtcagcccccaggaaaggccctggaatggcttgcgatcatttattggcatgatgagaagcgtttcaacccatccctgaacaccgggatcagcatcaccaaggacacctccaaaagccaggtggtcctgacaatggccactgtggaccctgttgacacagccacatattactgtgcacacagtcgaatagcagcacctggactttttgactactggggtcagggcatcctggtcaccgtctcctca

SEQ ID NO: 17243 - DNA, 321 bp, Homo sapiens
  source 1..321: mol_type = other DNA
acacagaccctcacgctgacctgcaccttctctgggttctcactcagcactagtggagtgggtgtgggctggatccgtcagcccccaggaaaggccctggagtggcttgcactcatttattgggatgatgataagcgctacagcccatctctgaagagcaggctcaccatcaccaaggacacctccaaaaaccaggtggtccttacaatgaccaacgtggaccctgtggacacagccacatattactgtgcgcactctcgtatagcagcacctggcctctttgactactggggccagggactctgggtcaccgtctcgtca

SEQ ID NO: 17244 - DNA, 286 bp, Homo sapiens
  source 1..286: mol_type = other DNA
tacagcctctggattcacctttaatatctattggatgacctgggtccgccaggctccagggaaggggctggagtgggtggccaacataaacgatgatggaagtaagaaaacctatgtggactctctgaggggccgactcaccatctccagagacaacgccaagaactcgctgtatctgcaaatgaacagcctgggagccgaggacacggctgtctattactgtgcgagacttggtcattactacatggacgtctggggcaaagggaccacggtcaccgtctcttca

SEQ ID NO: 17245 - DNA, 286 bp, Homo sapiens
  source 1..286: mol_type = other DNA
tgcagcctctggattcacctttaatacctattggatgagctgggtccgccaggctccagggaagggactggagtgggtggccaacataaagccagatggaagtgacaaatactatgtggactctctgaagggccgattcaccatctccagagacaacgccaagaactcactttatctgcaaatgaacagcctgagagccgaggacacggctgtgtattactgtgcgagattgggacactactacatggacgtctggggcaaagggaccacggtcaccgtctcctca

SEQ ID NO: 17246 - DNA, 324 bp, Homo sapiens
  source 1..324: mol_type = other DNA
acacagaccctcacgctgacctgcaccttctctggattctcactcactactagtggagtgggtgtgggctggttccgtcagcccccaggaaaggccctggagtggcttgcactcatttattgggatgatgacaagcgctacagcccatctctgaagagcaggctcaccatcaccaaggacacctccaaaaaccaggtggtccttacaatgaccaacatggaccctgtggacacagccacatattactgtgcacacagacgggggtatagcagtggcagaggagttgactactggggccagggaaccctggtcaccgtctcctca

SEQ ID NO: 17247 - DNA, 324 bp, Homo sapiens
  source 1..324: mol_type = other DNA
acacagaccctcacgctgacctgcaccttctctgggttctcactcaacactgctggagtgggtgtgggctggttccgtcagcccccaggaaaggccccggagtggcttgcactcatttattgggatgatgataagcgctacatcccatctctgcagagcaggctcaccatcaccaaggacacctccaaaaaccaggtggtccttacagtgaccgacatgggccctgtagacacagccacatattattgtgcacacaggaggggatacagctctggccggggtgttgactattggggccagggagccctggtcaccgtctcctca

SEQ ID NO: 17248 - DNA, 324 bp, Homo sapiens
  source 1..324: mol_type = other DNA
acacagaccctcacgctgacctgcaccttctctgggttctcactcagcactagtggagtgggagtgggctggttccgtcagcccccaggaaaggccctggagtggcttgcactcatttattgggatgatgataagcgctacatcccatctcttaagagcaggctcaccatcaccaaggacacctccaaaaaccaggtggtccttacaatgaccgacatggaccctgtggacacagccacatattactgtgcacacaggaggggatacagctctggccggggtgttgactactggggccagggaaccctggtcaccgtctcctca

SEQ ID NO: 17249 - DNA, 324 bp, Homo sapiens
  source 1..324: mol_type = other DNA
acacagaccctcacgctgacctgcaccttctctggattctcactcagtactagtggagtgggtgtgggctggttccgtcagcccccaggaaaggccctggagtggcttgcactcatttattgggatgatgacaagcgctacagtacatctctgaagagcaggctcaccatcaccaaggacacctccaaaaaccaggtggtccttacaatgaccaacatggaccctgtggacacagccacatattactgtgcacacagacggggctatagtagtggcagaggagttgactactggggccagggaaccctggtcaccgtctcctca

SEQ ID NO: 17250 - DNA, 277 bp, Homo sapiens
  source 1..277: mol_type = other DNA
tgcggcctctcgattcacctttaggacctattcgatggtctggatccgccaggctccagggcaggggctggagtgggtggccaacataaaccaagatggaagtgagaaaaactatgtggactctgtgaagggccgattcaccatctccagagacaacgccaagaattcactgtatctgcaaatgaacagcctaagagtcgaggacacggctgtgtatttctgtgcgagagggcccctcgacttctggggccagggaaccctggtcactgtctcctca

SEQ ID NO: 17251 - DNA, 277 bp, Homo sapiens
  source 1..277: mol_type = other DNA
tgcagcctctggattcagctttagtagctattggatgagctgggtccgccaggctccagggaaggggctggagtgggtggccagcataaagcgagatggaagtgagaaatactatgtggactctgtgaagggccgattcaccatctccagagacaacgccaagaactcactgtatctgcacatgaacagcctgagagccgaggacacggctgtgtattactgtgcgagaggacctcttgacttctggggccagggaaccctggtcaccgtctcctca

SEQ ID NO: 17252 - DNA, 277 bp, Homo sapiens
  source 1..277: mol_type = other DNA
tgcagcctctggattcacctttagcaaatatcccatgggctgggtccgccaggctccagggaaggggctggaatgggtctcaacagttagtggtagtggtagtaacacatactacgcagactccgtgaagggccggttcaccatctccagagacaattccaagaacacactgtatctgcaaattaacagcctgagagtcgaagacacggccgtatactactgtgcgaaagatcaattgttggggtggggccagggaaccctggtcaccgtctcctca

SEQ ID NO: 17253 - DNA, 277 bp, Homo sapiens
  source 1..277: mol_type = other DNA
tgcagcctcgggattcacctttagcaaatatgccatgggctgggtccgccaggctccagggaaggggctggaatgggtctcaagtcttagtgatagtgggactaacacatactacgcagactccgtgaagggccggttcaccatctccagagacaactccaagaacaccctgtatctgcaaatgaacagcctgagagccgaagacacggccgtatattactgtgcgaaagatcagttgttggggtggggccagggaaccctggtcatcgtctcctca

SEQ ID NO: 17254 - DNA, 277 bp, Homo sapiens
  source 1..277: mol_type = other DNA
tgcagcctctggattcacctttagcaaatatgccatgggctgggtccgccaggctccagggaaggggctggaatgggtctcaagtcttggtggtagtggtactgacacatattacgcagactccgtgaagggccggttcaccatctccagagacaattcgaagaacacggtttatctgcaaatgaacagcctgagagccgaagacacggccgtatattactgtgcgaaagatcagttgttggggtggggccagggaaccctggtcaccgtctcctca

SEQ ID NO: 17255 - DNA, 277 bp, Homo sapiens; identical to SEQ ID NO: 17252
  source 1..277: mol_type = other DNA

SEQ ID NO: 17256 - DNA, 277 bp, Homo sapiens
  source 1..277: mol_type = other DNA
tgcagcctctggattcacctttagcacctatgccatgacatgggtccgccaggctccagggaaggggctggagtgggtctcaggtattagtggtagtggtgatagcacatattacgcagactccgtgaagggccgattcaccatctccagagacaacgccaagaacacgctgtatctacaaatgaacagcctgagagccgaagacacggccgtatattactgtgcgaaagatcaacttcttggctggggccagggaaccctggtcaccgtctcctca

SEQ ID NO: 17257 - DNA, 280 bp, Homo sapiens
  source 1..280: mol_type = other DNA
cgctgtctatggtgggtccttcagtgattactactggagctggatccgccagcccccagggaaggggctggagtggattggggaaatcaatcatagtggaagcaccaactacaacccgtccctcaagagtcgagtcaccatatcagtagacacgtccaagaaccagttgtccctgaagctgagctctgtgaccgccgcggacacggctgtgtattactgtgcgagagactacggtgactcggggtactggggccagggaaccctggtcaccgtctcctca

SEQ ID NO: 17258 - DNA, 280 bp, Homo sapiens
  source 1..280: mol_type = other DNA
cgctgtctatggtgggtccttcagtggttattactggagctggatccgccagcccccagggaaggggctggagtggattggggaaatcaatcatagtggaagcaccaactacaacccgtccctcaagagtcgagtcaccatatcagtagacacgtccaagaaccagttcaccctgaagctgagctctgtgaccgccgcggacacggctgtgtattactgtgcgagagactacggtgactccggctactggggccagggaacactggtcaccgtctcctca

SEQ ID NO: 17259 - DNA, 277 bp, Homo sapiens
  source 1..277: mol_type = other DNA
tgcagcctctggattcagcttcagtagttatgaaatgaactgggtccgccaggctccagggaaggggctggagtgggtttcatacatcagtaccagtggtggtaccgtatactacgcagactctgtgaagggccgattcaccatttccagagacaacgccaagaactcactgaatctgcaaatgaacagcctgagagccgaggacacggctatttattactgtgcggcactgtggttcgacccctggggccagggagccctggtcaccgtctccgca

SEQ ID NO: 17260 - DNA, 277 bp, Homo sapiens
  source 1..277: mol_type = other DNA
tacagcctctggattcaccttcagtaattatgaaatgaactgggtccgccaggctccagggaaggggctggagtgggtttcatacatcactggaagtggtggtattgtatactatgcagactctgtgaagggccgattcaccatctccagagacaacgccaagaactcactgcatctgcaaatgaacagcctgagagccgaggacacggctatttattactgtgcggcattgtggttcgacccctggggccagggagccctggtcaccgtctccgca

SEQ ID NO: 17261 - DNA, 277 bp, Homo sapiens
  source 1..277: mol_type = other DNA
tgcagcctctggattcagcttcagtagttatgaaatgaactgggtccgccaggctccagggaaggggctggagtgggtttcatacattagtactagtggtggtaccatatactacgcagactctgtgaagggccgattcaccatctccagagacaacgccaagaactcactgaatctgcaaatgaacagcctgagagccgaggacacggctgtttattactgtgcggcattgtggttcgacccctggggccagggagccctggtcaccgtctccgca

SEQ ID NO: 17262 - DNA, 277 bp, Homo sapiens
  source 1..277: mol_type = other DNA
tgcagcctctggattcagtttcagtagttatgaaatgaactgggtccgccaggctccagggaaggggctggagtgggttgcatacagtagtggtagtggtaatatcgtatattacgcagactctgtgaagggccgattcaccatctccagagacaacgccgagaactcactgtatttgcaaatgaacagcctgagagccgaggacacggctgtttattactgtgcagcgctatggttcgacccctggggccagggaaccctggtcaccgtctcctca

SEQ ID NO: 17263 - DNA, 277 bp, Homo sapiens
  source 1..277: mol_type = other DNA
tgcagcctctggattcagtttcagtagttatgaaatgaattgggtccgccaggctccagggaaggggctggagtgggttgcatacagtagtggtagtggtaatatcgtatattacgcagactctgtgaagggccgcttcaccatctccagagacaacgccgagaactcactgtatttgcaaatgaacagcctgagagccgaggacacggctgtttattactgtgcagcgctatggttcgacccctggggccagggaaccctggtcaccgtctcctca

SEQ ID NO: 17264 - DNA, 277 bp, Homo sapiens
  source 1..277: mol_type = other DNA
tgcagcctctggattcagtttcagtagttatgaaatgaactgggtccgccaggctccagggaaggggctggagtgggttgcatacagtagtactagtggtaataccgtatattacgcagactctgtgaagggccgatttaccatctccagagacaacgtcgagaactcactgtatttgcaaatgaacagcctgagagccgaggacacggctgtttattactgtgcagcgctatggttcgacccctggggccagggaaccctggtcaccgtctcctca

SEQ ID NO: 17265 - DNA, 277 bp, Homo sapiens
  source 1..277: mol_type = other DNA
tgcagcctctggattcagtttcagtagttatgaaatgaactgggtccgccaggctccagggaaggggctggagtgggttgcatacagtactggtagtggtaatatcgtatattacgcagactctgtgaagggccgattcaccatctccagagacaacgccgagaactcactgtatttgcaaatgaacagcctgagagccgaggacacggctgtttattactgtgcagcgctatggttcgacccctggggccagggaaccctggtcaccgtctcctca

SEQ ID NO: 17266 - DNA, 274 bp, Homo sapiens
  source 1..274: mol_type = other DNA
tgcagcctctggattcaccttcagtaattatgaaatgaactgggtccgccaggctccagggagggggctggagtgggtttcatacattaatgctgggggctccacatactacgcagactctgtgaggggccgattcaccatctccagagacaatgccaacaacttactgtatctgcaaatgaacagcctgagagtcgacgacacggctatttattattgtgcggccctctggttcgacccctggggccagggagccctggtcaccgtctcctca

SEQ ID NO: 17267 - DNA, 277 bp, Homo sapiens
  source 1..277: mol_type = other DNA
tgaagcctccggattcaccttcagtagttatgaaatgaattgggtccgccaggctccagggaaggggctggagtgggtttcatacatcagtactagtggtagtaccatatactatgcagactctgtgaagggccgattcaccatctccagagacaacgccaagaactcactgtatctgcaaatgaatagcctgagagccgaggacacggctgtttattactgtgcggccctctggttcgacccctggggccagggagccctggtcaccgtctcctca

SEQ ID NO: 17268 - DNA, 277 bp, Homo sapiens
  source 1..277: mol_type = other DNA
tgcagcctctggattcagtttcagtagttatgaaatgaactgggtccgccaggctccagggaaggggctggagtgggttgcatacactagtggtagtggtaatatcgtatattacgcagactctgtgaagggccgattcgccatctccagagacaacgccgagaactcactgtatttgcaaatgaacagcctgagagccgaggacacggctgtttattactgtgcagcgctatggttcgacccctggggccagggaaccctggtcaccgtctcctca

SEQ ID NO: 17269 - DNA, 277 bp, Homo sapiens
  source 1..277: mol_type = other DNA
tgcagcctctggattcagtttcagtagttatgaaatgaactgggtccgccaggctccagggaaggggcttgagtgggtttcatacattagtggtagtgggaataccgtatattacgcagactctgtgaagggccgattcaccatctccagagacaacgccgagaactcactgtatctgcaaatgaacagcctgagagccgaggacacggctgtttattactgtgcagcactatggttcgacccctggggccagggaaccctggtcaccgtctcctca

SEQ ID NO: 17270 - DNA, 277 bp, Homo sapiens; identical to SEQ ID NO: 17262
  source 1..277: mol_type = other DNA

SEQ ID NO: 17271 - DNA, 276 bp, Homo sapiens
  source 1..276: mol_type = other DNA
gcttctggatacaccttctctaggtaccctatgcattggctgcgccaggcccccggacagaggcctgagtggatgggaaggatcaacggtggcgatggtaacacagaatattcacagaacttccagggcagagtcaccattgccagggacacatccgccaccacagtctacatggtgctgaacagcctgacatttgaagacacggctgtctattattgtgcgaggggggtgggagcggactactggggccagggaaccctggtcaccgtctcctca

SEQ ID NO: 17272 - DNA, 276 bp, Homo sapiens
  source 1..276: mol_type = other DNA
gcttctggaggcaccttcagcagctatgctatcagctgggtgcgacaggcccctggacaagggcttgagtggatgggagggatcaacggtggcgatggtaacacagaatattcacagaacttccagggcagagtcaccattgccagggacacatccgccaccacagtctacatggtgctgaacagcctgacatttgaagacacggctgtctattattgtgcgaggggggtgggagcggactactggggccagggaaccctggtcaccgtctcctca

SEQ ID NO: 17273 - DNA, 276 bp, Homo sapiens
  source 1..276: mol_type = other DNA
gcttctggatacaccttctctaggtaccctatgcattggctgcgccaggcccccggacagaggcctgagtggatgggaaggatcaacggtggcgatggtaacacagaatattcacagaagttccagggcagagtcaccattgccagggacacatccgccaccacagtctacatggagctgagcagcctgagatttgaagacacggctgtctattattgtgcgaggggggtgggagcggactactggggccagggaaccctggtcaccgtctcctca

SEQ ID NO: 17274 - DNA, 276 bp, Homo sapiens
  source 1..276: mol_type = other DNA
gcttctggatacaccttctctaggtaccctatgcattggctgcgccaggcccccggacagaggcctgagtggatgggaaggatcaacggtggcgatggtaacacagaatattcacagaacttccagggcagagtcaccattgccagggacacatccgccaccacagtctacatggtgctgaacagcctgagatttgaagacacggctgtctattattgtgcgaggggggtgggagcggactactggggccagggaaccctggtcaccgtctcctca

SEQ ID NO: 17275 - DNA, 276 bp, Homo sapiens
  source 1..276: mol_type = other DNA
acttctggatacagcttcactaaatatccgatacagtggatgcgccaggcccccggccaaacacttgagtggatggggtggatcatcgctggcaatggatccacaaaatattcacagaggttccaggatagagtcacccttctaagggacgcagccgcggccacagtctacatggaactgagcagtctgagacctgaggacacggctctgtattattgtgcgagaggggtcggcgctgactactggggccagggaacgcaggtcatcgtctccaca

SEQ ID NO: 17276 - DNA, 276 bp, Homo sapiens
  source 1..276: mol_type = other DNA
gcttctggatacaccttcagtatctatcctatgcattgggtgcgccaggcccccggacaaaggcctgagtggatgggatggatcaacgctggcaatgataacacacaatattcacagaaattccaggacagagtcaccattaccagagacacatccgcgagcacagcctacatggagctgagcagactgagaattgaagacacggctgtgtattactgtgcccgaggcgtgggggccgactactggggccagggaaccctggtcaccgtctcctca

SEQ ID NO: 17277 - DNA, 277 bp, Homo sapiens
  source 1..277: mol_type = other DNA
tgcagcctctggaatcacccttagtaacaatgccatgacctgggtccgccaggctccagggaaggggctgcagtgggtcgcagatattagaggaggtggtgacacatactacgcagactccgtgaggggccggttcaccatctccagagacaattccaacaacgtcttgtatcttcaaatggacagcctgagagccgaagacacggccctttattattgtgcaggacatggcggttcctcttactggggccacggaaccttggtcaccgtctcctct

SEQ ID NO: 17278 - DNA, 277 bp, Homo sapiens
  source 1..277: mol_type = other DNA
tgcagcctctggattcagtttgatcggcaatgccatgacctgggtccgccaggctccagggaaggggctggagtgggtctcaactattagtggaggtcataccacattttacgcagactccgtgaggggccggttcaccatttccaaagacgattccaggaacacactctatctgcaaatggacagcctgagagccgacgacacggccttatattactgtgcgggccatggtgggagctcctactggggccagggaaccctggtcaccgtctcctca

SEQ ID NO: 17279 - DNA, 286 bp, Homo sapiens
  source 1..286: mol_type = other DNA
tgcagcctctgggttcaccgtcaataccaactacatgagctgggtccgccaggctccagggaaggggctggagtgggtctcagttatttatagtggtggaagcacatactacgcagactccgtgaagggccgattcaccatctccagacacaattccaagaacacgctgtatcttcaaatgaacagcctgagagctgaggacacggccgtctattactgtgtgagagatacagactattacggtatggacgtctggggccaagggaccacggtcaccgtctcctca

SEQ ID NO: 17280 - DNA, 286 bp, Homo sapiens
  source 1..286: mol_type = other DNA
tgcagcctctgggttcatcgtcagtagcaactacatgagctgggtccgccaggcttcagggaaggggctggagtgggtctcagttatttatagtagtggtagcacatattacgcagactccgtgaagggccggttcaccatctccagacacatttccaagaacacgctgtatcttcaaatgaacagcctgagaactgaggacacggccgtgtattactgtgtgagagatacggactactacggtatggacgtctggggccaagggaccacggtcaccgtctcctca

SEQ ID NO: 17281 - DNA, 286 bp, Homo sapiens
  source 1..286: mol_type = other DNA
tgaagcctctggattcacgtttagtagtcactggatgcattgggcccgccaggctccagggaaggggctggagtgggtggccaccataaagcaagatggaactgagaaatactttgtggactctgtaaagggccgattcaccatctccagagacaacgccaagaactcactgtatctgcaaatgaacaggctgagagtcgaggacacggctgtgtattattgtgtgaggggcagtggctggttttttgattattggggccagggaatattggtcaccgtctcctca

SEQ ID NO: 17282 - DNA, 286 bp, Homo sapiens
  source 1..286: mol_type = other DNA
tgcagcctctggattcacctttagtaggtattggatgagctgggtccgccaggctccagggaaggggctggagtgggtggccagcataaagcaagatggaagtgagaaatactacttggactctgtgaagggccgattcaccatctccagagacaacgccaagaactcactgtatctgcaaatgaacaggctgagagtcgaggacacggctgtgtattattgtgtgaggggcagtggctggttttttgattattggggccagggaatattggtcaccgtctcctca

SEQ ID NO: 17283 - DNA, 286 bp, Homo sapiens
  source 1..286: mol_type = other DNA
tgcagcctctggattcacttttaacaattgttacatgcattgggtccgccaggctccagggaaggggctggagtgggtggccaacataaaacaagatggagctcagaaatactatgtggactctgtgaagggccgattcaccatctccagagacaacgccaagaattcactgtttctgcaaatgaacagcctgcgagtcgaggacacggctgtgtattattgtgtgagagggtctggttggttctttgactactggggccagggaaccctggtcaccgtctcctca

SEQ ID NO: 17284 - DNA, 286 bp, Homo sapiens; identical to SEQ ID NO: 17283
  source 1..286: mol_type = other DNA

SEQ ID NO: 17285 - DNA, 286 bp, Homo sapiens; identical to SEQ ID NO: 17283
  source 1..286: mol_type = other DNA

SEQ ID NO: 17286 - DNA, 286 bp, Homo sapiens
  source 1..286: mol_type = other DNA
tgcagcctctggattcagcttcagcagctctgaaatgaactgggtccgccaggctccagggaaggggctggaatggatttcatacattagtagtagtggtagtaccattttttatgcagactctgtgaagggccgattcaccgtctccagagacaacgccaaaaactcactgtatctgcaaatgagtagcctgggagccgaggacacggctctttattattgtgcgagagaccggggcttctgcttcgacccctggggccagggaaccctggtcaccgtctcctca

SEQ ID NO: 17287 - DNA, 286 bp, Homo sapiens
  source 1..286: mol_type = other DNA
tggagcctctggattcaccttcagtagttctgaaatgaactgggtccgccaggctccagggaaggggctggagtgggtttcatatattagtaggagtggtagtaccattttctacgcagactctgtgaagggccgattcaccatctccagagacaacgccaagaactcactgtatctgcaaatgaacagcctgagacccgaagacacggctgtgtattactgcgcgagagatagagggttctgtttcgacccctggggccagggaacccaggtcaccgtctcctca

SEQ ID NO: 17288 - DNA, 274 bp, Homo sapiens
  source 1..274: mol_type = other DNA
tgcagcctctgggttcacctttagcagctatgccatgacctgggtccgccaggctccagggaaggggctggagtgggtctcaactattagtggtaatggtgataacacattctacgcagactccgtgaagggccggttcaccatctccagagacaattccaagaacacgctgtatctgcaaatgaacagcctgagagccgacgacacggccctatattactgtgcggaaagaattgactactggggccagggaaccctggtcaccgtctcctcg

SEQ ID NO: 17289 - DNA, 274 bp, Homo sapiens
  source 1..274: mol_type = other DNA
tgcagcctctggattcacctttaacaagtatgccataacctgggtccgccaggctccagggaagggactggagtgggtctcacttattagtggcaatggtaataagacatactacacagactccgtgaagggccggttcaccatctccagagacaattccaagagcacggtgtatctgcaaatgaacagcctgagagccgaggacacggccatatattactgtgcagagcgtattgactactggggccagggaaccctagtcaccgtctcctca

SEQ ID NO: 17290 - DNA, 274 bp, Homo sapiens
  source 1..274: mol_type = other DNA
tgcagcctctgggttcacctttagcagctatgccatgacctgggtccgccaggctccagggaaggggctggagtgggtctcaactattagtggtaatggtgataacacattctacgcagactccgtgaagggccggttcaccatctccagagacaattccaagaacacgttgtatctgcaaatgaacagcctgagagccgacgacacggccctatattactgtgcggaaagaattgactactggggccagggaaccctggtaaccgtctcctcg

SEQ ID NO: 17291 - DNA, 291 bp, Homo sapiens
  source 1..291: mol_type = other DNA
aagggttctggacacagctttgtcttctggatcggctgggtgcgccagatgcccgggaaaggcctggagtggatggggatcatccatcctggtgactccgataccagatacagcccgtccttccaaggccaggtcaccatctcagccgacaagtccatcagcaccgcctacctgcagtggaacagcctgaaggcctcggacaccgccatgtattactgtgtgagacaggatggttcgggactattctactttgactactggggccagggaaccctggtcaccgtctcctca

SEQ ID NO: 17292 - DNA, 291 bp, Homo sapiens
  source 1..291: mol_type = other DNA
aagggctctggatatacgttttcctactggatcggctgggtgcgccagatgcccgggaaaggcctggagtggatgggggtcatccatcccggtgactcggataccagatacagcccgtccttcgaaggccaggtcaccatctccgtcgacaagtccatcaggatcgcctacttgcagtggagcagcctgaaggcctcggacaccgccatgtattattgtgtgagacaagatggttcggggctcttctactttgactactggggccagggaaccctggtcaccgtctcctca

SEQ ID NO: 17293 - DNA, 276 bp, Homo sapiens
  source 1..276: mol_type = other DNA
gcttctggatacaccttcaataggtatcctatgaattgggtgcgacaggcccctggacaagggcttgagtggatgggatggatcaacgccagcactgggaacccaacgtatgcccaggccttcacaggacggtttgtcttctccgtggacacctctgtcagtacggcatatctgcagatcagcactctcaaggctgaggacactgccgtttattactgtgcgagaggccgggagggggactactggggccagggaacccaggtcaccgtctcgtca

SEQ ID NO: 17294 - DNA, 276 bp, Homo sapiens
  source 1..276: mol_type = other DNA
gcttctggatacagcttcaataggtatcctatgaattgggtgcgacaggcccctggacaagggcttgagtggatgggatggatcaacgccagcactgggaacccaacctatgcccaggccttcacaggacggtttgtcttctccgtggacacctctgtcagtacggcatatctgcagatcagcactctaaaggctgaggacactgccgtgtattactgtgcgagaggccgggagggggactactggggccagggaacccaggtcaccgtctcgtca

SEQ ID NO: 17295 - DNA, 276 bp, Homo sapiens
  source 1..276: mol_type = other DNA
gcttctggatacaccttcactagctatgctatgaattgggtgcgacaggcccctggacaagggcttgagtggatggggtggatcagcaccaacactgggaacccaacgtatgcccagggcttcacaggacggtttgtcttctccttggacacctctgtcagcacggcatatctgcagatcagcagcctaaaggctgaggacactgccgtctattactgtgcgaggggccgggagggtgactactggggccagggaaccctggtcaccgtctcctca

SEQ ID NO: 17296 - DNA, 310 bp, Homo sapiens
  source 1..310: mol_type = other DNA
tgtagcgtctggattcgccttcagtggttatggcatgcattgggtccgccaggctccaggcaagggactggagtgggtggcagttatttggtatgatggaagtaatgaataccacgcagactccgtgaaggggcggttcaccatctccagagacaattccaagaacacgctgtatttgcaaatgaacagcctgagagccgaggacacggctgtgtattactgtgcgaggacctattgtactagtgccacttgctactactactacggaatggacgtctggggccaagggaccacggtcaccgtctcctca

SEQ ID NO: 17297 - DNA, 310 bp, Homo sapiens
  source 1..310: mol_type = other DNA
tgcagcgtctgaattcaacttcaggagctatggcatgcactgggtccgccaggctccaggcaaggggctggagtgggtggcagttatttggtatgatggaactaacgagtactatgcagagtccgtgaagggccgattcaccatctccagagacaactccaagaacacgctgtttctgcaaatgaacagcctgagaaccgaggacacggctgtttattactgtgcgagaacatattgtaccagtgccacctgctactactactacggtatggacgtctggggccaagggaccacggtcaccgtctcctca

SEQ ID NO: 17298 - DNA, 280 bp, Homo sapiens
  source 1..280: mol_type = other DNA
tgcagcctctggattcacctttagtaattttgtcatgagttgggtccgccaggctccagggaagggactggagtgggtctcgggtcttactagtagcggtggtagcacatactacgcagactccgtgaagggccgattcaccatctccagagacaactccaagaacacgctgtatctgcaaatgaacagcctgagagtcgaggacacggccgtctattactgtgcgaattggggtggcctgggtcactggggccagggaaccctggtcaccgtctcccca

SEQ ID NO: 17299 - DNA, 280 bp, Homo sapiens
  source 1..280: mol_type = other DNA
tgcagcctccggaatcgactttagaaactctgtcatgaactgggtccgccaggctccagggaagggtctggagtgcgtctcaagtattattgctaatggtcaaaacacatactacgcagactccgtgaagggccgcttcaccatctccagagacaattccaagaacactttgtatctccaaatgaatagcctgagagtcgaagacacggccatatattactgtgcgaattgggggggattgggccactggggccagggaaccctggtcaccgtctcctca

SEQ ID NO: 17300 - DNA, 280 bp, Homo sapiens
  source 1..280: mol_type = other DNA
tgtagcctccggaatcaactttaagaactctgtcatgaactgggtccggcaggctccagggcgtggcctggagtgcgtctccaccattattgctggtggtcaagacacatactacgcagacttcgtgaaggggcgattcaccatctccagagacaattccaagaatatgttgtatttgcaaatgaatagcctcagagtcgaagacacggccatgtattactgtgcgaattgggggggtttgggccactggggccagggaaccccggtcaccgtctcctca

SEQ ID NO: 17301 - DNA, 280 bp, Homo sapiens
  source 1..280: mol_type = other DNA
tgtagcctccggaatcaactttaagaactctgtcatgaactgggtccggcaggctccagggcgtggcctggagtgcgtctccaccattattgctggtggtcaagacacatactacgcagacttcgtgaaggggcgattcaccatctccagagacaattccaagaacatgttgtatttgcaaatgaatagcctcagagtcgaagacacggccatgtattactgtgcgaattgggggggtttgggccactggggccagggaaccccggtcaccgtctcctca

SEQ ID NO: 17302 - DNA, 280 bp, Homo sapiens
  source 1..280: mol_type = other DNA
tgcagcctccggaatcgactttagaaactctgtcatgaactgggtccgccaggctccagggaagggtctggagtgcgcctcaagtattattgctaatggtcaaaacacatactacgcagactccgtgaagggccgcttcaccatctccagagacaattccaagaacactttgtatctccaaatgaatagcctgagagtcgaagacacggccatatattactgtgcgaattgggggggattgggccactggggccagggaaccctggtcaccgtctcctca

SEQ ID NO: 17303 - DNA, 280 bp, Homo sapiens
  source 1..280: mol_type = other DNA
tgtagcctccggaatcaactttaagaactctgtcatgaactgggtccggcaggctccagggcatggcctggagtgcgtctccaccattattgctggtggtcaagacacatactacgcagacttcgtgaaggggcgattcaccatctccagagacaattccaagaatatgttgtatttgcaaatgaatagcctcagagtcgaagacacggccatgtattactgtgcgaattgggggggtttgggccactggggccagggaaccccggtcaccgtctcctca

SEQ ID NO: 17304 - DNA, 280 bp, Homo sapiens
  source 1..280: mol_type = other DNA
tgtagcctccggaatcaactttaagaactctgtcatgaactgggtccggcgggctccagggcgtggcctggagtgcgtctccaccattattgctggtggtcaagacacatactacgcagacttcgtgaaggggcgattcaccatctccagagacaattccaagaatatgttgtatttgcaaatgaatagcctcagagtcgaagacacggccatgtattactgtgcgaattgggggggtttgggccactggggccagggaaccccggtcaccgtctcctca

SEQ ID NO: 17305 - DNA, 297 bp, Homo sapiens
  source 1..297: mol_type = other DNA
cagggttctggatacagatttaccacgtactggatcggctgggtgcgccagatgcccgggaaaggcctggagtggttggggatgatctatcctggtgactctgagaccaaatacaacccgtccttcgaaggccgagtcaccttgtcaggcgacaagtccaccagcaccgtctatctacagtggagcagcctgaaggcctcggacaccgccatatattactgtgcgaggcttcgtagtagcagctggaaggatgcttctgatatctggggcccagggactctgctcaccgtctcttca

SEQ ID NO: 17306 - DNA, 297 bp, Homo sapiens
  source 1..297: mol_type = other DNA
gaggcttctggatacaggtttaccagctactggatcgcctgggtgcgccagatgcccgggaaaggcctggagtggatggggatcatctaccctggtgactctgaaaccacatacagcccgtcgttccaaggccaggtcaccatctcagccgacaagtccatcaccaccgcctacttgcagtggagcagcctgaaggcctcggacaccgccatgtattactgtgcgagactgcgtagcagcagctggaaggatgcttctgatatctggggccaagggacaatggtcaccgtctcttca

SEQ ID NO: 17307 - DNA, 304 bp, Homo sapiens
  source 1..304: mol_type = other DNA
tgcagcctctggattcacctttaacaactatgccatgacctgggtccgccaggctccagggaaggggctggagtgggtctcagctatcagtgctactggtggtagtacatactacgcagactccgtgaggggccggttcaccatctccagagacaattccaagaacacgctgtatctgcaaatgaacagcctgagagtcgaggacacggccgtatattactgtgcgaaagggccgaggtactatggttcggggagttattattttgactactggggccagggaaccctggtcaccgtctcctca

SEQ ID NO: 17308 - DNA, 307 bp, Homo sapiens
  source 1..307: mol_type = other DNA
tgcagcctctggattcacctttagcagctatgccatgacctgggtccgccaggctccagggaaggggctggagtgggtctcagctattagtgctagtagtggcagtagcacatactacgcagactccgtgacgggccggttcaccatctccagagacaattccaagaacacgctgtatctgcaaatgaacagcctgagagccgaggacacggccgtatattactgtgcgaaagggccccgttactatggttcagggagttactactttgattactggggccagggaaccctggtcaccgtctcctca

SEQ ID NO: 17309 - DNA, 295 bp, Homo sapiens
  source 1..295: mol_type = other DNA
tgcagcctctggattcaccatcagtgactacttcgtggactgggtccgccaggctccagggaagggcctggagtgggttggccgtagtaacaacaaagcttatggttacatcacagaatacgccgcgtctgtgaaaggcagattcaccatctcaagagatgattcaaagaactcactgtatctgcaaatgaacagcctgaaaaccgaagacacggccctgtattactgtactagagcaactggagggtacgacatggacgtctggggccaggggaccacggtcaccgtctcctca

SEQ ID NO: 17310 - DNA, 295 bp, Homo sapiens
  source 1..295: mol_type = other DNA
tgcagcctctggattcacttttagtgcctacttcgtggactgggtccgccaggctcccgggaaggggctggagtgggttggccgttctagaaacaaacttgatagttatatcacagaatatgccgcgtctgtgaaaggcagattcaccatctcaagagatgaatcaaagaattcagtgtatttgcaaatggacagcctgaaaaccgacgacacggccatatattattgtactagagcaacggggggttacgatatggacgtctggggccaagggaccacggtcaccgtctcctca

SEQ ID NO: 17311 - DNA, 295 bp, Homo sapiens
  source 1..295: mol_type = other DNA
tgcagcctctggattcaccttcagttcctacaacatgaactgggtccgccaggctccagggaagggactggagtgggtcgcatccataactggaactactaattacatatattacgcagactcagtgaagggccgattcaccatctccagagacaacgccaagaactcactgtatctgcaaatgaacaacctgggagccgaggacacggctagatattactgtgcgagagcctacggtgactacggatactactttgactactggggccagggaaccctggtcaccgtctcctca

SEQ ID NO: 17312 - DNA, 295 bp, Homo sapiens
  source 1..295: mol_type = other DNA
tgcagcctctggattcaccttcagtagctataggatgaagtgggtccgccaggctccagggaaggggctggagtgggtctcatccattagtagtagtagtagttacatatactacgcagactcagtgaagggccgattcaccatctccagagacaacgccaagaactcactgtatctgcaaatgaacagcctgagagccgaggacacggctgtatattactgtgcgagagcgtacggtgactacgggtactactttgactactggggccagggaaccctggtcaccgtctcctca

SEQ ID NO: 17313 - DNA, 289 bp, Homo sapiens
  source 1..289: mol_type = other DNA
cactgtctctggtggctccatcagtagttactactggagctggatccggcagcccccggggaagggactggagtggattgggtatatctattacagtgggagcaccaactacaacccctccctcaagagtcgagtcaccatatcagtagacacgtccaagaaccagttctccctgaagctgagctctgtgaccgctgcggacacggccgtgtattactgtgcaagggggggtagtagtggtaactggttcgacccctggggccagggaaccctggtcaccgtctcctca

SEQ ID NO: 17314 - DNA, 289 bp, Homo sapiens
  source 1..289: mol_type = other DNA
cactgtctctggtggctccatcagaagttactactggagctggatccggcagcccccggggaagggactggagtggattgggtatatctactacattgggagcaccacctacaacccctccctcgagagtcgagtcaccatatcagtagacacgtccaagaaccagttctccctgaagctgacctctgtgaccgctgcggacacggccatgtatttctgtgcgagagggggtagcagcggtaactggttcgacccctggggccagggaaccctggtcaccgtctcccca

SEQ ID NO: 17315 - DNA, 271 bp, Homo sapiens
  source 1..271: mol_type = other DNA
tgcaacctctggattcagttttgggaacatttggatgagctgggtccgccaggctccagggaaggggctggaatgggtggccaacataaaggacgatggaagtcagaaatattatgtggagtctgtgaggggccgattcaccatctccagagacaacaccaagaactcactgtatctgcaaatggacagcctgagggtcgaggacacggctatgtattattgtacgagcggcagtaactggggccagggagccctggtcaccgtctcctca

SEQ ID NO: 17316 - DNA, 271 bp, Homo sapiens
  source 1..271: mol_type = other DNA
tgtagcctctggattcgactttagtaaggattggatgagctgggtccgccaggctccagggaaggggctggagtgggtggccaatataaaacacgatggcactgagaaatactttggggactctgtgaagggccgattcagcatctccagagacaacgccgagaactccctgtttctgcaaatgaactacctgagactcgaagacacgggtacatattattgtacgagtgggtccaattggggccagggagccctggtcaccgtctcctca

SEQ ID NO: 17317 - DNA, 271 bp, Homo sapiens
  source 1..271: mol_type = other DNA
tgtagcctctggattcgactttagtaaggattggatgagctgggtccgccaggctccagggaaggggctggagtgggtggccaatataaaacacgatggcactgagaaatattttggggactctgtgaagggccgattcagcatctccagagacaacgccgagaactccctgtttctgcaaatgaactacctgagactcgaagacacgggtacatattattgtacgagtgggtccaattggggccagggagccctggtcaccgtctcctca

SEQ ID NO: 17318 - DNA, 288 bp, Homo sapiens
  source 1..288: mol_type = other DNA
gcttctggatacaccttcaccagttatgaaatgaactgggtgcgacaggccactggacaagggcttgagtggatgggatggatgaaccctaacagtggtaacacaggctattcacagaagttccagggcagagtcaccatggccaggaacacctccataagcacagcctacatggagctgagcagcctgacatctgaggacacggccgtttattactgtgcgagaggccctcctaccagtcaatacttccaacactggggccagggcaccctggtcaccgtctcctca

SEQ ID NO: 17319 - DNA, 288 bp, Homo sapiens
  source 1..288: mol_type = other DNA
gcttctggatacaccttcaccagttatgatatcaactgggtgcgacaggccactggacaagggcttgagtggatgggatggatgaaccctaacagtggtaacacagactatgcacagaacttccagggcagagtcaccatgaccaggaacacctccataagcacagcctacatggacctgagcagcctgagatctgaggacacggccgtgtattactgtgcgagaggcccccctacgagccaatacttccaacactggggccagggcaccctggtcaccgtctcctca

SEQ ID NO: 17320 - DNA, 288 bp, Homo sapiens
  source 1..288: mol_type = other DNA
gcttctggatacaccttcaccagttatgatatcaactgggtgcgacaggccactggacaagggcttgagtggatgggatggatgaatcctaacagtggtaacacaggctatgcacagaagttccagggcagagtcaccatgaccaggaacacctccataagcacagcctacatggagctgagcagcctgagatctgacgacacggccgtgtattactgtgcgagaggcccccctacgagccaatactttcagcactggggccagggcaccctggtcaccgtctcctca

SEQ ID NO: 17321 - DNA, 292 bp, Homo sapiens
  source 1..292: mol_type = other DNA
tgcagcctctggattcacctttagtaactcttggatgagttgggtccgccaggctccagggaagggactggagtgggtggccaacatacggccagatggaagtgagaaaaactatgtggactctgtgaagggccgattcaccatctccagagacaacgccgagtactcactgtatctgcaaatgtacagcctgagcgccgaggacacggctttttattattgtgtgagaggtggcggcagtggctggccgtttgagtcctggggccagggaaccctggtcaccgtctcctca

SEQ ID NO: 17322 - DNA, 292 bp, Homo sapiens
  source 1..292: mol_type = other DNA
tgcagcctctgggttcagttttagaacttcttggatggcctgggtccggcaggctccagggaaggggctggagtgggtggccaacataaaccagcctggaatcgagaaaaactatgtggacgcagtgaagggccggttcaccatctccagagacaacaccgatatgttactgtatctgcaaatgaacagcctgagagccgaggacacggctgtctattactgtgtgagaggggggggcagtggctggccctttgagtcctggggccagggagccctggtcaccgtctcctca

SEQ ID NO: 17323 - DNA, 292 bp, Homo sapiens
  source 1..292: mol_type = other DNA
tgcagcctctggattcaccttcagtagttcttggatgagctgggtccgccaggctccagggaaggggctggagtgggtggccaacataaacccagatggaagtgagcaaaactatgtggactctgtgaagggccgactcaccatctccagagacaacgccaagaactcactgtatctgcagttgaacagtctgagagtcgaggacacggctctatattactgtgtgcgagggggaggcagtggctggccatttgagtcctggggccagggaaccccggtcaccgtctccgca

SEQ ID NO: 17324 - DNA, 292 bp, Homo sapiens
  source 1..292: mol_type = other DNA
tgcggcctctggattcacctttaggagctcttggacgagctggctccgccaggctccagggaaggggctggagtgggtggccaacattgatccagatgggggtgagaaaaactatttggactctgtgaagggccgcttcgtcatctccagagacaacgccaaggactcactgtctctgcaactgaacagcctgagagccgaggacacggctgtgtattactgtgtgagaggggggggcagtggctggccttttgagtcctggggccagggaaccctggtcagcgtctcctca

SEQ ID NO: 17325 - DNA, 282 bp, Homo sapiens
  source 1..282: mol_type = other DNA
gcttctggatacaccttcactagttatgctatgaattgggtgcgacaggcccctggacaaggacttgagtgcatgggatggatcaacaccaacactgggaggccaacgtatgccccgggcttcacaggacggtttgtcttctcggtggacacgtctgtcagcacggcatatctggagatcagcagcctagaggctgaagacactgccgtctattactgtgcgagagatggtggccggaggttagactcctggggccagggagccctggtcaccgtctcttca

SEQ ID NO: 17326 - DNA, 282 bp, Homo sapiens
  source 1..282: mol_type = other DNA
gcttctgcatactccttcactacatatgctatttattgggtgcgacaggcccctggacaagggcttgcggggatgggatggatcaacaccaaaactgggagaccaacgtatgcccagggcttctctggacggcttgtcttctccttggacacctctgtcagcacggcatatctgcagatcaacaacctagaggctgaggacactgccgtttattactgtgcgagagatggtggtaggcggctcgactcctggggccagggaaccctggtcaccgtctcctca

SEQ ID NO: 17327 - DNA, 285 bp, Homo sapiens
  source 1..285: mol_type = other DNA
gcttctagatacaccttcactgactatcctatgcattgggtgcgccaggcccccggacaaaggcttgagtggatgggatggatcagcgctggcaatggtaacacagaatattcacagaagttccagggcagagtcaccattaccagggacacatccgcgagcacagcctacatggagctcagcagcctcagatctgaagacacggctgtatattactgtgcgaccggtagtggttattactctccagactactggggccagggaaccctggtcaccgtctcctca

SEQ ID NO: 17328 - DNA, 285 bp, Homo sapiens
  source 1..285: mol_type = other DNA
gcttctggatacaccttcagttcctatgctttgcattgggtgcgccaggcccccggacaaaggcttgagtggatgggatggatcaacggtggcaatggagacacaaaatattcacagaagtgccagggcagagtcaccataaccagggacacatccgcgagcacagcctacatggaactgagcagcctgaggtctgaagacacggctgtatattactgtgcgacggggtcgggctactattcccctgactactggggccagggaaccctggtcaccgtctcctca

SEQ ID NO: 17329 - DNA, 289 bp, Homo sapiens
  source 1..289: mol_type = other DNA
tgcagcctctggattcaccttcagtaactactggatgcactgggtccgccaagctccagggaaggggctggtgtgggtctcacgtatttatattgatgggagtaccacaacctacgcggactccgtggtgggccgattcaccatctccagagacaacgccaagaacacactgtatctgcaaatgaacagtctgagagccgaggacacggctgtatattactgtgcaagaggaggcgctggaggtgcttttgatatctggggccaagggacaatagtcaccgtctcttct

SEQ ID NO: 17330 - DNA, 289 bp, Homo sapiens
  source 1..289: mol_type = other DNA
tgcagcctctggattcaccttcagtagctactggatgtactgggtccgccaagctccagggaaggggccggtgtgggtctcacatattaatagtgacgggagtagcacaacctacgcggactccgtgaagggccgattcaccatctccagagacaacgccaagaacacgctgtatctgcaaatgaacagtctgagagccgaggacacggctgtgtatttctgtgcaagaggtggagctggaggcgcttttgatatctggggccaagggacaatggtcatcgtctcttca

SEQ ID NO: 17331 - DNA, 289 bp, Homo sapiens
  source 1..289: mol_type = other DNA
tgcagcctctggattcaccttcagtggctactggatgtactgggtccgccaagctccagggaaggggccggtgtgggtctcacatattaataatgacgggagtagcacaacctacgcggactccgtgaagggccgattcaccatctccagagacaacgccaagaacacgctgtatttacaaatgaacagtctgagagccgaggacacggctgtgtatttctgtgcaagaggtggagctggaggcgcttttgatatctggggccaagggacaatggtcatcgtctcttca

SEQ ID NO: 17332 - DNA, 286 bp, Homo sapiens
  source 1..286: mol_type = other DNA
tgtagcctctggattcaccttcagtacatattggatgcactgggtccgccaagttccagggaaggggctggtgtgggtctcacgtacttattttgatggaagtgacaccagttacacggactccgtgaagggccgattcaccatctccatagacaacgccaagaacacgctgtatctgcaaatgaacagtcttagagtcgacgacacggctctgtattattgtgcaagagatctcggactggctcggggatactggggccagggaaccctggtcaccgtctcctca

SEQ ID NO: 17333 - DNA, 286 bp, Homo sapiens
  source 1..286: mol_type = other DNA
cgtagcctctgcatacgcctttaatacctactggatgcactgggtccgccaagctccagggaaggggctggtgtgggtctcacgtcttagaggtgatgggagtgacataagctatgcggacttcgtgaagggccgattcaccatctccagagacaacgccaagaacacgctgtatctgcaaatggacagtctgagacccgaggacacggctgtgtattactgtgcaagggacttggggctggcacggggttactggggccagggaaccctggtcaccgtctcctca

SEQ ID NO: 17334 - DNA, 301 bp, Homo sapiens
  source 1..301: mol_type = other DNA
tgcagcgtctggattcaccttcaatgcatttggcatgaactgggtccgccaggctccaggcaaggggctggagtgggtggcaattatatggtttgatggaagtattaaatattatggagactccgtgaagggccgattcaccatctccagagacaataccaaggacacggtgtatctgcagatgaacagcctgagagtcgaggatacggctgtctattactgtgcgagatatggttcggggagagacttaagggacccctttgactactggggccagggaaccctggtcaccgtctcctca

SEQ ID NO: 17335 - DNA, 301 bp, Homo sapiens
  source 1..301: mol_type = other DNA
tgcggcgtctggattcagtttctttggccatgtcatgcactgggtccgccagcctcctggcaaggggctggagtgggtggcaactacatggcctgatgaaagttttaaggcttatgcagactccgtgaagggccgattcaccgtctccagagacaattccaagagcacactttacttgcaaatggacagtctgagagtcgaggacacggctatatatttttgtgcgaggtatggttcgggtagagacctacgtgacccttttgactactggggccagggaaccctggtcaccgtctcctca

SEQ ID NO: 17336 - DNA, 289 bp, Homo sapiens
  source 1..289: mol_type = other DNA
tgttgcctctggattcagctttagtagtttttggatgagttgggtccgccaggctccagggaaggggctggagtttgtgaccaacataaaccaagatggaagtcagaaatcctatgtggactctgtgaagggccgattcaccatctccagagacaacgccaagaagtcagtgtatctgcaaatggacagcctgagagccgaggacacggctgtgtattattgtgcgagagatccgggatacagcgaatttgatatctggggccaagggacaatggtcactgtctcttca

SEQ ID NO: 17337 - DNA, 289 bp, Homo sapiens
  source 1..289: mol_type = other DNA
tgaagcctccggattcacctttagtgacttttggatgagttgggtccgccagactccaggaaaggggctggagttcgtggccaacttgaatcaagatggaagtgagaaatcgtatgtggactctgtgaagggccgattcaccatctccagagacaacgccaagaactcagtgtttttgcaaatgaacagcctgagagccgacgacacggctgtatatttttgcgcgagagatccaggctatagtgaatttgatatttggggccaggggacagcggtcaccgtctcctca

SEQ ID NO: 17338 - DNA, 292 bp, Homo sapiens
  source 1..292: mol_type = other DNA
cactgtctctggtggctccgtcagcagtgatagttactattggagctggatccggcagcccgccgggaagggactggagtggattgggcgtatttattccagcgggagcaccagtaacaacccctccctcaagagtcgagtcaccatatcagtagacacgtccaagaaccagttctccctgaagctgaggtctgtgaccgccgcggacacggccgtgtattattgtgcgagagattttggactctacggtatggacgtctggggccaagggactacggtcaccgtctcctca

SEQ ID NO: 17339 - DNA, 292 bp, Homo sapiens
  source 1..292: mol_type = other DNA
cactgtctctggtggctccatcagtagtggtctttactactggagttggatccggcagcccgccgggaagggactggagtggattgggcgtatttacaccagtgggagcgccaattacaacccctccctcgagagtcgagtcaccatatcagtagacacgtcgaagaaccagttctccctgaaactgagctctgtgaccgccgcagacacggccgtgtattactgtgcgagagatttcgggctctacggtatggacgtctggggccaagggaccacggtcaccgtctcctca

SEQ ID NO: 17340 - DNA, 292 bp, Homo sapiens; identical to SEQ ID NO: 17339
  source 1..292: mol_type = other DNA

SEQ ID NO: 17341 - DNA, 289 bp, Homo sapiens
  source 1..289: mol_type = other DNA
cgttgtctctggtgggtcgttcagtggttactattggagttggatccgccagcccccaggaaaggggctggagtggattggggagatcaattacagtggagagaccaactacaacccgtccctcaagagtcgagtcaccctttcaatagacacgtccaagaaccagttctccctggagttgaactctgtgaccgccgcggacacggctatgtattactgtgcgagagacccctacactgcagatcagtttgactactggggccagggaatgctggtcatcgtctcctca

SEQ ID NO: 17342 - DNA, 289 bp, Homo sapiens
  source 1..289: mol_type = other DNA
cggtgtctatggtgggtccttcagtggttgctactggagctggatccgccagcccccagggaagggactggagtggattggggaaatcaatcagagtggaagcaccaactacaacccgtccctcaagagtcgagtcaccatttcaatagacacgtccaagaagcagttttccctgaagttgaactctgtgaccgccgcggacacgggtgtgtattactgtgcgagagacccatatactgcggaccaatttgactactggggccagggaatcctggtcaccgtctcctca

SEQ ID NO: 17343 - DNA, 286 bp, Homo sapiens
  source 1..286: mol_type = other DNA
tgcagcctctgggttcaccgtcagtagcaactacatgagctgggtccgccaggctccagggaaggggctggagtgggtctcagctattagtggtagtggtggtagcacatactacgcagactccgtgaagggccggttcaccatctccagagacaattccaagaacacgctgtatctgcaaatgaacagcctgagagccgaggacacggccgtatattactgtgcgaatgggggcagatactactttgactactggggccagggaaccctggtcaccgtctcctca

SEQ ID NO: 17344 - DNA, 286 bp, Homo sapiens
  source 1..286: mol_type = other DNA
tgaagtctctggattcaccgttagcagccatgccctgagctgggtccgccaggctccagggaaggggctggagtgggtctcacttattagtgatagtgatgatactacagactacgcagactccgtgaagggccggttcaccatctccagagacaattccaagaacactctgtatctgcaaatgaacagcctgagagccgacgactcggccatatattactgtgcgaacggtgggagatactactttgactactggggccagggaaccctggtcaccgtctcctca

SEQ ID NO: 17345 - DNA, 301 bp, Homo sapiens
  source 1..301: mol_type = other DNA
tgcagcctctggattcagcttcagtgactacttcatggactgggtccgccaggctccagggaaggggctggagtgggttggccgtattagagacaaacctagtaattacaccacagaatatgccgcgtctgtgaaaggcagattcaccatctcaagagatgattcagagaactcaatgtatttgcaaatgaacagcctgaaaattgaggacacggccgtctattattgtgctagagatcttagggagtcatgggctttctttgactactggggccagggaatccttgtcaccgtctcctca

SEQ ID NO: 17346 - DNA, 301 bp, Homo sapiens
  source 1..301: mol_type = other DNA
tacaacgtctgggttcagctttcgtgaccactacatggactgggtccgccaggctccagggaaggggctggagtgggttggccgtattagagacagagctaacagttacaccacagagtacgccgcgtctgttaaaggcagattcaccatctcaagagatgattcaaagaactcactgcatctggacatgaacaacctgaaaagcgaggacacggccgtctattattgtgccagggatttacgggagtcctgggccttctttgactactggggccagggaaccctggtcgccgtctcctca

SEQ ID NO: 17347 - DNA, 301 bp, Homo sapiens
  source 1..301: mol_type = other DNA
tacaacgtctgggttcacctttagtgaccactacatggactgggtccgccaggctccagggaaggggctggagtgggttggccgtattagagacagagctcacagttacaccacagagtacgccgcgtctgttaaaggcagattcaccatctcaagagatgattcaaagaactcactgcatctggatatgaacaacctgaaaagcgaggacacggccgtgtattattgtgcccgggatttacgggagtcctgggccttctttgactactggggccagggaaccctggtcgccgtctcctca

SEQ ID NO: 17348 - DNA, 301 bp, Homo sapiens
  source 1..301: mol_type = other DNA
tacaacttctgggttcagctttcgtgaccactacatggactgggtccgccaggctccagggaaggggctggagtgggttggccgtattagagacagagctaacagttacaccacagagtacgccgcgtctgttaaaggcagattcaccatctcaagagatgattcaaagaactcactgcatctggacatgaacaacctgaaaagcgaagacacggccgtctattattgtgccagggatttacgggagtcctgggccttctttgactactggggccagggaattctggtcgccgtctcctca

SEQ ID NO: 17349 - DNA, 301 bp, Homo sapiens
  source 1..301: mol_type = other DNA
tacaacgtctgggttcagctttcgtgaccactacatggactgggtccgccaggctccagggaaggggctggagtgggttggccgtattagagacagagctagtagttacaccacagagtatgccgcgtctgttaaaggcagattcaccatctcaagagatgattcaaagaactcactgcatctggacatgaacaacctgaaaagcgaggacacggccgtctattattgtgccagggatttacgcgagtcctgggccttctttgactactggggccagggaaccctggtcgccgtctcctca

SEQ ID NO: 17350 - DNA, 301 bp, Homo sapiens
  source 1..301: mol_type = other DNA
tacaacgtctggattcacctttagtgaccactacatggactgggtccgccaggctccagggaaggggctggagtgggttggccgtattagagacagagctaagagttacaccacagagtacgccgcgtctgttaaaggcagattcaccatctcaagagatgattcaaagaacttattgcatctggatatgaacaacctgaaaagcgaggacacggccgtgtattattgtgccagggatttgcgggagtcctgggccttctttgactactggggccagggaaccctggtcgccgtctcctca

SEQ ID NO: 17351 - DNA, 295 bp, Homo sapiens
  source 1..295: mol_type = other DNA
tggcgcctctggtttcaccttcgatcgacactggatgcactgggtccgccaagctccagggaaggggctgatgtgggtcgcacgtgttaggggtgatgggcttgattcaacctacgcggactccgtgaagggccgattcaccatctccagagacaacgccaagagcacgatgtatttgcaaatgaacagtctgacagacgaggacacggctgtgtatttttgtgcgagagacatagttgccggttcggggagtcttgactactggggccagggaaccctggtcaccgtctcctca

SEQ ID NO: 17352 - DNA, 295 bp, Homo sapiens
  source 1..295: mol_type = other DNA
tgcagcctctggattcaccttcaggaactactggatgcactgggtccgccaagttccagggaaggggctggtgtgggtctcacgtattaaaggtgatgggagtgacacaaactacgcggactccgtgaagggccgattcaccatctccagagacaacgccaaaaacacgttgtatctgcaaatgaacagtctgagagtcgaggacacggcggcgtattattgtgcaagagatatagtcgctggttcggggagtcttgactactggggccggggaaccctggtcaccgtctcctca

SEQ ID NO: 17353 - DNA, 286 bp, Homo sapiens
  source 1..286: mol_type = other DNA
tgcagcctctggattcactttcagtaacgcctggatgagctgggtccgccaggctccagggaaggggctggagtgggttggccgtattaaaagcaaaactgatggtgggacaacagactacgctgcacccgtgaaaggcagattcaccatctcaagagatgattcaaaaaacacgctgtatctgcaaatgaacagcctgaaaaccgaggacacagccgtgtattactgtacccccgatgatgcttttgatatctggggccaagggacaatggtcaccgtctcttca

SEQ ID NO: 17354 - DNA, 286 bp, Homo sapiens
  source 1..286: mol_type = other DNA
tgcagcctctggattcactttcagtaacgcctggatgagctgggtccgccaggctccagggaaggggctggagtgggttggccgtattaaaagcaaaactgatggtgggacaacagactacgctgcacccgtgaaaggcagattcaccatctcaagagatgattcaaaaaacacgctgtatctgcaaatgaacagcctgaaaaccgaggacacagccgtgtattactgtaccccggacgatgcttttgatatctggggccaagggacaatggtcaccgtctcttca

SEQ ID NO: 17355 - DNA, 293 bp, Homo sapiens
  source 1..293: mol_type = other DNA
ccatctccggggacagtgtctctaccaagagtattgcttggaactggatcaggcagtccccatcgagagggtttgagtggctgggaaggacatactatagatccaagtggtataatgaatatgcagaatctgtgaagagtcgaatagtcgtcaacccagacacatccaagaaccagttctccctgcacctgaactctgtgactcccgaggacacggctgtgtattactgtgcaagaggaactcttcgtacttttgatatctgggcccaagggacaatggtcaccgtctcttca

SEQ ID NO: 17356 - DNA, 293 bp, Homo sapiens
  source 1..293: mol_type = other DNA
ccatctccggggacagtgtctctaccagcagtgctgcttggaactggatcaggcagtccccatcgagagggtttgagtggctgggaaggacatactacagatccaagtggcataatgattatgcagtatctgtgaagagtcgaatagtcgtcaacccagacacatccaagaaccagttctccctgcacctgaactctgtgactcccgaggacacggctgtgtattactgtgcaagaggaactcttcgtacttttgatatctgggcccaagggacaatggtcaccgtctcttca

SEQ ID NO: 17357 - DNA, 293 bp, Homo sapiens
  source 1..293: mol_type = other DNA
ccatctccggggacagtgtctctaccaagagtactgcttggaactggatcaggcagtccccatcgagagggtttgagtggctgggaaggacatactacagatccaagtggtataatgattatgcagaatctgtaaagagtcgaatagtcgtcaacccagacacatccaagaaccagttctccctgcacctgaactctgtgactcccgaggacacggctgtgtattactgtgcaagaggaactcttcgtacttttgatatctgggcccaagggacaatggtcaccgtctcttca

SEQ ID NO: 17358 - DNA, 293 bp, Homo sapiens
  source 1..293: mol_type = other DNA
ccatctccggggacagtgtctctaccagcagtgctgcttggaactggatcaggcagtccccatcgagagggtttgagtggctgggaaggacatactacagatccaagtggtataatgattatgcagtatctgtgaagagtcgaatagtcgtcaacccagacacatccaagaaccagttctccctgcacctgaactctgtgactcccgaggacacggctgtgtattactgtgcaagaggaactcttcgtacttttgatatctgggcccaagggacaatggtcaccgtctcttca

SEQ ID NO: 17359 - DNA, 293 bp, Homo sapiens
  source 1..293: mol_type = other DNA
ccatctccggggacagtgtctctagcaacagtgttgcttggaactggatcaggcagtccccatcgagaggccttgagtggctgggaaggacatactacaggtccaagtggtataatgagtatgaagtatctgtgaaaagtcgagtaaccatcaacccagacacatccaagaaccagttctccctgcagctgaactctgtgactcccgaggacacggctgtgtattattgtgcaagagggaccctaaggacttttgatatctggggccgagggacaatggtcaccgtctcttca

SEQ ID NO: 17360 - DNA, 271 bp, Homo sapiens
  source 1..271: mol_type = other DNA
tgcagcctctggattcaccttcagtagctatggcatacactgggtccgccaggctccaggcaagggtctggagtgggtggcacttatatcaaatgatggacgtaatgaatactgtgcagactccgtgaagggccgattcaccatctccagagacaattccaagaatacgctgtatctgcaaatgaacagcctgagagctgaggacacggctgtgtattactgtacgaatttcgcttactggggccagggaaccctggtcaccgtctcctca

SEQ ID NO: 17361 - DNA, 271 bp, Homo sapiens
  source 1..271: mol_type = other DNA
tgcagcctctggattcaccttcagtacctatggcatgcactgggtccgccaggctccaggcaaggggctggagtgggtggcacttatatcatatgctggaagtgaggaatactatgcagactccgtgaagggccgattcaccgtctccagagacaattccaagaacacggtgtatctgcaaatcaacagcctgagagctgaggacacggctgtgtattactgtacgaattttgcctactggggccagggaaccctggtcaccgtctcctca

SEQ ID NO: 17362 - DNA, 314 bp, Homo sapiens
  source 1..314: mol_type = other DNA
ccatctccggggacagtgtctctagcaacagtgctgcttggaactggatcaggcagtccccatcgaaaggccttgagtggctgggaaggacatactacaggtccaagtggtataatgattatgcagtatctgtgaaaagtcgaataaccatcaacccagacacatccaagaaccagttctccctgcagctgaactctgtgactcccgaggacacggctgtgtatttctgtgcaagaggagggagaggatattgtactagtaccacctgctactttgactactggggccggggaaccctggtcaccgtctcctca

SEQ ID NO: 17363 - DNA, 314 bp, Homo sapiens
  source 1..314: mol_type = other DNA
ccatctccggggacagtgtctctagcaacagtgctgcttggaactggatcaggcagtccccatcgagaggccttgagtggctgggaaggacatactataggtccaagtggtataatgattatgcaatatctgtgaagagtcgaataaccatcaacccagacacatccaagaaccagttctccctgcagctgaactctgtgactcccgaggacacggctgtgtattactgtgcaagaggaggaagaggatattgtacttctaccacctgctactttgactactggggccagggagccctggtcaccgtctcctca

SEQ ID NO: 17364 - DNA, 283 bp, Homo sapiens
  source 1..283: mol_type = other DNA
tggagcctctgaattcaccttcaatactgttggcgtgcactgggtccgccaggctccagggaaggggctggagtggatttcatacattcctcctactggcattagcaccagcacattctacgcagactctgtgaagggccggttcaccatctccagagacaactccaagagctcagtgtatctgcaattgaacagcctgagagtcgaggacacggctgtgtacttttgtgcgagcacgaaagggggctactggggccagggaattctggtcaccgtctcctcg

SEQ ID NO: 17365 - DNA, 283 bp, Homo sapiens
  source 1..283: mol_type = other DNA
tggagcctctggattcaccttcaatagttttggcgtgcactgggtccgccaggctccagggaaggggctggagtgggtttcatacattcctagtactgacattagcaccagcacattctacgcagactctgtgaagggccggttcaccatctccagagacaacgccaagagctcagtgtatctgcaattgaacagcctgagagtcgatgacacggctgtgtacttttgtgcgagcacgaaagggggctactggggccggggaaccctggtcaccgtctcctcg

SEQ ID NO: 17366 - DNA, 283 bp, Homo sapiens
  source 1..283: mol_type = other DNA
tggagcctctgaattcaccttcaatacttttggcgtgcactgggtccgccaggctccagggaaggggctggagtgggtttcatacattcctcctactggcattagcaccagcacattctacgcagactctgtgaagggccggttcaccatctccagagacaacgccaagagctcagtgtatctgcaattgaacagcctgagagtcgaggacacggctgtgtacttttgtgcgagcacgaaagggggctactggggccagggaattctggtcaccgtctcctcg

SEQ ID NO: 17367 - DNA, 277 bp, Homo sapiens
  source 1..277: mol_type = other DNA
tgcagcctctggaatcaccttcattaactatagcatgaactgggtccgccaggctccagggaaggggctggagtgggtttcatacattagcagtagtagtaaaaccatacactatgcagactctgtgaagggccgattcaccatctccagagacaatgccaagaactcactgaatctgcaaatgaacagcctgagagacgaggacacggctgtgtattactgtgcgagtacgaaagggggctactggggccagggaaccctggtcaccgtctcctca

SEQ ID NO: 17368 - DNA, 304 bp, Homo sapiens
  source 1..304: mol_type = other DNA
cactgtctctggtggctccatcagcagtagtagttactactggggctggatccgccagcccccagggaaggggctggactggattgaaagtatctattatagtgggagcacctaccacaacccgtccctcaagagtcgactcaccatatcaatagacacgtccaagaaccagttctccctgaggctgacctctgtgaccgccgcagacacggccgtgtattactgtgtgaggtcccccatagcagcggctgttccgtactactttgactactggggccagggaaccctggtcaccgtctcctca

SEQ ID NO: 17369 - DNA, 304 bp, Homo sapiens
  source 1..304: mol_type = other DNA
ctctgtctctggtggctccatcagcagaagtgattactactggggctggattcggcagcccccagggaaggggctggagtggattgggggtgcctattatactgggaaagcctactacaacccgtccctcaggagtcgagtcaccatatccgtggacacgtccaagaaccagttctccctgaagctgagctctgtgaccgccgcagacacggctctatattactgtgtgagaagccctattgcggcagctgtcccatactactttgactactggggccagggaaccctggtcaccgtctcctcg

SEQ ID NO: 17370 - DNA, 298 bp, Homo sapiens
  source 1..298: mol_type = other DNA
tgcagcctctggattcatcttttacaactatgccatgagctgggtccgccagtctccagggagggggctggagtgggtctcagctctcactggttccagtgaagacacatactacgcagactccgtgaagggccgcttcaccatctccagagacaatgacaaggacaccctgtatttgcaaatgaacagcctaagagacgacgacacggccgtatattactgtgcgaaaggaagcgacaccggccggccctactactttgactactggggccagggaaccctggtcaccgtcgcctca

SEQ ID NO: 17371 - DNA, 298 bp, Homo sapiens
  source 1..298: mol_type = other DNA
tgcagcctctggattcacctttagtagttatgccatgagctgggtccgccaggctccagggaaggggctggagtgggtctcaggcattactgctagcggtggtgatacatggcacgcagactccgtgaggggccggttcaccatctccagagacaattccaagaacacgctgtatctgcaaatggacagtctgagaggcgaggacacggccatatattactgtgcgaaaggttctgacacaggtcgtccttactactttgactactggggccagggatccctggtcaccgtctcctca

SEQ ID NO: 17372 - DNA, 298 bp, Homo sapiens
  source 1..298: mol_type = other DNA
tgcagcctctggattcatcttttacaactctgccatgagctgggtccgccagtctccagggagggggctggagtgggtctcagctctcactggttccagtgaagacacatactacgcagactccgtgaagggccgcttcaccatctacagagacaatgacaaggacaccctgtatttgcaaatggacagcctaagagacgacgacacggccgtatattactgtgcgaaaggaagcgacaccggccggccctactactttgactactggggccagggaaccctggtcaccgtcgcctca

SEQ ID NO: 17373 - DNA, 315 bp, Homo sapiens
  source 1..315: mol_type = other DNA
acacagaccctcacgctgacctgcaccttctctgggttctcactcagcacttatggagtgggtgtgggctgggtccgtcagcccccaggaaaggccctggagtggcttgcactcatttattggcatgatgataggcgctacagcccatctctgaagagcaggctcaccatcaccaaggacacctccaaaaaccaggtggtccttacaatgaccaacatggaccctgttgacacagccacatattactgtgcacacagcaatagcagctcgccccacgactactggggccagggaaccctggtcaccgtctcctca

SEQ ID NO: 17374 - DNA, 315 bp, Homo sapiens
  source 1..315: mol_type = other DNA
acacagaccctcacgctgacctgcaccttctctgggttctcactcagcacttatggagtgggtgtgggctggatccgtcagtccccaggaaaggccctggagtggcttgcactcatttattggcatgatgataagcgctacagcccatctctgaagagcaggctcaccatcaccaaggacacctccaaaaaccaggtagtccttacaatgaccaacatggaccctgtggacacagccacatattactgtgcacacagtaatagcagctcgccccatgactactggggccagggaaccctggtcaccgtctcctca

SEQ ID NO: 17375 - DNA, 315 bp, Homo sapiens; identical to SEQ ID NO: 17373
  source 1..315: mol_type = other DNA

SEQ ID NO: 17376 - DNA, 315 bp, Homo sapiens
  source 1..315: mol_type = other DNA
acacagaccctcacgctgacctgcaccttctctgggttctcactcagcacttatggagtgggtgtgggctggatccgtcagcccccaggaaaggccctggagtggcttgcactcatttattggaatgatgataagcgctacaacccatctctgaagaacaggctcaccatcaccagggacacctccaaaaaccaggtggtccttacactgaccaacatggaccctgtggacacagccacatattactgtgcacacagcaacagcagctcgccccacgactactggggccagggaaccctggtcaccgtctcctca

SEQ ID NO: 17377 - DNA, 315 bp, Homo sapiens
  source 1..315: mol_type = other DNA
acacagaccctcacgctgacctgcaccttctctgggttctcactcaccacgactggagtgggtgtgggctggctccgtcagccccccggaaaggccccggagtggcttgcactcgtttattggcatgatgataagcgctacagcccatctctgaagaccaggctcaccatcacgaaggacacctccaaaaacgaggtggtcctcacactgaccaacatggcccctgtggacacagccacatatttctgtgcacactcaaatagcagcagtccccacgactactggggccagggagtcctggtcaccgtctcctca

SEQ ID NO: 17378 - DNA, 307 bp, Homo sapiens
  source 1..307: mol_type = other DNA
tgaagcctctggattcactttaggtgcccattggatgagttgggtccgccaggctccaggaaaggggctggagtgggtggccaccataaagcaagatggaagtgtgaaatactatgtggactctgtgaagggccgattcaccatctccagagacaacgccaagaactcactgtatctgaaaatgaacagcctgagagccgaggacacggctctgtattactgtgcgaggaaaatgtattactatgacactggtgatttaggctggttcgacccctggggccagggactcctggtcaacgtctcctca

SEQ ID NO: 17379 - DNA, 307 bp, Homo sapiens
  source 1..307: mol_type = other DNA
tgtagcctctggattcacctttagtaactattggatgagctgggtccgccaggttccagggaaggggccggagtgggtggccaacataaaccaagatggaagtaaaaaatactatgtggactctgtgaagggccgattcatcatctccagagacaacgccaagaactcactgtatctgcaaatgaacaacctgggagccgaggacacggctgtgtattactgtgcgagaaagatgtattattatgatactggtgatttgggctggttcgacccctggggccagggcaccctggtcaacgtctcctca

SEQ ID NO: 17380 - DNA, 277 bp, Homo sapiens
  source 1..277: mol_type = other DNA
tgcagcctctggattcacctttagcacctatggcatgagctgggtccgccaggctccagggaaggggctggagtgggtctcaacagttgtgagtggtggtcgtacatactacgcagactccgtgaagggccgcttcaccatctccagagacaattcccagaacacgctgtttctgcaaatgaacagcctgagagccgaggacacggccgtatattactgtgcgactcggggggcctttgatttctggggccaagggacaatggtcaccgtctcttca

SEQ ID NO: 17381 - DNA, 280 bp, Homo sapiens
  source 1..280: mol_type = other DNA
tacagtctctggattcacctttaccgcctatgccatgaactgggtccgccaggctccagggaaggggctggagtgggtctcagctattgttggtagtggtggtgccacatactacgcagactccgtgaagggccggttcaccatttccagagacacttccaagaacacgctctttctgcaaatggacagcctgagagtcgaggacacggccgtatattactgtgcgacccggggtgcttttgatttctggggccaggggacaatggtcaccgtctcttcg

SEQ ID NO: 17382 - DNA, 289 bp, Homo sapiens
  source 1..289: mol_type = other DNA
cactgtctctggtggctccatcagtagttacttctgtagctggatccggcagcccccagggaagggactggagtggattgggtatatctattacggtgggggtaccaactacaactcctccctcaggagtcgagtcaccatatcagtagacacgtccaagaagcagttctccctgaagctgagctctgtgaccgctgcggacacggccgtgtattactgtgcgggagggtatagcagcagctggtactttgactactggggccagggaaccctggtcaccgtctcctca

SEQ ID NO: 17383 - DNA, 289 bp, Homo sapiens
  source 1..289: mol_type = other DNA
cactgtctctggtggctccatcagtagttactactggagctggatccggcagcccccagggaagggactggagtggattgggtatatctattacagtgggagcaccaattacaacccctccctcaagagtcgagtcaccatatcagtagacacgtccaagaaccagttctccctgaagctgagctctgtgcccgccgcagacacggccgtgtattactgtgcggggggatatagcagcagctggtattttgactactggggccagggaaccctggtcaccgtctcctca

SEQ ID NO: 17384 - DNA, 289 bp, Homo sapiens
  source 1..289: mol_type = other DNA
cactgtctctggtgactccatcagtaattattactggagctggatccggcagcccccggggaagggaccggagtgcattggatatatctattacagtgggaacaccaactacaacccctccctcaagagtcgagtcactatatcaatagacgcgtccaagaaccagttctccctgaagctgaactctgtgaccgctgcggacacggccctatattactgtgcgggcgggtatagtagcagctggtactttgactattggggccagggaactctggtcaccgtctcctca

SEQ ID NO: 17385 - DNA, 307 bp, Homo sapiens
  source 1..307: mol_type = other DNA
cactctctctggtggctccgtcagtagttactcctggagctggatccggcagcccccagggaagggactggagtggattggatttatctattacagtgggcgcaccaactacaacccctccctcaagagtcgagtcaccatgtcagtagacacgtccgagaaccagttctccctgaagttgagctctgtgaccgctgcggacacggccatatattactgtgcgagagatacatattgtagtggtggtacctgctttgactggtacttcgatctctggggccgtggcaccctggtcactgtctcctca

SEQ ID NO: 17386 - DNA, 307 bp, Homo sapiens
  source 1..307: mol_type = other DNA
cactgtctctggtggctccgtcagtagttactcctggagctggatccggcagtccccagggaagggactggagtggattggatttatctattacagtgggcgcaccaactacaacccctccctcaagagtcgagtcaccatgtcagtagacacgtccgagaaccagttctccctgaagctgagctctgtgaccgctgcggacacggccgtatattactgtgcgagagatacatattgtagtggtggtacttgttttgactggtacttcgatctctggggccgtggcaccctggtcactgtctcctca

SEQ ID NO: 17387 - DNA, 307 bp, Homo sapiens
  source 1..307: mol_type = other DNA
cactgtctctggtggctccatcaatagttactcgtggagttggctccggcagtccccagggaagggactagagtggattgggttcatcttttacagtgggagaaccaactacaatccctccctcaagagtcgagtcaccatatcagttgacacgtccgagaaccggttctccctgaacctgaggtctgtgaccgctgcggacacggccatttattactgtgcgagagatacatactgcagtggcggtacctgcttcgactggtacttcgatctctggggccgtggcaccctggtcactgtctcctca

SEQ ID NO: 17388 - DNA, 307 bp, Homo sapiens
  source 1..307: mol_type = other DNA
cactgtctctggtggctccatcaatagttactcgtggagttggctccggcagtccccagggaagggactagagtggattgggtttatcttttacagtgggagaaccaactacaatccctccctcaggagtcgagtcaccatatcagttgacacgtccgagaaccggttctccctgaacctgaggtctgtgaccgctgcggacacggccatttattactgtgcgagagatacatactgtagtggcggtacctgcttcgactggtacttcgatctctggggccgtggcaccctggtcactgtctcctca

SEQ ID NO: 17389 - DNA, 274 bp, Homo sapiens
  source 1..274: mol_type = other DNA
ttcagcctctggattcatctttagtcactcttggatgagctgggtccgccaggctccagggaaggggctggagtgggtggcccacataaatcaagatgggagtcaccaatactatgtggactctgtgaagggccgattcaccatctccagagacaacgccaagaactcactgattctgcaaatgaatagcctgacagccgaggacatggctatatattactgtacgtcaggcacggagtcctggggccagggaaccccggtcaccgtctcctca

SEQ ID NO: 17390 - DNA, 274 bp, Homo sapiens
  source 1..274: mol_type = other DNA
tgaagcctctggaatcaccctcactagttcttggatgagttgggtccgccaggctccaggaaggggactggagtgggtggcccacatgaaaccagatggaagttcgacatactatgtggactctgtgaagggccgattcaccatctccaaagaccacaccaagaactcactgtatctgcagatggccagcctcagagtcgacgatacggctgtttattactgtacgagtgggaccgaatcctggggccggggaaccctggtcaccgtctcctca

SEQ ID NO: 17391 - DNA, 277 bp, Homo sapiens
  source 1..277: mol_type = other DNA
tacagcctctggattcacctttagtagttattggatgacgtgggtccgccaggctccagggaaggggctggagtgggtggccaacataaacgaagatggaagttcggagtactatctggactctctgaggggccgcttcaccatctccagagacaacgccaagaactcactacatctgcaaatgaacagcctgagagacgaggacaccgctctgtattactgtgcgagtaaacaaggtgactactggggccagggaaccctggtcaccgtctcctca

SEQ ID NO: 17392 - DNA, 277 bp, Homo sapiens
  source 1..277: mol_type = other DNA
tgtagcctctggattcacctttagttcctattggatgagctgggtccgccagactcctgggaaggggctggagtgggtggccaacataaatcaagatggaagtgggaaatactatgtggactctgtgaagggccgattcaccatctccagagacaacgccaagaactcactgtatctgcaaatgaatagcctgagagccgaggacacggctctttattactgtgcgagcaaacaaggtgactactggggccagggaaccctggtcaccgtctcctca

SEQ ID NO: 17393 - DNA, 289 bp, Homo sapiens
  source 1..289: mol_type = other DNA
tacaacttctggattcaccttcagtgattatgctatgagttggttccgccaggctccagggaagagactggagtgggtaggttttattcaaagcaaaacttctgatgaggcaacagagtacgccgcgtctgtgaaaggcagattcgtcatttcaagagatgcttccaaaaggatcgcctatctgcaaatgaacagcctgaaaaccgaggacacagccgtatactactgtgctcggggaaggtaccaatttgacttctggggccagggatccctggtcactgtctcctcc

SEQ ID NO: 17394 - DNA, 289 bp, Homo sapiens
  source 1..289: mol_type = other DNA
tacagtttctggattcgccattggtgattatgttatgagctggttccgccaggctccagggaaggggcttgagtgggtaggtctcattacaaacaaaccccatggtgagacaacagcgtacgccgcgtctgtgaaaggcagattcaccatctcaagagatgattcgaaaagcatggcctatctgcagatgaacagcctgaaaaccgaggacactgccgtgtattactgtgctagggggcgctaccagtttgacttctggggccggggagccctggtcaccgtctcctca

SEQ ID NO: 17395 - DNA, 289 bp, Homo sapiens
  source 1..289: mol_type = other DNA
tacagtttctggattcgcctttggtgattatgttatgagctggttccgccaggctccagggaaggggcttgagtgggtaggtctcattacaaacaaaccccatggtgagacaacagcgtacgccgcgtctgtgaaaggcagattcaccatctcaagagatgattcgaaaagcatggcctatctgcagatgaacagcctgaaaaccgaggacactgccgtgtattactgtgctagggggcgctaccagtttgacttctggggccggggagccctggtcaccgtctcctca

SEQ ID NO: 17396 - DNA, 291 bp, Homo sapiens
  source 1..291: mol_type = other DNA
gcttctggatacaccttcattaactttgctatgaattgggtgcgacaggcccctggacaaggccttgagtggatggggtggatcaacaccaacactgggaacccaacgtatgcccagggcttcactggacggtttgtcttctccttggacacctctgtcagcacggcatatctgcagatcagcagcctaaaggctgaggacactgccgtgtattactgtgcgagagagtcgggcgaagagatggctacaattgactactggggccagggaacccaggtcaccgtctcctcc

SEQ ID NO: 17397 - DNA, 291 bp, Homo sapiens
  source 1..291: mol_type = other DNA
gctgttggatacaccttcagtacgtttggtatgaattgggtacgacaggcccctggacaaggccttgagtggatgggatggatcaacaccaacactgggaacccaacgtatgcccagggcttcacaggacggtttgtcttctccttggacacctctgtcagcacggcatatctgcagatcagcaacctaaaggctgaggacactgccgtgtattactgtgcgagagaaagtggggaagagatggctacaattgactactggggccagggaaccctggtcaccgtctcctca

SEQ ID NO: 17398 - DNA, 289 bp, Homo sapiens
  source 1..289: mol_type = other DNA
cactgtctctggtggctccatcagcagcagaagttactactggggctggatccgccagcccccagggaaggggctggagtggattgggagtatttattatagtgggagcacctactacaacccgtccctcaagagtcgagtcaccatatccgtagacacgtccaagaaccagttctccctgaaactgagctctgtgaccgccgcagacacggctgtgtattactgtgcgaggctcataacaactcgtccggactactggggccagggaaccctggtcaccgtctcctca

SEQ ID NO: 17399 - DNA, 289 bp, Homo sapiens
  source 1..289: mol_type = other DNA
cactgtctctggtggctccatcagcagtagtagttattactggggctggatccgccagcccccagggaaggggctggagtggattgggagtatctattatagtgggaccacctactacaacccgtccctcaagagtcgagtcaccatgtccgtagacacgtccaagaactacttctccctgaagctgacctctgtgaccgccacagacacggctgtgtattactgtgcgagacttataacaactcgtccagactactggggccagggaaccctggtcaccgtctcctca

SEQ ID NO: 17400 - DNA, 274 bp, Homo sapiens
  source 1..274: mol_type = other DNA
tgtaggatctggattcaccttcggtagctatagcatgaactgggtccgccaggctccggggaaggggctggagtgggtttcatacattagtagtagtagtagtaccatatactacgcagactctgtgaagggccgattcaccatctccagagacaatgccaagaactcactgtatctgcaaatgaacagcctgagagacgaggacacggctgtgtattactgtgcgaggaagggcgatctctggggccgtggcaccctggtcactgtctcctca

SEQ ID NO: 17401 - DNA, 274 bp, Homo sapiens
  source 1..274: mol_type = other DNA
tgcagcctctggattcaccttaagtagttatagcatgaactgggtccgccaggctccagggaaggggctggagtgggtttcatacattagtagtagtagtagtaccatatactacgcagactctgtgaagggccgattcaccatctccagagacaatgccaagaactcactgtatctgcaaatgaacagcctgagagacgaggacacggctgtgtattattgtgcgaggaagggggatctctggggccgtggcaccctggtcactgtctcctca

SEQ ID NO: 17402 - DNA, 274 bp, Homo sapiens
  source 1..274: mol_type = other DNA
tgcagcctctggattcaccttaagtacttttagcatgaactgggtccgccaggctccagggaaggggctggagtgggtttcatacattagtagtagtggtagtaccatatactacgcagactctgtgaagggccgattcaccatctccagagacaatgccaggaactcactgtatctgcaaatgaacagcctgagagacgaggacacggctgtatattattgtgcgaggaagggggatctctggggccgtggcaccctggtcactgtctcctca

SEQ ID NO: 17403 - DNA, 274 bp, Homo sapiens
  source 1..274: mol_type = other DNA
tgcagcctctggattcaccttaagtacttttagcatgaactgggtccgccaggctccagggaaggggctggagtgggtttcatacattagtagtagtggtagtaccatatactacgcagactctgtgaagggccgattcaccatctccagagacaatgccaggaactcactgtatctgcaaatgaacagcctgagagacgaggacacggctgtgtattattgtgcgaggaagggggatctctggggccgtggcaccctggtcactgtctcctca

SEQ ID NO: 17404 - DNA, 274 bp, Homo sapiens
  source 1..274: mol_type = other DNA
tgcagcctctggattcaccttaagtagttatagcatgaactgggtccgccaggctccagggaaggggctggagtggatttcatacattagtagtagtagtagtaccatatactacgcagactctgtgaagggccgattcaccatctccagagacagtgccaagaactcactgtatcttcaaatgaacaacctgagagacgaggacacggctgtgtattattgtgcgaggaagggggatctctggggccgtggcaccctggtcactgtctcctca

SEQ ID NO: 17405 - DNA, 274 bp, Homo sapiens
  source 1..274: mol_type = other DNA
tgcagcctctggattcaccttaaatagttatagcatgaactgggtccgccaggctccagggaaggggctggagtgggtttcatacattagtagtagtggtagtaccatatactacgcagactctgtgaagggccgattcaccatctccagagacaatgccaagaactcactgtatctgcaaatgaacagcctgagagacgaggacacggctgtatattattgtgcgaggaagggggatctctggggccgtggcaccctggtcactgtctcctca

SEQ ID NO: 17406 - DNA, 280 bp, Homo sapiens
  source 1..280: mol_type = other DNA
tgcagcctctggattcacctttagtagtttttggatgacctgggtccgccaggctccggggaaggggctggagtgggtggccaacataaagcgagatggaagtgagaaatactatgtggactctgtgaagggccgattcaccatctccagagacaacgccaagaactctctgtatctgcaaatgaacagcctgagagtcgaggacacggctctatattactgtgcgagggctcgtggtgcggaatactggggtcagggaaccctggtcaccgtctcctca

SEQ ID NO: 17407 - DNA, 280 bp, Homo sapiens
  source 1..280: mol_type = other DNA
tgcagcctctggattcacctatagtaacttttggatgacctgggtccgccaggctccagggaaggggctggagtgggtggccaacataaagcaagatggaagtgagaagtactatgtggactctgtgaagggccgattcaccatctccagagacaacgccaagaactcactgtatctgcaaatgaacagcctgagagccgaggacacggctgtatattactgtgcgagagcccggggcgctgagtactggggccagggaaccctggtcaccgtctcctca

SEQ ID NO: 17408 - DNA, 307 bp, Homo sapiens
  source 1..307: mol_type = other DNA
cactgtctctggtggcgccatcagtggttactactggagctggatccggcagcccccagggaagggactggagtggattgggtatgtctattacagtgggagcaccaactacaacccctccctcaagagtcgagtcaccatgtcagtagacacgtccaagaaccagttctccctgaagatgaactctgtgaccgctgcggacacggccgtgtattactgtgcgagagatcggtattgttctggtggtacctgctttgactggtacttcgatctctggggccgcggcaccctggtcactgtctcctca

SEQ ID NO: 17409 - DNA, 307 bp, Homo sapiens
  source 1..307: mol_type = other DNA
cactgtctctggtggcgccatcagtggttactactggagctggatccggcagcccccagggaagggactggagtggattgggtatatctattacagtgggaacaccaactacaacccctccctcaagagtcgagtcaccatgtcagtagacacgtccaagaatcagttctccctgaagatgaactctgtgaccgctgcggacacggccgtatattactgtgcgagagatcggtattgttctggtggtacctgctttgactggtacttcgatctctggggccgcggcaccctggtcactgtctcctca

SEQ ID NO: 17410 - DNA, 307 bp, Homo sapiens
  source 1..307: mol_type = other DNA
cactgtgtctggtggctccatcagtggttactcctggagctgggtccggcagtccccagggaagggactggaatggattggatttatctattacagtgggagaaccaactacaacccctccctcaagagtcgagtcaccatgtcagcagacacgtccaataaccagttctccctgaagctgacgtctgtgaccgctgcggacacggccgtgtattactgtgcgcgagatagatattgtagtggtggtacctgcttcgactggtacttcgatctctggggccgtggcaccctagtcactgtctcttca

SEQ ID NO: 17411 - DNA, 307 bp, Homo sapiens
  source 1..307: mol_type = other DNA
cactgtgtctggtggctccatcagtggttactcctggagctgggtccgacagtccccaggaaagggactggaatggattggatttatctattacagtggaagaaccaactacaacccctccctcaagagtcgagtcaccatgtcagcagacacgtccaataaccagttctccctgaagctgacgtctgtgaccgctgcggacacggccgtatattactgtgcgcgagatagatattgtagtggtggtacctgcttcgactggtacttcgatctctggggccgtggcaccctagtcactgtctcttca

SEQ ID NO: 17412 - DNA, 288 bp, Homo sapiens
  source 1..288: mol_type = other DNA
acttctggatacaccttcggcagttatgacatcaactgggtgcgacaggcccctggacaggggcctgagtggatgggatggatgaatcccgacagtggtaacacaggctacgcactgcccttccagggcagactcaccatgaccagggacacctccatagccacagcctacatggagctgagcagcctggaatctgctgacacggccgtgtactattgtacgcgagcggtgaggcaccaactcctctcggactactggggccagggaaccctggtcaccgtctcctca

SEQ ID NO: 17413 - DNA, 288 bp, Homo sapiens
  source 1..288: mol_type = other DNA
gcttctggatacaccttcatcacttatgatatcacttgggtgcgacaggccactggacaagggcttgagtggatgggatggatgaacccttacagtggtgacactggctatgcacagaagttccagggcagagtcaccatgaccaggaacacctccataagcacagcctacatggagctggtcagcctgagacatgcggacacggccgtgtattactgtacgagagccgtgaggcaccagctgctatcggactactggggccagggaactctggtcaccgtctccgca

SEQ ID NO: 17414 - DNA, 289 bp, Homo sapiens
  source 1..289: mol_type = other DNA
tgcagcctctggattcacctttaccaaatatgtcataaactgggtccgccgggccccagggaagggcctggagtgggtctcagatatcaatggtagtggtgatgacacaaactacgcagactccgtgaagggccggttcaccatctccagagacaattccaagaacacagtatatttgcaaatgaacagcctgagagccgacgacacggccgtatattattgtgtgaaaggaggatggggttcggtagttgattactggggccaggggacccgggtcaccgtctcctca

SEQ ID NO: 17415 - DNA, 289 bp, Homo sapiens; identical to SEQ ID NO: 17414
  source 1..289: mol_type = other DNA

SEQ ID NO: 17416 - DNA, 289 bp, Homo sapiens
  source 1..289: mol_type = other DNA
tgcagcctctggattcacctttaccaaatatgtcataagctgggtccgccgggccccagggaagggcctggagtgggtctcagatatcaatggtagtggtgatgacacaaactacgcagactccgtgaagggccggttcaccatctccagagacaattccaagaacacagtatatttgcaaatgaacagcctgagagccgacgacacggccgtatattattgtgtgaaaggaggatggggttcggtagttgattactggggccaggggacccgggtcaccgtctcctca

SEQ ID NO: 17417 - DNA, 289 bp, Homo sapiens
  source 1..289: mol_type = other DNA
tgcagcctctggattcacctttaccaaatatgtcataaactgggtccgccgggccccagggaagggcctggagtgggtctcagatatcaatggtagtggtgatgacacaaactacgcagactccgtgaaggaccggttcaccatctccagagacaattccaagaacacagtatatttgcaaatgaacagcctgagagccgacgacacggccgtatattattgtgtgaaaggaggatggggttcggtagttgattactggggccaggggacccgggtcaccgtctcctca

SEQ ID NO: 17418 - DNA, 287 bp, Homo sapiens
  source 1..287: mol_type = other DNA
cagcctctggattcacctttaccaaatatgtcataaactgggtccgccgggccccagggaagggcctggagtgggtctcagatatcaatggtagtggtgatgacacaaactacgcagactccgtgaagggccggttcaccatctccagagacaattccaagaacacagtatatttgcaaatgaacagcctgagagccgacgacacggccgtatattattgtgtgaaaggaggatggggttcggtagttgattactggggccaggggacccgggtcaccgtctcctca

SEQ ID NO: 17419 - DNA, 289 bp, Homo sapiens
  source 1..289: mol_type = other DNA
tgcagcctctggattcacctttaccaaatatgtcataaactgggtccgccgggccccagggaagggcctggagtgggtctcagatatcaatggtagtggtgatgacacaaactacgcagactccatgaagggccggttcaccatctccagagacaattccaagaacacagtatatttgcaaatgaacagcctgagagccgacgacacggccgtatattattgtgtgaaaggaggatggggttcggtagttgattactggggccaggggacccgggtcaccgtctcctca

SEQ ID NO: 17420 - DNA, 289 bp, Homo sapiens
  source 1..289: mol_type = other DNA
tgcagtctctggattcacctttagcagctatgccatgagctgggtccgccaggctccagggaaggggctggagtgggtctcagctatttatagcggtggtactggcacatactatgcagactctgtgaagggccggttcaccatctccagagataattccaagaacacggtgtatctgcaaatgaacagcctgagagccgaggacacggccttatattactgtgtgaaaggtggctggggttcggtggttgactactggggccagggaaccctggtcaccgtctcctca

SEQ ID NO: 17421 - DNA, 280 bp, Homo sapiens
  source 1..280: mol_type = other DNA
tgcagcctctggattcaccttcagtacttatgaaatgaactgggtccgccaggctccagggaaggggctggagtgggtatcatatattagttatagtggaagtctcatatactacgcagactctgtgaagggccgattcaccatctccagagacaacgccaagaactcactgtatctgcaaatgaacagcctgagagccgaggacacggctgtttattactgtgcgagagacgcgtattctgattactggggccagggaaccctggtcaccgtctcctca

SEQ ID NO: 17422 - DNA, 280 bp, Homo sapiens
  source 1..280: mol_type = other DNA
tgcagcctctgggttcagcttcagtacttatgagatgaactgggtccgccaggctccagggaaggggctggagtgggtttcacacattagttacagtggtattaccatactctacgcagactctgtgaagggccgattcaccatctccagagacaacgccaagaactcactgtatttgcaaatgaacagcctgagagccgaggacacggctgtttattactgtgcgagagatgcctacagtgactactggggccagggaaccctggtcaccgtctcctca

SEQ ID NO: 17423 - DNA, 297 bp, Homo sapiens
  source 1..297: mol_type = other DNA
aagggttctggatacagttttagcacgtactggatcgcctgggtgcgccagatgcccgggaagggcctggagtggatggggatcatctatcctggtgactctgatgccagatacagcccggccttcaaaggccaggtcaccttctcagccgacaagtccatcagcaccgcctatctgcagtggagcagcctgaaggcctcggacagcgccatttattactgcgcgagaggggatagacctatgatctacttcggtatggacgtctggggccaagggaccgcggtcaccgtctcctca

SEQ ID NO: 17424 - DNA, 297 bp, Homo sapiens
  source 1..297: mol_type = other DNA
aagggttctggatacagttttaccacgtactggatcgcatgggtgcgccagatgcccgggaagggcctggagtggatggggatcatctatcctggtgactctgatgccagatacagcccggccttcaaaggccaggtcaccttctcagccgacaagtccatcagtaccgcctacctgcagtggagcagcctgaaggccacggacaccgccatttattactgcgcgagaggggatagacctatgatctacttcggtatggacgtctggggccaagggactgcggtcaccgtctcctca

SEQ ID NO: 17425 - DNA, 297 bp, Homo sapiens; identical to SEQ ID NO: 17423
  source 1..297: mol_type = other DNA

SEQ ID NO: 17426 - DNA, 297 bp, Homo sapiens; identical to SEQ ID NO: 17424
  source 1..297: mol_type = other DNA

SEQ ID NO: 17427 - DNA, 297 bp, Homo sapiens
  source 1..297: mol_type = other DNA
aagggttctggatacatctttaccacctattggatcgcctgggtgcgccagatgcccgacaaaggcctggagtggatggggatcatctatcctggtgactctgataccagatatagtccgtccttccgaggcctggtcaccatgtcagtcgacaagtccgtcaacaccacctacctgcagtggagcagcctgagggcctcggacaccgccacatattattgtgcgaggggggatagaccaatgatctacttcggtatggacgtctggggccaagggaccacggtcaccgtctcctca

SEQ ID NO: 17428 - DNA, 279 bp, Homo sapiens
  source 1..279: mol_type = other DNA
gcgtctggatacaccttcaccactttagatatcaactgggtgcgacaggccactggacaagggcttgagtggatgggatggatgaaccctaacagtggtttctcaggcactgcacagaagttccagggcagagtcaccatgaccaagatcacctccataagcacagcctacatggagttgagcggcctgacatctgaggacaccgccgtatattactgtgcgagagctcgtggggacttagactactggggccagggaaccctggtcaccgtctcctca

SEQ ID NO: 17429 - DNA, 279 bp, Homo sapiens
  source 1..279: mol_type = other DNA
gcttctggatacaccttcatcagttatgagatcaactgggtgcgacaggccactggacaagggcttgagtggatgggatggatgaaccctaacagtggtaacacaggctatgcacagaagttccagggcagagtcaccatgaccaggaacacctccataagcacagcctacatggagctgagcagcctgagatctgacgacacggccgtgtattactgtgcgagagctagaggtgatcttgactactggggccagggaaccctggtcaccgtctcccca

SEQ ID NO: 17430 - DNA, 286 bp, Homo sapiens
  source 1..286: mol_type = other DNA
cgctgtcaatggtgggtccttcagtggttactactggagctggatccgccagcccccagggaaggggctggagtggattggagaaatcattcatagtggaagcgccaactacaacccgtccctcaagagtcgagtcaccatctcagtagacacgtccaagaaccagttctccctgaagctgagctctgtgaccgccgcggacacggctgtgtattactgtgcgagaatctacgatccccgggggttcgacccctggggccagggaaccctggtcatcgtctcctca

SEQ ID NO: 17431 - DNA, 286 bp, Homo sapiens
  source 1..286: mol_type = other DNA
cgctgtctatagtgggtccttcagtgattactactggagctggatccgccagcccccagggaaggggctggagtggattggggaaatcattcatagtggaaccaccaactacaacccgtccctcaagagtcgagtcaccatatcagtagacacgtccaagaaccagttctccctgaaactgaactctctgaccgccgcggacacggctgtgtattactgtgcgagaatctatgatcccagagggttcgacccctggggccagggaaccctggtcaccgtctcctca

SEQ ID NO: 17432 - DNA, 292 bp, Homo sapiens
  source 1..292: mol_type = other DNA
ttcagcctctggattcacctttagtagttattggatgagttgggtccgccaggctccagggaaggggctggagtgggtggccaatattaagcaagatggtagtgagaaatattatgcggacggtgtgaagggccgattcaccatctccagagacaacgccaagaactcactgtatctgcaaatgaacagccttagagccgaggacacggcagtgtattactgtgcgagagcgggaacaacgacttgggttcaagacttctggggccagggaaccctggtcaccgtttcctca

SEQ ID NO: 17433 - DNA, 292 bp, Homo sapiens
  source 1..292: mol_type = other DNA
ttcagcctctggattcaccttcagtggtcattggatgagttgggtccgccaggctccagggcagggcctggagtgggtggccaacatcaagcaagatggcagtgagaaatattatctggatgctgtgaagggccgattcaccatctccagagacaacgccaagaactcactatatctgcaaatgaacagcctgagagtcgaggacacggctttttattactgtgcgagagcgggaactacgacttgggttcaagacttctggggccagggaaccctggtcaccgtttcctca

SEQ ID NO: 17434 - DNA, 292 bp, Homo sapiens
  source 1..292: mol_type = other DNA
tgcagcctctggattcacctttactacctattggatgagctgggtccgccaggctccagggaaggggctggagtgggtggccaacataagacaagatgggagtgagaaataccatgtggactctgtgaagggccgattcaccatctccagagacaactccaagaactcactatatctgcaaatgaacttcctgagagtcgaggacacggctgtctattactgtgcgcgggctgggactacgacatgggtacaagacttctggggccggggaaccctggtcaccgtctcttca

SEQ ID NO: 17435 - DNA, 274 bp, Homo sapiens
  source 1..274: mol_type = other DNA
tgcagcctctggattcagcttcagcagttttgaaatgaattgggtccgccagcctccagggaaggggctggagagcatttcacacattagtagtggatttaccatatactacgcagaatctgtgaagggccgattcaccatctccagagacaacgccaagaactcactgtatctgcaaatgaacagcctgagagccgaggacacggctgtttattactgtgtgagggggtggggggcccactggggccagggaaccctggtcaccgtctcctca

SEQ ID NO: 17436 - DNA, 277 bp, Homo sapiens
  source 1..277: mol_type = other DNA
tgcaacctctggattcaccttcagtgttgatgaaatgagctgggtccgccaggctccagggaaggggctggagtgggtttcatttattagtagtggtggtggatctatatattacgcggactatgtggagggccgattcaccatctccagagataacgccaagaagtcactgtatctgcaaatgaacagcctgacaaacgaggacacgggtctttattattgtgtgagagggtggggtgcccactggggccagggagccctggtcaccgtctcctca

SEQ ID NO: 17437 - DNA, 283 bp, Homo sapiens
  source 1..283: mol_type = other DNA
tgcagcctctgggttcgccgtcagtagcaactacatgagctgggtccgccaggctccagggaaggggctggagtgggtctcagttatttatagcgatgctagcacatactacgcagactccgtgaagggccgattcaccatctccagacacacttccaagaacacgctgtatcttcagatgaacagcctgagacctgaggacacggccgtgtattactgtgcgagagtagtatcagatgcttttgatgtctggggccaagggacaatggtcaccgtctcttca

SEQ ID NO: 17438 - DNA, 283 bp, Homo sapiens
  source 1..283: mol_type = other DNA
tgcagcctctgggttcaacgtcggcagcaactacatgagctgggtccgccaggctccagggaaggggctggagtgggtctcagttatttatagcggtggtagtacacactacgcagactccgtgaagggccgattcaccatctccggagacaattccaagaacactctgtatcttcaaatgaacagcctgagggtcgaggacacggccgtctattactgtgcacgagtggtctcagatgcttttgatgtctggggccaagggacaatggtcaccgtctcctca

SEQ ID NO: 17439 - DNA, 304 bp, Homo sapiens
  source 1..304: mol_type = other DNA
cactgtctctggcgggtccatcagcgtaggtggttacttctggagctgggtccgccagcacccaggggagggcctggagtggattgggtacatctcttacagtgggagcacctactacaacccgtccctcgagagtcgagtttccatttcagtagacacgtctaagaaccagttctccctgaaactgacctctgtgactgccgcggacacggccgtgtattactgtgcgagagatcgcggtggcagggaggactactactacatggacgtctggggcaaagggaccacggtcaccgtctcctca

SEQ ID NO: 17440 - DNA, 304 bp, Homo sapiens
  source 1..304: mol_type = other DNA
cactgtctctggtggctccctcaacagtggtggttactactggagctgggtccggcagctcccagggaggggcctggagtggattgggaacatctattacagtgggagcaccaactacaacccgtccctcaagagtcgagttaccatatcagtagacacgtctaagagccagttctccctgaggctgagctctgtgactgccgcggacacggccatctattattgtgcgagagatcggggaggccgagaagactactactacatggacgtctggggcaaagggaccacggtcgccgtctcctca

SEQ ID NO: 17441 - DNA, 304 bp, Homo sapiens
  source 1..304: mol_type = other DNA
cactgtctctggtggctccctcaacaatggtggttactactggagctgggtccggcagctcccagggaggggcctggagtggattgggaacatctattacagtgggagcaccaactacaacccgtccctcaagagtcgagttaccatatcagtagacacgtctaagagccagttctccctgaggctgagctctgtgactgccgcggacacggccatctattattgtgcgagagatcggggaggccgagaagactactactacatggacgtctggggcaaagggaccacggtcgccgtctcctca

SEQ ID NO: 17442 - DNA, 274 bp, Homo sapiens
  source 1..274: mol_type = other DNA
tgcagcctctggattcacctttagtaacaattggatgagctgggtccgccaggctccagggaaggggctggagtgggtggccaacgtaaatcaagatggcagtgagaaaaactatgtggactctgtgaagggccggttcaccatctccagagacaacgccaagaactcactgtatctgcaaatgaacagcctgagagtcgaggacacggctgtgtattactgtgccactgacttggcctactggggccagggaaccctggtcaccgtctcctca

SEQ ID NO: 17443 - DNA, 274 bp, Homo sapiens
  source 1..274: mol_type = other DNA
tgcagcctctggattcacctttagtgcatattggatggcctgggtccgccaggctccagggaaggggctggagtgggtggccaacataaagcaagatggaagtgagaaatactatgtggactctgtgaagggccgattcaccatctccagagacaacgccaagaagtcactgtatctgcaaatgaacagcctgagagtcgaggacacggccgtctattactgtgcgacagatttggcttactggggccagggaaccctggtcaccgtctcctca

SEQ ID NO: 17444 - DNA, 285 bp, Homo sapiens
  source 1..285: mol_type = other DNA
gcatctggatacaccttcaaaacctactatatacactgggtgcgacaggcccctggacaagggcttgagtggatgggaataatcaaccctagtggtggtagcacaagcttcgcacagaagttccagggcggaatcaccatgaccagggacacgtccacgaatacagtctacatggagctgagcagcctgagatctgaggacacggccctctattattgtgcgagagcggggatcttaagtgcttctgactactggggccagggagccctggtcaccgtctcctca

SEQ ID NO: 17445 - DNA, 285 bp, Homo sapiens
  source 1..285: mol_type = other DNA
gcatctggatacaccttcaaaacctactatatacactgggtgcgacaggcccctggacaagggcttgagtggatgggaataatcaaccctagtggtggtagcacaagcttcgcacagaagttccagggcagaatcaccatgaccagggacacgtccacgaatacagtctacatggagctgagcagcctgagatctgaggacacggccctctattattgtgcgagagcggggatcttaagtgcttctgactactggggccagggagccctggtcaccgtctcctca

SEQ ID NO: 17446 - DNA, 316 bp, Homo sapiens
  source 1..316: mol_type = other DNA
tgcagcctctggattcaccttcagtgactactatatggactgggtccgccaggctccagggaaggggctggagtgggttggccgtagaagaaacaaagttaacagttacaggacagaatacgccgcgtctgtgaaaggcagattcaccatctcaagagatgattcaaacaacttattgtatctgcaaatgaacagcctgaaaaccgaggacacggccgtgtactactgtgctagagatgtaagagcagtgcctggaaactacttctactccggtctggacgtctggggccaggggaccacggtcatcgtctcctca

SEQ ID NO: 17447 - DNA, 316 bp, Homo sapiens
  source 1..316: mol_type = other DNA
tgcagcctctggattcaccttcagtgaccactacatggactgggtccgccaggctccagggaaggggctggagtgggttggccgtgctagaaacaaagctgacagttacaccacagaatacgccgcgtctgtgaaaggcagattcaccatctcaagagatgattcaaagaactcactgtatctgcaaatgaacagcctgaaaaccgaggacacggccgtgtattactgtgctagagatgtcagagcagtgcctggtaactacttctactccggtttggacgtctggggccaagggaccacggtcaccgtctcctca

SEQ ID NO: 17448 - DNA, 295 bp, Homo sapiens
  source 1..295: mol_type = other DNA
tgcagcctctggattcacctttagcaactatgtcatgagctgggtccgccaggctccagggaaggggctggagtgggtctcaactattggtggtggtggtggcaccacatactacgcagactccgtgaagggccggttcaccatctccagagacaattccaagaacacactgtatctgcaaatgaacagcctgagagccgaggacacggccgtatattactgtgcgaatcggggacttcggggagctgggggtatggacgtctggggccaagggaccacggtcaccgtctcctca

SEQ ID NO: 17449 - DNA, 295 bp, Homo sapiens
  source 1..295: mol_type = other DNA
tgcagcctctggattcgcctttagcaactctggcatgagttgggtccgccaggctccagggaaggggctggagtgggtctcaacttttagtggtcgtggtggtaacacatactacgcagactccgtgaagggccggttcaccatctccagagacaattccaagagcacactatatctacaaatgaacagcctgagagccgaggacacggccgtatattactgtgcgaaccgggggcttcggggagcgggtggtatggacgtctgggggcaagggaccacggtcaccgtctcctca

SEQ ID NO: 17450 - DNA, 293 bp, Homo sapiens
  source 1..293: mol_type = other DNA
ccatctccggggacaatgtctttagtaaatctattgcttggaattggatcaggcagtccccatcgagaggcctagagtggctgggaaggacatactacgactccaagtggtttaatgattatgcagtgtcttttaaaagtcgaatgaccatcaacctggacacatccaacaaccacctctccctgcagttgaactccgtggctcccgaggacacggctgtgtacttctgtgcaagagggcacaattcggcatttgactactggggccagggaatcctggtcaccgtctcctca

SEQ ID NO: 17451 - DNA, 293 bp, Homo sapiens
  source 1..293: mol_type = other DNA
ccatctccggggacagtatgtctcgcatggatgttgcttggaactggatcaggcagtccccatcgagaggccttgagtggctgggaaggacatactacaggtccaagtggtataatgattatgcagagtctgtgaaaagtcgcataagtatcaccccagacacatccaagagtcagttctccctgcaactgaactctgtgactcccgaggaaacggctgtatactactgtgcaagaggccataattcggcctttgactactggggccagggaaccctggtcagcgtctcctca

SEQ ID NO: 17452 - DNA, 291 bp, Homo sapiens
  source 1..291: mol_type = other DNA
gcttctggttacacctttaccagctatggtatcaactgggtgcgacaggcccctggacaagggcttgagtggatgggatggatcagcgcttacaatggtaatacacactatgcacagaagctccagggcagagtcaccatgaccacagacacatccacgagcacagcctacatggacctgaagagcctgagatctgacgacacggccgtgtattactgtgcgagagggagagatggctacaattcgtcctttgactactggggccagggaaccctggtcaccgtctcctca

SEQ ID NO: 17453 - DNA, 291 bp, Homo sapiens
  source 1..291: mol_type = other DNA
gcttctggttacacctttaccagctatggtatcaactgggtgcgacaggcccctggacaagggcttgagtggatgggatggatcagcgcttacaatggtaacacaaactatgcacagaagctccaagacagagtcaccatgaccacagacacatccacgcgcacagcctacttggacctgaggagcctgagatttgacgacacggccctgtattactgtgcgagaggtagagatggctacaattcatcctttgactactggggccagggaaccctggtcaccgtctcctca

SEQ ID NO: 17454 - DNA, 291 bp, Homo sapiens
  source 1..291: mol_type = other DNA
gcttatggatacaccttcagtagtaatgctatgcattgggtgcgccaggcccccggacaaaggcttgagtggatgggatggatcaacactggcaatggaaacacaaaatattcacagaagttccagggcagagtcaccattaccagcgacacatccgcgagcacagcctacatggacctgagcagcctgacatctgaagacacggctgtctattactgtgcggcgcgtccgggtatagtagtggctggccttgactactggggccagggaaccctggtcaccgtctcctca

SEQ ID NO: 17455 - DNA, 291 bp, Homo sapiens
  source 1..291: mol_type = other DNA
gcttctggatacaccttcattgattatgctatgcattgggtgcgccaggcccccggacaaaggcttgagtggatgggatggatcaacgctggcaatggtgacacaaaatattcacagaagttccaggacagagtcaccattaccagggacacatccgcgagcacagtctacatgcaactgagcagcctgagatctgaagacacggctgtgtattactgtgcggctcgtccgggtattgtagtggctggacttgactactggggccagggagccctggtcaccgtctgctca

SEQ ID NO: 17456 - DNA, 291 bp, Homo sapiens
  source 1..291: mol_type = other DNA
ccttctggatataccttcacaaattatgctatacattgggtgcgccaggcccccggacaaaggtttgagtggatgggatggatcaaccctggcaatggtgacataaaattttcacagaatttccagggcagagtcaccattaccagcgacacatccgcgagcacagcctacatggagctgagcagcctgacatctgaagacacggctgtgtattactgtgcggccagaccgggtatagtagtggctggtcttgactactggggccagggaaccctggtcaccgtctcctca

SEQ ID NO: 17457 - DNA, 283 bp, Homo sapiens
  source 1..283: mol_type = other DNA
tgcagcctctggattcaccttcagtaaccactggatgcactgggtccgccaagctccagggaaggggctggtgtgggtctcacatattaatagtgatgggagtagcacaagttacgcgtactccgtgaagggccgattcaccatctccagaaacaacgccaagaacacgctgtatctgcaaatgaacagtctgagagccgaggacacggctgtgtatttctgtgctcgtggctggtactcttctgactactggggccagggaaccctggtcaccgtctcctca

SEQ ID NO: 17458 - DNA, 283 bp, Homo sapiens
  source 1..283: mol_type = other DNA
tgcagcctctggattcagcttcagtagctactggatgcactgggtccgccaagctccagggaaggggctggtgtgggtctcacgtctcaatagtgatgggagtagcacaagctacgcggactccgtgaagggccgattcaccatctccagagacaacgccaagaacacactgtatctgcaaatgaacagtctgagagccgaggacacggctgtgtattactgtgcaagaggttggtatagcagtgactactggggccagggaaccctggtcaccgtctcctca

SEQ ID NO: 17459 - DNA, 280 bp, Homo sapiens
  source 1..280: mol_type = other DNA
cactgtctctggtttctccctgagtaattactactggacctggatccggcagcccccagggaagggactggagtggattggctatatccattccagtgggagcaccaactacaacccctccctcaagagtcgagtcaccatatcagtagacacgtccaagaaccagttctccctgaagctgagctctgtgaccgctgcggacacggccttttattattgcgcgagaggcaatggctacatttattactggggccagggaaccctggtcaccgtctcccca

SEQ ID NO: 17460 - DNA, 280 bp, Homo sapiens
  source 1..280: mol_type = other DNA
cactgtctctggtggctccatcagtagtttctactggacctggatccggcagcccccagggaagggactggagtggattgggtatatctattacactgggaacaccaactacaacccctccctcaagagtcgagtcaccatgtcactagacacgtccaagaaccagttctccctgaagctgagctctgtgaccgctgcggacacggccgtgtattactgtgcgagaggaaacggatacatctactactggggccagggaaccctggtcaccgtctcctca

SEQ ID NO: 17461 - DNA, 298 bp, Homo sapiens
  source 1..298: mol_type = other DNA
tgcagcctctggattcacctttagcagttatgccatgagctgggtccgccaggctccagggagggggctggagtgggtctcaactatcaatgatggtggtggcagcacattctatgcagactccgtgaagggccggttcactatctccagagacaatcccaagaacacgctgtatctgcaaatgaacagcctgaaagccgaggacacggccgtatattactgtgcgaaagatcggggggatagtggctacgagatatttgactactggggccggggaacccttgtcaccgtctcctca

SEQ ID NO: 17462 - DNA, 298 bp, Homo sapiens
  source 1..298: mol_type = other DNA
cgcagcctctggattcacctttggcaactatgccatgacctgggtccgccaggctccagggaaggggctggagtgggtcgcaactattagtattaatggtgtcagttcatattatccagcctccgtgaagggccggttcaccatctccagggacaattccaaggacacgctgtttctgcaaatgaacagcctgagagccgaggacacggccacatatttctgtgcgaaagatcgaggagatagtgggtacgaaatctttgactactggggccacggaaccctggtcaccgtctcctca

SEQ ID NO: 17463 - DNA, 288 bp, Homo sapiens
  source 1..288: mol_type = other DNA
gcgtctggatacaccttcaccacctacttaatacactggctgcgacaggcccctggacaaggccttgagtggctgggaagaatcggccctgggagtgatgtcacgcactactcacactacttccagggcagagtcaccatgaccagcgacacgtccacgagcacagtctacatggagctgaccagcctgatgtctgacgacacggccgtgtatttttgtgcgagagagaaggaaggaacgacctactttgactactggggccagggaaccctagtcaccgtctcctca

SEQ ID NO: 17464 - DNA, 288 bp, Homo sapiens
  source 1..288: mol_type = other DNA
acatctggatataccttcaccaactactatatacactgggtgcgacaggcccctggacagggacttgagtggatgggaataatcaatcctaatgctggtaacacaaggtacgcacagaagttccagggcagagtcaccatgaccagggacacgtccacgaccacagtctacatggacctgagcagcctgagatctgaggacacggccgtgtatttctgtgcgagagagaaagagggaactacttattttgactactggggccagggaaccctggtcaccgtctcctca

SEQ ID NO: 17465 - DNA, 274 bp, Homo sapiens
  source 1..274: mol_type = other DNA
tacagcctctggattcacttttagcagctatgggatgaactgggtccgccaggctccagggaagggactggagtgggtggccaatattaagcatgatggaagtctcaaatactatgtggactctgtgaagggccgattcaccatctccagagacaacgcccagaactcactgtatttgcaaatgaacagcctgagagtcgaggacacggctgtttattattgtgcgagatctactgattactggggccggggaaccctggtcaccgtctcctca

SEQ ID NO: 17466 - DNA, 274 bp, Homo sapiens
  source 1..274: mol_type = other DNA
tgcagcctctggattcacctttactacctattggatgagctgggtccgccaggctccagggaaggggctggagtgggtggccaacataaagccagatggtagtgacaaattctatgtgggctctgcgaagggccgattcaccatctccagagacaacgccaagaactcactgtatctgcaaatgaacagcctgagagccgaggacacggccatttattactgtgcgagaagtaccgactactggggccagggaatcctggtcaccgtctcctca

SEQ ID NO: 17467 - DNA, 286 bp, Homo sapiens
  source 1..286: mol_type = other DNA
tgcagcctctggactcaccctcagtgactactttatgacctggattcgccaggctccggggaagggcctggagtgggtttcatacatcggtgacagagggactcccatattctattcagactctgtgaagggccggttcaccatctccagggacaacgccaagaactcactgtatctgcaaatgcacagcctgagagccgacgatacggccgtttattactgtacgacacttagcagttcctcaatcgcatactggggccagggaaccctgctcaccgtctcctca

SEQ ID NO: 17468 - DNA, 286 bp, Homo sapiens
  source 1..286: mol_type = other DNA
tgcagcccctggactcagcttcagtgactacttcatgacctggatccgccaggctccagggaaggggctggagtgggtttcatacattagtaatattgatagtaccatatactacgcagactctgtgaggggccgattcaccatctccagggacaacgccaagaagtcactgtatctgcaaatgaacagcctgcgagccgaggacacggccatgtattactgtacgaccctctcctccagctccattgcctactggggccggggaaccctggtcaccgtctcctca

SEQ ID NO: 17469 - DNA, 280 bp, Homo sapiens
  source 1..280: mol_type = other DNA
tacagcctctgaattcacctttagtaattattggatgacctgggtccgccaggctccagggaaggggctggagtgggtggccaacataaagcaagacggaagtgagaaatactatgtggactctgtgaagggccgattcaccatctccagagacaacgccaagaactcactttatctggaaatgaacagcctgagagccgacgacacggctgtgtattactgtgcggggggtagaaattcggcctactggggccagggaaccctggtcaccgtctcctca

SEQ ID NO: 17470 - DNA, 280 bp, Homo sapiens
  source 1..280: mol_type = other DNA
tgcagcctctggattcacctttagtacctattggatgacctgggtccgccaggctccagggaaggggctggactgggtggccaacataaagcaagatggaagtgagaaatactatgtggactctgtgaagggccgattcaccatctccagagacaacgccaagaactcactgtatctgcaaatgaacagcctgagagccgaggacacggccgtgtattactgtgcgggagggaggaattcggcctactggggccagggaacccgggtcaccgtctcctca

SEQ ID NO: 17471 - DNA, 280 bp, Homo sapiens
  source 1..280: mol_type = other DNA
tgcagcctctggattcacctttagtacctattggatgacctgggtccgccaggctccagggaaggggctggactgggtggccaacataaagcaagatggaagtgagaaatactatgtggactctgtgaagggccgattcaccatctccagagacaacgccaagaactcactgtatctgcaaatgaacagcctgagagccgaggacacggccgtgtattactgtgcgggagggaggaattcggcctactggggccaaggaacccgggtcaccgtctcctca

SEQ ID NO: 17472 - DNA, 277 bp, Homo sapiens
  source 1..277: mol_type = other DNA
tgcagcctctggattcaccttcagtagctatggcatgcactgggtccgccaggctccaggcaaggggctggagtgggtggcagttatatcatatgatggaagtaataaatactatgcagactccgtgaagggccgattcaccatctccagagacaattccaagaacacgctgtatctgcaaatgaacagcctgagagctgaggacacggctgtgtattactgttctagacggggctttgactactggggccagggaaccctggtcaccgtctcctca

SEQ ID NO: 17473 - DNA, 277 bp, Homo sapiens
  source 1..277: mol_type = other DNA
cgcagggtctggcttcactttcagtagctatggcatgcactggttccgccaggctccaggcaaggggccagagtgggtggcagctatatcgtctgatggacgtaataaagactatctagactccgtgtggggccgattcagcatctccagagacaattccaagaatatacattacctacaaatgaacaacctgagagccgaggacacggctctgtattactgttctcgccggggctttgactactggggccagggaaccctggtcaccgtctcttca

SEQ ID NO: 17474 - DNA, 283 bp, Homo sapiens
  source 1..283: mol_type = other DNA
cactgtctctggtggctccttcagcagtggtagttactactggaactggatccggcagcccgccgggaagggactggagtggattgggcgtatcgttaccagtgggagcaccgactacaatccctccctcaagagtcgagtcaccatatcagtagacacgtccaagaaccagttttccctgaaactgagctctgtgacccccgcagacacggccgtgtattactgtgcgaggagcggggcttttgatatctggggccaagggacaatggtcaccgtctcttca

SEQ ID NO: 17475 - DNA, 280 bp, Homo sapiens
  source 1..280: mol_type = other DNA
cactgtctctggtggctccgtcaacagaggttactactggaactggatccggcagcccccagagaagggactggagtggattgggtatatctataacagtgggaacaccagctacaacccctccctcaagagccgagtcaccatatcagtagacacgtccaagaaccaattctccctgaagctgacctctgtgaccactgcggacacggccgtctattactgtgcgagatccggtgcttttgatatctggggccaagggacaatggtcaccgtctcttca

SEQ ID NO: 17476 - DNA, 286 bp, Homo sapiens
  source 1..286: mol_type = other DNA
cagtgtctctggtgactccatcactacttactactggagctggatccggcagcccccagggaagggactggagtggattggctatatcactgacagtgggagcaccaactacaacccctccctcgagcgtcgagtcaccatatcaaaagacacgtccaagaaccaattccaccttaagctgacctctgtgaccgctgcggacacggccgtgtattattgtgcgagagaggggccggccaactggttcgacccctggggccagggaaccctggtcattgtctcctca

SEQ ID NO: 17477 - DNA, 286 bp, Homo sapiens
  source 1..286: mol_type = other DNA
cactgtctctggtggctccatcagtacttactactggggctggatccggcagcccccagggaagggactggagtggattggctatatcactgacagtgggagcaccaactacaacccctccctcaagagtcgagttatcatatcaaaagacatgtccaagaaccaattttccctgcggctgaactctgtgaccgctgcggacacggccgtgtattactgtgcgagagaaggccccgccaactggttcgacccctggggccggggaaccctggtcaccgtctcctcg

SEQ ID NO: 17478 - DNA, 286 bp, Homo sapiens
  source 1..286: mol_type = other DNA
ctctgtctctggtggctccatcagtagcttctattggagctggatccggcagcccccagggaagggactggagtggattgggtacatctattacagtggggtcaccaattacaacccctccttcaagagtcgagtcaccatgtcgatagacacgtccaataaccagttttccctgaaactgagttttgtgaccgctgcggacacggccgtgtattactgtgcgagagaaggccccgccaactggttcgacccctggggccagggagccctggtcaccgtctcctca

SEQ ID NO: 17479 - DNA, 280 bp, Homo sapiens
  source 1..280: mol_type = other DNA
tgcagcctctggattcatctttagtagcaattggatgacctgggtccgccaggctccagggaaggggctggagtgggtggccaatataaagcaagatggaagtgagaaatactatgtggactctgtgaagggccgattcaccatctccagagacaacgccaagaactcactgtatctgcaaatgaacatcctgagagccgatgacacggctgtgtattactgtgcgaggggtttagcagcagctggttggggccagggaaccctggtcaccgtctcctca

SEQ ID NO: 17480 - DNA, 280 bp, Homo sapiens
  source 1..280: mol_type = other DNA
tgcaggctctggattcacctatagtagtaattggatgaactgggtccgccaggctccagggaaggggctggaatgggtggccaacataaaccaagatggaagtgagaaatactatgtggactctgtgaagggccgattcaccatctccagagacaacgccaagaactcactgtatctgcaaatgaacagcctgagagccgaggacacggctgtgtattactgtgcgaggggtctagcagcggctggctggggccagggaaccctggtcaccgtctcctca

SEQ ID NO: 17481 - DNA, 280 bp, Homo sapiens
  source 1..280: mol_type = other DNA
tgcagcctctgaattcacctttaatagctattggatgagctgggtccgccaggctccaggcaaggggctggagtgggtggccaacatgaagcaagatggaagtgagatatactatgtggactctgtgaagggccgattcaccatctccagagacaatgccaagaactcactgtatctgcaaatgaatagcctgagagccgaggacacggctgtgtattactgtgcgagaggaaggactacggacgtctggggccaagggaccacggtcagcgtctcctca

SEQ ID NO: 17482 - DNA, 280 bp, Homo sapiens
  source 1..280: mol_type = other DNA
tggaacctctggattcacgtttagtagttattggatgacctgggtccgccagggtccagggaagaggctggagtgcgtggccagtataaagcaagatggaagtgagagaaactatgtggactctgtgaagggccgattcaccatctccagagacaacgccaacaactcactgtatctgcaaatgaacagcctgagcaccgaggacacggccgtttattactgtgcgagaggtcgcactacggacgtctggggccaagggaccacggtcaccgtctcgtca

SEQ ID NO: 17483 - DNA, 280 bp, Homo sapiens
  source 1..280: mol_type = other DNA
tggaacctctggattcacttttagtagttattggatgacctgggtccgccagggtccagggaagaggctggagtgcgtggccagcataaggcaagatgcaattgagagaaactatgtggactctgtgaggggccgattcaccatctccagagacaacgccaagaactcactgtatctgcaaatgaacagcctgagatccgaggacacggccgtttattactgtgcgagaggtcgcactacggacgtctggggccaagggaccacggtcaccgtctcctca

SEQ ID NO: 17484 - DNA, 292 bp, Homo sapiens
  source 1..292: mol_type = other DNA
cactgtctctggtgtctccatcagcagtagtagttactactgggcctggatccgccagcccccagggaaggggctggagtggattgggagtatctattatagtgggagaacctactacaacccgtccctcaagagtcgagtcaccatatccgtagacacgtccaagaaccagctctccctgaagctgagctctgtgaccgccgcagacacgactgtgtattactgtgcgagacatgtctcgcatacagctactgactactggggccagggaaccctggtcaccgtctcctca

SEQ ID NO: 17485 - DNA, 292 bp, Homo sapiens
  source 1..292: mol_type = other DNA
cactgtctctggtgtctccatcagcagtagtagttactactggggctggatccgccagcccccagggaaggggctggagtggattgggagtatctattatggtgggagcacctactacaacccgtccctcaagagtcgagtcaccatatccgtagacacgtccaagaaccagttctccctgaagctgagttctgtgaccgccgcagacacggctgtgtattactgtgcgagacatgtttcccatacagctactgactactggggccagggaaccctggtcaccgtctcctca

SEQ ID NO: 17486 - DNA, 283 bp, Homo sapiens
  source 1..283: mol_type = other DNA
tgcagcctctggattcacctttagcagttttgccatgaggtgggtccgccaggctccagggaggggactggagtgggtctcagctattggtgcaggtggtgtcagcacaaagtacgcagactccgtgaagggccggttcaccatctccagagacaattccaagaacacggtgtatctgcaaatgaacagcctgagagccgaggacacggccgtatattactgtgcacgtagcaacaacggttttgactactggggccagggaaccctggtcaccgtctcctca

SEQ ID NO: 17487 - DNA, 283 bp, Homo sapiens
  source 1..283: mol_type = other DNA
tgaatcctctggattcatctttagcaactatgccatgaactgggtccgccagactccagggagggggctggagtgggtctcaactattactattagtggtggtatcacatactacgcagactccgtgaagggccgcttcaccgtctccagagacaattccaagaacacgctgaatctgcaaatgaacagcctgagagccgaggacacggccgtatattactgtgcgaggagtaacaacggctttgactactggggccagggatctctggtctccgtctcctca

SEQ ID NO: 17488 - DNA, 280 bp, Homo sapiens
  source 1..280: mol_type = other DNA
tgctgcctctgggttcacctttaccagctatgtcatgatctgggtccgccaggctccagggaaggggctggagtgggtctcaggtattactggtagtggtggtaacacatactacgcaaactccgtgaagggccggttcaccatctccagagacaattccaggaacacgctgtatctgcaaatgaacagcctgacagccgatgacacggccgtatattactgtgcgaaaggcctcactattgactactggggccagggaaccctggtcaccgtctcctca

SEQ ID NO: 17489 - DNA, 280 bp, Homo sapiens
  source 1..280: mol_type = other DNA
tgaggcctctggattcacctttaccacctctgccatgacctgggtccgccaggctccagggaaggggctggagtgggtcgcagctattagtggtactagtggtagcgcatactactcagactccgtgaagggccggttcaccatctccagagacaattccaagaacacgctttatctacaaatgaactacctgagagtcgacgactcggccgtatactactgtgcgaaaggcctaacaattgactactggggccagggaaccctggtcaccgtctcctca

SEQ ID NO: 17490 - DNA, 280 bp, Homo sapiens
  source 1..280: mol_type = other DNA
tgaggcctctggattcacctttaccacctctgccatgacctgggtccgccaggctccagggaaggggctggagtgggtcgcagctattggtggtactagtggtggcgcatactactcagactccgtgaagggccggttcaccatctccagagacaattccaagaacacgctgtctctgcaaatgaactacctgagagtcgacgactcggccgtatactactgtgcgaaaggcctaacaattgactactggggccggggaaccctggtcaccgtctcctca

SEQ ID NO: 17491 - DNA, 280 bp, Homo sapiens
  source 1..280: mol_type = other DNA
tgaggcctctggattcaccttttccacctctgccatgacctgggtccgccaggctccagggaaggggctggagtgggtcgcagctattggtacttctagtggtagcgcatactactcagactccgtgaagggccggttcaccatctccagagacaattccaagaacacgctgtctctacaaatgaactacctgagagtcgacgactcggccgtatattactgtgcgaaaggcctaacaattgactactggggccagggaaccctggtcaccgtctcctca

SEQ ID NO: 17492 - DNA, 286 bp, Homo sapiens
  source 1..286: mol_type = other DNA
cactgtctctggtggctccatcagtggttactactggagctggatccggcagcccccagggaagggactggagtggattgggtatatcttttacagtgggagcaccaactacaacccctccctcaagagtcgagtcaccatatcagtagacacgtccaagaaccagttctccctgaagatgaactctgtgaccgctgcggacacggccgtatattactgtgcgagaggtggatacagctatggactcgacccctggggccagggaaccctggtcaccgtctcctca

SEQ ID NO: 17493 - DNA, 286 bp, Homo sapiens
  source 1..286: mol_type = other DNA
cactgtctctggtggctccatcagtaattactactggagctggatccggcagcccccgggaaagggactggagtggattgggtatatctattacactgggagcaccaactacaacccctccctcaagagtcgagtcaccatatcagtagacacgtccaagaaccagttctccctgaagctgatctctgtgaccgctgcggacacggccgtttattattgtgcgaggggaggatacagttatggcctcgacccctggggccagggatccctggtcaccgtctcctca

SEQ ID NO: 17494 - DNA, 298 bp, Homo sapiens
  source 1..298: mol_type = other DNA
tgcagcctctggattctcctttgaaaattatgccatgcactgggtccggcaagctccagggaagggcctggagtgggtcgcgggtatttgtgtgaatagtggttgcttagactatgcggactctgtgaagggccgattcaccatctccagagacaacgccaagaacaccctgtatctgcaaatgaacagtctgcgagctgaggacacggccttgtattactgtgcaaaagagctgtcaccagctggatattccccccttgactactggggccagggatccctggtcaccgtctcctca

SEQ ID NO: 17495 - DNA, 298 bp, Homo sapiens
  source 1..298: mol_type = other DNA
tgcagcctctggattcatttttggtgactatgccatgcactgggtccggcaagctccggggaagggcccggagtgggtcgcaggtatttgtgtaggtggtggttgcatgggctatgcggactctgtgaggggccgattcaccatctccagagacgacggccagaaatccctatatctgcaaatgaatagtctgagacctgacgacacggccttctactattgtgcgaaagaactatctcctgctggatactctcctctagactactggggccagggaaccctggtcaccgtctcctgg

SEQ ID NO: 17496 - DNA, 290 bp, Homo sapiens
  source 1..290: mol_type = other DNA
ccatctccggggacagtgtctctagcaacagtgctgcttggaattggatcaggcagtccccatcgagaggccttgagtggctgggaaggacatactacaggtccaagtggtttagtgtttatgcagtatctgtgaaaagccgaataaccatcaccccagacacatccaagaaccagttctccctgcaactgaagtctgtgactcccgaggacacggctgtgtattggtgtgcaagaggaccgggtcacttccagcactggggccagggcaccctggtcaccgtctcctca

SEQ ID NO: 17497 - DNA, 290 bp, Homo sapiens
  source 1..290: mol_type = other DNA
ccatttccggggacagtgtctctagtaacagtgctgcttggaactgggtcaggcagtccccatcgaggggccttgagtggctgggaaggacatactacaggtctaagtggtatagtgtttatgcactttcttttaaaagtcgaataagtatcaaggcagacacatccaagaaccagttctccctgcagctgaactctgtgactcccgaggacacgggtgtgtattattgtgcaagagggcctggtcacttccagcactggggccagggcaccctggtcaccgtctcctca

SEQ ID NO: 17498 - DNA, 290 bp, Homo sapiens
  source 1..290: mol_type = other DNA
ccatctccggggacagtgtctctagcaacagtgctgcttggaattggatcaggcagtccccatcgagaggccttgagtggctgggaaggacatactacaggtccaagtggtttagtgtttatgcagtatctgtgaaaagccgaataaccatcaccccagacacatccaagaaccagttctccctgcaactgaagtctgtgactcccgaggacacggctgtgtattggtgtgcaagaggaccgggtcacttccaacactggggccagggcaccctggtcaccgtctcctca

SEQ ID NO: 17499 - DNA, 283 bp, Homo sapiens
  source 1..283: mol_type = other DNA
tgcagcctctggattcacctttagcaactatgccatgagctgggtccgccaggctccagggaaggggctggagtgggtctcatttattagtagtagtggtggtaatacattctacgcagactccgtgaagggccggttcaccatttccagagacaattccaagaacacgctgtatctggaaatgaacatcctgagagccgaggacacggccctatattactgtgcgagaggtcggtccgcttttgatatctggggccaagggacaatggtcaccgtctcttca

SEQ ID NO: 17500 - DNA, 283 bp, Homo sapiens
  source 1..283: mol_type = other DNA
tgcagcctctggattcacctttaccagctatgccatgagttgggtccgccaggctccagagaaggggctggagtgggtctcaagtattagtggtagtggtggtagcacattctacgcagactccgtgaagggccggttcaccatctccagagacaattccaagagcatgctgtatctgcaaatgaacagcctgagagccgacgacacggccgtatattactgtgcgagaggtcgttcggcttttgatatctggggccaagggacaatggtcaccgtctcttca

SEQ ID NO: 17501 - DNA, 286 bp, Homo sapiens
  source 1..286: mol_type = other DNA
tgtaggctctggattcagcttcagtgaccactacatagactggctccgccaggctccagggaaggggctggagtgcattgggcgtattagaaacaaaggtaagagttacaccacagattacgccgcgtctgtgaaaggtagattcaccctctcaagagacgattcaaagaactcagtgtatctgcaaatgaacagcctgaaaaccgaggacacggccgtttattactgtgctgatgtggggagttatctcccctggggccagggaaccctggtcaccgtctcctca

SEQ ID NO: 17502 - DNA, 286 bp, Homo sapiens
  source 1..286: mol_type = other DNA
tgtagcctctgggttcagcttcagtgaccactacatggactgggtccgccaggctccagggaaggggctgcagtgggttgcccgtattaaaaacaaacctcgcagttacaccactggatatgccgcgtctgtgaaagacagattcagtatctcaagagatgattcacagaactcagtatatttgcaaatgaacagcctgagacccgaggactcggccgtctattattgtgctgacgtggggagctacctgccctggggccagggaaccctggtcaccgtctcctca

SEQ ID NO: 17503 - DNA, 280 bp, Homo sapiens
  source 1..280: mol_type = other DNA
tgtaggctctggattcacgttcagtgaccactacatagactgggtccgccaggctccagggaaggggctggagttcattgggcgtattagaaacaagagttacaccacagattacgccgcgtctgtgaaaggtagattcaccctctcaagagatgattcaaagaactcagtgtatctgcaaatgaacagcctgaaaaccgaggacacggccgtttattactgtgctgatgtggggagttatctcccctggggccagggagccctggtcaccgtctcctca

SEQ ID NO: 17504 - DNA, 277 bp, Homo sapiens
  source 1..277: mol_type = other DNA
tgtagcctctggactcacgtttagtagccattggatgggctgggtccgccaggctccaggaaaggggctggagtgggtggccgccataaaggaagatggaagtgagaagtactatgtggactctgtgaagggccgagtcaccatctccagagacaacgccaagaactcactatatctactaattgacaggccgagagccgaggacacggcgatatattactgtgcgagaggaaggggcgcctcctggggccagggaaccctggtcaccgtctcctca

SEQ ID NO: 17505 - DNA, 277 bp, Homo sapiens
  source 1..277: mol_type = other DNA
tgcagcctctggattcacctttgggacctattggatgagctgggtccgccaggctccagggagggggctggagtgggtggccaacataaaggaagatggaagtgagaaatactatgtggactctgtgaagggccgattcaccatctccagagacaacgccaagagctcactgtttctgcaaatgaacagcctgagagccgaggacacggctgtgtattactgtgcgagaggtcggggcgcctcctggggccagggaaccctggtcaccgtctcctca

SEQ ID NO: 17506 - DNA, 289 bp, Homo sapiens
  source 1..289: mol_type = other DNA
tgcagcctctggattcaccgtcagtagcaactacatgacctgggtccgccaggctccagggaaggggctggagtgggtctcagttatttatagcggcggtagcacatactacgcagactccgtgaagggccgattcaccatctccagggacaattccaagaacacgttgtttcttcaaatgaacagcctgagagttgaggacacggctatatatttctgtgcgagagattcagtagcagtggctggtacggactactggggccagggaaccctggtcaccgtctcctca

SEQ ID NO: 17507 - DNA, 289 bp, Homo sapiens
  source 1..289: mol_type = other DNA
tgcagcctctggattcaccgccagtagtaactacatgacttgggtccgccaggctccagggaaggggctggaatgggtctcagttatttataccgatggtagcacatactacgcagactctgtgaagggcagattcatcatctccagagacggctccaagaacacattgtatcttcaaatgaacagcctgagagccgaggacacggctgtgtattactgtgcgagagattctgtagcagtggctggtaccgactactggggccagggaaccctggtcaccgtctcctca

SEQ ID NO: 17508 - DNA, 289 bp, Homo sapiens
  source 1..289: mol_type = other DNA
tgcagcctctggattcaccgtcagtagcaactacatgagctgggtccgccaggctccagggaaggggctggagtgggtctcagttatttatagcggtggtagcacatactacgcagactccgtgaagggccgattcaccatctccagagataattccaggaacacactgtatcttcaaatgaacagcctgagaggtgaggacacggctgtgtattattgtgcgagagactctgtagcagtggctggtactgactactggggccagggagccctggtcaccgtctcctca

SEQ ID NO: 17509 - DNA, 295 bp, Homo sapiens
  source 1..295: mol_type = other DNA
cactgtctctggtggctccatcagcagtagtgattactactggggctggatccgccagcccccacggaagggactggagtggattgggactatctcttatagtgggaacacctactacaatccgtccctcaagagtcgagtcaccatatccgtagacgcgtccaaaaaccagttctccctgaagctgagctctgtgaccgccgcagacacggctgtgtattactgtgcgagacgtggagacagtcatgggctctttgactactggggccagggaaccctggtcaccgtctccgca

SEQ ID NO: 17510 - DNA, 295 bp, Homo sapiens
  source 1..295: mol_type = other DNA
cactgtctctggtggctccatcagcagtagtgattactactggggctggatccgccagccccctgggaaggggctggagtggattgggagtatctattatagtgggagaacctactacaacccgtccctcaagagtcgagtcaccatatacgtagacacgtccaagaaccagttctccctgaagctgagttctgtgaccgccacagacacggctgtgtattactgtgcgagacgcggagacagccatggtctctttgactactggggccagggcaccctggtgaccgtctcctca

SEQ ID NO: 17511 - DNA, 277 bp, Homo sapiens
  source 1..277: mol_type = other DNA
tgcagcctctggattcacccttagcatctatcccatgagctgggtccgccaggctccagggaaggggctggagtgggtctcagttatttctaacggtgatactaccacatcctatgcagactccgtgaagggccggttcaccatctccagagatgattcccagaacacgctgtatctgcaaatgaacagcctgagagccgaggacacggccctatattactgtgcgagggggtggggggccaactggggccagggaaccctggtcaccgtctcctca

SEQ ID NO: 17512 - DNA, 277 bp, Homo sapiens
  source 1..277: mol_type = other DNA
tgcagcctctggattcacctttagcaactatgacatgacttgggtccgccaggctccagggaaggggctggagtgcgtctcatatatttcttatagtggtggttccacaaactacgcagactccgtgaagggccggttcaccatctccagagacaattccaagaacacgttgtatctgcaaatgaacagcctgagagccgaggacacggccatatattactgtgcccgcggctggggcgccaactggggccagggaatcccggtcaccgtctcctca

SEQ ID NO: 17513 - DNA, 304 bp, Homo sapiens
  source 1..304: mol_type = other DNA
tgcagcctctggattcacctttggtgattatggcatgagttgggtccgccaagctccagggaaggggctggagtgggtctctggtattaattggaatggtggtagcacaggttatgcagactctgtgaagggccgattcaccatctccagagacaacgccaagaactccctgtatctgcaaatgaatggtctgagagccgaggacacggccttgtattactgtgcgagggattattatgcttcggggacttattaccttccgtctgattattggggccagggaaccctggtcaccgtctcctca

SEQ ID NO: 17514 - DNA, 304 bp, Homo sapiens
  source 1..304: mol_type = other DNA
tgcagcgtctggattcaattttgatgattttggcatgacctgggtccgccaagttccagggaaggggctggagtgggtcgctagtattagttcgactggcggcagaataggttatgcagactctgttaagggccgattcaccatctccagagacaacgccgaggactccctttatctgcaaatgaacagtctgagagccgaggacacggccttgtatcactgtgcgagagattattatgcttcgggcacttattacctccccagtgactactggggccagggaaccctggtcaccgtctcctca

SEQ ID NO: 17515 - DNA, 304 bp, Homo sapiens
  source 1..304: mol_type = other DNA
tgcagcctctggattcagctttgatgattttggcatgagctgggtccgccaagttccagggaaggggctggagtgggtttctggtattaattcgaatggcggtagaacaggttatgcagactctgttaagggccgattcaccatctccagagacaacgccaagaactccctgtttctgcaaatgaacagtctgagagccgaggacacggccttgtatcactgtgcgagagattattatgcttcgggcacttattacctccccagtgactactggggccagggaactctggtcaccgtctcctca

SEQ ID NO: 17516 - DNA, 301 bp, Homo sapiens
  source 1..301: mol_type = other DNA
cgcagcctctggattcaccttcagtagttctccgatgcactgggtccgccaggctccaggcaaggggctggactggctggcagttatatcacctgatggcactagtcaagactacgcagactccgtgcggggccgctttaccatctccagagacaattccaacaacgcactttatctgcaaatgaacagtctggcatctgaggagacgggtgtatattattgtgtgagagagggaagaagcagtggccgggcgggctgctttgactactggggccagggaagcctggtcaccgtctcctca

SEQ ID NO: 17517 - DNA, 301 bp, Homo sapiens
  source 1..301: mol_type = other DNA
tgcagtctctggattcaccttcagcacctctgttttgcactggctccgccaggctccaggcaaggggctggagtgggtggcaggtatatcagttgatggaagtgctcaacactacccagactccctgaggggccgattcaccatctccagagacaattccaagaacacgttgtttctgcaaatgaacagcctgcgaaatgaggacacggctgtctattattgtgtgagagaggggagaagcagcggccgggcgggctgctttgactactggggccagggagccctggtcaccgtctcttca

SEQ ID NO: 17518 - DNA, 286 bp, Homo sapiens
  source 1..286: mol_type = other DNA
tgcagcctctgggttcaccttcagtgactctggtatgcactgggtccgccaggctcccgggaaagggctggagtgggttggccgtattagaagcaaaactaacagttacgcgacagcatatgctgcgtcggtgaacggcaggttcaccatctccagagatgattccaagagcacggcatacctgcaaatgaacagcctgaaaaccgaggacacggccgtgtattactgtacgacccctgcggcttttaatatctggggccaagggacaatggtcaccgtctcttca

SEQ ID NO: 17519 - DNA, 286 bp, Homo sapiens
  source 1..286: mol_type = other DNA
tgcaacctctgggttcatcttcagtgactctggcatgcactgggtccgccagacttccgggaaaggactggagtgggttggccgtattagaagtaaagctaattattacgcgacaacatatgcttcgtcggtgaaaggcaggttcaccatctccagagatgattcaaagaacacggcgtatctgcaaatgaacagcctgaaaatcgaggacacggccgtctattactgtactaccccggcggcttttaatatctggggccaggggacaatggtcaccgtctcttca

SEQ ID NO: 17520 - DNA, 286 bp, Homo sapiens
  source 1..286: mol_type = other DNA
tgcagcctctgggctcaccttcagtgactccggcatgcactgggtccgccaggcttccgggaaagggctggagtgggttggccgtattagaaacaaagctaacagccatgcgacagaatattctgcgtcggtgaaaggcaggttcaccatctccagagatgattcaaaaaacatggcgtatctgcaaatgaacagcctgaaaaccgaggacacggccgtctattattgtactacccccgctgcttttaatatctggggccaagggacagtggttgtcgtctcttca

SEQ ID NO: 17521 - DNA, 286 bp, Homo sapiens
  source 1..286: mol_type = other DNA
tgcagcctctgggctcgacttcagtggctctgggatgcactgggtccgccaaccttccgggaaagggctggagtgggttggccgtatcagaaacaaaattaatggttacgcgacagaatatagtgcgtcggcgaaaggcaggttcaccatctccagagatgattcacagaacacggcgtatctgcaaatggacagcctgaaaaccgaggacacggccgtgtattactgtactactccggcggcttttaatatctggggccaagggacaagggtcaccgtctcttca

SEQ ID NO: 17522 - DNA, 285 bp, Homo sapiens
  source 1..285: mol_type = other DNA
gcttctggatacaccttccgcatctatggtgttcattgggtgcgccaggcccccggacaaaggcttgagtggatgggatggatcaaccctggcgatggtaacacaagagattcacagaagttccagggcagagtcaccattaccagggacacatccgcgagcacagtctacatggacctgagcagcctgacatctgaagacacggctgtgtattactgtgcgagagcgggcagtgcctggtccattgactactggggccagggaaccctggtcaccgtctcctca

SEQ ID NO: 17523 - DNA, 285 bp, Homo sapiens
  source 1..285: mol_type = other DNA
gcttctggatacaccttcactagttattctctgcagtgggtgcgccaggcccccggacaaaggcttgagtggatgggatggatcaacgctggcaatggtaacacaaaatattcacgaaagttccagggcagaatcaccatcaccagggacacatccgcgagcacagcctacatggagttgagcagcctgacatctgaagacacggctgtctattactgtgcgagagcgggcagtgcctggtcaattgactactggggccagggaaccctggtcaccgtctcctca

SEQ ID NO: 17524 - DNA, 289 bp, Homo sapiens
  source 1..289: mol_type = other DNA
tgcagcctctggattcacctttagtgcctattggatgacctggttccgccaggctccagggaaggggctggagtgggtggccaacataaaacaagatggaagtgagaaatattacgtggactctgtgaagggccgattcaccatctccagagacaacgccaagaactcactgtatctgcaagtgaacagcctgagagccgaggacacggctgtgtattactgtgcgagagatgacatgcgaaataccgtcgactactggggccagggaaccctggtcaccgtctcctca

SEQ ID NO: 17525 - DNA, 289 bp, Homo sapiens
  source 1..289: mol_type = other DNA
tgcagcctctggattcccctttagtagttattggctaacctggttccgccaggctccagggaaggggctggagtgggtggccaacatgaacaaagatggaagtgagaaatattatgtggactctgtgaagggccgattcaccatctccagagacaacgccaagaactcactgtatctgcaaatgaacgacctgagagacgaggacacggctacgtattactgtgcgagagatgacatgcgtaacactgttgactactggggccagggaaccctggtcaccgtctcctca

SEQ ID NO: 17526 - DNA, 304 bp, Homo sapiens
  source 1..304: mol_type = other DNA
tgcagcctctggattcactttcactaaggcctggatgagttgggtccgcctggctccagggaaggggccggagtgggttgcccgtattaaaagtaagagtgatggtgggacaacagactacgctgcacccgtgaaaggcagattcaccatctcaagagatgattcgcaaaacactctgtttctggaaatgaacaacctgaaaatcgaggacacagccgtgtattattgtaccacagatggggggctggcacctcgtcctctctttgactactggggccggggaaccctggtcaccgtctcctca

SEQ ID NO: 17527 - DNA, 304 bp, Homo sapiens
  source 1..304: mol_type = other DNA
tgcagcctctggattcactttcactaaggcctggatgagttgggtccgcctggctccagggaaggggccggaatgggttgcccgtattaaaagtaagagggatggtgggaaaccggactacgctgcagccgtgaaaggcagattcaccatctcaagagatgattcgcaaaacactctgtttctggaaatgaacaacctgaaaatcgaggacacagccgtgtattattgtaccacagatggggggctggcacctcgtcctctctttgactactggggccggggaaccctggtcaccgtctcctca

SEQ ID NO: 17528 - DNA, 304 bp, Homo sapiens
  source 1..304: mol_type = other DNA
tgcagcctctggattcactttcactaaggcctggatgagttgggtccgcctggctccagggaaggggccggagtgggttgcccgtattaaaaataagaataatggtgggacaacagactacgctgcacccgtgaaaggcagattcaccatctcaagagatgattcgcaaaacactctgtttctggaaatgaacaacctgaaagtcgaggacacagccgtgtattattgtaccacagatggggggctggcacctcgtcctctctttgactactggggccggggaaccctggtcaccgtctcctca

SEQ ID NO: 17529 - DNA, 304 bp, Homo sapiens
  source 1..304: mol_type = other DNA
tgcaacttctggattccctttcaatgacgcctggatgggctgggtccgccaggctccagggaaggggctggagtgggttggccgtattaaaagcaaatctaatggtgggacaacagactacgctgcacccgtgagaggcagattcaccatctcaagagatgattcgagaaatacagtgtatctgcaaatgaacagcctgaaaaccgaggacacagccatgtatttttgtaccacagatgggggcttagcacctcgtcccctttttgactactggggccggggaaccctggtcaccgtctcctca

SEQ ID NO: 17530 - DNA, 304 bp, Homo sapiens
  source 1..304: mol_type = other DNA
tgcaacttctggattccctttcaatgacgcctggatgggctgggtccgccaggctccagggaaggggctggagtgggttggccgtattaaaggcaaatctaatggtgggacaacagactacgctgcacccgtgagaggcagattcaccatctcaagagatgattcgagaaatacagtgtatctgcaaatgaacagcctgaaaaccgaggacacagccatgtatttttgtaccacagatgggggcttagcacctcgtcccctttttgactactggggccggggaaccctggtcaccgtctcctca

SEQ ID NO: 17531 - DNA, 303 bp, Homo sapiens
  source 1..303: mol_type = other DNA
tgcaacttctggattccctttcaatgacgcctggatgggctgggtccgccaggctccagggaaggggctggagtgggttggccgtattaaaagcaaatctaatggtgggacaacagactacgctgcacccgtgagaggcagattcaccatctcaagagatgattcgagaaatacagtgtatctgcaaatgaacagcctgaaaaccgaggacacagccatgtatttttgtaccacagatgggggcttagcacctcgtcccctttttgactactggggccgggaaccctggtcaccgtctcctca

SEQ ID NO: 17532 - DNA, 302 bp, Homo sapiens
  source 1..302: mol_type = other DNA
cagcctctggattcactttcagtagcgcctggatgaactgggtccgccaggctccagggaaggggctggagtgggttggccgtattaaaaccaaaagtgatggtgggacaacagactacgctgcacccgtgactggcagattcagcatctcaagagatgattcaaaaaacatggtgtatctgcaaatgaacagcctgaaaaccgaggacacagccatgtatttttgtaccacagatgggggcttagcacctcgtcccctttttgactactggggccggggaaccctggtcaccgtctcctca

SEQ ID NO: 17533 - DNA, 292 bp, Homo sapiens
  source 1..292: mol_type = other DNA
cactgtctctggtggctccatcagcagtagagatacctactggggctggatccgccagcccccagggaaggggctggagtggattgggagtcacttttatgatgggaggaccttctacaatccgtccctcaggagtcgagtcaccatatccgttgacacgtccaagaaccagttctccctgaacctgaactctgtgaccgccgcagacacggcggtgtatcactgtgcgagacgtccgtggggcagtggctttgactattggggccagggaaccctggtcaccgtctcctca

SEQ ID NO: 17534 - DNA, 292 bp, Homo sapiens
  source 1..292: mol_type = other DNA
cactgtctctggtggctccatcagtagtaaaagtaactactggggctggatccgccagcccccagggaaggggctggagtggattgggagtcactattctgatgggaggaccttctacaatccgtccctcaggagtcgagtcaccatatccgttgacacgtccaagaaccagttctccctgaacctgaactctgtgaccgccgcagacacggcggtgtatcactgtgcgagacgtccgtggggcagtggctttgactattggggccagggaaccctggtcaccgtctcctca

SEQ ID NO: 17535 - DNA, 292 bp, Homo sapiens
  source 1..292: mol_type = other DNA
cactgtctctggtggctccatcagcagtagaaataactactggggctggatccgccagcccccagggaaggggctggagtggattgggagtcactattctgatgggaggaccttctacaatccgtccctcaggagtcgagtcaccatatccgttgacacgtccaagaaccagttctccctgaacctgaactctgtgaccgccgcagacacggcggtgtatcactgtgcgagacgtccgtggggcagtggctttgactattggggccagggaaccctggtcaccgtctcctca

SEQ ID NO: 17536 - DNA, 292 bp, Homo sapiens
  source 1..292: mol_type = other DNA
cactgtctctggtggctccatcagcagtagaagtaactactggggctggatccgccagcccccagggaaggggctggagtggattgggagtcactattatgatgggaggaccttctacaatccgtccctcaggagtcgagtcaccatatccgttgacacgtccaagaaccagttctccctgaacctgaactctgtgaccgccgcagacacggcggtatatcactgtgcgagacgtccgtggggcagtggctttgactattggggccagggaaccctggtcaccgtctcctca

SEQ ID NO: 17537 - DNA, 292 bp, Homo sapiens
  source 1..292: mol_type = other DNA
cactgtctctggtggctccatcagtagtagaaatttatactggggctggatccgccaggccccagggaaggggctggagtggattgggagtcacttttatgatgggaggaccttctacaatccgtccctcaggagtcgagtcaccatatccgttgacacgtccaagaaccagttctccctgaacttgaactctgtgaccgccgcagacacggcggtctatcactgtgcgagacgtccgtggggcagtggctttgactattggggccagggaaccctggtcaccgtctcctca

SEQ ID NO: 17538 - DNA, 292 bp, Homo sapiens
  source 1..292: mol_type = other DNA
cactgtctctggtggctccatcagcagtagaagtaactactggggctggatccgccagcccccagggaaggggctggagtggattgggagtcactattatgatgggaggaccttctacaatccgtccctcaggagtcgagtcaccatatccgttgacacgtccaagaaccagttctccctgaacctgaactctgtgaccgccgcagacacggcggtgtatcactgtgcgagacgtccgtggggcagtggctttgactattggggccagggaaccctggtcaccgtctcctca

SEQ ID NO: 17539 - DNA, 292 bp, Homo sapiens
  source 1..292: mol_type = other DNA
cactgtctctggtggctccatcagcagtagaagttactactggggctggatccgccagcccccagggaaggggctggagtggattgggagtcactattctgatgggaggacccactacaacccgtccctcaggagtcgagtcaccatatccgtagacacgtccaagaaccagttctccctgaacctgaggtctgtgaccgccgcagacacggcggtgtatcactgtgcgagacgtccgtggggcagtggctttgactattggggccagggaaccctggtcaccgtctcctca

SEQ ID NO: 17540 - DNA, 292 bp, Homo sapiens
  source 1..292: mol_type = other DNA
cactgtctctggtggctccatcagtagtaaatatgactactggggctggatccgccagcccccagggaaggggctggagtggattgggagtcactattctgatgggaggaccttctacaatccgtccctcaggagtcgagtcaccatatccgttgacacgtccaagaaccagttctccctgaacctgaactctgtgaccgccgcagacacggcggtgtatcactgtgcgagacgtccgtggggcagtggctttgactattggggccagggaaccctggtcaccgtctcctca

SEQ ID NO: 17541 - DNA, 292 bp, Homo sapiens
  source 1..292: mol_type = other DNA
cactgtctctggtggctccatcagcagtagaaatacctactggggctggatccgccagcccccagggaaggggctggagtggattgggagtcacttttatgatgggaggaccttctacaatccgtccctcaggagtcgagtcaccatatccgttgacacgtccaagaaccagttctccctgaacctgaactctgtgaccgccgcagacacggcggtgtatcactgtgcgagacgtccgtggggcagtggctttgactattggggccagggaaccctggtcaccgtctcctca

SEQ ID NO: 17542 - DNA, 292 bp, Homo sapiens
  source 1..292: mol_type = other DNA
cactgtctctggtggctccatcagcagtagaaatacctactggggctggatccgccaacccccagggaaggggctggagtggattgggagtcacttttctgatgggaggaccttctacaatccgtccctcaggagtcgagtcaccatatccgttgacacgtccaagaaccagttctccctgaacctgaactctgtgaccgccgcagacacggcggtgtatcactgtgcgagacgtccgtggggcagtggctttgactattggggccagggaaccctggtcaccgtctcctca

SEQ ID NO: 17543 - DNA, 292 bp, Homo sapiens
  source 1..292: mol_type = other DNA
cactgtctctggtggctccatcagtagtaaatatgactactggggctggatccgccagcccccagggaaggggctggagtggattgggagtcactattctgatgggaggaccttctacaatccgtccctcaggactcgagtcaccatatccgttgacacgtccaagaaccagttctccctgaacctgaactctgtgaccgccgcagacacggcggtgtatcactgtgcgagacgtccgtggggcagtggctttgactattggggccaggggaccctggtcaccgtctcctca

SEQ ID NO: 17544 - DNA, 292 bp, Homo sapiens; identical to SEQ ID NO: 17541
  source 1..292: mol_type = other DNA

SEQ ID NO: 17545 - DNA, 292 bp, Homo sapiens
  source 1..292: mol_type = other DNA
cactgtctctggtggctccatcagcagtagatataactactggggctggatccgccagcccccagggaaggggctggagtggattgggagtcagtattatgatgggaggaccttctacaatccgtccctcaggagtcgagtcaccatatccgttgacacgtccaagaaccatttctccctgaacctgaactctgtgaccgccgcagacacggcggtgtatcactgtgcgagacgtccgtggggcagtggctttgactattggggccagggaattctggtcaccgtctcctca

SEQ ID NO: 17546 - DNA, 292 bp, Homo sapiens
  source 1..292: mol_type = other DNA
cgctgtctctggtggctccatcagcaatagaaatgactactggggctggatccgccagcccccagggaagggactggagtggattgggagtcacttttatgatgggaggaccttctacaatccgtccctcaggagtcgagtcaccatatccgttgacacgtccaagaaccagttctccctgaccctgaactctgtgaccgccgcagacacggcggtgtatcactgtgcgagacgtccgtggggcagtggctttgactattggggccagggaaccctggtcaccgtctcctca

SEQ ID NO: 17547 - DNA, 295 bp, Homo sapiens
  source 1..295: mol_type = other DNA
cagtgtctctggtggctccatcagcagtagtagttactactggggctggatccgccagcccccagggaaggggctggagtggattgggagtatctattatagtgggaccacctactacaacccgtccctcaagagtcgagtcaccatatccgtagacacgtccaagaaccagttctccctgaagctgagctctgtgaccgccgcagacacggctatgtattactgtgcgagactcgtaggcagctcgggctcctttgactactggggccagggaaccctggtcaccgtctcctca

SEQ ID NO: 17548 - DNA, 295 bp, Homo sapiens
  source 1..295: mol_type = other DNA
cactgtctctggtggctccatcagtagtagtagttactactggggctggatccgccagcccccagggagggggctggagtggattgcgagtatctattatagtgggaccacctactataacccgtccctcaagagtcgagtcaccatatccgtagacacgtccaagaaccagttctcccggaagctgagctctgtgaccgccacagacacggctgtgtattactgtgcgagactggtgggtagcagtggcagctttgactactggggccagggaaccctggtcaccgtctcctca

SEQ ID NO: 17549 - DNA, 280 bp, Homo sapiens
  source 1..280: mol_type = other DNA
cactgtctctggtgcctccatgagtaattactactggagctggatccggcagcccgctgggaagggactggagtggattgggcgtatctttcccagtgggagcaccaactacaacccctccctcaagagtcgagtcaccatgtcagtagacacgtccaagaaccagttctccctgaaagtgagctctgtgaccgccgcggacacggccgtctattactgtgcgagaggttccatgcaggttgactactggggccagggaaccctggtcaccgtctcctca

SEQ ID NO: 17550 - DNA, 280 bp, Homo sapiens
  source 1..280: mol_type = other DNA
cactgtctctggtgcctccatgagtaattactactggagctggatccggcagcccgccgggaagggactggagtggattgggcgtatctttcccagtgggagcaccaactacaacccctccctcaagagtcgagtcaccatgtcagtagacacgtccaagaaccagttctccctgaaagtgagctctgtgaccgccgcggacacggccgtctattactgtgcgagaggttccatgcaggttgactactggggccagggaaccctggtcaccgtctcctca

SEQ ID NO: 17551 - DNA, 280 bp, Homo sapiens
  source 1..280: mol_type = other DNA
cactgtctctggtggctccatgagtaattactactggagctggatccggcagcccgccgggaagggactggagtggattgggcgtatctttcccagtgggagcaccaactacaacccctccctcaagagtcgagtcaccatgtcagtagacacgtccaagaaccagttctccctgaaactgagctctgtgaccgccgcggacacggccgtctattactgtgcgagaggttccatgcaggttgactactggggccagggaaccctggtcaccgtctcctca

SEQ ID NO: 17552 - DNA, 280 bp, Homo sapiens
  source 1..280: mol_type = other DNA
cactgtctctggtggctccatgagtaattactactggagctggatccggcagcccgccggaaagggactggagtggattgggcgtatctttcccagtgggagcaccaactacaacccctccctcaagagtcgagtcaccatgtcagtagacacgtccaagaaccagttctccctgaaactgagctctgtgaccgccgcggacacggccgtctattactgtgcgagaggttccatgcaggttgactactggggccagggaaccctggtcaccgtctcctca

SEQ ID NO: 17553 - DNA, 280 bp, Homo sapiens
  source 1..280: mol_type = other DNA
cactgtctctgggacctccctgaataattggtactggagctggatccggcagcccgccgggaagggactggagtggattgggcgtatctttcccagtgggagcaccaactacaacccctccctcaagagtcgagtcaccatgtcagtagacacgtccaagaaccagttctccctgaaactgagctctgtgaccgccgcggacacggccgtctattactgtgcgagaggttccatgcaggttgactactggggccagggaaccctggtcaccgtctcctca

SEQ ID NO: 17554 - DNA, 280 bp, Homo sapiens
  source 1..280: mol_type = other DNA
cactgtctctggtggctccatgagtaattactactggagctggatccggcagcccgccgggaagggactggagtggattgggcgtatctttcccagtgggagcaccaactacaacccctccctcaagagtcgagtcaccatgtcagtagacacgtccaagaatcagttctccctgaaactgagctctgtgaccgccgcggacacggccgtctattactgtgcgagaggttccatgcaggttgactactggggccagggaaccctggtcaccgtctcctca

SEQ ID NO: 17555 - DNA, 280 bp, Homo sapiens
  source 1..280: mol_type = other DNA
cactgtctctggtgcctccctgagtaattactactggagctggatccggcagcccgccgggaagggactggagtggattgggcgtatctttcccagtgggatcaccaactacaacccctccctcaagagtcgagtcaccatgtcagttgacacgtccaagaaccagttctccctggaactgagctctgtgaccgccgcggacacggccgtctattactgtgcgagaggttccatgcaggttgactactggggccagggaaccctggtcaccgtctcctca

SEQ ID NO: 17556 - DNA, 280 bp, Homo sapiens
  source 1..280: mol_type = other DNA
cactgtctctggtgcctccatgagtaattggtactggagctggatccggcagcccgccgggaagggactggagtggattgggcgtatctttcccagtgggagcaccaactacaacccctccctcaagagtcgagtcaccatgtcagtagacacgtccaagaaccagttctccctgaaactgagctctgtgaccgccgcggacacggccgtctattactgtgcgagaggttccatgcaggttgactactggggccagggaaccctggtcaccgtctcctca

SEQ ID NO: 17557 - DNA, 280 bp, Homo sapiens
  source 1..280: mol_type = other DNA
cactgtctctggtggctccttgagttattactactggagctggatccggcagcccgccgggaagggactggagtggattgggcgtatctttcccagtgggagcaccaactacaacccctccctcaagagtcgcgtcaccatgtcagttgacacgtccaagaaccagttctccctgaaactgagctctgtgaccgccgcggacacggccgtctattactgtgcgagaggttccatgcaggttgactactggggccagggaaccctggtcaccgtctcctca

SEQ ID NO: 17558 - DNA, 280 bp, Homo sapiens
  source 1..280: mol_type = other DNA
cactgtctctggtgcctccatgagtaattactactggagctggatccggcagcccgccgggaagggactggagtggattgggcgtatctttcccagtgggagcaccaactacaacccctccctcaagagtcgagtcaccatgtcactagacacgtccaagaaccagttctccctgaaagtgagctctgtgaccgccgcggacacggccgtctattactgtgcgagaggttccatgcaggttgactactggggccagggaaccctggtcaccgtctcctca

SEQ ID NO: 17559 - DNA, 280 bp, Homo sapiens
  source 1..280: mol_type = other DNA
cactgtctctggtggctccatgagtaattggtactggagctggatccggcagcccgccggaaagggactggagtggattgggcgtatctttcccagtgggatcaccaactacaatccctccctcaagagtcgagtcaccatgtcagtagacacgtccaagaaccagttctccctgaaactgagctctgtgaccgccgcggacacggccgtctattactgtgcgaggggttccatgcaggttgactactggggccagggaaccctggtcaccgtctcctca

SEQ ID NO: 17560 - DNA, 280 bp, Homo sapiens
  source 1..280: mol_type = other DNA
cactgtctctggtgcctccatgagtaattactactggagctggatccggcagcccgccgggaagggactggagtggattgggcgtatctttcccagtgggagcaccaactacaacccctccctcaagagtcgagtcaccatgtcagtagacacgtccaagaaccagttttccctgaaagtgagctctgtgaccgccgcggacacggccgtctattactgtgcgagaggttccatgcaggttgactactggggccagggaaccctggtcaccgtctcctca

SEQ ID NO: 17561 - DNA, 280 bp, Homo sapiens
  source 1..280: mol_type = other DNA
cactgtctctggtgcctccatgagtaattactactggagctggatccggcagcccgccgggaagggactggagtggattgggcgtatctttcccagtgggagcaccaactacaacccctccctcaagagtcgagtcaccatgtcagtagacacgtccaagaaccagttctccctgaaagtgagctctgtgaccgccgcggacacggccgtctattactgtgcgagaggttccatgcaggttgactactggggccagggaagcctggtcaccgtctcctca

SEQ ID NO: 17562 - DNA, 280 bp, Homo sapiens
  source 1..280: mol_type = other DNA
cactgtctctggtgcctccatgagtaattactactggagctggatccggcagcccgccgggaagggactggagtggattgggcgtatctttcccagtgggagcaccaactacaacccctccctcaagagtcgagtcaccatgtcagtagacacgtccaagaaccagttctccctgaaagtgagctctgtgaccgccgcggacacggccgtctattactgtgcgagaggttccatgcaggttgactactggggccagagaaccctggtcaccgtctcctca

SEQ ID NO: 17563 - DNA, 279 bp, Homo sapiens
  source 1..279: mol_type = other DNA
actgtctctggtgcctccatgagtaattactactggagctggatccggcagcccgccgggaagggactggagtggattgggcgtatctttcccagtgggagcaccaactacaacccctccctcaagagtcgagtcaccatgtcagtagacacgtccaagaaccagttctccctgaaagtgagctctgtgaccgccgcggacacggccgtctattactgtgcgagaggttccatgcaggttgactactggggccagggaaccctggtcaccgtctcctca

SEQ ID NO: 17564 - DNA, 280 bp, Homo sapiens
  source 1..280: mol_type = other DNA
cactgtctcttgtgcctccatgagtaattactactggagctggatccggcagcccgccgggaagggactggagtggattgggcgtatctttcccagtgggagcaccaactacaacccctccctcaagagtcgagtcaccatgtcagtagacacgtccaagaaccagttctccctgaaagtgagctctgtgaccgccgcggacacggccgtctattactgtgcgagaggttccatgcaggttgactactggggccagggaaccctggtcaccgtctcctca

SEQ ID NO: 17565 - DNA, 281 bp, Homo sapiens
  source 1..281: mol_type = other DNA
acactgtctctggtgcctccatgagtaattactactggagctggatccggcagcccgccgggaagggactggagtggattgggcgtatctttcccagtgggagcaccaactacaacccctccctcaagagtcgagtcaccatgtcagtagacacgtccaagaaccagttctccctgaaagtgagctctgtgaccgccgcggacacggccgtctattactgtgcgagaggttccatgcaggttgactactggggccagggaaccctggtcaccgtctcctca

SEQ ID NO: 17566 - DNA, 280 bp, Homo sapiens
  source 1..280: mol_type = other DNA
cactgtctctggtgcctccatgagtaattactactggagctggatccggcagcccgccgggaagggactggagtggattgggcgtatctttcccagtgggagcaccaactacaacccctccctcaagagtcgagtcaccatgtcagtagacacgtccaagaaccagttctccctgaaagtgagctctgtgaccgccgcggacacggccgtctattactgtgcgagaggttccatgcaggttgactactggggccagggaaccctggtcaccgtctcctta

SEQ ID NO: 17567 - DNA, 280 bp, Homo sapiens
  source 1..280: mol_type = other DNA
cactgtctctggtgcctccatgagtaattactactggagctggatccggcagcccgccgggaagggactggagtggattaggcgtatctttcccagtgggagcaccaactacaacccctccctcaagagtcgagtcaccatgtcagtagacacgtccaagaaccagttctccctgaaagtgagctctgtgaccgccgcggacacggccgtctattactgtgcgagaggttccatgcaggttgactactggggccagggaaccctggtcaccgtctcctca

SEQ ID NO: 17568 - DNA, 280 bp, Homo sapiens
  source 1..280: mol_type = other DNA
cactgtctctggtggctccatgagtaattactactggagctggatccggcagcccaccgggaagggactggagtggattgggcgtatctttcccagtgggagcaccaactacaacccctccctcaagagtcgagtcaccatgtcagtagacacgtccaagaaccagttctccctgaaactgagctctgtgaccgccgcggacacggccgtctattactgtgcgagaggttccatgcaggttgactactggggccagggaaccctggtcaccgtctcctca

SEQ ID NO: 17569 - DNA, 280 bp, Homo sapiens
  source 1..280: mol_type = other DNA
cactgtctctggtacctccatgagtaattactactggagctggatccggcagcccgccgggaagggactggagtggattgggcgtatctttcccagtgggagcaccaactacaacccctccctcaagagtcgagtcaccatgtcagtagacacgtccaagaaccagttctccctgaaagtgagctctgtgaccgccgcggacacggccgtctattactgtgcgagaggttccatgcaggttgactactggggccagggaaccctggtcaccgtctcctca

SEQ ID NO: 17570 - DNA, 280 bp, Homo sapiens
  source 1..280: mol_type = other DNA
cactgtctctggtgcctccatgagtaattactactggagctggatccggcagcctgccgggaagggactggagtggattgggcgtatctttcccagtgggagcaccaactacaacccctccctcaagagtcgagtcaccatgtcagtagacacgtccaagaaccagttctccctgaaagtgagctctgtgaccgccgcggacacggccgtctattactgtgcgagaggttccatgcaggttgactactggggccagggaaccctggtcaccgtctcctca

SEQ ID NO: 17571 - DNA, 280 bp, Homo sapiens
  source 1..280: mol_type = other DNA
cactgtctctggtgcctccatgagtaattactactggagctggatccggcagcccgccgggaagggactggagtggattgggcgtatctttcccagtgggagcaccaactacaacccctccctcaagagtcgagtcaccatgtcagtagacacatccaagaaccagttctccctgaaagtgagctctgtgaccgccgcggacacggccgtctattactgtgcgagaggttccatgcaggttgactactggggccagggaaccctggtcaccgtctcctca

SEQ ID NO: 17572 - DNA, 280 bp, Homo sapiens
  source 1..280: mol_type = other DNA
cactgtctctggtgcctccatgagtaattactactggagctggatccggcagcccgccgggaagggactggagtggattgggcgtatctttcccagtgggagcaccaactacaacccctccctcaagagtcgagtcaccatgtcagtagacacgtctaagaaccagttctccctgaaagtgagctctgtgaccgccgcggacacggccgtctattactgtgcgagaggttccatgcaggttgactactggggccagggaaccctggtcaccgtctcctca

SEQ ID NO: 17573 - DNA, 280 bp, Homo sapiens
  source 1..280: mol_type = other DNA
cactgtctctggtgcctccatgagtaattactactggagctggatccggcagcccgccgggaagggactggagtggattgggcgtatctttcccagtgggagcaccaactacaacccctccctcaagagtcgagtcaccatgtcagtagacacgtccaagaaccagttctccctgaaagtgagctctgtgaccgccgcggacacggccgtctattgctgtgcgagaggttccatgcaggttgactactggggccagggaaccctggtcaccgtctcctca

SEQ ID NO: 17574 - DNA, 280 bp, Homo sapiens
  source 1..280: mol_type = other DNA
cactgtctctggtgcctccatgagtaattactactggagctggatccggcagcccgccgggaagggactggagtggattgggcgtatctttcccagtgggagcaccaactacaacccctcccttaagagtcgagtcaccatgtcagtagacacgtccaagaaccagttctccctgaaagtgagctctgtgaccgccgcggacacggccgtctattactgtgcgagaggttccatgcaggttgactactggggccagggaaccctggtcaccgtctcctca

SEQ ID NO: 17575 - DNA, 280 bp, Homo sapiens
  source 1..280: mol_type = other DNA
cactgtctctggtgcctccatgagtaattactactggagctggatccggcagcccgccgggaagggactggagtggattgggcgtatctttcccagtgggagcaccaactacaacccctccctcaagagtcgggtcaccatgtcagtagacacgtccaagaaccagttctccctgaaagtgagctctgtgaccgccgcggacacggccgtctattactgtgcgagaggttccatgcaggttgactactggggccagggaaccctggtcaccgtctcctca

SEQ ID NO: 17576 - DNA, 280 bp, Homo sapiens
  source 1..280: mol_type = other DNA
cactgtctctggtggctccatgagtaattactactggagctggatccggcagcccgccgggaagggactggagtggattgggcgtatctttcccagtgggagcaccaactacaacccctccctcaagagtcgagtcaccatgtcagtagacacgtccaagaaccagttctccctgaaactgagctctgtgaccgccgcggacacggccgtctattactgtgcgagaggttccatgcaggttgactactggggccagggaaccctggtcactgtctcctca

SEQ ID NO: 17577 - DNA, 280 bp, Homo sapiens
  source 1..280: mol_type = other DNA
cactgtctctggtgcctccatgagtaattactactggagctggatccggcagcccgccgggaagggactggagtggattgggcgtatctttcccagtgagagcaccaactacaacccctccctcaagagtcgagtcaccatgtcagtagacacgtccaagaaccagttctccctgaaagtgagctctgtgaccgccgcggacacggccgtctattactgtgcgagaggttccatgcaggttgactactggggccagggaaccctggtcaccgtctcctca

SEQ ID NO: 17578 - DNA, 280 bp, Homo sapiens
  source 1..280: mol_type = other DNA
cactgtctctggtggctccatgagtaattactactggagctggatccggcagcccgccggaaagggactggagtggattgggcgtatctttcccagtgggagcaccaactacaacccctccctcaagagtcgagtcaccatgtcagtagacacgtccaagaaccagttctccccgaaactgagctctgtgaccgccgcggacacggccgtctattactgtgcgagaggttccatgcaggttgactactggggccagggaaccctggtcaccgtctcctca

SEQ ID NO: 17579 - DNA, 280 bp, Homo sapiens
  source 1..280: mol_type = other DNA
cactgtctctggtgcctccatgagtaattactactggagctggatccggcagcccgccgggaagggactggagtggattgggcgtatctttcccagtgggagcaccaactacaacccctccctcaagagtcgagtcaccatgtcagtagacacgtccaagaaccagttctccctgaaagtgagctctgtgaccgccgcggacacggccgtctattactgtgcgagaggttccatgcaggttgactactggggccagggaaccctggtcaccgtttcctca

SEQ ID NO: 17580 - DNA, 280 bp, Homo sapiens
  source 1..280: mol_type = other DNA
cactgtctctgggacctccctgaataattggtactggagctggatccggcaccccgccgggaagggactggagtggattgggcgtatctttcccagtgggagcaccaactacaacccctccctcaagagtcgagtcaccatgtcagtagacacgtccaagaaccagttctccctgaaactgagctctgtgaccgccgcggacacggccgtctattactgtgcgagaggttccatgcaggttgactactggggccagggaaccctggtcaccgtctcctca

SEQ ID NO: 17581 - DNA, 280 bp, Homo sapiens
  source 1..280: mol_type = other DNA
cactgtctctggtgcctccatgagtaattggtactggagctggatccggcaacccgccgggaagggactggagtggattgggcgtatctttcccagtgggagcaccaactacaacccctccctcaagagtcgagtcaccatgtcagtagacacgtccaagaaccagttctccctgaaactgagctctgtgaccgccgcggacacggccgtctattactgtgcgagaggttccatgcaggttgactactggggccagggaaccctggtcaccgtctcctca

SEQ ID NO: 17582 - DNA, 280 bp, Homo sapiens
  source 1..280: mol_type = other DNA
cactgtctctggtgcctccatgagtaattactactggagctggatccggcagcccgccgggaagggactggagtggattgggcgtatctttcccagtgggagcaccaactacaacccctccctcaagagtcgagtcaccatgtcagtagacacgtccaagaaccagttctccctgaaagtgagctctgtgaccgccgcggacacggccgtctattactgtgcgagaggttccatgcaggttgactactggggccagggaaccctggtcaccgtctcttca

SEQ ID NO: 17583 - DNA, 280 bp, Homo sapiens
  source 1..280: mol_type = other DNA
cactgtctctggtgcctccatgagtaattactactggagctggatccggcagcccgccgggaagggactggagtggattgggcgtatctttcccagcgggagcaccaactacaacccctccctcaagagtcgagtcaccatgtcagtagacacgtccaagaaccagttctccctgaaagtgagctctgtgaccgccgcggacacggccgtctattactgtgcgagaggttccatgcaggttgactactggggccagggaaccctggtcaccgtctcctca

SEQ ID NO: 17584 - DNA, 280 bp, Homo sapiens
  source 1..280: mol_type = other DNA
cactgtctctggtggctccatgagtaattactactggagctggatccggcagcccgccggaaagggactggagtggattgagcgtatctttcccagtgggagcaccaactacaacccctccctcaagagtcgagtcaccatgtcagtagacacgtccaagaaccagttctccctgaaactgagctctgtgaccgccgcggacacggccgtctattactgtgcgagaggttccatgcaggttgactactggggccagggaaccctggtcaccgtctcctca

SEQ ID NO: 17585 - DNA, 280 bp, Homo sapiens
  source 1..280: mol_type = other DNA
cactgtctctggtggctccatgagtaattactattggagctggatccggcagcccgccgggaagggactggagtggattgggcgtatctttcccagtgggagcaccaactacaacccctccctcaagagtcgagtcaccatgtcagtagacacgtccaagaaccagttctccctgaaactgagctctgtgaccgccgcggacacggccgtctattactgtgcgagaggttccatgcaggttgactactggggccagggaaccctggtcaccgtctcctca

SEQ ID NO: 17586 - DNA, 280 bp, Homo sapiens
  source 1..280: mol_type = other DNA
cactgtctctggtgcctccatgagtaattactactggagctggatccggcagcccgccgggaagggactggagtggattgagcgtatctttcccagtgggagcaccaactacaacccctccctcaagagtcgagtcaccatgtcagtagacacgtccaagaaccagttctccctgaaagtgagctctgtgaccgccgcggacacggccgtctattactgtgcgagaggttccatgcaggttgactactggggccagggaaccctggtcaccgtctcctca

SEQ ID NO: 17587 - DNA, 280 bp, Homo sapiens
  source 1..280: mol_type = other DNA
cactgtctctggtggctccatgagtaattactactggagctggatccggcagcccgccgggaaaggactggagtggattgggcgtatctttcccagtgggagcaccaactacaacccctccctcaagagtcgagtcaccatgtcagtagacacgtccaagaaccagttctccctgaaactgagctctgtgaccgccgcggacacggccgtctattactgtgcgagaggttccatgcaggttgactactggggccagggaaccctggtcaccgtctcctca

SEQ ID NO: 17588 - DNA, 280 bp, Homo sapiens
  source 1..280: mol_type = other DNA
cactgtctctggtgcctccatgagtaattactactggagctggatccggcagcccgccgggaagggactggagtggattgggcgtatctttcccagtgggagcaccaactacaacccctccctcaagagtcgagtcaccatgtcagtagatacgtccaagaaccagttctccctgaaagtgagctctgtgaccgccgcggacacggccgtctattactgtgcgagaggttccatgcaggttgactactggggccagggaaccctggtcaccgtctcctca

SEQ ID NO: 17589 - DNA, 280 bp, Homo sapiens
  source 1..280: mol_type = other DNA
cactgtctctggtggctccatgagtaattactactggagctggatccggcagcccgccggaaagggactggagtggattgggagtatctttcccagtgggagcaccaactacaacccctccctcaagagtcgagtcaccatgtcagtagacacgtccaagaaccagttctccctgaaactgagctctgtgaccgccgcggacacggccgtctattactgtgcgagaggttccatgcaggttgactactggggccagggaaccctggtcaccgtctcctca

SEQ ID NO: 17590 - DNA, 280 bp, Homo sapiens
  source 1..280: mol_type = other DNA
cactgtctctgggacctccctgaataattggtactggagctggatccggcggcccgccgggaagggactggagtggattgggcgtatctttcccagtgggagcaccaactacaacccctccctcaagagtcgagtcaccatgtcagtagacacgtccaagaaccagttctccctgaaactgagctctgtgaccgccgcggacacggccgtctattactgtgcgagaggttccatgcaggttgactactggggccagggaaccctggtcaccgtctcctca

SEQ ID NO: 17591 - DNA, 280 bp, Homo sapiens
  source 1..280: mol_type = other DNA
cactgtctctggtgcctccatgagtaattactactggagctggatccggcagcccgccgggaagggactggagtggattgggcgtatctttcccagtgggagcaccaactacaacccctccctcaagagtcgagtcaccatgtcagtagacacgtccaagaaccagttctccctgaaactgagctctgtgaccgccgcggacacggccgtctattactgtgcgagaggttccatgcaggttgactactggggccagggaaccctggtcaccgtctcctca

SEQ ID NO: 17592 - DNA, 280 bp, Homo sapiens
  source 1..280: mol_type = other DNA
cactgtctctggtgcctccatgagtaattactactggagctggatccggcagcccgccgggaagggactggagtggattgggcgtatctttcccagtgggaacaccaactacaacccctccctcaagagtcgagtcaccatgtcagtagacacgtccaagaaccagttctccctgaaagtgagctctgtgaccgccgcggacacggccgtctattactgtgcgagaggttccatgcaggttgactactggggccagggaaccctggtcaccgtctcctca

SEQ ID NO: 17593 - DNA, 280 bp, Homo sapiens
  source 1..280: mol_type = other DNA
cactgtctctggtggctccatgagtaattactactggagctggatccggcagcccgccgggaagggactggagtggattgggcgtatctttcccagtgggagcaccaactacaacccctccctcaagagtcgagtcaccatgtcagtagacacgtccaagaaccagttctccctgaaactgagctctgtgaccgccgcggacacggccgtccattactgtgcgagaggttccatgcaggttgactactggggccagggaaccctggtcaccgtctcctca

SEQ ID NO: 17594 - DNA, 280 bp, Homo sapiens
  source 1..280: mol_type = other DNA
cactgtcactgggacctccctgaataattggtactggagctggatccggcagcccgccgggaagggactggagtggattgggcgtatctttcccagtgggagcaccaactacaacccctccctcaagagtcgagtcaccatgtcagtagacacgtccaagaaccagttctccctgaaactgagctctgtgaccgccgcggacacggccgtctattactgtgcgagaggttccatgcaggttgactactggggccagggaaccctggtcaccgtctcctca

SEQ ID NO: 17595 - DNA, 279 bp, Homo sapiens
  source 1..279: mol_type = other DNA
cactgctctggtgcctccatgagtaattactactggagctggatccggcagcccgccgggaagggactggagtggattgggcgtatctttcccagtgggagcaccaactacaacccctccctcaagagtcgagtcaccatgtcagtagacacgtccaagaaccagttctccctgaaagtgagctctgtgaccgccgcggacacggccgtctattactgtgcgagaggttccatgcaggttgactactggggccagggaaccctggtcaccgtctcctca

SEQ ID NO: 17596 - DNA, 280 bp, Homo sapiens
  source 1..280: mol_type = other DNA
cactgtctctggtgcctccatgagtaattactactggagctggatccggcagcccgccgggaagggactggagtggattgggcgtatctttctcagtgggagcaccaactacaacccctccctcaagagtcgagtcaccatgtcagtagacacgtccaagaaccagttctccctgaaagtgagctctgtgaccgccgcggacacggccgtctattactgtgcgagaggttccatgcaggttgactactggggccagggaaccctggtcaccgtctcctca

SEQ ID NO: 17597 - DNA, 280 bp, Homo sapiens
  source 1..280: mol_type = other DNA
cactgtctctggtgcctccatgagtaatcactactggagctggatccggcagcccgccgggaagggactggagtggattgggcgtatctttcccagtgggagcaccaactacaacccctccctcaagagtcgagtcaccatgtcagtagacacgtccaagaaccagttctccctgaaagtgagctctgtgaccgccgcggacacggccgtctattactgtgcgagaggttccatgcaggttgactactggggccagggaaccctggtcaccgtctcctca

SEQ ID NO: 17598 - DNA, 280 bp, Homo sapiens
  source 1..280: mol_type = other DNA
cactgtctctggtgcctccatgagtaattactactggagctggatccggcagcccgccgggaagggactggagtggattgggcgtatccttcccagtgggagcaccaactacaacccctccctcaagagtcgagtcaccatgtcagtagacacgtccaagaaccagttctccctgaaagtgagctctgtgaccgccgcggacacggccgtctattactgtgcgagaggttccatgcaggttgactactggggccagggaaccctggtcaccgtctcctca

SEQ ID NO: 17599 - DNA, 280 bp, Homo sapiens
  source 1..280: mol_type = other DNA
cactgtctctagtgcctccatgagtaattactactggagctggatccggcagcccgccgggaagggactggagtggattgggcgtatctttcccagtgggagcaccaactacaacccctccctcaagagtcgagtcaccatgtcagtagacacgtccaagaaccagttctccctgaaagtgagctctgtgaccgccgcggacacggccgtctattactgtgcgagaggttccatgcaggttgactactggggccagggaaccctggtcaccgtctcctca

SEQ ID NO: 17600 - DNA, 280 bp, Homo sapiens
  source 1..280: mol_type = other DNA
cactgtctctggtgcctccatgagtaattactactggagctggatccggcagcccgccgggaagggactggagtggattgggcgtatctttcccagtgggagcaccaactacaacccctccctcaagagtcgagtcaccatgtcagtagacacgtccaagaaccagttctccctgaaagtgagctctgtgaccgccgcggacacggccgtctattactgtgcgagaggctccatgcaggttgactactggggccagggaaccctggtcaccgtctcctca

SEQ ID NO: 17601 - DNA, 280 bp, Homo sapiens
  source 1..280: mol_type = other DNA
cactgtctctggtgcctccatgagtaattactactggagctggatccggcagcccgccgggaagggactggagtggattgggcgtatctttcccagtgggagcaccaactacaacccctccctcaagagtcgagtcaccatgtcagtagacacgtccaagaaccagttctccctgacagtgagctctgtgaccgccgcggacacggccgtctattactgtgcgagaggttccatgcaggttgactactggggccagggaaccctggtcaccgtctcctca

SEQ ID NO: 17602 - DNA, 280 bp, Homo sapiens
  source 1..280: mol_type = other DNA
cactgtctctggtgcctccatgagtaattactactggagctggatccggcagcccgtcgggaagggactggagtggattgggcgtatctttcccagtgggagcaccaactacaacccctccctcaagagtcgagtcaccatgtcagtagacacgtccaagaaccagttctccctgaaagtgagctctgtgaccgccgcggacacggccgtctattactgtgcgagaggttccatgcaggttgactactggggccagggaaccctggtcaccgtctcctca

SEQ ID NO: 17603 - DNA, 280 bp, Homo sapiens
  source 1..280: mol_type = other DNA
cactgtctctggtggctccatgagtaattactactggagctggatccggcagcccgccggaaagggactggagtggattgggcgtatctttcccagtgggagcaccaactacaacccctccctcaagagtcgagtcaccatgtcagtagacacgtccaagaaccagttctccctgaaactgagctctgtgaccgccgcggacacggccgtctattactgtgcgagaggttccatgcaggttgactactggggccaaggaaccctggtcaccgtctcctca

SEQ ID NO: 17604 - DNA, 280 bp, Homo sapiens; identical to SEQ ID NO: 17553
  source 1..280: mol_type = other DNA

SEQ ID NO: 17605 - DNA, 280 bp, Homo sapiens
  source 1..280: mol_type = other DNA
cactgtctctggtgcctccatgagtaattactattggagctggatccggcagcccgccgggaagggactggagtggattgggcgtatctttcccagtgggagcaccaactacaacccctccctcaagagtcgagtcaccatgtcagtagacacgtccaagaaccagttctccctgaaagtgagctctgtgaccgccgcggacacggccgtctattactgtgcgagaggttccatgcaggttgactactggggccagggaaccctggtcaccgtctcctca

SEQ ID NO: 17606 - DNA, 280 bp, Homo sapiens
  source 1..280: mol_type = other DNA
cactgtctctggtgcctccatgagtaattactactggagctggatccggcagcccgccgggaagggactggagtggattgggcgtatctttcccagtgggagcaccaactacaactcctccctcaagagtcgagtcaccatgtcagtagacacgtccaagaaccagttctccctgaaagtgagctctgtgaccgccgcggacacggccgtctattactgtgcgagaggttccatgcaggttgactactggggccagggaaccctggtcaccgtctcctca

SEQ ID NO: 17607 - DNA, 280 bp, Homo sapiens
  source 1..280: mol_type = other DNA
cactgtctctggtgcctccatgagtaattactactggagctggatccggcagcccgccgggaagggactggagtggattgggcggatctttcccagtgggagcaccaactacaacccctccctcaagagtcgagtcaccatgtcagtagacacgtccaagaaccagttctccctgaaagtgagctctgtgaccgccgcggacacggccgtctattactgtgcgagaggttccatgcaggttgactactggggccagggaaccctggtcaccgtctcctca

SEQ ID NO: 17608 - DNA, 280 bp, Homo sapiens
  source 1..280: mol_type = other DNA
cactgtctctggtgtctccatgagtaattactactggagctggatccggcagcccgccggaaagggactggagtggattgggcgtatctttcccagtgggagcaccaactacaacccctccctcaagagtcgagtcaccatgtcagtagacacgtccaagaaccagttctccctgaaactgagctctgtgaccgccgcggacacggccgtctattactgtgcgagaggttccatgcaggttgactactggggccagggaaccctggtcaccgtctcctca

SEQ ID NO: 17609 - DNA, 280 bp, Homo sapiens
  source 1..280: mol_type = other DNA
cactgtctctggtgcctccatgagtaattactactggagctggatccggcagcccgccgggaagggactggagtggattgggcgtatctttcccagtgggagcaccaaccacaacccctccctcaagagtcgagtcaccatgtcagtagacacgtccaagaaccagttctccctgaaagtgagctctgtgaccgccgcggacacggccgtctattactgtgcgagaggttccatgcaggttgactactggggccagggaaccctggtcaccgtctcctca

SEQ ID NO: 17610 - DNA, 289 bp, Homo sapiens
  source 1..289: mol_type = other DNA
cactgtctctggtggctccatcagtggttactactggacttggatccggcagcccccaggaaagggactggagtggattgcctatatctatagcagtgggaaaaccaactacaacccctccctccagagtcgaatcaccataacactagacacgtccaagaagcagttctccctgaaggtgacctctgtgaccgctgcggacacggccgtgtatttctgtgcgagaggcgatcactactacaactacatggacgtctggggcaaagggaccacggtcaccgtctcctca

SEQ ID NO: 17611 - DNA, 289 bp, Homo sapiens
  source 1..289: mol_type = other DNA
cactgtctctggtggctccatcagtggttactactggagctggatccggcagcccccagggaagggactggaatggattgggtatatctattctactgggagcaccaactacaacccctccctcaagagtcgagtcaccatatcagtagacacgtccaagaaccagttctccctgaagctgagttctgtgaccgccgcagacacggccgtctattactgtgcgagaggtgaccactactacaactacatggacgtctggggcagagggaccacggtcaccgtctcctca

SEQ ID NO: 17612 - DNA, 289 bp, Homo sapiens
  source 1..289: mol_type = other DNA
cactgtctctggtggctccatcagtggttactactggacttggatccggcagcccccaggaaagggactggagtggattgactatatctatagcagtgggaaaaccaactacaacccctccctccagagtcgaatcaccataacactagacacgtccaagaagcagttctccctgaaggtgacctctgtgaccgctgcggacacggccgtgtatttctgtgcgagaggcgatcactactacaactacatggacgtctggggcaaagggaccacggtcaccgtctcctca

SEQ ID NO: 17613 - DNA, 304 bp, Homo sapiens
  source 1..304: mol_type = other DNA
tacagtttctggttttaggttaggtgattattctctgagctgggtccgccaggctccagggaaggggctggagtgggtaggcatcattagaagcgaaacttctggtgggacaacagcctacgccgcgtctgtgaatggcagattcacgatctcaagagatgattccaacaacattgcctatctacaaatgaacagcctgaaaaccgaggacacagccgtatattactgcagtcgagacgagtacggttcggggattccccatatggacgtctggggcaaagggaccacggtcaccgtctcctca

SEQ ID NO: 17614 - DNA, 304 bp, Homo sapiens
  source 1..304: mol_type = other DNA
tacagcttctggattcacgtttggtgattgtgctatgagctgggtccgccaggctccagggaaggggctggagtgggtagggtccattagaaagaaaactaatggtgggacaacagaatatgccgcgtctgtgagaggcagattcaccatctcaagagatgactccaaaggcatcgcctatctacaaatggacagcctgaaaaccgaggacacagccgtgtattactgtagtagagacgagtatggttcggggatcccccatatggacgtctggggcaaagggaccacggtcaccgtctcctca

SEQ ID NO: 17615 - DNA, 304 bp, Homo sapiens
  source 1..304: mol_type = other DNA
tacagcttctggattcacgtttggtgattgtgctatgagctgggtccgccaggctccagggaaggggctggagtgggtagggtccattagaaagaaaactaatggtgggacaacagaatatgccgcgtctgtgagaggcagattcaccatctcaagagatgactccaaaggcatcgcctatctacaaatggacagcctgaaaaccgaggacacagccgtgtattactgtagtagagacgagtatggctcggggatcccccatatggacgtctggggcaaagggaccacggtcaccgtctcctca

SEQ ID NO: 17616 - DNA, 285 bp, Homo sapiens
  source 1..285: mol_type = other DNA
gcatctggatacaccttcaccagctactatatgcactgggtgcgacaggcccctggacaagggcttgagtggatgggaatgagcgaccctagtgatggtagcataaactacgcacagaagtttcagggtagagtcagcatgaccagggacacgtccacgagcacagtctacatggagctgagcagcctgagatctgaggacacggccatgtattactgtgcgagggaatatcggggtggctactttgactactggggccagggaaccctggtcaccgtctcctca

SEQ ID NO: 17617 - DNA, 285 bp, Homo sapiens
  source 1..285: mol_type = other DNA
gcatctggatacaccttcaccagttactatgtgcactgggtgcgacaggcccctggacaagggcttgagtggatgggaataatcatccctagtgatggtaacacaggctacgcacagagtttccagggcagagtcaccatgaacagggacacctctacgagcatagtctacatggaggtgagcagcctgagatctgaggacacggccgtgtattactgtgcgagagagtaccgcgggggctactttgactactggggccagggaaccctggtcaccgtctcctca

SEQ ID NO: 17618 - DNA, 289 bp, Homo sapiens
  source 1..289: mol_type = other DNA
cgcagcctctggattcaccttcagtagctactggatgcactgggtccgccaagttccagggaaggggctggtgtgggtctcacgtattaatactgatgggagtagcacaacctacgcggactctgtgaagggccgattcaccatctccagagacaacgccaagaacacgctgtatctgcaaatgcacagtctgagagtcgaggacacgtctgtgtattactgtacaagagacagtagtaccagtgaatttgactactggggccagggaaccctggtcaccgtctcctca

SEQ ID NO: 17619 - DNA, 289 bp, Homo sapiens
  source 1..289: mol_type = other DNA
tgcagcctctggattcaccttcaataactactggatgcactgggtccgccaagctccagggaaggggctggtgtgggtctcacgtattaacagtgatgggagtagtacaacttatgcggactccgtgaagggccgattcaccatctccagagacaacgccatgaccacgatgtatctacaaatgaacagtctgagagccgaggacacggctgtctattattgtacaagagatagcagtaccagtgaatttgactactggggccagggaaccctggtcaccgtctcctca

SEQ ID NO: 17620 - DNA, 289 bp, Homo sapiens
  source 1..289: mol_type = other DNA
cactgtctctggtggctccatcagtagttactactggagctggatgcggcagccccccgggaaggcactggagtggattgggtatatctattacagtgggagcaccaactacaacccctccctcaagagtcgagtcaccatgtcagtggacacgtccaagaaccagttctccctgaagctgagctctgttaccgctgcggacacggccgtgtattactgtgcgagaagaagcccactagaaaacttctttgactactggggccagggaaccctagtccccgtctcctca

SEQ ID NO: 17621 - DNA, 289 bp, Homo sapiens
  source 1..289: mol_type = other DNA
cactgtctctggtggctccatcagtagttactactggagctggatccggcagcccccagggaagggactggagtggattgggtatatctattacagtgggagcaccaactacaacccctccctcaggagtcgagtcaccatatcagtagacacgtccaagagtcagttctccctgaaactgagctctgtgaccgctgcggacacggccgtgtattactgtgcgagaagaagcccactagagaacttctttgactactggggccagggaaccctaatccccgtctcctca

SEQ ID NO: 17622 - DNA, 289 bp, Homo sapiens
  source 1..289: mol_type = other DNA
cactgtctctggtggctccatcagtagttactactggagctggatccggcagcccccagggaagggactggagtggattggatatatcaattacagtgggagcaccaactacaacccctccctcaagagtcgaatcaccatgtcagtagacacgtccaagaaccagttctccctgaacctgagctctgtgactactgcggacacggccgtatattactgtgcgagaagaagcccactagagaacttctttgactactggggccagggaaccctaatccccgtctcctca

SEQ ID NO: 17623 - DNA, 289 bp, Homo sapiens
  source 1..289: mol_type = other DNA
cactgtctctggtgcctccatcagttcttactactggagctggatccggcagcccccagggaagggactggagtggattgggtatatctattacagtgggagcaccaactacaacccctccctcaagagtcgagtcaccatatcagtagacacgtccaagaaccagttctccctgaagctgacctctgtgaccgctgcggacacggccgtgtattcctgtgcgagaaggtcgccacttgagaacttctttgactactggggccagggaaccctggtcaccgtctcctca

SEQ ID NO: 17624 - DNA, 295 bp, Homo sapiens
  source 1..295: mol_type = other DNA
tgcagcgtcaggactcagcttcagtagttatggcatgaactgggtccgccaggctccaggcaaggggctggagtgggtggcagttatatggtatgatggaagtaatgaatactatgcagactccgtgaagggccgattcaccatctccagagacaattccaagaacacgctgtatctgcaaatgaacagcctgagagccgaggacacggctgtctattattgtgtgagaaatcccgccgaggggtactacggtatggacgtctggggccaagggaccacggtcaccgtctcctca

SEQ ID NO: 17625 - DNA, 295 bp, Homo sapiens
  source 1..295: mol_type = other DNA
tgcagcgtcaggactcagtttcagtagttatggcatgaactgggtccgccaggctccaggcaaggggctggagtgggtggcagttatatggtatgatggaagtaatgaatactatgcagactccgtgaagggccgattcaccatctccagagacaattccaagaacacgctgtatctgcagatgaacagcctgagagccgaggacacggctgtctattattgtgtgagaaatcccgccgagggatactacggtatggacgtctggggccaagggaccacagtcaccgtctcctca

SEQ ID NO: 17626 - DNA, 295 bp, Homo sapiens
  source 1..295: mol_type = other DNA
tgcagcgtctggattcgatttcagaagctatggcatgaactgggtccgccaggctccaggcaaggggctggagtgggtggcagttatttggtatgatggaagtaatgaatactatggagacgccgtgaagggccgattcaccatctccagagacaattcgaagaatatgctttatctgcaaatgaacagtctgagaggcgaggacacggctgtgtattactgtgtgagaaatcccgcggaaggttattacggtatggacgtctggggccaggggaccacggtcaccgtctcctca

SEQ ID NO: 17627 - DNA, 316 bp, Homo sapiens
  source 1..316: mol_type = other DNA
cgcagcctctggattcactttcagtaacgcctggatgaactgggtccgccaggctccagggaaggggctggagtgggttggccgtattcaaagcagagctgatggtgggacaaccgactacgctgcacccgtgaaaggcagaatcaccatctcaagagatgattcaaagaacacgctgtatctgcaaattaacagcctgaaaaccgaggacacagccgtgtattactgtgccacacaccccccgcgttggggcagctggtacactggctatggtgtggacgtctggggccaagggaccacggtcaccgtctcctca

SEQ ID NO: 17628 - DNA, 316 bp, Homo sapiens
  source 1..316: mol_type = other DNA
cgcagcctctggattcactttcagtaacgcctggatgaactgggtccgccaggctccagggaaggggctggagtgggttggccgtattcaaagcagagctgatggtgggacaaccgactacgctgcacccgtgaaaggcagaatcaccatctcaagagatgattcaaagaacacgctatatctgcaaattaacagcctgaaaaccgaggacacagccgtgtattactgtgccacacaccccccgcgttggggcagctggtacactggctatggtgtggacgtctggggccaagggaccacggtcaccgtctcctca

SEQ ID NO: 17629 - DNA, 289 bp, Homo sapiens
  source 1..289: mol_type = other DNA
tgcagcctctggattcacctttagagcctatgccatgtactgggtccgccaggctccagggaaggggctggagtgggtctcgtcagttggtggtgggggacgtaacacacagtactcagactccgtgaagggccggttcagcatctccagagacgattcgaagaacacattgtttctgcaaatgaacagcctgagagccgaggacacggccgtatattactgtgcgaagctagtgggcactaatactgaggacttttggggccagggaaccctggtcaccgtctcctca

SEQ ID NO: 17630 - DNA, 289 bp, Homo sapiens
  source 1..289: mol_type = other DNA
tgcagcctctggattcaccttcagtagatatgccatgtattgggtccgccaggctccagggagggggctggagtgggtctcaagtattcctgctagtggtggtggcacagactacgcagactccgtgaagggccggttcaccgtctccagagacaattccaagaacacggtgtatctgcaaatgagtagcctgagagccgaggacacggccgtatattactgtgcgaaattggtgggaactaacacagaggacttctggggccagggaaccctggtcgtcgtctcctca

SEQ ID NO: 17631 - DNA, 289 bp, Homo sapiens
  source 1..289: mol_type = other DNA
cactgtctctggtggctccatcagggattactattggacctggatccggcagcccccagggaagggactggagtggattgggtatatctataacagtgggagttccaactacaacccctccctcaagagtcgagtcaccatatcagttgacacgtccaagaaccagttctccctgaagctgacctctgtgaccgctgcggacacggccctgtattactgtgcgagagggaggatggtcacacgggactttgatttctggggccagggaaccctggtcaccgtctcctca

SEQ ID NO: 17632 - DNA, 289 bp, Homo sapiens
  source 1..289: mol_type = other DNA
cactgtctctggtggctccatcagggattactattggacctggatccggcagcccccagggaagggactggagtggattgggtatatctatcacagtggcagttctaactacaacccctccctcaagagtcgagtcaccatatcagttgacacttccaagaaccagttctccctgaagctgacctctgtgaccgctgcggacacggccctctattactgtgcgagagggaggatggtcacacgggactttgatttctggggccagggaaccctggtcaccgtctcctca

SEQ ID NO: 17633 - DNA, 289 bp, Homo sapiens
  source 1..289: mol_type = other DNA
cactgtctctggtggctccatcagggattactattggacctggatccggcagcccccagggaagggactggagtggattgggtatgtctataacagtggcagctccaactacaacccctccctcaagagtcgagtcaccatatcagttgacacgtccaagaaccagttctccctgaagatgatttctgtgaccgctgcggacgcggccctctattactgtgcgagagggaggatggtcacacgggactttgatttctggggccagggaaccctggtcaccgtctcctca

SEQ ID NO: 17634 - DNA, 276 bp, Homo sapiens
  source 1..276: mol_type = other DNA
gcttctggatacaccttcactaactatgctatgcattgggtgcgccaggcccccggacaacggcttgagtggttgggatggatcatcgctggcaatggtaacacaaaatattcacagaacttccagggcagaatcaccattaccagggacacatccgcgagcacaacctacatggagttgagcagcctgagatctgaggacacggctgtgtattactgtgcgaggaccggaagccttgacaactggggccagggaaccctggtcaccgtctcctca

SEQ ID NO: 17635 - DNA, 276 bp, Homo sapiens; identical to SEQ ID NO: 17634
  source 1..276: mol_type = other DNA

SEQ ID NO: 17636 - DNA, 276 bp, Homo sapiens
  source 1..276: mol_type = other DNA
gcttctggatacaccttcactaactatgctatgcattgggtgcgccaggcccccggacaacggcttgagtggttgggatggatcatcgctggcaatggtaacacaaaatattcacagaacttccagggcagaatcaccattaccagggacacatccgcgagcacaacctacatggagttgagcagcctgagatccgaggacacggctgtgtattactgtgcgaggaccggaagccttgacaactggggccagggaaccctggtcaccgtctcctca

SEQ ID NO: 17637 - DNA, 276 bp, Homo sapiens
  source 1..276: mol_type = other DNA
gcttctggatacagcttcactagctatcctttgcaatgggtgcgccaggcccccggacaaaggcctgagtggatgggctggatcaaccctggcaatggtaacacaaaatattcacagaagttccagggcagagtcaccattaccagggacacatccgcgagcacagtctacatggagttgagcagcctgagatctgaagacacggctgtgttttactgtgcgaggactgggagcctcgacaactggggccagggaacccaggtcaccgtctcctca

SEQ ID NO: 17638 - DNA, 292 bp, Homo sapiens
  source 1..292: mol_type = other DNA
tgcagcctctggattcacctttagcaactatgccatgaactgggtccgccaggctccagggaaggggctggagtgggtctcagatattagtactagcggtgttaacacacactacgcagactccgtgacgggccggttcaccatctccagagacaattccaagaacacgctgtatctgcaaatgaacagcctgagagccgaggacacggccgtatattactgtgcgaaacgggagagcagcagctggacttttgactactggggccagggaaccctggtcaccgtctcctca

SEQ ID NO: 17639 - DNA, 292 bp, Homo sapiens
  source 1..292: mol_type = other DNA
tgcagcctctggattcacctttagcagttgtgccatgggttgggtccgccaggccccagggaaggggctggagtgggtctcaggtattagtggtagtggtgctaacacatactacgcagactccgtgaagggccggttcaccatctccagagacaattccaaggacacgctggatctgcaaatgaacagcctgagagtcgaggacgcggccgtatattactgtgcgaaaagggagagcagcagctggacatttgactactggggccagggaaccctggtcaccgtctcctca

SEQ ID NO: 17640 - DNA, 301 bp, Homo sapiens
  source 1..301: mol_type = other DNA
tgcagcctctggattcacctttaccacctatgccatgagctgggtccgccaggctccagggaaggggctggagtgggtctcaaccattagtagtagtggtggtagtacatactacacagagtccgtgaagggccgcttcatcatctccagagacaattccaagagcacgctgcatctgcaaatgaacagcctgacagccgacgacacggccgtatattactgtgcgaaagatggtgaccacaggtactactacaacggtttcgacgtctggggcccagggaccacggtgaccgtctcctca

SEQ ID NO: 17641 - DNA, 301 bp, Homo sapiens
  source 1..301: mol_type = other DNA
tgcagcctctggattcacctttagcagctatgccatgagctgggtccgccaggctccagggaaggggctggagtgggtctcaactattagtagtagtggtagtagtacatactacgcagactccgtgaagggccggttcaccatctccagagacaattccaagagcacgctgcatctgcaaatgaacagcctgacagccgaggacacggccatatattactgtgcgaaagatggtgaccaccggtactactacaacggtttcgacgtctggggcccagggaccacggtcaccgtctcctca

SEQ ID NO: 17642 - DNA, 283 bp, Homo sapiens
  source 1..283: mol_type = other DNA
tgcagcctctggattcaccttcagtagctactggatggactgggtccgccaagctccagggaaggggctggtgtgggtctcacgtattaatagtgatgggagtaacacaatctacgcggactccgtgaagggccgattcaccatctccagagacaacgccaagaacacggtgtatctgcaaatgaacagtctcagagccgaggacacggctatgtattactgtacaagaggcgacaacgggttcgacccctggggccagggaaccctggtcaccgtctcctca

SEQ ID NO: 17643 - DNA, 283 bp, Homo sapiens; identical to SEQ ID NO: 17642
  source 1..283: mol_type = other DNA

SEQ ID NO: 17644 - DNA, 283 bp, Homo sapiens
  source 1..283: mol_type = other DNA
cgcagcctctggattcaccttcagcagctattggatgtactgggtccgccaagttccaggggagggactggtgtgggtctcacaaattgatgctgtcggccgtggtacaaactacgcggactccgtaaagggccgattcaccatctccagagacaacgccaagaacacggtgtatctgcaaatgaacagtctgcgagtcgaggacacggctgtatattactgtacaagaggagacaatggcttcgacccctggggccggggaaccctggtcagcgtctcctca

SEQ ID NO: 17645 - DNA, 271 bp, Homo sapiens
  source 1..271: mol_type = other DNA
tgcggcctctggattctcctttagcagctctaccatgtattgggtccgccaggctccagggaaggggctggagtgtgtctcaattatgagtggtagtggtagcagtacatcctacgcagactccgtgaagggccggttcaccatctccagagacaattccaagaatacgctgtttctgcaaatgaacagcctgagagccgaggacacggccgtatattactgtgcgaaaccggggggctggggccagggaaccctggtcaccgtctcctca

SEQ ID NO: 17646 - DNA, 271 bp, Homo sapiens
  source 1..271: mol_type = other DNA
tgcagcctctggattcacctttagcagctctgccatgagctgggtccgccaggctccaggaaaggggctggagtgggtctcagctattagtgatagtggtggtagcacatactacgcagactccgtgaggggccggttcaccatctccagagacaattccaagaacacgctgtatctgcaaatgaacagcctgagagccgaggatacggccgtatattactgtgccaaacccgggggctggggccagggaatcctggtcaccgtctcctca

SEQ ID NO: 17647 - DNA, 271 bp, Homo sapiens; identical to SEQ ID NO: 17646
  source 1..271: mol_type = other DNA

SEQ ID NO: 17648 - DNA, 283 bp, Homo sapiens
  source 1..283: mol_type = other DNA
tgcagcctctgggttcaccttcagtccctacacgatgcactgggtccgccaagatccagggaaggggctggtgtgggtctcacgtatttccagtgatgagactagaagctatgcggactccgtgaagggccgattcaccatctccagagacaacgccaagagcaccgtgtatctgcaaatgaacagtctgagagccgaggacacgtctatgtattactgtacaagaagtgtcgagaacggaatggacgtctggggccaagggaccacggtcaccgtctcctca

SEQ ID NO: 17649 - DNA, 286 bp, Homo sapiens
  source 1..286: mol_type = other DNA
tagcacctctggattcaccttcagtccctatacaatgcactgggtccgccaagctccaggaaaggggctggtgtgggtctcacgtattaacggtgctgggaatatcaaatcctacgcggactccgtgaggggccgactcaccatctccagagacaacgccaagagcactgtgtttctgcaaatgaatagtctgagagtcgaagacacgggtgtctactactgtacaagaagtgttgagaacggtatggacgtctggggccaagggaccacggtcaccgtctcctca

SEQ ID NO: 17650 - DNA, 286 bp, Homo sapiens
  source 1..286: mol_type = other DNA
cgctgtctatggtgggtccttcagtgattactactggggctggatccgccagtccccagggaaggggctggagtggattggggaaatccatcctagtggaagcaccgactacaacccgtccctcatgagtcgagtcaccatgtcagtagacacgtccaacaaccagttctccctgaagctgacctctgtgaccgccgcggacacggctgtctattactgtacgagaggccccgatagtaggaaacatggctactggggccagggaacgctggtcaccgtctcctca

SEQ ID NO: 17651 - DNA, 286 bp, Homo sapiens
  source 1..286: mol_type = other DNA
cgcggtctatggtgggtcttgcagtggatattattgtagctggatccgccagtccccagggaaggggctggagtggattggggagatcagtcaggttgaaggcatcaggtacaatccgtccctcaacaatcgagtcaccatatcactagactcgtcacagagccaaatctccctgaacctgaactccgtgtccgccgcggacacggctgtctattattgtacgagaggcccggacagcaggaagcacggctactggggccagggaactctggtcaccgtctcctca

SEQ ID NO: 17652 - DNA, 277 bp, Homo sapiens
  source 1..277: mol_type = other DNA
tgcagcctctggattcccctttagtagcttttcgatgagctgggtccgccgggctccagggaaggggctggagtgggtggccaacataaaacaagatggaagtgagaaatactatgtggactctgtgaagggccgattcaccatctccagagacaacgccaagagctcactgtatctgcaaatgaacagcctgagagccgaggacacggctctgtattactgtgcgagaggtcgggcagcgatctggggccaagggacaatggtcaccgtctcttca

SEQ ID NO: 17653 - DNA, 277 bp, Homo sapiens
  source 1..277: mol_type = other DNA
tgcagcctctggactcacctttagtaactattggatgagctgggtccgcctgactccagggaaggggctggagtgggtggccaacataaaacaagatggaagtgagaaaaactatgtggactctgtgaggggccgattcaccatctccagagacaacgccaagaactcactgtatctgcaaatgaacagcctgagagtcgaggacacgtctgtttattattgtgcgagagggagggcggccatctggggccaagggacaatggtcaccgtctcttca

SEQ ID NO: 17654 - DNA, 289 bp, Homo sapiens
  source 1..289: mol_type = other DNA
tgcagcctctggattcactttcagtaacgcctggatgagctgggtccgccaggctccagggaaggggctggagtgggttggccgtattaaaagtagaactgatggtggggcaacagactacgctacacccgtgaaaggcagattcaccatctcaagagatgattcaaaaaacacgctgtatttgcaaatgaacagcctgaaaatcgaggacacagccgtgtattattgtgccacaatatggttcggggagcaagactggggccagggaaccctggtcaccgtctcctca

SEQ ID NO: 17655 - DNA, 289 bp, Homo sapiens
  source 1..289: mol_type = other DNA
tgcagcctctggattcactttcagtaacgcctggatgagctgggtccgccaggctccagggaacgggctggagtgggttggccttattaaaagcaaaactgatggtgggacaacagactacgctgcacccgtgaaaggcagattcaccatctcaagagatgatacaaaaaacacgctgtatctgcaaatgaacagcctgaaaaccgaggacacagccgtgtattactgtgccacaatatggttcggggagcaagactggggccagggaaccctggtcaccgtctcctca

SEQ ID NO: 17656 - DNA, 288 bp, Homo sapiens
  source 1..288: mol_type = other DNA
tgcagcctctggattcactttcagtaacgcctggatgagctgggtccgccaggctccagggaacgggctggagtgggttggccttattaaaagcaaaactgatggtgggacaacagactacgctgcacccgtgaaaggcagattcaccatctcaagagatgatacaaaaaacacgctgtatctgcaaatgaacagcctgaaaaccgaggacacagccgtgtattactgtgccacaatatggttcggggagcaagactggggccagggaaccctgtcaccgtctcctca

SEQ ID NO: 17657 - DNA, 295 bp, Homo sapiens
  source 1..295: mol_type = other DNA
tggagcctctggatacagcttcagtacctatgccattaactgggtccgccaggctccagggaaggggctggagtgggtctcctcaattagtgctactggtactttcatatactacgcagacttggtgcagggccgattcaccatctccagagacaacgccaagaactccctgtatctgcaaatggacaacctgagagccgaggacacggctgtttattactgtgcgagaggaaacggtaactacaggtactactttgactactggggccagggaaccccggtcaccgtctcctca

SEQ ID NO: 17658 - DNA, 295 bp, Homo sapiens
  source 1..295: mol_type = other DNA
tgcagcctctggattcaccttcagtaactatggcatgaactggatccgccagactccagggaaggggctggagtggatctcatccgttactagtagtagcgcttacacatattacatagattcagtgaagggccgattcaccgtctccagagacaacgccaagaactcactgtatctgcaaatggacagcctgagagtcgaggacacggctgtgtattattgtgcgagaggcaatggaaattaccggtattactttgactactggggccagggaaccctggtcaccgtctcctca

SEQ ID NO: 17659 - DNA, 283 bp, Homo sapiens
  source 1..283: mol_type = other DNA
tgcagcctctggattcaccttcaataactactggatgcactgggtccgccaacctccagggaaggggctggtgtgggtctcacgtattaataatgatggaagtagcacaaactacgcggactccgtgaagggccgattcaccatctccagagacaacgccaagaacacgctgtatctgcaaatgaacagtctgagagccgaggatatggctgtatattactgtgcaagaggccgagtgggagctacccactggggccagggaaccctggtcaccgtctcctca

SEQ ID NO: 17660 - DNA, 283 bp, Homo sapiens
  source 1..283: mol_type = other DNA
tgcagcctctggtttcaccttcagttcctactggatgcactgggtccgccaagctccagggaaggggctggtgtgggtctcacgtattaatactgatgggagtagcacaaactacgcggactccgtgaagggccgattcaccatctccagagacaacgccaagaacacgctgtatttgcaaatgaacagtctgagagccgaggacacggctgtgtattactgtgcaagagggagagtgggagctactcattggggccagggaaccctggtcaccgtctcctca

SEQ ID NO: 17661 - DNA, 286 bp, Homo sapiens
  source 1..286: mol_type = other DNA
cgcagcctctggattcacctttagcagttatgccatgagttgggtccgccaggctccagggaagggactggagtgggtctcagttatttttagtgctggcagcacgacacactatgcagactccgtgaagggccggttcaccatctccagagacaattccaggaacatactgtatctgcaaatggacagcctgagagtcgaggacacggccatatattactgtgcgagagatcatattgggcgagagggctactggggccagggaaccccggtcaccgtctcctca

SEQ ID NO: 17662 - DNA, 286 bp, Homo sapiens
  source 1..286: mol_type = other DNA
tgcagcctctggattcacctttagcagttatgccatgagctgggttcgccaggctccagggaagggactggagtgggtctcaactatttttagtgctggtagtagtacatactatgcagactccgtgaagggccggttcaccatctccagagataattccaagaacacactctttctgcaaatgaacagcctgagagccgacgacacggccgtatattactgtgcgagagatcatatcggtcgggaggggtactggggccagggaactcttgtcaccgtctcctca

SEQ ID NO: 17663 - DNA, 286 bp, Homo sapiens; identical to SEQ ID NO: 17662
  source 1..286: mol_type = other DNA

SEQ ID NO: 17664 - DNA, 286 bp, Homo sapiens; identical to SEQ ID NO: 17662
  source 1..286: mol_type = other DNA

SEQ ID NO: 17665 - DNA, 280 bp, Homo sapiens
  source 1..280: mol_type = other DNA
tgcagcctctggattcacatttaccacctatgccatgagctgggtccgccaggctccagggaaggggctggagtgggtcgcagttatttttggctccaccacacactatgcagactccgtgaagggccggttcaccatctccagagatgattccaagaacactctgtatctgcaaatgaacagcctgagagccgaggacacggccctatatttttgtgcgagagatcatattgggcgagagggctactggggcctgggaaccctggtcaccgtctcctca

SEQ ID NO: 17666 - DNA, 283 bp, Homo sapiens
  source 1..283: mol_type = other DNA
tgcagtgtctggattgagtttcagcaccattggcatgcactgggtccgccaggctccaggcaaggggctggagtgggtggcagttatatggtttgatggaaagaagaagttctatgcagactccgtgaagggccgattcaccatctccagggacaactccaacaagaccctttaccttcaaatgaacagcctgagagccgaggacacgggtatctattactgtgcgcgagatcgtgaacgcatggacgtctggggccaagggaccacggtcaccgtctcttca

SEQ ID NO: 17667 - DNA, 283 bp, Homo sapiens
  source 1..283: mol_type = other DNA
tgcagtgtctggattgagtttcagcaccattggcatgcactgggtccgccaggctccaggcaaggggctggagtgggtggcagttatatggtttgatggaaagaagaagttctatgcagactccgtgaagggccgattcaccatctccagggacaactccaacaagaccctttaccttcaaatgaacagcctgagagccgaggacacgggtgtctattactgtgcgagagatcgtgaacgcatggacgtctggggccaagggaccacggtcaccgtctcttca

SEQ ID NO: 17668 - DNA, 283 bp, Homo sapiens
  source 1..283: mol_type = other DNA
tgcagcgtctggattcagtttcagaacgattggcatgcactgggtccgccaggctccaggcaaggggctggagtgggtggcagttatatggtttgatggaagttataaatactatgcagactccgtgaagggccgattcaccatctccagagacaattccaacaacactctgtatctgcaaatgaacagcctgagagccgaggacacggctgtctattactgtgcgagagatcgggagcgaatggacgtctggggccaagggaccacagtcaccgtctcctca

SEQ ID NO: 17669 - DNA, 289 bp, Homo sapiens
  source 1..289: mol_type = other DNA
cactgtctctggcgactccatcagtagtcactactggagttggatccggcagtccccagggaagagactggaatggattggatatatccaaaagggtgggatcaccaactacaacccctccctcaggagtcgagtcaccacatcagtagacacgtccaagaatgacttttccctgacgctggactctgtgaccgccgcagacacgggcgtgtattactgtgcgatggacacacatagcaacagccggtttgaccactggggccagggaatcctggtcatcgtctcctca

SEQ ID NO: 17670 - DNA, 289 bp, Homo sapiens
  source 1..289: mol_type = other DNA
cactgtgtctggtgactccatcaacacttactactggagctggatccggcaaccccccgggaagggactggagtggattggctacatctattacactgggagcaccgactacaacccctccctcaggagtcgagtcaccatgtcattagacacggccaagaaccagttctccctgaggctgacctctgtgaccgccgcagacacggccatctattactgtgcgatggacacacatagcaatagtcgatttgaccactggggccagggaaccctggtcaccgtctcctca

SEQ ID NO: 17671 - DNA, 289 bp, Homo sapiens
  source 1..289: mol_type = other DNA
tgtagtctctggaatcaagtttcatgatcatgccatgcactgggtccggcaagttccagggaagggcctggagtgggtctcaggtatttttttgaggaatggtgaaacaggctatgcggactctgtgaagggccgattcaccgtctccagagataacgccaaggactccctgtatttggaaatgaatagtctgagagttgaggacacggccttctattattgtatcaaagatgtgtctcccgggggtgctgactactggggccagggaacgcttgtcaccgtctcgtca

SEQ ID NO: 17672 - DNA, 289 bp, Homo sapiens
  source 1..289: mol_type = other DNA
tgtaggctctgaattcaggtctaatgaacatgccatgcactgggtccggcaagctccaggaaagggcctggagtgggtctcaggctttatgtgggatagagttaggataggctatgcggactctgtgaagggccgattcaccatctccagagacgacgccaagaagtccctgtatctgcaaatgaacaatctgagacctgaagacacggccttatatttttgtataaaagatgtgagtcccggaggagccgactattggggccagggaatccaggtcaccgtctcctca

SEQ ID NO: 17673 - DNA, 285 bp, Homo sapiens
  source 1..285: mol_type = other DNA
gcatctggatacaccttcaccaactactatatgcactgggtgcgacaggcccctggacaagggcttgagtggctgggaataatcatccctagtggtggtagcacaaactacgcacagaagttccagggcagagtcaccatgaccagggacacgtccacgagcacagtctacatggaactgaccagcctgagatctgaagacacggccgtgtattactgtgcgagggagatggtcgggggatactttgactactggggccagggaacactggtcaccgtctcctca

SEQ ID NO: 17674 - DNA, 285 bp, Homo sapiens
  source 1..285: mol_type = other DNA
gcatctggatacaccttcaccagttactatatacactgggtgcgacaggcccctggacaagggcttgagtggatgggaataatcatccctgctggaggtagcacaaactacgcacagagcttccagggcagactcaccatgacaagtgacacgtccacgagtacagtctccatggaattgaccagcctgagatctgaggatacggccatatattactgcgcgagagaaatggtggggggatactttgactactggggccagggagccctggtcaccgtctcctcc

SEQ ID NO: 17675 - DNA, 289 bp, Homo sapiens
  source 1..289: mol_type = other DNA
tgcagcctctgggttcaccgtcagtagcaactacatgagctgggtccgccaggctccagggaaggggctggagtgggtctcagttatttctagcggtggtagcacatactacgcagactccgtgaagggccgattcaccatctccagacacaattccaagaacacgctatatcttcaaatgaacagcctgagagctgaggacacggccgtatattactgtgcgagagaccctccgtatagcagtggctggtccgactggggccagggaaccctggtcaccgtctcctca

SEQ ID NO: 17676 - DNA, 289 bp, Homo sapiens
  source 1..289: mol_type = other DNA
tgcagcctctgggttcaccgtcagtagcaactacatgagctgggtccgccaggctccagggaaggggctggagtgggtctcagttatttatagcggtggtagcacatactacgcagactctgtgaagggccgattcaccatctccagagacaattccaagaacacggtgtatcttcaaatgaacagtctgagagtcgaggacacggccgtgtattactgtgcgagagatcccccctatagcagtggctggagcgactggggccagggaaccctggtcaccgtctcctca

SEQ ID NO: 17677 - DNA, 307 bp, Homo sapiens
  source 1..307: mol_type = other DNA
tgcagcctctggactcacctttagcagtaatgccctgagctgggtccgccaggctccagggatgggactggaatgggtctcagaaattagtggtagtggtggtaacacaaactacgcagactccgtgaagggccggttcaccatctccagagacaattccaagaacacggtgtatctccaaatgaacatcctgagagccgaggacacggccgtctattactgtgcgaaattttacactcgatcctccgtcgactactactacttcatggacgtctggggcaaagggaccacggtcaccgtctcctca

SEQ ID NO: 17678 - DNA, 307 bp, Homo sapiens
  source 1..307: mol_type = other DNA
tgcagcctctggactcacctttagcagtaatgccatgagctgggtccgccaggctccagggaaggggctggagtgggtctcagaaattagtggtagtggtggtaacacaaactacgcaggctccgtgaagggccggttcaccatctccagagacaattccaagaacacggtgtatctgcaaatgaacatcctgagagccgaggacacggccgtatattactgtgcgaaattttacactcgatcctccgtcgactactactacttcatggacgtctggggcaaagggaccacggtcaccgtctcctca

SEQ ID NO: 17679 - DNA, 277 bp, Homo sapiens
  source 1..277: mol_type = other DNA
tgcagcctctggattcactttcaggagttatgagatgagttgggtccgccaggctccagggaaggggctggagtgggtttcatatatcagtggcagtggaggaaccatacattatgcagactctgtgaagggccgattcaccatttccagagacaacgccaagaactcactgtatctacaaatgaacagcctgagagtcgaggacacggctgtttattattgtgcgagaagaactattgactactggggccagggaaccctggtcaccgtctcctca

SEQ ID NO: 17680 - DNA, 277 bp, Homo sapiens
  source 1..277: mol_type = other DNA
tgcagcctctggattcagtttcaggagttatgagatgagttgggtccgccaggctccagggaaggggctggagtgggtttcatatatcagtggcagtggaggaaccatacattatgcagactctgtgaagggccgattcaccatttccagagacaacgccaagaactcactgtatctacaaatgaacagcctgagagccgaggacacggctgtttattactgtgcgagaagaactattgactactggggccagggaaccctggtcaccgtctcctca

SEQ ID NO: 17681 - DNA, 277 bp, Homo sapiens
  source 1..277: mol_type = other DNA
tgtaggttctggcttcactttcagaagttatgaaatgagttgggtccgccaggctccaggaaaggggctggagtggatttcatacatcagtggtagtgggggaacgattcattatgcggactctgtgaagggccgattcaccatctccagggacaacgccgagaattcagtgtatctgcaaatgaacagcctgagagtcgaggacacggctgtctatttctgtgcgagaaggactattgactactggggccagggaaccctggtcatcgtctcctca

SEQ ID NO: 17682 - DNA, 286 bp, Homo sapiens
  source 1..286: mol_type = other DNA
cactgtctctagtggctccatcggtagttactactggagctggatccggcagcccccagggaagggactggagtggattgggtatatctattacagtgggagcaccaactacaacccctccctcaagagtcgagtcaccatatcagtagacacgtccacgaaccagttctccctgaagctgagctctgtgaccgccgcagacacggccgtgtattactgtgcgagacgccgctcatacggctaccttgactactggggccagggaaccctggtcaccgtctcctca

SEQ ID NO: 17683 - DNA, 286 bp, Homo sapiens
  source 1..286: mol_type = other DNA
cactgtctctggtgactccatcagtagttactactggaactggatccggcagcccccagggaagggactggagtggattgggtatatctattacactgggagcaccaactacaacccctccctcaagagtcgagtcaccatatcattagacacgtccaagaaccagttctccctgaagctgagctctgtgaccgccgcagacacggccgtgtattactgtgcgagacggcgcagttatggttacctggactactggggccagggaaccctggtcaccgtctcctca

SEQ ID NO: 17684 - DNA, 289 bp, Homo sapiens
  source 1..289: mol_type = other DNA
tgtagcctctgaattcaccttcagtagttatgaaatgaactgggtccgccaggctccagggaaggggctggagtgggtttcatacattagtagtagtggtagtaccacatactacgcagactctgtgaagggccaattcaccatctccagagacaacgccaagaactcactgtatctgcaaatgaacagcctgagagccgaggacacggctgtttattactgtgcgagagatctatcaggctacggtatggacgtctggggccaggggaccacggtcaccgtctcctca

SEQ ID NO: 17685 - DNA, 289 bp, Homo sapiens
  source 1..289: mol_type = other DNA
tgcaggctctggattcaccttcagtaaccatgcgatggactgggtccgccaggctccagggaaggggctggagtgggtttcatacattagtggaaataagaaggccatatactacgcagactctgtgaagggccgattcaccatctccagagacaatgccaagaactcactgaatctgcaaatgaacagcctgagagacgaggacacggctgtgtattactgcgcgagagatttgtccggttacggtatggacgtctggggccaagggaccacggtcaccgtctcctca

SEQ ID NO: 17686 - DNA, 292 bp, Homo sapiens
  source 1..292: mol_type = other DNA
tgcagcctctgcagtcgccctcaatggttttccaatgaactgggtccgccagactccagggaaggggcttgagtggatttcatacattagtaatagtggcagtaccatatactacgcagactctgtgaagggccgattcaccatctccagagacaacgccaagaattcactgtatatgcaaatgaacagcctgagagccgaggatacggctgtttattactgtgcgagaggcctcggactgggtcattactttgagtcctggggccaggggaccctggtcaccgtctcctca

SEQ ID NO: 17687 - DNA, 295 bp, Homo sapiens
  source 1..295: mol_type = other DNA
tgcagcctctggattcatcttcaataactttccaataaattgggtccgccaggctccagggaaggggctggagtggatttcatacatcagtcgtgatagtggcagtaccatatattacgcagactctgtgaagggccgattcaccatctccagagacaacgccaagaacgcattgtatctgcaaatgaacagcctgagagtcgaggacacggctgtttactattgtgcgagaggcctgggcctagggcactactttgagtcttggggccagggaaccccggtcaccgtctcctca

SEQ ID NO: 17688 - DNA, 292 bp, Homo sapiens
  source 1..292: mol_type = other DNA
tgcagcctctggattcagtttcagtgtctctgctatgcactgggtccgccaggctccaggcaaggggctggagtgggtgtcagttatgtcatttgatggaaataatatatactacgcagactccgtgaagggccgattcaccatctccagagacaattccaagaacacgctgtatctgcaaatgaacagcctgagagctgaggacacggctgtgtattactgtgcgagagatttaaggaaactacgatactttgactggtggggccagggaaccctggtcaccgtctcctca

SEQ ID NO: 17689 - DNA, 292 bp, Homo sapiens
  source 1..292: mol_type = other DNA
tgcagcctctggattcaccttcagtggctctgctatgcactgggtccgccaggctccaggcaaggggctggaatggctgacagttatgtcatatgatggaaataatatatactacgcggacgccgtgaagggccgattcaccatctccagagacaattccaaaaatacgctgtttctacaactgaccagcctgagacctgacgacacggctttctattattgtgcgagagaccttcgtaaattacgatattttgactggtggggccagggaaccctggtcaccgtctcctcg

SEQ ID NO: 17690 - DNA, 286 bp, Homo sapiens
  source 1..286: mol_type = other DNA
tgcagcctctggattcagcattagtccttatgccatcacctgggtccgccacgatccagggaaggggctggagtgggtctccattatttggagtaatggtaagacctactatgcagagtccgcgaagggccggttcaccatctccagagataattcgaagaacatagtgaatctggaaatgaccagcctgagagccgaagacacggccgtgtattattgtggctcagggagttatgcttcgggctttgagtatcggggccagggaacccaggtcatcgtctcctca

SEQ ID NO: 17691 - DNA, 286 bp, Homo sapiens
  source 1..286: mol_type = other DNA
tgcagcctctggattcagcattagtccttatgccatcacctgggtccgccacgatccagggaaggggctggagtgggtctccattatttggagtaatggtaagacctactatgcagagtccgcgaagggccggttcaccatctccagagataattcgaagaacatagtgtatctggaaatgagcagcctgagagccgaagacacggccgtgtattattgtggctcagggagttatgcttcgggctttgagtattggggccagggaacccaggtcatcgtctcctca

SEQ ID NO: 17692 - DNA, 292 bp, Homo sapiens
  source 1..292: mol_type = other DNA
cactgtctctagtgactccatcagtagttactcctggagttggatccggcagcccgccgggaagggactggagtggattgggcgtgtctatgccagtgggagccccaactacaacccctccctcaagagtcgagtcaccatgtcagtagagacgtccaagaaccaggtctccctgaatctgaactctgtgaccgccgcggacacggccgtctattactgtgcgagagtgtctgccataacactggctggttttgactactggggccagggaatggtggtcaccgtctcctca

SEQ ID NO: 17693 - DNA, 292 bp, Homo sapiens
  source 1..292: mol_type = other DNA
caatgtctctagtgtctccatgaatagttattcctggagctggatccggcagcccgccgggaagggactggagtggattgggcgtgtctataccagagggagccccaactacaatccctccctcaggagtcgagtcgccatgtcagtagacatgtccaagaaccaggtctccctgacgctgacctctgtgaccgccgcggacacggccgtgtattactgtgcgagagtttcggccataactttggctggttttgactattggggccagggaaccccggtcaccgtctcctca

SEQ ID NO: 17694 - DNA, 310 bp, Homo sapiens
  source 1..310: mol_type = other DNA
tgcaggctctggtttcaccttcagtagttatgctctgcattgggtccgccaccctccaggcaagggtctggagtgggtggcaattatatcatctattggaaataatcaatactacgcagactccgtgaagggccgattcaccatctccagagacaaccccaggaagaccttttatctggaaatgaacagattgagagttgaggacacggcggtgtattactgtgcgagagaggaccaacattactacggttcgggctattactacgctatggacgtctggggccaagggaccacggtcaccgtctcctca

SEQ ID NO: 17695 - DNA, 310 bp, Homo sapiens
  source 1..310: mol_type = other DNA
ttcaggctctgggttcaccttcagcagttatgctatgcactgggtccgccaggctccaggcaaggggctggaatgggtcacagttatctcatatgatggacgtaatatatattacgcagactccgtgaagggccgattcaccatttccagagacaattccaagaacatgcagtctctgcatatggatagcctgagacctgaggacacggctatttattactgtgcgagagaggatcagcattactatggttcgggttactattacgccatggacgtctggggcccagggacaacggtcaccgtctccccc

SEQ ID NO: 17696 - DNA, 289 bp, Homo sapiens
  source 1..289: mol_type = other DNA
cactgtctctggtgcctccatcagtagttactactggagctggatccggcagcccccagggaagggactggagtggattgggtatatctattacggtgggagcaccaactacaacccctccctcaagagtcgagtcaccatatcactagacacgtccaagaaccagttctccctgcagctgagctctgtgaccgccgcagacacggccgtgtattactgtgcgagacagggggagagaggtggcccccccgactactggggccagggaaccctggtcaccgtctcctca

SEQ ID NO: 17697 - DNA, 289 bp, Homo sapiens
  source 1..289: mol_type = other DNA
cactgtctctggtgcctccatcagtagttactactggagctggatccggcagcccccagggaagggactggagtggattgggtttatctattaccgtgggagcaccaactacaacccctccctcaagagtcgagtcaccatatcactagacacgtccaagaaccagttctccctgcagctgagctctgtgaccgccgcagacacggccgtgtattactgtgcgagacagggggagagaggtggcccccccgactactggggccagggaaccctggtcaccgtctcctca

SEQ ID NO: 17698 - DNA, 289 bp, Homo sapiens
  source 1..289: mol_type = other DNA
cactgtctctggtgcctccatcagtagttactactggagctggatccggcagcccccagggaagggactggagtggattgggtatatctattacggtgggagcaccaactacaacccctccctcaagagtcgagtcaccatatcactagacacgtccaagaaccagttctccctgcaactgagctctgtgaccgccgcagacacggccgtgtattactgtgcgagacagggggagagaggtggcccccccgactactggggccagggaaccctggtcaccgtctcctca

SEQ ID NO: 17699 - DNA, 292 bp, Homo sapiens
  source 1..292: mol_type = other DNA
tgcagcctctgggttcacctttagcaactatgccatgagctgggtccgccaggctccagggcgggggctggagtgggtctcaattatttatagcgctggtactagcacatactatgcagactccgtgaagggccggttcaccgtctccagagataattccaagaacacactttatctgcaaatgaacaacctgagagccgaggacgcggccgtttattactgtgcgaaaccgagaaacaccgatgatgcttttgatatttggggccaagggacactggtcaccgtctcttca

SEQ ID NO: 17700 - DNA, 292 bp, Homo sapiens
  source 1..292: mol_type = other DNA
tgcagcctctggattcccctttagcgactatgccatgagttgggtccgccaggctccagggaaggggctggagtgggtctcaatcatttatagcgctggaagtagcacatactatgcagactccgtgaagggccggttcaccatctccagagataattccaagaacacgctgtatctgcaaatgaacagcctgagagccgaagacacggccgtatattactgtgcgaaaccgaggaacaccgatgatgcttttgatatctggggccaagggacagtggtcaccgtctcttca

SEQ ID NO: 17701 - DNA, 289 bp, Homo sapiens
  source 1..289: mol_type = other DNA
tgcagcctctgggttcgccactagtgactattacatgagttgggtccgccaggctccagggaaggggctggagtgggtggccaacataaggcaagatggaggtgagacatattatgtggactctgtgaagggccgattcaccatctctagagacaacgccgagaactcactgtatctgcaaatggacggcctgacagccgaggacacggctttgtattactgtgcgagagaaaggccgggccgttactttgactactggggccagggaatcctggtcaccgtctcctca

SEQ ID NO: 17702 - DNA, 289 bp, Homo sapiens; identical to SEQ ID NO: 17701
  source 1..289: mol_type = other DNA

SEQ ID NO: 17703 - DNA, 289 bp, Homo sapiens
  source 1..289: mol_type = other DNA
tgcagcctctgggttcgccactagtgactattacatgagttgggtccgccaggctccagggaaggggctggagtgggtggccaacataaggcaagatggaggtgagacatattatgtggactctgtgaagggccggttcaccatctctagagacaacgccgagaactcactgtatctgcaaatggacggcctgacagccgaggacacggctttgtattactgtgcgagagaaaggccgggccgttactttgactactggggccagggaatcctggtcaccgtctcctca

SEQ ID NO: 17704 - DNA, 289 bp, Homo sapiens; identical to SEQ ID NO: 17701
  source 1..289: mol_type = other DNA

SEQ ID NO: 17705 - DNA, 289 bp, Homo sapiens
  source 1..289: mol_type = other DNA
tgcagcctctgggttcgccactagtgactattacatgagttgggtccgccaggctccagggaaggggctggagtgggtggccaacataaggcaagatggaggtgagacatattatgtgggctctgtgaagggccgattcaccatctctagagacaacgccgagaactcactgtatctgcaaatggacggcctgacagccgaggacacggctttgtattactgtgcgagagaaaggccgggccgttactttgactactggggccagggaatcctggtcaccgtctcctca

SEQ ID NO: 17706 - DNA, 287 bp, Homo sapiens
  source 1..287: mol_type = other DNA
cagcctctgggttcgccactagtgactattacatgagttgggtccgccaggctccagggaaggggctggagtgggtggccaacataaggcaagatggaggtgagacatattatgtggactctgtgaagggccgattcaccatctctagagacaacgccgagaactcactgtatctgcaaatggacggcctgacagccgaggacacggctttgtattactgtgcgagagaaaggccgggccgttactttgactactggggccagggaatcctggtcaccgtctcctca

SEQ ID NO: 17707 - DNA, 289 bp, Homo sapiens
  source 1..289: mol_type = other DNA
tgcagcctctgggttcgccgctagtgactattacatgagttgggtccgccaggctccagggaaggggctggagtgggtggccaacataaggcaagatggaggtgagacatattatgtggactctgtgaagggccgattcaccatctctagagacaacgccgagaactcactgtatctgcaaatggacggcctgacagccgaggacacggctttgtattactgtgcgagagaaaggccgggccgttactttgactactggggccagggaatcctggtcaccgtctcctca

SEQ ID NO: 17708 - DNA, 289 bp, Homo sapiens
  source 1..289: mol_type = other DNA
tgcagcctctggattcatctttagaagtctttggatggcctgggtccgccaggctccagggaaggggctggagtgggtggccatgataaaggaagacggaagtgagaaatactatgtggactctgtgaagggccgattcaccatctccagagacaacgccaagaattcactatacttgcaaatgagcagcctgcgagtcgaggacacggctgtgtatttctgtgcgagagagagacccggacgttattttgactactggggccagggaatccaggtcaccgtctcctca

SEQ ID NO: 17709 - DNA, 286 bp, Homo sapiens
  source 1..286: mol_type = other DNA
tgtggcctctggattcacctttcctagtcattggatgggctgggtccgccgggctccagggaaggggctggagtgggtggccgacatcaagacagatggaagtgagaaatcctatgtggactctgtcaagggccgattcaccatctccagagacaacgccaggaactcactgtttctgcaaatgaacagcctgagagccgaggacacggctgtgtatttctgtgcgagagattacttccgatcttatgactactggggccagggaaccctggtcaccgtctcctca

SEQ ID NO: 17710 - DNA, 286 bp, Homo sapiens
  source 1..286: mol_type = other DNA
tgtggcctctggattcacctttcctagtcattggatgggctgggtccgccgggctccagggaaggggctggagtgggtagccgacatcaagacagatggaagtgagaaatcctatgtggactctgtcaagggccgattcaccatctccagagacaacgccaggaactcactgtttctgcaaatgaacagcctgagagccgaggacacggctgtgtatttctgtgcgagagattacttccgatcttatgactactggggccagggaaccctggtcaccgtctcctca

SEQ ID NO: 17711 - DNA, 286 bp, Homo sapiens
  source 1..286: mol_type = other DNA
tgcagcctctggattcagctttagtgactcttggatgcactgggtccgccaggctccagggaaggggctggagtgggtggcccaaataaagccagatggaagtgagcaatcctatgtggactctgtgaagggccgattcaccatctccagagacaacgccaagaactcactgtatctccagatgaacagcctgagagccgaggacgcggctgtgtattactgtgcgagagactatttccgatcctatgactactggggccagggaaccctggtcaccgtctcctca

SEQ ID NO: 17712 - DNA, 277 bp, Homo sapiens
  source 1..277: mol_type = other DNA
tgcagcctctggattcacctttagtagctattggatgagctgggtccgccagactccagggaaggggctggagtgggtggccaacataaaggaagatggaagtgacaaatactatgtggactctgtgaagggccgattcaccatctccagagacaacgccaagaactcactgtatctgcaaatgaatagcctgagagccgaggacacggctgtatattactgtgcgagatccaaatttgactactggggccagggaaccctggtcaccgtctcctca

SEQ ID NO: 17713 - DNA, 277 bp, Homo sapiens
  source 1..277: mol_type = other DNA
tgcagcctctggattcacctttaatagctattggatgagctgggtccgccaggctccagggaaggggctggagtgggtggccaacataaagcaagatggcagtgagaaatactatgtggactctgtgaagggccgattcaccatctccagagacaacgccaagaactcactgtatctgcaaatgaacagcctgagagccgaggacacggctgtgtattactgtgcgagaagcaaatttgactactggggccagggaaccctggtcaccgtctcctca

SEQ ID NO: 17714 - DNA, 286 bp, Homo sapiens
  source 1..286: mol_type = other DNA
tgcagcctctggattcacattcagtaattactggatgacgtgggcccgccaggctccagggaaggggctggagtgcgtggccagtttaaatcaagctgggagtgacaagtactatgtggactctgtgaagggccgattcaccatttccagagacaacgccgagaatttactgtatctgcagttgaacagcctgagagtcgaggacacggctgtctactactgtgcgagagctgcctggtcctctgttgactactggggcctgggaaccctggtcaccgtctcctca

SEQ ID NO: 17715 - DNA, 286 bp, Homo sapiens
  source 1..286: mol_type = other DNA
tgcagcctctggattcacctttagtacctattggatgagttgggtccgccaggctccagagaggggtctggagtgggtggccaacataaacaaagagggaagtgcgaaacactatgtggactctgtgaagggccgattcaccatctccagagacaacgccaagaactcactgtatctgcaaatgaacagcctgagagccgaggacacggctgtgtatttctgtgcgagggcggcctggtcgtccgttgactactggggccagggaaccctggtcaccgtctcctca

SEQ ID NO: 17716 - DNA, 289 bp, Homo sapiens
  source 1..289: mol_type = other DNA
cactgtctctggtgcctcctttagtagttactactggagctggatccggcagcccccagggaagggactggagtggattggatatttccattacagtgggagcaccaagtacaacccctccctcaagagtcgagtcgccatatcagtagacacgtccaagaaccagttctccctgaagttgacctctgtgacagccgcagacacggccgtgtattactgtgccagaagtgtgggactggggaactactttgactactggggccagggaaatgtggtcaccgtctcctca

SEQ ID NO: 17717 - DNA, 289 bp, Homo sapiens
  source 1..289: mol_type = other DNA
cactgtctctggtggctccatcagtagttactactggaactggatccggcagcccccagggaagggactggagtggattgggtatactcattacagtgggaggaccaactacaacccctccctcaagagtcgagtcaccatatcaatggacacgtccaagaaccagttctccctgaagctgacctctgtgaccgctgcggacacggccgtgtatttctgtgcgagaagtgtcggccttgggaactactttgactactggggccagggaaccctggtcaccgtctcccca

SEQ ID NO: 17718 - DNA, 286 bp, Homo sapiens
  source 1..286: mol_type = other DNA
cactgtgtctggtgggtccctcagcatttactactggagctgggtccggcagcccgccggcaagggactggagtggattgggcgtatctataatactgggagcaccaactccaacccctccctcaagagtcgagtcaccatatcagtagacaagtccaagaatcagttctccctgaggctgacctctgtgaccgccgcggacacggccgtgtattactgtgcgagaagttttgacgaaaaagcttttgatatctggggcgcagggacagtggtcaccgtctcttca

SEQ ID NO: 17719 - DNA, 286 bp, Homo sapiens
  source 1..286: mol_type = other DNA
cactgtgtctggtggctccctcagtatttattactggagctgggtccggcagcccgccgggaagggactggagtggattgggcgtatctatagtactgggagcaccaactccaacccctccctcaagagtcgagtcaccatatcagtagacaagtccaagaatcagttctccctgaggctgagctctgtgaccgccgcggacacggccgtgtatttctgtgcgagaagttttgacgaaaaagcttttgatatctggggcgaagggacagtggtcaccgtctcttca

SEQ ID NO: 17720 - DNA, 286 bp, Homo sapiens
  source 1..286: mol_type = other DNA
cactgtctctggtggctccatcagtggttactactggagctggatccggcagcccgccgggaagggactggagtggattgggcgtatctataccagtgggaacaccaattacaacccctccctcaagagtcgagtcaccatgtcagtagacacgtccaagaaccagttctccctgaaacttagctctgtgaccgccgcggacacggccgtgtattcctgtgcgaggtcgttcgatgaaaaagcttttgatatctggggccaagggacaatggtcaccgtctcttca

SEQ ID NO: 17721 - DNA, 289 bp, Homo sapiens
  source 1..289: mol_type = other DNA
tgcagcctctagattcaccttcagtgactactacatgacctggatccgccaggctccagggaaggggctggagtgggtttcatacattagtagtagtggtggtaccatatactacgcagactctgtgaagggccgattcaccgtctccagggacaacgccaagaactcactgtatctgcaaatgaacagcctgagagccgaggacacggccgtgtattactgtgcgagagcagtggctgggtggtacttcgatctctggggccgtggcaccctggtcactgtctcctca

SEQ ID NO: 17722 - DNA, 289 bp, Homo sapiens
  source 1..289: mol_type = other DNA
tgcagcctctggattcaccttcagtgactactacatgacctggatccgccaggctccagggaaggggctggagtggctttcatacattagtagtagtgataataccatatactacgcagactctgtggagggccgattcaccatctccagggacaacgccaagaagtcactgtatctgcaaatgaacagcctgagagccgaggacacggctgtgtattactgtgcgagagcggtggctggttggtacttcgatctctggggccgtggcaccctagtcactgtctcctca

SEQ ID NO: 17723 - DNA, 298 bp, Homo sapiens
  source 1..298: mol_type = other DNA
tgtagcctctggatttactttcagtgatgcctggatgagctgggtccgccagactccagggaagggactggagtggattggccgtattaaaggcagagctgatggttggtcaacagagtacggtgcacccgtgaaaggcagattttccatgtcaagagatgattcaaaaaacacgctgtatttgcaactgagcagcctgacggtggaggacacaggcgtctattattgcaccacagatggtgtggtggaagccccttttgactactggggccagggaacccgggtcaccgtctcctca

SEQ ID NO: 17724 - DNA, 298 bp, Homo sapiens
  source 1..298: mol_type = other DNA
tgcagcctctggattcagtttcgataacgcctggatgagttgggtccgccaggctccagggaaggggctggagtgggttggccgtattaaaaacaagattcatggtgagtcgacagagtactctgcattcgtgggaggcagattcaccatgtcaagagatgattcaagaagcagcctgtatctacagatgaacagcctgaaaaccgaagacacagccgtctattactgtaccacagatggtgtggtggaagccccctttgactactggggcccgggaaccctggtcaccgtctcctca

SEQ ID NO: 17725 - DNA, 283 bp, Homo sapiens
  source 1..283: mol_type = other DNA
tgcagcctctggtttcagttttagcagatctggcatgagctgggtccgccaggctccagggatggggctggagtgggtctcaggtgttggtgggagtggtggtagcacatactacgcagactccgtgaagggccggttcaccatctccagagacgattccaaggacacgctgtatctgcaaatgaacagcctgagagccgaggacacggccgtatattactgtgcgcgggggacaataaatcttgactattggggccagggaaccctggtcaccgtctcctcg

SEQ ID NO: 17726 - DNA, 280 bp, Homo sapiens
  source 1..280: mol_type = other DNA
tgtagcctctggactcacctttagcaaccatggcatgagctgggtccgccaggctccagggacggggctggagtgggtctcaggtattactgctggtggtaccagttactacgcagactccgtgaagggccggttcaccatctccagagacaaatccaagaacacgctgtatctgcaaatgaacagcctgagagccgaagacacggccatctactattgtgcgagagggactataaaccttgactactggggccagggaaccctggtcaccgtctcctca

SEQ ID NO: 17727 - DNA, 280 bp, Homo sapiens
  source 1..280: mol_type = other DNA
cactgtctctggtggttccatcagtacttactcctgggcctggatccggcagcccgccgggaagggactggagtggattgggcgtatctctcccggtgggagcaccaactacaacccctccctcaagagtcgcgtcaccatgtcagtagacacgtccaaaaaccagttctccctgaagctgagctctgtgaccgccgcggacaccgccgtgtattactgtgcgagggggagcagttactggcccaactggggccagggaaccctggtcaccgtctcctca

SEQ ID NO: 17728 - DNA, 280 bp, Homo sapiens
  source 1..280: mol_type = other DNA
caccgtctctggtggctccatcactacttactcctggacctggatccggcagcccgccgggaaggaactggagtgggttgggcgtatatatgccagtgggaacaccgactacaacccctccctcaagagtcgactcaccatgtcagtagacacctccaagaaccagttctccctgaagttgagttctgttaccgccgcggacacggccgtgtatttctgtgcgagagggagtagttattggcccaactggggccagggaaccctggtcaccgtctcctca

SEQ ID NO: 17729 - DNA, 298 bp, Homo sapiens
  source 1..298: mol_type = other DNA
cgctgtctatggtgggtccttcagtgcttacttcttgagctggatccgccagcccccaggtaaggggctggagtggattggacaaatcagtcatactggacgcaccgactacaatacgtccctcaagagtcgagtcaccatatcactagacacgtccaagaagcagttctccctgaagctgagttctgtgaccgccgcggacacggctctgtattactgtgcgagtcactgtagtggtggtaactgctattttggttttcatatctggggccaagggacaatggtcaccgtctcttca

SEQ ID NO: 17730 - DNA, 298 bp, Homo sapiens
  source 1..298: mol_type = other DNA
ttctgtatttggtgcgtccagtggtggtcactactggagctggatccgccagtccccggagatgggactgcagtggattggacaaatcgatcatggtgggaacgccggctacaacccgtccctcaagagtcgagtcacctattcactagacacgtccaagaacctcctctccctgacgctgacctccgtgaccgacgcggacacggctatatattactgtgcgagtcattgcagtggtggaaactgctatttcggttttcatatttggggccaggggacagcggtcaccgtctcttca

SEQ ID NO: 17731 - DNA, 289 bp, Homo sapiens
  source 1..289: mol_type = other DNA
cactgtctctggtgcctccctcaatagggaggacacctactggggctggatccgccagccccctgggaagggcctggagtggatcgggagtttgtacgggagtttgtattctagtgggcgctcctactacaatccgtccctcaagagtcggctcaccctttccgtagacaggtccaggaaccagttctctttgaacctgaggtctgtgaccgccgcagacacggctgtttattactgtgtgcagatggctgggttttggggccagggaatcctggccaccgtctcttca

SEQ ID NO: 17732 - DNA, 289 bp, Homo sapiens
  source 1..289: mol_type = other DNA
cactgtccctggtgcctccctcaatagggaggacacctactggggctggatccgccagccccctgggaagggcctggagtggatcgggagtttgtacgggagtttgtattctagtgggcgctcctactacaatccgtccctcaagagtcggctcaccctttccgtagacaggtccaggaaccagttctctttgaacctgaggtctgtgaccgccgcagacacggctgtttattactgtgtgcagatggctgggttttggggccagggaatcctggccaccgtctcttca

SEQ ID NO: 17733 - DNA, 280 bp, Homo sapiens
  source 1..280: mol_type = other DNA
cagtgtctctggtggctccctcagaattaataatgacaactactggggctgggtccgccagtcccccgggaaggggctggagtgggtcgggagtatatattatagtgggaccacgtattccaacccgtccctcaagagtcgagtcagtgtatcagtagacacgtccaagaaccagtttttcctgagattgacctctgtcaccgccgcagacacggctgtgtattactgtgttcagatggcgggcttctggggccagggaaccctggtcaccgtctcctca

SEQ ID NO: 17734 - DNA, 292 bp, Homo sapiens
  source 1..292: mol_type = other DNA
tgcagcctctggattcaccttcgctaacgcctggatgaactgggtccgccaggctccagggaaggggctggagtggcttggccgtattaaactccaacgtgagggtttggaaacaaactacgctgcacccgcgaaaggcagattcaccatctcaagagatgattctacaaacacactgtatctgcaaatgaacaacctgaaaaccgaggacacagccacatattattgtacttcacggattcgcacgaccaatgacaactggggccagggaatcctggtcaccgtctcccca

SEQ ID NO: 17735 - DNA, 292 bp, Homo sapiens
  source 1..292: mol_type = other DNA
tgcagcctctggatttgacttcactaacgcctggatgaactgggtccgccaggctccagggaagggtctggagtggattggccgtattttaagcaaaagtgatggtgagacaacaaattccatcgcacccgtgaaaggcagattcaccatctcaagagatgattcaaaaaacacgttgtatctgcaaatgaatagcctgaaaatcgaggacacagccgtttattattgtacctcccgaattcgtacgacaaatgataattggggccagggaaccctggtcaccgtctcctcg

SEQ ID NO: 17736 - DNA, 285 bp, Homo sapiens
  source 1..285: mol_type = other DNA
gcctctggatacaccttcacaagttatgctatgcattgggtgcgccaggcccccggagaaggacttgagtgggtgggaaggatccacggtggcagtgggcgcacactatattcacagaggttccaggacagagtctccattacaagtgacacatccgcgagcattgcctacatggagctgagcagcctgaaatcagaagacacggctgtctattattgtacgagagatgcgcctggtggacggggagactactggggccagggaaccctggtcaccgtctcctca

SEQ ID NO: 17737 - DNA, 285 bp, Homo sapiens
  source 1..285: mol_type = other DNA
gcttctggatacagtttcaccgcttatgcgatgcattgggtgcgccaggcccccggacaaggccttgagtggctgggacgggtccacggtggcagtggtaacacaaaatattcacagaagttcaagggcagagtcaccattaacagagacacacccgcgagcacagtttatttggaactaaagaatctgacctctgaagacacggctgtgtattattgtacgagagatgcccctgggggacggggggactactggggccagggaacccaggtcaccgtctcctca

SEQ ID NO: 17738 - DNA, 301 bp, Homo sapiens
  source 1..301: mol_type = other DNA
cgcagcctctggattcaattttaaaacattttggatgagttgggtccgccaggctccagggaaggggctggagtgggtggccaatataaagcacgacggaagtgataaatactatgtggactcggtgaagggccggttcaccatctccagagacaacgccaagaactctttctatctgcaaatgaacagcctgagagccgaggacacggctgtgtatttctgtgcgagagagtacgacactttgactagttattaccactttgattactggggccagggaaccctggtcaccgtctcctca

SEQ ID NO: 17739 - DNA, 301 bp, Homo sapiens
  source 1..301: mol_type = other DNA
tgcagcctctggattcacctttaatacgtattggatgacctgggtccgccaggctccagggaaggggctggagtgggtggccaacataaaccacaatggaagtgcgaaattctatgtggactctgtgaagggccgattcaccatctccagagacaacgccaagaactcactgtatctgcaattgaacagcctgagagccgaggacacggctgtatattactgtgcgagagagtacgatactttgacttcctattaccactttgactactggggccagggaaccctggtcaccgtctcctcc

SEQ ID NO: 17740 - DNA, 280 bp, Homo sapiens
  source 1..280: mol_type = other DNA
tgcagcctctggattcacctttagtaactattggatgagctgggtccgccaggctccagggaaggggctggagtgggtggccaacataaagcaagatggaagtgagaaatactatgtggactctgtgaagggccgattcaccatctccagagacaacgccaagaactcactgtatctgcaaatgaacagcctgagagtcgaggacacggctgtgtattactgtgcgagaggaattagctgcgccaactggggccagggaaccctggtcaccgtctcctca

SEQ ID NO: 17741 - DNA, 280 bp, Homo sapiens
  source 1..280: mol_type = other DNA
tgcagcctctggattcacctttagtacctattggatgagctgggtccgccaggctccagggaaggggctggagtgggtggccaacataaaggaagatggaagtgacaaatactatgtggactctgtgaagggccgattcaccatctccagagacaacgccaagaattcactgtatttgcaaatgaacagcctgagagccgaggacacggctgtgtattactgtgcgagagggatcagctgcgcgaactggggccagggaaccctggtcaccgtctcctca

SEQ ID NO: 17742 - DNA, 289 bp, Homo sapiens
  source 1..289: mol_type = other DNA
tgcagcgtctggatttaccttcaatatctatggcatgcactgggtccgccaggctccaggcaaggggctggagtgggtggcagttatttggcctgaaggatctattcaatattatggagactccgtgaagggccgattcaccatctccagagacaattccaagaaaacgctgtttctgcaaatgaacagcctgagagtcgaggacacggctatgtattattgtgcgagacacaataatgtatacgattgggactactggggccaaggaaccctggtcaccgtctcctca

SEQ ID NO: 17743 - DNA, 289 bp, Homo sapiens
  source 1..289: mol_type = other DNA
tgcagcatctggattcaccttcagtaactatggcatgcactgggtccgccaggctccaggccaggggctggagtgggtggcagttatctggcctgatggaagtacaaaatactatgcagactccgtgaagggccgattcaccatctccagagacaattccaggaacacgctgtatctgcaaatgaacagcccgagagccgaggacacggctttttattactgtgcgaggcataataatgtctacgattgggactactggggccagggaaccctggtcaccgtctcctca

SEQ ID NO: 17744 - DNA, 292 bp, Homo sapiens
  source 1..292: mol_type = other DNA
cactgtctctggtggctccatcagcagtagtagttactactggggctggatccgccagcccccagggaaggggcttgagtggattgggaacatctattatcgtgggagcacctactacaacccgtccctcaagagtcgagtcaccatatccgtggacacgtccaagaaccagttctccctgaaggtgaggtctgtgaccgccgcagactcggctgtttattactgtgcgagagactacggtgactacaactttgactcttggggccagggaaccctggtcaccgtctcctca

SEQ ID NO: 17745 - DNA, 292 bp, Homo sapiens
  source 1..292: mol_type = other DNA
cattgtctctggtggctccatcagtagttctagtttctactggggctggatccgccagcccccagggaagggcctggagtggattgggaatatctattatagtgggagcacctactacaacccgtccctcaagagtcgagtcaccatatccgtagacacgtccaagagccagttctccctgaagctgaactctgtgaccgccgcagacacggctgtgtattactgtgcgagagactacggtgactacaactttgactcctggggccagggaaccctggtcaccgtctcctca

SEQ ID NO: 17746 - DNA, 292 bp, Homo sapiens; identical to SEQ ID NO: 17745
  source 1..292: mol_type = other DNA

SEQ ID NO: 17747 - DNA, 286 bp, Homo sapiens
  source 1..286: mol_type = other DNA
tatagcgtctgggttcaccttcagagagtatggcatgcactgggtccgccaggctccaggcaaggggctggaatggctggcaattgtctggtataatggaaatactaaatactatggagattctgtgaagggccgattcaccatctcaagagacaattaccaggacagactgtatctgcagatgaacagcctgagacccgacgacacgggtatttattattgtgcgagacatcagagtggctacggtgactactggggccagggaatcctggtcaccgtctcctca

SEQ ID NO: 17748 - DNA, 286 bp, Homo sapiens
  source 1..286: mol_type = other DNA
tgcagcgtctggattcaccttcagtagttatggcatgcactgggtccgccaggctccaggcaaggggctggagtgggtggcaataatatggtatgatggaggtaataaatattatggagagtccgcgaagggccgattcaccatctccagagacaattccaagaacatgttgtatctgcaaatgaacaatttgagagccgaggacacggctgtatattactgtgcgagacaccaaagtggctacggtgactactggggccagggaaccctggtcaccgtctcctca

SEQ ID NO: 17749 - DNA, 273 bp, Homo sapiens
  source 1..273: mol_type = other DNA
gcttctggataccccttcagtagatctgctgtgaactggctgcgccaggcccccggacaaaggcttgagtggatggggtggatcaacgttgccgatgctaacacaagattttcagggaacttgcaggatagagtcacccttaccagggacacgtccgcgaacacagcctacatggagctgaccagcctgacatctgaagacacggctgtgtattactgtgcctcaggggcgtttgactactggggccaggggaccctggtcaccgtctcgtca

SEQ ID NO: 17750 - DNA, 273 bp, Homo sapiens
  source 1..273: mol_type = other DNA
gcttctggatacaccttcattaagtctgctgtggaatgggtgcgccaggcccccggacaaaggcttgagtggatgggatggatcagtgttggcgatggtagtacaagatattcacagaagttccaggacagagtcaccattaccagggacacatccgcgaccacagcctacatagaactgagcagcctgacatctgaagacacggctgtctattactgtgcgtcaggggcgtttgactactggggccagggaacccaggtcaccgtctcctca

SEQ ID NO: 17751 - DNA, 283 bp, Homo sapiens
  source 1..283: mol_type = other DNA
tgcagcctctggattcacctttagtaactactggatgcactgggtccgccaagctccggggaaggggctggtgtgggtctcacgtattagtggtgatgggattgccacaaactacgcggactccgtgaagggccgattcaccatctccagagacaacggcaagaacacggtttatctgcaaatgaccggtctgagagccgaggacacggctgtttattactgcgcaacagtggactaccgtgacgactactggggccagggaaccctggtcaccgtctcctca

SEQ ID NO: 17752 - DNA, 283 bp, Homo sapiens
  source 1..283: mol_type = other DNA
tgcagtctctggattcaccttcactaactactggatgcactgggtccgccaagctccagggaaggggctggtgtgggtctcacgcattagccctgatgggagtagtccaaaccacgcggactccgtggagggccgattcaccatctccagagacaacaccaagaacatggtatatctgcaaatgaacagtctgagagccgaggacacggctgtctattactgtgcaacagtagactatcgagatgactactggggccagggaaccctggtcaccgtctcctca

SEQ ID NO: 17753 - DNA, 289 bp, Homo sapiens
  source 1..289: mol_type = other DNA
tgtagcctccgggtttaccttcagtggttctaatatccactgggtccgccaggcttccgggaaagggctggagtgggttggccgtattaagaagagagctgagaattacgcgacagaatatgctgcgtcggtgaaaggcaggttcaccctctccagagatgattcaaagaacgcggcgtatctgcaaatgaacagcctggaaaccgaggacacggccgtgtattactgtctcagccgagattcggctggcggctactggggccagggaaccccggtcaccgtctcctca

SEQ ID NO: 17754 - DNA, 289 bp, Homo sapiens
  source 1..289: mol_type = other DNA
tgcagcctctgggttcaccttcagtggctctactctacactgggtccgccaggcctccgggaaagggctggagtgggttggccgtattagaaccaaagctaacaattacgcgacaggatatgctgcgtcggtgaaaggcaggttcaccatctccagagatgattcaaagaacacggcgtatctgcaaatgaacagcctgacaaccgaggacacggccgtgtattactgtttgtcgagggatagtgcggggggctattggggccaggggaccctggtcaccgtctcctca

SEQ ID NO: 17755 - DNA, 304 bp, Homo sapiens
  source 1..304: mol_type = other DNA
ctctgtctctggtgactccatcagcacaaataactactggggctggatccgccaggccccagggaagggcctggaatgcattgggagtatctcttctagtgggagcacctactacaatccgtccctcacgagtcgagtcatcatatccatagacacgtccaagaaccacctctccctgaatctgaactctgtgaccgccgctgacacggctgtttattactgtgcgagggggtataccagtggcttgagagtgtcacactggttcgacccctggggccagggaaccctggtcaccgtctcctca

SEQ ID NO: 17756 - DNA, 307 bp, Homo sapiens
  source 1..307: mol_type = other DNA
ctctgtctctggtggctccatcagcagtactggttcctactggggctggatccgccagcccccagggaaggggctggagtggattgggagtatctcctatggtgggagtacctactacaacccgtccctccagagtcgagtcatcatatccgtagacacgtgcaacaatcagttctccctgagactaagctctgtgaccgccacagacacggctgtgtattactgtgcgagaggttatactagtggcttgagggtttcacactggtttgacccctggggccaggggagcctggtcaccgtctcctca

SEQ ID NO: 17757 - DNA, 283 bp, Homo sapiens
  source 1..283: mol_type = other DNA
tgcagcctctggattcacctttagcgactttgccatgatctgggtccgccagactccagggaaggggctggagtgggtctcatctattatttataatggtgatagcacatactacgcggactccgtgaagggccggttcaccatctccagggacaattccaacaacacgctgtatctgcaaatgagcagcctgagagccgaggacacggccatgtattactgtgcgaaaggggagatgggcgttgattactggggccagggaaccctggtcaccgtctcctca

SEQ ID NO: 17758 - DNA, 283 bp, Homo sapiens
  source 1..283: mol_type = other DNA
tgcagcctctggattcacctttagcaactatgccatgaactgggtccgccaggctccagggaaggggctggagtgggtctcatctatcatttggagtggcggtagcgcatactatgcagactccgtgaagggccggttcaccatctccagagacaattccaagaacacgctgtatctgcaaatgaacaacctgagagccgaggacacggccgtatattactgtgcgaaaggggaaatgggggttgactactggggccagggaaccctggtcaacgtcgcttca

SEQ ID NO: 17759 - DNA, 286 bp, Homo sapiens
  source 1..286: mol_type = other DNA
tgcagcctctggattcacctttagtacccattggatgacctgggtccgccaggctccagggaaggggctggagtgggtggccaacataaagcaagatggaagtgtgcaacactatgtggactctgtgaagggccgattcaccatctccagagacaacgccaagaactcactgtatctgcaaatgaacagcctgagtcccgaggacgcggctgtgtattattgtgcgagggactactactactacatagacgtctggggcaaagggaccacggtcaccgtctcctca

SEQ ID NO: 17760 - DNA, 286 bp, Homo sapiens
  source 1..286: mol_type = other DNA
tgcagcctctggagtcagcataagtggatattggatgggctgggtccgccaggctccagggcaggggctggagtgggtggccaacataaacggagatgggagtgacaaacactatgtggactctgtgaagggccgattcgccatctccagagacaacgccaagaactcagtgtatctgcaactgaacagcctgagaggcgaggacacggctatttatttctgtgcgagagactattactattatatcgacgtctggggcaatgggaccacggtcaccgtctcctca

SEQ ID NO: 17761 - DNA, 286 bp, Homo sapiens
  source 1..286: mol_type = other DNA
tgcagcctctggactcagcttcagtagttattggatgagttgggtccgccaggctccagggaaggggctggagtgggtggccaacataaaggtagatggaagtcagcaatactatgtggactctgtgaagggccgattcaccatctccagagacaacgccaagaactcactgtatctgcaaatgaacagcctgagagccgaggacacggctgtgtattactgtgcgagaggtggctggtctaactttgactactggggccagggaaccctggtcaccgtctcctcg

SEQ ID NO: 17762 - DNA, 286 bp, Homo sapiens
  source 1..286: mol_type = other DNA
cgcagcctctggagccgcctttagtagctattggatgacctgggtccgccaggctccagggaaggggctggagtgggtggccaacataaagacagatggaagtcagaaatactatgtggactctgtgaagggccgattcaccatctccagagacaacgccaagaattcactgtatctgcaaatgaatagcctgagagccgaggacacggctgtctattactgtgcgagaggtggctggtccaactttgactactggggccagggaaccctggtcaccgtctcctca

SEQ ID NO: 17763 - DNA, 286 bp, Homo sapiens
  source 1..286: mol_type = other DNA
tgcagcctctggagtcgcctttagtagcttttggatgacctgggtccgccaggctccagggaaggggctggagtgggtggccaacataaagacagatggaagtcagaaatactatgtggactctgtgaagggccgattcaccatctccagagacaacgccaagaactcactgtatctgcaaatgaatagcctgagagccgaggacacggctgtctattactgtgcgagaggtggctggtccaactttgactactggggccagggaaccctggtcaccgtctcctca

SEQ ID NO: 17764 - DNA, 310 bp, Homo sapiens
  source 1..310: mol_type = other DNA
tgcagcctctggattcacctttagcaccaatgccatgagctgggtccgccaggctcccgggaaggggctggagtgggtctcaggttttagaagcagtggtagtgtcacatactacgcagactccgtgaagggccggttcaccatctccagagacatttccaagaacacgttgtatctgcaaatgaacagcctgagagccgaggacacggccttatattactgtgcgaaacacatagttgcagctggtaggagctactactactacggtatggacgtctggggccaagggaccacggtcaccgtctcctca

SEQ ID NO: 17765 - DNA, 310 bp, Homo sapiens
  source 1..310: mol_type = other DNA
tgcagcctctggattcaactttagaagctatgccatgagctgggtccgccagactccagggaaggggctggagtgggtctcaagtattagtggtagtggtggtagcacattctacgcagactccgtgaagggccggttcaccatctccagagacaattccaagaacacggtgtatctacaaatgaacagcctgagagccgaggacacggccgtatattactgtgcgaaacacatagtagcagctggtcgttcgtactactactacggtatggacgtctggggccaagggaccacggtcaccgtctcctca

SEQ ID NO: 17766 - DNA, 280 bp, Homo sapiens
  source 1..280: mol_type = other DNA
tgcagcctcgggattcaccctcagtaattatgaaatgaactgggtccgccaggctccagggaaggggctggagtgggtttcatacattagtagtggtggtagtgctacatactacgcagactctgtgaagggccgattcaccatctccaaagacgtccccaacaactcactgtacctgcaaatgaacagcctgagagtcgacgacacggctgtttattactgtgcgagaagttaccgtatggacgtctggggccaggggaccacggtcaccgtctcctca

SEQ ID NO: 17767 - DNA, 280 bp, Homo sapiens
  source 1..280: mol_type = other DNA
tgcagcctctggattcaccttcagtagtcatagcatgaactgggtccgccaggctccagggaaggggctggagtggttttcatacagtagcagtggtagtggaaccatatactacgcagactctgtgaagggccgattcaccatctccagagacaacgccaagaactcactgtatctgcaaatgagcagcctgagagccgaggacacggctgtgtattactgtgcgaggtcctaccgtatggacgtctggggccaagggaccacggtcagcgtctcctca

SEQ ID NO: 17768 - DNA, 301 bp, Homo sapiens
  source 1..301: mol_type = other DNA
tgcagcctctggattcaccttcagtagctatgctatacactgggtccgccaggctccaggcaaggggctggagtgggtggcagttatatcatatgatggaagtattaaatactacgcagactccgtgaagggccgattcaccatgtccagagacaattccaagaacacgctgtatctgcaagtgaacagcctgagagctgaggacacggctgtgtattactgtgcgagagtcggtgggacctacttctactactacggtatggacgtctggggccaagggaccacggtcaccgtctcctca

SEQ ID NO: 17769 - DNA, 301 bp, Homo sapiens
  source 1..301: mol_type = other DNA
tgtagtctctggattcaccttcagtagctatgctatacactgggtccgccaggctccaggcaaggggctggagtgggtggcagttatatcatctgatggaagttataaatattacgcagactccgtgaagggccggatcaccgtctccagagacaattccaaggacacgctgtatctgcaaatgaacagcctgagagctgaggacacggctgtgtattactgtgcgagagttggtgggacctacttctactactacggtatggacgtctggggccaagggaccacggtcaccgtctcctca

SEQ ID NO: 17770 - DNA, 295 bp, Homo sapiens
  source 1..295: mol_type = other DNA
tgtagcgtctgatttaaccttaagtagctctcttgtgcattgggtccgccaggctccaggcaaggggctggagtgggtggcactctcaccacatgatgaacgtcttgagcgttatgtcgactccgtgaagggccgattcaccgtctccagagacaattccaaaaatacggtgtatttgcaaatggacagcctgagagtcgaggacacggctgtgtattactgtgcgagaggtcttagtggccacggcccaagttttgagcactggggccagggaaccctggtcaccgtctcctca

SEQ ID NO: 17771 - DNA, 295 bp, Homo sapiens
  source 1..295: mol_type = other DNA
tgtagcgtctgatttaaccttaagtagctctcttgtgcgttgggtccgccaggctccaggcaaggggctggagtgggtggcactctcaccacatgatgaacgtcttgagcgttatgtcgactccgtgaagggccgattcaccgtctccagagacaattccaaaaatacggtgtatttgcaaatggacagcctgagagtcgaggacacggctgtgtattactgtgcgagaggtcttagtggccacggcccaagttttgagcactggggccagggaaccctggtcaccgtctcctca

SEQ ID NO: 17772 - DNA, 295 bp, Homo sapiens
  source 1..295: mol_type = other DNA
tgtagcgtctgatttaaccttaagtagctctcttgtgcgttgggtccgccaggctccaggcaaggggctggagtgggtggcactctcaccacatgatgaacgtcttgagcattatgtcgactccgtgaagggccgattcaccgtctccagagacaattccaaaaatacggtgtatttgcaaatggacagcctgagagtcgaggacacggctgtgtattactgtgcgagaggtcttagtggccacggcccaagttttgagcactggggccagggaaccctggtcaccgtctcctca

SEQ ID NO: 17773 - DNA, 363 bp, Homo sapiens
  source 1..363: mol_type = other DNA
tgcagcctctggattcgacttcagtaatgactggatgcactgggtccgccaagtttcagggaaggggctggcatggatctcacgtattaatagtgatgggagtctcataacttacgcggactccgtgaagggccgattcaccatctccagagacaacgccaagaacactttgtatctgcaaatgaacagtctgagagccgaggacacggctgtgtattattgtgtaagaggcttgggggatggatggggccagggaaccctggtcaccgtcttctcaggtgagtcctcataacttctcccgaatgcacttttggggggaaacaaccgcgctggggccagggaaccctggtctccgtcttctca

SEQ ID NO: 17774 - DNA, 277 bp, Homo sapiens
  source 1..277: mol_type = other DNA
tgcagcctctggattcgacttcagtaatgactggatgcactgggtccgccaagtttcagggaaggggctggcatggatctcacgtattaatagtgatgggagtctcataacttacgcggactccgtgaagggccgattcaccatctccagagacaacgccaagaacactttgtatctgcaaatgaacagtctgagagccgaggacacggctgtgtattattgtgtaagaggcttgggggatggatggggccagggaaccctggtcaccgtcttctca

SEQ ID NO: 17775 - DNA, 277 bp, Homo sapiens
  source 1..277: mol_type = other DNA
tgcagcctctagattcaccttcagtaagtattggatgcactgggtccgccaagttccaggtaagggactggtgtgggtctcacgtattaatggtgatgggactctcacaacctacgcggactccgtgaagggccgattcaccatctccagagacaacgccaagaacacgctgtccctacaaatgaacagtctgagagacgacgacacggctctctattattgtgtgagagggctgggagacggctggggccagggaaccctggtcaccgtctcctca

SEQ ID NO: 17776 - DNA, 289 bp, Homo sapiens
  source 1..289: mol_type = other DNA
tacagtctctggattcacttttagtgactattggatgagctgggtccgccaggctccagggaaggggctggagtgggtggccaacacaaaggacgatggaagtgacaaatactatgtggactctgtgaagggccgattcaccatctccagagacaacgccaagaactcactgtatctgcaaatgaacagcctgagagtcgaggacacggctgtgtattactgtgcgagagtaatcgcctgggggtggttcgacccctggggccagggaaccctggtcaccgtctcctca

SEQ ID NO: 17777 - DNA, 289 bp, Homo sapiens
  source 1..289: mol_type = other DNA
tgtagcctctggattcagttttagtagttattggatgagctggctccgccaggcttcagggaaggggctggagtgggtggccaaaatagacaaagaaggaagtgacaaatcctatggggactctgtgaagggccgattcaccatctccagagacaacgccaggaactcattgtatctgcaaatgaacagcctgagagccgaagacacggctgtttactattgtgcgagagttattgcctggggctggttcgacccctggggccagggaaccctggtcaccgtctcctca

SEQ ID NO: 17778 - DNA, 285 bp, Homo sapiens
  source 1..285: mol_type = other DNA
gcttctgggtacaccttcactaactatcctatacattgggtgcgccaggcccccggacaaaggcttgagtggatggcgtggatcatcactggcgatggtaacacaaaatattcacagaagttccagggcagagtctccattaccagggacacatccgcgagcacagtgtacatggaagtgagcagcctgaaatatgaagacacggctgtgtattattgtgcgaggagaggagaaggctacaagtatgactactggggccagggaaccctggtcaccgtctccaca

SEQ ID NO: 17779 - DNA, 285 bp, Homo sapiens
  source 1..285: mol_type = other DNA
acttctggatacaccttcactaactatcctttgcattgggtgcgccaggcccccggacaaaggcttgagtacatgggatggatcatcactggcgatggtcacacaaaatattcacagaagttccagggcagagtcacccttctcagggacacatccgcgagcacagccttcatggaattgcgcagcctcacatatgaagacacggctatgtattactgtgcgagaaggggggaaggctacaaatacgactactggggccagggaaccctggtcaccgtctcgtca

SEQ ID NO: 17780 - DNA, 280 bp, Homo sapiens
  source 1..280: mol_type = other DNA
tgtagcctctggattcacctttactacctattggatgggttgggtccgccaggctccagggaaggggctggagtgggtggccaacacaaagcaagatggaagtgagaaaaactatgtggactctgtgaagggccgattcaccatctccagagacaacgccaagaactcagtgtatctgcaaatgaacaacctgagaggcgaagacacggctgtatattactgtgcgaggggaaattggttcgcggggaggggccagggaaccctggtcaccgtctcctca

SEQ ID NO: 17781 - DNA, 280 bp, Homo sapiens
  source 1..280: mol_type = other DNA
tgcagcctctggattcacctttactgactactacatgggctgggtccgccaggctccagggaaggggctggagtgggtggccaacacaaagcaagatggcagtgagaagtactacgtggactctgtgaggggccgattcaccatcgccagagacaacgccgagaggtcactgtatctgcaaatgaacagcctgagagccgaggacacggccgtctattattgtgcgagagggaattggttcgcgggagggggccagggaaccctggtcatcgtctcctca

SEQ ID NO: 17782 - DNA, 286 bp, Homo sapiens
  source 1..286: mol_type = other DNA
tgcagcctctggattcacctttagtagctattggatgaggtgggtccgccaggctccagggaaggggctgcagtgggtggccgacataaaacaagatggaggttggacaaactacgtggactctgtgaagggccgattcaccatctccagagacaacgcccagaactcactgtatctgcaaatgaacagcctgagagccgaggacacggctgtgtattactgtgcgagaggagggatctggtcctttgactactggggccagggaaccctggtcaccgtctcctca

SEQ ID NO: 17783 - DNA, 286 bp, Homo sapiens
  source 1..286: mol_type = other DNA
tgcagcctctggattcacctttagtagctattggatgaggtgggtccgccaggctccagggaaggggctgcagtgggtggccgacataaagcaagatggaggttggacaaactacgtggactctgtgaagggccgattcaccatctccagagacaacgcccagaactcactgtatctgcaaatgaacagcctgagagccgaggacacggctgtgtattactgtgcgagaggagggatctggtcctttgactactggggccagggaaccctggtcaccgtctcctca

SEQ ID NO: 17784 - DNA, 286 bp, Homo sapiens
  source 1..286: mol_type = other DNA
tgcagcctctggattcacttttagtacctcttggatggactggctccgccaggctccagggaaggggctggagtgggtggccaacataaacccagatggaagtcgagactactatgtggactctgtgaagggccgattcaccatctccagagacaacaccaagaactcactatttctgcaaatgaacagcctgagagccgaggacacggccttatattactgtgcgagaggtggcatctggtcctttgactactggggccagggaatcctggtcaccgtctcctca

SEQ ID NO: 17785 - DNA, 289 bp, Homo sapiens
  source 1..289: mol_type = other DNA
tgcagcctctgagttcatttttagcaggtttaccatgagctgggtccgccaggctccagggaaggggctggagtgggtctcagccattagtggaagtggtattgacacacattacgcagactccgtgaagggccggttcaccatctccagggacaattccaagaacacactgtatttgcaaatcaacagcctgagagccgaggacacggccgtattttactgtgcgaagcactactcctactactacatggacgtctggggcaaagggaccacggtcaccgtctcctca

SEQ ID NO: 17786 - DNA, 289 bp, Homo sapiens
  source 1..289: mol_type = other DNA
tgcagcctctggattcacctttagcagctatgccatgagctgggtccgccaggctccagggaaggggctggagtgggtctcaggtattagtggcgatggtcttaggacatactacggagactccgtgaagggccggttcaccatcaccagagacaattccaagaacacggtgcatctgcaaatgaacagcctgagagccgaggacacggccctatatttctgtgcgaaacattactcctactactacatggacgtctggggcaaagggaccacggtcaccgtctcctca

SEQ ID NO: 17787 - DNA, 280 bp, Homo sapiens
  source 1..280: mol_type = other DNA
tgcaggctctggattcaccttcagtagctactggatgcactgggtccgccaagctccagggaaggggctggtgtgtctctcacgtaccaatgttgatgggagtgccacaatctacgcggactccgtgaaggggcgattcaccatctccagagacaacgccaagaacacgctgtggctgcaaatgaacagtctgggagccgaggacacggctgtgtattactgtgcaagagggcggtccatggacgtctggggcaaagggaccacggtcaccgtctcctca

SEQ ID NO: 17788 - DNA, 280 bp, Homo sapiens
  source 1..280: mol_type = other DNA
tgcagcctctggattcaccttcagtagctactggatgcactgggtccgccaagctccagggaaggggctggtgtgggtctcacgtatttatactgatgggagtagcacaacctacgcggactccgtgaggggccgattcaccatctccagagacaacgccaagaacacgctgtatctgcaaatgaacagtctgagagccgaggacacggctgtgtattactgtgcaaggggtcgtagtatggacgtctggggccaagggaccacggtcaccgtctcctca

SEQ ID NO: 17789 - DNA, 283 bp, Homo sapiens
  source 1..283: mol_type = other DNA
tgcagcctctggattcacctttaccaactctgccatgacctgggtccgccaggctccagggaaggggctggagtgggtctcagttattagtgatagtggtggtaacacatactacgcagactccgtgaagggccgcttcaccatctccagagacaattccaagaacacgctgtatctgcaaatgaacagcctgagagacgaggacacggccgtatattactgcgcgaaagggggggcatggttggacccctggggccagggaaccctggtcaccgtctcctca

SEQ ID NO: 17790 - DNA, 283 bp, Homo sapiens
  source 1..283: mol_type = other DNA
tgcagcctctggattttccttcagtagccatggcatgacgtgggtccgccaggctccagggaaggggctggagtggatctcagttatcactggtaatggtgttaccacaaactacgcagacttcgtgaggggccggttcaccatctccagagacaattccaaggacacggtatatctgcagatggacagcctgagagccgaggacacggccgtgtattattgtgcgaaaggtggggcctggctcgacccctggggccagggaaccctggtcaccgtctcctca

SEQ ID NO: 17791 - DNA, 298 bp, Homo sapiens
  source 1..298: mol_type = other DNA
tgaagcctctggattcatctttagcggctatagtatgaactggctccgccaggccccagggagggggctggaatgggtctcaattgtctatcgagatggagctacgagatactacgcagactccgtgaagggccggttcaccatctccagagacaattccagggatagggtgtatttgcaaatgaacaacctgagggccgaggacacgggcatatactactgtgcgaaggatcgcgaacccgattatagattcgacattgactattggggccatggaaccctggtcaccgtctcctca

SEQ ID NO: 17792 - DNA, 298 bp, Homo sapiens
  source 1..298: mol_type = other DNA
tgcagcctctggattcacgtttagcagctattccatgaactgggtccgccaggctccagggaaggggctggagtgggtctcaattatttatggtagcggtggtacaatctactatgcagactccgtgaggggccggttcaccatctccagagataattccaagaacaccctgtatctgcaaatgaccagcctgagagccgaggacacggccgtatattactgtgcgaaagaccgggaacctgattatcgcttcgatattgactactggggccagggaaccctggtcatcgtctcctca

SEQ ID NO: 17793 - DNA, 289 bp, Homo sapiens
  source 1..289: mol_type = other DNA
tgtagcctctggattcacctttaagaactttgccatgagctgggtccgccaggctcccgggaaggggctggagtgggtctcaactattaatgataaagctgacaaaacatactacgcagactccgtgaagggccggttcaccatctccagagacaattccaagaacacgctgtatctgcaaacgaacggcctgagagtcgaggacacggccgtatattactgtgcgaaattcggcagtggctggtcccttgactactggggccagggaaccctggtcaccgtctcctca

SEQ ID NO: 17794 - DNA, 289 bp, Homo sapiens
  source 1..289: mol_type = other DNA
tgcagcctctggattcatctctagtagttatggcatgagctgggtccgccaggctccagggaaggggctggagtgggtctcacttattcatagtggtgttgccgggacaaagtatgtagactccgtgaagggccggttcaccatctccagagatgattccaagaacacgatacatctagaaatgaacagcctgagagccgacgacacggccgtatattactgtgcgaaatttggcagtggctggtcacttgactactggggccagggaaccctggtcaccgtctcctca

SEQ ID NO: 17795 - DNA, 280 bp, Homo sapiens
  source 1..280: mol_type = other DNA
cactgtctctggtggctccatcagtagatactactggagttggatccggcagcccccagggaagggactggagtggattgggtatatcaattacagtgggagcaccaactacaacccctccctcaagggacgagtcaccatatcaatagacacgtctaagaaccagttctccctgcagctgagctctgtgaccgctgcggacacggccgtgtattactgtgcgagggggggaggttataacgcgtactggggcccgggaaccctggtcaccgtctcctca

SEQ ID NO: 17796 - DNA, 280 bp, Homo sapiens
  source 1..280: mol_type = other DNA
cactgtctctggtggctccatcggtactaacttctggaactggatccggcagcccccagggaagggactggagtggattggctatattaattacagtgggagcaccaactacaacccctccctcaagagtcgagtcaccatatcagtagacacgtccaagaaccagttctccctgaagctgaactctgtgaccgctgcggacacggccgtgtattactgtgccagaggtggtggctacaacgcctactggggccagggaaccctggtcaccgtctcctca

SEQ ID NO: 17797 - DNA, 289 bp, Homo sapiens
  source 1..289: mol_type = other DNA
tgtagcgtctggattcagcttcagtgcctatggcatgcactggctccgccaggctccaggcagggggctggagtgggtgggagttatatggaatgatggaggtgacaaatactatgcagactccgtgaagggccgattcaccttctccagagacaattccaagagcacactgtatctgcaaatggacagcctgagagtcgaggacacggctgtatattactgtgcgagagactccggcatctcgtcggcagcatactggggccagggaaccctggtcatcgtctcctca

SEQ ID NO: 17798 - DNA, 289 bp, Homo sapiens
  source 1..289: mol_type = other DNA
tgcagcatctgacttcatcttcaataactacggcattcactggctccgccaggctccaggcaaggggctggagtggatggcagttatgtggaatgatggcagtaggcaatattatgcagactccgtgaggggccggttctccgtctccagagacagttccaagaacatggtctatctacaactgaacaacctgagagacgaggacacggctgtgtactattgtgcgagagattctggcatctcgtccgctgcctactggggccggggaacccaggtcatcgtctcctca

SEQ ID NO: 17799 - DNA, 289 bp, Homo sapiens
  source 1..289: mol_type = other DNA
tgcagtctctggattctccctcagtgaccactacatggactgggtccgccaggctccagggaaggggctggaatgggttggccgtactagacccaaagctggtcgttacaccacagaatacgccgcgtctgtgaaaggcagattcatcgtctcaagagatgagtcaaagaattccctgtatctgcaaatgaacagcctgaaaaccgaggacacggccatgtattactgtgctagagggaagaactcatttgactcctggggccagggaaccctggtcaccgtctcctca

SEQ ID NO: 17800 - DNA, 289 bp, Homo sapiens
  source 1..289: mol_type = other DNA
tgcagcctctggattcactctcagtgaccactacatggactgggtccgccaggctccaggggaggggctggagtggattggccgttctacaaacaaagctactagttacaccacaatatatgccgcgtctgtgaagggcagattcaccatctcaagagatgattcaaagaactcactatatctgcagatgaacagcctgaaaaccgaggacacggccgtgtatttctgtgctagggggaagaactcctttgactcctggggccagggagccccggtcaccgtctcctca

SEQ ID NO: 17801 - DNA, 289 bp, Homo sapiens
  source 1..289: mol_type = other DNA
tgcagcctctggattcacctttagcaactatgccatgacctgggtccgccaggctccagggagggggctggagtgggtctcaactattaggaaaagtggtgatggcgcatactacgcagactccgtgacgggccggctcaccctctccagagacaattccaagaacacgctgtatctgcaaatgaacagcctgagagccgaggacacggccgtatattactgtgcgaaggggggtttgtggggaggtatggacgtctggggccaagggaccacggtcaccgtctcctca

SEQ ID NO: 17802 - DNA, 289 bp, Homo sapiens
  source 1..289: mol_type = other DNA
tgtgacctctggattcacttttaacgactatgccataaactgggtccgccaggcgccagggaaggggctggagtgggtctcaggtattagtggtagtggtggtagcacatactacgcagactccgtgaagggccggttcaccatctccagagacaattccaagaacacgctgtatctgcaaatgaacagcctgagagccgaggacacggccgtatattactgtgcgaaaggaggattgtggggcggtatggacgtctggggccaagggaccacggtcaccgtctcctca

SEQ ID NO: 17803 - DNA, 301 bp, Homo sapiens
  source 1..301: mol_type = other DNA
tgcagcctctgcattcacttttagtaacgctcctatgcactgggtccgccaggctccgggcaaggggctggagtgggtggcagttattcaccctgatggaggtgcccaggcctacattgactccgtgaggggccgattctccatctccagagacaactccaagagcacactgtatctgcaaatgaacggcctgagacttgaggacacggctctgtattactgtgcgaaagaggggcgttccagtggcagggcgggggcttgtaatgtctggggccaagggacaatggtcaccgtctctgca

SEQ ID NO: 17804 - DNA, 301 bp, Homo sapiens
  source 1..301: mol_type = other DNA
tgcagcctctgcattcacttttagtaacgctcctatgcactgggtccgccaggctccgggcaaggggctggagtgggtggcagttattcaccctgatggaggtgcccaggcctacattgactccgtgaggggccgattctccatctccagagacaactccaagagcacactgtatctgcaaatgaacggcctgagacttgaggacacggctctgtattactgtgcgaaagaggggcgttccagtggcagggcgggggcttgtaatgtctggggccaagggacaatggtcaccgtctcttca

SEQ ID NO: 17805 - DNA, 307 bp, Homo sapiens
  source 1..307: mol_type = other DNA
cactgtctctggtggctccgtcagtaatagtttttactactggacctggatccggcagcccgccgggaagacactggagtggattgggcgtatctataccagtgggagcaccaactacaacccctccctcaagagtcgagtcaccatatcagtagacacgtccaacaaccagttctccctgatcctgagctctgtgaccgccgcagacacggccgtctattactgtgcgagggcctcttattgtggtggtgattgctatagctggttcgacccctggggccagggaaccctggtcaccgtctcctca

SEQ ID NO: 17806 - DNA, 307 bp, Homo sapiens
  source 1..307: mol_type = other DNA
cactgtctctggtggctccatcagcagtggtactgactactggagctggctccggcagcccgccgggaagggactggagtggattgggcgtatctataccagtggaaacaccaactacaacccctccctcaagagtcgagtcaccatatcagcagacacgtccaagaaccagttctccctgaagctgagctctgtggccgccgcagacacggccgtgtattactgtgcgagagcgtcatattgtggtggtgattgctacagctggttcgacccctggggccagggaaccctggtcaccgtctcctca

SEQ ID NO: 17807 - DNA, 277 bp, Homo sapiens
  source 1..277: mol_type = other DNA
tgcagcctctggattcattttcagtaatgcctggatgagctgggtccgccaggctccagggaaggggctggagtgggttggccggattaaaagtaaaactggaggtgggataatagagtacactgcacccgtgaaaggcagattcaccatctcaagagatgattcaaaaaacacgttgtatctggaaatgaatagcctgaaaaccgaggacacagccgtgtattactgtaccacacttgggacgtggggccagggagccctggtcaccgtctcctca

SEQ ID NO: 17808 - DNA, 277 bp, Homo sapiens
  source 1..277: mol_type = other DNA
tgcagcctctggactcactttcagtaacgcctggatgagctgggtccgccagcctccagggaaggggctggagtgggttggccgtattaaaagcaaaattgttggtgggacaatagaatacacaccacccgtgacaggcagattcaccatctctagagatgatgcaaaaaatacggtatatctggaaatgaacagcctgaaaaccgaggacacagccgtctattactgtaccacactgggaacttggggccagggaaccctggtcaccgtctcctca

SEQ ID NO: 17809 - DNA, 283 bp, Homo sapiens
  source 1..283: mol_type = other DNA
tgcagcctctggattcacctttagtagctattggatgacctgggtccgccaggctcccgggaaggggctggagtgggtggccaacataaagcaagatggaagtgagaaatactatgtggactctgtgaagggccgattcaccatcgccagagacaacgccaagaactcactgtatctgcaaatgaacagcctgagagccgaagacacggctgtgtattactgtgcgaggggacaacggggtatggacgtctggggccaagggaccacggtcaccgtctcctca

SEQ ID NO: 17810 - DNA, 283 bp, Homo sapiens
  source 1..283: mol_type = other DNA
tgcagcctctggattgaccttcagaagctactggatgacctgggtccgccaggctccagggaaggggctggagtgggtggccaacataaagcaagatggaagtgagaaatactatgtggactctgtgaagggccgattcaccatctccagagacaacgccaagaaatcattgtatctgcaaatgaacagcctgagacccgaggacacggccgtgtattactgtgcgagaggccagcggggtatggacgtctggggccaagggaccacggtcaccgtctcctca

SEQ ID NO: 17811 - DNA, 283 bp, Homo sapiens
  source 1..283: mol_type = other DNA
tgcagcctctggattcacctttagtagctattgggtgacctgggtccgccaagctccagggaaggggctggagtgggtggccaacataaagcaagatggaagtgagaaacactatgtggactctgtgaagggccgattcaccatctccagagacaacgccaagaactcactgtatctgcaaatgaacagcctgagagccgaggacacggctgtgtattactgtgcgagagggcaaaggggtatggacgtctggggccaagggaccacggtcaccgtctcctca

SEQ ID NO: 17812 - DNA, 283 bp, Homo sapiens
  source 1..283: mol_type = other DNA
tgcagcctctggattcaccttcagaacctactggatgcactgggtccgccaagctccagggaaggggctggtgtgggtctcacgtattaatagtgatgggagtagcacaagctacgcggactccgtgaagggccgattcaccatctccagagacaacgccaagaacacgttgtatctgcaaatgaacagtctgagagccgaggacacggctgtgtattactgtgcaagagggggttatagggtggacgtctggggccaagggaccacggtcaccgtctcctca

SEQ ID NO: 17813 - DNA, 283 bp, Homo sapiens
  source 1..283: mol_type = other DNA
tgcagcctctggattcaccttcagtacctcctggatgcactgggtccgccaagttccagggaaggggctggtgtgggtctcacatattaagaatgatgggactaccacaatctacgaggagtccgtgaagggccgattcaccatctccagagacaacgccaagaacacgctctatctgcagatgaacagtctgagagccgaggacacgggtgtatattactgtgcaagggggggatatagagtggacgtctggggcgtggggaccgcggtcaccgtctcctca

SEQ ID NO: 17814 - DNA, 277 bp, Homo sapiens
  source 1..277: mol_type = other DNA
tgcagcctctggattcaccttcagtagttatgaaatgaaccgggtccgccaggctccagggaaggagctggagtgggtttcatacattagtagtagtggtattaccatatactacgcagactctgtgaagggccgattcaccatctccagagacaacgccaagaactcactgtatctgcaaatgaacagcctgagagccgaggacacggctgtttattactgtgcgagagtcggtttagcctactggggccagggaaccctggtcaccgtctcctca

SEQ ID NO: 17815 - DNA, 277 bp, Homo sapiens
  source 1..277: mol_type = other DNA
tgcagcctctggattcaccttcagtggttatgaaatgaactgggtccgccaggctccagggaaggggctggagtgggtttgcaacattggtactagtggtgggcccatatactacgcagactctgtgaagggccgattcaccatctccagagacgacgccaagaagtcattgtatctgcaaatggacagcctgagaggcgaggacacggctatttattactgtgcgagagtggggttggcttactggggccagggagccctggtcaccgtctcctca

SEQ ID NO: 17816 - DNA, 271 bp, Homo sapiens
  source 1..271: mol_type = other DNA
tgcggcgtctggattcaccttcagtagctatggcatgcactgggtccgccaggctccaggcaaggggctggagtgggtggcagttatatggtatgatggaagtaataaatactatgcagactccgtgaagggccgattcaccatctccagagacaattccaagaacacgctgcatctgcaaatgaacagcctgagagccgaggacacggctgtgtattactgttcttgttttgagtactggggccagggaaccctggtcaccgtctcctca

SEQ ID NO: 17817 - DNA, 271 bp, Homo sapiens
  source 1..271: mol_type = other DNA
tgaagcgtctggattcatcttcaataaatatggcatgcactgggtccgccaggctccaggcagggggctggagtgggtggcagttatatggtctgatggaattagaaaagagtatgcagagtccgtgaagggccgattcaccatctccagagacaattcgaagaacacgctgtatctgcaagtgaacagcctgagaagcgaggacacggctgtatattattgttcctgctttgagtattggggccagggaaccctggtcaccgtctcctca

SEQ ID NO: 17818 - DNA, 283 bp, Homo sapiens
  source 1..283: mol_type = other DNA
tgcagcctccggattcacgcttggtacctattggatgagctgggtccgccaggctccagggaaggggctggagtgggtggccaagataaaacaagatggaagtgagaaatactatgtggactctgtgaagggccgattcaccatctccagagacaacgccaagaactcactgtatctgcaaatgaacagcctgagagccgaggacacggctgtgtattactgtgcgaggggcactggctggtatttctactggggccagggaaccctggtcaccgtctcctca

SEQ ID NO: 17819 - DNA, 283 bp, Homo sapiens
  source 1..283: mol_type = other DNA
tgcagcctctggattcacctttagtacctattggatgagctgggtccgccaggctccagggaaggggctggagtgggtggccagcataaagcaaaatggaagtgagaaatactctgtggactctgtgaagggccgattcaccatctccagagacaacgccaagaactcactgtatctgcaaatgaacagcctgagagccgaggacacggctgtgtattactgtgcgagagggactggctggtacttctactggggccagggaaccctggtcaccgtctcctca

SEQ ID NO: 17820 - DNA, 277 bp, Homo sapiens
  source 1..277: mol_type = other DNA
cactgtctctggtggctccatcagcagtggtagttactactggagctggatccggcagcccgccgggaagggactggagtggattgggcgtatctataccagtgggagcaccaattacaacccctccctcaagagtcgagtcaccatatcagtagacacgtccaagaacgagttctccctgaagttgagctctgtgaccgccgcagacacggccgtctattactgtgcgagaaaattcgatgtctggggccgcggcaccctggtcactgtctcctca

SEQ ID NO: 17821 - DNA, 277 bp, Homo sapiens
  source 1..277: mol_type = other DNA
cactgtctctggtttctccgtcagcagtggtggttactactggagctggatccggcaggccccaggggagggactggagtggattggccacatctattacagtgggagtaccaactacaacccctccctcaagagtcgagtcaccatatcagtagacacgtccaagaatcagttttccctgaagttgacctctgtgaccgctgcggacacggccgtgtattattgtgcgagaaagttcgatgtctggggccgtggcaccctggtcactgtctcctca

SEQ ID NO: 17822 - DNA, 293 bp, Homo sapiens
  source 1..293: mol_type = other DNA
ccatctccggggacagtgtctctagcaacagtgttacttggaactggatcaggcagtccccatcgagaggccttgagtggctgggaaggacatactacaggtccaagtgggaaataaattatgcagtatctgtgaaaggtcgagtgaccatcaactcagacacatccaggaaccagatctccctgcagttgaactctgtgactcccgaggacacggccgtatattactgtgcaagagcaactggggggatttttgactactggggccagggaaccctggtcaccgcctcttca

SEQ ID NO: 17823 - DNA, 293 bp, Homo sapiens
  source 1..293: mol_type = other DNA
ccatctccggggacagtgtctctagcaacagtgctacttggaactggatcaggcagtccccatcgggaggccttgagtggctgggaaggacatactacaggtccaagtggtctaatgattatgcagtatctgtgaaaagtcgaataaccatcaacgcagacacatccaagaaccagttctccctgcaattgaactctatgactcccgaggacacggctatatattattgtgcaagagcgactggcggcatctttgactactggggccagggaaccctggtcaccgtctcctca

SEQ ID NO: 17824 - DNA, 289 bp, Homo sapiens
  source 1..289: mol_type = other DNA
tgcagcctctggattcaccttcagtacctttggcatgcactgggtccgccaggctccaggcaaggggctggagtgggtggcagttatttcatatgatggaagcaataaatactacgcagactccgtgaagggccgattcaccatctccagagacaattccaagaacatgctgtatctgcaaatgaacagcctgagacctgaggacacggctgtatattactgtgcgagagtccccagtgggagctactttgactattggggccagggaaccctggtcaccgtctcctca

SEQ ID NO: 17825 - DNA, 289 bp, Homo sapiens
  source 1..289: mol_type = other DNA
tgcagcgtctggattcaccttcagtagctatggcatgcactgggtccgccaggctccaggcaaggggctggagtggttggcagttatatcatatgatggaaagaataaatactatatagactccgtgaagggccgattcaccatctccagagacaattccaagaacacactgtatctgcaaatgaacagcctgagagctgaggacacggctatgtattactgtgcgagagtccctagtgggagctattttgactactggggccagggaaccctggtcaccgtctcctca

SEQ ID NO: 17826 - DNA, 283 bp, Homo sapiens
  source 1..283: mol_type = other DNA
tgcagcctctggattcacctttaccaactctgccatgaactgggtccgccaggctccagggaagggactggagtgggtctcatgcattactagaagtggtggtgacacattctacgcagactccgtgaagggccggttcaccatctccagagacaattccgagaacacggtgtatctgcaaatgaacagcctgagagccgaggacacggctctatattactgtgcgaagcgaggtgattattttgattcctggggtcagggaattctggtcaccgtcccctca

SEQ ID NO: 17827 - DNA, 283 bp, Homo sapiens
  source 1..283: mol_type = other DNA
tgcagcctctggattcacctttagcacctatgccatgagctgggtccgccaggctccagggaaggggctggagtgggtctcagttatttatagcggtgatagtagcacatactatgcagactccgtgaagggccggttcaccatctccagagataattccaagagcacgctgtatctgcaaatgaacagcctgagagccgaggacacggccatatattactgtgcgaaacgtggtgactactttgactcctggggccagggaaccctggtcaccgtctcctca

SEQ ID NO: 17828 - DNA, 286 bp, Homo sapiens
  source 1..286: mol_type = other DNA
tgcagcctctggattcaccttcaatacctatgctgtgcactgggtccgccaggctccaggcaaggggctggagtgggtggcagttatatcatatgatggaagtaataaatactacgcatactccgtgaagggccgattcaccatctccagagacaattccaagaacaccctgtatctgcaaatgaacagcctgagagctgaggacacggctgtgtatcactgtgcgagactggtagcagcagcgtttgactactggggccagggaaccctggtcaccgtctcctca

SEQ ID NO: 17829 - DNA, 286 bp, Homo sapiens
  source 1..286: mol_type = other DNA
tgcagcctctgtattcaccttcagtagctatgctatgcactgggtccgccaggctccaggcaaggggctggagtgggtggcagttatatcatatgatggaagtaataaatattacgcagactccgtgaagggccgattcaccatctccagagacaattcgaagaacacgctgtatctgcaaatgaacagcctgagagctgaggacacggctgtttatcactgtgcgagactggtcgcggcggcctttgactactggggccagggaaccctggtcaccgtctcctca

SEQ ID NO: 17830 - DNA, 271 bp, Homo sapiens
  source 1..271: mol_type = other DNA
tgcagcctctggattcaccttcagtagctatggcatacactgggtccgccaggctccaggcagggggctggagtggctggcagttatatcatatgatggaggtaatgactactatgcagactccgtgaaaggccgattcaccgtctccagagacaattccaggtacaacctttatctgcaaatgaacagcctgacagctgaagacacggctgtgtattactgttcgaccttcgactactggggccagggaaccctggtcaccgtctcctca

SEQ ID NO: 17831 - DNA, 271 bp, Homo sapiens
  source 1..271: mol_type = other DNA
tgcagcctccggattcaccttcagtagttatggcgtgcactgggtccgccaggctccaagcaaggggctggagtgggtggcagttatatcacatgatggaagcaataaagagtatgaagactccgtgaagggccgattcaccatctccagagacaactccaagaacacgctgtatctgcaaatgaacagcctgagagctgaggacacggctgtctattactgtagcacgtttgactactggggccagggaaccctggtcaccgtctcctca

SEQ ID NO: 17832 - DNA, 295 bp, Homo sapiens
  source 1..295: mol_type = other DNA
cactgtttctggtggctccatcagtaattactactggagttggttccggcagcccgccgggaagggcctggagtggattgggcgtatctattccactgggagcaccgcctacaacccctccctcaagactcgagtcaccatgtcagtagacacgtccgagaaccagttctccctgaggctgcactctgtgaccgccgcggacacggccgtctattactgtgcgaggggagcagcaactggttccgggaactggttcgacccctggggccagggaaccctggtcaccgtctcctca

SEQ ID NO: 17833 - DNA, 295 bp, Homo sapiens
  source 1..295: mol_type = other DNA
cactgtctctggtggctccatcaataattactactggagctggttccggcagcccgccgggaagagactggagtggattgggcgtgtctataccagtggggccaccagctacaacccctccctcaagagtcgagtcaccatgtcagtagacacgtccaagaaacagttgtccctggagctgacctctgtgaccgccgcggacacggccgtgtattattgtgcgaggggggcagcaactggtagtgggaactggttcgacccctggggccagggaaccctggtcaccgtctcctca

SEQ ID NO: 17834 - DNA, 306 bp, Homo sapiens
  source 1..306: mol_type = other DNA
aagggttctggatacaggtttaccagcaactggatcagctgggtgcgccagatgcccgggaaaggcctggagtggatggggaggattgatcctactgactcttataccaactacagcccgtccttccaaggccacgtcaccatctcagttgacgagtccatcgacactgcctacctacagtggggcagcctgaaggcctcggacaccgccatatattactgtgcgagagcggatcctactcgagggatcccttattactatggcatggacgtctggggccaagggaccgcggtcaccgtctcctca

SEQ ID NO: 17835 - DNA, 306 bp, Homo sapiens
  source 1..306: mol_type = other DNA
aagggttctggatacagctttaccaactactggatcagctgggtgcgccagatgcccgggaaaggcctggagtggatggggcggattgatcctagtgactcttataccaagtacagcccgtccttccaaggccacgtcaccatctcagctgacaagtccatcagcactgcctacctgcagtggagcagcctgaaggcctcggacaccgccatctattactgtgcgagagcggatcctactcgagggattccctattattacggtatggacgtctggggccaagggaccacggtcaccgtcgcctca

SEQ ID NO: 17836 - DNA, 295 bp, Homo sapiens
  source 1..295: mol_type = other DNA
tgcagcctctggattccttttcaggacctatggcatgcactgggtccgccaggctccaggcaaggggctggactgggtggcagttatatcaaatgatggaggtaggaaacactatggagactccgtgaagggccgattcaccatctccagagacaactctaacaacatgctgtatctgcaaatggacagcctgagacctgaggacacggctgtgtattattgtgtgaaagatagggtcacggaggcctacggtatggaggtctggggccaagggaccacggtcaccgtctcctca

SEQ ID NO: 17837 - DNA, 295 bp, Homo sapiens
  source 1..295: mol_type = other DNA
tgcagcctctggattccccttcagtagatctggcatgcactgggtccgccaggctccaggcaaggggctggagtgggtggcagttatacggaatgatggaagcagacaattctatggagactccgtgaagggccgattcaccatctccagagacaattccaagaacatggtgtttctgcaaatgaacagtctgagacttgaggacacggctgtgtactactgtgtgaaagatcgcgtgacggaagcctacggtatggaagtctggggccaagggaccacggtcagtgtctcctca

SEQ ID NO: 17838 - DNA, 307 bp, Homo sapiens
  source 1..307: mol_type = other DNA
tgaagcctctggaatcactgtcagtgatgcctggatgaactgggtccgccaggttccagggagggggctggagtgggttggccgtgttaaagacaaattaaatggtgggagaacagactacgctgcacccgtgaaaggcagattcaccgtctcaagagatgattcaaagaacactctgtatctccaaatgaacagcctgaaaaccgaggacacagccgtgtattactgtgccacagacgattactatgcctcggggacttatttctttgacttctggggccagggaaccctggtcaccgtctcctca

SEQ ID NO: 17839 - DNA, 307 bp, Homo sapiens
  source 1..307: mol_type = other DNA
tgcagcctctggattcactttcagtaacgcctggatgaactgggtccgccaggctccagggaagggactggaatgggttggccgtatcaaaaggaaaattgacggtgggacaacagactacgctgcacccgtgaaaggcagattcaccatctcaagagatgactcaaaaaacaccctgtatctgcagatgaacagcctgagaaccgaggacacagccgtgtattactgtgccacagatgattactatgcttcggggacttatttctttgacttctggggccagggaaccctggtcaccgtctcctca

SEQ ID NO: 17840 - DNA, 301 bp, Homo sapiens
  source 1..301: mol_type = other DNA
cgcagcctctggattcagcttcagtagtcatggcatgcactgggtccgccaggctccaggcaaggggctggagtgggtggcaatgatgtcatatgttggaactagtgaattctatatagactccgtgaagggccgattcaccatctccagagacaattccaagaatacgctgtatctgcaaatgaacagcctgaggactgaggacacggctgtctattactgtgcgaaagacttgtatgacaatggctggtacaactacttcgacccctggggccagggaaccctggtcatcgtctcctca

SEQ ID NO: 17841 - DNA, 301 bp, Homo sapiens
  source 1..301: mol_type = other DNA
tgcagcgtctggattcaccctcaacaactgtggcatgcactgggtccgccaggctccaggcaagggcctggagtgggtggccatgatttcatatgatggaagaagtgaatactatgcagactccgttaagggccgattcaccatctccagagacaattccaagaacacactgtatctgcaaatgaccaacctgagacctgaggacacggctatatattactgtgcgaaagatttatatgacaatggctggtacaactacttcgacccctggggccagggaacccttgtcaccgtctcctca

SEQ ID NO: 17842 - DNA, 294 bp, Homo sapiens
  source 1..294: mol_type = other DNA
gcttctggatacacattcactagctatgctgtgaattgggtgcgacaggcccctggacaaggacttgagtggatgggatggatcaacaccaacactgggaacccaacgtatgcccagggcttcacaggacggtttgtcttctccttggacacctctgtcagcacggcatatctgcagatcagcagcctaaaggctgaggacactgccatgtattactgtgcgagaggcctccgttatggttcggggagttattatgactactggggccagggaaccctggtcaccgtctcctca

SEQ ID NO: 17843 - DNA, 294 bp, Homo sapiens
  source 1..294: mol_type = other DNA
gcttctggatatactttcactaactatgctattaattgggtgcgacaggcccctggaccagggcttgagtggatgggatggatcaacaccaacactgggaacccaacgtatgcccagggcttcacaggacgatttgtcttctccttggacacctctgtcaacacggcatatctgcagatcagcagcctaaaggctgaggacactgccgtgtattactgtgcgagaggcctccggtatggttcggggagttattacgactactggggccagggaaccctggtcaccgtctcctca

SEQ ID NO: 17844 - DNA, 288 bp, Homo sapiens
  source 1..288: mol_type = other DNA
aaggtttctagatacagcttttccagctactggatcgcctgggtgcgccagatgcccgggaaaggcctggagtggatgggcatcatctatcctggtgactctaatattagatacagaccgtccttccaaggccaggtcaccatctcagccgacaagtccatcagcaccgcctacctgcagtggaggagcctgaaggcctcggacaccgccatatattactgtgcgagcgggggttcggggagtcatattgactactggggccggggaaccctggtcaccgtctcctca

SEQ ID NO: 17845 - DNA, 288 bp, Homo sapiens
  source 1..288: mol_type = other DNA
aagggttctggatacagctttaccagtcactggatcggctgggtgcgccagatgcccgggaaaggcctggagtggatggggatcatctatcctggtgactctgataccagatacagcccgtccttccaaggccaggtcaccatctcagtcgacaagtccatcagcaccgcctacgtgcagtggagcagcctgaaggcctcggacaccgccatgtattactgtgcgagcgggggtagtgggagtcatattgactactggggccagggaaccctggtcaccgtctcctca

SEQ ID NO: 17846 - DNA, 298 bp, Homo sapiens
  source 1..298: mol_type = other DNA
tgcagcgtctggattcaccttcggtagttatggcatgcactgggtccgccaggctccaggcaaggggctggagtgggtggcagttatatggtttgatggaagtaataaatactatgcagactccgtgaagggccgattcgccatctccagagacaattccaagaacacgctgtctctgcaaatgaacagcctgagagccgaggacacggctgtgtattactgtgcgagagatggtggatttagtggctatgcctactttgactattggggccagggaaccctggtcaccgtctcctca

SEQ ID NO: 17847 - DNA, 298 bp, Homo sapiens
  source 1..298: mol_type = other DNA
tgtagcgtctggattcaccttcagtagctatggcatgcactgggtccgccaggctccaggcaaggggctggagtgggtggcagttatatggtttgatggaagtaataaatattatgcagactccgtgaagggccgattcaccatctccagagactattccaagaacacgctgtatctgcaaatgaacagcctgagagccgaggacacggctgtttattactgtgcgagagatgggggatttagtggctacgcatactttgactactggggccagggaaccctggtcaccgtctcctca

SEQ ID NO: 17848 - DNA, 337 bp, Homo sapiens
  source 1..337: mol_type = other DNA
tgcagcctctggattcagctttagcaactatgtcatgagttgggtccgccaggctccagggaaggggctggagtgggtctcaggtattagtggtagtggtggtagtggtggtaacacatactacgcagactccgtgaggggccggttcaccatctccagagacaattccaagaacacgctgcatctgcaaatgaacagcctgagagccgaggacacggccgtttattattgtgcaaaagtttgggggggatattgtagtggtattacctgctactccccctactactactacggtatggacgtctggggccaagggaccacggtcaccgtctcctca

SEQ ID NO: 17849 - DNA, 328 bp, Homo sapiens
  source 1..328: mol_type = other DNA
tgcagcctctggattcacctttaccagctatgtcatgagctgggtccgccaggctccagggaaggggctggagtgggtctcaagtatgagtggcagagggggtgacacatattatgcagactccgtgaagggccggttcaccatctccagagacacttccaagaacactctatatctgcaaatgaacagcctgagaggcgaggacacggccgtatattactgtgcgaaggtgtgggggggatattgtagtggtatcacctgctattccccctactactactacggtatggacgtctggggccaggggaccacggtcgccgtctcctca

SEQ ID NO: 17850 - DNA, 295 bp, Homo sapiens
  source 1..295: mol_type = other DNA
tgcagcctctggattcgaagcctctggattcattttcagtagttataccatgaattgggtccgccaggctccagggaaggggctggagtgggtctcatccattagtagtagtggtagttacatatattatggagactcagtgaagggccgattcaccatctccagagacaacgccaagaactcactatatttgcacatgaacagcctgagagtcgaggacacggctgtgtattactgtgcgagaagcgacggtctggacgtctggggccaagggaccacggtcaccgtctcctca

SEQ ID NO: 17851 - DNA, 280 bp, Homo sapiens
  source 1..280: mol_type = other DNA
tgcagcctctggattcaccttcagtagttataccatgcactgggtccgccagactccggggaagggactagagtgggtcgcatccattacgaatactggtgtctacataaactacgcagactcagtgaagggccgattctccatctccagagacaacgccgagaagtcactctctctgcacatgaacggcctgacagccgacgacacggcgatatatttctgtgcaagatcagatggtctggacgtctggggccaagggaacacggtcaccgtctcctca

SEQ ID NO: 17852 - DNA, 289 bp, Homo sapiens
  source 1..289: mol_type = other DNA
tgtagcctctggattcacctttagtacctactggatgagctgggtccgccaggctccagggaaggggctggagtgggtggccaacataaatcaagatggaaatgggaaatactatgtggactctgtgaagggccgattcaccgtctccagagacaacgccaagaactcactatatctgcaaatgaacagcctgagagtcgaggacacggctgtgtattactgtgcgagagcactgggactacctgactttgacttctggggccagggaaccctgctcaccgtctcctca

SEQ ID NO: 17853 - DNA, 289 bp, Homo sapiens; identical to SEQ ID NO: 17852
  source 1..289: mol_type = other DNA

SEQ ID NO: 17854 - DNA, 289 bp, Homo sapiens
  source 1..289: mol_type = other DNA
tgcagcctctggattcacctttagtagatattggatgagctgggtccgccaaactccagggaaggggctggagtgggtggccaacataaagcatgatggaagtgagaaatactatgtggactctgtgaagggccgattctccgtctccagagacaacgccaagaactcactgtatctgcaaatgcacagtctgagagccgaggacacggctgtctattactgtgcgagagcgttggggcttcctgactttgacttctggggccagggaaccctggtcaccgtctcctca

SEQ ID NO: 17855 - DNA, 274 bp, Homo sapiens
  source 1..274: mol_type = other DNA
tgcagcctctggattcacctttagtagttattggatgagctgggtccgccaggctccagggaaggggctggagtgggtggccaacacaaagccagatggaagtgacaagtactatgaaccctctgtggagggccgattcaccatctccagagacaacgccaagaactcagtgtatctgcaaatgaacagcctgagagtcgaggacacggctgtgtattactgcgcggctggtcttggctactggggccagggaaccctggtcaccgtctcctca

SEQ ID NO: 17856 - DNA, 274 bp, Homo sapiens
  source 1..274: mol_type = other DNA
tgcagcctctggattcacctttagtagctattggatgacctgggtccgccaggctccaggaaaggggctggagtgggtggccaccataaagccagatggaagtgacaaatggtttgtggactctgtgaagggccgattcaccatctccagagacaacgcccagaactcagtgtatctgcaaatgaacagcctgagagccgaggacacggctgtatattactgtgcggctgggcttggctactggggccagggaaccctggtcaccgtctcccca

SEQ ID NO: 17857 - DNA, 280 bp, Homo sapiens
  source 1..280: mol_type = other DNA
tgcagtctctggattcacatttaccggccatgacatgagttgggtccgccaggctccagagaaggggctggagtgggtctcaactattcgtggttctggtagtcctacatactacgcagactccgtgaagggccgcttcaccatctccagagacgactccaagaacacactgtatctccaaatgaccagcctgagagtcgaggacacggccatatattattgtgtgaaaggaagttggatcgactacttcggccagggaaccctggtcaccgtctcctca

SEQ ID NO: 17858 - DNA, 280 bp, Homo sapiens
  source 1..280: mol_type = other DNA
tgcagcctctggattcccctttaccacctatgacatgacctgggtccgccaggctccagggaaggggctggagtgggtctcagttattattggtagggatggtaggacatactacgcagactccgtgaagggccggttcaccatctccagagacaattccgagaacacactgtatctgcaaatgaacagcctgagagccgaggacacggccatatattactgtgtgaaagggtcctggattgactattggggcccgggaaccctggtcaccgtctccgca

SEQ ID NO: 17859 - DNA, 295 bp, Homo sapiens
  source 1..295: mol_type = other DNA
cactgtctctggtggctccatcaatggtgctggttaccactggagctggatccgccagcacccagggaagggcctggagtacattgggcacataaattacggtgggagtacatactacaatccgtccctcaggagtcgacttaccatatcacttgacacgtctgagaatcagtactccctgagactcacctccgtgactgccgcggacacggccgtgtattactgtgcgacatattatgaaggtgttggtgggcggggcgactggggccagggaaccctggtcaccgtctcctct

SEQ ID NO: 17860 - DNA, 295 bp, Homo sapiens
  source 1..295: mol_type = other DNA
cactgtctctggtggctccatcagcagtcggggttatcactggacctggatccggcagcgccccgggaagggcctggagtggattggtcagatccacgtggatgggaatttctactacagcccgtcccttaagagtcgagttaccgtgtcaaaagacgtgtccaagaaccagttctccctgaggttgaactctgtgactgacgcggacacggccgtatattactgtgcgacatattatgaaggtgttggcgggcggggggactggggccagggaaccctggtcaccgtctcctca

SEQ ID NO: 17861 - DNA, 286 bp, Homo sapiens
  source 1..286: mol_type = other DNA
ttcagcctctggattcatttttagcaaaaatgccatggcctgggtccgccagggtcctgggaaggggctggagtgggtctcgtctattggtagtgatgataacacatactacgcagactccgtgaaaggccggttcaccacttccagagacacttccaagaacacactgtttctgcaaatgaacagcctgagtgccgaggacacggccatatattactgtgcgaaggatatctaccggtggtcatttgactattggggccaggggatcctggtcaccgtctcctca

SEQ ID NO: 17862 - DNA, 289 bp, Homo sapiens
  source 1..289: mol_type = other DNA
tatggcctctggattcaatctctggagtaatgccatgacctgggtccgccggtctccagggaaggggctggagtgggtcgcagcaattaatggaggaaatgatgacacaaattatgcagactccgtgaagggccgattcaccatctccagagacaattccaagaacattctgtatctgcaaatgaacagcctgagagccgaggacacggccatctattactgtgcgaaagacatctatagatggagttttgactactggggccagggagcccaggtcaccgtctcctcg

SEQ ID NO: 17863 - DNA, 289 bp, Homo sapiens
  source 1..289: mol_type = other DNA
tatggcctctggattcgatctctggagtaacgccatgacctgggtccgccggtctccagggaaggggctggagtgggtcgcagcaattaatggaggaaatgatgacacaaattatgcagactcggtgaagggccgattcaccatctccagagacaattccaagaacattctgtatctgcaaatgaacagcctgagagccgaggacacggccatctattactgtgcgaaagacatctatagatggagttttgactactggggccagggagtccaggtcaccgtctcctcg

SEQ ID NO: 17864 - DNA, 283 bp, Homo sapiens
  source 1..283: mol_type = other DNA
tgcagcctctggattcaccttcagtagctactggatgcactgggtccgccaggctccagggaaggggctggtgtgggtctcacgtattaatgatggtgggggtagcacaacgtacgcggactccgtgaagggccgattcaccatctccagagacaacgccaagaacacgctgtatctgcaaatgaacagtctgagagccgaggacacggctgtctattactgtgcaagagggcgctacggtgacaactactggggccagggaaccctggtcaccgtctcctca

SEQ ID NO: 17865 - DNA, 283 bp, Homo sapiens
  source 1..283: mol_type = other DNA
tgcagcctctggattcaccttcagtagctactggatgcactgggtccgccaagctccagggaaggggctggtgtggctgtcacgtattaatagtgatggtggtagtacaacctacgcggagtccgtgaagggccgattcaccatctccagagacaacgccaagaacactctgtatctgcaaatgaacagtctgagagccgaggacacggctgtgtattactgtgcaagaggacgatacggtgacaactactggggccagggaaccctggtcaccgtctcctca

SEQ ID NO: 17866 - DNA, 289 bp, Homo sapiens
  source 1..289: mol_type = other DNA
tgcagcctctgaattcgcctttagtggctattggatgagctgggtccgccaggctccagggaaggggctggagtgggtggccaacataaaacaagatgaaagtgagaaatactatctggactctgtgaagggccgattcaccatctccagagacaacgccaagaactcactgtatctgcaaatgaacagcctgggagccgaggacacggctctgtatttctgtgcgagagatgttggagggggtttctttgactactggggccggggaaccctggtcaccgtctcctcg

SEQ ID NO: 17867 - DNA, 289 bp, Homo sapiens
  source 1..289: mol_type = other DNA
tgcagcctctggattcagttttagaagtcattggatgacctggctccgccagactccagggaagcggccggagtgggtggccaacataaaccaagatgggagcgtgacaaactatatagattctgtggggggccgattcaccatctccagagacaacgccaagacctcagtgtatctgcaaatgaacagcctgagagccgaggacaccgctgtctattactgtgcgagagatgtgggcggtggatttttcgactactggggccagggaaccctggtcaccgtctcctca

SEQ ID NO: 17868 - DNA, 287 bp, Homo sapiens
  source 1..287: mol_type = other DNA
cagcctctggattcagttttagaagtcattggatgacctggctccgccagactccagggaagcggccggagtgggtggccaacataaaccaagatgggagcgtgacaaactatatagattctgtggggggccgattcaccatctccagagacaacgccaagacctcagtgtatctgcaaatgaacagcctgagagccgaggacaccgctgtctattactgtgcgagagatgtgggcggtggatttttcgactactggggccagggaaccctggtcaccgtctcctca

SEQ ID NO: 17869 - DNA, 289 bp, Homo sapiens
  source 1..289: mol_type = other DNA
tgcagcctctggattcagttttagaagtcattggatgacctggctccgccagactccagggaagcggccggagtgggtggccaacataaaccaagatgggagcgtgacaaactatatagattctgtggggggccgattcaccatctccagagacaacgccaagacctcagtgtatctgcaaatgaacagtctgagagccgaggacaccgctgtctattactgtgcgagagatgtgggcggtggatttttcgactactggggccagggaaccctggtcaccgtctcctca

SEQ ID NO: 17870 - DNA, 289 bp, Homo sapiens
  source 1..289: mol_type = other DNA
tgcagcctctggattcagttttagaagtcattggatgacctggctccgccagactccagggaagcggccggagcgggtggccaacataaaccaagatgggagcgtgacaaactatatagattctgtggggggccgattcaccatctccagagacaacgccaagacctcagtgtatctgcaaatgaacagcctgagagccgaggacaccgctgtctattactgtgcgagagatgtgggcggtggatttttcgactactggggccagggaaccctggtcaccgtctcctca

SEQ ID NO: 17871 - DNA, 298 bp, Homo sapiens
  source 1..298: mol_type = other DNA
tatagcgtctggattcaccttcagtagctatggcatgcactgggtccgccaggctccaggcaaggggctggagtgggtggcagttatatggtttgatggaagaaataaatactatgcagactccgtgaagggccgagtcaccatctccagagacaattccaagaacacgctgtctatgcaaatgaacagcctgagagccgaggacacggctgtgtattactgtgcgagagagggtatagtgggaactactacgggacttgactcctggggccggggaaccctggtcaccgtctcctca

SEQ ID NO: 17872 - DNA, 298 bp, Homo sapiens
  source 1..298: mol_type = other DNA
tgtagcgtctggattcaccttcagtaattatggcatgcactgggtccgccaggctccaggcaagggactggagtgggtgtcacttatatatcatgatggaagtaataaatactatgcagactccgtgaagggccgattcaccatctccagagacaactccaagaacacgctgtatctgcaaatggacagcctgagagccgaggacacggctatgtattattgtgcgagagagggtatagtgggaactactacgggccttgactcctggggccagggaaccctggtcaccgtctcctca

SEQ ID NO: 17873 - DNA, 298 bp, Homo sapiens
  source 1..298: mol_type = other DNA
tgcagcgtctggattcaccttcagtaactatggcatgcactgggtccgccaggctccaggcaaggggctggagtgggtggcagttgtttggcatgatggaaataataaatactatgcagactccgtgaagggccgattcaccatttccagagacagctccaagaacatggtgtatctgcagatgaacagcctgagagccgaggacacggctgtctattactgtgcgcgggagggtatagtgggcacaaccacagggcttgactcctggggccagggaaccctggtcaccgtctcctca

SEQ ID NO: 17874 - DNA, 295 bp, Homo sapiens
  source 1..295: mol_type = other DNA
tgcagcctctggattcacctttgatgattatgccatgagctgggtccgccaaggtccagggaaggggctggagtgggtctctggtattaattggaatggtggtaacacagcttatgcagattctgtgaagggccgattcaccatctccagagacaacgccaagaactccctgtatctgcaaatgagcagtctgagagccgaggacacggccttgtattactgtgcgagagggtatagcagtggcttgtactactttgactattggggccagggaaccctggtcaccgtctcctca

SEQ ID NO: 17875 - DNA, 295 bp, Homo sapiens
  source 1..295: mol_type = other DNA
tgcagcctctggattcacctttggtgattatggcatgagctgggtccgccaagctccagggaaggggctggagtgggtctctggtattaattggaatggtggtagcacaggttatgcagactctgtgaagggccgattcaccatctccagagacaacgccaagaactccctgtatctgcaaatgaacagtctgagagccgaggacacggccttgtattactgtgcgagagggtatagcagtggcctgtactactttgactactggggccagggaaccctggtcaccgtctcctca

SEQ ID NO: 17876 - DNA, 292 bp, Homo sapiens
  source 1..292: mol_type = other DNA
tgcagtctctggatttaccttcagtgattattggatgcactgggtccgccaaggtccaggggaggggctgatgtgggtctcagaaataaattcggaggggactacgacagcctacgcggtctccgtgaggggccgattcaccgtctccagagacaacgccgggaatacgctgattttgcaaatgaatggtctgagagtcgaggacacggctatgtattactgtgtgagagggaccagaggaacatctggagtggactactggggccagggaacccttgtcaccgtctcccca

SEQ ID NO: 17877 - DNA, 292 bp, Homo sapiens
  source 1..292: mol_type = other DNA
tacagcctctggattcaccttcggtgactactggatgcactgggtccgccttgttcctgggaagggactactgtgggtctcacgtcttagcggtagtgggtggaccaaaagttacgtggactccgtgaagggccggttctacatctcccgagacaacgccaagaacacggtgtttctgcaaatgaacactctgagagccgaggacacggctatctactattgtgtaagaggaacgagaggtacctccggggttgactactggggccagggagccctggtctccgtctcctca

SEQ ID NO: 17878 - DNA, 277 bp, Homo sapiens
  source 1..277: mol_type = other DNA
tgcagcctctggattcactttcagtaacgcctggatgagttgggtccgccaggctccagggaaggggctggagtgggttggccgtattaaaagcaatactgatggtgggacaacagactacgctgcacccgtgaaaggcagattcaccatctcaagagatgattcaaaaagcacgctgtatttgcaaatgaacagcctgaaaaccggggacacagccgtgtattactgttcacggatggacgtctggggccaagggaccacggtcaccgtctcctca

SEQ ID NO: 17879 - DNA, 277 bp, Homo sapiens
  source 1..277: mol_type = other DNA
tgcagtctctggattcactctcagtaacgcctggatgagctgggtccgccagcctgcagggaaggggctggagtgggtcggccgtattagaagcaaaactgatggtgggacaacagagtacgctccactcgtgaaaggcagattcaccatctcaagagatgactcacaaaacacgctatatctgcaaatgaacagcctgaaaaccgaggacacagccgtgtattactgttcgcgtatggacgtctggggccaagggaccacggtcaccgtctcctca

SEQ ID NO: 17880 - DNA, 289 bp, Homo sapiens
  source 1..289: mol_type = other DNA
tgcagcctctggattcacctttaccacctatgccatgagctgggtccgccaggctccagggaaggggctggagtgggtctctgctattagtggtcgtagtggcagcacaaactacgcagactccgtgaagggccggttcaccacctccagagacaattccaacaatacggtgtttttgcaaatgaacagcctgagagccgaggacacggccgtttattactgtgcgaaggactatggtggtatcccatttgaccactggggccagggaaccctggtcaccgtctcctca

SEQ ID NO: 17881 - DNA, 289 bp, Homo sapiens
  source 1..289: mol_type = other DNA
tgcagcctctggattcacctttagcgtctatgccatgagctgggtccgccaggctccagggaaggggctggagtgggtctcagctattagtggtagtggtggtagtacaaactacgcagactccgtgaggggccggttcaccatctccagagacaattccaagaacacactttatctgcaaatgagcagcctgacagccgaggacacggccttatattactgtgcgaaggactacggtggtatcccctttgaccactggggccagggaaccctggtcaccgtctcctca

SEQ ID NO: 17882 - DNA, 277 bp, Homo sapiens
  source 1..277: mol_type = other DNA
tgcagcctctgggttcacctttagtagtgcttggatgaactgggtccgccaggccccagggaaggggctggagtgggtggccaacataaaacttgcaaatgagaagttctatgtggactctgtgaagggccgattcaccatctccagagacaacgccaagagctcactgtatctgcaaatgaacagcctgagagccgaggacacggctgtttattactgtgcgagagatcgtggatcaggctactggggccagggaaccctggtcaccgtctcctca

SEQ ID NO: 17883 - DNA, 277 bp, Homo sapiens
  source 1..277: mol_type = other DNA
tgcagcctctgggttcacctttagtagtgcttggatgaactgggtccgccaggccccagggaaggggctggagtgggtggccaacataaaacttgcaaatgagaagttctatgtggactctgtgaagggccgattcaccatctccagagacaacgccaagagctcactgtatctgcaaatgaacagcctgagagccgaggacatggctgtttattactgtgcgagagatcgtggatcaggctactggggccagggaaccctggtcaccgtctcctca

SEQ ID NO: 17884 - DNA, 280 bp, Homo sapiens
  source 1..280: mol_type = other DNA
tgcagcctctggattcacctttagtagctgttggatgacctgggtccgccagggtgcagggaaggggctggagtgggtggccaacataaagcaagatggaagtgagaaacactatgtggactctgtgaagggccgattcaccatctccagagacaacgccaagaacttactgtatctgcaaatggacagcctgagagccgaggacacggccatttattactgtgcgagagatcgggggagcgggtactggggccagggaaccctggtcaccgtctcctca

SEQ ID NO: 17885 - DNA, 280 bp, Homo sapiens
  source 1..280: mol_type = other DNA
tgcagcctctggattcacctttagtagctcttgtatgaactgggtccgccaggctccagggaaggggctggagtgggtggccaacataaagcaagatggaagtgagaaatactatgtggactctgtgaagggccgattcaccatctccagagacaacgcccagaactcactgtatctgcaaatgaacagcctgagagccgaggacacggctgtatattactgtgcgagagatcggggctcgggctactggggccagggaaccctggtcaccgtctcctca

SEQ ID NO: 17886 - DNA, 286 bp, Homo sapiens
  source 1..286: mol_type = other DNA
tgcagcctctggattcacctttaatagccattggatgaactgggtccgccaggctccagggaaagggctggagtgggtggccaacataaaggaagatgggagtgtgaaagtctatgtggactctgtgaagggccgattcaccatctccagagagaacgccaacaactcagtgtatctgcaaatgaacagcctgagagccgaggacacggccgtctatcactgtgtgcggggcagtggctgggtatttgactactggggccagggaaccctggtcaccgtctcctca

SEQ ID NO: 17887 - DNA, 286 bp, Homo sapiens
  source 1..286: mol_type = other DNA
tgcagcctctggattcacctttaatagccattggatgaactgggtccgccaggctccagggaaagggctggagtgggtggccaacataaaagaagatgggagtgtgaaagtctatgtggactctgtgaagggccgattcaccatctccagagagaacgccaacaactcagtgtatctgcaaatgaacagcctgagagccgaggacacggccgtctatcactgtgtgcggggcagtggctgggtatttgactactggggccagggaaccctggtcaccgtctcctca

SEQ ID NO: 17888 - DNA, 286 bp, Homo sapiens
  source 1..286: mol_type = other DNA
tgcagcctctggattcacctttaatagccattggatgaactgggtccgccaggctccagggaaagggctggagtgggtggccaacataaaggaagatgggagtgtgaaagtctatgtggactctgtgaagggccgattcaccatcttcagagagaacgccaacaactcagtgtatctgcaaatgaacagcctgagagccgaggacacggccgtctatcactgtgtgcggggcagtggctgggtatttgactactggggccagggaaccctggtcaccgtctcctca

SEQ ID NO: 17889 - DNA, 286 bp, Homo sapiens
  source 1..286: mol_type = other DNA
tgcagcctctggattcacctttaatagccattggatgaactgggtccgccaggctccagggaaagggctggagtgggtggccaacataaaggaagatgggagtgtgaaagtctatgtggactctgtgaagggccgattcaccatctccagagagaacgccaacaactcagtgtatctgcaaatgaacagcctgagagccgaggacacggccgtctatcactgtgtgcggggcagtggctgggtatttgactactggggccagggaaccctggtcaccgtctcttca

SEQ ID NO: 17890 - DNA, 286 bp, Homo sapiens
  source 1..286: mol_type = other DNA
tgcaacctctggattcacctttagtagccgttcaatgcactgggtccgccaggctccagggaaggggctggagtgggtggccaacataggccaagatggaagtgagaagtattatgtggactctgtgaagggccgattcaccatctccagagacaacggcaagaattcactgtctctacaaatgaatagcctgagagccgaggacacggctctctatcgctgtgtgagagggagtggctgggtctttgactactggggccagggaacccaggtcaccgtctcctca

SEQ ID NO: 17891 - DNA, 271 bp, Homo sapiens
  source 1..271: mol_type = other DNA
tacaacgtctggactcatcttcagtcactataacatacactgggtccgccaggctccaggcaagggactggagtgggtggcacttatttactatgatggcactactaaatattatgcagactccgtgaagggccgattcaccatctccagagacaattccaagaacaccctctatctgcaaatgaacgacctgagagccgaggacacggctgtatatcgctgtagtaattatgaatactggggccagggaaccctggtcaccgtctcctca

SEQ ID NO: 17892 - DNA, 271 bp, Homo sapiens; identical to SEQ ID NO: 17891
  source 1..271: mol_type = other DNA

SEQ ID NO: 17893 - DNA, 271 bp, Homo sapiens
  source 1..271: mol_type = other DNA
tgcagcgtctggattcaggttcaataactatggcatgcactgggtccgccaggttccaggcaagggactggagtggatgacactcatatcgtatgatgggagtaataaatactatgtagactccgtgaagggccgattcaccgtctccagagacaattccaagaagacactgtacttggaaatgaacagcctgagagtcgaggacacggctgtgtattactgttcgaattatgaatactggggccagggaaccctggtcaccgtttcctca

SEQ ID NO: 17894 - DNA, 289 bp, Homo sapiens
  source 1..289: mol_type = other DNA
tgcaggctttggattcaggtttggtggttacaccatgcactgggttcgtcaagctccggggaagggtctggagtgggtctctctgattagttgggattctactaatacatactatggagactctgtgaggggccgattcaccatctccagagacaacagcagaaacttcctgtatctgcaaatgaacagtctgagaacagaggacaccgccaagtattactgtgcaaaggagggcggtaccatattctttgactcttggggccagggaaccctggtcaccgtctcctca

SEQ ID NO: 17895 - DNA, 289 bp, Homo sapiens
  source 1..289: mol_type = other DNA
tggaggctatggattcaggtttgatggttacaccatgcactgggttcgtcaagctccggggaagggtctggagtgggtctccctgattagttgggattctattaatacatactatggagactctgtgaggggccgattcaccatctccagagacaacagcagaaacttcctgtatctggaaatgaacagtctgacaacagaggacaccgccaaatattactgtgcaaaggagggcggtaccatattctttgactcttggggccagggaacccaggtcaccgtctcctca

SEQ ID NO: 17896 - DNA, 289 bp, Homo sapiens
  source 1..289: mol_type = other DNA
tgcaacctctggattcgcctttgatgcttttaccatgcactgggtccgtcaagttccgggtcagggtctggagtgggtctctcttattagttgggatagtactaacacatactatgcagactctgtgaagggccgattcaccatctccagagacaacagcaaaaactccctgtatttacgaatgaacactctgagaactgaggacaccgccttctattactgtgcaaaagaggggggcacaatcttctttgactcctggggccagggaacccaggtcaccgtctcctca

SEQ ID NO: 17897 - DNA, 292 bp, Homo sapiens
  source 1..292: mol_type = other DNA
tacagcttctggattcacctttggtggttatcctatgagctgggtccgccaggctccagggaaggggctggagtgggtaggtttcattagaagcaaagcttatggtgggacaacagaatatgccgcgtctgtgaagggcagattcaacatctcaagagatgattccaaaagcatcgcctatctgcaaatgaacagcctgaaatccgaggacaccgccgtgtattactgtactagagaggtggggggcgtctcggactactggggccagggaaccctggtcaccgtctcctca

SEQ ID NO: 17898 - DNA, 292 bp, Homo sapiens
  source 1..292: mol_type = other DNA
ttcagcttctggattcacctttggtgattgtgctatgagctgggtccgccaggctccagggaaggggctggagtgggtaggtttcattagaagcaaagcttatggtgggacaacagaatacgccgcgtctgtgaaaggcagattcaccatctcaagagatgattccaaaagcgtcgcctatctgcaaatgaacagcctgaaaaccgaggacacagccgtatattactgtactagagaggtgggtggtgtttctgactactggggccagggaaccctggtcaccgtctcctca

SEQ ID NO: 17899 - DNA, 286 bp, Homo sapiens
  source 1..286: mol_type = other DNA
tgcagcctctggattcaccttcagtacctatgccatgagctgggtccgccagcctccagggaaggggctggagtgggtttcatatattagtagtagtagtagtaccatatactacgcagactctgtgaagggccgattcaccatctccagagacaacgccaagaactcactgtatctgcaaatgaacagcctgagagccgaggacacggctgtgtattactgtgcgagagatttcggcgggtacttccaacactggggccagggcacccttgtcaccgtctcctca

SEQ ID NO: 17900 - DNA, 286 bp, Homo sapiens
  source 1..286: mol_type = other DNA
tgcagcctctggattcaccttcagtagctataccatgaactgggtccgccaggctccagggaaggggctggagtgggtttcatacattagtagtagtagtagtaccatttactacgcagactctgtgaggggccgattcaccatctccagagacaatgccaagaactcactgtatctgcaaatgaacagcctgagagacgaggacacggctgtctattactgtgcgagagattttgggggatacttccagcactggggccagggcaccctggtcaccgtctcctca

SEQ ID NO: 17901 - DNA, 280 bp, Homo sapiens
  source 1..280: mol_type = other DNA
tgcagcctctggattcacctttagtagctattggatgagctgggtccgccaggctccagggaaagggctggagtgggtggccaacataaagcaagatggaagtgagaaatactatgtggactctgtgaagggccgattcaccatctccagagacaacaccaagaactcactgtatctgcaaatgaacagcctgagagccgaggacacggccgtgtattactgtgcgaggaactgggcttttgactactggggccagggaaccctggtcaccgtctcctca

SEQ ID NO: 17902 - DNA, 280 bp, Homo sapiens
  source 1..280: mol_type = other DNA
tgcagcctctggattcacctttagtaactattggatgagctgggtccgccaggctccagggaaggggctggagtgggtggccaacataaagaaagatggaagtgagaaatattatgtggactctgtgaagggccgattcaccatctccagagacaacgccaagaactcactgtatctgcaaatgaacagcctgagagccgaggacacggctgtgtattactgtgcgagaaactgggcatttgactactggggccagggaaccctggtcatcgtctcctca

SEQ ID NO: 17903 - DNA, 292 bp, Homo sapiens
  source 1..292: mol_type = other DNA
tgcggcctctggattctccttcagttatttctggttccattgggtccgccaaactccagggaaggggctggactgggtctcacgcattgatcctaatggtgataatatagtctacgcggactccgtgaagggccgatttaccatctccagagacaacgccgcgaacacactgcatctgcagatgaccagtttgagagacgacgacacggctctgtatttttgtgtgaggggtaccagtgactgggccgggactgactactggggccagggatccctggtcaccgtctcctca

SEQ ID NO: 17904 - DNA, 292 bp, Homo sapiens
  source 1..292: mol_type = other DNA
tgtagcctctggattccctatcagaaattactggatgcactgggtccgccaagctccagggaaggggctggtgtgggtctcacgtcttagtgatgatagagatacaatagaatatgcggactccgtgaatggccgattcaccatctccagagacgacgccaagaacacgctgtatctgcaaatgagcagtctgagagacgaagacacggctctgtattactgtgtaagaggaacaagtgactgggccgggactgactactggggccagggaaccctggtcaccgtctcctca

SEQ ID NO: 17905 - DNA, 274 bp, Homo sapiens
  source 1..274: mol_type = other DNA
tgcagcctctggattcaccttcagtagctatagcatgaactgggtccgccaggctccagggaaggggctggaatgggtttcatacattagtagtagtagtagtaccatatactacgcagactctgtgaagggccgattcaccatctccagagacaacgccaagaactcactgtatctgcaaatgaacagcctgagagccgaggacacggctgtgtattactgtgcgggagggttgggctactggggccagggaaccctggtcaccgtctcctca

SEQ ID NO: 17906 - DNA, 274 bp, Homo sapiens
  source 1..274: mol_type = other DNA
tgcagcctctggattcaccttcagcagttatgaaatgaactgggtccgccaggctccaggcaaggggcttgagtgggtttcatccattagtagtagtggtagtaccatatactacgctgactctgtgaagggccgattcaccatctccagagacaacgccaagagctcactgtatctgcaaatgaacaccctgagagccgaggacacggctgtttattactgtgcgggggggcttggctactggggccagggaacccttgtcaccgtctccaca

SEQ ID NO: 17907 - DNA, 277 bp, Homo sapiens
  source 1..277: mol_type = other DNA
tgcagcctctggattcacgtttaggacgtcctggatggcctgggtccgccaggctccagggagggggctggagtgggcggccaacataaacccaactggaactgggaaggcctatgtggactctgtgaagggccgattcaccatctccaaggacaacgccaagaactcaatggatctccagatgaacagcctgagaggcgaggacacggctgtctattactgtgtgaccgatgggggtgccctctggggccagggagccccggtcatcgtctcgtca

SEQ ID NO: 17908 - DNA, 277 bp, Homo sapiens
  source 1..277: mol_type = other DNA
tgcagcctctggattcaccttcagtcgttcttggatgagctgggcccgccagcctccagggaaggggctggagtgggtggcctacataaagccagaaggaaatgagaaaagttatgtggactctgtgaggggccgattcaccgtctccagagacaacgtcaagaatttagtgtttctgcaaatgaacagtctgagagtcgaggacacggctcaatattactgtgtgacagatggcggggccctctggggccagggaaccctggtcaccgtctccgca

SEQ ID NO: 17909 - DNA, 298 bp, Homo sapiens
  source 1..298: mol_type = other DNA
tgcagcctctggactcatccccagtagctattggatgcactgggtccgccaagctccagggaaggggctggtgtgggtctcacgtattagtgttgatgggagcaccacagcctacgcggactccgtgaagggccgattcaccatctccagagacaacgccaagaacacgctatatctgcaaatgaacagtctgagagccgaggacacggctgtgtattactgtgcaagagatccggatagtgggggctactcctggttcgacccctggggccagggaaccctggtcaccgtctcctca

SEQ ID NO: 17910 - DNA, 298 bp, Homo sapiens
  source 1..298: mol_type = other DNA
tgcagcctctggattcaccttcagtaactactggatgcactgggtccgccaagctccagggaaggggctggtgtgggtctcacgtattaatagtgatgggagtagcataagctacgcggactccgtgaagggccgattcaccatctccagagacaacgccaagaacaccctgtatctgcaaatgaacagtctgcgagccgaggacacggctgtgttttactgtgcaagagatccggatagtgggggctacagctggttcgacccctggggccagggaaccctggtcaccgtctcctca

SEQ ID NO: 17911 - DNA, 313 bp, Homo sapiens
  source 1..313: mol_type = other DNA
ttcaggttctgggttcacccttggtgattatggcgtgagctggttccgccaggctccagggaaggggccggagtgggtagggttcatcaaaagcgaacgttatggtgggacaacagaatacgccccgtctgtgaaaggcagattcaacctctcaagagatgattccaaaagtatcgcctatctgcaaatgaacagcctgaaaaccgaggacacagccgtgtatcattgtagtagaggctgtagtggtggtagctgctactactatttcggtatggacgtctggggccaagggaccacggtcaccgtctcgtca

SEQ ID NO: 17912 - DNA, 313 bp, Homo sapiens
  source 1..313: mol_type = other DNA
taaagtctcgggattcacgtttggtgattatggaatgagttggtttcgccaggctccagggaaggggctggagtgggtaggttttagtagaagccaagcttatggtgggacaacagaatacgccgcgtctgtgaaaggcagattcaccatctcaagagatgattcgaaaaatatcgcctatctggaaatgaacagcctgaaaaccgaggacacagccgtgtattattgttctagagggtgtagtggtggtagctgctactactacttcggcatggacgtctggggccaagggaccacggtcaccgtctcctca

SEQ ID NO: 17913 - DNA, 298 bp, Homo sapiens
  source 1..298: mol_type = other DNA
cactgtctctggtgactccatcaccagtggtgtttactactggagctggatccgccagcacccagggaagggcctggagtggattgggtacatctattacagtgggagcacctactacaatccgtccctcaagagtcgagtaactatttcattagacaagtctaagaaccagttctccctgaacctgagctctgtgactgccgcggacacggccgtgtatttctgtgcgagagagccttacggtggtaactcccattttgacttctggggccagggaaccctggtcaccgtctcctca

SEQ ID NO: 17914 - DNA, 298 bp, Homo sapiens
  source 1..298: mol_type = other DNA
cactgtctctggtgcctccctcagcagtgatgtttactactggacctggatccgccagtaccccgggaagggcctggagtggattgggtacatctattacagtgggagcacctactacaacccgtccctcaagagtcggcttaccatatcaatggacaagtctaagaaccagttctccctaaagctgaactctgtgactgccgcggacacggccgtctattactgcgcgagagagccctatggtggtaactcgcactttgacttctggggccagggaaccctggtcaccgtctcccca

SEQ ID NO: 17915 - DNA, 280 bp, Homo sapiens
  source 1..280: mol_type = other DNA
tgcagcctctggattcaccttcagtacctacaccatgagctgggtccgccaggctccagggaagggcctggagtgggtctcgactatttatgcaggtggttctaccacatacaacgcagactccctgaagggccggttcaccatctccagagacgattccaagaacacgctgtatctccaaatgaacagcctgagagccgaggacacggccagatattactgtgttacgggggggtggggtgattactggggccagggaaccctggtcaccgtctcctca

SEQ ID NO: 17916 - DNA, 280 bp, Homo sapiens
  source 1..280: mol_type = other DNA
tgccgcctctggattcaactttagcggctttgtcatgacctgggtccgccagccttcagggaaggggctggagtgggtctcagcaattagtgagaatgatgagaccacattctacgcagactccgtgaagggccggttcaccatctccagagacaattccaggaacacactgtatctgcaaatgaacagtctgagcgccgacgacacggccctatattactgtgtaacagggggctggggggactactggggccagggaaccctggtcaccgtctcctca

SEQ ID NO: 17917 - DNA, 280 bp, Homo sapiens
  source 1..280: mol_type = other DNA
tgccgcctctggattcaactttagcggctttgtcatgacctgggtccgccagccttcagggaaggggctggagtgggtctcagcaattagtgagaatgatgagaccacattctacgcagactccgtgaagggccggttcaccatctccagagacaattccaggaacacactgtatctgcaaatgaacagtctgagcgccgacgacacggccctatattactgtgtaaccgggggctggggggactactggggccagggaaccctggtcaccgtctcctca

SEQ ID NO: 17918 - DNA, 274 bp, Homo sapiens
  source 1..274: mol_type = other DNA
cgctgtctatggtgagtccttcagtggtaaccactggagttggatccgccaggccccagggagggggctggagtggattggggaaatcaatctgcgtggaagcaccatctacaacccgtccctcaagagtcgagtcaccatatcagtagacacgtccaagaaccagttctccctcaatctgacctctgtgaccgccgcggacacggctgtgtattactgtgcgaagggagtgggtgcctactggggccagggaaccctggtcaccgtctcctca

SEQ ID NO: 17919 - DNA, 274 bp, Homo sapiens
  source 1..274: mol_type = other DNA
cgctgtctatggtgcgtcctttagtgataactactggagctggatgcgccagcgcccagggaaggggctggagtggattggggaaatcaatcatagaggaagcaccaactacaacccgtccctcaagagtcgagtcagtatgtcagtagacacttccaagaatcagttctccctgaacctgcgctctgcgaccgccgcggacacggctgtgtattactgtgcgaaaggtgtgggcgcctactggagcccgggaactctggtcaccgtctcgtca

SEQ ID NO: 17920 - DNA, 303 bp, Homo sapiens
  source 1..303: mol_type = other DNA
gcttctggattcacctttagtagccctgctgctgtgcagtgggtgcgacagcctcgtggacaacggcttgagtggataggatggatcgtcgttgccagtggtaagacagactacgcacagaagttccaggaaagagtcacctttaccagggacatgtccacgaacacagcctacatggagctgagcagcctgagatccgaggacacggccgtgtactattgtgcggcacctaattgtaatagaaccagctgctatgatggttttgatatctggggccaagggacactggtcaccgtctcttca

SEQ ID NO: 17921 - DNA, 300 bp, Homo sapiens
  source 1..300: mol_type = other DNA
gcctctggattctccttcagtacctctgctgtgcagtgggtgcgacaggctcgtggacaacgccttgagtggataggatggatggtcgttggcagtggtaacacaaatttcgcacaggagttccaggaaagagtcaccatttccagggacatgtccacaaccacagcctacatggagctgagcagcctgagatccgaggacacggccgtgtattactgtgcggctcccaattgtaataggaccagttgctatgatggttttgatatttggggccaagggacaatggtcaccgtctcctca

SEQ ID NO: 17922 - DNA, 289 bp, Homo sapiens
  source 1..289: mol_type = other DNA
tgcagcctctggattctcctttggcaactatgagatgaactgggtccggcaggctcctgggaaggggctggagtgggtctccagtattcatgcgagtgatggtaggacatggtatgcagagtccgtgaagggccggttcaccatctccagagacaatgacaagaacaccttgtatctgcaaatgaacagcctgagagccgaggacacggccttatattattgtgcgaaagacctgccgcacgcatcgtttgactactggggccagggaaccctagtcaccgtctcctca

SEQ ID NO: 17923 - DNA, 289 bp, Homo sapiens
  source 1..289: mol_type = other DNA
tgcagcctctggattcacattttccaactatgagatgagctgggtccgccaggctccaggaaaggggctggagtgggtcgcaagcatttttcgtagtggtggtagcacatactacgcagactccgtgaagggccggttcaccatctccagagacaattccaagaacaccgtggatctgcaaatgaacagcctgagagccgaggacacggccctatattactgtgcgaaagacctcccccacgcttcgtttgactactggggccagggaaccctgctcaccgtctcctca

SEQ ID NO: 17924 - DNA, 286 bp, Homo sapiens
  source 1..286: mol_type = other DNA
tgcggcctctggattcgccctcagcaaatactggatacactgggtccgccaagctccaggtaaggggctggtgtgggtctcacgaattaaaaatgatgggacttcaacagactacgcggacgccgtgaagggacgcttcgccatctccagagacaacggcaagaacacggtgaatctgcaaatgaacggtctgagagtcgaggacacggctgtgtattattgtgcaagaagcactttgcttcggggagtccattggggccagggaaccctggtcaccgtctcctca

SEQ ID NO: 17925 - DNA, 286 bp, Homo sapiens
  source 1..286: mol_type = other DNA
tgtcgcctctggaatgacgttcagcaagtattggatccactgggtccgccaagttccagggaagggcctattgtggctctcacatattaatgatgatggaggtatcacagattacgcggactccgtgaagggccgattcaccatctccagagacaacgccaagaggacggcatatttacaaatgaacagtctgcgactcgaagatacggctacatatttctgtgcaagaagtacccttcttcggggagttcactggggccagggaaccctggtcattgtctccact

SEQ ID NO: 17926 - DNA, 289 bp, Homo sapiens
  source 1..289: mol_type = other DNA
cgctgtctatggtgggtccttcagtggttactactggagctggatccgccagcccccagggaaggggctggagtggattggggaaatcaatcatagtggaagcaccaactacaacccgtccctcaagagtcgagtcaccatatcagtagacacgtccaagaaccagttctccctgaagctgagctctgtgaccgccgcggacacggctgtgtattactgtgcgcgggggtacgatattttgactggtcttgactactggggccagggaaccctggtcaccgtctcctca

SEQ ID NO: 17927 - DNA, 289 bp, Homo sapiens
  source 1..289: mol_type = other DNA
cgctgtctatggtgggtccttcagtgattactactggagctggatccgccagcccccagggaaggggctggagtacattggggaaatcgatcatagtggaagcaccaactacaacccgtccctcaagagtcgagtcaccatatcaatagacacgtccaagaaccagttctccctgaagctgaactctgtgaccgccgcggacaccgctgtatattactgtgcgagaggttacgatattttgactggtttagactactggggccagggaaccctggtcaccggctcctca

SEQ ID NO: 17928 - DNA, 289 bp, Homo sapiens
  source 1..289: mol_type = other DNA
cgctgtctatggtgggtccttcagtgattactactggagctggatccgccagcccccagggaaggggctggagtggattggggaaatcgatcatagtggaagcaccaactacaacccgtccctcaagagtcgagtcaccatatcagtagacacgtccaagaaccagttctccctgaagctgaactctgtgaccgccgcggacacggctgtatattactgtgcgagaggttacgatattttgactggtttagactactggggccagggaaccctggtcaccgtctcctca

SEQ ID NO: 17929 - DNA, 277 bp, Homo sapiens
  source 1..277: mol_type = other DNA
tgcagcctctgggttcagcatcagtggcaactacatgaattgggtccgccaggctccagggaaggggctggagtgggtcgcaggtttcacaagtactggaaatacacattatggtgactccgtgaagggccgattcagcgtctccagagacctttcaaataacacactctttcttcaaatgaatagcctgagagccgaggactcggccctttattactgtgcgagaggcaaggcgttcggcccctggggccgcggaactctggtcatcgtctcctca

SEQ ID NO: 17930 - DNA, 277 bp, Homo sapiens
  source 1..277: mol_type = other DNA
tgcagcctctgggttcaccctcagtgacagctacatgaactgggtccgccaggctccaggaaaggggctggagtggatatcagttctttacagtgatggtagaacattctacgcagactctgttaagggccgattcaccatctccagagacgaatccaagaacactctatatcttcaaatgaacaacctgagagccgaggacatggccgtatattactgtgcgagaggaaaagcgttcggcccctggggccagggaaccctggtcaccgtctcctca

SEQ ID NO: 17931 - DNA, 298 bp, Homo sapiens
  source 1..298: mol_type = other DNA
tatgggcactggatttaccttcagcgactacagtgtgaattgggtccgccaggctccagggaaggggctggaatggatttcatacatcagtactactggtactaccatacaatacgcagactctgtggagggccgattcaccatctccagaaacaatgccaagaactccgtgtctctgcaaatgaacagcctgagagacgaggacacggctgtttattactgtgcgagagtctgggagcagggctacagtcgtggttacctctactggggccagggagccctggtaaccgtctcctca

SEQ ID NO: 17932 - DNA, 298 bp, Homo sapiens
  source 1..298: mol_type = other DNA
tatgggcactggatttaccttcagcgactacagtgtgaattgggtccgccaggctccagggaaggggctggaatggatttcatacatcagtactactggtactaccatacaatacgcagactctgtggagggccgattcaccatctccagaaacaatgccaagaactccgtgtctctgcaaatgaacagcctgagagacgaggacacggctgtttattactgtgcgagagtctgggagcagggctacagtcgtggttacctctactggggccagggaaccctggtcaccgtctcctca

SEQ ID NO: 17933 - DNA, 282 bp, Homo sapiens
  source 1..282: mol_type = other DNA
gcttctggataccccttcagcgattttgatatcaactgggtgcgacaggcccctggacaagggcttgagtggatgggatgggtgagccctattagtggtcacacagcctatgcacagaagttccagggcagaataaccttgaccagggacacctccataaacacattctacctggaacttagtagcctgacatccgacgacacggccgtctattactgtacgaggggcatcggagtggccggggactactggggccagggaaccctggtcaccgtctcctca

SEQ ID NO: 17934 - DNA, 282 bp, Homo sapiens
  source 1..282: mol_type = other DNA
gcttctggatacaccttcaccggttttgatatcaactgggtgcgacaggccactggacaagggcttgagtggatgggatgggtgagccctaacagtggtcacacagcctatgcacagaagttccagggcagagtcaccatgaccagggacacctccataagcacagcctacatggagctgactagcctgacatctgacgacacggccgtatattactgtacgagaggcatcggagtggccggggactactggggccagggaaccctggtcaccgtcgcctca

SEQ ID NO: 17935 - DNA, 282 bp, Homo sapiens
  source 1..282: mol_type = other DNA
gcttctggataccccttcaccggttttgatatcaactgggtgcgacaggcccctggacaagggcttgagtggatgggatgggtgagccctattagtggtcacacagcctctgcacagaagttccagggcagaataaccttgaccagggacacctccataaacacattctacatggaacttagtagcctgacatccgacgacacggccgtctattattgtacgaggggcatcggagtggccggggactactggggccagggaaccctggtcaccgtctcctca

SEQ ID NO: 17936 - DNA, 282 bp, Homo sapiens
  source 1..282: mol_type = other DNA
gcttctggatacagcttctccaattttgatatcaactgggtgcgacaggcccctggacaggggcttgagtggatgggatggatgaaccctaaggttggtaacacagcctatgcacagaagttccagggcagagtcgccatgaccagggacacctccataagcacggcatacctggagctgagcgacctcggacctgaggacacggccgtgtattactgtacgagaggcattggagtggctggagactactggggccagggaacccgggtcaccgtctcctca

SEQ ID NO: 17937 - DNA, 298 bp, Homo sapiens
  source 1..298: mol_type = other DNA
tgcagcctctggattcacctttagcagctatgccttgagctgggtccgccaggttccagggaaggggctggagtgggtctcagctattagtgatagtggtgatagtacatactccgcagactccgtgaagggccggttcaccatctccagagacaattccaagaacacactgtatctgcaaatgaacagcctgagacccgaggacacggccgtatattactgtgcgaaaggttcagcagcaggtcgtccgtactactttgattcttggggccagggaaccctggtcaccgtctcctca

SEQ ID NO: 17938 - DNA, 298 bp, Homo sapiens
  source 1..298: mol_type = other DNA
tgcagcctctggattcacctttaacagctatgccatgagctgggtccgccaggctccagggaaggggctggagtgcgtctcagctatcagtgatggtggcggtagcacatggttcgcagactccgtgaagggccggttcaccatctccagagacaattccaagaacatgttgtatctgcaagtgaacagcctgagagacgaggacacggccgtatattactgtgcgaaagggtcagcagctggccgaccgtactactttgactcctggggccagggaaccctggtcaccgtctcctca

SEQ ID NO: 17939 - DNA, 292 bp, Homo sapiens
  source 1..292: mol_type = other DNA
tgcagtctctggattcaccttcagtaattactggatgcactgggtccgccgagctccagggaaggggctggtgtgggtcgcacgtatggatactaatggacgcgacataagctacgcggactccgtgaggggccgattcaccatctccagagacaacgccaagaacactctgtttctgcaaatgaacagtctgagagtcgacgacacggctgtctattattgtgcaagactatatagtggctatgacttctttgatcactggggcctgggaaccctggtctccgtctcctca

SEQ ID NO: 17940 - DNA, 292 bp, Homo sapiens
  source 1..292: mol_type = other DNA
tgtagcctctggattcaccttcagcaactactggatgcactgggtccgccaagttccagggaaggggctggtgtgggtctcacgtactgacagtgatgggagtgacataacctacgcggactctgtgaagggccgattcaccatctccagagacaacgccaagaacacgctgtatctgcaaatgaacaatctgagagtcgaggacacggctgtgtactattgtgcaagattgtatagtggctacgatttctttgaccactggggccagggaaccctggtcaccgtctcctca

SEQ ID NO: 17941 - DNA, 282 bp, Homo sapiens
  source 1..282: mol_type = other DNA
gcttctggatacaccttcaccagtcatgatatcaactggttgcgacaggcccctggacaagggcttcagtggatgggatggatgaccccccgcaatggtcagacaggctatgcacagaagttccaggacagagtcaccatgaccagggacacctccacaaacacagcctacatggagttgagcagcctgagatctgacgacacggccgtatattactgtgcgagaggagtgggaaatgtaggggactactggggccagggaaccctggtcaccgtctcctca

SEQ ID NO: 17942 - DNA, 282 bp, Homo sapiens
  source 1..282: mol_type = other DNA
gcttctggatacagtttcaccagttatgatatcaactgggtgcgacaggccgctggacaagggcttgagtggatgggatggataaatactaacaatggtgcaacaggctatgctcagaagttccagggcagagtcaccctgaccatggacacctccataaatacagcgtacatggagttgaagagtctgaaatctgacgacacggccgtctatttttgtgcgagaggagtgggaaatgttggggactactggggccagggagccctggtcagcgtctccgca

SEQ ID NO: 17943 - DNA, 282 bp, Homo sapiens
  source 1..282: mol_type = other DNA
gcttctggatataccttcaccagtaacgatatcaactgggtgcgacaggcccctggacaagggcttgagtggttgggatggatgaaacctaataatggtgccacaggctatgcacagaaattccagggcagagtcactatgaccagggacgtctctatagacacagcctacatggagctgagcagcctgagatctgaagacacggccgtgtattactgtgcgagaggcgtgggaaatgtgggggactactggggccagggaacgccggtcaccgtctcctca

SEQ ID NO: 17944 - DNA, 295 bp, Homo sapiens
  source 1..295: mol_type = other DNA
tgcagtatctggattcaccattagtaattactggatgagctgggtccgccaggctccagggaaggggctggagtgggtggccaacataaaggatgacggaagtgagaaatactatgtggactctgtgaagggccgattcaccatctccagagacaaggccaagaactcactgtctctgcaaatgaacagcctgagagacgaggacacggctgtttattactgtgcgaggcgatatagcagtgactggtactactttgactattggggccagggaaccctggtcaccgtctcctca

SEQ ID NO: 17945 - DNA, 295 bp, Homo sapiens
  source 1..295: mol_type = other DNA
tgcagcctctggattcacctttagtaactattggatgagctgggtccgccaggctccagggaaggggctggagtgggtggccaacataaagcaagatgcaagtgaacaatactatgtggactctgtgaagggccgattcaccacctccagagacaacgccaagaactcactgtatctgcaaatgaacagcctgagagccgaggacacggccgtgtattactgtgcgagaaggtatagcagcgactggtactactttgactactggggccagggaaccctggtcaccgtctcctca

SEQ ID NO: 17946 - DNA, 297 bp, Homo sapiens
  source 1..297: mol_type = other DNA
gcttctggatacaccttcaccagttatgatatcaactgggtgcgacaggccactggacaaggacttgagtggatgggatggatgaaccctaacagtggtaacacaggctatgcacagaagttccagggcagagtcaccatgaccaggaacacctccataagcacagcctacatggagttgagcagcctgagatctgaggatacggccgtatattactgtgcgcgacggttctacgatttttggagtggttattatacggactactggggccagggaaccctggtcatcgtctcctca

SEQ ID NO: 17947 - DNA, 297 bp, Homo sapiens
  source 1..297: mol_type = other DNA
gcttctggatacaccttcaccagttatgatatcaactgggtgcgacaggccactggacaagggcctgagtggatgggatggatgaaccctaacagtggtaacacaggctttgcacagaagttccagggcagagtcaccatgaccaggaacacctccataagcacagcctacatggagctgagcagcctgagatctgaggacacggccgtgtattactgtgcgagacgtttttacgatttttggagtggttattacactgactactggggccagggaaccctggtcaccgtctcctca

SEQ ID NO: 17948 - DNA, 277 bp, Homo sapiens
  source 1..277: mol_type = other DNA
tgcagcctctggattcacctttagtagtcattggatgagctgggtccgccaggctccagggaaggggctggagtgggtggccaacataaagcaagatggaagtgagaaatactatgtggactctgtgaagggccgattcaccatctccagagacaacgcgaagaattcactgtatttgcaattgaacagcctgagagccgaggacacggctgtgtattactgtgcgagagatgaggggaccttctggggccagggaaccctggtcaccgtctcctca

SEQ ID NO: 17949 - DNA, 277 bp, Homo sapiens
  source 1..277: mol_type = other DNA
tgcagcctctggattcacctttagtagccattggatgagctgggtccgccaggctccagggaaggggctggagtgggtggccaacataaagcaagacggaagtgagaaatactatgtggactctgtgaagggccgattcaccatctccagagacaacgccaagaattcactgtatctgcaattgaacagcctgagagccgaggacacggctgtgtattactgtgcgagagatgaggggaccttctggggccagggaaccctggtcaccgtctcctca

SEQ ID NO: 17950 - DNA, 277 bp, Homo sapiens
  source 1..277: mol_type = other DNA
tgtagcctctggattcatttttagtaattcttggatggcctgggtccgccaggctccagggaaggggctggagtgggtggccaacataaaacaggatggaagtgagaaacactatgtggactctgtgaagggtcgattcaccgtctccatagacaacgccaagaactcagtttatctacaaatgaacaacctgagagccgaggactcggctgtctattattgtgcgagagatgaaggtaccttctggggccagggaaccctggtctccgtctcctca

SEQ ID NO: 17951 - DNA, 289 bp, Homo sapiens
  source 1..289: mol_type = other DNA
tgtagcgtctggattcagcttcagtacctatggcatgcactgggtccgccaggctccaggcaaggggctggagtgggtggcagttgtttggtatgatgaaagtcagaaattctatgcagactccgtgaagggccgactctccatctccagagacaattccaagaacacggtgtatctgcaaatgaacagcctgagagccgatgacacggctgtgtattattgtgcgagagattgggcaggtcgccggtgtgaccactggggccagggaatcctggtcagcgtctcctca

SEQ ID NO: 17952 - DNA, 289 bp, Homo sapiens
  source 1..289: mol_type = other DNA
tacagcctctggattcagcttcagtacctatggcatgcactgggtccgccaggctccaggcaaggggctggagtgggtggcagttatatggtatgatggaagtgagaaatattatgcagactccgtgaagggccgattcaccatctccagagacaattccaagaacacggtatctctgcaaatgaacaatctgagagccgaggacacggctgtgtattactgtgcgagagattgggcaggtcgaagatgtgaccactggggccagggaaccccggtcaccgtctcctca

SEQ ID NO: 17953 - DNA, 283 bp, Homo sapiens
  source 1..283: mol_type = other DNA
tgcagcctctggactcactttcagtaacgcctggatgacctgggtccgccaggctccagggaaggggctggagtgggttggccgaattaaaaccaaaagtgaaggtggggcaacagactacgctgcacccgtgaaaggcagattcaccatcttaagagatgattcaaaaaacacgctgtatctgcagatgaacagcctgaagaccgaagacacagccgtgtattattgtacaaacttgtacttcgactactggggccagggaaccctggtcaccgtctcctca

SEQ ID NO: 17954 - DNA, 283 bp, Homo sapiens
  source 1..283: mol_type = other DNA
tgcagtctctggattcagtttcagtaacgcctggatgaactgggtccgccaggctccagggaaggggctggagtgggttggccgtatgaaaagtaaaactgatggtgggacaacagagtacgctgcacccgtggaaggcagattcaccatctcaagagatgattcaaaaaacactctgtatctgcaaatgagcagcctgaaaaccgaggacacagccgtatattattgtactaatttgtactttgactactggggccagggaaccctggtcaccgtctcctca

SEQ ID NO: 17955 - DNA, 298 bp, Homo sapiens
  source 1..298: mol_type = other DNA
tgcagcctctggattcaccttcagtgactactacatgagctggatccgccaggctccagggaaggggctggagtgggtttcattcattagtagtagtagtagttacacaaactacgcagactctgtgaagggccggttcaccatctccagagacaacggcaagaactcactgtatctgcaaatgaacagcctgagagccgaggacacggccgtgtattactgtgcgagagatggaggtagagatggctacaattatcttgactactggggccagggaaccctggtcaccgtctcctca

SEQ ID NO: 17956 - DNA, 298 bp, Homo sapiens
  source 1..298: mol_type = other DNA
tgcagcctctggattcaccttcagtgactactacatgacttggatccgccaggctccaggaaaggggctggagtgggtttcatacattagtggtagtggtagttccacaaactacgcagagtctctgaggggccgattcaccatctccagagacaacgccaagaactcactgtatctgcagatggacagcctgagagccgaggacacggctgtgtattattgtgcgagagatggagggagagatggctacaattaccttgactactggggccagggaaccctggtcaccgtctcctca

SEQ ID NO: 17957 - DNA, 283 bp, Homo sapiens
  source 1..283: mol_type = other DNA
tgcagcctctggattcaccttcagtgactactacatgacctggatgcgccaggctccagggaaggggccggagtggatttcatacatcagtagtagtagtcatgacacaaactacgcagactctgtgaagggccgattcaccatctccagggacaacgccaggaactcactgtatctgcaaatgagcagcctgagagccgacgacacggccgtatattactgcgcccggacagctcgtcttgttgactactggggcccgggaaccctggtcagcgtctcttca

SEQ ID NO: 17958 - DNA, 283 bp, Homo sapiens
  source 1..283: mol_type = other DNA
tgcagcctctggattcaccttcagtgaccactacatgagctggatccgccaggctccagggaaggggctggagtacatttcatacattagtaatagtggaagtaccacatcctacacagactctctgaagggccgattcaccatctccagggacaatgccaagaattcactgtatctgcaagtgaacagcctgagagccgaggacacggccgtgtattactgtgcgagaacggctcgtcttgttgactactggggccagggaaccctggtcaccgtctcctca

SEQ ID NO: 17959 - DNA, 292 bp, Homo sapiens
  source 1..292: mol_type = other DNA
tgcagcctctggattctcattcagtagtaatgtcatgtactgggtccgccaggctccaggcagggggctggagtgggtgtcacgtatatcacatgatgcaagtaatgaacagtatgcagactccgtgaggggccgattcaccatctccagagacaattccaggaacacgctgtatctgcagatgaacagcctgagagttgaggacacggctctctattattgtgtgaaagatcggaccaacacctggtcctttgattactggggccagggaaccctggtcaccgtctcctca

SEQ ID NO: 17960 - DNA, 292 bp, Homo sapiens
  source 1..292: mol_type = other DNA
tggagcctctggattcaccttcagtaacactgtaatgcactgggtccgccaggctccaggcaaggggctggagtgggtggctcttatattacatgatggaagtaagaaattttatggagactccgtgaagggccgattcaccatctccagagacaattccaagaacacgctgtttctgcaaatggacagcctgagagctgaggacacggctgtgtatcactgtgtgaaagatcgaactaacacgtggtcgtttgactactggggccagggaaccctggtcaccgtctcctca

SEQ ID NO: 17961 - DNA, 292 bp, Homo sapiens; identical to SEQ ID NO: 17960
  source 1..292: mol_type = other DNA

SEQ ID NO: 17962 - DNA, 289 bp, Homo sapiens
  source 1..289: mol_type = other DNA
tgcagcctctggattccccttcagtggctatgccatgacttgggtccgccaggctccagggaaggggctggagtgggtttcatatattagtgaatattatagtcccacattctacgcagactctgtgaagggccgattcaccatctccagagacaatgccaaaaactcactgtatctgcaaatggacaacctaagacacgaggacacggctgtttattattgtgcgagagggtatggcactagttggttttaccagtggggccagggaaccctggtcaccgtcacctca

SEQ ID NO: 17963 - DNA, 289 bp, Homo sapiens
  source 1..289: mol_type = other DNA
tgcagcctctggattcaccttcagtaactatgccatgacttgggtccgccaggctccagggaaggggctggagtggctttcatatattagtgaaaattatacaccgacattctacgcagactctgtgaagggccgattcaccatctccagagacaatgccaagaattcactgtatttgcaaatggacgacctaagacacgaggacacggctgtgtattggtgtgcgagagggtatggcacaagttggttttaccagtggggccagggaaccctggtcaccgtcacctca

SEQ ID NO: 17964 - DNA, 289 bp, Homo sapiens
  source 1..289: mol_type = other DNA
tgcagcctctggattcaccttcagtagttatgccatgacttgggtccgccaggctccagggaaggggctggagtggctttcatatattagtgaatattataatcccacattctacgcagactctgtgaagggccgattcaccatctccagagacaatgccaagaactcactgtatctgcaaatggacaacctaagacacgaggacacggctgtgtattattgtgcgagagggtatggcactagttggttttaccagtggggccagggaaccctggtcaccgtcacctca

SEQ ID NO: 17965 - DNA, 289 bp, Homo sapiens
  source 1..289: mol_type = other DNA
tgcagcctctggatttatgttcagtaactatgccatgacttgggtccgccaggctccagggaaggggctggagtgggtttcatatattagtgaaaattataatcccacattctacgcagactctgtgaagggccgattcaccatctccagagacaatgccaagaactctctgtttctgcaaatggacaacctaagacacgaggacacggctctttattattgtgcgagagggtatggcactagttggttttaccagtggggccagggaaccctggtcaccgtcgcctcg

SEQ ID NO: 17966 - DNA, 289 bp, Homo sapiens; identical to SEQ ID NO: 17962
  source 1..289: mol_type = other DNA

SEQ ID NO: 17967 - DNA, 289 bp, Homo sapiens
  source 1..289: mol_type = other DNA
tgcagcctctggattcactttcagtaactatggcatgacttgggtccgccaggctccagggaagggactggagtggctttcatatattagtgaacgttatgcaccgacattctacgcagactctgtgaagggccgattcaccgtctccagagacaatgccaagaattcactgtatttgcaaatggacgacctaagacacgaggacacggctgtgtattggtgtgcgaggggttatggcacaagttggttttaccaatggagccagggaaccctggtcaccgtcacctca

SEQ ID NO: 17968 - DNA, 289 bp, Homo sapiens
  source 1..289: mol_type = other DNA
tgcagcctctggattcatcttcagtagtcagaacatgaactgggtccgccaggctccagggaaggggctggagtgggtttcattcattagtggcagtggtagtcccttatactacgcagattctgtgaagggccgattcaccatctccagagacaatgccaagaattcactgtatctgcaaatgaacagtctgagagacgaggacacggctgtgtattattgtgcgagaggctatggcaccagctggttttatcagtggggccagggaaccttggtcaccgtctcctca

SEQ ID NO: 17969 - DNA, 280 bp, Homo sapiens
  source 1..280: mol_type = other DNA
tctcggctctggattcaatttcagtgcctacgacatgcactgggtccgccaatctccaggttcaggtctggagtgggtctcagggattggtgttgctgctgactcttactatccagtctccgtgaagggccgattcaccatctccagagaaaatgccagggactccttgtaccttgaaatgaacaatctgagagccggggacacggctatctattactgtacaagagacgcacacggcatggacgtctggggccaagggaccacggtcaccgtctcgtca

SEQ ID NO: 17970 - DNA, 280 bp, Homo sapiens
  source 1..280: mol_type = other DNA
tgcagcctctggatttagtttcattacttacgacatgcactgggtccgccaaactccagaaagacgtctggagtgggtcgcagcttttgataccagcggtgacacatactattccgactccctgaagggccgattcaccatctctaaagacagtgccaagaacttcttatatcttcaaatgaatagcctcagagccggggacacggctgtttattattgtacaagagatgcccacgggatggacgtctggggccaagggaccaccgtcattgtctcctca

SEQ ID NO: 17971 - DNA, 289 bp, Homo sapiens
  source 1..289: mol_type = other DNA
tgcagcctctggattcaccttcagtagccatggtatccactgggtccgccaggctccaggcaaggggctggagtgggtggcagttatatcacatgatggaagtaatcaattctccgtggaatccgtgaagggccgattcaccatctccagagacaattccaagaacacggcgcagctgcaaatgaacagcctgagagttgaggacacggctgtgtattactgtgcaagaggggatgttgggagctacttcccctattggggccagggatccctggtcaccgtctcctcc

SEQ ID NO: 17972 - DNA, 289 bp, Homo sapiens
  source 1..289: mol_type = other DNA
tgtagcctctggattcaccttcagtagctatgctatccactgggtccgccaggctccaggcaaggggctggagtgggtggcagttatatcatatgatggaggtaataaatactacgtagactccgtgaagggccgattcaccatgtccagagacaattccaagaacacgctgtatctgcaaatggacagcctgagacctgaggacacggctgtgtattactgtgcgagaggcgatgttgggagctacttcccctactggggccagggaaccctggtcaccgtctcctca

SEQ ID NO: 17973 - DNA, 291 bp, Homo sapiens
  source 1..291: mol_type = other DNA
gcatctggatacaccttcaccacctactatatacactgggtgcgacaggcccctggacaagggcttgagtggatgggaataatcaagcctagtgatggcagcacaacctacgcacagaagttccagggcagagtcaccatgaccagagacacgtccacgagcacggtctacatggagctgagcagcctgagatctgaggacacggccttgtattattgtgcgagagatcatggcaatggttggtcatactttgactactggggccagggaaccctggtcaccgtctcctca

SEQ ID NO: 17974 - DNA, 291 bp, Homo sapiens
  source 1..291: mol_type = other DNA
gcatctgcatacaccctcaccagtcactatatgcactgggtgcgacaggcccctggacaagggcttgagtggatgggaataatcaagcctagtgatggaaccacaagctactcagaggggttccagggcagagtcaccatgaccagggacacgtccacgggcacagtctacatggaactgaacagcctgagatctgaggacacggccgtatattactgtgcgagagatcatggcaatggctggtcttactttgactactggggccagggaaccctggtcaccgtctcctca

SEQ ID NO: 17975 - DNA, 301 bp, Homo sapiens
  source 1..301: mol_type = other DNA
tgcagcctctggattcaccttcagtgactattgcatgagctggatccgccaggccccagggaaggggctggagtgggtttcatacattagcactagtagtagtaccatccactacgcagactctgtgaagggccgattcaccatctccagagacaatgccaagaattcactgtatctgcaaatgaacagcctggcagccgaggacacggccctgtattattgtgtgagagacattacagcgcctggtagtactgaatacttccattactggggccagggcaccctggtcaccgtctcctca

SEQ ID NO: 17976 - DNA, 301 bp, Homo sapiens
  source 1..301: mol_type = other DNA
tgcagcctctggattcaccttcagtgactaccagatgacttggatccgccaggctccaggcaaggggctggagtgggtttcatacatcagtaggagtggtgatactatatactacagagactctgtggagggccgattcaccatctccagggacaacgccaagaactacctgtatctgcaaatgaacagccttagagtcgaggacacggccgtctactactgtgtcagagacataaccgcacctggtagtactgaatacttccactattggggccagggcaccctggtcaccgtctcctca

SEQ ID NO: 17977 - DNA, 280 bp, Homo sapiens
  source 1..280: mol_type = other DNA
tgcagcctctggattcaccttcagtgactactacatgagctggatacgccaggctccaggaaaggggctggagtgggtttcatacattagaggtagtggtagtaccatgtactatgcagactctgtgaagggccgattcaccatctccagggacaacgccaagaactcattgtatctgcaaatgaatagcctgagagccgaggacacggccatatattactgtgcgagggactcgcactttgactactggggccaggggaccctggtcaccgtctcctca

SEQ ID NO: 17978 - DNA, 280 bp, Homo sapiens
  source 1..280: mol_type = other DNA
tgcggcctctggattcactttcggtgactactacatgagttgggtccgccaggctccagggaaggggctggagtgggtttcatatatcaggagcactggtaaccccttttactacgcaaactctgtgaagggccgattcaccatctccagggacaacaccaagaattttctgtatctccaaatgaacaacctgagagccgaggacacggccgtatattactgcgcgagagattctcacttcgactactggggccagggaaccccggtcaccgtctcctca

SEQ ID NO: 17979 - DNA, 286 bp, Homo sapiens
  source 1..286: mol_type = other DNA
cgctgtctctggtggctccatcaccagtagtaagtggtggagttgggtccgccagtccccagggaaggggctggaatggattgggcaaatctatctcagtgggagccccgactacaacccgtccctcaagagtcgagccaccatatcagtagacaagtccaagaaccagattttcctgaacctgaagtctgtgagcgccgcggacacggccgtttattactgtaccaggaatgggtattactccctcgactactggggccagggaaccctggtcaccgtctcctca

SEQ ID NO: 17980 - DNA, 286 bp, Homo sapiens
  source 1..286: mol_type = other DNA
cgctgtctctggcgactccatcagcagaactagttggtggagttgggcccgccagcccccagggatgggcctggagtggattggggaaatctctcatagtgggagcaccaactacaacccgtccctcaagagtcgagtcaccatatcagtagacaagtccaagaaccaattttccctgcacctgagctctgtgaccgccgcggacacggccgtgtattattgtacgaggaatggctactacagtcttgactattggggccagggaaccctggtcactgtctcccca

SEQ ID NO: 17981 - DNA, 310 bp, Homo sapiens
  source 1..310: mol_type = other DNA
cgctgtctctggcgactccatcagcagaactagttggtggagttgggcccgccagcccccagggatgggcctggagtggattggggaaatctctcatagtgggagcaccaactacaacccgtccctcaagagtcgagtcaccatatcagtagacaagtccaagaaccaattttccctgcacctgagctctgtgaccgccgcggacacggccgtgtattattgtacgaggaatggctactacagtcttgactattggggccagggaaccctggtcactgtctccccagggaccacggtcatcgtctcctca

SEQ ID NO: 17982 - DNA, 286 bp, Homo sapiens
  source 1..286: mol_type = other DNA
cgctgtctctggcgactccatcagcagaactagttggtggagttgggcccgccagcccccagggatgggcctggagtggattggggaaatctctcatagtgggagcaccaactacaacccgtccctcaagagtcaagtcaccatatcagtagacaagtccaagaaccaattttccctgcacctgagctctgtgaccgccgcggacacggccgtgtattattgtacgaggaatggctactacagtcttgactattggggccagggaaccctggtcactgtctcccca

SEQ ID NO: 17983 - DNA, 286 bp, Homo sapiens
  source 1..286: mol_type = other DNA
cgctgtctctggcgactccatcagcagaactagttggtggagttgggcccgccagcccccagggatgggcctggagtggattggggaaatctctcatagtgggagcaccaactacaacccgtccctcaagagtcgagtcaccatatcagtagacaagtccaagaaccaattttccctgcacctgagctctgtgaccgccgcggacacggccgtgtattattgtacgaggaatggctactacagtcttgactattggggccggggaaccctggtcactgtctcccca

SEQ ID NO: 17984 - DNA, 286 bp, Homo sapiens; identical to SEQ ID NO: 17980
  source 1..286: mol_type = other DNA

SEQ ID NO: 17985 - DNA, 286 bp, Homo sapiens
  source 1..286: mol_type = other DNA
cgctgtctctggcgactccatcagcagaactagttggtggagttgggcccgccagcccccagggatgggcctggagtggattggggaaatctctcatagtgggagcaccaactacaacccgtcccccaagagtcgagtcaccatatcagtagacaagtccaagaaccaattttccctgcacctgagctctgtgaccgccgcggacacggccgtgtattattgtacgaggaatggctactacagtcttgactattggggccagggaaccctggtcactgtctcccca

SEQ ID NO: 17986 - DNA, 286 bp, Homo sapiens
  source 1..286: mol_type = other DNA
cgctgtctctggcgactccatcagcagaactagttggtggagttgggcccgccagcccccagggatgggcctggagtggattggggaaatctctcatagtgggagcaccaactacaacccgtccctcaagagtcgagtcaccatatcagtagacaagtccaagaaccaattttccctgcccctgagctctgtgaccgccgcggacacggccgtgtattattgtacgaggaatggctactacagtcttgactattggggccagggaaccctggtcactgtctcccca

SEQ ID NO: 17987 - DNA, 289 bp, Homo sapiens
  source 1..289: mol_type = other DNA
cgctgtctctggcgactccatcagcagaactagttggtggagttgggcccgccagcccccagggatgggcctggagtggattggggaaatctctcatagtgggagcaccaactacaacccgtccctcaagagtcgagtcaccatatcagtagacaagtccaagaaccaattttccctgcacctgagctctgtgaccgccgcggacacggccgtgtattattgtacgaggaatggctactacagtcttgactattggggccagggaaccctggtcactgtctccccagca

SEQ ID NO: 17988 - DNA, 286 bp, Homo sapiens
  source 1..286: mol_type = other DNA
cgctgtctctggcgactccatcagcagaactagttggtggagttgggcccgccagcccccagggatgggcctggagtggattggggaaatctctcatagtgggagcaccaactacaacccgtccctcaagagtcgagtcaccatatcagtagacaagtccaagaaccacttttccctgcacctgagctctgtgaccgccgcggacacggccgtgtattattgtacgaggaatggctactacagtcttgactattggggccagggaaccctggtcactgtctcccca

SEQ ID NO: 17989 - DNA, 286 bp, Homo sapiens
  source 1..286: mol_type = other DNA
cgctgtctctggcgactccatcagcagaactagttggtggagttgggcccgccagcccccagggatgggcctggagtggattggggaaatctctcatagtgggagcaccaactacaacccgtccctcaagagtcgagtcaccatatcagtagacaagtccaagaaccaattttccctgcacctgagctctgtgaccgccgcggacacggccgtgtattattgtacgaggaatggctactacagtctcgactattggggccagggaaccctggtcactgtctcccca

SEQ ID NO: 17990 - DNA, 289 bp, Homo sapiens
  source 1..289: mol_type = other DNA
tgcagcctctggattgacccttagcaaatatatcatggtctgggtccgccaggctccagagaagggactggagtgggtctcaactatgagtggtgacagtacatattactcagactccgtgaagggccggttcaccatctccagagacaattccaagaacacactggatctgcaaatgaatagcctgagagccgaggacacggccgtatattattgtgcgaaggcctcgagtggtacccgcgggtggttcgacccctggggccagggaaccctggtcatcgtctccgca

SEQ ID NO: 17991 - DNA, 292 bp, Homo sapiens
  source 1..292: mol_type = other DNA
tgaagcctctggaggattcacctttagcagatatatcatgacttgggtccgccagtctccagggaaggggctggagtgggtctcaactattagtggcgacagtacattctacgcaggctccgtggagggccggttcgccatctccagggacaactccaagaacacgctgcacctacaagtgaacgacctgagagccgaggacacggccatatattactgtgcgaaggcgagttcgggcacccgggggtggttcgacccctggggccagggagtggttgtcatcgtctcctca

SEQ ID NO: 17992 - DNA, 271 bp, Homo sapiens
  source 1..271: mol_type = other DNA
tgtagcctcggattccacctttaatatatattggatgagttgggtccgccaggctccagggaaggggctagagtgggtggccaacataaaagaagatggaagtgagaagtacttcgcggactctgtgaagggccgattcaccatctccagagacaacgcgaagaactcactgtatttgcaaatgaacagcctgagagtcgaggatgcgggtatctattactgcacgagcggcagcgtctggggccaagggaccacggtcaccgtctcctca

SEQ ID NO: 17993 - DNA, 271 bp, Homo sapiens
  source 1..271: mol_type = other DNA
tacagcctctgattccacctttaacatctattggatgagttgggtccgccaggctccagggaaggggctggagtgggtggccaatataaaggaagatgggagtgcgagatactatgtggactctgtgaagggccgattcaccatctccagagacaacaccaagaactcagtctatcttcaaatgagcagcctgagagtcgaggacacggccgtatactactgcacctcagggagcgtctggggccaagggaccacggtcaccgtctcccca

SEQ ID NO: 17994 - DNA, 271 bp, Homo sapiens
  source 1..271: mol_type = other DNA
tacagcctctgactccacctttaatatctattggatgagctgggtccgccaggctccagggaaggggctggagtgggtggccaatataaaagaggatggaagtgagagatactatgtggcctctgtgaagggccgattcaccatctccagagacaacaccaagaattcagtctatctgcaaatggacagtctgagagtcgaggacacggctgtctattactgtacgtcagggagcgtctggggccaaggggccacggtcaccgtctcctca

SEQ ID NO: 17995 - DNA, 271 bp, Homo sapiens
  source 1..271: mol_type = other DNA
tatagcctctgactccacctttaatatttattggatgagctgggtccgccaggctccagggaaggggctggagtgggtggccaatataaaagaagatggcactgagagatactatgtggactctgtgaagggccgattcaccatctccagagacaacacgaagaactcagtctatctgcaaatggacagcctgagagtcgaggatacggctgtctattattgtacctcagggagcgtctggggccaaggggccacggtcaccgtctcttca

SEQ ID NO: 17996 - DNA, 271 bp, Homo sapiens
  source 1..271: mol_type = other DNA
tacagcctctgagtccacctttaacatctattggatgagctgggtccgccaggctccagggaaggggctggagtgggtggccaatataaaagaggatggacgtgagagatactatgtggactctgtgaagggccgattcaccatctccagagacaacaccaagaattcagtctatctgcaaatggacagtctgagagtcgaggacacggctgtctattactgtacctcagggagcgtctggggccaaggggccacggtcaccgtctcctca

SEQ ID NO: 17997 - DNA, 271 bp, Homo sapiens
  source 1..271: mol_type = other DNA
tacagcctctgagtccacctttaacatctattggatgagctgggtccgccaggctccagggaaggggctggagtgggtggccaatataaaagaggatggacgtgagagatactatgtggactctgtgaagggccgattcaccatctccagagacaacaccaagaattcagtctatctgcaaatggacagtctgagagtcgaggacacggctgtctattactgtacgtcagggagcgtctggggccaaggggccacggtcaccgtctcctca

SEQ ID NO: 17998 - DNA, 271 bp, Homo sapiens
  source 1..271: mol_type = other DNA
tacagcctctgactccagttttaatatttattggatgagttgggtccgcctggctccggggaaggggctggagtgggtggccaatgtaaaggaagatggaagtgagagatactatgtggactctgtgaagggccggttcaccatctccagagacaacaccaagaattcagtctatctgcaaatgaacagcctgagagccgaggacacggctgtttattactgtacctcagggagtgtctggggccaagggaccacggtcaccgtctcctca

SEQ ID NO: 17999 - DNA, 271 bp, Homo sapiens
  source 1..271: mol_type = other DNA
tacagcctctgagtccacctttaacatctattggatgagctgggtccgccaggctccagggaaggggctggagtgggtggccaatataaaagaggatggacgtgagagatactatgtggactctgtgaagggccgattcaccatctccagagacaacaccaagaattcagtctatctgcaaatggacagtctgagagtcgaagacacggctgtctattactgtacgtcagggagcgtctggggccaaggggccacggtcaccgtctcctca

SEQ ID NO: 18000 - DNA, 271 bp, Homo sapiens
  source 1..271: mol_type = other DNA
cagagcctctgattcctcctttaatatctattggatgagttgggtccgccaggcgccagggaaggggctggagtgggtggccaatataaaggcagatggaagtgagagatactatgtggactctgtgaagggccgattcaccatctccagagacaacaccaagaactcaatctatcttcaaatgaacagcctgagagccgaggacacggctgtgtattactgtacctccgggagcgtctggggccaagggaccacggtcaccgtctcccca

SEQ ID NO: 18001 - DNA, 271 bp, Homo sapiens
  source 1..271: mol_type = other DNA
tatagcctctgactccacctttaatatttattggatgagctgggtccgccaggctccagggaaggggctggagtgggtggccaatataaaagaagatggcactgagagatactatgtggactctgtgaagggccgattcaccatctccagagacaacacgaagaactcagtctatctgcaaatggacagcctgagagccgaggatgcggctgtctattactgtacttcagggagcgtctggggccaaggggccacggtcaccgtctcctca

SEQ ID NO: 18002 - DNA, 271 bp, Homo sapiens
  source 1..271: mol_type = other DNA
tacagcctctgactccacctttaatatctattggatgagctgggtccgccaggctccagggaaggggctggagtgggtggccaatataaaagaggatggaagtgagagataccatgtggcctctgtgaagggccgattcaccatctccagagacaacaccaagaattcagtctatctgcaaatggacagtctgagagtcgaggacacggctgtctattactgtacgtcagggagcgtctggggccaaggggccacggtcaccgtctcctca

SEQ ID NO: 18003 - DNA, 271 bp, Homo sapiens
  source 1..271: mol_type = other DNA
tatagcctctgactccacctttaatatgtattggatgagctgggtccgccaggctccagggaaggggctggagtgggtggccaatataaaagaagatggcactgagagatactatgtggactctgtgaagggccgattcaccatctccagagacaacacgaagaactcagtctatctgcaaatggacagcctgagagccgaggatacggctgtctattactgtacctcagggagcgtctggggccaaggggccacggtcaccgtctcctca

SEQ ID NO: 18004 - DNA, 271 bp, Homo sapiens
  source 1..271: mol_type = other DNA
tacagcctctgactccacctttaatatctattggatgagctgggtccgccaggctccagggaaggggctggagtgggtggccaatataaaagaggatggaagtgagagatactatgtggcctctgtgaagggccgattcaccatctccagagacaacaccaagaattcagtctatctgcaaatggacaatctgagagtcgaggacacggctgtctattactgtacgtcagggagcgtctggggccaaggggccacggtcaccgtctcctca

SEQ ID NO: 18005 - DNA, 298 bp, Homo sapiens
  source 1..298: mol_type = other DNA
tgcagcctctggattcacctttagtaactatgccatgacctgggtccgccaggttccagggaaggggctggagtggatctcagctattacgcataatggtggtgacacatacgacgcagactccgtgaagggccggttcaccatctccagagacaattccaagaacacgctgtttctgcaaatgaacagcctgacagccgaggacacggccatatattactgtacgaaagggtcgagcagcagccggccctactactttgacttttggggccggggaaccctggtcaccgtctcctca

SEQ ID NO: 18006 - DNA, 298 bp, Homo sapiens
  source 1..298: mol_type = other DNA
tgctgcctctggattcacctttagcagctatgccatgagctgggtccgccaggctccaggggaggggctggaatggttctcagctattactgatagtggtggtgacacataccacgcagactccgtgaagggccggttcaccatctccagagacaattccaagaacacactgtatctgcaaatgaacagcctcagagccgaggacacggccatttattactgtacgaaggggtctagcagcagccgaccttactactttgacttctggggccagggaaccctggtcaccgtctcctca

SEQ ID NO: 18007 - DNA, 292 bp, Homo sapiens
  source 1..292: mol_type = other DNA
tattgtctctggtggctccatcagtaattactactggagctggatccgacagcccccagggaagggactggagtggattgggtatatctattacagtgggagcaccaactacaacccctccctcaagagtcgagtcaccatatcagtagacacgtccaagaaccagttctccctgaagctgaactctgtgaccgctgcggacacggccgtgtattactgtgcgagagtctatagcagcagctggtactaccttgactactggggccagggtaccctggtcaccgtctcctca

SEQ ID NO: 18008 - DNA, 292 bp, Homo sapiens
  source 1..292: mol_type = other DNA
cactgtctctggtggccccatgaatgcttactactggacctggatccggcagcccccagggaagggactagagtggattgggtacatctattacagtgggagtaccaactacaacccctccctcaagagtcgagtcaccatatcaatagacacgtccaagaaccagttctccctgaagctgagctctctgaccgctgcggacacggccgtgtattactgtgcgagagtgtatagcagcagctggtactatcttgactactggggccagggaaccctggtcaccgtctcctca

SEQ ID NO: 18009 - DNA, 295 bp, Homo sapiens
  source 1..295: mol_type = other DNA
tgcagcctctggattcacgtttagcaactttgccatgcactgggtccgccaggctccagggaaggggctggagtgggtctcaggcattagtggaagtggtgatggcacatactacgtagactccgtgaagggccggttctccatctccagagacacttccaagaacaccgtgtatctgcaaatgaacagcctgagagtcgaggacacggccgtatactattgtgcgaaagccagtgggagtccaaaagggtggttcgacccctggggccagggaaccctggtcaccgtctcctca

SEQ ID NO: 18010 - DNA, 295 bp, Homo sapiens
  source 1..295: mol_type = other DNA
tgcagcctctggattcacttttaccacctatggcatgcactgggtccgccaggctccagggaaggggctggagtgggtctcaggcattagtggaagtggtgatgacacatactacctagattccgtgaagggccggttcaccatctccagagacacctccaagaatatcctgtatctgcaaatgaacagcctgagagtcgaggacacggccgtatattactgtgcgaaagccagtgggagtccaaaagggtggttcgacccctggggccagggaaccctggtcaccgtctcctca

SEQ ID NO: 18011 - DNA, 295 bp, Homo sapiens
  source 1..295: mol_type = other DNA
tgcagcctctcgattcacctttagcaactatgccatgaactgggtccgccaggctccagggaaggggctggaatgggtctcacttattagtggtagtggtgataccacatactacgcagactccgtgaagggccggttcaccatctccagagacacttccaagaacacgctgtatctgcaaatgaacagcctgagagccgaggacacggccgtatattactgtgcaaaagccagtgggagcccaaaagggtggttcgacccctggggccagggaaccctggtcaccgtctcctca

SEQ ID NO: 18012 - DNA, 295 bp, Homo sapiens
  source 1..295: mol_type = other DNA
tgcagcctctggattcaccgttagcacctatggcatgaattgggtccgccaggctccagggaaggggctggagtgggtctcagttattagtggtgctggcggtgacacatactacgcagactccgtgaagggccggttcaccatctccagagacaattccaagaacatgctgtatctacaaatgaacagtctgagagccgaggacacggccgtatattactgtgcgaaagctagtgggagtcctaagggctggttcgacccctggggccagggaaccctggtcaccgtctctaca

SEQ ID NO: 18013 - DNA, 301 bp, Homo sapiens
  source 1..301: mol_type = other DNA
tgcagcctctggattcacctttgatgattatgccatgcactgggtccggcaaactccagggaagggcctggagtgggtctcaggtattggttggaataatgataaaacagactatgcggactctgtgaagggccgattcaccatctccagagacaacgccaagaactccctgtttttggaaatgaacagtctgagaagtgaggacacggccttgtattactgtgccaaagatatgtggctacaacagtgggcgaatgcttttgatatctggggccaagggacaatggtcactgtctcttca

SEQ ID NO: 18014 - DNA, 301 bp, Homo sapiens
  source 1..301: mol_type = other DNA
tgcagcctctggattcacctttgatgattatgccatgcactgggtccggcaaactccagggaagggcctggagtgggtctcaggtattggttggaataatgataaaatagactatgcggactctgtgaagggccgattcaccatctccagagacaacgccaagaactccctgtttttggaaatgaacagtctgagaagtgaggacacggccttgtattactgtgccaaagatatgtggctacaacagtgggcgaatgcttttgatatctggggccaagggacaatggtcactgtctcttca

SEQ ID NO: 18015 - DNA, 301 bp, Homo sapiens
  source 1..301: mol_type = other DNA
tgcagcctctggattcacctttgatgattatgccatgcactgggtccggcaaactccagggaggggcctggagtgggtctcaggtattagttggaatagtggtaaaatagactatgcggactttgtgaagggccgattcaccatctccagagacaacgccaagaactccctgtatctgcaaatggacagtctgagagctgaggacacggccttgtattactgtgcaaaagatatgtggctacaacagtgggccaatgcttttgatatctggggccaaggggcaatggtcaccgtctcctca

SEQ ID NO: 18016 - DNA, 301 bp, Homo sapiens
  source 1..301: mol_type = other DNA
tgcagcctctggattcacctttgatgattatgccatgcactgggtccggcaaactccaggaaagggcctggagtggatctcaggtattagttggaatagtggtaatgtagactatgcggactctgtgaagggccgattcaccatctccagagacaacgccaagaactccctctatctgcaaatgaacagtctgagacctgaggacacggccttgtattactgtgcaaaagatatgtggctacaacagtgggcgaatgcttttgatatctggggccaagggacaatggtcaccgtctcttca

SEQ ID NO: 18017 - DNA, 294 bp, Homo sapiens
  source 1..294: mol_type = other DNA
acttctggttacagctttaccagttttggtatcagttgggtgcgacaggtccctggacaagggccggagtggatgggatggatcaacgctgacaatggtcacacaaactatgcacaaaacctccagggcagagtcaccttgaccacagacacatccacgagcacagcctacatggaactgaggagcctcatatctgacgacacggccgtgtattactgtgcgcgggatcactatacctcggggagtttttactttgactactggggccagggaaccctggtcaccgtctcctca

SEQ ID NO: 18018 - DNA, 294 bp, Homo sapiens
  source 1..294: mol_type = other DNA
acttctggtttcacctttaccacctatggtctcagctgggtgcgacaggcccctggacaagggcttgagtggatgggatggatcagcacttacaatggtaacacagactatgcacagaatctccaggacagagtcaccatgaccacagacacatccacgagcacagcctacatggagctgaggagcctgagatctgacgacacggccgtctattactgtgcgcgagatcactatacttcggggagtttctattttgactactggggccagggaaccctggtcaccgtctcctca

SEQ ID NO: 18019 - DNA, 274 bp, Homo sapiens
  source 1..274: mol_type = other DNA
tgcagcctctggattcacctttagcagctctgccatgacctgggtccgccaggctccagggaaggggctggagtgggtctcagttattagtactaatggtgataccacatactacgcagactccgtgaagggccggttcaccatctccagagacaattccaagaacacgctgtatctgcaaatgaacagcctgagagccgaagacacggccgtatattactgtgcaaaaatgggggactactggggccagggaaccctggtcaccgtctcctca

SEQ ID NO: 18020 - DNA, 274 bp, Homo sapiens
  source 1..274: mol_type = other DNA
tgcagcctctggattcacctttagcagctatgccatgagctgggtccgccaggctccagggaaggggctggagtgggtctcaactttcagtggtagtgctgctggcacatactacgcagactccgtgaagggccggttcaccatctccagagacaattccaagagcacgctgtatctgcaaatgaacagcctgagagccgaggacacggccgtatattactgtgcaaaaatgggggactactggggccagggaaccctggtcaccgtctcctca

SEQ ID NO: 18021 - DNA, 271 bp, Homo sapiens
  source 1..271: mol_type = other DNA
tgcagcctctggattcacctttagtagctcttggatgagctgggtccgccaggctccagggaaggggctggagtgggtggccaacataaaccaagatggaagtgagaaatactatgtggactctgtgaagggccgattcactatctccagagacaacgccaagaactcactgtatttgcaaatgaacagcctgagagccgaggacacggctgtgtattactgtgcgagagcagagatgtgggggaagggaaccctggtcaccgtctcctca

SEQ ID NO: 18022 - DNA, 271 bp, Homo sapiens
  source 1..271: mol_type = other DNA
tgcaacttctggattcacctttagtagcgaatggatgagctgggtccgccaggctccagggaaggggctggaatgggtggccaacattaacccagatggaagtgagaattcctatgtggactctgtgaagggccgattcaccatctccagagacaacgccaagaattcattgtatctgcaaatgaacagcctgacagccgacgacacggctgtatattactgtgcgagagcggagatgtggggccagggagccctggtcacagtctcctca

SEQ ID NO: 18023 - DNA, 295 bp, Homo sapiens
  source 1..295: mol_type = other DNA
tgcagcctctggattcacctctaaaaagtataagaatgccatgcactgggtccggcaagctccagggaagggcctggagtgggtctcgggtttcaatttggacagtggtagagtagactatgcggagtctgtgaagggccgatttaccatctccagagacaacgccaaggactccctgtatctgcaaatggacagtctgagacctgaggacacggccttatattactgtgtaaaagatgtgtccgcgggcggtgcggacgtctggggccaagggaccacggtcaccgtctcctca

SEQ ID NO: 18024 - DNA, 289 bp, Homo sapiens
  source 1..289: mol_type = other DNA
tgcagcctctggattcacctttaatgattatgccatgcactgggtccggcaagttccagggaagggcctggagtgggtctcaggcatttactggaatagtaatagaatcgactatgcggactctgtgaagggccgattcaccatctccagagacaacgccaagaattctctgtatctgcaaatgaatagtctgagagttgaggacacggccctgtattattgtgtaaaggatgtgtctgcgggcggtgcggacgtctggggccaagggaccacggtcaccgtctcttta

SEQ ID NO: 18025 - DNA, 323 bp, Homo sapiens
  source 1..323: mol_type = other DNA
ccatctccggggacggtgtctctagcgtcagtgctgcttggacctggatcaggcagtccccatcgagaggccttgagtggctgggaaggacatactacaggtccaagtggtattatgattatgcagtatctgtgaagagtcgaatagccatcaacccagacacatccaagaaccagttctccctgcagttgaactctgtgactcccgaggacacggctgtgtattactgtgcaagagagagggttactatggttcgggaaattgttataacggcctacggtctggacgtctggggccaggggaccacggtcaccgtctcctca

SEQ ID NO: 18026 - DNA, 324 bp, Homo sapiens
  source 1..324: mol_type = other DNA
accatctccggcgacggtgtctctagcagcagtgctgcttggaactggatcaggcagtccccatcgagaggccttgagtggctgggaaggacatattacagggccaagtggtacaatgattatgcaatttctgtgcaacgtcgaataaccatcaacccagacacatccaagaaccagttttccctgcagctgaactctgtgactcccgaggacacggctatatattattgtgcaagagagcgggttactatggttcgggaaatcgttataacggcctacggtctggacgtctggggccaagggaccacggtcaccgtctcctca

SEQ ID NO: 18027 - DNA, 301 bp, Homo sapiens
  source 1..301: mol_type = other DNA
cactgtcgctggtgactccgtcagcagaagtatttactactggggctggatccgccagcccccagggaaggggctagagtggattggaagtgtcgattttagcgggagttcctactacaacccgtccctcaagagtcgagtcaccatatccgtagacacgtccatgaatcacttctccctgaggctggactctgtgaccgccgcagacacggctgtgtactattgtgcgagaccaaatagcagtggctggtcaggagcttttgatatctggggccaagggacgagggtcaccgtctcttca

SEQ ID NO: 18028 - DNA, 301 bp, Homo sapiens
  source 1..301: mol_type = other DNA
cactgtcgctggtgactccgtcagcagaagtatttactactggggctggatccgccagcccccagggaaggggctagagtggattggaagtgtcgattttagcgggagttcctacaacaacccgtccctcaagagtcgagtcaccatatccgtagacacgtccatgaatcacttctccctgaggctggactctgtgaccgccgcagacacggctgtgtactattgtgcgagaccaaatagcagtggctggtcaggagcttttgatatctggggccaagggacgagggtcaccgtctcttca

SEQ ID NO: 18029 - DNA, 292 bp, Homo sapiens
  source 1..292: mol_type = other DNA
tacaggctctggaatcacctttgaggatcatggcatgagctgggtccgccaagttccagggaaggggctggagtgggtctctggtattaattgggatggtggaagtacaggttatggagactctgtgaagggccgattcaccatctccagagacaacgccaagaactccctgtatctgcaaatgaacagtctgagagtcgaggacacggccatctattactgtgcggggggggacaggaatggctggtactttgaccgctggggccagggaaccctggtcaccgtctcctca

SEQ ID NO: 18030 - DNA, 292 bp, Homo sapiens
  source 1..292: mol_type = other DNA
tgcagcctctggattcatctttaatgatcatggcatgagctgggtccgccaagttccagggaaggggctggtgtgggtcgctggcattagttggaatagtgctggtacaggttatgcagactctgtgaggggccgattcaccatctccagagacaacgccaagaattttctctatttgcaaatgaacaatctgcgagtcgaggacacgggcttgtattactgtgcgggaggcgatcggaatggctggtattttgaccgctggggccagggaaccctggtcaccgtttcctca

SEQ ID NO: 18031 - DNA, 292 bp, Homo sapiens
  source 1..292: mol_type = other DNA
tgcagcctctggattcatcttttacgattatggcatgagctgggtccgccaagttccagggaaggggctggtgtgggtcgctggcattaattggaatagtgttaatacaggttatggagactctgtgaggggccgattcaccatctccagagacaacgccaagaattttctctatttgcaaatgaacgatctgcgagtcgaggacacgggcttgtattactgtgcgggaggcgaccggaatggctggtattttgaccgctggggccagggaaccctggtcaccgtttcctca

SEQ ID NO: 18032 - DNA, 285 bp, Homo sapiens
  source 1..285: mol_type = other DNA
gcttctggatacactttcaccaactatgccatacactgggtgcgccaggcccccggacaagggcttcagtgcatgggatggatcaacggtggcgatggctacacaaaatactcacagaggttccagggcagagtctccattaccaaggacacatccgccaacacagtctacatggaattgaacagcctgacatctgaagactcggctgtgtattactgtgcgagggattgggtgacttcgggctttgactactggggccagggaaccctggtcaccgtctcctca

SEQ ID NO: 18033 - DNA, 285 bp, Homo sapiens
  source 1..285: mol_type = other DNA
gcttctggatacaccttcactaattatgctatacattgggtgcgccaggcccccggacaaggacttgagtgcatgggatggatcaactgtggcaatggtaatacaagatattcacagaagttccagggcaaggtcaccattaccagggacacatccgcgaacacagcctacatggaactgagcagcctgacatctgaagactcggctgtctattactgtgcgagagattgggttacgtcgggttttgactactggggccagggaaccctgatcaccgtctcctca

SEQ ID NO: 18034 - DNA, 289 bp, Homo sapiens
  source 1..289: mol_type = other DNA
tgcagcctctggattcaccttcagtagctattggatgacctgggtccgccagcctccagggaaggggctggagtgggtggccatcacaaaccaagatggaactaagaaatactatattgactctgtgaagggccgattcaccatctccagagacaacgccaagaacacactgtatctgcaattgagcagcctgagagtcgaggacacggctgtgtattactgtgcgagagatgtttcgttcgggcgctttgactactggggccagggaaccctggtcaccggctcctca

SEQ ID NO: 18035 - DNA, 289 bp, Homo sapiens
  source 1..289: mol_type = other DNA
tgcagcctctggattcacgtttagtaattactggatgaattgggtccgccaggctccagggaaggggctggagtgggtggccagcataaaccaagatggaactgaaaaatactatgtggactctctgaagggccgattcaccatctccagagacaacgctaagaattcactgtatttgcaagtaaacagcctcagaggcgaggacacggctatatactactgtgcgagagatgtatccttcggtagatttgactactggggccaggggaccctggtcaccgtctcctca

SEQ ID NO: 18036 - DNA, 285 bp, Homo sapiens
  source 1..285: mol_type = other DNA
gcatctggatacactttcaccctctactatatacactgggtgagacagacccctggacacggacttgagtggatggggataatcaaccctaatgctgaaaccactcggtacgcacagaagtttcagggcagagtcaccatgaccagcgacacgtccacgagcacagtctacatggaactgaacaacgtgatatctgaggacacggccgtttactactgtgcgagagggggggactccggtgcttttgatatctggggccatgggacaatggtcgtcgtctcttca

SEQ ID NO: 18037 - DNA, 285 bp, Homo sapiens
  source 1..285: mol_type = other DNA
gcatctggatacactttcaccctctactatatacactgggtgagacagacccctagacacggacttgagtggatggggataatcaaccctaatgctgaaaccactcggtacgcacagaagtttcagggcagagtcaccatgaccagcgacacgtccacgagcacagtctacatggaactgaacaacgtgatatctgaggacacggccgtttactactgtgcgagagggggggactccggtgcttttgatatctggggccatgggacaatggtcgtcgtctcttca

SEQ ID NO: 18038 - DNA, 285 bp, Homo sapiens
  source 1..285: mol_type = other DNA
gcatctggatacactttcaccctctactatatacactgggtgagacagacccctggacacggacttgagtggatgggaataatcaaccctaatgctgaaaccacacggtacgcacagaagttccagggcagagtcaccatgaccagcgacacgtccacgagcacagtctacatggaactgaacaacctgatatctgaggacacggccgtttattactgtgcgagagggggggactccggtgcttttgatatctggggccatgggacaatggtcgtcgtctcttca

SEQ ID NO: 18039 - DNA, 285 bp, Homo sapiens
  source 1..285: mol_type = other DNA
gcatctggatacgtcttcaccaactactatatacactgggtgcggcaggcccctggacaagggcttgagtggatgggaattatcaaccccagaggtggcagtgtgaggtacgcagagaatttccagggcagagtcaccatgaccgaagacacgtccacgagcacagtctacatggagctgagcagcctgggatctgacgacacggccgtgttttactgtgcgagaggtggggactctggtgcttttgatatctggggccaagggacaatggtcaccgtgtcttca

SEQ ID NO: 18040 - DNA, 286 bp, Homo sapiens
  source 1..286: mol_type = other DNA
cgctgtctatggtgggtctttcagtggttactactggagttggatccgccagtccccagggaaggggctggagtggattggggaaatcaaacatagtggaagcaccaactacaacccgtccctcaagagtcgagtcaccatatcagtagatacgtccaagaaccagttctccctgaaactgatctctgtgaccgccgcagacacggctgtgtattactgtgcgagaggcaggtggtcccccgcccttgactactggggccagggaaccctggtcaccgtctcctca

SEQ ID NO: 18041 - DNA, 286 bp, Homo sapiens
  source 1..286: mol_type = other DNA
cgctgtctatggtgggtccttcagtggttattactggacctggatccgccagcccccagggaaggggctggagtggattggggagatcaatcatagtggaagccccaattacagcccgtccctcaggagtcgagtcactattttagtagacacgtccaagaaccagttctccctgaagttgaactctatgaccgccgcggacacggctgtgtattactgtgcgagaggccgttggtcgccggcgcttgactactggggccagggaaccctggtcaccgtctcctca

SEQ ID NO: 18042 - DNA, 283 bp, Homo sapiens
  source 1..283: mol_type = other DNA
tgcaacctctggattcaccttcagtaactttgacatgaactgggtccgccaggctccagggaaggggctggagtgggtcgcgttcatcagtaatggtggaaacacgcgctacgcagacccagtgatgggccgattcaccatctccagagacaacgccaagaactcactgtatctgcaaatggacagcctgagagccgaggacgcggctgtgtattactgtgcgagagatcctccccggcgatctgactactggggcctgggaaccctggtcaccgtctcctca

SEQ ID NO: 18043 - DNA, 286 bp, Homo sapiens
  source 1..286: mol_type = other DNA
tgcagcctctgacttcagtttcagtagttataccatgagttggctccgccaggctccagggaaggggctggagtgggtctcagccatcagtcctactagtgatgagatacagtattctggctcagtgaagggccgattcaccgtctccagagacaacgcccacaactcactgtatctgcagatgaacagcctgagagccgaagacacggcagtgtattactgtgcgagagacccgccccgacgctctgactactggggccagggaaccgtggtcaccgtctcctca

SEQ ID NO: 18044 - DNA, 286 bp, Homo sapiens
  source 1..286: mol_type = other DNA
tgcagcctctggcttcagtttcagtagttatgccatgggttgggtccgccaggctcgagggaaggggctggagtgggtctcagccatcagtcctaggagtgatgacagacactatgctgactcagtgaagggccgattcaccatctccagagacaacgcccacaactcactatttctgcaactgaacagcctgagagtcgaagacacggcagtctattactgtgcgagagacccgccccgacgctctgactattggggccagggaaccgtggtcaccgtctcctca

SEQ ID NO: 18045 - DNA, 298 bp, Homo sapiens
  source 1..298: mol_type = other DNA
tgtagcctctggatttacttttagtacttctgccatgagctgggtccgccagtctctagggagggggctggagtgggtcgcggctattagtggaagtggggataacacatactactcagactccgtgaagggccgattcaccatctccagagacaattccaggaataccctatatctgcaaatgaacagcctgagagccgaggactcggccacatattactgtgcgaaagatctgcccggtatagcagcagcttactttgactactggggccagggaaccctggtcactgtctcctca

SEQ ID NO: 18046 - DNA, 298 bp, Homo sapiens
  source 1..298: mol_type = other DNA
cgcagcctctggattcacctttagtagttatgccatgagctgggtccgccaggctccagggaaggggctggagtgggtctcaggtattagtggtagtggtcatgacacatattacacagattccgtgaggggccgattcaccatctccagagacaattccaagaacacgctgtatctccagatgtacagcctgagagccgaggacacggccgtatactactgtgcgaaggatctgccaggtatagcagcagcttactttgactactggggccggggaaccctggtcaccgtctcctca

SEQ ID NO: 18047 - DNA, 280 bp, Homo sapiens
  source 1..280: mol_type = other DNA
tgcagcctctggattcacctttactaataattacatgacctgggtccgccaggctcctgggaaggggctggagtgggtggccaacataaaacaagatggaagtgagacatgctatgtggactctgtgaagggccgattcaccatctccagagacaattccaagacgtcattatatctgcaaatgaacagcctgagagtcgaggacacggctgtgtattactgtgcgaggggagccggctcgtccgactggggccggggaaccctggtcaccgtctcctca

SEQ ID NO: 18048 - DNA, 280 bp, Homo sapiens
  source 1..280: mol_type = other DNA
tgcagcctctggattcacctttagtagctattggatgacctgggtccgccaggctccagggaaggggctggactgggtggccaacataaagcaagatggaagtgagaaacactatgtggactctgtgaagggccgattcaccatctccagagacaacgccaagaactcactgcatctgcaaatggacagcctgagagccgaggacacggctgtgtattactgtgcgagaggtgctggcagcagcgactggggcccgggaaccctggtcaccgtctcctca

SEQ ID NO: 18049 - DNA, 298 bp, Homo sapiens
  source 1..298: mol_type = other DNA
cactgtctctggtgactccattagcagtggtgcttactactggagctggatccgccagctcccagggaagggcctggagtggattgggtacatgtattacagtgggagcacctactacaacccgtccctcaagagtcgagttaccatgtcagtagacacgtctaagaaccagttctccctgaagctgagctctgtgactgccgcggacacggccctatattactgtgcgagagcatattgtggtggtgactgctatcccgactactggggcccgggaaccctggtcaccgtctcctca

SEQ ID NO: 18050 - DNA, 298 bp, Homo sapiens
  source 1..298: mol_type = other DNA
cactgtctctggtggctccattagcagtggtgcttactactggagctggatccgccagctcccagggaagggcctggagtggattgggtacatgtattacagtgggagcacctactacaacccgtccctcaagagtcgagttaccatgtcagtagacacgtctaagaaccagttctccctgaagctgagctctgtgactgccgcggacacggccctatattactgtgcgagagcatattgtggtggtgactgctatcccgactactggggcccgggaaccctggtcaccgtctcctca

SEQ ID NO: 18051 - DNA, 298 bp, Homo sapiens
  source 1..298: mol_type = other DNA
cagtgtctctggtgactccatgaacagtgatggttactattggggctggatccgccagctcccagggaagggcctggagtccattgggtacatctattacagtgggaacactttctacagcccgtccctcaagagtcgagttaccatctcgctagacacgtctaggtcccagttctccctgaagctgacctctgtgactgccgcggacacggccatgtatttctgtgcgagggcatattgtggtggtgactgttaccctgactactggggccagggaaccctggtctccgtctcctca

SEQ ID NO: 18052 - DNA, 295 bp, Homo sapiens
  source 1..295: mol_type = other DNA
cactgtctctggtggctccatcagcagtagtacttactattggggctggatccgccagcccccagggaagtggctggagttcattgggagtatcttttatagtgggaacacctactacaacccgtccctcaagagtcgagtcaccatatccatagacacgtccaagaaccagttgtccctgaggctgagctctgtgaccgccgcagacacggctgtgtatttctgtgcgagactttgggggggactacggcctcctgactactggggccagggaattctggtcaccgtctcctca

SEQ ID NO: 18053 - DNA, 295 bp, Homo sapiens
  source 1..295: mol_type = other DNA
cactgtctttggtggctccatcatcagtagtgattactactggggctggatccgccagcccccagggaaggggctggaatccattgggagtatgtcctatactgggacaacctactacaacccgtccctcaagagtcgagtcgccatgtccgttgacacgtccaagaaccagttatccctcaagctgagctctgtgaccgccgctgacacggctctatattactgtgcgaggctgtggggtggcttacgtccgccggactactggggcctgggagtcctggtctttgtctcctca

SEQ ID NO: 18054 - DNA, 289 bp, Homo sapiens
  source 1..289: mol_type = other DNA
tgcagcctctggattcaccttcagtgactactacatgagctggatccgccaggctccagggaaggggctggagtgggtttcatacattagtactagtggtagtaccaaatattacgcagactctgtgaagggccgattcaccatctccagggacaacgccaagaactcactgtatctgcaaatgaacagcctgagagccgaggacacggccgtgtattactgtgcgagagtccgcagtggtaactactttgactactggggccagggaaccctggtcaccgtctcctca

SEQ ID NO: 18055 - DNA, 289 bp, Homo sapiens
  source 1..289: mol_type = other DNA
tgcagcctctggattcaccttcagtaacttctacatgagttggatccgccaggctccagggaaggggctggagtggatttcatacattagtagtagtggtagtaccataaactatgcagactctgtgaagggccgattcaccatctccagggacaacgccaagaactcactgtatctgcaaatgaacagcctgagagccgaggacacggccgtgtattactgtgcgagagtccggagtggtaactactttgactactggggccagggaaccctggtcaccgtctcctca

SEQ ID NO: 18056 - DNA, 289 bp, Homo sapiens
  source 1..289: mol_type = other DNA
tgcagcctctggattcaccttcagtgaccactacatggactgggtccgccaggctccagggaaggggccggagtgggttggccgtattagaaagaaagttaacagttacaccacagaatacgccgcgtctgtgaaaggcagattcaccgtctcaagagatgattcacagaactcactgtatctggaactgcgcaacctgaaaaccgaggacacggccgtgtattactgtgctagggtcgactcgggtcttgactactggggccagggaaccctggtcaccgtctcctca

SEQ ID NO: 18057 - DNA, 289 bp, Homo sapiens
  source 1..289: mol_type = other DNA
tgcagcctctggattcaccttcagtgaccactacatggactgggtccgccaggctccagggaaggggctggagtgggttggccgtagtggaattaaagctaacagttacaccacagaatacgccgagtctgtgaaaggcagattcaccatctcaagagatgattcagagaactcactgtatctgcaaatgaacagcctgaaaatcgaggacacggccgtgtattactgtgctagagtcgactccggacttgactactggggccagggcaccctggtcaccgtctcctcg

SEQ ID NO: 18058 - DNA, 292 bp, Homo sapiens
  source 1..292: mol_type = other DNA
tgcagcctctggattcaccttcagtaactctggcatgcactgggtccgccaggctccaggcaaggggctggagtggatggctgttatttggtatgatggaagtaatatatattatgcagactccgtgaagggccgattcaccatctccagagacaattccaagaacatgttgtatctgcaaatgaacagcctgagagccgaggacacggctatatattactgtgtgaaatatagcagtgcttggtacgcccttgactactggggccagggaaccccggtcaccgtctcctca

SEQ ID NO: 18059 - DNA, 292 bp, Homo sapiens
  source 1..292: mol_type = other DNA
tgcagcgtctggattcaccttcagtgcctctggcatgcactgggtccgccaggctccaggcaaggggctggagtgggtggctgttatttggtctgatggaactaacatatattatgcggagtccgtgaagggccgattcaccatctccagagacaattccaagaacacgctgaatctgcagatgaacagcctgagagtcgaggactcgggtgtttattattgtgtgaaatatagcagtgcctggtacgccttggactactggggccaggggaccgtggtcaccgtctcctca

SEQ ID NO: 18060 - DNA, 271 bp, Homo sapiens
  source 1..271: mol_type = other DNA
tgcagcctctggagtcacctttgacatctatgacatgcactgggtccgccaacttccgggaaaggggctggagtgggtctcaagtatttttggtggtgatggtcgcacattctacgcagactctgtgaagggccggttcaccgtcttcagggacacttccaaggacatggtttatctgcaaatgagtagcctgagagccgaggacacggccgtatatttctgtacgggactttggaagtggggccagggaaccctggtcaccgtctcttca

SEQ ID NO: 18061 - DNA, 268 bp, Homo sapiens
  source 1..268: mol_type = other DNA
tgcagcctctggattcacatttactaggactgacatgaactgggtccgccaggctccagggaaggggccggagtgggtcgcagatattattagtgattataccacatattatgcagactccgtgaagggccggttcaccatctccagagacaatgccaagaacacggtgtctttgcaaatggacaacctgagagccgacgacacggccgtatatttttgtacgggtttgtggaagtggggccagggaaccctggtcaccgtctcccca

SEQ ID NO: 18062 - DNA, 289 bp, Homo sapiens
  source 1..289: mol_type = other DNA
tgtagcctctggattcacctttagcagctctgccatgacctgggtccgccaggctccagggaaggggctggattgggtctcaatcatttatagtggtggtagcaccacatactatgcagactccgtgaagggccgcttcaccatctccagagataattccaagaacacgctgcatctgcaaatgaacagcctgagagccgaggacacggccgtatattattgtgcgaaagggggaacggtgactccacttgactactggggccagggaatcctggtcaccgtctcctca

SEQ ID NO: 18063 - DNA, 289 bp, Homo sapiens
  source 1..289: mol_type = other DNA
tgcagcctctggattcatctttagcagctctgccatgacctgggtccgccaggctccagggaaggggctggagtgggtctcagttatttatagcggtggtagtaccgcatactatgcagactccgtgcagggccggctcaccatctccagagataattccaagaacatggtttatctgcaaatgaacagcctgagagccgaggacacggccgtatattactgtgcgaaagggggcacggtgactccgcttgactactggggccagggaaccctggtcaccgtctcctca

SEQ ID NO: 18064 - DNA, 283 bp, Homo sapiens
  source 1..283: mol_type = other DNA
tgtaggctctggattcgcctttagtacctatgccatgagctgggtccgccaggctccagggaaggggctggaatgggtctcatctattagtgatagtggtgttaccacacactacgcagactccgtgaagggccgcttcaccatctccagagacaattccaagagcacactgtatctgcaactgaacagcctgagagccgaggacacggccgtatattactgtgcgaaacccaatagtttgtttgattactggggccaggggaccctggtcaccgtctcgtca

SEQ ID NO: 18065 - DNA, 283 bp, Homo sapiens
  source 1..283: mol_type = other DNA
tgcaggctctggattcgcctttagcacctatgccatgagctgggtccgccaggctccagggaaggggctggagtgggtctcaagtatcagtgatagcggtgacaagatatactacgccgactccgtgaagggccgattcaccatctccagagacaattccaagaacatactacatctgcaaatgaatagcctgagagccgaggacacggccgtgtattactgtgcgaaacctaactcactctttgactactggggccagggcaccctggtcaccgtctcctca

SEQ ID NO: 18066 - DNA, 283 bp, Homo sapiens
  source 1..283: mol_type = other DNA
tgtcggctctggattcatgtttgacacctatgccatggcctgggtccgccaggctccagggaaggggctggagtgggtctcaagtgtaagtgaaagtggtgataggacgtattactcagactccgtgaggggccgcttcaccatctccagagacaattctaagaacacagtctatctgcaaatgaacagcctgagagccgacgacacggccgtttattactgtgcgaaaccgaactcgctctttgactattggggccaggggaccctggtcaccgtctcctca

SEQ ID NO: 18067 - DNA, 285 bp, Homo sapiens
  source 1..285: mol_type = other DNA
gcatctggatacaccttcaccagctactttatacactggttgcgacaggcccctggacaagggcttgagtggatgggaataatcaaccctagtggtggtagcacaacctactcacagaacctccagggcagagtcaccgtgaccagggacacgtccacgagcacagtctatatggaactgagcagcctgagatctgaggacacggccgtgtattattgtgcgagaggatacaatcatggccgacttgactactggggccagggaaccctggtcaccgtctcctca

SEQ ID NO: 18068 - DNA, 285 bp, Homo sapiens
  source 1..285: mol_type = other DNA
gcatcgggatacaccttcaccagctactatatgcactgggtgcgacaggcccctggacaagggcttgactggatgggaataatcaaccctagtggtggtagcacaacctacgcacagaagttccggggcagaatcaccatgaccagggacacgtccacgagcacagtctacatggaactgagcagcctgagatctgaggacacggccgtttattactgtgcgagaggatacaaccatggtcgtcttgactattggggccagggaatcctggtcaccgtctcctca

SEQ ID NO: 18069 - DNA, 277 bp, Homo sapiens
  source 1..277: mol_type = other DNA
cactgtctctggtggctccatcagcagtggtgattactactggagctggattcggcagcccgccgggaagggactggagtggattgggcgtatctataccagtggtaccaccaactacaacccctccctcaagagtcgagtcaccatatcagtagacacgtccaagaaccagttctccctgaaggtgaactctgtgaccgccgcagacacggccgtatattattgtgtgagacaatttgactactggggccagggaaccctggtcaccgtctcccca

SEQ ID NO: 18070 - DNA, 277 bp, Homo sapiens
  source 1..277: mol_type = other DNA
cactgtctctggtggctccatcagcagtggtagttattactggagctggatccggcagcccgccgggaagggactggagtggattgggcgtatctataccagtgggagcaccaactacaacccctccctcaagagtcgagtcaccatatcagtagacacgtccaagaatgagttctccctgaagctgagctctgtgaccgccgcagacacggccgtgtattactgtgtgagacaatttgactactggggccagggaaccctggtcaccgtctcctca

SEQ ID NO: 18071 - DNA, 298 bp, Homo sapiens
  source 1..298: mol_type = other DNA
cagtgtctctggtgcctccgtcaatagtagtcatcattactggggctggatccgccagcccccagggaagggactggagtggattggaagtatctactatagtgggagtacctactacaattcgtccctcaggagtcgagtcaccatatcaatggactcctccaagaatcacttttccctgaagctgacctctgtgagcgccgcagacacggctgtctattattgtgcgcgtcatccagctgcaggcggcgactggttcgacccctggggccagggaaccctggtcttcgtctcctca

SEQ ID NO: 18072 - DNA, 298 bp, Homo sapiens
  source 1..298: mol_type = other DNA
cagtgtctctggtgactccgtcagctctacttctgactactggggctggatccgccagtcccccgggaagggcctggagtggattgggagtatttactctactgggacttcctaccagaacccgtccctcaagagtcgggtcagcatttctgttgacacgtctaagaaccagttctctctgaaactgacctctgtgaccgccacagattcggggctttattactgtgcgagacatccggctgcggggggggactggttcgacccctggggcccgggaattctggtcagcgtctcctca

SEQ ID NO: 18073 - DNA, 295 bp, Homo sapiens
  source 1..295: mol_type = other DNA
tgcagcctctggattcacctttgcgcattataatattaattgggtccgccaaggtccagggaaggggctggagtggatcgcttttacagattggaatggaggaacttcaggatttgcagactctgttaagggccgattcagcatttccagagacaacgccaagaattccgtgtttctgcaaatgaacactctgaagcccgaggacacggccctttactactgtgcgcgggacggcccctattactactacggtctggacgtctggggcccggggaccatggtcaccgtctcctca

SEQ ID NO: 18074 - DNA, 295 bp, Homo sapiens
  source 1..295: mol_type = other DNA
tgcagcctctggattcacctttgctcattataatattaattgggtccgccaaggtccagggaaggggctggagtggatcgcttttacaaattggaatggaggaacttcaggatttgcagactctgttaagggccgattcagcatttccagagacaacgccaagaattccgtgtttctgcaaatgaacactctgaggcccgaggacacgaccctttactactgtgcgcgggacggcccctattactactacggtctggacgtctggggcccggggaccatggtcaccgtctcctca

SEQ ID NO: 18075 - DNA, 295 bp, Homo sapiens
  source 1..295: mol_type = other DNA
tgtgggttctggattcacctttgataattataacataaagtgggtccgccaagttcccgggaaggggctggagtgggtcgctggtgtcaactggaatggcgacagttcagattatgcagacgctgtgaagggccgattcagcattttcagagacaacgtcaagaattccgtctatctacaaatgaacagtctgagaggcgacgacacggccgtctattactgtgcgagagacggcccctattactattacggtctggacgtctggggccaggggacctcggtcaccgtttcctca

SEQ ID NO: 18076 - DNA, 289 bp, Homo sapiens
  source 1..289: mol_type = other DNA
tacagcctctggattcacctttcgtacttattggctgagctgggtccgccagtctccaggaaaggggctggagtgggtggccaacattaaggaagatggaagtgaggaatactatgtggactctctgaagggccgattcaccatctccagagacaacgccaagaactcactgtatctgcaaatgaacagcctgggagccgaggacacggccgtatattactgtgcgagagacctcccgcgaggactgtttgactactggggccgcggaaccctggtcaccgtctcctca

SEQ ID NO: 18077 - DNA, 289 bp, Homo sapiens
  source 1..289: mol_type = other DNA
tgcagcctctgggttcaccctcggtcattattggatgagctgggcccgccagactcaggggaaggggctggagtgggtggccaacataaacacagatggaagtgaggaatactatatggactctctgaagggccgattcaccatctccagagacaacgccaagaactcactgtatctgcaaatcaacagcctgagagccgaggacacggctatctattactgtgcgagagatttgccgcgtggactatttgactactggggccagggaaccccggtcaccgtctcctca

SEQ ID NO: 18078 - DNA, 289 bp, Homo sapiens
  source 1..289: mol_type = other DNA
tgcagcctctgggttcaccctcggtcattattggatgagctgggcccgccagactcaggggaaggggctggagtgggtggccaacataaacacagatggaagtgaggaatactatatggactctctgaagggccgattcaccatctccagagacaacgccaaaaactcactgtatctgcaaatcaacagcctgagagccgaggacacggctatctattactgtgcgagagatttgccgcgtggactatttgactactggggccagggaaccccggtcaccgtctcctca

SEQ ID NO: 18079 - DNA, 304 bp, Homo sapiens
  source 1..304: mol_type = other DNA
tgcagcctctggattcacctttagtagttattggatgagctgggtccgccaggctccagggaaggggctggagtgggtggccaacgtcaagcaagatggaaatgagaaatactatgtggactctgtgaagggccgattcaccatctccagagacaacgccaagaactcactgtatctgcaaatgaacagcctgagagccgaggacacggccgtgtattactgtgcgagagacggtagtcgtggttcttcccagtacaactggttcgacccctggggccagggaaccctggtcaccgtctcctca

SEQ ID NO: 18080 - DNA, 304 bp, Homo sapiens
  source 1..304: mol_type = other DNA
tgcagcctctggattcgcctttagtacttactggttcaactgggtccgccaggctccagggaaggggctggagtgggtggccaacataaagcaagatggaagtgagaaatactatgtggactctgtgaagggccgattcaccatatccagagacaacgccaggaactcagtgtatctgcaaatgaatagcctgagagccgacgacacgggtgtctattactgtgcgagagatggctctcgtgggagttcccagtacaactggttcgacccctggggccagggaaccctggtcaccgtctcctca

SEQ ID NO: 18081 - DNA, 307 bp, Homo sapiens
  source 1..307: mol_type = other DNA
cactgtctctggtggctccatcagcagtaatggtcactactggggctggatccgccagcccccagggaaggggctggagtggattgggagtatctactttagtgggagtacctactccaacccgtccctcaagagtcgagtcaccatatcctcagacacgtccaagaaccagttctccctgaggctgagctctgtgaccgccgcagacacggctgtgtattactgtgcgagacataggggatatagtggctacgacctcaactggttcgacccctggggccagggaaccctggtcaccgtctcctca

SEQ ID NO: 18082 - DNA, 307 bp, Homo sapiens
  source 1..307: mol_type = other DNA
cagtgtctctggtggctccattagtagtagtggatactactggggctggatccgccagcccccagggaaggggctggagtggatcgcgagtatcatttatagtgggagcacctactacaacccgtccctcaagagtcgagtcaccatattcgcagataggtccaagaaccagttctccctgaagctgagctctgtgaccgccgcagacacggctgtttattattgtgcgagacataggggatatagtggctacgatttgaactggttcgacccctggggccagggaaccctggccaccgtctcgtca

SEQ ID NO: 18083 - DNA, 298 bp, Homo sapiens
  source 1..298: mol_type = other DNA
ctctgtctctggtggctccatcagtccttactactggagctgggtccggcagcccccagggaagggactggagtgcattgggtatatccattacagtgggagcaccaattacaacccctccctcaagagtcgagtcagcatatcagtagacacgtccaagaagcagttgtccctgaagctgagctctgtgaccgccgcagacacggccgtgtattactgtgcgagacttagtgggagctcctattattattacggtatggacgtctggggccaggggaccacggtcatcgtctcctca

SEQ ID NO: 18084 - DNA, 298 bp, Homo sapiens
  source 1..298: mol_type = other DNA
cactgtctctggtgcctccctcagtccttactactggagctggattcggcagtccccagggaagggactggagtggattgggtatgtccattatagtgggagcaccaactacagcccctccctcaagagtcgagtcaccatatcactggacaagtccgagaaccagttctccctgaggctgaggtctgtgaccgccgcagacacggcctcttattattgtgcgagacttagtgggagttcctactactactacggtatggacgtctggggccaagggaccacggtcagcgtctcctca

SEQ ID NO: 18085 - DNA, 283 bp, Homo sapiens
  source 1..283: mol_type = other DNA
tgcagcctctggattcacctttagtggctacttgatgcactggttccgccaagctccagggaaggggctggtgtgcgtcgcaaagattagtagtgatggcagtgatacagtctacgcggactccgtgaggggccgattcaccatctccagagacaacgccaagaacacgctgtatctgcaaatgaacagtctgacaggcgaggacacggctgtgtatttttgtgtgagagataactggggagttcaccactggggccagggaacccttgtcaccgtctcctca

SEQ ID NO: 18086 - DNA, 283 bp, Homo sapiens
  source 1..283: mol_type = other DNA
tacagcctctggattcatcttcactgactacgcgatgcactgggtccgccaaggtccagagaagggcctgatgtggatctcgcgtattgatggtgatgcaattggcacactctacgcggactctgtgaagggccgattctccatctccagagacaacgccaagaatactctgtatctgcaaatgaacagtctgagagccgaggacacggctgtatattattgtgtaagagataattggggggttcaccactggggccagggaaccctggtcaccgtctcttca

SEQ ID NO: 18087 - DNA, 307 bp, Homo sapiens
  source 1..307: mol_type = other DNA
cactgcctctgatggctccatcagcagtaggaactactactggggctggatccgccagcccccagggaaggggctggagtggatggggagtatctttaatagtgggagcacctactacaatccgtccctcaagagtcgaatcaccatatccgtagacacgtccaagaaccagttctccctgaaattgaggtctgtgaccgccgcagacacggctgtgtattactgtgcgagacaattgtcggttcggggagtgaactacaactggttcgacccctggggccagggaaccctggtcaccgtctcctca

SEQ ID NO: 18088 - DNA, 307 bp, Homo sapiens
  source 1..307: mol_type = other DNA
cactgtctctgatggctccatcaccagtaatacttactactggggctggatccgccagcccccagggaaggggccggagtggattgggagtctcttttatagtgggagcacctactacaacccgtccctcaagagtcgagtcaccatgtccgtagacacgtccaagaaccacttctacctgaagctgacctctgtgaccgccgcagacacggctgtctattactgtgcgagacaactctcggttcggggagtcaactacaactggttcgacccctggggccagggaaccctggtcaccgtctcctca

SEQ ID NO: 18089 - DNA, 280 bp, Homo sapiens
  source 1..280: mol_type = other DNA
tgcagcctctggattcacctttagtggtttttggatgacctgggtccgccaggctccggggaaggggctggagtgggtggccaacataaagccagatggaaatgacaaatactatgtggactctgtgaagggccgattcgccatctccagagacaacgccaagaactcactgtatctgcaaatgaacagcctgagagtcgaggacacggctgtatattactgtgcgagaggtcggggagttgagtgctggggccagggaaccctggtcaccgtctcctca

SEQ ID NO: 18090 - DNA, 280 bp, Homo sapiens
  source 1..280: mol_type = other DNA
tgcagcctctggattcagctttagtaactcttggatgacctgggtccgccaggctccagggaaggggctggagtgggtggccaacataaaacaagatggaagtgagaagtactatgtggactctgtcaagggccgattcaccatctccagagacaacggcaagaactcactgtatctgcaaatgaacagcctgagagccgatgacacggctttgtattactgtgcgagaggccggggggtcgagtgctggggccagggaaccctggtcaccgtctcctca

SEQ ID NO: 18091 - DNA, 280 bp, Homo sapiens
  source 1..280: mol_type = other DNA
cactgtctctggtggctccctcactacttacttctggacctggatccggcagccccccgggaagggcctggagtggattgggtacatctactacagtgggaccaccaactacaacccctccctcaagagtcgagtcaccatgtcagtagacacctccaagaaccagttctccctgaagttgagctctgtgaccgctgcggacacggccgtgtattactgtgcgagaggggcacgataccttgactactggggccagggaaccctggtcaccgtctcctct

SEQ ID NO: 18092 - DNA, 280 bp, Homo sapiens
  source 1..280: mol_type = other DNA
cgctgtctctggtggctccatcagtagttactactggacctggatccggcagcccccagggaagggactggagtggattggatatatctattacagtggaagcaccaactacaacccctccctcaagagtcgagtcaccatatcagtagacacgtccaagaaccagttctccctgaggctgacctctgtgaccgccgcagacacggccgtctattactgtgcgagaggggcaaggtaccttgactactggggccagggaaccctggtcaccgtctcctca

SEQ ID NO: 18093 - DNA, 309 bp, Homo sapiens
  source 1..309: mol_type = other DNA
aagggttttggatacaggtttgccaattactggatcggctgggtgcgccagatgcccgggaaaggcctggagtggatggggatcatctatcctgctgactctgataccagatacagtccgtccttccaaggccaggtcaccatctcagccgacaagtccaccagtaccgcctacctgcagtggagcagcctgaaagcctcggacagcgccatctattactgtgcgagacagggatattactatggttcgggaagtgaatacaactggttcgacccctggggccagggaaccctggtcaccgtctcctca

SEQ ID NO: 18094 - DNA, 309 bp, Homo sapiens
  source 1..309: mol_type = other DNA
aagggttttggatacagttttaccaactactggatcggctgggtgcgccagatgcccgggaaaggcctggagtggatgggaatcatctatcctggtgactctgataccagatacagcccgtccttccaaggccaggtcaccatctcagccgacaagtccatcagcaccgcctacctgcactggagcagcctgaaggcctcggacaccgccatgtattattgtgcgagacaggggtattattatggttcggggagcgaatataactggttcgacccctggggccagggaaccctggtcaccgtctcctca

SEQ ID NO: 18095 - DNA, 288 bp, Homo sapiens
  source 1..288: mol_type = other DNA
gcttctggatacaccttcacttactatgctatccattgggtgcgccaggcccccgggcaaccgcttgagtggatgggatggttcaacgctggcaatggtaacacaagatcttcacagaagttccagggcagagtcacttttagcagcgacatatccgcgagcacatcctacatggagctgagcagcctgagatctgaagacacggctgtttattactgtgcgagagatgcttgtagcggtgcctgctacgactactggggccagggaaccctggtcaccgtctcctca

SEQ ID NO: 18096 - DNA, 288 bp, Homo sapiens
  source 1..288: mol_type = other DNA
gcttctggatacaccttcactaattatgctatacattgggtgcgccaggcccccggacaaaggcctgagtgcatgggatggatcaactctggcaacggtaacataaaatactcagtgaagttccagggcagagccacctttaccggggacatatccgcgagcacagcctacgtggaactgaccagcctgacatctgaagacacggctgtgtattactgtgcgagagacgcttgttcgggtgcctgctacgactactggggccagggaaccctggtcaccgtctcctca

SEQ ID NO: 18097 - DNA, 280 bp, Homo sapiens
  source 1..280: mol_type = other DNA
cgctgtctctggtatctccatcactgatttctactggagctggatccggctgcccccagggaagggactggagtggattgcgaatatccaccgcagtgggagcaccaactacaacccctccctcaagagtcgagtcaccatatcaatagacacgtccaagaaccagttctccatgaagctgaactctgtgaccgccgcggacacggccatctattattgtgcgagggggagtggtttcttctactactggggccagggaaccctcgtcaccgtctcctca

SEQ ID NO: 18098 - DNA, 280 bp, Homo sapiens
  source 1..280: mol_type = other DNA
cattgtctctggtggctccatcagtagttactactggagttggatccggcagaccccagggaagggactggagtggattgggtatatccattacagtgggagcaccaactacaacccctccctcaagagtcgagtcaccatatcagtagacacgtccaagaaccagttctccctgaagctgagctctgtgaccgccgcagacacggccgtgtattactgtgcgagaggtagtggttttttctattactggggccagggaaccctggtcaccgtctcctca

SEQ ID NO: 18099 - DNA, 283 bp, Homo sapiens
  source 1..283: mol_type = other DNA
tgcagcctctggattcacctttaccagttacgccatgagttgggtccgccaggctccagggaaggggctggagtgggtctcaagtatcaatgacagtggtgatagtatatactacgcagactccgtgaagggccggttcaccatctccagagacaattccaagaacacgctgtatctgcgaatgaacagcctgagagccgaggacacggccctatattactgtgcgaaagatcggattggcgatggctactggggccagggaaccctggtcaccgtctcctca

SEQ ID NO: 18100 - DNA, 283 bp, Homo sapiens
  source 1..283: mol_type = other DNA
tggagcctctggattcacctttagcagctatgccatgagctgggtccgccaggctccagggaaggggctggagtgggtctcttctattagtgatagtggtgttagcacatactacgcacactccgtgaagggccgattcgccgtctccagagacaattccaagaacacgttgtatctgcaaatggacagcctgagagccgaggacacggccgtatattactgtgcgaaagatcgcattggggatggctactggggccagggaaccctggtcaccgtctcctca

SEQ ID NO: 18101 - DNA, 292 bp, Homo sapiens
  source 1..292: mol_type = other DNA
tgcagcctctggattcgccttcagtaactggcacatgaactgggtccgccaggctccaggggaggggctggagtggctttcatacattactataggtagtaacgccatgtactacgcagactctgtgaagggccgattcaccatctccagggacgacgccaagaactcactctatttgcaaatgagtggcctgagagccgaggacacggctgtgtattactgtgcgagagatagcgggcatggatacagtgttgactactggggcccgggaaccctggtcaccgtctcctca

SEQ ID NO: 18102 - DNA, 292 bp, Homo sapiens
  source 1..292: mol_type = other DNA
tacatcctctggattcccctttggcagctatcacatgaactgggtccgccaggctccggggaaggggctggagtgggtttcatacattagtcatcagagtgttgccgtatacaccgcagactctgtgaagggccgattcaccgtctccagagacaacgccatggggtcactgtatctacaaatgaacagcctgagagccgaggacacggctgtctattactgtgcgagagatagcggccatggttactcggttgactactggggccagggaaccctggtcaccgtctcctca

SEQ ID NO: 18103 - DNA, 292 bp, Homo sapiens
  source 1..292: mol_type = other DNA
tacatcctctggattcccctttggcagctatcacatgaactgggtccgccaggctccggggaaggggctggagtgggtttcatatattagtcagcagagtgttgccgtatacaccgcggactctgtgaagggccgattcaccgtctccagagacgacgccatggggtcactgtatctacaaatgaacagcctgagagccgaggacacggctgtctattactgtgcgagagatagcggccatggttactcggttgactactggggccagggaaccctggtcaccgtctcctca

SEQ ID NO: 18104 - DNA, 301 bp, Homo sapiens
  source 1..301: mol_type = other DNA
tgcagcctctggattcacgtttagcagctacgccatgacttgggtccgccaggctccagggaaggggctggagtgggtctcagcaatcagtggtagtggtagtaacacatactacgcagactccgtgacgggccggttcacgatctccagagacaattccaagaacacgctgtatctgcaaatgaacagcctgagagccgaggacacggccgtatattcctgtgcgaaagattatagcagcagtcttcgttattacggtatggacgtctggggccacgggaccacggtcaccgtctcctca

SEQ ID NO: 18105 - DNA, 301 bp, Homo sapiens
  source 1..301: mol_type = other DNA
tgaagcctctggactcacctttagcagctatgccatggcctgggtccgccaggctccagggaaggggctggagtgggtctcagccatcagtggcagtggtgatagcacatattatgcagactccgtgaggggccggttcaccatctccagagacaattccaagaacacgctgtatctgcaaatgaacagcctgagagtcgacgacacggccatatataagtgtgcgaaagattatagcagcagcttgaggtactacgggatggacgtctggggccaggggaccacggtcaccgtctcgtca

SEQ ID NO: 18106 - DNA, 289 bp, Homo sapiens
  source 1..289: mol_type = other DNA
tgcggcctctgaattcacgtttgaagagcacgccatgcactgggtccgccaaactccagggaagggcctggagtgggtctcaggcattttgtgggatggtgccaggatagactatgcgaactcggtgaagggccgattcaccatctccacagacaacgccaagaagtccctgtatttgcaaatgaatagtctgagacctgaagatacggccttatacttttgtgtaaaggatataaatcccgggggtgcggacgtctggggccaagggaccacggtcaccgtctcctca

SEQ ID NO: 18107 - DNA, 289 bp, Homo sapiens
  source 1..289: mol_type = other DNA
tgcagtctctggcttaaccttccatgatcatgccatgcactgggtccggcaagctccagggaagggcctggagtgggtctcaggcattttttggaatagtggtaacacaggctattcggactctgtgaagggccgattcaccatttccagagacacggccaagaactccctgtatctgcaaatggacagtctgagaactgaggactcggccttatatttttgtgtaaaagatattaaccccggcggtgcggacgtctggggcccggggaccacggtcaccgtctcgtca

SEQ ID NO: 18108 - DNA, 295 bp, Homo sapiens
  source 1..295: mol_type = other DNA
tgcagcctctgaattcaccttccgtagttactggttctactgggtccgccaacccccagggaaggggctggtttgggtctcacgtattaatatggatgggagcaacacatattacgcggactccgtgaagggccgattcaccatctccagagacaacgccaagaacacactgtatctgcaaatgaacagtctgagagtcgaggacacggctatttattactgtgcaagagactttcctggggaacataatgcttttgatgtctggggccaagggacagtggtcaccgtctcttca

SEQ ID NO: 18109 - DNA, 295 bp, Homo sapiens
  source 1..295: mol_type = other DNA
tgcagcctctggattcaccttcagtcactactggatgcactgggtccgccaagctccagggaaggggctggtgtgggtctcacgtattggttttgatgggagtagcacaagctacgcggactccgtgaagggccgattcaccatctccagagacgacgccaagaacacgctgtatctgcaaatgaacagtctgagagccgaggacacggctgtctattactgtgcaagagattttccgggggaacataatgcttttgatgtctggggccaaggggcaatggtcaccgtctcttca

SEQ ID NO: 18110 - DNA, 286 bp, Homo sapiens
  source 1..286: mol_type = other DNA
tgcagcctctggattcaccttcagaacctactgggtgaactgggtccgccaagctccaggagaggggctggtgtgggtctcgcttatcaatggtgatgggagtaccacaacctacgcggactccgtgaaggggcgattcaccatctccagagacaacgccaagaacacggtgtatttgcaaatgaacagtctgagagccgacgacacggctgtttactactgtgcacgagactacgctggttcgcccgactattggggccagggaaccctggtcaccgtctcctca

SEQ ID NO: 18111 - DNA, 286 bp, Homo sapiens
  source 1..286: mol_type = other DNA
tgaagcctctggattccccctcagtaattactggatgaactgggtccgccaagctccagggaaggggctggtgtgggtctcacttataaatggtgatgggagaaccacagtctacgcggaccccgtgaagggccgattcaccgtctccagagacaacgccaagaacacggtgtatctgcaaatgaacagtctgagagccgacgatacggctgtttattactgtgcaagagattacgctggttctcctgactactggggccagggaaccctggtcaccgtctcctca

SEQ ID NO: 18112 - DNA, 312 bp, Homo sapiens
  source 1..312: mol_type = other DNA
acacagaccctcacgctgacctgcaccttctctgggttctcactcagcactagtggagtgggtgtgggctggatccgtcagcccccaggaaaggccctggagtggcttgcactcatttattgggatgatgataaacgttacagtccatctctgaggagcaggctcaccatcactaaggacacctccaaaaaccaggtggtccttacaatgaccaacatggaccctgtggacacagccacatattactgtgcacacagacgagggggagtatttgactactggggccagggaaccctggtcatcgtctcctca

SEQ ID NO: 18113 - DNA, 312 bp, Homo sapiens
  source 1..312: mol_type = other DNA
acacagaccctcacgctgacctgcaccttctctgggttctcactcagcactagtggagtgggtgtgggctggatccgtcagcccccaggaaaggccctggagtggcttgcactcatttattgggatgatgataagcgctacagcccatctctgaagaacaggctcaccatcaccaaggacacctccaaagaccaggtggtccttacaatgaccaacatggaccctgtggacacagccacatattactgtgcacacagacggggcggggtgtttgactactggggccagggaaccctggtcaccgtctcctca

SEQ ID NO: 18114 - DNA, 283 bp, Homo sapiens
  source 1..283: mol_type = other DNA
tgcagcctctgggttcaccgtcagtagtaactacatgaactgggtccgccaggctccagggaaggggctggagtgggtctcagttatttatagcggtggtagtacatattacgcagactccgtgaagggccgattcaccatctccagacacaattccaagaacacgttgtatcttcaaatgaacagcctgagaggtgaggacacggccgtgtattactgtgcgagagaagagagggacggtatggacgtctggggccaagggaccacggtcaccgtctcctca

SEQ ID NO: 18115 - DNA, 283 bp, Homo sapiens
  source 1..283: mol_type = other DNA
tgcagcctctgagttcaccgtcagtagcaacaacatgaactgggtccgccaggctccagggaaggggctggagtgggtctcagttatttatagcggtggtggcacatactacgcagactccgtgaagggccgattcaccatctccagagacaattccaggaacacgctccttcttcaaatgaacagcctgagaggcgaggacacggccgtgtattactgtgcgagagaagaacgggacggtatggacgtctggggccaagggaccacggtcaccgtctcctca

SEQ ID NO: 18116 - DNA, 304 bp, Homo sapiens
  source 1..304: mol_type = other DNA
tgaagcctctggattcacctttgatgattgtgccatgcactgggtccggcaagctccagggaagggcctggagtgggtctcaggtattaattggaatagtgggaccgtgggctatgcggactctgtgaagggccgattcaccatctccagagacaacgccaagaattccctgtatctgcaaatgaaccgtctgacaactgaggacacggccttgtattattgtgtgaaagatcggagttcgactttatattactactacggtatggacgtctggggccaagggaccacggtcaccgtctcctca

SEQ ID NO: 18117 - DNA, 304 bp, Homo sapiens
  source 1..304: mol_type = other DNA
tgcagcctctggactcacctttgaagattatgccatgcactgggtccggcaaactccagggaggggcctggagtgggtctccggtattagttggaacagcgatagtgtcggctatgcggactctgtgaggggccgatttttcatctccagagacaacgccaagaactccctgtatctgcaaatgaatggtctgagacctgaggacacggccgtctattactgtgtcaaagataggagttccactctgtattattattacggtatggacgtctggggccaagggaccacggtcaccgtctcctca

SEQ ID NO: 18118 - DNA, 295 bp, Homo sapiens
  source 1..295: mol_type = other DNA
cactgtctctggtggctccatcagctctagtgattactactggggctggatccgccagcccccagggaaggggctggagtggattgggagtatctattatactgggagcacctactacaacccgtcccgcaagagtcgaattatcatatccgcagacacgtcgaagaaccagttctccctgaaactgagctctgtcaccgccgcagacacggctgtgtattactgtgcgagacgagggtgggagtttgcatattttgactactggggccagggaaccctggtcaccgtctcctca

SEQ ID NO: 18119 - DNA, 295 bp, Homo sapiens
  source 1..295: mol_type = other DNA
cactgtctctggtggctccgtcagcagtagtagttactactggggctggatccgccagcccccagggaaggggctggaatggattgggagtttctattatactgggagtacctactacaacccgtccctcaagagtcgagtcaccatatcggcagacacgtccaagaaccagttctccctgaagctgagttctgtgaccgcctcagacacggctgtgtattactgtgcgagacgggggtgggagttcgcctactttgactactggggccagggaacccgggtcaccgtctcctca

SEQ ID NO: 18120 - DNA, 286 bp, Homo sapiens
  source 1..286: mol_type = other DNA
tgcagcctctggattcacctttagtaattatgtcatgagttgggtccgccaggctccagggaagggtctgcagtgggtctcagccattactagtggtggtgatgggacagactacgcggactccgtgaagggccggttcaccatctccagagacaattccaagaacacgttgtatctgcaaatgaacttcctgagagccgacgacacggccctatattactgcgcgaggaggacgtccggctacaaagactactggggccggggaaccctggtcaccgtctcctca

SEQ ID NO: 18121 - DNA, 286 bp, Homo sapiens
  source 1..286: mol_type = other DNA
tgcagcctcgggattcacctttagcaagtatgtcatgagttgggtccgccaggctccagggagggggctcgagtgggtctcagctatttctagtggtggcgatagcacagactacgcagcctccgtgaagggccggttcaccatctccagagacaattccaaggacacactgtatctgcagatgaatagcctgagagccgaggacacggccatatattactgtgcgaggagaacttccggctataaggactactggggccagggaaccctggtctccgtctcctca

SEQ ID NO: 18122 - DNA, 310 bp, Homo sapiens
  source 1..310: mol_type = other DNA
tgcagtctctggattcaccttcaatagctatagcatgaactgggtccgccaggctccagggaaggggctggagtgggtctcatccattagtagtagtagtacttacatatactacgcagactcagtgaagggccgaatcaccatctccagagacaacgccaagaactcactgtatctgcaaatgaacagcctgagagtcgaggacacggctttgtattactgtgcgagagatagatatagtggctacgattccaactactactacggtatggacgtctggggccaagggaccacggtcaccgtctcctca

SEQ ID NO: 18123 - DNA, 310 bp, Homo sapiens
  source 1..310: mol_type = other DNA
tgcagcctctggattcaccttcagtagttatagtatgaactgggtccgccaggctccagggaaggggctggagtgggtctcatccattagtagtagtagtacttacatatactacgcagactcagtgaagggccggttcaccatctccagagacaacgccaagaactcgctgtatctgcaaatgaacagcctcagagccgaggacacggctttttattactgtgcgagagaccgttatagtggctacgacagcaactactactacggtatggacgtctggggccaagggaccacggtcaccgtctcctca

SEQ ID NO: 18124 - DNA, 318 bp, Homo sapiens
  source 1..318: mol_type = other DNA
acacagaccctcacgctgacctgcaccttctctgagttctcactcaccactagtggagtgggtgtgggctggttccgtcagcccccaggaaaggccctggagtggcttgcactcatttattgggataatgataagcgctacagcccatctctgaagagcagtctcaccatcaccaaggacacctccaaaaaccaagtggtccttacaatgaccaacctggaccccgtggacacagccacatatttttgtgcacacaagggggatcgcggtgacccctttgactactggggccagggaaccctggtcaccgtctcctca

SEQ ID NO: 18125 - DNA, 318 bp, Homo sapiens
  source 1..318: mol_type = other DNA
acacagactctctcgttgacctgccccttctctggattctcactcagaactagtgcggagggtgtgggctggttccgtcagcccccaggaaaggccctggagtggcttgcactcatttattgggatgatgataagcgttacaacccatctctgaagagcagactcaccatcaccaaggacacctccaacagccaggtggtccttacaatgaccaacgtggaccctgtggacacagccacatattactgtgcacacaagggagatcggggggacccctttgactactggggccagggaaccctggtcaccgtctcctca

SEQ ID NO: 18126 - DNA, 298 bp, Homo sapiens
  source 1..298: mol_type = other DNA
tgcagcctctggattcacgttcagtgaccacttcatggactggttccgccaggctccagggaaggggctggagtgggttggccgtattacaaacaaagcagacggttacaccacacaatacgccgcgtctgtgaaaggcagattcaccgtctccagagatgattcaaagaactcagtgagtctgcaaatgaacagcctgaaactcgaggacacggccgtgtattattgtggtagagatgggatgcgtggtggtgactttgactattggggccagggaatcatggtcaccgtctcctca

SEQ ID NO: 18127 - DNA, 298 bp, Homo sapiens
  source 1..298: mol_type = other DNA
tgtagcctctggatttatgttcagtgaccacaacatggactggttccgccgggccccagggaaggggctggagtgggttggccgcgcgagattcaaagttgacaattacagaacagaatatgccgcctctgtagaaggcagattcattatctcaagagatgatgcaaagaactcactgtatttgcagatggacagtctaagaaccgaggacacggccgtgtattactgtgggagagacggtatgcgagggggcgactttgactactggggccagggaaccctggtcaccgtctcctca

SEQ ID NO: 18128 - DNA, 286 bp, Homo sapiens
  source 1..286: mol_type = other DNA
tgcagcctctggattcacctttactgattatggcatgcactgggtccgtcaaactccagggcagggtctggagtgggtctctcttattagtagggatggtagagccacgtactatgcagactctgtgaagggccgattcaccatctccagagacaacaccaaaaactccctgtatctgcaaatgaacagtctgagaactgaggacaccgccttgtattactgtgcaaaagatatcagacgtccctttgactactggggcctgggaaccctggtcaccgtctcctca

SEQ ID NO: 18129 - DNA, 286 bp, Homo sapiens
  source 1..286: mol_type = other DNA
tgcagcctctaagttcacctttgatgattatgccatgcactgggtccgtcaagctccagggaagggtctagaatgggtctcttttattagtggagatggtactaccagatactatactgactctgtgaaaggccgattcaccatctccagagacaacagcaaaaacttcctgtatctgcacatgaacagtctgagatctgaggacaccgccttctattattgtgcaaaagatatccgaaggccctttgactactggggccagggaaccctggtcaccgtctcctca

SEQ ID NO: 18130 - DNA, 286 bp, Homo sapiens
  source 1..286: mol_type = other DNA
tgcagcgtctggattgaacttcgatgtctactacatgaactggatgcggcaggttccagggaagggactagaatttatttcattcattagtgatagtggtcattctataaactatgccgactctgtgaagggccgattcaccatctccagggacaacgccaagaattcactgtttctgcagatgagcagcctgagagtcgaggacacggccgtgtattattgtgggtcactgaactggaactccatcgactactggggccagggaaccctggtcaccgtctcctca

SEQ ID NO: 18131 - DNA, 286 bp, Homo sapiens
  source 1..286: mol_type = other DNA
tgcagcctctggactcactttcaacaccgcctggatgagttgggtccgccaggttccagggaaggggctggaatatctttcacacattggtgaaagtagtactcacacagactacgcagactctgtgaagggccgattcaccatctccagagacagcgccaagaaatcactgtatttgcaaatgaacaacctgagagccgaggacacggccatatattattgtgggagcctcaactggaattccattgactactggggccggggaaccccggtcaccgtctcctca

SEQ ID NO: 18132 - DNA, 302 bp, Homo sapiens
  source 1..302: mol_type = other DNA
ccatctccggggacagtgtctctagcaacagtgctgcttggaactggatcaggcagtccccatcgagaggccttgagtggctgggaaggacatactacaggtccaagtggtataatcattatgcagtatctgtgaaaagtcgaatagccatcaacgcagacacatccaagaaccagttctccctgcagctgaactctgtgactcccgaggacacggctgtgtattactgtgcaagagatccagcagattactactacggtatggacgtctggggccaagggaccacggtcaccgtctcctca

SEQ ID NO: 18133 - DNA, 302 bp, Homo sapiens
  source 1..302: mol_type = other DNA
ccatctccggggacagtgtctctagcaacagtgctgcttggaactggatcaggcagtccccatcgagaggccttgagtggctgggaaggacatactacaggtccaagtggtataatgattatgcagtatctgtgaaaagtcgaataaccatcaattcagacacatccaagaaccagttctccctgcagctgaactctgtgactcccgaggacacggctgtgtattactgtgcaagagatcccgccgactactactacggtatggacgtctggggccaagggaccacggtcaccgtctcctca

SEQ ID NO: 18134 - DNA, 307 bp, Homo sapiens
  source 1..307: mol_type = other DNA
tgtagtctctggattcacctttagtacctattggatgacctgggtccgccaggctccagggaaggggctggagtgggtggccaacataaaacaagatggaagtgaggtattctatgtggactctgtgaagggccgattcaccatctccagagacaacgccaagaattcactgtatctgcaaatgaacagcctgagagtcgaggacacggctgtgtattactgtgcgagagatccaggaatagcatcagctggtactgttggttactttgactcctggggccagggaaccctggtcaccgtctcctca

SEQ ID NO: 18135 - DNA, 307 bp, Homo sapiens
  source 1..307: mol_type = other DNA
tgcagcctctggattcagcttcacttcctattggatgagctgggtccgccaggctccagggaaggggctggagtgggtggccagcataaaggaagatggaagggagacacactatgtggactctgtgaagggccgattcaccgtctccagagacaacgccaagaactcgctgtatctgcaaatgagtagcctgagagtcgaggacacggctgtgtatttctgcgcgagagatccgggtatagcatcagctggaacggtgggatactttgactcctggggccagggaaccctggtcaccgtctcctca

SEQ ID NO: 18136 - DNA, 286 bp, Homo sapiens
  source 1..286: mol_type = other DNA
tgcagactctggattcaccttcagtagtgaaaacatgaactgggtccgccaggccccagggaaggggctggagtggatttcatacattagtagtagtagccacacaaattacgcagactctctgaagggccgattcaccatctccagagacaacgccaagaggtcactgtatctgcaaatcaacagcctgagagccgaggacacggctgtgtattactgtgcgagaggtcaaggcagcagttggtttgcctactggggccagggaaccctggtcaccgtctcctca

SEQ ID NO: 18137 - DNA, 289 bp, Homo sapiens
  source 1..289: mol_type = other DNA
tgcagcctccggattcaccttcagtagcgaaaacatgaattgggtccgccaggctccagggaaggggctggagtgggtttcatacattagtagtagtggtagtgtcataaagtacgcagattctgtggagggccgattcaccatctccagagacaatgccaagaactcactgtatttgcaaatgaacagcctgagagacgaagacacggctgtctattactgtgcgagaggacagggcagcagctggtttgcctactggggccagggaaccctggtcaccgtctcctca

SEQ ID NO: 18138 - DNA, 297 bp, Homo sapiens
  source 1..297: mol_type = other DNA
gcttctggatacaccttcactagctatgctatgcattgggtgcgccaggcccccggacaaaggcttgagtggatgggatggatcaacgctggcaatggtgacacaaaatattcacagaagttccagggcagagtcaccattaccagggacacatccgcgagcacagcctacatggagctgagcagcctgagatctgaagacacggctgtctattactgtgcgagagggctactatggttcggggagttatcaacgttggggtattggggccagggaaccctggtcaccgtctcctca

SEQ ID NO: 18139 - DNA, 297 bp, Homo sapiens
  source 1..297: mol_type = other DNA
gcttctggatacaccttcactaactatgctatgcattgggtgcgccaggccccccgacaaaggcttgagtggatgggatggatcaacgctggcaatggtaatacaaaatattcacagaagttccagggcagagtcaccattaccagggacacatccgcgaacacagcctacatggagctgagcagcctgagatctgaagacacggctgtgtattactgtgcccgaggattactatggttcggggagttatcgactcttggctactggggccagggaaccctggtcaccgtctcctca

SEQ ID NO: 18140 - DNA, 292 bp, Homo sapiens
  source 1..292: mol_type = other DNA
tgccgcctctggattccccttcagtagatacagcatgacctgggtccgccaggctccagggaagggactgcagtgggtctcatacatcagtggagatagttctattgtttattatgcagactctgtgaagggccgattcaccatctccagagacaacgccgacaattcactgtatctccaaatggacaccctgagagccgaggacacggctgtatattactgtgcgagagactcaggaagtgtcggagccgacgactattggggccagggaaccctggtcaccgtctcctca

SEQ ID NO: 18141 - DNA, 292 bp, Homo sapiens
  source 1..292: mol_type = other DNA
tgtagtctctggattcaccttcagtacctacagcatgacctgggtccgccaggctccagggaaggggctggagtgggtttcatacattcattatagtagtaatatcatttactacgcggactctgtgaagggccgattcaccatctccagagacaacgccaagaactcattgtatctgcaaatgaacagcctgaaagccgacgacacggctgtttatttctgtgcgagagactcgggttctgtaggcgctgatgactattggggtcagggaaccctggtcaccgtctcttca

SEQ ID NO: 18142 - DNA, 292 bp, Homo sapiens
  source 1..292: mol_type = other DNA
tgtagcctctggattcaccttcagtacctacagcatgacctgggtccgccaggctccagggaaggggctggagtgggtttcatacattcattatagtagtaatatcatttactacgcagactctgtgaagggccgattcaccatctccagagacaacgccaagaactcattgtatctgcaaatgaacagcctgaaagccgacgacacggctgtttatttctgtgcgagagactcgggttctgtaggcgctgatgactattggggtcagggaaccctggtcaccgtctcttca

SEQ ID NO: 18143 - DNA, 285 bp, Homo sapiens
  source 1..285: mol_type = other DNA
gcttctggttacagctttaccagccatggtatcagctgggtgcgacaggcccctggacaagggcttgagtggatgggatggatcagcgtttacaatggtaacacaaactatgcacagaagctccagggcagagtcaccatgaccacagacacatccacgagtacagcctacatggagctgaggagcctgagatctgacgacacggccgtgtattactgtgcgagagatcgggggggagctactctggactactggggccagggaaccctggtcaccgtctcctca

SEQ ID NO: 18144 - DNA, 285 bp, Homo sapiens
  source 1..285: mol_type = other DNA
gcttctggttacacctttaccagctatggtatcagctgggtgcgacaggcccctggacaagggcttgagtggatgggatggatcagcgcttacaatggtaacacaaactatgcacagacgctccagggcagagtcaccatgaccacagacacatccacgagcacagcctacatggacctgaggagcctgagatctgacgacacggccgtgtattactgtgcgagagatcgggggggagctacccttgactactggggccagggaaccctggtcaccgtctcctca

SEQ ID NO: 18145 - DNA, 304 bp, Homo sapiens
  source 1..304: mol_type = other DNA
tggagcctctggattcatcttcagcgacgcctggatgggctgggtccgccaggctccagggaaggggccggagtgggttggccgcattaaaagtatacctgatggtgggacaacggactacgctgcgcccgtgaaaggcagattctccatttcaagagatgtttcgaaaaacacggtttatctccagatgaacagcctgaaaaccgaggacacagccatatactactgtaccaccgaccgtggcataacaagtcgccccctctttgacttctggggccggggaatcctggtcaccgtctccgca

SEQ ID NO: 18146 - DNA, 304 bp, Homo sapiens
  source 1..304: mol_type = other DNA
tgcagcctctggattcactttcagtgatgcctggttgagctgggtccgccaggctccagggaaggggctggactgggttggccgtattaaaagcaataccgctggtgggacaacggactacggcgcacccgtgaaaggcaggttcaccatctcaagagatgactctagaaacacggtgtatctgcaaatgaacagcctgagaagcgaggacgcgggcgtttatttctgtaccacagatcggggtataacatctcgtcccctttttgacttttggggcctgggaaccctagtcaccgtctcctca

SEQ ID NO: 18147 - DNA, 298 bp, Homo sapiens
  source 1..298: mol_type = other DNA
tgcagcctctggattcactttcagtaacgcctggatgaactgggtccgccaggctccagggaagggactggagtgggttgcccgtattaaaagtaaaatcgatggtgggacaacagactacattgcacccgtgaaaggcagattcaccatctcaagagatgattcaaaaaacacgctgtatctacaaatgaacagcctgaaaaccgaggacacagccgtgtattactgtaccacagatatatatgaccgcggggactttgactactggggccagggaaccctggtcaccgtctcctca

SEQ ID NO: 18148 - DNA, 298 bp, Homo sapiens
  source 1..298: mol_type = other DNA
tccagcctctggattcactttcagaaacgcctggatgagctgggtccgccaggctccagggaaggggctggagtgggttggccgtattaaaagtaaaactgatggtgggacaacagactacgctgcacccgtgaaaggcagattcagcatctcaagagatgattcaaaaaacacactctacctgcaaatgaacagcctgaaaaccgaggacacagccgtctattactgtaccacagatatctatgataggggggactttgactactggggccagggaaccctggtcaccgtctcctca

SEQ ID NO: 18149 - DNA, 289 bp, Homo sapiens
  source 1..289: mol_type = other DNA
tgcagcctctggattcaccctcaggagttactggatgaactgggtccgccaaggtccagcgaaggggctggtgtgggtctcacgtattaatggtgatgggagtttcatagactacgcggactccgtgaagggccgattcaccatttccagagacagcgccaagaacacgttgtatctgcaaatgaacagtctgagagccgaggacacggctgtgtattactgtgcaagaggcacctggaaggacggtctggacgtctggggccaagggaccacggtcaccgtctcctca

SEQ ID NO: 18150 - DNA, 289 bp, Homo sapiens
  source 1..289: mol_type = other DNA
tgcagcctctggattcaccttaagtgtcaagtggatgaactgggtccgccaagctccaggtaaggggctggtgtgggtctcacgcagtaatggtgatgagagttttaaagactacgcggactccgtgaagggccgattcaccatctccagagacaacgccaagaacacggtgtatctgcaaatgaacagtctaagaggcgaggacacggccgtgtattactgtgcaagggggacttggaaagacggtttggacgtctggggccaggggaccacggtcaccgtctcctca

SEQ ID NO: 18151 - DNA, 289 bp, Homo sapiens
  source 1..289: mol_type = other DNA
tgcagcctctggaatcaccttcagtaggtcctggatgaactgggtccgccaaactccaggaaaggggctggtgtggatctcacgtatgaatggtgatggaagttacatagactacgcggactccgtgaagggccgattcaccatctccagagacaacgccaagaacacgctgtatgtgcagatgaacagtctgagagccgaggacacggctgtgtattactgtgcaagaggcacctggaaggacggtttggacgtctggggccaagggaccacggtcaccgtctcctca

SEQ ID NO: 18152 - DNA, 280 bp, Homo sapiens
  source 1..280: mol_type = other DNA
tgcagcctctggattcacctttagcagctctgccatgagctgggtccgccaggctccagggaaggggctggagtgggtctcaactattggtggtagtggtgctagtacatactacgcagactccgtgaagggccggttcaccatctccagagacaattccaagaacacgctgtatctgcaaatgaacagcctgacagccgaggacacggccatatattactgtgcgaaagagcccctctttgactactggggccagggaaccctggtcaccgtctcctca

SEQ ID NO: 18153 - DNA, 280 bp, Homo sapiens
  source 1..280: mol_type = other DNA
tgcagcctctggattcacctttagcagcaatgccatgagctgggtccgccaggctccagggaaggggctggagtgggtctcaattatttatagcgatggtagtaacacatactatgcagactccgtgaagggccggttcaccatctccagagatacttccaggaacacgctgtatctgcaaatgaacagcctgagagccgaggacacggccgtatattactgtgcgaaagaacccctctttgactactggggccagggaaccctggtcaccgtctcctca

SEQ ID NO: 18154 - DNA, 282 bp, Homo sapiens
  source 1..282: mol_type = other DNA
aagggttctggatacagctttaccacctactggatcgcctgggtgcgccagatgcccgggaaaggcctggagtggatggggatcatttatcctggtgactctgatactagatacagcccgtccttccaaggccaggtcaccatctcagccgacaagtccatcagcaccgcctacctgcaatggaacagcctgaaggcctcggacaccgccatgtattactgtgcgagacggtctagtggctacgatgactggggccagggaaccctggtcaccgtctcctca

SEQ ID NO: 18155 - DNA, 282 bp, Homo sapiens
  source 1..282: mol_type = other DNA
aagggttctggatacagctttaccagctattggatcggctgggtgcgccagatgcccgggaaaggcctggagtggatggggatcatctatcctggtgactctgatactcgatacagcccgtccttccaaggccaggtcaccatctcagccgacaagtccctcagcaccgcctacttgcagtggagcagcctgaaggcctcggacaccgccatgtattactgtgcgagacggagttcggggtatgacgactggggccagggaaccctggtcaccgtctcctca

SEQ ID NO: 18156 - DNA, 280 bp, Homo sapiens
  source 1..280: mol_type = other DNA
tgtagcctctggattcagctttagtacctatgagatgacctgggcccgccaggctccagggaagggactggagtggatctcatcttttcgtggtgaccgtactgacacatactacgcagactccgtaaagggccggttcaccatctccagagacaactccaagaacacggtgtatttgcagatgaatagcctgagagtcgaagacacggccatatattattgtgtgaaaggggggtggtgtgactcttggggccagggaaccctggtcaccgtctccgca

SEQ ID NO: 18157 - DNA, 280 bp, Homo sapiens
  source 1..280: mol_type = other DNA
tgcagcctctggattcacctttagcaactatggcatgggctgggtccgccaggctccagggaaggggctggagtgggtctcaattctttatagcggaagtactagcacatactatacagactccgtgaagggccggttcaccatctccagagataattccaagaacacggtgtatctacaaatgaacagcctgagagtcgaggacacggccgtatattactgtgtgaagggggggtggtgtgactcctggggccagggaaccctggtcaccgtctcccca

SEQ ID NO: 18158 - DNA, 285 bp, Homo sapiens
  source 1..285: mol_type = other DNA
gcatctggagacaccttcaccggctactatttccactgggtgcgacgggcacctggacaagggcttgagtgggtgggactgatcaacccaagttatattactgcaaccaacacacagaagttgccgggcagagtcaccgtgaccagggacacgtccacgaccacagtctacttggagatgagcagcctgagatctgacgacacggccgtgtattattgtgtgagagagttgagagggggcttctttgattactggggccagggaaccctggtcaccgtctcctca

SEQ ID NO: 18159 - DNA, 285 bp, Homo sapiens
  source 1..285: mol_type = other DNA
gcatctggatacagtttcgtcacttacctcatgcactgggtgcggcaggcccctggacaaggccttgagtggctgggaatagtcaaccctaatggtggtgacacaaactacgcacagaagttccagggcagagtcaccttgaccagggacacgtccacgagcacagtctacatggacctgagcagcctgagatctgacgacacggccgtatattactgtgtgagggaattaagagggggcttctttgactattggggccagggaaccctggtcaccgtctcctca

SEQ ID NO: 18160 - DNA, 286 bp, Homo sapiens
  source 1..286: mol_type = other DNA
tgcagcctctggattcaccttcagtaactactggatacactgggtccgccaagctccagggaaggggctggtgtgggtctcacgtattaatagtgatgggagtagcacaagctacgcggagtccgtgaaggcccgattcaccatctccagagacaacgccaagaaaacggtatatctgcaaatgaacagtctgagagtcgaggacacggctgtgtattactgtgcaaggggggttagaggcggtatggacgtctggggccaagggaccacggtcaccgtctcctca

SEQ ID NO: 18161 - DNA, 286 bp, Homo sapiens
  source 1..286: mol_type = other DNA
tgcagcctctggattcaccttcagtagtaactggatgtactgggtccgccaagctccagggaaggggctggtgtgggtctcacatattgatagtgatgggagtaccacaagcttcgcggactccgtgaagggccgattcaccatctccagagacaacgccaagaacacgctgtatctgcaaatgaacagtctgagagccgaggacacggctgtgtattattgtgcaagaggggtgcggggtggtatggacgtctggggccaagggaccacggtcaccgtctcctca

SEQ ID NO: 18162 - DNA, 294 bp, Homo sapiens
  source 1..294: mol_type = other DNA
gcttccggatacaccttcaccacttatgatatcaactgggtgcgacaggccactggacaagggcttgagtggatgggaaggatgaaccctaacagtggtgacacaggctatgcacagaacttccggggcagactcaccatgaccaggtacacctctataagcacagcctacatggagctgagcagcctgacatctgaagacacggccgtgtattactgtgcgagaggggccatatggttcggggcctacggtatggacgtctggggccaagggaccacggtcatcgtctcctca

SEQ ID NO: 18163 - DNA, 294 bp, Homo sapiens
  source 1..294: mol_type = other DNA
gcttctggatacagtttcaccacttatgatgtcaactgggtgcggcaggccgctggacaagggcttgagtggatgggatggatgaaccctaacactggtggcacggtctatacacagaagttccggggcagagtcaccatgaccagggacaccaccacaggcacagcctatatggagctgtacagcctgacatctgaggacacggccgtctattactgtgcgagaggcgctatatggttcggggcctacggtatggacgtctggggccatgggaccgcggtcactgtctcctca

SEQ ID NO: 18164 - DNA, 286 bp, Homo sapiens
  source 1..286: mol_type = other DNA
tgcagcgtctggattcaccttcagtagctacggcatacactgggtccgccaggctccaggcaaggggctggagtgggtggcacttatatggtttgatggaagtaatagatactatgcagactccgtgaagggccgattcaccatctccagagacaattccaagaacacgctgtatctgcaaatgaacagcctgagagtcgaggacacggctgtgtattactgtgcgagagagaaactggtggaccttgactactggggccagggaaccctggtcaccgtctcctca

SEQ ID NO: 18165 - DNA, 286 bp, Homo sapiens
  source 1..286: mol_type = other DNA
tgcagcgtctggattcaccttcagtaactatggcatgcactgggtccgccaggctccaggcaaggggctggagtgggtggcacttatatggtatgatggaagtaataaatattatgcagactccgtgaagggccgattcaccatctccagagacaattccaagaacacgctgtatctgcaaatgaagagcctgagagccgaggacacggctgtgtattactgtgcgagagagaagctggtggaccttgactattggggccagggatccctggtctccgtctcctca

SEQ ID NO: 18166 - DNA, 286 bp, Homo sapiens
  source 1..286: mol_type = other DNA
tgcagcctctggattcagctttagtggctattggatgggctgggtccgccaggctccagggaaggggctggagtgggtggccaacataaagcaagatggaagtgacaaatactatgtggactctgtgaagggccgattcaccatctccagagacaacgccaagaactcactgtatctccaaatgaacagcctgagagccgaggacacggctctgtattactgtgcgagacacggttactactactttgactattggggccagggaaccctggtcaccgtctcctct

SEQ ID NO: 18167 - DNA, 286 bp, Homo sapiens
  source 1..286: mol_type = other DNA
tgcagtctctggattcacttttagtacttattggatgggctgggtccgccaggctccagggaaggggctggagtgggtggccaacataaaccaagatggaggtgtgaaatattatgtggactctgtgaagggccgattcaccatctccagagacaacgccgagaactcactatatctacaaatggacagcctgagagccgaggacacggccgtatattattgtgcgagacacgggtactactactttgactattggggccagggaaccccggtcaccgtctcctca

SEQ ID NO: 18168 - DNA, 280 bp, Homo sapiens
  source 1..280: mol_type = other DNA
tgcagcctctggattcacctttagtcggtattggatgagttgggtccgccaggctccaggggaggggctggagtgggtggcccacataaacgaagatggaagggagaaggaccatgtggactctgtgaagggccgattcaccatctccagagacaacgccaagaactcactgtatttgcaaatgaacagcctgacagccgaggacacggctgtgtattactgtgcgagaaaggggggagctggttcctggggccagggaaccctggtcaccgtctcctca

SEQ ID NO: 18169 - DNA, 280 bp, Homo sapiens
  source 1..280: mol_type = other DNA
tgcagcctctggattcacctttagtaggtattggatgagttgggtccgccaggctccagggagggggctggagtgggtggccaacataaacgaagatggaagtgagaaataccatgtggactctgtgaggggccgattcaccatctccagagacaacgccaagaactcactgtatctgcaaatgaacagcctgagagccgaggacacggctgtgtatcactgtgcgagaaagggaggggctggctcctggggccagggaaccctggtcatcgtctcctca

SEQ ID NO: 18170 - DNA, 280 bp, Homo sapiens
  source 1..280: mol_type = other DNA
tgcagcctctggattcaccttcagtaactacggtctgaactgggtccgccaggctccagggaaggggctggagtggctttcattcattagtggaagtggtagtaccatatactacgcagactctgtgaagggccgattcaccatctccagagacaatgtcaagaactcactgtatctgcaaatgaacagcctgagagacgaggacacggctgtgtattactgtgcgagagctttgggagcggactactggggccagggaaccctggtcaccgtctcctca

SEQ ID NO: 18171 - DNA, 280 bp, Homo sapiens
  source 1..280: mol_type = other DNA
tgcagcctctggattcaccttcagtagctatagcatgaactgggtccgccaggctccagggaaggggctggagtggctgtcatacattagtactagtggtactaccatgttctacgcagactctgtgaagggccgattcaccatttccagagacaatgccaagaactcactgtatctgcaaatgaacagcctgagagacgaggacacggctgtgtattactgtgcgagagcgctgggggctgactactggggccagggaaccctggtcaccgtctcctca

SEQ ID NO: 18172 - DNA, 292 bp, Homo sapiens
  source 1..292: mol_type = other DNA
tgcagcctctagattctccttcagcacctatgctatgcactgggtccgccaggttccaggcaaggggctggagtgggtggctcttatatcatttaatggaaaaaacaaatactatagagactccgtgaagggccgattcaccatctccagagacaattccaacaacacactatatctccaaatgaacagcctgagagttgaagacaccggtttatattattgtatgagaggtcactatgacagtagtgcccccgactactggggcccgggaaccctggtcaccgtctcctca

SEQ ID NO: 18173 - DNA, 292 bp, Homo sapiens
  source 1..292: mol_type = other DNA
tgcagcgtctagattcgccttcagtacctatgctatgcactgggtccgccaggttccaggcaaggggctggagtggctggcacttatatcatttaatgggaggaatcaattctacacagactccgtgaagggccgattcaccatctccagagacaattcccagaacacactgtatctgaaactgaatagcctgagacctgaagacacaggtctatattactgtatgagaggtcactacgattcgtccgcccctgactactggggccagggaaccctggtcatcgtctcctca

SEQ ID NO: 18174 - DNA, 283 bp, Homo sapiens
  source 1..283: mol_type = other DNA
tgcagcctctggattcaccttcagtgactactacatgaactggatccgccaggctccagggaaggggctggagtgggtttcatacattagtagtagtggtagtgtcatatactacgcagactctgtgaagggccgattcaccatctccagggacaacgccaagaactcactgtatctgcaaatgaacagcctgagagccgaggacacggccgtctattactgtgcgagggctgctggttggatcgacccctggggccagggaaccctggtcaccgtctcctca

SEQ ID NO: 18175 - DNA, 283 bp, Homo sapiens
  source 1..283: mol_type = other DNA
tgcagcctctggattcaccttcagtgactactacatgaactggatccgccaggctccagggaaggggctggagtgggtttcatacattagtaatagtggtagtgccgtttactacgcagactctgtgaagggccggttcaccatctccagggacaacgccaagaactcactgtatctgcaaatgaacagcctgagagccgaggacacggccgtttattactgtgcgagggctgctggttggatcgacccctggggccagggaaccctcgtcaccgtctcctca

SEQ ID NO: 18176 - DNA, 283 bp, Homo sapiens
  source 1..283: mol_type = other DNA
tgcagcctctggattcaccttcagtgactactacatgaactggatccgccaggctccagggaaggggctggagtgggtttcatacattagtagtagtggtagtgccatatactacgcagactctgtgaggggccgattcaccatctccagggacaacgccaagaactcactgtatctgcaaatgaacagcctgagagccgaggacacggccgtctattactgtgcgagggctgctggttggatcgacccctggggccagggaaccctggtcaccgtctcctca

SEQ ID NO: 18177 - DNA, 283 bp, Homo sapiens
  source 1..283: mol_type = other DNA
tgcagcctctgggttcaccttcagtgactactacatgacctggattcgccaggctccagggaaggggctggagtgggtttcatccattggaagtagtaatagtctcagatcttacgcagactctgtgaagggccgattcaccatctccagggacaacgccaagaagtcactgtatctacaaatgaacagcctgagacccgaggacacggccatgtattactgtgcgagagccgctgggtggatcgacccctggggccaggaaaccctggtcaccgtctcctca

SEQ ID NO: 18178 - DNA, 283 bp, Homo sapiens
  source 1..283: mol_type = other DNA
tgcagcctctgggttcaccttcagtgactactacatgacctggattcgccaggctccagggaaggggctggagtgggtttcatccattggaagtagtaatagtcccagatcttacgcagactctgtgaagggccgattcaccatctccagggacaacgccaagaagtcactgtatctacaaatgaacagcctgagacccgaggacacggccatgtattactgtgcgagagccgctgggtggatcgacccctggggccagggaaccctggtcaccgtctcctca

SEQ ID NO: 18179 - DNA, 277 bp, Homo sapiens
  source 1..277: mol_type = other DNA
tgtagcctcggggttcgtcggtgactactatatgacatggatccgccaggctccagggaaggggctgcaatgcgttgcatacattggttatggtgacggcaccttattttatgcaagctctgtgaagggccgattcagcatctcccgggacgacgccagaaactcagcgtatctgcagatgaacaggctgaggaccgacgacacggccgtctattactgtgcgagaggcctcagtttggacgtctggggccaaggggccacggtcaccgtctcctca

SEQ ID NO: 18180 - DNA, 280 bp, Homo sapiens
  source 1..280: mol_type = other DNA
tgtaacctctggattcaccttcagtgactactacatgacctggatccgccaggctccggggaagggcctgcagtgcgtttcataccttggtaacggtgatgggaccgtatactacgcagactctgtgaagggccgatttaccatctccagggacgacgccaagaaatcagtgtctctcgaaatggacagcctaagagccgacgacacggctgtgtattactgtgcgagaggactctcgctggacgtctggggccaagggaccacggtcaccgtctcctca

SEQ ID NO: 18181 - DNA, 307 bp, Homo sapiens
  source 1..307: mol_type = other DNA
tgcagcctctggattcaccttcagtgaccactacatggactgggtccgccaggctccagggaaggggctggagtgggttggccgtgctagaaacaaagctaacagttacaccactgaatacgccccatctgtgaaaggcagattcaccgtctcaagggatgattcaaagagctcactgtatctgcaaatgaacagcctgcaaaccgaggacacggccgtgtattattgtgttagagtccggggcagcagctggagcgaccactactttgactattggggccagggatccctggtcaccgtctcctca

SEQ ID NO: 18182 - DNA, 307 bp, Homo sapiens
  source 1..307: mol_type = other DNA
tgcagcctctggattcactttcagtgaccactacatggactgggtccgccaggctccagggaaggggctggagtgggttggccgtactagaaacaaagctaatggttacaccacagaatacgccgcgtctgtgaaaggcagattcaccatctcaagagatgattcacagaactcactgtatctgcaaatgaacagcctgaaagccgaggacacggccgtatattactgtgttagagtgagaggcagcagctggtccgaccactactttgactattggggccagggaaccctggtcaccgtctcctca

SEQ ID NO: 18183 - DNA, 286 bp, Homo sapiens
  source 1..286: mol_type = other DNA
tgcaacctctggattcactttcagtggctactggctgaactgggtccgccaagttccagggaaggggctggtgtgggtcgcacttattaatcctgatggaagtaggactacctacgcggactccgtgaggggccgattcaccatctccagagacaacgcccagaacacggggtatctgcaaatgaacagtctgagagccgacgacacggctgtctattattgtgcaagagacctcaggggatcccccgactactggggccagggaacccttgtcaccgtctcctca

SEQ ID NO: 18184 - DNA, 286 bp, Homo sapiens
  source 1..286: mol_type = other DNA
tgcagcctctggattcaccttcagtacttactggatgaactgggtccgccaagctccagggaaggggctggtgtgggtctcacttattaatcctgacgggagtagcataacatacgcggactccgtgaagggccgcttcaccatctccagagacaacgccaagaacaccgtgtatttggaaatgaacagtctgagagccgaggactcggctgtgtattactgtgcaagagaccttagagggagccctgactactggggccagggaaccctggtcaccgtctcctca

SEQ ID NO: 18185 - DNA, 304 bp, Homo sapiens
  source 1..304: mol_type = other DNA
tgcagcctctggattcaccttcagtagttatgaaatgaactgggtccgccaggctccagggaaggggctggagtgggtttcatacattagtagtagtggtagtaccatatactacgcagactctgtgaagggccgattcaccatctccagagacaacaccaagaactcactgtatctgcaactgaacagcctgagagccgaggacacggctgtttattactgtgcgagagagggaggtggcttcaactactactactacggtatggacgtctggggccaagggaccacggtcaccgtctcctca

SEQ ID NO: 18186 - DNA, 304 bp, Homo sapiens
  source 1..304: mol_type = other DNA
tgcagcctctggattcactttcagtagttggcaaatgaactgggtccgccaggctccagggagggggctggagtgggtttcacacattagtagcagtggtagtaccatatactacgcagactttgtgaagggccgattcaccatctccagagacaacgccaagaactccctgtatctgcaaatgaacagcctgagagccgaggacacggctctttattactgtgcgagagaaggcggtggttttaactactactactacggtatggacgtctggggccaagggactacggtcaccgtctcctca

SEQ ID NO: 18187 - DNA, 286 bp, Homo sapiens
  source 1..286: mol_type = other DNA
tgcagcctctggattcacccttaatacctattggatgacctgggtccgccaggctccagggaagggactggagtgggtggccaacataaaccaagatgggagtgtgaaatactatgtgggctctgtgaagggccgattcaccgtctccagagacgacgccgagaactcattctatctccaaatgaacgacttgagagtcgacgacacggctgtgtattactgtgcgagggcgatagctgcacctggtagtctctggggccagggaactctggtcaccgtctcctca

SEQ ID NO: 18188 - DNA, 286 bp, Homo sapiens
  source 1..286: mol_type = other DNA
tgcagcctctggattcagccttagtaattattggatgagctgggtccgccaggctccagggaaggggctggagtgggtggccaacataaggcaagatggcagtgagaaatactatgtggactctgtgaagggccgattcaacatctacagagacaacgccaagaactctgtgtttctgcaaatgaatagcctgagagccgaggacacggctgtgtattactgtgcgagagcaatagcagcacctggaagcctctggggccagggaaccttggtcaccgtctcctca

SEQ ID NO: 18189 - DNA, 267 bp, Homo sapiens
  source 1..267: mol_type = other DNA
gcttctggatacaccttcactaggtatgctatgaattgggtgcgacaggcccctggacaagggcttgagtggatgggatggatcaacaccaacactgggaacccaacgtatgcccagggcttcacaggacggtttgtcttctccttggacacctctgtcagcacggcatatctgcagatcagcagcctaaaggctgaggacactgccgtgtattactgtacgaggcgggactactggggccagggaaccctggtcaccgtctcctca

SEQ ID NO: 18190 - DNA, 267 bp, Homo sapiens
  source 1..267: mol_type = other DNA
gcttctggatacaccttcactacatatgctataaattgggtgcgacaggcccctggacaagggcttgagtggatgggttggatcaacaccaacactgggaacccaacgtatgcccagggcttcacaggacggtttgtcttctccttggacacctctgtcagcgcgacatatctgcagatcagcaacctaaaggctgaagacactgccttttattactgtacgagacgtgactactggggccagggaaccctggtcaccgtctcctca

SEQ ID NO: 18191 - DNA, 288 bp, Homo sapiens
  source 1..288: mol_type = other DNA
gcttctggatacagcttcaccagttatgatatcaactgggtgcggcaggcccctggacaagggcttgagtggctgggatggatgaaccctaacaagggttacacaggctattcacagaagttccagggcagagtcaccatgacccgagacacctccgtaagtacagcctacatggagctgagcagcctgacatctgaggacacggccgtctattactgtgcgagaaacctcgcttatactggagactttgactactggggccagggagccctggtcaccgtctcctca

SEQ ID NO: 18192 - DNA, 288 bp, Homo sapiens
  source 1..288: mol_type = other DNA
gcttctggatataccttcaccaactatgatatcaactgggtgcgacaggccactggacaagggcttgagtggatgggatggatgaaccctaacagtggtaacacaggctatgcacagaagttccagggcagagtcaccatgaccagggacacctccataagcacagcctacatggagctgagcagcctgagatctgaggacacggccgtctattactgtgcgagaaatttggcttatacgggggattttgactactggggccagggaacgctggtcaccgtctcctca

SEQ ID NO: 18193 - DNA, 307 bp, Homo sapiens
  source 1..307: mol_type = other DNA
tgcagcctctggattcaccttcagtagctatgctatgcactgggtccgccaggctccagggaagggactggaatatgtttcaggtattagtagtaatgggggtagtagatattatgcaaactctgtgaagggcagattcaccatctccagagacaattccaagaacacgctgtatcttcaaatgggcagcctgagagctgaggacatggctgtgtattactgtgcgagagtacctacgtattactatgatagtagtggttattactacgactactggggccagggaaccctggtcaccgtctcctca

SEQ ID NO: 18194 - DNA, 307 bp, Homo sapiens
  source 1..307: mol_type = other DNA
tgcagcctctggattcaccttcagtagctatgctatgcactgggtccgccaggctccagggaagggactggaatatgtttcagctattagtagtaatgggggtagcacatattatgcaaactctgtgaagggcagattcaccatctccagagacaattccaagaacacgctgtatcttcaaatgggcagcctgagagctgaggacatggctgtgtattactgtgcccgagttcccacgtattactatgatagtagtggttattactatgactactggggccagggaaccctggtcaccgtctcctca

SEQ ID NO: 18195 - DNA, 286 bp, Homo sapiens
  source 1..286: mol_type = other DNA
tgcagcctctggattcacctttagttcctattggatgacctgggtccgccaggctccagggaaggggctggagtgcgtggccaccataaatcaaggtggaagtgagccatactatgtggactccgtgaagggccgattcaccatctccagagacaacaccaagacctcactgtttctgcagatgagcagcctgagagccgaggacacggctgtgtattactgtgcgagagctattgaccacgctactgactactggggccagggaaccctggtcaccgtctcctca

SEQ ID NO: 18196 - DNA, 286 bp, Homo sapiens
  source 1..286: mol_type = other DNA
tgcagcctctggattcgcatttggcagtgaatggatgagctgggtccgtcagactccagggaaggggctggagtggttggccaacataaacccagatgcaagtgagaagcaccatgtggactctatggagggccgattcaccatctccagagacaacgtcaggaattcactgtatctgcaaatgaacagcctgagagccgaggacacgggtatatattactgtgcgagagcgatagatcacgccacggactactggggccagggaaccctggtcaccgtctcctca

SEQ ID NO: 18197 - DNA, 286 bp, Homo sapiens; identical to SEQ ID NO: 18196
  source 1..286: mol_type = other DNA

SEQ ID NO: 18198 - DNA, 292 bp, Homo sapiens
  source 1..292: mol_type = other DNA
cactgtctctggtggctccatcagcagtggttcttactactgggcctggatccgccagcccccagggaaggggctggagtggattgggactttctcttatactgggaacacctactacaacccgtccctcaagagtcgagtcaccatatccgtagacacgtccaagaaccacttctccctggagctgacctctgtgaccgccgcagacacggctctgtattactgtgcgagacattaccggccatacgggatggacgtctggggccaagggaccacggtcaccgtctcctca

SEQ ID NO: 18199 - DNA, 292 bp, Homo sapiens
  source 1..292: mol_type = other DNA
cactgtctctggtgactccaccagcactactacttactacagggcctggatccgccagcccccagggaaggggctggagtggattgcgactatttcttatactgggaccacctactacgacccgtccctcaagagtcgagtcaccatctccgaagacacgcccaagaagcagttctccctgaagctgagctctgtgaccgccgcagacacggctgtatatttctgtgcgagacattataggccctacggtatggacgtctggggccaagggaccacggtcaccgtctcctca

SEQ ID NO: 18200 - DNA, 274 bp, Homo sapiens
  source 1..274: mol_type = other DNA
tgcagcctctggattaagcttcagcaacaactggatggattgggtccgccaagttccagggaaggggctggtatgggtctctcgtattagtggtgatgggaggaagacatactacgcggactccgtgaagggccgatttaccatctccaaagacaacgccaataacatcctgtatcttcaaatgaatagtctgcgagtcgacgacgcggctgtgtattattgtttaagaccttgggactactggggccagggaaccctggtcaccgtctcctca

SEQ ID NO: 18201 - DNA, 274 bp, Homo sapiens
  source 1..274: mol_type = other DNA
tgcagcctctggattcaccttcagtagctactggatgcactgggtccgccaagctccagggaaggggctggtgtgggtctcccgtatttatagtgatgggagtagcacgagctacgcggactccgtgaagggccgattcaccatctccagagacaacgccaagaacacgctgtatctgcaaatgaacggtctgagagccgaggacacggctgtctattattgtctccgcccttgggactactggggccagggaaccctggtcaccgtctcctca

SEQ ID NO: 18202 - DNA, 301 bp, Homo sapiens
  source 1..301: mol_type = other DNA
tgcagcctctggattcacctttagtagctttgccatgagctgggtctgccaggctccagggaaggggctggagtgggtctcaactattactggtagtggtgattacacatactacgcagactccgtgaagggccggttcaccatctccagagacaattccaagaacacgctgtctctgcagatggacagcctgagtgccgaggacacggccgtatattactgtgcgaaacatactcgggcgggatactattattacggtatggacgtctggggccaagggaccacggtcaccgtctcctca

SEQ ID NO: 18203 - DNA, 301 bp, Homo sapiens
  source 1..301: mol_type = other DNA
tgcagcctctggattcacctttagcagctatgccatgagctgggtccgccaggctccagggaaggggctggagtgggtctcaggtattagtggtagtggtggtagcacatactacgcagactccgtgaagggccggttcaccatctccagagacagttccaagaacacgctgtatgtgcaaatgaacagcctgagagccgaggacacggccgtatattactgtgcgaaacacactcgagcgggctactactactacggtatggacgtctggggccaagggaccacggtcaccgtctcctca

SEQ ID NO: 18204 - DNA, 286 bp, Homo sapiens
  source 1..286: mol_type = other DNA
tgcagcctctggatttacttttggtaacgtctggatgagttgggtccgccaggttccagggaaggggctggagtgggttggtcgaattaaaagtaaacataatggtgggacaccagactacgctgcacccgtgaaaggcagattcggcatctccagagatgattcaaaagacacgctgtttttgcatatgaacagcctgaaagtcgaggacacagccgtgtattactgtgcgagggaaccggactttgactactggggccagggaacccaggtcaccgtctcctca

SEQ ID NO: 18205 - DNA, 286 bp, Homo sapiens
  source 1..286: mol_type = other DNA
tgaagcctctggattcacttttagtaatgtctggatgagctggatccgccaggcacctgggaaggggctggagtgggtaggccgtatcaagagcaaatatcatggtgggactacagactacgctgcacccgtgaggggccggttcttcatctcaagagatgactcaaaaaacactctttttctccaaatgaacaacctgaaaatcgacgacacagccgtctattactgtgcccgtgaaccggactttgactactggggccagggaaccctggtcaccgtctcctca

SEQ ID NO: 18206 - DNA, 286 bp, Homo sapiens
  source 1..286: mol_type = other DNA
cgcagcctctggattcactttcagtaacgtctggatgagctgggtccgccaggctcctgggaaggggctggagtgggtaggccgtatcaagagcaaatttcatggtgggacaacagactacgctgcacccgtgaggggcaggttcttcatctcaagagatgattcaaaaaacacgctttttctccaaatgaacaacctgaaaatcgacgacacagccgtctattactgtgcccgtgaaccggactttgactactggggccagggaaccctggtcaccgtctcctca

SEQ ID NO: 18207 - DNA, 283 bp, Homo sapiens
  source 1..283: mol_type = other DNA
tgcagcctctggattcacctttagtgccgcttggctgggttgggtccgccagactccagggacggggctggagtgggtggccaacataagggaagatggaggtgagagatactatgtggactctgtgaagggccgcttcaccatctccagagacaacgccaacaacttactatatctgcaaatgaacagcctgagagtcgatgacacggctgtgttttactgtgcgagagggggtgctttcctcgactactggggccaaggaaccctggtcatcgtctcctca

SEQ ID NO: 18208 - DNA, 283 bp, Homo sapiens
  source 1..283: mol_type = other DNA
tgcagcctctggattcacctttaatacctattggatgggctgggtccgccagactccagaaaaggggctggagtgggtggccaatatcaagacagatggaagtgacaaatactatgtggactctgtgaagggccgattcaccatctccagagacaacgcccagaaatcaatgtatctggaaatgaacagtctaagagccgaggacacggccgtgtattactgtgcgagaggcggcgcatttctcgactactggggccagggaaccctggtcaccgtctcctcc

SEQ ID NO: 18209 - DNA, 310 bp, Homo sapiens
  source 1..310: mol_type = other DNA
tgcagcgtctggattcaccttcagtaatcatggaatgcattgggtccgccaggttccaggcaaggggctggagtgggtggcggttatttcaggtgatggaagtgacaatcagttcgcagactccgtgaagggccgattcagcatctccagagacaattccaagaacagagtttatctacaaatgaacaacgtgagagatgaggacacggctctatattactgtgcgagagagggccgttgtggtgaacctaagtgctattccggcctccctgattactggggccagggaaccctggtcagcgtctcctca

SEQ ID NO: 18210 - DNA, 310 bp, Homo sapiens
  source 1..310: mol_type = other DNA
tgcagcctctgggttcatcttcgataaacatgcaatacactggatccgccaggtcccaggcaagggtctggagtgggtggcagctatttcacaagagggagctgatcaacgatatttggactccgtgaagggccgattcttcatttccagagacaattccaggaacacagcctatctggaactgagcagtctcagacctgaggacacggctctgtatttctgtgcgagggaagggcgatgtggtgagcctaagtgctactcgggcctccctgactattggggccagggagccctggtcaccgtctcctca

SEQ ID NO: 18211 - DNA, 283 bp, Homo sapiens
  source 1..283: mol_type = other DNA
tgcagcctctggattcacattcagtgactactacatgacttggatccgccaggctccagggaaggggctgcaatgggtttcatacattactaacactggtagttccaaatattacgcagactctgtggcgggccgattcaccgtgtcgagggataatgaccacagtgtcctctatttacaaatgaccaacctgagagccgaagacacggccttctattactgcgcgaggggcactgggagccacatccactggggccagggaaccctggtcaccgtctcctca

SEQ ID NO: 18212 - DNA, 283 bp, Homo sapiens
  source 1..283: mol_type = other DNA
tgtagcctccggattcagtttcagtgactattacatgacgtggattcgccaggctccagggaaggggctggagtgggttggatatatcactaaaagtgcaaataacatatactacgctgactctgtggagggccgattcaccatctccagggacaacgccgagaattcactgtttctgcaaatgaacagcctgagacccgaagacacggctatttattactgtgcgagaggaacgggcagtcatattcactggggccagggaaccctggtcagcgtctcctcc

SEQ ID NO: 18213 - DNA, 280 bp, Homo sapiens
  source 1..280: mol_type = other DNA
tgtagcctctggattcacttttagtagttttgacatgagctgggtccgccaggctccagggaaggggctggagtgggtctcagttatttatagcggcggtagaggtgcagactatgtagactccgtgaagggccggttcaccatctccagagatgattccaagaacacactgtatctgcaaatgaacagcctgagaaccgaggacacggccgtatattactgtgcccgtggagggtggctagcaaactggggccagggaaccctggtcaccgtctcctca

SEQ ID NO: 18214 - DNA, 280 bp, Homo sapiens
  source 1..280: mol_type = other DNA
tgcagcctctggattcacctttagcgacactgacatgagctgggtccgccaggctccagggaaggggctggattgggtctcagtgatttatagcggtgatagaaccacatattatgcaaactccgtgaagggccggttcaccatctccagagatgattccaacaacacgctgtatctgcaaatgagcagcctgagagccgaggacacggccgtatattactgtgcgagaggggggtggctcgccaactggggccagggaaccctggtcaccgtctcctca

SEQ ID NO: 18215 - DNA, 283 bp, Homo sapiens
  source 1..283: mol_type = other DNA
tgcagcctctggattcacctttagcgcctttgagatggcctgggttcgccaggctccagggcaggggctggagtgggtctcacttatttctttgagtgatagtagtggtacatactataaagactccgtgaagggccggttcaccgtctccagggataattccaagagcacactctatctgcacatgaacagcctgagagacgaagacacggccatatattactgtgcgcgaggggggtggcttgctaactggggcccgggaaccctggtcaccgtctcctca

SEQ ID NO: 18216 - DNA, 304 bp, Homo sapiens
  source 1..304: mol_type = other DNA
tacagcctctggattcactttcaataacgcctggatgatctgggtccgccaggctccagggaaggggctggagtgggttggccgtattaaaagcgaaactgatggtgggagagcagactacgctgcacccgtgaagggcagattcaccatctcaagagatgactcaaaaaacacggtgtatctgcaaatgaacagcctgaaaaccgaggacacagccgtgtattattgtaccacaagaagtatcccctattactattacggtatggacgtctggggccaagggaccacggtcaccgtctcctca

SEQ ID NO: 18217 - DNA, 304 bp, Homo sapiens
  source 1..304: mol_type = other DNA
tgcagcctctggattcactttcagtaatgcctggatgagctgggtccgccaggctccagggaaggggctggagtgggttggccgtattaaaaacacaggtgatggtgggacaatcgactacgctgcacccgtgaaaggcagattcaccatctcaagagatgattcaaaagacacgctgcatctgcaactgaacagcctgaaaaccgaggacacagccgtgtattactgtaccacaaggagtattccctactactactacggcatggacgtctggggccaagggaccacggtcaccgtctcctca

SEQ ID NO: 18218 - DNA, 292 bp, Homo sapiens
  source 1..292: mol_type = other DNA
tgcagcctctgggttcaccgtcaggagcaattacatgagctgggtccgccaggctccaggaaaggggctggagtgggtctcagttatttatagtggtggtaccacatactacgcagactccgtgaagggccgattcaccatctccagagacaattccaagaatatcctgtatcttgaaatgaacagcctgagagccgaggacacggccgtatattattgtgcgagagataggagcagtggctggtacagctttgactactggggccagggaaccctggtcaccgtctcctca

SEQ ID NO: 18219 - DNA, 292 bp, Homo sapiens
  source 1..292: mol_type = other DNA
tgcagcctctgggttcatcgtcggtaacaactacatgagctgggtccgccaggctccagggaaggggctggagtgggtctcacttatttatagcggtggtggcacatactacgcagactccgtgaagggccgattcaccgtctcccgagacaattccaagaacacgttgtatcttcaaatgaacagcctgagagccgaggacacggccctgtattactgtgcgagagataggagcagtggctggtactcctttgactactggggccagggagccctggtcaccgtctcctca

SEQ ID NO: 18220 - DNA, 286 bp, Homo sapiens
  source 1..286: mol_type = other DNA
tacaacgtctggattaacgtttagtgactattggatgaactgggtccgtcaggctccagggaaggggctggagtgggtggccattatcaagaatgatggagttgagaaaaaatatgtggactctgtgaggggccgattcaccatctccagagacaacgccgagaattcagtgtatctgcaaatggacagcctgagagccgacgacacggccgtctattactgtgtggcaggcagagggtggcaaccagattactggggccagggagccctagtcaccgtctcctca

SEQ ID NO: 18221 - DNA, 286 bp, Homo sapiens
  source 1..286: mol_type = other DNA
tgcgacctctggaatcacctttagtgaattttggatgaactgggtccgccaggctccggggaaggggctggaatgggtggccaacattgaacaagatggaaatgagaaaaattatgtggattctgtgaagggccgattcaccatctccagagacaacgccaagaacttagcgtttctccaaatgaacagcctgagggccgaagacacggcggtgtattattgtgtggcaggaagggggtggcagcctgactactggggccagggaaccctggtcaccgtctcctca

SEQ ID NO: 18222 - protein, 94 aa, Homo sapiens
AASGFTFSNYWMHWVRQVPGKGLVWVSHINIDGSTTNYADSVRGRFTISRDNAKNTLYLQMNSLSAEDTAVYYCGRSNGWVDYWGQGTLVTVSS

SEQ ID NO: 18223 - protein, 94 aa, Homo sapiens; identical to SEQ ID NO: 18222

SEQ ID NO: 18224 - protein, 93 aa, Homo sapiens
ASGFTFSNYWMHWVRQVPGKGLVWVSHINIDGSTTNYADSVRGRFTISRDNAKNTLYLQMNSLSAEDTAVYYCGRSNGWVDYWGQGTLVTVSS

SEQ ID NO: 18225 - protein, 94 aa, Homo sapiens
AASGFSFSSYWMHWVRQVPGKGLVWVSHIHIDGSLTNYADSVRGRFTISRDNAKSTVFLQMNNLRAEDTGVYYCGRSNGWVDYWGQGTVVIVSS

SEQ ID NO: 18226 - protein, 94 aa, Homo sapiens
AASGFSFSSYWMHWVRQVPGKGLVWVSHIHIDGSLTNYADSVRGRFTISRDNAKSTVFLQMNNLRAEDTGAYYCGRSNGWVDYWGQGTVVIVSS

SEQ ID NO: 18227 - protein, 94 aa, Homo sapiens
EASGFSFSNYWMHWVRQAPGKGLVWVSHIHSDGSLTNYADSVRGRFTISRDNAKNTLFLEMNSLRAEDTGVYYCGRSNGWVDYWGQGSLVIVSS

SEQ ID NO: 18228 - protein, 95 aa, Homo sapiens
AASGLTFSNYWMSWVRQAPGKGLEWVANINQDGSEKKYVDSVKGRFTISRDNAKNSLSLQMNSLRAEDTAVYYCARDYRGWFDPWGQGTLVTVSS

SEQ ID NO: 18229 - protein, 94 aa, Homo sapiens
ASGLTFSNYWMSWVRQAPGKGLEWVANINQDGSEKKYVDSVKGRFTISRDNAKNSLSLQMNSLRAEDTAVYYCARDYRGWFDPWGQGTLVTVSS

SEQ ID NO: 18230 - protein, 95 aa, Homo sapiens; identical to SEQ ID NO: 18228

SEQ ID NO: 18231 - protein, 95 aa, Homo sapiens
AASGLTFSNYWMSWVRQAPGKGLEWVANINQDGSEKKYVDSVKGRFTISRDNAKNSLSLQMNSLRAEDTAVYYCARDYRGWFDPWGQETLVTVSS

SEQ ID NO: 18232 - protein, 95 aa, Homo sapiens
ADSGFTFRSNWMTWVRQAPGKGLEWVANMNQDGSEKYYVDSVKGRFTISRDNAKNSVYLQMNSLRAEDTAVYYCARDYRGWFDPWGQGTLVTVSS

SEQ ID NO: 18233 - protein, 95 aa, Homo sapiens
AASGFTFSSYWMNWVRQAPGKGLEWVALIKLDGNDKDYVDSVRGRFTISRDNARNSLYLQMNSLRVEDTAVYYCARDYRGWFDPWGQGTRVTVSS

SEQ ID NO: 18234 - protein, 95 aa, Homo sapiens
AASGFTFSSYWMNWVRQAPGKGLEWVALIKLDGNDKDYVDSVRGRFTISRDNARNSLYLQMNSLRVEDTAVYYCARDYRGWFDPWGQGTLVTVSS

SEQ ID NO: 18235 - protein, 94 aa, Homo sapiens
AASGFTFSSYSMSWVRQAPGTGLEWVSTISGSGDTIVYADSVKGRFTISRDNSKNTVYLQMNSLRAEDTAVYYCVKVYYYMDVWGKGTSVTVSS

SEQ ID NO: 18236 - protein, 94 aa, Homo sapiens
AASGFTFTSYEMSWVRQAPGKGLEWVSSISGSADTAYYADSVRGRFTISRDNSMNTLSLQMNSLRAEDTALYHCVKVYYYMDVWGEGTTVTVSS

SEQ ID NO: 18237 - protein, 95 aa, Homo sapiens
AASGFTFSTYWMTWLRQAPGKGLEWVVNINTDGSQRHYVDSVKGRFIISRDNAKNSLFLQMNNLRTEDTAVYYCARHGNWNWDYWGQGTLVTVSS

SEQ ID NO: 18238 - protein, 95 aa, Homo sapiens
AASGLTFSPYWMTWLRQAPGKGLEWVANINTDGSQRHYVDSVKGRFIISRDNAKNSLYLQMNNLRAEDTAVYYCARHGNWNWDYWGQGTLVTVSS

SEQ ID NO: 18239 - protein, 95 aa, Homo sapiens
AASGFTFSDFWMTWLRQPPGKGLEWVANIKEDGTKQHYADSVKGRFTISRDNPKNSLYLQMNSLRADDSAMYYCARHGNWNWDYWGQGTLVSVSS

SEQ ID NO: 18240 - protein, 95 aa, Homo sapiens
AASGFTFSTYWMTWVRQAPGKGLEWVANIKADGSASHYVDSVKGRFTMSRDNAKNSLYLQMNNLRAEDTAVYYCARHGNWNWDYWGQGTLVTVSS

SEQ ID NO: 18241 - protein, 95 aa, Homo sapiens
AASGLTFSPYWVTWLRQAPGKGLEWVANINTDGSQRHYVDSVKGRFIISRDNAKNSLYLQMNNLRAEDTAVYYCARHGNWNWDYWGQGTLVTVSS

SEQ ID NO: 18242 - protein, 94 aa, Homo sapiens
ASGFTFSTYWMTWLRQAPGKGLEWVVNINTDGSQRHYVDSVKGRFIISRDNAKNSLFLQMNNLRTEDTAVYYCARHGNWNWDYWGQGTLVTVSS

SEQ ID NO: 18243 - protein, 95 aa, Homo sapiens; identical to SEQ ID NO: 18237

SEQ ID NO: 18244 - protein, 94 aa, Homo sapiens
ASGFTFNRNWMSWVRQAPGKGLEWVANINQDGSEKNYLDYVKGRFIISRDNAKNSLYLQMNSLRAEDTALYYCARHGNWNWDYWGQGTLVTVSS

SEQ ID NO: 18245 - protein, 91 aa, Homo sapiens
AASGFSFSDYHMHWVRQVPGKGLVWVSRVKNDGSSPIYADSVKGRFTISRDNAKNSLYLQMNSLRAEDTAVYYCVRSFDFWGQGTMVTVSS

SEQ ID NO: 18246 - protein, 91 aa, Homo sapiens
AASGFPFTPYWMHWVRQAPGKGLVWVSRINSDGSSTIYADSVKGRFTISRDNAKNTVYLQMNSLRAEDTAVYYCVRSFDFWGQGTMVTVSS

SEQ ID NO: 18247 - protein, 91 aa, Homo sapiens
AASGFSFSDYHMHWVRQVPGKGLVWVSRVKNDGSSPIYADSVRGRFTISRDNAKNSLYLQMNSLRAEDTAVYYCVRSFDFWGQGTMVTVSS

SEQ ID NO: 18248 - protein, 91 aa, Homo sapiens
AASGFPFTPYWMHWVRQAPGKGLVWVSRINSDGSSIIYADSVKGRFTISRDNAKNTVYLQMNSLRAEDTAVYYCVRSFDFWGQGTMVTVSS

SEQ ID NO: 18249 - protein, 95 aa, Homo sapiens
AASGFTFSSAWMTWVRQVPGKGLVWVSLISSDGNTTPYADSVKGRFTISRDNARNTLYLQMNSLRAEDTAVYYCARDNMGSIDYWGQGTLVTVSS

SEQ ID NO: 18250 - protein, 95 aa, Homo sapiens; identical to SEQ ID NO: 18249

SEQ ID NO: 18251 - protein, 94 aa, Homo sapiens
AASGFTFSTSFMHWVRQAPGTGLVAVSLIDNHGATTYAESVKGRFTISRDNAKNTLFLQMNSLRAEDTGIYYCARDNMGSIDYWGQGTLVTVSS

SEQ ID NO: 18252 - protein, 94 aa, Homo sapiens; identical to SEQ ID NO: 18251

SEQ ID NO: 18253 - protein, 93 aa, Homo sapiens
ASGFTFSTSFMHWVRQAPGTGLVAVSLIDNHGATTYAESVKGRFTISRDNAKNTLFLQMNSLRAEDTGIYYCARDNMGSIDYWGQGTLVTVSS

SEQ ID NO: 18254 - protein, 99 aa, Homo sapiens
TVSGDSITNRDYYWGWIRQPPGKGLEWIGTIYYSGKTYYDPSLKSRVTMSVDTPKNEFSLKVTSVTATDSAVYYCARQVGGGRWYFDLWGRGTLVSVSS

SEQ ID NO: 18255 - protein, 99 aa, Homo sapiens
TVSGDSISSSGYFWAWIRQPPGKGLEWIATIYYSGRTYYNPSLKSRVTISVDTSKNEFSLKLSSVTAADTAVYYCARQVGGGRWYFDLWGRGTLVTVSS

SEQ ID NO: 18256 - protein, 99 aa, Homo sapiens; identical to SEQ ID NO: 18255

SEQ ID NO: 18257 - protein, 99 aa, Homo sapiens; identical to SEQ ID NO: 18254

SEQ ID NO: 18258 - protein, 99 aa, Homo sapiens
TVSGGSISNTDYFWGWVRQPPGKGLEWIGTIYYTGKTYYSPSLKSRLTISVDTSRSQFSLKLTSVTAADTAVYHCARQVGGGRWYFDLWGRATLVTVSS

SEQ ID NO: 18259 - protein, 99 aa, Homo sapiens
TVSGGSIGSSSHYWGWVRQPPGKGLEWIEITKYTGTTYYNPSLKSRVTISVDTYTNQFSLKLSSVTAADTAVYFCARQVGGGRWYFDLWGRGTLVTVSS

SEQ ID NO: 18260 - protein, 99 aa, Homo sapiens
TVSGGSIGSSSHYWGWVRQPPGKGLEWIEITKYTGTTYYNPSLKSRVTVSVDTYTNQFSLKLSSVTAADTAVYFCARQVGGGRWYFDLWGRGTLVTVSS

SEQ ID NO: 18261 - protein, 99 aa, Homo sapiens
IVSGGSIDTTSHYWGWVRQPPGKGLEWIEITKYTGTTYYNPSLKSRVTVSVDTYTNQFSLKLSSVTAADTAVYFCARQVGGGRWYFDLWGRGTLVTVSS

SEQ ID NO: 18262 - protein, 99 aa, Homo sapiens; identical to SEQ ID NO: 18258

SEQ ID NO: 18263 - protein, 94 aa, Homo sapiens
AASGFTFSSYWMHWVRQAPGKGPVWVAHINNDGSGASYMDSVKGRFTISRDNAKNTLYLQMNSLRAEDTALYYCVRADGGFDYWGQGTLVTVSS

SEQ ID NO: 18264 - protein, 94 aa, Homo sapiens
AASGFTFSSYWIHWVRQAPGKGLLWVSFINNDGSVTNYAGSVKGRFTMSRDNAKNTLYLQMNSLRVEDTGLYYCVRADGGFDYWGQGTLVTVSS

SEQ ID NO: 18265 - protein, 95 aa, Homo sapiens
ASGYTFTDYGVTWVRQAPGKGLEWMGWISTRNGNTIYGQRFQGRVTMTRDTSTSTAYMELRSLRSDDTAMFYCALSGDGGYSHNWGQGTLVTVSS

SEQ ID NO: 18266 - protein, 94 aa, Homo sapiens
SGYRFTTYGLTWVRQAPGQGLEWLGWINTESGHTLYGQMLQGRGTLTADASTATGHLELTSLTSDDTATYYCALSGDGGYSHNWGRGTLVIVSS

SEQ ID NO: 18267 - protein, 93 aa, Homo sapiens
GYTSINFGITWVRQAPGQGLEWMGWISLEHGNTHYAQSFQGRVTMTADTSAYTAYMEMRSLRSDDTAMYYCALSGDGGYSHNWGQGTLVTVSS

SEQ ID NO: 18268 - protein, 94 aa, Homo sapiens
AASGFTFSNYGMTWVRQAPGKGLEWVSGFTGGSGNTHYTDSVKGRFTISRDNSKNTLYLQMNSLRAEDTALYYCVRGTTGMDVWGKGTTVIVSS

SEQ ID NO: 18269 - protein, 94 aa, Homo sapiens; identical to SEQ ID NO: 18268

SEQ ID NO: 18270 - protein, 93 aa, Homo sapiens
ASGFTFSNYGMTWVRQAPGKGLEWVSGFTGGSGNTHYTDSVKGRFTISRDNSKNTLYLQMNSLRAEDTALYYCVRGTTGMDVWGKGTTVIVSS

SEQ ID NO: 18271 - protein, 94 aa, Homo sapiens
AASGLTFRNHPMSWVRQAPGKGLECVSSISSSGDSTYYGDSVKGRFTISRDNSKNTLYLQMNSLRADDTAVYYCVRGTTGMDVWGQGTTVTVSS

SEQ ID NO: 18272 - protein, 98 aa, Homo sapiens
TISGDSITNNNFYWGWIRQSPGKGLEWIGTTYSSGSTFYTPSLRGRVAISVDTSKNQFSLKVYSVSAADSALYFCARHMSVRAVFDYWGQGHRVTVSS

SEQ ID NO: 18273 - protein, 98 aa, Homo sapiens
TVSGDSITSNNFYWGWLRQPPGKGLEWIGSSYSSGSAFSDPSLKGRVILSVDTSKNQFSLQLNSVTAADTAVYYCARHMSVRAVFDYWGRGALVTVSS

SEQ ID NO: 18274 - protein, 96 aa, Homo sapiens
ISGDSVSSNSAAWNWIRQSPSRGLEWLGRTRYRSTWFHDYAISVKSRITISPDTSKNQFSLHLNSVTPEDTAMYFCARDLGYFDSWGQGILVTVSS

SEQ ID NO: 18275 - protein, 96 aa, Homo sapiens; identical to SEQ ID NO: 18274

SEQ ID NO: 18276 - protein, 96 aa, Homo sapiens
ISGDSVSSNNAGWNWIRQSPSRGLEWLGRTYYRSRWYNYYAESVKSRITINPDTSKNQFSMQMNSMTPEDTAVYYCARDLGYFDSWGRGTLVTVSS

SEQ ID NO: 18277 - protein, 96 aa, Homo sapiens
ISGDSVSSNSAGWNWIRQSPSRGLEWLGRTYYRSNWNNFYAVSVKSRIIISPDTSKNQFSLQLNSVTPEDTALYYCARDLGYFDSWGQGTLVTVSS

SEQ ID NO: 18278 - protein, 96 aa, Homo sapiens
IPGDSVSSNNAGWNWIRQSPSRGLEWLGRTYYRSRWYNYYAESVKSRITINPDTSKNQFSMQMNSMTPEDTAVYYCARDLGYFDSWGRGTLVTVSS

SEQ ID NO: 18279 - protein, 96 aa, Homo sapiens
ISGDSVSSNSAGWNWIRQSPSRGLEWLGRTYYRSNWNNYYAVSVKSRIIISPDTSKNQFSLQLNSVTPEDTAVYYCARDLGYFDSWGQGTLVTVSS

SEQ ID NO: 18280 - protein, 96 aa, Homo sapiens; identical to SEQ ID NO: 18279

SEQ ID NO: 18281 - protein, 97 aa, Homo sapiens
AASGFTLSSYAMSWVRQAPGKGLEWVSGVSGTGATTHYAGSVMGRFTVSRDNSKNTLFLQMNNLRADDTAVYFCARDGYNDIPLDYWGQGVLVTVSS

SEQ ID NO: 18282 - protein, 97 aa, Homo sapiens
AASGFTLSTYAMSWVRQAPGKGLEWVSSISGTGATTHYAGSVMGRFTVSRDNSKNTLYLQMDNLRADDTAVYFCARDGYNDIPLDYWGQGVRVTVSS

SEQ ID NO: 18283 - protein, 97 aa, Homo sapiens; identical to SEQ ID NO: 18282

SEQ ID NO: 18284 - protein, 97 aa, Homo sapiens
AASGFTSNSYAMTWVRQAPGKGLEWVSTITGTGFDTYYANSLKGRIIVSRDNSMNMLFLQINSLRAEDTAVYYCARDGYNDIPLDYWGQGALVIVSS

SEQ ID NO: 18285 - protein, 97 aa, Homo sapiens
AASGFTASNYAMTWVRQTPGKGLQWVATITGTGGNTYYADSLKGRFVISRDNYMNTLSLQMNSLIPEDTAVYFCARDGYNDIPLDYWGQGTLVAVSS

SEQ ID NO: 18286 - protein, 100 aa, Homo sapiens
TTSGFTFSAYAVSWVRQAPGKGLEWVSFIRDKVYGGTTEYAASVKGRFTISRDDSKDIAYLQMNSLKTEDTAIYYCARGGGSGQYYFDYWGQGTLVTVSS

SEQ ID NO: 18287 - protein, 100 aa, Homo sapiens
TASGFTFGAYAVSWVRQAPGKGLEWVSFIRDKVYGGTTEYAASVKGRFTISRDDSKDIAYLQMNSLKTEDTAIYYCARGGGSGQYYFDYWGQGTLVTVSS

SEQ ID NO: 18288 - protein, 100 aa, Homo sapiens
TGSGFSFGDYAVSWVRQAPGKGLEWISFIRNKAYGETTEYAASVKGRFTISRDNYNSIAYLQLNNLETEDTAVYYCARGGGSGQYYFDYWGQGTLVTVSS

SEQ ID NO: 18289 - protein, 99 aa, Homo sapiens
AASGFTFSSYWMHWVRQAPGKGLVWVSRINSDGSNTYYADSVKGRFTISRDNAKNTLYLQMNSLRAEDTAVYYCARRAYSGSYYYFDYWGQGTLVTVSS

SEQ ID NO: 18290 - protein, 99 aa, Homo sapiens
AASGFTLSSFWMHWVRQAPGEGLVWVSRINGDGRTINYADSVKGRFTISRDNAKNTLYLQMNSLRAEDTAVYYCARRAYSGSYYYFDYWGQGTLVTVSS

SEQ ID NO: 18291 - protein, 99 aa, Homo sapiens
AASGFTLSSFWMHWVRQAPGEGLVWVSRINGDGRTINYADSVKGRFTTSRDNAKNTLYLQMNSLRAEDTAVYYCARRAYSGSYYYFDYWGQGTLVTVSS

SEQ ID NO: 18292 - protein, 98 aa, Homo sapiens
ASGFTLSSFWMHWVRQAPGEGLVWVSRINGDGRTINYADSVKGRFTISRDNAKNTLYLQMNSLRAEDTAVYYCARRAYSGSYYYFDYWGQGTLVTVSS

SEQ ID NO: 18293 - protein, 96 aa, Homo sapiens
AASGFTFSSYWMSWVRQAPGKGLEWVANLNQDGNKKNYVDSVKGRFTISRDNAENSLFLQLNSLRAEDTAVYYCARDRGYSTYDYWGQGTLVTVSS

SEQ ID NO: 18294 - protein, 96 aa, Homo sapiens
EASGFTFANSWMTWLRQAPGKGPYCVADMSADGGQITYADSVRGRFSISRDNAKNSLYLQMNGLRPEDTAVYYCARDRGYSTYDYWGQGILITVSS

SEQ ID NO: 18295 - protein, 96 aa, Homo sapiens
AASGFTFATYPMTWVRQAPGKGLEWVAAITGSGSITYYADSVKGRFTISRDNSKNMMYVQMNSLRAEDTAVYYCGKANSYYYMDVWGKGTTVIVSS

SEQ ID NO: 18296 - protein, 96 aa, Homo sapiens
AASGFTFSGYGMTWVRQAPGKGLEWVSAISASGDITYYADSVKGRFTISRDNSKNTLFLQMNSLRAEDAAVYYCGKANSYYYMDVWGKVSTVTVSS

SEQ ID NO: 18297 - protein, 93 aa, Homo sapiens
TVSGASINRYYWTWIRQPAGRGLEWIGRIHGTGSTNYDPSLKSRVTMSVDTSKNQVSLNLSSVTAADTAVYYCARENWYFDFWGRGTLVTVSS

SEQ ID NO: 18298 - protein, 93 aa, Homo sapiens
TVSGASVSRNYWTWIRQPAGKGLEWIGRVSASGYTNNNPSLKSRVTMSVDTSKNQFSLKLTSVTAADTAVYYCARENWYFDFWGRGTVVTVSS

SEQ ID NO: 18299 - protein, 95 aa, Homo sapiens
AASGFTFSSYWMHWVRQAPGKGLVWVSRILSDGSSTSYADSVKGRFTISRDNAKNTLYLQMNSLRAEDTAVYYCARDYYSSFDYWGQGALVTVSS

SEQ ID NO: 18300 - protein, 95 aa, Homo sapiens
VVSGFTFSNYWMHWVRQTPGQGLESVAQVNHNGDPTYYADSVKGRFTISRDNAKNTLYLQMNSLRDEDTAIYYCARDYYSSFDYWGQGILVTVSS

SEQ ID NO: 18301 - protein, 98 aa, Homo sapiens
AASGFTFSDYWMGWVRQAPGKGLEWVANINQDGGEERYVDSVKGRFTISRDNAKNSLYLQMNSLRAEDTAVYYCGREMRRAYGPFDYWGQGTLVTVSS

SEQ ID NO: 18302 - protein, 98 aa, Homo sapiens
VASEFTFRDYWMGWVRQAPGKGLEWVANINQGGTETQYMDSVKGRFTISRDDAKNSLYLQMNSLRGEDTAIYYCGREMRRAYGPFDYWGQGTPVTVSS

SEQ ID NO: 18303 - protein, 98 aa, Homo sapiens
AASEFTFRDYWMGWARQAPGKGLEWVANINQGGSETQYMDSVKGRFTISRDNAKNSLYLQMNSLRGEDTAIYYCGREMRRAYGPFDYWGQGTPVTVSS

SEQ ID NO: 18304 - protein, 98 aa, Homo sapiens
AASEFTFRDYWMGWVRQAPGKGLEWVANINQGGSETQYMDSVKGRFTISRDNAKNSLYLQMNSLRGEDTAIYYCGREMRRAYGPFDYWGQGTPVTVSS

SEQ ID NO: 18305 - protein, 98 aa, Homo sapiens; identical to SEQ ID NO: 18302

SEQ ID NO: 18306 - protein, 101 aa, Homo sapiens
KGYGYSFTNYWIGWVRQMPGKGLEWMGIIYPGDSDTKYSPSFQGQVTISTDKSISTAYLQWNSLKASDTAMYYCARHGHCRNNSCYGFDYWGQGTLVTVSS

SEQ ID NO: 18307 - protein, 101 aa, Homo sapiens; identical to SEQ ID NO: 18306

SEQ ID NO: 18308 - protein, 91 aa, Homo sapiens
ASGYTFTSYAVHWVRQAPGQRLEWMGWINAGNGNTKYSQKFQGRVTITRDTSASTAYMELSSLRSEDTAVYYCAREAGGYWGQGTLVTVSS

SEQ ID NO: 18309 - protein, 91 aa, Homo sapiens
ASGYTFTSYAMHWVRQAPGQRLEWMGWINAGNGDTKYSQNFQGRVTFTRDTSASTAYMELSSLTSEDTAIYYCAREAGGYWGQGTLVTVSS

SEQ ID NO: 18310 - protein, 95 aa, Homo sapiens
ASGYTFTKFGITWVRQAPGQGLEWMGWISTNNGNTNYAQRFQGRVTMTTDTSTSTAYLEVRSLRSDDTAMYYCAISGDGGYSHNWGQGTLVTVSS

SEQ ID NO: 18311 - protein, 94 aa, Homo sapiens
FGYNFATFGMTWARQAPGQGLEWMGWISAYNGNTNYARGLQSRVTLTTDTSTNTAFMELTSLHSDDTAVYYCAISGDGGYSHNWGQGTLVTVSS

SEQ ID NO: 18312 - protein, 95 aa, Homo sapiens
ASGYSFTTFGITWVRQAPGQGLEWMGWISTYSGNANYAHKLQDRVTLTTDTSTNTAYMELRSLNSDDTAVYYCAISGDGGYSHNWGQGTLLTVSS

SEQ ID NO: 18313 - protein, 97 aa, Homo sapiens
AASGFTFSSYWMHWVRHAPGKGLVWVSRINSDGSSTSYADSVEGRFTISRDNAKNTLYLQMNTLRAEDTAVYYCARGYAGNYRVDYWGQGILVTVSS

SEQ ID NO: 18314 - protein, 97 aa, Homo sapiens
AASGFTFSNYWMHWVRQAPGKGLVWVSHISADGTTTTYADSVKGRFTISRDNAKNTLYLQMSSLSAEDTAFYYCARGYAGNYRVDYWGQGTLVTVSS

SEQ ID NO: 18315 - protein, 90 aa, Homo sapiens
AASGFTFSNYWMSWVRQAPGKGLEWVASIKQDGSEKYYVDSVKGRFTISRDNAKNSLYLQMNSLRAEDTAVYYCAHTTIWGQGTLVTVSS

SEQ ID NO: 18316 - protein, 90 aa, Homo sapiens
AASEFSFSNYWMYWVRQAPGKGLEWVANINQDGSEKNYVDSVKGRFTISRDNTMNSVYLQMNSLRAEDTAVYYCAHTTIRGQGTLVTVSS

SEQ ID NO: 18317 - protein, 93 aa, Homo sapiens
ASGYAFRLYTINWVRQAPGQAFEWMGWIYPDSGGTKYSQKLQGRITITGDTSANTVYMEMRSLRSEDTAVYYCVRGKEGFDFWGQGTAVTVSS

SEQ ID NO: 18318 - protein, 93 aa, Homo sapiens
ASGYTFTDYTIQWVRQAPGQRPEWMGWMYAGDGGGKFSQHFRDRVTFTRDTSATTAYMELRSLRSEDTAVYYCVRGKEGFDFWGQGTQVTVSS

SEQ ID NO: 18319 - protein, 96 aa, Homo sapiens
AASGFTFSSYWMYWVRQAPGKGLEWVANIKQDGSEKYYVDSVKGRFTISRDNAKNSLYLHMNSLRAEDTAFYYCARGPYYYYMDVWGKGTTVTVSS

SEQ ID NO: 18320 - protein, 96 aa, Homo sapiens
AASGFTFSTYWMNWVRQAPGKGLEWVANIKQDGSEKYFVDSVKGRFTISRDNAENSVYLQINTLRAEDTAVYFCARGPYYYYMDVWGKGTTVTVSS

SEQ ID NO: 18321 - protein, 96 aa, Homo sapiens
AASGFTFSSYWMYWVRQAPGKGLEWVANIKQDGSDKYYVDSVKGRFTISRDNAKNSLYLHMNSLRAEDTAFYYCARGPYYYYMDVWGKGTTVTVSS

SEQ ID NO: 18322 - protein, 93 aa, Homo sapiens
APGDTFTSYYMHWVRQAPGQGLEWMGIINPSGDTTSYAQKFQGRVTMTRDTSTSTVYMEVSSLRSEDTAVYYCARDPAPLDYWGQGTLVTVSS

SEQ ID NO: 18323 - protein, 93 aa, Homo sapiens
ASGYTFTKYYMHWVRQAPGQGLEWMGIINPSGGRTTYGQKFQGRVTMTRDTSTSTVYMELTSLTSEDTAVYYCARDPAPLDYWGQGTLVTVSS

SEQ ID NO: 18324 - protein, 93 aa, Homo sapiens
AASGFSFSNYHMSWVRQAPGKGLEWVSYISGSGNAIDYADSVKGRFTISRDNAKKSLYLQMNGLKDGDTAVYYCARARGLDYWGQGTLVTVSS

SEQ ID NO: 18325 - protein, 93 aa, Homo sapiens
AASGFTFSNNNMNWVRQAPGKGLEWVSFISPSTTTIYYADSVKGRFTISRDNARNSLYLQMNSLRDEDTAVYYCARARGLDYWGQGTPVTVSS

SEQ ID NO: 18326 - protein, 96 aa, Homo sapiens
AASGLTLNNYGMVWVRQAPGKGLEWVAVISSDGINKNYADSVKGRFTISRDSSNNALHLEMNSLRAEDTAVYYCAKSPGWWAFDYWGQGTLVTVSS

SEQ ID NO: 18327 - protein, 96 aa, Homo sapiens
AASGFTFTKFGMHWVRQAPGKGLEWVAVIFSDGFNKYYVDSVKGRFTISRDNSNNTLHLDMNSLRPEDTGVYYCAKSPGWWAFDYWGQGTLVTVSS

SEQ ID NO: 18328 - protein, 96 aa, Homo sapiens
VASGFTFRHYDIHWVRQAPGKGLEWVAVISVDGSDAYYVNSVKGRFTISSDNSKNTLYLQMNSLRAEDTAVYYCAKSPGWWAFDYWGQGTLVTVSS

SEQ ID NO: 18329 - protein, 95 aa, Homo sapiens
AASGFTFPRYTMGWVRQAPEKGLEWVSAILSDAAKTFYTDSVRGRFTISRDNSKTMVYLQMNSLRAEDTAIYYCARRVEYAFDNWSQGTLVTVSS

SEQ ID NO: 18330 - protein, 95 aa, Homo sapiens
AASGFDFPRYTMGWVRQAPGKGLEWLSAILSAGEKSYYADSVKGRFTISRDNSMHTVYLQLNSLRVEDTAIYYCARRVEYAFDNWGQGTLVTVSS

SEQ ID NO: 18331 - protein, 95 aa, Homo sapiens
AASGFTFPRYTMGWVRQAPGKGLEWVSAILSDAAKTFYTDSVRGRFTISRDNSKTMVYLQMNSLRAEDTAIYYCARRVEYAFDNWSQGTLVTVSS

SEQ ID NO: 18332 - protein, 87 aa, Homo sapiens
AASGFRFSDYTMGWVRQFPGRGLEWVSAILSNRQTFYGEPVRGRFSVSRDNSKNMLFLEMRSLRPEDTGRYYCARRVEYAFDNWGQG

SEQ ID NO: 18333 - protein, 94 aa, Homo sapiens
AASGFTFSAYDFHWVRRAPGQGLQYVSAITKNGDSTYYADSVKGRFTISRDNSKNTLYLHMGSLRPEDMDVYYCARGFYYMDVWGKGTTVTVSS

SEQ ID NO: 18334 - protein, 94 aa, Homo sapiens
VASGFTFSSYGMHWVRQAPGKGLEYVSAISSDGGSTYYADSVKGRFTISRDNSKNTLYLQMGSLRAEDMAVYYCARGFYYMDVWGKGTTVTVSS

SEQ ID NO: 18335 - protein, 94 aa, Homo sapiens
AASGFTFSSYWVGWVRQAPGKGLEWVANIKQDGSERYYVDSVKGRFTISRDNAKNSLHLQMNSLRDEDTAVYYCARANRGFDYWGQGTLVTVSS

SEQ ID NO: 18336 - protein, 94 aa, Homo sapiens
AASGFTFSSYWMSWVRQAPGKGLEWVANIKQDGSEKYYVDSVKGRFTISRDNAKNSLYLQMNSLRAEDTAVYYCARANRGFDYWGQGTLVTVSS

SEQ ID NO: 18337 - protein, 94 aa, Homo sapiens; identical to SEQ ID NO: 18336

SEQ ID NO: 18338 - protein, 94 aa, Homo sapiens; identical to SEQ ID NO: 18336

SEQ ID NO: 18339 - protein, 94 aa, Homo sapiens
ASGFPFSRYSMGWARQAPGKGLEWVSAFTVGDGGNTYYADSVRGRFTLSRDTSKDTLHLQMDTLTAEDTATYYCARRVEGAFDLWGQGTVVTVS

SEQ ID NO: 18340 - protein, 91 aa, Homo sapiens
AASGFVFGPYTMGWVRQAPGKGLECVSTISDTRNYADTVKGRFTISRDNSMNTLYLEMSTLRVDDTAMYYCARRVEGAFDLWGQGTLVTVS

SEQ ID NO: 18341 - protein, 93 aa, Homo sapiens
AVSGFPFNIYTMGWVRQAPGKGLEWVSAITSDSTIAYADIVKGRFTISRDNSINTLRLQMNNLRVDDTATYYCARRVEGAFDLWGQGTLVTVS

SEQ ID NO: 18342 - protein, 91 aa, Homo sapiens; identical to SEQ ID NO: 18340

SEQ ID NO: 18343 - protein, 91 aa, Homo sapiens
AASGFTFGRYTMGWVRQAPGKGLECVSTITSTIDYADTVKGRFTISRDNSMNTLYLQMNTLRVDDTAIYYCARRVEGAFDLWGQGTLVTVS

SEQ ID NO: 18344 - protein, 91 aa, Homo sapiens
AASGFVFGPYTMGWVRQAPGKGLECVSTISNTLNYADTVKGRFTISRDNSMNTLYLEMNTLRVGDTAIYYCARRVEGAFDLWGQGTLVTVS

SEQ ID NO: 18345 - protein, 98 aa, Homo sapiens
TVSGGSISSSGYYWVWIRQPPGKGLEYIGGLYYSGSTYYNPSLKSRVTMSVDTSKNEFSLKLSSVTAADTAVYYCARHRGGSSEFDYWGQGTLVTVSS

SEQ ID NO: 18346 - protein, 98 aa, Homo sapiens
TVSGGSISSGGYKWDWIRQTPGKGLEWVASIYYGGSSYYSPSLKSRVTISVDTSGNQFSLKLSSVTAADTAVYYCARHRGGSSEFDYWGQGILVTVSS

SEQ ID NO: 18347 - protein, 92 aa, Homo sapiens
ASGYTFTAHLIHWVRQAPGQRLEWMGLINAGNGNTKYSQKFQGRVSITRDTSASTAYMELSSLESEDTAVYYCARPGDWVYWGQGTLLTVSS

SEQ ID NO: 18348 - protein, 92 aa, Homo sapiens
ASGYTFTSYSVHWVRQAPGLRPEWMGSINAGSGNTKYSQNFQGRVSIATDTSATTAYMELNSLRSEDTAVYYCARPGDWVYWGQGTLVTVSS

SEQ ID NO: 18349 - protein, 98 aa, Homo sapiens
ASGYTLTKYAMHWVRQAPGQRLEWMGWIKDNSGNTKYSQKFQGRVTFTWDTSASTAYMELSSLKSEDTALYYCARAGAAPPGNWFDSWGQGTLVTVSS

SEQ ID NO: 18350 - protein, 98 aa, Homo sapiens
ASGYTLTKYAMHWVRQAPGQRLEWMGWIKDNSGHTKYSQKFQGRVTFTWDTSASTAYMELSSLKSEDTALYYCARAGAAPPGNWFDSWGQGTLVTVSS

SEQ ID NO: 18351 - protein, 98 aa, Homo sapiens
ASGYTFNKHAIHWVRQAPGQRLEWMGWINAGYANTEYSQNFQGRVTITRDTSASTAYMELSGLTNEDTAVYYCARAGAAPPGNWFDSWGQGTLVTVSS

SEQ ID NO: 18352 - protein, 97 aa, Homo sapiens
ISGDSVSSNSVAWNWIRQSPSRGLEWLGRTYYRSKWYNDYAPSVKSRTIINPDTSKNQFSLQLTSVTPEDTAVYYCARDRSRLFDYWGQGTPITVSS

SEQ ID NO: 18353 - protein, 97 aa, Homo sapiens; identical to SEQ ID NO: 18352

SEQ ID NO: 18354 - protein, 97 aa, Homo sapiens
ISGDSVSSNSVAWNWIRQSPSRGLEWLGRTYYRSKWSNDYALSVRSRIIINPDTSNNQFSLQLNSVTPEDTAVYYCARDRSRLFDYWGQGTLVTVSS

SEQ ID NO: 18355 - protein, 93 aa, Homo sapiens
AASGFTFSSYWMSWVRQAPGKGLEWVANTKPDGSEKYYVDSVKGRFTISRDNAKNSLYLQMDSLRAEDTAVYYCGRNKRGDYWGQGTLVTVSS

SEQ ID NO: 18356 - protein, 93 aa, Homo sapiens
VASGFTFSDYWMSWVRQAPGKGLEWVANIKQDGSETYYVDSVKGRFSISRDNAKNSVYLQMNSLGGEDTAMYYCGRNKRGDYWGQGTLVTVSS

SEQ ID NO: 18357 - protein, 95 aa, Homo sapiens
TVSGGSITSNYWSWIRQSAGKGLEWIGLIQTTGGTNYNPSLKSRVTISGDKSKNQFSLKLSSVTAADTAVYYCARWRPGGYFDYWGQGTLVTVSS

SEQ ID NO: 18358 - protein, 95 aa, Homo sapiens
TVSGGSVSSYYWSWIRQSAGKGLEWIGRMYTSGSTIYNPSLKSRVTMSEDTSKNQFSLKLTSVTAADTAVYYCARWRPGGYFDYWGQGTLVTVSS

SEQ ID NO: 18359 - protein, 96 aa, Homo sapiens
AASGFTITNYGMGWVRQSPEKGLEWVSFITPDGRSIHYADSFWGRFTISRDTTKNTVSLQMSSLGDGDTATYYCVRGWRSNSFDFWGQGTLVTVSS

SEQ ID NO: 18360 - protein, 95 aa, Homo sapiens
GSGFTFTTYSMDWVRQAPGKGLEWVSYIGTSYSPIYYADSVKGRFTISRDNARNSIYLQMNNLRDEDTAVYYCVRGWRSNSFDFWGQGILVTVSS

SEQ ID NO: 18361 - protein, 95 aa, Homo sapiens
GSGFTFTTYSMDWVRQAPGKGLEWVSYIGTSNSPIYYADSVKGRFTISRDNAGNSIYLEMNNLRDEDTAVYYCVRGWRSNSFDFWGQGILVTVSS

SEQ ID NO: 18362 - protein, 95 aa, Homo sapiens
GSGFTFTTYSMDWVRQAPGKGLEWISYIGTSNSPIYYADSVKGRFTISRDNAMNSIYLEMNNLRDEDTAVYYCVRGWRSNSFDFWGQGVLVTVSS

SEQ ID NO: 18363 - protein, 99 aa, Homo sapiens
ISGDSVSSSSATWNWIRQSPSRGLEWLGRTYYRSKWYNDFAISVKSRISINPDTSENQFSLQLNSVTPEDTALYYCARDRAGNRAFDIWGQGTKVTVSS

SEQ ID NO: 18364 - protein, 99 aa, Homo sapiens
ISGDSVSSNNAAWNWIRQSPSRGLEWLGRTYYRSKYYSDYAVSLKSRITINADTSKNQFSLQLNSVTLDDTAVYYCARDRAGNRAFDIWGQGTLVTVSS

SEQ ID NO: 18365 - protein, 99 aa, Homo sapiens
ISGDSVSSNSDAWNWIRQSPSRGLEWLGRTYYRSKWYNDYSVSMKSRITINPDTSKNQFSLQLNSVTPEDTAVYYCARDRAGNRAFDIWGQGTMVTVSS

SEQ ID NO: 18366 - protein, 99 aa, Homo sapiens
ISGDSVSSNSAAWNWLRQSPSRGLDWLGRTYYRSKWYYDYAVSVTSRITIDPDTSKNQFSLQLNSVTPEDTAVYYCARDRAGNRAFDIWGQGTMVTVSS

SEQ ID NO: 18367 - protein, 98 aa, Homo sapiens
AASGFTLSGYEMNWVRQAPGKGLEWLSYISHSGATKYYADSVKGRFTISRDNAENSLYLQMNSLRVEDTAVYYCARDVRGWYRWFDPWGQGTLVTVSS

SEQ ID NO: 18368 - protein, 98 aa, Homo sapiens
AASGFTFSSYEMNWVRQAPGKGLEWVSYISGSSDSIHYADSVKGRFTISRDNAKKSLYLQMNSLRVEDTAVYYCARDVRGWYRWFDPWGQGTLVTVSS

SEQ ID NO: 18369 - protein, 91 aa, Homo sapiens
AASGFALSSFEMNWVRQAPGKGPEWVAYISDSGSFTHYADSVKGRFTISRDNARNSVYLQMRSLRAEDTAVYFCARGVASWGPGTLVIVSS

SEQ ID NO: 18370 - protein, 91 aa, Homo sapiens
VVSGFTFSSFGMNWVRQAPGKGLEWLSYISPSGGAINYADSVKGRFTISRDNAKNSLYLQMNSLRVEDTAIYYCARGVASWGQGTLVTVSS

SEQ ID NO: 18371 - protein, 93 aa, Homo sapiens
AASGFIFSKYWMNWVRQAPGKGLEWVARIKEDGSDKSYVGSLKGRFTISRDNANNSLYLQMNSLRVEDTAVYYCARTNGLDYWGQGTLVTVSS

SEQ ID NO: 18372 - protein, 93 aa, Homo sapiens
VASGFTFSIYWMSWVRQAPGKGLEWVANIKEDGSAKNYVDSVKGRFTISRDNAKNSLYLQMNSLRAEDTAVYYCARTNGLDYWGQGTLVTVSS

SEQ ID NO: 18373 - protein, 93 aa, Homo sapiens
VASGFTFSISWMTWVRQAPGKGLEWVANIKEDGSARNYVDSVKGRFTISRDNAKNSLYLQMNSLRADDTAVYYCARTNGLDYWGQGTLVTVSS

SEQ ID NO: 18374 - protein, 93 aa, Homo sapiens
VASGFTFSISWMTWVRQAPGKGLEWVANIKEDGSARNYVDSVKGRFTISRDNAKNSLYLQMNSLRVDDTAVYYCARTNGLDYWGQGTLVTVSS

SEQ ID NO: 18375 - protein, 97 aa, Homo sapiens
TVSGGSINSYYWTWTRQAAGKGLEWIGQIYTRGNINYNPSLKSRITLSADTSKNQFSLKLTSVTAADTAVYYCARVGGFPLGAFDIWGQGTMVTVSS

SEQ ID NO: 18376 - protein, 97 aa, Homo sapiens
TVSGGSISDYYWSWIRQPAGKGLEWIGRIYTSEGTNYNPSLKSRLIMSVDTSKNQFSLKLTSVTAADTAVYYCARVGGFPLGAFDIWGQGTKVTVSS

SEQ ID NO: 18377 - protein, 94 aa, Homo sapiens
AASGFTFSSYALGWVRQAPGKGLEWVSTISTSAGSTYHADSVEGRFTISRDNFKNTLYLQMNSLGVEDTAVYFCARTYYYMDVWGKGTTVTVSS

SEQ ID NO: 18378 - protein, 94 aa, Homo sapiens
AASGFTFSSYAMSWVRQAPGEGLEWVSTISISGGGTYYADSVKGRFTISRDNSKYTLYLQMNSLGADDTAVYFCARTYYYMDVWGRGTTVTVSS

SEQ ID NO: 18379 - protein, 94 aa, Homo sapiens; identical to SEQ ID NO: 18378

SEQ ID NO: 18380 - protein, 95 aa, Homo sapiens
AASGFTFSSYAMSWVRQAPGQGLEWVSAISGSGGNTYYADSVKGRFTISRDNSKNTLYLQMNSLRAEDTAVYYCAKRTDYYFDYWGQGTLVTVSS

SEQ ID NO: 18381 - protein, 95 aa, Homo sapiens
AASGFAFSDYAMSWVRQAPGKGLEWVSTISSDGAGTYHADSVKGRFTISRDNSKNTLYLQVNSLRAEDTALYFCAKRTDYYFDYWGQGTLVTVSS

SEQ ID NO: 18382 - protein, 95 aa, Homo sapiens; identical to SEQ ID NO: 18381

SEQ ID NO: 18383 - protein, 95 aa, Homo sapiens
AASGFTFSTYWMHWVRQAPGKGLVWVSPINSDGTNIAYADSVKGRFTISRDNAKNTLYLQMNSLRAEDTAVYYCARTNGGAFDIWGQGTMVTVSS

SEQ ID NO: 18384 - protein, 94 aa, Homo sapiens
ASGFTFSTHWMHWVRQAPGKGLVWVSRINSDGRSTKYADSVKGRFTISRDNAQNTLYLQMNSLRAEDTAVYYCARTNGGAFDIWGQGTMVTVSS

SEQ ID NO: 18385 - protein, 95 aa, Homo sapiens
AASGFTFSTHWMHWVRQAPGKGLVWVSRINSDGRSTKYADSVKGRFTISRDNAQNTLYLQMNSLRAEDTAVYYCARTNGGAFDIWGQGTMVTVSS

SEQ ID NO: 18386 - protein, 93 aa, Homo sapiens
AASGFTFSDSIIHWVRQPSGKGLEWVGRVSSKAYNYATAYAASVKGRFTISRDDSKNTAYLQMSSLKTEDTAVYYCTRFLDVWGKGTTVTVSS

SEQ ID NO: 18387 - protein, 93 aa, Homo sapiens
AASGFTFSGSGIHWVRQASGKGLEWVGRIKNKANSYATAYAVSVKGRFTISRDDSKNTAYLQMNSLKTEDTAVYYCTRFLDVWGQGTTVTVSS

SEQ ID NO: 18388 - protein, 93 aa, Homo sapiens
AASGFTFSSYWMSWVRQAPGKGLEWVANIKQDGSEKYYVDSVKGRFTISRDNAKNSLYLQMNSLRGEDTAVYYCSRGGRGDSWGQGTLVTISS

SEQ ID NO: 18389 - protein, 93 aa, Homo sapiens
AASGFTFSNNWMSWIRQAPGKGLEWVANINENGYNKYYVDSVKGRFTISRDNAKNSLYLQINSLRDEDTAVYYCSRGGRGDSWGQGTLVTVSS

SEQ ID NO: 18390 - protein, 93 aa, Homo sapiens
AASGFTFSNNWMSWVRQAPGKGLEWVANINENGNNEYYVDSVKGRFTISRDNAKNLLYLQINNVRDEDTAVYYCSRGGRGDSWGQGTLVTVSS

SEQ ID NO: 18391 - protein, 93 aa, Homo sapiens
AASGFTFSNNWMSWVRQAPGKGLEWVANINENGNNEYYVDSVKGRFTISRDNAKNSLYLQINSLRDEDTAVYYCSRGGRGDSWGQGTLVTVSS

SEQ ID NO: 18392 - protein, 93 aa, Homo sapiens
AASGFAFSDFYMSWVRQAPGKGLEWVSYIDGFGGIVYYADSVKGRFTISRDNAKNSLYLQMISLRAEDTALYYCARGRYGTYWGQGTLVTVSS

SEQ ID NO: 18393 - protein, 93 aa, Homo sapiens
AASGFSFSDYYMTWIRQAPGKGLEWVSYIKSYGSATGYADSVKGRFTISRDDGKKFLFLQMDSLRVEDTAIYYCARGRYGTYLGQGVLVTVSS

SEQ ID NO: 18394 - protein, 93 aa, Homo sapiens
AASGFSFSDYYMTWIRQAPGKGLEWVSYIKSCGSATGYADSVKGRFTISRDDGKKFLFLQMDSLRVEDTAIYYCARGRYGTYLGQGVLVTVSS

SEQ ID NO: 18395 - protein, 92 aa, Homo sapiens
TVSGGSISSYYWSWIRQPAGKGLEWIGRIYTSGSTNYNPSLKSRVTISVDKSKNQFSLKLSSVTAADTAVYYCARGHAFDIWGQGTMVTVSS

SEQ ID NO: 18396 - protein, 92 aa, Homo sapiens
IVSGGSISSYYWNWIRQPAGKGLEWLGRIYTSGSTNYNPSLKSRVTMSVDTSKNQFSLKLSSVTAADTAVYYCARGHAFDIWGQGTMVTVSS

SEQ ID NO: 18397 - protein, 94 aa, Homo sapiens
ASGFTFSTYAMHWVRQAPGEGLEWVAVIWHDGTNENYVSSVKGRFTISRDNAKNTLYLQMNSLRTEDTAVYYCVRDDYGGLDYWGQGALVTVSS

SEQ ID NO: 18398 - protein, 95 aa, Homo sapiens
AASGFTFSAYAMHWVRQAPGKGLDWVAIISYDGSIKYYADSVKGRFTISRDDSKNTLYLQMNSLRAEDTAVYYCVRDDYGGLDYWGQGTLVTVSS

SEQ ID NO: 18399 - protein, 99 aa, Homo sapiens
AASGFTFSSYGMHWVRQAPGKGLEWVAIISYDGSNNYYADSVKGRFTISRDNSKNTLYLKMNSLRAEDTAVYYCAKDGRAGYYYYMDVWGKGTTVTVSS

SEQ ID NO: 18400 - protein, 99 aa, Homo sapiens
AASGFSFSSFGMHWVRQAPGKGLEWVAVISYDGSNKYYADSVKGRFTISRDKSKNTLYLQMNSLRAEDTAVYYCAKDGRAGYYYYMDVWGKGTTVTVSS

SEQ ID NO: 18401 - protein, 99 aa, Homo sapiens
AASGFSFSSYGMHWVRQAPGKGLEWVAVISYDGSNKYYADSVKGRFTISRDKSKNTLYLQMNSLRAEDTAVYYCAKDGRAGYYYYMDVWGKGTTVTVSS

SEQ ID NO: 18402 - protein, 97 aa, Homo sapiens
VASGFTFGDHFMTWIRQAPGKGLEWVSYIGTSGTTIYSADSVQGRFTISRDNAKNSLYLQMTSLRGDDTAVYYCARGSGSYEPLDYWGQGTLVTVSS

SEQ ID NO: 18403 - protein, 97 aa, Homo sapiens
AASGFTFSDSFMSWIRQAPGRGLEWVSYIGTSGSTIYYADSVKGRFFVSRDNAKNSLYLQINSLRVEDTAVYYCARGSGSYEPLDYWGQGTLVTVSS

SEQ ID NO: 18404 - protein, 99 aa, Homo sapiens
AASGFTFSSYSMNWVRQAPGKGLEWVSSISSSSSYIYYADSVKGRFTISRDNANNSLFLQMNSLRADDTAVYYCARDRGRVLPAAIGYWGQGTLVTVSS

SEQ ID NO: 18405 - protein, 99 aa, Homo sapiens
AASGFSFSDYNMNWVRQAPGKGLEWVSSISRSSTYIYYADSVKGRFTISRDDATKSLYLQMNSLRADDTAVYYCARDRGRVLPAAIGYWGQGTLVTVSS

SEQ ID NO: 18406 - protein, 99 aa, Homo sapiens; identical to SEQ ID NO: 18405

SEQ ID NO: 18407 - protein, 97 aa, Homo sapiens
AASGFTFSTFGMHWVRQAQGKGLEWVAVIWSDGSNKNHADSVKGRFTISRDNSKNTLYLQMNSLRAEDTAVYYCARDRTQRHYMDVWGKGTTVTVSS

SEQ ID NO: 18408 - protein, 97 aa, Homo sapiens
VASGFTLSSYGMHWVRQAPGKGLESVAIIWNDGNTKYNADSVKGRFTISRDNSKNTLYLQMNSLRAEDTAVYHCARDRTQRHYMDVWGKGTTLTVSS

SEQ ID NO: 18409 - protein, 90 aa, Homo sapiens
AASGFTFSSYWMNWVRQAPGKGLEWVANIKQDGSEKYYVDSVKGRFTISRDNAKNSLYLQMNSLRVEDTAVYYCATHDYWGQGTLVTVSS

SEQ ID NO: 18410 - protein, 90 aa, Homo sapiens
AASGFTFSSYWMSWVRQAPGKGLEWVANIKQDGSEKYCVDSVMGRFTISRDNAKNSLYLQMSSLRAEDTAVYYCATHDYWGQGTLVTVSS

SEQ ID NO: 18411 - protein, 93 aa, Homo sapiens
TVSGGSISSYYWSWIRQPAGEGLEWIGRIYTSGSTSYNPSLKSRVTMSVDTSKNQFSLKLSSVTAADTAVYYCARDDGWFDPWGQGTLVTVSS

SEQ ID NO: 18412 - protein, 94 aa, Homo sapiens
SVSSGSINGFYWAWIRQPAGQGLEWIGRIYTTSGSTSYRPSLRSRVTISADTSKNQISLTMTSVTVADTAIYYCARDDGWFDPWGPGTRVIVSS

SEQ ID NO: 18413 - protein, 94 aa, Homo sapiens
AASGSTFSTSHMNWIRQAPGKGLEWVSYMSYTGDIFYAESVKGRFFISRDNAINSLYLQMNNLRDEDTAVYYCASDRDWAFDNWGQGILVTVSS

SEQ ID NO: 18414 - protein, 95 aa, Homo sapiens
AASGITFSTYNMNWVRQAPGKGLEWVSYITYTTRTISYADSVRGRFTISRDNAKNSLYLQMNSLRAEDTAVYYCASDRDWAFDNWGQGTLVTVSS

SEQ ID NO: 18415 - protein, 95 aa, Homo sapiens
AASGFTFSSFWMHWVRQAPRKGLVWVSRINGDGSSIAYADSVKGRFTISRDNAKNTLYLQMNSLRAEDTALYYCVRGAYPTFDIWGQGTMVTVSS

SEQ ID NO: 18416 - protein, 95 aa, Homo sapiens
AASGFTFSTYWMHWVRQDPGKGLVWVSRINSDANSIAYADSVKGRFTISRDNAKNTLYLQMNSLRAEDTAVYYCVRGAYPTFDIWGQGAMVTVSS

SEQ ID NO: 18417 - protein, 89 aa, Homo sapiens
AGSGFTFSRNWMSWVRQAPGKGPEWVASIKQDGSEKHYVDSVKGRFTISRDNAKNSLYLQMNSLRADDTAVYYCAREYIWGQGTVVTVS

SEQ ID NO: 18418 - protein, 89 aa, Homo sapiens
AGSGFTFSRYWMSWVRQAPGKGPEWVASINEDGSEKNYVDSVKGRFTISRDNAKNSLYLQMNRLRADDTAVYYCAREYIWGQGTVVTVS

SEQ ID NO: 18419 - protein, 89 aa, Homo sapiens
AGSGFTFSRNWMSWVRQAPGKGPEWVASIKEDGSVKHYADSVKGRFTISRDNAKNSLYLQMNSLRADDTAVYYCAREYIWGQGTVVTVS

SEQ ID NO: 18420 - protein, 90 aa, Homo sapiens
AASGFSFSKYWMSWVRQAPGKGLEWVANIRQDGSEIYYLDSVKGRFTISRDNAKNSLYLQMNNLRVEDTAVYYCAREYIWGQGTMVSVSS

SEQ ID NO: 18421 - protein, 90 aa, Homo sapiens
AASGFTFSNNWMSWVRQSPGKGLEWVANINKDGSEKYYVDSVKGRFTISRDNAKNSLYLQMNSLRDEDTAVYHCAREYIWGQGTVVTVSS

SEQ ID NO: 18422 - protein, 94 aa, Homo sapiens
TVSGGSISSYYWSWIRQPPGKGLEWIGYIYYSGSTNYNPSLKSRVTISVDTSKNQFSLKLSSVTAADTAVYYCARVWLDAFDIWGQGTMVTVSS

SEQ ID NO: 18423 - protein, 94 aa, Homo sapiens
TVSGASISSYYWSWIRQPPGKGLEWIGYMYYSGSTNYNPSLKSRVTMSGDTSKNQFSLKLNSVIAADTAVYYCARVWLDAFDIWGQGTVVTVSS

SEQ ID NO: 18424 - protein, 94 aa, Homo sapiens; identical to SEQ ID NO: 18423

SEQ ID NO: 18425 - protein, 94 aa, Homo sapiens; identical to SEQ ID NO: 18423

SEQ ID NO: 18426 - protein, 95 aa, Homo sapiens
AASGFTFSRYSMNWVRQAPGKGLEWVSYISSSSSRIYYADSVKGRFTISSDNAKNSLYLQMNSLRDEDTAVYYCARDTLWAFDYWGQGTLVAVSS

SEQ ID NO: 18427 - protein, 95 aa, Homo sapiens
AASGFIFGNEPMNWVRQAPGKGLEWIANIRDNGEITDYADSVKGRFTVSRDNVKSSLFLQLNSLRDEDTAVYYCARDTLWAFDYWGQGSLVIVSS

SEQ ID NO: 18428 - protein, 93 aa, Homo sapiens
VASGFIFSNFAMSWVRQAPGKGLEWVSHISEGGDTTFYADSVKGRFTISRDNSKNTLYLQMSSLTVEDTAVYYCAPSGWFDPWGQGTLVTVSS

SEQ ID NO: 18429 - protein, 92 aa, Homo sapiens
ASGFIFSNFAMSWVRQAPGKGLEWVSHISEGGDTTFYADSVKGRFTISRDNSKNTLYLQMSSLTVEDTAVYYCAPSGWFDPWGQGTLVTVSS

SEQ ID NO: 18430 - protein, 92 aa, Homo sapiens
ASGFTFKNYAMSWVRQPPGKGLEWVSHISDSGGETFYADSVKGRFSVSRDNSKDTLYLQMDSLRADDTAMYYCAPSGWFDPWGQGTLVSVSS

SEQ ID NO: 18431 - protein, 93 aa, Homo sapiens
TVSGDSISSHYWSWIRQPPGKGLEWIGYIYYSGSTNYNPSLKSRVTISVDTSKNQFSLKLSSVTAADTAVYYCARNLWGFDPWGQGTLVIVSS

SEQ ID NO: 18432 - protein, 93 aa, Homo sapiens
TVSGGSISSYYWTWIRQPPGKGLEWIGYIYDSGSTNYKPSLKSRVIISVDTSKNQFSLKLSSVTAADTAVYYCARNLWGFDPWGQGTLVTVSS

SEQ ID NO: 18433 - protein, 93 aa, Homo sapiens
TVSGGSISSYYWSWIRQPPGKGLEWIGYIYYSGSTNYNPSLKSRVTISVDTSKNQFSLKLSSVTAADTAVYYCARNLWGFDPWGQGTLVTVSS

SEQ ID NO: 18434 - protein, 97 aa, Homo sapiens
ASGYTFSSYGLSWLRQAPGQRLEYMGWITTKNGNTNYAQRLQGRVTMTTDTSTSTAYMELKSLISDDTAIYYCAIRTGTYPYYFDYWGQGTLVTVSS

SEQ ID NO: 18435 - protein, 97 aa, Homo sapiens
ASGYTFTSYGISWVRQAPGQGLEWMGWISAHKGNTNYAQKLQGRVTMTTDTSTSTAYMELRSLRSDDTAVYYCAIRTGTYPYYFDYWGQGTLVTVSS

SEQ ID NO: 18436 - protein, 94 aa, Homo sapiens
TAGFTFAAFSMTWVRQSPGKGLESVSYITPSSVPVYYADSVKGRFTISRDNAKNLLYLQMNSLRDEDTAVYYCVRDRDWAFDLWGQGTKVTVAS

SEQ ID NO: 18437 - protein, 94 aa, Homo sapiens
VASGFSFRTYNMNWFRQAPGKGLEWISYISITDAISYPESLRGRFTVSRDESEDSLYLQLNSLRAEDTAVYYCVRDRDWAFDLWGQGTVVTVSS

SEQ ID NO: 18438 - protein, 94 aa, Homo sapiens
VASGFTFRTYNMNWFRQAPGKGLEWISYISITDFISYPESLRGRFTVSRDESEDSLYLQLNSLRAEDTAVYYCVRDRDWAFDLWGQGTVVTVSS

SEQ ID NO: 18439 - protein, 94 aa, Homo sapiens
VASGFSFRTHHMNWIRQAPGKGLEWISYISITDAISYPDSLKGRFTVSRDESEDSLYLQLNSLRVEDTAVYYCVRDRDWAFDLWGQGTVVTVSS

SEQ ID NO: 18440 - protein, 93 aa, Homo sapiens
VASGFTFRTYNMNWIRQAPGKGLEWISYISITDAIYYPDSLRGRFIVSRDESEDSLYLQLNNLRAEDTAVYYCVRDRDWAFDLWAKGQLSPSL

SEQ ID NO: 18441 - protein, 94 aa, Homo sapiens
VASGFSFRTYNMNWFRQAPGKGLEWISYISITDAISYPESLKGRFTVSRDESEDSLYLQLNSLRAEDTAVYYCVRDRDWAFDLWGQGTVVTVSS

SEQ ID NO: 18442 - protein, 94 aa, Homo sapiens
VASGFSFRTHHMNWIRRAPGKGLEWISYISITDAISYPDSLKGRFTVSRDESEDSLYLQLNSLRVEDTAVYYCVRDRDWAFDLWGQGTVVTVSS

SEQ ID NO: 18443 - protein, 94 aa, Homo sapiens
VASGFTFRTYNMNWFRQAPGKGLEWISYISITDAISYPDSLRGRFTVSRDESEDSLYLQLNNLRADDTAVYYCVRDRDWAFDLWGQGTVVTVSS

SEQ ID NO: 18444 - protein, 96 aa, Homo sapiens
KGSGYSFTSYWIGWVRQMPGKGLEWMGIIFPGDSDTRYSPSFQGQVTISADKSISTAYLQWSSLKASDTAMYYCARRDSSSLADYWGQGTLVTVSS

SEQ ID NO: 18445 - protein, 95 aa, Homo sapiens
GSGYSFASFWIGWARQMPGKGLEWMGIIYPGDSDTRYSPSFQGQVTISADKSVSTAYLQWSSLKASDTAIYYCARRDSSSLADYWGQGTLVTVSS

SEQ ID NO: 18446 - protein, 95 aa, Homo sapiens
AASGFTFSSFSMNWVRQAPGKGLEWIAHIGGISGNMYYADSVKGRFTISRDNAKNSLYLQMNSLRDEDTAVYYCARGALHAFDIWGQGTMVTVSS

SEQ ID NO: 18447 - protein, 95 aa, Homo sapiens
VASGFTFSSNGMNWVRQAPGKGLECISYISGTSDTIFYADSLKGRITISRDNAKNSLYLQMNSLRDEDTAVYYCARGALHAFDIWGQGTMVTVSS

SEQ ID NO: 18448 - protein, 95 aa, Homo sapiens
AASGFTFSSYGMNWVRQAPGKGLESVSYIFDSSDSINYADSVKGRFTISRDNAKNSLYLQMNSLRDEDTAMYYCARGALHAFDIWGQGTMVTVSS

SEQ ID NO: 18449 - protein, 90 aa, Homo sapiens
AASGFSVSNNYITWVRQAPGKGLDWVSVIYSGGTTFYTDSVKGRFTISRDISKNTVYLQMDSLRAEDTAVYYCVKRGGDSWGQGTLVTVS

SEQ ID NO: 18450 - protein, 92 aa, Homo sapiens
AASGFSVSSNYMSWVRQAPGKGLEWFSVLYTGTSSVYYTDSVKGRFTIYRDNSKNTVYLQMNNLRDDDTAVYYCVKRGGDSWGQGTLVTVSS

SEQ ID NO: 18451 - protein, 90 aa, Homo sapiens
ASGLTFSAQWWHWVRQAPGKGLEWVANIKPDGSERFYVESVKGRFTISRDNAKNSLYLQMNSLRDEDTAVYYCARGLEYWGQGTLVTVSS

SEQ ID NO: 18452 - protein, 91 aa, Homo sapiens
AASGFTFSTSSMRWVRQAPGKGLESVASINQDGSDKYYVDSVKGRFTISRDNAKNSLYLQMNSLRAEDMAVYYCARGLEYWGQGTLVTVSS

SEQ ID NO: 18453 - protein, 95 aa, Homo sapiens
AASGFIFGGYGMHWIRQAPDKGLEWVASIWYNGTNEYYADSVKGRFTISRDNSRNTLYLQLNSLRAEDTAVYYCARDRGHGADYWGQGTLVTVSS

SEQ ID NO: 18454 - protein, 95 aa, Homo sapiens
AASGFTFSGYGMHWVRQAPGKGLEWVASIWYDGSNRYYADSVKGRFTISRDNSKNTLNLQMNGLRAEDTAMYYCARDRGHGADYWGQGSLVTVSS

SEQ ID NO: 18455 - protein, 98 aa, Homo sapiens
VASGFTFSSHWMIWVRQAPGKGLEWVASINQDGSEKYYVDSAKGRFTISRDNAKNSLYLQMNSLRAEDTAMYYCARDHVAPGLIFDYWGQGTLVTVSS

SEQ ID NO: 18456 - protein, 98 aa, Homo sapiens
AASGFVFNDHWMSWVRQAPGKGLEWVASINQDGSEKHYVDSVKGRFTVSRDRGYNSLFLQMNSLRPEDTAVYYCARDHVAPGLIFDYWGQGAQVTVSS

SEQ ID NO: 18457 - protein, 99 aa, Homo sapiens
AASGLSVSTNYLSWVRQAPGKGLEWLSVVWRDGTTHYADSVKGRFTISRDNSKNTLSLQMNDLRAEDTAVYHCAKDPGHSLGTDYGDYWGQGTLVTVSS

SEQ ID NO: 18458 - protein, 98 aa, Homo sapiens
AASGFSVRTNYMSWVRRAPGKGLEWVSVISNAGTTFYADSVKGRFTISRDTSNNMLFLQMNSLSAEDTAVYYCAKDPGHSLGTDYGDYWGQGTLVTVS

SEQ ID NO: 18459 - protein, 98 aa, Homo sapiens
AASGFTVSSNYMSWVRQAPGKGLEWLSVIFADDSTYYADSVKGRFTISRDSSKNAVFLQMNSLGVEDTAVYHCAKDPGHSLGTDYGDYWGQGTLVTVS

SEQ ID NO: 18460 - protein, 99 aa, Homo sapiens
AVSGFSVSDNYMSWVRQAPGKGLEWVSAIHSGGTTYYADSVKGRFTISRDNSKNTVYLHMNSLRADDTAVYHCAKDPGHSLGTDYGDYWGRGILVTVSS

SEQ ID NO: 18461 - protein, 96 aa, Homo sapiens
AVSGFSVSDNYMSWVRQAPGKGLEWVSAIHSGGTTYYADSVKGRFTISRDNSKNTVYLHMNSLRADDTAVYHCAKDPGHSLGTDYGDYWGRGILVT

SEQ ID NO: 18462 - protein, 95 aa, Homo sapiens
ASGYTFTNFGITWVRQAPGKGLEWMGWISANDGNTKFAQRFQGRVTMTTDTSTSTAYMELRSLRSDDTAMYYCAVSGDGGYSHDWGQGTLVTVSS

SEQ ID NO: 18463 - protein, 95 aa, Homo sapiens
ASGYTFTTFGITWVRQAPGQGLEWMGWLSNYNGNTNYGHKFQDRITLTTDTSTNTAYMELRSLNSDDTAVYYCAVSGDGGYSHDWGQGTLVTVSS

SEQ ID NO: 18464 - protein, 95 aa, Homo sapiens
ASGYTFTNFGITWVRQAPGQGLEWMGWVSPYNENTNYAQRLQGRVTMTTDASTSTAYMELRSLISDDTAVYYCAVSGDGGYSHDWGQGTLVTVSS

SEQ ID NO: 18465 - protein, 99 aa, Homo sapiens
AVYGGSFSVSYWSWIRQPPGRGLEWIGQIDHSGRTDYNPSLKSRVAMSLDTSKNQFSLKLSSVTAEDTAIYYCASHCSSTRCYAGFDSWGQGTLVTVSS

SEQ ID NO: 18466 - protein, 99 aa, Homo sapiens
AVYGGSFSDSYWSWIRQPPGKGLEWIGEISHSGRTSYSPPLTSRVTISLDTSMNQFSLKLTSATAADTAIYYCASHCSSTRCYAGFDSWGQGTLVTVSS

SEQ ID NO: 18467 - protein, 95 aa, Homo sapiens
AASGFTFSNYSLNWVRQAPGKGLEWISYIWSSSNNIWYADSVKGRFTISSDNAKNSVYLQMNSLRDEDTAVYYCVRDFAYAFDIWGQGATVTVSS

SEQ ID NO: 18468 - protein, 94 aa, Homo sapiens
AASGFTFSTYTMNWVRQAPGKGLEWISYITTSSTMYYADSVKGRFTISRDNAKNSLYLQMNSLRDEDTAMYYCVRDFAYAFDIWGQGTMVTVSS

SEQ ID NO: 18469 - protein, 95 aa, Homo sapiens
AASGFTFSSYNMNWFRQAPGKGPEWISYITTMDTTIRYADSVRGRFTVSRDNAKSSLYLQMNRLRDEDTAVYYCVRDFAYAFDIWGQGTMVTVSS

SEQ ID NO: 18470 - protein, 95 aa, Homo sapiens
AASGFTFTSYTMNWVRQAPGTGLEWLSYIDIASRIKSYADSVKGRFTISRDNAKNSLYLQMNSLRDEDTAVYYCVRDFAYAFDIWGQGTMVTVSS

SEQ ID NO: 18471 - protein, 95 aa, Homo sapiens
AASGFTFTSYTMNWVRQAPGKGLEWVSYIHIASSIKSYADSLKGRFTISRDNARNSLYLQMDSLRDEDTAVYYCVRDFAYAFDIWGQGTVVTVSS

SEQ ID NO: 18472 - protein, 95 aa, Homo sapiens; identical to SEQ ID NO: 18470

SEQ ID NO: 18473 - protein, 99 aa, Homo sapiens
VGSGFTFSTYVVHWVRQAPGRGLEWVAVMSAGGRFQYYADSVKGRFTIARDNSKNTLYLQMNSLTEEDTALYHCARDPLGGAPDYFDYWGQGTLVTVSS

SEQ ID NO: 18474 - protein, 99 aa, Homo sapiens
VASEFTFSTFAMHWVRQAPGRGLEWVAVISASGGTTVYPDSVRGRFTISRDNSKNTLYLQMNSLRPEDTALYYCARDPLGGAPDYFDYWGQGTPVTVSS

SEQ ID NO: 18475 - protein, 99 aa, Homo sapiens
AASGFTFSDYYMSWIRQAPGKGLEWVSYISSSGSSMYYADSVKGRFTISRDNAKNSLYLQMNSLRAEDTAVYYCARVSSTAAAGTTDYWGQGTLVTVSS

SEQ ID NO: 18476 - protein, 99 aa, Homo sapiens
AASGFTFSDYYMTWIRQAPGKGLEWLSYISSSGSHTPYADSVKGRFIISRDNAENSLFLQMNSLRDEDTAVYYCARVSSTAAAGTTDYWGQGTLVTVSS

SEQ ID NO: 18477 - protein, 93 aa, Homo sapiens
KGSGYSFTNYWIGWVRQMPGKGLEWMGIIYPGDSDTRYSPSLQGQVTISVDKSISTAYLQWSSLKASDTAMYYCARRQSFDIWGQGTMVTVSS

SEQ ID NO: 18478 - protein, 93 aa, Homo sapiens
KGSGYRFTSFWIGWVRQMPGKGLEWMGIISPGDSNTRYSPSFQGQVTISADKSINTAYLQWGSLKASDTAMYYCARRQSFDIWGQGTMVTVSS

SEQ ID NO: 18479 - protein, 91 aa, Homo sapiens
AASGFTLSSFWMNWVRQAPGKGLEWVANIKEDGSEKYVDSVKGRFTISRDNAKNSLYLQMNSLRAEDTAVYYCARGKGGLWGQGTLVTVSS

SEQ ID NO: 18480 - protein, 92 aa, Homo sapiens
AASGFTFSSYWMNWVRQAPGKGLEWVANIKQDGSEKYYVDSVKGRFTISRDNAKNSLYLQMNSLRAEDTAVYYCARGKGGLWGQGTLVTVSS

SEQ ID NO: 18481 - protein, 95 aa, Homo sapiens
ASGFTFSNYWMSWVRRAPGRGLEWVANINADGSAKYYVDSMKGRFTISRDNTKNSLYLQIDSLRAEDTAVYYCERDVRFGLFDYWGQGTLVTVTS

SEQ ID NO: 18482 - protein, 95 aa, Homo sapiens
ASGFTFSNYWMSWVRRAPGRGLEWVANINADGSAKYYVDSMKGRFAISRDNTKNSLYLQIDSLRAEDTAVYYCERDVRFGLFDYWGQGTLVTVTS

SEQ ID NO: 18483 - protein, 95 aa, Homo sapiens
ASGFTFSNYWMSWVRRAPGRGLEWVANINADGSAKYYVDSMKGRFTISRDNTKNSLYLQIDSLRAEDTAVYYCERDVRFGLFDYWGPGTLVTVTS

SEQ ID NO: 18484 - protein, 95 aa, Homo sapiens
ASGFTFSNYWMSWVRRAPGRGLEWVANINADGSAKYYVDSMKGRFTISRDNTKNSLYLQIDSLRAEDTAVYYCERDVRFGLFDYWGQGTLVTVSS

SEQ ID NO: 18485 - protein, 95 aa, Homo sapiens; identical to SEQ ID NO: 18481

SEQ ID NO: 18486 - protein, 95 aa, Homo sapiens
ASGFTFSNYWMSWVRRAPGRGLEWVANINADGSAKYYVDSMKGRFTISRDNTQNSLYLQIDSLRAEDTAVYYCERDVRFGLFDYWGQGTLVTVTS

SEQ ID NO: 18487 - protein, 95 aa, Homo sapiens
ASGFTFSNYWMSWVRRAPGRGLEWVANINADGSAKYYVDSMKGRFTISRDNTKNSLYLQIDSLRAEDTAVYYCERDVRFGLFDYWGQGTVVTVSS

SEQ ID NO: 18488 - protein, 96 aa, Homo sapiens
AASGFTFSNYWMDWVRQAPGKGLEWLATINQDGSAQYYVDSVKGRFTISRDNTKNSLYLQLNSLRGEDTAVYYCERDVRFGLFDYWGLGTLVTVSS

SEQ ID NO: 18489 - protein, 99 aa, Homo sapiens
AASGFTFARHAMTWVRQAPGKGLEWVSSLSGGGTDTYYTDSVKGRFTISRDNSKNTLYLQMNSLRAEDSAVYYCAKDYVGTVPDAFDIWGQGTMVIVSS

SEQ ID NO: 18490 - protein, 99 aa, Homo sapiens
AASGFTFARNAMTWVRQAPGKGLEWVSSLSGGGGDTAYTDSVKGRFTISRDNSKNTLYLQMDSLRAEDTAVYYCAKDYVGTVPDAFDIWGQGTMVIVSS

SEQ ID NO: 18491 - protein, 99 aa, Homo sapiens
AASGFTFARNAMTWVRQAPGKGLEWVSSLSGGGGDRYYTDSVKGRFTVSRDNSMNTLYLQMNSLRAEDTAVYYCAKDYVGTVPDAFDIWGQGTMVIVSS

SEQ ID NO: 18492 - protein, 99 aa, Homo sapiens
AASGFTFARNAMTWVRQAPGKGLEWVSSLSGGGGDTAYTDSVKGRFTISRDNSKNTLYLQMNSLRAEDTAVYYCAKDYVGTVPDAFDIWGQGTMVIVSS

SEQ ID NO: 18493 - protein, 99 aa, Homo sapiens
AASGFTFARNAMTWVRQAPGKGLEWVSSLSGGGGDTAYTDSVKGRFTISRDNSENTLYLQMNSLRAEDTAVYYCAKDYVGTVPDAFDIWGQGTMVIVSS

SEQ ID NO: 18494 - protein, 99 aa, Homo sapiens; identical to SEQ ID NO: 18489

SEQ ID NO: 18495 - protein, 99 aa, Homo sapiens
AASGFTFARNAMTWVRQAPGKGLEWVSSLSGGGGDTAYTDSVKGWFTISRDNSKNTLYLQMDSLRAEDTAVYYCAKDYVGTVPDAFDIWGQGTMVIVSS

SEQ ID NO: 18496 - protein, 99 aa, Homo sapiens
AASGFTFARNAMTWVRQAPGKGLEWVSSLSGGGGDTAYADSVKGRFTISRDNSKNTLYLQMNSLRAEDTAVYYCAKDYVGTVPDAFDIWGQGTMVIVSS

SEQ ID NO: 18497 - protein, 99 aa, Homo sapiens; identical to SEQ ID NO: 18490

SEQ ID NO: 18498 - protein, 99 aa, Homo sapiens
AASGFTFARNAMTWVRQAPGKGLEWVSSLSGGGGDIAYTDSVKGRFTISRDNSENTLYLQMNSLRAEDTAVYYCAKDYVGTVPDAFDIWGQGTMVIVSS

SEQ ID NO: 18499 - protein, 99 aa, Homo sapiens; identical to SEQ ID NO: 18496

SEQ ID NO: 18500 - protein, 99 aa, Homo sapiens; identical to SEQ ID NO: 18490

SEQ ID NO: 18501 - protein, 99 aa, Homo sapiens
AASGFMFARNAMTWVRQAPGKGLEWVSSLDGGGGDTYYTDSVKGRFTISRDNSKNTLYLQMNSLRAEDTAVYYCAKDYVGTVPDAFDIWGPGTMVIVSS

SEQ ID NO: 18502 - protein, 99 aa, Homo sapiens
AASGFTFARNAMTWVRQAPGKGLEWVSSLSGGGGDTAYTDSVKGRFTISRDNSENTLYLQMNSLRADDTAVYYCAKDYVGTVPDAFDIWGQGTMVIVSS

SEQ ID NO: 18503 - protein, 99 aa, Homo sapiens; identical to SEQ ID NO: 18491

SEQ ID NO: 18504 - protein, 98 aa, Homo sapiens
ASGFTFARHAMTWVRQAPGKGLEWVSSLSGGGTDTYYTDSVKGRFTISRDNSKNTLYLQMNSLRAEDSAVYYCAKDYVGTVPDAFDIWGQGTMVIVSS

SEQ ID NO: 18505 - protein, 99 aa, Homo sapiens
AASGFTFARHAMTWVRQAPGKGLEWVSSLSGGDTDTYYTDSVKGRFTISRDNSKNTLYLQMNSLRAEDSAVYYCAKDYVGTVPDAFDIWGQGTMVIVSS

SEQ ID NO: 18506 - protein, 99 aa, Homo sapiens
AASGFTFSSYSMNWVRQAPGKGLEWVSSLSGGGTDTYYTDSVKGRFTISRDNSKNTLYLQMNSLRAEDSAVYYCAKDYVGTVPDAFDIWGQGTMVIVSS

SEQ ID NO: 18507 - protein, 99 aa, Homo sapiens
AASGFAFRAYAMSWVRQAPGKGLEWVSSLSGGGGDTAYTDSVKGRFTISRDNSKNTLYLQMNSLRAEDTAVYYCAKDYVGTVPDAFDIWGQGTMVIVSS

SEQ ID NO: 18508 - protein, 99 aa, Homo sapiens
AASGFTFTSYAMTWVRQAPGKGLEWVSGISGSGGTTYYADSVKGRFTISRDNSKNTLYLQMNSLRVEDTAKYFCAKDYVGTVPDAFDIWGQGTLVTVSS

SEQ ID NO: 18509 - protein, 99 aa, Homo sapiens
AASGFTFSTYAMSWVRQAPGKGLEWVSGISGSGGRTYYADSVKGRFTISRDNSKNTLYLQMNSLRAEDTAVYYCAKDYVGTVPDAFDIWGQGTMVTVSS

SEQ ID NO: 18510 - protein, 102 aa, Homo sapiens
AASGFTFRNYWMSWVRQAPGKGLEWVATINQDGSEQDQVDSVKGRFTLSRDNAKYSLYLQMNNLRAEDTAMYYCARKKYYYDTSPMGWFDSWGQGTLVTVSS

SEQ ID NO: 18511 - protein, 101 aa, Homo sapiens
ASGFTFSSYWMSWVRQAPGKGLEWVATINQDGSEQDHVDSVKGRFTLSRDNAKNSLYLQMNNLRAEDTAMYYCARKKYYYDTSPMGWFDSWGQGTLVTVSS

SEQ ID NO: 18512 - protein, 101 aa, Homo sapiens
ASGFAFSGYWMSWVRQAPGKGLEWVATINRDGSEQDHVGSVEGRFTLSRDNAKNSLYLQMNNLRAEDTAIYYCARKKYYYDTSPMGWFDSWGQGTLVTVSS

SEQ ID NO: 18513 - protein, 101 aa, Homo sapiens
ASGFAFSGYWMSWFRQAPGKGLEWVATINREGSEQDHVGSVEGRFTLSRDNAKNSLYLQMNNLRAEDTAMYYCARKKYYYDTSPMGWFDSWGQGTLVTVSS

SEQ ID NO: 18514 - protein, 101 aa, Homo sapiens
APGFTFSSYWMSWVRQAPGKGLEWVATINQDGREQDHVDSVKGRFTLSRDNAKNSLYLQMNNLRAEDTAIYYCARKKYYYDTSPMGWFDSWGQGTLVTVSS

SEQ ID NO: 18515 - protein, 102 aa, Homo sapiens; identical to SEQ ID NO: 18510

SEQ ID NO: 18516 - protein, 101 aa, Homo sapiens
ASGFTLSSYWMSWVRQAPGKGLEWVATINQDGSEQDHVDSVKGRFTLSRDNAKNSLYLQMNNLRAEDTAMYYCARKKYYYDTSPMGWFDSWGQGTLVTVSS

SEQ ID NO: 18517 - protein, 102 aa, Homo sapiens; identical to SEQ ID NO: 18510

SEQ ID NO: 18518 - protein, 102 aa, Homo sapiens
AASGFTFRNYWMSWVRQAPGKGLEWVAIINQDGSEQDQVDSVKGRFTLSRDNAKYSLYLQMNNLRAEDTAMYYCARKKYYYDTSPMGWFDSWGQGTLVTVSS

SEQ ID NO: 18519 - protein, 101 aa, Homo sapiens
ASGFAFSGYWMSWFRQAPGKGLEWVATINRDGSEQDHVGSVEGRFTLSRDNAKNSLYLQMNNLRAEDTAMYYCARKKYYYDTSPMGWFDSWGQGTLVTVSS

SEQ ID NO: 18520 - protein, 101 aa, Homo sapiens
ASGFAFSGYWMSWVRQAPGKGLEWVATINRDGSEQDHVGSVEGRFTLSRDNAKNSLYLQMNNLRAEDTAMYYCARKKYYYDTSPMGWFDSWGQGTLVTVSS

SEQ ID NO: 18521 - protein, 101 aa, Homo sapiens
ASGFAFSGYWMSWVRQAPRKGLEWVATINRDGSEQDHVGSVEGRFTLSRDNAKNSLYLQMNNLRAEDTAMYYCARKKYYYDTSPMGWFDSWGQGTLVTVSS

SEQ ID NO: 18522 - protein, 102 aa, Homo sapiens
VASGFTFSTYWMSWVRRAPGKGLEWVATINQDGNQERYVDSVKGRFTVSRDNARNSLYLQMNSLRDEDTAVYFCARKKYYYDTSPMGWFDSWGQGTQVIVAS

SEQ ID NO: 18523 - protein, 93 aa, Homo sapiens
SGITRSSIWMAWVRQAPGKGLDWVANINADGSVKYYADSVKGRFTISRDIAKNSLYLQMNDLRPDDTAVYYCATTADAPGNDWGQGTLVTVSS

SEQ ID NO: 18524 - protein, 93 aa, Homo sapiens
SGITRSSIWMAWVRQAPGKGLDWVANINADGSVKYYADSVKGRFTISRDIAKNSLYLQMNGLRPDDTAVYYCATTADAPGNDWGQGTLVTVSS

SEQ ID NO: 18525 - protein, 93 aa, Homo sapiens; identical to SEQ ID NO: 18523

SEQ ID NO: 18526 - protein, 93 aa, Homo sapiens; identical to SEQ ID NO: 18523

SEQ ID NO: 18527 - protein, 93 aa, Homo sapiens
SGITRSSIWMAWVRQAPGKGLDWVANINADGSVKYYADSVKGRFTISRDIAKNSLYLHMNDLRPDDTAVYYCATTADAPGNDWGQGTLVTVSS

SEQ ID NO: 18528 - protein, 93 aa, Homo sapiens
SGITRSSIWMAWVRQAPGKGLDWVANINADGSVKYYADSVKDRFTISRDIAKNSLYLQMNDLRPDDTAVYYCATTADAPGNDWGQGTLVTVSS

SEQ ID NO: 18529 - protein, 93 aa, Homo sapiens
SGITRSSIWMAWVRQAPGKGLDWVANVNADGSVKYYADSVKGRFTISRDIAKNSLYLQMNDLRPDDTAVYYCATTADAPGNDWGQGTLVTVSS

SEQ ID NO: 18530 - protein, 93 aa, Homo sapiens
SGITRSSIWMAWVRQAPGKGLDWVANINADGSVKYYVDSVKGRFTISRDIAKNSLYLQMNDLRPDDTAVYYCATTADAPGNDWGQGTLVTVSS

SEQ ID NO: 18531 - protein, 95 aa, Homo sapiens
AASGFTFTRYWMTWVRQPPGKGLEWVANIKQDGTTTFYVDSVKGRFTISRDNAKNSLYLQMNSLRAEDTAVYYCATTADAPGNDWGQGTLVTVSS

SEQ ID NO: 18532 - protein, 93 aa, Homo sapiens
AASGFTLSPYWMSWVRQAPGKGLEWVANIKQDGSEKYYVDSVKGRFTISRDNAKNLLYLQMNSLRAEDTALYYCARKNIMDVWGQGTTVTVSS

SEQ ID NO: 18533 - protein, 93 aa, Homo sapiens; identical to SEQ ID NO: 18532

SEQ ID NO: 18534 - protein, 93 aa, Homo sapiens
AASGFIFSTYWMAWGRQAPGKGLEWVASIKEDGSEKYYVDSVKGRFTISRDNAKNSVFLQMDSLRAEDTALYYCARKNIMDVWGQGTTVTVSS

SEQ ID NO: 18535 - protein, 93 aa, Homo sapiens; identical to SEQ ID NO: 18534

SEQ ID NO: 18536 - protein, 97 aa, Homo sapiens
AASGFTLSNAWMSWVRQAPGKGLEWVGRIKSKTDGGTTDYAAPVKGRFTISRDDSKNTLSLQMNSLKTEDTAVYYCTNWNYARFEYWGQGTLVTVSS

SEQ ID NO: 18537 - protein, 97 aa, Homo sapiens
AASGFAFSNAWMNWVRQTPGKGLEWVGLIKTKSAGGTTDYAAPVKGRFTISRDDSKNTLDLQMNSLESEDTAVYYCTNWNYARFEYWGQGILVTVSS

SEQ ID NO: 18538 - protein, 97 aa, Homo sapiens
AASGFTLSNAWMSWVRQAPGKGLEWVGRIKSKTDGGTTDYAAPVKDRFTISRDDSKNTLSLQMNSLKTEDTAVYYCTNWNYARFEYWGQGTLVTVSS

SEQ ID NO: 18539 - protein, 99 aa, Homo sapiens
AASGLTVQNNYMSWVRQAPGKGLEWVSIIHRDGTTYYADSVRGRFTISRDTSKNTVFLQMNGLRVEDTAVYHCARDPGYSSGWVEFDPWGQGTLVTVAS

SEQ ID NO: 18540 - protein, 99 aa, Homo sapiens
AASGLTVQNNYMSWVRQAPGKGLEWVSIIHRDGTTYYADSVRGRFTISRDTSKNTVFLQMNGLRVEGTAVYHCARDPGYSSGWVEFDPWGQGTLVTVAS

SEQ ID NO: 18541 - protein, 99 aa, Homo sapiens
AASGFTVSTSYMSWVRQAPGKGLEWVSVIHSGGDTYYADSVKGRFTISRDNSKNTLYLQMNSLRAEDTAVYHCARDPGYSSGWVEFDPWGQGTLVTVSS

SEQ ID NO: 18542 - protein, 99 aa, Homo sapiens
AASGFSVSDSYMSWVRQAPGKGLEWVSVIHATGNTYYADSVKGRFTISRDTSKNTLYLQMNSLRVEDSAVYHCARDPGYSSGWVEFDPWGQGTLVTVSS

SEQ ID NO: 18543 - protein, 100 aa, Homo sapiens
ASGFTLSNSWMSWVRQAPGKGLEWVATINQDGSGMYYVGSVMGRFTISRDNAKNSLFLQMNSLRDDDTAIYHCARKLYYYDTSPAGWFDPWGQGTLVTVS

SEQ ID NO: 18544 - protein, 100 aa, Homo sapiens
ASGLTLSNSWMSWVRQAPGKGLEWVATINQDGSGMYYVGSVMGRFTISRDNAKNSLFLQMNSLRDDDTAIYHCARKLYYYDTSPAGWFDPWGQGTLVTVS

SEQ ID NO: 18545 - protein, 100 aa, Homo sapiens; identical to SEQ ID NO: 18543

SEQ ID NO: 18546 - protein, 102 aa, Homo sapiens
AASGFTPSTYWMSWVRQAPGKGLEWVANIKQDGSEEYYVDSVKGRFTISRDNAKNSVYLQMNSLRAEDTAVYYCARKLYYYDTSPAGWFDPWGQGTLVTVSS

SEQ ID NO: 18547 - protein, 95 aa, Homo sapiens
AASGFIFSDAWMNWVRQAPGKGLEWVGRIKSKAAGGTTDYAAAVKGRFTISRDDSKKTSFLQMNSLKNEDTAVYYCTTGGRVGYWGQGTLVTVSS

SEQ ID NO: 18548 - protein, 95 aa, Homo sapiens; identical to SEQ ID NO: 18547

SEQ ID NO: 18549 - protein, 95 aa, Homo sapiens; identical to SEQ ID NO: 18547

SEQ ID NO: 18550 - protein, 95 aa, Homo sapiens
APSGFTFSNAWMNWVRQAPGKGLEWVGRIKSNTDGGTTDYAAPVKGRFTISRDDSKSTVYLQMNSLKIEDTAVYYCTTGGRVGYWGQGTLVTVSS

SEQ ID NO: 18551 - protein, 95 aa, Homo sapiens
AASGFTFSNAWMNWVRQAPGKGLEWVGRIKSKTDGGTTDYAAPVKGRFTISRDDSKSTLYLQMNSLKIEDTAVYYCTTGGRVGYWGQGTLVTVSS

SEQ ID NO: 18552 - protein, 94 aa, Homo sapiens
AASGFTFNSYWMSWVRQAPGKGLEWVANIKQDGSEIYYVDSVKGRFTISRDNARNSLYLQMNSLRAEDTAVYYCGRGRADWGYWGQGTLVTVSS

SEQ ID NO: 18553 - protein, 94 aa, Homo sapiens
AASGFSFSIYWMSWVRQAPGKGLEWVANIKEDGSEKYYVDSVKGRFTISRDNAKNSLYLQMNSLRAEDTAVYYCGRGRADWGYWGRGTLVTVSS

SEQ ID NO: 18554 - protein, 94 aa, Homo sapiens
ATSGFTFSSHWMSWVRQTPGKGLEWVANIKQDGSEKYYVDSVKGRFTISRDNAKNSLYLQMNSLRAEDTAVYYCGRGRADWGYWGQGTVVTVSS

SEQ ID NO: 18555 - protein, 94 aa, Homo sapiens
VASGFDFTSYTVNWVRQAPGKGLEWVSSISSSSSYIFYADSVKGRFTISRDNARNSVYLHLNSLRAEDTAVYFCARDAYNYGDYWGQGTLVNVS

SEQ ID NO: 18556 - protein, 94 aa, Homo sapiens
AVSGFDFTSYTVNWVRQAPGKGLEWVSSISSSSTYIFYADSVKGRFTISRDNARNSVYLQLNSLRAEDTAVYFCARDAYNYGDYWGQGTLVNVS

SEQ ID NO: 18557 - protein, 94 aa, Homo sapiens; identical to SEQ ID NO: 18556

SEQ ID NO: 18558 - protein, 95 aa, Homo sapiens
AASGFTFNSYTINWVRQAPGLGLEWVSSISSSSTYIFYADSIKGRFTVSRDNAKNSIFLHINSLGPDDTGVYFCARDAYNYGDYWGQGTLVTVSS

SEQ ID NO: 18559 - protein, 95 aa, Homo sapiens
AAAGFTFGGYWMTWVRQAPGKGLECVAYIKSDGSDKYYVDSVKGRFTIFRDNAKTSLYLQMNSLRAEDTAVYYCVRETAWSFDSWGQGTLVTVSS

SEQ ID NO: 18560 - protein, 95 aa, Homo sapiens
AASGFSFSGYWMSWVRQAPGKGLEWVAIIKEDGSLKNYVDSVKGRFTISRDNTEKSLYLQMNSLRGEDTAIYYCVRETAWSFDSWGQGTLVTVSS

SEQ ID NO: 18561 - protein, 95 aa, Homo sapiens
AASGFSFSGYWMSWVRQAPGKGLEWVAIIKEDGSLKNYVDSVKGRFTIFRDNTEKSLYLQMNSLRGEDTAIYYCVRETAWSFDSWGQGTLVTVSS

SEQ ID NO: 18562 - protein, 95 aa, Homo sapiens
AAAGFTFGGYWMTWVRQAPGKGLECVAYIKSDGSAKYYVDSVKGRFTISRDNAENSLYLQMNSLRVEDTAVYYCVRETAWSFDSWGQGTLVTVSS

SEQ ID NO: 18563 - protein, 95 aa, Homo sapiens
AAAGFTFGGYWMTWVRQAPGKGLECVAYIKSDGSAKYYVDSVKGRFTTSRDNAENSLYLQMNSLRVEDTAVYYCVRETAWSFDSWGQGTLVTVSS

SEQ ID NO: 18564 - protein, 95 aa, Homo sapiens
AAAGFTFGGYWMTWVRQAPGKGLECVAYIKSDGSAKYYVDSVKGRFTISRDNAENSVYLQMNSLRAEDTAVYYCVRETAWSFDSWGQGTLVTVSS

SEQ ID NO: 18565 - protein, 92 aa, Homo sapiens
VASGFTFSIDAMSWVRQAPGKGLEWVSAISGRDTNTYYADSVKGRFSISRDNSKNTLYLQMDSLRADDTAVYYCVKDQWDVWGKGTTVAVSS

SEQ ID NO: 18566 - protein, 92 aa, Homo sapiens
VASGFTFSINAMSWVRQAPGKGLEWVSAISGRDTNTYYADSVKGRFSISRDNSKNTLYLQMDSLRADDTAVYYCVKDQWDVWGKGTTVAVSS

SEQ ID NO: 18567 - protein, 92 aa, Homo sapiens
AASGFSFSGYFMSWVRQAPGKGLEWVSAISDSGDSTYYADSVKGRFTISRDNSRNTLYLQVSSLRAEDTAVYFCVKDQWDVWGKGTTVTVSS

SEQ ID NO: 18568 - protein, 92 aa, Homo sapiens
AASGFSFSGYFMSWVRQAPGKGLEWVSAISDSGDGTYYADSVKGRFTISRDNSRNTLYLQVSSLRAEDTAVYFCVKDQWDVWGKGTTVTVSS

SEQ ID NO: 18569 - protein, 92 aa, Homo sapiens
AASGFSFSGYFMSWVRQAPGKGLEWVSAISDSGDSTYYADSAKGRFTISRDNSRNTLYLQVSSLRAEDTAVYFCVKDQWDVWGKGTTVTVSS

SEQ ID NO: 18570 - protein, 92 aa, Homo sapiens
AASGFTFSGYTMGWVRQAPGKGLEWVSTISDSGSSTHYADSVEGRFTISRDNPKNTLYLQMNSLRGEDTAVYYCVKDQWDVWGQGTTVIVSS

SEQ ID NO: 18571 - protein, 97 aa, Homo sapiens
AASGLTFSDHFMNWVRQAPGKGLEWVGRSRNKENSYATEYAASVKGRFTISRDDSKNSVYLQMNSLKIEDTAVYHCARELDGVLDYWGQGTLVTVSS

SEQ ID NO: 18572 - protein, 97 aa, Homo sapiens
AASGLTFSDHFMNWVRQVPGKGLEWVGRSRSKRNNYSTEFAASVKGRFTISRDDSKNSVYLQMNSLKTEDTAVYYCARELDGVLDYWGQGTLVTVSS

SEQ ID NO: 18573 - protein, 97 aa, Homo sapiens
AASGLTFSDHFMNWVRQVPRKGLEWVGRSRSKRNNYSTEFAASVKGRFTISRDDSKNSVYLQMNSLKTEDTAVYYCARELDGVLDYWGQGTLVTVSS

SEQ ID NO: 18574 - protein, 97 aa, Homo sapiens; identical to SEQ ID NO: 18572

SEQ ID NO: 18575 - protein, 97 aa, Homo sapiens
AASGLTFSDHFMNWVRQVPGKGLEWVGRSRSKRNNYSTEFAASVKGRFTTSRDDSKNSVYLQMNSLKTEDTAVYYCARELDGVLDYWGQGTLVTVSS

SEQ ID NO: 18576 - protein, 97 aa, Homo sapiens
AASGLTFSDHFMNWVRQVPGKGLEWVGRSRSKTNAYTTEFAASVKGRFTISRDDSKNSVYLQMNSLKTEDTAVYHCARELDGVLDYWGQGTLVTVSS

SEQ ID NO: 18577 - protein, 97 aa, Homo sapiens
AASGLTFSDHFMNWVRQAPGKGLEWVGRGRNKANSYSTEYAASVKGRFTISRDDSENSVFLQMDSLRTGDTAVYYCARELDGVLDYWGQGAVVTVSS

SEQ ID NO: 18578 - protein, 97 aa, Homo sapiens
AASGLTFSDHFMNWVRQAPGKGLEWVARGRNKANSYSTEYAASVKGRFTISRDDSGNAVFLKMSSLRTEDTAVYYCARELDGVLDYWGQGTVVTVSS

SEQ ID NO: 18579 - protein, 103 aa, Homo sapiens
TVSGGSISNGDYHWGWIRQPPGKGLEWIGSIYYSGSTYYNPSLKSRVTISVDTSKNHFSLKLSSVTAADTAVYYCARNEVSASYYSTREFDCWGQGTLVTVSS

SEQ ID NO: 18580 - protein, 103 aa, Homo sapiens; identical to SEQ ID NO: 18579

SEQ ID NO: 18581 - protein, 95 aa, Homo sapiens
AASGFTFSGYWMHWVRQVPGKGLVWVSHIHSSGIYATYADSVKGRFIISRDNAKNTLYLQMNSLTAEDAAVYYCARGNFGGFDYWGQGALVTVSS

SEQ ID NO: 18582 - protein, 95 aa, Homo sapiens
EASAFTFRTYWMLWVRQAPGEGLVWVSLINPDGSTTGYADSVKGRFTISRDNAKNTLYLQMHSLRAEDTAIYYCARGNFGGFDYWGQGTVVTVSS

SEQ ID NO: 18583 - protein, 92 aa, Homo sapiens
AASGFTFSRYEMNWVRQAPGKGLEYISNINSDERIKNYADSVRGRFTISRDNGKSSLFLQMNSLRAEDTAVYYCTRGENGLWGRGTLVTVSS

SEQ ID NO: 18584 - protein, 92 aa, Homo sapiens
AASGFTFKSYQMNWVRQAPGKGLEWLSSISSDSGTKYYADSVEGRFTISRDNTKSSLYLQMNDLRAEDTGFYYCTRGENGLWGRGTLVTVSS

SEQ ID NO: 18585 - protein, 92 aa, Homo sapiens
AASGFTFSSYQMNWVRQAPGKGLEWVSYISSSSETIYYADSVNGRFTISRDNAKKSLYLQMNSLRAEDTAIYYCTRGENGLWGQGTLVTVSS

SEQ ID NO: 18586 - protein, 92 aa, Homo sapiens
AASGFTFSSYNMNWVRQAPGKGLEWVSYISSSSSTIYYADSVKGRFTISRDNAKNSLYLQMNSLRDEDTAVYYCTRGENGLWGQGTLVTVSS

SEQ ID NO: 18587 - protein, 99 aa, Homo sapiens
IVSGGSINSGSWSWGWIRLPPGKRLEWIGTFHSSGNTYYNPSLKSRVTISVDTSKNQFSLSLSSVTAADTAVYYCARLPTGHPNWFDPWGQGTLVTVSS

SEQ ID NO: 18588 - protein, 99 aa, Homo sapiens; identical to SEQ ID NO: 18587

SEQ ID NO: 18589 - protein, 99 aa, Homo sapiens
TVSGGSIDMTHYSWGWVRQPPGAGLEWIATIHQTGSTFYNPSLKSRVTISADTSQKHFSLNLISVTAADTALYYCARLPTGHPNWFDPWGQGTLVTVSS

SEQ ID NO: 18590 - protein, 96 aa, Homo sapiens
AVSGGALTDGYYCSWVRQPPGKGLEWIGEIYHTGTTIYNPSLKSRVILSLDKSKNSFSLQLSSVTAADTAIYYCATSSGWWRIDSWGQGSLVTVSS

SEQ ID NO: 18591 - protein, 96 aa, Homo sapiens
DVSGVSISSGYWCNWVRQSPGKGLEWIGEIHHSGGTNWNPSLKSRVTLSVDTSKNQFSLVLNSVTAADTAVYYCATSSGWWRIDSWGQGTLVTVSS

SEQ ID NO: 18592 - protein, 96 aa, Homo sapiens
AASGFTFSTYGMHWVRQAPGKGLEWVAVISYDGSNKYYADSVKGRLTISRDNSKNTLYLQMNSLRVEDTAVYYCAKMVPGNFFDSWGQGTLVTVSS

SEQ ID NO: 18593 - protein, 96 aa, Homo sapiens
AASGFTFSTYGMHWVRQAPGKGLEWVAVISYDGSNKYYADSVKGRLTISRDNSKNTLYLQLNSLRVEDTAVYYCAKMVPGNFFDSWGQGTLVTVSS

SEQ ID NO: 18594 - protein, 96 aa, Homo sapiens
AASGFTFSSYGMHWVRQAPGKGLEWVAVLSYDGSNKYYADSVKGRFTISRDNSKNTLYLQMNSLRFEDTAVYYCAKMVPGNFFDSWGQGALVTVSS

SEQ ID NO: 18595 - protein, 94 aa, Homo sapiens
AASGFTFTRYWMTWVRQAPGKGLEWVGNIKEDGSEKHYVDSVKGRFTMSRDNAKNSLYLQMNSLRAEDTAVYYCTRENWGPDYWGQGTLVTVSS

SEQ ID NO: 18596 - protein, 93 aa, Homo sapiens
ASGFPFNSYTLTWVRQAPGKGLEWVANMKEDGRTRNYADSVRGRFTIYRDSTKNSVYLQMNNLRAEDTATYYCTRENWGPDYWGQGTLVTVSS

SEQ ID NO: 18597 - protein, 93 aa, Homo sapiens
TVSGGSIRSYYWSWIRQPPGKGLEWIGYIYDSGSTKYNPSLKSRVTISMDTSKNRFSLKLNSVTAADTAVYYCATGSDWHYYWGQGTLVTVSS

SEQ ID NO: 18598 - protein, 93 aa, Homo sapiens
SVSGGSISSYYWSWIRQPPGKGLEWIGNMYYSGGTNYSPSLKSRVTISIDTSKNQFSLKLSSVTAADTAVYYCATGSDWHYYWGQGTLVAVSS

SEQ ID NO: 18599 - protein, 96 aa, Homo sapiens
AASGLTFSRSWMTWVRQAPGKGLEWVANINPGGDNLYYVDSVRGRFTISRDNTKNSLYLQMNSLRPEDSAVYYCARDPDHGAVDYWGQGTLVTVAS

SEQ ID NO: 18600 - protein, 96 aa, Homo sapiens
AVSGFTFSTSWMSWVRQAPGKGLEWVADMNPDGNAKVYVDSVRGRFIISRDNAKNSLYLQMNSLRAEDTAVYYCARDPDHGAVDYWGQGTLVTVSS

SEQ ID NO: 18601 - protein, 97 aa, Homo sapiens
AASEFTFSSNWMHWVRQAPGKGLVWVSGIKGDGSIRWYADSVKGRFTISRDNAKNTLYLQMNSLRAEDTAVYYCARDGVGPTPLDYWGQGALVTVSS

SEQ ID NO: 18602 - protein, 97 aa, Homo sapiens
AASGFTFSSNWMHWVRQAPGKGLVWVSRINTDGSSTSYADSVKGRFTISRDNAKNTLYLQMNSLRAEDTAVYYCARDGVGPTPLDYWGQGTLVTVSS

SEQ ID NO: 18603 - protein, 97 aa, Homo sapiens; identical to SEQ ID NO: 18602

SEQ ID NO: 18604 - protein, 96 aa, Homo sapiens
AVSGFTFSDHYMDWVRQAPGKGLEWVGRSRNKDHRYSTEYATSVKGRFTISRDVSRNSMYLQMNSLKTEDTAVYYCVRGHKSFDFWGQGTLVTVSS

SEQ ID NO: 18605 - protein, 96 aa, Homo sapiens
VVSGFTFSDHYMDWVRQAPGRGLEWVGRSSDKAHSYTTEYAASVKGRFAISRDDSKNSLYLQMNSLNTEDTAVYYCVRGHKSFDFWGQGTLVTVSS

SEQ ID NO: 18606 - protein, 96 aa, Homo sapiens; identical to SEQ ID NO: 18605

SEQ ID NO: 18607 - protein, 96 aa, Homo sapiens; identical to SEQ ID NO: 18605

SEQ ID NO: 18608 - protein, 96 aa, Homo sapiens; identical to SEQ ID NO: 18605

SEQ ID NO: 18609 - protein, 101 aa, Homo sapiens
KGSGYSFTSYWIGWVRQMPGKGLEWMGIICPGDSDTRYSPSFQGQVTISADKSISTAYLQWSSLKASDTAMYYCARHSQYYSDNSGYGDYWGQGTLVTVSS

SEQ ID NO: 18610 - protein, 101 aa, Homo sapiens; identical to SEQ ID NO: 18609

SEQ ID NO: 18611 - protein, 101 aa, Homo sapiens
KGSGYSFTSYWIGWVRQMPGKGLEWMGIICPGDSDTRYSPSFQDQVTISADKSISTAYLQWSSLKASDTAMYYCARHSQYYSDNSGYGDYWGQGTLVTVSS

SEQ ID NO: 18612 - protein, 93 aa, Homo sapiens
AAYGFTFSSYSMSWVRQAPGKGLEWVAHIGQDGIAKYYVDSVKGRFTVSRDNAQNSLYLQMNTLRDEDTAVYYCTTRAWLEFWGRGTRVSVSS

SEQ ID NO: 18613 - protein, 92 aa, Homo sapiens
GSGFTFNTYSMSWVRQAPGKGLEWVAHVRQDGIEKNYADAVKGRFTVSRDNAHNSLYLQMNSLRDEDTAVYYCTTRAWLEFWGPGTLVTVSS

SEQ ID NO: 18614 - protein, 93 aa, Homo sapiens
AASGVVFDTYWMSWVRQAPGKGLEWVANIKPDGNERNYADSVKGRFTISRDNAKNSLYLQMNSLRADDTAVYYCTTRAWLEFWGQGTPVTVSS

SEQ ID NO: 18615 - protein, 96 aa, Homo sapiens
VASGIPFSFSGMHWVRQAPGKGLEWVAMIWSDGSKEYYADSVKGRFTISRDNSKNTIYLQMNSLRADDTAIYYCARDKGTYYFDQWGQGTLVTVSS

SEQ ID NO: 18616 - protein, 96 aa, Homo sapiens
AASGIPFSRSGMHWVRQAPGKGLEWVAMIWSDGSIEYYADSVKGRFTTSRDNSKNTAYLQMNSLRAEDTAMYYCARDKGTYYFDQWGQGTLVTVSS

SEQ ID NO: 18617 - protein, 96 aa, Homo sapiens; identical to SEQ ID NO: 18615

SEQ ID NO: 18618 - protein, 96 aa, Homo sapiens
AASGIPFSSSGMHWVRQAPGKGLEWVAFIWSDGSDKYYVDSVKGRFTISRDNFRNTVYLQMNSLRAEDTAVYYCARDKGTYYFDQWGQGTLVTVSS

SEQ ID NO: 18619 - protein, 96 aa, Homo sapiens
AASGIPFSASGMHWVRQPPGKGLEWVTFIWSDGSQKYYADSVKGRFTISRDNSKNMVYLQMDSLRDDDTALYYCARDKGTYYFDQWGQGTQVTVSS

SEQ ID NO: 18620 - protein, 96 aa, Homo sapiens
AASGIPFSASGMHWVRQAPGKGLEWVALIWYDGTYKYYADSVKGRFIISRDNSKNTVYLQMNTLRDEDTAVYYCARDKGTYYFDQWGQGTLVTVSS

SEQ ID NO: 18621 - protein, 96 aa, Homo sapiens
AASGIPFSRSGMHWVRQAPGKGLEWVAMIWSDRSREYYADSVKGRFTISRDNSKNTVYLQMNSLRAEDTAVYYCARDKGTYYFDQWGQGTLVTVSS

SEQ ID NO: 18622 - protein, 95 aa, Homo sapiens
GSGYSFTNYWIGWVRQMPGKGLEWMGIIYPGDSDTRYSPSFQGQVTISADKFISTAYLQWSSLKPSDTAMYYCARRGDGSRFDPWGQGTLVTVSS

SEQ ID NO: 18623 - protein, 96 aa, Homo sapiens
KASGYSFTTYWIGWVRQMPGKGLEWMGIIYPGDSDTRYSPSFQGQVTISADKSISTAYLQWSSLKASDTAIYYCARRGDGSRFDPWGQGTLITVSS

SEQ ID NO: 18624 - protein, 93 aa, Homo sapiens
KGSGYSFSSYWIGWVRQMPGKGLEWMGIIYPGDSETRYSPSFQGQVTISADKSISTAFLQWSSLKASDTAMYYCARHDTFDIWGQGTMVTVSS

SEQ ID NO: 18625 - protein, 93 aa, Homo sapiens
KGSGYSFSSYWIGWVRQMPGRGLEWMGIIYPGDSETRYSPSFQGQVTFSVDKSISTAYLQWSSLKASDSAMYYCARHDTFDIWGQGTMVTVSS

SEQ ID NO: 18626 - protein, 93 aa, Homo sapiens
KGSGYNFSSYYIAWVRQMPGKGLEWMGIIYPGDSDTRYNPSFQGQVTISADKSISTAYLQWSSLKASDTAMYFCARHDTFDIWGQGTMVTVSS

SEQ ID NO: 18627 - protein, 95 aa, Homo sapiens
AASGFAFNTYAMHWVRLPPGKGLEWVAAISYDGRNKYYADSVKGRFTISRDDSKNTLYLQMNSLRADDTAVYYCAPSGSGDFDYWGQGTQVTVSS

SEQ ID NO: 18628 - protein, 95 aa, Homo sapiens
AASGFAFNTYAMHWVRQAPGKGLEWVTAISYDGRNKYYADSVKGRFAISRDDSKNTLYLQMNSLRVEDTAVYYCAPSGSGDFDYWGQGTQVTVSS

SEQ ID NO: 18629 - protein, 95 aa, Homo sapiens
AASGFTFNSYAMHWVRQGPGKGLEWVAAISYDGNNKYYADSVRGRFTISRDDSKNTLYLQMNSLRNEDTAVYYCAPSGSGDFDYWGQGTLVTVSS

SEQ ID NO: 18630 - protein, 95 aa, Homo sapiens
EAFGFIFSTYAMHWVRQGPGKGLEWVAAISYDGNDKYYADSVKGRFTISRDDSKNTLYLQMNSLRNEDTAVYYCAPSGSGDFDYWGQGTLVTVSS

SEQ ID NO: 18631 - protein, 93 aa, Homo sapiens
AASGFTFSSYWMFWVRQAPGKGLVWVSRISDDGSSTTYADSVKGRFTISRDNAKNTLYLQMNSLRAEDTAVYYCTRDYNMDVWGQGTTVTVSS

SEQ ID NO: 18632 - protein, 93 aa, Homo sapiens
AASGFTFSSYWMLWVRQAPGKGPVWVSHINTDGSRTSYADSVKGRFTISRDNAKNTLYLQMSSLRAEDTAVYYCTRDYNMDVWGQGTTVTVSS

SEQ ID NO: 18633 - protein, 95 aa, Homo sapiens
ASGYSFTSYFVHWMRQAPGQNIEWMGWINPAKGDTRYSQNLQDRITISSDTSARTIYMELRSLRSEDTAVYYCARGPSSGSFDFWGQGTLVTVSS

SEQ ID NO: 18634 - protein, 95 aa, Homo sapiens
ASGYTFTGYYLHWLRQAPGQTLEWMGWINTNKGNTRYAQNLQDRVTITRDTSASTTYMELRSLRSEDTAVYYCARGPSSGSFDFWGQGTLVTVSS

SEQ ID NO: 18635 - protein, 95 aa, Homo sapiens
ASGYTFTGYYLHWLRQAPGQTLEWMGWINTDKGNTRYAQNLQDRVTITRDTSASTTYMELRSLRSEDTAVYYCARGPSSGSFDFWGQGTLVTVSS

SEQ ID NO: 18636 - protein, 95 aa, Homo sapiens
ASGYTFTKYTMHWLRQAPGQTLEWMGWINPANGNTKYSQSFQGRVTNTRDTSASTLYMELSSLSSEDTAVYYCARGPSSGSFDFWGQGTLVTVSS

SEQ ID NO: 18637 - protein, 95 aa, Homo sapiens
ASGYTFTNYYLHWMRQAPGQSLEWLGWINPDKGNTRCSQSLQDRVTITSDTIASTTYMELRSLTSEDTAVYYCARGPSSGSFDFWGQGTLVTVSS

SEQ ID NO: 18638 - protein, 95 aa, Homo sapiens
ASGYSFTNYFLHWMRQAPGQSPEWIGWINTDKGNTRYSQNLQDRVTITRDTSASTTYMELSSLRSEDTAVYYCARGPSSGSFDFWGQGTLVTVSS

SEQ ID NO: 18639 - protein, 105 aa, Homo sapiens
TQTLTLTCTFSGFSLSTSEICVSWIRQPPGKAPEWLARIDWDDDKSYSTSLKTRLTISKDTSKNQVVLTMTNMDPVDTATYYCARTPHRREFDYWGKGTLVTVSS

SEQ ID NO: 18640 - protein, 105 aa, Homo sapiens
TQTLTLTCTFSGFSLTTSGLCVSWIRQPPGKALEWLALIDWDGDKFYNTSLKTRLTISRDTSKNQVVLTMTNMGPVDTATYYCARTPHRREFDYWGQGTLVTVSS

SEQ ID NO: 18641 - protein, 105 aa, Homo sapiens; identical to SEQ ID NO: 18640

SEQ ID NO: 18642 - protein, 99 aa, Homo sapiens
AASGFTFSSYTMHWVRQAPGKGLEWVAVISYDGSNKYYADSVKGRFTISRDNSKNTLYLQMNFLRAGDTAVYYCASPGGSGWSRPFDYWGQGTLVTVSS

SEQ ID NO: 18643 - protein, 99 aa, Homo sapiens
AASGFTFSSYTMHWVRQAPGRGPEWVAVMSYDGSRKYYADSVQGRFTISRDNSKNTLYLQMNNLRAEDTALYYCASPGGSGWSRPFDYWGQGTLVTVSS

SEQ ID NO: 18644 - protein, 99 aa, Homo sapiens; identical to SEQ ID NO: 18643

SEQ ID NO: 18645 - protein, 96 aa, Homo sapiens
AASGFTFSSYEMNWVRQAPGKGLEWISYISYSGSPKYYADSVKGRFTISRDNAKNSLYLQMNSLRDEDTAIYYCASQGRAARPGYWGQGTLVTVSS

SEQ ID NO: 18646 - protein, 96 aa, Homo sapiens
AASGFTFTNYEMNWVRQAPGKGLEWVSYISSSGSSIYYADSVKGRFTISRDNAKNSLYLQMNSLRVEDTAVYYCASQGRAARPGYWGQGTLVTVSS

SEQ ID NO: 18647 - protein, 101 aa, Homo sapiens
AASGFAFSDYYMTWIRQAPGKELEWVSYITRSGDTVFYTDSVKGRFTISRDNAKNSLYLEMNSLRADDTAVYRCARDKGNGGRTPDAFDLWGQGTMVTVSS

SEQ ID NO: 18648 - protein, 99 aa, Homo sapiens
AASGFTFRHHHMTWVRLAPGKGLEWVAHITESSTYYLDSLKGRFTISRDNAKNSLYLQLNSLRVDDTAVYFCARDKGNGGRTPDAFDLWGRGTAVTVSS

SEQ ID NO: 18649 - protein, 99 aa, Homo sapiens
AASGFTFRRHHMTWVRLAPGKGLEWVAHITDSSTYYLDSVKGRFTISRDDAKSSLYLQLNSLRVDDTAVYFCARDKGNGGRTPDAFDLWGRGTAVTVSS

SEQ ID NO: 18650 - protein, 93 aa, Homo sapiens
AASGFSFTTYWMIWVRQAPGKGLEWVASIKQEGIVQNFVDSVKGRFTMSRDNDRNSVSLQMNSLRVDDTAVYYCARGNPADYWGQGTLVIVSS

SEQ ID NO: 18651 - protein, 93 aa, Homo sapiens
AASGFTFTDYWMIWVRQAPGKGLEWVASIKQDGSEKSYVDSVKGRLTISRDNSKNSVYLQLNSLRAEDTAVFYCARGNPADYWGQGTLVTVSS

SEQ ID NO: 18652 - protein, 93 aa, Homo sapiens
AASGFTFTDYWMIWVRQAPGKGLEWVASIKQDGSEKSYVDSVKGRLTISRDNSKNSVYLQMNSLRAEDTAVFYCARGNPADYWGQGTLVTVSS

SEQ ID NO: 18653 - protein, 99 aa, Homo sapiens
VASGFMFSNYGMSWVRQAPGKGLEWVSGFKGTYGTTSYAESVKGRFTISRDNSRNTLYLQMNSLRADDTAVYYCAKGPYFGSGRGMDVWGQGTTVTVSS

SEQ ID NO: 18654 - protein, 99 aa, Homo sapiens
AASGFTFSSFAMSWVRQAPGKGLEWVSIINSVGSGTFYADSVKGRFTISRDDSKNTLYLQMNSLRAEDTAVYYCAKGPYFGSGRGMDVWGQGTTVTVSS

SEQ ID NO: 18655 - protein, 94 aa, Homo sapiens
SVAGGSISSDYWMWIRQPPGKGLEWIGYVYYSGNTNYHPSLRSRVSISVDRSKNQFSLSLHSVTAADTAVYYCARQISPYGLDVWGQGTTVIVS

SEQ ID NO: 18656 - protein, 93 aa, Homo sapiens
SVSSGSIRGDYWMWIRQAPGKGLEWVGYIYHNGATFYSPSLRGRLTMSIGASRNHFALTLTSVTVADTATYFCARQISPYGLDVWGPGTTVTV

SEQ ID NO: 18657 - protein, 95 aa, Homo sapiens
SVSGGSMSRDYWMWIRQSPGKGLEWIGYIYYSGTTNYAPSLRSRVTMFLDTSKSRFSLQLKSVTAADTGVYYCARQISPYGLDVWGPGATVSVYS

SEQ ID NO: 18658 - protein, 94 aa, Homo sapiens
SVSGGSITRDYWMWIRQTPGKGLEWIGYMYHNGGTFYSPSLRSRVSISKETSNNQFSLKLTSVTVADTAVYYCARQISPYGLDVWGQGTTVIVS

SEQ ID NO: 18659 - protein, 94 aa, Homo sapiens
SVSGGSMNRDYWMWIRQTPEKGLEWIGYMYHNGGTFYSPSLRSRVSFSKETSNNQFSLKLTSVTVADTAVYYCARQISPYGLDVWGQGTTVIVS

SEQ ID NO: 18660 - protein, 94 aa, Homo sapiens
AASEFSFNNYGMIWVRQVPGKGLEWVSAITKTSGTTYYADSVQGRFTISRDNSKNTMFLQMNSLRAEDTAVYYCARGLWGMDVWGPGTTVTVSS

SEQ ID NO: 18661 - protein, 94 aa, Homo sapiens
AASEFSFDNYGMIWVRQVPGKGLEWVSAITKTSGTTYYADSVQGRFTISRDNSKNTMFLQMNSLRAEDTAVYYCARGLWGMDVWGPGTTVTVSS

SEQ ID NO: 18662 - protein, 94 aa, Homo sapiens
AASGFTFSDFGMTWVRQAPGKGLEWVSGISRDGERTFYADSVRGRFTISRDNSKKTMFLQLNSLRAEDTAVYFCARGLWGMDVWGQGTTVSVSS

SEQ ID NO: 18663 - protein, 94 aa, Homo sapiens; identical to SEQ ID NO: 18662

SEQ ID NO: 18664 - protein, 94 aa, Homo sapiens
VASGFTFSDYGMTWVRQAPGKGLEWVSGISRDGERTYYADSVRGRFTISRDNSKKTIFVQLNSLRVEDTAVYFCARGLWGMDVWGQGTTVSVSS

SEQ ID NO: 18665 - protein, 94 aa, Homo sapiens
AASDFSFHNYGMIWVRQVPGKGLEWVSAITKTSDTTYYAASVQGRFTISRDNSQNTMFLQMNSLRVEDTAVYYCARGLWGMDVWGPGTTVIVSS

SEQ ID NO: 18666 - protein, 95 aa, Homo sapiens
ASGFALSDSHMHWVRQAPGKGLEWVGHTRSRPDPYAIAYGGSVQGRFTISRDDSQNTVYLQMNSLKAEDTAVYFCTRQTISCHDYWGQGTLVTVS

SEQ ID NO: 18667 - protein, 97 aa, Homo sapiens
AASGFTFSDSRIHWVRQAAGKGLEWVGRIENKGRSYATTYGASVEGRFTISRDDLKNTAYLQMNSLKSEDTAVYFCTRQTISCHDYWGQGTLVTVSS

SEQ ID NO: 18668 - protein, 95 aa, Homo sapiens
ASGFTLSDSHMHWVRQASGKGLEWVGHVRNRADSYATAYGASVRGRFTISRDESHNTVYLQMNSLKAEDSGMYFCTRQTISCHDYWGLGTRVTVS

SEQ ID NO: 18669 - protein, 95 aa, Homo sapiens
ASGFTLSDSHMHWVRQASGKGLEWVGHARSRTDNYATAYGASVQGRFTISRDESQNTVYLQMNSLKAEDTAVYFCTRQTISCHDYWGQGTLVTVS

SEQ ID NO: 18670 - protein, 95 aa, Homo sapiens
ASGFALSDSHMHWVRQAPGKGLEWVGHTRSRPDPYAIAYGGSVQGRFIISRDDSQNTVYLQMNSLKAEDTAVYFCTRQTISCHDYWGQGTLVTVS

SEQ ID NO: 18671 - protein, 95 aa, Homo sapiens; identical to SEQ ID NO: 18666

SEQ ID NO: 18672 - protein, 92 aa, Homo sapiens
AASGFTFSGFSMSWVRQAPGKGLEWVAKIKSDGSDKYYVDSVKGRFTISRDNAKNSLYLQMNSLRVEDSAVYYCARGHLAVWGRGTLVTVSS

SEQ ID NO: 18673 - protein, 92 aa, Homo sapiens
AASGFTFSNYWMSWVRQAPGKGLEWVANIKEDGSEEYYVDSVKGRFTISRDNAKNSLYLQMNSLRAEDTAVYYCARGHLAVGGQGTLVTVSS

SEQ ID NO: 18674 - protein, 92 aa, Homo sapiens; identical to SEQ ID NO: 18673

SEQ ID NO: 18675 - protein, 96 aa, Homo sapiens
TVSGGSISNYYWSWIRQSPGKGLEWIGYIKYSGTTNYNPSLKSRVTISLDTSKGHFSLNLSSVTAADTAVYYCARNVGGLRAFDIWGQGTLVTVSS

SEQ ID NO: 18676 - protein, 96 aa, Homo sapiens
TVSGGSISSYYWSWIRQPPGKGLEWIGYIYHSGSTNYNPSLKSRLTISVDTSKNQFSLKLSSMTAADTAVYFCARNVGGLRAFDIWGQGTMVTVSS

SEQ ID NO: 18677 - protein, 95 aa, Homo sapiens
AVSGDSISRNNWWSWVRQPPGKGLEWIGEFHHTGSTNYNPSLKSRVTISVDKSKNQFSLKLNFVTAADTAVYYCARHFDYSFDYWGQGTLVTVSS

SEQ ID NO: 18678 - protein, 94 aa, Homo sapiens
VSGASISSNNWWSWVRQPPGKGLEWIGEIYHAGITNSNPSLRSRVAISMDTSKNLFSLTLTSVTAADTALYYCARHFDYSFDYWGQGILVTVSS

SEQ ID NO: 18679 - protein, 96 aa, Homo sapiens
KGSGYSFSSHWIGWVRQMPGKGLEWMGIINPVDSDTRYSPSFQGQVTMSADKSINTAYLQWSSLKASDTAMFYCARQGGGAVSLDYWGQGTLVTVS

SEQ ID NO: 18680 - protein, 96 aa, Homo sapiens
VSGYSFTSHWIAWVRQMPGKGLEWMGIINPIDSDTRYSPSFRGQVTLSVDKSISTAYLQWSSLKASDTAMFYCARQGGGAVSLDYWGQGTLVTVSS

SEQ ID NO: 18681 - protein, 97 aa, Homo sapiens
KGSGYSFTSYWIGWVRQMPGKGLEWMGIINPGDSDTRYSPSFQGQVTISVDKSSSTAYLQWSSLKASDTGMYYCARQGGGAVSLDYWGQGILVTVSS

SEQ ID NO: 18682 - protein, 98 aa, Homo sapiens
ITSGFNFGDYAISWVRQAPGKGLEWVGFIRTRAYGGTTKYAASVIDRFTISRDDSKSSAYLQMNSLKTEDTAVYYCTRVFSWGASDYWGQGTLVTVSS

SEQ ID NO: 18683 - protein, 98 aa, Homo sapiens
ITSGFTFGDYAVSWVRQAPGKGLEWVGFIRTRPYGGTTQYAASVIGRFTISRDDSKSSAYLQMNSLKTEDTAVYYCTRVFSWGASDYWGQGTLVTVSS

SEQ ID NO: 18684 - protein, 97 aa, Homo sapiens
ASGFTFGDYAMSWVRQAPGKGLEWVGFIRTNGYGGTTHYAASVNGRFTISRDDSKSIVYLQMNSLKPEDTAVYYCTRVFSWGASDYWGQGNLVSVSS

SEQ ID NO: 18685 - protein, 97 aa, Homo sapiens
TVSGGSMSGYYWSWIRQPPGKGLEWMGFIYYSGNTNTNPSLGSRVTMSADMSKNQFSLKLNSVTAADTAVYYCARFSSGWWGYFDYWGQGTLVTVSS

SEQ ID NO: 18686 - protein, 97 aa, Homo sapiens
TVSGGSISGYYWSWIRQPPGKGLEWIGYIYYSGSTNYNPSLKSGVTISVDASKSQISLKLSSVTAVDTAVYYCARFSSGWWGYFDYWGRGALVTVSS

SEQ ID NO: 18687 - protein, 98 aa, Homo sapiens
ATSGFTFNSVWMSWVRQAPGKGLEFVGRIKKEVDGGPTNYAAPVKGRFTISRDDSRNTLFLQMNSLKTDDTAIYYCVAGLGKSDLDSWGQGTLVTVSS

SEQ ID NO: 18688 - protein, 98 aa, Homo sapiens
ATSGFTFNSVWMSWVRQAPGKGLEFVGRIKKEIDGGPTNYAAPVKGRFTISRDDSRNTLFLQMNSLKTDDTAIYYCVAGLGKSDLDSWGQGTLVTVSS

SEQ ID NO: 18689 - protein, 98 aa, Homo sapiens
ATSGFTFSNAWMSWVRQVPGKGLEWLGRIKRKSDGETIHYAAPVKGRFTISRDDSTNTLYLQMNSLKTEDRAVYYCVAGLGKSDLDSWGQGTLVIVSS

SEQ ID NO: 18690 - protein, 98 aa, Homo sapiens
ATSGFTFNNVWMSWVRQAPGKGLEFVGRIKKEIDGGPTDYAAPVKGRFTISRDDSRNTLFLQMNSLKTDDTAIYYCVAGLGKSDLDSWGQGTLVTVSS

SEQ ID NO: 18691 - protein, 103 aa, Homo sapiens
AASGFTFSSYAMSWVRQAPGEGLEWVSAISGSDGGTNYADSVKGRFTISRDNSKNTLYLQMNSLRAEDTAVYHCGKATHCSSISCSRGWFDPWGQGTLVIVSS

SEQ ID NO: 18692 - protein, 102 aa, Homo sapiens
ASGFTFSSYAMSWVRQAPGEGLEWVSAISGSDGGTNYADSVKGRFTISRDNSKNTLYLQMNSLRAEDTAVYHCGKATHCSSISCSRGWFDPWGQGTLVIVSS

SEQ ID NO: 18693 - protein, 103 aa, Homo sapiens
AASGFTFSSYAMSWVRQAPGEGLEWVSAMSGSDGGTSYADSVKGRFTISRDNSKNTLYLQMNSLRAEDTAVYHCGKATHCSSISCSRGWFDPWGQGTLVIVSS

SEQ ID NO: 18694 - protein, 103 aa, Homo sapiens; identical to SEQ ID NO: 18691

SEQ ID NO: 18695 - protein, 103 aa, Homo sapiens
AASGFTFSNYAMSWVRQAPGKGLEWVSVISGSGDSTYYADSVKGRFAISRDNSKNTLYLQMNSLKAEDTAMYYCGKATHCSSISCSRGWFDPWGPGTLVTVSS

SEQ ID NO: 18696 - protein, 103 aa, Homo sapiens; identical to SEQ ID NO: 18691

SEQ ID NO: 18697 - protein, 90 aa, Homo sapiens
VSGASVYNNYWSWARQSPGKGLEWIGYIHHTGTTNSNAALKSRVTLSMDPSKNQFFLSLTYVTAADTAVYYCARETFEIWGQGILVTVSS

SEQ ID NO: 18698 - protein, 91 aa, Homo sapiens
TVSGASVTTNYWSWVRQPPGKGLQWIGYIHYNGDTNYSPSLKGRVSFSLDASRNQFSLRLNSMTAADTAIYYCARETFEIWGQGIMVDVSS

SEQ ID NO: 18699 - protein, 91 aa, Homo sapiens
TVSGGSISSNYWSWVRQPPGKGLEWIGYIHDSGTTNYNPSLKSRVAMTMDTSNNQFSLILTSVTAADTAVYYCARETFEIWGQGTMVTVSS

SEQ ID NO: 18700 - protein, 90 aa, Homo sapiens
VSGLFFSSNWMDWVRQAPGKGLEWVANIKPDGSEKYYVDSVKGRFTISRDNAKDSLYLQINSLRAEDTAVYYCSPSLNYWGQGVLVTVSS

SEQ ID NO: 18701 - protein, 90 aa, Homo sapiens
VSGLFFSSNWMDWVRQAPGKGLEWVANIKPDGSEKYYVDSVKGRFTISRDNTKDSLYLQINSLRAEDTAVYYCSPSLNYWGQGILVTVSS

SEQ ID NO: 18702 - protein, 91 aa, Homo sapiens
VVSGLSFSDQWMDWVRQAPGKGLEWVANINQDGSDEHYVDSVKGRFTISRDNAKNSVFLQINTLRGDDTAVYYCSPSLNYWGQGTPVTVSS

SEQ ID NO: 18703 - protein, 91 aa, Homo sapiens
AVSGLSFREQWMDWVRQAPGKGLEWVANINKDGSVSHYVDSVRGRFRISRDNAKNSVFLEINTLRGEDTAVYYCSPSLNYWGQGTLVTVSS

SEQ ID NO: 18704 - protein, 91 aa, Homo sapiens
AASGLSFRDNWMDWVRQAPGKGLEWVANINPGGSDKNYVDSVKGRFIISRDNAKNSVFLQMDSLRREDTAMYFCSPSLNYWGQGILVTVSS

SEQ ID NO: 18705 - protein, 91 aa, Homo sapiens
AVSGLSFSDQWMDWVRQAPGKGLEWVANINQDGSDKHYVDSVKGRFSISRDNAKNSVFLEINTLRGEDTAVYYCSPSLNYWGQGTLVTVSS

SEQ ID NO: 18706 - protein, 96 aa, Homo sapiens
AASGFIFNNYWMSWVRQAPGKGLEWVAKIKPDETEKYYGNSVKGRFAISRDNAKNTLYLQINSLRDEDTATYFCVRTGMAHGGDYWGQGTLVAVSS

SEQ ID NO: 18707 - protein, 96 aa, Homo sapiens
AASGFIFNNYWMSWVRQAPGKGLEWVAKIKPDETEKYYGNSVKGRFTISRDNAKNSLYLQINSLRDEDTAVYFCVRTGMAHGGDYWGQGTLVAVSS

SEQ ID NO: 18708 - protein, 96 aa, Homo sapiens
AASGFTFSNYWMSWVRQAPGKGLEWLAKIKVDGSEKYYADSVKGRCTISRDNGRNSVYLEMNSPRDEDTAVYYCVRTGMAHGGDYWGQGTLVTVSS

SEQ ID NO: 18709 - protein, 96 aa, Homo sapiens
VASGFIFTNYWMSWVRQAPGKGLEWLAKIKVDGTEKYYADSVKGRCTISRDNDKNSLYLEMNSPRVEDTAVYYCVRTGMAHGGDYWGQGTLVTVSS

SEQ ID NO: 18710 - protein, 95 aa, Homo sapiens
ATSGFTFTDYDMNWVRQAPGKGLEWVSSTNVNSDAIAYADSVKGRFTISRDNSKASLFLQMNSLRAEDTAVYYCARDPNWAEGYWGQGTLVTVSS

SEQ ID NO: 18711 - protein, 95 aa, Homo sapiens
AASGFTFTDYDMNWVRQAPGKGLEWVSSTNVNSDAIAYADSVKGRFTISRDNSKASLFLQMNSLRAEDTAVYYCARDPNWAEGYWGQGTLVTVSS

SEQ ID NO: 18712 - protein, 95 aa, Homo sapiens; identical to SEQ ID NO: 18710

SEQ ID NO: 18713 - protein, 94 aa, Homo sapiens
AASGFTVNSLDMSWVRKAPGKGLEWVATLSRSGFSISYADSVRGRFTISRDNTENSVYLHMNSLRAEDTAVYYCARDPNWAEGYWGQGTRVTVS

SEQ ID NO: 18714 - protein, 97 aa, Homo sapiens
SVSGDSVSSDYWSWLRQPPGKGLEWIGFISYTGGTRYNPSLKSRVTTSVDTSKNQFSLKLTSMTAADTAVYYCAKGWYPGSFRFDYWGQGIQVTVSS

SEQ ID NO: 18715 - protein, 97 aa, Homo sapiens
TVSGDSVSNYYWSWLRQPPGKGLEWIGFISYTGGTRYNPSLKSRVTTSVDTAKNQFSLNLNSVTAADTAMYYCAKGWYPGSFRFDYWGQGTLVTVSS

SEQ ID NO: 18716 - protein, 97 aa, Homo sapiens
TVSDASISGYYWSWIRQPPGKGLEWIGFVHSSGGTRYNPSLESRATTSADTSKNQFSLRLSYVTAADTAIYYCAKGWYPGSFRFDYWGQGTLVTVSS

SEQ ID NO: 18717 - protein, 96 aa, Homo sapiens
VSGDSVSNSYWSWLRQPPGKGLEWIGFISYTGGTRYNPSLKSRVTISIDTSKNQFSLKLSSVIAADTAVYYCAKGWYPGSFRFDYWGQGTLVTVSS

SEQ ID NO: 18718 - protein, 96 aa, Homo sapiens; identical to SEQ ID NO: 18717

SEQ ID NO: 18719 - protein, 97 aa, Homo sapiens
TVSGDSVSNYYWSWLRQPPGKGLEWIGFISYTGGTRYNPSLKSRVTTSVDTSKNQFSLKLNSVSAADTAVYYCAKGWYPGSFRFDYWGQGALVTVSS

SEQ ID NO: 18720 - protein, 97 aa, Homo sapiens
TVSGDSVSNYYWSWLRQPPGEGLEWIGFISYTGGTRYNPSLKSRVTISIDTSNNHFSLRLSSVTAADTAVYYCAKGWYPGSFRFDYWGQGALVTVSS

SEQ ID NO: 18721 - protein, 97 aa, Homo sapiens
TVSGDSVSNSYWSWLRQPPGKGLEWIGFISYTGGTRYNPSLKSRVSISVDTSKNLFSLRLSSVTAADTAVYSCAKGWYPGSFRFDYWGQGRLVTVSS

SEQ ID NO: 18722 - protein, 100 aa, Homo sapiens
AASELTFSNAWMSWVRQAPGKGLEWVGRIKSRTDGGTTDYAAPVKGRFTISRDDSRNTLYLQMNSLKTEDTAVYYCTTFKVGATRVFDYWGQGTLVTVSS

SEQ ID NO: 18723 - protein, 100 aa, Homo sapiens
AASEFTFSNAWMSWVRQAPGKGLEWVGRIKSRTDGGTTDYAAPVKGRFTISRDDSRNTLYLQMNSLKTEDTAVYYCTTFKVGATRVFDYWGQGTLVTVSS

SEQ ID NO: 18724 - protein, 100 aa, Homo sapiens
AASELTFSNALMSWVRQAPGKGLEWVGRIKSRTDGGTTDYAAPVKGRFTISRDDSRNTLYLQMNSLKTEDTAVYYCTTFKVGATRVFDYWGQGTLVTVSS

SEQ ID NO: 18725 - protein, 99 aa, Homo sapiens
VASDLTVSDAWMNWVRQAPGKGLEWVGRIKSKADGGTRDYAAPVKGRFTISRDESRNTLYLQMSSLKTEDTGVYYCTTFKVGATRVFDYWGQGTLVTVS

SEQ ID NO: 18726 - protein, 100 aa, Homo sapiens
AASELTFSNAWMSWVRQAPGKGLEWVGRIKSRTDGGTTDYAAPVKGRFTISRDDSRNTLYLQMNSLKIEDTAVYYCTTFKVGATRVFDYWGQGTLVTVSS

SEQ ID NO: 18727 - protein, 100 aa, Homo sapiens; identical to SEQ ID NO: 18723

SEQ ID NO: 18728 - protein, 100 aa, Homo sapiens
VASDLTFSDAWMSWVRQAPGKGLEWVGRIKSKADGGTTDYAAPVKGRFTISRDESRNRLYLQMSSLKTEDTGVYYCTTFKVGATRVFDYWGQGTLVTVSS

SEQ ID NO: 18729 - protein, 100 aa, Homo sapiens
VASDLTFSDAWMNWVRQAPGKGLEWVGRIKSKADGGTRDYAAPVKGRFTISRDESRNTLYLQMSSLKTEDTGVYYCTTFKVGATRVFDYWGQGTLVTVSS

SEQ ID NO: 18730 - protein, 100 aa, Homo sapiens
VASDLTLNDAWMSWVRQAPGKGLEWVGRIKSKADGGTTDYAAPVKGRFTISRDESRNTLYLQMSSLKTEDTGVYYCTTFKVGATRVFDYWGQGTLVTVSS

SEQ ID NO: 18731 - protein, 100 aa, Homo sapiens
VASDLTLSDAWMSWVRQAPGKGLEWVGRIKSKADGGTTDYAAPVKGRFTISRDESRNTLYLQMSSLKSEDTGVYFCTTFKVGATRVFDYWGQGALVTVSS

SEQ ID NO: 18732 - protein, 100 aa, Homo sapiens
VTSDLTLSDAWMSWVRQAPGKGLEWVGRIKRKADGGTTDYAVPVKGRFTISRDESRNTLYLQMSSLKTEDTGVYYCTTFKVGATRVFDYWGQGTLVTVSS

SEQ ID NO: 18733 - protein, 100 aa, Homo sapiens
EASQFSFTNAWMNWVRQAPGKGLEWVGHIKSKPDGGTTDYAAPVKGRFTISRDESKNTLYLQMNSLKSEDTAVYYCTTFKVGATRVFDYWGQGTLVTVSS

SEQ ID NO: 18734 - protein, 100 aa, Homo sapiens
AASEFTFNNAWMNWVRQAPGKGLEWVGHIKSKTDGGTTDYASPVKGRFSISRDHSKNILYLQMNSLKTEDTAVYYCTTFKVGATRVFDYWGPGTLVTVSS

SEQ ID NO: 18735 - protein, 97 aa, Homo sapiens
TVSGVSISSSSYHWGWIRQPPGKGLEWIGSIYYGGTTYYKSSLKSRVTISVDTSKNQFSLKLSSVTASDTAVYYCARHVSHTASDYWGQGTLVTVSS

SEQ ID NO: 18736 - protein, 97 aa, Homo sapiens
TVSGVSVSSSSYYWAWIRQPPGKGLEWIGSIYYSGSTYYNPSLKSRVTISVDTSKNQLSLKLTSVTAADTAVYYCARHVSHTASDYWGQGTLVTVSS

SEQ ID NO: 18737 - protein, 97 aa, Homo sapiens
TVSGVSVSSSSYYWAWIRQPPGKGLEWLGSIYYSGSTYYNPSLKSRVTISVDTSRNQLSLKLTSVTAADTAIYYCARHVSHTASDYWGQGTLVTVSS

SEQ ID NO: 18738 - protein, 91 aa, Homo sapiens
AASGFTFINYRMYWVRQAPGEGLECLATINQDGSETSYVGSVKGRFTISRDNAKNSVYLQMDSLRVEDTAVYYCARPWDIWGQGTMVTVSS

SEQ ID NO: 18739 - protein, 91 aa, Homo sapiens
AASGFSFSNSWMSWVRQAPGKGLEWVANIQRNGNEIYYVDSVKGRFTISRDNAKNSLYLQMNSLRAEDTAVYYCARPWDIWGQGTMVTVSS

SEQ ID NO: 18740 - protein, 95 aa, Homo sapiens
AASGFSFSSFAMSWVRQAPGKGLEWVSTIAGSDGSTFYAVSVKGRFTISRDNSKNTLFLQMNSLRAEDTAMYYCARRGGYSFDSWGQGTLVTVSS

SEQ ID NO: 18741 - protein, 94 aa, Homo sapiens
ASGFTFSSNAMSWVRQAPGKGLEWVSVISSTALNTYYADSVKARFTISRDNSKNTLYLQMNSLRAEDTAVYYCARRGGYSFDSWGQGTLVTVSS

SEQ ID NO: 18742 - protein, 97 aa, Homo sapiens
AASGFTFSTYWMFWVRQTPGVGLQWVARIKGDGGDASYADSVKGRFSVSRDNAKNTLYLQLSILRVEDTAVYYCARDLPATGAFDIWGQGTVVTVSS

SEQ ID NO: 18743 - protein, 97 aa, Homo sapiens
AASGFTFTTYWMFWVRQAPGKGPQWVSRISGDGSSTTYADSVKGRFTISRDNAKNTLYLQINSLRAEDTAVYFCARDLPATGAFDIWGQGTVVTVSS

SEQ ID NO: 18744 - protein, 97 aa, Homo sapiens
AASGFTFSRFWMFWVRQVPGKSPVWVSRIGTDGISTTYADNVKGRFTISRDNAKNTLYLQMSSLTAADTGVYYCARDLPATGAFDIWGQGTMVTVSS

SEQ ID NO: 18745 - protein, 97 aa, Homo sapiens
AASGFTFSSYWMFWVRQVPGKRLVWVSRIKTDGSATTYADAVKGRFTISRDNAKNTLYLQMNSLRAEDTAVYYCARDLPATGAFDIWGQGTVVTVSS

SEQ ID NO: 18746 - protein, 97 aa, Homo sapiens
VASGFTFSSYWMFWVRQVSGKGLVWVSRIRTDGRVTTYADSVKGRFTISRDNAKNTLYLQMNSLRADDTGLYYCARDLPATGAFDIWGQGTEVTVSS

SEQ ID NO: 18747 - protein, 97 aa, Homo sapiens
AASGFTFSNYWMFWVRQVPGEAPVWVSRIQGDGSRTGYADSVKGRFTISRDNAKNTLYLQMNSLRAEDTAVYYCARDLPATGAFDIWGQGTMVTVSS

SEQ ID NO: 18748 - protein, 97 aa, Homo sapiens
AASGFSFRSYWMFWVRQAPGTGLEWVSRISPDGFTTNYGDSVEGRFTMSRDNAKNTLYLQMNSLRGDDMALYYCARDLPATGAFDIWGQGTLVTVSS

SEQ ID NO: 18749 - protein, 97 aa, Homo sapiens
AASGFTFSTYWMFWVRQSPGVGLQWVARISGDGSSASYADSVKGRFSVSRDNAKNTLYLQISILRVEDTAVYYCARDLPATGAFDIWGQGTVVTVSS

SEQ ID NO: 18750 - protein, 97 aa, Homo sapiens; identical to SEQ ID NO: 18744

SEQ ID NO: 18751 - protein, 97 aa, Homo sapiens
AASGFAFSNFWMFWVRQAPGKGLEWVSRIKTDGSETTYADTVKGRFTISRDNTKNTLYLRMSRLTAEDTALYYCARDLPATGAFDIWGQGTMVTVSS

SEQ ID NO: 18752 - protein, 96 aa, Homo sapiens
ASGFTFGDYAMSWFRQAPGKSPVWVSRIGTDGISTTYADNVKGRFTISRDNAKNTLYLQMSSLTAADTGVYYCARDLPATGAFDIWGQGTMVTVSS

SEQ ID NO: 18753 - protein, 97 aa, Homo sapiens; identical to SEQ ID NO: 18743

SEQ ID NO: 18754 - protein, 98 aa, Homo sapiens
AASGFTFRDFYMSWIRQAPGKGLEWVSYISTTDNIIYYADSVKGRFTISRDNAKNSLYLQMNSLRAEDTAVYYCAREGYSYGYGFDYWGQGTLVTVSS

SEQ ID NO: 18755 - protein, 98 aa, Homo sapiens
AASGFTFTDFYMSWFRQAPGKGLEWVSYISSSGSTISYADSVKGRFTISRDNAKNSVHLQMNSLRAEDTALYYCAREGYSYGYGFDYWGQGTLVTVSS

SEQ ID NO: 18756 - protein, 100 aa, Homo sapiens
EASGFTFRNYAMSWVRQAPGKGLEWVSAISGSGVASNYADSVKGRLVISRDFSTNTLYLQMNSLRAEDTAVYYCARSRIEALGTGAFDMWGRGTMVTVSS

SEQ ID NO: 18757 - protein, 100 aa, Homo sapiens
AAPGFTFSTYPLSWVRQGPGKGLEWVSTIRDPDHKTYYADSVKGRFTISGDSSKTTIYLQMSSLRAEDSAMYYCARSRIEALGTGAFDMWGRGTMVTVSS

SEQ ID NO: 18758 - protein, 99 aa, Homo sapiens
TVSGGSISSSAYYWGWIRQPPGKGLEWLGSKSYSGSTYYKPSLKSRVTISIDMSKNQFSLKVNSVTAADTAVYYCARLRDGSGSYSDYWGQGTLVTVSS

SEQ ID NO: 18759 - protein, 99 aa, Homo sapiens
SVSGGSISSSSYYWGWIRQPPGKGLEWIGSRHYSGSTYYNPSLKSRVTISVDTSKNQLSLKLRSVTAADTAVYYCARLRDGSGSYSDYWGQGTLVTVSS

SEQ ID NO: 18760 - protein, 99 aa, Homo sapiens
AVYGGSFSGYYWSWIRQPPGKGLEWIGEINHSGSTKYNPSLKSRVTISVDTSKNQFSLKLSSVTAADTAMYYCARGGGCSGGGCYGDSWGQGTLVTVSS

SEQ ID NO: 18761 - protein, 99 aa, Homo sapiens
AVYGGSFSGYYWSWIRQPPGKGLEWIGEITHGGSTNYNPSLKSRVIISVDTSKNQFSLRLSSMTAADTAVYYCARGGGCSGGGCYGDSWSQGTLVTVSS

SEQ ID NO: 18762 - protein, 99 aa, Homo sapiens
AVYGGSFSGYYWSWIRQPPGKGLEWIGEITHGGSTNYNPSLKSRVIISVDTSKNQFSLRLSSVTAADTAVYYCARGGGCSGGGCYGDSWSQGTLVTVSS

SEQ ID NO: 18763 - protein, 99 aa, Homo sapiens; identical to SEQ ID NO: 18761

SEQ ID NO: 18764 - protein, 95 aa, Homo sapiens
AASGFTFRTYWMTWVRQAPGKGLEWVANIGPDGSQKHYVDSVKGRFSFSRDNAKNLVYLQMNSLRAEDAAVYYCATSRDWAFDYWGQGILVTVSS

SEQ ID NO: 18765 - protein, 95 aa, Homo sapiens
AASGFTFRSVWMTWARQAPGKGLEWVANINPDGSVQQYVDSVKGRFTISKDSAKNSLYLQMNSLRPEDTAFYYCATSRDWAFDYWGQGTLVTVSS

SEQ ID NO: 18766 - protein, 93 aa, Homo sapiens
AASGFTFSSYEMNWVRQAPGKGLEWLSYISSSGSTIYYADSVKGRFTISRDNAKNSLYLQMKSLRGEDTAVYYCARGGWLDPWGQGTLVTVSS

SEQ ID NO: 18767 - protein, 93 aa, Homo sapiens
AASGFTFSTYSMNWVRQAPGKGLEWISYISSDTSTTYYADSVKGRFTIYRDNAKNSLSLHMNSLRDEDTAVYYCARGGWLDPWGQGTLVTVSS

SEQ ID NO: 18768 - protein, 101 aa, Homo sapiens
AASGFTLSSYWMSWVRQAPGKGLEWVANIKQDGSEENYVDSVKGRFTISRDNARNSVFLQLNSLRVEDTAVYYCARDGRGAAGPYNLFDPWGQGTLVTVSS

SEQ ID NO: 18769 - protein, 101 aa, Homo sapiens
VGSGFTFSGYWMSWVRQAPGKRLEWVANIKQDGSEIYYLDSVKGRFTISRDNAENSLYLQMNSLRAEDTAIYHCARDGRGAAGPYNLFDPWGQGTLVTVSS

SEQ ID NO: 18770 - protein, 92 aa, Homo sapiens
DSGFTFSTYWMNWVRQAPGKGLEWVANIKQDGSEKYYVDSVKGRFTISRDNAKNSLYLQMNSLRADDTAVYYCARGGAMDVWGQGTTVTVSS

SEQ ID NO: 18771 - protein, 93 aa, Homo sapiens
AASGLTFSTSWMTWVRQAPGKGLEWVANIKQDGSEKYYVDSVKGRFTISRDNAKNSLYLQMNSLRAEDTAVYYCARGGAMDVWGKGTTVTVSS

SEQ ID NO: 18772 - protein, 93 aa, Homo sapiens
ASSGFRFSIFWMTWVRQAPGKGLEWVANIKEDGSEKYYVDSVKGRFTISRDNAKNSLDLQMDSLRAEDTAVYYCARGGAMDVWGQGTTVTVTS

SEQ ID NO: 18773 - protein, 95 aa, Homo sapiens
EASGFTFSRSWMSWVRQAPGKGLEWLANIKEDGSEKNYVDSVEGRFTISRDNAKNSLYMQMNSLRAEDTAVYYCARAYSSSWDSWGQGTLVTVSS

SEQ ID NO: 18774 - protein, 95 aa, Homo sapiens
AASGFTFSNYWMSWVRQAPGKGLEWVANIQREGSEKYHADFVKGRFTISRDNAKNSLYLQMNSLRVEDTAVYFCARAYSSSWDSWGQGTLVTVSS

SEQ ID NO: 18775 - protein, 96 aa, Homo sapiens
TTSGFTFVDYAMSWVRQAPGKGLEWVGFIRSKAYGGTTEYAPPVKGRFTISRDDPKSVLYLQMSSLLTADTAVYYCVRGVREVPYWGQGTLVTVSS

SEQ ID NO: 18776 - protein, 96 aa, Homo sapiens
TTSGFTFGDYAMTWVRQAPGKGLEWVGFIRSNAYGGTTEYAAPVKGRFTISRDDPKSIAYLQMNSLQTEDTAVYYCVRGVREVPYWGQGTLVTVSS

SEQ ID NO: 18777 - protein, 96 aa, Homo sapiens
TTSGFSFVDYAMSWVRQAPGKGLEWVGFIRSRAYGGTTEYAAPVRGRFTISRDDSKSIVYLQMNNLQIEDTAVYYCVRGVREVPYWGQGILVTVSS

SEQ ID NO: 18778 - protein, 96 aa, Homo sapiens
TTSGFTFVDYAMSWVRQAPGKGLEWVGFIRSKAYGGTTEYAASVRGRFTISRDDSKSTLYLQMDSLKTEDTAFYYCVRGVREVPYWGQGTLVTVSS

SEQ ID NO: 18779 - protein, 96 aa, Homo sapiens
TTSGFTFVDYAMSWVRQAPGKGLAWVGFIRSKTYGGTTEYAASVKGRFTISRDDSKSILYLQMNSLKSDDTAVYYCVRGVREVPYWGQGTLVTVSS

SEQ ID NO: 18780 - protein, 93 aa, Homo sapiens
AASGFTLSAYSMHWVRQAPGKGLVWVTRIKSDGRTISYADSVKGRFTISRDDAKNTLYLQMNSLRAEDTAVYYCARELASGYWGHGTLVTVSS

SEQ ID NO: 18781 - protein, 93 aa, Homo sapiens
AASGFIFSRYLMHWVRQPPGKGLVWVSRVTSDGGSTCYADSVKGRFTISRDNAKNTLYLQMNSLRAEDTAVYYCARELASGYWGHGTLVTVSS

SEQ ID NO: 18782 - protein, 93 aa, Homo sapiens
AVSGFTFNNYWMHWVRQAPGKGLVWVSRIKSDGSITNYADSVKGRFTVSRDNAKNTLYLQMNSLRAEDTAVYYCARELASGYWGQGTLVTVSS

SEQ ID NO: 18783 - protein, 96 aa, Homo sapiens
AASGFTFSTYAIHWVRQAPGKGLEWVAVISYDGNNKFYANSVKGRFTVSRDNSRNTLYLQMNSLRAEDTAIYYCTRGPAGSFYDYWGQGTLVTVSS

SEQ ID NO: 18784 - protein, 96 aa, Homo sapiens
AASGFSFSTYAIHWVRQAPGKGLEWVGVISKDGSNKFYADSVKGRFTISRDNSKNTVYLQMDSLRTEDTAVYHCTRGPAGSFYDYWGQGSLVTVSS

SEQ ID NO: 18785 - protein, 93 aa, Homo sapiens
KGSGYSFTSYWIGWVRQMPGKGLEWMGMIYPGDSETRYSPSFQGQVTISVDKSFSTAYLQWSSLKASDTAIYYCARHDTFDMWGQGTMVTVSS

SEQ ID NO: 18786 - protein, 93 aa, Homo sapiens
KGSGYSFSSYWIGWVRQMPGKGLEWMGIIYPGDSDTRYSPSFQGQVTISVDKSISTAYLQWSSLKASDTAMYYCARHDTFDMWGQGTMVTVSS

SEQ ID NO: 18787 - protein, 94 aa, Homo sapiens
SGYTFTNYGISWVRQAPGQGLEWMGWISAYNGNTNYVQKFHGRVTMTTETSTRTAYMELRSLTSDDTAVYYCATFTYYSGCDYWGQGTLVTVSS

SEQ ID NO: 18788 - protein, 95 aa, Homo sapiens
ASGYTFTTYEISWVRQAPGQGLEWMGWISAYNGNTNYAQKFHGRVTMTTDTPTSTAYMELRNLRSDDTAVYYCATFTYYSGCDYWGQGTLVTVSS

SEQ ID NO: 18789 - protein, 95 aa, Homo sapiens
ASGYTFTNYGISWVRQAPGQGLEWMGWISAYNGNTNYAQKFYGRVTMTTDTPTSTAYMELRNLRSDDTAVYYCATFTYYSGCDYWGQGSLVTVSS

SEQ ID NO: 18790 - protein, 96 aa, Homo sapiens
ASGYTCTTYAMHWVRQAPGQRLEWMGWINAGNGNTKYSQKFQGRVTITRDTSASTAYMELSSLRSEDTAVYYCARGRSGSYSVDYWGQGTLVTVSS

SEQ ID NO: 18791 - protein, 96 aa, Homo sapiens
ASGYIFTYYAMHWVRQAPGQRLEWMGWINAANGNTKYSPKFQDRVTFTRDTSASTAYMEVSSLRSEDTAVYHCARGRSGSYSVDYWGQGTLVTVSS

SEQ ID NO: 18792 - protein, 93 aa, Homo sapiens
AASGFNFRTSWMSWVRQAPGKGLEGVANIKEDGSEKNYVDSVKGRFTISRDNAKNSLYLQMNSLRVEDTAVYYCARIRGLDSWGQGILVTVSS

SEQ ID NO: 18793 - protein, 93 aa, Homo sapiens
AASGFTFSSFWMSWVRQAPGKGLEWVANINQDGSEKYYVDSVKGRFTISRDNAKNSLYLQMNSLRAEDTAVYYCARIRGLDSWGQGTLVTVSS

SEQ ID NO: 18794 - protein, 99 aa, Homo sapiens
SVSGDSISSSRYFWGWVRQPPGMGLEWIGVIYYDGTTYYNPSLKSRVTMSVDTSKNQFSLKLNSVTAADTALYYCARPLVRGGKDAFDIWGQGTMVTVS

SEQ ID NO: 18795 - protein, 100 aa, Homo sapiens
TVSGGAISGSGYNWGWVRQPPGEGLEWIGYIHYSGKTNYNPSLKSRVTMSVDTSKNRFSLNLSSVTAADTAVYYCARPLVRGGKDAFDIWGQGTMVTVSS

SEQ ID NO: 18796 - protein, 99 aa, Homo sapiens
SVSGDSISRSRYYWGWVRQPPGMGLEWIGVIYYDGTTYYNPSLKSRVTMSVDTSKNQFSLKLNSVTAADTALYYCARPLVRGGKDAFDIWGQGTMVTVS

SEQ ID NO: 18797 - protein, 97 aa, Homo sapiens
AASGFTFDDSAMHWVRLAPGKGLEWVSSISWDSGSIGYADSVKGRFTISRDSAKNSLYLQMNSLRPEDTALYYCAKGIAVAGTFDYWGQGTLVTVSS

SEQ ID NO: 18798 - protein, 97 aa, Homo sapiens
AASGFTFDDSAMHWVRLTPGKGLEWVSSISWDSGSIGYADSVKGRFTISRDSAKNSLYLQMNSLRPEDTALYYCAKGIAVAGTFDYWGQGTLVTVSS

SEQ ID NO: 18799 - protein, 97 aa, Homo sapiens; identical to SEQ ID NO: 18797

SEQ ID NO: 18800 - protein, 97 aa, Homo sapiens
AASGFIFDDSAMHWVRLAPGKGLEWVSSISWDSGSIGYADSVKGRFIISRDSAKNSLYLQMNSLRPEDTALYYCAKGIAVAGTFDYWGQGTLVTVSS

SEQ ID NO: 18801 - protein, 97 aa, Homo sapiens
AASGFTFGDYAMHWVRQAPGKGLEWVSGISWNSGSIGYADSVKGRFTISRDNAKNSLYLQMNSLRAEDTALYYCAKGIAVAGTFDYWGQGTLVTVSS

SEQ ID NO: 18802 - protein, 93 aa, Homo sapiens
AASGFTIRNNHMSWVRQAQGKGLEWVSSIYGRDESASYADSVKGRFTISRDYSKNTLHLQMNSLRAEDTALYYCTGHGGYSYCGQGTLVTVSS

SEQ ID NO: 18803 - protein, 92 aa, Homo sapiens
AASGFTLYNNAMTWVRQAPGKGLQWVSDIRGEGATHYADSVRGRFTISRDDSMNMVYLQMNSLRAEDTALYYCTGHGGYSYWGHGTLVTVSS

SEQ ID NO: 18804 - protein, 94 aa, Homo sapiens
ASGFTFSSHWMHWVRQAPGKGLVWVSRINEDGRTTTYVDSVKGRFTISRDNAKNTLYLQMISLRVEDTAVYYCARGGDGRFDPWGQGTLVTVSS

SEQ ID NO: 18805 - protein, 95 aa, Homo sapiens
AASGFTFSVYWMHWVRQAPGKGLVWVSRINSDGGSTSYADSVKGRFTISRDNGKNTLYLQMNSLRADDTAVYYCARGGDGRFDPWGQGTLVTVSS

SEQ ID NO: 18806 - protein, 93 aa, Homo sapiens
AASGFNFRTSWMSWVRQAPGKGLEGVANIKEDGSEKNYVDSVKGRFTISRDNAKNSLYLQMNSLRVEDTAVYYCARVRGFDSWGQGILVTVSS

SEQ ID NO: 18807 - protein, 93 aa, Homo sapiens
AASGFTFSGYWMNWVRQAPGKGLEWVANIKQDGSEKYYVDSVKGRFTISRDNAKNSLYLQMNSLRAEDTAVYYCARVRGFDSWGQGTLVTVSS

SEQ ID NO: 18808 - protein, 105 aa, Homo sapiens
AASGFTFSDFHMDWVRQVPGKGLEWVGRSRKKSHGHTTTYAASVKGRFTFSRNDVEMSVYLQMNSLKTEDTALYYCVRAGYYDSRDYSTNGFDIWGQGTLVTVSS

SEQ ID NO: 18809 - protein, 105 aa, Homo sapiens
AASGFTFSDYHIDWVRQAPGKGLEWVGRIRKRGHGHTTTYAASVEGRFILSREDSRNSLYLQMNSLKTEDTALYYCVRAGYYDSRDYSTNGFDIWGHGTMVTVSS

SEQ ID NO: 18810 - protein, 105 aa, Homo sapiens
AASGFSFSDYHMDWVRQAPGKGLEWVGRSRKKAHGYTTEYAASVKGRFTLSRNDVEMSVYLQMNSLKTEDTALYYCVRAGYYDSRDYSTNGFDIWGQGTMVTVSS

SEQ ID NO: 18811 - protein, 105 aa, Homo sapiens; identical to SEQ ID NO: 18810

SEQ ID NO: 18812 - protein, 105 aa, Homo sapiens
AASGFSFSDYHMDWVRQAPGKGLEWVGRSRKKAHGYTTEYAASVKGRFTLSRNDEEMSVYLQMNSLKTEDTALYYCVRAGYYDSRDYSTNGFDIWGQGTMVTVSS

SEQ ID NO: 18813 - protein, 96 aa, Homo sapiens
TVSGGSISNYYWSWIRQPPGKGLEWIGYMYSSGSTNYNPSLKSRVSISVDTSKNQFSLKLSSVTTADTAVYYCARAGGWVGYMDVWGKGTTVTVSS

SEQ ID NO: 18814 - protein, 96 aa, Homo sapiens
TVSRGSISSYYWSWIRQPPGKGLEWIGYIYYSGSTNYNPSLKSRVTISVDTSKNQFSLKLSSVTAADTAVYYCARAGGWVGYMDVWGKGTTVTVSS

SEQ ID NO: 18815 - protein, 96 aa, Homo sapiens
TVSRGSISSYYWSWIRQPPGKGLEWIGYIYYSGSTNYNPSLKSRVTISVDTPKNQFSLKLSSVTAADTAVYYCARAGGWVGYMDVWGKGTTVTVSS

SEQ ID NO: 18816 - protein, 95 aa, Homo sapiens
ASGYTFTNYAISWVRQSPGQGLEWMGWISGYNGNTKYAPNLQGRVTMTADTSTSTAYMELRSLRSDDTAVYSCARDWGNYGLDVWGQGTTVTVSS

SEQ ID NO: 18817 - protein, 95 aa, Homo sapiens
ASGYTFTDFGFSWVRQAPGQGLEWMGWISAYNGNTKYAQKFQGRVTMTTDTSTSTAHMELRSLKSGDMAVYYCARDWGNYGLDVWGQGTTVTVSS

SEQ ID NO: 18818 - protein, 95 aa, Homo sapiens
ASGYTFTDYAFSWVRQAPGQGLEWMGWISGYNGNTKYAQKFQGRVTMTTDTSTSTAYMELRSLKSGDTAVYYCARDWGNYGLDVWGQGTTVTVSS

SEQ ID NO: 18819 - protein, 99 aa, Homo sapiens
AASGFPFKDYEMAWVRQAPGKGLEWVSYISSSGSNIYYADSVKGRFTISRDNTKKSVFLQMNRLRGDDGGIYYCAREDWNHFYHHMDVWGRGTTVVVSS

SEQ ID NO: 18820 - protein, 99 aa, Homo sapiens
AASGFPFKDYEMAWVRQAPGKGLEWVSYISSSGSNIYYADSVKGRFTISRDNTKNSVFLQMNRLSGDDAGVYYCAREDWNHFYHHMDVWGRGTTVVVSS

SEQ ID NO: 18821 - protein, 99 aa, Homo sapiens; identical to SEQ ID NO: 18820

SEQ ID NO: 18822 - protein, 99 aa, Homo sapiens
VGSGFPLSKYEVSWVRQAPGKGLEWLSYISSSGSNRNYADFLKGRFTVSRDNTKNSVYLQMNSLRVEDTGLYYCAREDWNHFYHHMDVWGKGTTVIVSS

SEQ ID NO: 18823 - protein, 94 aa, Homo sapiens
ASGYTFTSYAMHWVRQAPGQRLEWMGWINVGNGNTKYSQKFQGRVTITRDTSASTASMELSSLRSEDTAVYYCARGSAAGIDYWGQGTLVTVSS

SEQ ID NO: 18824 - protein, 94 aa, Homo sapiens
ASGYTFTNYAMHWVRQAPGQRLEWMGWINAGNGNTKYSQKFQGRVTITRDTSASTAYMELSSLRSEDTAVYYCARGSAAGIDYWGQGTLVTVSS

SEQ ID NO: 18825 - protein, 96 aa, Homo sapiens
AASGFTFWNYAMTWVRQAPGKGLEWVSVITGSGGNTYYADSVKGRFTISRDNSNNIFYLEMNSLRAEDTAVYYCAKDELPYGMDVWGQGTTVTVSS

SEQ ID NO: 18826 - protein, 95 aa, Homo sapiens
AASGFTFSPYAMTWVRQAPEKGLEWVSALSGSGTYTYYADSVQGRFIISRDNSKNTLYLQMNSLRADDTAVYFCAKDELPYGMDVWGQGTTVTVS

SEQ ID NO: 18827 - protein, 96 aa, Homo sapiens
EASGFTFHNYAMIWVRQAPGKGPEWVSAISGSGAYTYHADAVKGRFTISRDNSKNTLYLQMNSLRADDTAIYYCAKDELPYGMDVWGQGTTVTISS

SEQ ID NO: 18828 - protein, 96 aa, Homo sapiens; identical to SEQ ID NO: 18825

SEQ ID NO: 18829 - protein, 96 aa, Homo sapiens
AASGFTFSNYAMIWVRQGPGKGPEWVSAISGSGDYTYYADSVKGRFTISRDNSKNTLYLQMNSLRVEDTAVYFCAKDELPYGMDVWGQGTTVTVSS

SEQ ID NO: 18830 - protein, 98 aa, Homo sapiens
AASGFAFSDYYMTWIRQAPGRGPEWIAHISASGTSMFHANSVAGRFTISRDNAKKSLYLQMNSLRDDDTAVYYCARGGRGTSFYWEYWGQGTLVAMSS

SEQ ID NO: 18831 - protein, 97 aa, Homo sapiens
AASGFTFSAYYMTWLRQAPGKGPEWLAHIGGGGYTNYAASVQGRFLVSRDNAKNLLNLEMSSLRDEDTAVYYCARGGRGTSFYWEYWGLGTLVTVSS

SEQ ID NO: 18832 - protein, 97 aa, Homo sapiens
AASGFTFSAYYMTWLRQAPGKGPEWLAHIGGGGYTNYAASVQDRFLVSRDNAKNLLNLEMSSLRDEDTAVYYCARGGRGTSFYWEYWGLGTLVTVSS

SEQ ID NO: 18833 - protein, 96 aa, Homo sapiens
EASGFTVSSNYMSWVRQAPGKGLEWVSVIYHNGGTSYADSVKGRFTISRHISNNTVYLQLNSLTPEDTAVYYCARDNRFYWYFDLWGRGTLVTVSS

SEQ ID NO: 18834 - protein, 96 aa, Homo sapiens
AASGFTVSSNYMSWVRQAPGKGLEWVSVIYVGGATFYADSVKGRFTISSDNAKNTVFLQMNSLRADDTAVYYCARDNRFYWYFDLWGRGTPVTVSS

SEQ ID NO: 18835 - protein, 96 aa, Homo sapiens
AASGFTVSSNYMNWVRQAPGKGLEWVSVIYTNGVTFYSDSVKGRFTISRDISKNTVFLQMNSLRAEDTAVYFCARDNRFYWYFDLWGRGTLVAVSS

SEQ ID NO: 18836 - protein, 96 aa, Homo sapiens
AASGFTVSSNYMTWVRQAPGKGLEWVSVIYSNGHTYYADPVKGRFTISRDNSKNTLYLQMNSLTAEDTAVYYCARDNRFYWYFDLWGRGTLVTVSS

SEQ ID NO: 18837 - protein, 98 aa, Homo sapiens
SVSDGSISSGGYSWSWIRQHPGKGLEWIGYIYYSGSTYYNPSLKSRVAISVDTSKNQFSLKLRSVTAADTAVYYCARDLSGYAHFDYWGQGTLVTVSS

SEQ ID NO: 18838 - protein, 98 aa, Homo sapiens
TVSGGSISSGGYYWSWIRHLPGEGLEWIGYTYYSGSTYYNPSLKSRVTISVDTSKNQFSLKLSSVTAADTAVYFCARDLSGYAHFDYWGQGTLVTVSS

SEQ ID NO: 18839 - protein, 98 aa, Homo sapiens; identical to SEQ ID NO: 18838

SEQ ID NO: 18840 - protein, 98 aa, Homo sapiens
TVSGGSISSGGYYWSWIRHLPGEGLEWIGYTYYSGSTYYNPSLKSRVTISVDTSKNQFSLKLRSVTAADTAVYFCARDLSGYAHFDYWGQGTLVTVSS

SEQ ID NO: 18841 - protein, 93 aa, Homo sapiens
AGSGFTFGAYWMNWVRQAPGRGLEWVARINEDGSESGHVDSVKGRFTISRDNAKDSLYLQMNSLRVEDTGVYYCTRRGFMDVWGKGTTVTVSS

SEQ ID NO: 18842 - protein, 93 aa, Homo sapiens
AASGFTFNNYWMNWVRQAPGKGLEWVAYMNEDGSVNSYVDSVKGRCTISRDNAKNSLYLQMNSLRVEDTAVYYCTRRGFMDVWGKGTTVTVSS

SEQ ID NO: 18843 - protein, 94 aa, Homo sapiens
AASGFTFSSFAMSWVRQAPGKGLEWVSGISASGGATYYADSVKGRFTISRDNSKNTLYLQMNSLRAEDTAVYYCAKDRVRVAYWGQGTLVTVSS

SEQ ID NO: 18844 - protein, 94 aa, Homo sapiens
VASGFTFSASGMSWVRQVPGKGLEWVSSIKNGDKATFYAESVKGRFTLSRDNSKNTLYLQMNSLRADDTAIYYCAKDRVRVAYWGQGALVTVSS

SEQ ID NO: 18845 - protein, 95 aa, Homo sapiens
ASGYTFTSYFMHWVRQAPGQGLEWMGIINTGNGDTVYAQNLQGRVTLTRDTSTSTVYMELSSLRSEDTAVYSCARELSGGTFDYWGQGTLVTVSS

SEQ ID NO: 18846 - protein, 95 aa, Homo sapiens
ASGYTFTSRYIHWMRQAPGQGLEWLGRVNPGPGDTHYAQEFQDRVSMTADTSTNTGYMELRSLRSEDSAIYFCARELSGGTFDYWGQGTLVTVSS

SEQ ID NO: 18847 - protein, 95 aa, Homo sapiens
ASGYTFTSRYIHWMRQAPGQGLEWLGRVNPAGGDTHYAQEFQDRVSMTTDTSTNTGYMELSSLRSDDSAIYYCARELSGGTFDYWGQGTLVTISS

SEQ ID NO: 18848 - protein, 95 aa, Homo sapiens
ASGYTFTSRYIHWMRQAPGQGLEWLGRVSPGPGDTHYAQEFQDRVSMTADTSTNTGYMELRSLRSEDSAIYFCARELSGGTFDYWGQGTLVTVSS

SEQ ID NO: 18849 - protein, 94 aa, Homo sapiens
ASGISFGNYWMSWVRQAPGKGLEWVANINPHGYEKNCVDSVKGRFTISRDNANNLLYLQMTGLRAEDTAVYYCATHNNWAFEYWGQGTLVTVSS

SEQ ID NO: 18850 - protein, 95 aa, Homo sapiens
AASGFTFSRYWMTWVRQGPGKGLEWVTNIRDDGSEENYVDSVKGRFTISRDNAKNSLFLQMNSLRAEDTAIYYCATHNNWAFEYWGQGTPVTVTS

SEQ ID NO: 18851 - protein, 92 aa, Homo sapiens
AASGFTFSSYSMNWVRQAPGKGLEWVSSISSSSSYIYYTDSVKGRFTISRDNSKNTLYLQMGSLRAEDMAVYYCARNRGDYWGQGTLVTVSS

SEQ ID NO: 18852 - protein, 92 aa, Homo sapiens
AASGFTFSSYSMNWVRQAPGKGLEWVSSISSSSSYIYYADSVKGRFTISRDNAKNSLYLQMNSLRAEDTAVYYCARNRGDYWGQGTLVTVSS

SEQ ID NO: 18853 - protein, 101 aa, Homo sapiens
AATGFTFSNFWMTWVRQAPGKGLEWVANIKQDGDETFYVDSVKGRFTISRDNAKNSLYLQMNNLRAEDTAFYYCARSGRGDVSTYYYFDYWGQGTLVTVSS

SEQ ID NO: 18854 - protein, 101 aa, Homo sapiens
ATSGFDFGSYWMTWVRQSPGKGLECVANIKEDATELNYVDFAKGRFTISRDNARKSLYLQMNDLRAEDTAIYYCARSGRGDVSTYYYFDYWGQGTLVAVSS

SEQ ID NO: 18855 - protein, 101 aa, Homo sapiens
AASGFAFSSYWMSWVRLAPGKGLECVANIKEDGSELNYVDSGKGRFTISRDNAKSSLYLQMSGLRAEDTAIYYCARSGRGDVSTYYYFDYWGQGTLVAVSS

SEQ ID NO: 18856 - protein, 97 aa, Homo sapiens
AASGFTFSSYWMHWVRQAPGKGLVWVSRINSDGSGTSYADSVKGRFTISRDNAKNTLSLQMDSLRAEDTAVYYCVRDGDGELPIDYWGQGILVTVSS

SEQ ID NO: 18857 - protein, 97 aa, Homo sapiens
VASGFTFSGYWMHWVRQAPEKGLVWVSRTDNVGSNTGYADSVKGRFTISRDNAKNTLYLQMNSLRAEDTAVYYCVRDGDGELPIDYWGQGTLVTVSS

SEQ ID NO: 18858 - protein, 102 aa, Homo sapiens
ASGYTFASYGISWVRQAPGQGLEWMGWISAYSGNTNYAQKLQGRVTMATDTSTSTAYMELRSLRSDDTAVYYCARDTGLLWFGELLRAPDYWGQGTLVTVSS

SEQ ID NO: 18859 - protein, 102 aa, Homo sapiens
ASGYSFASYGISWVRQAPGQGLEWMGWISAYSGNTNYAQKLQGRVTMTTDTSTSTAYMELRSLRSDDTAVYYCARDTGLLWFGELLRAPDYWGQGTLVTVSS

SEQ ID NO: 18860 - protein, 102 aa, Homo sapiens
AASGFTFSGHAMSWVRQSPGKGLEWVSEIHGNGADIYYADSVKGRFTTSRDSSTNTLYLQLNSLRAEDTAVYYCAKAGYGSGSYYTLSFDSWGQGTLVTVSS

SEQ ID NO: 18861 - protein, 102 aa, Homo sapiens
AASGFTFSNYAMIWVRQAPGKGLEWVSDIRSNGGSTTYADSVRGRFSISRDNSKNTLYLQMNSLRADDTATYFCAKAGYGSGSYYTLSFDSWGQGTLVTVSS

SEQ ID NO: 18862 - protein, 102 aa, Homo sapiens; identical to SEQ ID NO: 18861

SEQ ID NO: 18863 - protein, 102 aa, Homo sapiens; identical to SEQ ID NO: 18861

SEQ ID NO: 18864 - protein, 101 aa, Homo sapiens
AASGFTFSTYWMHWVRQAPGKGLVWVARINSDGDSTIYADSVKGRFTISRDNVKNTLFLQMNSLRPEDTAVYYCVRDLRRDYHHYYGMDVWGQGSTVTVSS

SEQ ID NO: 18865 - protein, 101 aa, Homo sapiens
AASGFTFSTYWMHWVRQVPGEGLVWVSRINSDGTTTSHADSVKGRFTISRDNAKNTLYLQMNSLRAEDTAVYYCVRDLRRDYHHYYGMDVWGQGTTVTVSS

SEQ ID NO: 18866 - protein, 101 aa, Homo sapiens
AASGFTFSTYWMHWVRQVPGEGLVWVSRVNSDGSTTSHADSVKGRFTISRDNAKNTLYLQMNSLRAEDTAVYYCVRDLRRDYHHYYGMDVWGRGTTVTVSS

SEQ ID NO: 18867 - protein, 97 aa, Homo sapiens
AASGFTFSNYGMHWLRQAPGQGLEYVSAIYNDGSRTFYTDSVKGRFTISRDNSKNTLYLQLGSLRVEDSAIYYCARRAWDLSYFDYWGQGTLVTVSS

SEQ ID NO: 18868 - protein, 96 aa, Homo sapiens
ASGFTFSDYGMHWVRQAPGKGPEYVSAIHNNGGATYYANSVKGRFTISRDNSKNTLYLQMGGLRAEDMAVYYCARRAWDLSYFDYWGQGTLVTVSS

SEQ ID NO: 18869 - protein, 97 aa, Homo sapiens
AASGFTFSSFWMSWVRQTPGKGLEWVANIKEDGSKKLYVDSVKGRFSISRDDTKNSLYLQMNDLRAEDTAVYYCARGDIAAAGIDYWGQGTLVTVSS

SEQ ID NO: 18870 - protein, 96 aa, Homo sapiens
VASGFTFSNYWMSWVRQAPGKGLEWVANTKPDGVRKLHVDSVEGRFTISRDNARNSLYLQMDNLRVEDTAVYYCARGDIAAAGIDYLGQGTLVTVS

SEQ ID NO: 18871 - protein, 94 aa, Homo sapiens
AASGFTFSNYWMSWVRQAPGKGLEWVANIKQDESEKYYVDSVKGRFTISRDNAKNSLYLQMNSLRAEDTAVYYCAKRGGTMNYWGQGTLVTVSS

SEQ ID NO: 18872 - protein, 94 aa, Homo sapiens
VASGFTFSNYWMTWVRQAPGKGLEWVANIKPDESEKYYVDSVKGRFTISRDNAQNSVFLQMNSLRAEDTAVYYCAKRGGTMNYWGQGTLVTVSS

SEQ ID NO: 18873 - protein, 102 aa, Homo sapiens
AASGFTFSSYAMSWVRQAPGKGLEWVSSISGNTAYIYYADSMEGRFTISRDNSKNTLYLQMNDLRAEDTAVYFCAKRGEVATALGHWYFDLWGRGTLLTVSS

SEQ ID NO: 18874 - protein, 102 aa, Homo sapiens
AGSGFTFSNYAMTWVRQAPGKGLEWVSVISATTEIIYYAASVKGRFTISRDNSKNTLYLQMNNLRDDDTALYFCAKRGEVATALGHWYFDLWGRGTLVTVSS

SEQ ID NO: 18875 - protein, 94 aa, Homo sapiens
AASGFTFSNYGMSWVRQAPGKGLEWVSCIGGNGGSTSYGDSAKGRFTISRDNSKNTVYLQMNSLRAEDTAVYYCARHLRYNDYWGQGTLVTVSS

SEQ ID NO: 18876 - protein, 93 aa, Homo sapiens
EGSGFTFTTGMTWVRQAPGKGLEWVTSIVSSGVTTNYADSVRGRFTISRDNSRNTLYLQMNSLRVEDTAVYYCARHLRYNDYWGQGTLVTVSS

SEQ ID NO: 18877 - protein, 93 aa, Homo sapiens
VGSGFTFTTGMTWVRQAPGKGLEWVTSILNSGVPTNYADSVRGRFTISRDDSRNTLYLQMNSLRVEDTAVYYCARHLRYNDYWGQGTLVTVSS

SEQ ID NO: 18878 - protein, 94 aa, Homo sapiens
AASGFTFSSYWMHWVRQAPGKGLVWVSRINTDGSSTSYADSVKGRFTISRDNAKNTLYLQMNSLRAEDTAVYYCVRSGGWIDYWGQGTLVTVSS

SEQ ID NO: 18879 - protein, 94 aa, Homo sapiens
AASGFTFSTYWMHWVRQAPGMGLVWVSRISTDVSTTTYADSVKGRFTISRDNAKSTLYLQMNSLRAEDTAVYYCVRSGGWIDYWGQGTLVTVSS

SEQ ID NO: 18880 - protein, 100 aa, Homo sapiens
AASGFTVSSNYMSWVRQAPGKGLEWVSVIYSGGSTYYADSVKGRFTISRDNSKNTLYLQMNSLRAEDTAVYYCARDRRAYSGYDYYFDYWGQGTLVTVSS

SEQ ID NO: 18881 - protein, 100 aa, Homo sapiens
AASGFTVSNNYMSWVRQAPGKGLEWVSVIYSGGSTYYADSVKGRFSISRDNSKNTLYLQMNGLRAEDTAVYYCARDRRAYSGYDYYFDYWGQGTLVTVSS

SEQ ID NO: 18882 - protein, 100 aa, Homo sapiens; identical to SEQ ID NO: 18880

SEQ ID NO: 18883 - protein, 94 aa, Homo sapiens
ASGYTFTGYVMHWVRQAPGQRLEWMGWINAGNGNTKYSQKFQDRVTITRDTSASAVYMELSSLRSEDTAVYYCARYSSGSLDYWGQGTLVTVSS

SEQ ID NO: 18884 - protein, 94 aa, Homo sapiens
ASGYTFISYAMHWVRQAPGQRLEWMGWIITGNGNTKYSQKFQDRVTITRDTSANTAYMELSSLRSEDTAVYYCARYSSGSLDYWGQGTMVTVSS

SEQ ID NO: 18885 - protein, 95 aa, Homo sapiens
TVSGGSITTYYWSWLRQSPGKGLEWIGYAFYSRSVTNYNPSLKSRVTISMDTSKNQFSLKLNSVTAADTAVYYCARGERLGGDFWGQGILVTVSS

SEQ ID NO: 18886 - protein, 94 aa, Homo sapiens
TVSGGSISGYYWSWLRQPPGKGLEWIGYIRYSGSTNYSPSLNSRVTISVDTSKNQFSLKVTSVTTADTAVYYCARGERLGGDFWGQGILVTVSS

SEQ ID NO: 18887 - protein, 98 aa, Homo sapiens
ASGISFSGYWMSWVRQAPGKGLEWVARVKPDGSDKNYVDSVKGRFTISRDNAKNSLSLQMNSLRAEDTAVYYCARVGQWPLNWALDYWGQGTLVTVSS

SEQ ID NO: 18888 - protein, 98 aa, Homo sapiens
ASGISFSGYWMSWVRQAPGKGLEWVARVKPDGSDKNYVDSVKGRFTISRDNAKNSLSLQMNSLRAEDTAVYYCARVGQWPLNWALDYWGQGTQVTVSS

SEQ ID NO: 18889 - protein, 98 aa, Homo sapiens; identical to SEQ ID NO: 18888

SEQ ID NO: 18890 - protein, 97 aa, Homo sapiens
SGISFSGYWMTWVRQTPGKGLEWVARVKPDGGEKNYVDSVKGRFTISRDNAKNSLSLQMNSLRDEDTAVYYCARVGQWPLNWALDYWGQGTQVTVSS

SEQ ID NO: 18891 - protein, 98 aa, Homo sapiens
ASGISFSGYWMSWVRQAPGKGLEWVAREKPDGSDKNYVDSVKGRFTISRDNAKNSLSLQMNSLRAEDTAVYYCARVGQWPLNWALDYWGQGTQVTVSS

SEQ ID NO: 18892 - protein, 92 aa, Homo sapiens
AASGFIFRNYWMHWVRQAPGKGLVWVSRCSGDGRLTTYADSVKGRFTISRDNAKNIVYLQINSLRVEDTAVYHCVSGLGDHWGQGILVSVSS

SEQ ID NO: 18893 - protein, 92 aa, Homo sapiens
AASGFTFRTYWMHWVRQAPGKGLLWVSRINSDGNLRTYTDSVKGRFTISRDNARDTLYLQINNLRTGDTGLYYCVSGLGDHWGQGTLVTVSS

SEQ ID NO: 18894 - protein, 90 aa, Homo sapiens
AASGFDFTNSWMHWVRQAPGKGLEWVSRINGDGSLTTCVDSVKGRFTVSRDNAKYTVQLQMSSLRVEDTAFYYCVSGLGDHWSQGTLVTV

SEQ ID NO: 18895 - protein, 97 aa, Homo sapiens
TVSGGSISSGTNYWGWIRQPPGKGLEWIASIYYSGNTYYNPSLKSRVTISVDTSKNQFSLNLSSVTAADTAVYYCARRPRGGSLDYWGQGALVTVSS

SEQ ID NO: 18896 - protein, 96 aa, Homo sapiens
TVSGGSISSSTSFWAWIRQPPGKELEWIGNIFNSGTAYNPSLRTRVAISADMSKNQFSLELRSVTAEDTAVYYCARRPRGGSLDYWGQGTLVTVSS

SEQ ID NO: 18897 - protein, 97 aa, Homo sapiens
AVSGGSFSGYYWSWIRQPPGKGLEWIGEINHSGNTNYNPSLKSRVTISVDTSKNQFSLELSSVTAADTAVYYCARGQSSSWYYFDYWGQGTLVTVSS

SEQ ID NO: 18898 - protein, 97 aa, Homo sapiens
AVYGGSFNGYYWSWIRQPPGKGLEWIGEINHSGSSNYNPSLKSRVTISVDTSKNQFSLKLSSVTAADTAVYYCARGQSSSWYYFDYWGRGTLVTVSS

SEQ ID NO: 18899 - protein, 102 aa, Homo sapiens
ASGYGLKDYFMHWVRQAPGQGLEWMGRINGNDADTDYEQRFQARVTLTRDTATNIGYMELRRLTSDDSALYFCVRGRSITGRGGVYDAFDIWGQGTTVVVAS

SEQ ID NO: 18900 - protein, 102 aa, Homo sapiens
ASGYGLKDYFMHWVRQAPGQGLEWMGRINGNDADTEYEQRFQARVTLTRDTATNIGYMELRRLTSDDSALYFCVRGRSITGRGGVYDAFDIWGQGTTVVVAS

SEQ ID NO: 18901 - protein, 98 aa, Homo sapiens
ASGYGLKDYFMHWVRQAPGQGLEWMGRINGNDADTDYEQRFQARVTLTRDTATNIGYMELRRLTSDDSALYFCVRGRSITGRGGVYDAFDIWGQGTTV

SEQ ID NO: 18902 - protein, 96 aa, Homo sapiens
AASGFTFRSYEMNWVRQAPGKGLEWLSYISTSGSTIYYADSVKGRFTISRDNAKNSLYLQMNSLRAEDTAVYFCARGYGGNPFDYWGQGTLVTVSS

SEQ ID NO: 18903 - protein, 96 aa, Homo sapiens
AASGFTFSSYEMNWVRQAPGKGLEWVSYISSSGSTIYYADSVKGRFTISRDNAKNSLYLQMNSLRAEDTAVYYCARGYGGNPFDYWGQGTLVTVSS

SEQ ID NO: 18904 - protein, 97 aa, Homo sapiens
TVSGGSISTYYWSWIRQPPGEGLEWIGNIYYRGSTYYNPSLKSRVTISVDTSKNQFSLNLSSVTAADTAVYYCARQAQYYYYGMDVWGQGTTVTVSS

SEQ ID NO: 18905 - protein, 97 aa, Homo sapiens
TVSGGSISTYYWSWIRQPPGKGLEWIGYIYYSGSTTYNPSLKSRVTISVDTSKNQFSLKLSSVTAADTAVYYCARQAQYYYYGMDVWGQGTTVTVSS

SEQ ID NO: 18906 - protein, 97 aa, Homo sapiens; identical to SEQ ID NO: 18905

SEQ ID NO: 18907 - protein, 98 aa, Homo sapiens
AASGFTFSSYWMHWVRQAPGKGLVWVSRINSDGSSTSYADSVKGRFTISRDSAKNTLYLQMNSLRAEDTALYYCARGGGYSYGAPDYWGQGTLVTVSS

SEQ ID NO: 18908 - protein, 98 aa, Homo sapiens
AASGFTFSSYWMHWVRQAPGKGLVWVSRINSDGSSTSYADSVKGRFTVSRDNAKNTLYLQMNSLRAEDTAVYYCARGGGYSYGAPDYWGQGTLVTVSS

SEQ ID NO: 18909 - protein, 98 aa, Homo sapiens
ATSGFPFSDYAMAWVRQVPGKGLEWVSAIGGGGFNTYYADSVKGRFTISRDDSKNTLYLQMNSLKAEDTAIYYCAKRGGSSSWTFDSWGHGTLVTVSS

SEQ ID NO: 18910 - protein, 98 aa, Homo sapiens
AASGFTFSRYAMSWVRQAPGKGLEWVSAITGGGTTAYYADSVKGRFTIARDDSESTLHLQMNSLSAEDTALYYCAKRGGSSSWTFDSWGQGTLVTVSS

SEQ ID NO: 18911 - protein, 92 aa, Homo sapiens
TVSSGSMRSNYWSWIRQAPGKELEWIGYVHYSGSTSYNPSLTSRVTISIDTSKNQFSLNLRSVTAADTAVYYCARGNGWHPDWGQGTLVTVS

SEQ ID NO: 18912 - protein, 93 aa, Homo sapiens
SVSGGSISGHYWTWIRQPPGKGLEWIGNIHYSRSTDSNPSLKSRVTISLDMSKNQVSLKLNFVTAADTAVYYCARGNGWHPDWGQGTLVTVSS

SEQ ID NO: 18913 - protein, 94 aa, Homo sapiens
AASGFNFEDVAMHWVRHIAGKGLEWLSFISGDGAKQYYADSVKGRFTISRDSSKHSLYLQMNSLGAEDTALYYCVKDNPVLHIWGQGTMVTVSS

SEQ ID NO: 18914 - protein, 93 aa, Homo sapiens
AASGFNFDDHAMHWVRQAPGKGPEWVGLIRGDDSFRKYGDSVKGRFIISRDNSKNSLYLQMNSLRTEDTALYYCVKDNPVLHIWGQGTLVTVS

SEQ ID NO: 18915 - protein, 99 aa, Homo sapiens
KGSGYSFTTYWIGWVRQMPGKGLEWMGIIYPDDSDTRYSPSFQGQVTFSADKSISTAYLQWSSLKASDTAMYYCARLCFRNSITCLYYWGQGTLVTVSS

SEQ ID NO: 18916 - protein, 99 aa, Homo sapiens
KGSGYSFTTYWIGWVRQMPGKGLEWMGIIYPDDSDTRYSPSFQGQVTISADKSISTAYLQWSSLKASDTAMYYCARLCFRNSITCLYYWGQGTLVTVSS

SEQ ID NO: 18917 - protein, 99 aa, Homo sapiens; identical to SEQ ID NO: 18915

SEQ ID NO: 18918 - protein, 99 aa, Homo sapiens
KGSGYSFTTYWIGWVRQMPGKGLEWMGIIYPDDSDTRYSPSFQGQITFSADKSISTAYLQWSSLKASDTAMYYCARLCFRNSITCLYYWGQGTLVTVSS

SEQ ID NO: 18919 - protein, 99 aa, Homo sapiens; identical to SEQ ID NO: 18916

SEQ ID NO: 18920 - protein, 99 aa, Homo sapiens
KGSGYSFTTYWIGWVRQMPGKGLEWMGIIYPDDSDTRYSPSFQGQVTVSADKSISTAYLQWSSLKASDTAMYYCARLCFRNSITCLYYWGQGTLVTVSS

SEQ ID NO: 18921 - protein, 99 aa, Homo sapiens; identical to SEQ ID NO: 18915

SEQ ID NO: 18922 - protein, 99 aa, Homo sapiens
KGSGYSFTTYWIGWVRQMPGKGLEWMGIIYPDDSDTRYSPSFQGQATFSADKSISTAYLQWSSLKASDTAMYYCARLCFRNSITCLYYWGQGTLVTVSS

SEQ ID NO: 18923 - protein, 97 aa, Homo sapiens
AASGFTFSRYAMSWVRQAPGKGLEWVSGLSSSGSSTYYADSVKGRFTISRDNSKNTLYLQMNSLRAEDTAVYYCAVNCSGGTCWDYWGQGTLVTVSS

SEQ ID NO: 18924 - protein, 97 aa, Homo sapiens; identical to SEQ ID NO: 18923

SEQ ID NO: 18925 - protein, 97 aa, Homo sapiens
AASGFTFSRYAMSWVRQAPGKGLGWVSGLSSSGSSTYYADSVKGRFTISRDNSKNTLYLQMNSLRAEDTAVYYCAVNCSGGTCWDYWGQGTLVTVSS

SEQ ID NO: 18926 - protein, 97 aa, Homo sapiens
AASGFTFSNYAMSWVRQAPGKGLEWVSGISGSGGSTYYAASVKGRFTISRDNSKDTLYLQMNSLRAEDTAVYYCAVNCSGGTCWDYWGQGTLVTVSS

SEQ ID NO: 18927 - protein, 109 aa, Homo sapiens
TQTLTLTCSFSGFSLNTTGVCVAWIRQPPGKALEWLAVIDWDGAVFYSTSLRPRLTVSKGTSKNQVVLTMTSMEPADTATFYCARHFYDRSDYFGFDFWGPGTLVTVSS

SEQ ID NO: 18928 - protein, 109 aa, Homo sapiens
TQTLTLTCSFSGFSLNTTGVCVAWIRQPPGKALEWLAVIDWDGAVFYSTSLRPRLTVSKGTSKNQVVLTMTSMEPEDTATFYCARHFYDRSDYFGFDFWGPGTLVTVSS

SEQ ID NO: 18929 - protein, 109 aa, Homo sapiens; identical to SEQ ID NO: 18927

SEQ ID NO: 18930 - protein, 109 aa, Homo sapiens
TQTLTLTCSFSDFSLNTTGVCVAWIRQPPGKALEWLAVIDWDGAVFYSTSLRPRLTVSKGTSKNQVVLTMTSMEPADTATFYCARHFYDRSDYFGFDFWGPGTLVTVSS

SEQ ID NO: 18931 - protein, 91 aa, Homo sapiens
ASGFTASSSYMNWVRQAPGKGLEWISVLYSDERTYYADSVKGRFIISRDNSKNTLYLQINSARVEDTAVYYCARGKGFDPWGQGTLVTVSS

SEQ ID NO: 18932 - protein, 92 aa, Homo sapiens
VASGFTASSSYMNWVRQAPGKGLEWISVLYSDGRTFYADSVKGRFTISRDSSNNTLYLQMNSVRAEDTAVYYCARGKGFDPWGQGTLVTVSS

SEQ ID NO: 18933 - protein, 92 aa, Homo sapiens
VASGFTASDSYMSWVRQAPGKGLEWISVLYSDDRTFYADSVKGRFTVSRDRSKNTLYLQMNRVRAEDTAMYYCARGKGFDPWGQGTLVTVSS

SEQ ID NO: 18934 - protein, 92 aa, Homo sapiens
AASGFSISGNYMNWVRQAPGKGLEWVAGFTSTDNTHYADSVRGRFTISRDTSRNTLFLQMNSLRVEDSALYYCARGKGFDPWGRGTLVTVSS

SEQ ID NO: 18935 - protein, 92 aa, Homo sapiens
AASGFDISGHYMNWVRQAPGKGLEWVAGFTGTGKIHYADSLRGRFSISRDLSNNTLFLQMNSLRVEDSALYYCARGKGFDPWGRGTLVTVSS

SEQ ID NO: 18936 - protein, 92 aa, Homo sapiens
AASGFDISGHYINWVRQAPGKGLEWVAGFTNTGRIHYADSLRGRFSISRDLSSNTVFLQMNSLRVEDSALYYCARGKGFDPWGRGTLVSVSS

SEQ ID NO: 18937 - protein, 92 aa, Homo sapiens; identical to SEQ ID NO: 18934

SEQ ID NO: 18938 - protein, 92 aa, Homo sapiens
AASGFGISGHYINWVRQAPGKGLEWVAGFTSTGNTHYADSVRGRFTISRDISNNTVFLQLNSLRVEDSALYYCARGKGFDPWGRGTLVTVSS

SEQ ID NO: 18939 - protein, 91 aa, Homo sapiens
AASGFDIRDHYLNWVRQAPGKGLEWVAGFTNTGRMHYADSLRGRFSISRDLSNNTLFLHMTSLRVEDSALYYCARGKGFDPWGRGTLVSVS

SEQ ID NO: 18940 - protein, 92 aa, Homo sapiens
AASGFDISGHYLNWVRQAPGKGLEWVAGFTNTGKIHYADSLRGRFTISRDLSNNTLFLQMNSLRVEDSALYYCARGKGFDPWGRGTLVTVSS

SEQ ID NO: 18941 - protein, 92 aa, Homo sapiens
AASGFDISGHYMNWVRQAPGKGLEWVAGFTNTGRIHYADSLRGRFSISRDLSNNTLFLQMNSLRVEDSALYYCARGKGFDPWGRGTLVTVSS

SEQ ID NO: 18942 - protein, 97 aa, Homo sapiens
KGSGYSFTSYWIGWVRQMPGKGLEWMGVIYPGDSDTRYSPSFQGQVTISVDKSINTAYLQWSSLKASDTAVYYCARRAGDAEYFQHWGQGTPVTVSS

SEQ ID NO: 18943 - protein, 97 aa, Homo sapiens
KGSGYSFTNYWIGWVRQMPGKGLEWMGTIYPGDSDTRYSPSFQGQVTISADKSINTATLQWSSLKASDTAIYYCARRAGDAEYFQHWGQGTPVTVSS

SEQ ID NO: 18944 - protein, 97 aa, Homo sapiens; identical to SEQ ID NO: 18942

SEQ ID NO: 18945 - protein, 97 aa, Homo sapiens
KGSGYSFTSYWIGWVRQMPGKGLEWMGVIYPGDSDTRYSPSFQGQVTISADKSINTAYLQWSSLKASDTAVYYCARRAGDAEYFQHWGQGTPVTVSS

SEQ ID NO: 18946 - protein, 97 aa, Homo sapiens; identical to SEQ ID NO: 18942

SEQ ID NO: 18947 - protein, 97 aa, Homo sapiens
KGSGYSFTSYWIGWVRQMPGKGLEWMGVIYPGDSDTRYSPSFQGQITISADKSINTAYLQWSSLKASDTAVYYCARRAGDAEYFQHWGQGTPVTVSS

SEQ ID NO: 18948 - protein, 97 aa, Homo sapiens; identical to SEQ ID NO: 18942

SEQ ID NO: 18949 - protein, 97 aa, Homo sapiens
KGSGYSFINYWIGWVRQMPGKGLEWMGIIYPGDSDTRYSPSVQGQVTISADKSISTAYLQWSSLKASDTAMYYCARRAGDAEYFQHWGQGTLVTVSS

SEQ ID NO: 18950 - protein, 97 aa, Homo sapiens; identical to SEQ ID NO: 18949

SEQ ID NO: 18951 - protein, 97 aa, Homo sapiens
KGSEYSFTSYWIGWVRQMPGKGLEWMGIIYPGDSDTRYSPSFQGQVTISADKSISTAYLQWSSLKASDTAIYYCARRAGDAEYFQHWGQGTLVTVSS

SEQ ID NO: 18952 - protein, 97 aa, Homo sapiens
KGSGYSFTSYWVGWVRQMPGKGLEWMGVIYPGDSDTRYSPSFQGQVTISVDKSINTAYLQWSSLKASDTAVYYCARRAGDAEYFQHWGQGTPVTVSS

SEQ ID NO: 18953 - protein, 97 aa, Homo sapiens
KGSGYSFTSYWIGWVRQMPGKGLEWMGVIYPGDSDTRYSPSFQGQVTISVDKSINTAYLQWSSLKASDTAVYFCARRAGDAEYFQHWGQGTPVTVSS

SEQ ID NO: 18954 - protein, 101 aa, Homo sapiens
ASGYTFTSYGISWVRQAPGQGLEWMGWVSAYNGNTNYAQKLQGRVTMTTDTSTSTAYMELRRLRSDDTAMYYCARGTTVTTQPPYYYMDVWGKGTTVTVSS

SEQ ID NO: 18955 - protein, 101 aa, Homo sapiens; identical to SEQ ID NO: 18954

SEQ ID NO: 18956 - protein, 101 aa, Homo sapiens
ASGYTFTSYVISWVRQAPGQGLEWMGWVSAYNGYTNYAQKLQGRVTMTTDTSTSTAYMELRRLRSDDTAMYYCARGTTVTTQPPYYYMDVWGKGTTVTVSS

SEQ ID NO: 18957 - protein, 101 aa, Homo sapiens
ASGYTFTSYGISWVRQAPGQGLEWMGWVSAYNGNTNYAQKLQGRVTMTTDTSTSTAYMDLRRLRSDDTAIYYCARGTTVTTQPPYYYMDVWGKGTTVTVSS

SEQ ID NO: 18958 - protein, 101 aa, Homo sapiens
ASGYSFISYVISWVRQAPGQGLEWMGWVSPYNGITKYTQKLQGRVTMTTDTSTNTAYMELRRLRSDDTAMYFCARGTTVTTQPPYYYMDVWGKGTTVTVSS

SEQ ID NO: 18959 - protein, 101 aa, Homo sapiens
ASGYTFTSYGISWVRQAPGQGLEWMGWVSAYNGNTNYAQKLQGRVIMTTDTSTSTAYMELRRLRSDDTAMYYCARGTTVTTQPPYYYMDVWGKGTTVTVSS

SEQ ID NO: 18960 - protein, 101 aa, Homo sapiens; identical to SEQ ID NO: 18956

SEQ ID NO: 18961 - protein, 100 aa, Homo sapiens
ASGYTFTSYGISWVRQAPGQGLEWMGWVSAYNGNTNYAQKLQGRVTMTTDTSTSTAYMELRRLRSDDTAMYYCARGTTVTTQPPYYYMDVWGKGPRSPSP

SEQ ID NO: 18962 - protein, 101 aa, Homo sapiens
ASGYTFTSYAISWVRQAPGQGLEWMGWVSAYNGNTKYARSLQGRVTMTTDTSTSTAYMELRRLRSDDTAIYYCARGTTVTTQPPYYYMDVWGKGTTVTVSS

SEQ ID NO: 18963 - protein, 101 aa, Homo sapiens; identical to SEQ ID NO: 18962

SEQ ID NO: 18964 - protein, 96 aa, Homo sapiens
AASGFTFSSNWMHWVRQAPGKGLVWVSRISDYDGSITDYADSVKGRFTISRDNAKNTLYLQMHSLRAEDTAVYYCGRDLSGSRDYWGQGTLVTVSS

SEQ ID NO: 18965 - protein, 95 aa, Homo sapiens
AGAGFTFSNYWFHWVRQVPGKGLVWVSRIDERGTITDYADSVRGRFTISRDNAKNTLYLQMNSLGVEDTAVYFCGRDLSGSRDYWGRGTLVTVSS

SEQ ID NO: 18966 - protein, 95 aa, Homo sapiens
AGSGFTFSNYWFHWVRQVPGKGLVWVSRINTDGTITNYADSVRGRFTISRDNAKNTLYLQMNSLGVDDTAVYFCGRDLSGSRDYWGQGTLVTVSS

SEQ ID NO: 18967 - protein, 95 aa, Homo sapiens
AASGFTFSSYAMHWVRQAPGKGLVWVSRIDERGTITDYADSVRGRFTISRDNAKNTLYLQMNSLGVEDTAVYFCGRDLSGSRDYWGRGTLVTVSS

SEQ ID NO: 18968 - protein, 95 aa, Homo sapiens; identical to SEQ ID NO: 18965

SEQ ID NO: 18969 - protein, 95 aa, Homo sapiens
AGAGFTFSNYWFHWVRQVPGKGLVWVSRIDERGTITDYADSVRGRFTIPRDNAKNTLYLQMNSLGVEDTAVYFCGRDLSGSRDYWGRGTLVTVSS

SEQ ID NO: 18970 - protein, 94 aa, Homo sapiens
ASGYIFSDYWMHWVRQVPGKGLVWVARIDRNGGTTNYADSVKGRFTVSRDNAKNTLYLQMNSLRAEDTAVYYCGRDLSGSRDYWGQGTLVTVSS

SEQ ID NO: 18971 - protein, 94 aa, Homo sapiens
ASGFTFSAYWMHWVRQVPGKGLVWVARTDEYGGTTNYADSVKGRFTVSRDNAKNTLYLQMNSLRAEDTAVYYCGRDLSGSRDYWGQGTLVTVSS

SEQ ID NO: 18972 - protein, 94 aa, Homo sapiens
ASGFTFSAYWMHWVRQVPGKGLVWVARIDEYGGTTNYADSVKGRFTVSRDNAKNTLYLQMNSLRAEDTAVYYCGRDLSGSRDYWGQGTLVTVSS

SEQ ID NO: 18973 - protein, 96 aa, Homo sapiens
AASGFTFSNYWMHWVRQVPGKGLMWVSRISDYGGSTTDYADSVKGRFTISRDNARNTLYLQMNSLRAEDTAVYYCGRDLSGSRDYWGQGTLVTVSS

SEQ ID NO: 18974 - protein, 96 aa, Homo sapiens
AASGFTFSSNWMHWVRQAPGKGLVWVSRISDYGGSTTDYADSVKGRFTISRDNAKNTLYLQMNSLRAEDTAVYYCGRDLSGSRDYWGQGTLVTVSS

SEQ ID NO: 18975 - protein, 96 aa, Homo sapiens
AASGFSFSSNWMHWVRQAPGKGLVWVSRISDYGGSTTDYADSVKGRFTISRDNAKNTLYLQMNSLRAEDTAVYYCGRDLSGSRDYWGQGTLVTVSS

SEQ ID NO: 18976 - protein, 96 aa, Homo sapiens; identical to SEQ ID NO: 18964

SEQ ID NO: 18977 - protein, 94 aa, Homo sapiens
ASGYIFSDYWMHWVRQVPGKGLVWVARIDRNGETTNYADSVKGRFTVSRDNAKNTLYLQMNSLRAEDTAVYYCGRDLSGSRDYWGQGTLVTVSS

SEQ ID NO: 18978 - protein, 99 aa, Homo sapiens
AASGFTFDDYAMHWVRQPPGKGLEWVSGINWNSGNIGYADSVKGRFTISRDNAKNSLYLQMNSLRAEDTALYYCAKGVDYDSSGPFDYWGQGTLVTVSS

SEQ ID NO: 18979 - protein, 99 aa, Homo sapiens
AASGFTFDDYAMYWVRQAPGKGLEWVSGISWNSGNIGYADSVKGRFTISRDNAKNSLYLQMNSLRAEDTALYYCAKGVDYDSSGPFDYWGQGTLVTVSS

SEQ ID NO: 18980 - protein, 99 aa, Homo sapiens; identical to SEQ ID NO: 18978

SEQ ID NO: 18981 - protein, 98 aa, Homo sapiens
AVSDGSLRTLFWGWIRQPPGKGLEWIGEDHHNGNTNYNPSFRSRVTISVDTSKLQISLQLRSVTAADTAVYYCARAGTWGAYDAFDIWGQGTMVVVSS

SEQ ID NO: 18982 - protein, 98 aa, Homo sapiens
AVSDGSLRTLFWGWIRQPPGKGLEWIGEDHHNGNTNLNPSFRSRVTISVDTSKLQISLQLRSVTAADTAVYYCARAGTWGAYDAFDIWGQGTMVVVSS

SEQ ID NO: 18983 - protein, 97 aa, Homo sapiens
VSGASISSHFWSWIRQPPGKGLEWIGENNHGGSANSNPSLKSRVTISIDTSKNQLSLRLTSVTAADTAAYYCARAGTWGAYDAFDIWGQGTVVIVSS

SEQ ID NO: 18984 - protein, 98 aa, Homo sapiens; identical to SEQ ID NO: 18981

SEQ ID NO: 18985 - protein, 98 aa, Homo sapiens
AVYDGSFRTLFWSWIRQPPGKGLEWIGEIHPSGSTNYNPSLRSRVTISVDTSNHQISLRLSSVTAADTAVYYCARAGTWGAYDAFDIWGQGTMVAVSS

SEQ ID NO: 18986 - protein, 98 aa, Homo sapiens
AVSDGSLRTHFWSWIRQPPGKGLEWIGEDHHAGSTNYNPSFRSRVTISVDTSKLQISLKLRSVTAADTAVYYCARAGTWGAYDAFDIWGQGTMVVVSS

SEQ ID NO: 18987 - protein, 96 aa, Homo sapiens
AASGFTFSDFEMNWVRQAPGKGLEWVSYISSVGGTIYYADSVKGRFTISRDNAKNSLYLQVNSLRAEDTAVYYCARGGFSWSFDYWGQGTLVTVSS

SEQ ID NO: 18988 - protein, 96 aa, Homo sapiens
AASGFTFSSYEMNWVRQAPGKGLEWVSYITSSGSTIYYADSVKGRFTISRDNAKDSLYLQMNSLRAEDTAVYYCARGGFSWSFDYWGQGTLVTVSS

SEQ ID NO: 18989 - protein, 96 aa, Homo sapiens
AASGFTFSSSEMNWVRQAPGKGLEWVSYISSGGGTIYYADSVKGRFTISRDNAKDSLYLQMNSLRADDTALYYCARGGFSWSFDYWGQGTLVTVSS

SEQ ID NO: 18990 - protein, 100 aa, Homo sapiens
ASGYTFISYAMHWVRQAPGQRLEWMGWINAGNGNTKYSQKFQGRVTITRDTSASTAYMELSSLRSEDTAVYYCAREYYDILTGQIPLDYWGQGTLVTVSS

SEQ ID NO: 18991 - protein, 100 aa, Homo sapiens
ASGYTFISYAMHWVRQAPGQRLEWMGWINAGNGNTKYSQKFQGRVTITRDTSASTAYMELSSLRSEDTAMYYCAREYYDILTGQIPLDYWGQGTLVTVSS

SEQ ID NO: 18992 - protein, 100 aa, Homo sapiens; identical to SEQ ID NO: 18990

SEQ ID NO: 18993 - protein, 100 aa, Homo sapiens; identical to SEQ ID NO: 18990

SEQ ID NO: 18994 - protein, 100 aa, Homo sapiens
ASGYTFTNYAMHWVRQAPGQRLEWMGWINAGNGNTKYSQKFQGRVTITRDTSASTAYMELSSLKSEDTAVYYCAREYYDILTGQIPLDYWGQGTLVTVSS

SEQ ID NO: 18995 - protein, 100 aa, Homo sapiens
ASGYTFISYAMHWVRQAPGQRLEWMGWINAGNGNTKYSQKFQGRVTIARDTSASTAYMELSSLRSEDTAVYYCAREYYDILTGQIPLDYWGQGTLVTVSS

SEQ ID NO: 18996 - protein, 100 aa, Homo sapiens
ASGYTFISYAMHWVRQAPGQRLEWMGWINAGNGNTKYSQKFQGRVTITRDTSASTAFMELSSLRSEDTAVYYCAREYYDILTGQIPLDYWGQGTLVTVSS

SEQ ID NO: 18997 - protein, 100 aa, Homo sapiens; identical to SEQ ID NO: 18990

SEQ ID NO: 18998 - protein, 100 aa, Homo sapiens
ASGYTFTNYAMHWVRQAPGQRLEWMGWINAGNGNTKYSQKFQGRVTITRDTSASTAYMELSSLKSEDTAVYFCAREYYDILTGQIPLDYWGQGTLVTVSS

SEQ ID NO: 18999 - protein, 101 aa, Homo sapiens
ASGYNFITYAIHWVRQAPGQSLEWMGWIDTGNGDTKYSQKFQGRVTITRDTSASTAYLELSSLRSEDTALYYCARGNYYDSSSYYYPFDYWGQGTLVTVSS

SEQ ID NO: 19000 - protein, 101 aa, Homo sapiens
ASGYSFITYAIHWVRQAPGQSLEWMGWIDTGNGDTKYSQNFQGRVTITRDTSASTAYMELSSLRSEDTAFYYCARGNYYDSSSYYYPFDYWGQGTLVTVSS

SEQ ID NO: 19001 - protein, 101 aa, Homo sapiens
ASGYTFITYAIHWVRQAPGQRLEWMGWINTGNGDTKYSQKFQGRVTITRDTSASAAYMELSSLRSEDTAVYYCARGNYYDSSSYYYPFDYWGQGTLVTVSS

SEQ ID NO: 19002 - protein, 101 aa, Homo sapiens
ASGYTFTNYAVHWVRQAPGQRLEWMGWIDTGNGNTKYSQKFQGRVTITRDTSASTAYMELSSLRSEDTAVYYCARGNYYDSSSYYYPFDYWGQGTLVPVSS

SEQ ID NO: 19003 - protein, 92 aa, Homo sapiens
AASGFTFRNAWMNWVRQAPGKGLEWVGRIRSTLDGGTVEYAAPVKGRFTISRDDSKNMLYLQMNSLKAEDTAVYYCVARPHWGQGTLVSVSS

SEQ ID NO: 19004 - protein, 92 aa, Homo sapiens
AASGFNVSDVWMNWVRQSPGKGLEWVGRIRAKIAGGTTDNAAPVKGRFTVSRDDSKNTFYLQMNNLKSEDTAVYYCVARPHWGQGTLVTVSS

SEQ ID NO: 19005 - protein, 103 aa, Homo sapiens
VSGFTFGDYAVTWFRQAPGKGLEWVGLMRSERYGGTKEYAASVKGRFTLSRDDSRSIAYLQMNSLKTEDTAVYYCSRGCSGGSCYYYYGMDVWGQGTTVTVSS

SEQ ID NO: 19006 - protein, 103 aa, Homo sapiens
VSGFSFGDYAVTWFRQAPGKGLEWVGLMRSERYGGTKEYAASVKGRFSLSRDDSRSIAYLQMNSLKTEDTAVYYCSRGCSGGSCYYYYGMDVWGQGTTVTVSS

SEQ ID NO: 19007 - protein, 103 aa, Homo sapiens
GSGFTLGDYGMSWFRQAPGKGLEWVGFIRSERYGGATEYAPSVKGRFILSRDDSKSIAYLQMNSLKTEDTAIYHCSRGCSGGSCYYYYGMDVWGQGTTVTVSS

SEQ ID NO: 19008 - protein, 104 aa, Homo sapiens
TASGFTSGDYGMSWFRQASGKGLEWVAFIRSEAYGGATEYAASVKGRFTISRDDSKSIAYLQMNSLKTEDTAVYYCSRGCSGGSCYYYYGMDVWGQGTTVTVSS

SEQ ID NO: 19009 - protein, 103 aa, Homo sapiens
GSGFTLGDYGMSWFRQAPGKGLEWVGLIRSERYGGATEYAPSVKGRFILSRDDSKSIGYLQMNSLKTEDTAVYHCSRGCSGGSCYYYYGMDVWGQGTTVTVSS

SEQ ID NO: 19010 - protein, 103 aa, Homo sapiens
VSGFSFGDYAVTWFRQAPGKGLEWVGLMKSERYGGTKEYAASVKGRFTISRDDSRGIAYLQMDSLKTEDTAVYYCSRGCSGGSCYYYYGMDVWGQGTTVTVSS

SEQ ID NO: 19011 - protein, 93 aa, Homo sapiens
TVSGGSISNYYWSWIRQPPGKGLEWIGYIYYSGSTNYNPSLKSRVTISVDTSKNQFSLMLSSVTAADTAVYYCARGRIRADYWGQGTLVTVSS

SEQ ID NO: 19012 - protein, 93 aa, Homo sapiens; identical to SEQ ID NO: 19011

SEQ ID NO: 19013 - protein, 93 aa, Homo sapiens
TVSGGSINNYYWSWIRQPPGKGLEWIGYIYYSGGTNYNPSLKSRVTISVDTSKNQFSLKLNSVTAADTAVYYCARGRIRADYWGQGTLVTVSS

SEQ ID NO: 19014 - protein, 92 aa, Homo sapiens
ASGYTFTNYAIHWVRQAPGQSLEWMGWINAASGNTKYSQKFQGRVTITRDTSASTAYMDLSSLRSEDTAVYYCARSASLDYWGQGILVTVSS

SEQ ID NO: 19015 - protein, 92 aa, Homo sapiens
ASGYSFTSYLMHWVRQAPGQRLEWMGWINAGNGNTRYSQKFQGRVTITRDTSASTAYMELSSLTYEDTAVYFCARSASLDYWGQGTLVTVSS

SEQ ID NO: 19016 - protein, 92 aa, Homo sapiens; identical to SEQ ID NO: 19014

SEQ ID NO: 19017 - protein, 92 aa, Homo sapiens
VASGFTFSTFWMGWVRQAPGKGLEWVANIKQDGSGKYYVDSVKGRFTISRDNAKNSLYLQMNGLRAEDTAVYYCARDWLDYWGQGTLVTVSS

SEQ ID NO: 19018 - protein, 92 aa, Homo sapiens
AASEFIFNNHWMSWVRQAPGKGLQWVANINQDGSQIQYLDSVKGRFTISRDNAKKSLYLQMNSLRPEDTAVYYCARDWLDYWGQGTLVTVSS

SEQ ID NO: 19019 - protein, 92 aa, Homo sapiens
VVSGLTFSNYWMSWVRQAPGKGLELVANIKEDGSAKQYLDSVQGRFTVSRDNAKNSVYLQMNSLRAEDTAVYYCARDWLDYWGQGTLVTVSS

SEQ ID NO: 19020 - protein, 92 aa, Homo sapiens; identical to SEQ ID NO: 19017

SEQ ID NO: 19021 - protein, 97 aa, Homo sapiens
AASGFTFDDYGMSWVRQVPGKGLEWVSGINWNGDTTGYADSVKGRFTISRDNAENSLYLQMNSLRVEDTALYYCARGRSGWYFFDYWGQGILVTVSS

SEQ ID NO: 19022 - protein, 97 aa, Homo sapiens; identical to SEQ ID NO: 19021

SEQ ID NO: 19023 - protein, 97 aa, Homo sapiens; identical to SEQ ID NO: 19021

SEQ ID NO: 19024 - protein, 97 aa, Homo sapiens; identical to SEQ ID NO: 19021

SEQ ID NO: 19025 - protein, 97 aa, Homo sapiens; identical to SEQ ID NO: 19021

SEQ ID NO: 19026 - protein, 97 aa, Homo sapiens
AASGFTFDDYGMSWVRQAPGKGLEWVSGVHWNAGTTGYTDSVKGRFTISRDSAKNSLYLQMNSLRAEDTALYYCARGRSGWYFFDYWGQGTLVTVSS

SEQ ID NO: 19027 - protein, 109 aa, Homo sapiens
TQTLTLTCTFSGFSLTTYGVGVGWIRQPPGKALEWLALIYWDDYKPYSPSLKTRLTVTKDTPKNQVVLTMTNMDPVDTATYYCAHRRGDGNRGDAFDIWGQGTMVTVSS

SEQ ID NO: 19028 - protein, 109 aa, Homo sapiens
TQTLTLTCTFSGFSLNTHGVGVGWIRQPPGKALEWLALIYWDDYKSYTPSLQSRLTITKDTSNNQVVLSMTNMDPVDTAAYYCAHRRGDGNRGDAFDIWGQGTMVTVSS

SEQ ID NO: 19029 - protein, 93 aa, Homo sapiens
AASGFTFSSYEMNWVRQAPGKGLEWVSYISSSGSNIYYADSVKGRFTISRDNAKNSLYLQMNSLRAEDTAVYHCARGRALSFWGQGTLVTVSS

SEQ ID NO: 19030 - protein, 93 aa, Homo sapiens
AASGFTFSSYEMNWVRQAPGRGLELVSHISSSGTTIYYADSVRGRFTISRDNAKNSLYMQMNSLRAEDTAVYYCARGRALSFWGQGTLVTVSS

SEQ ID NO: 19031 - protein, 101 aa, Homo sapiens
AASGFTFSDYYMSWIRQAPGKGLEWVSYISSGGSTIYYADSVKGRFTISRDNVKNSLYLQMNSLRAEDTAEYFCARGFDCSSTSCYAFDLWGQGTMVTVSS

SEQ ID NO: 19032 - protein, 100 aa, Homo sapiens
AASGFTFSDYYMSWIRQAPGKGLEWISYISGSATSIYYADSVKGRFTISRDNARKSLYLQMNSLRAEDTAVYFCARGFDCSSTSCYAFDLWGQGTMVTVS

SEQ ID NO: 19033 - protein, 101 aa, Homo sapiens
AASRFTFSDYYMSWIRQAPGKGLEWVSYISSSDNTIYYADSVRGRFTISRDNAKNSLYLQMNSLRAEDTARYYCARGFDCSSTSCYAFDLWGQGTMVTVSS

SEQ ID NO: 19034 - protein, 101 aa, Homo sapiens
AASGFTFSGYYMSWIRQAPGKGLEWVSYISSRDSTTYYADSVMGRFTISRDNAKNALYLQMNNLRAEDTAIFYCARGFDCSSTSCYAFDLWGQGTMVTVSS

SEQ ID NO: 19035 - protein, 100 aa, Homo sapiens
AASGFPFSDYYLSWIRQAPGKGLEWVSYIGSSGAIYYGDSVRGRFTISRDNAKNSLYLQMNSLRGEDTAVYYCARGFDCSSTSCYAFDLWGRGTMVTVSS

SEQ ID NO: 19036 - protein, 101 aa, Homo sapiens
AASGFIVSGYYMSWIRQAPGKGLEWVSYISDSGSILYYGDSVKGRCTISRDTAKNSLFLQMDSLGAEDTAMYYCARGFDCSSTSCYAFDLWGQGTMVTVSS

SEQ ID NO: 19037 - protein, 101 aa, Homo sapiens
AASGFTVSGYYMSWIRQAPGKGLEWVSYISDSGSILYYGDSVKGRYTISRDTAKNSLYLQMNSLGAEDTAMYYCARGFDCSSTSCYAFDLWGQGTMVTVSS

SEQ ID NO: 19038 - protein, 99 aa, Homo sapiens
ASGFTHSGYYMGWIRQAPGKGLEWVSYISTSGTIYYGDSVRGRFTISRDNAKNSLYLEMNGLRVQDTAMYYCARGFDCSSTSCYAFDLWGQGTMVTVSS

SEQ ID NO: 19039 - protein, 101 aa, Homo sapiens
AASGFSVSDYYMSWIRQAPGKGLEWVSYISNSGSILYYGDSVKGRCTISRDTAKNSLYLQMNSLGAEDTAMYYCARGFDCSSTSCYAFDLWGQGTMVTVSS

SEQ ID NO: 19040 - protein, 101 aa, Homo sapiens
AASGFSISDYYMSWIRQAPGKGLEWVSYISDSGSILYYGDSVKGRCTISRDTAKNSVYLQMNSLGVEDTAMYYCARGFDCSSTSCYAFDLWGQGTVVTVSS

SEQ ID NO: 19041 - protein, 101 aa, Homo sapiens
AASGFTFSDYYMSWVRQAPGKGLEWVSYISGSGITIYYADSVMGRFTISRDNAQHSLYLQMDSLRAEDTAVYYCARGFDCSSTSCYAFDLWGQGTMVTVSS

SEQ ID NO: 19042 - protein, 101 aa, Homo sapiens; identical to SEQ ID NO: 19040

SEQ ID NO: 19043 - protein, 101 aa, Homo sapiens
AASGFIVSDYYMSWIRQAPGKGLEWVSYISDSGSIVYYGDSVKGRCTISRDTAKNSVFLQMDSLGVDDTAKYYCARGFDCSSTSCYAFDLWGQGTMVTVSS

SEQ ID NO: 19044 - protein, 101 aa, Homo sapiens
AASGFIVSDYYMSWIRQAPGKGLEWVSYISDSGSIVYHGDSVKGRCTISRDTAKNSLFLQMDSLGAEDTAMYYCARGFDCSSTSCYAFDLWGQGTMVTVSS

SEQ ID NO: 19045 - protein, 101 aa, Homo sapiens
AASGFIVSDYYMSWIRQAPGKGLEWVSYISDSGSIAYYGDSVKGRCTISRDTAKNSVFLQMDSLGVDDTAKYYCARGFDCSSTSCYAFDLWGLGTMVTVSS

SEQ ID NO: 19046 - protein, 101 aa, Homo sapiens
AASGFTFSGYYMSWIRQAPGKGLEWVSYISDSGISRYYADSVKGRSTISRDNAQHSLYLQMDSLRAEDTALYYCARGFDCSSTSCYAFDLWGQGTMVTVSS

SEQ ID NO: 19047 - protein, 101 aa, Homo sapiens; identical to SEQ ID NO: 19043

SEQ ID NO: 19048 - protein, 101 aa, Homo sapiens
AASGLTFSRFPMSWVRQAPGKGPEWVSYISDSGSIVYYGDSVKGRCTISRDTAKNSVFLQMDSLGVDDTAKYYCARGFDCSSTSCYAFDLWGQGTMVTVSS

SEQ ID NO: 19049 - protein, 101 aa, Homo sapiens
AASGFTVSGYYMSWIRQAPGKGLEWVSYISDSGSILYYGDSVKGRCTISRDTAKNSLYLQMNSLGAEDTAMYYCARGFDCSSTSCYAFDLWGQGTMVTVSS

SEQ ID NO: 19050 - protein, 101 aa, Homo sapiens
AASGFVISDYYMSWIRQAPGKGLEWVSYISGSGSILYYGDSVKGRCTVSRDTAKNSLFLQLDSLGAEDTAMYYCARGFDCSSTSCYAFDLWGQGTMVTVSS

SEQ ID NO: 19051 - protein, 101 aa, Homo sapiens; identical to SEQ ID NO: 19039

SEQ ID NO: 19052 - protein, 101 aa, Homo sapiens
AASGFPLSGYYMSWIRQAPGKGLEWVSYISGSAGAIYYGDSVKGRFTISRDNAKNSLYLQLNSLRAEDTAVYYCARGFDCSSTSCYAFDLWGQGTMVTVSS

SEQ ID NO: 19053 - protein, 101 aa, Homo sapiens
AASGFRISDYYMTWIRQAPGKGLEWVSYITDNGDVLYSGDSVKGRCTISRDTAKNSLSLQMDSLGVEDTAMYYCARGFDCSSTSCYAFDLWGQGTMVTVSS

SEQ ID NO: 19054 - protein, 101 aa, Homo sapiens
AASGFTISDYYMSWLRQAPGKGLQWVSYISGSGSTIYYGDSVKGRFTISRDNAMNSLYLQMNSLGAEDTAVYYCARGFDCSSTSCYAFDLWGQGTVVTVSS

SEQ ID NO: 19055 - protein, 101 aa, Homo sapiens
AASGFAVSDYYMSWIRQAPGKGLEWVSYISDSGSILYYGDSVKGRCTISRDTAKNSLYLQMNSLGADDTAMYYCARGFDCSSTSCYAFDLWGQGTMVTVSS

SEQ ID NO: 19056 - protein, 101 aa, Homo sapiens
AASGFIVSDYYMSWIRQAPGKGLEWVSYISDSGSILYYGDSVKGRCTISRDTAKNSLFLQMDSLGGEDTAMYYCARGFDCSSTSCYAFDLWGQGTMVTVSS

SEQ ID NO: 19057 - protein, 101 aa, Homo sapiens
AASGFSISGYYMSWIRQAPGKGLEWVSYISDGGSILYYGDSVKGRCTISRDTAKNSVYLQMNSLGAEDTAIYYCARGFDCSSTSCYAFDLWGQGTMVTVSS

SEQ ID NO: 19058 - protein, 101 aa, Homo sapiens
AASGFRVSDYYMSWIRQAPGKGLEWVSYITNSGDVLYYGDSVKGRCTISRDTAKNSLYLQVDSLGVEDTAMYYCARGFDCSSTSCYAFDLWGQGTMVTVSS

SEQ ID NO: 19059 - protein, 100 aa, Homo sapiens
AASGFTFSDYYMSWIRQAPGKGLEWVSYIGTGSTIYYGDSVKGRFTISRDNAKNSLYLQMNSLTAEDTALYYCARGFDCSSTSCYAFDLWGQGTMVTVSS

SEQ ID NO: 19060 - protein, 100 aa, Homo sapiens
ASGFAFSDYYMSWIRQAPGKGLEWVSYISGSDITIYYADSVKGRFTISRDNAQNSLYLQMNSLRAEDTAVYYCARGFDCSSTSCYAFDLWGQGTMVTVSS

SEQ ID NO: 19061 - protein, 100 aa, Homo sapiens
AASGFPLSDYYLSWIRQAPGKGLEWVSYIGSSGIIYYGESVKGRFTISRDNAKNSLYLQMNSLRAEDTAVYYCARGFDCSSTSCYAFDLWGQGTMVTVSS

SEQ ID NO: 19062 - protein, 101 aa, Homo sapiens
AASGFSISDYYMSWIRQAPGKGLEWVSYISTRGSPIYYAGSVKGRFTISRDNAKNSLYLQMNSLRAEDTAVYYCARGFDCSSTSCYAFDLWGQGTMVTVSS

SEQ ID NO: 19063 - protein, 101 aa, Homo sapiens
AASGFTLSDYYMSWIRQAPGKGLEWVSYSSSSGSTRYYADSVKGRFTISRDNAKNSLYLQMNSLRAEDTAVYYCARGFDCSSTSCYAFDLWGQGTMVTVSS

SEQ ID NO: 19064 - protein, 101 aa, Homo sapiens
AASGFTFSDYYMSWIRRAPGKGLEWVSYISNSVSSRYYADSVKGRFTISRDNAKNSLYLQMNSLRAEDTAVYYCARGFDCSSTSCYAFDLWGQGTMVTVSS

SEQ ID NO: 19065 - protein, 101 aa, Homo sapiens; identical to SEQ ID NO: 19034

SEQ ID NO: 19066 - protein, 100 aa, Homo sapiens
AASGFTFSDYYMSWIRQAPGKGLEWISYISDSGTSIYYADSVKGRFTISRDNARNSLYLQMNSLRAEDTAVYFCARGFDCSSTSCYAFDLWGQGTMVTVS

SEQ ID NO: 19067 - protein, 102 aa, Homo sapiens
AASGFPFSDYYMSWIRQAPGKGLEWVSYISSSFSSHIYYADSVKGRFTISRDNSKNSLYLQMNSLRAEDTALYYCARGFDCSSTSCYAFDLWGQGTMVTVSS

SEQ ID NO: 19068 - protein, 102 aa, Homo sapiens
AASGFTFSDYYMSWIRQAPGKGLEWVSYISSSVSSTIYYADSVRGRFTISRDNSKKSLYLQMNSLRAEDTALYYCARGFDCSSTSCYAFDLWGQGTMVTVSS

SEQ ID NO: 19069 - protein, 98 aa, Homo sapiens
AVSDGSLRTLFWGWIRQPPGKGLEWIGEDHHNGNTNYNPSFRGRVTISVDTSKLQISLQLRSVTAADTAVYYCARAGTWGAFDAFDIWGQGTMVVVSS

SEQ ID NO: 19070 - protein, 98 aa, Homo sapiens
AVSDGSLRTLFWGWIRQPPGKGLEWIGEDHHNGNTNYNPSFRSRVTISVDTSKLQISLQLRSVTAADTAVYYCARAGTWGAFDAFDIWGQGTMVVVSS

SEQ ID NO: 19071 - protein, 98 aa, Homo sapiens
AVYGESFSRLFWSWIRQPPGKGLEWLGEINHGGSANSNPSLKSRVTMSIDPSKNQFSLRLTSVTAADTAVYYCARAGTWGAFDAFDIWGQGTMVTVSS

SEQ ID NO: 19072 - protein, 94 aa, Homo sapiens
AASGFTVSTNYMSWVRQAPGKGLEWVSIIYNDGSTYYVDSVKGRFTISRDNSKNLLYLQMNTLRTDDTAVYYCARWSGTYYDHWGQGTLVTVSS

SEQ ID NO: 19073 - protein, 95 aa, Homo sapiens
AVSGFSVSSNYMSWVRQAPGKGLEWVSIIYAGGTTTFYRDSVRGRFTISRDNSKNTLYLQMNSLRVDDTAMYYCARWSGTYYDHWGQGTPVTVSS

SEQ ID NO: 19074 - protein, 95 aa, Homo sapiens
AVSGFSVSSNYMSWVRQAPGKGLEWVSIIYADGTTTFYRDSVRGRFTISRDNSKNTLYLQMNSLRADDTAMYYCARWSGTYYDHWGQGTPVTVSS

SEQ ID NO: 19075 - protein, 94 aa, Homo sapiens
AASGFSVGSNYMSWVRQAPGKGLEWVSMIYNSGPTYYTDSVKGRFTISRDNSMNTLYLQMNSLRDEDTAMYYCARWSGTYYDHWGQGTLVTVSS

SEQ ID NO: 19076 - protein, 94 aa, Homo sapiens
AASGFTVGSNYMSWVRQAPGKGLEWVSMIYSGGPTYYTDSVKGRFTISRDNSKNMLYLQMNSLRDEDTAMYYCARWSGTYYDHWGQGTLVTVSS

SEQ ID NO: 19077 - protein, 94 aa, Homo sapiens
AASEFTVGSNYMSWVRQAPGKGLEWVSMIYSGGPTYYTDSVKGRFTISRDNSKNTLYLQMNSLRDEDTAMYYCARWSGTYYDHWGQGTLVTVSS

SEQ ID NO: 19078 - protein, 94 aa, Homo sapiens
AASGFSVGSNYMSWVRQAPGKGLEWVSMIYNSGPTYYTDSVKGRFTISRDNSMNTLYLQMNSLRDEDTAMYYCARWSGTYYDHWGQGTLVTASS

SEQ ID NO: 19079 - protein, 94 aa, Homo sapiens
AASGITVGSNYMSWVRQAPGKGLEWVSMIYSGGPTYYTDSVKGRFTISRDNSKNTLYLQMNSLRDEDTAMYYCARWSGTYYDHWGQGTLVTVSS

SEQ ID NO: 19080 - protein, 94 aa, Homo sapiens
AASGFTVGSNYMSWVRQAPGKGLEWVSMIYSGGPTYYTDSVKGRFTISRDSSKNTLYLQMNSLRDEDTAMYYCARWSGTYYDHWGQGTLVTVSS

SEQ ID NO: 19081 - protein, 94 aa, Homo sapiens
AASGFTVGSNYMSWVRQAPGKGLEWVSMIYSGGPTYYTDSVKGRFTISRDNSKNTLYLQMNSLRDEDTAMYYCARWSGTYYDHWGQGTLVTVSS

SEQ ID NO: 19082 - protein, 94 aa, Homo sapiens
AASGFTVGSNYMSWVRQAPGKGLEWVSMIYSSGPTYYTDSVKGRFTISRDSSKNTLYLQMNSLRDEDTAMYYCARWSGTYYDHWGQGTLVTVSS

SEQ ID NO: 19083 - protein, 94 aa, Homo sapiens; identical to SEQ ID NO: 19082

SEQ ID NO: 19084 - protein, 94 aa, Homo sapiens
AVSGFPVGSNYMSWVRQAPGKGLEWVSMIYNSGPTYYTDSVKGRFTISRDNSKNTLYLQMNSLRDEDTAMYYCARWSGTYYDHWGQGTLVTVSS

SEQ ID NO: 19085 - protein, 94 aa, Homo sapiens; identical to SEQ ID NO: 19081

SEQ ID NO: 19086 - protein, 99 aa, Homo sapiens
TVSGGSISSSSYYWGWIRQPPGKGLEWIGNIYYSGSTYYNPSLKSRVTISVVTSKNQFSLNLSSVTAADTAVYYCARRHSSSRNWFDPWGQGTLVTVSS

SEQ ID NO: 19087 - protein, 99 aa, Homo sapiens
TVSGGSIIPDSYYWCWIRQSPGTGLEWIGSIYYSGSTYYNPSLKSRVTMSVDRSKNQFFLNLNSVTAADTALYYCARRHSSSRNWFDPWGQGTLVTVSS

SEQ ID NO: 19088 - protein, 103 aa, Homo sapiens
TQTLTLTCTFSGFSLSTSGMCVTWIRQPPGKALEWLALIDWDDGKYYNTSLKARLTISKDTSKNQVVLIMTNVDSVDTGTYYCARRWDGLDVWGQGTTVTVSS

SEQ ID NO: 19089 - protein, 103 aa, Homo sapiens
TQTLTLTCTFSGFSLSTSGMCVTWIRQPPGKALEWLALIDWDDGKYYNTSLKARLTISKDTSKNQVVPIMTNVDSVDTGTYYCARRWDGLDVWGQGTTVTVSS

SEQ ID NO: 19090 - protein, 103 aa, Homo sapiens
TQTLTLTCTFSGFSLSTSGMCVSWIRQPPGKALEWLALIDWDDNKYYSASLKTRLTISKDTSKNQVVLIMTNMDPVDTATYFCARRWDGLDVWGQGTTVTVSS

SEQ ID NO: 19091 - protein, 103 aa, Homo sapiens
TQTLTLTCTFSGFSLSTSGVCVSWIRQPPGKALEWLALIDWDNNKYYNTSLKTRLTVSKDTSKNQVVLIMTNMDPVDTATYYCARRWDGLDVWGQGTTVTVSS

SEQ ID NO: 19092 - protein, 103 aa, Homo sapiens
TQTLTLTCTFSGFSLSTSGMCVSWIRQPPGKALEWLALIDWDDNKYYSTSLKTRLTISKDTSKNQVVLIMTNMDPVDTATYYCARRWDGLDVWGQGTTVTVSS

SEQ ID NO: 19093 - protein, 103 aa, Homo sapiens
TQTLTLTCTFSGFSLSTSGMCVTWIRQPPGKALEWLALIDWDDGKYYNTSLKARLTISKDTSKNQVVLIMTNVEPVDTGTYYCARRWDGLDVWGQGTTVTVSS

SEQ ID NO: 19094 - protein, 103 aa, Homo sapiens
TQTLTLTCTFSGFSLSTSGMCVSWIRQPPGKPLEWLALIDWDDNKYYSTSLKTRLTISKDTSKNQVVLIMTNMDPVDTATYYCARRWDGLDVWGQGTTVTVSS

SEQ ID NO: 19095 - protein, 103 aa, Homo sapiens
TQTLTLTCTFSGFSLSTSGMCVSWIRQPPGKALEWLALIDWDDNKYYNTSLKTRLTISKDTSKNQVVLIMTNMDPVDTATYYCARRWDGLDVWGQGTTVTVSS

SEQ ID NO: 19096 - protein, 103 aa, Homo sapiens
TQTVTLTCSFSGFSLSTSGMCVSWIRQPPGKPLEWLALIDWDDNKYYSTSLKTRLTISKDTSKNQVVLIMTNMDPVDTATYYCARRWDGLDVWGQGTTVTVSS

SEQ ID NO: 19097 - protein, 103 aa, Homo sapiens
TQTLTLTCTFSGFSLSTSGMCVSWIRQPPGKALEWLALIDWDDNKYYSTSLKTRLTISKDTSKNQVVLIMTNLDPVDTATYYCARRWDGLDVWGQGTTVTVSS

SEQ ID NO: 19098 - protein, 103 aa, Homo sapiens; identical to SEQ ID NO: 19091

SEQ ID NO: 19099 - protein, 96 aa, Homo sapiens
ASGYTFSSYTMHWVRQAPGQRLEWMGSIPTGNGDPKCSQRFQDRVTITRDTSASTAYMELSSLIFEDTAVYYCARGSSWSGWFDPWGQGTLVTVSS

SEQ ID NO: 19100 - protein, 96 aa, Homo sapiens
ASGYTFTSYAMHWVRQAPGQRLEWMGWINAGNGYTKYSQKFQDRVTITRDTSASTAYMELSSLRSEDTAVYYCARGSSWSGWFDPWGQGTLVTVSS

SEQ ID NO: 19101 - protein, 96 aa, Homo sapiens
EASGFTFSDYWMIWARQAPGKGLEWVANINPGGSETYYVDSVKGRFTISRDNAKRSLYLQMSSLRVEDTAVYHCARFGIEATTDYWGQGTLVTVSS

SEQ ID NO: 19102 - protein, 96 aa, Homo sapiens
EASGFTFSDYWMIWARRAPGKGLEWLANINPGGSAKYYVDSLKGRFTISRDNAKSSLYLQMSSLRVEDTAVYHCARFGIEATTDYWGQGTLVTVSS

SEQ ID NO: 19103 - protein, 96 aa, Homo sapiens
EVSEFTLTIYWMTWVRQAPGGGLEWVANINPDGNDRFYLDSVRGRFTISRDNAKNSVFLQMNNLRADDTGVYYCARFGIEATTDYWGQGTLVTVSS

SEQ ID NO: 19104 - protein, 95 aa, Homo sapiens
AASGFTFSSYWMHWVRQAPGKGLVWVSRIDSDGSSTNYADSVKGRFTISRDNAKNTLYLQMNSLRAEDTAVYYCARLATIRSDYWGQGTLVTVSS

SEQ ID NO: 19105 - protein, 95 aa, Homo sapiens
AASGFTFSSYWMHWVRQAPGKGLVWVSRINSDGSSTNYAESVKGRFTISRDNAKNTLYLQMNSLRAEDTAVYYCARLATIRSDYWGQGTLVTVSS

SEQ ID NO: 19106 - protein, 95 aa, Homo sapiens
AASGFTFGSYWMHWVRQAPGKGLVWVSHINNDGSTTTYADSVKGRFTVSRDNAKNTLYLQMNSLRAEDTAVYYCARLATIRSDYWGQGTLVTVSS

SEQ ID NO: 19107 - protein, 93 aa, Homo sapiens
AASGFTFSSYAMTWLRQAPGEGLEWVSAISGGGGSTYYADSVKGRFTISRDNSKNTLYLQMNSLRAEDTAVYHCAKTVANEFWGQGTLVTVSS

SEQ ID NO: 19108 - protein, 93 aa, Homo sapiens
AASGFTFNTYAMTWVRQAPGKGLEWVSAISGDGLNTYYADSVKGRFIMSRDNSRNRLYLQMNGLRAEDTAVYHCAKTVANEFWGQGTLVTVSS

SEQ ID NO: 19109 - protein, 93 aa, Homo sapiens
AASGFTFNTYAMTWVRLAPGKGLEWVSAISGDGLNTYYADSVKGRFIMSRDNSRNRLYLQMNGLRAEDTAVYHCAKTVANEFWGQGTLVTVSS

SEQ ID NO: 19110 - protein, 95 aa, Homo sapiens
AASGFTFSTYWMTWLRQAPGKGPEWVANINPGGSAEYYVASVKGRFTISRDNAKESLVLQMNSLRVEDTAIYYCATHLNWAWDYWGQGTLVTVSS

SEQ ID NO: 19111 - protein, 95 aa, Homo sapiens
AASGFTFSSYWMSWLRQAPGKGLEWVANIKQDGSEKYYVGSVKGRFTISRDNPKNSLYLQMNSLRAEDTAIYYCATHLNWAWDYWGHGTLVTVSS

SEQ ID NO: 19112 - protein, 95 aa, Homo sapiens
AASGFIFSSYWMTWLRQAPGKGLEWVANIKPDGSEEYYVGSVRGRFTISRDNAKNSQYLQMNSLRAEDTAVYYCATHLNWAWDYWGPGTLVTVSS

SEQ ID NO: 19113 - protein, 95 aa, Homo sapiens
AASGFTFSGYWMSWLRQAPGKGLEWVANIKPDGSERYYVGSVKGRFTISRDNAKNSLYLQMNSLRVEDTAVYYCATHLNWAWDYWGQGTLVTVSS

SEQ ID NO: 19114 - protein, 98 aa, Homo sapiens
AASGFTFSDYSLHWVRQAPGKGLEWVAIISYDGSQRYYRESAGGRFAISRDNSANTLYLQVNTLTSEDTAIYYCARAPSNAWHNFDYWGQGTLVTVSS

SEQ ID NO: 19115 - protein, 98 aa, Homo sapiens
AASGFSFKDYAMHWVRQAPGKELEWVAVISFDASQRYYRDVVQGRFIISRDNTQETLHLHMRSLTIDDSATYYCARAPSNAWHNFDYWGLGTLVTVSS

SEQ ID NO: 19116 - protein, 98 aa, Homo sapiens
AASGFTFRDYSMHWVRQAPGKDLEWVAIISFDGTQKYYRDVVQGRFIISRDNTQETLYLHMRSLTIDDSATYYCARAPSNAWHNFDYWGLGTLVTVSS

SEQ ID NO: 19117 - protein, 98 aa, Homo sapiens
AASGFTFRDYSMHWVRQAPGKDLEWVAIISFDGTQKHYRDVVQGRFIISRDNTQETLYLHMSSLTIDDSATYYCARAPSNAWHNFDYWGLGTLVTVSS

SEQ ID NO: 19118 - protein, 93 aa, Homo sapiens
TVSGGSISSYHWSWIRQPPGKGLEWIGYIYYSGSTKYNPSLKSRVTIAVDTSQNQFSLKLSSVTAADTAVYYCARGPGSFDYWGQGTLVTVSS

SEQ ID NO: 19119 - protein, 93 aa, Homo sapiens
TVSGGSISSYYWSWIRQPPGKTLEWIGNIYYSGSTNYNPSLKSRVTISIDMSKNQISLKLNSVTAADTAVYYCARGPGSFDYWGQGTLVTVSS

SEQ ID NO: 19120 - protein, 92 aa, Homo sapiens
AASGFGLRGNAMTWVRQAPGKGLEWVSDIRGDGHTTFYADSAKGRFLISKDDSKDTLRLEMTSLRVEDTALYYCVGHGGSSYWGRGTSVTVS

SEQ ID NO: 19121 - protein, 93 aa, Homo sapiens
AVSGITLSNNAMTWVRQAPGKGLQWVSDIRGGRDDTYYADSVRGRFSISRDISENILYLQMNSLRVEDTAVYYCVGHGGSSYWGQGTLVTVSS

SEQ ID NO: 19122 - protein, 93 aa, Homo sapiens
AVSGITLSNNAMTWVRQAPGKGLQWVSDIRGGRDDTYYADSVRGRFIISRDVSENILYLQMNSLRVEDTALYYCVGHGGSSYWGQGTWVTVSS

SEQ ID NO: 19123 - protein, 96 aa, Homo sapiens
AASGFIFTSYAVSWVRQAPGKGLEWVSTVTGGVGNTYNADSVEGRFTISRDISKSTVYLQMNSLRVEDTAIYFCAKGGHYSCFDPWGQGTLVTVSS

SEQ ID NO: 19124 - protein, 95 aa, Homo sapiens
ASEFAFSTYAMTWVRQAPGKGLEWVSTISGGGAATYYADSVKGRFTISRDNSKNMLYLQMNSLRAEDTAVYYCAKGGHYSCFDPWGQGTLVTVSS

SEQ ID NO: 19125 - protein, 96 aa, Homo sapiens
AASGFMFTSYAVSWVRQAPGKGLEWVSTITGGVGNTYYADSVEGRFTISRDISKSTVYLQMNSLRVEDTATYFCAKGGHYSCFDPWGQGTLVTVSS

SEQ ID NO: 19126 - protein, 92 aa, Homo sapiens
ASGYTFTSYAMHWVRQAPGQSLEWMGWINAGNGNTKYSQKFQGRVTITRDTSASTVYMELSSLRSEDTAVYYCARKLYFDYWGQGTLVTVSS

SEQ ID NO: 19127 - protein, 92 aa, Homo sapiens
ASGYTFNSYAVHWVRQAPGQSLEWMGWINAGNGNTKYSQKFQGRLIMTRDTSANTVYMELSSLRSEDTAVYFCARKLYFDYWGQGTLVTVSS

SEQ ID NO: 19128 - protein, 92 aa, Homo sapiens
ASGYTFSGYALHWVRQAPGQRLEWMGWINGGNGNTKYSEKFQGRVTITRDTSATTVYMELSSLRSEDTAVYYCARKLYFDYWGQGTLVTVSS

SEQ ID NO: 19129 - protein, 92 aa, Homo sapiens
ASGYIFTSYAMHWVRQAPGQRLEWMGWINAGNGNTKYSQKFQGRVTITRDTSASTAYMELSSLRSEDTAVYYCARKLYFDYWGQGTLVTVSS

SEQ ID NO: 19130 - protein, 97 aa, Homo sapiens
KGSGYSFTNYWIGWVRQMPGKGLEWMGIIYPGDSDTRYSPSFQGQVTISADKSINTAYLQWSSLKASDTAVYYCARRAGGAEYFQHWGQGTPVTVSS

SEQ ID NO: 19131 - protein, 97 aa, Homo sapiens
KGSGYSFTSYWIGWVRQMPGKGLEWMGIIYPGDSDTRYSPSFQGQVIISADKSINTAYLQWSSLKASDTAVYYCARRAGGAEYFQHWGQGTPVTVSS

SEQ ID NO: 19132 - protein, 97 aa, Homo sapiens
KGSEYSFTSYWIGWVRQMPGKGLEWMGIIYPGDSDTRYSPSFQGQVTISADKSISTAYLQWSSLKASDTAMYYCARRAGGAEYFQHWGQGTLVTVSS

SEQ ID NO: 19133 - protein, 97 aa, Homo sapiens
KGSGYSFSSYWIGWVRQMPGKGLEWMGIIYPGDSDTRYSPSFQGQVTISADKSINTAYLQWSSLKASDTAVYYCARRAGGAEYFQHWGQGTPVTVSS

SEQ ID NO: 19134 - protein, 97 aa, Homo sapiens
KGSGYSFTSYWIGWVRQMPGKGLEWMGIIYPGDSDTRYSPSFQGQVTISADKSINTAYLQWSSLKASDTAVYYCARRAGGAEYFQHWGQGTPVTVSS

SEQ ID NO: 19135 - protein, 89 aa, Homo sapiens
ASGLTFSDFALSWVRQAPGKGLEWVSAIGGSGVNTYYADSVKGRFTISRDNSKNTLYLQIHSLRVDDTAVYYCAGIRFWGQGTLVAVSS

SEQ ID NO: 19136 - protein, 89 aa, Homo sapiens
ASGFTFSTHAMNWVRQAPGKGLEWVSAISGSGGHTYYTDSVKGRFTISRDDSKNTMFLQMSSLRIEDTALYFCAGIRFWGQGTLVTVSS

SEQ ID NO: 19137 - protein, 93 aa, Homo sapiens
SGFSFTSSSVQWVRQARGQRLEWIGWIVVGSGNTNYAQKFLERVTFTRDMSRSTTYMELSSLRSDDTAVYYCAADPGLLTYYWGQGTLVTVSS

SEQ ID NO: 19138 - protein, 94 aa, Homo sapiens
ASGFTFSTSAVQWVRQARGQRLEWIGWIVVDSGKTNYAQKFQKRVTITRDMSTSTAYMELSSLRSEDTAVYYCAADPGLLTYYWGQGTLVTVSS

SEQ ID NO: 19139 - protein, 94 aa, Homo sapiens
ASGFAFSTSAVQWVRQARGQRLEWIGWIVVGSGKTNYAQKFQERVTITRDMSTSTAYMELSSLRSEDTAVYYCAADPGLLTYYWGRGTLVTVSS

SEQ ID NO: 19140 - protein, 94 aa, Homo sapiens
ASGFTFSTSAVQWVRQARGQRLEWIGWIVVGVGKTSYAEKFQERVTITRDMSKRTVYLELSGLRSEDTAVYYCAADPGLLTYYWGQGTLVTVSS

SEQ ID NO: 19141 - protein, 94 aa, Homo sapiens
ASGFSFTSSAVQWVRQARGQRLEWIGWIVVGSGNTNYAQKFQERVTITRDMSINTAYMELSSLRSEDTAVYYCAADPGLLTYYWGQGTLVTVSS

SEQ ID NO: 19142 - protein, 94 aa, Homo sapiens
ASGFTFSTAAVQWVRQARGQRLEWIGWIVVGSGKTDYAQNFQERATITRDKSTSTAYMELSSLRSEDTAVYYCAADPGLLTYYWGRGTLVTVSS

SEQ ID NO: 19143 - protein, 98 aa, Homo sapiens
AVYGGSFSGYYWSWIRQPPGKGLEWIGEINHSGSTNYNPSLKSRVTISVDTSKSQFSLKLSSVTAADTAVYYCARGFQLLFGGWFDPWGQGNLVTVSS

SEQ ID NO: 19144 - protein, 98 aa, Homo sapiens
AVYGGSFSGYYWTWIRQPPGKGLEWIGEINHSGRTNYNPSLKSRVTISVDTSKIQFSLKLRSVTAADTAVYYCARGFQLLFGGWFDPWGQGTLVTVSS

SEQ ID NO: 19145 - protein, 100 aa, Homo sapiens
AASGFIFSSYWMSWVRQAPGKGLEWVANIKHDGSEKFYVDSVKGRLTISRDNANNSLYLQMNSLRAEDTAVYYCARLPGYSSSWQYFDYWGQGTLVTVSS

SEQ ID NO: 19146 - protein, 100 aa, Homo sapiens
AASGFTFSSFWMSWVRQAPGKGLEWVANIKHDGIERNYVDSVKGRFTISRDNAKNSLYLQMNSLRAEDTAVYYCARLPGYSSSWQYFDYWGQGTLVTVSS

SEQ ID NO: 19147 - protein, 96 aa, Homo sapiens
AASGFTFSSYAMSWVRQAPGKGLEWVSAISGSGVSTYYADSVKGRFTISRDNSKNTLFLQMNSLRAEDTALYYCAKLGMVRGNDYWGQGTLVTVSS

SEQ ID NO: 19148 - protein, 96 aa, Homo sapiens
AASGFTFSSYAMSWVRQAPGKGLEWVSAISGNGVSTYYADSVKGRFTISRDNSKNTLFLQMNSLRADDTALYYCAKLGMVRGNDYWGQGTLVTVSS

SEQ ID NO: 19149 - protein, 96 aa, Homo sapiens; identical to SEQ ID NO: 19147

SEQ ID NO: 19150 - protein, 96 aa, Homo sapiens
AGSGFTFSSYAMSWVRQAPGKGLEWVSSISGNGVSTYYANSVKGRFTISRDNSKNTLFLQMSSLRAEDTAVYYCAKLGMVRGNDYWGQGTLVTVSS

SEQ ID NO: 19151 - protein, 96 aa, Homo sapiens; identical to SEQ ID NO: 19147

SEQ ID NO: 19152 - protein, 96 aa, Homo sapiens; identical to SEQ ID NO: 19147

SEQ ID NO: 19153 - protein, 95 aa, Homo sapiens
VASGFTFSIYWMTWVRQAPGKGLEWVANINPDGSKIYYVDSVKGRFTISRDNAKNSLYLQMNSLRAEDTALYYCVKQIGGSGSYWGQGTLVTVSS

SEQ ID NO: 19154 - protein, 95 aa, Homo sapiens
VASGFTFSNYWMTWVRQARGKGLEWVANIKEDGSQKYYVDSVKGRFTISRDNAKSSLYLQMNSLRAEDTAVYYCVKQIGGSGSYWGQGTLVAVSS

SEQ ID NO: 19155 - protein, 99 aa, Homo sapiens
AASGFTFSSYAMSWVRQAPGKGLEWVSTISAISGDGGTTNYADSVKGRFTISRDNSKPTLYLQMNSLRAEDTAVYYCAKGGVTTGFDPWGQGTLVTVSS

SEQ ID NO: 19156 - protein, 96 aa, Homo sapiens
AAFEFTFSSYAMSWVRQAPGKGLEWVSVIYSGGGRTSYADSVKGRFTVSRDNSKNTLYLQMNNLRAEDTAVYYCAKGGVTTGFDPWGQGTLVIVSS

SEQ ID NO: 19157 - protein, 96 aa, Homo sapiens
AASGFTFRNAWMTWVRQAPGKGLEWVGRVKSKTDGGTTDYAAPVKGRFTISRDDSKTTLYLQMNSLKTEDTAVYYCTTGAPAFDIWGQGTMVTVSS

SEQ ID NO: 19158 - protein, 96 aa, Homo sapiens
AASGFTFSNAWMSWVRQAPGKGLEWVGRIISKIDGGTTDYTAPVKGRFTISRDDSKNTLYLQMNSLQTEDTAVYYCTTGAPAFDIWGQGTMVTVSS

SEQ ID NO: 19159 - protein, 96 aa, Homo sapiens
AASGFTFSNAWMTWVRQAPGKGLEWIGRIKSKIDGGTTDYAAPVKGRFTISRHDSKNTLYLQMNSLKTEDTAVYYCTTGAPAFDIWGQGTMVTVSS

SEQ ID NO: 19160 - protein, 96 aa, Homo sapiens; identical to SEQ ID NO: 19159

SEQ ID NO: 19161 - protein, 96 aa, Homo sapiens
AASGFTFRNAWMSWVRQAPGKGLEWVGRIKSKIDGGTTDYAAPVKGRFTISRDDSKNTLYLQMNSLKTEDTAVYYCTTGAPAFDIWGQGTMVTVSS

SEQ ID NO: 19162 - protein, 96 aa, Homo sapiens; identical to SEQ ID NO: 19159

SEQ ID NO: 19163 - protein, 92 aa, Homo sapiens
AVSGFTFGDYWMSWVRQAPGKGLECVANIKGDGSEKFYADSVKGRFTVSRDNAKGSLYLEMISLRAEDTAVYYCGRDFGGYWGQGTLVTVSS

SEQ ID NO: 19164 - protein, 91 aa, Homo sapiens
ASGFTFSSYWMSWIRQASGKGLEWVANIKEDGSIKYYVDSVKGRFTISRDNANNFLYLQMDSLRAEDTAIYYCGRDFGGYWGQGTLVTVSS

SEQ ID NO: 19165 - protein, 95 aa, Homo sapiens
TISGGSVSTYYCSWIRQPPGKGLEWIGYISYSGSTKYNPSLRSRVTISLDTSRNQFSLKLSSVTAADTAIYYCARSRSPGDFDYWSQGTLVTVSS

SEQ ID NO: 19166 - protein, 95 aa, Homo sapiens
TVSGGSISSYYWNWIRQPPGKGLEWIGYIYYSGSTDYNPSLKSRVTISVDTSKNQFSLKLSSVTAADTAVYYCARSRSPGDFDYWGQGTLVTVSS

SEQ ID NO: 19167 - protein, 94 aa, Homo sapiens
AGSGFTFSRYTMSWVRQAPGKGLEWVSSISDSGDNTNYADSVRGRFTISRDNSKSTLYLEMNSLRAEDTAVYYCAKPQWELLLWGQGTLVTVSS

SEQ ID NO: 19168 - protein, 94 aa, Homo sapiens
AASGFTFDSYAMSWVRQAPGKGLEWVSAISGSGDNTYYADSVKGRFTIFRDNSKNTLYLQMNSLRAEDTAVYYCAKPQWELLLWGQGALVTVSS

SEQ ID NO: 19169 - protein, 94 aa, Homo sapiens; identical to SEQ ID NO: 19168

SEQ ID NO: 19170 - protein, 97 aa, Homo sapiens
ASGYTFTSYAMHWVRQAPGQRLEWMGWINVGNGNPKYSQKFQGRVTITRDTSANTADMELSGLRSEDTAIYYCARGRGFRPYYFDYWGQGTLVTVSS

SEQ ID NO: 19171 - protein, 97 aa, Homo sapiens
ASGYTFTSYAMHWVRQAPGQRLEWMGWINAGNGNTKYSQKFQGRVTITRDTSASTAYMELSSLGSEDTAVYYCARGRGFRPYYFDYWGQGTLVTVSS

SEQ ID NO: 19172 - protein, 98 aa, Homo sapiens
ASGYTFTSHAMNWVRQAPGQGLEWMGWINTNTGNPTYAQGFTGRFVFSLDTSVSTAYLQISSLKAEDTAIYYCARDPRGYSGYDLDSWGQGTLVTVSS

SEQ ID NO: 19173 - protein, 98 aa, Homo sapiens
ASGYTFSSYAMNWVRQAPGQGLEWMGWINTNTGNPTYAQGFTGRFVFSLENSVSTAYLQISGLKAEDTAVYYCARDPRGYSGYDLDSWGQGTLVIVSS

SEQ ID NO: 19174 - protein, 99 aa, Homo sapiens
AASGFTFSAYTINWVRQAPGKGLEWVSSISSSSTYIYYADSVKGRFTLSRDNAKNSLYLQMSSLRAEDTAVYYCARDRDGDSNWYFDLWGRGTLVTVSS

SEQ ID NO: 19175 - protein, 99 aa, Homo sapiens
AAFGFTFSSYTMNWVRQAPGKGLEWVSSISSSSTYIYYADSLKGRCTISRDNAKNSLYLQMNSLRAEDTAVYYCARDRDGDSNWYFDLWGRGTLVTVSS

SEQ ID NO: 19176 - protein, 99 aa, Homo sapiens
AASGFTFSAYTMNWVRQAPGKGLEWVSSISSSTVYIYYADSLKGRFTISRDNAKKSLYLQMNSLRADDTAVYYCARDRDGDSNWYFDLWGRGTLVTVSS

SEQ ID NO: 19177 - protein, 99 aa, Homo sapiens
AASGFTFSSYTMNWVRQAPGKGLEWVSSISSSSTYIYHADSVKGRFTISRDNAKNSLYLQMNSLRAEDMAVYYCARDRDGDSNWYFDLWGRGTLVTVSS

SEQ ID NO: 19178 - protein, 99 aa, Homo sapiens
AASGFSFSSYTMNWVRQAPGKGLEWVSSISSSSTYMYYADSVKGRFTISRDNAKNSLYLQMNSLRAEDTAAYFCARDRDGDSNWYFDLWGRGTLVTVSS

SEQ ID NO: 19179 - protein, 99 aa, Homo sapiens; identical to SEQ ID NO: 19175

SEQ ID NO: 19180 - protein, 99 aa, Homo sapiens
VASGFTFSSYTMNWVRQAPGKGLEWVSSISSSSTYIYHADSVKGRFTISRDNAKKSLYLQMNSLRAEDMAVYYCARDRDGDSNWYFDLWGRGTLVTVSS

SEQ ID NO: 19181 - protein, 99 aa, Homo sapiens; identical to SEQ ID NO: 19178

SEQ ID NO: 19182 - protein, 99 aa, Homo sapiens
AASGFTFSSYTMNWVRQAPGKELEWVSCITSNRIYIYYADSVKGRFTISRDNAKNSLYLQMNSLRADDTAVYYCARDRDGDSNWYFDLWGRGTLVTVSS

SEQ ID NO: 19183 - protein, 99 aa, Homo sapiens
AAFGFTFSSYTMNWVRQAPGKGLEWVSSISSSSTYIYYADSLMGRCTISRDNAKNSLYLQMNSLRAEDTAVYYCARDRDGDSNWYFDLWGRGTLVTVSS

SEQ ID NO: 19184 - protein, 99 aa, Homo sapiens; identical to SEQ ID NO: 19177

SEQ ID NO: 19185 - protein, 99 aa, Homo sapiens
AGFGFTFSSYTMNWVRQAPGKGLEWVSSISSSSTYIYYADSLKGRCTISRDNAKNSLYLQMNSLRAEDTAVYYCARDRDGDSNWYFDLWGRGTLVTVSS

SEQ ID NO: 19186 - protein, 99 aa, Homo sapiens
AASGFTFSSYTMNWVRQAPGKGLEWVSSISSSSTYIYYADSVKGRFTISRDNAKNSLYLQMNSLRAEDTAVYYCARDRDGDSNWYFDLWGRGTLVTVSS

SEQ ID NO: 19187 - protein, 99 aa, Homo sapiens
AASGFTLSPYEVNWVRQAPGKGLEWISYMSSSGSNIYYADSVKGRFTISRDNAKNSVYLQLSRLRAEDTALYYCARVDWNHFYKHMDVWGKGTTVTVSS

SEQ ID NO: 19188 - protein, 99 aa, Homo sapiens
EASGFTLSPYEVNWVRQAPGKGLEWVSYISSSGSNIYYADSVKGRFTISRDNAKNSVYLQMRSLRAEDTALYYCARVDWNHFYKHMDVWGKGTTVTVSS

SEQ ID NO: 19189 - protein, 99 aa, Homo sapiens
AASGFTLSPYEVNWVRRAPGKGLEWVSYISSSGSNIYYADSVKGRFTISRDNAKNSLYLQMNSLRAEDTAIYYCARVDWNHFYKHMDVWGKGTTVIVSS

SEQ ID NO: 19190 - protein, 112 aa, Homo sapiens
TQTLTLTCTFSGFSLSNSGVSVGWTRQPPGKALEWLALIYWDDDKRYSPSLKNRLTITKDTSKNQVILTMTNMGPGDTATYYCAHRLSGIAGATTGLYFDYWGQGTLVTVSS

SEQ ID NO: 19191 - protein, 112 aa, Homo sapiens
TQTLTLTCTFSGFSLTTSGVAVGWIRQPPGKALEWLALIYWDDDQRYSHSLKSRLTITKDTSKNQVVLTMTNMDPVDTATYYCAHRLSGIAGATTGLYFDYWGQGTLVTVSS

SEQ ID NO: 19192 - protein, 92 aa, Homo sapiens
TVSGGSISSSNYYWGWIRQPPGKGLEWIGSIYYSGRTYYNPSLTRRVTISVDTPKNQFSLELKSVTAADTAVYYCARGATSWGQGTLVTVSS

SEQ ID NO: 19193 - protein, 91 aa, Homo sapiens
VSGGSISGSNYYWGWIRQPPGKGLEWIGSIYYSGRTYYNPSLKRRVTISVDSPKKQFSLKLSSVTAADTAIYYCARGATSWGQGTLVTVSS

SEQ ID NO: 19194 - protein, 92 aa, Homo sapiens
TVSGGSISSSTYYWGWIRQSPGKGLEWVGSIYYSGRTYYNPSLKSRVTMSVDTSKNQFSLKLRSVTATDTAVYYCARGATSWGQGTLVTVSS

SEQ ID NO: 19195 - protein, 91 aa, Homo sapiens; identical to SEQ ID NO: 19193

SEQ ID NO: 19196 - protein, 104 aa, Homo sapiens
TQTLTLTCTFSGFSLSTSGVSVGWIRQPPGKALEWLALLYWDDDKRYSPSLKSRLTITKDTSKNQVVLTMTNMDPVDTATYYCAHRRGSSWYVWGQGTLVTVSS

SEQ ID NO: 19197 - protein, 104 aa, Homo sapiens
TQTLTLTCTFSGFSLSTSGVSVGWIRQPPGKALEWLALIYWDDDRRYSPTLKSRLTITKDTSKNQVVLTMTNMDPVDTGTYYCAHRRGSSWYVWGQGTLVTVSS

SEQ ID NO: 19198 - protein, 104 aa, Homo sapiens
TQTLTLTCTFSGFSLSTSGVSVGWIRQPPGKALEWLALLYWDDDKRYSPSLKSRLTITRDTSKNQVVLTMTNMDPVDTATYYCAHRRGSSWYVWGQGTLVTVSS

SEQ ID NO: 19199 - protein, 99 aa, Homo sapiens
AASGFTLNTYEFNWVRQAPGMGLEWISYIGHSGIGIYYAGSVKGRFTVSRDNAKNSVYLQMNSLRADDTAVYYCARETEGCGGDCYDYWGQGTLVTVSS

SEQ ID NO: 19200 - protein, 99 aa, Homo sapiens
AASGFTFSSYEFNWVRQAPGKGLEWVSYIGHGGRATYYSDSVKGRFTISRDDAKNSVYLQMNSLRVEDTALYYCARETEGCGGDCYDYWGQGTLVTVSS

SEQ ID NO: 19201 - protein, 93 aa, Homo sapiens
AAAGFTFSNYAMGWVRQAPGKGLEWVSTISGSGDNTYYADSVKGRFTISRDNSKNTLYLQMNSLRAEDTAVYYCARQVWLDYWGQGTLVTVSS

SEQ ID NO: 19202 - protein, 93 aa, Homo sapiens
AASGFTFSSYAMSWVRLAPGKGLEWVSTISGSGDSTYYADSVKGRFTISRDNSKNTLYLQMNSLRAEDTAVHYCARQVWLDYWGQGTLVTVSS

SEQ ID NO: 19203 - protein, 95 aa, Homo sapiens
ASGYIFTSHFIHWVRQAPGQRLEWMGWINPDNGNTKYSERFQGRVTIIRDTSASSAFMELTSLTFEDTAEYFCARGGYRSGLDYWGQGTLVTVSS

SEQ ID NO: 19204 - protein, 95 aa, Homo sapiens
ASGYSFGIHFIHWVRQAPGQRLEWIGWISVDKDIAKYSQNFQDRVTITRDTSANTSYMELSSLRTEDTAVYYCARGGYRSGLDYWGQGTLVTVSS

SEQ ID NO: 19205 - protein, 95 aa, Homo sapiens
ASGYSFGIHFIHWVRQAPGQRLEWIGWISVDKGIAKYSQNFQDRVTITRDTSANTSYMELSSLRTEDTAVYYCARGGYRSGLDYWGQGTLVTVSS

SEQ ID NO: 19206 - protein, 94 aa, Homo sapiens
AASGFTFSSYAMSWVRQAPGKGLEWVSAISGSGGSTYYADSVKGRFTISRDNSKNTLYLQMNSLRAEDTAVYYCARGSDYGDYWGQGTLVTVSS

SEQ ID NO: 19207 - protein, 94 aa, Homo sapiens
AASGFTFSTYAMNWVRQAPGKGLEWVSSISTSTDNTHYADSVKGRFTISRDNSKSTLYLQMNSLRAEDTAVYYCARGSDYGDYWGQGTLVTVSS

SEQ ID NO: 19208 - protein, 98 aa, Homo sapiens
VSGINFNLAWMTWVRQAPGKGLEWVSRIKSKGSGETTDYAAPVEGRFTISRDDSKTTLYLQMSSLKIEDTAFYYCANVKDMSSWSLEYWGQGILVTVS

SEQ ID NO: 19209 - protein, 98 aa, Homo sapiens
VSGINFNRAWMTWVRQAPGKGLEWVSRIKSKGGGGTTDYAAPVEGRFTISRDDSKNTLYLQMSSLKIEDTAFYYCANVKDMSSWSLEYWGQGILVTVS

SEQ ID NO: 19210 - protein, 98 aa, Homo sapiens
VSGINFNVAWMTWVRQAPGKGLEWVSRIKSKGSSETTDYAAPVEGRFTISRDDSKTTLYLQMSSLKIEDTAFYYCANVKDMSSWSLEYWGQGILVTVS

SEQ ID NO: 19211 - protein, 100 aa, Homo sapiens
AASGFNFIYAWMTWVRQSPGKGLEWVGRIKSKGSGETTDYAAPVKGRFTISRDDSKNMVYLQMNSLKTEDTAVYYCANVKDMSSWSLEYWGRGTLVTVSS

SEQ ID NO: 19212 - protein, 96 aa, Homo sapiens
AASGFSFSSYIMNWVRQAPGKGLEWVSTISGSGGATFYADSVRGRFTISRDNSKDTLYLEMNSLRAEDTAMFYCAKSIGRNYFDYWGQGTLVTVSS

SEQ ID NO: 19213 - protein, 96 aa, Homo sapiens
AASGFPLSKYPMSWVRQAPGKGLEWVSSFDPYNGYPTYADSVQGRFTISRDTSRNTLYLQMNSLRADDTALYYCAKSIGRNYFDYWGQGALVTVSS

SEQ ID NO: 19214 - protein, 92 aa, Homo sapiens
ASGYTFISYTIHWVRQAPGQRLAWMGCINAGNGNTKYSQKFQGRVTITRDTSASTVYMELSSLRSEDTAVYYCARADILRPWGQGTLVTVSS

SEQ ID NO: 19215 - protein, 92 aa, Homo sapiens
AFGYTFTSYPMHWVRQAPGQRFEWMGWINVANGNTKYSQKFQGRVTITRDTSASTAYMELSSLRSEDTAVYYCARADILRPWGQGTLVTVSS

SEQ ID NO: 19216 - protein, 92 aa, Homo sapiens
ASGYTFTSYPMHWLRQAPGQRPEWMGWINVGNGNTKYSQRFQGRVTITRDTSASTAYMELSSLTSEDTATYYCARADILRPWGQGTLVTVSS

SEQ ID NO: 19217 - protein, 92 aa, Homo sapiens
ASGYTFTSYPMHWLRQAPGQRLEWMGWINVGNGNTKYSQKFQGRVTITRDTSASTAYMELSSLRSEDTAIYYCARADILRPWGQGTLVTVSS

SEQ ID NO: 19218 - protein, 92 aa, Homo sapiens
ASGYTFTSYPMHWLRQAPGQRFEWMGWINVGNGNTKYSPKFQGRVTITRDTSASTAYMELSSLKSEDTALYYCARADILRPWGQGTLVTVSS

SEQ ID NO: 19219 - protein, 92 aa, Homo sapiens; identical to SEQ ID NO: 19216

SEQ ID NO: 19220 - protein, 92 aa, Homo sapiens
ASGYTFTSFPIHWVRQAPGQRLEWMGCINIGNGNTKYSQKFQGRVTITRDTSANTAYLELSSLRFEDMAVYYCARADILRPWGQGTQVTVSS

SEQ ID NO: 19221 - protein, 100 aa, Homo sapiens
TVSGGSISSSTYYWGWIRQPPGKGLEWIGSIYYSGSTYYNPSLKSRVTISVDTSKNQFSLKLSSVTAADTAVYNCARVYYYDSSGPFDYWGQGTLVTVSS

SEQ ID NO: 19222 - protein, 100 aa, Homo sapiens
TVSGGSISSSTYYWGWIRQSPGKGLEWTGSIYYSGSTYYNPSLKSRVTISVDTSKNQFSLKLSSVTAADTAVYYCARVYYYDSSGPFDYWGQGTLVTVSS

SEQ ID NO: 19223 - protein, 100 aa, Homo sapiens
TVSGGSISSSSYYWGWIRQPPGKGLEWIGSIYYSGTTYYNPSLKSRVTISVDTSQNQFSLKLSSVTAADTAVYYCARVYYYDSSGPFDYWGQGTLVTVSS

SEQ ID NO: 19224 - protein, 100 aa, Homo sapiens
TVSGGSISSSTYYWGWIRQPPGKGLEWIGSIYYSGSTYYNPSLKSRVTISVDTSKNQFSLRLSSVTAADTAVCYCARVYYYDSSGPFDYWGQGTLVTVSS

SEQ ID NO: 19225 - protein, 92 aa, Homo sapiens
AASGFTFSSDWMIWVRQAPEKGLEWVASIQPHGDYKYYVDSVKGRFTISRDNAQNSLFLQMNSLRVDDTAVYYCTTGGLDFWGQGTLVTVSS

SEQ ID NO: 19226 - protein, 92 aa, Homo sapiens
EASGFTFSSTYMRWIRQAPGKGLEWVATIKENGSGKFYVDSVKGRFTISRDNAENSLYLEMNSLRVEDTAIYYCTTGGLDFWGQGALVTVSS

SEQ ID NO: 19227 - protein, 99 aa, Homo sapiens
ASGYTFTNYAIHWVRQAPGQRLEWMGWINAGNGNTKYSQKFQGRVTITRDTSASTAYMELSSLRSEDTAVYYCARAYMVRGVIFWFDPWGQGTLVTVSS

SEQ ID NO: 19228 - protein, 99 aa, Homo sapiens
ASGYTFTNYAIHWVRQAPGQRLEWMGWINAGNGNTKYSQSFQGRVTFTRDTSAATAYMQLSSLKSEDTAVYYCARAYMVRGVIFWFDPWGQGTLVTVSS

SEQ ID NO: 19229 - protein, 95 aa, Homo sapiens
TAFGFAFGDYTMTWIRQTPGKGLEWVGFIRNKADGGTPEYAASVKGRFTLSRDDSKSIVFLQMNSLQTEDTAIYYCTRDPVLTGWGQGTLVTVSS

SEQ ID NO: 19230 - protein, 95 aa, Homo sapiens
TTFGFAFRDYTMTWIRQTPRKGLEWVGFIRNKADGGTPEYAASVKGRFTLSRDDSKSIVFLQMNSLQTEDTAIYYCTRDPVLTGWGQGTLVTVSS

SEQ ID NO: 19231 - protein, 95 aa, Homo sapiens
TASGFTFGDYTMSWIRQTPGEGLEWVGFIRNKASGGTPEYAASVRGRFTISRDDSKSIAYLQMNNLKTEDTAVYYCTRDPVLTGWGQGTLVTVSS

SEQ ID NO: 19232 - protein, 95 aa, Homo sapiens; identical to SEQ ID NO: 19230

SEQ ID NO: 19233 - protein, 101 aa, Homo sapiens
AASGFTFSGSAMHWVRQASGKGLEWIGLTRSKYHNYATSYAASVKGRFTISRDDSKNTAYLQMNSLKTDDTAVYYCARHNYYDSSGYLDYWGQGALVTVSS

SEQ ID NO: 19234 - protein, 101 aa, Homo sapiens
AASGFTFSGSAIHWVRQASGKGLEWIGLTRSKYHNYATSYAASVKGRFTISRDDSKNTAYLQMNSLKTDDTAVYYCARHNYYDSSGYLDYWGQGALVTVSS

SEQ ID NO: 19235 - protein, 101 aa, Homo sapiens; identical to SEQ ID NO: 19233

SEQ ID NO: 19236 - protein, 91 aa, Homo sapiens
AASGFSFSDYYMTWIRQAPGKGLEWVSHISSSGSTIYYADSVKGRFTISRDNAKNSLYLQMDSLRPEDTAVYYCARKFNYWGQGTLVTVSS

SEQ ID NO: 19237 - protein, 91 aa, Homo sapiens
AASGFTFSDYYMNWIRQAPGKGLEWVSYISSSGSTIYYADSVKGRFTISRDNAKNSLYLQMNSLSAEDTAVYYCARKFNYWGQGTLVTVSS

SEQ ID NO: 19238 - protein, 91 aa, Homo sapiens
AASGFTFSDYSMNWIRQAPGKGPEWVSHISSSGSNIYYADSVKGRFTISRDNAHNSLYLQMNSLRAEDTAVYYCARKFNYWGQGTLVTVSS

SEQ ID NO: 19239 - protein, 91 aa, Homo sapiens
AASGFTFSDYYMTWLRQAPGKGLEWVSYISSSGSTIYYADSVKGRFTISRDNAKNSLYLQMNSLRAEDTAVYYCARKFNYWGQGTLVTVSS

SEQ ID NO: 19240 - protein, 98 aa, Homo sapiens
ASGYTFTSYALQWVRQAPGQRLEWLGWTNADNGNTEYSQKFRGRVTMTRDTFASTAYMELSSLRSEDTAVYYCARDFLGDSGFEFDYWGQGTLVTVSS

SEQ ID NO: 19241 - protein, 98 aa, Homo sapiens
ASGYTFTSYALQWVRQAPGQRLEWLGWTNAGNGNTEYSQKFRGRVTITRDTSASTAYMELSSLRSEDTAVYYCARDFLGDSGFEFDYWGQGTLVTVSS

SEQ ID NO: 19242 - protein, 97 aa, Homo sapiens
ASGYRFSSYAIQWVRQAPGQRLEWMGWVNGANGDTRYSQKFQGRVTFSRDSSASTAYMELTSLASEDTAVYYCARDFLGDSGFEFDYWGQGTLVTVS

SEQ ID NO: 19243 - protein, 97 aa, Homo sapiens
AASGFTFSSYAMTWVRQAPGKGLEWVSAISGSSDRTYYADSVKGRFTVSRDNSKNTLYLQMSSLRAEDTAVYYCAKGRGLVSPDDYWGQGTLVTVSS

SEQ ID NO: 19244 - protein, 97 aa, Homo sapiens
AASGFTFINYAMTWVRQAPGKGLEWVSAISGSSDRTYYADSVKGRFTISRDNSKNTLYLQMNSLRAEDTALYYCAKGRGLVSPDDYWGQGTLVTVSS

SEQ ID NO: 19245 - protein, 97 aa, Homo sapiens
AASGFAFFNYAMTWVRQAPGKGLEWVSAISGGSDRTYYADSVEGRFTISRDNSKNTLYLQMNNLRAEDTALYYCAKGRGLVSPDDYWGQGTLVTVSS

SEQ ID NO: 19246 - protein, 92 aa, Homo sapiens
AASGFTFSKFAMNWVRQAPGKGLEWISYCNSDSRAIYYADSVEGRFTISRDNAKNSLYLQMNSLRGGDTAVYYCMRGNGDYWGQGTPVTVSS

SEQ ID NO: 19247 - protein, 92 aa, Homo sapiens
AASGFTFSRFAMNWVRQAPGKGLEWVSYCNSDSRAMYYADSVRGRFTISRDNAKNSVYLQMNSLRDGDTAVYYCMRGNGDYWGPGTLVTVSS

SEQ ID NO: 19248 - protein, 91 aa, Homo sapiens
ASGFTFSRFAMNWVRQTPGKGLEWISYINSDSRAMYYADSVQGRFTISRDNVKNSFYLQMNSLRVGDTAVYYCMRGNGDYWGPGTLVTVSS

SEQ ID NO: 19249 - protein, 92 aa, Homo sapiens
AASGFTFSRFAMNWVRQAPGKGLEWVSYCNSDSRAMYYADSVKGRFTISRDNSKNSVYLQMNSLRDGDAAVYYCMRGNGDYWGQGTLVTVSS

SEQ ID NO: 19250 - protein, 92 aa, Homo sapiens
EVSGFTFKNFAMNWVRQAPGKGLEEVSYISKYSTSIYYIDSVKGRFTTSRDNDKNSLYLQMDSLRDEDTAMYYCMRGNGDYWGQGTLVIVSS

SEQ ID NO: 19251 - protein, 99 aa, Homo sapiens
AASGFIFSRAWMSWVRQPPGKGLEWVGRIKAKSDDEATDYAAFVKGRFTVSRDDSKNTLYLQMNSLKTEDTAVYYCITECSSTICNGGWGQGTLVTVSS

SEQ ID NO: 19252 - protein, 99 aa, Homo sapiens
AASGFTFSDAWMSWVRQAPGKGLEWVAGIKIKSDGEATNYAASVKGRFTISRDDSENTLYLQMNSLKTEDTAVYYCITECSSTICNGGWGQGTLVTVSS

SEQ ID NO: 19253 - protein, 99 aa, Homo sapiens
AASGFTFSTAWMSWVRQAPGKGLEWVAGIKIKSDDEATNYAASVKGRFTISRDDSENTLYLQMNSLKTEDTATYYCITECSSTICNGGWGQGTLVTVSS

SEQ ID NO: 19254 - protein, 99 aa, Homo sapiens
AASGFSFSTYWMHWVRQAPGKGLVWVSRINSDETITTYADSVKGRFTISRDNARNTLYLQMNSLRVEDTAVYYCVREQTALTIFGMDVWGQGTTVTVSS

SEQ ID NO: 19255 - protein, 99 aa, Homo sapiens
AASGFTFSNYWMHWVRQAPGKGLVWVAHINSDGTTTNYADSVRGRFAISRDNAKNALYLQMNSLRAEDTAVYYCVREQTALTIFGMDVWGQGSTVTVSS

SEQ ID NO: 19256 - protein, 99 aa, Homo sapiens
TVSGGSISSGGYSWSWIRQHPGKGLEWIGYIYDSGSTYSNPSLKSRITISVDTSKNQFSLNLSSVTAADTAVYYCARDPIAVPGLFDYWGQGTLVTVSS

SEQ ID NO: 19257 - protein, 99 aa, Homo sapiens
TVSGGSISSGGYSWSWIRQHPGKGLEWIGYIYDSESTYSNPSLKSRITISVDTSKNQFSLNLSSVTAADTAVYYCARDPIAVPGLFDYWGQGTLVTVSS

SEQ ID NO: 19258 - protein, 95 aa, Homo sapiens
AASGFTFTSYWMHWVRQAPGKGLVWVSRINSDGSSTSYADSVKGRFTISRDNAKNTLYLQMNSLRAEDTAVYYCARGGGSYSGYWGQGTLVTVSS

SEQ ID NO: 19259 - protein, 95 aa, Homo sapiens
AASGFTFSSYWMHWVRQAPGKGLVWVSRINSDGSSTSYADSVKGRFTISRDNAKNTVYLQMNSLRAEDTAVYSCARGGGSYSGYWGQGTLVTVSS

SEQ ID NO: 19260 - protein, 95 aa, Homo sapiens
AASGFTFSSYWMHWVRQASGKGLVWVSRINSDGSSTTYADSVKGRFTISRDNAKNTLYLQMNSLRAEDTAVYYCARGGGSYSGYWGQGTLVTASS

SEQ ID NO: 19261 - protein, 95 aa, Homo sapiens
AASGFTFSSYWMHWVRQASGKGLVWVSRINSDGSSTTYADSVKGRFTISRDNAKNTLYLQMNSLRAEDTAVYYCARGGGSYSGYWGQGTLVTVSS

SEQ ID NO: 19262 - protein, 93 aa, Homo sapiens
AVSGFSFRRNALTWVRQAPGKGLEWVSTIRGVDDTTLYADSVKGRFAIFRDNSKDTLYLQMNSLRAEDTAVYYCVGHGSSSGWGQGTLVTVSS

SEQ ID NO: 19263 - protein, 93 aa, Homo sapiens
AASGFTLTGNAMDWVRQAPGKGLEWVASIRGDRDRRFYAASVRGRFTIFTDDSSNTLYLQMDSLRVEDTAIYYCVGHGSSSGCGQGTPVAVSS

SEQ ID NO: 19264 - protein, 93 aa, Homo sapiens; identical to SEQ ID NO: 19263

SEQ ID NO: 19265 - protein, 93 aa, Homo sapiens; identical to SEQ ID NO: 19262

SEQ ID NO: 19266 - protein, 95 aa, Homo sapiens
AASGFTFSDYSMNWVRQAPGKGLEWISYIRSGTHSIVYADSVKGRFTISRDNAKNSLYLQMNSLRDEDTALYYCVRDHMYAFDIWGQGTMVTVSS

SEQ ID NO: 19267 - protein, 95 aa, Homo sapiens
AASGFTFSPYSMNWVRQAPGKGLEWVSYIRTSPSTIYYADSVKGRFTISRDNAKNSLYLQMNSLRDEDTAVYYCVRDHMYAFDIWGQGTMVAVSS

SEQ ID NO: 19268 - protein, 100 aa, Homo sapiens
AVYGGSFSGYYWTWVRQPPGKGLEWIGEINHSGSANYNPSLKSRVTVSVDTSKNQFSLKLNSVTAADTAVYYCAGAVVVTAMTYWYFDLWGRGTLVTVSS

SEQ ID NO: 19269 - protein, 100 aa, Homo sapiens
AAYGGSFSGHYWTWIRQSPGRGLEWIGQLSHSGSTNYNPSLKSRVTISLDTSRNQFSLKLTSVTAADTATYYCAGAVVVTAMTYWYFDLWGRGTPVTVSS

SEQ ID NO: 19270 - protein, 95 aa, Homo sapiens
AASGFTFTNAYMSWVRQAPGKGLEWVGRIKSKSEGGTADYAAPVKGRFTISRDDSKNTLYLQMNSLKTEDTAVYYCTTYRSYMDVWGKGTTVTVS

SEQ ID NO: 19271 - protein, 96 aa, Homo sapiens
AASGFTFSNVYMSWVRQAPGKGLEWVGRIKSETEGGTADYAAPVKGRFTISRDDSQNTMYLQMNSLKTEDTAVYYCTTYRSYMDVWGQGTTVTVSS

SEQ ID NO: 19272 - protein, 96 aa, Homo sapiens
EASEFTFTNVWMSWVRQAPGTGLEWVGRIQSKTDGGTAEYAAPVKGRFTISRDDSKNTLYLQMNSLKIEDTAVYYCTTYRSYMDVWGKGTTVTVSS

SEQ ID NO: 19273 - protein, 95 aa, Homo sapiens
AASGFTFTNAYMSWVRQAPGKGLEWVGRIKSKSEDGTADYAAPVKGRFTISRDDSKNMLYLQMNSLKTEDTAVYYCTTYRSYMDVWGKGTTVTVS

SEQ ID NO: 19274 - protein, 98 aa, Homo sapiens
ISGDSVSSNSAAWNWIRQSPSRGLEWLGRTYYQSKWYNDYAVSVKSRITINPDTSKNQFSLQLNSVTPEDTAVYYCARGWLRNGMDVWGQGTAVTVSS

SEQ ID NO: 19275 - protein, 98 aa, Homo sapiens
ISGDSVSGNSGAWNWIRQSPSRGLEWLGRTYFQSKWYNDYEVSVKSRVSITPDTSKNQFSLQLNSVTPEDTAVYYCARGWLRNGMDVWGQGTTVTVSS

SEQ ID NO: 19276 - protein, 97 aa, Homo sapiens
GASGFTFDSSAMSWVRQAPGKGLEWVSSINNFGGTTYYADSVKGRFTISRDNSKNTLYLQMNSLRAEDTAVYYCAKVQGWVDPFDYWGQGTLVSVSS

SEQ ID NO: 19277 - protein, 97 aa, Homo sapiens
AASGFTFSSSGMSWVRQAPGKGLEWVSSINNNGGRTFFADSVKGRFTISRDNSKNTLYLQMNSLRGEDTAVYYCAKVQGWVDPFDYWGQGTLVTVSS

SEQ ID NO: 19278 - protein, 98 aa, Homo sapiens
KGSGYSFTSYWIGWVRQMPGKGLEWMGIIYPHDSDTRYSPSFQGQVTISADKSTNTAYLQWTSLKASDTAIYYCARRGRGGTTYFDYWGQGNLVTVSS

SEQ ID NO: 19279 - protein, 98 aa, Homo sapiens
KASGYSFTSYWIGWVRQMPGTGLEWMGIIYPSDSDTRYSPSFQGQVTISADRSISTAYLQWSSLKASDTAMYYCARRGRGGTTYFDYWGQGTLVTVSS

SEQ ID NO: 19280 - protein, 95 aa, Homo sapiens
AVSGFIFSNYWMSWVRQAPGKGLEWVANIAPDGSDKYYVDSMWGRFTISRDNTKNSLYLQVNSLRDDDTALYYCGRVVGAAVDYWGQGTLVTVSS

SEQ ID NO: 19281 - protein, 95 aa, Homo sapiens
AASGFTFGNYWMSWVRQAPGKGPEWVANIAPGGDDTRYVDSVRGRFTISRDNSKNSQWLQVNSLRAEDTAVYYCGRVVGAAVDYWGQGTLVTVSS

SEQ ID NO: 19282 - protein, 93 aa, Homo sapiens
AASGFTFNSYAMSWVRQAPGKGLEWVSTISSSGDNTYYADSVKGRFTISRDNSKHTLYLQMNSLRGEDTALYYCVRQVWSDYWGQGTLVTVSS

SEQ ID NO: 19283 - protein, 93 aa, Homo sapiens
AASGFTFSTYAMSWVRQAPGKGLEWVSTISSSGDRTYYADSVKGQFTISRDNSKNTLYLQVNSLRAEDTAVYYCVRQVWSDYWGQGTLVTVSS

SEQ ID NO: 19284 - protein, 94 aa, Homo sapiens
TVSGDSMTTYYWSWIRQPPGKGLEWIGYISQSGSATYNPSLNSRVTISIDTATNQFSLNLRSVTPADTAIYYCARESRNFFDPWGQGTLVTVSS

SEQ ID NO: 19285 - protein, 95 aa, Homo sapiens
TVSGDSIKSSFYWSWIRQTPGKGLEWIAYMHHSGTAKYNPYLKSRVTISMDTSKNQLSLKVTSMSTVDTAIYYCARESRNFFDPWGQGTLVTVSS

SEQ ID NO: 19286 - protein, 92 aa, Homo sapiens
ASGYTFTSYPMHWVRQAPGQGLEWMAWISAGNDNTKYSQKFQGRVTITRDTSASTAYMELSSLRSEDTAVYYCARGDVLDYWGQGTLVTVSS

SEQ ID NO: 19287 - protein, 92 aa, Homo sapiens
ASGYTFTSYAMHWVRQAPGQTLEWMAWINAGNDDTKYSQKFQGRVTITRDTSASTAYMDLSSLTSEDTAVYYCARGDVLDYWGQGSLVTVSS

SEQ ID NO: 19288 - protein, 91 aa, Homo sapiens
AASGFLLSSYEVNWVRQAPGKGLEWLAYINADGDTIHYTGSVRGRFTISRDNAANRVFLQMNSLTVEDSALYYCAGSWDYWGQGTLVTVSS

SEQ ID NO: 19289 - protein, 91 aa, Homo sapiens
AVSGFTLSNYEMNWVRQAPGKGLEWVSYIGSSGSSISYTDSVKGRFTISRDNAKNSLYLQMNSLRAEDTAIYYCAGSWDYWGQGALVTVSS

SEQ ID NO: 19290 - protein, 94 aa, Homo sapiens
AASGFTFSSYVMNWVRQAPGKGLEWVAYISVASDIIYYADSVKGRFTISRDNAKNSLYLQMDSLRDEDTAVYYCTRDRYSGSYWGQGTLVTVSS

SEQ ID NO: 19291 - protein, 94 aa, Homo sapiens
AASGFIFRNYNLNWIRRAPGKGLEWIAYISTGSTTIHYADSVKGRFTISRDDAKDSIFLQMDSLRDEDTATYYCTRDRYSGSYWGQGTLVTVSS

SEQ ID NO: 19292 - protein, 94 aa, Homo sapiens
VASGFSFSNYVMNWVRQAPGKGLEWVAYISVASDITYYADSVKGRFTISRDNAKNSLYLQMDSLRDEDTAVYYCTRDRYSGSYWGQGTLVTVSS

SEQ ID NO: 19293 - protein, 96 aa, Homo sapiens
VASGFTFSNHWMHWVRQAPGKGLVWVSEINPDGRAAHYADSVRGRFTISRDNAKNTLFLQMNTLGADDRAVYFCTKGGPRYSVDVWGLGATVTVSS

SEQ ID NO: 19294 - protein, 96 aa, Homo sapiens
VASGFTFSNHWMHWVRQAPGKGLVWVSEINPDGRAAHYADSVRGRFTISRDNAKNTLFLQMNTLGADDRVVYFCTKGGPRYSVDVWGLGATVTVSS

SEQ ID NO: 19295 - protein, 96 aa, Homo sapiens
AASGFTFSSRWMHWVRQAPGKGLVWVSQISGDGGGTSYSDSVKGRFTISRDNAKNTLYLQMNSLRAEDTAVYYCTKGGPRYSVDVWGQGTTVTVSS

SEQ ID NO: 19296 - protein, 98 aa, Homo sapiens
AASGFSFNTYAMSWVRQAPGKGLEWVSTISNSRSGERTYYTESVTGRFTISRDPSKDTVNLQMNSLRAEDTAVYFCVKDKGAIFGDYWGQGALVTVSS

SEQ ID NO: 19297 - protein, 96 aa, Homo sapiens
AASGFSFRTYAMSWVRQAPGRGLDWVSTISNDGTRTYYAESVKGRFTISRDDSSNTVYLQMSSLRADDTALYYCVKDKGAIFGDYWGQGALVTVSS

SEQ ID NO: 19298 - protein, 96 aa, Homo sapiens
AASGFTFRTYAMSWVRQAPGRGLDWVSTISNDGTRTYYAESVKGRFTISRDDSTNTVYLQMNSLRAEDTALYYCVKDKGAIFGDYWGQGALVTVSS

SEQ ID NO: 19299 - protein, 98 aa, Homo sapiens; identical to SEQ ID NO: 19296

SEQ ID NO: 19300 - protein, 97 aa, Homo sapiens
ASGFSFNTYAMSWVRQAPGKGLEWVSTISNSRSGERTYYTESVTGRFTISRDPSKDTVNLQMNSLRAEDTAVYFCVKDKGAIFGDYWGQGALVTVSS

SEQ ID NO: 19301 - protein, 98 aa, Homo sapiens
AASGFPFTTYAMSWVRQASGKGLEWISTISNTYKGHRTYYADSVEGRFTISRDNSKNIVYLQMNSLRAEDTAIYSCVKDKGAIFGDYWGLGTVVTVSS

SEQ ID NO: 19302 - protein, 98 aa, Homo sapiens
AASGFPFTTYAMSWVRQASGRGLEWVSTIGNVPKGSRTYYADSVKGRFTISRDNSNNIVYLQMNSLRAEDTAIYSCVKDKGAIFGDYWGLGTLVTVSS

SEQ ID NO: 19303 - protein, 96 aa, Homo sapiens; identical to SEQ ID NO: 19298

SEQ ID NO: 19304 - protein, 98 aa, Homo sapiens
SASGFTFSTYAMHWVRQAPGKGLEHVSAINNNGDDTYYADSVKGRFTISRDNSKKTLYLQTSSLRVEDTAVYYCVKDRGSLVRDFDSWGQGTLVTVSS

SEQ ID NO: 19305 - protein, 97 aa, Homo sapiens
ASGFTFSSYAMSWVRQAPGKGLEHVSAINNNGDDTYYADSVKGRFTISRDNSKKTLSLQTSSLRVEDTAVYYCVKDRGSLVRDFDSWGQGTLVTVSS

SEQ ID NO: 19306 - protein, 98 aa, Homo sapiens
SASGFTFSTYAFHWVRQGPGKGLEYVSGISGSGDDTYYADSLRGRFTISRDNSKNTLFLQMTSLRAEDTAVYYCVKDRGSLVRDFDSWGQGTLVTVSS

SEQ ID NO: 19307 - protein, 91 aa, Homo sapiens
ASGYTFTSYYMHWVRQAPGQGLEWMGIIHPNGGRTGYAQNFQGRVTLTRDTSTSTVYMELSSLRSDDTAVYYCARDQGAYWGQGTLVTVSS

SEQ ID NO: 19308 - protein, 91 aa, Homo sapiens
ASGYTFTSYYIHWVRQAPGQGLEWMGIIHPNGGRTGYAQNFQGRVTLTRDTSTSTVYMELSSLRSDDTAVYYCARDQGAYWGQGTLVTVSS

SEQ ID NO: 19309 - protein, 91 aa, Homo sapiens
ASGYTFTSYYMHWMRQAPGQGLEWMGVINPSGGGTTNAQKFQGRVTMTRDTSTNTIYMELSSLRSEDTAVYYCARDQGAYWGQGTLVTVSS

SEQ ID NO: 19310 - protein, 91 aa, Homo sapiens
ASGYTFTNYYMHWMRQAHGQGLEWIGVINPTGGGQTWAQKLQGRVTLTRDTSTNTVYMALSSLTSEDTAVYYCARDQGAYWGQGTLVTVSS

SEQ ID NO: 19311 - protein, 96 aa, Homo sapiens
AASGFSFSTYAMSWVRQAPGKGLDWVATISGDGGRTYYADSVKGRFTISRDSSKNTVFLQMNNLRAEDTAIYYCVKDNGPIFGEYWGQGTLVTVSS

SEQ ID NO: 19312 - protein, 96 aa, Homo sapiens
AASGFSFSTYAMSWVRQTPGKGLDWVATISGDGGRTYYADSVKGRFTISRDSSKNTVFLQMNNLRAEDTAIYYCVKDNGPIFGEYWGQGTLVTVSS

SEQ ID NO: 19313 - protein, 98 aa, Homo sapiens
AASGFSFTTYAMSWVRQASGKGLEWVSTISNSAKGGRTYYADSVQGRFTISRDNSKNIVYLQMDSVRAEDTGIYSCVKDNGPIFGEYWGPGTLVTVSS

SEQ ID NO: 19314 - protein, 91 aa, Homo sapiens
ASGYTFTSFVIHWVRQAPGQRLELLGWIHGGTGNTGCSQKFQGRVTITRDTPASTAYMELTSLTSEDTAVYYCARGDLLDWGQGTLVTVSS

SEQ ID NO: 19315 - protein, 91 aa, Homo sapiens
ASGYTFTSFVIHWVRQAPGQRLELLGRIHGGTGNTGCSQKFQGRVTITRDTPASTAYMELTSLTSEDTAVYYCARGDLLDWGQGTLVTVSS

SEQ ID NO: 19316 - protein, 91 aa, Homo sapiens
ASGYTFTTYAIHWVRQAPGQGLQLLGYIHAGSGYTEFSQNFQGRGTISRDTSASTAYMELSNLRSEDTAVYYCARGDLLDWGQGTLVTVSS

SEQ ID NO: 19317 - protein, 94 aa, Homo sapiens
AASAFTFKDFAMHWVRQPPGKGLEWVAVVSYEGSNEYYPDSVKGRFTISRDNSKNTLYLQMNSLRAEDTAVYYCARKGNAFDIWGQGTMVTVSS

SEQ ID NO: 19318 - protein, 94 aa, Homo sapiens
AASGFTFSNYDMHWVRQAPGKGLEWVAIISSDGSSKYYPDSVKGRFTLSRDNSNNMLFLQMNSLREEDTAVYYCARKGNAFDIWGQGTMVTVSS

SEQ ID NO: 19319 - protein, 94 aa, Homo sapiens
AASAFTFKDFAMHWVRQPPGKGLEWVAVVSYEGSNKYYPDSVKGRFTISRDNSKNTLYLQMNSLRAEDTAVYYCARKGNAFDIWGQGTMVTVSS

SEQ ID NO: 19320 - protein, 94 aa, Homo sapiens; identical to SEQ ID NO: 19317

SEQ ID NO: 19321 - protein, 94 aa, Homo sapiens
AASGISLSTFAIHWVRQAPGKGLEWLTVVSVDGSNEYYADSVKGRFTISKDNPKNTLYLQMNSLRTEDTAVYYCARKGNAFDIWGQGTMVTVSS

SEQ ID NO: 19322 - protein, 94 aa, Homo sapiens; identical to SEQ ID NO: 19321

SEQ ID NO: 19323 - protein, 94 aa, Homo sapiens; identical to SEQ ID NO: 19321

SEQ ID NO: 19324 - protein, 93 aa, Homo sapiens
AASGVTVGNNYMSWVRQAPGKGLEWISVIYSGGSTYYSDSVKGRFTVSRDSSKNTVYLQMNSLRVEDTAVYYCTRDPPGGGYWGQGTLVTVSS

SEQ ID NO: 19325 - protein, 93 aa, Homo sapiens
AASGVTVSNNYMSWVRQAPGKGLEWISVMYSGGRTNYVDSVKGRFTVSRDSSKNTLYLQMNSLRVEDTAMYYCTRDPPGGGYWGQGTLVTVSS

SEQ ID NO: 19326 - protein, 92 aa, Homo sapiens
AASGFIFSSYWLSWVRQAPGKGLEWLASIKEDGSEKYYVDSVKGRFTISRDNAKNSLYLQMNSLRAEDTAVYYCARERGTYWGQGTLVTVSS

SEQ ID NO: 19327 - protein, 92 aa, Homo sapiens
AVSGFTFSNFWMSWARQAPGKGLEWVATIKQDGSAKLYVDSVKGRFTISRDNANKSLYVQMNSLRVEDTAVYYCARERGTYWGQGTLVTVSS

SEQ ID NO: 19328 - protein, 98 aa, Homo sapiens
AASGFTFSNAWMTWVRQAPGKGLEWVGRIKRKTDGGTTDYGAPVKGRFTISRDDSKNTVYLQMNSLKTEDTAVYYCTGGVGTTDFDYWGQGTLVTVSS

SEQ ID NO: 19329 - protein, 98 aa, Homo sapiens
AASGFTFNNAWMSWVRQAPGKGLEWVGRIKSKTDGGTTDYTASVKGRFSISRDDPKNTAFLQMNSLKTEDTAVYYCTGGVGTTDFDYWGQGTLVTVSS

SEQ ID NO: 19330 - protein, 97 aa, Homo sapiens
TVSGGSISSFYWSWIRQPPGKGLEWIGYIYYSGSTNYNPSLKSRVTISVDTSKSQFSLRLSSLTAADTAVYYCARGYSSGWYFFDYWGQGTLVPVSS

SEQ ID NO: 19331 - protein, 97 aa, Homo sapiens
TVSGGSISSYYWTWIRQPPGKGLEWIGYIYYSGSTNYNPSLKSRVTISVDTSKNQFSLKLSSVIAADTAVYYCARGYSSGWYFFDYWGQGTLVTVSS

SEQ ID NO: 19332 - protein, 96 aa, Homo sapiens
ISGDSVSSNSAAWNWIRQSPSRGLEWLGRTYYRSKWYNDYAVSVKSRITINPDTSKNQFSLQLNSVSPEDTAVYYCARGAGSIDYWGQGTPVTVSS

SEQ ID NO: 19333 - protein, 96 aa, Homo sapiens
ISGDSVSSNSAAWNWIRQSPSRGLEWLGRTYYRSRWYHDYAVSVQSRITINPDTSKNQVSLQLNSVTPEDTAVYYCARGAGSIDYWGQGTLVTVSS

SEQ ID NO: 19334 - protein, 91 aa, Homo sapiens
TVSGGSITSDYWSWFRQPPGKGPEWIGYMYYSGNTDYNPSLKSRVTISMDTSKNQFSLKLTSVTAADTAVYYCARRAGTEWGQGTLVTVSS

SEQ ID NO: 19335 - protein, 90 aa, Homo sapiens
VSGGSITSDYWSWFRQPPGKGLEWIAYIYYSGNTDYNPSLRSRATISIDTSKNQFSLKLTSVTAADTAVYYCARRAGTEWGQGTLVTVSS

SEQ ID NO: 19336 - protein, 91 aa, Homo sapiens; identical to SEQ ID NO: 19334

SEQ ID NO: 19337 - protein, 90 aa, Homo sapiens
VSGGSITSDYWSWFRQPPGKGLEWIGYIYYSGNTDYNPSLRSRATISIDTSKNQFSLKLTSVTAADTAVYYCARRAGTEWGQGTLVTVSS

SEQ ID NO: 19338 - protein, 91 aa, Homo sapiens
IVSGDSISNSHWSWIRQPPGKGLEWIGYIYNGGSTNYNPSLKSRVTISVDTSKNQFSLKLRSVTAADTAVYYCARRAGTEWGQGTLVTVSS

SEQ ID NO: 19339 - protein, 91 aa, Homo sapiens
IVSGDSISNSHWSWVRQPPGKGLEWIGYIYNGGNTNYNPSLKSRVTISVDTSKNQFSLKLRSVTAADTAVYYCARRAGTEWGQGTLVTVSS

SEQ ID NO: 19340 - protein, 91 aa, Homo sapiens
IVSGDSISNSHWSWIRQPPGKGLEWIAYIYNGGSTNYNPSLKSRVTISVDTSKNQFSLKLRSVTAADTAVYYCARRAGTEWGQGTLVTVSS

SEQ ID NO: 19341 - protein, 93 aa, Homo sapiens
ASGFDFSYYWMSWVRQAPGKGLEWVANIKADGSAKYYVDAVKGRFTISRDNSKNTLYLQMDSLRPEDTALYYCARDNWNDRYWGQGTLVTVSS

SEQ ID NO: 19342 - protein, 94 aa, Homo sapiens
EASGFPFSSYWMSWVRQAPGKGLEWVANINEDGRQRYYVDAVKGRFTISRDNAKNSLYLQMNSLRAEDTAVYYCARDNWNDRYWGQGTLVTVSS

SEQ ID NO: 19343 - protein, 94 aa, Homo sapiens
AASGFPFSSYWMSWVRQAPGKGLEWVANINEDGRQKYYVDSVKGRFTISRDNAKNSLYLQMNSLRAEDTAVYYCARDNWNDRYWGQGTLVTVSS

SEQ ID NO: 19344 - protein, 94 aa, Homo sapiens
AASGFPFSSYWMSWVRQAPGKGLEWVANINEDGRQRYYVDSVKGRFTISRENAKNSLYLQMSSLRAEDTAVYYCARDNWNDRYWGQGTLVTVSS

SEQ ID NO: 19345 - protein, 94 aa, Homo sapiens
AASGFPFSTYWMSWVRQAPGKGLEWVANINEDGRQRYYVDSVKGRFTISRENAKNSLYLQMSSLRAEDTAVYYCARDNWNDRYWGQGTLVTVSS

SEQ ID NO: 19346 - protein, 101 aa, Homo sapiens
VVSGFTLSDHYMDWVRQAPGKGLEWVGRTRNKANSYTTEYAASVKGRFTISRDDSKNSLYLQMNTLKTEDTAVYYCARLQSVGPRADLDSWGQGTLVTVSS

SEQ ID NO: 19347 - protein, 100 aa, Homo sapiens
VSGFTLSDHYMDWVRQAPGKGLEWVGRTRNKANSYTTEYAASVKGRFTISRDDSKNSLYLQMNTLKTEDTAVYYCARLQSVGPRADLDSWGQGTLVTVSS

SEQ ID NO: 19348 - protein, 91 aa, Homo sapiens
AASGFTFSSYWMHWVRQAPGKGLVWVSRIKSDGSMTNYADSVQGRFTISRDNTKNTLYLQMNSLRAEDTAVYYCARVVGDWGQGTLVTVSS

SEQ ID NO: 19349 - protein, 90 aa, Homo sapiens
ASGFIFTNYWMHWVRQVPGKGLVWVSHISPDGRATTYADSVKGRFTISRDNAKNTLYLQMDSLRDEDTAIYYCARVVGDWGQGTLVTVSS

SEQ ID NO: 19350 - protein, 96 aa, Homo sapiens
AASGFTFGNYWMSWVRQAPGRGLEWVANIKRDGSEKDYVDSVKGRFTISRDNAKNSLYLQMNSLRAEDTAVYYCARDPQHGALDIWGLGTVVTVSS

SEQ ID NO: 19351 - protein, 96 aa, Homo sapiens
AASGITFSTSWMTWVRQSPGKGLEWVAIMNPDGSSISYVDSVKGRFTISRDNAKNSLYIQMNSLRPEDTGLYYCARDPQHGALDIWGQGTMVTVSS

SEQ ID NO: 19352 - protein, 96 aa, Homo sapiens
AASGFTFNTYWMHWVRQAPGKGLMWVSRISGDGSRTNYADSVKGRFTISRDSGRNTVHLQMNSLRAEDTAVYFCTRDRADVTFDIWGQGTMVTVSS

SEQ ID NO: 19353 - protein, 96 aa, Homo sapiens
AASGFTFDNYWMHWVRQAPGKGLVWLSRINGDGRRITYADSVRGRFTISRDSAKNTLYLQMTSLRAEDTAVYYCTRDRADVTFDIWGQGTMVTVSS

SEQ ID NO: 19354 - protein, 96 aa, Homo sapiens
AASGFTFNNYWMHWVRQAPGKGLVWVSRINGDGSSTAYADSVKGRFTISRDNAKNTLYLQMTSLRAEDTAVYYCTRDRADVTFDIWGQGTMVTVSS

SEQ ID NO: 19355 - protein, 96 aa, Homo sapiens
AASGFTFDNYWIHWVRQAPGKGLVWVSRIYGDGTRTTYADSVKGRFTISRDRAKNTLYLQMTSLRAEDTAIYYCTRDRADVTFDIWGQGTMVTVSS

SEQ ID NO: 19356 - protein, 96 aa, Homo sapiens
AASGFTFDTYWTHWVRQVPGKGLVWVSRIYSDGSRAVYADSVKGRFTISRDSAKNTVYLQMTSLRVEDTAVYYCTRDRADVTFDIWGQGTMVTVSS

SEQ ID NO: 19357 - protein, 96 aa, Homo sapiens
AASEFTLDNYWMHWVRQVPGKGLVWVSRIYGDGSRITYADSVKGRFTISRDRAKNTLYLQMTSLRAEDTAVYYCTRDRADVTFDIWGQGTMVTVSS

SEQ ID NO: 19358 - protein, 96 aa, Homo sapiens
AASGFSFDNYWIHWVRQAPGKGLVWVSRIYGDGNRPTYADSVKGRFTISRGSARNTFYLQMSGLRAEDTAIYYCTRDRADVTFDIWGQGTLVIVSS

SEQ ID NO: 19359 - protein, 96 aa, Homo sapiens
AASGFTFDTYWTHWVRQVPGKGLVWVSRIFSDGSRAFYADSVKGRFTISRDSAKNTVFLQMTSLRVEDTAVYYCTRDRADVTFDIWGQGTMVTVSS

SEQ ID NO: 19360 - protein, 96 aa, Homo sapiens
AASGFTFDNYWMHWVRQAPGKGLVWVSRIYSDGSRTTYADSVKGRFTISRDRAKNTLYLQMTSLRAEDTAVYYCTRDRADVTFDIWGQGTMVTVSS

SEQ ID NO: 19361 - protein, 96 aa, Homo sapiens; identical to SEQ ID NO: 19355

SEQ ID NO: 19362 - protein, 96 aa, Homo sapiens
AASRFTFNNYWMHWVRQTPGKGLVWVSRISGDGSRTTYADSVKGRFTISRDNAKNTLYLQMTSLRAEDTAVYYCTRDRADVTFDIWGQGTMVTVSS

SEQ ID NO: 19363 - protein, 95 aa, Homo sapiens
AASGFTFNDYWIHWVRQAPGKGLVWVSRISNDGRRTAYADSVKGRFTISRDNAKSTVFLQMTSLRAEDTAVYYCTRDRADVTFDIWGQGTMVTVS

SEQ ID NO: 19364 - protein, 96 aa, Homo sapiens
AASGFTFDNYWMHWVRQAPGKGLVWVSRIYGDGTRTTYADSVKGRFTISRDRAKNTLYLQMTSLRADDTAVYYCTRDRADVTFDIWGQGTMVTVSS

SEQ ID NO: 19365 - protein, 91 aa, Homo sapiens
TVAGGSISSYYWSWIRQPPGKGLEWVGYISYTGGTNYNPSLKSRVTISIDASKNQFSLRVSYVTAADTAVYYCARLNGGSWGQGTLVTVSS

SEQ ID NO: 19366 - protein, 91 aa, Homo sapiens
TVSGGSISSYYWSWIRQPPGKGLEWIGYIYYSGSTNYNPSLKSRVTISIDASKTQFSLRLSSVTAADTAVYYCARLNGGSWGQGTRVTVSS

SEQ ID NO: 19367 - protein, 91 aa, Homo sapiens
TVSGGSMSGYYWSWIRQPPGKGLEWIGYMSYSGNTNYNPSLKSRVTISVDTSRNRFSLKLSSVTAADTAVYYCARLNGGSWGQGTLVTVSS

SEQ ID NO: 19368 - protein, 91 aa, Homo sapiens
TVAGGSISSYYWSWIRQPPGKGLEWVGYISYTGGSNYNPSLKSRVTISIDASKNQFSLKLSSVTAADTAVYYCARLNGGSWGQGTLVTVSS

SEQ ID NO: 19369 - protein, 91 aa, Homo sapiens
TVSGGSMSGYYWSWIRQPPGKGLEWIGYISDSGNTNYNPSLKSRVTISIDTSRKRFSLKLSSVTAADTAVYYCARLNGGSWGQGTLVTVSS

SEQ ID NO: 19370 - protein, 94 aa, Homo sapiens
AASGFSFSNYWMTWVRQGPAKGLQWVASINKDGGERYHVASVRGRFTISRDNAQNSLFLQMNSLTVDDTAVYYCARDLVPDPYWGRGALVTVSS

SEQ ID NO: 19371 - protein, 94 aa, Homo sapiens
AASGFTFSRYCMTWVRQAPGKGLEWVANIDEHGSQIYYLDSVRGRFTISRDNARNFLYLRMSSLSDEDTAVYYCARDLVPDPYWGQGTLVTVSS

SEQ ID NO: 19372 - protein, 94 aa, Homo sapiens
VASGFTFSRYYMTWVRQAPGKGLEWVANIHEDGNQKYYVDSVKGRFTISRDNAKNSLSLQMNNLRDEDTAVYYCARDLVPDPYWGRGTLVTVSS

SEQ ID NO: 19373 - protein, 94 aa, Homo sapiens
AASGFTFSRYCMTWVRQAPGKGLEWVANIDEHGSQIYYLDSVRGRFIISRDNARNFLYLRMSSLSDEDTAVYYCARDLVPDPYWGQGTLVTVSS

SEQ ID NO: 19374 - protein, 94 aa, Homo sapiens
AASGFTFSRYCMTGVRQAPGKGLEWVANIDEHGSQIYYLDSVRGRFTISRDNARNFLYLRMSSLSDEDTAVYYCARDLVPDPYWGQGTLVTVSS

SEQ ID NO: 19375 - protein, 94 aa, Homo sapiens; identical to SEQ ID NO: 19372

SEQ ID NO: 19376 - protein, 94 aa, Homo sapiens; identical to SEQ ID NO: 19372

SEQ ID NO: 19377 - protein, 96 aa, Homo sapiens
TVSGGSLTSYYWGWIRQPPGKGLEWIGYIYYTGTTNYNPSLESRVTTSVDTSKNQFSLKLNSVTASDTAVYYCARGRVVTRDFDYWGQGTLVTVSS

SEQ ID NO: 19378 - protein, 96 aa, Homo sapiens
TVSGGSLTSYYWSWIRQPPGKGLEWIGYIYYTGTTNYNPSLESRVTTSVDTSNNQFSLKLNSVTASDTAVYYCARGRVVTRDFDYWGQGTLVTVSS

SEQ ID NO: 19379 - protein, 96 aa, Homo sapiens
TLSGGSIRDYYWSWIRQPPGRRLEWIGYVYDSGITNYNPSLKSRVTISAHTSMNQFSLKLDSVSAADTAVYYCARGRVVTRDFDYWGQGALVTVSS

SEQ ID NO: 19380 - protein, 96 aa, Homo sapiens; identical to SEQ ID NO: 19377

SEQ ID NO: 19381 - protein, 90 aa, Homo sapiens
AASGFTFRNFDMNWVRQAPGKGLEWISRISGSGGNTYYADSVKGRFTISRDNSKNTLYLQMNSLRAEDTAVYFCAGLWEWGQGTPVTVSS

SEQ ID NO: 19382 - protein, 90 aa, Homo sapiens
AASGFTFRNFDMNWVRQAPGKGLEWISRISGSGGNTYYADSVKGRFTISRDNYKNTLYLQMNSLRAEDTAVYFCAGLWEWGQGTPVTVSS

SEQ ID NO: 19383 - protein, 90 aa, Homo sapiens
AASGITFTTYDMSWVRQVPGKGLEWVSSIRGGDGSTYYADSVEGRFTISRDTSKHTVYLQMNSLRVEDTALYFCAGLWEWGQGTLVTVSS

SEQ ID NO: 19384 - protein, 90 aa, Homo sapiens
VVSGITFSNYDMNWVRQVPGKGLEWVSRIRGGDGRAYYADSVKGRFTISRDTSKDTVYLQMNSLRIEDSAVYFCAGLWEWGQGTVVTVSS

SEQ ID NO: 19385 - protein, 90 aa, Homo sapiens
VASGITFSNYDMNWVRQVPGKGLEWVSRIRGGDGRAYYADSVKGRFTISRDTSKDTIYLLMDSLRTEDTAVYFCAGLWEWGQGTLVTVSS

SEQ ID NO: 19386 - protein, 90 aa, Homo sapiens
AASGITFSTYDVHWVRQVPGKGLEWVSIIFGGDGRAYYADSVKGRFSISRDASRHTVYLQMDSLRAEDTAVYFCAGLWEWGQGTLVTVSS

SEQ ID NO: 19387 - protein, 90 aa, Homo sapiens
ATSGFTFSFYDMNWARQAPGRGLEWVSRINGPGDRTYYTDAVKGRFTISRDNAKNTLYLEMNSLRVEDTAVYYCAGLWEWGQGVLVTVSS

SEQ ID NO: 19388 - protein, 88 aa, Homo sapiens
TSGFTFSFYDMNWARQAPGGGLEWVSRINGPGDRTYYTDSVRGRFTISRDNAKNALYLEMNSLRVEDTAVYYCAGLWEWGQGILVTVS

SEQ ID NO: 19389 - protein, 90 aa, Homo sapiens
VASGITFSNYDMSWVRQVPGKGLEWVSSIRGGDGRAYYADSVKGRFTISRDTSKDTVYLQMNSLRTEDTAVYFCAGLWEWGQGTLVTVSS

SEQ ID NO: 19390 - protein, 90 aa, Homo sapiens
AASGITFTTYDMSWVRQVPGKGLEWVSTIRGGDGSTYYADSVEGRFTISRDTSKHTVYLQMNSLRVEDTALYFCAGLWEWGQGTLVTVSS

SEQ ID NO: 19391 - protein, 90 aa, Homo sapiens; identical to SEQ ID NO: 19384

SEQ ID NO: 19392 - protein, 90 aa, Homo sapiens; identical to SEQ ID NO: 19389

SEQ ID NO: 19393 - protein, 90 aa, Homo sapiens
AASGITFSTYDVHWVRQVPGKGLEWVSIIFGGDGRAYYADSVKGRFSISRDASRHTVYLQMDSLRAEDTAVYFCAGLWEWGQGTLVIVSS

SEQ ID NO: 19394 - protein, 90 aa, Homo sapiens
AASGFTFRNYDMNWVRQAPGKGLEWVSRISGSGGYTYYAESVKGRFTISRDNSKDTLYLQMNSLRAEDTAVYYCAGLWEWGQGTLVTVSS

SEQ ID NO: 19395 - protein, 93 aa, Homo sapiens
AASGFTFSSYSFHWVRQAPGKGLEWLSYISSSGATKYYADSVMGRFTISRDNADNLLYLQMDSLRAEDSALYYCARERAFDYWGQGTLVTVPS

SEQ ID NO: 19396 - protein, 93 aa, Homo sapiens
AASGFTFSSYNMNWVRQAPGKGLEWVSYISSSSITIYYADSVKGRFTISRDNAKNSLYLQMNSLRAEDTAVYYCARERAFDYWGQGTLVTVSS

SEQ ID NO: 19397 - protein, 100 aa, Homo sapiens
AASGFTFSSSDMHWVRQATGKGLEWVSAIGTIGDTYYPASVKGRFTISRENAKNSLYLQMNSLRAGDTAVYYCAREGPSSSWNDWYFDLWGRGTLVTVSS

SEQ ID NO: 19398 - protein, 100 aa, Homo sapiens
AASGFTFSSSEMHWVRQTTGKGLEWVSAIGTIGDTFYADSVKGRFTISREDAKNSLYLQMNSLRAGDTALYYCAREGPSSSWNDWYFDLWGRGTLVTVSS

SEQ ID NO: 19399 - protein, 100 aa, Homo sapiens
AASGFTFSSSDMHWVRQATGKGLEWVSAIGAAGDTYYPTSVKGRFTISRENAKNSLYLQMSSLRAEDTAVYYCAREGPSSSWNDWYFDLWGRGTLVTVSS

SEQ ID NO: 19400 - protein, 96 aa, Homo sapiens
AASGFTFSSYSMHWVRQAPGKGLQSVSAINFNGGVTYYANFVEGRFTISRDNSKNTLYLQMGGLRVEDTAVYYCAREGTPGTNDYWGQGTLVTVSS

SEQ ID NO: 19401 - protein, 96 aa, Homo sapiens
AASGFTFSNYPMHWVRQAPGKGLEYVSAISENGGTTYYANSVKGRFTISRDNSENTLYLQMGSLRTEDMALYYCAREGTPGTNDYWGQGTLVTVSS

SEQ ID NO: 19402 - protein, 95 aa, Homo sapiens
AASGFTFNTYAMAWVRQAPGKGLEWVSTIGHSGRDTYYADSVKGRFTISRDNSKNTLFLQMNSLRAEDTAVYFCTKAGSSWCDYWGQGTLVTVSS

SEQ ID NO: 19403 - protein, 94 aa, Homo sapiens
AASGFTFSTNAMGWVRQAPGRGLEWVSATSLSGTPYYADSVRGRFTISRDNSESTLFLQMNSLRAEDTAIYYCTKAGSSWCDYWGQGTLVTVSS

SEQ ID NO: 19404 - protein, 95 aa, Homo sapiens; identical to SEQ ID NO: 19402

SEQ ID NO: 19405 - protein, 97 aa, Homo sapiens
AASGFTFISYWLSWVRQAPGKGLEWVANIKQDGSVKYYVDSVKGRFTISRDNAKNSLYLQMNNLRAEDTAVYYCARIGYSSSGIDYWGQGTLVTVSS

SEQ ID NO: 19406 - protein, 97 aa, Homo sapiens; identical to SEQ ID NO: 19405

SEQ ID NO: 19407 - protein, 97 aa, Homo sapiens
AASGFPFNHYWMSWVRQAPGKGLEWVANIKEDGGKEYFVDSLKGRFTMSRDNAKNSLYLQMNSLRAEDTAMYYCARIGYSSSGIDYWGQGTLVTVSS

SEQ ID NO: 19408 - protein, 97 aa, Homo sapiens
AASGFPFNHYWMSWVRQAPGKGLEWVANIKEDGGKEYFVDSLKGRFTVSRDNAKNLLFLQMNSLRAEDTAMYFCARIGYSSSGIDYWGQGTLVTVSS

SEQ ID NO: 19409 - protein, 97 aa, Homo sapiens
AASGFIFISYWLSWVRQAPGKGLEWVANIKQDGSVKYYVDSVKGRFTISRDNAKNSLYLQMNNLRAEDTAVYYCARIGYSSSGIDYWGQGTLVTVSS

SEQ ID NO: 19410 - protein, 94 aa, Homo sapiens
EASGFTLSGYWISWVRQAPGKGLEWVANINQDGSQKHYLDSVKGRFTISRDNAKNSVYLQMNSLRGEDTAIYHCARGHLWLENWGQGTLVTVSS

SEQ ID NO: 19411 - protein, 92 aa, Homo sapiens
SGLTLSSFWMTWVRQAPGKGLEWVANINPDGSEKYSVDSMKGRFTISRDNAKNSLYLQMNSLRAEDTAVYSCARGHLWLENWGQGTLVTVSS

SEQ ID NO: 19412 - protein, 94 aa, Homo sapiens
AVSGLTFRNFWMTWVRQAPGKGLEWVATIKGDESEKYYVDSVRGRFTISRDNADNSLYLQMNGLRVEDTAVYYCARGHLWLENWGPGTLVTVSS

SEQ ID NO: 19413 - protein, 94 aa, Homo sapiens
AASGITLSNFWMSWVRQAPGKGLEWVAFSNQHGTEAYYVDSVKGRFTISRDNAKNSLYLQMNSLRAEDTAVYRCARGHLWLENWGQGTLVTVSS

SEQ ID NO: 19414 - protein, 94 aa, Homo sapiens
AVSGLTLSNFWMSWVRQAPGKGLEWVATIKEDGSKKYYVDSVKGRFTISRDNAENSVYLQMNSLRVDDTAAYSCARGHLWLENWGQGTLVTVSS

SEQ ID NO: 19415 - protein, 94 aa, Homo sapiens
AASGISLSNFWMSWVRQAPGEGLEWVAFSNQHGSEAYYVDSVKGRFTISRDNDKNSLYLQMNSLRAEDTAVYRCARGHLWLENWGQGTLVTVSS

SEQ ID NO: 19416 - protein, 94 aa, Homo sapiens
AASGFTLGNSGMTWVRQAPGKGLEWLSSISRTGGDTYYADSVKGRFTISRDSSKNTLYLQMNSLRVEDTAIYYCAKETRPNDYWGQGTLVTVTS

SEQ ID NO: 19417 - protein, 94 aa, Homo sapiens
ATSGFTFSNSAMSWVRQAPGKGLEWVSSISISGYKTYYADSVKGRFTISRDNSKNMVYLQMNRLTADDTAVYYCAKETRPNDYWGQGTLVTVSS

SEQ ID NO: 19418 - protein, 94 aa, Homo sapiens
ATSGFTFSNSAMSWVRQAPGKGLEWVSSISISGYKTYYADSVRGRFAISRDNSKNMVYLQMNSLTADDTAVYYCAKETRPNDYWGQGTLVTVSS

SEQ ID NO: 19419 - protein, 94 aa, Homo sapiens
ATSGFTFSNSAMSWVRQAPGKGLEWVSSISISGYKTYYADYVRGRFAISRDNSKNMVYLQMNSLTADDTAVYYCAKETRPNDYWGQGTLVTVSS

SEQ ID NO: 19420 - protein, 94 aa, Homo sapiens
ATSGFTFSNAAMSWVRQAPGKGLEWVSSISISGYKTYYADSVKGRFTISRDNSKNMVYLQMNRLTADDTAVYYCAKETRPNDYWGQGTLVTVSS

SEQ ID NO: 19421 - protein, 94 aa, Homo sapiens
EVSGFTFSTSAMTWVRQAPGKGLEWVSSIDIGGDNTLYADSVQGRFTISRDNSKNTLYLQMHNVRAEDTALYYCAKETRPNDYWGQGTLVTVSS

SEQ ID NO: 19422 - protein, 97 aa, Homo sapiens
TVSGDPVSSDFWTWIRQPPGKGLEWIGFIRYSGRTEYNPSLKSRVSISIDTSKKQFSLRLTSVTVSDTAQYYCARLLDVSGWPFDYWGQGTLVIVSS

SEQ ID NO: 19423 - protein, 97 aa, Homo sapiens
TVSSDFINSDFWTWIRQAPGKRPEWVGYIRHSGRTEYNPSLKSRVTIAIDKSKSQFSLKLSSVTAADTAVYYCARLLDVSGWPFDYWGRGTLVTVSS

SEQ ID NO: 19424 - protein, 99 aa, Homo sapiens
AASGFTFSSHSMNWVRQAPGKGLEWVSYISSSSSTTYYADSVKGRFTISRDNAKNSLYLQMNSLRAEDTAVYYCARDQTGYSSSSSDYWGQGTLVTVSS

SEQ ID NO: 19425 - protein, 99 aa, Homo sapiens
AASGFTLSGYSMNWVRQAPGQGLEWISYISSSGGTTYYADSVKGRFTISRDNANNFLYLQLASLRAEDTAVYYCARDQTGYSSSSSDYWGQGTLVTVSS

SEQ ID NO: 19426 - protein, 99 aa, Homo sapiens
AASGFTFSSHSMNWVRQAPGKGLEWVSYISSSSSTTYYADSVKGRFTISRDNAKNSLNLQMNSLRAEDTAVYYCARDQTGYSSSSSDYWGQGTLVTVSS

SEQ ID NO: 19427 - protein, 99 aa, Homo sapiens; identical to SEQ ID NO: 19424

SEQ ID NO: 19428 - protein, 97 aa, Homo sapiens
AASGFTFNSYWMTWVRQAPGKGLEWVANIKQDGSEKYYVDSVKGRFTISRDNAKNSLYLQLNSLRAEDTAVYYCARDPFSSSGGGYWGQGTLVTVSS

SEQ ID NO: 19429 - protein, 97 aa, Homo sapiens
AASGFTFNSYWMTWVRQAPGKGLEWVANIKQDGSEKYYVDSVKGRFTISRDNAKNSLYLQLNSLRAEDMAVYYCARDPFSSSGGGYWGQGTLVTVSS

SEQ ID NO: 19430 - protein, 97 aa, Homo sapiens
AASGLTINNYWMTWVRQAPGKGLEWVANIKEDGSVKYYVDSVKGRFTVSRDNAKNSIYLQMNSLRGEDTAVYYCARDPFSSSGGGYWGQGTLVIVSS

SEQ ID NO: 19431 - protein, 97 aa, Homo sapiens
AASGFTFNNYWMTWVRQAPGKGLEWVANIKQDGSEKYYVDSVKGRFTISRDNAKNSLYLQLNSLRAEDTAVYYCARDPFSSSGGGYWGQGTLVTVSS

SEQ ID NO: 19432 - protein, 99 aa, Homo sapiens
VASGFTFSNIWMSWVRQAPGKGLEWVGRIKTRNGGGATEYAAPVKGRFTISRDDSANTLYLQMNSLKTEDTAVYYCTALWYYSESSGHWGQGTLVTVSS

SEQ ID NO: 19433 - protein, 99 aa, Homo sapiens
ATSGFYFHEFWMSWVRQAPGKGLEWIGRIKSRSDGETIDYAAPVKGRFTISRDDSKTTLYLQMNSLKSEDTAVYYCTALWYYSESSGHWGQGTLVTVSS

SEQ ID NO: 19434 - protein, 95 aa, Homo sapiens
AASGFTFSSYAMTWVRQAPGKGLEWVSTIGHSGRDTYYADSVKGRFTISRDNSKNTLFLHMNSLRAEDTAVYFCAKAGSSWSDYWGQGTLVTVSS

SEQ ID NO: 19435 - protein, 95 aa, Homo sapiens
AGSGFTFNKYAMSWLRQAPGKGLEWLSTIGGGGRDTYYADSVKGRFTISRDNSRNTLFLQINSLRVEDTAVYYCAKAGSSWSDYWGQGTLVTVSS

SEQ ID NO: 19436 - protein, 93 aa, Homo sapiens
AASGFNFSGYDMTWVRQSPGKGLEWVSRISAGGSDTHYADSVKGRFTISRDNSKNTVYLRMDSLKAEDTATYYCTKGGWCDNWGQGTLVTVSS

SEQ ID NO: 19437 - protein, 93 aa, Homo sapiens
AASGFNLSGYDMTWVRQSPGKGLEWVSRISAGGSDTHYADSVKGRFTISRDNSKNTVYLRMDSLKAEDTATYYCTKGGWCDNWGQGTLVTVSS

SEQ ID NO: 19438 - protein, 93 aa, Homo sapiens
AASGFTFSTYLMTWVRQAPGKGLEWVSAVGTSGDSTFYSDSVKGRFTISRDNSKNTVYLQMNSLRVEDTAVYYCTKGGWCDNWGQGTLVTVSS

SEQ ID NO: 19439 - protein, 95 aa, Homo sapiens
AASGFTFTGQAMTWVRQAPGKGLEWVSTVRGRGGGAYYADSVKGRFTISRDNAKNTLYLQMNGLRVEDTAIYYCVKGSKWGGDNWGQGTQVTVSS

SEQ ID NO: 19440 - protein, 94 aa, Homo sapiens
AASGFTFSKQAMSWVRQAPGKGLEWVSVIFDSVKTLYADSVKGRFTISRDNSKNTLYLQMNSLRADDTAVYYCVKGSKWGGDNWGQGTLVTVSS

SEQ ID NO: 19441 - protein, 94 aa, Homo sapiens
AASGFTFSSYWMTWVRQAPGKGLEWVANIKQDGSEKYYVDSVKGRFTISRDNAKNSLYLQMNSLSAEDTAVYYCARDKVPRDYWGQGTLVTVSS

SEQ ID NO: 19442 - protein, 94 aa, Homo sapiens
AASGFTFSSYWMTWVRQAPGKGLEWVANIKQDGSEKYYVDSVKGRFTISRDNAKNSLYLQMNSLRAEDTAVYYCARDKVPRDYWGQGTLVTVSS

SEQ ID NO: 19443 - protein, 94 aa, Homo sapiens
AASGFTFSSYWMTWVRQAPGRGLEWVANIKQDGSAKYYVDSVKGRFTISRDNAKNSLYLQMNSLRAEDTAVYYCARDKVPRDYWGQGTLVTVSS

SEQ ID NO: 19444 - protein, 94 aa, Homo sapiens; identical to SEQ ID NO: 19442

SEQ ID NO: 19445 - protein, 94 aa, Homo sapiens
AASGFTFSNYWMSWVRQAPGKGLEWVANIKQEGSEKYYVDSVKGRFTISRDDAKNSLSLHMNSLRAEDTAVYYCARDKVPRDYWGQGTLVTVSS

SEQ ID NO: 19446 - protein, 94 aa, Homo sapiens; identical to SEQ ID NO: 19445

SEQ ID NO: 19447 - protein, 94 aa, Homo sapiens; identical to SEQ ID NO: 19445

SEQ ID NO: 19448 - protein, 99 aa, Homo sapiens
AASGFTFTSYSMSWVRQAPGKGLEWVSAIRGSGVSTYYADSVKGRFTISRDNSGNTLYLQMNSLRAEDTAVYYCAKDPYESSGYYSDYWGQGTLVTVSS

SEQ ID NO: 19449 - protein, 101 aa, Homo sapiens
AASGFTFSSYAMRWVRQAPGKGLEWVSAIRGSGDNTYTYYADSVKGRFTVSRDNSKSTLYLQMNSLRAEDTAVYYCAKDPYESSGYYSDYWGQGILVTVSS

SEQ ID NO: 19450 - protein, 93 aa, Homo sapiens
VSGGSISSSTAYWGWVRQPPGKGLEWIGTIYFPGDAYYNPSLKSRVTISLDTSKNQFSLKLFSVTAADTAVYYCATSNWGDYWGRGTLVTVSS

SEQ ID NO: 19451 - protein, 96 aa, Homo sapiens
TVSGGSISSSTSYWGWIRQPPGKGLEWIGSIYYIGSENTYYNPSLKSRVTISIDTSRNQFSLKLTSVTAADTAMYYCATSNWGDYWGQGTLVTVSS

SEQ ID NO: 19452 - protein, 95 aa, Homo sapiens
AASGFTFSSYAMHWVRQAPGKGLEWVASVSSDGRNINYADSVEGRFTISRDNSQTTLYLQMNSLRLEDTAVYYCARDHPGSLDYWGQGTPVTVSS

SEQ ID NO: 19453 - protein, 95 aa, Homo sapiens
AASQFTFRNYAMHWVRQAPGKGLDWVAFISSDGSSEKYADSVRGRFTVSRDNSKNTVFLQLTSLRPEDTAVYFCARDHPGSLDYWGQGTLVTVSS

SEQ ID NO: 19454 - protein, 97 aa, Homo sapiens
AASGFTLSDYYMTWIRQAPGKGLEWVSYISGSGTIIYYADSVKGRFTISRDNAQNSLDLQMNSLRVEDTAVYYCARGGRDGYKFDYWGQGTLVTVSS

SEQ ID NO: 19455 - protein, 97 aa, Homo sapiens
AASGFAFSDYYMTWIRQAPGKGLEWVSYSSSSGSTIYYAVSVKGRFTISRDNAKNSLYLQMNSLRAEDTAVYYCARGGRDGYKFDYWGQGTLVTVSS

SEQ ID NO: 19456 - protein, 97 aa, Homo sapiens
AASGFAFSDYYMTWIRQAPGKGLEWVSYISSSGSIIYYAVSVKGRFTISRDNAKNSLYLQMNSLRAEDTAVYYCARGGRDGYKFDYWGQGTLVTVSS

SEQ ID NO: 19457 - protein, 96 aa, Homo sapiens
AASGFSFSKKYMSWVRQAPGKGLEWVSAIYSAGSTYYADSVKGRFTISRDNSQNTVYLQMNSLRVEDTAVYYCARLGGHGDHFDYWGQGTLVTVSS

SEQ ID NO: 19458 - protein, 96 aa, Homo sapiens
ATSGFAVSRKFLSWVRQAPGKGLEWVSAIYSADSTYYADSVKGRFSISRDNSKSTVYLQMNNLRAEDTAVYYCARLGGHGDHFDYWGQGTLVTVSS

SEQ ID NO: 19459 - protein, 96 aa, Homo sapiens
AASGFTFSSHWMQWVRQGPGEGLVWVSNINGDGTSTNYADSVKGRFTVSRDNAKNTLYLQMNSLRAEDTAVYYCARDGVAGARDYWGQGTLVTVSS

SEQ ID NO: 19460 - protein, 95 aa, Homo sapiens
VASGFTFSNYWMHWVRQAPGKGLVWVSEIKTDGSRTNYADSVRGRFTISRDNAKNTLFLQMDSLSGEDTAVYYCARDGVAGARDYWGQGTLVTVS

SEQ ID NO: 19461 - protein, 93 aa, Homo sapiens
EASGFTFSSHWMTWVRQGPGKGLEWVATTNYDGSEIHYLDSVSGRFTISRDNAKNSLYLQMNSLRAEDTAVYYCARRGRFDYCGQGTLVTVSS

SEQ ID NO: 19462 - protein, 93 aa, Homo sapiens
AASGFTFSSYWMNWVRQAPGKGLEWVANIKQDGTEKYYVDSVKGRFTISRDNAKNSVYLEMNSLRAEDTAVYYCARRGRFDYWGQGTLVTVSS

SEQ ID NO: 19463 - protein, 99 aa, Homo sapiens
AASGFTFDDYAMHWVRQAPGKGLEWVSGISWNSGSIGYADSVKGRFTISRDNAKNSLYLQMNGLRAEDTALYYCAKTNYYDSSGYFDYWGQGTLVTVSS

SEQ ID NO: 19464 - protein, 99 aa, Homo sapiens
AASAFTFDDYAMHWVRQAPGKGLEWVSGITWNSGNIDYADSVKGRFTISRDNAKNSLYLQMNSLRAEDTALYYCAKTNYYDSSGYFDYWGQGTLVTVSS

SEQ ID NO: 19465 - protein, 93 aa, Homo sapiens
AASGFTFGIYYMTWVRQAPGKGLEWVANIQQDGSEKYYVDSVKGRFTISRDNAKNSLYLQMNSLRAEDTAVYYCARGASGAYWGQGALVTVSS

SEQ ID NO: 19466 - protein, 93 aa, Homo sapiens
AASEFTFSSSWMNWVRQAPGRGLEWVANIKQDGSEKHYLDSVKGRFTISRDNAKNALYLQMNSLRAEDTAVYYCARGASGAYWGQGALVTVSS

SEQ ID NO: 19467 - protein, 93 aa, Homo sapiens
AASEFTFSSSWMNWVRQAPGRGLEWVANIKQDGSEKHYLDSVKGRFTISRDNAKNALYLQMNSLRAKDTAVYYCARGASGAYWGQGALVTVSS

SEQ ID NO: 19468 - protein, 97 aa, Homo sapiens
TVSGGSVSPYYWSWIRQPPGQGLEWIGYIYYNGHAEYTPHLTSRVTMSVDTSTNKLSLILRSVTAADTAVYYCARLHFWRSEEFDPWGQGILVTVSS

SEQ ID NO: 19469 - protein, 96 aa, Homo sapiens
TVSGGSISPYYWAWIRQSPGKGLEWIAYIYYSGSSYYNPSLKSRATISVDTPRNQFSLKLTSVTPADTALYYCARLHFWRSEEFDPWGQGTLVTVS

SEQ ID NO: 19470 - protein, 98 aa, Homo sapiens
AASGFTFSSYAMHWVRQAPGKGLEWVAVISYDGSNKYYADSVKGRFTISRDNSKNTLYLQMNSLRAEDTAVYYCAGDYYDSSGYLDYWGQGTLVTVSS

SEQ ID NO: 19471 - protein, 98 aa, Homo sapiens
AASGFTFSSYGMHWVRQAPGKGLEWVAVISYDGSNKYYADSVKGRFTISRDNSKNTLYLQMNSLRAEDTAVYYCAGDYYDSSGYLDYWGQGTLVTVSS

SEQ ID NO: 19472 - protein, 92 aa, Homo sapiens
ASGYTFTSYYMHWVRQAPGQGLEWMGIINPSGGSTSYAQKFQGRVTMTRDTSTNTVYMELSSLRSEDTAVYYCARQLGLDYWGQGTLVTVSS

SEQ ID NO: 19473 - protein, 92 aa, Homo sapiens
ASGYIFTNYYMHWVRQAPGQGLEWMGIINPSGGSTSYAQEFQGRVTMTRDTSTSTVYMELSSLTSEDTAVYYCARQLGLDYWGQGTLVTVSS

SEQ ID NO: 19474 - protein, 95 aa, Homo sapiens
VASGFTFSNYDMHWVRQVRGRGLEWVSLIGTAGNTHYPDSVKGRFTVSRENAKNALYLQMNSLRDGDTAVYYCARDPSGGGLDVWGQGTTVTVSS

SEQ ID NO: 19475 - protein, 95 aa, Homo sapiens
VASGFTFSTYDMHWVRQVAGKGLEWVSLIGRRGDTHYPDSLRGRFTTSRENDKNSLYLQMNSLTAGDTAVYYCARDPSGGGLDVWGQGTTVIVSS

SEQ ID NO: 19476 - protein, 95 aa, Homo sapiens; identical to SEQ ID NO: 19475

SEQ ID NO: 19477 - protein, 97 aa, Homo sapiens
AASGFIFSDHRLDWVRQTPGKGLEWIGRSANKANNYATQYVASVEGRFIISRDDSKSSMYLQMGSLKTEDTAVYYCARDEGGTYIYWGQGTLVTVSS

SEQ ID NO: 19478 - protein, 97 aa, Homo sapiens
AASGFIFSDHYIDWVRQVPGKGLEWVGRSRDKTTNYATEYAPSVKGRFTISRDASRNSVHLQINSLKTEDTAVYYCARDEGGTYIYWGQGTLVTVSS

SEQ ID NO: 19479 - protein, 97 aa, Homo sapiens
AASGFSFTDYYMDWVRQSPEKGLEWIGRSKDKPNNYATEYVASVKGRFTISRDNSKNSLFLQMNSLKSEDTAVYYCARDEGGTYIYWGQGALVTVSS

SEQ ID NO: 19480 - protein, 97 aa, Homo sapiens; identical to SEQ ID NO: 19478

SEQ ID NO: 19481 - protein, 98 aa, Homo sapiens
AASGFTFTTYTMHWVRQAPGKGLEWVAVISDDGGKKCYAESVKGRFTISRDNSENTLYLQMNSLRPEDTAVYHCARAESSSWHNFDYWGQGTLVAVSS

SEQ ID NO: 19482 - protein, 98 aa, Homo sapiens
AASGFTFRNYAMHWVRQSPGEGLEWVAITSDNGDQKYYAESVKVRFAISRDNSENTLYLQMNGLRAEDTAIYYCARAESSSWHNFDYWGQGTPVTVSS

SEQ ID NO: 19483 - protein, 96 aa, Homo sapiens
AVYGESFNSYYWSWVRQPPGKGLEWIGEIDYSGSTNYSPSLRSRVTISVDRSKNQFSLKMTSVTAADTAVYYCARKRGYRSYFDSWGQKTLVTVSS

SEQ ID NO: 19484 - protein, 96 aa, Homo sapiens
AVYGGSFSGYYWSWLRQPPGKGLEWIGEINYNGNTDYNSSLESRVTISVDTSKNQFSLKVTSVTAADTAVYLCARKRGYRSYFDSWSQGGLVTVSS

SEQ ID NO: 19485 - protein, 95 aa, Homo sapiens
VYGGSFSGFYWSWLRQAPGKGLEWIGEINYNGNTDYNSSLESRITISVDTSKNQFSLTVTSVTAADTAVYLCARKRGYRSYFDSWSQGGLVTVSS

SEQ ID NO: 19486 - protein, 96 aa, Homo sapiens
AVYGESFNSFYWSWIRQPPGMGLEWIGEIDYTGSTNYSPSLRSRVTISVDRSKNQFSLKLTSVTAADTAVYYCARKRGYRSYFDSWGQKTLVTVSS

SEQ ID NO: 19487 - protein, 96 aa, Homo sapiens
AVYGGSFSGFYWSWVRHSPGKGLEWIGEISHTGTTYYNPSLKSRVTVSEDTSKNQFSLKLSFVTVADTAVYFCARKRGYRSYFDSWGRGTLVTVSS

SEQ ID NO: 19488 - protein, 96 aa, Homo sapiens
AVYGQSFSGFYWSWLRQPPGKGLEWIGEINYSESTNFNPSLESRVIISIDTSKNQFSLKLSSVTAADTAIYYCARKRGYRSYFDSWGRGTPVAVSS

SEQ ID NO: 19489 - protein, 96 aa, Homo sapiens
AVYGDSFNSYYWTWIRQPPGKGLEWIGEIDYSGSTNYSPSLRSRVTISIDRSKNQFSLRLTSVTAADTAVYYCARKRGYRSYFDSWGQKTLVTVSS

SEQ ID NO: 19490 - protein, 96 aa, Homo sapiens
AVYGETLSAFYWTWIRQPPGRGLEWIGEINYGESVSLNPSLKSRVMLLIDKSKNQFSLKLNSVTAADTAVYFCARKRGYRSYFDSWGRGTPVAVSS

SEQ ID NO: 19491 - protein, 96 aa, Homo sapiens
AVYGETLSAFYWTWIRQSPGRGLEWIGEINYGESVSLNPSLKSRVIMLIDKSKNQFSLKLNSVTAADTAVYFCARKRGYRSYFDSWGRGTPVAVSS

SEQ ID NO: 19492 - protein, 96 aa, Homo sapiens
AVYGETFNSYYWSWIRQPPGRGLEWIGEIDYSGNTNYNPSLESRVTISIDRSKNQFSLRLTSVTAADTAVYYCARKRGYRSYFDSWGQKTLVTVSS

SEQ ID NO: 19493 - protein, 96 aa, Homo sapiens
AVYGESFNPYYWSWIRQPPGKGLEWIGEIDYSGSTNYSPSLRSRVTISVDRSKNQFSLKLTSVTAADTAVYYCARKRGYRSYFDSWGQKTLVTVSS

SEQ ID NO: 19494 - protein, 93 aa, Homo sapiens
EASGFTFSSYWMTWVRQAPGKGLEWVANIKQDGSQKNYVDSLKGRFTISRDNAKNSLLLQMNSLRAEDTAVYYCARGVVSDYWGQGTLVTVSS

SEQ ID NO: 19495 - protein, 93 aa, Homo sapiens
AASGFTFSTYWMSWVRQAPGKGLEWVANIKEDGSEKYYVDSVKGRFTISRDNIKNSLFLQMNALRAEDTSLYYCARGVVSDYWGQGTQVTVSS

SEQ ID NO: 19496 - protein, 93 aa, Homo sapiens
AASGLTFTTYWMSWVRQTPGEGLVWVSSIKSDGSVTGYADSVKGRFTISRDNAKNTLYLEMNSLRAEDTALYFCARGNSMDVWGQGTTVTVSS

SEQ ID NO: 19497 - protein, 93 aa, Homo sapiens
AASGFTFSNHWMYWVRQAPGKGLVWLSFIKSDGSTTSYADSVKGRFTISRDNAKNTLYLQMSSLRAEDTAVYYCARGNSMDVWGQGTTVTVSS

SEQ ID NO: 19498 - protein, 93 aa, Homo sapiens
AASGFTFSNFWMNWVRQSPGKGLVWVSGINNDGSIRSYADSVKGRFNISRDNAKNTLYLQLSSLRAEDTTVYYCARGNSMDVWGQGTTVTVSS

SEQ ID NO: 19499 - protein, 93 aa, Homo sapiens
AASGFTFTDSWMTWVRQAPGKGLEWVANIKEDGSEKYYVDSVKGRFTISRDNAKTSLYLQMNSLRAEDTALYYCARGRGCGSWGQGTLVTVSS

SEQ ID NO: 19500 - protein, 93 aa, Homo sapiens
AASGFTFSNYWMSWVRQAPGKGLEWVANIKLDGSEKYYVDSVKGRFTISRDNAKNSLYLQMNSLRAEDTAVYYCARGRGCGSWGQGALVSVSS

SEQ ID NO: 19501 - protein, 96 aa, Homo sapiens
AASGFTFSRSWMTWVRQAPGKGLEWVANIKEDGSTKNYVDSVKGRFTISRDNAKNSLYLQMNSLRADDTALYYCARDSGWFRFDYWGQGTVVTVSS

SEQ ID NO: 19502 - protein, 96 aa, Homo sapiens
AASGLTFSSDWMAWVRQAPGKGLEWVANIKEDGNEKNHVDSVKGRFTISRDNAKKSLYLQMNSLRAEDTAIYFCARDSGWFRFDYWGQGTLVIVSS

SEQ ID NO: 19503 - protein, 95 aa, Homo sapiens
AVYGGSHSGYYWSWIRQPPGKGLEWIGEVNHGGSTNYNPSLKSRVSISVDTSKNQFSLTLRSVTGADTAVYYCARGQYSPPPDYWGQGTLVTVSS

SEQ ID NO: 19504 - protein, 95 aa, Homo sapiens
AVYGGSSRGYYWSWIRQPPGGGLEWIGEINHHRNTNYNPSLKSRVTISADTSKNQFSLRLRSVTAADTAVYYCARGQYSPPPDYWGQGTLVTVSS

SEQ ID NO: 19505 - protein, 95 aa, Homo sapiens
AVYGGSSRGYYWSWIRQPPGGGLEWIGEINHNRNTNYNPSLKSRVTISADTSKNQLSLRLRSVTAADTAVYYCARGQYSPPPDYWGQGTLVTVSS

SEQ ID NO: 19506 - protein, 95 aa, Homo sapiens
AVYGGSLSGYYWSWIRQPPGKGLEWIGEINHSGSTNYNPSLKSRVTISVDTSKNQFSLKLRSVTAADTAVYYCARGQYSPPPDYWGQGTLVTVSS

SEQ ID NO: 19507 - protein, 95 aa, Homo sapiens; identical to SEQ ID NO: 19503

SEQ ID NO: 19508 - protein, 95 aa, Homo sapiens
AVYGGSSRGYYWSWIRQPPGGGLEWIGEINHNRKTNYNPSLKSRVTISADTSKNQFSLRLRSVTAADTAVYYCARGQYSPPPDYWGQGTLVTVSS

SEQ ID NO: 19509 - protein, 95 aa, Homo sapiens
AVYGGSSRGFYWSWIRQPPGGGLEWIGEINHNRNTNYNPSLKSRVTISADTSKNQFSLRLRSVTAADTAVYYCARGQYSPPPDYWGQGTLVTVSS

SEQ ID NO: 19510 - protein, 92 aa, Homo sapiens
GSGFDFNRFDITWVRQPPGKRMEWVSGITGLNDHKGYVDSVKGRFTISRDPSNNTVYLQMNSLRADDTALYYCVKGFWGDNWGQGTLVTVSS

SEQ ID NO: 19511 - protein, 94 aa, Homo sapiens
AASGFTFSTFEMEWVRQAPGKGLEWVSAITSGGGDTTYYAESVKGRFTISRDSSKNVLYLQMNSLRVEDTAIYYCVKGFWGDNWGHGTLVTVSS

SEQ ID NO: 19512 - protein, 94 aa, Homo sapiens
AVSGLVFSNAWMNWVRQGPGKGLEWVGRIKSKSNGETVDYAAPVKGRFTISRDDSKNTVYLEMNSLKTEDTGVYYCTTGARDYWGQGTLVTVSS

SEQ ID NO: 19513 - protein, 93 aa, Homo sapiens
ASGIIFTNAWMNWVRQAPGQALEWVGRIKSKNDGGTIVYAAPVEGRFTVSRDDSKDTLYLQMNSLKPEDTAVYYCTTGARDYWGRGTLVTVSS

SEQ ID NO: 19514 - protein, 100 aa, Homo sapiens
AASGFTFRSYWMHWVRQAPGKGLVWVSHINSDGSSTSNADSVKGRFTISRDNAKNTLYLQMNSLRDEDTAVYYCARDLRRDYYHYYGMDVWGQGTTVTVS

SEQ ID NO: 19515 - protein, 101 aa, Homo sapiens
AASGFTFSNYWMHWVLQAPGKGLVWVSRTNSDGSSTTYADSVKGRFTISRDNAKNTLYLQMNSLRAEDTAVYYCARDLRRDYYHYYGMDVWGQGTTVTVSS

SEQ ID NO: 19516 - protein, 101 aa, Homo sapiens
AASGFRFSNYWMNWVRQAPGKGLVWVSRIDSDGSSTTYADSVKGRFTISRDNAKNTLYLQMSSLRVEDTAVYYCARDLRRDYYHYYGMDVWGQGTTVTVSS

SEQ ID NO: 19517 - protein, 93 aa, Homo sapiens
AASGFTFSSYAMSWVRQAPGKGLEWVSSIIGSGGSTYYEDSVKGRFTISRDNSKNTLYLQMNSLRAEDTAVYYCAKTASFDYWGQGTLVTVSS

SEQ ID NO: 19518 - protein, 93 aa, Homo sapiens
AASGFTFSSFGMSWVRQAPGQGLEWVSTIGGSGGNTYYADSVKGRFTISRDNSKNMLYLQMNSLTAEDTAVYYCAKTASFDYWGQGTLVTVSS

SEQ ID NO: 19519 - protein, 92 aa, Homo sapiens
ASGFIFKTYSMNWVRQAPGKGLEWISYITSNSNTTYYADSVKGRFTISRDNAKNSLYLHMSSLREEDTAVYYCARDAFGDFWGQGTLVTVSS

SEQ ID NO: 19520 - protein, 92 aa, Homo sapiens
ASGFIFKTYSMNWVRQAPGKGLEWISYITSNSNTTYYADSVKGRFTISRDNAKNSLYLHMSSLRDEDTAVYYCARDAFGDFWGQGTLVTVSS

SEQ ID NO: 19521 - protein, 93 aa, Homo sapiens
AASGFTFSTYSMNWVRQAPGKGLEWVAYITSNSSTIFYADSVKGRFTISRDNAKNSLYLQMNSLRDEDTAVYYCARDAFGDFWGQGTLVTVSS

SEQ ID NO: 19522 - protein, 93 aa, Homo sapiens
AASGFTLSTYWMSWVRQAPGKGLEWVANIKHDGSEKYYVDSVKGRFTISRDNAKNSLYLQMNSLRAEDTAVYYCARELRLSYWGQGTLVTVSS

SEQ ID NO: 19523 - protein, 93 aa, Homo sapiens
AASGFTFSTYWMSWVRQAPGKGLEWVANIKQDGSAKSYVDSVKGRFTISRDNAKNSLYLQMNSLRAEDTAMYYCARELRLSYWGQGTLVTVSS

SEQ ID NO: 19524 - protein, 92 aa, Homo sapiens
ASGFTFNKQWMMWVRQPPGKGPECVANIKSDGSETYYVDSVRGRFTISRDNAKNSLYLQMTSLRVEDTAVYHCARGWGIDSLGQGTLVSVSS

SEQ ID NO: 19525 - protein, 93 aa, Homo sapiens
AASGFTFSRYGMTWVRQAPGKGLEWVANINQDGSQKYYVDSVKGRFTISRDNAKNSLYLQMNSLRAEDTAVYYCARGWGIDSWGQGALVTVSS

SEQ ID NO: 19526 - protein, 92 aa, Homo sapiens
ASGFTFNKQWMMWVRQPPGKGPECVANIKSDGSETYYVDSVKGRFTISRDNAKNSLYLQMTSLRVEDTAVYHCARGWGIDSLGQGTLVTVSS

SEQ ID NO: 19527 - protein, 92 aa, Homo sapiens
ASGFTFDKQWMIWVRQPPGKGPECVANIKSDGSETYYVDSVKGRFTISRDNAKNSLYLQMTSLRVEDTAVYHCARGWGIDSLGQGTLVTVSS

SEQ ID NO: 19528 - protein, 97 aa, Homo sapiens
AASGFTFNNYAMSWVRQAPGRGLEWVSAISASGYDTHYGASVKGRFTISRDNSKNTLFLQMNSLRADDTALYYCAKDRITISAFDIWGQGTMVTVSS

SEQ ID NO: 19529 - protein, 97 aa, Homo sapiens
AASGFTFNNYGMSWVRQAPGKGLEWVSAISASSGDTYYGDSVKGRFTISRDNSKNTLFLQMNSLRADDTALYYCAKDRITISAFDIWGQGTMVTVSS

SEQ ID NO: 19530 - protein, 97 aa, Homo sapiens
AASGFTFKDYGMSWVRQAPGKGLEWVSGISATSGDRYYGDSVKGRFTISRDNSKNTLFLQMNSLRADDTALYYCAKDRITISAFDIWGQGTMVTVSS

SEQ ID NO: 19531 - protein, 97 aa, Homo sapiens
AASGFTFNNYGMSWVRQAPGKGLEWVSGISGSGRDTYYGDSVKGRFTISRDNSKNTLFLQMNSLRADDTALYYCAKDRITISAFDIWGQGTMVTVSS

SEQ ID NO: 19532 - protein, 97 aa, Homo sapiens
AASGFTFSSYGMNWVRQAPGKGLEWVSGVSDSGGSKYYGDSVKGRVTISRDNSKNTVYLQMNSLRVEDTAIYYCAKDRITISAFDIWGQGTMVTVSS

SEQ ID NO: 19533 - protein, 96 aa, Homo sapiens
AASGFTVSSYGMNWVRQAPGKGPEWVSAISSDFRTYYTDSVKGRFTISRDNSKNTVYLQMNYLRVEDTAVYYCAKDRITISAFDIWGRGTVVTVSS

SEQ ID NO: 19534 - protein, 101 aa, Homo sapiens
TVSGGSISSFYWSWIRQPPGKGLEYIGYIYDGENTNYNPSFKSRVTISVDTSEKQFSLKLSSVTAADTAVYYCASGDFWSGYDYYYYMDVWGKGTTVTVSS

SEQ ID NO: 19535 - protein, 100 aa, Homo sapiens
TVSGGSISSFYWSWIRQPPGRGLEWIGYVYDSGSTNYNPSLKSRVTISIDTSKNQVSLKLTSVTAADTAVYYCASGDFWSGYDYYYYMDVWGKGTAVTVS

SEQ ID NO: 19536 - protein, 101 aa, Homo sapiens
TVSGGSISGYYWSWIRQPPGKGLEWIGYIYDSGSTKYSPSLKSRVTISVDTSKNQFSLKLSSVTAADSAIYYCASGDFWSGYDYYYYMDVWGKGTTVTVSS

SEQ ID NO: 19537 - protein, 101 aa, Homo sapiens
TVSGGSMNSFYWSWIRQPPGRGLEWIGYIYDSGSTNYSPSLKSRVTMSMDTSKKQFSLKLTSVTAADTAVYYCASGDFWSGYDYYYYMDVWGKGTAVTVSS

SEQ ID NO: 19538 - protein, 101 aa, Homo sapiens
TVSGGSIDSFYWSWIRQPPGKGLEWIGYVYYSESTKYNPSLKSRVTISLDTSKNQFSLKLTSVTAADTAVYYCASGDFWSGYDYYYYMDVWGKGTTVTVSS

SEQ ID NO: 19539 - protein, 100 aa, Homo sapiens
VSGGSMNSFYWSWIRQPPGRGLEWIGYIYDSGSTKYNPSLKSRVTISMDTSKNQFSLKLTSVTAADTAVYYCASGDFWSGYDYYYYMDVWGKGAAVTVSS

SEQ ID NO: 19540 - protein, 101 aa, Homo sapiens
TVSGASISGYYWSWIRQTPGKGLEWIGYIYDSGSTNYNPSLKSRVTISIDTSENQFSLKLSSVTAADTAVYYCASGDFWSGYDYYYYMDVWGKGTTVTVSS

SEQ ID NO: 19541 - protein, 101 aa, Homo sapiens; identical to SEQ ID NO: 19538

SEQ ID NO: 19542 - protein, 101 aa, Homo sapiens
SVSGGSMNSFYWSWIRQPPGRGLEWIGYIYDTGSTKYNPSLKSRVTISMDTSNKQFSLRLTSVTAADTAVYYCASGDFWSGYDYYYYMDVWGKGTAVTVSS

SEQ ID NO: 19543 - protein, 101 aa, Homo sapiens
TVSGGPINSYYWSWIRQPPGKGLEYIGYIYDTGRTNYNPSLKSRVTISMDTSKNHFSLKLNSVTAADTAVYYCASGDFWSGYDYYYYMDVWGKGTTVTVSS

SEQ ID NO: 19544 - protein, 100 aa, Homo sapiens
VSGGSMNSFYWSWIRQPPGRGLEWIGYIYDSGSTKYNPSLKSRVTISVDTSKNQFSLKLTSVTAADTAVYYCASGDFWSGYDYYYYMDVWGKGTAVTVSS

SEQ ID NO: 19545 - protein, 101 aa, Homo sapiens; identical to SEQ ID NO: 19543

SEQ ID NO: 19546 - protein, 101 aa, Homo sapiens
TVSGGPINSYYWSWIRQPPGKGLEYIGYIYDTGRTNYNPSLKSRVTISMDTSKNQFSLKLNSVTAADTAVYYCASGDFWSGYDYYYYMDVWGKGTTVTVSS

SEQ ID NO: 19547 - protein, 101 aa, Homo sapiens; identical to SEQ ID NO: 19537

SEQ ID NO: 19548 - protein, 101 aa, Homo sapiens; identical to SEQ ID NO: 19543

SEQ ID NO: 19549 - protein, 101 aa, Homo sapiens; identical to SEQ ID NO: 19546

SEQ ID NO: 19550 - protein, 101 aa, Homo sapiens
TVSGASITGYYWSWIRQPPGKGLEWIGYIYDSGSTNYNPSLKSRLTISVDMSKNQFSLKLNSVTAADTAVYYCASGDFWSGYDYYYYMDVWGKGTTVTVSS

SEQ ID NO: 19551 - protein, 101 aa, Homo sapiens
TVSGGSINSFYWSWIRQPPGKGLEWIGYVYESETTNYNPSLKSRVTISLDTSKNQFSLKLSSVTAADTAVYYCASGDFWSGYDYYYYMDVWGKGTTVTVSS

SEQ ID NO: 19552 - protein, 101 aa, Homo sapiens
TVSGGSIDSFYWSWIRQPPGRGLEWIGYVYYSETTKYNPSLKSRVTISLDTSKNQFSLKLNSVTAADTAVYYCASGDFWSGYDYYYYMDVWGKGTTVTVSS

SEQ ID NO: 19553 - protein, 92 aa, Homo sapiens
AASGFTFSTYLMNWVRQAPGKGLEWVANIKQDGSEKYYVDSVKGRITISRDNAKNSLYLQMNGLRAEDTAVYYCTRGRLDYWGQGTLVTVSS

SEQ ID NO: 19554 - protein, 92 aa, Homo sapiens
AASGFTFSSYWMSWVRQAPGKGLEWVAIINQDGSEKYYVDSLKGRLTISRDNAKNSLCLQMNSLRAEDTAVYYCTRGRLDYWGQGTLVTVSS

SEQ ID NO: 19555 - protein, 92 aa, Homo sapiens; identical to SEQ ID NO: 19554

SEQ ID NO: 19556 - protein, 96 aa, Homo sapiens
AASGFTFSTYSMNWVRQAPGKGREWVSYISGSSGTIYYADPVKGRFTISRDNAKNSLYLQMNSLRAEDTAVYYCARARSGYYMDVWGKGTTVTVSS

SEQ ID NO: 19557 - protein, 96 aa, Homo sapiens
AASGFTFSSYSMNWVRQAPGRGLEWVSFISDTSKIIYYADSVKGRFTISRDDAQDSLYLQMTSLRDEDTAVYYCARARSGYYMDVWGKGSTVAVSS

SEQ ID NO: 19558 - protein, 100 aa, Homo sapiens
TVSGGSISSSSYYWGWIRQPPGKGLEWIGSIYYSASTYYNPSLKSRVTISVDTSKNQFSLKLSSVTAADTAVYYCARVYYYDSSGPYDYWGQGTLVTVSS

SEQ ID NO: 19559 - protein, 100 aa, Homo sapiens
TVSGGSISRSTYYWGWVRQPPGKGLEWIGSIYYSGTTYYNPSLKSRVTISVDTSKNQFSLKLSSVTAADTAVYYCARVYYYDSSGPYDYWGQGTLVTVSS

SEQ ID NO: 19560 - protein, 94 aa, Homo sapiens
AASGFTFSDYYMSWIRQAPGKGLEWVAYIRSSSSYTNYADSVKGRFTISRDNAKNSLYLQMNSLRAEDTAVYYCARGKDAFDIWGQGTMVTVSS

SEQ ID NO: 19561 - protein, 94 aa, Homo sapiens
AASGFTFSDYYMSWIRQAPGKGLEWVSYISSSGSTIYYADSVKGRFTISRDNAKNSLYLQMNSLRAEDTAVYYCARGKDAFDIWGQGTMVTVSS

SEQ ID NO: 19562 - protein, 95 aa, Homo sapiens
AVYGFTFSNYSMNWVRQAPGKGLEWVSYISRSSSVKYYADSVKGRFTISRDNAKNSLYLQMNNLRDDDTAVYYCARAGSSGFYYWGQGTLVTVSS

SEQ ID NO: 19563 - protein, 95 aa, Homo sapiens
AASGFTFSSYSMNWVRQAPGKGLEWVSYISSSSSSIYYVDSVKGRFTISRDNAKSSLYLQMNSLRDEDTAVYYCARAGSSGFYYWGQGTLVTVSS

SEQ ID NO: 19564 - protein, 92 aa, Homo sapiens
AVYGASISDYSWGWIRQPPSKGLEWIGEINQGGSTNYNPSLKSRVTISVDTSKNQFSLKLNSVTAADTAVYYCARGGGHRYWGQGTLVTVSS

SEQ ID NO: 19565 - protein, 92 aa, Homo sapiens; identical to SEQ ID NO: 19564

SEQ ID NO: 19566 - protein, 92 aa, Homo sapiens
AVYGGSVSSYSWGWIRQPPGKGLEWIGEISQSGSTNFNPSLKSRVTISVDTSRNQFSLKLNSVTVADTAVYYCARGGGHRYWGQGTLVTVFS

SEQ ID NO: 19567 - protein, 92 aa, Homo sapiens
AVYGASFSDYTWSWVRQPPGKGLEWIGEINQSGDTNYNPSLKSRGTISRDTSKNQFSLKVTSVTAADTALYYCARGGGHRYWGQGTLVTVSS

SEQ ID NO: 19568 - protein, 92 aa, Homo sapiens
AVYGASFSTYTWSWVRQPPGKGLEWIGEINQSGNTNYNPSLKGRVTISADTSKNQFSLRVTSVTAADTALYFCARGGGHRYWGQGTLVTVSS

SEQ ID NO: 19569 - protein, 92 aa, Homo sapiens
AVNGASFTSYSWGWIRQSPAKGLEWIGEINQGGSTSYNPSLKSRVTISRDTSKNQFSLKLTSVSAADTAVYYCARGGGHRYWGQGTLVTVSS

SEQ ID NO: 19570 - protein, 92 aa, Homo sapiens
AVYGASFSDYTWSWVRQPPGEGLEWIGEINQSGDTKYNPSLKSRGTISRDTSKNQFSLKVTSVTAADTALYYCARGGGHRYWGQGTLVTVSS

SEQ ID NO: 19571 - protein, 99 aa, Homo sapiens
TVSGVSISSTDYSWYWGWVRQPPGTGLEWIGGMSTSGSVFYNPSLKSRCTISVDTSKNEFSLWLTSVTAADTAKYYCARRDYRAWFDPWGQGILVTVSS

SEQ ID NO: 19572 - protein, 101 aa, Homo sapiens
SITSSVSGGSISSSSYYWGWIRQPPGKGLEWIGGIYYSGGTLYNPSLKSRVTISKDTSKNQISLKLSSVTAADTAVYYCARRDYRAWFDPWGQGTLVTVSS

SEQ ID NO: 19573 - protein, 97 aa, Homo sapiens
TVSGGSMTSGSFYWGWVRQPPGKELEWIGSVYYSGSTMYNPSLKSRVFIFGDTSKNQFSLELSSVSVADTAVYYCARRDYRAWFDPWGQGTQVTVSS

SEQ ID NO: 19574 - protein, 99 aa, Homo sapiens
SVSGGSIASNDYSKYWAWIRQSPGTGLEWIGGMPTTGGAFYNPSLKSRVTISVDTSKSEFSLRLNSVIAADTAVYYCARRDYRAWFDPWGQGILVTVSS

SEQ ID NO: 19575 - protein, 99 aa, Homo sapiens
TVSGVSISSTDYSYYWEWIRQPPGTGLEWIGGMSTSGSSYYNPSLKSRVTISVDTSKNQFSLKLNSVTAADTAVYYCARRDYRAWFDPWGQGILVTVSS

SEQ ID NO: 19576 - protein, 99 aa, Homo sapiens
TVSGGSISGYYWSWIRQPPGKGLEWIGYIYSSGSTNYNPSLKRRVTISEDTSKNQFSLKLSSVTAADTAVYYCARKDSSSWYGNWFDPWGQGTLVTVSS

SEQ ID NO: 19577 - protein, 99 aa, Homo sapiens
TVSGASISGYYWSWIRQPPGKGLEWIGYIYNSGSTNYNPSLKSRVTISADTSKNQFSLKLSSVTAADTAMYYCARKDSSSWYGNWFDPWGQGTLVTVSS

SEQ ID NO: 19578 - protein, 99 aa, Homo sapiens
TVSGAPISGYYWSWIRQPPGKGLEWIGYIYNSGSTNYNPSLKSRVTISADTSKNQFSLRVRSVTTADTAMYYCARKDSSSWYGNWFDPWGQGTLVTVSS

SEQ ID NO: 19579 - protein, 99 aa, Homo sapiens
TVSGDSISGYYWSWIRQPPGKGLEYIGYIYNSGSTNYSPSLKSRVTISVDTSKNQFSLKLTSVTAADTATYYCARKDSSSWYGNWFDPWGQGTLVTVSS

SEQ ID NO: 19580 - protein, 100 aa, Homo sapiens
TVSGGSVSSYYWSWIRQPPGKGLEWIGYIYSRGSTNYNPSLRTRVTISVDTSKNQFSLRLRSVTAADTAVYYCARDGGIAVSGTDAFDIWGQGTVVTVSS

SEQ ID NO: 19581 - protein, 100 aa, Homo sapiens
TVSGGSVSSYYWSWIRQSPGKGLEWIGYIYSRGSTNYNPSLKSRVTISVDTSKNQFSLRLRSVTAADTAVYYCARDGGIAVSGTDAFDIWGQGTMVTVSS

SEQ ID NO: 19582 - protein, 100 aa, Homo sapiens
TVSGGSVKSYYWSWIRQPPGKGLEWIGYIYYGGSTNYNPSLNSRVTISVDTSNNRFSLKLRSVTAADTAVYYCARDGGIAVSGTDAFDIWGQGTMVTVSS

SEQ ID NO: 19583 - protein, 100 aa, Homo sapiens
TVSGGSVSSYYWSWIRQPPGKGLEWIGYIYSRGSTNYNPSLKSRATISVDTSKNQFSLRLRSVTAADTAVYYCARDGGIAVSGTDAFDIWGQGTMVTVSS

SEQ ID NO: 19584 - protein, 100 aa, Homo sapiens; identical to SEQ ID NO: 19583

SEQ ID NO: 19585 - protein, 100 aa, Homo sapiens
TVSGGSVTSYYWSWIRQPPGKGLEWIGYIYSRGSTNYNPSLKSRATILVDTSKNQFSLRLRSVTAADTAVYYCARDGGIAVSGTDAFDIWGQGTMVTVSS

SEQ ID NO: 19586 - protein, 91 aa, Homo sapiens
ASGYMFSTSDINWVRQAPGQGLEWVGWMSPKSGFTAYAQKFQGTVTMTRDNSINTAYMEVRSLKSEDTAVYYCARALFDSWGQGTLVTVSS

SEQ ID NO: 19587 - protein, 91 aa, Homo sapiens
ASGYTFSNSDINWVRQATGQGLEWMGWMSPNSGNTGYAQKFRGRVTMTWNTSIGTAYMELSSLRSDDTAVYYCARALFDSWGQGTLVTVSS

SEQ ID NO: 19588 - protein, 103 aa, Homo sapiens
ASGFSFRTYKMTWVRQAPGRGLQWVANIKQDVSETDYVDSVKGRFSISRDNAMNSLYLQMNSLRVEDTATYYCARYCSGGSCPTHYFYGMDVWGPGTTVTVSS

SEQ ID NO: 19589 - protein, 104 aa, Homo sapiens
AASGFSFRSYQMTWVRQAPGKGLEWVANIIQDGSGKYYVDSVEGRFTISRDNAKNSLYLQMNDLRAVDTAVYYCARYCSGGSCPTHYFYGMDVWGQGTTVTVSS

SEQ ID NO: 19590 - protein, 92 aa, Homo sapiens
VASGFTFSNYAMSWVRQAPGKGLDWVSTINGSGSSTYYADSVKGRFTISRDNSKNTLYLQMNSLRAEDTAIYYCAKRQIDYWGQGMLVTVSS

SEQ ID NO: 19591 - protein, 92 aa, Homo sapiens
AASGFTFSSHAMNWVRQAPGKGLEWVSAISGSGTNTYYADSVKGRFTISRDNSKNTLYLQMNSLRVEDTAVYYCAKRQIDYWGQGTLVTVSS

SEQ ID NO: 19592 - protein, 92 aa, Homo sapiens
AASGFTLSGAWMSWVRQAPGKGLEWVATIKGDGSDQYYVDSVRGRFTISRDIDKNSLFLQMNSLRVEDTAIYYCAKDTLDVWGQGTTVTVSS

SEQ ID NO: 19593 - protein, 92 aa, Homo sapiens
AASGFTLSGAWMSWVRQAPGKGLEWVATIKGDGSDQYYVDSVRGRFTISRDIDKNSLFLQMNSLRVEDTAIYYRAKDTLDVWGQGTTVTVSS

SEQ ID NO: 19594 - protein, 92 aa, Homo sapiens
AASGFTLSGAWMSWVRQAPGKGLEWVATIKGDGSDQYYVHSVRGRFTISRDIDKNSLFLQMNSLRVEDTAIYYCAKDTLDVWGQGTTVTVSS

SEQ ID NO: 19595 - protein, 92 aa, Homo sapiens; identical to SEQ ID NO: 19592

SEQ ID NO: 19596 - protein, 92 aa, Homo sapiens
AASGFTLRDSWMSWVRQAPGKGLEWVATIGGEESQKFYVDSVKGRFTISRDDARSSVFLQMDSLRVEDTAVYFCAKDTLDVWGQGTTVTVSS

SEQ ID NO: 19597 - protein, 92 aa, Homo sapiens
ATSGFILRNAWMTWVRQAPGKGLEWVATMGGEESEKFYVDSVKGRFIISRDDARSSVFLQMDSLRGEDTAVYYCAKDTLDVRGQGTTVTVSS

SEQ ID NO: 19598 - protein, 92 aa, Homo sapiens
AASGFTLRNAWMSWVRQAPGKGLQWVATMGGEEYEKFYVDSVKGRFTISRDDARSSVFLQVDSLRVEDTAVYFCAKDTLDVWGQGTTVTVSS

SEQ ID NO: 19599 - protein, 92 aa, Homo sapiens
AASGFTFSSYGMNWVRQAPGKGLEWVAHISSSGSPIYYADSVKGRFTISRDNGKNSLYLQMSSLRDEDTATYYCATLVSDHWGQGTLVTVFS

SEQ ID NO: 19600 - protein, 92 aa, Homo sapiens; identical to SEQ ID NO: 19599

SEQ ID NO: 19601 - protein, 92 aa, Homo sapiens
AASGFTFSSYGMNWVRQAPGKGLEWVAHISSSGSPIYYADSVKGRFTISRDNGKNSLYLQMSSLRDGDTATYYCATLVSDHWGQGTLVTVFS

SEQ ID NO: 19602 - protein, 92 aa, Homo sapiens
AASGFTFSSYGMNWVRQAPGKGLEWVAHISSSGSPIYYADSVKGRFTISRDNGKNSLYLQMSSLRDEDTATYYCATLVSDHWGQGTPVTVFS

SEQ ID NO: 19603 - protein, 92 aa, Homo sapiens
AASGFTFSSYGMNWVRQAPGKGLEWVAHISSSGSPIYYADSVKGRFTISRDNGKNSLYLQMSSLRDEDTATYYCATLVSDHWGQGTLVTIFS

SEQ ID NO: 19604 - protein, 92 aa, Homo sapiens
VASGFTFSSYGMNWVRQAPGKGLEWVSHISSSGSPIFYADSVKGRFTISRDNGKSSLYLQMTSLRDEDTATYYCATLVSDHWGQGTLVTVSS

SEQ ID NO: 19605 - protein, 92 aa, Homo sapiens; identical to SEQ ID NO: 19604

SEQ ID NO: 19606 - protein, 92 aa, Homo sapiens; identical to SEQ ID NO: 19599

SEQ ID NO: 19607 - protein, 92 aa, Homo sapiens
VASGFAFSTYGMNWVRQAPGKGLEWISHISSSGSPIFYADSVKGRFTISRDNAKNSLYLQMTSLRDEDTATYYCATLVSDHWGQGTLVTVSS

SEQ ID NO: 19608 - protein, 91 aa, Homo sapiens
ASGFTFSSYGMHWVRQAPGKGLEWVAHISSSGSPIYYADSVKGRFTISRDNGKNSLYLQMSSLRDEDTATYYCATLVSDHWGQGTLVTVFS

SEQ ID NO: 19609 - protein, 92 aa, Homo sapiens; identical to SEQ ID NO: 19604

SEQ ID NO: 19610 - protein, 93 aa, Homo sapiens
ASGYTFSNYDINWVRQATGQGLEWVGWMNPKSGNTGYAQKFQGRVTMTRHTSMTTAYMELSNLRSEDTAVYYCVRVAGSIDYWGQGTLVTVSS

SEQ ID NO: 19611 - protein, 93 aa, Homo sapiens; identical to SEQ ID NO: 19610

SEQ ID NO: 19612 - protein, 93 aa, Homo sapiens
ASGYTFTSYDINWVRQATGQGLEWMGWTNPKSGYTGYAQKFQGRVTMTRDTSTSTAYMELSNLRSEDTALYYCVRVAGSIDYWGQGTLVTVSS

SEQ ID NO: 19613 - protein, 93 aa, Homo sapiens
ASGYTFTSYDINWVRQATGQGLEWMGWTNPKSGNTGYAQKFQGRVTMTRDTSISTAYMELSNLRSEDTALYYCVRVAGSIDYWGQGTLVTVSS

SEQ ID NO: 19614 - protein, 93 aa, Homo sapiens
ASGYTFTSYDINWVRQATGQGLEWVGWTNPKSGYTGSAQKFLGRVTMTRDTSISTAYMELSNLRSEDTALYYCVRVAGSIDYWGQGTLVTVSS

SEQ ID NO: 19615 - protein, 93 aa, Homo sapiens; identical to SEQ ID NO: 19612

SEQ ID NO: 19616 - protein, 93 aa, Homo sapiens
ASGYTFTTYDINWVRQATGQGLEWMGWTNPKSGYTGSSQNFLGRVTMTRDSSISTAYMELSNLRSEDTALYYCVRVAGSIDYWGQGTLVTVSS

SEQ ID NO: 19617 - protein, 97 aa, Homo sapiens
VASGFTFSTYWMAWVRQAPGKGLECVAKIKRDGSDKYYVDSVKGRFTISRDSAKNSLYLQMNSLRVEDTAVYYCARDAGRYGDFDYWGQGTLVTVSS

SEQ ID NO: 19618 - protein, 97 aa, Homo sapiens
EASGFTFSMYWMCWVRQAPGKGPECVAKIKNDGSAKYYVDSVKGRFTISRDNAKNSMFLQMNSLRAEDTAIYHCARDAGRYGDFDYWGQGTPVTVSS

SEQ ID NO: 19619 - protein, 97 aa, Homo sapiens; identical to SEQ ID NO: 19618

SEQ ID NO: 19620 - protein, 97 aa, Homo sapiens
EAFGFTFSMYWMCWVRQAPGKGPECVAKIRKDGSAKYYVDSVKGRFTVSRDNAKNSLFLQMNSLRGEDTAVYYCARDAGRYGDFDYWGQGTPVTVSS

SEQ ID NO: 19621 - protein, 99 aa, Homo sapiens
AASGFTFSSSDMHWLRQAPGKGLEWVAVISYGGGIIKYADSVKGRFTISRDNSKSTLYLQMNSLRAEDTAVYYCAKDLTGDYRAYFDYWGQGTLVTVSS

SEQ ID NO: 19622 - protein, 98 aa, Homo sapiens
ASGFTFSSSDMHWLRQAPGKGLEWVAVISYGGGIIKYADSVKGRFTISRDNSKSTLYLQMNSLRAEDTAVYYCAKDLTGDYRAYFDYWGQGTLVTVSS

SEQ ID NO: 19623 - protein, 99 aa, Homo sapiens; identical to SEQ ID NO: 19621

SEQ ID NO: 19624 - protein, 99 aa, Homo sapiens
AASGFTFSSSDMHWLRQAPGKGLEWVAVISYGGGIIKYADSVKGRFTISRDNSKSTLYLQMNSPRAEDTAVYYCAKDLTGDYRAYFDYWGQGTLVTVSS

SEQ ID NO: 19625 - protein, 99 aa, Homo sapiens
AASGFSFSASDMHWVRQAPGKGLEWVAVISSLGNIRFYTDSVKGRFTVSRDNSKNTLYLQMNSLTAEDTAVYYCAKDLTGDYRAYFDYWGQGTLVTVSS

SEQ ID NO: 19626 - protein, 99 aa, Homo sapiens
AASGFSFSASDMHWVRQAPGKGLEWVAVISTIGNIRFYVDSVKGRFTVSRDNSKNTLYLQMNSLRAEDTAVYYCAKDLTGDYRAYFDYWGQGTLVTVSS

SEQ ID NO: 19627 - protein, 98 aa, Homo sapiens
AASGFIFGNFDMHWVRQTPGKDLEWVAVISSDGSTKIYRDSVKGRFTISRDNSKNTLYLQMSSLTPEDTAVYYCAKDLTGDYRAYFDYWGQGTVVTVS

SEQ ID NO: 19628 - protein, 105 aa, Homo sapiens
AASGFTFSSYRMNWVRQAPGKGLEWVAFISTGGHNIYYADSVKGRFTISRDDAKNSVYLQMNSLKDEDTAVYYCARDKLGREFSDYETIPPFVYWGQGTLVTVSS

SEQ ID NO: 19629 - protein, 105 aa, Homo sapiens; identical to SEQ ID NO: 19628

SEQ ID NO: 19630 - protein, 105 aa, Homo sapiens
AASGFTFSSYRMNWVRQAPGRGLEWVAFISTGGHNIYYADSVKGRFTISRDDAKNSVYLQMNSLKDEDTAVYYCARDKLGREFSDYETIPPFVYWGQGTLVTVSS

SEQ ID NO: 19631 - protein, 95 aa, Homo sapiens
VASGFTFSNSPMHWVRQAPGEGLVWVSRIGGGGTDITYADSVKGRFTTSRDNAKNTVYLQMNNLRVEDTAVYYCTGDRGSLGDSWGQGTLVTVSS

SEQ ID NO: 19632 - protein, 95 aa, Homo sapiens
VGSGFTFSNSPMHWVRQAPGEGLVWVSRIGGGGTDITYADSVKGRFTTSRDNAKNTVYLQMNNLRVEDTAVYYCTGDRGSLGDSWGQGTLVTVSS

SEQ ID NO: 19633 - protein, 95 aa, Homo sapiens; identical to SEQ ID NO: 19631

SEQ ID NO: 19634 - protein, 95 aa, Homo sapiens
VASGFTFSNSPMHWVRQAPGEGLVWVSRIGGGGTDITYADSVKGRFTTSRDNAKNTVYLQMNNLRVEDTAVHYCTGDRGSLGDSWGQGTLVTVSS

SEQ ID NO: 19635 - protein, 94 aa, Homo sapiens
AASGPMFRNGPMHWVRQPPGEGPLWVSRIDGWGGTTYAAAVQGRFITSRDDASNTLSLHMNNLRPEDTAVYYCTGDRGSLGDSWGQGTLVTVSS

SEQ ID NO: 19636 - protein, 95 aa, Homo sapiens
VASGFTFSNSPMHWVRQTPGGGLVWVSRIYRGEADVTYADSVKGRFTISRDNAKNTVYLQMNNLRVEDTAVYYCTGDRGSLGDSWGQGTLVTVSS

SEQ ID NO: 19637 - protein, 95 aa, Homo sapiens; identical to SEQ ID NO: 19631

SEQ ID NO: 19638 - protein, 99 aa, Homo sapiens
AASGFTFNTYGMHWVRQAPGKGLEWVALISYDGFNKYYAESMKGRFTISRDNSKNTLYLQMNSLRPEDTAVYYCARTSRGSYYYGMDVWGQGTTVTVSS

SEQ ID NO: 19639 - protein, 99 aa, Homo sapiens
AASGFTFSTYGMHWVRQAPGKGLEWVALISYDGSNKYYADSMKGRFTISRDNSKNTLYLQMNSLRPEDTAVYYCARTSRGSYYYGMDVWGQGTTVTVSS

SEQ ID NO: 19640 - protein, 99 aa, Homo sapiens
AASGFTFSIYGIHWVRQAPGKGLEWVALISYDGINKYYADSVRGRFTISRDNSETTLYLQMNSLRVEDTAVYYCARTSRGSYYYGMDVWGQGTTVTVSS

SEQ ID NO: 19641 - protein, 95 aa, Homo sapiens
AASGFTFSTYAMSWVRQAPGKGLEWVSAIGYSGVDTYYAGSVKGRFTISRDNSKNTLYLQMDSLRDEDTAVYYCARGSHGEHDSWGQGTLVTVSS

SEQ ID NO: 19642 - protein, 95 aa, Homo sapiens
AASGFTFNNYAMSWVRLAPGKGLEWVSAIGGITTGTYYADSVKGRFTISRDNSKNTLFLQMNSLRAEDTALYYCARGSHGEHDSWGQGTLVTVSS

SEQ ID NO: 19643 - protein, 106 aa, Homo sapiens
AASGFTFSNYWMHWVRQEPGKGLVWVSRINRDGSDTTYADSVQGRFTISRDNAKNTLYLQMNSLRAEDTAVYYCVGAPDCGGGSCFSHHYYGLDVWGQGTTVTVSS

SEQ ID NO: 19644 - protein, 106 aa, Homo sapiens; identical to SEQ ID NO: 19643

SEQ ID NO: 19645 - protein, 106 aa, Homo sapiens
AASGFTFRNYWFHWVRQAPGKGLVWVSRVNRDGSETAYEDSVRGRLIISRDNARNTLYLQMSSLRAEDTAVYYCVGAPDCGGGSCFSHHYYGLDVWGQGATVVVSS

SEQ ID NO: 19646 - protein, 106 aa, Homo sapiens; identical to SEQ ID NO: 19645

SEQ ID NO: 19647 - protein, 96 aa, Homo sapiens
ASGYTFTYYYIHWVRQVPGQGLEWMGIIFLGGDDTAYAQKFQGRVTMTRDTSTSTVYMELSSLRSEDTAVYFCARESPHTFYFDYWGQGSLVTVSS

SEQ ID NO: 19648 - protein, 96 aa, Homo sapiens
AFGYTFTYYYIHWVRQVPGQGLEWMGIIFLGGDDTAYAQKFQGRVTMTRDTSTSTVYMELSSLRSEDTAVYFCARESPHTFYFDYWGQGSLVTVSS

SEQ ID NO: 19649 - protein, 96 aa, Homo sapiens
ASGYTFTNYYIHWVRQAPGQGPEWMGIINVTGGSTSHAQNFRGRVTMTRDTSTRTVYMELNNLRSEDTAIYYCARESPHTFYFDYWGQGTLVTVSS

SEQ ID NO: 19650 - protein, 95 aa, Homo sapiens
ATSGFIFSTYWMYWVRQAPGKGLVWVSRIKSDGISTSYGDSVKGRFTISRDNAKNTFFLQMNSLRDEDTAVYYCARGGIYSFDYWGQGTLVTVSS

SEQ ID NO: 19651 - protein, 94 aa, Homo sapiens
AASGFTFSTYGMYWVRQAPGKGLVWVARIFKDETTNYADSVKGRFTISRDNAKNTLYLQMSSLRGDDTALYYCARGGIYSFDYWGQGTLVTVSS

SEQ ID NO: 19652 - protein, 95 aa, Homo sapiens
AASGFNFSIYWMYWVRQAPGKGLVWVSRIKSDGISTSYGDSVKGRFTISRDNAKNTFFLQMNSLRDEDTAVYYCARGGIYSFDYWGQGILVTVSS

SEQ ID NO: 19653 - protein, 97 aa, Homo sapiens
AASGFTFGDYAMTWVRQVPGKGLEWVSYISGSSGTIFYADSVKGRFTISRDNVKNSLYLQMNSLRDEDSALYYCARDSGSAGADDYWGQGTLVTVSS

SEQ ID NO: 19654 - protein, 97 aa, Homo sapiens
VASGFTFGGYSMTWVRQAPGKGLEWVSYISGGSNTIYYADSVKGRFTISRDNAKNSLYLQMNSLRAEDTAVYYCARDSGSAGADDYWGQGTLVTVSS

SEQ ID NO: 19655 - protein, 97 aa, Homo sapiens
AASGFIFSDYSMTWVRQGPGKGLEWVSYISGSSSIIYYTDSVKGRFTISRDNVKNSLYLQMNSLRDEDTAVYYCARDSGSAGADDYWGQGTLVTVSS

SEQ ID NO: 19656 - protein, 96 aa, Homo sapiens
AASGFTFSDYSMTWVRQGPGKGLEWVSYISGSSSIIYYADSVKGRFTISRDNVKNSLYLQMNSLRDEDTAVYYCARDSGSAGADDYWGQGTLVTVS

SEQ ID NO: 19657 - protein, 99 aa, Homo sapiens
AASGFTFSDYYMIWIRQAPGKGLEWVSHITDSSSYTNSADSVKGRFTISRDNAKNSLNLQMNSLRVEDTAVYYCARVGRFPHNYAMDVWGQGTTVTVSS

SEQ ID NO: 19658 - protein, 99 aa, Homo sapiens
AGSGFTFSDYYMIWIRQAPGKGLEWVSYITEDSRHTNSADSVKGRFTISRDNAKASLNLQMNSLRVEDTAVYYCARVGRFPHNYAMDVWGQGTTVIVSS

SEQ ID NO: 19659 - protein, 99 aa, Homo sapiens
AGSGFTFSDYYMIWIRQAPGKGLEWVSYITEDSRNTNSADSVKGRFTISRDNAKASLNLQMNSLRVEDTAVYYCARVGRFPHNYAMDVWGQGTTVIVSS

SEQ ID NO: 19660 - protein, 100 aa, Homo sapiens
SGFSGFTFGDYYMSWIRQTPGKGLEWVSHITDTSSYTRYSDSVKGRFTISRDNVKNALYLQMNRLRAEDTAVYYCARVGRFPHNYAMDVWGQGTTVTVSS

SEQ ID NO: 19661 - protein, 100 aa, Homo sapiens; identical to SEQ ID NO: 19660

SEQ ID NO: 19662 - protein, 103 aa, Homo sapiens
AASGFTFSSYWMSWVRQAPGKGLEWVANIKQDGSEFFSVDSVKGRFTIFRDNAKNSLYLQMSSLRAEDTAVYYCARGDYYDSSGDYHDVFDIWGQGTVVTVSS

SEQ ID NO: 19663 - protein, 103 aa, Homo sapiens; identical to SEQ ID NO: 19662

SEQ ID NO: 19664 - protein, 103 aa, Homo sapiens
AVSGFTFSSYWMSWVRQAPGKGLEWVGNIKPDGSEKYYVDSVKGRFTISRDNAKNSLYLQMNSLRAEDTAVYFCARGDYYDSSGDYHDVFDIWGQGTMVTVSS

SEQ ID NO: 19665 - protein, 103 aa, Homo sapiens
AVSGFTFSSYWMSWVRQAPGKGLEWVGNIKPDGSEKYYVDSVKGRFTISRDNAKNSIYLQMNSLRAEDTAVYFCARGDYYDSSGDYHDVFDIWGQGTMVTVSS

SEQ ID NO: 19666 - protein, 102 aa, Homo sapiens
ASGFTFSSYWMSWVRQAPGKGLEWVANIKQDGSEFFSVDSVKGRFTIFRDNAKNSLYLQMSSLRAEDTAVYYCARGDYYDSSGDYHDVFDIWGQGTVVTVSS

SEQ ID NO: 19667 - protein, 103 aa, Homo sapiens; identical to SEQ ID NO: 19664

SEQ ID NO: 19668 - protein, 99 aa, Homo sapiens
ISGDSVSSNSAAWNWIRQSPSRGLEWLGRTYYRSKWNNDYAVSVKSRITINPDTTENQFSLQLKSVTPEDTAVYYCARAREGGWFFDYWGQGTLVTVSS

SEQ ID NO: 19669 - protein, 99 aa, Homo sapiens
ISGDSVSSSSAAWNWIRQSPSRGLEWLGRTYYRSKWNNDYTISVKSRITINPDTSKNHFSLQLNSVTPEDTAVYYCARAREGGWFFDYWGQGTLVTVSS

SEQ ID NO: 19670 - protein, 98 aa, Homo sapiens
TVSGGSISISNYNWGWIRQPPGKGLEWIGSTYYSGSTHYNPSLKSRVTISADTSKNQFSLKLSSVTAADTAVYYCARHGDYGDYLYYWGRGALVTVSS

SEQ ID NO: 19671 - protein, 98 aa, Homo sapiens
TVSGGSISISNYNWGWIRQPPGKGLEWIGSTYYSGSTHYNPSLKSRVTISADTSKNQFSLKLTSVTAADTAVYYCARHGDYGDYLYYWGRGALVTVSS

SEQ ID NO: 19672 - protein, 98 aa, Homo sapiens
TVSGGSISSSTYSWGWIRQSPGKGLEWIGSAYYSGATYYNPSLKSRVTLSLDTSKNQFSLKLSSVTATDTAVYYCARHGDYGDYLYYWGQGTLVTVSS

SEQ ID NO: 19673 - protein, 98 aa, Homo sapiens
TVSGGSISSSTYNWGWIRQSPGKGLEWIGSAYYSGATFYNPSLKSRVTLSLDTSKNQFSLKLSSVTATDTAVYYCARHGDYGDYLYYWGQGTLVTVSS

SEQ ID NO: 19674 - protein, 98 aa, Homo sapiens
TVSGDSSSSSTYNWGWIRQTPGKGLEWIGSIYSSGSTFYNPSLKSRVTISVDTSNKQFSLRLTSVTAADTAVYYCARHGDYGDYLYYWGQGTLVTVSS

SEQ ID NO: 19675 - protein, 98 aa, Homo sapiens
TVSGGSISTSTYNWGWIRQPPGKGLEWIGSIYYSGSTYYNPSLKSRVTISADTSQNQFSLKLSSVTAADTAVYYCARHGDYGDYLYYWGQGTLVTVSS

SEQ ID NO: 19676 - protein, 98 aa, Homo sapiens
TVSGGSISSSSYNWGWIRQPPGKGLEWIGSIYYSGSTYYNPSLKSRVTISADTSKNQFSLKLSSVTAADTAVYFCARHGDYGDYLYYWGQGTLVTVSS

SEQ ID NO: 19677 - protein, 98 aa, Homo sapiens; identical to SEQ ID NO: 19675

SEQ ID NO: 19678 - protein, 98 aa, Homo sapiens
TVSGGSISSNTYNWGWIRQPPGKGLEWIGSVYYSGSTYYNPSLKSRVTLSIDTSKNQFSLKLRSVTATDTAVYYCARHGDYGDYLYYWGLGTLVTVSS

SEQ ID NO: 19679 - protein, 98 aa, Homo sapiens
SVSGGSISSRTYNWGWIRQPPGKGLEWIGSIYYSGSTHYNPSLKSRVTISADTSKNQFSLKVNSVTAADTAVYYCARHGDYGDYLYYWGQGTLVTVSS

SEQ ID NO: 19680 - protein, 98 aa, Homo sapiens
SVSGGSISSSTYSWGWIRQPPGKGLEWIGSAYYSGATYYNPSLKSRVTLSLDTSKNQFSLKLSSVTATDTAVYYCARHGDYGDYLYYWGQGTLVTVSS

SEQ ID NO: 19681 - protein, 97 aa, Homo sapiens
TVSGGSISISNYNWGWIRQPPGKGLEWIGSAYYSGSTHYNPSLKSRVTISADSSKNQFSLKLSSVTAADTAVYYCARHGDYGDYLYYWGRGALVTVS

SEQ ID NO: 19682 - protein, 98 aa, Homo sapiens
TVSGDSISSSSYNWGWIRQSPGKGLEWIGSIYSSGSTYYNPSLKSRVTISVDTSKRQFSLRLTSVTVADTAVYYCARHGDYGDYLYYWGQGTQVTVSS

SEQ ID NO: 19683 - protein, 98 aa, Homo sapiens
TVSGGSISSRSYNWGWIRQPPGKGLEWIGSVYSSGSTYYNPSLKSRVTISVDTSKTQFSLKLSSVTAADTAVYYCARHGDYGDYLYYWGQGTLVTVSS

SEQ ID NO: 19684 - protein, 98 aa, Homo sapiens
TVSGDSVSSSTYNWGWIRQSPGKGLEWIGSIYSSGSTYYNPSLKSRVIMSVDTSKRQFSLRLTSVTVADTAVYYCARHGDYGDYLYYWGQGTQVTVSS

SEQ ID NO: 19685 - protein, 98 aa, Homo sapiens; identical to SEQ ID NO: 19683

SEQ ID NO: 19686 - protein, 91 aa, Homo sapiens
SGYTFSAYGISWVRQAPGQGLEWMGWISVYTGDIEYAPNFQGRLTITIDKSTTTAHMELTGLVFDDTAIYYCARRGLLDYWGQGTLVTVSS

SEQ ID NO: 19687 - protein, 92 aa, Homo sapiens
ASGYTFTTYDISWVRQAPGQGLEWMGWISAYNGNTKYAQKLQGRVTMTTDTSTTTAYMELRSLRSDDTAVYYCARRGLLDYWGQGTLVTVSS

SEQ ID NO: 19688 - protein, 97 aa, Homo sapiens
AASGFTFSNFWMSWVRQAPGKGLEWVANMNQDGSEKYYVDSVKGRFTISRDNAKNSLYLQMNSLRAEDTAVYYCARDKGGYYPFDYWGQGTLVTVSS

SEQ ID NO: 19689 - protein, 97 aa, Homo sapiens
AASGFTFSTYWMSWVRQAPGRGLEWVANMNQDGSKKDYVGSVKGRFTISRDNAKNSLFLQMNSLRAEDTAVYYCARDKGGYYPFDYWGQGTLVTVSS

SEQ ID NO: 19690 - protein, 99 aa, Homo sapiens
VASGFPFSHYWIHWVRQPPGKGLVWVSRVNSDGSSTTYADSVKGRFTISRDNAKNTLYLQMNSLRVEDTAVYYCARGETTNSWSTFDYWGQGTLVTVSS

SEQ ID NO: 19691 - protein, 99 aa, Homo sapiens
VASGFTFSSYWIHWVRQVPGKGLVWVSRIKSDGSFTTYADSVKGRFTISRDNAKNTLYLQMNSLRVEDTAVYYCARGETTNSWSTFDYWGQGTLVTVSS

SEQ ID NO: 19692 - protein, 99 aa, Homo sapiens
VASGFTFSSYWIHWVRQVPGKGLVWVSRIRSDGSFTTYADSVKGRFTISRDNAKNTLYLQMNSLRVEDTAVYYCARGETTNSWSTFDYWGQGTLVTVSS

SEQ ID NO: 19693 - protein, 99 aa, Homo sapiens; identical to SEQ ID NO: 19691

SEQ ID NO: 19694 - protein, 99 aa, Homo sapiens
AASGFPFNHYWMHWVRQSPGKRPMWISRVNFDGRETAYADSVRGRFTISRDNAENTLFLQMNSLRAEDTGVYYCARGETTNSWSTFDYWGQGTLVNVSS

SEQ ID NO: 19695 - protein, 99 aa, Homo sapiens
AASGFPFNKYWMHWVRQSPGKRPVWISRVNFDGSDTAYADSVRGRFTISRDNAKNTLFLQMNSLRAEDTGVYYCARGETTNSWSTFDYWGQGSLVSVSS

SEQ ID NO: 19696 - protein, 99 aa, Homo sapiens
AASGFPFSSYWIHWVRQTPGKELVWVSRIRGDGRSTTYADSVKGRFTISRDNAKNTVYLQMNSLRAEDTAVYYCARGETTNSWSTFDYWGQGTLVAVSS

SEQ ID NO: 19697 - protein, 99 aa, Homo sapiens
AASGFPFSSYWIHWVRQTPGKELVWVSRIKGDGRSTTYADSVKGRFTISRDNAKNTVYLQMNSLRAEDTAVYYCARGETTNSWSTFDYWGQGTLVAVSS

SEQ ID NO: 19698 - protein, 98 aa, Homo sapiens
ASGFTFSNYWIHWVRQPPGKGLVWVARVKSDGSSTTYADSVKGRFTISRDNAMNTLYLQMNSLRVEDTAVYYCARGETTNSWSTFDYWGQGTLVTVSS

SEQ ID NO: 19699 - protein, 101 aa, Homo sapiens
SGPSGFTLSTYGMNWVRQAPRKGLEWVSTISDDGSYTYYADSVKGRFTISRDNSKNTVYLQMNSLRADDTAVYYCAKDRYCSSIRCPTDYWGQGTLVTVSS

SEQ ID NO: 19700 - protein, 101 aa, Homo sapiens
SGPSGFTLSSYGMNWVRQAPRKGLEWVSTISDDGSYTYYADSVKGRFTISRDNSKNTVYLQMNSLRADDTAVYYCAKDRYCSSIRCPTDYWGQGTLVTVSS

SEQ ID NO: 19701 - protein, 101 aa, Homo sapiens
SGPSGFIFSSYAMNWVRQAPRKGLEWVSTISGDGAYTYYADSVKGRFTISRDNSKNTVYLQMNSLRADDTAVYYCAKDRYCSSIRCPTDYWGQGTLVTVSS

SEQ ID NO: 19702 - protein, 101 aa, Homo sapiens
SGPSGFIFSSYAMNWVRQAPRKGLEWVSTISGDGAYTYYADSAKGRFTISRDNSKNTVYLQMNSLRADDTAVYYCAKDRYCSSIRCPTDYWGQGTLVTVSS

SEQ ID NO: 19703 - protein, 100 aa, Homo sapiens
AASGVSISSYAMNWVRQAPGKGLEWVSAISGSGDSTYYADSVKGRFTISRDNSKNMLYLQMSRLTVDDTAVYYCAKDRYCSSIRCPTDYWGQGTLVTVSS

SEQ ID NO: 19704 - protein, 100 aa, Homo sapiens
AASGVSISSYAMNWVRQAPGKGLEWVSAISGSGDSTYYADSVKGRFTISRDNSKNMLYLQMNSLTVDDTAVYYCAKDRYCSSIRCPTDYWGQGTLVTVSS

SEQ ID NO: 19705 - protein, 101 aa, Homo sapiens
SGPSGFTFSSYGMNWVRQAPRKGLEWVSTISGDGSYTYYADSVKGRFTISRDNSKNTVYLQMNSLRADDTAVYYCAKDRYCSSIRCPTDYWGQGTLVTVSS

SEQ ID NO: 19706 - protein, 101 aa, Homo sapiens; identical to SEQ ID NO: 19701

SEQ ID NO: 19707 - protein, 101 aa, Homo sapiens
SGPSGFIFSSYGMNWVRQAPRKGLEWVSTISGDGAYTYYADSVKGRFTISRDNSKNTVYLQMNSLRADDTAVYYCAKDRYCSSIRCPTDYWGQGTLVTVSS

SEQ ID NO: 19708 - protein, 101 aa, Homo sapiens
SGPSGFTISTYGMNWVRQAPRKGLEWVSTISDDGSYTYYADSVKGRFTISRDNSKNTVYLQMNSLRADDTAVYYCAKDRYCSSIRCPTDYWGQGTLVTVSS

SEQ ID NO: 19709 - protein, 101 aa, Homo sapiens
SGPSGFTFSRYGMNWVRQAPRKGLEWVSTISDDGSYTYYADSVKGRFTISRDNSKNMVYLQMNSLRADDTAVYYCAKDRYCSSIRCPTDYWGQGTLVTVSS

SEQ ID NO: 19710 - protein, 101 aa, Homo sapiens
SGPSGFTFNSYAMNWVRQAPRKGLEWVSTISGDGAYTYYADSVKGRFTISRDNSKNTVYLQMNSLRADDTAVYYCAKDRYCSSIRCPTDYWGQGTLVTVSS

SEQ ID NO: 19711 - protein, 101 aa, Homo sapiens
SGPSGFILSSYAMNWVRQAPRKGLEWVSTISGDGAYTYYADSVKGRFTISRDNSKNTVYLQMNSLRADDTAVYFCAKDRYCSSIRCPTDYWGQGTLVTVSS

SEQ ID NO: 19712 - protein, 101 aa, Homo sapiens
SGPSGFTFSSYGMNWVRQAPRKGLEWVSTISGDGGYTYYADSVKGRFTISRDNSKNTVYLQMNSLRADDTAVYYCAKDRYCSSIRCPTDYWGQGTLVTVSS

SEQ ID NO: 19713 - protein, 93 aa, Homo sapiens
AASGFTFNSYWMSWVRQAPGKGLEWVANMKQDGSETHYVDSVKGRFTISRDNAKNSLYLQMNSLRAEDTAVYYCARMASLDYWGQGALVTVSS

SEQ ID NO: 19714 - protein, 93 aa, Homo sapiens
AASGFTLRSYWMSWVRQAPGKGLEWVANIKHDGSEKYYVDSVKGRFTISRDNAENSLSLQMNSLRVEDTAVYYCARMASLDYWGRGTLVTVSS

SEQ ID NO: 19715 - protein, 93 aa, Homo sapiens; identical to SEQ ID NO: 19714

SEQ ID NO: 19716 - protein, 100 aa, Homo sapiens
AASGLTFSSYAMSWVRQAPGKGLEWVSTISVSGDRTFHADFAKGRFTISRDNSKNTLYMQMNSLRAEDTAVYYCAKDGDDNRPPDAYDIWGQGTVVTVSS

SEQ ID NO: 19717 - protein, 100 aa, Homo sapiens
AASGFTFSTYAMTWVRQAPGKGLEWVSTIIDSGARTQYADSVRGRFTISRDNSKNTLYLQMNSLRAEDTAVYYCAKDGDDNRPPDAYDIWGQGTMVTVSS

SEQ ID NO: 19718 - protein, 100 aa, Homo sapiens
EASGFTLSSYAMSWVRQAPGKGLEWVSTISDSGSRTWYADSLKGRVTISRDNSKNTVYLEMNSLRAEDTAVYYCAKDGDDNRPPDAYDIWGQGTMVTVSS

SEQ ID NO: 19719 - protein, 95 aa, Homo sapiens
AASEFSFSNYWMGWVRQAPGKGLEWMANIHQGGSQKYYADSVKGRFTISRDNAKHSLYLQMNSLRAEDTAVYYCVRWGVSYGMDVWGQGTTVTVS

SEQ ID NO: 19720 - protein, 95 aa, Homo sapiens
AASEFSFSNYWMGWVRQAPGKGLEWMANIHQGGSQKYYADSVKGRFTISRDNAKHSLYLQMNSLRAEDTAVYYCVRWGVSYGMDVWDQGTTVTVS

SEQ ID NO: 19721 - protein, 96 aa, Homo sapiens
AASEFSLSGYWMAWVRQAPGKGLEWVAIIKQLGSERYYVDSVKGRFAISGDNTKNSLYLQMNSLRAEDTAMYYCVRWGVSYGMDVWGQGTTVTVAS

SEQ ID NO: 19722 - protein, 96 aa, Homo sapiens
AASGFSLSGYWMAWVRQAPGKGLEWVAIINQDGSEKYYVDSVKGRFAVSGDNTKNSLYLQMNSLRAEDTAMYYCVRWGVSYGMDVWGQGTTVTVAS

SEQ ID NO: 19723 - protein, 101 aa, Homo sapiens
ATSGFPFSEYSMNWVRQAPGKGLEWISHISAATSNSIYYADSVKGRFTISRDNAKNSLYLQMNSLRDEDTAVYYCATDGVGVVPGDVFDIWGQGTMVTVSS

SEQ ID NO: 19724 - protein, 100 aa, Homo sapiens
AASGFPFITHSMNWVRQAPGKGLEWLSHSVAGNDIIFYADSVKGRFTMSRDNAKNSVFLQMDSLRDEDTALYYCATDGVGVVPGDVFDIWGRGTMVTVSS

SEQ ID NO: 19725 - protein, 95 aa, Homo sapiens
AASGLTFSDYSMQWVRQAPGKGLEWVSYISGGSDTIYYADSVKGRFTISRDNAKNSLYLQMNSLRDEDTAVYYCARGQLRGFDYWGQGTLVTVSS

SEQ ID NO: 19726 - protein, 95 aa, Homo sapiens
AASGFTFSAYAMHWVRQAPGKGLEWVSFINSVGNSVYYADSVRGRFSISRDNAKNSLYLQMNSLRDEDTAVYFCARGQLRGFDYWGQGALVTVSS

SEQ ID NO: 19727 - protein, 92 aa, Homo sapiens
AASGFSLSSHDMSWVRQAPGKGLEWVSYISGSGTGIYYAESVKGRFTIFRDNSKNSLYLQMNSLRDEDTAVYYCARGHMDVWGQGTTVTVSS

SEQ ID NO: 19728 - protein, 91 aa, Homo sapiens
AASGFTLSSHDMSWVRQAPGKRLEWVAYISRSSSTYYADSVKGRFTISRDNGKNSLHLQMISLRDDDTAVYFCARGHMDVWGTGTTVTVSS

SEQ ID NO: 19729 - protein, 91 aa, Homo sapiens
AASGFTLSSHDMSWVRQAPGKRLEWVAYISGGSSTYYADSVKGRFTISRDNGKNSLHLQMISLRDDDTAVYFCARGHMDVWGTGTTVTVSS

SEQ ID NO: 19730 - protein, 91 aa, Homo sapiens
AASGFTLSSHDMSWVRQAPGKRLEWVAYISRSGSTYYADSVKGRFTISRDNGINSLHLQMISLRDDDTAVYFCARGHMDVWGTGTTVTVSS

SEQ ID NO: 19731 - protein, 93 aa, Homo sapiens
TVSGDSITSSYWSWIRQPPGKGLEYLGYIYYTGITNYNPSLKSRVSMSIDASRNQVSLDLSSVTAADTAVYYCAKTARVPVYWGQGTLVTVSS

SEQ ID NO: 19732 - protein, 93 aa, Homo sapiens
TVSGDSFTTSYWSWIRQLPGGGLESIGYIHHSGITNYNPSLWGRATISMDMSKGQFSLKLSSVTAADTAVYYCAKTARVPVYWGQGALVIVSS

SEQ ID NO: 19733 - protein, 101 aa, Homo sapiens
SGPSGFTLSTYGMNWVRQAPRKGLEWVSTISADGSYTYYADSVKGRFTISRDNSKNTVYLQMNSLRADDTAIYYCAKDRYCTSIRCPTDYWGQGTLVTVSS

SEQ ID NO: 19734 - protein, 101 aa, Homo sapiens
SGPSGFTISTYGMNWVRQAPRKGLEWVSTISSDGSYTYYADSVKGRFTISRDNSKNTVYLQMNSLRADDTAIYYCAKDRYCTSIRCPTDYWGQGTLVTVSS

SEQ ID NO: 19735 - protein, 101 aa, Homo sapiens
SGPSGFTISTYGMNWVRQAPRKGLEWVSTISADGSHTYYADSVKGRFTISRDNSKNTVYLQMNSLRADDTAVYYCAKDRYCTSIRCPTDYWGQGTLVTVSS

SEQ ID NO: 19736 - protein, 100 aa, Homo sapiens
VASGVALSSYAMNWVRLAPGKGLEWVSSISDSGGSTYYADSVKGRFTISRDNSKNTLYLQMNSLRAEDTAIYYCAKDRYCTSIRCPTDYWGQGTLVTVSS

SEQ ID NO: 19737 - protein, 101 aa, Homo sapiens
SGPSGFTLSTYGMNWVRQAPRKGLEWVSTISADGSYTYYADSVKGRFTISRDNSKNTVYLQMNSLRADDTAVYYCAKDRYCTSIRCPTDYWGQGTLVTVSS

SEQ ID NO: 19738 - protein, 97 aa, Homo sapiens
AASGFTFSSYSMTWVRRAPGKGLEWLSYITSSSSVIYYADSVKGRFTISRDNAKNSLYLQMNSLRDEDTAIYYCARDSGTAGADDYWGQGTLVTVSS

SEQ ID NO: 19739 - protein, 97 aa, Homo sapiens
VTSGFTFSAHPMTWVRQAPGKGLEWVSYISGGSEIIYYRDSVKGRFTISRDNAKNSLYLQMSNVRVEDTAVYYCARDSGTAGADDYWGQGTLVTVSS

SEQ ID NO: 19740 - protein, 97 aa, Homo sapiens
AASGFTFSAYAMTWVRQAPGKGLEWISYISRTSTIIYYADSMKGRFTISRDDAGNSLYLQMNSLRVEDTGIYFCARDSGTAGADDYWSQGTLVTVSS

SEQ ID NO: 19741 - protein, 95 aa, Homo sapiens
AASGFTFSDYSMNWVRQAPGKGLEWISYIGTSTSTTYFADSVKGRFTITRDNAKNSLYVQMNSLRDEDTAVYYCVRDHYWSFDYWGQGTLVTVSS

SEQ ID NO: 19742 - protein, 95 aa, Homo sapiens; identical to SEQ ID NO: 19741

SEQ ID NO: 19743 - protein, 95 aa, Homo sapiens
AASGFTFRSYSMNWVRQAPGKGLEWISYIRGGGSPIYFADSVRGRFTISRDDARNSLYLQMSSLREEDTAVYYCVRDHYWSFDYWGQGALVSVSS

SEQ ID NO: 19744 - protein, 92 aa, Homo sapiens
TVSGGSISSGSFFWSWVRQPAGKGLEWIGRILTSGSTTYNPSLKSRVTISLDTSKNQFSLRLSSVTAADTAVYYCARNPIYWGQGTLVSVSS

SEQ ID NO: 19745 - protein, 92 aa, Homo sapiens
TVSGDSISSGSYFWSWVRQPAGKGLEWIGRIHTSGSTTYNPSLKSRVSISMDTSKNHFSLRLNSVTAADTAVYYCARNPIYWGQGTLVTVSS

SEQ ID NO: 19746 - protein, 92 aa, Homo sapiens
TVSGDSMTSGTYFWGWIRQPAGKGLEWIGRIHSSGSTTYNPSLKGRVTISLDTSKKQFSLNLNSVTAADTAVYYCARNPIYWGQGALVTVSS

SEQ ID NO: 19747 - protein, 92 aa, Homo sapiens
TVSGDSMTRGTYFWGWIRQPAGKGLEWIGRIHSSGFTTYNPSLKGRVTISLDTSKKQFSLNLNSVTAADTAVYYCARNPIYWGQGARVTVSS

SEQ ID NO: 19748 - protein, 92 aa, Homo sapiens
TVSGASISSGSFFWSWVRQPAGKGLEWIGRIITSGSTTYNPSFKSRVAISIDTSKNQFSLRLNSVTDADTAVYYCARNPIYWGQGTLVTISS

SEQ ID NO: 19749 - protein, 95 aa, Homo sapiens
VASGFTFSNHYMSWVRQAPGKGLEWVANIKGDGGDKGYVDSVKGRFTISRDNAKNSLYLQMNSLRVEDTAVYYCLRGGGWYPDYWGQGTLVTVSS

SEQ ID NO: 19750 - protein, 95 aa, Homo sapiens
AASGFTFVTSWMSWVRQAPGKGLEWVANIKGDGSETAYVDSVKGRFTVSRDNAKDSLYLQMNSLRVEDTAVYYCLRGGGWYPDYWGQGTLVTVSS

SEQ ID NO: 19751 - protein, 95 aa, Homo sapiens
AASGFTFSKFWMSWVRQAPGKGLEWVANIKEDGSEKAYMDSMKGRFTVSRDNAKDALYLQMNSLRVEDTAVYYCLRGGGWYPDYWGQGTLVTVSS

SEQ ID NO: 19752 - protein, 95 aa, Homo sapiens; identical to SEQ ID NO: 19751

SEQ ID NO: 19753 - protein, 95 aa, Homo sapiens
ASGYTFSSYNMHWVRQAPGQGLEWMGIINPSGTTTGYAQSFQGRVTMTSDASTGTVYMELSSLRSEDTAVYFCARDSTHWSSDYWGQGTLVTVSS

SEQ ID NO: 19754 - protein, 95 aa, Homo sapiens
ASGYIFTSYKMHWVRQAPGQGLEWMAIINPSDGVTRYAQNFQGRVTMTRDTSTSTVYMELSSLRSEDTAVYYCARDSTHWSSDYWGQGTLVTVSS

SEQ ID NO: 19755 - protein, 94 aa, Homo sapiens
KGSGYSFATYWIAWVRQMPGKGLEWMGIIYPGDSDTRYSPSFQGQVTISADKSISTAYLQWSSLKASDTAMYYCARKSAGMDVWGQGTTVTVSS

SEQ ID NO: 19756 - protein, 94 aa, Homo sapiens
KGSGYSFTNYWIGWVRQMPGKGLEWMGIIYPGDSDTTYSPSFQGQVTISADKSINTAYLQWSSLKASDTAMYFCARKSAGMDVWGQGTTVTVSS

SEQ ID NO: 19757 - protein, 96 aa, Homo sapiens
AASGFTFKDYYVTWIRQSPGKGLEWLSYISGSGDIIHYADSVKGRFTVSRDNGKDLLFLQMNSLRAEDTAVYYCARDPYYYSSDPWGQGTLVTVSS

SEQ ID NO: 19758 - protein, 95 aa, Homo sapiens
TSGFTFSAFYMTWIRQAPGKGLEWISYISETGDTIHYADSVRGRFTVSRDNARNSLFLQMNSLRAEDTAIYYCARDPYYYSSDPWGQGALVTVSS

SEQ ID NO: 19759 - protein, 96 aa, Homo sapiens
AASGFTFTDYYMTWLRQAPGKGLEWVSKISGSGSTIYYADSVKGRFTISRDNGKDSVYLQMNSLRAEDTAMYYCARDPYYYSSDPWGQGTLVTVSS

SEQ ID NO: 19760 - protein, 95 aa, Homo sapiens
TSGFTFTAFYMTWIRQAPGKGLEWISYISETGDTIHYADSVRGRFTVSRDNARNSLFLQMNSLRAEDTAIYYCARDPYYYSSDPWGQGALVTVSS

SEQ ID NO: 19761 - protein, 96 aa, Homo sapiens
AASGFIFSDSYMTWYRQAPGKGLEWISYISGSGTTIHYADSVRGRFTVSRDNAKNSVFLQMNSLRAEDTAVYYCARDPYYYSSDPWGQGTLVTVSS

SEQ ID NO: 19762 - protein, 99 aa, Homo sapiens
AASGFTFTSHAIHWVRQAPGKGLEWVAQVWADDRNQYYADAVKGRFTFSRDNSKNTLYVQMNGLRVDDTAVYYCARDGQGGAPYAMDVWGQGTTVTVSS

SEQ ID NO: 19763 - protein, 99 aa, Homo sapiens
AASGFTFTSHAIHWVRQAPGKGLEWVAQVWPNGINQYYADSVKGRFTFFRDNSKNTLYVQMNGLRVDDTAVYYCARDGQGGAPYAMDVWGQGTTVTVTS

SEQ ID NO: 19764 - protein, 99 aa, Homo sapiens
AASGFIFSRHAMHWVRQAPGKGLEWVVQVWADGSTRYYADSVKGRFTSSRDESKTTLNLQMNSLRAEDTAVYYCARDGQGGAPYAMDVWGQGTTVTVSS

SEQ ID NO: 19765 - protein, 99 aa, Homo sapiens
ETSGFAFSGHAMHWVRQAPGKGLEWVTQIWPDDINKYYADSVKGRFTASRDNSKTTVYLQMDSLRVEDTAVYYCARDGQGGAPYAMDVWGQGTTVTVSS

SEQ ID NO: 19766 - protein, 99 aa, Homo sapiens
AASGFIFSRHAMHWVRQAPGKGLEWVVQVWADGSTRYYADSVKGRFTSSRDESKTTLNLQMNSLRTEDTAVYYCARDGQGGAPYAMDVWGQGTTVTVSS

SEQ ID NO: 19767 - protein, 99 aa, Homo sapiens; identical to SEQ ID NO: 19764

SEQ ID NO: 19768 - protein, 99 aa, Homo sapiens
AASGFSFSEHAIHWVRQAPGKGLEWVVQVWSDGSTRYYADSVKGRFTSSRDESRATVNLQMNSLRVDDTAVYYCARDGQGGAPYAMDVWGQGTTVTVSS

SEQ ID NO: 19769 - protein, 98 aa, Homo sapiens
ASGFSFSEHAIHWVRQAPGKGLEWVVQVWSDGSTRYYADSVKGRFTSSRDESRATVNLQMNSLRVDDTAVYYCARDGQGGAPYAMDVWGQGTTVTVSS

SEQ ID NO: 19770 - protein, 94 aa, Homo sapiens
AASGFTFSNYWMHWVRQAPGKGLLWVARINPDGSSTYYADSVKGRFTISRDNSKNTLYLQMNSLRAEDTAVYYCTSDPNWVDYWGQGTLVTVSS

SEQ ID NO: 19771 - protein, 93 aa, Homo sapiens
ASGFTFSSYQMYWVRQPPGKGLVYVSNISPDGSRTTYADSVKGRFTISRDNAKSTLYLQMNSLRAEDTAVYYCTSDPNWVDYWGQGTLVTVSS

SEQ ID NO: 19772 - protein, 94 aa, Homo sapiens
VGSGFTFSSYLMYWVRQAPGKGLVWVSSIYTDGSRTSYADSVKGRFTISRDNAKSTLYLQMNSLRAEDTAVYYCTSDPNWVDYWGQGTLVTVSS

SEQ ID NO: 19773 - protein, 93 aa, Homo sapiens
ASGFTFSGYQMYWVRQSPGKGLLYVSNISPDGSRTTYADSVKGRFTISRDNAKSTLYLQMKSLRVEDTAVYYCTSDPNWVDYWGQGTLVTVSS

SEQ ID NO: 19774 - protein, 94 aa, Homo sapiens
VGSGFTFSSYLMYWVRQPPGKGLVWVSSIYTDGSRTSYADSVKGRFTISRDNAKSTLYLQMNSLRAEDTAVYYCTSDPNWVDYWGQGTLVTVSS

SEQ ID NO: 19775 - protein, 94 aa, Homo sapiens; identical to SEQ ID NO: 19774

SEQ ID NO: 19776 - protein, 94 aa, Homo sapiens; identical to SEQ ID NO: 19772

SEQ ID NO: 19777 - protein, 94 aa, Homo sapiens
AASGFTFSSYLMYWVRQAPGKGLVWVSSIYTDGSRTSYADSVKGRFTISRDNAKSTLYLQMNSLRAEDTAVYYCTSDPNWVDYWGQGTLVTVSS

SEQ ID NO: 19778 - protein, 94 aa, Homo sapiens
VASGFTFSSYLMYWVRQAPGKGLVWVSSIYTDGSRTSYADSVKGRFTISRDNAKSTLYLQMNSLRAEDTAVYYCTSDPNWVDYWGQGTLVTVSS

SEQ ID NO: 19779 - protein, 94 aa, Homo sapiens
AASGFTFTNYWMHWVRQAPGEGLLWVARINKDGSATYYADSVKGRFTISRDNAKNTLYLQMNSLTAEDTAVYYCTSDPNWVDYWGQGALVTVSS

SEQ ID NO: 19780 - protein, 90 aa, Homo sapiens
VSEFIFTTHWVDWVRQVPGKGLVWVSRIKSDGSDILYADSVKGRFTISRDNAENRFYLQMNSLRDEDTALYYCMINPGYWGQGTLVTVSS

SEQ ID NO: 19781 - protein, 90 aa, Homo sapiens
VSEFIFSTHWVDWVRQVPGKGLVWVSRIKSDGSSILYADSVKGRFTISRDNAENRFYLQMNSLRDEDTALYYCMINPGYWGQGTLVTVSS

SEQ ID NO: 19782 - protein, 91 aa, Homo sapiens
AVSEFMFSTHWVDWVRQVPGKGLVWVSRIKSDGSEILQADSVKGRFSISRDNAGNRFYLQMNSLRDEDTALYYCMINPGYWGQGTLVTVSS

SEQ ID NO: 19783 - protein, 91 aa, Homo sapiens
AASRLTFSSHWMFWVRQTPGKGLVWVSRILSDGTSMTYVDSVKGRFTVSRDNVKNIMYLQMNSLRAEDTAVYYCMINPGYWGQGTQVTVSS

SEQ ID NO: 19784 - protein, 90 aa, Homo sapiens
VSEFIFSTHWVDWVRQVPGKGLVWVSRIKSDGSETLYADSVKGRFTISRDYAENRFYLQMNSLRDEDTGLYYCMINPGYWGQGTLVTVSS

SEQ ID NO: 19785 - protein, 99 aa, Homo sapiens
AASGFRFVGYVMSWVRQAPGKGLEWVSGLSRSGDRTYYADSVKGRFTVSRDNSKNTLYLQMNSLGAGDTALYFCVKDRDDHGDFLFDSWGQGTLVTVSS

SEQ ID NO: 19786 - protein, 98 aa, Homo sapiens
ASGFIFSNYVMSWVRQAPGKGLEWVSGIWRTGHPTYYADSVEGRFTISRDNSKNTLYLQMHSLRADDTALYYCVKDRDDHGDFLFDSWGQGILVTVSS

SEQ ID NO: 19787 - protein, 99 aa, Homo sapiens
AASGFRFVGYVMSWVRQAPGKGLEWVSGLSRSGDRTYYADSVKGRFTVSRDNSRNTLYLQMNSLGAGDTALYFCVKDRDDHGDFLFDSWGQGTLVTVSS

SEQ ID NO: 19788 - protein, 95 aa, Homo sapiens
AASGFSFSSYTMSWVRQAPGKGLEWVARMKEDGNDIYYVDSVRGRFTISRDNAKNSVYLQMNSLRAEDTAVYYCARGGYHYFDYWGQGTLVTVSS

SEQ ID NO: 19789 - protein, 95 aa, Homo sapiens
AASGFRFSTYWMSWVRQAPGKGLEWVANIKEDGGEKYYVDSVKGRFTISRDNAKNSLYLQMNSLRAEDTAVYYCARGGYHYFDYWAQGTLVTVSS

SEQ ID NO: 19790 - protein, 96 aa, Homo sapiens
ASGYTFTSHSLNWVRQAPGQGLEWMGLINTNTGNPTYAQGFTGRFVFSLDTSVNTAYLQISSLKTEDTAVYYCARGSGDGYNSDYWGQGALVTISS

SEQ ID NO: 19791 - protein, 96 aa, Homo sapiens
ASGGTFSSYAISWVRQAPGQGLEWMGGINTDTGNSTYAQGFTGRFVFSLDTSVNTAYMQITSLKAEDSAIFYCARGSGDGYNSDYWGQGTLVTVSS

SEQ ID NO: 19792 - protein, 96 aa, Homo sapiens
ASGYSFTDYSMNWVRQAPGQGLEWMGVINTDTGNSTYAQGFTGRFVFSLDTSVNTAYMQITSLKAEDSAIFYCARGSGDGYNSDYWGQGTLVTVSS

SEQ ID NO: 19793 - protein, 96 aa, Homo sapiens; identical to SEQ ID NO: 19792

SEQ ID NO: 19794 - protein, 96 aa, Homo sapiens
ASGYRFTDYAMNWVRQAPGQGLEWMGLINTNSGNSTYAPDFTGRFVFSFDTSVSMAHLQISSLKPEDTAVYFCARGSGDGYNSDYWGQGTLVTVSS

SEQ ID NO: 19795 - protein, 96 aa, Homo sapiens
ASGYSFTEYAMNWVRQAPGQGLEWVGLINTNNGDSTYAPDFTGRFVFSFDTSVTMAYLQISSLKAEDTAVYFCARGSGDGYNSDYWGQGTLVTVSS

SEQ ID NO: 19796 - protein, 96 aa, Homo sapiens; identical to SEQ ID NO: 19795

SEQ ID NO: 19797 - protein, 96 aa, Homo sapiens; identical to SEQ ID NO: 19792

SEQ ID NO: 19798 - protein, 96 aa, Homo sapiens; identical to SEQ ID NO: 19792

SEQ ID NO: 19799 - protein, 95 aa, Homo sapiens
ATSGFIFSNYYMAWVRQAPGKGLEWVANIRQDESNKNYVGSVKGRFTVSRDNAKNSLYLQMNSLRDEDTALYFCARDVGGTLDYWGQGTLVTVSS

SEQ ID NO: 19800 - protein, 95 aa, Homo sapiens
AASGFTLGRYWMAWVRQAPGKGLEWVANVRADEGDKGYADSVEGRFTISRDNAKGSVYLQMNSLRADDTAVYYCARDVGGTLDYWGQGTLVTVSS

SEQ ID NO: 19801 - protein, 95 aa, Homo sapiens
AASGFTFSRYWMAWVRQAPGKGLEWVANIRSDEGDKGYADSVRGRFTITRDNAKGSVYLQMNSLRVEDTAVYYCARDVGGTLDYWGQGSLVTVSS

SEQ ID NO: 19802 - protein, 95 aa, Homo sapiens; identical to SEQ ID NO: 19800

SEQ ID NO: 19803 - protein, 97 aa, Homo sapiens
AASGFTFSSYDFHWVRQTTGKGLEWVSGISTNGDTYYPGSVKGRFTMSRENAKNSLYLQMNTLTAGDTALYYCARAGWFGESGMDVWGQGTSVTVSS

SEQ ID NO: 19804 - protein, 97 aa, Homo sapiens
AASGFIFRGYDFHWVRQPTGGRLEWVSGISTNGDTYYPESVKGRFTMSRENAKNSFYLQMNSLTVGDTAVYYCARAGWFGESGMDVWGHGTTVTVSS

SEQ ID NO: 19805 - protein, 96 aa, Homo sapiens
ASGFIFSGYDMHWVRQPTGRGLEWVAAISTAGDTYYPNSVKGRFIISRENAKSSFYLQMNSLTVGDTAVYYCARAGWFGESGMDVWGQGTTVTVSS

SEQ ID NO: 19806 - protein, 99 aa, Homo sapiens
TGSGDSISSNRHWWGWIRQPPGKGLEWIGSIYNDGSTYYSPSLKSRVTIAVDTSKKQFSLKLSSVTAADTAVYYCARQLGRGLWAFDIWGQGTMVTVSS

SEQ ID NO: 19807 - protein, 99 aa, Homo sapiens
IVSGGPISSDDYWWAWIRQAPGTGLEWIGSIFYTGGTHYNSSLKSRASISVDTSKDQFSLKLYSLTAADTAVYSCARQLGRGLWAFDIWGQGTMVTVSS

SEQ ID NO: 19808 - protein, 96 aa, Homo sapiens
AASGFTFSTYWMDWVRQAPGKGLEWVANIKEDGTTENYVDSVKGRFTISRDNAKNLLYLQMNSLSAEDTAVYYCARNRGWQQFDNWGQGALVTVSS

SEQ ID NO: 19809 - protein, 96 aa, Homo sapiens
GASGFTFSSHWMDWVRQAPGKGLEWVANINEDGSVKYYADSVKGRFTISRDNAKNSLFLQMSNLRDEDTAVYYCARNRGWQQFDNWGQGTLVSVSS

SEQ ID NO: 19810 - protein, 96 aa, Homo sapiens; identical to SEQ ID NO: 19808

SEQ ID NO: 19811 - protein, 96 aa, Homo sapiens
AASGFTFSTYWMDWVRQAPGKGLEGVANIKEDGTTENYVDSVKGRFTISRDNAKNLLYLQMNSLSAEDTAVYYCARNRGWQQFDNWGQGALVTVSS

SEQ ID NO: 19812 - protein, 101 aa, Homo sapiens
AVSGFTFNNYAMSWVRQAPGKGLEWVSSIDGSGDGTYYVDSVKGRFTISRDNSKNTLYLQMTSLRAEDTAVYYCAKNRGYCSGGTCYSDYWGQGTLVTVSS

SEQ ID NO: 19813 - protein, 101 aa, Homo sapiens
VASGFTFSNYAMSWVRQAQGKGLEWVSSISGGAGTTYYADSLNGRFTISRDNSKNTLYLQMNSLRAEDTAVYYCAKNRGYCSGGTCYSDYWGQGTLVTVSS

SEQ ID NO: 19814 - protein, 94 aa, Homo sapiens
VASEFAFTSYWMTWVRQAPGKGLEWVASIKEDGIEKHYADSVKGRFTVSRDNRKDSLYLLLDSLRAEDTAVYYCARGGWTFGLWGRDTLVIVSS

SEQ ID NO: 19815 - protein, 94 aa, Homo sapiens
AGSGFTFRSYWMSWVRQAPGKGLEWVANIKEDGSEKHYGDSVKGRFTISRDNAEDSLFLQMNSLRAEDTAVYYCARGGWTFGLWGRGTLVTVSS

SEQ ID NO: 19816 - protein, 99 aa, Homo sapiens
AASGFTFGRYGLIWVRQAPGRGLEWISYISSTSGTIYYADSVKGRFTISRDDARNSLYLQMNSLRDEDTAVYYCARANQPTPIYYFDYWGQGTLVTVSS

SEQ ID NO: 19817 - protein, 99 aa, Homo sapiens
AASGFTFGRYGLIWVRQAPGRGLEWISYISSASSTIYYAGSVKGRFTISRDDARNSLSLQMNSLRDEDTAVYYCARANQPTPIYYFDYWGQGALVTVSS

SEQ ID NO: 19818 - protein, 99 aa, Homo sapiens
AASGFSFSSYSMNWVRQAPGKGLEWLSYIDMGSETIYYADSVKGRFTISRDNAKNSLYLQMNSLRDEDTAVYYCARANQPTPIYYFDYWGQGTLVTVSS

SEQ ID NO: 19819 - protein, 94 aa, Homo sapiens
AASGFTFRTYTMNWVRQAPGKGLEWVSSISTTGTYIYYADSVRGRFTISRDNTKNSLYLQLDSLRAEDTALYYCARDSSWYDSWGPGTPVTVSS

SEQ ID NO: 19820 - protein, 94 aa, Homo sapiens
VASGFTFSSYSMNWVRQAPGKGLEWVSSISSSSSYIYYADSVKGRFTISRDNAKNSLYLQMNSLRAEDTAVYYCARDSSWYDSWGQGTLVTVSS

SEQ ID NO: 19821 - protein, 94 aa, Homo sapiens
AASGFTFSSYSMNWVRQAPGKGLEWVSSISSTGSYKYYADSVRGRFTISRDNTKNSLYLQLDSLRAEDTALYYCARDSSWYDSWGPGTPVTVSS

SEQ ID NO: 19822 - protein, 93 aa, Homo sapiens
AASGFTFSSYSMNWVRQAPGKGLEWVSYISSSSTIYYADSVKGRFTISRDKAMRSMYLQMNSLRDEDTAVYYCARGGAWFDPWGQGTLVTVSS

SEQ ID NO: 19823 - protein, 94 aa, Homo sapiens
AASGFSFSDYEMNWVRQAAGKGLEWVSYINSGGDIIYYEDSVKGRFTISRDNAKNSLYLQMDRLRDEDTAVYFCARGGAWFDPWGQGTPVTVSS

SEQ ID NO: 19824 - protein, 96 aa, Homo sapiens
AASGFSVSRSYMNWVRQAPGKGLQWVSIIYSGGTTYYADSVKGRFTISRDNSENRLYLQMNNLRAEDTAVYYCARGGSGDLDFDYWGQGTLVTVSS

SEQ ID NO: 19825 - protein, 96 aa, Homo sapiens
AASGFSVSSSYMSWVRQAPGRGLQWVSIIYSGGSTFYADSVKGRFTISRDNSENRLYLQMSNLRAEDTAVYYCARGGSGDLDFDYWGQGTLVTVSS

SEQ ID NO: 19826 - protein, 96 aa, Homo sapiens
AVSGFTVNSNYMSWVRQAPGKGLEWVSIIYSGGRTYYADSVRGRFTISRDNSKNTLYLLMNILRAEDTAVYYCARGGSGDLDFDYWGQGTLVTVSS

SEQ ID NO: 19827 - protein, 96 aa, Homo sapiens; identical to SEQ ID NO: 19826

SEQ ID NO: 19828 - protein, 96 aa, Homo sapiens
VASGFTVNSNYMSWVRQAPGKGLEWVSIIYSGGSTYYADSVKGRFTISRDNSKNTLYLLMNTLRAEDTAVYYCARGGSGDLDFDYWGQGTLVTVSS

SEQ ID NO: 19829 - protein, 96 aa, Homo sapiens
AASGFTVKTNYMSWVRQAPGKGLEWVSTIYSGDSTYYADSVKGRFTISRDNSQNTISLQMNSLRAEDTAVYYCARGGSGDLDFDYWGQGTLVTVSS

SEQ ID NO: 19830 - protein, 96 aa, Homo sapiens
AASGFSVSSSYMSWVRQAPGRGLQWVSIIYSGGSRFYADSVKGRFTISRDNSENRLYLQMSNLRAEDTAVYYCARGGSGDLDFDYWGQGTLVTVSS

SEQ ID NO: 19831 - protein, 96 aa, Homo sapiens
AASGFSVSSSYMSWVRQAPGKGLQWVSIIYSGGSTYYADSVKGRFTISRDNSENRLYLQMNNLRAEDTAVYYCARGGSGDLDFDYWGQGTLVTVSS

SEQ ID NO: 19832 - protein, 90 aa, Homo sapiens
AASGLTFSSYSMNWVRQAPGKGLEWLSYISSSSDTVFYADSVKGRFTISRDNAKNSLYLQMNSLRDDDTAVYFCARVPHWGQGTLVTVSS

SEQ ID NO: 19833 - protein, 90 aa, Homo sapiens
AASGFTFSSYEMNWVRQAPGKGLEWVSYISGSGTTIYYADSVKGRFTISRDNAKNSLYLQMNSLRAEDTAVYYCARVPHWGQGTLVTVSS

SEQ ID NO: 19834 - protein, 96 aa, Homo sapiens
AVYGGSFSGYYWSWIRQPPGKGLEWIGEITESGDTYYSPSLKSRITISVDSSKNQFSLKLTSVTAADTAVYYCARGRDAYKCGNYWGQGTLVTVSS

SEQ ID NO: 19835 - protein, 96 aa, Homo sapiens
AVYGGSFSGYYWSWIRQPPGKGLEWIGEINPSGSTNYNPSLKSRVTISVDTSKNQFSLKLSSVTAADTAVYYCARGRDAYKCGNYWGQGTLVTVSS

SEQ ID NO: 19836 - protein, 98 aa, Homo sapiens
AASGFTFSNYWMHWVRQAPGKGLVWVSRIDTDGSSTSYADSVKGRFTISRDNAKNTLFLQMNSLRAEDTAVYYCVKLIAAAGQDIAYWGQGTLVTVSS

SEQ ID NO: 19837 - protein, 98 aa, Homo sapiens
AASGFTFSNYWMHWVRQAPGKGLVWVSRIDTDGSSTSYADSVKGRFTISRDNAENTLILQMNSLRAEDTAVYYCVKLIAAAGQDIAYWGQGTLVTVSS

SEQ ID NO: 19838 - protein, 98 aa, Homo sapiens
AASGFTFSNYWMHWVRQAPGKGLVWVSRIDTDGSSTSYADSVQGRFTISRDNAENTLFLQMNSLRAEDTAVYYCVKLIAAAGQDIAYWGQGTLVTVSS

SEQ ID NO: 19839 - protein, 98 aa, Homo sapiens
AASGFTFSNYWMHWVRQAPGKGLVWVSRIDTDGSSTSYADFVKGRFTISRDNAENTLFLQMNSLRAEDTAVYYCVKLIAAAGQDIAYWGQGTLVTVSS

SEQ ID NO: 19840 - protein, 101 aa, Homo sapiens
AASGFTFAMYAMTWVRQAPGKGPEWVSVIYSRGGTTYYADSVKGRFTISRDNSYNMLYLQMNNLRAEDTAVYYCAKDHSQNGYDWGAFDHWGQGTVVTVSS

SEQ ID NO: 19841 - protein, 101 aa, Homo sapiens
AASGFTFAMYAMTWVRQAPGKGPEWVSVIYNRGGTTYYADSVKGRFTISRDNSYNMLYLQMNNLRAEDTAVYYCAKDHSQNGYDWGAFDHWGQGTVVTVSS

SEQ ID NO: 19842 - protein, 101 aa, Homo sapiens; identical to SEQ ID NO: 19840

SEQ ID NO: 19843 - protein, 101 aa, Homo sapiens
AASGFTFAMYAMTWVRQAPGKGPEWVSVIYSRGGTTYYGDSVKGRFTVSRDNSYNMLYLQMNNLRAEDTAVYYCAKDHSQNGYDWGAFDHWGQGTVVTVSS

SEQ ID NO: 19844 - protein, 101 aa, Homo sapiens; identical to SEQ ID NO: 19841

SEQ ID NO: 19845 - protein, 101 aa, Homo sapiens
AASGFTFGMYAMTWVRQAPGKGPEWVSVIYSRGGTTYYADSVKGRFTISRDNSYNMLYLQMNNLRAEDTAVYYCAKDHSQNGYDWGAFDHWGQGTVVTVSS

SEQ ID NO: 19846 - protein, 101 aa, Homo sapiens; identical to SEQ ID NO: 19841

SEQ ID NO: 19847 - protein, 101 aa, Homo sapiens; identical to SEQ ID NO: 19845

SEQ ID NO: 19848 - protein, 101 aa, Homo sapiens; identical to SEQ ID NO: 19840

SEQ ID NO: 19849 - protein, 101 aa, Homo sapiens; identical to SEQ ID NO: 19841

SEQ ID NO: 19850 - protein, 101 aa, Homo sapiens; identical to SEQ ID NO: 19840

SEQ ID NO: 19851 - protein, 101 aa, Homo sapiens
AASGFTFGLYAMTWVRQAPGKGPEWVSVIYSRGGTTYYVDSVKGRFTISRDNSYNMLYLQMNNLRADDTAVYYCAKDHSQNGYDWGAFDHWGQGTVVTVSS

SEQ ID NO: 19852 - protein, 101 aa, Homo sapiens; identical to SEQ ID NO: 19841

SEQ ID NO: 19853 - protein, 101 aa, Homo sapiens
AASGFTFGMYAMTWVRQAPGKGPEWVSVIYSRGGTTYYADSVKGRFTISRDNSYNMLYLQMNNLRVEDTAVYYCAKDHSQNGYDWGAFDHWGQGTVVTVSS

SEQ ID NO: 19854 - protein, 101 aa, Homo sapiens
AASGFTFAMYAMTWVRQAPGKGPEWVSVIYSRGGTTYYADSVKGRFSISRDNSYNMLYLQMNNLRAEDTAVYYCAKDHSQNGYDWGAFDHWGQGTVVTVSS

SEQ ID NO: 19855 - protein, 101 aa, Homo sapiens
AASGFTFAMYAMTWVRQTPGKGPEWVSLIYSRGGTTYYADSVKGRFTISRDNSYNMLYLQMNNLRAEDTAVYYCAKDHSQNGYDWGAFDHWGQGTVVTVSS

SEQ ID NO: 19856 - protein, 101 aa, Homo sapiens; identical to SEQ ID NO: 19840

SEQ ID NO: 19857 - protein, 101 aa, Homo sapiens; identical to SEQ ID NO: 19841

SEQ ID NO: 19858 - protein, 101 aa, Homo sapiens; identical to SEQ ID NO: 19840

SEQ ID NO: 19859 - protein, 101 aa, Homo sapiens
EASGFTFGMYAMTWVRQAPGKGPEWVSVIYSRGGTTYYADSVKGRFTISRDNSYNMLYLQMNNLRAEDTAVYYCAKDHSQNGYDWGAFDHWGQGTVVTVSS

SEQ ID NO: 19860 - protein, 101 aa, Homo sapiens; identical to SEQ ID NO: 19859

SEQ ID NO: 19861 - protein, 98 aa, Homo sapiens
AASGFTFSHAWMNWVRQTPGKGLEWIGRIKSKSDGGTRDFAAPVKGRFTISRDDSKRTVYLELNFLKTEDTALYYCAAGTGKSDFDHWGQGTLVTVSS

SEQ ID NO: 19862 - protein, 98 aa, Homo sapiens
AASGFTFSHAWMNWVRQTPGKGLEWIGRIKSKSEGGTRDFAAPGKGRFTISRDDSKSTVYLELNFLKSEDTGVYYCAAGTGKSDFDHWGQGTLVTVSS

SEQ ID NO: 19863 - protein, 98 aa, Homo sapiens
VASGFNFKDAWMSWVRQAPGKGLEWVGRMKSKNEGGTKDFAAPVRGRCAMSRDESKNIVYLQLDSLKIEDTAVYYCAAGTGKSDFDHWGQGTLVTVSS

SEQ ID NO: 19864 - protein, 98 aa, Homo sapiens; identical to SEQ ID NO: 19863

SEQ ID NO: 19865 - protein, 98 aa, Homo sapiens
VASGFNFKDAWMSWVRQAPGKGLEWVGRMKSKNEGGTKDFAAPVRGRCAMSRDESKNLVYLQLDSLKIEDTAVYYCAAGTGKSDFDHWGQGTLVTVSS

SEQ ID NO: 19866 - protein, 97 aa, Homo sapiens
ASGFTFSHAWMNWVRQIPGKGLEWIGRIKSKTDGATRDFAAPVKGRFTISRDDSKSTVYLELNFLKSEDTAVYYCAAGTGKSDFDHWGQGTLVTVSS

SEQ ID NO: 19867 - protein, 98 aa, Homo sapiens
AASGFTFSHAWMNWVRQSPGKGLEWIGRIKSKSEGGTRDFAAPVKGRFIISRDDSKSTVYLELNFLKREDTAVYYCAAGTGKSDFDHWGQGTLVTVSS

SEQ ID NO: 19868 - protein, 97 aa, Homo sapiens
ASGFTFSHAWMNWVRQTPGKGLEWIGRIKSKSDGGTRDFAAPVKGRFIISRDDSKSTVYLELNFLKSEDTAVYYCAAGTGKSDFDHWGQGTLVTVSS

SEQ ID NO: 19869 - protein, 98 aa, Homo sapiens
AASGFTFSHAWMNWVRQTPGKGLEWIGRIKSKSDGGTRDFAAPVKGRFIISRDDSKSTVYLELNFLKTEDTAVYYCAAGTGKSDFDHWGQGTLVTVSS

SEQ ID NO: 19870 - protein, 98 aa, Homo sapiens
AASGFTFSHAWMNWVRQTPGKGLEWIGRIKSKSEGGTRDFAAPGKGRFTISRDDTKSMVYLDLNFLKTEDTAVYFCAAGTGKSDFDHWGQGTLVTVSS

SEQ ID NO: 19871 - protein, 94 aa, Homo sapiens
AASGFTVSSNYMYWVRQAPVKGLEWVSVIYSRGTTYYADSVKGRFTISRDNSKNTLYLQMNSLRAEDTAVYYCAAFSGTYITYWGQGTLVTVSS

SEQ ID NO: 19872 - protein, 94 aa, Homo sapiens; identical to SEQ ID NO: 19871

SEQ ID NO: 19873 - protein, 98 aa, Homo sapiens
AASGFSFSNHGMHWVRQAPGKGLEWVSVILHDGSKQHYAESVKGRFTISRDNSKNTLYLQMNSLRDEDTAMYYCARDDLLPDNGFDIWGQGTMVTVSS

SEQ ID NO: 19874 - protein, 98 aa, Homo sapiens
AASGFSFSNYGMHWVRQAPGKGLEWVAVIPHDGTYRHYADSVKGRFTISRDNSKNMLYLEMNSLRVEDTAVYYCARDDLLPDNGFDIWGQGTMVTVSS

SEQ ID NO: 19875 - protein, 97 aa, Homo sapiens
AASGFTFSTYAMSWVRQAPGKGLEWVSVSSGSGGSTYYADSVKGRFTISRDNSKNTLYLQMNSLRAEDTAVYYCAKDVRLLDAFDIWGQGTMVTVSS

SEQ ID NO: 19876 - protein, 96 aa, Homo sapiens
AASGFNFSSYAMSWVRQAPGKGLEWVSVISSSGSTYYADSVKGRFTISRDNSKNTLYLQMHSLRAEDTAVYYCAKDVRLLDAFDIWGQGTMVTVSS

SEQ ID NO: 19877 - protein, 97 aa, Homo sapiens
AASGFSLSTYAMSWVRQAPGKGLEWVSVSSDSGGSTYYADSVKGRFTISRDNSKNTLYLQMNTLRAEDTAVYYCAKDVRLLDAFDIWGQGTMVTVSS

SEQ ID NO: 19878 - protein, 104 aa, Homo sapiens
AASGFTFSTYAMNWVRQAPGKGLEWVSSISTGGSTTYYADSVQGRFTISRDNSKNALYLQMNSLRAEDTAVYYCAKVAVPTTSALMFYYAVDVWGQGTTVTVSS

SEQ ID NO: 19879 - protein, 104 aa, Homo sapiens
AASGFTFSTYAMNWVRQAPGKGLEWVSAISTGGTTTYYADSVKGRFTISRDNSKNALYLQMNSLRAEDTAVYYCAKVAVPTTSALMFYYAVDVWGQGTTVTVSS

SEQ ID NO: 19880 - protein, 104 aa, Homo sapiens; identical to SEQ ID NO: 19879

SEQ ID NO: 19881 - protein, 92 aa, Homo sapiens
AASGFTFGDYYMTWIRQPPGKGLEWVSSINGDSSATNYADSVKGRFTISRDNAQKSLYLQMNSLRAEDTAVYYCARASGSYWGQGTLVTVSS

SEQ ID NO: 19882 - protein, 91 aa, Homo sapiens
ASGFSFSDYYMTWIRQAPGKGLQWVSSISNGSTHINYADSVKGRFTISRDDARKSLYLQMNTLRADDTAVYYCARASGSYWGQGTLVIVSS

SEQ ID NO: 19883 - protein, 104 aa, Homo sapiens
AASGFRFDDYAMHWVRQAPGKGLEWVSGINWNGDNKGYADSVKGRFTISRDNAKNSLYFQMNSLSAEDTALYFCARDKSLVYYASGSSNAFDIWGQGTMVTVSS

SEQ ID NO: 19884 - protein, 104 aa, Homo sapiens; identical to SEQ ID NO: 19883

SEQ ID NO: 19885 - protein, 104 aa, Homo sapiens; identical to SEQ ID NO: 19883

SEQ ID NO: 19886 - protein, 104 aa, Homo sapiens; identical to SEQ ID NO: 19883

SEQ ID NO: 19887 - protein, 104 aa, Homo sapiens
AASGFRFDDYAMHWVRQAPGKGLEWVSGINWNGDNKGYADSVKGRSTISRDNAKNSLYFQMNSLSAEDTALYFCARDKSLVYYASGSSNAFDIWGQGTMVTVSS

SEQ ID NO: 19888 - protein, 104 aa, Homo sapiens
AASGFRFDDYAMHWVRQAPGKGLEWVSGINWNGDNKGYADSVKGRFTISRDNAKNSLYLQMNSLSAEDTALYFCARDKSLVYYASGSSNAFDIWGQGTMVTVSS

SEQ ID NO: 19889 - protein, 104 aa, Homo sapiens
AASGFRFDDYAMHWVRQAPGKGLEGVSGINWNGDNKGYADSVKGRFTISRDNAKNSLYFQMNSLSAEDTALYFCARDKSLVYYASGSSNAFDIWGQGTMVTVSS

SEQ ID NO: 19890 - protein, 104 aa, Homo sapiens
AASGFRFDDYAMHWVRQAPGKGLEWVSGINWNGDNKGYADSVKGRFTISRDNAKNSLYFQMNSLSAEDTALYFCARDKSLVYYASGSSNAFDIRGQGTMVTVSS

SEQ ID NO: 19891 - protein, 104 aa, Homo sapiens
AASGFRFDDYAMHWVRQAPGKGLEWVSGINWNGDNKGYADSVKGRFTISRDNAKNSLYFQMNSLSAEDTALYFCARDKSLVYYASGSSNAFDIWGQGTTVTVSS

SEQ ID NO: 19892 - protein, 104 aa, Homo sapiens
AASGFRFDDYAMHWVRQAPGKGLEWVSGINWNGDNKGYADSVKGRFTISRDNAKNSLYLQMNSLSTEDTALYFCARDKSLVYYASGSSNAFDIWGQGTMVTVSS

SEQ ID NO: 19893 - protein, 96 aa, Homo sapiens
AASGFTFDDYGMSWVRQAPGKGLEWVSGINRNGGSTGYADSVKGRFTISRDNAKNSLYLQMNSLRAEDTALYSCARGYNYGPFDYWGQGTLVTVSS

SEQ ID NO: 19894 - protein, 96 aa, Homo sapiens
AASGSTFGDHGMSWVRQAPGKGLEWVSGINRNSDSTGYVESVKGRFTISRDNAKNSLYLQMNILRAEDTALYYCARGYNYGPFDYWGQGTLVTVSS

SEQ ID NO: 19895 - protein, 96 aa, Homo sapiens
EASGVTFADHGMSWVRQAPGKGLEWVAGINRNSGNTDYIDSVKGRFTISRDNAKKYLYLQMSSLRAEDTALYYCARGYNYGPFDYWGRGTLVTVSS

SEQ ID NO: 19896 - protein, 96 aa, Homo sapiens
EASGVTFADHGMSWVRQAPGKGLEWVAGINRNGDNTDYIDSVKGRFTISRDNAKKYLYLQMSSLRAEDTALYYCARGYNYGPFDYWGRGTLVTVSS

SEQ ID NO: 19897 - protein, 96 aa, Homo sapiens
EASGVTFGDHGMSWVRQAPGKGLEWVAGINRNGANTDYIDSVKGRFTISRDNAKKYLYLQMNSLRAEDTALYYCARGYNYGPFDYWGRGTLVTVSS

SEQ ID NO: 19898 - protein, 112 aa, Homo sapiens
TQTLTLTCTFSELSLSTRGVGVGWIRQPPGKALEWLALIYWEDDKRYIPSLKSRLTITKDTSRNQVVLTLTNVDPVDTATYYCAHRPSQRHSGWYPNWFDPWGQGTLVTVSS

SEQ ID NO: 19899 - protein, 112 aa, Homo sapiens
TQTLTLTCTFSGFSLSTSGVGVGWIRQPPGKALEWLALIYWDDDKRYSPSLRSRLTITKDTSKNQVVLTLTNVDPVDTATYYCAHRPSQRHSGWYPNWFDPWGQGTLVTVSS

SEQ ID NO: 19900 - protein, 112 aa, Homo sapiens
TQTLTLTCTFSGFSLSTSGVGVGWIRQPPGKALEWLALIYWDDDKRYSPSLRTRLTITKDTSKNQVVLTLSNVDPVDTATYYCAHRPSQRHSGWYPNWFDPWGQGTLVTVSS

SEQ ID NO: 19901 - protein, 111 aa, Homo sapiens
QTLTLTCTFSGFSLSTSGVGVGWIRQPPGMALEWLALIYWDDDRRYSPSLGSRLTITKDTSKNQVVLTLTNVDPVDTATYYCAHRPSQRHSGWYPNWFDPWGQGTLVTVSS

SEQ ID NO: 19902 - protein, 112 aa, Homo sapiens
TQTLTLTCTFSGFSIGTSGVGVGWIRQPPGKALEWLALIYWDNDKFYSPSLRNRITIMKDSSRNQVVLTMTNTDPVDTATYYCAHRPSQRHSGWYPNWFDPWGQGILVTVSS

SEQ ID NO: 19903 - protein, 99 aa, Homo sapiens
AASGFTFSSYAMSWVRQAPGKGLEWVSAISGSGATTYYADSVKGRFTISRDNLKYALYLQMNSLRAEDTAVYYCAKDGQQLVSDAFDIWGQGTMVTVSS

SEQ ID NO: 19904 - protein, 99 aa, Homo sapiens
AASKFTFSSYALSWVRQAPGKGLEWVSAISSSGGTTYYADSVKGRFTISRDNYENMLYLQMNSLRAEDTAVYYCAKDGQQLVSDAFDIWGQGTMVTVSS

SEQ ID NO: 19905 - protein, 98 aa, Homo sapiens
AASGFPFSTYGMHWVRQAPGKGLEWAAVIWSDGGKESYADSVKGRFTISRDNFKNTLYLQMNSLRVEDTAVYFCARDRFGGWFHMDVWGPGTTVTVSS

SEQ ID NO: 19906 - protein, 98 aa, Homo sapiens
AASGFPFSTYGMHWVRQAPGKGLEWVAVIWSDGNKKSYVDSVKGRFTISRDNFKNTLDLQMNSLRADDTAVYYCARDRFGGWFHMDVWGQGTTVTVSS

SEQ ID NO: 19907 - protein, 94 aa, Homo sapiens
AAYGLSFSSSWMHWVRQAPGKGLVWVSRINHDATTINYADSVKGRFTISRDNAKNTLYLQMNSLREDDTAVYYCARVVSWFDPWGQGTLVTVSS

SEQ ID NO: 19908 - protein, 92 aa, Homo sapiens
SGFTFSSYWMHWVRQAPGKGLVWVSRIKSDGSDTTYADSVKGRFTISRDNAKNMVYLQMNSLRVEDTAIYYCARVVSWFDPWGQGTLVTVSS

SEQ ID NO: 19909 - protein, 95 aa, Homo sapiens
AASGFTFSTYWMHWVRQAPGKGLVWVSHVNGDGSTTTYADSVKGRFSISRDYAKNTLFLQMDGLRTEDTAVYYCARGWSHGLDVWGQGTTVTVSS

SEQ ID NO: 19910 - protein, 95 aa, Homo sapiens
AASEFTFTTYWMHWVRQAPGKGLVWVSHINSDLSVINYVDSVKGRFTISRDNAKNTLYLQMNSLRAEDTAVYYCARGWSHGLDVWGQGTTVTVSS

SEQ ID NO: 19911 - protein, 95 aa, Homo sapiens
AASEFTFTSYWMHWVRQAPGKGLVWVSHINSDLSVINYVDSVKGRFTISRDNAKNTVYLQMNSLRAEDTAVYYCARGWSHGLDVWGQGTTVTVSS

SEQ ID NO: 19912 - protein, 95 aa, Homo sapiens; identical to SEQ ID NO: 19911

SEQ ID NO: 19913 - protein, 100 aa, Homo sapiens
AASGFTFDDYAMHWVRQAPGKGLEWVSGISWNSGTIGYADSVKGRFTISRDNAKNSLYLQMNSLRAGDTALYYCAKGYTSSWYHEPFDYWGQGTLVTVSS

SEQ ID NO: 19914 - protein, 100 aa, Homo sapiens; identical to SEQ ID NO: 19913

SEQ ID NO: 19915 - protein, 100 aa, Homo sapiens; identical to SEQ ID NO: 19913

SEQ ID NO: 19916 - protein, 99 aa, Homo sapiens
AASGFTFDDYAMHWVRQAPGKGLEWVSGISWNSGTIGYADSVKGRFTISRDNAKNSLYLQMNSLRAGDTALYYCAKGYTSSWYHEPFDYWGQGPWSPSP

SEQ ID NO: 19917 - protein, 100 aa, Homo sapiens
AASGFTFDDYAMHWVRQAPGKGLEWVSGISWNSGTIGYADSVKGRFTISRDNAKNSLYPQMNSLRAGDTALYYCAKGYTSSWYHEPFDYWGQGTLVTVSS

SEQ ID NO: 19918 - protein, 100 aa, Homo sapiens
AASGFTFDDYAMHWVRQAPGKGLEWVSGISWNSGTIGYADSVKGRFTISRDNAKNSPYLQMNSLRAGDTALYYCAKGYTSSWYHEPFDYWGQGTLVTVSS

SEQ ID NO: 19919 - protein, 100 aa, Homo sapiens; identical to SEQ ID NO: 19913

SEQ ID NO: 19920 - protein, 100 aa, Homo sapiens; identical to SEQ ID NO: 19913

SEQ ID NO: 19921 - protein, 99 aa, Homo sapiens
AASGFTFDDYAMHWVRQAPGKGLEWVSGISWNSGTIGYADSVKGRFTISRDNAKNSLYLQMNSLRAGDTALYYCAKGYTSSWYHEPFDYWGQGTLSPSP

SEQ ID NO: 19922 - protein, 94 aa, Homo sapiens
AASGFTFTNYAMTWVRQAPGKGLEWVSTIGGSGATYYADSVKGRFTISRDNSKNTLYLLMNSLTVADTADYYCAKGPPLYFDSWGQGTLVTVSS

SEQ ID NO: 19923 - protein, 95 aa, Homo sapiens
AASGFTFTSYAMTWVRQAPGKGLESVSTISGSGGQTYYADSVKGRFTISRDNSRNTLYLQMNSLRAEDTALYYCAKGPPLYFDSWGQGSLVTVSS

SEQ ID NO: 19924 - protein, 95 aa, Homo sapiens; identical to SEQ ID NO: 19923

SEQ ID NO: 19925 - protein, 95 aa, Homo sapiens
ASGYTFSTYLLHWVRQAPGQGLEWMALINPGDGGTIYAQNFRGRITVTKDTSASTVYMELSSLRSDDMAVYYCAREFHGGHFDYWGRGTLVTVSS

SEQ ID NO: 19926 - protein, 95 aa, Homo sapiens
ASGYSLTSYYMHWVRQVPGQGPEWMGIIYSPGGGAASSQRFQGRLTMTMDTSTSTVYMELSSLTSDDSAVYYCAREFHGGHFDYWGQGTLVTVSS

SEQ ID NO: 19927 - protein, 99 aa, Homo sapiens
SGYSFTHHGVTWVRQAPGQGLEWMGWISGYNSDTHYAQKVQGRVTMTVDRSTSTGYMELRSLTSDDTAVYYCARDPSNTSGFYAYFDYWGQGVLVTVSS

SEQ ID NO: 19928 - protein, 100 aa, Homo sapiens
ASGYTFTHHGISWVRQAPGQGIEWMGWISAYNGDTKYAQKLQGRVTMTTDTSTTTAYMELRSLQSDDTAVYYCARDPSNTSGFYAYFDYWGQGTLVTVSS

SEQ ID NO: 19929 - protein, 99 aa, Homo sapiens
SGYTFTHHGVAWVRQAPGQGLEWVGWISCFNGDTHYAQKFQGRVTMTTDRSTSTAYMELRSLRSDDTAVYFCARDPSNTSGFYAYFDYWGQGVLVTVSS

SEQ ID NO: 19930 - protein, 97 aa, Homo sapiens
AASGFSISDYWMHWVRQVPGKGLVWVSEINRDARTKTYADSVKGRFTISRDNTRNTLFLQMNSLRVEDTAVYYCVRGTIGWNGVDYWGQGTLVTVSS

SEQ ID NO: 19931 - protein, 97 aa, Homo sapiens
AASEFTFRSYWMHWVRRAPGKGLVWVSHISEDGNHTAYADSVKGRFSISRDNAKNTLYLQMNSLRVEDTAVYYCVRGTIGWNGVDYWGQGTLVTVSS

SEQ ID NO: 19932 - protein, 97 aa, Homo sapiens
AASEFTFRSYWMHWVRRAPGKGLVWVSHISEDGSHTAYADSVKGRFSISRDNAKNTLYLQMNSLRVEDTAVYYCVRGTIGWNGVDYWGQGTLVTVSS

SEQ ID NO: 19933 - protein, 96 aa, Homo sapiens
GSGFTFRNAWMSWVRQASGKGLEWVGRIKSEINGGTADYGAAVRGRFFISRDDSQNTLYLQMNSLKTEDTAVYYCTTVTDGGLDYWGQGTLVTVSS

SEQ ID NO: 19934 - protein, 97 aa, Homo sapiens
AASGFTFSNAWMSWVRQAPGKGLEWVGRIKRKSDGGTADHAVPVKGRFTISRDDSNNTLYLQMNSLKSEDTAVYYCTTVTDGGLDYWGQGTLVTVSS

SEQ ID NO: 19935 - protein, 97 aa, Homo sapiens
AASGFIFSNAWMSWVRQAPGKGLEWIGRIKSKTHGGTADSAAPVKGRFTISRDDSKNTLYLQMNSLTTEDTALYYCTTVTDGGLDYWGQGTLVTVSS

SEQ ID NO: 19936 - protein, 97 aa, Homo sapiens
AASGFTFSNAWMSWVRQGPGKGLEWVGRIKRKSDGGTADSAAPVKGRFTISRDDSKNTLYLQMNSLKTEDTAVYFCTTVTDGGLDYWGQGILVTVSS

SEQ ID NO: 19937 - protein, 97 aa, Homo sapiens; identical to SEQ ID NO: 19936

SEQ ID NO: 19938 - protein, 97 aa, Homo sapiens; identical to SEQ ID NO: 19935

SEQ ID NO: 19939 - protein, 97 aa, Homo sapiens; identical to SEQ ID NO: 19936

SEQ ID NO: 19940 - protein, 97 aa, Homo sapiens; identical to SEQ ID NO: 19935

SEQ ID NO: 19941 - protein, 97 aa, Homo sapiens; identical to SEQ ID NO: 19936

SEQ ID NO: 19942 - protein, 97 aa, Homo sapiens
AASGFTFINAWMSWVRQAPGKGLEWVGRIKRKSDGGTADHAVPVKGRFTISRDDSDNTLYLQMNSLKSEDTAVYYCTTVTDGGLDYWGQGTLVTVSS

SEQ ID NO: 19943 - protein, 97 aa, Homo sapiens
AASGFTFSNAWMSWVRQAPGKGLEWVGRIKSKKNGGTADHAAPVKGRFSMSREDSKNMLYLQMNSLETEDTAVYFCTTVTDGGLDYWGQGTLVTVSS

SEQ ID NO: 19944 - protein, 103 aa, Homo sapiens
GVDGASLSGFFWTWIRQPSGKGLEWIGQINYSGGTTHHNPSLKGRVTFSLDTSNKQFSLRLTSVTAADTAIYYCARYSSNWYGTGYYYGMDVWGEGTTVTVSS

SEQ ID NO: 19945 - protein, 102 aa, Homo sapiens
GVHGASFSGFFWTWIRQPPGKGLEWIGEIYHSGNTNYNPSLRSRVTMSIDTSRKQFSLDLTSVTAADTAIYYCARYSSNWYGTGYYYGMDVWGQGTAVTVSS

SEQ ID NO: 19946 - protein, 100 aa, Homo sapiens
KASGYTFRNYWIGWVRQKPGKGLEWMGIIYPGDYDTRYSPSFRGQVTISVDKSITSAFLQWNSLKASDTAMYYCARAPTSVSNPYHFDSWGQGTPVTVSS

SEQ ID NO: 19947 - protein, 100 aa, Homo sapiens
KGSGYSFSTYWIGWVRQMPGKGLEWIGIIYPGDSDTRYSPSFKGQVTISVDRSISTAYLQLRTLSTSDTAIFYCARAPTSVSNPYHFDSWGQGTLVSVSS

SEQ ID NO: 19948 - protein, 95 aa, Homo sapiens
ASGFTFNTYWMHWVRQAPGKGLVWVSRINSDGSITNYADSVKGRFTISRDNAKNTLYLQMNSLRAEDTAVYYCAREAVVGGFDYWGLGTLVTVSS

SEQ ID NO: 19949 - protein, 96 aa, Homo sapiens
VASGFTFSNYWMHWVRQAPGKGLVWVSRINNNGLTTNYADSVRGRFTISRDNAKNTLYLETNSLGAEDTAVYFCAREAVVGGFDYWGQGALVTVSS

SEQ ID NO: 19950 - protein, 94 aa, Homo sapiens
ASGFIFRNYAMLWVRQAPGKELEWVSTIDGPTTNTHYADSVQGRFTIFRDNSRNTVYLQMNSLRADDTAIYYCSTWLTGHFDYWGQGTLVTVSS

SEQ ID NO: 19951 - protein, 94 aa, Homo sapiens
ASGFIFRNYAMLWVRQAPGKELEWVSTIDGPTTNTHYADSVQGRFTIFRDNSRNTVYLQMNSLRADDTAFYYCSTWLTGHFDYWGQGTLVTVSS

SEQ ID NO: 19952 - protein, 94 aa, Homo sapiens
ASGFIFRNYAMLWVRQAPGKELEWVSTIDGPTTNTHYADSVQGRFTIFRDNSRNTVYLQMNSLRADDTAIYYCSTWLTGHFDYWGQGTLVTASS

SEQ ID NO: 19953 - protein, 93 aa, Homo sapiens
SASGFTFADGMHWVRQAPGRGPEYVAFISRYGNITYYADSVRGRFTISRDNSKKMVFLQMASLRTDDTAVYYCVRDWYGFDSWGQGTLVSVSS

SEQ ID NO: 19954 - protein, 93 aa, Homo sapiens
SASGFSFNDGMHWVRQAPGKGLEYVSFISRYGDKTYYLDSVKGRFTISRDNSKKMLYLQMNNLRVDDTGVYFCVRDWYGFDSWGQGTLVTVSS

SEQ ID NO: 19955 - protein, 99 aa, Homo sapiens
NVSGSSITMSNYYWGWIRQPPGKGLEWIGSMFSRGTTYYNPSLKSRVSISVDTSKNQFSLRLSSVTAADTAVYYCARHCYGGCGWFDPWGQGTLVTVSS

SEQ ID NO: 19956 - protein, 100 aa, Homo sapiens
TVSGGSISSNSNYYWGWIRQAPGKGLEWIGSSYYSGTTYYHASLKSRLTISVDTSKSQFFLRLTSVTASDTAVYYCARHCYGGCGWFDPWGQGIVVTVSS

SEQ ID NO: 19957 - protein, 95 aa, Homo sapiens
ASGFSFSGNAMCWVRQAPGKGLEWVSGIGGDGGAYYADSVKGRFTISRVNSENTVSLQMNSLTAEDTAIYFCAKDLYDFSGMDVWGQGTTVTVSS

SEQ ID NO: 19958 - protein, 95 aa, Homo sapiens; identical to SEQ ID NO: 19957

SEQ ID NO: 19959 - protein, 95 aa, Homo sapiens; identical to SEQ ID NO: 19957

SEQ ID NO: 19960 - protein, 96 aa, Homo sapiens
VASGFSFSGNAMCWVRQAPGKGLEWVSGIGGDGGAYYADSVKGRFTISRVNSKNTVSLQMNSLSAEDTAIYYCAKDLYDFSGMDVWGQGTTVTVSS

SEQ ID NO: 19961 - protein, 96 aa, Homo sapiens
VASGFEFPGNAMCWVRQAPGKGLEWVSGIGGDGGTHYADSVKGRFTMSRDNSKNTVSLQMNSLRAEDTAVYYCAKDLYDFSGMDVWGQGTTVTVSS

SEQ ID NO: 19962 - protein, 95 aa, Homo sapiens
ASGFSFSGNAMCWVRQAPGKGLEWVSGIGGDGGAYYADSVKGRFTISRVNSENTVSLQMNSLTAEDTAIYFCAKDLYDFSGMDVWSQGTTVTVSS

SEQ ID NO: 19963 - protein, 96 aa, Homo sapiens; identical to SEQ ID NO: 19961

SEQ ID NO: 19964 - protein, 96 aa, Homo sapiens; identical to SEQ ID NO: 19961

SEQ ID NO: 19965 - protein, 96 aa, Homo sapiens
VVSGFTIHGNAMGWVRQAPGKGPEWVCGIGSDFSTHYGGTVKGRFTVSRDNSRSTIYLQMNSLTAEDTAVYYCAKDLYDFSGMDVWGPGTTVTVSS

SEQ ID NO: 19966 - protein, 96 aa, Homo sapiens
VVSGFTIHGNAMGWVRQAPGKGPEWVCGIGTDFSTHYAGAVKGRFTVSRDNSKNTVYLQMNSLTAEDTAIYYCAKDLYDFSGMDVWGPGTTVTVSS

SEQ ID NO: 19967 - protein, 94 aa, Homo sapiens
SGFTIHGNAMGWVRQAPGMGPEWVCGIGTDFSTHYGGAVKGRFTVSRDNSKNTVYLQMNSLTAEDTAIYYCAKDLYDFSGMDVWGPGTTVIVSS

SEQ ID NO: 19968 - protein, 96 aa, Homo sapiens
VASGFMFTGNAMCWVRQAPGKGLEWVSGIGGDGGTHYADSVKGRFTVSRDNSKNTLSLQMNSLRAEDTAVYYCAKDLYDFSGMDVWGQGTTVTVSS

SEQ ID NO: 19969 - protein, 103 aa, Homo sapiens
AVYGGSFRDYWWSWIRQSPGRGLEWVAEINSDGKTNFNPSLKSRVAISVDPSKVQFSLRLGTVTAADTALYYCARGLPYGSGVHHNFWTFDYWGQGDLVTVSS

SEQ ID NO: 19970 - protein, 103 aa, Homo sapiens
AVYGGSFSDYWWSWIRQSPGRGLEWVAEINSDGKTNFNPSLKSRVAISVDPSKLQFSLRLGIVTAADSALYYCARGLPYGSGVHHNFWTFDYWSQGDLVTVSS

SEQ ID NO: 19971 - protein, 95 aa, Homo sapiens
TVSGDSITSYYWSWIRQPPGKGLEWIGYIYNSGSTNYNPSLKSRVTISVDTAKNQFSLRLTSVTAADTAVYYCARPYYFYAMDVWGQGTTVTVSS

SEQ ID NO: 19972 - protein, 95 aa, Homo sapiens
TVSGGSISTSYWSWIRQPPGKALEWIGYIHYSGSTNYNPSLKSRVTISVDTSKNHLSLRLRSVTAADTAVYYCARPYYFYAMDVWGQGTTVTVSS

SEQ ID NO: 19973 - protein, 95 aa, Homo sapiens
TVSGDSVSHSYWSWVRQPPGKGLEWIGYIYDRVSPNYSPSLKSRVSISVDTSKNQFSLKLTSVTAADTAIYYCARPYYFYAMDVWGPGTTVTVSS

SEQ ID NO: 19974 - protein, 94 aa, Homo sapiens
ASGFGFSGNAMGWVRQSPGKGLEWVAAIGSDGNRLYGDPVRGRFTVSRDNSKNALFLEMHSLRAEDTALYYCVKDILGWAFDFWGQGTLVTVSS

SEQ ID NO: 19975 - protein, 95 aa, Homo sapiens
AASGFSFSGNAMAWVRQAPGQGLEWVSGSGSDGNTLYANSVKGRFTISRDNSQSTLYLQMNSLRAEDTAVYYCVKDILGWAFDFWGQGTLVTVSS

SEQ ID NO: 19976 - protein, 99 aa, Homo sapiens
ASGGTSSTHTINWVRQAPGQGLEWMGRIIPTLGITNYAQKFQGRVTITADKSTTTAYMELNSLRSEDTAIYFCARVLGGVIARGGFDPWGQGTLVTVSS

SEQ ID NO: 19977 - protein, 99 aa, Homo sapiens
ASGGTSSTHTINWVRQAPGQGLEWMGRIIPTLGITNYAQKFQGRVTITADKSTTTAYMELNSLRSEDMAIYFCARVLGGVIARGGFDPWGQGTLVTVSS

SEQ ID NO: 19978 - protein, 102 aa, Homo sapiens
AASGFTFSSYAMSWVRQAPGKGLEWVSVISGSGGSTYNADSVKGRFTISRDNSKSTLYLQMDSLRVEDTAVYYCAKRRVVVTEDYSYGMDVWGQGTTVIVSS

SEQ ID NO: 19979 - protein, 102 aa, Homo sapiens; identical to SEQ ID NO: 19978

SEQ ID NO: 19980 - protein, 101 aa, Homo sapiens
TVASGSISSSSHYWGWIRQPPGKGLEWIGVSASGTAYFNPSLKSRASISVDTSKNQLSLNLHSVTAADTAVYFCARRVYYFDSSGYFFDYWGQGILVIVSS

SEQ ID NO: 19981 - protein, 100 aa, Homo sapiens
SDGSIRSSNFYGGWIRQPPGKGLELIGTLHHSGNTYYNPSLKSRVRMSVDTTKNHFSLSVTSVTAADTAVYYCARRVYYFDSSGYFFDYWGQGALVTVSS

SEQ ID NO: 19982 - protein, 95 aa, Homo sapiens
ASGFTFSSYAMHWVRQAPGKGLEWVSYIWYDASNKYYADSVRGRFTISRDNSKNTVYLEMSSLRAEDTAVYYCARGGSEGWLDPWGQGTLVTVSS

SEQ ID NO: 19983 - protein, 95 aa, Homo sapiens
ASGFTFSSYAMHWVRQAPGKGLEWVSYIWYDASNKYYADSVRGRFTISRDNSKNTVYLEMTSLRAEDTAVYYCARGGSEGWLDPWGQGTLVTVSS

SEQ ID NO: 19984 - protein, 98 aa, Homo sapiens
ATSGFSFKTYAMTWVRQAPGKGLEWVSAISGDGFYIYHTESVKGRFSTSRDNSRSTLYLQMNYLRAEDTAVYYCAKNLVDGQALYEYWGQGTLVTVSS

SEQ ID NO: 19985 - protein, 98 aa, Homo sapiens
AASGFTFSKYAMTWVRQAPGKGLEWVSAISGVGAHVYHADSVKGRFTMSRDNTKNTVHLQMVSLRAEDTAVYYCAKNLVDGQALYEYWGQGTLVTVSS

SEQ ID NO: 19986 - protein, 98 aa, Homo sapiens
AASGFTFSKYAMTWVRQAPGKGLEWVSAISGVGAHVYHADSVKGCFTMSRDNTKNTVHLQMVSLRAEDTAVYYCAKNLVDGQALYEYWGQGTLVTVSS

SEQ ID NO: 19987 - protein, 98 aa, Homo sapiens
ATSGFTFKTYAMTWVRQAPGKGLEWVSAISGDAFYIYYTESVKGRFTTSRDNSRSTLYLQMNNLRAEDTAVYYCAKNLVDGQALYEYWGQGTLVTVSS

SEQ ID NO: 19988 - protein, 98 aa, Homo sapiens; identical to SEQ ID NO: 19985

SEQ ID NO: 19989 - protein, 98 aa, Homo sapiens; identical to SEQ ID NO: 19985

SEQ ID NO: 19990 - protein, 93 aa, Homo sapiens
SVTDGSMTEHYWSWLRQSPGKDLEWIGFIHHSGSTDYNPSLKSRVTLSMETSWKRFSLILTSVSAADTAVYYCASGAHYFGSWGQGALVTVSS

SEQ ID NO: 19991 - protein, 93 aa, Homo sapiens
TVSGDSMSNHYWSWIRQPPGKGLEWIGFIYHRGSTSYNPSLKSRVTISVDTSKNKFSLKLSSVTAADTAMYFCASGAHYFGSWGQGTLVTVSS

SEQ ID NO: 19992 - protein, 98 aa, Homo sapiens
VASGFTFSSNAMSWVRQAPGKGLEWVSTISGTGGSTYYADSVKGRFTISRDNSRNTLYLQMTSLRAEDTAIYYCAKVRISAAGSFDYWGQGTLVTVSS

SEQ ID NO: 19993 - protein, 98 aa, Homo sapiens
AAPGFSFSNNAMSWVRQAPGKGLEWVSGISGSGTFTYYADSVKGRFTISRDISKNTLYLQMNSLRAEDTAVYYCAKVRISAAGSFDYWGQGTLVTVSS

SEQ ID NO: 19994 - protein, 95 aa, Homo sapiens
AASGFSFSNYWMHWIRQTPGKGLMWVSRLNEDGSWTTYADSVKGRFTISRDNAKNTLDLQMNSLRAEDTGLYYCARDVSGRDDYWGQGVLVTVSS

SEQ ID NO: 19995 - protein, 95 aa, Homo sapiens; identical to SEQ ID NO: 19994

SEQ ID NO: 19996 - protein, 95 aa, Homo sapiens
EASGFIFSRYWMHWVRQAPGKGLVWVSRSNEVGSVTNYADSVKGRFTISRDNNKNMLYLEMSSLRAEDTAVYYCARDVSGRDDYWGQGTLVTVSS

SEQ ID NO: 19997 - protein, 95 aa, Homo sapiens; identical to SEQ ID NO: 19996

SEQ ID NO: 19998 - protein, 95 aa, Homo sapiens
AASGFSFSNYWMHWVRQTPGKGLMWVSRLNEDGSWTTYADSVKGRFTISRDNAKNTLDLQMNSLRAEDTGLYYCARDVSGRDDYWGQGVLVTVSS

SEQ ID NO: 19999 - protein, 95 aa, Homo sapiens
AASGFSFSNYWMHWVRQAPGKGLMWVSRLNEDGSTTTYADSVKGRFTISRDNAKNTLDLQMNSLRAEDTGLYYCARDVSGRDDYWGQGVLVTVSS

SEQ ID NO: 20000 - protein, 96 aa, Homo sapiens
AASGFTFTTYAMSWVRQAPGKGLEWVSAISGGGGSTYYADSVKGRFTISRDNSRNTLYLQVNSLRADDTAVYYCAKGSLGRYFDYWGQGTLVTVSS

SEQ ID NO: 20001 - protein, 96 aa, Homo sapiens
AASGFIFSSYVMRWVRQAPGKGLEWVSAIDGSGDKTYYADSVKGRFSISRDNSKNTLYLQMNSLRAEDTAVYYCAKGSLGRYFDYWGQGTLVTVSS

SEQ ID NO: 20002 - protein, 96 aa, Homo sapiens
ASGYTFISYGITWVRQAPGQGLEWMGWISSYDGNTNDAQKFQGRITMTTDTATTTAYMELRSLRSDDTAVYYCAREGYSAYDFAYWGQGTLVTVSS

SEQ ID NO: 20003 - protein, 96 aa, Homo sapiens
AYGYTFIRYGISWVRQAPGQGLEWMGWISGYDGSTSYAQKFQGTVTMTTDTSTSTVYMELRSLRSDDTAVYYCAREGYSAYDFAYWGQGTLVTVSS

SEQ ID NO: 20004 - protein, 91 aa, Homo sapiens
ASGYTFTNYAMNWMRQAPGQGLEWMGRINTNTGNPTYAQGFTGRFVFSLDTSVSTAYLQISSLKAEDTAVYYCARGPVDYWGQGTLVTVSS

SEQ ID NO: 20005 - protein, 91 aa, Homo sapiens
ASGYTFTSYAMNWVRQAPGQGLEWMGWINTNTGNPTFAQGFTGRLVFSLDTSVSTAYLQISSLKAEDTAVYYCARGPVDYWGQGTLVTVSS

SEQ ID NO: 20006 - protein, 99 aa, Homo sapiens
TVSGGSISSYYWSWIRQPPGKGLEWIGYIYYSGSTNYNPSLKSRVTISVDTSKNQFSLKLSSVTAADTAVYYCARARLPYYYYYGMDVWGQGTTVTVSS

SEQ ID NO: 20007 - protein, 98 aa, Homo sapiens
VSGGSISSYYWSWIRQPPGKGLEWIGYIYYSGSTNYNPSLKSRVTISVDTSKNQFSLNLTSVTAADTAVYYCARARLPYYYYYGMDVWGQGTTVTVSS

SEQ ID NO: 20008 - protein, 99 aa, Homo sapiens
AASGFTVSTNYMSWVRQAPGKGLEWVSVIHIGGNTYYADSVKGRFSVSRDNSKNTMYLQMNSLRAEDTAVYYCARDGGSGYYEGYFDLWGQGTLVTVSS

SEQ ID NO: 20009 - protein, 99 aa, Homo sapiens
AASGFIVSSNYMSWVRQAPGKGLEWVSVIHIGDNTYYADSVKGRFSVSRDNSKNTMYLQMNSLRAEDTAVYYCARDGGSGYYEGYFDLWGQGTLVTVSS

SEQ ID NO: 20010 - protein, 98 aa, Homo sapiens
ASGFIFTNYAMTWVRQAPGKGLEWISVIWGGSGTTNSADSVKGRFTLSRDTSKNTLYLQMNSLRAEDTATYYCAKRSLSGAPSPLDCWGQGTLVSVSS

SEQ ID NO: 20011 - protein, 99 aa, Homo sapiens
AASGFIITNYAMTWVRQAPGKGLEWISVTWGYSGSTNSADSVKGRFTLSRDTSKNTLYLQMNSLRAEDTATYYCAKRSLSGAPSPLDCWGQGTLVTVSS

SEQ ID NO: 20012 - protein, 99 aa, Homo sapiens
AASGFIFTNYAMTWVRQAPGKGLEWISVIWGYSGTTNSADSVKGRFTLSRDTSKNTLYLQMNNLRAEDTATYYCAKRSLSGAPSPLDCWGQGTVVTVSS

SEQ ID NO: 20013 - protein, 93 aa, Homo sapiens
AASGFTFSTYWMHWVRQAPGKGLVWVSRIKSDGSSTNYADSVKGRFTISRDNAKNTLYLQMNSLRAEDTAVYYCARGEALGCWGQGTLVTVSS

SEQ ID NO: 20014 - protein, 93 aa, Homo sapiens
AASGFPFSSHWMHWVRQAPGKGLVWVSRISSDGSTANYADSVKGRFTISRDNAKNTLYLQMNSLRVEDTAVYYCARGEALGCWGQGTLVTVSS

SEQ ID NO: 20015 - protein, 93 aa, Homo sapiens
AASGFTFNSHWMHWVRQAPGKGLVWVSRINSDGSSTSYADSVKGRFTISRDNAKNTLYLQMNSLRAEDTAVYYCARGEALGCWGQGTLVTVSS

SEQ ID NO: 20016 - protein, 94 aa, Homo sapiens
AASGLTVSDTWMAWARQAPGKGLEWVGHITSKTEGGTARYAAPVKDRFTISRDDSRNTLYLQMNSLKPEDTAVYYCTGSFLAYWGQGTLVTVSS

SEQ ID NO: 20017 - protein, 94 aa, Homo sapiens
AASGFTFSNAWMSWARQAPGKGLEWVALIQSQTDGATADYTAPVKGRFSISRDDSKNTLYLQMNNLQTEDTAVYFCTGSFLAYWGQGTLVTVSS

SEQ ID NO: 20018 - protein, 94 aa, Homo sapiens
VVSGFTFSDAWMSWVRQAPGKGLEWVGHIQSQTNGATTLYTAPVKGRFTISRDDSKNTVYLQMNSLQIDDTAVYYCTGSFLAYWGQGTLVTVSS

SEQ ID NO: 20019 - protein, 94 aa, Homo sapiens
VVSGFTFSNAWMSWFRQAPGKGLEWVGHIQSQTNGGTTEYTAPVKGRFTISRDDSKNTLYLQMNSLRTEDTAVYYCTGSFLAYWGQGTLVTVSS

SEQ ID NO: 20020 - protein, 94 aa, Homo sapiens
GASGFTFSNAWMSWARQAPGKGLEWVGHIQSQTDGGTAQYTAPVKGRFTISRDDSKNTLYLQMNNLQTEDTAVYYCTGSFLAYWGQGTLVTVSS

SEQ ID NO: 20021 - protein, 99 aa, Homo sapiens
TVSGGSISGYYWSWIRQPPGKGLEWIGYIYYSGSTNYNPSLTSRVTISVDTSKNQFSLKVSSVTAADTAVYYCARHGKSGSYNRYFDYWGQGTLVTVSS

SEQ ID NO: 20022 - protein, 99 aa, Homo sapiens
TVSGGSISTYFWSWIRQPPGKGLEWIGYIYYSGTTNYDPSLKSRVTISVDTSKNQFSLRLSSVTAADTAVYYCARHGKSGSYNRYFDYWGQGTLVTVSS

SEQ ID NO: 20023 - protein, 98 aa, Homo sapiens
AASGFTFSNAWMSWVRQAPGKGLEWVGRIKSRTDGGTTDYAAPVKGRFTISRDDSKNTLYLQMNSLKTEDTALYYCTTGLVATISDYWGQGTLVTVSS

SEQ ID NO: 20024 - protein, 98 aa, Homo sapiens
AASGFTFNNAWMSWVRQAPGKGLEWVGRIKSKTDGGTTDYAAPVKGRFTISRDDSKNTLYLQMNSLQTEDTAVYYCTTGLVATISDYWGQGTLVTVSS

SEQ ID NO: 20025 - protein, 95 aa, Homo sapiens
ASGYTFLDYGISWVRQAPGQGLEWMGWISTNSRNTKSAPKFQDRVTMTTDTSTTTAYMELRSLNSDDTAVYYCAISGDGAYSHDWGRGTLVIVSS

SEQ ID NO: 20026 - protein, 95 aa, Homo sapiens
ASGYTFTDFGITWVRQAPGQGLEWMGWISTYNGDTNYGLNLQGRVTLTTDTSTSTAYMELRNLMSDDTAVYYCAISGDGAYSHDWGQGTQVTVSS

SEQ ID NO: 20027 - protein, 94 aa, Homo sapiens
AVSGFTFSSYWMSWVRQAPGQGLEWVANIKQDGNEKYYVDSVKGRFTISRDNAKNSLYLQMNSLRAEDTAVYYCASGRTTSHYWGQGTLVTVSS

SEQ ID NO: 20028 - protein, 94 aa, Homo sapiens
AASGFSFGSYWMSWVRQAPGKGPEWVANIKQDGSEKTYVNSVKGRFSISRDNAENSLYLQMNSLRAEDTAIYYCASGRTTSHYWGQGTLVTVSS

SEQ ID NO: 20029 - protein, 100 aa, Homo sapiens
ASGYIFIRYAMHWVRQAPGQRLEWMGWINPVNGDALFSQKFQGRVTITRDTSASTAYMELSSLGSADTAVYYCARAPGIEAVEGYYFDSWGQGTLVTVSS

SEQ ID NO: 20030 - protein, 100 aa, Homo sapiens
ASGYTFTIYAMHWVRQAPGQRLEWMGWINAGNGNTKYSQKFQDRVTITRDTSASTAYMELSSLRSEDTAVYYCARAPGIEAVEGYYFDSWGQGTLVTVSS

SEQ ID NO: 20031 - protein, 92 aa, Homo sapiens
AASGFTFSNYAMSWVRQAPGKGLEWVSAISDSGGTTYYADSVKGRFTISRDNSKNTLYLQMNSLRAEDTAVYYCAKRDQHDWGQGTLVTVSS

SEQ ID NO: 20032 - protein, 92 aa, Homo sapiens
AASGFTFGTYGMIWVRQAPGKGLEWVSGISGSGSSTYYADSVKGRFTISRDNSQNTLYLQMSSLRVEDTAVYYCAKRDQHDWGQGTLVTISS

SEQ ID NO: 20033 - protein, 93 aa, Homo sapiens
AASGFTFSNYYMGWVRQAPGKGLEWLANTKQDGSEKYYVDSVKGRFTISRDNAKNSLYLQMNSLRAEDTAVYYCARDSSSPYWGQGTLVTVSS

SEQ ID NO: 20034 - protein, 93 aa, Homo sapiens
AASGFTFSNYYMGWVRQAPGKGLEWLANIKQDGSEKYYVDSVKGRFTISRDNAKNSLYLQMNSLRAEDTAVYYCARDSSSPYWGQGTLVTVSS

SEQ ID NO: 20035 - protein, 93 aa, Homo sapiens
AASGFTFSNYYMGWVRQAPGKGLEWLANIKQDGSEKYYVDSVKGRFTISRDNAKNSLYLQMNSLRVEDTAVYYCARDSSSPYWGQGTLVTVSS

SEQ ID NO: 20036 - protein, 93 aa, Homo sapiens
AASGFTFSNYYMGWVRQAPGKGLEWLANIKQDGSEKYYVDSVKGRLTISRDNAKNSLYLQMNSLRAEDTAVYYCARDSSSPYWGQGTLVTVSS

SEQ ID NO: 20037 - protein, 94 aa, Homo sapiens
AASGFTFSSYVMIWVRQAPGKGLEWVSGIFGNGGYADYADSVKGRFTISRDNSKNMMYLEMHSLRAEDTAIYFCANDPRFGGSYWGQGTTVTVS

SEQ ID NO: 20038 - protein, 95 aa, Homo sapiens
AASGFTFSSYIMTWVRQAPGKGLEWVSGIGGGGGTTYYADSVKGRFTISRDNSKNTLYLQMSSLRVEDTAVYYCANDPRFGGSYWGQGTLVIVSS

SEQ ID NO: 20039 - protein, 103 aa, Homo sapiens
AASGFTFSNFAMSWVRQAPGKGLEWVSAISGSGDITYYADYVDSVKGRFTISRDNSKNTVYLQMNSLRVEDTAVYFCAKDRVVRGVMGALGYWGQGTLVTVSS

SEQ ID NO: 20040 - protein, 103 aa, Homo sapiens
AASGFTFSNFAMSWVRQAPGKGLEWVSAISGSGDSTYYADNADSVKGQFTISRDNSKNTVYLQMNSLRVEDTAVYFCAKDRVVRGVMGALGYWGQGTLVTVSS

SEQ ID NO: 20041 - protein, 100 aa, Homo sapiens
AASGFTFSSYAMSWVRQAPGKGLEWVSTMSGSGDSTYYADSVKGRFTISRDSSKNTLYLQMNGLRAEDTAVYYCAKDRVVRGVMGALGYWGQGTLVTVSS

SEQ ID NO: 20042 - protein, 98 aa, Homo sapiens
VASGFTFNDHAMNWVRQAPGKGPEWVSSITGDGFGSSYGDSVRGRFTISRDNSLTTLYLHMRSLRVDDTAVYYCAKDQRGYNRPVESWGQGTLVTVSS

SEQ ID NO: 20043 - protein, 98 aa, Homo sapiens
AASGFTFNTCAMTWVRQAPGKGLEWVSTIGGGGNSKYYADSVTGRFTVSRDNSMNTLYLQMNSLRVEDTAIYYCAKDQRGYNRPVESWGQGTLVTVSS

SEQ ID NO: 20044 - protein, 99 aa, Homo sapiens
VASAFAFNNYDMTWVRQAPGKGLEWVSTINILGHSTFYADSVKGRFTISRDNSKNTVYLQMNSLRAEDTAVYYCAKGPFGSGNNFNDFWGRGILVTVSS

SEQ ID NO: 20045 - protein, 99 aa, Homo sapiens
VASAFAFNNYDITWVRQAPGKGLEWVSTINILGHNTFYADSVKGRFTISRDNSKSTVYLQMNSLRAEDTAVYYCAKGPFGSGNNFNDFWGRGILVTVSS

SEQ ID NO: 20046 - protein, 97 aa, Homo sapiens
TVSGGSISSSSYYWGWIRQPPGKGLEWIGSIYYSGSTYYNPSLKSRVTISVDTSKNQFSLKLSSVTAADTAVYYCVAAPNQYYFDYWGQGTLVTVSS

SEQ ID NO: 20047 - protein, 97 aa, Homo sapiens
TVSGDSISSSPYYWGCIRQPPGKGLEWIGTISYSGNTYYNPSLKSRVTISVDTSKDQFFLDLTSVTAADTAVYYCVAAPNQYYFDYWGRGTLVTVSS

SEQ ID NO: 20048 - protein, 99 aa, Homo sapiens
AASGFTFDDYAMQWVRQAPGKGLEWVSLISWDGGSTYYADSVKGRFTISRDNSKNSLYLQMNSLRAEDTALYYCAKPSCSSTSCPAGYWGQGTLVTVSS

SEQ ID NO: 20049 - protein, 99 aa, Homo sapiens; identical to SEQ ID NO: 20048

SEQ ID NO: 20050 - protein, 96 aa, Homo sapiens
TVSGGSISSFYWSWIRQPPGQGLEWIGYIYSSGNTKYNSSLKSRVIISVDTSKNQFSLRLSSVTAADTAVYFCARHGGWRSPFDYWGQGILVTVSS

SEQ ID NO: 20051 - protein, 96 aa, Homo sapiens
TVSGGSISYFYWSWIRQPPGQGLEWIGYIYSSGNTKYNSSLKSRVIISVDTSKNQFSLRLSSVTAADTAVYFCARHGGWRSPFDYWGQGILVTVSS

SEQ ID NO: 20052 - protein, 96 aa, Homo sapiens
TVSGGSISNYYWSWIRQPPGKGLEWIAYIYYSGSTNYNPSLKSRVTISVDTSKNQFSLKLSSVTAADTAVYYCARHGGWRSPFDYWGQGTLVTVSS

SEQ ID NO: 20053 - protein, 102 aa, Homo sapiens
AASGFSFDDYGMHWVRQAPGKGLEWVSLISGNGASTYYAVSVKGRFTISRDSSKNSLSLQMNSLRTEDTALYYCAKDILRISEPGTRGLDYWGQGTLVTVSS

SEQ ID NO: 20054 - protein, 102 aa, Homo sapiens
AASGFTFDNYGMHWVRQAPGKGLEWVSLISGNGIATYYAESVKGRFTISRDNSKNSLYLQMNSLRAEDTALYYCAKDILRISEPGTRGLDYWGQGTLVTVSS

SEQ ID NO: 20055 - protein, 93 aa, Homo sapiens
AASGFTFSTYWMNWVRQPPGKGLEWVASIKQDGSEKYYVDSVKGRFTISRDNAKNSLYLQMNSLRAEDTAVYYCGRVRGMDVWGQGTTVTVSS

SEQ ID NO: 20056 - protein, 93 aa, Homo sapiens
VASGFTFRSYWMSWVRQAPGKGLEWVASISQDGSDKYYLDSVKGRFTISRDNARNSLYLQMNGLRVEDTAVYYCGRVRGMDVWGQGTTVTVSS

SEQ ID NO: 20057 - protein, 98 aa, Homo sapiens
TSGFTFSAFTMNWVRQAPGKGLEWVSSIGKSTSYKYYRESVKGRFTTSRDDARSSLYLQMNGLRVEDTAVYYCARGNASESHYNSGYWGRGVLVTVSS

SEQ ID NO: 20058 - protein, 98 aa, Homo sapiens
TSGFTFTRYTMNWVRQAPGKGLEWVSSISPSSSDTYYAGSVKGRFTVSRDNAKSSLFLQMNSLRNEDTAVYYCARGNASESHYNSGYWGQGTLVTVSS

SEQ ID NO: 20059 - protein, 94 aa, Homo sapiens
AASGFTFSGYWMTWVRQAPGKGLEWVGNIKGDGSEKNYVASAKGRFTISRDNAKNFVYLQMNSLRAEDTAVYYCARGSGYNYYWGQGALVTVSS

SEQ ID NO: 20060 - protein, 94 aa, Homo sapiens
AASGFTFRTYWMNWVRQAPGKGLEWVANIKPDGSEKYYVDSVKGRFTISRDNAKNSLYLQMNSLRAEDTAVYFCARGSGYNYYWGQGTLVTVSS

SEQ ID NO: 20061 - protein, 94 aa, Homo sapiens
AASGFTFEAIGLTWVRQAPGKGLQWVANINQDGSEKNYVDSVKGRFTISRDNAKNSLYLQMNSLRAEDTAVYYCARTARGLDYWGQGALVTVSS

SEQ ID NO: 20062 - protein, 94 aa, Homo sapiens
AASGFNFRSYWMSWVRQAPGKGLEWVATIKQDGSEKYYVDSVKGRFTVSRDNAKNSLYMQMNSLRAEDTAVYYCARTARGLDYWGQGTLVTVSS

SEQ ID NO: 20063 - protein, 101 aa, Homo sapiens
AVYGGSFSGYYWSWIRQPPGKGLEWIGEINHGGGTNYNPSLKSRVTISVDTSKNQFSLKLSSVTAADTAVYYCARGFTVTTGYYYYGMDVWGQGTTVTVSS

SEQ ID NO: 20064 - protein, 101 aa, Homo sapiens
AVYGGSFSGYYWSWIRQPPGKGLEWIGEINHSGSTNYNPSLKSRVTISVDTSKNQFSLKLSSVTAADTAVYYCARGFTVTTGYYYYGMDVWGQGTTVTVSS

SEQ ID NO: 20065 - protein, 96 aa, Homo sapiens
AASGFNFSSYGMSWVRQAPGKGLEWVSGISVSGTTTYYADSVKGRFTISRDNSKNTLYLQMNSLRADDTAVYYCAKVWVKLGGDYWGQGTLVTVSS

SEQ ID NO: 20066 - protein, 96 aa, Homo sapiens
GASGFNFSNYGMSWVRQAPGKGLEWVSGISGSGDTTYYADSVRGRFTISRDNSKNTVYLQMNSLRGGDTAVYYCAKVWVKLGGDYWGQGTLVTVSS

SEQ ID NO: 20067 - protein, 96 aa, Homo sapiens
AASGFTFSNYGMSWVRQAPGKGLEWVSGISGSGNTTSYADSVKGRFTISRDNSNNTVYLQMNSLRREDTAVYYCAKVWVKLGGDYWGQGALVTVSS

SEQ ID NO: 20068 - protein, 97 aa, Homo sapiens
AASGFTFTSYSMNWVRQAPGKGLEWVSSISSTSSYIYYADSVKGRFTISRDNAENSLYLQMNSLRAEDTAVYYCARDFYGDYSFDYWGQGTLVTVSS

SEQ ID NO: 20069 - protein, 97 aa, Homo sapiens
AASGFTFSSYSMNWVRQAPGKGLEWVSSISGNSGHIYYADSVKGRFTISRDNAKNSLSLQMNSLRAEDTAVYYCARDFYGDYSFDYWGQGTLVTVSS

SEQ ID NO: 20070 - protein, 95 aa, Homo sapiens
AASGFTFSQHWTSWVRQVPGKGLEWLTTINDYGSEKYYVDSVKGRFTVSRDNAKNSLYLQMNSLRVEDTAVYYCARFGHYVMDVWGQGTTVTVSS

SEQ ID NO: 20071 - protein, 95 aa, Homo sapiens
AASGFTFSSHWMTWVRQAPGKGLEWVANIKEDGSAKYYVDSVRGRFTISRDNAKNSLYLQMNSLRVEDTAVYYCARFGHYVMDVWGQGTTVTVSS

SEQ ID NO: 20072 - protein, 95 aa, Homo sapiens
AASGFTFSQHWMSWVRQAPGKGLEWLITTNDYGSEKYYVDSVKGRFTVSRDNAKNSLYLQMNSLRVEDTAVYYCARFGHYVMDVWGQGTMVTVSS

SEQ ID NO: 20073 - protein, 98 aa, Homo sapiens
AASGFTFRSYAMHWVRQAPGKGLEWVAFLWYDGSNKHYADSVKGRFTISRDNSKNTVSLQMDSLRAEDTAVYYCVGDPPNSGYAFDIWGQGTMVTVSS

SEQ ID NO: 20074 - protein, 98 aa, Homo sapiens
AASGFTFRSYAMHWVRQAPGKGLEWVVFLWYDGSNKHYADSVKGRFTISRDNSKNTVSLQMDSLRAEDTAVYYCVGDPPNSGYAFDIWGQGTMVTVSS

SEQ ID NO: 20075 - protein, 98 aa, Homo sapiens
VASAFSFRTYGMHWVRQAPGKGLEWVAFIWSDEIHRYYADSVKDRFTVSRDNSKHTLDLQMNSLRVEDSGIYYCVGDPPNSGYAFDIWGQGTTVTVSS

SEQ ID NO: 20076 - protein, 98 aa, Homo sapiens
AASGFNFRTYGMHWVRQAPGKGLEWVAFIWFDGDNKFYADSVKGRFTISRDNSKNSLYLQMNSLRVEDTAVYYCVGDPPNSGYAFDIWGQGTMVTVSS

SEQ ID NO: 20077 - protein, 92 aa, Homo sapiens
ASGYTFTTYVIHWMRQAPGQSLEWMGWVSTGSGNTRYSQKFQGRVTFTRDTSATTAYMELSSLRSEDTAVYYCARGNNLDYWGQGTLVTVSS

SEQ ID NO: 20078 - protein, 92 aa, Homo sapiens; identical to SEQ ID NO: 20077

SEQ ID NO: 20079 - protein, 92 aa, Homo sapiens
ASGYTFTNYGLHWMRQAPGQGLEWMGWINTDSGNTKYSQKFQGRVAITRDTSASTAYMELSSLRSEDTAVYYCARGNNLDYWGQGSLVTVSS

SEQ ID NO: 20080 - protein, 92 aa, Homo sapiens
VASGFTLSNHAMSWFRQTPGKGLEWVSVIGASGAIVYYEDSVKGRFTTSRDTSKNMAFLQMNGLRDDDTAVYYCAKGRLDSWGQGTLVIVSS

SEQ ID NO: 20081 - protein, 92 aa, Homo sapiens
AASGFTFSSYAMGWVRQAPGKGLEWVSVINNGGSSTYYADSVKGRFTISRDNSKNTLFLQMNSLRAEDTAVYYCAKGRLDSRGQGTLVTVSS

SEQ ID NO: 20082 - protein, 94 aa, Homo sapiens
TVSGDSVSSASYYWSWIRQSPGKGLEWIGYVYNRGNTNYNPSLKSRVAISVDTSKNQFSLKLRSVTTADTAVYYCARGLQVDYWGLGTLVTVSS

SEQ ID NO: 20083 - protein, 93 aa, Homo sapiens
VSGDSVSSASYYWSWIRQPPGKGLEWIGYIYNSGTTNYNPSLKSRVTISVDASKNQFSLKVSSVTAADTAVYYCARGLQVDYWGQGTLVTVSS

SEQ ID NO: 20084 - protein, 94 aa, Homo sapiens
TVSSDSLSSASYYWSWIRQPPGKGLEFIGYTYYGGSPNYNPSLKSRVTISVDTSKNQFSLKLSSVTAADTAVYYCARGLQVDYWGRGTLVTVSS

SEQ ID NO: 20085 - protein, 94 aa, Homo sapiens
TVSGDSVSSASYYWSWIRQSPGKALEWIGYVYNRDTTNYNPSLKSRVAISVDTSKNQFSLKLRSVTTADTAVYYCARGLQVDYWGQGTLVTVSS

SEQ ID NO: 20086 - protein, 94 aa, Homo sapiens
TVSGDSLSSASYYWSWIRQPPGKGLEWIGYTYYGGSPNYNPSLKSRVTISVDTSKNQFSLKLSSVTAADTAVYYCARGLQVDYWGRGTLVTVSS

SEQ ID NO: 20087 - protein, 94 aa, Homo sapiens
TVSGDSVSSPSYYWSWIRQPPGKALEFIGYIYNSGSTNYNPSLKSRVTISVDTSKNQFSLKLSSVTAVDTAVYYCARGLQVDYWGQGALVTVSS

SEQ ID NO: 20088 - protein, 94 aa, Homo sapiens
TVSGDSVSSNSYYWSWIRQPPGKGLEWIGYIYSIVNSNYNPSLKSRVTISVDTSKNQFSLKLSSVTAADTAVYYCARGLQVDYWGQGTLVTVSS

SEQ ID NO: 20089 - protein, 93 aa, Homo sapiens; identical to SEQ ID NO: 20083

SEQ ID NO: 20090 - protein, 94 aa, Homo sapiens
TVSGDSLSSPSYYWSWIRQPPGKGLEWIGFTHYGGSPNYNPSLKSRVTISVDTSKNQFSLKLSSVTAADTAVYYCARGLQVDYWGRGTLVTVSS

SEQ ID NO: 20091 - protein, 97 aa, Homo sapiens
VGSGFTFDNHAMHWVRQVPGKGLEWVSGISWNSGTLGYADSVKGRFTISRDNAKNSLYLRMNSLRPEDTALYYCAKDSGGPYYFDSWGQGALVTVSS

SEQ ID NO: 20092 - protein, 97 aa, Homo sapiens
VGSGFTFDNHAMHWVRQVPGKGLEWVSGISWNSGSLGYADSVKGRFTISRDNAKNSLFLRMNSLKPEDTALYYCAKDSGGPYYFDSWGQGALVTVSS

SEQ ID NO: 20093 - protein, 97 aa, Homo sapiens
VASGFTFDNHAMHWVRQVPGKGLEWVSGISWNSGTLGYADSVEGRFTISRDNAKNSLFLRMNSLRPEDTALYYCAKDSGGPYYFDSWGQGALVTVSS

SEQ ID NO: 20094 - protein, 97 aa, Homo sapiens
VASGFTFDNHAMHWVRQVPGKGLEWVSGISWNSGTLGYADSVEGRFTISRDNAKNSLYLRMNSLRPEDTALYYCAKDSGGPYYFDSWGQGALVTVSS

SEQ ID NO: 20095 - protein, 97 aa, Homo sapiens; identical to SEQ ID NO: 20091

SEQ ID NO: 20096 - protein, 97 aa, Homo sapiens; identical to SEQ ID NO: 20091

SEQ ID NO: 20097 - protein, 97 aa, Homo sapiens; identical to SEQ ID NO: 20092

SEQ ID NO: 20098 - protein, 97 aa, Homo sapiens
VGSGFTFDNHAMHWVRQVPGKGLEWVSGISWNSGILGYADSVKGRFTISRDNAKNSLFLRMNSLRPEDTALYYCAKDSGGPYYFDSWGQGALVTVSS

SEQ ID NO: 20099 - protein, 97 aa, Homo sapiens; identical to SEQ ID NO: 20093

SEQ ID NO: 20100 - protein, 97 aa, Homo sapiens
AASGFTFNDHAMHWVRQAPGKGLEWVSGISWNSGTLGYADFVKGRFTISRDNAKNSLYLQMNSLRPEDTAFYYCAKDSGGPYYFDSWGQGSLVTVSS

SEQ ID NO: 20101 - protein, 93 aa, Homo sapiens
AASGFIFSNYAMNWVRQAPGKGLEWVSSINDGGVGTYYADSVKGRFTISRDNSKNTLYLQMSSLRADDTAVYYCAAGRGFDYWGQGTLVTVSS

SEQ ID NO: 20102 - protein, 93 aa, Homo sapiens
AASGFTFSNYAMNWVRQAPGKGLEWVSSINDGGVGTYYADSVKGRFTISRDNSKNTLYLQMNSLRADDTAVYYCAAGRGFDYWGQGTLVTVSS

SEQ ID NO: 20103 - protein, 93 aa, Homo sapiens
AASGFIFGNYAMNWVRQAPGKGLEWVSSINDGGVGTYYADSVKGRFTISRDNSKNTLYLQMSSLRADDTAVYYCAAGRGFDYWGQGTLVTVSS

SEQ ID NO: 20104 - protein, 93 aa, Homo sapiens
AASGFTFSNYAMNWVRQAPGKGLEWVSSINDGGVGTYYADSVKGRFTISRDNSKNTLYLQMSSLRADDTAVYYCAAGRGFDYWGQGTLVTVSS

SEQ ID NO: 20105 - protein, 93 aa, Homo sapiens
AASGFTFSSYAMNWVRQAPGKGLEWVSAINGGGGSPYYADSVKGRFTTSRDNSKNTLYLQMNSLRAEDTAVYYCAAGRGFDYWGQGALVTVSS

SEQ ID NO: 20106 - protein, 99 aa, Homo sapiens
AATGFTFSSYVMSWVRQAPGKGLEWFSAITGGSDDTYYADYVKGRFTISRDNSRNILFLQMNSLRAEDTAIYYCAKGSGDSRPYYFDYWGQGTLVTVSS

SEQ ID NO: 20107 - protein, 99 aa, Homo sapiens
VASGFTFSYYVMSWVRQAPGKGLEWISAITGDGGSTYYADSVKGRFSVSRDSSKNTLFLQMNNLGTEDTAIYYCAKGSGDSRPYYFDYWGQGTLVTVSS

SEQ ID NO: 20108 - protein, 99 aa, Homo sapiens
VASGFTFSHYVMSWVRQAPGKGLEWISAISGNGGYTYYADSVKGRFSVSRDSSKNTLFLQMNNLGTEDTAIYYCAKGSGDSRPYYFDYWGQGTLVTVSS

SEQ ID NO: 20109 - protein, 90 aa, Homo sapiens
AVYGGSFSSYYWSWIRQPPGKGLEWIGEINYSGSTNYNPSLKTRLTISVDTSKKQLSLRLVSVTAADTAVYYCARVQDYWGQGTLVSVSS

SEQ ID NO: 20110 - protein, 90 aa, Homo sapiens; identical to SEQ ID NO: 20109

SEQ ID NO: 20111 - protein, 90 aa, Homo sapiens
AVYGGSFSNYYWSWIRQPPGKGLEWIGEITHSGSTIYTPSLKSRVTMSLDTSNNQFSLKLTSVTAADTAVYYCARVQDYWGRGTLVTVSS

SEQ ID NO: 20112 - protein, 90 aa, Homo sapiens; identical to SEQ ID NO: 20109

SEQ ID NO: 20113 - protein, 96 aa, Homo sapiens
VASGFSVSNNYMNWVRQAPGKGLEWVSVLYNGDSRDYADSVKGRFTISGHDSKNIVYLHMNSLRDDDTAVYYCARGAYSGYDFDYWGQGSLVTVSS

SEQ ID NO: 20114 - protein, 96 aa, Homo sapiens
AASGFTVSSNYMSWVRQAPGKGLEWVSVIYSGGSTEHADSVKGRFTISRDNSKNTLYLQIKSLRAEDTAVYYCARGAYSGYDFDYWGQGTLVTVSS

SEQ ID NO: 20115 - protein, 96 aa, Homo sapiens
AASEFTVSSNYMSWVRQAPGKGLEWVSVIYSGGSTNYADSVKGRFTISRDNSKNTLYLQMNSLRAEDTAVYYCARGAYSGYDFDYWGQGILVTVSS

SEQ ID NO: 20116 - protein, 96 aa, Homo sapiens
AASGFTVSSNYMSWVRQAPGKGLEWVSVIYSGGSTNYADSVKGRVTISRDNSKNTLYLQMNSLRAEDTAVYYCARGAYSGYDFDYWGQGTLVTVSS

SEQ ID NO: 20117 - protein, 90 aa, Homo sapiens
TVSGGSISSYYWTWIRQPPGKGLEWIGYIYYSGSTNYNPSLKSRVTMSVDTSKNQFSLRLSSVTAADTAVYYCAGELDVWGQGTTVTVSS

SEQ ID NO: 20118 - protein, 90 aa, Homo sapiens
TVSGGSINTYYWTWIRQPPGKGLEWIGYIYYTGSTNYNPSLKSRVTISVDTSKNEFSLKLTSVTAADTAVYYCAGELDVWGQGTTVTVSS

SEQ ID NO: 20119 - protein, 90 aa, Homo sapiens
TVSGGSINTYYWTWIRQPPGKGLEWIGYIYYTGSTNYNPSLKSRVTMSVDTSKNQFSLELSSVTAADTAVYYCAGELDVWGQGTTVTVSS

SEQ ID NO: 20120 - protein, 90 aa, Homo sapiens
TVSGGSIRTYYWTWIRQPPGKGLEWIGYIYYTGSTNYNPSLKSRLTMSVDMSKNQFSLKLSSVTAADTAVYYCAGELDVWGQGTTVTVSS

SEQ ID NO: 20121 - protein, 90 aa, Homo sapiens; identical to SEQ ID NO: 20117

SEQ ID NO: 20122 - protein, 90 aa, Homo sapiens
TVSGGSISTYYWTWIRQPPGKGLEWIGYIYYTGSTSYNPSLKSRVTISVDTSKNQFSLKLSSVTAADTAVYYCAGELDVWGQGTTVTVSS

SEQ ID NO: 20123 - protein, 90 aa, Homo sapiens; identical to SEQ ID NO: 20122

SEQ ID NO: 20124 - protein, 89 aa, Homo sapiens
VSGGSISSYYWSWIRQPPGKGLEWIGYIYYSGSTNYNPSLKSRVTISVDTSKNQFSLKLRSVTAADTAVYYCAGELDVWGKGTTVTVSS

SEQ ID NO: 20125 - protein, 90 aa, Homo sapiens; identical to SEQ ID NO: 20118

SEQ ID NO: 20126 - protein, 90 aa, Homo sapiens; identical to SEQ ID NO: 20119

SEQ ID NO: 20127 - protein, 93 aa, Homo sapiens
TVSGGSSSSHKWSWIRQSPGKGLEWIGYITFSGSTNYNPSLTSRVSISVDTSKSQVTLHLSSVTAADTAVYYCAREWSAFDFWGQGTQVTVSS

SEQ ID NO: 20128 - protein, 93 aa, Homo sapiens
TVSGGSSSSHKWNWIRQSPGKGLEWIGLIYFSGTTIYNPSLRSRVSMSVDTSKSQVTLNLSSVTAADTAVYYCAREWSAFDFWGQGTQVTVSS

SEQ ID NO: 20129 - protein, 93 aa, Homo sapiens
TVSGGSLSHYKWSWIRQPPGKGLEWIGYVYASGDINYNPSLKGRATILVDTSKNQFSLRVLSVTAADTAVYYCAREWSAFDFWGQGTLVTVSS

SEQ ID NO: 20130 - protein, 93 aa, Homo sapiens
TVSGGSLNIYKWSWIRQPPGKGLEWLAYVYSSGSAAYNPSLENRLSVLVDTSKNQFSLKLNSVTAADTAVYYCAREWSAFDFWGQGILVTVSS

SEQ ID NO: 20131 - protein, 102 aa, Homo sapiens
AASGFTFSSYSMNWVRQAPGKGLEWVSSISSSSSYIYYADSMKGRFTISRDNAKNSLFLQMNSLRAEDTAVYYCARAYDFWSGYPGGAFDIWGQGTMVTVSS

SEQ ID NO: 20132 - protein, 102 aa, Homo sapiens
AASGFTLSSYSMNWVRQAPGKGLEWVSSISSNSNYIYYADSVKGRFTISRDNAKNSLYLQMNSLRAEDTAVYYCARAYDFWSGYPGGAFDIWGQGTMVTVSS

SEQ ID NO: 20133 - protein, 99 aa, Homo sapiens
AASGFTFSSYSMNWVRQAPGQGLEWVSAISSSSSYKDYADSVKGRFTMSRDNAKNSLYLQMSSLRAEDTAVYYCARFYYGSGSPQTDYWGQGTLVTVSS

SEQ ID NO: 20134 - protein, 99 aa, Homo sapiens
AASGFTFSSYSMNWVRQAPGKGLEWVSAISSSSSYKDYADSVKGRFTMSRDNAKNSLYLQMSGLRAEDTAVYYCARFYYGSGSPQTDYWGQGTLVTVSS

SEQ ID NO: 20135 - protein, 99 aa, Homo sapiens; identical to SEQ ID NO: 20133

SEQ ID NO: 20136 - protein, 99 aa, Homo sapiens
EASGFTFSSYSMNWVRQAPGKGLEWISSITSSSGYRSYADSLKGRFTISRDNAKNSLYLHMNSLRAEDTAVYYCARFYYGSGSPQTDYWGPGIMVTVSS

SEQ ID NO: 20137 - protein, 99 aa, Homo sapiens
EASGFTFSSYSMNWVRQAPGKGLEWVSHITSSSGYRSYADSLKGRFTISRDNAKNSLYLHMNNLRAEDTAVYYCARFYYGSGSPQTDYWGQGIMVTVSS

SEQ ID NO: 20138 - protein, 98 aa, Homo sapiens
TVSGDSISSGAYYWGWIRQSPGKGLEWIGSIYFTGSTHYNPSLESRLTISVDTSQTHFSLKVSSVTAADTALYYCARHGGSAAGFDYWGQGTLVTVSS

SEQ ID NO: 20139 - protein, 98 aa, Homo sapiens
SVSDASISSSNYYWGWIRQPPGKGLEWIGSIHYTGTTYYNPSLKSRVTISADTSKNQFSLRLSSVTAADRSLYYCARHGGSAAGFDYWGQGTLVTVSS

SEQ ID NO: 20140 - protein, 95 aa, Homo sapiens
AASGFTLRTHWMHWVRQAPGKGLVWVSVINTDGSSTNYADSVKGRFTISRDNAKNTLYLQMNSLRAEDTAVYYCARGRAGSLDYWGQGTLVTVSS

SEQ ID NO: 20141 - protein, 95 aa, Homo sapiens
AAAGFTLSNYWMYWVRQGPGKGLVWVSRINNDGSGTGHADSVKGRFTISRDNAKNTLYLQMNSLRDEDTAVYYCARGRAGSLDYWGQGTLVTVSS

SEQ ID NO: 20142 - protein, 97 aa, Homo sapiens
AGSGFTFSDSAMHWVRQASGKGLEWVGRIRSRANGYATDYAASVKGRFTISRDESKNTAYLQMNSLKTEDTAVYYCTRPYYDNTGYWGQGILVTVSS

SEQ ID NO: 20143 - protein, 97 aa, Homo sapiens
AGSGFTFSDSAMHWVRQASGKGLEWVGRIRSRANRYATDYAASVMGRFTISRDDSKNTAYLQMNSLKTEDTAVYYCTRPYYDNTGYWGQGTLVTVSS

SEQ ID NO: 20144 - protein, 97 aa, Homo sapiens
AGSGFTFSDSAMHWVRQASGKGLEWVGRIRSRPNGYATDYAASVKGRFTISRDDSKNTAYLQMNSLKSEDTAVYYCTRPYYDNTGYWGQGTLVTVSS

SEQ ID NO: 20145 - protein, 97 aa, Homo sapiens
AGSGFTFSDSAIHWVRQASGKGLEWVGRIRSRPNGYATDYAASVKGRFTISRDDSKNTAYLQMNSLKTEDTAVYYCTRPYYDNTGYWGQGTLVTVSS

SEQ ID NO: 20146 - protein, 97 aa, Homo sapiens; identical to SEQ ID NO: 20143

SEQ ID NO: 20147 - protein, 97 aa, Homo sapiens
AGSGFTFSDSAIHWVRQASGKGLEWVGRIRSRANGYATDYAASVMGRFSISRDDSKNTAYLQMNSLKTEDTAVYYCTRPYYDNTGYWGQGTLVTVSS

SEQ ID NO: 20148 - protein, 97 aa, Homo sapiens
AASGFTFSGSAIHWVRQASGKGLEWVGRIRSKPNNYATDYAASVTGRFTISRDDSKNTAYLQMNSLRTEDTAMYYCTRPYYDNTGYWGQGTLVTVSS

SEQ ID NO: 20149 - protein, 97 aa, Homo sapiens
AASGFTFSGSAIHWVRQASGKGLEWVGRIRSKPNNYATDYAASVTGRFTISRDDSKNTAYLQMNSLKTEDTAMYYCTRPYYDNTGYWGQGTLVTVSS

SEQ ID NO: 20150 - protein, 97 aa, Homo sapiens; identical to SEQ ID NO: 20147

SEQ ID NO: 20151 - protein, 97 aa, Homo sapiens
AGSGFTFSDSAMHWVRQASGKGLEWVGRIRSRANGYATDYAASVKGRFTISRDNSKNTAYLQMNSLKTEDTAVYYCTRPYYDNTGYWGQGILVTVSS

SEQ ID NO: 20152 - protein, 97 aa, Homo sapiens
AGSGFTFSDSAMHWVRQASGKGLEWVGRIRSRPNGYATDYAASVRGRFTISRDDSKNTAYLQMNSLKTEDTAVYYCTRPYYDNTGYWGQGTLVTVSS

SEQ ID NO: 20153 - protein, 99 aa, Homo sapiens
AASGFTFRSYTMNWVRQAPGKGLEWVSSISSTGTFTYYADSVQGRFTIYRDNAKNSLYLQMNTLRTDDTAIYYCARGGWELRSDYFQHWGQGTLVTVSS

SEQ ID NO: 20154 - protein, 99 aa, Homo sapiens
AASGFTFRSYTMNWVRQAPGKGLEWVSSISSTGTFTYYADSVQGRFTIYRDNAKNSLYLQMSSLRTDDTAIYYCARGGWELRSDYFQHWGQGTLVTVSS

SEQ ID NO: 20155 - protein, 99 aa, Homo sapiens
AASGFTFSIYNMNWVRQAPGKGLEWVSSISSSGSYKGYADSVKGRFTISRDNAKNSLYLQMNSLRADDTAVYYCARGGWELRSDYFQHWGQGTLVTVSS

SEQ ID NO: 20156 - protein, 97 aa, Homo sapiens
TVSGGSISSHYWSWLRQPPGKGLEWIGYIYYSANTNYNPSLKSRVTISVDTSKNQFSLKLSSVTAADTAVYYCARGTSDYYYGMDVWGQGTTVTVSS

SEQ ID NO: 20157 - protein, 97 aa, Homo sapiens
TVSGGSISSNYWSWIRQPPGKGLEWIGYIYYSGNTNYNPSLKSRVTISVDTSKNQFSLKLSSVTAADTAVYYCARGTSDYYYGMDVWGQGTTVTVSS

SEQ ID NO: 20158 - protein, 97 aa, Homo sapiens
TVSGGSISSHYWSWIRQPPGKGLEWIGYIYYSGNTNYNPSLKSRVTISVDTSKNQFSLKLSSVTAADTAVYYCARGTSDYYYGMDVWGQGTTVTVSS

SEQ ID NO: 20159 - protein, 100 aa, Homo sapiens
AASGFTFSSYGMHWVRQAPGKGLKWVAVIWYDGSNKYYADSVKGRFTISRDNSKNTLYLQMNSLRAEDTAVYYCARDLYSGYDSNWFDPWGQGTLVTVSS

SEQ ID NO: 20160 - protein, 100 aa, Homo sapiens
AASGFIFSSYGMHWVRQAPGKGLEWVAVIWYDGSNKYYADSVKGRFTISRDNSKNTLYLQMNSLRAEDTAVYYCARDLYSGYDSNWFDPWGQGTLVTVSS

SEQ ID NO: 20161 - protein, 100 aa, Homo sapiens
AASGFTFSSYGMHWVRQAPGKGLEWVAVIWYDGSNKYYADSAKGRFTISRDNSKNTLFLQMNSLRAEDTAVYYCARDLYSGYDSNWFDPWGQGTLVTVSS

SEQ ID NO: 20162 - protein, 99 aa, Homo sapiens
AASGFAFSSYGIHWVRQAPGKGLEWVALISYDGGNKYYTDSVKGRFTISRDNSKNTLYLQMNSLRVDDTAIYYCARGSINMLRGVPDYWGQGTLVTVSS

SEQ ID NO: 20163 - protein, 99 aa, Homo sapiens
AASGFTFSSYAMHWVRQAPGKGLEWVAIISYDGSNKYYADSVKGRFTISRDKSKNTVYVQMNSLRAEDTAVYYCARGSINMLRGVPDYWGQGTLVTVSS

SEQ ID NO: 20164 - protein, 99 aa, Homo sapiens
AASGFAFSSYGIHWVRQAPGKGLEWVALISYDGSNKYYADSVRGRFTISRDNSKNTLSLQMDSLRVDDTAIYYCARGSINMLRGVPDYWGQGTLVTVSS

SEQ ID NO: 20165 - protein, 102 aa, Homo sapiens
EVSGFTFSRHWMSWVRQAPGKGLEWVATINQDGSETHYVDAVKGRFTISRDNTKNSLNLQMNILRAEDSAVYYCARKLYYYDTSDSGWFDPWGHGTLVNVSS

SEQ ID NO: 20166 - protein, 102 aa, Homo sapiens; identical to SEQ ID NO: 20165

SEQ ID NO: 20167 - protein, 102 aa, Homo sapiens
AASGFTFDSYWMSWVRQAPGKGLEWVASIKQDGSEKYYVDSVKGRFTISRDNAQNSLFLQMNSLRAEDTAIYYCARKLYYYDTSDSGWFDPWGQGTLVTVSS

SEQ ID NO: 20168 - protein, 91 aa, Homo sapiens
AASGFTFSSYWMHWVRQAPGKGLVWVSRINTDGSTTTYADSVNGRFTISRDNAKNMLYLQMNSLRAEDTAVYYCARDWDYWGQGTLVTVSS

SEQ ID NO: 20169 - protein, 91 aa, Homo sapiens
AASGFTFSSYWMHWVRQAPGKGLVWVSRIHSDGSSTTYADSVKGRFTISRDNAKNTLYLQMNSLRAEDTAVYYCARDWDYWGQGTLVTVSS

SEQ ID NO: 20170 - protein, 95 aa, Homo sapiens
AASGFTLSSYWLHWVRQTPEKGLVWVSRINEDGRTTNYADSVKGRFTISRDNAKNTLYLQMNSLREEDTAVYYCARDLSGKFDYWGQGTLVTASS

SEQ ID NO: 20171 - protein, 95 aa, Homo sapiens
AASGFTFSSYWMHWVRQVPGKGLVWVSRIDEYGTTINYADSVKGRFTISRDNAKNTLYLQMNSLSPEDTAVYYCARDLSGKFDYWGHGTLVTVSS

SEQ ID NO: 20172 - protein, 95 aa, Homo sapiens
AASGFTFRSYWMHWVRQVPGKGLVWVSRIDNDGTIINYADSVEGRFTISRDNAKNTLYLQMNSLRAEDTAVYYCARDLSGKFDYWGQGTLVTVSS

SEQ ID NO: 20173 - protein, 92 aa, Homo sapiens
ASGYTFTNYAMNWVRQAPGQGLEWMGWINTNTGNPTYAQGFTGRFVFSLDTSVSTAYLQISSLKAEDTAVYYCARDRIMDVWGQGTTVTVSS

SEQ ID NO: 20174 - protein, 92 aa, Homo sapiens; identical to SEQ ID NO: 20173

SEQ ID NO: 20175 - protein, 92 aa, Homo sapiens
ASGYTFTHYAMNWVRQAPGQGLEWMGWINTNTGNPTYAQGFAGRFVFSLDTSVSTAYLQISSLKAEDTAVYYCARDRIMDVWGQGTTVTVSS

SEQ ID NO: 20176 - protein, 92 aa, Homo sapiens
ASGYTFSSHTMSWVRQAPGQGLEWMGWINCKSGNPAYAQGFIGRFVFSLDTSVSTAYLQISSLEAEDTAVYYCARDRIMDVWGRGTTVTVSS

SEQ ID NO: 20177 - protein, 97 aa, Homo sapiens
TVSGGSISGSSYYWGWIRQPPGKGLEWIGSIYHRGRTNYNPSLKSRVTISVDTSKNQFSLKLSSVTAADTAIYYCARRGTWELLDYWGQGTLVTVSS

SEQ ID NO: 20178 - protein, 97 aa, Homo sapiens
TVSGGSVSSSSYYWGWIRQPPGKGLEWIGSIYYSGNTYYNPSLKSRVTISVDTSKNQFSLKLSSVTAADTAVFYCARRGTWELLDYWGQGTLVTVSS

SEQ ID NO: 20179 - protein, 97 aa, Homo sapiens; identical to SEQ ID NO: 20178

SEQ ID NO: 20180 - protein, 105 aa, Homo sapiens
AASGFTFSDHFMDWVRQAPGKGLEWVGRIRNKAKSYATEYVASVKGRFTISRDDSKSSLYLQMNSLKTEDTAVYYCVRVNYFDRSGYSLDAFDIWGQGTRVTVSS

SEQ ID NO: 20181 - protein, 105 aa, Homo sapiens
AASGLIFSDYYFDWVRQAPGKGLEWVGRIRRKPNGYTTNYAASVEGRFSISRDDSKNSAYLQMNSLKIEDTAVYYCVRVNYFDRSGYSLDAFDIWGQGTLVTVSS

SEQ ID NO: 20182 - protein, 94 aa, Homo sapiens
AASGLVISGSDMHWVRQASGKGLEWVGRIRSKANNYATVYGASMKGRISISRDDSKDTAYLEVNSLKVEDTAVYYCTRIPYDYWGQGTLVTVSS

SEQ ID NO: 20183 - protein, 93 aa, Homo sapiens
AASGFTFSASDMHWVRQASGKGLEWVGRIRSKASSYATVYAASVKGRFTISRDDSKNTAYLQMDSLKTEDSAVYFCTRIPYDYWGQGTLVTVS

SEQ ID NO: 20184 - protein, 97 aa, Homo sapiens
ASGFAFSSYTMNWLRQAPGKGLEWVASISSQSGYIYYADSVKGRFTISRENAENSLYLQMNRLRAEDTAVYHCARDLGRSGDNFDYWGQGTLVTVSS

SEQ ID NO: 20185 - protein, 98 aa, Homo sapiens
AATGFTFSSYTMNWVRQAPGKGLEWVSSISSSSGYIYYADSVKGRFTISRDNAKNSLYVQMSSLRDEDTAVYYCARDLGRSGDNFDYWGQGTLVTVSS

SEQ ID NO: 20186 - protein, 96 aa, Homo sapiens
AASGFIFSTYGMHWVRQAPGEGLEWVGIIWSDGSHAHYADSVKGRFIISRDNSKNTLFLQMNGLRVEDTAVYYCARDTSIGAPDYWGQGTLVTVSS

SEQ ID NO: 20187 - protein, 96 aa, Homo sapiens
AASGFTFSSFGMHWVRQAPGEGLEWVAIIWSDGSNAEYEDSVKGRFTISRDNSRNTLFLQMNGLRVEDTAMYYCARDTSIGAPDYWGQGTLVIVSS

SEQ ID NO: 20188 - protein, 96 aa, Homo sapiens
AASGFTFSSFGMHWVRQAPGKGLEWVAIIWYDGSNKYYADSVKGRFTISRDNSKNTLYLQMDSLRAEDTAVYYCARDTSIGAPDYWGQGTLVTVSS

SEQ ID NO: 20189 - protein, 96 aa, Homo sapiens
SASGFTFSGYAMHWVRQAPGKGLEYVSSIRPSGDTTYYADSMRGRFTVSRDNSKNTLYLQMSSLRPEDTAVYYCVKETLRLAFDYWGQGTLVTVSS

SEQ ID NO: 20190 - protein, 96 aa, Homo sapiens
SASGFAFSNLAMHWVRQAPGNGLEFVSAISTNGDTTYYGHSVKGRFTVSRDNSKNTLYLQMSSLRPEDTAVYYCVKETLRLAFDYWGQGTLVTVSS

SEQ ID NO: 20191 - protein, 97 aa, Homo sapiens
VSGGSITNYYWSWIRQSPGKGLEWMGYMYYGGTTRYNPSLKSRLTISVDTSKNQCLLKLNSVTAADTAVYYCARQSGIIGTTDWFDPWAREHWSPSP

SEQ ID NO: 20192 - protein, 99 aa, Homo sapiens
SVSGGSISSHYWSWIRQSPGKGLEWIGYISYTGSTKYNASLKSQVTISIDTSKNQVSLRLSSVTAADTAVYYCARQSGIIGTTDWFDPWGQGTLVTVSS

SEQ ID NO: 20193 - protein, 100 aa, Homo sapiens
VASGFTFSSYWMSWVRQAPGKGLEWVANIKQDGSEKNYVDSVKGRFTIFRDNAKNLLYLQMNSLRVEDTAEYYCARDGWGSTSYNWFDPWGQGTRVTVSS

SEQ ID NO: 20194 - protein, 100 aa, Homo sapiens
AASGFTFSSYWMAWVRQAPGKGLEWVANINQDGSERYYVDSVKGRFTISRDNAKNSMYLQMNSLRAEDTAVYYCARDGWGSTSYNWFDPWGQGTLVTVSS

SEQ ID NO: 20195 - protein, 99 aa, Homo sapiens
AASGFTFSSYWMAWVRQAPGRGLEWVANINQDGSERYYVDSVKGRFTISRDNAKNSMYLQMNSLRAEDTAVYYCARDGWGSTSYNWFDPWGQGTLVTVS

SEQ ID NO: 20196 - protein, 94 aa, Homo sapiens
VSGGSIGNHYWSWLRQPPGKGLEWIAYIYSSGSTNYNPSLKSRVTISVDTSKNQFSLRLTSVTAADTALYYCARGPWTEYFQLWGQGTLVTVSS

SEQ ID NO: 20197 - protein, 94 aa, Homo sapiens
VSGGSIGNHYWSWLRQPPGKGLEWIAYIYSSGSTNYNPSFRSRVTISVDTSKNQFSLRLTSVTAADTALYFCARGPWTEYFQLWGQGALVTVSS

SEQ ID NO: 20198 - protein, 95 aa, Homo sapiens
TVSGGSISSYYWSWIRQPPGKGLEWIAYIYSSGSTNYNPSLKSRVTISVDTSKNQFSLRLNSVTAADTAVYYCARGPWTEYFQLWGQGTLVTVSS

SEQ ID NO: 20199 - protein, 94 aa, Homo sapiens
TVSGGSISSYYWSWIRQPPGKGLEWIAYIYSSGSTNYNPSLKSRVTISVDTSKNQFSLRLNSVTAADTAVYYCARGPWTEYFQLWGQGTLVTVS

SEQ ID NO: 20200 - protein, 94 aa, Homo sapiens; identical to SEQ ID NO: 20196

SEQ ID NO: 20201 - protein, 95 aa, Homo sapiens
TVSGGSISSYYWSWIRQPPGKGLEWIAYIYSSGSTNYNPSLKSRVTISVDTSKNQFSLRLNSVTAADTAMYYCARGPWTEYFQLWGQGTLVTVSS

SEQ ID NO: 20202 - protein, 94 aa, Homo sapiens
AVYGGSFTNYHWSWIRQSPDKGLEWIGDVNPSGTSTYRPSLKTRVSISRDPSKNQISLNLRFVTAADSAVYYCTRGVFHRFDPWGRGTPVIVSS

SEQ ID NO: 20203 - protein, 94 aa, Homo sapiens
AVYGGSFSNYHWSWIRQSPDKGLEWIGDVNPSGTSTYRPSLKTRVSISRDPSKNQISLNLHFVTAADSAVYYCTRGVFHRFDPWGRGTPVIVSS

SEQ ID NO: 20204 - protein, 94 aa, Homo sapiens
AVYGTSFSNYHWSWIRQSPGKGLEWIGDVNPSGTSSYRPSLKSRVSISRDPSKNQISLSLRFVTAADTAVYYCTRGVFHRFDPWGRGTPVTVSS

SEQ ID NO: 20205 - protein, 94 aa, Homo sapiens
AVYGGSFSNYHWSWIRQSPGKGLEWIGDVNPSGTSTYRPSLKTRVSISRDASKNQISLNLRFVTAADTAVYFCTRGVFHRFDPWGRGTPVTVSS

SEQ ID NO: 20206 - protein, 94 aa, Homo sapiens
AVYRGTFGGYHWSWLRQSPGKGLEWIGDVNGSGTTNYNSSLNRRVVISLDVSKNQFSLKMTSMTVADTAVYYCTRGVFHRFDPWGQGTLVTVSS

SEQ ID NO: 20207 - protein, 101 aa, Homo sapiens
TVSGGSISSSNNYWGWIRQPPGKGLEWIGSIYYSGNTYHNPSLKSRVTISVDTSKNQFSLKLSSVTAADTAVYYCARHCSGGSCYSCSDYWGQGTLVTVSS

SEQ ID NO: 20208 - protein, 101 aa, Homo sapiens; identical to SEQ ID NO: 20207

SEQ ID NO: 20209 - protein, 101 aa, Homo sapiens
TVSGGSISGNSYYWGWIRQPPGKGLEWIGSIYYSGSTYYNPSLKSRVTISVDTSKTQFSLKLTSVTAADTAVYYCARHCSGGSCYSCSDYWGQGTLVTVSS

SEQ ID NO: 20210 - protein, 99 aa, Homo sapiens
AASGFSFSDYYMDWVRQAPGKGLEWVGRSRNKANSYTTDYAASVKGRFTTSRDASMNSLYLQMNSLKTEDTAVYYCVRVSSGGNYFDYWGQGTLVTVSS

SEQ ID NO: 20211 - protein, 99 aa, Homo sapiens
VASGFIFSDYYMDWVRQAPGKGLEWVGRSRNKVNSYSTDYAASVKGRFSVSRDVSKNSLYLQMSSLKTEDTAVYYCVRVSSGGNYFDYWGQGTLVTVSS

SEQ ID NO: 20212 - protein, 99 aa, Homo sapiens
AASGFMFSDYYIDWVRQAPGKGLEWVGRSRNKANSYTTEYAASVKGRFSVSRDVSKNSLYLQMSSLKTEDTAVYYCVRVSSGGNYFDYWGQGTLVTVSS

SEQ ID NO: 20213 - protein, 99 aa, Homo sapiens
AASGFIFSDYYMDWVRHAPGKGLEWIGRSRNKANSYSTDYAASVKGRFSVSRDVSKNSLYLQMSGLKTEDTAVYYCVRVSSGGNYFDYWGQGTLVTVSS

SEQ ID NO: 20214 - protein, 99 aa, Homo sapiens
AASGFIFSDYYMDWVRHAPGKGLEWIGRSRNKANSYSTDYAASVKGRFSVSRDVSKNALYLQMSGLKTGDTAVYYCVRVSSGGNYFDYWGQGTLVTVSS

SEQ ID NO: 20215 - protein, 99 aa, Homo sapiens
AASGFIFVDYYIDWVRQAPGKGLEWVGRSRNKANSYSTEYAASVKGRFSVSRDVSMNSLYLQMSSLKTEDTAVYYCVRVSSGGNYFDYWGQGTLVTVSS

SEQ ID NO: 20216 - protein, 99 aa, Homo sapiens
AASGFIFSDYYMDWVRQAPGKGLEWVGRSRNKVNSYSTDYAASVKGRFSVSRDVSKNSLYLQMSSLKTEDTAVYYCVRVSSGGNYFDYWGQGTLVTVSS

SEQ ID NO: 20217 - protein, 96 aa, Homo sapiens
AASGFTFSDYGMHWVRQAPGKGLEWVSVISYDGSNKYYADSVKGRITISRDNSKNTLYLQMNSLRAEDTAVYYCVKSMGAIDLDYWGQGTLVTVSS

SEQ ID NO: 20218 - protein, 96 aa, Homo sapiens
AASGFTFSGFAIHWVRQAPGKGLEWVAVVSSDGTSKNYADSVKGRFTISRDNSKNTLFLQMDSLRPEDTALYYCVKSMGAIDLDYWGQGTLVTVSS

SEQ ID NO: 20219 - protein, 96 aa, Homo sapiens
ISGDSVSATSSAWNWIRQSPSRGLEWLGRTYYRTKWNTDYVVSVKGRITISPDTSKNQFSLHLNSVTPDDTAVYYCARGDYYFDFWGQGTLVTVSS

SEQ ID NO: 20220 - protein, 96 aa, Homo sapiens
ISGDSVSATSSAWNWIRQSPSRGLEWLGRTYYRTKWNNDYVVSVKGRITISPDTSKNQFSLHLNSVTPDDTAVYYCARGDYYFDFWGQGTLVTVSS

SEQ ID NO: 20221 - protein, 96 aa, Homo sapiens
ISGDSVSSISAAWNWIRQSPSRGLEWLGRTYYRSKWNNDYAVSVKSRITINPDTTKNQFSLQLNSVTPEDTAVYYCARGDYYFDFWGQGTLVTVSS

SEQ ID NO: 20222 - protein, 95 aa, Homo sapiens
AASGFTFSNYEMNWVRQAPGKGLEWISYITTSDSTRYYADSVKGRFTISRDNAKKSLYLQMNNLRAEDMAVYYCARDFGGYSDYWGRGTLVTVSS

SEQ ID NO: 20223 - protein, 95 aa, Homo sapiens
VASGFTFSRYEMKWVRQAPGKGLEWVSYIDSSGSVVFYGDSVEGRFRISRDNARNSLYLQMNSLRVEDTAVYYCARDFGGYSDYWGQGTLVTVSS

SEQ ID NO: 20224 - protein, 99 aa, Homo sapiens
VSGGSISPYYWSWIRQPPGKGLEWIGYIYYSGSTNYNPSLKSRVTMSVDTSKNQFSLRLRSLTTADTALYFCARGPLRYSSGWYYFDYWGQGTLLTVSS

SEQ ID NO: 20225 - protein, 100 aa, Homo sapiens
TVSAGSISNYYWSWIRQPPGKGLEWIGYIYYSGSTKYNPSLKSRVTISVDTSKNQFSLNLSSVTAADTAVYYCARGPLRYSSGWYYFDYWGQGTLVTVSS

SEQ ID NO: 20226 - protein, 100 aa, Homo sapiens
TVSGGSISPYYWSWIRQPPGKGLEWIGYIYYSGSTNYNPSLKSRVTISVDTSENHFSLKLRSLSTADTALYFCARGPLRYSSGWYYFDYWGQGTLVTVSS

SEQ ID NO: 20227 - protein, 100 aa, Homo sapiens
SVSGGSISSFYWSWIRQPPGKALEWIGYIYYSGSTNYNPSLKSRVTILVDTSKNQFSLKLSSVTAADTAVYYCARGPLRYSSGWYYFDYWGQGTLVTVSS

SEQ ID NO: 20228 - protein, 100 aa, Homo sapiens
TVSGGSISSYYWSWIRQPPGKGLEWIGYVYYSGSTNYKPSLKSRVTISVDTSKNQFSLNLISVTDADTAVYFCARGPLRYSSGWYYFDYWGQGTLVTVSS

SEQ ID NO: 20229 - protein, 99 aa, Homo sapiens
TVSGGSISSSTYYWGWIRQPPGKGLEWIGSLYYSGSSYYDPSLKSRLTLSVDTSKNQFSLKLNSVTAADTAVYFCARASGSYYSDFDYWGQGTLVTVSS

SEQ ID NO: 20230 - protein, 99 aa, Homo sapiens
TVSGGSISSSSYYWGWIRQPPGKGLEWIGSIYYSGSTYYNASLKSRVTISVDTSKNQFSLRVSSVTAADTAVYYCARASGSYYSDFDYWGQGTLVTVSS

SEQ ID NO: 20231 - protein, 95 aa, Homo sapiens
AASGFTFNKYWMMWVRQAPGKGLEWVANIKEDGSEKYYVDSVKGRFTISRDNAKNSLYLQMSSLRAEDTAVYYCAKYRGYAFDIWGHGTMVTVSS

SEQ ID NO: 20232 - protein, 95 aa, Homo sapiens
AASGFTFNNYWMSWVRQAPGKGLEWVAHIKQDGSEKYYVDFVKGRFTISRDNTKNSLYLQMNSLRAEDTAVYYCAKYRGYAFDIWGQGTMVTVSS

SEQ ID NO: 20233 - protein, 96 aa, Homo sapiens
TVSGGSINSYSWSWIRQPPGKGLECIGYINYSGSINYSPSLKSRVTISVDTSKNQFSLKLSSVTAADTAVYYCARRTSSWYYFDYWGQGTLVTVSS

SEQ ID NO: 20234 - protein, 96 aa, Homo sapiens
TVSGGYIQTYYWAWIRQTPGKGLEWIGYIHHGGSTNYNPSLGSRITISVDTSRNQFSLKVTSVTAADTAVYFCARRTSSWYYFDYWGQGSLVTVSS

SEQ ID NO: 20235 - protein, 96 aa, Homo sapiens
TVSGGFITTYYWSWIRQPPGKGLEWIGYVYYRGSTNYNPSLKSRLTMSVDTSKNQFSLTLSSVTAADTAVYFCARRTSSWYYFDYWSPGTLVTVSS

SEQ ID NO: 20236 - protein, 100 aa, Homo sapiens
EASGFTFDDSAIHWVRQAPGKGLEWIGRMRSKRNNYATSYAGSVKGRFIISRDDSKDTAYLQMNSLKTEDTAVYYCTRRETTYYYGMDVWGQGTTVTVSS

SEQ ID NO: 20237 - protein, 100 aa, Homo sapiens
AASGFTFNNSAIHWVRQASGKGLEWVGRIRSKANNYATTYAASVKGRFTISSDDSKNTAYLQMNSLKIEDTAVYYCTRRETTYYYGMDVWGQGTTVTVSS

SEQ ID NO: 20238 - protein, 101 aa, Homo sapiens
AASGFSFRSHAIHWVRQAPGKGLEWVALISYNGDNEYYADSVKGRFTISRDNSKDTLYLQMSSLRAEDTAVYYCAKDRGYGSGSYRHLDYWGQGTLVTVSS

SEQ ID NO: 20239 - protein, 101 aa, Homo sapiens
AASGFSFSSHAMHWVRQAPGKGLEWVAVISYDESNKYYSDSVKGRFTISRDNSKNTLYLQMNSLRAEDTAVFYCAKDRGYGSGSYRHLDYWGQGTPVIVSS

SEQ ID NO: 20240 - protein, 92 aa, Homo sapiens
AASGFNFKNAWMSWVRQAPGKGLEWVGRIRSKTDGGTVDYTTPVEGRFTISRDDSTNTLYLQMNRLTTEDTAVYYCSTVRDWGQGALVIVSS

SEQ ID NO: 20241 - protein, 92 aa, Homo sapiens
AASGFTFANAWMYWLRQAPGKGLECVGRIKSKTNGGTADYAAPVKGRFTISRDDSENMLYLQMNNLKTEDTAVYYCSTVRDWGQGTLVTVSS

SEQ ID NO: 20242 - protein, 94 aa, Homo sapiens
ASGYTFAMYAIYWVRQAPGQGLEWMGWINTNNGFPTYAQGFAGRFVFSLDTSVTTAYVEIRSLKAEDTAVYYCAREKGDAFDIWGQGTMVTVSS

SEQ ID NO: 20243 - protein, 94 aa, Homo sapiens
ASGYTFTTYAMHWVRQAPGQGLEWMGWINTNTGNPTYAQGFTGRFVFSLDTSVSTASLQISSLKAEDTAVYYCAREKGDAFDIWGQGTMVTVSS

SEQ ID NO: 20244 - protein, 94 aa, Homo sapiens; identical to SEQ ID NO: 20243

SEQ ID NO: 20245 - protein, 94 aa, Homo sapiens; identical to SEQ ID NO: 20243

SEQ ID NO: 20246 - protein, 94 aa, Homo sapiens; identical to SEQ ID NO: 20243

SEQ ID NO: 20247 - protein, 99 aa, Homo sapiens
ASGYTFTSYGISWVRQAPGQGLEWMGWISPYNGNTNYAQNLQGRVTMITETSTSTAYMELRSLRSDDTAVYYCARDPYYYDTSGYFDPWGQGTLVTVSS

SEQ ID NO: 20248 - protein, 99 aa, Homo sapiens
ASGYTFTSYGISWVRQAPGQGLEWMGWISPNNGKTDLAQKFQGRVTMFAETYTNTAYMQLRSLTSDDAAVYYCARDPYYYDTSGYFDPWGQGTLVTVSS

SEQ ID NO: 20249 - protein, 99 aa, Homo sapiens
ASGYTFTSYGISWVRQAPGQGLEWMGWISPNNGKTNLAQKFQGRVTMFTETSTNTAYMHLRSLTSDDTAVYYCARDPYYYDTSGYFDPWGQGTLVTVSS

SEQ ID NO: 20250 - protein, 99 aa, Homo sapiens; identical to SEQ ID NO: 20248

SEQ ID NO: 20251 - protein, 99 aa, Homo sapiens; identical to SEQ ID NO: 20248

SEQ ID NO: 20252 - protein, 99 aa, Homo sapiens
ASGYTFTSYGISWVRQAPGQGLGWMGWISPNNGKTDLAQKFQGRVTMFAETYTNTAYMQLRSLTSDDAAVYYCARDPYYYDTSGYFDPWGQGTLVTVSS

SEQ ID NO: 20253 - protein, 93 aa, Homo sapiens
AASGFTFSIYAMSWVRQAPGKGLEWVSAINGNGAGTYYADSVKGRFSISRDNSKNTLYLQMNSLRAEDTAVYYCAGGRSFDYWGQGTLVTVSS

SEQ ID NO: 20254 - protein, 93 aa, Homo sapiens
AASGFTFSIYAMSWVRQAPGKGLEWVAAIGGSGDSTYYGDSVKGRFTISRDNSKNTLYLQMNNLRDEDTAAYYCAGGRSFDYWAQGILVIVSS

SEQ ID NO: 20255 - protein, 93 aa, Homo sapiens
AASGFTFSSYAMSWVRQAPGKGLEWVSAINGNGEGTYYADSVKGRFSISRDNSKNTLYLQMNSLRAEDTAVYYCAGGRSFDYWGQGIQVTVSS

SEQ ID NO: 20256 - protein, 93 aa, Homo sapiens
AASGFTFSNYAMNWVRQAPGKGLEWVSAINGNGEGTYYGDSVKGRFSISRDNSKNMLYLQMNSLRAEDTAIYYCAGGRSFDYWGQGTLVTVSS

SEQ ID NO: 20257 - protein, 93 aa, Homo sapiens
AASGFTFSSYAMNWVRQAPGKGLEWVSAINGNGDGTYYADSVKGRFSISRDNSKNTLYLQMHSLRAEDTAVYYCAGGRSFDYWGQGTLVTVSS

SEQ ID NO: 20258 - protein, 93 aa, Homo sapiens
AASGFTFSSYALNWVRQAPGKGLEWVSSINNVGGGTYYADSVKGRFTISRDNSQNTLYLQMNSLRGEDTAIYYCAGGRSFDYWGQGSLVTVSS

SEQ ID NO: 20259 - protein, 93 aa, Homo sapiens
AASGFTFSSYAMSWVRQAPGKGLEWVSAINGNGEGTYYADSVKGRFSISRDNSKNTLYLQMNSLRAEDTAVYYCAGGRSFDYWGQGTLVTVSS

SEQ ID NO: 20260 - protein, 93 aa, Homo sapiens; identical to SEQ ID NO: 20255

SEQ ID NO: 20261 - protein, 97 aa, Homo sapiens
AASGFSFSDHYMDWVRQAPGKGLEWVGRIRNKANSYTTEYAASVKGRFTISRDDSKNSLYLQMNSLKTEDTAVYYCARVRGDPYDYWGQGTLVTVSS

SEQ ID NO: 20262 - protein, 97 aa, Homo sapiens
AASGFSFSDHYIDWVRQAPGKGLEWVGRSRDRANGYSTEFVASVKGRFAITRDDSKNSLDLHMNSLQTEDTAVYYCARVRGDPYDYWGQGTLVTVSS

SEQ ID NO: 20263 - protein, 96 aa, Homo sapiens
AASGFTFNNYGMHWVRQAPGKGPEWVAVVWFDGTKKYYADSVKGRFIISRDSSENTLYLVMNSLRVEDTAVYYCARGGGTVTTDYWGHGTLVTVSS

SEQ ID NO: 20264 - protein, 96 aa, Homo sapiens
EASGFTFRNFGMHWVRQAPGKGLEWVAVIWYDGSKKYYADSVKGRFTISRDSSKNTLHLQMNSLRVEDTAVYYCARGGGTVTTDYWGQGTLVTVSS

SEQ ID NO: 20265 - protein, 96 aa, Homo sapiens; identical to SEQ ID NO: 20264

SEQ ID NO: 20266 - protein, 96 aa, Homo sapiens; identical to SEQ ID NO: 20263

SEQ ID NO: 20267 - protein, 96 aa, Homo sapiens; identical to SEQ ID NO: 20263

SEQ ID NO: 20268 - protein, 96 aa, Homo sapiens
AASGFTLNNYGMHWVRQAPGKGPEWVAVVWFDGTKKYYADSVKGRFIISRDSSENTLYLVMNSLRVEDTAVYYCARGGGTVTTDYWGHGTLVTVSS

SEQ ID NO: 20269 - protein, 96 aa, Homo sapiens; identical to SEQ ID NO: 20263

SEQ ID NO: 20270 - protein, 96 aa, Homo sapiens
AASGFTFTNYGMHWVRQAPGKGLEWVAVIWYDGSNKYYADSVKSRFTISRDNSKNTLYLQMNSLRAEDTAVYYCARGGGTVTTDYWGQGTLVTVSS

SEQ ID NO: 20271 - protein, 96 aa, Homo sapiens
AASGFTFSNYGMHWVRQAPGKGLEWLAVVWYDGSNKYYADSVKGRFTISRDSSKNTLNLQMNSLRVEDTAVYYCARGGGTVTTDYWGQGTLVTVSS

SEQ ID NO: 20272 - protein, 99 aa, Homo sapiens
AASGFTFSSYAMSWVRQAPGKGLEWVSAISGSGDSTYYADSVKGRFTISRDNSKNTLYLQINSLRAEDTAVYYCAKERWLGELLSIDYWGQGTLVTVSS

SEQ ID NO: 20273 - protein, 99 aa, Homo sapiens
AASGFTFSSHAMSWVRQAPGKGLEWVSAISGSGDSTYYADSVKGRFTISRDNSKNTLYLQINSLRAEDTAVYYCAKERWLGELLSIDYWGQGTLVTVSS

SEQ ID NO: 20274 - protein, 92 aa, Homo sapiens
ASGYTFTNYGVTWVRQAPGQGLEWMGWISPYNGNTNYAQKFQGRVTLTTDTSTTTAYMELRSLRSDDTAVYYCARDRQQGYWGQGTLVTVSS

SEQ ID NO: 20275 - protein, 92 aa, Homo sapiens; identical to SEQ ID NO: 20274

SEQ ID NO: 20276 - protein, 92 aa, Homo sapiens
ASGYTFTNYGVTWVRQAPGQGLEWMGWISPYNGNTNYAQKFQGRVTLTTDTSTTTAYMELRSLRSDDTAVYYCARDRQQGYWGQGTLVTISS

SEQ ID NO: 20277 - protein, 92 aa, Homo sapiens
ASGYTFTNYGVTWVRQAPGQGLEWMGWISPYNGNTNYAQKFQGRVTLTTDTSTSTAYMELRSLRSDDTAVYYCARDRQQGYWGQGTLVTVSS

SEQ ID NO: 20278 - protein, 92 aa, Homo sapiens; identical to SEQ ID NO: 20274

SEQ ID NO: 20279 - protein, 92 aa, Homo sapiens; identical to SEQ ID NO: 20274

SEQ ID NO: 20280 - protein, 92 aa, Homo sapiens
ASGYTFTNYGVTWVRQAPGQGLEWMGWISPYNGNTNYAQKFQGRVTLTTDTSTTTAYMELRGLRSDDTAVYYCARDRQQGYWGQGTLVTVSS

SEQ ID NO: 20281 - protein, 92 aa, Homo sapiens
ASGYTFTNYGISWVRQAPGQGLEWMGWISTYNGNTNYAQKLQGRVTMTTDTTTSTAYMELSSLTSDDTAVYYCARDRQQGYWGQGTLVTVSS

SEQ ID NO: 20282 - protein, 92 aa, Homo sapiens
ASGYTFTNYGVSWVRQAPGQGLEWMGWISTNNGNTNYAQNLQGRVTMTTDTSTSTAYMELSSLTSDDTAIYYCARDRQQGYWGQGTLVTVSS

SEQ ID NO: 20283 - protein, 92 aa, Homo sapiens; identical to SEQ ID NO: 20282

SEQ ID NO: 20284 - protein, 92 aa, Homo sapiens
ASGYTFTNYGISWVRQAPGQGLEWMGWISTYNGNTNYAQKLQGRVTMTTDTTTSTAYMELTSLTSDDTAVYYCARDRQQGYWGQGTPVTVSS

SEQ ID NO: 20285 - protein, 92 aa, Homo sapiens
ASGYTFTNYGISWVRQAPGQGLEWMGWISTYNGNTNYAHNLQGRVTMTTDTSTSTAYMELSSLTSDDTAIYYCARDRQQGYWGQGTLVTVSS

SEQ ID NO: 20286 - protein, 92 aa, Homo sapiens
ASGYTFTNYGISWVRQAPGQGLEWMGWISTSNGNTYYAQKLQGRLTMTTDTTTSTAYMELSSLTSDDTAIYYCARDRQQGYWGQGALVTVSS

SEQ ID NO: 20287 - protein, 92 aa, Homo sapiens
ASGYTFTNYGISWVRQAPGQGLEWMGWISTYNGNTNYAQKLQGRVTMTTDTTTSTAYMELRTLTSDDTAVYYCARDRQQGYWGQGTLVTVSS

SEQ ID NO: 20288 - protein, 92 aa, Homo sapiens
ASGYTFTNYGVSWVRQAPGQGLEWMGWISTYNGNTNYAQNLQGRVTMTTDTSTSTAYMELTSLTSDDTAIYYCARDRQQGYWGQGTLVTVSS

SEQ ID NO: 20289 - protein, 92 aa, Homo sapiens; identical to SEQ ID NO: 20281

SEQ ID NO: 20290 - protein, 92 aa, Homo sapiens
ASGYTFTNYGVTWVRQAPGQGLEWMGWISPYNGNTNYAQKFQGRVTLTTDTSTTTTYMELRSLRSDDTAVYYCARDRQQGYWGQGTLVTVSS

SEQ ID NO: 20291 - protein, 97 aa, Homo sapiens
AASGFTFSSNWMSWVRQAPGKGLEWVANIKNDGSEGYYADSVKGRFTISRDNAKNSLYLQMNSLRAEDTALYYCARDVGDRAGFDPWGQGTLVTVSS

SEQ ID NO: 20292 - protein, 97 aa, Homo sapiens; identical to SEQ ID NO: 20291

SEQ ID NO: 20293 - protein, 97 aa, Homo sapiens; identical to SEQ ID NO: 20291

SEQ ID NO: 20294 - protein, 97 aa, Homo sapiens
VASGFTFSSNWMSWVRQAPGKGLEWVANIKNDGSEGYYADSVKGRFTISRDNAKNSLYLQMNSLRAEDTALYYCARDVGDRAGFDPWGQGTLVTVSS

SEQ ID NO: 20295 - protein, 97 aa, Homo sapiens
AASGFTLSSNWMSWVRQAPGKGLEWVANIKNDGSEGYYADSVKGRFTISRDNAKNSLYLQMNSLRAEDTALYYCARDVGDRAGFDPWGQGTLVTVSS

SEQ ID NO: 20296 - protein, 97 aa, Homo sapiens
AASGFTFSSNWMSWVRQAPGKGLEWVANIKNDGSEGYYADSVKGRFTISRENAKNSLYLQMNSLRAEDTALYYCARDVGDRAGFDPWGQGTLVTVSS

SEQ ID NO: 20297 - protein, 96 aa, Homo sapiens
ASGFTFSSNWMSWVRQAPGKGLEWVANIKNDGSEGYYADSVKGRFTISRDNAKNSLYLQMNSLRAEDTALYYCARDVGDRAGFDPWGQGTLVTVSS

SEQ ID NO: 20298 - protein, 92 aa, Homo sapiens
EASGFTFRTIRMNWVRQAPGKGLEWVSDIDGISSVKQYADSVKGRFTISRDNAKKLLYLQMNSLRAEDTAVYYCTRGEYGVWGQGTVVTVSS

SEQ ID NO: 20299 - protein, 92 aa, Homo sapiens
AASGFTISAFRMNWVRQAPGRGLEVVSEINGDGKIINYADSVRGRFSVSRDNAKDSLFLQMDSLRVEDTAIYYCTRGEYGVWGRGTMVTVSS

SEQ ID NO: 20300 - protein, 92 aa, Homo sapiens
AASGFTFSLFRMNWVRQAPGKGLEWVSDIGANPSMINYADSVQGRFTISRDNGKSSLYLQMNSLRVEDTAIYYCTRGEYGVWGQGAMVTVSS

SEQ ID NO: 20301 - protein, 92 aa, Homo sapiens
ATSGFTFSAFRINWIRQAPGRGPEVVSETSSNGKSTEYGDSVRGRFTVSRDNAKGSLFLQMESLRGEDTAMYYCTRGEYGVWGRGTMVIVSS

SEQ ID NO: 20302 - protein, 92 aa, Homo sapiens
VASGFTFTYIRMNWVRQAPGKGLEWVSEISGSSTVKHYADSVRGRFTISRDNARNSLFLQMDSLRAEDTAVYYCTRGEYGVWGQGTVVTVSS

SEQ ID NO: 20303 - protein, 92 aa, Homo sapiens
AASGFTFSTIRMNWVRQAPGKGLEWVSEISGSSTVKHYADSVRGRFTISRDNARNSLYLQMDSLRAEDTAVYYCTRGEYGVWGQGTVVTVSS

SEQ ID NO: 20304 - protein, 92 aa, Homo sapiens
AASGITISGFRMTWVRQAPGRGLEVISEINNDGKTINYADSVRGRFTVSRDNAKDSTWLQMESLRAEDTAVYYCTRGEYGVWGQGTMVTVSS

SEQ ID NO: 20305 - protein, 92 aa, Homo sapiens
AASGFTISAFRINWVRQAPGRGPEVVSETTRNGETTDYGDSVRGRFTVSRDNAKESLYLQMESLRGEDTAMYYCTRGEYGVWGRGTLVTVSS

SEQ ID NO: 20306 - protein, 92 aa, Homo sapiens
AASGITISASRMNWVRQAPGRGLEVVSEINNNGKTVNYADSVRGRFIVSRDNAKGSLYLQMESLRVEDTAVYYCTRGEYGVWGQGTMVTVSS

SEQ ID NO: 20307 - protein, 92 aa, Homo sapiens
VGSGFRISIHRMNWVRQAPGKGLEWISDISGNSDVKRYADSVMGRFTISRDNARNSLYLQMNSLRVDDTATYFCTRGEYGVWGKGTMVTVSS

SEQ ID NO: 20308 - protein, 92 aa, Homo sapiens
AASGFTISAFRITWIRQAPGRGPEVVSETNNNGKTTDYGDSVRGRFTVSRDNAKESLYLQMESLRGEDTAMYYCTRGEYGVWGRGTMVTVSS

SEQ ID NO: 20309 - protein, 92 aa, Homo sapiens
AASGFTMSAFRINWVRQAPGRGPEVVSETSRDGKITYYGDSVRGRFTVSRDIAKESLYLQIESLRGEDTAMYYCTRGEYGVWGRGTMVTVSS

SEQ ID NO: 20310 - protein, 92 aa, Homo sapiens
AASGFTFSTSRMNWVRQTPGKGLESVSEISGSSTDKQYADSVRGRFTISRDNARNSLYLQMDSLRVEDTAIYYCTRGEYGVWGQGTVVTVSS

SEQ ID NO: 20311 - protein, 92 aa, Homo sapiens
AASGFTFSLFRMNWVRQAPGKGLEWISDIGANPSMINYADSVQGRFTISRDNGKSSLYLQMNSLRVEDTAIYYCTRGEYGVWGQGAMVTVSS

SEQ ID NO: 20312 - protein, 92 aa, Homo sapiens
AASGFTFSAFRINWVRQAPGRGPEVVSETSGNGKTTDYGDSVRGRFIVSRDNAKESLYLQMESLRGEDTAMYYCTRGEYGVWGRGTMVIVSS

SEQ ID NO: 20313 - protein, 92 aa, Homo sapiens; identical to SEQ ID NO: 20298

SEQ ID NO: 20314 - protein, 92 aa, Homo sapiens
VASGFSISAFRMNWVRQAPGRGPEVVSETSGNGKTTNYGDSVRGRFTVSRDNAKESLYLQMESLRGEDTAMYYCTRGEYGVWGQGTMVTVSS

SEQ ID NO: 20315 - protein, 92 aa, Homo sapiens; identical to SEQ ID NO: 20310

SEQ ID NO: 20316 - protein, 92 aa, Homo sapiens
AASGFTMSAFRINWVRQAPGRGPEVISETSGNGKTTDYGDSVRGRFTVSRDNAKESLYLQMESLRGEDTAIYYCTRGEYGVWGRGTMVIVSS

SEQ ID NO: 20317 - protein, 92 aa, Homo sapiens
VASGFTISAFRINWVRQAPGRGPEVVSETSGNGKTTDYGDSVRGRFTVSRDNAKESLYLQMESLTGEDTAMYYCTRGEYGVWGRGTMVTVSS

SEQ ID NO: 20318 - protein, 92 aa, Homo sapiens
AASGFTFSAFRINWIRQAPGRGPEVVSETSSNGKSTEYGDSVRGRFTVSRDNAKGSLFLQMESLRGEDTAMYYCTRGEYGVWGRGTMVIVSS

SEQ ID NO: 20319 - protein, 92 aa, Homo sapiens
AASGFSFSAYRISWVRQAPGRGPEVISETSGNGKITDYGDSARGRFIVSRDNAKESLYLQMESLRGEDTAMYYCTRGEYGVWGRGTMVTVSS

SEQ ID NO: 20320 - protein, 92 aa, Homo sapiens
AASGVTISGFRMSWVRQAPGRGLEVISEINNNGKTVNYADSVRGRFTVSRDNAKDSLYLQMERLRAEDTAVYYCTRGEYGVWGQGTMVTVSS

SEQ ID NO: 20321 - protein, 92 aa, Homo sapiens
ATSGFTFSAFRINWIRQAPGRGPEVISETSSNGKSTEYGDSVRGRFTVSRDNAKGSLFLQMESLRGEDTAMYYCTRGEYGVWGRGTMVIVSS

SEQ ID NO: 20322 - protein, 92 aa, Homo sapiens
AASGFTFSAIRMNWVRQAPGKGLEWVSEISGSSTVKHYADSVRGRFTISRDNARNSLYLQMDSLRVEDTAVYYCTRGEYGVWGQGTVVTVSS

SEQ ID NO: 20323 - protein, 92 aa, Homo sapiens
AASGFTISAFRITWIRQAPGRGPEVVSETNNNGKTTDYGDSVRGRFTVSRDKAKESLYLQMESLRGEDTAMYYCTRGEYGVWGRGTMVTVSS

SEQ ID NO: 20324 - protein, 92 aa, Homo sapiens
AASGFTFSAFRINWIRQAPGRGPEVVSETSSNGKTTDYGDSVRGRFTVSRDNAKESLYLQMESLRGEDTAMYYCTRGEYGVWGRGTMVTVSS

SEQ ID NO: 20325 - protein, 92 aa, Homo sapiens
VGSGFRISIHRMNWVRQAPGKGLEWVSDISGKSDVKRYADSVMGRFTISRDNARNSLYLQMNSLRADDTAIYFCTRGEYGVWGQGTMVTVSS

SEQ ID NO: 20326 - protein, 92 aa, Homo sapiens; identical to SEQ ID NO: 20307

SEQ ID NO: 20327 - protein, 92 aa, Homo sapiens
ATSGFTISAFRINWVRQAPGRGPEVVSETSGNGKTTDYGDSVRGRFTVSRDNAKGSLYLQMESLRGEDTAMYYCTRGEYGVWGRGTMVTVSS

SEQ ID NO: 20328 - protein, 92 aa, Homo sapiens
AASGVTISGFRMNWVRQAPGRGLEVISEINNNGKTVNYADSVRGRFTVSRDNAKDSLYLQMERLRAEDTAVYYCTRGEYGVWGQGTMVTVSS

SEQ ID NO: 20329 - protein, 92 aa, Homo sapiens
AASGFIFSTIRMNWVRQAPGKGLEWVSDISGSSTVKHYADSVRGRFTISRDNARNSLYLQMDSLRAEDTAVYYCTRGEYGVWGQGTMVTVSS

SEQ ID NO: 20330 - protein, 92 aa, Homo sapiens
ATSGFTISAFRINWIRQAPGRGPEVVSETSSNGKTTDYGDSVRGRFTVSRNNAKGSLYLQMESLRGEDTAMYYCTRGEYGVWGRGTMVIVSS

SEQ ID NO: 20331 - protein, 92 aa, Homo sapiens
AASGFIFSSYTMSWVRQAPGKGLEFVAFIGGAGRTKYYADSVKGRFTVSRDNAKNSLYLQMNSLSAEDTAVYYCTRGEYGVWGQGTMVTVSS

SEQ ID NO: 20332 - protein, 92 aa, Homo sapiens
AASGFTISAFRINWVRQAPGRGPEVVSETSRNGKTTDYGDSVRGRFTVSRDNAKESLYLQMESLRGEDTAMYYCTRGEYGVWGRGTMVTVSS

SEQ ID NO: 20333 - protein, 92 aa, Homo sapiens; identical to SEQ ID NO: 20304

SEQ ID NO: 20334 - protein, 92 aa, Homo sapiens
ATSGFTISAFRINWIRQAPGRGPEVVSETSSNGKTTDYGDSVRGRFTVSRDNAKGSLYLQMESLRGEDTAMYYCTRGEYGVWGRGTMVIVSS

SEQ ID NO: 20335 - protein, 92 aa, Homo sapiens; identical to SEQ ID NO: 20299

SEQ ID NO: 20336 - protein, 92 aa, Homo sapiens
AASGITISGFRMTWVRQAPGRGLEVISEINNDGKTINYADSVRGRFTVSRDNAKDSTWLQMESLRAEDTAVYYCTRGEYGVWGQGAMVTVSS

SEQ ID NO: 20337 - protein, 92 aa, Homo sapiens
AASGFTFSAFRITWIRQAPGRGPEVVSETSSNGKTTDYGDSVRGRFTVSRDNAKGSLYLQMESLRGEDTAMYYCTRGEYGVWGRGTMVIVSS

SEQ ID NO: 20338 - protein, 92 aa, Homo sapiens
AASGFTFSTSRMNWVRQTPGKGLESVSEISGRSTDKQYADSVRGRFTISRDNARNSLYLQMDSLRVEDTAIYYCTRGEYGVWGQGTVVTVSS

SEQ ID NO: 20339 - protein, 92 aa, Homo sapiens; identical to SEQ ID NO: 20301

SEQ ID NO: 20340 - protein, 92 aa, Homo sapiens
AASGFTISAYRINWVRQAPGRGPEVVSETSRNGKSTDYGDSVRGRFIVSTDNAKETLYLQMENLRGEDTAMYYCTRGEYGVWGRGTMVIVSS

SEQ ID NO: 20341 - protein, 92 aa, Homo sapiens
AASGFTISAFRINWIRQAPGRGPEVVSETSSNGKTTDYGDSVRGRFTVSRDNAKGSLYLQMESLRGEDTAMYYCTRGEYGVWGRGTMVIVSS

SEQ ID NO: 20342 - protein, 92 aa, Homo sapiens
ATSGFTFRPYTMNWVRQAPGKGLEWVSDISGSGTVIHYADSVRGRFTVSRDSARNSLYLQMNSLSAEDTAVYYCTRGEYGVWGQGTMVTVSS

SEQ ID NO: 20343 - protein, 92 aa, Homo sapiens; identical to SEQ ID NO: 20336

SEQ ID NO: 20344 - protein, 92 aa, Homo sapiens
AASGFSFSAYRISWVRQAPGRGPEVVSETSGNGKTTDYGDSVRGRFTVSRDNAKESLYLQMESLRGEDTAMYYCTRGEYGVWGRGTMVTVSS

SEQ ID NO: 20345 - protein, 92 aa, Homo sapiens; identical to SEQ ID NO: 20299

SEQ ID NO: 20346 - protein, 92 aa, Homo sapiens
AASGFSFRTFAMNWVRQAPGKGLEWLSDIDGRGSVTHYADSVKGRFTISRDNAKNTLFLQLSSLRDEDTAVYYCTRGEYGVWGQGTMVTVSS

SEQ ID NO: 20347 - protein, 92 aa, Homo sapiens
VGSGFRISIHRMNWVRQAPGKGLEWVSDISGNSDVKRYADSVMGRFTISRDNARNSLYLQMNSLRADDTAIYFCTRGEYGVWGQGTMVTVSS

SEQ ID NO: 20348 - protein, 92 aa, Homo sapiens; identical to SEQ ID NO: 20336

SEQ ID NO: 20349 - protein, 92 aa, Homo sapiens; identical to SEQ ID NO: 20301

SEQ ID NO: 20350 - protein, 92 aa, Homo sapiens
EASGFTFRTIRMNWVRQAPGKGLEWVSDIDGISSVKQYADSVKGRFTISRDNAKKLLYLQMNSLRAEDTAAYYCTRGEYGVWGQGTVVTVSS

SEQ ID NO: 20351 - protein, 91 aa, Homo sapiens
AASGFTISAFRINWVRQAPGRGPEVVSETSRNGKTTDYGDSVRGRFTVSRDNAKESLYLQMESLRGEDTAMYYCTRGEYGVWGRGTMVTVS

SEQ ID NO: 20352 - protein, 92 aa, Homo sapiens
AASGFTISAFRINWIRQAPGRGPEVVSETNSNGKTTAYGDSVRGRFTVSRDNAKESLYLQMESLRGEDTAMYYCTRGEYGVWGRGTMVIVSS

SEQ ID NO: 20353 - protein, 92 aa, Homo sapiens
AASGFTFRTFAMNWVRQAPGKGLEWVSDIDGRGSVTHYADSVKGRFTISRDNARNTLWLQLSSLRDEDTAVYYCTRGEYGVWGQGTMVTVSS

SEQ ID NO: 20354 - protein, 92 aa, Homo sapiens
AASGFTFSTWRMNWVRQAPGKGLESISEISGSGAVKQYADSVRGRFTISRDNARNSLYLQMDSLRVEDTAIYYCTRGEYGVWGQGTVVTVSS

SEQ ID NO: 20355 - protein, 92 aa, Homo sapiens
AGSGFTFSAYRISWVRQAPGRGPEVVSETSGNGKTTDYGDSVRGRFTVSRDNAKESLYLQMESLRGEDTAMYYCTRGEYGVWGRGTMVTVSS

SEQ ID NO: 20356 - protein, 92 aa, Homo sapiens; identical to SEQ ID NO: 20332

SEQ ID NO: 20357 - protein, 92 aa, Homo sapiens
AASGFTMSAFRLNWIRQAPGRGPEVVSETSGNGKTTDYADSVRGRFTVSRDNAKESLYLQMESLRGEDTAMYYCTRGEYGVWGRGTMVTVSS

SEQ ID NO: 20358 - protein, 92 aa, Homo sapiens
AASGFTISAFRINWVRQAPGRGPEVVSETSSNGKATYYGDSVRGRFTVSRDNAKESLFLQMESLRGEDTAMYYCTRGEYGVWGRGTMVIVSS

SEQ ID NO: 20359 - protein, 92 aa, Homo sapiens; identical to SEQ ID NO: 20303

SEQ ID NO: 20360 - protein, 92 aa, Homo sapiens
AASGITISGFRMTWVRQAPGRGPELISEINNDGKTINYADSVRGRFTVSRDNGKDSTWLQMESLRAEDTAVYYCTRGEYGVWGQGAMVTVSS

SEQ ID NO: 20361 - protein, 91 aa, Homo sapiens
ASGFSINTFRMNWVRQAPGGGPEVVSETSSNGKTTNYVDSVRGRFTVSRDNAKESLYLQMESLRGEDTAMYFCTRGEYGVWGRGTMVTVSS

SEQ ID NO: 20362 - protein, 92 aa, Homo sapiens
AASGFTISAFRINWVRQAPGRGPEVVSETSRNGQTTDYGDSVRGRFTVSRDIPKESLYLQMESLRGEDTAMYYCTRGEYGVWGRGTMVTVSS

SEQ ID NO: 20363 - protein, 92 aa, Homo sapiens
AASGFTFSIIRMNWVRQAPGKGLEWVSEISGSSTVKHYADSVRGRFTISRDNARNSLYLQMDSLRAEDTAIYYCTRGEYGVWGQGTVVTVSS

SEQ ID NO: 20364 - protein, 92 aa, Homo sapiens
AASGITISGCRMTWVRQAPGRGLEVISEINNDGKTINYADSVRGRFTVSRDNAKDSTWLLMESLRAEDTAVYYCTRGEYGVWGQGAMVTVSS

SEQ ID NO: 20365 - protein, 92 aa, Homo sapiens
AASGITIRGFRMTWVRQAPGRGLEVISEINNDGKTINYADSVRGRFTVSRDNAKDSTWLQMESLRAEDTAVYYCTRGEYGVWGQGAMVTVSS

SEQ ID NO: 20366 - protein, 92 aa, Homo sapiens; identical to SEQ ID NO: 20303

SEQ ID NO: 20367 - protein, 92 aa, Homo sapiens
VGSGFRINIHRMNWVRQAPGKGLEWVSDISGSSDVKHYADSVMGRFTVSRDNARNSLYLQMNSLRADDTAIYFCTRGEYGVWGQGTMVTVSS

SEQ ID NO: 20368 - protein, 92 aa, Homo sapiens
AASGFTISAFRINWVRLAPGKGPEVISETSGNGKTTDYGDSVRGRFTVSRDNAKESLYLQMESLRGEDTAMYYCTRGEYGVWGRGTMVTVSS

SEQ ID NO: 20369 - protein, 92 aa, Homo sapiens
AASGFTISAFRINWVRQAPGRGPEVVSETSSNGKTTDYGDSVRGRFTVSRDNAKESLYLQMESLRGEDTAMYYCTRGEYGVWGRGTMVTVSS

SEQ ID NO: 20370 - protein, 92 aa, Homo sapiens
AASGFTMSAFRINWVRQAPGRGPEVISETSGNGKTTDYGDSVRGRFTVSRDNAKESLYLQMESLRGEDTAMYYCTRGEYGVWGRGTMVIVSS

SEQ ID NO: 20371 - protein, 96 aa, Homo sapiens
VASGFTLSSYAMYWVRQSPGKGLEWISAINVAGTSTPYGDSVKGRFTISRDNSKNTLYLQMNSLRADDTALYYCARRIPGGPFDYWGQGALVTVSS

SEQ ID NO: 20372 - protein, 96 aa, Homo sapiens
AASGFTFTSYAIHWVRQAPGKGLEWVSGVNVDGSFAPYGDSVKGRFTVSRDTSKHTLFLQMNSLRAEDTALYYCARRIPGGPFDYWGRGALVTVSS

SEQ ID NO: 20373 - protein, 95 aa, Homo sapiens
GSGFTFSNYAMFWVRQAPGKGLEWVSGVGSTGSFAYYGDSVKGRFTISRDNSKNTVYLQMNSLRAEDTALYYCARRIPGGPFDYWGQGVLVTVSS

SEQ ID NO: 20374 - protein, 96 aa, Homo sapiens; identical to SEQ ID NO: 20371

SEQ ID NO: 20375 - protein, 95 aa, Homo sapiens; identical to SEQ ID NO: 20373

SEQ ID NO: 20376 - protein, 96 aa, Homo sapiens; identical to SEQ ID NO: 20372

SEQ ID NO: 20377 - protein, 96 aa, Homo sapiens
AASGFTFTSYAIHWVRQAPVKGLEWVSGVNVDGSFAPYGDSVKGRFTVSRDTSKHTLFLQMNSLRAEDTALYYCARRIPGGPFDYWGRGALVTVSS

SEQ ID NO: 20378 - protein, 96 aa, Homo sapiens
AASGFTFSNYAMSWVRQAPGKGLEWVSGIAISSSYTSYADSVKGRFTVSRDNSKNTLYLQINSLRAEDTALYYCARRIPGGPFDYWGQGTLVPVSS

SEQ ID NO: 20379 - protein, 94 aa, Homo sapiens
SGFSFSNYAMFWVRQAPGKGLEYVSGISGSGTSTLYVDAVRGRFTISRDASKNTLFLQMSSLRADDTALYYCARRIPGGPFDYWGRGTLVTVSS

SEQ ID NO: 20380 - protein, 96 aa, Homo sapiens
VASGFSFSNYVMYWVRQAPGKGLEWVSGISSSGTSTPYADSVKGRFTISRDTSKNTLFLQMSSLRADDTALYYCARRIPGGPFDYWGQGTLVTVSS

SEQ ID NO: 20381 - protein, 96 aa, Homo sapiens
VAAGFTLSSYAMYWVRQSPGKGLEWISAINVAGTSTPYGDSVKGRFTISRDNSKNTLYLQMNSLRADDTALYYCARRIPGGPFDYWGQGALVTVSS

SEQ ID NO: 20382 - protein, 96 aa, Homo sapiens; identical to SEQ ID NO: 20371

SEQ ID NO: 20383 - protein, 95 aa, Homo sapiens; identical to SEQ ID NO: 20373

SEQ ID NO: 20384 - protein, 96 aa, Homo sapiens
AGSGFTITNYGMFWVRQIPGKGLEWVSGISGSGVTTRYADSVKGRFTISRDTSKNTVSLRVSSLGADDTALYHCARRIPGGPFDYWGQGALVTVSS

SEQ ID NO: 20385 - protein, 96 aa, Homo sapiens
AASGFTFSSYAMSWVRQAPGKGLEWVSVINTGGDITYYADSVKGRFTISRDNSKNTLYLQMNSLRAEDTAIYYCARRIPGGPFDYWGQGTLVSVSS

SEQ ID NO: 20386 - protein, 95 aa, Homo sapiens; identical to SEQ ID NO: 20373

SEQ ID NO: 20387 - protein, 95 aa, Homo sapiens
GSGFTFSNYAMFWVRQAPGKGLEWVSGVGSTGNFAYYGDSVKGRFTISRDNSKNTVYLQMNSLRAEDTALYYCARRIPGGPFDYWGQGVLVTVSS

SEQ ID NO: 20388 - protein, 96 aa, Homo sapiens
AASGFTFSNYAMFWVRQAPGKGLEWVSGVGSTGSFAYYGDSVKGRFTISRDNSKNTVYLQMNSLRAEDTALYYCARRIPGGPFDYWGQGVLVTVSS

SEQ ID NO: 20389 - protein, 96 aa, Homo sapiens
VASGFSFSNYAMFWVRQAPGKGLEYVSGIFGSGTSAPYIDAVRGRFTVSRDTSKNTLFLQMDSLRADDTALYYCARRIPGGPFDYWGRGTLVTVSS

SEQ ID NO: 20390 - protein, 96 aa, Homo sapiens
AASGFTFTNFAMTWVRQAPGKGLEWISTMVGGGVTAVYADPVKGRFTISRDTYSRTLFLQINNLGVEDTALYYCARRIPGGPFDYWGPGTLVTVSS

SEQ ID NO: 20391 - protein, 95 aa, Homo sapiens
TVSGGSMINYYWGWIRQSPTKGLEWVGDIYYSGGTKYNPSLRSRVTISVDTSKKQFSLEVNSVTAADTAVYFCVRHIGKWGFDYWGQGTLVTVSS

SEQ ID NO: 20392 - protein, 95 aa, Homo sapiens
TVSGGSMINYYWGWIRQSPTKGLEWIGNTYYSGGTKYNPSLRSRVTISVDTSKNQFSLEVTSMTAADTAIYFCVRHIGKWGFDYWGQGTLVTVSS

SEQ ID NO: 20393 - protein, 95 aa, Homo sapiens; identical to SEQ ID NO: 20391

SEQ ID NO: 20394 - protein, 95 aa, Homo sapiens; identical to SEQ ID NO: 20391

SEQ ID NO: 20395 - protein, 95 aa, Homo sapiens
TVSGGYMINYYWGWIRQSPTKGLEWVGDIYYSGGTKYNPSLRSRVTISVDTSKKQFSLEVNSVTAADTAVYFCVRHIGKWGFDYWGQGTLVTVSS

SEQ ID NO: 20396 - protein, 95 aa, Homo sapiens
TVSGGSMINYYWGWIRQSPTKGLEWIGNTYYSGGTKYNPSLRSRVTISVDTSKNQFSLEGTSMTAADTAIYFCVRHIGKWGFDYWGQGTLVTVSS

SEQ ID NO: 20397 - protein, 95 aa, Homo sapiens
TVSGGSISSYYWGWIRQPPEKGLEWIGYIYYSGSTNYNPSLKSRVTISVDTSKNQFSLKLSSVSAADTAVYYCVRHIGKWGFDYWGQGTLVTVSS

SEQ ID NO: 20398 - protein, 96 aa, Homo sapiens
ASGYTFTSYHMHWVRQAPGQGLEWMGISKSSGGITIYAQKFQGRVTMTRDTSTSTVYMELSSLRSDDTAVYYCAREMPHTYYFDYWGQGTLVTVSS

SEQ ID NO: 20399 - protein, 95 aa, Homo sapiens
ASGYTFTSYHMHWVRQAPGQGLEWMGISKSSGGITIYAQKFQGRVTMTRDTSTSTVYMELSSLRSDDTAVYYCAREMPHTYYFDYWAREPWSPSP

SEQ ID NO: 20400 - protein, 96 aa, Homo sapiens
ASGYTFTSYSMHWVRQAPGQGLEWVGLINPNISYTNYAQKFQGRVTMTWDTSTTTVYMALSSLTSEDTAVYYCAREMPHTYYFDYWGQGTLVTVSS

SEQ ID NO: 20401 - protein, 96 aa, Homo sapiens; identical to SEQ ID NO: 20400

SEQ ID NO: 20402 - protein, 95 aa, Homo sapiens
AASGFTFNIYSMNWVRQAPGKGLEWISYITSDTRTIYYADSVKGRFTISRDNAKNSLSLQMNSLRVEDTAVYFCARSVQGAFDNWGQGTLVTVSS

SEQ ID NO: 20403 - protein, 95 aa, Homo sapiens; identical to SEQ ID NO: 20402

SEQ ID NO: 20404 - protein, 95 aa, Homo sapiens
AASGFTFNIYSMNWVRQAPGKGLEWISYITSDTRTIYYAGSVKGRFTISRDNAKNSLSLQMNSLRVEDTAVYFCARSVQGAFDNWGQGTLVTVSS

SEQ ID NO: 20405 - protein, 94 aa, Homo sapiens
AASGFIFSHYSMNWIRQAPGKGLEWISYITSDMKTIKYADSVKGRFTISRDNAKNSVYLQMDSLRDEDTSIYYCARSVQGAFDNWGQGTLVTVS

SEQ ID NO: 20406 - protein, 95 aa, Homo sapiens
AASGFTFSPYSMNWIRQAPGKGLEWISYITGASNIIKYADSVKGRFTISRDNAKNSVYLEMSSLRDEDTSIYYCARSVQGAFDNWGQGILVTVSS

SEQ ID NO: 20407 - protein, 94 aa, Homo sapiens
AASGFIFSHYSMNWIRQAPGKGLEWISYMTSDMKTIKYADSVKGRFTISRDNAKNSVYLQMDSLRDEDTSIYYCARSVQGAFDNWGQGTLVTVS

SEQ ID NO: 20408 - protein, 95 aa, Homo sapiens
AASGFTFSPYSMNWIRQAPGKGLEWISYITGGSNIINYADSVKGRFTISRDNAKNSVYLQMSSLRDEDTSIYYCARSVQGAFDNWGQGTLVTVSS

SEQ ID NO: 20409 - protein, 95 aa, Homo sapiens
AASGFTFSPYSMNWIRQAPGKGLEWISYIRGDSNIIQYADSVRGRFTISRDNAKNSVYLQMTSLRDEDTSIYYCARSVQGAFDNWGQGTLVTVSS

SEQ ID NO: 20410 - protein, 95 aa, Homo sapiens
AASGFTFSPYSMNWIRQAPGKGLEWISYITGDSNIINYADSVKGRFTISRDNAKNSVYLQMSSLRDEDTSIYYCARSVQGAFDNWGQGTLVTVSS

SEQ ID NO: 20411 - protein, 95 aa, Homo sapiens; identical to SEQ ID NO: 20408

SEQ ID NO: 20412 - protein, 94 aa, Homo sapiens
AASGFIFSHYSMNWIRQAPGKGLEWISYMTSDMKTIKYADSVKGRFTISRDNAKNSVYLQMDSLRDDDTSIYYCARSVQGAFDNWGQGTLVTVS

SEQ ID NO: 20413 - protein, 94 aa, Homo sapiens
VASGFTFSPYSMNWIRQAPGKGLEWISYVNRNTKIIKYADSVKGRFTISRDDAKNSVYLQMDDLRDEDTSIYYCARSVQGAFDNWGQGTLVTVS

SEQ ID NO: 20414 - protein, 95 aa, Homo sapiens
AASGFTFSPYSMNWIRQAPGKGLEWISYITGGSNIINYADSVKGRFTISRDNAKNSVYLQMSSLRDDDTSIYYCARSVQGAFDNWGQGTLVTVSS

SEQ ID NO: 20415 - protein, 94 aa, Homo sapiens
ASGYTFTNYGITWVRQAPGQGLEWMGWISAYNGNTNYAQKLQGRVTMTTDTSTSIAYMEVRSLRSDDTAVYYCARHVGYYFDYWGRGTLVTVSS

SEQ ID NO: 20416 - protein, 94 aa, Homo sapiens; identical to SEQ ID NO: 20415

SEQ ID NO: 20417 - protein, 93 aa, Homo sapiens
SGYTFTSYDISWVRQAPGQGLEWMGWISGYNGNTNYAQKLQGRVTMTTDTSTSTAYMELRSLRSDDTAVYYCARHVGYYFDYWGQGTLVTVSS

SEQ ID NO: 20418 - protein, 92 aa, Homo sapiens
AASGFSFSSSTWNWVRQAPGKGLEWVSYITSGSTVREYADSLKGRFTISRDNAKNSLYLQMNSLRAEDTAMYYCARGAFGVWGQGTMVIVSS

SEQ ID NO: 20419 - protein, 92 aa, Homo sapiens
VASGFTFSTFDMNWVRQAPGKGLEWVSFITANSRIVHYSDSVKGRFTVSRDNAKNSLYLQINSLRVEDTAIYYCARGAFGVWGRGTMVTVSS

SEQ ID NO: 20420 - protein, 92 aa, Homo sapiens; identical to SEQ ID NO: 20418

SEQ ID NO: 20421 - protein, 91 aa, Homo sapiens
AASGFTFSNFDMNWVRQAPGKGLEWVSYISSSGTIYYADSVKGRFTISRDNAKNSLYLQMNSLRVEDTAVYYCARGAFGVWGQGTMVSVSS

SEQ ID NO: 20422 - protein, 94 aa, Homo sapiens
ASGFTFSSYHMSWVRQAPGKGPEWVAAITSTGSNTYYAESVKGRFTISRDDSKDTVYVQMNRLEAEDSAIYYCARDGGGSFDYWGQGILVTVSS

SEQ ID NO: 20423 - protein, 94 aa, Homo sapiens
ASGFTFSSYHMSWVRQAPGKGPEWVAAITSTGSNTYYAESVKGRFTISRDDSKDTVYVQMNRLEAEDSAVYYCARDGGGSFDYWGQGILVTVSS

SEQ ID NO: 20424 - protein, 95 aa, Homo sapiens
AASGLTFSTYPMSWVRQSPGGGLEWVSAITGTSGNTYYADSVKGRFTISRDNSKNTLYMYMNRLKAEDSAVYYCARDGGGSFDYWGQGTLVTVSS

SEQ ID NO: 20425 - protein, 95 aa, Homo sapiens
AASGLTFSSYPMSWVRQAPGKGLEWVSAITGSGDNTYYADSVKGRFTISRDNSKKTLYVQMNRLKADDSAVYYCARDGGGSFDYWGQGTLVTVSS

SEQ ID NO: 20426 - protein, 95 aa, Homo sapiens; identical to SEQ ID NO: 20425

SEQ ID NO: 20427 - protein, 95 aa, Homo sapiens
AASGLTFSSYPMSWVRQAPGKGLEWVSAITGSGDNTYYTDSVKGRFTISRDNSKNTIYVQMNRLKAEDSAVYYCARDGGGSFDYWGQGTLVTVSS

SEQ ID NO: 20428 - protein, 95 aa, Homo sapiens
AASGLPFSSYPMSWVRQAPGKGLEWVAAITGSSDNTYYADSVKGRFTISRDNSKNTLYVQMNRLKAEDSAVYYCARDGGGSFDYWGQGILVTVSS

SEQ ID NO: 20429 - protein, 95 aa, Homo sapiens
AASGFTFSSYHMSWVRQAPGKGLEWVSAITRSGDNTYYADSVKGRFTISRDNSKNTFYVEMKRLKAEDSAVYYCARDGGGSFDYWGQGTRVTVSS

SEQ ID NO: 20430 - protein, 94 aa, Homo sapiens
ASGFTFSSYHMSWIRQAPGKGPEWVAAITSTGSNTYYAESVKGRFTISRDDSKDTVYVQMNRLEVEDSAVYYCARDGGGSFDYWGQGILVTVSS

SEQ ID NO: 20431 - protein, 95 aa, Homo sapiens
AASGFTFSIYPMSWVRQAPGKGLEWVSAITGSGDNTYYAESVKGRFTISRDNSKNTFYVQMNRLKAEDSAVYYCARDGGGSFDYWGLGTLVTVSS

SEQ ID NO: 20432 - protein, 95 aa, Homo sapiens; identical to SEQ ID NO: 20427

SEQ ID NO: 20433 - protein, 95 aa, Homo sapiens
AASGLTFSSYPMSWVRQAPGKGLEWVSAITGSGDNTFYTDSVKGRFTISRDNSKNTIYVQMNRLKAEDSAVYYCARDGGGSFDYWGQGTLVTVSS

SEQ ID NO: 20434 - protein, 95 aa, Homo sapiens
AASGLTFSTYPMSWVRQAPGKRLEWVSAITGSGDNTYYTDSVKGRFTISRDNSKNTIYVQMNRLKAEDSAVYYCARDGGGSFDYWGQGTLVTVSS

SEQ ID NO: 20435 - protein, 95 aa, Homo sapiens
AASGLTFSSYPMSWIRQAPGKGLEWVAAITGSSDNTYYADSVKGRFTISRDNSNNMVYVQMNRLKADDSAVYYCARDGGGSFDYWGQGTLVTVSS

SEQ ID NO: 20436 - protein, 95 aa, Homo sapiens
AASGLIFSSYPMSWVRQAPGKGLEWVSAITGSSDKTFYADSVKGRFTISRDNSKNTIYMQMNRLKAEDSAVYYCARDGGGSFDYWGQGTLVTVSS

SEQ ID NO: 20437 - protein, 94 aa, Homo sapiens; identical to SEQ ID NO: 20423

SEQ ID NO: 20438 - protein, 94 aa, Homo sapiens; identical to SEQ ID NO: 20422

SEQ ID NO: 20439 - protein, 95 aa, Homo sapiens
AASGFTFTSYHMSWVRQAPGKGLEWVSAITRSGDNTYYADSVKGRFTISRDNSKNTFYVQMNRLKAEDSAVYYCARDGGGSFDYWGQGTLVNVSS

SEQ ID NO: 20440 - protein, 94 aa, Homo sapiens
ASGFTFSSYHMSWVRQAPGKGLEWVSAITSTGSNTYYADSVKGRFTISRDDSKDTLYVQMNRLEAEDSAVYYCARDGGGSFDYWGQGTLVTVSS

SEQ ID NO: 20441 - protein, 95 aa, Homo sapiens
AASGLTFSSYPMSWIRQAPGKGLEWVAAITGSSANTYYADSVKGRFTISRDNSKNMVFVQMNNLEPEDSAVYFCARDGGGSFDYWGQGTLVAVSS

SEQ ID NO: 20442 - protein, 95 aa, Homo sapiens
AASGFTFTSYHMSWVRQAPGKGLEWVSAITRSGDNTYYADSVKGRFTISRDNSKNTFYVQMNRLKAEDSAVYYCARDGGGSFDYWGQGTLVTVSS

SEQ ID NO: 20443 - protein, 95 aa, Homo sapiens
AASGFTFSIYPMSWVRQAPGKGLEWVSAITGSGHDTYYANSVKGRFTISRDNFKNTISMQMNRLKAEDSAVYYCARDGGGSFDYWGQGILVTVSS

SEQ ID NO: 20444 - protein, 95 aa, Homo sapiens
AASGLTFSSYPMSWIRQAPGKGLEWVSAITGSGDNTYYADSVKGRFTISRDNSKKTLYVQMNRLTAEDSAIYYCARDGGGSFDYWGQGTLVTVSS

SEQ ID NO: 20445 - protein, 95 aa, Homo sapiens
AASGLTFSTYPMSWVRQAPGKGLEWVSAITGSGDNTYYTDSVKGRFTISRDNSKNTIYVQMNRLKAEDSAVYYCARDGGGSFDYWGQGTLVTVSS

SEQ ID NO: 20446 - protein, 95 aa, Homo sapiens
AASGLTFSSYPMSWVRQAPGKGLEWVSAITGSSDNTYYADSVKGRFTISRDNSKNTLYVQMNRLKADDSAVYYCARDGGGSFDYWGQGTLVTVSS

SEQ ID NO: 20447 - protein, 95 aa, Homo sapiens
AASGLTFSSYPMSWVRQAPGKGLEWVSAITGSSDNTYYADSVKGRFTISRDNSKNTLYVQMNRLKAEDSAVYYCARDGGGSFDYWGQGTLVTVSS

SEQ ID NO: 20448 - protein, 94 aa, Homo sapiens
ASGFTFSSYHMSWIRQAPGKGPEWVAAITSTGSNTYYLESVKGRFTISRDDSKDTVYVQMNRLEVEDSAIYYCARDGGGSFDYWGQGILVTVSS

SEQ ID NO: 20449 - protein, 94 aa, Homo sapiens
ASGFTFSSYHMSWVRQAPGKGPEWVSAITSTGSNTYYADSVKGRFTISRDDSKDTVYVQMNRLEAEDSAVYYCARDGGGSFDYWGQGILVTVSS

SEQ ID NO: 20450 - protein, 95 aa, Homo sapiens
AASGFAFGIYAMSWVRQAPGKGLDWVSGITAGSSSTYYADSVRGRFTISRDNSKNTVYLQMNSLTAEDTAIYYCARDGGGSFDYWGQGTLVTVSS

SEQ ID NO: 20451 - protein, 95 aa, Homo sapiens
AASGLTFSTYPMSWIRQAPGKGLEWVAAITGSSANTYYADSVKGRFTISRDNSKNMVYVQMNKLQAEDSAVYYCARDGGGSFDYWGQGILVTVSS

SEQ ID NO: 20452 - protein, 95 aa, Homo sapiens
AASGLTFSSYPMSWVRQAPGKGLEWVSAITGSGDNTYYADSVKGRFTISRDNSKNTLYVQMNRLKAEDSAVYYCARDGGGSFDYWGQGTLVTVSS

SEQ ID NO: 20453 - protein, 95 aa, Homo sapiens
AASGLTFSNYPMSWVRQAPGKGLEWVSAITGHSGSTYYADSVEGRFTISRDNSRNTLYMQMNRLIAEDSAVYYCARDGGGSFDYWGQGTLVTVSS

SEQ ID NO: 20454 - protein, 95 aa, Homo sapiens
AASGLTFSSYPMSWVRQAPGKGLEWVSAITGSGDNTYYAEIVKGRFTISRDNSKKTVYVQMNRLKVDDSAVYYCARDGGGSFDYWGQGTLVTVSS

SEQ ID NO: 20455 - protein, 94 aa, Homo sapiens; identical to SEQ ID NO: 20423

SEQ ID NO: 20456 - protein, 95 aa, Homo sapiens
AASGFTFSIYPMSWVRQAPGKGLEWVSAITGSGDNTYYADSVKGRFTISRDNSKNTFYVQMNRLKAEDSAVYYCARDGGGSFDYWGLGTLVTVSS

SEQ ID NO: 20457 - protein, 95 aa, Homo sapiens
AASGLTFSTYPMSWVRQSPGGGLEWVSAITGTSGNTYYADSVKGRFTISRDNSKNTLYMHMNRLKAEDSAVYYCARDGGGSFDYWGQGTLVTVSS

SEQ ID NO: 20458 - protein, 95 aa, Homo sapiens
AASGFTFSSYHMSWVRQAPGKGLEWVSAITRSGDNTYYADSVKGRFTISRDNSKNTFYVQMNRLKAEDSAVYYCARDGGGSFDYWGQGTLVTVSS

SEQ ID NO: 20459 - protein, 95 aa, Homo sapiens; identical to SEQ ID NO: 20453

SEQ ID NO: 20460 - protein, 100 aa, Homo sapiens
AASGFTLSAYGIHWVRHTPGKGLEWVAVFWSDGSQQYYADSVKGRFTISRDLSKSTVDLQMNSLRPEDTAVYYCARDCDTTSHYSRFDPWGQGTLVTVSS

SEQ ID NO: 20461 - protein, 100 aa, Homo sapiens
AASGFTLSAYGIHWVRHTPGKGLEWVAVFWYDGSQQYYADSVKGRFTISRDLSKSTVDLQMNSLRPEDTAVYYCARDCDTTSHYSRFDPWGQGTLVTVSS

SEQ ID NO: 20462 - protein, 100 aa, Homo sapiens; identical to SEQ ID NO: 20460

SEQ ID NO: 20463 - protein, 99 aa, Homo sapiens
ASGFTFSKYGIHWVRQAPGKGLEWVAVIWAGTNAKYYADSVKGRFTVSRDNSKNMVFLQMDSLRAEDTALYYCARDCDTTSHYSRFDPWGQGTLVTVSS

SEQ ID NO: 20464 - protein, 95 aa, Homo sapiens
AASGFTFRNYPMRWVRQAPGKGLDWVSTIGGGGSTYYADSVKGRFTVSRDNSENTLYLQMNNLRAEDTAVYYCATKYSGYDFGYWGQGTLVTVFS

SEQ ID NO: 20465 - protein, 95 aa, Homo sapiens
AASGFTFSTYVMRWVRQAPGKGLEWVSSIGDGGNAYYADSVKGRFTISRDNSKNTLYLQMNSLRAEDTAVYYCATKYSGYDFGYWGQGTLVTVSS

SEQ ID NO: 20466 - protein, 95 aa, Homo sapiens
AASGFTFSGYPMRWVRQAPGKGLEWVSTIGTFSSTYYADSVKGRFTISRDNSKNTFYLQMNSLRVDDTAVYYCATKYSGYDFGYWGQGTLVTVSS

SEQ ID NO: 20467 - protein, 95 aa, Homo sapiens; identical to SEQ ID NO: 20465

SEQ ID NO: 20468 - protein, 95 aa, Homo sapiens
AASGFTFSTYVMRWVRQAPGKGLEWVSSIGDGGNAYYADSVKCRFTISRDNSKNTLYLQMNSLRAEDTAVYYCATKYSGYDFGYWGQGTLVTVSS

SEQ ID NO: 20469 - protein, 95 aa, Homo sapiens; identical to SEQ ID NO: 20465

SEQ ID NO: 20470 - protein, 95 aa, Homo sapiens
AASGFTFSTNAMAWVRQAPGKGLDWVSSVDNGGNTFYADSVKGRFTISRDISKNTLYLQMNSLRAEDTAIYYCAKDIFWWAFDFWGRGTLVTVSS

SEQ ID NO: 20471 - protein, 95 aa, Homo sapiens
AASGFTFAGNAMAWVRQPPGKGLEWVSSFGNGADTYYADSVKGRFTISRDDSKNTLYLQMNSLRAEDTAVYYCAKDIFWWAFDFWGQGTLVTVSS

SEQ ID NO: 20472 - protein, 95 aa, Homo sapiens
VASGFTFAGNAMAWVRQRPGKGLEWVSSFGNGAETYYADSVKGRFTISRDDSKNTLYLQMNSLRAEDTAVYYCAKDIFWWAFDFWGQGTLVTVSS

SEQ ID NO: 20473 - protein, 96 aa, Homo sapiens
AASGFTFSSYWMHWVRQAPGKGLVWVSRIHSDGTSTVYADSVRGRFTISRDNAKNTVYLQMNSLRADDTAVYYCARGGPYGDLDYWGQGTLVTVSS

SEQ ID NO: 20474 - protein, 96 aa, Homo sapiens; identical to SEQ ID NO: 20473

SEQ ID NO: 20475 - protein, 96 aa, Homo sapiens
AASGFTFSSYWMHWVRQAPGKGLVWVSRIHSDGSSTVYADSVRDRFTISRDNAKNTVYLQMNSLRVDDTAIYYCARGGPYGDLDYWGQGTLVTVSS

SEQ ID NO: 20476 - protein, 96 aa, Homo sapiens
AASGFTFSSYWMHWVRQAPGKGLVWVSRIHSDGSRTVYADSVRDRFTISRDNAKNTVYLQMNSLRVDDTAIYYCARGGPYGDLDYWGQGTLVTVSS

SEQ ID NO: 20477 - protein, 96 aa, Homo sapiens; identical to SEQ ID NO: 20476

SEQ ID NO: 20478 - protein, 96 aa, Homo sapiens
AASGFTFSSYWMHWVRQAPGKGLVWVSRINSDGSDTTYADSVKGRFTISRDSAKNTLYLQMNSLRVEDTAVYYCARGGPYGDLDYWGQGTLVTVSS

SEQ ID NO: 20479 - protein, 101 aa, Homo sapiens
VASGFTFSNAWMSWVRQAPGKGPEWVGRIKSKADGGTTDYAAPVKGRFTISRDDSKNTLYLRMNSLKTEDTAMYFCITDRGYGDFGGEPNWGQGTLVTVSS

SEQ ID NO: 20480 - protein, 101 aa, Homo sapiens
AASGFTFSIAWMSWVRQAPGKGLEWVGRIKSKTDGETTDYAAPVKGRFTISRDDSKNTLYLRMNSLKTEDTAMYFCITDRGYGDFGGEPNWGQGTLVTVSS

SEQ ID NO: 20481 - protein, 100 aa, Homo sapiens
ASGFTFSNAWMSWVRQAPGKGPEWGGRIKSKADGGTTDYAAPVKGRFTISRDDSKNTLYLRMNSLKTEDTAMYFCITDRGYGDFGGEPNWGQGTLVTVSS

SEQ ID NO: 20482 - protein, 95 aa, Homo sapiens
AASGFTFSSYEMNWVRQAPGKGLEWVSYIGTGGSTIFYADSVKGRFTISRDNAKNSLYLQMNSLRAEDTAVYYCARRGRGYFDYWGQGTLVTVSS

SEQ ID NO: 20483 - protein, 95 aa, Homo sapiens
AASGFTFSTYEMNWVRQAPGKGLEWVSYIGADGSTIFYPDSVKGRFTISRDNAKNSLFLQMDSLRAEDTAVYYCARRGRGYFDYWGQGTLVTVSS

SEQ ID NO: 20484 - protein, 95 aa, Homo sapiens
AASGFTFSTYEMNWVRQAPGKGLEWLSYIGTSGSTIFYADSAKGRFTISRDNAKNSLYLQMNSLRAEDTAVYYCARRGRGYFDYWGQGTLVSVSS

SEQ ID NO: 20485 - protein, 95 aa, Homo sapiens
AASGFTFSTYEMNWVRQAPGKGLEWLSYIGTSGSTIFYADSAKGRFTISRDNAKNSLYLQMNSLRAEDTAVYYCARRGRGYFDYWGQGALVSVSS

SEQ ID NO: 20486 - protein, 95 aa, Homo sapiens
AASGFTFSSYEMNWVRQAPGKGLEWLSYIGTSGSTIFYADSAKGRFTISRDNAKNSLYLQMNSLRAEDTAVYYCARRGRGYFDYWGQGTLVSVSS

SEQ ID NO: 20487 - protein, 95 aa, Homo sapiens; identical to SEQ ID NO: 20484

SEQ ID NO: 20488 - protein, 95 aa, Homo sapiens
AASGFTFSSYDMNWVRQAPGKGLEWLSHIGASGVAIFHADTVKGRITISRDNAKNSLYLQMDSLRAEDTAVYYCARRGRGYFDYWGQGTLVSVSS

SEQ ID NO: 20489 - protein, 95 aa, Homo sapiens; identical to SEQ ID NO: 20483

SEQ ID NO: 20490 - protein, 95 aa, Homo sapiens
AASGFTFSSYEMNWVRQAPGKGLEWVSYIGTSGSTIFYADSVKGRFTISRDNAKNSLYLQMNSLRAEDTAVYYCARRGRGYFDYWGQGTLVSVSS

SEQ ID NO: 20491 - protein, 95 aa, Homo sapiens
EASGFIFDSYEMNWVRQAPGKGLEWASYIGSSTASIYYADSVKGRFTISRDNAKNSLYLQMDSLRVEDTAVYYCARRGRGYFDYWGQGILVTVSS

SEQ ID NO: 20492 - protein, 95 aa, Homo sapiens
VGSGFNFNIYSMNWVRQAPGKGLEWVSYITGPSNVIDYGDSVKGRFTISRDNAKKSVYLQMNSLSAEDTGVYYCARSTEGAFDYWGQGVLVTVSS

SEQ ID NO: 20493 - protein, 95 aa, Homo sapiens; identical to SEQ ID NO: 20492

SEQ ID NO: 20494 - protein, 95 aa, Homo sapiens
AASGFTFSIYSMNWVRQAPGKGLEWVSYMTSDTRTIHYAESVKGRFTISRDNAKNSVYLQMNSLRDEDTAVYYCARSTEGAFDYWGQGTLVTVSS

SEQ ID NO: 20495 - protein, 95 aa, Homo sapiens
AASGFTFRVYSMNWVRQAPGKGLEWISYMTSDMRTIKYADSVKGRFTISRDNDKNSVYLQMNSLRDEDTAIYYCARSTEGAFDYWGQGTLVTVSS

SEQ ID NO: 20496 - protein, 95 aa, Homo sapiens
AGCGFTFTNYAMRWVRQAPGKGLEWVSTISGSGVGTYYADSVKGRFTISRDTSKDTLYLQMNSLRADDTALYFCARGPGYYFDYCGQGTLVTVSS

SEQ ID NO: 20497 - protein, 95 aa, Homo sapiens
AVSGFTLSGYVMRWVRQAPGKGLEWVSTLGSDGESTYYTDSVRGRFTISRDSSKNTLYLQMNSLRAEDAAVYYCARGPGYYFDYWGQGTLVTVSS

SEQ ID NO: 20498 - protein, 98 aa, Homo sapiens
AGSGFTLSSFWMHWVRQVPGKGLVWVSRINSDGSSTSYADSVKGRFTISRDNAKNTLYLQMNSLRAEDTAVYYCARDGYGSGIDFDYWGQGTLVTVSS

SEQ ID NO: 20499 - protein, 98 aa, Homo sapiens
AASGFTFSSHWTHWVRQAPGKGLVWVSRINTDGSFTNYADSVKGRFTISRDNAKNTLYLQMNRLRADDTAVYYCARDGYGSGIDFDYWGQGTLVTVSS

SEQ ID NO: 20500 - protein, 97 aa, Homo sapiens
AASGFTFSSYWMTWVRQAPGKGLEWVANINQDGSEKHYVDSVKGRFTNSRDNAKNSLYLQMNSLRVEDTAVYYCAREGGSGYSFDYWGQGTLVTVSS

SEQ ID NO: 20501 - protein, 97 aa, Homo sapiens
AASGFTFSSYWMTWVRQAPGKGLEWVANINQDGSEKHYVDSVKGRFTNSRDNAKNSLYLQMNSLRAEDTAVYYCAREGGSGYSFDYWGQGTLVTVSS

SEQ ID NO: 20502 - protein, 97 aa, Homo sapiens; identical to SEQ ID NO: 20501

SEQ ID NO: 20503 - protein, 97 aa, Homo sapiens
AASGFSFSSYWMTWVRQAPGKGLEWVANINQDGSEKHYVDSVKGRFTNSRDNAKNSLYLQMNSLRAEDTAVYYCAREGGSGYSFDYWGQGTLVTVSS

SEQ ID NO: 20504 - protein, 97 aa, Homo sapiens
AASGFSFSSYWMTWVRQAPGKGLEWVANINQDGSEKHYVDPVKGRFTNSRDNAKNSLYLQMNSLRAEDTAVYYCAREGGSGYSFDYWGQGTLVTVSS

SEQ ID NO: 20505 - protein, 97 aa, Homo sapiens
AVSGITFSSYWMTWVRQAPGKGLEWVANIKQDGSEKHYVDSVKGRFTISRDNAKNSMYLQMNSLRAEDTAVYYCAREGGSGYSFDYWGRGTLVTVSS

SEQ ID NO: 20506 - protein, 97 aa, Homo sapiens
VASGFTFSNYWMTWVRQAPGKGLEWLANTKQDGSEKNYVDSVKGRFTISRDNAKKSLYLQMNSLRGEDTAVYYCAREGGSGYSFDYWGQGTLVTVSS

SEQ ID NO: 20507 - protein, 96 aa, Homo sapiens
ASGFTFSNYWMTWVRQAPGKGLEWLANIKQDGSEKNYVDSVKGRFTISRDNAKNSLSLQMNSLRAEDTAVYYCAREGGSGYSFDYWGQGTLVTVSS

SEQ ID NO: 20508 - protein, 97 aa, Homo sapiens
AVSGITFSSYWMTWVRQAPGKGLEWVANINQDGSEKNYVASLKGRFTISRDNAKKSLYLQLNSLRAEDTAVYYCAREGGSGYSFDYWGQGTLVTVSS

SEQ ID NO: 20509 - protein, 95 aa, Homo sapiens
AASGFSFSTYAMHWVRQAPGKGLEYVSAINYNGGTTYYTNSVKGRFTISRDNSKNMLYLQMGSLRAEDMAVYYCARYQMGAPDYWGQGTLVTVSS

SEQ ID NO: 20510 - protein, 95 aa, Homo sapiens
AASGFSFNTYAMHWVRQAPGKGLEYVSAINYNGGTTYYANSVKGRFTISRDNSKNMLYLQMGSLRPEDMAVYFCARYQMGAPDYWGQGTLVTVSS

SEQ ID NO: 20511 - protein, 95 aa, Homo sapiens
AASGFSFSTYAMHWVRQAPGKGLEYVSAINYNGHNTYYVSSVTGRFTISRDNSKNMLYLQMGSLRPEDMAVYFCARYQMGAPDYWGPGTLVTVSS

SEQ ID NO: 20512 - protein, 95 aa, Homo sapiens; identical to SEQ ID NO: 20509

SEQ ID NO: 20513 - protein, 95 aa, Homo sapiens; identical to SEQ ID NO: 20510

SEQ ID NO: 20514 - protein, 95 aa, Homo sapiens; identical to SEQ ID NO: 20509

SEQ ID NO: 20515 - protein, 95 aa, Homo sapiens
ADSGFTFGSYWMDWVRQAPGKGLEWVANIKQDGSETGYVDSVKGRFTISRDNAKSSLYLQMNSLRVEDTAVYYCARDAFGVGSYWGQGILVTVSS

SEQ ID NO: 20516 - protein, 95 aa, Homo sapiens
ADSGFSFGNYWLDWVRQAPGKGLEWVANIKQDGSETGYVDSVKGRFTISRDNAKSSLYLQMNSLRVEDTAVYYCARDAFGVGSYWGQGILVTVSS

SEQ ID NO: 20517 - protein, 95 aa, Homo sapiens
AASGLTFSSYWLDWVRQAPGKGLEWVANVRQDGSERNYVDSVKGRFTVSRDNAKNSLYLQMNSLGAEDTAVYYCARDAFGVGSYWGQGILVSVSS

SEQ ID NO: 20518 - protein, 94 aa, Homo sapiens
VASGFTFSSHEMLWVRQAPGKGLERVSYINTGDRNIWYADSVKGRFTISRDDAKNSLYLQMNSLRTEDMAVYYCVRGWRELTHWGQGTLVTVSS

SEQ ID NO: 20519 - protein, 94 aa, Homo sapiens
AASGFPFSSHEMNWVRQAPGEGPEWISYIGDSGGNIKYADSVKGRFTISRDNAKNSLYLQMNSLRAEDTAVYYCVRGWRELTHWGQGTLVTVSS

SEQ ID NO: 20520 - protein, 95 aa, Homo sapiens
KGSGYGFTSYWIAWVRQMPGKGLELMGIIYPGDSDTTYSPSFEGQVTMTADKSINTAYLQWSSLKASDTALYYCARRDAYRFDYWGQGTLVTVSS

SEQ ID NO: 20521 - protein, 94 aa, Homo sapiens
GSGYSFTNYWIGWVRQMPGKGLEWMGIIYPYDSDTRYSPSFQGQVTISADKSISTAYLQWSSLKASDTAMYYCARRDAYRFDYWGQGTLVTVSS

SEQ ID NO: 20522 - protein, 95 aa, Homo sapiens
ASGYTFTNYAIHWVRQAPGQSLEWMGWIYAANGNTQYSQKFQGRVTITMDTFTNTAYMDLSSLRSEDTAIYYCARFAVAAPPDYWGQGTQVTVSS

SEQ ID NO: 20523 - protein, 95 aa, Homo sapiens
ASGYTFSAYAIHWVRQAPGQRLEWLGWINVGKGNTKYSEEFQGRVTITRDTSASTAYMEVSSLRSEDTAVYYCARFAVAAPPDYWGQGTLVTVSS

SEQ ID NO: 20524 - protein, 95 aa, Homo sapiens
ASGYTFTNYAIHWVRQAPGQSLEWMGWIYAADGNTQYSQKFQGRVTITMDTFTNTAYMDLSSLRSEDTAIYYCARFAVAAPPDYWGQGTQVTVSS

SEQ ID NO: 20525 - protein, 95 aa, Homo sapiens; identical to SEQ ID NO: 20522

SEQ ID NO: 20526 - protein, 94 aa, Homo sapiens
VASGFTFSGYWMHWVRQAPGKGLMWISGINNDGSRTKYVDSVRGRFTISRDNAKNTLFLQVNGLTAEDTAVYYCARDFLTGGYWGQGTPVTVSS

SEQ ID NO: 20527 - protein, 94 aa, Homo sapiens
AASGFTFSNYWMHWVRQAPGKGLVWVSRIKTDGSRTSYADSVKGRFTISRDNAKNTLYLQMNSLRAEDTAVYFCARDFLTGGYWGQGTVVTVSS

SEQ ID NO: 20528 - protein, 91 aa, Homo sapiens
AASGFTFSNSWMNWVRQAPGKGLECVANINQDGTDKYYVDSVKGRFTISRDNAKNSLYLQMNSLTAEDTALYYCVRSLDSWGQGTLVTVSS

SEQ ID NO: 20529 - protein, 91 aa, Homo sapiens; identical to SEQ ID NO: 20528

SEQ ID NO: 20530 - protein, 91 aa, Homo sapiens
VASGFTFSSYWMNWVRRTPGKGLEWVANIKEDGSEDYYMDSMKGRFTISRDNAKNTVYLQMNSLRAEDTALYYCVRSLDSWGQGILVTVSS

SEQ ID NO: 20531 - protein, 98 aa, Homo sapiens
AASGFTFSSYAMSWVRQAPGEGLEWVSSIRVTGSSTYYAGSVKGRFTISRDSSKNTLYLQMNSLRAEDTALYYCAKGSGYDWRIFDYWGQGTLVTVSS

SEQ ID NO: 20532 - protein, 98 aa, Homo sapiens
AASGFTFSSYAMSWVRQAPGEGLEWVSSIRASGSSTYYAGSVKGRFTISRDSSKNTLYLQMNSLRAEDTALYYCAKGSGYDWRIFDYWGQGTLVTVSS

SEQ ID NO: 20533 - protein, 97 aa, Homo sapiens
ASGFTFNSYAMSWVRQAPGEGLEWVSSIRASGGNIFYAGSVKGRFTISRDSSKNTLYLQMNSLRAEDTALYYCAKGSGYDWRIFDYWGQGTLVTVSS

SEQ ID NO: 20534 - protein, 98 aa, Homo sapiens
AASGFTFSSYAMSWVRQAPGEGLEWVSSIRVSGSNIYYAGSVKGRFTISRDNSKNTLFLQMNSLRAEDTALYYCAKGSGYDWRIFDYWGQGTLVTVSS

SEQ ID NO: 20535 - protein, 98 aa, Homo sapiens
AASGFTFTSYAMSWVRQTPGEGLEWISTIRVSGGNIYYAGSVKGRFTISRDTSKNTLYLQMNSLRAEDTALYYCAKGSGYDWRIFDYWGQGTLVTVSS

SEQ ID NO: 20536 - protein, 98 aa, Homo sapiens; identical to SEQ ID NO: 20532

SEQ ID NO: 20537 - protein, 97 aa, Homo sapiens; identical to SEQ ID NO: 20533

SEQ ID NO: 20538 - protein, 98 aa, Homo sapiens
AASGFTFSAYAMSWVRQGPGKGLEWVSGISGSGGTTHYADSVKGRFTISRDNSKNTLYLQMNGLRADDTAVYYCAKGSGYDWRIFDYWGQGTLITVSS

SEQ ID NO: 20539 - protein, 98 aa, Homo sapiens
AASGFTFSSYAMSWVRQAPGEGLEWVSSIRVSGSSTYYAGSVKGRFTISRDSSKNTLYLQMNSLRAEDTALYYCAKGSGYDWRIFDYWGQGTLVTVSS

SEQ ID NO: 20540 - protein, 98 aa, Homo sapiens
AASGFTFSSYAMSWVRQAPGEGLEWVSSIRVSGGSIYYAGSVKGRFTISRDNSKNTLYLQMNSLRAEDTALYYCAKGSGYDWRIFDYWGQGTLVTVSS

SEQ ID NO: 20541 - protein, 87 aa, Homo sapiens
SGFTFNNAGMNWVRQAPGRGLEWISYISSDAIFYGDSVQNRFIVSRDSAQNSVYLQMNSLRVEDTAVYFCARGGEDWGQGTLVTVSS

SEQ ID NO: 20542 - protein, 91 aa, Homo sapiens
VASGLTFSTYNMNWVRQAPGKGLEWVSFISGSDSTIYYADSVKGRFTISRDNAKNSLYLQMNSLRDEDTAVYYCARGGEDWGPGTLVTVSS

SEQ ID NO: 20543 - protein, 91 aa, Homo sapiens
AASGFTFNTFWMSWVRQISGKGLECLANISPDGSAKFYADSVKGRITISRDNAKNSLTLQMNSLRVDDTAVYYCVRSVDHWGQGTLVTVSS

SEQ ID NO: 20544 - protein, 91 aa, Homo sapiens
AASGFTFNTFWMSWVRQISGKGLECLANISPDGSAKFYADSVKGRITISRDNAKNSLTLQMNSLRVDDTGVYYCVRSVDHWGQGTLVTVSS

SEQ ID NO: 20545 - protein, 91 aa, Homo sapiens
AASGFRFNTFWMSWVRQTSGKGLECLANISPDGSSKFYADSLKGRITISRDNAKNSLNLQMNSLRVDDTAVYYCVRSVDHWGQGTLVTVSS

SEQ ID NO: 20546 - protein, 91 aa, Homo sapiens
EASGFTFTNYWMSWVRQSPGKGLECVANIKPDGSDKFYVDSLKGRFTISRDNAKNSLYLEMNSLRAEDTAVYYCVRSVDHWGQGTLVTVSS

SEQ ID NO: 20547 - protein, 91 aa, Homo sapiens
AASGFTFSNYWMSWVRQAPGKRLECVANIKPDGSDKFYVDSVKGRFTISRDNAKNSLYLQMNNLRAEDTAVYHCVRSVDHWGQGTLVTVSS

SEQ ID NO: 20548 - protein, 91 aa, Homo sapiens; identical to SEQ ID NO: 20546

SEQ ID NO: 20549 - protein, 91 aa, Homo sapiens
VASGFTFSNFWMSWVRQAPGKGLECVANIKPDGSDKFYVDSLKGRFTISRDNAKNSLYLQMNSLRAEDTAVYYCVRSVDHWGQGTLVTVSS

SEQ ID NO: 20550 - protein, 91 aa, Homo sapiens
AASGFTFSNSWMSWVRQGPGKRLECVANIKEDGTATFYVDSVKGRFTISRDNAKNSLFLQMNSLRVEDTAVYYCVRSVDHWGQGTLVTVSS

SEQ ID NO: 20551 - protein, 91 aa, Homo sapiens
AASGFTFTNYWMSWVRQAPGKRLECVANIKPDGSDSFYVDSVKGRFTISRDNAKNSLFLQMNSLRVEDTAVYYCVRSVDHWGQGTLVTVSS

SEQ ID NO: 20552 - protein, 91 aa, Homo sapiens
AASGFTFTNYWMSWVRQAPGKRLECVANIKPDGSDKFYVDSVKGRFTISRDNAKNSLFLQMNSLRVEDTAVYYCVRSVDHWGQGTLVTVSS

SEQ ID NO: 20553 - protein, 91 aa, Homo sapiens
AASGFTFPDFWMSWVRQTPGKRLECVANIRPDGGAKFYVDSVEGRFTISRDNAKNSLFLQMNSLRVEDTAVYYCVRSVDHWGQGTLVTVSS

SEQ ID NO: 20554 - protein, 91 aa, Homo sapiens
VASGFTFSNYWMSWVRQAPGKRLECVANIKPDGSDKFYVDSVKGRFTISRDNAKNSLYLQMNNLRAEDTAVYHCVRSVDHWGQGTLVTVSS

SEQ ID NO: 20555 - protein, 91 aa, Homo sapiens
AASGFTFSSSWMSWVRQGPGKRLECVANIKEDGSAKFYVDSVKGRFTISRDNAKNSLYLQMNSLRAEDTAVYYCVRSVDHWGQGTLVTVSS

SEQ ID NO: 20556 - protein, 91 aa, Homo sapiens
AASGFTFPNFWMSWVRQTPGKRLECVANIKPDGGATFYLDSVKGRFTISRDNAQNSLFLQMNSLRVEDTAVYYCVRSVDHWGQGTLVTVSS

SEQ ID NO: 20557 - protein, 91 aa, Homo sapiens
AASGFTFSDYWMSWVRQAPGKRLECVANIKPDGSDKFYMDSVKGRFTISRDNAKNSLYLQMYSLTVEDTAVYHCVRSVDHWGQGTLVTVSS

SEQ ID NO: 20558 - protein, 91 aa, Homo sapiens
AASGFTFSNYWMSWVRQGPGKRLECVANIKEDGSAKFYVDSVRGRFTISRDNAKNSVYLQMNSLRAEDTAVYYCVRSVDHWGQGTLVTVSS

SEQ ID NO: 20559 - protein, 91 aa, Homo sapiens; identical to SEQ ID NO: 20547

SEQ ID NO: 20560 - protein, 91 aa, Homo sapiens
AASGFTFADFWMSWVRQAPGKRLECVANIRPDGGAKFYVDSVEGRFTISRDNAKNSLFLQMNSLRVEDTAVYYCVRSVDHWGQGTLVTVSS

SEQ ID NO: 20561 - protein, 91 aa, Homo sapiens
AASGFTFSNYWMSWVRQGPGKRLECVANIKEDGSAKFYVDSVKGRFTISRDNAKNSLYLQMNSLRAEDTAVYYCVRSVDHWGQGTLVTVSS

SEQ ID NO: 20562 - protein, 90 aa, Homo sapiens
ASGFTFSNYWMSWVRQAPGKRLECVANIKPDGSDKFYVDSVKGRFTISRDNAKNSLYLQMNNLRAEDTAVYHCVRSVDHWGQGTLVTVSS

SEQ ID NO: 20563 - protein, 91 aa, Homo sapiens
AASGFIFSDFWMSWVRQAPGRRPECVANIKPDGSDQFYVDSLKGRFTISRDNAKNSLFLQMNSLRVEDTAVYYCVRSVDHWGQGTLVTVSS

SEQ ID NO: 20564 - protein, 97 aa, Homo sapiens
TVSGGSISSYYWSWIRQPPGKGLEWIGNIYYSGSTHYNPSLKSRVTISVDTSKNQFSLKLSSVIVADTAVYYCARSSSGWYWYFDLWGRGTLVTVSS

SEQ ID NO: 20565 - protein, 96 aa, Homo sapiens
VSGGSISSYYWNWIRQPPGKGLEWIGYIYYSGTTNYNPSLKSRVTISVDTSKNQFSLKLSSVTAADTAVYYCARSSSGWYWYFDLWGRGTLVTVSS

SEQ ID NO: 20566 - protein, 97 aa, Homo sapiens
TVSGGSISSYYWNWIRQPPGKGLEWIGYIYYSGTTNYNPSLKSRVTISVDTSKNQFSLKLSSVTAADTAVYYCARSSSGWYWYFDLWGRGTLVTVSS

SEQ ID NO: 20567 - protein, 95 aa, Homo sapiens
ASGYIFSTYYVHWVRQAPGQGLEWMGRVSPSDGSTHYPQNFQGRVTMTTDTSSSTVYMDLSSLRSEDTAVYYCAREYPGRCWFDPWGQGTLVTVS

SEQ ID NO: 20568 - protein, 96 aa, Homo sapiens
ASGYTFSTYYVHWVRQAPGQGLEWMGRVGPNDGSTHYPQNFQGRVTMTTDTSSSTVYMDLSSLRSEDTAVYYCAREYPGRCWFDPWGQGTLVTVSS

SEQ ID NO: 20569 - protein, 96 aa, Homo sapiens
ASGYTFTNYFIHWVRQAPGQGLEWLGMISPSDGAINYAQRFQGRVTMTRDTPTSTVYMELNTLRSEDTAVYYCAREYPGRCWFDPWGQGTLVTVSS

SEQ ID NO: 20570 - protein, 96 aa, Homo sapiens
ASGYTFSTYFVHWVRQAPGQGLEWMGRVNPNGGATHYPRNFQGRITMTTDTSSSTVYMDLSSLRSEDTAVYYCAREYPGRCWFDPWGQGTLVTVSS

SEQ ID NO: 20571 - protein, 93 aa, Homo sapiens
IGSGFSFGDEAISWVRQAPGKGLEWVGFIRSKVYGGTTDYAASVKGRFTISRDDSKSIAYLQINNLKAEDTAVYFCTRDQLWWGQGTLVTVSS

SEQ ID NO: 20572 - protein, 92 aa, Homo sapiens
TSGFTFAEDGLSWVRQAPGKGLEWVGFVRPKANGGTAEYAASVKGRCIISRDDSKSIVYLQMNSLKAEDTAMYYCTRDQLWWGQGTLVTVSS

SEQ ID NO: 20573 - protein, 93 aa, Homo sapiens
TTSGFTFDEDGLSWVRQAPGKGLEWVGFVRPKAYGGTAEYAASVKGRFIISRDDSRRIAYLQMNSLKAEDTAVYYCTRDQLWWGQGTLVIVSS

SEQ ID NO: 20574 - protein, 100 aa, Homo sapiens
APGFIVGDAWMGWVRQAPGTGLEWVGRIKSKADGGTTDYAAPVEGRFTISRDDSKNTLYLQMNSLRSDDTAVYYCTTDRGIAARPLFDSWGLGTLVTVSS

SEQ ID NO: 20575 - protein, 101 aa, Homo sapiens
AAPGFSVSNAWMGWVRQAPGTGLQWVGRIKSRPDGGTTDYAAPVKGRFTIFRDDSKNTLYLQMNSLKSEDTAVYYCTTDRGIAARPLFDSWGQGTLVTVSS

SEQ ID NO: 20576 - protein, 101 aa, Homo sapiens
AAPGFTVSDAWMGWVRQAPGTGLEWIGRIKSKRDGGTTDYAAPVKGRFTISRDDSKNTLYLQMNSLKSEDTAVYYCTTDRGIAARPLFDSWGQGTLVTVSS

SEQ ID NO: 20577 - protein, 101 aa, Homo sapiens
AASGFTFTNAWMGWVRQAPGKGLEWIGRLKSKSDGGTTDYAAPVKGRFIISRDDSKNMLYLQMSSLKIEDTAVYFCTTDRGIAARPLFDSWGQGTLVTVSS

SEQ ID NO: 20578 - protein, 101 aa, Homo sapiens
AAPGFTVADAWMGWVRQAPGTGLEWVGRIKSKPDGGATDYAAPVKGRFTISRDDLKNTLYLQMSSLTSEDTAVYYCTTDRGIAARPLFDSWGLGTLVTVSS

SEQ ID NO: 20579 - protein, 101 aa, Homo sapiens
AAPGFIVGDAWMGWVRQAPGTGLEWVGRIKSKADGGTTDYAAPVEGRFTISRDDSKNTLYLQMNRLRSDDTAVYYCTTDRGIAARPLFDSWGLGTLVTVSS

SEQ ID NO: 20580 - protein, 100 aa, Homo sapiens
ASGFSFNNGWMGWVRQIPGKGLEWVGRIKPRSDGGTEDYAAPVKGRVSIFRDDSKNTVILYMNSLKIEDTAMYYCTTDRGIAARPLFDSWGQGTLVTVSS

SEQ ID NO: 20581 - protein, 94 aa, Homo sapiens
KGSGYSFTSYWIGWVRQMPGKGLEWMGIIYPGDSDTRYSPSFQGQVTISADKSISTAFLQWSSLKASDTAMYYCARRNGGFDIWGQGTMVTVSS

SEQ ID NO: 20582 - protein, 94 aa, Homo sapiens
KASGYSFTSYWIAWVRQMPGKGLEWMGIIYPGDSDTRYSPSFQGQVTISADKSIFTAYLQWSSLKASDTAMYYCARRNGGFDIWGRGTMVTVSS

SEQ ID NO: 20583 - protein, 91 aa, Homo sapiens
AVSGFTFSNHWMGWVRQAPGTGLECVATINEDGSERYYVDSVKGRFTISRDNAKNSLSLEMNSLRAEDTAIYYCVRAIDSWGQGTLVTVSS

SEQ ID NO: 20584 - protein, 90 aa, Homo sapiens
AASGFTFSTYWMSWVRQAPGKGPEWAAKINEDGSTIYYVDSVKGRFTISRDNARNSLTLQMNSLRVEDTAVYYCVRAIDSWGQGTRVTVS

SEQ ID NO: 20585 - protein, 90 aa, Homo sapiens
AASGFTFSTYWMSWVRQAPGKGPEWAAKINEDGSRTYYVDSVKGRFTISRDNARNSLTLEMNSLRVEDTAVYYCVRAIDSWGQGTRVTVS

SEQ ID NO: 20586 - protein, 90 aa, Homo sapiens
AASGFTFSTYWMSWVRQAPGKGPEWAAKINEDGSTIYYVDSVKGRFTVSRDNARNSLTLQMNSLRVEDTAVYYCVRAIDSWGQGTRVTVS

SEQ ID NO: 20587 - protein, 90 aa, Homo sapiens; identical to SEQ ID NO: 20585

SEQ ID NO: 20588 - protein, 90 aa, Homo sapiens
AASGFTFSTYWMSWVRQAPGKGPEWAAKINEDGSTIYYADSVKGRFTISRDNARNSLTLQMNSLRVEDTAVYYCVRAIDSWGQGTRVTVS

SEQ ID NO: 20589 - protein, 90 aa, Homo sapiens
AASGFTFSTYWMSWVRQAPGKGPEWAAKINEDGSRIYYVDSVKGRFTISRDNARNSLILQMNSLRVEDTAVYYCVRAIDSWGQGTRVTVS

SEQ ID NO: 20590 - protein, 93 aa, Homo sapiens
ASGYSFTSYAMHWVRQAPGQGLEWMGWINAGNGNTKYSQKFQGRVTITGDTSASTAYMELSSLRSEDTAVYYCARGNHGMDVWGQGTTVTVSS

SEQ ID NO: 20591 - protein, 93 aa, Homo sapiens; identical to SEQ ID NO: 20590

SEQ ID NO: 20592 - protein, 92 aa, Homo sapiens
ASGYTFSAYNVHWVRQAPGQGLECMGWISAGGDTIYSEKFQDRITITRDTSATTAYVELSSLRPDDTAVYYCARGNHGMDVWGQGTTVTVSS

SEQ ID NO: 20593 - protein, 91 aa, Homo sapiens
AASGFTFSSYWMHWVRQPPGKGLVWVSGINGDGSSISYADSVKGRFTISRDNAKNTLFLQMNSLRAEDTAVYYCARAYDFWGQGTLVTVSS

SEQ ID NO: 20594 - protein, 91 aa, Homo sapiens
AASGFTFSSYWMHWVRQAPGKGLVWVSRINGDGSSTSYADSVKGRFTISRDNAKNTLYLQMNSLRVEDTAVYYCARAYDFWGQGTLVTVSS

SEQ ID NO: 20595 - protein, 96 aa, Homo sapiens
NVSGGSISSYYWSWIRLPPGKGLEWIGYIYNSGSTNYNPSLKSRVTVSVDTSKNQFSLKLSSVSAADTAVYYCARQGPGGRAYDYWGQGALVTVSS

SEQ ID NO: 20596 - protein, 96 aa, Homo sapiens; identical to SEQ ID NO: 20595

SEQ ID NO: 20597 - protein, 96 aa, Homo sapiens
IVSSGSISSYYWNWIRQPPGKGLEWIGYIYYSGSTNYNPSLKSRVTMSLDTSKNQFSLTLSSVTAADTAMYYCARQGPGGRAYDYWGQGTLVTVSS

SEQ ID NO: 20598 - protein, 92 aa, Homo sapiens
ASGYAFTKYAINWVRQAPGQGLEWMGWINTNTGNPTYAQGFTGRFVFSLDTSVSTAYLQISSLKAEDTAVYYCARFEAFDIWGQGTMVTVSS

SEQ ID NO: 20599 - protein, 92 aa, Homo sapiens
ASGYTFTNYAMNWVRQAPGQGLEWMGWINTKTGNPTYAQDFTGRFVFSLDTSVSTAYLQISSLKGEDTAVYYCARFEAFDIWGQGTKVTVSS

SEQ ID NO: 20600 - protein, 98 aa, Homo sapiens
AASGFTFSSYAMHWVRQAPGKGLEYVSSINGNGDWTAYADSVKGRFTISRDNSRGSLYLQMGSLRVEDTAWYYCARDSGLTQGWFDPWGQGTLVTVSS

SEQ ID NO: 20601 - protein, 98 aa, Homo sapiens
AASGFTFSSYYMHWVRLAPGKGLEYLSSISGDGDRTYYANSVKDRFTISRDNSRNTLYLQMFSLRPEDMAVYYCARDSGLTQGWFDPWGQGTLVTVSS

SEQ ID NO: 20602 - protein, 98 aa, Homo sapiens
AASGFTFSSYYMHWVRLAPGKGLEYLSSISGDGDRTYYANSVKDRSTISRDNSRNTLYLQMFSLRPEDMAVYYCARDSGLTQGWFDPWGQGTLVTVSS

SEQ ID NO: 20603 - protein, 96 aa, Homo sapiens
AASGFTFSRNGMAWVRQAPGKGLEWVSAFDGTGDGTYYADSVKGRFTISRDNSKNTLYLQMNSLRADDTALYYCAKDVWRWAFDYWGQGVQVTVSS

SEQ ID NO: 20604 - protein, 96 aa, Homo sapiens
EASGFRFSGNAMAWVRQAPGKGLEWVSAFDGSGDGTYYADSVKGRFTISRDNSKNTLYLQMNSLRADDTARYYCAKDVWRWAFDYWGQGVQVTVSS

SEQ ID NO: 20605 - protein, 96 aa, Homo sapiens
AASGFNFGGNAMAWVRQAPGKGLEWVAAFDGTGDGTYYADSVKGRFTISRDNSRNTLYLLMNSLRADDTALYYCAKDVWRWAFDYWGQGVQVTVSS

SEQ ID NO: 20606 - protein, 95 aa, Homo sapiens
VASGFSFSHNAMAWVRQAPGKGLEWVSGLGGDGRTYYGDFVKGRFIISRDNFKNTLYLEMNGLRADDTAVYYCAKDVWRWAFDYWGQGTLVTVSS

SEQ ID NO: 20607 - protein, 99 aa, Homo sapiens
AASAFTVSSYAMHWVRQAPGKGLEWVAVISIDGSRTHYADSLKGRFTISKDNSKNTLYLHLDSLRAEDTAVYYCAKEGDGSSWSSFDYWGQGTLVTVSS

SEQ ID NO: 20608 - protein, 99 aa, Homo sapiens
AASGFTLSRYAMHWVRQPPGKGLEWVAIISYDGRDKFYADSLKGRFTISRDNSKNTLSLQMNSLTAEDTAVYYCAKEGDGSSWSSFDYWGRGTLVSVSS

SEQ ID NO: 20609 - protein, 97 aa, Homo sapiens
ASGYTFTSYAIHWVRQAPGQRLEWMGWINAGNGNTKYSQKFQGRVTITRDTSASTAYMELNSLRSEDTAVYYCVRSGSYSVDWFDPWGQGTLVTVSS

SEQ ID NO: 20610 - protein, 97 aa, Homo sapiens
ASGYTFTSYAIHWVRQAPGQRLEWMGWINAGNGNTKYSQKFQGRVTITRDTSASTAYMELSSLRSEDTAVYYCVRSGSYSVDWFDPWGQGTLVTVSS

SEQ ID NO: 20611 - protein, 97 aa, Homo sapiens
ASGYTFSSHAVHWVRQAPGQRLEWMGWINAGNGNTKYSQKFQGRVTITRDTSASTAYMELSSLRSEDTAVYYCVRSGSYSVDWFDPWGQGTLVTVSS

SEQ ID NO: 20612 - protein, 97 aa, Homo sapiens
AASGFTFSSNWMSWVRQAPGKGLEWVANIKQDGSVKYYVESVKGRFTISRDNAKSSLYLQMNSLRAEDTAVYYCAREGGAGYSFDYWGQGTLVTVSS

SEQ ID NO: 20613 - protein, 97 aa, Homo sapiens
AASGFTFSSFWMTWVRQTPGKGLEWVANIKKDGSEKNYVDSLKGRFTVSRDNARRSLYLQMNSLRAEDTAVYYCAREGGAGYSFDYWGQGTRVTVSS

SEQ ID NO: 20614 - protein, 97 aa, Homo sapiens
AASGFTFSNYWMTWVRQAPGQGLEWVANIKQGGREQNYVGSVKGRFTISRDNAKNSLYLQMNSLRAEDTAVYYCAREGGAGYSFDYWGQGTLVAVSS

SEQ ID NO: 20615 - protein, 93 aa, Homo sapiens
AASGFIFSTYSMNWVRQAPGKGLEWLSYISSSGNTIYYADSVKGRFTISRDNAKNSLYLQMNSLRAEDTAVYYCARVLNLDYWGQGTLVTVSS

SEQ ID NO: 20616 - protein, 93 aa, Homo sapiens
AASGFTFSSSEMNWVRQAPGKGLEWVSYISSSGSTIYYADSVKGRFTISRDNAKNSLYLQMNSLRAEDTAVYYCARVLNLDYWGQGTLVTVSS

SEQ ID NO: 20617 - protein, 98 aa, Homo sapiens
AASGFTFSVFWMTWVRQSPSKGLEWVASIEQDGSAKYYVDSVKGRFTISRDNVDDSLYLQMNNLRVEDTATYYCARGGSDSSWYWVHWGQGTLVTVSS

SEQ ID NO: 20618 - protein, 98 aa, Homo sapiens
AASGFTFWDYWMTWVRQSPGKGLEWVANINQDGTEKYYVDSVKGRFTISRDNAKNSLYLQMNSLRAEDTNVYYCARGGSDSSWYWVHWGQGTLVTVSS

SEQ ID NO: 20619 - protein, 98 aa, Homo sapiens
GDSGFIFNNLWMTWVRQAPGKGLEWVANINQDGSETYYVDSVKGRFTISRDNAKKSLYLQMNSLRPEDTAVYYCARGGSDSSWYWVHWGQGTQLTVSS

SEQ ID NO: 20620 - protein, 97 aa, Homo sapiens
ISGDSVSSNSVAWNWIRQSPSRGLEWLGRTYYKSKWYNDYAVSVKSRITINPDTSKNQFSLQLNSVTPEDTAVYYCARGSSSSFGYWGQGTLVTVSS

SEQ ID NO: 20621 - protein, 97 aa, Homo sapiens
ISGDSVSSNSAAWNWIRQSPSRGLEWLGRTYYKSKWYNDYAVSVKSRITINPDTSKNQFSLLLNSVTPEDTAVYYCARGSSSSFGYWGQGTLVTVSS

SEQ ID NO: 20622 - protein, 97 aa, Homo sapiens
ISGDSVSSNSADWNWIRQSPSRGLEWLGRTYYKSKWYNDYAVSVKSRITINPDTSKNQFSLQLASVTPDDTAVYYCARGSSSSFGYWGQGALVTVSS

SEQ ID NO: 20623 - protein, 97 aa, Homo sapiens
ISGDSVSSNSAAWNWIRQSPSRGLEWLGRTYYKSKWYNDYAVSVKSRITISPDTSKNQFSLQLNSVTPEDTAVYYCARGSSSSFGYWGQGTLVTVSS

SEQ ID NO: 20624 - protein, 97 aa, Homo sapiens
ISGDSVSSNSAAWNWIRQSPSRGLEWLGRTYYKSKWYNDYAVSVKSRISINPDTSKNQFSLQLNSVTPEDTAVYYCARGSSSSFGYWGQGTLVTVSS

SEQ ID NO: 20625 - protein, 97 aa, Homo sapiens
ISGDSVSSNSADWNWIRQSPSRSLEWLGRTYYKSKWYNDYALSVKSRITINADTSKNQFSLQLNSVTPEDTAVYYCARGSSSSFGYWGQGTLVTVSS

SEQ ID NO: 20626 - protein, 93 aa, Homo sapiens
ASGYTFTSYDINWVRQATGQGLEWMGWMNPNSGTTGYAQKFQGRITMTKNTSISTVYMELSSLRSEDTAVYYCARGLAGADYWGQGTLVTVSS

SEQ ID NO: 20627 - protein, 93 aa, Homo sapiens
ASGYTLTSYDINWVRQATGQGLEWMGYMNPNSGNIGYAQKFQGRVTMTRNTSISTAYMELSSLRSEDTAVYYCARGLAGADYWGQGTLVTVSS

SEQ ID NO: 20628 - protein, 92 aa, Homo sapiens
ASGYTFTGYDINWVRQATGQGLEWMGWMNPNSGYTGSAQKFQGRVTMTMNTSISTVYMELSSLRSEDTAVYYCARGLAGADYWGQGTLVTVS

SEQ ID NO: 20629 - protein, 93 aa, Homo sapiens
ASGYTFTSYDINWVRQATGQGLEWMGWMNPNSGNTGYAQKFQGRVTMSKNTSISTAFMELSSLRSEDTAVYYCARGLAGADYWGQGTLVTVSS

SEQ ID NO: 20630 - protein, 93 aa, Homo sapiens
ASGYTFTGYDINWVRQATGQGLEWMGWINPNSGNRGYTQKFQGRVTMTRNTSISTAYMELTSLRSEDTAVYYCARGLAGADYWGQGTLVTVSS

SEQ ID NO: 20631 - protein, 95 aa, Homo sapiens
AVSGFSFRSYAMSWVRQAPGKGLEWVSSITDSGGNTYYADSVKGRFTISRDNSKSTLYLQMSNLRVEDTAVYFCARGIASLGAYWGQGILVTVSS

SEQ ID NO: 20632 - protein, 95 aa, Homo sapiens
VASGFRFSGYAMSWVRQTPGKGLEWVSSITDNGGDTYYADSVKGRFTISRDNSKNTLCLQMNSLRAEDTAIYYCARGIASLGAYWGQGTLVTVSS

SEQ ID NO: 20633 - protein, 97 aa, Homo sapiens
ASGFTFRSYWMTWGRQAPGKGLEWVASIKEDGSDKYYVDSVKGRFTISKDNARNSVSLQMNNLRAGDTATYYCARRRSGDGWSVDYWGRGTLVTVSS

SEQ ID NO: 20634 - protein, 98 aa, Homo sapiens
VASGFTFSSYWMTWGRQTPGKGLEWVASISEDGSDKYYVDSAKGRFTISRDNAHNTLYLQMTSLRADDTAIYYCARRRSGDGWSVDYWGLGSLVTVSS

SEQ ID NO: 20635 - protein, 98 aa, Homo sapiens
AASGFIFNNYWMNWIRQSPGKGLEWVAAIKEDGSDRYYVDSLKGRFTISKDNSKNSLYLEMNSLTVEDTAVYYCARRRSGDGWSVDYWGQGTLVTVSS

SEQ ID NO: 20636 - protein, 98 aa, Homo sapiens
AASGFTFNNYWMNWVRQAPGKGLEWVAAIKADGSDEYYVDSVRGRFIISKDNSNNSLYLKMNSLRVEDTATYYCARRRSGDGWSVDYWGQGTLVTVSS

SEQ ID NO: 20637 - protein, 98 aa, Homo sapiens
AASGFTFNNYWMNWVRQAPGKGLEWVAAIKEDGSDKYYVDSVKGRFTISKDNSKNSLYLDMNSLRVEDTAVYYCARRRSGDGWSVDYWGQGTLVTVSS

SEQ ID NO: 20638 - protein, 98 aa, Homo sapiens
AASGFTFNNYWMNWVRQAPGKGLEWVAAIKADGSDEYYVDSVRGRFIISKDNSNNSLYLKMNSLRVEDTAVYYCARRRSGDGWSVDYWGQGTLVTVSS

SEQ ID NO: 20639 - protein, 93 aa, Homo sapiens
AASGFTFSDYWMHWVRQDPGKGLVWVSRISNDGSTTTYADSVKGRFTISRDNAKNTLYLQMNSLRAEDTAVYYCARSGGLDPWGQGTLVTVSS

SEQ ID NO: 20640 - protein, 93 aa, Homo sapiens
AASGFTFSSYWMHWVRQAPGKGLVWVSRISTDGSSTTYADSVKGRFTISRDNTKNTVYLQMNSLRAEDTAIYYCARSGGLDPWGQGTLVTVSS

SEQ ID NO: 20641 - protein, 93 aa, Homo sapiens
AASGFTFSDYWMHWVRQTPGKGLVWVSRISGDGSATDYADSVRGRFSISRDNAKNTVYLQMNSLRAEDTAVYYCARSGGLDPWGQGTLVTVSS

SEQ ID NO: 20642 - protein, 93 aa, Homo sapiens
AASGFTFSDSWMHWVRQAPGKGLVWVSRINSDGSSTNYADSVKGRFTISRDNAKNTVYLQMNSLRAEDTAVYYCARSGGLDPWGQGTLVTVSS

SEQ ID NO: 20643 - protein, 93 aa, Homo sapiens
AASGFRFSEYWMYWVRQAPGKGLVWVSRIEGDGRSTTYADSVKGRFTISRDNAKNTLYLQMNRLRVEDTAVYYCARSGGLDPWGQGTLVTVSS

SEQ ID NO: 20644 - protein, 93 aa, Homo sapiens
AASGFRFSEYWMYWVRQAPGKGLVWVSRIEGDGRSTTYADSVKGRFTISRDNVKNTLYLQMNRLRVEDTAVYYCARSGGLDPWGQGTLVTVSS

SEQ ID NO: 20645 - protein, 93 aa, Homo sapiens
AASGFRFSEYWMYWVRQAPGKGLVWVSRIEGDGRTTTYADSVKGRFTISRDNAKNTLYLQMSRLRVEDTAVYYCARSGGLDPWGQGTLVTVSS

SEQ ID NO: 20646 - protein, 93 aa, Homo sapiens
AASGFTFSSYWMHWVRQAPGKGLVWVSRVDSDGRGSTYADSVKGRFTISRDNAKNTLYLQMNSLRVEDTAVYYCARSGGLDPWGQGTLVTVSS

SEQ ID NO: 20647 - protein, 93 aa, Homo sapiens
AASGFRFSEYWMYWVRQAPGKGLVWVSRIEGDGRSTTYADSVKGRFTISRDNAKNTLFLQMNSLRAEDTAVYYCARSGGLDPWGQGTLVTVSS

SEQ ID NO: 20648 - protein, 93 aa, Homo sapiens
AASGFRFSEYWMYWVRQAPGKGLVWVSRIEGDGRTTTYADSVKGRFTISRDNAKNTLYLQMNSLRAEDTAVYYCARSGGLDPWGQGTLVTVSS

SEQ ID NO: 20649 - protein, 93 aa, Homo sapiens; identical to SEQ ID NO: 20643

SEQ ID NO: 20650 - protein, 93 aa, Homo sapiens
AASGFRFSEYWMYWVRQAPGKGLVWVSRIEGDGRNTAYADSVKGRFTISRDNAKNTLYLQMNRLRVEDTAVYYCARSGGLDPWGQGTLVTVSS

SEQ ID NO: 20651 - protein, 93 aa, Homo sapiens
AASGFTFSNYWMHWVRQPPGKGLVWVSGIDSDERTTTYADSVKGRFTISRDNAKNAVYLQMNSLRVEDTAVYYCARSGGLDPWGQGTLVTVSS

SEQ ID NO: 20652 - protein, 93 aa, Homo sapiens
AASGFRFSEYRMYWVRQAPGKGLVWVSRIEGDGRSTTYADSVKGRFTISRDNAKNTLYLQMNRLRVEDTAVYYCARSGGLDPWGQGTLVTVSS

SEQ ID NO: 20653 - protein, 93 aa, Homo sapiens
AASGFRFSEYWMYWVRQAPGKGLVWVSRIEGDGGNTAYADSVKGRFTISRDNAKNTLYLQMNRLRVEDTAVYYCARSGGLDPWGQGTLVTVSS

SEQ ID NO: 20654 - protein, 93 aa, Homo sapiens; identical to SEQ ID NO: 20643

SEQ ID NO: 20655 - protein, 93 aa, Homo sapiens
AASGFRFSEYWMYWVRQAPGKGLVWLSRIEGDGRSTTYADSVKGRFTISRDNAKNTLYLQMNRLRVEDTAVYYCARSGGLDPWGQGTLVTVSS

SEQ ID NO: 20656 - protein, 93 aa, Homo sapiens; identical to SEQ ID NO: 20653

SEQ ID NO: 20657 - protein, 93 aa, Homo sapiens
AASGFRFSEYWMYWVRQAPGKGLVWVSRIEGDGRTTTYADSVRGRFTISRDNAKNTLYLQMNSLRAEDTAVYYCARSGGLDPWGQGTLVTVSS

SEQ ID NO: 20658 - protein, 93 aa, Homo sapiens; identical to SEQ ID NO: 20650

SEQ ID NO: 20659 - protein, 93 aa, Homo sapiens
AASGFRFSEYWMYWVRQAPGKGLVWVSRIEGDGRSTTYADSVKGRFTISRDNAKNTLYLQMSRLRVEDTAVYYCARSGGLDPWGQGTLVTVSS

SEQ ID NO: 20660 - protein, 92 aa, Homo sapiens
ASGFTFSDSWMHWVRQAPGKGLMWVSRIDHDGSTTNYADSVRGRFTISRDNVKNTVWLQMNSLRVEDTAFYYCARSGGLDPWGQGTLVTVSS

SEQ ID NO: 20661 - protein, 93 aa, Homo sapiens
VASGFTFSTDWMHWVRQAPGKGLVWVSRINGDGSDTTYADSVKGRFTISRDNAKNTLYLQMNSLRAEDTAVYYCARSGGLDPWGQGTLVTVSS

SEQ ID NO: 20662 - protein, 93 aa, Homo sapiens
AASGFKFSEFWMYWVRQAPGKGLVWVSRIEGDGRSTTYADSVKGRFTISRDNAKSTLYLQMNSLRAEDTAVYYCARSGGLDPWGQGTLVTVSS

SEQ ID NO: 20663 - protein, 93 aa, Homo sapiens
AASGFTFSTYWMHWVRQAPGKGLVWVSRIDSDGSTTTYADSVKGRFTISRDNAKNAVYLQMNSLRVEDTAVYYCARSGGLDPWGQGTLVTVSS

SEQ ID NO: 20664 - protein, 93 aa, Homo sapiens
AASGFRFSEYWMYWVRQAPGKGLVWVSRIEGDGRSTTYADSVKGRFTISRDNAKNTLYLQMNSLRAEDTAVYYCARSGGLDPWGQGTLVTVSS

SEQ ID NO: 20665 - protein, 98 aa, Homo sapiens
AASGFTFSSYEMNWVRQAPGKGLEWFSYISSSGSSFSYADSVKGRFTISRDNAKNSLYLQMNSLRADDTAVYYCVRDGGLDGDAFDIWGQGTMVTVSS

SEQ ID NO: 20666 - protein, 98 aa, Homo sapiens
AASGFTFSSYEMNWVRQAPGKGLEWFSYISSSGSSFYYADSVKGRFTISRDNAKNSLYLQMNSLRADDTAVYYCVRDGGLDGDAFDIWGQGTMVTVSS

SEQ ID NO: 20667 - protein, 98 aa, Homo sapiens
AASGFAFSTYEMNWVRQAPGKGLEWVSYIRSSGTTTYYADSVKGRFAISRDNAKNSLYLQMNSLRAEDTAVYYCVRDGGLDGDAFDIWGQGTRVTVSS

SEQ ID NO: 20668 - protein, 98 aa, Homo sapiens
GASGFAFSTYEMNWVRQAPGKGLEWVSYIRSSGTTTYYADSVKGRFAISRDNAKNSLYLQMNSLRVEDTAVYYCVRDGGLDGDAFDIWGQGTRVTVSS

SEQ ID NO: 20669 - protein, 101 aa, Homo sapiens
AASGFTLNNVWMGWVRQSSEKGLEWLGRVKSKADGGTIDYAAPVKGRFFISRDDSKNILYLQINNLKTEDTGVYYCTTDRGIASRPLFDFWGQGTLVTVSS

SEQ ID NO: 20670 - protein, 101 aa, Homo sapiens
AASGFTFNNAWMSWVRQAPGKGLEWVGRIKSKTDGGTTDYGAPVKGRFFISRDESKSTVYLQMNSLKIEDAAVYYCTTDRGIASRPLFDFWGQGTLVTVSS

SEQ ID NO: 20671 - protein, 96 aa, Homo sapiens
AASGFTFSSYAMHWVRQAPGKGLEYVSAIGSNGVSTYYANSVKGRFTISRDNSKNTLYLQMGSLRAEDMAVYYCARVGGTSAFDIWGQGTMVTVSS

SEQ ID NO: 20672 - protein, 96 aa, Homo sapiens
AASGFSFSGYSMHWVRQAPGKGLEYVSAIDPSGGGTYYATSVKDRFTISRDNSKNTLYLEMGSLRAEDMAVYYCARVGGTSAFDIWGQGTMVTVSS

SEQ ID NO: 20673 - protein, 99 aa, Homo sapiens
AASGFTFDNYWMHWVRQVPGRGLEWIARVSYDGTTTTYADSLKGRFTISRDNAKNAVYLQMNSLRVEDTAIYYCARPYKSGWCNWFDPWGQGTLVTVSS

SEQ ID NO: 20674 - protein, 99 aa, Homo sapiens
AASGFTFDSYWMHWVRQVPGRGLEWIARISNDGTTTTYADSLKGRFTISRDNAKNTLYLQMNSLRVEDTAVYYCARPYKSGWCNWFDPWGQGTLVTVSS

SEQ ID NO: 20675 - protein, 99 aa, Homo sapiens; identical to SEQ ID NO: 20674

SEQ ID NO: 20676 - protein, 99 aa, Homo sapiens
AASGFTFSTYWMFWVRQTPGKGLVWVSRISPDGSATVYADSVKGRFTISRDNTKNTLYLHMNSLRAEDTAVYYCARPYKSGWCNWFDPWGQGTLVTVSS

SEQ ID NO: 20677 - protein, 91 aa, Homo sapiens
AASGFSFSSFEMNWVRQAPGKGLEWVSYITTGGETVYYADSVQGRFTISRDNAKNSLFLQMNSLRAEDTAVYFCARRFNLWGQGTLVTVSS

SEQ ID NO: 20678 - protein, 91 aa, Homo sapiens
AASGFSFSSFEMNWVRQAPGKGLEWVSFITVDGGSMYYADSVKGRFTISRDNAKNSLYLHMNSLRVEDTAVYYCARRFNLWGHGTLVTVSS

SEQ ID NO: 20679 - protein, 95 aa, Homo sapiens
VSGGSISSYFWTWIRLPPGGGLEWFGNIYYSGNTNYNPSLKSRVTMLVDTSKNQFSLKLNSVTAADTAVYYCARRASSENYFDYWGQGALVTVSS

SEQ ID NO: 20680 - protein, 96 aa, Homo sapiens
TVSDGSFSSYYWSWIRQPPGKALEWIGYIYYSGGTNYNPSLTSRVTISVDTSKNQFSLKLSSVTAADTAMYYCARRASSENYFDYWGQGTLVTVSS

SEQ ID NO: 20681 - protein, 96 aa, Homo sapiens
TVSDGSFSTYYWSWIRQPPGKALEWIGYIYYSGSTNYNPSLTSRVTISVDTSKNQFSLKLSSVTAADTAMYYCARRASSENYFDYWGQGTLVTVSS

SEQ ID NO: 20682 - protein, 92 aa, Homo sapiens
AASGFSISGHWMHWVRQAPGKGLVWVSRIKNDGTITNYADSVKGRFTISRDNAKNTLYLQMNSLRAEDTAVYYCARGYNWNWGQGTLVTVSS

SEQ ID NO: 20683 - protein, 92 aa, Homo sapiens
VGSGFTFSGAWMHWVRQAPGKGLEWVSRISSDATTTSYADSVKGRFTVSRDNAENTLYLQLNSLRVEDTAVYYCARGYNWNWGQGTLVTVSS

SEQ ID NO: 20684 - protein, 97 aa, Homo sapiens
AASGFTFSSYSFNWVRQAPGQGLEWVSYISFSRNIIYYADSVKGRFTISRDNANNALFLQMNSLRAEDTAVYYCTRDGNRGYDMDVWGQGTTVTVSS

SEQ ID NO: 20685 - protein, 96 aa, Homo sapiens
AASGFTLSSYSMNWVRQAPGKGLEWLSYIGYGGNIYYADSVKGRFISSRDNAENSLYLQMNSLRDEDTAIYYCTRDGNRGYDMDVWGQGTTVTVSS

SEQ ID NO: 20686 - protein, 94 aa, Homo sapiens
ASGYTFTSYALHWVRQAPGQRLEWMGWINAGNGNTKYSQKFQGRVTFSSDTSASTAHMEVSSLRSEDTAVYYCARDRVRAFDIWGQGTMVTVSS

SEQ ID NO: 20687 - protein, 94 aa, Homo sapiens; identical to SEQ ID NO: 20686

SEQ ID NO: 20688 - protein, 94 aa, Homo sapiens
ASGYTFTSYAIHWVRQAPGQRPEWMGWINAGSGNTRYSQKFQGRVTFTTDTSASTAYMEMSSLRSGDTAVYYCARDRVRAFDIWGQGTMVSVSS

SEQ ID NO: 20689 - protein, 96 aa, Homo sapiens
SVSGGSISNYHWSWMRQSPGKQLEWIAYIYYTGSITYNPSLKSRVTVSVDTSKNHFSLKLPSVTAADTAVYYCARRASAENYFDYWGQGTLVTVSS

SEQ ID NO: 20690 - protein, 91 aa, Homo sapiens
TVSGGSFSTYSWSWIRQPPGKALEWIGSISNYNPSLTSRVTMSIDTSKNQFSLKLSSMTAADTAMYYCARRASAENYFDYWGQGALVTVSS

SEQ ID NO: 20691 - protein, 97 aa, Homo sapiens
ISGDSVSSSSAAWSWIRQSPSRGLEWLGRTYYKSKWHNDYAGSVKSRITINPDTSKNQFSLQLNSVTPEDTAVYYCVRGSSSSFDYWGQGTLVTVSS

SEQ ID NO: 20692 - protein, 97 aa, Homo sapiens
ISGDSVSSNSAAWNWIRQSPSRGLEWLGRTYYQSNWNNDYAVSVKSRISVNPDTSKNQFSLQLNSVTPEDTAVYYCVRGSSSSFDYWGQGTLVTVSS

SEQ ID NO: 20693 - protein, 96 aa, Homo sapiens
ASGYTFTSYDINWVRQATGQGLEWVGWMNPNSGNTGYAQKFQGRVTMTRSTSISTAYMELSSLRSEDTAVYYCARGEGVAAISGYWGQGTLVTVSS

SEQ ID NO: 20694 - protein, 96 aa, Homo sapiens
ASGYTFTSYDINWVRQATGQGLEWMGWMNPNSGNTGYAQKFQGRVTMTRNTSINTVYMELSSLRSEDTAVYYCARGEGVAAISGYWGQGTLVTVSS

SEQ ID NO: 20695 - protein, 97 aa, Homo sapiens
AASGFTFSDYYMTWIRQAPGKGLEWVSYMSSSDSIIKYTDSVKGRFTNSRDNSKNSLYLQMNSLRAEDTAVYFCARVRSSGSPLDYWGQGTLVTVSS

SEQ ID NO: 20696 - protein, 97 aa, Homo sapiens
AASGFTFSDYYMTWIRQAPGKGLEWVSYMSSSDSIIKYADSVKGRFTNSRDNSKNSLYLQMNSLRAEDTAVYFCARVRSSGSPLDYWGQGTLVTVSS

SEQ ID NO: 20697 - protein, 97 aa, Homo sapiens
AASGFTFSDYYMTWIRQAPGKGLEWVSYMSSTDSIIKYADSVKGRFTNSRDNSKNSLYLQMNSLRAEDTAVYFCARVRSSGSPLDYWGQGTLVTVSS

SEQ ID NO: 20698 - protein, 97 aa, Homo sapiens
AASGFTFSDYYMTWIRQAPGKGLEWVSYMSNNDNIIKYTDSVKGRFTNSRDNSKNSLYLQMNSLRAEDTAVYFCARVRSSGSPLDYWGQGTLVTVSS

SEQ ID NO: 20699 - protein, 97 aa, Homo sapiens
AASGFTFSDYYMTWIRQAPGKGLEWVSYMSNSDSIIKYADSVKGRFTNSRDNSKNSLYLQMNSLRAEDTAVYYCARVRSSGSPLDYWGQGTLVTVSS

SEQ ID NO: 20700 - protein, 97 aa, Homo sapiens; identical to SEQ ID NO: 20698

SEQ ID NO: 20701 - protein, 97 aa, Homo sapiens
AASGFTFSDYYMTWIRQAPGKGLEWVSYMSSRDSIIEYADSVKGRFTNSRDNSKNSLYLQMNSLRAEDTAVYYCARVRSSGSPLDYWGQGTLVTVSS

SEQ ID NO: 20702 - protein, 100 aa, Homo sapiens
AASGFTFSDYYMTWIRQAPGKGLEWVSYISYMSTSDSIIKYADSVKGRFTNSRDNSKNSLFLQMNSLRAEDTAVYFCARVRSSGSPLDYWGQGTLVTVSS

SEQ ID NO: 20703 - protein, 97 aa, Homo sapiens
AASGFTFSDYYMTWIRQAPGKGLEWVSYMSNSDNIIEYADSVKGRFTNSRDNSKNSLYLQMNSLRAEDTAVYYCARVRSSGSPLDYWGQGTLVTVSS

SEQ ID NO: 20704 - protein, 97 aa, Homo sapiens
AASGFTFRDYYMTWIRQAPGKGLEWVSYMSSDDSIIEYADSVKGRFTNSRDNSKNSLYLQMNGLRVEDTAVYYCARVRSSGSPLDYWGQGTLVTVSS

SEQ ID NO: 20705 - protein, 97 aa, Homo sapiens
AASGFTFSDYYMTWIRQAPGKGLEWVSYMSSSDSIIEYADSVKGRFTNSRDNSKNSLYLQMNSLRAEDTAVYYCARVRSSGSPLDYWGQGTLVTVSS

SEQ ID NO: 20706 - protein, 97 aa, Homo sapiens; identical to SEQ ID NO: 20697

SEQ ID NO: 20707 - protein, 97 aa, Homo sapiens
AASGFTFSDYYMTWIRQAPGKGLEWVSYMSSRDSIIKYADSVKGRFTNSRDNSKNSLYLQMNSLRVEDTAVYYCARVRSSGSPLDYWGQGTLVTVSS

SEQ ID NO: 20708 - protein, 96 aa, Homo sapiens
AASGFIFSDYYMSWISQAPGKGLEWVSYTSTGGTTKYADSVKGRFTVSRDNAKNSLYLQMNSLRAEDTAVYYCARVRSSGSPLDYWGQGTPVTVSS

SEQ ID NO: 20709 - protein, 97 aa, Homo sapiens; identical to SEQ ID NO: 20707

SEQ ID NO: 20710 - protein, 97 aa, Homo sapiens
AASGFTFSDYYMTWIRQAPGKGLEWVSYMSSSYSIIEYADSVKGRFTNSRDNSKNSLYLQMNSLRAEDTAVYYCARVRSSGSPLDYWGQGTLVTVSS

SEQ ID NO: 20711 - protein, 97 aa, Homo sapiens
AASGFTFTDYYMTWIRQAPGKGLEWVSYMSSSDSIIKYADSVKGRFTNSRDNSKNSLYLQMNSLRAEDTAVYYCARVRSSGSPLDYWGQGTLVTVSS

SEQ ID NO: 20712 - protein, 95 aa, Homo sapiens
AASGFDFSIYSMNWVRQAPGKGLEWVAYITGGSNIIYYADSVRGRFTVSRDNARNSLYLQMDYLGVEDTAVFYCARGVQWGFDSWGPGTLVTVSS

SEQ ID NO: 20713 - protein, 95 aa, Homo sapiens; identical to SEQ ID NO: 20712

SEQ ID NO: 20714 - protein, 95 aa, Homo sapiens
AASGFSFSIYSMNWVRQAPGKGLEWVSYITGGSNIIYYADSVKGRFSISRDNAQNSLYLQMNSLRDEDTAVYYCARGVQWGFDSWGQGILVTVSS

SEQ ID NO: 20715 - protein, 95 aa, Homo sapiens; identical to SEQ ID NO: 20714

SEQ ID NO: 20716 - protein, 93 aa, Homo sapiens
AASGFTFSDYWMSWVRQAPGTGLGWVANIKYDGSEKYYVDSVKGRFTISRDNAKNSLYLQMDSLRAEDTAVYYCAREGNLGSWGQGTLVTVSS

SEQ ID NO: 20717 - protein, 93 aa, Homo sapiens
AASGFTFSNYWMSWVRQAPGKGLEWVANIKHDGSNKYYVDSVKGRFTISRDNAKSSLYLQMNSLRVEDTAIYYCAREGNLGSWGQGTLVTVSS

SEQ ID NO: 20718 - protein, 95 aa, Homo sapiens
AASGFTFSSFTMNWVRQAPGKGLEWLSYISRSGDAMFYADSVKGRFTISRDNAKNSLFLQMNSLRAEDTAVYYCARDLHYAFDFWGQGTLVTVSS

SEQ ID NO: 20719 - protein, 95 aa, Homo sapiens
AASGFTFSSYSMNWVRQAPGKGLEWVSYISGSGYPISYAGSVKGRFTISRDNAKNSLFLQMSSLRDEDTAVYYCARDLHYAFDFWGQGIMVTVSS

SEQ ID NO: 20720 - protein, 95 aa, Homo sapiens
ASGYTFTNYGMHWVRQAPGQRLEWMGWINAGSGDTKYSQKFQGRVTITRDTSASTAYMELSSLRSEDTAVYYCASGAGTYSPDYWGQGTLVTVSS

SEQ ID NO: 20721 - protein, 95 aa, Homo sapiens
ASRNISPSYTIHWVRQAPGQRLEWMGWINGDNGNTKYSQKFQGRVTITRDTPASTTYMEVSSLRSEDTAVYYCASGAGTYSPDYWGQGTLLTVSS

SEQ ID NO: 20722 - protein, 98 aa, Homo sapiens
ISGDSVSSNSATWNWIRQSPSRGLEWLGRTYYRSKWYNDYAVSVKSRITINPDTSKNQFSLHLNSVTPEDTAVYYCARDRGQQLGDYWGQGTLVTVSS

SEQ ID NO: 20723 - protein, 98 aa, Homo sapiens
ISGDTVSSNSATWNWIRQSPSRGLEWLGRTYYRSTWFNDYAVSVKSRITISPDTSKNQFSLHLSSVTPEDTAVYYCARDRGQQLGDYWGQGTLVTVSS

SEQ ID NO: 20724 - protein, 98 aa, Homo sapiens; identical to SEQ ID NO: 20723

SEQ ID NO: 20725 - protein, 98 aa, Homo sapiens
ISGDTVSSNSATWNWIRQSPSRGLEWLGRTYYRSTWFNDYAVSVKSRITISPDTSKNQFSLQLSSVTPEDTAVYYCARDRGQQLGDYWGQGTLVTVSS

SEQ ID NO: 20726 - protein, 99 aa, Homo sapiens
TVSGGSISSYYWSWIRQPPGKGLEWIGYIYDSGRTNYNPSLKSRVTISVDTSKNQFSLKVSSVTAADTAVYYCARDRYSSGWYHGFDIWGQGTMVTVSS

SEQ ID NO: 20727 - protein, 99 aa, Homo sapiens
TVSGGSISNYYWSWIRQPPGKGLEWIGYISYSGTTDYNPSLKSRVTISVDTSRNQFSLKLSSVTAADTAVYYCARDRYSSGWYHGFDIWGQGTMVTVSS

SEQ ID NO: 20728 - protein, 90 aa, Homo sapiens
AASGFTFNSHAMNWARQPPGKGLEWVSTISGSGGSTFYAASVKGRFTISRDNSKNTLYLQMNSLTAEDTAVYYCDGANYWGLGSLVTVSS

SEQ ID NO: 20729 - protein, 89 aa, Homo sapiens
ASGLTYSTHVMNWARRAPGKGLEWVSTINGPGESTYYADFVKGRFTISRDNFKNMLYLQMNSLTAEDTAVYYCDGANYWGRGTQVTVSS

SEQ ID NO: 20730 - protein, 91 aa, Homo sapiens
ASAFTFSSYYMSWVRQAPGKGLEWVAGINKDGSEKYFVDSVKGRFTISRDNTKNSLYLQMNSLRVADTAVYYCGRGSGSLRGQGTLVTVSS

SEQ ID NO: 20731 - protein, 91 aa, Homo sapiens
ASAFTFSSYYMSWVRQAPGKGLEWVAGINKDGSEKYFVDSVKGRFTISRDNTKNSLYLQMDNLRAADTAVYYCGRGSGSLRGQGTLVTVSS

SEQ ID NO: 20732 - protein, 92 aa, Homo sapiens
AASGFTFGSDWMTWVRQAPGKGLECVASMNQDGSATYYVDSVKGRFTVSRDNAKNSVYLQMNSLRTEDTAVYFCGRGSGSLWGQGTLITVSS

SEQ ID NO: 20733 - protein, 93 aa, Homo sapiens
AASGFPFSSYEMNWVRQAPGKGLEWVSYISGGGSAIYYADSVKGRFTISRDNAKNSLYLQMNSLRAEDTAVYFCARRGGFDCWGQGTLVTVSS

SEQ ID NO: 20734 - protein, 93 aa, Homo sapiens
VASGFTFSNYDMNWVRQAPGKGLEWVSYIGSGSRTIYYADSVKGRFTISRDNARDSLYLQMNSLRDEDTAVYYCARRGGFDCWGRGTLVTVSS

SEQ ID NO: 20735 - protein, 93 aa, Homo sapiens
AASGFSFSSYEMNWVRQAPGKGLEWISYISSGGSTIYYADSVKGRFTISRDNAQNTLYLQMNSLRAEDTAVYYCARRGGFDCWGQGTLVTVSS

SEQ ID NO: 20736 - protein, 92 aa, Homo sapiens
TVSRGSISTYYWSWIRQPPGKGLEWIGYISYSGGAYYDPSLKSRVTISVDASKNQFSLMVTSVTAADTAVYYCARGPSFDYWGLGTLVTVSS

SEQ ID NO: 20737 - protein, 92 aa, Homo sapiens
TVSGGSMTSYYWSWIRQPPGKTLEWIGYIYYTGISFYNPSLKSRVAISVDTSKNQFSLELTSVTAADTAVYYCARGPSFDYWGQGTLVTVSS

SEQ ID NO: 20738 - protein, 92 aa, Homo sapiens
TVSGASMGGYYWSWIRQPPGKGLEWIGYIYYTGISLYNPSLKSRVAMSVDTSKNQFSLELTSVTATDTAVYYCARGPSFDYWGRGTLVTVSS

SEQ ID NO: 20739 - protein, 92 aa, Homo sapiens
TVSGDSIGGHSWSWVRQPPGKGLEWIAYIYYGGSTSYNPSLKSRVTISVEMSKSQFSLKLTSVTAADTAVYYCARGPSFDYWGQGTLVIVSS

SEQ ID NO: 20740 - protein, 91 aa, Homo sapiens
TVSGDSIGGHSWSWVRQPPGKGLEWIAYIYYGGSTYNPSLKSRVTISVEMSKSQFSLKLTSVTAADTAVYYCARGPSFDYWGQGTLVIVSS

SEQ ID NO: 20741 - protein, 92 aa, Homo sapiens
TVSGGSMTSYYWSWIRQPPGKTLEWIGYIYYTGISFYNPSLKSRVTISVDTSKNQFSLELTSVTAADTAVYYCARGPSFDYWGQGTLVTVSS

SEQ ID NO: 20742 - protein, 92 aa, Homo sapiens; identical to SEQ ID NO: 20737

SEQ ID NO: 20743 - protein, 92 aa, Homo sapiens
TVSGGSMTSYYWSWIRQPPGKTPEWIGYIYYTGISFYNPSLKSRVAISVDTSKNQFSLELTSVTAADTAVYYCARGPSFDYWGQGTLVTVSS

SEQ ID NO: 20744 - protein, 92 aa, Homo sapiens; identical to SEQ ID NO: 20737

SEQ ID NO: 20745 - protein, 95 aa, Homo sapiens
AASGFSFGSYAMGWVRQAPGKGLEWVSGISATGESTYYADSVKGRFTISRDNSKNTVHLQMNSLRAEDTAIYYCAKEKSGCFDYWGQGTLVTVSS

SEQ ID NO: 20746 - protein, 95 aa, Homo sapiens
AASGFSFSSYAMGWVRQSPGKGLEWVSSISASGGATFYADSVKGRFIISRDGSKNILSLQMNSLRGEDTARYYCAKEKSGCFDYWGQGILVSVSS

SEQ ID NO: 20747 - protein, 95 aa, Homo sapiens
AGSGFSFGSYAMGWVRQAPGKGLEWVSGISATGESTYYADSVKGRFTISRDNSKNSLHLQMNSLRAEDTAIYYCAKEKSGCFDYWGQGTLVPVSS

SEQ ID NO: 20748 - protein, 93 aa, Homo sapiens
AASEFMFSNYWMSWVRQAPGKGLECVANIKRDGSEKYYVDSVKGRFTISRDNAKNSLYLQMNSLRAEDTAVYYCTRARGMDVWGQGTTVTVSS

SEQ ID NO: 20749 - protein, 93 aa, Homo sapiens; identical to SEQ ID NO: 20748

SEQ ID NO: 20750 - protein, 93 aa, Homo sapiens
AASGFTFSNYGMTWVRQTPGKGLEWVAYIKPDGSEAFYVDSVKGRFTMSRDNARDSLYLQMNSLRVEDTAVYSCTRARGMDVWGQGTTVTVSS

SEQ ID NO: 20751 - protein, 93 aa, Homo sapiens
AASGFTFSGFWMTWARQAPGKGLEWVANMNQDGSEEHYLDSVKGRFTISRDNAKNSLYLQMNSLRAEDTAVYYCVRDRGSSYWGQGTLVTVSS

SEQ ID NO: 20752 - protein, 93 aa, Homo sapiens
AASGFTFSTSWMTWVRQAPGKGLEWVANIKEDGSEKYYVDSVKGRFTNSRDNAQNSLYLQMNSLRVEDTAVYYCVRDRGSSYWGQGTLVTVSS

SEQ ID NO: 20753 - protein, 105 aa, Homo sapiens
AASGFTFSNAWMSWVRQAPGQGLEWVGRIKSKTDGGTTDYAAPVKGRFTISRDDSKNTLYLQMDSLKTEDTAVYYCTTEGCSSTRCYSPNAFDIWGQGTKVTVSS

SEQ ID NO: 20754 - protein, 105 aa, Homo sapiens
AASGFTFSNAWMNWVRQAPGKGLEWVGRIKTKTNGGTTDYPAPVKGRFTISRDDSKNMLYLQMNSLETEDTAVYYCTTEGCSSTRCYSPNAFDIWGQGTMVTVSS

SEQ ID NO: 20755 - protein, 102 aa, Homo sapiens
TVSGGSISSYYWSWIRQPPGKGLEWIGYIYYSGSTNYNPSLKSRVTISVDTSENQFSLKLRSVTAADTAVYYCARDRYCSRGSCFDWYFDLWGRGTLVTVSS

SEQ ID NO: 20756 - protein, 102 aa, Homo sapiens
TVSGGPISSYYWSWIRQPPGKGLEWIGYIYYSGSTNYNPSLKSRVTMSVDTSKNQFSLKLSSVTAADTAMYYCARDRYCSRGSCFDWYFDLWGRGTLVTVSS

SEQ ID NO: 20757 - protein, 96 aa, Homo sapiens
KASGYSFTNSWIGWARQMPGKGLEWMGIINPGDSGTRYSPSFQGQVTISADKSISTAYLQWSSLKASDTAIYYCARQPGSGWFDPWGQGTLVTVSS

SEQ ID NO: 20758 - protein, 96 aa, Homo sapiens
KASGYSFTSNWIGWVRQMPGKGLEWMGIINPGDSDTRYSPSFQGQVTMSVDKSISTAYLQWSSLKASDTAMYYCARQPGSGWFDPWGQGTLVTVSS

SEQ ID NO: 20759 - protein, 96 aa, Homo sapiens
KASGYSLTSNWIGWVRQMPGKGLEWMGIINPGDSDTRYSPSFQGQVTMSVDKSISTAYLQWSSLKASDTAMYYCARQPGSGWFDPWGQGTLVTVSS

SEQ ID NO: 20760 - protein, 96 aa, Homo sapiens; identical to SEQ ID NO: 20758

SEQ ID NO: 20761 - protein, 98 aa, Homo sapiens
TVSGGSISTYYWSWIRQPPGKGLEWIAYIYNSGSTKYNPSLTSRVTISVDTSKNQFSLQLSSVTAADTAVYYCARGGDSSGYYAYDYWGQGTLVTVSS

SEQ ID NO: 20762 - protein, 98 aa, Homo sapiens
SVFGGSISNYYWGWIRQPPGKRLEWIGYIYYSGSTNYNPSLKSRVTISLDTPKKQFYLKLSSVAAADTAVYYCARGGDSSGYYAYDYWGQGTLVTVSS

SEQ ID NO: 20763 - protein, 97 aa, Homo sapiens
TVSGGSISSNSYYWGWIRQPPGKGLEWIGSIYYSGGTYDNPSLKSRVTISVDRSKNQFSLRLSSVTAADTAVYYCARTLSANWFDPWGHGTLVTVSS

SEQ ID NO: 20764 - protein, 97 aa, Homo sapiens
TVSGGSISSNSYYWGWIRQPPGKGLEWIGSIYYSGGTYDNPSLKSRVTISVDRSKNQFSLRLSSVTAADTAVYYCARTLSANWFDPWGQGTLVTVSS

SEQ ID NO: 20765 - protein, 99 aa, Homo sapiens
TVSGGSVSSTSYHWGWLRQPPGMGLEWIANIYYTGTTYYNPSLKSRVTVSVDTSKNQFSLKLYSVTAADTAVYYCAGRITVAGGWFDPWGQGTLVTVSS

SEQ ID NO: 20766 - protein, 99 aa, Homo sapiens
TVSGDSISSGHYHWGWIRQPPGEGLEWIGTMSVGGSTFYNPSLSSRVIISVDTSRTQFSLKLSSVTAADTGVYYCAGRITVAGGWFDPWGQGTLVTVSS

SEQ ID NO: 20767 - protein, 92 aa, Homo sapiens
AASGFTFSNYWMAWVRQPPGKGLEWVASLKKDGDGKYYVDSVKGRFTITRDIAENLLYLQMNNLGAADTAVYYCVRGSMDVWGQGTTVTVSS

SEQ ID NO: 20768 - protein, 92 aa, Homo sapiens
AASGFTFTRYWMNWVRQTPGKGLEWVASIKPEGNDKYHVDSVKGRFTISRDNAKNSQYLQMNSLRAEDTAVYYCVRGSMDVWGQGTTVTVSS

SEQ ID NO: 20769 - protein, 96 aa, Homo sapiens
AASGFAFSRYGMHWVRQAPGKGLECVATVWYDGSNKYYADSVKGRFTVSRDNSKNSLYLQVNSLRAEDTALYYCARDRGGWSIDFWGQGTLVTVSS

SEQ ID NO: 20770 - protein, 96 aa, Homo sapiens
AASGFTFSSFGMHWVRQAPGKGLEGVATIWYDGSEKYYADSVKGRFTISRDNSKNTMYLQMNSLRAEDMAVYSCARDRGGWSIDFWGQGTLVSVSS

SEQ ID NO: 20771 - protein, 98 aa, Homo sapiens
TVSGDSISSGGFFWSWIRQRPGEALEWIGYTYYGGTTHYSPSLQSRVSISVDSSKDQFSLRLSSVTAADTAVYYCARDVTGKYYFDYWGQGTLVTVSS

SEQ ID NO: 20772 - protein, 98 aa, Homo sapiens
TVSGDFLSSGGYFWSWIRQHPGKGLEWIGYTYYGGTTHYNPSLESRVSISVDASKNQFSLKLTSVTAADTAMYYCARDVTGKYYFDYWGQGTPAFVSS

SEQ ID NO: 20773 - protein, 98 aa, Homo sapiens
TVSGDFLSSGGYFWSWIRQYPGKGLEWIGYTYYGGTTHYNPSLESRVSISVDASKNQFSLKLTSVTAADTAMYYCARDVTGKYYFDYWGQGTPAFVSS

SEQ ID NO: 20774 - protein, 94 aa, Homo sapiens
AASGFTFSNYAIQWVRQAPGKGLEFVSAISTSGYTTYYATSVKGRFTISRDNSKNTLYLQMGSLRGEDMAVYYCARAAGYLDYWGQGTLVTVSS

SEQ ID NO: 20775 - protein, 94 aa, Homo sapiens
AASGFTFSSYAMHWVRQAPGKGLEYVSAISSNGGSTYYAISVKGRFTISRDNSKNTLYLQMGSLRAEDMAVYYCARAAGYLDYWGQGTLVTVSS

SEQ ID NO: 20776 - protein, 97 aa, Homo sapiens
AASGFRFSSNWMSWVRQTPGGGLEWVATIKQDGSQKYYVDSVKGRFTISRDNAKTSVYLQMNSLRAEDTAIYYCVRDDRGSYLFDYWGQGTLVTVSS

SEQ ID NO: 20777 - protein, 97 aa, Homo sapiens
AASGFTFSTNWMTWVRQAPGKGLEWVANMNQGGSEKHYVDSVKGRFTISRDNAKKSLYLQMNSLRAEDTAVYYCVRDDRGSYLFDYWGQGTLVTVSS

SEQ ID NO: 20778 - protein, 103 aa, Homo sapiens
AVSGGSMTSPNWWSWVRQPPGKALEWIGEILHTGTAHSSPSLRSRVTVSLDKSKNQFSLNLNSVTAADTAVYYCARLGPGATTPTTGAAFDIWGQGTMVTVSS

SEQ ID NO: 20779 - protein, 103 aa, Homo sapiens
AVSGGSISSLNWWTWVRQPPGKGLEWIGEIYHSGTTHYSPSLWSRATISLDKSKTRFSLNLSSVTAADTAVYYCARLGPGATTPTTGAAFDIWGQGTMVTVSS

SEQ ID NO: 20780 - protein, 102 aa, Homo sapiens
VSGDSMVGPNWWTWVRQPPGKGLEWIGEIRHTGTAHYSPALRSRVTITSDNSMQRFFLTLSSLTAADTAVYYCARLGPGATTPTTGAAFDIWGQGAVVTVSS

SEQ ID NO: 20781 - protein, 102 aa, Homo sapiens; identical to SEQ ID NO: 20780

SEQ ID NO: 20782 - protein, 94 aa, Homo sapiens
KGSGYSFATHWIGWVRLMPGKGLEWMGIIYPGDSDTRYSPSFQGQVTISADKSISTAFLQWSSLKASDTAMYYCARRGTSLDYWGQGTLVTVSS

SEQ ID NO: 20783 - protein, 94 aa, Homo sapiens
KGSGYSFTTYWIAWVRQMPGKGLEYMGIIYPGDSDTRYSPSFQGQVTISADKSLTTAYLEWSSLKASDTAMYYCARRGTSLDYWGQGTLVTVSS

SEQ ID NO: 20784 - protein, 93 aa, Homo sapiens
AASGFTFSNSWMQWVRQAPGKGLVWVSRINADGSSTTYADSVKGRFTISRDNAKKTLYLQMNSLRAEDTAIYYCVRDSSATYWGQGTLVTVSS

SEQ ID NO: 20785 - protein, 92 aa, Homo sapiens
AVSGFSLRGHWMYWVRQAPGKGLMGVSRISATGTTEYADSVKGRFTISGDNAKNTLFLQMNSLRVEDTGVYYCVRDSSATYWGRGTLVHVSS

SEQ ID NO: 20786 - protein, 93 aa, Homo sapiens
AASGFSFKDYWMSWVRQAPGKGLEWVANINEGGSQKNYVDSVKGRFTISRDNAKNSLYLQMNSLRAEDTAVYYCTNRAWLESWGQGTLVTVSS

SEQ ID NO: 20787 - protein, 93 aa, Homo sapiens
EASGFPFSSHWMSWVRQAPGKGLEWVANINEDGSQKNYVDSVKGRFTISRDNAKNALHLQMSSLRAEDTAVYYCTNRAWLESWGQGTLVAVSS

SEQ ID NO: 20788 - protein, 98 aa, Homo sapiens
KGSGYSFRSYWIAWVRQMPGKGPEWMGIIQPGDSDTRYSPSFQGQVTISADKSISTAYLQWSSLKASDTAMYYCARQDGAAEYYFDYWGQGTLVTVSS

SEQ ID NO: 20789 - protein, 98 aa, Homo sapiens
KGSGYDFNFYWIAWVRQMPGKGLEWMGIIYPGDSKSRYSPSFQGQATISVDKSINTAYLQWRSLKASDTAIYFCARQDGAAEYYFDYWGQGTLVTVSS

SEQ ID NO: 20790 - protein, 96 aa, Homo sapiens
AASGFTFSTYWMSWVRLTPGEGLEWVANLDQDASEKNYVDSVKGRFTISRDNAKSSLYLQMNSLRVDDTALYYCARDRGYSTFDFWGQGALVTVSS

SEQ ID NO: 20791 - protein, 96 aa, Homo sapiens
AASGFTFGTYWMSWVRQAPGKGLEWVANMQEDGTEINYVDSVRGRFTISRDNARDSLYLQMTSLRAEDTAVYYCARDRGYSTFDFWGQGILVTVSS

SEQ ID NO: 20792 - protein, 95 aa, Homo sapiens
AVSGASFSNNNWWSWVRQSPEKGLEWIGEIHHSDGTNYNPSLRSRVTMSLDTSKNQFSLRLTSVTAADTAVYYCTRPYSYYMDVWGKGTTVTVSS

SEQ ID NO: 20793 - protein, 94 aa, Homo sapiens
VSDGSISNNNWWGWVRQPPGKGLEWIGEIYHSGSTNYNPSLKSRVTISVDKSKNLFSLNLSSVTAADTAVYYCTRPYSYYMDVWGKGTTVTVSS

SEQ ID NO: 20794 - protein, 93 aa, Homo sapiens
AASGFTFSSYEMNWVRQAPGKGLEWVSYISSSGGTIYYADSVKGRFTISRDNAKNSLYLQMNSLRAEDTAVYYCARGSSSSSWGRGTLVTVSS

SEQ ID NO: 20795 - protein, 93 aa, Homo sapiens
AASGFTFTTYVMNWVRQAPGKGLEWVSFISSGSKTIYYADSVKGRFTISRDNANNSLYLQMNSLRDEDTAVYYCARGSSSSSWGQGTLVTVSS

SEQ ID NO: 20796 - protein, 105 aa, Homo sapiens
TQTLTLTCAFSGFSLTTSGVAVGWFRQPPGKALEWLAHIYWDNDKRHSPSLRTRLTITKAASKNQVVLTLTNVGPLDTATYFCAHRLRADAFDVWGQGTLVAVSS

SEQ ID NO: 20797 - protein, 105 aa, Homo sapiens
TQTLTLTCTFSGFSLSTSGVAVGWLRQPPGKALEWLAHVYWDDDKRYSRSLRNRLTITKATSRNQVVLTLTNMGPLDTATYFCAHRLRADAFDVWGRGTMVAVYS

SEQ ID NO: 20798 - protein, 105 aa, Homo sapiens
TQTLTLTCTFSGFSLTTSGVAVGWFRQPPGKALEWLAHIYWDNDKRHSPSLRTRLTITKAASKNQVVLTLTNVGPLDTGTYFCAHRLRADAFDVWGQGTLVAVSS

SEQ ID NO: 20799 - protein, 104 aa, Homo sapiens
QTLTLTCAFSGFSLKTSGVAVGWLRQPPGKALEFLALIYWDDDKRYSPSLKNRLTIMKDSSRNQVVLTMTNVDRVDTATYFCAHRLRADAFDVWGQGTMVTVAS

SEQ ID NO: 20800 - protein, 105 aa, Homo sapiens
TQTLTLTCTFSGFSLSSSGVAVGWLRQPPGKALEWLAHIYWDDDKRFSLSLRNRLTITKATPRNQVVLTMTNVGPVDTATYFCAHRLRADAFDVWGQGTRVTVSS

SEQ ID NO: 20801 - protein, 92 aa, Homo sapiens
AASGFTFSSYWMSWVRQAPGKGLEWVANIKQDGSAKYYVDSVKGRFTISRDNAKNSLYLQMNSLRAEDTAVYYCARGLPDPHWGQGTLVTVS

SEQ ID NO: 20802 - protein, 92 aa, Homo sapiens
ASGFIFSDYWINWVRRAPGKGLEWVANIKKDGSEKYFADSVKGRFTISRDNGKNSVYLQMSSLRAEDTAVYFCARGLPDPHWGQGTLVTVSS

SEQ ID NO: 20803 - protein, 96 aa, Homo sapiens
SVSGGSINNYHWSWMRQSPGKEPEWIAYIFYSGIITYNPSLKSRVTISIDTSKYHFSLKLRSVTAADTAVYYCARRASGENYFDYWGQGTLVTVSS

SEQ ID NO: 20804 - protein, 96 aa, Homo sapiens
TVSGGSISFYHWSWMRQSPGKELEWIAYIYYSGTITYNPSLKSRVTISVDTSKNHFSLTLPSVTAADTAIYYCARRASGENYFDYWGQGTLVTVSS

SEQ ID NO: 20805 - protein, 96 aa, Homo sapiens
SVSGGSTSGYHWSWMRQSPEKGIEWIGYIHYSGTTTYNPSLKSRLTITVDTPKNQFSLNLRSVTAADTAVYFCARRASGENYFDYWGQGTLVTVSS

SEQ ID NO: 20806 - protein, 99 aa, Homo sapiens
ATSGFTFSTYAMAWVRQAPGKGLEWLSAIGDRSHYTYYADSVKGRFTISRDNSENTLYLQMNTLTAEDTAIYFCAKELVSRQSLSFDFWGQGTLVTVSS

SEQ ID NO: 20807 - protein, 99 aa, Homo sapiens
AASGFTFGNYAMAWVRQAPGKGLEWLSAIGGSSEYTFYADSVKGRFTFTRDNSKNTLYLQMNSLRAEDTAVYFCAKELVSRQSLSFDFWGQGTLVTVSS

SEQ ID NO: 20808 - protein, 93 aa, Homo sapiens
AIYGGSFSTYYWSWIRQSPEKGLEWIGEINHRGSTNYNPSLDSRVTISVDTSNNQFSLRLTSVTAADTAVYYCARGPGTTSDWGRGTLVTVSS

SEQ ID NO: 20809 - protein, 93 aa, Homo sapiens
AVSGGSFSDYYWSWIRQSPGKGLEWIGEINHSGSTSYNPSLKSRVAISVDTSKNQFSLKLTSVTAADTAVYFCARGPGTTSDWGQGTLVTVSS

SEQ ID NO: 20810 - protein, 93 aa, Homo sapiens
AVYGGSFSDYYWSWIRQPPGKGLEWIGEINHSGSTTYNPSLKSRVAMSVDTSKNQFSLKLTSVTAADTAVYFCARGPGTTSDWGQGTLVSVSS

SEQ ID NO: 20811 - protein, 93 aa, Homo sapiens
AVSGGSFGDYYWSWIRQPPGKGLEWIGEINHSGNTNYNPSLKSRVAISIDTSKNQFSLKVTSVTAADTAVYFCARGPGTTSDWGQGTLVSVSS

SEQ ID NO: 20812 - protein, 93 aa, Homo sapiens
AVYGGSFSDYYWSWIRQPPGKGLEWIGEINHSGTTNYNPSLKSRVAISVDTSKNQFSLKVTSVTAADTAIYFCARGPGTTSDWGQGTLVSVSS

SEQ ID NO: 20813 - protein, 93 aa, Homo sapiens
AVYGGSFSDYYWSWIRQPPGKGLEWIGEINHSGTTNYNPSLKSRVAISVDTSKNQFSLKVTSVTAADTAIYFCARGPGTTSDWGQGTLVTVSS

SEQ ID NO: 20814 - protein, 93 aa, Homo sapiens
AVYDGSFAEYYWSWIRQPPGGGLEWIGEINHSGNTNYNPSLKGRVAISIDTSKNQFSLKLTSVTAADTAVYFCARGPGTTSDWGQGTLVSVSS

SEQ ID NO: 20815 - protein, 93 aa, Homo sapiens
AVYGGSFGTYYWSWIRQPPGKGLEWIGEINHSGRTNYNPSLESRVTISIDTSKNQFSLKLTSVTAADTAVYYCARGPGTTSDWGQGTLITVSS

SEQ ID NO: 20816 - protein, 93 aa, Homo sapiens; identical to SEQ ID NO: 20811

SEQ ID NO: 20817 - protein, 93 aa, Homo sapiens
AVYGGSFSDYYWSWIRQPPGKGPEWIGEINHSGNTNYNPSLKSRVAISIDTSKNQFSLKLTSVTAADTAVYFCARGPGTTSDWGQGTLVSVSS

SEQ ID NO: 20818 - protein, 95 aa, Homo sapiens
AASGFTFSAYSMNWVRQAPGEGLEWISKVSASGINTYYADSVRGRLSVSRDNAKDSLYLQMNSLRAEDTALYYCARDHNYGFDYWGQGALVTVSS

SEQ ID NO: 20819 - protein, 94 aa, Homo sapiens
ASGFIFSRYSMNWVRQAPGKGLEWVSYIRTSDSVIYYADSVRGRFTISRDIAENSLYLQMNSLRDEDTAVYYCARDHNYGFDYWGQGIPVTVSS

SEQ ID NO: 20820 - protein, 105 aa, Homo sapiens
TQTLTLTCTFSGFSLSTSGVGVGWVRQPPGKALEWLALIYWDDDKRYRPSLKSRLTINKDTSRNQVVLIMTNMDPVDTATYYCAHLYNYGRFDYWGQGALVTVSS

SEQ ID NO: 20821 - protein, 105 aa, Homo sapiens
TQTLTLTCTFSGFSLNTSGVGVGWIRQPPGKPLEWLALVYWDDDQRYRPSLKSRLTITKDTSKDQVVLTMTNMDPVDTATYYCAHLYNYGRFDYWGQGTLVTVSS

SEQ ID NO: 20822 - protein, 105 aa, Homo sapiens
TQTLTLTCTFSGFSLSTSGVGVGWIRQTPGKPLEWLALIYWDDDKRYSPSLKTRLTISKDTSKSQVVLTMTNMDPLDTATYSCAHLYNYGRFDYWGQGTLVTVSS

SEQ ID NO: 20823 - protein, 97 aa, Homo sapiens
KGSGYTFTSYWIGWVRQMPGKGLEWMGIIYPGDSDTRYSPSFQGQVTISADKSINTAYLQWSSLKASDTAMYYCARSIVGATPFDYWGQGTPVAVSS

SEQ ID NO: 20824 - protein, 97 aa, Homo sapiens
KGSGYSFTSYWIGWVRQMPGKGLEWMGIIHPSDSDTRYSPSFQGQVTISADKSISTAYLQWSSLKASDTAMYYCARSIVGATPFDYWGQGTLVTVSS

SEQ ID NO: 20825 - protein, 94 aa, Homo sapiens
AVYGGSFSGYYWSWIRQPPGKGLEWIGEINHSGSTNYHPSLKSRVTMSIDTSKNQFSLKLSSVTAADTAVYYCARGASRYSGTWGQGTLVTVSS

SEQ ID NO: 20826 - protein, 94 aa, Homo sapiens
AVYGGSFSGYYWSWIRQPPGKGLEWIGEINHSGSTNYHPSLKSRVTMSIDTSKNQFSLKLSSVTTADTAVYYCARGASRYSGTWGQGTLVTVSS

SEQ ID NO: 20827 - protein, 94 aa, Homo sapiens; identical to SEQ ID NO: 20825

SEQ ID NO: 20828 - protein, 94 aa, Homo sapiens
AVYGGSFSTYYWTWIRQPPGKGLEWIGEIDPSGSANYNPSLKSRVTISADTSKNQLSLKLRSVTAADTAVYYCARGASRYSGTWGQGTLVTVSS

SEQ ID NO: 20829 - protein, 94 aa, Homo sapiens
AVYGGSFSGYYWTWIRQPPGKGLEWIGEINHSGSTNYHPSLKSRVTMSIDTSKNQFSLKLSSVTAADTAVYYCARGASRYSGTWGQGTLVTVSS

SEQ ID NO: 20830 - protein, 92 aa, Homo sapiens
AASGYTLSNNGMTWVRQAPGKGLEWVSDITGRGGTYYADSVKGRFTISRDNSKNTLNLQMNSLRAEDTAVYYCVGHGSGSYWGQGTLVTVSS

SEQ ID NO: 20831 - protein, 93 aa, Homo sapiens
AVSGLTFNNHGMTWVRLAPGKGLEWVSDISSSGGGTYYADSVKGRFTISRDNSKNTLYLQMDSLRAEDTAVYYCVGHGSGSYWGQGTLVTVSS

SEQ ID NO: 20832 - protein, 93 aa, Homo sapiens
AVSGLTFNNVGMTWVRLAPGKGLEWVSDISSSGGGTYYADSVKGRFTISRDNSKSTLYLQMDSLRAEDTAVYYCVGHGSGSYWGQGTLVTVSS

SEQ ID NO: 20833 - protein, 93 aa, Homo sapiens
AVSGLTFKNVGMTWVRLAPGKGLEWVSDISSSGGGTYYADSVKGRFTISRDNSKSTLYLQMDSLRAEDTAVYYCVGHGSGSYWGQGTLVTVSS

SEQ ID NO: 20834 - protein, 93 aa, Homo sapiens; identical to SEQ ID NO: 20832

SEQ ID NO: 20835 - protein, 93 aa, Homo sapiens
AVSGLTFTRVAMSWVRQAPGKGLKWVADISGGGESTYYADSVKGRFTVSRDNSKNTLSLQMNSLRAEDTAVYYCVGHGSGSYGGQGTLVTVSS

SEQ ID NO: 20836 - protein, 95 aa, Homo sapiens
AVSGFTFSSYWMSWVRQAPGKGLEWVANIKQDGSDKYYVDSVKGRFTISRDNAKNSLYLQMNSLRVADTAVYYCARLVAGPFDSWGQGTLVTVSS

SEQ ID NO: 20837 - protein, 95 aa, Homo sapiens
AASIFSISKYWMSWVRQAPGKGLEWVANIKQDGSEKFYVDSVRGRFTISRDNAKNSLYLQMNSLRVEDTAVYYCARLVAGPFDSWGQGTLLTVSS

SEQ ID NO: 20838 - protein, 98 aa, Homo sapiens
AVSGFTFSSYWMHWVRQAPGKGLVWVSRINSDGSSTSYADSVKGRFTISRDNAKNTLYLQMNSLRAEDTAVYYCARGGRYSYGAFDIWGQGTMVTVSS

SEQ ID NO: 20839 - protein, 98 aa, Homo sapiens
AASGITFSSYWMHWVRQAPGKGLVWVSRINSDGSSTSYADSVKGRFTISRDNAKNTLFLQMNSLRAEDTAMYYCARGGRYSYGAFDIWGQGTMVTVSS

SEQ ID NO: 20840 - protein, 94 aa, Homo sapiens
VASGFTFRSNWMQWVRQAPGKGLVWVSRSNPDGSSTDYADSVKGRFTISRDNAKNTLYLQMNSLRAEDTAVYYCARSREGFDIWGHGTMVTVSS

SEQ ID NO: 20841 - protein, 94 aa, Homo sapiens
AASGFTFSTNWMQWVRQAPGKGLEWVSNSNPDGSQTKYADSVKGRFTISRDNAKNTLYLQMNSLRVDDTAVYYCARSREGFDIWGQGTMVTVSS

SEQ ID NO: 20842 - protein, 94 aa, Homo sapiens
AASGFTFSNSWMHWVRQAPGKGLLWVSGINPDGSWINYADSVKGRFTISRDSAKNTLYLQMISLRVEDTAVYYCARSREGFDIWGQGTMVTVSS

SEQ ID NO: 20843 - protein, 96 aa, Homo sapiens
SVSGGSISNYHWSWMRQSPGKELEWIAYIYYTGSITYNPSLKSRVTMSVDMSTNNFSLKLPFVTAADTAVYYCARRASAENYFDHWGQGTLVTVSS

SEQ ID NO: 20844 - protein, 95 aa, Homo sapiens
VSDDSFSSHYWSWIRQPPGKALEWIGYVHYTGSTHYNPSLTSRVTISLDTSKNQFSLKLTSVTAADTAMYFCARRASAENYFDHWGQGSLVTVSS

SEQ ID NO: 20845 - protein, 93 aa, Homo sapiens
TVSGGSINSYYWSWIRQPPGKGLEWIGYIYYSGSTNYNPSLKSRVTISVDTSKNQFSLKLSSVTAADTAVYYCARGTTYFDYWGQGTLVTVSS

SEQ ID NO: 20846 - protein, 92 aa, Homo sapiens
SISGGSISSYYCTWIRQSPGKGLEWIGYIYGGSTNYNPSLESRVAISIDTSKNHFSLELSSVTSTDTAIYYCARGTTYFDYWGQGVLVTVSS

SEQ ID NO: 20847 - protein, 94 aa, Homo sapiens
AASGFTFTSHWMTWVRQAPGKGLEWVAVIKPDGTEKYYMDSVKGRFTISRDNGKNSVYLQMNTLRAEDSALYYCARDLSWNFDYWGEGTLVTVS

SEQ ID NO: 20848 - protein, 95 aa, Homo sapiens
AASGFTFSRDWLTWVRQPPGKGLEWVANIKPDGSEKYYMDSVKGRFTISRDNTRNSVYLQMNSLRVEDTAVYYCARDLSWNFDYWGQGTLVTVSS

SEQ ID NO: 20849 - protein, 95 aa, Homo sapiens
AASGLTFSRDWMTWVRQPPGKGLEWVANIKPDGSETYYVDSVKGRFTISRDNARNSVYLQINSLRVEDTAVYYCARDLSWNFDYWGQGTLVTVSS

SEQ ID NO: 20850 - protein, 95 aa, Homo sapiens
AASGFTFSRDWMAWVRQPPGQGLEWVANIKPDGSEKYYVDSVKGRFTISRDNARISVYLQMNSLRVEDTAVYYCARDLSWNFDYWGQGILVTVSS

SEQ ID NO: 20851 - protein, 95 aa, Homo sapiens
AASGLTFSRDWMTWVRQPPGMGLEWVANIKPDGTEKYYVDSVKGRFTISRDNARNSVYLHMNSLRVEDTAVYYCARDLSWNFDYWGQGTLVTVSS

SEQ ID NO: 20852 - protein, 95 aa, Homo sapiens
AASGFTFSRDWVTWVRQPPGKGLEWVANIKPDGSEKYYVDSVKGRFTISRDNARNSVYLQMNSLRVEDTAVYYCARDLSWNFDYWGQGTLVTVSS

SEQ ID NO: 20853 - protein, 96 aa, Homo sapiens
ASGYTFPTYGISWVRQAPGQGLEWMGWISVYNGNTNYAQKLQDRVTMTTDTSTSTAYMELRSLTSDDTAMYYCARGPPSPQYFQYWGQGTLVTVSS

SEQ ID NO: 20854 - protein, 96 aa, Homo sapiens
ASGYTFTSYGISWVRQAPGQGLEYMGWITTGNGNTNYAQKLQGRVTMTTDTSTSTVYMELTSLRSDDTAVYYCARGPPSPQYFQYWGQGTLVTVSS

SEQ ID NO: 20855 - protein, 96 aa, Homo sapiens; identical to SEQ ID NO: 20854

SEQ ID NO: 20856 - protein, 97 aa, Homo sapiens
ATSGFTFSGSPMHWVRQASGKGLEWVGHVRHKAYNYETAYAESVKGRFTISRDDSKNTAYLQMNTLKTEDTAIYYCVAQTVSVSDYWGQGTLVTVSS

SEQ ID NO: 20857 - protein, 97 aa, Homo sapiens
AASGFDFSDSHMHWVRQASGKGLEWVGHIRARRDGYSTAYIESARGRFSISRDDSKNMLFLQMNSLKTEDTAVYYCVAQTVSVSDYWGRGTLVTVSS

SEQ ID NO: 20858 - protein, 97 aa, Homo sapiens
AASGFDFSDSHMHWVRQASGKGLEWVGHIRAKRDSYATAYTESARGRFTISRDDSKNMVFLQMNSMKTEDTAVYYCVAQTVSVSDYWGQGTLVTVSS

SEQ ID NO: 20859 - protein, 99 aa, Homo sapiens
AASGFTFSSYAMSWVRQAPGKGLEWVSAISGSGGSTYYADSVKGRFTISRDNSKNTLYLQMNSLRAEDSAVYYCAKGRLADYYYYMDVWGKGTTVTVSS

SEQ ID NO: 20860 - protein, 99 aa, Homo sapiens
AASGFTFSSYAMSWVRQAPGKGLEWVSAIGGSGGSTYYADSVKGRFTISRDNSKNTLYLQMNSLRAEDSAVYYCAKGRLADYYYYMDVWGKGTTVTVSS

SEQ ID NO: 20861 - protein, 92 aa, Homo sapiens
AASGFSFSSYEMNWVHQAPGKGLEWVSYISSSGSTIYYADSVKGRFTISRDNPKNSLYLQMNSLRAEDTAVYYCARDLGLYWGQGTLVTVSS

SEQ ID NO: 20862 - protein, 92 aa, Homo sapiens
AASGFSFSSYEMNWVRQAPGKGLEWVSYISSSGSTIYYADSVKGRFTISRDNPKNSLYLQMNSLRAEDTAVYYCARDLGLYWGQGTLVTVSS

SEQ ID NO: 20863 - protein, 91 aa, Homo sapiens
GSGFTFSTSEINWVRQAPGKGLEWVAYISSSGSDVYYPDSVKGRFTISRDNAKNSVYLQMNSLRAEDTAVYFCARDLGLYWGQGTLVTVSS

SEQ ID NO: 20864 - protein, 98 aa, Homo sapiens
ISGDSVSSNSAAWHWIRQSPSRGLEWLGRTYYRSKRYNDYAVSVKSRITINPDTSKNQFSLQLNSVTPEDTAVYYCARVGSSGSLDYWGQGTLVTVSS

SEQ ID NO: 20865 - protein, 98 aa, Homo sapiens
ISGDSVSSNSAAWNWIRQSPSRGLEWLGRAYYRSKWYYNYAVSVKSRITISPDTSKNQFSLQLNSVTPEDTAMYYCARVGSSGSLDYWGQGTLVTVSS

SEQ ID NO: 20866 - protein, 98 aa, Homo sapiens; identical to SEQ ID NO: 20865

SEQ ID NO: 20867 - protein, 98 aa, Homo sapiens
ISGDSVSSNSAAWHWIRQSPSRGLEWLGRTYYRSKWSRDYAVSVKSRITINPDTSKNQFSLQLNSVTPDDTAVYYCARVGSSGSLDYWGQGTLVTVSS

SEQ ID NO: 20868 - protein, 98 aa, Homo sapiens
ISGDSVSSNSAAWHWIRQSPSRGLEWLGRTYYRSKWYKDYAVSVKSRITINPDTFKNQFSLQLNSVTPDDTAVYYCARVGSSGSLDYWGQGTLVTVSS

SEQ ID NO: 20869 - protein, 96 aa, Homo sapiens
AASGFTFSNYAMSWVRQAPGKGLEWVSAITGSGDSTYYADSVKGRFTSSRDNSKNTLFLQMSGLRVEDTALYYCARGDRYSGWGYWGLGTLVTVSS

SEQ ID NO: 20870 - protein, 96 aa, Homo sapiens
AASGFTFGSYAMSWVRQAPGKGLEWVSAISNDGRGTHYADSVKGRFTISRDNSKSTLYLQMNNLRAEDTAVYYCARGDRYSGWGYWGQGTLVTVSS

SEQ ID NO: 20871 - protein, 97 aa, Homo sapiens
AASGFTFSDHYINWVRQAPGKGLEWVGLTRNKANRYTTQYAASVKGRFTISRDASENSVYLQMNSLKTEDTAVYYCVRTRADAFDIWGQGTMVTVSS

SEQ ID NO: 20872 - protein, 97 aa, Homo sapiens; identical to SEQ ID NO: 20871

SEQ ID NO: 20873 - protein, 97 aa, Homo sapiens
AASGLTFSDHYMNWVRQAPGKGLEWVGLTRNKANRYTTQYAASVKGRFTISRDDSENSLYLEMNSLKTEDTAVYYCVRTRADAFDIWGQGTMVTVSS

SEQ ID NO: 20874 - protein, 97 aa, Homo sapiens
AASGFTLSDHYIDWVRQAPGKGLEWVGRTRNKVNSYTTEYAASVKGRFTISRDDSKNSLYLQMNSLKSEDTAVYYCVRTRADAFDIWGQGTMVTVSS

SEQ ID NO: 20875 - protein, 97 aa, Homo sapiens
EVSGFDFTNAWMSWVRQAPGKGLEWVGRIKRNADGATRDYAAPVKGRFTISRDDSKNTLFLQMNNLKTEDTGVYYCTTDPPGGTDFWGQGTLVTVSS

SEQ ID NO: 20876 - protein, 97 aa, Homo sapiens
AASGFSFTNAWMSWVRQAPGKGLEWVGRIKLNTDGGTTDYAAPVRGRFTISRDDSKNTLFLQMNSLKTEDTAMYYCTTDPPGGTDFWGQGTLVTVSS

SEQ ID NO: 20877 - protein, 95 aa, Homo sapiens
AASGFTVSTNYMSWLRQAPGKGLEWVSVIYANGRTYYADSVKGRFSISRDDSKNTLYLQMNSPRAEDTAVYYCARGGAVAGFDPWGQGTLVTVSS

SEQ ID NO: 20878 - protein, 95 aa, Homo sapiens
AASGFTVSSNYMSWVRQAPGKGLEWVSVIYSDGSTYYAGSVKGRFTISRDNSKNTLYLQMNNLRAEDTAVYYCARGGAVAGFDPWGQGTLVTVSS

SEQ ID NO: 20879 - protein, 104 aa, Homo sapiens
AASGFTFSSFAMSWVRQAPGKGLEWVSGISGSGGSTYYADSVKGRFTISRDNSKNTLYLQMNSLRAEDTAVYYCAKDPAKRQTTVVTILNFDYWGQGILVTVSS

SEQ ID NO: 20880 - protein, 104 aa, Homo sapiens
AASGFTFSSYAMSWVRQAPGKGLEWVSAISGSGGSTYYADSVKGRFTISRDNSKNTLYMQMNSLRGEDTAVYYCAKDPAKRQTTVVTILNFDYWGQGTLVTVSS

SEQ ID NO: 20881 - protein, 104 aa, Homo sapiens
AASGFTFSSYAMSWVRQAPGKGLEWVSAISGSGGSTYYADSVKGRFTISRDTSKNTLYLQMNSLRAEDTALYYCAKDPAKRQTTVVTILNFDYWGQGTLVTVSS

SEQ ID NO: 20882 - protein, 90 aa, Homo sapiens
TVSGASISSYYWSWIRQPPGKGLEWIGYIYYSGTTNYNPSLKSRVTISVDTSKNQFSLKLISVTAADTAVYYCASLPKDWGQGTLVTVSS

SEQ ID NO: 20883 - protein, 90 aa, Homo sapiens
TVSGGSISSSYWSWIRQPPDKGLEWIGYIYYTGSTNYNPSLKSRVTLSVDTSKNQFSLKLNSVTAADTAVYYCASLPKDWGKGTLVTVSS

SEQ ID NO: 20884 - protein, 90 aa, Homo sapiens
TVSGASISSYYWSWIRQPPGKGLEWIGYIYYSGTTNYNPSLKSRVSISVDTSKNQFSLKLISVTAADSAVYYCASLPKDWGQGTLVTVSS

SEQ ID NO: 20885 - protein, 97 aa, Homo sapiens
AASGFTFSRYGMHWVRQAPGKGLEWVTVIWNDGSNKYFADSVNGRFTISRDNSKNTLYLQMNSLRAEDTAVYYCARGAGFRELIDYWGQGTLVTVSS

SEQ ID NO: 20886 - protein, 97 aa, Homo sapiens
AASGFTFSRYGMHWVRQAPGKGLEWVTVIWNDGSNKYFADSVKGRFTISRDNSKNTLYLQMNSLRAEDTAVYYCARGAGFRELIDYWGQGTLVTVSS

SEQ ID NO: 20887 - protein, 98 aa, Homo sapiens
AASGFIFSTYEMNWVRQAPGKGLEWVSYISGSGSSFFYADSVKGRFTVSRDNAKNSLFLQMNSLRADDTALYYCVRDGGLGGDAFDVWGQGTMVAVSS

SEQ ID NO: 20888 - protein, 98 aa, Homo sapiens
AASGFTFTSYEMNWVRQAPGKGLEWVSYISGSGSTMFYADSVKGRFTISRDNARESLYLQMNDLRVEDTAIYYCVRDGGLGGDAFDVWGQGTMVTVSS

SEQ ID NO: 20889 - protein, 96 aa, Homo sapiens
AASGFIFSSYEMNWVRQAPGKGLEWISYISSRGTSIYYADSVEGRFTISRDNAENSLYLQMNSLRAEDTAVYYCARDRATVTFDFWGQGTLVTVSS

SEQ ID NO: 20890 - protein, 96 aa, Homo sapiens
AASGFLFSSFQMNWVRQAPGKGLEWISYISADGVTKYYADSVQGRFTISRDNGKNSLFLQMHSLRVEDTALYYCARDRATVTFDFWGLGTLVSVSS

SEQ ID NO: 20891 - protein, 98 aa, Homo sapiens
AASGFTFGTYAMGWVRQAPGKGLDWVSGISGSGGSTYYADSVKGRFTISRDNSKNTLYLQMSSLRAEDTAVYYCAKEPPRSGWAFDYWGQGTLVTVSS

SEQ ID NO: 20892 - protein, 97 aa, Homo sapiens
AASGFTFSSYCMGWVRQAPGKGLDWVSTIDLSDGTNYADSVKGRFTISRDNSKSTLYLQMNSLRAEDTAVYYCAKEPPRSGWAFDYWGQGTLVTVSS

SEQ ID NO: 20893 - protein, 104 aa, Homo sapiens
AASGLTVRSNYMSWVRQAPGKGLEWVSGVTGRADSTHHADSVKGRFTISRDNSKNTLYLQMNSLRAEDTAIYYCAKEGVPTPAAHGYFYHMDIWGKGTTVIVSS

SEQ ID NO: 20894 - protein, 104 aa, Homo sapiens
AASGFTFRGYAMNWVRQAPGKGLEWVSGVTGRADSTHHADSVKGRFTISRDNSKNTLYLQMNSLRAEDTAIYYCAKEGVPTPAAHGYFYHMDIWGKGTTVIVSS

SEQ ID NO: 20895 - protein, 97 aa, Homo sapiens
ATSGFTFSFYWMSWVRQAPGKGLEWMANIKQDGGEKYYVDSVKGRFTISRDNAKNSLYLQMNSLRAEDTAVYYCARLSGSSWDFDYWGQGTLVIVSS

SEQ ID NO: 20896 - protein, 97 aa, Homo sapiens
AVSGFSFSNYWMSWVRQAPGKRLEWVANIKQDGGEKYYVASVRGRFTISRDNAKNSLYLQMNRLRVEDTAVYYCARLSGSSWDFDYWGQGTQVTVSS

SEQ ID NO: 20897 - protein, 94 aa, Homo sapiens
AASGFTFSTYWMSWVRQAPGKGLEWVANIKPDGSEMYYVDSVKGRFTISRDDATNSLYLQMNSLRAEDTAVYYCVRGGGNFAYWGQGTLVTASS

SEQ ID NO: 20898 - protein, 94 aa, Homo sapiens
AASGFTFTTYWMSWVRQAPGKGLEWVANIKHDGSEKNYVDSVKGRFTISRENVKNSLYLQMNSLRVEDTAVYYCVRGGGNFAYWGQGTLVTVSS

SEQ ID NO: 20899 - protein, 95 aa, Homo sapiens
AASGFTFSSYWMSWVRQAPGKGLEWVANIKQDGSEKYYVDSVKGRFTISRDNAGNSLYLQMNTLRAEDTAVYYCASHSGWRLDYWGQGTLVTVSS

SEQ ID NO: 20900 - protein, 95 aa, Homo sapiens
AASGFTFSNYWMAWVRQAPGKGLEWVANIKQDGSAKYYVDSVKGRFTISRDNAKNSLFLQMNSLGAEDGAVYYCASHSGWRLDYWGQGTLVTVSS

SEQ ID NO: 20901 - protein, 95 aa, Homo sapiens
AASGFTFSSYWMSWVRQAPGKGLEWVANIKQDGSEKYYVDSVKGRFTISRDNAKNSLYLQMNSLRAEDTAVYYCASHSGWRLDYWGQGTLVTVSS

SEQ ID NO: 20902 - protein, 95 aa, Homo sapiens
AASGFTFSSYWMSWVRQAPGKGLEWVANIKQDGSEKYYVDSVKGRCTISRDNAKNSLYLQMNSLRADDTAVYYCASHSGWRLDYWGQGTLVTVSS

SEQ ID NO: 20903 - protein, 95 aa, Homo sapiens; identical to SEQ ID NO: 20902

SEQ ID NO: 20904 - protein, 98 aa, Homo sapiens
TVSGGSIRSGGYYWSWIRQHPGKGLEWIGHIYYSGSTYYNPSLKSRVTISVDTSKNQFSLRLSSVTAADTAVYYCARDIDSSGYLDYWGQGTLATVSS

SEQ ID NO: 20905 - protein, 98 aa, Homo sapiens
TVSGGSISSGGYYWNWIRQHPGMGLEWIGYIYYSGNTYYNPSLKSRVTISVDTSKNQFSLKLSSVTAADTAVYYCARDIDSSGYLDYWGQGTLVTVSS

SEQ ID NO: 20906 - protein, 98 aa, Homo sapiens
TVSGGSISSGGYYWNWIRQHPGKGLEWIGYIYYSGSTYYNPSLKSRVTILVDTSKNQFSLKLSSVTAADTAVYYCARDIDSSGYLDYWGQGTLVTVSS

SEQ ID NO: 20907 - protein, 92 aa, Homo sapiens
AASGFSFSSYEMNWVRQAPGKGLEWVSNIGRSGSTKYYADSVKGRFTISRDNADNSLYLQMNSLRAEDTAVYYCTRGLGGYWGQGTLVTVSS

SEQ ID NO: 20908 - protein, 92 aa, Homo sapiens
AASGFTFSSFEMNWVRQVPGKGLECISYISSSGSTIYYADSVKGRFTISRDNAKNSLYLQMNSLRAEDTAVYYCTRGLGGYWGQGTLVTVSS

SEQ ID NO: 20909 - protein, 97 aa, Homo sapiens
AASGFTFSSYAMSWVRQAPGKGLECVSTISGSGGSTYYTDSVKGRFTISRDNSKNTLYLQMNSLRDEDTAVYYCAKGLSRFGDFDYWGQGTLVTVSS

SEQ ID NO: 20910 - protein, 97 aa, Homo sapiens
AASGFTFRSYAMSWVRQAPGEGLEWVSCISGSGSSTYYADSVKGRFTISRDNSKNTVYLQMNSLRADDTAVYYCAKGLSRFGDFDYWGQGTLVTVSS

SEQ ID NO: 20911 - protein, 94 aa, Homo sapiens
ASVISGDHAMHWVRQRPGKGLEWVSGFHLITEAIGYADSVKGRFTTSRDNARNSLYLEMNSLRAEDTALYFCVKDLKAGGADVWGQGTTVTVSS

SEQ ID NO: 20912 - protein, 96 aa, Homo sapiens
EVSGVTFHDHGMHWVRQTPGRGLEWVSGIIWNRGDVGYGDSVKGRFTISRDNAKNSVYLEMHSLRVEDTALYYCVKDLKAGGADVWGQGTTVIVSS

SEQ ID NO: 20913 - protein, 100 aa, Homo sapiens
VASGFTFSAYPMTWVRQAPGKGLEWVSSVSNTGVSKYYADSVKGRFSISRDNSRNTLYLQMNSLRVDDTAVYYCARDLGGDNYAYLPDFWGQGALVTVSS

SEQ ID NO: 20914 - protein, 100 aa, Homo sapiens; identical to SEQ ID NO: 20913

SEQ ID NO: 20915 - protein, 100 aa, Homo sapiens; identical to SEQ ID NO: 20913

SEQ ID NO: 20916 - protein, 100 aa, Homo sapiens
VASGFTFDDYGMSWVRQAPGKGLEWVSGINWDGGSTGYADSVKGRFTISRDNAKNSLYLQMNSLRAEDTAFYHCARVPDSSGYLYYFDYWGQGTLVTVSS

SEQ ID NO: 20917 - protein, 100 aa, Homo sapiens
AASGFSFDDYAMSWVRQAPGKGLEWVSGTSWNGGSTAYADSVKGRFTISRDNAKNSLYLQMNSLSAEETALYYCARVPDSSGYLYYFDYWGQGTLVTVSS

SEQ ID NO: 20918 - protein, 100 aa, Homo sapiens
AASGFTFSSYAMHWVRQAPGKGLEWVAVISYDGSNKYYADSVKGRFTISRDNSKNTLFLQMNSLRAEDTAVYYCAGGGQMRTTEAAFDIWGQGTMVTVSS

SEQ ID NO: 20919 - protein, 99 aa, Homo sapiens
AASGFTFSSYAMHWVRQAPGKGLEWVAVISYDGSNKYYADSVKGRFTISRDNSKNTLFLQMNSLRAEDTAVYYCAGGGQMRTTEAAFDIWGQGTMSPSL

SEQ ID NO: 20920 - protein, 100 aa, Homo sapiens
AASGFTFSSYAMHWVRQAPGKGLEWVAVISYDGSNKYYADSVKGRFTISRDNSKNTLFLQMNSLRAEDTAVYSCAGGGQMRTTEAAFDIWGQGTMVTVSS

SEQ ID NO: 20921 - protein, 98 aa, Homo sapiens
AASGFTFSDFYMSWIRQAPGEGLECVSYISFSGSTIYYADSVKGRFTISRDDAKNSLYLQMNSLRAEDTAFYYCARDIPAAGLFLDYWGRGTLVTVSS

SEQ ID NO: 20922 - protein, 97 aa, Homo sapiens
AASGFTFSDFYMSWIRQAPGKGLEWVSYISYSGTIYYADSVKGRFTISRDNAKSALYLQMDSLRAEDTAMYYCARDIPAAGLFLDYWGQGTLVTVSS

SEQ ID NO: 20923 - protein, 98 aa, Homo sapiens
AASGFTFSDFYMTWIRQAPGKGLEWVSYIHYSGTPIYYADSVKGRFTISRDNAKNSLYLQMNSLRADDTAVYYCARDIPAAGLFLDYWGQGTLVTVSS

SEQ ID NO: 20924 - protein, 96 aa, Homo sapiens
AASGFTFGDYAIHWVRQAPGKGLEWVSGIYLESGRVGYVDSVKGRFTISIDKAKNSLFLQMNSLRAEDTAFYYCGKDLKPGGLDYWGQGILVTVSS

SEQ ID NO: 20925 - protein, 96 aa, Homo sapiens
AGSGFTCDEFAMHWVRQGPTKGLEWVAGIFCEGGGVGYADSVNGRFTISIDNDKSSLYLQMNNLKTEDTAVYYCGKDLKPGGLDYWGQGILVTVSS

SEQ ID NO: 20926 - protein, 93 aa, Homo sapiens
AVSGFAVSNNYMSWVRRASETGLEWISVIHKDGLIHYADSVRGRFTISRDNSKNTLYLQMNSLRVEDTAIYYCVRQASGFDYWGQGTLVTVSS

SEQ ID NO: 20927 - protein, 93 aa, Homo sapiens
AASGFTVSNNYLSWVRQAPGKGLEWVSVIHNDGKIYYADSVRGRFTISRDNSRNTLYLQMNSLRAEDTAIYYCVRQASGFDYWGQGTLVTVSS

SEQ ID NO: 20928 - protein, 93 aa, Homo sapiens
AASGFTVSSNYMSWVRQAPGKGLEWVSVIHNDGKIYYADSVRGRFTISRDNSKNTLYLQMNSLRAEDTAVYYCVRQASGFDYWGQGTLVTVSS

SEQ ID NO: 20929 - protein, 93 aa, Homo sapiens; identical to SEQ ID NO: 20928

SEQ ID NO: 20930 - protein, 98 aa, Homo sapiens
ASGYTFTSYAMNWVRQAPGQGLEWMGWINPNTGNPTYAQGFTGRFVFSLDTSVNTAYLQISSLQAEDTAIYYCARGTSAAGTDWFDPWGQGTLVTVSS

SEQ ID NO: 20931 - protein, 98 aa, Homo sapiens; identical to SEQ ID NO: 20930

SEQ ID NO: 20932 - protein, 98 aa, Homo sapiens
ASGYTFTNYAMNWVRQAPGQRPQWMGWINPTTGNPTYAQGFTGRFVFSLDTSVSTAYLQISSLKPEDTAVYYCARGTSAAGTDWFDPWGQGTLVTVSS

SEQ ID NO: 20933 - protein, 98 aa, Homo sapiens
ASGYTFKSYAMNWVRQAPGQGPEWMGWINVNSGNPTYGPGFTGRFVFSLDTSVNTAYLQINSLRAEDTAVYYCARGTSAAGTDWFDPWGQGTLVIVSS

SEQ ID NO: 20934 - protein, 93 aa, Homo sapiens
EGSGFIFRNYWMTWVRQAPGKGLEWVANMNQDGSERYYVDSVKGRFTISRDNAMTSLYLQMNSLRAEDTAVYYCVTGRDSSHWGQGTVVTVSS

SEQ ID NO: 20935 - protein, 93 aa, Homo sapiens
AASGFIFRNYWMTWVRQAPGKGLEWVANMNQDGSERYYVDSVKGRFTISRDNAKNSVYLQMSSLRVEDTAVYFCVTGRDSSHWGQGTLVTVSS

SEQ ID NO: 20936 - protein, 93 aa, Homo sapiens; identical to SEQ ID NO: 20935

SEQ ID NO: 20937 - protein, 93 aa, Homo sapiens
AASGFTFSTYWMNWVRQAPGKGLEWVANMNQDGSERYYVDSVKGRFTISRDNAKNSVYLQMSSLRVEDTAVYFCVTGRDSSHWGQGTLVTVSS

SEQ ID NO: 20938 - protein, 97 aa, Homo sapiens
ASGYTFKAYYIHWVRQAPGQGLEWMGRINPNIGDTDYAQKFQGRVTLTRDTSIRTAYMELNGLRSDDAVVYYCARGGGYTGYDIDYWGQGTLVTVSS

SEQ ID NO: 20939 - protein, 97 aa, Homo sapiens
GSGYTFTAYYIHWVRQAPGQGLEWMGRINPKTGVTEYAQNFQGRVTMTRDTSISTAYVELKRLRSDDTVVYFCARGGGYTGYDIDYWGQGTLVTVSS

SEQ ID NO: 20940 - protein, 97 aa, Homo sapiens; identical to SEQ ID NO: 20938

SEQ ID NO: 20941 - protein, 97 aa, Homo sapiens
TVSGGSISGYYWSWIRQPPGEGLEWIGYIHYSGGTNYNPSLASRVTMSVDTSKNQLSLRLTSVTAADTAVYFCARLHSLYSEEFDPWGQGSLVTVSS

SEQ ID NO: 20942 - protein, 97 aa, Homo sapiens
TVSGASVTGSYWSWIRQPPGKGLEWLGYIYSTGSTNYNPSLVSRLTLLGDTNKNQLSLILTSVTSADTAVYYCARLHSLYSEEFDPWGQGTLVTVSS

SEQ ID NO: 20943 - protein, 96 aa, Homo sapiens
TVSGGPISSGDYYWSWIRQHPGKGLEWIAYIYHSGSTYYSPSLKSRAIISVDTSKNQISLMLSSVTAADTAVYYCASLRGYRFDYWGQGTLVTVSS

SEQ ID NO: 20944 - protein, 96 aa, Homo sapiens
TVSGGSVSSGPYYWSWIRQHPGKGLEWIGYIYYSGSTYYNPSLKSRVTISVDTSKNQCSLKLSSVTAADTAVYYCASLRGYRFDYWGQGTLVTVSS

SEQ ID NO: 20945 - protein, 96 aa, Homo sapiens; identical to SEQ ID NO: 20944

SEQ ID NO: 20946 - protein, 96 aa, Homo sapiens
AASGFTFSNYWMTWVRQAPGKRLEFVANIDLNGGTRNYVDSVKGRFTISRDNAKSSVYLQMNSLRVEDSALYYCARDPFYSAFDIWGQGTMVAVSS

SEQ ID NO: 20947 - protein, 96 aa, Homo sapiens
AASAFTFSNSWMAWVRQAPGRGLECVAKINPDGSGKGYVDSVKGRFTISRDNAKNSLYLQMNSLTAEDTAVYYCARDPFYSAFDIWGQGTVVTVSS

SEQ ID NO: 20948 - protein, 100 aa, Homo sapiens
AVSGVTFSEYPMSWVRQAPGKGLEWVSFISGSGGSTYHADSVKGRFTISRDNSKNTLYLQMNSLRVEDTAIYYCAKDRYCPGGICPVDYWGQGTLVTVSS

SEQ ID NO: 20949 - protein, 100 aa, Homo sapiens
AGSGFTSSEYAMNWVRQAPGKGLEWVSIISGSGGTSYYADSVKGRFTISRDHSKNTLYLQMNSLRAEDTAVYYCAKDRYCPGGICPVDYWGQGTLVTVSS

SEQ ID NO: 20950 - protein, 99 aa, Homo sapiens
GSGFASSEYAMNWVRQAPGKGLEWVSTISGSGGTSDYADSVKGRFTISRDHFKNTLYLQMNSLRAEDTAVYYCAKDRYCPGGICPVDYWGQGTLVTVSS

SEQ ID NO: 20951 - protein, 100 aa, Homo sapiens
AGSGFTSTEYAMNWVRQAPGKGLEWVSTISGSGDSSDYADSVKGRFTISRDHFKNILYLHMHSLRAEDTAVYYCAKDRYCPGGICPVDYWGQGTLVIVSS

SEQ ID NO: 20952 - protein, 100 aa, Homo sapiens
AGSGFTSTEYAMNWVRQAPGKGLEWVSTISGSGDSSDYADSVKGRFTISRDLFRNILYLHMHSLRAEDTAVYYCAKDRYCPGGICPVDYWGQGTLVIVSS

SEQ ID NO: 20953 - protein, 100 aa, Homo sapiens
AGSGFTSSEYAMNWVRQAPGKGLEWVSTISGSGGTSDYANSVKGRFTISRDHFKNILYLHMNSLRAEDTAVYYCAKDRYCPGGICPVDYWGQGTLVTVSS

SEQ ID NO: 20954 - protein, 100 aa, Homo sapiens
AGSGFTSSEYAMNWVRQAPGKGLEWVSTISGSGGTSDYADSVKGRFTISRDLFKNTLYLQMNSLRAEDTAVYYCAKDRYCPGGICPVDYWGQGTLVTVSS

SEQ ID NO: 20955 - protein, 100 aa, Homo sapiens
AGSGFTSSEYAMNWVRQAPGKGLEWVSTISGSGGTSDYADSVKGRFTISRDHFKNTLYLQMNSLRAEDTAVYYCAKDRYCPGGICPVDYWGQGTLVTVSS

SEQ ID NO: 20956 - protein, 100 aa, Homo sapiens
AGSGFTSSEYAMNWVRQAPGKGLEWVSTISGSGGTSDYADSVKGRFTISRDHFKNTLYLQMNSLRAEDTAVYYCAKDRYCPGGICPVDYWGQSTLVTVSS

SEQ ID NO: 20957 - protein, 100 aa, Homo sapiens
AGSGFTSTEYAMNWVRQAPGKGLEWVSFISGSGGTAGYADSVKGRFTISRDHFKNILYLHINSLRAEDTAVYYCAKDRYCPGGICPVDYWGQGTLVIVSS

SEQ ID NO: 20958 - protein, 100 aa, Homo sapiens
AGSGFASSEYAMNWVRQAPGKGLEWVSTISGSGGTSDYADSVKGRFTISRDHFKNTLYLQMNSLRAEDTAVYYCAKDRYCPGGICPVDYWGQGTLVTVSS

SEQ ID NO: 20959 - protein, 92 aa, Homo sapiens
AASGFSFSSYWIHWVRQAPGKGLVWVSRINSDGSSTSYADSVKGRFTISRDNAKNTLYLQMNSLRAEDTAVYYCAREGMAYWGQGTLVTVSS

SEQ ID NO: 20960 - protein, 92 aa, Homo sapiens
AVSGFTLSEYWMHWVRQAPGKGLLWVSRINSDGSSTGYADSVKGRFTISRDNAKNTVYLQMNSLRVEDTAVYYCAREGMAYWGQGTLVSVSS

SEQ ID NO: 20961 - protein, 99 aa, Homo sapiens
AASGFTFSSYWMHWVRQVPGKGLAWVSRLDNDGTTTIYADSVKGRFTISRDNAKNTLFLQMNSLTAEDTAVYYCAREVTTIGAYYFDYWGRGILVTVSS

SEQ ID NO: 20962 - protein, 99 aa, Homo sapiens
AASGFTFSNYWMHWVRQAPGKGLVWVSRIHNDGSGTMYEDSVKGRFTISRDNAKNTLYLQMNSLRAEDTAVYYCAREVTTIGAYYFDYWGQGTLVTVSS

SEQ ID NO: 20963 - protein, 97 aa, Homo sapiens
ASGYTFTNYWIGWVRQMPGKGLEWMGIIYPGDSDTRYSPSFQGQVTISADKSINTAYLQWSSLKASDTAMYYCARVGTAGTRWFDPWGQGTLVTVSS

SEQ ID NO: 20964 - protein, 98 aa, Homo sapiens
KGSGYSFTNYWIAWVRQMPAKGLEWMGIIYPGDSDTRYSPSFQGQVTISADKSIGTAYLQWSSLTASDTAMYYCARVGTAGTRWFDPWGQGTLVTVFS

SEQ ID NO: 20965 - protein, 93 aa, Homo sapiens
ASGYRFSTSWIGWVRHIPGKGLEWMGNIYPGDSDTKYSPSFQGQVTFSADTSITTAYLQWGSLKASDTAIYYCAKKGGGFDSWGQGTLVTVSS

SEQ ID NO: 20966 - protein, 94 aa, Homo sapiens
KASGYRFGTSWIGWVRQMSGRGLEWMGIVYPDDSDTRYSPSFQGHVTFSVDMSTNTAFLRWRSLGASDTAIYYCAKKGGGFDSWGQGTRVTVSS

SEQ ID NO: 20967 - protein, 94 aa, Homo sapiens
KASGYSFTNSWIAWVRQMPGKGLEWMGVIYPGDSESRYSPLFQGQVTFSVDTSINTAYLHWSSLKASDSAMYYCAKKGGGFDSWGRGTLVTVSS

SEQ ID NO: 20968 - protein, 94 aa, Homo sapiens
KAAGYRFGTSWIGWVRQKPGKGLEWMGIIYPDDSDTKYSPSLQGQVTFSVDMSKTTAYLQWRSLRASDTAIYYCAKKGGGFDSWGQGTLVTVSS

SEQ ID NO: 20969 - protein, 94 aa, Homo sapiens
TVSGGSISSYYWSWIRQPPGKGLEWIGYTDYSANANYNPALKGRVTMSVDTSTNRFFLKVNSVTAADTAVYFCARGREWELANWGQGALVTVSS

SEQ ID NO: 20970 - protein, 93 aa, Homo sapiens
VSGVSVGTHFWSWIRQPPGQGLEWIGYTDYSANANYNPALKGRVTMSVDTSTNRFFLKVNSVTAADTAVYFCARGREWELANWGQGALVTVSS

SEQ ID NO: 20971 - protein, 93 aa, Homo sapiens
VSGVSVGTHFWSWIRQPPGQGLEWIGYTDYSANGNYNPALKGRVTMSVDTSTNQFFLKVNSVTAADTAVYYCARGREWELANWGQGALVTVSS

SEQ ID NO: 20972 - protein, 93 aa, Homo sapiens
VSGVSVGTHFWSWIRQPPGQGLEWIGYTDYSANANYNPALKGRVTMSVDTSTNQFFLKVNSVTAADTAVYYCARGREWELANWGQGALVTVSS

SEQ ID NO: 20973 - protein, 93 aa, Homo sapiens
VSGVSVGTHFWSWIRQPPGQGLEWIGYTDYSANANYNPALKGRVTMSVDTSTNQFFLKVKSVTAADTAVYYCARGREWELANWGQGALVTVSS

SEQ ID NO: 20974 - protein, 93 aa, Homo sapiens; identical to SEQ ID NO: 20972

SEQ ID NO: 20975 - protein, 93 aa, Homo sapiens; identical to SEQ ID NO: 20970

SEQ ID NO: 20976 - protein, 93 aa, Homo sapiens; identical to SEQ ID NO: 20972

SEQ ID NO: 20977 - protein, 93 aa, Homo sapiens
VSGVSVGTHFWSWIRQPPGQGLEWIGYTDYSANANYNPALKGRVTMSVDMSTNRFFLKVNSVTAADTAVYFCARGREWELANWGQGALVTVSS

SEQ ID NO: 20978 - protein, 93 aa, Homo sapiens
VSGVSVGTHFWSWIRQPPGQGLEWIGYTDYSANANYNPALKGRVTMSVDTSTNRFFLKVNSVTAADTAVYFCARGREWELANWSQGALVTVSS

SEQ ID NO: 20979 - protein, 93 aa, Homo sapiens
ASGVSVGTHFWSWIRQPPGQGLEWIGYTDYSANANYNPALKGRVTMSVDTSTNQFFLKVNSVTAADTAVYYCARGREWELANWGQGALVTVSS

SEQ ID NO: 20980 - protein, 93 aa, Homo sapiens; identical to SEQ ID NO: 20970

SEQ ID NO: 20981 - protein, 93 aa, Homo sapiens
VSGVSVGTHFWSWIRQPPGQGLEWIGYTDYSANANYNPALKGRVTMSVDTSTNRFFLTVNSVTAADTAVYFCARGREWELANWGQGALVTVSS

SEQ ID NO: 20982 - protein, 93 aa, Homo sapiens
VSGVSVGTHFWSWIRQPPGQGLEWIGYTDYSANANYNPALKGRVTMSVDTSTNRFFLKVNSVTAADTAVYFCARGREWELANWGQGPLVTVSS

SEQ ID NO: 20983 - protein, 93 aa, Homo sapiens
VSGVSVGTHFWSWIRQPPGQGLEWIGYTDYSANANYNPALKGRVTMSVDTSTNRFFLKVNSLTAADTAVYFCARGREWELANWGQGALVTVSS

SEQ ID NO: 20984 - protein, 93 aa, Homo sapiens
VSGVSVGTHFWSWIRQPPGQGLEWIGYTGYSANANYNPALKGRVTMSVDTSTNRFFLKVNSVTAADTAVYFCARGREWELANWGQGALVTVSS

SEQ ID NO: 20985 - protein, 93 aa, Homo sapiens; identical to SEQ ID NO: 20972

SEQ ID NO: 20986 - protein, 93 aa, Homo sapiens
VSGVSVGTHFWSWIRQPPGQGLEWIGYTDYSANANYNPALKGRVTMSVDTSTNRFFLKVNSVTAADTAVYFCARGREWELANWGQGTLVTVSS

SEQ ID NO: 20987 - protein, 93 aa, Homo sapiens; identical to SEQ ID NO: 20970

SEQ ID NO: 20988 - protein, 93 aa, Homo sapiens
VSGASVGTHFWSWIRQPPGQGLEWIGYTDYSANANYNPALKGRVTMSVDTSTNRFFLKVNSVTAADTAVYFCARGREWELANWGQGALVTVSS

SEQ ID NO: 20989 - protein, 93 aa, Homo sapiens
VSGVSVGTHFWSWIRQPPGQGLEWIGYTDYSANANYNPAPKGRVTMSVDTSTNQFFLKVKSVTAADTAVYYCARGREWELANWGQGALVTVSS

SEQ ID NO: 20990 - protein, 93 aa, Homo sapiens
VSGVSVGTHFWSWIRQPPGQGLEWIGYTDYSANANYNPAPKGRVTMSVDTSTNRFFLKVNSVTAADTAVYFCARGREWELANWGQGALVTVSS

SEQ ID NO: 20991 - protein, 93 aa, Homo sapiens; identical to SEQ ID NO: 20970

SEQ ID NO: 20992 - protein, 93 aa, Homo sapiens; identical to SEQ ID NO: 20970

SEQ ID NO: 20993 - protein, 93 aa, Homo sapiens; identical to SEQ ID NO: 20973

SEQ ID NO: 20994 - protein, 94 aa, Homo sapiens
TVSGGSISSYYWSWIRQPPGKGLEWIGYTDYSANGNYNPALKGRVTMSVDTSTNQFFLKVNSVTAADTAVYYCARGREWELANWGQGALVTVSS

SEQ ID NO: 20995 - protein, 94 aa, Homo sapiens; identical to SEQ ID NO: 20994

SEQ ID NO: 20996 - protein, 93 aa, Homo sapiens
VSGVSVGTHFWSWIRQPPGQGLEWIGYTDYSANANYNPALKGRVTMPVDTSTNQFFLKVNSVTAADTAVYYCARGREWELANWGQGALVTVSS

SEQ ID NO: 20997 - protein, 93 aa, Homo sapiens
VSGVSVGTHFWSWIRQPPGQGLEWIGYTDYSANANYNPALKGRVTMSVDTSANRFFLKVNSVTAADTAVYFCARGREWELANWGQGALVTVSS

SEQ ID NO: 20998 - protein, 93 aa, Homo sapiens; identical to SEQ ID NO: 20973

SEQ ID NO: 20999 - protein, 93 aa, Homo sapiens
VSGVSVGTHFWSWIRQPPGQGLEWIGYTDYSANANYNPALKGRVTMSVDTSTNRFFLKVNSVTAADTAAYFCARGREWELANWGQGALVTVSS

SEQ ID NO: 21000 - protein, 93 aa, Homo sapiens
VSGVSVGTHFWSWIRQPPGQGLEWIGYTDYSANANYNPALKGRVTMSVDTSTNRFFLKVSSVTAADTAVYFCARGREWELANWGQGALVTVSS

SEQ ID NO: 21001 - protein, 93 aa, Homo sapiens; identical to SEQ ID NO: 20971

SEQ ID NO: 21002 - protein, 93 aa, Homo sapiens
VSGVSVWTHFWSWIRQPPGQGLEWIGYTDYSANGNYNPALKGRVTMSVDTSTNQFFLKVNSVTAADTAVYYCARGREWELANWGQGALVTVSS

SEQ ID NO: 21003 - protein, 93 aa, Homo sapiens; identical to SEQ ID NO: 20971

SEQ ID NO: 21004 - protein, 93 aa, Homo sapiens; identical to SEQ ID NO: 20970

SEQ ID NO: 21005 - protein, 93 aa, Homo sapiens
VSGVSVGTHFWSWIRQPPGQGLEWIGYTDYSANANYNPALKGRVTMSVDTSTNRFFLKVNSVTAADMAVYFCARGREWELANWGQGALVTVSS

SEQ ID NO: 21006 - protein, 93 aa, Homo sapiens; identical to SEQ ID NO: 20972

SEQ ID NO: 21007 - protein, 93 aa, Homo sapiens
VSGVSVGTHFWSWIRQPPGQGLEWIGYTDYSANANYNPALKGRVTMSVDTSTNRFFLEVNSVTAADTAVYFCARGREWELANWGQGALVTVSS

SEQ ID NO: 21008 - protein, 93 aa, Homo sapiens
VSGVSVGTHFWNWIRQPPGQGLEWIGYTDYSANANYNPALKGRVTMSVDTSTNRFFLKVNSVTAADTAVYFCARGREWELANWGQGALVTVSS

SEQ ID NO: 21009 - protein, 93 aa, Homo sapiens
VSGVSVGTHFWSWIRQPPGQGLEWIGYTDYSANGNYNPALKGRVTMSEDTSTNQFFLKVNSVTAADTAVYYCARGREWELANWGQGALVTVSS

SEQ ID NO: 21010 - protein, 103 aa, Homo sapiens
AASGFTFSSYAMSWVRLTPGKGLEWVSSISGSGDSTYYADSVKGRFTISRDNSKNTVYLQMNNLRVDDTAVYHCTKGTLPYCTSGRCYPFDYWGQGTLVTVSS

SEQ ID NO: 21011 - protein, 103 aa, Homo sapiens
AASGFTFSSYAMTWVRQTPGKGLEWVSAITNSGDNSVYADSVKGRFTMSRDNSKNTLYLQLNSLRAEDTAIYYCTKGTLPYCTSGRCYPFDYWGQGALVTVSS

SEQ ID NO: 21012 - protein, 95 aa, Homo sapiens
KGSGYIFTSYWIGWVRQTPGKGLEWMGIIYPGDSDTRYSPSFQGQVTFSADKSISTAYLQWSSLKASDTAMYYCARRSGLTVDYWGQGTLVTVSS

SEQ ID NO: 21013 - protein, 95 aa, Homo sapiens; identical to SEQ ID NO: 21012

SEQ ID NO: 21014 - protein, 95 aa, Homo sapiens
KGFGYNFANYWIGWVRQMPGIGLEWMGIIYPGDSDTTYSPSFQGQVTMSADKSISTAYLQWSSLKASDTAMYYCARRSGLTVDYWGQGTLVTVSS

SEQ ID NO: 21015 - protein, 97 aa, Homo sapiens
AASGFTFSSYAMSWVRQAPGKGLEWVSAISGSGGSTYYADSVKGRFTISRDNSKNTLYLQMNSLRAEDTAVYYCAKEGYSSSPFDYWGQGTLVTVSS

SEQ ID NO: 21016 - protein, 97 aa, Homo sapiens; identical to SEQ ID NO: 21015

SEQ ID NO: 21017 - protein, 99 aa, Homo sapiens
AASGFTFSSYAMSWVRQAPGKGLEWVSAISGGGGSTFYADSVKGRLTISRDNSKNTVYLQMNSLRAEDTAVYYCAKGGGSSYSYYMDVWGEGTTVTVSS

SEQ ID NO: 21018 - protein, 99 aa, Homo sapiens
AASGFTFSSYAMSWVRQAPGKGLEWVLVITGSGDTTYYADSVKGRFTISRDNSKNTLYLQMNSLRAEDTAVYYCAKGGGSSYSYYMDVWGKGTTVTVSS

SEQ ID NO: 21019 - protein, 95 aa, Homo sapiens
AASGFTFSSYWMNWVRQAPGKGLEWVANIKQDGSEKSYVDSVKGRFTISRDNAKSSLYLQMNSLRAEDTAVFYCARDRGGGFDSWGQGTLVTVSS

SEQ ID NO: 21020 - protein, 95 aa, Homo sapiens
AASDFPFSIYWMNWVRQAPGKGLEWVANIKPDGTEMYYMDSVKGRFTISRDNAGNSLFLQMNTLRVEDTAVYYCARDRGGGFDSWGRGTLVTVSS

SEQ ID NO: 21021 - protein, 99 aa, Homo sapiens
AASGFTFSNYAMSWVRQAPGKGLEWVSFIRGGGGVTAYSDSVKGRFTISRDNSKNTLYLHMNSLRAEDTALYYCAKSSSSYGNDAFDVWGQGTMVTVSS

SEQ ID NO: 21022 - protein, 99 aa, Homo sapiens
AASGFTFGDFAMSWVRLAPGKGLEWVSYIKGGGGNSFYGDSVKGRFAISRDNSKNTLFLQMNDLRAEDTAVYYCAKSSSSYGNDAFDVWGQGTMVTVSS

SEQ ID NO: 21023 - protein, 99 aa, Homo sapiens
AASGFTFGDFAMSWVRLAPGKGLEWVSYIKGGGGNTFYVDSVKGRFAISRDNSKDTLFLQMNSLRAEDTAVYYCAKSSSSYGNDAFDVWGQGTMVTVSS

SEQ ID NO: 21024 - protein, 99 aa, Homo sapiens
AASGFTFGDFAMSWVRLAPGKGLEWVSYIKGGGGNSFYGDSVKGRFAISRDNSKNTLFLQMNDLRAEDTAVYYCAKSSSSYGNDAFDVRGQGTMVTVSS

SEQ ID NO: 21025 - protein, 99 aa, Homo sapiens; identical to SEQ ID NO: 21022

SEQ ID NO: 21026 - protein, 99 aa, Homo sapiens; identical to SEQ ID NO: 21022

SEQ ID NO: 21027 - protein, 99 aa, Homo sapiens; identical to SEQ ID NO: 21022

SEQ ID NO: 21028 - protein, 99 aa, Homo sapiens
AASGFTFDNYAMSWVRQAPGKGLEWVSYISGGGAKRFYADSVRGRFTISRDNSKNTLYLQMDSLRAEDSAVYYCAKSSSSYGNDAFDVWGRGTMVTVSS

SEQ ID NO: 21029 - protein, 99 aa, Homo sapiens
AASGFAFGSYAMSWVRQAPGKGLEWVSYVRGGGANAGYADSVRGRFTISRDNSKNTLYLQMNSLRAEDTAVYYCAKSSSSYGNDAFDVWGQGTMVTVSS

SEQ ID NO: 21030 - protein, 97 aa, Homo sapiens
APGFTFGTFSMSWVRQAPGKGLEWVSTISGSGGGTYYADAVKGRFTISRDNSKNTLYLQMNSLRGEDTALYYCAKPVIGTYWYFDLWGRGTLVTVSS

SEQ ID NO: 21031 - protein, 97 aa, Homo sapiens
ASGFTFGTFSMSWVRQAPGKGLEWVSTISGSGGGTYYADAVKGRFTISRDNSKNTLYLQMNSLRGEDTALYYCAKPVIGTYWYFDLWGRGTLVTVSS

SEQ ID NO: 21032 - protein, 98 aa, Homo sapiens
AASGFTFSSYAMSWVRQAPGKGLEWVSTISGSGDGTYYTDSVKGRFTISRDNSKNTLYLQMNSLRADDTAVYYCAKPVIGTYWYFDLWGRGTLVTVSS

SEQ ID NO: 21033 - protein, 90 aa, Homo sapiens
AASGFTVSNNYMSWVRQAPGKGLEWVSVIYSGGSTYYADSVKGRFTISRDNSKNTLYLQMNSLRAEDTAVYYCVRDTGYWGQGTLVTVSS

SEQ ID NO: 21034 - protein, 90 aa, Homo sapiens
AASGFIVSSNYMSWVRQAPGKGLEWVSIIHSDGTTHYADSVKGRFTISRDNSKNTLYLQMNSLRTEDTAVYYCVRDTGYWGQGTLVTVSS

SEQ ID NO: 21035 - protein, 94 aa, Homo sapiens
AASGFTFSSYAMTWVRQAPGKGLECVSAMSSRGDNTYNADSVKGRFTISRDNSKNTLYLQMNSLRAEDTAVYYCAKRGDWFDSWGQGTLVTVSS

SEQ ID NO: 21036 - protein, 94 aa, Homo sapiens
AASGFTFSSYAMSWVRQAPGKGLEWVSTISGSGGGTYYADSVKGRFTISRDNSKNTLYLQLNSLRAGDTAVYCCAKRGDWFDSWGQGTLVTVSS

SEQ ID NO: 21037 - protein, 96 aa, Homo sapiens
AASGFTFSSYSMNWVRQAPGKGLEWVSYISSSNTIYYADSVKGRFTISRDNAKNSLYLQMNSLRAEDTAVYYCARDRGDGYIFDYWGQGTLVTVSS

SEQ ID NO: 21038 - protein, 97 aa, Homo sapiens
AASGFSFSTYKMNWVRQAPGKGLEWVAYINFTSTPKYYADSVKGRFTISRDNAKNSLYLQMSGLRDEDTAVYYCARDRGDGYIFDYWGQGTLVTVSS

SEQ ID NO: 21039 - protein, 100 aa, Homo sapiens
AASGFVFSTYGIHWARQAPGKGLEWVAAVSYEGRNKWYADSVKGRFTTSRDDSKNTVYLQMNSLRAEDTAVYHCARDRDTSGHYGWLDPWGQGTLVTVAS

SEQ ID NO: 21040 - protein, 100 aa, Homo sapiens
AASGFTLSDYGMHWVRQAPGKGLEWVVVIYYHGSKEFYADSVKGRFTISRDISKNTVFLQMNSLRAEDTAVYYCARDRDTSGHYGWLDPWGQGTLVTVSS

SEQ ID NO: 21041 - protein, 100 aa, Homo sapiens
AASGFVFSSFGIHWVRQAPGKGLEWVAVVTYDGRNQWYADSVKGRLTTSRDQSKNTVYLQMNSLRVEDTAVYHCARDRDTSGHYGWLDPWGQGTLVTVAS

SEQ ID NO: 21042 - protein, 97 aa, Homo sapiens
AASGFTFSDYWMSWVRQAPGKGLEWVANINHGGSEKYYVDSVKGRFTISRDNAENSLYLQMNSLRVEDTAVYYCARVAGSSGCPGYWGQGTLVTVSS

SEQ ID NO: 21043 - protein, 97 aa, Homo sapiens
EASGFIFSNYWMSWVRQAPGKGLEWVANIRQDGIEKYYVDSVKGRFTISRDNAKNSLYLQMNSLTVEDTALYYCARVAGSSGCPGYWGQGTLVTVPS

SEQ ID NO: 21044 - protein, 94 aa, Homo sapiens
AASGFTFTAYWMTWVRQAPGKGLEWVANINQDGSEKHYVDSVKGRFTISRDNANNSLYLLMNSLRVEDTAVYYCLRGGESYGYWGQGTLVAVSS

SEQ ID NO: 21045 - protein, 94 aa, Homo sapiens
AASGFSLSTYWMTWVRQAPGEGLEWVANINQDGNERHYVDSVKGRFTISRDNARNSMYLQMNSLRAEDTAVYYCLRGGESYGYWGQGTLVTVSS

SEQ ID NO: 21046 - protein, 97 aa, Homo sapiens
TVSGGSISSSTYYWGWIRQPPGKGLEWIANIYYSGATYYNPSLKSRVTISVDTSKNQFSLKLSSVTAADTAVYYCARRYGSGPFDYWGQGTLVTVSS

SEQ ID NO: 21047 - protein, 97 aa, Homo sapiens
TVSGGPIIGTYYYWGWVRQSPGKGLEFIGIIYHNGNTYYSPSLRSRVTMSVDTSKSQFSLELRSVTAADTAVYYCARRYGSGPFDYWGQGNMVIVSS

SEQ ID NO: 21048 - protein, 97 aa, Homo sapiens
TVSGGSITSSSSYWAWIRQPPGKGLEWIGSIYYSGSTYYNPSLKSRVTISVDTSKNHFSLKLSSVTAADTTVYYCARRYGSGPFDYWGQGTLVTVSS

SEQ ID NO: 21049 - protein, 97 aa, Homo sapiens; identical to SEQ ID NO: 21048

SEQ ID NO: 21050 - protein, 97 aa, Homo sapiens
IVSGGSISGSTYYWGWIRQPPGKGLEWIGSMSYSGSTYYNPSLKSRVTISVDTSNNQFSLKVNSMTAADTAVYYCARRYGSGPFDYWGQGTLVIVSS

SEQ ID NO: 21051 - protein, 99 aa, Homo sapiens
KASGYSFTSYWIGWVRQMPGKDLEWMGLIYPGDSDTRDSSSFQGQVTMSVDKSISTAYLQWSSLKASDTAIYYCARLRGAYNHEDFDYWGQGTVVTVSS

SEQ ID NO: 21052 - protein, 99 aa, Homo sapiens
KGSGYSFSTYWIGWVRQMPGKGLEWLGLIYPGDSDTRDNPSFQGQVTLSVDKSISTAYLQWSSLKASDTAMYYCARLRGAYNHEDFDYWGQGTLVTVSS

SEQ ID NO: 21053 - protein, 99 aa, Homo sapiens
AASGFPFSSYAMSWVRQAPGKGLEWVSGVSDSGGSTYYADSVKGRFTISRDNSKNTVYLQMNTLRAEDTAVFYCAKSGGSRHYYGLDVWGQGTTVTVSS

SEQ ID NO: 21054 - protein, 99 aa, Homo sapiens; identical to SEQ ID NO: 21053

SEQ ID NO: 21055 - protein, 93 aa, Homo sapiens
VASGFTFRTYTMNWVRQAPGKRLEWISYINTGSSTIYYADSVKGRFTISRDNAKNSLYLQMNSLRAEDTAVYYCARDRTAFDIWGPGTMVTVS

SEQ ID NO: 21056 - protein, 94 aa, Homo sapiens
AASGFTFSRYSMNWVRQAPGKGLEWISYISPSSGTIYYADSVKGRFTISRDNAKNSLYLQMNSLKDEDTAVYYCARDRTAFDIWGQGTMVTVSS

SEQ ID NO: 21057 - protein, 91 aa, Homo sapiens
VDSGFTFSNSWMNWVRQAPGKGLEWVANIKPDGTQTSYVDSVKGRFTISRDNAKNSLYLQMNSLRAEDTALYYCSRGLDPWGQGTLVTVSS

SEQ ID NO: 21058 - protein, 91 aa, Homo sapiens
VASGFTFSTQWMSWVRQAPGKGLEWVANIKPDGTEEFYLDSVKGRLTISRDNALNTLYLQMNSLRAEDTAVYYCSRGLDPWGQGTLVSVSS

SEQ ID NO: 21059 - protein, 91 aa, Homo sapiens
VASGFTFSSQWMSWVRQAPGKGLEWVANIKPDGSDKYYLDSVKGRLTISRDNARNTLYLQMNSLRAEDTAIYYCSRGLDPWGQGTLVAVSS

SEQ ID NO: 21060 - protein, 98 aa, Homo sapiens
AASGFTFSDYDMHWVRQATGTGLEWVSAIGIRDDTHYSDSVEGRFTISRENAKNTLYLQMNSLRVGDTGVYYCVRGGIQVSGIDEFDIWGQGTMVTVS

SEQ ID NO: 21061 - protein, 98 aa, Homo sapiens; identical to SEQ ID NO: 21060

SEQ ID NO: 21062 - protein, 98 aa, Homo sapiens
AASGFTFSDYDMHWIRQATGTGLEWVSAIGIRDDTHYSDSVEGRFTISRENAKNTLYLQMNSLRVGDTGVYYCVRGGIQVSGIDEFDIWGQGTMVTVS

SEQ ID NO: 21063 - protein, 98 aa, Homo sapiens; identical to SEQ ID NO: 21060

SEQ ID NO: 21064 - protein, 99 aa, Homo sapiens
AASGFTFRNYDIHWVRQVTGRRLEWVSAIGTGGDTHYADSVKGRHIISRENSKNSVYLQMNSLRAEDTAVYYCVRGGIQVSGIDEFDIWGQGTTVTVSS

SEQ ID NO: 21065 - protein, 99 aa, Homo sapiens
AASGFTFSNYDIHWVRQVTGRRLEWVSAIGTGGDTHYADSVKGRHIISRENSKNSVYLQMNSLRAEDTAVYYCVRGGIQVSGIDEFDIWGQGTTVTVSS

SEQ ID NO: 21066 - protein, 95 aa, Homo sapiens
AASGFTFRAYWMHWVRQAPGKGLVWVSRIDNDGGITNYADSVKGRFTIYRDNAKNMLFLQMNNLRVEDTAVYYCTRDIGGRYGFWGQGTLVTVSS

SEQ ID NO: 21067 - protein, 94 aa, Homo sapiens
ASGYTFSTFWMHWVRQTPGKGLVWVSRIDESGSITNYADSVKGRFTIYRDNAKNTLYLQMNSLSVEDTAVYYCTRDIGGRYGFWGPGTLVAVSS

SEQ ID NO: 21068 - protein, 94 aa, Homo sapiens
ASGFTFRTYWMHWVRQTPGKGLVWVSRIDNDGSITNYADSVKGRFTIYRDNAKNTLYLQMNSLSVEDTAIYYCTRDIGGRYGFWGPGTLVTVSS

SEQ ID NO: 21069 - protein, 94 aa, Homo sapiens
ASGYSFSTYWMHWVRQVPGKGPIWVSRIDTDGSVTDYADSVKGRFTIYRDNAKNTLYLQMNSLRVEDTAVYYCTRDIGGRYGFWGRGTLVTVSS

SEQ ID NO: 21070 - protein, 95 aa, Homo sapiens
VGSGYTFSSYWMHWVRQAPGKGLEWVSRIDEHGRITTYADSVKGRFTIYRDNSGNTLYLQMNSLRADDSAVYFCTRDIGGRYGFWGQGTLVTVSS

SEQ ID NO: 21071 - protein, 95 aa, Homo sapiens; identical to SEQ ID NO: 21070

SEQ ID NO: 21072 - protein, 95 aa, Homo sapiens; identical to SEQ ID NO: 21070

SEQ ID NO: 21073 - protein, 100 aa, Homo sapiens
AASEFTLSSFCMHWVRQVPGKGLEWVARICHDARRTGYAESVKGRFSISRDSARNTLYLQMDYLSGDDTAVYFCVRDPGGDRHDWYFDLWGGGTLVTVSS

SEQ ID NO: 21074 - protein, 100 aa, Homo sapiens
AASEFTLSSFCMHWVRQVPGKGLEWVARICHDVRRTGYAESVKGRFTISRDSANNTLSLEMNYLRGDDTAAYFCVRDPGGDRHDWYFDLWGCGTLVTVSS

SEQ ID NO: 21075 - protein, 99 aa, Homo sapiens
VSESLSSESCIHWVRQAPGKGLVWITRICEDRRRTNYGGSVKGRYTISRDNVKNTVFLQMNNLRVDDTAVYYCVRDPGGDRHDWYFDLWGRGTLVTVSS

SEQ ID NO: 21076 - protein, 100 aa, Homo sapiens
VASESPSSRSCIHWVRQAPGKGLVWVSRICADRRRTNYGDSVKGRYIISRDNVKNTVFLQMNSLRADDTAVYYCVRDPGGDRHDWYFDLWGRGTLVTVSS

SEQ ID NO: 21077 - protein, 100 aa, Homo sapiens
EVSEVLSSRSCIHWVRQAPGKGLVWVSRLCADARRTNYGDSVRGRYSISRDNVKNTVFLQMNSLRADDTAIYYCVRDPGGDRHDWYFDLWGRGTPVTVSS

SEQ ID NO: 21078 - protein, 95 aa, Homo sapiens
AGSEFTFGDYWMNWVRQAPGKGLEWVANIKQDGTVKNYVDSVNGRFTIARDNAKNSLFLQMSGLRADDTAVYFCVRGLGWFFDLWGRGTLVTVSS

SEQ ID NO: 21079 - protein, 95 aa, Homo sapiens
AASQFTFGDYWMNWVRQAPGKGLEWVANINKDGTVKYYVDSVKGRFTISRDNAKNSLFLQMSSLRADDTAVYYCVRGLGWFFDLWGRGTLVTVSS

SEQ ID NO: 21080 - protein, 95 aa, Homo sapiens
AASEFTFGDYWMNWVRQAPGKGLEWVANINKEGTVKYYVDSVNGRFTISRDNAKNSVFLQMSSLRADDTAVYFCVRGLGWFFDLWGRGTLVTVSS

SEQ ID NO: 21081 - protein, 95 aa, Homo sapiens
AASGFTFSALWMSWVRQAPGKGLEWVAHVKGDGTVINYVESVKGRFTISRDNAKNILYLQMTSLRAEDTALYYCVRGLGWFFDLWGRGTLVTVSS

SEQ ID NO: 21082 - protein, 97 aa, Homo sapiens
EGSGFTFRNYGMSWVRQAPGKGLEWVSGISDNGRDTYYPDSLKGRFTISRDNSKNTLYLQLNSLRAEDTAVYFCAKDRLTIDAFDIWGQGTMVTVSS

SEQ ID NO: 21083 - protein, 97 aa, Homo sapiens
VGSGFTFRNYGMSWVRQAPGKGLEWVSGISDNGRDTYYADSVKGRFIITRDNSKNTLYLQMNSQRAEDTAVYFCAKDRLTIDAFDIWGQGTMVTVSS

SEQ ID NO: 21084 - protein, 97 aa, Homo sapiens; identical to SEQ ID NO: 21083

SEQ ID NO: 21085 - protein, 97 aa, Homo sapiens
AVSGFTFRNYGMSWVRQAPGKGLEWVSGISDNGRDTYYADSVKGRFTISRDNSKNTLYLQMNSLRAEDTAVYFCAKDRLTIDAFDIWGQGTMVTVSS

SEQ ID NO: 21086 - protein, 97 aa, Homo sapiens
AASGFPFSSSGMSWVRQAPGKGLEWVSGISSSGEYTYYADSVKGRVTISRDNSREMLFLEMNSLRAEDTAEYYCAKDRLTIDAFDIWGQGTMVTVSS

SEQ ID NO: 21087 - protein, 91 aa, Homo sapiens
AASGFTFTNYWMHWVRQVPGKGLVWVSRVDLDGSGTSYADSVRGRFTMSRDNAKNALSLQMNSLTVDDTAVYYCTTVFEHWGQGILVTVSS

SEQ ID NO: 21088 - protein, 91 aa, Homo sapiens
AASGITFMNYWMHWVRQVPGKELVWVSGINSDGSGTYYADSVKGRFTISRDNAKNTLYLQMNSLRAEDTAVYYCTTVFEHWGQGALVTVSS

SEQ ID NO: 21089 - protein, 94 aa, Homo sapiens
AASGISFSTHWMSWVRQAPGKGLEWVANINEDGSAKYYGDSVKGRFTIARDNAKSSLFLQMDSLRAEDTGVYYCARDSLGYDYWGQGSLVTVSS

SEQ ID NO: 21090 - protein, 94 aa, Homo sapiens
VASGFSFTTHWMSWVRLTPGGGLEWVANIKEDGSATYYAGFVGDRFTISRDNAKNSLFLEMNNLRSEDAAVYYCARDSLGYDYWGQGSQVTVSS

SEQ ID NO: 21091 - protein, 94 aa, Homo sapiens
ATSGISFSTHWMSWVRQAPGKGLEWVANINEDGSAKYYVDSVKGRFTISRDNARSSLYLQMNTLRAEDTAVYYCARDSLGYDYWGQGTLVTVSS

SEQ ID NO: 21092 - protein, 94 aa, Homo sapiens; identical to SEQ ID NO: 21091

SEQ ID NO: 21093 - protein, 94 aa, Homo sapiens; identical to SEQ ID NO: 21091

SEQ ID NO: 21094 - protein, 95 aa, Homo sapiens
ASGYTFSNYGISWVRQAPGQGLEWMGWISTDNGKTIYTQKFQGRVIMTIDTSASIAYMELRSLRSDDTAIYYCARAPHRDWFDPWGQGTLVTVSS

SEQ ID NO: 21095 - protein, 95 aa, Homo sapiens
ASGYTFLSYGISWVRQAPGQGLEWLGWISTDNGNTRYAQNLQGRVTMTTDTSTSTAYLELRTLKSDDTAVYYCARAPHRDWFDPWGQGTQVIVSS

SEQ ID NO: 21096 - protein, 95 aa, Homo sapiens
AASGFTFSRFWMHWVRQTSTKGLVWVARTNEDGTWINYADSVKGRFTISRDNAKNTLYLQMNRLRVEDTALYYCATDLSGRYDYWGQGTLVTVSS

SEQ ID NO: 21097 - protein, 95 aa, Homo sapiens
AASGFAFSSYWMHWVRQVPGKGLVWVSRINEDGSITNYADSVKGRFTISRDNAKNTLYLQMNSLRGEDTAVYYCATDLSGRYDYWGQGTLVTVSS

SEQ ID NO: 21098 - protein, 95 aa, Homo sapiens; identical to SEQ ID NO: 21097

SEQ ID NO: 21099 - protein, 93 aa, Homo sapiens
AASGSSIGMDAMHWVRQAPGQGLEWVSSIDKRGDRADYKDSVKGRFTISRDNSKNTVYLTMDGLRGDDTALYYCVLRGSAFDIWGQGTMVTVS

SEQ ID NO: 21100 - protein, 94 aa, Homo sapiens
AASGSSIGTDAMHWVRQAPGKGLEWVSSISGRGDRTDYADSVKGRFSISRDNSKNALYLSMDGLTGDDTAVYYCVLRGSAFDIWGHGTVVTVSS

SEQ ID NO: 21101 - protein, 94 aa, Homo sapiens
AASGSSIGMDAMHWVRQAPGKGLEWVSSISDRGDRIVYADSVKGRFSISRDNSKNTLYLSMDGLTGDDTAVYYCVLRGSAFDIWGQGTVVTVSS

SEQ ID NO: 21102 - protein, 94 aa, Homo sapiens
AASGLSIGLDAMHWVRQGPGKGLEWVSSISGRGERTDYAGSVKGRFIVSRDNSKNKLFLTMDGLRGDDTAVYFCVLRGSAFDIWGQGTVVTVSS

SEQ ID NO: 21103 - protein, 94 aa, Homo sapiens; identical to SEQ ID NO: 21100

SEQ ID NO: 21104 - protein, 94 aa, Homo sapiens
AASGSSIGTDAMHWVRQAPGKGLEWVSSISDRGDRTGYADSVKGRFSISRDNSKNALYLSMEGLTGDDTAVYYCVLRGSAFDIWGHGTVVTVSS

SEQ ID NO: 21105 - protein, 94 aa, Homo sapiens
AASGSSIAMDVMHWVRQGPGKGLEWVSSISGGGDRRDYADSVKGRFIISRDNSKNTLFLEMDGLRGEDTAIYYCVLRGSAFDIWGQGTVVTVSS

SEQ ID NO: 21106 - protein, 94 aa, Homo sapiens
ETSGLRFSRYAMVWVRQAPGKGLEWVSTISGSGDDTYYADSVRGRFTISRDNSKNTLYLQMSSLRAEDTALHYCVLRGSAFDIWGQGTMVTVSS

SEQ ID NO: 21107 - protein, 103 aa, Homo sapiens
VASGLTLSSNAMSWVRQAPGKGLEWVSAISGSGGSTYYSGSGGSTYYADSVKGRFTIFRDNSRNTLFLQMSSLRAEDTAVYYCVLRGSAFDIWGQGTMITVSS

SEQ ID NO: 21108 - protein, 94 aa, Homo sapiens
AASEFPFSKYAMSWVRQAPGKGLEWVSTISGRGESTFYADSVKGRFTISRDNSRDTLYLQMNSVRAEDSAVYYCVLRGSAFDIWGQGTMVTVSS

SEQ ID NO: 21109 - protein, 94 aa, Homo sapiens
VASGFTFSTFAMSWVRQPPGKGLEWVSAISGDGGDTFYADSVKGRFTISRDSSGNTLYLHMNSLRDEDTAAFYCVLRGSAFDIWGQGTMVTVSS

SEQ ID NO: 21110 - protein, 94 aa, Homo sapiens
VASGFSLRNEAMTWVRQPPGKGLEWVSVISGSAENTYYADSVKGRVTISRDKSKNTLHLQMNNLKVEDTAIFYCVLRGSAFDIWGQGTMVTVSS

SEQ ID NO: 21111 - protein, 94 aa, Homo sapiens
VASGFSLRNEAMTWVRQPPGKGLEWVSVISGSAENTYYADSVKGRVTISRDKSKNTLHLQMNNLKVEDTAIYYCVLRGSAFDIWGQGTMVTVSS

SEQ ID NO: 21112 - protein, 94 aa, Homo sapiens
VASEFPFSKYAMSWVRQAPGKGLEWVSAITGRGETTFYADSVRGRFTISRDNSRDTLYLQMNSVRAEDSAVYYCVLRGSAFDIWGQGTMVTVSS

SEQ ID NO: 21113 - protein, 94 aa, Homo sapiens
AASEVTFRKYAMSWVRQAPGEGLEWVSAISDSGDSTYYADSVKGRFTISRDNSRDTLYLQMNSVRAEDTAVYYCVLRGSAFDIWGQGTMVTVSS

SEQ ID NO: 21114 - protein, 94 aa, Homo sapiens; identical to SEQ ID NO: 21113

SEQ ID NO: 21115 - protein, 94 aa, Homo sapiens
VASGFTFSTFAMSWVRQAPGKGLEWVSGISGSGSNTFYADSVKGRFTVSRDTSRNTLYLQINSLRVEDTAAFYCVLRGSAFDIWGQGTVVTVSS

SEQ ID NO: 21116 - protein, 93 aa, Homo sapiens
ASGFTFSTYAMTWVRQAPGKGLEWVSAISGSGGSTFYAESVKGRFTISRDRSRNTLFLQMNSLRDEDTATYYCVLRGSAFDIWGQGTMVSVSS

SEQ ID NO: 21117 - protein, 94 aa, Homo sapiens
AASGFPFSTYSMTWVRQAPGRGLEWVANMNGDGSERNYLHSVKGRFTISRDNAKNSLFLQMNSLRAEDTAVYYCATRGQAPADWGQGTLVTVSS

SEQ ID NO: 21118 - protein, 94 aa, Homo sapiens
AASGFPFSSYWMTWVRQAPGRGLEWVANINEYGNEQNYLDSVKGRFTISRDNAKNSLFLQMNSLRAEDTAVYYCATRGQAPADWGQGTLVTVSS

SEQ ID NO: 21119 - protein, 94 aa, Homo sapiens
AASGFPFTTYWMTWVRQAPGRGLEWVANINEDGSEQNYLDSVKGRFTISRDNPTNSLFLQMNSLRAEDTAVYYCATRGQAPADWGQGTLVTVSS

SEQ ID NO: 21120 - protein, 93 aa, Homo sapiens
AVSGFTFRTYWMSWVRQAPGKGLEWVANIKEDGSEENYVDSVNGRFTISRDNAKNSLFLQMNSLRAEDTAMYYCATRGQAPADWGQGTLVTVS

SEQ ID NO: 21121 - protein, 94 aa, Homo sapiens
VGSGFTFSSYWMSWVRQAPGKGLEWVANINEDGSEENYVASVRGRFTISRDNAKNSLFLQMDSLRGEDTAMYYCATRGQAPADWGQGSLVTVSS

SEQ ID NO: 21122 - protein, 94 aa, Homo sapiens
AASGFPFSTWGMTWVRQAPGRGLEWVGNINGRGDEQNYLDSVKGRFTISRDNAKNSLFLQMNSLRSEDTAVYYCATRGQAPADWGQGTLVTVSS

SEQ ID NO: 21123 - protein, 94 aa, Homo sapiens
AASGFPFSSYWMTWVRQAPGRGLEWVANINEYGNEQNYLDSVKGRFTISIDNAKNSLFLQMNSLRAEDTAVYYCATRGQAPADWGQGTLVTVSS

SEQ ID NO: 21124 - protein, 93 aa, Homo sapiens
AVSGFTFSTYWMSWVRQAPGKGLEWVANIKEDGSEENYVDSVKGRFTISRDNAMHSLFLQMNSLRAEDTAMYYCATRGQAPADWGQGTLVTVS

SEQ ID NO: 21125 - protein, 93 aa, Homo sapiens
VSGFTFSRYWMTWVRQTPGKGLQWVASINEDGSERHYLDSVKGRFTISRDNAKNSLLLQMNSLTAEDTAMYFCATRGQAPADWGQGTLVTVSS

SEQ ID NO: 21126 - protein, 94 aa, Homo sapiens
AASGFPFSTYSMTWVRQAPGRGLEWVANINGDGSEQNYLDSVKGRFTISRDNARNSLFLQMNSLRVEDTAVYYCATRGQAPADWGQGTLVTVSS

SEQ ID NO: 21127 - protein, 94 aa, Homo sapiens
AASGFPFSTWWMTWVRQAPGRGLEWVANINEDGTEQNYLDSVKGRFTISRDNAKNSLFLQMDSLRVEDTAVYYCATRGQAPADWGQGTLVTVSS

SEQ ID NO: 21128 - protein, 94 aa, Homo sapiens
AASGFPFNTYWMTWVRQAPGRGLEWVANIDGHGGERHYLDSVKGRFTISRDNAKNSLFLQMNSLRAEDTAVYYCATRGQAPADWSQGTLVTVSS

SEQ ID NO: 21129 - protein, 94 aa, Homo sapiens
AASGFPFRDYWMTWVRQAPGRGLEWVANIDGPASEQNYLDSVKGRFTISRDNAKNSLFLQMNSLRAEDTAVYYCATRGQAPADWGQGTLVTVSS

SEQ ID NO: 21130 - protein, 94 aa, Homo sapiens
AASGFPFSTYSMTWVRQAPGRGLEWVANMNGDGSERNYLDSVKGRFTISRDNAKNSLFLQLNSLRAEDTAVYYCATRGQAPADWGQGTLVIVSS

SEQ ID NO: 21131 - protein, 94 aa, Homo sapiens
AASGFTFSSYRMSWVRQAPGKGLEWVANINEDGSAKNYADSVKGRFTISRDNAKNSLFLQMNSLRAEDTAMYYCATRGQAPADWGEGTLVTVSS

SEQ ID NO: 21132 - protein, 93 aa, Homo sapiens
VSGFTFSRYWMTWVRQTPGKGLQWVASINEDGSERHYLDSVKDRFTISRDNAKNSLLLQMNSLTAEDTAMYFCATRGQAPADWGQGTLVTVSS

SEQ ID NO: 21133 - protein, 94 aa, Homo sapiens
AASGFTFSTYWMTWVRQAPGKGLEWVGNINEDGGDKNYVDSVRGRFTISRDNAKSSLFLQMNSLRAEDTAVYYCATRGQAPADWGQGILVTVSS

SEQ ID NO: 21134 - protein, 94 aa, Homo sapiens
AVSGSRIGMDAMHWVRQAPGKGLEWISSISGRGDARDYADSVKGRFTVSRDNSKNTLFLSMDGLRDDDTAVYHCVLRGSSFDVWGQGTVVTVSS

SEQ ID NO: 21135 - protein, 94 aa, Homo sapiens
AASGSSIGMDAMHWVRQAPGKGLEWVSTITGRGDRRDYADSVKGRFTVSRDNSRNTLSLTMDGLKDDDTAVYFCVLRGSSFDVWGRGTVVSVSS

SEQ ID NO: 21136 - protein, 94 aa, Homo sapiens
VASGSSIGMDAMHWVRQAPGKGLEWVSSINARGDRRDYADSVKGRFTVSRDNSRNTLSLTMDGLRDDDTAVYYCVLRGSSFDVWGRGTVVTVSS

SEQ ID NO: 21137 - protein, 94 aa, Homo sapiens; identical to SEQ ID NO: 21134

SEQ ID NO: 21138 - protein, 94 aa, Homo sapiens
VASGSSIGMDAMHWVRQAPGKGLEWVSSITGRGDRREYADSVKGRFTVSRDNSRNTLSLTMDGLRDDDTAVYYCVLRGSSFDVWGRGTVVTVSS

SEQ ID NO: 21139 - protein, 94 aa, Homo sapiens
VASGSSIGMDAMHWVRQAPGKGLEWVSSITGRGDRRYYGDSVKGRFTVSRDNSRNTLSLTMDGLRDDDTAVYYCVLRGSSFDVWGRGTVVTVSS

SEQ ID NO: 21140 - protein, 92 aa, Homo sapiens
SEFIPDKYAMSWVRQAPGKGLEWVSSISGGGVNTNYADSVQGRFTISRDRSKNTLYLQMSRLRGDDTAMYYCVLRGSSFDVWGHGTLVTVSS

SEQ ID NO: 21141 - protein, 94 aa, Homo sapiens
VASGFTFGNFAMSWVRQAPGKGLEWVSSISGNGGDSDYADSVKGRFTISRDTSKTILYLQMKSLRADDTAMYNCVLRGSSFDVWGLGTMVTVSS

SEQ ID NO: 21142 - protein, 96 aa, Homo sapiens
AASGFTFSSYDMNWVRQAPGKGLEWVSYISTSSSSIYYADSVKGRFTISRDNAENSLYLQMNSLRDEDTAVYYCARDRHGGSFDYWGQGTLVTVSS

SEQ ID NO: 21143 - protein, 96 aa, Homo sapiens
AASGFTFSSYDMNWVRQAPGKGLEWVSYISTSSSSIYYADSVKGRFTISRDNAENSLYLQMNSLRDEDTAVYYCARDRHGGSFDYWGQGTLITVSS

SEQ ID NO: 21144 - protein, 96 aa, Homo sapiens
AASGFTFSAFDMNWVRQAPGKGLEWLSFISTSSTTIYYADSVKGRFTISRDNAENSLYLQMSSLRDEDMAVYYCARDRHGGSFDYWGQGTLVTVSS

SEQ ID NO: 21145 - protein, 96 aa, Homo sapiens; identical to SEQ ID NO: 21144

SEQ ID NO: 21146 - protein, 96 aa, Homo sapiens
AASDFTFSSYDMNWVRQAPGKGLEWVSYINTASTTIHYADSVKGRFTMSRDNAKNSLFLQLNSLRDEDTAVYYCARDRHGGSFDYWGQGTLVTVSS

SEQ ID NO: 21147 - protein, 96 aa, Homo sapiens
AASDFTFSGYDMNWVRQAPGKGLEWVSYINTASTTIYYADSVKGRFTMSRDNAKNSLFLQLNSLREEDTAVYYCARDRHGGSFDYWGQGTLVTVSS

SEQ ID NO: 21148 - protein, 94 aa, Homo sapiens
AASGLSIGLDAMHWVRQGPGKGLEWVSSISGRGERTDYADSVKGRFIVSRDNSKNKLFLTMDGLRGDDTAVYFCALRGSAFDIWGQGTVVTVSS

SEQ ID NO: 21149 - protein, 94 aa, Homo sapiens
AASGVSIAMDAMHWVRQGPGKGLEWVSSISGRGDRRDYADSVKGRFTISRDNSKNTLFLEMDGLRGEDTAIYYCALRGSAFDIWGQGTVVTVSS

SEQ ID NO: 21150 - protein, 94 aa, Homo sapiens
AASGLNIGLDAMHWVRQGPGKGLEWVSSISGRGERKDYADSVKGRFTISRDNSKNSVFLTMDGLRGDDTAVYFCALRGSAFDIWGRGTVVTVSS

SEQ ID NO: 21151 - protein, 94 aa, Homo sapiens
AASGVRIGMDVMHWVRQAPGRGLEWVSSISGRGDRINYADSVRGRFTMSRDNSKNTLFLTMDGLRGDDTAVYFCALRGSAFDIWGQGTVVTVSS

SEQ ID NO: 21152 - protein, 94 aa, Homo sapiens
AASGVSIAMDVMHWVRQGPGKGLEWVSSISGRGDRRHYADSVKGRFTISRDNSKNTLFLEMDGLRGEDTAIYYCALRGSAFDIWGQGTVVTVSS

SEQ ID NO: 21153 - protein, 94 aa, Homo sapiens
AASGVRIGMDAMHWVRQAPGRGLEWVSSISGRGDRTDYADSVRGRFTISRDNSKNTLFLTMDGLRGDDTAVYFCALRGSAFDIWGPGTVVTVSS

SEQ ID NO: 21154 - protein, 94 aa, Homo sapiens
AASGLSIGLDAMHWVRQSPGKGLEWVSSISGRGERTDYADSVKGRFIISRDNSKNKLFLTMDGLRGDDTAVYFCALRGSAFDIWGQGTVVTVSS

SEQ ID NO: 21155 - protein, 94 aa, Homo sapiens; identical to SEQ ID NO: 21148

SEQ ID NO: 21156 - protein, 94 aa, Homo sapiens
AASGFTFNREAMSWVRQAPGKGLEWVSGDSGSGGSTYYADSVKGRFTISRDNSRNTLYLQMNSLRDEDTAVYYCALRGSAFDIWGHGTMVTVSS

SEQ ID NO: 21157 - protein, 94 aa, Homo sapiens
AASGFTFNRDAMSWVRQAPGKGLEWVSGDSGRGDSTYYADSVKGRFTISRDSSRSTLYLQMKSLRDEDTAVYYCALRGSAFDIWGHGTLVTVSS

SEQ ID NO: 21158 - protein, 92 aa, Homo sapiens
GASGFTLRSDAMTWVRRAPGKGLERVAVISGGGETTYYADSVKGRFTISRDKSKNTLYLQMNNLRGEDTAMYYCALRGSAFDIWGHGTNVIV

SEQ ID NO: 21159 - protein, 92 aa, Homo sapiens
GASGFTLRNDAMTWVRRAPGKGLERVAVISGGGETTYYADSVKGRFTISRDTSKNTLYLQMNNLRGEDTAMYYCALRGSAFDIWGHGTNVIV

SEQ ID NO: 21160 - protein, 94 aa, Homo sapiens
AASGFTLRNEAMTWVRQPPGKGLECVSVISGSGENTYYADSVKGRFTISRDNSKNTLYLQMNSLRAEDTAVYYCALRGSAFDIWGQGTMVTVSS

SEQ ID NO: 21161 - protein, 94 aa, Homo sapiens
VASGFTLRNEAMTWVRQPPGKGLEWVSVISGSAENTYYADSVKGRVTISRDNSKNTLYLQMNSLRAEDTAVYYCALRGSAFDIWGQGTMVTVSS

SEQ ID NO: 21162 - protein, 94 aa, Homo sapiens; identical to SEQ ID NO: 21156

SEQ ID NO: 21163 - protein, 96 aa, Homo sapiens
AASGFTFSRYAISWVRQAPGKGLEWVSGDSGSGGGGTTYYADSVKGRFTISRDNSRNTLYLQMKSLRGEDTAVYYCALRGSAFDIWGQGTMVTVSS

SEQ ID NO: 21164 - protein, 93 aa, Homo sapiens
ASGYTFTNYAMNWVRQAPGQGLEWMGWINTNTGSPTYAQGFTGRFVFSVDTSVSTAYLQISSLKAEDAALYYCARGLIDFDYWGQGTLVTVSS

SEQ ID NO: 21165 - protein, 93 aa, Homo sapiens
ASGYSFTNIAMNWVRQAPGQGLEWMGWIHTNTGNPTYAQGFTGRFVFSLDTSVTTAYLQISSLKPEDTAVYYCARGLIDFDYWGQGTLVTVSS

SEQ ID NO: 21166 - protein, 100 aa, Homo sapiens
ATSRFTFSNYAMSWVRQAPGKGPEWVSAISGRGETTYYADSVKGRFTISRDNSKNTLYLQMSSLRDDDSAVYHCAKAGVVGATIRYFDYWGQGTLVTVSS

SEQ ID NO: 21167 - protein, 100 aa, Homo sapiens
AASGFTFDSYVMSWVRQAPGKGLEWVSAISGSGDSTYYANSVKGRFTISRDNSKNTLYLQMNSLRAEDTALYYCAKAGVVGATIRYFDYWGQGTLVTVSS

SEQ ID NO: 21168 - protein, 94 aa, Homo sapiens
VVSGSSIGMDAMHWVRQAPGKGLEWVSTISGRGNGRNYADSVKGRCTVSKDSFKNTIYLTMDGLRDDDTAVYHCVLRGSSFDIWGQGTVVTVSS

SEQ ID NO: 21169 - protein, 94 aa, Homo sapiens
AASGSSIGMDAMHWVRQAAGRGLEWVSSISGRGDRRDYAGSVRGRFTVSRDNTRNTLSLTMDGLRDDDTAVYFCVLRGSSFDIWGRGTVVTVSS

SEQ ID NO: 21170 - protein, 94 aa, Homo sapiens
VVSGSSIGMDAMHWVRQAPGKGLEWVSTISGRGDGRNYADSLRGRCTVSKDSFKNTLYLTMDGLRDDDTAVYHCVLRGSSFDIWGQGTVVTVSS

SEQ ID NO: 21171 - protein, 94 aa, Homo sapiens
VASGSSIAMDAMHWVRQVPAKGLEWVSSISNRADKADYADSVKGRFTISRDNSKNTVYLNMDDLRGDDTAVYYCVLRGSSFDIWGQGTVVTVSS

SEQ ID NO: 21172 - protein, 94 aa, Homo sapiens; identical to SEQ ID NO: 21171

SEQ ID NO: 21173 - protein, 94 aa, Homo sapiens
AASGSRIGMDAMHWVRQAPGKGLEWVSSISGSGDGRNYADSVKGRFTVSRDNSKNTLYLTMDGLRGDDTAVYHCVLRGSSFDIWGQGTVVTVSS

SEQ ID NO: 21174 - protein, 94 aa, Homo sapiens
VVSGSSIGMDAMHWVRQAPGKGLEWVSTISGRGDGRNYADSVKGRCTVSKDSFKNTLYLTMDGLRDDDTAVYHCVLRGSSFDIWGQGTVVTVSS

SEQ ID NO: 21175 - protein, 92 aa, Homo sapiens
SGSRIGMDAMHWVRQAPGRGLEWVSTISGRGDGRNYADSVKGRCTVSKDSFKNTLYLTMDGLRDDDTAVYHCVLRGSSFDIWGQGTVVTVSS

SEQ ID NO: 21176 - protein, 94 aa, Homo sapiens
VVSGSSIGMDAMHWVRQAPGKGLEWVSTISGRRDERNFADSVKGRCTVSKDTFKNTFYLTMDGLRDDDTAVYHCVLRGSSFDIWGQGTVVTVSS

SEQ ID NO: 21177 - protein, 94 aa, Homo sapiens
VVSGSSIGMDAMHWVRQAPGKGLEWVATISGRGDGRNYADSVKGRCTVSKDSFKNTLYLTMDGLRDDDTAVYHCVLRGSSFDIWGQGTVVTVSS

SEQ ID NO: 21178 - protein, 94 aa, Homo sapiens
VASGSSIAMDAMHWVRQVPTKGLEWVSSISPTADRTHYAESVKGRFTISRDNSENTLFLTMDGLRGDDTAIYYCVLRGSSFDIWGQGAAVTVSS

SEQ ID NO: 21179 - protein, 94 aa, Homo sapiens
VASETILGNFAMSWVRQAPGEGLEWVSSVSGNSITTHYSDSVKGRFTVSRDRSRNTLFLQMNGLTADDTARYYCVLRGSSFDIWGQGTMVTVSS

SEQ ID NO: 21180 - protein, 94 aa, Homo sapiens
VPSEIILGNYAMSWVRQAPGEGLEWVSSISGNGVTTHYADSVKGRFTISRDRSRNTLFLQMSSLTADDTAKYYCVLRGSSFDIWGQGTMVTVSS

SEQ ID NO: 21181 - protein, 94 aa, Homo sapiens
VPSEIILGNYAMSWVRQAPGEGLEWVSCVSGNGVATHYADSVKGRFTISRDRSRNTLFLQMNSLTADDTAKYYCVLRGSSFDIWGQGTMVTVSS

SEQ ID NO: 21182 - protein, 94 aa, Homo sapiens
VPSEIILGNYAMSWVRQAPGEGLEWVSCVSGNGITTHYTDSVKGRFTISRDRSRNTLFLQMSSLTADDTAKYYCVLRGSSFDIWGQGTMVTVSS

SEQ ID NO: 21183 - protein, 92 aa, Homo sapiens
SGLVLGNSDMSWVRQAPGKGLEWVSSISGDGVNTYYADSVKGRFTISRDSSRNRLSLQMDTLRDNDTAVYYCVLRGSSFDIWGQGTMVSVSS

SEQ ID NO: 21184 - protein, 94 aa, Homo sapiens
VPSEIILGNYAMSWVRQAPGEGLEWVSSVSGNGVTTHYADSVKGRFTISRDRSRNTLFLQMNSLTADDTAKYYCVLRGSSFDIWGQGTMVTVSS

SEQ ID NO: 21185 - protein, 94 aa, Homo sapiens
VPSEIILGNYAMSWVRQAPGEGLEWVSSVSGNGVTTHYADSVKGRFTISRDRSRSTLLLQMSSLTADDTAKYYCVLRGSSFDIWGQGTMVTVSS

SEQ ID NO: 21186 - protein, 92 aa, Homo sapiens
SGLVLGNSDMSWVRQAPGKGLEWVSSISGSGVNTYYADSVKGRFTISRDSSRNRLSLQMDTLRDNDTAVYYCVLRGSSFDIWGQGTMVSVSS

SEQ ID NO: 21187 - protein, 94 aa, Homo sapiens
VPSEVILGNYAMSWVRQAPGEGLEWVSSVSGNAVTTHYADSVKGRFTISRDRSRNTLFLQMSSVTADDTAKYYCVLRGSSFDIWGQGTMVTVSS

SEQ ID NO: 21188 - protein, 92 aa, Homo sapiens
SEIILGNYAMSWVRQAPGEGLEWVSSVSGNGVTTHYADSVKGRFTISRDRSRNTLFLQMSSLTADDTAKYYCVLRGSSFDIWGQGTMVTVSS

SEQ ID NO: 21189 - protein, 94 aa, Homo sapiens
VPSEIILGNYAMSWVRQAPGEGLEWVSSVSGNDVTTHYADSVKGRFTISRDRSRNTLFLQMSSLTVDDTAKYYCVLRGSSFDIWGQGTMVTVSS

SEQ ID NO: 21190 - protein, 94 aa, Homo sapiens
VASEAILGNYAMSWVRQAPGEGLEWVSSVSGNGISTHYADSVKGRFTISRDRSRNTLFLQVSSLTADDTAKYYCVLRGSSFDIWGQGTMVTVSS

SEQ ID NO: 21191 - protein, 94 aa, Homo sapiens
VASETILGNYAMSWVRQAPGEGLEWVSSVSGNGITTHYADSVKGRFTVSRDRSRNTLFLQMNGLTADDTARYYCVLRGSSFDIWGQGTMVTVSS

SEQ ID NO: 21192 - protein, 98 aa, Homo sapiens
AASGFSFSNYAMHWVRQAPGKGLDWVALISFDGSNRNYADSLKGRFTISRDNSRNTVFLQMNGLRPEDTAVYFCARGFGRGSWSFDYWGQGTLVTVSS

SEQ ID NO: 21193 - protein, 98 aa, Homo sapiens
AASGFIFDNYAMHWVRQAPGKGPEWVAFLKFDGTEEIYADSVKGRFTVSRDNSKNTLYLQMNSLRPEDTAQYYCARGFGRGSWSFDYWGQGTLVTISS

SEQ ID NO: 21194 - protein, 98 aa, Homo sapiens
AASGFIFHNYAMHWVRQAPGKGPEWVAFLKFDGTEEIYADSVKGRFTVSRDNSKDTLYLQMNSLRPEDTAEYYCARGFGRGSWSFDYWGQGTLVTISS

SEQ ID NO: 21195 - protein, 100 aa, Homo sapiens
AASGFRFNTYWMSWGRQAPGKGLEWVANIKEDGSEKYYVESVKGRFTISRDNAKNSLYLQMNSLRGEDTAVYYCARGPTGTTGYYGMDVWGQGTTVTVSS

SEQ ID NO: 21196 - protein, 103 aa, Homo sapiens
VASGFTFSGYNSYWMSWVRQAPGKGLEWVANIKEDGSEKYYVDSVKGRFTISRDNAKNSLYLQMNSLRAEDTAVYHCARGPTGTTGYYGMDVWGQGTTVTVSS

SEQ ID NO: 21197 - protein, 96 aa, Homo sapiens
AASGFTCRNNWMGWVRQSPGRGLEWVANIKQDDSERLYGDSVRGRFTISRDSARNSLHLQMTALTAEDAGVYYCAAWCWSHWFDYWGQGTLVAVSS

SEQ ID NO: 21198 - protein, 96 aa, Homo sapiens
AASGFTCSNNWMGWVRQVPGKGLEWVANIKQDESEKYYMDSVKGRFTISRDDARNSMYLQMNNLRAEDTAVYYCAAWCWSHWFDYWGQGTLVTVSS

SEQ ID NO: 21199 - protein, 95 aa, Homo sapiens
ASGFTCSNNWMGWVRQVPGKGLEWVANIKQDGSEKSYVDSVRGRFTISRDDARNSLYLQMNNLRAEDTAVYYCAAWCWSHWFDYWGQGTLVTVSS

SEQ ID NO: 21200 - protein, 96 aa, Homo sapiens
VASGFTCSNNWMGWVRQLPGKGLEWVANIKQGETEKSYVDSVKGRFTISRDDTRNSLYLQMNSLRAEDTAVYYCAAWCWSHWFDYWGQGTLVTVSS

SEQ ID NO: 21201 - protein, 96 aa, Homo sapiens
AASGFTCSNNWMGWVRQLPGKGLEWVANIKQGETEKSYVDSVKGRFTISRDDTRNSLYLQMNSLRAEDTAVYYCAAWCWSHWFDYWGQGTLVTVSS

SEQ ID NO: 21202 - protein, 96 aa, Homo sapiens
AASGFTCNNNWMGWVRQVPGKGLEWVANIKQDESEKYYMDSVKGRFTISRDDARNSMYLQMNNLRAEDTAVYYCAAWCWSHWFDYWGQGTLVTVSS

SEQ ID NO: 21203 - protein, 95 aa, Homo sapiens
AASGFTCSNNWMGWVRQVPGKGEWVANIKQDESEKYYMDSVKGRFTISRDDARNSMYLQMNNLRAEDTAVYYCAAWCWSHWFDYWGQGTLVTVSS

SEQ ID NO: 21204 - protein, 96 aa, Homo sapiens
AASGFTCSNNWMGWIRQVPGKGLEWVANIKQDESEKYYMDSVKGRFTISRDDARNSMYLQMNNLRAEDTAVYYCAAWCWSHWFDYWGQGTLVTVSS

SEQ ID NO: 21205 - protein, 95 aa, Homo sapiens; identical to SEQ ID NO: 21199

SEQ ID NO: 21206 - protein, 97 aa, Homo sapiens
ISGESVSSNSARWHWIRESPSRGLEWLGRTFYESRWHSDYAVSVKSRITFIADTSKNQVSLQLNSVTPEDTAVYYCARGENYAFEYWGQGTPVTVSS

SEQ ID NO: 21207 - protein, 97 aa, Homo sapiens
ISGDSVSSNSVGWHWIRQSPSRGLEWLGRTYYRSKWYNDYAVSVKSRITINPDTSKNQFSLQLNSVTPEDTAVYYCARGENYAFEYWGQGTLVSVSS

SEQ ID NO: 21208 - protein, 95 aa, Homo sapiens
AVPGFLFQNNHMSWVRQAPGKGLEWVASIDNDGSRKYYVDSVTGRFTISRDNTKNSLSLQMDSLRVEDTAIFYCARGGYNRFDFWGQGTLVIVSS

SEQ ID NO: 21209 - protein, 95 aa, Homo sapiens
AASGFTFSHYWMSWVRQAPGKGLEWVVSMREDGSEKYYVDSVKGRFTISRDNAKNSLYLQMNSLRAEDRAVYYCARGGYNRFDFWGQGAVVTVSS

SEQ ID NO: 21210 - protein, 93 aa, Homo sapiens
AVSGYTFSSSWMAWVRQAPGKGLVWVSRISSDGSSITYADSVKGRFTISRDNAKNTLYLQMHSLRAEDTAVYYCIRGRPWDYWGQGTLVTVSS

SEQ ID NO: 21211 - protein, 92 aa, Homo sapiens
AASGFTFSTYWMDWVRQAPGKGLVWVSAITRNGITSYADSVKGRFTISRDNAKNTVYLQMNGLRGEDTAVYYCIRGRPWDYWGQGTLVTVSS

SEQ ID NO: 21212 - protein, 99 aa, Homo sapiens
AASGFTFSNAWMSWVRQAPGKGLEWVGHIKRKTDGGTTDYAAPVKGRFTISRDDSKTTLYLQMDSLKTEDTAVYYCTTEPRGYRLFDYWGQGTLVTVSS

SEQ ID NO: 21213 - protein, 99 aa, Homo sapiens
AASGFSFTKARMSWVRQAPGKGLEWVGRIETKAEGETKDYAAPVAGRFTILRDDAESTLYLQMNTLKIEDTAVYYCTTEPRGYRLFDYWGQGALVTVSS

SEQ ID NO: 21214 - protein, 93 aa, Homo sapiens
SVSGFTFSSNHMHWVRQAPGKGLQYVSSISPNGDRTYYTDSVKGRFSISRDNYNNMLYLQMSSLRAEDTAVYYCVKDQYIDYWGQGTLVTVSS

SEQ ID NO: 21215 - protein, 93 aa, Homo sapiens
SVSGFTFSNYFMHWVRQAPGKGLQYVSSISTNGDSKYYPDSVKGRFTISRDNSKNTLYLQMSSLRAEDTAVYYCVKDQYIDYWGQGTLVTVSS

SEQ ID NO: 21216 - protein, 96 aa, Homo sapiens
AASGFTFSTSWMSWVRQAPGKGLEWVANIKPDGERHCVDSVTGRFTISRDNAKNSLYLQMNSLRAEDTAVYYCARDGGRGGDLDYWGQGTLVTVSS

SEQ ID NO: 21217 - protein, 97 aa, Homo sapiens
GASGFTFSRHWMSWVRQTPGKGLEWVAKIKFDGSYIRYVDTVKGRFTISRDNAKESLFLQMSSLRAEDTALYYCARDGGRGGDLDYWGLGTLVTVSS

SEQ ID NO: 21218 - protein, 94 aa, Homo sapiens
AASGFTFSSYWMNWVRQSPGKGLEWVANIKPDGSDKNYVDSVKGRFTISRDNAKNSLYLQMNSLRVEDTAVYYCARDKHPPTYWGQGTLVTVSS

SEQ ID NO: 21219 - protein, 94 aa, Homo sapiens
AASGFTFSSYWMNWVRQAPGKGLEWVANIKQDGSDKNYVDSVKGRFTISRDNAKNSLYLQMNSLRVEDTAVYYCARDKHPPTYWGQGTLVTVSS

SEQ ID NO: 21220 - protein, 94 aa, Homo sapiens
AASGFTFSTYWMNWVRQAPGKGLEWVANIKPDGSEANYVDSVKGRFTISRDNAKNSLYLQMHSLRAEDTAVYYCARDKHPPTYWGQGTLVTVSS

SEQ ID NO: 21221 - protein, 97 aa, Homo sapiens
TVSRGSLDGYYCNWIRQPPGKGLEWIGYIYSIGSTNYNPSLKSRVTISIDTSQNQCSLKLSSVTAADTALYYCARGQAGATTLFDYWGQGTLVTVSS

SEQ ID NO: 21222 - protein, 97 aa, Homo sapiens
TVSGASITTYYWNWIRQPPGKGLEWIGYIYYSGSTNYNPSLKSRVTISVDTSKNQFSLKLSSVTAADTAVYYCARGQAGATTLFDYWGQGTLVTVSS

SEQ ID NO: 21223 - protein, 98 aa, Homo sapiens
AASGFTFNYYWMHWVRQAPGKGLVWVSRIHGDESRTNYADSVKGRFTISRDNAKNTVYLQMNNLRAEDTAVYYCARDGHGSGIDFDYWGQGTLVTVSS

SEQ ID NO: 21224 - protein, 98 aa, Homo sapiens
AGSGFAFSTHWMHWVRQAPGKGLVWVAHINGDGSRTNYMDSVKGRFTISRDNAKNTLYLQMNSLRAEDTAVYYCARDGHGSGIDFDYWGQGTLITVSS

SEQ ID NO: 21225 - protein, 98 aa, Homo sapiens
AGSGFAFSTHWMHWVRQAPGKGLVWVAHINGDGSRTNYMDSLKGRFTISRDNAKNTLYLQMNSLRAEDTAVYYCARDGHGSGIDFDYWGQGTLITVSS

SEQ ID NO: 21226 - protein, 98 aa, Homo sapiens
AGSGFAFSTHWMHWVRQAPGKGLVWVAHINDDGSRTNYMDSVKGRFTISRDNAKNTLYLQMNSLRAEDTAVYYCARDGHGSGIDFDYWGQGTLITVSS

SEQ ID NO: 21227 - protein, 97 aa, Homo sapiens
AASGFSVSTSYMTWVRQAPGRGLEWVSFIYRDGSTFYADSVRGRFTISRDNSKNTLYLQMNSLSADDTAVYYCASRPPDFDVGVLDYWGQGTLVTVS

SEQ ID NO: 21228 - protein, 98 aa, Homo sapiens
AVSGFSVSTNYMTWVRRAPGRGLEWVSFIYRDGSVYYADSVRGRFTISRDNSKNTLYLQMNSLSADDTAVYYCASRPPDFDVGVLDYWGQGTLVTVSS

SEQ ID NO: 21229 - protein, 98 aa, Homo sapiens
AASGFSVSTNYMTWVRQAPGRGLEWVSFIYRDGRTFYADSVRGRFTVSRDSSKNTLYLQMNSLSADDTAVYYCASRPPDFDVGVLDYWGQGTLVTVSS

SEQ ID NO: 21230 - protein, 98 aa, Homo sapiens
AASGLTVTSNYMTWVRQAPGRGLEWVSFIYRDGSTYYADSVRGRFTISRDNSKNTLYLHMKSLSADDTAVYYCASRPPDFDVGVLDYWGQGTLVTVSS

SEQ ID NO: 21231 - protein, 98 aa, Homo sapiens
AVSGLTVSSHYMSWVRLAPGKGLEWVSFIYRGGNTYYADSVQGRFTISRDTSKNTLFLQMNSLRAEDTAVYYCASRPPDFDVGVLDYWGQGTLVTVSS

SEQ ID NO: 21232 - protein, 93 aa, Homo sapiens
SVSGFTLSDYFMHWVRQAPGKGLQYVSSISRNGDSTYYADSVKGRFTISRDNYKNMLYLQMNSLRAEDTAVYYCVKDQYVDYWGQGTLVTVSS

SEQ ID NO: 21233 - protein, 93 aa, Homo sapiens
SVSGFTLSDYFMHWVRQAPGKGLQYVSSISRNGDSTYYADSVKGRFTISRDNYQNMLYLQMSSLRAEDTAVYYCVKDQYVDYWGQGTLVTVSS

SEQ ID NO: 21234 - protein, 93 aa, Homo sapiens; identical to SEQ ID NO: 21232

SEQ ID NO: 21235 - protein, 93 aa, Homo sapiens
SASGFTFSNYAMHWVRQAPGKGLEYVSSISSNGDRTYYRDSVKGRFTISRDNFKNTLYLQMSSLRAEDTALYYCVKDQYVDYWGQGTLVTVSS

SEQ ID NO: 21236 - protein, 94 aa, Homo sapiens
VASGLSIGLDVMHWVRQGPGKGLEWVSSISGRGERRDYADSVKGRFIVSRDNSKNKLFLTMDGLRDDDTAAYFCALRGSAFDIWGQGTVVTVSS

SEQ ID NO: 21237 - protein, 94 aa, Homo sapiens
AASGFTLRNEAMTWVRQPPGKGLECVSVISGSGENTYYADSVKGRFTISRDNSKNTLYLQMNSLRAEDTAVYYCALRGSAFDIWGQGTLVTVSS

SEQ ID NO: 21238 - protein, 99 aa, Homo sapiens
TVSGASISSSSYYWGWIRQPPGKGLEWIGSIYYSGSTYYNPSLKSRVTISVDTSKNKVSLKVSSVTAADTAVYYCARQPSLVRGHFDHWGQGTLVTVSS

SEQ ID NO: 21239 - protein, 99 aa, Homo sapiens
TVSGGSISSSTYYWGWVRHPPGKGLEWIGSIYYSGNTYYNPSLKSRVTISVDTSKNHFSLKLSSVTAADTAVYYCARQPSLVRGHFDHWGQGTLVTVSS

SEQ ID NO: 21240 - protein, 107 aa, Homo sapiens
TQTLTLTCTFSGFSLTTTGVGVGWIRQPPGKALEWLAVIFWDNDKRYSPSLKSRLTITKDTSKNQVVLTMTYMEPVDTATYYCVRRPLRGQNWFDPWGQGILVTVSS

SEQ ID NO: 21241 - protein, 107 aa, Homo sapiens
TQTLTLTCTFSGFSLRTTGVGVGWIRQPPGEALEYLVVIYWDDDKRYNPSLKSRLTVTKDTSKNQVVLTMTNMDPVDTATYYCVRRPLRGQNWFDPWGQGTLVTVSS

SEQ ID NO: 21242 - protein, 107 aa, Homo sapiens
TQTLTLTCTFSGFSLTTTGVGVGWIRQPPGGALEYLVIVYWDDENRYNPSLESRLTITKDTSKNQVVLTMTNMDPMDTATYYCVRRPLRGQNWFDPWGQGTLVTVSS

SEQ ID NO: 21243 - protein, 107 aa, Homo sapiens
TQTLTLTCTFSGFSLSTTGVGVGWIRQPPGEALEYLVVVYWDDDKRYNPSLKNRLAVTKDTSKNQVVLTMTNMDPVDTATYYCVRRPLRGQNWFDPWGQGTLVTVSS

SEQ ID NO: 21244 - protein, 107 aa, Homo sapiens
TQTLTLTCTFSGFSLSTSGVGVGWIRQPPGEALEYLVVIYWDDDKRYNPSLKSRLTITKDTSKNQVVLTMTNMDPMDTATYYCVRRPLRGQNWFDPWGQGTLVTVSS

SEQ ID NO: 21245 - protein, 107 aa, Homo sapiens
TQTLTLTCTFSGFSLSTTGVGVGWIRQPPGEALEYLVVIYWDDDKRYNPSLKNRLTITKDTSKNQVFLTMTNMDPMDTATYYCVRRPLRGQNWFDPWGQGTLVSVSS

SEQ ID NO: 21246 - protein, 107 aa, Homo sapiens
TQTLTLTCTFSGFSLSTTGVGVGWIRQPPGEALEYLVVVYWDDDKRYNPSLKNRLTITKDTSKNQVVLTMTNMDPMDTATYYCVRRPLRGQNWFDPWGQGTLVTVSS

SEQ ID NO: 21247 - protein, 101 aa, Homo sapiens
ASGYTFNSYDINWVRQATGQGLEWMGWMNPNSGNTGYAQKFQGRVTMTRNTSISTGYMELSSLSTEDTAVYYCARGPGCTSTTCPYYFDYWGQGTLVTVSS

SEQ ID NO: 21248 - protein, 101 aa, Homo sapiens
ASGYTFTSYDINWVRQATGHGLEWMGWMNPNSGNTGYAQKFQGRVTMTRNTSISTAYMELSSLRSEDTAIYYCARGPGCTSTTCPYYFDYWGQGTLVTVSS

SEQ ID NO: 21249 - protein, 92 aa, Homo sapiens
AVSGFTFSTNWMSWVRQAPGKGLEWVANIKQDGSEKYYVDSVKGRFTISRDNAKNSLYLQMNSLRAEDTAMYYCASPRLDPWGQGTLVTVSS

SEQ ID NO: 21250 - protein, 92 aa, Homo sapiens
AVSGFTFTTNWMSWVRQAPGKGLEWVANIKQDGSEKYYADSVEGRFTISRDNAKNSLYLQMNSLRAEDTAVYYCASPRLDPWGQGTLVTVSS

SEQ ID NO: 21251 - protein, 92 aa, Homo sapiens
AVSGFTFSTNWMSWVRQAPGKGLEWVANIKQDGSDKNYVDSVKGRFTISRDNAKNSLYLQMNSLRAEDTAMYYCASPRLDPWGQGTLVTVSS

SEQ ID NO: 21252 - protein, 92 aa, Homo sapiens
ATSGFIFSNDWMSWVRQAPGKGLECVANINEDGSVKYYMDSVKGRFTISRDNAQNSLYLQMNSLKVEDTAVYYCASPRLDPWGQGTLVTVSS

SEQ ID NO: 21253 - protein, 92 aa, Homo sapiens
ATSGFIFSNDWMSWVRQAPGKGPECVANINKDGSLKYYVDSVKGRFTISRDNAQNSLYLQMNSLKVEDTAVYYCASPRLDPWGQGTLVTVSS

SEQ ID NO: 21254 - protein, 92 aa, Homo sapiens
ATSGFIFSNDWMSWVCQAPGKGLECVANINEDGSVKYYMDSVKGRFTISRDNAQNSLYLQMNSLKVEDTAVYYCASPRLDPWGQGTLVTVSS

SEQ ID NO: 21255 - protein, 95 aa, Homo sapiens
ASGFTFSDAWMSWVRQTPGKGLEWVARLKSKRDGGTRDYAAPVKGRFIVSRDDSKNTLYLEMNSLKSEDTGRYYCTTDQAIFDYWGLGTLVTVSS

SEQ ID NO: 21256 - protein, 94 aa, Homo sapiens
ASGFTFRDAWMSWVRQAPGKGLEWVGRIKSETDGGTRDYAAPVRGRFSISRDDSKDTLYLQMNSLKIEDTAMYFCTTDQAIFDYWGPGIQVTVS

SEQ ID NO: 21257 - protein, 94 aa, Homo sapiens
SGYIFTTFGLTWVRQAPGQGLEWLGWINNKDGHTQYGQMVQGRVTMTTDTSTTTAYMELRSLTSGDTAMYYCARSGDGGYSHDWGRGTLVTVSS

SEQ ID NO: 21258 - protein, 95 aa, Homo sapiens
ASGYSFTNFGITWVRQAPGQGLEWMGWISTYNGNTNYAHKFQDRVTLTTDTSTNTAYMELRSLSSDDTAVYYCARSGDGGYSHDWGQGTLVTVSS

SEQ ID NO: 21259 - protein, 93 aa, Homo sapiens
TVSGGSVSSDTFYWGWIRQPPGKGLEWIGMMSYSGRTYYNPSLKSRVTISVDTSRNQFSLNLNSVTAADTAVYYCARSHGTYWGQGMLVTVSS

SEQ ID NO: 21260 - protein, 93 aa, Homo sapiens
TVSGGSVSSGNFLWAWIRQPPGEALEWIGHIFNSGSTTYNPSLKSRVIISRDTSKNQFSLKVTSVSAADTAVYYCARSHGTYWGQGTLVTVSS

SEQ ID NO: 21261 - protein, 93 aa, Homo sapiens
TVSGGSVSSGNFLWAWIRQPPGEALEWIGHICNSGSTTYNPSLKSRVIISRDTSKNQFSLKVTSVSAADTAVYYCARSHGTYWGQGTLVTVSS

SEQ ID NO: 21262 - protein, 95 aa, Homo sapiens
VTTESFNDYSWSWVRQPPGKGLEWIGEITHTGSTYYSPSLQSRVSIFLDTPKKVVFLNLTSVTAADTALYYCARVRGAAAGADYWGQGSLVTVSS

SEQ ID NO: 21263 - protein, 96 aa, Homo sapiens
GVSGGAMTDYSWGWVRQPPGKGLEWLGEMTHAGKTHYTPSLKSRTSISVDTSKSQVSLNLTSVTAADTAIYFCARVRGAAAGADYWGQGILVTVSS

SEQ ID NO: 21264 - protein, 100 aa, Homo sapiens
ATSGFPFSEYWMTWVRQVPGKGLEWVANIKQDGSEGNYAASVRGRFTISRENAKNSMFLQMNGLRADDAGVYSCARDKGTTLTSYGMDVWGRGTKVTVSS

SEQ ID NO: 21265 - protein, 100 aa, Homo sapiens
ATSGFPFSKYWMTWVRQVPGKGLEWVANIKQDGSEGNYATSVRGRFTISRENAKNSVFLQMNDLRVDDAGVYSCARDKGTTLTSYGMDVWGRGTKVTVSS

SEQ ID NO: 21266 - protein, 99 aa, Homo sapiens
ASGFIFRTYWMTWIRQAPGKGLEWVANIKQDGSEKNYVDSVKGRFTISRDNAKNSIYLQMDGLRADDTALYYCARDKGTTLTSYGMDVWGQGTTVTVSS

SEQ ID NO: 21267 - protein, 99 aa, Homo sapiens
ASGFIFRTYWMTWIRQAPGKGLEWVANIKHDGSETNYVDSVRGRFTISRDNAKNSIYLQMNGLRADDTALYYCARDKGTTLTSYGMDVWGQGTTVTVSS

SEQ ID NO: 21268 - protein, 99 aa, Homo sapiens
ASGFIFRTYWMTWIRQAPGKGLEWVANIKHDGSEKNYVDSVKGRFTISRDNAKNSIYLQMNGLRADDTALYYCARDKGTTLTSYGMDVWGQGTTVTVSS

SEQ ID NO: 21269 - protein, 99 aa, Homo sapiens
GASGFIFSTYWMTWVRQAPGKGLEWVANIKQDGSEKYYVDSVKGRFTVSRDNAKNSLYLQMNSLRAEDTALYYCARDKGTTLTSYGMDVWGQGTTVTVS

SEQ ID NO: 21270 - protein, 100 aa, Homo sapiens
AASGFTFSTYWMTWVRQAPGKGLEWVANIKQDGSEKYYVDSVKGRFTISRDNAKNSVYLQMNSLRAEDTALYYCARDKGTTLTSYGMDVWGQGTTVTVSS

SEQ ID NO: 21271 - protein, 91 aa, Homo sapiens
AASGFTFSSYEMNWVRQAPGKGLEWISFISGSGSTIYYADSVKGRFTISRDNAKNSLYLQMNSLRAEDTAVYYCASFSDPWGQGTLVTVSS

SEQ ID NO: 21272 - protein, 91 aa, Homo sapiens
AASGFTFSNYEMNWVRQAPGKGLEWVSYITGSGSAIYYADSVKGRFTISRDNAKNSLYLQMNSLRAEDTAIYYCASFSDPWGQGTLVTVSS

SEQ ID NO: 21273 - protein, 97 aa, Homo sapiens
ASGLTFSNYWMTWVRQAPGKGLEWVAHIDEVGRDTYYLDSVKGRFTISRDNAETSLYLQMNSLRMEDTAVYYCARDLPIAGAGFDYWGQGALVTVSS

SEQ ID NO: 21274 - protein, 98 aa, Homo sapiens
AASGFSFSGSWMTWVRQAPGKGLEWVAHIQEDGSRKFYVDSVKGRFTISRDNAENSLYLQMNSLRVDDTAIYYCARDLPIAGAGFDYWGQGTMVTVSS

SEQ ID NO: 21275 - protein, 98 aa, Homo sapiens; identical to SEQ ID NO: 21274

SEQ ID NO: 21276 - protein, 98 aa, Homo sapiens
AASGFTFSGSWMTWVRQAPGKGLEWVAHIQEDGSQKFYVDSVKGRFTISRDNAKNSLSLQMNSLRVEDTAVYYCARDLPIAGAGFDYWGQGTLVTVSS

SEQ ID NO: 21277 - protein, 96 aa, Homo sapiens
ASGYSFPTFGISWVRQAPGQGLEWMGWISPNNGATNYARKFRGRATMTTDASTTTAYLELRSLTSDDTAVFYCARDPGGGSGFDSWGQGTLVTVSS

SEQ ID NO: 21278 - protein, 96 aa, Homo sapiens
ASGYTFTTYGISWVRQAPGQGLEWMGWISPNNGNTNYAQKFRGRVTMTTDASTTTAYLELRSLTSDDTAVFYCARDPGGGSGFDSWGQGTLVTVSS

SEQ ID NO: 21279 - protein, 96 aa, Homo sapiens
ASGYTFTTFGISWVRQAPGQGLEWMGWISPYNGNTNYAQKFRGRVTMTTDTSTSTAYLDLRSLTSDDTALYYCARDPGGGSGFDSWGQGTLVTVSS

SEQ ID NO: 21280 - protein, 94 aa, Homo sapiens
SGYRFTNFGLTWVRQAPGQGLEWLGWISTESGHTQYGQMIQGRGTMTADTSTATAYMELRSLTSDDTAMYYCALSGDGAYSHDWGRGTLVTVSS

SEQ ID NO: 21281 - protein, 95 aa, Homo sapiens
ASGYTFTRFGLTWVRQAPGKGLEWMGWINTDEGTSKYAEKFRGRVTLTTDTSATTAYMELKSLKSDDTAVYYCALSGDGAYSHDWGQGTRVTVSS

SEQ ID NO: 21282 - protein, 95 aa, Homo sapiens
ASGHTVTNFGLTWVRQAPGQGLEWVGWISLINGHAEYGQELQGRVTLTTDTPASTAYMELRSLRSDDTAVYYCALSGDGAYSHDWGQGTLVTVSS

SEQ ID NO: 21283 - protein, 94 aa, Homo sapiens
ASTYLFTTFGVTWVRQAPGQGLEWMGWISPDNGHTNYAQRLQDRGTLTTDTSTGTAYMELRRLQSDDTAVYYCALSGDGAYSHDWGQGTLVTVS

SEQ ID NO: 21284 - protein, 95 aa, Homo sapiens
ASGYPFKSFGITWVRQAPGQGLEWVGWISTNNGDANYAQTFQGRVTLTADTSTSTAYMELRSLRSDDTAMYFCALSGDGAYSHDWGQGTLVTVSS

SEQ ID NO: 21285 - protein, 93 aa, Homo sapiens
GHIFKSFGITWVRQAPGQGLEWMGWISTYNGNTNYAQRIQGRVIMTADTSTSTAYMELRNLRSDDTAIYYCALSGDGAYSHDWGQGTLVTVSS

SEQ ID NO: 21286 - protein, 94 aa, Homo sapiens
ASSYIFTSFGVTWVRQAPGQGLEWMGWISPHNGNTNYAQRLQDRVTMTTDASTSTAYMELRSLKSDDTAVYYCALSGDGAYSHDWGQGTLVTVS

SEQ ID NO: 21287 - protein, 93 aa, Homo sapiens
AASGFTFTTYWMSWVRQAPGKGPEWVANIKQDGNEKYYVDSVKGRFTISRDNARNSLYLQMSSLRAEDTAIYYCARGRTCDNWGQGTLVTVSS

SEQ ID NO: 21288 - protein, 93 aa, Homo sapiens
AASGFTFSSYWMTWVRQAPGKGLEWVASVNQYGSEKYYVDSVRGRFTISRDNAKNSLYLQMNSLRGEDTAVYYCARGRTCDNWGQGSLVDVSS

SEQ ID NO: 21289 - protein, 102 aa, Homo sapiens
ASGYTFTSYGISWVRQAPGQGLEWMAWISAYNGDTNCAPRLQGRVTMTTDTSTSTAYLELRSLRSDDTAVYYCARDEKRSCSGSSCYYFDYWGQGTLVTVSS

SEQ ID NO: 21290 - protein, 102 aa, Homo sapiens
ASGYTFTNYGISWVRQAPGQGLEWMGWISGYRGNRNYAQKLQGRVTVTTDTSTGTAYMELRSLRSDDTAVYYCARDEKRSCSGSSCYYFDYWGQGTLVTVSS

SEQ ID NO: 21291 - protein, 98 aa, Homo sapiens
AASGFTFSSYEMNWVRQAPGKGLEWVSYINSRGSSTYYADSVRGRITISRDNAKSSLYLQMNSLRAEDTAVYYCARGVWDSSGYFHYWGQGTLVTVSS

SEQ ID NO: 21292 - protein, 98 aa, Homo sapiens
AASGFTFSSYEMNWVRQAPGKGLEWVSYIGSSGSTIYYGDSVKGRFTISRDNAKNSLYLQMNSLRAEDTAVYYCARGVWDSSGYFHYWGRGTLVTVSS

SEQ ID NO: 21293 - protein, 97 aa, Homo sapiens
AASRFTFSSYAMHWVRQAPGKGLEWVAVISFDGKNTDYTGSVKGRFAISRDNSKNTLYLQMNSLRTEDTAVYYCARGHYYSSDFDYWGQGTLVTVSS

SEQ ID NO: 21294 - protein, 97 aa, Homo sapiens
AASGFQFGSYAMHWVRQSPVRGLEWVAVISFDGKTESYADSVKGRFTISRDNSKNILYLQMNSLRPGDTALYYCARGHYYSSDFDYWGQGTLVTVSS

SEQ ID NO: 21295 - protein, 97 aa, Homo sapiens; identical to SEQ ID NO: 21294

SEQ ID NO: 21296 - protein, 94 aa, Homo sapiens
ASGFTFRSFWMTWVRQAPGKGLEWVANIKEDASERYFLDSVKGRFTISRDNARNSLNLQMDSLRVDDTAVYYCVRGGWTAVDYWGQGTLVTVSS

SEQ ID NO: 21297 - protein, 95 aa, Homo sapiens
AASGFIFSDYWMTWVRQSPGKGLEWVANIKSDGSEKYYLDSVRGRFTISRDYATNSLYLQMNTLRVEDTALYYCVRGGWTAVDYWGPGTLVTVSS

SEQ ID NO: 21298 - protein, 99 aa, Homo sapiens
VASGITFSSARMTWVRQVPGRGLEWVGRIKSKTEGGTTDYAAPVKGRFAISRDDSKNTLYLQMNSLKTEDTGVYYCIHYGSGSYTTDYWGQGTLVTVSS

SEQ ID NO: 21299 - protein, 98 aa, Homo sapiens
ASGFYFTNARMSWFRQAPGKGLEWVGHIKTKSDGGTMDYAAPVKGRFTISRDDSKNTLYLQMNSLKTEDTAVYYCIHYGSGSYTTDYWGQGTLVTVSS

SEQ ID NO: 21300 - protein, 99 aa, Homo sapiens
AASGFFFPSARMSWFRQAPGKGLEWVGHIRTKSDGGTIDYAAPVTGRFTISRDDSKNTLYLQMNSLKTEDTAVYYCIHYGSGSYTTDYWGQGTLVTVSS

SEQ ID NO: 21301 - protein, 96 aa, Homo sapiens
SASGFTFNNYNMHWVRQAPGKGLQYVAAISGNGGSAYYADSVKARFTISRDNSANTIYLQMTSLRTEDTAVYFCVKDVSSGWYDYWGQGTLVTVSS

SEQ ID NO: 21302 - protein, 96 aa, Homo sapiens
SASGFTFSRYTMHWVRQAPGKGLEYVSAITSNGGSTYYTDSVKGRFTISRDNSKNTLYLQMSSLRVEDTAIYYCVKDVSSGWYDYWGQGTLVTVSS

SEQ ID NO: 21303 - protein, 94 aa, Homo sapiens
ASGFTFSGSAVQWVRQARGQRLEWIGWIVVGSGNANYAQKFQGRVTISRDKSTSTAFMELSNLRSEDTAIYYCAAEEVATGAYWGQGTLVTVSS

SEQ ID NO: 21304 - protein, 93 aa, Homo sapiens
SGFTFSGSAVQWVRQARGQRLEWIGWIVVGSGKANYAQKFQERVAITRDMSTRTAYLEMSRLTSEDTAVYYCAAEEVATGAYWGQGTLVTVSS

SEQ ID NO: 21305 - protein, 94 aa, Homo sapiens
ASGFTFSGSAVQWVRQARGQRLEWIGWIVVGSGKANYAPKFQQRVTITRDKSTNTAYMELRTLRYDDTAVYYCAAEEVATGAYWGQGTLVTVSS

SEQ ID NO: 21306 - protein, 93 aa, Homo sapiens
SGFTFSGSAVQWVRQARGQRLEWVGWIVVGSGYTNYAQKFQERVTIARDMSTSTVYLELSSLRSEDTAVYFCAAEEVATGAYWGPGTLVTVSS

SEQ ID NO: 21307 - protein, 93 aa, Homo sapiens
SGFTFSGSAVQWVRQARGQRLEWVGWIVVGSAYTNYAQKFQERVTIARDMSTSTVYLELSSLRSEDTAVYFCAAEEVATGAYWGPGTLVTVSS

SEQ ID NO: 21308 - protein, 93 aa, Homo sapiens
SGLTFSGSAVQWVRQARGQRLEWIGWIVVGSGYTNYAQKFQERVTISRDMSTRTAYLELSSLTSDDTAVYYCAAEEVATGAYWGQGTLVTVSS

SEQ ID NO: 21309 - protein, 93 aa, Homo sapiens
SGFTFSGTAVQWVRQARGQRLEWVGWIVAGSGYTNYAQIFQERVTIARDMSTSTVYLELSSLRSEDTAVYFCAAEEVATGAYWGPGTLVTVSS

SEQ ID NO: 21310 - protein, 97 aa, Homo sapiens
AASGFTFSTNGMHWVRQAPGKGLEWVALILYDGSNKYYADSVKGRFTISRDNSKNTLYLQMDSLRAEDAAVYYCARDKSKGRYFDYWGQGTLVTVSS

SEQ ID NO: 21311 - protein, 97 aa, Homo sapiens
AASGFTFSTSGMHWVRQAPGKGLEWVAIIWYDGNNKYYSDSVKGRFTISRDNSKNTLYLQMNSLRAEDTAVYYCARDKSKGRYFDYWGQGTLVTVSS

SEQ ID NO: 21312 - protein, 97 aa, Homo sapiens
AASGFSISGYWMTWVRQAPGKGLELVANIKGDGSDIFYSASVTGRFTVSRDNAKNAVYLQMNSLRAEDTAVYYCARDRGGATTLDYWGQGTLVTFSS

SEQ ID NO: 21313 - protein, 97 aa, Homo sapiens
AASGFSFSNYWMPWVRQAPGKGLELVANIEPDGSRQFYIGSVRGRFTISRDNAKNSVYLQMNSLRDEDTAVYYCARDRGGATTLDYWGQGTLVTVSS

SEQ ID NO: 21314 - protein, 94 aa, Homo sapiens
AASGSSIRMDAMHWVRQGPGQGLEWVSSISGRGDRTDYADSVKGRFTISRDNSKNTLFLEMDGLRGEDTAIYYCILRGSAFDIWGQGTVVTVSS

SEQ ID NO: 21315 - protein, 94 aa, Homo sapiens
VASGFSFSNYALSWVRQAPGKGLEWVSAIGGSSVDTFYAASVRGRFTISRDSSRNILFLQMKSLRAEDTASYYCILRGSAFDIWGQGTRVTVSS

SEQ ID NO: 21316 - protein, 94 aa, Homo sapiens
VASGFTFTTFAMSWVRQAPGEGLEWVSAISGSGDDTLYADSVKGRFSVSRDSSRSTLFLQMDSLRAEDTATFYCILRGSAFDIWGRGTMVTVSS

SEQ ID NO: 21317 - protein, 99 aa, Homo sapiens
AASGFTFGGHYMAWVRQAPGKGLQWVAKIKMDGSEKFYVDSVKGRFTISRDNAENSLYLQMNSLRADDTAVYYCARENRYSIGWDFDYWGQGTLVTVSS

SEQ ID NO: 21318 - protein, 99 aa, Homo sapiens
AASGFTFSSHYMGWVRQAPGKGLEWVANIKYDGSDKYYVDSVKGRFTISRDNAKNSLYLQMNSLKVEDTAVFYCARENRYSIGWDFDYWGQGTLVTVSS

SEQ ID NO: 21319 - protein, 99 aa, Homo sapiens
EASGFTFSRHYMAWVRQAPGKGLEWLANIKYDGSDTFYVDSVKGRFTISRDNAKNSLYLQMNSLEVEDTALFYCARENRYSIGWDFDYWGQGTLVTVSS

SEQ ID NO: 21320 - protein, 99 aa, Homo sapiens
AASGFNFSGHWMSWVRQAPGKGLEWVAKIKQDGSDQYSVDSVKGRFTMSRDNAKNSLYLQMNSLRAEDTAVYYCARENRYSIGWDFDYWGQGTLVTVSS

SEQ ID NO: 21321 - protein, 99 aa, Homo sapiens
EASGFPFSGHYMGWVRQAPGKGLEWVAKIKFDGSDKHYVDSVKGRFTISRDNAKNSLYLQMNSLKVEDTAVFYCARENRYSIGWDFDYWGQGTLVTVSS

SEQ ID NO: 21322 - protein, 98 aa, Homo sapiens
ASGFNFSGHWMSWVRQAPGKGLEWVAKIKQDGSDQYSVDSVKGRFTMSRDNAKNSLYLQMNSLRAEDTAVYYCARENRYSIGWDFDYWGQGTLVTVSS

SEQ ID NO: 21323 - protein, 94 aa, Homo sapiens
AASGFTFSSYWMNWVRQAPGKGLEWVANINQDGSDKNYVDSVKGRFTISRDNAKNSLYLQMKSLRVEDTAVYYCARDKRPPTYWGQGTLVTVSS

SEQ ID NO: 21324 - protein, 94 aa, Homo sapiens
AASGFTFSNYWMNWVRQAPGKGLEWVANIKPDGSEANYVDSVKGRFTISRDNAKNSLYLQMHSLRAEDTAVYYCARDKRPPTYWGQGTLVTVSS

SEQ ID NO: 21325 - protein, 93 aa, Homo sapiens
AASGFTFSTYVMTWVRQAPGKGLEWVSGITGSSGVTYYADSVRGRFTISRDNSKNTLYLQMNSLRAEDTAVYYCAKTGQFENWGQGILVTVSS

SEQ ID NO: 21326 - protein, 92 aa, Homo sapiens
AASGFTFSTYAMSWVRQAPGQGLEWVSSITTSGGTYYAQSVRGRFTISRDNSKNTLFLQMNSLRDEDTAVYYCAKTGQFENWGPGTLVTVSS

SEQ ID NO: 21327 - protein, 104 aa, Homo sapiens
TVSGGSVSSGSYYWSWIRQTPGKGLEWIGYIYYSGSTNDNPSLKSRVTISVDTSKNQFSLNLSSVTAADTAVYYCARGLYYYDSSGYYYYFDYWGQGTLVTVSS

SEQ ID NO: 21328 - protein, 104 aa, Homo sapiens
TVSGASISSTGYYWTWIRQPAGKGLEWIGRIYTSGSTNYNPSLKSRVTISVDTSKNQFSLKLSSVTAADTAVYYCARGLYYYDSSGYYYYFDYWGQGTLVTVSS

SEQ ID NO: 21329 - protein, 94 aa, Homo sapiens
AVSGSSIAMDAMHWVRQAPGKGLEWVSSITGRGDGREYADSVKGRFTASRDNSKNTLYLSMDGLRDDDTAVYYCVLRGSSFDLWGQGTVVTVSS

SEQ ID NO: 21330 - protein, 94 aa, Homo sapiens
VPSEIILGNYAMSWVRQAPGEGLEWVSSITGNGVTTHYADSVKGRFTISRDRSRNTLFLQMSSLTADDTAKYYCVLRGSSFDLWGQGTMVTVSS

SEQ ID NO: 21331 - protein, 95 aa, Homo sapiens
AASGFTFSSYVMTWVRQAPGKGLEWVSTIGGGGDNTYYADSVRGRFTISRDNSRNTLHLQMSSLRAEDTAVYYCASKITDDFDYWGQGTLVTVSS

SEQ ID NO: 21332 - protein, 95 aa, Homo sapiens
AASGFTFRKSTMSWVRQAPGKGLQWVSTISSRGDATYYADSVKGRFTVSRDKSENTLYLQMNSLRTDDTALYYCASKITDDFDYWSQGTLVTVSS

SEQ ID NO: 21333 - protein, 95 aa, Homo sapiens
AGSGFSLRKSTMTWVRQAPGKGLQWVSTISSRGDATYYADSVRGRFTIFRDKSENTMHLQMNSLTTDDTAVYYCASKITDDFDYWGQGTLVTVSS

SEQ ID NO: 21334 - protein, 95 aa, Homo sapiens
AVSGFTFRKSIMSWVRQAPGKGLQWVSTISSRGDATYYADSVKGRFTVSRDKSENTLYLQMNSLRTDDTALYYCASKITDDFDYWSQGTLVTVSS

SEQ ID NO: 21335 - protein, 95 aa, Homo sapiens
AASGFSLSRYTMSWVRQAPGKGLEWVSTFSPSRDRTFYADSVRGRFTISTDNSKNTLYLQMDSLRAEDTAIYYCASKITDDFDYVGQGTLVTVSS

SEQ ID NO: 21336 - protein, 95 aa, Homo sapiens
AASGFTFRKSIMSWVRQAPGKGLQWVSTISSRGDATYYADSVKGRFTVSRDKSEDTLYLQMNSLRTDDTALYYCASKITDDFDYWSQGTLVTVSS

SEQ ID NO: 21337 - protein, 95 aa, Homo sapiens
AASGFTFRKSTMSWVRQAPGKGLQWVSTISSRNDATYYADSVKGRFTVSRDKSENTLYLQMNSLRTDDTALYYCASKITDDFDYWSQGTLVTVSS

SEQ ID NO: 21338 - protein, 96 aa, Homo sapiens
ASGYTFTSYGVSWVRQAPGQGLEWMGWINAHNGNTNYAQKLQGRVTMTTDTSTNTAYMDLRSLRSDDTAVYYCARGGTSGWYVDYWGQGTLVTVSS

SEQ ID NO: 21339 - protein, 96 aa, Homo sapiens
ASGYTFTSYGITWVRQAPGQGLEWMGWINPNNGNTNYAQNLQDRVTMTTDTSTSTAYMDLRSLRSDDTAVYYCARGGTSGWYVDYWGQGTLVTVSS

SEQ ID NO: 21340 - protein, 100 aa, Homo sapiens
TVSGASITTYYWSWIRQPPGKGLEWIGYIHDSGSTNYNPSLKSRVIISVDTSKNQFSLQLTSVTAADTAVYYCARGGNAVANWRYYFDYWGQGTLVTVSS

SEQ ID NO: 21341 - protein, 100 aa, Homo sapiens
TVSGGSISTYYLSWIRQTPEKGLEWIGYIYYDGSTQYSPSLEGRVTISLDTSKNQFSLKLYSVTAADTAVYYCARGGNAVANWRYYFDYWGPGMQVTVSS

SEQ ID NO: 21342 - protein, 100 aa, Homo sapiens
TVSGDSISTYYLSWIRQTPEKGLEWIGYIYYDGGTQYSPSLEGRVTISLDTSKNQFSLKLYSVTAADTAVYYCARGGNAVANWRYYFDYWGPGIQVTVSS

SEQ ID NO: 21343 - protein, 97 aa, Homo sapiens
SVSGGSISSYYWSWIRQPPGKGLEWIGYISYSGITNYNPSLKSRVTISLDTSKNQFSLKLSSVTAADTALYYCARAGRGAAAGYDYWGQGTLVTVSS

SEQ ID NO: 21344 - protein, 97 aa, Homo sapiens
TVSGGSISSYYWSWIRQPPGKGLEWIGYIYYSGSTNYNPSLQSRVTISVDTSKNQFSLKLTSVTAADTAVYYCARAGRGAAAGYDYWGQGTLVTVSS

SEQ ID NO: 21345 - protein, 96 aa, Homo sapiens
AASGFTFNDAWMSWVRQPPGKGLEWVGRIKSKTQGGATDYAAPVTGRFTISRDDSKNTLYLQMNSLKIEDTAVYYCTTRPTQGGYWGQGTLVTVSS

SEQ ID NO: 21346 - protein, 96 aa, Homo sapiens
AASGFTFSSAWMSWVRQVPGEGLEWVGRIRSKTSGETIEYAAPVEGRFSISRDDSKNTVYLQMNSLKTEDTAVYYCTTRPTQGGYWGQGTLVTVSS

SEQ ID NO: 21347 - protein, 96 aa, Homo sapiens
AASGFTFNNAWMNWVRQAPGKGLEWVGRIKRKTEGGTTEYAAPVKGRFTISRDDSKNTLYLQMNSLKTEDTAVYYCTTRPTQGGYWGQGTLVTVSS

SEQ ID NO: 21348 - protein, 89 aa, Homo sapiens
VSGFSLTDLSMHWIRQSTGKGLEWMGGFDPESGKTIYAQKFQGRVTMTEDTYTDTAYMEMRSLRSDDTSIYFCATHRDWGQGTPVTVSS

SEQ ID NO: 21349 - protein, 89 aa, Homo sapiens
VSGYTLTDLAMHWVRQTPGKGLEWMGGFHPEDGKTIYAQKFQGRLTMTEDTFTDTAYMELSSLRSEDTAIYYCATHRDWGQGTLVTVSS

SEQ ID NO: 21350 - protein, 99 aa, Homo sapiens
VGSGFTFSGNAMHWVRQPPGKGLEWMAFISYDGRDKYYADSVKGRFTISRDNSESTLYLQMSSLSFEDTAVYYCAREAGAGGSSSFDYWGRGTLVTVSS

SEQ ID NO: 21351 - protein, 99 aa, Homo sapiens
EDSGFTFSRHAMHWVRQAPGRGPEWVAFISYDGGSKCYADSVKGRFTISRDNSKNTLYLQMNSLRAEDTALYYCAREAGAGGSSSFDYWGQGTLVTVSS

SEQ ID NO: 21352 - protein, 98 aa, Homo sapiens
KGSGYTFTNYWIAWVRQMPGKGLEWMGIIYPGDFHTRYSPSFQGQVTLSADNSISTAYLQWSSLKASDTAMYYCARHRSSSSGWLDPWGQGTLVTVSS

SEQ ID NO: 21353 - protein, 98 aa, Homo sapiens
KGSGYSFTSYWIAWVRQMPGKGLEWMGIIYPGDSDTRYSPSFQGQVAISADKSISTAYLQWSSLKASDSAMYYCARHRSSSSGWLDPWGQGTLVTVSS

SEQ ID NO: 21354 - protein, 98 aa, Homo sapiens
AASGFTFSSYGMTWVRQAPGKGLEWVSAISGSGGNTHYADSVKGRFTISRDNSKNTLFLQMNSLRVEDTAVYYCAKLIPSSGWPFDYWGQGTLATVSS

SEQ ID NO: 21355 - protein, 98 aa, Homo sapiens
AASGFTFTAYPMSWVRQAPGKGLQWVSAISISGDNTYYADSVKGRFTIFRDNSKNTLFLQMNSLRAEDTAVYYCAKLIPSSGWPFDYWGQGTLVTVSS

SEQ ID NO: 21356 - protein, 97 aa, Homo sapiens
AASGFTFSTNGMHWVRQAPGKGLEWVALILYDGSNEYYADSVKGRFTISRDNSKNTLYLLMDSLRAEDAAVYYCARDKSKGRYLDYWGLGTLVTVSS

SEQ ID NO: 21357 - protein, 97 aa, Homo sapiens
AASGFTFNTQGMHWVRQAPGKGPEWVAIIRFDGSNIYYADSVKGRFTISRDNSKNTLYLQMNSLRAEDTAIYYCARDKSKGRYLDYWGQGTLVTVSS

SEQ ID NO: 21358 - protein, 88 aa, Homo sapiens
VVSGFVFSSYEMGWFRQGPGKGLEWVSSITSSGDRTYYAESVKGRFIISRDNSKNALYLQLNSLRAEDTAVKSWFDPWGQGTLVTVSS

SEQ ID NO: 21359 - protein, 88 aa, Homo sapiens
AASGFSFSNYGMGWVRQAPGKGLEWVSEVSTGGDVRYYADSVKGRFTISRDNSKNTLYLHYCAKDDGVGPTTNYFDPWGQGTLVTVSS

SEQ ID NO: 21360 - protein, 97 aa, Homo sapiens
AASGFTFSYDWMSWVRQAPGKGLEWVAFITADGSAKKYVDSVEGRFTISRDNAKNSLYLQMNGLRAEDTAVYYCARDVVGGNTFDYWGQGTLVTVSS

SEQ ID NO: 21361 - protein, 97 aa, Homo sapiens
AVSGFTFSNYWMDWVRQAPGKGLEWVANIKQDGSEKYYVDSVKGRFTISRDNAKNSLYLQMSSLRAEDTAVYYCARDVVGGNTFDYWGQGTLVTVSS

SEQ ID NO: 21362 - protein, 96 aa, Homo sapiens
AASGFTFSDAWMSWVRQAPGKGLEWVGRIKSKTSGGTTDYAAPVKGRFTISRDDSRNTAYLQMNSLKTEDTAIYYCTTRATQGGYWGQGTLVTVSS

SEQ ID NO: 21363 - protein, 96 aa, Homo sapiens
VASGFTFSDAWMSWVRQAPGKGLEWVGRSKSKTNGGIIDYAAPVNDRFTISRDDSENTLYLQMNSLKSEDTAVYYCTTRATQGGYWGRGALVTVSS

SEQ ID NO: 21364 - protein, 99 aa, Homo sapiens
TVSGGSISSSSYYWGWIRQTPGKGLEWIGSIYYSGSTYYNPSLKSRVTMSVDTSNNQFSLKLGSVTAADTAVYYCARHPALVVIHFDYWGRGTLVTVSS

SEQ ID NO: 21365 - protein, 99 aa, Homo sapiens
TVSRGSISSSTYYWGWIRQPPGKGLEWIGSIYYSGSTYYNPSLKSRVTISVDTSRNHFSLKLSSVTAADTAVYYCARHPALVVIHFDYWGQGSLVTVSS

SEQ ID NO: 21366 - protein, 99 aa, Homo sapiens
FGYTFSTYAIHWVRQAPGQRLEWMGWINAGNGDTNYSQKFQGRVTITRDTSASTAYMELSGLRSEDTGVYYCATGYCSSTSCQYYSDYWGQGTLVTVSS

SEQ ID NO: 21367 - protein, 100 aa, Homo sapiens
ASGYTFTTKAIHWVRQAPGQRLEWMGWINAGTGDTKYSENFQGRVTITRDSAASTAYMELSSLRSEDTAVYYCATGYCSSTSCQYYSDYWGQGSLVTVSS

SEQ ID NO: 21368 - protein, 100 aa, Homo sapiens; identical to SEQ ID NO: 21367

SEQ ID NO: 21369 - protein, 97 aa, Homo sapiens
AASGFTFSGQGMHWVRQAPGKGLEWVALIWYDGSKIYYGDSVKGRFAISRDNSKNTLYLQMNNLRAGDTAVYYCARDKGKGSYFDSWGQGTLVTVSS

SEQ ID NO: 21370 - protein, 97 aa, Homo sapiens
AASAFTFSTYGMHWVRQAPGKGLEWVAIILYDGSKEYYTDSVKGRFTISRDNSKNTLYLQMNSLRAEDTAVYYCARDKGKGSYFDSWGQGTLVTVSS

SEQ ID NO: 21371 - protein, 97 aa, Homo sapiens; identical to SEQ ID NO: 21370

SEQ ID NO: 21372 - protein, 94 aa, Homo sapiens
AASGFSVTFKYMAWVRQAPGKGLEWVSVIHNDGSTYYTESVKGRFTISKDNSKNTVYLQMNSLRAEDTAVYYCAREYYYKLDVWGQGTTVTVSS

SEQ ID NO: 21373 - protein, 94 aa, Homo sapiens
AASRFTIGFTYMNWVRQAPGKGLEWVSGIYSGTNTDYADSVKGRFTISRDNSKNTVYLQMNSLRAEDTAVYYCAREYYYKLDVWGQGTTVTVSS

SEQ ID NO: 21374 - protein, 96 aa, Homo sapiens
AASGFTLSDHFMDWVRQAPGKGLEWVGRTRSKTSGYTTEYAASVKGRFTVSRDDSTNSVYLQMKSLETEDTAVYYCARGYNSFDNWGQGTLVTVSS

SEQ ID NO: 21375 - protein, 96 aa, Homo sapiens
AASGFTFSDYYMDWVRQAPGKGLEWVGRAGKKVKRYTTDYAASVKGRFTISRDDSKNSLFLQMNSLNTEDTAVYYCARGYNSFDNWGQGTLVTVSS

SEQ ID NO: 21376 - protein, 93 aa, Homo sapiens
ASGTTFSSYWMHWVRQAPGKGLVWVSHINSDGSSETYADSVKGRFTISRDNAKNTLYLQMHSLRVEDTAIYYCARSIGGFDSWGQGTLVTVSS

SEQ ID NO: 21377 - protein, 93 aa, Homo sapiens; identical to SEQ ID NO: 21376

SEQ ID NO: 21378 - protein, 93 aa, Homo sapiens; identical to SEQ ID NO: 21376

SEQ ID NO: 21379 - protein, 93 aa, Homo sapiens; identical to SEQ ID NO: 21376

SEQ ID NO: 21380 - protein, 93 aa, Homo sapiens
ASGTTFSSYWMHWVRQAPGKGLVWVSHINSDGSSKTYADSVKGRFTISRDNAKNTLYLQMHSLRVEDTAIYYCARSIGGFDSWGQGTLVTVSS

SEQ ID NO: 21381 - protein, 93 aa, Homo sapiens
ASGATFSDYWMHWVRQAPGKGLVWVSYITGDGSSASYADSVKGRFTISRDNAKNTLYLQMNSLRAEDTAVYYCARSIGGFDSWGQGSLVTVSS

SEQ ID NO: 21382 - protein, 96 aa, Homo sapiens
AASGFTFSRYWMSWVRQGPDKGLEFVGNINQDASSKNYVDSVKGRFTISRDNAKNTLHLQMNSLRVEDTAVYYCARDPDSSAFDMWGQGTMVTVSS

SEQ ID NO: 21383 - protein, 96 aa, Homo sapiens
ATSGFTFSRYWMSWVRQGPDKGLEFVGNINQDASSKNYVDSVKGRFTISRDNAKNTLHLQMNSLRVEDTAVYYCARDPDSSAFDMWGQGTMVTVSS

SEQ ID NO: 21384 - protein, 96 aa, Homo sapiens; identical to SEQ ID NO: 21382

SEQ ID NO: 21385 - protein, 96 aa, Homo sapiens; identical to SEQ ID NO: 21382

SEQ ID NO: 21386 - protein, 96 aa, Homo sapiens; identical to SEQ ID NO: 21382

SEQ ID NO: 21387 - protein, 96 aa, Homo sapiens
VASGFSFSSYWMSWVRQTPGQGLEFVANINQDGSVKNYQDSVKGRFTISRDNAKNSLYLQMNSLRVEDAAVYYCARDPDSSAFDMWGQGTMVTVSS

SEQ ID NO: 21388 - protein, 97 aa, Homo sapiens
SGYTFTGYYIQWVRQAPGQGLEWMAWTNPISGKTQYAQKFQGKVTMTRDTSISTAYMELSTLTSDDTAVYYCARSPMVRGAGGMDVWGQGTTVTVSS

SEQ ID NO: 21389 - protein, 97 aa, Homo sapiens
SGYTFTSYYIQWVRQAPGQGLEWMAWTNPISGKTQYAQKFQGKVTMTRDTSISTAYMELSTLTSDDTAVYYCARSPMVRGAGGMDVWGQGTTVTVSS

SEQ ID NO: 21390 - protein, 97 aa, Homo sapiens; identical to SEQ ID NO: 21388

SEQ ID NO: 21391 - protein, 98 aa, Homo sapiens
ASGYTFTGYYMHWVRQAPGQGLEWLGWINPKSGGTNYAQKFQGRVDMTMDTSISTVYMELSRLTFDDTALYYCARSPMVRGAGGMDVWGQGTTVTVSS

SEQ ID NO: 21392 - protein, 94 aa, Homo sapiens
ASGYTLTTYYMHWVRQAPGQGLEWMGWIDPNSGGTNYAQRFQGRVTMTSDTSVSTASMDLSSLRSDDTAVYYCARMVAGGMDVWGQGTTVTVSS

SEQ ID NO: 21393 - protein, 94 aa, Homo sapiens; identical to SEQ ID NO: 21392

SEQ ID NO: 21394 - protein, 94 aa, Homo sapiens
ASGYTLTTYYLHWVRQAPGQGLEWVGWIDPNSGGTNYAQRFQGRVTMTSDTSVSTASMDLSSLRSDDTAVYYCARMVAGGMDVWGQGTTVTVSS

SEQ ID NO: 21395 - protein, 94 aa, Homo sapiens; identical to SEQ ID NO: 21392

SEQ ID NO: 21396 - protein, 94 aa, Homo sapiens
ASGYTLTTYYMHWVRQAPGQGLEWMGWIDPNSGRTNYAQRFQGRVTMTSDTSVSTASMDLNSLRSDDTAVYYCARMVAGGMDVWGQGTTVTVSS

SEQ ID NO: 21397 - protein, 94 aa, Homo sapiens
ASGYTLTTYYLHWVRQAPGQGLEWMGWIDPSSGATKYAQRFQGRVTMTSDTSVSTASMDLSSLRSDDTAVYYCARMVAGGMDVWGQGTTVTVSS

SEQ ID NO: 21398 - protein, 94 aa, Homo sapiens; identical to SEQ ID NO: 21392

SEQ ID NO: 21399 - protein, 94 aa, Homo sapiens
ASGYTLTTYYLHWVRQAPGRGLEWMGWIDPSSGATKYAQRFQGRVTMTSDTSVSTASMDLSSLRSDDTAVYYCARMVAGGMDVWGQGTTVTVSS

SEQ ID NO: 21400 - protein, 93 aa, Homo sapiens
SRYAITDHYMHWVRQAPGQGLEWMGWINPTNGGTKYAQKFQGRVTMTRDTSINTAYMELSSLRSDDTAVYFCARMVAGGMDVWGQGTTVTVSS

SEQ ID NO: 21401 - protein, 94 aa, Homo sapiens
ASGYILTTYYMHWVRQAPGQGLEWMGWIDPKSGGTNYAQRFQDRVTMTSDTSVSTVSMDLSSLRSDDTAVYYCARMVAGGMDVWGQGTTVTVSS

SEQ ID NO: 21402 - protein, 94 aa, Homo sapiens
ASGYTLTTYYMHWVRQAPGQGLEWMGWIDPNSGGTNYAQRFQGRVTMTSDTSVSTASMDLSSLRSDDTAVYYCARMVAGGMDVGGQGTTVTVSS

SEQ ID NO: 21403 - protein, 94 aa, Homo sapiens
ASGYTLSTYYMHWVRQAPGQGLEWMGWIDPKSGDTNYAQRFQGRVSMTSDTSVSTASMDLSSLRSDDTAVYYCARMVAGGMDVWGQGTTVTVSS

SEQ ID NO: 21404 - protein, 101 aa, Homo sapiens
AASGFTFSSYAMSWVRQAPGKGLEWVSTISASAGDTFYADSVKGRFTISRDNSKNTVYLQMNSLRAEDTSVYYCAKRGYHDTSAYYYFDCWGQGTLVTVSS

SEQ ID NO: 21405 - protein, 100 aa, Homo sapiens
AASGFTFDSYAMTWVRQAPGKGLEWVATVAAGGTTFYADSVKGRFTISRDNSKSMVHLEMNGLRVEDTAVYYCAKRGYHDTSAYYYFDCWGQGTLVTVSS

SEQ ID NO: 21406 - protein, 96 aa, Homo sapiens
AASGFTFTNYAMSWVRQAPGKGLEWVSAISTSGDATFYADSVKGRFTISRDNFKNTLYLRMNNLRAEDTAIYYGLVVPDPYGMDVWGQGTTVTVSS

SEQ ID NO: 21407 - protein, 96 aa, Homo sapiens
AASGFTFSDYSMSWVRQAPGKGLEWVSAISASGDGTFYADSVKGRFTISRDNSENTLSLQMNSLRAEDTAIYYSLVVPDPYGMDVWGQGTTVTVSS

SEQ ID NO: 21408 - protein, 96 aa, Homo sapiens
AASGFTFSNYAMSWVRQAPGKGLEWVSAISVSGDSTFYADSVKGRFTISRDNSKNTLHLQMNSLRAEDTAIYYSLVVPDPYGMDVWGQGTTVTVSS

SEQ ID NO: 21409 - protein, 96 aa, Homo sapiens
AASGFTFSNFAMSWVRQAPGKGLEWVSAIGVSGDNTFYADSVRGHFTISRDNSKNTVHLQMNSLRAEDTAIYYCLVVPDPYGMDVWGQGTTVTVSS

SEQ ID NO: 21410 - protein, 96 aa, Homo sapiens
AASGFTFATYSMSWVRQAPGKGLEWVSAISATNGATYYADSVKGRFTISRDNSRNMLWLQMNSLRADDTAIYYSLVVPDPYGMDVWGHGTAVTVSS

SEQ ID NO: 21411 - protein, 95 aa, Homo sapiens
AASGFTFSDFCMSWVRQAPGRGLEWVSAIGVRGTTFYADSVKGRFSISRDNSRNTVYLQMNSLRAEDTAIYYSLVVPDPYGMDVWGQGTTVTVSS

SEQ ID NO: 21412 - protein, 95 aa, Homo sapiens
ETSGFTFSDYSMSWVRQAPGRGLEWVSAISTSGDATFYADSVKGRFIISRDNSRNTLHLQMNSLRAEDTAIYYSLVVPDPYGMDVWGQGTTVTVS

SEQ ID NO: 21413 - protein, 96 aa, Homo sapiens
AASGFTFSNFAMSWVRQAPGKGLEWVSAISTSGDATFYADSVKGRFTISRDNSKNTLYLRMNNLRAEDTAVYYGLVVPDPYGMDVWGQGTTVTVSS

SEQ ID NO: 21414 - protein, 96 aa, Homo sapiens
AASGFTFTNYAMSWVRQAPGKGLEWVSAISTSGDATFYADSVKGRFTISRDNSKNTLYLRMNSLRAEDTAVYYGLVVPDPYGMDVWGQGTTVTVSS

SEQ ID NO: 21415 - protein, 96 aa, Homo sapiens
AASGFTFSSYSMSWVRQAPGKGLEWVSAISVSGDSTFYADSVKGRFIISRDNSKNTLHLQMNSLRAEDTAIYYSLVVPDPYGMDVWGQGTTVTVSS

SEQ ID NO: 21416 - protein, 95 aa, Homo sapiens
AASGFTFSNFAMSWVRQAPGRGLEWVSAIGVRGSTFYADSVKGRFTISRDNSKNTVHLQINSLRAEDTAVYYCLVVPDPYGMDVWGQGTTVTVSS

SEQ ID NO: 21417 - protein, 96 aa, Homo sapiens; identical to SEQ ID NO: 21407

SEQ ID NO: 21418 - protein, 99 aa, Homo sapiens
AASGFTFSRHAMHWVRQAPGKGLEWVAQVWPDDTNKYYADSVEGRFTISRDNSRSTHYLQMNFLRAEDTAVYYCARDGQSGAPYGMDVWGQGTTVTVSS

SEQ ID NO: 21419 - protein, 99 aa, Homo sapiens
AASGFTFTGHAMHWVRQAPGKGLEWVAQIWSGGSNEYYADSVRGRFTISRDNSKTTAYLQMNSLRAEDTAVYYCARDGQSGAPYGMDVWGQGTTVTVSS

SEQ ID NO: 21420 - protein, 99 aa, Homo sapiens
AASGFIFGGHAMHWVRQAPGKGLEWVAQIWSDGSNKYYVDSVEGRFTISRDNSKNTLYLQIYSLRAEDTAIYYCARDGQSGAPYGMDVWGQGTTVTVSS

SEQ ID NO: 21421 - protein, 99 aa, Homo sapiens
AASGFTFSRHAMHWVRQAPGKGLEWVAQIWPDVSNKYYADSVRGRFTISRDNFKTTVYLEMNTMRAEDTAVYYCARDGQSGAPYGMDVWGQGTTVTVSS

SEQ ID NO: 21422 - protein, 99 aa, Homo sapiens
TVPGGSISSSSYYWGWIRQPPGKGLEWIGSISSSGSTSYNPSLKSRVTISVDTTKSRLSLKLSSVTAADTAVYYCASPNSGRMYYFDYWGQGTLVTVSS

SEQ ID NO: 21423 - protein, 99 aa, Homo sapiens
TVPGGSISSSSYYWGWIRQPPGKGLEWIGSISSRGSTSYNPSLKSRVTISVDTSKSRLSLKLSSVTAADTAVYYCASPNSGRMYYFDYWGQGTLVTVSS

SEQ ID NO: 21424 - protein, 99 aa, Homo sapiens
TVPGGSISSSSYYWGWIRQPPGKGLEWIGSISSSGSTSYNPSLKSRVTISVDTSKSRLSLKLSSVTAADTAVYYCASPNSGRMYYFDYWGQGTLVTVSS

SEQ ID NO: 21425 - protein, 99 aa, Homo sapiens
TVPGGSISSSSYYWGWIRQPPGKGLEWIGSISSSGSTSYNPSLKSRVIISVDTSKSRLSLKLSSVTAADTAVYYCASPNSGRMYYFDYWGQGTLVTVSS

SEQ ID NO: 21426 - protein, 99 aa, Homo sapiens
TVFGGSISSSRYYWGWVRQSPGKGLEWIGSMDYSGNTDYNPSLKSRVTIFLDRAKNQFSLRLTSVTAADTAMYYCASPNSGRMYYFDYWVQGTLVTVSS

SEQ ID NO: 21427 - protein, 94 aa, Homo sapiens
GPSGFTFIRYWMSWVRQAPGKGLEWVANINQDGSEKYYVDSVKGRFTISRDNAKNSLYLQMNSLRAEDTAVYYCVRLAEYFQNWGQGTLVTVSS

SEQ ID NO: 21428 - protein, 94 aa, Homo sapiens
VASGFTFSRYWMSWVRQAPGKGLEWVANIKHDGSEEDYVDSVKGRFTLSRDSAKNSLYLQMNSLRVEDTAIYYCVRLAEYFQNWGQGTLVTVSS

SEQ ID NO: 21429 - protein, 94 aa, Homo sapiens
AASGFTFSRYWMSWVRQAPGKGLEWVANINQDGSEKYYVDSVKGRFTISRDNAKNSLYLQMNSLRAEDTAVYYCVRLAEYFQNWGQGTLVTVSS

SEQ ID NO: 21430 - protein, 94 aa, Homo sapiens
AASGFTFCRYWMSWVRQAPGKGLEWVANINQDGSEKYYVDSVKGRFTISRDNAKNSLYLQMNSLRAEDTAVYYCVRLAEYFQNWGQGTLVTVSS

SEQ ID NO: 21431 - protein, 94 aa, Homo sapiens
AATGFVFSRYWMSWVRQAPGKGLEWVANLKYDGSDKQYVDSVKGRFTISRDNAKNSVYLQMNSLRAEDTAVYFCVRLAEYFQNWGQGTLVTVSS

SEQ ID NO: 21432 - protein, 94 aa, Homo sapiens
AASGFVFSRYWMSWVRQAPGKGLEWVANLKYDGSEKHYVASVKGRFTISRDNAKNSLYLQMNSLRAEDTAVYFCVRLAEYFQNWGQGTLVTVSS

SEQ ID NO: 21433 - protein, 94 aa, Homo sapiens
VASGFTFSRYWMSWVRQAPGKGLEWVANIKQDGSEKYYVDSVKGRFTISKDNAKHSLYLQMNSLRAEDTAVYYCVRLAEYFQNWGQGTLVTVSS

SEQ ID NO: 21434 - protein, 94 aa, Homo sapiens
GPSGFTFFRYWMSWVRQAPGKGLEWVANINQDGSEKYYVDSVKGRFTISRDNAKNSLYLQMNSLRAEDTAVYYCVRLAEYFQNWGQGTLVTVSS

SEQ ID NO: 21435 - protein, 94 aa, Homo sapiens
AATGFVFSRYWMSWVRQAPGKGLEWVANLKYDGSEKHYVDSVKGRFTISRDNAKNSVYLQMNSLRAEDTAVYFCVRLAEYFQNWGQGTLVTVSS

SEQ ID NO: 21436 - protein, 94 aa, Homo sapiens
AASGFTFSRFWMSWVRQAPGKGLEWVANINQDGSEKYYVDSVKGRFTLSRDNAKNSLYLQMNSLRAEDTAVYYCVRLAEYFQNWGQGTLVTVSS

SEQ ID NO: 21437 - protein, 94 aa, Homo sapiens
AASGFTFSRYWMSWVRQAPGKGLEWVANIKQDGSDKYYVDSVKGRVTISRDNAKNSLYLQMNSLRAEDTAVYYCVRLAEYFQNWGQGTLVTVSS

SEQ ID NO: 21438 - protein, 94 aa, Homo sapiens
VASGFTFSRYWMSWVRQAPGKGLEWVANIKYDGSEKYYVDSVKGRFSVSKDNAKNSLYLQMNSLRAEDTAVYYCVRLAEYFQNWGQGTLVTVSS

SEQ ID NO: 21439 - protein, 94 aa, Homo sapiens; identical to SEQ ID NO: 21438

SEQ ID NO: 21440 - protein, 101 aa, Homo sapiens
TVSGFEFSAYAMSWVRQAPGKGLEWVGFIRSKSYGATRDYAPSVKGRFIISRNDSESIAYLQMNSLKTDDTGVYYCTRDRRGSGTHFFDYWGQGTLVTVSS

SEQ ID NO: 21441 - protein, 101 aa, Homo sapiens; identical to SEQ ID NO: 21440

SEQ ID NO: 21442 - protein, 101 aa, Homo sapiens
TVSGFEFAAYALSWVRQAPGKGLEWVGFIRSKSYGGTTDYTASVKGRFTISRDDSKSIAYLQMNSLKADDTGVYYCTRDRRGSGTHFFDYWGQGTLVSVSS

SEQ ID NO: 21443 - protein, 101 aa, Homo sapiens
TASGFEFDAYAISWVRQAPGKGLEWVGVIRIKRSGATADYAASVKGRFVISRDDSKRIAYLQMNSLKEDDTGVYYCTRDRRGSGTHFFDYWGQGALVSVSS

SEQ ID NO: 21444 - protein, 95 aa, Homo sapiens
AASGFNFNGNWMGWVRQAAGKGPEWVGNIKPDGTEKYYVGSVKGRFTISRDNAKNSLFLQLDSLRAEDTAVYYCVKGGTMDLDYWGQGTLVTVSS

SEQ ID NO: 21445 - protein, 95 aa, Homo sapiens
AASGFTFNGYWMGWVRQAPGKGLEWVANIKPDGTEKYYVDSVKGRFTISRDNAKNSLFLQVDSLRAEDTAVYYCVKGGTMDLDYWGQGTLVTVSS

SEQ ID NO: 21446 - protein, 95 aa, Homo sapiens
AASGFTFNGNWMGWVRQLPGKGLEWVANIKPDGTQKFYVDSVKGRFSISRDNTRNSLFLQVDSLRVEDTAVYYCVKGGTMDLDYWGQGTLVTVSS

SEQ ID NO: 21447 - protein, 95 aa, Homo sapiens
VASGFTFRTYWVGWLRQAPEKGLEWVANIKPDGSEEYYGDSVKGRFSISRDNAQNSLYLQMNSLRAEDTAVYYCVKGGTMDLDYWGQGTLVTVSS

SEQ ID NO: 21448 - protein, 85 aa, Homo sapiens
WMNWVRQAPGRGLEWVAIIKEDGSEKLYVDSVKGRFTISRDNAKTSLYLEMDRLRVEDTAVYYCAGGSGWRIDSWGQGTLVTVSS

SEQ ID NO: 21449 - protein, 85 aa, Homo sapiens; identical to SEQ ID NO: 21448

SEQ ID NO: 21450 - protein, 95 aa, Homo sapiens
AASGFNFSTYWMNWVRQAPGKGLEWVAIIRQDGAWTSYVDSVKGRSTISRDNAHNSLFLQLNSLRAEDTAVYYCAGGSGWRIDSWGQGTLVTVSS

SEQ ID NO: 21451 - protein, 92 aa, Homo sapiens
AASGFDFRTNWMHWVRQVPGKGLVWVSRINGDGTMSTNADSVKGRFTISRDNARNTLYLQMNGLRGEDTAVYYCAKGMGDSWGQGTLVAVSS

SEQ ID NO: 21452 - protein, 92 aa, Homo sapiens
AASGFTFSTSWMHWVRQVPGKGLVWVARINRDGTLSTCADSVKGRFSISRDNTKNTLYLQMNSLRATDTAIYYCAKGMGDSWGQGTLVTVSS

SEQ ID NO: 21453 - protein, 92 aa, Homo sapiens
AASGFDFRTNWMHWVRQVPGKGLVWVSRINGDGTMSTNAGSVRGRFTISRDNARNTLYLQMNGLRAEDTAVYYCAKGMGDSWGQGTLVAVSS

SEQ ID NO: 21454 - protein, 92 aa, Homo sapiens
AASGFTFSSYWMHWVRQVPGKGLVWVSRINSGGSITNYADSVKGRFTISRDNAKNTLYLQMNNLRAEDTALYYCAKGMGDSWGQGSLVTVSS

SEQ ID NO: 21455 - protein, 92 aa, Homo sapiens
AASGFTFSTSWMHWVRQVPGKGLVWVARINRDGTLSTCADSVKGRFSISRDNTKNTLYLQMNSLRATDTAMYYCAKGMGDSWGQGTLVTVSS

SEQ ID NO: 21456 - protein, 92 aa, Homo sapiens
AASGFDFRTNWMHWVRQVPGKGLVWVSRINGDGTMSTNADSVKGRFTISRDNARNTLYLQMNGLRVEDTAVYYCAKGMGDSWGQGTLVAVSS

SEQ ID NO: 21457 - protein, 96 aa, Homo sapiens
AASGFSFSDYAMTWVRQAPGKGLEWVSAMNSYASTTFYADSVKGRFTISSDNAKNTLYLQMNSLRADDTAVYYCAKYSSRWYEDYWGQGTLVTVSS

SEQ ID NO: 21458 - protein, 96 aa, Homo sapiens
AASGFTFSTYAMTWVRQAPGKGLEWVSAISNTIGFTFHADSVKGRFSISRDNSKNIVYLQMNSLRAEDTAVYYCAKYSSRWYEDYWGQGTLVTVSS

SEQ ID NO: 21459 - protein, 104 aa, Homo sapiens
TQTLTLTCSFSGFSLNSPAVGVAWIRQPPGRALEWLALVYWNDDTVYSPSLRTRLTITKDTSRNQVVLTMVNMEPVDTATYYCAHTAGWLPDSWGQGTLVTVSS

SEQ ID NO: 21460 - protein, 104 aa, Homo sapiens; identical to SEQ ID NO: 21459

SEQ ID NO: 21461 - protein, 104 aa, Homo sapiens
TQTLTLTCAFSGFSLSSYAVGVGWIRQPPGKAPEWLALIYWDDDKRYSPSLETRLTITKDTSRNQVVLTMTNMDPIDTGTYYCAHTAGWLPDSWGQGTLVTVSS

SEQ ID NO: 21462 - protein, 96 aa, Homo sapiens
AASGFTFSNAWMNWVRQAPGKGLEWVGRIRSKADGGTTDYAAPVRGRFTISRDDSKDTLYLQMNSLNIEDTAVYYCATQGGFLDFWGQGTLVTVSS

SEQ ID NO: 21463 - protein, 96 aa, Homo sapiens; identical to SEQ ID NO: 21462

SEQ ID NO: 21464 - protein, 96 aa, Homo sapiens; identical to SEQ ID NO: 21462

SEQ ID NO: 21465 - protein, 96 aa, Homo sapiens
AASGFTFSNVWMTWVRQTPGKGLEWVGRIKSKVDGGTTDYAAFVKDRFTISRDDSKTTLYLQMNSLKTEDTAVYYCATQGGFLDFWGQGVLVTVSS

SEQ ID NO: 21466 - protein, 96 aa, Homo sapiens
AASGFTFSNVWMTWVRQTPGKGLEWVGRIKSKVDGGTTDYAAFVKDRFTISRDDSKATVFLQMSSLKSEDTALYYCATQGGFLDFWGQGVLVTVSS

SEQ ID NO: 21467 - protein, 96 aa, Homo sapiens
EASGFTFRNVWISWVRQAPGKGLEWVGRIKSKADGGTADYAAPVKGRFTISRDDSKKTLYLQMNNLKSEDTAVYYCATQGGFLDFWGQGTLVTVSS

SEQ ID NO: 21468 - protein, 96 aa, Homo sapiens
AASGFTFSTSWMYWVRQAPGKGLVWLSHIKGDDRGTTYADSVKGRFTISRDNTKNTLYLQMDSLRVEDTAMYYCARDLAHAAFDLWGQGTMVTVSS

SEQ ID NO: 21469 - protein, 96 aa, Homo sapiens
AASGFTFSNYWMYWVRQAPGKGLVWLSHIQSDDKRTTYADSVKGRFTMSRDNAKNTLYLQMDGLRVDDTAIYYCARDLAHAAFDLWGQGTMVTVSS

SEQ ID NO: 21470 - protein, 96 aa, Homo sapiens
VASGFTFSDRWMYWVRQAPGKGLVWLSHIQNDDSSTIYADSVKGRFTISRDNAKNTLYLQMNSLRVEDTAMYYCARDLAHAAFDLWGQGTMVTVSS

SEQ ID NO: 21471 - protein, 94 aa, Homo sapiens
AASGFTFRNYWMSWVRQAPGRGLEWVANIKYDGSEKYYVDSVKGRFTISRDNAKNSLYLQMNSLRAEDTAVYHCVRLAEYFQDWGQGTLVTVSS

SEQ ID NO: 21472 - protein, 93 aa, Homo sapiens
TSGFTFIRYWMSWVRQAPGRGLEWVANINQDGSDKYYVDSVNGRFTISRDNAKNSLYLQMNSLRADDRAVYYCVRLAEYFQDWGQGTLVTVSS

SEQ ID NO: 21473 - protein, 94 aa, Homo sapiens
AASGFTFSRYWMSWVRQAPGKGLEWVANINQDGSDKYYVDSVKGRCIISRDNAKNSLYLQMNSLRAADTAVYYCVRLAEYFQDWGQGTLVTVSS

SEQ ID NO: 21474 - protein, 94 aa, Homo sapiens
AASRFTFSRYWMSWVRQAPGKGLEWVANIKQDGSDKYYVDSVKGRFTISRDNAKNSLYLQMNSLRAEDTAVYYCVRLAEYFQDWGQGTLVTVSS

SEQ ID NO: 21475 - protein, 94 aa, Homo sapiens
VASGFSFNRYWMSWVRQAPGRGLEWVANIKYDGSEERYVDAVKGRFTISRDNAKNSLYLQMNSLRAEDTGVYYCVRLAEYFQDWGQGTLVTVSS

SEQ ID NO: 21476 - protein, 93 aa, Homo sapiens
TSGFTFIRYWMSWVRQAPGRGLEWVANINQDGSDKYYADSVNGRFTISRDNAKNSLYLQMNSLRADDRAVYYCVRLAEYFQDWGQGTLVTVSS

SEQ ID NO: 21477 - protein, 94 aa, Homo sapiens; identical to SEQ ID NO: 21474

SEQ ID NO: 21478 - protein, 94 aa, Homo sapiens
AASGLSFSSYWMTWVRQAPGKGLEWVANIKHGGSEKYYVDSVRGRFTISRDDAKNSVYLQMNSLRDEDTAVYYCATGRIGRDYWGQGTLVAVSS

SEQ ID NO: 21479 - protein, 94 aa, Homo sapiens
AASGFSITNYWMTWVRQAPGKGLEWVANIKHGGGEKYYVDSVKGRFTISRDDAKNSVYLQMNSLTDEDTAVYYCATGRIGRDYWGQGTLVAVSS

SEQ ID NO: 21480 - protein, 94 aa, Homo sapiens; identical to SEQ ID NO: 21478

SEQ ID NO: 21481 - protein, 94 aa, Homo sapiens
AASGFTFRNYWMTWVRQAPGKGLEWVANIKMAGSEKYYVDSVKGRFTISRDDAQNSVFLQMNSLRVEDTAVYYCATGRIGRDYWGQGTLVTVSS

SEQ ID NO: 21482 - protein, 94 aa, Homo sapiens
AASGFTFRNYWMTWVRQAPGKGLEWVANIKMAGSEKCYVDSVKGRFTISRDDAQNSVFLQMNSLRVEDTAVYYCATGRIGRDYWGQGTLVTVSS

SEQ ID NO: 21483 - protein, 100 aa, Homo sapiens
AASGFPFSDYYLSWIRQAPGKGLEWVSYIGSSGTIYYGDSVKGRFTISRDNAKNSLYLQMNSLRAEDTAVYYCARGFDCSSTSCYAFDIWGQGTMVTVSS

SEQ ID NO: 21484 - protein, 100 aa, Homo sapiens
AASGFPFSDYYLSWIRQAPGKGLEWVSYIGSSGAIYYGDSVRGRFTISRDNAKNSLYLQMNSLRAEDTAVYYCARGFDCSSTSCYAFDIWGRGTMVTVSS

SEQ ID NO: 21485 - protein, 101 aa, Homo sapiens
AASGFTFTDYYMSWIRQAPGKGLEWVSYISTSGSTMYNEDSVKGRFTISRDNAKNVLYLQMNSLRVEDTAVYYCARGFDCSSTSCYAFDIWGQGTMVTVSS

SEQ ID NO: 21486 - protein, 93 aa, Homo sapiens
TVSGGSISNYYWSWIRQPPGKGLEWIGCIYSSGSTNYNPSLKSRVTVSEDTSKNQVFLKLTSVTAADTAVYYCARGRGWSDYWGQGTLVTVSS

SEQ ID NO: 21487 - protein, 95 aa, Homo sapiens
SVSGVSINNWFWSWIRQPPGKGLEWIASVDNSGSTNYNYNPSLQSRLAISRDTSKNQLSLNLSSVTAADTAVYYCARGRGWSDYWGQGTLVIVSS

SEQ ID NO: 21488 - protein, 101 aa, Homo sapiens
AASGFTFSGYYMSWIRQAPGEGLQWVSYIGGSGTTIYYADSAKGRFTISRDNARNSLYLQMNSLGAEDTAVYYCARGFDCSTTSCYAFDLWGQGTMVTVSS

SEQ ID NO: 21489 - protein, 101 aa, Homo sapiens
AASGFTFSGYYMSWIRQAPGEGLQWVSYIGGSGTTIYYADSAKGRFTISRDNARNSLYLQMHSLGAEDTAVYYCARGFDCSTTSCYAFDLWGQGTMVTVSS

SEQ ID NO: 21490 - protein, 102 aa, Homo sapiens
AASGFTFSDYYMSWIRQAPGKGLEWVSYISSSSGSDIYYADSVKGRFTISRDNAKNSLYLQMNSLRAEDTAVYYCARGFDCSTTSCYAFDLWGQGTMVTVSS

SEQ ID NO: 21491 - protein, 102 aa, Homo sapiens
AASGFTFSDYYMSWIRQAPGKGLEWVSYISSGGGSIIYYGDSVKGRFTISRDNAKNSLYLQMNSLRAEDTAVYYCARGFDCSTTSCYAFDLWGQGTMVPVSS

SEQ ID NO: 21492 - protein, 101 aa, Homo sapiens
AASGFPLSDYYMSWIRQAPGKGLEWVSYIGGSGITIYYADSVKGRFTISRDNAQNSLYLQMNSLRAEDTALYYCARGFDCSTTSCYAFDLWGQGTMVTVSS

SEQ ID NO: 21493 - protein, 101 aa, Homo sapiens
AASGFTFSDYYMSWVRLAPGKGLEWVSYIGGGGSSIYYGDSVKGRFTISRDNAKKSVYLQMNSLTVEDTAVYYCARGFDCSTTSCYAFDLWGQGTMVTVSS

SEQ ID NO: 21494 - protein, 101 aa, Homo sapiens
AASGFPLSDYYMSWIRQAPGKGLQWVSYVSDSGTTMHYADSVKGRFTISRDNARNSLYLQMNSLRVEDTAVYYCARGFDCSTTSCYAFDLWGQGTMVTVSS

SEQ ID NO: 21495 - protein, 101 aa, Homo sapiens
AASGFSISDYYMSWVRQAPGKGLQWVSYISGSGTTIYYADSVKGRFTISRDNARNSLYLQMNSLGADDTALYYCARGFDCSTTSCYAFDLWGQGTMVTVSS

SEQ ID NO: 21496 - protein, 101 aa, Homo sapiens
AASGFSVSDYYMSWIRQAPGKGLEWVSYVSDSGSILYYGDSVKGRCTISRDTAKNSVYLQMNSLGAEDTAMYYCARGFDCSTTSCYAFDLWGQGTMVTVSS

SEQ ID NO: 21497 - protein, 101 aa, Homo sapiens
AASGFTFSVYYMSWIRQAPGKGLQWVSYISGSGTSIYYADSVKGRFTISRDNARNSLYLQMNSLGAEDSAIYYCARGFDCSTTSCYAFDLWGQGTMVTVSS

SEQ ID NO: 21498 - protein, 101 aa, Homo sapiens
AASGFTFSDYYMSWIRQAPGKGLQWVSYISGSATTIYYADSVKGRFTISRDNARNSLYLQMNSLGAEDTAVYYCARGFDCSTTSCYAFDLWGQGTMVTVSS

SEQ ID NO: 21499 - protein, 101 aa, Homo sapiens
AASGFRVSDYYMSWIRQAPGKGLEWVSYISDSGSILYYGDSVKGRCTISRDTAKNSLYLQMNSLGVEDTAMYYCARGFDCSTTSCYAFDLWGQGTMVTVSS

SEQ ID NO: 21500 - protein, 101 aa, Homo sapiens; identical to SEQ ID NO: 21499

SEQ ID NO: 21501 - protein, 101 aa, Homo sapiens
AASGFTFSDYYMSWIRQAPGKGLQWVSYISGSGSTIYYADSVKGRFTISRDNARNSLYLQMNSLGADDTAVYYCARGFDCSTTSCYAFDLWGQGTMVTVSS

SEQ ID NO: 21502 - protein, 103 aa, Homo sapiens
AASRFTFTFSDYYMSWIRQAPGKGLQWISYIDGSGSTIYYADSVKGRFTISRDNARNSLYLQMNSLGADDTAVYYCARGFDCSTTSCYAFDLWGQGTMVTVSS

SEQ ID NO: 21503 - protein, 101 aa, Homo sapiens
AASGFTTSGYYMSWIRQAPGKGLQWVSYISGSGDIIYYADSVRGRFTISRDNARNSLSLEMNSLGAEDTALYYCARGFDCSTTSCYAFDLWGQGTRVTVSS

SEQ ID NO: 21504 - protein, 101 aa, Homo sapiens
VASGFSISDYYMSWVRQAPGKGLQWVSYISGSGTTIYYADSVKGRFTISRDNARNSLYLQMNSLGADDTALYYCARGFDCSTTSCYAFDLWGQGTMVTVSS

SEQ ID NO: 21505 - protein, 101 aa, Homo sapiens
AASGFSVSDYYMSWIRQAPGKGLEWVSYVSNSGSILYYGDSVKGRCTISRGTAKNSVFLQMNSLGAEDTAMYYCARGFDCSTTSCYAFDLWGQGTMVTVSS

SEQ ID NO: 21506 - protein, 102 aa, Homo sapiens
AASGFTFSDYYMTWIRQAPGKGLEWVSYISGSGIITIYYADSVKGRFTISRDNAQNSLYLQMNSLRAEDTALYYCARGFDCSTTSCYAFDLWGQGTMVTVSS

SEQ ID NO: 21507 - protein, 101 aa, Homo sapiens
AASGFTFSDYYMSWVRLAPGKGLEWVSYISGGGSTIYYGDSVKGRFTISRDNAKKSLYLQMNSLRVEDTAVYYCARGFDCSTTSCYAFDLWGQGTMVTVSS

SEQ ID NO: 21508 - protein, 101 aa, Homo sapiens
AASGFSVTDYYVSWIRQAPGKGLEWVSYISDSGDILYYGDSVKGRCTISRDTAKNSLYLQMNSLGADDTAMYYCARGFDCSTTSCYAFDLWGQGTMVTVSS

SEQ ID NO: 21509 - protein, 100 aa, Homo sapiens
AASGFPFSDYYLSWIRQAPGKGLEWVSYIGSSGTIYYGDSVKGRFTISRDNAKNSLYLQMNSLRAEDTAVYYCARGFDCSTTSCYAFDLWGQGTMVTVSS

SEQ ID NO: 21510 - protein, 101 aa, Homo sapiens
AASGFTLSDYYMSWIRQAPGKGLQWVSYISGSGRTIYYADSVKGRFTISRDNARNSVSLQMNSLGAEDTAVYYCARGFDCSTTSCYAFDLWGQGTMVTVSS

SEQ ID NO: 21511 - protein, 101 aa, Homo sapiens
AASGFTSSDYYMSWIRQAPGKGLQWVSYISGSGGRIYYADSVKGRFTISRDNARNSLYLQMNSLGAEDTAVYYCARGFDCSTTSCYAFDLWGQGTMVTVSS

SEQ ID NO: 21512 - protein, 101 aa, Homo sapiens
AASGFSVSDYYMSWIRQAPGKGLEWVSYVSNSGSILYYGDSVKGRCTISRGTAKNSVYLQMNSLGAEDTAMYYCARGFDCSTTSCYAFDLWGQGTMVTVSS

SEQ ID NO: 21513 - protein, 101 aa, Homo sapiens
AASGFRISDYYMSWIRQAPGKGLEWVSYISDSGSILYYGDSVKGRCTISRDTAKNSVFLQMNSLGVEDTAMYYCARGFDCSTTSCYAFDLWGQGTVVTVSS

SEQ ID NO: 21514 - protein, 101 aa, Homo sapiens
AASGFTFSGYYMSWIRQAPGKGLEWVSYISNGGGTIYYGDSVRGRFTISRDNAKNSLYLQMNSLRAEDTAVYYCARGFDCSTTSCYAFDLWGQGTMVTVSS

SEQ ID NO: 21515 - protein, 101 aa, Homo sapiens
AASGFTISDYYMSWIRQAPGKGLQWVSYISGSATNIYSADSVKGRFTISRDNARNSLYLQMNSLGAEDTAVYYCARGFDCSTTSCYAFDLWGQGTMVTVSS

SEQ ID NO: 21516 - protein, 100 aa, Homo sapiens
AASGFTFSDYYMSWIRQAPGKGLEWISYISGSATTTYYADSVRGRFTIFRDNTRKSLYLQMNNLRAEDTAVYFCARGFDCSTTSCYAFDLWGQGTLVTVS

SEQ ID NO: 21517 - protein, 100 aa, Homo sapiens; identical to SEQ ID NO: 21516

SEQ ID NO: 21518 - protein, 94 aa, Homo sapiens
AASGFAFGRYWMHWLRQTPGRGLVWVSHINFDGTTTDYADSVRGRFTISRDNAKNTVYLQMTSLRVEDTATYYCARSTVLRGVHWGRGTAVTVS

SEQ ID NO: 21519 - protein, 94 aa, Homo sapiens
ASGFSVIKYWMHWVRQAPGKGPVWVSRINGDATTTNYADSVRGRFTISRDNGKNAVDLEMNSLRVEDTGVYYCARSTVLRGVHWGQGTLVIVSS

SEQ ID NO: 21520 - protein, 102 aa, Homo sapiens
AASGFTFSSYSMNWVRQAPGKGLEWVSYISSSSSTIYYADSVKGRFTISRDNAENSLYLQMNSLRDEDTAVYYCARDWRVEMATNYYGMDVWGQGTTVTVSS

SEQ ID NO: 21521 - protein, 101 aa, Homo sapiens
AVSGFTFSRYSMNWVRQAPGKGLEWVSYISSSSSTIYYADSVEGRFTISRDNAGNSLYLQMNSLRDEDTAVYYCARDWRVEMATNYYGMDVWGQGTTVTVS

SEQ ID NO: 21522 - protein, 102 aa, Homo sapiens
AASGFTFSTYSMNWVRQAPGKGLEWVSYISSSSRTIYYADSVKGRFTISRDNAKNSLNLQMNSLRDEDTAVYYCARDWRVEMATNYYGMDVWGQGTTVTVSS

SEQ ID NO: 21523 - protein, 94 aa, Homo sapiens
TVSGSSIKNHYWSWIRQPPGTGLEWIGYIHYSGTTNYNPSLRSRVTISVDTSETQFSLKLSSVTAADTAVYYCTRGPGWLPDYWGQGILVTVSS

SEQ ID NO: 21524 - protein, 93 aa, Homo sapiens
VSGSPISGLYWSWFRQPPGKTLEWIGYFHFSGTTNYNPSLQSRVTLSVDTSKNQFSLKLTSVTAADTAVYYCTRGPGWLPDYWGQGTLVSVSS

SEQ ID NO: 21525 - protein, 95 aa, Homo sapiens
TVSGDSISSYYWSWIRQPAGKGLEWIGRVYSSGSTNYNPSLKSRVTMSVDTSKNQFSLKLSSVTAADTAVYYCARGRIGSGLDVWGQGTTVTVSS

SEQ ID NO: 21526 - protein, 94 aa, Homo sapiens
VSSGSISSYYWSWIRQPAGQGLEWIGRIYTSGNTNYNPSLKSRVTMSVDTSKNQFSLKMNSVTAADTAIYFCARGRIGSGLDVWGQGTTVTISS

SEQ ID NO: 21527 - protein, 105 aa, Homo sapiens
AASGFTFSSYGMHWVRQAPGKGLEWVAVISYDGRNKFYSDSVKGRLTISRDNSKNTLYLEMNSLRGEDTAVYYCAKDQYYGSGSPYYDYYGMDVWGQGTTVTVSS

SEQ ID NO: 21528 - protein, 105 aa, Homo sapiens
AASGFTFSSYGMHWVRQAPGKGLEWVAVISYDGNNKYYADSVKGRFTISRDNSENTLFLQMNSLRAEDTAVYYCAKDQYYGSGSPYYDYYGMDVWGQGTTVTVSS

SEQ ID NO: 21529 - protein, 95 aa, Homo sapiens
ASGYIFNTYGISWVRQAPGQGLEWMGWTNTYKGDANYAQRFQGRVTMTTDTSTTTAYMELRSLRSDDTAVYYCARGGRTNAFDIWGQGTMVTVSS

SEQ ID NO: 21530 - protein, 95 aa, Homo sapiens
ASGYTFTSYGISWVRQAPGQGLEWVGWIGVYSGYTNYAQKFQGRVTMTTDTSTGTAYMELRSLISDDTAVFYCARGGRTNAFDIWGQGTMVTVSS

SEQ ID NO: 21531 - protein, 96 aa, Homo sapiens
AASGFTFSSYEMNWVRQAPGKGLEWVSYISGSGTTIYYADSVKGRFTISRDNAKNSLYLQMNSLRAEDTAVYYCARDSGWNYEDYWGQGTLVTVSS

SEQ ID NO: 21532 - protein, 96 aa, Homo sapiens
AASGFTFSSYSMNWVRQAPGKGLEWVSYIISSSSTIYYADSVKGRFTISRDNARNSLFLQMNSLRVEDTAVYYCARDSGWNYEDYWGQGTLVTVSS

SEQ ID NO: 21533 - protein, 101 aa, Homo sapiens
ASGFTFADHGLGWVRQAPGKGLEWIAFTRSYIYGGSPEYAASVRGRFTVSRDDSRSVAYLQMNSLRTEDTAIYYCGRGLTVTGAKYYFDSWGQGILVTVSS

SEQ ID NO: 21534 - protein, 102 aa, Homo sapiens
TTSGFTFADYGFSWVRQAPGKGLEWVAFARSKLYGGAPEYAASVKGRFTVSRDDSKSIAHLQMDSLKTDDTAVYYCGRGLTVTGAKYYFDSWGQGTLVTVSS

SEQ ID NO: 21535 - protein, 99 aa, Homo sapiens
SVSGGSISNYYWNWIRQPPGKGLEWIGYIYYSGSTSYNPSLKSRVTISVDTSKNQFSLKLSSVTAADTAVYYCARGGSNWYANNWFDPWGQGTLVTVSS

SEQ ID NO: 21536 - protein, 99 aa, Homo sapiens
TVSGGSISSYYWSWIRQPPGKGLEWIGYIYYSGSTNYNPSLKSRVTISVDTSKNQFSLKLTSVTAADTAIYYCARGGSNWYANNWFDPWGQGTLVTVSS

SEQ ID NO: 21537 - protein, 99 aa, Homo sapiens
TVSGGSISNYYWNWIRQPPGKGLEWIGYIYYSGSTSYNPSLKSRVTISVDTSKNQFSLKLSSVTAADTAVYYCARGGSNWYANNWFDPWGQGTLVTVSS

SEQ ID NO: 21538 - protein, 93 aa, Homo sapiens
AASGFTFSDYYMSWIRQAPGKGLEWVSYISSSGSTIYYADSVKGRFTISRDNAKNSLYLQMNSLRAEDTAVYYCAKGDWFDPWGQGTLVTVSS

SEQ ID NO: 21539 - protein, 93 aa, Homo sapiens
AASGFTFSDYNINWIRQAPGKGLEWISHINPNGNIRYYADSVRGRFTISRDNAKNSLYLQMNSLRAEDTAVYYCAKGDWFDPWGLGTLVTVSS

SEQ ID NO: 21540 - protein, 97 aa, Homo sapiens
AASGFTLRSYWMSWVRQAPGKGLEWVANIKEDGSETYYVDSVEGRFTISRDNAKNLLYLQMNSLRVEDTAVYYCARENVAVPAGDCWGQGTLVTVSS

SEQ ID NO: 21541 - protein, 97 aa, Homo sapiens
AASGFRISMYWMSWVRQTPGKGLEWVANIKPDGTEQYYADSLKGRFTISRDNAKNLVYLRMNSPRADDTALYYCARENVAVPAGDCWGQGALVTVSS

SEQ ID NO: 21542 - protein, 93 aa, Homo sapiens
AASGFTFSSYGIHWVRQAPGKGLEWVAIILKDGSNKFYADSVKGRFTISRDNSKNTLFLQMNSLRAEDTAIYYCVKGPDFDYWGPGTLVTVSS

SEQ ID NO: 21543 - protein, 93 aa, Homo sapiens
AASGFTFSTYGFHWVRQAPGKGLEWVAIILKDERNKFYADSVKGRFTISRDNSKNTIYLEMNSLRGDDTAVYYCVKGPDFDYWGQGTLVTVSS

SEQ ID NO: 21544 - protein, 93 aa, Homo sapiens
AASGFTFSSYGIHWVRQAPGKGLEWVAIILKDGSNKFYADSVKGRFTISRDNSKNTLFLQMNSLRAEDTAIYYCVKGPDFDYWDPGTLVTVSS

SEQ ID NO: 21545 - protein, 97 aa, Homo sapiens
ASGYTFTSYGISWVRQAPGQGLEWMGWISTHNGLTVYARSLQGRVTMTTDTSTSTAYMEVRSLRSDDTAVYYCVRDFSGGTDCFDPWGQGTLVTISS

SEQ ID NO: 21546 - protein, 96 aa, Homo sapiens
AFGYTFTDYGISWVRQAPGQGLEWMGWIRTYNGDTRFAQNVQDRVTLTTDTSTSTAYMELRTLRPDDTAVYYCVRDFSGGTDCFDPWGQGTLVFVS

SEQ ID NO: 21547 - protein, 103 aa, Homo sapiens
IASGFAFGDYAMTWVRQAPGKGLEWVGFIRSKAYGGTTEYAAPVKGRFSISRDDSKSIAYLQMNSLKTEDTAVYYCTPTYDSSGYYPYYFDSWGQGTLVTVSS

SEQ ID NO: 21548 - protein, 103 aa, Homo sapiens
TASGFSFADYAMTWVRQAPGKGLEWVGFIRSKPYGGTTQYAASVKGRFTISRDDSKSIAYLQMNSLKTEDTAVYYCTPTYDSSGYYPYYFDSWGQGTLVTVSS

SEQ ID NO: 21549 - protein, 93 aa, Homo sapiens
EASGFAFNTAWMSWVRQAPGKGLEWVGRIKTKTDGETTDYAAPVKGRFTISRDDSRNTLYLHMNNLKSEDTAVYYCTTGWQVWGQGTRVTVSS

SEQ ID NO: 21550 - protein, 93 aa, Homo sapiens
AASGFIFSNAWMSWVRQAPGKGLEWVGRIKSNADGGATDYATPVKGRFTISRDDSKTTLFLQMDSLKTEDTAMYYCTTGWQVWGQGTLVTVSS

SEQ ID NO: 21551 - protein, 99 aa, Homo sapiens
AASGFTFSSYWMIWVRQAPGKGLEWVANIKEDGSEKYYVDSVKGRFTISRDNAKNSLHLQMNSLRAEDTAVYYCARDLDGYNPGPFDYWGQGTLVTVSS

SEQ ID NO: 21552 - protein, 99 aa, Homo sapiens
AASGFSFSSYWMTWVRQSPVKGLEWVANIKEDGSEKYYVDSVKGRFTISRDNAKNSLYLQMNSLRAEETAVYYCARDLDGYNPGPFDYWGQGTLVTVSS

SEQ ID NO: 21553 - protein, 99 aa, Homo sapiens
AASGFSFSSYWMTWVRQSAGKGLEWVANIKEDGSEKYYVDSVKGRFTISRDNAKKTLYLQMNSLRAEETAVYYCARDLDGYNPGPFDYWGQGTLVTVSS

SEQ ID NO: 21554 - protein, 99 aa, Homo sapiens
AASGFSFSNYWMTWVRQSAGKGLEWVANIKEDGSEKYYVDSVKGRFTISRDNAKKTLYLQMNSLRAEETAVYYCARDLDGYNPGPFDYWGQGTLVTVSS

SEQ ID NO: 21555 - protein, 98 aa, Homo sapiens
AASGFILSNYWMCWVRQAPGKGLEWVANIKEDGSEKYSVDSVKGRFTISRDNAKNSLYLQMNSLRVEDTAVYYCARDLDGYNPGPFDYWGQGTLVTVS

SEQ ID NO: 21556 - protein, 99 aa, Homo sapiens
AASGFTFSRYWMTWVRQAPGKGLEWVANIKEDASERYYVDFVEGRFTISRDNAKNLLHLQMSSLRAEDTAVYYCARDLDGYNPGPFDYWGQGTLVTVSS

SEQ ID NO: 21557 - protein, 99 aa, Homo sapiens
AASGFTFSRYWMAWVRQAPGKGLEWVANIKEDGSEKYYVDFVEGRFTISRDNAKSLLHLEMGSLRVEDTAMYYCARDLDGYNPGPFDYWGQGILVTVSS

SEQ ID NO: 21558 - protein, 99 aa, Homo sapiens
AASGFTFSNYWMIWVRQAPGKGLEWVANIKQDGSEKYYVDFVEGRFTISRDNAKNSLHLQMNSLRVEDTAVYYCARDLDGYNPGPFDYWGQGSLVTVSS

SEQ ID NO: 21559 - protein, 99 aa, Homo sapiens
AASGFTFSNYWMTWVRQAPGKGLEWVANIKQDGSEKYYVDFVEGRFTISRDNAKNSLHLQMNSLRAEDTAVYYCARDLDGYNPGPFDYWGQGSLVTVSS

SEQ ID NO: 21560 - protein, 99 aa, Homo sapiens
AASGFSLSNYWMTWVRQSAGKGLEWVANIKEDGSEKYYVDSVKGRFTISRDNAKKTLYLQMNSLRAEETAVYYCARDLDGYNPGPFDYWGQGTLVTVSS

SEQ ID NO: 21561 - protein, 100 aa, Homo sapiens
ASGYRFTGYYIHWVRQVPGQGLEWMGWINPDSGGTNYAQKFQGRVSMTRDRSISSAYMELSGLRSDDTAVYYCARDLNFYGSGRGYFDPWGQGTQVTVSS

SEQ ID NO: 21562 - protein, 100 aa, Homo sapiens
ASGYTFTGYYIHWVRQAPGQGLEWMGWIDPKSGATNYAQKFQGRVTVTRDTSITTAYMELSSLRSDDTAVYHCARDLNFYGSGRGYFDPWGQGTLVTVSS

SEQ ID NO: 21563 - protein, 94 aa, Homo sapiens
AASGFTFSSNWMHWVRQAPGKGLVWVSRINTDGSTTTYADSVKGRVTISRDNAKNTLYLQMNSLRAEDTAVYYCVRNAYFFDSWGQGTLVTVSS

SEQ ID NO: 21564 - protein, 94 aa, Homo sapiens
AASGFTFSSNWMHWLRQVPGKGPVWVSRIKGDGSQTAYADSVKGRFTISRDNAKNTVYLQMNSLTAEDTAVYYCVRNAYFFDSWGQGTPVTVSS

SEQ ID NO: 21565 - protein, 99 aa, Homo sapiens
VASGFTFSSYVMSWVRQAPGKGLEWVSTIYHNGDRIYYADSVKGRFTMSRDNSKNTLYLQMNSLRVEDTAIYYCAKDRDDAGDYCFDSWGQGTLVTVSS

SEQ ID NO: 21566 - protein, 98 aa, Homo sapiens
AASGFNFAGYVMSWVRQAPGKGLEWVSGIYRDGSWTHYADSVKGRFTVSRENSKNTLYLQMHSLRAEDTAVYYCAKDRDDAGDYCFDSWGQGTLVTVS

SEQ ID NO: 21567 - protein, 95 aa, Homo sapiens
AASGFTFSTYSMNWVRQAPGKGLEWISYVRSSSSSIYYADSVKGRFTISRDDDKNSLFLQMNGLRDEDTAIYYCARDDVYAFDIWGQGTMVTVSS

SEQ ID NO: 21568 - protein, 95 aa, Homo sapiens
ASGFTFSSYSLNWVRQAPGKGLEWVSYVRSGSSPAVWYADSVKGRFIISRDNAENSLYLQMNSLRDEDTAIYYCARDDVYAFDIWGQGTMVTVSS

SEQ ID NO: 21569 - protein, 102 aa, Homo sapiens
TVSGGPISSYYWSWIRQTPGKGPEWVGSIYYTGRINYNPTLKSRVTISIDTSKSQFSLRLSSVTAADTAVYYCARDSYCSRGTCFDWYFDLWGRGTLVTVSS

SEQ ID NO: 21570 - protein, 102 aa, Homo sapiens
TVSGGSVNSYAWSFIRQPPGKGLEWIGFIYHSGRTNYNPSFQSRITMSVDTSDNHISLKLSSVTAADTAVYYCARDSYCSRGTCFDWYFDLWGRGTLVTVSS

SEQ ID NO: 21571 - protein, 97 aa, Homo sapiens
TVSGGSISGTSYYWGWIRQPPGKGLEWIGNIYYSGSTYYNPSLKSRVTISVDPSKNQFSLKLSSVTAADTAVYYCARRGYYYAMDVWGQGTTVTVSS

SEQ ID NO: 21572 - protein, 97 aa, Homo sapiens
IVSGVSMSSVTYYWSWIRQPPGKGLEWIGSVYHSGTTYYNPSLKSRVAISIDTSENRFSLNLNSVTAADAAVYYCARRGYYYAMDVWGQGTTVTVSS

SEQ ID NO: 21573 - protein, 90 aa, Homo sapiens
AASGFSFSTSAMSWVRQAPGKGLEWVAVITDNGGDTYYAGSVKGRFTISRDNSKKTLYLQMNSLRVEDTAVYYCDSGDVWGQGTTVTVSS

SEQ ID NO: 21574 - protein, 90 aa, Homo sapiens
AASGFTFNTYAMTWVRQAPGKGLEWVSSISGNGGRTYYADSVKGRFTISRDNSKNTLYLQMNSLTAEDTAVYYCDSGDVWGQGTTVTVSS

SEQ ID NO: 21575 - protein, 92 aa, Homo sapiens
TVSGGSISSYYWSWIRQAPGKGLEWIGYIPYGGRPNYNPSLESRVTIAADTSKDQFSLRLTSVTAADTAVYYCAGGYQFDYWGQGTLVTVSS

SEQ ID NO: 21576 - protein, 92 aa, Homo sapiens
TVSGGSISGYYCAWVRQPPGKGLEWIGSIYYSGSTNYNPSLESRVTISADTSKNQFSLKLASVTAADTAVYYCAGGYQFDYWGQGTLVTVSS

SEQ ID NO: 21577 - protein, 101 aa, Homo sapiens
AASGFAFSNVWMNWVRQAPGKGLEWLCRIKTKSDGETTDYAADYAAPAKGRFTISRDDSTRTVYLQMNSLRIEDTAVYYCTSRVLTTNDYWGQGTLVTVSS

SEQ ID NO: 21578 - protein, 96 aa, Homo sapiens
ASGFTFSNAWMNWVRQAPGMGLEWLGRIKTRSEGETTEYAVPMRGRITISRDDSKNTLYLQLDSLKTEDTAVYYCTSRVLTTNDYWGQGVLVTVSS

SEQ ID NO: 21579 - protein, 96 aa, Homo sapiens; identical to SEQ ID NO: 21578

SEQ ID NO: 21580 - protein, 97 aa, Homo sapiens
AASGFTFNNAWMNWVRQAPGQGLEWIGRIQKKTENEKTEYAAPFEGRFTISRDDSKSTLFLQMNSLKTEDTAVYYCTSRVLTTNDYWGQGTLVTVSS

SEQ ID NO: 21581 - protein, 99 aa, Homo sapiens
AASGFTFSRYAMSWVRQAPGKGLEWVSGISGSGGNTYYADSVEGRFTISRDNSRNTLYLQMNSLRAEDTAIYYCAKVVVVTVYWYLDLWGRGTLVTVSS

SEQ ID NO: 21582 - protein, 99 aa, Homo sapiens
AASGFTFSNYAMTWVRQAPGKGPEWVSGISANGGTTYYADSVKGRFTISRDNSKNTLFLQMNSLRAEDTAIYYCAKVVVVTVYWYLDLWGRGTQVTVSS

SEQ ID NO: 21583 - protein, 97 aa, Homo sapiens
AASGFTLSDYYMSWIRQAPGKGLEWISYISTTGRTIYYTDSVQGRFTISRDSAKNSLYLQMNSLRAEDTAVYYCARDELGTYGMDVWGQGTMVTVSS

SEQ ID NO: 21584 - protein, 96 aa, Homo sapiens
AASGFTLSAYYMSWIRQAPGKGLEWVSYISSTGKSMYYADSVKGRFTISRDNAKNSLYLQMKSLTAEDTAVYYCARDELGTYGMDVWGQGTTVTVS

SEQ ID NO: 21585 - protein, 92 aa, Homo sapiens
AASGFTFSNYGMNWVRQAAGKGLEWVSYISGSTGVAYYADSVKGRFTISRDNAKNSLYLQMNSLRDEDTAVYYCARAGGAYWGQGTLVTVSS

SEQ ID NO: 21586 - protein, 92 aa, Homo sapiens
AASGFTFSSYSMNWVRQAPGKGLEWFSHISSSRSTIYYAESVKGRFTISRDNAKNSVYLQMNSLRDEDTAVYYCARAGGAYWGQGTLVTVSS

SEQ ID NO: 21587 - protein, 102 aa, Homo sapiens
AASGFTFSDYYLSWIRQAPGKGLEWLSYISSSSGSITYYGVSVKGRFTISRDNAKNSLYLQMNSLSAEDTAVYYCARGFDCSSASCYAFDLWGQGTMVTVSS

SEQ ID NO: 21588 - protein, 101 aa, Homo sapiens
AASGFSISDYYMSWIRQAPGKGLEWVSYISDSGSILYYGDSVKGRCTISRDTAKNSVYLQMNSLGAEDTAMYYCARGFDCSSASCYAFDLWGQGTMVTVSS

SEQ ID NO: 21589 - protein, 101 aa, Homo sapiens; identical to SEQ ID NO: 21588

SEQ ID NO: 21590 - protein, 102 aa, Homo sapiens
AASGFTFSDYYMSWIRQAPGKGLEWVSYISSSSGSTIYYGDSVKGRFTISRDNAKNSLYLQMNSLRAEDTAVYYCARGFDCSSASCYAFDLWGQGTMVTVSS

SEQ ID NO: 21591 - protein, 102 aa, Homo sapiens
AASGFTFGDYYMGWIRQAPGRGLEWVSYISSSSGSTIYYGDSVKGRFAISRDNAKNSLYLQMNSLRAEDTAVYYCARGFDCSSASCYAFDLWGQGTMVTVSS

SEQ ID NO: 21592 - protein, 101 aa, Homo sapiens
AASGFTFSDYYMSWIRQAPGKGLEWISYISGSGTSIYYADSVKGRFTISRDNARNSLYLQMNSLRAEDTAVYFCARGFDCSSASCYAFDLWGQGTVVTVSS

SEQ ID NO: 21593 - protein, 102 aa, Homo sapiens
AASGFAFSGYYMSWIRQAPGKGLEWVSYISSSGSSTIYYADSVRGRFTISRDNSKNSLYLQMNSLRAEDTALYYCARGFDCSSASCYAFDLWGQGTMVTVSS

SEQ ID NO: 21594 - protein, 96 aa, Homo sapiens
ASGYTFTNYDIIWVRQAAGQGLEWMGWMNPDSGGTGYVQKFQGRVTMTRDTSISTAYMELSSLRLADMAVYYCARAVRDQLLSDSWGQGTLVTVSS

SEQ ID NO: 21595 - protein, 96 aa, Homo sapiens
ASGYTFSNYDITWVRQATGQGLEWMGWMNPYSGNSGFVRNFRDRVTVTTDASINTVYMELSSLTSDDTAVYYCARAVRDQLLSDSWGQGTQVTVSS

SEQ ID NO: 21596 - protein, 96 aa, Homo sapiens
ASGYTFSSYDITWVRQATGQGLEWMGWMNPYSGNSGFAQKFRDRVTVTTDASINTAYMELSSLTSEDTAVYYCARAVRDQLLSDSWGQGTLVTVSS

SEQ ID NO: 21597 - protein, 96 aa, Homo sapiens; identical to SEQ ID NO: 21595

SEQ ID NO: 21598 - protein, 96 aa, Homo sapiens
ASGYTFSSYDITWVRQATGQGLEWMGWMNPYSGNSGFAQKFRDRVTVTTDASINTAYMELSSLTSEDTAVYFCARAVRDQLLSDSWGQGTLVTVSS

SEQ ID NO: 21599 - protein, 94 aa, Homo sapiens
AASGFPFSTYLMSWVRQAPGKGLEWVSAISGSGDSTYYADSVKGRFTISRDNSKSTLYVQMNSLRAEDTAVYYCAKWSTGYDYWGQGTLVTVSS

SEQ ID NO: 21600 - protein, 96 aa, Homo sapiens
AASEFTFSTYAMSWVRQAPGKGLEWVSCIYSDSEHSNTYYADSVKGRFTISRDNSKNTLYLQMNSLRVEDTGIYYCAKWSTGYDYWGQGTLVTVSS

SEQ ID NO: 21601 - protein, 95 aa, Homo sapiens
ASGYSFSSNDMAWVRQAPGKGLEWVSYIDVSSSSANYADSVKGRFTISRDNAKNSVYLQMDRLRDEDTAVYYCARGWGSGWYPYWGQGTLVTVSS

SEQ ID NO: 21602 - protein, 96 aa, Homo sapiens
AASGYTFSNEDMNWVRQAPGKGLEWVSSIIISSTSVYYADSVKGRFTISRDNGKSSVYLQMNSLRDEDTAVYYCARGWGSGWYPYWGQGTLVTVSS

SEQ ID NO: 21603 - protein, 92 aa, Homo sapiens
TVSGGSISSSTYNWNWIRQPAGKGLEWIGRILASGSTDYNPSLKSRVAISVDTSKNQFSLKLSSVTATDTAVYYCARGIAVWGPGTTVTVSS

SEQ ID NO: 21604 - protein, 92 aa, Homo sapiens
TVSGGSISSGSYYWSWIRQPAGKGLEWIGRIYTSGSTNYNPSLKSRVTISVDTSKNQFSLKLSSVTAADTAVYYCARGIAVWGKGTTVTVSS

SEQ ID NO: 21605 - protein, 91 aa, Homo sapiens
ASEFTFSNYVMNWVRQAPGKGLEWVSAITNSGDRTHYADSVKGRFTISRDNSKETLYLQMNSLRAEDTARYYCVKDEWDVWGQGTTVTVSS

SEQ ID NO: 21606 - protein, 92 aa, Homo sapiens
AASGFNFGSYTMGWVRQAPGKGLEWVSSIRESGDNTYYADSVKGRFTISRDDSKNTLYLQMNSLRADDTAVYYCVKDEWDVWGQGTTVIVSS

SEQ ID NO: 21607 - protein, 105 aa, Homo sapiens
TQTLTLTCTFSGFSLNTHGVGVGWVRQPPGKTLEWLAHVYWDDDKRYTPSLIGRLTITKDTSRSQVVLTLANVDPIDTATYYCVHRPYYEHFDSWSQGILVTVSS

SEQ ID NO: 21608 - protein, 105 aa, Homo sapiens
TQTLTLTCTFSGFSLTTGGVGVGWVRQPPGETLQWLAHIYWDDDTRYNPSLRGRLTITKDTSKNQVVLTITNMDPVDTAKYYCVHRPYYEHFDSWGQGLLVTVSS

SEQ ID NO: 21609 - protein, 105 aa, Homo sapiens
TQTLTLTCTFSGFSLNTHGVGVGWVRQPPGKTLEWLAHGYWDDDKRYTPSLIGRLTITKDTSRSQVVLTLANVDPIDTATYYCVHRPYYEHFDSWSQGILVTVSS

SEQ ID NO: 21610 - protein, 104 aa, Homo sapiens
TQTLTLTCTFSGFSLNTHGVGVGWVRQPPGKTLEWLAHVYWDDDKRYTPSLIGRLTITKDTSRSQVVLTLANVDPIDTATYYCVHRPYYEHFDSWSQGILSPSP

SEQ ID NO: 21611 - protein, 105 aa, Homo sapiens
TQTLTLTCTFSGFSLSTAGVGVGWVRQSPGKALEWLAHIYWDDDTRYNPSLRGRLTITKDTSKNQVVLTVTNMVPVDTATYYCVHRPYYEHFDSWGQGTLVTVSS

SEQ ID NO: 21612 - protein, 105 aa, Homo sapiens
TQTLTLTCTFSGFSLNTHGVGVGWVRQPPGKTLEWLAHVYWDDDKRYTPSLIGRLTITKDTSRSQVVLILANVDPIDTATYYCVHRPYYEHFDSWSQGILVTVSS

SEQ ID NO: 21613 - protein, 97 aa, Homo sapiens
AASGLTFSNAWLSWVRQAPGKGLEWVGRIKTKTEGGTTDYAAPVKGRFTISRDDSKDTVFLQMNSLKIEDTAVYYCTTDGYWGSDYWGQGTLVTVSS

SEQ ID NO: 21614 - protein, 97 aa, Homo sapiens
AASGLTFSNAWLSWVRQAPGKGLEWVGRIKTKTEGGTTDYAAPVKGRFTISRDDSKETVFLQMNSLKIEDTAVYYCTTDGYWGSDYWGQGTLVTVSS

SEQ ID NO: 21615 - protein, 97 aa, Homo sapiens
AASGLTFSNAWMSWVRQAPGRGLEWVGRIKTKTDGETTDYAALVKGRFTISRDDSKTTVYLEMNSLKTEDTAVYYCTTDGYWGSDYWGQGTLVTVSS

SEQ ID NO: 21616 - protein, 97 aa, Homo sapiens
AASGLTFSNAWMSWVRQAPGRGLEWVGRIKTKSDGETTDYAALVKGRFSISRDDSKTTVYLEMNSLKTEDTAVYYCTTDGYWGSDYWGQGTLVTVSS

SEQ ID NO: 21617 - protein, 95 aa, Homo sapiens
IVSAGSISSYYWTWIRQPPGKGLEWIGNVHSSGSTHWNPSLRSRVSISLDTSKNQVSLKLSSVTAADTAVYYCLGGRSGEPFDYWGQGTLVTVSS

SEQ ID NO: 21618 - protein, 95 aa, Homo sapiens
IVSAGSISSYYWTWIRQPPGKGLEWIGNVHSSGSTHWNPSLRSRVSISLDTPKNQVSLKLSSVTAADTAVYYCLGGRSGEPFDYWGQGTLVTVSS

SEQ ID NO: 21619 - protein, 94 aa, Homo sapiens
TVSGASLNSYYWTWIRQPPNKGLEWIGNVHYTESSSYSPYLKSRLTLSIDTSTKQISLQLTSVTVADTAVYYCLGGRSGEPFDYWGQGTLVIVS

SEQ ID NO: 21620 - protein, 95 aa, Homo sapiens
TVSGDSLNSYYWTWIRQSPEKGLEWIGNAHYTETSSYSPSLRSRLTLSIDKSTNQISLQLTSVTVADTAVYYCLGGRSGEPFDYWGRGTLVTVSS

SEQ ID NO: 21621 - protein, 96 aa, Homo sapiens
VSGFSLRKYGMHWVRQAPGRGLEWLAVIYWDETYKNCAASVRGRCSISRDIFENTLHLELSGLTAEDTGRYFCARSRDGYNHGYTWGQGTLVTVSS

SEQ ID NO: 21622 - protein, 96 aa, Homo sapiens
VSGFSLRKYGMHWVRQAPGKGLEWLAVIYWDETYKNCAASVRGRCSISRDIFENTLHLELSGLTAEDTGRYFCARSRDGYNHGYTWGQGTLVTVSS

SEQ ID NO: 21623 - protein, 96 aa, Homo sapiens; identical to SEQ ID NO: 21621

SEQ ID NO: 21624 - protein, 97 aa, Homo sapiens
AASGFSLNNYGMHWVRQAPGKGLEWVAVIWYDGSVQLYADSVKGRFTISRDTSRNMLYLQMNSLRPEDTALYYCARSRDGYNHGYTWGQGTLVTVSS

SEQ ID NO: 21625 - protein, 96 aa, Homo sapiens
VGSGFTLTRRWVSWVRQAPGKGLETLASINGDGSERYYVGSVKGRSTISRDNAQDAVSLQVNSLRVEDTAVYYCARYAYNNGMDVWGQGTTVTVAS

SEQ ID NO: 21626 - protein, 96 aa, Homo sapiens
VASGFTFSRHWVSWVRQAPGKGLESVASINGDGSEKNYVDSVKGRSTISRDNAQNSVCLQMNSLRVEDTAVYYCARYAYNNGMDVWGQGTTVTVSS

SEQ ID NO: 21627 - protein, 96 aa, Homo sapiens
AGSGFTFSTYWVGWARQAPGRGLEWVANIKGDESAKRYADSVKGRFTISRDNAQNLAYLEMNSLRAEDTAVYYCARYAYNNGMDVWGQGTTVTVSS

SEQ ID NO: 21628 - protein, 96 aa, Homo sapiens
VGSGFTLTRRWVSWVRQAPGKGLETLASINGDGSEKNYVDSVKGRSTISRDDAQNSVSLQVNSLRVEDTAVYYCARYAYNNGMDVWGQGTTVTVSS

SEQ ID NO: 21629 - protein, 96 aa, Homo sapiens
VGSGFTLTRRWVSWVRQAPGKGLETLASINGDGSEKNYVGSVKGRSTISRDDAQNSVTLQVNSLRVEDTAVYYCARYAYNNGMDVWGQGTTVTVSS

SEQ ID NO: 21630 - protein, 90 aa, Homo sapiens
AASGFTFTTAYMNWVRQAPGKGLEWVANINPDGSKKYYVDSVKGRFTISRDNTGNSLYLQMDSLRVDDTGLYYCVRGADVWGQGTTVIVS

SEQ ID NO: 21631 - protein, 91 aa, Homo sapiens
AASGFTFSGYWVNWVRQAPGKGLECVARVNDDGSVTYYVDSVRGRFTVSSDSARTSLYLQMNSLRVEDTAVYYCVRGADVWGKGTTVTVSS

SEQ ID NO: 21632 - protein, 91 aa, Homo sapiens; identical to SEQ ID NO: 21631

SEQ ID NO: 21633 - protein, 90 aa, Homo sapiens
AASGFTFTIAYMNWVRQAPGKGLEWVANINPDGSKKYYVDSVKGRFTISRDNTGNSMYLQMDSLTVDDTGLYYCVRGADVWGQGTTVIVS

SEQ ID NO: 21634 - protein, 90 aa, Homo sapiens
AASGFTFSSAYMNWVRQAPGKGLEWVANMNPDGSKKYYVDSVKGRFTISRDNTGNSLYLQMDSLRVDDTGLYYCVRGADVWGQGTTVIVS

SEQ ID NO: 21635 - protein, 90 aa, Homo sapiens
AASGFTFSSAYMNWVRQAPGKGLEWVANIKPDGSKKYYVDSVKGRFTISRDNTGNSLYLQMDSLRVDDTGLYYCVRGADVWGQGTTVIVS

SEQ ID NO: 21636 - protein, 90 aa, Homo sapiens
AASGFTFTIAYMNWVRQAPGKGLEWVANINPDGSKKYYVDSVKSRFTISRDNTGNSMYLQMDSLTVDDTGLYYCVRGADVWGQGTTVIVS

SEQ ID NO: 21637 - protein, 90 aa, Homo sapiens; identical to SEQ ID NO: 21633

SEQ ID NO: 21638 - protein, 93 aa, Homo sapiens
AASGFTLSTYWMSWVRQAPGKGLEWVANINQDGSDKYYVDSVKGRFTISRDNAKNSLYLQMNSLRAEDTAVYYCARGGRPADWGQGTLVTVSS

SEQ ID NO: 21639 - protein, 93 aa, Homo sapiens
AASGFTFNNYWMTWVRQAPGKGLECVATIKGDGSEKSYVESVKGRFTISRDNAKNSLYLQMNSLRADDTAVYYCARGGRPADWGQGTLVTVSS

SEQ ID NO: 21640 - protein, 97 aa, Homo sapiens
AASGFTFSNFWMHWVRQTPEKGLVWVSKIGPDGTYTTYADFVKGRFTISRDNAKNTLFLQMNSLTADDTAVYYCVRGSSGWSGVDYWGQGTLVTASS

SEQ ID NO: 21641 - protein, 97 aa, Homo sapiens
AASGFTFSYYWMHWVRQTPGTGLMWISRISGDGTRTNYPDSVKGRFTVSRDNAKNTLYLQMNSLRAEDTALYYCVRGSSGWSGVDYWGQGTLVTVSS

SEQ ID NO: 21642 - protein, 93 aa, Homo sapiens
ASGYTFSSNYLSWVRQAPGQGLEWVGLINPSGGATTYAQKFQGRVTMTRDTSTTTVYMDLSSLTSEDTAVYYCVREAGAFDIWGRGTMVTVSS

SEQ ID NO: 21643 - protein, 93 aa, Homo sapiens
ASGYTFSSNYMSWVRQAPGQGLEWVGLINPSGGATTYAQKFQGRVTMTRDTSTTTVYMELSSLTSEDTAVYYCVREAGAFDIWGRGTMVTVSS

SEQ ID NO: 21644 - protein, 93 aa, Homo sapiens
ASGYTFSSNYMSWVRQAPGQGLEWVGLINPSGGATTYAQKFQGRVTMTRDTSTSTLYMELSSLTSEDTAVYYCVREAGAFDIWGRGTMVTVSS

SEQ ID NO: 21645 - protein, 93 aa, Homo sapiens; identical to SEQ ID NO: 21642

SEQ ID NO: 21646 - protein, 93 aa, Homo sapiens
ASGYTFTSNYMDWVRQAPGQGLEWMGVINPSGGSTTYAQKFQGRVTMTRDTSTSTVYMELSSLRSEDTAMYYCVREAGAFDIWGQGTMVTVSS

SEQ ID NO: 21647 - protein, 93 aa, Homo sapiens; identical to SEQ ID NO: 21646

SEQ ID NO: 21648 - protein, 93 aa, Homo sapiens; identical to SEQ ID NO: 21646

SEQ ID NO: 21649 - protein, 93 aa, Homo sapiens
ASGYTFTSNYMDWVRQAPGQGLEWMGVINPSGGSTTYAQKFQGRLTMTRDTSTSTVYMELSSLRSEDTAMYYCVREAGAFDIWGQGTMVTVSS

SEQ ID NO: 21650 - protein, 93 aa, Homo sapiens
ASGYTFTSNYMDWVRQAPGQGLEWMGVINPSGGSTTYAQKLQGRVTMTRDTSTSTVYMELSSLRSEDTAMYYCVREAGAFDIWGQGTMVTVSS

SEQ ID NO: 21651 - protein, 94 aa, Homo sapiens
AASGFTFSSHAMSWLRQAPGKGLEWLSSISDSGGDTSYIDSVKGRFIISRDNSKNTVYLQMNTLRVGDTAVYYCARDPPWFHPWGQGTLVTVSS

SEQ ID NO: 21652 - protein, 94 aa, Homo sapiens
AASGFTFSSHAMAWLRQAPGRGLEWLSSISDSGGDTSYIDSVKGRFIISRDNSKNTVYLQMNTLRVGDTAVYYCARDPPWFHPWGQGTLVTVSS

SEQ ID NO: 21653 - protein, 94 aa, Homo sapiens
AASGFTFSSHAMSWLRQAPGKGLEWVSSITDSGGDTSYTDSVKGRFIISRDNSRNTVYLQMNTLRVEDTAVYYCARDPPWFHPWGQGILVTVSS

SEQ ID NO: 21654 - protein, 94 aa, Homo sapiens
AASGFTFSSHAMAWLRQAPGRGLEWLSSISDSGGDSSYIDSVKGRFIISRDNSKNTVYLQMNTLRVGDTAVYYCARDPPWFHPWGQGTLVTVSS

SEQ ID NO: 21655 - protein, 94 aa, Homo sapiens
AASGFTFSSHAMSWVRQAPGKGLEWVSSISDSGGDTYYTDSVKGRFIISRDNSKNTVYLQMNTLRVEDTAVYYCARDPPWFHPWGQGTLVTVSS

SEQ ID NO: 21656 - protein, 94 aa, Homo sapiens
AASGFTFNSHAMSWLRQAPGKGLEWVSSITDSGGDTSYTDSVKGRFIISRDNSKNTVYLQMNTLRAEDTAVYYCARDPPWFHPWGQGTLVTVSS

SEQ ID NO: 21657 - protein, 94 aa, Homo sapiens; identical to SEQ ID NO: 21655

SEQ ID NO: 21658 - protein, 94 aa, Homo sapiens
AASGFTFSNHALSWVRQAPGKGLEWVSSMSGNGDAIYYADSVKGRFTISRDNSKNTLYLQLDSLRADDTAVYYCARDPPWFHPWGQGTLVTVSS

SEQ ID NO: 21659 - protein, 94 aa, Homo sapiens
AASGFTFSSHAMAWLRQAPGRGLEWLSSISDSGGDTSYIDSVKGRFIISRDNSKNTVYLQMNTLRVGDTAVYYCARDPPWFHPWGPGNPGHRLL

SEQ ID NO: 21660 - protein, 94 aa, Homo sapiens
GGSGFTFNSHAMSWLRQAPGKGLEWLSSITDNGGDTSYRDSVKGRFIISRDNSKNTVYLQMNTLRVEDTAVYYCARDPPWFHPWGQGTLVTVSS

SEQ ID NO: 21661 - protein, 94 aa, Homo sapiens
AASGFTFNSHAMSWVRQAPGKGLEWVSSISDSGGDTYYTDSVKGRFIISRDNSKNTVYLQMNTVRVEDTAVYYCARDPPWFHPWGQGTLVAVSS

SEQ ID NO: 21662 - protein, 94 aa, Homo sapiens
AASGFTFSSHAMAWLRQAPGRGLEWLASISDNGGDTSYIDSVKGRFIISRDNSKNTVYLQMDTLRVGDTAVYYCARDPPWFHPWGQGTLVTVSS

SEQ ID NO: 21663 - protein, 93 aa, Homo sapiens
ASGFTFSSHAMSWVRQAPGKGLEWVSSISDSGGDTSYKDSVKSRFIISRDNSKNTVYLQMNTLRVEDSAVYYCARDPPWFHPWGQGTLVTVSS

SEQ ID NO: 21664 - protein, 94 aa, Homo sapiens
AASGFTFSSHAMSWLRQAPGKGLEWFSSISDNGGDTSYRDSVKGRFIISRDNSKNTVYLQMKTLRVEDTAVYYCARDPPWFHPWGQGTLVTVSS

SEQ ID NO: 21665 - protein, 94 aa, Homo sapiens
AASGFTFSSHAMSWVRQAPGKGLEWVSSISDSGGDTSYTDSVKGRFIISRDNSKNTVYLQMNTLRVEDTAVYYCARDPPWFHPWGQGTLVTVSS

SEQ ID NO: 21666 - protein, 92 aa, Homo sapiens
AASGFTFSTYWMSWVRQAPGKGLEWVANINQDGSNKYYVDSVKGRFTISRDNAKNSLFLQMNSLRAEDTAVYYCARDYGDHWGQGTLVTVSS

SEQ ID NO: 21667 - protein, 92 aa, Homo sapiens
AASGFTFNNYWMSWVRQGPGKGLEWVANINQNGSEAHYAASVKGRFTISRDDAQNSLYLQMNSLTAADAAVYFCARDYGDHWGRGILVTVSS

SEQ ID NO: 21668 - protein, 90 aa, Homo sapiens
AASGFTFRKYWVSWVRQAPGRGLEWVASIKGDGSERYYVDSVEGRFIISRDNAKNSLYLQMSSLRVEDTAVYYCAREWVWGQGTLVTVSS

SEQ ID NO: 21669 - protein, 88 aa, Homo sapiens
ASGFTFSSYWMSWVRQAPGKGPERVARIKQDGSERYYVASVTGRFTISRDNAKMSLYLQMNSLRAEDTAVYYCAREWVWGQGTLVTVS

SEQ ID NO: 21670 - protein, 93 aa, Homo sapiens
SVSGFTFSNYAMYWVRQAPGKGLECVSLISTAGDTYYADSVKGRFTISRDNSKNVLYLQMSSLRAEDTAIYYCVRDYYGMDVWGQGTTVTVSS

SEQ ID NO: 21671 - protein, 93 aa, Homo sapiens; identical to SEQ ID NO: 21670

SEQ ID NO: 21672 - protein, 94 aa, Homo sapiens
SASGFTFGSYAMHWVRQAPGKGLEYVSASVTNGGSTYYADSVKGRFTISRDNPKNTLYLQMTSLRPEDTAVYYCVRDYYGMDVWGQGTTVTVSS

SEQ ID NO: 21673 - protein, 93 aa, Homo sapiens; identical to SEQ ID NO: 21670

SEQ ID NO: 21674 - protein, 94 aa, Homo sapiens
SASGFTFSTYAMYWVRQAPGKGLECVSLISINGGSTYYADSVKGRFTISRDNSKNTLFLQMRSLRAEDTAVYYCVRDYYGMDVWGQGTTVTVSS

SEQ ID NO: 21675 - protein, 92 aa, Homo sapiens
ASGFTFSSYAMYWVRQAPGKGLECVSLISIVGDTYYADSVKGRFTISRDNSKNTLYLQMRTLRPEDTAVYYCVRDYYGMDVWGQGTTVTVSS

SEQ ID NO: 21676 - protein, 93 aa, Homo sapiens
SASGFTFSTYAMYWVRQAPGKGLECVSLISIAGDTYYADSVKGRFTISRDNSKNTLYLQMRSLRAEDTAVYYCVRDYYGMDVWGQGTTVTVSS

SEQ ID NO: 21677 - protein, 97 aa, Homo sapiens
TVSGGSISNYYWSWIRQPAGKGLEWIGRINTSGSTNFNPSLKSRVTMSVDTSKNHFSLKLSSVTAADTAVYYCARATTGTFYYFDYWGQGTLVTVSS

SEQ ID NO: 21678 - protein, 105 aa, Homo sapiens
TVSAGSIRSYYWSWIRQPAGKGLEQPAGKGLEWIGRISTSGSTNYNPSLKSRLSMSVDTSKNQFSLNLTYVTAADTAVYYCARATTGTFYYFDYWGQGALVTVSS

SEQ ID NO: 21679 - protein, 97 aa, Homo sapiens
TVSGGSISNYYWSWIRQPAGKGLEWIGRIYTSGSTNYNPSLKSRVTMSVDTSKNQFSLKLSSVTAADTAVYYCARATTGTFYYFDYWGQGTLVTVSS

SEQ ID NO: 21680 - protein, 95 aa, Homo sapiens
AASEFTFSSYAMTWVRQAPGKGLEWVSASGGSGATTYYADSVKGRFTISRDNSKNMLYLQMNILRAEDTAVYYCAKGQSGAFDIWGQGTMVTVSS

SEQ ID NO: 21681 - protein, 95 aa, Homo sapiens
AASGFTFSIYGMSWVRQAPGKGLEWVSALTSSGSRTYYADSVKGRFTISRDNSKNTLYLQMNSLRAEDTAVYYCAKGQSGAFDIWGQGTMVTVSS

SEQ ID NO: 21682 - protein, 94 aa, Homo sapiens
SGYTFTNYAVHWVRQAPGQSLEWMGWINAGNGDRKYSQNFQGRVTITTDTSARTAYMELSSLRSEDTAVYYCARNSGSYRFDPWGQGTLVTVSS

SEQ ID NO: 21683 - protein, 95 aa, Homo sapiens
ASGYTFTNYGLHWVRQAPGQRLEWMGWINVANGNTKYSQRFQGRVSITRDTSANTAYMELSSLRSEDTAVYYCARNSGSYRFDPWGQGTLVTVSS

SEQ ID NO: 21684 - protein, 98 aa, Homo sapiens
AASGFNLRDYWMHWVRQAPGKGLEWVSVINLDGSNTKYADSVKGRFTISKDNAKNTLYLQMNGLRAEDTAVYYCARDFPGTPNACDIWGQGTMVTVSS

SEQ ID NO: 21685 - protein, 96 aa, Homo sapiens
SGFRLSNYWMHWVRQSPGKGLVWLSRINLDGRITDYADSVKGRFAISKDDAKNTVYLEMSSLRVEDTGVYYCARDFPGTPNACDIWGQGTMVIVSS

SEQ ID NO: 21686 - protein, 90 aa, Homo sapiens
AASGFIFSTSWMSWVRQAPGKGLEWVAKIKPDGSDKYYVGSVKGRFTISRDNAKNSLYLQMNSLRAEDTAVYYCARFDIWGQGTMVTVSS

SEQ ID NO: 21687 - protein, 90 aa, Homo sapiens
AASGFGFSGYWMTWVRQTSERGLEWVANINQDGSEKNYVDSVRGRFTISRDNVKNSLYLQMNSLRAEDTALYYCARFDIWGRGTMVTVSS

SEQ ID NO: 21688 - protein, 90 aa, Homo sapiens
EASGFTFSSYWMTWVRQAPGKGLEWVANIKPDGTEKKYLDSVKGRFIISRDNAKNSLYLQMNSLRAEDTALYYCARFDIWGKGTMVTVSS

SEQ ID NO: 21689 - protein, 90 aa, Homo sapiens; identical to SEQ ID NO: 21686

SEQ ID NO: 21690 - protein, 90 aa, Homo sapiens
AASGFTFSMSWMSWVRLAPGKGLEWVAKIKPDGSEKYYVDSVRGRFTISRDNAKNSLYLQMNSLRAEDTAVYYCARFDIWGQGTMVTVSS

SEQ ID NO: 21691 - protein, 100 aa, Homo sapiens
AASGFTFSDHYMDWVRQAPGKGLEWVGRIRDKGNNYITEYAASVKGRFTVSRDDSKNSLYLQMNSLKTEDTAVYYCARDARAYGGYFDYWGQGTLVTVSS

SEQ ID NO: 21692 - protein, 100 aa, Homo sapiens
VGSGFTFSDHYIDWVRQAPGKGLEWVGRIRDKGYNYYTEYAASVKGRFTISRDDSRNSLYLQMNSLKTEDTAVYYCARDARAYGGYFDYWGQGTLVTVSS

SEQ ID NO: 21693 - protein, 95 aa, Homo sapiens
EASEFTFSDYWMHWVRQAPGEGLVWVSQINAAGTSTNYADSVKGRFTISRDNAKNTLYLQMNSLRAEDTALYFCARDGTGAIDLDYWGQGTLVTV

SEQ ID NO: 21694 - protein, 97 aa, Homo sapiens
AASGFTLSSYWMHWVRHAPGKGLVWVSLIESDGRSTNYADSVKGRFTISRDNAKNTLYLQMNSLSADDTAVYYCARDGTGAIDLDYWGQGTLVTVSS

SEQ ID NO: 21695 - protein, 98 aa, Homo sapiens
TVSGDSINNDNYYWSWIRQSAGKGLEWIGRIYPSGATYYTPSLRGRLTMSIDRSKNQFSMKLSSVTATDTAVYFCARGGSGPNWFDPWGPGNLVTVSS

SEQ ID NO: 21696 - protein, 98 aa, Homo sapiens
TVTGDSIYNDNYYWSWIRQTAGKGLEWIGRVYLSGATYYNPSLRSRVTMSLDMSKRQFFLNLNFVTATDTAVYYCARGGSGPNWFDPWGQGILVTVSS

SEQ ID NO: 21697 - protein, 97 aa, Homo sapiens
AVSGFTFSNYWMHWVRRAPGKGLVWVARIDKVGRDISYADSVKGRFTISRDNSQNTLFLQMNSLRADDTAVYYCARLYSGDDFFDYWGLGTLVSVSS

SEQ ID NO: 21698 - protein, 97 aa, Homo sapiens
AVSGCTFSDYWMHWVRRAPGKGLMWVARINKDGRSTTYADSVKGRFTISRDNSKNTLYLQMNSLRADDTAVYYCARLYSGDDFFDYWGLGTLVSVSS

SEQ ID NO: 21699 - protein, 97 aa, Homo sapiens
AVSGFTFSNYWMHWVRRVPGKGLVWVARVNKDGRETSYADSVKGRFTISRDNSKNRLYLQMNSLRADDTALYYCARLYSGDDFFDYWGLGTLVSVSS

SEQ ID NO: 21700 - protein, 97 aa, Homo sapiens
AVSGFTFSNYWMHWVRRAPGKGLVWVARINKDGRSTTYADSVKGRFTMSRDNSKNTLYLQMNSLRADDTAVYYCARLYSGDDFFDYWGLGTLVSVSS

SEQ ID NO: 21701 - protein, 97 aa, Homo sapiens
VASGFTFSNYWMHWVRQVPGKGLMWVSRTDTYGRDINYADSVKGRFTISRDNAKNTLYLQMNNLRVEDTAVYYCARLYSGDDFFDYWGQGTLVTVSS

SEQ ID NO: 21702 - protein, 97 aa, Homo sapiens
VASGFTFSNYWMHWVRQVPGKGLVWVSRTDTYGRDINYADSVKGRFTISRDNAKNTLYLQMNNLRVEDTAVYYCARLYSGDDFFDYWGQGTLVTVSS

SEQ ID NO: 21703 - protein, 97 aa, Homo sapiens
AVSGFTFSNYWMHWVRRAPGKGLVWVARINKDGRSTSYADSVKGRFTISRDNSRNTLYLQMNSLRADDTAVYYCARLYSGDDFFDYWGLGTLVSVSS

SEQ ID NO: 21704 - protein, 97 aa, Homo sapiens
AVSGFTFSNYWMHWVRRAPGKGLVWVARVNKDGRERSYADSVKGRFTISRDNSKNTLYLQMNNLRADDTAVYYCARLYSGDDFFDYWGLGTLVSVSS

SEQ ID NO: 21705 - protein, 97 aa, Homo sapiens
AVSGFTFSNYWMHWVRRAPGKGLVWVARVNKDGRSTSYADSVKGRFTISRDNSKNTLYLQMNSLRADDTAVYYCARLYSGDDFFDYWGLGTLVSVSS

SEQ ID NO: 21706 - protein, 97 aa, Homo sapiens; identical to SEQ ID NO: 21705

SEQ ID NO: 21707 - protein, 97 aa, Homo sapiens
VASGFTFSNYWMHWVRQAPGKGLVWVSRTDSYGRDITYADSVKGRFTISRDNAKNTLYLQMNNLRVEDTAVYYCARLYSGDDFFDYWGQGTLVTVSS

SEQ ID NO: 21708 - protein, 97 aa, Homo sapiens
AASGFTFINYWMHWVRQVPGKGLLWVARTDSDGSDISYADSVKGRFTISRDNAKNTLYLQMNSLRAEDTAVYYCARLYSGDDFFDYWGRGTLVTVSS

SEQ ID NO: 21709 - protein, 97 aa, Homo sapiens
VASGFTFSNYWMHWVRQIPGKGLVWVSRTDSYGRDINYADSVKGRFTISRDNAKNTLYLQMNNLRVEDTAVYYCARLYSGDDFFDYWGQGTLVTVSS

SEQ ID NO: 21710 - protein, 96 aa, Homo sapiens
AASGFTFSSYWMLWVRQAPGKGLVWVSRIKNDESDTKYADSVKGRFTISRDNAKNTLYLQMNSLRAEDTAVYYCARGGDGYNPDYWGQGTLVTVSS

SEQ ID NO: 21711 - protein, 96 aa, Homo sapiens; identical to SEQ ID NO: 21710

SEQ ID NO: 21712 - protein, 96 aa, Homo sapiens
AASGFTFSNYWMHWVRQAPGNGLVWVSRINSDGSSTSYADSVKGRFTISRDSAKNTVYLQMNSLRGEDTAVYYCARGGDGYNPDYWGQGTLVTVSS

SEQ ID NO: 21713 - protein, 95 aa, Homo sapiens
AASGFGFADYYMTWIRQAPGKGLEWVSYLSGDGGYKRYADSVKGRFAISRDNARKSVYLQMNSLRAEDTAVYYCARAPTGSCDYWGQGTLVTVSS

SEQ ID NO: 21714 - protein, 95 aa, Homo sapiens
AASGFTFTDYYMTWIRQAPGKGLEWVSYLSGSGSYTRYPDSVKGRFTISRDNARNLVFLQLNSLRAEDTAVYFCARAPTGSCDYWGQGTLVTVSS

SEQ ID NO: 21715 - protein, 95 aa, Homo sapiens
AASGFTFSDYYMTWIRQAPGKGLEWVSYISGSDTYTKYADSVKGRFTISRDNAKNSLYLQMNSLRVEDTAVYYCARAPTGSCDYWGQGTLVTVSS

SEQ ID NO: 21716 - protein, 94 aa, Homo sapiens
AASGFTVSNNYMSWVRQSPGRGLEWVSILYGDGSTFYRDSVKGRFIISRDSSKNTLFLQMNTLGVEDTALYYCARWSGRYYDYWGQGTLVTVSS

SEQ ID NO: 21717 - protein, 94 aa, Homo sapiens
AVSGFIVNDNYMSWLRQAPGKGLEWVSMIYSGGDTYYADSVKGRFTISRHNSNNILYLQMNSLRVDDTAVYYCARWSGRYYDYWGHGNLVTVSS

SEQ ID NO: 21718 - protein, 94 aa, Homo sapiens
AVSGFIVNDNYMSWLRQAPGKGLEWVSMIYSGGDTHYADSVKGRFTISRHNSYNILYLQMNSLGVDDTAVYYCARWSGRYYDYWGHGNLVSVSS

SEQ ID NO: 21719 - protein, 96 aa, Homo sapiens
AASGFSVNINYMSWVRQAPGKGLEWVSIIYNDESGTTYYKDSVEGRFTISRDSSKNTLYLHMDSLRAEDTAVYFCARWSGRYYDYWGQGTLVTVSS

SEQ ID NO: 21720 - protein, 94 aa, Homo sapiens
AVSGFIVNDNYMSWLRQAPGKGLEWVSMIYSGGETHYADSVKGRFIISRHNSYNILYLQMNSLGVDDTAVYYCARWSGRYYDYWGHGNLVTVSS

SEQ ID NO: 21721 - protein, 96 aa, Homo sapiens; identical to SEQ ID NO: 21719

SEQ ID NO: 21722 - protein, 94 aa, Homo sapiens
AVSGFTVSNNYMSWVRQAPGKGLEWVSMIYSGGDTYYGDSVKGRFTISRHDSNNILYLQMNSLRADDTAVYYCARWSGRYYDYWGHGNLVTVSS

SEQ ID NO: 21723 - protein, 91 aa, Homo sapiens
AASGFTFSDSTMYWVRQASGKGLEWVGRIRNKANNYATTYGASVKGRFTISRDDSKNTAYLQMNSLKIEDTAVYYCTSHYWGQGTLVTVSS

SEQ ID NO: 21724 - protein, 91 aa, Homo sapiens
AASGFSFSDSTMYWVRQASGKGLEWVGRIRNKANNYATTYGASVKGRFTISRDDSKNTAYLQMNSLKIEDTAMYYCTSHYWGQGTLVTVSS

SEQ ID NO: 21725 - protein, 91 aa, Homo sapiens
AASGFTFSDSPIHWVRQASGKGLEWVGRIRSKANTYATAYAASVKGRFTISRDDSKNTAYLQMNSLKTEDTAIYYCTSHYWGQGTLVTVSS

SEQ ID NO: 21726 - protein, 91 aa, Homo sapiens
AASGFTFSDSTMYWVRQASGKGLEWVGRIRNKANNYATTYGASVKGRFTISRDDSKNTAYLQMNSLKIEDTAVYYCTSHYWGQGTVVTVSS

SEQ ID NO: 21727 - protein, 97 aa, Homo sapiens
AASGFTFNTCGMHWVRQAPGKGLEWVAVIWKNGINQYYADSVKGRFIFSRDDSKNALYLQMNSLRAEDTAVYYCARERGPFDGFDVWGQGTMVTVSS

SEQ ID NO: 21728 - protein, 97 aa, Homo sapiens
VASGFTFSTYGMHWVRQAPGKGLEWVTVIWSNGVNKYYADSVRGRFTFSRDNSKNTLYLHMNNLRVEDTAVYYCARERGPFDGFDVWGHGTLVTVSS

SEQ ID NO: 21729 - protein, 95 aa, Homo sapiens
ASGFTFSTYGMHWVRQAPGKGLEWVAVLWSNGINNYYSDSVRGRFTISRDNSNTLYLQMNSLRGEDTAVYYCARERGPFDGFDVWGLGTMVTVSS

SEQ ID NO: 21730 - protein, 96 aa, Homo sapiens
AASGFTFNTCGMHWVRQAPGKGLEWVAVIWKNGINQYYADSVKGRFIFSRDDSKNTLYLQMNSLRAEDTAVYYCARERGPFDGFDVWGQGTMVTVS

SEQ ID NO: 21731 - protein, 97 aa, Homo sapiens
AASGFMFNTCGMHWVRQAPGKGLEWVAVIWSNGINQYYGDSVKGRFIFSRDDSKNILYLQMNSLRAEDTAVYYCARERGPFDGFDVWGQGTMVTVSS

SEQ ID NO: 21732 - protein, 94 aa, Homo sapiens
ASGFTFNSYYMTWVRQAPGKGLEWLANIREDGGERFYVDSVKGRFTISRDNAKNSLYLQMSSLRAEDTAVYFCARGGHTSPDYWGQGTLVTVSS

SEQ ID NO: 21733 - protein, 95 aa, Homo sapiens
AASGFILNNYWMTWVRQAPGKGLEWVANIKQDGSEKYYVDSVKGRFTIFRDNAKNSLYLQMSNLRAEDTAVYYCARGGHTSPDYWGQGTLVTVSS

SEQ ID NO: 21734 - protein, 97 aa, Homo sapiens
TASGFTFGDYAMNWFRQAPGKGLEWVGFIRTKAYGGTTEYAASVKGRFTISRDDSKSIAYLQMNSLKTEDTAVYYCQGSSWNWFDPWGQGTLVTVSS

SEQ ID NO: 21735 - protein, 97 aa, Homo sapiens
TASGFIFGDYVMNWFRQAPGKGLEWVGFIRNKAYGGSTEYAASVKGRFTISRDDSKSIAYLQMNNLKIEDTAVYYCQGSSWNWFDPWGQGTLVTVSS

SEQ ID NO: 21736 - protein, 97 aa, Homo sapiens
TASGFTFGDYTMNWFRQPPGKGLEWVGFIRTKASGGTTEYAASVKGRFTISRDDSKSIAYLQMNSLKTEDTAVYYCQGSSWNWFDPWGRGTLVTVSS

SEQ ID NO: 21737 - protein, 97 aa, Homo sapiens
TASGFTFGDYVMNWFRQAPGKGLEWIGFIRNKAYGGSTEYAASVKGRFTISRDDSKSIAYLQMNSLKIEDTAVYYCQGSSWNWFDPWGQGTLVTVSS

SEQ ID NO: 21738 - protein, 97 aa, Homo sapiens
TASGFTFSDYTMSWFRQAPGKGLEWVGFIRIKAYGGTTEYAASVKGRFTISRDDSESIAYLQMNSLKTEDTAVYYCQGSSWNWFDPWGQGTLVTVSS

SEQ ID NO: 21739 - protein, 100 aa, Homo sapiens
TVSGGSISSGSYYWSWIRQPAGKGLEWIGRIYTSGSTNYNPSLKSRVTISVDTSKNQFSLKLSSVTAADTAVYYCARSRDYYYYYGMDVWGQGTTVTVSS

SEQ ID NO: 21740 - protein, 100 aa, Homo sapiens; identical to SEQ ID NO: 21739

SEQ ID NO: 21741 - protein, 101 aa, Homo sapiens
AASGFFFSNYAMSWVRQAPGKGLEWVSAISGGADRTDFADSVKGRFTISRDNSRKMLFLHMNRLRAEDTAIYYCAKDGWGYSSGRGAFDIWGQGTMVTVSS

SEQ ID NO: 21742 - protein, 101 aa, Homo sapiens
AASGFLFSNYAMSWVRQAPGKGLEWVSAISGGADSTNFADSVKGRFTISRDNSRNTLYLHMNSLRAEDTAIYYCAKDGWGYSSGRGAFDIWGQGTMVTVSS

SEQ ID NO: 21743 - protein, 101 aa, Homo sapiens
AASGFVFSKYAMSWVRQAPGKGLEWVSGISGGADSTNFADSVKGRFTISRDNSRNMLYLHMNSLRAEDTAIYYCAKDGWGYSSGRGAFDIWGQGTMVTVSS

SEQ ID NO: 21744 - protein, 101 aa, Homo sapiens
AASEFSFSSYAMGWVRQAPGKGLEWVSIISGSGDSTDYADSVKGRFTISRDNSKNTLYLQMNRLRAEDTAIYYCAKDGWGYSSGRGAFDIWGQGTMVTVSS

SEQ ID NO: 21745 - protein, 101 aa, Homo sapiens
VASEFSFSSYAMGWVRQAPGKGLEWVSIISGSGDSTDYADSVKGRFTISRDNTKNTLYLQMNRLRAEDTAIYYCAKDGWGYSSGRGAFDIWGQGTMVTVSS

SEQ ID NO: 21746 - protein, 101 aa, Homo sapiens
AASEFSFSSYAMGWVRQAPGKGLEWVSIISGSGDSIDYADSVKGRFTISRDNTKNTLYLQMNRLRAEDTAIYYCAKDGWGYSSGRGAFDIWGHGTMVTVSS

SEQ ID NO: 21747 - protein, 101 aa, Homo sapiens; identical to SEQ ID NO: 21745

SEQ ID NO: 21748 - protein, 93 aa, Homo sapiens
ASGYTFTGHHIHWVRQTPGQGLEWMGRIMPYDGSTTYAQKFLGRVTMTRDTSTSTVYMELSSLRSDDTAVYYCARDTYGHDYWGQGTRVTVSS

SEQ ID NO: 21749 - protein, 93 aa, Homo sapiens
ASGYTFTDHHIHWVRQTPGQGLEWMGRIIPYDGSATYAQKFLGRVTMTRDTSTSTVYMELSSLRSDDTAVYYCARDTYGHDYWGQGTRVTVSS

SEQ ID NO: 21750 - protein, 93 aa, Homo sapiens
ASGYTFTDHHIHWVRQAPGQGLEWMGKITPYDGSTIYAQKFQTRVTMTRDTSTRTVYMVLSGLRYEDTAVYYCARDTYGHDYWGQGTLVTVSS

SEQ ID NO: 21751 - protein, 92 aa, Homo sapiens
AGYGFSFRNYDMTWVRQAPGKGLEWVSTITSGGTTYYADSVKGRFTISRDNSEDTLYLQMNSLRAEDTALYYCAKGSGVDSWGQGALVSVSS

SEQ ID NO: 21752 - protein, 93 aa, Homo sapiens
AASGFTFTNYAMSWVRQPPGKGLEWVSSVRGSGDNTYYADSVKGRFTISRDSSKNTLYLQMSGLRDDDTAVYYCAKGSGVDSWGQGTLVTVSS

SEQ ID NO: 21753 - protein, 102 aa, Homo sapiens
AASGFTFSSYGMHWVRQAPGKGLEWVGVIWNDGRLKYYTDSVKGRFTISRDNSDNTLYLQMDSLRAEDTAVYYCARSVVVVPGAISNWFDPWGQGTLVTVSS

SEQ ID NO: 21754 - protein, 102 aa, Homo sapiens
AASGFTFSAYGMHWVRQAPGKGLEWVAVIWYDGSDKYYADSVKGRFTISRDNSKNTLYLQMNSLRAEDTALYYCARSVVVVPGAISNWFDPWGQGTLVTVSS

SEQ ID NO: 21755 - protein, 103 aa, Homo sapiens
TVSGGSISSISYYWGWIRQPPGKGLEWIGSILYNGRIFYNPSLKSRVTISVDTSKNQFSLKVSSVTAADTAVYYCARHGDYYGSQSYYGMDVWGQGTTVTVSS

SEQ ID NO: 21756 - protein, 103 aa, Homo sapiens
TVSGGSISSISYYWGWIRQPPGKGLEWIGSILYNGRVFYNASLKSRVTISVDTSRNQFSLKLSSVTAADTAVYYCARHGDYYGSQSYYGMDVWGQGTAVTVSS

SEQ ID NO: 21757 - protein, 103 aa, Homo sapiens
IVSGGSISSSSYYWGWIRQPPGKGLEWIGSIYYSGRTFYNPSLKSRVTISVDTSKNQFSLKVSSVTAADTAVYYCARHGDYYGSQSYYGMDVWGQGTTVTVSS

SEQ ID NO: 21758 - protein, 93 aa, Homo sapiens
AASGLTFSIYRMSWVRQAPGKGLEWVANIKEDGSEKYYLDSVKGRFTISRDNAKNSLYLQMNSLRVEDTAVYYCARGTSLGVWGKGTTVIVSS

SEQ ID NO: 21759 - protein, 93 aa, Homo sapiens
AASGFTFSTYWMNWVRQAPGKGLEWVANIKADGSEKNFVDSVKGRFTISRDNAKNSLYLQMNSLRAEDTALYYCARGTSLGVWGQGTTVIVPS

SEQ ID NO: 21760 - protein, 96 aa, Homo sapiens
AASGFTFNNAWMSWVRQAPGKGLEWVGRIRTKADGEPTDYAAPVKGRFTISRDDSKNTLYLQMNSLKTEDTAVYYCTTRSSQGGYWGQGTLVTVSS

SEQ ID NO: 21761 - protein, 96 aa, Homo sapiens; identical to SEQ ID NO: 21760

SEQ ID NO: 21762 - protein, 96 aa, Homo sapiens
AASGFTFSDAWMSWVRQAPGKGLEWVGRIKSKTGGATTDYAAPVKGRFTISRDDSRNTLYLQMNTLKTEDTAVYFCTTRSSQGGYWGQGTLVTVSS

SEQ ID NO: 21763 - protein, 96 aa, Homo sapiens
AASGFTFSDAWMSWVRQAPGKGLEWVGRIKSKTAGATTDYAAPVKGRFTISRDDSKNTLYLQMNSLKTEDTAVYYCTTRSSQGGYWGQGTLVTVSS

SEQ ID NO: 21764 - protein, 96 aa, Homo sapiens
AASGFTFSDAWMSWVRQAPGKGLEWVGRIKSKTGGATTEYAAPVKGRFTISRDDSRNTLYLQMNTLKTEDTAVYYCTTRSSQGGYWGQGTLVTVSS

SEQ ID NO: 21765 - protein, 96 aa, Homo sapiens
AASGFTFSDAWMSWVRQAPGKGLEWVGRIKSKTGGATTDYAPPVKGRFTISRDDSRNTLYLQMNTLKTEDTAVYYCTTRSSQGGYWGQGTLVTVSS

SEQ ID NO: 21766 - protein, 96 aa, Homo sapiens
AASGFTFSDAWMSWVRQAPGKGLEWVGRIKSKTGGATTDYGAPVKGRFTISRDDSRNTLYLQMNTLKTEDTAVYYCTTRSSQGGYWGQGTLVTVSS

SEQ ID NO: 21767 - protein, 99 aa, Homo sapiens
VVSGFSFSDYGMHWVRQAPGKGLEWVAVIWYDGSNKYYADSVKGRFTISRDNSKNTLYLQMNSLRAEDTAVYYCARDSSGGDWRYFDYWGQGTLVTVSS

SEQ ID NO: 21768 - protein, 99 aa, Homo sapiens
VVSGFTFGDYGMHWVRQAPGKGLEWVAVIWHDGSNKYYADSVKGRFTTSRDNSQNTVYLQMDRLRAEDTAVYYCARDSSGGDWRYFDYWGQGTLVTVSS

SEQ ID NO: 21769 - protein, 99 aa, Homo sapiens
AASGFTFNRYGIHWVRQAPGKGLEWVAVIWYDGRNKYYADSVKGRFTISRDNSKNTLYLEMNSLRAEDTAVYYCARDSSGGDWRYFDYWGQGTLVTVSS

SEQ ID NO: 21770 - protein, 99 aa, Homo sapiens
AASGFSFSDYGMHWVRQAPGKGLEWLARIWYDGSNEYYADSLKGRFTISRDNSKNTLYLQMNSLRAEDTAIYYCARDSSGGDWRYFDYWGQGILVTVSS

SEQ ID NO: 21771 - protein, 99 aa, Homo sapiens
VVSGFSFSDYGMHWVRQAPGKGLEWVARIWYDGSNEYYADSVKGRFTISRDNSKNTLYLQMNSLRGEDTAVYYCARDSSGGDWRYFDYWGQGTLVTVSS

SEQ ID NO: 21772 - protein, 93 aa, Homo sapiens
VVSGFSVSNNYMSWVRRAPGRGLQWVSVIHDDGKTYYLDSVKGRFTISRDKSKNTLYLQMSSLTAEDTAVYYCVRQAGGFDYWGQGTPVTVSS

SEQ ID NO: 21773 - protein, 93 aa, Homo sapiens
EVSGFAVGNNYLSWVRQAPGKGLQWVSVIHDDGKIYYADSVKGRFTISRDNSKNTLYLQMHSLRVEDTAVYYCVRQAGGFDYWGQGTLVTVSS

SEQ ID NO: 21774 - protein, 93 aa, Homo sapiens
AVSGFTVSSSYMSWVRQDPGKGLEWVSTIHKDGATHYADSVKGRYTISRDTSRNMVYFEMNSLRVDDTALYYCVRQAGGFDYWGQGTLVTVSS

SEQ ID NO: 21775 - protein, 93 aa, Homo sapiens
AVSGFAVGNNYLSWVRQAPGKGLQWVSVIHDDGKIYYADSVKGRFTISRDNSRNTLYLQMHSLRAEDTAVYYCVRQAGGFDYWGQGTLVTVSS

SEQ ID NO: 21776 - protein, 94 aa, Homo sapiens
VASGFSVSNNYMSWVRQAPGKGLEWVSVIHDDGKTIYYADSVKGRFTISRDNSKNTLYLQMSSLRAEDTAVYYCVRQAGGFDYWGQGTLVTVSS

SEQ ID NO: 21777 - protein, 93 aa, Homo sapiens
AASGFTVSNNYLSWVRQAPGKGLEWVSVIHDDGRTHYADSVKGRFTISRDNSKNTFDLQMNTLRAEDTALYYCVRQAGGFDYWGQGTLVTVSS

SEQ ID NO: 21778 - protein, 94 aa, Homo sapiens
AASGFTFSSHWMSWVRQAPGKGLEWVADINQDGSEKHYVDSVKGRFTISRDNAKNSLYLQMNSLRVEDTATYYCARDPRLFHYWGQGTVVTVSS

SEQ ID NO: 21779 - protein, 94 aa, Homo sapiens
VASGFTLSSHWMSWVRQAPGKGLEWVADINQDGSEKHYVDSVKGRFTISRDNAQNILYLQMNSLRVEDTAVYYCARDPRLFHYWGQGTLVTVSS

SEQ ID NO: 21780 - protein, 94 aa, Homo sapiens; identical to SEQ ID NO: 21779

SEQ ID NO: 21781 - protein, 92 aa, Homo sapiens
TVAGGSISSDTYYWNWIRQPAGKGLEWIGRIYSSGSTNYNPPLKSRVTMSVDTSKNQFSLNLSSVTAADTAVYYCARGVAVWGQGTTVTVSS

SEQ ID NO: 21782 - protein, 92 aa, Homo sapiens
TVSGGSISSATYYWSWIRQPAGKGLEWIGRIFASGTTNYNPSLNSRVTILIDTSRNQFSLKLSSVTAADTAVYYCARGVAVWGQGTTVTVSS

SEQ ID NO: 21783 - protein, 92 aa, Homo sapiens; identical to SEQ ID NO: 21782

SEQ ID NO: 21784 - protein, 92 aa, Homo sapiens
TASGGSISSATYYWSWIRQPAGKGLEWIGRIFASGTTNYNPSLNSRVTILIDTSRNQFSLKLSSVTAADTAVYYCARGVAVWGQGTTVTVSS

SEQ ID NO: 21785 - protein, 92 aa, Homo sapiens
TVSGGSISSATYYWSWIRQPAGKGLEWIGRIFASGTTNYNPSLNSRVTILIDTSRNQFSLKLSSVTAADTAVYYCARGVAVWGQGTTVTISS

SEQ ID NO: 21786 - protein, 92 aa, Homo sapiens; identical to SEQ ID NO: 21782

SEQ ID NO: 21787 - protein, 97 aa, Homo sapiens
AASGFTFSNYWMHWVRRAPGKGLVWVARIDTNGRDITYADSVKGRFTISRDNAKNTLFLQMNSLRADDTAVYYCARLYSGYDFFDYWGLGTLVSVSS

SEQ ID NO: 21788 - protein, 97 aa, Homo sapiens
AVSGFTFSNYWMHWVRRAPGKGLVWVARINTNGRDITYADSVKGRFTISRDNAKNTLFLQMNSLRADDTAVYYCARLYSGYDFFDYWGLGTLVSVSS

SEQ ID NO: 21789 - protein, 96 aa, Homo sapiens
VSGFTFSSYWMHWVRRAPGKGLVWVSRMDTNGRDISYADSVKGRFTISRDNAKNTLYLQMNSLRADDTAVYYCARLYSGYDFFDYWGLGTLVSVSS

SEQ ID NO: 21790 - protein, 97 aa, Homo sapiens
AASGFTFSNYWMHWVRQVPGKGLVWVSRTDSDGSDISYADSVKGRFTISRDNAKNTLYLQMNNLRAEDTAVYYCARLYSGYDFFDYWGQGTLVTVSS

SEQ ID NO: 21791 - protein, 97 aa, Homo sapiens
AVSGFTFSNYWMHWVRRAPGKGLVWVARMNTDGRDITYADSVKGRFTISRDNAKNTLFLQMNSLRADDTAVYYCARLYSGYDFFDYWGLGTLVSVSS

SEQ ID NO: 21792 - protein, 97 aa, Homo sapiens
AVSGFTFSNYWMHWVRRAPGKGLVWVARMDTNGRDISYADSVRGRFTISRDNAKNTLFLQMNSLRADDTAVYYCARLYSGYDFFDYWGLGTLVSVSS

SEQ ID NO: 21793 - protein, 97 aa, Homo sapiens
AVSGFTFSNYWMHWVRRAPGKGLVWVARMDTNGRDISYADSVRGRFTISRDNAKNTLFLQMNSLRVDDTAVYYCARLYSGYDFFDYWGLETLVSVSS

SEQ ID NO: 21794 - protein, 97 aa, Homo sapiens
AVSGFTFSSYWMHWVRRAPGKGLVWVSRIDTNGRDISYADSVKGRFTISRDNAKNTLYLQMNSLRADDTAVYYCARLYSGYDFFDYWGLGTLVSVSS

SEQ ID NO: 21795 - protein, 97 aa, Homo sapiens
VVSGFTFSNYWMHWVRQPPGKGLVWVARMNTDGRDITYADSVKGRFTISRDNAKNTLFLQMNSLRADDTAVYYCARLYSGYDFFDYWGLGTLVSVSS

SEQ ID NO: 21796 - protein, 97 aa, Homo sapiens
AVSGFTFSNYWMHWVRRAPGKGLVWVARMDTNGRDISYADSVRGRFTISRDNAKNTLFLQMNSLRVDDTAVYYCARLYSGYDFFDYWGLGTLVSVSS

SEQ ID NO: 21797 - protein, 97 aa, Homo sapiens; identical to SEQ ID NO: 21791

SEQ ID NO: 21798 - protein, 94 aa, Homo sapiens
AVYGGSFSGYYWSWIRQPPGKGLEWIGEINHSGSSYYNPSLKSRLTISVDTSKNQFSLKLSSVTAADTAVYYCARKGEQLWHYWGQGTLVTVSS

SEQ ID NO: 21799 - protein, 94 aa, Homo sapiens
AVYGGSFSGYYWSWIRQPPGKGLEWIGEINHSRSTNYNPSLKSRVTISVDTSKNQFSLKLSSVTAADTAVYYCARKGEQLWHYWGQGGLVTVSS

SEQ ID NO: 21800 - protein, 94 aa, Homo sapiens
AVYGGSFSDYYWSWIRQPPGKGLEWIGEINHSGSTYYNPSLKSRLTISVDTSKNQFSLKLSSVTAADTAVYYCARKGEQLWHYWGQGTLVTVSS

SEQ ID NO: 21801 - protein, 94 aa, Homo sapiens
AVYGGSFSGYYWSWIRQPPGKGLEWIGEINHSESTYYNPSLKSRVTISVDTSKNQFSLKLSSVTAADTAVYYCARKGEQLWHYWGQGTLVTVSS

SEQ ID NO: 21802 - protein, 94 aa, Homo sapiens; identical to SEQ ID NO: 21800

SEQ ID NO: 21803 - protein, 94 aa, Homo sapiens; identical to SEQ ID NO: 21798

SEQ ID NO: 21804 - protein, 94 aa, Homo sapiens; identical to SEQ ID NO: 21801

SEQ ID NO: 21805 - protein, 94 aa, Homo sapiens
AVYGGSFRGYYWSWIRQPPGKGLEWIGEINHSRSTNYNPSLKSRVTISVDASKNQFSLKVSSVTAADTAVYYCARKGEQLWHYWGQGTLVTVSS

SEQ ID NO: 21806 - protein, 94 aa, Homo sapiens
AVYGGSFSGYYWSWIRQPPGKGLEWIGEINHNRITYYNPSLKSRVTISVDTSKNQFSLKLSSVTAADTAVYYCARKGEQLWHYWGQGTLVTVSS

SEQ ID NO: 21807 - protein, 94 aa, Homo sapiens
AVYGGSFSGYYWSWIRQPPGKGLEWIGEINHSGSTYSNPSLNSRVTISVDTSKNQFSLKLSSVTAADTAVYYCARKGEQLWHYWGQGTLVTVSS

SEQ ID NO: 21808 - protein, 94 aa, Homo sapiens
AVYGGSFSGYYWSWIRQPPGKGLEWIGEINHSRRTNYNPSLKSRLTISVDTSKNQFSLKLSSVTAADTAVYYCARKGEQLWHYWGQGTLVTVSS

SEQ ID NO: 21809 - protein, 94 aa, Homo sapiens; identical to SEQ ID NO: 21808

SEQ ID NO: 21810 - protein, 94 aa, Homo sapiens
AVYGGSFSDYYWSWIRQPPGKGLEWIGEINHKRITNYNPSVKSRVTISVDTSKNQFSLKLSSVTAADTAVYYCARKGEQLWHYWSQGILVTVSS

SEQ ID NO: 21811 - protein, 94 aa, Homo sapiens; identical to SEQ ID NO: 21801

SEQ ID NO: 21812 - protein, 94 aa, Homo sapiens
AVYGGSFSDYYWSWIRQPPGKGLEWIGEINHSGSTYYNPSLKSRLTISVDTPKNQFSLKLSSVTAADTAVYYCARKGEQLWHYWGQGTLVTVSS

SEQ ID NO: 21813 - protein, 94 aa, Homo sapiens
AVYGGSFSAYYWSWIRQPPGKGLEWIGEINHSRSTYYNPSLKSRVTISVDTSKNQFSLKLSSVTAADTAVYYCARKGEQLWHYWGQGGLVTVSS

SEQ ID NO: 21814 - protein, 94 aa, Homo sapiens; identical to SEQ ID NO: 21807

SEQ ID NO: 21815 - protein, 94 aa, Homo sapiens
AVYGGSFRGYYWSWIRQPPEKGLEWIGEINHSRSTNYNPSLKSRVTISVDASKNQFSLKVSSVTAADTAVYYCARKGEQLWHYWGQGTLVTVSS

SEQ ID NO: 21816 - protein, 94 aa, Homo sapiens; identical to SEQ ID NO: 21799

SEQ ID NO: 21817 - protein, 94 aa, Homo sapiens
AVYGGSFSGYYWSWIRQPPGKGLEWIGEINHGGGTNYNPSLKSRVAISLATSKNQFSLKLSSVTAADTAVYYCARKGEQLWHYWGQGGLVTVSS

SEQ ID NO: 21818 - protein, 94 aa, Homo sapiens
AVYGGSFSGYYWSWIRQPPGKGLEWIGEINHIRVTNYNPSLKSRVTISVDTSKNQCSLKLSAVTAADTAVYYCARKGEQLWHYWSQGTLVTVSS

SEQ ID NO: 21819 - protein, 94 aa, Homo sapiens
AVYGGSFSGYYWSWIRQPPGKGLEWIGEINHSRSTNYNPSLKSRVTISVDTSKNQFSLKLSSVTAADTAVYYCARKGEQLWHYWSQGTLVTVSS

SEQ ID NO: 21820 - protein, 94 aa, Homo sapiens
AVYGGSFSGYYWSWIRQPPGKGLEWIGEINHSRRTYYNPSLKSRVTISVDTSKNQFSLKLSSVTAADTAVYYCARKGEQLWHYWGQGTLVTVSS

SEQ ID NO: 21821 - protein, 94 aa, Homo sapiens
AVYGGSFSGYYWSWIRQPPGKGLEWIGEINHSRSTNYNPSLKSRVTISVDRSKNQFSLKLSSVTAADTAVYYCARKGEQLWHYWGQGTLVTVSS

SEQ ID NO: 21822 - protein, 94 aa, Homo sapiens
AVYGGSFRGYYWSWIRQPPGKGLEWIGEINHSRSTNYNPSLKSRVTISVDASKKQVSLKVSSVTAADTAVYYCARKGEQLWHYWGQGTLVTVSS

SEQ ID NO: 21823 - protein, 94 aa, Homo sapiens; identical to SEQ ID NO: 21798

SEQ ID NO: 21824 - protein, 94 aa, Homo sapiens
AASGFTFSTHWMHWVRQAPGKGLVWVARTSSDGSSTSYADSVKGRFTISRDNAKNTVYLQMNSLRVEDTAVYYCATFGGYPDYWGQGVLVTVSS

SEQ ID NO: 21825 - protein, 93 aa, Homo sapiens
AASGFTFSNMWMDWVRQAPGTGLEWVSFITSDGSNTGYADSVKGRFTISRDNAKNTLYLQMNSLRAEDTAVYYCATFGGYPDYWGQGTLVSVS

SEQ ID NO: 21826 - protein, 93 aa, Homo sapiens
AASGFTLSSHWMTWLRQAPGMGLQWVANIKDDGSEKYYADSVKGRFTISRDNAKNSLSLQMNSLRVEDTAVYFCARGLAPPYWGQGTLVTVSS

SEQ ID NO: 21827 - protein, 93 aa, Homo sapiens
AASGFTFSGYWMSWVRQAPGKGLEWVANIKQGGSEKYYVDSVKGRFTISRDDAKNSLYLQMNGLRVEDTAVYYCARGLAPPYWGQGTLVTVSS

SEQ ID NO: 21828 - protein, 91 aa, Homo sapiens
AASGFTLSSHDMSWVRQAPGKGLEWISYISPRSAKYYADSVKGRFTISRDNAKNSLDLQMNSLRDEDTAVYYCVRGWMADWGQGTLVTVSS

SEQ ID NO: 21829 - protein, 92 aa, Homo sapiens
AASGFTISRDDMSWVRQAPGKGLEWVSYISGSTDATYYADSVKGRFTISRDTAKTSVFLQMNSLRDDDTAVYYCVRGWMADWGQGTLVTVSS

SEQ ID NO: 21830 - protein, 91 aa, Homo sapiens
VASGFTLNSDDISWVRQAPGKRLEWISYISPVSATYYANSVKGRFTISRDTAKASVYLQMNSLRDDDTAVYFCVRGWMADWGQGTLVTVSS

SEQ ID NO: 21831 - protein, 91 aa, Homo sapiens
VASGFTLNSDDISWVRQAPGKRLEWISYISPVSATYYANSVKGRFTISRDTAKASVYLQMNSLRDDDTAVYYCVRGWMADWGQGTLVTVSS

SEQ ID NO: 21832 - protein, 97 aa, Homo sapiens
AASGFTFSNHWMHWVRQAPGKGLVWVSRIDSSGTGESYADFVKGRFTISRDNAKSTVYLQMNSLGAEDRAVYYCARDARNWNRIDYWGQGALVSVSS

SEQ ID NO: 21833 - protein, 97 aa, Homo sapiens
AASGFTFSNNWMHWVRQAPGKGLVWVSRIDFDGGSTSYADSVKGRFTISRDNAQNTLYLQMTSLRVEDTAVYYCARDARNWNRIDYWGPGTQVTVSS

SEQ ID NO: 21834 - protein, 97 aa, Homo sapiens
VASGFTFNSNWMHWVRQSPGMGLVWVSRIDYDGSSTNYADSVKGRFTISRDNAKNTLYLQMNSLRAEDTGVYYCARDARNWNRIDYWGQGTLVTVSS

SEQ ID NO: 21835 - protein, 97 aa, Homo sapiens
AASGFTFNSNWMHWVRQPPGMGLVWVSRIDYDGSSTSYADSVKGRFTISRDNAKNTLYLQMNSLRAEDTAVYYCARDARNWNRIDYWGQGTLVTVSS

SEQ ID NO: 21836 - protein, 97 aa, Homo sapiens
AASGFRFDGYWMHWVRQSSGKGLEWVARTDYNGYDTSYADSVKGRFTISRDNAENTVYLQMNSLRVEDTAKYFCARDARNWNRIDYWGQGTLVTVAS

SEQ ID NO: 21837 - protein, 97 aa, Homo sapiens
AASGFTFDDYWMHWVRQTPGKGLEWVARIDYSGYGTSHADSVKGRFTISRDNARNTMYLQMNSLRVDDTAKYYCARDARNWNRIDYWGQGTLVTVAS

SEQ ID NO: 21838 - protein, 91 aa, Homo sapiens
AAFGFSLSSIDMSWVRQAPGKGLEWVAYISTVSSTYYADSVKGRFSISRDNAKNSLYLQMNSLRDEDTAVYYCARGWFANWGQGTLVTVSS

SEQ ID NO: 21839 - protein, 91 aa, Homo sapiens
AAFGFSLSSIDMSWVRQAPGKGLEWVAYISTVSATYYADSVKGRFSISRDDAKNSLYLQMNSLKDEDTAVYYCARGWFANWGQGTLVTVSS

SEQ ID NO: 21840 - protein, 92 aa, Homo sapiens
AASGFTFSSYSMNWVRQAPGKGLQWVSYISSSSSNIYYADSVKGRFTISRDNAKNSLYLQMNSLRAEDTAVYYCARGWFANWGQGTLVTVSS

SEQ ID NO: 21841 - protein, 95 aa, Homo sapiens
AASGFTFSDYSMNWIRQAPGKGLEWLAYIRSTSKMIYYVDSVRGRFTISRDNAQNSLFLQMNSLRDDDTALYYCVRDHEFAFDIWGRGTMVTVSS

SEQ ID NO: 21842 - protein, 95 aa, Homo sapiens
AASGFTFSEYPMNWVRQAPGKGLEWVSHIRGDAITVRYVDSVKGRFTISRDNAENSLFLQMTSLRDEDSAVYYCVRDHEFAFDIWGQGTVVTVSS

SEQ ID NO: 21843 - protein, 91 aa, Homo sapiens
AASGFTFSNYWMDWVRQAPGKGLEWVANIKRDESEKYYVDSVKGRFTISRDNAKNSVYLQMNSLRVEDKAVYYCMRSFEYWGQGILVTVSS

SEQ ID NO: 21844 - protein, 91 aa, Homo sapiens
AASRFIFSSYWMHWVRQAPGKGLEWVANIKGDGSEKYYVDSVKGRFTISRDNAKNSLFLQMNSLRVEDTAVYYCMRSFEYWGQGILVTVSS

SEQ ID NO: 21845 - protein, 92 aa, Homo sapiens
AASRLLFRTDWMSWVRQAPGKGLEWVATIKPDGSVDFYVDSVRGRFTISRDNAKRSLYLQMNSLRGEDTALYYCVRGDGDDWGQGTLVTVSS

SEQ ID NO: 21846 - protein, 92 aa, Homo sapiens
VASGVSLSNYWMNWVRQTPRKGLEWVAHIKPDGTEAYYVDSVKGRFTISRDNAKNSLYLQMDSLRGEDTAVYFCVRGDGDDWGQGTLVSVSS

SEQ ID NO: 21847 - protein, 92 aa, Homo sapiens
VASGVSLSNYWMNWVRQTPRKGLEWVAHIKPDGTETYYVDSVKGRFTISRDNAKNSLYLQMDSLRGEDTAVYFCVRGDGDDWGQGTLVSVSS

SEQ ID NO: 21848 - protein, 96 aa, Homo sapiens
GFGYTFTRYWIIWVRQMPGKGLEWMGMIDPSDSHASYDPSFQGHVTISVDKSFNTAYLQWSSLQASDTAIYYCATGTSFGYTVSYWGQGTLVTVSS

SEQ ID NO: 21849 - protein, 96 aa, Homo sapiens; identical to SEQ ID NO: 21848

SEQ ID NO: 21850 - protein, 101 aa, Homo sapiens
AASGLTFSNAWMNWVRQPPGKGLEWVGLIKSKADGGTTDYAAPVKGRFTISRDDSKDTVYLQMNSLQSEDTAVYYCATAPGFYSSSPFDYWGQGTVVTVSS

SEQ ID NO: 21851 - protein, 101 aa, Homo sapiens
AASGLTFNNAWMNWVRQAPGKGLEWVGLIKSKADGGTTDYAAPVKGRFTISRDDSKDTVYLQMNSLQSEDTAVYYCATAPGFYSSSPFDYWGQGTVVTVSS

SEQ ID NO: 21852 - protein, 101 aa, Homo sapiens
AASGITFSNAWMHWVRQAPGKGLEWIGRIESKSDGGTTDYAAPVQGRFTISRDDSQSTVYLQMNSVNTEDTAVYYCATAPGFYSSSPFDYWGQGSLVTVSS

SEQ ID NO: 21853 - protein, 97 aa, Homo sapiens
VSGVTISGFLWTWIRQSSERGLQWLGQIRDSGATTFNPSLQSRLTISVDTSKNHFSLHLKSVTAADTAVYYCARVSVHNDYYMRLDYWGQGTRVTVS

SEQ ID NO: 21854 - protein, 97 aa, Homo sapiens
VSGVTISGFLWTWIRQSSERGLQWLGQIRDSGATTFNPSLQSRLTISVDTSKNHFSLHLKSLTAADTAVYYCARVSVHNDYYMRLDYWGQGTRVTVS

SEQ ID NO: 21855 - protein, 97 aa, Homo sapiens
VSGVTISVFLWTWIRQSSERGLQWLGQIRDSGATTFNPSLQSRLTISVDTSKNHFSLHLKSVTAADTAVYYCARVSVHNDYYMRLDYWGQGTRVTVS

SEQ ID NO: 21856 - protein, 97 aa, Homo sapiens
VSGVTISGFLWTWIRQSSERGLQWLGHIRDSGATTFNPSLQSRLTISVDTSKNHFSLHLKSVTAADTAVYYCARVSVHNDYYMRLDYWGQGTRVTVS

SEQ ID NO: 21857 - protein, 96 aa, Homo sapiens
AASAFTVSNYYMSWVRLAPGKGLEWVSVIYSGGTTYYAASVTGRFTISRDSSKNSLYLQMNSLRADDTAVYYCARGYSSGWYSDYWGQGTLVTVSS

SEQ ID NO: 21858 - protein, 96 aa, Homo sapiens
AASGFTVSNNYMSWVRQAPGKGLEWVSVIYSGGVTYYADSVEGRFTISRDNSKNTLYLQMNSLRAEDTAVYYCARGYSSGWYSDYWGQGTLVTVSS

SEQ ID NO: 21859 - protein, 96 aa, Homo sapiens
AASGFTVSSNYMSWVRQAPGKGLEWVSVIYSGGVTYYADSVEGRFTISRDNSKNTLYLQMNSLRAEDTAVYYCARGYSSGWYSDYWGQGTLVTVSS

SEQ ID NO: 21860 - protein, 96 aa, Homo sapiens; identical to SEQ ID NO: 21858

SEQ ID NO: 21861 - protein, 96 aa, Homo sapiens; identical to SEQ ID NO: 21858

SEQ ID NO: 21862 - protein, 90 aa, Homo sapiens
AVYGGSFSGYYWSWIRQTPGKGLEVIGEIDGSGSAKYNPSLRSRLTLSLDTSKNQFSLKLNSMTAADTAVYYCARVWDLWGRGTLVTVSS

SEQ ID NO: 21863 - protein, 90 aa, Homo sapiens
AVYGGSFSGYYWSWVRQPPGKGLEVIGEIDDRGSAKYNPSLKSRVTLSLDTSKRQFSLKVSSMTAADTAVYYCARVWDLWGQGTLVTVSS

SEQ ID NO: 21864 - protein, 90 aa, Homo sapiens
AVYGGSFSGYYWSWVRHPPGKGLEVIGEIDDRGSAKYNPSLKSRVTLSLDTSKRQFSLKVSSMTAADTAVYYCARVWDLWGQGTLVTVSS

SEQ ID NO: 21865 - protein, 90 aa, Homo sapiens
AVYGGSFSGYYWSWVRQPPEKSPECIGEITPSGSTNYNPSLKSRVTISVDTSKNHFSLKLTSVTAADTAVYYCARVWDLWGPGTLVIVSS

SEQ ID NO: 21866 - protein, 94 aa, Homo sapiens
VGSGFMFSRYWMAWVRHPPGEGLEWVAHIKEDRTQTYYLDSVKGRFTISKDDTKNSLHLEMNSLRVEDTAVYYCVRGGWELDSWGQGTLVTVSS

SEQ ID NO: 21867 - protein, 94 aa, Homo sapiens
AASGFTFKYYWMNWVRQAPGKGLEWVANIKEDGTEKYYVNSVEGRFTISKDDAMNSLSLQMNNLRVEDTAVYYCVRGGWELDSWGQGTRVTVSS

SEQ ID NO: 21868 - protein, 94 aa, Homo sapiens
AASGFTFKYFWMNWVRQAPGKGLEWVANIKEDGTQKYYVNSVEGRFTISKDDAMNSLSLQMNNLRVEDTAVYYCVRGGWELDSWGQGTRVTVSS

SEQ ID NO: 21869 - protein, 92 aa, Homo sapiens
KGSGYRFTTYWIVWVRQMPGKGLEWMGSIYPGDSDIRYSPSFQGQVTISADKSSGTAYLQWSTLKASDTAIYYCAREGFDYWGQGTMVTVSS

SEQ ID NO: 21870 - protein, 92 aa, Homo sapiens
KGSGYKFTSYFIGWVRQMPGKGLEWMGLIYPGDSDTTYSPSFQGQITISADKSINTAYLQWSSLKASDTAIYYCAREGFDYWGQGTLVTVSS

SEQ ID NO: 21871 - protein, 92 aa, Homo sapiens
SGFTFSTSAMQWVRQARGQRLEWIGWIVVGSGNTNYAQKFQGRVTITRDMSTRTVYMELNRLKYEDTAVYYCAADDLLTGSWGQGTLVTVSS

SEQ ID NO: 21872 - protein, 92 aa, Homo sapiens; identical to SEQ ID NO: 21871

SEQ ID NO: 21873 - protein, 92 aa, Homo sapiens
SGFTFTNSAVQWVRQARGQRLEWIGWIVVGSGKSNYAQKFRDRVTITRDMSTSTAYMELGSLRSEDTAVYYCAADDLLTGSWGQGTLVTVSS

SEQ ID NO: 21874 - protein, 96 aa, Homo sapiens
AASGFTFSDYWMSWVRQAPGKGLEWVANINQDGSEDYYVGLVAGRFTISRDNAKNSLYLQMDSLRADDTALFYCARAATAGTVDYWGQGTQVTVSS

SEQ ID NO: 21875 - protein, 96 aa, Homo sapiens
EASRFTFSDYWMSWVRQAPGKGLEWVANINQDGSAKYYVDSVKGRFTISRDNAKNSLYLQMNSLRADDTAVYYCARAATAGTVDYWGQGALVTVSS

SEQ ID NO: 21876 - protein, 96 aa, Homo sapiens
AASEFTFSSYWMSWVRQAPGKGLEWVANINQDGSKEYYVDSVKGRFTISRDNAKNSLFLQMNYLRADDTAVYYCARAATAGTVDYWGQGNLVTVSS

SEQ ID NO: 21877 - protein, 96 aa, Homo sapiens
AASGFTFTTFSMDWVRQAPGKGLEWVSYVSSGGDTTYYADSVKGRFTISRDNARNSLYLQMTTLRDEDTAVYYCARGWRENSFDYWGHGTLVSVSS

SEQ ID NO: 21878 - protein, 96 aa, Homo sapiens
AASGFTFTTFSMDWVRQAPGKGPEWLSYISTDTNTIYYADSVRGRFTISRDNAKNSVYLEMHSLRAEDTAMYYCARGWRENSFDYWGQGTLVSVSS

SEQ ID NO: 21879 - protein, 96 aa, Homo sapiens
AASGFTFTTYSMDWVRQAPGKGLEWVSYISTDTNTIYYADSVRGRFTISRDNARNSLYLEMNSLRTEDTAMYYCARGWRENSFDYWGQGTLVTVSS

SEQ ID NO: 21880 - protein, 96 aa, Homo sapiens
AASGFTFTTYSMDWVRQAPGKGLEWVSYISTDTNTIYYADSVRGRFTISRDNARNSLYLEMNSLRTEDTAMYYCARGWRENSFDYRGQGTLVTVSS

SEQ ID NO: 21881 - protein, 96 aa, Homo sapiens
AASGFTFTTFSMDWVRQAPGKGPEWLSYISTDTNTIYYADSVRGRFTISRDNAKNSVYPEMHSLRAEDTAMYYCARGWRENSFDYWGQGTLVSVSS

SEQ ID NO: 21882 - protein, 96 aa, Homo sapiens
AASGFTLTTFSMDWVRQAPGKGPEWLSYISTDTNTIYYADSVRGRFTISRDNAKNSVYLEMHSLRAEDTAMYYCARGWRENSFDYWGQGTLVSVSS

SEQ ID NO: 21883 - protein, 96 aa, Homo sapiens; identical to SEQ ID NO: 21877

SEQ ID NO: 21884 - protein, 96 aa, Homo sapiens
AASGFTFTTFSMDWVRQAPGKGLEWVSYVSSGGDTTYYADSVKGRFTISRDNARNSLYLQMTTLRDEDTAVYYCARGWRENSFDYWGHGTLVTVSS

SEQ ID NO: 21885 - protein, 96 aa, Homo sapiens
AASGFTFTTFSMDWVRQAPGKGLEWVSYVSSGGDTTYYADSVKGRFTISRDNARNSIYLEMTTLRDEDTAVYYCARGWRENSFDYWGHGALVSVSS

SEQ ID NO: 21886 - protein, 96 aa, Homo sapiens; identical to SEQ ID NO: 21877

SEQ ID NO: 21887 - protein, 96 aa, Homo sapiens
AAPGFTFTTFSMDWVRQAPGKGLEWVSYVSSGGDTTYYADSVKGRFTISRDNARNSLYLQMTTLRDEDTAVYYCARGWRENSFDYWGHGTLVSVSS

SEQ ID NO: 21888 - protein, 96 aa, Homo sapiens; identical to SEQ ID NO: 21877

SEQ ID NO: 21889 - protein, 96 aa, Homo sapiens; identical to SEQ ID NO: 21877

SEQ ID NO: 21890 - protein, 96 aa, Homo sapiens; identical to SEQ ID NO: 21877

SEQ ID NO: 21891 - protein, 96 aa, Homo sapiens; identical to SEQ ID NO: 21884

SEQ ID NO: 21892 - protein, 96 aa, Homo sapiens
AASGFTFTTFSMDWVRQAPGKGLEWVSYVSSGGDTTYYADSVKGRFTISRDNARNSLYLQMTTRRDEDTAVYYCARGWRENSFDYWGHGTLVSVSS

SEQ ID NO: 21893 - protein, 106 aa, Homo sapiens
VASGFTFSRYWMHWVRQAPGKGLVWVSRINTDGSSTSSAESVKGRFSTSRDNAKNTFYLQMNSLTAEDTAIYYCTGAPDCGGGTCNSYHYYGLDVWGQGTTVTVSS

SEQ ID NO: 21894 - protein, 106 aa, Homo sapiens
AVSGFTFKDYWMHWVRQAPGKGLVWVSRINRSGSETAYADSVRGRLTISRDNAKNTLYLQMSSLRAEDTAVYYCTGAPDCGGGTCNSYHYYGLDVWGRGAAVTVSS

SEQ ID NO: 21895 - protein, 96 aa, Homo sapiens
AASGFTFSRHWMTWVRQAPGKGLEWVANIRQDASEKYYVDSVKGRFTISRDNANNSLYLQMNSLRVEDTAVYYCASYGYYYGLDVWGQGTTVTVSS

SEQ ID NO: 21896 - protein, 96 aa, Homo sapiens
AASGFTFSRNWMSWVRQAPGKGLEWVANIKQDGSEKYYVDSVKGRFTISRDNAKNSLYLQMNSLRAEDTAVYYCASYGYYYGLDVWGQGTTVTVSS

SEQ ID NO: 21897 - protein, 90 aa, Homo sapiens
AASGFAFSTSWMTWVRQAPGRGLEWVANINQDGSQRYYVDSVKGRFTISRDNAKNSLYLQMNSLRAEDTAVYYCLGSDYWGQGTLVTVSS

SEQ ID NO: 21898 - protein, 90 aa, Homo sapiens
AVSGFSFSRSWMSWVRQAPGKGLEWVANINQDGRTKNYLDSVKGRFTIFRDNANNSLYLQMSSLRAEDTAMYYCLGSDYWGQGSLVTVSS

SEQ ID NO: 21899 - protein, 95 aa, Homo sapiens
AIYGGSFSGYQWTWIRQPPGKGLEWIGEINHSGNTNYNPSLKSRVTILVQTSRNQFSLKLTSVTAADTAVYYCARPGGGNAFDIWGQGTMVTVSS

SEQ ID NO: 21900 - protein, 95 aa, Homo sapiens
AVYGGSFSGYHWTWIRQPPGKGLEWIGEINHSGSTNYNPSLKSRVTISIDSSKNQFSLKLSSVTAADTAVYYCARPGGGNAFDIWGQGTMVTVSS

SEQ ID NO: 21901 - protein, 95 aa, Homo sapiens
AVYGGSFSGYHWTWIRQPPGKGLEWIGEINHSGSTNYNPSLKSRVTISVDASKNQFSLKLSSVTAADTAVYYCARPGGGNAFDIWGPGTMVTVSS

SEQ ID NO: 21902 - protein, 95 aa, Homo sapiens; identical to SEQ ID NO: 21901

SEQ ID NO: 21903 - protein, 93 aa, Homo sapiens
ASGYTFIKHHIHWVRQTPGQGLEWMGRIIPYDGGATYAQKFVGRVTMTRDTSATTVYMELSSLRSDDTAVYYCVRDTYGHDYWGQGTRVTVSS

SEQ ID NO: 21904 - protein, 93 aa, Homo sapiens
ASGYSFASHHIHWVRQAPGEGLEWMGVIIPSGGSTTYAQKFQGRVIMTRDTSTTTVYLEVSSLRSEDTAVYYCVRDTYGHDYWGQGTLVTVSS

SEQ ID NO: 21905 - protein, 97 aa, Homo sapiens
TFSGGSTSSSSHYWGWIRQPPGKGLEWIGSIYYSGSTYYNPSLKSRVTISVDTSKNQFSLRLNSVTAADTSVYYCARVGATLTFDYWGQGTLVTVSS

SEQ ID NO: 21906 - protein, 97 aa, Homo sapiens
NVSGGSISITTYYWAWIRQPPGKGLEWIGSIYYSGSTYYNPSLKSRLTISVDTSNNHFSLELSSLTAADTAVYYCARVGATLTFDYWGQGTLVTVSS

SEQ ID NO: 21907 - protein, 96 aa, Homo sapiens
AASGFTFRDYWMAWLRQTAGKGLEWVANIKMDGSLKYYLDSVEGRFTVSRDNAKNSLYLHMNSLSADDTALYYCARDDGYRSIDYWGQGTPVTVSS

SEQ ID NO: 21908 - protein, 96 aa, Homo sapiens
AASGFTFSNYWMTWVRQTPGKALEWVAQIKEDGSETYYVGSLEDRFTISRDNAKNSLYLEMNSLRGEDTALYYCARDDGYRSIDYWGQGTLVTVSS

SEQ ID NO: 21909 - protein, 96 aa, Homo sapiens
AASGFTFGTYWMSWVRQAPGKGLEWVANMKPDGSERDYVDSVEGRFTISRDNAKNSLFLQMNSLRAEDTAVYYCARDDGYRSIDYWGQGTLVTVSS

SEQ ID NO: 21910 - protein, 96 aa, Homo sapiens
AASGFTFSSYWMSWVRQAPGKGLEWVANMKPDGSERDYVDSVEGRFTISRDNAKNSVFLQMNSLRAEDTAVYYCARDDGYRSIDYWGRGTLVTVSS

SEQ ID NO: 21911 - protein, 96 aa, Homo sapiens; identical to SEQ ID NO: 21910

SEQ ID NO: 21912 - protein, 96 aa, Homo sapiens
AASGFTFSSYWMSWVRQAPGKGLEWVANMKPDGSERDYVRSVEGRFTISRDNAKNSLFLQMNSLRAEDTAVYYCARDDGYRSIDYWGQGTLVTVSS

SEQ ID NO: 21913 - protein, 96 aa, Homo sapiens; identical to SEQ ID NO: 21910

SEQ ID NO: 21914 - protein, 96 aa, Homo sapiens
AASGFTFSSYWMSWVRQAPGKGLEWVANMKPDGSERDYVDSVEGRFTISRDNAKNSLFLQMNSLRAEDTAVYYCARDDGYRSIDYWGQGTLVTVSS

SEQ ID NO: 21915 - protein, 96 aa, Homo sapiens
AASGFTFSSYWMSWVRQAPGKGLEWVANMKPDGSERDYVDSVEGRFTISRDNAKSSVFLHMNSLRVEDTAVYYCARDDGYRSIDYWGQGTLVTVSS

SEQ ID NO: 21916 - protein, 96 aa, Homo sapiens
AASGFTFSSYWMSWVRQAPGKGLEWVANMKPDGSERDYVDSVEGRFTISRDNAKNSVFLQMNSLRVEDTAVYYCARDDGYRSIDYWGQGTLVTVSS

SEQ ID NO: 21917 - protein, 96 aa, Homo sapiens; identical to SEQ ID NO: 21914

SEQ ID NO: 21918 - protein, 96 aa, Homo sapiens; identical to SEQ ID NO: 21910

SEQ ID NO: 21919 - protein, 96 aa, Homo sapiens
AASGFTFRTYWMSWVRQAPGIGLEWVANIKEDGSEEYYVDSVKGRFTISRDNAKNSLYLQMNSLRAEDTAVYYCARDDGYRSIDYWGQGTLVTVSS

SEQ ID NO: 21920 - protein, 96 aa, Homo sapiens
AASGFTFSNYWMSWVRQAPGKGLEWVANMKPDGSERDYVDSVEGRFTISRDNAKNSVFLQMNRVRVDDTAVYYCARDDGYRSIDYWGRGTLVTVSS

SEQ ID NO: 21921 - protein, 98 aa, Homo sapiens
AASGFTFSNYAMSWVRQAPGKGLEWVSTITGSDGSTYYADSVKGRFTISRDNSKNTLYLEMNSLRAEDMAVYYCAKDRSNSWYYFDYWGQGTLVTVSS

SEQ ID NO: 21922 - protein, 98 aa, Homo sapiens
AASGFTFSDYAMSWVRQAPGKGLEWVSTIYSGGSSTYYADSVKGRFTISRDNSKNTLYLQMNSLRVDDTAVYYCAKDRSNSWYYFDYWGQGTLVTVSS

SEQ ID NO: 21923 - protein, 98 aa, Homo sapiens
AASGFTFSSYAMSWVRQAPGKGLEWVSTIGSGGGDTYYSDSVKGRFTISRDNSKNTLYLQMISLRAEDTALYYCAKDPPESGTTFDYWGQGTLVTVSS

SEQ ID NO: 21924 - protein, 98 aa, Homo sapiens
AASGFTFSSYAMSWVRQAPGKGLEWVSTISDGGAGTWNADSVKGRFTASRDNSKNTLYLHMNSLRAEDTAVYYCAKDPPESGTTFDYWGQGTLVTVSS

SEQ ID NO: 21925 - protein, 98 aa, Homo sapiens
AASGFTFSSYAMSWVRQAPGKGLEWVATINRSGADKYYPGSVKGRFTASRDNSRNTLYLQMNSLTADDTAIYYCAKDPPESGTTFDYWGQGTLVTVSS

SEQ ID NO: 21926 - protein, 98 aa, Homo sapiens
AASGFTFSSYAMSWVRQAPGKGLEWVSTVSTGGARTYYVDSVKGRFTISRDNSKNTLYLEMNSLRAEDTAVYYCAKDPPESGTTFDYWGQGTMVAVSS

SEQ ID NO: 21927 - protein, 96 aa, Homo sapiens
AASGFTFSSSGMSWVRQAPGKGLEWVSTIGFTKTYYPDSVKGRFTISRDNSKSTLYLQMTSLRVEDTAVYYCAKDPPESGTTFDYWGQGILVTVSS

SEQ ID NO: 21928 - protein, 98 aa, Homo sapiens; identical to SEQ ID NO: 21924

SEQ ID NO: 21929 - protein, 98 aa, Homo sapiens
AASGFTFGSYAMSWVRQAPGKGLEWVSTISSGGGSTHYPDSVKGRFTISRDNAKNTLYLQIYSLRSEDTAIYYCAKDPPESGTTFDYWGQGTLVTVSS

SEQ ID NO: 21930 - protein, 98 aa, Homo sapiens; identical to SEQ ID NO: 21923

SEQ ID NO: 21931 - protein, 98 aa, Homo sapiens
AASGFTFSSYAMSWVRQAPGKGLEWVSTINSGGTRPYYVDSLRGRFTISRDNSKNTVYLQMNSVRADDTAVYYCAKDPPESGTTFDYWGQGTLVAVSS

SEQ ID NO: 21932 - protein, 99 aa, Homo sapiens
AASGFTFSNAWMSWVRQAPGKGLEWVGRIKRKSDGETTQYAAPVNGRFTISRDDSRDTMYLQMNSLNTEDTAVYFCTADRLLTALFDSWGQGVLVTVSS

SEQ ID NO: 21933 - protein, 99 aa, Homo sapiens
AASGFSLNNAWMSWVRQAPGKGLEWVARLKRNPDDGTEQYAAPVTGRFTISRDDSKNTLYLHMNSLKVEDTAVYYCTADRLLTALFDSWGPGTLVTVSS

SEQ ID NO: 21934 - protein, 99 aa, Homo sapiens
AASGFTFSNAWMSWVRQAPGKGLEWVGRIKRKIDYETPQYAEPVNGRFTLSRDDSRNIMYLQMNSLKTEDTAVYFCTADRLLTALFDSWGQGVLVTVSS

SEQ ID NO: 21935 - protein, 99 aa, Homo sapiens
AASGFTFSNAWMSWVRQAPGKGLEWVGRLKRKSDAETTQYAAPVKGRFTISRDDSRNTMYLQMNNLKTEDTAVYFCTADRLLTALFDSWGQGVLVTVSS

SEQ ID NO: 21936 - protein, 99 aa, Homo sapiens
AASGFTFSNAWMSWVRQAPGKGLEWIGRVKRQSDVETTQYAAPVKGRFTISRDDSTNTMYLDMNSLKAEDTAVYFCTADRLLTALFDSWGQGVLVTVSS

SEQ ID NO: 21937 - protein, 94 aa, Homo sapiens
AASGFMLSDYNMNWVRQAPGKGLEIVSYISRSNSIFYGDSVRGRFTGSRDNAKNSLYLQMNSLRDEDTAVYYCVRDFNWGFDFWGQGALVTVSS

SEQ ID NO: 21938 - protein, 95 aa, Homo sapiens
AASGFSFSDYSMNWVRQAPGKGLEWVSYIDRYSNNIQFADSVKGRFTISRDNAKASLSLQMNSLRDEDTAVYYCVRDFNWGFDFWGQGTPVTVSS

SEQ ID NO: 21939 - protein, 97 aa, Homo sapiens
EASGFTFSSFWMTWVRQAPGKGLEWVANIKQDGTEKYFVDSVKGRFTISRDNAKNSLYLQMNSLRAEDTAVYYCAREGGAGYSFDSWGQGTLVTVSS

SEQ ID NO: 21940 - protein, 97 aa, Homo sapiens
AASGFTFSNFWMTWVRQAPGKGLEWVGNTNQDETEKNYVDSVKGRFTISRDNAKRSLYLHMTSLRVEDMAVYFCAREGGAGYSFDSWGQGTLVTVSS

SEQ ID NO: 21941 - protein, 94 aa, Homo sapiens
AASGFTFRNFWMAWVRQPPNKGLEWVAHIKEDGSQKYYLDSVKGRFTISRDDTQNSLHLQMNSLKAEDTALYYCVKGGWELDSWGQGTLVTVSS

SEQ ID NO: 21942 - protein, 94 aa, Homo sapiens
AASGFTFRRYWMAWVRQPPDKGLEWVAHIKEDGSQKYYVDSVKGRFTISKDDTKNSLHLQMDSLRVEDTAIYYCVKGGWELDSWGQGTLVTVSS

SEQ ID NO: 21943 - protein, 94 aa, Homo sapiens
AASGFSLRNYWMCWVRQAPGKGLEWVAHIKEDGTEKYYVDSVEGRFIISKDDARNRVYLQMNSLTAEDTAVYYCVKGGWELDSWGQGTVVTVSS

SEQ ID NO: 21944 - protein, 97 aa, Homo sapiens
TVSGVSISSYYWSWIRQPAGKGPEWIGRIHITENRFYSPSLKSRVTMSLDTSKSQFSLRLSSVTAADTAVYYCAKYGEVPAAHFDYWGQGTLVTVSS

SEQ ID NO: 21945 - protein, 97 aa, Homo sapiens
TVSGASISSYYWSWIRQTAGRGLEWIGRVYITESSNFNPSLKSRVTMSLDTSKNQFSLKLSSVTAADTAIYYCAKYGEVPAAHFDYWGQGILVTVSS

SEQ ID NO: 21946 - protein, 97 aa, Homo sapiens
AASGFTFINFAVTWVRQAPGKGLEWVSTIHNDGVVTYYADSVQGRFTISRDNSINTLYLDMNSLRGEDTAIYYCAKNGRGWNYSDYWGLGTLVTVSS

SEQ ID NO: 21947 - protein, 98 aa, Homo sapiens
AASGFTFSGYAMTWVRQAPGKGLEWVSTISGNGDGTTYYADSVKGRFTISRDDSKNTLYLQMNSLRADDTAVYYCAKNGRGWNYSDYWGQGTRVTVSS

SEQ ID NO: 21948 - protein, 97 aa, Homo sapiens
AASGFTFINYAVTWVRQAPGRGLEWVSTIHNDGRVTYYADSVKGRFTISRDNSENTLYLQMDSLRAEDTAIYYCAKNGRGWNYSDYWGQGTVVTVSS

SEQ ID NO: 21949 - protein, 101 aa, Homo sapiens
ISGDSVSSNSAAWNWIRQSPSRGLEWLGRTYYNSKWYNDYAVSVKSRITINPDTSKNQFSLQLKSMTPEDTAVYYCARDVSPGSSSWYDYWGQGTLVTVSS

SEQ ID NO: 21950 - protein, 101 aa, Homo sapiens
ISGDSVSSNSAAWNWIRQSPSRGLEWLGRTYYGSKWYNDYAVSVRGRITINPDTSKNQVSLQLNSVTPEDTAVYYCARDVSPGSSSWYDYWGQGTLVTVSS

SEQ ID NO: 21951 - protein, 95 aa, Homo sapiens
ATSGFTFSQYWMAWVRQAPGTGLEWVANIKEDGTEKYYVGSVKGRFSISRDNAKNSLFLQMNSLRAEDTAVYYCARHGHHHFDYWGQGILVTVSS

SEQ ID NO: 21952 - protein, 95 aa, Homo sapiens
AASGFTFSNYWMAWVRQAPGKGLEWVANIKHDGGERYYVDSVQARFTISRDNADNSLYLVMNSLRADDTAVYYCARHGHHHFDYWGQGALVTVSS

SEQ ID NO: 21953 - protein, 95 aa, Homo sapiens
AASGYPFNNAWMNWVRQAPGKGLEWVGRIKSKSDGGTTDYAAPVKGRFIISRDDSKNTLYLQMNSLKSEDTAVYYCTVHSALDYWGQGTLVTVSS

SEQ ID NO: 21954 - protein, 95 aa, Homo sapiens
ATSGFTFKNAWMNWVRQAPGKGLEWVGRIKSKTDGGTTDYAAPVQGRFTISRDDSQNTLYLQMSSLKTEDTAIYYCTVHSALDYWGQGTLVTVSS

SEQ ID NO: 21955 - protein, 95 aa, Homo sapiens
ATSGFTFKNAWMNWVRQAPGKGLEWVGRIQRQIDGGTTDYAAPVQGRFTISRDDSQNTLYLQMSSLKTEDTAIYYCTVHSALDYWGQGTLVTVSS

SEQ ID NO: 21956 - protein, 95 aa, Homo sapiens
AASGYPFSNAWMSWVRQAPGKGLEYVGRIKRKTDGETTDYAAPVKGRFTISRDDSRNTLYLQMNSLKTEDTAVYYCTVHSALDYWGQGALVTVSS

SEQ ID NO: 21957 - protein, 96 aa, Homo sapiens
AASGFNFDIFTMNWVRQAPGKGLEWLSYISSSSLTIYYADSVKGRFTTSRDNVKNSLYLEMNGLRSEDTAVYYCARGDGNGYPDYWGRGTLVTVSS

SEQ ID NO: 21958 - protein, 96 aa, Homo sapiens
AASGFNFSIFTMNWVRQAPGKGLEWISYISSSSLTKYYADAVKGRFTISRDNAKNSLFLQMNGLRDEDRAVYYCARGDGNGYPDYWGRGTLVTVSS

SEQ ID NO: 21959 - protein, 100 aa, Homo sapiens
AASGFPFSNAWMTWVRQAPGKGLEWVGRIKSKVVGATTDYAAPVKGRFTISRDDSKNTLYLHMDSLKSEDTAVYYCISTVGYSGYDCGYWGQGTLVTVSS

SEQ ID NO: 21960 - protein, 100 aa, Homo sapiens
AASGFPFTNAWMSWVRQAPGKGLEWVGRIKSKSGGATTDYAAPVKGRFTISRDDSKTTLYLQMNSLKTEDTAVYYCISTVGYSGYDCGYWGQGTLVTVSS

SEQ ID NO: 21961 - protein, 100 aa, Homo sapiens
AASGFPFTNAWMSWVRQAPGKGLEWVGRIKSKSGGATTDYAAPVKGRFTISRDDSKTTLYLQMNSLKIEDTAVYYCISTVGYSGYDCGYWGQGTLVTVSS

SEQ ID NO: 21962 - protein, 100 aa, Homo sapiens
AASGFTFSNAWMTWVRQAPGKGLEWVGRIKSNVVGATTDYAAPVKGRFTISRDDSKTTLYLHMNSLKSEDTAVYYCISTVGYSGYDCGYWGQGTLVTVSS

SEQ ID NO: 21963 - protein, 95 aa, Homo sapiens
AASGLIFSDAWMSWVRQRPGKGLEWVGRIKSKIFDERAEYAAPVKGRFTISRDDSKNTMFLQMNSLTVEDTGVYYCSTDDPRWPHWGQGTQITVS

SEQ ID NO: 21964 - protein, 96 aa, Homo sapiens
AVSGLTFSDAWLSWVRQAPGKGLEWVGRMKSHSDGGAAEYAAAVKGKFTISRDDSKNTLYLQMNSLKTEDSAVYYCSTDDPRWPHWGQGTLVTVSS

SEQ ID NO: 21965 - protein, 96 aa, Homo sapiens; identical to SEQ ID NO: 21964

SEQ ID NO: 21966 - protein, 95 aa, Homo sapiens
AASGLIFSDAWMSWVRQRPGKGLEWVGRIKSKIFDERAEYAAPVKGRFIISRDDSKNTLFLQMNSLTVDDTGVYYCSTDDPRWPHWGQGAQITVS

SEQ ID NO: 21967 - protein, 95 aa, Homo sapiens
AASGFTFRVFWMHWVRQVPGEGLVWVAHMNQDGRTTNYADSVKGRFTISRDNARNTLYLQLNSLRVEDTGIYYCARDVRGPEDFWGQGTLVTVSS

SEQ ID NO: 21968 - protein, 95 aa, Homo sapiens
AASGFTFRVFWMHWVRQVPGEGLVWVAHMNQDGRTTNYADSVKGRFTIPRDNARNTLYLQLNSLRVEDTGIYYCARDVRGPEDFWGQGTLVTVSS

SEQ ID NO: 21969 - protein, 95 aa, Homo sapiens; identical to SEQ ID NO: 21967

SEQ ID NO: 21970 - protein, 95 aa, Homo sapiens
AASGFTFRVFWMHWVRQVPGEGLVWVAHMNQDGRTTNYADSVKGRFTISRDNARNTLYLQLDSLRVEDTGIYYCARDVRGPEDFWGQGTLVTVSS

SEQ ID NO: 21971 - protein, 94 aa, Homo sapiens
ASGFTFRVFWMHWVRQVPGEGLVWVAHMNQDGRTTNYADSVKGRFTISRDNARNTLYLQLNSLRVEDTGIYYCARDVRGPEDFWGQGTLVTVSS

SEQ ID NO: 21972 - protein, 94 aa, Homo sapiens
AASGFTFRRYWMHWVRQPPGMGLDWVSNINEDGSDTNYADSVKGRFTISRDNAQNILYLQMTSLRVEDTAVYYCARDVRGPEDFWGQGILVTVS

SEQ ID NO: 21973 - protein, 97 aa, Homo sapiens
ISGDSVSSKTAAWNWLRQSPSRGLEWLGRTYYRSKWYNDYAVFLNGRITVKPDTSKNQFSLQLNSVTPEDTAVYYCARDPFSTLDYWGQGSLVTVSS

SEQ ID NO: 21974 - protein, 97 aa, Homo sapiens
ISGDSVSSNTAAWNWIRQSPSGGLEWLGRTYYRSKWYNDYALSVKNRITVNPDTSKNQFSLQLTSVIPEDTAVYYCARDPFSTLDYWGQGILVTVSS

SEQ ID NO: 21975 - protein, 99 aa, Homo sapiens
TVSGASISGKGYYWSWIRQLPGKGLEWIGYIYSTGSAYYNPSLKSRVTMSVDTSKNHISLKMDSLTAADTAIYYCARDQDGYGYYFDYWGQGTLVTVSS

SEQ ID NO: 21976 - protein, 99 aa, Homo sapiens; identical to SEQ ID NO: 21975

SEQ ID NO: 21977 - protein, 98 aa, Homo sapiens
VSGVSINSVGYYWSWIRQLPGQGLEWIGYIYSTGSAYYNPSLKSRLTISLDTSKNHFSLMMSSVTAADTAVYYCARDQDGYGYYFDYWGQGTLVTISS

SEQ ID NO: 21978 - protein, 99 aa, Homo sapiens
TVSGASISGKGFYWSWIRQLPGKGLEWIGYIYSTGSAYYNPSLKSRVTMSVDTSKNHISLKMDSLTAADTAIYYCARDQDGYGYYFDYWGQGTLVTVSS

SEQ ID NO: 21979 - protein, 99 aa, Homo sapiens; identical to SEQ ID NO: 21975

SEQ ID NO: 21980 - protein, 99 aa, Homo sapiens
TVSGASISGKGYYWSWIRQLPGKGLEWIGYIYSTGSTYYNPSLKSRVTMSVDTSKNHISLKMDSVTAADTAVYYCARDQDGYGYYFDYWGQGTLVTVSS

SEQ ID NO: 21981 - protein, 99 aa, Homo sapiens
TVSGASISGKGYYWTWIRQLPGKGLEWIGYIYSTGSAYYNPSLKSRVTMSVDTSKNHISLKMDSLTAADTAIYYCARDQDGYGYYFDYWGQGTLVTVSS

SEQ ID NO: 21982 - protein, 99 aa, Homo sapiens
SVSGGSISSKGYYWSWIRQFPGKGLEWIGYIYSTGSAYYNPSLKSRLTISVDTSQNHFSLMVSSVTAADTAVYYCARDQDGYGYYFDYWGQGILVTVSS

SEQ ID NO: 21983 - protein, 99 aa, Homo sapiens
TVSGASISGKGYYWSWIRQLPGKGLEWIGYIYSTGSTYYNPSLKSRVTMSVDTSKNHISLKMDSVTAADTAVYYCARDQDGYGYYFDYWGRGTLVTVSS

SEQ ID NO: 21984 - protein, 99 aa, Homo sapiens
TVSGASISGKGYYWSWIRQFPGKGLEWIGYIYSTGSTYYNPSLKSRVTMSVDTSKNHISLKMDSVTAADTAVYYCARDQDGYGYYFDYWGRGTLVTVSS

SEQ ID NO: 21985 - protein, 99 aa, Homo sapiens
TVSGASISGKGYYWSWIRQLPGKGLEWIGYIYSTGSTYYNPSLKSRVTMSVDTSKNHISLKMDSLTAADTAVYYCARDQDGYGYYFDYWGQGTLVTVSS

SEQ ID NO: 21986 - protein, 99 aa, Homo sapiens
TVSGGSISRDGHYWSWIRQHPGKGLEWIGYIYSTGSAYYNPSLKSRVTMSVDTSKNHFSLEMRSVTAADTAVYYCARDQDGYGYYFDYWGQGMLATVSS

SEQ ID NO: 21987 - protein, 99 aa, Homo sapiens; identical to SEQ ID NO: 21980

SEQ ID NO: 21988 - protein, 99 aa, Homo sapiens; identical to SEQ ID NO: 21975

SEQ ID NO: 21989 - protein, 99 aa, Homo sapiens
SVSGGSISSKGYYWSWIRQFPGKGLEWIGYIYSTGSAYYNPSLKSRLTISVDTSQNHFSLMVNSVTAADTAVYYCARDQDGYGYYFDYWGQGILVTVSS

SEQ ID NO: 21990 - protein, 99 aa, Homo sapiens; identical to SEQ ID NO: 21980

SEQ ID NO: 21991 - protein, 99 aa, Homo sapiens
TVSGGSVSRDGYYWSWIRQHPGKGLEWIGYIYSTGSAYYNPSLKSRVTMSVDTSKNHFSLEMRSVTAADTAVYYCARDQDGYGYYFDYWGQGTLATVSS

SEQ ID NO: 21992 - protein, 97 aa, Homo sapiens
SGASISGKGYYWTWIRQLPGKGLEWIGYIYSTGSAYYNPSLKSRVTMSVDTSKNHISLKMDSLTAADTAIYYCARDQDGYGYYFDYWGQGTLVTVSS

SEQ ID NO: 21993 - protein, 99 aa, Homo sapiens
TVSGGSISSAGYYWSWIRQHPGKGLEWIGYIYSSGSAYYNPSLKSRVTISVDTSKNQFSLKLRSVTAADTAVYYCARDQDGYGYYFDYWGQGTLVTVSS

SEQ ID NO: 21994 - protein, 99 aa, Homo sapiens
TVSGGSISSAGYYWSWIRQHPGKGLEWIGYIYSTGSAYYNPSLKSRLTISVDTSKNQFSLKLSSVTAADTAVYYCARDQDGYGYYFDYWGQGTLVTVSS

SEQ ID NO: 21995 - protein, 99 aa, Homo sapiens
AASGFTFSSYWMTWVRQAPGKGLEWVANIKQDGSVKYYVDSMKGRFTISRDNVKNSLYLQMNSLRVEDTAVYYCATDRTDYGDYRFDYWGQGTLVTVSS

SEQ ID NO: 21996 - protein, 99 aa, Homo sapiens
AASGFTFSSYWMSWVRQAPGKGLEWVANIKQDGSEKYYVDSVKGRFTISRDNAKSSVYLQMNSLRAEDTAVYYCATDRTDYGDYRFDYWGQGTLVTVSS

SEQ ID NO: 21997 - protein, 99 aa, Homo sapiens
AASGFTFSSYWMSWVRQAPGKGLEWVANIKQDGSEKYYVDSVKGRFTISRDNAKNSLYLQMNSLRAEDTAVYYCATDRTDYGDYRFDYWGQGTLVTVSS

SEQ ID NO: 21998 - protein, 99 aa, Homo sapiens
AASGFTFSSYWMTWVRQAPGKGLEWVANINQDGSVKYYVDSMKGRFTISRDNVQNSLYLQMNSLRVEDTAVYYCATDRTDYGDYRFDYWGQGTLVTVSS

SEQ ID NO: 21999 - protein, 99 aa, Homo sapiens; identical to SEQ ID NO: 21998

SEQ ID NO: 22000 - protein, 99 aa, Homo sapiens; identical to SEQ ID NO: 21997

SEQ ID NO: 22001 - protein, 99 aa, Homo sapiens
AASGFTFSSYWMTWVRQAPGKGLEWVANIKQDGSEKYYVDSVKGRFTISRDNAKNSLYLQMNSLRAEDTAVYYCATDRTDYGDYRFDYWGQGTLVTVSS

SEQ ID NO: 22002 - protein, 97 aa, Homo sapiens
AASGFTFSNYGMHWVRQAPGKGLEWVAIISYDGSNKYYADSVKGRFTISRDNSKNTLYLQMNSLRPEDTAVYSCAKDPSLRVTLAYCGQGTLVTVSS

SEQ ID NO: 22003 - protein, 96 aa, Homo sapiens
AASGFTFSNYGMHWVRQAPGKGLEWVAIISYDGSNKYYADSVKGRFTISRDNSKNTLYLQMNSLRPEDTAVYSCAKDPSLRVTLAYCGQGTLVTVS

SEQ ID NO: 22004 - protein, 97 aa, Homo sapiens
AASGFTFNNYGMHWVRQAPGKGLEWVAIISYDGSNKYYADSVKGRFTISRDSSKNTLYLQMNSLRAEDSAVYYCAKDPSLRVTLAYWGQGTLVTVSS

SEQ ID NO: 22005 - protein, 97 aa, Homo sapiens
AASGFTFSHYGMHWVRQAPGKGLEWVAIISYDGTNKYYADSVKGRFTISRDDSKNMVFLQMNSLRVEDTALYYCAKDPSLRVTLAYCGQGTLVTVSS

SEQ ID NO: 22006 - protein, 96 aa, Homo sapiens
AISGFTFSNYWMGWVRQAPGKGLEWVANINPLGSEKTYLDSVKDRFTISRDNAKSSLSLQLDNLRAEDTALYHCMRWGVVAGMDVWGRGTAVTVSS

SEQ ID NO: 22007 - protein, 96 aa, Homo sapiens
AISGFTFSNYWMGWVRQAPGKGLEWVANINPVGSEKTYLDSVKDRFTISRDNAKSSLSLQMNNLRAEDTALYHCMRWGVVAGMDVWGRGTAVIVSS

SEQ ID NO: 22008 - protein, 96 aa, Homo sapiens
AISGFTFSNYWMGWVRQAPGKGLEWVANINPVGSEKTYLDSVKDRFTISRDNAKSSLSLQMNNLRAEDTALYHCMRWGVVAGMDVWGRGTAVTVSS

SEQ ID NO: 22009 - protein, 96 aa, Homo sapiens
AISGFNFPNYWMGWVRQAPGKGLEWVANINPAGSEKYYLDSVKDRFTISRDNAKSSLSLQMNNLRAEDTALYYCMRWGVVAGMDVWGRGTAVTVSS

SEQ ID NO: 22010 - protein, 96 aa, Homo sapiens
AISGFTFSSHWMGWVRQAPGSGLEWVANINPGGSDEYYVESAKGRFTVSRDNAQGSLFLQMHGLRADDTAVYYCMRWGVVAGMDVWGQGTTVTVSS

SEQ ID NO: 22011 - protein, 94 aa, Homo sapiens
ISGDSVSSKSAAWDWIRRSPSRGLEWLGRTYYRSKWYNDYAVSVKSRITINPDTSKNQFSLQLNSVTPEDTAIYYCADLERGYWGQGTLVTVSS

SEQ ID NO: 22012 - protein, 94 aa, Homo sapiens; identical to SEQ ID NO: 22011

SEQ ID NO: 22013 - protein, 94 aa, Homo sapiens
ISGDSVSSNSAAWNWIRQSPSRGLEWLGRTYYRSKWYRGYAVSVKGRITINPDTSKNQFSLELNSVTPEDTALYYCADLERGYWGQGTLVTVSS

SEQ ID NO: 22014 - protein, 102 aa, Homo sapiens
AASGFPFSSYEMNWVRQAPGKGLEWVSYISGSSRNIYYADSVKGRFTISRDNAKNSLYLQMNSLRAEDTAIYYCARFGGSMVRGLGGWFDPWGQGILVTVSS

SEQ ID NO: 22015 - protein, 102 aa, Homo sapiens
AASGFPFSSYEMNWVRQAPGKGLEWVSYISGSGRNIYYGDSVKGRFTISRDNAKNSLYLQMNSLRAEDTAVYYCARFGGSMVRGLGGWFDPWGQGILVTVSS

SEQ ID NO: 22016 - protein, 102 aa, Homo sapiens
AASGFPFSSYEMNWVRQAPGKGLEWVSYISGSSRNIYYADSVKGRFTISRDNAKNSLYLQMNSLRAEDTAVYYCARFGGSMVRGLGGWFDPWGQGILVTVSS

SEQ ID NO: 22017 - protein, 102 aa, Homo sapiens
AASGFTFSNYEMNWVRQAPGKGLEWVSYISGSGRNIYYADSVKGRFIISRDNAKNSLHLQMNSLRAEDTAVYYCARFGGSMVRGLGGWFDPWGQGTLVTVSS

SEQ ID NO: 22018 - protein, 102 aa, Homo sapiens
AASGFTFSNYEMNWVRQAPGKGLEWVSYISGSGRNIYYADSVKGRFTISRDNAKNSLLLQMNSLRVEDTAVYYCARFGGSMVRGLGGWFDPWGQGTLVTVSS

SEQ ID NO: 22019 - protein, 102 aa, Homo sapiens
AASGFTFSNYEMNWVRQAPGKGLEWVSYISGSGRNIYYADSVKGRFTISRDNAKNSLHLQMNSLRAEDTAVYYCARFGGSMVRGLGGWFDPWGQGTLVTVSS

SEQ ID NO: 22020 - protein, 102 aa, Homo sapiens
AASGFTFSNYEMNWVRQAPGKGLEWVSYISGSGRNIYYADSVKGRFTISRDNAKNSLHLQMTSLRAEDTAVYYCARFGGSMVRGLGGWFDPWGQGTLVTVSS

SEQ ID NO: 22021 - protein, 102 aa, Homo sapiens; identical to SEQ ID NO: 22014

SEQ ID NO: 22022 - protein, 102 aa, Homo sapiens
AASGFTFSNYEMNWVRQAPGKGLEWVSYISGSGRNIYYADSMKGRFTISRDNAKNSLHLQMNSLRAEDTAVYYCARFGGSMVRGLGGWFDPWGQGTLVTVSS

SEQ ID NO: 22023 - protein, 92 aa, Homo sapiens
SVSGDSMSSGGFYWTWIRQRPGKGLEWLGYTYYSGLLLYNPSLKSRLTISVDKSKNQFSLQLTSVTAADTAVYYCAKTLLSWGKGTLVTVSS

SEQ ID NO: 22024 - protein, 92 aa, Homo sapiens
SVSGDSMSSGGFYWTWIRQHPGKGLEWLGYIYYSGLLLYNPSLKSRLTISVDKSKNQFSLKLTSVTAADTAVYYCAKTLLSWGQGTLVTVSS

SEQ ID NO: 22025 - protein, 92 aa, Homo sapiens
SISGDSMSTGGYYWTWIRQHPGKGLEWIGYIYYSGLSYYNPSLKSRLTMSVDKSNNQFSLKLTSVTAADTAVYYCAKTLLSWGQGTLVTVSS

SEQ ID NO: 22026 - protein, 94 aa, Homo sapiens
AASGFTFSNYWMHWVRQAPGKGLVWVSYINNHGTTTSYADSVKGRFTISRDNAKNTLYLQMNSLRADDTAIYYCAREANAFDIWGQGTMVTVSS

SEQ ID NO: 22027 - protein, 94 aa, Homo sapiens
AASGFTFTTYWMHWVRQVPGKGLVWVSSVRGDGGDANYADSVKGRVTISRDNAKNTLYLQIYSLRAEDTAVYYCAREANAFDIWGQGTLVTVSS

SEQ ID NO: 22028 - protein, 96 aa, Homo sapiens
AASGFTFISHWMHWLRQAPGKGLVWLSRIDNHGSDINYADSVKDRFTISRDNAKNTLYLQMNSLRVEDTAMYYCARGGFNHVFDIWGQGTMVTVSS

SEQ ID NO: 22029 - protein, 96 aa, Homo sapiens
AASGFSFTGYWMHWVRQPPGKGLVWVSRIDRDGNGPVYADSVKGRFTISRDNAKNTVYLQMNSLRDDDTAVYYCARGGFNHVFDIWGQGTSVTVSS

SEQ ID NO: 22030 - protein, 92 aa, Homo sapiens
TVSGGSISSSNYYWGWIRQPPGKGLEWIGSFYYSGSSYYNSSLKSRVTISVDTSMNQFSLSLTSVTAADTAVYYCAAAFEYWGQGTLVTVSS

SEQ ID NO: 22031 - protein, 92 aa, Homo sapiens
TVSGASISSSSYYWGWIRQPPGEGLEWIGSIFSTGGTNYNPSLKSRVTIFVDTSKNQFSLNLNSVTAADTAMYYCAAAFEYWGQGNLVTVSS

SEQ ID NO: 22032 - protein, 92 aa, Homo sapiens
TVSGASISSSSYYWGWIRQPPGEGLEWIGSIFSTGGTNYNPSLKSRVTIFVDTSKNQFSLNLNSVTAADTAIYYCAAAFEYWGQGNLVTVSS

SEQ ID NO: 22033 - protein, 92 aa, Homo sapiens
TVSGGSISSSNYYWGWIRQPPGKGLEWIGSFYYSGTSYYNSSLKSRVTISVDTSMNQFSLSLTSVTAADTAVYYCAAAFEYWGQGTLVTVSS

SEQ ID NO: 22034 - protein, 100 aa, Homo sapiens
AASGFTFSNYAMNWVRQAPGKGLEWVSGISGSGVNTYYADSVKGRFTISRDNSKNTLYLQVNGLRAEDTAVYYCAKDGYSSSWQYYFDYWGQGTLVTVSS

SEQ ID NO: 22035 - protein, 100 aa, Homo sapiens
AASGFTFSNYAMNWVRQAPGKGLEWVSGISGSGVNTYYADSVKGRFTISRDNSKNTLYLQVNGLRAEDTAIYYCAKDGYSSSWQYYFDYWGQGTLVTVSS

SEQ ID NO: 22036 - protein, 100 aa, Homo sapiens
AASGFIFSSYAMSWVRQAPGKGLEWVSVISGSTGVTYYADSVKGRFTISRDNSKNTLYLQMNSLRVDDTAIYYCAKDGYSSSWQYYFDYWGQGALVTVSS

SEQ ID NO: 22037 - protein, 94 aa, Homo sapiens
AASGFTFSYSWMTWVRQAPGKGLEWVANIQQDGSEKEYVDSVKGRFTISRDNAKNSLYLQMNSLRAEDTAIYYCARGIGWFLDWGQGTLVTVSS

SEQ ID NO: 22038 - protein, 94 aa, Homo sapiens
VVSGITLSRHWMTWVRQAPGKGLEWVANIKEDGSEKNYVDSVKGRFTISRDNAKNSLYLQMSSLRAEDTAVYYCARGIGWFLDWGQGTLVTVSS

SEQ ID NO: 22039 - protein, 94 aa, Homo sapiens; identical to SEQ ID NO: 22038

SEQ ID NO: 22040 - protein, 94 aa, Homo sapiens; identical to SEQ ID NO: 22038

SEQ ID NO: 22041 - protein, 93 aa, Homo sapiens
VSGITLSRHWMTWVRQAPGKGLEWVANIKEDGSEKNYVDSVKGRFTISRDNAKNSLYLQMSSLRAEDTAVYYCARGIGWFLDWGQGTLVTVSS

SEQ ID NO: 22042 - protein, 94 aa, Homo sapiens
AVSGITLSRHWMTWVRQAPGKGLEWVANIKEDGSERNYVDAVKGRFTISRDNPKNSLYLQMNSLRAEDTAVYYCARGIGWFLDWGQGTLVTVSS

SEQ ID NO: 22043 - protein, 94 aa, Homo sapiens
VVSGITLSRHWMTWVRQAPGKGLEWVANIKEDGSEENYVDSVKGRFTISRDNAKNSLYLQMSSLRAEDTAVYYCARGIGWFLDWGQGTLVTVSS

SEQ ID NO: 22044 - protein, 94 aa, Homo sapiens
AASGFTFSSSWMSWVRQAPGKGLEWVAKIQQDGSEKYYVDSVKGRFTISRDNAKNSLYLQMNSLRVEDTALYYCARVKGAFDIWGQGTMVTVSS

SEQ ID NO: 22045 - protein, 94 aa, Homo sapiens
AASGFTFSSYWMSWVRQAPGKGLEWVANIKQDGSEKYYVDSVKGRFTISRDNAKNSLYLQMNSLRAEDTAVYYCARVKGAFDIWGQGTMVTVSS

SEQ ID NO: 22046 - protein, 108 aa, Homo sapiens
TQTLTLTCTFSGFSLSTSGVGVGWIRQPAGKALEWLALIYWDDDKRYSPSLKSRLTITKDTSKNQVVLTMTNMDPVDTATYYCAHRRGGIVGAPFDYWGQGTLVTVSS

SEQ ID NO: 22047 - protein, 108 aa, Homo sapiens
TQTLTLTCTFSGFSLSTTGVGVGWIRQPPGKALEWLALIYWDDDKRYSPSLKSRLTITKNTSKNQVVLTMTNMDPVDTATYYCAHRRGGIVGAPFDYWGQGTLVTVSS

SEQ ID NO: 22048 - protein, 108 aa, Homo sapiens
TQTLTLTCSFSGFSLSTSGVGVAWIRQPPGKALEWLALIYWDDDKRYSPSLKSRLTITKDTSKNQVVLTMTNMDPVDTATYYCAHRRGGIVGAPFDYWGQGTLVTVSS

SEQ ID NO: 22049 - protein, 97 aa, Homo sapiens
AVYGGSFSGYFWTWIRQPPGKGLEWIGEINHSGSTNYNPSLKSRVTISVDTSKNQFSLKVTSVTAADTAVYYCARGHYGDFYYFDYWGQGTLVTVSS

SEQ ID NO: 22050 - protein, 97 aa, Homo sapiens
AAYGGSFSGYFWTWIRQPPGKGLEWIGEINHSGSTNYNPSLKSRVTMSVDTSKSQFSLKVRSVTAADTAVYHCARGHYGDFYYFDYWGQGTLVTVSS

SEQ ID NO: 22051 - protein, 106 aa, Homo sapiens
TQTLTLTCTFSGFSLSTSGVGVGWIRQPPGKALEWLALIYWDDDRRYSPSLKTRLTITKDTSKNQVVLTMTNMDPVDTATYYCAHRRPTLDSFDIWGQGTMVTVSS

SEQ ID NO: 22052 - protein, 106 aa, Homo sapiens
TQTLTLTCTFSGFSLSTSGMGVGWIRQPPGKALEWLALIYWDDDKRYIPSLRSRLTITKDTSRNQVVFTMTNMDPVDTATYYCAHRRPTLDSFDIWGQGTMVTVSS

SEQ ID NO: 22053 - protein, 97 aa, Homo sapiens
TVSGDSVSSTRYYWSWIRQPPGKGLEWIGYIYYTGTTNYNPSLKSRVTISVDTSNNQFSLKLSYVTAADTAVYYCAREVAGTLGIDYWGQGTLVTVS

SEQ ID NO: 22054 - protein, 98 aa, Homo sapiens
TVSGGSVSSGSYYWSWIRQPPGKGLEWIGYIHYRGSSNYNPSLKSRVTISVDTSKNQFSLKLSSVTAADTAVYYCAREVAGTLGIDYWGQGILVTVSS

SEQ ID NO: 22055 - protein, 98 aa, Homo sapiens; identical to SEQ ID NO: 22054

SEQ ID NO: 22056 - protein, 95 aa, Homo sapiens
AGSGFTFSTYWMTWVRQAPGKGLEWVGNIIQDGSAVYYADSVKGRFTISRDNAKNSLYLQMNSLRAEDTAVYHCARDFSGWSDYWGQGTRVTVSS

SEQ ID NO: 22057 - protein, 95 aa, Homo sapiens
VGSGFTFSTYWMTWVRQAPGKGLEWVANINKDGSGKYYADSVKGRFAISRDNTKNSLSLQMNSLRDEDTAVYYCARDFSGWSDYWGQGTLVIVSS

SEQ ID NO: 22058 - protein, 102 aa, Homo sapiens
AASGFTFSDYGMHWVRQALGRGLEWVAVVSYDGNIKYYGDSVKGRFTISRDTSKNTLYLQMNSLRAEDTAVYYCAKATYTYGSFYYYGMDVWGQGTTVTVSS

SEQ ID NO: 22059 - protein, 102 aa, Homo sapiens
AASGFSFSNYGMHWVRQAPGKGLEWVAVISYNGGIKYSADSVKGRFTISRDNSKNTLYLQVSSLRAEDTAVYYCAKATYTYGSFYYYGMDVWGQGTTVTVSS

SEQ ID NO: 22060 - protein, 102 aa, Homo sapiens
AASGFTFRNYGMHWVRQAPGKGLEWVAVISDDGNIKYHADSVKGRLTISRDNSGNTLFLQMNNLRTEDTAVYYCAKATYTYGSFYYYGMDVWGQGTTVTVSS

SEQ ID NO: 22061 - protein, 101 aa, Homo sapiens
AASGFTFSNYGMHWVRQAPGKGLEWVAVISYNGGIKYSTDSVKGRFTISKDDSKNTLYLQMSSLRAEDTAVYYCAKATYTYGSFYYYGMDVWGQGTTVTVS

SEQ ID NO: 22062 - protein, 95 aa, Homo sapiens
ASGYPFTTYYMHWVRQAPGQGLEWMGIIKPMSGGTTYAQNLQGRVTVTTDTSTSTVYMEVNSLRSEDTAVYYCVREKSGGFFDYWGQGTLVTVSS

SEQ ID NO: 22063 - protein, 95 aa, Homo sapiens
ASGYTFTTYYIHWVRQAPGQGLEWMGIMYTSGGSTRLAQRFQGRVTMTRDTSTNTVYMELSSLGSEDTAVYYCVREKSGGFFDYWGQGTLVTVSS

SEQ ID NO: 22064 - protein, 94 aa, Homo sapiens
SGYTFTSYYIHWVRQAPGQGLEWMGMVYTSGGVTRLPQRFQGRVTMTRDTSTNTVYMELSSLGSEDTAVYYCVREKSGGFFDYWGQGTLVTVSS

SEQ ID NO: 22065 - protein, 98 aa, Homo sapiens
AASGFTFSSYAMSWVRQAPGKGLEWVSVISGSGGSTYYADSVKGRFTISRDNSKNTLYLQMNSLRAEDTAVYYCAKDLSGSYDYFDYWGQGTLVTISS

SEQ ID NO: 22066 - protein, 98 aa, Homo sapiens
AGSGFTFSSYGMIWVRQAPGKGLEWVSAITDSGTSTYYTDSVRGRFTISRDNSKNELYLQMNSLRAEDTAVYYCAKDLSGSYDYFDYWGQGTLVTVSS

SEQ ID NO: 22067 - protein, 93 aa, Homo sapiens
AASGFIFSDYYMSWIRQAPGKGLEWVSYMSGSNINYADSVKGRFTISRDNAKNSLYLQMNSLRAEDTAVYYCARGGARRFDYWGQGTLVTVSS

SEQ ID NO: 22068 - protein, 94 aa, Homo sapiens
AASGFTFSHYYMSWIRQAPGKGLEWVSYINSGSTINYADSVEGRFTISRDNAKSSLYLQMNSLRVEDTAVYYCARGGARRFDYWGQGTLVTVSS

SEQ ID NO: 22069 - protein, 93 aa, Homo sapiens
AASGFIFSNYAMSWVRQAPGKGLQWVSTIGGDGTRTYYADSVKGRVTVSRDNSKNTLYLQMNSLRVGDTAIYYCARTVVNDYWGQGTLVTVSS

SEQ ID NO: 22070 - protein, 93 aa, Homo sapiens
AASGFTFSNYAMSWVRQAPGKGLQWVSTIGGDGTRTYYTDSVKGRVTVSRDNSKNTLYLQMNSLRAEDTAIYYCARTVVNDYWGQGTLVTVSS

SEQ ID NO: 22071 - protein, 93 aa, Homo sapiens
AASGFTFSNYAMTWVRQAPGKGLQWVATIGGDGTRTYYTDSVKGRVTVSRDNSKNMLYLQMNSLRAEDTAMYYCARTVVNDYWGQGTLVTVSS

SEQ ID NO: 22072 - protein, 93 aa, Homo sapiens
VASQFTFKDYAMSWVRQAPGKGLEWVSSISGGGSSTFYADSVKGRFTISRDNSKNTLYLQMNSLRVDDTAIYYCARTVVNDYWGQGTLVTVSS

SEQ ID NO: 22073 - protein, 102 aa, Homo sapiens
AASGFTFSNFALSWVRQAPGKGLEWVSTITYNGGSTYYADSVKGRFTISRDNSKNTLYLQMNSLRAEDTAVYYCAKKYSYGSGTYLYYFDYWGQGTLVTVSS

SEQ ID NO: 22074 - protein, 102 aa, Homo sapiens
AASGFTFSNYAMSWVRQAPGKGLAWVSTITASAGSTLYADSVKGRFTISRDNSKNTLYLQMNSLRADDTAVYYCAKKYSYGSGTYLYYFDYWGQGTLVTVSS

SEQ ID NO: 22075 - protein, 105 aa, Homo sapiens
AASGFNFRSYDMSWVRQTPGKGLEWVSTISDTGATTHYADSAKGRFIISRDNSENTLYLHMNNLRADDAAVYFCAKPPIAVMPAGRGPNYFFDLWDRGTLVAVSS

SEQ ID NO: 22076 - protein, 105 aa, Homo sapiens
AASGFNFRSYDMSWVRQTPGKGLEWVSTISDTGATTHYADSAKGRFIISRDNSENTLYLHMNNLRADDAAVYFCAKPPIAVMPAGRGPNYFFDLWGRGTLVAVSS

SEQ ID NO: 22077 - protein, 105 aa, Homo sapiens; identical to SEQ ID NO: 22076

SEQ ID NO: 22078 - protein, 97 aa, Homo sapiens
AASGFTFSNNEMNWVRQAPGKGLEWVSYISYSGSPIYYADSVKGRFTISRDDAKNSLYLQMNSLRAEDTAVYYCAREGRETDAFDIWGQGTMVTVSS

SEQ ID NO: 22079 - protein, 97 aa, Homo sapiens
AASGFTFSSHEMNWVRQAPGKGLEWVSYISNGGGTIYYADSVKGRFTISRDDARNSLFLQMNSLRAEDTAVYYCAREGRETDAFDIWGQGTLVTVSS

SEQ ID NO: 22080 - protein, 95 aa, Homo sapiens
AASGFTFSRYWMHWVRQVPGKGLVWVSNINEDGRTTNYGDSVKGRFTTFRDNVRNTLYLQMNSLRAEDTAVYFCARDVRGPEDYWGQGIWVTVSS

SEQ ID NO: 22081 - protein, 95 aa, Homo sapiens; identical to SEQ ID NO: 22080

SEQ ID NO: 22082 - protein, 95 aa, Homo sapiens
EASGFAFSRYWMHWVRQAPGEGLVWVSNINQDGRTVNYADSVKGRFTNSRDNVKNTLYLQMNSLRVEDTAVYFCARDVRGPEDYWGQGILVTVSS

SEQ ID NO: 22083 - protein, 95 aa, Homo sapiens
AASGFTFSRYWMHWVRQAPGKGLVWVSNINEDGRTVNYADSVKGRFTNSRDNVKNTLYLQMNSLRVEDTAVYFCARDVRGPEDYWGQGILVTVSS

SEQ ID NO: 22084 - protein, 95 aa, Homo sapiens
AASGFTFSRYWMHWVRQAPGKGLVWVSNINEDGRTINYADSVKGRFTNSRDNVKNTLYLQMNSLRVEDTAIYFCARDVRGPEDYWGQGILVTVSS

SEQ ID NO: 22085 - protein, 95 aa, Homo sapiens; identical to SEQ ID NO: 22080

SEQ ID NO: 22086 - protein, 93 aa, Homo sapiens
AGSGFTFSRYWMHWVRQPPGMGLVWVSNINEDGSTTNYADSVKGRFTISRDNAKNTLYLQMTSLRVEDTALYYCARDVRGPEDYWGQGILVTV

SEQ ID NO: 22087 - protein, 96 aa, Homo sapiens
AASGFTFSNFWMHWVRQAPGQGLVWVARVNEDGYRTTYADSVKGRFTISRDNAKNTLDLQMNSLRAEDTAVYYCAKGIVGAALGYWGQGALVTVSS

SEQ ID NO: 22088 - protein, 96 aa, Homo sapiens
AASGFTFNIYWMHWVRQAPGKGLVWVSRIDNDGSATTYADSVRGRFTISRDNAKNMLYLQMNSLRDEDTAVYYCAKGIVGAALGYWGQGALVTVSS

SEQ ID NO: 22089 - protein, 98 aa, Homo sapiens
AASGFAFSNVWMSWVRQAPGKGLEWVGQIKTKGEGGSIDHAAPVKGRFTISRDDSKNTVYLQMNSLQTEDTAVYYCTTDFLRGFFGSWGQGTLVTVSS

SEQ ID NO: 22090 - protein, 98 aa, Homo sapiens
AASGFIFSNVWMNWVRQAPGKGLEWVGRIKTKTDGGTIDYAAPVKGRFTISRDDSKNTLYMQMNSLKTEDTAVYYCTTDFLRGFFGSWGQGALVIVSS

SEQ ID NO: 22091 - protein, 98 aa, Homo sapiens
AASGFIFSNVWMNWVRQAPGKGLEWVARIKIETAGGTIDYAAPVKGRFTISRDDSKNMLYLQMTSLKTEDTAVYYCTTDFLRGFFGSWGQGALVTVSS

SEQ ID NO: 22092 - protein, 98 aa, Homo sapiens
AASGFIFSNVWMNWVRQTPGKGLEWVARIKIETAGGTIDYAAPVKGRFTISRDDSKNMLYLQMTSLKTEDTAVYYCTTDFLRGFFGSWGQGALVTVSS

SEQ ID NO: 22093 - protein, 98 aa, Homo sapiens; identical to SEQ ID NO: 22090

SEQ ID NO: 22094 - protein, 98 aa, Homo sapiens
AASGFIFSNVWMNWVRQAPGKGLEWVARIKIKTDGGTIDYAAPVKGRFSISRDDSKNMLYLQMNSLKTEDTAVYYCTTDFLRGFFGSWGQGALVTVSS

SEQ ID NO: 22095 - protein, 98 aa, Homo sapiens
AASGFTFSNVWMNWVRQAPGKGLEWVGLIKIKTDGGTIDYAAPVKGRFTISRDDSKNMLYLQMNSLKTDDTAVYYCTTDFLRGFFGSWGQGALVTVSS

SEQ ID NO: 22096 - protein, 98 aa, Homo sapiens
AASGFTFSNVWMSWVRQVPGKGLEWVGQIKTKIEGGTTDHAAPVKGRFTISRDDSKNTVFLQMNSLQTEDTAVYYCTTDFLRGFFGSWGQGTLVTVSS

SEQ ID NO: 22097 - protein, 98 aa, Homo sapiens
AASGFIFSNVWMNWVRQAPGKGLEWVGRIKTKTDGGTIDYAAPVKGRFTISRDDSKNTVYLQMNSLKTEDTAVYYCTTDFLRGFFGSWGQGALVTVSS

SEQ ID NO: 22098 - protein, 101 aa, Homo sapiens
TVSGGSITITSYYWGWIRQPPGKGLEWIGSIYYSGRTYDNPSLKSRVTISVDTSKNQFSLRLSSVTAADTAVYYCARLLYDSSGYYYFDCWGQGTLVTVSS

SEQ ID NO: 22099 - protein, 101 aa, Homo sapiens
TISGGSISSSSYYWGWIRQPPGKGLEWLGSIYYSGSTYDNPSLKSRVTMSVDTSKNQFSLKLTSVTAADTAVYYCARLLYDSSGYYYFDCWGQGTLVTVSS

SEQ ID NO: 22100 - protein, 100 aa, Homo sapiens
TVSGGSISSSSYYWGWIRQPPGKGLEWIASMHYTGRPYDNPSLKSRITMPVDTSKNQFSLKLSSVTAADTAVYYCARLLYDSSGYYYFDCWGQGTLVTVS

SEQ ID NO: 22101 - protein, 97 aa, Homo sapiens
GVSGLSFSSYAMSWARQAPGKGLEWVSAISGSGGSTYYADSVKGRFTISRDNSKNTLYLQMNSLRAEDTAVYYCAKDVITLDAFDIWGQGTMVTVSS

SEQ ID NO: 22102 - protein, 97 aa, Homo sapiens; identical to SEQ ID NO: 22101

SEQ ID NO: 22103 - protein, 97 aa, Homo sapiens
AASGFTFGNYGMSWVRQAPGKGLEWVSAISESSSSTYYADSVKGRFTITRDNSKSTIYLQMNSLTAEDTAMYYCAKDVITLDAFDIWGQGTMVTVSS

SEQ ID NO: 22104 - protein, 100 aa, Homo sapiens
TVSGGSISSSSYYWGWIRQPPGKGLEWIGSINYSWSTYYNPSLKSRVTISVDTSKNQFSLKLSSVTAADTAVYYCARPGSSTGWYYFDYWGQGTLVTVSS

SEQ ID NO: 22105 - protein, 100 aa, Homo sapiens
TVSGGSISSSGYYWGWIRQPPGKGLEWVGSINYSWSTYYNPSLKSRVTISVDTCKNQFSLKLSSVTAADTAVYYCARPGSSTGWYYFDYWGQGTLVTVSS

SEQ ID NO: 22106 - protein, 100 aa, Homo sapiens
TVSGGSISSSTYYWGWIRQPPGKGLEWIGSICYSGNTYYNPSLKSRVTISVDTSKNQFSLKLSSVTAADTAVYYCARPGSSTGWYYFDYWGQGTLVTVSS

SEQ ID NO: 22107 - protein, 94 aa, Homo sapiens
AASGFTLSSYWMYWVRQAPGKGLVWVSDITSDGSTTTYADSVKGRFTISRDNAENTLYLQMISLRAEDTAVYYCARGNIGFDYWGQGTLVTVSS

SEQ ID NO: 22108 - protein, 94 aa, Homo sapiens
AASGFTFSSYWMHWVRQAPGKGLVWVSRIYSDGSTTRYADSVKGRFTISRDNAKNTLYLQMNSLRAEDTAVYYCARGNIGFDYWGQGTLVTVSS

SEQ ID NO: 22109 - protein, 91 aa, Homo sapiens
ASGYTFTNYDINWVRQASGQGLEWMGWMSPRTGDTVYAQNFQGRVTMTRDTSISTAYMELSSLRSEDTAIYYCARGYRDYWGQGTLVTVSS

SEQ ID NO: 22110 - protein, 91 aa, Homo sapiens
ASGYTFTNYDINWVRQASGQGLEWMGWMSPRTGDTVYAQNFQGRVTMTRDTSISTAYMELSSLRSEDTAVYYCARGYRDYWGQGTLVTVSS

SEQ ID NO: 22111 - protein, 91 aa, Homo sapiens
ASGYSFTNYDINWVRQASGQGLEWMGRMSPRTGDTVYAQNFQGRVTMTRDTSISTAYMELSSLRSEDTAVYYCARGYRDYWGQGTLVTVSS

SEQ ID NO: 22112 - protein, 91 aa, Homo sapiens
ASGYTFSSYDINWVRQATGQGLEWMGSMSPRTGDTAYAQKFQGRVTMTRDTSISTAYMELSSLTSEDTAVYYCARGYRDYWGQGTLVTVSS

SEQ ID NO: 22113 - protein, 91 aa, Homo sapiens
ASGYTFSSYDINWVRQATGQGLEWMGWMSPRTGDTVYAQKFQGRVTMTRDTSISTAYMELSSLTSEDTAVYYCARGYRDYWGQGILVTVSS

SEQ ID NO: 22114 - protein, 91 aa, Homo sapiens
ASGYTFSSYDINWVRQATGQGLEWMGWMSPRTGDTVYAQKFQGRVTMTRDTSISTAYMELSTLTSEDTAVYYCARGYRDYWGQGTLVTVSS

SEQ ID NO: 22115 - protein, 91 aa, Homo sapiens
ASGYTFSSYDINWVRQATGQGLEWMGSMSPRTGDTAYAQKFQGRVTMTRDTSISIAYMELSSLTSEDTAVYYCARGYRDYWGQGTLVTVSS

SEQ ID NO: 22116 - protein, 91 aa, Homo sapiens
ASGYTFSSYDINWVRQATGQGLEWMGWMSPRTGDTVYAQKFQGRVTMTRDTSISTAYMELSSLTSEDTAVYYCARGYRDYWGQGTLVTVSS

SEQ ID NO: 22117 - protein, 91 aa, Homo sapiens; identical to SEQ ID NO: 22111

SEQ ID NO: 22118 - protein, 94 aa, Homo sapiens
AASGFTFSSRWMTWVRQAPGKGLECVADIKPDGSETYYLDSVKGRFTVSRDNAKNSLFLQMNSLTAEDTALYYCTTDLNWESFWGQGTLVTVSS

SEQ ID NO: 22119 - protein, 94 aa, Homo sapiens
VGSGISLSNYWMTWVRQTPGKGMESVANIKGDGGEKYYVDSVKGRFTISRDNAKNSLFLQMDSLTLEDTALYYCTTDLNWESFWGQGTLVTVSS

SEQ ID NO: 22120 - protein, 92 aa, Homo sapiens
AASGFTFSIYAMSWARQAPGKGLEWVSVIGDSGERTYYADSVKGRFTISRDNSKDTLYLQMNSLRADDTALYYCAKLRGDVWGQGTTVTVSS

SEQ ID NO: 22121 - protein, 92 aa, Homo sapiens
AVSGFNLNSYTMSWVRQAPGKGLEWVSLISGTGGTIYYAESVKGRFTISRDISKNTLYLQMNSLRAEDTAIYYCAKLRGDVWGQGTTVTVSS

SEQ ID NO: 22122 - protein, 98 aa, Homo sapiens
ISGDSVSSNSAAWDWIRQSPSRGLEWLGRTYYRSKWYNNYAVSVKSRITINPDTSKNQFSLQLNSVTPEDTAVYYCARRGQEQALDYWGQGTLVTVSS

SEQ ID NO: 22123 - protein, 98 aa, Homo sapiens
ISGDSVSSTSATWNWIRQSPSRGLEWLGRTYYRSKWSNDYAASVKSRITVNPDTTKNQFSLQLNSVTPDDTAVYYCARRGQEQALDYWGQGTLVTVSS

SEQ ID NO: 22124 - protein, 97 aa, Homo sapiens
AASGFTFSNHWMHWIRQAPGKGLVWVSRIKGDESSTSYADSVKGRFTISRDNAKNMLFLQMDALRADDTALYYCVRDGVGAPPFDSWGPGTLVTVSS

SEQ ID NO: 22125 - protein, 97 aa, Homo sapiens
AASGFTFSAHWMHWVRQTPEKGLFWVADIKYDETAKRYADSVKGRFTISRDNTENRLYLQMNSLTVEDTALYYCVRDGVGAPPFDSWGQGTLVTVSS

SEQ ID NO: 22126 - protein, 98 aa, Homo sapiens
AASGFTFSNYELNWVRQAPGKGLEWVSYISSTGSTIYYADSVEGRFTISRDNAKNSLYLQMNYLRAEDTAVYYCVRDHGDYFWYFDLWGRGTLVTVSS

SEQ ID NO: 22127 - protein, 98 aa, Homo sapiens
AASGFTFSSYEMNWVRQAPGRGLEWISYISSSGSTIYYADSVKGRFTISRDNAKKSLFLQMNYLRAEDTALYYCVRDHGDYFWYFDLWGRGTLVTVSS

SEQ ID NO: 22128 - protein, 95 aa, Homo sapiens
AASGFTFSSYSMNWVRQAPGKGLEWVSAIDSSSTHIYYGDSMKGRFSISRDNAKNSLDLQMNSLRAEDTGVYYCAKAFGWYFDLWGRGTLVTVSS

SEQ ID NO: 22129 - protein, 95 aa, Homo sapiens
AASGFTFTSYSMNWVRQAPGKGLEWVAAINDDSRYIYYADSLKGRFTVSRDNAKNSLYLQLNSLRAEDTAVYYCAKAFGWYFDLWGRGTLVTVSS

SEQ ID NO: 22130 - protein, 106 aa, Homo sapiens
TQTLTLTCTFSGFSLSTSGVGVGWIRQPPGKALEWLALIFWDDDKRYSPSLKSRLTITKDTSKNQVVLTMTNMDPVGTATYYCAHRRGVAGYFDYWGQGTLVTVSS

SEQ ID NO: 22131 - protein, 106 aa, Homo sapiens
TQTLTLTCTFSGFSLSTSGVGVGWIRQPPGKALEWLALIYWEDDKRYSPSLKSRLTITKDTSKNQVVLTMTNMDPVDTATYYCAHRRGVAGYFDYWGQGTLVTVSS

SEQ ID NO: 22132 - protein, 93 aa, Homo sapiens
AASGFTFKSRWLTWGRQAPGKGLEWVASIKEDGREKYYVDSVKGRFTVSRDNAKNSLYLQMTSLRAEDTSVYYCALGRGMDVWGPGTTVTVSS

SEQ ID NO: 22133 - protein, 93 aa, Homo sapiens; identical to SEQ ID NO: 22132

SEQ ID NO: 22134 - protein, 93 aa, Homo sapiens
AASGFNFNTRWMTWVRQAPGKGLEWVANIKEDGSQKNYVDSVKGRFTVSRDNAENSVVLQMNSLRVEDTAVYYCALGRGMDVWGQGTSVTVSS

SEQ ID NO: 22135 - protein, 90 aa, Homo sapiens
GFTFDSRWMTWVRQAPGKGLEWVANIKGSGSEKHYADSVTGRFTVSRDNARDSVFLQMNRLRPDDTAVYYCALGRGMDVWGQGTTVTVSS

SEQ ID NO: 22136 - protein, 93 aa, Homo sapiens
AASGFIFSGRWMTWVRQPPGKGLEWVANIKEDGSQKNYVDSVRGRFTVSRDNAKNSVVLQMNSLRVEDTAVYYCALGRGMDVWGQGTSVTVSS

SEQ ID NO: 22137 - protein, 93 aa, Homo sapiens
AASGFTFTSRWMTWVRQAPGKGLEWVANIKENGNEKNYVGSVKGRFTVSRDNARNLVLLQMNSLRPEDSAVYYCALGRGMDVWGQGTTVTVSS

SEQ ID NO: 22138 - protein, 93 aa, Homo sapiens; identical to SEQ ID NO: 22137

SEQ ID NO: 22139 - protein, 93 aa, Homo sapiens
AASGFTFSSRWMTWVRQAPGKGLEWVANIRGSGSEKHYVDSVTGRFTVSRDNAKNSVFLQMNSLRPEDTAVYYCALGRGMDVWGQGTTVTVSS

SEQ ID NO: 22140 - protein, 93 aa, Homo sapiens
AASGFTFNKRWMTWVRQAPGKGLEWVANINEDGREIHYVDSVKGRFTISRDNAKNSVYLQMNSLRAEDTAVFYCALGRGMDVWGQGSTVTVSS

SEQ ID NO: 22141 - protein, 93 aa, Homo sapiens
AASGFTFSSRWMTWVRQAPGKGLEWVATINRDGSDIYYVDAVKGRFTISRDNAKNSLYLQMNSLRDDDTAVYYCALGRGMDVWGQGTTVTVSS

SEQ ID NO: 22142 - protein, 93 aa, Homo sapiens
AASGFTFSSRWMTWVRQAPGKGLEWVANINRDGSDKYYVDAVKGRFTISRDNAKNSLYLQMNSLRDDDTAVYYCALGRGMDVWGQGTTVTVSS

SEQ ID NO: 22143 - protein, 93 aa, Homo sapiens
AASRFAFSGRWMTWVRQAPGKGLEWVASIKGDGSEKYYVDSVRGRFAISRDNAKNSLYLQMNSLRGDDTGMYYCALGRGMDVWGQGTTVTVSS

SEQ ID NO: 22144 - protein, 92 aa, Homo sapiens
AVSGFTFSNYRMSWARQAPGKGLEWVANINQDGSEQYYVDSVKGRFTISRDNAKNSLYLQLNSLRAEDTAVYYCARWGLDVWGQGTTVTVSS

SEQ ID NO: 22145 - protein, 92 aa, Homo sapiens; identical to SEQ ID NO: 22144

SEQ ID NO: 22146 - protein, 92 aa, Homo sapiens
AASGFTFNPYWMNWVRQAAGKGLEWVANINEDGSEKNYVDSVKGRFTISRDNAKNSLYLQMDSLRADDTAVYYCARWGLDVWGQGTTVTVSS

SEQ ID NO: 22147 - protein, 91 aa, Homo sapiens
ASGFTFNTYWMNWVRQAPGKGLEWVANINQDGTEKNYVDSVKGRFTISRDNAKNSLYLQMDSLRAEDTAVYYCARWGLDVWGQGTTVTVSS

SEQ ID NO: 22148 - protein, 91 aa, Homo sapiens
ASGFNFNIYWMNWVRQAPGEGLEWVANINLEESEKNYVDSVKGRFTVSRDNAKNSLYLQMDSLRAEDTGVYYCARWGLDVWGQGTTVTVSS

SEQ ID NO: 22149 - protein, 91 aa, Homo sapiens; identical to SEQ ID NO: 22147

SEQ ID NO: 22150 - protein, 92 aa, Homo sapiens
AVSGFTFSNYRMSWARQAPGKGLEWVANINQDGSERHYVDSVRGRFTISRDNAKNSLYLQLNSLRAEDTAVYYCARWGLDVWGQGTTVTVSS

SEQ ID NO: 22151 - protein, 92 aa, Homo sapiens
AVSGFTFSNYRMSWARQAPGKGLEWVANINQDGSEQHYVDSVKGRFTISRDNAKNSLYLQLNSLRAEDTAVYYCARWGLDVWGQGTTVTVSS

SEQ ID NO: 22152 - protein, 91 aa, Homo sapiens
VSGFTFSNYRMSWARQAPGKGLEWVANINQDGSERHYVDSVRGRFTISRDNAKNSLYLQLNSLRAEDTAVYYCARWGLDVWGQGTTVTVSS

SEQ ID NO: 22153 - protein, 92 aa, Homo sapiens
AVSGFTFSNYRMSWARQAPGKGLEWVANINEDGSEQYYVDSGKGRFTISRDNAKNSLYLQLNSLRAEDTAVYYCARWGLDVWGRGTTVTVSS

SEQ ID NO: 22154 - protein, 92 aa, Homo sapiens
AVSGFTFSSYRMSWARQAPGKGLEWVANINEDGSEQHYVDSVKGRFTVSRDNAKNSLYLQLNGLRADDTAIYYCARWGLDVWGQGTTVTVSS

SEQ ID NO: 22155 - protein, 92 aa, Homo sapiens; identical to SEQ ID NO: 22151

SEQ ID NO: 22156 - protein, 92 aa, Homo sapiens
AVSGFTFSNYRMSWARQAPGKGLEWVANIDQDGSEQYYVDSVKGRFTISRDNAKNSLYLQLNSLRAEDTAVYYCARWGLDVWGQGTTVTVSS

SEQ ID NO: 22157 - protein, 92 aa, Homo sapiens
AVSGFTFSNYRMSWARQAPGKGLEWVANINEDGSEQHYVDSVKGRFTVSRDNAKNSLYLQLNGLRADDTAIYYCARWGLDVWGQGTSVTVSS

SEQ ID NO: 22158 - protein, 96 aa, Homo sapiens
AVSGFTFSSSYMSWVRQAPGKGLEWVANIKQDGSEKNYVDSVKGRFTISRDNAKNSLYLQMNSLRAEDTALYYCARDGYYYAMDVWGQGTTVTVSS

SEQ ID NO: 22159 - protein, 96 aa, Homo sapiens
AASGFTFRSYWMSWVRQAPGKGLEWLANLKHDGSEKYYVDSVTGRFTISRDNAKNSLYLQMNSLRAEDTAVYYCARDGYYYAMDVWGQGTTVTVSS

SEQ ID NO: 22160 - protein, 96 aa, Homo sapiens
AASGFPFSDYWMSWVRQAPGKGLEWVANIKGDQSARYYVDSVKGRFTISRDNAKNSLYLQMNSLRVDDTAVYYCARDGYYYAMDVWGQGTTVTVSS

SEQ ID NO: 22161 - protein, 102 aa, Homo sapiens
VGSGFTFSSYWMSWVRQAPGRGLEWVANIKQDGTEKYYIDAVKGRFSISRDNAKKSLYLQMDSLRAEDTAMYFCARGDYYDSSGDYIDAFDIWGQGTMVTVS

SEQ ID NO: 22162 - protein, 103 aa, Homo sapiens
AASGFTFSSYWMSWVRQAPGKGLEWVANIKQDGSEKFYVDSVRGRFILSRDNAKNSLYLQMNSLRPEDTAVYYCARGDYYDSSGDYIDAFDIWGQGTVVTVSS

SEQ ID NO: 22163 - protein, 100 aa, Homo sapiens
AASGFTFSNYGIHWVRQAPGKGLEWVAVISYDGSNKYYADSVKGRFTISRDNSKNTLYLQMNSLRAEDTAVYYCAKEGGRRDGYNYFDYWGQGTLVTVSS

SEQ ID NO: 22164 - protein, 100 aa, Homo sapiens
AASGFTFSTYGMHWVRQAPGKGLEWVAVISYDGSNKYYADSVKGRFTISRDNSKNTLYLQMNSLRTEDTAVYYCAKEGGRRDGYNYFDYWGQGTLVTVSS

SEQ ID NO: 22165 - protein, 100 aa, Homo sapiens; identical to SEQ ID NO: 22164

SEQ ID NO: 22166 - protein, 100 aa, Homo sapiens
AASRFTFSTYGMHWVRQAPGKGLEWVSMISYDGNNKDYADSVKGRFTISRDNSKNTLYLHMNSLRPEDTAVYYCAKEGGRRDGYNYFDYWGQGTLVTVSS

SEQ ID NO: 22167 - protein, 100 aa, Homo sapiens
AASGFTFSAYEMNWVRQVPGKGPEWVSYIDSSSSTIHYADSVQGRFTISRDNAKSSLYLQMNSLRAEDTGLYYCARGRGMARVWYGFDIWGQGTMVTVSS

SEQ ID NO: 22168 - protein, 99 aa, Homo sapiens
AASGFTFSSYEMNWVRQAPGKGLEWVSYISSGSTIFYADSVKGRFTISRDNAKNSLYLQINSLRAEDTAVYFCARGRGMARVWYGFDIWGQGTMVTVSS

SEQ ID NO: 22169 - protein, 96 aa, Homo sapiens
KASGYSFTDYWIGWVRQMPGKGLEYMGIIYPGDSNIKYSPSFQGQVTISADKSITTAYLQWSSLKASDTAIYFCARRYSNSWFDYWGQGTLLTVSS

SEQ ID NO: 22170 - protein, 96 aa, Homo sapiens
KGSGYNFISYWIGWVRQMPGKGLEWMGIIYPGDSDTRYSPSFQGQVTISADKSISTAYLQWSSLKASDTAMYYCARRYSNSWFDYWGQGTLVTVSS

SEQ ID NO: 22171 - protein, 96 aa, Homo sapiens
EVSGFTFTDYWMTWVRQAPGKGLEWVANIKEDGSATFYADSVKGRFAISRDNAKKSLYLQMNSLRAEDTAVYYCATSADAAAGPYWGQGTLLTVSS

SEQ ID NO: 22172 - protein, 96 aa, Homo sapiens
VVSEFIFSNYWMTWVRQAPGKGLEWVANINEDGSVKYYVDSVKGRFTISRDNAKNSLFLHMNSLRAEDTAVYYCATSADAAAGPYWGQGTLVTVSS

SEQ ID NO: 22173 - protein, 96 aa, Homo sapiens
TVSGDSISSYYWSWIRQPPGKGLEWIGYIYYSGSTNYNPSLKSRVTISVDTSKNQCSLKLRSVTAADTALYYCARHGGGYDPFDYWGQGTLVAVSS

SEQ ID NO: 22174 - protein, 96 aa, Homo sapiens
SVSGGSISSHYWSWIRQPPGKRLEWLGYIYYLGSTNYNPSVKSRVTISIDTSKNQLSLKLSSVTAADTAVYYCARHGGGYDPFDYWGQGTLVTVSS

SEQ ID NO: 22175 - protein, 96 aa, Homo sapiens
SVSGGSISSHYWSWIRQPPGKRLEWLGYIYYLGSTNYNPSLKSRVTISIDTSKNQLSLKLSSVTAADTAVYYCARHGGGYDPFDYWGQGTLVTVSS

SEQ ID NO: 22176 - protein, 96 aa, Homo sapiens; identical to SEQ ID NO: 22175

SEQ ID NO: 22177 - protein, 96 aa, Homo sapiens; identical to SEQ ID NO: 22174

SEQ ID NO: 22178 - protein, 96 aa, Homo sapiens; identical to SEQ ID NO: 22174

SEQ ID NO: 22179 - protein, 101 aa, Homo sapiens
ASGYTFSNYAINWVRQAPGQGLEWMGWVNTNTGNPTYAQGFTGRFVFSWDTSVSTAFLQISSLKVEDTALYYCARRGYCSGSTCGGWFDPWGQGTLVTVSS

SEQ ID NO: 22180 - protein, 101 aa, Homo sapiens
ASGYTFTSYAINWVRQAPGQGLEWMGWINTNTGNPTYAQGFTGRFVFSLDTSVTTAYLQISTLTTEDTAMYYCARRGYCSGSTCGGWFDPWGQGTLVTVSS

SEQ ID NO: 22181 - protein, 96 aa, Homo sapiens
ASGFIFSTYEVNWVRQAPGKGLEWVSYIRSGGDSTTYYADSVRGRFTISRDNAKNSVYLQMNSLRVEDTAVYYCARDLRSNGLDVWGLGTTVSVSS

SEQ ID NO: 22182 - protein, 96 aa, Homo sapiens
AASGFTFSMYEMNWIRQTPGKGLEWVSYISSSGSTTYYADSVKGRFTISRDNAKNSVFLQMNSLRDDDTAIYLCARDLRSNGLDVWGQGTTVTVSS

SEQ ID NO: 22183 - protein, 96 aa, Homo sapiens
AASGFTFSSFEMNWVRQAPGKGLQWISYIGVSGDTVYYADSVKGRFTISRDNAKNSLWLQMTSLRAEDTAVYYCARDLRSNGLDVWGQGTTVTVSS

SEQ ID NO: 22184 - protein, 99 aa, Homo sapiens
KGSGYDFSNYWIGWVRQMPGKGLEWMGIIYPSDSEAKYSPSFQGQVTISVDKSISTAFLQWSSLKASDTAMYYCARPRGGSYYGAFDYWGQGALVTVSS

SEQ ID NO: 22185 - protein, 99 aa, Homo sapiens
KGSGYIFTNFWIGWVRQVPGEGLEWMGIIYPGDSDAKYSPSLQGQVTISVDKSISTAYLHWSSLKASDTAMYYCARPRGGSYYGAFDYWGQGTLVTVSS

SEQ ID NO: 22186 - protein, 99 aa, Homo sapiens
KGSGYSFTNFWIGWVRQVPGEGLEWMGIIYPGDSDAKYSPSLQGQVTISVDKSISTAYLHWSSLKASDTAMYYCARPRGGSYYGAFDYWGQGTLVTVSS

SEQ ID NO: 22187 - protein, 99 aa, Homo sapiens; identical to SEQ ID NO: 22186

SEQ ID NO: 22188 - protein, 97 aa, Homo sapiens
TVSGGSISNYYWTWIRQPPGKGLEWIGYIYDTGSPNCNPSLKSRLTISVDTSKSQFFLKLSSVTAADTAVYYCARGYDSSGYYYDYWGQGTLVTVSS

SEQ ID NO: 22189 - protein, 97 aa, Homo sapiens
TVSGGSISSYYWTWIRQPPGEGLEWVGYIYYSGSTNYNPSLKSRVTISVDTSKNQVSLNLSSVTAADTAVYYCARGYDSSGYYYDYWGQGTLVTVSS

SEQ ID NO: 22190 - protein, 97 aa, Homo sapiens
TVSGGSISSYYWTWIRQPPGKGLEWIGYIFYSGSTNSNPSLKSRVTISVDTSKNQVSLKLRSVTAADTAVYYCARGYDSSGYYYDYWGQGTLVTVSS

SEQ ID NO: 22191 - protein, 96 aa, Homo sapiens
TVSGGSISSYYWTWIRQPPGEGLEWVGYIYYSGSTNYNPSLKSRVTISVDTSKNQVSLNLSSVTAADTAVYYCARGYDSSGYYYDYWGQGTLSPSP

SEQ ID NO: 22192 - protein, 95 aa, Homo sapiens
AASGFTFSSYWMHWVRQAPGKGLVWVSRIDNYGSITDYADSVKGRFTISRDNTKNTLYLQMNSLRTEDAGMYYCARDVGGRAGYWGQGTLVTVSS

SEQ ID NO: 22193 - protein, 95 aa, Homo sapiens
AASGFTLSSYWMHWVRQAPGKGLVWVSRINGDGTSITYADSVKGRFTISKDNAKNTLYLQMNSLRVEDTAVYYCARDVGGRAGYWGQGTLVTVSS

SEQ ID NO: 22194 - protein, 98 aa, Homo sapiens
AGSGFTFSSFWMGWVRQAPGKGLEWVANIKQDGSEKYYVDSVKGRFTISRDNAKNSLYLQMNSLRAEDTAVYYCARGFSYGTDYFDYWGQGTLVTVSS

SEQ ID NO: 22195 - protein, 98 aa, Homo sapiens
AASGFTFSNYWMSWVRQTPGKGLEWLAIIKQDGSEKYYVDSVKGRFTISRDNAKNSLYLQMNSLRAEDTAVYYCARGFSYGTDYFDYWGQGTLVTVSS

SEQ ID NO: 22196 - protein, 90 aa, Homo sapiens
AVYGGSFSNYYWSWIRQPPGKGLEWIGEINHSGNTNYNPSLKSRVTMSVDTSKNQFSLKLTSVTAADTAVYYCGRRFDYWGLGSLVTVSS

SEQ ID NO: 22197 - protein, 89 aa, Homo sapiens
AVYGASFSGYYWSWIRQPPGKGLEWIGEINHGGSTNYNPSLKSRVTISVDTSKNQFSLKLSSVTAADTAVYYCGRRFDYWGQGTLVTVS

SEQ ID NO: 22198 - protein, 90 aa, Homo sapiens
AVYGASFSGYYWSWIRQPPGKGLEWIGEINHGGSTNYNPSLKSRVTISVDTSKNQFSLKLSSVTAADTAVYYCGRRFDYWGQGTLVTVSS

SEQ ID NO: 22199 - protein, 90 aa, Homo sapiens
AVYGASFSGYYWSWIRQPPGKGLEWIGEINDSGGTNYNPSLKSRVTISVDTSKKQFSLKVISVTAADTAVYFCGRRFDYWGQGTLVTVSS

SEQ ID NO: 22200 - protein, 93 aa, Homo sapiens
AASGFIFGDYEMNWVRQAPGKGLEWISYISGSGTTIYADSVRGRFTISRDNAENSLFLQMNNVRVEDTAIYYCTRDPRGMDVWGQGTTVTVSS

SEQ ID NO: 22201 - protein, 94 aa, Homo sapiens
AASGFTFSSYEMNWVRQTPGKGLEWLSYISESGGTIWYADSVKGRFTTSRDNTKNSLYLQMNSLRVEDSAIYYCTRDPRGMDVWGQGTKVTVSS

SEQ ID NO: 22202 - protein, 91 aa, Homo sapiens
AASGFTFSSFAMHWVRQAPGKGLEWVAVISYDGSNKYYADSVKGRFTISRDNSKNTLYLQMNSLRAEDTAVYYCANRFDYWGQGTLVTVSS

SEQ ID NO: 22203 - protein, 91 aa, Homo sapiens
AASGFTFSGYAMHWVRQAPGKGLEWVAVISSDGSNQYYADSVKGRFTISRDNSQNTLYLQLNSLRAEDTAVYYCANRFDYWGQGTLVTVSS

SEQ ID NO: 22204 - protein, 100 aa, Homo sapiens
VGSGFTFGSNWMSWVRQAPGKGLEWVASIKQDGTKTYNEDSVKGRFSISRDNAKNSLYLQMNSLTGADTAVYYCARGPSYGSRTDYFDYWGQGTLVTVSS

SEQ ID NO: 22205 - protein, 100 aa, Homo sapiens
AASGFTFSSHWMSWVRQAPGKGLEWVASIKEVGRGTYNVDSVKGRFTISRDNAKNSLYLQMNGLRSEDTALYYCARGPSYGSRTDYFDYWGQGTLVTVSS

SEQ ID NO: 22206 - protein, 100 aa, Homo sapiens
AASGFTFSSNWMSWVRQTPGKGLEWVASVKQDGITKYYMDSVKGRVTISRDNAKDALYLQMNSLRAEDTAIYYCARGPSYGSRTDYFDYWGQGTLVTVSS

SEQ ID NO: 22207 - protein, 100 aa, Homo sapiens
AASRFTFSNHWMGWVRQAPGKGLEWVASIKQDGSETYNVAPVKGRFTISRDNARNSLYLQMNSLTIEDTAIYYCARGPSYGSRTDYFDYWGQGTLVTVSS

SEQ ID NO: 22208 - protein, 94 aa, Homo sapiens
AASGFTFSSYWMSWVRQSPGKGLEWVANIKQDGSDKYYVDSVKGRFTISRDNAKNSLYLQMNSLRAEDTAVYYCAKGSGWYGYWGQGTLVTVSS

SEQ ID NO: 22209 - protein, 94 aa, Homo sapiens
AASGFTFSNYWMSWVRQAPGKGLEWVANIKKDESEKYYVDSVKGRFTISRDNAKNSLSLQMNSLRAEDTAVYYCAKGSGWYGYWGQGTLVTVSS

SEQ ID NO: 22210 - protein, 94 aa, Homo sapiens
AASGFTFSTSWMNWVRQAPGKGLEWVAKIKQDGSEKYYVDSVRGRFTISRDNAKNSLYLQMNSLRVEDTAVYYCAKGSGWYGYWGQGILVTVSS

SEQ ID NO: 22211 - protein, 93 aa, Homo sapiens
AASGFTFNNYYMGWVRQAPGKGLEWVANIKEDGSETLYVDSVRGRFIISRDNAKNSVYLQMNSLRGEDTAMYYCARGVRSEGWGQGTLVTVPS

SEQ ID NO: 22212 - protein, 93 aa, Homo sapiens
AASGFTFNKYFMGWVRQAPGKGLEWVANVKEDGSETLYVDSVKGRFIISRDNAKNSVYLQMNSLRGEDTAMYYCARGVRSEGWGQGTLVTVTS

SEQ ID NO: 22213 - protein, 93 aa, Homo sapiens
AASGFTFNNYFMGWVRQAPGKGLEWVANIKEDGSETLYVDSVKGRFIISRDNAKNSVYLQMNSLRGEDTAMYYCARGVRSEGWGQGTLVTVPS

SEQ ID NO: 22214 - protein, 93 aa, Homo sapiens
VASGFTFTSYFMGWVRQAPGKGLEWVANIKEDGSVKLYVDSVKGRFTISRDNANNSLFLQMNSLRAEDTAVYYCARGVRSEGWGQGTLVTVSS

SEQ ID NO: 22215 - protein, 93 aa, Homo sapiens
AASGFTFTSYFMGWVRQAPGKGLEWVANIKHDGSDKLYVDSVKGRFTISRDNAKNSLFLQMNSLRAEDTAVYYCARGVRSEGWGQGTLVTVSS

SEQ ID NO: 22216 - protein, 93 aa, Homo sapiens
AASGFTFNKYFMGWVRQAPGKGLEWVANIKEDGSETLYVGSVKGRFIISRDNAKNSVYLQMNSLRGEDTAIYYCARGVRSEGWGQGTLVTVPS

SEQ ID NO: 22217 - protein, 94 aa, Homo sapiens
AASGFTFSDYYMSWIRQAPGKGLEWVSYISSSGSTIYYADSVKGRFTISRDNAKNSLYLQMNSLRAEDTAVYYCARGGSSPDYWGQGTLVTVSS

SEQ ID NO: 22218 - protein, 102 aa, Homo sapiens
AASGFTFSDYYMSWVRQAPGKGLEWVSYIRSGDISYISSSDSTKHYADSVRGRFTISRDNAKNSLYLQLNSLRAEDTAVYYCARGGSSPDYWGQGTLVTVSS

SEQ ID NO: 22219 - protein, 96 aa, Homo sapiens
AASGFTFTNYWINWVRQAPGKGLEWVANINNDGGRKNHADSVKGRFTISRDNDKNSLYLQMNNLRAEDTAVYYCARNRGWEQLDYWGQGTLVTVSS

SEQ ID NO: 22220 - protein, 96 aa, Homo sapiens
AASGFTFTNYWMNWVRQAPGKGLEWVANIDIDGGTKNNAGSVAGRFTISRDNDKNSLYLQMSNLRAEDTAVYYCARNRGWEQLDYWGQGTLVTVSS

SEQ ID NO: 22221 - protein, 96 aa, Homo sapiens
AASGFTFTNYWINWVRQAPGKGLEWVANINEVGGTKNYGDSVKGRFSISRDNDKNSLYLQMNNLRAEDTAVYYCARNRGWEQLDYWGQGTLVTVSS

SEQ ID NO: 22222 - protein, 96 aa, Homo sapiens
AASGFSFTNYWMNWVRQAPGKGLDWVANIDTDGVTKNYADSVKGRFTISRDNDKNSLYLHMNNLRAEDTAVYYCARNRGWEQLDYWGQGALVTVSS

SEQ ID NO: 22223 - protein, 96 aa, Homo sapiens
AASGFTFSTYWMNWVRQAPGKGLEWVANIKEDGSDKHYVDSVKGRFIISRDNSKNSLYLQMNSLRVEDTAVYYCARNRGWEQLDYWGQGTLVTVSS

SEQ ID NO: 22224 - protein, 96 aa, Homo sapiens
AASGFTFNTYWMNWVRQAPGKGLEWVANIKEDGTDKHYVASVRGRFIISRDNSKNSLYLEMNSLRVEDTAVYYCARNRGWEQLDYWGQGTLVTVSS

SEQ ID NO: 22225 - protein, 96 aa, Homo sapiens
AASGFTFTNYWMNWVRQAPGKGLEWVANIKEDGSYGHYVDSVKGRFTISRDNAKNSLYLQMNSLRVEDTAVYYCARNRGWEQLDYWGQGILVTVSS

SEQ ID NO: 22226 - protein, 96 aa, Homo sapiens; identical to SEQ ID NO: 22223

SEQ ID NO: 22227 - protein, 96 aa, Homo sapiens
AASGFTFSSYAMTWVRQAPGKGLEWVSALGSRGSDTYYPESVKGRFTISRDNSKNTLFLQMNSLRGEDAALYYCAKGVVDRGLDYWGQGILVTVSS

SEQ ID NO: 22228 - protein, 96 aa, Homo sapiens
AASGFTFSNYAMTWVRQAPGKGLEWVSGIGPSGADTYYADSVKGRFTISRDSSKSALFLQMNSLRAEDTAVYFCAKGVVDRGLDYWGQGTLVTVSS

SEQ ID NO: 22229 - protein, 95 aa, Homo sapiens
AASGFTFSSYEMNWVRQAPGKGLEWVSYISSSGNLIYYADSVKGRFTISRDNAKNLLYLQMNSLRAEDTALYYCAREAPDAFDLWGQGTMVTVSS

SEQ ID NO: 22230 - protein, 95 aa, Homo sapiens
AASGFTFSSDEMNWVRQAPGKGLEWVAYISGIGSTIYYADSVKGRFTISRDNAKKSLYLQINSLRVEDTAVYYCAREAPDAFDLWGQGTMVTVSS

SEQ ID NO: 22231 - protein, 95 aa, Homo sapiens
AASGFTFSSDEMNWVRQAPGKGLEWVAYISGIGNTIYYADSVKGRFTISRDNAKKSLYLQINSLRVEDTAIYYCAREAPDAFDLWGQGTMVTVSS

SEQ ID NO: 22232 - protein, 93 aa, Homo sapiens
SGFSFRDDWMHWVRQAPGKGLEWVSHIQGDGSRTSYADSVKGRFTISRDNAKNTVYLQMNSLSAEDTAVYYCGRDRGYQIDYWGQGTLVSVSS

SEQ ID NO: 22233 - protein, 95 aa, Homo sapiens
AASGFTFSRSWMHWVRQAPGKGLVWVSRIYSDGSGTTYADSVKGRFTISRDNAKNTLYLEMNGLRAEDTAVYYCGRDRGYQIDYWGQGTLVTVSS

SEQ ID NO: 22234 - protein, 98 aa, Homo sapiens
AASGFTFTTYAMSWVRQAPGKGLEWVSAISSSGGSTSYADSVKGRFTISRDNSKNTLYLQVNSLRAEDTAVYYCAKGYSSIWYYFDYWGQGILVTVSS

SEQ ID NO: 22235 - protein, 98 aa, Homo sapiens
AASGFTFSSYAMSWVRQAPGKGLEWVSGISTSGGSTYYAESVKGRFTISRDNSKNTLYLQMNSLRAEDTAVYYCAKGYSSIWYYFDYWGQGTLVTVSS

SEQ ID NO: 22236 - protein, 95 aa, Homo sapiens
AASGFTFTSYSMNWVRQAPGKGLEWVSWVSYSPTATYYADSVKGRFTVSRDNAKQSLSLQMNSLRDDDTAVYYCVRDYDYAFDYWGQGILVIVSS

SEQ ID NO: 22237 - protein, 95 aa, Homo sapiens
AASGFTFTRYSMNWVRQAPGKGLEWVSWVSYSPTATYYADSVKGRFTVSRDNAKQSLSLQMNSLRDDDTAVYYCVRDYDYAFDYWGQGILVIVSS

SEQ ID NO: 22238 - protein, 94 aa, Homo sapiens
AVSGLRVGDESMNWVRQAPGRGLEWVSNLHGSGRIYYADSVKGRFTISRDSATNLLFLQMNSLRAEDTAVYFCVRDYDYAFDYWGQGTLVTVSS

SEQ ID NO: 22239 - protein, 94 aa, Homo sapiens
AVSGLRVGDESMNWVRQAPGRGLEWVSNLHGSGRIYYADSVKGRFTISRDSATNLLFPQMNSLRAEDTAVYFCVRDYDYAFDYWGQGTLVTVSS

SEQ ID NO: 22240 - protein, 94 aa, Homo sapiens; identical to SEQ ID NO: 22238

SEQ ID NO: 22241 - protein, 101 aa, Homo sapiens
TQTLTLTCTFSGFSLNTPGVGVGWIRQPPGKALEWLALIYWDDDKRYSPSLKSRLTITKDTSKNQVVLTMTNMDPVDTATYYCGRGYFDYCGQGTLVTVSS

SEQ ID NO: 22242 - protein, 101 aa, Homo sapiens
TQTLTLTCTFSGFSLSTPGVGVGWIRQPPGKALEWLALIYWDDDKRYSPSLKSRLTITKDTSKNQVVLTMTNMDPVDTATYYCGRGYFDYCGQGTLVTVSS

SEQ ID NO: 22243 - protein, 101 aa, Homo sapiens
TQTLTLTCTFSGFSLSTTGVGVGWIRQPPGKALEWLALIYWDGDQRYSPSLASRLTITKDTSKNQVVLTMTNMDPVDTATYYCGRGYFDYCGQGILVTISS

SEQ ID NO: 22244 - protein, 101 aa, Homo sapiens
TQTLTLTCTFSGFSLRTTGVGVGWIRQPPGKALEWLALIYWDGDKRYSPSLESRLTITKDTSKNQVVLTMTNMDPVDTATYYCGRGYFDYCGQGILVTISS

SEQ ID NO: 22245 - protein, 101 aa, Homo sapiens
TQTLTLTCTFSGFSLRTTGVGVGWIRQPPGKALEWLALIYWDGEKRYRPSLESRLTITEDTSKNQVVLTMTNMDPVDTGTYYCGRGYFDYCGQGILVTISS

SEQ ID NO: 22246 - protein, 101 aa, Homo sapiens
TQTLTLTCSFSGFSLTTTGVGVGWVRQPPGKALEWLALIYWDGDKRYSPSLESRLTITKDTSKNQVVLTMTNMDPVDTATYYCGRGYFDYCGQGILVTISS

SEQ ID NO: 22247 - protein, 101 aa, Homo sapiens
TQTLTLTCTFSGFSLRTTGVGVGWIRQPPGKALEWLALIYWDGEKRYSPSLESRLTITEDTSKNQVVLIMTNMDPVDTATYYCGRGYFDYCGQGILVTISS

SEQ ID NO: 22248 - protein, 101 aa, Homo sapiens; identical to SEQ ID NO: 22243

SEQ ID NO: 22249 - protein, 101 aa, Homo sapiens
TQTLTLTCTFSGFSLTTTGVGVGWVRQPPGKALEWLALIYWDGDKRYSPSLESRLTITKDTSKNQVVLTMTNMDPVDTATYYCGRGYFDYCGQGILVTISS

SEQ ID NO: 22250 - protein, 101 aa, Homo sapiens
TQTLTLTCTFSGFSLRTTGVGVGWIRQPPGKALEWLALIYWDGEKRYSPSLESRLTITEDTSKNQVVLTMTNMDPVDTATYYCGRGYFDYCGQGILVTISS

SEQ ID NO: 22251 - protein, 100 aa, Homo sapiens
TQTLTLTCTFSGFSLRTTGVGVGWIRQPPGKALEWLALIYWDDDKRYSPSLESRLTITKDTSKNQVVLTMTNMDPVDTATYYCGRGYFDYCGQGILVTIS

SEQ ID NO: 22252 - protein, 101 aa, Homo sapiens
TQTLTLTCTFSGFSLTTSGVGVGWIRQPPGKALEWLALIYWDDDKSYSPSLESRLTITKDTSKNQVVLIMTNMDPVDTATYYCGRGYFDYWGQGILVTVSS

SEQ ID NO: 22253 - protein, 101 aa, Homo sapiens; identical to SEQ ID NO: 22244

SEQ ID NO: 22254 - protein, 101 aa, Homo sapiens
TQTLTLTCTFSGFSLTTTGVGVGWVRQPPGKALEWLALIYWDGDKRYSPSLESRLTITKDTSKNQVVLTMTNVDPVDTATYYCGRGYFDYCGQGILVTISS

SEQ ID NO: 22255 - protein, 101 aa, Homo sapiens; identical to SEQ ID NO: 22250

SEQ ID NO: 22256 - protein, 101 aa, Homo sapiens; identical to SEQ ID NO: 22252

SEQ ID NO: 22257 - protein, 101 aa, Homo sapiens
TQTLTLTCTFSGFSLSTTGVGVGWIRQPPGKALEWLALIYWDDDKTYSPSLKSRLTITKDTSKNQVVLTMTNMDPVDTATYYCGRGYFDYWGQGILVTVSS

SEQ ID NO: 22258 - protein, 97 aa, Homo sapiens
ISGDSVSSNSAAWSWIRQSPSRGLEWLGRTYYRSKWYNDYAVSVKSRITINPDTSKNQFSLQLNSVTPEDTAVYYCARGSYDSSWCWGQGTLVTVSS

SEQ ID NO: 22259 - protein, 97 aa, Homo sapiens
ISGDFVSSNSAAWHWIRQSPSRGLEWLGRTYYRSQWFYDYALSVKSRITINPDTSKNQFSLQLNSVTPEDTAVYYCARGSYDSSWCWGQGTLVTVSS

SEQ ID NO: 22260 - protein, 96 aa, Homo sapiens
AASGFRFNDHAMHWVRQAPGKGLEWVSGINWKTGWIDYADSVKGRFTISRDNAKNSLYLHMDSLRAEDTALYYCTRDILPGGVDVWGQGTTVTVSS

SEQ ID NO: 22261 - protein, 96 aa, Homo sapiens
AASGFTSGDHAMHWVRQVPGKGLEWVSGFYLKTGRVGYADSVKGRFSISRDNAKNSLYLQMNSLRAEDTALYYCTRDILPGGVDVWGQGTTVTVSS

SEQ ID NO: 22262 - protein, 93 aa, Homo sapiens
AASGFTLSTHNMNWVRQAPGKGLDLVSYINSDSSTMSYAGSVQGRFTISRDNAKNSLYLQMNSLRDEDTAVYYCARGNNLDYWGQGTLVTVSS

SEQ ID NO: 22263 - protein, 93 aa, Homo sapiens
VGSGFSFSATNMNWVRLAPGKGLELVSYINAGSTTISYADSVKGRFTTSRDNAKSSLYLEMNSLREEDTAFYYCARGNNLDYWGQGTLVTVSS

SEQ ID NO: 22264 - protein, 102 aa, Homo sapiens
ASAHTFSTYYMHWVRQAPGQGLDWMGIINPSGDSTMYAQKFQGRVTMTRDTSTSTVYMELSSLRSEDTAVYYCARDGPGYCSGGSCYYFDYWGQGTLVTVSS

SEQ ID NO: 22265 - protein, 102 aa, Homo sapiens
ASGYTFTNHYMHWVRQAPGQGLEWMGIIDPSGGSTNYAQKFQGRVTMTRDTSTSTVYMELSSLRSEDTAVYYCARDGPGYCSGGSCYYFDYWGQGTLVTVSS

SEQ ID NO: 22266 - protein, 102 aa, Homo sapiens; identical to SEQ ID NO: 22265

SEQ ID NO: 22267 - protein, 97 aa, Homo sapiens
IVSGGSISNYYWSWIRQPPGKGLEWIGYIYYSGSTNYNPSLKSRVTISVDTSKNQFSLKLSSVTAADTAIYYCARHFTPGGNWFDPWGQGTLVTVSS

SEQ ID NO: 22268 - protein, 97 aa, Homo sapiens
TVSGGSIGGYYWSWIRQPPGKGLEWIGFVYYSGSTKYNPSLTSRVTISVDTSKNQFSLKLSSVTAADTAVYYCARHFTPGGNWFDPWGQGTLVTVSS

SEQ ID NO: 22269 - protein, 94 aa, Homo sapiens
AASGFTFRRYWMSWVRQAPGKGLEWVANIKEDGSDKYYVDSVKGRFTISRDNAKISLYLQMNSLRAEDTAVYYCVRLAEYFQHWGQGTLVTVSS

SEQ ID NO: 22270 - protein, 94 aa, Homo sapiens
AASGFIFRSYWMSWVRQAPGKGLEWVANIKYDGSEKYYVDSVKGRFTISRDNAKNSLFLQMNSLRAEDTAVYYCVRLAEYFQHWGQGTLVTVSS

SEQ ID NO: 22271 - protein, 92 aa, Homo sapiens
AASGFTFDDYAMHWVRQAPGKGLEWVSGISWNSGSIGYADSVKGRFTISRDNAKNSLYLQMNSLRAEDTALYYCARDGGDYWGQGTLVTVSS

SEQ ID NO: 22272 - protein, 92 aa, Homo sapiens; identical to SEQ ID NO: 22271

SEQ ID NO: 22273 - protein, 97 aa, Homo sapiens
AGSGFTFSGSAIHWVRQASGKGLEWVGRIRSKANNYATSYSASVEGRFSISRDDSKNTAYLQMNSLKTDDTAVYYCSRPYYDNTGYWGQGTLVTVSS

SEQ ID NO: 22274 - protein, 97 aa, Homo sapiens
AGSGFTFSDSAIHWVRQASGKGLEWVGRVRSKANSYATDYAASVEGRFTISRDESKNTAYLQMNNLRPEDTAVYYCSRPYYDNTGYWGQGTLVTVSS

SEQ ID NO: 22275 - protein, 97 aa, Homo sapiens
AGSGFTFSDSAIHWVRQASGKGLEWVGRIRSRPNGYATDYAASVKGRFTISRDDSKNTAYLQMNSLKTEDTAVYYCSRPYYDNTGYWGQGTLVTVSS

SEQ ID NO: 22276 - protein, 95 aa, Homo sapiens
AASGFTFNDYYMTWIRQAPGKGLVWVSYISGDHSVIYYGESVKGRFTISRDNAKNSVYLQMNSLRADDTAVYYCVRGGALGFDFWGQGSLVTVSS

SEQ ID NO: 22277 - protein, 95 aa, Homo sapiens
AASGFTFTDYYMTWIRQPPGKGLVWVSYISGDRSVIHYGDSVKGRFTISRDNARNSVYLQMNSLRADDTAVYYCVRGGALGFDFWGQGTLVTVSS

SEQ ID NO: 22278 - protein, 95 aa, Homo sapiens; identical to SEQ ID NO: 22276

SEQ ID NO: 22279 - protein, 95 aa, Homo sapiens
AASGFTFTDYYMTWIRQAPGKGLEWVSYSSPSRDIIHYVDSVKGRFTISRDNAKNSLYLQMNSLRAEDTAVYYCVRGGALGFDFWGQGTLVTVSS

SEQ ID NO: 22280 - protein, 106 aa, Homo sapiens
TQTLTLTCTISGFSLSTSGVGVAWIRQPPGKALEWLALIYWDDDKRYSPSLKSRLTITKDTSKTQVILTMTNMDPVDTATYYCAHRLGRAIDFDYWGQGILVTVSS

SEQ ID NO: 22281 - protein, 106 aa, Homo sapiens
TQTLTLTCTVSGFSLSTSGVGVAWIRQPPGKALEWLALIYWDDDKRYSPSLRSRLTITKDTSKNQVVLSMTNMDPVDTATYYCAHRLGRAIDFDYWGQGTLVTVSS

SEQ ID NO: 22282 - protein, 92 aa, Homo sapiens
AFGYTFTSYAIHWVRQAPGQRLEWMGWINAGNGNTKYSQKFQGRVTITRDTSASTAYMELSSLRSEDTAMYYCARNWNVDYWGQGTLVTVSS

SEQ ID NO: 22283 - protein, 92 aa, Homo sapiens
ASGYTFTSLTIQWVRQVPGQSLEWMGSIHAGSGDTKYSQKFQDRVTITRDTSANTAYMEMSGLRSEDTAVYYCARNWNVDYWGQGTLVTVSS

SEQ ID NO: 22284 - protein, 98 aa, Homo sapiens
TVSGGSINSYYWSWIRQTPGKRLEWIGSIYYTGSTNYNPSLKSRVTISVDTSKNQFSLKLSSVTAADTAVYYCTRDGGSDGDYEFDYWGQGTLVTVSS

SEQ ID NO: 22285 - protein, 98 aa, Homo sapiens
IVSGGSISGYYWSWIRQPPGKGLEWIGSIYYSGNTNYNPSLKSRVTISVDTSKNQFSLKVTSMTAADTAVYYCTRDGGSDGDYEFDYWGQGTLVTVSS

SEQ ID NO: 22286 - protein, 97 aa, Homo sapiens
VSGGSISGYYWSWIRQPPGKGLEWIGSIYYRGNTNYNPSLKSRVTISVDTSKNQFSLKVTSVTTADTAVYYCTRDGGSDGDYEFDYWGQGTLVTVSS

SEQ ID NO: 22287 - protein, 98 aa, Homo sapiens
IVSGGSISSYYWSWIRQPPGKGLEWIGSIYYNGNTNYNPSLKSRVTISVDTSKNQFSLKVSSVTAADTAVYYCTRDGGSDGDYEFDYWGQGTLVTVSS

SEQ ID NO: 22288 - protein, 97 aa, Homo sapiens
IVSAGSISGYYWSWIRQPPGKGLEWIGSIHYSGNTNYNPSLKSRVTISVDTSKNQFSLKVSSMTAADTAVYYCTRDGGSDGDYEFDYWGQGTLVTVS

SEQ ID NO: 22289 - protein, 98 aa, Homo sapiens
IVSGGSISGYYWSWIRQPPGKGLEWIGSISYYGNTNYNPSLKSRVTISVDTSKNQFSLQVSSVTAADTAVYYCTRDGGSDGDYEFDYWGQGTLVTVSS

SEQ ID NO: 22290 - protein, 97 aa, Homo sapiens
VSSGSIYGYYWSWIRQSPGRGLEWIGSIYYAGNTNYNPSLKSRVSISVDTSKNQFSLKVSSVTAADTAVYYCTRDGGSDGDYEFDYWGQGMLVTVSS

SEQ ID NO: 22291 - protein, 97 aa, Homo sapiens
IVSGGSISGYYWSWIRQPPGKGLEWIGSIYYSGNTNYNPSLKSRVTISVDTSKNQFSLKVSSMTAADTAVYYCTRDGGSDGDYEFDYWGQGTLVTVS

SEQ ID NO: 22292 - protein, 98 aa, Homo sapiens; identical to SEQ ID NO: 22285

SEQ ID NO: 22293 - protein, 97 aa, Homo sapiens
VSGGSISSYYWSWIRQPPGKGLEWIGSIYYNGNTNYNPSLKSRVTISVDTSKNQFSLKVSSATAADTAVYYCTRDGGSDGDYEFDYWGQGTLVTVSS

SEQ ID NO: 22294 - protein, 94 aa, Homo sapiens
AASGITVSSNYMSWVRQAPGKGLEWVSFIYIAGNTNYADSVKGRFTISRDNSKNTLYLQMNSLRAEDTAVYYCARWTGTYYDYWGQGTLVTVSS

SEQ ID NO: 22295 - protein, 93 aa, Homo sapiens
AVSGFTVSNNYMSWVRQAPGKGLEWVSMLYSDGDTYYADSVKGRFTISRHNSINILYLQMNSLRADDTAVYYCARWTGTYYDYWGHGNLVTVS

SEQ ID NO: 22296 - protein, 94 aa, Homo sapiens
AVSGFAVNNNYMSWVRQAPGKGLEWVSMIYSGGDTYYADSVKGRFTISRHSSINILYLQMNSLRADDTAVYYCARWTGTYYDYWGHGSLVTVSS

SEQ ID NO: 22297 - protein, 94 aa, Homo sapiens
AVSGFTVSNNYMSWVRQAPGKGLEWVSMIYADGNTYYADSVKGRFTISRHNSFNILYLQMNSLRADDTAVYYCARWTGTYYDYWGHGNLVTVSS

SEQ ID NO: 22298 - protein, 94 aa, Homo sapiens
AASGFAVSNNYMSWVRQAPGKGLQWVSMLYNTGDTYYADSVKGRFTISRDNSRNTLYLQMNSLRAEDTALYYCARWTGTYYDYWGQGTLVIVSS

SEQ ID NO: 22299 - protein, 90 aa, Homo sapiens
AASGFTFSNYEMNWVRQAPGKGLEWLSYIASTGSPIYYADSVKGRFTISRDNAKNSLYLQMNSLRAEDTAVYYCARLDSWGQGTLVTVSS

SEQ ID NO: 22300 - protein, 89 aa, Homo sapiens
AASGFTFSSFDMNWFRQAPGKGLEWISHINSGGSTIYYADSVKGRFTISRDNAKNSLYLQMNSLRAEDTAFYYCARLDSWGQATLVTVS

SEQ ID NO: 22301 - protein, 99 aa, Homo sapiens
EASGFTFSIFWMHWVRQVPGKGLEWVSRISTDGSDIKYADSVRGRFTISRDNAKKTLFLHMDSLRAEDTAVYYCARDQTVRGPSTYDNWGQGTLVTVSS

SEQ ID NO: 22302 - protein, 99 aa, Homo sapiens
AASGFAFSRYWMHWVRQAPGKGPVWVSRIDTDGGIINYADSVKGRFTVSRDNTKNTLFLQMNSLRDEDTALYYCARDQTVRGPSTYDNWGQGTLVIVSS

SEQ ID NO: 22303 - protein, 97 aa, Homo sapiens
AASGFLTLNYAMSWVRQAPGKGLEWVAFSSGTGNDNYYADSVKGRFTISRDNRKNTLSLQLDSLRVEDTATYYCVRDGYNFVPFDYWGQGALVAVSS

SEQ ID NO: 22304 - protein, 96 aa, Homo sapiens
ASGFTLSAYAMSWVRQAPGKGLEWVAFITGTGNDAYYMDSVKGRFTVSRHNSLNTLYLQMNSLRAEDTALYYCVRDGYNFVPFDYWGRGTLVTVSS

SEQ ID NO: 22305 - protein, 97 aa, Homo sapiens
AASGFTLSAYAMSWVRQAPGKGLEWVSFISGTGNDAYYMDSVKGRFTISRDNSMNTLYLQMNSLRAEDTALYYCVRDGYNFVPFDYWGRGTLVTVSS

SEQ ID NO: 22306 - protein, 98 aa, Homo sapiens
ASGYTFTTYAMHWVRQAPGQRLEWMGWINAGNGNTKYSQKFQGRVTITRDTSASTAYMELSSLRSEDTAVYYCARDLWRDYYYGMDVWGQGTTVTVSS

SEQ ID NO: 22307 - protein, 98 aa, Homo sapiens
ASGYTFTTYAMHWVRQAPGQRLEWMGWINAGNGNTKYSQKFQGRVTITRDTSASTAYMDLSSLRSEDTAVYYCARDLWRDYYYGMDVWGQGTTVTVSS

SEQ ID NO: 22308 - protein, 97 aa, Homo sapiens
AASGFTFSSYGMHWVRQAPGKGLEWVAIIWYDGSNKYYADSVKGRFTISRDNSKNTLYLQMNSLRAEDTAVYYCARVGSGSYYFDYWGQGTLVTVSS

SEQ ID NO: 22309 - protein, 97 aa, Homo sapiens
AASGFTFSDHDMHWVRLAPGKGLECVAVIWFDGSNEYFADSVKGRFTISRDNSKNTLYLQMNSLRAEDTAVYYCARVGSGSYYFDYWGQGTLVSVSS

SEQ ID NO: 22310 - protein, 93 aa, Homo sapiens
AASGFSFRSYGMNWVRQAPGKGLEWVSTIDPGGIKTYYADSVKGRFTISRDNSKTTLYLQINSLRAEDTALYYCVRSNFMDVWGQGTTVTVSS

SEQ ID NO: 22311 - protein, 93 aa, Homo sapiens
AASGFTFDSLAMNWVRQAPGKGLEWVSLISRDNSVSYYADSVRGRFTISRDNSENMVYLQMDSLRAEDTAVYFCVRSNFMDVWGQGTTVTVSS

SEQ ID NO: 22312 - protein, 96 aa, Homo sapiens
AVSGFSFSSYWMTWVRQAPGKGLEWVANIKEDGSAKYYVDSVKGRFDISRDNAKNSLYLQMNSLRVEDTAVYYCATTADAAAGPYWGQGTLVTVSS

SEQ ID NO: 22313 - protein, 96 aa, Homo sapiens
VVPEFIFTKYWMTWVRQAPGKGLEWVANINEDGSVKYYVDSVKGRFTISRDNAKNSLFLHMNSLRAEDTAVYYCATTADAAAGPYWGQGTLVTVSS

SEQ ID NO: 22314 - protein, 91 aa, Homo sapiens
SGFTFNTRWLTWVRQAPGKGLEWVASINQNGREKYYVDSAKGRFTVSRDNAKNSAYLQMTSLRAEDTSVYYCAIGRGMDVWGQGTTVTVSS

SEQ ID NO: 22315 - protein, 93 aa, Homo sapiens
AASGFTFSSRWMTWVRQAPGKGLEWVANIKKDGSDKYYVDAVKGRFTISRDNAKNSLYLQMNSLRDDDTAVYYCAIGRGMDVWGQGTTVTVSS

SEQ ID NO: 22316 - protein, 93 aa, Homo sapiens
AASGFAFSGRWMTWVRQAPGEGLEWVANINEDGREIYYLDPVKGRFTISRDNAKNSLYLQMNSLRVEDTAVYYCAIGRGMDVWGKGTTVTVSS

SEQ ID NO: 22317 - protein, 96 aa, Homo sapiens
AASGFTFVNYWMHWVRQAPGEGLVWVSRINNHGTETIYASSVEGRFATSRDNAKNTLYLQISGLRGEDTALYYCARGGFEHAFDVWGPGTLVTVSS

SEQ ID NO: 22318 - protein, 96 aa, Homo sapiens
AASGFTFRSYWMHWVRQAPGKGLVWVSRIDNDGYSTIYAESVKGRFTISRDNAKNTLHLQMNSLRAEDTAVYYCARGGFEHAFDVWGQGTEVTVSS

SEQ ID NO: 22319 - protein, 95 aa, Homo sapiens
AASGFTFRTYAMSWVRQAPGKGLEWVSGISGGGGSTYYADSVKGRFTISRDNSKYTLYLQMNSLRAEDTAVYYCAKDLTVTPDYWGQGTLVTVSS

SEQ ID NO: 22320 - protein, 95 aa, Homo sapiens
AASGFTLSRYAMSWVRQTPGKGLEWVSLIYSDGHSTFYADSVKGRFTISRDTSKNTLYLQMNSLRAEDTAVYYCAKDLTVTPDYWGQGTLVTVSS

SEQ ID NO: 22321 - protein, 96 aa, Homo sapiens
AASGFTFSSYAMNWVRQAPGKGLEWVSTFSVSTDSTYYADSVKGRFTISRDISKNTVFLQMNSLRAEDTALYYCAKAGSGIFFDHWGRGTLVTVSS

SEQ ID NO: 22322 - protein, 96 aa, Homo sapiens
AASGFTFSNYVMTWVRQAPGKGLEWVSATSNNGGNIYYADSVKGRFTISRDNSKNMLYLQLNSLRGEDTAVYYCAKAGSGIFFDHWGQGTLVTVSS

SEQ ID NO: 22323 - protein, 91 aa, Homo sapiens
AASRFTFSSYWMHWVRQAPGKGLVWVSHINTDGSSTTYADSVKGRFTISRDNAKNTLYLQMNSLRAEDTAVYYCVRDVIRWGQGTMVTVSS

SEQ ID NO: 22324 - protein, 91 aa, Homo sapiens
AASGFTFSGFWMYWVRQTPGKGLVWVSHINTNGRTTSYADSVKGRFTISRDNAKNTLYLQMNSLRAEDTAMYYCVRDVIRRGQGTMVTVSS

SEQ ID NO: 22325 - protein, 105 aa, Homo sapiens
AASGFTFDNAWMSWVRQAPGKGLEWIGRIKSKTDGGTTDFAAPVKGRFTISRDDSKNALYLQMNNLKTEDTAVYYCTTDRYYDYIWGSYRYVDYWGQGTLVTVSS

SEQ ID NO: 22326 - protein, 105 aa, Homo sapiens
AASEFTFTNAWMTWVRQAPGKGLEWVGRIKSETDGGTIDYVAPVKGRFTISRDDSKNTLYLQMNSLKTEDTAVYYCTTDRYYDYIWGSYRYVDYWGQGTLVTVSS

SEQ ID NO: 22327 - protein, 105 aa, Homo sapiens
AASEFTFTNAWMTWVRQAPGKGLEWVGRIKSKTDGGTIDYVAPVKGRFTISRDDSKNTLYLQMNSLKTEDTAVYYCTTDRYYDYIWGSYRYVDYWGQGTLVTVSS

SEQ ID NO: 22328 - protein, 105 aa, Homo sapiens
AASGFTFSNAWMSWVRQTPGKGLEWVGRIKTKTDGGTTDYAAPVKGRFTISRDDSKNTLYLQMNSLKTEDTAVYYCTTDRYYDYIWGSYRYVDYWGQGTLVTVSS

SEQ ID NO: 22329 - protein, 105 aa, Homo sapiens
AASGFTFSNAWMTWVRQTPGKGLEWVGRIKSKTDGGTTDYAAPVKGRFTISRDDSKNTLYLQMNSLKTEDTAVYYCTTDRYYDYIWGSYRYVDYWGQGTLVTVSS

SEQ ID NO: 22330 - protein, 95 aa, Homo sapiens
AASGFTFSYYGMYWVRQAPGKGLVWVSRIYNDGITTTYTDSVKGRFTISRDNAKNTLYLQMNSLRAEDTAVYFCARGGTYSFDFWGQGTLVTVSS

SEQ ID NO: 22331 - protein, 94 aa, Homo sapiens
AASGFTFSSYGMYWVRQAPGKGLVWVARIWSDVTTNYAESVRGRFTISRDNAKNTLFLQMNSLRGEDTAVYYCARGGTYSFDFWGQGTQVTVSS

SEQ ID NO: 22332 - protein, 94 aa, Homo sapiens; identical to SEQ ID NO: 22331

SEQ ID NO: 22333 - protein, 95 aa, Homo sapiens
AASGFTFSYYGMYWVRQAPGKGLVWVSRIYNDGITTTYADSVKGRFTISRDNAKNTLYLQMNSLRAEDTAVYFCARGGTYSFDFWGQGTLVTVSS

SEQ ID NO: 22334 - protein, 92 aa, Homo sapiens
AASGFTFSVYSMNWVRQGPGKGLEWLSYISSDSTTIYYADSVKGRFTTSRDNAKTSLYLQMNSLRDDDSAVYYCARGAFDFWGQGTMVSVSS

SEQ ID NO: 22335 - protein, 91 aa, Homo sapiens
ASGFNFSAFAMNWVRQAPGKGLEWVSYISSRSSTISFADSVKGRFSLSRDNAKESMYLEMNSLSAEDTAVYYCARGAFDFWGQGTVVTVSS

SEQ ID NO: 22336 - protein, 94 aa, Homo sapiens
TVSGFSLSLGFWNWVRQPPGKGLEWIGYVHYSGTTNYNPSLRSRVTILGDSSKNQFSLKLTSVTAADTAVYFCVIGIGWQPDYWGPGTLVTVSS

SEQ ID NO: 22337 - protein, 94 aa, Homo sapiens
SVTGDSINSYYLNWVRQPPGKGLEWIGYVHYSRNTKYNPSLKSRVTISLDTSKSLFSLELSSVTAADTAVYYCVIGIGWQPDYWGQGTLVTVSS

SEQ ID NO: 22338 - protein, 94 aa, Homo sapiens
SVTGDSINSYYLNWVRQPPGKGLEWIGYAHYSRNTKYNPSLNSRVTISLDTSKSLFSLELRSVTAADTAVYYCVIGIGWQPDYWGQGTLVTVSS

SEQ ID NO: 22339 - protein, 97 aa, Homo sapiens
SVSSGSFNSYYWSWIRQSPGKGLEWIAYIYYSGDTNYNPSLQSRATISVDTSKNQFSLKLTSVTAADTAVYFCARRRAAVGTAFDYWGLGTLVTVSS

SEQ ID NO: 22340 - protein, 97 aa, Homo sapiens; identical to SEQ ID NO: 22339

SEQ ID NO: 22341 - protein, 97 aa, Homo sapiens
SVSGGSISSYYWSWIRQPPGKGLEWLGYIFYSGSTNYNPSLRSRVTISIDTSKNQFSLKLSSVTAVDTAVYYCARRRAAVGTAFDYWGQGTLVTVSS

SEQ ID NO: 22342 - protein, 98 aa, Homo sapiens
AASGFTFSSYWMNWVRQAPGKGLEWVANIKQDGSEKYYVGSVKGRFTISRDNAKNSLYLQMNSLRAEDTAVYYCVRYIVIDPSAIGYWGQGALVTVSS

SEQ ID NO: 22343 - protein, 98 aa, Homo sapiens
AASGFTFSSYWMNWVRQAPGKGLEWVANIKQDGSEKYYVDSVKGRFTISRDNAKNSLYLHMNSLRAEDTAVYYCVRYIVIDPSAIGYWGQGTLVTVSS

SEQ ID NO: 22344 - protein, 107 aa, Homo sapiens
TQTLTLTCTFSGFSLSTSGMCVNWIRQPPGKALKWLARIDWDDDKYYSTSLKTRLTISKDASKNQVVLTMTNMDPVDTGTYYCARIGQVGATHFDYWGQGTLVTVSS

SEQ ID NO: 22345 - protein, 107 aa, Homo sapiens
TQTLTLTCTFSGFSLYTSEVYMNWIRQPPGKALEWLARIDYNNNKYYSTSLRTRLTVSKDMSKNQVVLTMTNMDPVDTATYYCARIGQVGATHFDYWGQGILVTVSS

SEQ ID NO: 22346 - protein, 99 aa, Homo sapiens
AASGFTFSNYGMHWVRQAPGKGLEWVAVISYDGNNKYDGDSVKGRFSISRDNSKNTLYLQMNSLRAEDTAVYYCAKPYGDYARGGFDIWGQGTMVTVSS

SEQ ID NO: 22347 - protein, 100 aa, Homo sapiens
AASGFTFSTYGMHWVRQAPGKGLEWVAVISYGDGSHTYYGDSVKGRSTISRDNSKNTLYLQMNSLRAEDTAVYYCAKPYGDYARGGFDIWGQGTMVTVSS

SEQ ID NO: 22348 - protein, 90 aa, Homo sapiens
AASGFTFSGYWMSWVRQAPGKGLEWVANIKGDGSEKNYVDSVKGRFTISRDNAKDSLFLRMNSLRAEDTAVYYCASRVVRGQGTLVTVSS

SEQ ID NO: 22349 - protein, 88 aa, Homo sapiens
SGFTISAIWMSWVRQAPGKGLEWVANTNQDGSDRHYVDSVRGRFTISRDNAKRSLFLQMNSLRVEDTAVYYCASRVVWGQGMLVTVSS

SEQ ID NO: 22350 - protein, 98 aa, Homo sapiens
AASGFTFSSYGMHWVRQAPGKGLEWVTVIWYDGSNKYYADSVKGRFTISRDNSKNTLYLQMNSLRAEDTAVYYCARAYSSSWPNFDYWGQGTLVTVSS

SEQ ID NO: 22351 - protein, 98 aa, Homo sapiens
AASGFTFSSYGMHWVRQAPGKGLEWVAVIWYDGSNKYYADSVKGRFTISRDNSKNTLYLQVNSLRAEDTAVFYCARAYSSSWPNFDYWGQGTLVTVSS

SEQ ID NO: 22352 - protein, 106 aa, Homo sapiens
AASGFTFSSYAMSWVRQAPGKGLEWVSAFSGRGSGTYYAESVKGRFTISRDNSKNTLHMQMNSLRAEDTAVYYCAKTYSYDSSGYYDYYYYGMDVWGQGTTVTVSS

SEQ ID NO: 22353 - protein, 106 aa, Homo sapiens
AASGFTFSNYAMSWVRQAPGKGLEWVSGFSGRGVSTYSADSVKGRFTISRDNSKNMLYLQMNSLRAEDTAVYYCAKTYSYDSSGYYDYYYYGMDVWGQGTTVTVSS

SEQ ID NO: 22354 - protein, 106 aa, Homo sapiens
AASGFTFRNYAMSWVRQAPGKGLEWVSAFSGRGSGTYYADSVKGRFTISRDNSKNTLHLQMNSLRAEDTAVYYCAKTYSYDSSGYYDYYYYGMDVWGQGTTVTVSS

SEQ ID NO: 22355 - protein, 106 aa, Homo sapiens
AASGFTFRNYAMSWVRQAPGKGLEWVSAFSGRGTGTYYADSVKGRFTISRDNSKNTLHLQMNSLRDDDTAVYYCAKTYSYDSSGYYDYYYYGMDVWGQGTTVTVSS

SEQ ID NO: 22356 - protein, 95 aa, Homo sapiens
ASGFDFNSYFMTWVRQAPGKGLEWVASIKPDESEIYYVDYLRGRFTISRDNAKNSLYLQMNSLRVDDTALYYCARLNGWGWFGPWGQGSLVTVSS

SEQ ID NO: 22357 - protein, 96 aa, Homo sapiens
AASGFTFTNYWMGWVRQAPGKGLEWVANIREDGSGVFYVESVKGRFTISRDNAQNSLYLQMNSLRADDTAMYYCARLNGWGWFGPWGQGTLVSVSS

SEQ ID NO: 22358 - protein, 96 aa, Homo sapiens
AASGFTFSDYYMSWIRQAPGKGLEWFSYISTGGITIHYADSVKGRFTISRDNAKNSLYLQMNSLRAEDTAVYYCARVRGSYSIDYWGQGTLVTVSS

SEQ ID NO: 22359 - protein, 97 aa, Homo sapiens
AASGFTFSDYYMSWIRQAPGKGLECISYISSGGGSTRYYADSVKGRFTISRDNAKTSLYLQMNSLRAEDTALYYCARVRGSYSIDYWGQGTLVTVSS

SEQ ID NO: 22360 - protein, 97 aa, Homo sapiens
AASGFTFSDYYMSWIRQAPGKGLECISYISSGGGSTRYYADSVKGRFTISRDNAKTSLYLQMNSLRAEDTAVYYCARVRGSYSIDYWGQGTLVTVSS

SEQ ID NO: 22361 - protein, 97 aa, Homo sapiens
AASGFTFSGYYMTWIRQAPGKGLECISYISNGGGSTKYYAESMKGRFTISRDNAKTSLYLQVNSLRADDTAVYYCARVRGSYSIDYWGQGTLVTVSS

SEQ ID NO: 22362 - protein, 97 aa, Homo sapiens
EASGFTFSDYYMTWIRQAPGKGLECISYISSRGGSTRYYADSGKGRFSISRDNAKTSLYLQMDSLRADDTAVYYCARVRGSYSIDYWGQGTLVTVSS

SEQ ID NO: 22363 - protein, 97 aa, Homo sapiens
AASGFTFSDYYMTWIRQAPGKGLECISYISSGGGTTRYYADSVKGRFTISRDNAKTSLYLQMNSLRADDTAVYYCARVRGSYSIDYWGQGTLVTVSS

SEQ ID NO: 22364 - protein, 97 aa, Homo sapiens
AASGFTFSDYYMSWIRQAPGKGLECISYISSGGGSTKYYADSVKGRFTISRDNAKTSLYLQMNSLRAEDTAVYYCARVRGSYSIDYWGQGTLVTVSS

SEQ ID NO: 22365 - protein, 97 aa, Homo sapiens
AASGFTFSGYYMTWIRQAPGKGLECISYISSGGGSTRYYAESMKGRFTISRDNAKTSLYLQVNSLRADDTAVYYCARVRGSYSIDYWGQGTLVTVSS

SEQ ID NO: 22366 - protein, 97 aa, Homo sapiens; identical to SEQ ID NO: 22360

SEQ ID NO: 22367 - protein, 97 aa, Homo sapiens
AASGFTFSDYYMSWIRQAPGKGLECISYINSGGGSTRYYADSVKGRFTISRDNAKTSLYLQMNSLRAEDTAVYYCARVRGSYSIDYWGQGTLVTVSS

SEQ ID NO: 22368 - protein, 97 aa, Homo sapiens
EASGFTFSDYYMTWIRQAPGKGLECISYISSRGGSTRYYADSGKGRFTISRDNAKTSLYLQMDSLRADDTAVYYCARVRGSYSIDYWGQGTLVTVSS

SEQ ID NO: 22369 - protein, 99 aa, Homo sapiens
AASGFTFSSYSMNWVRQAPGKGLEWVSYITSSSSTIYYADSVKGRFTISRDNAKNSLDLQMNSLRDEDTAVYYCASARGYSYGYYFDYWGQGTLVTVSS

SEQ ID NO: 22370 - protein, 99 aa, Homo sapiens
AASGFTFSSYSMNWVRQAPGKGLEWVSYITSSSSSIYYADSVKGRFTISRDNAKNSLYLQMSSLRDEDTAVYYCASARGYSYGYYFDYWGQGTLVTVSS

SEQ ID NO: 22371 - protein, 98 aa, Homo sapiens
AASGFSFGNFGMHWVRQAPGKGLEWVAVIRHEGTHKYYADSVKGRFTISRDNSRNTLYLQMNSLRGEDTALYYCVKDRLTEAYGMEVWGQGTTVTVSS

SEQ ID NO: 22372 - protein, 98 aa, Homo sapiens
AASGFIFRTYGMHWVRQAPGKGLEWVAVTSNDGSRKYYGDSVKGRFTISRDNSKNTLYLQMNSLRSEDTAVYYCVKDRLTEAYGMEVWGQGTTVTVSS

SEQ ID NO: 22373 - protein, 94 aa, Homo sapiens
AASGFTFSDYYMSWIRQAPGKGLESISYISGDSRDLNYADSVKGRFTISRDNAKNSLYLQIHSLRAEDTAVYYCSRDPRHLDFWGQGTLVTVSS

SEQ ID NO: 22374 - protein, 94 aa, Homo sapiens
AASGFTFSDYYMSWIRQAPGKGLESISYISGDSRDVNYADSVKGRFTISRDNAKNSLYLQIHSLRAEDTAVYYCSRDPRHLDFWGQGTLVTVSS

SEQ ID NO: 22375 - protein, 94 aa, Homo sapiens
AASGFTFTDYYMTWIRQAPGTGLEWISYISQNSRDTSYADSVRGRFTISRDNTMNSLYLQMDNLRADDTAVYYCSRDPRHLDFLGRGTLVTVSS

SEQ ID NO: 22376 - protein, 99 aa, Homo sapiens
ASGYTFTSYDINWVRQATGQGLEWMGWMNPNSDNTGYAQKFQGRVTMTRSTSISTAYMELSSLRSEDTAVYYCARVYCSGGSCYGMDVWGQGTTVTVSS

SEQ ID NO: 22377 - protein, 99 aa, Homo sapiens
ASGYTFTSYDINWVRQATGQGLEWMGWMNPNSDDTGYAQKFQGRVTMTRSTSISTAYMELSSLRSEDTAVYYCARVYCSGGSCYGMDVWGQGTTVTVSS

SEQ ID NO: 22378 - protein, 99 aa, Homo sapiens; identical to SEQ ID NO: 22377

SEQ ID NO: 22379 - protein, 94 aa, Homo sapiens
AASGFTFSSYEMNWVRQAPGKGLEWVSYISSSGSTIYHADSVKGRFTISRDNAKNSLYLQMNSLRAEDTAVYYCARERGGFDHWGQGTRVTVSS

SEQ ID NO: 22380 - protein, 94 aa, Homo sapiens
AASGFTFSSFEMTWVRQAPGKGLEWISYIGSSYSTIYYADSVKGRFTISRDNAKNSLYLQMNSLRVEDTAVYYCARERGGFDHWGQGTLVTVSS

SEQ ID NO: 22381 - protein, 100 aa, Homo sapiens
AASGFTFSRYWMGWVRQAPGKGLEWVASIKQDESETYNVDSVKGRFTISRDNAKNSIYLQMNSLRTEDTAVYYCARGPSYGSRTDYFDSWGQGTLVTVSS

SEQ ID NO: 22382 - protein, 100 aa, Homo sapiens
AASAFTFSNYWMAWVRQAPGKGLEWVANIKQGGSEKYYVDSVKGRFTISRDDAESSLFLQMNSLRVEDTAVYYCARGPSYGSRTDYFDSWGQGALVTVSS

SEQ ID NO: 22383 - protein, 103 aa, Homo sapiens
AASGFTFSSYAMSWVRQAPGKGLEWVSAITDSGDSTVYAASVKGRFTFSRDNSKNTLYLQMNSLRAEDTAVYHCAKGTLRYCSGGSCYPFDYWGQGTLVTVSS

SEQ ID NO: 22384 - protein, 103 aa, Homo sapiens
AASGFTFSSYAMSWVRQAPGKGLECVSVITNSGDSTLCTDPVKGRCTISRDNSKNILYLQMNSLRAEDTAVYYCAKGTLRYCSGGSCYPFDYWGQGTLVTVSS

SEQ ID NO: 22385 - protein, 99 aa, Homo sapiens
TVSGGSIGTYYWTWIRQPPGKGLEWIGYIDYSGSTDYNPSLKSRVTISLDTSKNQFSLKLSSVTAADTAVYYCARGRRYSGRHDALDIWGQGTMVTVSS

SEQ ID NO: 22386 - protein, 99 aa, Homo sapiens
TVSGGSISSYYWSWIRQPPGKGLEWIGYIYYSGSTNYNPSLKSRVTISVDTSKNQFSLKLSSVTAADTAVYFCARGRRYSGRHDALDIWGQGTMVTVSS

SEQ ID NO: 22387 - protein, 98 aa, Homo sapiens
AASGFTFSSYSMNWVRQAPGKGLEWVSSISSSSSYIYYADSVKGRFTISRDNAKNSLYLQMNSLRAEDTAVYYCARGDSSGWYGLDYWGQGTLVTVSS

SEQ ID NO: 22388 - protein, 98 aa, Homo sapiens
AASEFTFSSYRMNWVRQAPGKGLEWVSSISSSSSYIYYADSVKGRFTISRDNAKNSLYLQINSLRAEDTAVYYCARGDSSGWYGLDYWGQGTLVTVSS

SEQ ID NO: 22389 - protein, 94 aa, Homo sapiens
AGSGFRFDDHAMHWVRQPPGKGLEWVASISWNSGSSGYADSVKGRFTISRDNANNFLYLQMNSLRVEDTALYYCAKARFGLDYWGQGTLVTVSS

SEQ ID NO: 22390 - protein, 94 aa, Homo sapiens
AGSGFMFEDHVMHWVRQAPGKGLEWVASISWDSGSIGYADSVRGRFTISRDNAKNSLYLEMNSLTIDDTALYYCAKARFGLDYWGQGTLVTVSS

SEQ ID NO: 22391 - protein, 102 aa, Homo sapiens
AASGLTFTIYAMTWVRQAPGKGLEWVSTISASGGTIYYADSVKGRFTVSRDNSKNIMVLQMNSLRVDDTAVYYCAKGPLGYCSGGTCYLDYWGQGTLVTVSS

SEQ ID NO: 22392 - protein, 102 aa, Homo sapiens
AASGVTFSIYAMSWVRLAPGKGLQWVSAISASGGSTYYADSVKGRFTTSRDNSKNTLYLQMNSLRAEDTALYYCAKGPLGYCSGGTCYLDYWGQGTPVTVSS

SEQ ID NO: 22393 - protein, 99 aa, Homo sapiens
AASGFTISTAWMSWLRQAPGKGLEWVAYIRQDENEKQYVDSVKGRFTISRDNSKNSVYLQMNSLRAEDTAVYYCARGLKNTHYGGWAYWGQGTLVTVSS

SEQ ID NO: 22394 - protein, 99 aa, Homo sapiens; identical to SEQ ID NO: 22393

SEQ ID NO: 22395 - protein, 99 aa, Homo sapiens; identical to SEQ ID NO: 22393

SEQ ID NO: 22396 - protein, 99 aa, Homo sapiens; identical to SEQ ID NO: 22393

SEQ ID NO: 22397 - protein, 99 aa, Homo sapiens
EASGFTISWVWMSWLRLTPGKGLEWVAHIQQDENQKTYVDPVRGRFTISRNNAQNSLYLQMNRLRVEDTGVYFCARGLKNTHYGGWAYWGQGALVTVSS

SEQ ID NO: 22398 - protein, 95 aa, Homo sapiens
VSGDSINSPSYRWVWIRQSPGKGLEWIGYVYHTGASHYTSSLQSRVTMSVDTSKNQFSLNLASVSAADTAVYYCARHYGSASDYWGPGLLVTVSS

SEQ ID NO: 22399 - protein, 95 aa, Homo sapiens; identical to SEQ ID NO: 22398

SEQ ID NO: 22400 - protein, 95 aa, Homo sapiens
VSGDSINSPSYRWVWIRQSPGKGLEWIGYVYHTGASHYTSSLQSRVTMSVDTSKNQFSLNLASVSAADTAVYYCARHYGSASDYWGQGTLVTVSS

SEQ ID NO: 22401 - protein, 95 aa, Homo sapiens
VSGDSISSPTYRWVWIRQPPGKGLEWIGYIYHTGSSHYNSSLKSRVSMSVDTSKNQFSLNVTSVTAADTAVYYCARHYGSASDYWGQGLLVTVSS

SEQ ID NO: 22402 - protein, 96 aa, Homo sapiens
TVSGDSISSPAHRWGWMRQSPGKGLEWIGTISSGALTDYNPSLKSRVAISIDTSKSLFSLTLTSVTAADTAIYYCARHYGSASDYWGQGTLVTVSS

SEQ ID NO: 22403 - protein, 96 aa, Homo sapiens
TVSGDSIASPTHRWGWFRQPPGKGLEWVGTGTHVGVTHYNPSLKGRVSISVDTSENQFFLRLTSVTAADTAVYFCARHYGSASDYWGQGILVTVSS

SEQ ID NO: 22404 - protein, 97 aa, Homo sapiens
AASGFTFSDYWMHWVRHVPGKGLVWVSRINDDGSHSAYADSVKGRFTISRDNAKNTAFLQMIGLRVDDTAIYFCVRGTRDWSGIDYWGQGILVSVFS

SEQ ID NO: 22405 - protein, 97 aa, Homo sapiens
AASGFNLSSHWMHWVRQAPGKGLVCVARITDDGNYIDYADSVKGRFTISRDNAKNTLYLQMNSLRSEDTAKYYCVRGTRDWSGIDYWGQGAVVTVSS

SEQ ID NO: 22406 - protein, 97 aa, Homo sapiens
AVSGFTLSTHWMHWVRQAPGKGLVCVSRITDDGRYTDYADSVKGRFTISRDNAKNTLYLEMNNLRFEDSAVYYCVRGTRDWSGIDYWGQGTVVTVSS

SEQ ID NO: 22407 - protein, 92 aa, Homo sapiens
VATGFSFTSQAMSWVRQVPGRGLECISTIGGNGITYYVDSVKGRFTISRDISKNTLYLQMSSLRAEDTAIYYCARNAGLDYWGQGTLVTVSS

SEQ ID NO: 22408 - protein, 92 aa, Homo sapiens
ASGFIFSMQAMNWVRQAPGKGLELISTITGSGGATYYADSVKGRFTISRDNSRNTMHLQMDNLRPDDTALYYCARNAGLDYWGQGIQVTVSS

SEQ ID NO: 22409 - protein, 93 aa, Homo sapiens
AASGFIFTRQDMAWVRQAPGKGLEWVACVGVSDTDSFYIDSVKGRFTISRDNSRNTVSLQMNNLRSEDTAIYYCARNAGLDYWGQGSLVTVSS

SEQ ID NO: 22410 - protein, 93 aa, Homo sapiens
ATSGFTFSSQDMNWVRQTPGKGLELVSSISGSGLNTHYADSVKGRFTISRDSSRNTLHLQMNSLRAEDTAVYYCARNAGLDYWGQGTLVTVSS

SEQ ID NO: 22411 - protein, 92 aa, Homo sapiens
AASGFTFTSQDMTWVRQAPGKGLEWVSVVSPGGGGYYADSVKGRFTVSRDNSRNTVYLQMNSLRAEDTAIYYCARNAGLDYWGQGTLVTVSS

SEQ ID NO: 22412 - protein, 103 aa, Homo sapiens
ASGDPLNNIDINWVRQAPGQGLEWLGWMNMDSGNTVYSQKFQGRIAMTRDKAITTAYMELSGLRSQDTAVYFCAIADVDWYESGWYVGLVSRWGQGTLVTVSS

SEQ ID NO: 22413 - protein, 103 aa, Homo sapiens; identical to SEQ ID NO: 22412

SEQ ID NO: 22414 - protein, 101 aa, Homo sapiens
AASGFTFNRYAMNWVRQAPGKGLEWVSGIGAIGGSTDYADSVKGRFTISRDNSKNTLYLQMMFLRAEDTAVYYCAKDRDVIVATVHGMDVWGQGTMVTVSS

SEQ ID NO: 22415 - protein, 101 aa, Homo sapiens
AASGFTFNRYAMNWVRQAPGKGLEWVSGIGAIGGNTDYADSVKGRFTISRDNSKNTLYLQMMFLRAEDTAVYYCAKDRDVIVATVHGMDVWGQGTMVTVSS

SEQ ID NO: 22416 - protein, 101 aa, Homo sapiens
AASGFTFNRYAMNWVRQATGKGLEWVSGIGAIGGSTDYADSVKGRFTISRDNSKNTLYLQMMFLRAEDTAVYYCAKDRDVIVATVHGMDVWGQGTMVTVSS

SEQ ID NO: 22417 - protein, 101 aa, Homo sapiens
AATGFTFSSHAMTWVRQAPGKGLEWVAGIGGSGGSTDYADSVKGRFTISRDNFKNTLYLQMHSLRAEDTAVYYCAKDRDVIVATVHGMDVWGQGTTVTVSS

SEQ ID NO: 22418 - protein, 96 aa, Homo sapiens
AASGFTFSTSWMSWVRQAPGRGLEWVGHMNPDGSAIYCVDSVRGRFTISRDNAKNSLYLQMDSLRVEDTAVYYCARDPGWGAFDMWGQGTMVTVSS

SEQ ID NO: 22419 - protein, 96 aa, Homo sapiens
AASGFTFRNYWMNWVRQAPGKGLEWVAIINADGSVKGSMDSVKGRFTVSRDNAKNSLYLQMDSLRAEDTAVYYCARDPGWGAFDMWGQGTMVTVSS

SEQ ID NO: 22420 - protein, 96 aa, Homo sapiens
AASGFTFRNYWMNWVRQAPGKGLEWVAIIKADGSNKDCVDSVKGRFTVSRDNAKNSLYLQMDSLRAEDTAVYYCARDPGWGAFDMWGQGTMVTVSS

SEQ ID NO: 22421 - protein, 95 aa, Homo sapiens
AASGFRFSDYSMNWVRQGPGKGLEWISYLDGRKGTISYADSVKGRFTISWDSGKNSLLLQMNSLRDEDTAVYYCARDLIYAFDYWGLGTLVTVSS

SEQ ID NO: 22422 - protein, 95 aa, Homo sapiens
AASGFTFSDYTINWVRQAPGKGLEWVSYITSTSSTKSYADSVKGRFTISRDNAKNSLYLQMNSLRDEDTAVYYCARDLIYAFDYWGQGTLVTVSS

SEQ ID NO: 22423 - protein, 104 aa, Homo sapiens
TQTLTLTCTFSGFSLTTEAVGVGWIRQPPGKALEWLAFIYWNDETHYSPSLASRLTITKDTSKNQVVLTLTDMDPVDTATYYCSHGSGWLLDYWGQGILVTVSS

SEQ ID NO: 22424 - protein, 104 aa, Homo sapiens
TQTLTLTCTFSGFSLSAPAVGVGWVRQPPGEGLEWLAFIYWDDNKYYSPSLASRLSISKDTSKNQVVLTMTNMDPVDTGTYYCSHGSGWLLDYWGPGALVTVSS

SEQ ID NO: 22425 - protein, 98 aa, Homo sapiens
AASGFSFGASAMHWVRQASGKGLEWVGRIRSKPYNYATAYTASVTGRFTISRDDSKNTAYLQMNSLKTDDTAVYYCTYYGSGSYLSYWGQGTLVTVSS

SEQ ID NO: 22426 - protein, 98 aa, Homo sapiens; identical to SEQ ID NO: 22425

SEQ ID NO: 22427 - protein, 97 aa, Homo sapiens
ASGFTFSDSSMEWVRQASGKGLEWVGRIRSRTRKFATKYVASVQGRFTISRDDSESTAFLHMNSLKTDDTAVYYCTYYGSGSYLSYWGQGALVTVSS

SEQ ID NO: 22428 - protein, 98 aa, Homo sapiens
AASGFTFSGSDMQWVRQASGKGLEWVGRIRSRPNNYATAYAASVKGRFTISRDDSKYTAYLQMNNLKSEDAAIYYCTYYGSGSYLSYWGQGTLVTVSS

SEQ ID NO: 22429 - protein, 104 aa, Homo sapiens
AASEFMFSDYYMSWIRQAPGKGLEWVSYISSSGNTIYYADSVKGRFTVSRDNAKNSLYLQMNSLRAEDTAVYYCARDRRDILTGYYYYYAMDVWGQGTTVTVSS

SEQ ID NO: 22430 - protein, 104 aa, Homo sapiens
AASDFIFSDYYMSWIRQAPGKGLEWISYISSSGSTIYYADSVEGRFTISRDNAKNSLYLQMNSLRAEDSAVYYCARDRRDILTGYYYYYAMDVWGQGTTVTVSS

SEQ ID NO: 22431 - protein, 104 aa, Homo sapiens; identical to SEQ ID NO: 22430

SEQ ID NO: 22432 - protein, 104 aa, Homo sapiens
AASDFIFSDYYMSWIRQAPGKGLEWISYTSSSGSTIYYADSVEGRFTISRDNAKNSLYLQMNSLRAEDSAVYYCARDRRDILTGYYYYYAMDVWGQGTTVTVSS

SEQ ID NO: 22433 - protein, 100 aa, Homo sapiens
ASGFSVTSHYTHWVRQAPGQGLEWMGLVYPGGVDPYYAEKFQGRVSMTRDTSTGTDYMELTSLRSGDTAVYFCAREGPLAAPGVNDAFDIWGQGTLVIVS

SEQ ID NO: 22434 - protein, 100 aa, Homo sapiens
ASGYSFTSSYIHWVRQAPGLGPEWMGLIYPSGDRTFYAQKFQGRVIMTRDTSTSTFYMDLSSLRYEDTAVYYCAREGPLAAPGVNDAFDIWGQGTMVTVS

SEQ ID NO: 22435 - protein, 94 aa, Homo sapiens
AASGFTVSSNYMSWVRQAPGKRLEWVAIIYRDGTTYYADSVRGRFTISRDNSKNTLYLQMNSLRAEDTAMYYCARWLEIFYDYWGQGTLVTVSS

SEQ ID NO: 22436 - protein, 93 aa, Homo sapiens
AASGFAVSNNYMSWVRQAPGKGLEWVSIIYNSGTTYYADSVKGRFTISRDNSKNTLYLQMNSLRAEDTAVYYCARWLEIFYDYWGQGTLVTVS

SEQ ID NO: 22437 - protein, 94 aa, Homo sapiens
AASGFTVSSNYMSWVRQPPGQRPEWVAIIYRDGTTYYADSVRGRFTISRDNSRNTLYLQMNSLRAEDTAIYYCARWLEIFYDYWGQGTLVTVSS

SEQ ID NO: 22438 - protein, 94 aa, Homo sapiens
AASGFTVSSNYMSWVRQPPGKRLEWVAIIYRDGTTYYADSVRGRFTISRDNSKNTLYLQMNSLRAEDTAMYYCARWLEIFYDYWGQGTLVTVSS

SEQ ID NO: 22439 - protein, 94 aa, Homo sapiens
AASGFTVSSNYMSWVRQAPGKGLEWVAIIYRDGTTYYADSVKGRFTISRDNSKNTLYLQMNSLRAEDTAMYYCARWLEIFYDYWGQGTLVTVSS

SEQ ID NO: 22440 - protein, 94 aa, Homo sapiens
AASGFTVSSNYMSWVRQPPGQRLEWVAIIYRDGTTYYADSVRGRFTISRDNSKNTLYLQMNSLRAEDTAIYYCARWLEIFYDYWGQGTLVTVSS

SEQ ID NO: 22441 - protein, 93 aa, Homo sapiens
AASGFTVSNNYMSWVRQAPGKGLEWVSIIYSGGTTYYADSVKGRFTISRDNSKNTLYLQMNSLRAEDTAVYYCARWLEIFYDYWGQGTLVTVS

SEQ ID NO: 22442 - protein, 94 aa, Homo sapiens
AASGFTVSSNYMSWVRQAPGKRLEWVTIIYRDGTTYYADSVRGRFTISRDNAKNTLYLQMNSLRAEDTAIYYCARWLEIFYDYWGQGTLVTVSS

SEQ ID NO: 22443 - protein, 95 aa, Homo sapiens
AVSGFTVSSNYMSWVRQAPGKGLEWVSIIYSGDGTTYYTDSVKGRFTISRDNSKNTLYLQMNNLRADDTAVYYCARWLEIFYDYWGQGTLVTVSS

SEQ ID NO: 22444 - protein, 94 aa, Homo sapiens; identical to SEQ ID NO: 22435

SEQ ID NO: 22445 - protein, 95 aa, Homo sapiens
AVYGGPFTNHYWTWIRQPPGKGLEWIGEILHNGNTKYNPSLKSRVVISLDKSKNQFSLKLNSLTAADTAVYFCARGRWSPTLDIWGLGTMVTVSS

SEQ ID NO: 22446 - protein, 94 aa, Homo sapiens
AVYGGSFTKHHWTWIRHSPGEGLEWIGEILHSGVSKYNPSLKSRVVISLDTSKNQFSLKLQSLTVADSAVYYCARGRWSPTLDIWGQGTMVTVS

SEQ ID NO: 22447 - protein, 95 aa, Homo sapiens
AVYGGPFKNYYWTWIRQPPGKGLEWIGEIYHSGGTNYNPSLKSRVTISVDTSKNQFSLRLTSMTAADTAVYYCARGRWSPTLDIWGQGTVVTVSS

SEQ ID NO: 22448 - protein, 95 aa, Homo sapiens
AVYGGSLKNHYWTWIRQAPGKGLEWIGEISHSGGTNYNPSLKSRVTISVDTSKNQFSLRVTSVIAADTAVYYCARGRWSPTLDIWGQGTLVTVSS

SEQ ID NO: 22449 - protein, 95 aa, Homo sapiens
AVYGGSFKNHYWTWIRQAPGKGLEWIGEISHSGDTKYNPSLRSRVTISVDTSRNQFSLRVTSVTAADTAVYYCARGRWSPTLDIWGQGTLVTVSS

SEQ ID NO: 22450 - protein, 95 aa, Homo sapiens
VVYGGSFKNYYWTWIRQAPGKGLEWIGEILHSGVTNYNPSLKSRVTISVDTSKNQFSLRVTSVTAADTGVYYCARGRWSPTLDIWGQGTLVTVSS

SEQ ID NO: 22451 - protein, 96 aa, Homo sapiens
TVSGGSITGYHWSWIRQPPGEGLEWIGFIHYSGDTNYNPSLRSRLTMSVDTSKNQFSLKLNSVTAADTAVYYCTRDRGRDGGFDYWGQGTLVTVSS

SEQ ID NO: 22452 - protein, 97 aa, Homo sapiens
TVSGVSITGYYHWSWIRQPPGEGLEWIGFIHYSGDTNYSPSLRSRLTMSVDTSKNQFSLKLNSVTAADTAVYYCTRDRGRDGGFDYWGQGTLVTVSS

SEQ ID NO: 22453 - protein, 96 aa, Homo sapiens
TVSGGSITPYYWSWVRQPPGRGLEWIGFIHHSGYTVCNPSLKSRVTVSVDTSNNQLSLKMNSVTAPDTAVYYCTRDRGRDGGFDYWGLGILVTVSS

SEQ ID NO: 22454 - protein, 97 aa, Homo sapiens
VASGFTFSSYGMDWVRQAPGKGLEWVSAISTGGDNTYYTDSIKGRFTISRDNSKSTLYLQMNGLRAEDTALYYCAKERGFRGPFDIWGQGTMVTVSS

SEQ ID NO: 22455 - protein, 97 aa, Homo sapiens
AASGFTFSNYGMNWVRQAPGKGLEWVSAIGSGNAKTYYADSVKGRFTISRDNSKNTLNLQMNSLRAEDTAVYYCAKERGFRGPFDIWGQGTMVTVSS

SEQ ID NO: 22456 - protein, 101 aa, Homo sapiens
AASGFTFRSYWMSWVRQAPGKGLEWVANIKEDGSDKYYVDSVKGRFTISRDNAKNSLYLQMNSLRAEDTAVYYCARDGYSSSWYRDGMDVWGQGTTVTVSS

SEQ ID NO: 22457 - protein, 101 aa, Homo sapiens
AASGFTFSSYWMSWVRQAPGKGLEWVANIKQDGSDKYYVDSVKGRFTISRDNAKNSLFLQMNSLRAEDTAVYYCARDGYSSSWYRDGMDVWGQGTTVSVSS

SEQ ID NO: 22458 - protein, 101 aa, Homo sapiens; identical to SEQ ID NO: 22457

SEQ ID NO: 22459 - protein, 101 aa, Homo sapiens
AASGFTFSSYWMSWVRQAPGKGLEWVANIKQDGSNKYYVDSVKGRFTISRDNAKNSLFLQMNSLRAEDTAVYYCARDGYSSSWYRDGMDVWGQGTTVSVSS

SEQ ID NO: 22460 - protein, 101 aa, Homo sapiens
AASGFTFSSYWMSWVRQAPGKGLEWVANIKQDGSDKYYVDSVKGRFTISRDNAKNSLFLQMNRLRAEDTAVYYCARDGYSSSWYRDGMDVWGQGTTVSVSS

SEQ ID NO: 22461 - protein, 101 aa, Homo sapiens
AASGFTFSSYWMSWVRQAPGKGLEWVANIKQDGSDKYYVDSVKGRFTISRDNAKNSLFLQMNSLRDEDTAVYYCARDGYSSSWYRDGMDVWGQGTTVSVSS

SEQ ID NO: 22462 - protein, 101 aa, Homo sapiens; identical to SEQ ID NO: 22460

SEQ ID NO: 22463 - protein, 95 aa, Homo sapiens
AASGFTFKNYAMSWVRQAPGKGLEWVSVIGVSGGDTYYADSVKGRFTISRDNSKNTLYLQMDSLRAEDTAVYYCASRGAVAGDYWGQGTLVTVSS

SEQ ID NO: 22464 - protein, 95 aa, Homo sapiens
AASGFTFSIYAMSWVRQAPGKGLEWVSVISVSGDNTYYADSVKGRFTISRHNSKNTLYLQMNSLRAEDTAVYYCASRGAVAGDYWGQGTLVTVSS

SEQ ID NO: 22465 - protein, 94 aa, Homo sapiens
AASGFTFSTYVMTWVRQAPGKGLEWVSTISGSGGSTYYADSVKGRFTISRDNSKNTLSLQMNSLRAEDTAVYYCVRGYTGMDVWGQGTTVTVSS

SEQ ID NO: 22466 - protein, 94 aa, Homo sapiens
AASGFTFTSFAMSWVRQAPGKGLEWVSSLTTSGGSTYYADSVKGRFTISRDNSKNTLHLQMNSLRAEDTAVYYAVRGYTGMDVWGQGTTVTVSS

SEQ ID NO: 22467 - protein, 94 aa, Homo sapiens; identical to SEQ ID NO: 22465

SEQ ID NO: 22468 - protein, 92 aa, Homo sapiens
EASGFIFIDYAMTWVRQSPGKGLEWVSTIAYSGTHYTDSVKGRFTISRDNTKNMVYLQMNSLRAEDTAIYYCVKGLTTFDYWGPGTLVTVSS

SEQ ID NO: 22469 - protein, 92 aa, Homo sapiens
AASGFVFIDYAMTWVRQAPGKGLEWVSTIAYSGTHYTDSVKGRFTISRDNTKNTVYLQMNSLRAEDTAIYYCVKGLTTFDYWGQGTLVTVSS

SEQ ID NO: 22470 - protein, 92 aa, Homo sapiens
EASGFIFIDYAMTWVRQSPGKGLEWVSTIAYSGIYYADSVKGRFTISRDNSNNMVYLQMSSLRAEDTAIYYCVKGLTTFDYWGPGTLVTVSS

SEQ ID NO: 22471 - protein, 92 aa, Homo sapiens
AASGFIFRDFAMTWVRQAPEKGLEWVSTITYSGLHYADSVKGRFTISRDNSQNTVYLQMNSLRAEDTAVYYCVKGLTTFDYWGQGSLVTVSS

SEQ ID NO: 22472 - protein, 92 aa, Homo sapiens
AASGFPFSAYAMTWVRQAPGMGLEWVSTIVYDGSHYSDSVKGRFTISRDNSQNTVYLQMNSLRVADTAVYFCVKGLTTFDYWGQGALVTVSS

SEQ ID NO: 22473 - protein, 98 aa, Homo sapiens
SVSGDSISDYYWTWIRQPPGKGLEWIGYIHNSWSTNYAPSLRGRVTMSRDTSKNQFSLRLTSVTAADTGVYYCARYFYGSGTPYFDYWGQGMLVTVSS

SEQ ID NO: 22474 - protein, 97 aa, Homo sapiens
SVSGDSISDYYWTWIRQPPGKGLEWIGYIHNSWSTNYAPSLRGRVTMSRDTSKNQFSLRLTSVTAADTGVYYCARYFYGSGTPYFDYWGQGCWSPSP

SEQ ID NO: 22475 - protein, 98 aa, Homo sapiens
TVSGDSIGDYYWTWIRQPPGKGLEWIGYIYYSWVTNYNPSLKGRVSMAVDSSKNQFSLKLTSVTAADTAMYYCARYFYGSGTPYFDYWGQGTLVTVSS

SEQ ID NO: 22476 - protein, 92 aa, Homo sapiens
AASGFTFSSYEMNWVRQAPGKGLEWVSYISSSGSTMYYADSVKGRFTISRDNAKNSLYLQMNSLRAEDTAFYYCARGKNGVWGQGTLVTVSS

SEQ ID NO: 22477 - protein, 92 aa, Homo sapiens
AASGFTFSSYEMNWVRQAPGKGLEWVSYISSSGTIKYYADSVKGRFTISRDNAKNSLYLQMNSLRAEDTAVYYCARGKNGVWGQGTLVTVSS

SEQ ID NO: 22478 - protein, 104 aa, Homo sapiens
TQTLTLTCTFSGFSLSTNGLGVAWIRQPPGKALEWLALIYWDDDKRYSPSLNNRLTIAKDTSKNQVVLTLTNLDPADTATYYCAHLSTTVTTHWGQGTLVTVSS

SEQ ID NO: 22479 - protein, 104 aa, Homo sapiens; identical to SEQ ID NO: 22478

SEQ ID NO: 22480 - protein, 104 aa, Homo sapiens; identical to SEQ ID NO: 22478

SEQ ID NO: 22481 - protein, 104 aa, Homo sapiens
TQTLTLTCTFSGFSLSTSGLGVAWIRQPPGKALEWLALIYWDDDKRYSPSLKSRLTITKDTSKNQVVLTMTNMDPVDTATYYCAHLSTTVTTHWGQGALVTVSS

SEQ ID NO: 22482 - protein, 104 aa, Homo sapiens; identical to SEQ ID NO: 22481

SEQ ID NO: 22483 - protein, 104 aa, Homo sapiens; identical to SEQ ID NO: 22481

SEQ ID NO: 22484 - protein, 94 aa, Homo sapiens
AASGFIFSNYAMMWVRQAPGKGLEWVSSLSGNSRDIYYRDSVKGRFTISRDNSKNTLYLQMNSLRADDTAIYYCAKDSPVGTYWGQGALVTVSS

SEQ ID NO: 22485 - protein, 93 aa, Homo sapiens
GSGFTFSTPGMSWVRQAPGKGLEWVSSIDGSGRATYYADSVKGRFTISRDNSKNTLYLQMSTLRAEDTAVYYCAKDSPVGTYWGQGTLVTVSS

SEQ ID NO: 22486 - protein, 93 aa, Homo sapiens
ASGFTFSTPGMSWVRQAPGKGLEWVSSIDGSGRATYYADSVKGRFTISRDNSKNTLYLQMTMLRAEDTAVYYCAKDSPVGTYWGQGTLVTVSS

SEQ ID NO: 22487 - protein, 93 aa, Homo sapiens
ASGFTFSTPGMSWVRQAPGKGLEWVSSIDGSGRATYYADSVKGRFTISRDNSKNTLYLQMSTLRAEDTAVYYCAKDSPVGTYWGQGTLVTVSS

SEQ ID NO: 22488 - protein, 94 aa, Homo sapiens
AASGFTFSTHGMSWVRQAPGKGLEWVSSIDVSGRATYYADSVKGRFTISRDNSKNTLYLQMSTLRAEDTAVYYCAKDSPVGTYWGQGTLVTVSS

SEQ ID NO: 22489 - protein, 93 aa, Homo sapiens
ASGFTFNTPGMSWVRQAPGKGLEWVSSIDGSGRATYYADSVKGRFTISRDNSKNTLYLQMSTLRAEDTAVYYCAKDSPVGTYWGQGTLVTVSS

SEQ ID NO: 22490 - protein, 93 aa, Homo sapiens
ASGFTFSTPGMSWVRQAPGKGLEWVSSIDGSGRATYYADSVKGRFTISRDNSKNTLYLQMSTLRAEDTAVYYCAKDSPVGTYGGQGTLVTVSS

SEQ ID NO: 22491 - protein, 92 aa, Homo sapiens
VSGDSINKYYWNWIRQPPGKGLEWLGYVYYNGITIYNPSLKGRVTISVATSRTQFSLKLTSLTAADTAVYYCARTWEGVFDIWGQGALVTVS

SEQ ID NO: 22492 - protein, 94 aa, Homo sapiens
SVSGGAINRYYWNWIRQPPGRGLEWIGYIYHNGITHYNPALKSRVTISLDTSRTQFSLKLNSLTVADTAVYYCARTWEGVFDIWGPGTLVAVSS

SEQ ID NO: 22493 - protein, 99 aa, Homo sapiens
TVSGGSVSDNNYYWGWIRQPPGKGLEYIATMHSSGTTYYDPSLKSRVTISADTSKNQFSLRLSSVTAADTAVYYCARRMTGPGGWFDPWGQGTLVTVSS

SEQ ID NO: 22494 - protein, 99 aa, Homo sapiens
TVSGASVTDTYYYWGWIRQPPGEEPEYISTIHSTGTTYYNPSLQSRLTISLDRSKNQLSLELRSVTAADTAVYYCARRMTGPGGWFDPWGQGTLVTVSS

SEQ ID NO: 22495 - protein, 92 aa, Homo sapiens
AASGFTFSNYWMSWVRQAPGKGLEWVANIKQDGSERYYVDSVKGRFTISRDNAKNSLFLQMNSLTVEDTAVYYCARGYQGEWGQGTLVTVSS

SEQ ID NO: 22496 - protein, 92 aa, Homo sapiens
AASGFTFSNYWMSWVRQAPGKGLEWVANIKQDGSEKYYVDSVKGRFTISRDNAKNSLFLQMNSLTVEDTAVYYCARGYQGEWGQGTLVTVSS

SEQ ID NO: 22497 - protein, 92 aa, Homo sapiens
AASGFTFSNYWMSWVRQAPGKGLEWVANIKQDGSERYYVDSVKGRFTISRDNAKNSLYLQMNSLIVEDTAVYYCARGYQGEWGQGTLVTVSS

SEQ ID NO: 22498 - protein, 92 aa, Homo sapiens; identical to SEQ ID NO: 22495

SEQ ID NO: 22499 - protein, 92 aa, Homo sapiens; identical to SEQ ID NO: 22496

SEQ ID NO: 22500 - protein, 92 aa, Homo sapiens
AASGFTFSNYWMSWVRQAPGKGLEWVANIKQDGSEKYYVDSVKGRFTISRDNAKNSLSLQMNSLTVEDTAVYYCARGYQGEWGQGTLVTVSS

SEQ ID NO: 22501 - protein, 92 aa, Homo sapiens
AASGFTFSSYWMSWVRQAPGKGLEWVANIKQDGSEKYYVDSVKGRFTISRDNAKNSLYLQMNSLRVEDTAMYYCARGYQGEWGQGTLVTVSS

SEQ ID NO: 22502 - protein, 92 aa, Homo sapiens; identical to SEQ ID NO: 22500

SEQ ID NO: 22503 - protein, 92 aa, Homo sapiens
AASGFTFSNYWMSWVRQAPGKGLEWVANIKQDGSEKYYVDSVKGRFTISRDNAKNSLYLQMNSLTVEDTAVYYCARGYQGEWGQGTLVTVSS

SEQ ID NO: 22504 - protein, 92 aa, Homo sapiens
AASGFIFSTYWMSWVRQAPGKGLEWVANIKQDGSEKYYVDSVKGRFTISRDNAKNSLYLKMNSLRAEDTAVYYCARGYQGEWGQGTLVTVSS

SEQ ID NO: 22505 - protein, 96 aa, Homo sapiens
AASGFTFSDRYMDWVRQAPGKGLEWLGRIRNRTNGYSIEYAASVKGRFTISRDDSKLYLQMNSLATEDTAVYYCARSGSYSAFDYWGQGTLVTVSS

SEQ ID NO: 22506 - protein, 98 aa, Homo sapiens
AASGFTFIDHSMDWVRQAPGKGLEWVGHTRNKAYSYTTQYAASVKGRFIISRDESKNSLHLQMNSLKSEDTAVYYCARSGSYSAFDYWGQGTLVTVSS

SEQ ID NO: 22507 - protein, 92 aa, Homo sapiens
SGFTFSGYWMSWVRQAPGKGLEWVANIKEDGSDKYYVESVKGRFTISRDNSKNSLYLQMSSLRAEDSAVYYCVMGRAGFDSWGQGTLVAVSS

SEQ ID NO: 22508 - protein, 94 aa, Homo sapiens
AASGFSFSDYWMSWVRQDPGKGLEWVANIKQDGNEKYYVDSVKGRFTISRDNAKSSLYLQMYSLRVEDTALYHCVMGRAGFDSWGQGTLVTVSS

SEQ ID NO: 22509 - protein, 93 aa, Homo sapiens
SGFDFSGAAIHWIRQAPGKGLEWVGHIRIKDDSYATTYAASVKGRFTISRDDSKNTAYLQMNSLKNEDTAVYYCARHDWLDPWGLGTLVTVSS

SEQ ID NO: 22510 - protein, 93 aa, Homo sapiens
SGFPFSGAAIHWVRQASGKGLEWVGHIRIKSDNYATTYGTSAEGRFTISRDDSKNTAYLQMDSLTSEDTAIYYCARHDWLDPWGQGTLVTVSS

SEQ ID NO: 22511 - protein, 94 aa, Homo sapiens
AASEFTFGNYWMAWVRQAPGKGLEWVANINLDGSGQYYVDSVRGRFTISRDNAKNSLYLQMNSLRVEDTAVYYCARDHFYTDYWGQGTLVTVSS

SEQ ID NO: 22512 - protein, 94 aa, Homo sapiens
AASGFTFSNYWMTWVRQAPGKGLEWVANINQDGTEEYYVDSVRGRFTISRDNAKNSLYLEMNSLRVEDTAVYYCARDHFYTDYWGQGTLVTVSS

SEQ ID NO: 22513 - protein, 92 aa, Homo sapiens
GTGYTFRDHWMTWVRQAPGRGLEWVANIQQDGSGKNYVDSVKGRFSISRDNAKNSLYLQMDSLRVEDTAVYYCGRSRAPGYWGQGTLVTVSS

SEQ ID NO: 22514 - protein, 92 aa, Homo sapiens; identical to SEQ ID NO: 22513

SEQ ID NO: 22515 - protein, 93 aa, Homo sapiens
VASGLTLNTHFMTWVRQAPGKGLEWVANIKPDGSEKYYVDSVKGRFTISRDNTKNSLFLQMNSLRVEDTAVYFCGRSRAPGYWGQGTLVTVSS

SEQ ID NO: 22516 - protein, 94 aa, Homo sapiens
AASGFTFRDHDMSWVRRAPGRGLEWVSTIGRSGELTYYADSVKGRFTISRDNSKSTLCLQMNGLRAEDTAVYYCARGGWLDDYWGQGTLVTVSS

SEQ ID NO: 22517 - protein, 94 aa, Homo sapiens
AASGFTFSNYDMSWVRQTPGEGLEWVSTISRSGGITYYADSVRGRFTISRDNSKNTLYLQMNSLRAGDTALYYCARGGWLDDYWGLGTLVTVSS

SEQ ID NO: 22518 - protein, 94 aa, Homo sapiens
AASGFTFRSYDMSWVRQAPGRGLEWVSAISRTGEATYYADSVKGRFTISRDNSKNTLCLQMDSLRAEDTAIYYCARGGWLDDYWGQGTLVTVSS

SEQ ID NO: 22519 - protein, 94 aa, Homo sapiens
AASGFTFRNYEMTWVRQTPGKGLEWVSSIYTMGSGTNYADSVRGRFTVSREDSMSTLYLQMNSLRAEDTAIYFCARGGWLDDYWGQGTLVTVSS

SEQ ID NO: 22520 - protein, 94 aa, Homo sapiens
AASGFTFRNYEMTWVRQTPGKGLEWVSSIYTMGSGTNYADSVRGRSTVSREDSMSTLYLQMNSLRAEDTAIYFCARGGWLDDYWGQGTLVTVSS

SEQ ID NO: 22521 - protein, 94 aa, Homo sapiens
AASGFIFRNYDMSWVRQTPGRGLEWVSAISRSGEATYYADSVKGRFTISRDNSKNTLSLQMNSLRAEDTAVYYCARGGWLDDYWGQGTQVTVSS

SEQ ID NO: 22522 - protein, 98 aa, Homo sapiens
AVSGFTFSDYGMHWVRQAPGKGLEWVAVIWHDGSNKYYADFVTGRFTISRDDSKNTLYLQMNSLRAEDTAVYYCARDDILGGYTIDYWGQGTPLTVSS

SEQ ID NO: 22523 - protein, 98 aa, Homo sapiens
AVSGFIFTDYGMHWVRQAPGKGPEWVAVIWHDGSNKFYADSVKGRFTISRDDSKNTLNLQMNSLRAEDTAVYFCARDDILGGYTIDYWGQGTLVIVSS

SEQ ID NO: 22524 - protein, 96 aa, Homo sapiens
AVSGFTSHDHGMHWVRQGPRKGLEWVSGIMWNSGATGYADSVKGRFTISRDNTKNSLYLQMDDLTTDDTALYYCVKDVEAGGAASWGQGTLVTVSS

SEQ ID NO: 22525 - protein, 94 aa, Homo sapiens
SGFISHHHGMHWVRLSPRKGLEWVAGIIWYTYATGYADSVKGRFTISRDNTKNSLYLQMDDLRDDDTALYYCVKDVEAGGAASWGQGTLVTVSS

SEQ ID NO: 22526 - protein, 93 aa, Homo sapiens
SGFASHNHAMHWVRQAPGKGLEWVSGIYWNSGSAGYAESVKGRFTVSRDNARSTLFLQMDSLRLEDTGLYFCVKDVEAGGAASWGLGTLVTVS

SEQ ID NO: 22527 - protein, 93 aa, Homo sapiens
SGFVSHDHAMHWVRQAPGKGLEWVSGIFWYSGDTGYAESVKGRFTVSRDNARNTLFLQMDSLRVEDTGFYYCVKDVEAGGAASWGQGTLVTVS

SEQ ID NO: 22528 - protein, 94 aa, Homo sapiens
AASGLTFSSYSMNWVRQAPGKGLEWVSYITGGSGSIYYADSVKGRFTISRDNAKNSVYLQMNSLRDEDTAVYYCASSNGCLDYWGQGTLVTVSS

SEQ ID NO: 22529 - protein, 94 aa, Homo sapiens
AASGFTFSSYSMNWVRQAPGKGLEWLSYITGSSTSIYYADSVKGRFTISRDNAKNSLFLQMNSLRDEDMAVYYCASSNGCLDYWGQGTLVTVSS

SEQ ID NO: 22530 - protein, 96 aa, Homo sapiens
AASGITFSSSGMHWVRQAPGKGLEWVAMIWSDGSKQYYADSVKGRFTISRDNYRNTVHLQMDSLRAEDTAVYYCGRDKGVTSIDNWGQGALVTVSS

SEQ ID NO: 22531 - protein, 96 aa, Homo sapiens
AASGIPFSSSGMHWVRQAPGKGLEWVAMIWSDGSNQYYADSVKGRFIISRDNSKNTVYLQMDSLRAEDTAVYYCGRDKGVTSIDNWGQGALVTVSS

SEQ ID NO: 22532 - protein, 96 aa, Homo sapiens
AVSGISFSASGMHWVRQAPGKGLEWVAMITSVGTTEFYADSVKGRFSISRDNSKDTLFLQMNSLKVEDTAIYYCGRDKGVTSIDNWGQGTLVIVSS

SEQ ID NO: 22533 - protein, 95 aa, Homo sapiens
AASGFTFSSSEMSWVRQAPGKGLEWVSFIRHSDGTIYSADSVKGRFTISRDSAKNTLYLQMNSLRVDDTAIYYCARGSLYGMDVWGPGTTVTVSS

SEQ ID NO: 22534 - protein, 95 aa, Homo sapiens
AASGFIFSSYEMNWVRQAPGKGLEWVSYISSSGSTIYYADSVKGRITISRDNVKKSLYLQMNSLRAEDTAVFYCARGSLYGMDVWGQGTTVTVSS

SEQ ID NO: 22535 - protein, 100 aa, Homo sapiens
KGSGYSFATYWIGWVRQKPGKGLEWMGIIYPGDFDTRYSPSFQGQVTISVDKSISTAYLQWSSLKASDSATYYCARSPTSVSNPYYSDYWGQGTLVTVSS

SEQ ID NO: 22536 - protein, 100 aa, Homo sapiens
KGSGYSFTKYWIGWVRQMPGKGLEWMGIIYPGDSDTRYSPSFKGQVTISADKSITTAHLQWSSLKASDTAIYYCARSPTSVSNPYYSDYWGQGTLVTVSS

SEQ ID NO: 22537 - protein, 98 aa, Homo sapiens
AASGFPFSISGMHWVRQAPGKGPEWVAVIPNDGSRQYYGDSVKGRFTISRDNSKNTLYLQMNSLRLEDTAVYYCVKDRMTEAYGMEVWGQGTTVSVSS

SEQ ID NO: 22538 - protein, 98 aa, Homo sapiens
AASGFPFSISGMHWVRQAPGKGLEWVAVMRNDGSRQYYGDSVKGRFTISRDNSKNTLYLQMNSLRLEDTAVYYCVKDRMTEAYGMEVWGQGTTVTVSS

SEQ ID NO: 22539 - protein, 98 aa, Homo sapiens
AASGFPFSISGMHWVRQAPGKGLEWVAVIPNDGSRQYYGDSVKGRFTISRDNSKNTLYLQMNSLRLEDTAVYYCVKDRMTEAYGMEVWGQGTTVSVSS

SEQ ID NO: 22540 - protein, 98 aa, Homo sapiens
AASGFTFNAFGMHWVRQAPGKGLEWVAVVSNDGTRKHYSDTVKGRFTISRDSSMNTLYLQMNSLRAEDTAVYYCVKDRMTEAYGMEVWGQGTTVTVSS

SEQ ID NO: 22541 - protein, 111 aa, Homo sapiens
TQTLTLTCTLSGFSLSTSGVGVGWIRQPPGKALEWLAVIYWDDDKRYSPSLQSRLSITKDTSKNQVVLTMTNMDPVDTATYYCAHRRFYGSGSYRCAFDIWGQGTLVTVSS

SEQ ID NO: 22542 - protein, 111 aa, Homo sapiens
TQTLTLTCTLSGFSLTTTGVGVAWIRQPPGQALEWLAVIYWDDDKRYNPSLKSRLTITKDTSKNQVVLTMTNMDPVDTASYYCAHRRFYGSGSYRCAFDIWGQGTMVTVAS

SEQ ID NO: 22543 - protein, 97 aa, Homo sapiens
TVSRGSISSSTYHWGWIRQPPGKGLEWIGSIYYSGSTYYNPSLRSRATLSVDTSKNQFSLKLTSVTAADTAVYYCAGSSWNKWFDPWGQGSLVTVSS

SEQ ID NO: 22544 - protein, 97 aa, Homo sapiens
TVSDGSISSSTYHWAWIRQPPGKGLEWIGSIYYSGSTYYNPSLKSRLILSVDTTKNQFSLKLTSVTVADTATYYCAGSSWNKWFDPWGQGSLVTVSS

SEQ ID NO: 22545 - protein, 97 aa, Homo sapiens
TVSAGSISSSTYHWAWIRQPPGKGLEWIGSIYYSGSTYYNPSLKSRLTLSVDTTKNQFSLKLTSVTVADTATYYCAGSSWNKWFDPWGQGSLVTVSS

SEQ ID NO: 22546 - protein, 98 aa, Homo sapiens
VASAFNFGSYWMSWVRQAPGEGLEWVANIKQDGSEKHYADSVKGRFTISRDNSKNSVYLQMNSLRAEDTAVYYCARVYSTSWYDFDYWGQGTLVTVSS

SEQ ID NO: 22547 - protein, 98 aa, Homo sapiens
VAYGFPFGSYWMSWVRQAPGKGLEWVATIKKDGSEKYYVDSVKGRFTLSRDNAENSVYLQMNSLRAEDTAVYYCARVYSTSWYDFDYWGQGTMVTVSS

SEQ ID NO: 22548 - protein, 97 aa, Homo sapiens
ASGFIFHSHWMSWVRQAPGKGLEWVANINQDGTERYYVDSVKGRFTVSRDNAKNSLYLQMNSLRAEDTALYYCARDGVAEGVYFDSWGQGTLVTVSS

SEQ ID NO: 22549 - protein, 98 aa, Homo sapiens
AASGFTFRSHWMSWVRQAPGKGLEWVANINQDGRETYYMDSVKGRFTISRDNAKNSLILQMNSLRAEDTAVYLCARDGVAEGVYFDSWGQGTLVTVSS

SEQ ID NO: 22550 - protein, 98 aa, Homo sapiens
AASGFTFRSHWMSWVRQAPGKGLEWVANINQDGRETYYLDSVKGRFSISRDNAKNSLYLQMNSLTAEDTAVYLCARDGVAEGVYFDSWGQGTLVTVSS

SEQ ID NO: 22551 - protein, 98 aa, Homo sapiens
AASGFTFRSHWMSWVRQAPGKGLEWVANINQDGRETYYLDSVKGRFTISRDNAKNSLYLQMNSLTAEDTAVYLCARDGVAEGVYFDSWGQGTLVTVSS

SEQ ID NO: 22552 - protein, 98 aa, Homo sapiens; identical to SEQ ID NO: 22551

SEQ ID NO: 22553 - protein, 98 aa, Homo sapiens
AASGFTFRSHWMSWVRQAPGEGLEWVANIIQDGRETYYVDSVKGRFTISRDNAKNSLYLQMNSLRAEDTAVYFCARDGVAEGVYFDSWGQGTLVTVSS

SEQ ID NO: 22554 - protein, 95 aa, Homo sapiens
AASGFTFSSYWMSWVRQAPGKGLEWVAKIKTDGSEKYYVDSVKGRFTISRDNAENSLYLQMNSLRVEDTAVYYCARGGYRYFDQWGQGSLATVSS

SEQ ID NO: 22555 - protein, 95 aa, Homo sapiens
AASGFTFNTYWMSWVRQAPGKGLEWVANIKEDGSQKYYVDSVRGRFTISRDNAKNSLYLQMNSLRAEDTAVYYCARGGYRYFDQWGQGTLVTVSS

SEQ ID NO: 22556 - protein, 97 aa, Homo sapiens
AASGFTFSSYAMSWVRQAPGKGLEWVSAISGSGGSTYYADSVKGRFTVSRDNSKNTLYLQMNSLRAEDTAVYYCAKDGLRYYGMDVWGQGTTVTVSS

SEQ ID NO: 22557 - protein, 97 aa, Homo sapiens
AASGFTFSSYAMSWVRQAPGKGLEWVSAISGSGGSTYYADSVKGRFTISRVNSKNTLYVQMNSLRAEDTAVYYCAKDGLRYYGMDVWGQGTTVTVSS

SEQ ID NO: 22558 - protein, 97 aa, Homo sapiens
AASGFTFSSHAMSWVRQAPGKGLEWVSGISGSGGSTDYADSVKGRFTISRDNSKNTLYLQMNSLRAEDTAVYYCAKDGLRYYGMDVWGQGTTVTVSS

SEQ ID NO: 22559 - protein, 97 aa, Homo sapiens
ASGYSLSKYGMSWVRQAPGQGLEWMGWVGLHNDDTHYIQKLQGRVTMTTDTSTNTAYMELRSLRSDDTAIYYCARDKGGSPDTFDIWGQGTVVIVSS

SEQ ID NO: 22560 - protein, 97 aa, Homo sapiens
ASGYTLSSYGMSWVRQAPGQGLEWMGWVGSHNDDTHYIQKLQGRVTMTTDTSTSTAYMELRSLRSDDTAIYYCARDKGGSPDTFDIWGQGTVVIVSS

SEQ ID NO: 22561 - protein, 96 aa, Homo sapiens
SGYTFITYGISWVRQAPGQGLEWMGWVSAHTGEANYAESLQGRVIMTTDTSTSTIYMELRSLRSDDTAVYYCARDKGGSPDTFDIWGQGTMVTVSS

SEQ ID NO: 22562 - protein, 103 aa, Homo sapiens
AASGFTFSSYEMNWVRQAPGKGLEWVSYISSSGSTIYYADSVKGRFTISRDNAKNSLYLQMNSLRAEDTAVYYCAGDSSGYYYGYYYYGMDVWGQGTTVTVSS

SEQ ID NO: 22563 - protein, 103 aa, Homo sapiens
AASGFTFSSYSMNWVRQAPGKGLEWVSYISSSSSTIYYADSVKGRFTISRDNAKNSLYLQMNSLRDEDTAVYYCAGDSSGYYYGYYYYGMDVWGQGTTVTVSS

SEQ ID NO: 22564 - protein, 92 aa, Homo sapiens
ADSGFTFTRYWMNWVRQAPGKGLEWVANINEDGSQRDYVGSVKGRFTISRDNAKGSLYLQMNSLRVEDTAVYYCAGGHFEFWGQGALVTVSS

SEQ ID NO: 22565 - protein, 92 aa, Homo sapiens
AASGSTFRSYWMNWVRQAPGKGLEWVANINEDGSVIFYVDSVKGRFTISRDNAKKSVYLQMNSLRVEDTAIYYCAGGHFEFWGQGMLVTVSS

SEQ ID NO: 22566 - protein, 96 aa, Homo sapiens
AASGFTLSSYWMYWVRQVPGKGLVWVSYINNDGSNTNYADSVKGRFTFSRDNAKNTLYLQMNSLRTEDTAVYYCARGGHNHALDVWGQGTTVTVSS

SEQ ID NO: 22567 - protein, 96 aa, Homo sapiens
AASGFTLSYYWMYWVRQAPGKGLVWVSHIDSDGTTTTYADSVKGRFTFSRDNAKNTLYLQMNSLRAEDTAVYYCARGGHNHALDVWGQGTTVTVSS

SEQ ID NO: 22568 - protein, 96 aa, Homo sapiens
AASGFTLSAYWMYWVRQAPGKGLVWVSYINNDGTSTIYADSVKGRFTFSRDNAKNTLFLQMNSLRAEDSALYYCARGGHNHALDVWGQGTTVTVSS

SEQ ID NO: 22569 - protein, 96 aa, Homo sapiens
AASGFTFSSYWMYWVRQAPGKGLVWVSYINSDGSSTIYADSVKGRFTFSRDNAKNTLFLQMNSLRAEDTAVYYCARGGHNHALDVWGQGTTVTVSS

SEQ ID NO: 22570 - protein, 96 aa, Homo sapiens
AASGFTLSAYWMYWVRQAPGKGLVWVSYINNDGTSTIYADSVKGRFTFSRDNAKNTLFLQMNSLRAEDSALYYCARGGHNHALDVWGQRTTVTVSS

SEQ ID NO: 22571 - protein, 103 aa, Homo sapiens
ASGYTFSASAVHWVRQAPGQRPEWMEWIKGGSGDTKYLQKFQGRVTITRDTSANTAYMELSSLISEDTAIYYCVRDMGFDVLTGSYVDAFDLWGQGTLVTVSS

SEQ ID NO: 22572 - protein, 103 aa, Homo sapiens
ASGYTFSASAVHWVRQAPGQRPEWMGWIKGGSGDTKYLQKFQGRVTITRDTSANTAYMELSSLISEDTAIYYCVRDMGFDVLTGSYVDAFDLWGQGTLVTVSS

SEQ ID NO: 22573 - protein, 98 aa, Homo sapiens
TVSGGSINKFYWSWVRQTPGKGLEWIGYIYYSGSTQYNPSLKSRVTLSVDTSKNQFSLTLTSVTAADSAVYYCARGATSGTTRWFDPWGQGTLVTVSS

SEQ ID NO: 22574 - protein, 98 aa, Homo sapiens
TVSGGSISNYYWSWVRQPPGKGLEWIGYIYYSGSTQYNPSLKSRVTISVDTSNNQFSLKLTSVTAADTAVYYCARGATSGTTRWFDPWGQGTLVTVSS

SEQ ID NO: 22575 - protein, 97 aa, Homo sapiens
VGSGFTFGRSAMTWVRQAPGKGLEWVSRISDSGGETYYADSVKGRFTVSRDNSKDTLYLQMHSLRAEDTAMYFCAKDHYTTSLGDYWGQGALVTVSS

SEQ ID NO: 22576 - protein, 96 aa, Homo sapiens
AASGFTFGNNAMTWVRQAPGKGLEWVSRIGGGDETHYADSVKGRFTISRDNSKSMVYLQMNSLTAEDTAVYFCAKDHYTTSLGDYWGQGTLVIVSS

SEQ ID NO: 22577 - protein, 96 aa, Homo sapiens
AASGFTFNNNAMTWVRQAPGKGLEWVSRIGGGDETHYADSVKGRFTISRDNSKSMLYLQMNSLTAEDTAVYFCAKDHYTTSLGDYWGQGTLVTVSS

SEQ ID NO: 22578 - protein, 95 aa, Homo sapiens
VASGFGFSGYGMHWVRQAPGKGLEWVAVIPFDETYRYYADSVKGRFTISRDNSKKTLYLQMNSLRPEDTAVYYCARDIHPGFDYWGQGTLVTVSS

SEQ ID NO: 22579 - protein, 95 aa, Homo sapiens
AASGFGFSGYGMHWVRQAPGKGLEWVAVIPFDETYRYYADSVKGRFTISRDNSKKTLYLQMNSLRPEDTAVYYCARDIHPGFDYWGQGTLVTVSS

SEQ ID NO: 22580 - protein, 95 aa, Homo sapiens
AASGFSFSGYGMHWVRQAPGKGLEWVAVIPFDETYRYYADSVKGRFTISRDNSKKTLYLQMNSLRPEDTAVYYCARDIHPGFDYWGQGTLVTVSS

SEQ ID NO: 22581 - protein, 95 aa, Homo sapiens
AASGFSFSRYGMHWVRQAPGKGLEWVAVLPFDESYKYYADSVKGRFTVSRDNSKNTLYLQMNSLRAEDTAVYYCARDIHPGFDYWGQGTLVTVSS

SEQ ID NO: 22582 - protein, 95 aa, Homo sapiens; identical to SEQ ID NO: 22580

SEQ ID NO: 22583 - protein, 97 aa, Homo sapiens
AASGFTFSDSYMSWIRQAPGKGLEWVSYISSSGSAKYYADSVKGRFTISWDNAKKSLYLQMNSLRADDTAVYYCARAGDGYNSFDYWGQGTLVTVSS

SEQ ID NO: 22584 - protein, 97 aa, Homo sapiens
AASGFTFSGSYMSWIRQAPGKGLEWVSYISIGGSTIFYADSVKGRFIVSRDDAKNALYLQMNSLRAEDTAVYYCARAGDGYNSFDYWGQGSLVTVSS

SEQ ID NO: 22585 - protein, 97 aa, Homo sapiens
AASGFTFSYYYMTWIRQAPGKGLEWVSCLSGSGSSKFYADSVKGRFTISRDNAKNSLYLQMNSLRAEDTAIYYCARAGDGYNSFDYWGQGTLVTVSS

SEQ ID NO: 22586 - protein, 93 aa, Homo sapiens
ASGFTLSNYWMHWVRQPPGKGLVWVSRISNDENIITYADSVKGRFTISRDNAKNTVYLQMSSLRAEDTAVYYCARSSGYVDFWGQGTLVTVSS

SEQ ID NO: 22587 - protein, 94 aa, Homo sapiens
AASGFTFNTYWMHWVRQAPGKGLVWVSHINTDGGTTNYADSVKGRFTISRDNAKNTVYLQMNSLRAEDTAVYYCARSSGYVDFRGQGTLVTVSS

SEQ ID NO: 22588 - protein, 99 aa, Homo sapiens
TVSGGSISGYYWSWIRQPPGKGLEWIGYIYYTGSTNYNPSLKSRLTISVDTSKNQFSLKVSSVTAADTAVYYCARDGRGYNYGYGMDVWGQGTTVTVSS

SEQ ID NO: 22589 - protein, 99 aa, Homo sapiens
SVSGGSINGYHWSWIRQPPGKGLEWIGYIYFTGSTNYNPSLKSRVTISADTSKNQISLKLRSVTAADTAVYYCARDGRGYNYGYGMDVWGQGTTVTVSS

SEQ ID NO: 22590 - protein, 93 aa, Homo sapiens
AASGFPFSKSWMSWVRQAPGKGLEWVANINHDGSATYYVRSLEGRFFISRDNAKNSLYLQMDRLRGDDTAVYYCARGGSYGHWGQGTLVIVSS

SEQ ID NO: 22591 - protein, 93 aa, Homo sapiens
VVSGFNFSRSWMSWVRQPPGKGLEWVGNINQDGSETYYVDFLKGRFIISRDNTKNLLFLQMYRLRVEESAVYYCARGGSYGHWGQGSLVTVSS

SEQ ID NO: 22592 - protein, 93 aa, Homo sapiens
VVSGFNFSRSWMSWVRQPPGKGLEWVGNINQDGSETYYVDFLKGRFIISRDNTKNLLFLQMYRLRVEDSAVYYCARGGSYGHWGQGSLVTVSS

SEQ ID NO: 22593 - protein, 97 aa, Homo sapiens
AGSGFTFYGSAIHWVRQASGKGLEWVGRIRSKANGYATDYAASVKGRFTIYRDDSKNTAYLQMNSLKTEDTAVYYCTRPYYDNSGYWGQGTLVTVSS

SEQ ID NO: 22594 - protein, 97 aa, Homo sapiens
AASGFIFSDSAIHWVRQASGKGLEWVGRIRSKANSYATGYAASVQGRFTISRDESKNTAFLQMNSLKIEDTAVYYCTRPYYDNSGYWGQGTLVTVSS

SEQ ID NO: 22595 - protein, 96 aa, Homo sapiens
AASGFSFSGSNMHWVRQASGKGLEWLGRIKRKADNYATQYAASVERRFTISRDDSRNTAFLQMNSLQIEDTAVYYCFSRDSSGGYWGQGTLVTVSS

SEQ ID NO: 22596 - protein, 96 aa, Homo sapiens
GASGFIFSGSNMHWVRQASGKGLEWVGRITRKSNNYATEYAAWVKGRFIISRDDSKSTAYLQMNSLQTEDTAVYYCFSRDSSGGYWGQGTLVTVSS

SEQ ID NO: 22597 - protein, 96 aa, Homo sapiens
AASGFTFSGSNMHWVRQASGKGLEWVGRIKSKANNYATEYAASVKGRFTISRDDSKNTAYLQMNSLETEDTAVYYCFSRDSSGGYWGQGTLVTVSS

SEQ ID NO: 22598 - protein, 96 aa, Homo sapiens
AASGFSFSGSNMHWVRQASGKGLEWVGRIKSKAKNYATEYAASLKGRFVISRDDSKNTAYLQMNSLKTEDTAVYFCFSRDSSGGYWGQGTLVTVSS

SEQ ID NO: 22599 - protein, 96 aa, Homo sapiens
AASGLTINGHAIHWVRQAPGKGLEWVSAISLTIGRIGYADSVKGRFIISRDDAKNSVYLQMNSLRLEDTALYYCLKDIKPGGLDVWGQGTTVTVSS

SEQ ID NO: 22600 - protein, 95 aa, Homo sapiens
ASGFTFDGHAIHWVRQTPGKGLEWVSGFDWNSGRIDYGDSVKGRFTVSRNNAKNSLDLQMNSLRVDDTALYYCLKDIKPGGLDVWGQGTTVTVSS

SEQ ID NO: 22601 - protein, 90 aa, Homo sapiens
TVSGGSISSYYWSWIRQPPGKGLEWIGYIYYTGSTNYNPSLKSRVTISLDTSKNQFSLKLSSVTAADTAVYYCARLPYDWGQGTLVTVSS

SEQ ID NO: 22602 - protein, 90 aa, Homo sapiens
TVSGGSISSDYWSWIRQPPGKGLEWIGYIYYSGTTNSNPSLKSRVTISVDTSKNQFSLKLSSVTAADTAVYYCARLPYDWGQGTLVTVSS

SEQ ID NO: 22603 - protein, 101 aa, Homo sapiens
AASGFTFSHAWMNWVRQVPGKGLEWVGHIKSKADGGTTDSATPVKGRFTISRDDSKDTLSLQMNSLEIEDSAVYYCATGDYGSGSYPLQHWGQGTLVTVSS

SEQ ID NO: 22604 - protein, 101 aa, Homo sapiens
AASGFTFSGAWMNWVRQAPGKGLEWVGRIKSKTDGGAIDYAAPVKGRFTISRDDSKNTLYLQMNSLKIEDTAVYHCATGDYGSGSYPLQHWGQGTLVTVSS

SEQ ID NO: 22605 - protein, 102 aa, Homo sapiens
AASGFTFSNYGMHWVRQAPGKGLEWVALILFDGSNQYYEDSVKGRFTISRDNSKNTLYLQMDSLRPEDTSVYYCAKEMGSGWYYSYYGMDVWGPGTTVTVSS

SEQ ID NO: 22606 - protein, 102 aa, Homo sapiens
AASGFTFSNYGIHWVRQAPGKGLEWVALISFDGSKKYYADSVEGRFTISRDNSKNTVYLEMNSVRTEDTAVFYCAKEMGSGWYYSYYGMDVWGQGTTVTVSS

SEQ ID NO: 22607 - protein, 94 aa, Homo sapiens
AASGFTFTTYWMSWVRQAPGKGLEWVANIKEDGSDIYYADSVQGRFTMSRDNAKKSLYLLMNSLRAEDTAVYYCARMGWYFDLWGRGTLVTVSS

SEQ ID NO: 22608 - protein, 94 aa, Homo sapiens
AASGFTFTTYWMSWVRQAPGKGLEWVANIKEDGSDKYYADSVQGRFTVSRDNAKKSLYLLMNSLRAEDTAVYYCARMGWYFDLWGRGTLVTVSS

SEQ ID NO: 22609 - protein, 93 aa, Homo sapiens
AASGFTFSTYWMSWVRQAPGKGLEWVAKIKADGSDRYYVDSVKGRFTISRDNARNSLYLQMSSLRPEDTAVYFCARMGWYFDLWGRGTLVTVS

SEQ ID NO: 22610 - protein, 93 aa, Homo sapiens; identical to SEQ ID NO: 22609

SEQ ID NO: 22611 - protein, 93 aa, Homo sapiens
AASGFTFRTYWMSWVRQAPGTGLEWVAKIKADGSDKYYVDSVKGRFTISRDNARNSLYLQVSSLRPEDTAVYFCARMGWYFDLWGRGTLVTVS

SEQ ID NO: 22612 - protein, 94 aa, Homo sapiens
AASGFTFSTYWMSWVRQAPGKGLEWVASIKADGSDMYYADSVQGRFTMSRDNAKKSLYLLMNSLRAEDTAVYYCARMGWYFDLWGRGTLVSVSS

SEQ ID NO: 22613 - protein, 95 aa, Homo sapiens
AASGFTFSDYYMTWIRQAPGKGLEWVSYISTTSGGATGFADSVRGRFTISRDDAKNSLYLQMNNLRAEDTAVYYCARGASDSDYWGQGTLVTVSS

SEQ ID NO: 22614 - protein, 94 aa, Homo sapiens
AASGFTFSDYYMSWIRQAPGKGLEWVSYISTSDSAIYYADSVEGRFTISRDNAKNSLYLQMNSLRAEDTAVYYCARGASDSDYWGQGTLVTVSS

SEQ ID NO: 22615 - protein, 97 aa, Homo sapiens
VASGFTFTSYAMHWVRQAPGKGLEWVAVISFDGNNKYYADSVKGRFTISRDNSKNTLYLEMSSLRAEDTGLYYCARSGNYYPPLGYWGQGTLVTVSS

SEQ ID NO: 22616 - protein, 97 aa, Homo sapiens
AASGFTFSNYAFHWVRQAPGKGLEWVAVISFDGSHTYYAESVKGRFTISRDNSKNTLYVQMNSLRPEDAAVYFCARSGNYYPPLGYWGQGTLVTVSS

SEQ ID NO: 22617 - protein, 97 aa, Homo sapiens
AASGFTFSSYAMHWVRQGPGKGLEWVAVISFDGANKYYADYLKGRFTISRDNSKNTLSLQINGLRADDTAVYYCARSGNYYPPLGYWGLGTLVTVSS

SEQ ID NO: 22618 - protein, 96 aa, Homo sapiens
AASGFTFRSYWMAWVRQAPGKGLEWVANTNPDETEKDYVDSVKGRFTVSRDNAKNLVLLQMNSLRAEDTAVYYCVRDRGWSTYDYWGQGTLATVSS

SEQ ID NO: 22619 - protein, 96 aa, Homo sapiens
AASGFTFRTYWMSWVRQAPGKGLEWVANIREDGGEINYVDSVRGRFSISRDNAKNSVDLQMNSLRAEDTAVYYCVRDRGWSTYDYWGQGTLLTVSS

SEQ ID NO: 22620 - protein, 102 aa, Homo sapiens
VSGGSISRSSYHWGWIRQPPGKGLEWIGSIYYSGSTYYNPSLKSRVTISVDTSKNQFSLKLSSVTAADTAVYYCARHYCSGDTCYSNYFDYWGQGTLVTVSS

SEQ ID NO: 22621 - protein, 103 aa, Homo sapiens
TVSGGSISSRSYHWGWIRQPPGKGLEWIGSIYYSGSTYYSPSLNSRVTISVDTSKKQFSLKVRSVTAADTAVYYCARHYCSGDTCYSNYFDYWGQGTLVTVSS

SEQ ID NO: 22622 - protein, 103 aa, Homo sapiens; identical to SEQ ID NO: 22621

SEQ ID NO: 22623 - protein, 102 aa, Homo sapiens
GSGFTFSEHYMDWVRQAPGAGLEWVGRSRDNVNSYRPEYAASVKGRLTISRDDSGNSMFLQINALRAEDTAVYYCTRGGTETTGYYDPMDVWGQGTTVTVSS

SEQ ID NO: 22624 - protein, 103 aa, Homo sapiens
AASGFTFSDHYMDWVRQAPGKGLEWVGRGRNKANRYTTEYAASVKGRFTISRDDSKNSLYLQLNGLKTEDTAVYYCTRGGTETTGYYDPMDVWGQGTTVTVSS

SEQ ID NO: 22625 - protein, 103 aa, Homo sapiens
AGSGFSFSDHYMDWVRQAPGKGLEWVGRARNKANHYTPEYAASVKGRFSISRDDSKNSIFLQMNSLRVEDTAVYYCTRGGTETTGYYDPMDVWGQGTTVTVSS

SEQ ID NO: 22626 - protein, 95 aa, Homo sapiens
ACGYNFSNYFFHWVRQAPGQGLEWMGLIHPDGRTSYAQKFQDRVSMTRDTSTSTAYLELISLTSEDTAVYYCVREGDDYKYFDYWGQGTLVTVSS

SEQ ID NO: 22627 - protein, 95 aa, Homo sapiens
SGYSLMRYYMHWVRQAPGEGLEWMGLIHPSGDDTSYAQKFQGRFTVTRDTSTSTVYMELSGLTSEDTAIYHCVREGDDYKYFDYWGQGTLVTVSS

SEQ ID NO: 22628 - protein, 95 aa, Homo sapiens
AASGFPFSDVWMSWVRQAPGKGLEWVASINGDGSAQHYVDSVKGRVTISRDNAKTSVYLQMNSLRVEDTAVYYCTRGGGWDQDYWGQGTLVTVSS

SEQ ID NO: 22629 - protein, 95 aa, Homo sapiens
AASGFTFTTYWMTWIRQAPGKGLEWVAVVKRDGSDKYYVDSVKGRFTISRDNTKNSLYLQMDSLRVEDTAVYYCTRGGGWDQDYWGQGTLVTVSS

SEQ ID NO: 22630 - protein, 98 aa, Homo sapiens
AASGFTFSNAWMSWVRQAPGKGLEWVGRIKSKTDGGTTDYAAPVKGRFTISRDDSKNTLYLQMNSLKTEDTAVYYCTADIVATIVDYWGQGTLVTVSS

SEQ ID NO: 22631 - protein, 98 aa, Homo sapiens; identical to SEQ ID NO: 22630

SEQ ID NO: 22632 - protein, 99 aa, Homo sapiens
AASGFTFSTYAVHWVRQGPGKGLEWVALISYDGVNKYYADSVKGRFTLSRDNSKNTLYLQMNSLRPEDTAVYYCARSRSGSYYYGMDVWGQGTTVTVSS

SEQ ID NO: 22633 - protein, 99 aa, Homo sapiens
AASGFTFSSYAMHWVRQAPGKGLEWMALISYDGINKYYADSVKGRFTISRDNSKNMLFLQTSTLRAEDTAVYYCARSRSGSYYYGMDVWGQGTTVTVSS

SEQ ID NO: 22634 - protein, 99 aa, Homo sapiens
AASGFTFSTYAFHWVRQAPVKGLEWVALISYDGNNQYYADSVRGRFTISRDNSKNTLYLQMNSLRPEDTAVYYCARSRSGSYYYGMDVWGQGTTVTVSS

SEQ ID NO: 22635 - protein, 98 aa, Homo sapiens
AASGFTFSTYAMHWVRQAPGKGPQWVALISYDASNKFYADSVKGRITISRDNSKNTLYLQMHSLRAEDTAVYYCARSRSGSYYYGMDVWGQGITVTVS

SEQ ID NO: 22636 - protein, 95 aa, Homo sapiens
AASGFTFSTHGMTWVRQAPGKGLEWAALIIHDGSKQYYSDSVKGRFTISRDNAKNTLYLQMNSLRAEDTAVYYCARGGDNTFDYWGQGTLVTVSS

SEQ ID NO: 22637 - protein, 95 aa, Homo sapiens
AASGFTFSSYGMLWVRQAPGKGLEWVALISYDGSNKYYADSVKGRFTISRDNSKNTLYLQMNSLRAEDTAVYYCARGGDNTFDYWGQGTLLTVSS

SEQ ID NO: 22638 - protein, 96 aa, Homo sapiens
AASGFALGRNAMSWVRQVPGKGLECVAGIGNTDDDIHYLDSVNGRFTISRDPSKNMVYLHMTSLRPEDTARYYCAKDILWWSFDHWGQGVLVTVSS

SEQ ID NO: 22639 - protein, 95 aa, Homo sapiens
AASGFSFSTNAMTWVRQAPGKGLEWVSGIGGDGNTLYADSVKGRFTISRDTSKSTLYLQMNSLRADDTAVYYCAKDILWWSFDHWGQGTLVSVSS

SEQ ID NO: 22640 - protein, 95 aa, Homo sapiens
AASGFNFGPNAMAWVRQVPGKGLEWVSGIGGDGNTLYADSVRGRFTISRDTSKSTLYLQMNSLRADDTAVYYCAKDILWWSFDHWGQGTLVSVSS

SEQ ID NO: 22641 - protein, 95 aa, Homo sapiens
AASGFTFSNYDMSWIRQAPGKGLEWVSAITGDGDITFYAGSVEGRFTISRDNSRDTVYLQMSSLRAEDTAVYYCAKHQVRTHDYWGQGTLVTVSS

SEQ ID NO: 22642 - protein, 95 aa, Homo sapiens
AASGFTFSNYDMSWIRQAPGKGLEWVSAITGSGDITFYAGSVKGRFTISRDNSRNTVYLQMNSLRAEDTAVYFCAKHQVRTHDYWGQGTLVTVSS

SEQ ID NO: 22643 - protein, 95 aa, Homo sapiens
AASGFTFSNYDMSWVRQAPGKGLEWVSAITSNGGTTYYADSVKGRFTISRDNSKNTLYMQMNSLRVEDTAVYYCAKHQVRTHDYWGQGTLVTVSS

SEQ ID NO: 22644 - protein, 96 aa, Homo sapiens
AASGFSIGRNAMSWVRQVPGKGLECVAGIGNTDDDIHYADSVKGRFTISRDASENTVFLQMTSLRAEDTARYYCAKDILWWSFDYWGQGVLVTVSS

SEQ ID NO: 22645 - protein, 95 aa, Homo sapiens
AASGFTFSPNAMSWVRQTPEKGLEWVSGIGGDGRTHYTDSVKGRFLISRDNSKNTLYLQMNSLRAEDTGVYYCAKDILWWSFDYWGQGTLVTVSS

SEQ ID NO: 22646 - protein, 98 aa, Homo sapiens
AASGFTFSSYWMHWVRQAPGKGLVWVSRINSDGSSTSYAASVKGRFTISRDNAENTLYLQMNSLRAEDTAVYYCARGAVVTANWFDPWGQGTLVTVSS

SEQ ID NO: 22647 - protein, 98 aa, Homo sapiens
VASGFSFSTYWMHWVRQAPGEGLVWVSRILSDGSSTMYADSVKGRFTISRDNSKNTLYLQMHSLGAEDTAVYYCARGAVVTANWFDPWGQGTLVTVSS

SEQ ID NO: 22648 - protein, 96 aa, Homo sapiens
VASGFSIVGHAMHWVRQGPEKGLEWVSGIDWTSTHIGYADSVKGRFTVSRDNAKNSLFLQMNSLRVEDTAFYFCIKDINPGGADVWGQGTTVTVSS

SEQ ID NO: 22649 - protein, 96 aa, Homo sapiens
VTSGFTSYDYAMHWVRQAPGKGLEWVSGIYWASNRIDYADSVKGRFTISRDNARNSLYLQMNSLRGEDTALYFCIKDINPGGADVWGQGTTVIVSS

SEQ ID NO: 22650 - protein, 96 aa, Homo sapiens
AVSGFTFSTSWMDWVRQAPGKGLEWVAIIKPDGGVKNYLDSVKGRFTISRDNAKNSMYLEMNSLRAEDTAVYYCVRDPAWGAFDVWGQGTTVTVSS

SEQ ID NO: 22651 - protein, 96 aa, Homo sapiens
AASGYTFSNNWMHWVRQAPGKGLEGVAIINQDGSQTKYVDSVRGRFTISRDNAKDSLYLQMNSLRVDDTAVYFCVRDPAWGAFDVWGQGTKVSVSS

SEQ ID NO: 22652 - protein, 96 aa, Homo sapiens
AASGYTFSNHWMHWVRQAPGKGLEGVAMMNQDGSQTYYVDSVRGRFTISRDNAKDSLYLQMNSLRVDDTAVYFCVRDPAWGAFDVWGQGTQVSVSS

SEQ ID NO: 22653 - protein, 93 aa, Homo sapiens
AASGFTFSNYAMSWVRQAPGKGLEWVSAISGSGGSTYYADSVKGRFTMSRDNSKNTLFLQMSSLRAEDTAVYYCTKDVRGSYWAQGTLVTVSS

SEQ ID NO: 22654 - protein, 94 aa, Homo sapiens
AASGFTFTTYAMSWVRQAPGKGLEWVSSAIGGSGGTTYYADSVKGRFTISRDNSKNTLYLQMNSLRAEDTAIYFCTKDVRGSYWGEGTLVTVSS

SEQ ID NO: 22655 - protein, 98 aa, Homo sapiens
ISGDSVFGNNGAWNWIRQSPSRGLEWLGRTYYSSKWYYDYAESVKSRITINPDTSKNQFSLQLNSVTPEDTAVYYCARGWIRFGFDYWGQGTLVTVSS

SEQ ID NO: 22656 - protein, 98 aa, Homo sapiens
ISGDSVSSNSAAWNWIRQSPSRGLEWLGRTYYNSKWYNDYAVSVKSRITINPDTSKNQFSLQLNSVTPEDTAVYFCARGWIRFGFDYWGLGTLVTVSS

SEQ ID NO: 22657 - protein, 98 aa, Homo sapiens
ISGDSVSSNSGAWNWIRQSPSRGLEWLGRTYYNSKWYNDYAVSVKSRITINPDTSKNQFSLQLNSVTPEDTAVYFCARGWIRFGFDYWGLGTLVTVSS

SEQ ID NO: 22658 - protein, 98 aa, Homo sapiens; identical to SEQ ID NO: 22656

SEQ ID NO: 22659 - protein, 98 aa, Homo sapiens; identical to SEQ ID NO: 22656

SEQ ID NO: 22660 - protein, 96 aa, Homo sapiens
AAFGFSFSSYEMNWIRQAPGKGLEWISYTSATGSPKDYADSVKGRFTISRDNAKNSLYLQMSSLRVEDTAVYYCAREMRTSGFDYWGQGAVVTVSS

SEQ ID NO: 22661 - protein, 96 aa, Homo sapiens
AASKFTFSNVEMNWVRQAPGKGLEWVSYINTISNVMDYADSVKGRFTISRDNAKNSLYLQMHSLRAEDTAVYYCAREMRTSGFDYWGQGTLVTVSS

SEQ ID NO: 22662 - protein, 96 aa, Homo sapiens
AASKFTFSNFEMNWVRQAPGKGLEWVSYINTISNVMDYADSVKGRFTISRDNAKNSLYLQMHSLRAEDTAVYYCAREMRTSGFDYWGQGTLVTVSS

SEQ ID NO: 22663 - protein, 96 aa, Homo sapiens
AASGFTFSTYEINWVRQAPGKGLEWVSYINSDSSRIDYAAPVKGRFTLSRDNAKYSLYLQMNSLRAEDTAVYYCAREMRTSGFDYWGQGTLVTVSS

SEQ ID NO: 22664 - protein, 91 aa, Homo sapiens
SGYTFASYGISWVRQAPGQGLEWVGWVSGNNDNTNYAQKFQDRVTMTTDTSTSTAYMELRSLRSDDTAVYYCVRALPFDYWGQGTLVTVSS

SEQ ID NO: 22665 - protein, 91 aa, Homo sapiens
SGYTFTSYDISWVRQAPGQGLEWMGWISANNGNTNYAQKFQGRVTMTTDTSTSTAYMELRSLSSDDTAVYYCVRALPFDYWGQGTQVTVSS

SEQ ID NO: 22666 - protein, 96 aa, Homo sapiens
AASGFTFSTYWMSWVRQAPGKGLEWMANIRQDGSEEYYVDSVKGRFTISRDNAKNSLYLQMNSLRAEDTAMYYCARSPSSTFYSYWGQGTLVTVSS

SEQ ID NO: 22667 - protein, 96 aa, Homo sapiens
AASGFTFSTYWMSWVRQAPGKGLEWVANIRQDGSEEYYVDSVKGRFTISRDNAKNSLYLQMNSLRAEDTAMYYCARSPSSTFYSYWGQGTLVTVSS
